United States Patent Application Publication US 2021/0061914 A1 - sequence listing, part 3

SEQ ID NO: 42617 - protein, 11 aa, Homo sapiens
  Table A; Target 42617; HLA-C*05:01; MAGEB2; ENSG00000099399; CTA
AAAAAGVSSTK

SEQ ID NO: 42618 - protein, 11 aa, Homo sapiens
  Table A; Target 42618; HLA-C*06:02; MAGEB2; ENSG00000099399; CTA
AAAAAGVSSTK

SEQ ID NO: 42619 - protein, 11 aa, Homo sapiens
  Table A; Target 42619; HLA-C*07:02; MAGEB2; ENSG00000099399; CTA
AAAAAGVSSTK

SEQ ID NO: 42620 - protein, 11 aa, Homo sapiens
  Table A; Target 42620; HLA-C*07:06; MAGEB2; ENSG00000099399; CTA
AAAAAGVSSTK

SEQ ID NO: 42621 - protein, 11 aa, Homo sapiens
  Table A; Target 42621; HLA-C*12:03; MAGEB2; ENSG00000099399; CTA
AAAAAGVSSTK

SEQ ID NO: 42622 - protein, 11 aa, Homo sapiens
  Table A; Target 42622; HLA-C*16:02; MAGEB2; ENSG00000099399; CTA
AAAAAGVSSTK

SEQ ID NO: 42623 - protein, 11 aa, Homo sapiens
  Table A; Target 42623; HLA-C*16:04; MAGEB2; ENSG00000099399; CTA
AAAAAGVSSTK

SEQ ID NO: 42624 - protein, 9 aa, Homo sapiens
  Table A; Target 42624; HLA-A*32:01; MAGEB2; ENSG00000099399; CTA
AAAAGVSST

SEQ ID NO: 42625 - protein, 9 aa, Homo sapiens
  Table A; Target 42625; HLA-C*03:04; MAGEB2; ENSG00000099399; CTA
AAAAGVSST

SEQ ID NO: 42626 - protein, 9 aa, Homo sapiens
  Table A; Target 42626; HLA-C*05:01; MAGEB2; ENSG00000099399; CTA
AAAAGVSST

SEQ ID NO: 42627 - protein, 9 aa, Homo sapiens
  Table A; Target 42627; HLA-C*16:02; MAGEB2; ENSG00000099399; CTA
AAAAGVSST

SEQ ID NO: 42628 - protein, 10 aa, Homo sapiens
  Table A; Target 42628; HLA-A*03:01; MAGEB2; ENSG00000099399; CTA
AAAAGVSSTK

SEQ ID NO: 42629 - protein, 10 aa, Homo sapiens
  Table A; Target 42629; HLA-A*03:02; MAGEB2; ENSG00000099399; CTA
AAAAGVSSTK

SEQ ID NO: 42630 - protein, 10 aa, Homo sapiens
  Table A; Target 42630; HLA-A*11:01; MAGEB2; ENSG00000099399; CTA
AAAAGVSSTK

SEQ ID NO: 42631 - protein, 10 aa, Homo sapiens
  Table A; Target 42631; HLA-A*68:01; MAGEB2; ENSG00000099399; CTA
AAAAGVSSTK

SEQ ID NO: 42632 - protein, 10 aa, Homo sapiens
  Table A; Target 42632; HLA-B*27:02; MAGEB2; ENSG00000099399; CTA
AAAAGVSSTK

SEQ ID NO: 42633 - protein, 10 aa, Homo sapiens
  Table A; Target 42633; HLA-B*27:05; MAGEB2; ENSG00000099399; CTA
AAAAGVSSTK

SEQ ID NO: 42634 - protein, 10 aa, Homo sapiens
  Table A; Target 42634; HLA-C*02:02; MAGEB2; ENSG00000099399; CTA
AAAAGVSSTK

SEQ ID NO: 42635 - protein, 10 aa, Homo sapiens
  Table A; Target 42635; HLA-C*06:02; MAGEB2; ENSG00000099399; CTA
AAAAGVSSTK

SEQ ID NO: 42636 - protein, 10 aa, Homo sapiens
  Table A; Target 42636; HLA-C*07:06; MAGEB2; ENSG00000099399; CTA
AAAAGVSSTK

SEQ ID NO: 42637 - protein, 9 aa, Homo sapiens
  Table A; Target 42637; HLA-A*03:01; MAGEB2; ENSG00000099399; CTA
AAAGVSSTK

SEQ ID NO: 42638 - protein, 9 aa, Homo sapiens
  Table A; Target 42638; HLA-A*03:02; MAGEB2; ENSG00000099399; CTA
AAAGVSSTK

SEQ ID NO: 42639 - protein, 9 aa, Homo sapiens
  Table A; Target 42639; HLA-A*25:01; MAGEB2; ENSG00000099399; CTA
AAAGVSSTK

SEQ ID NO: 42640 - protein, 9 aa, Homo sapiens
  Table A; Target 42640; HLA-A*31:01; MAGEB2; ENSG00000099399; CTA
AAAGVSSTK

SEQ ID NO: 42641 - protein, 9 aa, Homo sapiens
  Table A; Target 42641; HLA-A*32:01; MAGEB2; ENSG00000099399; CTA
AAAGVSSTK

SEQ ID NO: 42642 - protein, 9 aa, Homo sapiens
  Table A; Target 42642; HLA-A*33:03; MAGEB2; ENSG00000099399; CTA
AAAGVSSTK

SEQ ID NO: 42643 - protein, 9 aa, Homo sapiens
  Table A; Target 42643; HLA-A*68:01; MAGEB2; ENSG00000099399; CTA
AAAGVSSTK

SEQ ID NO: 42644 - protein, 9 aa, Homo sapiens
  Table A; Target 42644; HLA-B*13:02; MAGEB2; ENSG00000099399; CTA
AAAGVSSTK

SEQ ID NO: 42645 - protein, 9 aa, Homo sapiens
  Table A; Target 42645; HLA-B*15:01; MAGEB2; ENSG00000099399; CTA
AAAGVSSTK

SEQ ID NO: 42646 - protein, 9 aa, Homo sapiens
  Table A; Target 42646; HLA-B*27:02; MAGEB2; ENSG00000099399; CTA
AAAGVSSTK

SEQ ID NO: 42647 - protein, 9 aa, Homo sapiens
  Table A; Target 42647; HLA-B*27:05; MAGEB2; ENSG00000099399; CTA
AAAGVSSTK

SEQ ID NO: 42648 - protein, 9 aa, Homo sapiens
  Table A; Target 42648; HLA-B*39:01; MAGEB2; ENSG00000099399; CTA
AAAGVSSTK

SEQ ID NO: 42649 - protein, 9 aa, Homo sapiens
  Table A; Target 42649; HLA-B*46:01; MAGEB2; ENSG00000099399; CTA
AAAGVSSTK

SEQ ID NO: 42650 - protein, 9 aa, Homo sapiens
  Table A; Target 42650; HLA-B*51:01; MAGEB2; ENSG00000099399; CTA
AAAGVSSTK

SEQ ID NO: 42651 - protein, 9 aa, Homo sapiens
  Table A; Target 42651; HLA-B*56:01; MAGEB2; ENSG00000099399; CTA
AAAGVSSTK

SEQ ID NO: 42652 - protein, 9 aa, Homo sapiens
  Table A; Target 42652; HLA-B*57:01; MAGEB2; ENSG00000099399; CTA
AAAGVSSTK

SEQ ID NO: 42653 - protein, 9 aa, Homo sapiens
  Table A; Target 42653; HLA-B*58:01; MAGEB2; ENSG00000099399; CTA
AAAGVSSTK

SEQ ID NO: 42654 - protein, 9 aa, Homo sapiens
  Table A; Target 42654; HLA-C*02:02; MAGEB2; ENSG00000099399; CTA
AAAGVSSTK

SEQ ID NO: 42655 - protein, 9 aa, Homo sapiens
  Table A; Target 42655; HLA-C*03:03; MAGEB2; ENSG00000099399; CTA
AAAGVSSTK

SEQ ID NO: 42656 - protein, 9 aa, Homo sapiens
  Table A; Target 42656; HLA-C*03:04; MAGEB2; ENSG00000099399; CTA
AAAGVSSTK

SEQ ID NO: 42657 - protein, 9 aa, Homo sapiens
  Table A; Target 42657; HLA-C*04:01; MAGEB2; ENSG00000099399; CTA
AAAGVSSTK

SEQ ID NO: 42658 - protein, 9 aa, Homo sapiens
  Table A; Target 42658; HLA-C*05:01; MAGEB2; ENSG00000099399; CTA
AAAGVSSTK

SEQ ID NO: 42659 - protein, 9 aa, Homo sapiens
  Table A; Target 42659; HLA-C*06:02; MAGEB2; ENSG00000099399; CTA
AAAGVSSTK

SEQ ID NO: 42660 - protein, 9 aa, Homo sapiens
  Table A; Target 42660; HLA-C*07:04; MAGEB2; ENSG00000099399; CTA
AAAGVSSTK

SEQ ID NO: 42661 - protein, 9 aa, Homo sapiens
  Table A; Target 42661; HLA-C*07:06; MAGEB2; ENSG00000099399; CTA
AAAGVSSTK

SEQ ID NO: 42662 - protein, 9 aa, Homo sapiens
  Table A; Target 42662; HLA-C*12:03; MAGEB2; ENSG00000099399; CTA
AAAGVSSTK

SEQ ID NO: 42663 - protein, 9 aa, Homo sapiens
  Table A; Target 42663; HLA-C*16:01; MAGEB2; ENSG00000099399; CTA
AAAGVSSTK

SEQ ID NO: 42664 - protein, 9 aa, Homo sapiens
  Table A; Target 42664; HLA-C*16:02; MAGEB2; ENSG00000099399; CTA
AAAGVSSTK

SEQ ID NO: 42665 - protein, 9 aa, Homo sapiens
  Table A; Target 42665; HLA-C*16:04; MAGEB2; ENSG00000099399; CTA
AAAGVSSTK

SEQ ID NO: 42666 - protein, 10 aa, Homo sapiens
  Table A; Target 42666; HLA-C*06:02; MAGEB2; ENSG00000099399; CTA
AAAGVSSTKS

SEQ ID NO: 42667 - protein, 11 aa, Homo sapiens
  Table A; Target 42667; HLA-A*03:01; MAGEB2; ENSG00000099399; CTA
AAAGVSSTKSK

SEQ ID NO: 42668 - protein, 11 aa, Homo sapiens
  Table A; Target 42668; HLA-A*03:02; MAGEB2; ENSG00000099399; CTA
AAAGVSSTKSK

SEQ ID NO: 42669 - protein, 11 aa, Homo sapiens
  Table A; Target 42669; HLA-A*11:01; MAGEB2; ENSG00000099399; CTA
AAAGVSSTKSK

SEQ ID NO: 42670 - protein, 11 aa, Homo sapiens
  Table A; Target 42670; HLA-A*31:01; MAGEB2; ENSG00000099399; CTA
AAAGVSSTKSK

SEQ ID NO: 42671 - protein, 11 aa, Homo sapiens
  Table A; Target 42671; HLA-A*68:01; MAGEB2; ENSG00000099399; CTA
AAAGVSSTKSK

SEQ ID NO: 42672 - protein, 11 aa, Homo sapiens
  Table A; Target 42672; HLA-B*27:05; MAGEB2; ENSG00000099399; CTA
AAAGVSSTKSK

SEQ ID NO: 42673 - protein, 11 aa, Homo sapiens
  Table A; Target 42673; HLA-C*04:01; MAGEB2; ENSG00000099399; CTA
AAAGVSSTKSK

SEQ ID NO: 42674 - protein, 11 aa, Homo sapiens
  Table A; Target 42674; HLA-C*06:02; MAGEB2; ENSG00000099399; CTA
AAAGVSSTKSK

SEQ ID NO: 42675 - protein, 11 aa, Homo sapiens
  Table A; Target 42675; HLA-C*07:06; MAGEB2; ENSG00000099399; CTA
AAAGVSSTKSK

SEQ ID NO: 42676 - protein, 11 aa, Homo sapiens
  Table A; Target 42676; HLA-C*12:03; MAGEB2; ENSG00000099399; CTA
AAAGVSSTKSK

SEQ ID NO: 42677 - protein, 11 aa, Homo sapiens
  Table A; Target 42677; HLA-C*16:01; MAGEB2; ENSG00000099399; CTA
AAAGVSSTKSK

SEQ ID NO: 42678 - protein, 11 aa, Homo sapiens
  Table A; Target 42678; HLA-C*16:02; MAGEB2; ENSG00000099399; CTA
AAAGVSSTKSK

SEQ ID NO: 42679 - protein, 8 aa, Homo sapiens
  Table A; Target 42679; HLA-A*03:02; MAGEB2; ENSG00000099399; CTA
AAGVSSTK

SEQ ID NO: 42680 - protein, 8 aa, Homo sapiens
  Table A; Target 42680; HLA-A*11:01; MAGEB2; ENSG00000099399; CTA
AAGVSSTK

SEQ ID NO: 42681 - protein, 8 aa, Homo sapiens
  Table A; Target 42681; HLA-B*27:02; MAGEB2; ENSG00000099399; CTA
AAGVSSTK

SEQ ID NO: 42682 - protein, 8 aa, Homo sapiens
  Table A; Target 42682; HLA-C*04:01; MAGEB2; ENSG00000099399; CTA
AAGVSSTK

SEQ ID NO: 42683 - protein, 8 aa, Homo sapiens
  Table A; Target 42683; HLA-C*05:01; MAGEB2; ENSG00000099399; CTA
AAGVSSTK

SEQ ID NO: 42684 - protein, 8 aa, Homo sapiens
  Table A; Target 42684; HLA-C*06:02; MAGEB2; ENSG00000099399; CTA
AAGVSSTK

SEQ ID NO: 42685 - protein, 8 aa, Homo sapiens
  Table A; Target 42685; HLA-C*07:01; MAGEB2; ENSG00000099399; CTA
AAGVSSTK

SEQ ID NO: 42686 - protein, 8 aa, Homo sapiens
  Table A; Target 42686; HLA-C*07:06; MAGEB2; ENSG00000099399; CTA
AAGVSSTK

SEQ ID NO: 42687 - protein, 8 aa, Homo sapiens
  Table A; Target 42687; HLA-C*12:03; MAGEB2; ENSG00000099399; CTA
AAGVSSTK

SEQ ID NO: 42688 - protein, 10 aa, Homo sapiens
  Table A; Target 42688; HLA-C*04:01; MAGEB2; ENSG00000099399; CTA
AAGVSSTKSK

SEQ ID NO: 42689 - protein, 10 aa, Homo sapiens
  Table A; Target 42689; HLA-C*07:01; MAGEB2; ENSG00000099399; CTA
AAGVSSTKSK

SEQ ID NO: 42690 - protein, 10 aa, Homo sapiens
  Table A; Target 42690; HLA-C*07:02; MAGEB2; ENSG00000099399; CTA
AAGVSSTKSK

SEQ ID NO: 42691 - protein, 8 aa, Homo sapiens
  Table A; Target 42691; HLA-B*56:01; MAGEB2; ENSG00000099399; CTA
AASSSPAA

SEQ ID NO: 42692 - protein, 9 aa, Homo sapiens
  Table A; Target 42692; HLA-A*30:01; MAGEB2; ENSG00000099399; CTA
AEEEEAPCC

SEQ ID NO: 42693 - protein, 9 aa, Homo sapiens
  Table A; Target 42693; HLA-B*49:01; MAGEB2; ENSG00000099399; CTA
AEEEEAPCC

SEQ ID NO: 42694 - protein, 8 aa, Homo sapiens
  Table A; Target 42694; HLA-B*44:03; MAGEB2; ENSG00000099399; CTA
AETSKMKV

SEQ ID NO: 42695 - protein, 9 aa, Homo sapiens
  Table A; Target 42695; HLA-C*16:01; MAGEB2; ENSG00000099399; CTA
AETSKMKVL

SEQ ID NO: 42696 - protein, 9 aa, Homo sapiens
  Table A; Target 42696; HLA-C*16:02; MAGEB2; ENSG00000099399; CTA
AETSKMKVL

SEQ ID NO: 42697 - protein, 10 aa, Homo sapiens
  Table A; Target 42697; HLA-C*01:02; MAGEB2; ENSG00000099399; CTA
AFPTHYEEAL

SEQ ID NO: 42698 - protein, 9 aa, Homo sapiens
  Table A; Target 42698; HLA-A*31:01; MAGEB2; ENSG00000099399; CTA
AGIPQEPQR

SEQ ID NO: 42699 - protein, 9 aa, Homo sapiens
  Table A; Target 42699; HLA-A*11:01; MAGEB2; ENSG00000099399; CTA
AGVSSTKSK

SEQ ID NO: 42700 - protein, 9 aa, Homo sapiens
  Table A; Target 42700; HLA-C*01:02; MAGEB2; ENSG00000099399; CTA
AGVSSTKSK

SEQ ID NO: 42701 - protein, 9 aa, Homo sapiens
  Table A; Target 42701; HLA-C*04:01; MAGEB2; ENSG00000099399; CTA
AGVSSTKSK

SEQ ID NO: 42702 - protein, 9 aa, Homo sapiens
  Table A; Target 42702; HLA-C*06:02; MAGEB2; ENSG00000099399; CTA
AGVSSTKSK

SEQ ID NO: 42703 - protein, 9 aa, Homo sapiens
  Table A; Target 42703; HLA-C*16:02; MAGEB2; ENSG00000099399; CTA
AGVSSTKSK

SEQ ID NO: 42704 - protein, 9 aa, Homo sapiens
  Table A; Target 42704; HLA-B*15:03; MAGEB2; ENSG00000099399; CTA
AKVNGTTPC

SEQ ID NO: 42705 - protein, 11 aa, Homo sapiens
  Table A; Target 42705; HLA-B*15:03; MAGEB2; ENSG00000099399; CTA
AKVNGTTPCAF

SEQ ID NO: 42706 - protein, 10 aa, Homo sapiens
  Table A; Target 42706; HLA-A*02:01; MAGEB2; ENSG00000099399; CTA
ALKDEEKAGV

SEQ ID NO: 42707 - protein, 10 aa, Homo sapiens
  Table A; Target 42707; HLA-A*02:03; MAGEB2; ENSG00000099399; CTA
ALKDEEKAGV

SEQ ID NO: 42708 - protein, 10 aa, Homo sapiens
  Table A; Target 42708; HLA-B*55:01; MAGEB2; ENSG00000099399; CTA
ALKDEEKAGV

SEQ ID NO: 42709 - protein, 8 aa, Homo sapiens
  Table A; Target 42709; HLA-B*55:01; MAGEB2; ENSG00000099399; CTA
APTTAAAA

SEQ ID NO: 42710 - protein, 8 aa, Homo sapiens
  Table A; Target 42710; HLA-B*56:01; MAGEB2; ENSG00000099399; CTA
APTTAAAA

SEQ ID NO: 42711 - protein, 9 aa, Homo sapiens
  Table A; Target 42711; HLA-B*07:02; MAGEB2; ENSG00000099399; CTA
APTTAAAAA

SEQ ID NO: 42712 - protein, 9 aa, Homo sapiens
  Table A; Target 42712; HLA-B*35:03; MAGEB2; ENSG00000099399; CTA
APTTAAAAA

SEQ ID NO: 42713 - protein, 9 aa, Homo sapiens
  Table A; Target 42713; HLA-B*54:01; MAGEB2; ENSG00000099399; CTA
APTTAAAAA

SEQ ID NO: 42714 - protein, 9 aa, Homo sapiens
  Table A; Target 42714; HLA-B*55:01; MAGEB2; ENSG00000099399; CTA
APTTAAAAA

SEQ ID NO: 42715 - protein, 9 aa, Homo sapiens
  Table A; Target 42715; HLA-B*56:01; MAGEB2; ENSG00000099399; CTA
APTTAAAAA

SEQ ID NO: 42716 - protein, 9 aa, Homo sapiens
  Table A; Target 42716; HLA-C*07:02; MAGEB2; ENSG00000099399; CTA
APTTAAAAA

SEQ ID NO: 42717 - protein, 9 aa, Homo sapiens
  Table A; Target 42717; HLA-C*14:02; MAGEB2; ENSG00000099399; CTA
APTTAAAAA

SEQ ID NO: 42718 - protein, 10 aa, Homo sapiens
  Table A; Target 42718; HLA-B*54:01; MAGEB2; ENSG00000099399; CTA
APTTAAAAAA

SEQ ID NO: 42719 - protein, 10 aa, Homo sapiens
  Table A; Target 42719; HLA-B*56:01; MAGEB2; ENSG00000099399; CTA
APTTAAAAAA

SEQ ID NO: 42720 - protein, 11 aa, Homo sapiens
  Table A; Target 42720; HLA-B*56:01; MAGEB2; ENSG00000099399; CTA
APTTAAAAAAG

SEQ ID NO: 42721 - protein, 9 aa, Homo sapiens
  Table A; Target 42721; HLA-A*01:01; MAGEB2; ENSG00000099399; CTA
ASEGLSVVF

SEQ ID NO: 42722 - protein, 9 aa, Homo sapiens
  Table A; Target 42722; HLA-B*15:01; MAGEB2; ENSG00000099399; CTA
ASEGLSVVF

SEQ ID NO: 42723 - protein, 9 aa, Homo sapiens
  Table A; Target 42723; HLA-B*15:03; MAGEB2; ENSG00000099399; CTA
ASEGLSVVF

SEQ ID NO: 42724 - protein, 9 aa, Homo sapiens
  Table A; Target 42724; HLA-B*38:01; MAGEB2; ENSG00000099399; CTA
ASEGLSVVF

SEQ ID NO: 42725 - protein, 9 aa, Homo sapiens
  Table A; Target 42725; HLA-B*57:01; MAGEB2; ENSG00000099399; CTA
ASEGLSVVF

SEQ ID NO: 42726 - protein, 9 aa, Homo sapiens
  Table A; Target 42726; HLA-B*58:01; MAGEB2; ENSG00000099399; CTA
ASEGLSVVF

SEQ ID NO: 42727 - protein, 9 aa, Homo sapiens
  Table A; Target 42727; HLA-C*02:02; MAGEB2; ENSG00000099399; CTA
ASEGLSVVF

SEQ ID NO: 42728 - protein, 9 aa, Homo sapiens
  Table A; Target 42728; HLA-C*04:01; MAGEB2; ENSG00000099399; CTA
ASEGLSVVF

SEQ ID NO: 42729 - protein, 9 aa, Homo sapiens
  Table A; Target 42729; HLA-C*05:01; MAGEB2; ENSG00000099399; CTA
ASEGLSVVF

SEQ ID NO: 42730 - protein, 9 aa, Homo sapiens
  Table A; Target 42730; HLA-C*07:04; MAGEB2; ENSG00000099399; CTA
ASEGLSVVF

SEQ ID NO: 42731 - protein, 9 aa, Homo sapiens
  Table A; Target 42731; HLA-C*12:03; MAGEB2; ENSG00000099399; CTA
ASEGLSVVF

SEQ ID NO: 42732 - protein, 9 aa, Homo sapiens
  Table A; Target 42732; HLA-C*16:04; MAGEB2; ENSG00000099399; CTA
ASEGLSVVF

SEQ ID NO: 42733 - protein, 9 aa, Homo sapiens
  Table A; Target 42733; HLA-B*13:02; MAGEB2; ENSG00000099399; CTA
ASSSPAAGI

SEQ ID NO: 42734 - protein, 11 aa, Homo sapiens
  Table A; Target 42734; HLA-A*03:01; MAGEB2; ENSG00000099399; CTA
ASSSQASTSTK

SEQ ID NO: 42735 - protein, 11 aa, Homo sapiens
  Table A; Target 42735; HLA-A*03:02; MAGEB2; ENSG00000099399; CTA
ASSSQASTSTK

SEQ ID NO: 42736 - protein, 11 aa, Homo sapiens
  Table A; Target 42736; HLA-A*11:01; MAGEB2; ENSG00000099399; CTA
ASSSQASTSTK

SEQ ID NO: 42737 - protein, 11 aa, Homo sapiens
  Table A; Target 42737; HLA-C*04:01; MAGEB2; ENSG00000099399; CTA
ASSSQASTSTK

SEQ ID NO: 42738 - protein, 9 aa, Homo sapiens
  Table A; Target 42738; HLA-C*05:01; MAGEB2; ENSG00000099399; CTA
ATEEEIWEF

SEQ ID NO: 42739 - protein, 8 aa, Homo sapiens
  Table A; Target 42739; HLA-A*23:01; MAGEB2; ENSG00000099399; CTA
AYAETSKM

SEQ ID NO: 42740 - protein, 8 aa, Homo sapiens
  Table A; Target 42740; HLA-A*24:02; MAGEB2; ENSG00000099399; CTA
AYAETSKM

SEQ ID NO: 42741 - protein, 8 aa, Homo sapiens
  Table A; Target 42741; HLA-B*46:01; MAGEB2; ENSG00000099399; CTA
AYAETSKM

SEQ ID NO: 42742 - protein, 8 aa, Homo sapiens
  Table A; Target 42742; HLA-C*01:02; MAGEB2; ENSG00000099399; CTA
AYAETSKM

SEQ ID NO: 42743 - protein, 8 aa, Homo sapiens
  Table A; Target 42743; HLA-C*04:01; MAGEB2; ENSG00000099399; CTA
AYAETSKM

SEQ ID NO: 42744 - protein, 8 aa, Homo sapiens
  Table A; Target 42744; HLA-C*14:02; MAGEB2; ENSG00000099399; CTA
AYAETSKM

SEQ ID NO: 42745 - protein, 8 aa, Homo sapiens
  Table A; Target 42745; HLA-C*16:01; MAGEB2; ENSG00000099399; CTA
AYAETSKM

SEQ ID NO: 42746 - protein, 8 aa, Homo sapiens
  Table A; Target 42746; HLA-C*16:02; MAGEB2; ENSG00000099399; CTA
AYAETSKM

SEQ ID NO: 42747 - protein, 9 aa, Homo sapiens
  Table A; Target 42747; HLA-A*33:03; MAGEB2; ENSG00000099399; CTA
AYAETSKMK

SEQ ID NO: 42748 - protein, 9 aa, Homo sapiens
  Table A; Target 42748; HLA-C*16:02; MAGEB2; ENSG00000099399; CTA
AYAETSKMK

SEQ ID NO: 42749 - protein, 10 aa, Homo sapiens
  Table A; Target 42749; HLA-C*16:02; MAGEB2; ENSG00000099399; CTA
AYAETSKMKV

SEQ ID NO: 42750 - protein, 11 aa, Homo sapiens
  Table A; Target 42750; HLA-A*24:02; MAGEB2; ENSG00000099399; CTA
AYAETSKMKVL

SEQ ID NO: 42751 - protein, 9 aa, Homo sapiens
  Table A; Target 42751; HLA-A*25:01; MAGEB2; ENSG00000099399; CTA
DEESLLSSW

SEQ ID NO: 42752 - protein, 9 aa, Homo sapiens
  Table A; Target 42752; HLA-B*18:01; MAGEB2; ENSG00000099399; CTA
DEESLLSSW

SEQ ID NO: 42753 - protein, 9 aa, Homo sapiens
  Table A; Target 42753; HLA-B*44:02; MAGEB2; ENSG00000099399; CTA
DEESLLSSW

SEQ ID NO: 42754 - protein, 9 aa, Homo sapiens
  Table A; Target 42754; HLA-B*44:03; MAGEB2; ENSG00000099399; CTA
DEESLLSSW

SEQ ID NO: 42755 - protein, 9 aa, Homo sapiens
  Table A; Target 42755; HLA-C*16:04; MAGEB2; ENSG00000099399; CTA
DEESLLSSW

SEQ ID NO: 42756 - protein, 8 aa, Homo sapiens
  Table A; Target 42756; HLA-B*18:01; MAGEB2; ENSG00000099399; CTA
DETRGLNV

SEQ ID NO: 42757 - protein, 8 aa, Homo sapiens
  Table A; Target 42757; HLA-B*49:01; MAGEB2; ENSG00000099399; CTA
DETRGLNV

SEQ ID NO: 42758 - protein, 8 aa, Homo sapiens
  Table A; Target 42758; HLA-B*51:01; MAGEB2; ENSG00000099399; CTA
DETRGLNV

SEQ ID NO: 42759 - protein, 11 aa, Homo sapiens
  Table A; Target 42759; HLA-B*38:01; MAGEB2; ENSG00000099399; CTA
DKVDLTDEESL

SEQ ID NO: 42760 - protein, 10 aa, Homo sapiens
  Table A; Target 42760; HLA-B*18:01; MAGEB2; ENSG00000099399; CTA
DLVQEKYLEY

SEQ ID NO: 42761 - protein, 10 aa, Homo sapiens
  Table A; Target 42761; HLA-B*08:01; MAGEB2; ENSG00000099399; CTA
DPLTRKSGSL

SEQ ID NO: 42762 - protein, 8 aa, Homo sapiens
  Table A; Target 42762; HLA-B*51:01; MAGEB2; ENSG00000099399; CTA
DPPRFQFL

SEQ ID NO: 42763 - protein, 9 aa, Homo sapiens
  Table A; Target 42763; HLA-B*51:01; MAGEB2; ENSG00000099399; CTA
EAPCCSSSV

SEQ ID NO: 42764 - protein, 10 aa, Homo sapiens
  Table A; Target 42764; HLA-B*18:01; MAGEB2; ENSG00000099399; CTA
EEHSVFGEPW

SEQ ID NO: 42765 - protein, 10 aa, Homo sapiens
  Table A; Target 42765; HLA-B*44:02; MAGEB2; ENSG00000099399; CTA
EEHSVFGEPW

SEQ ID NO: 42766 - protein, 10 aa, Homo sapiens
  Table A; Target 42766; HLA-B*44:03; MAGEB2; ENSG00000099399; CTA
EEHSVFGEPW

SEQ ID NO: 42767 - protein, 10 aa, Homo sapiens
  Table A; Target 42767; HLA-C*16:04; MAGEB2; ENSG00000099399; CTA
EEHSVFGEPW

SEQ ID NO: 42768 - protein, 8 aa, Homo sapiens
  Table A; Target 42768; HLA-B*18:01; MAGEB2; ENSG00000099399; CTA
EESLLSSW

SEQ ID NO: 42769 - protein, 8 aa, Homo sapiens
  Table A; Target 42769; HLA-B*44:02; MAGEB2; ENSG00000099399; CTA
EESLLSSW

SEQ ID NO: 42770 - protein, 8 aa, Homo sapiens
  Table A; Target 42770; HLA-B*44:03; MAGEB2; ENSG00000099399; CTA
EESLLSSW

SEQ ID NO: 42771 - protein, 10 aa, Homo sapiens
  Table A; Target 42771; HLA-B*44:02; MAGEB2; ENSG00000099399; CTA
EESLLSSWDF

SEQ ID NO: 42772 - protein, 9 aa, Homo sapiens
  Table A; Target 42772; HLA-A*29:02; MAGEB2; ENSG00000099399; CTA
EFLNMLGVY

SEQ ID NO: 42773 - protein, 9 aa, Homo sapiens
  Table A; Target 42773; HLA-A*33:03; MAGEB2; ENSG00000099399; CTA
EGLSVVFGL

SEQ ID NO: 42774 - protein, 9 aa, Homo sapiens
  Table A; Target 42774; HLA-A*33:03; MAGEB2; ENSG00000099399; CTA
EHFPEILKK

SEQ ID NO: 42775 - protein, 9 aa, Homo sapiens
  Table A; Target 42775; HLA-A*68:02; MAGEB2; ENSG00000099399; CTA
EHFPEILKK

SEQ ID NO: 42776 - protein, 9 aa, Homo sapiens
  Table A; Target 42776; HLA-B*38:01; MAGEB2; ENSG00000099399; CTA
EHFPEILKK

SEQ ID NO: 42777 - protein, 10 aa, Homo sapiens
  Table A; Target 42777; HLA-A*68:02; MAGEB2; ENSG00000099399; CTA
EHFPEILKKA

SEQ ID NO: 42778 - protein, 9 aa, Homo sapiens
  Table A; Target 42778; HLA-B*38:01; MAGEB2; ENSG00000099399; CTA
EHSVFGEPW

SEQ ID NO: 42779 - protein, 9 aa, Homo sapiens
  Table A; Target 42779; HLA-A*02:04; MAGEB2; ENSG00000099399; CTA
EIWEFLNML

SEQ ID NO: 42780 - protein, 8 aa, Homo sapiens
  Table A; Target 42780; HLA-A*33:01; MAGEB2; ENSG00000099399; CTA
EMLKIVGK

SEQ ID NO: 42781 - protein, 8 aa, Homo sapiens
  Table A; Target 42781; HLA-A*33:03; MAGEB2; ENSG00000099399; CTA
EMLKIVGK

SEQ ID NO: 42782 - protein, 9 aa, Homo sapiens
  Table A; Target 42782; HLA-A*33:01; MAGEB2; ENSG00000099399; CTA
EMLKIVGKR

SEQ ID NO: 42783 - protein, 9 aa, Homo sapiens
  Table A; Target 42783; HLA-A*33:03; MAGEB2; ENSG00000099399; CTA
EMLKIVGKR

SEQ ID NO: 42784 - protein, 9 aa, Homo sapiens
  Table A; Target 42784; HLA-B*54:01; MAGEB2; ENSG00000099399; CTA
EPQRAPTTA

SEQ ID NO: 42785 - protein, 9 aa, Homo sapiens
  Table A; Target 42785; HLA-B*56:01; MAGEB2; ENSG00000099399; CTA
EPQRAPTTA

SEQ ID NO: 42786 - protein, 10 aa, Homo sapiens
  Table A; Target 42786; HLA-B*07:02; MAGEB2; ENSG00000099399; CTA
EPQRAPTTAA

SEQ ID NO: 42787 - protein, 10 aa, Homo sapiens
  Table A; Target 42787; HLA-B*54:01; MAGEB2; ENSG00000099399; CTA
EPQRAPTTAA

SEQ ID NO: 42788 - protein, 10 aa, Homo sapiens
  Table A; Target 42788; HLA-B*55:01; MAGEB2; ENSG00000099399; CTA
EPQRAPTTAA

SEQ ID NO: 42789 - protein, 10 aa, Homo sapiens
  Table A; Target 42789; HLA-B*56:01; MAGEB2; ENSG00000099399; CTA
EPQRAPTTAA

SEQ ID NO: 42790 - protein, 11 aa, Homo sapiens
  Table A; Target 42790; HLA-B*56:01; MAGEB2; ENSG00000099399; CTA
EPQRAPTTAAA

SEQ ID NO: 42791 - protein, 11 aa, Homo sapiens
  Table A; Target 42791; HLA-A*33:01; MAGEB2; ENSG00000099399; CTA
ESLLSSWDFPR

SEQ ID NO: 42792 - protein, 10 aa, Homo sapiens
  Table A; Target 42792; HLA-A*26:01; MAGEB2; ENSG00000099399; CTA
ETRGLNVPQV

SEQ ID NO: 42793 - protein, 8 aa, Homo sapiens
  Table A; Target 42793; HLA-B*51:01; MAGEB2; ENSG00000099399; CTA
FGLELNKV

SEQ ID NO: 42794 - protein, 8 aa, Homo sapiens
  Table A; Target 42794; HLA-B*54:01; MAGEB2; ENSG00000099399; CTA
FPEILKKA

SEQ ID NO: 42795 - protein, 8 aa, Homo sapiens
  Table A; Target 42795; HLA-B*54:01; MAGEB2; ENSG00000099399; CTA
FPTHYEEA

SEQ ID NO: 42796 - protein, 8 aa, Homo sapiens
  Table A; Target 42796; HLA-B*56:01; MAGEB2; ENSG00000099399; CTA
FPTHYEEA

SEQ ID NO: 42797 - protein, 9 aa, Homo sapiens
  Table A; Target 42797; HLA-B*07:02; MAGEB2; ENSG00000099399; CTA
FPTHYEEAL

SEQ ID NO: 42798 - protein, 9 aa, Homo sapiens
  Table A; Target 42798; HLA-B*38:01; MAGEB2; ENSG00000099399; CTA
FPTHYEEAL

SEQ ID NO: 42799 - protein, 9 aa, Homo sapiens
  Table A; Target 42799; HLA-B*39:01; MAGEB2; ENSG00000099399; CTA
FPTHYEEAL

SEQ ID NO: 42800 - protein, 9 aa, Homo sapiens
  Table A; Target 42800; HLA-B*51:01; MAGEB2; ENSG00000099399; CTA
FPTHYEEAL

SEQ ID NO: 42801 - protein, 9 aa, Homo sapiens
  Table A; Target 42801; HLA-B*54:01; MAGEB2; ENSG00000099399; CTA
FPTHYEEAL

SEQ ID NO: 42802 - protein, 9 aa, Homo sapiens
  Table A; Target 42802; HLA-B*55:01; MAGEB2; ENSG00000099399; CTA
FPTHYEEAL

SEQ ID NO: 42803 - protein, 9 aa, Homo sapiens
  Table A; Target 42803; HLA-B*56:01; MAGEB2; ENSG00000099399; CTA
FPTHYEEAL

SEQ ID NO: 42804 - protein, 9 aa, Homo sapiens
  Table A; Target 42804; HLA-C*03:03; MAGEB2; ENSG00000099399; CTA
FPTHYEEAL

SEQ ID NO: 42805 - protein, 9 aa, Homo sapiens
  Table A; Target 42805; HLA-C*03:04; MAGEB2; ENSG00000099399; CTA
FPTHYEEAL

SEQ ID NO: 42806 - protein, 9 aa, Homo sapiens
  Table A; Target 42806; HLA-C*07:02; MAGEB2; ENSG00000099399; CTA
FPTHYEEAL

SEQ ID NO: 42807 - protein, 9 aa, Homo sapiens
  Table A; Target 42807; HLA-C*16:01; MAGEB2; ENSG00000099399; CTA
FPTHYEEAL

SEQ ID NO: 42808 - protein, 9 aa, Homo sapiens
  Table A; Target 42808; HLA-A*02:04; MAGEB2; ENSG00000099399; CTA
FQFLWGPRA

SEQ ID NO: 42809 - protein, 9 aa, Homo sapiens
  Table A; Target 42809; HLA-B*27:05; MAGEB2; ENSG00000099399; CTA
GAASSSPAA

SEQ ID NO: 42810 - protein, 9 aa, Homo sapiens
  Table A; Target 42810; HLA-B*39:01; MAGEB2; ENSG00000099399; CTA
GAASSSPAA

SEQ ID NO: 42811 - protein, 9 aa, Homo sapiens
  Table A; Target 42811; HLA-B*46:01; MAGEB2; ENSG00000099399; CTA
GAASSSPAA

SEQ ID NO: 42812 - protein, 9 aa, Homo sapiens
  Table A; Target 42812; HLA-B*54:01; MAGEB2; ENSG00000099399; CTA
GAASSSPAA

SEQ ID NO: 42813 - protein, 9 aa, Homo sapiens
  Table A; Target 42813; HLA-B*55:01; MAGEB2; ENSG00000099399; CTA
GAASSSPAA

SEQ ID NO: 42814 - protein, 9 aa, Homo sapiens
  Table A; Target 42814; HLA-B*56:01; MAGEB2; ENSG00000099399; CTA
GAASSSPAA

SEQ ID NO: 42815 - protein, 9 aa, Homo sapiens
  Table A; Target 42815; HLA-C*03:03; MAGEB2; ENSG00000099399; CTA
GAASSSPAA

SEQ ID NO: 42816 - protein, 9 aa, Homo sapiens
  Table A; Target 42816; HLA-C*03:04; MAGEB2; ENSG00000099399; CTA
GAASSSPAA

SEQ ID NO: 42817 - protein, 11 aa, Homo sapiens
  Table A; Target 42817; HLA-B*44:02; MAGEB2; ENSG00000099399; CTA
GEEHSVFGEPW

SEQ ID NO: 42818 - protein, 11 aa, Homo sapiens
  Table A; Target 42818; HLA-B*44:03; MAGEB2; ENSG00000099399; CTA
GEEHSVFGEPW

SEQ ID NO: 42819 - protein, 10 aa, Homo sapiens
  Table A; Target 42819; HLA-A*30:01; MAGEB2; ENSG00000099399; CTA
GEKNASSSQA

SEQ ID NO: 42820 - protein, 10 aa, Homo sapiens
  Table A; Target 42820; HLA-B*40:02; MAGEB2; ENSG00000099399; CTA
GEKNASSSQA

SEQ ID NO: 42821 - protein, 10 aa, Homo sapiens
  Table A; Target 42821; HLA-B*49:01; MAGEB2; ENSG00000099399; CTA
GEKNASSSQA

SEQ ID NO: 42822 - protein, 9 aa, Homo sapiens
  Table A; Target 42822; HLA-B*37:01; MAGEB2; ENSG00000099399; CTA
GEMLKIVGK

SEQ ID NO: 42823 - protein, 9 aa, Homo sapiens
  Table A; Target 42823; HLA-B*44:02; MAGEB2; ENSG00000099399; CTA
GEMLKIVGK

SEQ ID NO: 42824 - protein, 11 aa, Homo sapiens
  Table A; Target 42824; HLA-B*44:02; MAGEB2; ENSG00000099399; CTA
GEMLKIVGKRF

SEQ ID NO: 42825 - protein, 11 aa, Homo sapiens
  Table A; Target 42825; HLA-B*44:03; MAGEB2; ENSG00000099399; CTA
GEMLKIVGKRF

SEQ ID NO: 42826 - protein, 10 aa, Homo sapiens
  Table A; Target 42826; HLA-A*02:03; MAGEB2; ENSG00000099399; CTA
GLNVPQVTEA

SEQ ID NO: 42827 - protein, 8 aa, Homo sapiens
  Table A; Target 42827; HLA-A*02:04; MAGEB2; ENSG00000099399; CTA
GLSVVFGL

SEQ ID NO: 42828 - protein, 8 aa, Homo sapiens
  Table A; Target 42828; HLA-B*37:01; MAGEB2; ENSG00000099399; CTA
GLSVVFGL

SEQ ID NO: 42829 - protein, 10 aa, Homo sapiens
  Table A; Target 42829; HLA-A*02:01; MAGEB2; ENSG00000099399; CTA
GLSVVFGLEL

SEQ ID NO: 42830 - protein, 10 aa, Homo sapiens
  Table A; Target 42830; HLA-A*02:03; MAGEB2; ENSG00000099399; CTA
GLSVVFGLEL

SEQ ID NO: 42831 - protein, 10 aa, Homo sapiens
  Table A; Target 42831; HLA-A*02:04; MAGEB2; ENSG00000099399; CTA
GLSVVFGLEL

SEQ ID NO: 42832 - protein, 10 aa, Homo sapiens
  Table A; Target 42832; HLA-B*07:02; MAGEB2; ENSG00000099399; CTA
GPRAYAETSK

SEQ ID NO: 42833 - protein, 11 aa, Homo sapiens
  Table A; Target 42833; HLA-B*07:02; MAGEB2; ENSG00000099399; CTA
GPRAYAETSKM

SEQ ID NO: 42834 - protein, 11 aa, Homo sapiens
  Table A; Target 42834; HLA-C*07:02; MAGEB2; ENSG00000099399; CTA
GPRAYAETSKM

SEQ ID NO: 42835 - protein, 9 aa, Homo sapiens
  Table A; Target 42835; HLA-A*01:01; MAGEB2; ENSG00000099399; CTA
GSLVQFLLY

SEQ ID NO: 42836 - protein, 9 aa, Homo sapiens
  Table A; Target 42836; HLA-A*03:01; MAGEB2; ENSG00000099399; CTA
GSLVQFLLY

SEQ ID NO: 42837 - protein, 9 aa, Homo sapiens
  Table A; Target 42837; HLA-A*11:01; MAGEB2; ENSG00000099399; CTA
GSLVQFLLY

SEQ ID NO: 42838 - protein, 9 aa, Homo sapiens
  Table A; Target 42838; HLA-A*29:02; MAGEB2; ENSG00000099399; CTA
GSLVQFLLY

SEQ ID NO: 42839 - protein, 9 aa, Homo sapiens
  Table A; Target 42839; HLA-A*30:02; MAGEB2; ENSG00000099399; CTA
GSLVQFLLY

SEQ ID NO: 42840 - protein, 9 aa, Homo sapiens
  Table A; Target 42840; HLA-B*57:01; MAGEB2; ENSG00000099399; CTA
GSLVQFLLY

SEQ ID NO: 42841 - protein, 9 aa, Homo sapiens
  Table A; Target 42841; HLA-B*58:01; MAGEB2; ENSG00000099399; CTA
GSLVQFLLY

SEQ ID NO: 42842 - protein, 10 aa, Homo sapiens
  Table A; Target 42842; HLA-A*03:01; MAGEB2; ENSG00000099399; CTA
GSLVQFLLYK

SEQ ID NO: 42843 - protein, 10 aa, Homo sapiens
  Table A; Target 42843; HLA-A*11:01; MAGEB2; ENSG00000099399; CTA
GSLVQFLLYK

SEQ ID NO: 42844 - protein, 11 aa, Homo sapiens
  Table A; Target 42844; HLA-A*29:02; MAGEB2; ENSG00000099399; CTA
GSLVQFLLYKY

SEQ ID NO: 42845 - protein, 10 aa, Homo sapiens
  Table A; Target 42845; HLA-B*56:01; MAGEB2; ENSG00000099399; CTA
GVIFLNGNSA

SEQ ID NO: 42846 - protein, 8 aa, Homo sapiens
  Table A; Target 42846; HLA-A*03:02; MAGEB2; ENSG00000099399; CTA
GVSSTKSK

SEQ ID NO: 42847 - protein, 9 aa, Homo sapiens
  Table A; Target 42847; HLA-A*03:01; MAGEB2; ENSG00000099399; CTA
GVSSTKSKK

SEQ ID NO: 42848 - protein, 9 aa, Homo sapiens
  Table A; Target 42848; HLA-A*03:02; MAGEB2; ENSG00000099399; CTA
GVSSTKSKK

SEQ ID NO: 42849 - protein, 9 aa, Homo sapiens
  Table A; Target 42849; HLA-A*11:01; MAGEB2; ENSG00000099399; CTA
GVSSTKSKK

SEQ ID NO: 42850 - protein, 10 aa, Homo sapiens
  Table A; Target 42850; HLA-A*02:03; MAGEB2; ENSG00000099399; CTA
GVYDGEEHSV

SEQ ID NO: 42851 - protein, 10 aa, Homo sapiens
  Table A; Target 42851; HLA-A*02:04; MAGEB2; ENSG00000099399; CTA
GVYDGEEHSV

SEQ ID NO: 42852 - protein, 10 aa, Homo sapiens
  Table A; Target 42852; HLA-A*02:07; MAGEB2; ENSG00000099399; CTA
GVYDGEEHSV

SEQ ID NO: 42853 - protein, 10 aa, Homo sapiens
  Table A; Target 42853; HLA-A*03:01; MAGEB2; ENSG00000099399; CTA
GVYDGEEHSV

SEQ ID NO: 42854 - protein, 10 aa, Homo sapiens
  Table A; Target 42854; HLA-A*03:02; MAGEB2; ENSG00000099399; CTA
GVYDGEEHSV

SEQ ID NO: 42855 - protein, 10 aa, Homo sapiens
  Table A; Target 42855; HLA-A*11:01; MAGEB2; ENSG00000099399; CTA
GVYDGEEHSV

SEQ ID NO: 42856 - protein, 10 aa, Homo sapiens
  Table A; Target 42856; HLA-A*23:01; MAGEB2; ENSG00000099399; CTA
GVYDGEEHSV

SEQ ID NO: 42857 - protein, 10 aa, Homo sapiens
  Table A; Target 42857; HLA-A*25:01; MAGEB2; ENSG00000099399; CTA
GVYDGEEHSV

SEQ ID NO: 42858 - protein, 10 aa, Homo sapiens
  Table A; Target 42858; HLA-A*26:01; MAGEB2; ENSG00000099399; CTA
GVYDGEEHSV

SEQ ID NO: 42859 - protein, 10 aa, Homo sapiens
  Table A; Target 42859; HLA-A*29:02; MAGEB2; ENSG00000099399; CTA
GVYDGEEHSV

SEQ ID NO: 42860 - protein, 10 aa, Homo sapiens
  Table A; Target 42860; HLA-A*30:01; MAGEB2; ENSG00000099399; CTA
GVYDGEEHSV

SEQ ID NO: 42861 - protein, 10 aa, Homo sapiens
  Table A; Target 42861; HLA-A*32:01; MAGEB2; ENSG00000099399; CTA
GVYDGEEHSV

SEQ ID NO: 42862 - protein, 10 aa, Homo sapiens
  Table A; Target 42862; HLA-A*68:02; MAGEB2; ENSG00000099399; CTA
GVYDGEEHSV

SEQ ID NO: 42863 - protein, 10 aa, Homo sapiens
  Table A; Target 42863; HLA-B*13:02; MAGEB2; ENSG00000099399; CTA
GVYDGEEHSV

SEQ ID NO: 42864 - protein, 10 aa, Homo sapiens
  Table A; Target 42864; HLA-B*15:01; MAGEB2; ENSG00000099399; CTA
GVYDGEEHSV

SEQ ID NO: 42865 - protein, 10 aa, Homo sapiens
  Table A; Target 42865; HLA-B*15:03; MAGEB2; ENSG00000099399; CTA
GVYDGEEHSV

SEQ ID NO: 42866 - protein, 10 aa, Homo sapiens
  Table A; Target 42866; HLA-B*27:05; MAGEB2; ENSG00000099399; CTA
GVYDGEEHSV

SEQ ID NO: 42867 - protein, 10 aa, Homo sapiens
  Table A; Target 42867; HLA-B*38:01; MAGEB2; ENSG00000099399; CTA
GVYDGEEHSV

SEQ ID NO: 42868 - protein, 10 aa, Homo sapiens
  Table A; Target 42868; HLA-B*39:01; MAGEB2; ENSG00000099399; CTA
GVYDGEEHSV

SEQ ID NO: 42869 - protein, 10 aa, Homo sapiens
  Table A; Target 42869; HLA-B*40:01; MAGEB2; ENSG00000099399; CTA
GVYDGEEHSV

SEQ ID NO: 42870 - protein, 10 aa, Homo sapiens
  Table A; Target 42870; HLA-B*40:02; MAGEB2; ENSG00000099399; CTA
GVYDGEEHSV

SEQ ID NO: 42871 - protein, 10 aa, Homo sapiens
  Table A; Target 42871; HLA-B*46:01; MAGEB2; ENSG00000099399; CTA
GVYDGEEHSV

SEQ ID NO: 42872 - protein, 10 aa, Homo sapiens
  Table A; Target 42872; HLA-B*49:01; MAGEB2; ENSG00000099399; CTA
GVYDGEEHSV

SEQ ID NO: 42873 - protein, 10 aa, Homo sapiens
  Table A; Target 42873; HLA-B*56:01; MAGEB2; ENSG00000099399; CTA
GVYDGEEHSV

SEQ ID NO: 42874 - protein, 10 aa, Homo sapiens
  Table A; Target 42874; HLA-B*58:01; MAGEB2; ENSG00000099399; CTA
GVYDGEEHSV

SEQ ID NO: 42875 - protein, 10 aa, Homo sapiens
  Table A; Target 42875; HLA-C*01:02; MAGEB2; ENSG00000099399; CTA
GVYDGEEHSV

SEQ ID NO: 42876 - protein, 10 aa, Homo sapiens
  Table A; Target 42876; HLA-C*02:02; MAGEB2; ENSG00000099399; CTA
GVYDGEEHSV

SEQ ID NO: 42877 - protein, 10 aa, Homo sapiens
  Table A; Target 42877; HLA-C*03:03; MAGEB2; ENSG00000099399; CTA
GVYDGEEHSV

SEQ ID NO: 42878 - protein, 10 aa, Homo sapiens
  Table A; Target 42878; HLA-C*03:04; MAGEB2; ENSG00000099399; CTA
GVYDGEEHSV

SEQ ID NO: 42879 - protein, 10 aa, Homo sapiens
  Table A; Target 42879; HLA-C*05:01; MAGEB2; ENSG00000099399; CTA
GVYDGEEHSV

SEQ ID NO: 42880 - protein, 10 aa, Homo sapiens
  Table A; Target 42880; HLA-C*06:02; MAGEB2; ENSG00000099399; CTA
GVYDGEEHSV

SEQ ID NO: 42881 - protein, 10 aa, Homo sapiens
  Table A; Target 42881; HLA-C*07:04; MAGEB2; ENSG00000099399; CTA
GVYDGEEHSV

SEQ ID NO: 42882 - protein, 10 aa, Homo sapiens
  Table A; Target 42882; HLA-C*12:03; MAGEB2; ENSG00000099399; CTA
GVYDGEEHSV

SEQ ID NO: 42883 - protein, 10 aa, Homo sapiens
  Table A; Target 42883; HLA-C*16:02; MAGEB2; ENSG00000099399; CTA
GVYDGEEHSV

SEQ ID NO: 42884 - protein, 10 aa, Homo sapiens
  Table A; Target 42884; HLA-C*16:04; MAGEB2; ENSG00000099399; CTA
GVYDGEEHSV

SEQ ID NO: 42885 - protein, 11 aa, Homo sapiens
  Table A; Target 42885; HLA-A*02:07; MAGEB2; ENSG00000099399; CTA
GVYDGEEHSVF

SEQ ID NO: 42886 - protein, 11 aa, Homo sapiens
  Table A; Target 42886; HLA-A*03:01; MAGEB2; ENSG00000099399; CTA
GVYDGEEHSVF

SEQ ID NO: 42887 - protein, 11 aa, Homo sapiens
  Table A; Target 42887; HLA-A*03:02; MAGEB2; ENSG00000099399; CTA
GVYDGEEHSVF

SEQ ID NO: 42888 - protein, 11 aa, Homo sapiens
  Table A; Target 42888; HLA-A*11:01; MAGEB2; ENSG00000099399; CTA
GVYDGEEHSVF

SEQ ID NO: 42889 - protein, 11 aa, Homo sapiens
  Table A; Target 42889; HLA-A*25:01; MAGEB2; ENSG00000099399; CTA
GVYDGEEHSVF

SEQ ID NO: 42890 - protein, 11 aa, Homo sapiens
  Table A; Target 42890; HLA-A*26:01; MAGEB2; ENSG00000099399; CTA
GVYDGEEHSVF

SEQ ID NO: 42891 - protein, 11 aa, Homo sapiens
  Table A; Target 42891; HLA-A*29:02; MAGEB2; ENSG00000099399; CTA
GVYDGEEHSVF

SEQ ID NO: 42892 - protein, 11 aa, Homo sapiens
  Table A; Target 42892; HLA-A*30:02; MAGEB2; ENSG00000099399; CTA
GVYDGEEHSVF

SEQ ID NO: 42893 - protein, 11 aa, Homo sapiens
  Table A; Target 42893; HLA-A*31:01; MAGEB2; ENSG00000099399; CTA
GVYDGEEHSVF

SEQ ID NO: 42894 - protein, 11 aa, Homo sapiens
  Table A; Target 42894; HLA-A*32:01; MAGEB2; ENSG00000099399; CTA
GVYDGEEHSVF

SEQ ID NO: 42895 - protein, 11 aa, Homo sapiens
  Table A; Target 42895; HLA-A*68:02; MAGEB2; ENSG00000099399; CTA
GVYDGEEHSVF

SEQ ID NO: 42896 - protein, 11 aa, Homo sapiens
  Table A; Target 42896; HLA-B*15:03; MAGEB2; ENSG00000099399; CTA
GVYDGEEHSVF

SEQ ID NO: 42897 - protein, 11 aa, Homo sapiens
  Table A; Target 42897; HLA-B*27:02; MAGEB2; ENSG00000099399; CTA
GVYDGEEHSVF

SEQ ID NO: 42898 - protein, 11 aa, Homo sapiens
  Table A; Target 42898; HLA-B*27:05; MAGEB2; ENSG00000099399; CTA
GVYDGEEHSVF

SEQ ID NO: 42899 - protein, 11 aa, Homo sapiens
  Table A; Target 42899; HLA-B*35:01; MAGEB2; ENSG00000099399; CTA
GVYDGEEHSVF

SEQ ID NO: 42900 - protein, 11 aa, Homo sapiens
  Table A; Target 42900; HLA-B*38:01; MAGEB2; ENSG00000099399; CTA
GVYDGEEHSVF

SEQ ID NO: 42901 - protein, 11 aa, Homo sapiens
  Table A; Target 42901; HLA-B*46:01; MAGEB2; ENSG00000099399; CTA
GVYDGEEHSVF

SEQ ID NO: 42902 - protein, 11 aa, Homo sapiens
  Table A; Target 42902; HLA-B*55:01; MAGEB2; ENSG00000099399; CTA
GVYDGEEHSVF

SEQ ID NO: 42903 - protein, 11 aa, Homo sapiens
  Table A; Target 42903; HLA-B*57:01; MAGEB2; ENSG00000099399; CTA
GVYDGEEHSVF

SEQ ID NO: 42904 - protein, 11 aa, Homo sapiens
  Table A; Target 42904; HLA-B*58:01; MAGEB2; ENSG00000099399; CTA
GVYDGEEHSVF

SEQ ID NO: 42905 - protein, 11 aa, Homo sapiens
  Table A; Target 42905; HLA-C*02:02; MAGEB2; ENSG00000099399; CTA
GVYDGEEHSVF

SEQ ID NO: 42906 - protein, 11 aa, Homo sapiens
  Table A; Target 42906; HLA-C*05:01; MAGEB2; ENSG00000099399; CTA
GVYDGEEHSVF

SEQ ID NO: 42907 - protein, 11 aa, Homo sapiens
  Table A; Target 42907; HLA-C*07:04; MAGEB2; ENSG00000099399; CTA
GVYDGEEHSVF

SEQ ID NO: 42908 - protein, 11 aa, Homo sapiens
  Table A; Target 42908; HLA-C*07:06; MAGEB2; ENSG00000099399; CTA
GVYDGEEHSVF

SEQ ID NO: 42909 - protein, 11 aa, Homo sapiens
  Table A; Target 42909; HLA-C*12:03; MAGEB2; ENSG00000099399; CTA
GVYDGEEHSVF

SEQ ID NO: 42910 - protein, 11 aa, Homo sapiens
  Table A; Target 42910; HLA-C*16:04; MAGEB2; ENSG00000099399; CTA
GVYDGEEHSVF

SEQ ID NO: 42911 - protein, 8 aa, Homo sapiens
  Table A; Target 42911; HLA-A*03:01; MAGEB2; ENSG00000099399; CTA
HTYTFIDK

SEQ ID NO: 42912 - protein, 9 aa, Homo sapiens
  Table A; Target 42912; HLA-A*02:03; MAGEB2; ENSG00000099399; CTA
HTYTFIDKV

SEQ ID NO: 42913 - protein, 9 aa, Homo sapiens
  Table A; Target 42913; HLA-A*02:04; MAGEB2; ENSG00000099399; CTA
HTYTFIDKV

SEQ ID NO: 42914 - protein, 8 aa, Homo sapiens
  Table A; Target 42914; HLA-C*14:02; MAGEB2; ENSG00000099399; CTA
IFLNGNSA

SEQ ID NO: 42915 - protein, 9 aa, Homo sapiens
  Table A; Target 42915; HLA-C*14:02; MAGEB2; ENSG00000099399; CTA
IFLNGNSAT

SEQ ID NO: 42916 - protein, 9 aa, Homo sapiens
  Table A; Target 42916; HLA-A*02:03; MAGEB2; ENSG00000099399; CTA
ILKKASEGL

SEQ ID NO: 42917 - protein, 9 aa, Homo sapiens
  Table A; Target 42917; HLA-B*08:01; MAGEB2; ENSG00000099399; CTA
ILKKASEGL

SEQ ID NO: 42918 - protein, 8 aa, Homo sapiens
  Table A; Target 42918; HLA-B*56:01; MAGEB2; ENSG00000099399; CTA
IPQEPQRA

SEQ ID NO: 42919 - protein, 9 aa, Homo sapiens
  Table A; Target 42919; HLA-B*07:02; MAGEB2; ENSG00000099399; CTA
IPQEPQRAP

SEQ ID NO: 42920 - protein, 9 aa, Homo sapiens
  Table A; Target 42920; HLA-B*54:01; MAGEB2; ENSG00000099399; CTA
IPQEPQRAP

SEQ ID NO: 42921 - protein, 9 aa, Homo sapiens
  Table A; Target 42921; HLA-B*55:01; MAGEB2; ENSG00000099399; CTA
IPQEPQRAP

SEQ ID NO: 42922 - protein, 9 aa, Homo sapiens
  Table A; Target 42922; HLA-B*56:01; MAGEB2; ENSG00000099399; CTA
IPQEPQRAP

SEQ ID NO: 42923 - protein, 9 aa, Homo sapiens
  Table A; Target 42923; HLA-C*07:02; MAGEB2; ENSG00000099399; CTA
IPQEPQRAP

SEQ ID NO: 42924 - protein, 10 aa, Homo sapiens
  Table A; Target 42924; HLA-B*54:01; MAGEB2; ENSG00000099399; CTA
IPQEPQRAPT

SEQ ID NO: 42925 - protein, 10 aa, Homo sapiens
  Table A; Target 42925; HLA-B*56:01; MAGEB2; ENSG00000099399; CTA
IPQEPQRAPT

SEQ ID NO: 42926 - protein, 10 aa, Homo sapiens
  Table A; Target 42926; HLA-C*16:02; MAGEB2; ENSG00000099399; CTA
IPQEPQRAPT

SEQ ID NO: 42927 - protein, 9 aa, Homo sapiens
  Table A; Target 42927; HLA-A*03:01; MAGEB2; ENSG00000099399; CTA
ITKDLVQEK

SEQ ID NO: 42928 - protein, 9 aa, Homo sapiens
  Table A; Target 42928; HLA-A*03:02; MAGEB2; ENSG00000099399; CTA
ITKDLVQEK

SEQ ID NO: 42929 - protein, 9 aa, Homo sapiens
  Table A; Target 42929; HLA-A*11:01; MAGEB2; ENSG00000099399; CTA
ITKDLVQEK

SEQ ID NO: 42930 - protein, 9 aa, Homo sapiens
  Table A; Target 42930; HLA-A*26:01; MAGEB2; ENSG00000099399; CTA
ITKDLVQEK

SEQ ID NO: 42931 - protein, 9 aa, Homo sapiens
  Table A; Target 42931; HLA-A*29:02; MAGEB2; ENSG00000099399; CTA
ITKDLVQEK

SEQ ID NO: 42932 - protein, 9 aa, Homo sapiens
  Table A; Target 42932; HLA-A*30:02; MAGEB2; ENSG00000099399; CTA
ITKDLVQEK

SEQ ID NO: 42933 - protein, 9 aa, Homo sapiens
  Table A; Target 42933; HLA-A*31:01; MAGEB2; ENSG00000099399; CTA
ITKDLVQEK

SEQ ID NO: 42934 - protein, 9 aa, Homo sapiens
  Table A; Target 42934; HLA-A*33:01; MAGEB2; ENSG00000099399; CTA
ITKDLVQEK

SEQ ID NO: 42935 - protein, 9 aa, Homo sapiens
  Table A; Target 42935; HLA-A*33:03; MAGEB2; ENSG00000099399; CTA
ITKDLVQEK

SEQ ID NO: 42936 - protein, 9 aa, Homo sapiens
  Table A; Target 42936; HLA-A*68:01; MAGEB2; ENSG00000099399; CTA
ITKDLVQEK

SEQ ID NO: 42937 - protein, 9 aa, Homo sapiens
  Table A; Target 42937; HLA-B*27:02; MAGEB2; ENSG00000099399; CTA
ITKDLVQEK

SEQ ID NO: 42938 - protein, 9 aa, Homo sapiens
  Table A; Target 42938; HLA-B*40:02; MAGEB2; ENSG00000099399; CTA
ITKDLVQEK

SEQ ID NO: 42939 - protein, 9 aa, Homo sapiens
  Table A; Target 42939; HLA-B*46:01; MAGEB2; ENSG00000099399; CTA
ITKDLVQEK

SEQ ID NO: 42940 - protein, 9 aa, Homo sapiens
  Table A; Target 42940; HLA-B*57:01; MAGEB2; ENSG00000099399; CTA
ITKDLVQEK

SEQ ID NO: 42941 - protein, 9 aa, Homo sapiens
  Table A; Target 42941; HLA-C*02:02; MAGEB2; ENSG00000099399; CTA
ITKDLVQEK

SEQ ID NO: 42942 - protein, 9 aa, Homo sapiens
  Table A; Target 42942; HLA-C*06:02; MAGEB2; ENSG00000099399; CTA
ITKDLVQEK

SEQ ID NO: 42943 - protein, 9 aa, Homo sapiens
  Table A; Target 42943; HLA-C*07:06; MAGEB2; ENSG00000099399; CTA
ITKDLVQEK

SEQ ID NO: 42944 - protein, 9 aa, Homo sapiens
  Table A; Target 42944; HLA-C*12:03; MAGEB2; ENSG00000099399; CTA
ITKDLVQEK

SEQ ID NO: 42945 - protein, 9 aa, Homo sapiens
  Table A; Target 42945; HLA-C*16:01; MAGEB2; ENSG00000099399; CTA
ITKDLVQEK

SEQ ID NO: 42946 - protein, 9 aa, Homo sapiens
  Table A; Target 42946; HLA-C*16:02; MAGEB2; ENSG00000099399; CTA
ITKDLVQEK

SEQ ID NO: 42947 - protein, 10 aa, Homo sapiens
  Table A; Target 42947; HLA-A*01:01; MAGEB2; ENSG00000099399; CTA
ITKDLVQEKY

SEQ ID NO: 42948 - protein, 10 aa, Homo sapiens
  Table A; Target 42948; HLA-A*25:01; MAGEB2; ENSG00000099399; CTA
ITKDLVQEKY

SEQ ID NO: 42949 - protein, 10 aa, Homo sapiens
  Table A; Target 42949; HLA-A*26:01; MAGEB2; ENSG00000099399; CTA
ITKDLVQEKY

SEQ ID NO: 42950 - protein, 10 aa, Homo sapiens
  Table A; Target 42950; HLA-A*29:02; MAGEB2; ENSG00000099399; CTA
ITKDLVQEKY

SEQ ID NO: 42951 - protein, 10 aa, Homo sapiens
  Table A; Target 42951; HLA-A*30:02; MAGEB2; ENSG00000099399; CTA
ITKDLVQEKY

SEQ ID NO: 42952 - protein, 10 aa, Homo sapiens
  Table A; Target 42952; HLA-A*32:01; MAGEB2; ENSG00000099399; CTA
ITKDLVQEKY

SEQ ID NO: 42953 - protein, 10 aa, Homo sapiens
  Table A; Target 42953; HLA-B*15:01; MAGEB2; ENSG00000099399; CTA
ITKDLVQEKY

SEQ ID NO: 42954 - protein, 10 aa, Homo sapiens
  Table A; Target 42954; HLA-B*46:01; MAGEB2; ENSG00000099399; CTA
ITKDLVQEKY

SEQ ID NO: 42955 - protein, 10 aa, Homo sapiens
  Table A; Target 42955; HLA-B*57:01; MAGEB2; ENSG00000099399; CTA
ITKDLVQEKY

SEQ ID NO: 42956 - protein, 10 aa, Homo sapiens
  Table A; Target 42956; HLA-B*58:01; MAGEB2; ENSG00000099399; CTA
ITKDLVQEKY

SEQ ID NO: 42957 - protein, 9 aa, Homo sapiens
  Table A; Target 42957; HLA-B*07:02; MAGEB2; ENSG00000099399; CTA
KARDETRGL

SEQ ID NO: 42958 - protein, 9 aa, Homo sapiens
  Table A; Target 42958; HLA-C*06:02; MAGEB2; ENSG00000099399; CTA
KARDETRGL

SEQ ID NO: 42959 - protein, 9 aa, Homo sapiens
  Table A; Target 42959; HLA-C*16:02; MAGEB2; ENSG00000099399; CTA
KARDETRGL

SEQ ID NO: 42960 - protein, 8 aa, Homo sapiens
  Table A; Target 42960; HLA-C*03:04; MAGEB2; ENSG00000099399; CTA
KASEGLSV

SEQ ID NO: 42961 - protein, 8 aa, Homo sapiens
  Table A; Target 42961; HLA-C*05:01; MAGEB2; ENSG00000099399; CTA
KASEGLSV

SEQ ID NO: 42962 - protein, 8 aa, Homo sapiens
  Table A; Target 42962; HLA-C*16:01; MAGEB2; ENSG00000099399; CTA
KASEGLSV

SEQ ID NO: 42963 - protein, 8 aa, Homo sapiens
  Table A; Target 42963; HLA-C*16:02; MAGEB2; ENSG00000099399; CTA
KASEGLSV

SEQ ID NO: 42964 - protein, 9 aa, Homo sapiens
  Table A; Target 42964; HLA-A*02:03; MAGEB2; ENSG00000099399; CTA
KASEGLSVV

SEQ ID NO: 42965 - protein, 9 aa, Homo sapiens
  Table A; Target 42965; HLA-A*32:01; MAGEB2; ENSG00000099399; CTA
KASEGLSVV

SEQ ID NO: 42966 - protein, 9 aa, Homo sapiens
  Table A; Target 42966; HLA-B*46:01; MAGEB2; ENSG00000099399; CTA
KASEGLSVV

SEQ ID NO: 42967 - protein, 9 aa, Homo sapiens
  Table A; Target 42967; HLA-B*49:01; MAGEB2; ENSG00000099399; CTA
KASEGLSVV

SEQ ID NO: 42968 - protein, 9 aa, Homo sapiens
  Table A; Target 42968; HLA-B*55:01; MAGEB2; ENSG00000099399; CTA
KASEGLSVV

SEQ ID NO: 42969 - protein, 9 aa, Homo sapiens
  Table A; Target 42969; HLA-C*02:02; MAGEB2; ENSG00000099399; CTA
KASEGLSVV

SEQ ID NO: 42970 - protein, 9 aa, Homo sapiens
  Table A; Target 42970; HLA-C*03:04; MAGEB2; ENSG00000099399; CTA
KASEGLSVV

SEQ ID NO: 42971 - protein, 9 aa, Homo sapiens
  Table A; Target 42971; HLA-C*05:01; MAGEB2; ENSG00000099399; CTA
KASEGLSVV

SEQ ID NO: 42972 - protein, 9 aa, Homo sapiens
  Table A; Target 42972; HLA-C*12:03; MAGEB2; ENSG00000099399; CTA
KASEGLSVV

SEQ ID NO: 42973 - protein, 9 aa, Homo sapiens
  Table A; Target 42973; HLA-C*16:02; MAGEB2; ENSG00000099399; CTA
KASEGLSVV

SEQ ID NO: 42974 - protein, 9 aa, Homo sapiens
  Table A; Target 42974; HLA-C*16:04; MAGEB2; ENSG00000099399; CTA
KASEGLSVV

SEQ ID NO: 42975 - protein, 10 aa, Homo sapiens
  Table A; Target 42975; HLA-A*23:01; MAGEB2; ENSG00000099399; CTA
KASEGLSVVF

SEQ ID NO: 42976 - protein, 10 aa, Homo sapiens
  Table A; Target 42976; HLA-A*30:02; MAGEB2; ENSG00000099399; CTA
KASEGLSVVF

SEQ ID NO: 42977 - protein, 10 aa, Homo sapiens
  Table A; Target 42977; HLA-A*32:01; MAGEB2; ENSG00000099399; CTA
KASEGLSVVF

SEQ ID NO: 42978 - protein, 10 aa, Homo sapiens
  Table A; Target 42978; HLA-B*15:01; MAGEB2; ENSG00000099399; CTA
KASEGLSVVF

SEQ ID NO: 42979 - protein, 10 aa, Homo sapiens
  Table A; Target 42979; HLA-B*15:03; MAGEB2; ENSG00000099399; CTA
KASEGLSVVF

SEQ ID NO: 42980 - protein, 10 aa, Homo sapiens
  Table A; Target 42980; HLA-B*27:02; MAGEB2; ENSG00000099399; CTA
KASEGLSVVF

SEQ ID NO: 42981 - protein, 10 aa, Homo sapiens
  Table A; Target 42981; HLA-B*27:05; MAGEB2; ENSG00000099399; CTA
KASEGLSVVF

SEQ ID NO: 42982 - protein, 10 aa, Homo sapiens
  Table A; Target 42982; HLA-B*35:01; MAGEB2; ENSG00000099399; CTA
KASEGLSVVF

SEQ ID NO: 42983 - protein, 10 aa, Homo sapiens
  Table A; Target 42983; HLA-B*40:01; MAGEB2; ENSG00000099399; CTA
KASEGLSVVF

SEQ ID NO: 42984 - protein, 10 aa, Homo sapiens
  Table A; Target 42984; HLA-B*55:01; MAGEB2; ENSG00000099399; CTA
KASEGLSVVF

SEQ ID NO: 42985 - protein, 10 aa, Homo sapiens
  Table A; Target 42985; HLA-B*57:01; MAGEB2; ENSG00000099399; CTA
KASEGLSVVF

SEQ ID NO: 42986 - protein, 10 aa, Homo sapiens
  Table A; Target 42986; HLA-B*58:01; MAGEB2; ENSG00000099399; CTA
KASEGLSVVF

SEQ ID NO: 42987 - protein, 10 aa, Homo sapiens
  Table A; Target 42987; HLA-C*02:02; MAGEB2; ENSG00000099399; CTA
KASEGLSVVF

SEQ ID NO: 42988 - protein, 10 aa, Homo sapiens
  Table A; Target 42988; HLA-C*05:01; MAGEB2; ENSG00000099399; CTA
KASEGLSVVF

SEQ ID NO: 42989 - protein, 10 aa, Homo sapiens
  Table A; Target 42989; HLA-C*07:06; MAGEB2; ENSG00000099399; CTA
KASEGLSVVF

SEQ ID NO: 42990 - protein, 10 aa, Homo sapiens
  Table A; Target 42990; HLA-C*12:03; MAGEB2; ENSG00000099399; CTA
KASEGLSVVF

SEQ ID NO: 42991 - protein, 10 aa, Homo sapiens
  Table A; Target 42991; HLA-C*16:01; MAGEB2; ENSG00000099399; CTA
KASEGLSVVF

SEQ ID NO: 42992 - protein, 10 aa, Homo sapiens
  Table A; Target 42992; HLA-C*16:02; MAGEB2; ENSG00000099399; CTA
KASEGLSVVF

SEQ ID NO: 42993 - protein, 10 aa, Homo sapiens
  Table A; Target 42993; HLA-C*16:04; MAGEB2; ENSG00000099399; CTA
KASEGLSVVF

SEQ ID NO: 42994 - protein, 8 aa, Homo sapiens
  Table A; Target 42994; HLA-B*37:01; MAGEB2; ENSG00000099399; CTA
KDEEKAGV

SEQ ID NO: 42995 - protein, 8 aa, Homo sapiens
  Table A; Target 42995; HLA-C*16:02; MAGEB2; ENSG00000099399; CTA
KDEEKAGV

SEQ ID NO: 42996 - protein, 8 aa, Homo sapiens
  Table A; Target 42996; HLA-B*37:01; MAGEB2; ENSG00000099399; CTA
KDLVQEKY

SEQ ID NO: 42997 - protein, 8 aa, Homo sapiens
  Table A; Target 42997; HLA-C*07:01; MAGEB2; ENSG00000099399; CTA
KDLVQEKY

SEQ ID NO: 42998 - protein, 8 aa, Homo sapiens
  Table A; Target 42998; HLA-C*04:01; MAGEB2; ENSG00000099399; CTA
KIKKSVTK

SEQ ID NO: 42999 - protein, 9 aa, Homo sapiens
  Table A; Target 42999; HLA-B*15:03; MAGEB2; ENSG00000099399; CTA
KKASEGLSV

SEQ ID NO: 43000 - protein, 11 aa, Homo sapiens
  Table A; Target 43000; HLA-B*15:03; MAGEB2; ENSG00000099399; CTA
KKASEGLSVVF

SEQ ID NO: 43001 - protein, 11 aa, Homo sapiens
  Table A; Target 43001; HLA-A*03:01; MAGEB2; ENSG00000099399; CTA
KLITKDLVQEK

SEQ ID NO: 43002 - protein, 11 aa, Homo sapiens
  Table A; Target 43002; HLA-A*03:02; MAGEB2; ENSG00000099399; CTA
KLITKDLVQEK

SEQ ID NO: 43003 - protein, 11 aa, Homo sapiens
  Table A; Target 43003; HLA-A*11:01; MAGEB2; ENSG00000099399; CTA
KLITKDLVQEK

SEQ ID NO: 43004 - protein, 11 aa, Homo sapiens
  Table A; Target 43004; HLA-A*31:01; MAGEB2; ENSG00000099399; CTA
KLITKDLVQEK

SEQ ID NO: 43005 - protein, 9 aa, Homo sapiens
  Table A; Target 43005; HLA-A*02:01; MAGEB2; ENSG00000099399; CTA
KLLMPLLGV

SEQ ID NO: 43006 - protein, 9 aa, Homo sapiens
  Table A; Target 43006; HLA-A*02:03; MAGEB2; ENSG00000099399; CTA
KLLMPLLGV

SEQ ID NO: 43007 - protein, 9 aa, Homo sapiens
  Table A; Target 43007; HLA-A*02:04; MAGEB2; ENSG00000099399; CTA
KLLMPLLGV

SEQ ID NO: 43008 - protein, 9 aa, Homo sapiens
  Table A; Target 43008; HLA-A*02:07; MAGEB2; ENSG00000099399; CTA
KLLMPLLGV

SEQ ID NO: 43009 - protein, 10 aa, Homo sapiens
  Table A; Target 43009; HLA-C*06:02; MAGEB2; ENSG00000099399; CTA
KQVPSSDPPR

SEQ ID NO: 43010 - protein, 11 aa, Homo sapiens
  Table A; Target 43010; HLA-A*24:02; MAGEB2; ENSG00000099399; CTA
KQVPSSDPPRF

SEQ ID NO: 43011 - protein, 11 aa, Homo sapiens
  Table A; Target 43011; HLA-A*32:01; MAGEB2; ENSG00000099399; CTA
KQVPSSDPPRF

SEQ ID NO: 43012 - protein, 11 aa, Homo sapiens
  Table A; Target 43012; HLA-B*15:01; MAGEB2; ENSG00000099399; CTA
KQVPSSDPPRF

SEQ ID NO: 43013 - protein, 11 aa, Homo sapiens
  Table A; Target 43013; HLA-B*38:01; MAGEB2; ENSG00000099399; CTA
KQVPSSDPPRF

SEQ ID NO: 43014 - protein, 11 aa, Homo sapiens
  Table A; Target 43014; HLA-B*57:01; MAGEB2; ENSG00000099399; CTA
KQVPSSDPPRF

SEQ ID NO: 43015 - protein, 11 aa, Homo sapiens
  Table A; Target 43015; HLA-B*58:01; MAGEB2; ENSG00000099399; CTA
KQVPSSDPPRF

SEQ ID NO: 43016 - protein, 8 aa, Homo sapiens
  Table A; Target 43016; HLA-A*32:01; MAGEB2; ENSG00000099399; CTA
KSGSLVQF

SEQ ID NO: 43017 - protein, 8 aa, Homo sapiens
  Table A; Target 43017; HLA-B*58:01; MAGEB2; ENSG00000099399; CTA
KSGSLVQF

SEQ ID NO: 43018 - protein, 11 aa, Homo sapiens
  Table A; Target 43018; HLA-A*29:02; MAGEB2; ENSG00000099399; CTA
KSGSLVQFLLY

SEQ ID NO: 43019 - protein, 11 aa, Homo sapiens
  Table A; Target 43019; HLA-B*57:01; MAGEB2; ENSG00000099399; CTA
KSGSLVQFLLY

SEQ ID NO: 43020 - protein, 10 aa, Homo sapiens
  Table A; Target 43020; HLA-A*68:01; MAGEB2; ENSG00000099399; CTA
KSPSEDPLTR

SEQ ID NO: 43021 - protein, 10 aa, Homo sapiens
  Table A; Target 43021; HLA-B*27:05; MAGEB2; ENSG00000099399; CTA
KSPSEDPLTR

SEQ ID NO: 43022 - protein, 10 aa, Homo sapiens
  Table A; Target 43022; HLA-B*57:01; MAGEB2; ENSG00000099399; CTA
KSPSEDPLTR

SEQ ID NO: 43023 - protein, 10 aa, Homo sapiens
  Table A; Target 43023; HLA-C*07:02; MAGEB2; ENSG00000099399; CTA
KSPSEDPLTR

SEQ ID NO: 43024 - protein, 10 aa, Homo sapiens
  Table A; Target 43024; HLA-C*07:06; MAGEB2; ENSG00000099399; CTA
KSPSEDPLTR

SEQ ID NO: 43025 - protein, 11 aa, Homo sapiens
  Table A; Target 43025; HLA-A*03:01; MAGEB2; ENSG00000099399; CTA
KSPSEDPLTRK

SEQ ID NO: 43026 - protein, 11 aa, Homo sapiens
  Table A; Target 43026; HLA-A*03:02; MAGEB2; ENSG00000099399; CTA
KSPSEDPLTRK

SEQ ID NO: 43027 - protein, 11 aa, Homo sapiens
  Table A; Target 43027; HLA-A*11:01; MAGEB2; ENSG00000099399; CTA
KSPSEDPLTRK

SEQ ID NO: 43028 - protein, 8 aa, Homo sapiens
  Table A; Target 43028; HLA-C*16:01; MAGEB2; ENSG00000099399; CTA
KSVTKGEM

SEQ ID NO: 43029 - protein, 9 aa, Homo sapiens
  Table A; Target 43029; HLA-B*40:02; MAGEB2; ENSG00000099399; CTA
KSVTKGEML

SEQ ID NO: 43030 - protein, 9 aa, Homo sapiens
  Table A; Target 43030; HLA-B*58:01; MAGEB2; ENSG00000099399; CTA
KSVTKGEML

SEQ ID NO: 43031 - protein, 9 aa, Homo sapiens
  Table A; Target 43031; HLA-B*13:02; MAGEB2; ENSG00000099399; CTA
KVLEFLAKV

SEQ ID NO: 43032 - protein, 9 aa, Homo sapiens
  Table A; Target 43032; HLA-B*40:02; MAGEB2; ENSG00000099399; CTA
KVLEFLAKV

SEQ ID NO: 43033 - protein, 9 aa, Homo sapiens
  Table A; Target 43033; HLA-B*55:01; MAGEB2; ENSG00000099399; CTA
KVLEFLAKV

SEQ ID NO: 43034 - protein, 10 aa, Homo sapiens
  Table A; Target 43034; HLA-A*03:02; MAGEB2; ENSG00000099399; CTA
KVNGTTPCAF

SEQ ID NO: 43035 - protein, 10 aa, Homo sapiens
  Table A; Target 43035; HLA-A*25:01; MAGEB2; ENSG00000099399; CTA
KVNGTTPCAF

SEQ ID NO: 43036 - protein, 10 aa, Homo sapiens
  Table A; Target 43036; HLA-A*30:02; MAGEB2; ENSG00000099399; CTA
KVNGTTPCAF

SEQ ID NO: 43037 - protein, 10 aa, Homo sapiens
  Table A; Target 43037; HLA-A*32:01; MAGEB2; ENSG00000099399; CTA
KVNGTTPCAF

SEQ ID NO: 43038 - protein, 10 aa, Homo sapiens
  Table A; Target 43038; HLA-B*15:01; MAGEB2; ENSG00000099399; CTA
KVNGTTPCAF

SEQ ID NO: 43039 - protein, 10 aa, Homo sapiens
  Table A; Target 43039; HLA-C*01:02; MAGEB2; ENSG00000099399; CTA
KVNGTTPCAF

SEQ ID NO: 43040 - protein, 10 aa, Homo sapiens
  Table A; Target 43040; HLA-C*07:04; MAGEB2; ENSG00000099399; CTA
KVNGTTPCAF

SEQ ID NO: 43041 - protein, 9 aa, Homo sapiens
  Table A; Target 43041; HLA-A*03:01; MAGEB2; ENSG00000099399; CTA
KVNPNGHTY

SEQ ID NO: 43042 - protein, 9 aa, Homo sapiens
  Table A; Target 43042; HLA-A*03:02; MAGEB2; ENSG00000099399; CTA
KVNPNGHTY

SEQ ID NO: 43043 - protein, 9 aa, Homo sapiens
  Table A; Target 43043; HLA-A*23:01; MAGEB2; ENSG00000099399; CTA
KVNPNGHTY

SEQ ID NO: 43044 - protein, 9 aa, Homo sapiens
  Table A; Target 43044; HLA-A*25:01; MAGEB2; ENSG00000099399; CTA
KVNPNGHTY

SEQ ID NO: 43045 - protein, 9 aa, Homo sapiens
  Table A; Target 43045; HLA-A*26:01; MAGEB2; ENSG00000099399; CTA
KVNPNGHTY

SEQ ID NO: 43046 - protein, 9 aa, Homo sapiens
  Table A; Target 43046; HLA-A*29:02; MAGEB2; ENSG00000099399; CTA
KVNPNGHTY

SEQ ID NO: 43047 - protein, 9 aa, Homo sapiens
  Table A; Target 43047; HLA-A*30:02; MAGEB2; ENSG00000099399; CTA
KVNPNGHTY

SEQ ID NO: 43048 - protein, 9 aa, Homo sapiens
  Table A; Target 43048; HLA-A*31:01; MAGEB2; ENSG00000099399; CTA
KVNPNGHTY

SEQ ID NO: 43049 - protein, 9 aa, Homo sapiens
  Table A; Target 43049; HLA-B*15:03; MAGEB2; ENSG00000099399; CTA
KVNPNGHTY

SEQ ID NO: 43050 - protein, 9 aa, Homo sapiens
  Table A; Target 43050; HLA-B*35:01; MAGEB2; ENSG00000099399; CTA
KVNPNGHTY

SEQ ID NO: 43051 - protein, 9 aa, Homo sapiens
  Table A; Target 43051; HLA-B*44:03; MAGEB2; ENSG00000099399; CTA
KVNPNGHTY

SEQ ID NO: 43052 - protein, 9 aa, Homo sapiens
  Table A; Target 43052; HLA-B*46:01; MAGEB2; ENSG00000099399; CTA
KVNPNGHTY

SEQ ID NO: 43053 - protein, 9 aa, Homo sapiens
  Table A; Target 43053; HLA-B*57:01; MAGEB2; ENSG00000099399; CTA
KVNPNGHTY

SEQ ID NO: 43054 - protein, 9 aa, Homo sapiens
  Table A; Target 43054; HLA-C*01:02; MAGEB2; ENSG00000099399; CTA
KVNPNGHTY

SEQ ID NO: 43055 - protein, 9 aa, Homo sapiens
  Table A; Target 43055; HLA-C*02:02; MAGEB2; ENSG00000099399; CTA
KVNPNGHTY

SEQ ID NO: 43056 - protein, 9 aa, Homo sapiens
  Table A; Target 43056; HLA-C*03:04; MAGEB2; ENSG00000099399; CTA
KVNPNGHTY

SEQ ID NO: 43057 - protein, 9 aa, Homo sapiens
  Table A; Target 43057; HLA-C*07:04; MAGEB2; ENSG00000099399; CTA
KVNPNGHTY

SEQ ID NO: 43058 - protein, 9 aa, Homo sapiens
  Table A; Target 43058; HLA-C*07:06; MAGEB2; ENSG00000099399; CTA
KVNPNGHTY

SEQ ID NO: 43059 - protein, 9 aa, Homo sapiens
  Table A; Target 43059; HLA-C*12:03; MAGEB2; ENSG00000099399; CTA
KVNPNGHTY

SEQ ID NO: 43060 - protein, 9 aa, Homo sapiens
  Table A; Target 43060; HLA-C*14:02; MAGEB2; ENSG00000099399; CTA
KVNPNGHTY

SEQ ID NO: 43061 - protein, 9 aa, Homo sapiens
  Table A; Target 43061; HLA-C*16:01; MAGEB2; ENSG00000099399; CTA
KVNPNGHTY

SEQ ID NO: 43062 - protein, 9 aa, Homo sapiens
  Table A; Target 43062; HLA-C*16:02; MAGEB2; ENSG00000099399; CTA
KVNPNGHTY

SEQ ID NO: 43063 - protein, 9 aa, Homo sapiens
  Table A; Target 43063; HLA-C*16:04; MAGEB2; ENSG00000099399; CTA
KVNPNGHTY

SEQ ID NO: 43064 - protein, 10 aa, Homo sapiens
  Table A; Target 43064; HLA-A*32:01; MAGEB2; ENSG00000099399; CTA
KVNPNGHTYT

SEQ ID NO: 43065 - protein, 11 aa, Homo sapiens
  Table A; Target 43065; HLA-A*03:02; MAGEB2; ENSG00000099399; CTA
KVNPNGHTYTF

SEQ ID NO: 43066 - protein, 11 aa, Homo sapiens
  Table A; Target 43066; HLA-A*23:01; MAGEB2; ENSG00000099399; CTA
KVNPNGHTYTF

SEQ ID NO: 43067 - protein, 11 aa, Homo sapiens
  Table A; Target 43067; HLA-A*24:02; MAGEB2; ENSG00000099399; CTA
KVNPNGHTYTF

SEQ ID NO: 43068 - protein, 11 aa, Homo sapiens
  Table A; Target 43068; HLA-A*25:01; MAGEB2; ENSG00000099399; CTA
KVNPNGHTYTF

SEQ ID NO: 43069 - protein, 11 aa, Homo sapiens
  Table A; Target 43069; HLA-A*29:02; MAGEB2; ENSG00000099399; CTA
KVNPNGHTYTF

SEQ ID NO: 43070 - protein, 11 aa, Homo sapiens
  Table A; Target 43070; HLA-A*30:02; MAGEB2; ENSG00000099399; CTA
KVNPNGHTYTF

SEQ ID NO: 43071 - protein, 11 aa, Homo sapiens
  Table A; Target 43071; HLA-A*31:01; MAGEB2; ENSG00000099399; CTA
KVNPNGHTYTF

SEQ ID NO: 43072 - protein, 11 aa, Homo sapiens
  Table A; Target 43072; HLA-A*32:01; MAGEB2; ENSG00000099399; CTA
KVNPNGHTYTF

SEQ ID NO: 43073 - protein, 11 aa, Homo sapiens
  Table A; Target 43073; HLA-B*15:01; MAGEB2; ENSG00000099399; CTA
KVNPNGHTYTF

SEQ ID NO: 43074 - protein, 11 aa, Homo sapiens
  Table A; Target 43074; HLA-B*46:01; MAGEB2; ENSG00000099399; CTA
KVNPNGHTYTF

SEQ ID NO: 43075 - protein, 11 aa, Homo sapiens
  Table A; Target 43075; HLA-B*58:01; MAGEB2; ENSG00000099399; CTA
KVNPNGHTYTF

SEQ ID NO: 43076 - protein, 11 aa, Homo sapiens
  Table A; Target 43076; HLA-C*16:04; MAGEB2; ENSG00000099399; CTA
KVNPNGHTYTF

SEQ ID NO: 43077 - protein, 9 aa, Homo sapiens
  Table A; Target 43077; HLA-B*46:01; MAGEB2; ENSG00000099399; CTA
LAKVNGTTP

SEQ ID NO: 43078 - protein, 9 aa, Homo sapiens
  Table A; Target 43078; HLA-C*03:04; MAGEB2; ENSG00000099399; CTA
LAKVNGTTP

SEQ ID NO: 43079 - protein, 9 aa, Homo sapiens
  Table A; Target 43079; HLA-B*49:01; MAGEB2; ENSG00000099399; CTA
LEYKQVPSS

SEQ ID NO: 43080 - protein, 9 aa, Homo sapiens
  Table A; Target 43080; HLA-A*03:01; MAGEB2; ENSG00000099399; CTA
LLYKYKIKK

SEQ ID NO: 43081 - protein, 9 aa, Homo sapiens
  Table A; Target 43081; HLA-B*54:01; MAGEB2; ENSG00000099399; CTA
LNVPQVTEA

SEQ ID NO: 43082 - protein, 9 aa, Homo sapiens
  Table A; Target 43082; HLA-B*46:01; MAGEB2; ENSG00000099399; CTA
LSVVFGLEL

SEQ ID NO: 43083 - protein, 9 aa, Homo sapiens
  Table A; Target 43083; HLA-B*58:01; MAGEB2; ENSG00000099399; CTA
LSVVFGLEL

SEQ ID NO: 43084 - protein, 9 aa, Homo sapiens
  Table A; Target 43084; HLA-C*02:02; MAGEB2; ENSG00000099399; CTA
LSVVFGLEL

SEQ ID NO: 43085 - protein, 9 aa, Homo sapiens
  Table A; Target 43085; HLA-C*03:03; MAGEB2; ENSG00000099399; CTA
LSVVFGLEL

SEQ ID NO: 43086 - protein, 9 aa, Homo sapiens
  Table A; Target 43086; HLA-C*03:04; MAGEB2; ENSG00000099399; CTA
LSVVFGLEL

SEQ ID NO: 43087 - protein, 9 aa, Homo sapiens
  Table A; Target 43087; HLA-C*16:04; MAGEB2; ENSG00000099399; CTA
LSVVFGLEL

SEQ ID NO: 43088 - protein, 8 aa, Homo sapiens
  Table A; Target 43088; HLA-C*04:01; MAGEB2; ENSG00000099399; CTA
LTDEESLL

SEQ ID NO: 43089 - protein, 8 aa, Homo sapiens
  Table A; Target 43089; HLA-C*05:01; MAGEB2; ENSG00000099399; CTA
LTDEESLL

SEQ ID NO: 43090 - protein, 9 aa, Homo sapiens
  Table A; Target 43090; HLA-A*01:01; MAGEB2; ENSG00000099399; CTA
LTDEESLLS

SEQ ID NO: 43091 - protein, 11 aa, Homo sapiens
  Table A; Target 43091; HLA-A*01:01; MAGEB2; ENSG00000099399; CTA
LTDEESLLSSW

SEQ ID NO: 43092 - protein, 11 aa, Homo sapiens
  Table A; Target 43092; HLA-B*57:01; MAGEB2; ENSG00000099399; CTA
LTRKSGSLVQF

SEQ ID NO: 43093 - protein, 10 aa, Homo sapiens
  Table A; Target 43093; HLA-A*03:01; MAGEB2; ENSG00000099399; CTA
LVQEKYLEYK

SEQ ID NO: 43094 - protein, 10 aa, Homo sapiens
  Table A; Target 43094; HLA-A*03:02; MAGEB2; ENSG00000099399; CTA
LVQEKYLEYK

SEQ ID NO: 43095 - protein, 10 aa, Homo sapiens
  Table A; Target 43095; HLA-A*11:01; MAGEB2; ENSG00000099399; CTA
LVQEKYLEYK

SEQ ID NO: 43096 - protein, 11 aa, Homo sapiens
  Table A; Target 43096; HLA-B*54:01; MAGEB2; ENSG00000099399; CTA
MPLLGVIFLNG

SEQ ID NO: 43097 - protein, 10 aa, Homo sapiens
  Table A; Target 43097; HLA-B*15:03; MAGEB2; ENSG00000099399; CTA
NKVNPNGHTY

SEQ ID NO: 43098 - protein, 9 aa, Homo sapiens
  Table A; Target 43098; HLA-A*23:01; MAGEB2; ENSG00000099399; CTA
NPNGHTYTF

SEQ ID NO: 43099 - protein, 9 aa, Homo sapiens
  Table A; Target 43099; HLA-A*24:02; MAGEB2; ENSG00000099399; CTA
NPNGHTYTF

SEQ ID NO: 43100 - protein, 9 aa, Homo sapiens
  Table A; Target 43100; HLA-A*25:01; MAGEB2; ENSG00000099399; CTA
NPNGHTYTF

SEQ ID NO: 43101 - protein, 9 aa, Homo sapiens
  Table A; Target 43101; HLA-A*32:01; MAGEB2; ENSG00000099399; CTA
NPNGHTYTF

SEQ ID NO: 43102 - protein, 9 aa, Homo sapiens
  Table A; Target 43102; HLA-A*33:01; MAGEB2; ENSG00000099399; CTA
NPNGHTYTF

SEQ ID NO: 43103 - protein, 9 aa, Homo sapiens
  Table A; Target 43103; HLA-A*33:03; MAGEB2; ENSG00000099399; CTA
NPNGHTYTF

SEQ ID NO: 43104 - protein, 9 aa, Homo sapiens
  Table A; Target 43104; HLA-B*07:02; MAGEB2; ENSG00000099399; CTA
NPNGHTYTF

SEQ ID NO: 43105 - protein, 9 aa, Homo sapiens
  Table A; Target 43105; HLA-B*08:01; MAGEB2; ENSG00000099399; CTA
NPNGHTYTF

SEQ ID NO: 43106 - protein, 9 aa, Homo sapiens
  Table A; Target 43106; HLA-B*18:01; MAGEB2; ENSG00000099399; CTA
NPNGHTYTF

SEQ ID NO: 43107 - protein, 9 aa, Homo sapiens
  Table A; Target 43107; HLA-B*35:03; MAGEB2; ENSG00000099399; CTA
NPNGHTYTF

SEQ ID NO: 43108 - protein, 9 aa, Homo sapiens
  Table A; Target 43108; HLA-B*38:01; MAGEB2; ENSG00000099399; CTA
NPNGHTYTF

SEQ ID NO: 43109 - protein, 9 aa, Homo sapiens
  Table A; Target 43109; HLA-B*54:01; MAGEB2; ENSG00000099399; CTA
NPNGHTYTF

SEQ ID NO: 43110 - protein, 9 aa, Homo sapiens
  Table A; Target 43110; HLA-B*55:01; MAGEB2; ENSG00000099399; CTA
NPNGHTYTF

SEQ ID NO: 43111 - protein, 9 aa, Homo sapiens
  Table A; Target 43111; HLA-B*56:01; MAGEB2; ENSG00000099399; CTA
NPNGHTYTF

SEQ ID NO: 43112 - protein, 9 aa, Homo sapiens
  Table A; Target 43112; HLA-C*03:03; MAGEB2; ENSG00000099399; CTA
NPNGHTYTF

SEQ ID NO: 43113 - protein, 9 aa, Homo sapiens
  Table A; Target 43113; HLA-C*07:02; MAGEB2; ENSG00000099399; CTA
NPNGHTYTF

SEQ ID NO: 43114 - protein, 9 aa, Homo sapiens
  Table A; Target 43114; HLA-C*14:02; MAGEB2; ENSG00000099399; CTA
NPNGHTYTF

SEQ ID NO: 43115 - protein, 9 aa, Homo sapiens
  Table A; Target 43115; HLA-C*16:01; MAGEB2; ENSG00000099399; CTA
NPNGHTYTF

SEQ ID NO: 43116 - protein, 9 aa, Homo sapiens
  Table A; Target 43116; HLA-C*16:02; MAGEB2; ENSG00000099399; CTA
NPNGHTYTF

SEQ ID NO: 43117 - protein, 8 aa, Homo sapiens
  Table A; Target 43117; HLA-C*01:02; MAGEB2; ENSG00000099399; CTA
NVPQVTEA

SEQ ID NO: 43118 - protein, 11 aa, Homo sapiens
  Table A; Target 43118; HLA-A*68:01; MAGEB2; ENSG00000099399; CTA
PAAGIPQEPQR

SEQ ID NO: 43119 - protein, 11 aa, Homo sapiens
  Table A; Target 43119; HLA-B*27:02; MAGEB2; ENSG00000099399; CTA
PAAGIPQEPQR

SEQ ID NO: 43120 - protein, 9 aa, Homo sapiens
  Table A; Target 43120; HLA-A*01:01; MAGEB2; ENSG00000099399; CTA
PSEDPLTRK

SEQ ID NO: 43121 - protein, 9 aa, Homo sapiens
  Table A; Target 43121; HLA-A*03:02; MAGEB2; ENSG00000099399; CTA
PSEDPLTRK

SEQ ID NO: 43122 - protein, 9 aa, Homo sapiens
  Table A; Target 43122; HLA-A*11:01; MAGEB2; ENSG00000099399; CTA
PSEDPLTRK

SEQ ID NO: 43123 - protein, 10 aa, Homo sapiens
  Table A; Target 43123; HLA-C*16:01; MAGEB2; ENSG00000099399; CTA
PSSDPPRFQF

SEQ ID NO: 43124 - protein, 9 aa, Homo sapiens
  Table A; Target 43124; HLA-C*16:02; MAGEB2; ENSG00000099399; CTA
QASTSTKSP

SEQ ID NO: 43125 - protein, 9 aa, Homo sapiens
  Table A; Target 43125; HLA-B*39:01; MAGEB2; ENSG00000099399; CTA
QRAPTTAAA

SEQ ID NO: 43126 - protein, 9 aa, Homo sapiens
  Table A; Target 43126; HLA-A*11:01; MAGEB2; ENSG00000099399; CTA
QVPSSDPPR

SEQ ID NO: 43127 - protein, 9 aa, Homo sapiens
  Table A; Target 43127; HLA-A*68:01; MAGEB2; ENSG00000099399; CTA
QVPSSDPPR

SEQ ID NO: 43128 - protein, 9 aa, Homo sapiens
  Table A; Target 43128; HLA-C*07:06; MAGEB2; ENSG00000099399; CTA
QVPSSDPPR

SEQ ID NO: 43129 - protein, 10 aa, Homo sapiens
  Table A; Target 43129; HLA-A*25:01; MAGEB2; ENSG00000099399; CTA
QVPSSDPPRF

SEQ ID NO: 43130 - protein, 10 aa, Homo sapiens
  Table A; Target 43130; HLA-A*26:01; MAGEB2; ENSG00000099399; CTA
QVPSSDPPRF

SEQ ID NO: 43131 - protein, 9 aa, Homo sapiens
  Table A; Target 43131; HLA-C*01:02; MAGEB2; ENSG00000099399; CTA
RAPTTAAAA

SEQ ID NO: 43132 - protein, 10 aa, Homo sapiens
  Table A; Target 43132; HLA-C*01:02; MAGEB2; ENSG00000099399; CTA
RAPTTAAAAA

SEQ ID NO: 43133 - protein, 9 aa, Homo sapiens
  Table A; Target 43133; HLA-A*03:01; MAGEB2; ENSG00000099399; CTA
RAYAETSKM

SEQ ID NO: 43134 - protein, 9 aa, Homo sapiens
  Table A; Target 43134; HLA-A*32:01; MAGEB2; ENSG00000099399; CTA
RAYAETSKM

SEQ ID NO: 43135 - protein, 9 aa, Homo sapiens
  Table A; Target 43135; HLA-B*07:02; MAGEB2; ENSG00000099399; CTA
RAYAETSKM

SEQ ID NO: 43136 - protein, 9 aa, Homo sapiens
  Table A; Target 43136; HLA-B*15:01; MAGEB2; ENSG00000099399; CTA
RAYAETSKM

SEQ ID NO: 43137 - protein, 9 aa, Homo sapiens
  Table A; Target 43137; HLA-B*15:03; MAGEB2; ENSG00000099399; CTA
RAYAETSKM

SEQ ID NO: 43138 - protein, 9 aa, Homo sapiens
  Table A; Target 43138; HLA-B*46:01; MAGEB2; ENSG00000099399; CTA
RAYAETSKM

SEQ ID NO: 43139 - protein, 9 aa, Homo sapiens
  Table A; Target 43139; HLA-B*58:01; MAGEB2; ENSG00000099399; CTA
RAYAETSKM

SEQ ID NO: 43140 - protein, 9 aa, Homo sapiens
  Table A; Target 43140; HLA-C*01:02; MAGEB2; ENSG00000099399; CTA
RAYAETSKM

SEQ ID NO: 43141 - protein, 9 aa, Homo sapiens
  Table A; Target 43141; HLA-C*02:02; MAGEB2; ENSG00000099399; CTA
RAYAETSKM

SEQ ID NO: 43142 - protein, 9 aa, Homo sapiens
  Table A; Target 43142; HLA-C*03:03; MAGEB2; ENSG00000099399; CTA
RAYAETSKM

SEQ ID NO: 43143 - protein, 9 aa, Homo sapiens
  Table A; Target 43143; HLA-C*03:04; MAGEB2; ENSG00000099399; CTA
RAYAETSKM

SEQ ID NO: 43144 - protein, 9 aa, Homo sapiens
  Table A; Target 43144; HLA-C*05:01; MAGEB2; ENSG00000099399; CTA
RAYAETSKM

SEQ ID NO: 43145 - protein, 9 aa, Homo sapiens
  Table A; Target 43145; HLA-C*12:03; MAGEB2; ENSG00000099399; CTA
RAYAETSKM

SEQ ID NO: 43146 - protein, 9 aa, Homo sapiens
  Table A; Target 43146; HLA-C*16:02; MAGEB2; ENSG00000099399; CTA
RAYAETSKM

SEQ ID NO: 43147 - protein, 9 aa, Homo sapiens
  Table A; Target 43147; HLA-C*16:04; MAGEB2; ENSG00000099399; CTA
RAYAETSKM

SEQ ID NO: 43148 - protein, 10 aa, Homo sapiens
  Table A; Target 43148; HLA-A*03:01; MAGEB2; ENSG00000099399; CTA
RAYAETSKMK

SEQ ID NO: 43149 - protein, 9 aa, Homo sapiens
  Table A; Target 43149; HLA-B*37:01; MAGEB2; ENSG00000099399; CTA
RDETRGLNV

SEQ ID NO: 43150 - protein, 9 aa, Homo sapiens
  Table A; Target 43150; HLA-B*15:03; MAGEB2; ENSG00000099399; CTA
RKSGSLVQF

SEQ ID NO: 43151 - protein, 8 aa, Homo sapiens
  Table A; Target 43151; HLA-B*37:01; MAGEB2; ENSG00000099399; CTA
SDPPRFQF

SEQ ID NO: 43152 - protein, 9 aa, Homo sapiens
  Table A; Target 43152; HLA-B*37:01; MAGEB2; ENSG00000099399; CTA
SDPPRFQFL

SEQ ID NO: 43153 - protein, 9 aa, Homo sapiens
  Table A; Target 43153; HLA-B*44:03; MAGEB2; ENSG00000099399; CTA
SEDPLTRKS

SEQ ID NO: 43154 - protein, 8 aa, Homo sapiens
  Table A; Target 43154; HLA-A*30:01; MAGEB2; ENSG00000099399; CTA
SEGLSVVF

SEQ ID NO: 43155 - protein, 8 aa, Homo sapiens
  Table A; Target 43155; HLA-B*15:03; MAGEB2; ENSG00000099399; CTA
SEGLSVVF

SEQ ID NO: 43156 - protein, 8 aa, Homo sapiens
  Table A; Target 43156; HLA-B*18:01; MAGEB2; ENSG00000099399; CTA
SEGLSVVF

SEQ ID NO: 43157 - protein, 8 aa, Homo sapiens
  Table A; Target 43157; HLA-B*37:01; MAGEB2; ENSG00000099399; CTA
SEGLSVVF

SEQ ID NO: 43158 - protein, 8 aa, Homo sapiens
  Table A; Target 43158; HLA-B*40:01; MAGEB2; ENSG00000099399; CTA
SEGLSVVF

SEQ ID NO: 43159 - protein, 8 aa, Homo sapiens
  Table A; Target 43159; HLA-B*40:02; MAGEB2; ENSG00000099399; CTA
SEGLSVVF

SEQ ID NO: 43160 - protein, 8 aa, Homo sapiens
  Table A; Target 43160; HLA-B*44:02; MAGEB2; ENSG00000099399; CTA
SEGLSVVF

SEQ ID NO: 43161 - protein, 8 aa, Homo sapiens
  Table A; Target 43161; HLA-B*44:03; MAGEB2; ENSG00000099399; CTA
SEGLSVVF

SEQ ID NO: 43162 - protein, 8 aa, Homo sapiens
  Table A; Target 43162; HLA-B*49:01; MAGEB2; ENSG00000099399; CTA
SEGLSVVF

SEQ ID NO: 43163 - protein, 8 aa, Homo sapiens
  Table A; Target 43163; HLA-C*07:04; MAGEB2; ENSG00000099399; CTA
SEGLSVVF

SEQ ID NO: 43164 - protein, 8 aa, Homo sapiens
  Table A; Target 43164; HLA-C*16:04; MAGEB2; ENSG00000099399; CTA
SEGLSVVF

SEQ ID NO: 43165 - protein, 10 aa, Homo sapiens
  Table A; Target 43165; HLA-A*30:01; MAGEB2; ENSG00000099399; CTA
SEGLSVVFGL

SEQ ID NO: 43166 - protein, 10 aa, Homo sapiens
  Table A; Target 43166; HLA-B*40:01; MAGEB2; ENSG00000099399; CTA
SEGLSVVFGL

SEQ ID NO: 43167 - protein, 10 aa, Homo sapiens
  Table A; Target 43167; HLA-B*40:02; MAGEB2; ENSG00000099399; CTA
SEGLSVVFGL

SEQ ID NO: 43168 - protein, 10 aa, Homo sapiens
  Table A; Target 43168; HLA-B*44:02; MAGEB2; ENSG00000099399; CTA
SEGLSVVFGL

SEQ ID NO: 43169 - protein, 10 aa, Homo sapiens
  Table A; Target 43169; HLA-B*44:03; MAGEB2; ENSG00000099399; CTA
SEGLSVVFGL

SEQ ID NO: 43170 - protein, 10 aa, Homo sapiens
  Table A; Target 43170; HLA-A*02:04; MAGEB2; ENSG00000099399; CTA
SLLSSWDFPR

SEQ ID NO: 43171 - protein, 8 aa, Homo sapiens
  Table A; Target 43171; HLA-A*29:02; MAGEB2; ENSG00000099399; CTA
SLVQFLLY

SEQ ID NO: 43172 - protein, 9 aa, Homo sapiens
  Table A; Target 43172; HLA-A*03:01; MAGEB2; ENSG00000099399; CTA
SLVQFLLYK

SEQ ID NO: 43173 - protein, 10 aa, Homo sapiens
  Table A; Target 43173; HLA-A*29:02; MAGEB2; ENSG00000099399; CTA
SLVQFLLYKY

SEQ ID NO: 43174 - protein, 10 aa, Homo sapiens
  Table A; Target 43174; HLA-B*56:01; MAGEB2; ENSG00000099399; CTA
SPAAGIPQEP

SEQ ID NO: 43175 - protein, 9 aa, Homo sapiens
  Table A; Target 43175; HLA-A*33:03; MAGEB2; ENSG00000099399; CTA
SPSEDPLTR

SEQ ID NO: 43176 - protein, 9 aa, Homo sapiens
  Table A; Target 43176; HLA-A*68:01; MAGEB2; ENSG00000099399; CTA
SPSEDPLTR

SEQ ID NO: 43177 - protein, 9 aa, Homo sapiens
  Table A; Target 43177; HLA-B*07:02; MAGEB2; ENSG00000099399; CTA
SPSEDPLTR

SEQ ID NO: 43178 - protein, 9 aa, Homo sapiens
  Table A; Target 43178; HLA-B*35:01; MAGEB2; ENSG00000099399; CTA
SPSEDPLTR

SEQ ID NO: 43179 - protein, 9 aa, Homo sapiens
  Table A; Target 43179; HLA-B*35:03; MAGEB2; ENSG00000099399; CTA
SPSEDPLTR

SEQ ID NO: 43180 - protein, 9 aa, Homo sapiens
  Table A; Target 43180; HLA-B*56:01; MAGEB2; ENSG00000099399; CTA
SPSEDPLTR

SEQ ID NO: 43181 - protein, 9 aa, Homo sapiens
  Table A; Target 43181; HLA-C*07:06; MAGEB2; ENSG00000099399; CTA
SPSEDPLTR

SEQ ID NO: 43182 - protein, 10 aa, Homo sapiens
  Table A; Target 43182; HLA-A*03:02; MAGEB2; ENSG00000099399; CTA
SPSEDPLTRK

SEQ ID NO: 43183 - protein, 10 aa, Homo sapiens
  Table A; Target 43183; HLA-A*11:01; MAGEB2; ENSG00000099399; CTA
SPSEDPLTRK

SEQ ID NO: 43184 - protein, 10 aa, Homo sapiens
  Table A; Target 43184; HLA-B*56:01; MAGEB2; ENSG00000099399; CTA
SPSEDPLTRK

SEQ ID NO: 43185 - protein, 10 aa, Homo sapiens
  Table A; Target 43185; HLA-C*07:06; MAGEB2; ENSG00000099399; CTA
SPSEDPLTRK

SEQ ID NO: 43186 - protein, 9 aa, Homo sapiens
  Table A; Target 43186; HLA-A*01:01; MAGEB2; ENSG00000099399; CTA
SSDPPRFQF

SEQ ID NO: 43187 - protein, 9 aa, Homo sapiens
  Table A; Target 43187; HLA-A*02:07; MAGEB2; ENSG00000099399; CTA
SSDPPRFQF

SEQ ID NO: 43188 - protein, 9 aa, Homo sapiens
  Table A; Target 43188; HLA-A*32:01; MAGEB2; ENSG00000099399; CTA
SSDPPRFQF

SEQ ID NO: 43189 - protein, 9 aa, Homo sapiens
  Table A; Target 43189; HLA-B*57:01; MAGEB2; ENSG00000099399; CTA
SSDPPRFQF

SEQ ID NO: 43190 - protein, 9 aa, Homo sapiens
  Table A; Target 43190; HLA-B*58:01; MAGEB2; ENSG00000099399; CTA
SSDPPRFQF

SEQ ID NO: 43191 - protein, 9 aa, Homo sapiens
  Table A; Target 43191; HLA-C*05:01; MAGEB2; ENSG00000099399; CTA
SSDPPRFQF

SEQ ID NO: 43192 - protein, 9 aa, Homo sapiens
  Table A; Target 43192; HLA-C*16:01; MAGEB2; ENSG00000099399; CTA
SSDPPRFQF

SEQ ID NO: 43193 - protein, 11 aa, Homo sapiens
  Table A; Target 43193; HLA-B*57:01; MAGEB2; ENSG00000099399; CTA
SSDPPRFQFLW

SEQ ID NO: 43194 - protein, 9 aa, Homo sapiens
  Table A; Target 43194; HLA-A*03:02; MAGEB2; ENSG00000099399; CTA
SSQASTSTK

SEQ ID NO: 43195 - protein, 9 aa, Homo sapiens
  Table A; Target 43195; HLA-A*11:01; MAGEB2; ENSG00000099399; CTA
SSQASTSTK

SEQ ID NO: 43196 - protein, 9 aa, Homo sapiens
  Table A; Target 43196; HLA-C*07:06; MAGEB2; ENSG00000099399; CTA
SSQASTSTK

SEQ ID NO: 43197 - protein, 10 aa, Homo sapiens
  Table A; Target 43197; HLA-A*03:01; MAGEB2; ENSG00000099399; CTA
SSSQASTSTK

SEQ ID NO: 43198 - protein, 10 aa, Homo sapiens
  Table A; Target 43198; HLA-A*03:02; MAGEB2; ENSG00000099399; CTA
SSSQASTSTK

SEQ ID NO: 43199 - protein, 10 aa, Homo sapiens
  Table A; Target 43199; HLA-A*11:01; MAGEB2; ENSG00000099399; CTA
SSSQASTSTK

SEQ ID NO: 43200 - protein, 8 aa, Homo sapiens
  Table A; Target 43200; HLA-A*31:01; MAGEB2; ENSG00000099399; CTA
SSWDFPRR

SEQ ID NO: 43201 - protein, 9 aa, Homo sapiens
  Table A; Target 43201; HLA-A*02:01; MAGEB2; ENSG00000099399; CTA
SVFGEPWKL

SEQ ID NO: 43202 - protein, 9 aa, Homo sapiens
  Table A; Target 43202; HLA-A*02:03; MAGEB2; ENSG00000099399; CTA
SVFGEPWKL

SEQ ID NO: 43203 - protein, 9 aa, Homo sapiens
  Table A; Target 43203; HLA-A*02:04; MAGEB2; ENSG00000099399; CTA
SVFGEPWKL

SEQ ID NO: 43204 - protein, 9 aa, Homo sapiens
  Table A; Target 43204; HLA-A*02:07; MAGEB2; ENSG00000099399; CTA
SVFGEPWKL

SEQ ID NO: 43205 - protein, 9 aa, Homo sapiens
  Table A; Target 43205; HLA-A*68:02; MAGEB2; ENSG00000099399; CTA
SVFGEPWKL

SEQ ID NO: 43206 - protein, 9 aa, Homo sapiens
  Table A; Target 43206; HLA-B*13:02; MAGEB2; ENSG00000099399; CTA
SVFGEPWKL

SEQ ID NO: 43207 - protein, 9 aa, Homo sapiens
  Table A; Target 43207; HLA-C*02:02; MAGEB2; ENSG00000099399; CTA
SVFGEPWKL

SEQ ID NO: 43208 - protein, 11 aa, Homo sapiens
  Table A; Target 43208; HLA-C*07:04; MAGEB2; ENSG00000099399; CTA
SVSGGAASSSP

SEQ ID NO: 43209 - protein, 9 aa, Homo sapiens
  Table A; Target 43209; HLA-A*03:01; MAGEB2; ENSG00000099399; CTA
SVTKGEMLK

SEQ ID NO: 43210 - protein, 9 aa, Homo sapiens
  Table A; Target 43210; HLA-A*03:02; MAGEB2; ENSG00000099399; CTA
SVTKGEMLK

SEQ ID NO: 43211 - protein, 9 aa, Homo sapiens
  Table A; Target 43211; HLA-A*11:01; MAGEB2; ENSG00000099399; CTA
SVTKGEMLK

SEQ ID NO: 43212 - protein, 8 aa, Homo sapiens
  Table A; Target 43212; HLA-C*01:02; MAGEB2; ENSG00000099399; CTA
SVVFGLEL

SEQ ID NO: 43213 - protein, 8 aa, Homo sapiens
  Table A; Target 43213; HLA-C*03:03; MAGEB2; ENSG00000099399; CTA
SVVFGLEL

SEQ ID NO: 43214 - protein, 8 aa, Homo sapiens
  Table A; Target 43214; HLA-C*03:04; MAGEB2; ENSG00000099399; CTA
SVVFGLEL

SEQ ID NO: 43215 - protein, 10 aa, Homo sapiens
  Table A; Target 43215; HLA-A*03:02; MAGEB2; ENSG00000099399; CTA
SVVFGLELNK

SEQ ID NO: 43216 - protein, 10 aa, Homo sapiens
  Table A; Target 43216; HLA-A*11:01; MAGEB2; ENSG00000099399; CTA
SVVFGLELNK

SEQ ID NO: 43217 - protein, 10 aa, Homo sapiens
  Table A; Target 43217; HLA-B*27:02; MAGEB2; ENSG00000099399; CTA
SVVFGLELNK

SEQ ID NO: 43218 - protein, 11 aa, Homo sapiens
  Table A; Target 43218; HLA-A*68:02; MAGEB2; ENSG00000099399; CTA
SVVFGLELNKV

SEQ ID NO: 43219 - protein, 9 aa, Homo sapiens
  Table A; Target 43219; HLA-A*02:03; MAGEB2; ENSG00000099399; CTA
TAAAAAAGV

SEQ ID NO: 43220 - protein, 9 aa, Homo sapiens
  Table A; Target 43220; HLA-B*51:01; MAGEB2; ENSG00000099399; CTA
TAAAAAAGV

SEQ ID NO: 43221 - protein, 9 aa, Homo sapiens
  Table A; Target 43221; HLA-C*02:02; MAGEB2; ENSG00000099399; CTA
TAAAAAAGV

SEQ ID NO: 43222 - protein, 9 aa, Homo sapiens
  Table A; Target 43222; HLA-C*07:06; MAGEB2; ENSG00000099399; CTA
TAAAAAAGV

SEQ ID NO: 43223 - protein, 9 aa, Homo sapiens
  Table A; Target 43223; HLA-C*16:02; MAGEB2; ENSG00000099399; CTA
TAAAAAAGV

SEQ ID NO: 43224 - protein, 10 aa, Homo sapiens
  Table A; Target 43224; HLA-B*44:02; MAGEB2; ENSG00000099399; CTA
TDEESLLSSW

SEQ ID NO: 43225 - protein, 8 aa, Homo sapiens
  Table A; Target 43225; HLA-B*18:01; MAGEB2; ENSG00000099399; CTA
TEEEIWEF

SEQ ID NO: 43226 - protein, 8 aa, Homo sapiens
  Table A; Target 43226; HLA-B*08:01; MAGEB2; ENSG00000099399; CTA
TFIDKVDL

SEQ ID NO: 43227 - protein, 8 aa, Homo sapiens
  Table A; Target 43227; HLA-C*14:02; MAGEB2; ENSG00000099399; CTA
TFIDKVDL

SEQ ID NO: 43228 - protein, 9 aa, Homo sapiens
  Table A; Target 43228; HLA-B*15:03; MAGEB2; ENSG00000099399; CTA
TKDLVQEKY

SEQ ID NO: 43229 - protein, 9 aa, Homo sapiens
  Table A; Target 43229; HLA-B*27:05; MAGEB2; ENSG00000099399; CTA
TKSPSEDPL

SEQ ID NO: 43230 - protein, 9 aa, Homo sapiens
  Table A; Target 43230; HLA-B*38:01; MAGEB2; ENSG00000099399; CTA
TKSPSEDPL

SEQ ID NO: 43231 - protein, 9 aa, Homo sapiens
  Table A; Target 43231; HLA-B*39:01; MAGEB2; ENSG00000099399; CTA
TKSPSEDPL

SEQ ID NO: 43232 - protein, 9 aa, Homo sapiens
  Table A; Target 43232; HLA-B*35:01; MAGEB2; ENSG00000099399; CTA
TPCAFPTHY

SEQ ID NO: 43233 - protein, 9 aa, Homo sapiens
  Table A; Target 43233; HLA-C*06:02; MAGEB2; ENSG00000099399; CTA
TRGLNVPQV

SEQ ID NO: 43234 - protein, 9 aa, Homo sapiens
  Table A; Target 43234; HLA-B*57:01; MAGEB2; ENSG00000099399; CTA
TSKMKVLEF

SEQ ID NO: 43235 - protein, 9 aa, Homo sapiens
  Table A; Target 43235; HLA-C*07:01; MAGEB2; ENSG00000099399; CTA
TSKMKVLEF

SEQ ID NO: 43236 - protein, 10 aa, Homo sapiens
  Table A; Target 43236; HLA-C*06:02; MAGEB2; ENSG00000099399; CTA
TTAAAAAAGV

SEQ ID NO: 43237 - protein, 10 aa, Homo sapiens
  Table A; Target 43237; HLA-C*07:06; MAGEB2; ENSG00000099399; CTA
TTAAAAAAGV

SEQ ID NO: 43238 - protein, 10 aa, Homo sapiens
  Table A; Target 43238; HLA-A*26:01; MAGEB2; ENSG00000099399; CTA
TTPCAFPTHY

SEQ ID NO: 43239 - protein, 8 aa, Homo sapiens
  Table A; Target 43239; HLA-C*06:02; MAGEB2; ENSG00000099399; CTA
TYTFIDKV

SEQ ID NO: 43240 - protein, 9 aa, Homo sapiens
  Table A; Target 43240; HLA-B*40:01; MAGEB2; ENSG00000099399; CTA
VDLTDEESL

SEQ ID NO: 43241 - protein, 8 aa, Homo sapiens
  Table A; Target 43241; HLA-A*23:01; MAGEB2; ENSG00000099399; CTA
VFGEPWKL

SEQ ID NO: 43242 - protein, 8 aa, Homo sapiens
  Table A; Target 43242; HLA-A*24:02; MAGEB2; ENSG00000099399; CTA
VFGEPWKL

SEQ ID NO: 43243 - protein, 9 aa, Homo sapiens
  Table A; Target 43243; HLA-A*24:02; MAGEB2; ENSG00000099399; CTA
VFGEPWKLI

SEQ ID NO: 43244 - protein, 9 aa, Homo sapiens
  Table A; Target 43244; HLA-B*46:01; MAGEB2; ENSG00000099399; CTA
VIFLNGNSA

SEQ ID NO: 43245 - protein, 9 aa, Homo sapiens
  Table A; Target 43245; HLA-B*54:01; MAGEB2; ENSG00000099399; CTA
VIFLNGNSA

SEQ ID NO: 43246 - protein, 9 aa, Homo sapiens
  Table A; Target 43246; HLA-B*56:01; MAGEB2; ENSG00000099399; CTA
VIFLNGNSA

SEQ ID NO: 43247 - protein, 9 aa, Homo sapiens
  Table A; Target 43247; HLA-C*01:02; MAGEB2; ENSG00000099399; CTA
VIFLNGNSA

SEQ ID NO: 43248 - protein, 8 aa, Homo sapiens
  Table A; Target 43248; HLA-B*39:01; MAGEB2; ENSG00000099399; CTA
VNPNGHTY

SEQ ID NO: 43249 - protein, 8 aa, Homo sapiens
  Table A; Target 43249; HLA-B*46:01; MAGEB2; ENSG00000099399; CTA
VNPNGHTY

SEQ ID NO: 43250 - protein, 8 aa, Homo sapiens
  Table A; Target 43250; HLA-C*01:02; MAGEB2; ENSG00000099399; CTA
VNPNGHTY

SEQ ID NO: 43251 - protein, 8 aa, Homo sapiens
  Table A; Target 43251; HLA-C*04:01; MAGEB2; ENSG00000099399; CTA
VNPNGHTY

SEQ ID NO: 43252 - protein, 8 aa, Homo sapiens
  Table A; Target 43252; HLA-C*07:01; MAGEB2; ENSG00000099399; CTA
VNPNGHTY

SEQ ID NO: 43253 - protein, 8 aa, Homo sapiens
  Table A; Target 43253; HLA-C*14:02; MAGEB2; ENSG00000099399; CTA
VNPNGHTY

SEQ ID NO: 43254 - protein, 8 aa, Homo sapiens
  Table A; Target 43254; HLA-C*16:01; MAGEB2; ENSG00000099399; CTA
VNPNGHTY

SEQ ID NO: 43255 - protein, 8 aa, Homo sapiens
  Table A; Target 43255; HLA-C*16:02; MAGEB2; ENSG00000099399; CTA
VNPNGHTY

SEQ ID NO: 43256 - protein, 10 aa, Homo sapiens
  Table A; Target 43256; HLA-A*23:01; MAGEB2; ENSG00000099399; CTA
VNPNGHTYTF

SEQ ID NO: 43257 - protein, 10 aa, Homo sapiens
  Table A; Target 43257; HLA-A*24:02; MAGEB2; ENSG00000099399; CTA
VNPNGHTYTF

SEQ ID NO: 43258 - protein, 10 aa, Homo sapiens
  Table A; Target 43258; HLA-A*29:02; MAGEB2; ENSG00000099399; CTA
VNPNGHTYTF

SEQ ID NO: 43259 - protein, 10 aa, Homo sapiens
  Table A; Target 43259; HLA-A*33:01; MAGEB2; ENSG00000099399; CTA
VNPNGHTYTF

SEQ ID NO: 43260 - protein, 10 aa, Homo sapiens
  Table A; Target 43260; HLA-C*07:02; MAGEB2; ENSG00000099399; CTA
VNPNGHTYTF

SEQ ID NO: 43261 - protein, 9 aa, Homo sapiens
  Table A; Target 43261; HLA-A*23:01; MAGEB2; ENSG00000099399; CTA
VPSSDPPRF

SEQ ID NO: 43262 - protein, 9 aa, Homo sapiens
  Table A; Target 43262; HLA-A*24:02; MAGEB2; ENSG00000099399; CTA
VPSSDPPRF

SEQ ID NO: 43263 - protein, 9 aa, Homo sapiens
  Table A; Target 43263; HLA-B*07:02; MAGEB2; ENSG00000099399; CTA
VPSSDPPRF

SEQ ID NO: 43264 - protein, 9 aa, Homo sapiens
  Table A; Target 43264; HLA-B*35:01; MAGEB2; ENSG00000099399; CTA
VPSSDPPRF

SEQ ID NO: 43265 - protein, 9 aa, Homo sapiens
  Table A; Target 43265; HLA-B*35:03; MAGEB2; ENSG00000099399; CTA
VPSSDPPRF

SEQ ID NO: 43266 - protein, 9 aa, Homo sapiens
  Table A; Target 43266; HLA-B*38:01; MAGEB2; ENSG00000099399; CTA
VPSSDPPRF

SEQ ID NO: 43267 - protein, 9 aa, Homo sapiens
  Table A; Target 43267; HLA-B*51:01; MAGEB2; ENSG00000099399; CTA
VPSSDPPRF

SEQ ID NO: 43268 - protein, 9 aa, Homo sapiens
  Table A; Target 43268; HLA-B*55:01; MAGEB2; ENSG00000099399; CTA
VPSSDPPRF

SEQ ID NO: 43269 - protein, 9 aa, Homo sapiens
  Table A; Target 43269; HLA-C*03:03; MAGEB2; ENSG00000099399; CTA
VPSSDPPRF

SEQ ID NO: 43270 - protein, 9 aa, Homo sapiens
  Table A; Target 43270; HLA-C*05:01; MAGEB2; ENSG00000099399; CTA
VPSSDPPRF

SEQ ID NO: 43271 - protein, 9 aa, Homo sapiens
  Table A; Target 43271; HLA-C*07:02; MAGEB2; ENSG00000099399; CTA
VPSSDPPRF

SEQ ID NO: 43272 - protein, 9 aa, Homo sapiens
  Table A; Target 43272; HLA-C*16:01; MAGEB2; ENSG00000099399; CTA
VPSSDPPRF

SEQ ID NO: 43273 - protein, 9 aa, Homo sapiens
  Table A; Target 43273; HLA-C*16:02; MAGEB2; ENSG00000099399; CTA
VPSSDPPRF

SEQ ID NO: 43274 - protein, 11 aa, Homo sapiens
  Table A; Target 43274; HLA-B*35:01; MAGEB2; ENSG00000099399; CTA
VPSSDPPRFQF

SEQ ID NO: 43275 - protein, 8 aa, Homo sapiens
  Table A; Target 43275; HLA-C*16:01; MAGEB2; ENSG00000099399; CTA
VSSTKSKK

SEQ ID NO: 43276 - protein, 8 aa, Homo sapiens
  Table A; Target 43276; HLA-C*06:02; MAGEB2; ENSG00000099399; CTA
VTKGEMLK

SEQ ID NO: 43277 - protein, 9 aa, Homo sapiens
  Table A; Target 43277; HLA-A*02:03; MAGEB2; ENSG00000099399; CTA
VTKGEMLKI

SEQ ID NO: 43278 - protein, 9 aa, Homo sapiens
  Table A; Target 43278; HLA-B*13:02; MAGEB2; ENSG00000099399; CTA
VTKGEMLKI

SEQ ID NO: 43279 - protein, 9 aa, Homo sapiens
  Table A; Target 43279; HLA-B*40:02; MAGEB2; ENSG00000099399; CTA
VTKGEMLKI

SEQ ID NO: 43280 - protein, 9 aa, Homo sapiens
  Table A; Target 43280; HLA-C*06:02; MAGEB2; ENSG00000099399; CTA
VTKGEMLKI

SEQ ID NO: 43281 - protein, 9 aa, Homo sapiens
  Table A; Target 43281; HLA-A*03:01; MAGEB2; ENSG00000099399; CTA
VVFGLELNK

SEQ ID NO: 43282 - protein, 9 aa, Homo sapiens
  Table A; Target 43282; HLA-A*03:02; MAGEB2; ENSG00000099399; CTA
VVFGLELNK

SEQ ID NO: 43283 - protein, 9 aa, Homo sapiens
  Table A; Target 43283; HLA-A*11:01; MAGEB2; ENSG00000099399; CTA
VVFGLELNK

SEQ ID NO: 43284 - protein, 9 aa, Homo sapiens
  Table A; Target 43284; HLA-A*29:02; MAGEB2; ENSG00000099399; CTA
VVFGLELNK

SEQ ID NO: 43285 - protein, 9 aa, Homo sapiens
  Table A; Target 43285; HLA-B*27:02; MAGEB2; ENSG00000099399; CTA
VVFGLELNK

SEQ ID NO: 43286 - protein, 9 aa, Homo sapiens
  Table A; Target 43286; HLA-B*27:05; MAGEB2; ENSG00000099399; CTA
VVFGLELNK

SEQ ID NO: 43287 - protein, 10 aa, Homo sapiens
  Table A; Target 43287; HLA-A*02:01; MAGEB2; ENSG00000099399; CTA
VVFGLELNKV

SEQ ID NO: 43288 - protein, 10 aa, Homo sapiens
  Table A; Target 43288; HLA-A*02:03; MAGEB2; ENSG00000099399; CTA
VVFGLELNKV

SEQ ID NO: 43289 - protein, 10 aa, Homo sapiens
  Table A; Target 43289; HLA-A*02:04; MAGEB2; ENSG00000099399; CTA
VVFGLELNKV

SEQ ID NO: 43290 - protein, 10 aa, Homo sapiens
  Table A; Target 43290; HLA-A*02:07; MAGEB2; ENSG00000099399; CTA
VVFGLELNKV

SEQ ID NO: 43291 - protein, 10 aa, Homo sapiens
  Table A; Target 43291; HLA-A*68:02; MAGEB2; ENSG00000099399; CTA
VVFGLELNKV

SEQ ID NO: 43292 - protein, 10 aa, Homo sapiens
  Table A; Target 43292; HLA-C*02:02; MAGEB2; ENSG00000099399; CTA
VVFGLELNKV

SEQ ID NO: 43293 - protein, 9 aa, Homo sapiens
  Table A; Target 43293; HLA-A*02:01; MAGEB2; ENSG00000099399; CTA
VYDGEEHSV

SEQ ID NO: 43294 - protein, 9 aa, Homo sapiens
  Table A; Target 43294; HLA-A*02:07; MAGEB2; ENSG00000099399; CTA
VYDGEEHSV

SEQ ID NO: 43295 - protein, 9 aa, Homo sapiens
  Table A; Target 43295; HLA-A*23:01; MAGEB2; ENSG00000099399; CTA
VYDGEEHSV

SEQ ID NO: 43296 - protein, 9 aa, Homo sapiens
  Table A; Target 43296; HLA-A*24:02; MAGEB2; ENSG00000099399; CTA
VYDGEEHSV

SEQ ID NO: 43297 - protein, 9 aa, Homo sapiens
  Table A; Target 43297; HLA-A*32:01; MAGEB2; ENSG00000099399; CTA
VYDGEEHSV

SEQ ID NO: 43298 - protein, 9 aa, Homo sapiens
  Table A; Target 43298; HLA-B*35:01; MAGEB2; ENSG00000099399; CTA
VYDGEEHSV

SEQ ID NO: 43299 - protein, 9 aa, Homo sapiens
  Table A; Target 43299; HLA-B*35:03; MAGEB2; ENSG00000099399; CTA
VYDGEEHSV

SEQ ID NO: 43300 - protein, 9 aa, Homo sapiens
  Table A; Target 43300; HLA-B*38:01; MAGEB2; ENSG00000099399; CTA
VYDGEEHSV

SEQ ID NO: 43301 - protein, 9 aa, Homo sapiens
  Table A; Target 43301; HLA-B*39:01; MAGEB2; ENSG00000099399; CTA
VYDGEEHSV

SEQ ID NO: 43302 - protein, 9 aa, Homo sapiens
  Table A; Target 43302; HLA-B*55:01; MAGEB2; ENSG00000099399; CTA
VYDGEEHSV

SEQ ID NO: 43303 - protein, 9 aa, Homo sapiens
  Table A; Target 43303; HLA-C*03:04; MAGEB2; ENSG00000099399; CTA
VYDGEEHSV

SEQ ID NO: 43304 - protein, 9 aa, Homo sapiens
  Table A; Target 43304; HLA-C*04:01; MAGEB2; ENSG00000099399; CTA
VYDGEEHSV

SEQ ID NO: 43305 - protein, 9 aa, Homo sapiens
  Table A; Target 43305; HLA-C*05:01; MAGEB2; ENSG00000099399; CTA
VYDGEEHSV

SEQ ID NO: 43306 - protein, 9 aa, Homo sapiens
  Table A; Target 43306; HLA-C*07:04; MAGEB2; ENSG00000099399; CTA
VYDGEEHSV

SEQ ID NO: 43307 - protein, 9 aa, Homo sapiens
  Table A; Target 43307; HLA-C*14:02; MAGEB2; ENSG00000099399; CTA
VYDGEEHSV

SEQ ID NO: 43308 - protein, 9 aa, Homo sapiens
  Table A; Target 43308; HLA-C*16:02; MAGEB2; ENSG00000099399; CTA
VYDGEEHSV

SEQ ID NO: 43309 - protein, 10 aa, Homo sapiens
  Table A; Target 43309; HLA-A*23:01; MAGEB2; ENSG00000099399; CTA
VYDGEEHSVF

SEQ ID NO: 43310 - protein, 10 aa, Homo sapiens
  Table A; Target 43310; HLA-A*24:02; MAGEB2; ENSG00000099399; CTA
VYDGEEHSVF

SEQ ID NO: 43311 - protein, 10 aa, Homo sapiens
  Table A; Target 43311; HLA-B*35:01; MAGEB2; ENSG00000099399; CTA
VYDGEEHSVF

SEQ ID NO: 43312 - protein, 10 aa, Homo sapiens
  Table A; Target 43312; HLA-B*35:03; MAGEB2; ENSG00000099399; CTA
VYDGEEHSVF

SEQ ID NO: 43313 - protein, 10 aa, Homo sapiens
  Table A; Target 43313; HLA-B*38:01; MAGEB2; ENSG00000099399; CTA
VYDGEEHSVF

SEQ ID NO: 43314 - protein, 10 aa, Homo sapiens
  Table A; Target 43314; HLA-B*55:01; MAGEB2; ENSG00000099399; CTA
VYDGEEHSVF

SEQ ID NO: 43315 - protein, 10 aa, Homo sapiens
  Table A; Target 43315; HLA-C*04:01; MAGEB2; ENSG00000099399; CTA
VYDGEEHSVF

SEQ ID NO: 43316 - protein, 10 aa, Homo sapiens
  Table A; Target 43316; HLA-C*05:01; MAGEB2; ENSG00000099399; CTA
VYDGEEHSVF

SEQ ID NO: 43317 - protein, 9 aa, Homo sapiens
  Table A; Target 43317; HLA-B*49:01; MAGEB2; ENSG00000099399; CTA
WEFLNMLGV

SEQ ID NO: 43318 - protein, 9 aa, Homo sapiens
  Table A; Target 43318; HLA-A*01:01; MAGEB2; ENSG00000099399; CTA
YAETSKMKV

SEQ ID NO: 43319 - protein, 9 aa, Homo sapiens
  Table A; Target 43319; HLA-B*51:01; MAGEB2; ENSG00000099399; CTA
YAETSKMKV

SEQ ID NO: 43320 - protein, 9 aa, Homo sapiens
  Table A; Target 43320; HLA-C*05:01; MAGEB2; ENSG00000099399; CTA
YAETSKMKV

SEQ ID NO: 43321 - protein, 9 aa, Homo sapiens
  Table A; Target 43321; HLA-C*16:02; MAGEB2; ENSG00000099399; CTA
YAETSKMKV

SEQ ID NO: 43322 - protein, 8 aa, Homo sapiens
  Table A; Target 43322; HLA-B*37:01; MAGEB2; ENSG00000099399; CTA
YDGEEHSV

SEQ ID NO: 43323 - protein, 8 aa, Homo sapiens
  Table A; Target 43323; HLA-B*40:02; MAGEB2; ENSG00000099399; CTA
YDGEEHSV

SEQ ID NO: 43324 - protein, 8 aa, Homo sapiens
  Table A; Target 43324; HLA-C*06:02; MAGEB2; ENSG00000099399; CTA
YDGEEHSV

SEQ ID NO: 43325 - protein, 8 aa, Homo sapiens
  Table A; Target 43325; HLA-C*07:01; MAGEB2; ENSG00000099399; CTA
YDGEEHSV

SEQ ID NO: 43326 - protein, 8 aa, Homo sapiens
  Table A; Target 43326; HLA-C*07:04; MAGEB2; ENSG00000099399; CTA
YDGEEHSV

SEQ ID NO: 43327 - protein, 8 aa, Homo sapiens
  Table A; Target 43327; HLA-C*12:03; MAGEB2; ENSG00000099399; CTA
YDGEEHSV

SEQ ID NO: 43328 - protein, 8 aa, Homo sapiens
  Table A; Target 43328; HLA-C*16:02; MAGEB2; ENSG00000099399; CTA
YDGEEHSV

SEQ ID NO: 43329 - protein, 9 aa, Homo sapiens
  Table A; Target 43329; HLA-B*18:01; MAGEB2; ENSG00000099399; CTA
YDGEEHSVF

SEQ ID NO: 43330 - protein, 9 aa, Homo sapiens
  Table A; Target 43330; HLA-B*37:01; MAGEB2; ENSG00000099399; CTA
YDGEEHSVF

SEQ ID NO: 43331 - protein, 9 aa, Homo sapiens
  Table A; Target 43331; HLA-B*38:01; MAGEB2; ENSG00000099399; CTA
YDGEEHSVF

SEQ ID NO: 43332 - protein, 9 aa, Homo sapiens
  Table A; Target 43332; HLA-C*12:03; MAGEB2; ENSG00000099399; CTA
YDGEEHSVF

SEQ ID NO: 43333 - protein, 9 aa, Homo sapiens
  Table A; Target 43333; HLA-A*68:02; MAGEB2; ENSG00000099399; CTA
YTFIDKVDL

SEQ ID NO: 43334 - protein, 9 aa, Homo sapiens
  Table A; Target 43334; HLA-C*07:04; MAGEB2; ENSG00000099399; CTA
YTFIDKVDL

SEQ ID NO: 43335 - protein, 9 aa, Homo sapiens
  Table A; Target 43335; HLA-B*44:02; MAGEB2,MAGEB4; ENSG00000099399,ENSG00000120289; CTA,CTA
EEIWEFLNM

SEQ ID NO: 43336 - protein, 9 aa, Homo sapiens
  Table A; Target 43336; HLA-B*44:03; MAGEB2,MAGEB4; ENSG00000099399,ENSG00000120289; CTA,CTA
EEIWEFLNM

SEQ ID NO: 43337 - protein, 9 aa, Homo sapiens
  Table A; Target 43337; HLA-A*02:07; MAGEB2,MAGEB4; ENSG00000099399,ENSG00000120289; CTA,CTA
EIWEFLNML

SEQ ID NO: 43338 - protein, 9 aa, Homo sapiens
  Table A; Target 43338; HLA-A*68:02; MAGEB2,MAGEB4; ENSG00000099399,ENSG00000120289; CTA,CTA
EIWEFLNML

SEQ ID NO: 43339 - protein, 10 aa, Homo sapiens
  Table A; Target 43339; HLA-A*25:01; MAGEB2,MAGEB4; ENSG00000099399,ENSG00000120289; CTA,CTA
ETSKMKVLEF

SEQ ID NO: 43340 - protein, 10 aa, Homo sapiens
  Table A; Target 43340; HLA-A*26:01; MAGEB2,MAGEB4; ENSG00000099399,ENSG00000120289; CTA,CTA
ETSKMKVLEF

SEQ ID NO: 43341 - protein, 9 aa, Homo sapiens
  Table A; Target 43341; HLA-A*02:01; MAGEB2,MAGEB4; ENSG00000099399,ENSG00000120289; CTA,CTA
KVLEFLAKV

SEQ ID NO: 43342 - protein, 9 aa, Homo sapiens
  Table A; Target 43342; HLA-A*02:03; MAGEB2,MAGEB4; ENSG00000099399,ENSG00000120289; CTA,CTA
KVLEFLAKV

SEQ ID NO: 43343 - protein, 9 aa, Homo sapiens
  Table A; Target 43343; HLA-A*02:04; MAGEB2,MAGEB4; ENSG00000099399,ENSG00000120289; CTA,CTA
KVLEFLAKV

SEQ ID NO: 43344 - protein, 9 aa, Homo sapiens
  Table A; Target 43344; HLA-A*02:07; MAGEB2,MAGEB4; ENSG00000099399,ENSG00000120289; CTA,CTA
KVLEFLAKV

SEQ ID NO: 43345 - protein, 9 aa, Homo sapiens
  Table A; Target 43345; HLA-A*31:01; MAGEB2,MAGEB4; ENSG00000099399,ENSG00000120289; CTA,CTA
KVLEFLAKV

SEQ ID NO: 43346 - protein, 9 aa, Homo sapiens
  Table A; Target 43346; HLA-A*68:02; MAGEB2,MAGEB4; ENSG00000099399,ENSG00000120289; CTA,CTA
KVLEFLAKV

SEQ ID NO: 43347 - protein, 9 aa, Homo sapiens
  Table A; Target 43347; HLA-C*02:02; MAGEB2,MAGEB4; ENSG00000099399,ENSG00000120289; CTA,CTA
KVLEFLAKV

SEQ ID NO: 43348 - protein, 9 aa, Homo sapiens
  Table A; Target 43348; HLA-A*29:02; MAGEB2,MAGEB4; ENSG00000099399,ENSG00000120289; CTA,CTA
LVQFLLYKY

SEQ ID NO: 43349 - protein, 9 aa, Homo sapiens
  Table A; Target 43349; HLA-A*30:02; MAGEB2,MAGEB4; ENSG00000099399,ENSG00000120289; CTA,CTA
LVQFLLYKY

SEQ ID NO: 43350 - protein, 8 aa, Homo sapiens
  Table A; Target 43350; HLA-B*15:03; MAGEB2,MAGEB4; ENSG00000099399,ENSG00000120289; CTA,CTA
SKMKVLEF

SEQ ID NO: 43351 - protein, 9 aa, Homo sapiens
  Table A; Target 43351; HLA-B*08:01; MAGEB2,MAGEB4; ENSG00000099399,ENSG00000120289; CTA,CTA
TSKMKVLEF

SEQ ID NO: 43352 - protein, 8 aa, Homo sapiens
  Table A; Target 43352; HLA-B*15:01; MAGEB2,MAGEB4; ENSG00000099399,ENSG00000120289; CTA,CTA
VQFLLYKY

SEQ ID NO: 43353 - protein, 8 aa, Homo sapiens
  Table A; Target 43353; HLA-B*15:03; MAGEB2,MAGEB4; ENSG00000099399,ENSG00000120289; CTA,CTA
VQFLLYKY

SEQ ID NO: 43354 - protein, 8 aa, Homo sapiens
  Table A; Target 43354; HLA-B*18:01; MAGEB2,MAGEB4; ENSG00000099399,ENSG00000120289; CTA,CTA
VQFLLYKY

SEQ ID NO: 43355 - protein, 9 aa, Homo sapiens
  Table A; Target 43355; HLA-C*12:03; MAGEB4; ENSG00000120289; CTA
AAAAMSCTG

SEQ ID NO: 43356 - protein, 9 aa, Homo sapiens
  Table A; Target 43356; HLA-B*07:02; MAGEB4; ENSG00000120289; CTA
AARRGTTAM

SEQ ID NO: 43357 - protein, 9 aa, Homo sapiens
  Table A; Target 43357; HLA-B*46:01; MAGEB4; ENSG00000120289; CTA
AARRGTTAM

SEQ ID NO: 43358 - protein, 9 aa, Homo sapiens
  Table A; Target 43358; HLA-C*03:04; MAGEB4; ENSG00000120289; CTA
AARRGTTAM

SEQ ID NO: 43359 - protein, 9 aa, Homo sapiens
  Table A; Target 43359; HLA-C*07:02; MAGEB4; ENSG00000120289; CTA
AARRGTTAM

SEQ ID NO: 43360 - protein, 9 aa, Homo sapiens
  Table A; Target 43360; HLA-B*37:01; MAGEB4; ENSG00000120289; CTA
AEMLKIISK

SEQ ID NO: 43361 - protein, 9 aa, Homo sapiens
  Table A; Target 43361; HLA-B*40:02; MAGEB4; ENSG00000120289; CTA
AEMLKIISK

SEQ ID NO: 43362 - protein, 9 aa, Homo sapiens
  Table A; Target 43362; HLA-B*44:02; MAGEB4; ENSG00000120289; CTA
AEMLKIISK

SEQ ID NO: 43363 - protein, 9 aa, Homo sapiens
  Table A; Target 43363; HLA-B*44:03; MAGEB4; ENSG00000120289; CTA
AEMLKIISK

SEQ ID NO: 43364 - protein, 9 aa, Homo sapiens
  Table A; Target 43364; HLA-B*49:01; MAGEB4; ENSG00000120289; CTA
AEMLKIISK

SEQ ID NO: 43365 - protein, 11 aa, Homo sapiens
  Table A; Target 43365; HLA-B*44:02; MAGEB4; ENSG00000120289; CTA
AEMLKIISKKY

SEQ ID NO: 43366 - protein, 11 aa, Homo sapiens
  Table A; Target 43366; HLA-B*44:03; MAGEB4; ENSG00000120289; CTA
AEMLKIISKKY

SEQ ID NO: 43367 - protein, 9 aa, Homo sapiens
  Table A; Target 43367; HLA-A*32:01; MAGEB4; ENSG00000120289; CTA
AGARPRVAA

SEQ ID NO: 43368 - protein, 9 aa, Homo sapiens
  Table A; Target 43368; HLA-B*54:01; MAGEB4; ENSG00000120289; CTA
AGARPRVAA

SEQ ID NO: 43369 - protein, 9 aa, Homo sapiens
  Table A; Target 43369; HLA-B*56:01; MAGEB4; ENSG00000120289; CTA
AGARPRVAA

SEQ ID NO: 43370 - protein, 9 aa, Homo sapiens
  Table A; Target 43370; HLA-C*16:01; MAGEB4; ENSG00000120289; CTA
AGARPRVAA

SEQ ID NO: 43371 - protein, 11 aa, Homo sapiens
  Table A; Target 43371; HLA-B*15:03; MAGEB4; ENSG00000120289; CTA
AKVNDTTPNNF

SEQ ID NO: 43372 - protein, 9 aa, Homo sapiens
  Table A; Target 43372; HLA-A*02:03; MAGEB4; ENSG00000120289; CTA
ALKEVNPTT

SEQ ID NO: 43373 - protein, 9 aa, Homo sapiens
  Table A; Target 43373; HLA-A*32:01; MAGEB4; ENSG00000120289; CTA
ALKEVNPTT

SEQ ID NO: 43374 - protein, 9 aa, Homo sapiens
  Table A; Target 43374; HLA-B*55:01; MAGEB4; ENSG00000120289; CTA
ALKEVNPTT

SEQ ID NO: 43375 - protein, 9 aa, Homo sapiens
  Table A; Target 43375; HLA-C*16:02; MAGEB4; ENSG00000120289; CTA
ALKEVNPTT

SEQ ID NO: 43376 - protein, 10 aa, Homo sapiens
  Table A; Target 43376; HLA-A*02:03; MAGEB4; ENSG00000120289; CTA
ALKEVNPTTH

SEQ ID NO: 43377 - protein, 10 aa, Homo sapiens
  Table A; Target 43377; HLA-A*03:01; MAGEB4; ENSG00000120289; CTA
ALKEVNPTTH

SEQ ID NO: 43378 - protein, 10 aa, Homo sapiens
  Table A; Target 43378; HLA-B*15:01; MAGEB4; ENSG00000120289; CTA
ALKEVNPTTH

SEQ ID NO: 43379 - protein, 10 aa, Homo sapiens
  Table A; Target 43379; HLA-B*46:01; MAGEB4; ENSG00000120289; CTA
ALKEVNPTTH

SEQ ID NO: 43380 - protein, 8 aa, Homo sapiens
  Table A; Target 43380; HLA-A*31:01; MAGEB4; ENSG00000120289; CTA
AMTSAYSR

SEQ ID NO: 43381 - protein, 10 aa, Homo sapiens
  Table A; Target 43381; HLA-C*06:02; MAGEB4; ENSG00000120289; CTA
ARRGTTAMTS

SEQ ID NO: 43382 - protein, 9 aa, Homo sapiens
  Table A; Target 43382; HLA-B*13:02; MAGEB4; ENSG00000120289; CTA
ASSSLAFGI

SEQ ID NO: 43383 - protein, 9 aa, Homo sapiens
  Table A; Target 43383; HLA-A*32:01; MAGEB4; ENSG00000120289; CTA
ASTSTERSL

SEQ ID NO: 43384 - protein, 9 aa, Homo sapiens
  Table A; Target 43384; HLA-B*58:01; MAGEB4; ENSG00000120289; CTA
ASTSTERSL

SEQ ID NO: 43385 - protein, 9 aa, Homo sapiens
  Table A; Target 43385; HLA-C*01:02; MAGEB4; ENSG00000120289; CTA
ASTSTERSL

SEQ ID NO: 43386 - protein, 9 aa, Homo sapiens
  Table A; Target 43386; HLA-C*03:03; MAGEB4; ENSG00000120289; CTA
ASTSTERSL

SEQ ID NO: 43387 - protein, 9 aa, Homo sapiens
  Table A; Target 43387; HLA-C*03:04; MAGEB4; ENSG00000120289; CTA
ASTSTERSL

SEQ ID NO: 43388 - protein, 9 aa, Homo sapiens
  Table A; Target 43388; HLA-C*14:02; MAGEB4; ENSG00000120289; CTA
ASTSTERSL

SEQ ID NO: 43389 - protein, 9 aa, Homo sapiens
  Table A; Target 43389; HLA-C*16:01; MAGEB4; ENSG00000120289; CTA
ASTSTERSL

SEQ ID NO: 43390 - protein, 9 aa, Homo sapiens
  Table A; Target 43390; HLA-C*16:02; MAGEB4; ENSG00000120289; CTA
ASTSTERSL

SEQ ID NO: 43391 - protein, 10 aa, Homo sapiens
  Table A; Target 43391; HLA-A*03:01; MAGEB4; ENSG00000120289; CTA
ATSSSSSQPM

SEQ ID NO: 43392 - protein, 10 aa, Homo sapiens
  Table A; Target 43392; HLA-A*03:02; MAGEB4; ENSG00000120289; CTA
ATSSSSSQPM

SEQ ID NO: 43393 - protein, 10 aa, Homo sapiens
  Table A; Target 43393; HLA-A*11:01; MAGEB4; ENSG00000120289; CTA
ATSSSSSQPM

SEQ ID NO: 43394 - protein, 10 aa, Homo sapiens
  Table A; Target 43394; HLA-A*30:02; MAGEB4; ENSG00000120289; CTA
ATSSSSSQPM

SEQ ID NO: 43395 - protein, 10 aa, Homo sapiens
  Table A; Target 43395; HLA-A*31:01; MAGEB4; ENSG00000120289; CTA
ATSSSSSQPM

SEQ ID NO: 43396 - protein, 10 aa, Homo sapiens
  Table A; Target 43396; HLA-A*68:01; MAGEB4; ENSG00000120289; CTA
ATSSSSSQPM

SEQ ID NO: 43397 - protein, 10 aa, Homo sapiens
  Table A; Target 43397; HLA-B*07:02; MAGEB4; ENSG00000120289; CTA
ATSSSSSQPM

SEQ ID NO: 43398 - protein, 10 aa, Homo sapiens
  Table A; Target 43398; HLA-B*27:05; MAGEB4; ENSG00000120289; CTA
ATSSSSSQPM

SEQ ID NO: 43399 - protein, 10 aa, Homo sapiens
  Table A; Target 43399; HLA-B*39:01; MAGEB4; ENSG00000120289; CTA
ATSSSSSQPM

SEQ ID NO: 43400 - protein, 10 aa, Homo sapiens
  Table A; Target 43400; HLA-B*40:02; MAGEB4; ENSG00000120289; CTA
ATSSSSSQPM

SEQ ID NO: 43401 - protein, 10 aa, Homo sapiens
  Table A; Target 43401; HLA-C*01:02; MAGEB4; ENSG00000120289; CTA
ATSSSSSQPM

SEQ ID NO: 43402 - protein, 10 aa, Homo sapiens
  Table A; Target 43402; HLA-C*03:03; MAGEB4; ENSG00000120289; CTA
ATSSSSSQPM

SEQ ID NO: 43403 - protein, 10 aa, Homo sapiens
  Table A; Target 43403; HLA-C*03:04; MAGEB4; ENSG00000120289; CTA
ATSSSSSQPM

SEQ ID NO: 43404 - protein, 10 aa, Homo sapiens
  Table A; Target 43404; HLA-C*04:01; MAGEB4; ENSG00000120289; CTA
ATSSSSSQPM

SEQ ID NO: 43405 - protein, 10 aa, Homo sapiens
  Table A; Target 43405; HLA-C*06:02; MAGEB4; ENSG00000120289; CTA
ATSSSSSQPM

SEQ ID NO: 43406 - protein, 10 aa, Homo sapiens
  Table A; Target 43406; HLA-C*07:01; MAGEB4; ENSG00000120289; CTA
ATSSSSSQPM

SEQ ID NO: 43407 - protein, 10 aa, Homo sapiens
  Table A; Target 43407; HLA-C*07:02; MAGEB4; ENSG00000120289; CTA
ATSSSSSQPM

SEQ ID NO: 43408 - protein, 10 aa, Homo sapiens
  Table A; Target 43408; HLA-C*07:04; MAGEB4; ENSG00000120289; CTA
ATSSSSSQPM

SEQ ID NO: 43409 - protein, 10 aa, Homo sapiens
  Table A; Target 43409; HLA-C*07:06; MAGEB4; ENSG00000120289; CTA
ATSSSSSQPM

SEQ ID NO: 43410 - protein, 10 aa, Homo sapiens
  Table A; Target 43410; HLA-C*14:02; MAGEB4; ENSG00000120289; CTA
ATSSSSSQPM

SEQ ID NO: 43411 - protein, 11 aa, Homo sapiens
  Table A; Target 43411; HLA-A*33:01; MAGEB4; ENSG00000120289; CTA
DEEERAGARPR

SEQ ID NO: 43412 - protein, 8 aa, Homo sapiens
  Table A; Target 43412; HLA-B*08:01; MAGEB4; ENSG00000120289; CTA
DGKRHLIF

SEQ ID NO: 43413 - protein, 9 aa, Homo sapiens
  Table A; Target 43413; HLA-B*08:01; MAGEB4; ENSG00000120289; CTA
DSLTRKTKM

SEQ ID NO: 43414 - protein, 9 aa, Homo sapiens
  Table A; Target 43414; HLA-A*01:01; MAGEB4; ENSG00000120289; CTA
DTASSSLAF

SEQ ID NO: 43415 - protein, 9 aa, Homo sapiens
  Table A; Target 43415; HLA-A*25:01; MAGEB4; ENSG00000120289; CTA
DTASSSLAF

SEQ ID NO: 43416 - protein, 9 aa, Homo sapiens
  Table A; Target 43416; HLA-A*26:01; MAGEB4; ENSG00000120289; CTA
DTASSSLAF

SEQ ID NO: 43417 - protein, 9 aa, Homo sapiens
  Table A; Target 43417; HLA-A*33:01; MAGEB4; ENSG00000120289; CTA
DTASSSLAF

SEQ ID NO: 43418 - protein, 9 aa, Homo sapiens
  Table A; Target 43418; HLA-A*33:03; MAGEB4; ENSG00000120289; CTA
DTASSSLAF

SEQ ID NO: 43419 - protein, 9 aa, Homo sapiens
  Table A; Target 43419; HLA-B*18:01; MAGEB4; ENSG00000120289; CTA
DTASSSLAF

SEQ ID NO: 43420 - protein, 9 aa, Homo sapiens
  Table A; Target 43420; HLA-C*07:04; MAGEB4; ENSG00000120289; CTA
DTASSSLAF

SEQ ID NO: 43421 - protein, 9 aa, Homo sapiens
  Table A; Target 43421; HLA-C*07:06; MAGEB4; ENSG00000120289; CTA
DTASSSLAF

SEQ ID NO: 43422 - protein, 11 aa, Homo sapiens
  Table A; Target 43422; HLA-A*68:01; MAGEB4; ENSG00000120289; CTA
DTASSSLAFGI

SEQ ID NO: 43423 - protein, 10 aa, Homo sapiens
  Table A; Target 43423; HLA-A*25:01; MAGEB4; ENSG00000120289; CTA
DTTPNNFPLL

SEQ ID NO: 43424 - protein, 10 aa, Homo sapiens
  Table A; Target 43424; HLA-A*68:02; MAGEB4; ENSG00000120289; CTA
DTTPNNFPLL

SEQ ID NO: 43425 - protein, 11 aa, Homo sapiens
  Table A; Target 43425; HLA-A*01:01; MAGEB4; ENSG00000120289; CTA
DTTPNNFPLLY

SEQ ID NO: 43426 - protein, 11 aa, Homo sapiens
  Table A; Target 43426; HLA-A*26:01; MAGEB4; ENSG00000120289; CTA
DTTPNNFPLLY

SEQ ID NO: 43427 - protein, 11 aa, Homo sapiens
  Table A; Target 43427; HLA-A*29:02; MAGEB4; ENSG00000120289; CTA
DTTPNNFPLLY

SEQ ID NO: 43428 - protein, 9 aa, Homo sapiens
  Table A; Target 43428; HLA-A*33:03; MAGEB4; ENSG00000120289; CTA
EERAGARPR

SEQ ID NO: 43429 - protein, 10 aa, Homo sapiens
  Table A; Target 43429; HLA-B*49:01; MAGEB4; ENSG00000120289; CTA
EESPSSSSSV

SEQ ID NO: 43430 - protein, 11 aa, Homo sapiens
  Table A; Target 43430; HLA-A*30:01; MAGEB4; ENSG00000120289; CTA
EESPSSSSSVL

SEQ ID NO: 43431 - protein, 11 aa, Homo sapiens
  Table A; Target 43431; HLA-B*38:01; MAGEB4; ENSG00000120289; CTA
EESPSSSSSVL

SEQ ID NO: 43432 - protein, 11 aa, Homo sapiens
  Table A; Target 43432; HLA-B*39:01; MAGEB4; ENSG00000120289; CTA
EESPSSSSSVL

SEQ ID NO: 43433 - protein, 11 aa, Homo sapiens
  Table A; Target 43433; HLA-B*40:01; MAGEB4; ENSG00000120289; CTA
EESPSSSSSVL

SEQ ID NO: 43434 - protein, 11 aa, Homo sapiens
  Table A; Target 43434; HLA-B*40:02; MAGEB4; ENSG00000120289; CTA
EESPSSSSSVL

SEQ ID NO: 43435 - protein, 11 aa, Homo sapiens
  Table A; Target 43435; HLA-B*44:02; MAGEB4; ENSG00000120289; CTA
EESPSSSSSVL

SEQ ID NO: 43436 - protein, 11 aa, Homo sapiens
  Table A; Target 43436; HLA-B*44:03; MAGEB4; ENSG00000120289; CTA
EESPSSSSSVL

SEQ ID NO: 43437 - protein, 11 aa, Homo sapiens
  Table A; Target 43437; HLA-C*16:04; MAGEB4; ENSG00000120289; CTA
EESPSSSSSVL

SEQ ID NO: 43438 - protein, 9 aa, Homo sapiens
  Table A; Target 43438; HLA-A*29:02; MAGEB4; ENSG00000120289; CTA
EFLNMLGIY

SEQ ID NO: 43439 - protein, 10 aa, Homo sapiens
  Table A; Target 43439; HLA-A*68:02; MAGEB4; ENSG00000120289; CTA
EHFPEIFRKV

SEQ ID NO: 43440 - protein, 9 aa, Homo sapiens
  Table A; Target 43440; HLA-A*33:01; MAGEB4; ENSG00000120289; CTA
EIFRKVSQR

SEQ ID NO: 43441 - protein, 9 aa, Homo sapiens
  Table A; Target 43441; HLA-A*33:03; MAGEB4; ENSG00000120289; CTA
EIFRKVSQR

SEQ ID NO: 43442 - protein, 9 aa, Homo sapiens
  Table A; Target 43442; HLA-A*68:01; MAGEB4; ENSG00000120289; CTA
EIFRKVSQR

SEQ ID NO: 43443 - protein, 8 aa, Homo sapiens
  Table A; Target 43443; HLA-A*33:01; MAGEB4; ENSG00000120289; CTA
EMLKIISK

SEQ ID NO: 43444 - protein, 8 aa, Homo sapiens
  Table A; Target 43444; HLA-A*33:03; MAGEB4; ENSG00000120289; CTA
EMLKIISK

SEQ ID NO: 43445 - protein, 9 aa, Homo sapiens
  Table A; Target 43445; HLA-A*33:01; MAGEB4; ENSG00000120289; CTA
EMLKIISKK

SEQ ID NO: 43446 - protein, 9 aa, Homo sapiens
  Table A; Target 43446; HLA-A*33:03; MAGEB4; ENSG00000120289; CTA
EMLKIISKK

SEQ ID NO: 43447 - protein, 11 aa, Homo sapiens
  Table A; Target 43447; HLA-B*35:01; MAGEB4; ENSG00000120289; CTA
EPPTTSAAAAM

SEQ ID NO: 43448 - protein, 11 aa, Homo sapiens
  Table A; Target 43448; HLA-B*35:03; MAGEB4; ENSG00000120289; CTA
EPPTTSAAAAM

SEQ ID NO: 43449 - protein, 11 aa, Homo sapiens
  Table A; Target 43449; HLA-B*54:01; MAGEB4; ENSG00000120289; CTA
EPQREPPTTSA

SEQ ID NO: 43450 - protein, 11 aa, Homo sapiens
  Table A; Target 43450; HLA-B*56:01; MAGEB4; ENSG00000120289; CTA
EPQREPPTTSA

SEQ ID NO: 43451 - protein, 8 aa, Homo sapiens
  Table A; Target 43451; HLA-B*07:02; MAGEB4; ENSG00000120289; CTA
EPTTKAEM

SEQ ID NO: 43452 - protein, 8 aa, Homo sapiens
  Table A; Target 43452; HLA-B*08:01; MAGEB4; ENSG00000120289; CTA
EPTTKAEM

SEQ ID NO: 43453 - protein, 8 aa, Homo sapiens
  Table A; Target 43453; HLA-B*35:03; MAGEB4; ENSG00000120289; CTA
EPTTKAEM

SEQ ID NO: 43454 - protein, 8 aa, Homo sapiens
  Table A; Target 43454; HLA-B*55:01; MAGEB4; ENSG00000120289; CTA
EPTTKAEM

SEQ ID NO: 43455 - protein, 8 aa, Homo sapiens
  Table A; Target 43455; HLA-C*07:02; MAGEB4; ENSG00000120289; CTA
EPTTKAEM

SEQ ID NO: 43456 - protein, 9 aa, Homo sapiens
  Table A; Target 43456; HLA-B*07:02; MAGEB4; ENSG00000120289; CTA
EPTTKAEML

SEQ ID NO: 43457 - protein, 9 aa, Homo sapiens
  Table A; Target 43457; HLA-B*08:01; MAGEB4; ENSG00000120289; CTA
EPTTKAEML

SEQ ID NO: 43458 - protein, 9 aa, Homo sapiens
  Table A; Target 43458; HLA-B*35:03; MAGEB4; ENSG00000120289; CTA
EPTTKAEML

SEQ ID NO: 43459 - protein, 9 aa, Homo sapiens
  Table A; Target 43459; HLA-C*07:02; MAGEB4; ENSG00000120289; CTA
EPTTKAEML

SEQ ID NO: 43460 - protein, 9 aa, Homo sapiens
  Table A; Target 43460; HLA-C*01:02; MAGEB4; ENSG00000120289; CTA
ESPSSSSSV

SEQ ID NO: 43461 - protein, 11 aa, Homo sapiens
  Table A; Target 43461; HLA-A*33:01; MAGEB4; ENSG00000120289; CTA
ESPSSSSSVLR

SEQ ID NO: 43462 - protein, 11 aa, Homo sapiens
  Table A; Target 43462; HLA-A*33:03; MAGEB4; ENSG00000120289; CTA
ESPSSSSSVLR

SEQ ID NO: 43463 - protein, 11 aa, Homo sapiens
  Table A; Target 43463; HLA-A*68:01; MAGEB4; ENSG00000120289; CTA
ESPSSSSSVLR

SEQ ID NO: 43464 - protein, 11 aa, Homo sapiens
  Table A; Target 43464; HLA-C*07:06; MAGEB4; ENSG00000120289; CTA
ESPSSSSSVLR

SEQ ID NO: 43465 - protein, 9 aa, Homo sapiens
  Table A; Target 43465; HLA-A*01:01; MAGEB4; ENSG00000120289; CTA
EVNPTTHSY

SEQ ID NO: 43466 - protein, 9 aa, Homo sapiens
  Table A; Target 43466; HLA-A*25:01; MAGEB4; ENSG00000120289; CTA
EVNPTTHSY

SEQ ID NO: 43467 - protein, 9 aa, Homo sapiens
  Table A; Target 43467; HLA-A*26:01; MAGEB4; ENSG00000120289; CTA
EVNPTTHSY

SEQ ID NO: 43468 - protein, 9 aa, Homo sapiens
  Table A; Target 43468; HLA-A*29:02; MAGEB4; ENSG00000120289; CTA
EVNPTTHSY

SEQ ID NO: 43469 - protein, 9 aa, Homo sapiens
  Table A; Target 43469; HLA-A*30:02; MAGEB4; ENSG00000120289; CTA
EVNPTTHSY

SEQ ID NO: 43470 - protein, 9 aa, Homo sapiens
  Table A; Target 43470; HLA-A*32:01; MAGEB4; ENSG00000120289; CTA
EVNPTTHSY

SEQ ID NO: 43471 - protein, 9 aa, Homo sapiens
  Table A; Target 43471; HLA-A*33:01; MAGEB4; ENSG00000120289; CTA
EVNPTTHSY

SEQ ID NO: 43472 - protein, 9 aa, Homo sapiens
  Table A; Target 43472; HLA-A*33:03; MAGEB4; ENSG00000120289; CTA
EVNPTTHSY

SEQ ID NO: 43473 - protein, 9 aa, Homo sapiens
  Table A; Target 43473; HLA-A*68:01; MAGEB4; ENSG00000120289; CTA
EVNPTTHSY

SEQ ID NO: 43474 - protein, 9 aa, Homo sapiens
  Table A; Target 43474; HLA-B*15:01; MAGEB4; ENSG00000120289; CTA
EVNPTTHSY

SEQ ID NO: 43475 - protein, 9 aa, Homo sapiens
  Table A; Target 43475; HLA-B*15:03; MAGEB4; ENSG00000120289; CTA
EVNPTTHSY

SEQ ID NO: 43476 - protein, 9 aa, Homo sapiens
  Table A; Target 43476; HLA-B*18:01; MAGEB4; ENSG00000120289; CTA
EVNPTTHSY

SEQ ID NO: 43477 - protein, 9 aa, Homo sapiens
  Table A; Target 43477; HLA-B*27:02; MAGEB4; ENSG00000120289; CTA
EVNPTTHSY

SEQ ID NO: 43478 - protein, 9 aa, Homo sapiens
  Table A; Target 43478; HLA-B*35:01; MAGEB4; ENSG00000120289; CTA
EVNPTTHSY

SEQ ID NO: 43479 - protein, 9 aa, Homo sapiens
  Table A; Target 43479; HLA-B*39:01; MAGEB4; ENSG00000120289; CTA
EVNPTTHSY

SEQ ID NO: 43480 - protein, 9 aa, Homo sapiens
  Table A; Target 43480; HLA-B*44:02; MAGEB4; ENSG00000120289; CTA
EVNPTTHSY

SEQ ID NO: 43481 - protein, 9 aa, Homo sapiens
  Table A; Target 43481; HLA-B*44:03; MAGEB4; ENSG00000120289; CTA
EVNPTTHSY

SEQ ID NO: 43482 - protein, 9 aa, Homo sapiens
  Table A; Target 43482; HLA-B*46:01; MAGEB4; ENSG00000120289; CTA
EVNPTTHSY

SEQ ID NO: 43483 - protein, 9 aa, Homo sapiens
  Table A; Target 43483; HLA-B*58:01; MAGEB4; ENSG00000120289; CTA
EVNPTTHSY

SEQ ID NO: 43484 - protein, 9 aa, Homo sapiens
  Table A; Target 43484; HLA-C*01:02; MAGEB4; ENSG00000120289; CTA
EVNPTTHSY

SEQ ID NO: 43485 - protein, 9 aa, Homo sapiens
  Table A; Target 43485; HLA-C*02:02; MAGEB4; ENSG00000120289; CTA
EVNPTTHSY

SEQ ID NO: 43486 - protein, 9 aa, Homo sapiens
  Table A; Target 43486; HLA-C*03:03; MAGEB4; ENSG00000120289; CTA
EVNPTTHSY

SEQ ID NO: 43487 - protein, 9 aa, Homo sapiens
  Table A; Target 43487; HLA-C*07:04; MAGEB4; ENSG00000120289; CTA
EVNPTTHSY

SEQ ID NO: 43488 - protein, 9 aa, Homo sapiens
  Table A; Target 43488; HLA-C*07:06; MAGEB4; ENSG00000120289; CTA
EVNPTTHSY

SEQ ID NO: 43489 - protein, 9 aa, Homo sapiens
  Table A; Target 43489; HLA-C*12:03; MAGEB4; ENSG00000120289; CTA
EVNPTTHSY

SEQ ID NO: 43490 - protein, 9 aa, Homo sapiens
  Table A; Target 43490; HLA-C*14:02; MAGEB4; ENSG00000120289; CTA
EVNPTTHSY

SEQ ID NO: 43491 - protein, 9 aa, Homo sapiens
  Table A; Target 43491; HLA-C*16:01; MAGEB4; ENSG00000120289; CTA
EVNPTTHSY

SEQ ID NO: 43492 - protein, 9 aa, Homo sapiens
  Table A; Target 43492; HLA-C*16:02; MAGEB4; ENSG00000120289; CTA
EVNPTTHSY

SEQ ID NO: 43493 - protein, 9 aa, Homo sapiens
  Table A; Target 43493; HLA-C*16:04; MAGEB4; ENSG00000120289; CTA
EVNPTTHSY

SEQ ID NO: 43494 - protein, 10 aa, Homo sapiens
  Table A; Target 43494; HLA-A*25:01; MAGEB4; ENSG00000120289; CTA
EVNPTTHSYI

SEQ ID NO: 43495 - protein, 10 aa, Homo sapiens
  Table A; Target 43495; HLA-A*26:01; MAGEB4; ENSG00000120289; CTA
EVNPTTHSYI

SEQ ID NO: 43496 - protein, 10 aa, Homo sapiens
  Table A; Target 43496; HLA-A*33:03; MAGEB4; ENSG00000120289; CTA
EVNPTTHSYI

SEQ ID NO: 43497 - protein, 10 aa, Homo sapiens
  Table A; Target 43497; HLA-A*68:01; MAGEB4; ENSG00000120289; CTA
EVNPTTHSYI

SEQ ID NO: 43498 - protein, 10 aa, Homo sapiens
  Table A; Target 43498; HLA-A*68:02; MAGEB4; ENSG00000120289; CTA
EVNPTTHSYI

SEQ ID NO: 43499 - protein, 11 aa, Homo sapiens
  Table A; Target 43499; HLA-A*33:01; MAGEB4; ENSG00000120289; CTA
EVNPTTHSYIL

SEQ ID NO: 43500 - protein, 8 aa, Homo sapiens
  Table A; Target 43500; HLA-B*51:01; MAGEB4; ENSG00000120289; CTA
FGLALKEV

SEQ ID NO: 43501 - protein, 8 aa, Homo sapiens
  Table A; Target 43501; HLA-B*51:01; MAGEB4; ENSG00000120289; CTA
FPEIFRKV

SEQ ID NO: 43502 - protein, 8 aa, Homo sapiens
  Table A; Target 43502; HLA-B*54:01; MAGEB4; ENSG00000120289; CTA
FPEIFRKV

SEQ ID NO: 43503 - protein, 8 aa, Homo sapiens
  Table A; Target 43503; HLA-B*54:01; MAGEB4; ENSG00000120289; CTA
FPLLYEEA

SEQ ID NO: 43504 - protein, 8 aa, Homo sapiens
  Table A; Target 43504; HLA-B*56:01; MAGEB4; ENSG00000120289; CTA
FPLLYEEA

SEQ ID NO: 43505 - protein, 9 aa, Homo sapiens
  Table A; Target 43505; HLA-B*35:01; MAGEB4; ENSG00000120289; CTA
FPLLYEEAL

SEQ ID NO: 43506 - protein, 9 aa, Homo sapiens
  Table A; Target 43506; HLA-B*35:03; MAGEB4; ENSG00000120289; CTA
FPLLYEEAL

SEQ ID NO: 43507 - protein, 9 aa, Homo sapiens
  Table A; Target 43507; HLA-B*54:01; MAGEB4; ENSG00000120289; CTA
FPLLYEEAL

SEQ ID NO: 43508 - protein, 9 aa, Homo sapiens
  Table A; Target 43508; HLA-B*55:01; MAGEB4; ENSG00000120289; CTA
FPLLYEEAL

SEQ ID NO: 43509 - protein, 9 aa, Homo sapiens
  Table A; Target 43509; HLA-C*03:03; MAGEB4; ENSG00000120289; CTA
FPLLYEEAL

SEQ ID NO: 43510 - protein, 9 aa, Homo sapiens
  Table A; Target 43510; HLA-A*03:01; MAGEB4; ENSG00000120289; CTA
GARPRVAAR

SEQ ID NO: 43511 - protein, 9 aa, Homo sapiens
  Table A; Target 43511; HLA-A*31:01; MAGEB4; ENSG00000120289; CTA
GARPRVAAR

SEQ ID NO: 43512 - protein, 9 aa, Homo sapiens
  Table A; Target 43512; HLA-A*33:01; MAGEB4; ENSG00000120289; CTA
GARPRVAAR

SEQ ID NO: 43513 - protein, 9 aa, Homo sapiens
  Table A; Target 43513; HLA-A*33:03; MAGEB4; ENSG00000120289; CTA
GARPRVAAR

SEQ ID NO: 43514 - protein, 9 aa, Homo sapiens
  Table A; Target 43514; HLA-A*02:01; MAGEB4; ENSG00000120289; CTA
GLLMPLLSV

SEQ ID NO: 43515 - protein, 9 aa, Homo sapiens
  Table A; Target 43515; HLA-A*02:04; MAGEB4; ENSG00000120289; CTA
GLLMPLLSV

SEQ ID NO: 43516 - protein, 9 aa, Homo sapiens
  Table A; Target 43516; HLA-B*13:02; MAGEB4; ENSG00000120289; CTA
GLLMPLLSV

SEQ ID NO: 43517 - protein, 10 aa, Homo sapiens
  Table A; Target 43517; HLA-B*56:01; MAGEB4; ENSG00000120289; CTA
GPNDGNQSSA

SEQ ID NO: 43518 - protein, 11 aa, Homo sapiens
  Table A; Target 43518; HLA-A*25:01; MAGEB4; ENSG00000120289; CTA
GPNDGNQSSAW

SEQ ID NO: 43519 - protein, 11 aa, Homo sapiens
  Table A; Target 43519; HLA-B*07:02; MAGEB4; ENSG00000120289; CTA
GPNDGNQSSAW

SEQ ID NO: 43520 - protein, 11 aa, Homo sapiens
  Table A; Target 43520; HLA-B*27:02; MAGEB4; ENSG00000120289; CTA
GPNDGNQSSAW

SEQ ID NO: 43521 - protein, 11 aa, Homo sapiens
  Table A; Target 43521; HLA-B*44:03; MAGEB4; ENSG00000120289; CTA
GPNDGNQSSAW

SEQ ID NO: 43522 - protein, 11 aa, Homo sapiens
  Table A; Target 43522; HLA-C*07:02; MAGEB4; ENSG00000120289; CTA
GPNDGNQSSAW

SEQ ID NO: 43523 - protein, 11 aa, Homo sapiens
  Table A; Target 43523; HLA-C*07:06; MAGEB4; ENSG00000120289; CTA
GPNDGNQSSAW

SEQ ID NO: 43524 - protein, 11 aa, Homo sapiens
  Table A; Target 43524; HLA-C*16:04; MAGEB4; ENSG00000120289; CTA
GPNDGNQSSAW

SEQ ID NO: 43525 - protein, 8 aa, Homo sapiens
  Table A; Target 43525; HLA-B*13:02; MAGEB4; ENSG00000120289; CTA
GQTQDLKV

SEQ ID NO: 43526 - protein, 8 aa, Homo sapiens
  Table A; Target 43526; HLA-C*06:02; MAGEB4; ENSG00000120289; CTA
GQTQDLKV

SEQ ID NO: 43527 - protein, 9 aa, Homo sapiens
  Table A; Target 43527; HLA-A*01:01; MAGEB4; ENSG00000120289; CTA
GTTAMTSAY

SEQ ID NO: 43528 - protein, 9 aa, Homo sapiens
  Table A; Target 43528; HLA-A*03:01; MAGEB4; ENSG00000120289; CTA
GTTAMTSAY

SEQ ID NO: 43529 - protein, 9 aa, Homo sapiens
  Table A; Target 43529; HLA-A*03:02; MAGEB4; ENSG00000120289; CTA
GTTAMTSAY

SEQ ID NO: 43530 - protein, 9 aa, Homo sapiens
  Table A; Target 43530; HLA-A*11:01; MAGEB4; ENSG00000120289; CTA
GTTAMTSAY

SEQ ID NO: 43531 - protein, 9 aa, Homo sapiens
  Table A; Target 43531; HLA-A*25:01; MAGEB4; ENSG00000120289; CTA
GTTAMTSAY

SEQ ID NO: 43532 - protein, 9 aa, Homo sapiens
  Table A; Target 43532; HLA-A*26:01; MAGEB4; ENSG00000120289; CTA
GTTAMTSAY

SEQ ID NO: 43533 - protein, 9 aa, Homo sapiens
  Table A; Target 43533; HLA-A*29:02; MAGEB4; ENSG00000120289; CTA
GTTAMTSAY

SEQ ID NO: 43534 - protein, 9 aa, Homo sapiens
  Table A; Target 43534; HLA-A*30:02; MAGEB4; ENSG00000120289; CTA
GTTAMTSAY

SEQ ID NO: 43535 - protein, 9 aa, Homo sapiens
  Table A; Target 43535; HLA-A*32:01; MAGEB4; ENSG00000120289; CTA
GTTAMTSAY

SEQ ID NO: 43536 - protein, 9 aa, Homo sapiens
  Table A; Target 43536; HLA-B*15:01; MAGEB4; ENSG00000120289; CTA
GTTAMTSAY

SEQ ID NO: 43537 - protein, 9 aa, Homo sapiens
  Table A; Target 43537; HLA-B*15:03; MAGEB4; ENSG00000120289; CTA
GTTAMTSAY

SEQ ID NO: 43538 - protein, 9 aa, Homo sapiens
  Table A; Target 43538; HLA-B*18:01; MAGEB4; ENSG00000120289; CTA
GTTAMTSAY

SEQ ID NO: 43539 - protein, 9 aa, Homo sapiens
  Table A; Target 43539; HLA-B*27:02; MAGEB4; ENSG00000120289; CTA
GTTAMTSAY

SEQ ID NO: 43540 - protein, 9 aa, Homo sapiens
  Table A; Target 43540; HLA-B*27:05; MAGEB4; ENSG00000120289; CTA
GTTAMTSAY

SEQ ID NO: 43541 - protein, 9 aa, Homo sapiens
  Table A; Target 43541; HLA-B*35:01; MAGEB4; ENSG00000120289; CTA
GTTAMTSAY

SEQ ID NO: 43542 - protein, 9 aa, Homo sapiens
  Table A; Target 43542; HLA-B*39:01; MAGEB4; ENSG00000120289; CTA
GTTAMTSAY

SEQ ID NO: 43543 - protein, 9 aa, Homo sapiens
  Table A; Target 43543; HLA-B*44:03; MAGEB4; ENSG00000120289; CTA
GTTAMTSAY

SEQ ID NO: 43544 - protein, 9 aa, Homo sapiens
  Table A; Target 43544; HLA-B*46:01; MAGEB4; ENSG00000120289; CTA
GTTAMTSAY

SEQ ID NO: 43545 - protein, 9 aa, Homo sapiens
  Table A; Target 43545; HLA-B*58:01; MAGEB4; ENSG00000120289; CTA
GTTAMTSAY

SEQ ID NO: 43546 - protein, 9 aa, Homo sapiens
  Table A; Target 43546; HLA-C*01:02; MAGEB4; ENSG00000120289; CTA
GTTAMTSAY

SEQ ID NO: 43547 - protein, 9 aa, Homo sapiens
  Table A; Target 43547; HLA-C*02:02; MAGEB4; ENSG00000120289; CTA
GTTAMTSAY

SEQ ID NO: 43548 - protein, 9 aa, Homo sapiens
  Table A; Target 43548; HLA-C*04:01; MAGEB4; ENSG00000120289; CTA
GTTAMTSAY

SEQ ID NO: 43549 - protein, 9 aa, Homo sapiens
  Table A; Target 43549; HLA-C*06:02; MAGEB4; ENSG00000120289; CTA
GTTAMTSAY

SEQ ID NO: 43550 - protein, 9 aa, Homo sapiens
  Table A; Target 43550; HLA-C*07:01; MAGEB4; ENSG00000120289; CTA
GTTAMTSAY

SEQ ID NO: 43551 - protein, 9 aa, Homo sapiens
  Table A; Target 43551; HLA-C*07:04; MAGEB4; ENSG00000120289; CTA
GTTAMTSAY

SEQ ID NO: 43552 - protein, 9 aa, Homo sapiens
  Table A; Target 43552; HLA-C*07:06; MAGEB4; ENSG00000120289; CTA
GTTAMTSAY

SEQ ID NO: 43553 - protein, 9 aa, Homo sapiens
  Table A; Target 43553; HLA-C*12:03; MAGEB4; ENSG00000120289; CTA
GTTAMTSAY

SEQ ID NO: 43554 - protein, 9 aa, Homo sapiens
  Table A; Target 43554; HLA-C*14:02; MAGEB4; ENSG00000120289; CTA
GTTAMTSAY

SEQ ID NO: 43555 - protein, 9 aa, Homo sapiens
  Table A; Target 43555; HLA-C*16:01; MAGEB4; ENSG00000120289; CTA
GTTAMTSAY

SEQ ID NO: 43556 - protein, 9 aa, Homo sapiens
  Table A; Target 43556; HLA-C*16:02; MAGEB4; ENSG00000120289; CTA
GTTAMTSAY

SEQ ID NO: 43557 - protein, 9 aa, Homo sapiens
  Table A; Target 43557; HLA-C*16:04; MAGEB4; ENSG00000120289; CTA
GTTAMTSAY

SEQ ID NO: 43558 - protein, 11 aa, Homo sapiens
  Table A; Target 43558; HLA-A*03:02; MAGEB4; ENSG00000120289; CTA
GTTAMTSAYSR

SEQ ID NO: 43559 - protein, 11 aa, Homo sapiens
  Table A; Target 43559; HLA-A*11:01; MAGEB4; ENSG00000120289; CTA
GTTAMTSAYSR

SEQ ID NO: 43560 - protein, 11 aa, Homo sapiens
  Table A; Target 43560; HLA-A*31:01; MAGEB4; ENSG00000120289; CTA
GTTAMTSAYSR

SEQ ID NO: 43561 - protein, 11 aa, Homo sapiens
  Table A; Target 43561; HLA-A*33:03; MAGEB4; ENSG00000120289; CTA
GTTAMTSAYSR

SEQ ID NO: 43562 - protein, 11 aa, Homo sapiens
  Table A; Target 43562; HLA-A*68:01; MAGEB4; ENSG00000120289; CTA
GTTAMTSAYSR

SEQ ID NO: 43563 - protein, 11 aa, Homo sapiens
  Table A; Target 43563; HLA-B*27:02; MAGEB4; ENSG00000120289; CTA
GTTAMTSAYSR

SEQ ID NO: 43564 - protein, 11 aa, Homo sapiens
  Table A; Target 43564; HLA-C*07:06; MAGEB4; ENSG00000120289; CTA
GTTAMTSAYSR

SEQ ID NO: 43565 - protein, 9 aa, Homo sapiens
  Table A; Target 43565; HLA-A*02:07; MAGEB4; ENSG00000120289; CTA
HFPEIFRKV

SEQ ID NO: 43566 - protein, 8 aa, Homo sapiens
  Table A; Target 43566; HLA-B*08:01; MAGEB4; ENSG00000120289; CTA
HSYILVSM

SEQ ID NO: 43567 - protein, 8 aa, Homo sapiens
  Table A; Target 43567; HLA-B*51:01; MAGEB4; ENSG00000120289; CTA
HSYILVSM

SEQ ID NO: 43568 - protein, 8 aa, Homo sapiens
  Table A; Target 43568; HLA-C*14:02; MAGEB4; ENSG00000120289; CTA
IFLNGNCA

SEQ ID NO: 43569 - protein, 9 aa, Homo sapiens
  Table A; Target 43569; HLA-B*56:01; MAGEB4; ENSG00000120289; CTA
IPQEPQREP

SEQ ID NO: 43570 - protein, 10 aa, Homo sapiens
  Table A; Target 43570; HLA-B*54:01; MAGEB4; ENSG00000120289; CTA
IPQEPQREPP

SEQ ID NO: 43571 - protein, 10 aa, Homo sapiens
  Table A; Target 43571; HLA-B*56:01; MAGEB4; ENSG00000120289; CTA
IPQEPQREPP

SEQ ID NO: 43572 - protein, 9 aa, Homo sapiens
  Table A; Target 43572; HLA-A*24:02; MAGEB4; ENSG00000120289; CTA
IYDGKRHLI

SEQ ID NO: 43573 - protein, 10 aa, Homo sapiens
  Table A; Target 43573; HLA-A*24:02; MAGEB4; ENSG00000120289; CTA
IYDGKRHLIF

SEQ ID NO: 43574 - protein, 11 aa, Homo sapiens
  Table A; Target 43574; HLA-B*40:01; MAGEB4; ENSG00000120289; CTA
KEESPSSSSSV

SEQ ID NO: 43575 - protein, 11 aa, Homo sapiens
  Table A; Target 43575; HLA-B*49:01; MAGEB4; ENSG00000120289; CTA
KEESPSSSSSV

SEQ ID NO: 43576 - protein, 9 aa, Homo sapiens
  Table A; Target 43576; HLA-B*37:01; MAGEB4; ENSG00000120289; CTA
KEPTTKAEM

SEQ ID NO: 43577 - protein, 9 aa, Homo sapiens
  Table A; Target 43577; HLA-B*40:01; MAGEB4; ENSG00000120289; CTA
KEPTTKAEM

SEQ ID NO: 43578 - protein, 10 aa, Homo sapiens
  Table A; Target 43578; HLA-A*30:01; MAGEB4; ENSG00000120289; CTA
KEPTTKAEML

SEQ ID NO: 43579 - protein, 10 aa, Homo sapiens
  Table A; Target 43579; HLA-B*40:01; MAGEB4; ENSG00000120289; CTA
KEPTTKAEML

SEQ ID NO: 43580 - protein, 10 aa, Homo sapiens
  Table A; Target 43580; HLA-B*40:02; MAGEB4; ENSG00000120289; CTA
KEPTTKAEML

SEQ ID NO: 43581 - protein, 10 aa, Homo sapiens
  Table A; Target 43581; HLA-A*25:01; MAGEB4; ENSG00000120289; CTA
KEVNPTTHSY

SEQ ID NO: 43582 - protein, 10 aa, Homo sapiens
  Table A; Target 43582; HLA-A*29:02; MAGEB4; ENSG00000120289; CTA
KEVNPTTHSY

SEQ ID NO: 43583 - protein, 10 aa, Homo sapiens
  Table A; Target 43583; HLA-A*30:01; MAGEB4; ENSG00000120289; CTA
KEVNPTTHSY

SEQ ID NO: 43584 - protein, 10 aa, Homo sapiens
  Table A; Target 43584; HLA-A*30:02; MAGEB4; ENSG00000120289; CTA
KEVNPTTHSY

SEQ ID NO: 43585 - protein, 10 aa, Homo sapiens
  Table A; Target 43585; HLA-A*32:01; MAGEB4; ENSG00000120289; CTA
KEVNPTTHSY

SEQ ID NO: 43586 - protein, 10 aa, Homo sapiens
  Table A; Target 43586; HLA-B*15:01; MAGEB4; ENSG00000120289; CTA
KEVNPTTHSY

SEQ ID NO: 43587 - protein, 10 aa, Homo sapiens
  Table A; Target 43587; HLA-B*15:03; MAGEB4; ENSG00000120289; CTA
KEVNPTTHSY

SEQ ID NO: 43588 - protein, 10 aa, Homo sapiens
  Table A; Target 43588; HLA-B*18:01; MAGEB4; ENSG00000120289; CTA
KEVNPTTHSY

SEQ ID NO: 43589 - protein, 10 aa, Homo sapiens
  Table A; Target 43589; HLA-B*27:02; MAGEB4; ENSG00000120289; CTA
KEVNPTTHSY

SEQ ID NO: 43590 - protein, 10 aa, Homo sapiens
  Table A; Target 43590; HLA-B*37:01; MAGEB4; ENSG00000120289; CTA
KEVNPTTHSY

SEQ ID NO: 43591 - protein, 10 aa, Homo sapiens
  Table A; Target 43591; HLA-B*40:01; MAGEB4; ENSG00000120289; CTA
KEVNPTTHSY

SEQ ID NO: 43592 - protein, 10 aa, Homo sapiens
  Table A; Target 43592; HLA-B*44:02; MAGEB4; ENSG00000120289; CTA
KEVNPTTHSY

SEQ ID NO: 43593 - protein, 10 aa, Homo sapiens
  Table A; Target 43593; HLA-B*44:03; MAGEB4; ENSG00000120289; CTA
KEVNPTTHSY

SEQ ID NO: 43594 - protein, 10 aa, Homo sapiens
  Table A; Target 43594; HLA-C*02:02; MAGEB4; ENSG00000120289; CTA
KEVNPTTHSY

SEQ ID NO: 43595 - protein, 10 aa, Homo sapiens
  Table A; Target 43595; HLA-C*16:01; MAGEB4; ENSG00000120289; CTA
KEVNPTTHSY

SEQ ID NO: 43596 - protein, 10 aa, Homo sapiens
  Table A; Target 43596; HLA-C*16:02; MAGEB4; ENSG00000120289; CTA
KEVNPTTHSY

SEQ ID NO: 43597 - protein, 10 aa, Homo sapiens
  Table A; Target 43597; HLA-C*16:04; MAGEB4; ENSG00000120289; CTA
KEVNPTTHSY

SEQ ID NO: 43598 - protein, 11 aa, Homo sapiens
  Table A; Target 43598; HLA-B*49:01; MAGEB4; ENSG00000120289; CTA
KEVNPTTHSYI

SEQ ID NO: 43599 - protein, 11 aa, Homo sapiens
  Table A; Target 43599; HLA-A*03:01; MAGEB4; ENSG00000120289; CTA
KLITQDLVQEK

SEQ ID NO: 43600 - protein, 11 aa, Homo sapiens
  Table A; Target 43600; HLA-A*03:02; MAGEB4; ENSG00000120289; CTA
KLITQDLVQEK

SEQ ID NO: 43601 - protein, 11 aa, Homo sapiens
  Table A; Target 43601; HLA-A*11:01; MAGEB4; ENSG00000120289; CTA
KLITQDLVQEK

SEQ ID NO: 43602 - protein, 8 aa, Homo sapiens
  Table A; Target 43602; HLA-A*03:01; MAGEB4; ENSG00000120289; CTA
KMKEPTTK

SEQ ID NO: 43603 - protein, 9 aa, Homo sapiens
  Table A; Target 43603; HLA-A*02:03; MAGEB4; ENSG00000120289; CTA
KMKEPTTKA

SEQ ID NO: 43604 - protein, 9 aa, Homo sapiens
  Table A; Target 43604; HLA-A*32:01; MAGEB4; ENSG00000120289; CTA
KMKEPTTKA

SEQ ID NO: 43605 - protein, 9 aa, Homo sapiens
  Table A; Target 43605; HLA-B*46:01; MAGEB4; ENSG00000120289; CTA
KMKEPTTKA

SEQ ID NO: 43606 - protein, 9 aa, Homo sapiens
  Table A; Target 43606; HLA-B*55:01; MAGEB4; ENSG00000120289; CTA
KMKEPTTKA

SEQ ID NO: 43607 - protein, 9 aa, Homo sapiens
  Table A; Target 43607; HLA-A*03:01; MAGEB4; ENSG00000120289; CTA
KMLVQFLLY

SEQ ID NO: 43608 - protein, 9 aa, Homo sapiens
  Table A; Target 43608; HLA-A*24:02; MAGEB4; ENSG00000120289; CTA
KMLVQFLLY

SEQ ID NO: 43609 - protein, 9 aa, Homo sapiens
  Table A; Target 43609; HLA-A*29:02; MAGEB4; ENSG00000120289; CTA
KMLVQFLLY

SEQ ID NO: 43610 - protein, 9 aa, Homo sapiens
  Table A; Target 43610; HLA-B*57:01; MAGEB4; ENSG00000120289; CTA
KMLVQFLLY

SEQ ID NO: 43611 - protein, 10 aa, Homo sapiens
  Table A; Target 43611; HLA-A*03:01; MAGEB4; ENSG00000120289; CTA
KMLVQFLLYK

SEQ ID NO: 43612 - protein, 10 aa, Homo sapiens
  Table A; Target 43612; HLA-A*03:01; MAGEB4; ENSG00000120289; CTA
KVGQPTAAEK

SEQ ID NO: 43613 - protein, 10 aa, Homo sapiens
  Table A; Target 43613; HLA-A*03:02; MAGEB4; ENSG00000120289; CTA
KVGQPTAAEK

SEQ ID NO: 43614 - protein, 10 aa, Homo sapiens
  Table A; Target 43614; HLA-A*11:01; MAGEB4; ENSG00000120289; CTA
KVGQPTAAEK

SEQ ID NO: 43615 - protein, 10 aa, Homo sapiens
  Table A; Target 43615; HLA-A*03:02; MAGEB4; ENSG00000120289; CTA
KVNDTTPNNF

SEQ ID NO: 43616 - protein, 10 aa, Homo sapiens
  Table A; Target 43616; HLA-A*25:01; MAGEB4; ENSG00000120289; CTA
KVNDTTPNNF

SEQ ID NO: 43617 - protein, 10 aa, Homo sapiens
  Table A; Target 43617; HLA-A*30:02; MAGEB4; ENSG00000120289; CTA
KVNDTTPNNF

SEQ ID NO: 43618 - protein, 10 aa, Homo sapiens
  Table A; Target 43618; HLA-A*32:01; MAGEB4; ENSG00000120289; CTA
KVNDTTPNNF

SEQ ID NO: 43619 - protein, 10 aa, Homo sapiens
  Table A; Target 43619; HLA-B*58:01; MAGEB4; ENSG00000120289; CTA
KVNDTTPNNF

SEQ ID NO: 43620 - protein, 8 aa, Homo sapiens
  Table A; Target 43620; HLA-B*07:02; MAGEB4; ENSG00000120289; CTA
KVSQRTEL

SEQ ID NO: 43621 - protein, 8 aa, Homo sapiens
  Table A; Target 43621; HLA-B*08:01; MAGEB4; ENSG00000120289; CTA
KVSQRTEL

SEQ ID NO: 43622 - protein, 8 aa, Homo sapiens
  Table A; Target 43622; HLA-C*16:01; MAGEB4; ENSG00000120289; CTA
KVSQRTEL

SEQ ID NO: 43623 - protein, 9 aa, Homo sapiens
  Table A; Target 43623; HLA-B*37:01; MAGEB4; ENSG00000120289; CTA
KVSQRTELV

SEQ ID NO: 43624 - protein, 9 aa, Homo sapiens
  Table A; Target 43624; HLA-A*24:02; MAGEB4; ENSG00000120289; CTA
KYKEHFPEI

SEQ ID NO: 43625 - protein, 9 aa, Homo sapiens
  Table A; Target 43625; HLA-A*32:01; MAGEB4; ENSG00000120289; CTA
LAFGIPQEP

SEQ ID NO: 43626 - protein, 9 aa, Homo sapiens
  Table A; Target 43626; HLA-B*54:01; MAGEB4; ENSG00000120289; CTA
LAFGIPQEP

SEQ ID NO: 43627 - protein, 9 aa, Homo sapiens
  Table A; Target 43627; HLA-C*02:02; MAGEB4; ENSG00000120289; CTA
LAFGIPQEP

SEQ ID NO: 43628 - protein, 9 aa, Homo sapiens
  Table A; Target 43628; HLA-C*12:03; MAGEB4; ENSG00000120289; CTA
LAFGIPQEP

SEQ ID NO: 43629 - protein, 9 aa, Homo sapiens
  Table A; Target 43629; HLA-C*16:04; MAGEB4; ENSG00000120289; CTA
LAFGIPQEP

SEQ ID NO: 43630 - protein, 11 aa, Homo sapiens
  Table A; Target 43630; HLA-A*68:01; MAGEB4; ENSG00000120289; CTA
LAFGIPQEPQR

SEQ ID NO: 43631 - protein, 9 aa, Homo sapiens
  Table A; Target 43631; HLA-B*49:01; MAGEB4; ENSG00000120289; CTA
LEYQQVPNS

SEQ ID NO: 43632 - protein, 10 aa, Homo sapiens
  Table A; Target 43632; HLA-B*27:02; MAGEB4; ENSG00000120289; CTA
LITQDLVQEK

SEQ ID NO: 43633 - protein, 9 aa, Homo sapiens
  Table A; Target 43633; HLA-B*15:03; MAGEB4; ENSG00000120289; CTA
LKVGQPTAA

SEQ ID NO: 43634 - protein, 9 aa, Homo sapiens
  Table A; Target 43634; HLA-A*02:01; MAGEB4; ENSG00000120289; CTA
LLMPLLSVI

SEQ ID NO: 43635 - protein, 9 aa, Homo sapiens
  Table A; Target 43635; HLA-A*02:03; MAGEB4; ENSG00000120289; CTA
LLMPLLSVI

SEQ ID NO: 43636 - protein, 9 aa, Homo sapiens
  Table A; Target 43636; HLA-A*02:04; MAGEB4; ENSG00000120289; CTA
LLMPLLSVI

SEQ ID NO: 43637 - protein, 9 aa, Homo sapiens
  Table A; Target 43637; HLA-A*02:07; MAGEB4; ENSG00000120289; CTA
LLMPLLSVI

SEQ ID NO: 43638 - protein, 11 aa, Homo sapiens
  Table A; Target 43638; HLA-A*02:04; MAGEB4; ENSG00000120289; CTA
LLMPLLSVIFL

SEQ ID NO: 43639 - protein, 9 aa, Homo sapiens
  Table A; Target 43639; HLA-A*24:02; MAGEB4; ENSG00000120289; CTA
LMPLLSVIF

SEQ ID NO: 43640 - protein, 10 aa, Homo sapiens
  Table A; Target 43640; HLA-B*27:02; MAGEB4; ENSG00000120289; CTA
LNMLGIYDGK

SEQ ID NO: 43641 - protein, 8 aa, Homo sapiens
  Table A; Target 43641; HLA-B*07:02; MAGEB4; ENSG00000120289; CTA
LPRNGLLM

SEQ ID NO: 43642 - protein, 8 aa, Homo sapiens
  Table A; Target 43642; HLA-B*51:01; MAGEB4; ENSG00000120289; CTA
LPRNGLLM

SEQ ID NO: 43643 - protein, 9 aa, Homo sapiens
  Table A; Target 43643; HLA-B*54:01; MAGEB4; ENSG00000120289; CTA
LPRNGLLMP

SEQ ID NO: 43644 - protein, 9 aa, Homo sapiens
  Table A; Target 43644; HLA-B*56:01; MAGEB4; ENSG00000120289; CTA
LPRNGLLMP

SEQ ID NO: 43645 - protein, 9 aa, Homo sapiens
  Table A; Target 43645; HLA-B*38:01; MAGEB4; ENSG00000120289; CTA
LRDTASSSL

SEQ ID NO: 43646 - protein, 9 aa, Homo sapiens
  Table A; Target 43646; HLA-B*39:01; MAGEB4; ENSG00000120289; CTA
LRDTASSSL

SEQ ID NO: 43647 - protein, 9 aa, Homo sapiens
  Table A; Target 43647; HLA-C*05:01; MAGEB4; ENSG00000120289; CTA
LRDTASSSL

SEQ ID NO: 43648 - protein, 10 aa, Homo sapiens
  Table A; Target 43648; HLA-A*02:03; MAGEB4; ENSG00000120289; CTA
LVFGLALKEV

SEQ ID NO: 43649 - protein, 9 aa, Homo sapiens
  Table A; Target 43649; HLA-A*29:02; MAGEB4; ENSG00000120289; CTA
LVQEKYLEY

SEQ ID NO: 43650 - protein, 9 aa, Homo sapiens
  Table A; Target 43650; HLA-A*29:02; MAGEB4; ENSG00000120289; CTA
MLKIISKKY

SEQ ID NO: 43651 - protein, 8 aa, Homo sapiens
  Table A; Target 43651; HLA-A*29:02; MAGEB4; ENSG00000120289; CTA
MLVQFLLY

SEQ ID NO: 43652 - protein, 9 aa, Homo sapiens
  Table A; Target 43652; HLA-A*03:01; MAGEB4; ENSG00000120289; CTA
MLVQFLLYK

SEQ ID NO: 43653 - protein, 10 aa, Homo sapiens
  Table A; Target 43653; HLA-A*29:02; MAGEB4; ENSG00000120289; CTA
MLVQFLLYKY

SEQ ID NO: 43654 - protein, 8 aa, Homo sapiens
  Table A; Target 43654; HLA-B*35:01; MAGEB4; ENSG00000120289; CTA
MPLLSVIF

SEQ ID NO: 43655 - protein, 8 aa, Homo sapiens
  Table A; Target 43655; HLA-B*35:03; MAGEB4; ENSG00000120289; CTA
MPLLSVIF

SEQ ID NO: 43656 - protein, 9 aa, Homo sapiens
  Table A; Target 43656; HLA-B*35:01; MAGEB4; ENSG00000120289; CTA
MPLLSVIFL

SEQ ID NO: 43657 - protein, 9 aa, Homo sapiens
  Table A; Target 43657; HLA-B*35:03; MAGEB4; ENSG00000120289; CTA
MPLLSVIFL

SEQ ID NO: 43658 - protein, 9 aa, Homo sapiens
  Table A; Target 43658; HLA-B*51:01; MAGEB4; ENSG00000120289; CTA
MPLLSVIFL

SEQ ID NO: 43659 - protein, 9 aa, Homo sapiens
  Table A; Target 43659; HLA-B*54:01; MAGEB4; ENSG00000120289; CTA
MPLLSVIFL

SEQ ID NO: 43660 - protein, 11 aa, Homo sapiens
  Table A; Target 43660; HLA-B*54:01; MAGEB4; ENSG00000120289; CTA
MPLLSVIFLNG

SEQ ID NO: 43661 - protein, 9 aa, Homo sapiens
  Table A; Target 43661; HLA-C*16:01; MAGEB4; ENSG00000120289; CTA
MTSAYSRAT

SEQ ID NO: 43662 - protein, 9 aa, Homo sapiens
  Table A; Target 43662; HLA-B*44:02; MAGEB4; ENSG00000120289; CTA
NDGNQSSAW

SEQ ID NO: 43663 - protein, 8 aa, Homo sapiens
  Table A; Target 43663; HLA-B*37:01; MAGEB4; ENSG00000120289; CTA
NDTTPNNF

SEQ ID NO: 43664 - protein, 10 aa, Homo sapiens
  Table A; Target 43664; HLA-A*33:01; MAGEB4; ENSG00000120289; CTA
NMLGIYDGKR

SEQ ID NO: 43665 - protein, 9 aa, Homo sapiens
  Table A; Target 43665; HLA-B*35:01; MAGEB4; ENSG00000120289; CTA
NPTTHSYIL

SEQ ID NO: 43666 - protein, 9 aa, Homo sapiens
  Table A; Target 43666; HLA-B*35:03; MAGEB4; ENSG00000120289; CTA
NPTTHSYIL

SEQ ID NO: 43667 - protein, 9 aa, Homo sapiens
  Table A; Target 43667; HLA-A*68:01; MAGEB4; ENSG00000120289; CTA
PSSSSSVLR

SEQ ID NO: 43668 - protein, 9 aa, Homo sapiens
  Table A; Target 43668; HLA-C*07:06; MAGEB4; ENSG00000120289; CTA
PSSSSSVLR

SEQ ID NO: 43669 - protein, 8 aa, Homo sapiens
  Table A; Target 43669; HLA-C*07:06; MAGEB4; ENSG00000120289; CTA
QASTSTER

SEQ ID NO: 43670 - protein, 10 aa, Homo sapiens
  Table A; Target 43670; HLA-B*07:02; MAGEB4; ENSG00000120289; CTA
QASTSTERSL

SEQ ID NO: 43671 - protein, 10 aa, Homo sapiens
  Table A; Target 43671; HLA-B*35:03; MAGEB4; ENSG00000120289; CTA
QASTSTERSL

SEQ ID NO: 43672 - protein, 10 aa, Homo sapiens
  Table A; Target 43672; HLA-C*03:03; MAGEB4; ENSG00000120289; CTA
QASTSTERSL

SEQ ID NO: 43673 - protein, 10 aa, Homo sapiens
  Table A; Target 43673; HLA-C*03:04; MAGEB4; ENSG00000120289; CTA
QASTSTERSL

SEQ ID NO: 43674 - protein, 10 aa, Homo sapiens
  Table A; Target 43674; HLA-C*16:01; MAGEB4; ENSG00000120289; CTA
QASTSTERSL

SEQ ID NO: 43675 - protein, 10 aa, Homo sapiens
  Table A; Target 43675; HLA-C*16:02; MAGEB4; ENSG00000120289; CTA
QASTSTERSL

SEQ ID NO: 43676 - protein, 11 aa, Homo sapiens
  Table A; Target 43676; HLA-A*30:02; MAGEB4; ENSG00000120289; CTA
QQVPNSDPPRY

SEQ ID NO: 43677 - protein, 11 aa, Homo sapiens
  Table A; Target 43677; HLA-A*32:01; MAGEB4; ENSG00000120289; CTA
QQVPNSDPPRY

SEQ ID NO: 43678 - protein, 11 aa, Homo sapiens
  Table A; Target 43678; HLA-B*15:01; MAGEB4; ENSG00000120289; CTA
QQVPNSDPPRY

SEQ ID NO: 43679 - protein, 11 aa, Homo sapiens
  Table A; Target 43679; HLA-B*15:03; MAGEB4; ENSG00000120289; CTA
QQVPNSDPPRY

SEQ ID NO: 43680 - protein, 11 aa, Homo sapiens
  Table A; Target 43680; HLA-B*39:01; MAGEB4; ENSG00000120289; CTA
QQVPNSDPPRY

SEQ ID NO: 43681 - protein, 11 aa, Homo sapiens
  Table A; Target 43681; HLA-B*58:01; MAGEB4; ENSG00000120289; CTA
QQVPNSDPPRY

SEQ ID NO: 43682 - protein, 9 aa, Homo sapiens
  Table A; Target 43682; HLA-B*27:05; MAGEB4; ENSG00000120289; CTA
QRTELVFGL

SEQ ID NO: 43683 - protein, 9 aa, Homo sapiens
  Table A; Target 43683; HLA-A*31:01; MAGEB4; ENSG00000120289; CTA
QSSAWTLPR

SEQ ID NO: 43684 - protein, 11 aa, Homo sapiens
  Table A; Target 43684; HLA-C*03:03; MAGEB4; ENSG00000120289; CTA
RATSSSSSQPM

SEQ ID NO: 43685 - protein, 11 aa, Homo sapiens
  Table A; Target 43685; HLA-C*03:04; MAGEB4; ENSG00000120289; CTA
RATSSSSSQPM

SEQ ID NO: 43686 - protein, 11 aa, Homo sapiens
  Table A; Target 43686; HLA-C*07:01; MAGEB4; ENSG00000120289; CTA
RATSSSSSQPM

SEQ ID NO: 43687 - protein, 11 aa, Homo sapiens
  Table A; Target 43687; HLA-C*16:01; MAGEB4; ENSG00000120289; CTA
RATSSSSSQPM

SEQ ID NO: 43688 - protein, 8 aa, Homo sapiens
  Table A; Target 43688; HLA-B*37:01; MAGEB4; ENSG00000120289; CTA
RDTASSSL

SEQ ID NO: 43689 - protein, 9 aa, Homo sapiens
  Table A; Target 43689; HLA-A*30:01; MAGEB4; ENSG00000120289; CTA
REPPTTSAA

SEQ ID NO: 43690 - protein, 9 aa, Homo sapiens
  Table A; Target 43690; HLA-B*37:01; MAGEB4; ENSG00000120289; CTA
REPPTTSAA

SEQ ID NO: 43691 - protein, 9 aa, Homo sapiens
  Table A; Target 43691; HLA-B*40:01; MAGEB4; ENSG00000120289; CTA
REPPTTSAA

SEQ ID NO: 43692 - protein, 9 aa, Homo sapiens
  Table A; Target 43692; HLA-B*49:01; MAGEB4; ENSG00000120289; CTA
REPPTTSAA

SEQ ID NO: 43693 - protein, 10 aa, Homo sapiens
  Table A; Target 43693; HLA-A*30:01; MAGEB4; ENSG00000120289; CTA
REPPTTSAAA

SEQ ID NO: 43694 - protein, 10 aa, Homo sapiens
  Table A; Target 43694; HLA-B*40:01; MAGEB4; ENSG00000120289; CTA
REPPTTSAAA

SEQ ID NO: 43695 - protein, 10 aa, Homo sapiens
  Table A; Target 43695; HLA-A*30:02; MAGEB4; ENSG00000120289; CTA
RGTTAMTSAY

SEQ ID NO: 43696 - protein, 10 aa, Homo sapiens
  Table A; Target 43696; HLA-B*15:01; MAGEB4; ENSG00000120289; CTA
RGTTAMTSAY

SEQ ID NO: 43697 - protein, 10 aa, Homo sapiens
  Table A; Target 43697; HLA-B*15:03; MAGEB4; ENSG00000120289; CTA
RGTTAMTSAY

SEQ ID NO: 43698 - protein, 10 aa, Homo sapiens
  Table A; Target 43698; HLA-B*46:01; MAGEB4; ENSG00000120289; CTA
RGTTAMTSAY

SEQ ID NO: 43699 - protein, 10 aa, Homo sapiens
  Table A; Target 43699; HLA-B*58:01; MAGEB4; ENSG00000120289; CTA
RGTTAMTSAY

SEQ ID NO: 43700 - protein, 9 aa, Homo sapiens
  Table A; Target 43700; HLA-A*31:01; MAGEB4; ENSG00000120289; CTA
RHLIFGEPR

SEQ ID NO: 43701 - protein, 9 aa, Homo sapiens
  Table A; Target 43701; HLA-B*57:01; MAGEB4; ENSG00000120289; CTA
RSLKDSLTR

SEQ ID NO: 43702 - protein, 10 aa, Homo sapiens
  Table A; Target 43702; HLA-A*03:01; MAGEB4; ENSG00000120289; CTA
RSLKDSLTRK

SEQ ID NO: 43703 - protein, 10 aa, Homo sapiens
  Table A; Target 43703; HLA-A*03:01; MAGEB4; ENSG00000120289; CTA
RTRGQTQDLK

SEQ ID NO: 43704 - protein, 10 aa, Homo sapiens
  Table A; Target 43704; HLA-A*03:02; MAGEB4; ENSG00000120289; CTA
RTRGQTQDLK

SEQ ID NO: 43705 - protein, 10 aa, Homo sapiens
  Table A; Target 43705; HLA-A*11:01; MAGEB4; ENSG00000120289; CTA
RTRGQTQDLK

SEQ ID NO: 43706 - protein, 9 aa, Homo sapiens
  Table A; Target 43706; HLA-B*08:01; MAGEB4; ENSG00000120289; CTA
SAYSRATSS

SEQ ID NO: 43707 - protein, 9 aa, Homo sapiens
  Table A; Target 43707; HLA-B*46:01; MAGEB4; ENSG00000120289; CTA
SAYSRATSS

SEQ ID NO: 43708 - protein, 9 aa, Homo sapiens
  Table A; Target 43708; HLA-C*12:03; MAGEB4; ENSG00000120289; CTA
SAYSRATSS

SEQ ID NO: 43709 - protein, 9 aa, Homo sapiens
  Table A; Target 43709; HLA-C*16:01; MAGEB4; ENSG00000120289; CTA
SAYSRATSS

SEQ ID NO: 43710 - protein, 9 aa, Homo sapiens
  Table A; Target 43710; HLA-A*03:01; MAGEB4; ENSG00000120289; CTA
SLKDSLTRK

SEQ ID NO: 43711 - protein, 8 aa, Homo sapiens
  Table A; Target 43711; HLA-B*07:02; MAGEB4; ENSG00000120289; CTA
SPSSSSSV

SEQ ID NO: 43712 - protein, 8 aa, Homo sapiens
  Table A; Target 43712; HLA-C*07:02; MAGEB4; ENSG00000120289; CTA
SPSSSSSV

SEQ ID NO: 43713 - protein, 9 aa, Homo sapiens
  Table A; Target 43713; HLA-B*35:01; MAGEB4; ENSG00000120289; CTA
SPSSSSSVL

SEQ ID NO: 43714 - protein, 9 aa, Homo sapiens
  Table A; Target 43714; HLA-B*35:03; MAGEB4; ENSG00000120289; CTA
SPSSSSSVL

SEQ ID NO: 43715 - protein, 9 aa, Homo sapiens
  Table A; Target 43715; HLA-B*39:01; MAGEB4; ENSG00000120289; CTA
SPSSSSSVL

SEQ ID NO: 43716 - protein, 9 aa, Homo sapiens
  Table A; Target 43716; HLA-B*55:01; MAGEB4; ENSG00000120289; CTA
SPSSSSSVL

SEQ ID NO: 43717 - protein, 9 aa, Homo sapiens
  Table A; Target 43717; HLA-B*56:01; MAGEB4; ENSG00000120289; CTA
SPSSSSSVL

SEQ ID NO: 43718 - protein, 9 aa, Homo sapiens
  Table A; Target 43718; HLA-C*01:02; MAGEB4; ENSG00000120289; CTA
SPSSSSSVL

SEQ ID NO: 43719 - protein, 9 aa, Homo sapiens
  Table A; Target 43719; HLA-C*03:03; MAGEB4; ENSG00000120289; CTA
SPSSSSSVL

SEQ ID NO: 43720 - protein, 9 aa, Homo sapiens
  Table A; Target 43720; HLA-C*07:02; MAGEB4; ENSG00000120289; CTA
SPSSSSSVL

SEQ ID NO: 43721 - protein, 9 aa, Homo sapiens
  Table A; Target 43721; HLA-C*14:02; MAGEB4; ENSG00000120289; CTA
SPSSSSSVL

SEQ ID NO: 43722 - protein, 10 aa, Homo sapiens
  Table A; Target 43722; HLA-A*68:01; MAGEB4; ENSG00000120289; CTA
SPSSSSSVLR

SEQ ID NO: 43723 - protein, 10 aa, Homo sapiens
  Table A; Target 43723; HLA-C*07:06; MAGEB4; ENSG00000120289; CTA
SPSSSSSVLR

SEQ ID NO: 43724 - protein, 9 aa, Homo sapiens
  Table A; Target 43724; HLA-B*27:05; MAGEB4; ENSG00000120289; CTA
SQASTSTER

SEQ ID NO: 43725 - protein, 9 aa, Homo sapiens
  Table A; Target 43725; HLA-C*07:06; MAGEB4; ENSG00000120289; CTA
SQASTSTER

SEQ ID NO: 43726 - protein, 11 aa, Homo sapiens
  Table A; Target 43726; HLA-B*38:01; MAGEB4; ENSG00000120289; CTA
SQASTSTERSL

SEQ ID NO: 43727 - protein, 8 aa, Homo sapiens
  Table A; Target 43727; HLA-B*15:01; MAGEB4; ENSG00000120289; CTA
SQRTELVF

SEQ ID NO: 43728 - protein, 8 aa, Homo sapiens
  Table A; Target 43728; HLA-B*15:03; MAGEB4; ENSG00000120289; CTA
SQRTELVF

SEQ ID NO: 43729 - protein, 10 aa, Homo sapiens
  Table A; Target 43729; HLA-A*68:01; MAGEB4; ENSG00000120289; CTA
SSQASTSTER

SEQ ID NO: 43730 - protein, 10 aa, Homo sapiens
  Table A; Target 43730; HLA-C*07:06; MAGEB4; ENSG00000120289; CTA
SSQASTSTER

SEQ ID NO: 43731 - protein, 8 aa, Homo sapiens
  Table A; Target 43731; HLA-B*13:02; MAGEB4; ENSG00000120289; CTA
SSSLAFGI

SEQ ID NO: 43732 - protein, 11 aa, Homo sapiens
  Table A; Target 43732; HLA-A*68:01; MAGEB4; ENSG00000120289; CTA
SSSQASTSTER

SEQ ID NO: 43733 - protein, 11 aa, Homo sapiens
  Table A; Target 43733; HLA-C*07:06; MAGEB4; ENSG00000120289; CTA
SSSQASTSTER

SEQ ID NO: 43734 - protein, 8 aa, Homo sapiens
  Table A; Target 43734; HLA-C*16:01; MAGEB4; ENSG00000120289; CTA
STSTERSL

SEQ ID NO: 43735 - protein, 9 aa, Homo sapiens
  Table A; Target 43735; HLA-A*03:02; MAGEB4; ENSG00000120289; CTA
STSTERSLK

SEQ ID NO: 43736 - protein, 9 aa, Homo sapiens
  Table A; Target 43736; HLA-A*11:01; MAGEB4; ENSG00000120289; CTA
STSTERSLK

SEQ ID NO: 43737 - protein, 11 aa, Homo sapiens
  Table A; Target 43737; HLA-A*31:01; MAGEB4; ENSG00000120289; CTA
SVIFLNGNCAR

SEQ ID NO: 43738 - protein, 11 aa, Homo sapiens
  Table A; Target 43738; HLA-A*25:01; MAGEB4; ENSG00000120289; CTA
SVLRDTASSSL

SEQ ID NO: 43739 - protein, 11 aa, Homo sapiens
  Table A; Target 43739; HLA-B*07:02; MAGEB4; ENSG00000120289; CTA
SVLRDTASSSL

SEQ ID NO: 43740 - protein, 11 aa, Homo sapiens
  Table A; Target 43740; HLA-B*58:01; MAGEB4; ENSG00000120289; CTA
SVLRDTASSSL

SEQ ID NO: 43741 - protein, 11 aa, Homo sapiens
  Table A; Target 43741; HLA-C*01:02; MAGEB4; ENSG00000120289; CTA
SVLRDTASSSL

SEQ ID NO: 43742 - protein, 11 aa, Homo sapiens
  Table A; Target 43742; HLA-C*03:03; MAGEB4; ENSG00000120289; CTA
SVLRDTASSSL

SEQ ID NO: 43743 - protein, 11 aa, Homo sapiens
  Table A; Target 43743; HLA-C*03:04; MAGEB4; ENSG00000120289; CTA
SVLRDTASSSL

SEQ ID NO: 43744 - protein, 8 aa, Homo sapiens
  Table A; Target 43744; HLA-A*23:01; MAGEB4; ENSG00000120289; CTA
SYILVSML

SEQ ID NO: 43745 - protein, 8 aa, Homo sapiens
  Table A; Target 43745; HLA-A*24:02; MAGEB4; ENSG00000120289; CTA
SYILVSML

SEQ ID NO: 43746 - protein, 8 aa, Homo sapiens
  Table A; Target 43746; HLA-C*14:02; MAGEB4; ENSG00000120289; CTA
SYILVSML

SEQ ID NO: 43747 - protein, 9 aa, Homo sapiens
  Table A; Target 43747; HLA-A*03:02; MAGEB4; ENSG00000120289; CTA
TAMTSAYSR

SEQ ID NO: 43748 - protein, 9 aa, Homo sapiens
  Table A; Target 43748; HLA-A*11:01; MAGEB4; ENSG00000120289; CTA
TAMTSAYSR

SEQ ID NO: 43749 - protein, 9 aa, Homo sapiens
  Table A; Target 43749; HLA-A*31:01; MAGEB4; ENSG00000120289; CTA
TAMTSAYSR

SEQ ID NO: 43750 - protein, 9 aa, Homo sapiens
  Table A; Target 43750; HLA-A*33:01; MAGEB4; ENSG00000120289; CTA
TAMTSAYSR

SEQ ID NO: 43751 - protein, 9 aa, Homo sapiens
  Table A; Target 43751; HLA-A*33:03; MAGEB4; ENSG00000120289; CTA
TAMTSAYSR

SEQ ID NO: 43752 - protein, 9 aa, Homo sapiens
  Table A; Target 43752; HLA-A*68:01; MAGEB4; ENSG00000120289; CTA
TAMTSAYSR

SEQ ID NO: 43753 - protein, 9 aa, Homo sapiens
  Table A; Target 43753; HLA-B*35:01; MAGEB4; ENSG00000120289; CTA
TAMTSAYSR

SEQ ID NO: 43754 - protein, 9 aa, Homo sapiens
  Table A; Target 43754; HLA-B*57:01; MAGEB4; ENSG00000120289; CTA
TAMTSAYSR

SEQ ID NO: 43755 - protein, 9 aa, Homo sapiens
  Table A; Target 43755; HLA-C*07:06; MAGEB4; ENSG00000120289; CTA
TAMTSAYSR

SEQ ID NO: 43756 - protein, 10 aa, Homo sapiens
  Table A; Target 43756; HLA-B*54:01; MAGEB4; ENSG00000120289; CTA
TAMTSAYSRA

SEQ ID NO: 43757 - protein, 8 aa, Homo sapiens
  Table A; Target 43757; HLA-B*35:01; MAGEB4; ENSG00000120289; CTA
TASSSLAF

SEQ ID NO: 43758 - protein, 8 aa, Homo sapiens
  Table A; Target 43758; HLA-B*35:03; MAGEB4; ENSG00000120289; CTA
TASSSLAF

SEQ ID NO: 43759 - protein, 8 aa, Homo sapiens
  Table A; Target 43759; HLA-B*37:01; MAGEB4; ENSG00000120289; CTA
TASSSLAF

SEQ ID NO: 43760 - protein, 8 aa, Homo sapiens
  Table A; Target 43760; HLA-C*03:03; MAGEB4; ENSG00000120289; CTA
TASSSLAF

SEQ ID NO: 43761 - protein, 8 aa, Homo sapiens
  Table A; Target 43761; HLA-C*03:04; MAGEB4; ENSG00000120289; CTA
TASSSLAF

SEQ ID NO: 43762 - protein, 8 aa, Homo sapiens
  Table A; Target 43762; HLA-C*05:01; MAGEB4; ENSG00000120289; CTA
TASSSLAF

SEQ ID NO: 43763 - protein, 8 aa, Homo sapiens
  Table A; Target 43763; HLA-C*16:01; MAGEB4; ENSG00000120289; CTA
TASSSLAF

SEQ ID NO: 43764 - protein, 8 aa, Homo sapiens
  Table A; Target 43764; HLA-B*18:01; MAGEB4; ENSG00000120289; CTA
TELVFGLA

SEQ ID NO: 43765 - protein, 8 aa, Homo sapiens
  Table A; Target 43765; HLA-B*49:01; MAGEB4; ENSG00000120289; CTA
TELVFGLA

SEQ ID NO: 43766 - protein, 9 aa, Homo sapiens
  Table A; Target 43766; HLA-A*30:01; MAGEB4; ENSG00000120289; CTA
TELVFGLAL

SEQ ID NO: 43767 - protein, 9 aa, Homo sapiens
  Table A; Target 43767; HLA-B*18:01; MAGEB4; ENSG00000120289; CTA
TELVFGLAL

SEQ ID NO: 43768 - protein, 9 aa, Homo sapiens
  Table A; Target 43768; HLA-B*37:01; MAGEB4; ENSG00000120289; CTA
TELVFGLAL

SEQ ID NO: 43769 - protein, 9 aa, Homo sapiens
  Table A; Target 43769; HLA-B*40:01; MAGEB4; ENSG00000120289; CTA
TELVFGLAL

SEQ ID NO: 43770 - protein, 9 aa, Homo sapiens
  Table A; Target 43770; HLA-B*40:02; MAGEB4; ENSG00000120289; CTA
TELVFGLAL

SEQ ID NO: 43771 - protein, 9 aa, Homo sapiens
  Table A; Target 43771; HLA-B*44:02; MAGEB4; ENSG00000120289; CTA
TELVFGLAL

SEQ ID NO: 43772 - protein, 9 aa, Homo sapiens
  Table A; Target 43772; HLA-B*44:03; MAGEB4; ENSG00000120289; CTA
TELVFGLAL

SEQ ID NO: 43773 - protein, 9 aa, Homo sapiens
  Table A; Target 43773; HLA-B*49:01; MAGEB4; ENSG00000120289; CTA
TELVFGLAL

SEQ ID NO: 43774 - protein, 9 aa, Homo sapiens
  Table A; Target 43774; HLA-A*30:01; MAGEB4; ENSG00000120289; CTA
TERSLKDSL

SEQ ID NO: 43775 - protein, 9 aa, Homo sapiens
  Table A; Target 43775; HLA-B*07:02; MAGEB4; ENSG00000120289; CTA
TERSLKDSL

SEQ ID NO: 43776 - protein, 9 aa, Homo sapiens
  Table A; Target 43776; HLA-B*18:01; MAGEB4; ENSG00000120289; CTA
TERSLKDSL

SEQ ID NO: 43777 - protein, 9 aa, Homo sapiens
  Table A; Target 43777; HLA-B*40:01; MAGEB4; ENSG00000120289; CTA
TERSLKDSL

SEQ ID NO: 43778 - protein, 9 aa, Homo sapiens
  Table A; Target 43778; HLA-B*40:02; MAGEB4; ENSG00000120289; CTA
TERSLKDSL

SEQ ID NO: 43779 - protein, 9 aa, Homo sapiens
  Table A; Target 43779; HLA-B*44:02; MAGEB4; ENSG00000120289; CTA
TERSLKDSL

SEQ ID NO: 43780 - protein, 9 aa, Homo sapiens
  Table A; Target 43780; HLA-B*44:03; MAGEB4; ENSG00000120289; CTA
TERSLKDSL

SEQ ID NO: 43781 - protein, 9 aa, Homo sapiens
  Table A; Target 43781; HLA-B*38:01; MAGEB4; ENSG00000120289; CTA
THSYILVSM

SEQ ID NO: 43782 - protein, 9 aa, Homo sapiens
  Table A; Target 43782; HLA-B*39:01; MAGEB4; ENSG00000120289; CTA
THSYILVSM

SEQ ID NO: 43783 - protein, 8 aa, Homo sapiens
  Table A; Target 43783; HLA-B*51:01; MAGEB4; ENSG00000120289; CTA
TPNNFPLL

SEQ ID NO: 43784 - protein, 9 aa, Homo sapiens
  Table A; Target 43784; HLA-A*01:01; MAGEB4; ENSG00000120289; CTA
TPNNFPLLY

SEQ ID NO: 43785 - protein, 9 aa, Homo sapiens
  Table A; Target 43785; HLA-A*26:01; MAGEB4; ENSG00000120289; CTA
TPNNFPLLY

SEQ ID NO: 43786 - protein, 9 aa, Homo sapiens
  Table A; Target 43786; HLA-A*29:02; MAGEB4; ENSG00000120289; CTA
TPNNFPLLY

SEQ ID NO: 43787 - protein, 9 aa, Homo sapiens
  Table A; Target 43787; HLA-A*30:02; MAGEB4; ENSG00000120289; CTA
TPNNFPLLY

SEQ ID NO: 43788 - protein, 9 aa, Homo sapiens
  Table A; Target 43788; HLA-B*18:01; MAGEB4; ENSG00000120289; CTA
TPNNFPLLY

SEQ ID NO: 43789 - protein, 9 aa, Homo sapiens
  Table A; Target 43789; HLA-B*35:01; MAGEB4; ENSG00000120289; CTA
TPNNFPLLY

SEQ ID NO: 43790 - protein, 9 aa, Homo sapiens
  Table A; Target 43790; HLA-B*44:03; MAGEB4; ENSG00000120289; CTA
TPNNFPLLY

SEQ ID NO: 43791 - protein, 9 aa, Homo sapiens
  Table A; Target 43791; HLA-B*51:01; MAGEB4; ENSG00000120289; CTA
TPNNFPLLY

SEQ ID NO: 43792 - protein, 9 aa, Homo sapiens
  Table A; Target 43792; HLA-B*55:01; MAGEB4; ENSG00000120289; CTA
TPNNFPLLY

SEQ ID NO: 43793 - protein, 9 aa, Homo sapiens
  Table A; Target 43793; HLA-C*02:02; MAGEB4; ENSG00000120289; CTA
TPNNFPLLY

SEQ ID NO: 43794 - protein, 9 aa, Homo sapiens
  Table A; Target 43794; HLA-C*12:03; MAGEB4; ENSG00000120289; CTA
TPNNFPLLY

SEQ ID NO: 43795 - protein, 9 aa, Homo sapiens
  Table A; Target 43795; HLA-B*27:05; MAGEB4; ENSG00000120289; CTA
TRGQTQDLK

SEQ ID NO: 43796 - protein, 9 aa, Homo sapiens
  Table A; Target 43796; HLA-A*33:03; MAGEB4; ENSG00000120289; CTA
TSSSSSQPM

SEQ ID NO: 43797 - protein, 9 aa, Homo sapiens
  Table A; Target 43797; HLA-A*68:01; MAGEB4; ENSG00000120289; CTA
TSSSSSQPM

SEQ ID NO: 43798 - protein, 9 aa, Homo sapiens
  Table A; Target 43798; HLA-B*27:05; MAGEB4; ENSG00000120289; CTA
TSSSSSQPM

SEQ ID NO: 43799 - protein, 9 aa, Homo sapiens
  Table A; Target 43799; HLA-B*35:01; MAGEB4; ENSG00000120289; CTA
TSSSSSQPM

SEQ ID NO: 43800 - protein, 9 aa, Homo sapiens
  Table A; Target 43800; HLA-B*35:03; MAGEB4; ENSG00000120289; CTA
TSSSSSQPM

SEQ ID NO: 43801 - protein, 9 aa, Homo sapiens
  Table A; Target 43801; HLA-B*37:01; MAGEB4; ENSG00000120289; CTA
TSSSSSQPM

SEQ ID NO: 43802 - protein, 9 aa, Homo sapiens
  Table A; Target 43802; HLA-B*39:01; MAGEB4; ENSG00000120289; CTA
TSSSSSQPM

SEQ ID NO: 43803 - protein, 9 aa, Homo sapiens
  Table A; Target 43803; HLA-B*40:02; MAGEB4; ENSG00000120289; CTA
TSSSSSQPM

SEQ ID NO: 43804 - protein, 9 aa, Homo sapiens
  Table A; Target 43804; HLA-B*55:01; MAGEB4; ENSG00000120289; CTA
TSSSSSQPM

SEQ ID NO: 43805 - protein, 9 aa, Homo sapiens
  Table A; Target 43805; HLA-B*58:01; MAGEB4; ENSG00000120289; CTA
TSSSSSQPM

SEQ ID NO: 43806 - protein, 9 aa, Homo sapiens
  Table A; Target 43806; HLA-C*01:02; MAGEB4; ENSG00000120289; CTA
TSSSSSQPM

SEQ ID NO: 43807 - protein, 9 aa, Homo sapiens
  Table A; Target 43807; HLA-C*02:02; MAGEB4; ENSG00000120289; CTA
TSSSSSQPM

SEQ ID NO: 43808 - protein, 9 aa, Homo sapiens
  Table A; Target 43808; HLA-C*03:03; MAGEB4; ENSG00000120289; CTA
TSSSSSQPM

SEQ ID NO: 43809 - protein, 9 aa, Homo sapiens
  Table A; Target 43809; HLA-C*03:04; MAGEB4; ENSG00000120289; CTA
TSSSSSQPM

SEQ ID NO: 43810 - protein, 9 aa, Homo sapiens
  Table A; Target 43810; HLA-C*04:01; MAGEB4; ENSG00000120289; CTA
TSSSSSQPM

SEQ ID NO: 43811 - protein, 9 aa, Homo sapiens
  Table A; Target 43811; HLA-C*05:01; MAGEB4; ENSG00000120289; CTA
TSSSSSQPM

SEQ ID NO: 43812 - protein, 9 aa, Homo sapiens
  Table A; Target 43812; HLA-C*06:02; MAGEB4; ENSG00000120289; CTA
TSSSSSQPM

SEQ ID NO: 43813 - protein, 9 aa, Homo sapiens
  Table A; Target 43813; HLA-C*07:01; MAGEB4; ENSG00000120289; CTA
TSSSSSQPM

SEQ ID NO: 43814 - protein, 9 aa, Homo sapiens
  Table A; Target 43814; HLA-C*07:02; MAGEB4; ENSG00000120289; CTA
TSSSSSQPM

SEQ ID NO: 43815 - protein, 9 aa, Homo sapiens
  Table A; Target 43815; HLA-C*07:04; MAGEB4; ENSG00000120289; CTA
TSSSSSQPM

SEQ ID NO: 43816 - protein, 9 aa, Homo sapiens
  Table A; Target 43816; HLA-C*07:06; MAGEB4; ENSG00000120289; CTA
TSSSSSQPM

SEQ ID NO: 43817 - protein, 9 aa, Homo sapiens
  Table A; Target 43817; HLA-C*12:03; MAGEB4; ENSG00000120289; CTA
TSSSSSQPM

SEQ ID NO: 43818 - protein, 9 aa, Homo sapiens
  Table A; Target 43818; HLA-C*14:02; MAGEB4; ENSG00000120289; CTA
TSSSSSQPM

SEQ ID NO: 43819 - protein, 9 aa, Homo sapiens
  Table A; Target 43819; HLA-C*16:01; MAGEB4; ENSG00000120289; CTA
TSSSSSQPM

SEQ ID NO: 43820 - protein, 9 aa, Homo sapiens
  Table A; Target 43820; HLA-C*16:02; MAGEB4; ENSG00000120289; CTA
TSSSSSQPM

SEQ ID NO: 43821 - protein, 8 aa, Homo sapiens
  Table A; Target 43821; HLA-C*16:01; MAGEB4; ENSG00000120289; CTA
TSTERSLK

SEQ ID NO: 43822 - protein, 8 aa, Homo sapiens
  Table A; Target 43822; HLA-A*01:01; MAGEB4; ENSG00000120289; CTA
TTAMTSAY

SEQ ID NO: 43823 - protein, 8 aa, Homo sapiens
  Table A; Target 43823; HLA-A*25:01; MAGEB4; ENSG00000120289; CTA
TTAMTSAY

SEQ ID NO: 43824 - protein, 8 aa, Homo sapiens
  Table A; Target 43824; HLA-A*26:01; MAGEB4; ENSG00000120289; CTA
TTAMTSAY

SEQ ID NO: 43825 - protein, 8 aa, Homo sapiens
  Table A; Target 43825; HLA-A*30:02; MAGEB4; ENSG00000120289; CTA
TTAMTSAY

SEQ ID NO: 43826 - protein, 8 aa, Homo sapiens
  Table A; Target 43826; HLA-A*32:01; MAGEB4; ENSG00000120289; CTA
TTAMTSAY

SEQ ID NO: 43827 - protein, 8 aa, Homo sapiens
  Table A; Target 43827; HLA-B*15:01; MAGEB4; ENSG00000120289; CTA
TTAMTSAY

SEQ ID NO: 43828 - protein, 8 aa, Homo sapiens
  Table A; Target 43828; HLA-B*15:03; MAGEB4; ENSG00000120289; CTA
TTAMTSAY

SEQ ID NO: 43829 - protein, 8 aa, Homo sapiens
  Table A; Target 43829; HLA-B*18:01; MAGEB4; ENSG00000120289; CTA
TTAMTSAY

SEQ ID NO: 43830 - protein, 8 aa, Homo sapiens
  Table A; Target 43830; HLA-B*46:01; MAGEB4; ENSG00000120289; CTA
TTAMTSAY

SEQ ID NO: 43831 - protein, 8 aa, Homo sapiens
  Table A; Target 43831; HLA-C*01:02; MAGEB4; ENSG00000120289; CTA
TTAMTSAY

SEQ ID NO: 43832 - protein, 8 aa, Homo sapiens
  Table A; Target 43832; HLA-C*03:03; MAGEB4; ENSG00000120289; CTA
TTAMTSAY

SEQ ID NO: 43833 - protein, 8 aa, Homo sapiens
  Table A; Target 43833; HLA-C*04:01; MAGEB4; ENSG00000120289; CTA
TTAMTSAY

SEQ ID NO: 43834 - protein, 8 aa, Homo sapiens
  Table A; Target 43834; HLA-C*07:01; MAGEB4; ENSG00000120289; CTA
TTAMTSAY

SEQ ID NO: 43835 - protein, 8 aa, Homo sapiens
  Table A; Target 43835; HLA-C*07:04; MAGEB4; ENSG00000120289; CTA
TTAMTSAY

SEQ ID NO: 43836 - protein, 8 aa, Homo sapiens
  Table A; Target 43836; HLA-C*12:03; MAGEB4; ENSG00000120289; CTA
TTAMTSAY

SEQ ID NO: 43837 - protein, 8 aa, Homo sapiens
  Table A; Target 43837; HLA-C*14:02; MAGEB4; ENSG00000120289; CTA
TTAMTSAY

SEQ ID NO: 43838 - protein, 8 aa, Homo sapiens
  Table A; Target 43838; HLA-C*16:02; MAGEB4; ENSG00000120289; CTA
TTAMTSAY

SEQ ID NO: 43839 - protein, 10 aa, Homo sapiens
  Table A; Target 43839; HLA-A*03:02; MAGEB4; ENSG00000120289; CTA
TTAMTSAYSR

SEQ ID NO: 43840 - protein, 10 aa, Homo sapiens
  Table A; Target 43840; HLA-A*11:01; MAGEB4; ENSG00000120289; CTA
TTAMTSAYSR

SEQ ID NO: 43841 - protein, 10 aa, Homo sapiens
  Table A; Target 43841; HLA-A*31:01; MAGEB4; ENSG00000120289; CTA
TTAMTSAYSR

SEQ ID NO: 43842 - protein, 10 aa, Homo sapiens
  Table A; Target 43842; HLA-A*33:03; MAGEB4; ENSG00000120289; CTA
TTAMTSAYSR

SEQ ID NO: 43843 - protein, 10 aa, Homo sapiens
  Table A; Target 43843; HLA-A*68:01; MAGEB4; ENSG00000120289; CTA
TTAMTSAYSR

SEQ ID NO: 43844 - protein, 10 aa, Homo sapiens
  Table A; Target 43844; HLA-B*27:02; MAGEB4; ENSG00000120289; CTA
TTAMTSAYSR

SEQ ID NO: 43845 - protein, 10 aa, Homo sapiens
  Table A; Target 43845; HLA-C*07:06; MAGEB4; ENSG00000120289; CTA
TTAMTSAYSR

SEQ ID NO: 43846 - protein, 9 aa, Homo sapiens
  Table A; Target 43846; HLA-A*02:07; MAGEB4; ENSG00000120289; CTA
TTPNNFPLL

SEQ ID NO: 43847 - protein, 9 aa, Homo sapiens
  Table A; Target 43847; HLA-A*24:02; MAGEB4; ENSG00000120289; CTA
TTPNNFPLL

SEQ ID NO: 43848 - protein, 9 aa, Homo sapiens
  Table A; Target 43848; HLA-A*25:01; MAGEB4; ENSG00000120289; CTA
TTPNNFPLL

SEQ ID NO: 43849 - protein, 9 aa, Homo sapiens
  Table A; Target 43849; HLA-A*26:01; MAGEB4; ENSG00000120289; CTA
TTPNNFPLL

SEQ ID NO: 43850 - protein, 9 aa, Homo sapiens
  Table A; Target 43850; HLA-A*68:02; MAGEB4; ENSG00000120289; CTA
TTPNNFPLL

SEQ ID NO: 43851 - protein, 10 aa, Homo sapiens
  Table A; Target 43851; HLA-A*01:01; MAGEB4; ENSG00000120289; CTA
TTPNNFPLLY

SEQ ID NO: 43852 - protein, 10 aa, Homo sapiens
  Table A; Target 43852; HLA-A*25:01; MAGEB4; ENSG00000120289; CTA
TTPNNFPLLY

SEQ ID NO: 43853 - protein, 10 aa, Homo sapiens
  Table A; Target 43853; HLA-A*26:01; MAGEB4; ENSG00000120289; CTA
TTPNNFPLLY

SEQ ID NO: 43854 - protein, 10 aa, Homo sapiens
  Table A; Target 43854; HLA-A*29:02; MAGEB4; ENSG00000120289; CTA
TTPNNFPLLY

SEQ ID NO: 43855 - protein, 10 aa, Homo sapiens
  Table A; Target 43855; HLA-B*57:01; MAGEB4; ENSG00000120289; CTA
TTPNNFPLLY

SEQ ID NO: 43856 - protein, 9 aa, Homo sapiens
  Table A; Target 43856; HLA-B*54:01; MAGEB4; ENSG00000120289; CTA
VAARRGTTA

SEQ ID NO: 43857 - protein, 9 aa, Homo sapiens
  Table A; Target 43857; HLA-C*16:01; MAGEB4; ENSG00000120289; CTA
VAARRGTTA

SEQ ID NO: 43858 - protein, 9 aa, Homo sapiens
  Table A; Target 43858; HLA-A*03:02; MAGEB4; ENSG00000120289; CTA
VGQPTAAEK

SEQ ID NO: 43859 - protein, 9 aa, Homo sapiens
  Table A; Target 43859; HLA-A*11:01; MAGEB4; ENSG00000120289; CTA
VGQPTAAEK

SEQ ID NO: 43860 - protein, 9 aa, Homo sapiens
  Table A; Target 43860; HLA-B*27:02; MAGEB4; ENSG00000120289; CTA
VGQPTAAEK

SEQ ID NO: 43861 - protein, 9 aa, Homo sapiens
  Table A; Target 43861; HLA-C*01:02; MAGEB4; ENSG00000120289; CTA
VGQPTAAEK

SEQ ID NO: 43862 - protein, 9 aa, Homo sapiens
  Table A; Target 43862; HLA-C*07:06; MAGEB4; ENSG00000120289; CTA
VGQPTAAEK

SEQ ID NO: 43863 - protein, 10 aa, Homo sapiens
  Table A; Target 43863; HLA-A*02:03; MAGEB4; ENSG00000120289; CTA
VLRDTASSSL

SEQ ID NO: 43864 - protein, 10 aa, Homo sapiens
  Table A; Target 43864; HLA-A*03:01; MAGEB4; ENSG00000120289; CTA
VLRDTASSSL

SEQ ID NO: 43865 - protein, 10 aa, Homo sapiens
  Table A; Target 43865; HLA-B*07:02; MAGEB4; ENSG00000120289; CTA
VLRDTASSSL

SEQ ID NO: 43866 - protein, 10 aa, Homo sapiens
  Table A; Target 43866; HLA-B*15:01; MAGEB4; ENSG00000120289; CTA
VLRDTASSSL

SEQ ID NO: 43867 - protein, 10 aa, Homo sapiens
  Table A; Target 43867; HLA-B*15:03; MAGEB4; ENSG00000120289; CTA
VLRDTASSSL

SEQ ID NO: 43868 - protein, 10 aa, Homo sapiens
  Table A; Target 43868; HLA-B*46:01; MAGEB4; ENSG00000120289; CTA
VLRDTASSSL

SEQ ID NO: 43869 - protein, 10 aa, Homo sapiens
  Table A; Target 43869; HLA-C*01:02; MAGEB4; ENSG00000120289; CTA
VLRDTASSSL

SEQ ID NO: 43870 - protein, 10 aa, Homo sapiens
  Table A; Target 43870; HLA-C*07:02; MAGEB4; ENSG00000120289; CTA
VLRDTASSSL

SEQ ID NO: 43871 - protein, 10 aa, Homo sapiens
  Table A; Target 43871; HLA-C*07:04; MAGEB4; ENSG00000120289; CTA
VLRDTASSSL

SEQ ID NO: 43872 - protein, 10 aa, Homo sapiens
  Table A; Target 43872; HLA-C*14:02; MAGEB4; ENSG00000120289; CTA
VLRDTASSSL

SEQ ID NO: 43873 - protein, 9 aa, Homo sapiens
  Table A; Target 43873; HLA-C*04:01; MAGEB4; ENSG00000120289; CTA
VNDTTPNNF

SEQ ID NO: 43874 - protein, 9 aa, Homo sapiens
  Table A; Target 43874; HLA-C*05:01; MAGEB4; ENSG00000120289; CTA
VNDTTPNNF

SEQ ID NO: 43875 - protein, 8 aa, Homo sapiens
  Table A; Target 43875; HLA-C*14:02; MAGEB4; ENSG00000120289; CTA
VNPTTHSY

SEQ ID NO: 43876 - protein, 9 aa, Homo sapiens
  Table A; Target 43876; HLA-A*23:01; MAGEB4; ENSG00000120289; CTA
VSQRTELVF

SEQ ID NO: 43877 - protein, 9 aa, Homo sapiens
  Table A; Target 43877; HLA-A*32:01; MAGEB4; ENSG00000120289; CTA
VSQRTELVF

SEQ ID NO: 43878 - protein, 9 aa, Homo sapiens
  Table A; Target 43878; HLA-B*15:01; MAGEB4; ENSG00000120289; CTA
VSQRTELVF

SEQ ID NO: 43879 - protein, 9 aa, Homo sapiens
  Table A; Target 43879; HLA-B*46:01; MAGEB4; ENSG00000120289; CTA
VSQRTELVF

SEQ ID NO: 43880 - protein, 9 aa, Homo sapiens
  Table A; Target 43880; HLA-B*57:01; MAGEB4; ENSG00000120289; CTA
VSQRTELVF

SEQ ID NO: 43881 - protein, 9 aa, Homo sapiens
  Table A; Target 43881; HLA-B*58:01; MAGEB4; ENSG00000120289; CTA
VSQRTELVF

SEQ ID NO: 43882 - protein, 9 aa, Homo sapiens
  Table A; Target 43882; HLA-C*03:04; MAGEB4; ENSG00000120289; CTA
VSQRTELVF

SEQ ID NO: 43883 - protein, 9 aa, Homo sapiens
  Table A; Target 43883; HLA-C*12:03; MAGEB4; ENSG00000120289; CTA
VSQRTELVF

SEQ ID NO: 43884 - protein, 9 aa, Homo sapiens
  Table A; Target 43884; HLA-C*16:01; MAGEB4; ENSG00000120289; CTA
VSQRTELVF

SEQ ID NO: 43885 - protein, 9 aa, Homo sapiens
  Table A; Target 43885; HLA-B*49:01; MAGEB4; ENSG00000120289; CTA
WEFLNMLGI

SEQ ID NO: 43886 - protein, 10 aa, Homo sapiens
  Table A; Target 43886; HLA-A*11:01; MAGEB6; ENSG00000176746; CTA
ACTLAQFLQK

SEQ ID NO: 43887 - protein, 11 aa, Homo sapiens
  Table A; Target 43887; HLA-A*30:02; MAGEB6; ENSG00000176746; CTA
ADSSNTSPGLY

SEQ ID NO: 43888 - protein, 9 aa, Homo sapiens
  Table A; Target 43888; HLA-A*30:01; MAGEB6; ENSG00000176746; CTA
AETTKMRVL

SEQ ID NO: 43889 - protein, 9 aa, Homo sapiens
  Table A; Target 43889; HLA-B*37:01; MAGEB6; ENSG00000176746; CTA
AETTKMRVL

SEQ ID NO: 43890 - protein, 9 aa, Homo sapiens
  Table A; Target 43890; HLA-B*40:01; MAGEB6; ENSG00000176746; CTA
AETTKMRVL

SEQ ID NO: 43891 - protein, 9 aa, Homo sapiens
  Table A; Target 43891; HLA-B*40:02; MAGEB6; ENSG00000176746; CTA
AETTKMRVL

SEQ ID NO: 43892 - protein, 9 aa, Homo sapiens
  Table A; Target 43892; HLA-B*44:02; MAGEB6; ENSG00000176746; CTA
AETTKMRVL

SEQ ID NO: 43893 - protein, 9 aa, Homo sapiens
  Table A; Target 43893; HLA-B*44:03; MAGEB6; ENSG00000176746; CTA
AETTKMRVL

SEQ ID NO: 43894 - protein, 9 aa, Homo sapiens
  Table A; Target 43894; HLA-C*12:03; MAGEB6; ENSG00000176746; CTA
AETTKMRVL

SEQ ID NO: 43895 - protein, 9 aa, Homo sapiens
  Table A; Target 43895; HLA-C*16:01; MAGEB6; ENSG00000176746; CTA
AETTKMRVL

SEQ ID NO: 43896 - protein, 9 aa, Homo sapiens
  Table A; Target 43896; HLA-C*16:02; MAGEB6; ENSG00000176746; CTA
AETTKMRVL

SEQ ID NO: 43897 - protein, 9 aa, Homo sapiens
  Table A; Target 43897; HLA-A*02:03; MAGEB6; ENSG00000176746; CTA
ALIDEVERA

SEQ ID NO: 43898 - protein, 9 aa, Homo sapiens
  Table A; Target 43898; HLA-A*02:04; MAGEB6; ENSG00000176746; CTA
ALIDEVERA

SEQ ID NO: 43899 - protein, 9 aa, Homo sapiens
  Table A; Target 43899; HLA-A*02:07; MAGEB6; ENSG00000176746; CTA
ALIDEVERA

SEQ ID NO: 43900 - protein, 9 aa, Homo sapiens
  Table A; Target 43900; HLA-B*55:01; MAGEB6; ENSG00000176746; CTA
ALIDEVERA

SEQ ID NO: 43901 - protein, 10 aa, Homo sapiens
  Table A; Target 43901; HLA-A*02:01; MAGEB6; ENSG00000176746; CTA
ALIDEVERAL

SEQ ID NO: 43902 - protein, 10 aa, Homo sapiens
  Table A; Target 43902; HLA-A*02:03; MAGEB6; ENSG00000176746; CTA
ALIDEVERAL

SEQ ID NO: 43903 - protein, 10 aa, Homo sapiens
  Table A; Target 43903; HLA-A*02:04; MAGEB6; ENSG00000176746; CTA
ALIDEVERAL

SEQ ID NO: 43904 - protein, 10 aa, Homo sapiens
  Table A; Target 43904; HLA-A*25:01; MAGEB6; ENSG00000176746; CTA
ALIDEVERAL

SEQ ID NO: 43905 - protein, 10 aa, Homo sapiens
  Table A; Target 43905; HLA-A*30:01; MAGEB6; ENSG00000176746; CTA
ALIDEVERAL

SEQ ID NO: 43906 - protein, 10 aa, Homo sapiens
  Table A; Target 43906; HLA-B*15:01; MAGEB6; ENSG00000176746; CTA
ALIDEVERAL

SEQ ID NO: 43907 - protein, 10 aa, Homo sapiens
  Table A; Target 43907; HLA-B*40:01; MAGEB6; ENSG00000176746; CTA
ALIDEVERAL

SEQ ID NO: 43908 - protein, 10 aa, Homo sapiens
  Table A; Target 43908; HLA-B*46:01; MAGEB6; ENSG00000176746; CTA
ALIDEVERAL

SEQ ID NO: 43909 - protein, 10 aa, Homo sapiens
  Table A; Target 43909; HLA-B*55:01; MAGEB6; ENSG00000176746; CTA
ALIDEVERAL

SEQ ID NO: 43910 - protein, 10 aa, Homo sapiens
  Table A; Target 43910; HLA-C*01:02; MAGEB6; ENSG00000176746; CTA
ALIDEVERAL

SEQ ID NO: 43911 - protein, 11 aa, Homo sapiens
  Table A; Target 43911; HLA-A*31:01; MAGEB6; ENSG00000176746; CTA
ALIDEVERALR

SEQ ID NO: 43912 - protein, 9 aa, Homo sapiens
  Table A; Target 43912; HLA-A*01:01; MAGEB6; ENSG00000176746; CTA
ALPKSGLLM

SEQ ID NO: 43913 - protein, 9 aa, Homo sapiens
  Table A; Target 43913; HLA-A*03:01; MAGEB6; ENSG00000176746; CTA
ALPKSGLLM

SEQ ID NO: 43914 - protein, 11 aa, Homo sapiens
  Table A; Target 43914; HLA-A*02:04; MAGEB6; ENSG00000176746; CTA
ALPKSGLLMSL

SEQ ID NO: 43915 - protein, 11 aa, Homo sapiens
  Table A; Target 43915; HLA-A*02:07; MAGEB6; ENSG00000176746; CTA
ALPKSGLLMSL

SEQ ID NO: 43916 - protein, 8 aa, Homo sapiens
  Table A; Target 43916; HLA-B*15:01; MAGEB6; ENSG00000176746; CTA
AQFLQKKF

SEQ ID NO: 43917 - protein, 8 aa, Homo sapiens
  Table A; Target 43917; HLA-B*15:03; MAGEB6; ENSG00000176746; CTA
AQFLQKKF

SEQ ID NO: 43918 - protein, 10 aa, Homo sapiens
  Table A; Target 43918; HLA-A*11:01; MAGEB6; ENSG00000176746; CTA
AQFLQKKFEK

SEQ ID NO: 43919 - protein, 8 aa, Homo sapiens
  Table A; Target 43919; HLA-B*58:01; MAGEB6; ENSG00000176746; CTA
ASQKAIIF

SEQ ID NO: 43920 - protein, 9 aa, Homo sapiens
  Table A; Target 43920; HLA-A*03:01; MAGEB6; ENSG00000176746; CTA
ASQKAIIFK

SEQ ID NO: 43921 - protein, 9 aa, Homo sapiens
  Table A; Target 43921; HLA-A*03:02; MAGEB6; ENSG00000176746; CTA
ASQKAIIFK

SEQ ID NO: 43922 - protein, 9 aa, Homo sapiens
  Table A; Target 43922; HLA-A*31:01; MAGEB6; ENSG00000176746; CTA
ASQKAIIFK

SEQ ID NO: 43923 - protein, 10 aa, Homo sapiens
  Table A; Target 43923; HLA-A*31:01; MAGEB6; ENSG00000176746; CTA
ASQKAIIFKR

SEQ ID NO: 43924 - protein, 9 aa, Homo sapiens
  Table A; Target 43924; HLA-C*05:01; MAGEB6; ENSG00000176746; CTA
ATEEEVWEF

SEQ ID NO: 43925 - protein, 9 aa, Homo sapiens
  Table A; Target 43925; HLA-B*08:01; MAGEB6; ENSG00000176746; CTA
AVKKKACTL

SEQ ID NO: 43926 - protein, 9 aa, Homo sapiens
  Table A; Target 43926; HLA-A*31:01; MAGEB6; ENSG00000176746; CTA
AYAETTKMR

SEQ ID NO: 43927 - protein, 9 aa, Homo sapiens
  Table A; Target 43927; HLA-A*33:03; MAGEB6; ENSG00000176746; CTA
AYAETTKMR

SEQ ID NO: 43928 - protein, 11 aa, Homo sapiens
  Table A; Target 43928; HLA-A*24:02; MAGEB6; ENSG00000176746; CTA
AYAETTKMRVL

SEQ ID NO: 43929 - protein, 9 aa, Homo sapiens
  Table A; Target 43929; HLA-A*03:01; MAGEB6; ENSG00000176746; CTA
CTLAQFLQK

SEQ ID NO: 43930 - protein, 9 aa, Homo sapiens
  Table A; Target 43930; HLA-A*03:02; MAGEB6; ENSG00000176746; CTA
CTLAQFLQK

SEQ ID NO: 43931 - protein, 9 aa, Homo sapiens
  Table A; Target 43931; HLA-A*11:01; MAGEB6; ENSG00000176746; CTA
CTLAQFLQK

SEQ ID NO: 43932 - protein, 10 aa, Homo sapiens
  Table A; Target 43932; HLA-A*11:01; MAGEB6; ENSG00000176746; CTA
CTLAQFLQKK

SEQ ID NO: 43933 - protein, 9 aa, Homo sapiens
  Table A; Target 43933; HLA-A*33:01; MAGEB6; ENSG00000176746; CTA
DALIDEVER

SEQ ID NO: 43934 - protein, 9 aa, Homo sapiens
  Table A; Target 43934; HLA-A*33:03; MAGEB6; ENSG00000176746; CTA
DALIDEVER

SEQ ID NO: 43935 - protein, 9 aa, Homo sapiens
  Table A; Target 43935; HLA-A*68:01; MAGEB6; ENSG00000176746; CTA
DALIDEVER

SEQ ID NO: 43936 - protein, 9 aa, Homo sapiens
  Table A; Target 43936; HLA-C*07:06; MAGEB6; ENSG00000176746; CTA
DALIDEVER

SEQ ID NO: 43937 - protein, 9 aa, Homo sapiens
  Table A; Target 43937; HLA-C*07:06; MAGEB6; ENSG00000176746; CTA
DASIPQESQ

SEQ ID NO: 43938 - protein, 9 aa, Homo sapiens
  Table A; Target 43938; HLA-C*07:06; MAGEB6; ENSG00000176746; CTA
DASVPQESQ

SEQ ID NO: 43939 - protein, 8 aa, Homo sapiens
  Table A; Target 43939; HLA-B*08:01; MAGEB6; ENSG00000176746; CTA
DAVKKKAC

SEQ ID NO: 43940 - protein, 10 aa, Homo sapiens
  Table A; Target 43940; HLA-B*08:01; MAGEB6; ENSG00000176746; CTA
DAVKKKACTL

SEQ ID NO: 43941 - protein, 8 aa, Homo sapiens
  Table A; Target 43941; HLA-B*51:01; MAGEB6; ENSG00000176746; CTA
DAVVSYSK

SEQ ID NO: 43942 - protein, 9 aa, Homo sapiens
  Table A; Target 43942; HLA-B*18:01; MAGEB6; ENSG00000176746; CTA
DEKSPSTSH

SEQ ID NO: 43943 - protein, 9 aa, Homo sapiens
  Table A; Target 43943; HLA-A*33:01; MAGEB6; ENSG00000176746; CTA
DEKSPSTSR

SEQ ID NO: 43944 - protein, 9 aa, Homo sapiens
  Table A; Target 43944; HLA-A*33:03; MAGEB6; ENSG00000176746; CTA
DEKSPSTSR

SEQ ID NO: 43945 - protein, 9 aa, Homo sapiens
  Table A; Target 43945; HLA-B*18:01; MAGEB6; ENSG00000176746; CTA
DEKSPSTSR

SEQ ID NO: 43946 - protein, 9 aa, Homo sapiens
  Table A; Target 43946; HLA-C*07:06; MAGEB6; ENSG00000176746; CTA
DEKSPSTSR

SEQ ID NO: 43947 - protein, 9 aa, Homo sapiens
  Table A; Target 43947; HLA-B*18:01; MAGEB6; ENSG00000176746; CTA
DEVERALRL

SEQ ID NO: 43948 - protein, 9 aa, Homo sapiens
  Table A; Target 43948; HLA-B*37:01; MAGEB6; ENSG00000176746; CTA
DEVERALRL

SEQ ID NO: 43949 - protein, 9 aa, Homo sapiens
  Table A; Target 43949; HLA-B*44:02; MAGEB6; ENSG00000176746; CTA
DEVERALRL

SEQ ID NO: 43950 - protein, 9 aa, Homo sapiens
  Table A; Target 43950; HLA-B*44:03; MAGEB6; ENSG00000176746; CTA
DEVERALRL

SEQ ID NO: 43951 - protein, 8 aa, Homo sapiens
  Table A; Target 43951; HLA-B*08:01; MAGEB6; ENSG00000176746; CTA
DGILHSIY

SEQ ID NO: 43952 - protein, 8 aa, Homo sapiens
  Table A; Target 43952; HLA-B*18:01; MAGEB6; ENSG00000176746; CTA
DGILHSIY

SEQ ID NO: 43953 - protein, 8 aa, Homo sapiens
  Table A; Target 43953; HLA-C*12:03; MAGEB6; ENSG00000176746; CTA
DGILHSIY

SEQ ID NO: 43954 - protein, 9 aa, Homo sapiens
  Table A; Target 43954; HLA-B*08:01; MAGEB6; ENSG00000176746; CTA
DLVQDKYVV

SEQ ID NO: 43955 - protein, 10 aa, Homo sapiens
  Table A; Target 43955; HLA-A*25:01; MAGEB6; ENSG00000176746; CTA
DLVQDKYVVY

SEQ ID NO: 43956 - protein, 10 aa, Homo sapiens
  Table A; Target 43956; HLA-A*26:01; MAGEB6; ENSG00000176746; CTA
DLVQDKYVVY

SEQ ID NO: 43957 - protein, 10 aa, Homo sapiens
  Table A; Target 43957; HLA-B*35:01; MAGEB6; ENSG00000176746; CTA
DLVQDKYVVY

SEQ ID NO: 43958 - protein, 11 aa, Homo sapiens
  Table A; Target 43958; HLA-A*33:01; MAGEB6; ENSG00000176746; CTA
DLVQDKYVVYR

SEQ ID NO: 43959 - protein, 9 aa, Homo sapiens
  Table A; Target 43959; HLA-A*33:01; MAGEB6; ENSG00000176746; CTA
DNALPKSGL

SEQ ID NO: 43960 - protein, 9 aa, Homo sapiens
  Table A; Target 43960; HLA-B*08:01; MAGEB6; ENSG00000176746; CTA
DNALPKSGL

SEQ ID NO: 43961 - protein, 9 aa, Homo sapiens
  Table A; Target 43961; HLA-B*27:05; MAGEB6; ENSG00000176746; CTA
DSSGESYTL

SEQ ID NO: 43962 - protein, 9 aa, Homo sapiens
  Table A; Target 43962; HLA-B*35:03; MAGEB6; ENSG00000176746; CTA
DSSGESYTL

SEQ ID NO: 43963 - protein, 9 aa, Homo sapiens
  Table A; Target 43963; HLA-B*38:01; MAGEB6; ENSG00000176746; CTA
DSSGESYTL

SEQ ID NO: 43964 - protein, 9 aa, Homo sapiens
  Table A; Target 43964; HLA-B*39:01; MAGEB6; ENSG00000176746; CTA
DSSGESYTL

SEQ ID NO: 43965 - protein, 10 aa, Homo sapiens
  Table A; Target 43965; HLA-A*01:01; MAGEB6; ENSG00000176746; CTA
DSSNTSPGLY

SEQ ID NO: 43966 - protein, 10 aa, Homo sapiens
  Table A; Target 43966; HLA-A*26:01; MAGEB6; ENSG00000176746; CTA
DSSNTSPGLY

SEQ ID NO: 43967 - protein, 10 aa, Homo sapiens
  Table A; Target 43967; HLA-B*27:02; MAGEB6; ENSG00000176746; CTA
EDALIDEVER

SEQ ID NO: 43968 - protein, 11 aa, Homo sapiens
  Table A; Target 43968; HLA-B*27:02; MAGEB6; ENSG00000176746; CTA
EDEESVSASQK

SEQ ID NO: 43969 - protein, 8 aa, Homo sapiens
  Table A; Target 43969; HLA-B*18:01; MAGEB6; ENSG00000176746; CTA
EDLVQDKY

SEQ ID NO: 43970 - protein, 11 aa, Homo sapiens
  Table A; Target 43970; HLA-B*44:02; MAGEB6; ENSG00000176746; CTA
EESVSASQKAI

SEQ ID NO: 43971 - protein, 11 aa, Homo sapiens
  Table A; Target 43971; HLA-B*44:03; MAGEB6; ENSG00000176746; CTA
EESVSASQKAI

SEQ ID NO: 43972 - protein, 9 aa, Homo sapiens
  Table A; Target 43972; HLA-A*29:02; MAGEB6; ENSG00000176746; CTA
EFLGLLGIY

SEQ ID NO: 43973 - protein, 10 aa, Homo sapiens
  Table A; Target 43973; HLA-B*35:03; MAGEB6; ENSG00000176746; CTA
EGILSGDNAL

SEQ ID NO: 43974 - protein, 9 aa, Homo sapiens
  Table A; Target 43974; HLA-A*01:01; MAGEB6; ENSG00000176746; CTA
EMDSSGESY

SEQ ID NO: 43975 - protein, 9 aa, Homo sapiens
  Table A; Target 43975; HLA-A*26:01; MAGEB6; ENSG00000176746; CTA
EMDSSGESY

SEQ ID NO: 43976 - protein, 9 aa, Homo sapiens
  Table A; Target 43976; HLA-A*30:02; MAGEB6; ENSG00000176746; CTA
EMDSSGESY

SEQ ID NO: 43977 - protein, 9 aa, Homo sapiens
  Table A; Target 43977; HLA-B*15:01; MAGEB6; ENSG00000176746; CTA
EMDSSGESY

SEQ ID NO: 43978 - protein, 9 aa, Homo sapiens
  Table A; Target 43978; HLA-B*18:01; MAGEB6; ENSG00000176746; CTA
EMDSSGESY

SEQ ID NO: 43979 - protein, 9 aa, Homo sapiens
  Table A; Target 43979; HLA-B*39:01; MAGEB6; ENSG00000176746; CTA
EMDSSGESY

SEQ ID NO: 43980 - protein, 9 aa, Homo sapiens
  Table A; Target 43980; HLA-C*05:01; MAGEB6; ENSG00000176746; CTA
EMDSSGESY

SEQ ID NO: 43981 - protein, 9 aa, Homo sapiens
  Table A; Target 43981; HLA-C*07:04; MAGEB6; ENSG00000176746; CTA
EMDSSGESY

SEQ ID NO: 43982 - protein, 11 aa, Homo sapiens
  Table A; Target 43982; HLA-B*38:01; MAGEB6; ENSG00000176746; CTA
EMDSSGESYTL

SEQ ID NO: 43983 - protein, 11 aa, Homo sapiens
  Table A; Target 43983; HLA-B*39:01; MAGEB6; ENSG00000176746; CTA
EMDSSGESYTL

SEQ ID NO: 43984 - protein, 10 aa, Homo sapiens
  Table A; Target 43984; HLA-A*33:03; MAGEB6; ENSG00000176746; CTA
ESHSSSSSSR

SEQ ID NO: 43985 - protein, 8 aa, Homo sapiens
  Table A; Target 43985; HLA-B*08:01; MAGEB6; ENSG00000176746; CTA
ESILKADM

SEQ ID NO: 43986 - protein, 8 aa, Homo sapiens
  Table A; Target 43986; HLA-A*11:01; MAGEB6; ENSG00000176746; CTA
ESYTLVSK

SEQ ID NO: 43987 - protein, 8 aa, Homo sapiens
  Table A; Target 43987; HLA-A*33:01; MAGEB6; ENSG00000176746; CTA
ESYTLVSK

SEQ ID NO: 43988 - protein, 8 aa, Homo sapiens
  Table A; Target 43988; HLA-A*33:03; MAGEB6; ENSG00000176746; CTA
ESYTLVSK

SEQ ID NO: 43989 - protein, 9 aa, Homo sapiens
  Table A; Target 43989; HLA-A*25:01; MAGEB6; ENSG00000176746; CTA
ESYTLVSKL

SEQ ID NO: 43990 - protein, 9 aa, Homo sapiens
  Table A; Target 43990; HLA-A*26:01; MAGEB6; ENSG00000176746; CTA
ESYTLVSKL

SEQ ID NO: 43991 - protein, 9 aa, Homo sapiens
  Table A; Target 43991; HLA-A*33:01; MAGEB6; ENSG00000176746; CTA
ESYTLVSKL

SEQ ID NO: 43992 - protein, 9 aa, Homo sapiens
  Table A; Target 43992; HLA-A*33:03; MAGEB6; ENSG00000176746; CTA
ESYTLVSKL

SEQ ID NO: 43993 - protein, 9 aa, Homo sapiens
  Table A; Target 43993; HLA-A*68:01; MAGEB6; ENSG00000176746; CTA
ESYTLVSKL

SEQ ID NO: 43994 - protein, 9 aa, Homo sapiens
  Table A; Target 43994; HLA-A*68:02; MAGEB6; ENSG00000176746; CTA
ESYTLVSKL

SEQ ID NO: 43995 - protein, 9 aa, Homo sapiens
  Table A; Target 43995; HLA-B*51:01; MAGEB6; ENSG00000176746; CTA
ESYTLVSKL

SEQ ID NO: 43996 - protein, 9 aa, Homo sapiens
  Table A; Target 43996; HLA-C*07:06; MAGEB6; ENSG00000176746; CTA
ESYTLVSKL

SEQ ID NO: 43997 - protein, 9 aa, Homo sapiens
  Table A; Target 43997; HLA-C*12:03; MAGEB6; ENSG00000176746; CTA
ESYTLVSKL

SEQ ID NO: 43998 - protein, 9 aa, Homo sapiens
  Table A; Target 43998; HLA-A*25:01; MAGEB6; ENSG00000176746; CTA
ETNGQPQGL

SEQ ID NO: 43999 - protein, 9 aa, Homo sapiens
  Table A; Target 43999; HLA-A*26:01; MAGEB6; ENSG00000176746; CTA
ETNGQPQGL

SEQ ID NO: 44000 - protein, 9 aa, Homo sapiens
  Table A; Target 44000; HLA-A*33:03; MAGEB6; ENSG00000176746; CTA
ETNGQPQGL

SEQ ID NO: 44001 - protein, 9 aa, Homo sapiens
  Table A; Target 44001; HLA-A*68:01; MAGEB6; ENSG00000176746; CTA
ETNGQPQGL

SEQ ID NO: 44002 - protein, 8 aa, Homo sapiens
  Table A; Target 44002; HLA-B*08:01; MAGEB6; ENSG00000176746; CTA
ETTKMRVL

SEQ ID NO: 44003 - protein, 9 aa, Homo sapiens
  Table A; Target 44003; HLA-A*33:01; MAGEB6; ENSG00000176746; CTA
ETTKMRVLR

SEQ ID NO: 44004 - protein, 9 aa, Homo sapiens
  Table A; Target 44004; HLA-A*33:03; MAGEB6; ENSG00000176746; CTA
ETTKMRVLR

SEQ ID NO: 44005 - protein, 9 aa, Homo sapiens
  Table A; Target 44005; HLA-A*33:01; MAGEB6; ENSG00000176746; CTA
EVERALRLR

SEQ ID NO: 44006 - protein, 9 aa, Homo sapiens
  Table A; Target 44006; HLA-A*68:02; MAGEB6; ENSG00000176746; CTA
EVWEFLGLL

SEQ ID NO: 44007 - protein, 9 aa, Homo sapiens
  Table A; Target 44007; HLA-A*23:01; MAGEB6; ENSG00000176746; CTA
EYKPYFPQI

SEQ ID NO: 44008 - protein, 9 aa, Homo sapiens
  Table A; Target 44008; HLA-A*24:02; MAGEB6; ENSG00000176746; CTA
EYKPYFPQI

SEQ ID NO: 44009 - protein, 9 aa, Homo sapiens
  Table A; Target 44009; HLA-A*31:01; MAGEB6; ENSG00000176746; CTA
EYKPYFPQI

SEQ ID NO: 44010 - protein, 9 aa, Homo sapiens
  Table A; Target 44010; HLA-A*33:01; MAGEB6; ENSG00000176746; CTA
EYKPYFPQI

SEQ ID NO: 44011 - protein, 9 aa, Homo sapiens
  Table A; Target 44011; HLA-A*33:03; MAGEB6; ENSG00000176746; CTA
EYKPYFPQI

SEQ ID NO: 44012 - protein, 10 aa, Homo sapiens
  Table A; Target 44012; HLA-A*24:02; MAGEB6; ENSG00000176746; CTA
EYKPYFPQIL

SEQ ID NO: 44013 - protein, 8 aa, Homo sapiens
  Table A; Target 44013; HLA-B*46:01; MAGEB6; ENSG00000176746; CTA
FGVELKEM

SEQ ID NO: 44014 - protein, 8 aa, Homo sapiens
  Table A; Target 44014; HLA-C*03:03; MAGEB6; ENSG00000176746; CTA
FGVELKEM

SEQ ID NO: 44015 - protein, 8 aa, Homo sapiens
  Table A; Target 44015; HLA-C*03:04; MAGEB6; ENSG00000176746; CTA
FGVELKEM

SEQ ID NO: 44016 - protein, 9 aa, Homo sapiens
  Table A; Target 44016; HLA-B*40:01; MAGEB6; ENSG00000176746; CTA
GEDEESVSA

SEQ ID NO: 44017 - protein, 9 aa, Homo sapiens
  Table A; Target 44017; HLA-B*49:01; MAGEB6; ENSG00000176746; CTA
GEDEESVSA

SEQ ID NO: 44018 - protein, 9 aa, Homo sapiens
  Table A; Target 44018; HLA-A*03:02; MAGEB6; ENSG00000176746; CTA
GESYTLVSK

SEQ ID NO: 44019 - protein, 9 aa, Homo sapiens
  Table A; Target 44019; HLA-A*11:01; MAGEB6; ENSG00000176746; CTA
GESYTLVSK

SEQ ID NO: 44020 - protein, 9 aa, Homo sapiens
  Table A; Target 44020; HLA-B*27:05; MAGEB6; ENSG00000176746; CTA
GESYTLVSK

SEQ ID NO: 44021 - protein, 10 aa, Homo sapiens
  Table A; Target 44021; HLA-A*30:01; MAGEB6; ENSG00000176746; CTA
GESYTLVSKL

SEQ ID NO: 44022 - protein, 10 aa, Homo sapiens
  Table A; Target 44022; HLA-B*40:01; MAGEB6; ENSG00000176746; CTA
GESYTLVSKL

SEQ ID NO: 44023 - protein, 10 aa, Homo sapiens
  Table A; Target 44023; HLA-B*49:01; MAGEB6; ENSG00000176746; CTA
GESYTLVSKL

SEQ ID NO: 44024 - protein, 11 aa, Homo sapiens
  Table A; Target 44024; HLA-A*03:01; MAGEB6; ENSG00000176746; CTA
GILSGDNALPK

SEQ ID NO: 44025 - protein, 11 aa, Homo sapiens
  Table A; Target 44025; HLA-A*03:02; MAGEB6; ENSG00000176746; CTA
GILSGDNALPK

SEQ ID NO: 44026 - protein, 11 aa, Homo sapiens
  Table A; Target 44026; HLA-A*11:01; MAGEB6; ENSG00000176746; CTA
GILSGDNALPK

SEQ ID NO: 44027 - protein, 11 aa, Homo sapiens
  Table A; Target 44027; HLA-B*27:02; MAGEB6; ENSG00000176746; CTA
GILSGDNALPK

SEQ ID NO: 44028 - protein, 10 aa, Homo sapiens
  Table A; Target 44028; HLA-A*02:01; MAGEB6; ENSG00000176746; CTA
GIYDGILHSI

SEQ ID NO: 44029 - protein, 10 aa, Homo sapiens
  Table A; Target 44029; HLA-A*02:03; MAGEB6; ENSG00000176746; CTA
GIYDGILHSI

SEQ ID NO: 44030 - protein, 10 aa, Homo sapiens
  Table A; Target 44030; HLA-A*02:04; MAGEB6; ENSG00000176746; CTA
GIYDGILHSI

SEQ ID NO: 44031 - protein, 10 aa, Homo sapiens
  Table A; Target 44031; HLA-A*02:07; MAGEB6; ENSG00000176746; CTA
GIYDGILHSI

SEQ ID NO: 44032 - protein, 10 aa, Homo sapiens
  Table A; Target 44032; HLA-A*03:01; MAGEB6; ENSG00000176746; CTA
GIYDGILHSI

SEQ ID NO: 44033 - protein, 10 aa, Homo sapiens
  Table A; Target 44033; HLA-A*23:01; MAGEB6; ENSG00000176746; CTA
GIYDGILHSI

SEQ ID NO: 44034 - protein, 10 aa, Homo sapiens
  Table A; Target 44034; HLA-A*25:01; MAGEB6; ENSG00000176746; CTA
GIYDGILHSI

SEQ ID NO: 44035 - protein, 10 aa, Homo sapiens
  Table A; Target 44035; HLA-A*30:01; MAGEB6; ENSG00000176746; CTA
GIYDGILHSI

SEQ ID NO: 44036 - protein, 10 aa, Homo sapiens
  Table A; Target 44036; HLA-A*32:01; MAGEB6; ENSG00000176746; CTA
GIYDGILHSI

SEQ ID NO: 44037 - protein, 10 aa, Homo sapiens
  Table A; Target 44037; HLA-A*68:02; MAGEB6; ENSG00000176746; CTA
GIYDGILHSI

SEQ ID NO: 44038 - protein, 10 aa, Homo sapiens
  Table A; Target 44038; HLA-B*13:02; MAGEB6; ENSG00000176746; CTA
GIYDGILHSI

SEQ ID NO: 44039 - protein, 10 aa, Homo sapiens
  Table A; Target 44039; HLA-B*46:01; MAGEB6; ENSG00000176746; CTA
GIYDGILHSI

SEQ ID NO: 44040 - protein, 10 aa, Homo sapiens
  Table A; Target 44040; HLA-B*49:01; MAGEB6; ENSG00000176746; CTA
GIYDGILHSI

SEQ ID NO: 44041 - protein, 10 aa, Homo sapiens
  Table A; Target 44041; HLA-B*55:01; MAGEB6; ENSG00000176746; CTA
GIYDGILHSI

SEQ ID NO: 44042 - protein, 10 aa, Homo sapiens
  Table A; Target 44042; HLA-C*02:02; MAGEB6; ENSG00000176746; CTA
GIYDGILHSI

SEQ ID NO: 44043 - protein, 11 aa, Homo sapiens
  Table A; Target 44043; HLA-A*01:01; MAGEB6; ENSG00000176746; CTA
GIYDGILHSIY

SEQ ID NO: 44044 - protein, 11 aa, Homo sapiens
  Table A; Target 44044; HLA-A*29:02; MAGEB6; ENSG00000176746; CTA
GIYDGILHSIY

SEQ ID NO: 44045 - protein, 11 aa, Homo sapiens
  Table A; Target 44045; HLA-A*30:02; MAGEB6; ENSG00000176746; CTA
GIYDGILHSIY

SEQ ID NO: 44046 - protein, 11 aa, Homo sapiens
  Table A; Target 44046; HLA-B*15:01; MAGEB6; ENSG00000176746; CTA
GIYDGILHSIY

SEQ ID NO: 44047 - protein, 9 aa, Homo sapiens
  Table A; Target 44047; HLA-A*02:04; MAGEB6; ENSG00000176746; CTA
GLLGIYDGI

SEQ ID NO: 44048 - protein, 10 aa, Homo sapiens
  Table A; Target 44048; HLA-A*02:04; MAGEB6; ENSG00000176746; CTA
GLLGIYDGIL

SEQ ID NO: 44049 - protein, 9 aa, Homo sapiens
  Table A; Target 44049; HLA-A*02:04; MAGEB6; ENSG00000176746; CTA
GLLMSLLVV

SEQ ID NO: 44050 - protein, 11 aa, Homo sapiens
  Table A; Target 44050; HLA-A*03:02; MAGEB6; ENSG00000176746; CTA
GLTGPQATAEK

SEQ ID NO: 44051 - protein, 11 aa, Homo sapiens
  Table A; Target 44051; HLA-A*02:04; MAGEB6; ENSG00000176746; CTA
GLYPHLYEDAL

SEQ ID NO: 44052 - protein, 11 aa, Homo sapiens
  Table A; Target 44052; HLA-A*31:01; MAGEB6; ENSG00000176746; CTA
GQDEKSPSTSR

SEQ ID NO: 44053 - protein, 11 aa, Homo sapiens
  Table A; Target 44053; HLA-B*27:05; MAGEB6; ENSG00000176746; CTA
GQDEKSPSTSR

SEQ ID NO: 44054 - protein, 9 aa, Homo sapiens
  Table A; Target 44054; HLA-A*11:01; MAGEB6; ENSG00000176746; CTA
GSPDAVVSY

SEQ ID NO: 44055 - protein, 9 aa, Homo sapiens
  Table A; Target 44055; HLA-A*25:01; MAGEB6; ENSG00000176746; CTA
GSPDAVVSY

SEQ ID NO: 44056 - protein, 9 aa, Homo sapiens
  Table A; Target 44056; HLA-A*26:01; MAGEB6; ENSG00000176746; CTA
GSPDAVVSY

SEQ ID NO: 44057 - protein, 9 aa, Homo sapiens
  Table A; Target 44057; HLA-A*29:02; MAGEB6; ENSG00000176746; CTA
GSPDAVVSY

SEQ ID NO: 44058 - protein, 9 aa, Homo sapiens
  Table A; Target 44058; HLA-A*30:02; MAGEB6; ENSG00000176746; CTA
GSPDAVVSY

SEQ ID NO: 44059 - protein, 9 aa, Homo sapiens
  Table A; Target 44059; HLA-A*32:01; MAGEB6; ENSG00000176746; CTA
GSPDAVVSY

SEQ ID NO: 44060 - protein, 9 aa, Homo sapiens
  Table A; Target 44060; HLA-B*15:01; MAGEB6; ENSG00000176746; CTA
GSPDAVVSY

SEQ ID NO: 44061 - protein, 9 aa, Homo sapiens
  Table A; Target 44061; HLA-B*15:03; MAGEB6; ENSG00000176746; CTA
GSPDAVVSY

SEQ ID NO: 44062 - protein, 9 aa, Homo sapiens
  Table A; Target 44062; HLA-B*46:01; MAGEB6; ENSG00000176746; CTA
GSPDAVVSY

SEQ ID NO: 44063 - protein, 9 aa, Homo sapiens
  Table A; Target 44063; HLA-B*58:01; MAGEB6; ENSG00000176746; CTA
GSPDAVVSY

SEQ ID NO: 44064 - protein, 9 aa, Homo sapiens
  Table A; Target 44064; HLA-C*01:02; MAGEB6; ENSG00000176746; CTA
GSPDAVVSY

SEQ ID NO: 44065 - protein, 9 aa, Homo sapiens
  Table A; Target 44065; HLA-C*02:02; MAGEB6; ENSG00000176746; CTA
GSPDAVVSY

SEQ ID NO: 44066 - protein, 9 aa, Homo sapiens
  Table A; Target 44066; HLA-C*07:04; MAGEB6; ENSG00000176746; CTA
GSPDAVVSY

SEQ ID NO: 44067 - protein, 9 aa, Homo sapiens
  Table A; Target 44067; HLA-C*14:02; MAGEB6; ENSG00000176746; CTA
GSPDAVVSY

SEQ ID NO: 44068 - protein, 11 aa, Homo sapiens
  Table A; Target 44068; HLA-A*03:02; MAGEB6; ENSG00000176746; CTA
GSPDAVVSYSK

SEQ ID NO: 44069 - protein, 11 aa, Homo sapiens
  Table A; Target 44069; HLA-A*11:01; MAGEB6; ENSG00000176746; CTA
GSPDAVVSYSK

SEQ ID NO: 44070 - protein, 11 aa, Homo sapiens
  Table A; Target 44070; HLA-B*27:02; MAGEB6; ENSG00000176746; CTA
GSPDAVVSYSK

SEQ ID NO: 44071 - protein, 11 aa, Homo sapiens
  Table A; Target 44071; HLA-A*02:01; MAGEB6; ENSG00000176746; CTA
HLYEDALIDEV

SEQ ID NO: 44072 - protein, 11 aa, Homo sapiens
  Table A; Target 44072; HLA-A*29:02; MAGEB6; ENSG00000176746; CTA
IITEDLVQDKY

SEQ ID NO: 44073 - protein, 10 aa, Homo sapiens
  Table A; Target 44073; HLA-A*03:01; MAGEB6; ENSG00000176746; CTA
ILSGDNALPK

SEQ ID NO: 44074 - protein, 10 aa, Homo sapiens
  Table A; Target 44074; HLA-A*03:02; MAGEB6; ENSG00000176746; CTA
ILSGDNALPK

SEQ ID NO: 44075 - protein, 8 aa, Homo sapiens
  Table A; Target 44075; HLA-B*51:01; MAGEB6; ENSG00000176746; CTA
IPQESQGV

SEQ ID NO: 44076 - protein, 8 aa, Homo sapiens
  Table A; Target 44076; HLA-B*56:01; MAGEB6; ENSG00000176746; CTA
IPQESQGV

SEQ ID NO: 44077 - protein, 10 aa, Homo sapiens
  Table A; Target 44077; HLA-B*56:01; MAGEB6; ENSG00000176746; CTA
IPQESQGVSP

SEQ ID NO: 44078 - protein, 9 aa, Homo sapiens
  Table A; Target 44078; HLA-A*01:01; MAGEB6; ENSG00000176746; CTA
ITEDLVQDK

SEQ ID NO: 44079 - protein, 9 aa, Homo sapiens
  Table A; Target 44079; HLA-A*03:02; MAGEB6; ENSG00000176746; CTA
ITEDLVQDK

SEQ ID NO: 44080 - protein, 9 aa, Homo sapiens
  Table A; Target 44080; HLA-A*11:01; MAGEB6; ENSG00000176746; CTA
ITEDLVQDK

SEQ ID NO: 44081 - protein, 10 aa, Homo sapiens
  Table A; Target 44081; HLA-A*01:01; MAGEB6; ENSG00000176746; CTA
ITEDLVQDKY

SEQ ID NO: 44082 - protein, 10 aa, Homo sapiens
  Table A; Target 44082; HLA-A*26:01; MAGEB6; ENSG00000176746; CTA
ITEDLVQDKY

SEQ ID NO: 44083 - protein, 10 aa, Homo sapiens
  Table A; Target 44083; HLA-A*29:02; MAGEB6; ENSG00000176746; CTA
ITEDLVQDKY

SEQ ID NO: 44084 - protein, 10 aa, Homo sapiens
  Table A; Target 44084; HLA-A*30:02; MAGEB6; ENSG00000176746; CTA
ITEDLVQDKY

SEQ ID NO: 44085 - protein, 10 aa, Homo sapiens
  Table A; Target 44085; HLA-B*58:01; MAGEB6; ENSG00000176746; CTA
ITEDLVQDKY

SEQ ID NO: 44086 - protein, 9 aa, Homo sapiens
  Table A; Target 44086; HLA-A*02:01; MAGEB6; ENSG00000176746; CTA
IYDGILHSI

SEQ ID NO: 44087 - protein, 9 aa, Homo sapiens
  Table A; Target 44087; HLA-A*02:07; MAGEB6; ENSG00000176746; CTA
IYDGILHSI

SEQ ID NO: 44088 - protein, 9 aa, Homo sapiens
  Table A; Target 44088; HLA-A*23:01; MAGEB6; ENSG00000176746; CTA
IYDGILHSI

SEQ ID NO: 44089 - protein, 9 aa, Homo sapiens
  Table A; Target 44089; HLA-A*29:02; MAGEB6; ENSG00000176746; CTA
IYDGILHSI

SEQ ID NO: 44090 - protein, 9 aa, Homo sapiens
  Table A; Target 44090; HLA-A*30:01; MAGEB6; ENSG00000176746; CTA
IYDGILHSI

SEQ ID NO: 44091 - protein, 9 aa, Homo sapiens
  Table A; Target 44091; HLA-A*32:01; MAGEB6; ENSG00000176746; CTA
IYDGILHSI

SEQ ID NO: 44092 - protein, 9 aa, Homo sapiens
  Table A; Target 44092; HLA-B*35:01; MAGEB6; ENSG00000176746; CTA
IYDGILHSI

SEQ ID NO: 44093 - protein, 9 aa, Homo sapiens
  Table A; Target 44093; HLA-B*35:03; MAGEB6; ENSG00000176746; CTA
IYDGILHSI

SEQ ID NO: 44094 - protein, 9 aa, Homo sapiens
  Table A; Target 44094; HLA-B*38:01; MAGEB6; ENSG00000176746; CTA
IYDGILHSI

SEQ ID NO: 44095 - protein, 9 aa, Homo sapiens
  Table A; Target 44095; HLA-B*49:01; MAGEB6; ENSG00000176746; CTA
IYDGILHSI

SEQ ID NO: 44096 - protein, 9 aa, Homo sapiens
  Table A; Target 44096; HLA-B*51:01; MAGEB6; ENSG00000176746; CTA
IYDGILHSI

SEQ ID NO: 44097 - protein, 9 aa, Homo sapiens
  Table A; Target 44097; HLA-B*55:01; MAGEB6; ENSG00000176746; CTA
IYDGILHSI

SEQ ID NO: 44098 - protein, 9 aa, Homo sapiens
  Table A; Target 44098; HLA-B*58:01; MAGEB6; ENSG00000176746; CTA
IYDGILHSI

SEQ ID NO: 44099 - protein, 9 aa, Homo sapiens
  Table A; Target 44099; HLA-C*04:01; MAGEB6; ENSG00000176746; CTA
IYDGILHSI

SEQ ID NO: 44100 - protein, 9 aa, Homo sapiens
  Table A; Target 44100; HLA-C*05:01; MAGEB6; ENSG00000176746; CTA
IYDGILHSI

SEQ ID NO: 44101 - protein, 9 aa, Homo sapiens
  Table A; Target 44101; HLA-C*07:04; MAGEB6; ENSG00000176746; CTA
IYDGILHSI

SEQ ID NO: 44102 - protein, 9 aa, Homo sapiens
  Table A; Target 44102; HLA-C*14:02; MAGEB6; ENSG00000176746; CTA
IYDGILHSI

SEQ ID NO: 44103 - protein, 9 aa, Homo sapiens
  Table A; Target 44103; HLA-C*16:02; MAGEB6; ENSG00000176746; CTA
IYDGILHSI

SEQ ID NO: 44104 - protein, 10 aa, Homo sapiens
  Table A; Target 44104; HLA-A*29:02; MAGEB6; ENSG00000176746; CTA
IYDGILHSIY

SEQ ID NO: 44105 - protein, 8 aa, Homo sapiens
  Table A; Target 44105; HLA-A*24:02; MAGEB6; ENSG00000176746; CTA
IYGDARKI

SEQ ID NO: 44106 - protein, 9 aa, Homo sapiens
  Table A; Target 44106; HLA-A*24:02; MAGEB6; ENSG00000176746; CTA
IYGDARKII

SEQ ID NO: 44107 - protein, 10 aa, Homo sapiens
  Table A; Target 44107; HLA-A*25:01; MAGEB6; ENSG00000176746; CTA
KEMDSSGESY

SEQ ID NO: 44108 - protein, 10 aa, Homo sapiens
  Table A; Target 44108; HLA-A*26:01; MAGEB6; ENSG00000176746; CTA
KEMDSSGESY

SEQ ID NO: 44109 - protein, 10 aa, Homo sapiens
  Table A; Target 44109; HLA-A*30:01; MAGEB6; ENSG00000176746; CTA
KEMDSSGESY

SEQ ID NO: 44110 - protein, 10 aa, Homo sapiens
  Table A; Target 44110; HLA-A*30:02; MAGEB6; ENSG00000176746; CTA
KEMDSSGESY

SEQ ID NO: 44111 - protein, 10 aa, Homo sapiens
  Table A; Target 44111; HLA-A*32:01; MAGEB6; ENSG00000176746; CTA
KEMDSSGESY

SEQ ID NO: 44112 - protein, 10 aa, Homo sapiens
  Table A; Target 44112; HLA-B*15:01; MAGEB6; ENSG00000176746; CTA
KEMDSSGESY

SEQ ID NO: 44113 - protein, 10 aa, Homo sapiens
  Table A; Target 44113; HLA-B*15:03; MAGEB6; ENSG00000176746; CTA
KEMDSSGESY

SEQ ID NO: 44114 - protein, 10 aa, Homo sapiens
  Table A; Target 44114; HLA-B*18:01; MAGEB6; ENSG00000176746; CTA
KEMDSSGESY

SEQ ID NO: 44115 - protein, 10 aa, Homo sapiens
  Table A; Target 44115; HLA-B*27:02; MAGEB6; ENSG00000176746; CTA
KEMDSSGESY

SEQ ID NO: 44116 - protein, 10 aa, Homo sapiens
  Table A; Target 44116; HLA-B*37:01; MAGEB6; ENSG00000176746; CTA
KEMDSSGESY

SEQ ID NO: 44117 - protein, 10 aa, Homo sapiens
  Table A; Target 44117; HLA-B*39:01; MAGEB6; ENSG00000176746; CTA
KEMDSSGESY

SEQ ID NO: 44118 - protein, 10 aa, Homo sapiens
  Table A; Target 44118; HLA-B*40:01; MAGEB6; ENSG00000176746; CTA
KEMDSSGESY

SEQ ID NO: 44119 - protein, 10 aa, Homo sapiens
  Table A; Target 44119; HLA-B*40:02; MAGEB6; ENSG00000176746; CTA
KEMDSSGESY

SEQ ID NO: 44120 - protein, 10 aa, Homo sapiens
  Table A; Target 44120; HLA-B*44:02; MAGEB6; ENSG00000176746; CTA
KEMDSSGESY

SEQ ID NO: 44121 - protein, 10 aa, Homo sapiens
  Table A; Target 44121; HLA-B*46:01; MAGEB6; ENSG00000176746; CTA
KEMDSSGESY

SEQ ID NO: 44122 - protein, 10 aa, Homo sapiens
  Table A; Target 44122; HLA-B*49:01; MAGEB6; ENSG00000176746; CTA
KEMDSSGESY

SEQ ID NO: 44123 - protein, 10 aa, Homo sapiens
  Table A; Target 44123; HLA-B*58:01; MAGEB6; ENSG00000176746; CTA
KEMDSSGESY

SEQ ID NO: 44124 - protein, 10 aa, Homo sapiens
  Table A; Target 44124; HLA-C*02:02; MAGEB6; ENSG00000176746; CTA
KEMDSSGESY

SEQ ID NO: 44125 - protein, 10 aa, Homo sapiens
  Table A; Target 44125; HLA-C*07:04; MAGEB6; ENSG00000176746; CTA
KEMDSSGESY

SEQ ID NO: 44126 - protein, 10 aa, Homo sapiens
  Table A; Target 44126; HLA-C*14:02; MAGEB6; ENSG00000176746; CTA
KEMDSSGESY

SEQ ID NO: 44127 - protein, 10 aa, Homo sapiens
  Table A; Target 44127; HLA-C*16:04; MAGEB6; ENSG00000176746; CTA
KEMDSSGESY

SEQ ID NO: 44128 - protein, 9 aa, Homo sapiens
  Table A; Target 44128; HLA-B*37:01; MAGEB6; ENSG00000176746; CTA
KESILKADM

SEQ ID NO: 44129 - protein, 9 aa, Homo sapiens
  Table A; Target 44129; HLA-B*40:01; MAGEB6; ENSG00000176746; CTA
KESILKADM

SEQ ID NO: 44130 - protein, 10 aa, Homo sapiens
  Table A; Target 44130; HLA-B*40:01; MAGEB6; ENSG00000176746; CTA
KESILKADML

SEQ ID NO: 44131 - protein, 11 aa, Homo sapiens
  Table A; Target 44131; HLA-A*03:01; MAGEB6; ENSG00000176746; CTA
KIITEDLVQDK

SEQ ID NO: 44132 - protein, 11 aa, Homo sapiens
  Table A; Target 44132; HLA-A*03:02; MAGEB6; ENSG00000176746; CTA
KIITEDLVQDK

SEQ ID NO: 44133 - protein, 11 aa, Homo sapiens
  Table A; Target 44133; HLA-A*11:01; MAGEB6; ENSG00000176746; CTA
KIITEDLVQDK

SEQ ID NO: 44134 - protein, 8 aa, Homo sapiens
  Table A; Target 44134; HLA-B*07:02; MAGEB6; ENSG00000176746; CTA
KPYFPQIL

SEQ ID NO: 44135 - protein, 8 aa, Homo sapiens
  Table A; Target 44135; HLA-B*08:01; MAGEB6; ENSG00000176746; CTA
KPYFPQIL

SEQ ID NO: 44136 - protein, 8 aa, Homo sapiens
  Table A; Target 44136; HLA-C*04:01; MAGEB6; ENSG00000176746; CTA
KYDVAANG

SEQ ID NO: 44137 - protein, 9 aa, Homo sapiens
  Table A; Target 44137; HLA-C*05:01; MAGEB6; ENSG00000176746; CTA
LADSSNTSP

SEQ ID NO: 44138 - protein, 11 aa, Homo sapiens
  Table A; Target 44138; HLA-C*05:01; MAGEB6; ENSG00000176746; CTA
LADSSNTSPGL

SEQ ID NO: 44139 - protein, 8 aa, Homo sapiens
  Table A; Target 44139; HLA-C*05:01; MAGEB6; ENSG00000176746; CTA
LIDEVERA

SEQ ID NO: 44140 - protein, 9 aa, Homo sapiens
  Table A; Target 44140; HLA-A*02:07; MAGEB6; ENSG00000176746; CTA
LIDEVERAL

SEQ ID NO: 44141 - protein, 9 aa, Homo sapiens
  Table A; Target 44141; HLA-B*07:02; MAGEB6; ENSG00000176746; CTA
LIDEVERAL

SEQ ID NO: 44142 - protein, 9 aa, Homo sapiens
  Table A; Target 44142; HLA-B*35:03; MAGEB6; ENSG00000176746; CTA
LIDEVERAL

SEQ ID NO: 44143 - protein, 9 aa, Homo sapiens
  Table A; Target 44143; HLA-B*38:01; MAGEB6; ENSG00000176746; CTA
LIDEVERAL

SEQ ID NO: 44144 - protein, 9 aa, Homo sapiens
  Table A; Target 44144; HLA-C*01:02; MAGEB6; ENSG00000176746; CTA
LIDEVERAL

SEQ ID NO: 44145 - protein, 9 aa, Homo sapiens
  Table A; Target 44145; HLA-C*03:03; MAGEB6; ENSG00000176746; CTA
LIDEVERAL

SEQ ID NO: 44146 - protein, 9 aa, Homo sapiens
  Table A; Target 44146; HLA-C*03:04; MAGEB6; ENSG00000176746; CTA
LIDEVERAL

SEQ ID NO: 44147 - protein, 9 aa, Homo sapiens
  Table A; Target 44147; HLA-C*04:01; MAGEB6; ENSG00000176746; CTA
LIDEVERAL

SEQ ID NO: 44148 - protein, 9 aa, Homo sapiens
  Table A; Target 44148; HLA-C*05:01; MAGEB6; ENSG00000176746; CTA
LIDEVERAL

SEQ ID NO: 44149 - protein, 9 aa, Homo sapiens
  Table A; Target 44149; HLA-C*16:01; MAGEB6; ENSG00000176746; CTA
LIDEVERAL

SEQ ID NO: 44150 - protein, 9 aa, Homo sapiens
  Table A; Target 44150; HLA-C*16:02; MAGEB6; ENSG00000176746; CTA
LIDEVERAL

SEQ ID NO: 44151 - protein, 11 aa, Homo sapiens
  Table A; Target 44151; HLA-A*02:07; MAGEB6; ENSG00000176746; CTA
LIDEVERALRL

SEQ ID NO: 44152 - protein, 9 aa, Homo sapiens
  Table A; Target 44152; HLA-A*02:01; MAGEB6; ENSG00000176746; CTA
LLMSLLVVI

SEQ ID NO: 44153 - protein, 9 aa, Homo sapiens
  Table A; Target 44153; HLA-A*02:04; MAGEB6; ENSG00000176746; CTA
LLMSLLVVI

SEQ ID NO: 44154 - protein, 8 aa, Homo sapiens
  Table A; Target 44154; HLA-B*08:01; MAGEB6; ENSG00000176746; CTA
LPKSGLLM

SEQ ID NO: 44155 - protein, 8 aa, Homo sapiens
  Table A; Target 44155; HLA-B*51:01; MAGEB6; ENSG00000176746; CTA
LPKSGLLM

SEQ ID NO: 44156 - protein, 10 aa, Homo sapiens
  Table A; Target 44156; HLA-B*07:02; MAGEB6; ENSG00000176746; CTA
LPKSGLLMSL

SEQ ID NO: 44157 - protein, 10 aa, Homo sapiens
  Table A; Target 44157; HLA-C*07:02; MAGEB6; ENSG00000176746; CTA
LPKSGLLMSL

SEQ ID NO: 44158 - protein, 9 aa, Homo sapiens
  Table A; Target 44158; HLA-B*35:03; MAGEB6; ENSG00000176746; CTA
LPSEGILSG

SEQ ID NO: 44159 - protein, 9 aa, Homo sapiens
  Table A; Target 44159; HLA-B*54:01; MAGEB6; ENSG00000176746; CTA
LPSEGILSG

SEQ ID NO: 44160 - protein, 9 aa, Homo sapiens
  Table A; Target 44160; HLA-B*56:01; MAGEB6; ENSG00000176746; CTA
LPSEGILSG

SEQ ID NO: 44161 - protein, 8 aa, Homo sapiens
  Table A; Target 44161; HLA-B*08:01; MAGEB6; ENSG00000176746; CTA
LVQDKYVV

SEQ ID NO: 44162 - protein, 9 aa, Homo sapiens
  Table A; Target 44162; HLA-A*01:01; MAGEB6; ENSG00000176746; CTA
LVQDKYVVY

SEQ ID NO: 44163 - protein, 9 aa, Homo sapiens
  Table A; Target 44163; HLA-A*11:01; MAGEB6; ENSG00000176746; CTA
LVQDKYVVY

SEQ ID NO: 44164 - protein, 9 aa, Homo sapiens
  Table A; Target 44164; HLA-A*25:01; MAGEB6; ENSG00000176746; CTA
LVQDKYVVY

SEQ ID NO: 44165 - protein, 9 aa, Homo sapiens
  Table A; Target 44165; HLA-A*26:01; MAGEB6; ENSG00000176746; CTA
LVQDKYVVY

SEQ ID NO: 44166 - protein, 9 aa, Homo sapiens
  Table A; Target 44166; HLA-A*29:02; MAGEB6; ENSG00000176746; CTA
LVQDKYVVY

SEQ ID NO: 44167 - protein, 9 aa, Homo sapiens
  Table A; Target 44167; HLA-A*30:02; MAGEB6; ENSG00000176746; CTA
LVQDKYVVY

SEQ ID NO: 44168 - protein, 9 aa, Homo sapiens
  Table A; Target 44168; HLA-A*32:01; MAGEB6; ENSG00000176746; CTA
LVQDKYVVY

SEQ ID NO: 44169 - protein, 9 aa, Homo sapiens
  Table A; Target 44169; HLA-B*15:01; MAGEB6; ENSG00000176746; CTA
LVQDKYVVY

SEQ ID NO: 44170 - protein, 9 aa, Homo sapiens
  Table A; Target 44170; HLA-B*35:01; MAGEB6; ENSG00000176746; CTA
LVQDKYVVY

SEQ ID NO: 44171 - protein, 9 aa, Homo sapiens
  Table A; Target 44171; HLA-B*46:01; MAGEB6; ENSG00000176746; CTA
LVQDKYVVY

SEQ ID NO: 44172 - protein, 9 aa, Homo sapiens
  Table A; Target 44172; HLA-B*58:01; MAGEB6; ENSG00000176746; CTA
LVQDKYVVY

SEQ ID NO: 44173 - protein, 9 aa, Homo sapiens
  Table A; Target 44173; HLA-C*02:02; MAGEB6; ENSG00000176746; CTA
LVQDKYVVY

SEQ ID NO: 44174 - protein, 9 aa, Homo sapiens
  Table A; Target 44174; HLA-C*07:04; MAGEB6; ENSG00000176746; CTA
LVQDKYVVY

SEQ ID NO: 44175 - protein, 9 aa, Homo sapiens
  Table A; Target 44175; HLA-C*12:03; MAGEB6; ENSG00000176746; CTA
LVQDKYVVY

SEQ ID NO: 44176 - protein, 9 aa, Homo sapiens
  Table A; Target 44176; HLA-C*14:02; MAGEB6; ENSG00000176746; CTA
LVQDKYVVY

SEQ ID NO: 44177 - protein, 9 aa, Homo sapiens
  Table A; Target 44177; HLA-C*16:01; MAGEB6; ENSG00000176746; CTA
LVQDKYVVY

SEQ ID NO: 44178 - protein, 10 aa, Homo sapiens
  Table A; Target 44178; HLA-A*03:02; MAGEB6; ENSG00000176746; CTA
LVQDKYVVYR

SEQ ID NO: 44179 - protein, 10 aa, Homo sapiens
  Table A; Target 44179; HLA-A*11:01; MAGEB6; ENSG00000176746; CTA
LVQDKYVVYR

SEQ ID NO: 44180 - protein, 10 aa, Homo sapiens
  Table A; Target 44180; HLA-A*31:01; MAGEB6; ENSG00000176746; CTA
LVQDKYVVYR

SEQ ID NO: 44181 - protein, 10 aa, Homo sapiens
  Table A; Target 44181; HLA-A*33:01; MAGEB6; ENSG00000176746; CTA
LVQDKYVVYR

SEQ ID NO: 44182 - protein, 10 aa, Homo sapiens
  Table A; Target 44182; HLA-A*33:03; MAGEB6; ENSG00000176746; CTA
LVQDKYVVYR

SEQ ID NO: 44183 - protein, 10 aa, Homo sapiens
  Table A; Target 44183; HLA-A*68:01; MAGEB6; ENSG00000176746; CTA
LVQDKYVVYR

SEQ ID NO: 44184 - protein, 9 aa, Homo sapiens
  Table A; Target 44184; HLA-A*02:07; MAGEB6; ENSG00000176746; CTA
LVVAFGVEL

SEQ ID NO: 44185 - protein, 9 aa, Homo sapiens
  Table A; Target 44185; HLA-A*30:01; MAGEB6; ENSG00000176746; CTA
LVVAFGVEL

SEQ ID NO: 44186 - protein, 9 aa, Homo sapiens
  Table A; Target 44186; HLA-A*68:02; MAGEB6; ENSG00000176746; CTA
LVVAFGVEL

SEQ ID NO: 44187 - protein, 9 aa, Homo sapiens
  Table A; Target 44187; HLA-B*15:01; MAGEB6; ENSG00000176746; CTA
LVVAFGVEL

SEQ ID NO: 44188 - protein, 9 aa, Homo sapiens
  Table A; Target 44188; HLA-B*35:01; MAGEB6; ENSG00000176746; CTA
LVVAFGVEL

SEQ ID NO: 44189 - protein, 9 aa, Homo sapiens
  Table A; Target 44189; HLA-B*35:03; MAGEB6; ENSG00000176746; CTA
LVVAFGVEL

SEQ ID NO: 44190 - protein, 9 aa, Homo sapiens
  Table A; Target 44190; HLA-B*40:01; MAGEB6; ENSG00000176746; CTA
LVVAFGVEL

SEQ ID NO: 44191 - protein, 9 aa, Homo sapiens
  Table A; Target 44191; HLA-B*46:01; MAGEB6; ENSG00000176746; CTA
LVVAFGVEL

SEQ ID NO: 44192 - protein, 9 aa, Homo sapiens
  Table A; Target 44192; HLA-B*54:01; MAGEB6; ENSG00000176746; CTA
LVVAFGVEL

SEQ ID NO: 44193 - protein, 9 aa, Homo sapiens
  Table A; Target 44193; HLA-B*58:01; MAGEB6; ENSG00000176746; CTA
LVVAFGVEL

SEQ ID NO: 44194 - protein, 9 aa, Homo sapiens
  Table A; Target 44194; HLA-C*01:02; MAGEB6; ENSG00000176746; CTA
LVVAFGVEL

SEQ ID NO: 44195 - protein, 9 aa, Homo sapiens
  Table A; Target 44195; HLA-C*02:02; MAGEB6; ENSG00000176746; CTA
LVVAFGVEL

SEQ ID NO: 44196 - protein, 9 aa, Homo sapiens
  Table A; Target 44196; HLA-C*03:03; MAGEB6; ENSG00000176746; CTA
LVVAFGVEL

SEQ ID NO: 44197 - protein, 9 aa, Homo sapiens
  Table A; Target 44197; HLA-C*03:04; MAGEB6; ENSG00000176746; CTA
LVVAFGVEL

SEQ ID NO: 44198 - protein, 9 aa, Homo sapiens
  Table A; Target 44198; HLA-C*12:03; MAGEB6; ENSG00000176746; CTA
LVVAFGVEL

SEQ ID NO: 44199 - protein, 9 aa, Homo sapiens
  Table A; Target 44199; HLA-C*16:04; MAGEB6; ENSG00000176746; CTA
LVVAFGVEL

SEQ ID NO: 44200 - protein, 8 aa, Homo sapiens
  Table A; Target 44200; HLA-A*30:02; MAGEB6; ENSG00000176746; CTA
MDSSGESY

SEQ ID NO: 44201 - protein, 8 aa, Homo sapiens
  Table A; Target 44201; HLA-B*18:01; MAGEB6; ENSG00000176746; CTA
MDSSGESY

SEQ ID NO: 44202 - protein, 8 aa, Homo sapiens
  Table A; Target 44202; HLA-B*37:01; MAGEB6; ENSG00000176746; CTA
MDSSGESY

SEQ ID NO: 44203 - protein, 8 aa, Homo sapiens
  Table A; Target 44203; HLA-B*39:01; MAGEB6; ENSG00000176746; CTA
MDSSGESY

SEQ ID NO: 44204 - protein, 10 aa, Homo sapiens
  Table A; Target 44204; HLA-B*38:01; MAGEB6; ENSG00000176746; CTA
MDSSGESYTL

SEQ ID NO: 44205 - protein, 10 aa, Homo sapiens
  Table A; Target 44205; HLA-B*39:01; MAGEB6; ENSG00000176746; CTA
MDSSGESYTL

SEQ ID NO: 44206 - protein, 8 aa, Homo sapiens
  Table A; Target 44206; HLA-B*08:01; MAGEB6; ENSG00000176746; CTA
NALPKSGL

SEQ ID NO: 44207 - protein, 9 aa, Homo sapiens
  Table A; Target 44207; HLA-B*08:01; MAGEB6; ENSG00000176746; CTA
NALPKSGLL

SEQ ID NO: 44208 - protein, 9 aa, Homo sapiens
  Table A; Target 44208; HLA-C*03:03; MAGEB6; ENSG00000176746; CTA
NALPKSGLL

SEQ ID NO: 44209 - protein, 9 aa, Homo sapiens
  Table A; Target 44209; HLA-C*03:04; MAGEB6; ENSG00000176746; CTA
NALPKSGLL

SEQ ID NO: 44210 - protein, 9 aa, Homo sapiens
  Table A; Target 44210; HLA-A*01:01; MAGEB6; ENSG00000176746; CTA
NSDPPCYEF

SEQ ID NO: 44211 - protein, 9 aa, Homo sapiens
  Table A; Target 44211; HLA-B*35:01; MAGEB6; ENSG00000176746; CTA
NSDPPCYEF

SEQ ID NO: 44212 - protein, 9 aa, Homo sapiens
  Table A; Target 44212; HLA-B*38:01; MAGEB6; ENSG00000176746; CTA
NSDPPCYEF

SEQ ID NO: 44213 - protein, 9 aa, Homo sapiens
  Table A; Target 44213; HLA-B*58:01; MAGEB6; ENSG00000176746; CTA
NSDPPCYEF

SEQ ID NO: 44214 - protein, 9 aa, Homo sapiens
  Table A; Target 44214; HLA-C*03:04; MAGEB6; ENSG00000176746; CTA
NSDPPCYEF

SEQ ID NO: 44215 - protein, 9 aa, Homo sapiens
  Table A; Target 44215; HLA-C*05:01; MAGEB6; ENSG00000176746; CTA
NSDPPCYEF

SEQ ID NO: 44216 - protein, 9 aa, Homo sapiens
  Table A; Target 44216; HLA-C*07:04; MAGEB6; ENSG00000176746; CTA
NSDPPCYEF

SEQ ID NO: 44217 - protein, 10 aa, Homo sapiens
  Table A; Target 44217; HLA-A*01:01; MAGEB6; ENSG00000176746; CTA
NSDPPCYEFL

SEQ ID NO: 44218 - protein, 10 aa, Homo sapiens
  Table A; Target 44218; HLA-A*68:01; MAGEB6; ENSG00000176746; CTA
NTSPGLYPHL

SEQ ID NO: 44219 - protein, 10 aa, Homo sapiens
  Table A; Target 44219; HLA-A*68:02; MAGEB6; ENSG00000176746; CTA
NTSPGLYPHL

SEQ ID NO: 44220 - protein, 11 aa, Homo sapiens
  Table A; Target 44220; HLA-A*01:01; MAGEB6; ENSG00000176746; CTA
NTSPGLYPHLY

SEQ ID NO: 44221 - protein, 11 aa, Homo sapiens
  Table A; Target 44221; HLA-A*29:02; MAGEB6; ENSG00000176746; CTA
NTSPGLYPHLY

SEQ ID NO: 44222 - protein, 11 aa, Homo sapiens
  Table A; Target 44222; HLA-A*30:02; MAGEB6; ENSG00000176746; CTA
NTSPGLYPHLY

SEQ ID NO: 44223 - protein, 9 aa, Homo sapiens
  Table A; Target 44223; HLA-B*27:02; MAGEB6; ENSG00000176746; CTA
PDAVVSYSK

SEQ ID NO: 44224 - protein, 11 aa, Homo sapiens
  Table A; Target 44224; HLA-A*01:01; MAGEB6; ENSG00000176746; CTA
PTGSPDAVVSY

SEQ ID NO: 44225 - protein, 11 aa, Homo sapiens
  Table A; Target 44225; HLA-A*30:02; MAGEB6; ENSG00000176746; CTA
PTGSPDAVVSY

SEQ ID NO: 44226 - protein, 9 aa, Homo sapiens
  Table A; Target 44226; HLA-A*31:01; MAGEB6; ENSG00000176746; CTA
PYFPQILNR

SEQ ID NO: 44227 - protein, 9 aa, Homo sapiens
  Table A; Target 44227; HLA-A*33:01; MAGEB6; ENSG00000176746; CTA
PYFPQILNR

SEQ ID NO: 44228 - protein, 9 aa, Homo sapiens
  Table A; Target 44228; HLA-A*33:03; MAGEB6; ENSG00000176746; CTA
PYFPQILNR

SEQ ID NO: 44229 - protein, 10 aa, Homo sapiens
  Table A; Target 44229; HLA-A*30:01; MAGEB6; ENSG00000176746; CTA
QETNGQPQGL

SEQ ID NO: 44230 - protein, 10 aa, Homo sapiens
  Table A; Target 44230; HLA-B*40:01; MAGEB6; ENSG00000176746; CTA
QETNGQPQGL

SEQ ID NO: 44231 - protein, 10 aa, Homo sapiens
  Table A; Target 44231; HLA-B*44:02; MAGEB6; ENSG00000176746; CTA
QETNGQPQGL

SEQ ID NO: 44232 - protein, 10 aa, Homo sapiens
  Table A; Target 44232; HLA-B*44:03; MAGEB6; ENSG00000176746; CTA
QETNGQPQGL

SEQ ID NO: 44233 - protein, 10 aa, Homo sapiens
  Table A; Target 44233; HLA-C*16:04; MAGEB6; ENSG00000176746; CTA
QETNGQPQGL

SEQ ID NO: 44234 - protein, 10 aa, Homo sapiens
  Table A; Target 44234; HLA-B*54:01; MAGEB6; ENSG00000176746; CTA
QPQGLTGPQA

SEQ ID NO: 44235 - protein, 10 aa, Homo sapiens
  Table A; Target 44235; HLA-B*55:01; MAGEB6; ENSG00000176746; CTA
QPQGLTGPQA

SEQ ID NO: 44236 - protein, 10 aa, Homo sapiens
  Table A; Target 44236; HLA-B*56:01; MAGEB6; ENSG00000176746; CTA
QPQGLTGPQA

SEQ ID NO: 44237 - protein, 9 aa, Homo sapiens
  Table A; Target 44237; HLA-A*03:01; MAGEB6; ENSG00000176746; CTA
RLSKDAVKK

SEQ ID NO: 44238 - protein, 9 aa, Homo sapiens
  Table A; Target 44238; HLA-A*03:02; MAGEB6; ENSG00000176746; CTA
RLSKDAVKK

SEQ ID NO: 44239 - protein, 10 aa, Homo sapiens
  Table A; Target 44239; HLA-A*03:01; MAGEB6; ENSG00000176746; CTA
RLSKDAVKKK

SEQ ID NO: 44240 - protein, 10 aa, Homo sapiens
  Table A; Target 44240; HLA-A*03:02; MAGEB6; ENSG00000176746; CTA
RLSKDAVKKK

SEQ ID NO: 44241 - protein, 11 aa, Homo sapiens
  Table A; Target 44241; HLA-B*39:01; MAGEB6; ENSG00000176746; CTA
RQETNGQPQGL

SEQ ID NO: 44242 - protein, 11 aa, Homo sapiens
  Table A; Target 44242; HLA-A*30:02; MAGEB6; ENSG00000176746; CTA
RQVCNSDPPCY

SEQ ID NO: 44243 - protein, 10 aa, Homo sapiens
  Table A; Target 44243; HLA-B*57:01; MAGEB6; ENSG00000176746; CTA
RTSQHLVVAF

SEQ ID NO: 44244 - protein, 9 aa, Homo sapiens
  Table A; Target 44244; HLA-B*35:01; MAGEB6; ENSG00000176746; CTA
SASQKAIIF

SEQ ID NO: 44245 - protein, 9 aa, Homo sapiens
  Table A; Target 44245; HLA-B*37:01; MAGEB6; ENSG00000176746; CTA
SASQKAIIF

SEQ ID NO: 44246 - protein, 9 aa, Homo sapiens
  Table A; Target 44246; HLA-B*58:01; MAGEB6; ENSG00000176746; CTA
SASQKAIIF

SEQ ID NO: 44247 - protein, 9 aa, Homo sapiens
  Table A; Target 44247; HLA-C*02:02; MAGEB6; ENSG00000176746; CTA
SASQKAIIF

SEQ ID NO: 44248 - protein, 9 aa, Homo sapiens
  Table A; Target 44248; HLA-C*12:03; MAGEB6; ENSG00000176746; CTA
SASQKAIIF

SEQ ID NO: 44249 - protein, 9 aa, Homo sapiens
  Table A; Target 44249; HLA-C*16:01; MAGEB6; ENSG00000176746; CTA
SASQKAIIF

SEQ ID NO: 44250 - protein, 9 aa, Homo sapiens
  Table A; Target 44250; HLA-C*16:02; MAGEB6; ENSG00000176746; CTA
SASQKAIIF

SEQ ID NO: 44251 - protein, 10 aa, Homo sapiens
  Table A; Target 44251; HLA-A*03:01; MAGEB6; ENSG00000176746; CTA
SASQKAIIFK

SEQ ID NO: 44252 - protein, 10 aa, Homo sapiens
  Table A; Target 44252; HLA-A*03:02; MAGEB6; ENSG00000176746; CTA
SASQKAIIFK

SEQ ID NO: 44253 - protein, 10 aa, Homo sapiens
  Table A; Target 44253; HLA-A*11:01; MAGEB6; ENSG00000176746; CTA
SASQKAIIFK

SEQ ID NO: 44254 - protein, 10 aa, Homo sapiens
  Table A; Target 44254; HLA-A*68:01; MAGEB6; ENSG00000176746; CTA
SASQKAIIFK

SEQ ID NO: 44255 - protein, 8 aa, Homo sapiens
  Table A; Target 44255; HLA-B*37:01; MAGEB6; ENSG00000176746; CTA
SDPPCYEF

SEQ ID NO: 44256 - protein, 11 aa, Homo sapiens
  Table A; Target 44256; HLA-A*30:01; MAGEB6; ENSG00000176746; CTA
SEGILSGDNAL

SEQ ID NO: 44257 - protein, 11 aa, Homo sapiens
  Table A; Target 44257; HLA-B*40:01; MAGEB6; ENSG00000176746; CTA
SEGILSGDNAL

SEQ ID NO: 44258 - protein, 8 aa, Homo sapiens
  Table A; Target 44258; HLA-A*11:01; MAGEB6; ENSG00000176746; CTA
SGDNALPK

SEQ ID NO: 44259 - protein, 10 aa, Homo sapiens
  Table A; Target 44259; HLA-A*03:02; MAGEB6; ENSG00000176746; CTA
SGESYTLVSK

SEQ ID NO: 44260 - protein, 10 aa, Homo sapiens
  Table A; Target 44260; HLA-A*11:01; MAGEB6; ENSG00000176746; CTA
SGESYTLVSK

SEQ ID NO: 44261 - protein, 10 aa, Homo sapiens
  Table A; Target 44261; HLA-A*68:01; MAGEB6; ENSG00000176746; CTA
SGESYTLVSK

SEQ ID NO: 44262 - protein, 10 aa, Homo sapiens
  Table A; Target 44262; HLA-B*27:02; MAGEB6; ENSG00000176746; CTA
SGESYTLVSK

SEQ ID NO: 44263 - protein, 10 aa, Homo sapiens
  Table A; Target 44263; HLA-C*07:06; MAGEB6; ENSG00000176746; CTA
SGESYTLVSK

SEQ ID NO: 44264 - protein, 9 aa, Homo sapiens
  Table A; Target 44264; HLA-A*03:01; MAGEB6; ENSG00000176746; CTA
SILKADMLK

SEQ ID NO: 44265 - protein, 9 aa, Homo sapiens
  Table A; Target 44265; HLA-A*03:02; MAGEB6; ENSG00000176746; CTA
SILKADMLK

SEQ ID NO: 44266 - protein, 9 aa, Homo sapiens
  Table A; Target 44266; HLA-A*11:01; MAGEB6; ENSG00000176746; CTA
SILKADMLK

SEQ ID NO: 44267 - protein, 11 aa, Homo sapiens
  Table A; Target 44267; HLA-C*01:02; MAGEB6; ENSG00000176746; CTA
SIPQESQGVSP

SEQ ID NO: 44268 - protein, 8 aa, Homo sapiens
  Table A; Target 44268; HLA-A*30:02; MAGEB6; ENSG00000176746; CTA
SNTSPGLY

SEQ ID NO: 44269 - protein, 8 aa, Homo sapiens
  Table A; Target 44269; HLA-A*01:01; MAGEB6; ENSG00000176746; CTA
SPDAVVSY

SEQ ID NO: 44270 - protein, 8 aa, Homo sapiens
  Table A; Target 44270; HLA-B*18:01; MAGEB6; ENSG00000176746; CTA
SPDAVVSY

SEQ ID NO: 44271 - protein, 8 aa, Homo sapiens
  Table A; Target 44271; HLA-B*35:01; MAGEB6; ENSG00000176746; CTA
SPDAVVSY

SEQ ID NO: 44272 - protein, 8 aa, Homo sapiens
  Table A; Target 44272; HLA-B*55:01; MAGEB6; ENSG00000176746; CTA
SPDAVVSY

SEQ ID NO: 44273 - protein, 8 aa, Homo sapiens
  Table A; Target 44273; HLA-C*03:03; MAGEB6; ENSG00000176746; CTA
SPDAVVSY

SEQ ID NO: 44274 - protein, 8 aa, Homo sapiens
  Table A; Target 44274; HLA-C*05:01; MAGEB6; ENSG00000176746; CTA
SPDAVVSY

SEQ ID NO: 44275 - protein, 8 aa, Homo sapiens
  Table A; Target 44275; HLA-B*07:02; MAGEB6; ENSG00000176746; CTA
SPGLYPHL

SEQ ID NO: 44276 - protein, 8 aa, Homo sapiens
  Table A; Target 44276; HLA-C*07:02; MAGEB6; ENSG00000176746; CTA
SPGLYPHL

SEQ ID NO: 44277 - protein, 9 aa, Homo sapiens
  Table A; Target 44277; HLA-B*35:01; MAGEB6; ENSG00000176746; CTA
SPGLYPHLY

SEQ ID NO: 44278 - protein, 10 aa, Homo sapiens
  Table A; Target 44278; HLA-B*07:02; MAGEB6; ENSG00000176746; CTA
SPSTSHDVSV

SEQ ID NO: 44279 - protein, 10 aa, Homo sapiens
  Table A; Target 44279; HLA-B*56:01; MAGEB6; ENSG00000176746; CTA
SPSTSHDVSV

SEQ ID NO: 44280 - protein, 10 aa, Homo sapiens
  Table A; Target 44280; HLA-C*07:02; MAGEB6; ENSG00000176746; CTA
SPSTSHDVSV

SEQ ID NO: 44281 - protein, 10 aa, Homo sapiens
  Table A; Target 44281; HLA-B*07:02; MAGEB6; ENSG00000176746; CTA
SPSTSRDASV

SEQ ID NO: 44282 - protein, 10 aa, Homo sapiens
  Table A; Target 44282; HLA-C*07:02; MAGEB6; ENSG00000176746; CTA
SPSTSRDASV

SEQ ID NO: 44283 - protein, 9 aa, Homo sapiens
  Table A; Target 44283; HLA-B*07:02; MAGEB6; ENSG00000176746; CTA
SPTGSPDAV

SEQ ID NO: 44284 - protein, 9 aa, Homo sapiens
  Table A; Target 44284; HLA-B*56:01; MAGEB6; ENSG00000176746; CTA
SPTGSPDAV

SEQ ID NO: 44285 - protein, 10 aa, Homo sapiens
  Table A; Target 44285; HLA-B*35:03; MAGEB6; ENSG00000176746; CTA
SPTGSPDAVV

SEQ ID NO: 44286 - protein, 10 aa, Homo sapiens
  Table A; Target 44286; HLA-B*56:01; MAGEB6; ENSG00000176746; CTA
SPTGSPDAVV

SEQ ID NO: 44287 - protein, 8 aa, Homo sapiens
  Table A; Target 44287; HLA-A*32:01; MAGEB6; ENSG00000176746; CTA
SQHLVVAF

SEQ ID NO: 44288 - protein, 8 aa, Homo sapiens
  Table A; Target 44288; HLA-B*13:02; MAGEB6; ENSG00000176746; CTA
SQHLVVAF

SEQ ID NO: 44289 - protein, 8 aa, Homo sapiens
  Table A; Target 44289; HLA-B*15:01; MAGEB6; ENSG00000176746; CTA
SQHLVVAF

SEQ ID NO: 44290 - protein, 8 aa, Homo sapiens
  Table A; Target 44290; HLA-B*15:03; MAGEB6; ENSG00000176746; CTA
SQHLVVAF

SEQ ID NO: 44291 - protein, 8 aa, Homo sapiens
  Table A; Target 44291; HLA-B*18:01; MAGEB6; ENSG00000176746; CTA
SQHLVVAF

SEQ ID NO: 44292 - protein, 8 aa, Homo sapiens
  Table A; Target 44292; HLA-B*37:01; MAGEB6; ENSG00000176746; CTA
SQHLVVAF

SEQ ID NO: 44293 - protein, 8 aa, Homo sapiens
  Table A; Target 44293; HLA-C*07:04; MAGEB6; ENSG00000176746; CTA
SQHLVVAF

SEQ ID NO: 44294 - protein, 8 aa, Homo sapiens
  Table A; Target 44294; HLA-C*16:04; MAGEB6; ENSG00000176746; CTA
SQHLVVAF

SEQ ID NO: 44295 - protein, 9 aa, Homo sapiens
  Table A; Target 44295; HLA-A*31:01; MAGEB6; ENSG00000176746; CTA
SQKAIIFKR

SEQ ID NO: 44296 - protein, 9 aa, Homo sapiens
  Table A; Target 44296; HLA-A*33:01; MAGEB6; ENSG00000176746; CTA
SQKAIIFKR

SEQ ID NO: 44297 - protein, 9 aa, Homo sapiens
  Table A; Target 44297; HLA-A*33:03; MAGEB6; ENSG00000176746; CTA
SQKAIIFKR

SEQ ID NO: 44298 - protein, 11 aa, Homo sapiens
  Table A; Target 44298; HLA-A*03:02; MAGEB6; ENSG00000176746; CTA
SSGESYTLVSK

SEQ ID NO: 44299 - protein, 11 aa, Homo sapiens
  Table A; Target 44299; HLA-A*11:01; MAGEB6; ENSG00000176746; CTA
SSGESYTLVSK

SEQ ID NO: 44300 - protein, 11 aa, Homo sapiens
  Table A; Target 44300; HLA-A*68:01; MAGEB6; ENSG00000176746; CTA
SSGESYTLVSK

SEQ ID NO: 44301 - protein, 11 aa, Homo sapiens
  Table A; Target 44301; HLA-B*27:02; MAGEB6; ENSG00000176746; CTA
SSGESYTLVSK

SEQ ID NO: 44302 - protein, 9 aa, Homo sapiens
  Table A; Target 44302; HLA-A*01:01; MAGEB6; ENSG00000176746; CTA
SSNTSPGLY

SEQ ID NO: 44303 - protein, 9 aa, Homo sapiens
  Table A; Target 44303; HLA-A*30:02; MAGEB6; ENSG00000176746; CTA
SSNTSPGLY

SEQ ID NO: 44304 - protein, 9 aa, Homo sapiens
  Table A; Target 44304; HLA-B*15:03; MAGEB6; ENSG00000176746; CTA
SSNTSPGLY

SEQ ID NO: 44305 - protein, 9 aa, Homo sapiens
  Table A; Target 44305; HLA-B*58:01; MAGEB6; ENSG00000176746; CTA
SSNTSPGLY

SEQ ID NO: 44306 - protein, 8 aa, Homo sapiens
  Table A; Target 44306; HLA-C*16:01; MAGEB6; ENSG00000176746; CTA
SSSSRACL

SEQ ID NO: 44307 - protein, 9 aa, Homo sapiens
  Table A; Target 44307; HLA-B*07:02; MAGEB6; ENSG00000176746; CTA
SSSSSRACL

SEQ ID NO: 44308 - protein, 9 aa, Homo sapiens
  Table A; Target 44308; HLA-C*07:02; MAGEB6; ENSG00000176746; CTA
SSSSSRACL

SEQ ID NO: 44309 - protein, 9 aa, Homo sapiens
  Table A; Target 44309; HLA-C*16:01; MAGEB6; ENSG00000176746; CTA
SSSSSRACL

SEQ ID NO: 44310 - protein, 9 aa, Homo sapiens
  Table A; Target 44310; HLA-C*16:01; MAGEB6; ENSG00000176746; CTA
SSSSSSRAC

SEQ ID NO: 44311 - protein, 9 aa, Homo sapiens
  Table A; Target 44311; HLA-B*13:02; MAGEB6; ENSG00000176746; CTA
SVSASQKAI

SEQ ID NO: 44312 - protein, 8 aa, Homo sapiens
  Table A; Target 44312; HLA-A*23:01; MAGEB6; ENSG00000176746; CTA
SYTLVSKL

SEQ ID NO: 44313 - protein, 8 aa, Homo sapiens
  Table A; Target 44313; HLA-A*24:02; MAGEB6; ENSG00000176746; CTA
SYTLVSKL

SEQ ID NO: 44314 - protein, 8 aa, Homo sapiens
  Table A; Target 44314; HLA-C*14:02; MAGEB6; ENSG00000176746; CTA
SYTLVSKL

SEQ ID NO: 44315 - protein, 9 aa, Homo sapiens
  Table A; Target 44315; HLA-A*01:01; MAGEB6; ENSG00000176746; CTA
TEDLVQDKY

SEQ ID NO: 44316 - protein, 9 aa, Homo sapiens
  Table A; Target 44316; HLA-B*18:01; MAGEB6; ENSG00000176746; CTA
TEDLVQDKY

SEQ ID NO: 44317 - protein, 9 aa, Homo sapiens
  Table A; Target 44317; HLA-B*44:02; MAGEB6; ENSG00000176746; CTA
TEDLVQDKY

SEQ ID NO: 44318 - protein, 9 aa, Homo sapiens
  Table A; Target 44318; HLA-B*44:03; MAGEB6; ENSG00000176746; CTA
TEDLVQDKY

SEQ ID NO: 44319 - protein, 9 aa, Homo sapiens
  Table A; Target 44319; HLA-C*16:04; MAGEB6; ENSG00000176746; CTA
TEDLVQDKY

SEQ ID NO: 44320 - protein, 10 aa, Homo sapiens
  Table A; Target 44320; HLA-B*49:01; MAGEB6; ENSG00000176746; CTA
TEDLVQDKYV

SEQ ID NO: 44321 - protein, 11 aa, Homo sapiens
  Table A; Target 44321; HLA-B*49:01; MAGEB6; ENSG00000176746; CTA
TEDLVQDKYVV

SEQ ID NO: 44322 - protein, 8 aa, Homo sapiens
  Table A; Target 44322; HLA-B*18:01; MAGEB6; ENSG00000176746; CTA
TEEEVWEF

SEQ ID NO: 44323 - protein, 9 aa, Homo sapiens
  Table A; Target 44323; HLA-C*01:02; MAGEB6; ENSG00000176746; CTA
TGPQATAEK

SEQ ID NO: 44324 - protein, 10 aa, Homo sapiens
  Table A; Target 44324; HLA-A*30:02; MAGEB6; ENSG00000176746; CTA
TGSPDAVVSY

SEQ ID NO: 44325 - protein, 10 aa, Homo sapiens
  Table A; Target 44325; HLA-B*15:01; MAGEB6; ENSG00000176746; CTA
TGSPDAVVSY

SEQ ID NO: 44326 - protein, 10 aa, Homo sapiens
  Table A; Target 44326; HLA-B*35:01; MAGEB6; ENSG00000176746; CTA
TGSPDAVVSY

SEQ ID NO: 44327 - protein, 10 aa, Homo sapiens
  Table A; Target 44327; HLA-B*39:01; MAGEB6; ENSG00000176746; CTA
TGSPDAVVSY

SEQ ID NO: 44328 - protein, 10 aa, Homo sapiens
  Table A; Target 44328; HLA-C*03:03; MAGEB6; ENSG00000176746; CTA
TGSPDAVVSY

SEQ ID NO: 44329 - protein, 10 aa, Homo sapiens
  Table A; Target 44329; HLA-C*07:04; MAGEB6; ENSG00000176746; CTA
TGSPDAVVSY

SEQ ID NO: 44330 - protein, 10 aa, Homo sapiens
  Table A; Target 44330; HLA-C*07:06; MAGEB6; ENSG00000176746; CTA
TGSPDAVVSY

SEQ ID NO: 44331 - protein, 9 aa, Homo sapiens
  Table A; Target 44331; HLA-A*03:01; MAGEB6; ENSG00000176746; CTA
TLAQFLQKK

SEQ ID NO: 44332 - protein, 9 aa, Homo sapiens
  Table A; Target 44332; HLA-A*03:02; MAGEB6; ENSG00000176746; CTA
TLAQFLQKK

SEQ ID NO: 44333 - protein, 8 aa, Homo sapiens
  Table A; Target 44333; HLA-B*08:01; MAGEB6; ENSG00000176746; CTA
TLVSKLGL

SEQ ID NO: 44334 - protein, 9 aa, Homo sapiens
  Table A; Target 44334; HLA-A*02:07; MAGEB6; ENSG00000176746; CTA
TSPGLYPHL

SEQ ID NO: 44335 - protein, 10 aa, Homo sapiens
  Table A; Target 44335; HLA-A*01:01; MAGEB6; ENSG00000176746; CTA
TSPGLYPHLY

SEQ ID NO: 44336 - protein, 10 aa, Homo sapiens
  Table A; Target 44336; HLA-A*29:02; MAGEB6; ENSG00000176746; CTA
TSPGLYPHLY

SEQ ID NO: 44337 - protein, 10 aa, Homo sapiens
  Table A; Target 44337; HLA-A*30:02; MAGEB6; ENSG00000176746; CTA
TSPGLYPHLY

SEQ ID NO: 44338 - protein, 9 aa, Homo sapiens
  Table A; Target 44338; HLA-A*30:02; MAGEB6; ENSG00000176746; CTA
TSQHLVVAF

SEQ ID NO: 44339 - protein, 9 aa, Homo sapiens
  Table A; Target 44339; HLA-A*32:01; MAGEB6; ENSG00000176746; CTA
TSQHLVVAF

SEQ ID NO: 44340 - protein, 9 aa, Homo sapiens
  Table A; Target 44340; HLA-A*33:01; MAGEB6; ENSG00000176746; CTA
TSQHLVVAF

SEQ ID NO: 44341 - protein, 9 aa, Homo sapiens
  Table A; Target 44341; HLA-B*35:01; MAGEB6; ENSG00000176746; CTA
TSQHLVVAF

SEQ ID NO: 44342 - protein, 9 aa, Homo sapiens
  Table A; Target 44342; HLA-B*57:01; MAGEB6; ENSG00000176746; CTA
TSQHLVVAF

SEQ ID NO: 44343 - protein, 9 aa, Homo sapiens
  Table A; Target 44343; HLA-B*58:01; MAGEB6; ENSG00000176746; CTA
TSQHLVVAF

SEQ ID NO: 44344 - protein, 9 aa, Homo sapiens
  Table A; Target 44344; HLA-C*07:04; MAGEB6; ENSG00000176746; CTA
TSQHLVVAF

SEQ ID NO: 44345 - protein, 9 aa, Homo sapiens
  Table A; Target 44345; HLA-C*12:03; MAGEB6; ENSG00000176746; CTA
TSQHLVVAF

SEQ ID NO: 44346 - protein, 9 aa, Homo sapiens
  Table A; Target 44346; HLA-C*16:01; MAGEB6; ENSG00000176746; CTA
TSQHLVVAF

SEQ ID NO: 44347 - protein, 9 aa, Homo sapiens
  Table A; Target 44347; HLA-C*16:02; MAGEB6; ENSG00000176746; CTA
TSQHLVVAF

SEQ ID NO: 44348 - protein, 10 aa, Homo sapiens
  Table A; Target 44348; HLA-C*02:02; MAGEB6; ENSG00000176746; CTA
VAFGVELKEM

SEQ ID NO: 44349 - protein, 10 aa, Homo sapiens
  Table A; Target 44349; HLA-C*12:03; MAGEB6; ENSG00000176746; CTA
VAFGVELKEM

SEQ ID NO: 44350 - protein, 9 aa, Homo sapiens
  Table A; Target 44350; HLA-A*30:02; MAGEB6; ENSG00000176746; CTA
VCNSDPPCY

SEQ ID NO: 44351 - protein, 8 aa, Homo sapiens
  Table A; Target 44351; HLA-B*15:01; MAGEB6; ENSG00000176746; CTA
VQDKYVVY

SEQ ID NO: 44352 - protein, 8 aa, Homo sapiens
  Table A; Target 44352; HLA-B*15:03; MAGEB6; ENSG00000176746; CTA
VQDKYVVY

SEQ ID NO: 44353 - protein, 8 aa, Homo sapiens
  Table A; Target 44353; HLA-B*18:01; MAGEB6; ENSG00000176746; CTA
VQDKYVVY

SEQ ID NO: 44354 - protein, 8 aa, Homo sapiens
  Table A; Target 44354; HLA-C*05:01; MAGEB6; ENSG00000176746; CTA
VQDKYVVY

SEQ ID NO: 44355 - protein, 8 aa, Homo sapiens
  Table A; Target 44355; HLA-C*07:04; MAGEB6; ENSG00000176746; CTA
VQDKYVVY

SEQ ID NO: 44356 - protein, 9 aa, Homo sapiens
  Table A; Target 44356; HLA-A*03:01; MAGEB6; ENSG00000176746; CTA
VQDKYVVYR

SEQ ID NO: 44357 - protein, 9 aa, Homo sapiens
  Table A; Target 44357; HLA-A*31:01; MAGEB6; ENSG00000176746; CTA
VQDKYVVYR

SEQ ID NO: 44358 - protein, 9 aa, Homo sapiens
  Table A; Target 44358; HLA-C*16:01; MAGEB6; ENSG00000176746; CTA
VSASQKAII

SEQ ID NO: 44359 - protein, 10 aa, Homo sapiens
  Table A; Target 44359; HLA-C*12:03; MAGEB6; ENSG00000176746; CTA
VSASQKAIIF

SEQ ID NO: 44360 - protein, 10 aa, Homo sapiens
  Table A; Target 44360; HLA-C*16:01; MAGEB6; ENSG00000176746; CTA
VSASQKAIIF

SEQ ID NO: 44361 - protein, 11 aa, Homo sapiens
  Table A; Target 44361; HLA-A*03:01; MAGEB6; ENSG00000176746; CTA
VSASQKAIIFK

SEQ ID NO: 44362 - protein, 11 aa, Homo sapiens
  Table A; Target 44362; HLA-A*03:02; MAGEB6; ENSG00000176746; CTA
VSASQKAIIFK

SEQ ID NO: 44363 - protein, 11 aa, Homo sapiens
  Table A; Target 44363; HLA-A*11:01; MAGEB6; ENSG00000176746; CTA
VSASQKAIIFK

SEQ ID NO: 44364 - protein, 8 aa, Homo sapiens
  Table A; Target 44364; HLA-B*46:01; MAGEB6; ENSG00000176746; CTA
VVAFGVEL

SEQ ID NO: 44365 - protein, 8 aa, Homo sapiens
  Table A; Target 44365; HLA-C*01:02; MAGEB6; ENSG00000176746; CTA
VVAFGVEL

SEQ ID NO: 44366 - protein, 8 aa, Homo sapiens
  Table A; Target 44366; HLA-C*03:03; MAGEB6; ENSG00000176746; CTA
VVAFGVEL

SEQ ID NO: 44367 - protein, 8 aa, Homo sapiens
  Table A; Target 44367; HLA-C*03:04; MAGEB6; ENSG00000176746; CTA
VVAFGVEL

SEQ ID NO: 44368 - protein, 8 aa, Homo sapiens
  Table A; Target 44368; HLA-C*05:01; MAGEB6; ENSG00000176746; CTA
VVAFGVEL

SEQ ID NO: 44369 - protein, 9 aa, Homo sapiens
  Table A; Target 44369; HLA-A*03:02; MAGEB6; ENSG00000176746; CTA
VVAFGVELK

SEQ ID NO: 44370 - protein, 9 aa, Homo sapiens
  Table A; Target 44370; HLA-A*11:01; MAGEB6; ENSG00000176746; CTA
VVAFGVELK

SEQ ID NO: 44371 - protein, 9 aa, Homo sapiens
  Table A; Target 44371; HLA-B*49:01; MAGEB6; ENSG00000176746; CTA
WEFLGLLGI

SEQ ID NO: 44372 - protein, 9 aa, Homo sapiens
  Table A; Target 44372; HLA-A*01:01; MAGEB6; ENSG00000176746; CTA
YAETTKMRV

SEQ ID NO: 44373 - protein, 10 aa, Homo sapiens
  Table A; Target 44373; HLA-C*03:03; MAGEB6; ENSG00000176746; CTA
YAETTKMRVL

SEQ ID NO: 44374 - protein, 10 aa, Homo sapiens
  Table A; Target 44374; HLA-C*03:04; MAGEB6; ENSG00000176746; CTA
YAETTKMRVL

SEQ ID NO: 44375 - protein, 8 aa, Homo sapiens
  Table A; Target 44375; HLA-A*30:01; MAGEB6; ENSG00000176746; CTA
YDGILHSI

SEQ ID NO: 44376 - protein, 8 aa, Homo sapiens
  Table A; Target 44376; HLA-B*13:02; MAGEB6; ENSG00000176746; CTA
YDGILHSI

SEQ ID NO: 44377 - protein, 8 aa, Homo sapiens
  Table A; Target 44377; HLA-B*37:01; MAGEB6; ENSG00000176746; CTA
YDGILHSI

SEQ ID NO: 44378 - protein, 8 aa, Homo sapiens
  Table A; Target 44378; HLA-B*49:01; MAGEB6; ENSG00000176746; CTA
YDGILHSI

SEQ ID NO: 44379 - protein, 9 aa, Homo sapiens
  Table A; Target 44379; HLA-C*07:01; MAGEB6; ENSG00000176746; CTA
YDGILHSIY

SEQ ID NO: 44380 - protein, 11 aa, Homo sapiens
  Table A; Target 44380; HLA-B*27:02; MAGEB6; ENSG00000176746; CTA
YDVAANGQDEK

SEQ ID NO: 44381 - protein, 9 aa, Homo sapiens
  Table A; Target 44381; HLA-A*30:01; MAGEB6; ENSG00000176746; CTA
YEDALIDEV

SEQ ID NO: 44382 - protein, 9 aa, Homo sapiens
  Table A; Target 44382; HLA-B*40:01; MAGEB6; ENSG00000176746; CTA
YEDALIDEV

SEQ ID NO: 44383 - protein, 9 aa, Homo sapiens
  Table A; Target 44383; HLA-B*49:01; MAGEB6; ENSG00000176746; CTA
YEDALIDEV

SEQ ID NO: 44384 - protein, 10 aa, Homo sapiens
  Table A; Target 44384; HLA-B*44:02; MAGEB6; ENSG00000176746; CTA
YEFLWGPRAY

SEQ ID NO: 44385 - protein, 8 aa, Homo sapiens
  Table A; Target 44385; HLA-B*54:01; MAGEB6; ENSG00000176746; CTA
YPHLYEDA

SEQ ID NO: 44386 - protein, 9 aa, Homo sapiens
  Table A; Target 44386; HLA-B*35:01; MAGEB6; ENSG00000176746; CTA
YPHLYEDAL

SEQ ID NO: 44387 - protein, 9 aa, Homo sapiens
  Table A; Target 44387; HLA-B*35:03; MAGEB6; ENSG00000176746; CTA
YPHLYEDAL

SEQ ID NO: 44388 - protein, 9 aa, Homo sapiens
  Table A; Target 44388; HLA-B*55:01; MAGEB6; ENSG00000176746; CTA
YPHLYEDAL

SEQ ID NO: 44389 - protein, 9 aa, Homo sapiens
  Table A; Target 44389; HLA-C*03:03; MAGEB6; ENSG00000176746; CTA
YPHLYEDAL

SEQ ID NO: 44390 - protein, 9 aa, Homo sapiens
  Table A; Target 44390; HLA-C*03:04; MAGEB6; ENSG00000176746; CTA
YTLVSKLGL

SEQ ID NO: 44391 - protein, 11 aa, Homo sapiens
  Table A; Target 44391; HLA-C*02:02; MAGEC1; ENSG00000155495; CTA
AASSSTLVSIF

SEQ ID NO: 44392 - protein, 8 aa, Homo sapiens
  Table A; Target 44392; HLA-A*30:01; MAGEC1; ENSG00000155495; CTA
AEMLTNVI

SEQ ID NO: 44393 - protein, 8 aa, Homo sapiens
  Table A; Target 44393; HLA-B*18:01; MAGEC1; ENSG00000155495; CTA
AEMLTNVI

SEQ ID NO: 44394 - protein, 8 aa, Homo sapiens
  Table A; Target 44394; HLA-B*37:01; MAGEC1; ENSG00000155495; CTA
AEMLTNVI

SEQ ID NO: 44395 - protein, 8 aa, Homo sapiens
  Table A; Target 44395; HLA-B*40:01; MAGEC1; ENSG00000155495; CTA
AEMLTNVI

SEQ ID NO: 44396 - protein, 8 aa, Homo sapiens
  Table A; Target 44396; HLA-B*40:02; MAGEC1; ENSG00000155495; CTA
AEMLTNVI

SEQ ID NO: 44397 - protein, 8 aa, Homo sapiens
  Table A; Target 44397; HLA-B*44:02; MAGEC1; ENSG00000155495; CTA
AEMLTNVI

SEQ ID NO: 44398 - protein, 8 aa, Homo sapiens
  Table A; Target 44398; HLA-B*44:03; MAGEC1; ENSG00000155495; CTA
AEMLTNVI

SEQ ID NO: 44399 - protein, 11 aa, Homo sapiens
  Table A; Target 44399; HLA-A*30:02; MAGEC1; ENSG00000155495; CTA
AEMLTNVISRY

SEQ ID NO: 44400 - protein, 11 aa, Homo sapiens
  Table A; Target 44400; HLA-B*27:02; MAGEC1; ENSG00000155495; CTA
AEMLTNVISRY

SEQ ID NO: 44401 - protein, 11 aa, Homo sapiens
  Table A; Target 44401; HLA-B*37:01; MAGEC1; ENSG00000155495; CTA
AEMLTNVISRY

SEQ ID NO: 44402 - protein, 11 aa, Homo sapiens
  Table A; Target 44402; HLA-B*40:01; MAGEC1; ENSG00000155495; CTA
AEMLTNVISRY

SEQ ID NO: 44403 - protein, 11 aa, Homo sapiens
  Table A; Target 44403; HLA-C*16:04; MAGEC1; ENSG00000155495; CTA
AEMLTNVISRY

SEQ ID NO: 44404 - protein, 8 aa, Homo sapiens
  Table A; Target 44404; HLA-C*16:01; MAGEC1; ENSG00000155495; CTA
AFGEPREL

SEQ ID NO: 44405 - protein, 9 aa, Homo sapiens
  Table A; Target 44405; HLA-A*02:01; MAGEC1; ENSG00000155495; CTA
AMLKNTVPI

SEQ ID NO: 44406 - protein, 11 aa, Homo sapiens
  Table A; Target 44406; HLA-A*23:01; MAGEC1; ENSG00000155495; CTA
AMLKNTVPITF

SEQ ID NO: 44407 - protein, 8 aa, Homo sapiens
  Table A; Target 44407; HLA-B*37:01; MAGEC1; ENSG00000155495; CTA
AQSAFEGF

SEQ ID NO: 44408 - protein, 9 aa, Homo sapiens
  Table A; Target 44408; HLA-A*02:01; MAGEC1; ENSG00000155495; CTA
AQSPLQIPV

SEQ ID NO: 44409 - protein, 9 aa, Homo sapiens
  Table A; Target 44409; HLA-A*30:01; MAGEC1; ENSG00000155495; CTA
AQSPLQIPV

SEQ ID NO: 44410 - protein, 9 aa, Homo sapiens
  Table A; Target 44410; HLA-A*68:02; MAGEC1; ENSG00000155495; CTA
AQSPLQIPV

SEQ ID NO: 44411 - protein, 9 aa, Homo sapiens
  Table A; Target 44411; HLA-B*13:02; MAGEC1; ENSG00000155495; CTA
AQSPLQIPV

SEQ ID NO: 44412 - protein, 9 aa, Homo sapiens
  Table A; Target 44412; HLA-B*27:05; MAGEC1; ENSG00000155495; CTA
AQSPLQIPV

SEQ ID NO: 44413 - protein, 9 aa, Homo sapiens
  Table A; Target 44413; HLA-B*37:01; MAGEC1; ENSG00000155495; CTA
AQSPLQIPV

SEQ ID NO: 44414 - protein, 9 aa, Homo sapiens
  Table A; Target 44414; HLA-B*39:01; MAGEC1; ENSG00000155495; CTA
AQSPLQIPV

SEQ ID NO: 44415 - protein, 9 aa, Homo sapiens
  Table A; Target 44415; HLA-B*56:01; MAGEC1; ENSG00000155495; CTA
AQSPLQIPV

SEQ ID NO: 44416 - protein, 9 aa, Homo sapiens
  Table A; Target 44416; HLA-C*02:02; MAGEC1; ENSG00000155495; CTA
AQSPLQIPV

SEQ ID NO: 44417 - protein, 9 aa, Homo sapiens
  Table A; Target 44417; HLA-C*06:02; MAGEC1; ENSG00000155495; CTA
AQSPLQIPV

SEQ ID NO: 44418 - protein, 9 aa, Homo sapiens
  Table A; Target 44418; HLA-C*07:04; MAGEC1; ENSG00000155495; CTA
AQSPLQIPV

SEQ ID NO: 44419 - protein, 9 aa, Homo sapiens
  Table A; Target 44419; HLA-C*16:04; MAGEC1; ENSG00000155495; CTA
AQSPLQIPV

SEQ ID NO: 44420 - protein, 9 aa, Homo sapiens
  Table A; Target 44420; HLA-B*13:02; MAGEC1; ENSG00000155495; CTA
AQSPLQRPV

SEQ ID NO: 44421 - protein, 9 aa, Homo sapiens
  Table A; Target 44421; HLA-B*37:01; MAGEC1; ENSG00000155495; CTA
AQSPLQRPV

SEQ ID NO: 44422 - protein, 9 aa, Homo sapiens
  Table A; Target 44422; HLA-C*02:02; MAGEC1; ENSG00000155495; CTA
AQSPLQRPV

SEQ ID NO: 44423 - protein, 9 aa, Homo sapiens
  Table A; Target 44423; HLA-C*06:02; MAGEC1; ENSG00000155495; CTA
AQSPLQRPV

SEQ ID NO: 44424 - protein, 9 aa, Homo sapiens
  Table A; Target 44424; HLA-C*16:01; MAGEC1; ENSG00000155495; CTA
AQSPLQRPV

SEQ ID NO: 44425 - protein, 9 aa, Homo sapiens
  Table A; Target 44425; HLA-C*16:02; MAGEC1; ENSG00000155495; CTA
AQSPLQRPV

SEQ ID NO: 44426 - protein, 9 aa, Homo sapiens
  Table A; Target 44426; HLA-B*13:02; MAGEC1; ENSG00000155495; CTA
AQSPLQSPV

SEQ ID NO: 44427 - protein, 9 aa, Homo sapiens
  Table A; Target 44427; HLA-B*27:05; MAGEC1; ENSG00000155495; CTA
AQSPLQSPV

SEQ ID NO: 44428 - protein, 9 aa, Homo sapiens
  Table A; Target 44428; HLA-B*39:01; MAGEC1; ENSG00000155495; CTA
AQSPLQSPV

SEQ ID NO: 44429 - protein, 9 aa, Homo sapiens
  Table A; Target 44429; HLA-A*02:01; MAGEC1; ENSG00000155495; CTA
AQSSLQIPV

SEQ ID NO: 44430 - protein, 9 aa, Homo sapiens
  Table A; Target 44430; HLA-B*13:02; MAGEC1; ENSG00000155495; CTA
AQSSLQIPV

SEQ ID NO: 44431 - protein, 9 aa, Homo sapiens
  Table A; Target 44431; HLA-B*27:05; MAGEC1; ENSG00000155495; CTA
AQSSLQIPV

SEQ ID NO: 44432 - protein, 9 aa, Homo sapiens
  Table A; Target 44432; HLA-B*39:01; MAGEC1; ENSG00000155495; CTA
AQSSLQIPV

SEQ ID NO: 44433 - protein, 9 aa, Homo sapiens
  Table A; Target 44433; HLA-B*56:01; MAGEC1; ENSG00000155495; CTA
AQSSLQIPV

SEQ ID NO: 44434 - protein, 8 aa, Homo sapiens
  Table A; Target 44434; HLA-B*37:01; MAGEC1; ENSG00000155495; CTA
AQSTFEGF

SEQ ID NO: 44435 - protein, 9 aa, Homo sapiens
  Table A; Target 44435; HLA-C*03:04; MAGEC1; ENSG00000155495; CTA
ASSFFSSAL

SEQ ID NO: 44436 - protein, 9 aa, Homo sapiens
  Table A; Target 44436; HLA-A*30:01; MAGEC1; ENSG00000155495; CTA
ASSSTLVSI

SEQ ID NO: 44437 - protein, 9 aa, Homo sapiens
  Table A; Target 44437; HLA-B*13:02; MAGEC1; ENSG00000155495; CTA
ASSSTLVSI

SEQ ID NO: 44438 - protein, 9 aa, Homo sapiens
  Table A; Target 44438; HLA-B*49:01; MAGEC1; ENSG00000155495; CTA
ASSSTLVSI

SEQ ID NO: 44439 - protein, 9 aa, Homo sapiens
  Table A; Target 44439; HLA-B*58:01; MAGEC1; ENSG00000155495; CTA
ASSSTLVSI

SEQ ID NO: 44440 - protein, 9 aa, Homo sapiens
  Table A; Target 44440; HLA-C*16:02; MAGEC1; ENSG00000155495; CTA
ASSSTLVSI

SEQ ID NO: 44441 - protein, 10 aa, Homo sapiens
  Table A; Target 44441; HLA-A*30:02; MAGEC1; ENSG00000155495; CTA
ASSSVMSPSF

SEQ ID NO: 44442 - protein, 10 aa, Homo sapiens
  Table A; Target 44442; HLA-B*27:05; MAGEC1; ENSG00000155495; CTA
ASSSVMSPSF

SEQ ID NO: 44443 - protein, 10 aa, Homo sapiens
  Table A; Target 44443; HLA-B*58:01; MAGEC1; ENSG00000155495; CTA
ASSSVMSPSF

SEQ ID NO: 44444 - protein, 10 aa, Homo sapiens
  Table A; Target 44444; HLA-C*16:04; MAGEC1; ENSG00000155495; CTA
ASSSVMSPSF

SEQ ID NO: 44445 - protein, 9 aa, Homo sapiens
  Table A; Target 44445; HLA-C*05:01; MAGEC1; ENSG00000155495; CTA
ATESASSSV

SEQ ID NO: 44446 - protein, 9 aa, Homo sapiens
  Table A; Target 44446; HLA-C*03:04; MAGEC1; ENSG00000155495; CTA
CSSSTSLSL

SEQ ID NO: 44447 - protein, 10 aa, Homo sapiens
  Table A; Target 44447; HLA-B*18:01; MAGEC1; ENSG00000155495; CTA
DEKVDELARF

SEQ ID NO: 44448 - protein, 10 aa, Homo sapiens
  Table A; Target 44448; HLA-B*44:02; MAGEC1; ENSG00000155495; CTA
DEKVDELARF

SEQ ID NO: 44449 - protein, 10 aa, Homo sapiens
  Table A; Target 44449; HLA-B*44:03; MAGEC1; ENSG00000155495; CTA
DEKVDELARF

SEQ ID NO: 44450 - protein, 8 aa, Homo sapiens
  Table A; Target 44450; HLA-B*18:01; MAGEC1; ENSG00000155495; CTA
DELARFLL

SEQ ID NO: 44451 - protein, 9 aa, Homo sapiens
  Table A; Target 44451; HLA-B*44:02; MAGEC1; ENSG00000155495; CTA
DELARFLLL

SEQ ID NO: 44452 - protein, 10 aa, Homo sapiens
  Table A; Target 44452; HLA-B*18:01; MAGEC1; ENSG00000155495; CTA
DEQGMSQNRL

SEQ ID NO: 44453 - protein, 10 aa, Homo sapiens
  Table A; Target 44453; HLA-A*30:01; MAGEC1; ENSG00000155495; CTA
DEYTSSSDTL

SEQ ID NO: 44454 - protein, 10 aa, Homo sapiens
  Table A; Target 44454; HLA-B*18:01; MAGEC1; ENSG00000155495; CTA
DEYTSSSDTL

SEQ ID NO: 44455 - protein, 10 aa, Homo sapiens
  Table A; Target 44455; HLA-B*40:01; MAGEC1; ENSG00000155495; CTA
DEYTSSSDTL

SEQ ID NO: 44456 - protein, 10 aa, Homo sapiens
  Table A; Target 44456; HLA-A*25:01; MAGEC1; ENSG00000155495; CTA
DMPTAGMPSL

SEQ ID NO: 44457 - protein, 10 aa, Homo sapiens
  Table A; Target 44457; HLA-A*26:01; MAGEC1; ENSG00000155495; CTA
DMPTAGMPSL

SEQ ID NO: 44458 - protein, 8 aa, Homo sapiens
  Table A; Target 44458; HLA-B*35:01; MAGEC1; ENSG00000155495; CTA
DPDDSYVF

SEQ ID NO: 44459 - protein, 8 aa, Homo sapiens
  Table A; Target 44459; HLA-B*35:03; MAGEC1; ENSG00000155495; CTA
DPDDSYVF

SEQ ID NO: 44460 - protein, 8 aa, Homo sapiens
  Table A; Target 44460; HLA-B*55:01; MAGEC1; ENSG00000155495; CTA
DPDDSYVF

SEQ ID NO: 44461 - protein, 8 aa, Homo sapiens
  Table A; Target 44461; HLA-C*03:03; MAGEC1; ENSG00000155495; CTA
DPDDSYVF

SEQ ID NO: 44462 - protein, 8 aa, Homo sapiens
  Table A; Target 44462; HLA-C*05:01; MAGEC1; ENSG00000155495; CTA
DPDDSYVF

SEQ ID NO: 44463 - protein, 9 aa, Homo sapiens
  Table A; Target 44463; HLA-B*51:01; MAGEC1; ENSG00000155495; CTA
DPDDSYVFV

SEQ ID NO: 44464 - protein, 8 aa, Homo sapiens
  Table A; Target 44464; HLA-B*51:01; MAGEC1; ENSG00000155495; CTA
DSLSPLEI

SEQ ID NO: 44465 - protein, 8 aa, Homo sapiens
  Table A; Target 44465; HLA-B*51:01; MAGEC1; ENSG00000155495; CTA
DSLSPLQI

SEQ ID NO: 44466 - protein, 9 aa, Homo sapiens
  Table A; Target 44466; HLA-A*33:01; MAGEC1; ENSG00000155495; CTA
DSLSSLHFP

SEQ ID NO: 44467 - protein, 9 aa, Homo sapiens
  Table A; Target 44467; HLA-B*35:03; MAGEC1; ENSG00000155495; CTA
DSLTDSESL

SEQ ID NO: 44468 - protein, 8 aa, Homo sapiens
  Table A; Target 44468; HLA-A*68:01; MAGEC1; ENSG00000155495; CTA
DSSDPLQR

SEQ ID NO: 44469 - protein, 9 aa, Homo sapiens
  Table A; Target 44469; HLA-A*25:01; MAGEC1; ENSG00000155495; CTA
DSYVFVNTL

SEQ ID NO: 44470 - protein, 9 aa, Homo sapiens
  Table A; Target 44470; HLA-A*33:01; MAGEC1; ENSG00000155495; CTA
DSYVFVNTL

SEQ ID NO: 44471 - protein, 9 aa, Homo sapiens
  Table A; Target 44471; HLA-A*68:02; MAGEC1; ENSG00000155495; CTA
DSYVFVNTL

SEQ ID NO: 44472 - protein, 9 aa, Homo sapiens
  Table A; Target 44472; HLA-B*08:01; MAGEC1; ENSG00000155495; CTA
DSYVFVNTL

SEQ ID NO: 44473 - protein, 9 aa, Homo sapiens
  Table A; Target 44473; HLA-B*18:01; MAGEC1; ENSG00000155495; CTA
DSYVFVNTL

SEQ ID NO: 44474 - protein, 9 aa, Homo sapiens
  Table A; Target 44474; HLA-B*35:01; MAGEC1; ENSG00000155495; CTA
DSYVFVNTL

SEQ ID NO: 44475 - protein, 9 aa, Homo sapiens
  Table A; Target 44475; HLA-B*35:03; MAGEC1; ENSG00000155495; CTA
DSYVFVNTL

SEQ ID NO: 44476 - protein, 9 aa, Homo sapiens
  Table A; Target 44476; HLA-B*51:01; MAGEC1; ENSG00000155495; CTA
DSYVFVNTL

SEQ ID NO: 44477 - protein, 9 aa, Homo sapiens
  Table A; Target 44477; HLA-C*12:03; MAGEC1; ENSG00000155495; CTA
DSYVFVNTL

SEQ ID NO: 44478 - protein, 9 aa, Homo sapiens
  Table A; Target 44478; HLA-C*16:02; MAGEC1; ENSG00000155495; CTA
DSYVFVNTL

SEQ ID NO: 44479 - protein, 9 aa, Homo sapiens
  Table A; Target 44479; HLA-B*35:03; MAGEC1; ENSG00000155495; CTA
DTLLESDSL

SEQ ID NO: 44480 - protein, 10 aa, Homo sapiens
  Table A; Target 44480; HLA-A*33:01; MAGEC1; ENSG00000155495; CTA
DTLYPLQSPQ

SEQ ID NO: 44481 - protein, 9 aa, Homo sapiens
  Table A; Target 44481; HLA-B*08:01; MAGEC1; ENSG00000155495; CTA
DVEERAQAI

SEQ ID NO: 44482 - protein, 8 aa, Homo sapiens
  Table A; Target 44482; HLA-B*51:01; MAGEC1; ENSG00000155495; CTA
DVLSGIGV

SEQ ID NO: 44483 - protein, 9 aa, Homo sapiens
  Table A; Target 44483; HLA-A*25:01; MAGEC1; ENSG00000155495; CTA
DVLSGIGVR

SEQ ID NO: 44484 - protein, 9 aa, Homo sapiens
  Table A; Target 44484; HLA-A*26:01; MAGEC1; ENSG00000155495; CTA
DVLSGIGVR

SEQ ID NO: 44485 - protein, 9 aa, Homo sapiens
  Table A; Target 44485; HLA-A*33:01; MAGEC1; ENSG00000155495; CTA
DVLSGIGVR

SEQ ID NO: 44486 - protein, 9 aa, Homo sapiens
  Table A; Target 44486; HLA-A*33:03; MAGEC1; ENSG00000155495; CTA
DVLSGIGVR

SEQ ID NO: 44487 - protein, 9 aa, Homo sapiens
  Table A; Target 44487; HLA-A*68:01; MAGEC1; ENSG00000155495; CTA
DVLSGIGVR

SEQ ID NO: 44488 - protein, 9 aa, Homo sapiens
  Table A; Target 44488; HLA-C*07:06; MAGEC1; ENSG00000155495; CTA
DVLSGIGVR

SEQ ID NO: 44489 - protein, 10 aa, Homo sapiens
  Table A; Target 44489; HLA-A*26:01; MAGEC1; ENSG00000155495; CTA
DVLSGIGVRA

SEQ ID NO: 44490 - protein, 10 aa, Homo sapiens
  Table A; Target 44490; HLA-A*68:02; MAGEC1; ENSG00000155495; CTA
DVLSGIGVRA

SEQ ID NO: 44491 - protein, 10 aa, Homo sapiens
  Table A; Target 44491; HLA-B*54:01; MAGEC1; ENSG00000155495; CTA
DVLSGIGVRA

SEQ ID NO: 44492 - protein, 9 aa, Homo sapiens
  Table A; Target 44492; HLA-B*37:01; MAGEC1; ENSG00000155495; CTA
EDSLSPLHF

SEQ ID NO: 44493 - protein, 9 aa, Homo sapiens
  Table A; Target 44493; HLA-B*44:03; MAGEC1; ENSG00000155495; CTA
EDSLSPLHF

SEQ ID NO: 44494 - protein, 9 aa, Homo sapiens
  Table A; Target 44494; HLA-B*37:01; MAGEC1; ENSG00000155495; CTA
EDSLSSLHF

SEQ ID NO: 44495 - protein, 8 aa, Homo sapiens
  Table A; Target 44495; HLA-B*18:01; MAGEC1; ENSG00000155495; CTA
EDSMSPLY

SEQ ID NO: 44496 - protein, 9 aa, Homo sapiens
  Table A; Target 44496; HLA-A*33:03; MAGEC1; ENSG00000155495; CTA
EDSSDPLQR

SEQ ID NO: 44497 - protein, 9 aa, Homo sapiens
  Table A; Target 44497; HLA-A*68:01; MAGEC1; ENSG00000155495; CTA
EDSSDPLQR

SEQ ID NO: 44498 - protein, 9 aa, Homo sapiens
  Table A; Target 44498; HLA-C*07:06; MAGEC1; ENSG00000155495; CTA
EDSSDPLQR

SEQ ID NO: 44499 - protein, 11 aa, Homo sapiens
  Table A; Target 44499; HLA-B*49:01; MAGEC1; ENSG00000155495; CTA
EEFQSSLQSPV

SEQ ID NO: 44500 - protein, 10 aa, Homo sapiens
  Table A; Target 44500; HLA-B*39:01; MAGEC1; ENSG00000155495; CTA
EESSSPVDEY

SEQ ID NO: 44501 - protein, 10 aa, Homo sapiens
  Table A; Target 44501; HLA-B*44:02; MAGEC1; ENSG00000155495; CTA
EESSSPVDEY

SEQ ID NO: 44502 - protein, 10 aa, Homo sapiens
  Table A; Target 44502; HLA-B*44:03; MAGEC1; ENSG00000155495; CTA
EESSSPVDEY

SEQ ID NO: 44503 - protein, 8 aa, Homo sapiens
  Table A; Target 44503; HLA-B*18:01; MAGEC1; ENSG00000155495; CTA
EEVIWDVL

SEQ ID NO: 44504 - protein, 9 aa, Homo sapiens
  Table A; Target 44504; HLA-C*05:01; MAGEC1; ENSG00000155495; CTA
EGDDTQSPL

SEQ ID NO: 44505 - protein, 9 aa, Homo sapiens
  Table A; Target 44505; HLA-C*05:01; MAGEC1; ENSG00000155495; CTA
EGEDSQSPL

SEQ ID NO: 44506 - protein, 11 aa, Homo sapiens
  Table A; Target 44506; HLA-A*33:01; MAGEC1; ENSG00000155495; CTA
EGEDSSDPLQR

SEQ ID NO: 44507 - protein, 11 aa, Homo sapiens
  Table A; Target 44507; HLA-A*33:03; MAGEC1; ENSG00000155495; CTA
EGEDSSDPLQR

SEQ ID NO: 44508 - protein, 11 aa, Homo sapiens
  Table A; Target 44508; HLA-A*68:01; MAGEC1; ENSG00000155495; CTA
EGEDSSDPLQR

SEQ ID NO: 44509 - protein, 11 aa, Homo sapiens
  Table A; Target 44509; HLA-C*07:06; MAGEC1; ENSG00000155495; CTA
EGEDSSDPLQR

SEQ ID NO: 44510 - protein, 9 aa, Homo sapiens
  Table A; Target 44510; HLA-C*05:01; MAGEC1; ENSG00000155495; CTA
EGEDVQSPL

SEQ ID NO: 44511 - protein, 8 aa, Homo sapiens
  Table A; Target 44511; HLA-B*51:01; MAGEC1; ENSG00000155495; CTA
EGFAQSSL

SEQ ID NO: 44512 - protein, 10 aa, Homo sapiens
  Table A; Target 44512; HLA-A*68:01; MAGEC1; ENSG00000155495; CTA
EGPAQSPLQR

SEQ ID NO: 44513 - protein, 9 aa, Homo sapiens
  Table A; Target 44513; HLA-A*33:01; MAGEC1; ENSG00000155495; CTA
EHFAFGEPR

SEQ ID NO: 44514 - protein, 9 aa, Homo sapiens
  Table A; Target 44514; HLA-A*33:03; MAGEC1; ENSG00000155495; CTA
EHFAFGEPR

SEQ ID NO: 44515 - protein, 10 aa, Homo sapiens
  Table A; Target 44515; HLA-A*29:02; MAGEC1; ENSG00000155495; CTA
ELARFLLLKY

SEQ ID NO: 44516 - protein, 9 aa, Homo sapiens
  Table A; Target 44516; HLA-A*31:01; MAGEC1; ENSG00000155495; CTA
EMLTNVISR

SEQ ID NO: 44517 - protein, 9 aa, Homo sapiens
  Table A; Target 44517; HLA-A*33:01; MAGEC1; ENSG00000155495; CTA
EMLTNVISR

SEQ ID NO: 44518 - protein, 9 aa, Homo sapiens
  Table A; Target 44518; HLA-A*33:03; MAGEC1; ENSG00000155495; CTA
EMLTNVISR

SEQ ID NO: 44519 - protein, 9 aa, Homo sapiens
  Table A; Target 44519; HLA-A*68:01; MAGEC1; ENSG00000155495; CTA
EMLTNVISR

SEQ ID NO: 44520 - protein, 9 aa, Homo sapiens
  Table A; Target 44520; HLA-C*07:06; MAGEC1; ENSG00000155495; CTA
EMLTNVISR

SEQ ID NO: 44521 - protein, 10 aa, Homo sapiens
  Table A; Target 44521; HLA-A*01:01; MAGEC1; ENSG00000155495; CTA
EMLTNVISRY

SEQ ID NO: 44522 - protein, 10 aa, Homo sapiens
  Table A; Target 44522; HLA-A*25:01; MAGEC1; ENSG00000155495; CTA
EMLTNVISRY

SEQ ID NO: 44523 - protein, 10 aa, Homo sapiens
  Table A; Target 44523; HLA-A*26:01; MAGEC1; ENSG00000155495; CTA
EMLTNVISRY

SEQ ID NO: 44524 - protein, 10 aa, Homo sapiens
  Table A; Target 44524; HLA-A*29:02; MAGEC1; ENSG00000155495; CTA
EMLTNVISRY

SEQ ID NO: 44525 - protein, 10 aa, Homo sapiens
  Table A; Target 44525; HLA-A*30:02; MAGEC1; ENSG00000155495; CTA
EMLTNVISRY

SEQ ID NO: 44526 - protein, 10 aa, Homo sapiens
  Table A; Target 44526; HLA-B*44:02; MAGEC1; ENSG00000155495; CTA
EMLTNVISRY

SEQ ID NO: 44527 - protein, 10 aa, Homo sapiens
  Table A; Target 44527; HLA-B*44:03; MAGEC1; ENSG00000155495; CTA
EMLTNVISRY

SEQ ID NO: 44528 - protein, 8 aa, Homo sapiens
  Table A; Target 44528; HLA-B*35:01; MAGEC1; ENSG00000155495; CTA
EPLFTYTL

SEQ ID NO: 44529 - protein, 8 aa, Homo sapiens
  Table A; Target 44529; HLA-B*35:03; MAGEC1; ENSG00000155495; CTA
EPLFTYTL

SEQ ID NO: 44530 - protein, 9 aa, Homo sapiens
  Table A; Target 44530; HLA-B*38:01; MAGEC1; ENSG00000155495; CTA
EQGMSQNRL

SEQ ID NO: 44531 - protein, 10 aa, Homo sapiens
  Table A; Target 44531; HLA-A*25:01; MAGEC1; ENSG00000155495; CTA
ESAQSAFEGF

SEQ ID NO: 44532 - protein, 10 aa, Homo sapiens
  Table A; Target 44532; HLA-A*26:01; MAGEC1; ENSG00000155495; CTA
ESAQSAFEGF

SEQ ID NO: 44533 - protein, 10 aa, Homo sapiens
  Table A; Target 44533; HLA-A*25:01; MAGEC1; ENSG00000155495; CTA
ESAQSTFEGF

SEQ ID NO: 44534 - protein, 10 aa, Homo sapiens
  Table A; Target 44534; HLA-A*26:01; MAGEC1; ENSG00000155495; CTA
ESAQSTFEGF

SEQ ID NO: 44535 - protein, 8 aa, Homo sapiens
  Table A; Target 44535; HLA-A*01:01; MAGEC1; ENSG00000155495; CTA
ESEPLFTY

SEQ ID NO: 44536 - protein, 11 aa, Homo sapiens
  Table A; Target 44536; HLA-A*25:01; MAGEC1; ENSG00000155495; CTA
ESPLQSPVISF

SEQ ID NO: 44537 - protein, 9 aa, Homo sapiens
  Table A; Target 44537; HLA-A*01:01; MAGEC1; ENSG00000155495; CTA
ESSSPVDEY

SEQ ID NO: 44538 - protein, 9 aa, Homo sapiens
  Table A; Target 44538; HLA-A*25:01; MAGEC1; ENSG00000155495; CTA
ESSSPVDEY

SEQ ID NO: 44539 - protein, 9 aa, Homo sapiens
  Table A; Target 44539; HLA-A*26:01; MAGEC1; ENSG00000155495; CTA
ESSSPVDEY

SEQ ID NO: 44540 - protein, 9 aa, Homo sapiens
  Table A; Target 44540; HLA-A*30:02; MAGEC1; ENSG00000155495; CTA
ESSSPVDEY

SEQ ID NO: 44541 - protein, 9 aa, Homo sapiens
  Table A; Target 44541; HLA-B*35:01; MAGEC1; ENSG00000155495; CTA
ESSSPVDEY

SEQ ID NO: 44542 - protein, 9 aa, Homo sapiens
  Table A; Target 44542; HLA-C*07:06; MAGEC1; ENSG00000155495; CTA
ESSSPVDEY

SEQ ID NO: 44543 - protein, 8 aa, Homo sapiens
  Table A; Target 44543; HLA-A*01:01; MAGEC1; ENSG00000155495; CTA
EVDPDDSY

SEQ ID NO: 44544 - protein, 9 aa, Homo sapiens
  Table A; Target 44544; HLA-C*05:01; MAGEC1; ENSG00000155495; CTA
EVDPDDSYV

SEQ ID NO: 44545 - protein, 10 aa, Homo sapiens
  Table A; Target 44545; HLA-A*25:01; MAGEC1; ENSG00000155495; CTA
EVDPDDSYVF

SEQ ID NO: 44546 - protein, 10 aa, Homo sapiens
  Table A; Target 44546; HLA-A*26:01; MAGEC1; ENSG00000155495; CTA
EVDPDDSYVF

SEQ ID NO: 44547 - protein, 10 aa, Homo sapiens
  Table A; Target 44547; HLA-B*35:01; MAGEC1; ENSG00000155495; CTA
EVDPDDSYVF

SEQ ID NO: 44548 - protein, 10 aa, Homo sapiens
  Table A; Target 44548; HLA-B*38:01; MAGEC1; ENSG00000155495; CTA
EVDPDDSYVF

SEQ ID NO: 44549 - protein, 10 aa, Homo sapiens
  Table A; Target 44549; HLA-B*39:01; MAGEC1; ENSG00000155495; CTA
EVDPDDSYVF

SEQ ID NO: 44550 - protein, 10 aa, Homo sapiens
  Table A; Target 44550; HLA-C*03:03; MAGEC1; ENSG00000155495; CTA
EVDPDDSYVF

SEQ ID NO: 44551 - protein, 10 aa, Homo sapiens
  Table A; Target 44551; HLA-C*05:01; MAGEC1; ENSG00000155495; CTA
EVDPDDSYVF

SEQ ID NO: 44552 - protein, 11 aa, Homo sapiens
  Table A; Target 44552; HLA-A*01:01; MAGEC1; ENSG00000155495; CTA
EVDPDDSYVFV

SEQ ID NO: 44553 - protein, 11 aa, Homo sapiens
  Table A; Target 44553; HLA-A*02:07; MAGEC1; ENSG00000155495; CTA
EVDPDDSYVFV

SEQ ID NO: 44554 - protein, 11 aa, Homo sapiens
  Table A; Target 44554; HLA-A*68:02; MAGEC1; ENSG00000155495; CTA
EVDPDDSYVFV

SEQ ID NO: 44555 - protein, 10 aa, Homo sapiens
  Table A; Target 44555; HLA-A*25:01; MAGEC1; ENSG00000155495; CTA
EVIKRKVVEF

SEQ ID NO: 44556 - protein, 10 aa, Homo sapiens
  Table A; Target 44556; HLA-A*26:01; MAGEC1; ENSG00000155495; CTA
EVIKRKVVEF

SEQ ID NO: 44557 - protein, 10 aa, Homo sapiens
  Table A; Target 44557; HLA-A*25:01; MAGEC1; ENSG00000155495; CTA
EVIWDVLSGI

SEQ ID NO: 44558 - protein, 10 aa, Homo sapiens
  Table A; Target 44558; HLA-A*26:01; MAGEC1; ENSG00000155495; CTA
EVIWDVLSGI

SEQ ID NO: 44559 - protein, 10 aa, Homo sapiens
  Table A; Target 44559; HLA-A*68:02; MAGEC1; ENSG00000155495; CTA
EVIWDVLSGI

SEQ ID NO: 44560 - protein, 9 aa, Homo sapiens
  Table A; Target 44560; HLA-A*26:01; MAGEC1; ENSG00000155495; CTA
EVPNSSPPR

SEQ ID NO: 44561 - protein, 9 aa, Homo sapiens
  Table A; Target 44561; HLA-A*33:01; MAGEC1; ENSG00000155495; CTA
EVPNSSPPR

SEQ ID NO: 44562 - protein, 9 aa, Homo sapiens
  Table A; Target 44562; HLA-A*33:03; MAGEC1; ENSG00000155495; CTA
EVPNSSPPR

SEQ ID NO: 44563 - protein, 9 aa, Homo sapiens
  Table A; Target 44563; HLA-A*68:01; MAGEC1; ENSG00000155495; CTA
EVPNSSPPR

SEQ ID NO: 44564 - protein, 9 aa, Homo sapiens
  Table A; Target 44564; HLA-C*07:06; MAGEC1; ENSG00000155495; CTA
EVPNSSPPR

SEQ ID NO: 44565 - protein, 10 aa, Homo sapiens
  Table A; Target 44565; HLA-A*25:01; MAGEC1; ENSG00000155495; CTA
EVPNSSPPRY

SEQ ID NO: 44566 - protein, 10 aa, Homo sapiens
  Table A; Target 44566; HLA-A*29:02; MAGEC1; ENSG00000155495; CTA
EVPNSSPPRY

SEQ ID NO: 44567 - protein, 10 aa, Homo sapiens
  Table A; Target 44567; HLA-A*30:02; MAGEC1; ENSG00000155495; CTA
EVPNSSPPRY

SEQ ID NO: 44568 - protein, 9 aa, Homo sapiens
  Table A; Target 44568; HLA-A*24:02; MAGEC1; ENSG00000155495; CTA
EYTSSSDTL

SEQ ID NO: 44569 - protein, 9 aa, Homo sapiens
  Table A; Target 44569; HLA-A*02:03; MAGEC1; ENSG00000155495; CTA
FAFGEPREL

SEQ ID NO: 44570 - protein, 9 aa, Homo sapiens
  Table A; Target 44570; HLA-A*30:01; MAGEC1; ENSG00000155495; CTA
FAFGEPREL

SEQ ID NO: 44571 - protein, 9 aa, Homo sapiens
  Table A; Target 44571; HLA-A*68:02; MAGEC1; ENSG00000155495; CTA
FAFGEPREL

SEQ ID NO: 44572 - protein, 9 aa, Homo sapiens
  Table A; Target 44572; HLA-B*15:03; MAGEC1; ENSG00000155495; CTA
FAFGEPREL

SEQ ID NO: 44573 - protein, 9 aa, Homo sapiens
  Table A; Target 44573; HLA-B*27:05; MAGEC1; ENSG00000155495; CTA
FAFGEPREL

SEQ ID NO: 44574 - protein, 9 aa, Homo sapiens
  Table A; Target 44574; HLA-B*35:01; MAGEC1; ENSG00000155495; CTA
FAFGEPREL

SEQ ID NO: 44575 - protein, 9 aa, Homo sapiens
  Table A; Target 44575; HLA-B*35:03; MAGEC1; ENSG00000155495; CTA
FAFGEPREL

SEQ ID NO: 44576 - protein, 9 aa, Homo sapiens
  Table A; Target 44576; HLA-B*40:01; MAGEC1; ENSG00000155495; CTA
FAFGEPREL

SEQ ID NO: 44577 - protein, 9 aa, Homo sapiens
  Table A; Target 44577; HLA-B*46:01; MAGEC1; ENSG00000155495; CTA
FAFGEPREL

SEQ ID NO: 44578 - protein, 9 aa, Homo sapiens
  Table A; Target 44578; HLA-B*51:01; MAGEC1; ENSG00000155495; CTA
FAFGEPREL

SEQ ID NO: 44579 - protein, 9 aa, Homo sapiens
  Table A; Target 44579; HLA-B*54:01; MAGEC1; ENSG00000155495; CTA
FAFGEPREL

SEQ ID NO: 44580 - protein, 9 aa, Homo sapiens
  Table A; Target 44580; HLA-B*58:01; MAGEC1; ENSG00000155495; CTA
FAFGEPREL

SEQ ID NO: 44581 - protein, 9 aa, Homo sapiens
  Table A; Target 44581; HLA-C*01:02; MAGEC1; ENSG00000155495; CTA
FAFGEPREL

SEQ ID NO: 44582 - protein, 9 aa, Homo sapiens
  Table A; Target 44582; HLA-C*02:02; MAGEC1; ENSG00000155495; CTA
FAFGEPREL

SEQ ID NO: 44583 - protein, 9 aa, Homo sapiens
  Table A; Target 44583; HLA-C*03:03; MAGEC1; ENSG00000155495; CTA
FAFGEPREL

SEQ ID NO: 44584 - protein, 9 aa, Homo sapiens
  Table A; Target 44584; HLA-C*05:01; MAGEC1; ENSG00000155495; CTA
FAFGEPREL

SEQ ID NO: 44585 - protein, 9 aa, Homo sapiens
  Table A; Target 44585; HLA-C*07:04; MAGEC1; ENSG00000155495; CTA
FAFGEPREL

SEQ ID NO: 44586 - protein, 9 aa, Homo sapiens
  Table A; Target 44586; HLA-C*12:03; MAGEC1; ENSG00000155495; CTA
FAFGEPREL

SEQ ID NO: 44587 - protein, 9 aa, Homo sapiens
  Table A; Target 44587; HLA-C*16:01; MAGEC1; ENSG00000155495; CTA
FAFGEPREL

SEQ ID NO: 44588 - protein, 9 aa, Homo sapiens
  Table A; Target 44588; HLA-C*16:02; MAGEC1; ENSG00000155495; CTA
FAFGEPREL

SEQ ID NO: 44589 - protein, 9 aa, Homo sapiens
  Table A; Target 44589; HLA-C*16:04; MAGEC1; ENSG00000155495; CTA
FAFGEPREL

SEQ ID NO: 44590 - protein, 8 aa, Homo sapiens
  Table A; Target 44590; HLA-B*51:01; MAGEC1; ENSG00000155495; CTA
FAQSPLQI

SEQ ID NO: 44591 - protein, 10 aa, Homo sapiens
  Table A; Target 44591; HLA-A*68:02; MAGEC1; ENSG00000155495; CTA
FAQSPLQIPV

SEQ ID NO: 44592 - protein, 10 aa, Homo sapiens
  Table A; Target 44592; HLA-B*54:01; MAGEC1; ENSG00000155495; CTA
FAQSPLQIPV

SEQ ID NO: 44593 - protein, 10 aa, Homo sapiens
  Table A; Target 44593; HLA-C*02:02; MAGEC1; ENSG00000155495; CTA
FAQSPLQIPV

SEQ ID NO: 44594 - protein, 10 aa, Homo sapiens
  Table A; Target 44594; HLA-C*16:04; MAGEC1; ENSG00000155495; CTA
FAQSPLQIPV

SEQ ID NO: 44595 - protein, 8 aa, Homo sapiens
  Table A; Target 44595; HLA-B*51:01; MAGEC1; ENSG00000155495; CTA
FAQSSLQI

SEQ ID NO: 44596 - protein, 9 aa, Homo sapiens
  Table A; Target 44596; HLA-B*40:01; MAGEC1; ENSG00000155495; CTA
FEGFAQSPL

SEQ ID NO: 44597 - protein, 9 aa, Homo sapiens
  Table A; Target 44597; HLA-B*49:01; MAGEC1; ENSG00000155495; CTA
FEGFAQSPL

SEQ ID NO: 44598 - protein, 11 aa, Homo sapiens
  Table A; Target 44598; HLA-B*49:01; MAGEC1; ENSG00000155495; CTA
FEGFAQSPLQI

SEQ ID NO: 44599 - protein, 9 aa, Homo sapiens
  Table A; Target 44599; HLA-A*30:01; MAGEC1; ENSG00000155495; CTA
FEGFAQSSL

SEQ ID NO: 44600 - protein, 9 aa, Homo sapiens
  Table A; Target 44600; HLA-B*18:01; MAGEC1; ENSG00000155495; CTA
FEGFAQSSL

SEQ ID NO: 44601 - protein, 9 aa, Homo sapiens
  Table A; Target 44601; HLA-B*40:01; MAGEC1; ENSG00000155495; CTA
FEGFAQSSL

SEQ ID NO: 44602 - protein, 9 aa, Homo sapiens
  Table A; Target 44602; HLA-B*40:02; MAGEC1; ENSG00000155495; CTA
FEGFAQSSL

SEQ ID NO: 44603 - protein, 9 aa, Homo sapiens
  Table A; Target 44603; HLA-B*49:01; MAGEC1; ENSG00000155495; CTA
FEGFAQSSL

SEQ ID NO: 44604 - protein, 9 aa, Homo sapiens
  Table A; Target 44604; HLA-C*03:04; MAGEC1; ENSG00000155495; CTA
FEGFAQSSL

SEQ ID NO: 44605 - protein, 11 aa, Homo sapiens
  Table A; Target 44605; HLA-B*49:01; MAGEC1; ENSG00000155495; CTA
FEGFAQSSLQI

SEQ ID NO: 44606 - protein, 8 aa, Homo sapiens
  Table A; Target 44606; HLA-A*30:01; MAGEC1; ENSG00000155495; CTA
FEGFPQSL

SEQ ID NO: 44607 - protein, 8 aa, Homo sapiens
  Table A; Target 44607; HLA-B*18:01; MAGEC1; ENSG00000155495; CTA
FEGFPQSL

SEQ ID NO: 44608 - protein, 8 aa, Homo sapiens
  Table A; Target 44608; HLA-B*39:01; MAGEC1; ENSG00000155495; CTA
FEGFPQSL

SEQ ID NO: 44609 - protein, 8 aa, Homo sapiens
  Table A; Target 44609; HLA-B*40:01; MAGEC1; ENSG00000155495; CTA
FEGFPQSL

SEQ ID NO: 44610 - protein, 8 aa, Homo sapiens
  Table A; Target 44610; HLA-B*40:02; MAGEC1; ENSG00000155495; CTA
FEGFPQSL

SEQ ID NO: 44611 - protein, 8 aa, Homo sapiens
  Table A; Target 44611; HLA-B*49:01; MAGEC1; ENSG00000155495; CTA
FEGFPQSL

SEQ ID NO: 44612 - protein, 9 aa, Homo sapiens
  Table A; Target 44612; HLA-A*30:01; MAGEC1; ENSG00000155495; CTA
FEGFPQSLL

SEQ ID NO: 44613 - protein, 9 aa, Homo sapiens
  Table A; Target 44613; HLA-B*40:01; MAGEC1; ENSG00000155495; CTA
FEGFPQSLL

SEQ ID NO: 44614 - protein, 9 aa, Homo sapiens
  Table A; Target 44614; HLA-B*49:01; MAGEC1; ENSG00000155495; CTA
FEGFPQSLL

SEQ ID NO: 44615 - protein, 8 aa, Homo sapiens
  Table A; Target 44615; HLA-B*49:01; MAGEC1; ENSG00000155495; CTA
FEGFPQSV

SEQ ID NO: 44616 - protein, 9 aa, Homo sapiens
  Table A; Target 44616; HLA-A*30:01; MAGEC1; ENSG00000155495; CTA
FEGFPQSVL

SEQ ID NO: 44617 - protein, 9 aa, Homo sapiens
  Table A; Target 44617; HLA-B*40:01; MAGEC1; ENSG00000155495; CTA
FEGFPQSVL

SEQ ID NO: 44618 - protein, 9 aa, Homo sapiens
  Table A; Target 44618; HLA-B*40:02; MAGEC1; ENSG00000155495; CTA
FEGFPQSVL

SEQ ID NO: 44619 - protein, 9 aa, Homo sapiens
  Table A; Target 44619; HLA-B*49:01; MAGEC1; ENSG00000155495; CTA
FEGFPQSVL

SEQ ID NO: 44620 - protein, 9 aa, Homo sapiens
  Table A; Target 44620; HLA-A*23:01; MAGEC1; ENSG00000155495; CTA
FFSSALLSI

SEQ ID NO: 44621 - protein, 10 aa, Homo sapiens
  Table A; Target 44621; HLA-A*29:02; MAGEC1; ENSG00000155495; CTA
FFSSALLSIF

SEQ ID NO: 44622 - protein, 9 aa, Homo sapiens
  Table A; Target 44622; HLA-A*02:03; MAGEC1; ENSG00000155495; CTA
FLAMLKNTV

SEQ ID NO: 44623 - protein, 8 aa, Homo sapiens
  Table A; Target 44623; HLA-B*51:01; MAGEC1; ENSG00000155495; CTA
FPQSLLQI

SEQ ID NO: 44624 - protein, 11 aa, Homo sapiens
  Table A; Target 44624; HLA-B*35:01; MAGEC1; ENSG00000155495; CTA
FPQSPLQGEEF

SEQ ID NO: 44625 - protein, 11 aa, Homo sapiens
  Table A; Target 44625; HLA-B*35:03; MAGEC1; ENSG00000155495; CTA
FPQSPLQGEEF

SEQ ID NO: 44626 - protein, 11 aa, Homo sapiens
  Table A; Target 44626; HLA-B*38:01; MAGEC1; ENSG00000155495; CTA
FPQSPLQGEEF

SEQ ID NO: 44627 - protein, 11 aa, Homo sapiens
  Table A; Target 44627; HLA-B*54:01; MAGEC1; ENSG00000155495; CTA
FPQSPLQGEEF

SEQ ID NO: 44628 - protein, 11 aa, Homo sapiens
  Table A; Target 44628; HLA-B*55:01; MAGEC1; ENSG00000155495; CTA
FPQSPLQGEEF

SEQ ID NO: 44629 - protein, 11 aa, Homo sapiens
  Table A; Target 44629; HLA-B*56:01; MAGEC1; ENSG00000155495; CTA
FPQSPLQGEEF

SEQ ID NO: 44630 - protein, 11 aa, Homo sapiens
  Table A; Target 44630; HLA-C*04:01; MAGEC1; ENSG00000155495; CTA
FPQSPLQGEEF

SEQ ID NO: 44631 - protein, 10 aa, Homo sapiens
  Table A; Target 44631; HLA-B*54:01; MAGEC1; ENSG00000155495; CTA
FPQSPLQIPG

SEQ ID NO: 44632 - protein, 10 aa, Homo sapiens
  Table A; Target 44632; HLA-B*56:01; MAGEC1; ENSG00000155495; CTA
FPQSPLQIPG

SEQ ID NO: 44633 - protein, 10 aa, Homo sapiens
  Table A; Target 44633; HLA-B*35:01; MAGEC1; ENSG00000155495; CTA
FPQSPLQIPM

SEQ ID NO: 44634 - protein, 10 aa, Homo sapiens
  Table A; Target 44634; HLA-B*35:03; MAGEC1; ENSG00000155495; CTA
FPQSPLQIPM

SEQ ID NO: 44635 - protein, 10 aa, Homo sapiens
  Table A; Target 44635; HLA-B*54:01; MAGEC1; ENSG00000155495; CTA
FPQSPLQIPM

SEQ ID NO: 44636 - protein, 10 aa, Homo sapiens
  Table A; Target 44636; HLA-B*56:01; MAGEC1; ENSG00000155495; CTA
FPQSPLQIPM

SEQ ID NO: 44637 - protein, 11 aa, Homo sapiens
  Table A; Target 44637; HLA-B*54:01; MAGEC1; ENSG00000155495; CTA
FPQSPLQIPMT

SEQ ID NO: 44638 - protein, 11 aa, Homo sapiens
  Table A; Target 44638; HLA-B*35:01; MAGEC1; ENSG00000155495; CTA
FPQSPQGEDSL

SEQ ID NO: 44639 - protein, 11 aa, Homo sapiens
  Table A; Target 44639; HLA-B*35:03; MAGEC1; ENSG00000155495; CTA
FPQSPQGEDSL

SEQ ID NO: 44640 - protein, 11 aa, Homo sapiens
  Table A; Target 44640; HLA-B*38:01; MAGEC1; ENSG00000155495; CTA
FPQSPQGEDSL

SEQ ID NO: 44641 - protein, 11 aa, Homo sapiens
  Table A; Target 44641; HLA-B*39:01; MAGEC1; ENSG00000155495; CTA
FPQSPQGEDSL

SEQ ID NO: 44642 - protein, 11 aa, Homo sapiens
  Table A; Target 44642; HLA-B*55:01; MAGEC1; ENSG00000155495; CTA
FPQSPQGEDSL

SEQ ID NO: 44643 - protein, 8 aa, Homo sapiens
  Table A; Target 44643; HLA-B*51:01; MAGEC1; ENSG00000155495; CTA
FPQSVLQI

SEQ ID NO: 44644 - protein, 10 aa, Homo sapiens
  Table A; Target 44644; HLA-B*54:01; MAGEC1; ENSG00000155495; CTA
FPQSVLQIPV

SEQ ID NO: 44645 - protein, 10 aa, Homo sapiens
  Table A; Target 44645; HLA-B*56:01; MAGEC1; ENSG00000155495; CTA
FPQSVLQIPV

SEQ ID NO: 44646 - protein, 9 aa, Homo sapiens
  Table A; Target 44646; HLA-B*07:02; MAGEC1; ENSG00000155495; CTA
FPSSYKDAL

SEQ ID NO: 44647 - protein, 9 aa, Homo sapiens
  Table A; Target 44647; HLA-B*08:01; MAGEC1; ENSG00000155495; CTA
FPSSYKDAL

SEQ ID NO: 44648 - protein, 9 aa, Homo sapiens
  Table A; Target 44648; HLA-B*35:01; MAGEC1; ENSG00000155495; CTA
FPSSYKDAL

SEQ ID NO: 44649 - protein, 9 aa, Homo sapiens
  Table A; Target 44649; HLA-B*35:03; MAGEC1; ENSG00000155495; CTA
FPSSYKDAL

SEQ ID NO: 44650 - protein, 9 aa, Homo sapiens
  Table A; Target 44650; HLA-B*55:01; MAGEC1; ENSG00000155495; CTA
FPSSYKDAL

SEQ ID NO: 44651 - protein, 9 aa, Homo sapiens
  Table A; Target 44651; HLA-B*56:01; MAGEC1; ENSG00000155495; CTA
FPSSYKDAL

SEQ ID NO: 44652 - protein, 9 aa, Homo sapiens
  Table A; Target 44652; HLA-C*03:03; MAGEC1; ENSG00000155495; CTA
FPSSYKDAL

SEQ ID NO: 44653 - protein, 9 aa, Homo sapiens
  Table A; Target 44653; HLA-C*07:02; MAGEC1; ENSG00000155495; CTA
FPSSYKDAL

SEQ ID NO: 44654 - protein, 8 aa, Homo sapiens
  Table A; Target 44654; HLA-B*54:01; MAGEC1; ENSG00000155495; CTA
FPVIFRKA

SEQ ID NO: 44655 - protein, 9 aa, Homo sapiens
  Table A; Target 44655; HLA-C*05:01; MAGEC1; ENSG00000155495; CTA
FSEESSSPV

SEQ ID NO: 44656 - protein, 9 aa, Homo sapiens
  Table A; Target 44656; HLA-A*01:01; MAGEC1; ENSG00000155495; CTA
FSERTQSTF

SEQ ID NO: 44657 - protein, 9 aa, Homo sapiens
  Table A; Target 44657; HLA-A*32:01; MAGEC1; ENSG00000155495; CTA
FSERTQSTF

SEQ ID NO: 44658 - protein, 9 aa, Homo sapiens
  Table A; Target 44658; HLA-B*46:01; MAGEC1; ENSG00000155495; CTA
FSERTQSTF

SEQ ID NO: 44659 - protein, 9 aa, Homo sapiens
  Table A; Target 44659; HLA-B*58:01; MAGEC1; ENSG00000155495; CTA
FSERTQSTF

SEQ ID NO: 44660 - protein, 9 aa, Homo sapiens
  Table A; Target 44660; HLA-C*03:03; MAGEC1; ENSG00000155495; CTA
FSERTQSTF

SEQ ID NO: 44661 - protein, 9 aa, Homo sapiens
  Table A; Target 44661; HLA-C*03:04; MAGEC1; ENSG00000155495; CTA
FSERTQSTF

SEQ ID NO: 44662 - protein, 9 aa, Homo sapiens
  Table A; Target 44662; HLA-C*05:01; MAGEC1; ENSG00000155495; CTA
FSERTQSTF

SEQ ID NO: 44663 - protein, 9 aa, Homo sapiens
  Table A; Target 44663; HLA-C*07:04; MAGEC1; ENSG00000155495; CTA
FSERTQSTF

SEQ ID NO: 44664 - protein, 9 aa, Homo sapiens
  Table A; Target 44664; HLA-B*57:01; MAGEC1; ENSG00000155495; CTA
FSSALLSIF

SEQ ID NO: 44665 - protein, 9 aa, Homo sapiens
  Table A; Target 44665; HLA-C*02:02; MAGEC1; ENSG00000155495; CTA
FSSALLSIF

SEQ ID NO: 44666 - protein, 9 aa, Homo sapiens
  Table A; Target 44666; HLA-C*02:02; MAGEC1; ENSG00000155495; CTA
FSSTLLSIL

SEQ ID NO: 44667 - protein, 9 aa, Homo sapiens
  Table A; Target 44667; HLA-C*12:03; MAGEC1; ENSG00000155495; CTA
FSSTLLSIL

SEQ ID NO: 44668 - protein, 9 aa, Homo sapiens
  Table A; Target 44668; HLA-A*01:01; MAGEC1; ENSG00000155495; CTA
FSSTLLSLF

SEQ ID NO: 44669 - protein, 8 aa, Homo sapiens
  Table A; Target 44669; HLA-C*03:04; MAGEC1; ENSG00000155495; CTA
FSSTLVSL

SEQ ID NO: 44670 - protein, 9 aa, Homo sapiens
  Table A; Target 44670; HLA-A*01:01; MAGEC1; ENSG00000155495; CTA
FSSTLVSLF

SEQ ID NO: 44671 - protein, 9 aa, Homo sapiens
  Table A; Target 44671; HLA-B*57:01; MAGEC1; ENSG00000155495; CTA
FSSTLVSLF

SEQ ID NO: 44672 - protein, 9 aa, Homo sapiens
  Table A; Target 44672; HLA-C*02:02; MAGEC1; ENSG00000155495; CTA
FSSTLVSLF

SEQ ID NO: 44673 - protein, 8 aa, Homo sapiens
  Table A; Target 44673; HLA-B*46:01; MAGEC1; ENSG00000155495; CTA
FSYTLASL

SEQ ID NO: 44674 - protein, 8 aa, Homo sapiens
  Table A; Target 44674; HLA-C*03:03; MAGEC1; ENSG00000155495; CTA
FSYTLASL

SEQ ID NO: 44675 - protein, 8 aa, Homo sapiens
  Table A; Target 44675; HLA-C*03:04; MAGEC1; ENSG00000155495; CTA
FSYTLASL

SEQ ID NO: 44676 - protein, 9 aa, Homo sapiens
  Table A; Target 44676; HLA-A*01:01; MAGEC1; ENSG00000155495; CTA
FSYTLASLL

SEQ ID NO: 44677 - protein, 9 aa, Homo sapiens
  Table A; Target 44677; HLA-C*02:02; MAGEC1; ENSG00000155495; CTA
FSYTLASLL

SEQ ID NO: 44678 - protein, 9 aa, Homo sapiens
  Table A; Target 44678; HLA-C*03:03; MAGEC1; ENSG00000155495; CTA
FSYTLASLL

SEQ ID NO: 44679 - protein, 9 aa, Homo sapiens
  Table A; Target 44679; HLA-C*03:04; MAGEC1; ENSG00000155495; CTA
FSYTLASLL

SEQ ID NO: 44680 - protein, 9 aa, Homo sapiens
  Table A; Target 44680; HLA-C*12:03; MAGEC1; ENSG00000155495; CTA
FSYTLASLL

SEQ ID NO: 44681 - protein, 8 aa, Homo sapiens
  Table A; Target 44681; HLA-C*03:03; MAGEC1; ENSG00000155495; CTA
FSYTLLSL

SEQ ID NO: 44682 - protein, 8 aa, Homo sapiens
  Table A; Target 44682; HLA-C*03:04; MAGEC1; ENSG00000155495; CTA
FSYTLLSL

SEQ ID NO: 44683 - protein, 9 aa, Homo sapiens
  Table A; Target 44683; HLA-B*57:01; MAGEC1; ENSG00000155495; CTA
FSYTLLSLF

SEQ ID NO: 44684 - protein, 8 aa, Homo sapiens
  Table A; Target 44684; HLA-B*40:01; MAGEC1; ENSG00000155495; CTA
GEDFQSSL

SEQ ID NO: 44685 - protein, 10 aa, Homo sapiens
  Table A; Target 44685; HLA-A*30:01; MAGEC1; ENSG00000155495; CTA
GEDSLSPLQI

SEQ ID NO: 44686 - protein, 10 aa, Homo sapiens
  Table A; Target 44686; HLA-B*40:01; MAGEC1; ENSG00000155495; CTA
GEDSLSPLQI

SEQ ID NO: 44687 - protein, 10 aa, Homo sapiens
  Table A; Target 44687; HLA-B*44:03; MAGEC1; ENSG00000155495; CTA
GEDSLSPLQI

SEQ ID NO: 44688 - protein, 10 aa, Homo sapiens
  Table A; Target 44688; HLA-B*49:01; MAGEC1; ENSG00000155495; CTA
GEDSLSPLQI

SEQ ID NO: 44689 - protein, 8 aa, Homo sapiens
  Table A; Target 44689; HLA-B*40:01; MAGEC1; ENSG00000155495; CTA
GEDSLSSL

SEQ ID NO: 44690 - protein, 10 aa, Homo sapiens
  Table A; Target 44690; HLA-A*30:01; MAGEC1; ENSG00000155495; CTA
GEDSLSSLHF

SEQ ID NO: 44691 - protein, 10 aa, Homo sapiens
  Table A; Target 44691; HLA-B*27:02; MAGEC1; ENSG00000155495; CTA
GEDSLSSLHF

SEQ ID NO: 44692 - protein, 10 aa, Homo sapiens
  Table A; Target 44692; HLA-B*40:01; MAGEC1; ENSG00000155495; CTA
GEDSLSSLHF

SEQ ID NO: 44693 - protein, 10 aa, Homo sapiens
  Table A; Target 44693; HLA-B*44:02; MAGEC1; ENSG00000155495; CTA
GEDSLSSLHF

SEQ ID NO: 44694 - protein, 10 aa, Homo sapiens
  Table A; Target 44694; HLA-B*44:03; MAGEC1; ENSG00000155495; CTA
GEDSLSSLHF

SEQ ID NO: 44695 - protein, 10 aa, Homo sapiens
  Table A; Target 44695; HLA-B*49:01; MAGEC1; ENSG00000155495; CTA
GEDSLSSLHF

SEQ ID NO: 44696 - protein, 10 aa, Homo sapiens
  Table A; Target 44696; HLA-C*16:04; MAGEC1; ENSG00000155495; CTA
GEDSLSSLHF

SEQ ID NO: 44697 - protein, 9 aa, Homo sapiens
  Table A; Target 44697; HLA-B*18:01; MAGEC1; ENSG00000155495; CTA
GEDSMSPLY

SEQ ID NO: 44698 - protein, 9 aa, Homo sapiens
  Table A; Target 44698; HLA-B*44:02; MAGEC1; ENSG00000155495; CTA
GEDSMSPLY

SEQ ID NO: 44699 - protein, 9 aa, Homo sapiens
  Table A; Target 44699; HLA-B*44:03; MAGEC1; ENSG00000155495; CTA
GEDSMSPLY

SEQ ID NO: 44700 - protein, 10 aa, Homo sapiens
  Table A; Target 44700; HLA-B*40:01; MAGEC1; ENSG00000155495; CTA
GEDSMSPLYF

SEQ ID NO: 44701 - protein, 10 aa, Homo sapiens
  Table A; Target 44701; HLA-B*44:03; MAGEC1; ENSG00000155495; CTA
GEDSMSPLYF

SEQ ID NO: 44702 - protein, 10 aa, Homo sapiens
  Table A; Target 44702; HLA-B*49:01; MAGEC1; ENSG00000155495; CTA
GEDSMSPLYF

SEQ ID NO: 44703 - protein, 10 aa, Homo sapiens
  Table A; Target 44703; HLA-A*30:01; MAGEC1; ENSG00000155495; CTA
GEDSQSPLQI

SEQ ID NO: 44704 - protein, 10 aa, Homo sapiens
  Table A; Target 44704; HLA-B*40:01; MAGEC1; ENSG00000155495; CTA
GEDSQSPLQI

SEQ ID NO: 44705 - protein, 10 aa, Homo sapiens
  Table A; Target 44705; HLA-B*49:01; MAGEC1; ENSG00000155495; CTA
GEDSQSPLQI

SEQ ID NO: 44706 - protein, 8 aa, Homo sapiens
  Table A; Target 44706; HLA-B*37:01; MAGEC1; ENSG00000155495; CTA
GENTHSPL

SEQ ID NO: 44707 - protein, 10 aa, Homo sapiens
  Table A; Target 44707; HLA-A*30:01; MAGEC1; ENSG00000155495; CTA
GENTHSPLQI

SEQ ID NO: 44708 - protein, 10 aa, Homo sapiens
  Table A; Target 44708; HLA-B*40:01; MAGEC1; ENSG00000155495; CTA
GENTHSPLQI

SEQ ID NO: 44709 - protein, 10 aa, Homo sapiens
  Table A; Target 44709; HLA-B*44:03; MAGEC1; ENSG00000155495; CTA
GENTHSPLQI

SEQ ID NO: 44710 - protein, 10 aa, Homo sapiens
  Table A; Target 44710; HLA-B*49:01; MAGEC1; ENSG00000155495; CTA
GENTHSPLQI

SEQ ID NO: 44711 - protein, 9 aa, Homo sapiens
  Table A; Target 44711; HLA-A*23:01; MAGEC1; ENSG00000155495; CTA
GFAQSPLQI

SEQ ID NO: 44712 - protein, 9 aa, Homo sapiens
  Table A; Target 44712; HLA-A*30:01; MAGEC1; ENSG00000155495; CTA
GFAQSPLQI

SEQ ID NO: 44713 - protein, 9 aa, Homo sapiens
  Table A; Target 44713; HLA-B*13:02; MAGEC1; ENSG00000155495; CTA
GFAQSPLQI

SEQ ID NO: 44714 - protein, 9 aa, Homo sapiens
  Table A; Target 44714; HLA-B*13:02; MAGEC1; ENSG00000155495; CTA
GMSQNRLLI

SEQ ID NO: 44715 - protein, 10 aa, Homo sapiens
  Table A; Target 44715; HLA-B*56:01; MAGEC1; ENSG00000155495; CTA
GPAQSPLQSP

SEQ ID NO: 44716 - protein, 8 aa, Homo sapiens
  Table A; Target 44716; HLA-B*07:02; MAGEC1; ENSG00000155495; CTA
GPRAHSEV

SEQ ID NO: 44717 - protein, 9 aa, Homo sapiens
  Table A; Target 44717; HLA-B*07:02; MAGEC1; ENSG00000155495; CTA
GPRAHSEVI

SEQ ID NO: 44718 - protein, 9 aa, Homo sapiens
  Table A; Target 44718; HLA-C*07:02; MAGEC1; ENSG00000155495; CTA
GPRAHSEVI

SEQ ID NO: 44719 - protein, 10 aa, Homo sapiens
  Table A; Target 44719; HLA-B*56:01; MAGEC1; ENSG00000155495; CTA
GPVQSPLHSP

SEQ ID NO: 44720 - protein, 9 aa, Homo sapiens
  Table A; Target 44720; HLA-C*01:02; MAGEC1; ENSG00000155495; CTA
GSPSFSSTL

SEQ ID NO: 44721 - protein, 10 aa, Homo sapiens
  Table A; Target 44721; HLA-B*57:01; MAGEC1; ENSG00000155495; CTA
GTYASEEVIW

SEQ ID NO: 44722 - protein, 8 aa, Homo sapiens
  Table A; Target 44722; HLA-A*31:01; MAGEC1; ENSG00000155495; CTA
GYFPVIFR

SEQ ID NO: 44723 - protein, 9 aa, Homo sapiens
  Table A; Target 44723; HLA-A*29:02; MAGEC1; ENSG00000155495; CTA
GYFPVIFRK

SEQ ID NO: 44724 - protein, 9 aa, Homo sapiens
  Table A; Target 44724; HLA-A*31:01; MAGEC1; ENSG00000155495; CTA
GYFPVIFRK

SEQ ID NO: 44725 - protein, 9 aa, Homo sapiens
  Table A; Target 44725; HLA-B*57:01; MAGEC1; ENSG00000155495; CTA
GYFPVIFRK

SEQ ID NO: 44726 - protein, 9 aa, Homo sapiens
  Table A; Target 44726; HLA-A*30:01; MAGEC1; ENSG00000155495; CTA
IEILFGISL

SEQ ID NO: 44727 - protein, 9 aa, Homo sapiens
  Table A; Target 44727; HLA-B*15:03; MAGEC1; ENSG00000155495; CTA
IEILFGISL

SEQ ID NO: 44728 - protein, 9 aa, Homo sapiens
  Table A; Target 44728; HLA-B*18:01; MAGEC1; ENSG00000155495; CTA
IEILFGISL

SEQ ID NO: 44729 - protein, 9 aa, Homo sapiens
  Table A; Target 44729; HLA-B*37:01; MAGEC1; ENSG00000155495; CTA
IEILFGISL

SEQ ID NO: 44730 - protein, 9 aa, Homo sapiens
  Table A; Target 44730; HLA-B*40:01; MAGEC1; ENSG00000155495; CTA
IEILFGISL

SEQ ID NO: 44731 - protein, 9 aa, Homo sapiens
  Table A; Target 44731; HLA-B*40:02; MAGEC1; ENSG00000155495; CTA
IEILFGISL

SEQ ID NO: 44732 - protein, 9 aa, Homo sapiens
  Table A; Target 44732; HLA-B*44:02; MAGEC1; ENSG00000155495; CTA
IEILFGISL

SEQ ID NO: 44733 - protein, 9 aa, Homo sapiens
  Table A; Target 44733; HLA-B*44:03; MAGEC1; ENSG00000155495; CTA
IEILFGISL

SEQ ID NO: 44734 - protein, 9 aa, Homo sapiens
  Table A; Target 44734; HLA-B*49:01; MAGEC1; ENSG00000155495; CTA
IEILFGISL

SEQ ID NO: 44735 - protein, 9 aa, Homo sapiens
  Table A; Target 44735; HLA-A*23:01; MAGEC1; ENSG00000155495; CTA
IESEPLFTY

SEQ ID NO: 44736 - protein, 9 aa, Homo sapiens
  Table A; Target 44736; HLA-A*25:01; MAGEC1; ENSG00000155495; CTA
IESEPLFTY

SEQ ID NO: 44737 - protein, 9 aa, Homo sapiens
  Table A; Target 44737; HLA-A*29:02; MAGEC1; ENSG00000155495; CTA
IESEPLFTY

SEQ ID NO: 44738 - protein, 9 aa, Homo sapiens
  Table A; Target 44738; HLA-A*30:01; MAGEC1; ENSG00000155495; CTA
IESEPLFTY

SEQ ID NO: 44739 - protein, 9 aa, Homo sapiens
  Table A; Target 44739; HLA-A*30:02; MAGEC1; ENSG00000155495; CTA
IESEPLFTY

SEQ ID NO: 44740 - protein, 9 aa, Homo sapiens
  Table A; Target 44740; HLA-B*15:01; MAGEC1; ENSG00000155495; CTA
IESEPLFTY

SEQ ID NO: 44741 - protein, 9 aa, Homo sapiens
  Table A; Target 44741; HLA-B*15:03; MAGEC1; ENSG00000155495; CTA
IESEPLFTY

SEQ ID NO: 44742 - protein, 9 aa, Homo sapiens
  Table A; Target 44742; HLA-B*18:01; MAGEC1; ENSG00000155495; CTA
IESEPLFTY

SEQ ID NO: 44743 - protein, 9 aa, Homo sapiens
  Table A; Target 44743; HLA-B*27:02; MAGEC1; ENSG00000155495; CTA
IESEPLFTY

SEQ ID NO: 44744 - protein, 9 aa, Homo sapiens
  Table A; Target 44744; HLA-B*27:05; MAGEC1; ENSG00000155495; CTA
IESEPLFTY

SEQ ID NO: 44745 - protein, 9 aa, Homo sapiens
  Table A; Target 44745; HLA-B*35:01; MAGEC1; ENSG00000155495; CTA
IESEPLFTY

SEQ ID NO: 44746 - protein, 9 aa, Homo sapiens
  Table A; Target 44746; HLA-B*37:01; MAGEC1; ENSG00000155495; CTA
IESEPLFTY

SEQ ID NO: 44747 - protein, 9 aa, Homo sapiens
  Table A; Target 44747; HLA-B*40:01; MAGEC1; ENSG00000155495; CTA
IESEPLFTY

SEQ ID NO: 44748 - protein, 9 aa, Homo sapiens
  Table A; Target 44748; HLA-B*40:02; MAGEC1; ENSG00000155495; CTA
IESEPLFTY

SEQ ID NO: 44749 - protein, 9 aa, Homo sapiens
  Table A; Target 44749; HLA-B*44:02; MAGEC1; ENSG00000155495; CTA
IESEPLFTY

SEQ ID NO: 44750 - protein, 9 aa, Homo sapiens
  Table A; Target 44750; HLA-B*44:03; MAGEC1; ENSG00000155495; CTA
IESEPLFTY

SEQ ID NO: 44751 - protein, 9 aa, Homo sapiens
  Table A; Target 44751; HLA-B*49:01; MAGEC1; ENSG00000155495; CTA
IESEPLFTY

SEQ ID NO: 44752 - protein, 9 aa, Homo sapiens
  Table A; Target 44752; HLA-C*02:02; MAGEC1; ENSG00000155495; CTA
IESEPLFTY

SEQ ID NO: 44753 - protein, 9 aa, Homo sapiens
  Table A; Target 44753; HLA-C*12:03; MAGEC1; ENSG00000155495; CTA
IESEPLFTY

SEQ ID NO: 44754 - protein, 9 aa, Homo sapiens
  Table A; Target 44754; HLA-C*14:02; MAGEC1; ENSG00000155495; CTA
IESEPLFTY

SEQ ID NO: 44755 - protein, 9 aa, Homo sapiens
  Table A; Target 44755; HLA-C*16:01; MAGEC1; ENSG00000155495; CTA
IESEPLFTY

SEQ ID NO: 44756 - protein, 9 aa, Homo sapiens
  Table A; Target 44756; HLA-C*16:04; MAGEC1; ENSG00000155495; CTA
IESEPLFTY

SEQ ID NO: 44757 - protein, 10 aa, Homo sapiens
  Table A; Target 44757; HLA-B*49:01; MAGEC1; ENSG00000155495; CTA
IESEPLFTYT

SEQ ID NO: 44758 - protein, 11 aa, Homo sapiens
  Table A; Target 44758; HLA-A*30:01; MAGEC1; ENSG00000155495; CTA
IESEPLFTYTL

SEQ ID NO: 44759 - protein, 11 aa, Homo sapiens
  Table A; Target 44759; HLA-B*40:01; MAGEC1; ENSG00000155495; CTA
IESEPLFTYTL

SEQ ID NO: 44760 - protein, 11 aa, Homo sapiens
  Table A; Target 44760; HLA-B*49:01; MAGEC1; ENSG00000155495; CTA
IESEPLFTYTL

SEQ ID NO: 44761 - protein, 8 aa, Homo sapiens
  Table A; Target 44761; HLA-C*14:02; MAGEC1; ENSG00000155495; CTA
IFIKGTYA

SEQ ID NO: 44762 - protein, 8 aa, Homo sapiens
  Table A; Target 44762; HLA-C*14:02; MAGEC1; ENSG00000155495; CTA
IFQSSPER

SEQ ID NO: 44763 - protein, 9 aa, Homo sapiens
  Table A; Target 44763; HLA-C*14:02; MAGEC1; ENSG00000155495; CTA
IFQSSPESA

SEQ ID NO: 44764 - protein, 10 aa, Homo sapiens
  Table A; Target 44764; HLA-C*05:01; MAGEC1; ENSG00000155495; CTA
IIDTTDDSTA

SEQ ID NO: 44765 - protein, 8 aa, Homo sapiens
  Table A; Target 44765; HLA-B*15:01; MAGEC1; ENSG00000155495; CTA
IIFIKGTY

SEQ ID NO: 44766 - protein, 8 aa, Homo sapiens
  Table A; Target 44766; HLA-B*15:03; MAGEC1; ENSG00000155495; CTA
IIFIKGTY

SEQ ID NO: 44767 - protein, 9 aa, Homo sapiens
  Table A; Target 44767; HLA-A*02:03; MAGEC1; ENSG00000155495; CTA
IIFIKGTYA

SEQ ID NO: 44768 - protein, 10 aa, Homo sapiens
  Table A; Target 44768; HLA-A*02:01; MAGEC1; ENSG00000155495; CTA
ILFGISLREV

SEQ ID NO: 44769 - protein, 10 aa, Homo sapiens
  Table A; Target 44769; HLA-A*02:03; MAGEC1; ENSG00000155495; CTA
ILFGISLREV

SEQ ID NO: 44770 - protein, 10 aa, Homo sapiens
  Table A; Target 44770; HLA-A*02:04; MAGEC1; ENSG00000155495; CTA
ILFGISLREV

SEQ ID NO: 44771 - protein, 9 aa, Homo sapiens
  Table A; Target 44771; HLA-A*02:01; MAGEC1; ENSG00000155495; CTA
ILILSIIFI

SEQ ID NO: 44772 - protein, 9 aa, Homo sapiens
  Table A; Target 44772; HLA-A*02:04; MAGEC1; ENSG00000155495; CTA
ILILSIIFI

SEQ ID NO: 44773 - protein, 9 aa, Homo sapiens
  Table A; Target 44773; HLA-A*02:01; MAGEC1; ENSG00000155495; CTA
ILQSSPESA

SEQ ID NO: 44774 - protein, 9 aa, Homo sapiens
  Table A; Target 44774; HLA-A*02:03; MAGEC1; ENSG00000155495; CTA
ILQSSPESA

SEQ ID NO: 44775 - protein, 9 aa, Homo sapiens
  Table A; Target 44775; HLA-B*55:01; MAGEC1; ENSG00000155495; CTA
ILQSSPESA

SEQ ID NO: 44776 - protein, 9 aa, Homo sapiens
  Table A; Target 44776; HLA-C*14:02; MAGEC1; ENSG00000155495; CTA
ILQSSPESA

SEQ ID NO: 44777 - protein, 11 aa, Homo sapiens
  Table A; Target 44777; HLA-B*07:02; MAGEC1; ENSG00000155495; CTA
IPGSPSFSSTL

SEQ ID NO: 44778 - protein, 11 aa, Homo sapiens
  Table A; Target 44778; HLA-C*07:02; MAGEC1; ENSG00000155495; CTA
IPGSPSFSSTL

SEQ ID NO: 44779 - protein, 11 aa, Homo sapiens
  Table A; Target 44779; HLA-B*07:02; MAGEC1; ENSG00000155495; CTA
IPVSAASSSTL

SEQ ID NO: 44780 - protein, 11 aa, Homo sapiens
  Table A; Target 44780; HLA-B*35:01; MAGEC1; ENSG00000155495; CTA
IPVSAASSSTL

SEQ ID NO: 44781 - protein, 11 aa, Homo sapiens
  Table A; Target 44781; HLA-B*35:03; MAGEC1; ENSG00000155495; CTA
IPVSAASSSTL

SEQ ID NO: 44782 - protein, 11 aa, Homo sapiens
  Table A; Target 44782; HLA-C*07:02; MAGEC1; ENSG00000155495; CTA
IPVSAASSSTL

SEQ ID NO: 44783 - protein, 9 aa, Homo sapiens
  Table A; Target 44783; HLA-B*56:01; MAGEC1; ENSG00000155495; CTA
IPVSPSFSS

SEQ ID NO: 44784 - protein, 10 aa, Homo sapiens
  Table A; Target 44784; HLA-B*56:01; MAGEC1; ENSG00000155495; CTA
IPVSPSFSST

SEQ ID NO: 44785 - protein, 11 aa, Homo sapiens
  Table A; Target 44785; HLA-B*07:02; MAGEC1; ENSG00000155495; CTA
IPVSPSFSSTL

SEQ ID NO: 44786 - protein, 11 aa, Homo sapiens
  Table A; Target 44786; HLA-B*35:01; MAGEC1; ENSG00000155495; CTA
IPVSPSFSSTL

SEQ ID NO: 44787 - protein, 11 aa, Homo sapiens
  Table A; Target 44787; HLA-B*35:03; MAGEC1; ENSG00000155495; CTA
IPVSPSFSSTL

SEQ ID NO: 44788 - protein, 11 aa, Homo sapiens
  Table A; Target 44788; HLA-B*51:01; MAGEC1; ENSG00000155495; CTA
IPVSPSFSSTL

SEQ ID NO: 44789 - protein, 11 aa, Homo sapiens
  Table A; Target 44789; HLA-B*56:01; MAGEC1; ENSG00000155495; CTA
IPVSPSFSSTL

SEQ ID NO: 44790 - protein, 11 aa, Homo sapiens
  Table A; Target 44790; HLA-C*03:03; MAGEC1; ENSG00000155495; CTA
IPVSPSFSSTL

SEQ ID NO: 44791 - protein, 11 aa, Homo sapiens
  Table A; Target 44791; HLA-C*03:04; MAGEC1; ENSG00000155495; CTA
IPVSPSFSSTL

SEQ ID NO: 44792 - protein, 11 aa, Homo sapiens
  Table A; Target 44792; HLA-C*07:02; MAGEC1; ENSG00000155495; CTA
IPVSPSFSSTL

SEQ ID NO: 44793 - protein, 9 aa, Homo sapiens
  Table A; Target 44793; HLA-B*56:01; MAGEC1; ENSG00000155495; CTA
IPVSPSSSS

SEQ ID NO: 44794 - protein, 11 aa, Homo sapiens
  Table A; Target 44794; HLA-B*07:02; MAGEC1; ENSG00000155495; CTA
IPVSPSSSSTL

SEQ ID NO: 44795 - protein, 11 aa, Homo sapiens
  Table A; Target 44795; HLA-B*35:01; MAGEC1; ENSG00000155495; CTA
IPVSPSSSSTL

SEQ ID NO: 44796 - protein, 11 aa, Homo sapiens
  Table A; Target 44796; HLA-B*35:03; MAGEC1; ENSG00000155495; CTA
IPVSPSSSSTL

SEQ ID NO: 44797 - protein, 11 aa, Homo sapiens
  Table A; Target 44797; HLA-B*51:01; MAGEC1; ENSG00000155495; CTA
IPVSPSSSSTL

SEQ ID NO: 44798 - protein, 11 aa, Homo sapiens
  Table A; Target 44798; HLA-C*03:03; MAGEC1; ENSG00000155495; CTA
IPVSPSSSSTL

SEQ ID NO: 44799 - protein, 11 aa, Homo sapiens
  Table A; Target 44799; HLA-C*03:04; MAGEC1; ENSG00000155495; CTA
IPVSPSSSSTL

SEQ ID NO: 44800 - protein, 11 aa, Homo sapiens
  Table A; Target 44800; HLA-C*07:02; MAGEC1; ENSG00000155495; CTA
IPVSPSSSSTL

SEQ ID NO: 44801 - protein, 11 aa, Homo sapiens
  Table A; Target 44801; HLA-B*07:02; MAGEC1; ENSG00000155495; CTA
IPVSRSFSSTL

SEQ ID NO: 44802 - protein, 11 aa, Homo sapiens
  Table A; Target 44802; HLA-C*07:02; MAGEC1; ENSG00000155495; CTA
IPVSRSFSSTL

SEQ ID NO: 44803 - protein, 9 aa, Homo sapiens
  Table A; Target 44803; HLA-A*29:02; MAGEC1; ENSG00000155495; CTA
IPVSSSFSY

SEQ ID NO: 44804 - protein, 9 aa, Homo sapiens
  Table A; Target 44804; HLA-B*15:03; MAGEC1; ENSG00000155495; CTA
IPVSSSFSY

SEQ ID NO: 44805 - protein, 9 aa, Homo sapiens
  Table A; Target 44805; HLA-B*35:01; MAGEC1; ENSG00000155495; CTA
IPVSSSFSY

SEQ ID NO: 44806 - protein, 9 aa, Homo sapiens
  Table A; Target 44806; HLA-B*55:01; MAGEC1; ENSG00000155495; CTA
IPVSSSFSY

SEQ ID NO: 44807 - protein, 11 aa, Homo sapiens
  Table A; Target 44807; HLA-B*35:03; MAGEC1; ENSG00000155495; CTA
IPVSSSFSYTL

SEQ ID NO: 44808 - protein, 11 aa, Homo sapiens
  Table A; Target 44808; HLA-B*07:02; MAGEC1; ENSG00000155495; CTA
IPVSSSSSSTL

SEQ ID NO: 44809 - protein, 11 aa, Homo sapiens
  Table A; Target 44809; HLA-B*35:01; MAGEC1; ENSG00000155495; CTA
IPVSSSSSSTL

SEQ ID NO: 44810 - protein, 11 aa, Homo sapiens
  Table A; Target 44810; HLA-B*35:03; MAGEC1; ENSG00000155495; CTA
IPVSSSSSSTL

SEQ ID NO: 44811 - protein, 11 aa, Homo sapiens
  Table A; Target 44811; HLA-C*03:04; MAGEC1; ENSG00000155495; CTA
IPVSSSSSSTL

SEQ ID NO: 44812 - protein, 11 aa, Homo sapiens
  Table A; Target 44812; HLA-C*07:02; MAGEC1; ENSG00000155495; CTA
IPVSSSSSSTL

SEQ ID NO: 44813 - protein, 9 aa, Homo sapiens
  Table A; Target 44813; HLA-A*23:01; MAGEC1; ENSG00000155495; CTA
ISFSSSTSL

SEQ ID NO: 44814 - protein, 9 aa, Homo sapiens
  Table A; Target 44814; HLA-A*30:01; MAGEC1; ENSG00000155495; CTA
ISFSSSTSL

SEQ ID NO: 44815 - protein, 9 aa, Homo sapiens
  Table A; Target 44815; HLA-A*32:01; MAGEC1; ENSG00000155495; CTA
ISFSSSTSL

SEQ ID NO: 44816 - protein, 9 aa, Homo sapiens
  Table A; Target 44816; HLA-B*07:02; MAGEC1; ENSG00000155495; CTA
ISFSSSTSL

SEQ ID NO: 44817 - protein, 9 aa, Homo sapiens
  Table A; Target 44817; HLA-B*15:01; MAGEC1; ENSG00000155495; CTA
ISFSSSTSL

SEQ ID NO: 44818 - protein, 9 aa, Homo sapiens
  Table A; Target 44818; HLA-B*15:03; MAGEC1; ENSG00000155495; CTA
ISFSSSTSL

SEQ ID NO: 44819 - protein, 9 aa, Homo sapiens
  Table A; Target 44819; HLA-B*35:03; MAGEC1; ENSG00000155495; CTA
ISFSSSTSL

SEQ ID NO: 44820 - protein, 9 aa, Homo sapiens
  Table A; Target 44820; HLA-B*39:01; MAGEC1; ENSG00000155495; CTA
ISFSSSTSL

SEQ ID NO: 44821 - protein, 9 aa, Homo sapiens
  Table A; Target 44821; HLA-B*40:01; MAGEC1; ENSG00000155495; CTA
ISFSSSTSL

SEQ ID NO: 44822 - protein, 9 aa, Homo sapiens
  Table A; Target 44822; HLA-B*46:01; MAGEC1; ENSG00000155495; CTA
ISFSSSTSL

SEQ ID NO: 44823 - protein, 9 aa, Homo sapiens
  Table A; Target 44823; HLA-B*58:01; MAGEC1; ENSG00000155495; CTA
ISFSSSTSL

SEQ ID NO: 44824 - protein, 9 aa, Homo sapiens
  Table A; Target 44824; HLA-C*01:02; MAGEC1; ENSG00000155495; CTA
ISFSSSTSL

SEQ ID NO: 44825 - protein, 9 aa, Homo sapiens
  Table A; Target 44825; HLA-C*02:02; MAGEC1; ENSG00000155495; CTA
ISFSSSTSL

SEQ ID NO: 44826 - protein, 9 aa, Homo sapiens
  Table A; Target 44826; HLA-C*03:03; MAGEC1; ENSG00000155495; CTA
ISFSSSTSL

SEQ ID NO: 44827 - protein, 9 aa, Homo sapiens
  Table A; Target 44827; HLA-C*03:04; MAGEC1; ENSG00000155495; CTA
ISFSSSTSL

SEQ ID NO: 44828 - protein, 9 aa, Homo sapiens
  Table A; Target 44828; HLA-C*05:01; MAGEC1; ENSG00000155495; CTA
ISFSSSTSL

SEQ ID NO: 44829 - protein, 9 aa, Homo sapiens
  Table A; Target 44829; HLA-C*07:02; MAGEC1; ENSG00000155495; CTA
ISFSSSTSL

SEQ ID NO: 44830 - protein, 9 aa, Homo sapiens
  Table A; Target 44830; HLA-C*07:04; MAGEC1; ENSG00000155495; CTA
ISFSSSTSL

SEQ ID NO: 44831 - protein, 9 aa, Homo sapiens
  Table A; Target 44831; HLA-C*12:03; MAGEC1; ENSG00000155495; CTA
ISFSSSTSL

SEQ ID NO: 44832 - protein, 9 aa, Homo sapiens
  Table A; Target 44832; HLA-C*14:02; MAGEC1; ENSG00000155495; CTA
ISFSSSTSL

SEQ ID NO: 44833 - protein, 9 aa, Homo sapiens
  Table A; Target 44833; HLA-C*16:01; MAGEC1; ENSG00000155495; CTA
ISFSSSTSL

SEQ ID NO: 44834 - protein, 9 aa, Homo sapiens
  Table A; Target 44834; HLA-C*16:04; MAGEC1; ENSG00000155495; CTA
ISFSSSTSL

SEQ ID NO: 44835 - protein, 10 aa, Homo sapiens
  Table A; Target 44835; HLA-C*04:01; MAGEC1; ENSG00000155495; CTA
IWDVLSGIGV

SEQ ID NO: 44836 - protein, 9 aa, Homo sapiens
  Table A; Target 44836; HLA-B*57:01; MAGEC1; ENSG00000155495; CTA
KAREFIEIL

SEQ ID NO: 44837 - protein, 10 aa, Homo sapiens
  Table A; Target 44837; HLA-B*57:01; MAGEC1; ENSG00000155495; CTA
KAREFIEILF

SEQ ID NO: 44838 - protein, 8 aa, Homo sapiens
  Table A; Target 44838; HLA-B*37:01; MAGEC1; ENSG00000155495; CTA
KDMPTAGM

SEQ ID NO: 44839 - protein, 10 aa, Homo sapiens
  Table A; Target 44839; HLA-C*06:02; MAGEC1; ENSG00000155495; CTA
KDMPTAGMPS

SEQ ID NO: 44840 - protein, 9 aa, Homo sapiens
  Table A; Target 44840; HLA-B*37:01; MAGEC1; ENSG00000155495; CTA
KDSLSPLEI

SEQ ID NO: 44841 - protein, 9 aa, Homo sapiens
  Table A; Target 44841; HLA-B*37:01; MAGEC1; ENSG00000155495; CTA
KDSQSPLQI

SEQ ID NO: 44842 - protein, 8 aa, Homo sapiens
  Table A; Target 44842; HLA-C*16:01; MAGEC1; ENSG00000155495; CTA
KNTVPITF

SEQ ID NO: 44843 - protein, 8 aa, Homo sapiens
  Table A; Target 44843; HLA-C*05:01; MAGEC1; ENSG00000155495; CTA
KVDELARF

SEQ ID NO: 44844 - protein, 9 aa, Homo sapiens
  Table A; Target 44844; HLA-A*02:07; MAGEC1; ENSG00000155495; CTA
KVDELARFL

SEQ ID NO: 44845 - protein, 9 aa, Homo sapiens
  Table A; Target 44845; HLA-A*03:01; MAGEC1; ENSG00000155495; CTA
KVDELARFL

SEQ ID NO: 44846 - protein, 10 aa, Homo sapiens
  Table A; Target 44846; HLA-A*02:07; MAGEC1; ENSG00000155495; CTA
KVDELARFLL

SEQ ID NO: 44847 - protein, 11 aa, Homo sapiens
  Table A; Target 44847; HLA-A*02:07; MAGEC1; ENSG00000155495; CTA
KVDELARFLLL

SEQ ID NO: 44848 - protein, 11 aa, Homo sapiens
  Table A; Target 44848; HLA-A*03:01; MAGEC1; ENSG00000155495; CTA
KVDELARFLLL

SEQ ID NO: 44849 - protein, 9 aa, Homo sapiens
  Table A; Target 44849; HLA-A*02:01; MAGEC1; ENSG00000155495; CTA
KVVEFLAML

SEQ ID NO: 44850 - protein, 9 aa, Homo sapiens
  Table A; Target 44850; HLA-A*02:03; MAGEC1; ENSG00000155495; CTA
KVVEFLAML

SEQ ID NO: 44851 - protein, 9 aa, Homo sapiens
  Table A; Target 44851; HLA-A*02:04; MAGEC1; ENSG00000155495; CTA
KVVEFLAML

SEQ ID NO: 44852 - protein, 9 aa, Homo sapiens
  Table A; Target 44852; HLA-A*02:07; MAGEC1; ENSG00000155495; CTA
KVVEFLAML

SEQ ID NO: 44853 - protein, 9 aa, Homo sapiens
  Table A; Target 44853; HLA-A*68:02; MAGEC1; ENSG00000155495; CTA
KVVEFLAML

SEQ ID NO: 44854 - protein, 10 aa, Homo sapiens
  Table A; Target 44854; HLA-A*03:01; MAGEC1; ENSG00000155495; CTA
KVVEFLAMLK

SEQ ID NO: 44855 - protein, 10 aa, Homo sapiens
  Table A; Target 44855; HLA-A*03:02; MAGEC1; ENSG00000155495; CTA
KVVEFLAMLK

SEQ ID NO: 44856 - protein, 10 aa, Homo sapiens
  Table A; Target 44856; HLA-A*11:01; MAGEC1; ENSG00000155495; CTA
KVVEFLAMLK

SEQ ID NO: 44857 - protein, 9 aa, Homo sapiens
  Table A; Target 44857; HLA-A*02:04; MAGEC1; ENSG00000155495; CTA
KVWVQEHYL

SEQ ID NO: 44858 - protein, 9 aa, Homo sapiens
  Table A; Target 44858; HLA-A*02:07; MAGEC1; ENSG00000155495; CTA
KVWVQEHYL

SEQ ID NO: 44859 - protein, 10 aa, Homo sapiens
  Table A; Target 44859; HLA-A*03:02; MAGEC1; ENSG00000155495; CTA
KYQVKQPITK

SEQ ID NO: 44860 - protein, 10 aa, Homo sapiens
  Table A; Target 44860; HLA-A*31:01; MAGEC1; ENSG00000155495; CTA
KYQVKQPITK

SEQ ID NO: 44861 - protein, 10 aa, Homo sapiens
  Table A; Target 44861; HLA-C*06:02; MAGEC1; ENSG00000155495; CTA
KYQVKQPITK

SEQ ID NO: 44862 - protein, 8 aa, Homo sapiens
  Table A; Target 44862; HLA-B*08:01; MAGEC1; ENSG00000155495; CTA
LAMLKNTV

SEQ ID NO: 44863 - protein, 8 aa, Homo sapiens
  Table A; Target 44863; HLA-B*51:01; MAGEC1; ENSG00000155495; CTA
LAMLKNTV

SEQ ID NO: 44864 - protein, 9 aa, Homo sapiens
  Table A; Target 44864; HLA-A*29:02; MAGEC1; ENSG00000155495; CTA
LARFLLLKY

SEQ ID NO: 44865 - protein, 10 aa, Homo sapiens
  Table A; Target 44865; HLA-A*30:01; MAGEC1; ENSG00000155495; CTA
LEGEDSLSSL

SEQ ID NO: 44866 - protein, 10 aa, Homo sapiens
  Table A; Target 44866; HLA-B*40:01; MAGEC1; ENSG00000155495; CTA
LEGEDSLSSL

SEQ ID NO: 44867 - protein, 10 aa, Homo sapiens
  Table A; Target 44867; HLA-B*57:01; MAGEC1; ENSG00000155495; CTA
LHFPQSPPEW

SEQ ID NO: 44868 - protein, 10 aa, Homo sapiens
  Table A; Target 44868; HLA-A*01:01; MAGEC1; ENSG00000155495; CTA
LIESEPLFTY

SEQ ID NO: 44869 - protein, 10 aa, Homo sapiens
  Table A; Target 44869; HLA-A*29:02; MAGEC1; ENSG00000155495; CTA
LIESEPLFTY

SEQ ID NO: 44870 - protein, 8 aa, Homo sapiens
  Table A; Target 44870; HLA-A*02:04; MAGEC1; ENSG00000155495; CTA
LILSIIFI

SEQ ID NO: 44871 - protein, 9 aa, Homo sapiens
  Table A; Target 44871; HLA-B*15:03; MAGEC1; ENSG00000155495; CTA
LKNTVPITF

SEQ ID NO: 44872 - protein, 10 aa, Homo sapiens
  Table A; Target 44872; HLA-B*46:01; MAGEC1; ENSG00000155495; CTA
LLQIPMTSSF

SEQ ID NO: 44873 - protein, 9 aa, Homo sapiens
  Table A; Target 44873; HLA-B*54:01; MAGEC1; ENSG00000155495; CTA
LPQSFPESP

SEQ ID NO: 44874 - protein, 9 aa, Homo sapiens
  Table A; Target 44874; HLA-B*56:01; MAGEC1; ENSG00000155495; CTA
LPQSFPESP

SEQ ID NO: 44875 - protein, 9 aa, Homo sapiens
  Table A; Target 44875; HLA-A*23:01; MAGEC1; ENSG00000155495; CTA
LQIPGSPSF

SEQ ID NO: 44876 - protein, 9 aa, Homo sapiens
  Table A; Target 44876; HLA-A*24:02; MAGEC1; ENSG00000155495; CTA
LQIPGSPSF

SEQ ID NO: 44877 - protein, 9 aa, Homo sapiens
  Table A; Target 44877; HLA-A*25:01; MAGEC1; ENSG00000155495; CTA
LQIPGSPSF

SEQ ID NO: 44878 - protein, 9 aa, Homo sapiens
  Table A; Target 44878; HLA-A*26:01; MAGEC1; ENSG00000155495; CTA
LQIPGSPSF

SEQ ID NO: 44879 - protein, 9 aa, Homo sapiens
  Table A; Target 44879; HLA-A*32:01; MAGEC1; ENSG00000155495; CTA
LQIPGSPSF

SEQ ID NO: 44880 - protein, 9 aa, Homo sapiens
  Table A; Target 44880; HLA-B*15:01; MAGEC1; ENSG00000155495; CTA
LQIPGSPSF

SEQ ID NO: 44881 - protein, 9 aa, Homo sapiens
  Table A; Target 44881; HLA-B*15:03; MAGEC1; ENSG00000155495; CTA
LQIPGSPSF

SEQ ID NO: 44882 - protein, 9 aa, Homo sapiens
  Table A; Target 44882; HLA-B*38:01; MAGEC1; ENSG00000155495; CTA
LQIPGSPSF

SEQ ID NO: 44883 - protein, 9 aa, Homo sapiens
  Table A; Target 44883; HLA-B*39:01; MAGEC1; ENSG00000155495; CTA
LQIPGSPSF

SEQ ID NO: 44884 - protein, 9 aa, Homo sapiens
  Table A; Target 44884; HLA-B*46:01; MAGEC1; ENSG00000155495; CTA
LQIPGSPSF

SEQ ID NO: 44885 - protein, 9 aa, Homo sapiens
  Table A; Target 44885; HLA-B*58:01; MAGEC1; ENSG00000155495; CTA
LQIPGSPSF

SEQ ID NO: 44886 - protein, 9 aa, Homo sapiens
  Table A; Target 44886; HLA-C*02:02; MAGEC1; ENSG00000155495; CTA
LQIPGSPSF

SEQ ID NO: 44887 - protein, 9 aa, Homo sapiens
  Table A; Target 44887; HLA-C*03:03; MAGEC1; ENSG00000155495; CTA
LQIPGSPSF

SEQ ID NO: 44888 - protein, 9 aa, Homo sapiens
  Table A; Target 44888; HLA-C*03:04; MAGEC1; ENSG00000155495; CTA
LQIPGSPSF

SEQ ID NO: 44889 - protein, 9 aa, Homo sapiens
  Table A; Target 44889; HLA-C*07:04; MAGEC1; ENSG00000155495; CTA
LQIPGSPSF

SEQ ID NO: 44890 - protein, 9 aa, Homo sapiens
  Table A; Target 44890; HLA-C*14:02; MAGEC1; ENSG00000155495; CTA
LQIPGSPSF

SEQ ID NO: 44891 - protein, 9 aa, Homo sapiens
  Table A; Target 44891; HLA-C*16:04; MAGEC1; ENSG00000155495; CTA
LQIPGSPSF

SEQ ID NO: 44892 - protein, 9 aa, Homo sapiens
  Table A; Target 44892; HLA-A*02:01; MAGEC1; ENSG00000155495; CTA
LQIPVSPSF

SEQ ID NO: 44893 - protein, 9 aa, Homo sapiens
  Table A; Target 44893; HLA-A*02:07; MAGEC1; ENSG00000155495; CTA
LQIPVSPSF

SEQ ID NO: 44894 - protein, 9 aa, Homo sapiens
  Table A; Target 44894; HLA-A*23:01; MAGEC1; ENSG00000155495; CTA
LQIPVSPSF

SEQ ID NO: 44895 - protein, 9 aa, Homo sapiens
  Table A; Target 44895; HLA-A*24:02; MAGEC1; ENSG00000155495; CTA
LQIPVSPSF

SEQ ID NO: 44896 - protein, 9 aa, Homo sapiens
  Table A; Target 44896; HLA-A*25:01; MAGEC1; ENSG00000155495; CTA
LQIPVSPSF

SEQ ID NO: 44897 - protein, 9 aa, Homo sapiens
  Table A; Target 44897; HLA-A*26:01; MAGEC1; ENSG00000155495; CTA
LQIPVSPSF

SEQ ID NO: 44898 - protein, 9 aa, Homo sapiens
  Table A; Target 44898; HLA-A*30:01; MAGEC1; ENSG00000155495; CTA
LQIPVSPSF

SEQ ID NO: 44899 - protein, 9 aa, Homo sapiens
  Table A; Target 44899; HLA-A*30:02; MAGEC1; ENSG00000155495; CTA
LQIPVSPSF

SEQ ID NO: 44900 - protein, 9 aa, Homo sapiens
  Table A; Target 44900; HLA-A*32:01; MAGEC1; ENSG00000155495; CTA
LQIPVSPSF

SEQ ID NO: 44901 - protein, 9 aa, Homo sapiens
  Table A; Target 44901; HLA-B*07:02; MAGEC1; ENSG00000155495; CTA
LQIPVSPSF

SEQ ID NO: 44902 - protein, 9 aa, Homo sapiens
  Table A; Target 44902; HLA-B*13:02; MAGEC1; ENSG00000155495; CTA
LQIPVSPSF

SEQ ID NO: 44903 - protein, 9 aa, Homo sapiens
  Table A; Target 44903; HLA-B*15:03; MAGEC1; ENSG00000155495; CTA
LQIPVSPSF

SEQ ID NO: 44904 - protein, 9 aa, Homo sapiens
  Table A; Target 44904; HLA-B*18:01; MAGEC1; ENSG00000155495; CTA
LQIPVSPSF

SEQ ID NO: 44905 - protein, 9 aa, Homo sapiens
  Table A; Target 44905; HLA-B*27:02; MAGEC1; ENSG00000155495; CTA
LQIPVSPSF

SEQ ID NO: 44906 - protein, 9 aa, Homo sapiens
  Table A; Target 44906; HLA-B*27:05; MAGEC1; ENSG00000155495; CTA
LQIPVSPSF

SEQ ID NO: 44907 - protein, 9 aa, Homo sapiens
  Table A; Target 44907; HLA-B*35:01; MAGEC1; ENSG00000155495; CTA
LQIPVSPSF

SEQ ID NO: 44908 - protein, 9 aa, Homo sapiens
  Table A; Target 44908; HLA-B*35:03; MAGEC1; ENSG00000155495; CTA
LQIPVSPSF

SEQ ID NO: 44909 - protein, 9 aa, Homo sapiens
  Table A; Target 44909; HLA-B*37:01; MAGEC1; ENSG00000155495; CTA
LQIPVSPSF

SEQ ID NO: 44910 - protein, 9 aa, Homo sapiens
  Table A; Target 44910; HLA-B*38:01; MAGEC1; ENSG00000155495; CTA
LQIPVSPSF

SEQ ID NO: 44911 - protein, 9 aa, Homo sapiens
  Table A; Target 44911; HLA-B*39:01; MAGEC1; ENSG00000155495; CTA
LQIPVSPSF

SEQ ID NO: 44912 - protein, 9 aa, Homo sapiens
  Table A; Target 44912; HLA-B*40:01; MAGEC1; ENSG00000155495; CTA
LQIPVSPSF

SEQ ID NO: 44913 - protein, 9 aa, Homo sapiens
  Table A; Target 44913; HLA-B*40:02; MAGEC1; ENSG00000155495; CTA
LQIPVSPSF

SEQ ID NO: 44914 - protein, 9 aa, Homo sapiens
  Table A; Target 44914; HLA-B*44:02; MAGEC1; ENSG00000155495; CTA
LQIPVSPSF

SEQ ID NO: 44915 - protein, 9 aa, Homo sapiens
  Table A; Target 44915; HLA-B*44:03; MAGEC1; ENSG00000155495; CTA
LQIPVSPSF

SEQ ID NO: 44916 - protein, 9 aa, Homo sapiens
  Table A; Target 44916; HLA-B*46:01; MAGEC1; ENSG00000155495; CTA
LQIPVSPSF

SEQ ID NO: 44917 - protein, 9 aa, Homo sapiens
  Table A; Target 44917; HLA-B*57:01; MAGEC1; ENSG00000155495; CTA
LQIPVSPSF

SEQ ID NO: 44918 - protein, 9 aa, Homo sapiens
  Table A; Target 44918; HLA-B*58:01; MAGEC1; ENSG00000155495; CTA
LQIPVSPSF

SEQ ID NO: 44919 - protein, 9 aa, Homo sapiens
  Table A; Target 44919; HLA-C*02:02; MAGEC1; ENSG00000155495; CTA
LQIPVSPSF

SEQ ID NO: 44920 - protein, 9 aa, Homo sapiens
  Table A; Target 44920; HLA-C*03:03; MAGEC1; ENSG00000155495; CTA
LQIPVSPSF

SEQ ID NO: 44921 - protein, 9 aa, Homo sapiens
  Table A; Target 44921; HLA-C*03:04; MAGEC1; ENSG00000155495; CTA
LQIPVSPSF

SEQ ID NO: 44922 - protein, 9 aa, Homo sapiens
  Table A; Target 44922; HLA-C*07:04; MAGEC1; ENSG00000155495; CTA
LQIPVSPSF

SEQ ID NO: 44923 - protein, 9 aa, Homo sapiens
  Table A; Target 44923; HLA-C*12:03; MAGEC1; ENSG00000155495; CTA
LQIPVSPSF

SEQ ID NO: 44924 - protein, 9 aa, Homo sapiens
  Table A; Target 44924; HLA-C*14:02; MAGEC1; ENSG00000155495; CTA
LQIPVSPSF

SEQ ID NO: 44925 - protein, 9 aa, Homo sapiens
  Table A; Target 44925; HLA-C*16:01; MAGEC1; ENSG00000155495; CTA
LQIPVSPSF

SEQ ID NO: 44926 - protein, 9 aa, Homo sapiens
  Table A; Target 44926; HLA-C*16:04; MAGEC1; ENSG00000155495; CTA
LQIPVSPSF

SEQ ID NO: 44927 - protein, 9 aa, Homo sapiens
  Table A; Target 44927; HLA-A*23:01; MAGEC1; ENSG00000155495; CTA
LQIPVSRSF

SEQ ID NO: 44928 - protein, 9 aa, Homo sapiens
  Table A; Target 44928; HLA-A*24:02; MAGEC1; ENSG00000155495; CTA
LQIPVSRSF

SEQ ID NO: 44929 - protein, 9 aa, Homo sapiens
  Table A; Target 44929; HLA-A*32:01; MAGEC1; ENSG00000155495; CTA
LQIPVSRSF

SEQ ID NO: 44930 - protein, 9 aa, Homo sapiens
  Table A; Target 44930; HLA-B*15:01; MAGEC1; ENSG00000155495; CTA
LQIPVSRSF

SEQ ID NO: 44931 - protein, 9 aa, Homo sapiens
  Table A; Target 44931; HLA-B*15:03; MAGEC1; ENSG00000155495; CTA
LQIPVSRSF

SEQ ID NO: 44932 - protein, 9 aa, Homo sapiens
  Table A; Target 44932; HLA-B*46:01; MAGEC1; ENSG00000155495; CTA
LQIPVSRSF

SEQ ID NO: 44933 - protein, 9 aa, Homo sapiens
  Table A; Target 44933; HLA-B*57:01; MAGEC1; ENSG00000155495; CTA
LQIPVSRSF

SEQ ID NO: 44934 - protein, 9 aa, Homo sapiens
  Table A; Target 44934; HLA-B*58:01; MAGEC1; ENSG00000155495; CTA
LQIPVSRSF

SEQ ID NO: 44935 - protein, 9 aa, Homo sapiens
  Table A; Target 44935; HLA-C*16:01; MAGEC1; ENSG00000155495; CTA
LQIPVSRSF

SEQ ID NO: 44936 - protein, 9 aa, Homo sapiens
  Table A; Target 44936; HLA-C*16:04; MAGEC1; ENSG00000155495; CTA
LQIPVSRSF

SEQ ID NO: 44937 - protein, 9 aa, Homo sapiens
  Table A; Target 44937; HLA-A*23:01; MAGEC1; ENSG00000155495; CTA
LQIPVSSSF

SEQ ID NO: 44938 - protein, 9 aa, Homo sapiens
  Table A; Target 44938; HLA-A*24:02; MAGEC1; ENSG00000155495; CTA
LQIPVSSSF

SEQ ID NO: 44939 - protein, 9 aa, Homo sapiens
  Table A; Target 44939; HLA-A*25:01; MAGEC1; ENSG00000155495; CTA
LQIPVSSSF

SEQ ID NO: 44940 - protein, 9 aa, Homo sapiens
  Table A; Target 44940; HLA-A*26:01; MAGEC1; ENSG00000155495; CTA
LQIPVSSSF

SEQ ID NO: 44941 - protein, 9 aa, Homo sapiens
  Table A; Target 44941; HLA-A*30:02; MAGEC1; ENSG00000155495; CTA
LQIPVSSSF

SEQ ID NO: 44942 - protein, 9 aa, Homo sapiens
  Table A; Target 44942; HLA-A*32:01; MAGEC1; ENSG00000155495; CTA
LQIPVSSSF

SEQ ID NO: 44943 - protein, 9 aa, Homo sapiens
  Table A; Target 44943; HLA-B*15:03; MAGEC1; ENSG00000155495; CTA
LQIPVSSSF

SEQ ID NO: 44944 - protein, 9 aa, Homo sapiens
  Table A; Target 44944; HLA-B*18:01; MAGEC1; ENSG00000155495; CTA
LQIPVSSSF

SEQ ID NO: 44945 - protein, 9 aa, Homo sapiens
  Table A; Target 44945; HLA-B*38:01; MAGEC1; ENSG00000155495; CTA
LQIPVSSSF

SEQ ID NO: 44946 - protein, 9 aa, Homo sapiens
  Table A; Target 44946; HLA-B*46:01; MAGEC1; ENSG00000155495; CTA
LQIPVSSSF

SEQ ID NO: 44947 - protein, 9 aa, Homo sapiens
  Table A; Target 44947; HLA-B*57:01; MAGEC1; ENSG00000155495; CTA
LQIPVSSSF

SEQ ID NO: 44948 - protein, 9 aa, Homo sapiens
  Table A; Target 44948; HLA-B*58:01; MAGEC1; ENSG00000155495; CTA
LQIPVSSSF

SEQ ID NO: 44949 - protein, 9 aa, Homo sapiens
  Table A; Target 44949; HLA-C*02:02; MAGEC1; ENSG00000155495; CTA
LQIPVSSSF

SEQ ID NO: 44950 - protein, 9 aa, Homo sapiens
  Table A; Target 44950; HLA-C*03:03; MAGEC1; ENSG00000155495; CTA
LQIPVSSSF

SEQ ID NO: 44951 - protein, 9 aa, Homo sapiens
  Table A; Target 44951; HLA-C*03:04; MAGEC1; ENSG00000155495; CTA
LQIPVSSSF

SEQ ID NO: 44952 - protein, 9 aa, Homo sapiens
  Table A; Target 44952; HLA-C*07:04; MAGEC1; ENSG00000155495; CTA
LQIPVSSSF

SEQ ID NO: 44953 - protein, 9 aa, Homo sapiens
  Table A; Target 44953; HLA-C*14:02; MAGEC1; ENSG00000155495; CTA
LQIPVSSSF

SEQ ID NO: 44954 - protein, 9 aa, Homo sapiens
  Table A; Target 44954; HLA-C*16:01; MAGEC1; ENSG00000155495; CTA
LQIPVSSSF

SEQ ID NO: 44955 - protein, 9 aa, Homo sapiens
  Table A; Target 44955; HLA-C*16:04; MAGEC1; ENSG00000155495; CTA
LQIPVSSSF

SEQ ID NO: 44956 - protein, 11 aa, Homo sapiens
  Table A; Target 44956; HLA-A*29:02; MAGEC1; ENSG00000155495; CTA
LQIPVSSSFSY

SEQ ID NO: 44957 - protein, 11 aa, Homo sapiens
  Table A; Target 44957; HLA-A*30:02; MAGEC1; ENSG00000155495; CTA
LQIPVSSSFSY

SEQ ID NO: 44958 - protein, 11 aa, Homo sapiens
  Table A; Target 44958; HLA-A*32:01; MAGEC1; ENSG00000155495; CTA
LQIPVSSSFSY

SEQ ID NO: 44959 - protein, 11 aa, Homo sapiens
  Table A; Target 44959; HLA-B*15:01; MAGEC1; ENSG00000155495; CTA
LQIPVSSSFSY

SEQ ID NO: 44960 - protein, 8 aa, Homo sapiens
  Table A; Target 44960; HLA-A*32:01; MAGEC1; ENSG00000155495; CTA
LQNPASSF

SEQ ID NO: 44961 - protein, 8 aa, Homo sapiens
  Table A; Target 44961; HLA-B*15:01; MAGEC1; ENSG00000155495; CTA
LQNPASSF

SEQ ID NO: 44962 - protein, 8 aa, Homo sapiens
  Table A; Target 44962; HLA-B*15:03; MAGEC1; ENSG00000155495; CTA
LQNPASSF

SEQ ID NO: 44963 - protein, 8 aa, Homo sapiens
  Table A; Target 44963; HLA-B*39:01; MAGEC1; ENSG00000155495; CTA
LQNPASSF

SEQ ID NO: 44964 - protein, 8 aa, Homo sapiens
  Table A; Target 44964; HLA-B*46:01; MAGEC1; ENSG00000155495; CTA
LQNPASSF

SEQ ID NO: 44965 - protein, 8 aa, Homo sapiens
  Table A; Target 44965; HLA-C*14:02; MAGEC1; ENSG00000155495; CTA
LQNPASSF

SEQ ID NO: 44966 - protein, 9 aa, Homo sapiens
  Table A; Target 44966; HLA-A*30:02; MAGEC1; ENSG00000155495; CTA
LQNPASSFF

SEQ ID NO: 44967 - protein, 9 aa, Homo sapiens
  Table A; Target 44967; HLA-A*32:01; MAGEC1; ENSG00000155495; CTA
LQNPASSFF

SEQ ID NO: 44968 - protein, 9 aa, Homo sapiens
  Table A; Target 44968; HLA-B*15:01; MAGEC1; ENSG00000155495; CTA
LQNPASSFF

SEQ ID NO: 44969 - protein, 9 aa, Homo sapiens
  Table A; Target 44969; HLA-B*15:03; MAGEC1; ENSG00000155495; CTA
LQNPASSFF

SEQ ID NO: 44970 - protein, 9 aa, Homo sapiens
  Table A; Target 44970; HLA-B*46:01; MAGEC1; ENSG00000155495; CTA
LQNPASSFF

SEQ ID NO: 44971 - protein, 9 aa, Homo sapiens
  Table A; Target 44971; HLA-C*07:04; MAGEC1; ENSG00000155495; CTA
LQNPASSFF

SEQ ID NO: 44972 - protein, 8 aa, Homo sapiens
  Table A; Target 44972; HLA-A*32:01; MAGEC1; ENSG00000155495; CTA
LQRPVSSF

SEQ ID NO: 44973 - protein, 8 aa, Homo sapiens
  Table A; Target 44973; HLA-B*15:01; MAGEC1; ENSG00000155495; CTA
LQRPVSSF

SEQ ID NO: 44974 - protein, 8 aa, Homo sapiens
  Table A; Target 44974; HLA-B*15:03; MAGEC1; ENSG00000155495; CTA
LQRPVSSF

SEQ ID NO: 44975 - protein, 8 aa, Homo sapiens
  Table A; Target 44975; HLA-B*37:01; MAGEC1; ENSG00000155495; CTA
LQRPVSSF

SEQ ID NO: 44976 - protein, 8 aa, Homo sapiens
  Table A; Target 44976; HLA-B*46:01; MAGEC1; ENSG00000155495; CTA
LQRPVSSF

SEQ ID NO: 44977 - protein, 9 aa, Homo sapiens
  Table A; Target 44977; HLA-A*32:01; MAGEC1; ENSG00000155495; CTA
LQRPVSSFF

SEQ ID NO: 44978 - protein, 9 aa, Homo sapiens
  Table A; Target 44978; HLA-B*15:01; MAGEC1; ENSG00000155495; CTA
LQRPVSSFF

SEQ ID NO: 44979 - protein, 9 aa, Homo sapiens
  Table A; Target 44979; HLA-B*15:03; MAGEC1; ENSG00000155495; CTA
LQRPVSSFF

SEQ ID NO: 44980 - protein, 9 aa, Homo sapiens
  Table A; Target 44980; HLA-B*57:01; MAGEC1; ENSG00000155495; CTA
LQRPVSSFF

SEQ ID NO: 44981 - protein, 11 aa, Homo sapiens
  Table A; Target 44981; HLA-A*30:02; MAGEC1; ENSG00000155495; CTA
LQRPVSSFFSY

SEQ ID NO: 44982 - protein, 8 aa, Homo sapiens
  Table A; Target 44982; HLA-A*32:01; MAGEC1; ENSG00000155495; CTA
LQSPVISF

SEQ ID NO: 44983 - protein, 8 aa, Homo sapiens
  Table A; Target 44983; HLA-B*15:01; MAGEC1; ENSG00000155495; CTA
LQSPVISF

SEQ ID NO: 44984 - protein, 8 aa, Homo sapiens
  Table A; Target 44984; HLA-B*37:01; MAGEC1; ENSG00000155495; CTA
LQSPVISF

SEQ ID NO: 44985 - protein, 8 aa, Homo sapiens
  Table A; Target 44985; HLA-C*07:04; MAGEC1; ENSG00000155495; CTA
LQSPVISF

SEQ ID NO: 44986 - protein, 8 aa, Homo sapiens
  Table A; Target 44986; HLA-A*32:01; MAGEC1; ENSG00000155495; CTA
LQSPVSSF

SEQ ID NO: 44987 - protein, 8 aa, Homo sapiens
  Table A; Target 44987; HLA-B*15:01; MAGEC1; ENSG00000155495; CTA
LQSPVSSF

SEQ ID NO: 44988 - protein, 8 aa, Homo sapiens
  Table A; Target 44988; HLA-B*15:03; MAGEC1; ENSG00000155495; CTA
LQSPVSSF

SEQ ID NO: 44989 - protein, 8 aa, Homo sapiens
  Table A; Target 44989; HLA-B*37:01; MAGEC1; ENSG00000155495; CTA
LQSPVSSF

SEQ ID NO: 44990 - protein, 8 aa, Homo sapiens
  Table A; Target 44990; HLA-B*39:01; MAGEC1; ENSG00000155495; CTA
LQSPVSSF

SEQ ID NO: 44991 - protein, 9 aa, Homo sapiens
  Table A; Target 44991; HLA-A*02:07; MAGEC1; ENSG00000155495; CTA
LSPLHFPQF

SEQ ID NO: 44992 - protein, 9 aa, Homo sapiens
  Table A; Target 44992; HLA-A*24:02; MAGEC1; ENSG00000155495; CTA
LSPLHFPQF

SEQ ID NO: 44993 - protein, 10 aa, Homo sapiens
  Table A; Target 44993; HLA-A*25:01; MAGEC1; ENSG00000155495; CTA
LSQSSPVSSF

SEQ ID NO: 44994 - protein, 10 aa, Homo sapiens
  Table A; Target 44994; HLA-A*30:02; MAGEC1; ENSG00000155495; CTA
LSQSSPVSSF

SEQ ID NO: 44995 - protein, 10 aa, Homo sapiens
  Table A; Target 44995; HLA-B*46:01; MAGEC1; ENSG00000155495; CTA
LSQSSPVSSF

SEQ ID NO: 44996 - protein, 10 aa, Homo sapiens
  Table A; Target 44996; HLA-B*58:01; MAGEC1; ENSG00000155495; CTA
LSQSSPVSSF

SEQ ID NO: 44997 - protein, 8 aa, Homo sapiens
  Table A; Target 44997; HLA-C*05:01; MAGEC1; ENSG00000155495; CTA
LTDSESLI

SEQ ID NO: 44998 - protein, 8 aa, Homo sapiens
  Table A; Target 44998; HLA-A*01:01; MAGEC1; ENSG00000155495; CTA
LTNVISRY

SEQ ID NO: 44999 - protein, 8 aa, Homo sapiens
  Table A; Target 44999; HLA-A*30:02; MAGEC1; ENSG00000155495; CTA
LTNVISRY

SEQ ID NO: 45000 - protein, 8 aa, Homo sapiens
  Table A; Target 45000; HLA-A*32:01; MAGEC1; ENSG00000155495; CTA
LTNVISRY

SEQ ID NO: 45001 - protein, 8 aa, Homo sapiens
  Table A; Target 45001; HLA-B*15:01; MAGEC1; ENSG00000155495; CTA
LTNVISRY

SEQ ID NO: 45002 - protein, 8 aa, Homo sapiens
  Table A; Target 45002; HLA-B*46:01; MAGEC1; ENSG00000155495; CTA
LTNVISRY

SEQ ID NO: 45003 - protein, 8 aa, Homo sapiens
  Table A; Target 45003; HLA-B*58:01; MAGEC1; ENSG00000155495; CTA
LTNVISRY

SEQ ID NO: 45004 - protein, 8 aa, Homo sapiens
  Table A; Target 45004; HLA-C*07:01; MAGEC1; ENSG00000155495; CTA
LTNVISRY

SEQ ID NO: 45005 - protein, 8 aa, Homo sapiens
  Table A; Target 45005; HLA-C*12:03; MAGEC1; ENSG00000155495; CTA
LTNVISRY

SEQ ID NO: 45006 - protein, 8 aa, Homo sapiens
  Table A; Target 45006; HLA-C*16:01; MAGEC1; ENSG00000155495; CTA
LTNVISRY

SEQ ID NO: 45007 - protein, 8 aa, Homo sapiens
  Table A; Target 45007; HLA-C*16:02; MAGEC1; ENSG00000155495; CTA
LTNVISRY

SEQ ID NO: 45008 - protein, 10 aa, Homo sapiens
  Table A; Target 45008; HLA-A*23:01; MAGEC1; ENSG00000155495; CTA
MLKNTVPITF

SEQ ID NO: 45009 - protein, 10 aa, Homo sapiens
  Table A; Target 45009; HLA-A*24:02; MAGEC1; ENSG00000155495; CTA
MLKNTVPITF

SEQ ID NO: 45010 - protein, 10 aa, Homo sapiens
  Table A; Target 45010; HLA-B*46:01; MAGEC1; ENSG00000155495; CTA
MLKNTVPITF

SEQ ID NO: 45011 - protein, 10 aa, Homo sapiens
  Table A; Target 45011; HLA-B*57:01; MAGEC1; ENSG00000155495; CTA
MLKNTVPITF

SEQ ID NO: 45012 - protein, 10 aa, Homo sapiens
  Table A; Target 45012; HLA-C*04:01; MAGEC1; ENSG00000155495; CTA
MLKNTVPITF

SEQ ID NO: 45013 - protein, 8 aa, Homo sapiens
  Table A; Target 45013; HLA-A*33:03; MAGEC1; ENSG00000155495; CTA
MLTNVISR

SEQ ID NO: 45014 - protein, 9 aa, Homo sapiens
  Table A; Target 45014; HLA-A*01:01; MAGEC1; ENSG00000155495; CTA
MLTNVISRY

SEQ ID NO: 45015 - protein, 9 aa, Homo sapiens
  Table A; Target 45015; HLA-A*03:01; MAGEC1; ENSG00000155495; CTA
MLTNVISRY

SEQ ID NO: 45016 - protein, 9 aa, Homo sapiens
  Table A; Target 45016; HLA-A*24:02; MAGEC1; ENSG00000155495; CTA
MLTNVISRY

SEQ ID NO: 45017 - protein, 9 aa, Homo sapiens
  Table A; Target 45017; HLA-A*25:01; MAGEC1; ENSG00000155495; CTA
MLTNVISRY

SEQ ID NO: 45018 - protein, 9 aa, Homo sapiens
  Table A; Target 45018; HLA-A*26:01; MAGEC1; ENSG00000155495; CTA
MLTNVISRY

SEQ ID NO: 45019 - protein, 9 aa, Homo sapiens
  Table A; Target 45019; HLA-A*29:02; MAGEC1; ENSG00000155495; CTA
MLTNVISRY

SEQ ID NO: 45020 - protein, 9 aa, Homo sapiens
  Table A; Target 45020; HLA-A*30:02; MAGEC1; ENSG00000155495; CTA
MLTNVISRY

SEQ ID NO: 45021 - protein, 9 aa, Homo sapiens
  Table A; Target 45021; HLA-A*32:01; MAGEC1; ENSG00000155495; CTA
MLTNVISRY

SEQ ID NO: 45022 - protein, 9 aa, Homo sapiens
  Table A; Target 45022; HLA-B*15:01; MAGEC1; ENSG00000155495; CTA
MLTNVISRY

SEQ ID NO: 45023 - protein, 9 aa, Homo sapiens
  Table A; Target 45023; HLA-B*15:03; MAGEC1; ENSG00000155495; CTA
MLTNVISRY

SEQ ID NO: 45024 - protein, 9 aa, Homo sapiens
  Table A; Target 45024; HLA-B*35:01; MAGEC1; ENSG00000155495; CTA
MLTNVISRY

SEQ ID NO: 45025 - protein, 9 aa, Homo sapiens
  Table A; Target 45025; HLA-B*44:02; MAGEC1; ENSG00000155495; CTA
MLTNVISRY

SEQ ID NO: 45026 - protein, 9 aa, Homo sapiens
  Table A; Target 45026; HLA-B*44:03; MAGEC1; ENSG00000155495; CTA
MLTNVISRY

SEQ ID NO: 45027 - protein, 9 aa, Homo sapiens
  Table A; Target 45027; HLA-B*46:01; MAGEC1; ENSG00000155495; CTA
MLTNVISRY

SEQ ID NO: 45028 - protein, 9 aa, Homo sapiens
  Table A; Target 45028; HLA-B*57:01; MAGEC1; ENSG00000155495; CTA
MLTNVISRY

SEQ ID NO: 45029 - protein, 9 aa, Homo sapiens
  Table A; Target 45029; HLA-B*58:01; MAGEC1; ENSG00000155495; CTA
MLTNVISRY

SEQ ID NO: 45030 - protein, 9 aa, Homo sapiens
  Table A; Target 45030; HLA-C*02:02; MAGEC1; ENSG00000155495; CTA
MLTNVISRY

SEQ ID NO: 45031 - protein, 9 aa, Homo sapiens
  Table A; Target 45031; HLA-C*07:04; MAGEC1; ENSG00000155495; CTA
MLTNVISRY

SEQ ID NO: 45032 - protein, 9 aa, Homo sapiens
  Table A; Target 45032; HLA-C*12:03; MAGEC1; ENSG00000155495; CTA
MLTNVISRY

SEQ ID NO: 45033 - protein, 9 aa, Homo sapiens
  Table A; Target 45033; HLA-C*16:01; MAGEC1; ENSG00000155495; CTA
MLTNVISRY

SEQ ID NO: 45034 - protein, 9 aa, Homo sapiens
  Table A; Target 45034; HLA-C*16:02; MAGEC1; ENSG00000155495; CTA
MLTNVISRY

SEQ ID NO: 45035 - protein, 9 aa, Homo sapiens
  Table A; Target 45035; HLA-C*16:04; MAGEC1; ENSG00000155495; CTA
MLTNVISRY

SEQ ID NO: 45036 - protein, 9 aa, Homo sapiens
  Table A; Target 45036; HLA-B*54:01; MAGEC1; ENSG00000155495; CTA
MPSLLQSSS

SEQ ID NO: 45037 - protein, 9 aa, Homo sapiens
  Table A; Target 45037; HLA-B*56:01; MAGEC1; ENSG00000155495; CTA
MPSLLQSSS

SEQ ID NO: 45038 - protein, 9 aa, Homo sapiens
  Table A; Target 45038; HLA-B*08:01; MAGEC1; ENSG00000155495; CTA
MPTAGMPSL

SEQ ID NO: 45039 - protein, 9 aa, Homo sapiens
  Table A; Target 45039; HLA-B*39:01; MAGEC1; ENSG00000155495; CTA
MPTAGMPSL

SEQ ID NO: 45040 - protein, 9 aa, Homo sapiens
  Table A; Target 45040; HLA-B*51:01; MAGEC1; ENSG00000155495; CTA
MPTAGMPSL

SEQ ID NO: 45041 - protein, 9 aa, Homo sapiens
  Table A; Target 45041; HLA-B*54:01; MAGEC1; ENSG00000155495; CTA
MPTAGMPSL

SEQ ID NO: 45042 - protein, 9 aa, Homo sapiens
  Table A; Target 45042; HLA-B*55:01; MAGEC1; ENSG00000155495; CTA
MPTAGMPSL

SEQ ID NO: 45043 - protein, 9 aa, Homo sapiens
  Table A; Target 45043; HLA-B*56:01; MAGEC1; ENSG00000155495; CTA
MPTAGMPSL

SEQ ID NO: 45044 - protein, 9 aa, Homo sapiens
  Table A; Target 45044; HLA-C*03:03; MAGEC1; ENSG00000155495; CTA
MPTAGMPSL

SEQ ID NO: 45045 - protein, 9 aa, Homo sapiens
  Table A; Target 45045; HLA-C*03:04; MAGEC1; ENSG00000155495; CTA
MPTAGMPSL

SEQ ID NO: 45046 - protein, 9 aa, Homo sapiens
  Table A; Target 45046; HLA-C*07:02; MAGEC1; ENSG00000155495; CTA
MPTAGMPSL

SEQ ID NO: 45047 - protein, 9 aa, Homo sapiens
  Table A; Target 45047; HLA-C*07:06; MAGEC1; ENSG00000155495; CTA
MPTAGMPSL

SEQ ID NO: 45048 - protein, 9 aa, Homo sapiens
  Table A; Target 45048; HLA-C*14:02; MAGEC1; ENSG00000155495; CTA
MPTAGMPSL

SEQ ID NO: 45049 - protein, 10 aa, Homo sapiens
  Table A; Target 45049; HLA-B*07:02; MAGEC1; ENSG00000155495; CTA
MPTAGMPSLL

SEQ ID NO: 45050 - protein, 10 aa, Homo sapiens
  Table A; Target 45050; HLA-B*35:01; MAGEC1; ENSG00000155495; CTA
MPTAGMPSLL

SEQ ID NO: 45051 - protein, 10 aa, Homo sapiens
  Table A; Target 45051; HLA-B*35:03; MAGEC1; ENSG00000155495; CTA
MPTAGMPSLL

SEQ ID NO: 45052 - protein, 9 aa, Homo sapiens
  Table A; Target 45052; HLA-C*16:01; MAGEC1; ENSG00000155495; CTA
MSQNRLLIL

SEQ ID NO: 45053 - protein, 10 aa, Homo sapiens
  Table A; Target 45053; HLA-B*54:01; MAGEC1; ENSG00000155495; CTA
NPASSFFSSA

SEQ ID NO: 45054 - protein, 10 aa, Homo sapiens
  Table A; Target 45054; HLA-B*55:01; MAGEC1; ENSG00000155495; CTA
NPASSFFSSA

SEQ ID NO: 45055 - protein, 10 aa, Homo sapiens
  Table A; Target 45055; HLA-B*56:01; MAGEC1; ENSG00000155495; CTA
NPASSFFSSA

SEQ ID NO: 45056 - protein, 11 aa, Homo sapiens
  Table A; Target 45056; HLA-B*07:02; MAGEC1; ENSG00000155495; CTA
NPASSFFSSAL

SEQ ID NO: 45057 - protein, 9 aa, Homo sapiens
  Table A; Target 45057; HLA-A*32:01; MAGEC1; ENSG00000155495; CTA
NSSPPRYEF

SEQ ID NO: 45058 - protein, 9 aa, Homo sapiens
  Table A; Target 45058; HLA-B*57:01; MAGEC1; ENSG00000155495; CTA
NSSPPRYEF

SEQ ID NO: 45059 - protein, 9 aa, Homo sapiens
  Table A; Target 45059; HLA-B*58:01; MAGEC1; ENSG00000155495; CTA
NSSPPRYEF

SEQ ID NO: 45060 - protein, 9 aa, Homo sapiens
  Table A; Target 45060; HLA-C*16:01; MAGEC1; ENSG00000155495; CTA
NSSPPRYEF

SEQ ID NO: 45061 - protein, 11 aa, Homo sapiens
  Table A; Target 45061; HLA-A*01:01; MAGEC1; ENSG00000155495; CTA
NTVPITFPSSY

SEQ ID NO: 45062 - protein, 11 aa, Homo sapiens
  Table A; Target 45062; HLA-A*25:01; MAGEC1; ENSG00000155495; CTA
NTVPITFPSSY

SEQ ID NO: 45063 - protein, 11 aa, Homo sapiens
  Table A; Target 45063; HLA-A*26:01; MAGEC1; ENSG00000155495; CTA
NTVPITFPSSY

SEQ ID NO: 45064 - protein, 11 aa, Homo sapiens
  Table A; Target 45064; HLA-A*29:02; MAGEC1; ENSG00000155495; CTA
NTVPITFPSSY

SEQ ID NO: 45065 - protein, 11 aa, Homo sapiens
  Table A; Target 45065; HLA-A*30:02; MAGEC1; ENSG00000155495; CTA
NTVPITFPSSY

SEQ ID NO: 45066 - protein, 11 aa, Homo sapiens
  Table A; Target 45066; HLA-C*02:02; MAGEC1; ENSG00000155495; CTA
NTVPITFPSSY

SEQ ID NO: 45067 - protein, 9 aa, Homo sapiens
  Table A; Target 45067; HLA-A*25:01; MAGEC1; ENSG00000155495; CTA
NVISRYTGY

SEQ ID NO: 45068 - protein, 9 aa, Homo sapiens
  Table A; Target 45068; HLA-A*26:01; MAGEC1; ENSG00000155495; CTA
NVISRYTGY

SEQ ID NO: 45069 - protein, 9 aa, Homo sapiens
  Table A; Target 45069; HLA-A*29:02; MAGEC1; ENSG00000155495; CTA
NVISRYTGY

SEQ ID NO: 45070 - protein, 9 aa, Homo sapiens
  Table A; Target 45070; HLA-A*30:02; MAGEC1; ENSG00000155495; CTA
NVISRYTGY

SEQ ID NO: 45071 - protein, 9 aa, Homo sapiens
  Table A; Target 45071; HLA-A*32:01; MAGEC1; ENSG00000155495; CTA
NVISRYTGY

SEQ ID NO: 45072 - protein, 9 aa, Homo sapiens
  Table A; Target 45072; HLA-B*46:01; MAGEC1; ENSG00000155495; CTA
NVISRYTGY

SEQ ID NO: 45073 - protein, 9 aa, Homo sapiens
  Table A; Target 45073; HLA-B*40:01; MAGEC1; ENSG00000155495; CTA
PEGPVQSPL

SEQ ID NO: 45074 - protein, 8 aa, Homo sapiens
  Table A; Target 45074; HLA-B*37:01; MAGEC1; ENSG00000155495; CTA
PESAQSAF

SEQ ID NO: 45075 - protein, 8 aa, Homo sapiens
  Table A; Target 45075; HLA-B*18:01; MAGEC1; ENSG00000155495; CTA
PESAQSTF

SEQ ID NO: 45076 - protein, 8 aa, Homo sapiens
  Table A; Target 45076; HLA-B*37:01; MAGEC1; ENSG00000155495; CTA
PESAQSTF

SEQ ID NO: 45077 - protein, 8 aa, Homo sapiens
  Table A; Target 45077; HLA-C*04:01; MAGEC1; ENSG00000155495; CTA
PESAQSTF

SEQ ID NO: 45078 - protein, 9 aa, Homo sapiens
  Table A; Target 45078; HLA-B*15:01; MAGEC1; ENSG00000155495; CTA
PLQNPASSF

SEQ ID NO: 45079 - protein, 9 aa, Homo sapiens
  Table A; Target 45079; HLA-C*14:02; MAGEC1; ENSG00000155495; CTA
PLQNPASSF

SEQ ID NO: 45080 - protein, 9 aa, Homo sapiens
  Table A; Target 45080; HLA-A*24:02; MAGEC1; ENSG00000155495; CTA
PLQRPVSSF

SEQ ID NO: 45081 - protein, 9 aa, Homo sapiens
  Table A; Target 45081; HLA-A*24:02; MAGEC1; ENSG00000155495; CTA
PLQSPVSSF

SEQ ID NO: 45082 - protein, 9 aa, Homo sapiens
  Table A; Target 45082; HLA-B*15:01; MAGEC1; ENSG00000155495; CTA
PLQSPVSSF

SEQ ID NO: 45083 - protein, 11 aa, Homo sapiens
  Table A; Target 45083; HLA-B*39:01; MAGEC1; ENSG00000155495; CTA
PQSPPQGEDSM

SEQ ID NO: 45084 - protein, 8 aa, Homo sapiens
  Table A; Target 45084; HLA-B*07:02; MAGEC1; ENSG00000155495; CTA
PSSYKDAL

SEQ ID NO: 45085 - protein, 8 aa, Homo sapiens
  Table A; Target 45085; HLA-A*30:02; MAGEC1; ENSG00000155495; CTA
PVSSSFSY

SEQ ID NO: 45086 - protein, 10 aa, Homo sapiens
  Table A; Target 45086; HLA-A*01:01; MAGEC1; ENSG00000155495; CTA
QGEDSMSPLY

SEQ ID NO: 45087 - protein, 8 aa, Homo sapiens
  Table A; Target 45087; HLA-C*01:02; MAGEC1; ENSG00000155495; CTA
QIPVSSSF

SEQ ID NO: 45088 - protein, 8 aa, Homo sapiens
  Table A; Target 45088; HLA-C*14:02; MAGEC1; ENSG00000155495; CTA
QIPVSSSF

SEQ ID NO: 45089 - protein, 10 aa, Homo sapiens
  Table A; Target 45089; HLA-A*30:02; MAGEC1; ENSG00000155495; CTA
QIPVSSSFSY

SEQ ID NO: 45090 - protein, 9 aa, Homo sapiens
  Table A; Target 45090; HLA-A*25:01; MAGEC1; ENSG00000155495; CTA
QIVPSLPEW

SEQ ID NO: 45091 - protein, 9 aa, Homo sapiens
  Table A; Target 45091; HLA-B*57:01; MAGEC1; ENSG00000155495; CTA
QIVPSLPEW

SEQ ID NO: 45092 - protein, 9 aa, Homo sapiens
  Table A; Target 45092; HLA-B*58:01; MAGEC1; ENSG00000155495; CTA
QIVPSLPEW

SEQ ID NO: 45093 - protein, 8 aa, Homo sapiens
  Table A; Target 45093; HLA-B*07:02; MAGEC1; ENSG00000155495; CTA
QPITKAEM

SEQ ID NO: 45094 - protein, 8 aa, Homo sapiens
  Table A; Target 45094; HLA-B*08:01; MAGEC1; ENSG00000155495; CTA
QPITKAEM

SEQ ID NO: 45095 - protein, 8 aa, Homo sapiens
  Table A; Target 45095; HLA-B*35:03; MAGEC1; ENSG00000155495; CTA
QPITKAEM

SEQ ID NO: 45096 - protein, 8 aa, Homo sapiens
  Table A; Target 45096; HLA-C*07:02; MAGEC1; ENSG00000155495; CTA
QPITKAEM

SEQ ID NO: 45097 - protein, 9 aa, Homo sapiens
  Table A; Target 45097; HLA-B*07:02; MAGEC1; ENSG00000155495; CTA
QPITKAEML

SEQ ID NO: 45098 - protein, 9 aa, Homo sapiens
  Table A; Target 45098; HLA-B*08:01; MAGEC1; ENSG00000155495; CTA
QPITKAEML

SEQ ID NO: 45099 - protein, 9 aa, Homo sapiens
  Table A; Target 45099; HLA-B*35:01; MAGEC1; ENSG00000155495; CTA
QPITKAEML

SEQ ID NO: 45100 - protein, 9 aa, Homo sapiens
  Table A; Target 45100; HLA-B*35:03; MAGEC1; ENSG00000155495; CTA
QPITKAEML

SEQ ID NO: 45101 - protein, 9 aa, Homo sapiens
  Table A; Target 45101; HLA-B*55:01; MAGEC1; ENSG00000155495; CTA
QPITKAEML

SEQ ID NO: 45102 - protein, 9 aa, Homo sapiens
  Table A; Target 45102; HLA-C*07:02; MAGEC1; ENSG00000155495; CTA
QPITKAEML

SEQ ID NO: 45103 - protein, 11 aa, Homo sapiens
  Table A; Target 45103; HLA-A*25:01; MAGEC1; ENSG00000155495; CTA
QSFSERTQSTF

SEQ ID NO: 45104 - protein, 11 aa, Homo sapiens
  Table A; Target 45104; HLA-A*26:01; MAGEC1; ENSG00000155495; CTA
QSFSERTQSTF

SEQ ID NO: 45105 - protein, 11 aa, Homo sapiens
  Table A; Target 45105; HLA-A*30:02; MAGEC1; ENSG00000155495; CTA
QSFSERTQSTF

SEQ ID NO: 45106 - protein, 11 aa, Homo sapiens
  Table A; Target 45106; HLA-A*32:01; MAGEC1; ENSG00000155495; CTA
QSFSERTQSTF

SEQ ID NO: 45107 - protein, 11 aa, Homo sapiens
  Table A; Target 45107; HLA-B*15:01; MAGEC1; ENSG00000155495; CTA
QSFSERTQSTF

SEQ ID NO: 45108 - protein, 11 aa, Homo sapiens
  Table A; Target 45108; HLA-B*15:03; MAGEC1; ENSG00000155495; CTA
QSFSERTQSTF

SEQ ID NO: 45109 - protein, 11 aa, Homo sapiens
  Table A; Target 45109; HLA-B*46:01; MAGEC1; ENSG00000155495; CTA
QSFSERTQSTF

SEQ ID NO: 45110 - protein, 11 aa, Homo sapiens
  Table A; Target 45110; HLA-B*57:01; MAGEC1; ENSG00000155495; CTA
QSFSERTQSTF

SEQ ID NO: 45111 - protein, 11 aa, Homo sapiens
  Table A; Target 45111; HLA-B*58:01; MAGEC1; ENSG00000155495; CTA
QSFSERTQSTF

SEQ ID NO: 45112 - protein, 11 aa, Homo sapiens
  Table A; Target 45112; HLA-C*02:02; MAGEC1; ENSG00000155495; CTA
QSFSERTQSTF

SEQ ID NO: 45113 - protein, 11 aa, Homo sapiens
  Table A; Target 45113; HLA-C*07:01; MAGEC1; ENSG00000155495; CTA
QSFSERTQSTF

SEQ ID NO: 45114 - protein, 11 aa, Homo sapiens
  Table A; Target 45114; HLA-C*07:04; MAGEC1; ENSG00000155495; CTA
QSFSERTQSTF

SEQ ID NO: 45115 - protein, 11 aa, Homo sapiens
  Table A; Target 45115; HLA-C*12:03; MAGEC1; ENSG00000155495; CTA
QSFSERTQSTF

SEQ ID NO: 45116 - protein, 11 aa, Homo sapiens
  Table A; Target 45116; HLA-C*16:04; MAGEC1; ENSG00000155495; CTA
QSFSERTQSTF

SEQ ID NO: 45117 - protein, 9 aa, Homo sapiens
  Table A; Target 45117; HLA-C*01:02; MAGEC1; ENSG00000155495; CTA
QSPLQGEEF

SEQ ID NO: 45118 - protein, 10 aa, Homo sapiens
  Table A; Target 45118; HLA-A*68:01; MAGEC1; ENSG00000155495; CTA
QSPLQIPVSR

SEQ ID NO: 45119 - protein, 11 aa, Homo sapiens
  Table A; Target 45119; HLA-C*01:02; MAGEC1; ENSG00000155495; CTA
QSPLQNPASSF

SEQ ID NO: 45120 - protein, 9 aa, Homo sapiens
  Table A; Target 45120; HLA-C*01:02; MAGEC1; ENSG00000155495; CTA
QSPQGEDSL

SEQ ID NO: 45121 - protein, 11 aa, Homo sapiens
  Table A; Target 45121; HLA-A*25:01; MAGEC1; ENSG00000155495; CTA
QSSPESAQSAF

SEQ ID NO: 45122 - protein, 11 aa, Homo sapiens
  Table A; Target 45122; HLA-A*30:02; MAGEC1; ENSG00000155495; CTA
QSSPESAQSAF

SEQ ID NO: 45123 - protein, 11 aa, Homo sapiens
  Table A; Target 45123; HLA-A*32:01; MAGEC1; ENSG00000155495; CTA
QSSPESAQSAF

SEQ ID NO: 45124 - protein, 11 aa, Homo sapiens
  Table A; Target 45124; HLA-B*15:01; MAGEC1; ENSG00000155495; CTA
QSSPESAQSAF

SEQ ID NO: 45125 - protein, 11 aa, Homo sapiens
  Table A; Target 45125; HLA-B*39:01; MAGEC1; ENSG00000155495; CTA
QSSPESAQSAF

SEQ ID NO: 45126 - protein, 11 aa, Homo sapiens
  Table A; Target 45126; HLA-B*46:01; MAGEC1; ENSG00000155495; CTA
QSSPESAQSAF

SEQ ID NO: 45127 - protein, 11 aa, Homo sapiens
  Table A; Target 45127; HLA-B*57:01; MAGEC1; ENSG00000155495; CTA
QSSPESAQSAF

SEQ ID NO: 45128 - protein, 11 aa, Homo sapiens
  Table A; Target 45128; HLA-B*58:01; MAGEC1; ENSG00000155495; CTA
QSSPESAQSAF

SEQ ID NO: 45129 - protein, 11 aa, Homo sapiens
  Table A; Target 45129; HLA-C*07:04; MAGEC1; ENSG00000155495; CTA
QSSPESAQSAF

SEQ ID NO: 45130 - protein, 11 aa, Homo sapiens
  Table A; Target 45130; HLA-A*25:01; MAGEC1; ENSG00000155495; CTA
QSSPESAQSTF

SEQ ID NO: 45131 - protein, 11 aa, Homo sapiens
  Table A; Target 45131; HLA-A*30:02; MAGEC1; ENSG00000155495; CTA
QSSPESAQSTF

SEQ ID NO: 45132 - protein, 11 aa, Homo sapiens
  Table A; Target 45132; HLA-A*32:01; MAGEC1; ENSG00000155495; CTA
QSSPESAQSTF

SEQ ID NO: 45133 - protein, 11 aa, Homo sapiens
  Table A; Target 45133; HLA-B*15:01; MAGEC1; ENSG00000155495; CTA
QSSPESAQSTF

SEQ ID NO: 45134 - protein, 11 aa, Homo sapiens
  Table A; Target 45134; HLA-B*57:01; MAGEC1; ENSG00000155495; CTA
QSSPESAQSTF

SEQ ID NO: 45135 - protein, 11 aa, Homo sapiens
  Table A; Target 45135; HLA-B*58:01; MAGEC1; ENSG00000155495; CTA
QSSPESAQSTF

SEQ ID NO: 45136 - protein, 11 aa, Homo sapiens
  Table A; Target 45136; HLA-C*07:04; MAGEC1; ENSG00000155495; CTA
QSSPESAQSTF

SEQ ID NO: 45137 - protein, 11 aa, Homo sapiens
  Table A; Target 45137; HLA-A*01:01; MAGEC1; ENSG00000155495; CTA
QSSPESDDTLY

SEQ ID NO: 45138 - protein, 8 aa, Homo sapiens
  Table A; Target 45138; HLA-A*32:01; MAGEC1; ENSG00000155495; CTA
QSSPVSSF

SEQ ID NO: 45139 - protein, 8 aa, Homo sapiens
  Table A; Target 45139; HLA-B*37:01; MAGEC1; ENSG00000155495; CTA
QSSPVSSF

SEQ ID NO: 45140 - protein, 8 aa, Homo sapiens
  Table A; Target 45140; HLA-A*03:01; MAGEC1; ENSG00000155495; CTA
QVKQPITK

SEQ ID NO: 45141 - protein, 8 aa, Homo sapiens
  Table A; Target 45141; HLA-A*03:02; MAGEC1; ENSG00000155495; CTA
QVKQPITK

SEQ ID NO: 45142 - protein, 8 aa, Homo sapiens
  Table A; Target 45142; HLA-A*31:01; MAGEC1; ENSG00000155495; CTA
QVKQPITK

SEQ ID NO: 45143 - protein, 8 aa, Homo sapiens
  Table A; Target 45143; HLA-A*33:03; MAGEC1; ENSG00000155495; CTA
QVKQPITK

SEQ ID NO: 45144 - protein, 9 aa, Homo sapiens
  Table A; Target 45144; HLA-A*02:03; MAGEC1; ENSG00000155495; CTA
QVKQPITKA

SEQ ID NO: 45145 - protein, 9 aa, Homo sapiens
  Table A; Target 45145; HLA-B*54:01; MAGEC1; ENSG00000155495; CTA
QVKQPITKA

SEQ ID NO: 45146 - protein, 9 aa, Homo sapiens
  Table A; Target 45146; HLA-B*55:01; MAGEC1; ENSG00000155495; CTA
QVKQPITKA

SEQ ID NO: 45147 - protein, 9 aa, Homo sapiens
  Table A; Target 45147; HLA-B*56:01; MAGEC1; ENSG00000155495; CTA
QVKQPITKA

SEQ ID NO: 45148 - protein, 9 aa, Homo sapiens
  Table A; Target 45148; HLA-A*03:01; MAGEC1; ENSG00000155495; CTA
RAHSEVIKR

SEQ ID NO: 45149 - protein, 9 aa, Homo sapiens
  Table A; Target 45149; HLA-A*31:01; MAGEC1; ENSG00000155495; CTA
RAHSEVIKR

SEQ ID NO: 45150 - protein, 9 aa, Homo sapiens
  Table A; Target 45150; HLA-A*33:01; MAGEC1; ENSG00000155495; CTA
RAHSEVIKR

SEQ ID NO: 45151 - protein, 9 aa, Homo sapiens
  Table A; Target 45151; HLA-A*30:02; MAGEC1; ENSG00000155495; CTA
REVDPDDSY

SEQ ID NO: 45152 - protein, 9 aa, Homo sapiens
  Table A; Target 45152; HLA-B*15:03; MAGEC1; ENSG00000155495; CTA
REVDPDDSY

SEQ ID NO: 45153 - protein, 9 aa, Homo sapiens
  Table A; Target 45153; HLA-B*18:01; MAGEC1; ENSG00000155495; CTA
REVDPDDSY

SEQ ID NO: 45154 - protein, 9 aa, Homo sapiens
  Table A; Target 45154; HLA-B*27:02; MAGEC1; ENSG00000155495; CTA
REVDPDDSY

SEQ ID NO: 45155 - protein, 9 aa, Homo sapiens
  Table A; Target 45155; HLA-B*40:01; MAGEC1; ENSG00000155495; CTA
REVDPDDSY

SEQ ID NO: 45156 - protein, 9 aa, Homo sapiens
  Table A; Target 45156; HLA-B*44:02; MAGEC1; ENSG00000155495; CTA
REVDPDDSY

SEQ ID NO: 45157 - protein, 9 aa, Homo sapiens
  Table A; Target 45157; HLA-B*44:03; MAGEC1; ENSG00000155495; CTA
REVDPDDSY

SEQ ID NO: 45158 - protein, 9 aa, Homo sapiens
  Table A; Target 45158; HLA-C*16:04; MAGEC1; ENSG00000155495; CTA
REVDPDDSY

SEQ ID NO: 45159 - protein, 10 aa, Homo sapiens
  Table A; Target 45159; HLA-B*40:01; MAGEC1; ENSG00000155495; CTA
REVDPDDSYV

SEQ ID NO: 45160 - protein, 10 aa, Homo sapiens
  Table A; Target 45160; HLA-B*49:01; MAGEC1; ENSG00000155495; CTA
REVDPDDSYV

SEQ ID NO: 45161 - protein, 11 aa, Homo sapiens
  Table A; Target 45161; HLA-A*23:01; MAGEC1; ENSG00000155495; CTA
REVDPDDSYVF

SEQ ID NO: 45162 - protein, 11 aa, Homo sapiens
  Table A; Target 45162; HLA-A*24:02; MAGEC1; ENSG00000155495; CTA
REVDPDDSYVF

SEQ ID NO: 45163 - protein, 11 aa, Homo sapiens
  Table A; Target 45163; HLA-A*30:01; MAGEC1; ENSG00000155495; CTA
REVDPDDSYVF

SEQ ID NO: 45164 - protein, 11 aa, Homo sapiens
  Table A; Target 45164; HLA-B*40:01; MAGEC1; ENSG00000155495; CTA
REVDPDDSYVF

SEQ ID NO: 45165 - protein, 11 aa, Homo sapiens
  Table A; Target 45165; HLA-B*40:02; MAGEC1; ENSG00000155495; CTA
REVDPDDSYVF

SEQ ID NO: 45166 - protein, 11 aa, Homo sapiens
  Table A; Target 45166; HLA-B*44:02; MAGEC1; ENSG00000155495; CTA
REVDPDDSYVF

SEQ ID NO: 45167 - protein, 11 aa, Homo sapiens
  Table A; Target 45167; HLA-B*44:03; MAGEC1; ENSG00000155495; CTA
REVDPDDSYVF

SEQ ID NO: 45168 - protein, 11 aa, Homo sapiens
  Table A; Target 45168; HLA-B*57:01; MAGEC1; ENSG00000155495; CTA
REVDPDDSYVF

SEQ ID NO: 45169 - protein, 11 aa, Homo sapiens
  Table A; Target 45169; HLA-C*16:04; MAGEC1; ENSG00000155495; CTA
REVDPDDSYVF

SEQ ID NO: 45170 - protein, 11 aa, Homo sapiens
  Table A; Target 45170; HLA-A*30:02; MAGEC1; ENSG00000155495; CTA
REVPNSSPPRY

SEQ ID NO: 45171 - protein, 11 aa, Homo sapiens
  Table A; Target 45171; HLA-B*44:02; MAGEC1; ENSG00000155495; CTA
REVPNSSPPRY

SEQ ID NO: 45172 - protein, 11 aa, Homo sapiens
  Table A; Target 45172; HLA-B*44:03; MAGEC1; ENSG00000155495; CTA
REVPNSSPPRY

SEQ ID NO: 45173 - protein, 9 aa, Homo sapiens
  Table A; Target 45173; HLA-A*02:04; MAGEC1; ENSG00000155495; CTA
RLLILILSI

SEQ ID NO: 45174 - protein, 9 aa, Homo sapiens
  Table A; Target 45174; HLA-A*30:02; MAGEC1; ENSG00000155495; CTA
RPVSSFFSY

SEQ ID NO: 45175 - protein, 9 aa, Homo sapiens
  Table A; Target 45175; HLA-B*35:01; MAGEC1; ENSG00000155495; CTA
RPVSSFFSY

SEQ ID NO: 45176 - protein, 11 aa, Homo sapiens
  Table A; Target 45176; HLA-B*57:01; MAGEC1; ENSG00000155495; CTA
RSFSSTLLSIF

SEQ ID NO: 45177 - protein, 9 aa, Homo sapiens
  Table A; Target 45177; HLA-A*23:01; MAGEC1; ENSG00000155495; CTA
RYTGYFPVI

SEQ ID NO: 45178 - protein, 9 aa, Homo sapiens
  Table A; Target 45178; HLA-A*24:02; MAGEC1; ENSG00000155495; CTA
RYTGYFPVI

SEQ ID NO: 45179 - protein, 10 aa, Homo sapiens
  Table A; Target 45179; HLA-A*24:02; MAGEC1; ENSG00000155495; CTA
RYTGYFPVIF

SEQ ID NO: 45180 - protein, 8 aa, Homo sapiens
  Table A; Target 45180; HLA-C*03:03; MAGEC1; ENSG00000155495; CTA
SAASSSTL

SEQ ID NO: 45181 - protein, 8 aa, Homo sapiens
  Table A; Target 45181; HLA-C*03:04; MAGEC1; ENSG00000155495; CTA
SAASSSTL

SEQ ID NO: 45182 - protein, 8 aa, Homo sapiens
  Table A; Target 45182; HLA-C*05:01; MAGEC1; ENSG00000155495; CTA
SAASSSTL

SEQ ID NO: 45183 - protein, 9 aa, Homo sapiens
  Table A; Target 45183; HLA-C*02:02; MAGEC1; ENSG00000155495; CTA
SAASSSTLV

SEQ ID NO: 45184 - protein, 9 aa, Homo sapiens
  Table A; Target 45184; HLA-C*01:02; MAGEC1; ENSG00000155495; CTA
SAPEGEDSL

SEQ ID NO: 45185 - protein, 9 aa, Homo sapiens
  Table A; Target 45185; HLA-C*05:01; MAGEC1; ENSG00000155495; CTA
SAPEGEDSL

SEQ ID NO: 45186 - protein, 9 aa, Homo sapiens
  Table A; Target 45186; HLA-C*05:01; MAGEC1; ENSG00000155495; CTA
SAQSAFEGF

SEQ ID NO: 45187 - protein, 9 aa, Homo sapiens
  Table A; Target 45187; HLA-A*30:02; MAGEC1; ENSG00000155495; CTA
SAQSTFEGF

SEQ ID NO: 45188 - protein, 11 aa, Homo sapiens
  Table A; Target 45188; HLA-A*30:02; MAGEC1; ENSG00000155495; CTA
SEESSSPVDEY

SEQ ID NO: 45189 - protein, 11 aa, Homo sapiens
  Table A; Target 45189; HLA-B*44:03; MAGEC1; ENSG00000155495; CTA
SEESSSPVDEY

SEQ ID NO: 45190 - protein, 9 aa, Homo sapiens
  Table A; Target 45190; HLA-B*40:01; MAGEC1; ENSG00000155495; CTA
SEEVIWDVL

SEQ ID NO: 45191 - protein, 10 aa, Homo sapiens
  Table A; Target 45191; HLA-B*40:01; MAGEC1; ENSG00000155495; CTA
SEGEDSSDPL

SEQ ID NO: 45192 - protein, 9 aa, Homo sapiens
  Table A; Target 45192; HLA-A*30:01; MAGEC1; ENSG00000155495; CTA
SEPLFTYTL

SEQ ID NO: 45193 - protein, 9 aa, Homo sapiens
  Table A; Target 45193; HLA-B*18:01; MAGEC1; ENSG00000155495; CTA
SEPLFTYTL

SEQ ID NO: 45194 - protein, 9 aa, Homo sapiens
  Table A; Target 45194; HLA-B*37:01; MAGEC1; ENSG00000155495; CTA
SEPLFTYTL

SEQ ID NO: 45195 - protein, 9 aa, Homo sapiens
  Table A; Target 45195; HLA-B*40:01; MAGEC1; ENSG00000155495; CTA
SEPLFTYTL

SEQ ID NO: 45196 - protein, 9 aa, Homo sapiens
  Table A; Target 45196; HLA-B*40:02; MAGEC1; ENSG00000155495; CTA
SEPLFTYTL

SEQ ID NO: 45197 - protein, 9 aa, Homo sapiens
  Table A; Target 45197; HLA-B*44:02; MAGEC1; ENSG00000155495; CTA
SEPLFTYTL

SEQ ID NO: 45198 - protein, 9 aa, Homo sapiens
  Table A; Target 45198; HLA-B*44:03; MAGEC1; ENSG00000155495; CTA
SEPLFTYTL

SEQ ID NO: 45199 - protein, 9 aa, Homo sapiens
  Table A; Target 45199; HLA-B*49:01; MAGEC1; ENSG00000155495; CTA
SEPLFTYTL

SEQ ID NO: 45200 - protein, 8 aa, Homo sapiens
  Table A; Target 45200; HLA-B*15:03; MAGEC1; ENSG00000155495; CTA
SERTQSTF

SEQ ID NO: 45201 - protein, 8 aa, Homo sapiens
  Table A; Target 45201; HLA-B*18:01; MAGEC1; ENSG00000155495; CTA
SERTQSTF

SEQ ID NO: 45202 - protein, 8 aa, Homo sapiens
  Table A; Target 45202; HLA-B*37:01; MAGEC1; ENSG00000155495; CTA
SERTQSTF

SEQ ID NO: 45203 - protein, 8 aa, Homo sapiens
  Table A; Target 45203; HLA-B*40:02; MAGEC1; ENSG00000155495; CTA
SERTQSTF

SEQ ID NO: 45204 - protein, 11 aa, Homo sapiens
  Table A; Target 45204; HLA-B*37:01; MAGEC1; ENSG00000155495; CTA
SERTQSTFEGF

SEQ ID NO: 45205 - protein, 11 aa, Homo sapiens
  Table A; Target 45205; HLA-B*44:02; MAGEC1; ENSG00000155495; CTA
SERTQSTFEGF

SEQ ID NO: 45206 - protein, 11 aa, Homo sapiens
  Table A; Target 45206; HLA-B*44:03; MAGEC1; ENSG00000155495; CTA
SERTQSTFEGF

SEQ ID NO: 45207 - protein, 10 aa, Homo sapiens
  Table A; Target 45207; HLA-B*40:01; MAGEC1; ENSG00000155495; CTA
SESLIESEPL

SEQ ID NO: 45208 - protein, 11 aa, Homo sapiens
  Table A; Target 45208; HLA-B*44:02; MAGEC1; ENSG00000155495; CTA
SESLIESEPLF

SEQ ID NO: 45209 - protein, 9 aa, Homo sapiens
  Table A; Target 45209; HLA-C*01:02; MAGEC1; ENSG00000155495; CTA
SFPESSQSP

SEQ ID NO: 45210 - protein, 10 aa, Homo sapiens
  Table A; Target 45210; HLA-A*23:01; MAGEC1; ENSG00000155495; CTA
SFSERTQSTF

SEQ ID NO: 45211 - protein, 10 aa, Homo sapiens
  Table A; Target 45211; HLA-A*24:02; MAGEC1; ENSG00000155495; CTA
SFSERTQSTF

SEQ ID NO: 45212 - protein, 10 aa, Homo sapiens
  Table A; Target 45212; HLA-C*14:02; MAGEC1; ENSG00000155495; CTA
SFSERTQSTF

SEQ ID NO: 45213 - protein, 8 aa, Homo sapiens
  Table A; Target 45213; HLA-C*14:02; MAGEC1; ENSG00000155495; CTA
SFSSSTSL

SEQ ID NO: 45214 - protein, 9 aa, Homo sapiens
  Table A; Target 45214; HLA-C*01:02; MAGEC1; ENSG00000155495; CTA
SFSSTLLSL

SEQ ID NO: 45215 - protein, 9 aa, Homo sapiens
  Table A; Target 45215; HLA-C*14:02; MAGEC1; ENSG00000155495; CTA
SFSSTLLSL

SEQ ID NO: 45216 - protein, 9 aa, Homo sapiens
  Table A; Target 45216; HLA-A*23:01; MAGEC1; ENSG00000155495; CTA
SFSSTLVSL

SEQ ID NO: 45217 - protein, 9 aa, Homo sapiens
  Table A; Target 45217; HLA-C*01:02; MAGEC1; ENSG00000155495; CTA
SFSSTLVSL

SEQ ID NO: 45218 - protein, 9 aa, Homo sapiens
  Table A; Target 45218; HLA-C*14:02; MAGEC1; ENSG00000155495; CTA
SFSSTLVSL

SEQ ID NO: 45219 - protein, 9 aa, Homo sapiens
  Table A; Target 45219; HLA-C*14:02; MAGEC1; ENSG00000155495; CTA
SFSYTLLSL

SEQ ID NO: 45220 - protein, 9 aa, Homo sapiens
  Table A; Target 45220; HLA-A*31:01; MAGEC1; ENSG00000155495; CTA
SGIGVRAGR

SEQ ID NO: 45221 - protein, 9 aa, Homo sapiens
  Table A; Target 45221; HLA-B*07:02; MAGEC1; ENSG00000155495; CTA
SICSSSTSL

SEQ ID NO: 45222 - protein, 9 aa, Homo sapiens
  Table A; Target 45222; HLA-C*01:02; MAGEC1; ENSG00000155495; CTA
SICSSSTSL

SEQ ID NO: 45223 - protein, 9 aa, Homo sapiens
  Table A; Target 45223; HLA-C*14:02; MAGEC1; ENSG00000155495; CTA
SICSSSTSL

SEQ ID NO: 45224 - protein, 9 aa, Homo sapiens
  Table A; Target 45224; HLA-A*03:01; MAGEC1; ENSG00000155495; CTA
SIFQSSPER

SEQ ID NO: 45225 - protein, 9 aa, Homo sapiens
  Table A; Target 45225; HLA-A*03:02; MAGEC1; ENSG00000155495; CTA
SIFQSSPER

SEQ ID NO: 45226 - protein, 9 aa, Homo sapiens
  Table A; Target 45226; HLA-A*11:01; MAGEC1; ENSG00000155495; CTA
SIFQSSPER

SEQ ID NO: 45227 - protein, 9 aa, Homo sapiens
  Table A; Target 45227; HLA-A*31:01; MAGEC1; ENSG00000155495; CTA
SIFQSSPER

SEQ ID NO: 45228 - protein, 9 aa, Homo sapiens
  Table A; Target 45228; HLA-A*68:01; MAGEC1; ENSG00000155495; CTA
SIFQSSPER

SEQ ID NO: 45229 - protein, 9 aa, Homo sapiens
  Table A; Target 45229; HLA-C*07:06; MAGEC1; ENSG00000155495; CTA
SIFQSSPER

SEQ ID NO: 45230 - protein, 10 aa, Homo sapiens
  Table A; Target 45230; HLA-A*02:03; MAGEC1; ENSG00000155495; CTA
SIFQSSPESA

SEQ ID NO: 45231 - protein, 9 aa, Homo sapiens
  Table A; Target 45231; HLA-A*26:01; MAGEC1; ENSG00000155495; CTA
SIIFIKGTY

SEQ ID NO: 45232 - protein, 9 aa, Homo sapiens
  Table A; Target 45232; HLA-A*29:02; MAGEC1; ENSG00000155495; CTA
SIIFIKGTY

SEQ ID NO: 45233 - protein, 9 aa, Homo sapiens
  Table A; Target 45233; HLA-A*30:02; MAGEC1; ENSG00000155495; CTA
SIIFIKGTY

SEQ ID NO: 45234 - protein, 9 aa, Homo sapiens
  Table A; Target 45234; HLA-A*32:01; MAGEC1; ENSG00000155495; CTA
SIIFIKGTY

SEQ ID NO: 45235 - protein, 9 aa, Homo sapiens
  Table A; Target 45235; HLA-B*15:01; MAGEC1; ENSG00000155495; CTA
SIIFIKGTY

SEQ ID NO: 45236 - protein, 9 aa, Homo sapiens
  Table A; Target 45236; HLA-B*46:01; MAGEC1; ENSG00000155495; CTA
SIIFIKGTY

SEQ ID NO: 45237 - protein, 10 aa, Homo sapiens
  Table A; Target 45237; HLA-A*02:03; MAGEC1; ENSG00000155495; CTA
SIIFIKGTYA

SEQ ID NO: 45238 - protein, 9 aa, Homo sapiens
  Table A; Target 45238; HLA-A*02:03; MAGEC1; ENSG00000155495; CTA
SLFQSFSER

SEQ ID NO: 45239 - protein, 9 aa, Homo sapiens
  Table A; Target 45239; HLA-A*03:01; MAGEC1; ENSG00000155495; CTA
SLFQSFSER

SEQ ID NO: 45240 - protein, 9 aa, Homo sapiens
  Table A; Target 45240; HLA-A*31:01; MAGEC1; ENSG00000155495; CTA
SLFQSFSER

SEQ ID NO: 45241 - protein, 9 aa, Homo sapiens
  Table A; Target 45241; HLA-A*33:01; MAGEC1; ENSG00000155495; CTA
SLFQSFSER

SEQ ID NO: 45242 - protein, 9 aa, Homo sapiens
  Table A; Target 45242; HLA-A*33:03; MAGEC1; ENSG00000155495; CTA
SLFQSFSER

SEQ ID NO: 45243 - protein, 9 aa, Homo sapiens
  Table A; Target 45243; HLA-A*68:01; MAGEC1; ENSG00000155495; CTA
SLFQSFSER

SEQ ID NO: 45244 - protein, 9 aa, Homo sapiens
  Table A; Target 45244; HLA-C*07:06; MAGEC1; ENSG00000155495; CTA
SLFQSFSER

SEQ ID NO: 45245 - protein, 9 aa, Homo sapiens
  Table A; Target 45245; HLA-A*02:01; MAGEC1; ENSG00000155495; CTA
SLFQSSPEC

SEQ ID NO: 45246 - protein, 9 aa, Homo sapiens
  Table A; Target 45246; HLA-A*02:01; MAGEC1; ENSG00000155495; CTA
SLIESEPLF

SEQ ID NO: 45247 - protein, 9 aa, Homo sapiens
  Table A; Target 45247; HLA-A*02:04; MAGEC1; ENSG00000155495; CTA
SLIESEPLF

SEQ ID NO: 45248 - protein, 9 aa, Homo sapiens
  Table A; Target 45248; HLA-A*02:07; MAGEC1; ENSG00000155495; CTA
SLIESEPLF

SEQ ID NO: 45249 - protein, 9 aa, Homo sapiens
  Table A; Target 45249; HLA-A*23:01; MAGEC1; ENSG00000155495; CTA
SLIESEPLF

SEQ ID NO: 45250 - protein, 9 aa, Homo sapiens
  Table A; Target 45250; HLA-A*24:02; MAGEC1; ENSG00000155495; CTA
SLIESEPLF

SEQ ID NO: 45251 - protein, 9 aa, Homo sapiens
  Table A; Target 45251; HLA-A*26:01; MAGEC1; ENSG00000155495; CTA
SLIESEPLF

SEQ ID NO: 45252 - protein, 9 aa, Homo sapiens
  Table A; Target 45252; HLA-A*32:01; MAGEC1; ENSG00000155495; CTA
SLIESEPLF

SEQ ID NO: 45253 - protein, 9 aa, Homo sapiens
  Table A; Target 45253; HLA-B*15:01; MAGEC1; ENSG00000155495; CTA
SLIESEPLF

SEQ ID NO: 45254 - protein, 9 aa, Homo sapiens
  Table A; Target 45254; HLA-B*15:03; MAGEC1; ENSG00000155495; CTA
SLIESEPLF

SEQ ID NO: 45255 - protein, 9 aa, Homo sapiens
  Table A; Target 45255; HLA-B*38:01; MAGEC1; ENSG00000155495; CTA
SLIESEPLF

SEQ ID NO: 45256 - protein, 9 aa, Homo sapiens
  Table A; Target 45256; HLA-B*55:01; MAGEC1; ENSG00000155495; CTA
SLIESEPLF

SEQ ID NO: 45257 - protein, 11 aa, Homo sapiens
  Table A; Target 45257; HLA-A*25:01; MAGEC1; ENSG00000155495; CTA
SLIESEPLFTY

SEQ ID NO: 45258 - protein, 11 aa, Homo sapiens
  Table A; Target 45258; HLA-A*26:01; MAGEC1; ENSG00000155495; CTA
SLIESEPLFTY

SEQ ID NO: 45259 - protein, 11 aa, Homo sapiens
  Table A; Target 45259; HLA-A*29:02; MAGEC1; ENSG00000155495; CTA
SLIESEPLFTY

SEQ ID NO: 45260 - protein, 11 aa, Homo sapiens
  Table A; Target 45260; HLA-A*30:02; MAGEC1; ENSG00000155495; CTA
SLIESEPLFTY

SEQ ID NO: 45261 - protein, 9 aa, Homo sapiens
  Table A; Target 45261; HLA-A*02:07; MAGEC1; ENSG00000155495; CTA
SLPEWEDSL

SEQ ID NO: 45262 - protein, 10 aa, Homo sapiens
  Table A; Target 45262; HLA-A*30:02; MAGEC1; ENSG00000155495; CTA
SLQIPVSPSF

SEQ ID NO: 45263 - protein, 11 aa, Homo sapiens
  Table A; Target 45263; HLA-A*30:02; MAGEC1; ENSG00000155495; CTA
SLREVDPDDSY

SEQ ID NO: 45264 - protein, 11 aa, Homo sapiens
  Table A; Target 45264; HLA-B*15:01; MAGEC1; ENSG00000155495; CTA
SLREVDPDDSY

SEQ ID NO: 45265 - protein, 11 aa, Homo sapiens
  Table A; Target 45265; HLA-B*46:01; MAGEC1; ENSG00000155495; CTA
SLREVDPDDSY

SEQ ID NO: 45266 - protein, 8 aa, Homo sapiens
  Table A; Target 45266; HLA-B*37:01; MAGEC1; ENSG00000155495; CTA
SLSLPQSF

SEQ ID NO: 45267 - protein, 11 aa, Homo sapiens
  Table A; Target 45267; HLA-A*25:01; MAGEC1; ENSG00000155495; CTA
SLSQSSPVSSF

SEQ ID NO: 45268 - protein, 11 aa, Homo sapiens
  Table A; Target 45268; HLA-B*15:01; MAGEC1; ENSG00000155495; CTA
SLSQSSPVSSF

SEQ ID NO: 45269 - protein, 9 aa, Homo sapiens
  Table A; Target 45269; HLA-A*02:01; MAGEC1; ENSG00000155495; CTA
SLTDSESLI

SEQ ID NO: 45270 - protein, 9 aa, Homo sapiens
  Table A; Target 45270; HLA-B*13:02; MAGEC1; ENSG00000155495; CTA
SLTDSESLI

SEQ ID NO: 45271 - protein, 11 aa, Homo sapiens
  Table A; Target 45271; HLA-B*35:03; MAGEC1; ENSG00000155495; CTA
SPEGDDTQSPL

SEQ ID NO: 45272 - protein, 8 aa, Homo sapiens
  Table A; Target 45272; HLA-B*07:02; MAGEC1; ENSG00000155495; CTA
SPEGKDSL

SEQ ID NO: 45273 - protein, 8 aa, Homo sapiens
  Table A; Target 45273; HLA-C*07:02; MAGEC1; ENSG00000155495; CTA
SPEGKDSL

SEQ ID NO: 45274 - protein, 11 aa, Homo sapiens
  Table A; Target 45274; HLA-B*07:02; MAGEC1; ENSG00000155495; CTA
SPEGKDSLSPL

SEQ ID NO: 45275 - protein, 9 aa, Homo sapiens
  Table A; Target 45275; HLA-B*07:02; MAGEC1; ENSG00000155495; CTA
SPESAQSAF

SEQ ID NO: 45276 - protein, 9 aa, Homo sapiens
  Table A; Target 45276; HLA-B*15:03; MAGEC1; ENSG00000155495; CTA
SPESAQSAF

SEQ ID NO: 45277 - protein, 9 aa, Homo sapiens
  Table A; Target 45277; HLA-B*35:01; MAGEC1; ENSG00000155495; CTA
SPESAQSAF

SEQ ID NO: 45278 - protein, 9 aa, Homo sapiens
  Table A; Target 45278; HLA-B*35:03; MAGEC1; ENSG00000155495; CTA
SPESAQSAF

SEQ ID NO: 45279 - protein, 9 aa, Homo sapiens
  Table A; Target 45279; HLA-B*55:01; MAGEC1; ENSG00000155495; CTA
SPESAQSAF

SEQ ID NO: 45280 - protein, 9 aa, Homo sapiens
  Table A; Target 45280; HLA-C*01:02; MAGEC1; ENSG00000155495; CTA
SPESAQSAF

SEQ ID NO: 45281 - protein, 9 aa, Homo sapiens
  Table A; Target 45281; HLA-C*03:03; MAGEC1; ENSG00000155495; CTA
SPESAQSAF

SEQ ID NO: 45282 - protein, 9 aa, Homo sapiens
  Table A; Target 45282; HLA-C*05:01; MAGEC1; ENSG00000155495; CTA
SPESAQSAF

SEQ ID NO: 45283 - protein, 9 aa, Homo sapiens
  Table A; Target 45283; HLA-C*07:02; MAGEC1; ENSG00000155495; CTA
SPESAQSAF

SEQ ID NO: 45284 - protein, 9 aa, Homo sapiens
  Table A; Target 45284; HLA-C*07:06; MAGEC1; ENSG00000155495; CTA
SPESAQSAF

SEQ ID NO: 45285 - protein, 9 aa, Homo sapiens
  Table A; Target 45285; HLA-B*07:02; MAGEC1; ENSG00000155495; CTA
SPESAQSTF

SEQ ID NO: 45286 - protein, 9 aa, Homo sapiens
  Table A; Target 45286; HLA-B*35:01; MAGEC1; ENSG00000155495; CTA
SPESAQSTF

SEQ ID NO: 45287 - protein, 9 aa, Homo sapiens
  Table A; Target 45287; HLA-B*35:03; MAGEC1; ENSG00000155495; CTA
SPESAQSTF

SEQ ID NO: 45288 - protein, 9 aa, Homo sapiens
  Table A; Target 45288; HLA-B*38:01; MAGEC1; ENSG00000155495; CTA
SPESAQSTF

SEQ ID NO: 45289 - protein, 9 aa, Homo sapiens
  Table A; Target 45289; HLA-B*55:01; MAGEC1; ENSG00000155495; CTA
SPESAQSTF

SEQ ID NO: 45290 - protein, 9 aa, Homo sapiens
  Table A; Target 45290; HLA-C*03:03; MAGEC1; ENSG00000155495; CTA
SPESAQSTF

SEQ ID NO: 45291 - protein, 9 aa, Homo sapiens
  Table A; Target 45291; HLA-C*05:01; MAGEC1; ENSG00000155495; CTA
SPESAQSTF

SEQ ID NO: 45292 - protein, 9 aa, Homo sapiens
  Table A; Target 45292; HLA-C*07:02; MAGEC1; ENSG00000155495; CTA
SPESAQSTF

SEQ ID NO: 45293 - protein, 9 aa, Homo sapiens
  Table A; Target 45293; HLA-C*07:06; MAGEC1; ENSG00000155495; CTA
SPESAQSTF

SEQ ID NO: 45294 - protein, 9 aa, Homo sapiens
  Table A; Target 45294; HLA-B*35:01; MAGEC1; ENSG00000155495; CTA
SPESDDTLY

SEQ ID NO: 45295 - protein, 9 aa, Homo sapiens
  Table A; Target 45295; HLA-B*55:01; MAGEC1; ENSG00000155495; CTA
SPESDDTLY

SEQ ID NO: 45296 - protein, 9 aa, Homo sapiens
  Table A; Target 45296; HLA-C*03:03; MAGEC1; ENSG00000155495; CTA
SPESDDTLY

SEQ ID NO: 45297 - protein, 11 aa, Homo sapiens
  Table A; Target 45297; HLA-B*35:03; MAGEC1; ENSG00000155495; CTA
SPESDDTLYPL

SEQ ID NO: 45298 - protein, 9 aa, Homo sapiens
  Table A; Target 45298; HLA-B*56:01; MAGEC1; ENSG00000155495; CTA
SPESPLQSP

SEQ ID NO: 45299 - protein, 11 aa, Homo sapiens
  Table A; Target 45299; HLA-B*35:03; MAGEC1; ENSG00000155495; CTA
SPESPLQSPVI

SEQ ID NO: 45300 - protein, 10 aa, Homo sapiens
  Table A; Target 45300; HLA-B*56:01; MAGEC1; ENSG00000155495; CTA
SPFEGFPQSP

SEQ ID NO: 45301 - protein, 11 aa, Homo sapiens
  Table A; Target 45301; HLA-B*07:02; MAGEC1; ENSG00000155495; CTA
SPFEGFPQSPL

SEQ ID NO: 45302 - protein, 11 aa, Homo sapiens
  Table A; Target 45302; HLA-B*56:01; MAGEC1; ENSG00000155495; CTA
SPFEGFPQSPL

SEQ ID NO: 45303 - protein, 10 aa, Homo sapiens
  Table A; Target 45303; HLA-A*02:03; MAGEC1; ENSG00000155495; CTA
SPFEGFPQSV

SEQ ID NO: 45304 - protein, 10 aa, Homo sapiens
  Table A; Target 45304; HLA-B*07:02; MAGEC1; ENSG00000155495; CTA
SPFEGFPQSV

SEQ ID NO: 45305 - protein, 10 aa, Homo sapiens
  Table A; Target 45305; HLA-B*35:03; MAGEC1; ENSG00000155495; CTA
SPFEGFPQSV

SEQ ID NO: 45306 - protein, 10 aa, Homo sapiens
  Table A; Target 45306; HLA-B*51:01; MAGEC1; ENSG00000155495; CTA
SPFEGFPQSV

SEQ ID NO: 45307 - protein, 10 aa, Homo sapiens
  Table A; Target 45307; HLA-B*54:01; MAGEC1; ENSG00000155495; CTA
SPFEGFPQSV

SEQ ID NO: 45308 - protein, 10 aa, Homo sapiens
  Table A; Target 45308; HLA-B*55:01; MAGEC1; ENSG00000155495; CTA
SPFEGFPQSV

SEQ ID NO: 45309 - protein, 10 aa, Homo sapiens
  Table A; Target 45309; HLA-B*56:01; MAGEC1; ENSG00000155495; CTA
SPFEGFPQSV

SEQ ID NO: 45310 - protein, 10 aa, Homo sapiens
  Table A; Target 45310; HLA-C*02:02; MAGEC1; ENSG00000155495; CTA
SPFEGFPQSV

SEQ ID NO: 45311 - protein, 10 aa, Homo sapiens
  Table A; Target 45311; HLA-C*07:02; MAGEC1; ENSG00000155495; CTA
SPFEGFPQSV

SEQ ID NO: 45312 - protein, 11 aa, Homo sapiens
  Table A; Target 45312; HLA-B*07:02; MAGEC1; ENSG00000155495; CTA
SPFEGFPQSVL

SEQ ID NO: 45313 - protein, 11 aa, Homo sapiens
  Table A; Target 45313; HLA-B*35:01; MAGEC1; ENSG00000155495; CTA
SPFEGFPQSVL

SEQ ID NO: 45314 - protein, 11 aa, Homo sapiens
  Table A; Target 45314; HLA-B*35:03; MAGEC1; ENSG00000155495; CTA
SPFEGFPQSVL

SEQ ID NO: 45315 - protein, 11 aa, Homo sapiens
  Table A; Target 45315; HLA-B*56:01; MAGEC1; ENSG00000155495; CTA
SPFEGFPQSVL

SEQ ID NO: 45316 - protein, 11 aa, Homo sapiens
  Table A; Target 45316; HLA-C*07:02; MAGEC1; ENSG00000155495; CTA
SPFSEESSSPV

SEQ ID NO: 45317 - protein, 9 aa, Homo sapiens
  Table A; Target 45317; HLA-B*07:02; MAGEC1; ENSG00000155495; CTA
SPLEGEDSL

SEQ ID NO: 45318 - protein, 9 aa, Homo sapiens
  Table A; Target 45318; HLA-B*35:01; MAGEC1; ENSG00000155495; CTA
SPLEGEDSL

SEQ ID NO: 45319 - protein, 9 aa, Homo sapiens
  Table A; Target 45319; HLA-B*35:03; MAGEC1; ENSG00000155495; CTA
SPLEGEDSL

SEQ ID NO: 45320 - protein, 9 aa, Homo sapiens
  Table A; Target 45320; HLA-B*39:01; MAGEC1; ENSG00000155495; CTA
SPLEGEDSL

SEQ ID NO: 45321 - protein, 9 aa, Homo sapiens
  Table A; Target 45321; HLA-B*55:01; MAGEC1; ENSG00000155495; CTA
SPLEGEDSL

SEQ ID NO: 45322 - protein, 9 aa, Homo sapiens
  Table A; Target 45322; HLA-C*03:03; MAGEC1; ENSG00000155495; CTA
SPLEGEDSL

SEQ ID NO: 45323 - protein, 9 aa, Homo sapiens
  Table A; Target 45323; HLA-C*07:02; MAGEC1; ENSG00000155495; CTA
SPLEGEDSL

SEQ ID NO: 45324 - protein, 9 aa, Homo sapiens
  Table A; Target 45324; HLA-B*56:01; MAGEC1; ENSG00000155495; CTA
SPLEISQSP

SEQ ID NO: 45325 - protein, 8 aa, Homo sapiens
  Table A; Target 45325; HLA-B*35:01; MAGEC1; ENSG00000155495; CTA
SPLQGEEF

SEQ ID NO: 45326 - protein, 11 aa, Homo sapiens
  Table A; Target 45326; HLA-B*35:01; MAGEC1; ENSG00000155495; CTA
SPLQIPGSPSF

SEQ ID NO: 45327 - protein, 9 aa, Homo sapiens
  Table A; Target 45327; HLA-B*56:01; MAGEC1; ENSG00000155495; CTA
SPLQIPMTS

SEQ ID NO: 45328 - protein, 10 aa, Homo sapiens
  Table A; Target 45328; HLA-B*07:02; MAGEC1; ENSG00000155495; CTA
SPLQIPQSPL

SEQ ID NO: 45329 - protein, 10 aa, Homo sapiens
  Table A; Target 45329; HLA-B*56:01; MAGEC1; ENSG00000155495; CTA
SPLQIPQSPL

SEQ ID NO: 45330 - protein, 10 aa, Homo sapiens
  Table A; Target 45330; HLA-C*07:02; MAGEC1; ENSG00000155495; CTA
SPLQIPQSPL

SEQ ID NO: 45331 - protein, 9 aa, Homo sapiens
  Table A; Target 45331; HLA-B*54:01; MAGEC1; ENSG00000155495; CTA
SPLQIPVSP

SEQ ID NO: 45332 - protein, 9 aa, Homo sapiens
  Table A; Target 45332; HLA-B*55:01; MAGEC1; ENSG00000155495; CTA
SPLQIPVSP

SEQ ID NO: 45333 - protein, 9 aa, Homo sapiens
  Table A; Target 45333; HLA-B*56:01; MAGEC1; ENSG00000155495; CTA
SPLQIPVSP

SEQ ID NO: 45334 - protein, 9 aa, Homo sapiens
  Table A; Target 45334; HLA-A*33:01; MAGEC1; ENSG00000155495; CTA
SPLQIPVSR

SEQ ID NO: 45335 - protein, 9 aa, Homo sapiens
  Table A; Target 45335; HLA-A*33:03; MAGEC1; ENSG00000155495; CTA
SPLQIPVSR

SEQ ID NO: 45336 - protein, 9 aa, Homo sapiens
  Table A; Target 45336; HLA-A*68:01; MAGEC1; ENSG00000155495; CTA
SPLQIPVSR

SEQ ID NO: 45337 - protein, 9 aa, Homo sapiens
  Table A; Target 45337; HLA-B*56:01; MAGEC1; ENSG00000155495; CTA
SPLQIPVSR

SEQ ID NO: 45338 - protein, 9 aa, Homo sapiens
  Table A; Target 45338; HLA-C*07:06; MAGEC1; ENSG00000155495; CTA
SPLQIPVSR

SEQ ID NO: 45339 - protein, 11 aa, Homo sapiens
  Table A; Target 45339; HLA-A*23:01; MAGEC1; ENSG00000155495; CTA
SPLQIPVSSSF

SEQ ID NO: 45340 - protein, 11 aa, Homo sapiens
  Table A; Target 45340; HLA-B*35:01; MAGEC1; ENSG00000155495; CTA
SPLQIPVSSSF

SEQ ID NO: 45341 - protein, 9 aa, Homo sapiens
  Table A; Target 45341; HLA-A*23:01; MAGEC1; ENSG00000155495; CTA
SPLQIVPSL

SEQ ID NO: 45342 - protein, 9 aa, Homo sapiens
  Table A; Target 45342; HLA-B*07:02; MAGEC1; ENSG00000155495; CTA
SPLQIVPSL

SEQ ID NO: 45343 - protein, 9 aa, Homo sapiens
  Table A; Target 45343; HLA-B*35:01; MAGEC1; ENSG00000155495; CTA
SPLQIVPSL

SEQ ID NO: 45344 - protein, 9 aa, Homo sapiens
  Table A; Target 45344; HLA-B*35:03; MAGEC1; ENSG00000155495; CTA
SPLQIVPSL

SEQ ID NO: 45345 - protein, 9 aa, Homo sapiens
  Table A; Target 45345; HLA-B*55:01; MAGEC1; ENSG00000155495; CTA
SPLQIVPSL

SEQ ID NO: 45346 - protein, 9 aa, Homo sapiens
  Table A; Target 45346; HLA-B*56:01; MAGEC1; ENSG00000155495; CTA
SPLQIVPSL

SEQ ID NO: 45347 - protein, 9 aa, Homo sapiens
  Table A; Target 45347; HLA-C*07:02; MAGEC1; ENSG00000155495; CTA
SPLQIVPSL

SEQ ID NO: 45348 - protein, 10 aa, Homo sapiens
  Table A; Target 45348; HLA-B*07:02; MAGEC1; ENSG00000155495; CTA
SPLQNPASSF

SEQ ID NO: 45349 - protein, 10 aa, Homo sapiens
  Table A; Target 45349; HLA-B*35:01; MAGEC1; ENSG00000155495; CTA
SPLQNPASSF

SEQ ID NO: 45350 - protein, 10 aa, Homo sapiens
  Table A; Target 45350; HLA-B*56:01; MAGEC1; ENSG00000155495; CTA
SPLQNPASSF

SEQ ID NO: 45351 - protein, 10 aa, Homo sapiens
  Table A; Target 45351; HLA-C*07:02; MAGEC1; ENSG00000155495; CTA
SPLQNPASSF

SEQ ID NO: 45352 - protein, 11 aa, Homo sapiens
  Table A; Target 45352; HLA-B*35:01; MAGEC1; ENSG00000155495; CTA
SPLQNPASSFF

SEQ ID NO: 45353 - protein, 9 aa, Homo sapiens
  Table A; Target 45353; HLA-B*08:01; MAGEC1; ENSG00000155495; CTA
SPLQRPVSS

SEQ ID NO: 45354 - protein, 9 aa, Homo sapiens
  Table A; Target 45354; HLA-B*56:01; MAGEC1; ENSG00000155495; CTA
SPLQRPVSS

SEQ ID NO: 45355 - protein, 10 aa, Homo sapiens
  Table A; Target 45355; HLA-B*07:02; MAGEC1; ENSG00000155495; CTA
SPLQRPVSSF

SEQ ID NO: 45356 - protein, 10 aa, Homo sapiens
  Table A; Target 45356; HLA-C*07:02; MAGEC1; ENSG00000155495; CTA
SPLQRPVSSF

SEQ ID NO: 45357 - protein, 9 aa, Homo sapiens
  Table A; Target 45357; HLA-B*54:01; MAGEC1; ENSG00000155495; CTA
SPLQSPESA

SEQ ID NO: 45358 - protein, 9 aa, Homo sapiens
  Table A; Target 45358; HLA-B*56:01; MAGEC1; ENSG00000155495; CTA
SPLQSPESA

SEQ ID NO: 45359 - protein, 8 aa, Homo sapiens
  Table A; Target 45359; HLA-B*51:01; MAGEC1; ENSG00000155495; CTA
SPLQSPVI

SEQ ID NO: 45360 - protein, 10 aa, Homo sapiens
  Table A; Target 45360; HLA-B*07:02; MAGEC1; ENSG00000155495; CTA
SPLQSPVISF

SEQ ID NO: 45361 - protein, 10 aa, Homo sapiens
  Table A; Target 45361; HLA-B*35:01; MAGEC1; ENSG00000155495; CTA
SPLQSPVISF

SEQ ID NO: 45362 - protein, 10 aa, Homo sapiens
  Table A; Target 45362; HLA-B*55:01; MAGEC1; ENSG00000155495; CTA
SPLQSPVISF

SEQ ID NO: 45363 - protein, 10 aa, Homo sapiens
  Table A; Target 45363; HLA-B*56:01; MAGEC1; ENSG00000155495; CTA
SPLQSPVISF

SEQ ID NO: 45364 - protein, 10 aa, Homo sapiens
  Table A; Target 45364; HLA-B*07:02; MAGEC1; ENSG00000155495; CTA
SPLQSPVSSF

SEQ ID NO: 45365 - protein, 10 aa, Homo sapiens
  Table A; Target 45365; HLA-B*35:01; MAGEC1; ENSG00000155495; CTA
SPLQSPVSSF

SEQ ID NO: 45366 - protein, 10 aa, Homo sapiens
  Table A; Target 45366; HLA-C*07:02; MAGEC1; ENSG00000155495; CTA
SPLQSPVSSF

SEQ ID NO: 45367 - protein, 9 aa, Homo sapiens
  Table A; Target 45367; HLA-B*56:01; MAGEC1; ENSG00000155495; CTA
SPLYFPQSP

SEQ ID NO: 45368 - protein, 10 aa, Homo sapiens
  Table A; Target 45368; HLA-B*07:02; MAGEC1; ENSG00000155495; CTA
SPLYFPQSPL

SEQ ID NO: 45369 - protein, 11 aa, Homo sapiens
  Table A; Target 45369; HLA-B*07:02; MAGEC1; ENSG00000155495; CTA
SPPEGPVQSPL

SEQ ID NO: 45370 - protein, 9 aa, Homo sapiens
  Table A; Target 45370; HLA-B*07:02; MAGEC1; ENSG00000155495; CTA
SPQSPPEGM

SEQ ID NO: 45371 - protein, 9 aa, Homo sapiens
  Table A; Target 45371; HLA-B*35:01; MAGEC1; ENSG00000155495; CTA
SPQSPPEGM

SEQ ID NO: 45372 - protein, 9 aa, Homo sapiens
  Table A; Target 45372; HLA-B*35:03; MAGEC1; ENSG00000155495; CTA
SPQSPPEGM

SEQ ID NO: 45373 - protein, 9 aa, Homo sapiens
  Table A; Target 45373; HLA-C*07:02; MAGEC1; ENSG00000155495; CTA
SPQSPPEGM

SEQ ID NO: 45374 - protein, 9 aa, Homo sapiens
  Table A; Target 45374; HLA-B*07:02; MAGEC1; ENSG00000155495; CTA
SPSFSSTLL

SEQ ID NO: 45375 - protein, 9 aa, Homo sapiens
  Table A; Target 45375; HLA-B*35:03; MAGEC1; ENSG00000155495; CTA
SPSFSSTLL

SEQ ID NO: 45376 - protein, 9 aa, Homo sapiens
  Table A; Target 45376; HLA-C*07:02; MAGEC1; ENSG00000155495; CTA
SPSFSSTLL

SEQ ID NO: 45377 - protein, 11 aa, Homo sapiens
  Table A; Target 45377; HLA-B*07:02; MAGEC1; ENSG00000155495; CTA
SPSFSSTLLSL

SEQ ID NO: 45378 - protein, 9 aa, Homo sapiens
  Table A; Target 45378; HLA-B*07:02; MAGEC1; ENSG00000155495; CTA
SPSFSSTLV

SEQ ID NO: 45379 - protein, 9 aa, Homo sapiens
  Table A; Target 45379; HLA-B*56:01; MAGEC1; ENSG00000155495; CTA
SPSFSSTLV

SEQ ID NO: 45380 - protein, 11 aa, Homo sapiens
  Table A; Target 45380; HLA-B*07:02; MAGEC1; ENSG00000155495; CTA
SPSFSSTLVSL

SEQ ID NO: 45381 - protein, 11 aa, Homo sapiens
  Table A; Target 45381; HLA-C*07:02; MAGEC1; ENSG00000155495; CTA
SPSFSSTLVSL

SEQ ID NO: 45382 - protein, 8 aa, Homo sapiens
  Table A; Target 45382; HLA-B*07:02; MAGEC1; ENSG00000155495; CTA
SPSSSSTL

SEQ ID NO: 45383 - protein, 8 aa, Homo sapiens
  Table A; Target 45383; HLA-C*07:02; MAGEC1; ENSG00000155495; CTA
SPSSSSTL

SEQ ID NO: 45384 - protein, 9 aa, Homo sapiens
  Table A; Target 45384; HLA-B*07:02; MAGEC1; ENSG00000155495; CTA
SPSSSSTLL

SEQ ID NO: 45385 - protein, 9 aa, Homo sapiens
  Table A; Target 45385; HLA-B*35:03; MAGEC1; ENSG00000155495; CTA
SPSSSSTLL

SEQ ID NO: 45386 - protein, 9 aa, Homo sapiens
  Table A; Target 45386; HLA-C*07:02; MAGEC1; ENSG00000155495; CTA
SPSSSSTLL

SEQ ID NO: 45387 - protein, 11 aa, Homo sapiens
  Table A; Target 45387; HLA-B*07:02; MAGEC1; ENSG00000155495; CTA
SPSSSSTLLSL

SEQ ID NO: 45388 - protein, 11 aa, Homo sapiens
  Table A; Target 45388; HLA-C*07:02; MAGEC1; ENSG00000155495; CTA
SPSSSSTLLSL

SEQ ID NO: 45389 - protein, 9 aa, Homo sapiens
  Table A; Target 45389; HLA-B*55:01; MAGEC1; ENSG00000155495; CTA
SPVDEYTSS

SEQ ID NO: 45390 - protein, 9 aa, Homo sapiens
  Table A; Target 45390; HLA-B*56:01; MAGEC1; ENSG00000155495; CTA
SPVDEYTSS

SEQ ID NO: 45391 - protein, 9 aa, Homo sapiens
  Table A; Target 45391; HLA-B*56:01; MAGEC1; ENSG00000155495; CTA
SPVISFSSS

SEQ ID NO: 45392 - protein, 10 aa, Homo sapiens
  Table A; Target 45392; HLA-B*56:01; MAGEC1; ENSG00000155495; CTA
SPVISFSSST

SEQ ID NO: 45393 - protein, 9 aa, Homo sapiens
  Table A; Target 45393; HLA-B*13:02; MAGEC1; ENSG00000155495; CTA
SQNRLLILI

SEQ ID NO: 45394 - protein, 11 aa, Homo sapiens
  Table A; Target 45394; HLA-B*27:05; MAGEC1; ENSG00000155495; CTA
SQSSPEGKDSL

SEQ ID NO: 45395 - protein, 11 aa, Homo sapiens
  Table A; Target 45395; HLA-B*38:01; MAGEC1; ENSG00000155495; CTA
SQSSPEGKDSL

SEQ ID NO: 45396 - protein, 11 aa, Homo sapiens
  Table A; Target 45396; HLA-B*39:01; MAGEC1; ENSG00000155495; CTA
SQSSPEGKDSL

SEQ ID NO: 45397 - protein, 9 aa, Homo sapiens
  Table A; Target 45397; HLA-A*25:01; MAGEC1; ENSG00000155495; CTA
SQSSPVSSF

SEQ ID NO: 45398 - protein, 9 aa, Homo sapiens
  Table A; Target 45398; HLA-A*26:01; MAGEC1; ENSG00000155495; CTA
SQSSPVSSF

SEQ ID NO: 45399 - protein, 9 aa, Homo sapiens
  Table A; Target 45399; HLA-A*30:02; MAGEC1; ENSG00000155495; CTA
SQSSPVSSF

SEQ ID NO: 45400 - protein, 9 aa, Homo sapiens
  Table A; Target 45400; HLA-A*32:01; MAGEC1; ENSG00000155495; CTA
SQSSPVSSF

SEQ ID NO: 45401 - protein, 9 aa, Homo sapiens
  Table A; Target 45401; HLA-B*13:02; MAGEC1; ENSG00000155495; CTA
SQSSPVSSF

SEQ ID NO: 45402 - protein, 9 aa, Homo sapiens
  Table A; Target 45402; HLA-B*15:03; MAGEC1; ENSG00000155495; CTA
SQSSPVSSF

SEQ ID NO: 45403 - protein, 9 aa, Homo sapiens
  Table A; Target 45403; HLA-B*27:02; MAGEC1; ENSG00000155495; CTA
SQSSPVSSF

SEQ ID NO: 45404 - protein, 9 aa, Homo sapiens
  Table A; Target 45404; HLA-B*27:05; MAGEC1; ENSG00000155495; CTA
SQSSPVSSF

SEQ ID NO: 45405 - protein, 9 aa, Homo sapiens
  Table A; Target 45405; HLA-B*37:01; MAGEC1; ENSG00000155495; CTA
SQSSPVSSF

SEQ ID NO: 45406 - protein, 9 aa, Homo sapiens
  Table A; Target 45406; HLA-B*38:01; MAGEC1; ENSG00000155495; CTA
SQSSPVSSF

SEQ ID NO: 45407 - protein, 9 aa, Homo sapiens
  Table A; Target 45407; HLA-B*39:01; MAGEC1; ENSG00000155495; CTA
SQSSPVSSF

SEQ ID NO: 45408 - protein, 9 aa, Homo sapiens
  Table A; Target 45408; HLA-B*44:02; MAGEC1; ENSG00000155495; CTA
SQSSPVSSF

SEQ ID NO: 45409 - protein, 9 aa, Homo sapiens
  Table A; Target 45409; HLA-B*44:03; MAGEC1; ENSG00000155495; CTA
SQSSPVSSF

SEQ ID NO: 45410 - protein, 9 aa, Homo sapiens
  Table A; Target 45410; HLA-B*46:01; MAGEC1; ENSG00000155495; CTA
SQSSPVSSF

SEQ ID NO: 45411 - protein, 9 aa, Homo sapiens
  Table A; Target 45411; HLA-B*58:01; MAGEC1; ENSG00000155495; CTA
SQSSPVSSF

SEQ ID NO: 45412 - protein, 9 aa, Homo sapiens
  Table A; Target 45412; HLA-C*02:02; MAGEC1; ENSG00000155495; CTA
SQSSPVSSF

SEQ ID NO: 45413 - protein, 9 aa, Homo sapiens
  Table A; Target 45413; HLA-C*05:01; MAGEC1; ENSG00000155495; CTA
SQSSPVSSF

SEQ ID NO: 45414 - protein, 9 aa, Homo sapiens
  Table A; Target 45414; HLA-C*07:02; MAGEC1; ENSG00000155495; CTA
SQSSPVSSF

SEQ ID NO: 45415 - protein, 9 aa, Homo sapiens
  Table A; Target 45415; HLA-C*07:04; MAGEC1; ENSG00000155495; CTA
SQSSPVSSF

SEQ ID NO: 45416 - protein, 9 aa, Homo sapiens
  Table A; Target 45416; HLA-C*12:03; MAGEC1; ENSG00000155495; CTA
SQSSPVSSF

SEQ ID NO: 45417 - protein, 9 aa, Homo sapiens
  Table A; Target 45417; HLA-C*14:02; MAGEC1; ENSG00000155495; CTA
SQSSPVSSF

SEQ ID NO: 45418 - protein, 9 aa, Homo sapiens
  Table A; Target 45418; HLA-C*16:04; MAGEC1; ENSG00000155495; CTA
SQSSPVSSF

SEQ ID NO: 45419 - protein, 9 aa, Homo sapiens
  Table A; Target 45419; HLA-B*27:05; MAGEC1; ENSG00000155495; CTA
SRSFSSTLL

SEQ ID NO: 45420 - protein, 8 aa, Homo sapiens
  Table A; Target 45420; HLA-C*03:03; MAGEC1; ENSG00000155495; CTA
SSFFSSAL

SEQ ID NO: 45421 - protein, 8 aa, Homo sapiens
  Table A; Target 45421; HLA-C*03:04; MAGEC1; ENSG00000155495; CTA
SSFFSSAL

SEQ ID NO: 45422 - protein, 10 aa, Homo sapiens
  Table A; Target 45422; HLA-B*58:01; MAGEC1; ENSG00000155495; CTA
SSPECTQSTF

SEQ ID NO: 45423 - protein, 9 aa, Homo sapiens
  Table A; Target 45423; HLA-C*01:02; MAGEC1; ENSG00000155495; CTA
SSPEGKDSL

SEQ ID NO: 45424 - protein, 9 aa, Homo sapiens
  Table A; Target 45424; HLA-C*01:02; MAGEC1; ENSG00000155495; CTA
SSPESAQSA

SEQ ID NO: 45425 - protein, 10 aa, Homo sapiens
  Table A; Target 45425; HLA-C*01:02; MAGEC1; ENSG00000155495; CTA
SSPESAQSAF

SEQ ID NO: 45426 - protein, 10 aa, Homo sapiens
  Table A; Target 45426; HLA-C*01:02; MAGEC1; ENSG00000155495; CTA
SSPESAQSTF

SEQ ID NO: 45427 - protein, 10 aa, Homo sapiens
  Table A; Target 45427; HLA-B*57:01; MAGEC1; ENSG00000155495; CTA
SSPPRYEFLW

SEQ ID NO: 45428 - protein, 8 aa, Homo sapiens
  Table A; Target 45428; HLA-A*30:02; MAGEC1; ENSG00000155495; CTA
SSSPVDEY

SEQ ID NO: 45429 - protein, 8 aa, Homo sapiens
  Table A; Target 45429; HLA-B*39:01; MAGEC1; ENSG00000155495; CTA
SSSPVDEY

SEQ ID NO: 45430 - protein, 8 aa, Homo sapiens
  Table A; Target 45430; HLA-C*16:02; MAGEC1; ENSG00000155495; CTA
SSSPVDEY

SEQ ID NO: 45431 - protein, 9 aa, Homo sapiens
  Table A; Target 45431; HLA-C*03:04; MAGEC1; ENSG00000155495; CTA
SSSSSSSTL

SEQ ID NO: 45432 - protein, 9 aa, Homo sapiens
  Table A; Target 45432; HLA-A*25:01; MAGEC1; ENSG00000155495; CTA
SSSTLVSIF

SEQ ID NO: 45433 - protein, 9 aa, Homo sapiens
  Table A; Target 45433; HLA-A*26:01; MAGEC1; ENSG00000155495; CTA
SSSTLVSIF

SEQ ID NO: 45434 - protein, 9 aa, Homo sapiens
  Table A; Target 45434; HLA-B*57:01; MAGEC1; ENSG00000155495; CTA
SSSTLVSIF

SEQ ID NO: 45435 - protein, 9 aa, Homo sapiens
  Table A; Target 45435; HLA-B*58:01; MAGEC1; ENSG00000155495; CTA
SSSTLVSIF

SEQ ID NO: 45436 - protein, 9 aa, Homo sapiens
  Table A; Target 45436; HLA-C*02:02; MAGEC1; ENSG00000155495; CTA
SSSTLVSIF

SEQ ID NO: 45437 - protein, 9 aa, Homo sapiens
  Table A; Target 45437; HLA-C*07:04; MAGEC1; ENSG00000155495; CTA
SSSTLVSIF

SEQ ID NO: 45438 - protein, 9 aa, Homo sapiens
  Table A; Target 45438; HLA-C*12:03; MAGEC1; ENSG00000155495; CTA
SSSTLVSIF

SEQ ID NO: 45439 - protein, 9 aa, Homo sapiens
  Table A; Target 45439; HLA-C*16:01; MAGEC1; ENSG00000155495; CTA
SSSTLVSIF

SEQ ID NO: 45440 - protein, 8 aa, Homo sapiens
  Table A; Target 45440; HLA-C*03:04; MAGEC1; ENSG00000155495; CTA
SSSTSLSL

SEQ ID NO: 45441 - protein, 9 aa, Homo sapiens
  Table A; Target 45441; HLA-B*46:01; MAGEC1; ENSG00000155495; CTA
SSSTSLSPF

SEQ ID NO: 45442 - protein, 9 aa, Homo sapiens
  Table A; Target 45442; HLA-C*16:01; MAGEC1; ENSG00000155495; CTA
SSSTSLSPF

SEQ ID NO: 45443 - protein, 9 aa, Homo sapiens
  Table A; Target 45443; HLA-A*32:01; MAGEC1; ENSG00000155495; CTA
SSSVMSPSF

SEQ ID NO: 45444 - protein, 9 aa, Homo sapiens
  Table A; Target 45444; HLA-B*15:03; MAGEC1; ENSG00000155495; CTA
SSSVMSPSF

SEQ ID NO: 45445 - protein, 9 aa, Homo sapiens
  Table A; Target 45445; HLA-B*46:01; MAGEC1; ENSG00000155495; CTA
SSSVMSPSF

SEQ ID NO: 45446 - protein, 9 aa, Homo sapiens
  Table A; Target 45446; HLA-B*57:01; MAGEC1; ENSG00000155495; CTA
SSSVMSPSF

SEQ ID NO: 45447 - protein, 9 aa, Homo sapiens
  Table A; Target 45447; HLA-B*58:01; MAGEC1; ENSG00000155495; CTA
SSSVMSPSF

SEQ ID NO: 45448 - protein, 9 aa, Homo sapiens
  Table A; Target 45448; HLA-C*02:02; MAGEC1; ENSG00000155495; CTA
SSSVMSPSF

SEQ ID NO: 45449 - protein, 9 aa, Homo sapiens
  Table A; Target 45449; HLA-C*04:01; MAGEC1; ENSG00000155495; CTA
SSSVMSPSF

SEQ ID NO: 45450 - protein, 9 aa, Homo sapiens
  Table A; Target 45450; HLA-C*16:01; MAGEC1; ENSG00000155495; CTA
SSSVMSPSF

SEQ ID NO: 45451 - protein, 9 aa, Homo sapiens
  Table A; Target 45451; HLA-C*16:04; MAGEC1; ENSG00000155495; CTA
SSSVMSPSF

SEQ ID NO: 45452 - protein, 8 aa, Homo sapiens
  Table A; Target 45452; HLA-C*16:01; MAGEC1; ENSG00000155495; CTA
SSTLLSIL

SEQ ID NO: 45453 - protein, 8 aa, Homo sapiens
  Table A; Target 45453; HLA-B*37:01; MAGEC1; ENSG00000155495; CTA
SSTLVSIF

SEQ ID NO: 45454 - protein, 8 aa, Homo sapiens
  Table A; Target 45454; HLA-B*37:01; MAGEC1; ENSG00000155495; CTA
SSTLVSLF

SEQ ID NO: 45455 - protein, 11 aa, Homo sapiens
  Table A; Target 45455; HLA-B*57:01; MAGEC1; ENSG00000155495; CTA
SSTPSSLPQSF

SEQ ID NO: 45456 - protein, 11 aa, Homo sapiens
  Table A; Target 45456; HLA-B*58:01; MAGEC1; ENSG00000155495; CTA
SSTPSSLPQSF

SEQ ID NO: 45457 - protein, 9 aa, Homo sapiens
  Table A; Target 45457; HLA-A*11:01; MAGEC1; ENSG00000155495; CTA
SSTSSSLSK

SEQ ID NO: 45458 - protein, 9 aa, Homo sapiens
  Table A; Target 45458; HLA-C*07:06; MAGEC1; ENSG00000155495; CTA
SSTSSSLSK

SEQ ID NO: 45459 - protein, 8 aa, Homo sapiens
  Table A; Target 45459; HLA-B*58:01; MAGEC1; ENSG00000155495; CTA
SSVMSPSF

SEQ ID NO: 45460 - protein, 8 aa, Homo sapiens
  Table A; Target 45460; HLA-C*16:01; MAGEC1; ENSG00000155495; CTA
SSVMSPSF

SEQ ID NO: 45461 - protein, 11 aa, Homo sapiens
  Table A; Target 45461; HLA-A*68:02; MAGEC1; ENSG00000155495; CTA
STFEGFAQSPL

SEQ ID NO: 45462 - protein, 11 aa, Homo sapiens
  Table A; Target 45462; HLA-A*25:01; MAGEC1; ENSG00000155495; CTA
STFEGFAQSSL

SEQ ID NO: 45463 - protein, 11 aa, Homo sapiens
  Table A; Target 45463; HLA-A*26:01; MAGEC1; ENSG00000155495; CTA
STFEGFAQSSL

SEQ ID NO: 45464 - protein, 11 aa, Homo sapiens
  Table A; Target 45464; HLA-A*68:02; MAGEC1; ENSG00000155495; CTA
STFEGFAQSSL

SEQ ID NO: 45465 - protein, 11 aa, Homo sapiens
  Table A; Target 45465; HLA-B*27:05; MAGEC1; ENSG00000155495; CTA
STFEGFAQSSL

SEQ ID NO: 45466 - protein, 11 aa, Homo sapiens
  Table A; Target 45466; HLA-C*01:02; MAGEC1; ENSG00000155495; CTA
STFEGFAQSSL

SEQ ID NO: 45467 - protein, 10 aa, Homo sapiens
  Table A; Target 45467; HLA-A*02:03; MAGEC1; ENSG00000155495; CTA
STFEGFPQSL

SEQ ID NO: 45468 - protein, 10 aa, Homo sapiens
  Table A; Target 45468; HLA-A*25:01; MAGEC1; ENSG00000155495; CTA
STFEGFPQSL

SEQ ID NO: 45469 - protein, 10 aa, Homo sapiens
  Table A; Target 45469; HLA-A*26:01; MAGEC1; ENSG00000155495; CTA
STFEGFPQSL

SEQ ID NO: 45470 - protein, 10 aa, Homo sapiens
  Table A; Target 45470; HLA-A*68:01; MAGEC1; ENSG00000155495; CTA
STFEGFPQSL

SEQ ID NO: 45471 - protein, 10 aa, Homo sapiens
  Table A; Target 45471; HLA-A*68:02; MAGEC1; ENSG00000155495; CTA
STFEGFPQSL

SEQ ID NO: 45472 - protein, 10 aa, Homo sapiens
  Table A; Target 45472; HLA-B*13:02; MAGEC1; ENSG00000155495; CTA
STFEGFPQSL

SEQ ID NO: 45473 - protein, 10 aa, Homo sapiens
  Table A; Target 45473; HLA-B*27:05; MAGEC1; ENSG00000155495; CTA
STFEGFPQSL

SEQ ID NO: 45474 - protein, 10 aa, Homo sapiens
  Table A; Target 45474; HLA-C*02:02; MAGEC1; ENSG00000155495; CTA
STFEGFPQSL

SEQ ID NO: 45475 - protein, 10 aa, Homo sapiens
  Table A; Target 45475; HLA-C*12:03; MAGEC1; ENSG00000155495; CTA
STFEGFPQSL

SEQ ID NO: 45476 - protein, 11 aa, Homo sapiens
  Table A; Target 45476; HLA-A*68:02; MAGEC1; ENSG00000155495; CTA
STFEGFPQSLL

SEQ ID NO: 45477 - protein, 10 aa, Homo sapiens
  Table A; Target 45477; HLA-B*57:01; MAGEC1; ENSG00000155495; CTA
STLLSLFQSF

SEQ ID NO: 45478 - protein, 10 aa, Homo sapiens
  Table A; Target 45478; HLA-A*25:01; MAGEC1; ENSG00000155495; CTA
STPSSLPQSF

SEQ ID NO: 45479 - protein, 10 aa, Homo sapiens
  Table A; Target 45479; HLA-A*26:01; MAGEC1; ENSG00000155495; CTA
STPSSLPQSF

SEQ ID NO: 45480 - protein, 9 aa, Homo sapiens
  Table A; Target 45480; HLA-A*02:01; MAGEC1; ENSG00000155495; CTA
SVLQIPVSA

SEQ ID NO: 45481 - protein, 9 aa, Homo sapiens
  Table A; Target 45481; HLA-A*32:01; MAGEC1; ENSG00000155495; CTA
SVLQIPVSA

SEQ ID NO: 45482 - protein, 9 aa, Homo sapiens
  Table A; Target 45482; HLA-B*54:01; MAGEC1; ENSG00000155495; CTA
SVLQIPVSA

SEQ ID NO: 45483 - protein, 9 aa, Homo sapiens
  Table A; Target 45483; HLA-B*55:01; MAGEC1; ENSG00000155495; CTA
SVLQIPVSA

SEQ ID NO: 45484 - protein, 9 aa, Homo sapiens
  Table A; Target 45484; HLA-B*56:01; MAGEC1; ENSG00000155495; CTA
SVLQIPVSA

SEQ ID NO: 45485 - protein, 10 aa, Homo sapiens
  Table A; Target 45485; HLA-B*56:01; MAGEC1; ENSG00000155495; CTA
SVLQIPVSAA

SEQ ID NO: 45486 - protein, 10 aa, Homo sapiens
  Table A; Target 45486; HLA-A*26:01; MAGEC1; ENSG00000155495; CTA
SVMSPSFSSE

SEQ ID NO: 45487 - protein, 10 aa, Homo sapiens
  Table A; Target 45487; HLA-A*31:01; MAGEC1; ENSG00000155495; CTA
SVMSPSFSSE

SEQ ID NO: 45488 - protein, 10 aa, Homo sapiens
  Table A; Target 45488; HLA-C*01:02; MAGEC1; ENSG00000155495; CTA
SVMSPSFSSE

SEQ ID NO: 45489 - protein, 8 aa, Homo sapiens
  Table A; Target 45489; HLA-A*23:01; MAGEC1; ENSG00000155495; CTA
SYTLASLL

SEQ ID NO: 45490 - protein, 8 aa, Homo sapiens
  Table A; Target 45490; HLA-A*24:02; MAGEC1; ENSG00000155495; CTA
SYTLASLL

SEQ ID NO: 45491 - protein, 8 aa, Homo sapiens
  Table A; Target 45491; HLA-C*04:01; MAGEC1; ENSG00000155495; CTA
SYTLASLL

SEQ ID NO: 45492 - protein, 8 aa, Homo sapiens
  Table A; Target 45492; HLA-C*14:02; MAGEC1; ENSG00000155495; CTA
SYTLASLL

SEQ ID NO: 45493 - protein, 8 aa, Homo sapiens
  Table A; Target 45493; HLA-A*24:02; MAGEC1; ENSG00000155495; CTA
SYTLLSLF

SEQ ID NO: 45494 - protein, 8 aa, Homo sapiens
  Table A; Target 45494; HLA-A*23:01; MAGEC1; ENSG00000155495; CTA
SYVFVNTL

SEQ ID NO: 45495 - protein, 8 aa, Homo sapiens
  Table A; Target 45495; HLA-A*24:02; MAGEC1; ENSG00000155495; CTA
SYVFVNTL

SEQ ID NO: 45496 - protein, 8 aa, Homo sapiens
  Table A; Target 45496; HLA-C*14:02; MAGEC1; ENSG00000155495; CTA
SYVFVNTL

SEQ ID NO: 45497 - protein, 11 aa, Homo sapiens
  Table A; Target 45497; HLA-B*35:01; MAGEC1; ENSG00000155495; CTA
TATESASSSVM

SEQ ID NO: 45498 - protein, 11 aa, Homo sapiens
  Table A; Target 45498; HLA-B*35:03; MAGEC1; ENSG00000155495; CTA
TATESASSSVM

SEQ ID NO: 45499 - protein, 11 aa, Homo sapiens
  Table A; Target 45499; HLA-B*39:01; MAGEC1; ENSG00000155495; CTA
TATESASSSVM

SEQ ID NO: 45500 - protein, 11 aa, Homo sapiens
  Table A; Target 45500; HLA-C*03:03; MAGEC1; ENSG00000155495; CTA
TATESASSSVM

SEQ ID NO: 45501 - protein, 11 aa, Homo sapiens
  Table A; Target 45501; HLA-C*03:04; MAGEC1; ENSG00000155495; CTA
TATESASSSVM

SEQ ID NO: 45502 - protein, 11 aa, Homo sapiens
  Table A; Target 45502; HLA-C*07:04; MAGEC1; ENSG00000155495; CTA
TATESASSSVM

SEQ ID NO: 45503 - protein, 8 aa, Homo sapiens
  Table A; Target 45503; HLA-B*49:01; MAGEC1; ENSG00000155495; CTA
TESASSSV

SEQ ID NO: 45504 - protein, 9 aa, Homo sapiens
  Table A; Target 45504; HLA-A*30:01; MAGEC1; ENSG00000155495; CTA
TESASSSVM

SEQ ID NO: 45505 - protein, 9 aa, Homo sapiens
  Table A; Target 45505; HLA-B*15:03; MAGEC1; ENSG00000155495; CTA
TESASSSVM

SEQ ID NO: 45506 - protein, 9 aa, Homo sapiens
  Table A; Target 45506; HLA-B*18:01; MAGEC1; ENSG00000155495; CTA
TESASSSVM

SEQ ID NO: 45507 - protein, 9 aa, Homo sapiens
  Table A; Target 45507; HLA-B*35:01; MAGEC1; ENSG00000155495; CTA
TESASSSVM

SEQ ID NO: 45508 - protein, 9 aa, Homo sapiens
  Table A; Target 45508; HLA-B*37:01; MAGEC1; ENSG00000155495; CTA
TESASSSVM

SEQ ID NO: 45509 - protein, 9 aa, Homo sapiens
  Table A; Target 45509; HLA-B*39:01; MAGEC1; ENSG00000155495; CTA
TESASSSVM

SEQ ID NO: 45510 - protein, 9 aa, Homo sapiens
  Table A; Target 45510; HLA-B*40:01; MAGEC1; ENSG00000155495; CTA
TESASSSVM

SEQ ID NO: 45511 - protein, 9 aa, Homo sapiens
  Table A; Target 45511; HLA-B*40:02; MAGEC1; ENSG00000155495; CTA
TESASSSVM

SEQ ID NO: 45512 - protein, 9 aa, Homo sapiens
  Table A; Target 45512; HLA-B*44:03; MAGEC1; ENSG00000155495; CTA
TESASSSVM

SEQ ID NO: 45513 - protein, 9 aa, Homo sapiens
  Table A; Target 45513; HLA-B*49:01; MAGEC1; ENSG00000155495; CTA
TESASSSVM

SEQ ID NO: 45514 - protein, 9 aa, Homo sapiens
  Table A; Target 45514; HLA-C*02:02; MAGEC1; ENSG00000155495; CTA
TESASSSVM

SEQ ID NO: 45515 - protein, 9 aa, Homo sapiens
  Table A; Target 45515; HLA-C*03:03; MAGEC1; ENSG00000155495; CTA
TESASSSVM

SEQ ID NO: 45516 - protein, 9 aa, Homo sapiens
  Table A; Target 45516; HLA-C*07:04; MAGEC1; ENSG00000155495; CTA
TESASSSVM

SEQ ID NO: 45517 - protein, 9 aa, Homo sapiens
  Table A; Target 45517; HLA-C*16:04; MAGEC1; ENSG00000155495; CTA
TESASSSVM

SEQ ID NO: 45518 - protein, 10 aa, Homo sapiens
  Table A; Target 45518; HLA-C*01:02; MAGEC1; ENSG00000155495; CTA
TFEGFAQSSL

SEQ ID NO: 45519 - protein, 10 aa, Homo sapiens
  Table A; Target 45519; HLA-C*14:02; MAGEC1; ENSG00000155495; CTA
TFEGFAQSSL

SEQ ID NO: 45520 - protein, 9 aa, Homo sapiens
  Table A; Target 45520; HLA-A*23:01; MAGEC1; ENSG00000155495; CTA
TFEGFPQSL

SEQ ID NO: 45521 - protein, 9 aa, Homo sapiens
  Table A; Target 45521; HLA-A*32:01; MAGEC1; ENSG00000155495; CTA
TFEGFPQSL

SEQ ID NO: 45522 - protein, 9 aa, Homo sapiens
  Table A; Target 45522; HLA-B*35:01; MAGEC1; ENSG00000155495; CTA
TFEGFPQSL

SEQ ID NO: 45523 - protein, 9 aa, Homo sapiens
  Table A; Target 45523; HLA-B*35:03; MAGEC1; ENSG00000155495; CTA
TFEGFPQSL

SEQ ID NO: 45524 - protein, 9 aa, Homo sapiens
  Table A; Target 45524; HLA-C*01:02; MAGEC1; ENSG00000155495; CTA
TFEGFPQSL

SEQ ID NO: 45525 - protein, 9 aa, Homo sapiens
  Table A; Target 45525; HLA-C*04:01; MAGEC1; ENSG00000155495; CTA
TFEGFPQSL

SEQ ID NO: 45526 - protein, 9 aa, Homo sapiens
  Table A; Target 45526; HLA-C*14:02; MAGEC1; ENSG00000155495; CTA
TFEGFPQSL

SEQ ID NO: 45527 - protein, 8 aa, Homo sapiens
  Table A; Target 45527; HLA-C*12:03; MAGEC1; ENSG00000155495; CTA
TGYFPVIF

SEQ ID NO: 45528 - protein, 9 aa, Homo sapiens
  Table A; Target 45528; HLA-A*03:01; MAGEC1; ENSG00000155495; CTA
TGYFPVIFR

SEQ ID NO: 45529 - protein, 9 aa, Homo sapiens
  Table A; Target 45529; HLA-A*11:01; MAGEC1; ENSG00000155495; CTA
TGYFPVIFR

SEQ ID NO: 45530 - protein, 9 aa, Homo sapiens
  Table A; Target 45530; HLA-A*31:01; MAGEC1; ENSG00000155495; CTA
TGYFPVIFR

SEQ ID NO: 45531 - protein, 9 aa, Homo sapiens
  Table A; Target 45531; HLA-A*33:01; MAGEC1; ENSG00000155495; CTA
TGYFPVIFR

SEQ ID NO: 45532 - protein, 9 aa, Homo sapiens
  Table A; Target 45532; HLA-A*33:03; MAGEC1; ENSG00000155495; CTA
TGYFPVIFR

SEQ ID NO: 45533 - protein, 9 aa, Homo sapiens
  Table A; Target 45533; HLA-A*68:01; MAGEC1; ENSG00000155495; CTA
TGYFPVIFR

SEQ ID NO: 45534 - protein, 9 aa, Homo sapiens
  Table A; Target 45534; HLA-A*68:02; MAGEC1; ENSG00000155495; CTA
TGYFPVIFR

SEQ ID NO: 45535 - protein, 9 aa, Homo sapiens
  Table A; Target 45535; HLA-C*07:06; MAGEC1; ENSG00000155495; CTA
TGYFPVIFR

SEQ ID NO: 45536 - protein, 11 aa, Homo sapiens
  Table A; Target 45536; HLA-B*38:01; MAGEC1; ENSG00000155495; CTA
THSPLQIVPSL

SEQ ID NO: 45537 - protein, 9 aa, Homo sapiens
  Table A; Target 45537; HLA-B*15:03; MAGEC1; ENSG00000155495; CTA
TKVWVQEHY

SEQ ID NO: 45538 - protein, 9 aa, Homo sapiens
  Table A; Target 45538; HLA-A*02:01; MAGEC1; ENSG00000155495; CTA
TLDEKVDEL

SEQ ID NO: 45539 - protein, 9 aa, Homo sapiens
  Table A; Target 45539; HLA-A*02:04; MAGEC1; ENSG00000155495; CTA
TLDEKVDEL

SEQ ID NO: 45540 - protein, 9 aa, Homo sapiens
  Table A; Target 45540; HLA-A*02:07; MAGEC1; ENSG00000155495; CTA
TLDEKVDEL

SEQ ID NO: 45541 - protein, 9 aa, Homo sapiens
  Table A; Target 45541; HLA-B*35:03; MAGEC1; ENSG00000155495; CTA
TLDEKVDEL

SEQ ID NO: 45542 - protein, 9 aa, Homo sapiens
  Table A; Target 45542; HLA-B*38:01; MAGEC1; ENSG00000155495; CTA
TLDEKVDEL

SEQ ID NO: 45543 - protein, 9 aa, Homo sapiens
  Table A; Target 45543; HLA-B*39:01; MAGEC1; ENSG00000155495; CTA
TLDEKVDEL

SEQ ID NO: 45544 - protein, 9 aa, Homo sapiens
  Table A; Target 45544; HLA-B*55:01; MAGEC1; ENSG00000155495; CTA
TLDEKVDEL

SEQ ID NO: 45545 - protein, 9 aa, Homo sapiens
  Table A; Target 45545; HLA-C*04:01; MAGEC1; ENSG00000155495; CTA
TLDEKVDEL

SEQ ID NO: 45546 - protein, 9 aa, Homo sapiens
  Table A; Target 45546; HLA-C*05:01; MAGEC1; ENSG00000155495; CTA
TLDEKVDEL

SEQ ID NO: 45547 - protein, 9 aa, Homo sapiens
  Table A; Target 45547; HLA-A*02:07; MAGEC1; ENSG00000155495; CTA
TLLSLFQSF

SEQ ID NO: 45548 - protein, 9 aa, Homo sapiens
  Table A; Target 45548; HLA-A*23:01; MAGEC1; ENSG00000155495; CTA
TLLSLFQSF

SEQ ID NO: 45549 - protein, 9 aa, Homo sapiens
  Table A; Target 45549; HLA-A*24:02; MAGEC1; ENSG00000155495; CTA
TLLSLFQSF

SEQ ID NO: 45550 - protein, 9 aa, Homo sapiens
  Table A; Target 45550; HLA-A*29:02; MAGEC1; ENSG00000155495; CTA
TLLSLFQSF

SEQ ID NO: 45551 - protein, 9 aa, Homo sapiens
  Table A; Target 45551; HLA-B*44:02; MAGEC1; ENSG00000155495; CTA
TLLSLFQSF

SEQ ID NO: 45552 - protein, 11 aa, Homo sapiens
  Table A; Target 45552; HLA-A*03:01; MAGEC1; ENSG00000155495; CTA
TLYPLQSPQSR

SEQ ID NO: 45553 - protein, 11 aa, Homo sapiens
  Table A; Target 45553; HLA-A*03:02; MAGEC1; ENSG00000155495; CTA
TLYPLQSPQSR

SEQ ID NO: 45554 - protein, 11 aa, Homo sapiens
  Table A; Target 45554; HLA-A*11:01; MAGEC1; ENSG00000155495; CTA
TLYPLQSPQSR

SEQ ID NO: 45555 - protein, 11 aa, Homo sapiens
  Table A; Target 45555; HLA-A*31:01; MAGEC1; ENSG00000155495; CTA
TLYPLQSPQSR

SEQ ID NO: 45556 - protein, 11 aa, Homo sapiens
  Table A; Target 45556; HLA-A*33:01; MAGEC1; ENSG00000155495; CTA
TLYPLQSPQSR

SEQ ID NO: 45557 - protein, 11 aa, Homo sapiens
  Table A; Target 45557; HLA-A*33:03; MAGEC1; ENSG00000155495; CTA
TLYPLQSPQSR

SEQ ID NO: 45558 - protein, 11 aa, Homo sapiens
  Table A; Target 45558; HLA-A*68:01; MAGEC1; ENSG00000155495; CTA
TLYPLQSPQSR

SEQ ID NO: 45559 - protein, 11 aa, Homo sapiens
  Table A; Target 45559; HLA-C*07:06; MAGEC1; ENSG00000155495; CTA
TLYPLQSPQSR

SEQ ID NO: 45560 - protein, 9 aa, Homo sapiens
  Table A; Target 45560; HLA-B*07:02; MAGEC1; ENSG00000155495; CTA
TPSSLPQSF

SEQ ID NO: 45561 - protein, 9 aa, Homo sapiens
  Table A; Target 45561; HLA-B*15:03; MAGEC1; ENSG00000155495; CTA
TPSSLPQSF

SEQ ID NO: 45562 - protein, 9 aa, Homo sapiens
  Table A; Target 45562; HLA-B*18:01; MAGEC1; ENSG00000155495; CTA
TPSSLPQSF

SEQ ID NO: 45563 - protein, 9 aa, Homo sapiens
  Table A; Target 45563; HLA-B*35:01; MAGEC1; ENSG00000155495; CTA
TPSSLPQSF

SEQ ID NO: 45564 - protein, 9 aa, Homo sapiens
  Table A; Target 45564; HLA-B*35:03; MAGEC1; ENSG00000155495; CTA
TPSSLPQSF

SEQ ID NO: 45565 - protein, 9 aa, Homo sapiens
  Table A; Target 45565; HLA-B*38:01; MAGEC1; ENSG00000155495; CTA
TPSSLPQSF

SEQ ID NO: 45566 - protein, 9 aa, Homo sapiens
  Table A; Target 45566; HLA-B*55:01; MAGEC1; ENSG00000155495; CTA
TPSSLPQSF

SEQ ID NO: 45567 - protein, 9 aa, Homo sapiens
  Table A; Target 45567; HLA-C*07:02; MAGEC1; ENSG00000155495; CTA
TPSSLPQSF

SEQ ID NO: 45568 - protein, 9 aa, Homo sapiens
  Table A; Target 45568; HLA-A*23:01; MAGEC1; ENSG00000155495; CTA
TSLSLPQSF

SEQ ID NO: 45569 - protein, 9 aa, Homo sapiens
  Table A; Target 45569; HLA-A*29:02; MAGEC1; ENSG00000155495; CTA
TSLSLPQSF

SEQ ID NO: 45570 - protein, 9 aa, Homo sapiens
  Table A; Target 45570; HLA-A*30:02; MAGEC1; ENSG00000155495; CTA
TSLSLPQSF

SEQ ID NO: 45571 - protein, 9 aa, Homo sapiens
  Table A; Target 45571; HLA-A*32:01; MAGEC1; ENSG00000155495; CTA
TSLSLPQSF

SEQ ID NO: 45572 - protein, 9 aa, Homo sapiens
  Table A; Target 45572; HLA-A*33:03; MAGEC1; ENSG00000155495; CTA
TSLSLPQSF

SEQ ID NO: 45573 - protein, 9 aa, Homo sapiens
  Table A; Target 45573; HLA-B*15:03; MAGEC1; ENSG00000155495; CTA
TSLSLPQSF

SEQ ID NO: 45574 - protein, 9 aa, Homo sapiens
  Table A; Target 45574; HLA-B*18:01; MAGEC1; ENSG00000155495; CTA
TSLSLPQSF

SEQ ID NO: 45575 - protein, 9 aa, Homo sapiens
  Table A; Target 45575; HLA-B*35:01; MAGEC1; ENSG00000155495; CTA
TSLSLPQSF

SEQ ID NO: 45576 - protein, 9 aa, Homo sapiens
  Table A; Target 45576; HLA-B*46:01; MAGEC1; ENSG00000155495; CTA
TSLSLPQSF

SEQ ID NO: 45577 - protein, 9 aa, Homo sapiens
  Table A; Target 45577; HLA-B*57:01; MAGEC1; ENSG00000155495; CTA
TSLSLPQSF

SEQ ID NO: 45578 - protein, 9 aa, Homo sapiens
  Table A; Target 45578; HLA-B*58:01; MAGEC1; ENSG00000155495; CTA
TSLSLPQSF

SEQ ID NO: 45579 - protein, 9 aa, Homo sapiens
  Table A; Target 45579; HLA-C*07:06; MAGEC1; ENSG00000155495; CTA
TSLSLPQSF

SEQ ID NO: 45580 - protein, 9 aa, Homo sapiens
  Table A; Target 45580; HLA-C*16:01; MAGEC1; ENSG00000155495; CTA
TSLSLPQSF

SEQ ID NO: 45581 - protein, 9 aa, Homo sapiens
  Table A; Target 45581; HLA-C*16:04; MAGEC1; ENSG00000155495; CTA
TSLSLPQSF

SEQ ID NO: 45582 - protein, 10 aa, Homo sapiens
  Table A; Target 45582; HLA-A*25:01; MAGEC1; ENSG00000155495; CTA
TVPITFPSSY

SEQ ID NO: 45583 - protein, 10 aa, Homo sapiens
  Table A; Target 45583; HLA-A*26:01; MAGEC1; ENSG00000155495; CTA
TVPITFPSSY

SEQ ID NO: 45584 - protein, 10 aa, Homo sapiens
  Table A; Target 45584; HLA-A*30:02; MAGEC1; ENSG00000155495; CTA
TVPITFPSSY

SEQ ID NO: 45585 - protein, 10 aa, Homo sapiens
  Table A; Target 45585; HLA-C*01:02; MAGEC1; ENSG00000155495; CTA
TVPITFPSSY

SEQ ID NO: 45586 - protein, 10 aa, Homo sapiens
  Table A; Target 45586; HLA-C*07:04; MAGEC1; ENSG00000155495; CTA
TVPITFPSSY

SEQ ID NO: 45587 - protein, 8 aa, Homo sapiens
  Table A; Target 45587; HLA-B*37:01; MAGEC1; ENSG00000155495; CTA
VDELARFL

SEQ ID NO: 45588 - protein, 9 aa, Homo sapiens
  Table A; Target 45588; HLA-A*23:01; MAGEC1; ENSG00000155495; CTA
VDPDDSYVF

SEQ ID NO: 45589 - protein, 9 aa, Homo sapiens
  Table A; Target 45589; HLA-A*24:02; MAGEC1; ENSG00000155495; CTA
VDPDDSYVF

SEQ ID NO: 45590 - protein, 8 aa, Homo sapiens
  Table A; Target 45590; HLA-B*18:01; MAGEC1; ENSG00000155495; CTA
VEERAQAI

SEQ ID NO: 45591 - protein, 8 aa, Homo sapiens
  Table A; Target 45591; HLA-B*49:01; MAGEC1; ENSG00000155495; CTA
VEERAQAI

SEQ ID NO: 45592 - protein, 9 aa, Homo sapiens
  Table A; Target 45592; HLA-B*40:01; MAGEC1; ENSG00000155495; CTA
VEERAQAII

SEQ ID NO: 45593 - protein, 9 aa, Homo sapiens
  Table A; Target 45593; HLA-B*49:01; MAGEC1; ENSG00000155495; CTA
VEERAQAII

SEQ ID NO: 45594 - protein, 8 aa, Homo sapiens
  Table A; Target 45594; HLA-A*23:01; MAGEC1; ENSG00000155495; CTA
VFVNTLDL

SEQ ID NO: 45595 - protein, 8 aa, Homo sapiens
  Table A; Target 45595; HLA-C*14:02; MAGEC1; ENSG00000155495; CTA
VFVNTLDL

SEQ ID NO: 45596 - protein, 9 aa, Homo sapiens
  Table A; Target 45596; HLA-B*08:01; MAGEC1; ENSG00000155495; CTA
VIKRKVVEF

SEQ ID NO: 45597 - protein, 9 aa, Homo sapiens
  Table A; Target 45597; HLA-A*02:01; MAGEC1; ENSG00000155495; CTA
VIWDVLSGI

SEQ ID NO: 45598 - protein, 9 aa, Homo sapiens
  Table A; Target 45598; HLA-A*02:03; MAGEC1; ENSG00000155495; CTA
VIWDVLSGI

SEQ ID NO: 45599 - protein, 9 aa, Homo sapiens
  Table A; Target 45599; HLA-A*02:04; MAGEC1; ENSG00000155495; CTA
VIWDVLSGI

SEQ ID NO: 45600 - protein, 9 aa, Homo sapiens
  Table A; Target 45600; HLA-A*02:07; MAGEC1; ENSG00000155495; CTA
VIWDVLSGI

SEQ ID NO: 45601 - protein, 11 aa, Homo sapiens
  Table A; Target 45601; HLA-A*02:01; MAGEC1; ENSG00000155495; CTA
VIWDVLSGIGV

SEQ ID NO: 45602 - protein, 11 aa, Homo sapiens
  Table A; Target 45602; HLA-A*02:04; MAGEC1; ENSG00000155495; CTA
VIWDVLSGIGV

SEQ ID NO: 45603 - protein, 11 aa, Homo sapiens
  Table A; Target 45603; HLA-A*02:07; MAGEC1; ENSG00000155495; CTA
VIWDVLSGIGV

SEQ ID NO: 45604 - protein, 10 aa, Homo sapiens
  Table A; Target 45604; HLA-B*15:03; MAGEC1; ENSG00000155495; CTA
VKQPITKAEM

SEQ ID NO: 45605 - protein, 9 aa, Homo sapiens
  Table A; Target 45605; HLA-A*02:01; MAGEC1; ENSG00000155495; CTA
VLQIPVSAA

SEQ ID NO: 45606 - protein, 9 aa, Homo sapiens
  Table A; Target 45606; HLA-A*02:03; MAGEC1; ENSG00000155495; CTA
VLQIPVSAA

SEQ ID NO: 45607 - protein, 9 aa, Homo sapiens
  Table A; Target 45607; HLA-C*14:02; MAGEC1; ENSG00000155495; CTA
VLQIPVSAA

SEQ ID NO: 45608 - protein, 9 aa, Homo sapiens
  Table A; Target 45608; HLA-A*02:01; MAGEC1; ENSG00000155495; CTA
VLSGIGVRA

SEQ ID NO: 45609 - protein, 9 aa, Homo sapiens
  Table A; Target 45609; HLA-A*02:03; MAGEC1; ENSG00000155495; CTA
VLSGIGVRA

SEQ ID NO: 45610 - protein, 9 aa, Homo sapiens
  Table A; Target 45610; HLA-A*02:04; MAGEC1; ENSG00000155495; CTA
VLSGIGVRA

SEQ ID NO: 45611 - protein, 11 aa, Homo sapiens
  Table A; Target 45611; HLA-A*31:01; MAGEC1; ENSG00000155495; CTA
VLSGIGVRAGR

SEQ ID NO: 45612 - protein, 9 aa, Homo sapiens
  Table A; Target 45612; HLA-C*01:02; MAGEC1; ENSG00000155495; CTA
VMSPSFSSE

SEQ ID NO: 45613 - protein, 8 aa, Homo sapiens
  Table A; Target 45613; HLA-B*51:01; MAGEC1; ENSG00000155495; CTA
VPITFPSS

SEQ ID NO: 45614 - protein, 9 aa, Homo sapiens
  Table A; Target 45614; HLA-A*01:01; MAGEC1; ENSG00000155495; CTA
VPITFPSSY

SEQ ID NO: 45615 - protein, 9 aa, Homo sapiens
  Table A; Target 45615; HLA-A*23:01; MAGEC1; ENSG00000155495; CTA
VPITFPSSY

SEQ ID NO: 45616 - protein, 9 aa, Homo sapiens
  Table A; Target 45616; HLA-A*25:01; MAGEC1; ENSG00000155495; CTA
VPITFPSSY

SEQ ID NO: 45617 - protein, 9 aa, Homo sapiens
  Table A; Target 45617; HLA-A*26:01; MAGEC1; ENSG00000155495; CTA
VPITFPSSY

SEQ ID NO: 45618 - protein, 9 aa, Homo sapiens
  Table A; Target 45618; HLA-A*29:02; MAGEC1; ENSG00000155495; CTA
VPITFPSSY

SEQ ID NO: 45619 - protein, 9 aa, Homo sapiens
  Table A; Target 45619; HLA-A*30:02; MAGEC1; ENSG00000155495; CTA
VPITFPSSY

SEQ ID NO: 45620 - protein, 9 aa, Homo sapiens
  Table A; Target 45620; HLA-B*07:02; MAGEC1; ENSG00000155495; CTA
VPITFPSSY

SEQ ID NO: 45621 - protein, 9 aa, Homo sapiens
  Table A; Target 45621; HLA-B*15:01; MAGEC1; ENSG00000155495; CTA
VPITFPSSY

SEQ ID NO: 45622 - protein, 9 aa, Homo sapiens
  Table A; Target 45622; HLA-B*15:03; MAGEC1; ENSG00000155495; CTA
VPITFPSSY

SEQ ID NO: 45623 - protein, 9 aa, Homo sapiens
  Table A; Target 45623; HLA-B*18:01; MAGEC1; ENSG00000155495; CTA
VPITFPSSY

SEQ ID NO: 45624 - protein, 9 aa, Homo sapiens
  Table A; Target 45624; HLA-B*35:03; MAGEC1; ENSG00000155495; CTA
VPITFPSSY

SEQ ID NO: 45625 - protein, 9 aa, Homo sapiens
  Table A; Target 45625; HLA-B*46:01; MAGEC1; ENSG00000155495; CTA
VPITFPSSY

SEQ ID NO: 45626 - protein, 9 aa, Homo sapiens
  Table A; Target 45626; HLA-B*51:01; MAGEC1; ENSG00000155495; CTA
VPITFPSSY

SEQ ID NO: 45627 - protein, 9 aa, Homo sapiens
  Table A; Target 45627; HLA-B*54:01; MAGEC1; ENSG00000155495; CTA
VPITFPSSY

SEQ ID NO: 45628 - protein, 9 aa, Homo sapiens
  Table A; Target 45628; HLA-B*55:01; MAGEC1; ENSG00000155495; CTA
VPITFPSSY

SEQ ID NO: 45629 - protein, 9 aa, Homo sapiens
  Table A; Target 45629; HLA-B*56:01; MAGEC1; ENSG00000155495; CTA
VPITFPSSY

SEQ ID NO: 45630 - protein, 9 aa, Homo sapiens
  Table A; Target 45630; HLA-C*02:02; MAGEC1; ENSG00000155495; CTA
VPITFPSSY

SEQ ID NO: 45631 - protein, 9 aa, Homo sapiens
  Table A; Target 45631; HLA-C*07:02; MAGEC1; ENSG00000155495; CTA
VPITFPSSY

SEQ ID NO: 45632 - protein, 9 aa, Homo sapiens
  Table A; Target 45632; HLA-C*14:02; MAGEC1; ENSG00000155495; CTA
VPITFPSSY

SEQ ID NO: 45633 - protein, 9 aa, Homo sapiens
  Table A; Target 45633; HLA-A*30:02; MAGEC1; ENSG00000155495; CTA
VPNSSPPRY

SEQ ID NO: 45634 - protein, 9 aa, Homo sapiens
  Table A; Target 45634; HLA-B*35:01; MAGEC1; ENSG00000155495; CTA
VPNSSPPRY

SEQ ID NO: 45635 - protein, 9 aa, Homo sapiens
  Table A; Target 45635; HLA-B*55:01; MAGEC1; ENSG00000155495; CTA
VPNSSPPRY

SEQ ID NO: 45636 - protein, 11 aa, Homo sapiens
  Table A; Target 45636; HLA-A*23:01; MAGEC1; ENSG00000155495; CTA
VPNSSPPRYEF

SEQ ID NO: 45637 - protein, 11 aa, Homo sapiens
  Table A; Target 45637; HLA-B*07:02; MAGEC1; ENSG00000155495; CTA
VPNSSPPRYEF

SEQ ID NO: 45638 - protein, 11 aa, Homo sapiens
  Table A; Target 45638; HLA-B*35:01; MAGEC1; ENSG00000155495; CTA
VPNSSPPRYEF

SEQ ID NO: 45639 - protein, 11 aa, Homo sapiens
  Table A; Target 45639; HLA-B*55:01; MAGEC1; ENSG00000155495; CTA
VPNSSPPRYEF

SEQ ID NO: 45640 - protein, 8 aa, Homo sapiens
  Table A; Target 45640; HLA-A*01:01; MAGEC1; ENSG00000155495; CTA
VQEHYLEY

SEQ ID NO: 45641 - protein, 9 aa, Homo sapiens
  Table A; Target 45641; HLA-B*27:05; MAGEC1; ENSG00000155495; CTA
VQSPLQNPA

SEQ ID NO: 45642 - protein, 9 aa, Homo sapiens
  Table A; Target 45642; HLA-B*39:01; MAGEC1; ENSG00000155495; CTA
VQSPLQNPA

SEQ ID NO: 45643 - protein, 9 aa, Homo sapiens
  Table A; Target 45643; HLA-C*07:04; MAGEC1; ENSG00000155495; CTA
VQSPLQNPA

SEQ ID NO: 45644 - protein, 9 aa, Homo sapiens
  Table A; Target 45644; HLA-B*46:01; MAGEC1; ENSG00000155495; CTA
VSAASSSTL

SEQ ID NO: 45645 - protein, 9 aa, Homo sapiens
  Table A; Target 45645; HLA-B*58:01; MAGEC1; ENSG00000155495; CTA
VSAASSSTL

SEQ ID NO: 45646 - protein, 9 aa, Homo sapiens
  Table A; Target 45646; HLA-C*01:02; MAGEC1; ENSG00000155495; CTA
VSAASSSTL

SEQ ID NO: 45647 - protein, 9 aa, Homo sapiens
  Table A; Target 45647; HLA-C*03:03; MAGEC1; ENSG00000155495; CTA
VSAASSSTL

SEQ ID NO: 45648 - protein, 9 aa, Homo sapiens
  Table A; Target 45648; HLA-C*03:04; MAGEC1; ENSG00000155495; CTA
VSAASSSTL

SEQ ID NO: 45649 - protein, 9 aa, Homo sapiens
  Table A; Target 45649; HLA-C*05:01; MAGEC1; ENSG00000155495; CTA
VSAASSSTL

SEQ ID NO: 45650 - protein, 9 aa, Homo sapiens
  Table A; Target 45650; HLA-B*46:01; MAGEC1; ENSG00000155495; CTA
VSPSFSSTL

SEQ ID NO: 45651 - protein, 9 aa, Homo sapiens
  Table A; Target 45651; HLA-C*01:02; MAGEC1; ENSG00000155495; CTA
VSPSFSSTL

SEQ ID NO: 45652 - protein, 9 aa, Homo sapiens
  Table A; Target 45652; HLA-C*03:04; MAGEC1; ENSG00000155495; CTA
VSPSFSSTL

SEQ ID NO: 45653 - protein, 9 aa, Homo sapiens
  Table A; Target 45653; HLA-C*16:01; MAGEC1; ENSG00000155495; CTA
VSPSFSSTL

SEQ ID NO: 45654 - protein, 9 aa, Homo sapiens
  Table A; Target 45654; HLA-C*01:02; MAGEC1; ENSG00000155495; CTA
VSPSSSSTL

SEQ ID NO: 45655 - protein, 9 aa, Homo sapiens
  Table A; Target 45655; HLA-C*03:04; MAGEC1; ENSG00000155495; CTA
VSPSSSSTL

SEQ ID NO: 45656 - protein, 9 aa, Homo sapiens
  Table A; Target 45656; HLA-B*46:01; MAGEC1; ENSG00000155495; CTA
VSRSFSSTL

SEQ ID NO: 45657 - protein, 9 aa, Homo sapiens
  Table A; Target 45657; HLA-C*07:02; MAGEC1; ENSG00000155495; CTA
VSRSFSSTL

SEQ ID NO: 45658 - protein, 9 aa, Homo sapiens
  Table A; Target 45658; HLA-C*02:02; MAGEC1; ENSG00000155495; CTA
VSSSFSYTL

SEQ ID NO: 45659 - protein, 9 aa, Homo sapiens
  Table A; Target 45659; HLA-C*16:01; MAGEC1; ENSG00000155495; CTA
VSSSFSYTL

SEQ ID NO: 45660 - protein, 9 aa, Homo sapiens
  Table A; Target 45660; HLA-C*03:03; MAGEC1; ENSG00000155495; CTA
VSSSSSSTL

SEQ ID NO: 45661 - protein, 9 aa, Homo sapiens
  Table A; Target 45661; HLA-C*03:04; MAGEC1; ENSG00000155495; CTA
VSSSSSSTL

SEQ ID NO: 45662 - protein, 9 aa, Homo sapiens
  Table A; Target 45662; HLA-C*05:01; MAGEC1; ENSG00000155495; CTA
VSSSSSSTL

SEQ ID NO: 45663 - protein, 9 aa, Homo sapiens
  Table A; Target 45663; HLA-C*16:01; MAGEC1; ENSG00000155495; CTA
VSSSSSSTL

SEQ ID NO: 45664 - protein, 9 aa, Homo sapiens
  Table A; Target 45664; HLA-A*03:02; MAGEC1; ENSG00000155495; CTA
VVEFLAMLK

SEQ ID NO: 45665 - protein, 9 aa, Homo sapiens
  Table A; Target 45665; HLA-A*11:01; MAGEC1; ENSG00000155495; CTA
VVEFLAMLK

SEQ ID NO: 45666 - protein, 10 aa, Homo sapiens
  Table A; Target 45666; HLA-A*29:02; MAGEC1; ENSG00000155495; CTA
VWVQEHYLEY

SEQ ID NO: 45667 - protein, 9 aa, Homo sapiens
  Table A; Target 45667; HLA-A*01:01; MAGEC1; ENSG00000155495; CTA
WVQEHYLEY

SEQ ID NO: 45668 - protein, 9 aa, Homo sapiens
  Table A; Target 45668; HLA-A*25:01; MAGEC1; ENSG00000155495; CTA
WVQEHYLEY

SEQ ID NO: 45669 - protein, 9 aa, Homo sapiens
  Table A; Target 45669; HLA-A*26:01; MAGEC1; ENSG00000155495; CTA
WVQEHYLEY

SEQ ID NO: 45670 - protein, 9 aa, Homo sapiens
  Table A; Target 45670; HLA-A*29:02; MAGEC1; ENSG00000155495; CTA
WVQEHYLEY

SEQ ID NO: 45671 - protein, 9 aa, Homo sapiens
  Table A; Target 45671; HLA-A*30:02; MAGEC1; ENSG00000155495; CTA
WVQEHYLEY

SEQ ID NO: 45672 - protein, 9 aa, Homo sapiens
  Table A; Target 45672; HLA-A*33:01; MAGEC1; ENSG00000155495; CTA
YPLQSPQSR

SEQ ID NO: 45673 - protein, 9 aa, Homo sapiens
  Table A; Target 45673; HLA-A*33:03; MAGEC1; ENSG00000155495; CTA
YPLQSPQSR

SEQ ID NO: 45674 - protein, 9 aa, Homo sapiens
  Table A; Target 45674; HLA-A*68:01; MAGEC1; ENSG00000155495; CTA
YPLQSPQSR

SEQ ID NO: 45675 - protein, 9 aa, Homo sapiens
  Table A; Target 45675; HLA-B*35:01; MAGEC1; ENSG00000155495; CTA
YPLQSPQSR

SEQ ID NO: 45676 - protein, 9 aa, Homo sapiens
  Table A; Target 45676; HLA-B*35:03; MAGEC1; ENSG00000155495; CTA
YPLQSPQSR

SEQ ID NO: 45677 - protein, 9 aa, Homo sapiens
  Table A; Target 45677; HLA-B*51:01; MAGEC1; ENSG00000155495; CTA
YPLQSPQSR

SEQ ID NO: 45678 - protein, 9 aa, Homo sapiens
  Table A; Target 45678; HLA-B*54:01; MAGEC1; ENSG00000155495; CTA
YPLQSPQSR

SEQ ID NO: 45679 - protein, 9 aa, Homo sapiens
  Table A; Target 45679; HLA-B*56:01; MAGEC1; ENSG00000155495; CTA
YPLQSPQSR

SEQ ID NO: 45680 - protein, 9 aa, Homo sapiens
  Table A; Target 45680; HLA-C*07:06; MAGEC1; ENSG00000155495; CTA
YPLQSPQSR

SEQ ID NO: 45681 - protein, 9 aa, Homo sapiens
  Table A; Target 45681; HLA-A*03:01; MAGEC1; ENSG00000155495; CTA
YQVKQPITK

SEQ ID NO: 45682 - protein, 9 aa, Homo sapiens
  Table A; Target 45682; HLA-A*03:02; MAGEC1; ENSG00000155495; CTA
YQVKQPITK

SEQ ID NO: 45683 - protein, 9 aa, Homo sapiens
  Table A; Target 45683; HLA-A*11:01; MAGEC1; ENSG00000155495; CTA
YQVKQPITK

SEQ ID NO: 45684 - protein, 9 aa, Homo sapiens
  Table A; Target 45684; HLA-B*13:02; MAGEC1; ENSG00000155495; CTA
YQVKQPITK

SEQ ID NO: 45685 - protein, 9 aa, Homo sapiens
  Table A; Target 45685; HLA-B*27:05; MAGEC1; ENSG00000155495; CTA
YQVKQPITK

SEQ ID NO: 45686 - protein, 9 aa, Homo sapiens
  Table A; Target 45686; HLA-B*40:02; MAGEC1; ENSG00000155495; CTA
YQVKQPITK

SEQ ID NO: 45687 - protein, 9 aa, Homo sapiens
  Table A; Target 45687; HLA-C*02:02; MAGEC1; ENSG00000155495; CTA
YQVKQPITK

SEQ ID NO: 45688 - protein, 9 aa, Homo sapiens
  Table A; Target 45688; HLA-C*03:03; MAGEC1; ENSG00000155495; CTA
YQVKQPITK

SEQ ID NO: 45689 - protein, 9 aa, Homo sapiens
  Table A; Target 45689; HLA-C*06:02; MAGEC1; ENSG00000155495; CTA
YQVKQPITK

SEQ ID NO: 45690 - protein, 9 aa, Homo sapiens
  Table A; Target 45690; HLA-C*07:04; MAGEC1; ENSG00000155495; CTA
YQVKQPITK

SEQ ID NO: 45691 - protein, 9 aa, Homo sapiens
  Table A; Target 45691; HLA-C*16:01; MAGEC1; ENSG00000155495; CTA
YQVKQPITK

SEQ ID NO: 45692 - protein, 8 aa, Homo sapiens
  Table A; Target 45692; HLA-B*51:01; MAGEC1; ENSG00000155495; CTA
YTGYFPVI

SEQ ID NO: 45693 - protein, 9 aa, Homo sapiens
  Table A; Target 45693; HLA-A*24:02; MAGEC1; ENSG00000155495; CTA
YTGYFPVIF

SEQ ID NO: 45694 - protein, 10 aa, Homo sapiens
  Table A; Target 45694; HLA-A*68:02; MAGEC1; ENSG00000155495; CTA
YTGYFPVIFR

SEQ ID NO: 45695 - protein, 10 aa, Homo sapiens
  Table A; Target 45695; HLA-A*02:01; MAGEC1; ENSG00000155495; CTA
YTLDEKVDEL

SEQ ID NO: 45696 - protein, 10 aa, Homo sapiens
  Table A; Target 45696; HLA-A*02:04; MAGEC1; ENSG00000155495; CTA
YTLDEKVDEL

SEQ ID NO: 45697 - protein, 10 aa, Homo sapiens
  Table A; Target 45697; HLA-A*25:01; MAGEC1; ENSG00000155495; CTA
YTLDEKVDEL

SEQ ID NO: 45698 - protein, 10 aa, Homo sapiens
  Table A; Target 45698; HLA-A*26:01; MAGEC1; ENSG00000155495; CTA
YTLDEKVDEL

SEQ ID NO: 45699 - protein, 10 aa, Homo sapiens
  Table A; Target 45699; HLA-A*68:02; MAGEC1; ENSG00000155495; CTA
YTLDEKVDEL

SEQ ID NO: 45700 - protein, 10 aa, Homo sapiens
  Table A; Target 45700; HLA-B*40:01; MAGEC1; ENSG00000155495; CTA
YTLDEKVDEL

SEQ ID NO: 45701 - protein, 8 aa, Homo sapiens
  Table A; Target 45701; HLA-B*39:01; MAGEC1; ENSG00000155495; CTA
YTSSSDTL

SEQ ID NO: 45702 - protein, 8 aa, Homo sapiens
  Table A; Target 45702; HLA-C*03:03; MAGEC1; ENSG00000155495; CTA
YTSSSDTL

SEQ ID NO: 45703 - protein, 8 aa, Homo sapiens
  Table A; Target 45703; HLA-C*03:04; MAGEC1; ENSG00000155495; CTA
YTSSSDTL

SEQ ID NO: 45704 - protein, 8 aa, Homo sapiens
  Table A; Target 45704; HLA-C*05:01; MAGEC1; ENSG00000155495; CTA
YTSSSDTL

SEQ ID NO: 45705 - protein, 9 aa, Homo sapiens
  Table A; Target 45705; HLA-A*68:02; MAGEC1; ENSG00000155495; CTA
YTSSSDTLL

SEQ ID NO: 45706 - protein, 9 aa, Homo sapiens
  Table A; Target 45706; HLA-B*35:03; MAGEC1; ENSG00000155495; CTA
YTSSSDTLL

SEQ ID NO: 45707 - protein, 9 aa, Homo sapiens
  Table A; Target 45707; HLA-B*39:01; MAGEC1; ENSG00000155495; CTA
YTSSSDTLL

SEQ ID NO: 45708 - protein, 9 aa, Homo sapiens
  Table A; Target 45708; HLA-B*13:02; MAGEC1; ENSG00000155495; CTA
YVFVNTLDL

SEQ ID NO: 45709 - protein, 9 aa, Homo sapiens
  Table A; Target 45709; HLA-B*46:01; MAGEC1; ENSG00000155495; CTA
YVFVNTLDL

SEQ ID NO: 45710 - protein, 9 aa, Homo sapiens
  Table A; Target 45710; HLA-C*02:02; MAGEC1; ENSG00000155495; CTA
YVFVNTLDL

SEQ ID NO: 45711 - protein, 9 aa, Homo sapiens
  Table A; Target 45711; HLA-C*03:03; MAGEC1; ENSG00000155495; CTA
YVFVNTLDL

SEQ ID NO: 45712 - protein, 9 aa, Homo sapiens
  Table A; Target 45712; HLA-C*03:04; MAGEC1; ENSG00000155495; CTA
YVFVNTLDL

SEQ ID NO: 45713 - protein, 9 aa, Homo sapiens
  Table A; Target 45713; HLA-A*33:01; MAGEC1,MAGEC2; ENSG00000155495,ENSG00000046774; CTA,CTA
DALKDVEER

SEQ ID NO: 45714 - protein, 9 aa, Homo sapiens
  Table A; Target 45714; HLA-A*33:03; MAGEC1,MAGEC2; ENSG00000155495,ENSG00000046774; CTA,CTA
DALKDVEER

SEQ ID NO: 45715 - protein, 9 aa, Homo sapiens
  Table A; Target 45715; HLA-A*68:01; MAGEC1,MAGEC2; ENSG00000155495,ENSG00000046774; CTA,CTA
DALKDVEER

SEQ ID NO: 45716 - protein, 9 aa, Homo sapiens
  Table A; Target 45716; HLA-B*51:01; MAGEC1,MAGEC2; ENSG00000155495,ENSG00000046774; CTA,CTA
DALKDVEER

SEQ ID NO: 45717 - protein, 9 aa, Homo sapiens
  Table A; Target 45717; HLA-C*07:06; MAGEC1,MAGEC2; ENSG00000155495,ENSG00000046774; CTA,CTA
DALKDVEER

SEQ ID NO: 45718 - protein, 9 aa, Homo sapiens
  Table A; Target 45718; HLA-A*68:02; MAGEC1,MAGEC2; ENSG00000155495,ENSG00000046774; CTA,CTA
FTYTLDEKV

SEQ ID NO: 45719 - protein, 10 aa, Homo sapiens
  Table A; Target 45719; HLA-B*49:01; MAGEC1,MAGEC2; ENSG00000155495,ENSG00000046774; CTA,CTA
GEPRELLTKV

SEQ ID NO: 45720 - protein, 11 aa, Homo sapiens
  Table A; Target 45720; HLA-B*44:02; MAGEC1,MAGEC2; ENSG00000155495,ENSG00000046774; CTA,CTA
GEPRELLTKVW

SEQ ID NO: 45721 - protein, 11 aa, Homo sapiens
  Table A; Target 45721; HLA-B*44:03; MAGEC1,MAGEC2; ENSG00000155495,ENSG00000046774; CTA,CTA
GEPRELLTKVW

SEQ ID NO: 45722 - protein, 8 aa, Homo sapiens
  Table A; Target 45722; HLA-B*49:01; MAGEC2; ENSG00000046774; CTA
AEEPVTEA

SEQ ID NO: 45723 - protein, 10 aa, Homo sapiens
  Table A; Target 45723; HLA-A*30:01; MAGEC2; ENSG00000046774; CTA
AEEPVTEAEM

SEQ ID NO: 45724 - protein, 10 aa, Homo sapiens
  Table A; Target 45724; HLA-B*39:01; MAGEC2; ENSG00000046774; CTA
AEEPVTEAEM

SEQ ID NO: 45725 - protein, 10 aa, Homo sapiens
  Table A; Target 45725; HLA-B*40:02; MAGEC2; ENSG00000046774; CTA
AEEPVTEAEM

SEQ ID NO: 45726 - protein, 10 aa, Homo sapiens
  Table A; Target 45726; HLA-B*44:03; MAGEC2; ENSG00000046774; CTA
AEEPVTEAEM

SEQ ID NO: 45727 - protein, 10 aa, Homo sapiens
  Table A; Target 45727; HLA-B*49:01; MAGEC2; ENSG00000046774; CTA
AEEPVTEAEM

SEQ ID NO: 45728 - protein, 11 aa, Homo sapiens
  Table A; Target 45728; HLA-A*30:01; MAGEC2; ENSG00000046774; CTA
AEEPVTEAEML

SEQ ID NO: 45729 - protein, 11 aa, Homo sapiens
  Table A; Target 45729; HLA-B*38:01; MAGEC2; ENSG00000046774; CTA
AEEPVTEAEML

SEQ ID NO: 45730 - protein, 11 aa, Homo sapiens
  Table A; Target 45730; HLA-B*44:02; MAGEC2; ENSG00000046774; CTA
AEEPVTEAEML

SEQ ID NO: 45731 - protein, 9 aa, Homo sapiens
  Table A; Target 45731; HLA-B*44:02; MAGEC2; ENSG00000046774; CTA
AELVEFLLL

SEQ ID NO: 45732 - protein, 9 aa, Homo sapiens
  Table A; Target 45732; HLA-B*44:03; MAGEC2; ENSG00000046774; CTA
AELVEFLLL

SEQ ID NO: 45733 - protein, 9 aa, Homo sapiens
  Table A; Target 45733; HLA-B*49:01; MAGEC2; ENSG00000046774; CTA
AELVEFLLL

SEQ ID NO: 45734 - protein, 11 aa, Homo sapiens
  Table A; Target 45734; HLA-B*44:02; MAGEC2; ENSG00000046774; CTA
AELVEFLLLKY

SEQ ID NO: 45735 - protein, 11 aa, Homo sapiens
  Table A; Target 45735; HLA-B*44:03; MAGEC2; ENSG00000046774; CTA
AELVEFLLLKY

SEQ ID NO: 45736 - protein, 8 aa, Homo sapiens
  Table A; Target 45736; HLA-B*18:01; MAGEC2; ENSG00000046774; CTA
AEMLMIVI

SEQ ID NO: 45737 - protein, 8 aa, Homo sapiens
  Table A; Target 45737; HLA-B*44:02; MAGEC2; ENSG00000046774; CTA
AEMLMIVI

SEQ ID NO: 45738 - protein, 8 aa, Homo sapiens
  Table A; Target 45738; HLA-B*49:01; MAGEC2; ENSG00000046774; CTA
AEMLMIVI

SEQ ID NO: 45739 - protein, 10 aa, Homo sapiens
  Table A; Target 45739; HLA-A*30:01; MAGEC2; ENSG00000046774; CTA
AEMLMIVIKY

SEQ ID NO: 45740 - protein, 10 aa, Homo sapiens
  Table A; Target 45740; HLA-B*18:01; MAGEC2; ENSG00000046774; CTA
AEMLMIVIKY

SEQ ID NO: 45741 - protein, 10 aa, Homo sapiens
  Table A; Target 45741; HLA-B*27:02; MAGEC2; ENSG00000046774; CTA
AEMLMIVIKY

SEQ ID NO: 45742 - protein, 10 aa, Homo sapiens
  Table A; Target 45742; HLA-C*16:04; MAGEC2; ENSG00000046774; CTA
AEMLMIVIKY

SEQ ID NO: 45743 - protein, 11 aa, Homo sapiens
  Table A; Target 45743; HLA-B*15:03; MAGEC2; ENSG00000046774; CTA
AKLNNTVPSSF

SEQ ID NO: 45744 - protein, 10 aa, Homo sapiens
  Table A; Target 45744; HLA-A*02:07; MAGEC2; ENSG00000046774; CTA
ALIEVGPDHF

SEQ ID NO: 45745 - protein, 10 aa, Homo sapiens
  Table A; Target 45745; HLA-A*23:01; MAGEC2; ENSG00000046774; CTA
ALIEVGPDHF

SEQ ID NO: 45746 - protein, 10 aa, Homo sapiens
  Table A; Target 45746; HLA-B*15:01; MAGEC2; ENSG00000046774; CTA
ALIEVGPDHF

SEQ ID NO: 45747 - protein, 9 aa, Homo sapiens
  Table A; Target 45747; HLA-A*02:01; MAGEC2; ENSG00000046774; CTA
ALKDVEERV

SEQ ID NO: 45748 - protein, 9 aa, Homo sapiens
  Table A; Target 45748; HLA-A*02:03; MAGEC2; ENSG00000046774; CTA
ALKDVEERV

SEQ ID NO: 45749 - protein, 9 aa, Homo sapiens
  Table A; Target 45749; HLA-A*02:04; MAGEC2; ENSG00000046774; CTA
ALKDVEERV

SEQ ID NO: 45750 - protein, 9 aa, Homo sapiens
  Table A; Target 45750; HLA-A*02:07; MAGEC2; ENSG00000046774; CTA
ALKDVEERV

SEQ ID NO: 45751 - protein, 9 aa, Homo sapiens
  Table A; Target 45751; HLA-B*13:02; MAGEC2; ENSG00000046774; CTA
ALKDVEERV

SEQ ID NO: 45752 - protein, 9 aa, Homo sapiens
  Table A; Target 45752; HLA-B*55:01; MAGEC2; ENSG00000046774; CTA
ALKDVEERV

SEQ ID NO: 45753 - protein, 11 aa, Homo sapiens
  Table A; Target 45753; HLA-A*02:01; MAGEC2; ENSG00000046774; CTA
ALKDVEERVQA

SEQ ID NO: 45754 - protein, 11 aa, Homo sapiens
  Table A; Target 45754; HLA-A*02:03; MAGEC2; ENSG00000046774; CTA
ALKDVEERVQA

SEQ ID NO: 45755 - protein, 11 aa, Homo sapiens
  Table A; Target 45755; HLA-B*55:01; MAGEC2; ENSG00000046774; CTA
ALKDVEERVQA

SEQ ID NO: 45756 - protein, 8 aa, Homo sapiens
  Table A; Target 45756; HLA-C*05:01; MAGEC2; ENSG00000046774; CTA
ASESLSVM

SEQ ID NO: 45757 - protein, 9 aa, Homo sapiens
  Table A; Target 45757; HLA-A*01:01; MAGEC2; ENSG00000046774; CTA
ASSASSTLY

SEQ ID NO: 45758 - protein, 9 aa, Homo sapiens
  Table A; Target 45758; HLA-A*26:01; MAGEC2; ENSG00000046774; CTA
ASSASSTLY

SEQ ID NO: 45759 - protein, 9 aa, Homo sapiens
  Table A; Target 45759; HLA-A*29:02; MAGEC2; ENSG00000046774; CTA
ASSASSTLY

SEQ ID NO: 45760 - protein, 9 aa, Homo sapiens
  Table A; Target 45760; HLA-A*30:02; MAGEC2; ENSG00000046774; CTA
ASSASSTLY

SEQ ID NO: 45761 - protein, 9 aa, Homo sapiens
  Table A; Target 45761; HLA-A*32:01; MAGEC2; ENSG00000046774; CTA
ASSASSTLY

SEQ ID NO: 45762 - protein, 9 aa, Homo sapiens
  Table A; Target 45762; HLA-B*15:01; MAGEC2; ENSG00000046774; CTA
ASSASSTLY

SEQ ID NO: 45763 - protein, 9 aa, Homo sapiens
  Table A; Target 45763; HLA-B*15:03; MAGEC2; ENSG00000046774; CTA
ASSASSTLY

SEQ ID NO: 45764 - protein, 9 aa, Homo sapiens
  Table A; Target 45764; HLA-B*46:01; MAGEC2; ENSG00000046774; CTA
ASSASSTLY

SEQ ID NO: 45765 - protein, 9 aa, Homo sapiens
  Table A; Target 45765; HLA-B*58:01; MAGEC2; ENSG00000046774; CTA
ASSASSTLY

SEQ ID NO: 45766 - protein, 9 aa, Homo sapiens
  Table A; Target 45766; HLA-C*02:02; MAGEC2; ENSG00000046774; CTA
ASSASSTLY

SEQ ID NO: 45767 - protein, 9 aa, Homo sapiens
  Table A; Target 45767; HLA-C*07:04; MAGEC2; ENSG00000046774; CTA
ASSASSTLY

SEQ ID NO: 45768 - protein, 9 aa, Homo sapiens
  Table A; Target 45768; HLA-C*16:01; MAGEC2; ENSG00000046774; CTA
ASSASSTLY

SEQ ID NO: 45769 - protein, 9 aa, Homo sapiens
  Table A; Target 45769; HLA-C*16:02; MAGEC2; ENSG00000046774; CTA
ASSASSTLY

SEQ ID NO: 45770 - protein, 9 aa, Homo sapiens
  Table A; Target 45770; HLA-C*16:04; MAGEC2; ENSG00000046774; CTA
ASSASSTLY

SEQ ID NO: 45771 - protein, 9 aa, Homo sapiens
  Table A; Target 45771; HLA-A*01:01; MAGEC2; ENSG00000046774; CTA
ASSTLYLVF

SEQ ID NO: 45772 - protein, 9 aa, Homo sapiens
  Table A; Target 45772; HLA-A*03:01; MAGEC2; ENSG00000046774; CTA
ASSTLYLVF

SEQ ID NO: 45773 - protein, 9 aa, Homo sapiens
  Table A; Target 45773; HLA-A*11:01; MAGEC2; ENSG00000046774; CTA
ASSTLYLVF

SEQ ID NO: 45774 - protein, 9 aa, Homo sapiens
  Table A; Target 45774; HLA-A*23:01; MAGEC2; ENSG00000046774; CTA
ASSTLYLVF

SEQ ID NO: 45775 - protein, 9 aa, Homo sapiens
  Table A; Target 45775; HLA-A*29:02; MAGEC2; ENSG00000046774; CTA
ASSTLYLVF

SEQ ID NO: 45776 - protein, 9 aa, Homo sapiens
  Table A; Target 45776; HLA-A*30:02; MAGEC2; ENSG00000046774; CTA
ASSTLYLVF

SEQ ID NO: 45777 - protein, 9 aa, Homo sapiens
  Table A; Target 45777; HLA-A*32:01; MAGEC2; ENSG00000046774; CTA
ASSTLYLVF

SEQ ID NO: 45778 - protein, 9 aa, Homo sapiens
  Table A; Target 45778; HLA-B*27:02; MAGEC2; ENSG00000046774; CTA
ASSTLYLVF

SEQ ID NO: 45779 - protein, 9 aa, Homo sapiens
  Table A; Target 45779; HLA-B*57:01; MAGEC2; ENSG00000046774; CTA
ASSTLYLVF

SEQ ID NO: 45780 - protein, 9 aa, Homo sapiens
  Table A; Target 45780; HLA-B*58:01; MAGEC2; ENSG00000046774; CTA
ASSTLYLVF

SEQ ID NO: 45781 - protein, 9 aa, Homo sapiens
  Table A; Target 45781; HLA-C*02:02; MAGEC2; ENSG00000046774; CTA
ASSTLYLVF

SEQ ID NO: 45782 - protein, 9 aa, Homo sapiens
  Table A; Target 45782; HLA-C*12:03; MAGEC2; ENSG00000046774; CTA
ASSTLYLVF

SEQ ID NO: 45783 - protein, 9 aa, Homo sapiens
  Table A; Target 45783; HLA-C*16:01; MAGEC2; ENSG00000046774; CTA
ASSTLYLVF

SEQ ID NO: 45784 - protein, 9 aa, Homo sapiens
  Table A; Target 45784; HLA-C*16:04; MAGEC2; ENSG00000046774; CTA
ASSTLYLVF

SEQ ID NO: 45785 - protein, 11 aa, Homo sapiens
  Table A; Target 45785; HLA-A*68:02; MAGEC2; ENSG00000046774; CTA
ATIDTADDATV

SEQ ID NO: 45786 - protein, 9 aa, Homo sapiens
  Table A; Target 45786; HLA-B*15:01; MAGEC2; ENSG00000046774; CTA
ATVMASESL

SEQ ID NO: 45787 - protein, 9 aa, Homo sapiens
  Table A; Target 45787; HLA-B*40:01; MAGEC2; ENSG00000046774; CTA
ATVMASESL

SEQ ID NO: 45788 - protein, 9 aa, Homo sapiens
  Table A; Target 45788; HLA-B*46:01; MAGEC2; ENSG00000046774; CTA
ATVMASESL

SEQ ID NO: 45789 - protein, 9 aa, Homo sapiens
  Table A; Target 45789; HLA-B*58:01; MAGEC2; ENSG00000046774; CTA
ATVMASESL

SEQ ID NO: 45790 - protein, 9 aa, Homo sapiens
  Table A; Target 45790; HLA-C*01:02; MAGEC2; ENSG00000046774; CTA
ATVMASESL

SEQ ID NO: 45791 - protein, 9 aa, Homo sapiens
  Table A; Target 45791; HLA-C*03:03; MAGEC2; ENSG00000046774; CTA
ATVMASESL

SEQ ID NO: 45792 - protein, 9 aa, Homo sapiens
  Table A; Target 45792; HLA-C*03:04; MAGEC2; ENSG00000046774; CTA
ATVMASESL

SEQ ID NO: 45793 - protein, 9 aa, Homo sapiens
  Table A; Target 45793; HLA-C*14:02; MAGEC2; ENSG00000046774; CTA
ATVMASESL

SEQ ID NO: 45794 - protein, 9 aa, Homo sapiens
  Table A; Target 45794; HLA-C*16:04; MAGEC2; ENSG00000046774; CTA
ATVMASESL

SEQ ID NO: 45795 - protein, 9 aa, Homo sapiens
  Table A; Target 45795; HLA-A*02:03; MAGEC2; ENSG00000046774; CTA
CVFANTVGL

SEQ ID NO: 45796 - protein, 9 aa, Homo sapiens
  Table A; Target 45796; HLA-A*03:02; MAGEC2; ENSG00000046774; CTA
CVFANTVGL

SEQ ID NO: 45797 - protein, 9 aa, Homo sapiens
  Table A; Target 45797; HLA-B*13:02; MAGEC2; ENSG00000046774; CTA
CVFANTVGL

SEQ ID NO: 45798 - protein, 9 aa, Homo sapiens
  Table A; Target 45798; HLA-B*15:03; MAGEC2; ENSG00000046774; CTA
CVFANTVGL

SEQ ID NO: 45799 - protein, 9 aa, Homo sapiens
  Table A; Target 45799; HLA-B*27:05; MAGEC2; ENSG00000046774; CTA
CVFANTVGL

SEQ ID NO: 45800 - protein, 9 aa, Homo sapiens
  Table A; Target 45800; HLA-B*58:01; MAGEC2; ENSG00000046774; CTA
CVFANTVGL

SEQ ID NO: 45801 - protein, 9 aa, Homo sapiens
  Table A; Target 45801; HLA-C*01:02; MAGEC2; ENSG00000046774; CTA
CVFANTVGL

SEQ ID NO: 45802 - protein, 9 aa, Homo sapiens
  Table A; Target 45802; HLA-C*02:02; MAGEC2; ENSG00000046774; CTA
CVFANTVGL

SEQ ID NO: 45803 - protein, 10 aa, Homo sapiens
  Table A; Target 45803; HLA-B*35:03; MAGEC2; ENSG00000046774; CTA
DATVMASESL

SEQ ID NO: 45804 - protein, 9 aa, Homo sapiens
  Table A; Target 45804; HLA-A*30:01; MAGEC2; ENSG00000046774; CTA
DEGMPENSL

SEQ ID NO: 45805 - protein, 9 aa, Homo sapiens
  Table A; Target 45805; HLA-B*18:01; MAGEC2; ENSG00000046774; CTA
DEGMPENSL

SEQ ID NO: 45806 - protein, 9 aa, Homo sapiens
  Table A; Target 45806; HLA-B*40:01; MAGEC2; ENSG00000046774; CTA
DEGMPENSL

SEQ ID NO: 45807 - protein, 10 aa, Homo sapiens
  Table A; Target 45807; HLA-B*40:01; MAGEC2; ENSG00000046774; CTA
DEGMPENSLL

SEQ ID NO: 45808 - protein, 10 aa, Homo sapiens
  Table A; Target 45808; HLA-B*18:01; MAGEC2; ENSG00000046774; CTA
DEKVAELVEF

SEQ ID NO: 45809 - protein, 8 aa, Homo sapiens
  Table A; Target 45809; HLA-C*05:01; MAGEC2; ENSG00000046774; CTA
DNDSPTSV

SEQ ID NO: 45810 - protein, 10 aa, Homo sapiens
  Table A; Target 45810; HLA-B*38:01; MAGEC2; ENSG00000046774; CTA
DNDSPTSVEL

SEQ ID NO: 45811 - protein, 10 aa, Homo sapiens
  Table A; Target 45811; HLA-B*39:01; MAGEC2; ENSG00000046774; CTA
DNDSPTSVEL

SEQ ID NO: 45812 - protein, 10 aa, Homo sapiens
  Table A; Target 45812; HLA-C*05:01; MAGEC2; ENSG00000046774; CTA
DNDSPTSVEL

SEQ ID NO: 45813 - protein, 8 aa, Homo sapiens
  Table A; Target 45813; HLA-A*01:01; MAGEC2; ENSG00000046774; CTA
DSESSFTY

SEQ ID NO: 45814 - protein, 8 aa, Homo sapiens
  Table A; Target 45814; HLA-B*08:01; MAGEC2; ENSG00000046774; CTA
DSPTSVEL

SEQ ID NO: 45815 - protein, 8 aa, Homo sapiens
  Table A; Target 45815; HLA-B*51:01; MAGEC2; ENSG00000046774; CTA
DSPTSVEL

SEQ ID NO: 45816 - protein, 8 aa, Homo sapiens
  Table A; Target 45816; HLA-C*01:02; MAGEC2; ENSG00000046774; CTA
DSPTSVEL

SEQ ID NO: 45817 - protein, 8 aa, Homo sapiens
  Table A; Target 45817; HLA-C*05:01; MAGEC2; ENSG00000046774; CTA
DSPTSVEL

SEQ ID NO: 45818 - protein, 11 aa, Homo sapiens
  Table A; Target 45818; HLA-A*33:01; MAGEC2; ENSG00000046774; CTA
DSPTSVELEDW

SEQ ID NO: 45819 - protein, 9 aa, Homo sapiens
  Table A; Target 45819; HLA-A*25:01; MAGEC2; ENSG00000046774; CTA
DTADDATVM

SEQ ID NO: 45820 - protein, 9 aa, Homo sapiens
  Table A; Target 45820; HLA-A*26:01; MAGEC2; ENSG00000046774; CTA
DTADDATVM

SEQ ID NO: 45821 - protein, 9 aa, Homo sapiens
  Table A; Target 45821; HLA-A*68:01; MAGEC2; ENSG00000046774; CTA
DTADDATVM

SEQ ID NO: 45822 - protein, 9 aa, Homo sapiens
  Table A; Target 45822; HLA-B*35:01; MAGEC2; ENSG00000046774; CTA
DTADDATVM

SEQ ID NO: 45823 - protein, 9 aa, Homo sapiens
  Table A; Target 45823; HLA-B*35:03; MAGEC2; ENSG00000046774; CTA
DTADDATVM

SEQ ID NO: 45824 - protein, 9 aa, Homo sapiens
  Table A; Target 45824; HLA-B*39:01; MAGEC2; ENSG00000046774; CTA
DTADDATVM

SEQ ID NO: 45825 - protein, 9 aa, Homo sapiens
  Table A; Target 45825; HLA-C*07:06; MAGEC2; ENSG00000046774; CTA
DTADDATVM

SEQ ID NO: 45826 - protein, 10 aa, Homo sapiens
  Table A; Target 45826; HLA-A*68:01; MAGEC2; ENSG00000046774; CTA
DTADDATVMA

SEQ ID NO: 45827 - protein, 10 aa, Homo sapiens
  Table A; Target 45827; HLA-A*25:01; MAGEC2; ENSG00000046774; CTA
DVEERVQATI

SEQ ID NO: 45828 - protein, 8 aa, Homo sapiens
  Table A; Target 45828; HLA-A*33:01; MAGEC2; ENSG00000046774; CTA
DYFPVILK

SEQ ID NO: 45829 - protein, 8 aa, Homo sapiens
  Table A; Target 45829; HLA-A*33:03; MAGEC2; ENSG00000046774; CTA
DYFPVILK

SEQ ID NO: 45830 - protein, 8 aa, Homo sapiens
  Table A; Target 45830; HLA-C*07:02; MAGEC2; ENSG00000046774; CTA
DYFPVILK

SEQ ID NO: 45831 - protein, 9 aa, Homo sapiens
  Table A; Target 45831; HLA-A*24:02; MAGEC2; ENSG00000046774; CTA
DYFPVILKR

SEQ ID NO: 45832 - protein, 9 aa, Homo sapiens
  Table A; Target 45832; HLA-A*29:02; MAGEC2; ENSG00000046774; CTA
DYFPVILKR

SEQ ID NO: 45833 - protein, 9 aa, Homo sapiens
  Table A; Target 45833; HLA-A*31:01; MAGEC2; ENSG00000046774; CTA
DYFPVILKR

SEQ ID NO: 45834 - protein, 9 aa, Homo sapiens
  Table A; Target 45834; HLA-A*33:01; MAGEC2; ENSG00000046774; CTA
DYFPVILKR

SEQ ID NO: 45835 - protein, 9 aa, Homo sapiens
  Table A; Target 45835; HLA-A*33:03; MAGEC2; ENSG00000046774; CTA
DYFPVILKR

SEQ ID NO: 45836 - protein, 9 aa, Homo sapiens
  Table A; Target 45836; HLA-A*68:01; MAGEC2; ENSG00000046774; CTA
DYFPVILKR

SEQ ID NO: 45837 - protein, 9 aa, Homo sapiens
  Table A; Target 45837; HLA-A*68:02; MAGEC2; ENSG00000046774; CTA
DYFPVILKR

SEQ ID NO: 45838 - protein, 9 aa, Homo sapiens
  Table A; Target 45838; HLA-C*07:06; MAGEC2; ENSG00000046774; CTA
DYFPVILKR

SEQ ID NO: 45839 - protein, 9 aa, Homo sapiens
  Table A; Target 45839; HLA-C*05:01; MAGEC2; ENSG00000046774; CTA
EAEEPVTEA

SEQ ID NO: 45840 - protein, 11 aa, Homo sapiens
  Table A; Target 45840; HLA-C*05:01; MAGEC2; ENSG00000046774; CTA
EAEEPVTEAEM

SEQ ID NO: 45841 - protein, 9 aa, Homo sapiens
  Table A; Target 45841; HLA-A*25:01; MAGEC2; ENSG00000046774; CTA
EASSASSTL

SEQ ID NO: 45842 - protein, 9 aa, Homo sapiens
  Table A; Target 45842; HLA-A*26:01; MAGEC2; ENSG00000046774; CTA
EASSASSTL

SEQ ID NO: 45843 - protein, 9 aa, Homo sapiens
  Table A; Target 45843; HLA-B*35:01; MAGEC2; ENSG00000046774; CTA
EASSASSTL

SEQ ID NO: 45844 - protein, 9 aa, Homo sapiens
  Table A; Target 45844; HLA-B*35:03; MAGEC2; ENSG00000046774; CTA
EASSASSTL

SEQ ID NO: 45845 - protein, 9 aa, Homo sapiens
  Table A; Target 45845; HLA-B*39:01; MAGEC2; ENSG00000046774; CTA
EASSASSTL

SEQ ID NO: 45846 - protein, 9 aa, Homo sapiens
  Table A; Target 45846; HLA-B*51:01; MAGEC2; ENSG00000046774; CTA
EASSASSTL

SEQ ID NO: 45847 - protein, 9 aa, Homo sapiens
  Table A; Target 45847; HLA-C*01:02; MAGEC2; ENSG00000046774; CTA
EASSASSTL

SEQ ID NO: 45848 - protein, 9 aa, Homo sapiens
  Table A; Target 45848; HLA-C*03:03; MAGEC2; ENSG00000046774; CTA
EASSASSTL

SEQ ID NO: 45849 - protein, 9 aa, Homo sapiens
  Table A; Target 45849; HLA-C*03:04; MAGEC2; ENSG00000046774; CTA
EASSASSTL

SEQ ID NO: 45850 - protein, 9 aa, Homo sapiens
  Table A; Target 45850; HLA-C*05:01; MAGEC2; ENSG00000046774; CTA
EASSASSTL

SEQ ID NO: 45851 - protein, 9 aa, Homo sapiens
  Table A; Target 45851; HLA-C*07:06; MAGEC2; ENSG00000046774; CTA
EASSASSTL

SEQ ID NO: 45852 - protein, 10 aa, Homo sapiens
  Table A; Target 45852; HLA-A*01:01; MAGEC2; ENSG00000046774; CTA
EASSASSTLY

SEQ ID NO: 45853 - protein, 10 aa, Homo sapiens
  Table A; Target 45853; HLA-A*25:01; MAGEC2; ENSG00000046774; CTA
EASSASSTLY

SEQ ID NO: 45854 - protein, 10 aa, Homo sapiens
  Table A; Target 45854; HLA-A*26:01; MAGEC2; ENSG00000046774; CTA
EASSASSTLY

SEQ ID NO: 45855 - protein, 10 aa, Homo sapiens
  Table A; Target 45855; HLA-A*30:02; MAGEC2; ENSG00000046774; CTA
EASSASSTLY

SEQ ID NO: 45856 - protein, 10 aa, Homo sapiens
  Table A; Target 45856; HLA-A*68:01; MAGEC2; ENSG00000046774; CTA
EASSASSTLY

SEQ ID NO: 45857 - protein, 10 aa, Homo sapiens
  Table A; Target 45857; HLA-B*35:01; MAGEC2; ENSG00000046774; CTA
EASSASSTLY

SEQ ID NO: 45858 - protein, 10 aa, Homo sapiens
  Table A; Target 45858; HLA-C*07:06; MAGEC2; ENSG00000046774; CTA
EASSASSTLY

SEQ ID NO: 45859 - protein, 10 aa, Homo sapiens
  Table A; Target 45859; HLA-A*30:01; MAGEC2; ENSG00000046774; CTA
EEASSASSTL

SEQ ID NO: 45860 - protein, 10 aa, Homo sapiens
  Table A; Target 45860; HLA-B*40:01; MAGEC2; ENSG00000046774; CTA
EEASSASSTL

SEQ ID NO: 45861 - protein, 10 aa, Homo sapiens
  Table A; Target 45861; HLA-B*44:03; MAGEC2; ENSG00000046774; CTA
EEASSASSTL

SEQ ID NO: 45862 - protein, 11 aa, Homo sapiens
  Table A; Target 45862; HLA-A*26:01; MAGEC2; ENSG00000046774; CTA
EEASSASSTLY

SEQ ID NO: 45863 - protein, 11 aa, Homo sapiens
  Table A; Target 45863; HLA-B*18:01; MAGEC2; ENSG00000046774; CTA
EEASSASSTLY

SEQ ID NO: 45864 - protein, 11 aa, Homo sapiens
  Table A; Target 45864; HLA-B*44:02; MAGEC2; ENSG00000046774; CTA
EEASSASSTLY

SEQ ID NO: 45865 - protein, 11 aa, Homo sapiens
  Table A; Target 45865; HLA-B*44:03; MAGEC2; ENSG00000046774; CTA
EEASSASSTLY

SEQ ID NO: 45866 - protein, 11 aa, Homo sapiens
  Table A; Target 45866; HLA-C*16:04; MAGEC2; ENSG00000046774; CTA
EEASSASSTLY

SEQ ID NO: 45867 - protein, 11 aa, Homo sapiens
  Table A; Target 45867; HLA-B*40:01; MAGEC2; ENSG00000046774; CTA
EEEASSASSTL

SEQ ID NO: 45868 - protein, 9 aa, Homo sapiens
  Table A; Target 45868; HLA-B*49:01; MAGEC2; ENSG00000046774; CTA
EEEVPSGVI

SEQ ID NO: 45869 - protein, 9 aa, Homo sapiens
  Table A; Target 45869; HLA-B*40:01; MAGEC2; ENSG00000046774; CTA
EEPVTEAEM

SEQ ID NO: 45870 - protein, 9 aa, Homo sapiens
  Table A; Target 45870; HLA-B*44:02; MAGEC2; ENSG00000046774; CTA
EEPVTEAEM

SEQ ID NO: 45871 - protein, 9 aa, Homo sapiens
  Table A; Target 45871; HLA-B*44:03; MAGEC2; ENSG00000046774; CTA
EEPVTEAEM

SEQ ID NO: 45872 - protein, 10 aa, Homo sapiens
  Table A; Target 45872; HLA-B*40:01; MAGEC2; ENSG00000046774; CTA
EEPVTEAEML

SEQ ID NO: 45873 - protein, 8 aa, Homo sapiens
  Table A; Target 45873; HLA-B*18:01; MAGEC2; ENSG00000046774; CTA
EEVIWEVL

SEQ ID NO: 45874 - protein, 8 aa, Homo sapiens
  Table A; Target 45874; HLA-B*49:01; MAGEC2; ENSG00000046774; CTA
EEVPSGVI

SEQ ID NO: 45875 - protein, 11 aa, Homo sapiens
  Table A; Target 45875; HLA-A*30:01; MAGEC2; ENSG00000046774; CTA
EEVPSGVIPNL

SEQ ID NO: 45876 - protein, 11 aa, Homo sapiens
  Table A; Target 45876; HLA-B*40:01; MAGEC2; ENSG00000046774; CTA
EEVPSGVIPNL

SEQ ID NO: 45877 - protein, 11 aa, Homo sapiens
  Table A; Target 45877; HLA-B*44:02; MAGEC2; ENSG00000046774; CTA
EEVPSGVIPNL

SEQ ID NO: 45878 - protein, 11 aa, Homo sapiens
  Table A; Target 45878; HLA-B*44:03; MAGEC2; ENSG00000046774; CTA
EEVPSGVIPNL

SEQ ID NO: 45879 - protein, 9 aa, Homo sapiens
  Table A; Target 45879; HLA-A*33:01; MAGEC2; ENSG00000046774; CTA
EHFVYGEPR

SEQ ID NO: 45880 - protein, 9 aa, Homo sapiens
  Table A; Target 45880; HLA-A*33:03; MAGEC2; ENSG00000046774; CTA
EHFVYGEPR

SEQ ID NO: 45881 - protein, 10 aa, Homo sapiens
  Table A; Target 45881; HLA-A*25:01; MAGEC2; ENSG00000046774; CTA
ELVEFLLLKY

SEQ ID NO: 45882 - protein, 10 aa, Homo sapiens
  Table A; Target 45882; HLA-A*26:01; MAGEC2; ENSG00000046774; CTA
ELVEFLLLKY

SEQ ID NO: 45883 - protein, 10 aa, Homo sapiens
  Table A; Target 45883; HLA-A*29:02; MAGEC2; ENSG00000046774; CTA
ELVEFLLLKY

SEQ ID NO: 45884 - protein, 10 aa, Homo sapiens
  Table A; Target 45884; HLA-B*44:03; MAGEC2; ENSG00000046774; CTA
ELVEFLLLKY

SEQ ID NO: 45885 - protein, 9 aa, Homo sapiens
  Table A; Target 45885; HLA-A*01:01; MAGEC2; ENSG00000046774; CTA
EMLMIVIKY

SEQ ID NO: 45886 - protein, 9 aa, Homo sapiens
  Table A; Target 45886; HLA-A*23:01; MAGEC2; ENSG00000046774; CTA
EMLMIVIKY

SEQ ID NO: 45887 - protein, 9 aa, Homo sapiens
  Table A; Target 45887; HLA-A*26:01; MAGEC2; ENSG00000046774; CTA
EMLMIVIKY

SEQ ID NO: 45888 - protein, 9 aa, Homo sapiens
  Table A; Target 45888; HLA-A*29:02; MAGEC2; ENSG00000046774; CTA
EMLMIVIKY

SEQ ID NO: 45889 - protein, 9 aa, Homo sapiens
  Table A; Target 45889; HLA-A*33:03; MAGEC2; ENSG00000046774; CTA
EMLMIVIKY

SEQ ID NO: 45890 - protein, 9 aa, Homo sapiens
  Table A; Target 45890; HLA-B*18:01; MAGEC2; ENSG00000046774; CTA
EMLMIVIKY

SEQ ID NO: 45891 - protein, 9 aa, Homo sapiens
  Table A; Target 45891; HLA-B*35:01; MAGEC2; ENSG00000046774; CTA
EMLMIVIKY

SEQ ID NO: 45892 - protein, 9 aa, Homo sapiens
  Table A; Target 45892; HLA-B*44:02; MAGEC2; ENSG00000046774; CTA
EMLMIVIKY

SEQ ID NO: 45893 - protein, 9 aa, Homo sapiens
  Table A; Target 45893; HLA-B*44:03; MAGEC2; ENSG00000046774; CTA
EMLMIVIKY

SEQ ID NO: 45894 - protein, 9 aa, Homo sapiens
  Table A; Target 45894; HLA-C*07:01; MAGEC2; ENSG00000046774; CTA
EMLMIVIKY

SEQ ID NO: 45895 - protein, 9 aa, Homo sapiens
  Table A; Target 45895; HLA-C*12:03; MAGEC2; ENSG00000046774; CTA
EMLMIVIKY

SEQ ID NO: 45896 - protein, 8 aa, Homo sapiens
  Table A; Target 45896; HLA-B*35:01; MAGEC2; ENSG00000046774; CTA
EPVTEAEM

SEQ ID NO: 45897 - protein, 8 aa, Homo sapiens
  Table A; Target 45897; HLA-B*35:03; MAGEC2; ENSG00000046774; CTA
EPVTEAEM

SEQ ID NO: 45898 - protein, 9 aa, Homo sapiens
  Table A; Target 45898; HLA-B*35:01; MAGEC2; ENSG00000046774; CTA
EPVTEAEML

SEQ ID NO: 45899 - protein, 9 aa, Homo sapiens
  Table A; Target 45899; HLA-B*35:03; MAGEC2; ENSG00000046774; CTA
EPVTEAEML

SEQ ID NO: 45900 - protein, 10 aa, Homo sapiens
  Table A; Target 45900; HLA-B*35:03; MAGEC2; ENSG00000046774; CTA
EPVTEAEMLM

SEQ ID NO: 45901 - protein, 8 aa, Homo sapiens
  Table A; Target 45901; HLA-B*08:01; MAGEC2; ENSG00000046774; CTA
ESIKKKVL

SEQ ID NO: 45902 - protein, 10 aa, Homo sapiens
  Table A; Target 45902; HLA-A*25:01; MAGEC2; ENSG00000046774; CTA
EVGPDHFCVF

SEQ ID NO: 45903 - protein, 10 aa, Homo sapiens
  Table A; Target 45903; HLA-A*26:01; MAGEC2; ENSG00000046774; CTA
EVGPDHFCVF

SEQ ID NO: 45904 - protein, 9 aa, Homo sapiens
  Table A; Target 45904; HLA-A*26:01; MAGEC2; ENSG00000046774; CTA
EVIWEVLNA

SEQ ID NO: 45905 - protein, 9 aa, Homo sapiens
  Table A; Target 45905; HLA-A*68:02; MAGEC2; ENSG00000046774; CTA
EVIWEVLNA

SEQ ID NO: 45906 - protein, 10 aa, Homo sapiens
  Table A; Target 45906; HLA-A*25:01; MAGEC2; ENSG00000046774; CTA
EVIWEVLNAV

SEQ ID NO: 45907 - protein, 10 aa, Homo sapiens
  Table A; Target 45907; HLA-A*26:01; MAGEC2; ENSG00000046774; CTA
EVIWEVLNAV

SEQ ID NO: 45908 - protein, 9 aa, Homo sapiens
  Table A; Target 45908; HLA-A*25:01; MAGEC2; ENSG00000046774; CTA
EVLNAVGVY

SEQ ID NO: 45909 - protein, 9 aa, Homo sapiens
  Table A; Target 45909; HLA-A*29:02; MAGEC2; ENSG00000046774; CTA
EVLNAVGVY

SEQ ID NO: 45910 - protein, 9 aa, Homo sapiens
  Table A; Target 45910; HLA-A*30:02; MAGEC2; ENSG00000046774; CTA
EVLNAVGVY

SEQ ID NO: 45911 - protein, 9 aa, Homo sapiens
  Table A; Target 45911; HLA-A*33:01; MAGEC2; ENSG00000046774; CTA
EVLNAVGVY

SEQ ID NO: 45912 - protein, 9 aa, Homo sapiens
  Table A; Target 45912; HLA-A*33:03; MAGEC2; ENSG00000046774; CTA
EVLNAVGVY

SEQ ID NO: 45913 - protein, 9 aa, Homo sapiens
  Table A; Target 45913; HLA-A*68:01; MAGEC2; ENSG00000046774; CTA
EVLNAVGVY

SEQ ID NO: 45914 - protein, 9 aa, Homo sapiens
  Table A; Target 45914; HLA-B*15:01; MAGEC2; ENSG00000046774; CTA
EVLNAVGVY

SEQ ID NO: 45915 - protein, 9 aa, Homo sapiens
  Table A; Target 45915; HLA-B*15:03; MAGEC2; ENSG00000046774; CTA
EVLNAVGVY

SEQ ID NO: 45916 - protein, 9 aa, Homo sapiens
  Table A; Target 45916; HLA-B*18:01; MAGEC2; ENSG00000046774; CTA
EVLNAVGVY

SEQ ID NO: 45917 - protein, 9 aa, Homo sapiens
  Table A; Target 45917; HLA-B*35:01; MAGEC2; ENSG00000046774; CTA
EVLNAVGVY

SEQ ID NO: 45918 - protein, 9 aa, Homo sapiens
  Table A; Target 45918; HLA-B*39:01; MAGEC2; ENSG00000046774; CTA
EVLNAVGVY

SEQ ID NO: 45919 - protein, 9 aa, Homo sapiens
  Table A; Target 45919; HLA-B*44:03; MAGEC2; ENSG00000046774; CTA
EVLNAVGVY

SEQ ID NO: 45920 - protein, 9 aa, Homo sapiens
  Table A; Target 45920; HLA-B*46:01; MAGEC2; ENSG00000046774; CTA
EVLNAVGVY

SEQ ID NO: 45921 - protein, 9 aa, Homo sapiens
  Table A; Target 45921; HLA-C*07:04; MAGEC2; ENSG00000046774; CTA
EVLNAVGVY

SEQ ID NO: 45922 - protein, 9 aa, Homo sapiens
  Table A; Target 45922; HLA-C*07:06; MAGEC2; ENSG00000046774; CTA
EVLNAVGVY

SEQ ID NO: 45923 - protein, 9 aa, Homo sapiens
  Table A; Target 45923; HLA-C*12:03; MAGEC2; ENSG00000046774; CTA
EVLNAVGVY

SEQ ID NO: 45924 - protein, 10 aa, Homo sapiens
  Table A; Target 45924; HLA-A*26:01; MAGEC2; ENSG00000046774; CTA
EVLNAVGVYA

SEQ ID NO: 45925 - protein, 10 aa, Homo sapiens
  Table A; Target 45925; HLA-A*33:03; MAGEC2; ENSG00000046774; CTA
EVLNAVGVYA

SEQ ID NO: 45926 - protein, 10 aa, Homo sapiens
  Table A; Target 45926; HLA-A*68:01; MAGEC2; ENSG00000046774; CTA
EVLNAVGVYA

SEQ ID NO: 45927 - protein, 10 aa, Homo sapiens
  Table A; Target 45927; HLA-A*68:02; MAGEC2; ENSG00000046774; CTA
EVLNAVGVYA

SEQ ID NO: 45928 - protein, 9 aa, Homo sapiens
  Table A; Target 45928; HLA-A*25:01; MAGEC2; ENSG00000046774; CTA
EVPHSSPPY

SEQ ID NO: 45929 - protein, 9 aa, Homo sapiens
  Table A; Target 45929; HLA-A*26:01; MAGEC2; ENSG00000046774; CTA
EVPHSSPPY

SEQ ID NO: 45930 - protein, 9 aa, Homo sapiens
  Table A; Target 45930; HLA-A*29:02; MAGEC2; ENSG00000046774; CTA
EVPHSSPPY

SEQ ID NO: 45931 - protein, 10 aa, Homo sapiens
  Table A; Target 45931; HLA-A*25:01; MAGEC2; ENSG00000046774; CTA
EVPHSSPPYY

SEQ ID NO: 45932 - protein, 10 aa, Homo sapiens
  Table A; Target 45932; HLA-A*26:01; MAGEC2; ENSG00000046774; CTA
EVPHSSPPYY

SEQ ID NO: 45933 - protein, 10 aa, Homo sapiens
  Table A; Target 45933; HLA-A*24:02; MAGEC2; ENSG00000046774; CTA
EVPSGVIPNL

SEQ ID NO: 45934 - protein, 10 aa, Homo sapiens
  Table A; Target 45934; HLA-A*25:01; MAGEC2; ENSG00000046774; CTA
EVPSGVIPNL

SEQ ID NO: 45935 - protein, 10 aa, Homo sapiens
  Table A; Target 45935; HLA-A*33:03; MAGEC2; ENSG00000046774; CTA
EVPSGVIPNL

SEQ ID NO: 45936 - protein, 10 aa, Homo sapiens
  Table A; Target 45936; HLA-A*68:01; MAGEC2; ENSG00000046774; CTA
EVPSGVIPNL

SEQ ID NO: 45937 - protein, 10 aa, Homo sapiens
  Table A; Target 45937; HLA-A*68:02; MAGEC2; ENSG00000046774; CTA
EVPSGVIPNL

SEQ ID NO: 45938 - protein, 9 aa, Homo sapiens
  Table A; Target 45938; HLA-A*02:01; MAGEC2; ENSG00000046774; CTA
FLAKLNNTV

SEQ ID NO: 45939 - protein, 9 aa, Homo sapiens
  Table A; Target 45939; HLA-A*02:03; MAGEC2; ENSG00000046774; CTA
FLAKLNNTV

SEQ ID NO: 45940 - protein, 9 aa, Homo sapiens
  Table A; Target 45940; HLA-A*02:04; MAGEC2; ENSG00000046774; CTA
FLAKLNNTV

SEQ ID NO: 45941 - protein, 9 aa, Homo sapiens
  Table A; Target 45941; HLA-A*68:02; MAGEC2; ENSG00000046774; CTA
FLAKLNNTV

SEQ ID NO: 45942 - protein, 9 aa, Homo sapiens
  Table A; Target 45942; HLA-B*13:02; MAGEC2; ENSG00000046774; CTA
FLAKLNNTV

SEQ ID NO: 45943 - protein, 9 aa, Homo sapiens
  Table A; Target 45943; HLA-B*55:01; MAGEC2; ENSG00000046774; CTA
FLAKLNNTV

SEQ ID NO: 45944 - protein, 8 aa, Homo sapiens
  Table A; Target 45944; HLA-B*54:01; MAGEC2; ENSG00000046774; CTA
FPVILKRA

SEQ ID NO: 45945 - protein, 9 aa, Homo sapiens
  Table A; Target 45945; HLA-A*01:01; MAGEC2; ENSG00000046774; CTA
FSEESSSQK

SEQ ID NO: 45946 - protein, 9 aa, Homo sapiens
  Table A; Target 45946; HLA-C*05:01; MAGEC2; ENSG00000046774; CTA
FSEESSSQK

SEQ ID NO: 45947 - protein, 9 aa, Homo sapiens
  Table A; Target 45947; HLA-C*03:03; MAGEC2; ENSG00000046774; CTA
FSTSSSLIL

SEQ ID NO: 45948 - protein, 9 aa, Homo sapiens
  Table A; Target 45948; HLA-C*03:04; MAGEC2; ENSG00000046774; CTA
FSTSSSLIL

SEQ ID NO: 45949 - protein, 9 aa, Homo sapiens
  Table A; Target 45949; HLA-A*01:01; MAGEC2; ENSG00000046774; CTA
FTYTLDEKV

SEQ ID NO: 45950 - protein, 9 aa, Homo sapiens
  Table A; Target 45950; HLA-B*13:02; MAGEC2; ENSG00000046774; CTA
FTYTLDEKV

SEQ ID NO: 45951 - protein, 9 aa, Homo sapiens
  Table A; Target 45951; HLA-C*02:02; MAGEC2; ENSG00000046774; CTA
FTYTLDEKV

SEQ ID NO: 45952 - protein, 9 aa, Homo sapiens
  Table A; Target 45952; HLA-C*12:03; MAGEC2; ENSG00000046774; CTA
FTYTLDEKV

SEQ ID NO: 45953 - protein, 9 aa, Homo sapiens
  Table A; Target 45953; HLA-A*02:01; MAGEC2; ENSG00000046774; CTA
FVYGEPREL

SEQ ID NO: 45954 - protein, 9 aa, Homo sapiens
  Table A; Target 45954; HLA-A*02:03; MAGEC2; ENSG00000046774; CTA
FVYGEPREL

SEQ ID NO: 45955 - protein, 9 aa, Homo sapiens
  Table A; Target 45955; HLA-A*02:04; MAGEC2; ENSG00000046774; CTA
FVYGEPREL

SEQ ID NO: 45956 - protein, 9 aa, Homo sapiens
  Table A; Target 45956; HLA-A*02:07; MAGEC2; ENSG00000046774; CTA
FVYGEPREL

SEQ ID NO: 45957 - protein, 9 aa, Homo sapiens
  Table A; Target 45957; HLA-A*03:01; MAGEC2; ENSG00000046774; CTA
FVYGEPREL

SEQ ID NO: 45958 - protein, 9 aa, Homo sapiens
  Table A; Target 45958; HLA-A*25:01; MAGEC2; ENSG00000046774; CTA
FVYGEPREL

SEQ ID NO: 45959 - protein, 9 aa, Homo sapiens
  Table A; Target 45959; HLA-A*26:01; MAGEC2; ENSG00000046774; CTA
FVYGEPREL

SEQ ID NO: 45960 - protein, 9 aa, Homo sapiens
  Table A; Target 45960; HLA-A*32:01; MAGEC2; ENSG00000046774; CTA
FVYGEPREL

SEQ ID NO: 45961 - protein, 9 aa, Homo sapiens
  Table A; Target 45961; HLA-A*68:02; MAGEC2; ENSG00000046774; CTA
FVYGEPREL

SEQ ID NO: 45962 - protein, 9 aa, Homo sapiens
  Table A; Target 45962; HLA-B*08:01; MAGEC2; ENSG00000046774; CTA
FVYGEPREL

SEQ ID NO: 45963 - protein, 9 aa, Homo sapiens
  Table A; Target 45963; HLA-B*15:03; MAGEC2; ENSG00000046774; CTA
FVYGEPREL

SEQ ID NO: 45964 - protein, 9 aa, Homo sapiens
  Table A; Target 45964; HLA-B*35:01; MAGEC2; ENSG00000046774; CTA
FVYGEPREL

SEQ ID NO: 45965 - protein, 9 aa, Homo sapiens
  Table A; Target 45965; HLA-B*35:03; MAGEC2; ENSG00000046774; CTA
FVYGEPREL

SEQ ID NO: 45966 - protein, 9 aa, Homo sapiens
  Table A; Target 45966; HLA-B*40:01; MAGEC2; ENSG00000046774; CTA
FVYGEPREL

SEQ ID NO: 45967 - protein, 9 aa, Homo sapiens
  Table A; Target 45967; HLA-B*46:01; MAGEC2; ENSG00000046774; CTA
FVYGEPREL

SEQ ID NO: 45968 - protein, 9 aa, Homo sapiens
  Table A; Target 45968; HLA-B*51:01; MAGEC2; ENSG00000046774; CTA
FVYGEPREL

SEQ ID NO: 45969 - protein, 9 aa, Homo sapiens
  Table A; Target 45969; HLA-B*55:01; MAGEC2; ENSG00000046774; CTA
FVYGEPREL

SEQ ID NO: 45970 - protein, 9 aa, Homo sapiens
  Table A; Target 45970; HLA-B*58:01; MAGEC2; ENSG00000046774; CTA
FVYGEPREL

SEQ ID NO: 45971 - protein, 9 aa, Homo sapiens
  Table A; Target 45971; HLA-C*01:02; MAGEC2; ENSG00000046774; CTA
FVYGEPREL

SEQ ID NO: 45972 - protein, 9 aa, Homo sapiens
  Table A; Target 45972; HLA-C*02:02; MAGEC2; ENSG00000046774; CTA
FVYGEPREL

SEQ ID NO: 45973 - protein, 9 aa, Homo sapiens
  Table A; Target 45973; HLA-C*03:03; MAGEC2; ENSG00000046774; CTA
FVYGEPREL

SEQ ID NO: 45974 - protein, 9 aa, Homo sapiens
  Table A; Target 45974; HLA-C*05:01; MAGEC2; ENSG00000046774; CTA
FVYGEPREL

SEQ ID NO: 45975 - protein, 9 aa, Homo sapiens
  Table A; Target 45975; HLA-C*07:04; MAGEC2; ENSG00000046774; CTA
FVYGEPREL

SEQ ID NO: 45976 - protein, 9 aa, Homo sapiens
  Table A; Target 45976; HLA-C*12:03; MAGEC2; ENSG00000046774; CTA
FVYGEPREL

SEQ ID NO: 45977 - protein, 9 aa, Homo sapiens
  Table A; Target 45977; HLA-C*16:01; MAGEC2; ENSG00000046774; CTA
FVYGEPREL

SEQ ID NO: 45978 - protein, 9 aa, Homo sapiens
  Table A; Target 45978; HLA-C*16:02; MAGEC2; ENSG00000046774; CTA
FVYGEPREL

SEQ ID NO: 45979 - protein, 9 aa, Homo sapiens
  Table A; Target 45979; HLA-C*16:04; MAGEC2; ENSG00000046774; CTA
FVYGEPREL

SEQ ID NO: 45980 - protein, 9 aa, Homo sapiens
  Table A; Target 45980; HLA-B*49:01; MAGEC2; ENSG00000046774; CTA
GEDTGTCQG

SEQ ID NO: 45981 - protein, 10 aa, Homo sapiens
  Table A; Target 45981; HLA-A*30:01; MAGEC2; ENSG00000046774; CTA
GEDTGTCQGL

SEQ ID NO: 45982 - protein, 10 aa, Homo sapiens
  Table A; Target 45982; HLA-B*44:03; MAGEC2; ENSG00000046774; CTA
GEDTGTCQGL

SEQ ID NO: 45983 - protein, 10 aa, Homo sapiens
  Table A; Target 45983; HLA-B*49:01; MAGEC2; ENSG00000046774; CTA
GEDTGTCQGL

SEQ ID NO: 45984 - protein, 9 aa, Homo sapiens
  Table A; Target 45984; HLA-A*26:01; MAGEC2; ENSG00000046774; CTA
GLPDSESSF

SEQ ID NO: 45985 - protein, 9 aa, Homo sapiens
  Table A; Target 45985; HLA-A*32:01; MAGEC2; ENSG00000046774; CTA
GLPDSESSF

SEQ ID NO: 45986 - protein, 9 aa, Homo sapiens
  Table A; Target 45986; HLA-B*15:01; MAGEC2; ENSG00000046774; CTA
GLPDSESSF

SEQ ID NO: 45987 - protein, 9 aa, Homo sapiens
  Table A; Target 45987; HLA-B*15:03; MAGEC2; ENSG00000046774; CTA
GLPDSESSF

SEQ ID NO: 45988 - protein, 9 aa, Homo sapiens
  Table A; Target 45988; HLA-B*46:01; MAGEC2; ENSG00000046774; CTA
GLPDSESSF

SEQ ID NO: 45989 - protein, 9 aa, Homo sapiens
  Table A; Target 45989; HLA-C*01:02; MAGEC2; ENSG00000046774; CTA
GLPDSESSF

SEQ ID NO: 45990 - protein, 9 aa, Homo sapiens
  Table A; Target 45990; HLA-C*14:02; MAGEC2; ENSG00000046774; CTA
GLPDSESSF

SEQ ID NO: 45991 - protein, 11 aa, Homo sapiens
  Table A; Target 45991; HLA-A*26:01; MAGEC2; ENSG00000046774; CTA
GLPDSESSFTY

SEQ ID NO: 45992 - protein, 11 aa, Homo sapiens
  Table A; Target 45992; HLA-A*29:02; MAGEC2; ENSG00000046774; CTA
GLPDSESSFTY

SEQ ID NO: 45993 - protein, 11 aa, Homo sapiens
  Table A; Target 45993; HLA-A*30:02; MAGEC2; ENSG00000046774; CTA
GLPDSESSFTY

SEQ ID NO: 45994 - protein, 11 aa, Homo sapiens
  Table A; Target 45994; HLA-A*32:01; MAGEC2; ENSG00000046774; CTA
GLPDSESSFTY

SEQ ID NO: 45995 - protein, 11 aa, Homo sapiens
  Table A; Target 45995; HLA-B*15:01; MAGEC2; ENSG00000046774; CTA
GLPDSESSFTY

SEQ ID NO: 45996 - protein, 11 aa, Homo sapiens
  Table A; Target 45996; HLA-B*15:03; MAGEC2; ENSG00000046774; CTA
GLPDSESSFTY

SEQ ID NO: 45997 - protein, 11 aa, Homo sapiens
  Table A; Target 45997; HLA-B*46:01; MAGEC2; ENSG00000046774; CTA
GLPDSESSFTY

SEQ ID NO: 45998 - protein, 9 aa, Homo sapiens
  Table A; Target 45998; HLA-B*07:02; MAGEC2; ENSG00000046774; CTA
GPRAHSESI

SEQ ID NO: 45999 - protein, 9 aa, Homo sapiens
  Table A; Target 45999; HLA-B*56:01; MAGEC2; ENSG00000046774; CTA
GPRAHSESI

SEQ ID NO: 46000 - protein, 9 aa, Homo sapiens
  Table A; Target 46000; HLA-C*07:02; MAGEC2; ENSG00000046774; CTA
GPRAHSESI

SEQ ID NO: 46001 - protein, 10 aa, Homo sapiens
  Table A; Target 46001; HLA-B*07:02; MAGEC2; ENSG00000046774; CTA
GPSQSPLSSC

SEQ ID NO: 46002 - protein, 10 aa, Homo sapiens
  Table A; Target 46002; HLA-B*56:01; MAGEC2; ENSG00000046774; CTA
GPSQSPLSSC

SEQ ID NO: 46003 - protein, 10 aa, Homo sapiens
  Table A; Target 46003; HLA-A*25:01; MAGEC2; ENSG00000046774; CTA
GVIPNLTESI

SEQ ID NO: 46004 - protein, 10 aa, Homo sapiens
  Table A; Target 46004; HLA-A*02:01; MAGEC2; ENSG00000046774; CTA
GVYAGREHFV

SEQ ID NO: 46005 - protein, 10 aa, Homo sapiens
  Table A; Target 46005; HLA-A*02:03; MAGEC2; ENSG00000046774; CTA
GVYAGREHFV

SEQ ID NO: 46006 - protein, 11 aa, Homo sapiens
  Table A; Target 46006; HLA-A*03:01; MAGEC2; ENSG00000046774; CTA
GVYAGREHFVY

SEQ ID NO: 46007 - protein, 11 aa, Homo sapiens
  Table A; Target 46007; HLA-A*29:02; MAGEC2; ENSG00000046774; CTA
GVYAGREHFVY

SEQ ID NO: 46008 - protein, 11 aa, Homo sapiens
  Table A; Target 46008; HLA-A*30:02; MAGEC2; ENSG00000046774; CTA
GVYAGREHFVY

SEQ ID NO: 46009 - protein, 10 aa, Homo sapiens
  Table A; Target 46009; HLA-B*35:03; MAGEC2; ENSG00000046774; CTA
HPTDEEEEEA

SEQ ID NO: 46010 - protein, 9 aa, Homo sapiens
  Table A; Target 46010; HLA-B*35:01; MAGEC2; ENSG00000046774; CTA
HSSPPYYEF

SEQ ID NO: 46011 - protein, 9 aa, Homo sapiens
  Table A; Target 46011; HLA-B*57:01; MAGEC2; ENSG00000046774; CTA
HSSPPYYEF

SEQ ID NO: 46012 - protein, 9 aa, Homo sapiens
  Table A; Target 46012; HLA-B*58:01; MAGEC2; ENSG00000046774; CTA
HSSPPYYEF

SEQ ID NO: 46013 - protein, 9 aa, Homo sapiens
  Table A; Target 46013; HLA-C*02:02; MAGEC2; ENSG00000046774; CTA
HSSPPYYEF

SEQ ID NO: 46014 - protein, 8 aa, Homo sapiens
  Table A; Target 46014; HLA-B*18:01; MAGEC2; ENSG00000046774; CTA
IEVGPDHF

SEQ ID NO: 46015 - protein, 10 aa, Homo sapiens
  Table A; Target 46015; HLA-B*49:01; MAGEC2; ENSG00000046774; CTA
IEVGPDHFCV

SEQ ID NO: 46016 - protein, 9 aa, Homo sapiens
  Table A; Target 46016; HLA-A*03:01; MAGEC2; ENSG00000046774; CTA
IILSVIFIK

SEQ ID NO: 46017 - protein, 8 aa, Homo sapiens
  Table A; Target 46017; HLA-B*51:01; MAGEC2; ENSG00000046774; CTA
IPNLTESI

SEQ ID NO: 46018 - protein, 8 aa, Homo sapiens
  Table A; Target 46018; HLA-B*56:01; MAGEC2; ENSG00000046774; CTA
IPNLTESI

SEQ ID NO: 46019 - protein, 9 aa, Homo sapiens
  Table A; Target 46019; HLA-B*56:01; MAGEC2; ENSG00000046774; CTA
IPSSPPQGP

SEQ ID NO: 46020 - protein, 9 aa, Homo sapiens
  Table A; Target 46020; HLA-B*57:01; MAGEC2; ENSG00000046774; CTA
IVIKYKDYF

SEQ ID NO: 46021 - protein, 9 aa, Homo sapiens
  Table A; Target 46021; HLA-A*30:01; MAGEC2; ENSG00000046774; CTA
KDVEERVQA

SEQ ID NO: 46022 - protein, 9 aa, Homo sapiens
  Table A; Target 46022; HLA-B*40:02; MAGEC2; ENSG00000046774; CTA
KDVEERVQA

SEQ ID NO: 46023 - protein, 11 aa, Homo sapiens
  Table A; Target 46023; HLA-A*30:01; MAGEC2; ENSG00000046774; CTA
KDVEERVQATI

SEQ ID NO: 46024 - protein, 8 aa, Homo sapiens
  Table A; Target 46024; HLA-B*37:01; MAGEC2; ENSG00000046774; CTA
KDYFPVIL

SEQ ID NO: 46025 - protein, 9 aa, Homo sapiens
  Table A; Target 46025; HLA-A*03:01; MAGEC2; ENSG00000046774; CTA
KDYFPVILK

SEQ ID NO: 46026 - protein, 9 aa, Homo sapiens
  Table A; Target 46026; HLA-A*03:02; MAGEC2; ENSG00000046774; CTA
KDYFPVILK

SEQ ID NO: 46027 - protein, 10 aa, Homo sapiens
  Table A; Target 46027; HLA-A*03:01; MAGEC2; ENSG00000046774; CTA
KLNNTVPSSF

SEQ ID NO: 46028 - protein, 10 aa, Homo sapiens
  Table A; Target 46028; HLA-A*03:02; MAGEC2; ENSG00000046774; CTA
KLNNTVPSSF

SEQ ID NO: 46029 - protein, 10 aa, Homo sapiens
  Table A; Target 46029; HLA-A*23:01; MAGEC2; ENSG00000046774; CTA
KLNNTVPSSF

SEQ ID NO: 46030 - protein, 10 aa, Homo sapiens
  Table A; Target 46030; HLA-A*24:02; MAGEC2; ENSG00000046774; CTA
KLNNTVPSSF

SEQ ID NO: 46031 - protein, 10 aa, Homo sapiens
  Table A; Target 46031; HLA-A*30:02; MAGEC2; ENSG00000046774; CTA
KLNNTVPSSF

SEQ ID NO: 46032 - protein, 10 aa, Homo sapiens
  Table A; Target 46032; HLA-A*32:01; MAGEC2; ENSG00000046774; CTA
KLNNTVPSSF

SEQ ID NO: 46033 - protein, 10 aa, Homo sapiens
  Table A; Target 46033; HLA-B*15:01; MAGEC2; ENSG00000046774; CTA
KLNNTVPSSF

SEQ ID NO: 46034 - protein, 10 aa, Homo sapiens
  Table A; Target 46034; HLA-B*15:03; MAGEC2; ENSG00000046774; CTA
KLNNTVPSSF

SEQ ID NO: 46035 - protein, 10 aa, Homo sapiens
  Table A; Target 46035; HLA-B*46:01; MAGEC2; ENSG00000046774; CTA
KLNNTVPSSF

SEQ ID NO: 46036 - protein, 10 aa, Homo sapiens
  Table A; Target 46036; HLA-B*58:01; MAGEC2; ENSG00000046774; CTA
KLNNTVPSSF

SEQ ID NO: 46037 - protein, 10 aa, Homo sapiens
  Table A; Target 46037; HLA-C*01:02; MAGEC2; ENSG00000046774; CTA
KLNNTVPSSF

SEQ ID NO: 46038 - protein, 10 aa, Homo sapiens
  Table A; Target 46038; HLA-C*14:02; MAGEC2; ENSG00000046774; CTA
KLNNTVPSSF

SEQ ID NO: 46039 - protein, 9 aa, Homo sapiens
  Table A; Target 46039; HLA-A*02:01; MAGEC2; ENSG00000046774; CTA
KVAELVEFL

SEQ ID NO: 46040 - protein, 9 aa, Homo sapiens
  Table A; Target 46040; HLA-A*02:03; MAGEC2; ENSG00000046774; CTA
KVAELVEFL

SEQ ID NO: 46041 - protein, 9 aa, Homo sapiens
  Table A; Target 46041; HLA-A*02:04; MAGEC2; ENSG00000046774; CTA
KVAELVEFL

SEQ ID NO: 46042 - protein, 9 aa, Homo sapiens
  Table A; Target 46042; HLA-A*02:07; MAGEC2; ENSG00000046774; CTA
KVAELVEFL

SEQ ID NO: 46043 - protein, 9 aa, Homo sapiens
  Table A; Target 46043; HLA-A*68:02; MAGEC2; ENSG00000046774; CTA
KVAELVEFL

SEQ ID NO: 46044 - protein, 9 aa, Homo sapiens
  Table A; Target 46044; HLA-B*27:05; MAGEC2; ENSG00000046774; CTA
KVAELVEFL

SEQ ID NO: 46045 - protein, 9 aa, Homo sapiens
  Table A; Target 46045; HLA-B*58:01; MAGEC2; ENSG00000046774; CTA
KVAELVEFL

SEQ ID NO: 46046 - protein, 10 aa, Homo sapiens
  Table A; Target 46046; HLA-A*02:04; MAGEC2; ENSG00000046774; CTA
KVAELVEFLL

SEQ ID NO: 46047 - protein, 9 aa, Homo sapiens
  Table A; Target 46047; HLA-A*02:01; MAGEC2; ENSG00000046774; CTA
KVLEFLAKL

SEQ ID NO: 46048 - protein, 9 aa, Homo sapiens
  Table A; Target 46048; HLA-A*02:03; MAGEC2; ENSG00000046774; CTA
KVLEFLAKL

SEQ ID NO: 46049 - protein, 9 aa, Homo sapiens
  Table A; Target 46049; HLA-A*02:04; MAGEC2; ENSG00000046774; CTA
KVLEFLAKL

SEQ ID NO: 46050 - protein, 9 aa, Homo sapiens
  Table A; Target 46050; HLA-A*02:07; MAGEC2; ENSG00000046774; CTA
KVLEFLAKL

SEQ ID NO: 46051 - protein, 9 aa, Homo sapiens
  Table A; Target 46051; HLA-A*03:01; MAGEC2; ENSG00000046774; CTA
KVLEFLAKL

SEQ ID NO: 46052 - protein, 9 aa, Homo sapiens
  Table A; Target 46052; HLA-A*24:02; MAGEC2; ENSG00000046774; CTA
KVLEFLAKL

SEQ ID NO: 46053 - protein, 9 aa, Homo sapiens
  Table A; Target 46053; HLA-A*31:01; MAGEC2; ENSG00000046774; CTA
KVLEFLAKL

SEQ ID NO: 46054 - protein, 9 aa, Homo sapiens
  Table A; Target 46054; HLA-B*57:01; MAGEC2; ENSG00000046774; CTA
KVLEFLAKL

SEQ ID NO: 46055 - protein, 9 aa, Homo sapiens
  Table A; Target 46055; HLA-A*02:04; MAGEC2; ENSG00000046774; CTA
KVWVQGHYL

SEQ ID NO: 46056 - protein, 11 aa, Homo sapiens
  Table A; Target 46056; HLA-A*03:01; MAGEC2; ENSG00000046774; CTA
KVWVQGHYLEY

SEQ ID NO: 46057 - protein, 11 aa, Homo sapiens
  Table A; Target 46057; HLA-A*29:02; MAGEC2; ENSG00000046774; CTA
KVWVQGHYLEY

SEQ ID NO: 46058 - protein, 9 aa, Homo sapiens
  Table A; Target 46058; HLA-A*24:02; MAGEC2; ENSG00000046774; CTA
KYKDYFPVI

SEQ ID NO: 46059 - protein, 10 aa, Homo sapiens
  Table A; Target 46059; HLA-A*24:02; MAGEC2; ENSG00000046774; CTA
KYKDYFPVIL

SEQ ID NO: 46060 - protein, 8 aa, Homo sapiens
  Table A; Target 46060; HLA-B*08:01; MAGEC2; ENSG00000046774; CTA
LAKLNNTV

SEQ ID NO: 46061 - protein, 8 aa, Homo sapiens
  Table A; Target 46061; HLA-B*51:01; MAGEC2; ENSG00000046774; CTA
LAKLNNTV

SEQ ID NO: 46062 - protein, 8 aa, Homo sapiens
  Table A; Target 46062; HLA-A*02:04; MAGEC2; ENSG00000046774; CTA
LLFGLALI

SEQ ID NO: 46063 - protein, 10 aa, Homo sapiens
  Table A; Target 46063; HLA-A*02:01; MAGEC2; ENSG00000046774; CTA
LLFGLALIEV

SEQ ID NO: 46064 - protein, 10 aa, Homo sapiens
  Table A; Target 46064; HLA-A*02:03; MAGEC2; ENSG00000046774; CTA
LLFGLALIEV

SEQ ID NO: 46065 - protein, 10 aa, Homo sapiens
  Table A; Target 46065; HLA-A*02:04; MAGEC2; ENSG00000046774; CTA
LLFGLALIEV

SEQ ID NO: 46066 - protein, 10 aa, Homo sapiens
  Table A; Target 46066; HLA-A*02:07; MAGEC2; ENSG00000046774; CTA
LLFGLALIEV

SEQ ID NO: 46067 - protein, 8 aa, Homo sapiens
  Table A; Target 46067; HLA-B*55:01; MAGEC2; ENSG00000046774; CTA
LPDSESSF

SEQ ID NO: 46068 - protein, 8 aa, Homo sapiens
  Table A; Target 46068; HLA-C*05:01; MAGEC2; ENSG00000046774; CTA
LPDSESSF

SEQ ID NO: 46069 - protein, 10 aa, Homo sapiens
  Table A; Target 46069; HLA-A*01:01; MAGEC2; ENSG00000046774; CTA
LPDSESSFTY

SEQ ID NO: 46070 - protein, 10 aa, Homo sapiens
  Table A; Target 46070; HLA-B*35:01; MAGEC2; ENSG00000046774; CTA
LPDSESSFTY

SEQ ID NO: 46071 - protein, 10 aa, Homo sapiens
  Table A; Target 46071; HLA-C*03:03; MAGEC2; ENSG00000046774; CTA
LPDSESSFTY

SEQ ID NO: 46072 - protein, 10 aa, Homo sapiens
  Table A; Target 46072; HLA-B*57:01; MAGEC2; ENSG00000046774; CTA
LSVMSSNVSF

SEQ ID NO: 46073 - protein, 10 aa, Homo sapiens
  Table A; Target 46073; HLA-B*58:01; MAGEC2; ENSG00000046774; CTA
LSVMSSNVSF

SEQ ID NO: 46074 - protein, 11 aa, Homo sapiens
  Table A; Target 46074; HLA-C*05:01; MAGEC2; ENSG00000046774; CTA
LTDEGSDDEGM

SEQ ID NO: 46075 - protein, 9 aa, Homo sapiens
  Table A; Target 46075; HLA-A*01:01; MAGEC2; ENSG00000046774; CTA
LVEFLLLKY

SEQ ID NO: 46076 - protein, 9 aa, Homo sapiens
  Table A; Target 46076; HLA-A*29:02; MAGEC2; ENSG00000046774; CTA
LVEFLLLKY

SEQ ID NO: 46077 - protein, 8 aa, Homo sapiens
  Table A; Target 46077; HLA-A*25:01; MAGEC2; ENSG00000046774; CTA
LVFSPSSF

SEQ ID NO: 46078 - protein, 8 aa, Homo sapiens
  Table A; Target 46078; HLA-A*26:01; MAGEC2; ENSG00000046774; CTA
LVFSPSSF

SEQ ID NO: 46079 - protein, 8 aa, Homo sapiens
  Table A; Target 46079; HLA-A*32:01; MAGEC2; ENSG00000046774; CTA
LVFSPSSF

SEQ ID NO: 46080 - protein, 8 aa, Homo sapiens
  Table A; Target 46080; HLA-B*39:01; MAGEC2; ENSG00000046774; CTA
LVFSPSSF

SEQ ID NO: 46081 - protein, 8 aa, Homo sapiens
  Table A; Target 46081; HLA-B*46:01; MAGEC2; ENSG00000046774; CTA
LVFSPSSF

SEQ ID NO: 46082 - protein, 8 aa, Homo sapiens
  Table A; Target 46082; HLA-C*02:02; MAGEC2; ENSG00000046774; CTA
LVFSPSSF

SEQ ID NO: 46083 - protein, 8 aa, Homo sapiens
  Table A; Target 46083; HLA-C*05:01; MAGEC2; ENSG00000046774; CTA
LVFSPSSF

SEQ ID NO: 46084 - protein, 8 aa, Homo sapiens
  Table A; Target 46084; HLA-C*12:03; MAGEC2; ENSG00000046774; CTA
LVFSPSSF

SEQ ID NO: 46085 - protein, 10 aa, Homo sapiens
  Table A; Target 46085; HLA-A*23:01; MAGEC2; ENSG00000046774; CTA
LYLVFSPSSF

SEQ ID NO: 46086 - protein, 10 aa, Homo sapiens
  Table A; Target 46086; HLA-A*24:02; MAGEC2; ENSG00000046774; CTA
LYLVFSPSSF

SEQ ID NO: 46087 - protein, 10 aa, Homo sapiens
  Table A; Target 46087; HLA-A*29:02; MAGEC2; ENSG00000046774; CTA
LYLVFSPSSF

SEQ ID NO: 46088 - protein, 10 aa, Homo sapiens
  Table A; Target 46088; HLA-C*14:02; MAGEC2; ENSG00000046774; CTA
LYLVFSPSSF

SEQ ID NO: 46089 - protein, 8 aa, Homo sapiens
  Table A; Target 46089; HLA-B*51:01; MAGEC2; ENSG00000046774; CTA
MASESLSV

SEQ ID NO: 46090 - protein, 8 aa, Homo sapiens
  Table A; Target 46090; HLA-C*03:04; MAGEC2; ENSG00000046774; CTA
MASESLSV

SEQ ID NO: 46091 - protein, 9 aa, Homo sapiens
  Table A; Target 46091; HLA-A*25:01; MAGEC2; ENSG00000046774; CTA
MASESLSVM

SEQ ID NO: 46092 - protein, 9 aa, Homo sapiens
  Table A; Target 46092; HLA-A*26:01; MAGEC2; ENSG00000046774; CTA
MASESLSVM

SEQ ID NO: 46093 - protein, 9 aa, Homo sapiens
  Table A; Target 46093; HLA-A*68:01; MAGEC2; ENSG00000046774; CTA
MASESLSVM

SEQ ID NO: 46094 - protein, 9 aa, Homo sapiens
  Table A; Target 46094; HLA-B*07:02; MAGEC2; ENSG00000046774; CTA
MASESLSVM

SEQ ID NO: 46095 - protein, 9 aa, Homo sapiens
  Table A; Target 46095; HLA-B*15:01; MAGEC2; ENSG00000046774; CTA
MASESLSVM

SEQ ID NO: 46096 - protein, 9 aa, Homo sapiens
  Table A; Target 46096; HLA-B*15:03; MAGEC2; ENSG00000046774; CTA
MASESLSVM

SEQ ID NO: 46097 - protein, 9 aa, Homo sapiens
  Table A; Target 46097; HLA-B*27:05; MAGEC2; ENSG00000046774; CTA
MASESLSVM

SEQ ID NO: 46098 - protein, 9 aa, Homo sapiens
  Table A; Target 46098; HLA-B*35:03; MAGEC2; ENSG00000046774; CTA
MASESLSVM

SEQ ID NO: 46099 - protein, 9 aa, Homo sapiens
  Table A; Target 46099; HLA-B*38:01; MAGEC2; ENSG00000046774; CTA
MASESLSVM

SEQ ID NO: 46100 - protein, 9 aa, Homo sapiens
  Table A; Target 46100; HLA-B*39:01; MAGEC2; ENSG00000046774; CTA
MASESLSVM

SEQ ID NO: 46101 - protein, 9 aa, Homo sapiens
  Table A; Target 46101; HLA-B*46:01; MAGEC2; ENSG00000046774; CTA
MASESLSVM

SEQ ID NO: 46102 - protein, 9 aa, Homo sapiens
  Table A; Target 46102; HLA-B*51:01; MAGEC2; ENSG00000046774; CTA
MASESLSVM

SEQ ID NO: 46103 - protein, 9 aa, Homo sapiens
  Table A; Target 46103; HLA-B*54:01; MAGEC2; ENSG00000046774; CTA
MASESLSVM

SEQ ID NO: 46104 - protein, 9 aa, Homo sapiens
  Table A; Target 46104; HLA-B*55:01; MAGEC2; ENSG00000046774; CTA
MASESLSVM

SEQ ID NO: 46105 - protein, 9 aa, Homo sapiens
  Table A; Target 46105; HLA-B*58:01; MAGEC2; ENSG00000046774; CTA
MASESLSVM

SEQ ID NO: 46106 - protein, 9 aa, Homo sapiens
  Table A; Target 46106; HLA-C*01:02; MAGEC2; ENSG00000046774; CTA
MASESLSVM

SEQ ID NO: 46107 - protein, 9 aa, Homo sapiens
  Table A; Target 46107; HLA-C*02:02; MAGEC2; ENSG00000046774; CTA
MASESLSVM

SEQ ID NO: 46108 - protein, 9 aa, Homo sapiens
  Table A; Target 46108; HLA-C*03:03; MAGEC2; ENSG00000046774; CTA
MASESLSVM

SEQ ID NO: 46109 - protein, 9 aa, Homo sapiens
  Table A; Target 46109; HLA-C*03:04; MAGEC2; ENSG00000046774; CTA
MASESLSVM

SEQ ID NO: 46110 - protein, 9 aa, Homo sapiens
  Table A; Target 46110; HLA-C*05:01; MAGEC2; ENSG00000046774; CTA
MASESLSVM

SEQ ID NO: 46111 - protein, 9 aa, Homo sapiens
  Table A; Target 46111; HLA-C*07:04; MAGEC2; ENSG00000046774; CTA
MASESLSVM

SEQ ID NO: 46112 - protein, 9 aa, Homo sapiens
  Table A; Target 46112; HLA-C*07:06; MAGEC2; ENSG00000046774; CTA
MASESLSVM

SEQ ID NO: 46113 - protein, 9 aa, Homo sapiens
  Table A; Target 46113; HLA-C*12:03; MAGEC2; ENSG00000046774; CTA
MASESLSVM

SEQ ID NO: 46114 - protein, 9 aa, Homo sapiens
  Table A; Target 46114; HLA-C*14:02; MAGEC2; ENSG00000046774; CTA
MASESLSVM

SEQ ID NO: 46115 - protein, 9 aa, Homo sapiens
  Table A; Target 46115; HLA-C*16:01; MAGEC2; ENSG00000046774; CTA
MASESLSVM

SEQ ID NO: 46116 - protein, 9 aa, Homo sapiens
  Table A; Target 46116; HLA-C*16:02; MAGEC2; ENSG00000046774; CTA
MASESLSVM

SEQ ID NO: 46117 - protein, 9 aa, Homo sapiens
  Table A; Target 46117; HLA-C*16:04; MAGEC2; ENSG00000046774; CTA
MASESLSVM

SEQ ID NO: 46118 - protein, 8 aa, Homo sapiens
  Table A; Target 46118; HLA-B*18:01; MAGEC2; ENSG00000046774; CTA
MELLFGLA

SEQ ID NO: 46119 - protein, 9 aa, Homo sapiens
  Table A; Target 46119; HLA-B*18:01; MAGEC2; ENSG00000046774; CTA
MELLFGLAL

SEQ ID NO: 46120 - protein, 9 aa, Homo sapiens
  Table A; Target 46120; HLA-B*44:02; MAGEC2; ENSG00000046774; CTA
MELLFGLAL

SEQ ID NO: 46121 - protein, 9 aa, Homo sapiens
  Table A; Target 46121; HLA-B*49:01; MAGEC2; ENSG00000046774; CTA
MELLFGLAL

SEQ ID NO: 46122 - protein, 10 aa, Homo sapiens
  Table A; Target 46122; HLA-B*49:01; MAGEC2; ENSG00000046774; CTA
MELLFGLALI

SEQ ID NO: 46123 - protein, 8 aa, Homo sapiens
  Table A; Target 46123; HLA-B*18:01; MAGEC2; ENSG00000046774; CTA
MLMIVIKY

SEQ ID NO: 46124 - protein, 8 aa, Homo sapiens
  Table A; Target 46124; HLA-C*07:01; MAGEC2; ENSG00000046774; CTA
MLMIVIKY

SEQ ID NO: 46125 - protein, 9 aa, Homo sapiens
  Table A; Target 46125; HLA-B*35:03; MAGEC2; ENSG00000046774; CTA
MPENSLLII

SEQ ID NO: 46126 - protein, 9 aa, Homo sapiens
  Table A; Target 46126; HLA-B*51:01; MAGEC2; ENSG00000046774; CTA
MPENSLLII

SEQ ID NO: 46127 - protein, 11 aa, Homo sapiens
  Table A; Target 46127; HLA-B*35:01; MAGEC2; ENSG00000046774; CTA
MPENSLLIIIL

SEQ ID NO: 46128 - protein, 11 aa, Homo sapiens
  Table A; Target 46128; HLA-B*35:03; MAGEC2; ENSG00000046774; CTA
MPENSLLIIIL

SEQ ID NO: 46129 - protein, 9 aa, Homo sapiens
  Table A; Target 46129; HLA-B*07:02; MAGEC2; ENSG00000046774; CTA
MPPVPGVPF

SEQ ID NO: 46130 - protein, 9 aa, Homo sapiens
  Table A; Target 46130; HLA-B*35:01; MAGEC2; ENSG00000046774; CTA
MPPVPGVPF

SEQ ID NO: 46131 - protein, 9 aa, Homo sapiens
  Table A; Target 46131; HLA-B*35:03; MAGEC2; ENSG00000046774; CTA
MPPVPGVPF

SEQ ID NO: 46132 - protein, 9 aa, Homo sapiens
  Table A; Target 46132; HLA-B*54:01; MAGEC2; ENSG00000046774; CTA
MPPVPGVPF

SEQ ID NO: 46133 - protein, 9 aa, Homo sapiens
  Table A; Target 46133; HLA-B*55:01; MAGEC2; ENSG00000046774; CTA
MPPVPGVPF

SEQ ID NO: 46134 - protein, 9 aa, Homo sapiens
  Table A; Target 46134; HLA-A*26:01; MAGEC2; ENSG00000046774; CTA
NAVGVYAGR

SEQ ID NO: 46135 - protein, 9 aa, Homo sapiens
  Table A; Target 46135; HLA-A*33:01; MAGEC2; ENSG00000046774; CTA
NAVGVYAGR

SEQ ID NO: 46136 - protein, 9 aa, Homo sapiens
  Table A; Target 46136; HLA-A*33:03; MAGEC2; ENSG00000046774; CTA
NAVGVYAGR

SEQ ID NO: 46137 - protein, 9 aa, Homo sapiens
  Table A; Target 46137; HLA-A*68:02; MAGEC2; ENSG00000046774; CTA
NAVGVYAGR

SEQ ID NO: 46138 - protein, 9 aa, Homo sapiens
  Table A; Target 46138; HLA-B*27:02; MAGEC2; ENSG00000046774; CTA
NAVGVYAGR

SEQ ID NO: 46139 - protein, 9 aa, Homo sapiens
  Table A; Target 46139; HLA-C*07:06; MAGEC2; ENSG00000046774; CTA
NAVGVYAGR

SEQ ID NO: 46140 - protein, 9 aa, Homo sapiens
  Table A; Target 46140; HLA-A*30:01; MAGEC2; ENSG00000046774; CTA
NDSPTSVEL

SEQ ID NO: 46141 - protein, 9 aa, Homo sapiens
  Table A; Target 46141; HLA-B*27:05; MAGEC2; ENSG00000046774; CTA
NDSPTSVEL

SEQ ID NO: 46142 - protein, 9 aa, Homo sapiens
  Table A; Target 46142; HLA-B*35:03; MAGEC2; ENSG00000046774; CTA
NDSPTSVEL

SEQ ID NO: 46143 - protein, 9 aa, Homo sapiens
  Table A; Target 46143; HLA-B*37:01; MAGEC2; ENSG00000046774; CTA
NDSPTSVEL

SEQ ID NO: 46144 - protein, 9 aa, Homo sapiens
  Table A; Target 46144; HLA-B*38:01; MAGEC2; ENSG00000046774; CTA
NDSPTSVEL

SEQ ID NO: 46145 - protein, 9 aa, Homo sapiens
  Table A; Target 46145; HLA-B*39:01; MAGEC2; ENSG00000046774; CTA
NDSPTSVEL

SEQ ID NO: 46146 - protein, 9 aa, Homo sapiens
  Table A; Target 46146; HLA-B*40:01; MAGEC2; ENSG00000046774; CTA
NDSPTSVEL

SEQ ID NO: 46147 - protein, 9 aa, Homo sapiens
  Table A; Target 46147; HLA-C*16:02; MAGEC2; ENSG00000046774; CTA
NDSPTSVEL

SEQ ID NO: 46148 - protein, 10 aa, Homo sapiens
  Table A; Target 46148; HLA-A*25:01; MAGEC2; ENSG00000046774; CTA
NTVPSSFPSW

SEQ ID NO: 46149 - protein, 10 aa, Homo sapiens
  Table A; Target 46149; HLA-A*26:01; MAGEC2; ENSG00000046774; CTA
NTVPSSFPSW

SEQ ID NO: 46150 - protein, 10 aa, Homo sapiens
  Table A; Target 46150; HLA-B*57:01; MAGEC2; ENSG00000046774; CTA
NTVPSSFPSW

SEQ ID NO: 46151 - protein, 10 aa, Homo sapiens
  Table A; Target 46151; HLA-B*58:01; MAGEC2; ENSG00000046774; CTA
NTVPSSFPSW

SEQ ID NO: 46152 - protein, 10 aa, Homo sapiens
  Table A; Target 46152; HLA-C*05:01; MAGEC2; ENSG00000046774; CTA
NVDNDSPTSV

SEQ ID NO: 46153 - protein, 9 aa, Homo sapiens
  Table A; Target 46153; HLA-A*03:01; MAGEC2; ENSG00000046774; CTA
RAHSESIKK

SEQ ID NO: 46154 - protein, 9 aa, Homo sapiens
  Table A; Target 46154; HLA-A*03:02; MAGEC2; ENSG00000046774; CTA
RAHSESIKK

SEQ ID NO: 46155 - protein, 9 aa, Homo sapiens
  Table A; Target 46155; HLA-A*11:01; MAGEC2; ENSG00000046774; CTA
RAHSESIKK

SEQ ID NO: 46156 - protein, 10 aa, Homo sapiens
  Table A; Target 46156; HLA-B*57:01; MAGEC2; ENSG00000046774; CTA
RAREFMELLF

SEQ ID NO: 46157 - protein, 10 aa, Homo sapiens
  Table A; Target 46157; HLA-A*30:02; MAGEC2; ENSG00000046774; CTA
REVPHSSPPY

SEQ ID NO: 46158 - protein, 10 aa, Homo sapiens
  Table A; Target 46158; HLA-B*44:03; MAGEC2; ENSG00000046774; CTA
REVPHSSPPY

SEQ ID NO: 46159 - protein, 11 aa, Homo sapiens
  Table A; Target 46159; HLA-A*30:02; MAGEC2; ENSG00000046774; CTA
REVPHSSPPYY

SEQ ID NO: 46160 - protein, 11 aa, Homo sapiens
  Table A; Target 46160; HLA-B*44:03; MAGEC2; ENSG00000046774; CTA
REVPHSSPPYY

SEQ ID NO: 46161 - protein, 8 aa, Homo sapiens
  Table A; Target 46161; HLA-B*37:01; MAGEC2; ENSG00000046774; CTA
SASSTLYL

SEQ ID NO: 46162 - protein, 8 aa, Homo sapiens
  Table A; Target 46162; HLA-C*03:03; MAGEC2; ENSG00000046774; CTA
SASSTLYL

SEQ ID NO: 46163 - protein, 8 aa, Homo sapiens
  Table A; Target 46163; HLA-C*03:04; MAGEC2; ENSG00000046774; CTA
SASSTLYL

SEQ ID NO: 46164 - protein, 8 aa, Homo sapiens
  Table A; Target 46164; HLA-C*05:01; MAGEC2; ENSG00000046774; CTA
SASSTLYL

SEQ ID NO: 46165 - protein, 9 aa, Homo sapiens
  Table A; Target 46165; HLA-A*02:04; MAGEC2; ENSG00000046774; CTA
SASSTLYLV

SEQ ID NO: 46166 - protein, 9 aa, Homo sapiens
  Table A; Target 46166; HLA-A*68:02; MAGEC2; ENSG00000046774; CTA
SASSTLYLV

SEQ ID NO: 46167 - protein, 9 aa, Homo sapiens
  Table A; Target 46167; HLA-B*13:02; MAGEC2; ENSG00000046774; CTA
SASSTLYLV

SEQ ID NO: 46168 - protein, 9 aa, Homo sapiens
  Table A; Target 46168; HLA-C*02:02; MAGEC2; ENSG00000046774; CTA
SASSTLYLV

SEQ ID NO: 46169 - protein, 9 aa, Homo sapiens
  Table A; Target 46169; HLA-C*16:02; MAGEC2; ENSG00000046774; CTA
SASSTLYLV

SEQ ID NO: 46170 - protein, 10 aa, Homo sapiens
  Table A; Target 46170; HLA-B*35:01; MAGEC2; ENSG00000046774; CTA
SASSTLYLVF

SEQ ID NO: 46171 - protein, 10 aa, Homo sapiens
  Table A; Target 46171; HLA-C*02:02; MAGEC2; ENSG00000046774; CTA
SASSTLYLVF

SEQ ID NO: 46172 - protein, 9 aa, Homo sapiens
  Table A; Target 46172; HLA-A*30:01; MAGEC2; ENSG00000046774; CTA
SEEVIWEVL

SEQ ID NO: 46173 - protein, 9 aa, Homo sapiens
  Table A; Target 46173; HLA-B*40:01; MAGEC2; ENSG00000046774; CTA
SEEVIWEVL

SEQ ID NO: 46174 - protein, 9 aa, Homo sapiens
  Table A; Target 46174; HLA-B*37:01; MAGEC2; ENSG00000046774; CTA
SESIKKKVL

SEQ ID NO: 46175 - protein, 9 aa, Homo sapiens
  Table A; Target 46175; HLA-B*44:03; MAGEC2; ENSG00000046774; CTA
SESIKKKVL

SEQ ID NO: 46176 - protein, 9 aa, Homo sapiens
  Table A; Target 46176; HLA-A*23:01; MAGEC2; ENSG00000046774; CTA
SESSFTYTL

SEQ ID NO: 46177 - protein, 9 aa, Homo sapiens
  Table A; Target 46177; HLA-B*18:01; MAGEC2; ENSG00000046774; CTA
SESSFTYTL

SEQ ID NO: 46178 - protein, 9 aa, Homo sapiens
  Table A; Target 46178; HLA-B*27:02; MAGEC2; ENSG00000046774; CTA
SESSFTYTL

SEQ ID NO: 46179 - protein, 9 aa, Homo sapiens
  Table A; Target 46179; HLA-B*37:01; MAGEC2; ENSG00000046774; CTA
SESSFTYTL

SEQ ID NO: 46180 - protein, 9 aa, Homo sapiens
  Table A; Target 46180; HLA-B*38:01; MAGEC2; ENSG00000046774; CTA
SESSFTYTL

SEQ ID NO: 46181 - protein, 9 aa, Homo sapiens
  Table A; Target 46181; HLA-B*39:01; MAGEC2; ENSG00000046774; CTA
SESSFTYTL

SEQ ID NO: 46182 - protein, 9 aa, Homo sapiens
  Table A; Target 46182; HLA-B*40:02; MAGEC2; ENSG00000046774; CTA
SESSFTYTL

SEQ ID NO: 46183 - protein, 9 aa, Homo sapiens
  Table A; Target 46183; HLA-B*44:02; MAGEC2; ENSG00000046774; CTA
SESSFTYTL

SEQ ID NO: 46184 - protein, 9 aa, Homo sapiens
  Table A; Target 46184; HLA-B*44:03; MAGEC2; ENSG00000046774; CTA
SESSFTYTL

SEQ ID NO: 46185 - protein, 9 aa, Homo sapiens
  Table A; Target 46185; HLA-B*49:01; MAGEC2; ENSG00000046774; CTA
SESSFTYTL

SEQ ID NO: 46186 - protein, 9 aa, Homo sapiens
  Table A; Target 46186; HLA-C*02:02; MAGEC2; ENSG00000046774; CTA
SESSFTYTL

SEQ ID NO: 46187 - protein, 9 aa, Homo sapiens
  Table A; Target 46187; HLA-C*16:04; MAGEC2; ENSG00000046774; CTA
SESSFTYTL

SEQ ID NO: 46188 - protein, 8 aa, Homo sapiens
  Table A; Target 46188; HLA-C*01:02; MAGEC2; ENSG00000046774; CTA
SFSTSSSL

SEQ ID NO: 46189 - protein, 8 aa, Homo sapiens
  Table A; Target 46189; HLA-C*14:02; MAGEC2; ENSG00000046774; CTA
SFSTSSSL

SEQ ID NO: 46190 - protein, 9 aa, Homo sapiens
  Table A; Target 46190; HLA-A*23:01; MAGEC2; ENSG00000046774; CTA
SFSTSSSLI

SEQ ID NO: 46191 - protein, 9 aa, Homo sapiens
  Table A; Target 46191; HLA-C*14:02; MAGEC2; ENSG00000046774; CTA
SFSTSSSLI

SEQ ID NO: 46192 - protein, 9 aa, Homo sapiens
  Table A; Target 46192; HLA-B*08:01; MAGEC2; ENSG00000046774; CTA
SIKKKVLEF

SEQ ID NO: 46193 - protein, 9 aa, Homo sapiens
  Table A; Target 46193; HLA-A*02:01; MAGEC2; ENSG00000046774; CTA
SLLIIILSV

SEQ ID NO: 46194 - protein, 9 aa, Homo sapiens
  Table A; Target 46194; HLA-A*02:03; MAGEC2; ENSG00000046774; CTA
SLLIIILSV

SEQ ID NO: 46195 - protein, 9 aa, Homo sapiens
  Table A; Target 46195; HLA-A*02:04; MAGEC2; ENSG00000046774; CTA
SLLIIILSV

SEQ ID NO: 46196 - protein, 9 aa, Homo sapiens
  Table A; Target 46196; HLA-A*02:07; MAGEC2; ENSG00000046774; CTA
SLLIIILSV

SEQ ID NO: 46197 - protein, 9 aa, Homo sapiens
  Table A; Target 46197; HLA-A*02:01; MAGEC2; ENSG00000046774; CTA
SLSVMSSNV

SEQ ID NO: 46198 - protein, 9 aa, Homo sapiens
  Table A; Target 46198; HLA-A*02:03; MAGEC2; ENSG00000046774; CTA
SLSVMSSNV

SEQ ID NO: 46199 - protein, 9 aa, Homo sapiens
  Table A; Target 46199; HLA-B*13:02; MAGEC2; ENSG00000046774; CTA
SLSVMSSNV

SEQ ID NO: 46200 - protein, 9 aa, Homo sapiens
  Table A; Target 46200; HLA-B*56:01; MAGEC2; ENSG00000046774; CTA
SPSSFSTSS

SEQ ID NO: 46201 - protein, 11 aa, Homo sapiens
  Table A; Target 46201; HLA-B*35:01; MAGEC2; ENSG00000046774; CTA
SPSSFSTSSSL

SEQ ID NO: 46202 - protein, 11 aa, Homo sapiens
  Table A; Target 46202; HLA-B*35:03; MAGEC2; ENSG00000046774; CTA
SPSSFSTSSSL

SEQ ID NO: 46203 - protein, 11 aa, Homo sapiens
  Table A; Target 46203; HLA-B*56:01; MAGEC2; ENSG00000046774; CTA
SPSSFSTSSSL

SEQ ID NO: 46204 - protein, 8 aa, Homo sapiens
  Table A; Target 46204; HLA-A*30:02; MAGEC2; ENSG00000046774; CTA
SSASSTLY

SEQ ID NO: 46205 - protein, 9 aa, Homo sapiens
  Table A; Target 46205; HLA-A*01:01; MAGEC2; ENSG00000046774; CTA
SSASSTLYL

SEQ ID NO: 46206 - protein, 9 aa, Homo sapiens
  Table A; Target 46206; HLA-A*03:01; MAGEC2; ENSG00000046774; CTA
SSASSTLYL

SEQ ID NO: 46207 - protein, 9 aa, Homo sapiens
  Table A; Target 46207; HLA-A*11:01; MAGEC2; ENSG00000046774; CTA
SSASSTLYL

SEQ ID NO: 46208 - protein, 9 aa, Homo sapiens
  Table A; Target 46208; HLA-C*02:02; MAGEC2; ENSG00000046774; CTA
SSASSTLYL

SEQ ID NO: 46209 - protein, 9 aa, Homo sapiens
  Table A; Target 46209; HLA-C*03:03; MAGEC2; ENSG00000046774; CTA
SSASSTLYL

SEQ ID NO: 46210 - protein, 9 aa, Homo sapiens
  Table A; Target 46210; HLA-C*03:04; MAGEC2; ENSG00000046774; CTA
SSASSTLYL

SEQ ID NO: 46211 - protein, 11 aa, Homo sapiens
  Table A; Target 46211; HLA-B*57:01; MAGEC2; ENSG00000046774; CTA
SSASSTLYLVF

SEQ ID NO: 46212 - protein, 11 aa, Homo sapiens
  Table A; Target 46212; HLA-A*03:01; MAGEC2; ENSG00000046774; CTA
SSFSEESSSQK

SEQ ID NO: 46213 - protein, 11 aa, Homo sapiens
  Table A; Target 46213; HLA-A*03:02; MAGEC2; ENSG00000046774; CTA
SSFSEESSSQK

SEQ ID NO: 46214 - protein, 11 aa, Homo sapiens
  Table A; Target 46214; HLA-A*68:01; MAGEC2; ENSG00000046774; CTA
SSFSEESSSQK

SEQ ID NO: 46215 - protein, 11 aa, Homo sapiens
  Table A; Target 46215; HLA-B*27:02; MAGEC2; ENSG00000046774; CTA
SSFSEESSSQK

SEQ ID NO: 46216 - protein, 11 aa, Homo sapiens
  Table A; Target 46216; HLA-B*27:05; MAGEC2; ENSG00000046774; CTA
SSFSEESSSQK

SEQ ID NO: 46217 - protein, 11 aa, Homo sapiens
  Table A; Target 46217; HLA-C*07:06; MAGEC2; ENSG00000046774; CTA
SSFSEESSSQK

SEQ ID NO: 46218 - protein, 9 aa, Homo sapiens
  Table A; Target 46218; HLA-A*32:01; MAGEC2; ENSG00000046774; CTA
SSFSTSSSL

SEQ ID NO: 46219 - protein, 9 aa, Homo sapiens
  Table A; Target 46219; HLA-B*07:02; MAGEC2; ENSG00000046774; CTA
SSFSTSSSL

SEQ ID NO: 46220 - protein, 9 aa, Homo sapiens
  Table A; Target 46220; HLA-B*15:01; MAGEC2; ENSG00000046774; CTA
SSFSTSSSL

SEQ ID NO: 46221 - protein, 9 aa, Homo sapiens
  Table A; Target 46221; HLA-B*15:03; MAGEC2; ENSG00000046774; CTA
SSFSTSSSL

SEQ ID NO: 46222 - protein, 9 aa, Homo sapiens
  Table A; Target 46222; HLA-B*35:03; MAGEC2; ENSG00000046774; CTA
SSFSTSSSL

SEQ ID NO: 46223 - protein, 9 aa, Homo sapiens
  Table A; Target 46223; HLA-B*40:01; MAGEC2; ENSG00000046774; CTA
SSFSTSSSL

SEQ ID NO: 46224 - protein, 9 aa, Homo sapiens
  Table A; Target 46224; HLA-B*46:01; MAGEC2; ENSG00000046774; CTA
SSFSTSSSL

SEQ ID NO: 46225 - protein, 9 aa, Homo sapiens
  Table A; Target 46225; HLA-B*58:01; MAGEC2; ENSG00000046774; CTA
SSFSTSSSL

SEQ ID NO: 46226 - protein, 9 aa, Homo sapiens
  Table A; Target 46226; HLA-C*01:02; MAGEC2; ENSG00000046774; CTA
SSFSTSSSL

SEQ ID NO: 46227 - protein, 9 aa, Homo sapiens
  Table A; Target 46227; HLA-C*02:02; MAGEC2; ENSG00000046774; CTA
SSFSTSSSL

SEQ ID NO: 46228 - protein, 9 aa, Homo sapiens
  Table A; Target 46228; HLA-C*03:03; MAGEC2; ENSG00000046774; CTA
SSFSTSSSL

SEQ ID NO: 46229 - protein, 9 aa, Homo sapiens
  Table A; Target 46229; HLA-C*03:04; MAGEC2; ENSG00000046774; CTA
SSFSTSSSL

SEQ ID NO: 46230 - protein, 9 aa, Homo sapiens
  Table A; Target 46230; HLA-C*05:01; MAGEC2; ENSG00000046774; CTA
SSFSTSSSL

SEQ ID NO: 46231 - protein, 9 aa, Homo sapiens
  Table A; Target 46231; HLA-C*07:02; MAGEC2; ENSG00000046774; CTA
SSFSTSSSL

SEQ ID NO: 46232 - protein, 9 aa, Homo sapiens
  Table A; Target 46232; HLA-C*14:02; MAGEC2; ENSG00000046774; CTA
SSFSTSSSL

SEQ ID NO: 46233 - protein, 9 aa, Homo sapiens
  Table A; Target 46233; HLA-C*16:04; MAGEC2; ENSG00000046774; CTA
SSFSTSSSL

SEQ ID NO: 46234 - protein, 10 aa, Homo sapiens
  Table A; Target 46234; HLA-A*11:01; MAGEC2; ENSG00000046774; CTA
SSFTYTLDEK

SEQ ID NO: 46235 - protein, 10 aa, Homo sapiens
  Table A; Target 46235; HLA-B*57:01; MAGEC2; ENSG00000046774; CTA
SSPPYYEFLW

SEQ ID NO: 46236 - protein, 9 aa, Homo sapiens
  Table A; Target 46236; HLA-A*03:02; MAGEC2; ENSG00000046774; CTA
SVMSSNVSF

SEQ ID NO: 46237 - protein, 9 aa, Homo sapiens
  Table A; Target 46237; HLA-A*11:01; MAGEC2; ENSG00000046774; CTA
SVMSSNVSF

SEQ ID NO: 46238 - protein, 9 aa, Homo sapiens
  Table A; Target 46238; HLA-A*23:01; MAGEC2; ENSG00000046774; CTA
SVMSSNVSF

SEQ ID NO: 46239 - protein, 9 aa, Homo sapiens
  Table A; Target 46239; HLA-A*24:02; MAGEC2; ENSG00000046774; CTA
SVMSSNVSF

SEQ ID NO: 46240 - protein, 9 aa, Homo sapiens
  Table A; Target 46240; HLA-A*25:01; MAGEC2; ENSG00000046774; CTA
SVMSSNVSF

SEQ ID NO: 46241 - protein, 9 aa, Homo sapiens
  Table A; Target 46241; HLA-A*26:01; MAGEC2; ENSG00000046774; CTA
SVMSSNVSF

SEQ ID NO: 46242 - protein, 9 aa, Homo sapiens
  Table A; Target 46242; HLA-A*29:02; MAGEC2; ENSG00000046774; CTA
SVMSSNVSF

SEQ ID NO: 46243 - protein, 9 aa, Homo sapiens
  Table A; Target 46243; HLA-A*30:02; MAGEC2; ENSG00000046774; CTA
SVMSSNVSF

SEQ ID NO: 46244 - protein, 9 aa, Homo sapiens
  Table A; Target 46244; HLA-A*31:01; MAGEC2; ENSG00000046774; CTA
SVMSSNVSF

SEQ ID NO: 46245 - protein, 9 aa, Homo sapiens
  Table A; Target 46245; HLA-B*07:02; MAGEC2; ENSG00000046774; CTA
SVMSSNVSF

SEQ ID NO: 46246 - protein, 9 aa, Homo sapiens
  Table A; Target 46246; HLA-B*08:01; MAGEC2; ENSG00000046774; CTA
SVMSSNVSF

SEQ ID NO: 46247 - protein, 9 aa, Homo sapiens
  Table A; Target 46247; HLA-B*13:02; MAGEC2; ENSG00000046774; CTA
SVMSSNVSF

SEQ ID NO: 46248 - protein, 9 aa, Homo sapiens
  Table A; Target 46248; HLA-B*15:03; MAGEC2; ENSG00000046774; CTA
SVMSSNVSF

SEQ ID NO: 46249 - protein, 9 aa, Homo sapiens
  Table A; Target 46249; HLA-B*35:01; MAGEC2; ENSG00000046774; CTA
SVMSSNVSF

SEQ ID NO: 46250 - protein, 9 aa, Homo sapiens
  Table A; Target 46250; HLA-B*35:03; MAGEC2; ENSG00000046774; CTA
SVMSSNVSF

SEQ ID NO: 46251 - protein, 9 aa, Homo sapiens
  Table A; Target 46251; HLA-B*37:01; MAGEC2; ENSG00000046774; CTA
SVMSSNVSF

SEQ ID NO: 46252 - protein, 9 aa, Homo sapiens
  Table A; Target 46252; HLA-B*38:01; MAGEC2; ENSG00000046774; CTA
SVMSSNVSF

SEQ ID NO: 46253 - protein, 9 aa, Homo sapiens
  Table A; Target 46253; HLA-B*39:01; MAGEC2; ENSG00000046774; CTA
SVMSSNVSF

SEQ ID NO: 46254 - protein, 9 aa, Homo sapiens
  Table A; Target 46254; HLA-B*44:03; MAGEC2; ENSG00000046774; CTA
SVMSSNVSF

SEQ ID NO: 46255 - protein, 9 aa, Homo sapiens
  Table A; Target 46255; HLA-B*46:01; MAGEC2; ENSG00000046774; CTA
SVMSSNVSF

SEQ ID NO: 46256 - protein, 9 aa, Homo sapiens
  Table A; Target 46256; HLA-B*55:01; MAGEC2; ENSG00000046774; CTA
SVMSSNVSF

SEQ ID NO: 46257 - protein, 9 aa, Homo sapiens
  Table A; Target 46257; HLA-B*57:01; MAGEC2; ENSG00000046774; CTA
SVMSSNVSF

SEQ ID NO: 46258 - protein, 9 aa, Homo sapiens
  Table A; Target 46258; HLA-B*58:01; MAGEC2; ENSG00000046774; CTA
SVMSSNVSF

SEQ ID NO: 46259 - protein, 9 aa, Homo sapiens
  Table A; Target 46259; HLA-C*01:02; MAGEC2; ENSG00000046774; CTA
SVMSSNVSF

SEQ ID NO: 46260 - protein, 9 aa, Homo sapiens
  Table A; Target 46260; HLA-C*02:02; MAGEC2; ENSG00000046774; CTA
SVMSSNVSF

SEQ ID NO: 46261 - protein, 9 aa, Homo sapiens
  Table A; Target 46261; HLA-C*03:03; MAGEC2; ENSG00000046774; CTA
SVMSSNVSF

SEQ ID NO: 46262 - protein, 9 aa, Homo sapiens
  Table A; Target 46262; HLA-C*03:04; MAGEC2; ENSG00000046774; CTA
SVMSSNVSF

SEQ ID NO: 46263 - protein, 9 aa, Homo sapiens
  Table A; Target 46263; HLA-C*05:01; MAGEC2; ENSG00000046774; CTA
SVMSSNVSF

SEQ ID NO: 46264 - protein, 9 aa, Homo sapiens
  Table A; Target 46264; HLA-C*07:02; MAGEC2; ENSG00000046774; CTA
SVMSSNVSF

SEQ ID NO: 46265 - protein, 9 aa, Homo sapiens
  Table A; Target 46265; HLA-C*07:04; MAGEC2; ENSG00000046774; CTA
SVMSSNVSF

SEQ ID NO: 46266 - protein, 9 aa, Homo sapiens
  Table A; Target 46266; HLA-C*07:06; MAGEC2; ENSG00000046774; CTA
SVMSSNVSF

SEQ ID NO: 46267 - protein, 9 aa, Homo sapiens
  Table A; Target 46267; HLA-C*14:02; MAGEC2; ENSG00000046774; CTA
SVMSSNVSF

SEQ ID NO: 46268 - protein, 9 aa, Homo sapiens
  Table A; Target 46268; HLA-C*16:01; MAGEC2; ENSG00000046774; CTA
SVMSSNVSF

SEQ ID NO: 46269 - protein, 9 aa, Homo sapiens
  Table A; Target 46269; HLA-C*16:04; MAGEC2; ENSG00000046774; CTA
SVMSSNVSF

SEQ ID NO: 46270 - protein, 8 aa, Homo sapiens
  Table A; Target 46270; HLA-A*32:01; MAGEC2; ENSG00000046774; CTA
TADDATVM

SEQ ID NO: 46271 - protein, 8 aa, Homo sapiens
  Table A; Target 46271; HLA-B*35:01; MAGEC2; ENSG00000046774; CTA
TADDATVM

SEQ ID NO: 46272 - protein, 8 aa, Homo sapiens
  Table A; Target 46272; HLA-B*35:03; MAGEC2; ENSG00000046774; CTA
TADDATVM

SEQ ID NO: 46273 - protein, 8 aa, Homo sapiens
  Table A; Target 46273; HLA-B*39:01; MAGEC2; ENSG00000046774; CTA
TADDATVM

SEQ ID NO: 46274 - protein, 8 aa, Homo sapiens
  Table A; Target 46274; HLA-B*55:01; MAGEC2; ENSG00000046774; CTA
TADDATVM

SEQ ID NO: 46275 - protein, 8 aa, Homo sapiens
  Table A; Target 46275; HLA-C*03:03; MAGEC2; ENSG00000046774; CTA
TADDATVM

SEQ ID NO: 46276 - protein, 8 aa, Homo sapiens
  Table A; Target 46276; HLA-C*03:04; MAGEC2; ENSG00000046774; CTA
TADDATVM

SEQ ID NO: 46277 - protein, 8 aa, Homo sapiens
  Table A; Target 46277; HLA-C*04:01; MAGEC2; ENSG00000046774; CTA
TADDATVM

SEQ ID NO: 46278 - protein, 8 aa, Homo sapiens
  Table A; Target 46278; HLA-C*07:04; MAGEC2; ENSG00000046774; CTA
TADDATVM

SEQ ID NO: 46279 - protein, 9 aa, Homo sapiens
  Table A; Target 46279; HLA-B*35:03; MAGEC2; ENSG00000046774; CTA
TADDATVMA

SEQ ID NO: 46280 - protein, 9 aa, Homo sapiens
  Table A; Target 46280; HLA-B*39:01; MAGEC2; ENSG00000046774; CTA
TADDATVMA

SEQ ID NO: 46281 - protein, 9 aa, Homo sapiens
  Table A; Target 46281; HLA-B*54:01; MAGEC2; ENSG00000046774; CTA
TADDATVMA

SEQ ID NO: 46282 - protein, 9 aa, Homo sapiens
  Table A; Target 46282; HLA-C*05:01; MAGEC2; ENSG00000046774; CTA
TADDATVMA

SEQ ID NO: 46283 - protein, 8 aa, Homo sapiens
  Table A; Target 46283; HLA-B*49:01; MAGEC2; ENSG00000046774; CTA
TEAEMLMI

SEQ ID NO: 46284 - protein, 9 aa, Homo sapiens
  Table A; Target 46284; HLA-B*18:01; MAGEC2; ENSG00000046774; CTA
TEAEMLMIV

SEQ ID NO: 46285 - protein, 9 aa, Homo sapiens
  Table A; Target 46285; HLA-B*49:01; MAGEC2; ENSG00000046774; CTA
TEAEMLMIV

SEQ ID NO: 46286 - protein, 10 aa, Homo sapiens
  Table A; Target 46286; HLA-A*30:01; MAGEC2; ENSG00000046774; CTA
TEAEMLMIVI

SEQ ID NO: 46287 - protein, 10 aa, Homo sapiens
  Table A; Target 46287; HLA-B*49:01; MAGEC2; ENSG00000046774; CTA
TEAEMLMIVI

SEQ ID NO: 46288 - protein, 10 aa, Homo sapiens
  Table A; Target 46288; HLA-C*05:01; MAGEC2; ENSG00000046774; CTA
TIDTADDATV

SEQ ID NO: 46289 - protein, 11 aa, Homo sapiens
  Table A; Target 46289; HLA-B*35:03; MAGEC2; ENSG00000046774; CTA
TIDTADDATVM

SEQ ID NO: 46290 - protein, 11 aa, Homo sapiens
  Table A; Target 46290; HLA-B*55:01; MAGEC2; ENSG00000046774; CTA
TIDTADDATVM

SEQ ID NO: 46291 - protein, 11 aa, Homo sapiens
  Table A; Target 46291; HLA-C*03:03; MAGEC2; ENSG00000046774; CTA
TIDTADDATVM

SEQ ID NO: 46292 - protein, 11 aa, Homo sapiens
  Table A; Target 46292; HLA-C*04:01; MAGEC2; ENSG00000046774; CTA
TIDTADDATVM

SEQ ID NO: 46293 - protein, 11 aa, Homo sapiens
  Table A; Target 46293; HLA-C*05:01; MAGEC2; ENSG00000046774; CTA
TIDTADDATVM

SEQ ID NO: 46294 - protein, 9 aa, Homo sapiens
  Table A; Target 46294; HLA-A*02:01; MAGEC2; ENSG00000046774; CTA
TLDEKVAEL

SEQ ID NO: 46295 - protein, 9 aa, Homo sapiens
  Table A; Target 46295; HLA-A*02:03; MAGEC2; ENSG00000046774; CTA
TLDEKVAEL

SEQ ID NO: 46296 - protein, 9 aa, Homo sapiens
  Table A; Target 46296; HLA-A*02:04; MAGEC2; ENSG00000046774; CTA
TLDEKVAEL

SEQ ID NO: 46297 - protein, 9 aa, Homo sapiens
  Table A; Target 46297; HLA-A*02:07; MAGEC2; ENSG00000046774; CTA
TLDEKVAEL

SEQ ID NO: 46298 - protein, 9 aa, Homo sapiens
  Table A; Target 46298; HLA-A*32:01; MAGEC2; ENSG00000046774; CTA
TLDEKVAEL

SEQ ID NO: 46299 - protein, 9 aa, Homo sapiens
  Table A; Target 46299; HLA-B*08:01; MAGEC2; ENSG00000046774; CTA
TLDEKVAEL

SEQ ID NO: 46300 - protein, 9 aa, Homo sapiens
  Table A; Target 46300; HLA-B*35:03; MAGEC2; ENSG00000046774; CTA
TLDEKVAEL

SEQ ID NO: 46301 - protein, 9 aa, Homo sapiens
  Table A; Target 46301; HLA-B*38:01; MAGEC2; ENSG00000046774; CTA
TLDEKVAEL

SEQ ID NO: 46302 - protein, 9 aa, Homo sapiens
  Table A; Target 46302; HLA-B*39:01; MAGEC2; ENSG00000046774; CTA
TLDEKVAEL

SEQ ID NO: 46303 - protein, 9 aa, Homo sapiens
  Table A; Target 46303; HLA-B*40:01; MAGEC2; ENSG00000046774; CTA
TLDEKVAEL

SEQ ID NO: 46304 - protein, 9 aa, Homo sapiens
  Table A; Target 46304; HLA-B*55:01; MAGEC2; ENSG00000046774; CTA
TLDEKVAEL

SEQ ID NO: 46305 - protein, 9 aa, Homo sapiens
  Table A; Target 46305; HLA-C*01:02; MAGEC2; ENSG00000046774; CTA
TLDEKVAEL

SEQ ID NO: 46306 - protein, 9 aa, Homo sapiens
  Table A; Target 46306; HLA-C*04:01; MAGEC2; ENSG00000046774; CTA
TLDEKVAEL

SEQ ID NO: 46307 - protein, 9 aa, Homo sapiens
  Table A; Target 46307; HLA-C*05:01; MAGEC2; ENSG00000046774; CTA
TLDEKVAEL

SEQ ID NO: 46308 - protein, 9 aa, Homo sapiens
  Table A; Target 46308; HLA-C*07:04; MAGEC2; ENSG00000046774; CTA
TLDEKVAEL

SEQ ID NO: 46309 - protein, 8 aa, Homo sapiens
  Table A; Target 46309; HLA-B*35:03; MAGEC2; ENSG00000046774; CTA
TVMASESL

SEQ ID NO: 46310 - protein, 10 aa, Homo sapiens
  Table A; Target 46310; HLA-A*25:01; MAGEC2; ENSG00000046774; CTA
TVMASESLSV

SEQ ID NO: 46311 - protein, 10 aa, Homo sapiens
  Table A; Target 46311; HLA-B*13:02; MAGEC2; ENSG00000046774; CTA
TVMASESLSV

SEQ ID NO: 46312 - protein, 11 aa, Homo sapiens
  Table A; Target 46312; HLA-A*25:01; MAGEC2; ENSG00000046774; CTA
TVMASESLSVM

SEQ ID NO: 46313 - protein, 11 aa, Homo sapiens
  Table A; Target 46313; HLA-A*26:01; MAGEC2; ENSG00000046774; CTA
TVMASESLSVM

SEQ ID NO: 46314 - protein, 11 aa, Homo sapiens
  Table A; Target 46314; HLA-B*15:01; MAGEC2; ENSG00000046774; CTA
TVMASESLSVM

SEQ ID NO: 46315 - protein, 11 aa, Homo sapiens
  Table A; Target 46315; HLA-B*35:01; MAGEC2; ENSG00000046774; CTA
TVMASESLSVM

SEQ ID NO: 46316 - protein, 11 aa, Homo sapiens
  Table A; Target 46316; HLA-B*35:03; MAGEC2; ENSG00000046774; CTA
TVMASESLSVM

SEQ ID NO: 46317 - protein, 11 aa, Homo sapiens
  Table A; Target 46317; HLA-B*39:01; MAGEC2; ENSG00000046774; CTA
TVMASESLSVM

SEQ ID NO: 46318 - protein, 11 aa, Homo sapiens
  Table A; Target 46318; HLA-C*01:02; MAGEC2; ENSG00000046774; CTA
TVMASESLSVM

SEQ ID NO: 46319 - protein, 11 aa, Homo sapiens
  Table A; Target 46319; HLA-C*04:01; MAGEC2; ENSG00000046774; CTA
TVMASESLSVM

SEQ ID NO: 46320 - protein, 11 aa, Homo sapiens
  Table A; Target 46320; HLA-C*07:02; MAGEC2; ENSG00000046774; CTA
TVMASESLSVM

SEQ ID NO: 46321 - protein, 11 aa, Homo sapiens
  Table A; Target 46321; HLA-C*07:04; MAGEC2; ENSG00000046774; CTA
TVMASESLSVM

SEQ ID NO: 46322 - protein, 11 aa, Homo sapiens
  Table A; Target 46322; HLA-C*07:06; MAGEC2; ENSG00000046774; CTA
TVMASESLSVM

SEQ ID NO: 46323 - protein, 11 aa, Homo sapiens
  Table A; Target 46323; HLA-C*14:02; MAGEC2; ENSG00000046774; CTA
TVMASESLSVM

SEQ ID NO: 46324 - protein, 9 aa, Homo sapiens
  Table A; Target 46324; HLA-A*02:07; MAGEC2; ENSG00000046774; CTA
TVPSSFPSW

SEQ ID NO: 46325 - protein, 9 aa, Homo sapiens
  Table A; Target 46325; HLA-A*24:02; MAGEC2; ENSG00000046774; CTA
TVPSSFPSW

SEQ ID NO: 46326 - protein, 9 aa, Homo sapiens
  Table A; Target 46326; HLA-A*25:01; MAGEC2; ENSG00000046774; CTA
TVPSSFPSW

SEQ ID NO: 46327 - protein, 9 aa, Homo sapiens
  Table A; Target 46327; HLA-A*26:01; MAGEC2; ENSG00000046774; CTA
TVPSSFPSW

SEQ ID NO: 46328 - protein, 9 aa, Homo sapiens
  Table A; Target 46328; HLA-A*32:01; MAGEC2; ENSG00000046774; CTA
TVPSSFPSW

SEQ ID NO: 46329 - protein, 9 aa, Homo sapiens
  Table A; Target 46329; HLA-B*57:01; MAGEC2; ENSG00000046774; CTA
TVPSSFPSW

SEQ ID NO: 46330 - protein, 9 aa, Homo sapiens
  Table A; Target 46330; HLA-B*58:01; MAGEC2; ENSG00000046774; CTA
TVPSSFPSW

SEQ ID NO: 46331 - protein, 8 aa, Homo sapiens
  Table A; Target 46331; HLA-C*05:01; MAGEC2; ENSG00000046774; CTA
VAELVEFL

SEQ ID NO: 46332 - protein, 9 aa, Homo sapiens
  Table A; Target 46332; HLA-C*05:01; MAGEC2; ENSG00000046774; CTA
VAELVEFLL

SEQ ID NO: 46333 - protein, 9 aa, Homo sapiens
  Table A; Target 46333; HLA-A*02:01; MAGEC2; ENSG00000046774; CTA
VDNDSPTSV

SEQ ID NO: 46334 - protein, 9 aa, Homo sapiens
  Table A; Target 46334; HLA-A*02:03; MAGEC2; ENSG00000046774; CTA
VDNDSPTSV

SEQ ID NO: 46335 - protein, 9 aa, Homo sapiens
  Table A; Target 46335; HLA-A*30:01; MAGEC2; ENSG00000046774; CTA
VDNDSPTSV

SEQ ID NO: 46336 - protein, 9 aa, Homo sapiens
  Table A; Target 46336; HLA-B*13:02; MAGEC2; ENSG00000046774; CTA
VDNDSPTSV

SEQ ID NO: 46337 - protein, 9 aa, Homo sapiens
  Table A; Target 46337; HLA-B*37:01; MAGEC2; ENSG00000046774; CTA
VDNDSPTSV

SEQ ID NO: 46338 - protein, 9 aa, Homo sapiens
  Table A; Target 46338; HLA-B*49:01; MAGEC2; ENSG00000046774; CTA
VDNDSPTSV

SEQ ID NO: 46339 - protein, 9 aa, Homo sapiens
  Table A; Target 46339; HLA-B*56:01; MAGEC2; ENSG00000046774; CTA
VDNDSPTSV

SEQ ID NO: 46340 - protein, 9 aa, Homo sapiens
  Table A; Target 46340; HLA-C*01:02; MAGEC2; ENSG00000046774; CTA
VDNDSPTSV

SEQ ID NO: 46341 - protein, 9 aa, Homo sapiens
  Table A; Target 46341; HLA-C*05:01; MAGEC2; ENSG00000046774; CTA
VDNDSPTSV

SEQ ID NO: 46342 - protein, 9 aa, Homo sapiens
  Table A; Target 46342; HLA-C*12:03; MAGEC2; ENSG00000046774; CTA
VDNDSPTSV

SEQ ID NO: 46343 - protein, 9 aa, Homo sapiens
  Table A; Target 46343; HLA-C*16:02; MAGEC2; ENSG00000046774; CTA
VDNDSPTSV

SEQ ID NO: 46344 - protein, 9 aa, Homo sapiens
  Table A; Target 46344; HLA-C*16:04; MAGEC2; ENSG00000046774; CTA
VDNDSPTSV

SEQ ID NO: 46345 - protein, 9 aa, Homo sapiens
  Table A; Target 46345; HLA-A*30:01; MAGEC2; ENSG00000046774; CTA
VEERVQATI

SEQ ID NO: 46346 - protein, 9 aa, Homo sapiens
  Table A; Target 46346; HLA-B*40:01; MAGEC2; ENSG00000046774; CTA
VEERVQATI

SEQ ID NO: 46347 - protein, 9 aa, Homo sapiens
  Table A; Target 46347; HLA-B*40:02; MAGEC2; ENSG00000046774; CTA
VEERVQATI

SEQ ID NO: 46348 - protein, 9 aa, Homo sapiens
  Table A; Target 46348; HLA-B*44:02; MAGEC2; ENSG00000046774; CTA
VEERVQATI

SEQ ID NO: 46349 - protein, 9 aa, Homo sapiens
  Table A; Target 46349; HLA-B*44:03; MAGEC2; ENSG00000046774; CTA
VEERVQATI

SEQ ID NO: 46350 - protein, 8 aa, Homo sapiens
  Table A; Target 46350; HLA-B*18:01; MAGEC2; ENSG00000046774; CTA
VEFLLLKY

SEQ ID NO: 46351 - protein, 8 aa, Homo sapiens
  Table A; Target 46351; HLA-B*44:02; MAGEC2; ENSG00000046774; CTA
VEFLLLKY

SEQ ID NO: 46352 - protein, 8 aa, Homo sapiens
  Table A; Target 46352; HLA-B*44:03; MAGEC2; ENSG00000046774; CTA
VEFLLLKY

SEQ ID NO: 46353 - protein, 8 aa, Homo sapiens
  Table A; Target 46353; HLA-A*23:01; MAGEC2; ENSG00000046774; CTA
VFANTVGL

SEQ ID NO: 46354 - protein, 8 aa, Homo sapiens
  Table A; Target 46354; HLA-C*14:02; MAGEC2; ENSG00000046774; CTA
VFANTVGL

SEQ ID NO: 46355 - protein, 9 aa, Homo sapiens
  Table A; Target 46355; HLA-C*14:02; MAGEC2; ENSG00000046774; CTA
VFSPSSFST

SEQ ID NO: 46356 - protein, 9 aa, Homo sapiens
  Table A; Target 46356; HLA-A*24:02; MAGEC2; ENSG00000046774; CTA
VGPDHFCVF

SEQ ID NO: 46357 - protein, 9 aa, Homo sapiens
  Table A; Target 46357; HLA-A*02:07; MAGEC2; ENSG00000046774; CTA
VIPNLTESI

SEQ ID NO: 46358 - protein, 9 aa, Homo sapiens
  Table A; Target 46358; HLA-A*24:02; MAGEC2; ENSG00000046774; CTA
VIPNLTESI

SEQ ID NO: 46359 - protein, 9 aa, Homo sapiens
  Table A; Target 46359; HLA-C*01:02; MAGEC2; ENSG00000046774; CTA
VIPNLTESI

SEQ ID NO: 46360 - protein, 9 aa, Homo sapiens
  Table A; Target 46360; HLA-A*02:01; MAGEC2; ENSG00000046774; CTA
VIWEVLNAV

SEQ ID NO: 46361 - protein, 9 aa, Homo sapiens
  Table A; Target 46361; HLA-A*02:03; MAGEC2; ENSG00000046774; CTA
VIWEVLNAV

SEQ ID NO: 46362 - protein, 9 aa, Homo sapiens
  Table A; Target 46362; HLA-A*02:04; MAGEC2; ENSG00000046774; CTA
VIWEVLNAV

SEQ ID NO: 46363 - protein, 9 aa, Homo sapiens
  Table A; Target 46363; HLA-A*02:07; MAGEC2; ENSG00000046774; CTA
VIWEVLNAV

SEQ ID NO: 46364 - protein, 9 aa, Homo sapiens
  Table A; Target 46364; HLA-B*13:02; MAGEC2; ENSG00000046774; CTA
VIWEVLNAV

SEQ ID NO: 46365 - protein, 9 aa, Homo sapiens
  Table A; Target 46365; HLA-B*51:01; MAGEC2; ENSG00000046774; CTA
VIWEVLNAV

SEQ ID NO: 46366 - protein, 9 aa, Homo sapiens
  Table A; Target 46366; HLA-B*55:01; MAGEC2; ENSG00000046774; CTA
VIWEVLNAV

SEQ ID NO: 46367 - protein, 11 aa, Homo sapiens
  Table A; Target 46367; HLA-A*02:07; MAGEC2; ENSG00000046774; CTA
VIWEVLNAVGV

SEQ ID NO: 46368 - protein, 8 aa, Homo sapiens
  Table A; Target 46368; HLA-A*03:01; MAGEC2; ENSG00000046774; CTA
VLNAVGVY

SEQ ID NO: 46369 - protein, 8 aa, Homo sapiens
  Table A; Target 46369; HLA-A*30:02; MAGEC2; ENSG00000046774; CTA
VLNAVGVY

SEQ ID NO: 46370 - protein, 8 aa, Homo sapiens
  Table A; Target 46370; HLA-A*32:01; MAGEC2; ENSG00000046774; CTA
VLNAVGVY

SEQ ID NO: 46371 - protein, 8 aa, Homo sapiens
  Table A; Target 46371; HLA-B*15:01; MAGEC2; ENSG00000046774; CTA
VLNAVGVY

SEQ ID NO: 46372 - protein, 8 aa, Homo sapiens
  Table A; Target 46372; HLA-B*15:03; MAGEC2; ENSG00000046774; CTA
VLNAVGVY

SEQ ID NO: 46373 - protein, 8 aa, Homo sapiens
  Table A; Target 46373; HLA-B*39:01; MAGEC2; ENSG00000046774; CTA
VLNAVGVY

SEQ ID NO: 46374 - protein, 8 aa, Homo sapiens
  Table A; Target 46374; HLA-B*46:01; MAGEC2; ENSG00000046774; CTA
VLNAVGVY

SEQ ID NO: 46375 - protein, 8 aa, Homo sapiens
  Table A; Target 46375; HLA-C*07:02; MAGEC2; ENSG00000046774; CTA
VLNAVGVY

SEQ ID NO: 46376 - protein, 8 aa, Homo sapiens
  Table A; Target 46376; HLA-C*07:04; MAGEC2; ENSG00000046774; CTA
VLNAVGVY

SEQ ID NO: 46377 - protein, 8 aa, Homo sapiens
  Table A; Target 46377; HLA-C*14:02; MAGEC2; ENSG00000046774; CTA
VLNAVGVY

SEQ ID NO: 46378 - protein, 8 aa, Homo sapiens
  Table A; Target 46378; HLA-C*16:02; MAGEC2; ENSG00000046774; CTA
VLNAVGVY

SEQ ID NO: 46379 - protein, 9 aa, Homo sapiens
  Table A; Target 46379; HLA-A*02:01; MAGEC2; ENSG00000046774; CTA
VLNAVGVYA

SEQ ID NO: 46380 - protein, 9 aa, Homo sapiens
  Table A; Target 46380; HLA-A*02:03; MAGEC2; ENSG00000046774; CTA
VLNAVGVYA

SEQ ID NO: 46381 - protein, 9 aa, Homo sapiens
  Table A; Target 46381; HLA-A*02:04; MAGEC2; ENSG00000046774; CTA
VLNAVGVYA

SEQ ID NO: 46382 - protein, 9 aa, Homo sapiens
  Table A; Target 46382; HLA-A*02:07; MAGEC2; ENSG00000046774; CTA
VLNAVGVYA

SEQ ID NO: 46383 - protein, 9 aa, Homo sapiens
  Table A; Target 46383; HLA-A*03:01; MAGEC2; ENSG00000046774; CTA
VLNAVGVYA

SEQ ID NO: 46384 - protein, 9 aa, Homo sapiens
  Table A; Target 46384; HLA-A*03:02; MAGEC2; ENSG00000046774; CTA
VLNAVGVYA

SEQ ID NO: 46385 - protein, 9 aa, Homo sapiens
  Table A; Target 46385; HLA-B*13:02; MAGEC2; ENSG00000046774; CTA
VLNAVGVYA

SEQ ID NO: 46386 - protein, 9 aa, Homo sapiens
  Table A; Target 46386; HLA-B*46:01; MAGEC2; ENSG00000046774; CTA
VLNAVGVYA

SEQ ID NO: 46387 - protein, 9 aa, Homo sapiens
  Table A; Target 46387; HLA-B*56:01; MAGEC2; ENSG00000046774; CTA
VLNAVGVYA

SEQ ID NO: 46388 - protein, 9 aa, Homo sapiens
  Table A; Target 46388; HLA-C*02:02; MAGEC2; ENSG00000046774; CTA
VLNAVGVYA

SEQ ID NO: 46389 - protein, 11 aa, Homo sapiens
  Table A; Target 46389; HLA-A*31:01; MAGEC2; ENSG00000046774; CTA
VLNAVGVYAGR

SEQ ID NO: 46390 - protein, 9 aa, Homo sapiens
  Table A; Target 46390; HLA-A*02:01; MAGEC2; ENSG00000046774; CTA
VMASESLSV

SEQ ID NO: 46391 - protein, 9 aa, Homo sapiens
  Table A; Target 46391; HLA-A*02:03; MAGEC2; ENSG00000046774; CTA
VMASESLSV

SEQ ID NO: 46392 - protein, 9 aa, Homo sapiens
  Table A; Target 46392; HLA-B*13:02; MAGEC2; ENSG00000046774; CTA
VMASESLSV

SEQ ID NO: 46393 - protein, 9 aa, Homo sapiens
  Table A; Target 46393; HLA-B*55:01; MAGEC2; ENSG00000046774; CTA
VMASESLSV

SEQ ID NO: 46394 - protein, 10 aa, Homo sapiens
  Table A; Target 46394; HLA-B*15:01; MAGEC2; ENSG00000046774; CTA
VMASESLSVM

SEQ ID NO: 46395 - protein, 10 aa, Homo sapiens
  Table A; Target 46395; HLA-B*46:01; MAGEC2; ENSG00000046774; CTA
VMASESLSVM

SEQ ID NO: 46396 - protein, 10 aa, Homo sapiens
  Table A; Target 46396; HLA-C*01:02; MAGEC2; ENSG00000046774; CTA
VMASESLSVM

SEQ ID NO: 46397 - protein, 10 aa, Homo sapiens
  Table A; Target 46397; HLA-C*07:01; MAGEC2; ENSG00000046774; CTA
VMASESLSVM

SEQ ID NO: 46398 - protein, 10 aa, Homo sapiens
  Table A; Target 46398; HLA-C*07:04; MAGEC2; ENSG00000046774; CTA
VMASESLSVM

SEQ ID NO: 46399 - protein, 10 aa, Homo sapiens
  Table A; Target 46399; HLA-C*14:02; MAGEC2; ENSG00000046774; CTA
VMASESLSVM

SEQ ID NO: 46400 - protein, 8 aa, Homo sapiens
  Table A; Target 46400; HLA-A*23:01; MAGEC2; ENSG00000046774; CTA
VMSSNVSF

SEQ ID NO: 46401 - protein, 8 aa, Homo sapiens
  Table A; Target 46401; HLA-A*32:01; MAGEC2; ENSG00000046774; CTA
VMSSNVSF

SEQ ID NO: 46402 - protein, 8 aa, Homo sapiens
  Table A; Target 46402; HLA-B*37:01; MAGEC2; ENSG00000046774; CTA
VMSSNVSF

SEQ ID NO: 46403 - protein, 8 aa, Homo sapiens
  Table A; Target 46403; HLA-B*46:01; MAGEC2; ENSG00000046774; CTA
VMSSNVSF

SEQ ID NO: 46404 - protein, 8 aa, Homo sapiens
  Table A; Target 46404; HLA-C*04:01; MAGEC2; ENSG00000046774; CTA
VMSSNVSF

SEQ ID NO: 46405 - protein, 8 aa, Homo sapiens
  Table A; Target 46405; HLA-C*14:02; MAGEC2; ENSG00000046774; CTA
VMSSNVSF

SEQ ID NO: 46406 - protein, 9 aa, Homo sapiens
  Table A; Target 46406; HLA-B*51:01; MAGEC2; ENSG00000046774; CTA
VPGVPFRNV

SEQ ID NO: 46407 - protein, 9 aa, Homo sapiens
  Table A; Target 46407; HLA-B*56:01; MAGEC2; ENSG00000046774; CTA
VPGVPFRNV

SEQ ID NO: 46408 - protein, 8 aa, Homo sapiens
  Table A; Target 46408; HLA-A*30:02; MAGEC2; ENSG00000046774; CTA
VPHSSPPY

SEQ ID NO: 46409 - protein, 8 aa, Homo sapiens
  Table A; Target 46409; HLA-B*35:01; MAGEC2; ENSG00000046774; CTA
VPHSSPPY

SEQ ID NO: 46410 - protein, 9 aa, Homo sapiens
  Table A; Target 46410; HLA-A*30:02; MAGEC2; ENSG00000046774; CTA
VPHSSPPYY

SEQ ID NO: 46411 - protein, 9 aa, Homo sapiens
  Table A; Target 46411; HLA-B*35:01; MAGEC2; ENSG00000046774; CTA
VPHSSPPYY

SEQ ID NO: 46412 - protein, 11 aa, Homo sapiens
  Table A; Target 46412; HLA-B*35:01; MAGEC2; ENSG00000046774; CTA
VPHSSPPYYEF

SEQ ID NO: 46413 - protein, 9 aa, Homo sapiens
  Table A; Target 46413; HLA-A*02:04; MAGEC2; ENSG00000046774; CTA
VPSGVIPNL

SEQ ID NO: 46414 - protein, 9 aa, Homo sapiens
  Table A; Target 46414; HLA-A*11:01; MAGEC2; ENSG00000046774; CTA
VPSGVIPNL

SEQ ID NO: 46415 - protein, 9 aa, Homo sapiens
  Table A; Target 46415; HLA-A*23:01; MAGEC2; ENSG00000046774; CTA
VPSGVIPNL

SEQ ID NO: 46416 - protein, 9 aa, Homo sapiens
  Table A; Target 46416; HLA-A*24:02; MAGEC2; ENSG00000046774; CTA
VPSGVIPNL

SEQ ID NO: 46417 - protein, 9 aa, Homo sapiens
  Table A; Target 46417; HLA-A*30:01; MAGEC2; ENSG00000046774; CTA
VPSGVIPNL

SEQ ID NO: 46418 - protein, 9 aa, Homo sapiens
  Table A; Target 46418; HLA-A*68:01; MAGEC2; ENSG00000046774; CTA
VPSGVIPNL

SEQ ID NO: 46419 - protein, 9 aa, Homo sapiens
  Table A; Target 46419; HLA-A*68:02; MAGEC2; ENSG00000046774; CTA
VPSGVIPNL

SEQ ID NO: 46420 - protein, 9 aa, Homo sapiens
  Table A; Target 46420; HLA-B*07:02; MAGEC2; ENSG00000046774; CTA
VPSGVIPNL

SEQ ID NO: 46421 - protein, 9 aa, Homo sapiens
  Table A; Target 46421; HLA-B*38:01; MAGEC2; ENSG00000046774; CTA
VPSGVIPNL

SEQ ID NO: 46422 - protein, 9 aa, Homo sapiens
  Table A; Target 46422; HLA-B*39:01; MAGEC2; ENSG00000046774; CTA
VPSGVIPNL

SEQ ID NO: 46423 - protein, 9 aa, Homo sapiens
  Table A; Target 46423; HLA-B*51:01; MAGEC2; ENSG00000046774; CTA
VPSGVIPNL

SEQ ID NO: 46424 - protein, 9 aa, Homo sapiens
  Table A; Target 46424; HLA-B*54:01; MAGEC2; ENSG00000046774; CTA
VPSGVIPNL

SEQ ID NO: 46425 - protein, 9 aa, Homo sapiens
  Table A; Target 46425; HLA-B*55:01; MAGEC2; ENSG00000046774; CTA
VPSGVIPNL

SEQ ID NO: 46426 - protein, 9 aa, Homo sapiens
  Table A; Target 46426; HLA-B*56:01; MAGEC2; ENSG00000046774; CTA
VPSGVIPNL

SEQ ID NO: 46427 - protein, 9 aa, Homo sapiens
  Table A; Target 46427; HLA-B*58:01; MAGEC2; ENSG00000046774; CTA
VPSGVIPNL

SEQ ID NO: 46428 - protein, 9 aa, Homo sapiens
  Table A; Target 46428; HLA-C*02:02; MAGEC2; ENSG00000046774; CTA
VPSGVIPNL

SEQ ID NO: 46429 - protein, 9 aa, Homo sapiens
  Table A; Target 46429; HLA-C*03:03; MAGEC2; ENSG00000046774; CTA
VPSGVIPNL

SEQ ID NO: 46430 - protein, 9 aa, Homo sapiens
  Table A; Target 46430; HLA-C*05:01; MAGEC2; ENSG00000046774; CTA
VPSGVIPNL

SEQ ID NO: 46431 - protein, 9 aa, Homo sapiens
  Table A; Target 46431; HLA-C*07:02; MAGEC2; ENSG00000046774; CTA
VPSGVIPNL

SEQ ID NO: 46432 - protein, 9 aa, Homo sapiens
  Table A; Target 46432; HLA-C*07:04; MAGEC2; ENSG00000046774; CTA
VPSGVIPNL

SEQ ID NO: 46433 - protein, 9 aa, Homo sapiens
  Table A; Target 46433; HLA-C*07:06; MAGEC2; ENSG00000046774; CTA
VPSGVIPNL

SEQ ID NO: 46434 - protein, 9 aa, Homo sapiens
  Table A; Target 46434; HLA-C*12:03; MAGEC2; ENSG00000046774; CTA
VPSGVIPNL

SEQ ID NO: 46435 - protein, 9 aa, Homo sapiens
  Table A; Target 46435; HLA-C*16:01; MAGEC2; ENSG00000046774; CTA
VPSGVIPNL

SEQ ID NO: 46436 - protein, 9 aa, Homo sapiens
  Table A; Target 46436; HLA-C*16:02; MAGEC2; ENSG00000046774; CTA
VPSGVIPNL

SEQ ID NO: 46437 - protein, 10 aa, Homo sapiens
  Table A; Target 46437; HLA-B*56:01; MAGEC2; ENSG00000046774; CTA
VPSGVIPNLT

SEQ ID NO: 46438 - protein, 8 aa, Homo sapiens
  Table A; Target 46438; HLA-B*51:01; MAGEC2; ENSG00000046774; CTA
VPSSFPSW

SEQ ID NO: 46439 - protein, 8 aa, Homo sapiens
  Table A; Target 46439; HLA-A*29:02; MAGEC2; ENSG00000046774; CTA
VQGHYLEY

SEQ ID NO: 46440 - protein, 8 aa, Homo sapiens
  Table A; Target 46440; HLA-A*30:02; MAGEC2; ENSG00000046774; CTA
VQGHYLEY

SEQ ID NO: 46441 - protein, 8 aa, Homo sapiens
  Table A; Target 46441; HLA-A*32:01; MAGEC2; ENSG00000046774; CTA
VQGHYLEY

SEQ ID NO: 46442 - protein, 8 aa, Homo sapiens
  Table A; Target 46442; HLA-B*15:01; MAGEC2; ENSG00000046774; CTA
VQGHYLEY

SEQ ID NO: 46443 - protein, 8 aa, Homo sapiens
  Table A; Target 46443; HLA-B*15:03; MAGEC2; ENSG00000046774; CTA
VQGHYLEY

SEQ ID NO: 46444 - protein, 8 aa, Homo sapiens
  Table A; Target 46444; HLA-C*07:01; MAGEC2; ENSG00000046774; CTA
VQGHYLEY

SEQ ID NO: 46445 - protein, 8 aa, Homo sapiens
  Table A; Target 46445; HLA-C*16:01; MAGEC2; ENSG00000046774; CTA
VQGHYLEY

SEQ ID NO: 46446 - protein, 10 aa, Homo sapiens
  Table A; Target 46446; HLA-A*29:02; MAGEC2; ENSG00000046774; CTA
VWVQGHYLEY

SEQ ID NO: 46447 - protein, 9 aa, Homo sapiens
  Table A; Target 46447; HLA-A*24:02; MAGEC2; ENSG00000046774; CTA
VYAGREHFV

SEQ ID NO: 46448 - protein, 10 aa, Homo sapiens
  Table A; Target 46448; HLA-A*29:02; MAGEC2; ENSG00000046774; CTA
VYAGREHFVY

SEQ ID NO: 46449 - protein, 8 aa, Homo sapiens
  Table A; Target 46449; HLA-A*23:01; MAGEC2; ENSG00000046774; CTA
VYGEPREL

SEQ ID NO: 46450 - protein, 8 aa, Homo sapiens
  Table A; Target 46450; HLA-A*24:02; MAGEC2; ENSG00000046774; CTA
VYGEPREL

SEQ ID NO: 46451 - protein, 8 aa, Homo sapiens
  Table A; Target 46451; HLA-C*01:02; MAGEC2; ENSG00000046774; CTA
VYGEPREL

SEQ ID NO: 46452 - protein, 8 aa, Homo sapiens
  Table A; Target 46452; HLA-C*14:02; MAGEC2; ENSG00000046774; CTA
VYGEPREL

SEQ ID NO: 46453 - protein, 8 aa, Homo sapiens
  Table A; Target 46453; HLA-C*16:01; MAGEC2; ENSG00000046774; CTA
VYGEPREL

SEQ ID NO: 46454 - protein, 8 aa, Homo sapiens
  Table A; Target 46454; HLA-C*16:02; MAGEC2; ENSG00000046774; CTA
VYGEPREL

SEQ ID NO: 46455 - protein, 9 aa, Homo sapiens
  Table A; Target 46455; HLA-A*23:01; MAGEC2; ENSG00000046774; CTA
VYGEPRELL

SEQ ID NO: 46456 - protein, 9 aa, Homo sapiens
  Table A; Target 46456; HLA-A*24:02; MAGEC2; ENSG00000046774; CTA
VYGEPRELL

SEQ ID NO: 46457 - protein, 11 aa, Homo sapiens
  Table A; Target 46457; HLA-A*33:01; MAGEC2; ENSG00000046774; CTA
VYGEPRELLTK

SEQ ID NO: 46458 - protein, 9 aa, Homo sapiens
  Table A; Target 46458; HLA-A*30:01; MAGEC2; ENSG00000046774; CTA
WEVLNAVGV

SEQ ID NO: 46459 - protein, 9 aa, Homo sapiens
  Table A; Target 46459; HLA-B*40:02; MAGEC2; ENSG00000046774; CTA
WEVLNAVGV

SEQ ID NO: 46460 - protein, 9 aa, Homo sapiens
  Table A; Target 46460; HLA-B*49:01; MAGEC2; ENSG00000046774; CTA
WEVLNAVGV

SEQ ID NO: 46461 - protein, 9 aa, Homo sapiens
  Table A; Target 46461; HLA-A*01:01; MAGEC2; ENSG00000046774; CTA
WVQGHYLEY

SEQ ID NO: 46462 - protein, 9 aa, Homo sapiens
  Table A; Target 46462; HLA-A*26:01; MAGEC2; ENSG00000046774; CTA
WVQGHYLEY

SEQ ID NO: 46463 - protein, 9 aa, Homo sapiens
  Table A; Target 46463; HLA-A*29:02; MAGEC2; ENSG00000046774; CTA
WVQGHYLEY

SEQ ID NO: 46464 - protein, 9 aa, Homo sapiens
  Table A; Target 46464; HLA-A*30:02; MAGEC2; ENSG00000046774; CTA
WVQGHYLEY

SEQ ID NO: 46465 - protein, 9 aa, Homo sapiens
  Table A; Target 46465; HLA-A*29:02; MAGEC2; ENSG00000046774; CTA
YAGREHFVY

SEQ ID NO: 46466 - protein, 9 aa, Homo sapiens
  Table A; Target 46466; HLA-B*35:01; MAGEC2; ENSG00000046774; CTA
YAGREHFVY

SEQ ID NO: 46467 - protein, 9 aa, Homo sapiens
  Table A; Target 46467; HLA-C*02:02; MAGEC2; ENSG00000046774; CTA
YAGREHFVY

SEQ ID NO: 46468 - protein, 8 aa, Homo sapiens
  Table A; Target 46468; HLA-B*18:01; MAGEC2; ENSG00000046774; CTA
YEAEEPVT

SEQ ID NO: 46469 - protein, 9 aa, Homo sapiens
  Table A; Target 46469; HLA-B*49:01; MAGEC2; ENSG00000046774; CTA
YEAEEPVTE

SEQ ID NO: 46470 - protein, 10 aa, Homo sapiens
  Table A; Target 46470; HLA-A*30:01; MAGEC2; ENSG00000046774; CTA
YEAEEPVTEA

SEQ ID NO: 46471 - protein, 10 aa, Homo sapiens
  Table A; Target 46471; HLA-B*40:01; MAGEC2; ENSG00000046774; CTA
YEAEEPVTEA

SEQ ID NO: 46472 - protein, 10 aa, Homo sapiens
  Table A; Target 46472; HLA-B*49:01; MAGEC2; ENSG00000046774; CTA
YEAEEPVTEA

SEQ ID NO: 46473 - protein, 8 aa, Homo sapiens
  Table A; Target 46473; HLA-A*33:03; MAGEC2; ENSG00000046774; CTA
YFPVILKR

SEQ ID NO: 46474 - protein, 9 aa, Homo sapiens
  Table A; Target 46474; HLA-A*01:01; MAGEC2; ENSG00000046774; CTA
YLVFSPSSF

SEQ ID NO: 46475 - protein, 9 aa, Homo sapiens
  Table A; Target 46475; HLA-A*02:03; MAGEC2; ENSG00000046774; CTA
YLVFSPSSF

SEQ ID NO: 46476 - protein, 9 aa, Homo sapiens
  Table A; Target 46476; HLA-A*02:07; MAGEC2; ENSG00000046774; CTA
YLVFSPSSF

SEQ ID NO: 46477 - protein, 9 aa, Homo sapiens
  Table A; Target 46477; HLA-A*23:01; MAGEC2; ENSG00000046774; CTA
YLVFSPSSF

SEQ ID NO: 46478 - protein, 9 aa, Homo sapiens
  Table A; Target 46478; HLA-A*24:02; MAGEC2; ENSG00000046774; CTA
YLVFSPSSF

SEQ ID NO: 46479 - protein, 9 aa, Homo sapiens
  Table A; Target 46479; HLA-A*25:01; MAGEC2; ENSG00000046774; CTA
YLVFSPSSF

SEQ ID NO: 46480 - protein, 9 aa, Homo sapiens
  Table A; Target 46480; HLA-A*26:01; MAGEC2; ENSG00000046774; CTA
YLVFSPSSF

SEQ ID NO: 46481 - protein, 9 aa, Homo sapiens
  Table A; Target 46481; HLA-A*29:02; MAGEC2; ENSG00000046774; CTA
YLVFSPSSF

SEQ ID NO: 46482 - protein, 9 aa, Homo sapiens
  Table A; Target 46482; HLA-B*08:01; MAGEC2; ENSG00000046774; CTA
YLVFSPSSF

SEQ ID NO: 46483 - protein, 9 aa, Homo sapiens
  Table A; Target 46483; HLA-B*15:01; MAGEC2; ENSG00000046774; CTA
YLVFSPSSF

SEQ ID NO: 46484 - protein, 9 aa, Homo sapiens
  Table A; Target 46484; HLA-B*15:03; MAGEC2; ENSG00000046774; CTA
YLVFSPSSF

SEQ ID NO: 46485 - protein, 9 aa, Homo sapiens
  Table A; Target 46485; HLA-B*18:01; MAGEC2; ENSG00000046774; CTA
YLVFSPSSF

SEQ ID NO: 46486 - protein, 9 aa, Homo sapiens
  Table A; Target 46486; HLA-B*46:01; MAGEC2; ENSG00000046774; CTA
YLVFSPSSF

SEQ ID NO: 46487 - protein, 9 aa, Homo sapiens
  Table A; Target 46487; HLA-C*01:02; MAGEC2; ENSG00000046774; CTA
YLVFSPSSF

SEQ ID NO: 46488 - protein, 9 aa, Homo sapiens
  Table A; Target 46488; HLA-C*02:02; MAGEC2; ENSG00000046774; CTA
YLVFSPSSF

SEQ ID NO: 46489 - protein, 9 aa, Homo sapiens
  Table A; Target 46489; HLA-C*03:03; MAGEC2; ENSG00000046774; CTA
YLVFSPSSF

SEQ ID NO: 46490 - protein, 9 aa, Homo sapiens
  Table A; Target 46490; HLA-C*03:04; MAGEC2; ENSG00000046774; CTA
YLVFSPSSF

SEQ ID NO: 46491 - protein, 9 aa, Homo sapiens
  Table A; Target 46491; HLA-C*07:04; MAGEC2; ENSG00000046774; CTA
YLVFSPSSF

SEQ ID NO: 46492 - protein, 9 aa, Homo sapiens
  Table A; Target 46492; HLA-C*14:02; MAGEC2; ENSG00000046774; CTA
YLVFSPSSF

SEQ ID NO: 46493 - protein, 10 aa, Homo sapiens
  Table A; Target 46493; HLA-A*01:01; MAGEC2; ENSG00000046774; CTA
YTLDEKVAEL

SEQ ID NO: 46494 - protein, 10 aa, Homo sapiens
  Table A; Target 46494; HLA-A*02:01; MAGEC2; ENSG00000046774; CTA
YTLDEKVAEL

SEQ ID NO: 46495 - protein, 10 aa, Homo sapiens
  Table A; Target 46495; HLA-A*02:03; MAGEC2; ENSG00000046774; CTA
YTLDEKVAEL

SEQ ID NO: 46496 - protein, 10 aa, Homo sapiens
  Table A; Target 46496; HLA-A*02:04; MAGEC2; ENSG00000046774; CTA
YTLDEKVAEL

SEQ ID NO: 46497 - protein, 10 aa, Homo sapiens
  Table A; Target 46497; HLA-A*25:01; MAGEC2; ENSG00000046774; CTA
YTLDEKVAEL

SEQ ID NO: 46498 - protein, 10 aa, Homo sapiens
  Table A; Target 46498; HLA-A*26:01; MAGEC2; ENSG00000046774; CTA
YTLDEKVAEL

SEQ ID NO: 46499 - protein, 10 aa, Homo sapiens
  Table A; Target 46499; HLA-A*68:02; MAGEC2; ENSG00000046774; CTA
YTLDEKVAEL

SEQ ID NO: 46500 - protein, 11 aa, Homo sapiens
  Table A; Target 46500; HLA-B*49:01; MORC1; ENSG00000114487; CTA
AEEAVKIAESI

SEQ ID NO: 46501 - protein, 10 aa, Homo sapiens
  Table A; Target 46501; HLA-B*40:01; MORC1; ENSG00000114487; CTA
AELMQQFDVI

SEQ ID NO: 46502 - protein, 10 aa, Homo sapiens
  Table A; Target 46502; HLA-B*49:01; MORC1; ENSG00000114487; CTA
AELMQQFDVI

SEQ ID NO: 46503 - protein, 9 aa, Homo sapiens
  Table A; Target 46503; HLA-A*30:01; MORC1; ENSG00000114487; CTA
AEQQPQPQF

SEQ ID NO: 46504 - protein, 9 aa, Homo sapiens
  Table A; Target 46504; HLA-B*18:01; MORC1; ENSG00000114487; CTA
AEQQPQPQF

SEQ ID NO: 46505 - protein, 9 aa, Homo sapiens
  Table A; Target 46505; HLA-B*27:02; MORC1; ENSG00000114487; CTA
AEQQPQPQF

SEQ ID NO: 46506 - protein, 9 aa, Homo sapiens
  Table A; Target 46506; HLA-B*37:01; MORC1; ENSG00000114487; CTA
AEQQPQPQF

SEQ ID NO: 46507 - protein, 9 aa, Homo sapiens
  Table A; Target 46507; HLA-B*40:01; MORC1; ENSG00000114487; CTA
AEQQPQPQF

SEQ ID NO: 46508 - protein, 9 aa, Homo sapiens
  Table A; Target 46508; HLA-B*44:02; MORC1; ENSG00000114487; CTA
AEQQPQPQF

SEQ ID NO: 46509 - protein, 9 aa, Homo sapiens
  Table A; Target 46509; HLA-B*49:01; MORC1; ENSG00000114487; CTA
AEQQPQPQF

SEQ ID NO: 46510 - protein, 9 aa, Homo sapiens
  Table A; Target 46510; HLA-C*16:04; MORC1; ENSG00000114487; CTA
AEQQPQPQF

SEQ ID NO: 46511 - protein, 10 aa, Homo sapiens
  Table A; Target 46511; HLA-B*13:02; MORC1; ENSG00000114487; CTA
AEQQPQPQFI

SEQ ID NO: 46512 - protein, 10 aa, Homo sapiens
  Table A; Target 46512; HLA-B*44:02; MORC1; ENSG00000114487; CTA
AEQQPQPQFI

SEQ ID NO: 46513 - protein, 10 aa, Homo sapiens
  Table A; Target 46513; HLA-B*44:03; MORC1; ENSG00000114487; CTA
AEQQPQPQFI

SEQ ID NO: 46514 - protein, 10 aa, Homo sapiens
  Table A; Target 46514; HLA-B*49:01; MORC1; ENSG00000114487; CTA
AEQQPQPQFI

SEQ ID NO: 46515 - protein, 9 aa, Homo sapiens
  Table A; Target 46515; HLA-A*30:01; MORC1; ENSG00000114487; CTA
AERLDVFSV

SEQ ID NO: 46516 - protein, 9 aa, Homo sapiens
  Table A; Target 46516; HLA-B*37:01; MORC1; ENSG00000114487; CTA
AERLDVFSV

SEQ ID NO: 46517 - protein, 9 aa, Homo sapiens
  Table A; Target 46517; HLA-B*40:02; MORC1; ENSG00000114487; CTA
AERLDVFSV

SEQ ID NO: 46518 - protein, 9 aa, Homo sapiens
  Table A; Target 46518; HLA-B*44:02; MORC1; ENSG00000114487; CTA
AERLDVFSV

SEQ ID NO: 46519 - protein, 9 aa, Homo sapiens
  Table A; Target 46519; HLA-B*49:01; MORC1; ENSG00000114487; CTA
AERLDVFSV

SEQ ID NO: 46520 - protein, 9 aa, Homo sapiens
  Table A; Target 46520; HLA-B*49:01; MORC1; ENSG00000114487; CTA
AERSQRSQI

SEQ ID NO: 46521 - protein, 10 aa, Homo sapiens
  Table A; Target 46521; HLA-B*40:01; MORC1; ENSG00000114487; CTA
AESILKEAQI

SEQ ID NO: 46522 - protein, 10 aa, Homo sapiens
  Table A; Target 46522; HLA-B*44:02; MORC1; ENSG00000114487; CTA
AESILKEAQI

SEQ ID NO: 46523 - protein, 10 aa, Homo sapiens
  Table A; Target 46523; HLA-B*44:03; MORC1; ENSG00000114487; CTA
AESILKEAQI

SEQ ID NO: 46524 - protein, 10 aa, Homo sapiens
  Table A; Target 46524; HLA-B*49:01; MORC1; ENSG00000114487; CTA
AESILKEAQI

SEQ ID NO: 46525 - protein, 9 aa, Homo sapiens
  Table A; Target 46525; HLA-A*32:01; MORC1; ENSG00000114487; CTA
AGAERLDVF

SEQ ID NO: 46526 - protein, 9 aa, Homo sapiens
  Table A; Target 46526; HLA-B*15:01; MORC1; ENSG00000114487; CTA
AGAERLDVF

SEQ ID NO: 46527 - protein, 9 aa, Homo sapiens
  Table A; Target 46527; HLA-B*15:03; MORC1; ENSG00000114487; CTA
AGAERLDVF

SEQ ID NO: 46528 - protein, 9 aa, Homo sapiens
  Table A; Target 46528; HLA-B*37:01; MORC1; ENSG00000114487; CTA
AGAERLDVF

SEQ ID NO: 46529 - protein, 9 aa, Homo sapiens
  Table A; Target 46529; HLA-B*46:01; MORC1; ENSG00000114487; CTA
AGAERLDVF

SEQ ID NO: 46530 - protein, 9 aa, Homo sapiens
  Table A; Target 46530; HLA-B*55:01; MORC1; ENSG00000114487; CTA
AGAERLDVF

SEQ ID NO: 46531 - protein, 9 aa, Homo sapiens
  Table A; Target 46531; HLA-C*02:02; MORC1; ENSG00000114487; CTA
AGAERLDVF

SEQ ID NO: 46532 - protein, 9 aa, Homo sapiens
  Table A; Target 46532; HLA-C*16:01; MORC1; ENSG00000114487; CTA
AGAERLDVF

SEQ ID NO: 46533 - protein, 9 aa, Homo sapiens
  Table A; Target 46533; HLA-C*16:02; MORC1; ENSG00000114487; CTA
AGAERLDVF

SEQ ID NO: 46534 - protein, 11 aa, Homo sapiens
  Table A; Target 46534; HLA-B*44:02; MORC1; ENSG00000114487; CTA
AGALEDFPARW

SEQ ID NO: 46535 - protein, 11 aa, Homo sapiens
  Table A; Target 46535; HLA-B*57:01; MORC1; ENSG00000114487; CTA
AGALEDFPARW

SEQ ID NO: 46536 - protein, 10 aa, Homo sapiens
  Table A; Target 46536; HLA-A*11:01; MORC1; ENSG00000114487; CTA
AGMFIYSNNR

SEQ ID NO: 46537 - protein, 9 aa, Homo sapiens
  Table A; Target 46537; HLA-A*02:01; MORC1; ENSG00000114487; CTA
ALAELLDNA

SEQ ID NO: 46538 - protein, 9 aa, Homo sapiens
  Table A; Target 46538; HLA-A*02:03; MORC1; ENSG00000114487; CTA
ALAELLDNA

SEQ ID NO: 46539 - protein, 9 aa, Homo sapiens
  Table A; Target 46539; HLA-A*02:04; MORC1; ENSG00000114487; CTA
ALAELLDNA

SEQ ID NO: 46540 - protein, 9 aa, Homo sapiens
  Table A; Target 46540; HLA-A*02:07; MORC1; ENSG00000114487; CTA
ALAELLDNA

SEQ ID NO: 46541 - protein, 9 aa, Homo sapiens
  Table A; Target 46541; HLA-B*55:01; MORC1; ENSG00000114487; CTA
ALAELLDNA

SEQ ID NO: 46542 - protein, 10 aa, Homo sapiens
  Table A; Target 46542; HLA-B*27:02; MORC1; ENSG00000114487; CTA
ALAELLDNAR

SEQ ID NO: 46543 - protein, 9 aa, Homo sapiens
  Table A; Target 46543; HLA-A*01:01; MORC1; ENSG00000114487; CTA
ALEDFPARW

SEQ ID NO: 46544 - protein, 9 aa, Homo sapiens
  Table A; Target 46544; HLA-A*02:07; MORC1; ENSG00000114487; CTA
ALEDFPARW

SEQ ID NO: 46545 - protein, 9 aa, Homo sapiens
  Table A; Target 46545; HLA-B*44:02; MORC1; ENSG00000114487; CTA
ALEDFPARW

SEQ ID NO: 46546 - protein, 9 aa, Homo sapiens
  Table A; Target 46546; HLA-B*44:03; MORC1; ENSG00000114487; CTA
ALEDFPARW

SEQ ID NO: 46547 - protein, 9 aa, Homo sapiens
  Table A; Target 46547; HLA-B*57:01; MORC1; ENSG00000114487; CTA
ALEDFPARW

SEQ ID NO: 46548 - protein, 11 aa, Homo sapiens
  Table A; Target 46548; HLA-A*02:04; MORC1; ENSG00000114487; CTA
ALEDFPARWSF

SEQ ID NO: 46549 - protein, 10 aa, Homo sapiens
  Table A; Target 46549; HLA-A*03:02; MORC1; ENSG00000114487; CTA
ALEDVEAKQK

SEQ ID NO: 46550 - protein, 9 aa, Homo sapiens
  Table A; Target 46550; HLA-A*02:04; MORC1; ENSG00000114487; CTA
ALLLQKLQL

SEQ ID NO: 46551 - protein, 9 aa, Homo sapiens
  Table A; Target 46551; HLA-A*02:03; MORC1; ENSG00000114487; CTA
ALPENVKLA

SEQ ID NO: 46552 - protein, 9 aa, Homo sapiens
  Table A; Target 46552; HLA-A*02:07; MORC1; ENSG00000114487; CTA
ALPENVKLA

SEQ ID NO: 46553 - protein, 9 aa, Homo sapiens
  Table A; Target 46553; HLA-A*03:01; MORC1; ENSG00000114487; CTA
AMELSIIYK

SEQ ID NO: 46554 - protein, 9 aa, Homo sapiens
  Table A; Target 46554; HLA-A*03:02; MORC1; ENSG00000114487; CTA
AMELSIIYK

SEQ ID NO: 46555 - protein, 9 aa, Homo sapiens
  Table A; Target 46555; HLA-A*11:01; MORC1; ENSG00000114487; CTA
AMELSIIYK

SEQ ID NO: 46556 - protein, 10 aa, Homo sapiens
  Table A; Target 46556; HLA-A*01:01; MORC1; ENSG00000114487; CTA
AMELSIIYKY

SEQ ID NO: 46557 - protein, 10 aa, Homo sapiens
  Table A; Target 46557; HLA-A*29:02; MORC1; ENSG00000114487; CTA
AMELSIIYKY

SEQ ID NO: 46558 - protein, 10 aa, Homo sapiens
  Table A; Target 46558; HLA-A*30:02; MORC1; ENSG00000114487; CTA
AMELSIIYKY

SEQ ID NO: 46559 - protein, 8 aa, Homo sapiens
  Table A; Target 46559; HLA-B*08:01; MORC1; ENSG00000114487; CTA
AMKRSSSL

SEQ ID NO: 46560 - protein, 9 aa, Homo sapiens
  Table A; Target 46560; HLA-C*16:01; MORC1; ENSG00000114487; CTA
ANNPNRLEN

SEQ ID NO: 46561 - protein, 8 aa, Homo sapiens
  Table A; Target 46561; HLA-B*37:01; MORC1; ENSG00000114487; CTA
ANSTTHSF

SEQ ID NO: 46562 - protein, 8 aa, Homo sapiens
  Table A; Target 46562; HLA-B*13:02; MORC1; ENSG00000114487; CTA
AQAASWEM

SEQ ID NO: 46563 - protein, 8 aa, Homo sapiens
  Table A; Target 46563; HLA-B*27:05; MORC1; ENSG00000114487; CTA
AQAASWEM

SEQ ID NO: 46564 - protein, 9 aa, Homo sapiens
  Table A; Target 46564; HLA-A*11:01; MORC1; ENSG00000114487; CTA
AQPTEGCLK

SEQ ID NO: 46565 - protein, 9 aa, Homo sapiens
  Table A; Target 46565; HLA-B*38:01; MORC1; ENSG00000114487; CTA
ARDAGAERL

SEQ ID NO: 46566 - protein, 10 aa, Homo sapiens
  Table A; Target 46566; HLA-B*27:05; MORC1; ENSG00000114487; CTA
ARVSVSGSCK

SEQ ID NO: 46567 - protein, 9 aa, Homo sapiens
  Table A; Target 46567; HLA-A*11:01; MORC1; ENSG00000114487; CTA
ASDIIYFGR

SEQ ID NO: 46568 - protein, 9 aa, Homo sapiens
  Table A; Target 46568; HLA-A*31:01; MORC1; ENSG00000114487; CTA
ASDIIYFGR

SEQ ID NO: 46569 - protein, 9 aa, Homo sapiens
  Table A; Target 46569; HLA-A*03:01; MORC1; ENSG00000114487; CTA
ASSQSTPVK

SEQ ID NO: 46570 - protein, 9 aa, Homo sapiens
  Table A; Target 46570; HLA-A*03:02; MORC1; ENSG00000114487; CTA
ASSQSTPVK

SEQ ID NO: 46571 - protein, 9 aa, Homo sapiens
  Table A; Target 46571; HLA-A*11:01; MORC1; ENSG00000114487; CTA
ASSQSTPVK

SEQ ID NO: 46572 - protein, 9 aa, Homo sapiens
  Table A; Target 46572; HLA-B*07:02; MORC1; ENSG00000114487; CTA
AVKIAESIL

SEQ ID NO: 46573 - protein, 9 aa, Homo sapiens
  Table A; Target 46573; HLA-B*15:01; MORC1; ENSG00000114487; CTA
AVKIAESIL

SEQ ID NO: 46574 - protein, 10 aa, Homo sapiens
  Table A; Target 46574; HLA-A*03:01; MORC1; ENSG00000114487; CTA
AVKIAESILK

SEQ ID NO: 46575 - protein, 10 aa, Homo sapiens
  Table A; Target 46575; HLA-A*03:02; MORC1; ENSG00000114487; CTA
AVKIAESILK

SEQ ID NO: 46576 - protein, 10 aa, Homo sapiens
  Table A; Target 46576; HLA-A*11:01; MORC1; ENSG00000114487; CTA
AVKIAESILK

SEQ ID NO: 46577 - protein, 8 aa, Homo sapiens
  Table A; Target 46577; HLA-A*23:01; MORC1; ENSG00000114487; CTA
AYTSVLYF

SEQ ID NO: 46578 - protein, 8 aa, Homo sapiens
  Table A; Target 46578; HLA-A*24:02; MORC1; ENSG00000114487; CTA
AYTSVLYF

SEQ ID NO: 46579 - protein, 9 aa, Homo sapiens
  Table A; Target 46579; HLA-B*49:01; MORC1; ENSG00000114487; CTA
CEEESLSEV

SEQ ID NO: 46580 - protein, 10 aa, Homo sapiens
  Table A; Target 46580; HLA-B*49:01; MORC1; ENSG00000114487; CTA
CEEESLSEVV

SEQ ID NO: 46581 - protein, 9 aa, Homo sapiens
  Table A; Target 46581; HLA-A*23:01; MORC1; ENSG00000114487; CTA
CFNQIQNTY

SEQ ID NO: 46582 - protein, 9 aa, Homo sapiens
  Table A; Target 46582; HLA-A*24:02; MORC1; ENSG00000114487; CTA
CFNQIQNTY

SEQ ID NO: 46583 - protein, 9 aa, Homo sapiens
  Table A; Target 46583; HLA-A*29:02; MORC1; ENSG00000114487; CTA
CFNQIQNTY

SEQ ID NO: 46584 - protein, 9 aa, Homo sapiens
  Table A; Target 46584; HLA-A*30:02; MORC1; ENSG00000114487; CTA
CFNQIQNTY

SEQ ID NO: 46585 - protein, 9 aa, Homo sapiens
  Table A; Target 46585; HLA-B*15:01; MORC1; ENSG00000114487; CTA
CFNQIQNTY

SEQ ID NO: 46586 - protein, 9 aa, Homo sapiens
  Table A; Target 46586; HLA-B*15:03; MORC1; ENSG00000114487; CTA
CFNQIQNTY

SEQ ID NO: 46587 - protein, 9 aa, Homo sapiens
  Table A; Target 46587; HLA-C*14:02; MORC1; ENSG00000114487; CTA
CFNQIQNTY

SEQ ID NO: 46588 - protein, 10 aa, Homo sapiens
  Table A; Target 46588; HLA-A*25:01; MORC1; ENSG00000114487; CTA
CLKNAQAASW

SEQ ID NO: 46589 - protein, 9 aa, Homo sapiens
  Table A; Target 46589; HLA-B*51:01; MORC1; ENSG00000114487; CTA
DAGAERLDV

SEQ ID NO: 46590 - protein, 8 aa, Homo sapiens
  Table A; Target 46590; HLA-B*08:01; MORC1; ENSG00000114487; CTA
DDLKHESL

SEQ ID NO: 46591 - protein, 8 aa, Homo sapiens
  Table A; Target 46591; HLA-B*18:01; MORC1; ENSG00000114487; CTA
DDLKHESL

SEQ ID NO: 46592 - protein, 8 aa, Homo sapiens
  Table A; Target 46592; HLA-B*37:01; MORC1; ENSG00000114487; CTA
DDLKHESL

SEQ ID NO: 46593 - protein, 8 aa, Homo sapiens
  Table A; Target 46593; HLA-B*40:02; MORC1; ENSG00000114487; CTA
DDLKHESL

SEQ ID NO: 46594 - protein, 8 aa, Homo sapiens
  Table A; Target 46594; HLA-B*08:01; MORC1; ENSG00000114487; CTA
DDPQKFAM

SEQ ID NO: 46595 - protein, 9 aa, Homo sapiens
  Table A; Target 46595; HLA-A*33:01; MORC1; ENSG00000114487; CTA
DDRYPALQR

SEQ ID NO: 46596 - protein, 9 aa, Homo sapiens
  Table A; Target 46596; HLA-A*33:03; MORC1; ENSG00000114487; CTA
DDRYPALQR

SEQ ID NO: 46597 - protein, 9 aa, Homo sapiens
  Table A; Target 46597; HLA-A*68:01; MORC1; ENSG00000114487; CTA
DDRYPALQR

SEQ ID NO: 46598 - protein, 8 aa, Homo sapiens
  Table A; Target 46598; HLA-B*18:01; MORC1; ENSG00000114487; CTA
DEITVTST

SEQ ID NO: 46599 - protein, 9 aa, Homo sapiens
  Table A; Target 46599; HLA-A*30:01; MORC1; ENSG00000114487; CTA
DEITVTSTC

SEQ ID NO: 46600 - protein, 9 aa, Homo sapiens
  Table A; Target 46600; HLA-B*18:01; MORC1; ENSG00000114487; CTA
DEITVTSTC

SEQ ID NO: 46601 - protein, 9 aa, Homo sapiens
  Table A; Target 46601; HLA-B*49:01; MORC1; ENSG00000114487; CTA
DEITVTSTC

SEQ ID NO: 46602 - protein, 10 aa, Homo sapiens
  Table A; Target 46602; HLA-A*30:01; MORC1; ENSG00000114487; CTA
DEITVTSTCL

SEQ ID NO: 46603 - protein, 10 aa, Homo sapiens
  Table A; Target 46603; HLA-B*18:01; MORC1; ENSG00000114487; CTA
DEITVTSTCL

SEQ ID NO: 46604 - protein, 10 aa, Homo sapiens
  Table A; Target 46604; HLA-B*40:01; MORC1; ENSG00000114487; CTA
DEITVTSTCL

SEQ ID NO: 46605 - protein, 9 aa, Homo sapiens
  Table A; Target 46605; HLA-B*18:01; MORC1; ENSG00000114487; CTA
DEVKKAEEA

SEQ ID NO: 46606 - protein, 9 aa, Homo sapiens
  Table A; Target 46606; HLA-B*38:01; MORC1; ENSG00000114487; CTA
DKSNTDVSL

SEQ ID NO: 46607 - protein, 9 aa, Homo sapiens
  Table A; Target 46607; HLA-B*39:01; MORC1; ENSG00000114487; CTA
DKSNTDVSL

SEQ ID NO: 46608 - protein, 10 aa, Homo sapiens
  Table A; Target 46608; HLA-A*25:01; MORC1; ENSG00000114487; CTA
DLKHESLSSF

SEQ ID NO: 46609 - protein, 10 aa, Homo sapiens
  Table A; Target 46609; HLA-A*26:01; MORC1; ENSG00000114487; CTA
DLKHESLSSF

SEQ ID NO: 46610 - protein, 10 aa, Homo sapiens
  Table A; Target 46610; HLA-A*33:01; MORC1; ENSG00000114487; CTA
DNARDAGAER

SEQ ID NO: 46611 - protein, 10 aa, Homo sapiens
  Table A; Target 46611; HLA-A*68:01; MORC1; ENSG00000114487; CTA
DNARDAGAER

SEQ ID NO: 46612 - protein, 9 aa, Homo sapiens
  Table A; Target 46612; HLA-B*07:02; MORC1; ENSG00000114487; CTA
DPQKFAMEL

SEQ ID NO: 46613 - protein, 9 aa, Homo sapiens
  Table A; Target 46613; HLA-B*08:01; MORC1; ENSG00000114487; CTA
DPQKFAMEL

SEQ ID NO: 46614 - protein, 9 aa, Homo sapiens
  Table A; Target 46614; HLA-B*35:01; MORC1; ENSG00000114487; CTA
DPQKFAMEL

SEQ ID NO: 46615 - protein, 9 aa, Homo sapiens
  Table A; Target 46615; HLA-B*35:03; MORC1; ENSG00000114487; CTA
DPQKFAMEL

SEQ ID NO: 46616 - protein, 9 aa, Homo sapiens
  Table A; Target 46616; HLA-B*51:01; MORC1; ENSG00000114487; CTA
DPQKFAMEL

SEQ ID NO: 46617 - protein, 9 aa, Homo sapiens
  Table A; Target 46617; HLA-C*07:02; MORC1; ENSG00000114487; CTA
DPQKFAMEL

SEQ ID NO: 46618 - protein, 10 aa, Homo sapiens
  Table A; Target 46618; HLA-A*01:01; MORC1; ENSG00000114487; CTA
DSDIILVSDK

SEQ ID NO: 46619 - protein, 11 aa, Homo sapiens
  Table A; Target 46619; HLA-A*01:01; MORC1; ENSG00000114487; CTA
DSDVEYISETK

SEQ ID NO: 46620 - protein, 9 aa, Homo sapiens
  Table A; Target 46620; HLA-A*01:01; MORC1; ENSG00000114487; CTA
DTYLEALLK

SEQ ID NO: 46621 - protein, 9 aa, Homo sapiens
  Table A; Target 46621; HLA-A*11:01; MORC1; ENSG00000114487; CTA
DTYLEALLK

SEQ ID NO: 46622 - protein, 9 aa, Homo sapiens
  Table A; Target 46622; HLA-A*25:01; MORC1; ENSG00000114487; CTA
DVEKPLNSF

SEQ ID NO: 46623 - protein, 9 aa, Homo sapiens
  Table A; Target 46623; HLA-A*26:01; MORC1; ENSG00000114487; CTA
DVEKPLNSF

SEQ ID NO: 46624 - protein, 9 aa, Homo sapiens
  Table A; Target 46624; HLA-A*33:01; MORC1; ENSG00000114487; CTA
DVEKPLNSF

SEQ ID NO: 46625 - protein, 9 aa, Homo sapiens
  Table A; Target 46625; HLA-C*05:01; MORC1; ENSG00000114487; CTA
DVEKPLNSF

SEQ ID NO: 46626 - protein, 11 aa, Homo sapiens
  Table A; Target 46626; HLA-A*01:01; MORC1; ENSG00000114487; CTA
DVEKPLNSFQY

SEQ ID NO: 46627 - protein, 11 aa, Homo sapiens
  Table A; Target 46627; HLA-A*26:01; MORC1; ENSG00000114487; CTA
DVEKPLNSFQY

SEQ ID NO: 46628 - protein, 9 aa, Homo sapiens
  Table A; Target 46628; HLA-A*68:01; MORC1; ENSG00000114487; CTA
DVEYISETK

SEQ ID NO: 46629 - protein, 10 aa, Homo sapiens
  Table A; Target 46629; HLA-A*68:02; MORC1; ENSG00000114487; CTA
DVEYISETKI

SEQ ID NO: 46630 - protein, 9 aa, Homo sapiens
  Table A; Target 46630; HLA-A*33:01; MORC1; ENSG00000114487; CTA
DVFSVDNEK

SEQ ID NO: 46631 - protein, 9 aa, Homo sapiens
  Table A; Target 46631; HLA-A*68:01; MORC1; ENSG00000114487; CTA
DVFSVDNEK

SEQ ID NO: 46632 - protein, 9 aa, Homo sapiens
  Table A; Target 46632; HLA-C*07:06; MORC1; ENSG00000114487; CTA
DVFSVDNEK

SEQ ID NO: 46633 - protein, 10 aa, Homo sapiens
  Table A; Target 46633; HLA-A*25:01; MORC1; ENSG00000114487; CTA
DVFSVDNEKL

SEQ ID NO: 46634 - protein, 10 aa, Homo sapiens
  Table A; Target 46634; HLA-A*26:01; MORC1; ENSG00000114487; CTA
DVFSVDNEKL

SEQ ID NO: 46635 - protein, 10 aa, Homo sapiens
  Table A; Target 46635; HLA-A*68:01; MORC1; ENSG00000114487; CTA
DVFSVDNEKL

SEQ ID NO: 46636 - protein, 10 aa, Homo sapiens
  Table A; Target 46636; HLA-A*68:02; MORC1; ENSG00000114487; CTA
DVFSVDNEKL

SEQ ID NO: 46637 - protein, 10 aa, Homo sapiens
  Table A; Target 46637; HLA-B*35:03; MORC1; ENSG00000114487; CTA
DVFSVDNEKL

SEQ ID NO: 46638 - protein, 10 aa, Homo sapiens
  Table A; Target 46638; HLA-A*25:01; MORC1; ENSG00000114487; CTA
DVIYGKCGTL

SEQ ID NO: 46639 - protein, 10 aa, Homo sapiens
  Table A; Target 46639; HLA-A*26:01; MORC1; ENSG00000114487; CTA
DVIYGKCGTL

SEQ ID NO: 46640 - protein, 10 aa, Homo sapiens
  Table A; Target 46640; HLA-A*33:01; MORC1; ENSG00000114487; CTA
DVIYGKCGTL

SEQ ID NO: 46641 - protein, 11 aa, Homo sapiens
  Table A; Target 46641; HLA-A*33:01; MORC1; ENSG00000114487; CTA
DVNLSSGHIAR

SEQ ID NO: 46642 - protein, 11 aa, Homo sapiens
  Table A; Target 46642; HLA-A*33:03; MORC1; ENSG00000114487; CTA
DVNLSSGHIAR

SEQ ID NO: 46643 - protein, 11 aa, Homo sapiens
  Table A; Target 46643; HLA-A*68:01; MORC1; ENSG00000114487; CTA
DVNLSSGHIAR

SEQ ID NO: 46644 - protein, 11 aa, Homo sapiens
  Table A; Target 46644; HLA-C*07:06; MORC1; ENSG00000114487; CTA
DVNLSSGHIAR

SEQ ID NO: 46645 - protein, 9 aa, Homo sapiens
  Table A; Target 46645; HLA-A*68:02; MORC1; ENSG00000114487; CTA
EASDIIYFG

SEQ ID NO: 46646 - protein, 10 aa, Homo sapiens
  Table A; Target 46646; HLA-A*26:01; MORC1; ENSG00000114487; CTA
EASDIIYFGR

SEQ ID NO: 46647 - protein, 10 aa, Homo sapiens
  Table A; Target 46647; HLA-A*33:01; MORC1; ENSG00000114487; CTA
EASDIIYFGR

SEQ ID NO: 46648 - protein, 10 aa, Homo sapiens
  Table A; Target 46648; HLA-A*33:03; MORC1; ENSG00000114487; CTA
EASDIIYFGR

SEQ ID NO: 46649 - protein, 10 aa, Homo sapiens
  Table A; Target 46649; HLA-A*68:02; MORC1; ENSG00000114487; CTA
EASDIIYFGR

SEQ ID NO: 46650 - protein, 10 aa, Homo sapiens
  Table A; Target 46650; HLA-B*27:02; MORC1; ENSG00000114487; CTA
EASDIIYFGR

SEQ ID NO: 46651 - protein, 10 aa, Homo sapiens
  Table A; Target 46651; HLA-C*07:06; MORC1; ENSG00000114487; CTA
EASDIIYFGR

SEQ ID NO: 46652 - protein, 9 aa, Homo sapiens
  Table A; Target 46652; HLA-A*23:01; MORC1; ENSG00000114487; CTA
EAVKIAESI

SEQ ID NO: 46653 - protein, 9 aa, Homo sapiens
  Table A; Target 46653; HLA-A*25:01; MORC1; ENSG00000114487; CTA
EAVKIAESI

SEQ ID NO: 46654 - protein, 9 aa, Homo sapiens
  Table A; Target 46654; HLA-A*26:01; MORC1; ENSG00000114487; CTA
EAVKIAESI

SEQ ID NO: 46655 - protein, 9 aa, Homo sapiens
  Table A; Target 46655; HLA-A*68:01; MORC1; ENSG00000114487; CTA
EAVKIAESI

SEQ ID NO: 46656 - protein, 9 aa, Homo sapiens
  Table A; Target 46656; HLA-A*68:02; MORC1; ENSG00000114487; CTA
EAVKIAESI

SEQ ID NO: 46657 - protein, 9 aa, Homo sapiens
  Table A; Target 46657; HLA-B*35:01; MORC1; ENSG00000114487; CTA
EAVKIAESI

SEQ ID NO: 46658 - protein, 9 aa, Homo sapiens
  Table A; Target 46658; HLA-B*35:03; MORC1; ENSG00000114487; CTA
EAVKIAESI

SEQ ID NO: 46659 - protein, 9 aa, Homo sapiens
  Table A; Target 46659; HLA-B*51:01; MORC1; ENSG00000114487; CTA
EAVKIAESI

SEQ ID NO: 46660 - protein, 9 aa, Homo sapiens
  Table A; Target 46660; HLA-B*58:01; MORC1; ENSG00000114487; CTA
EAVKIAESI

SEQ ID NO: 46661 - protein, 9 aa, Homo sapiens
  Table A; Target 46661; HLA-C*07:06; MORC1; ENSG00000114487; CTA
EAVKIAESI

SEQ ID NO: 46662 - protein, 10 aa, Homo sapiens
  Table A; Target 46662; HLA-B*35:03; MORC1; ENSG00000114487; CTA
EAVKIAESIL

SEQ ID NO: 46663 - protein, 11 aa, Homo sapiens
  Table A; Target 46663; HLA-A*68:01; MORC1; ENSG00000114487; CTA
EAVKIAESILK

SEQ ID NO: 46664 - protein, 9 aa, Homo sapiens
  Table A; Target 46664; HLA-B*18:01; MORC1; ENSG00000114487; CTA
EDFPARWSF

SEQ ID NO: 46665 - protein, 9 aa, Homo sapiens
  Table A; Target 46665; HLA-B*44:02; MORC1; ENSG00000114487; CTA
EDFPARWSF

SEQ ID NO: 46666 - protein, 9 aa, Homo sapiens
  Table A; Target 46666; HLA-B*44:03; MORC1; ENSG00000114487; CTA
EDFPARWSF

SEQ ID NO: 46667 - protein, 9 aa, Homo sapiens
  Table A; Target 46667; HLA-B*40:02; MORC1; ENSG00000114487; CTA
EDILMAGAL

SEQ ID NO: 46668 - protein, 10 aa, Homo sapiens
  Table A; Target 46668; HLA-B*40:02; MORC1; ENSG00000114487; CTA
EDVEAKQKNL

SEQ ID NO: 46669 - protein, 9 aa, Homo sapiens
  Table A; Target 46669; HLA-B*18:01; MORC1; ENSG00000114487; CTA
EEASDIIYF

SEQ ID NO: 46670 - protein, 9 aa, Homo sapiens
  Table A; Target 46670; HLA-B*44:02; MORC1; ENSG00000114487; CTA
EEASDIIYF

SEQ ID NO: 46671 - protein, 9 aa, Homo sapiens
  Table A; Target 46671; HLA-B*44:03; MORC1; ENSG00000114487; CTA
EEASDIIYF

SEQ ID NO: 46672 - protein, 10 aa, Homo sapiens
  Table A; Target 46672; HLA-B*44:02; MORC1; ENSG00000114487; CTA
EEAVKIAESI

SEQ ID NO: 46673 - protein, 10 aa, Homo sapiens
  Table A; Target 46673; HLA-B*44:03; MORC1; ENSG00000114487; CTA
EEAVKIAESI

SEQ ID NO: 46674 - protein, 9 aa, Homo sapiens
  Table A; Target 46674; HLA-B*44:02; MORC1; ENSG00000114487; CTA
EEPALSCEL

SEQ ID NO: 46675 - protein, 9 aa, Homo sapiens
  Table A; Target 46675; HLA-B*44:03; MORC1; ENSG00000114487; CTA
EEPALSCEL

SEQ ID NO: 46676 - protein, 9 aa, Homo sapiens
  Table A; Target 46676; HLA-B*40:01; MORC1; ENSG00000114487; CTA
EESLSEVVV

SEQ ID NO: 46677 - protein, 9 aa, Homo sapiens
  Table A; Target 46677; HLA-B*49:01; MORC1; ENSG00000114487; CTA
EESLSEVVV

SEQ ID NO: 46678 - protein, 9 aa, Homo sapiens
  Table A; Target 46678; HLA-B*18:01; MORC1; ENSG00000114487; CTA
EETDSDVEY

SEQ ID NO: 46679 - protein, 9 aa, Homo sapiens
  Table A; Target 46679; HLA-B*44:02; MORC1; ENSG00000114487; CTA
EETDSDVEY

SEQ ID NO: 46680 - protein, 9 aa, Homo sapiens
  Table A; Target 46680; HLA-B*44:03; MORC1; ENSG00000114487; CTA
EETDSDVEY

SEQ ID NO: 46681 - protein, 8 aa, Homo sapiens
  Table A; Target 46681; HLA-B*18:01; MORC1; ENSG00000114487; CTA
EETMTCVF

SEQ ID NO: 46682 - protein, 8 aa, Homo sapiens
  Table A; Target 46682; HLA-B*37:01; MORC1; ENSG00000114487; CTA
EETMTCVF

SEQ ID NO: 46683 - protein, 9 aa, Homo sapiens
  Table A; Target 46683; HLA-B*18:01; MORC1; ENSG00000114487; CTA
EETMTCVFF

SEQ ID NO: 46684 - protein, 9 aa, Homo sapiens
  Table A; Target 46684; HLA-B*44:02; MORC1; ENSG00000114487; CTA
EETMTCVFF

SEQ ID NO: 46685 - protein, 9 aa, Homo sapiens
  Table A; Target 46685; HLA-B*44:03; MORC1; ENSG00000114487; CTA
EETMTCVFF

SEQ ID NO: 46686 - protein, 8 aa, Homo sapiens
  Table A; Target 46686; HLA-C*14:02; MORC1; ENSG00000114487; CTA
EFLNVQEY

SEQ ID NO: 46687 - protein, 10 aa, Homo sapiens
  Table A; Target 46687; HLA-A*01:01; MORC1; ENSG00000114487; CTA
EGDLEQTDTY

SEQ ID NO: 46688 - protein, 9 aa, Homo sapiens
  Table A; Target 46688; HLA-A*26:01; MORC1; ENSG00000114487; CTA
ELCNDVLAM

SEQ ID NO: 46689 - protein, 11 aa, Homo sapiens
  Table A; Target 46689; HLA-A*68:01; MORC1; ENSG00000114487; CTA
ELCNDVLAMKR

SEQ ID NO: 46690 - protein, 8 aa, Homo sapiens
  Table A; Target 46690; HLA-B*08:01; MORC1; ENSG00000114487; CTA
ELKTARTL

SEQ ID NO: 46691 - protein, 10 aa, Homo sapiens
  Table A; Target 46691; HLA-B*08:01; MORC1; ENSG00000114487; CTA
ELKTARTLSL

SEQ ID NO: 46692 - protein, 9 aa, Homo sapiens
  Table A; Target 46692; HLA-A*24:02; MORC1; ENSG00000114487; CTA
ELMQQFDVI

SEQ ID NO: 46693 - protein, 9 aa, Homo sapiens
  Table A; Target 46693; HLA-A*25:01; MORC1; ENSG00000114487; CTA
ELMQQFDVI

SEQ ID NO: 46694 - protein, 8 aa, Homo sapiens
  Table A; Target 46694; HLA-B*18:01; MORC1; ENSG00000114487; CTA
ELSIIYKY

SEQ ID NO: 46695 - protein, 8 aa, Homo sapiens
  Table A; Target 46695; HLA-C*07:01; MORC1; ENSG00000114487; CTA
ELSIIYKY

SEQ ID NO: 46696 - protein, 8 aa, Homo sapiens
  Table A; Target 46696; HLA-B*08:01; MORC1; ENSG00000114487; CTA
EMKRKQSL

SEQ ID NO: 46697 - protein, 8 aa, Homo sapiens
  Table A; Target 46697; HLA-A*33:01; MORC1; ENSG00000114487; CTA
ENVKLAER

SEQ ID NO: 46698 - protein, 8 aa, Homo sapiens
  Table A; Target 46698; HLA-A*33:03; MORC1; ENSG00000114487; CTA
ENVKLAER

SEQ ID NO: 46699 - protein, 9 aa, Homo sapiens
  Table A; Target 46699; HLA-B*08:01; MORC1; ENSG00000114487; CTA
EQMNKKLKM

SEQ ID NO: 46700 - protein, 9 aa, Homo sapiens
  Table A; Target 46700; HLA-B*13:02; MORC1; ENSG00000114487; CTA
EQQPQPQFI

SEQ ID NO: 46701 - protein, 9 aa, Homo sapiens
  Table A; Target 46701; HLA-B*38:01; MORC1; ENSG00000114487; CTA
EQQPQPQFI

SEQ ID NO: 46702 - protein, 10 aa, Homo sapiens
  Table A; Target 46702; HLA-B*39:01; MORC1; ENSG00000114487; CTA
EQTDTYLEAL

SEQ ID NO: 46703 - protein, 10 aa, Homo sapiens
  Table A; Target 46703; HLA-A*33:03; MORC1; ENSG00000114487; CTA
ESLSEVVVPM

SEQ ID NO: 46704 - protein, 10 aa, Homo sapiens
  Table A; Target 46704; HLA-C*07:06; MORC1; ENSG00000114487; CTA
ESLSEVVVPM

SEQ ID NO: 46705 - protein, 9 aa, Homo sapiens
  Table A; Target 46705; HLA-A*33:01; MORC1; ENSG00000114487; CTA
ESVIKYQNR

SEQ ID NO: 46706 - protein, 9 aa, Homo sapiens
  Table A; Target 46706; HLA-A*33:03; MORC1; ENSG00000114487; CTA
ESVIKYQNR

SEQ ID NO: 46707 - protein, 9 aa, Homo sapiens
  Table A; Target 46707; HLA-A*68:01; MORC1; ENSG00000114487; CTA
ESVIKYQNR

SEQ ID NO: 46708 - protein, 9 aa, Homo sapiens
  Table A; Target 46708; HLA-C*07:06; MORC1; ENSG00000114487; CTA
ESVIKYQNR

SEQ ID NO: 46709 - protein, 9 aa, Homo sapiens
  Table A; Target 46709; HLA-A*68:01; MORC1; ENSG00000114487; CTA
ESVTDDPQK

SEQ ID NO: 46710 - protein, 10 aa, Homo sapiens
  Table A; Target 46710; HLA-A*25:01; MORC1; ENSG00000114487; CTA
ESVTDDPQKF

SEQ ID NO: 46711 - protein, 10 aa, Homo sapiens
  Table A; Target 46711; HLA-A*26:01; MORC1; ENSG00000114487; CTA
ESVTDDPQKF

SEQ ID NO: 46712 - protein, 10 aa, Homo sapiens
  Table A; Target 46712; HLA-A*68:01; MORC1; ENSG00000114487; CTA
ESVTDDPQKF

SEQ ID NO: 46713 - protein, 10 aa, Homo sapiens
  Table A; Target 46713; HLA-C*07:06; MORC1; ENSG00000114487; CTA
ESVTDDPQKF

SEQ ID NO: 46714 - protein, 8 aa, Homo sapiens
  Table A; Target 46714; HLA-A*01:01; MORC1; ENSG00000114487; CTA
ETDSDVEY

SEQ ID NO: 46715 - protein, 8 aa, Homo sapiens
  Table A; Target 46715; HLA-C*05:01; MORC1; ENSG00000114487; CTA
ETDSDVEY

SEQ ID NO: 46716 - protein, 9 aa, Homo sapiens
  Table A; Target 46716; HLA-C*05:01; MORC1; ENSG00000114487; CTA
ETDSDVEYI

SEQ ID NO: 46717 - protein, 9 aa, Homo sapiens
  Table A; Target 46717; HLA-A*26:01; MORC1; ENSG00000114487; CTA
EVKKAEEAV

SEQ ID NO: 46718 - protein, 10 aa, Homo sapiens
  Table A; Target 46718; HLA-A*33:03; MORC1; ENSG00000114487; CTA
EVKKAEEAVK

SEQ ID NO: 46719 - protein, 9 aa, Homo sapiens
  Table A; Target 46719; HLA-A*03:01; MORC1; ENSG00000114487; CTA
EVMEPSHNK

SEQ ID NO: 46720 - protein, 9 aa, Homo sapiens
  Table A; Target 46720; HLA-A*03:02; MORC1; ENSG00000114487; CTA
EVMEPSHNK

SEQ ID NO: 46721 - protein, 9 aa, Homo sapiens
  Table A; Target 46721; HLA-A*11:01; MORC1; ENSG00000114487; CTA
EVMEPSHNK

SEQ ID NO: 46722 - protein, 9 aa, Homo sapiens
  Table A; Target 46722; HLA-A*25:01; MORC1; ENSG00000114487; CTA
EVMEPSHNK

SEQ ID NO: 46723 - protein, 9 aa, Homo sapiens
  Table A; Target 46723; HLA-A*33:01; MORC1; ENSG00000114487; CTA
EVMEPSHNK

SEQ ID NO: 46724 - protein, 9 aa, Homo sapiens
  Table A; Target 46724; HLA-A*33:03; MORC1; ENSG00000114487; CTA
EVMEPSHNK

SEQ ID NO: 46725 - protein, 9 aa, Homo sapiens
  Table A; Target 46725; HLA-A*68:01; MORC1; ENSG00000114487; CTA
EVMEPSHNK

SEQ ID NO: 46726 - protein, 9 aa, Homo sapiens
  Table A; Target 46726; HLA-C*07:06; MORC1; ENSG00000114487; CTA
EVMEPSHNK

SEQ ID NO: 46727 - protein, 9 aa, Homo sapiens
  Table A; Target 46727; HLA-A*25:01; MORC1; ENSG00000114487; CTA
EVVVPMPSW

SEQ ID NO: 46728 - protein, 9 aa, Homo sapiens
  Table A; Target 46728; HLA-A*26:01; MORC1; ENSG00000114487; CTA
EVVVPMPSW

SEQ ID NO: 46729 - protein, 9 aa, Homo sapiens
  Table A; Target 46729; HLA-B*44:02; MORC1; ENSG00000114487; CTA
EVVVPMPSW

SEQ ID NO: 46730 - protein, 9 aa, Homo sapiens
  Table A; Target 46730; HLA-B*44:03; MORC1; ENSG00000114487; CTA
EVVVPMPSW

SEQ ID NO: 46731 - protein, 9 aa, Homo sapiens
  Table A; Target 46731; HLA-B*57:01; MORC1; ENSG00000114487; CTA
EVVVPMPSW

SEQ ID NO: 46732 - protein, 9 aa, Homo sapiens
  Table A; Target 46732; HLA-B*58:01; MORC1; ENSG00000114487; CTA
EVVVPMPSW

SEQ ID NO: 46733 - protein, 8 aa, Homo sapiens
  Table A; Target 46733; HLA-A*23:01; MORC1; ENSG00000114487; CTA
EYISETKI

SEQ ID NO: 46734 - protein, 9 aa, Homo sapiens
  Table A; Target 46734; HLA-A*23:01; MORC1; ENSG00000114487; CTA
EYISETKIM

SEQ ID NO: 46735 - protein, 9 aa, Homo sapiens
  Table A; Target 46735; HLA-A*24:02; MORC1; ENSG00000114487; CTA
EYISETKIM

SEQ ID NO: 46736 - protein, 9 aa, Homo sapiens
  Table A; Target 46736; HLA-C*14:02; MORC1; ENSG00000114487; CTA
EYISETKIM

SEQ ID NO: 46737 - protein, 10 aa, Homo sapiens
  Table A; Target 46737; HLA-A*33:01; MORC1; ENSG00000114487; CTA
EYISETKIMK

SEQ ID NO: 46738 - protein, 10 aa, Homo sapiens
  Table A; Target 46738; HLA-A*33:03; MORC1; ENSG00000114487; CTA
EYISETKIMK

SEQ ID NO: 46739 - protein, 11 aa, Homo sapiens
  Table A; Target 46739; HLA-A*24:02; MORC1; ENSG00000114487; CTA
EYISETKIMKK

SEQ ID NO: 46740 - protein, 11 aa, Homo sapiens
  Table A; Target 46740; HLA-A*33:01; MORC1; ENSG00000114487; CTA
EYISETKIMKK

SEQ ID NO: 46741 - protein, 11 aa, Homo sapiens
  Table A; Target 46741; HLA-A*33:03; MORC1; ENSG00000114487; CTA
EYISETKIMKK

SEQ ID NO: 46742 - protein, 11 aa, Homo sapiens
  Table A; Target 46742; HLA-A*68:01; MORC1; ENSG00000114487; CTA
EYISETKIMKK

SEQ ID NO: 46743 - protein, 9 aa, Homo sapiens
  Table A; Target 46743; HLA-A*29:02; MORC1; ENSG00000114487; CTA
FAMELSIIY

SEQ ID NO: 46744 - protein, 9 aa, Homo sapiens
  Table A; Target 46744; HLA-B*35:01; MORC1; ENSG00000114487; CTA
FAMELSIIY

SEQ ID NO: 46745 - protein, 9 aa, Homo sapiens
  Table A; Target 46745; HLA-B*46:01; MORC1; ENSG00000114487; CTA
FAMELSIIY

SEQ ID NO: 46746 - protein, 9 aa, Homo sapiens
  Table A; Target 46746; HLA-C*02:02; MORC1; ENSG00000114487; CTA
FAMELSIIY

SEQ ID NO: 46747 - protein, 9 aa, Homo sapiens
  Table A; Target 46747; HLA-C*12:03; MORC1; ENSG00000114487; CTA
FAMELSIIY

SEQ ID NO: 46748 - protein, 9 aa, Homo sapiens
  Table A; Target 46748; HLA-C*16:04; MORC1; ENSG00000114487; CTA
FAMELSIIY

SEQ ID NO: 46749 - protein, 10 aa, Homo sapiens
  Table A; Target 46749; HLA-A*11:01; MORC1; ENSG00000114487; CTA
FAMELSIIYK

SEQ ID NO: 46750 - protein, 10 aa, Homo sapiens
  Table A; Target 46750; HLA-B*27:02; MORC1; ENSG00000114487; CTA
FAMELSIIYK

SEQ ID NO: 46751 - protein, 11 aa, Homo sapiens
  Table A; Target 46751; HLA-B*27:02; MORC1; ENSG00000114487; CTA
FGYQNDIDVEK

SEQ ID NO: 46752 - protein, 9 aa, Homo sapiens
  Table A; Target 46752; HLA-B*27:05; MORC1; ENSG00000114487; CTA
FIGQYGNGL

SEQ ID NO: 46753 - protein, 9 aa, Homo sapiens
  Table A; Target 46753; HLA-C*01:02; MORC1; ENSG00000114487; CTA
FIGQYGNGL

SEQ ID NO: 46754 - protein, 9 aa, Homo sapiens
  Table A; Target 46754; HLA-C*07:04; MORC1; ENSG00000114487; CTA
FIGQYGNGL

SEQ ID NO: 46755 - protein, 9 aa, Homo sapiens
  Table A; Target 46755; HLA-C*14:02; MORC1; ENSG00000114487; CTA
FIGQYGNGL

SEQ ID NO: 46756 - protein, 9 aa, Homo sapiens
  Table A; Target 46756; HLA-A*32:01; MORC1; ENSG00000114487; CTA
FIHANSTTH

SEQ ID NO: 46757 - protein, 9 aa, Homo sapiens
  Table A; Target 46757; HLA-B*15:03; MORC1; ENSG00000114487; CTA
FIHANSTTH

SEQ ID NO: 46758 - protein, 9 aa, Homo sapiens
  Table A; Target 46758; HLA-B*46:01; MORC1; ENSG00000114487; CTA
FIHANSTTH

SEQ ID NO: 46759 - protein, 9 aa, Homo sapiens
  Table A; Target 46759; HLA-C*02:02; MORC1; ENSG00000114487; CTA
FIHANSTTH

SEQ ID NO: 46760 - protein, 9 aa, Homo sapiens
  Table A; Target 46760; HLA-C*07:04; MORC1; ENSG00000114487; CTA
FIHANSTTH

SEQ ID NO: 46761 - protein, 9 aa, Homo sapiens
  Table A; Target 46761; HLA-A*02:07; MORC1; ENSG00000114487; CTA
FIPVDEITV

SEQ ID NO: 46762 - protein, 9 aa, Homo sapiens
  Table A; Target 46762; HLA-A*02:03; MORC1; ENSG00000114487; CTA
FIYSNNRLI

SEQ ID NO: 46763 - protein, 8 aa, Homo sapiens
  Table A; Target 46763; HLA-C*05:01; MORC1; ENSG00000114487; CTA
FLDDGCGM

SEQ ID NO: 46764 - protein, 10 aa, Homo sapiens
  Table A; Target 46764; HLA-A*01:01; MORC1; ENSG00000114487; CTA
FLDDGCGMSP

SEQ ID NO: 46765 - protein, 9 aa, Homo sapiens
  Table A; Target 46765; HLA-A*02:01; MORC1; ENSG00000114487; CTA
FLFGALAEL

SEQ ID NO: 46766 - protein, 9 aa, Homo sapiens
  Table A; Target 46766; HLA-A*02:03; MORC1; ENSG00000114487; CTA
FLFGALAEL

SEQ ID NO: 46767 - protein, 9 aa, Homo sapiens
  Table A; Target 46767; HLA-A*02:04; MORC1; ENSG00000114487; CTA
FLFGALAEL

SEQ ID NO: 46768 - protein, 9 aa, Homo sapiens
  Table A; Target 46768; HLA-A*02:07; MORC1; ENSG00000114487; CTA
FLFGALAEL

SEQ ID NO: 46769 - protein, 9 aa, Homo sapiens
  Table A; Target 46769; HLA-B*46:01; MORC1; ENSG00000114487; CTA
FLFGALAEL

SEQ ID NO: 46770 - protein, 10 aa, Homo sapiens
  Table A; Target 46770; HLA-A*02:03; MORC1; ENSG00000114487; CTA
FLFGALAELL

SEQ ID NO: 46771 - protein, 10 aa, Homo sapiens
  Table A; Target 46771; HLA-A*02:04; MORC1; ENSG00000114487; CTA
FLFGALAELL

SEQ ID NO: 46772 - protein, 8 aa, Homo sapiens
  Table A; Target 46772; HLA-C*14:02; MORC1; ENSG00000114487; CTA
FNQIQNTY

SEQ ID NO: 46773 - protein, 9 aa, Homo sapiens
  Table A; Target 46773; HLA-C*04:01; MORC1; ENSG00000114487; CTA
FNQIQNTYM

SEQ ID NO: 46774 - protein, 9 aa, Homo sapiens
  Table A; Target 46774; HLA-C*14:02; MORC1; ENSG00000114487; CTA
FNQIQNTYM

SEQ ID NO: 46775 - protein, 10 aa, Homo sapiens
  Table A; Target 46775; HLA-B*35:01; MORC1; ENSG00000114487; CTA
FPEHQLPSEL

SEQ ID NO: 46776 - protein, 10 aa, Homo sapiens
  Table A; Target 46776; HLA-B*35:03; MORC1; ENSG00000114487; CTA
FPEHQLPSEL

SEQ ID NO: 46777 - protein, 10 aa, Homo sapiens
  Table A; Target 46777; HLA-A*32:01; MORC1; ENSG00000114487; CTA
FQNNLNKVTI

SEQ ID NO: 46778 - protein, 10 aa, Homo sapiens
  Table A; Target 46778; HLA-B*13:02; MORC1; ENSG00000114487; CTA
FQNNLNKVTI

SEQ ID NO: 46779 - protein, 10 aa, Homo sapiens
  Table A; Target 46779; HLA-B*38:01; MORC1; ENSG00000114487; CTA
FQNNLNKVTI

SEQ ID NO: 46780 - protein, 9 aa, Homo sapiens
  Table A; Target 46780; HLA-B*08:01; MORC1; ENSG00000114487; CTA
FQYQRRQAM

SEQ ID NO: 46781 - protein, 8 aa, Homo sapiens
  Table A; Target 46781; HLA-C*03:04; MORC1; ENSG00000114487; CTA
FSVDNEKL

SEQ ID NO: 46782 - protein, 9 aa, Homo sapiens
  Table A; Target 46782; HLA-A*31:01; MORC1; ENSG00000114487; CTA
FYGVNVENR

SEQ ID NO: 46783 - protein, 9 aa, Homo sapiens
  Table A; Target 46783; HLA-A*33:01; MORC1; ENSG00000114487; CTA
FYGVNVENR

SEQ ID NO: 46784 - protein, 9 aa, Homo sapiens
  Table A; Target 46784; HLA-A*33:03; MORC1; ENSG00000114487; CTA
FYGVNVENR

SEQ ID NO: 46785 - protein, 9 aa, Homo sapiens
  Table A; Target 46785; HLA-A*03:01; MORC1; ENSG00000114487; CTA
GAFKDEVKK

SEQ ID NO: 46786 - protein, 9 aa, Homo sapiens
  Table A; Target 46786; HLA-A*03:02; MORC1; ENSG00000114487; CTA
GAFKDEVKK

SEQ ID NO: 46787 - protein, 9 aa, Homo sapiens
  Table A; Target 46787; HLA-A*11:01; MORC1; ENSG00000114487; CTA
GAFKDEVKK

SEQ ID NO: 46788 - protein, 9 aa, Homo sapiens
  Table A; Target 46788; HLA-B*57:01; MORC1; ENSG00000114487; CTA
GAFKDEVKK

SEQ ID NO: 46789 - protein, 9 aa, Homo sapiens
  Table A; Target 46789; HLA-C*07:06; MORC1; ENSG00000114487; CTA
GAFKDEVKK

SEQ ID NO: 46790 - protein, 8 aa, Homo sapiens
  Table A; Target 46790; HLA-C*12:03; MORC1; ENSG00000114487; CTA
GAGVVGIV

SEQ ID NO: 46791 - protein, 9 aa, Homo sapiens
  Table A; Target 46791; HLA-A*11:01; MORC1; ENSG00000114487; CTA
GALEDFPAR

SEQ ID NO: 46792 - protein, 9 aa, Homo sapiens
  Table A; Target 46792; HLA-A*31:01; MORC1; ENSG00000114487; CTA
GALEDFPAR

SEQ ID NO: 46793 - protein, 9 aa, Homo sapiens
  Table A; Target 46793; HLA-C*07:06; MORC1; ENSG00000114487; CTA
GALEDFPAR

SEQ ID NO: 46794 - protein, 10 aa, Homo sapiens
  Table A; Target 46794; HLA-B*44:02; MORC1; ENSG00000114487; CTA
GALEDFPARW

SEQ ID NO: 46795 - protein, 10 aa, Homo sapiens
  Table A; Target 46795; HLA-B*44:03; MORC1; ENSG00000114487; CTA
GALEDFPARW

SEQ ID NO: 46796 - protein, 10 aa, Homo sapiens
  Table A; Target 46796; HLA-B*57:01; MORC1; ENSG00000114487; CTA
GALEDFPARW

SEQ ID NO: 46797 - protein, 9 aa, Homo sapiens
  Table A; Target 46797; HLA-A*30:01; MORC1; ENSG00000114487; CTA
GDDLKHESL

SEQ ID NO: 46798 - protein, 9 aa, Homo sapiens
  Table A; Target 46798; HLA-B*37:01; MORC1; ENSG00000114487; CTA
GDDLKHESL

SEQ ID NO: 46799 - protein, 9 aa, Homo sapiens
  Table A; Target 46799; HLA-B*40:01; MORC1; ENSG00000114487; CTA
GDDLKHESL

SEQ ID NO: 46800 - protein, 9 aa, Homo sapiens
  Table A; Target 46800; HLA-B*40:02; MORC1; ENSG00000114487; CTA
GDDLKHESL

SEQ ID NO: 46801 - protein, 9 aa, Homo sapiens
  Table A; Target 46801; HLA-A*32:01; MORC1; ENSG00000114487; CTA
GINNRNLTL

SEQ ID NO: 46802 - protein, 9 aa, Homo sapiens
  Table A; Target 46802; HLA-B*07:02; MORC1; ENSG00000114487; CTA
GINNRNLTL

SEQ ID NO: 46803 - protein, 9 aa, Homo sapiens
  Table A; Target 46803; HLA-B*08:01; MORC1; ENSG00000114487; CTA
GINNRNLTL

SEQ ID NO: 46804 - protein, 9 aa, Homo sapiens
  Table A; Target 46804; HLA-B*37:01; MORC1; ENSG00000114487; CTA
GINNRNLTL

SEQ ID NO: 46805 - protein, 9 aa, Homo sapiens
  Table A; Target 46805; HLA-C*07:02; MORC1; ENSG00000114487; CTA
GINNRNLTL

SEQ ID NO: 46806 - protein, 9 aa, Homo sapiens
  Table A; Target 46806; HLA-C*16:01; MORC1; ENSG00000114487; CTA
GINNRNLTL

SEQ ID NO: 46807 - protein, 9 aa, Homo sapiens
  Table A; Target 46807; HLA-A*02:01; MORC1; ENSG00000114487; CTA
GIVNIPLEV

SEQ ID NO: 46808 - protein, 9 aa, Homo sapiens
  Table A; Target 46808; HLA-A*02:03; MORC1; ENSG00000114487; CTA
GIVNIPLEV

SEQ ID NO: 46809 - protein, 9 aa, Homo sapiens
  Table A; Target 46809; HLA-A*02:04; MORC1; ENSG00000114487; CTA
GIVNIPLEV

SEQ ID NO: 46810 - protein, 9 aa, Homo sapiens
  Table A; Target 46810; HLA-A*30:01; MORC1; ENSG00000114487; CTA
GIVNIPLEV

SEQ ID NO: 46811 - protein, 9 aa, Homo sapiens
  Table A; Target 46811; HLA-B*13:02; MORC1; ENSG00000114487; CTA
GIVNIPLEV

SEQ ID NO: 46812 - protein, 9 aa, Homo sapiens
  Table A; Target 46812; HLA-C*02:02; MORC1; ENSG00000114487; CTA
GIVNIPLEV

SEQ ID NO: 46813 - protein, 9 aa, Homo sapiens
  Table A; Target 46813; HLA-A*02:03; MORC1; ENSG00000114487; CTA
GLKSGSMRI

SEQ ID NO: 46814 - protein, 9 aa, Homo sapiens
  Table A; Target 46814; HLA-A*31:01; MORC1; ENSG00000114487; CTA
GMFIYSNNR

SEQ ID NO: 46815 - protein, 9 aa, Homo sapiens
  Table A; Target 46815; HLA-B*13:02; MORC1; ENSG00000114487; CTA
GQYGNGLKS

SEQ ID NO: 46816 - protein, 9 aa, Homo sapiens
  Table A; Target 46816; HLA-B*27:05; MORC1; ENSG00000114487; CTA
GQYGNGLKS

SEQ ID NO: 46817 - protein, 11 aa, Homo sapiens
  Table A; Target 46817; HLA-B*27:05; MORC1; ENSG00000114487; CTA
GQYGNGLKSGS

SEQ ID NO: 46818 - protein, 8 aa, Homo sapiens
  Table A; Target 46818; HLA-B*13:02; MORC1; ENSG00000114487; CTA
GQYLVQYC

SEQ ID NO: 46819 - protein, 9 aa, Homo sapiens
  Table A; Target 46819; HLA-A*02:04; MORC1; ENSG00000114487; CTA
GTLLVIYNL

SEQ ID NO: 46820 - protein, 10 aa, Homo sapiens
  Table A; Target 46820; HLA-A*03:01; MORC1; ENSG00000114487; CTA
GTLLVIYNLK

SEQ ID NO: 46821 - protein, 10 aa, Homo sapiens
  Table A; Target 46821; HLA-A*11:01; MORC1; ENSG00000114487; CTA
GTLLVIYNLK

SEQ ID NO: 46822 - protein, 10 aa, Homo sapiens
  Table A; Target 46822; HLA-A*03:01; MORC1; ENSG00000114487; CTA
GTMSTISPSK

SEQ ID NO: 46823 - protein, 10 aa, Homo sapiens
  Table A; Target 46823; HLA-A*03:02; MORC1; ENSG00000114487; CTA
GTMSTISPSK

SEQ ID NO: 46824 - protein, 10 aa, Homo sapiens
  Table A; Target 46824; HLA-A*11:01; MORC1; ENSG00000114487; CTA
GTMSTISPSK

SEQ ID NO: 46825 - protein, 10 aa, Homo sapiens
  Table A; Target 46825; HLA-B*27:02; MORC1; ENSG00000114487; CTA
GTMSTISPSK

SEQ ID NO: 46826 - protein, 10 aa, Homo sapiens
  Table A; Target 46826; HLA-B*27:02; MORC1; ENSG00000114487; CTA
GYQNDIDVEK

SEQ ID NO: 46827 - protein, 9 aa, Homo sapiens
  Table A; Target 46827; HLA-A*23:01; MORC1; ENSG00000114487; CTA
HANSTTHSF

SEQ ID NO: 46828 - protein, 9 aa, Homo sapiens
  Table A; Target 46828; HLA-A*25:01; MORC1; ENSG00000114487; CTA
HANSTTHSF

SEQ ID NO: 46829 - protein, 9 aa, Homo sapiens
  Table A; Target 46829; HLA-A*26:01; MORC1; ENSG00000114487; CTA
HANSTTHSF

SEQ ID NO: 46830 - protein, 9 aa, Homo sapiens
  Table A; Target 46830; HLA-A*30:02; MORC1; ENSG00000114487; CTA
HANSTTHSF

SEQ ID NO: 46831 - protein, 9 aa, Homo sapiens
  Table A; Target 46831; HLA-A*32:01; MORC1; ENSG00000114487; CTA
HANSTTHSF

SEQ ID NO: 46832 - protein, 9 aa, Homo sapiens
  Table A; Target 46832; HLA-A*33:01; MORC1; ENSG00000114487; CTA
HANSTTHSF

SEQ ID NO: 46833 - protein, 9 aa, Homo sapiens
  Table A; Target 46833; HLA-B*08:01; MORC1; ENSG00000114487; CTA
HANSTTHSF

SEQ ID NO: 46834 - protein, 9 aa, Homo sapiens
  Table A; Target 46834; HLA-B*15:01; MORC1; ENSG00000114487; CTA
HANSTTHSF

SEQ ID NO: 46835 - protein, 9 aa, Homo sapiens
  Table A; Target 46835; HLA-B*15:03; MORC1; ENSG00000114487; CTA
HANSTTHSF

SEQ ID NO: 46836 - protein, 9 aa, Homo sapiens
  Table A; Target 46836; HLA-B*35:01; MORC1; ENSG00000114487; CTA
HANSTTHSF

SEQ ID NO: 46837 - protein, 9 aa, Homo sapiens
  Table A; Target 46837; HLA-B*35:03; MORC1; ENSG00000114487; CTA
HANSTTHSF

SEQ ID NO: 46838 - protein, 9 aa, Homo sapiens
  Table A; Target 46838; HLA-B*37:01; MORC1; ENSG00000114487; CTA
HANSTTHSF

SEQ ID NO: 46839 - protein, 9 aa, Homo sapiens
  Table A; Target 46839; HLA-B*38:01; MORC1; ENSG00000114487; CTA
HANSTTHSF

SEQ ID NO: 46840 - protein, 9 aa, Homo sapiens
  Table A; Target 46840; HLA-B*39:01; MORC1; ENSG00000114487; CTA
HANSTTHSF

SEQ ID NO: 46841 - protein, 9 aa, Homo sapiens
  Table A; Target 46841; HLA-B*46:01; MORC1; ENSG00000114487; CTA
HANSTTHSF

SEQ ID NO: 46842 - protein, 9 aa, Homo sapiens
  Table A; Target 46842; HLA-B*55:01; MORC1; ENSG00000114487; CTA
HANSTTHSF

SEQ ID NO: 46843 - protein, 9 aa, Homo sapiens
  Table A; Target 46843; HLA-B*57:01; MORC1; ENSG00000114487; CTA
HANSTTHSF

SEQ ID NO: 46844 - protein, 9 aa, Homo sapiens
  Table A; Target 46844; HLA-B*58:01; MORC1; ENSG00000114487; CTA
HANSTTHSF

SEQ ID NO: 46845 - protein, 9 aa, Homo sapiens
  Table A; Target 46845; HLA-C*01:02; MORC1; ENSG00000114487; CTA
HANSTTHSF

SEQ ID NO: 46846 - protein, 9 aa, Homo sapiens
  Table A; Target 46846; HLA-C*02:02; MORC1; ENSG00000114487; CTA
HANSTTHSF

SEQ ID NO: 46847 - protein, 9 aa, Homo sapiens
  Table A; Target 46847; HLA-C*03:03; MORC1; ENSG00000114487; CTA
HANSTTHSF

SEQ ID NO: 46848 - protein, 9 aa, Homo sapiens
  Table A; Target 46848; HLA-C*03:04; MORC1; ENSG00000114487; CTA
HANSTTHSF

SEQ ID NO: 46849 - protein, 9 aa, Homo sapiens
  Table A; Target 46849; HLA-C*05:01; MORC1; ENSG00000114487; CTA
HANSTTHSF

SEQ ID NO: 46850 - protein, 9 aa, Homo sapiens
  Table A; Target 46850; HLA-C*07:06; MORC1; ENSG00000114487; CTA
HANSTTHSF

SEQ ID NO: 46851 - protein, 9 aa, Homo sapiens
  Table A; Target 46851; HLA-C*12:03; MORC1; ENSG00000114487; CTA
HANSTTHSF

SEQ ID NO: 46852 - protein, 9 aa, Homo sapiens
  Table A; Target 46852; HLA-C*14:02; MORC1; ENSG00000114487; CTA
HANSTTHSF

SEQ ID NO: 46853 - protein, 9 aa, Homo sapiens
  Table A; Target 46853; HLA-C*16:01; MORC1; ENSG00000114487; CTA
HANSTTHSF

SEQ ID NO: 46854 - protein, 9 aa, Homo sapiens
  Table A; Target 46854; HLA-C*16:02; MORC1; ENSG00000114487; CTA
HANSTTHSF

SEQ ID NO: 46855 - protein, 9 aa, Homo sapiens
  Table A; Target 46855; HLA-C*16:04; MORC1; ENSG00000114487; CTA
HANSTTHSF

SEQ ID NO: 46856 - protein, 8 aa, Homo sapiens
  Table A; Target 46856; HLA-A*30:01; MORC1; ENSG00000114487; CTA
HEKVGSQL

SEQ ID NO: 46857 - protein, 8 aa, Homo sapiens
  Table A; Target 46857; HLA-B*08:01; MORC1; ENSG00000114487; CTA
HEKVGSQL

SEQ ID NO: 46858 - protein, 8 aa, Homo sapiens
  Table A; Target 46858; HLA-B*18:01; MORC1; ENSG00000114487; CTA
HEKVGSQL

SEQ ID NO: 46859 - protein, 8 aa, Homo sapiens
  Table A; Target 46859; HLA-B*37:01; MORC1; ENSG00000114487; CTA
HEKVGSQL

SEQ ID NO: 46860 - protein, 8 aa, Homo sapiens
  Table A; Target 46860; HLA-B*40:01; MORC1; ENSG00000114487; CTA
HEKVGSQL

SEQ ID NO: 46861 - protein, 8 aa, Homo sapiens
  Table A; Target 46861; HLA-B*40:02; MORC1; ENSG00000114487; CTA
HEKVGSQL

SEQ ID NO: 46862 - protein, 10 aa, Homo sapiens
  Table A; Target 46862; HLA-A*30:01; MORC1; ENSG00000114487; CTA
HEKVGSQLKL

SEQ ID NO: 46863 - protein, 9 aa, Homo sapiens
  Table A; Target 46863; HLA-A*30:01; MORC1; ENSG00000114487; CTA
HESLSSFEL

SEQ ID NO: 46864 - protein, 9 aa, Homo sapiens
  Table A; Target 46864; HLA-B*18:01; MORC1; ENSG00000114487; CTA
HESLSSFEL

SEQ ID NO: 46865 - protein, 9 aa, Homo sapiens
  Table A; Target 46865; HLA-B*37:01; MORC1; ENSG00000114487; CTA
HESLSSFEL

SEQ ID NO: 46866 - protein, 9 aa, Homo sapiens
  Table A; Target 46866; HLA-B*40:01; MORC1; ENSG00000114487; CTA
HESLSSFEL

SEQ ID NO: 46867 - protein, 9 aa, Homo sapiens
  Table A; Target 46867; HLA-B*40:02; MORC1; ENSG00000114487; CTA
HESLSSFEL

SEQ ID NO: 46868 - protein, 9 aa, Homo sapiens
  Table A; Target 46868; HLA-A*29:02; MORC1; ENSG00000114487; CTA
HLLKVMGQY

SEQ ID NO: 46869 - protein, 9 aa, Homo sapiens
  Table A; Target 46869; HLA-A*30:02; MORC1; ENSG00000114487; CTA
HLLKVMGQY

SEQ ID NO: 46870 - protein, 9 aa, Homo sapiens
  Table A; Target 46870; HLA-A*02:01; MORC1; ENSG00000114487; CTA
HQVECLPSI

SEQ ID NO: 46871 - protein, 9 aa, Homo sapiens
  Table A; Target 46871; HLA-B*13:02; MORC1; ENSG00000114487; CTA
HQVECLPSI

SEQ ID NO: 46872 - protein, 9 aa, Homo sapiens
  Table A; Target 46872; HLA-B*38:01; MORC1; ENSG00000114487; CTA
HQVECLPSI

SEQ ID NO: 46873 - protein, 9 aa, Homo sapiens
  Table A; Target 46873; HLA-B*51:01; MORC1; ENSG00000114487; CTA
HQVECLPSI

SEQ ID NO: 46874 - protein, 9 aa, Homo sapiens
  Table A; Target 46874; HLA-B*54:01; MORC1; ENSG00000114487; CTA
HSFLFGALA

SEQ ID NO: 46875 - protein, 9 aa, Homo sapiens
  Table A; Target 46875; HLA-B*54:01; MORC1; ENSG00000114487; CTA
IAESILKEA

SEQ ID NO: 46876 - protein, 8 aa, Homo sapiens
  Table A; Target 46876; HLA-A*23:01; MORC1; ENSG00000114487; CTA
IANITTVW

SEQ ID NO: 46877 - protein, 8 aa, Homo sapiens
  Table A; Target 46877; HLA-A*25:01; MORC1; ENSG00000114487; CTA
IANITTVW

SEQ ID NO: 46878 - protein, 8 aa, Homo sapiens
  Table A; Target 46878; HLA-A*32:01; MORC1; ENSG00000114487; CTA
IANITTVW

SEQ ID NO: 46879 - protein, 8 aa, Homo sapiens
  Table A; Target 46879; HLA-B*08:01; MORC1; ENSG00000114487; CTA
IANITTVW

SEQ ID NO: 46880 - protein, 8 aa, Homo sapiens
  Table A; Target 46880; HLA-B*46:01; MORC1; ENSG00000114487; CTA
IANITTVW

SEQ ID NO: 46881 - protein, 8 aa, Homo sapiens
  Table A; Target 46881; HLA-B*57:01; MORC1; ENSG00000114487; CTA
IANITTVW

SEQ ID NO: 46882 - protein, 8 aa, Homo sapiens
  Table A; Target 46882; HLA-B*58:01; MORC1; ENSG00000114487; CTA
IANITTVW

SEQ ID NO: 46883 - protein, 8 aa, Homo sapiens
  Table A; Target 46883; HLA-C*12:03; MORC1; ENSG00000114487; CTA
IANITTVW

SEQ ID NO: 46884 - protein, 8 aa, Homo sapiens
  Table A; Target 46884; HLA-C*16:01; MORC1; ENSG00000114487; CTA
IANITTVW

SEQ ID NO: 46885 - protein, 8 aa, Homo sapiens
  Table A; Target 46885; HLA-C*16:04; MORC1; ENSG00000114487; CTA
IANITTVW

SEQ ID NO: 46886 - protein, 9 aa, Homo sapiens
  Table A; Target 46886; HLA-A*31:01; MORC1; ENSG00000114487; CTA
IANITTVWR

SEQ ID NO: 46887 - protein, 9 aa, Homo sapiens
  Table A; Target 46887; HLA-A*33:01; MORC1; ENSG00000114487; CTA
IANITTVWR

SEQ ID NO: 46888 - protein, 9 aa, Homo sapiens
  Table A; Target 46888; HLA-C*16:02; MORC1; ENSG00000114487; CTA
ICANNPNRL

SEQ ID NO: 46889 - protein, 10 aa, Homo sapiens
  Table A; Target 46889; HLA-A*23:01; MORC1; ENSG00000114487; CTA
IDVEKPLNSF

SEQ ID NO: 46890 - protein, 10 aa, Homo sapiens
  Table A; Target 46890; HLA-A*30:01; MORC1; ENSG00000114487; CTA
IDVEKPLNSF

SEQ ID NO: 46891 - protein, 10 aa, Homo sapiens
  Table A; Target 46891; HLA-B*37:01; MORC1; ENSG00000114487; CTA
IDVEKPLNSF

SEQ ID NO: 46892 - protein, 10 aa, Homo sapiens
  Table A; Target 46892; HLA-B*44:03; MORC1; ENSG00000114487; CTA
IDVEKPLNSF

SEQ ID NO: 46893 - protein, 10 aa, Homo sapiens
  Table A; Target 46893; HLA-C*16:04; MORC1; ENSG00000114487; CTA
IDVEKPLNSF

SEQ ID NO: 46894 - protein, 8 aa, Homo sapiens
  Table A; Target 46894; HLA-C*01:02; MORC1; ENSG00000114487; CTA
IGQYGNGL

SEQ ID NO: 46895 - protein, 8 aa, Homo sapiens
  Table A; Target 46895; HLA-C*14:02; MORC1; ENSG00000114487; CTA
IGQYGNGL

SEQ ID NO: 46896 - protein, 9 aa, Homo sapiens
  Table A; Target 46896; HLA-A*03:02; MORC1; ENSG00000114487; CTA
IGQYGNGLK

SEQ ID NO: 46897 - protein, 9 aa, Homo sapiens
  Table A; Target 46897; HLA-A*11:01; MORC1; ENSG00000114487; CTA
IGQYGNGLK

SEQ ID NO: 46898 - protein, 11 aa, Homo sapiens
  Table A; Target 46898; HLA-C*04:01; MORC1; ENSG00000114487; CTA
IGQYGNGLKSG

SEQ ID NO: 46899 - protein, 10 aa, Homo sapiens
  Table A; Target 46899; HLA-B*38:01; MORC1; ENSG00000114487; CTA
IHANSTTHSF

SEQ ID NO: 46900 - protein, 11 aa, Homo sapiens
  Table A; Target 46900; HLA-B*38:01; MORC1; ENSG00000114487; CTA
IHANSTTHSFL

SEQ ID NO: 46901 - protein, 10 aa, Homo sapiens
  Table A; Target 46901; HLA-A*02:03; MORC1; ENSG00000114487; CTA
IIYDSNTRGI

SEQ ID NO: 46902 - protein, 10 aa, Homo sapiens
  Table A; Target 46902; HLA-A*25:01; MORC1; ENSG00000114487; CTA
IIYDSNTRGI

SEQ ID NO: 46903 - protein, 8 aa, Homo sapiens
  Table A; Target 46903; HLA-A*03:01; MORC1; ENSG00000114487; CTA
IIYFGRSK

SEQ ID NO: 46904 - protein, 9 aa, Homo sapiens
  Table A; Target 46904; HLA-A*03:01; MORC1; ENSG00000114487; CTA
IIYFGRSKK

SEQ ID NO: 46905 - protein, 9 aa, Homo sapiens
  Table A; Target 46905; HLA-A*03:01; MORC1; ENSG00000114487; CTA
IIYKYSPFK

SEQ ID NO: 46906 - protein, 9 aa, Homo sapiens
  Table A; Target 46906; HLA-A*02:01; MORC1; ENSG00000114487; CTA
ILKEAQIKV

SEQ ID NO: 46907 - protein, 9 aa, Homo sapiens
  Table A; Target 46907; HLA-A*02:03; MORC1; ENSG00000114487; CTA
ILKEAQIKV

SEQ ID NO: 46908 - protein, 9 aa, Homo sapiens
  Table A; Target 46908; HLA-A*02:07; MORC1; ENSG00000114487; CTA
ILKEAQIKV

SEQ ID NO: 46909 - protein, 9 aa, Homo sapiens
  Table A; Target 46909; HLA-B*55:01; MORC1; ENSG00000114487; CTA
ILKEAQIKV

SEQ ID NO: 46910 - protein, 10 aa, Homo sapiens
  Table A; Target 46910; HLA-B*15:01; MORC1; ENSG00000114487; CTA
ILMAGALEDF

SEQ ID NO: 46911 - protein, 9 aa, Homo sapiens
  Table A; Target 46911; HLA-A*23:01; MORC1; ENSG00000114487; CTA
INNRNLTLF

SEQ ID NO: 46912 - protein, 9 aa, Homo sapiens
  Table A; Target 46912; HLA-A*24:02; MORC1; ENSG00000114487; CTA
INNRNLTLF

SEQ ID NO: 46913 - protein, 9 aa, Homo sapiens
  Table A; Target 46913; HLA-B*35:01; MORC1; ENSG00000114487; CTA
IPFIIQCDL

SEQ ID NO: 46914 - protein, 9 aa, Homo sapiens
  Table A; Target 46914; HLA-B*35:03; MORC1; ENSG00000114487; CTA
IPFIIQCDL

SEQ ID NO: 46915 - protein, 8 aa, Homo sapiens
  Table A; Target 46915; HLA-B*54:01; MORC1; ENSG00000114487; CTA
IPLEVMEP

SEQ ID NO: 46916 - protein, 9 aa, Homo sapiens
  Table A; Target 46916; HLA-A*23:01; MORC1; ENSG00000114487; CTA
IPLGTMSTI

SEQ ID NO: 46917 - protein, 9 aa, Homo sapiens
  Table A; Target 46917; HLA-B*07:02; MORC1; ENSG00000114487; CTA
IPLGTMSTI

SEQ ID NO: 46918 - protein, 9 aa, Homo sapiens
  Table A; Target 46918; HLA-B*35:03; MORC1; ENSG00000114487; CTA
IPLGTMSTI

SEQ ID NO: 46919 - protein, 9 aa, Homo sapiens
  Table A; Target 46919; HLA-B*49:01; MORC1; ENSG00000114487; CTA
IPLGTMSTI

SEQ ID NO: 46920 - protein, 9 aa, Homo sapiens
  Table A; Target 46920; HLA-B*54:01; MORC1; ENSG00000114487; CTA
IPLGTMSTI

SEQ ID NO: 46921 - protein, 9 aa, Homo sapiens
  Table A; Target 46921; HLA-B*56:01; MORC1; ENSG00000114487; CTA
IPLGTMSTI

SEQ ID NO: 46922 - protein, 9 aa, Homo sapiens
  Table A; Target 46922; HLA-C*07:02; MORC1; ENSG00000114487; CTA
IPLGTMSTI

SEQ ID NO: 46923 - protein, 11 aa, Homo sapiens
  Table A; Target 46923; HLA-B*07:02; MORC1; ENSG00000114487; CTA
IPLLNQEKQEL

SEQ ID NO: 46924 - protein, 11 aa, Homo sapiens
  Table A; Target 46924; HLA-B*35:03; MORC1; ENSG00000114487; CTA
IPLLNQEKQEL

SEQ ID NO: 46925 - protein, 11 aa, Homo sapiens
  Table A; Target 46925; HLA-B*55:01; MORC1; ENSG00000114487; CTA
IPLLNQEKQEL

SEQ ID NO: 46926 - protein, 11 aa, Homo sapiens
  Table A; Target 46926; HLA-C*07:02; MORC1; ENSG00000114487; CTA
IPLLNQEKQEL

SEQ ID NO: 46927 - protein, 9 aa, Homo sapiens
  Table A; Target 46927; HLA-B*35:01; MORC1; ENSG00000114487; CTA
IPVALPENV

SEQ ID NO: 46928 - protein, 9 aa, Homo sapiens
  Table A; Target 46928; HLA-B*35:03; MORC1; ENSG00000114487; CTA
IPVALPENV

SEQ ID NO: 46929 - protein, 9 aa, Homo sapiens
  Table A; Target 46929; HLA-B*51:01; MORC1; ENSG00000114487; CTA
IPVALPENV

SEQ ID NO: 46930 - protein, 9 aa, Homo sapiens
  Table A; Target 46930; HLA-B*54:01; MORC1; ENSG00000114487; CTA
IPVALPENV

SEQ ID NO: 46931 - protein, 9 aa, Homo sapiens
  Table A; Target 46931; HLA-B*56:01; MORC1; ENSG00000114487; CTA
IPVALPENV

SEQ ID NO: 46932 - protein, 11 aa, Homo sapiens
  Table A; Target 46932; HLA-A*23:01; MORC1; ENSG00000114487; CTA
IPVALPENVKL

SEQ ID NO: 46933 - protein, 11 aa, Homo sapiens
  Table A; Target 46933; HLA-B*35:01; MORC1; ENSG00000114487; CTA
IPVALPENVKL

SEQ ID NO: 46934 - protein, 11 aa, Homo sapiens
  Table A; Target 46934; HLA-B*35:03; MORC1; ENSG00000114487; CTA
IPVALPENVKL

SEQ ID NO: 46935 - protein, 11 aa, Homo sapiens
  Table A; Target 46935; HLA-B*55:01; MORC1; ENSG00000114487; CTA
IPVALPENVKL

SEQ ID NO: 46936 - protein, 8 aa, Homo sapiens
  Table A; Target 46936; HLA-B*51:01; MORC1; ENSG00000114487; CTA
IPVDEITV

SEQ ID NO: 46937 - protein, 8 aa, Homo sapiens
  Table A; Target 46937; HLA-B*56:01; MORC1; ENSG00000114487; CTA
IPVDEITV

SEQ ID NO: 46938 - protein, 9 aa, Homo sapiens
  Table A; Target 46938; HLA-B*35:01; MORC1; ENSG00000114487; CTA
IPVDEITVT

SEQ ID NO: 46939 - protein, 9 aa, Homo sapiens
  Table A; Target 46939; HLA-B*35:03; MORC1; ENSG00000114487; CTA
IPVDEITVT

SEQ ID NO: 46940 - protein, 9 aa, Homo sapiens
  Table A; Target 46940; HLA-B*55:01; MORC1; ENSG00000114487; CTA
IPVDEITVT

SEQ ID NO: 46941 - protein, 9 aa, Homo sapiens
  Table A; Target 46941; HLA-B*56:01; MORC1; ENSG00000114487; CTA
IPVDEITVT

SEQ ID NO: 46942 - protein, 10 aa, Homo sapiens
  Table A; Target 46942; HLA-B*56:01; MORC1; ENSG00000114487; CTA
IPVDEITVTS

SEQ ID NO: 46943 - protein, 11 aa, Homo sapiens
  Table A; Target 46943; HLA-B*35:01; MORC1; ENSG00000114487; CTA
IPVDEITVTST

SEQ ID NO: 46944 - protein, 11 aa, Homo sapiens
  Table A; Target 46944; HLA-B*54:01; MORC1; ENSG00000114487; CTA
IPVDEITVTST

SEQ ID NO: 46945 - protein, 11 aa, Homo sapiens
  Table A; Target 46945; HLA-B*55:01; MORC1; ENSG00000114487; CTA
IPVDEITVTST

SEQ ID NO: 46946 - protein, 11 aa, Homo sapiens
  Table A; Target 46946; HLA-B*56:01; MORC1; ENSG00000114487; CTA
IPVDEITVTST

SEQ ID NO: 46947 - protein, 9 aa, Homo sapiens
  Table A; Target 46947; HLA-A*03:01; MORC1; ENSG00000114487; CTA
IQNTYMVQY

SEQ ID NO: 46948 - protein, 9 aa, Homo sapiens
  Table A; Target 46948; HLA-A*03:02; MORC1; ENSG00000114487; CTA
IQNTYMVQY

SEQ ID NO: 46949 - protein, 9 aa, Homo sapiens
  Table A; Target 46949; HLA-A*23:01; MORC1; ENSG00000114487; CTA
IQNTYMVQY

SEQ ID NO: 46950 - protein, 9 aa, Homo sapiens
  Table A; Target 46950; HLA-A*26:01; MORC1; ENSG00000114487; CTA
IQNTYMVQY

SEQ ID NO: 46951 - protein, 9 aa, Homo sapiens
  Table A; Target 46951; HLA-A*29:02; MORC1; ENSG00000114487; CTA
IQNTYMVQY

SEQ ID NO: 46952 - protein, 9 aa, Homo sapiens
  Table A; Target 46952; HLA-A*30:02; MORC1; ENSG00000114487; CTA
IQNTYMVQY

SEQ ID NO: 46953 - protein, 9 aa, Homo sapiens
  Table A; Target 46953; HLA-A*32:01; MORC1; ENSG00000114487; CTA
IQNTYMVQY

SEQ ID NO: 46954 - protein, 9 aa, Homo sapiens
  Table A; Target 46954; HLA-B*15:01; MORC1; ENSG00000114487; CTA
IQNTYMVQY

SEQ ID NO: 46955 - protein, 9 aa, Homo sapiens
  Table A; Target 46955; HLA-B*15:03; MORC1; ENSG00000114487; CTA
IQNTYMVQY

SEQ ID NO: 46956 - protein, 9 aa, Homo sapiens
  Table A; Target 46956; HLA-B*18:01; MORC1; ENSG00000114487; CTA
IQNTYMVQY

SEQ ID NO: 46957 - protein, 9 aa, Homo sapiens
  Table A; Target 46957; HLA-B*27:02; MORC1; ENSG00000114487; CTA
IQNTYMVQY

SEQ ID NO: 46958 - protein, 9 aa, Homo sapiens
  Table A; Target 46958; HLA-B*46:01; MORC1; ENSG00000114487; CTA
IQNTYMVQY

SEQ ID NO: 46959 - protein, 9 aa, Homo sapiens
  Table A; Target 46959; HLA-C*02:02; MORC1; ENSG00000114487; CTA
IQNTYMVQY

SEQ ID NO: 46960 - protein, 9 aa, Homo sapiens
  Table A; Target 46960; HLA-C*07:04; MORC1; ENSG00000114487; CTA
IQNTYMVQY

SEQ ID NO: 46961 - protein, 9 aa, Homo sapiens
  Table A; Target 46961; HLA-C*12:03; MORC1; ENSG00000114487; CTA
IQNTYMVQY

SEQ ID NO: 46962 - protein, 9 aa, Homo sapiens
  Table A; Target 46962; HLA-C*14:02; MORC1; ENSG00000114487; CTA
IQNTYMVQY

SEQ ID NO: 46963 - protein, 9 aa, Homo sapiens
  Table A; Target 46963; HLA-C*16:02; MORC1; ENSG00000114487; CTA
IQNTYMVQY

SEQ ID NO: 46964 - protein, 9 aa, Homo sapiens
  Table A; Target 46964; HLA-C*16:04; MORC1; ENSG00000114487; CTA
IQNTYMVQY

SEQ ID NO: 46965 - protein, 9 aa, Homo sapiens
  Table A; Target 46965; HLA-C*05:01; MORC1; ENSG00000114487; CTA
ISEDKLKNL

SEQ ID NO: 46966 - protein, 9 aa, Homo sapiens
  Table A; Target 46966; HLA-C*16:02; MORC1; ENSG00000114487; CTA
ISEDKLKNL

SEQ ID NO: 46967 - protein, 9 aa, Homo sapiens
  Table A; Target 46967; HLA-A*01:01; MORC1; ENSG00000114487; CTA
ISETKIMKK

SEQ ID NO: 46968 - protein, 9 aa, Homo sapiens
  Table A; Target 46968; HLA-A*11:01; MORC1; ENSG00000114487; CTA
ISETKIMKK

SEQ ID NO: 46969 - protein, 8 aa, Homo sapiens
  Table A; Target 46969; HLA-C*03:03; MORC1; ENSG00000114487; CTA
ITVTSTCL

SEQ ID NO: 46970 - protein, 8 aa, Homo sapiens
  Table A; Target 46970; HLA-C*03:04; MORC1; ENSG00000114487; CTA
ITVTSTCL

SEQ ID NO: 46971 - protein, 8 aa, Homo sapiens
  Table A; Target 46971; HLA-B*13:02; MORC1; ENSG00000114487; CTA
IVNIPLEV

SEQ ID NO: 46972 - protein, 9 aa, Homo sapiens
  Table A; Target 46972; HLA-B*15:01; MORC1; ENSG00000114487; CTA
IVNIPLEVM

SEQ ID NO: 46973 - protein, 9 aa, Homo sapiens
  Table A; Target 46973; HLA-B*35:01; MORC1; ENSG00000114487; CTA
IVNIPLEVM

SEQ ID NO: 46974 - protein, 9 aa, Homo sapiens
  Table A; Target 46974; HLA-B*46:01; MORC1; ENSG00000114487; CTA
IVNIPLEVM

SEQ ID NO: 46975 - protein, 9 aa, Homo sapiens
  Table A; Target 46975; HLA-C*05:01; MORC1; ENSG00000114487; CTA
IVNIPLEVM

SEQ ID NO: 46976 - protein, 9 aa, Homo sapiens
  Table A; Target 46976; HLA-C*07:04; MORC1; ENSG00000114487; CTA
IVNIPLEVM

SEQ ID NO: 46977 - protein, 9 aa, Homo sapiens
  Table A; Target 46977; HLA-A*23:01; MORC1; ENSG00000114487; CTA
IYDSNTRGI

SEQ ID NO: 46978 - protein, 9 aa, Homo sapiens
  Table A; Target 46978; HLA-A*24:02; MORC1; ENSG00000114487; CTA
IYDSNTRGI

SEQ ID NO: 46979 - protein, 9 aa, Homo sapiens
  Table A; Target 46979; HLA-B*35:03; MORC1; ENSG00000114487; CTA
IYDSNTRGI

SEQ ID NO: 46980 - protein, 9 aa, Homo sapiens
  Table A; Target 46980; HLA-C*04:01; MORC1; ENSG00000114487; CTA
IYDSNTRGI

SEQ ID NO: 46981 - protein, 9 aa, Homo sapiens
  Table A; Target 46981; HLA-C*14:02; MORC1; ENSG00000114487; CTA
IYDSNTRGI

SEQ ID NO: 46982 - protein, 9 aa, Homo sapiens
  Table A; Target 46982; HLA-C*16:02; MORC1; ENSG00000114487; CTA
IYDSNTRGI

SEQ ID NO: 46983 - protein, 9 aa, Homo sapiens
  Table A; Target 46983; HLA-A*23:01; MORC1; ENSG00000114487; CTA
IYGKCGTLL

SEQ ID NO: 46984 - protein, 9 aa, Homo sapiens
  Table A; Target 46984; HLA-A*24:02; MORC1; ENSG00000114487; CTA
IYGKCGTLL

SEQ ID NO: 46985 - protein, 8 aa, Homo sapiens
  Table A; Target 46985; HLA-A*23:01; MORC1; ENSG00000114487; CTA
IYNLKLLL

SEQ ID NO: 46986 - protein, 10 aa, Homo sapiens
  Table A; Target 46986; HLA-A*24:02; MORC1; ENSG00000114487; CTA
IYSNNRLIKM

SEQ ID NO: 46987 - protein, 8 aa, Homo sapiens
  Table A; Target 46987; HLA-C*05:01; MORC1; ENSG00000114487; CTA
KAEEAVKI

SEQ ID NO: 46988 - protein, 8 aa, Homo sapiens
  Table A; Target 46988; HLA-B*37:01; MORC1; ENSG00000114487; CTA
KDVLQRAL

SEQ ID NO: 46989 - protein, 10 aa, Homo sapiens
  Table A; Target 46989; HLA-B*40:01; MORC1; ENSG00000114487; CTA
KEDILMAGAL

SEQ ID NO: 46990 - protein, 11 aa, Homo sapiens
  Table A; Target 46990; HLA-A*30:01; MORC1; ENSG00000114487; CTA
KEDNLLFQNNL

SEQ ID NO: 46991 - protein, 11 aa, Homo sapiens
  Table A; Target 46991; HLA-B*40:01; MORC1; ENSG00000114487; CTA
KEDNLLFQNNL

SEQ ID NO: 46992 - protein, 8 aa, Homo sapiens
  Table A; Target 46992; HLA-B*49:01; MORC1; ENSG00000114487; CTA
KEETMTCV

SEQ ID NO: 46993 - protein, 9 aa, Homo sapiens
  Table A; Target 46993; HLA-B*18:01; MORC1; ENSG00000114487; CTA
KEETMTCVF

SEQ ID NO: 46994 - protein, 9 aa, Homo sapiens
  Table A; Target 46994; HLA-B*37:01; MORC1; ENSG00000114487; CTA
KEETMTCVF

SEQ ID NO: 46995 - protein, 9 aa, Homo sapiens
  Table A; Target 46995; HLA-B*40:01; MORC1; ENSG00000114487; CTA
KEETMTCVF

SEQ ID NO: 46996 - protein, 10 aa, Homo sapiens
  Table A; Target 46996; HLA-B*44:02; MORC1; ENSG00000114487; CTA
KEIPLLNQEK

SEQ ID NO: 46997 - protein, 10 aa, Homo sapiens
  Table A; Target 46997; HLA-B*44:03; MORC1; ENSG00000114487; CTA
KEIPLLNQEK

SEQ ID NO: 46998 - protein, 9 aa, Homo sapiens
  Table A; Target 46998; HLA-B*44:02; MORC1; ENSG00000114487; CTA
KENTKTQKI

SEQ ID NO: 46999 - protein, 9 aa, Homo sapiens
  Table A; Target 46999; HLA-B*44:03; MORC1; ENSG00000114487; CTA
KENTKTQKI

SEQ ID NO: 47000 - protein, 9 aa, Homo sapiens
  Table A; Target 47000; HLA-B*49:01; MORC1; ENSG00000114487; CTA
KENTKTQKI

SEQ ID NO: 47001 - protein, 10 aa, Homo sapiens
  Table A; Target 47001; HLA-B*38:01; MORC1; ENSG00000114487; CTA
KHESLSSFEL

SEQ ID NO: 47002 - protein, 8 aa, Homo sapiens
  Table A; Target 47002; HLA-A*03:01; MORC1; ENSG00000114487; CTA
KIAESILK

SEQ ID NO: 47003 - protein, 8 aa, Homo sapiens
  Table A; Target 47003; HLA-A*03:02; MORC1; ENSG00000114487; CTA
KIAESILK

SEQ ID NO: 47004 - protein, 10 aa, Homo sapiens
  Table A; Target 47004; HLA-A*02:01; MORC1; ENSG00000114487; CTA
KIAESILKEA

SEQ ID NO: 47005 - protein, 10 aa, Homo sapiens
  Table A; Target 47005; HLA-A*02:03; MORC1; ENSG00000114487; CTA
KIAESILKEA

SEQ ID NO: 47006 - protein, 9 aa, Homo sapiens
  Table A; Target 47006; HLA-A*02:03; MORC1; ENSG00000114487; CTA
KLALLLQKL

SEQ ID NO: 47007 - protein, 9 aa, Homo sapiens
  Table A; Target 47007; HLA-A*02:04; MORC1; ENSG00000114487; CTA
KLALLLQKL

SEQ ID NO: 47008 - protein, 10 aa, Homo sapiens
  Table A; Target 47008; HLA-A*02:03; MORC1; ENSG00000114487; CTA
KLKSLLGAGV

SEQ ID NO: 47009 - protein, 10 aa, Homo sapiens
  Table A; Target 47009; HLA-A*02:01; MORC1; ENSG00000114487; CTA
KLLLNGEPEL

SEQ ID NO: 47010 - protein, 10 aa, Homo sapiens
  Table A; Target 47010; HLA-A*02:04; MORC1; ENSG00000114487; CTA
KLLLNGEPEL

SEQ ID NO: 47011 - protein, 9 aa, Homo sapiens
  Table A; Target 47011; HLA-B*57:01; MORC1; ENSG00000114487; CTA
KLREILLYF

SEQ ID NO: 47012 - protein, 9 aa, Homo sapiens
  Table A; Target 47012; HLA-B*13:02; MORC1; ENSG00000114487; CTA
KMNSQQQRI

SEQ ID NO: 47013 - protein, 8 aa, Homo sapiens
  Table A; Target 47013; HLA-B*35:01; MORC1; ENSG00000114487; CTA
KPLNSFQY

SEQ ID NO: 47014 - protein, 10 aa, Homo sapiens
  Table A; Target 47014; HLA-A*01:01; MORC1; ENSG00000114487; CTA
KQEFLNVQEY

SEQ ID NO: 47015 - protein, 10 aa, Homo sapiens
  Table A; Target 47015; HLA-A*30:02; MORC1; ENSG00000114487; CTA
KQEFLNVQEY

SEQ ID NO: 47016 - protein, 10 aa, Homo sapiens
  Table A; Target 47016; HLA-B*15:01; MORC1; ENSG00000114487; CTA
KQEFLNVQEY

SEQ ID NO: 47017 - protein, 10 aa, Homo sapiens
  Table A; Target 47017; HLA-C*07:01; MORC1; ENSG00000114487; CTA
KQEFLNVQEY

SEQ ID NO: 47018 - protein, 10 aa, Homo sapiens
  Table A; Target 47018; HLA-C*07:04; MORC1; ENSG00000114487; CTA
KQEFLNVQEY

SEQ ID NO: 47019 - protein, 10 aa, Homo sapiens
  Table A; Target 47019; HLA-C*16:04; MORC1; ENSG00000114487; CTA
KQEFLNVQEY

SEQ ID NO: 47020 - protein, 10 aa, Homo sapiens
  Table A; Target 47020; HLA-A*30:02; MORC1; ENSG00000114487; CTA
KQLRESVIKY

SEQ ID NO: 47021 - protein, 10 aa, Homo sapiens
  Table A; Target 47021; HLA-B*15:01; MORC1; ENSG00000114487; CTA
KQLRESVIKY

SEQ ID NO: 47022 - protein, 10 aa, Homo sapiens
  Table A; Target 47022; HLA-B*15:03; MORC1; ENSG00000114487; CTA
KQLRESVIKY

SEQ ID NO: 47023 - protein, 9 aa, Homo sapiens
  Table A; Target 47023; HLA-A*31:01; MORC1; ENSG00000114487; CTA
KQRELKTAR

SEQ ID NO: 47024 - protein, 9 aa, Homo sapiens
  Table A; Target 47024; HLA-A*03:01; MORC1; ENSG00000114487; CTA
KSNTDVSLK

SEQ ID NO: 47025 - protein, 9 aa, Homo sapiens
  Table A; Target 47025; HLA-A*03:02; MORC1; ENSG00000114487; CTA
KSNTDVSLK

SEQ ID NO: 47026 - protein, 9 aa, Homo sapiens
  Table A; Target 47026; HLA-A*11:01; MORC1; ENSG00000114487; CTA
KSNTDVSLK

SEQ ID NO: 47027 - protein, 9 aa, Homo sapiens
  Table A; Target 47027; HLA-A*31:01; MORC1; ENSG00000114487; CTA
KSNTDVSLK

SEQ ID NO: 47028 - protein, 9 aa, Homo sapiens
  Table A; Target 47028; HLA-B*57:01; MORC1; ENSG00000114487; CTA
KTARTLSLF

SEQ ID NO: 47029 - protein, 10 aa, Homo sapiens
  Table A; Target 47029; HLA-A*01:01; MORC1; ENSG00000114487; CTA
KTARTLSLFY

SEQ ID NO: 47030 - protein, 10 aa, Homo sapiens
  Table A; Target 47030; HLA-A*29:02; MORC1; ENSG00000114487; CTA
KTARTLSLFY

SEQ ID NO: 47031 - protein, 10 aa, Homo sapiens
  Table A; Target 47031; HLA-B*57:01; MORC1; ENSG00000114487; CTA
KTARTLSLFY

SEQ ID NO: 47032 - protein, 9 aa, Homo sapiens
  Table A; Target 47032; HLA-A*01:01; MORC1; ENSG00000114487; CTA
KTDKEDILM

SEQ ID NO: 47033 - protein, 9 aa, Homo sapiens
  Table A; Target 47033; HLA-C*05:01; MORC1; ENSG00000114487; CTA
KTDKEDILM

SEQ ID NO: 47034 - protein, 10 aa, Homo sapiens
  Table A; Target 47034; HLA-B*58:01; MORC1; ENSG00000114487; CTA
KTEAELMQQF

SEQ ID NO: 47035 - protein, 9 aa, Homo sapiens
  Table A; Target 47035; HLA-A*03:01; MORC1; ENSG00000114487; CTA
KVGSQLKLK

SEQ ID NO: 47036 - protein, 9 aa, Homo sapiens
  Table A; Target 47036; HLA-A*03:02; MORC1; ENSG00000114487; CTA
KVGSQLKLK

SEQ ID NO: 47037 - protein, 9 aa, Homo sapiens
  Table A; Target 47037; HLA-A*11:01; MORC1; ENSG00000114487; CTA
KVGSQLKLK

SEQ ID NO: 47038 - protein, 10 aa, Homo sapiens
  Table A; Target 47038; HLA-A*03:01; MORC1; ENSG00000114487; CTA
KVMGQYLVQY

SEQ ID NO: 47039 - protein, 10 aa, Homo sapiens
  Table A; Target 47039; HLA-A*03:02; MORC1; ENSG00000114487; CTA
KVMGQYLVQY

SEQ ID NO: 47040 - protein, 10 aa, Homo sapiens
  Table A; Target 47040; HLA-A*11:01; MORC1; ENSG00000114487; CTA
KVMGQYLVQY

SEQ ID NO: 47041 - protein, 10 aa, Homo sapiens
  Table A; Target 47041; HLA-A*25:01; MORC1; ENSG00000114487; CTA
KVMGQYLVQY

SEQ ID NO: 47042 - protein, 10 aa, Homo sapiens
  Table A; Target 47042; HLA-A*26:01; MORC1; ENSG00000114487; CTA
KVMGQYLVQY

SEQ ID NO: 47043 - protein, 10 aa, Homo sapiens
  Table A; Target 47043; HLA-A*29:02; MORC1; ENSG00000114487; CTA
KVMGQYLVQY

SEQ ID NO: 47044 - protein, 10 aa, Homo sapiens
  Table A; Target 47044; HLA-A*30:02; MORC1; ENSG00000114487; CTA
KVMGQYLVQY

SEQ ID NO: 47045 - protein, 10 aa, Homo sapiens
  Table A; Target 47045; HLA-A*31:01; MORC1; ENSG00000114487; CTA
KVMGQYLVQY

SEQ ID NO: 47046 - protein, 10 aa, Homo sapiens
  Table A; Target 47046; HLA-A*32:01; MORC1; ENSG00000114487; CTA
KVMGQYLVQY

SEQ ID NO: 47047 - protein, 10 aa, Homo sapiens
  Table A; Target 47047; HLA-B*15:01; MORC1; ENSG00000114487; CTA
KVMGQYLVQY

SEQ ID NO: 47048 - protein, 10 aa, Homo sapiens
  Table A; Target 47048; HLA-B*46:01; MORC1; ENSG00000114487; CTA
KVMGQYLVQY

SEQ ID NO: 47049 - protein, 10 aa, Homo sapiens
  Table A; Target 47049; HLA-B*57:01; MORC1; ENSG00000114487; CTA
KVMGQYLVQY

SEQ ID NO: 47050 - protein, 10 aa, Homo sapiens
  Table A; Target 47050; HLA-B*58:01; MORC1; ENSG00000114487; CTA
KVMGQYLVQY

SEQ ID NO: 47051 - protein, 10 aa, Homo sapiens
  Table A; Target 47051; HLA-C*02:02; MORC1; ENSG00000114487; CTA
KVMGQYLVQY

SEQ ID NO: 47052 - protein, 10 aa, Homo sapiens
  Table A; Target 47052; HLA-C*07:04; MORC1; ENSG00000114487; CTA
KVMGQYLVQY

SEQ ID NO: 47053 - protein, 10 aa, Homo sapiens
  Table A; Target 47053; HLA-C*16:04; MORC1; ENSG00000114487; CTA
KVMGQYLVQY

SEQ ID NO: 47054 - protein, 9 aa, Homo sapiens
  Table A; Target 47054; HLA-A*23:01; MORC1; ENSG00000114487; CTA
KYLYVTSSF

SEQ ID NO: 47055 - protein, 9 aa, Homo sapiens
  Table A; Target 47055; HLA-A*24:02; MORC1; ENSG00000114487; CTA
KYLYVTSSF

SEQ ID NO: 47056 - protein, 9 aa, Homo sapiens
  Table A; Target 47056; HLA-A*32:01; MORC1; ENSG00000114487; CTA
KYLYVTSSF

SEQ ID NO: 47057 - protein, 9 aa, Homo sapiens
  Table A; Target 47057; HLA-C*14:02; MORC1; ENSG00000114487; CTA
KYLYVTSSF

SEQ ID NO: 47058 - protein, 10 aa, Homo sapiens
  Table A; Target 47058; HLA-C*05:01; MORC1; ENSG00000114487; CTA
LAEQQPQPQF

SEQ ID NO: 47059 - protein, 8 aa, Homo sapiens
  Table A; Target 47059; HLA-B*51:01; MORC1; ENSG00000114487; CTA
LALLLQKL

SEQ ID NO: 47060 - protein, 9 aa, Homo sapiens
  Table A; Target 47060; HLA-B*07:02; MORC1; ENSG00000114487; CTA
LAMKRSSSL

SEQ ID NO: 47061 - protein, 9 aa, Homo sapiens
  Table A; Target 47061; HLA-B*08:01; MORC1; ENSG00000114487; CTA
LAMKRSSSL

SEQ ID NO: 47062 - protein, 9 aa, Homo sapiens
  Table A; Target 47062; HLA-C*03:03; MORC1; ENSG00000114487; CTA
LAMKRSSSL

SEQ ID NO: 47063 - protein, 9 aa, Homo sapiens
  Table A; Target 47063; HLA-C*03:04; MORC1; ENSG00000114487; CTA
LAMKRSSSL

SEQ ID NO: 47064 - protein, 10 aa, Homo sapiens
  Table A; Target 47064; HLA-A*33:01; MORC1; ENSG00000114487; CTA
LCNDVLAMKR

SEQ ID NO: 47065 - protein, 10 aa, Homo sapiens
  Table A; Target 47065; HLA-B*27:02; MORC1; ENSG00000114487; CTA
LDVFSVDNEK

SEQ ID NO: 47066 - protein, 10 aa, Homo sapiens
  Table A; Target 47066; HLA-B*40:01; MORC1; ENSG00000114487; CTA
LEALLKEDNL

SEQ ID NO: 47067 - protein, 8 aa, Homo sapiens
  Table A; Target 47067; HLA-B*44:02; MORC1; ENSG00000114487; CTA
LEDFPARW

SEQ ID NO: 47068 - protein, 8 aa, Homo sapiens
  Table A; Target 47068; HLA-B*44:03; MORC1; ENSG00000114487; CTA
LEDFPARW

SEQ ID NO: 47069 - protein, 10 aa, Homo sapiens
  Table A; Target 47069; HLA-B*40:01; MORC1; ENSG00000114487; CTA
LEEPALSCEL

SEQ ID NO: 47070 - protein, 11 aa, Homo sapiens
  Table A; Target 47070; HLA-B*40:01; MORC1; ENSG00000114487; CTA
LEQTDTYLEAL

SEQ ID NO: 47071 - protein, 9 aa, Homo sapiens
  Table A; Target 47071; HLA-C*12:03; MORC1; ENSG00000114487; CTA
LGAGVVGIV

SEQ ID NO: 47072 - protein, 9 aa, Homo sapiens
  Table A; Target 47072; HLA-B*15:03; MORC1; ENSG00000114487; CTA
LKHESLSSF

SEQ ID NO: 47073 - protein, 9 aa, Homo sapiens
  Table A; Target 47073; HLA-A*03:01; MORC1; ENSG00000114487; CTA
LLFQNNLNK

SEQ ID NO: 47074 - protein, 10 aa, Homo sapiens
  Table A; Target 47074; HLA-A*02:03; MORC1; ENSG00000114487; CTA
LLFQNNLNKV

SEQ ID NO: 47075 - protein, 10 aa, Homo sapiens
  Table A; Target 47075; HLA-A*02:04; MORC1; ENSG00000114487; CTA
LLFQNNLNKV

SEQ ID NO: 47076 - protein, 9 aa, Homo sapiens
  Table A; Target 47076; HLA-A*02:01; MORC1; ENSG00000114487; CTA
LLGAGVVGI

SEQ ID NO: 47077 - protein, 9 aa, Homo sapiens
  Table A; Target 47077; HLA-A*02:03; MORC1; ENSG00000114487; CTA
LLGAGVVGI

SEQ ID NO: 47078 - protein, 9 aa, Homo sapiens
  Table A; Target 47078; HLA-A*02:04; MORC1; ENSG00000114487; CTA
LLGAGVVGI

SEQ ID NO: 47079 - protein, 9 aa, Homo sapiens
  Table A; Target 47079; HLA-A*01:01; MORC1; ENSG00000114487; CTA
LLKEDNLLF

SEQ ID NO: 47080 - protein, 9 aa, Homo sapiens
  Table A; Target 47080; HLA-A*23:01; MORC1; ENSG00000114487; CTA
LLKEDNLLF

SEQ ID NO: 47081 - protein, 9 aa, Homo sapiens
  Table A; Target 47081; HLA-A*24:02; MORC1; ENSG00000114487; CTA
LLKEDNLLF

SEQ ID NO: 47082 - protein, 9 aa, Homo sapiens
  Table A; Target 47082; HLA-A*29:02; MORC1; ENSG00000114487; CTA
LLKEDNLLF

SEQ ID NO: 47083 - protein, 9 aa, Homo sapiens
  Table A; Target 47083; HLA-A*02:03; MORC1; ENSG00000114487; CTA
LLKVMGQYL

SEQ ID NO: 47084 - protein, 9 aa, Homo sapiens
  Table A; Target 47084; HLA-A*02:01; MORC1; ENSG00000114487; CTA
LLLNGEPEL

SEQ ID NO: 47085 - protein, 9 aa, Homo sapiens
  Table A; Target 47085; HLA-A*02:04; MORC1; ENSG00000114487; CTA
LLLNGEPEL

SEQ ID NO: 47086 - protein, 9 aa, Homo sapiens
  Table A; Target 47086; HLA-B*55:01; MORC1; ENSG00000114487; CTA
LLLNGEPEL

SEQ ID NO: 47087 - protein, 9 aa, Homo sapiens
  Table A; Target 47087; HLA-C*03:04; MORC1; ENSG00000114487; CTA
LLLNGEPEL

SEQ ID NO: 47088 - protein, 9 aa, Homo sapiens
  Table A; Target 47088; HLA-B*08:01; MORC1; ENSG00000114487; CTA
LLNQEKQEL

SEQ ID NO: 47089 - protein, 10 aa, Homo sapiens
  Table A; Target 47089; HLA-A*02:01; MORC1; ENSG00000114487; CTA
LLYFFPEHQL

SEQ ID NO: 47090 - protein, 10 aa, Homo sapiens
  Table A; Target 47090; HLA-A*02:04; MORC1; ENSG00000114487; CTA
LLYFFPEHQL

SEQ ID NO: 47091 - protein, 9 aa, Homo sapiens
  Table A; Target 47091; HLA-B*46:01; MORC1; ENSG00000114487; CTA
LMAGALEDF

SEQ ID NO: 47092 - protein, 9 aa, Homo sapiens
  Table A; Target 47092; HLA-A*33:01; MORC1; ENSG00000114487; CTA
LNKVTIDAR

SEQ ID NO: 47093 - protein, 9 aa, Homo sapiens
  Table A; Target 47093; HLA-A*33:03; MORC1; ENSG00000114487; CTA
LNKVTIDAR

SEQ ID NO: 47094 - protein, 8 aa, Homo sapiens
  Table A; Target 47094; HLA-B*08:01; MORC1; ENSG00000114487; CTA
LNQEKQEL

SEQ ID NO: 47095 - protein, 10 aa, Homo sapiens
  Table A; Target 47095; HLA-B*35:01; MORC1; ENSG00000114487; CTA
LPSELEEPAL

SEQ ID NO: 47096 - protein, 10 aa, Homo sapiens
  Table A; Target 47096; HLA-B*35:03; MORC1; ENSG00000114487; CTA
LPSELEEPAL

SEQ ID NO: 47097 - protein, 10 aa, Homo sapiens
  Table A; Target 47097; HLA-B*55:01; MORC1; ENSG00000114487; CTA
LPSELEEPAL

SEQ ID NO: 47098 - protein, 10 aa, Homo sapiens
  Table A; Target 47098; HLA-B*56:01; MORC1; ENSG00000114487; CTA
LPSELEEPAL

SEQ ID NO: 47099 - protein, 10 aa, Homo sapiens
  Table A; Target 47099; HLA-C*03:03; MORC1; ENSG00000114487; CTA
LPSELEEPAL

SEQ ID NO: 47100 - protein, 9 aa, Homo sapiens
  Table A; Target 47100; HLA-B*07:02; MORC1; ENSG00000114487; CTA
LPSIPLGTM

SEQ ID NO: 47101 - protein, 9 aa, Homo sapiens
  Table A; Target 47101; HLA-B*35:01; MORC1; ENSG00000114487; CTA
LPSIPLGTM

SEQ ID NO: 47102 - protein, 9 aa, Homo sapiens
  Table A; Target 47102; HLA-B*35:03; MORC1; ENSG00000114487; CTA
LPSIPLGTM

SEQ ID NO: 47103 - protein, 9 aa, Homo sapiens
  Table A; Target 47103; HLA-B*51:01; MORC1; ENSG00000114487; CTA
LPSIPLGTM

SEQ ID NO: 47104 - protein, 9 aa, Homo sapiens
  Table A; Target 47104; HLA-B*54:01; MORC1; ENSG00000114487; CTA
LPSIPLGTM

SEQ ID NO: 47105 - protein, 9 aa, Homo sapiens
  Table A; Target 47105; HLA-B*55:01; MORC1; ENSG00000114487; CTA
LPSIPLGTM

SEQ ID NO: 47106 - protein, 9 aa, Homo sapiens
  Table A; Target 47106; HLA-B*56:01; MORC1; ENSG00000114487; CTA
LPSIPLGTM

SEQ ID NO: 47107 - protein, 9 aa, Homo sapiens
  Table A; Target 47107; HLA-C*03:03; MORC1; ENSG00000114487; CTA
LPSIPLGTM

SEQ ID NO: 47108 - protein, 9 aa, Homo sapiens
  Table A; Target 47108; HLA-C*07:02; MORC1; ENSG00000114487; CTA
LPSIPLGTM

SEQ ID NO: 47109 - protein, 8 aa, Homo sapiens
  Table A; Target 47109; HLA-C*16:01; MORC1; ENSG00000114487; CTA
LSSAKDVL

SEQ ID NO: 47110 - protein, 10 aa, Homo sapiens
  Table A; Target 47110; HLA-B*27:02; MORC1; ENSG00000114487; CTA
LSSFELSASR

SEQ ID NO: 47111 - protein, 9 aa, Homo sapiens
  Table A; Target 47111; HLA-A*02:03; MORC1; ENSG00000114487; CTA
LSSGHIARV

SEQ ID NO: 47112 - protein, 9 aa, Homo sapiens
  Table A; Target 47112; HLA-A*24:02; MORC1; ENSG00000114487; CTA
LYFFPEHQL

SEQ ID NO: 47113 - protein, 11 aa, Homo sapiens
  Table A; Target 47113; HLA-A*24:02; MORC1; ENSG00000114487; CTA
LYVTSSFKGAF

SEQ ID NO: 47114 - protein, 10 aa, Homo sapiens
  Table A; Target 47114; HLA-A*26:01; MORC1; ENSG00000114487; CTA
MCFNQIQNTY

SEQ ID NO: 47115 - protein, 10 aa, Homo sapiens
  Table A; Target 47115; HLA-A*29:02; MORC1; ENSG00000114487; CTA
MCFNQIQNTY

SEQ ID NO: 47116 - protein, 10 aa, Homo sapiens
  Table A; Target 47116; HLA-A*30:02; MORC1; ENSG00000114487; CTA
MCFNQIQNTY

SEQ ID NO: 47117 - protein, 10 aa, Homo sapiens
  Table A; Target 47117; HLA-B*15:03; MORC1; ENSG00000114487; CTA
MCFNQIQNTY

SEQ ID NO: 47118 - protein, 10 aa, Homo sapiens
  Table A; Target 47118; HLA-B*35:01; MORC1; ENSG00000114487; CTA
MCFNQIQNTY

SEQ ID NO: 47119 - protein, 10 aa, Homo sapiens
  Table A; Target 47119; HLA-C*16:04; MORC1; ENSG00000114487; CTA
MCFNQIQNTY

SEQ ID NO: 47120 - protein, 11 aa, Homo sapiens
  Table A; Target 47120; HLA-B*49:01; MORC1; ENSG00000114487; CTA
MEDVNLSSGHI

SEQ ID NO: 47121 - protein, 9 aa, Homo sapiens
  Table A; Target 47121; HLA-A*29:02; MORC1; ENSG00000114487; CTA
MELSIIYKY

SEQ ID NO: 47122 - protein, 9 aa, Homo sapiens
  Table A; Target 47122; HLA-A*30:02; MORC1; ENSG00000114487; CTA
MELSIIYKY

SEQ ID NO: 47123 - protein, 9 aa, Homo sapiens
  Table A; Target 47123; HLA-B*18:01; MORC1; ENSG00000114487; CTA
MELSIIYKY

SEQ ID NO: 47124 - protein, 9 aa, Homo sapiens
  Table A; Target 47124; HLA-B*35:01; MORC1; ENSG00000114487; CTA
MELSIIYKY

SEQ ID NO: 47125 - protein, 9 aa, Homo sapiens
  Table A; Target 47125; HLA-B*44:02; MORC1; ENSG00000114487; CTA
MELSIIYKY

SEQ ID NO: 47126 - protein, 9 aa, Homo sapiens
  Table A; Target 47126; HLA-B*44:03; MORC1; ENSG00000114487; CTA
MELSIIYKY

SEQ ID NO: 47127 - protein, 9 aa, Homo sapiens
  Table A; Target 47127; HLA-C*16:04; MORC1; ENSG00000114487; CTA
MELSIIYKY

SEQ ID NO: 47128 - protein, 10 aa, Homo sapiens
  Table A; Target 47128; HLA-B*44:02; MORC1; ENSG00000114487; CTA
MEPSHNKQEF

SEQ ID NO: 47129 - protein, 10 aa, Homo sapiens
  Table A; Target 47129; HLA-B*44:03; MORC1; ENSG00000114487; CTA
MEPSHNKQEF

SEQ ID NO: 47130 - protein, 9 aa, Homo sapiens
  Table A; Target 47130; HLA-B*38:01; MORC1; ENSG00000114487; CTA
MHEKVGSQL

SEQ ID NO: 47131 - protein, 9 aa, Homo sapiens
  Table A; Target 47131; HLA-B*39:01; MORC1; ENSG00000114487; CTA
MHEKVGSQL

SEQ ID NO: 47132 - protein, 10 aa, Homo sapiens
  Table A; Target 47132; HLA-A*03:02; MORC1; ENSG00000114487; CTA
MQQFDVIYGK

SEQ ID NO: 47133 - protein, 10 aa, Homo sapiens
  Table A; Target 47133; HLA-A*11:01; MORC1; ENSG00000114487; CTA
MQQFDVIYGK

SEQ ID NO: 47134 - protein, 10 aa, Homo sapiens
  Table A; Target 47134; HLA-B*27:02; MORC1; ENSG00000114487; CTA
MQQFDVIYGK

SEQ ID NO: 47135 - protein, 9 aa, Homo sapiens
  Table A; Target 47135; HLA-B*35:01; MORC1; ENSG00000114487; CTA
NAQAASWEM

SEQ ID NO: 47136 - protein, 9 aa, Homo sapiens
  Table A; Target 47136; HLA-B*35:03; MORC1; ENSG00000114487; CTA
NAQAASWEM

SEQ ID NO: 47137 - protein, 9 aa, Homo sapiens
  Table A; Target 47137; HLA-B*55:01; MORC1; ENSG00000114487; CTA
NAQAASWEM

SEQ ID NO: 47138 - protein, 9 aa, Homo sapiens
  Table A; Target 47138; HLA-C*07:06; MORC1; ENSG00000114487; CTA
NAQAASWEM

SEQ ID NO: 47139 - protein, 9 aa, Homo sapiens
  Table A; Target 47139; HLA-C*14:02; MORC1; ENSG00000114487; CTA
NAQAASWEM

SEQ ID NO: 47140 - protein, 9 aa, Homo sapiens
  Table A; Target 47140; HLA-C*16:01; MORC1; ENSG00000114487; CTA
NAQAASWEM

SEQ ID NO: 47141 - protein, 11 aa, Homo sapiens
  Table A; Target 47141; HLA-A*33:01; MORC1; ENSG00000114487; CTA
NAQAASWEMKR

SEQ ID NO: 47142 - protein, 9 aa, Homo sapiens
  Table A; Target 47142; HLA-A*33:01; MORC1; ENSG00000114487; CTA
NARDAGAER

SEQ ID NO: 47143 - protein, 9 aa, Homo sapiens
  Table A; Target 47143; HLA-A*33:03; MORC1; ENSG00000114487; CTA
NARDAGAER

SEQ ID NO: 47144 - protein, 9 aa, Homo sapiens
  Table A; Target 47144; HLA-C*07:06; MORC1; ENSG00000114487; CTA
NARDAGAER

SEQ ID NO: 47145 - protein, 10 aa, Homo sapiens
  Table A; Target 47145; HLA-B*07:02; MORC1; ENSG00000114487; CTA
NARDAGAERL

SEQ ID NO: 47146 - protein, 9 aa, Homo sapiens
  Table A; Target 47146; HLA-A*30:01; MORC1; ENSG00000114487; CTA
NEFGYQNDI

SEQ ID NO: 47147 - protein, 9 aa, Homo sapiens
  Table A; Target 47147; HLA-B*18:01; MORC1; ENSG00000114487; CTA
NEFGYQNDI

SEQ ID NO: 47148 - protein, 9 aa, Homo sapiens
  Table A; Target 47148; HLA-B*40:01; MORC1; ENSG00000114487; CTA
NEFGYQNDI

SEQ ID NO: 47149 - protein, 9 aa, Homo sapiens
  Table A; Target 47149; HLA-B*44:03; MORC1; ENSG00000114487; CTA
NEFGYQNDI

SEQ ID NO: 47150 - protein, 9 aa, Homo sapiens
  Table A; Target 47150; HLA-B*49:01; MORC1; ENSG00000114487; CTA
NEFGYQNDI

SEQ ID NO: 47151 - protein, 8 aa, Homo sapiens
  Table A; Target 47151; HLA-B*18:01; MORC1; ENSG00000114487; CTA
NEKLQGGF

SEQ ID NO: 47152 - protein, 8 aa, Homo sapiens
  Table A; Target 47152; HLA-B*37:01; MORC1; ENSG00000114487; CTA
NEKLQGGF

SEQ ID NO: 47153 - protein, 11 aa, Homo sapiens
  Table A; Target 47153; HLA-A*01:01; MORC1; ENSG00000114487; CTA
NIEETDSDVEY

SEQ ID NO: 47154 - protein, 11 aa, Homo sapiens
  Table A; Target 47154; HLA-B*55:01; MORC1; ENSG00000114487; CTA
NIEETDSDVEY

SEQ ID NO: 47155 - protein, 9 aa, Homo sapiens
  Table A; Target 47155; HLA-A*02:03; MORC1; ENSG00000114487; CTA
NLKEKQREL

SEQ ID NO: 47156 - protein, 9 aa, Homo sapiens
  Table A; Target 47156; HLA-B*08:01; MORC1; ENSG00000114487; CTA
NLKEKQREL

SEQ ID NO: 47157 - protein, 8 aa, Homo sapiens
  Table A; Target 47157; HLA-B*08:01; MORC1; ENSG00000114487; CTA
NLRIKLAL

SEQ ID NO: 47158 - protein, 9 aa, Homo sapiens
  Table A; Target 47158; HLA-A*33:01; MORC1; ENSG00000114487; CTA
NLSSGHIAR

SEQ ID NO: 47159 - protein, 9 aa, Homo sapiens
  Table A; Target 47159; HLA-A*68:01; MORC1; ENSG00000114487; CTA
NLSSGHIAR

SEQ ID NO: 47160 - protein, 10 aa, Homo sapiens
  Table A; Target 47160; HLA-A*02:03; MORC1; ENSG00000114487; CTA
NLSSGHIARV

SEQ ID NO: 47161 - protein, 8 aa, Homo sapiens
  Table A; Target 47161; HLA-B*08:01; MORC1; ENSG00000114487; CTA
NNLNKVTI

SEQ ID NO: 47162 - protein, 11 aa, Homo sapiens
  Table A; Target 47162; HLA-A*33:01; MORC1; ENSG00000114487; CTA
NNLNKVTIDAR

SEQ ID NO: 47163 - protein, 10 aa, Homo sapiens
  Table A; Target 47163; HLA-B*54:01; MORC1; ENSG00000114487; CTA
NPWMRIFIQA

SEQ ID NO: 47164 - protein, 8 aa, Homo sapiens
  Table A; Target 47164; HLA-C*14:02; MORC1; ENSG00000114487; CTA
NQIQNTYM

SEQ ID NO: 47165 - protein, 9 aa, Homo sapiens
  Table A; Target 47165; HLA-A*02:01; MORC1; ENSG00000114487; CTA
NQIQNTYMV

SEQ ID NO: 47166 - protein, 9 aa, Homo sapiens
  Table A; Target 47166; HLA-A*02:03; MORC1; ENSG00000114487; CTA
NQIQNTYMV

SEQ ID NO: 47167 - protein, 9 aa, Homo sapiens
  Table A; Target 47167; HLA-A*02:04; MORC1; ENSG00000114487; CTA
NQIQNTYMV

SEQ ID NO: 47168 - protein, 9 aa, Homo sapiens
  Table A; Target 47168; HLA-A*30:01; MORC1; ENSG00000114487; CTA
NQIQNTYMV

SEQ ID NO: 47169 - protein, 9 aa, Homo sapiens
  Table A; Target 47169; HLA-B*13:02; MORC1; ENSG00000114487; CTA
NQIQNTYMV

SEQ ID NO: 47170 - protein, 9 aa, Homo sapiens
  Table A; Target 47170; HLA-B*27:05; MORC1; ENSG00000114487; CTA
NQIQNTYMV

SEQ ID NO: 47171 - protein, 9 aa, Homo sapiens
  Table A; Target 47171; HLA-B*39:01; MORC1; ENSG00000114487; CTA
NQIQNTYMV

SEQ ID NO: 47172 - protein, 11 aa, Homo sapiens
  Table A; Target 47172; HLA-A*30:02; MORC1; ENSG00000114487; CTA
NQIQNTYMVQY

SEQ ID NO: 47173 - protein, 11 aa, Homo sapiens
  Table A; Target 47173; HLA-B*15:01; MORC1; ENSG00000114487; CTA
NQIQNTYMVQY

SEQ ID NO: 47174 - protein, 11 aa, Homo sapiens
  Table A; Target 47174; HLA-C*16:04; MORC1; ENSG00000114487; CTA
NQIQNTYMVQY

SEQ ID NO: 47175 - protein, 9 aa, Homo sapiens
  Table A; Target 47175; HLA-C*16:01; MORC1; ENSG00000114487; CTA
NSQQQRIPV

SEQ ID NO: 47176 - protein, 8 aa, Homo sapiens
  Table A; Target 47176; HLA-C*16:01; MORC1; ENSG00000114487; CTA
NSTTHSFL

SEQ ID NO: 47177 - protein, 9 aa, Homo sapiens
  Table A; Target 47177; HLA-A*29:02; MORC1; ENSG00000114487; CTA
NSTTHSFLF

SEQ ID NO: 47178 - protein, 9 aa, Homo sapiens
  Table A; Target 47178; HLA-B*57:01; MORC1; ENSG00000114487; CTA
NSTTHSFLF

SEQ ID NO: 47179 - protein, 9 aa, Homo sapiens
  Table A; Target 47179; HLA-C*16:01; MORC1; ENSG00000114487; CTA
NSTTHSFLF

SEQ ID NO: 47180 - protein, 10 aa, Homo sapiens
  Table A; Target 47180; HLA-A*01:01; MORC1; ENSG00000114487; CTA
NTDVSLKQEK

SEQ ID NO: 47181 - protein, 9 aa, Homo sapiens
  Table A; Target 47181; HLA-B*35:03; MORC1; ENSG00000114487; CTA
NTSDSDIIL

SEQ ID NO: 47182 - protein, 10 aa, Homo sapiens
  Table A; Target 47182; HLA-A*68:02; MORC1; ENSG00000114487; CTA
NTSDSDIILV

SEQ ID NO: 47183 - protein, 9 aa, Homo sapiens
  Table A; Target 47183; HLA-A*03:02; MORC1; ENSG00000114487; CTA
NTYMVQYEK

SEQ ID NO: 47184 - protein, 9 aa, Homo sapiens
  Table A; Target 47184; HLA-A*11:01; MORC1; ENSG00000114487; CTA
NTYMVQYEK

SEQ ID NO: 47185 - protein, 9 aa, Homo sapiens
  Table A; Target 47185; HLA-A*68:01; MORC1; ENSG00000114487; CTA
NTYMVQYEK

SEQ ID NO: 47186 - protein, 10 aa, Homo sapiens
  Table A; Target 47186; HLA-A*68:01; MORC1; ENSG00000114487; CTA
NTYMVQYEKK

SEQ ID NO: 47187 - protein, 9 aa, Homo sapiens
  Table A; Target 47187; HLA-C*01:02; MORC1; ENSG00000114487; CTA
NVPMEDVNL

SEQ ID NO: 47188 - protein, 9 aa, Homo sapiens
  Table A; Target 47188; HLA-A*02:01; MORC1; ENSG00000114487; CTA
NVQEYNHLL

SEQ ID NO: 47189 - protein, 9 aa, Homo sapiens
  Table A; Target 47189; HLA-A*02:04; MORC1; ENSG00000114487; CTA
NVQEYNHLL

SEQ ID NO: 47190 - protein, 9 aa, Homo sapiens
  Table A; Target 47190; HLA-A*02:07; MORC1; ENSG00000114487; CTA
NVQEYNHLL

SEQ ID NO: 47191 - protein, 9 aa, Homo sapiens
  Table A; Target 47191; HLA-A*68:02; MORC1; ENSG00000114487; CTA
NVQEYNHLL

SEQ ID NO: 47192 - protein, 9 aa, Homo sapiens
  Table A; Target 47192; HLA-B*35:03; MORC1; ENSG00000114487; CTA
NVQEYNHLL

SEQ ID NO: 47193 - protein, 9 aa, Homo sapiens
  Table A; Target 47193; HLA-B*38:01; MORC1; ENSG00000114487; CTA
NVQEYNHLL

SEQ ID NO: 47194 - protein, 9 aa, Homo sapiens
  Table A; Target 47194; HLA-B*55:01; MORC1; ENSG00000114487; CTA
NVQEYNHLL

SEQ ID NO: 47195 - protein, 9 aa, Homo sapiens
  Table A; Target 47195; HLA-C*01:02; MORC1; ENSG00000114487; CTA
NVQEYNHLL

SEQ ID NO: 47196 - protein, 9 aa, Homo sapiens
  Table A; Target 47196; HLA-C*16:02; MORC1; ENSG00000114487; CTA
NVQEYNHLL

SEQ ID NO: 47197 - protein, 10 aa, Homo sapiens
  Table A; Target 47197; HLA-A*03:02; MORC1; ENSG00000114487; CTA
NVQEYNHLLK

SEQ ID NO: 47198 - protein, 10 aa, Homo sapiens
  Table A; Target 47198; HLA-A*11:01; MORC1; ENSG00000114487; CTA
NVQEYNHLLK

SEQ ID NO: 47199 - protein, 10 aa, Homo sapiens
  Table A; Target 47199; HLA-A*33:01; MORC1; ENSG00000114487; CTA
NVQEYNHLLK

SEQ ID NO: 47200 - protein, 8 aa, Homo sapiens
  Table A; Target 47200; HLA-C*14:02; MORC1; ENSG00000114487; CTA
NYQEKEFF

SEQ ID NO: 47201 - protein, 8 aa, Homo sapiens
  Table A; Target 47201; HLA-B*07:02; MORC1; ENSG00000114487; CTA
PALQRAQL

SEQ ID NO: 47202 - protein, 9 aa, Homo sapiens
  Table A; Target 47202; HLA-A*31:01; MORC1; ENSG00000114487; CTA
PLNSFQYQR

SEQ ID NO: 47203 - protein, 9 aa, Homo sapiens
  Table A; Target 47203; HLA-A*31:01; MORC1; ENSG00000114487; CTA
QAASWEMKR

SEQ ID NO: 47204 - protein, 9 aa, Homo sapiens
  Table A; Target 47204; HLA-A*33:03; MORC1; ENSG00000114487; CTA
QAASWEMKR

SEQ ID NO: 47205 - protein, 9 aa, Homo sapiens
  Table A; Target 47205; HLA-A*68:01; MORC1; ENSG00000114487; CTA
QAASWEMKR

SEQ ID NO: 47206 - protein, 9 aa, Homo sapiens
  Table A; Target 47206; HLA-C*07:06; MORC1; ENSG00000114487; CTA
QAASWEMKR

SEQ ID NO: 47207 - protein, 8 aa, Homo sapiens
  Table A; Target 47207; HLA-B*51:01; MORC1; ENSG00000114487; CTA
QAMGIPFI

SEQ ID NO: 47208 - protein, 9 aa, Homo sapiens
  Table A; Target 47208; HLA-B*13:02; MORC1; ENSG00000114487; CTA
QAMGIPFII

SEQ ID NO: 47209 - protein, 9 aa, Homo sapiens
  Table A; Target 47209; HLA-B*51:01; MORC1; ENSG00000114487; CTA
QAMGIPFII

SEQ ID NO: 47210 - protein, 9 aa, Homo sapiens
  Table A; Target 47210; HLA-C*12:03; MORC1; ENSG00000114487; CTA
QAMGIPFII

SEQ ID NO: 47211 - protein, 9 aa, Homo sapiens
  Table A; Target 47211; HLA-A*25:01; MORC1; ENSG00000114487; CTA
QEFLNVQEY

SEQ ID NO: 47212 - protein, 9 aa, Homo sapiens
  Table A; Target 47212; HLA-A*26:01; MORC1; ENSG00000114487; CTA
QEFLNVQEY

SEQ ID NO: 47213 - protein, 9 aa, Homo sapiens
  Table A; Target 47213; HLA-A*30:01; MORC1; ENSG00000114487; CTA
QEFLNVQEY

SEQ ID NO: 47214 - protein, 9 aa, Homo sapiens
  Table A; Target 47214; HLA-A*30:02; MORC1; ENSG00000114487; CTA
QEFLNVQEY

SEQ ID NO: 47215 - protein, 9 aa, Homo sapiens
  Table A; Target 47215; HLA-B*15:01; MORC1; ENSG00000114487; CTA
QEFLNVQEY

SEQ ID NO: 47216 - protein, 9 aa, Homo sapiens
  Table A; Target 47216; HLA-B*15:03; MORC1; ENSG00000114487; CTA
QEFLNVQEY

SEQ ID NO: 47217 - protein, 9 aa, Homo sapiens
  Table A; Target 47217; HLA-B*27:02; MORC1; ENSG00000114487; CTA
QEFLNVQEY

SEQ ID NO: 47218 - protein, 9 aa, Homo sapiens
  Table A; Target 47218; HLA-B*27:05; MORC1; ENSG00000114487; CTA
QEFLNVQEY

SEQ ID NO: 47219 - protein, 9 aa, Homo sapiens
  Table A; Target 47219; HLA-B*35:01; MORC1; ENSG00000114487; CTA
QEFLNVQEY

SEQ ID NO: 47220 - protein, 9 aa, Homo sapiens
  Table A; Target 47220; HLA-B*37:01; MORC1; ENSG00000114487; CTA
QEFLNVQEY

SEQ ID NO: 47221 - protein, 9 aa, Homo sapiens
  Table A; Target 47221; HLA-B*40:01; MORC1; ENSG00000114487; CTA
QEFLNVQEY

SEQ ID NO: 47222 - protein, 9 aa, Homo sapiens
  Table A; Target 47222; HLA-B*44:02; MORC1; ENSG00000114487; CTA
QEFLNVQEY

SEQ ID NO: 47223 - protein, 9 aa, Homo sapiens
  Table A; Target 47223; HLA-B*44:03; MORC1; ENSG00000114487; CTA
QEFLNVQEY

SEQ ID NO: 47224 - protein, 9 aa, Homo sapiens
  Table A; Target 47224; HLA-B*49:01; MORC1; ENSG00000114487; CTA
QEFLNVQEY

SEQ ID NO: 47225 - protein, 9 aa, Homo sapiens
  Table A; Target 47225; HLA-C*02:02; MORC1; ENSG00000114487; CTA
QEFLNVQEY

SEQ ID NO: 47226 - protein, 9 aa, Homo sapiens
  Table A; Target 47226; HLA-C*07:01; MORC1; ENSG00000114487; CTA
QEFLNVQEY

SEQ ID NO: 47227 - protein, 9 aa, Homo sapiens
  Table A; Target 47227; HLA-C*07:04; MORC1; ENSG00000114487; CTA
QEFLNVQEY

SEQ ID NO: 47228 - protein, 9 aa, Homo sapiens
  Table A; Target 47228; HLA-C*12:03; MORC1; ENSG00000114487; CTA
QEFLNVQEY

SEQ ID NO: 47229 - protein, 9 aa, Homo sapiens
  Table A; Target 47229; HLA-C*14:02; MORC1; ENSG00000114487; CTA
QEFLNVQEY

SEQ ID NO: 47230 - protein, 9 aa, Homo sapiens
  Table A; Target 47230; HLA-C*16:01; MORC1; ENSG00000114487; CTA
QEFLNVQEY

SEQ ID NO: 47231 - protein, 9 aa, Homo sapiens
  Table A; Target 47231; HLA-C*16:02; MORC1; ENSG00000114487; CTA
QEFLNVQEY

SEQ ID NO: 47232 - protein, 9 aa, Homo sapiens
  Table A; Target 47232; HLA-C*16:04; MORC1; ENSG00000114487; CTA
QEFLNVQEY

SEQ ID NO: 47233 - protein, 9 aa, Homo sapiens
  Table A; Target 47233; HLA-B*44:02; MORC1; ENSG00000114487; CTA
QEKEFFDIW

SEQ ID NO: 47234 - protein, 9 aa, Homo sapiens
  Table A; Target 47234; HLA-A*30:01; MORC1; ENSG00000114487; CTA
QEKKEIPLL

SEQ ID NO: 47235 - protein, 9 aa, Homo sapiens
  Table A; Target 47235; HLA-B*40:01; MORC1; ENSG00000114487; CTA
QEKKEIPLL

SEQ ID NO: 47236 - protein, 9 aa, Homo sapiens
  Table A; Target 47236; HLA-B*40:02; MORC1; ENSG00000114487; CTA
QEKKEIPLL

SEQ ID NO: 47237 - protein, 9 aa, Homo sapiens
  Table A; Target 47237; HLA-B*44:02; MORC1; ENSG00000114487; CTA
QEKKEIPLL

SEQ ID NO: 47238 - protein, 9 aa, Homo sapiens
  Table A; Target 47238; HLA-A*30:01; MORC1; ENSG00000114487; CTA
QEYNHLLKV

SEQ ID NO: 47239 - protein, 9 aa, Homo sapiens
  Table A; Target 47239; HLA-B*44:03; MORC1; ENSG00000114487; CTA
QEYNHLLKV

SEQ ID NO: 47240 - protein, 9 aa, Homo sapiens
  Table A; Target 47240; HLA-B*49:01; MORC1; ENSG00000114487; CTA
QEYNHLLKV

SEQ ID NO: 47241 - protein, 10 aa, Homo sapiens
  Table A; Target 47241; HLA-B*44:02; MORC1; ENSG00000114487; CTA
QEYNHLLKVM

SEQ ID NO: 47242 - protein, 10 aa, Homo sapiens
  Table A; Target 47242; HLA-B*44:03; MORC1; ENSG00000114487; CTA
QEYNHLLKVM

SEQ ID NO: 47243 - protein, 8 aa, Homo sapiens
  Table A; Target 47243; HLA-B*27:02; MORC1; ENSG00000114487; CTA
QFDVIYGK

SEQ ID NO: 47244 - protein, 8 aa, Homo sapiens
  Table A; Target 47244; HLA-A*02:03; MORC1; ENSG00000114487; CTA
QIANITTV

SEQ ID NO: 47245 - protein, 9 aa, Homo sapiens
  Table A; Target 47245; HLA-A*23:01; MORC1; ENSG00000114487; CTA
QIANITTVW

SEQ ID NO: 47246 - protein, 9 aa, Homo sapiens
  Table A; Target 47246; HLA-A*24:02; MORC1; ENSG00000114487; CTA
QIANITTVW

SEQ ID NO: 47247 - protein, 9 aa, Homo sapiens
  Table A; Target 47247; HLA-A*25:01; MORC1; ENSG00000114487; CTA
QIANITTVW

SEQ ID NO: 47248 - protein, 9 aa, Homo sapiens
  Table A; Target 47248; HLA-A*26:01; MORC1; ENSG00000114487; CTA
QIANITTVW

SEQ ID NO: 47249 - protein, 9 aa, Homo sapiens
  Table A; Target 47249; HLA-A*32:01; MORC1; ENSG00000114487; CTA
QIANITTVW

SEQ ID NO: 47250 - protein, 9 aa, Homo sapiens
  Table A; Target 47250; HLA-A*33:03; MORC1; ENSG00000114487; CTA
QIANITTVW

SEQ ID NO: 47251 - protein, 9 aa, Homo sapiens
  Table A; Target 47251; HLA-A*68:01; MORC1; ENSG00000114487; CTA
QIANITTVW

SEQ ID NO: 47252 - protein, 9 aa, Homo sapiens
  Table A; Target 47252; HLA-A*68:02; MORC1; ENSG00000114487; CTA
QIANITTVW

SEQ ID NO: 47253 - protein, 9 aa, Homo sapiens
  Table A; Target 47253; HLA-B*15:01; MORC1; ENSG00000114487; CTA
QIANITTVW

SEQ ID NO: 47254 - protein, 9 aa, Homo sapiens
  Table A; Target 47254; HLA-B*15:03; MORC1; ENSG00000114487; CTA
QIANITTVW

SEQ ID NO: 47255 - protein, 9 aa, Homo sapiens
  Table A; Target 47255; HLA-B*35:01; MORC1; ENSG00000114487; CTA
QIANITTVW

SEQ ID NO: 47256 - protein, 9 aa, Homo sapiens
  Table A; Target 47256; HLA-B*38:01; MORC1; ENSG00000114487; CTA
QIANITTVW

SEQ ID NO: 47257 - protein, 9 aa, Homo sapiens
  Table A; Target 47257; HLA-B*44:02; MORC1; ENSG00000114487; CTA
QIANITTVW

SEQ ID NO: 47258 - protein, 9 aa, Homo sapiens
  Table A; Target 47258; HLA-B*44:03; MORC1; ENSG00000114487; CTA
QIANITTVW

SEQ ID NO: 47259 - protein, 9 aa, Homo sapiens
  Table A; Target 47259; HLA-B*57:01; MORC1; ENSG00000114487; CTA
QIANITTVW

SEQ ID NO: 47260 - protein, 9 aa, Homo sapiens
  Table A; Target 47260; HLA-B*58:01; MORC1; ENSG00000114487; CTA
QIANITTVW

SEQ ID NO: 47261 - protein, 9 aa, Homo sapiens
  Table A; Target 47261; HLA-C*02:02; MORC1; ENSG00000114487; CTA
QIANITTVW

SEQ ID NO: 47262 - protein, 9 aa, Homo sapiens
  Table A; Target 47262; HLA-C*07:04; MORC1; ENSG00000114487; CTA
QIANITTVW

SEQ ID NO: 47263 - protein, 9 aa, Homo sapiens
  Table A; Target 47263; HLA-C*07:06; MORC1; ENSG00000114487; CTA
QIANITTVW

SEQ ID NO: 47264 - protein, 9 aa, Homo sapiens
  Table A; Target 47264; HLA-C*12:03; MORC1; ENSG00000114487; CTA
QIANITTVW

SEQ ID NO: 47265 - protein, 9 aa, Homo sapiens
  Table A; Target 47265; HLA-C*16:04; MORC1; ENSG00000114487; CTA
QIANITTVW

SEQ ID NO: 47266 - protein, 10 aa, Homo sapiens
  Table A; Target 47266; HLA-A*68:01; MORC1; ENSG00000114487; CTA
QIANITTVWR

SEQ ID NO: 47267 - protein, 10 aa, Homo sapiens
  Table A; Target 47267; HLA-A*03:02; MORC1; ENSG00000114487; CTA
QIQNTYMVQY

SEQ ID NO: 47268 - protein, 10 aa, Homo sapiens
  Table A; Target 47268; HLA-A*29:02; MORC1; ENSG00000114487; CTA
QIQNTYMVQY

SEQ ID NO: 47269 - protein, 10 aa, Homo sapiens
  Table A; Target 47269; HLA-A*30:02; MORC1; ENSG00000114487; CTA
QIQNTYMVQY

SEQ ID NO: 47270 - protein, 10 aa, Homo sapiens
  Table A; Target 47270; HLA-C*07:04; MORC1; ENSG00000114487; CTA
QIQNTYMVQY

SEQ ID NO: 47271 - protein, 8 aa, Homo sapiens
  Table A; Target 47271; HLA-B*08:01; MORC1; ENSG00000114487; CTA
QLKLKSLL

SEQ ID NO: 47272 - protein, 9 aa, Homo sapiens
  Table A; Target 47272; HLA-A*01:01; MORC1; ENSG00000114487; CTA
QLRESVIKY

SEQ ID NO: 47273 - protein, 9 aa, Homo sapiens
  Table A; Target 47273; HLA-A*03:01; MORC1; ENSG00000114487; CTA
QLRESVIKY

SEQ ID NO: 47274 - protein, 9 aa, Homo sapiens
  Table A; Target 47274; HLA-A*26:01; MORC1; ENSG00000114487; CTA
QLRESVIKY

SEQ ID NO: 47275 - protein, 9 aa, Homo sapiens
  Table A; Target 47275; HLA-A*29:02; MORC1; ENSG00000114487; CTA
QLRESVIKY

SEQ ID NO: 47276 - protein, 9 aa, Homo sapiens
  Table A; Target 47276; HLA-A*30:02; MORC1; ENSG00000114487; CTA
QLRESVIKY

SEQ ID NO: 47277 - protein, 9 aa, Homo sapiens
  Table A; Target 47277; HLA-B*15:01; MORC1; ENSG00000114487; CTA
QLRESVIKY

SEQ ID NO: 47278 - protein, 9 aa, Homo sapiens
  Table A; Target 47278; HLA-B*15:03; MORC1; ENSG00000114487; CTA
QLRESVIKY

SEQ ID NO: 47279 - protein, 9 aa, Homo sapiens
  Table A; Target 47279; HLA-B*46:01; MORC1; ENSG00000114487; CTA
QLRESVIKY

SEQ ID NO: 47280 - protein, 9 aa, Homo sapiens
  Table A; Target 47280; HLA-C*07:04; MORC1; ENSG00000114487; CTA
QLRESVIKY

SEQ ID NO: 47281 - protein, 9 aa, Homo sapiens
  Table A; Target 47281; HLA-B*54:01; MORC1; ENSG00000114487; CTA
QPQPQFIPV

SEQ ID NO: 47282 - protein, 9 aa, Homo sapiens
  Table A; Target 47282; HLA-B*56:01; MORC1; ENSG00000114487; CTA
QPQPQFIPV

SEQ ID NO: 47283 - protein, 9 aa, Homo sapiens
  Table A; Target 47283; HLA-A*03:01; MORC1; ENSG00000114487; CTA
QQFDVIYGK

SEQ ID NO: 47284 - protein, 9 aa, Homo sapiens
  Table A; Target 47284; HLA-A*03:02; MORC1; ENSG00000114487; CTA
QQFDVIYGK

SEQ ID NO: 47285 - protein, 9 aa, Homo sapiens
  Table A; Target 47285; HLA-A*11:01; MORC1; ENSG00000114487; CTA
QQFDVIYGK

SEQ ID NO: 47286 - protein, 9 aa, Homo sapiens
  Table A; Target 47286; HLA-A*31:01; MORC1; ENSG00000114487; CTA
QQFDVIYGK

SEQ ID NO: 47287 - protein, 9 aa, Homo sapiens
  Table A; Target 47287; HLA-B*13:02; MORC1; ENSG00000114487; CTA
QQFDVIYGK

SEQ ID NO: 47288 - protein, 9 aa, Homo sapiens
  Table A; Target 47288; HLA-B*27:05; MORC1; ENSG00000114487; CTA
QQFDVIYGK

SEQ ID NO: 47289 - protein, 9 aa, Homo sapiens
  Table A; Target 47289; HLA-A*02:04; MORC1; ENSG00000114487; CTA
QQQRIPVAL

SEQ ID NO: 47290 - protein, 9 aa, Homo sapiens
  Table A; Target 47290; HLA-A*32:01; MORC1; ENSG00000114487; CTA
QQQRIPVAL

SEQ ID NO: 47291 - protein, 9 aa, Homo sapiens
  Table A; Target 47291; HLA-B*13:02; MORC1; ENSG00000114487; CTA
QQQRIPVAL

SEQ ID NO: 47292 - protein, 9 aa, Homo sapiens
  Table A; Target 47292; HLA-B*15:01; MORC1; ENSG00000114487; CTA
QQQRIPVAL

SEQ ID NO: 47293 - protein, 9 aa, Homo sapiens
  Table A; Target 47293; HLA-B*15:03; MORC1; ENSG00000114487; CTA
QQQRIPVAL

SEQ ID NO: 47294 - protein, 9 aa, Homo sapiens
  Table A; Target 47294; HLA-B*27:05; MORC1; ENSG00000114487; CTA
QQQRIPVAL

SEQ ID NO: 47295 - protein, 9 aa, Homo sapiens
  Table A; Target 47295; HLA-B*38:01; MORC1; ENSG00000114487; CTA
QQQRIPVAL

SEQ ID NO: 47296 - protein, 9 aa, Homo sapiens
  Table A; Target 47296; HLA-B*39:01; MORC1; ENSG00000114487; CTA
QQQRIPVAL

SEQ ID NO: 47297 - protein, 8 aa, Homo sapiens
  Table A; Target 47297; HLA-B*08:01; MORC1; ENSG00000114487; CTA
QQRIPVAL

SEQ ID NO: 47298 - protein, 8 aa, Homo sapiens
  Table A; Target 47298; HLA-B*15:01; MORC1; ENSG00000114487; CTA
QQRIPVAL

SEQ ID NO: 47299 - protein, 8 aa, Homo sapiens
  Table A; Target 47299; HLA-B*15:03; MORC1; ENSG00000114487; CTA
QQRIPVAL

SEQ ID NO: 47300 - protein, 10 aa, Homo sapiens
  Table A; Target 47300; HLA-A*68:01; MORC1; ENSG00000114487; CTA
QSIIYDSNTR

SEQ ID NO: 47301 - protein, 9 aa, Homo sapiens
  Table A; Target 47301; HLA-A*32:01; MORC1; ENSG00000114487; CTA
QSTPVKETV

SEQ ID NO: 47302 - protein, 9 aa, Homo sapiens
  Table A; Target 47302; HLA-A*68:02; MORC1; ENSG00000114487; CTA
QSTPVKETV

SEQ ID NO: 47303 - protein, 9 aa, Homo sapiens
  Table A; Target 47303; HLA-B*13:02; MORC1; ENSG00000114487; CTA
QSTPVKETV

SEQ ID NO: 47304 - protein, 9 aa, Homo sapiens
  Table A; Target 47304; HLA-B*58:01; MORC1; ENSG00000114487; CTA
QSTPVKETV

SEQ ID NO: 47305 - protein, 9 aa, Homo sapiens
  Table A; Target 47305; HLA-C*16:01; MORC1; ENSG00000114487; CTA
QSTPVKETV

SEQ ID NO: 47306 - protein, 9 aa, Homo sapiens
  Table A; Target 47306; HLA-C*16:02; MORC1; ENSG00000114487; CTA
QSTPVKETV

SEQ ID NO: 47307 - protein, 9 aa, Homo sapiens
  Table A; Target 47307; HLA-C*16:04; MORC1; ENSG00000114487; CTA
QSTPVKETV

SEQ ID NO: 47308 - protein, 10 aa, Homo sapiens
  Table A; Target 47308; HLA-C*07:06; MORC1; ENSG00000114487; CTA
QSTPVKETVR

SEQ ID NO: 47309 - protein, 9 aa, Homo sapiens
  Table A; Target 47309; HLA-A*01:01; MORC1; ENSG00000114487; CTA
QTDTYLEAL

SEQ ID NO: 47310 - protein, 10 aa, Homo sapiens
  Table A; Target 47310; HLA-A*01:01; MORC1; ENSG00000114487; CTA
QTDTYLEALL

SEQ ID NO: 47311 - protein, 9 aa, Homo sapiens
  Table A; Target 47311; HLA-A*03:02; MORC1; ENSG00000114487; CTA
RALEDVEAK

SEQ ID NO: 47312 - protein, 9 aa, Homo sapiens
  Table A; Target 47312; HLA-A*11:01; MORC1; ENSG00000114487; CTA
RALEDVEAK

SEQ ID NO: 47313 - protein, 9 aa, Homo sapiens
  Table A; Target 47313; HLA-B*27:02; MORC1; ENSG00000114487; CTA
RALEDVEAK

SEQ ID NO: 47314 - protein, 11 aa, Homo sapiens
  Table A; Target 47314; HLA-A*03:02; MORC1; ENSG00000114487; CTA
RALEDVEAKQK

SEQ ID NO: 47315 - protein, 11 aa, Homo sapiens
  Table A; Target 47315; HLA-A*11:01; MORC1; ENSG00000114487; CTA
RALEDVEAKQK

SEQ ID NO: 47316 - protein, 9 aa, Homo sapiens
  Table A; Target 47316; HLA-B*07:02; MORC1; ENSG00000114487; CTA
RAQPTEGCL

SEQ ID NO: 47317 - protein, 9 aa, Homo sapiens
  Table A; Target 47317; HLA-C*03:04; MORC1; ENSG00000114487; CTA
RAQPTEGCL

SEQ ID NO: 47318 - protein, 10 aa, Homo sapiens
  Table A; Target 47318; HLA-A*03:02; MORC1; ENSG00000114487; CTA
RAQPTEGCLK

SEQ ID NO: 47319 - protein, 10 aa, Homo sapiens
  Table A; Target 47319; HLA-A*11:01; MORC1; ENSG00000114487; CTA
RAQPTEGCLK

SEQ ID NO: 47320 - protein, 8 aa, Homo sapiens
  Table A; Target 47320; HLA-B*15:03; MORC1; ENSG00000114487; CTA
RAYTSVLY

SEQ ID NO: 47321 - protein, 9 aa, Homo sapiens
  Table A; Target 47321; HLA-A*03:01; MORC1; ENSG00000114487; CTA
RAYTSVLYF

SEQ ID NO: 47322 - protein, 9 aa, Homo sapiens
  Table A; Target 47322; HLA-B*57:01; MORC1; ENSG00000114487; CTA
RAYTSVLYF

SEQ ID NO: 47323 - protein, 9 aa, Homo sapiens
  Table A; Target 47323; HLA-C*02:02; MORC1; ENSG00000114487; CTA
RAYTSVLYF

SEQ ID NO: 47324 - protein, 8 aa, Homo sapiens
  Table A; Target 47324; HLA-B*37:01; MORC1; ENSG00000114487; CTA
RDAGAERL

SEQ ID NO: 47325 - protein, 9 aa, Homo sapiens
  Table A; Target 47325; HLA-B*37:01; MORC1; ENSG00000114487; CTA
RELKTARTL

SEQ ID NO: 47326 - protein, 11 aa, Homo sapiens
  Table A; Target 47326; HLA-B*44:02; MORC1; ENSG00000114487; CTA
RESVTDDPQKF

SEQ ID NO: 47327 - protein, 11 aa, Homo sapiens
  Table A; Target 47327; HLA-B*44:03; MORC1; ENSG00000114487; CTA
RESVTDDPQKF

SEQ ID NO: 47328 - protein, 10 aa, Homo sapiens
  Table A; Target 47328; HLA-A*03:01; MORC1; ENSG00000114487; CTA
RIFIQAKRVK

SEQ ID NO: 47329 - protein, 9 aa, Homo sapiens
  Table A; Target 47329; HLA-B*57:01; MORC1; ENSG00000114487; CTA
RIGKDFILF

SEQ ID NO: 47330 - protein, 10 aa, Homo sapiens
  Table A; Target 47330; HLA-A*02:07; MORC1; ENSG00000114487; CTA
RIPVALPENV

SEQ ID NO: 47331 - protein, 11 aa, Homo sapiens
  Table A; Target 47331; HLA-A*03:02; MORC1; ENSG00000114487; CTA
RLDVFSVDNEK

SEQ ID NO: 47332 - protein, 9 aa, Homo sapiens
  Table A; Target 47332; HLA-A*03:02; MORC1; ENSG00000114487; CTA
RLPLEKNEK

SEQ ID NO: 47333 - protein, 9 aa, Homo sapiens
  Table A; Target 47333; HLA-B*13:02; MORC1; ENSG00000114487; CTA
RQAMGIPFI

SEQ ID NO: 47334 - protein, 9 aa, Homo sapiens
  Table A; Target 47334; HLA-A*30:02; MORC1; ENSG00000114487; CTA
RSQAGMFIY

SEQ ID NO: 47335 - protein, 9 aa, Homo sapiens
  Table A; Target 47335; HLA-B*57:01; MORC1; ENSG00000114487; CTA
RSQAGMFIY

SEQ ID NO: 47336 - protein, 9 aa, Homo sapiens
  Table A; Target 47336; HLA-B*58:01; MORC1; ENSG00000114487; CTA
RSQAGMFIY

SEQ ID NO: 47337 - protein, 11 aa, Homo sapiens
  Table A; Target 47337; HLA-B*57:01; MORC1; ENSG00000114487; CTA
RSQIANITTVW

SEQ ID NO: 47338 - protein, 11 aa, Homo sapiens
  Table A; Target 47338; HLA-B*58:01; MORC1; ENSG00000114487; CTA
RSQIANITTVW

SEQ ID NO: 47339 - protein, 8 aa, Homo sapiens
  Table A; Target 47339; HLA-B*57:01; MORC1; ENSG00000114487; CTA
RSSSLPSW

SEQ ID NO: 47340 - protein, 8 aa, Homo sapiens
  Table A; Target 47340; HLA-B*58:01; MORC1; ENSG00000114487; CTA
RSSSLPSW

SEQ ID NO: 47341 - protein, 9 aa, Homo sapiens
  Table A; Target 47341; HLA-A*02:04; MORC1; ENSG00000114487; CTA
RTLSLFYGV

SEQ ID NO: 47342 - protein, 9 aa, Homo sapiens
  Table A; Target 47342; HLA-A*03:01; MORC1; ENSG00000114487; CTA
RVLPSSTNY

SEQ ID NO: 47343 - protein, 9 aa, Homo sapiens
  Table A; Target 47343; HLA-A*03:02; MORC1; ENSG00000114487; CTA
RVLPSSTNY

SEQ ID NO: 47344 - protein, 9 aa, Homo sapiens
  Table A; Target 47344; HLA-A*25:01; MORC1; ENSG00000114487; CTA
RVLPSSTNY

SEQ ID NO: 47345 - protein, 9 aa, Homo sapiens
  Table A; Target 47345; HLA-A*26:01; MORC1; ENSG00000114487; CTA
RVLPSSTNY

SEQ ID NO: 47346 - protein, 9 aa, Homo sapiens
  Table A; Target 47346; HLA-A*29:02; MORC1; ENSG00000114487; CTA
RVLPSSTNY

SEQ ID NO: 47347 - protein, 9 aa, Homo sapiens
  Table A; Target 47347; HLA-A*30:02; MORC1; ENSG00000114487; CTA
RVLPSSTNY

SEQ ID NO: 47348 - protein, 9 aa, Homo sapiens
  Table A; Target 47348; HLA-A*31:01; MORC1; ENSG00000114487; CTA
RVLPSSTNY

SEQ ID NO: 47349 - protein, 9 aa, Homo sapiens
  Table A; Target 47349; HLA-A*32:01; MORC1; ENSG00000114487; CTA
RVLPSSTNY

SEQ ID NO: 47350 - protein, 9 aa, Homo sapiens
  Table A; Target 47350; HLA-B*15:01; MORC1; ENSG00000114487; CTA
RVLPSSTNY

SEQ ID NO: 47351 - protein, 9 aa, Homo sapiens
  Table A; Target 47351; HLA-B*15:03; MORC1; ENSG00000114487; CTA
RVLPSSTNY

SEQ ID NO: 47352 - protein, 9 aa, Homo sapiens
  Table A; Target 47352; HLA-B*39:01; MORC1; ENSG00000114487; CTA
RVLPSSTNY

SEQ ID NO: 47353 - protein, 9 aa, Homo sapiens
  Table A; Target 47353; HLA-B*46:01; MORC1; ENSG00000114487; CTA
RVLPSSTNY

SEQ ID NO: 47354 - protein, 9 aa, Homo sapiens
  Table A; Target 47354; HLA-B*57:01; MORC1; ENSG00000114487; CTA
RVLPSSTNY

SEQ ID NO: 47355 - protein, 9 aa, Homo sapiens
  Table A; Target 47355; HLA-B*58:01; MORC1; ENSG00000114487; CTA
RVLPSSTNY

SEQ ID NO: 47356 - protein, 9 aa, Homo sapiens
  Table A; Target 47356; HLA-C*02:02; MORC1; ENSG00000114487; CTA
RVLPSSTNY

SEQ ID NO: 47357 - protein, 9 aa, Homo sapiens
  Table A; Target 47357; HLA-C*07:04; MORC1; ENSG00000114487; CTA
RVLPSSTNY

SEQ ID NO: 47358 - protein, 9 aa, Homo sapiens
  Table A; Target 47358; HLA-C*16:04; MORC1; ENSG00000114487; CTA
RVLPSSTNY

SEQ ID NO: 47359 - protein, 9 aa, Homo sapiens
  Table A; Target 47359; HLA-A*03:01; MORC1; ENSG00000114487; CTA
RVSVSGSCK

SEQ ID NO: 47360 - protein, 9 aa, Homo sapiens
  Table A; Target 47360; HLA-A*03:02; MORC1; ENSG00000114487; CTA
RVSVSGSCK

SEQ ID NO: 47361 - protein, 10 aa, Homo sapiens
  Table A; Target 47361; HLA-A*24:02; MORC1; ENSG00000114487; CTA
RYPALQRAQL

SEQ ID NO: 47362 - protein, 8 aa, Homo sapiens
  Table A; Target 47362; HLA-A*31:01; MORC1; ENSG00000114487; CTA
SAKDVLQR

SEQ ID NO: 47363 - protein, 8 aa, Homo sapiens
  Table A; Target 47363; HLA-A*33:01; MORC1; ENSG00000114487; CTA
SAKDVLQR

SEQ ID NO: 47364 - protein, 8 aa, Homo sapiens
  Table A; Target 47364; HLA-A*33:03; MORC1; ENSG00000114487; CTA
SAKDVLQR

SEQ ID NO: 47365 - protein, 8 aa, Homo sapiens
  Table A; Target 47365; HLA-A*68:01; MORC1; ENSG00000114487; CTA
SAKDVLQR

SEQ ID NO: 47366 - protein, 9 aa, Homo sapiens
  Table A; Target 47366; HLA-B*54:01; MORC1; ENSG00000114487; CTA
SAKDVLQRA

SEQ ID NO: 47367 - protein, 9 aa, Homo sapiens
  Table A; Target 47367; HLA-A*11:01; MORC1; ENSG00000114487; CTA
SDIILVSDK

SEQ ID NO: 47368 - protein, 10 aa, Homo sapiens
  Table A; Target 47368; HLA-A*30:01; MORC1; ENSG00000114487; CTA
SDKSNTDVSL

SEQ ID NO: 47369 - protein, 11 aa, Homo sapiens
  Table A; Target 47369; HLA-A*11:01; MORC1; ENSG00000114487; CTA
SDKSNTDVSLK

SEQ ID NO: 47370 - protein, 8 aa, Homo sapiens
  Table A; Target 47370; HLA-B*37:01; MORC1; ENSG00000114487; CTA
SDSDIILV

SEQ ID NO: 47371 - protein, 8 aa, Homo sapiens
  Table A; Target 47371; HLA-A*30:01; MORC1; ENSG00000114487; CTA
SELEEPAL

SEQ ID NO: 47372 - protein, 8 aa, Homo sapiens
  Table A; Target 47372; HLA-B*18:01; MORC1; ENSG00000114487; CTA
SELEEPAL

SEQ ID NO: 47373 - protein, 8 aa, Homo sapiens
  Table A; Target 47373; HLA-B*40:01; MORC1; ENSG00000114487; CTA
SELEEPAL

SEQ ID NO: 47374 - protein, 8 aa, Homo sapiens
  Table A; Target 47374; HLA-B*44:03; MORC1; ENSG00000114487; CTA
SELEEPAL

SEQ ID NO: 47375 - protein, 8 aa, Homo sapiens
  Table A; Target 47375; HLA-B*49:01; MORC1; ENSG00000114487; CTA
SEVVVPMP

SEQ ID NO: 47376 - protein, 10 aa, Homo sapiens
  Table A; Target 47376; HLA-A*25:01; MORC1; ENSG00000114487; CTA
SEVVVPMPSW

SEQ ID NO: 47377 - protein, 10 aa, Homo sapiens
  Table A; Target 47377; HLA-A*30:01; MORC1; ENSG00000114487; CTA
SEVVVPMPSW

SEQ ID NO: 47378 - protein, 10 aa, Homo sapiens
  Table A; Target 47378; HLA-B*27:02; MORC1; ENSG00000114487; CTA
SEVVVPMPSW

SEQ ID NO: 47379 - protein, 10 aa, Homo sapiens
  Table A; Target 47379; HLA-B*44:02; MORC1; ENSG00000114487; CTA
SEVVVPMPSW

SEQ ID NO: 47380 - protein, 10 aa, Homo sapiens
  Table A; Target 47380; HLA-B*44:03; MORC1; ENSG00000114487; CTA
SEVVVPMPSW

SEQ ID NO: 47381 - protein, 10 aa, Homo sapiens
  Table A; Target 47381; HLA-B*49:01; MORC1; ENSG00000114487; CTA
SEVVVPMPSW

SEQ ID NO: 47382 - protein, 10 aa, Homo sapiens
  Table A; Target 47382; HLA-C*16:04; MORC1; ENSG00000114487; CTA
SEVVVPMPSW

SEQ ID NO: 47383 - protein, 10 aa, Homo sapiens
  Table A; Target 47383; HLA-A*29:02; MORC1; ENSG00000114487; CTA
SFRAYTSVLY

SEQ ID NO: 47384 - protein, 9 aa, Homo sapiens
  Table A; Target 47384; HLA-B*07:02; MORC1; ENSG00000114487; CTA
SGHIARVSV

SEQ ID NO: 47385 - protein, 9 aa, Homo sapiens
  Table A; Target 47385; HLA-B*08:01; MORC1; ENSG00000114487; CTA
SGHIARVSV

SEQ ID NO: 47386 - protein, 9 aa, Homo sapiens
  Table A; Target 47386; HLA-C*16:01; MORC1; ENSG00000114487; CTA
SGHIARVSV

SEQ ID NO: 47387 - protein, 9 aa, Homo sapiens
  Table A; Target 47387; HLA-A*68:01; MORC1; ENSG00000114487; CTA
SIIYDSNTR

SEQ ID NO: 47388 - protein, 9 aa, Homo sapiens
  Table A; Target 47388; HLA-C*07:06; MORC1; ENSG00000114487; CTA
SIIYDSNTR

SEQ ID NO: 47389 - protein, 9 aa, Homo sapiens
  Table A; Target 47389; HLA-A*03:02; MORC1; ENSG00000114487; CTA
SILKEAQIK

SEQ ID NO: 47390 - protein, 9 aa, Homo sapiens
  Table A; Target 47390; HLA-C*01:02; MORC1; ENSG00000114487; CTA
SIPLGTMST

SEQ ID NO: 47391 - protein, 10 aa, Homo sapiens
  Table A; Target 47391; HLA-C*01:02; MORC1; ENSG00000114487; CTA
SIPLGTMSTI

SEQ ID NO: 47392 - protein, 8 aa, Homo sapiens
  Table A; Target 47392; HLA-A*02:04; MORC1; ENSG00000114487; CTA
SLFYGVNV

SEQ ID NO: 47393 - protein, 8 aa, Homo sapiens
  Table A; Target 47393; HLA-B*13:02; MORC1; ENSG00000114487; CTA
SLFYGVNV

SEQ ID NO: 47394 - protein, 11 aa, Homo sapiens
  Table A; Target 47394; HLA-A*31:01; MORC1; ENSG00000114487; CTA
SLFYGVNVENR

SEQ ID NO: 47395 - protein, 11 aa, Homo sapiens
  Table A; Target 47395; HLA-A*68:01; MORC1; ENSG00000114487; CTA
SLFYGVNVENR

SEQ ID NO: 47396 - protein, 10 aa, Homo sapiens
  Table A; Target 47396; HLA-A*02:01; MORC1; ENSG00000114487; CTA
SLLGAGVVGI

SEQ ID NO: 47397 - protein, 10 aa, Homo sapiens
  Table A; Target 47397; HLA-A*02:03; MORC1; ENSG00000114487; CTA
SLLGAGVVGI

SEQ ID NO: 47398 - protein, 10 aa, Homo sapiens
  Table A; Target 47398; HLA-A*02:04; MORC1; ENSG00000114487; CTA
SLLGAGVVGI

SEQ ID NO: 47399 - protein, 10 aa, Homo sapiens
  Table A; Target 47399; HLA-B*55:01; MORC1; ENSG00000114487; CTA
SLLGAGVVGI

SEQ ID NO: 47400 - protein, 9 aa, Homo sapiens
  Table A; Target 47400; HLA-A*03:02; MORC1; ENSG00000114487; CTA
SLNFVEECK

SEQ ID NO: 47401 - protein, 9 aa, Homo sapiens
  Table A; Target 47401; HLA-A*02:04; MORC1; ENSG00000114487; CTA
SLPSWKSLL

SEQ ID NO: 47402 - protein, 9 aa, Homo sapiens
  Table A; Target 47402; HLA-A*02:07; MORC1; ENSG00000114487; CTA
SLPSWKSLL

SEQ ID NO: 47403 - protein, 9 aa, Homo sapiens
  Table A; Target 47403; HLA-A*24:02; MORC1; ENSG00000114487; CTA
SLPSWKSLL

SEQ ID NO: 47404 - protein, 11 aa, Homo sapiens
  Table A; Target 47404; HLA-A*02:07; MORC1; ENSG00000114487; CTA
SLPSWKSLLNV

SEQ ID NO: 47405 - protein, 9 aa, Homo sapiens
  Table A; Target 47405; HLA-A*02:01; MORC1; ENSG00000114487; CTA
SLSEVVVPM

SEQ ID NO: 47406 - protein, 9 aa, Homo sapiens
  Table A; Target 47406; HLA-A*02:04; MORC1; ENSG00000114487; CTA
SLSEVVVPM

SEQ ID NO: 47407 - protein, 9 aa, Homo sapiens
  Table A; Target 47407; HLA-A*02:07; MORC1; ENSG00000114487; CTA
SLSEVVVPM

SEQ ID NO: 47408 - protein, 9 aa, Homo sapiens
  Table A; Target 47408; HLA-B*37:01; MORC1; ENSG00000114487; CTA
SLSEVVVPM

SEQ ID NO: 47409 - protein, 9 aa, Homo sapiens
  Table A; Target 47409; HLA-C*07:06; MORC1; ENSG00000114487; CTA
SLSEVVVPM

SEQ ID NO: 47410 - protein, 9 aa, Homo sapiens
  Table A; Target 47410; HLA-B*07:02; MORC1; ENSG00000114487; CTA
SLSSAKDVL

SEQ ID NO: 47411 - protein, 9 aa, Homo sapiens
  Table A; Target 47411; HLA-B*39:01; MORC1; ENSG00000114487; CTA
SLSSAKDVL

SEQ ID NO: 47412 - protein, 9 aa, Homo sapiens
  Table A; Target 47412; HLA-A*02:01; MORC1; ENSG00000114487; CTA
SLSSFELSA

SEQ ID NO: 47413 - protein, 9 aa, Homo sapiens
  Table A; Target 47413; HLA-B*13:02; MORC1; ENSG00000114487; CTA
SLSSFELSA

SEQ ID NO: 47414 - protein, 10 aa, Homo sapiens
  Table A; Target 47414; HLA-B*07:02; MORC1; ENSG00000114487; CTA
SPASSQSTPV

SEQ ID NO: 47415 - protein, 10 aa, Homo sapiens
  Table A; Target 47415; HLA-B*56:01; MORC1; ENSG00000114487; CTA
SPASSQSTPV

SEQ ID NO: 47416 - protein, 10 aa, Homo sapiens
  Table A; Target 47416; HLA-C*07:02; MORC1; ENSG00000114487; CTA
SPASSQSTPV

SEQ ID NO: 47417 - protein, 11 aa, Homo sapiens
  Table A; Target 47417; HLA-A*11:01; MORC1; ENSG00000114487; CTA
SPASSQSTPVK

SEQ ID NO: 47418 - protein, 11 aa, Homo sapiens
  Table A; Target 47418; HLA-C*07:06; MORC1; ENSG00000114487; CTA
SPASSQSTPVK

SEQ ID NO: 47419 - protein, 9 aa, Homo sapiens
  Table A; Target 47419; HLA-B*35:03; MORC1; ENSG00000114487; CTA
SPEEASDII

SEQ ID NO: 47420 - protein, 10 aa, Homo sapiens
  Table A; Target 47420; HLA-B*35:01; MORC1; ENSG00000114487; CTA
SPEEASDIIY

SEQ ID NO: 47421 - protein, 10 aa, Homo sapiens
  Table A; Target 47421; HLA-B*35:03; MORC1; ENSG00000114487; CTA
SPEEASDIIY

SEQ ID NO: 47422 - protein, 10 aa, Homo sapiens
  Table A; Target 47422; HLA-B*55:01; MORC1; ENSG00000114487; CTA
SPEEASDIIY

SEQ ID NO: 47423 - protein, 10 aa, Homo sapiens
  Table A; Target 47423; HLA-C*03:03; MORC1; ENSG00000114487; CTA
SPEEASDIIY

SEQ ID NO: 47424 - protein, 11 aa, Homo sapiens
  Table A; Target 47424; HLA-B*35:01; MORC1; ENSG00000114487; CTA
SPEEASDIIYF

SEQ ID NO: 47425 - protein, 11 aa, Homo sapiens
  Table A; Target 47425; HLA-B*35:03; MORC1; ENSG00000114487; CTA
SPEEASDIIYF

SEQ ID NO: 47426 - protein, 11 aa, Homo sapiens
  Table A; Target 47426; HLA-B*55:01; MORC1; ENSG00000114487; CTA
SPEEASDIIYF

SEQ ID NO: 47427 - protein, 9 aa, Homo sapiens
  Table A; Target 47427; HLA-B*08:01; MORC1; ENSG00000114487; CTA
SPFKTEAEL

SEQ ID NO: 47428 - protein, 9 aa, Homo sapiens
  Table A; Target 47428; HLA-B*35:01; MORC1; ENSG00000114487; CTA
SPFKTEAEL

SEQ ID NO: 47429 - protein, 9 aa, Homo sapiens
  Table A; Target 47429; HLA-B*35:03; MORC1; ENSG00000114487; CTA
SPFKTEAEL

SEQ ID NO: 47430 - protein, 9 aa, Homo sapiens
  Table A; Target 47430; HLA-B*39:01; MORC1; ENSG00000114487; CTA
SPFKTEAEL

SEQ ID NO: 47431 - protein, 9 aa, Homo sapiens
  Table A; Target 47431; HLA-B*40:01; MORC1; ENSG00000114487; CTA
SPFKTEAEL

SEQ ID NO: 47432 - protein, 9 aa, Homo sapiens
  Table A; Target 47432; HLA-B*51:01; MORC1; ENSG00000114487; CTA
SPFKTEAEL

SEQ ID NO: 47433 - protein, 9 aa, Homo sapiens
  Table A; Target 47433; HLA-B*55:01; MORC1; ENSG00000114487; CTA
SPFKTEAEL

SEQ ID NO: 47434 - protein, 9 aa, Homo sapiens
  Table A; Target 47434; HLA-B*56:01; MORC1; ENSG00000114487; CTA
SPFKTEAEL

SEQ ID NO: 47435 - protein, 9 aa, Homo sapiens
  Table A; Target 47435; HLA-C*03:03; MORC1; ENSG00000114487; CTA
SPFKTEAEL

SEQ ID NO: 47436 - protein, 9 aa, Homo sapiens
  Table A; Target 47436; HLA-C*05:01; MORC1; ENSG00000114487; CTA
SPFKTEAEL

SEQ ID NO: 47437 - protein, 9 aa, Homo sapiens
  Table A; Target 47437; HLA-C*07:02; MORC1; ENSG00000114487; CTA
SPFKTEAEL

SEQ ID NO: 47438 - protein, 10 aa, Homo sapiens
  Table A; Target 47438; HLA-B*07:02; MORC1; ENSG00000114487; CTA
SPFKTEAELM

SEQ ID NO: 47439 - protein, 10 aa, Homo sapiens
  Table A; Target 47439; HLA-B*35:01; MORC1; ENSG00000114487; CTA
SPFKTEAELM

SEQ ID NO: 47440 - protein, 10 aa, Homo sapiens
  Table A; Target 47440; HLA-B*35:03; MORC1; ENSG00000114487; CTA
SPFKTEAELM

SEQ ID NO: 47441 - protein, 11 aa, Homo sapiens
  Table A; Target 47441; HLA-B*07:02; MORC1; ENSG00000114487; CTA
SPSKNEKEKQL

SEQ ID NO: 47442 - protein, 11 aa, Homo sapiens
  Table A; Target 47442; HLA-C*07:02; MORC1; ENSG00000114487; CTA
SPSKNEKEKQL

SEQ ID NO: 47443 - protein, 8 aa, Homo sapiens
  Table A; Target 47443; HLA-A*30:02; MORC1; ENSG00000114487; CTA
SQAGMFIY

SEQ ID NO: 47444 - protein, 8 aa, Homo sapiens
  Table A; Target 47444; HLA-B*15:01; MORC1; ENSG00000114487; CTA
SQAGMFIY

SEQ ID NO: 47445 - protein, 8 aa, Homo sapiens
  Table A; Target 47445; HLA-B*15:03; MORC1; ENSG00000114487; CTA
SQAGMFIY

SEQ ID NO: 47446 - protein, 8 aa, Homo sapiens
  Table A; Target 47446; HLA-C*07:04; MORC1; ENSG00000114487; CTA
SQAGMFIY

SEQ ID NO: 47447 - protein, 9 aa, Homo sapiens
  Table A; Target 47447; HLA-B*27:05; MORC1; ENSG00000114487; CTA
SQAGMFIYS

SEQ ID NO: 47448 - protein, 9 aa, Homo sapiens
  Table A; Target 47448; HLA-A*02:01; MORC1; ENSG00000114487; CTA
SQIANITTV

SEQ ID NO: 47449 - protein, 9 aa, Homo sapiens
  Table A; Target 47449; HLA-A*02:03; MORC1; ENSG00000114487; CTA
SQIANITTV

SEQ ID NO: 47450 - protein, 9 aa, Homo sapiens
  Table A; Target 47450; HLA-A*02:04; MORC1; ENSG00000114487; CTA
SQIANITTV

SEQ ID NO: 47451 - protein, 9 aa, Homo sapiens
  Table A; Target 47451; HLA-A*30:01; MORC1; ENSG00000114487; CTA
SQIANITTV

SEQ ID NO: 47452 - protein, 9 aa, Homo sapiens
  Table A; Target 47452; HLA-A*32:01; MORC1; ENSG00000114487; CTA
SQIANITTV

SEQ ID NO: 47453 - protein, 9 aa, Homo sapiens
  Table A; Target 47453; HLA-B*13:02; MORC1; ENSG00000114487; CTA
SQIANITTV

SEQ ID NO: 47454 - protein, 9 aa, Homo sapiens
  Table A; Target 47454; HLA-B*15:01; MORC1; ENSG00000114487; CTA
SQIANITTV

SEQ ID NO: 47455 - protein, 9 aa, Homo sapiens
  Table A; Target 47455; HLA-B*15:03; MORC1; ENSG00000114487; CTA
SQIANITTV

SEQ ID NO: 47456 - protein, 9 aa, Homo sapiens
  Table A; Target 47456; HLA-B*39:01; MORC1; ENSG00000114487; CTA
SQIANITTV

SEQ ID NO: 47457 - protein, 9 aa, Homo sapiens
  Table A; Target 47457; HLA-B*40:02; MORC1; ENSG00000114487; CTA
SQIANITTV

SEQ ID NO: 47458 - protein, 9 aa, Homo sapiens
  Table A; Target 47458; HLA-B*46:01; MORC1; ENSG00000114487; CTA
SQIANITTV

SEQ ID NO: 47459 - protein, 9 aa, Homo sapiens
  Table A; Target 47459; HLA-B*49:01; MORC1; ENSG00000114487; CTA
SQIANITTV

SEQ ID NO: 47460 - protein, 9 aa, Homo sapiens
  Table A; Target 47460; HLA-B*55:01; MORC1; ENSG00000114487; CTA
SQIANITTV

SEQ ID NO: 47461 - protein, 9 aa, Homo sapiens
  Table A; Target 47461; HLA-C*02:02; MORC1; ENSG00000114487; CTA
SQIANITTV

SEQ ID NO: 47462 - protein, 9 aa, Homo sapiens
  Table A; Target 47462; HLA-C*06:02; MORC1; ENSG00000114487; CTA
SQIANITTV

SEQ ID NO: 47463 - protein, 10 aa, Homo sapiens
  Table A; Target 47463; HLA-A*25:01; MORC1; ENSG00000114487; CTA
SQIANITTVW

SEQ ID NO: 47464 - protein, 10 aa, Homo sapiens
  Table A; Target 47464; HLA-A*26:01; MORC1; ENSG00000114487; CTA
SQIANITTVW

SEQ ID NO: 47465 - protein, 10 aa, Homo sapiens
  Table A; Target 47465; HLA-A*32:01; MORC1; ENSG00000114487; CTA
SQIANITTVW

SEQ ID NO: 47466 - protein, 10 aa, Homo sapiens
  Table A; Target 47466; HLA-B*15:01; MORC1; ENSG00000114487; CTA
SQIANITTVW

SEQ ID NO: 47467 - protein, 10 aa, Homo sapiens
  Table A; Target 47467; HLA-B*27:02; MORC1; ENSG00000114487; CTA
SQIANITTVW

SEQ ID NO: 47468 - protein, 10 aa, Homo sapiens
  Table A; Target 47468; HLA-B*44:02; MORC1; ENSG00000114487; CTA
SQIANITTVW

SEQ ID NO: 47469 - protein, 10 aa, Homo sapiens
  Table A; Target 47469; HLA-B*44:03; MORC1; ENSG00000114487; CTA
SQIANITTVW

SEQ ID NO: 47470 - protein, 10 aa, Homo sapiens
  Table A; Target 47470; HLA-B*57:01; MORC1; ENSG00000114487; CTA
SQIANITTVW

SEQ ID NO: 47471 - protein, 10 aa, Homo sapiens
  Table A; Target 47471; HLA-B*58:01; MORC1; ENSG00000114487; CTA
SQIANITTVW

SEQ ID NO: 47472 - protein, 10 aa, Homo sapiens
  Table A; Target 47472; HLA-C*16:04; MORC1; ENSG00000114487; CTA
SQIANITTVW

SEQ ID NO: 47473 - protein, 9 aa, Homo sapiens
  Table A; Target 47473; HLA-B*13:02; MORC1; ENSG00000114487; CTA
SQQQRIPVA

SEQ ID NO: 47474 - protein, 9 aa, Homo sapiens
  Table A; Target 47474; HLA-A*02:03; MORC1; ENSG00000114487; CTA
SQRSQIANI

SEQ ID NO: 47475 - protein, 9 aa, Homo sapiens
  Table A; Target 47475; HLA-B*13:02; MORC1; ENSG00000114487; CTA
SQRSQIANI

SEQ ID NO: 47476 - protein, 10 aa, Homo sapiens
  Table A; Target 47476; HLA-B*13:02; MORC1; ENSG00000114487; CTA
SQSTPVKETV

SEQ ID NO: 47477 - protein, 11 aa, Homo sapiens
  Table A; Target 47477; HLA-C*07:06; MORC1; ENSG00000114487; CTA
SQSTPVKETVR

SEQ ID NO: 47478 - protein, 9 aa, Homo sapiens
  Table A; Target 47478; HLA-A*33:03; MORC1; ENSG00000114487; CTA
SSAKDVLQR

SEQ ID NO: 47479 - protein, 9 aa, Homo sapiens
  Table A; Target 47479; HLA-A*68:01; MORC1; ENSG00000114487; CTA
SSAKDVLQR

SEQ ID NO: 47480 - protein, 9 aa, Homo sapiens
  Table A; Target 47480; HLA-C*07:06; MORC1; ENSG00000114487; CTA
SSAKDVLQR

SEQ ID NO: 47481 - protein, 9 aa, Homo sapiens
  Table A; Target 47481; HLA-A*11:01; MORC1; ENSG00000114487; CTA
SSFELSASR

SEQ ID NO: 47482 - protein, 9 aa, Homo sapiens
  Table A; Target 47482; HLA-A*31:01; MORC1; ENSG00000114487; CTA
SSFELSASR

SEQ ID NO: 47483 - protein, 9 aa, Homo sapiens
  Table A; Target 47483; HLA-A*33:01; MORC1; ENSG00000114487; CTA
SSFELSASR

SEQ ID NO: 47484 - protein, 9 aa, Homo sapiens
  Table A; Target 47484; HLA-A*33:03; MORC1; ENSG00000114487; CTA
SSFELSASR

SEQ ID NO: 47485 - protein, 9 aa, Homo sapiens
  Table A; Target 47485; HLA-A*68:01; MORC1; ENSG00000114487; CTA
SSFELSASR

SEQ ID NO: 47486 - protein, 9 aa, Homo sapiens
  Table A; Target 47486; HLA-B*27:05; MORC1; ENSG00000114487; CTA
SSFELSASR

SEQ ID NO: 47487 - protein, 9 aa, Homo sapiens
  Table A; Target 47487; HLA-B*57:01; MORC1; ENSG00000114487; CTA
SSFELSASR

SEQ ID NO: 47488 - protein, 9 aa, Homo sapiens
  Table A; Target 47488; HLA-C*07:06; MORC1; ENSG00000114487; CTA
SSFELSASR

SEQ ID NO: 47489 - protein, 10 aa, Homo sapiens
  Table A; Target 47489; HLA-A*31:01; MORC1; ENSG00000114487; CTA
SSFELSASRR

SEQ ID NO: 47490 - protein, 10 aa, Homo sapiens
  Table A; Target 47490; HLA-A*68:01; MORC1; ENSG00000114487; CTA
SSFELSASRR

SEQ ID NO: 47491 - protein, 10 aa, Homo sapiens
  Table A; Target 47491; HLA-C*07:06; MORC1; ENSG00000114487; CTA
SSFELSASRR

SEQ ID NO: 47492 - protein, 9 aa, Homo sapiens
  Table A; Target 47492; HLA-C*01:02; MORC1; ENSG00000114487; CTA
SSPASSQST

SEQ ID NO: 47493 - protein, 10 aa, Homo sapiens
  Table A; Target 47493; HLA-C*16:01; MORC1; ENSG00000114487; CTA
SSTNYQEKEF

SEQ ID NO: 47494 - protein, 9 aa, Homo sapiens
  Table A; Target 47494; HLA-A*11:01; MORC1; ENSG00000114487; CTA
STCLTSAHK

SEQ ID NO: 47495 - protein, 10 aa, Homo sapiens
  Table A; Target 47495; HLA-A*03:01; MORC1; ENSG00000114487; CTA
STISPSKNEK

SEQ ID NO: 47496 - protein, 10 aa, Homo sapiens
  Table A; Target 47496; HLA-A*03:02; MORC1; ENSG00000114487; CTA
STISPSKNEK

SEQ ID NO: 47497 - protein, 10 aa, Homo sapiens
  Table A; Target 47497; HLA-A*11:01; MORC1; ENSG00000114487; CTA
STISPSKNEK

SEQ ID NO: 47498 - protein, 10 aa, Homo sapiens
  Table A; Target 47498; HLA-A*68:01; MORC1; ENSG00000114487; CTA
STISPSKNEK

SEQ ID NO: 47499 - protein, 10 aa, Homo sapiens
  Table A; Target 47499; HLA-C*07:06; MORC1; ENSG00000114487; CTA
STISPSKNEK

SEQ ID NO: 47500 - protein, 9 aa, Homo sapiens
  Table A; Target 47500; HLA-A*01:01; MORC1; ENSG00000114487; CTA
STLKFIGQY

SEQ ID NO: 47501 - protein, 9 aa, Homo sapiens
  Table A; Target 47501; HLA-A*03:01; MORC1; ENSG00000114487; CTA
STLKFIGQY

SEQ ID NO: 47502 - protein, 9 aa, Homo sapiens
  Table A; Target 47502; HLA-A*11:01; MORC1; ENSG00000114487; CTA
STLKFIGQY

SEQ ID NO: 47503 - protein, 9 aa, Homo sapiens
  Table A; Target 47503; HLA-A*25:01; MORC1; ENSG00000114487; CTA
STLKFIGQY

SEQ ID NO: 47504 - protein, 9 aa, Homo sapiens
  Table A; Target 47504; HLA-A*26:01; MORC1; ENSG00000114487; CTA
STLKFIGQY

SEQ ID NO: 47505 - protein, 9 aa, Homo sapiens
  Table A; Target 47505; HLA-A*29:02; MORC1; ENSG00000114487; CTA
STLKFIGQY

SEQ ID NO: 47506 - protein, 9 aa, Homo sapiens
  Table A; Target 47506; HLA-A*30:02; MORC1; ENSG00000114487; CTA
STLKFIGQY

SEQ ID NO: 47507 - protein, 9 aa, Homo sapiens
  Table A; Target 47507; HLA-A*32:01; MORC1; ENSG00000114487; CTA
STLKFIGQY

SEQ ID NO: 47508 - protein, 9 aa, Homo sapiens
  Table A; Target 47508; HLA-B*44:03; MORC1; ENSG00000114487; CTA
STLKFIGQY

SEQ ID NO: 47509 - protein, 9 aa, Homo sapiens
  Table A; Target 47509; HLA-B*57:01; MORC1; ENSG00000114487; CTA
STLKFIGQY

SEQ ID NO: 47510 - protein, 9 aa, Homo sapiens
  Table A; Target 47510; HLA-B*58:01; MORC1; ENSG00000114487; CTA
STLKFIGQY

SEQ ID NO: 47511 - protein, 10 aa, Homo sapiens
  Table A; Target 47511; HLA-A*11:01; MORC1; ENSG00000114487; CTA
STPVKETVRK

SEQ ID NO: 47512 - protein, 8 aa, Homo sapiens
  Table A; Target 47512; HLA-B*57:01; MORC1; ENSG00000114487; CTA
STTHSFLF

SEQ ID NO: 47513 - protein, 8 aa, Homo sapiens
  Table A; Target 47513; HLA-A*31:01; MORC1; ENSG00000114487; CTA
SVIKYQNR

SEQ ID NO: 47514 - protein, 9 aa, Homo sapiens
  Table A; Target 47514; HLA-A*24:02; MORC1; ENSG00000114487; CTA
SVTDDPQKF

SEQ ID NO: 47515 - protein, 9 aa, Homo sapiens
  Table A; Target 47515; HLA-A*25:01; MORC1; ENSG00000114487; CTA
SVTDDPQKF

SEQ ID NO: 47516 - protein, 9 aa, Homo sapiens
  Table A; Target 47516; HLA-A*26:01; MORC1; ENSG00000114487; CTA
SVTDDPQKF

SEQ ID NO: 47517 - protein, 9 aa, Homo sapiens
  Table A; Target 47517; HLA-A*29:02; MORC1; ENSG00000114487; CTA
SVTDDPQKF

SEQ ID NO: 47518 - protein, 9 aa, Homo sapiens
  Table A; Target 47518; HLA-A*32:01; MORC1; ENSG00000114487; CTA
SVTDDPQKF

SEQ ID NO: 47519 - protein, 9 aa, Homo sapiens
  Table A; Target 47519; HLA-A*68:01; MORC1; ENSG00000114487; CTA
SVTDDPQKF

SEQ ID NO: 47520 - protein, 9 aa, Homo sapiens
  Table A; Target 47520; HLA-B*38:01; MORC1; ENSG00000114487; CTA
SVTDDPQKF

SEQ ID NO: 47521 - protein, 9 aa, Homo sapiens
  Table A; Target 47521; HLA-B*58:01; MORC1; ENSG00000114487; CTA
SVTDDPQKF

SEQ ID NO: 47522 - protein, 9 aa, Homo sapiens
  Table A; Target 47522; HLA-C*02:02; MORC1; ENSG00000114487; CTA
SVTDDPQKF

SEQ ID NO: 47523 - protein, 9 aa, Homo sapiens
  Table A; Target 47523; HLA-C*05:01; MORC1; ENSG00000114487; CTA
SVTDDPQKF

SEQ ID NO: 47524 - protein, 9 aa, Homo sapiens
  Table A; Target 47524; HLA-C*07:06; MORC1; ENSG00000114487; CTA
SVTDDPQKF

SEQ ID NO: 47525 - protein, 9 aa, Homo sapiens
  Table A; Target 47525; HLA-A*29:02; MORC1; ENSG00000114487; CTA
TARTLSLFY

SEQ ID NO: 47526 - protein, 9 aa, Homo sapiens
  Table A; Target 47526; HLA-B*37:01; MORC1; ENSG00000114487; CTA
TDDPQKFAM

SEQ ID NO: 47527 - protein, 8 aa, Homo sapiens
  Table A; Target 47527; HLA-B*37:01; MORC1; ENSG00000114487; CTA
TDKEDILM

SEQ ID NO: 47528 - protein, 8 aa, Homo sapiens
  Table A; Target 47528; HLA-C*07:04; MORC1; ENSG00000114487; CTA
TDKEDILM

SEQ ID NO: 47529 - protein, 8 aa, Homo sapiens
  Table A; Target 47529; HLA-B*37:01; MORC1; ENSG00000114487; CTA
TDSDVEYI

SEQ ID NO: 47530 - protein, 10 aa, Homo sapiens
  Table A; Target 47530; HLA-B*27:02; MORC1; ENSG00000114487; CTA
TDTYLEALLK

SEQ ID NO: 47531 - protein, 9 aa, Homo sapiens
  Table A; Target 47531; HLA-A*25:01; MORC1; ENSG00000114487; CTA
TEAELMQQF

SEQ ID NO: 47532 - protein, 9 aa, Homo sapiens
  Table A; Target 47532; HLA-A*30:01; MORC1; ENSG00000114487; CTA
TEAELMQQF

SEQ ID NO: 47533 - protein, 9 aa, Homo sapiens
  Table A; Target 47533; HLA-B*18:01; MORC1; ENSG00000114487; CTA
TEAELMQQF

SEQ ID NO: 47534 - protein, 9 aa, Homo sapiens
  Table A; Target 47534; HLA-B*27:02; MORC1; ENSG00000114487; CTA
TEAELMQQF

SEQ ID NO: 47535 - protein, 9 aa, Homo sapiens
  Table A; Target 47535; HLA-B*37:01; MORC1; ENSG00000114487; CTA
TEAELMQQF

SEQ ID NO: 47536 - protein, 9 aa, Homo sapiens
  Table A; Target 47536; HLA-B*38:01; MORC1; ENSG00000114487; CTA
TEAELMQQF

SEQ ID NO: 47537 - protein, 9 aa, Homo sapiens
  Table A; Target 47537; HLA-B*40:01; MORC1; ENSG00000114487; CTA
TEAELMQQF

SEQ ID NO: 47538 - protein, 9 aa, Homo sapiens
  Table A; Target 47538; HLA-B*44:02; MORC1; ENSG00000114487; CTA
TEAELMQQF

SEQ ID NO: 47539 - protein, 9 aa, Homo sapiens
  Table A; Target 47539; HLA-B*49:01; MORC1; ENSG00000114487; CTA
TEAELMQQF

SEQ ID NO: 47540 - protein, 9 aa, Homo sapiens
  Table A; Target 47540; HLA-C*02:02; MORC1; ENSG00000114487; CTA
TEAELMQQF

SEQ ID NO: 47541 - protein, 9 aa, Homo sapiens
  Table A; Target 47541; HLA-C*16:04; MORC1; ENSG00000114487; CTA
TEAELMQQF

SEQ ID NO: 47542 - protein, 10 aa, Homo sapiens
  Table A; Target 47542; HLA-B*08:01; MORC1; ENSG00000114487; CTA
TGINNRNLTL

SEQ ID NO: 47543 - protein, 10 aa, Homo sapiens
  Table A; Target 47543; HLA-C*16:01; MORC1; ENSG00000114487; CTA
TGINNRNLTL

SEQ ID NO: 47544 - protein, 10 aa, Homo sapiens
  Table A; Target 47544; HLA-C*16:02; MORC1; ENSG00000114487; CTA
TGINNRNLTL

SEQ ID NO: 47545 - protein, 9 aa, Homo sapiens
  Table A; Target 47545; HLA-A*03:02; MORC1; ENSG00000114487; CTA
TISPSKNEK

SEQ ID NO: 47546 - protein, 9 aa, Homo sapiens
  Table A; Target 47546; HLA-A*29:02; MORC1; ENSG00000114487; CTA
TLFCNEFGY

SEQ ID NO: 47547 - protein, 9 aa, Homo sapiens
  Table A; Target 47547; HLA-A*30:02; MORC1; ENSG00000114487; CTA
TLFCNEFGY

SEQ ID NO: 47548 - protein, 8 aa, Homo sapiens
  Table A; Target 47548; HLA-A*30:02; MORC1; ENSG00000114487; CTA
TLKFIGQY

SEQ ID NO: 47549 - protein, 8 aa, Homo sapiens
  Table A; Target 47549; HLA-B*15:01; MORC1; ENSG00000114487; CTA
TLKFIGQY

SEQ ID NO: 47550 - protein, 8 aa, Homo sapiens
  Table A; Target 47550; HLA-B*46:01; MORC1; ENSG00000114487; CTA
TLKFIGQY

SEQ ID NO: 47551 - protein, 8 aa, Homo sapiens
  Table A; Target 47551; HLA-A*02:04; MORC1; ENSG00000114487; CTA
TLLVIYNL

SEQ ID NO: 47552 - protein, 10 aa, Homo sapiens
  Table A; Target 47552; HLA-A*02:04; MORC1; ENSG00000114487; CTA
TLLVIYNLKL

SEQ ID NO: 47553 - protein, 9 aa, Homo sapiens
  Table A; Target 47553; HLA-A*03:01; MORC1; ENSG00000114487; CTA
TMSTISPSK

SEQ ID NO: 47554 - protein, 9 aa, Homo sapiens
  Table A; Target 47554; HLA-A*03:02; MORC1; ENSG00000114487; CTA
TMSTISPSK

SEQ ID NO: 47555 - protein, 9 aa, Homo sapiens
  Table A; Target 47555; HLA-A*11:01; MORC1; ENSG00000114487; CTA
TMSTISPSK

SEQ ID NO: 47556 - protein, 10 aa, Homo sapiens
  Table A; Target 47556; HLA-B*07:02; MORC1; ENSG00000114487; CTA
TPVKETVRKL

SEQ ID NO: 47557 - protein, 8 aa, Homo sapiens
  Table A; Target 47557; HLA-C*05:01; MORC1; ENSG00000114487; CTA
TSDSDIIL

SEQ ID NO: 47558 - protein, 9 aa, Homo sapiens
  Table A; Target 47558; HLA-A*01:01; MORC1; ENSG00000114487; CTA
TSDSDIILV

SEQ ID NO: 47559 - protein, 9 aa, Homo sapiens
  Table A; Target 47559; HLA-C*05:01; MORC1; ENSG00000114487; CTA
TSDSDIILV

SEQ ID NO: 47560 - protein, 8 aa, Homo sapiens
  Table A; Target 47560; HLA-C*16:01; MORC1; ENSG00000114487; CTA
TSSFKGAF

SEQ ID NO: 47561 - protein, 9 aa, Homo sapiens
  Table A; Target 47561; HLA-B*57:01; MORC1; ENSG00000114487; CTA
TSVLYFNPW

SEQ ID NO: 47562 - protein, 9 aa, Homo sapiens
  Table A; Target 47562; HLA-A*02:01; MORC1; ENSG00000114487; CTA
VALPENVKL

SEQ ID NO: 47563 - protein, 9 aa, Homo sapiens
  Table A; Target 47563; HLA-A*23:01; MORC1; ENSG00000114487; CTA
VALPENVKL

SEQ ID NO: 47564 - protein, 9 aa, Homo sapiens
  Table A; Target 47564; HLA-B*35:03; MORC1; ENSG00000114487; CTA
VALPENVKL

SEQ ID NO: 47565 - protein, 9 aa, Homo sapiens
  Table A; Target 47565; HLA-B*40:01; MORC1; ENSG00000114487; CTA
VALPENVKL

SEQ ID NO: 47566 - protein, 9 aa, Homo sapiens
  Table A; Target 47566; HLA-B*58:01; MORC1; ENSG00000114487; CTA
VALPENVKL

SEQ ID NO: 47567 - protein, 9 aa, Homo sapiens
  Table A; Target 47567; HLA-C*02:02; MORC1; ENSG00000114487; CTA
VALPENVKL

SEQ ID NO: 47568 - protein, 9 aa, Homo sapiens
  Table A; Target 47568; HLA-C*03:03; MORC1; ENSG00000114487; CTA
VALPENVKL

SEQ ID NO: 47569 - protein, 9 aa, Homo sapiens
  Table A; Target 47569; HLA-C*03:04; MORC1; ENSG00000114487; CTA
VALPENVKL

SEQ ID NO: 47570 - protein, 9 aa, Homo sapiens
  Table A; Target 47570; HLA-C*05:01; MORC1; ENSG00000114487; CTA
VALPENVKL

SEQ ID NO: 47571 - protein, 9 aa, Homo sapiens
  Table A; Target 47571; HLA-C*07:04; MORC1; ENSG00000114487; CTA
VALPENVKL

SEQ ID NO: 47572 - protein, 9 aa, Homo sapiens
  Table A; Target 47572; HLA-C*16:01; MORC1; ENSG00000114487; CTA
VALPENVKL

SEQ ID NO: 47573 - protein, 9 aa, Homo sapiens
  Table A; Target 47573; HLA-C*03:03; MORC1; ENSG00000114487; CTA
VASSPASSQ

SEQ ID NO: 47574 - protein, 8 aa, Homo sapiens
  Table A; Target 47574; HLA-B*37:01; MORC1; ENSG00000114487; CTA
VEAKQKNL

SEQ ID NO: 47575 - protein, 8 aa, Homo sapiens
  Table A; Target 47575; HLA-B*18:01; MORC1; ENSG00000114487; CTA
VEKPLNSF

SEQ ID NO: 47576 - protein, 8 aa, Homo sapiens
  Table A; Target 47576; HLA-B*37:01; MORC1; ENSG00000114487; CTA
VEKPLNSF

SEQ ID NO: 47577 - protein, 8 aa, Homo sapiens
  Table A; Target 47577; HLA-B*46:01; MORC1; ENSG00000114487; CTA
VEKPLNSF

SEQ ID NO: 47578 - protein, 10 aa, Homo sapiens
  Table A; Target 47578; HLA-A*29:02; MORC1; ENSG00000114487; CTA
VEKPLNSFQY

SEQ ID NO: 47579 - protein, 10 aa, Homo sapiens
  Table A; Target 47579; HLA-A*30:02; MORC1; ENSG00000114487; CTA
VEKPLNSFQY

SEQ ID NO: 47580 - protein, 10 aa, Homo sapiens
  Table A; Target 47580; HLA-B*18:01; MORC1; ENSG00000114487; CTA
VEKPLNSFQY

SEQ ID NO: 47581 - protein, 10 aa, Homo sapiens
  Table A; Target 47581; HLA-B*27:02; MORC1; ENSG00000114487; CTA
VEKPLNSFQY

SEQ ID NO: 47582 - protein, 10 aa, Homo sapiens
  Table A; Target 47582; HLA-B*44:02; MORC1; ENSG00000114487; CTA
VEKPLNSFQY

SEQ ID NO: 47583 - protein, 10 aa, Homo sapiens
  Table A; Target 47583; HLA-B*44:03; MORC1; ENSG00000114487; CTA
VEKPLNSFQY

SEQ ID NO: 47584 - protein, 10 aa, Homo sapiens
  Table A; Target 47584; HLA-C*16:04; MORC1; ENSG00000114487; CTA
VEKPLNSFQY

SEQ ID NO: 47585 - protein, 9 aa, Homo sapiens
  Table A; Target 47585; HLA-A*30:01; MORC1; ENSG00000114487; CTA
VENRSQAGM

SEQ ID NO: 47586 - protein, 9 aa, Homo sapiens
  Table A; Target 47586; HLA-B*37:01; MORC1; ENSG00000114487; CTA
VENRSQAGM

SEQ ID NO: 47587 - protein, 9 aa, Homo sapiens
  Table A; Target 47587; HLA-B*40:01; MORC1; ENSG00000114487; CTA
VENRSQAGM

SEQ ID NO: 47588 - protein, 9 aa, Homo sapiens
  Table A; Target 47588; HLA-B*44:02; MORC1; ENSG00000114487; CTA
VENRSQAGM

SEQ ID NO: 47589 - protein, 9 aa, Homo sapiens
  Table A; Target 47589; HLA-B*44:03; MORC1; ENSG00000114487; CTA
VENRSQAGM

SEQ ID NO: 47590 - protein, 9 aa, Homo sapiens
  Table A; Target 47590; HLA-C*16:04; MORC1; ENSG00000114487; CTA
VENRSQAGM

SEQ ID NO: 47591 - protein, 8 aa, Homo sapiens
  Table A; Target 47591; HLA-B*18:01; MORC1; ENSG00000114487; CTA
VEYISETK

SEQ ID NO: 47592 - protein, 9 aa, Homo sapiens
  Table A; Target 47592; HLA-A*23:01; MORC1; ENSG00000114487; CTA
VEYISETKI

SEQ ID NO: 47593 - protein, 9 aa, Homo sapiens
  Table A; Target 47593; HLA-A*30:01; MORC1; ENSG00000114487; CTA
VEYISETKI

SEQ ID NO: 47594 - protein, 9 aa, Homo sapiens
  Table A; Target 47594; HLA-B*13:02; MORC1; ENSG00000114487; CTA
VEYISETKI

SEQ ID NO: 47595 - protein, 9 aa, Homo sapiens
  Table A; Target 47595; HLA-B*18:01; MORC1; ENSG00000114487; CTA
VEYISETKI

SEQ ID NO: 47596 - protein, 9 aa, Homo sapiens
  Table A; Target 47596; HLA-B*40:01; MORC1; ENSG00000114487; CTA
VEYISETKI

SEQ ID NO: 47597 - protein, 9 aa, Homo sapiens
  Table A; Target 47597; HLA-B*40:02; MORC1; ENSG00000114487; CTA
VEYISETKI

SEQ ID NO: 47598 - protein, 9 aa, Homo sapiens
  Table A; Target 47598; HLA-B*44:02; MORC1; ENSG00000114487; CTA
VEYISETKI

SEQ ID NO: 47599 - protein, 9 aa, Homo sapiens
  Table A; Target 47599; HLA-B*44:03; MORC1; ENSG00000114487; CTA
VEYISETKI

SEQ ID NO: 47600 - protein, 9 aa, Homo sapiens
  Table A; Target 47600; HLA-B*49:01; MORC1; ENSG00000114487; CTA
VEYISETKI

SEQ ID NO: 47601 - protein, 9 aa, Homo sapiens
  Table A; Target 47601; HLA-C*16:04; MORC1; ENSG00000114487; CTA
VEYISETKI

SEQ ID NO: 47602 - protein, 10 aa, Homo sapiens
  Table A; Target 47602; HLA-A*30:01; MORC1; ENSG00000114487; CTA
VEYISETKIM

SEQ ID NO: 47603 - protein, 10 aa, Homo sapiens
  Table A; Target 47603; HLA-B*49:01; MORC1; ENSG00000114487; CTA
VEYISETKIM

SEQ ID NO: 47604 - protein, 9 aa, Homo sapiens
  Table A; Target 47604; HLA-C*04:01; MORC1; ENSG00000114487; CTA
VFSVDNEKL

SEQ ID NO: 47605 - protein, 8 aa, Homo sapiens
  Table A; Target 47605; HLA-B*08:01; MORC1; ENSG00000114487; CTA
VIKYQNRL

SEQ ID NO: 47606 - protein, 9 aa, Homo sapiens
  Table A; Target 47606; HLA-B*08:01; MORC1; ENSG00000114487; CTA
VIYGKCGTL

SEQ ID NO: 47607 - protein, 9 aa, Homo sapiens
  Table A; Target 47607; HLA-A*02:04; MORC1; ENSG00000114487; CTA
VIYNLKLLL

SEQ ID NO: 47608 - protein, 8 aa, Homo sapiens
  Table A; Target 47608; HLA-A*32:01; MORC1; ENSG00000114487; CTA
VLPSSTNY

SEQ ID NO: 47609 - protein, 8 aa, Homo sapiens
  Table A; Target 47609; HLA-B*15:01; MORC1; ENSG00000114487; CTA
VLPSSTNY

SEQ ID NO: 47610 - protein, 8 aa, Homo sapiens
  Table A; Target 47610; HLA-B*15:03; MORC1; ENSG00000114487; CTA
VLPSSTNY

SEQ ID NO: 47611 - protein, 8 aa, Homo sapiens
  Table A; Target 47611; HLA-B*46:01; MORC1; ENSG00000114487; CTA
VLPSSTNY

SEQ ID NO: 47612 - protein, 9 aa, Homo sapiens
  Table A; Target 47612; HLA-A*29:02; MORC1; ENSG00000114487; CTA
VMGQYLVQY

SEQ ID NO: 47613 - protein, 9 aa, Homo sapiens
  Table A; Target 47613; HLA-A*30:02; MORC1; ENSG00000114487; CTA
VMGQYLVQY

SEQ ID NO: 47614 - protein, 9 aa, Homo sapiens
  Table A; Target 47614; HLA-B*15:01; MORC1; ENSG00000114487; CTA
VMGQYLVQY

SEQ ID NO: 47615 - protein, 9 aa, Homo sapiens
  Table A; Target 47615; HLA-B*15:03; MORC1; ENSG00000114487; CTA
VMGQYLVQY

SEQ ID NO: 47616 - protein, 9 aa, Homo sapiens
  Table A; Target 47616; HLA-B*46:01; MORC1; ENSG00000114487; CTA
VMGQYLVQY

SEQ ID NO: 47617 - protein, 9 aa, Homo sapiens
  Table A; Target 47617; HLA-C*07:04; MORC1; ENSG00000114487; CTA
VMGQYLVQY

SEQ ID NO: 47618 - protein, 10 aa, Homo sapiens
  Table A; Target 47618; HLA-A*33:01; MORC1; ENSG00000114487; CTA
VNLSSGHIAR

SEQ ID NO: 47619 - protein, 10 aa, Homo sapiens
  Table A; Target 47619; HLA-A*33:03; MORC1; ENSG00000114487; CTA
VNLSSGHIAR

SEQ ID NO: 47620 - protein, 8 aa, Homo sapiens
  Table A; Target 47620; HLA-B*35:01; MORC1; ENSG00000114487; CTA
VPMEDVNL

SEQ ID NO: 47621 - protein, 8 aa, Homo sapiens
  Table A; Target 47621; HLA-B*35:03; MORC1; ENSG00000114487; CTA
VPMEDVNL

SEQ ID NO: 47622 - protein, 8 aa, Homo sapiens
  Table A; Target 47622; HLA-B*55:01; MORC1; ENSG00000114487; CTA
VPMEDVNL

SEQ ID NO: 47623 - protein, 11 aa, Homo sapiens
  Table A; Target 47623; HLA-B*56:01; MORC1; ENSG00000114487; CTA
VPMEDVNLSSG

SEQ ID NO: 47624 - protein, 8 aa, Homo sapiens
  Table A; Target 47624; HLA-B*51:01; MORC1; ENSG00000114487; CTA
VPMPSWLI

SEQ ID NO: 47625 - protein, 9 aa, Homo sapiens
  Table A; Target 47625; HLA-A*01:01; MORC1; ENSG00000114487; CTA
VQEYNHLLK

SEQ ID NO: 47626 - protein, 9 aa, Homo sapiens
  Table A; Target 47626; HLA-B*13:02; MORC1; ENSG00000114487; CTA
VQYCKDTGI

SEQ ID NO: 47627 - protein, 9 aa, Homo sapiens
  Table A; Target 47627; HLA-A*31:01; MORC1; ENSG00000114487; CTA
VQYEKKIKR

SEQ ID NO: 47628 - protein, 9 aa, Homo sapiens
  Table A; Target 47628; HLA-A*01:01; MORC1; ENSG00000114487; CTA
VSDKSNTDV

SEQ ID NO: 47629 - protein, 9 aa, Homo sapiens
  Table A; Target 47629; HLA-C*05:01; MORC1; ENSG00000114487; CTA
VSDKSNTDV

SEQ ID NO: 47630 - protein, 11 aa, Homo sapiens
  Table A; Target 47630; HLA-C*05:01; MORC1; ENSG00000114487; CTA
VSDKSNTDVSL

SEQ ID NO: 47631 - protein, 8 aa, Homo sapiens
  Table A; Target 47631; HLA-A*01:01; MORC1; ENSG00000114487; CTA
VTDDPQKF

SEQ ID NO: 47632 - protein, 8 aa, Homo sapiens
  Table A; Target 47632; HLA-A*32:01; MORC1; ENSG00000114487; CTA
VTDDPQKF

SEQ ID NO: 47633 - protein, 8 aa, Homo sapiens
  Table A; Target 47633; HLA-B*39:01; MORC1; ENSG00000114487; CTA
VTDDPQKF

SEQ ID NO: 47634 - protein, 8 aa, Homo sapiens
  Table A; Target 47634; HLA-B*58:01; MORC1; ENSG00000114487; CTA
VTDDPQKF

SEQ ID NO: 47635 - protein, 8 aa, Homo sapiens
  Table A; Target 47635; HLA-C*04:01; MORC1; ENSG00000114487; CTA
VTDDPQKF

SEQ ID NO: 47636 - protein, 8 aa, Homo sapiens
  Table A; Target 47636; HLA-C*07:04; MORC1; ENSG00000114487; CTA
VTDDPQKF

SEQ ID NO: 47637 - protein, 10 aa, Homo sapiens
  Table A; Target 47637; HLA-A*01:01; MORC1; ENSG00000114487; CTA
VTDDPQKFAM

SEQ ID NO: 47638 - protein, 10 aa, Homo sapiens
  Table A; Target 47638; HLA-A*02:07; MORC1; ENSG00000114487; CTA
VTDDPQKFAM

SEQ ID NO: 47639 - protein, 10 aa, Homo sapiens
  Table A; Target 47639; HLA-C*05:01; MORC1; ENSG00000114487; CTA
VTDDPQKFAM

SEQ ID NO: 47640 - protein, 10 aa, Homo sapiens
  Table A; Target 47640; HLA-C*16:01; MORC1; ENSG00000114487; CTA
VTDDPQKFAM

SEQ ID NO: 47641 - protein, 10 aa, Homo sapiens
  Table A; Target 47641; HLA-C*16:02; MORC1; ENSG00000114487; CTA
VTDDPQKFAM

SEQ ID NO: 47642 - protein, 11 aa, Homo sapiens
  Table A; Target 47642; HLA-A*01:01; MORC1; ENSG00000114487; CTA
VTDDPQKFAME

SEQ ID NO: 47643 - protein, 9 aa, Homo sapiens
  Table A; Target 47643; HLA-A*32:01; MORC1; ENSG00000114487; CTA
VTIDARHRL

SEQ ID NO: 47644 - protein, 9 aa, Homo sapiens
  Table A; Target 47644; HLA-A*25:01; MORC1; ENSG00000114487; CTA
VTSSFKGAF

SEQ ID NO: 47645 - protein, 9 aa, Homo sapiens
  Table A; Target 47645; HLA-A*26:01; MORC1; ENSG00000114487; CTA
VTSSFKGAF

SEQ ID NO: 47646 - protein, 9 aa, Homo sapiens
  Table A; Target 47646; HLA-A*30:02; MORC1; ENSG00000114487; CTA
VTSSFKGAF

SEQ ID NO: 47647 - protein, 9 aa, Homo sapiens
  Table A; Target 47647; HLA-A*32:01; MORC1; ENSG00000114487; CTA
VTSSFKGAF

SEQ ID NO: 47648 - protein, 9 aa, Homo sapiens
  Table A; Target 47648; HLA-C*02:02; MORC1; ENSG00000114487; CTA
VTSSFKGAF

SEQ ID NO: 47649 - protein, 9 aa, Homo sapiens
  Table A; Target 47649; HLA-C*16:01; MORC1; ENSG00000114487; CTA
VTSSFKGAF

SEQ ID NO: 47650 - protein, 9 aa, Homo sapiens
  Table A; Target 47650; HLA-C*16:02; MORC1; ENSG00000114487; CTA
VTSSFKGAF

SEQ ID NO: 47651 - protein, 10 aa, Homo sapiens
  Table A; Target 47651; HLA-A*03:01; MORC1; ENSG00000114487; CTA
VTSSFKGAFK

SEQ ID NO: 47652 - protein, 10 aa, Homo sapiens
  Table A; Target 47652; HLA-A*03:02; MORC1; ENSG00000114487; CTA
VTSSFKGAFK

SEQ ID NO: 47653 - protein, 10 aa, Homo sapiens
  Table A; Target 47653; HLA-A*11:01; MORC1; ENSG00000114487; CTA
VTSSFKGAFK

SEQ ID NO: 47654 - protein, 9 aa, Homo sapiens
  Table A; Target 47654; HLA-A*02:07; MORC1; ENSG00000114487; CTA
VVPMPSWLI

SEQ ID NO: 47655 - protein, 8 aa, Homo sapiens
  Table A; Target 47655; HLA-A*25:01; MORC1; ENSG00000114487; CTA
VVVPMPSW

SEQ ID NO: 47656 - protein, 8 aa, Homo sapiens
  Table A; Target 47656; HLA-B*57:01; MORC1; ENSG00000114487; CTA
VVVPMPSW

SEQ ID NO: 47657 - protein, 8 aa, Homo sapiens
  Table A; Target 47657; HLA-B*58:01; MORC1; ENSG00000114487; CTA
VVVPMPSW

SEQ ID NO: 47658 - protein, 10 aa, Homo sapiens
  Table A; Target 47658; HLA-A*31:01; MORC1; ENSG00000114487; CTA
YCKDTGINNR

SEQ ID NO: 47659 - protein, 10 aa, Homo sapiens
  Table A; Target 47659; HLA-A*33:01; MORC1; ENSG00000114487; CTA
YCKDTGINNR

SEQ ID NO: 47660 - protein, 10 aa, Homo sapiens
  Table A; Target 47660; HLA-A*33:03; MORC1; ENSG00000114487; CTA
YCKDTGINNR

SEQ ID NO: 47661 - protein, 10 aa, Homo sapiens
  Table A; Target 47661; HLA-A*68:01; MORC1; ENSG00000114487; CTA
YCKDTGINNR

SEQ ID NO: 47662 - protein, 10 aa, Homo sapiens
  Table A; Target 47662; HLA-C*07:06; MORC1; ENSG00000114487; CTA
YCKDTGINNR

SEQ ID NO: 47663 - protein, 8 aa, Homo sapiens
  Table A; Target 47663; HLA-B*37:01; MORC1; ENSG00000114487; CTA
YDSNTRGI

SEQ ID NO: 47664 - protein, 8 aa, Homo sapiens
  Table A; Target 47664; HLA-A*23:01; MORC1; ENSG00000114487; CTA
YFFPEHQL

SEQ ID NO: 47665 - protein, 9 aa, Homo sapiens
  Table A; Target 47665; HLA-A*24:02; MORC1; ENSG00000114487; CTA
YFNPWMRIF

SEQ ID NO: 47666 - protein, 10 aa, Homo sapiens
  Table A; Target 47666; HLA-C*01:02; MORC1; ENSG00000114487; CTA
YGNGLKSGSM

SEQ ID NO: 47667 - protein, 10 aa, Homo sapiens
  Table A; Target 47667; HLA-C*04:01; MORC1; ENSG00000114487; CTA
YGNGLKSGSM

SEQ ID NO: 47668 - protein, 10 aa, Homo sapiens
  Table A; Target 47668; HLA-C*07:01; MORC1; ENSG00000114487; CTA
YGNGLKSGSM

SEQ ID NO: 47669 - protein, 10 aa, Homo sapiens
  Table A; Target 47669; HLA-C*07:02; MORC1; ENSG00000114487; CTA
YGNGLKSGSM

SEQ ID NO: 47670 - protein, 10 aa, Homo sapiens
  Table A; Target 47670; HLA-C*14:02; MORC1; ENSG00000114487; CTA
YGNGLKSGSM

SEQ ID NO: 47671 - protein, 8 aa, Homo sapiens
  Table A; Target 47671; HLA-B*27:02; MORC1; ENSG00000114487; CTA
YGVNVENR

SEQ ID NO: 47672 - protein, 8 aa, Homo sapiens
  Table A; Target 47672; HLA-C*07:06; MORC1; ENSG00000114487; CTA
YGVNVENR

SEQ ID NO: 47673 - protein, 10 aa, Homo sapiens
  Table A; Target 47673; HLA-C*06:02; MORC1; ENSG00000114487; CTA
YGVNVENRSQ

SEQ ID NO: 47674 - protein, 10 aa, Homo sapiens
  Table A; Target 47674; HLA-C*07:01; MORC1; ENSG00000114487; CTA
YGVNVENRSQ

SEQ ID NO: 47675 - protein, 10 aa, Homo sapiens
  Table A; Target 47675; HLA-C*16:01; MORC1; ENSG00000114487; CTA
YGVNVENRSQ

SEQ ID NO: 47676 - protein, 8 aa, Homo sapiens
  Table A; Target 47676; HLA-C*03:03; MORC1; ENSG00000114487; CTA
YISETKIM

SEQ ID NO: 47677 - protein, 8 aa, Homo sapiens
  Table A; Target 47677; HLA-C*03:04; MORC1; ENSG00000114487; CTA
YISETKIM

SEQ ID NO: 47678 - protein, 9 aa, Homo sapiens
  Table A; Target 47678; HLA-A*03:01; MORC1; ENSG00000114487; CTA
YISETKIMK

SEQ ID NO: 47679 - protein, 9 aa, Homo sapiens
  Table A; Target 47679; HLA-A*03:02; MORC1; ENSG00000114487; CTA
YISETKIMK

SEQ ID NO: 47680 - protein, 9 aa, Homo sapiens
  Table A; Target 47680; HLA-A*11:01; MORC1; ENSG00000114487; CTA
YISETKIMK

SEQ ID NO: 47681 - protein, 9 aa, Homo sapiens
  Table A; Target 47681; HLA-A*68:01; MORC1; ENSG00000114487; CTA
YISETKIMK

SEQ ID NO: 47682 - protein, 10 aa, Homo sapiens
  Table A; Target 47682; HLA-A*03:01; MORC1; ENSG00000114487; CTA
YISETKIMKK

SEQ ID NO: 47683 - protein, 10 aa, Homo sapiens
  Table A; Target 47683; HLA-A*11:01; MORC1; ENSG00000114487; CTA
YISETKIMKK

SEQ ID NO: 47684 - protein, 10 aa, Homo sapiens
  Table A; Target 47684; HLA-A*68:01; MORC1; ENSG00000114487; CTA
YISETKIMKK

SEQ ID NO: 47685 - protein, 8 aa, Homo sapiens
  Table A; Target 47685; HLA-B*08:01; MORC1; ENSG00000114487; CTA
YLYVTSSF

SEQ ID NO: 47686 - protein, 8 aa, Homo sapiens
  Table A; Target 47686; HLA-B*15:01; MORC1; ENSG00000114487; CTA
YLYVTSSF

SEQ ID NO: 47687 - protein, 8 aa, Homo sapiens
  Table A; Target 47687; HLA-B*15:03; MORC1; ENSG00000114487; CTA
YLYVTSSF

SEQ ID NO: 47688 - protein, 8 aa, Homo sapiens
  Table A; Target 47688; HLA-B*18:01; MORC1; ENSG00000114487; CTA
YLYVTSSF

SEQ ID NO: 47689 - protein, 8 aa, Homo sapiens
  Table A; Target 47689; HLA-B*37:01; MORC1; ENSG00000114487; CTA
YLYVTSSF

SEQ ID NO: 47690 - protein, 8 aa, Homo sapiens
  Table A; Target 47690; HLA-B*46:01; MORC1; ENSG00000114487; CTA
YLYVTSSF

SEQ ID NO: 47691 - protein, 8 aa, Homo sapiens
  Table A; Target 47691; HLA-C*03:03; MORC1; ENSG00000114487; CTA
YLYVTSSF

SEQ ID NO: 47692 - protein, 8 aa, Homo sapiens
  Table A; Target 47692; HLA-C*03:04; MORC1; ENSG00000114487; CTA
YLYVTSSF

SEQ ID NO: 47693 - protein, 8 aa, Homo sapiens
  Table A; Target 47693; HLA-C*14:02; MORC1; ENSG00000114487; CTA
YLYVTSSF

SEQ ID NO: 47694 - protein, 9 aa, Homo sapiens
  Table A; Target 47694; HLA-A*03:01; MORC1; ENSG00000114487; CTA
YLYVTSSFK

SEQ ID NO: 47695 - protein, 9 aa, Homo sapiens
  Table A; Target 47695; HLA-B*07:02; MORC1; ENSG00000114487; CTA
YPALQRAQL

SEQ ID NO: 47696 - protein, 9 aa, Homo sapiens
  Table A; Target 47696; HLA-B*08:01; MORC1; ENSG00000114487; CTA
YPALQRAQL

SEQ ID NO: 47697 - protein, 9 aa, Homo sapiens
  Table A; Target 47697; HLA-B*35:01; MORC1; ENSG00000114487; CTA
YPALQRAQL

SEQ ID NO: 47698 - protein, 9 aa, Homo sapiens
  Table A; Target 47698; HLA-B*35:03; MORC1; ENSG00000114487; CTA
YPALQRAQL

SEQ ID NO: 47699 - protein, 9 aa, Homo sapiens
  Table A; Target 47699; HLA-B*51:01; MORC1; ENSG00000114487; CTA
YPALQRAQL

SEQ ID NO: 47700 - protein, 9 aa, Homo sapiens
  Table A; Target 47700; HLA-B*56:01; MORC1; ENSG00000114487; CTA
YPALQRAQL

SEQ ID NO: 47701 - protein, 9 aa, Homo sapiens
  Table A; Target 47701; HLA-C*07:02; MORC1; ENSG00000114487; CTA
YPALQRAQL

SEQ ID NO: 47702 - protein, 11 aa, Homo sapiens
  Table A; Target 47702; HLA-B*07:02; MORC1; ENSG00000114487; CTA
YPALQRAQLRL

SEQ ID NO: 47703 - protein, 9 aa, Homo sapiens
  Table A; Target 47703; HLA-A*03:02; MORC1; ENSG00000114487; CTA
YQNDIDVEK

SEQ ID NO: 47704 - protein, 9 aa, Homo sapiens
  Table A; Target 47704; HLA-A*11:01; MORC1; ENSG00000114487; CTA
YQNDIDVEK

SEQ ID NO: 47705 - protein, 9 aa, Homo sapiens
  Table A; Target 47705; HLA-B*27:02; MORC1; ENSG00000114487; CTA
YQNDIDVEK

SEQ ID NO: 47706 - protein, 9 aa, Homo sapiens
  Table A; Target 47706; HLA-B*27:05; MORC1; ENSG00000114487; CTA
YQNDIDVEK

SEQ ID NO: 47707 - protein, 9 aa, Homo sapiens
  Table A; Target 47707; HLA-B*08:01; MORC1; ENSG00000114487; CTA
YSNNRLIKM

SEQ ID NO: 47708 - protein, 9 aa, Homo sapiens
  Table A; Target 47708; HLA-B*46:01; MORC1; ENSG00000114487; CTA
YSNNRLIKM

SEQ ID NO: 47709 - protein, 9 aa, Homo sapiens
  Table A; Target 47709; HLA-C*02:02; MORC1; ENSG00000114487; CTA
YSNNRLIKM

SEQ ID NO: 47710 - protein, 9 aa, Homo sapiens
  Table A; Target 47710; HLA-C*12:03; MORC1; ENSG00000114487; CTA
YSNNRLIKM

SEQ ID NO: 47711 - protein, 9 aa, Homo sapiens
  Table A; Target 47711; HLA-C*16:01; MORC1; ENSG00000114487; CTA
YSNNRLIKM

SEQ ID NO: 47712 - protein, 10 aa, Homo sapiens
  Table A; Target 47712; HLA-C*01:02; MORC1; ENSG00000114487; CTA
YSPFKTEAEL

SEQ ID NO: 47713 - protein, 9 aa, Homo sapiens
  Table A; Target 47713; HLA-B*54:01; MORC1; ENSG00000114487; CTA
YVTSSFKGA

SEQ ID NO: 47714 - protein, 10 aa, Homo sapiens
  Table A; Target 47714; HLA-A*25:01; MORC1; ENSG00000114487; CTA
YVTSSFKGAF

SEQ ID NO: 47715 - protein, 10 aa, Homo sapiens
  Table A; Target 47715; HLA-A*26:01; MORC1; ENSG00000114487; CTA
YVTSSFKGAF

SEQ ID NO: 47716 - protein, 8 aa, Homo sapiens
  Table A; Target 47716; HLA-B*07:02; MTRNR2L1; ENSG00000256618; TAA
APRGFSCL

SEQ ID NO: 47717 - protein, 8 aa, Homo sapiens
  Table A; Target 47717; HLA-B*08:01; MTRNR2L1; ENSG00000256618; TAA
APRGFSCL

SEQ ID NO: 47718 - protein, 8 aa, Homo sapiens
  Table A; Target 47718; HLA-C*07:02; MTRNR2L1; ENSG00000256618; TAA
APRGFSCL

SEQ ID NO: 47719 - protein, 9 aa, Homo sapiens
  Table A; Target 47719; HLA-B*07:02; MTRNR2L1; ENSG00000256618; TAA
APRGFSCLL

SEQ ID NO: 47720 - protein, 9 aa, Homo sapiens
  Table A; Target 47720; HLA-C*07:02; MTRNR2L1; ENSG00000256618; TAA
APRGFSCLL

SEQ ID NO: 47721 - protein, 8 aa, Homo sapiens
  Table A; Target 47721; HLA-A*33:01; MTRNR2L1; ENSG00000256618; TAA
EIDLPVKR

SEQ ID NO: 47722 - protein, 8 aa, Homo sapiens
  Table A; Target 47722; HLA-A*33:03; MTRNR2L1; ENSG00000256618; TAA
EIDLPVKR

SEQ ID NO: 47723 - protein, 8 aa, Homo sapiens
  Table A; Target 47723; HLA-A*68:01; MTRNR2L1; ENSG00000256618; TAA
EIDLPVKR

SEQ ID NO: 47724 - protein, 8 aa, Homo sapiens
  Table A; Target 47724; HLA-C*04:01; MTRNR2L1; ENSG00000256618; TAA
EIDLPVKR

SEQ ID NO: 47725 - protein, 8 aa, Homo sapiens
  Table A; Target 47725; HLA-C*05:01; MTRNR2L1; ENSG00000256618; TAA
EIDLPVKR

SEQ ID NO: 47726 - protein, 9 aa, Homo sapiens
  Table A; Target 47726; HLA-A*33:01; MTRNR2L1; ENSG00000256618; TAA
EIDLPVKRR

SEQ ID NO: 47727 - protein, 9 aa, Homo sapiens
  Table A; Target 47727; HLA-A*33:03; MTRNR2L1; ENSG00000256618; TAA
EIDLPVKRR

SEQ ID NO: 47728 - protein, 9 aa, Homo sapiens
  Table A; Target 47728; HLA-A*68:01; MTRNR2L1; ENSG00000256618; TAA
EIDLPVKRR

SEQ ID NO: 47729 - protein, 9 aa, Homo sapiens
  Table A; Target 47729; HLA-A*02:01; MTRNR2L1; ENSG00000256618; TAA
LLSTSEIDL

SEQ ID NO: 47730 - protein, 9 aa, Homo sapiens
  Table A; Target 47730; HLA-B*39:01; MTRNR2L1; ENSG00000256618; TAA
LLSTSEIDL

SEQ ID NO: 47731 - protein, 11 aa, Homo sapiens
  Table A; Target 47731; HLA-A*68:02; MTRNR2L1; ENSG00000256618; TAA
LLSTSEIDLPV

SEQ ID NO: 47732 - protein, 11 aa, Homo sapiens
  Table A; Target 47732; HLA-A*11:01; MTRNR2L1; ENSG00000256618; TAA
LSTSEIDLPVK

SEQ ID NO: 47733 - protein, 11 aa, Homo sapiens
  Table A; Target 47733; HLA-B*27:02; MTRNR2L1; ENSG00000256618; TAA
LSTSEIDLPVK

SEQ ID NO: 47734 - protein, 9 aa, Homo sapiens
  Table A; Target 47734; HLA-C*01:02; MTRNR2L1; ENSG00000256618; TAA
MAPRGFSCL

SEQ ID NO: 47735 - protein, 8 aa, Homo sapiens
  Table A; Target 47735; HLA-B*18:01; MTRNR2L1; ENSG00000256618; TAA
SEIDLPVK

SEQ ID NO: 47736 - protein, 8 aa, Homo sapiens
  Table A; Target 47736; HLA-B*27:05; MTRNR2L1; ENSG00000256618; TAA
SEIDLPVK

SEQ ID NO: 47737 - protein, 8 aa, Homo sapiens
  Table A; Target 47737; HLA-B*40:02; MTRNR2L1; ENSG00000256618; TAA
SEIDLPVK

SEQ ID NO: 47738 - protein, 8 aa, Homo sapiens
  Table A; Target 47738; HLA-B*49:01; MTRNR2L1; ENSG00000256618; TAA
SEIDLPVK

SEQ ID NO: 47739 - protein, 9 aa, Homo sapiens
  Table A; Target 47739; HLA-A*11:01; MTRNR2L1; ENSG00000256618; TAA
SEIDLPVKR

SEQ ID NO: 47740 - protein, 9 aa, Homo sapiens
  Table A; Target 47740; HLA-A*30:01; MTRNR2L1; ENSG00000256618; TAA
SEIDLPVKR

SEQ ID NO: 47741 - protein, 9 aa, Homo sapiens
  Table A; Target 47741; HLA-A*31:01; MTRNR2L1; ENSG00000256618; TAA
SEIDLPVKR

SEQ ID NO: 47742 - protein, 9 aa, Homo sapiens
  Table A; Target 47742; HLA-A*33:01; MTRNR2L1; ENSG00000256618; TAA
SEIDLPVKR

SEQ ID NO: 47743 - protein, 9 aa, Homo sapiens
  Table A; Target 47743; HLA-A*33:03; MTRNR2L1; ENSG00000256618; TAA
SEIDLPVKR

SEQ ID NO: 47744 - protein, 9 aa, Homo sapiens
  Table A; Target 47744; HLA-A*68:01; MTRNR2L1; ENSG00000256618; TAA
SEIDLPVKR

SEQ ID NO: 47745 - protein, 9 aa, Homo sapiens
  Table A; Target 47745; HLA-A*68:02; MTRNR2L1; ENSG00000256618; TAA
SEIDLPVKR

SEQ ID NO: 47746 - protein, 9 aa, Homo sapiens
  Table A; Target 47746; HLA-B*18:01; MTRNR2L1; ENSG00000256618; TAA
SEIDLPVKR

SEQ ID NO: 47747 - protein, 9 aa, Homo sapiens
  Table A; Target 47747; HLA-B*27:02; MTRNR2L1; ENSG00000256618; TAA
SEIDLPVKR

SEQ ID NO: 47748 - protein, 9 aa, Homo sapiens
  Table A; Target 47748; HLA-B*27:05; MTRNR2L1; ENSG00000256618; TAA
SEIDLPVKR

SEQ ID NO: 47749 - protein, 9 aa, Homo sapiens
  Table A; Target 47749; HLA-B*40:01; MTRNR2L1; ENSG00000256618; TAA
SEIDLPVKR

SEQ ID NO: 47750 - protein, 9 aa, Homo sapiens
  Table A; Target 47750; HLA-B*40:02; MTRNR2L1; ENSG00000256618; TAA
SEIDLPVKR

SEQ ID NO: 47751 - protein, 9 aa, Homo sapiens
  Table A; Target 47751; HLA-B*44:02; MTRNR2L1; ENSG00000256618; TAA
SEIDLPVKR

SEQ ID NO: 47752 - protein, 9 aa, Homo sapiens
  Table A; Target 47752; HLA-B*44:03; MTRNR2L1; ENSG00000256618; TAA
SEIDLPVKR

SEQ ID NO: 47753 - protein, 9 aa, Homo sapiens
  Table A; Target 47753; HLA-B*49:01; MTRNR2L1; ENSG00000256618; TAA
SEIDLPVKR

SEQ ID NO: 47754 - protein, 9 aa, Homo sapiens
  Table A; Target 47754; HLA-B*57:01; MTRNR2L1; ENSG00000256618; TAA
SEIDLPVKR

SEQ ID NO: 47755 - protein, 9 aa, Homo sapiens
  Table A; Target 47755; HLA-C*02:02; MTRNR2L1; ENSG00000256618; TAA
SEIDLPVKR

SEQ ID NO: 47756 - protein, 9 aa, Homo sapiens
  Table A; Target 47756; HLA-C*06:02; MTRNR2L1; ENSG00000256618; TAA
SEIDLPVKR

SEQ ID NO: 47757 - protein, 9 aa, Homo sapiens
  Table A; Target 47757; HLA-C*07:06; MTRNR2L1; ENSG00000256618; TAA
SEIDLPVKR

SEQ ID NO: 47758 - protein, 9 aa, Homo sapiens
  Table A; Target 47758; HLA-C*12:03; MTRNR2L1; ENSG00000256618; TAA
SEIDLPVKR

SEQ ID NO: 47759 - protein, 9 aa, Homo sapiens
  Table A; Target 47759; HLA-C*16:04; MTRNR2L1; ENSG00000256618; TAA
SEIDLPVKR

SEQ ID NO: 47760 - protein, 10 aa, Homo sapiens
  Table A; Target 47760; HLA-B*44:02; MTRNR2L1; ENSG00000256618; TAA
SEIDLPVKRR

SEQ ID NO: 47761 - protein, 10 aa, Homo sapiens
  Table A; Target 47761; HLA-B*44:03; MTRNR2L1; ENSG00000256618; TAA
SEIDLPVKRR

SEQ ID NO: 47762 - protein, 11 aa, Homo sapiens
  Table A; Target 47762; HLA-B*44:02; MTRNR2L1; ENSG00000256618; TAA
SEIDLPVKRRT

SEQ ID NO: 47763 - protein, 11 aa, Homo sapiens
  Table A; Target 47763; HLA-B*44:03; MTRNR2L1; ENSG00000256618; TAA
SEIDLPVKRRT

SEQ ID NO: 47764 - protein, 9 aa, Homo sapiens
  Table A; Target 47764; HLA-A*11:01; MTRNR2L1; ENSG00000256618; TAA
STSEIDLPV

SEQ ID NO: 47765 - protein, 9 aa, Homo sapiens
  Table A; Target 47765; HLA-A*68:01; MTRNR2L1; ENSG00000256618; TAA
STSEIDLPV

SEQ ID NO: 47766 - protein, 9 aa, Homo sapiens
  Table A; Target 47766; HLA-A*68:02; MTRNR2L1; ENSG00000256618; TAA
STSEIDLPV

SEQ ID NO: 47767 - protein, 9 aa, Homo sapiens
  Table A; Target 47767; HLA-B*13:02; MTRNR2L1; ENSG00000256618; TAA
STSEIDLPV

SEQ ID NO: 47768 - protein, 9 aa, Homo sapiens
  Table A; Target 47768; HLA-C*06:02; MTRNR2L1; ENSG00000256618; TAA
STSEIDLPV

SEQ ID NO: 47769 - protein, 9 aa, Homo sapiens
  Table A; Target 47769; HLA-C*07:06; MTRNR2L1; ENSG00000256618; TAA
STSEIDLPV

SEQ ID NO: 47770 - protein, 9 aa, Homo sapiens
  Table A; Target 47770; HLA-C*16:04; MTRNR2L1; ENSG00000256618; TAA
STSEIDLPV

SEQ ID NO: 47771 - protein, 10 aa, Homo sapiens
  Table A; Target 47771; HLA-A*01:01; MTRNR2L1; ENSG00000256618; TAA
STSEIDLPVK

SEQ ID NO: 47772 - protein, 10 aa, Homo sapiens
  Table A; Target 47772; HLA-A*03:01; MTRNR2L1; ENSG00000256618; TAA
STSEIDLPVK

SEQ ID NO: 47773 - protein, 10 aa, Homo sapiens
  Table A; Target 47773; HLA-A*03:02; MTRNR2L1; ENSG00000256618; TAA
STSEIDLPVK

SEQ ID NO: 47774 - protein, 10 aa, Homo sapiens
  Table A; Target 47774; HLA-A*11:01; MTRNR2L1; ENSG00000256618; TAA
STSEIDLPVK

SEQ ID NO: 47775 - protein, 10 aa, Homo sapiens
  Table A; Target 47775; HLA-A*33:03; MTRNR2L1; ENSG00000256618; TAA
STSEIDLPVK

SEQ ID NO: 47776 - protein, 10 aa, Homo sapiens
  Table A; Target 47776; HLA-A*68:01; MTRNR2L1; ENSG00000256618; TAA
STSEIDLPVK

SEQ ID NO: 47777 - protein, 10 aa, Homo sapiens
  Table A; Target 47777; HLA-A*68:02; MTRNR2L1; ENSG00000256618; TAA
STSEIDLPVK

SEQ ID NO: 47778 - protein, 10 aa, Homo sapiens
  Table A; Target 47778; HLA-B*27:02; MTRNR2L1; ENSG00000256618; TAA
STSEIDLPVK

SEQ ID NO: 47779 - protein, 10 aa, Homo sapiens
  Table A; Target 47779; HLA-B*27:05; MTRNR2L1; ENSG00000256618; TAA
STSEIDLPVK

SEQ ID NO: 47780 - protein, 10 aa, Homo sapiens
  Table A; Target 47780; HLA-B*57:01; MTRNR2L1; ENSG00000256618; TAA
STSEIDLPVK

SEQ ID NO: 47781 - protein, 10 aa, Homo sapiens
  Table A; Target 47781; HLA-C*07:06; MTRNR2L1; ENSG00000256618; TAA
STSEIDLPVK

SEQ ID NO: 47782 - protein, 11 aa, Homo sapiens
  Table A; Target 47782; HLA-A*11:01; MTRNR2L1; ENSG00000256618; TAA
STSEIDLPVKR

SEQ ID NO: 47783 - protein, 11 aa, Homo sapiens
  Table A; Target 47783; HLA-A*31:01; MTRNR2L1; ENSG00000256618; TAA
STSEIDLPVKR

SEQ ID NO: 47784 - protein, 11 aa, Homo sapiens
  Table A; Target 47784; HLA-A*33:01; MTRNR2L1; ENSG00000256618; TAA
STSEIDLPVKR

SEQ ID NO: 47785 - protein, 11 aa, Homo sapiens
  Table A; Target 47785; HLA-A*33:03; MTRNR2L1; ENSG00000256618; TAA
STSEIDLPVKR

SEQ ID NO: 47786 - protein, 11 aa, Homo sapiens
  Table A; Target 47786; HLA-A*68:01; MTRNR2L1; ENSG00000256618; TAA
STSEIDLPVKR

SEQ ID NO: 47787 - protein, 11 aa, Homo sapiens
  Table A; Target 47787; HLA-A*68:02; MTRNR2L1; ENSG00000256618; TAA
STSEIDLPVKR

SEQ ID NO: 47788 - protein, 11 aa, Homo sapiens
  Table A; Target 47788; HLA-B*57:01; MTRNR2L1; ENSG00000256618; TAA
STSEIDLPVKR

SEQ ID NO: 47789 - protein, 11 aa, Homo sapiens
  Table A; Target 47789; HLA-C*07:06; MTRNR2L1; ENSG00000256618; TAA
STSEIDLPVKR

SEQ ID NO: 47790 - protein, 9 aa, Homo sapiens
  Table A; Target 47790; HLA-A*01:01; MTRNR2L1; ENSG00000256618; TAA
TSEIDLPVK

SEQ ID NO: 47791 - protein, 9 aa, Homo sapiens
  Table A; Target 47791; HLA-A*03:02; MTRNR2L1; ENSG00000256618; TAA
TSEIDLPVK

SEQ ID NO: 47792 - protein, 9 aa, Homo sapiens
  Table A; Target 47792; HLA-A*11:01; MTRNR2L1; ENSG00000256618; TAA
TSEIDLPVK

SEQ ID NO: 47793 - protein, 9 aa, Homo sapiens
  Table A; Target 47793; HLA-A*68:01; MTRNR2L1; ENSG00000256618; TAA
TSEIDLPVK

SEQ ID NO: 47794 - protein, 9 aa, Homo sapiens
  Table A; Target 47794; HLA-B*27:02; MTRNR2L1; ENSG00000256618; TAA
TSEIDLPVK

SEQ ID NO: 47795 - protein, 9 aa, Homo sapiens
  Table A; Target 47795; HLA-C*07:06; MTRNR2L1; ENSG00000256618; TAA
TSEIDLPVK

SEQ ID NO: 47796 - protein, 10 aa, Homo sapiens
  Table A; Target 47796; HLA-A*01:01; MTRNR2L1; ENSG00000256618; TAA
TSEIDLPVKR

SEQ ID NO: 47797 - protein, 10 aa, Homo sapiens
  Table A; Target 47797; HLA-A*33:03; MTRNR2L1; ENSG00000256618; TAA
TSEIDLPVKR

SEQ ID NO: 47798 - protein, 10 aa, Homo sapiens
  Table A; Target 47798; HLA-A*68:01; MTRNR2L1; ENSG00000256618; TAA
TSEIDLPVKR

SEQ ID NO: 47799 - protein, 10 aa, Homo sapiens
  Table A; Target 47799; HLA-B*27:02; MTRNR2L1; ENSG00000256618; TAA
TSEIDLPVKR

SEQ ID NO: 47800 - protein, 10 aa, Homo sapiens
  Table A; Target 47800; HLA-C*07:06; MTRNR2L1; ENSG00000256618; TAA
TSEIDLPVKR

SEQ ID NO: 47801 - protein, 8 aa, Homo sapiens
  Table A; Target 47801; HLA-B*27:02; MYH4; ENSG00000264424; TAA
AACIALDK

SEQ ID NO: 47802 - protein, 9 aa, Homo sapiens
  Table A; Target 47802; HLA-A*11:01; MYH4; ENSG00000264424; TAA
AACIELIEK

SEQ ID NO: 47803 - protein, 8 aa, Homo sapiens
  Table A; Target 47803; HLA-C*03:04; MYH4; ENSG00000264424; TAA
AAEALRNL

SEQ ID NO: 47804 - protein, 8 aa, Homo sapiens
  Table A; Target 47804; HLA-C*16:01; MYH4; ENSG00000264424; TAA
AAEALRNL

SEQ ID NO: 47805 - protein, 8 aa, Homo sapiens
  Table A; Target 47805; HLA-C*16:02; MYH4; ENSG00000264424; TAA
AAEALRNL

SEQ ID NO: 47806 - protein, 8 aa, Homo sapiens
  Table A; Target 47806; HLA-A*30:01; MYH4; ENSG00000264424; TAA
AAMMAEEL

SEQ ID NO: 47807 - protein, 8 aa, Homo sapiens
  Table A; Target 47807; HLA-B*15:01; MYH4; ENSG00000264424; TAA
AAMMAEEL

SEQ ID NO: 47808 - protein, 8 aa, Homo sapiens
  Table A; Target 47808; HLA-B*35:03; MYH4; ENSG00000264424; TAA
AAMMAEEL

SEQ ID NO: 47809 - protein, 8 aa, Homo sapiens
  Table A; Target 47809; HLA-B*37:01; MYH4; ENSG00000264424; TAA
AAMMAEEL

SEQ ID NO: 47810 - protein, 8 aa, Homo sapiens
  Table A; Target 47810; HLA-B*40:01; MYH4; ENSG00000264424; TAA
AAMMAEEL

SEQ ID NO: 47811 - protein, 8 aa, Homo sapiens
  Table A; Target 47811; HLA-B*46:01; MYH4; ENSG00000264424; TAA
AAMMAEEL

SEQ ID NO: 47812 - protein, 8 aa, Homo sapiens
  Table A; Target 47812; HLA-B*58:01; MYH4; ENSG00000264424; TAA
AAMMAEEL

SEQ ID NO: 47813 - protein, 8 aa, Homo sapiens
  Table A; Target 47813; HLA-C*01:02; MYH4; ENSG00000264424; TAA
AAMMAEEL

SEQ ID NO: 47814 - protein, 8 aa, Homo sapiens
  Table A; Target 47814; HLA-C*03:03; MYH4; ENSG00000264424; TAA
AAMMAEEL

SEQ ID NO: 47815 - protein, 8 aa, Homo sapiens
  Table A; Target 47815; HLA-C*03:04; MYH4; ENSG00000264424; TAA
AAMMAEEL

SEQ ID NO: 47816 - protein, 8 aa, Homo sapiens
  Table A; Target 47816; HLA-C*05:01; MYH4; ENSG00000264424; TAA
AAMMAEEL

SEQ ID NO: 47817 - protein, 8 aa, Homo sapiens
  Table A; Target 47817; HLA-C*14:02; MYH4; ENSG00000264424; TAA
AAMMAEEL

SEQ ID NO: 47818 - protein, 8 aa, Homo sapiens
  Table A; Target 47818; HLA-C*16:01; MYH4; ENSG00000264424; TAA
AAMMAEEL

SEQ ID NO: 47819 - protein, 8 aa, Homo sapiens
  Table A; Target 47819; HLA-C*16:02; MYH4; ENSG00000264424; TAA
AAMMAEEL

SEQ ID NO: 47820 - protein, 8 aa, Homo sapiens
  Table A; Target 47820; HLA-C*16:04; MYH4; ENSG00000264424; TAA
AAMMAEEL

SEQ ID NO: 47821 - protein, 9 aa, Homo sapiens
  Table A; Target 47821; HLA-A*11:01; MYH4; ENSG00000264424; TAA
AAMMAEELK

SEQ ID NO: 47822 - protein, 9 aa, Homo sapiens
  Table A; Target 47822; HLA-B*27:02; MYH4; ENSG00000264424; TAA
AAMMAEELK

SEQ ID NO: 47823 - protein, 10 aa, Homo sapiens
  Table A; Target 47823; HLA-A*11:01; MYH4; ENSG00000264424; TAA
AAMMAEELKK

SEQ ID NO: 47824 - protein, 10 aa, Homo sapiens
  Table A; Target 47824; HLA-B*27:02; MYH4; ENSG00000264424; TAA
AAMMAEELKK

SEQ ID NO: 47825 - protein, 8 aa, Homo sapiens
  Table A; Target 47825; HLA-B*15:03; MYH4; ENSG00000264424; TAA
AAWMIYTY

SEQ ID NO: 47826 - protein, 8 aa, Homo sapiens
  Table A; Target 47826; HLA-B*35:01; MYH4; ENSG00000264424; TAA
AAWMIYTY

SEQ ID NO: 47827 - protein, 8 aa, Homo sapiens
  Table A; Target 47827; HLA-C*02:02; MYH4; ENSG00000264424; TAA
AAWMIYTY

SEQ ID NO: 47828 - protein, 8 aa, Homo sapiens
  Table A; Target 47828; HLA-C*12:03; MYH4; ENSG00000264424; TAA
AAWMIYTY

SEQ ID NO: 47829 - protein, 8 aa, Homo sapiens
  Table A; Target 47829; HLA-C*16:04; MYH4; ENSG00000264424; TAA
AAWMIYTY

SEQ ID NO: 47830 - protein, 10 aa, Homo sapiens
  Table A; Target 47830; HLA-B*54:01; MYH4; ENSG00000264424; TAA
AAYLTSLNSA

SEQ ID NO: 47831 - protein, 10 aa, Homo sapiens
  Table A; Target 47831; HLA-B*56:01; MYH4; ENSG00000264424; TAA
AAYLTSLNSA

SEQ ID NO: 47832 - protein, 8 aa, Homo sapiens
  Table A; Target 47832; HLA-A*11:01; MYH4; ENSG00000264424; TAA
ACIELIEK

SEQ ID NO: 47833 - protein, 10 aa, Homo sapiens
  Table A; Target 47833; HLA-B*27:02; MYH4; ENSG00000264424; TAA
ADALADAEER

SEQ ID NO: 47834 - protein, 8 aa, Homo sapiens
  Table A; Target 47834; HLA-B*18:01; MYH4; ENSG00000264424; TAA
ADEKVAIY

SEQ ID NO: 47835 - protein, 8 aa, Homo sapiens
  Table A; Target 47835; HLA-B*37:01; MYH4; ENSG00000264424; TAA
ADEKVAIY

SEQ ID NO: 47836 - protein, 8 aa, Homo sapiens
  Table A; Target 47836; HLA-C*07:01; MYH4; ENSG00000264424; TAA
ADEKVAIY

SEQ ID NO: 47837 - protein, 9 aa, Homo sapiens
  Table A; Target 47837; HLA-A*03:01; MYH4; ENSG00000264424; TAA
ADEKVAIYK

SEQ ID NO: 47838 - protein, 9 aa, Homo sapiens
  Table A; Target 47838; HLA-A*03:02; MYH4; ENSG00000264424; TAA
ADEKVAIYK

SEQ ID NO: 47839 - protein, 9 aa, Homo sapiens
  Table A; Target 47839; HLA-A*11:01; MYH4; ENSG00000264424; TAA
ADEKVAIYK

SEQ ID NO: 47840 - protein, 9 aa, Homo sapiens
  Table A; Target 47840; HLA-B*27:02; MYH4; ENSG00000264424; TAA
ADEKVAIYK

SEQ ID NO: 47841 - protein, 10 aa, Homo sapiens
  Table A; Target 47841; HLA-A*03:02; MYH4; ENSG00000264424; TAA
ADIAESQVNK

SEQ ID NO: 47842 - protein, 10 aa, Homo sapiens
  Table A; Target 47842; HLA-A*11:01; MYH4; ENSG00000264424; TAA
ADIAESQVNK

SEQ ID NO: 47843 - protein, 10 aa, Homo sapiens
  Table A; Target 47843; HLA-B*27:02; MYH4; ENSG00000264424; TAA
ADIAESQVNK

SEQ ID NO: 47844 - protein, 11 aa, Homo sapiens
  Table A; Target 47844; HLA-A*30:01; MYH4; ENSG00000264424; TAA
ADIAESQVNKL

SEQ ID NO: 47845 - protein, 11 aa, Homo sapiens
  Table A; Target 47845; HLA-B*38:01; MYH4; ENSG00000264424; TAA
ADIAESQVNKL

SEQ ID NO: 47846 - protein, 11 aa, Homo sapiens
  Table A; Target 47846; HLA-B*40:01; MYH4; ENSG00000264424; TAA
ADIAESQVNKL

SEQ ID NO: 47847 - protein, 11 aa, Homo sapiens
  Table A; Target 47847; HLA-B*40:02; MYH4; ENSG00000264424; TAA
ADIAESQVNKL

SEQ ID NO: 47848 - protein, 11 aa, Homo sapiens
  Table A; Target 47848; HLA-B*44:02; MYH4; ENSG00000264424; TAA
ADIAESQVNKL

SEQ ID NO: 47849 - protein, 11 aa, Homo sapiens
  Table A; Target 47849; HLA-B*44:03; MYH4; ENSG00000264424; TAA
ADIAESQVNKL

SEQ ID NO: 47850 - protein, 11 aa, Homo sapiens
  Table A; Target 47850; HLA-C*12:03; MYH4; ENSG00000264424; TAA
ADIAESQVNKL

SEQ ID NO: 47851 - protein, 11 aa, Homo sapiens
  Table A; Target 47851; HLA-C*16:02; MYH4; ENSG00000264424; TAA
ADIAESQVNKL

SEQ ID NO: 47852 - protein, 8 aa, Homo sapiens
  Table A; Target 47852; HLA-A*30:01; MYH4; ENSG00000264424; TAA
ADIETYLL

SEQ ID NO: 47853 - protein, 8 aa, Homo sapiens
  Table A; Target 47853; HLA-B*37:01; MYH4; ENSG00000264424; TAA
ADIETYLL

SEQ ID NO: 47854 - protein, 8 aa, Homo sapiens
  Table A; Target 47854; HLA-B*40:02; MYH4; ENSG00000264424; TAA
ADIETYLL

SEQ ID NO: 47855 - protein, 8 aa, Homo sapiens
  Table A; Target 47855; HLA-B*44:02; MYH4; ENSG00000264424; TAA
ADIETYLL

SEQ ID NO: 47856 - protein, 10 aa, Homo sapiens
  Table A; Target 47856; HLA-A*03:01; MYH4; ENSG00000264424; TAA
ADIETYLLEK

SEQ ID NO: 47857 - protein, 10 aa, Homo sapiens
  Table A; Target 47857; HLA-A*11:01; MYH4; ENSG00000264424; TAA
ADIETYLLEK

SEQ ID NO: 47858 - protein, 10 aa, Homo sapiens
  Table A; Target 47858; HLA-B*27:02; MYH4; ENSG00000264424; TAA
ADIETYLLEK

SEQ ID NO: 47859 - protein, 8 aa, Homo sapiens
  Table A; Target 47859; HLA-B*37:01; MYH4; ENSG00000264424; TAA
ADKAAYLT

SEQ ID NO: 47860 - protein, 10 aa, Homo sapiens
  Table A; Target 47860; HLA-A*30:01; MYH4; ENSG00000264424; TAA
ADKAAYLTSL

SEQ ID NO: 47861 - protein, 10 aa, Homo sapiens
  Table A; Target 47861; HLA-B*40:02; MYH4; ENSG00000264424; TAA
ADKAAYLTSL

SEQ ID NO: 47862 - protein, 10 aa, Homo sapiens
  Table A; Target 47862; HLA-C*07:02; MYH4; ENSG00000264424; TAA
ADKAAYLTSL

SEQ ID NO: 47863 - protein, 9 aa, Homo sapiens
  Table A; Target 47863; HLA-B*37:01; MYH4; ENSG00000264424; TAA
ADLLKSLCY

SEQ ID NO: 47864 - protein, 9 aa, Homo sapiens
  Table A; Target 47864; HLA-B*49:01; MYH4; ENSG00000264424; TAA
AEADALADA

SEQ ID NO: 47865 - protein, 9 aa, Homo sapiens
  Table A; Target 47865; HLA-B*44:03; MYH4; ENSG00000264424; TAA
AEAEGGGGK

SEQ ID NO: 47866 - protein, 10 aa, Homo sapiens
  Table A; Target 47866; HLA-B*44:03; MYH4; ENSG00000264424; TAA
AEAEGGGGKK

SEQ ID NO: 47867 - protein, 10 aa, Homo sapiens
  Table A; Target 47867; HLA-B*49:01; MYH4; ENSG00000264424; TAA
AEAEGGGGKK

SEQ ID NO: 47868 - protein, 11 aa, Homo sapiens
  Table A; Target 47868; HLA-B*44:02; MYH4; ENSG00000264424; TAA
AEAEGGGGKKG

SEQ ID NO: 47869 - protein, 11 aa, Homo sapiens
  Table A; Target 47869; HLA-B*44:03; MYH4; ENSG00000264424; TAA
AEAEGGGGKKG

SEQ ID NO: 47870 - protein, 11 aa, Homo sapiens
  Table A; Target 47870; HLA-A*30:01; MYH4; ENSG00000264424; TAA
AEDEEEINAEL

SEQ ID NO: 47871 - protein, 11 aa, Homo sapiens
  Table A; Target 47871; HLA-B*40:01; MYH4; ENSG00000264424; TAA
AEDEEEINAEL

SEQ ID NO: 47872 - protein, 10 aa, Homo sapiens
  Table A; Target 47872; HLA-B*49:01; MYH4; ENSG00000264424; TAA
AEEAEEQSNV

SEQ ID NO: 47873 - protein, 8 aa, Homo sapiens
  Table A; Target 47873; HLA-B*49:01; MYH4; ENSG00000264424; TAA
AEEHVEAV

SEQ ID NO: 47874 - protein, 11 aa, Homo sapiens
  Table A; Target 47874; HLA-A*11:01; MYH4; ENSG00000264424; TAA
AEEHVEAVNSK

SEQ ID NO: 47875 - protein, 11 aa, Homo sapiens
  Table A; Target 47875; HLA-B*27:02; MYH4; ENSG00000264424; TAA
AEEHVEAVNSK

SEQ ID NO: 47876 - protein, 9 aa, Homo sapiens
  Table A; Target 47876; HLA-B*40:01; MYH4; ENSG00000264424; TAA
AEEKAKKAI

SEQ ID NO: 47877 - protein, 9 aa, Homo sapiens
  Table A; Target 47877; HLA-B*44:02; MYH4; ENSG00000264424; TAA
AEEKAKKAI

SEQ ID NO: 47878 - protein, 9 aa, Homo sapiens
  Table A; Target 47878; HLA-B*44:03; MYH4; ENSG00000264424; TAA
AEEKAKKAI

SEQ ID NO: 47879 - protein, 9 aa, Homo sapiens
  Table A; Target 47879; HLA-B*49:01; MYH4; ENSG00000264424; TAA
AEEKAKKAI

SEQ ID NO: 47880 - protein, 9 aa, Homo sapiens
  Table A; Target 47880; HLA-A*30:01; MYH4; ENSG00000264424; TAA
AEEQSNVNL

SEQ ID NO: 47881 - protein, 9 aa, Homo sapiens
  Table A; Target 47881; HLA-B*27:02; MYH4; ENSG00000264424; TAA
AEEQSNVNL

SEQ ID NO: 47882 - protein, 9 aa, Homo sapiens
  Table A; Target 47882; HLA-B*37:01; MYH4; ENSG00000264424; TAA
AEEQSNVNL

SEQ ID NO: 47883 - protein, 9 aa, Homo sapiens
  Table A; Target 47883; HLA-B*38:01; MYH4; ENSG00000264424; TAA
AEEQSNVNL

SEQ ID NO: 47884 - protein, 9 aa, Homo sapiens
  Table A; Target 47884; HLA-B*40:01; MYH4; ENSG00000264424; TAA
AEEQSNVNL

SEQ ID NO: 47885 - protein, 9 aa, Homo sapiens
  Table A; Target 47885; HLA-B*40:02; MYH4; ENSG00000264424; TAA
AEEQSNVNL

SEQ ID NO: 47886 - protein, 9 aa, Homo sapiens
  Table A; Target 47886; HLA-B*44:02; MYH4; ENSG00000264424; TAA
AEEQSNVNL

SEQ ID NO: 47887 - protein, 9 aa, Homo sapiens
  Table A; Target 47887; HLA-B*44:03; MYH4; ENSG00000264424; TAA
AEEQSNVNL

SEQ ID NO: 47888 - protein, 9 aa, Homo sapiens
  Table A; Target 47888; HLA-B*49:01; MYH4; ENSG00000264424; TAA
AEEQSNVNL

SEQ ID NO: 47889 - protein, 10 aa, Homo sapiens
  Table A; Target 47889; HLA-B*40:01; MYH4; ENSG00000264424; TAA
AEEQSNVNLA

SEQ ID NO: 47890 - protein, 10 aa, Homo sapiens
  Table A; Target 47890; HLA-B*49:01; MYH4; ENSG00000264424; TAA
AEEQSNVNLA

SEQ ID NO: 47891 - protein, 9 aa, Homo sapiens
  Table A; Target 47891; HLA-B*49:01; MYH4; ENSG00000264424; TAA
AEERCDQLI

SEQ ID NO: 47892 - protein, 10 aa, Homo sapiens
  Table A; Target 47892; HLA-A*30:01; MYH4; ENSG00000264424; TAA
AEIRSRNDAL

SEQ ID NO: 47893 - protein, 10 aa, Homo sapiens
  Table A; Target 47893; HLA-B*37:01; MYH4; ENSG00000264424; TAA
AEIRSRNDAL

SEQ ID NO: 47894 - protein, 10 aa, Homo sapiens
  Table A; Target 47894; HLA-B*40:01; MYH4; ENSG00000264424; TAA
AEIRSRNDAL

SEQ ID NO: 47895 - protein, 10 aa, Homo sapiens
  Table A; Target 47895; HLA-B*40:02; MYH4; ENSG00000264424; TAA
AEIRSRNDAL

SEQ ID NO: 47896 - protein, 10 aa, Homo sapiens
  Table A; Target 47896; HLA-B*44:02; MYH4; ENSG00000264424; TAA
AEIRSRNDAL

SEQ ID NO: 47897 - protein, 10 aa, Homo sapiens
  Table A; Target 47897; HLA-B*44:03; MYH4; ENSG00000264424; TAA
AEIRSRNDAL

SEQ ID NO: 47898 - protein, 10 aa, Homo sapiens
  Table A; Target 47898; HLA-B*49:01; MYH4; ENSG00000264424; TAA
AEIRSRNDAL

SEQ ID NO: 47899 - protein, 10 aa, Homo sapiens
  Table A; Target 47899; HLA-A*30:01; MYH4; ENSG00000264424; TAA
AEKDEELDQL

SEQ ID NO: 47900 - protein, 10 aa, Homo sapiens
  Table A; Target 47900; HLA-B*39:01; MYH4; ENSG00000264424; TAA
AEKDEELDQL

SEQ ID NO: 47901 - protein, 10 aa, Homo sapiens
  Table A; Target 47901; HLA-B*40:01; MYH4; ENSG00000264424; TAA
AEKDEELDQL

SEQ ID NO: 47902 - protein, 10 aa, Homo sapiens
  Table A; Target 47902; HLA-B*40:02; MYH4; ENSG00000264424; TAA
AEKDEELDQL

SEQ ID NO: 47903 - protein, 10 aa, Homo sapiens
  Table A; Target 47903; HLA-B*44:02; MYH4; ENSG00000264424; TAA
AEKDEELDQL

SEQ ID NO: 47904 - protein, 10 aa, Homo sapiens
  Table A; Target 47904; HLA-B*44:03; MYH4; ENSG00000264424; TAA
AEKDEELDQL

SEQ ID NO: 47905 - protein, 10 aa, Homo sapiens
  Table A; Target 47905; HLA-B*49:01; MYH4; ENSG00000264424; TAA
AEKDEELDQL

SEQ ID NO: 47906 - protein, 11 aa, Homo sapiens
  Table A; Target 47906; HLA-B*27:02; MYH4; ENSG00000264424; TAA
AEKDEELDQLK

SEQ ID NO: 47907 - protein, 9 aa, Homo sapiens
  Table A; Target 47907; HLA-B*44:02; MYH4; ENSG00000264424; TAA
AELEASQKE

SEQ ID NO: 47908 - protein, 9 aa, Homo sapiens
  Table A; Target 47908; HLA-B*44:03; MYH4; ENSG00000264424; TAA
AELEASQKE

SEQ ID NO: 47909 - protein, 11 aa, Homo sapiens
  Table A; Target 47909; HLA-A*30:01; MYH4; ENSG00000264424; TAA
AELEASQKESR

SEQ ID NO: 47910 - protein, 11 aa, Homo sapiens
  Table A; Target 47910; HLA-B*27:02; MYH4; ENSG00000264424; TAA
AELEASQKESR

SEQ ID NO: 47911 - protein, 11 aa, Homo sapiens
  Table A; Target 47911; HLA-B*40:01; MYH4; ENSG00000264424; TAA
AELEASQKESR

SEQ ID NO: 47912 - protein, 11 aa, Homo sapiens
  Table A; Target 47912; HLA-B*44:02; MYH4; ENSG00000264424; TAA
AELEASQKESR

SEQ ID NO: 47913 - protein, 11 aa, Homo sapiens
  Table A; Target 47913; HLA-B*44:03; MYH4; ENSG00000264424; TAA
AELEASQKESR

SEQ ID NO: 47914 - protein, 11 aa, Homo sapiens
  Table A; Target 47914; HLA-C*16:04; MYH4; ENSG00000264424; TAA
AELEASQKESR

SEQ ID NO: 47915 - protein, 10 aa, Homo sapiens
  Table A; Target 47915; HLA-A*30:01; MYH4; ENSG00000264424; TAA
AELGEQIDSL

SEQ ID NO: 47916 - protein, 10 aa, Homo sapiens
  Table A; Target 47916; HLA-B*27:02; MYH4; ENSG00000264424; TAA
AELGEQIDSL

SEQ ID NO: 47917 - protein, 10 aa, Homo sapiens
  Table A; Target 47917; HLA-B*40:01; MYH4; ENSG00000264424; TAA
AELGEQIDSL

SEQ ID NO: 47918 - protein, 10 aa, Homo sapiens
  Table A; Target 47918; HLA-B*40:02; MYH4; ENSG00000264424; TAA
AELGEQIDSL

SEQ ID NO: 47919 - protein, 10 aa, Homo sapiens
  Table A; Target 47919; HLA-B*44:02; MYH4; ENSG00000264424; TAA
AELGEQIDSL

SEQ ID NO: 47920 - protein, 10 aa, Homo sapiens
  Table A; Target 47920; HLA-B*44:03; MYH4; ENSG00000264424; TAA
AELGEQIDSL

SEQ ID NO: 47921 - protein, 10 aa, Homo sapiens
  Table A; Target 47921; HLA-B*49:01; MYH4; ENSG00000264424; TAA
AELGEQIDSL

SEQ ID NO: 47922 - protein, 10 aa, Homo sapiens
  Table A; Target 47922; HLA-C*16:04; MYH4; ENSG00000264424; TAA
AELGEQIDSL

SEQ ID NO: 47923 - protein, 9 aa, Homo sapiens
  Table A; Target 47923; HLA-B*37:01; MYH4; ENSG00000264424; TAA
AELQRGMSK

SEQ ID NO: 47924 - protein, 9 aa, Homo sapiens
  Table A; Target 47924; HLA-B*40:02; MYH4; ENSG00000264424; TAA
AELQRGMSK

SEQ ID NO: 47925 - protein, 9 aa, Homo sapiens
  Table A; Target 47925; HLA-B*44:02; MYH4; ENSG00000264424; TAA
AELQRGMSK

SEQ ID NO: 47926 - protein, 9 aa, Homo sapiens
  Table A; Target 47926; HLA-B*44:03; MYH4; ENSG00000264424; TAA
AELQRGMSK

SEQ ID NO: 47927 - protein, 9 aa, Homo sapiens
  Table A; Target 47927; HLA-C*16:01; MYH4; ENSG00000264424; TAA
AELQRGMSK

SEQ ID NO: 47928 - protein, 10 aa, Homo sapiens
  Table A; Target 47928; HLA-B*40:02; MYH4; ENSG00000264424; TAA
AELQRGMSKA

SEQ ID NO: 47929 - protein, 8 aa, Homo sapiens
  Table A; Target 47929; HLA-B*39:01; MYH4; ENSG00000264424; TAA
AEPDGTEV

SEQ ID NO: 47930 - protein, 8 aa, Homo sapiens
  Table A; Target 47930; HLA-B*49:01; MYH4; ENSG00000264424; TAA
AEPDGTEV

SEQ ID NO: 47931 - protein, 9 aa, Homo sapiens
  Table A; Target 47931; HLA-A*30:01; MYH4; ENSG00000264424; TAA
AEPDGTEVA

SEQ ID NO: 47932 - protein, 9 aa, Homo sapiens
  Table A; Target 47932; HLA-B*40:01; MYH4; ENSG00000264424; TAA
AEPDGTEVA

SEQ ID NO: 47933 - protein, 9 aa, Homo sapiens
  Table A; Target 47933; HLA-B*49:01; MYH4; ENSG00000264424; TAA
AEPDGTEVA

SEQ ID NO: 47934 - protein, 11 aa, Homo sapiens
  Table A; Target 47934; HLA-A*11:01; MYH4; ENSG00000264424; TAA
AEPDGTEVADK

SEQ ID NO: 47935 - protein, 11 aa, Homo sapiens
  Table A; Target 47935; HLA-B*39:01; MYH4; ENSG00000264424; TAA
AEPDGTEVADK

SEQ ID NO: 47936 - protein, 11 aa, Homo sapiens
  Table A; Target 47936; HLA-B*27:02; MYH4; ENSG00000264424; TAA
AEQELLDASER

SEQ ID NO: 47937 - protein, 9 aa, Homo sapiens
  Table A; Target 47937; HLA-B*44:02; MYH4; ENSG00000264424; TAA
AERSYHIFY

SEQ ID NO: 47938 - protein, 9 aa, Homo sapiens
  Table A; Target 47938; HLA-B*44:03; MYH4; ENSG00000264424; TAA
AERSYHIFY

SEQ ID NO: 47939 - protein, 8 aa, Homo sapiens
  Table A; Target 47939; HLA-A*30:01; MYH4; ENSG00000264424; TAA
AESQVNKL

SEQ ID NO: 47940 - protein, 8 aa, Homo sapiens
  Table A; Target 47940; HLA-B*18:01; MYH4; ENSG00000264424; TAA
AESQVNKL

SEQ ID NO: 47941 - protein, 8 aa, Homo sapiens
  Table A; Target 47941; HLA-B*37:01; MYH4; ENSG00000264424; TAA
AESQVNKL

SEQ ID NO: 47942 - protein, 8 aa, Homo sapiens
  Table A; Target 47942; HLA-B*40:01; MYH4; ENSG00000264424; TAA
AESQVNKL

SEQ ID NO: 47943 - protein, 8 aa, Homo sapiens
  Table A; Target 47943; HLA-B*40:02; MYH4; ENSG00000264424; TAA
AESQVNKL

SEQ ID NO: 47944 - protein, 8 aa, Homo sapiens
  Table A; Target 47944; HLA-B*44:02; MYH4; ENSG00000264424; TAA
AESQVNKL

SEQ ID NO: 47945 - protein, 8 aa, Homo sapiens
  Table A; Target 47945; HLA-B*44:03; MYH4; ENSG00000264424; TAA
AESQVNKL

SEQ ID NO: 47946 - protein, 8 aa, Homo sapiens
  Table A; Target 47946; HLA-B*49:01; MYH4; ENSG00000264424; TAA
AESQVNKL

SEQ ID NO: 47947 - protein, 8 aa, Homo sapiens
  Table A; Target 47947; HLA-C*16:04; MYH4; ENSG00000264424; TAA
AESQVNKL

SEQ ID NO: 47948 - protein, 9 aa, Homo sapiens
  Table A; Target 47948; HLA-B*44:02; MYH4; ENSG00000264424; TAA
AESQVNKLR

SEQ ID NO: 47949 - protein, 9 aa, Homo sapiens
  Table A; Target 47949; HLA-B*44:03; MYH4; ENSG00000264424; TAA
AESQVNKLR

SEQ ID NO: 47950 - protein, 10 aa, Homo sapiens
  Table A; Target 47950; HLA-B*44:02; MYH4; ENSG00000264424; TAA
AESQVNKLRV

SEQ ID NO: 47951 - protein, 10 aa, Homo sapiens
  Table A; Target 47951; HLA-B*44:03; MYH4; ENSG00000264424; TAA
AESQVNKLRV

SEQ ID NO: 47952 - protein, 10 aa, Homo sapiens
  Table A; Target 47952; HLA-B*49:01; MYH4; ENSG00000264424; TAA
AESQVNKLRV

SEQ ID NO: 47953 - protein, 10 aa, Homo sapiens
  Table A; Target 47953; HLA-A*30:01; MYH4; ENSG00000264424; TAA
AETEKEMANM

SEQ ID NO: 47954 - protein, 10 aa, Homo sapiens
  Table A; Target 47954; HLA-B*40:01; MYH4; ENSG00000264424; TAA
AETEKEMANM

SEQ ID NO: 47955 - protein, 10 aa, Homo sapiens
  Table A; Target 47955; HLA-B*40:02; MYH4; ENSG00000264424; TAA
AETEKEMANM

SEQ ID NO: 47956 - protein, 10 aa, Homo sapiens
  Table A; Target 47956; HLA-B*44:02; MYH4; ENSG00000264424; TAA
AETEKEMANM

SEQ ID NO: 47957 - protein, 10 aa, Homo sapiens
  Table A; Target 47957; HLA-B*44:03; MYH4; ENSG00000264424; TAA
AETEKEMANM

SEQ ID NO: 47958 - protein, 10 aa, Homo sapiens
  Table A; Target 47958; HLA-B*49:01; MYH4; ENSG00000264424; TAA
AETEKEMANM

SEQ ID NO: 47959 - protein, 10 aa, Homo sapiens
  Table A; Target 47959; HLA-A*30:01; MYH4; ENSG00000264424; TAA
AEVEELRASL

SEQ ID NO: 47960 - protein, 10 aa, Homo sapiens
  Table A; Target 47960; HLA-B*18:01; MYH4; ENSG00000264424; TAA
AEVEELRASL

SEQ ID NO: 47961 - protein, 10 aa, Homo sapiens
  Table A; Target 47961; HLA-B*27:02; MYH4; ENSG00000264424; TAA
AEVEELRASL

SEQ ID NO: 47962 - protein, 10 aa, Homo sapiens
  Table A; Target 47962; HLA-B*37:01; MYH4; ENSG00000264424; TAA
AEVEELRASL

SEQ ID NO: 47963 - protein, 10 aa, Homo sapiens
  Table A; Target 47963; HLA-B*40:01; MYH4; ENSG00000264424; TAA
AEVEELRASL

SEQ ID NO: 47964 - protein, 10 aa, Homo sapiens
  Table A; Target 47964; HLA-B*40:02; MYH4; ENSG00000264424; TAA
AEVEELRASL

SEQ ID NO: 47965 - protein, 10 aa, Homo sapiens
  Table A; Target 47965; HLA-B*44:02; MYH4; ENSG00000264424; TAA
AEVEELRASL

SEQ ID NO: 47966 - protein, 10 aa, Homo sapiens
  Table A; Target 47966; HLA-B*44:03; MYH4; ENSG00000264424; TAA
AEVEELRASL

SEQ ID NO: 47967 - protein, 10 aa, Homo sapiens
  Table A; Target 47967; HLA-B*49:01; MYH4; ENSG00000264424; TAA
AEVEELRASL

SEQ ID NO: 47968 - protein, 10 aa, Homo sapiens
  Table A; Target 47968; HLA-C*02:02; MYH4; ENSG00000264424; TAA
AEVEELRASL

SEQ ID NO: 47969 - protein, 10 aa, Homo sapiens
  Table A; Target 47969; HLA-C*16:04; MYH4; ENSG00000264424; TAA
AEVEELRASL

SEQ ID NO: 47970 - protein, 8 aa, Homo sapiens
  Table A; Target 47970; HLA-C*16:02; MYH4; ENSG00000264424; TAA
AFGNAKTV

SEQ ID NO: 47971 - protein, 10 aa, Homo sapiens
  Table A; Target 47971; HLA-C*14:02; MYH4; ENSG00000264424; TAA
AFLFSGAQTA

SEQ ID NO: 47972 - protein, 10 aa, Homo sapiens
  Table A; Target 47972; HLA-A*24:02; MYH4; ENSG00000264424; TAA
AFMNVKHWPW

SEQ ID NO: 47973 - protein, 9 aa, Homo sapiens
  Table A; Target 47973; HLA-C*04:01; MYH4; ENSG00000264424; TAA
AFTQQIEEL

SEQ ID NO: 47974 - protein, 9 aa, Homo sapiens
  Table A; Target 47974; HLA-C*14:02; MYH4; ENSG00000264424; TAA
AFTQQIEEL

SEQ ID NO: 47975 - protein, 8 aa, Homo sapiens
  Table A; Target 47975; HLA-A*03:02; MYH4; ENSG00000264424; TAA
AGATVTVK

SEQ ID NO: 47976 - protein, 8 aa, Homo sapiens
  Table A; Target 47976; HLA-A*11:01; MYH4; ENSG00000264424; TAA
AGATVTVK

SEQ ID NO: 47977 - protein, 9 aa, Homo sapiens
  Table A; Target 47977; HLA-A*31:01; MYH4; ENSG00000264424; TAA
AGKTVNTKR

SEQ ID NO: 47978 - protein, 9 aa, Homo sapiens
  Table A; Target 47978; HLA-A*03:02; MYH4; ENSG00000264424; TAA
AGLDETIAK

SEQ ID NO: 47979 - protein, 9 aa, Homo sapiens
  Table A; Target 47979; HLA-A*11:01; MYH4; ENSG00000264424; TAA
AGLDETIAK

SEQ ID NO: 47980 - protein, 10 aa, Homo sapiens
  Table A; Target 47980; HLA-A*02:04; MYH4; ENSG00000264424; TAA
AGLDETIAKL

SEQ ID NO: 47981 - protein, 10 aa, Homo sapiens
  Table A; Target 47981; HLA-B*40:01; MYH4; ENSG00000264424; TAA
AGLDETIAKL

SEQ ID NO: 47982 - protein, 8 aa, Homo sapiens
  Table A; Target 47982; HLA-B*13:02; MYH4; ENSG00000264424; TAA
AGTVDYNI

SEQ ID NO: 47983 - protein, 9 aa, Homo sapiens
  Table A; Target 47983; HLA-B*38:01; MYH4; ENSG00000264424; TAA
AHQQTLDDL

SEQ ID NO: 47984 - protein, 9 aa, Homo sapiens
  Table A; Target 47984; HLA-B*39:01; MYH4; ENSG00000264424; TAA
AHQQTLDDL

SEQ ID NO: 47985 - protein, 11 aa, Homo sapiens
  Table A; Target 47985; HLA-B*38:01; MYH4; ENSG00000264424; TAA
AHQQTLDDLQM

SEQ ID NO: 47986 - protein, 9 aa, Homo sapiens
  Table A; Target 47986; HLA-A*26:01; MYH4; ENSG00000264424; TAA
AIFGEAAPF

SEQ ID NO: 47987 - protein, 9 aa, Homo sapiens
  Table A; Target 47987; HLA-A*29:02; MYH4; ENSG00000264424; TAA
AIFGEAAPF

SEQ ID NO: 47988 - protein, 9 aa, Homo sapiens
  Table A; Target 47988; HLA-A*30:02; MYH4; ENSG00000264424; TAA
AIFGEAAPF

SEQ ID NO: 47989 - protein, 9 aa, Homo sapiens
  Table A; Target 47989; HLA-B*15:01; MYH4; ENSG00000264424; TAA
AIFGEAAPF

SEQ ID NO: 47990 - protein, 9 aa, Homo sapiens
  Table A; Target 47990; HLA-B*46:01; MYH4; ENSG00000264424; TAA
AIFGEAAPF

SEQ ID NO: 47991 - protein, 9 aa, Homo sapiens
  Table A; Target 47991; HLA-C*02:02; MYH4; ENSG00000264424; TAA
AIFGEAAPF

SEQ ID NO: 47992 - protein, 9 aa, Homo sapiens
  Table A; Target 47992; HLA-C*07:04; MYH4; ENSG00000264424; TAA
AIFGEAAPF

SEQ ID NO: 47993 - protein, 9 aa, Homo sapiens
  Table A; Target 47993; HLA-C*14:02; MYH4; ENSG00000264424; TAA
AIFGEAAPF

SEQ ID NO: 47994 - protein, 10 aa, Homo sapiens
  Table A; Target 47994; HLA-A*02:01; MYH4; ENSG00000264424; TAA
AIFGEAAPFL

SEQ ID NO: 47995 - protein, 10 aa, Homo sapiens
  Table A; Target 47995; HLA-A*02:03; MYH4; ENSG00000264424; TAA
AIFGEAAPFL

SEQ ID NO: 47996 - protein, 10 aa, Homo sapiens
  Table A; Target 47996; HLA-A*02:04; MYH4; ENSG00000264424; TAA
AIFGEAAPFL

SEQ ID NO: 47997 - protein, 10 aa, Homo sapiens
  Table A; Target 47997; HLA-A*02:07; MYH4; ENSG00000264424; TAA
AIFGEAAPFL

SEQ ID NO: 47998 - protein, 10 aa, Homo sapiens
  Table A; Target 47998; HLA-A*03:01; MYH4; ENSG00000264424; TAA
AIFGEAAPFL

SEQ ID NO: 47999 - protein, 10 aa, Homo sapiens
  Table A; Target 47999; HLA-A*03:02; MYH4; ENSG00000264424; TAA
AIFGEAAPFL

SEQ ID NO: 48000 - protein, 10 aa, Homo sapiens
  Table A; Target 48000; HLA-B*27:05; MYH4; ENSG00000264424; TAA
AIFGEAAPFL

SEQ ID NO: 48001 - protein, 11 aa, Homo sapiens
  Table A; Target 48001; HLA-A*03:01; MYH4; ENSG00000264424; TAA
AIFGEAAPFLR

SEQ ID NO: 48002 - protein, 11 aa, Homo sapiens
  Table A; Target 48002; HLA-A*03:02; MYH4; ENSG00000264424; TAA
AIFGEAAPFLR

SEQ ID NO: 48003 - protein, 11 aa, Homo sapiens
  Table A; Target 48003; HLA-A*11:01; MYH4; ENSG00000264424; TAA
AIFGEAAPFLR

SEQ ID NO: 48004 - protein, 11 aa, Homo sapiens
  Table A; Target 48004; HLA-A*29:02; MYH4; ENSG00000264424; TAA
AIFGEAAPFLR

SEQ ID NO: 48005 - protein, 11 aa, Homo sapiens
  Table A; Target 48005; HLA-A*31:01; MYH4; ENSG00000264424; TAA
AIFGEAAPFLR

SEQ ID NO: 48006 - protein, 11 aa, Homo sapiens
  Table A; Target 48006; HLA-C*07:06; MYH4; ENSG00000264424; TAA
AIFGEAAPFLR

SEQ ID NO: 48007 - protein, 11 aa, Homo sapiens
  Table A; Target 48007; HLA-A*03:02; MYH4; ENSG00000264424; TAA
AIPEGQFIDSK

SEQ ID NO: 48008 - protein, 11 aa, Homo sapiens
  Table A; Target 48008; HLA-A*11:01; MYH4; ENSG00000264424; TAA
AIPEGQFIDSK

SEQ ID NO: 48009 - protein, 8 aa, Homo sapiens
  Table A; Target 48009; HLA-C*01:02; MYH4; ENSG00000264424; TAA
AIQRTEEL

SEQ ID NO: 48010 - protein, 9 aa, Homo sapiens
  Table A; Target 48010; HLA-A*03:02; MYH4; ENSG00000264424; TAA
AIRGQDDLK

SEQ ID NO: 48011 - protein, 8 aa, Homo sapiens
  Table A; Target 48011; HLA-C*01:02; MYH4; ENSG00000264424; TAA
AITDAAMM

SEQ ID NO: 48012 - protein, 8 aa, Homo sapiens
  Table A; Target 48012; HLA-C*14:02; MYH4; ENSG00000264424; TAA
AITDAAMM

SEQ ID NO: 48013 - protein, 9 aa, Homo sapiens
  Table A; Target 48013; HLA-B*13:02; MYH4; ENSG00000264424; TAA
AITDAAMMA

SEQ ID NO: 48014 - protein, 9 aa, Homo sapiens
  Table A; Target 48014; HLA-A*02:04; MYH4; ENSG00000264424; TAA
AIYEKMFLW

SEQ ID NO: 48015 - protein, 9 aa, Homo sapiens
  Table A; Target 48015; HLA-B*57:01; MYH4; ENSG00000264424; TAA
AIYEKMFLW

SEQ ID NO: 48016 - protein, 10 aa, Homo sapiens
  Table A; Target 48016; HLA-B*07:02; MYH4; ENSG00000264424; TAA
AIYKLTGAVM

SEQ ID NO: 48017 - protein, 10 aa, Homo sapiens
  Table A; Target 48017; HLA-B*15:03; MYH4; ENSG00000264424; TAA
AIYKLTGAVM

SEQ ID NO: 48018 - protein, 10 aa, Homo sapiens
  Table A; Target 48018; HLA-B*46:01; MYH4; ENSG00000264424; TAA
AIYKLTGAVM

SEQ ID NO: 48019 - protein, 9 aa, Homo sapiens
  Table A; Target 48019; HLA-B*15:03; MYH4; ENSG00000264424; TAA
AKAELQRGM

SEQ ID NO: 48020 - protein, 8 aa, Homo sapiens
  Table A; Target 48020; HLA-B*15:03; MYH4; ENSG00000264424; TAA
AKANFEKM

SEQ ID NO: 48021 - protein, 9 aa, Homo sapiens
  Table A; Target 48021; HLA-B*15:03; MYH4; ENSG00000264424; TAA
AKIKEVTER

SEQ ID NO: 48022 - protein, 10 aa, Homo sapiens
  Table A; Target 48022; HLA-B*15:03; MYH4; ENSG00000264424; TAA
AKKAITDAAM

SEQ ID NO: 48023 - protein, 9 aa, Homo sapiens
  Table A; Target 48023; HLA-B*15:03; MYH4; ENSG00000264424; TAA
AKSTLAHAL

SEQ ID NO: 48024 - protein, 9 aa, Homo sapiens
  Table A; Target 48024; HLA-B*38:01; MYH4; ENSG00000264424; TAA
AKSTLAHAL

SEQ ID NO: 48025 - protein, 9 aa, Homo sapiens
  Table A; Target 48025; HLA-B*15:03; MYH4; ENSG00000264424; TAA
AKTEAGATV

SEQ ID NO: 48026 - protein, 9 aa, Homo sapiens
  Table A; Target 48026; HLA-A*03:01; MYH4; ENSG00000264424; TAA
ALAIQLQKK

SEQ ID NO: 48027 - protein, 9 aa, Homo sapiens
  Table A; Target 48027; HLA-A*03:02; MYH4; ENSG00000264424; TAA
ALAIQLQKK

SEQ ID NO: 48028 - protein, 9 aa, Homo sapiens
  Table A; Target 48028; HLA-A*02:04; MYH4; ENSG00000264424; TAA
ALAKAIYEK

SEQ ID NO: 48029 - protein, 9 aa, Homo sapiens
  Table A; Target 48029; HLA-A*03:01; MYH4; ENSG00000264424; TAA
ALAKAIYEK

SEQ ID NO: 48030 - protein, 9 aa, Homo sapiens
  Table A; Target 48030; HLA-A*03:02; MYH4; ENSG00000264424; TAA
ALAKAIYEK

SEQ ID NO: 48031 - protein, 9 aa, Homo sapiens
  Table A; Target 48031; HLA-A*11:01; MYH4; ENSG00000264424; TAA
ALAKAIYEK

SEQ ID NO: 48032 - protein, 9 aa, Homo sapiens
  Table A; Target 48032; HLA-A*03:01; MYH4; ENSG00000264424; TAA
ALDKKQRNF

SEQ ID NO: 48033 - protein, 9 aa, Homo sapiens
  Table A; Target 48033; HLA-A*03:01; MYH4; ENSG00000264424; TAA
ALFRENLNK

SEQ ID NO: 48034 - protein, 9 aa, Homo sapiens
  Table A; Target 48034; HLA-A*03:02; MYH4; ENSG00000264424; TAA
ALFRENLNK

SEQ ID NO: 48035 - protein, 9 aa, Homo sapiens
  Table A; Target 48035; HLA-A*11:01; MYH4; ENSG00000264424; TAA
ALFRENLNK

SEQ ID NO: 48036 - protein, 10 aa, Homo sapiens
  Table A; Target 48036; HLA-A*02:01; MYH4; ENSG00000264424; TAA
ALFRENLNKL

SEQ ID NO: 48037 - protein, 10 aa, Homo sapiens
  Table A; Target 48037; HLA-A*02:03; MYH4; ENSG00000264424; TAA
ALFRENLNKL

SEQ ID NO: 48038 - protein, 10 aa, Homo sapiens
  Table A; Target 48038; HLA-A*02:04; MYH4; ENSG00000264424; TAA
ALFRENLNKL

SEQ ID NO: 48039 - protein, 11 aa, Homo sapiens
  Table A; Target 48039; HLA-A*02:04; MYH4; ENSG00000264424; TAA
ALFRENLNKLM

SEQ ID NO: 48040 - protein, 10 aa, Homo sapiens
  Table A; Target 48040; HLA-A*02:01; MYH4; ENSG00000264424; TAA
ALQEAHQQTL

SEQ ID NO: 48041 - protein, 10 aa, Homo sapiens
  Table A; Target 48041; HLA-A*02:03; MYH4; ENSG00000264424; TAA
ALQEAHQQTL

SEQ ID NO: 48042 - protein, 10 aa, Homo sapiens
  Table A; Target 48042; HLA-A*02:04; MYH4; ENSG00000264424; TAA
ALQEAHQQTL

SEQ ID NO: 48043 - protein, 10 aa, Homo sapiens
  Table A; Target 48043; HLA-A*02:07; MYH4; ENSG00000264424; TAA
ALQEAHQQTL

SEQ ID NO: 48044 - protein, 10 aa, Homo sapiens
  Table A; Target 48044; HLA-A*32:01; MYH4; ENSG00000264424; TAA
ALQEAHQQTL

SEQ ID NO: 48045 - protein, 10 aa, Homo sapiens
  Table A; Target 48045; HLA-B*13:02; MYH4; ENSG00000264424; TAA
ALQEAHQQTL

SEQ ID NO: 48046 - protein, 10 aa, Homo sapiens
  Table A; Target 48046; HLA-B*15:01; MYH4; ENSG00000264424; TAA
ALQEAHQQTL

SEQ ID NO: 48047 - protein, 10 aa, Homo sapiens
  Table A; Target 48047; HLA-B*37:01; MYH4; ENSG00000264424; TAA
ALQEAHQQTL

SEQ ID NO: 48048 - protein, 10 aa, Homo sapiens
  Table A; Target 48048; HLA-B*38:01; MYH4; ENSG00000264424; TAA
ALQEAHQQTL

SEQ ID NO: 48049 - protein, 10 aa, Homo sapiens
  Table A; Target 48049; HLA-B*40:01; MYH4; ENSG00000264424; TAA
ALQEAHQQTL

SEQ ID NO: 48050 - protein, 10 aa, Homo sapiens
  Table A; Target 48050; HLA-B*55:01; MYH4; ENSG00000264424; TAA
ALQEAHQQTL

SEQ ID NO: 48051 - protein, 10 aa, Homo sapiens
  Table A; Target 48051; HLA-B*58:01; MYH4; ENSG00000264424; TAA
ALQEAHQQTL

SEQ ID NO: 48052 - protein, 10 aa, Homo sapiens
  Table A; Target 48052; HLA-C*01:02; MYH4; ENSG00000264424; TAA
ALQEAHQQTL

SEQ ID NO: 48053 - protein, 10 aa, Homo sapiens
  Table A; Target 48053; HLA-C*16:02; MYH4; ENSG00000264424; TAA
ALQEAHQQTL

SEQ ID NO: 48054 - protein, 8 aa, Homo sapiens
  Table A; Target 48054; HLA-B*08:01; MYH4; ENSG00000264424; TAA
ALRIKKKM

SEQ ID NO: 48055 - protein, 9 aa, Homo sapiens
  Table A; Target 48055; HLA-A*23:01; MYH4; ENSG00000264424; TAA
AMKTLAFLF

SEQ ID NO: 48056 - protein, 9 aa, Homo sapiens
  Table A; Target 48056; HLA-A*24:02; MYH4; ENSG00000264424; TAA
AMKTLAFLF

SEQ ID NO: 48057 - protein, 9 aa, Homo sapiens
  Table A; Target 48057; HLA-A*29:02; MYH4; ENSG00000264424; TAA
AMKTLAFLF

SEQ ID NO: 48058 - protein, 9 aa, Homo sapiens
  Table A; Target 48058; HLA-A*31:01; MYH4; ENSG00000264424; TAA
AMKTLAFLF

SEQ ID NO: 48059 - protein, 9 aa, Homo sapiens
  Table A; Target 48059; HLA-B*57:01; MYH4; ENSG00000264424; TAA
AMKTLAFLF

SEQ ID NO: 48060 - protein, 9 aa, Homo sapiens
  Table A; Target 48060; HLA-A*03:02; MYH4; ENSG00000264424; TAA
AMMAEELKK

SEQ ID NO: 48061 - protein, 9 aa, Homo sapiens
  Table A; Target 48061; HLA-A*11:01; MYH4; ENSG00000264424; TAA
AMMAEELKK

SEQ ID NO: 48062 - protein, 9 aa, Homo sapiens
  Table A; Target 48062; HLA-A*02:01; MYH4; ENSG00000264424; TAA
AMMTHLHEP

SEQ ID NO: 48063 - protein, 9 aa, Homo sapiens
  Table A; Target 48063; HLA-A*32:01; MYH4; ENSG00000264424; TAA
AMVERRANL

SEQ ID NO: 48064 - protein, 9 aa, Homo sapiens
  Table A; Target 48064; HLA-B*08:01; MYH4; ENSG00000264424; TAA
AMVERRANL

SEQ ID NO: 48065 - protein, 9 aa, Homo sapiens
  Table A; Target 48065; HLA-C*16:01; MYH4; ENSG00000264424; TAA
AMVERRANL

SEQ ID NO: 48066 - protein, 10 aa, Homo sapiens
  Table A; Target 48066; HLA-A*03:01; MYH4; ENSG00000264424; TAA
AMVSQLSRGK

SEQ ID NO: 48067 - protein, 10 aa, Homo sapiens
  Table A; Target 48067; HLA-A*03:02; MYH4; ENSG00000264424; TAA
AMVSQLSRGK

SEQ ID NO: 48068 - protein, 9 aa, Homo sapiens
  Table A; Target 48068; HLA-A*11:01; MYH4; ENSG00000264424; TAA
ANMKEEFEK

SEQ ID NO: 48069 - protein, 9 aa, Homo sapiens
  Table A; Target 48069; HLA-B*07:02; MYH4; ENSG00000264424; TAA
ANRQAAEAL

SEQ ID NO: 48070 - protein, 9 aa, Homo sapiens
  Table A; Target 48070; HLA-C*01:02; MYH4; ENSG00000264424; TAA
ANRQAAEAL

SEQ ID NO: 48071 - protein, 9 aa, Homo sapiens
  Table A; Target 48071; HLA-C*07:02; MYH4; ENSG00000264424; TAA
ANRQAAEAL

SEQ ID NO: 48072 - protein, 9 aa, Homo sapiens
  Table A; Target 48072; HLA-C*07:06; MYH4; ENSG00000264424; TAA
ANSEVAQWR

SEQ ID NO: 48073 - protein, 9 aa, Homo sapiens
  Table A; Target 48073; HLA-B*07:02; MYH4; ENSG00000264424; TAA
APFLRKSEK

SEQ ID NO: 48074 - protein, 9 aa, Homo sapiens
  Table A; Target 48074; HLA-C*07:02; MYH4; ENSG00000264424; TAA
APFLRKSEK

SEQ ID NO: 48075 - protein, 8 aa, Homo sapiens
  Table A; Target 48075; HLA-B*51:01; MYH4; ENSG00000264424; TAA
APPHIFSI

SEQ ID NO: 48076 - protein, 8 aa, Homo sapiens
  Table A; Target 48076; HLA-A*11:01; MYH4; ENSG00000264424; TAA
AQIEMNKK

SEQ ID NO: 48077 - protein, 8 aa, Homo sapiens
  Table A; Target 48077; HLA-B*27:05; MYH4; ENSG00000264424; TAA
AQIEMNKK

SEQ ID NO: 48078 - protein, 10 aa, Homo sapiens
  Table A; Target 48078; HLA-B*13:02; MYH4; ENSG00000264424; TAA
AQLITRTQAI

SEQ ID NO: 48079 - protein, 9 aa, Homo sapiens
  Table A; Target 48079; HLA-A*03:01; MYH4; ENSG00000264424; TAA
AQNKPFDAK

SEQ ID NO: 48080 - protein, 9 aa, Homo sapiens
  Table A; Target 48080; HLA-A*03:02; MYH4; ENSG00000264424; TAA
AQNKPFDAK

SEQ ID NO: 48081 - protein, 9 aa, Homo sapiens
  Table A; Target 48081; HLA-A*11:01; MYH4; ENSG00000264424; TAA
AQNKPFDAK

SEQ ID NO: 48082 - protein, 9 aa, Homo sapiens
  Table A; Target 48082; HLA-A*32:01; MYH4; ENSG00000264424; TAA
AQNKPFDAK

SEQ ID NO: 48083 - protein, 10 aa, Homo sapiens
  Table A; Target 48083; HLA-B*27:02; MYH4; ENSG00000264424; TAA
ARLHTESGEF

SEQ ID NO: 48084 - protein, 10 aa, Homo sapiens
  Table A; Target 48084; HLA-B*27:05; MYH4; ENSG00000264424; TAA
ARLHTESGEF

SEQ ID NO: 48085 - protein, 10 aa, Homo sapiens
  Table A; Target 48085; HLA-C*16:04; MYH4; ENSG00000264424; TAA
ARLHTESGEF

SEQ ID NO: 48086 - protein, 9 aa, Homo sapiens
  Table A; Target 48086; HLA-B*27:05; MYH4; ENSG00000264424; TAA
ARNAEEKAK

SEQ ID NO: 48087 - protein, 8 aa, Homo sapiens
  Table A; Target 48087; HLA-A*30:02; MYH4; ENSG00000264424; TAA
ASADIETY

SEQ ID NO: 48088 - protein, 8 aa, Homo sapiens
  Table A; Target 48088; HLA-B*15:01; MYH4; ENSG00000264424; TAA
ASADIETY

SEQ ID NO: 48089 - protein, 8 aa, Homo sapiens
  Table A; Target 48089; HLA-B*58:01; MYH4; ENSG00000264424; TAA
ASADIETY

SEQ ID NO: 48090 - protein, 9 aa, Homo sapiens
  Table A; Target 48090; HLA-A*02:01; MYH4; ENSG00000264424; TAA
ASADIETYL

SEQ ID NO: 48091 - protein, 9 aa, Homo sapiens
  Table A; Target 48091; HLA-A*23:01; MYH4; ENSG00000264424; TAA
ASADIETYL

SEQ ID NO: 48092 - protein, 9 aa, Homo sapiens
  Table A; Target 48092; HLA-A*32:01; MYH4; ENSG00000264424; TAA
ASADIETYL

SEQ ID NO: 48093 - protein, 9 aa, Homo sapiens
  Table A; Target 48093; HLA-A*68:02; MYH4; ENSG00000264424; TAA
ASADIETYL

SEQ ID NO: 48094 - protein, 9 aa, Homo sapiens
  Table A; Target 48094; HLA-B*13:02; MYH4; ENSG00000264424; TAA
ASADIETYL

SEQ ID NO: 48095 - protein, 9 aa, Homo sapiens
  Table A; Target 48095; HLA-B*27:05; MYH4; ENSG00000264424; TAA
ASADIETYL

SEQ ID NO: 48096 - protein, 9 aa, Homo sapiens
  Table A; Target 48096; HLA-B*38:01; MYH4; ENSG00000264424; TAA
ASADIETYL

SEQ ID NO: 48097 - protein, 9 aa, Homo sapiens
  Table A; Target 48097; HLA-B*39:01; MYH4; ENSG00000264424; TAA
ASADIETYL

SEQ ID NO: 48098 - protein, 9 aa, Homo sapiens
  Table A; Target 48098; HLA-B*40:01; MYH4; ENSG00000264424; TAA
ASADIETYL

SEQ ID NO: 48099 - protein, 9 aa, Homo sapiens
  Table A; Target 48099; HLA-B*58:01; MYH4; ENSG00000264424; TAA
ASADIETYL

SEQ ID NO: 48100 - protein, 9 aa, Homo sapiens
  Table A; Target 48100; HLA-C*02:02; MYH4; ENSG00000264424; TAA
ASADIETYL

SEQ ID NO: 48101 - protein, 9 aa, Homo sapiens
  Table A; Target 48101; HLA-C*05:01; MYH4; ENSG00000264424; TAA
ASADIETYL

SEQ ID NO: 48102 - protein, 9 aa, Homo sapiens
  Table A; Target 48102; HLA-C*12:03; MYH4; ENSG00000264424; TAA
ASADIETYL

SEQ ID NO: 48103 - protein, 9 aa, Homo sapiens
  Table A; Target 48103; HLA-C*16:02; MYH4; ENSG00000264424; TAA
ASADIETYL

SEQ ID NO: 48104 - protein, 9 aa, Homo sapiens
  Table A; Target 48104; HLA-C*16:04; MYH4; ENSG00000264424; TAA
ASADIETYL

SEQ ID NO: 48105 - protein, 9 aa, Homo sapiens
  Table A; Target 48105; HLA-A*30:02; MYH4; ENSG00000264424; TAA
ASAIPEGQF

SEQ ID NO: 48106 - protein, 9 aa, Homo sapiens
  Table A; Target 48106; HLA-B*15:01; MYH4; ENSG00000264424; TAA
ASAIPEGQF

SEQ ID NO: 48107 - protein, 9 aa, Homo sapiens
  Table A; Target 48107; HLA-B*58:01; MYH4; ENSG00000264424; TAA
ASAIPEGQF

SEQ ID NO: 48108 - protein, 9 aa, Homo sapiens
  Table A; Target 48108; HLA-C*05:01; MYH4; ENSG00000264424; TAA
ASAIPEGQF

SEQ ID NO: 48109 - protein, 9 aa, Homo sapiens
  Table A; Target 48109; HLA-C*16:01; MYH4; ENSG00000264424; TAA
ASAIPEGQF

SEQ ID NO: 48110 - protein, 8 aa, Homo sapiens
  Table A; Target 48110; HLA-B*58:01; MYH4; ENSG00000264424; TAA
ASERVQLL

SEQ ID NO: 48111 - protein, 9 aa, Homo sapiens
  Table A; Target 48111; HLA-A*01:01; MYH4; ENSG00000264424; TAA
ASERVQLLH

SEQ ID NO: 48112 - protein, 9 aa, Homo sapiens
  Table A; Target 48112; HLA-A*31:01; MYH4; ENSG00000264424; TAA
ASLEKTKQR

SEQ ID NO: 48113 - protein, 8 aa, Homo sapiens
  Table A; Target 48113; HLA-C*16:01; MYH4; ENSG00000264424; TAA
ASLERTER

SEQ ID NO: 48114 - protein, 9 aa, Homo sapiens
  Table A; Target 48114; HLA-A*03:01; MYH4; ENSG00000264424; TAA
ASNMETVSK

SEQ ID NO: 48115 - protein, 9 aa, Homo sapiens
  Table A; Target 48115; HLA-A*03:02; MYH4; ENSG00000264424; TAA
ASNMETVSK

SEQ ID NO: 48116 - protein, 9 aa, Homo sapiens
  Table A; Target 48116; HLA-A*11:01; MYH4; ENSG00000264424; TAA
ASNMETVSK

SEQ ID NO: 48117 - protein, 9 aa, Homo sapiens
  Table A; Target 48117; HLA-A*31:01; MYH4; ENSG00000264424; TAA
ASNMETVSK

SEQ ID NO: 48118 - protein, 9 aa, Homo sapiens
  Table A; Target 48118; HLA-A*68:01; MYH4; ENSG00000264424; TAA
ASNMETVSK

SEQ ID NO: 48119 - protein, 9 aa, Homo sapiens
  Table A; Target 48119; HLA-B*27:02; MYH4; ENSG00000264424; TAA
ASNMETVSK

SEQ ID NO: 48120 - protein, 9 aa, Homo sapiens
  Table A; Target 48120; HLA-B*27:05; MYH4; ENSG00000264424; TAA
ASNMETVSK

SEQ ID NO: 48121 - protein, 9 aa, Homo sapiens
  Table A; Target 48121; HLA-B*57:01; MYH4; ENSG00000264424; TAA
ASNMETVSK

SEQ ID NO: 48122 - protein, 9 aa, Homo sapiens
  Table A; Target 48122; HLA-B*58:01; MYH4; ENSG00000264424; TAA
ASNMETVSK

SEQ ID NO: 48123 - protein, 9 aa, Homo sapiens
  Table A; Target 48123; HLA-C*07:06; MYH4; ENSG00000264424; TAA
ASNMETVSK

SEQ ID NO: 48124 - protein, 11 aa, Homo sapiens
  Table A; Target 48124; HLA-A*03:01; MYH4; ENSG00000264424; TAA
ASNMETVSKAK

SEQ ID NO: 48125 - protein, 11 aa, Homo sapiens
  Table A; Target 48125; HLA-A*03:02; MYH4; ENSG00000264424; TAA
ASNMETVSKAK

SEQ ID NO: 48126 - protein, 11 aa, Homo sapiens
  Table A; Target 48126; HLA-A*11:01; MYH4; ENSG00000264424; TAA
ASNMETVSKAK

SEQ ID NO: 48127 - protein, 11 aa, Homo sapiens
  Table A; Target 48127; HLA-A*31:01; MYH4; ENSG00000264424; TAA
ASNMETVSKAK

SEQ ID NO: 48128 - protein, 11 aa, Homo sapiens
  Table A; Target 48128; HLA-B*27:02; MYH4; ENSG00000264424; TAA
ASNMETVSKAK

SEQ ID NO: 48129 - protein, 11 aa, Homo sapiens
  Table A; Target 48129; HLA-C*06:02; MYH4; ENSG00000264424; TAA
ASNMETVSKAK

SEQ ID NO: 48130 - protein, 9 aa, Homo sapiens
  Table A; Target 48130; HLA-B*58:01; MYH4; ENSG00000264424; TAA
ASQKESRSL

SEQ ID NO: 48131 - protein, 9 aa, Homo sapiens
  Table A; Target 48131; HLA-C*03:03; MYH4; ENSG00000264424; TAA
ASQKESRSL

SEQ ID NO: 48132 - protein, 9 aa, Homo sapiens
  Table A; Target 48132; HLA-C*03:04; MYH4; ENSG00000264424; TAA
ASQKESRSL

SEQ ID NO: 48133 - protein, 9 aa, Homo sapiens
  Table A; Target 48133; HLA-C*16:01; MYH4; ENSG00000264424; TAA
ASQKESRSL

SEQ ID NO: 48134 - protein, 8 aa, Homo sapiens
  Table A; Target 48134; HLA-A*03:01; MYH4; ENSG00000264424; TAA
ATAAALRK

SEQ ID NO: 48135 - protein, 8 aa, Homo sapiens
  Table A; Target 48135; HLA-A*03:02; MYH4; ENSG00000264424; TAA
ATAAALRK

SEQ ID NO: 48136 - protein, 8 aa, Homo sapiens
  Table A; Target 48136; HLA-A*11:01; MYH4; ENSG00000264424; TAA
ATAAALRK

SEQ ID NO: 48137 - protein, 9 aa, Homo sapiens
  Table A; Target 48137; HLA-A*03:01; MYH4; ENSG00000264424; TAA
ATAAALRKK

SEQ ID NO: 48138 - protein, 9 aa, Homo sapiens
  Table A; Target 48138; HLA-A*03:02; MYH4; ENSG00000264424; TAA
ATAAALRKK

SEQ ID NO: 48139 - protein, 9 aa, Homo sapiens
  Table A; Target 48139; HLA-A*11:01; MYH4; ENSG00000264424; TAA
ATAAALRKK

SEQ ID NO: 48140 - protein, 9 aa, Homo sapiens
  Table A; Target 48140; HLA-C*06:02; MYH4; ENSG00000264424; TAA
ATAAALRKK

SEQ ID NO: 48141 - protein, 9 aa, Homo sapiens
  Table A; Target 48141; HLA-C*16:01; MYH4; ENSG00000264424; TAA
ATAAALRKK

SEQ ID NO: 48142 - protein, 8 aa, Homo sapiens
  Table A; Target 48142; HLA-C*04:01; MYH4; ENSG00000264424; TAA
ATDSAVDI

SEQ ID NO: 48143 - protein, 8 aa, Homo sapiens
  Table A; Target 48143; HLA-C*05:01; MYH4; ENSG00000264424; TAA
ATDSAVDI

SEQ ID NO: 48144 - protein, 9 aa, Homo sapiens
  Table A; Target 48144; HLA-A*01:01; MYH4; ENSG00000264424; TAA
ATDSAVDIL

SEQ ID NO: 48145 - protein, 9 aa, Homo sapiens
  Table A; Target 48145; HLA-B*38:01; MYH4; ENSG00000264424; TAA
ATDSAVDIL

SEQ ID NO: 48146 - protein, 9 aa, Homo sapiens
  Table A; Target 48146; HLA-C*04:01; MYH4; ENSG00000264424; TAA
ATDSAVDIL

SEQ ID NO: 48147 - protein, 9 aa, Homo sapiens
  Table A; Target 48147; HLA-C*05:01; MYH4; ENSG00000264424; TAA
ATDSAVDIL

SEQ ID NO: 48148 - protein, 11 aa, Homo sapiens
  Table A; Target 48148; HLA-A*01:01; MYH4; ENSG00000264424; TAA
ATDSAVDILGF

SEQ ID NO: 48149 - protein, 11 aa, Homo sapiens
  Table A; Target 48149; HLA-A*02:07; MYH4; ENSG00000264424; TAA
ATDSAVDILGF

SEQ ID NO: 48150 - protein, 11 aa, Homo sapiens
  Table A; Target 48150; HLA-A*03:02; MYH4; ENSG00000264424; TAA
ATDSAVDILGF

SEQ ID NO: 48151 - protein, 11 aa, Homo sapiens
  Table A; Target 48151; HLA-A*11:01; MYH4; ENSG00000264424; TAA
ATDSAVDILGF

SEQ ID NO: 48152 - protein, 11 aa, Homo sapiens
  Table A; Target 48152; HLA-A*25:01; MYH4; ENSG00000264424; TAA
ATDSAVDILGF

SEQ ID NO: 48153 - protein, 11 aa, Homo sapiens
  Table A; Target 48153; HLA-A*26:01; MYH4; ENSG00000264424; TAA
ATDSAVDILGF

SEQ ID NO: 48154 - protein, 11 aa, Homo sapiens
  Table A; Target 48154; HLA-A*32:01; MYH4; ENSG00000264424; TAA
ATDSAVDILGF

SEQ ID NO: 48155 - protein, 11 aa, Homo sapiens
  Table A; Target 48155; HLA-B*58:01; MYH4; ENSG00000264424; TAA
ATDSAVDILGF

SEQ ID NO: 48156 - protein, 11 aa, Homo sapiens
  Table A; Target 48156; HLA-C*05:01; MYH4; ENSG00000264424; TAA
ATDSAVDILGF

SEQ ID NO: 48157 - protein, 9 aa, Homo sapiens
  Table A; Target 48157; HLA-A*01:01; MYH4; ENSG00000264424; TAA
ATDTSFKNK

SEQ ID NO: 48158 - protein, 9 aa, Homo sapiens
  Table A; Target 48158; HLA-A*03:01; MYH4; ENSG00000264424; TAA
ATDTSFKNK

SEQ ID NO: 48159 - protein, 9 aa, Homo sapiens
  Table A; Target 48159; HLA-A*03:02; MYH4; ENSG00000264424; TAA
ATDTSFKNK

SEQ ID NO: 48160 - protein, 9 aa, Homo sapiens
  Table A; Target 48160; HLA-A*11:01; MYH4; ENSG00000264424; TAA
ATDTSFKNK

SEQ ID NO: 48161 - protein, 9 aa, Homo sapiens
  Table A; Target 48161; HLA-A*31:01; MYH4; ENSG00000264424; TAA
ATDTSFKNK

SEQ ID NO: 48162 - protein, 10 aa, Homo sapiens
  Table A; Target 48162; HLA-A*01:01; MYH4; ENSG00000264424; TAA
ATDTSFKNKL

SEQ ID NO: 48163 - protein, 11 aa, Homo sapiens
  Table A; Target 48163; HLA-A*01:01; MYH4; ENSG00000264424; TAA
ATDTSFKNKLY

SEQ ID NO: 48164 - protein, 9 aa, Homo sapiens
  Table A; Target 48164; HLA-A*01:01; MYH4; ENSG00000264424; TAA
ATIAVTGEK

SEQ ID NO: 48165 - protein, 9 aa, Homo sapiens
  Table A; Target 48165; HLA-A*03:01; MYH4; ENSG00000264424; TAA
ATIAVTGEK

SEQ ID NO: 48166 - protein, 9 aa, Homo sapiens
  Table A; Target 48166; HLA-A*03:02; MYH4; ENSG00000264424; TAA
ATIAVTGEK

SEQ ID NO: 48167 - protein, 9 aa, Homo sapiens
  Table A; Target 48167; HLA-A*11:01; MYH4; ENSG00000264424; TAA
ATIAVTGEK

SEQ ID NO: 48168 - protein, 9 aa, Homo sapiens
  Table A; Target 48168; HLA-A*25:01; MYH4; ENSG00000264424; TAA
ATIAVTGEK

SEQ ID NO: 48169 - protein, 9 aa, Homo sapiens
  Table A; Target 48169; HLA-A*26:01; MYH4; ENSG00000264424; TAA
ATIAVTGEK

SEQ ID NO: 48170 - protein, 9 aa, Homo sapiens
  Table A; Target 48170; HLA-A*30:02; MYH4; ENSG00000264424; TAA
ATIAVTGEK

SEQ ID NO: 48171 - protein, 9 aa, Homo sapiens
  Table A; Target 48171; HLA-A*31:01; MYH4; ENSG00000264424; TAA
ATIAVTGEK

SEQ ID NO: 48172 - protein, 9 aa, Homo sapiens
  Table A; Target 48172; HLA-A*33:01; MYH4; ENSG00000264424; TAA
ATIAVTGEK

SEQ ID NO: 48173 - protein, 9 aa, Homo sapiens
  Table A; Target 48173; HLA-A*33:03; MYH4; ENSG00000264424; TAA
ATIAVTGEK

SEQ ID NO: 48174 - protein, 9 aa, Homo sapiens
  Table A; Target 48174; HLA-A*68:01; MYH4; ENSG00000264424; TAA
ATIAVTGEK

SEQ ID NO: 48175 - protein, 9 aa, Homo sapiens
  Table A; Target 48175; HLA-A*68:02; MYH4; ENSG00000264424; TAA
ATIAVTGEK

SEQ ID NO: 48176 - protein, 9 aa, Homo sapiens
  Table A; Target 48176; HLA-B*27:02; MYH4; ENSG00000264424; TAA
ATIAVTGEK

SEQ ID NO: 48177 - protein, 9 aa, Homo sapiens
  Table A; Target 48177; HLA-B*27:05; MYH4; ENSG00000264424; TAA
ATIAVTGEK

SEQ ID NO: 48178 - protein, 9 aa, Homo sapiens
  Table A; Target 48178; HLA-B*40:02; MYH4; ENSG00000264424; TAA
ATIAVTGEK

SEQ ID NO: 48179 - protein, 9 aa, Homo sapiens
  Table A; Target 48179; HLA-B*46:01; MYH4; ENSG00000264424; TAA
ATIAVTGEK

SEQ ID NO: 48180 - protein, 9 aa, Homo sapiens
  Table A; Target 48180; HLA-B*57:01; MYH4; ENSG00000264424; TAA
ATIAVTGEK

SEQ ID NO: 48181 - protein, 9 aa, Homo sapiens
  Table A; Target 48181; HLA-B*58:01; MYH4; ENSG00000264424; TAA
ATIAVTGEK

SEQ ID NO: 48182 - protein, 9 aa, Homo sapiens
  Table A; Target 48182; HLA-C*01:02; MYH4; ENSG00000264424; TAA
ATIAVTGEK

SEQ ID NO: 48183 - protein, 9 aa, Homo sapiens
  Table A; Target 48183; HLA-C*02:02; MYH4; ENSG00000264424; TAA
ATIAVTGEK

SEQ ID NO: 48184 - protein, 9 aa, Homo sapiens
  Table A; Target 48184; HLA-C*03:03; MYH4; ENSG00000264424; TAA
ATIAVTGEK

SEQ ID NO: 48185 - protein, 9 aa, Homo sapiens
  Table A; Target 48185; HLA-C*03:04; MYH4; ENSG00000264424; TAA
ATIAVTGEK

SEQ ID NO: 48186 - protein, 9 aa, Homo sapiens
  Table A; Target 48186; HLA-C*06:02; MYH4; ENSG00000264424; TAA
ATIAVTGEK

SEQ ID NO: 48187 - protein, 9 aa, Homo sapiens
  Table A; Target 48187; HLA-C*07:06; MYH4; ENSG00000264424; TAA
ATIAVTGEK

SEQ ID NO: 48188 - protein, 9 aa, Homo sapiens
  Table A; Target 48188; HLA-C*16:04; MYH4; ENSG00000264424; TAA
ATIAVTGEK

SEQ ID NO: 48189 - protein, 10 aa, Homo sapiens
  Table A; Target 48189; HLA-A*01:01; MYH4; ENSG00000264424; TAA
ATIAVTGEKK

SEQ ID NO: 48190 - protein, 10 aa, Homo sapiens
  Table A; Target 48190; HLA-A*03:01; MYH4; ENSG00000264424; TAA
ATIAVTGEKK

SEQ ID NO: 48191 - protein, 10 aa, Homo sapiens
  Table A; Target 48191; HLA-A*03:02; MYH4; ENSG00000264424; TAA
ATIAVTGEKK

SEQ ID NO: 48192 - protein, 10 aa, Homo sapiens
  Table A; Target 48192; HLA-A*11:01; MYH4; ENSG00000264424; TAA
ATIAVTGEKK

SEQ ID NO: 48193 - protein, 10 aa, Homo sapiens
  Table A; Target 48193; HLA-A*31:01; MYH4; ENSG00000264424; TAA
ATIAVTGEKK

SEQ ID NO: 48194 - protein, 10 aa, Homo sapiens
  Table A; Target 48194; HLA-A*32:01; MYH4; ENSG00000264424; TAA
ATIAVTGEKK

SEQ ID NO: 48195 - protein, 10 aa, Homo sapiens
  Table A; Target 48195; HLA-A*33:03; MYH4; ENSG00000264424; TAA
ATIAVTGEKK

SEQ ID NO: 48196 - protein, 10 aa, Homo sapiens
  Table A; Target 48196; HLA-A*68:01; MYH4; ENSG00000264424; TAA
ATIAVTGEKK

SEQ ID NO: 48197 - protein, 10 aa, Homo sapiens
  Table A; Target 48197; HLA-A*68:02; MYH4; ENSG00000264424; TAA
ATIAVTGEKK

SEQ ID NO: 48198 - protein, 10 aa, Homo sapiens
  Table A; Target 48198; HLA-B*27:02; MYH4; ENSG00000264424; TAA
ATIAVTGEKK

SEQ ID NO: 48199 - protein, 10 aa, Homo sapiens
  Table A; Target 48199; HLA-B*27:05; MYH4; ENSG00000264424; TAA
ATIAVTGEKK

SEQ ID NO: 48200 - protein, 10 aa, Homo sapiens
  Table A; Target 48200; HLA-B*57:01; MYH4; ENSG00000264424; TAA
ATIAVTGEKK

SEQ ID NO: 48201 - protein, 10 aa, Homo sapiens
  Table A; Target 48201; HLA-B*58:01; MYH4; ENSG00000264424; TAA
ATIAVTGEKK

SEQ ID NO: 48202 - protein, 10 aa, Homo sapiens
  Table A; Target 48202; HLA-C*06:02; MYH4; ENSG00000264424; TAA
ATIAVTGEKK

SEQ ID NO: 48203 - protein, 10 aa, Homo sapiens
  Table A; Target 48203; HLA-C*07:06; MYH4; ENSG00000264424; TAA
ATIAVTGEKK

SEQ ID NO: 48204 - protein, 11 aa, Homo sapiens
  Table A; Target 48204; HLA-A*03:02; MYH4; ENSG00000264424; TAA
ATIAVTGEKKK

SEQ ID NO: 48205 - protein, 11 aa, Homo sapiens
  Table A; Target 48205; HLA-A*11:01; MYH4; ENSG00000264424; TAA
ATIAVTGEKKK

SEQ ID NO: 48206 - protein, 11 aa, Homo sapiens
  Table A; Target 48206; HLA-B*57:01; MYH4; ENSG00000264424; TAA
ATIAVTGEKKK

SEQ ID NO: 48207 - protein, 8 aa, Homo sapiens
  Table A; Target 48207; HLA-A*32:01; MYH4; ENSG00000264424; TAA
ATSAQIEM

SEQ ID NO: 48208 - protein, 8 aa, Homo sapiens
  Table A; Target 48208; HLA-B*58:01; MYH4; ENSG00000264424; TAA
ATSAQIEM

SEQ ID NO: 48209 - protein, 8 aa, Homo sapiens
  Table A; Target 48209; HLA-C*16:01; MYH4; ENSG00000264424; TAA
ATSAQIEM

SEQ ID NO: 48210 - protein, 10 aa, Homo sapiens
  Table A; Target 48210; HLA-A*03:01; MYH4; ENSG00000264424; TAA
ATSAQIEMNK

SEQ ID NO: 48211 - protein, 10 aa, Homo sapiens
  Table A; Target 48211; HLA-A*03:02; MYH4; ENSG00000264424; TAA
ATSAQIEMNK

SEQ ID NO: 48212 - protein, 10 aa, Homo sapiens
  Table A; Target 48212; HLA-A*11:01; MYH4; ENSG00000264424; TAA
ATSAQIEMNK

SEQ ID NO: 48213 - protein, 10 aa, Homo sapiens
  Table A; Target 48213; HLA-A*31:01; MYH4; ENSG00000264424; TAA
ATSAQIEMNK

SEQ ID NO: 48214 - protein, 10 aa, Homo sapiens
  Table A; Target 48214; HLA-A*33:03; MYH4; ENSG00000264424; TAA
ATSAQIEMNK

SEQ ID NO: 48215 - protein, 10 aa, Homo sapiens
  Table A; Target 48215; HLA-A*68:01; MYH4; ENSG00000264424; TAA
ATSAQIEMNK

SEQ ID NO: 48216 - protein, 10 aa, Homo sapiens
  Table A; Target 48216; HLA-B*27:02; MYH4; ENSG00000264424; TAA
ATSAQIEMNK

SEQ ID NO: 48217 - protein, 10 aa, Homo sapiens
  Table A; Target 48217; HLA-B*27:05; MYH4; ENSG00000264424; TAA
ATSAQIEMNK

SEQ ID NO: 48218 - protein, 10 aa, Homo sapiens
  Table A; Target 48218; HLA-C*06:02; MYH4; ENSG00000264424; TAA
ATSAQIEMNK

SEQ ID NO: 48219 - protein, 10 aa, Homo sapiens
  Table A; Target 48219; HLA-C*07:06; MYH4; ENSG00000264424; TAA
ATSAQIEMNK

SEQ ID NO: 48220 - protein, 11 aa, Homo sapiens
  Table A; Target 48220; HLA-A*03:01; MYH4; ENSG00000264424; TAA
ATSAQIEMNKK

SEQ ID NO: 48221 - protein, 11 aa, Homo sapiens
  Table A; Target 48221; HLA-A*03:02; MYH4; ENSG00000264424; TAA
ATSAQIEMNKK

SEQ ID NO: 48222 - protein, 11 aa, Homo sapiens
  Table A; Target 48222; HLA-A*11:01; MYH4; ENSG00000264424; TAA
ATSAQIEMNKK

SEQ ID NO: 48223 - protein, 11 aa, Homo sapiens
  Table A; Target 48223; HLA-B*57:01; MYH4; ENSG00000264424; TAA
ATVTVKEDQVF

SEQ ID NO: 48224 - protein, 11 aa, Homo sapiens
  Table A; Target 48224; HLA-B*58:01; MYH4; ENSG00000264424; TAA
ATVTVKEDQVF

SEQ ID NO: 48225 - protein, 9 aa, Homo sapiens
  Table A; Target 48225; HLA-A*02:07; MYH4; ENSG00000264424; TAA
AVDILGFTA

SEQ ID NO: 48226 - protein, 9 aa, Homo sapiens
  Table A; Target 48226; HLA-B*56:01; MYH4; ENSG00000264424; TAA
AVDILGFTA

SEQ ID NO: 48227 - protein, 9 aa, Homo sapiens
  Table A; Target 48227; HLA-B*13:02; MYH4; ENSG00000264424; TAA
AVGALAKAI

SEQ ID NO: 48228 - protein, 9 aa, Homo sapiens
  Table A; Target 48228; HLA-B*44:03; MYH4; ENSG00000264424; TAA
AVGALAKAI

SEQ ID NO: 48229 - protein, 9 aa, Homo sapiens
  Table A; Target 48229; HLA-C*01:02; MYH4; ENSG00000264424; TAA
AVGALAKAI

SEQ ID NO: 48230 - protein, 10 aa, Homo sapiens
  Table A; Target 48230; HLA-A*29:02; MYH4; ENSG00000264424; TAA
AVGALAKAIY

SEQ ID NO: 48231 - protein, 10 aa, Homo sapiens
  Table A; Target 48231; HLA-A*30:02; MYH4; ENSG00000264424; TAA
AVGALAKAIY

SEQ ID NO: 48232 - protein, 10 aa, Homo sapiens
  Table A; Target 48232; HLA-A*32:01; MYH4; ENSG00000264424; TAA
AVGALAKAIY

SEQ ID NO: 48233 - protein, 10 aa, Homo sapiens
  Table A; Target 48233; HLA-B*15:01; MYH4; ENSG00000264424; TAA
AVGALAKAIY

SEQ ID NO: 48234 - protein, 9 aa, Homo sapiens
  Table A; Target 48234; HLA-A*31:01; MYH4; ENSG00000264424; TAA
AVLYNLKER

SEQ ID NO: 48235 - protein, 9 aa, Homo sapiens
  Table A; Target 48235; HLA-A*33:01; MYH4; ENSG00000264424; TAA
AVLYNLKER

SEQ ID NO: 48236 - protein, 10 aa, Homo sapiens
  Table A; Target 48236; HLA-A*29:02; MYH4; ENSG00000264424; TAA
AVLYNLKERY

SEQ ID NO: 48237 - protein, 10 aa, Homo sapiens
  Table A; Target 48237; HLA-A*30:02; MYH4; ENSG00000264424; TAA
AVLYNLKERY

SEQ ID NO: 48238 - protein, 9 aa, Homo sapiens
  Table A; Target 48238; HLA-A*03:01; MYH4; ENSG00000264424; TAA
AVMHYGNMK

SEQ ID NO: 48239 - protein, 9 aa, Homo sapiens
  Table A; Target 48239; HLA-A*03:02; MYH4; ENSG00000264424; TAA
AVMHYGNMK

SEQ ID NO: 48240 - protein, 9 aa, Homo sapiens
  Table A; Target 48240; HLA-A*11:01; MYH4; ENSG00000264424; TAA
AVMHYGNMK

SEQ ID NO: 48241 - protein, 9 aa, Homo sapiens
  Table A; Target 48241; HLA-A*32:01; MYH4; ENSG00000264424; TAA
AVNSKCASL

SEQ ID NO: 48242 - protein, 9 aa, Homo sapiens
  Table A; Target 48242; HLA-B*07:02; MYH4; ENSG00000264424; TAA
AVNSKCASL

SEQ ID NO: 48243 - protein, 9 aa, Homo sapiens
  Table A; Target 48243; HLA-B*08:01; MYH4; ENSG00000264424; TAA
AVNSKCASL

SEQ ID NO: 48244 - protein, 9 aa, Homo sapiens
  Table A; Target 48244; HLA-C*01:02; MYH4; ENSG00000264424; TAA
AVNSKCASL

SEQ ID NO: 48245 - protein, 9 aa, Homo sapiens
  Table A; Target 48245; HLA-C*07:02; MYH4; ENSG00000264424; TAA
AVNSKCASL

SEQ ID NO: 48246 - protein, 9 aa, Homo sapiens
  Table A; Target 48246; HLA-C*14:02; MYH4; ENSG00000264424; TAA
AVNSKCASL

SEQ ID NO: 48247 - protein, 9 aa, Homo sapiens
  Table A; Target 48247; HLA-A*24:02; MYH4; ENSG00000264424; TAA
AYEESLDHL

SEQ ID NO: 48248 - protein, 9 aa, Homo sapiens
  Table A; Target 48248; HLA-A*23:01; MYH4; ENSG00000264424; TAA
AYLTSLNSA

SEQ ID NO: 48249 - protein, 9 aa, Homo sapiens
  Table A; Target 48249; HLA-A*24:02; MYH4; ENSG00000264424; TAA
AYLTSLNSA

SEQ ID NO: 48250 - protein, 9 aa, Homo sapiens
  Table A; Target 48250; HLA-C*01:02; MYH4; ENSG00000264424; TAA
AYLTSLNSA

SEQ ID NO: 48251 - protein, 9 aa, Homo sapiens
  Table A; Target 48251; HLA-C*04:01; MYH4; ENSG00000264424; TAA
AYLTSLNSA

SEQ ID NO: 48252 - protein, 9 aa, Homo sapiens
  Table A; Target 48252; HLA-C*14:02; MYH4; ENSG00000264424; TAA
AYLTSLNSA

SEQ ID NO: 48253 - protein, 11 aa, Homo sapiens
  Table A; Target 48253; HLA-A*23:01; MYH4; ENSG00000264424; TAA
AYLTSLNSADL

SEQ ID NO: 48254 - protein, 11 aa, Homo sapiens
  Table A; Target 48254; HLA-A*24:02; MYH4; ENSG00000264424; TAA
AYLTSLNSADL

SEQ ID NO: 48255 - protein, 11 aa, Homo sapiens
  Table A; Target 48255; HLA-C*14:02; MYH4; ENSG00000264424; TAA
AYLTSLNSADL

SEQ ID NO: 48256 - protein, 9 aa, Homo sapiens
  Table A; Target 48256; HLA-A*31:01; MYH4; ENSG00000264424; TAA
AYQFMLTDR

SEQ ID NO: 48257 - protein, 8 aa, Homo sapiens
  Table A; Target 48257; HLA-B*18:01; MYH4; ENSG00000264424; TAA
CDLLREQY

SEQ ID NO: 48258 - protein, 8 aa, Homo sapiens
  Table A; Target 48258; HLA-C*07:01; MYH4; ENSG00000264424; TAA
CDLLREQY

SEQ ID NO: 48259 - protein, 8 aa, Homo sapiens
  Table A; Target 48259; HLA-C*07:04; MYH4; ENSG00000264424; TAA
CDLLREQY

SEQ ID NO: 48260 - protein, 9 aa, Homo sapiens
  Table A; Target 48260; HLA-B*37:01; MYH4; ENSG00000264424; TAA
CDQLIKTKI

SEQ ID NO: 48261 - protein, 11 aa, Homo sapiens
  Table A; Target 48261; HLA-A*23:01; MYH4; ENSG00000264424; TAA
CMFPKATDTSF

SEQ ID NO: 48262 - protein, 11 aa, Homo sapiens
  Table A; Target 48262; HLA-A*24:02; MYH4; ENSG00000264424; TAA
CMFPKATDTSF

SEQ ID NO: 48263 - protein, 11 aa, Homo sapiens
  Table A; Target 48263; HLA-A*32:01; MYH4; ENSG00000264424; TAA
CMFPKATDTSF

SEQ ID NO: 48264 - protein, 11 aa, Homo sapiens
  Table A; Target 48264; HLA-B*15:01; MYH4; ENSG00000264424; TAA
CMFPKATDTSF

SEQ ID NO: 48265 - protein, 11 aa, Homo sapiens
  Table A; Target 48265; HLA-B*15:03; MYH4; ENSG00000264424; TAA
CMFPKATDTSF

SEQ ID NO: 48266 - protein, 11 aa, Homo sapiens
  Table A; Target 48266; HLA-B*46:01; MYH4; ENSG00000264424; TAA
CMFPKATDTSF

SEQ ID NO: 48267 - protein, 11 aa, Homo sapiens
  Table A; Target 48267; HLA-A*24:02; MYH4; ENSG00000264424; TAA
CYPRVKVGNEF

SEQ ID NO: 48268 - protein, 9 aa, Homo sapiens
  Table A; Target 48268; HLA-A*68:01; MYH4; ENSG00000264424; TAA
DAAMMAEEL

SEQ ID NO: 48269 - protein, 9 aa, Homo sapiens
  Table A; Target 48269; HLA-B*18:01; MYH4; ENSG00000264424; TAA
DAAMMAEEL

SEQ ID NO: 48270 - protein, 9 aa, Homo sapiens
  Table A; Target 48270; HLA-B*35:01; MYH4; ENSG00000264424; TAA
DAAMMAEEL

SEQ ID NO: 48271 - protein, 9 aa, Homo sapiens
  Table A; Target 48271; HLA-B*35:03; MYH4; ENSG00000264424; TAA
DAAMMAEEL

SEQ ID NO: 48272 - protein, 9 aa, Homo sapiens
  Table A; Target 48272; HLA-B*39:01; MYH4; ENSG00000264424; TAA
DAAMMAEEL

SEQ ID NO: 48273 - protein, 9 aa, Homo sapiens
  Table A; Target 48273; HLA-B*51:01; MYH4; ENSG00000264424; TAA
DAAMMAEEL

SEQ ID NO: 48274 - protein, 9 aa, Homo sapiens
  Table A; Target 48274; HLA-C*07:06; MYH4; ENSG00000264424; TAA
DAAMMAEEL

SEQ ID NO: 48275 - protein, 10 aa, Homo sapiens
  Table A; Target 48275; HLA-B*27:02; MYH4; ENSG00000264424; TAA
DAAMMAEELK

SEQ ID NO: 48276 - protein, 9 aa, Homo sapiens
  Table A; Target 48276; HLA-B*35:03; MYH4; ENSG00000264424; TAA
DAEEHVEAV

SEQ ID NO: 48277 - protein, 9 aa, Homo sapiens
  Table A; Target 48277; HLA-B*51:01; MYH4; ENSG00000264424; TAA
DAEEHVEAV

SEQ ID NO: 48278 - protein, 9 aa, Homo sapiens
  Table A; Target 48278; HLA-C*05:01; MYH4; ENSG00000264424; TAA
DAEEHVEAV

SEQ ID NO: 48279 - protein, 9 aa, Homo sapiens
  Table A; Target 48279; HLA-A*25:01; MYH4; ENSG00000264424; TAA
DAIQRTEEL

SEQ ID NO: 48280 - protein, 9 aa, Homo sapiens
  Table A; Target 48280; HLA-A*26:01; MYH4; ENSG00000264424; TAA
DAIQRTEEL

SEQ ID NO: 48281 - protein, 9 aa, Homo sapiens
  Table A; Target 48281; HLA-A*33:01; MYH4; ENSG00000264424; TAA
DAIQRTEEL

SEQ ID NO: 48282 - protein, 9 aa, Homo sapiens
  Table A; Target 48282; HLA-A*68:01; MYH4; ENSG00000264424; TAA
DAIQRTEEL

SEQ ID NO: 48283 - protein, 9 aa, Homo sapiens
  Table A; Target 48283; HLA-A*68:02; MYH4; ENSG00000264424; TAA
DAIQRTEEL

SEQ ID NO: 48284 - protein, 9 aa, Homo sapiens
  Table A; Target 48284; HLA-B*07:02; MYH4; ENSG00000264424; TAA
DAIQRTEEL

SEQ ID NO: 48285 - protein, 9 aa, Homo sapiens
  Table A; Target 48285; HLA-B*08:01; MYH4; ENSG00000264424; TAA
DAIQRTEEL

SEQ ID NO: 48286 - protein, 9 aa, Homo sapiens
  Table A; Target 48286; HLA-B*18:01; MYH4; ENSG00000264424; TAA
DAIQRTEEL

SEQ ID NO: 48287 - protein, 9 aa, Homo sapiens
  Table A; Target 48287; HLA-B*35:01; MYH4; ENSG00000264424; TAA
DAIQRTEEL

SEQ ID NO: 48288 - protein, 9 aa, Homo sapiens
  Table A; Target 48288; HLA-B*35:03; MYH4; ENSG00000264424; TAA
DAIQRTEEL

SEQ ID NO: 48289 - protein, 9 aa, Homo sapiens
  Table A; Target 48289; HLA-B*38:01; MYH4; ENSG00000264424; TAA
DAIQRTEEL

SEQ ID NO: 48290 - protein, 9 aa, Homo sapiens
  Table A; Target 48290; HLA-B*39:01; MYH4; ENSG00000264424; TAA
DAIQRTEEL

SEQ ID NO: 48291 - protein, 9 aa, Homo sapiens
  Table A; Target 48291; HLA-B*40:01; MYH4; ENSG00000264424; TAA
DAIQRTEEL

SEQ ID NO: 48292 - protein, 9 aa, Homo sapiens
  Table A; Target 48292; HLA-B*40:02; MYH4; ENSG00000264424; TAA
DAIQRTEEL

SEQ ID NO: 48293 - protein, 9 aa, Homo sapiens
  Table A; Target 48293; HLA-B*46:01; MYH4; ENSG00000264424; TAA
DAIQRTEEL

SEQ ID NO: 48294 - protein, 9 aa, Homo sapiens
  Table A; Target 48294; HLA-B*51:01; MYH4; ENSG00000264424; TAA
DAIQRTEEL

SEQ ID NO: 48295 - protein, 9 aa, Homo sapiens
  Table A; Target 48295; HLA-B*55:01; MYH4; ENSG00000264424; TAA
DAIQRTEEL

SEQ ID NO: 48296 - protein, 9 aa, Homo sapiens
  Table A; Target 48296; HLA-B*58:01; MYH4; ENSG00000264424; TAA
DAIQRTEEL

SEQ ID NO: 48297 - protein, 9 aa, Homo sapiens
  Table A; Target 48297; HLA-C*01:02; MYH4; ENSG00000264424; TAA
DAIQRTEEL

SEQ ID NO: 48298 - protein, 9 aa, Homo sapiens
  Table A; Target 48298; HLA-C*02:02; MYH4; ENSG00000264424; TAA
DAIQRTEEL

SEQ ID NO: 48299 - protein, 9 aa, Homo sapiens
  Table A; Target 48299; HLA-C*03:03; MYH4; ENSG00000264424; TAA
DAIQRTEEL

SEQ ID NO: 48300 - protein, 9 aa, Homo sapiens
  Table A; Target 48300; HLA-C*03:04; MYH4; ENSG00000264424; TAA
DAIQRTEEL

SEQ ID NO: 48301 - protein, 9 aa, Homo sapiens
  Table A; Target 48301; HLA-C*05:01; MYH4; ENSG00000264424; TAA
DAIQRTEEL

SEQ ID NO: 48302 - protein, 9 aa, Homo sapiens
  Table A; Target 48302; HLA-C*07:06; MYH4; ENSG00000264424; TAA
DAIQRTEEL

SEQ ID NO: 48303 - protein, 9 aa, Homo sapiens
  Table A; Target 48303; HLA-C*12:03; MYH4; ENSG00000264424; TAA
DAIQRTEEL

SEQ ID NO: 48304 - protein, 9 aa, Homo sapiens
  Table A; Target 48304; HLA-C*14:02; MYH4; ENSG00000264424; TAA
DAIQRTEEL

SEQ ID NO: 48305 - protein, 9 aa, Homo sapiens
  Table A; Target 48305; HLA-C*16:01; MYH4; ENSG00000264424; TAA
DAIQRTEEL

SEQ ID NO: 48306 - protein, 9 aa, Homo sapiens
  Table A; Target 48306; HLA-C*16:02; MYH4; ENSG00000264424; TAA
DAIQRTEEL

SEQ ID NO: 48307 - protein, 9 aa, Homo sapiens
  Table A; Target 48307; HLA-C*16:04; MYH4; ENSG00000264424; TAA
DAIQRTEEL

SEQ ID NO: 48308 - protein, 9 aa, Homo sapiens
  Table A; Target 48308; HLA-B*35:03; MYH4; ENSG00000264424; TAA
DAIRGQDDL

SEQ ID NO: 48309 - protein, 9 aa, Homo sapiens
  Table A; Target 48309; HLA-C*03:03; MYH4; ENSG00000264424; TAA
DAIRGQDDL

SEQ ID NO: 48310 - protein, 8 aa, Homo sapiens
  Table A; Target 48310; HLA-B*08:01; MYH4; ENSG00000264424; TAA
DAKTSVFV

SEQ ID NO: 48311 - protein, 8 aa, Homo sapiens
  Table A; Target 48311; HLA-B*51:01; MYH4; ENSG00000264424; TAA
DAKTSVFV

SEQ ID NO: 48312 - protein, 9 aa, Homo sapiens
  Table A; Target 48312; HLA-A*33:01; MYH4; ENSG00000264424; TAA
DAKTSVFVV

SEQ ID NO: 48313 - protein, 9 aa, Homo sapiens
  Table A; Target 48313; HLA-B*51:01; MYH4; ENSG00000264424; TAA
DAKTSVFVV

SEQ ID NO: 48314 - protein, 9 aa, Homo sapiens
  Table A; Target 48314; HLA-C*12:03; MYH4; ENSG00000264424; TAA
DAKTSVFVV

SEQ ID NO: 48315 - protein, 9 aa, Homo sapiens
  Table A; Target 48315; HLA-A*33:01; MYH4; ENSG00000264424; TAA
DALADAEER

SEQ ID NO: 48316 - protein, 9 aa, Homo sapiens
  Table A; Target 48316; HLA-A*33:03; MYH4; ENSG00000264424; TAA
DALADAEER

SEQ ID NO: 48317 - protein, 9 aa, Homo sapiens
  Table A; Target 48317; HLA-A*68:01; MYH4; ENSG00000264424; TAA
DALADAEER

SEQ ID NO: 48318 - protein, 9 aa, Homo sapiens
  Table A; Target 48318; HLA-C*07:06; MYH4; ENSG00000264424; TAA
DALADAEER

SEQ ID NO: 48319 - protein, 8 aa, Homo sapiens
  Table A; Target 48319; HLA-A*33:01; MYH4; ENSG00000264424; TAA
DALRIKKK

SEQ ID NO: 48320 - protein, 8 aa, Homo sapiens
  Table A; Target 48320; HLA-B*51:01; MYH4; ENSG00000264424; TAA
DAMVSQLS

SEQ ID NO: 48321 - protein, 9 aa, Homo sapiens
  Table A; Target 48321; HLA-A*25:01; MYH4; ENSG00000264424; TAA
DAMVSQLSR

SEQ ID NO: 48322 - protein, 9 aa, Homo sapiens
  Table A; Target 48322; HLA-A*26:01; MYH4; ENSG00000264424; TAA
DAMVSQLSR

SEQ ID NO: 48323 - protein, 9 aa, Homo sapiens
  Table A; Target 48323; HLA-A*33:01; MYH4; ENSG00000264424; TAA
DAMVSQLSR

SEQ ID NO: 48324 - protein, 9 aa, Homo sapiens
  Table A; Target 48324; HLA-A*33:03; MYH4; ENSG00000264424; TAA
DAMVSQLSR

SEQ ID NO: 48325 - protein, 9 aa, Homo sapiens
  Table A; Target 48325; HLA-A*68:01; MYH4; ENSG00000264424; TAA
DAMVSQLSR

SEQ ID NO: 48326 - protein, 9 aa, Homo sapiens
  Table A; Target 48326; HLA-B*51:01; MYH4; ENSG00000264424; TAA
DAMVSQLSR

SEQ ID NO: 48327 - protein, 9 aa, Homo sapiens
  Table A; Target 48327; HLA-C*07:06; MYH4; ENSG00000264424; TAA
DAMVSQLSR

SEQ ID NO: 48328 - protein, 11 aa, Homo sapiens
  Table A; Target 48328; HLA-A*33:01; MYH4; ENSG00000264424; TAA
DAMVSQLSRGK

SEQ ID NO: 48329 - protein, 8 aa, Homo sapiens
  Table A; Target 48329; HLA-B*08:01; MYH4; ENSG00000264424; TAA
DASERVQL

SEQ ID NO: 48330 - protein, 8 aa, Homo sapiens
  Table A; Target 48330; HLA-B*51:01; MYH4; ENSG00000264424; TAA
DASERVQL

SEQ ID NO: 48331 - protein, 8 aa, Homo sapiens
  Table A; Target 48331; HLA-C*05:01; MYH4; ENSG00000264424; TAA
DASERVQL

SEQ ID NO: 48332 - protein, 8 aa, Homo sapiens
  Table A; Target 48332; HLA-C*16:01; MYH4; ENSG00000264424; TAA
DASERVQL

SEQ ID NO: 48333 - protein, 9 aa, Homo sapiens
  Table A; Target 48333; HLA-A*25:01; MYH4; ENSG00000264424; TAA
DASERVQLL

SEQ ID NO: 48334 - protein, 9 aa, Homo sapiens
  Table A; Target 48334; HLA-A*26:01; MYH4; ENSG00000264424; TAA
DASERVQLL

SEQ ID NO: 48335 - protein, 9 aa, Homo sapiens
  Table A; Target 48335; HLA-A*33:01; MYH4; ENSG00000264424; TAA
DASERVQLL

SEQ ID NO: 48336 - protein, 9 aa, Homo sapiens
  Table A; Target 48336; HLA-A*33:03; MYH4; ENSG00000264424; TAA
DASERVQLL

SEQ ID NO: 48337 - protein, 9 aa, Homo sapiens
  Table A; Target 48337; HLA-A*68:01; MYH4; ENSG00000264424; TAA
DASERVQLL

SEQ ID NO: 48338 - protein, 9 aa, Homo sapiens
  Table A; Target 48338; HLA-A*68:02; MYH4; ENSG00000264424; TAA
DASERVQLL

SEQ ID NO: 48339 - protein, 9 aa, Homo sapiens
  Table A; Target 48339; HLA-B*08:01; MYH4; ENSG00000264424; TAA
DASERVQLL

SEQ ID NO: 48340 - protein, 9 aa, Homo sapiens
  Table A; Target 48340; HLA-B*35:01; MYH4; ENSG00000264424; TAA
DASERVQLL

SEQ ID NO: 48341 - protein, 9 aa, Homo sapiens
  Table A; Target 48341; HLA-B*35:03; MYH4; ENSG00000264424; TAA
DASERVQLL

SEQ ID NO: 48342 - protein, 9 aa, Homo sapiens
  Table A; Target 48342; HLA-B*38:01; MYH4; ENSG00000264424; TAA
DASERVQLL

SEQ ID NO: 48343 - protein, 9 aa, Homo sapiens
  Table A; Target 48343; HLA-B*39:01; MYH4; ENSG00000264424; TAA
DASERVQLL

SEQ ID NO: 48344 - protein, 9 aa, Homo sapiens
  Table A; Target 48344; HLA-B*51:01; MYH4; ENSG00000264424; TAA
DASERVQLL

SEQ ID NO: 48345 - protein, 9 aa, Homo sapiens
  Table A; Target 48345; HLA-C*05:01; MYH4; ENSG00000264424; TAA
DASERVQLL

SEQ ID NO: 48346 - protein, 9 aa, Homo sapiens
  Table A; Target 48346; HLA-C*07:06; MYH4; ENSG00000264424; TAA
DASERVQLL

SEQ ID NO: 48347 - protein, 9 aa, Homo sapiens
  Table A; Target 48347; HLA-C*12:03; MYH4; ENSG00000264424; TAA
DASERVQLL

SEQ ID NO: 48348 - protein, 9 aa, Homo sapiens
  Table A; Target 48348; HLA-C*16:01; MYH4; ENSG00000264424; TAA
DASERVQLL

SEQ ID NO: 48349 - protein, 9 aa, Homo sapiens
  Table A; Target 48349; HLA-C*16:02; MYH4; ENSG00000264424; TAA
DASERVQLL

SEQ ID NO: 48350 - protein, 9 aa, Homo sapiens
  Table A; Target 48350; HLA-A*01:01; MYH4; ENSG00000264424; TAA
DCDLLREQY

SEQ ID NO: 48351 - protein, 11 aa, Homo sapiens
  Table A; Target 48351; HLA-B*27:02; MYH4; ENSG00000264424; TAA
DDLEGSLEQEK

SEQ ID NO: 48352 - protein, 9 aa, Homo sapiens
  Table A; Target 48352; HLA-B*27:02; MYH4; ENSG00000264424; TAA
DDLELTLAK

SEQ ID NO: 48353 - protein, 9 aa, Homo sapiens
  Table A; Target 48353; HLA-B*18:01; MYH4; ENSG00000264424; TAA
DDLKEQLAM

SEQ ID NO: 48354 - protein, 8 aa, Homo sapiens
  Table A; Target 48354; HLA-A*30:01; MYH4; ENSG00000264424; TAA
DEAEQLAL

SEQ ID NO: 48355 - protein, 8 aa, Homo sapiens
  Table A; Target 48355; HLA-B*18:01; MYH4; ENSG00000264424; TAA
DEAEQLAL

SEQ ID NO: 48356 - protein, 8 aa, Homo sapiens
  Table A; Target 48356; HLA-B*39:01; MYH4; ENSG00000264424; TAA
DEAEQLAL

SEQ ID NO: 48357 - protein, 8 aa, Homo sapiens
  Table A; Target 48357; HLA-B*40:01; MYH4; ENSG00000264424; TAA
DEAEQLAL

SEQ ID NO: 48358 - protein, 9 aa, Homo sapiens
  Table A; Target 48358; HLA-B*18:01; MYH4; ENSG00000264424; TAA
DEAEQLALK

SEQ ID NO: 48359 - protein, 9 aa, Homo sapiens
  Table A; Target 48359; HLA-B*27:02; MYH4; ENSG00000264424; TAA
DEAEQLALK

SEQ ID NO: 48360 - protein, 10 aa, Homo sapiens
  Table A; Target 48360; HLA-B*18:01; MYH4; ENSG00000264424; TAA
DEAEQLALKG

SEQ ID NO: 48361 - protein, 9 aa, Homo sapiens
  Table A; Target 48361; HLA-A*30:01; MYH4; ENSG00000264424; TAA
DEEEINAEL

SEQ ID NO: 48362 - protein, 9 aa, Homo sapiens
  Table A; Target 48362; HLA-A*68:02; MYH4; ENSG00000264424; TAA
DEEEINAEL

SEQ ID NO: 48363 - protein, 9 aa, Homo sapiens
  Table A; Target 48363; HLA-B*18:01; MYH4; ENSG00000264424; TAA
DEEEINAEL

SEQ ID NO: 48364 - protein, 9 aa, Homo sapiens
  Table A; Target 48364; HLA-B*35:03; MYH4; ENSG00000264424; TAA
DEEEINAEL

SEQ ID NO: 48365 - protein, 9 aa, Homo sapiens
  Table A; Target 48365; HLA-B*39:01; MYH4; ENSG00000264424; TAA
DEEEINAEL

SEQ ID NO: 48366 - protein, 9 aa, Homo sapiens
  Table A; Target 48366; HLA-B*40:01; MYH4; ENSG00000264424; TAA
DEEEINAEL

SEQ ID NO: 48367 - protein, 11 aa, Homo sapiens
  Table A; Target 48367; HLA-B*18:01; MYH4; ENSG00000264424; TAA
DEEEINAELTA

SEQ ID NO: 48368 - protein, 8 aa, Homo sapiens
  Table A; Target 48368; HLA-B*18:01; MYH4; ENSG00000264424; TAA
DEKDAMVS

SEQ ID NO: 48369 - protein, 9 aa, Homo sapiens
  Table A; Target 48369; HLA-B*18:01; MYH4; ENSG00000264424; TAA
DEKDAMVSQ

SEQ ID NO: 48370 - protein, 10 aa, Homo sapiens
  Table A; Target 48370; HLA-A*25:01; MYH4; ENSG00000264424; TAA
DEKDAMVSQL

SEQ ID NO: 48371 - protein, 10 aa, Homo sapiens
  Table A; Target 48371; HLA-A*30:01; MYH4; ENSG00000264424; TAA
DEKDAMVSQL

SEQ ID NO: 48372 - protein, 10 aa, Homo sapiens
  Table A; Target 48372; HLA-B*18:01; MYH4; ENSG00000264424; TAA
DEKDAMVSQL

SEQ ID NO: 48373 - protein, 10 aa, Homo sapiens
  Table A; Target 48373; HLA-B*40:01; MYH4; ENSG00000264424; TAA
DEKDAMVSQL

SEQ ID NO: 48374 - protein, 10 aa, Homo sapiens
  Table A; Target 48374; HLA-B*40:02; MYH4; ENSG00000264424; TAA
DEKDAMVSQL

SEQ ID NO: 48375 - protein, 10 aa, Homo sapiens
  Table A; Target 48375; HLA-B*44:02; MYH4; ENSG00000264424; TAA
DEKDAMVSQL

SEQ ID NO: 48376 - protein, 8 aa, Homo sapiens
  Table A; Target 48376; HLA-B*08:01; MYH4; ENSG00000264424; TAA
DEKLAQLI

SEQ ID NO: 48377 - protein, 8 aa, Homo sapiens
  Table A; Target 48377; HLA-B*18:01; MYH4; ENSG00000264424; TAA
DEKLAQLI

SEQ ID NO: 48378 - protein, 8 aa, Homo sapiens
  Table A; Target 48378; HLA-B*49:01; MYH4; ENSG00000264424; TAA
DEKLAQLI

SEQ ID NO: 48379 - protein, 8 aa, Homo sapiens
  Table A; Target 48379; HLA-B*51:01; MYH4; ENSG00000264424; TAA
DEKLAQLI

SEQ ID NO: 48380 - protein, 10 aa, Homo sapiens
  Table A; Target 48380; HLA-A*33:01; MYH4; ENSG00000264424; TAA
DEKLAQLITR

SEQ ID NO: 48381 - protein, 10 aa, Homo sapiens
  Table A; Target 48381; HLA-A*33:03; MYH4; ENSG00000264424; TAA
DEKLAQLITR

SEQ ID NO: 48382 - protein, 10 aa, Homo sapiens
  Table A; Target 48382; HLA-A*68:01; MYH4; ENSG00000264424; TAA
DEKLAQLITR

SEQ ID NO: 48383 - protein, 8 aa, Homo sapiens
  Table A; Target 48383; HLA-B*18:01; MYH4; ENSG00000264424; TAA
DEKVAIYK

SEQ ID NO: 48384 - protein, 9 aa, Homo sapiens
  Table A; Target 48384; HLA-A*30:01; MYH4; ENSG00000264424; TAA
DEKVAIYKL

SEQ ID NO: 48385 - protein, 9 aa, Homo sapiens
  Table A; Target 48385; HLA-B*18:01; MYH4; ENSG00000264424; TAA
DEKVAIYKL

SEQ ID NO: 48386 - protein, 9 aa, Homo sapiens
  Table A; Target 48386; HLA-B*40:02; MYH4; ENSG00000264424; TAA
DEKVAIYKL

SEQ ID NO: 48387 - protein, 9 aa, Homo sapiens
  Table A; Target 48387; HLA-B*44:02; MYH4; ENSG00000264424; TAA
DEKVAIYKL

SEQ ID NO: 48388 - protein, 9 aa, Homo sapiens
  Table A; Target 48388; HLA-B*44:03; MYH4; ENSG00000264424; TAA
DEKVAIYKL

SEQ ID NO: 48389 - protein, 9 aa, Homo sapiens
  Table A; Target 48389; HLA-A*30:01; MYH4; ENSG00000264424; TAA
DEQALAIQL

SEQ ID NO: 48390 - protein, 9 aa, Homo sapiens
  Table A; Target 48390; HLA-B*18:01; MYH4; ENSG00000264424; TAA
DEQALAIQL

SEQ ID NO: 48391 - protein, 9 aa, Homo sapiens
  Table A; Target 48391; HLA-B*40:01; MYH4; ENSG00000264424; TAA
DEQALAIQL

SEQ ID NO: 48392 - protein, 9 aa, Homo sapiens
  Table A; Target 48392; HLA-B*40:02; MYH4; ENSG00000264424; TAA
DEQALAIQL

SEQ ID NO: 48393 - protein, 9 aa, Homo sapiens
  Table A; Target 48393; HLA-B*44:02; MYH4; ENSG00000264424; TAA
DEQALAIQL

SEQ ID NO: 48394 - protein, 9 aa, Homo sapiens
  Table A; Target 48394; HLA-B*44:03; MYH4; ENSG00000264424; TAA
DEQALAIQL

SEQ ID NO: 48395 - protein, 11 aa, Homo sapiens
  Table A; Target 48395; HLA-B*27:02; MYH4; ENSG00000264424; TAA
DEQALAIQLQK

SEQ ID NO: 48396 - protein, 8 aa, Homo sapiens
  Table A; Target 48396; HLA-B*18:01; MYH4; ENSG00000264424; TAA
DETIAKLT

SEQ ID NO: 48397 - protein, 9 aa, Homo sapiens
  Table A; Target 48397; HLA-B*18:01; MYH4; ENSG00000264424; TAA
DETIAKLTK

SEQ ID NO: 48398 - protein, 9 aa, Homo sapiens
  Table A; Target 48398; HLA-B*44:03; MYH4; ENSG00000264424; TAA
DETIAKLTK

SEQ ID NO: 48399 - protein, 9 aa, Homo sapiens
  Table A; Target 48399; HLA-B*08:01; MYH4; ENSG00000264424; TAA
DFKQRYKVL

SEQ ID NO: 48400 - protein, 11 aa, Homo sapiens
  Table A; Target 48400; HLA-B*38:01; MYH4; ENSG00000264424; TAA
DHEKSELQTSL

SEQ ID NO: 48401 - protein, 11 aa, Homo sapiens
  Table A; Target 48401; HLA-B*39:01; MYH4; ENSG00000264424; TAA
DHEKSELQTSL

SEQ ID NO: 48402 - protein, 9 aa, Homo sapiens
  Table A; Target 48402; HLA-A*03:01; MYH4; ENSG00000264424; TAA
DIAESQVNK

SEQ ID NO: 48403 - protein, 9 aa, Homo sapiens
  Table A; Target 48403; HLA-A*03:02; MYH4; ENSG00000264424; TAA
DIAESQVNK

SEQ ID NO: 48404 - protein, 9 aa, Homo sapiens
  Table A; Target 48404; HLA-A*11:01; MYH4; ENSG00000264424; TAA
DIAESQVNK

SEQ ID NO: 48405 - protein, 9 aa, Homo sapiens
  Table A; Target 48405; HLA-A*33:01; MYH4; ENSG00000264424; TAA
DIAESQVNK

SEQ ID NO: 48406 - protein, 9 aa, Homo sapiens
  Table A; Target 48406; HLA-A*33:03; MYH4; ENSG00000264424; TAA
DIAESQVNK

SEQ ID NO: 48407 - protein, 9 aa, Homo sapiens
  Table A; Target 48407; HLA-A*68:01; MYH4; ENSG00000264424; TAA
DIAESQVNK

SEQ ID NO: 48408 - protein, 9 aa, Homo sapiens
  Table A; Target 48408; HLA-B*27:02; MYH4; ENSG00000264424; TAA
DIAESQVNK

SEQ ID NO: 48409 - protein, 9 aa, Homo sapiens
  Table A; Target 48409; HLA-C*07:06; MYH4; ENSG00000264424; TAA
DIAESQVNK

SEQ ID NO: 48410 - protein, 10 aa, Homo sapiens
  Table A; Target 48410; HLA-A*25:01; MYH4; ENSG00000264424; TAA
DIAESQVNKL

SEQ ID NO: 48411 - protein, 10 aa, Homo sapiens
  Table A; Target 48411; HLA-A*26:01; MYH4; ENSG00000264424; TAA
DIAESQVNKL

SEQ ID NO: 48412 - protein, 10 aa, Homo sapiens
  Table A; Target 48412; HLA-A*68:01; MYH4; ENSG00000264424; TAA
DIAESQVNKL

SEQ ID NO: 48413 - protein, 10 aa, Homo sapiens
  Table A; Target 48413; HLA-A*68:02; MYH4; ENSG00000264424; TAA
DIAESQVNKL

SEQ ID NO: 48414 - protein, 10 aa, Homo sapiens
  Table A; Target 48414; HLA-C*07:06; MYH4; ENSG00000264424; TAA
DIAESQVNKL

SEQ ID NO: 48415 - protein, 11 aa, Homo sapiens
  Table A; Target 48415; HLA-A*33:01; MYH4; ENSG00000264424; TAA
DIAESQVNKLR

SEQ ID NO: 48416 - protein, 11 aa, Homo sapiens
  Table A; Target 48416; HLA-A*33:03; MYH4; ENSG00000264424; TAA
DIAESQVNKLR

SEQ ID NO: 48417 - protein, 11 aa, Homo sapiens
  Table A; Target 48417; HLA-A*68:01; MYH4; ENSG00000264424; TAA
DIAESQVNKLR

SEQ ID NO: 48418 - protein, 11 aa, Homo sapiens
  Table A; Target 48418; HLA-C*07:06; MYH4; ENSG00000264424; TAA
DIAESQVNKLR

SEQ ID NO: 48419 - protein, 10 aa, Homo sapiens
  Table A; Target 48419; HLA-A*25:01; MYH4; ENSG00000264424; TAA
DIAGFEIFDF

SEQ ID NO: 48420 - protein, 10 aa, Homo sapiens
  Table A; Target 48420; HLA-A*26:01; MYH4; ENSG00000264424; TAA
DIAGFEIFDF

SEQ ID NO: 48421 - protein, 9 aa, Homo sapiens
  Table A; Target 48421; HLA-A*01:01; MYH4; ENSG00000264424; TAA
DIDDLELTL

SEQ ID NO: 48422 - protein, 9 aa, Homo sapiens
  Table A; Target 48422; HLA-A*02:07; MYH4; ENSG00000264424; TAA
DIDDLELTL

SEQ ID NO: 48423 - protein, 9 aa, Homo sapiens
  Table A; Target 48423; HLA-A*68:02; MYH4; ENSG00000264424; TAA
DIDDLELTL

SEQ ID NO: 48424 - protein, 9 aa, Homo sapiens
  Table A; Target 48424; HLA-B*35:03; MYH4; ENSG00000264424; TAA
DIDDLELTL

SEQ ID NO: 48425 - protein, 9 aa, Homo sapiens
  Table A; Target 48425; HLA-B*38:01; MYH4; ENSG00000264424; TAA
DIDDLELTL

SEQ ID NO: 48426 - protein, 9 aa, Homo sapiens
  Table A; Target 48426; HLA-B*39:01; MYH4; ENSG00000264424; TAA
DIDDLELTL

SEQ ID NO: 48427 - protein, 9 aa, Homo sapiens
  Table A; Target 48427; HLA-C*05:01; MYH4; ENSG00000264424; TAA
DIDDLELTL

SEQ ID NO: 48428 - protein, 11 aa, Homo sapiens
  Table A; Target 48428; HLA-B*27:02; MYH4; ENSG00000264424; TAA
DIDDLELTLAK

SEQ ID NO: 48429 - protein, 9 aa, Homo sapiens
  Table A; Target 48429; HLA-A*33:01; MYH4; ENSG00000264424; TAA
DIETYLLEK

SEQ ID NO: 48430 - protein, 9 aa, Homo sapiens
  Table A; Target 48430; HLA-A*68:01; MYH4; ENSG00000264424; TAA
DIETYLLEK

SEQ ID NO: 48431 - protein, 9 aa, Homo sapiens
  Table A; Target 48431; HLA-B*27:02; MYH4; ENSG00000264424; TAA
DIETYLLEK

SEQ ID NO: 48432 - protein, 9 aa, Homo sapiens
  Table A; Target 48432; HLA-A*26:01; MYH4; ENSG00000264424; TAA
DISQIQGEM

SEQ ID NO: 48433 - protein, 9 aa, Homo sapiens
  Table A; Target 48433; HLA-A*68:01; MYH4; ENSG00000264424; TAA
DISQIQGEM

SEQ ID NO: 48434 - protein, 9 aa, Homo sapiens
  Table A; Target 48434; HLA-C*07:06; MYH4; ENSG00000264424; TAA
DISQIQGEM

SEQ ID NO: 48435 - protein, 9 aa, Homo sapiens
  Table A; Target 48435; HLA-B*15:03; MYH4; ENSG00000264424; TAA
DKAAYLTSL

SEQ ID NO: 48436 - protein, 9 aa, Homo sapiens
  Table A; Target 48436; HLA-A*02:01; MYH4; ENSG00000264424; TAA
DLASNMETV

SEQ ID NO: 48437 - protein, 9 aa, Homo sapiens
  Table A; Target 48437; HLA-A*02:03; MYH4; ENSG00000264424; TAA
DLASNMETV

SEQ ID NO: 48438 - protein, 9 aa, Homo sapiens
  Table A; Target 48438; HLA-A*25:01; MYH4; ENSG00000264424; TAA
DLASNMETV

SEQ ID NO: 48439 - protein, 9 aa, Homo sapiens
  Table A; Target 48439; HLA-A*26:01; MYH4; ENSG00000264424; TAA
DLASNMETV

SEQ ID NO: 48440 - protein, 9 aa, Homo sapiens
  Table A; Target 48440; HLA-A*68:02; MYH4; ENSG00000264424; TAA
DLASNMETV

SEQ ID NO: 48441 - protein, 9 aa, Homo sapiens
  Table A; Target 48441; HLA-B*39:01; MYH4; ENSG00000264424; TAA
DLASNMETV

SEQ ID NO: 48442 - protein, 9 aa, Homo sapiens
  Table A; Target 48442; HLA-B*51:01; MYH4; ENSG00000264424; TAA
DLASNMETV

SEQ ID NO: 48443 - protein, 9 aa, Homo sapiens
  Table A; Target 48443; HLA-B*55:01; MYH4; ENSG00000264424; TAA
DLASNMETV

SEQ ID NO: 48444 - protein, 11 aa, Homo sapiens
  Table A; Target 48444; HLA-A*03:02; MYH4; ENSG00000264424; TAA
DLASNMETVSK

SEQ ID NO: 48445 - protein, 11 aa, Homo sapiens
  Table A; Target 48445; HLA-A*33:01; MYH4; ENSG00000264424; TAA
DLASNMETVSK

SEQ ID NO: 48446 - protein, 11 aa, Homo sapiens
  Table A; Target 48446; HLA-A*68:01; MYH4; ENSG00000264424; TAA
DLASNMETVSK

SEQ ID NO: 48447 - protein, 9 aa, Homo sapiens
  Table A; Target 48447; HLA-A*01:01; MYH4; ENSG00000264424; TAA
DLEESTLQH

SEQ ID NO: 48448 - protein, 8 aa, Homo sapiens
  Table A; Target 48448; HLA-B*08:01; MYH4; ENSG00000264424; TAA
DLKEQLAM

SEQ ID NO: 48449 - protein, 9 aa, Homo sapiens
  Table A; Target 48449; HLA-A*02:03; MYH4; ENSG00000264424; TAA
DLKEQLAMV

SEQ ID NO: 48450 - protein, 9 aa, Homo sapiens
  Table A; Target 48450; HLA-B*08:01; MYH4; ENSG00000264424; TAA
DLKEQLAMV

SEQ ID NO: 48451 - protein, 9 aa, Homo sapiens
  Table A; Target 48451; HLA-B*51:01; MYH4; ENSG00000264424; TAA
DLKEQLAMV

SEQ ID NO: 48452 - protein, 11 aa, Homo sapiens
  Table A; Target 48452; HLA-A*33:01; MYH4; ENSG00000264424; TAA
DLKEQLAMVER

SEQ ID NO: 48453 - protein, 11 aa, Homo sapiens
  Table A; Target 48453; HLA-A*33:03; MYH4; ENSG00000264424; TAA
DLKEQLAMVER

SEQ ID NO: 48454 - protein, 11 aa, Homo sapiens
  Table A; Target 48454; HLA-A*68:01; MYH4; ENSG00000264424; TAA
DLKEQLAMVER

SEQ ID NO: 48455 - protein, 10 aa, Homo sapiens
  Table A; Target 48455; HLA-B*08:01; MYH4; ENSG00000264424; TAA
DLKLAQESTM

SEQ ID NO: 48456 - protein, 10 aa, Homo sapiens
  Table A; Target 48456; HLA-A*33:01; MYH4; ENSG00000264424; TAA
DLLKSLCYPR

SEQ ID NO: 48457 - protein, 8 aa, Homo sapiens
  Table A; Target 48457; HLA-A*33:01; MYH4; ENSG00000264424; TAA
DLMIDVER

SEQ ID NO: 48458 - protein, 9 aa, Homo sapiens
  Table A; Target 48458; HLA-B*35:03; MYH4; ENSG00000264424; TAA
DLNEMEIQL

SEQ ID NO: 48459 - protein, 9 aa, Homo sapiens
  Table A; Target 48459; HLA-B*38:01; MYH4; ENSG00000264424; TAA
DLNEMEIQL

SEQ ID NO: 48460 - protein, 9 aa, Homo sapiens
  Table A; Target 48460; HLA-B*39:01; MYH4; ENSG00000264424; TAA
DLNEMEIQL

SEQ ID NO: 48461 - protein, 9 aa, Homo sapiens
  Table A; Target 48461; HLA-B*55:01; MYH4; ENSG00000264424; TAA
DLNEMEIQL

SEQ ID NO: 48462 - protein, 9 aa, Homo sapiens
  Table A; Target 48462; HLA-A*25:01; MYH4; ENSG00000264424; TAA
DLVDKLQTK

SEQ ID NO: 48463 - protein, 9 aa, Homo sapiens
  Table A; Target 48463; HLA-A*26:01; MYH4; ENSG00000264424; TAA
DLVDKLQTK

SEQ ID NO: 48464 - protein, 9 aa, Homo sapiens
  Table A; Target 48464; HLA-A*33:01; MYH4; ENSG00000264424; TAA
DLVDKLQTK

SEQ ID NO: 48465 - protein, 9 aa, Homo sapiens
  Table A; Target 48465; HLA-A*33:03; MYH4; ENSG00000264424; TAA
DLVDKLQTK

SEQ ID NO: 48466 - protein, 9 aa, Homo sapiens
  Table A; Target 48466; HLA-A*68:01; MYH4; ENSG00000264424; TAA
DLVDKLQTK

SEQ ID NO: 48467 - protein, 9 aa, Homo sapiens
  Table A; Target 48467; HLA-B*08:01; MYH4; ENSG00000264424; TAA
DLVDKLQTK

SEQ ID NO: 48468 - protein, 9 aa, Homo sapiens
  Table A; Target 48468; HLA-C*07:06; MYH4; ENSG00000264424; TAA
DLVDKLQTK

SEQ ID NO: 48469 - protein, 10 aa, Homo sapiens
  Table A; Target 48469; HLA-A*68:02; MYH4; ENSG00000264424; TAA
DLVDKLQTKV

SEQ ID NO: 48470 - protein, 8 aa, Homo sapiens
  Table A; Target 48470; HLA-B*08:01; MYH4; ENSG00000264424; TAA
DMAMMTHL

SEQ ID NO: 48471 - protein, 8 aa, Homo sapiens
  Table A; Target 48471; HLA-B*51:01; MYH4; ENSG00000264424; TAA
DMAMMTHL

SEQ ID NO: 48472 - protein, 9 aa, Homo sapiens
  Table A; Target 48472; HLA-A*33:01; MYH4; ENSG00000264424; TAA
DNSSRFGKF

SEQ ID NO: 48473 - protein, 8 aa, Homo sapiens
  Table A; Target 48473; HLA-A*33:01; MYH4; ENSG00000264424; TAA
DPKESYVK

SEQ ID NO: 48474 - protein, 8 aa, Homo sapiens
  Table A; Target 48474; HLA-A*33:03; MYH4; ENSG00000264424; TAA
DPKESYVK

SEQ ID NO: 48475 - protein, 9 aa, Homo sapiens
  Table A; Target 48475; HLA-B*54:01; MYH4; ENSG00000264424; TAA
DPKESYVKA

SEQ ID NO: 48476 - protein, 8 aa, Homo sapiens
  Table A; Target 48476; HLA-B*51:01; MYH4; ENSG00000264424; TAA
DPLNETVV

SEQ ID NO: 48477 - protein, 10 aa, Homo sapiens
  Table A; Target 48477; HLA-A*68:01; MYH4; ENSG00000264424; TAA
DPLNETVVGL

SEQ ID NO: 48478 - protein, 10 aa, Homo sapiens
  Table A; Target 48478; HLA-B*35:01; MYH4; ENSG00000264424; TAA
DPLNETVVGL

SEQ ID NO: 48479 - protein, 10 aa, Homo sapiens
  Table A; Target 48479; HLA-B*35:03; MYH4; ENSG00000264424; TAA
DPLNETVVGL

SEQ ID NO: 48480 - protein, 11 aa, Homo sapiens
  Table A; Target 48480; HLA-A*01:01; MYH4; ENSG00000264424; TAA
DPLNETVVGLY

SEQ ID NO: 48481 - protein, 11 aa, Homo sapiens
  Table A; Target 48481; HLA-A*26:01; MYH4; ENSG00000264424; TAA
DPLNETVVGLY

SEQ ID NO: 48482 - protein, 11 aa, Homo sapiens
  Table A; Target 48482; HLA-B*35:01; MYH4; ENSG00000264424; TAA
DPLNETVVGLY

SEQ ID NO: 48483 - protein, 9 aa, Homo sapiens
  Table A; Target 48483; HLA-B*08:01; MYH4; ENSG00000264424; TAA
DQIISANPL

SEQ ID NO: 48484 - protein, 9 aa, Homo sapiens
  Table A; Target 48484; HLA-B*18:01; MYH4; ENSG00000264424; TAA
DQIISANPL

SEQ ID NO: 48485 - protein, 9 aa, Homo sapiens
  Table A; Target 48485; HLA-B*27:05; MYH4; ENSG00000264424; TAA
DQIISANPL

SEQ ID NO: 48486 - protein, 9 aa, Homo sapiens
  Table A; Target 48486; HLA-B*39:01; MYH4; ENSG00000264424; TAA
DQIISANPL

SEQ ID NO: 48487 - protein, 10 aa, Homo sapiens
  Table A; Target 48487; HLA-B*38:01; MYH4; ENSG00000264424; TAA
DQIISANPLL

SEQ ID NO: 48488 - protein, 8 aa, Homo sapiens
  Table A; Target 48488; HLA-B*08:01; MYH4; ENSG00000264424; TAA
DQLIKTKI

SEQ ID NO: 48489 - protein, 8 aa, Homo sapiens
  Table A; Target 48489; HLA-B*08:01; MYH4; ENSG00000264424; TAA
DQLKRNHL

SEQ ID NO: 48490 - protein, 9 aa, Homo sapiens
  Table A; Target 48490; HLA-A*33:01; MYH4; ENSG00000264424; TAA
DQLKRNHLR

SEQ ID NO: 48491 - protein, 10 aa, Homo sapiens
  Table A; Target 48491; HLA-A*68:01; MYH4; ENSG00000264424; TAA
DQVFSMNPPK

SEQ ID NO: 48492 - protein, 10 aa, Homo sapiens
  Table A; Target 48492; HLA-B*27:02; MYH4; ENSG00000264424; TAA
DQVFSMNPPK

SEQ ID NO: 48493 - protein, 10 aa, Homo sapiens
  Table A; Target 48493; HLA-C*04:01; MYH4; ENSG00000264424; TAA
DQVFSMNPPK

SEQ ID NO: 48494 - protein, 9 aa, Homo sapiens
  Table A; Target 48494; HLA-B*38:01; MYH4; ENSG00000264424; TAA
DRENQSILI

SEQ ID NO: 48495 - protein, 9 aa, Homo sapiens
  Table A; Target 48495; HLA-A*25:01; MYH4; ENSG00000264424; TAA
DSAVDILGF

SEQ ID NO: 48496 - protein, 9 aa, Homo sapiens
  Table A; Target 48496; HLA-A*26:01; MYH4; ENSG00000264424; TAA
DSAVDILGF

SEQ ID NO: 48497 - protein, 9 aa, Homo sapiens
  Table A; Target 48497; HLA-A*33:01; MYH4; ENSG00000264424; TAA
DSAVDILGF

SEQ ID NO: 48498 - protein, 9 aa, Homo sapiens
  Table A; Target 48498; HLA-A*68:01; MYH4; ENSG00000264424; TAA
DSAVDILGF

SEQ ID NO: 48499 - protein, 9 aa, Homo sapiens
  Table A; Target 48499; HLA-B*18:01; MYH4; ENSG00000264424; TAA
DSAVDILGF

SEQ ID NO: 48500 - protein, 9 aa, Homo sapiens
  Table A; Target 48500; HLA-C*07:06; MYH4; ENSG00000264424; TAA
DSAVDILGF

SEQ ID NO: 48501 - protein, 9 aa, Homo sapiens
  Table A; Target 48501; HLA-A*33:01; MYH4; ENSG00000264424; TAA
DSLQRVKQK

SEQ ID NO: 48502 - protein, 10 aa, Homo sapiens
  Table A; Target 48502; HLA-A*01:01; MYH4; ENSG00000264424; TAA
DTENDKQQLN

SEQ ID NO: 48503 - protein, 9 aa, Homo sapiens
  Table A; Target 48503; HLA-A*25:01; MYH4; ENSG00000264424; TAA
DTKQPRQYF

SEQ ID NO: 48504 - protein, 9 aa, Homo sapiens
  Table A; Target 48504; HLA-A*33:01; MYH4; ENSG00000264424; TAA
DTKQPRQYF

SEQ ID NO: 48505 - protein, 9 aa, Homo sapiens
  Table A; Target 48505; HLA-A*33:03; MYH4; ENSG00000264424; TAA
DTKQPRQYF

SEQ ID NO: 48506 - protein, 8 aa, Homo sapiens
  Table A; Target 48506; HLA-A*33:01; MYH4; ENSG00000264424; TAA
DTSAHLER

SEQ ID NO: 48507 - protein, 8 aa, Homo sapiens
  Table A; Target 48507; HLA-A*33:03; MYH4; ENSG00000264424; TAA
DTSAHLER

SEQ ID NO: 48508 - protein, 8 aa, Homo sapiens
  Table A; Target 48508; HLA-A*68:01; MYH4; ENSG00000264424; TAA
DTSAHLER

SEQ ID NO: 48509 - protein, 9 aa, Homo sapiens
  Table A; Target 48509; HLA-A*25:01; MYH4; ENSG00000264424; TAA
DTSAHLERM

SEQ ID NO: 48510 - protein, 9 aa, Homo sapiens
  Table A; Target 48510; HLA-A*26:01; MYH4; ENSG00000264424; TAA
DTSAHLERM

SEQ ID NO: 48511 - protein, 9 aa, Homo sapiens
  Table A; Target 48511; HLA-A*33:01; MYH4; ENSG00000264424; TAA
DTSAHLERM

SEQ ID NO: 48512 - protein, 9 aa, Homo sapiens
  Table A; Target 48512; HLA-A*33:03; MYH4; ENSG00000264424; TAA
DTSAHLERM

SEQ ID NO: 48513 - protein, 9 aa, Homo sapiens
  Table A; Target 48513; HLA-A*68:02; MYH4; ENSG00000264424; TAA
DTSAHLERM

SEQ ID NO: 48514 - protein, 8 aa, Homo sapiens
  Table A; Target 48514; HLA-B*08:01; MYH4; ENSG00000264424; TAA
DTSFKNKL

SEQ ID NO: 48515 - protein, 9 aa, Homo sapiens
  Table A; Target 48515; HLA-A*01:01; MYH4; ENSG00000264424; TAA
DTSFKNKLY

SEQ ID NO: 48516 - protein, 9 aa, Homo sapiens
  Table A; Target 48516; HLA-A*26:01; MYH4; ENSG00000264424; TAA
DTSFKNKLY

SEQ ID NO: 48517 - protein, 11 aa, Homo sapiens
  Table A; Target 48517; HLA-A*68:01; MYH4; ENSG00000264424; TAA
EADALADAEER

SEQ ID NO: 48518 - protein, 11 aa, Homo sapiens
  Table A; Target 48518; HLA-B*27:02; MYH4; ENSG00000264424; TAA
EADALADAEER

SEQ ID NO: 48519 - protein, 8 aa, Homo sapiens
  Table A; Target 48519; HLA-C*05:01; MYH4; ENSG00000264424; TAA
EAEEQSNV

SEQ ID NO: 48520 - protein, 10 aa, Homo sapiens
  Table A; Target 48520; HLA-A*33:03; MYH4; ENSG00000264424; TAA
EAEEQSNVNL

SEQ ID NO: 48521 - protein, 10 aa, Homo sapiens
  Table A; Target 48521; HLA-A*68:01; MYH4; ENSG00000264424; TAA
EAEEQSNVNL

SEQ ID NO: 48522 - protein, 10 aa, Homo sapiens
  Table A; Target 48522; HLA-C*04:01; MYH4; ENSG00000264424; TAA
EAEEQSNVNL

SEQ ID NO: 48523 - protein, 10 aa, Homo sapiens
  Table A; Target 48523; HLA-C*05:01; MYH4; ENSG00000264424; TAA
EAEEQSNVNL

SEQ ID NO: 48524 - protein, 8 aa, Homo sapiens
  Table A; Target 48524; HLA-C*05:01; MYH4; ENSG00000264424; TAA
EAEGGGGK

SEQ ID NO: 48525 - protein, 9 aa, Homo sapiens
  Table A; Target 48525; HLA-C*05:01; MYH4; ENSG00000264424; TAA
EAEGGGGKK

SEQ ID NO: 48526 - protein, 8 aa, Homo sapiens
  Table A; Target 48526; HLA-B*27:02; MYH4; ENSG00000264424; TAA
EAEQLALK

SEQ ID NO: 48527 - protein, 9 aa, Homo sapiens
  Table A; Target 48527; HLA-A*02:03; MYH4; ENSG00000264424; TAA
EAFGNAKTV

SEQ ID NO: 48528 - protein, 9 aa, Homo sapiens
  Table A; Target 48528; HLA-A*25:01; MYH4; ENSG00000264424; TAA
EAFGNAKTV

SEQ ID NO: 48529 - protein, 9 aa, Homo sapiens
  Table A; Target 48529; HLA-A*26:01; MYH4; ENSG00000264424; TAA
EAFGNAKTV

SEQ ID NO: 48530 - protein, 9 aa, Homo sapiens
  Table A; Target 48530; HLA-A*33:01; MYH4; ENSG00000264424; TAA
EAFGNAKTV

SEQ ID NO: 48531 - protein, 9 aa, Homo sapiens
  Table A; Target 48531; HLA-A*33:03; MYH4; ENSG00000264424; TAA
EAFGNAKTV

SEQ ID NO: 48532 - protein, 9 aa, Homo sapiens
  Table A; Target 48532; HLA-A*68:01; MYH4; ENSG00000264424; TAA
EAFGNAKTV

SEQ ID NO: 48533 - protein, 9 aa, Homo sapiens
  Table A; Target 48533; HLA-A*68:02; MYH4; ENSG00000264424; TAA
EAFGNAKTV

SEQ ID NO: 48534 - protein, 9 aa, Homo sapiens
  Table A; Target 48534; HLA-B*13:02; MYH4; ENSG00000264424; TAA
EAFGNAKTV

SEQ ID NO: 48535 - protein, 9 aa, Homo sapiens
  Table A; Target 48535; HLA-B*35:01; MYH4; ENSG00000264424; TAA
EAFGNAKTV

SEQ ID NO: 48536 - protein, 9 aa, Homo sapiens
  Table A; Target 48536; HLA-B*35:03; MYH4; ENSG00000264424; TAA
EAFGNAKTV

SEQ ID NO: 48537 - protein, 9 aa, Homo sapiens
  Table A; Target 48537; HLA-B*39:01; MYH4; ENSG00000264424; TAA
EAFGNAKTV

SEQ ID NO: 48538 - protein, 9 aa, Homo sapiens
  Table A; Target 48538; HLA-B*40:02; MYH4; ENSG00000264424; TAA
EAFGNAKTV

SEQ ID NO: 48539 - protein, 9 aa, Homo sapiens
  Table A; Target 48539; HLA-B*49:01; MYH4; ENSG00000264424; TAA
EAFGNAKTV

SEQ ID NO: 48540 - protein, 9 aa, Homo sapiens
  Table A; Target 48540; HLA-B*51:01; MYH4; ENSG00000264424; TAA
EAFGNAKTV

SEQ ID NO: 48541 - protein, 9 aa, Homo sapiens
  Table A; Target 48541; HLA-B*54:01; MYH4; ENSG00000264424; TAA
EAFGNAKTV

SEQ ID NO: 48542 - protein, 9 aa, Homo sapiens
  Table A; Target 48542; HLA-B*56:01; MYH4; ENSG00000264424; TAA
EAFGNAKTV

SEQ ID NO: 48543 - protein, 9 aa, Homo sapiens
  Table A; Target 48543; HLA-C*02:02; MYH4; ENSG00000264424; TAA
EAFGNAKTV

SEQ ID NO: 48544 - protein, 9 aa, Homo sapiens
  Table A; Target 48544; HLA-C*03:03; MYH4; ENSG00000264424; TAA
EAFGNAKTV

SEQ ID NO: 48545 - protein, 9 aa, Homo sapiens
  Table A; Target 48545; HLA-C*03:04; MYH4; ENSG00000264424; TAA
EAFGNAKTV

SEQ ID NO: 48546 - protein, 9 aa, Homo sapiens
  Table A; Target 48546; HLA-C*06:02; MYH4; ENSG00000264424; TAA
EAFGNAKTV

SEQ ID NO: 48547 - protein, 9 aa, Homo sapiens
  Table A; Target 48547; HLA-C*07:01; MYH4; ENSG00000264424; TAA
EAFGNAKTV

SEQ ID NO: 48548 - protein, 9 aa, Homo sapiens
  Table A; Target 48548; HLA-C*07:06; MYH4; ENSG00000264424; TAA
EAFGNAKTV

SEQ ID NO: 48549 - protein, 9 aa, Homo sapiens
  Table A; Target 48549; HLA-C*12:03; MYH4; ENSG00000264424; TAA
EAFGNAKTV

SEQ ID NO: 48550 - protein, 9 aa, Homo sapiens
  Table A; Target 48550; HLA-C*16:02; MYH4; ENSG00000264424; TAA
EAFGNAKTV

SEQ ID NO: 48551 - protein, 9 aa, Homo sapiens
  Table A; Target 48551; HLA-C*16:04; MYH4; ENSG00000264424; TAA
EAFGNAKTV

SEQ ID NO: 48552 - protein, 10 aa, Homo sapiens
  Table A; Target 48552; HLA-A*26:01; MYH4; ENSG00000264424; TAA
EAFGNAKTVR

SEQ ID NO: 48553 - protein, 10 aa, Homo sapiens
  Table A; Target 48553; HLA-A*33:01; MYH4; ENSG00000264424; TAA
EAFGNAKTVR

SEQ ID NO: 48554 - protein, 10 aa, Homo sapiens
  Table A; Target 48554; HLA-A*33:03; MYH4; ENSG00000264424; TAA
EAFGNAKTVR

SEQ ID NO: 48555 - protein, 10 aa, Homo sapiens
  Table A; Target 48555; HLA-A*68:01; MYH4; ENSG00000264424; TAA
EAFGNAKTVR

SEQ ID NO: 48556 - protein, 10 aa, Homo sapiens
  Table A; Target 48556; HLA-B*35:01; MYH4; ENSG00000264424; TAA
EAFGNAKTVR

SEQ ID NO: 48557 - protein, 10 aa, Homo sapiens
  Table A; Target 48557; HLA-C*07:06; MYH4; ENSG00000264424; TAA
EAFGNAKTVR

SEQ ID NO: 48558 - protein, 8 aa, Homo sapiens
  Table A; Target 48558; HLA-B*51:01; MYH4; ENSG00000264424; TAA
EAGATVTV

SEQ ID NO: 48559 - protein, 8 aa, Homo sapiens
  Table A; Target 48559; HLA-C*05:01; MYH4; ENSG00000264424; TAA
EAGATVTV

SEQ ID NO: 48560 - protein, 9 aa, Homo sapiens
  Table A; Target 48560; HLA-A*33:01; MYH4; ENSG00000264424; TAA
EAGATVTVK

SEQ ID NO: 48561 - protein, 9 aa, Homo sapiens
  Table A; Target 48561; HLA-A*33:03; MYH4; ENSG00000264424; TAA
EAGATVTVK

SEQ ID NO: 48562 - protein, 9 aa, Homo sapiens
  Table A; Target 48562; HLA-A*68:01; MYH4; ENSG00000264424; TAA
EAGATVTVK

SEQ ID NO: 48563 - protein, 9 aa, Homo sapiens
  Table A; Target 48563; HLA-C*07:06; MYH4; ENSG00000264424; TAA
EAGATVTVK

SEQ ID NO: 48564 - protein, 9 aa, Homo sapiens
  Table A; Target 48564; HLA-A*01:01; MYH4; ENSG00000264424; TAA
EAHFSLVHY

SEQ ID NO: 48565 - protein, 9 aa, Homo sapiens
  Table A; Target 48565; HLA-A*25:01; MYH4; ENSG00000264424; TAA
EAHFSLVHY

SEQ ID NO: 48566 - protein, 9 aa, Homo sapiens
  Table A; Target 48566; HLA-A*26:01; MYH4; ENSG00000264424; TAA
EAHFSLVHY

SEQ ID NO: 48567 - protein, 9 aa, Homo sapiens
  Table A; Target 48567; HLA-A*33:01; MYH4; ENSG00000264424; TAA
EAHFSLVHY

SEQ ID NO: 48568 - protein, 9 aa, Homo sapiens
  Table A; Target 48568; HLA-B*35:01; MYH4; ENSG00000264424; TAA
EAHFSLVHY

SEQ ID NO: 48569 - protein, 9 aa, Homo sapiens
  Table A; Target 48569; HLA-C*07:01; MYH4; ENSG00000264424; TAA
EAHFSLVHY

SEQ ID NO: 48570 - protein, 8 aa, Homo sapiens
  Table A; Target 48570; HLA-A*33:03; MYH4; ENSG00000264424; TAA
EAKAELQR

SEQ ID NO: 48571 - protein, 8 aa, Homo sapiens
  Table A; Target 48571; HLA-B*08:01; MYH4; ENSG00000264424; TAA
EAKIKEVT

SEQ ID NO: 48572 - protein, 10 aa, Homo sapiens
  Table A; Target 48572; HLA-A*33:01; MYH4; ENSG00000264424; TAA
EAKIKEVTER

SEQ ID NO: 48573 - protein, 10 aa, Homo sapiens
  Table A; Target 48573; HLA-A*33:03; MYH4; ENSG00000264424; TAA
EAKIKEVTER

SEQ ID NO: 48574 - protein, 10 aa, Homo sapiens
  Table A; Target 48574; HLA-A*68:01; MYH4; ENSG00000264424; TAA
EAKIKEVTER

SEQ ID NO: 48575 - protein, 9 aa, Homo sapiens
  Table A; Target 48575; HLA-A*33:01; MYH4; ENSG00000264424; TAA
EAKKKLAQR

SEQ ID NO: 48576 - protein, 9 aa, Homo sapiens
  Table A; Target 48576; HLA-A*33:03; MYH4; ENSG00000264424; TAA
EAKKKLAQR

SEQ ID NO: 48577 - protein, 9 aa, Homo sapiens
  Table A; Target 48577; HLA-A*02:04; MYH4; ENSG00000264424; TAA
EAPPHIFSI

SEQ ID NO: 48578 - protein, 9 aa, Homo sapiens
  Table A; Target 48578; HLA-A*02:07; MYH4; ENSG00000264424; TAA
EAPPHIFSI

SEQ ID NO: 48579 - protein, 9 aa, Homo sapiens
  Table A; Target 48579; HLA-A*23:01; MYH4; ENSG00000264424; TAA
EAPPHIFSI

SEQ ID NO: 48580 - protein, 9 aa, Homo sapiens
  Table A; Target 48580; HLA-A*24:02; MYH4; ENSG00000264424; TAA
EAPPHIFSI

SEQ ID NO: 48581 - protein, 9 aa, Homo sapiens
  Table A; Target 48581; HLA-A*25:01; MYH4; ENSG00000264424; TAA
EAPPHIFSI

SEQ ID NO: 48582 - protein, 9 aa, Homo sapiens
  Table A; Target 48582; HLA-A*26:01; MYH4; ENSG00000264424; TAA
EAPPHIFSI

SEQ ID NO: 48583 - protein, 9 aa, Homo sapiens
  Table A; Target 48583; HLA-A*33:01; MYH4; ENSG00000264424; TAA
EAPPHIFSI

SEQ ID NO: 48584 - protein, 9 aa, Homo sapiens
  Table A; Target 48584; HLA-A*33:03; MYH4; ENSG00000264424; TAA
EAPPHIFSI

SEQ ID NO: 48585 - protein, 9 aa, Homo sapiens
  Table A; Target 48585; HLA-A*68:01; MYH4; ENSG00000264424; TAA
EAPPHIFSI

SEQ ID NO: 48586 - protein, 9 aa, Homo sapiens
  Table A; Target 48586; HLA-A*68:02; MYH4; ENSG00000264424; TAA
EAPPHIFSI

SEQ ID NO: 48587 - protein, 9 aa, Homo sapiens
  Table A; Target 48587; HLA-B*08:01; MYH4; ENSG00000264424; TAA
EAPPHIFSI

SEQ ID NO: 48588 - protein, 9 aa, Homo sapiens
  Table A; Target 48588; HLA-B*13:02; MYH4; ENSG00000264424; TAA
EAPPHIFSI

SEQ ID NO: 48589 - protein, 9 aa, Homo sapiens
  Table A; Target 48589; HLA-B*51:01; MYH4; ENSG00000264424; TAA
EAPPHIFSI

SEQ ID NO: 48590 - protein, 9 aa, Homo sapiens
  Table A; Target 48590; HLA-B*54:01; MYH4; ENSG00000264424; TAA
EAPPHIFSI

SEQ ID NO: 48591 - protein, 10 aa, Homo sapiens
  Table A; Target 48591; HLA-A*33:01; MYH4; ENSG00000264424; TAA
EAQNKPFDAK

SEQ ID NO: 48592 - protein, 10 aa, Homo sapiens
  Table A; Target 48592; HLA-A*33:03; MYH4; ENSG00000264424; TAA
EAQNKPFDAK

SEQ ID NO: 48593 - protein, 10 aa, Homo sapiens
  Table A; Target 48593; HLA-A*68:01; MYH4; ENSG00000264424; TAA
EAQNKPFDAK

SEQ ID NO: 48594 - protein, 11 aa, Homo sapiens
  Table A; Target 48594; HLA-A*33:01; MYH4; ENSG00000264424; TAA
EARNAEEKAKK

SEQ ID NO: 48595 - protein, 8 aa, Homo sapiens
  Table A; Target 48595; HLA-A*33:01; MYH4; ENSG00000264424; TAA
EATAAALR

SEQ ID NO: 48596 - protein, 8 aa, Homo sapiens
  Table A; Target 48596; HLA-A*33:03; MYH4; ENSG00000264424; TAA
EATAAALR

SEQ ID NO: 48597 - protein, 8 aa, Homo sapiens
  Table A; Target 48597; HLA-A*68:01; MYH4; ENSG00000264424; TAA
EATAAALR

SEQ ID NO: 48598 - protein, 8 aa, Homo sapiens
  Table A; Target 48598; HLA-C*07:06; MYH4; ENSG00000264424; TAA
EATAAALR

SEQ ID NO: 48599 - protein, 9 aa, Homo sapiens
  Table A; Target 48599; HLA-A*33:03; MYH4; ENSG00000264424; TAA
EATAAALRK

SEQ ID NO: 48600 - protein, 9 aa, Homo sapiens
  Table A; Target 48600; HLA-A*68:01; MYH4; ENSG00000264424; TAA
EATAAALRK

SEQ ID NO: 48601 - protein, 9 aa, Homo sapiens
  Table A; Target 48601; HLA-C*07:06; MYH4; ENSG00000264424; TAA
EATAAALRK

SEQ ID NO: 48602 - protein, 10 aa, Homo sapiens
  Table A; Target 48602; HLA-A*68:01; MYH4; ENSG00000264424; TAA
EATAAALRKK

SEQ ID NO: 48603 - protein, 10 aa, Homo sapiens
  Table A; Target 48603; HLA-A*25:01; MYH4; ENSG00000264424; TAA
EAVNSKCASL

SEQ ID NO: 48604 - protein, 10 aa, Homo sapiens
  Table A; Target 48604; HLA-A*26:01; MYH4; ENSG00000264424; TAA
EAVNSKCASL

SEQ ID NO: 48605 - protein, 8 aa, Homo sapiens
  Table A; Target 48605; HLA-B*27:02; MYH4; ENSG00000264424; TAA
EDIVQEAR

SEQ ID NO: 48606 - protein, 9 aa, Homo sapiens
  Table A; Target 48606; HLA-A*33:03; MYH4; ENSG00000264424; TAA
EDKVNTLTK

SEQ ID NO: 48607 - protein, 9 aa, Homo sapiens
  Table A; Target 48607; HLA-A*33:01; MYH4; ENSG00000264424; TAA
EDLMIDVER

SEQ ID NO: 48608 - protein, 9 aa, Homo sapiens
  Table A; Target 48608; HLA-A*33:03; MYH4; ENSG00000264424; TAA
EDLMIDVER

SEQ ID NO: 48609 - protein, 9 aa, Homo sapiens
  Table A; Target 48609; HLA-A*68:01; MYH4; ENSG00000264424; TAA
EDLMIDVER

SEQ ID NO: 48610 - protein, 9 aa, Homo sapiens
  Table A; Target 48610; HLA-B*40:02; MYH4; ENSG00000264424; TAA
EDMAMMTHL

SEQ ID NO: 48611 - protein, 9 aa, Homo sapiens
  Table A; Target 48611; HLA-B*44:02; MYH4; ENSG00000264424; TAA
EDMAMMTHL

SEQ ID NO: 48612 - protein, 9 aa, Homo sapiens
  Table A; Target 48612; HLA-B*44:03; MYH4; ENSG00000264424; TAA
EDMAMMTHL

SEQ ID NO: 48613 - protein, 10 aa, Homo sapiens
  Table A; Target 48613; HLA-B*27:02; MYH4; ENSG00000264424; TAA
EDQLSEIKTK

SEQ ID NO: 48614 - protein, 11 aa, Homo sapiens
  Table A; Target 48614; HLA-C*04:01; MYH4; ENSG00000264424; TAA
EDQVFSMNPPK

SEQ ID NO: 48615 - protein, 9 aa, Homo sapiens
  Table A; Target 48615; HLA-B*18:01; MYH4; ENSG00000264424; TAA
EEAEASLEH

SEQ ID NO: 48616 - protein, 9 aa, Homo sapiens
  Table A; Target 48616; HLA-B*44:03; MYH4; ENSG00000264424; TAA
EEAEASLEH

SEQ ID NO: 48617 - protein, 9 aa, Homo sapiens
  Table A; Target 48617; HLA-B*49:01; MYH4; ENSG00000264424; TAA
EEAEEQSNV

SEQ ID NO: 48618 - protein, 11 aa, Homo sapiens
  Table A; Target 48618; HLA-A*30:01; MYH4; ENSG00000264424; TAA
EEAEEQSNVNL

SEQ ID NO: 48619 - protein, 11 aa, Homo sapiens
  Table A; Target 48619; HLA-A*68:02; MYH4; ENSG00000264424; TAA
EEAEEQSNVNL

SEQ ID NO: 48620 - protein, 11 aa, Homo sapiens
  Table A; Target 48620; HLA-B*27:05; MYH4; ENSG00000264424; TAA
EEAEEQSNVNL

SEQ ID NO: 48621 - protein, 11 aa, Homo sapiens
  Table A; Target 48621; HLA-B*38:01; MYH4; ENSG00000264424; TAA
EEAEEQSNVNL

SEQ ID NO: 48622 - protein, 11 aa, Homo sapiens
  Table A; Target 48622; HLA-B*39:01; MYH4; ENSG00000264424; TAA
EEAEEQSNVNL

SEQ ID NO: 48623 - protein, 11 aa, Homo sapiens
  Table A; Target 48623; HLA-B*40:01; MYH4; ENSG00000264424; TAA
EEAEEQSNVNL

SEQ ID NO: 48624 - protein, 11 aa, Homo sapiens
  Table A; Target 48624; HLA-B*44:02; MYH4; ENSG00000264424; TAA
EEAEEQSNVNL

SEQ ID NO: 48625 - protein, 11 aa, Homo sapiens
  Table A; Target 48625; HLA-B*44:03; MYH4; ENSG00000264424; TAA
EEAEEQSNVNL

SEQ ID NO: 48626 - protein, 9 aa, Homo sapiens
  Table A; Target 48626; HLA-B*39:01; MYH4; ENSG00000264424; TAA
EEAGGATSA

SEQ ID NO: 48627 - protein, 9 aa, Homo sapiens
  Table A; Target 48627; HLA-B*49:01; MYH4; ENSG00000264424; TAA
EEAGGATSA

SEQ ID NO: 48628 - protein, 11 aa, Homo sapiens
  Table A; Target 48628; HLA-B*44:02; MYH4; ENSG00000264424; TAA
EEAGGATSAQI

SEQ ID NO: 48629 - protein, 11 aa, Homo sapiens
  Table A; Target 48629; HLA-B*44:03; MYH4; ENSG00000264424; TAA
EEAGGATSAQI

SEQ ID NO: 48630 - protein, 9 aa, Homo sapiens
  Table A; Target 48630; HLA-B*44:02; MYH4; ENSG00000264424; TAA
EEAKERADI

SEQ ID NO: 48631 - protein, 9 aa, Homo sapiens
  Table A; Target 48631; HLA-B*44:03; MYH4; ENSG00000264424; TAA
EEAKERADI

SEQ ID NO: 48632 - protein, 8 aa, Homo sapiens
  Table A; Target 48632; HLA-A*30:01; MYH4; ENSG00000264424; TAA
EEDKVNTL

SEQ ID NO: 48633 - protein, 8 aa, Homo sapiens
  Table A; Target 48633; HLA-B*18:01; MYH4; ENSG00000264424; TAA
EEDKVNTL

SEQ ID NO: 48634 - protein, 8 aa, Homo sapiens
  Table A; Target 48634; HLA-B*37:01; MYH4; ENSG00000264424; TAA
EEDKVNTL

SEQ ID NO: 48635 - protein, 8 aa, Homo sapiens
  Table A; Target 48635; HLA-B*40:01; MYH4; ENSG00000264424; TAA
EEDKVNTL

SEQ ID NO: 48636 - protein, 8 aa, Homo sapiens
  Table A; Target 48636; HLA-B*44:02; MYH4; ENSG00000264424; TAA
EEDKVNTL

SEQ ID NO: 48637 - protein, 8 aa, Homo sapiens
  Table A; Target 48637; HLA-B*44:03; MYH4; ENSG00000264424; TAA
EEDKVNTL

SEQ ID NO: 48638 - protein, 8 aa, Homo sapiens
  Table A; Target 48638; HLA-B*49:01; MYH4; ENSG00000264424; TAA
EEDKVNTL

SEQ ID NO: 48639 - protein, 10 aa, Homo sapiens
  Table A; Target 48639; HLA-A*01:01; MYH4; ENSG00000264424; TAA
EEDKVNTLTK

SEQ ID NO: 48640 - protein, 10 aa, Homo sapiens
  Table A; Target 48640; HLA-B*44:03; MYH4; ENSG00000264424; TAA
EEDKVNTLTK

SEQ ID NO: 48641 - protein, 8 aa, Homo sapiens
  Table A; Target 48641; HLA-B*40:01; MYH4; ENSG00000264424; TAA
EEEINAEL

SEQ ID NO: 48642 - protein, 11 aa, Homo sapiens
  Table A; Target 48642; HLA-B*27:02; MYH4; ENSG00000264424; TAA
EEEINAELTAK

SEQ ID NO: 48643 - protein, 10 aa, Homo sapiens
  Table A; Target 48643; HLA-A*30:01; MYH4; ENSG00000264424; TAA
EEEQEAKAEL

SEQ ID NO: 48644 - protein, 10 aa, Homo sapiens
  Table A; Target 48644; HLA-B*40:01; MYH4; ENSG00000264424; TAA
EEEQEAKAEL

SEQ ID NO: 48645 - protein, 10 aa, Homo sapiens
  Table A; Target 48645; HLA-B*44:02; MYH4; ENSG00000264424; TAA
EEEQEAKAEL

SEQ ID NO: 48646 - protein, 10 aa, Homo sapiens
  Table A; Target 48646; HLA-B*44:03; MYH4; ENSG00000264424; TAA
EEEQEAKAEL

SEQ ID NO: 48647 - protein, 11 aa, Homo sapiens
  Table A; Target 48647; HLA-A*30:01; MYH4; ENSG00000264424; TAA
EEEQQRLINEL

SEQ ID NO: 48648 - protein, 11 aa, Homo sapiens
  Table A; Target 48648; HLA-B*40:01; MYH4; ENSG00000264424; TAA
EEEQQRLINEL

SEQ ID NO: 48649 - protein, 11 aa, Homo sapiens
  Table A; Target 48649; HLA-B*44:02; MYH4; ENSG00000264424; TAA
EEEQQRLINEL

SEQ ID NO: 48650 - protein, 10 aa, Homo sapiens
  Table A; Target 48650; HLA-B*40:01; MYH4; ENSG00000264424; TAA
EEETKAKSTL

SEQ ID NO: 48651 - protein, 10 aa, Homo sapiens
  Table A; Target 48651; HLA-B*40:02; MYH4; ENSG00000264424; TAA
EEETKAKSTL

SEQ ID NO: 48652 - protein, 10 aa, Homo sapiens
  Table A; Target 48652; HLA-B*44:03; MYH4; ENSG00000264424; TAA
EEETKAKSTL

SEQ ID NO: 48653 - protein, 10 aa, Homo sapiens
  Table A; Target 48653; HLA-A*30:01; MYH4; ENSG00000264424; TAA
EEFEKTKEEL

SEQ ID NO: 48654 - protein, 10 aa, Homo sapiens
  Table A; Target 48654; HLA-B*18:01; MYH4; ENSG00000264424; TAA
EEFEKTKEEL

SEQ ID NO: 48655 - protein, 10 aa, Homo sapiens
  Table A; Target 48655; HLA-B*40:01; MYH4; ENSG00000264424; TAA
EEFEKTKEEL

SEQ ID NO: 48656 - protein, 10 aa, Homo sapiens
  Table A; Target 48656; HLA-B*40:02; MYH4; ENSG00000264424; TAA
EEFEKTKEEL

SEQ ID NO: 48657 - protein, 10 aa, Homo sapiens
  Table A; Target 48657; HLA-B*44:02; MYH4; ENSG00000264424; TAA
EEFEKTKEEL

SEQ ID NO: 48658 - protein, 10 aa, Homo sapiens
  Table A; Target 48658; HLA-B*44:03; MYH4; ENSG00000264424; TAA
EEFEKTKEEL

SEQ ID NO: 48659 - protein, 8 aa, Homo sapiens
  Table A; Target 48659; HLA-B*44:02; MYH4; ENSG00000264424; TAA
EEGKILRI

SEQ ID NO: 48660 - protein, 8 aa, Homo sapiens
  Table A; Target 48660; HLA-B*44:03; MYH4; ENSG00000264424; TAA
EEGKILRI

SEQ ID NO: 48661 - protein, 10 aa, Homo sapiens
  Table A; Target 48661; HLA-B*44:02; MYH4; ENSG00000264424; TAA
EEGKILRIQL

SEQ ID NO: 48662 - protein, 10 aa, Homo sapiens
  Table A; Target 48662; HLA-B*44:03; MYH4; ENSG00000264424; TAA
EEGKILRIQL

SEQ ID NO: 48663 - protein, 8 aa, Homo sapiens
  Table A; Target 48663; HLA-B*18:01; MYH4; ENSG00000264424; TAA
EEIEAERA

SEQ ID NO: 48664 - protein, 10 aa, Homo sapiens
  Table A; Target 48664; HLA-A*33:03; MYH4; ENSG00000264424; TAA
EEIEAERASR

SEQ ID NO: 48665 - protein, 10 aa, Homo sapiens
  Table A; Target 48665; HLA-B*44:02; MYH4; ENSG00000264424; TAA
EEIEAERASR

SEQ ID NO: 48666 - protein, 10 aa, Homo sapiens
  Table A; Target 48666; HLA-B*44:03; MYH4; ENSG00000264424; TAA
EEIEAERASR

SEQ ID NO: 48667 - protein, 11 aa, Homo sapiens
  Table A; Target 48667; HLA-B*44:02; MYH4; ENSG00000264424; TAA
EEIEAERASRA

SEQ ID NO: 48668 - protein, 11 aa, Homo sapiens
  Table A; Target 48668; HLA-B*49:01; MYH4; ENSG00000264424; TAA
EEIEAERASRA

SEQ ID NO: 48669 - protein, 9 aa, Homo sapiens
  Table A; Target 48669; HLA-A*30:01; MYH4; ENSG00000264424; TAA
EEINAELTA

SEQ ID NO: 48670 - protein, 9 aa, Homo sapiens
  Table A; Target 48670; HLA-B*18:01; MYH4; ENSG00000264424; TAA
EEINAELTA

SEQ ID NO: 48671 - protein, 9 aa, Homo sapiens
  Table A; Target 48671; HLA-B*49:01; MYH4; ENSG00000264424; TAA
EEINAELTA

SEQ ID NO: 48672 - protein, 10 aa, Homo sapiens
  Table A; Target 48672; HLA-A*33:03; MYH4; ENSG00000264424; TAA
EEINAELTAK

SEQ ID NO: 48673 - protein, 10 aa, Homo sapiens
  Table A; Target 48673; HLA-B*27:02; MYH4; ENSG00000264424; TAA
EEINAELTAK

SEQ ID NO: 48674 - protein, 10 aa, Homo sapiens
  Table A; Target 48674; HLA-B*44:02; MYH4; ENSG00000264424; TAA
EEINAELTAK

SEQ ID NO: 48675 - protein, 10 aa, Homo sapiens
  Table A; Target 48675; HLA-B*44:03; MYH4; ENSG00000264424; TAA
EEINAELTAK

SEQ ID NO: 48676 - protein, 10 aa, Homo sapiens
  Table A; Target 48676; HLA-B*49:01; MYH4; ENSG00000264424; TAA
EEINAELTAK

SEQ ID NO: 48677 - protein, 10 aa, Homo sapiens
  Table A; Target 48677; HLA-C*07:06; MYH4; ENSG00000264424; TAA
EEINAELTAK

SEQ ID NO: 48678 - protein, 11 aa, Homo sapiens
  Table A; Target 48678; HLA-A*68:01; MYH4; ENSG00000264424; TAA
EEINAELTAKK

SEQ ID NO: 48679 - protein, 11 aa, Homo sapiens
  Table A; Target 48679; HLA-A*68:02; MYH4; ENSG00000264424; TAA
EEINAELTAKK

SEQ ID NO: 48680 - protein, 11 aa, Homo sapiens
  Table A; Target 48680; HLA-B*27:02; MYH4; ENSG00000264424; TAA
EEINAELTAKK

SEQ ID NO: 48681 - protein, 11 aa, Homo sapiens
  Table A; Target 48681; HLA-B*27:05; MYH4; ENSG00000264424; TAA
EEINAELTAKK

SEQ ID NO: 48682 - protein, 11 aa, Homo sapiens
  Table A; Target 48682; HLA-B*44:02; MYH4; ENSG00000264424; TAA
EEINAELTAKK

SEQ ID NO: 48683 - protein, 11 aa, Homo sapiens
  Table A; Target 48683; HLA-B*44:03; MYH4; ENSG00000264424; TAA
EEINAELTAKK

SEQ ID NO: 48684 - protein, 11 aa, Homo sapiens
  Table A; Target 48684; HLA-C*07:06; MYH4; ENSG00000264424; TAA
EEINAELTAKK

SEQ ID NO: 48685 - protein, 10 aa, Homo sapiens
  Table A; Target 48685; HLA-A*30:01; MYH4; ENSG00000264424; TAA
EEISERLEEA

SEQ ID NO: 48686 - protein, 10 aa, Homo sapiens
  Table A; Target 48686; HLA-B*40:02; MYH4; ENSG00000264424; TAA
EEISERLEEA

SEQ ID NO: 48687 - protein, 8 aa, Homo sapiens
  Table A; Target 48687; HLA-B*18:01; MYH4; ENSG00000264424; TAA
EEKMVTLM

SEQ ID NO: 48688 - protein, 8 aa, Homo sapiens
  Table A; Target 48688; HLA-B*37:01; MYH4; ENSG00000264424; TAA
EEKMVTLM

SEQ ID NO: 48689 - protein, 8 aa, Homo sapiens
  Table A; Target 48689; HLA-B*40:02; MYH4; ENSG00000264424; TAA
EEKMVTLM

SEQ ID NO: 48690 - protein, 9 aa, Homo sapiens
  Table A; Target 48690; HLA-A*33:03; MYH4; ENSG00000264424; TAA
EELAKTEAK

SEQ ID NO: 48691 - protein, 9 aa, Homo sapiens
  Table A; Target 48691; HLA-B*44:03; MYH4; ENSG00000264424; TAA
EELAKTEAK

SEQ ID NO: 48692 - protein, 9 aa, Homo sapiens
  Table A; Target 48692; HLA-B*44:03; MYH4; ENSG00000264424; TAA
EELEEAKKK

SEQ ID NO: 48693 - protein, 10 aa, Homo sapiens
  Table A; Target 48693; HLA-B*40:01; MYH4; ENSG00000264424; TAA
EELEEAKKKL

SEQ ID NO: 48694 - protein, 10 aa, Homo sapiens
  Table A; Target 48694; HLA-B*40:02; MYH4; ENSG00000264424; TAA
EELEEAKKKL

SEQ ID NO: 48695 - protein, 10 aa, Homo sapiens
  Table A; Target 48695; HLA-B*44:02; MYH4; ENSG00000264424; TAA
EELEEAKKKL

SEQ ID NO: 48696 - protein, 10 aa, Homo sapiens
  Table A; Target 48696; HLA-B*44:03; MYH4; ENSG00000264424; TAA
EELEEAKKKL

SEQ ID NO: 48697 - protein, 11 aa, Homo sapiens
  Table A; Target 48697; HLA-A*33:03; MYH4; ENSG00000264424; TAA
EELEEEIEAER

SEQ ID NO: 48698 - protein, 11 aa, Homo sapiens
  Table A; Target 48698; HLA-B*27:02; MYH4; ENSG00000264424; TAA
EELEEEIEAER

SEQ ID NO: 48699 - protein, 11 aa, Homo sapiens
  Table A; Target 48699; HLA-C*07:06; MYH4; ENSG00000264424; TAA
EELEEEIEAER

SEQ ID NO: 48700 - protein, 10 aa, Homo sapiens
  Table A; Target 48700; HLA-B*18:01; MYH4; ENSG00000264424; TAA
EEMAGLDETI

SEQ ID NO: 48701 - protein, 10 aa, Homo sapiens
  Table A; Target 48701; HLA-B*27:02; MYH4; ENSG00000264424; TAA
EEMAGLDETI

SEQ ID NO: 48702 - protein, 10 aa, Homo sapiens
  Table A; Target 48702; HLA-B*38:01; MYH4; ENSG00000264424; TAA
EEMAGLDETI

SEQ ID NO: 48703 - protein, 10 aa, Homo sapiens
  Table A; Target 48703; HLA-B*40:01; MYH4; ENSG00000264424; TAA
EEMAGLDETI

SEQ ID NO: 48704 - protein, 10 aa, Homo sapiens
  Table A; Target 48704; HLA-B*44:02; MYH4; ENSG00000264424; TAA
EEMAGLDETI

SEQ ID NO: 48705 - protein, 10 aa, Homo sapiens
  Table A; Target 48705; HLA-B*44:03; MYH4; ENSG00000264424; TAA
EEMAGLDETI

SEQ ID NO: 48706 - protein, 10 aa, Homo sapiens
  Table A; Target 48706; HLA-B*49:01; MYH4; ENSG00000264424; TAA
EEMAGLDETI

SEQ ID NO: 48707 - protein, 11 aa, Homo sapiens
  Table A; Target 48707; HLA-B*44:02; MYH4; ENSG00000264424; TAA
EEMRDEKLAQL

SEQ ID NO: 48708 - protein, 11 aa, Homo sapiens
  Table A; Target 48708; HLA-B*44:03; MYH4; ENSG00000264424; TAA
EEMRDEKLAQL

SEQ ID NO: 48709 - protein, 9 aa, Homo sapiens
  Table A; Target 48709; HLA-A*30:01; MYH4; ENSG00000264424; TAA
EEQEAKAEL

SEQ ID NO: 48710 - protein, 9 aa, Homo sapiens
  Table A; Target 48710; HLA-B*18:01; MYH4; ENSG00000264424; TAA
EEQEAKAEL

SEQ ID NO: 48711 - protein, 9 aa, Homo sapiens
  Table A; Target 48711; HLA-B*27:02; MYH4; ENSG00000264424; TAA
EEQEAKAEL

SEQ ID NO: 48712 - protein, 9 aa, Homo sapiens
  Table A; Target 48712; HLA-B*37:01; MYH4; ENSG00000264424; TAA
EEQEAKAEL

SEQ ID NO: 48713 - protein, 9 aa, Homo sapiens
  Table A; Target 48713; HLA-B*40:01; MYH4; ENSG00000264424; TAA
EEQEAKAEL

SEQ ID NO: 48714 - protein, 9 aa, Homo sapiens
  Table A; Target 48714; HLA-B*40:02; MYH4; ENSG00000264424; TAA
EEQEAKAEL

SEQ ID NO: 48715 - protein, 9 aa, Homo sapiens
  Table A; Target 48715; HLA-B*44:02; MYH4; ENSG00000264424; TAA
EEQEAKAEL

SEQ ID NO: 48716 - protein, 9 aa, Homo sapiens
  Table A; Target 48716; HLA-B*44:03; MYH4; ENSG00000264424; TAA
EEQEAKAEL

SEQ ID NO: 48717 - protein, 9 aa, Homo sapiens
  Table A; Target 48717; HLA-C*16:04; MYH4; ENSG00000264424; TAA
EEQEAKAEL

SEQ ID NO: 48718 - protein, 11 aa, Homo sapiens
  Table A; Target 48718; HLA-A*33:03; MYH4; ENSG00000264424; TAA
EEQEAKAELQR

SEQ ID NO: 48719 - protein, 10 aa, Homo sapiens
  Table A; Target 48719; HLA-A*30:01; MYH4; ENSG00000264424; TAA
EEQQRLINEL

SEQ ID NO: 48720 - protein, 10 aa, Homo sapiens
  Table A; Target 48720; HLA-B*40:02; MYH4; ENSG00000264424; TAA
EEQQRLINEL

SEQ ID NO: 48721 - protein, 10 aa, Homo sapiens
  Table A; Target 48721; HLA-B*44:02; MYH4; ENSG00000264424; TAA
EEQQRLINEL

SEQ ID NO: 48722 - protein, 10 aa, Homo sapiens
  Table A; Target 48722; HLA-B*44:03; MYH4; ENSG00000264424; TAA
EEQQRLINEL

SEQ ID NO: 48723 - protein, 10 aa, Homo sapiens
  Table A; Target 48723; HLA-A*33:03; MYH4; ENSG00000264424; TAA
EEQSNVNLAK

SEQ ID NO: 48724 - protein, 11 aa, Homo sapiens
  Table A; Target 48724; HLA-A*25:01; MYH4; ENSG00000264424; TAA
EEQSNVNLAKF

SEQ ID NO: 48725 - protein, 11 aa, Homo sapiens
  Table A; Target 48725; HLA-A*26:01; MYH4; ENSG00000264424; TAA
EEQSNVNLAKF

SEQ ID NO: 48726 - protein, 11 aa, Homo sapiens
  Table A; Target 48726; HLA-A*30:01; MYH4; ENSG00000264424; TAA
EEQSNVNLAKF

SEQ ID NO: 48727 - protein, 11 aa, Homo sapiens
  Table A; Target 48727; HLA-B*18:01; MYH4; ENSG00000264424; TAA
EEQSNVNLAKF

SEQ ID NO: 48728 - protein, 11 aa, Homo sapiens
  Table A; Target 48728; HLA-B*27:02; MYH4; ENSG00000264424; TAA
EEQSNVNLAKF

SEQ ID NO: 48729 - protein, 11 aa, Homo sapiens
  Table A; Target 48729; HLA-B*44:02; MYH4; ENSG00000264424; TAA
EEQSNVNLAKF

SEQ ID NO: 48730 - protein, 11 aa, Homo sapiens
  Table A; Target 48730; HLA-B*44:03; MYH4; ENSG00000264424; TAA
EEQSNVNLAKF

SEQ ID NO: 48731 - protein, 11 aa, Homo sapiens
  Table A; Target 48731; HLA-C*07:01; MYH4; ENSG00000264424; TAA
EEQSNVNLAKF

SEQ ID NO: 48732 - protein, 11 aa, Homo sapiens
  Table A; Target 48732; HLA-C*16:04; MYH4; ENSG00000264424; TAA
EEQSNVNLAKF

SEQ ID NO: 48733 - protein, 10 aa, Homo sapiens
  Table A; Target 48733; HLA-A*30:01; MYH4; ENSG00000264424; TAA
EESLDHLETL

SEQ ID NO: 48734 - protein, 10 aa, Homo sapiens
  Table A; Target 48734; HLA-B*38:01; MYH4; ENSG00000264424; TAA
EESLDHLETL

SEQ ID NO: 48735 - protein, 10 aa, Homo sapiens
  Table A; Target 48735; HLA-B*40:01; MYH4; ENSG00000264424; TAA
EESLDHLETL

SEQ ID NO: 48736 - protein, 10 aa, Homo sapiens
  Table A; Target 48736; HLA-B*40:02; MYH4; ENSG00000264424; TAA
EESLDHLETL

SEQ ID NO: 48737 - protein, 10 aa, Homo sapiens
  Table A; Target 48737; HLA-B*44:02; MYH4; ENSG00000264424; TAA
EESLDHLETL

SEQ ID NO: 48738 - protein, 10 aa, Homo sapiens
  Table A; Target 48738; HLA-B*44:03; MYH4; ENSG00000264424; TAA
EESLDHLETL

SEQ ID NO: 48739 - protein, 9 aa, Homo sapiens
  Table A; Target 48739; HLA-B*18:01; MYH4; ENSG00000264424; TAA
EESTLQHEA

SEQ ID NO: 48740 - protein, 9 aa, Homo sapiens
  Table A; Target 48740; HLA-B*44:02; MYH4; ENSG00000264424; TAA
EESTLQHEA

SEQ ID NO: 48741 - protein, 9 aa, Homo sapiens
  Table A; Target 48741; HLA-B*44:03; MYH4; ENSG00000264424; TAA
EESTLQHEA

SEQ ID NO: 48742 - protein, 9 aa, Homo sapiens
  Table A; Target 48742; HLA-A*30:01; MYH4; ENSG00000264424; TAA
EETKAKSTL

SEQ ID NO: 48743 - protein, 9 aa, Homo sapiens
  Table A; Target 48743; HLA-B*18:01; MYH4; ENSG00000264424; TAA
EETKAKSTL

SEQ ID NO: 48744 - protein, 9 aa, Homo sapiens
  Table A; Target 48744; HLA-B*37:01; MYH4; ENSG00000264424; TAA
EETKAKSTL

SEQ ID NO: 48745 - protein, 9 aa, Homo sapiens
  Table A; Target 48745; HLA-B*40:01; MYH4; ENSG00000264424; TAA
EETKAKSTL

SEQ ID NO: 48746 - protein, 9 aa, Homo sapiens
  Table A; Target 48746; HLA-B*40:02; MYH4; ENSG00000264424; TAA
EETKAKSTL

SEQ ID NO: 48747 - protein, 9 aa, Homo sapiens
  Table A; Target 48747; HLA-B*44:02; MYH4; ENSG00000264424; TAA
EETKAKSTL

SEQ ID NO: 48748 - protein, 9 aa, Homo sapiens
  Table A; Target 48748; HLA-B*44:03; MYH4; ENSG00000264424; TAA
EETKAKSTL

SEQ ID NO: 48749 - protein, 10 aa, Homo sapiens
  Table A; Target 48749; HLA-B*44:02; MYH4; ENSG00000264424; TAA
EEYKKEGIEW

SEQ ID NO: 48750 - protein, 10 aa, Homo sapiens
  Table A; Target 48750; HLA-B*44:03; MYH4; ENSG00000264424; TAA
EEYKKEGIEW

SEQ ID NO: 48751 - protein, 9 aa, Homo sapiens
  Table A; Target 48751; HLA-A*23:01; MYH4; ENSG00000264424; TAA
EFIDFGMDL

SEQ ID NO: 48752 - protein, 9 aa, Homo sapiens
  Table A; Target 48752; HLA-C*14:02; MYH4; ENSG00000264424; TAA
EFIDFGMDL

SEQ ID NO: 48753 - protein, 9 aa, Homo sapiens
  Table A; Target 48753; HLA-B*08:01; MYH4; ENSG00000264424; TAA
EGKILRIQL

SEQ ID NO: 48754 - protein, 10 aa, Homo sapiens
  Table A; Target 48754; HLA-B*38:01; MYH4; ENSG00000264424; TAA
EHEEGKILRI

SEQ ID NO: 48755 - protein, 9 aa, Homo sapiens
  Table A; Target 48755; HLA-B*27:05; MYH4; ENSG00000264424; TAA
EHELVLHQL

SEQ ID NO: 48756 - protein, 9 aa, Homo sapiens
  Table A; Target 48756; HLA-B*38:01; MYH4; ENSG00000264424; TAA
EHELVLHQL

SEQ ID NO: 48757 - protein, 9 aa, Homo sapiens
  Table A; Target 48757; HLA-B*39:01; MYH4; ENSG00000264424; TAA
EHELVLHQL

SEQ ID NO: 48758 - protein, 9 aa, Homo sapiens
  Table A; Target 48758; HLA-A*33:03; MYH4; ENSG00000264424; TAA
EHVEAVNSK

SEQ ID NO: 48759 - protein, 9 aa, Homo sapiens
  Table A; Target 48759; HLA-A*68:01; MYH4; ENSG00000264424; TAA
EHVEAVNSK

SEQ ID NO: 48760 - protein, 9 aa, Homo sapiens
  Table A; Target 48760; HLA-B*27:05; MYH4; ENSG00000264424; TAA
EHVEAVNSK

SEQ ID NO: 48761 - protein, 9 aa, Homo sapiens
  Table A; Target 48761; HLA-B*38:01; MYH4; ENSG00000264424; TAA
EHVEAVNSK

SEQ ID NO: 48762 - protein, 9 aa, Homo sapiens
  Table A; Target 48762; HLA-B*39:01; MYH4; ENSG00000264424; TAA
EHVEAVNSK

SEQ ID NO: 48763 - protein, 9 aa, Homo sapiens
  Table A; Target 48763; HLA-C*07:06; MYH4; ENSG00000264424; TAA
EHVEAVNSK

SEQ ID NO: 48764 - protein, 9 aa, Homo sapiens
  Table A; Target 48764; HLA-A*02:07; MYH4; ENSG00000264424; TAA
EIDHTQYKF

SEQ ID NO: 48765 - protein, 9 aa, Homo sapiens
  Table A; Target 48765; HLA-A*33:03; MYH4; ENSG00000264424; TAA
EIDRKIAEK

SEQ ID NO: 48766 - protein, 9 aa, Homo sapiens
  Table A; Target 48766; HLA-A*33:03; MYH4; ENSG00000264424; TAA
EIEAERASR

SEQ ID NO: 48767 - protein, 8 aa, Homo sapiens
  Table A; Target 48767; HLA-A*25:01; MYH4; ENSG00000264424; TAA
EIFDFNSL

SEQ ID NO: 48768 - protein, 8 aa, Homo sapiens
  Table A; Target 48768; HLA-A*26:01; MYH4; ENSG00000264424; TAA
EIFDFNSL

SEQ ID NO: 48769 - protein, 8 aa, Homo sapiens
  Table A; Target 48769; HLA-A*68:02; MYH4; ENSG00000264424; TAA
EIFDFNSL

SEQ ID NO: 48770 - protein, 10 aa, Homo sapiens
  Table A; Target 48770; HLA-A*26:01; MYH4; ENSG00000264424; TAA
EIFDFNSLEQ

SEQ ID NO: 48771 - protein, 11 aa, Homo sapiens
  Table A; Target 48771; HLA-A*02:07; MYH4; ENSG00000264424; TAA
EIFDFNSLEQL

SEQ ID NO: 48772 - protein, 11 aa, Homo sapiens
  Table A; Target 48772; HLA-A*25:01; MYH4; ENSG00000264424; TAA
EIFDFNSLEQL

SEQ ID NO: 48773 - protein, 11 aa, Homo sapiens
  Table A; Target 48773; HLA-A*26:01; MYH4; ENSG00000264424; TAA
EIFDFNSLEQL

SEQ ID NO: 48774 - protein, 11 aa, Homo sapiens
  Table A; Target 48774; HLA-A*68:02; MYH4; ENSG00000264424; TAA
EIFDFNSLEQL

SEQ ID NO: 48775 - protein, 11 aa, Homo sapiens
  Table A; Target 48775; HLA-A*33:01; MYH4; ENSG00000264424; TAA
EIKTKEEEQQR

SEQ ID NO: 48776 - protein, 11 aa, Homo sapiens
  Table A; Target 48776; HLA-A*33:03; MYH4; ENSG00000264424; TAA
EIKTKEEEQQR

SEQ ID NO: 48777 - protein, 9 aa, Homo sapiens
  Table A; Target 48777; HLA-A*03:01; MYH4; ENSG00000264424; TAA
EINAELTAK

SEQ ID NO: 48778 - protein, 9 aa, Homo sapiens
  Table A; Target 48778; HLA-A*03:02; MYH4; ENSG00000264424; TAA
EINAELTAK

SEQ ID NO: 48779 - protein, 9 aa, Homo sapiens
  Table A; Target 48779; HLA-A*11:01; MYH4; ENSG00000264424; TAA
EINAELTAK

SEQ ID NO: 48780 - protein, 9 aa, Homo sapiens
  Table A; Target 48780; HLA-A*25:01; MYH4; ENSG00000264424; TAA
EINAELTAK

SEQ ID NO: 48781 - protein, 9 aa, Homo sapiens
  Table A; Target 48781; HLA-A*26:01; MYH4; ENSG00000264424; TAA
EINAELTAK

SEQ ID NO: 48782 - protein, 9 aa, Homo sapiens
  Table A; Target 48782; HLA-A*33:01; MYH4; ENSG00000264424; TAA
EINAELTAK

SEQ ID NO: 48783 - protein, 9 aa, Homo sapiens
  Table A; Target 48783; HLA-A*33:03; MYH4; ENSG00000264424; TAA
EINAELTAK

SEQ ID NO: 48784 - protein, 9 aa, Homo sapiens
  Table A; Target 48784; HLA-A*68:01; MYH4; ENSG00000264424; TAA
EINAELTAK

SEQ ID NO: 48785 - protein, 9 aa, Homo sapiens
  Table A; Target 48785; HLA-C*07:06; MYH4; ENSG00000264424; TAA
EINAELTAK

SEQ ID NO: 48786 - protein, 10 aa, Homo sapiens
  Table A; Target 48786; HLA-A*03:02; MYH4; ENSG00000264424; TAA
EINAELTAKK

SEQ ID NO: 48787 - protein, 10 aa, Homo sapiens
  Table A; Target 48787; HLA-A*26:01; MYH4; ENSG00000264424; TAA
EINAELTAKK

SEQ ID NO: 48788 - protein, 10 aa, Homo sapiens
  Table A; Target 48788; HLA-A*33:03; MYH4; ENSG00000264424; TAA
EINAELTAKK

SEQ ID NO: 48789 - protein, 10 aa, Homo sapiens
  Table A; Target 48789; HLA-A*68:01; MYH4; ENSG00000264424; TAA
EINAELTAKK

SEQ ID NO: 48790 - protein, 10 aa, Homo sapiens
  Table A; Target 48790; HLA-C*07:06; MYH4; ENSG00000264424; TAA
EINAELTAKK

SEQ ID NO: 48791 - protein, 11 aa, Homo sapiens
  Table A; Target 48791; HLA-A*33:01; MYH4; ENSG00000264424; TAA
EINAELTAKKR

SEQ ID NO: 48792 - protein, 11 aa, Homo sapiens
  Table A; Target 48792; HLA-A*33:03; MYH4; ENSG00000264424; TAA
EINAELTAKKR

SEQ ID NO: 48793 - protein, 11 aa, Homo sapiens
  Table A; Target 48793; HLA-A*68:01; MYH4; ENSG00000264424; TAA
EINAELTAKKR

SEQ ID NO: 48794 - protein, 9 aa, Homo sapiens
  Table A; Target 48794; HLA-A*25:01; MYH4; ENSG00000264424; TAA
EINDLASNM

SEQ ID NO: 48795 - protein, 9 aa, Homo sapiens
  Table A; Target 48795; HLA-A*26:01; MYH4; ENSG00000264424; TAA
EINDLASNM

SEQ ID NO: 48796 - protein, 9 aa, Homo sapiens
  Table A; Target 48796; HLA-A*33:01; MYH4; ENSG00000264424; TAA
EINDLASNM

SEQ ID NO: 48797 - protein, 9 aa, Homo sapiens
  Table A; Target 48797; HLA-A*33:03; MYH4; ENSG00000264424; TAA
EINDLASNM

SEQ ID NO: 48798 - protein, 9 aa, Homo sapiens
  Table A; Target 48798; HLA-A*68:01; MYH4; ENSG00000264424; TAA
EINDLASNM

SEQ ID NO: 48799 - protein, 9 aa, Homo sapiens
  Table A; Target 48799; HLA-C*01:02; MYH4; ENSG00000264424; TAA
EINDLASNM

SEQ ID NO: 48800 - protein, 9 aa, Homo sapiens
  Table A; Target 48800; HLA-C*05:01; MYH4; ENSG00000264424; TAA
EINDLASNM

SEQ ID NO: 48801 - protein, 9 aa, Homo sapiens
  Table A; Target 48801; HLA-C*07:06; MYH4; ENSG00000264424; TAA
EINDLASNM

SEQ ID NO: 48802 - protein, 9 aa, Homo sapiens
  Table A; Target 48802; HLA-A*33:01; MYH4; ENSG00000264424; TAA
EIQLNHANR

SEQ ID NO: 48803 - protein, 9 aa, Homo sapiens
  Table A; Target 48803; HLA-A*33:03; MYH4; ENSG00000264424; TAA
EIQLNHANR

SEQ ID NO: 48804 - protein, 9 aa, Homo sapiens
  Table A; Target 48804; HLA-A*68:01; MYH4; ENSG00000264424; TAA
EIQLNHANR

SEQ ID NO: 48805 - protein, 9 aa, Homo sapiens
  Table A; Target 48805; HLA-C*07:06; MYH4; ENSG00000264424; TAA
EIQLNHANR

SEQ ID NO: 48806 - protein, 9 aa, Homo sapiens
  Table A; Target 48806; HLA-B*07:02; MYH4; ENSG00000264424; TAA
EIRSRNDAL

SEQ ID NO: 48807 - protein, 9 aa, Homo sapiens
  Table A; Target 48807; HLA-B*08:01; MYH4; ENSG00000264424; TAA
EIRSRNDAL

SEQ ID NO: 48808 - protein, 9 aa, Homo sapiens
  Table A; Target 48808; HLA-C*07:02; MYH4; ENSG00000264424; TAA
EIRSRNDAL

SEQ ID NO: 48809 - protein, 9 aa, Homo sapiens
  Table A; Target 48809; HLA-A*25:01; MYH4; ENSG00000264424; TAA
EISDLTEQI

SEQ ID NO: 48810 - protein, 9 aa, Homo sapiens
  Table A; Target 48810; HLA-A*26:01; MYH4; ENSG00000264424; TAA
EISDLTEQI

SEQ ID NO: 48811 - protein, 9 aa, Homo sapiens
  Table A; Target 48811; HLA-A*68:01; MYH4; ENSG00000264424; TAA
EISDLTEQI

SEQ ID NO: 48812 - protein, 9 aa, Homo sapiens
  Table A; Target 48812; HLA-A*68:02; MYH4; ENSG00000264424; TAA
EISDLTEQI

SEQ ID NO: 48813 - protein, 9 aa, Homo sapiens
  Table A; Target 48813; HLA-B*38:01; MYH4; ENSG00000264424; TAA
EISDLTEQI

SEQ ID NO: 48814 - protein, 9 aa, Homo sapiens
  Table A; Target 48814; HLA-B*38:01; MYH4; ENSG00000264424; TAA
EKDAMVSQL

SEQ ID NO: 48815 - protein, 9 aa, Homo sapiens
  Table A; Target 48815; HLA-C*04:01; MYH4; ENSG00000264424; TAA
EKDAMVSQL

SEQ ID NO: 48816 - protein, 9 aa, Homo sapiens
  Table A; Target 48816; HLA-A*33:01; MYH4; ENSG00000264424; TAA
EKLAQLITR

SEQ ID NO: 48817 - protein, 9 aa, Homo sapiens
  Table A; Target 48817; HLA-A*33:03; MYH4; ENSG00000264424; TAA
EKLAQLITR

SEQ ID NO: 48818 - protein, 9 aa, Homo sapiens
  Table A; Target 48818; HLA-B*15:03; MYH4; ENSG00000264424; TAA
EKSELQTSL

SEQ ID NO: 48819 - protein, 9 aa, Homo sapiens
  Table A; Target 48819; HLA-B*38:01; MYH4; ENSG00000264424; TAA
EKSELQTSL

SEQ ID NO: 48820 - protein, 9 aa, Homo sapiens
  Table A; Target 48820; HLA-B*39:01; MYH4; ENSG00000264424; TAA
EKSELQTSL

SEQ ID NO: 48821 - protein, 9 aa, Homo sapiens
  Table A; Target 48821; HLA-A*68:02; MYH4; ENSG00000264424; TAA
EKSRVTFQL

SEQ ID NO: 48822 - protein, 9 aa, Homo sapiens
  Table A; Target 48822; HLA-A*33:03; MYH4; ENSG00000264424; TAA
ELAKTEAKR

SEQ ID NO: 48823 - protein, 10 aa, Homo sapiens
  Table A; Target 48823; HLA-A*33:03; MYH4; ENSG00000264424; TAA
ELEASQKESR

SEQ ID NO: 48824 - protein, 10 aa, Homo sapiens
  Table A; Target 48824; HLA-A*33:03; MYH4; ENSG00000264424; TAA
ELEEEIEAER

SEQ ID NO: 48825 - protein, 10 aa, Homo sapiens
  Table A; Target 48825; HLA-B*27:02; MYH4; ENSG00000264424; TAA
ELEEEIEAER

SEQ ID NO: 48826 - protein, 9 aa, Homo sapiens
  Table A; Target 48826; HLA-A*01:01; MYH4; ENSG00000264424; TAA
ELEEISERL

SEQ ID NO: 48827 - protein, 9 aa, Homo sapiens
  Table A; Target 48827; HLA-A*02:07; MYH4; ENSG00000264424; TAA
ELEEISERL

SEQ ID NO: 48828 - protein, 9 aa, Homo sapiens
  Table A; Target 48828; HLA-A*68:02; MYH4; ENSG00000264424; TAA
ELEEISERL

SEQ ID NO: 48829 - protein, 9 aa, Homo sapiens
  Table A; Target 48829; HLA-A*02:07; MYH4; ENSG00000264424; TAA
ELEEKMVTL

SEQ ID NO: 48830 - protein, 9 aa, Homo sapiens
  Table A; Target 48830; HLA-A*25:01; MYH4; ENSG00000264424; TAA
ELEEKMVTL

SEQ ID NO: 48831 - protein, 9 aa, Homo sapiens
  Table A; Target 48831; HLA-B*08:01; MYH4; ENSG00000264424; TAA
ELEEKMVTL

SEQ ID NO: 48832 - protein, 9 aa, Homo sapiens
  Table A; Target 48832; HLA-C*05:01; MYH4; ENSG00000264424; TAA
ELEEKMVTL

SEQ ID NO: 48833 - protein, 10 aa, Homo sapiens
  Table A; Target 48833; HLA-A*01:01; MYH4; ENSG00000264424; TAA
ELEEKMVTLM

SEQ ID NO: 48834 - protein, 11 aa, Homo sapiens
  Table A; Target 48834; HLA-B*27:02; MYH4; ENSG00000264424; TAA
ELESEVESEQK

SEQ ID NO: 48835 - protein, 9 aa, Homo sapiens
  Table A; Target 48835; HLA-A*25:01; MYH4; ENSG00000264424; TAA
ELFKVKNAY

SEQ ID NO: 48836 - protein, 9 aa, Homo sapiens
  Table A; Target 48836; HLA-A*26:01; MYH4; ENSG00000264424; TAA
ELFKVKNAY

SEQ ID NO: 48837 - protein, 9 aa, Homo sapiens
  Table A; Target 48837; HLA-A*29:02; MYH4; ENSG00000264424; TAA
ELFKVKNAY

SEQ ID NO: 48838 - protein, 9 aa, Homo sapiens
  Table A; Target 48838; HLA-A*30:02; MYH4; ENSG00000264424; TAA
ELFKVKNAY

SEQ ID NO: 48839 - protein, 9 aa, Homo sapiens
  Table A; Target 48839; HLA-A*32:01; MYH4; ENSG00000264424; TAA
ELFKVKNAY

SEQ ID NO: 48840 - protein, 9 aa, Homo sapiens
  Table A; Target 48840; HLA-B*15:01; MYH4; ENSG00000264424; TAA
ELFKVKNAY

SEQ ID NO: 48841 - protein, 9 aa, Homo sapiens
  Table A; Target 48841; HLA-B*18:01; MYH4; ENSG00000264424; TAA
ELFKVKNAY

SEQ ID NO: 48842 - protein, 9 aa, Homo sapiens
  Table A; Target 48842; HLA-B*44:03; MYH4; ENSG00000264424; TAA
ELFKVKNAY

SEQ ID NO: 48843 - protein, 9 aa, Homo sapiens
  Table A; Target 48843; HLA-C*07:04; MYH4; ENSG00000264424; TAA
ELFKVKNAY

SEQ ID NO: 48844 - protein, 9 aa, Homo sapiens
  Table A; Target 48844; HLA-B*39:01; MYH4; ENSG00000264424; TAA
ELGEQIDSL

SEQ ID NO: 48845 - protein, 9 aa, Homo sapiens
  Table A; Target 48845; HLA-A*02:03; MYH4; ENSG00000264424; TAA
ELIEKPMGI

SEQ ID NO: 48846 - protein, 9 aa, Homo sapiens
  Table A; Target 48846; HLA-A*25:01; MYH4; ENSG00000264424; TAA
ELIEKPMGI

SEQ ID NO: 48847 - protein, 9 aa, Homo sapiens
  Table A; Target 48847; HLA-A*26:01; MYH4; ENSG00000264424; TAA
ELIEKPMGI

SEQ ID NO: 48848 - protein, 9 aa, Homo sapiens
  Table A; Target 48848; HLA-A*68:02; MYH4; ENSG00000264424; TAA
ELIEKPMGI

SEQ ID NO: 48849 - protein, 9 aa, Homo sapiens
  Table A; Target 48849; HLA-B*08:01; MYH4; ENSG00000264424; TAA
ELIEKPMGI

SEQ ID NO: 48850 - protein, 10 aa, Homo sapiens
  Table A; Target 48850; HLA-A*25:01; MYH4; ENSG00000264424; TAA
ELIEKPMGIF

SEQ ID NO: 48851 - protein, 10 aa, Homo sapiens
  Table A; Target 48851; HLA-A*26:01; MYH4; ENSG00000264424; TAA
ELIEKPMGIF

SEQ ID NO: 48852 - protein, 8 aa, Homo sapiens
  Table A; Target 48852; HLA-A*33:03; MYH4; ENSG00000264424; TAA
ELLDASER

SEQ ID NO: 48853 - protein, 11 aa, Homo sapiens
  Table A; Target 48853; HLA-A*02:01; MYH4; ENSG00000264424; TAA
ELLDASERVQL

SEQ ID NO: 48854 - protein, 11 aa, Homo sapiens
  Table A; Target 48854; HLA-A*02:04; MYH4; ENSG00000264424; TAA
ELLDASERVQL

SEQ ID NO: 48855 - protein, 9 aa, Homo sapiens
  Table A; Target 48855; HLA-A*25:01; MYH4; ENSG00000264424; TAA
ELNQVKSEI

SEQ ID NO: 48856 - protein, 9 aa, Homo sapiens
  Table A; Target 48856; HLA-A*26:01; MYH4; ENSG00000264424; TAA
ELNQVKSEI

SEQ ID NO: 48857 - protein, 9 aa, Homo sapiens
  Table A; Target 48857; HLA-B*08:01; MYH4; ENSG00000264424; TAA
ELNQVKSEI

SEQ ID NO: 48858 - protein, 9 aa, Homo sapiens
  Table A; Target 48858; HLA-B*13:02; MYH4; ENSG00000264424; TAA
ELNQVKSEI

SEQ ID NO: 48859 - protein, 9 aa, Homo sapiens
  Table A; Target 48859; HLA-A*02:03; MYH4; ENSG00000264424; TAA
ELQARIEEL

SEQ ID NO: 48860 - protein, 9 aa, Homo sapiens
  Table A; Target 48860; HLA-A*02:04; MYH4; ENSG00000264424; TAA
ELQARIEEL

SEQ ID NO: 48861 - protein, 9 aa, Homo sapiens
  Table A; Target 48861; HLA-A*25:01; MYH4; ENSG00000264424; TAA
ELQARIEEL

SEQ ID NO: 48862 - protein, 9 aa, Homo sapiens
  Table A; Target 48862; HLA-A*26:01; MYH4; ENSG00000264424; TAA
ELQARIEEL

SEQ ID NO: 48863 - protein, 9 aa, Homo sapiens
  Table A; Target 48863; HLA-B*08:01; MYH4; ENSG00000264424; TAA
ELQARIEEL

SEQ ID NO: 48864 - protein, 9 aa, Homo sapiens
  Table A; Target 48864; HLA-B*08:01; MYH4; ENSG00000264424; TAA
ELSAQKARL

SEQ ID NO: 48865 - protein, 9 aa, Homo sapiens
  Table A; Target 48865; HLA-A*33:01; MYH4; ENSG00000264424; TAA
ELTLAKVEK

SEQ ID NO: 48866 - protein, 9 aa, Homo sapiens
  Table A; Target 48866; HLA-A*33:03; MYH4; ENSG00000264424; TAA
ELTLAKVEK

SEQ ID NO: 48867 - protein, 9 aa, Homo sapiens
  Table A; Target 48867; HLA-B*38:01; MYH4; ENSG00000264424; TAA
EMAGLDETI

SEQ ID NO: 48868 - protein, 11 aa, Homo sapiens
  Table A; Target 48868; HLA-A*03:02; MYH4; ENSG00000264424; TAA
EMAGLDETIAK

SEQ ID NO: 48869 - protein, 11 aa, Homo sapiens
  Table A; Target 48869; HLA-A*33:03; MYH4; ENSG00000264424; TAA
EMAGLDETIAK

SEQ ID NO: 48870 - protein, 11 aa, Homo sapiens
  Table A; Target 48870; HLA-A*68:01; MYH4; ENSG00000264424; TAA
EMAGLDETIAK

SEQ ID NO: 48871 - protein, 11 aa, Homo sapiens
  Table A; Target 48871; HLA-B*27:02; MYH4; ENSG00000264424; TAA
EMAGLDETIAK

SEQ ID NO: 48872 - protein, 9 aa, Homo sapiens
  Table A; Target 48872; HLA-A*24:02; MYH4; ENSG00000264424; TAA
EMANMKEEF

SEQ ID NO: 48873 - protein, 9 aa, Homo sapiens
  Table A; Target 48873; HLA-A*25:01; MYH4; ENSG00000264424; TAA
EMANMKEEF

SEQ ID NO: 48874 - protein, 9 aa, Homo sapiens
  Table A; Target 48874; HLA-A*26:01; MYH4; ENSG00000264424; TAA
EMANMKEEF

SEQ ID NO: 48875 - protein, 9 aa, Homo sapiens
  Table A; Target 48875; HLA-C*07:04; MYH4; ENSG00000264424; TAA
EMANMKEEF

SEQ ID NO: 48876 - protein, 10 aa, Homo sapiens
  Table A; Target 48876; HLA-A*33:01; MYH4; ENSG00000264424; TAA
EMEDIVQEAR

SEQ ID NO: 48877 - protein, 10 aa, Homo sapiens
  Table A; Target 48877; HLA-A*33:03; MYH4; ENSG00000264424; TAA
EMEDIVQEAR

SEQ ID NO: 48878 - protein, 10 aa, Homo sapiens
  Table A; Target 48878; HLA-A*68:01; MYH4; ENSG00000264424; TAA
EMEDIVQEAR

SEQ ID NO: 48879 - protein, 10 aa, Homo sapiens
  Table A; Target 48879; HLA-C*07:06; MYH4; ENSG00000264424; TAA
EMEDIVQEAR

SEQ ID NO: 48880 - protein, 11 aa, Homo sapiens
  Table A; Target 48880; HLA-A*33:03; MYH4; ENSG00000264424; TAA
EMEIQLNHANR

SEQ ID NO: 48881 - protein, 10 aa, Homo sapiens
  Table A; Target 48881; HLA-A*01:01; MYH4; ENSG00000264424; TAA
EMLLITTNPY

SEQ ID NO: 48882 - protein, 10 aa, Homo sapiens
  Table A; Target 48882; HLA-A*33:01; MYH4; ENSG00000264424; TAA
ENLNKLMTNL

SEQ ID NO: 48883 - protein, 10 aa, Homo sapiens
  Table A; Target 48883; HLA-A*33:03; MYH4; ENSG00000264424; TAA
ENLNKLMTNL

SEQ ID NO: 48884 - protein, 9 aa, Homo sapiens
  Table A; Target 48884; HLA-A*33:03; MYH4; ENSG00000264424; TAA
ENQSILITG

SEQ ID NO: 48885 - protein, 11 aa, Homo sapiens
  Table A; Target 48885; HLA-B*07:02; MYH4; ENSG00000264424; TAA
EPASGKMQGTL

SEQ ID NO: 48886 - protein, 8 aa, Homo sapiens
  Table A; Target 48886; HLA-B*08:01; MYH4; ENSG00000264424; TAA
EPAVLYNL

SEQ ID NO: 48887 - protein, 9 aa, Homo sapiens
  Table A; Target 48887; HLA-A*33:03; MYH4; ENSG00000264424; TAA
EPAVLYNLK

SEQ ID NO: 48888 - protein, 9 aa, Homo sapiens
  Table A; Target 48888; HLA-A*68:01; MYH4; ENSG00000264424; TAA
EPAVLYNLK

SEQ ID NO: 48889 - protein, 9 aa, Homo sapiens
  Table A; Target 48889; HLA-C*07:06; MYH4; ENSG00000264424; TAA
EPAVLYNLK

SEQ ID NO: 48890 - protein, 10 aa, Homo sapiens
  Table A; Target 48890; HLA-B*27:02; MYH4; ENSG00000264424; TAA
EPDGTEVADK

SEQ ID NO: 48891 - protein, 10 aa, Homo sapiens
  Table A; Target 48891; HLA-A*26:01; MYH4; ENSG00000264424; TAA
EQAEPDGTEV

SEQ ID NO: 48892 - protein, 10 aa, Homo sapiens
  Table A; Target 48892; HLA-B*39:01; MYH4; ENSG00000264424; TAA
EQAEPDGTEV

SEQ ID NO: 48893 - protein, 11 aa, Homo sapiens
  Table A; Target 48893; HLA-B*39:01; MYH4; ENSG00000264424; TAA
EQAEPDGTEVA

SEQ ID NO: 48894 - protein, 8 aa, Homo sapiens
  Table A; Target 48894; HLA-B*27:05; MYH4; ENSG00000264424; TAA
EQALAIQL

SEQ ID NO: 48895 - protein, 8 aa, Homo sapiens
  Table A; Target 48895; HLA-B*39:01; MYH4; ENSG00000264424; TAA
EQALAIQL

SEQ ID NO: 48896 - protein, 10 aa, Homo sapiens
  Table A; Target 48896; HLA-A*68:01; MYH4; ENSG00000264424; TAA
EQALAIQLQK

SEQ ID NO: 48897 - protein, 10 aa, Homo sapiens
  Table A; Target 48897; HLA-B*27:02; MYH4; ENSG00000264424; TAA
EQALAIQLQK

SEQ ID NO: 48898 - protein, 10 aa, Homo sapiens
  Table A; Target 48898; HLA-C*07:06; MYH4; ENSG00000264424; TAA
EQALAIQLQK

SEQ ID NO: 48899 - protein, 8 aa, Homo sapiens
  Table A; Target 48899; HLA-B*38:01; MYH4; ENSG00000264424; TAA
EQDTSAHL

SEQ ID NO: 48900 - protein, 8 aa, Homo sapiens
  Table A; Target 48900; HLA-B*39:01; MYH4; ENSG00000264424; TAA
EQDTSAHL

SEQ ID NO: 48901 - protein, 8 aa, Homo sapiens
  Table A; Target 48901; HLA-C*05:01; MYH4; ENSG00000264424; TAA
EQDTSAHL

SEQ ID NO: 48902 - protein, 10 aa, Homo sapiens
  Table A; Target 48902; HLA-A*33:03; MYH4; ENSG00000264424; TAA
EQDTSAHLER

SEQ ID NO: 48903 - protein, 10 aa, Homo sapiens
  Table A; Target 48903; HLA-A*68:01; MYH4; ENSG00000264424; TAA
EQDTSAHLER

SEQ ID NO: 48904 - protein, 10 aa, Homo sapiens
  Table A; Target 48904; HLA-C*07:06; MYH4; ENSG00000264424; TAA
EQDTSAHLER

SEQ ID NO: 48905 - protein, 11 aa, Homo sapiens
  Table A; Target 48905; HLA-B*38:01; MYH4; ENSG00000264424; TAA
EQDTSAHLERM

SEQ ID NO: 48906 - protein, 8 aa, Homo sapiens
  Table A; Target 48906; HLA-B*08:01; MYH4; ENSG00000264424; TAA
EQEAKAEL

SEQ ID NO: 48907 - protein, 10 aa, Homo sapiens
  Table A; Target 48907; HLA-B*38:01; MYH4; ENSG00000264424; TAA
EQHLGKSNNF

SEQ ID NO: 48908 - protein, 10 aa, Homo sapiens
  Table A; Target 48908; HLA-B*38:01; MYH4; ENSG00000264424; TAA
EQIAEGGKHI

SEQ ID NO: 48909 - protein, 9 aa, Homo sapiens
  Table A; Target 48909; HLA-A*02:01; MYH4; ENSG00000264424; TAA
EQIDSLQRV

SEQ ID NO: 48910 - protein, 9 aa, Homo sapiens
  Table A; Target 48910; HLA-A*02:03; MYH4; ENSG00000264424; TAA
EQIDSLQRV

SEQ ID NO: 48911 - protein, 9 aa, Homo sapiens
  Table A; Target 48911; HLA-A*02:04; MYH4; ENSG00000264424; TAA
EQIDSLQRV

SEQ ID NO: 48912 - protein, 9 aa, Homo sapiens
  Table A; Target 48912; HLA-A*02:07; MYH4; ENSG00000264424; TAA
EQIDSLQRV

SEQ ID NO: 48913 - protein, 9 aa, Homo sapiens
  Table A; Target 48913; HLA-A*25:01; MYH4; ENSG00000264424; TAA
EQIDSLQRV

SEQ ID NO: 48914 - protein, 9 aa, Homo sapiens
  Table A; Target 48914; HLA-A*26:01; MYH4; ENSG00000264424; TAA
EQIDSLQRV

SEQ ID NO: 48915 - protein, 9 aa, Homo sapiens
  Table A; Target 48915; HLA-A*68:02; MYH4; ENSG00000264424; TAA
EQIDSLQRV

SEQ ID NO: 48916 - protein, 9 aa, Homo sapiens
  Table A; Target 48916; HLA-B*13:02; MYH4; ENSG00000264424; TAA
EQIDSLQRV

SEQ ID NO: 48917 - protein, 9 aa, Homo sapiens
  Table A; Target 48917; HLA-B*27:05; MYH4; ENSG00000264424; TAA
EQIDSLQRV

SEQ ID NO: 48918 - protein, 9 aa, Homo sapiens
  Table A; Target 48918; HLA-B*38:01; MYH4; ENSG00000264424; TAA
EQIDSLQRV

SEQ ID NO: 48919 - protein, 9 aa, Homo sapiens
  Table A; Target 48919; HLA-B*39:01; MYH4; ENSG00000264424; TAA
EQIDSLQRV

SEQ ID NO: 48920 - protein, 9 aa, Homo sapiens
  Table A; Target 48920; HLA-C*06:02; MYH4; ENSG00000264424; TAA
EQIDSLQRV

SEQ ID NO: 48921 - protein, 10 aa, Homo sapiens
  Table A; Target 48921; HLA-A*26:01; MYH4; ENSG00000264424; TAA
EQIDSLQRVK

SEQ ID NO: 48922 - protein, 10 aa, Homo sapiens
  Table A; Target 48922; HLA-A*68:01; MYH4; ENSG00000264424; TAA
EQIDSLQRVK

SEQ ID NO: 48923 - protein, 10 aa, Homo sapiens
  Table A; Target 48923; HLA-B*27:02; MYH4; ENSG00000264424; TAA
EQIDSLQRVK

SEQ ID NO: 48924 - protein, 9 aa, Homo sapiens
  Table A; Target 48924; HLA-A*02:03; MYH4; ENSG00000264424; TAA
EQKHNVEAV

SEQ ID NO: 48925 - protein, 9 aa, Homo sapiens
  Table A; Target 48925; HLA-A*26:01; MYH4; ENSG00000264424; TAA
EQKHNVEAV

SEQ ID NO: 48926 - protein, 8 aa, Homo sapiens
  Table A; Target 48926; HLA-A*33:03; MYH4; ENSG00000264424; TAA
EQLAMVER

SEQ ID NO: 48927 - protein, 9 aa, Homo sapiens
  Table A; Target 48927; HLA-A*33:03; MYH4; ENSG00000264424; TAA
EQLAMVERR

SEQ ID NO: 48928 - protein, 9 aa, Homo sapiens
  Table A; Target 48928; HLA-A*02:04; MYH4; ENSG00000264424; TAA
EQQRLINEL

SEQ ID NO: 48929 - protein, 9 aa, Homo sapiens
  Table A; Target 48929; HLA-A*25:01; MYH4; ENSG00000264424; TAA
EQQRLINEL

SEQ ID NO: 48930 - protein, 9 aa, Homo sapiens
  Table A; Target 48930; HLA-A*26:01; MYH4; ENSG00000264424; TAA
EQQRLINEL

SEQ ID NO: 48931 - protein, 9 aa, Homo sapiens
  Table A; Target 48931; HLA-B*13:02; MYH4; ENSG00000264424; TAA
EQQRLINEL

SEQ ID NO: 48932 - protein, 9 aa, Homo sapiens
  Table A; Target 48932; HLA-B*38:01; MYH4; ENSG00000264424; TAA
EQQRLINEL

SEQ ID NO: 48933 - protein, 9 aa, Homo sapiens
  Table A; Target 48933; HLA-B*39:01; MYH4; ENSG00000264424; TAA
EQQRLINEL

SEQ ID NO: 48934 - protein, 9 aa, Homo sapiens
  Table A; Target 48934; HLA-B*44:02; MYH4; ENSG00000264424; TAA
EQQRLINEL

SEQ ID NO: 48935 - protein, 9 aa, Homo sapiens
  Table A; Target 48935; HLA-A*11:01; MYH4; ENSG00000264424; TAA
EQSNVNLAK

SEQ ID NO: 48936 - protein, 9 aa, Homo sapiens
  Table A; Target 48936; HLA-A*33:03; MYH4; ENSG00000264424; TAA
EQSNVNLAK

SEQ ID NO: 48937 - protein, 9 aa, Homo sapiens
  Table A; Target 48937; HLA-A*68:01; MYH4; ENSG00000264424; TAA
EQSNVNLAK

SEQ ID NO: 48938 - protein, 9 aa, Homo sapiens
  Table A; Target 48938; HLA-B*27:05; MYH4; ENSG00000264424; TAA
EQSNVNLAK

SEQ ID NO: 48939 - protein, 9 aa, Homo sapiens
  Table A; Target 48939; HLA-B*39:01; MYH4; ENSG00000264424; TAA
EQSNVNLAK

SEQ ID NO: 48940 - protein, 9 aa, Homo sapiens
  Table A; Target 48940; HLA-C*07:06; MYH4; ENSG00000264424; TAA
EQSNVNLAK

SEQ ID NO: 48941 - protein, 10 aa, Homo sapiens
  Table A; Target 48941; HLA-A*23:01; MYH4; ENSG00000264424; TAA
EQSNVNLAKF

SEQ ID NO: 48942 - protein, 10 aa, Homo sapiens
  Table A; Target 48942; HLA-A*24:02; MYH4; ENSG00000264424; TAA
EQSNVNLAKF

SEQ ID NO: 48943 - protein, 10 aa, Homo sapiens
  Table A; Target 48943; HLA-A*25:01; MYH4; ENSG00000264424; TAA
EQSNVNLAKF

SEQ ID NO: 48944 - protein, 10 aa, Homo sapiens
  Table A; Target 48944; HLA-A*26:01; MYH4; ENSG00000264424; TAA
EQSNVNLAKF

SEQ ID NO: 48945 - protein, 10 aa, Homo sapiens
  Table A; Target 48945; HLA-A*33:03; MYH4; ENSG00000264424; TAA
EQSNVNLAKF

SEQ ID NO: 48946 - protein, 10 aa, Homo sapiens
  Table A; Target 48946; HLA-A*68:01; MYH4; ENSG00000264424; TAA
EQSNVNLAKF

SEQ ID NO: 48947 - protein, 10 aa, Homo sapiens
  Table A; Target 48947; HLA-A*68:02; MYH4; ENSG00000264424; TAA
EQSNVNLAKF

SEQ ID NO: 48948 - protein, 10 aa, Homo sapiens
  Table A; Target 48948; HLA-B*27:05; MYH4; ENSG00000264424; TAA
EQSNVNLAKF

SEQ ID NO: 48949 - protein, 10 aa, Homo sapiens
  Table A; Target 48949; HLA-B*38:01; MYH4; ENSG00000264424; TAA
EQSNVNLAKF

SEQ ID NO: 48950 - protein, 10 aa, Homo sapiens
  Table A; Target 48950; HLA-B*39:01; MYH4; ENSG00000264424; TAA
EQSNVNLAKF

SEQ ID NO: 48951 - protein, 10 aa, Homo sapiens
  Table A; Target 48951; HLA-B*44:02; MYH4; ENSG00000264424; TAA
EQSNVNLAKF

SEQ ID NO: 48952 - protein, 10 aa, Homo sapiens
  Table A; Target 48952; HLA-B*44:03; MYH4; ENSG00000264424; TAA
EQSNVNLAKF

SEQ ID NO: 48953 - protein, 10 aa, Homo sapiens
  Table A; Target 48953; HLA-C*07:04; MYH4; ENSG00000264424; TAA
EQSNVNLAKF

SEQ ID NO: 48954 - protein, 10 aa, Homo sapiens
  Table A; Target 48954; HLA-C*16:04; MYH4; ENSG00000264424; TAA
EQSNVNLAKF

SEQ ID NO: 48955 - protein, 11 aa, Homo sapiens
  Table A; Target 48955; HLA-A*33:03; MYH4; ENSG00000264424; TAA
EQSNVNLAKFR

SEQ ID NO: 48956 - protein, 9 aa, Homo sapiens
  Table A; Target 48956; HLA-B*08:01; MYH4; ENSG00000264424; TAA
EQTVKDLQL

SEQ ID NO: 48957 - protein, 9 aa, Homo sapiens
  Table A; Target 48957; HLA-B*38:01; MYH4; ENSG00000264424; TAA
EQTVKDLQL

SEQ ID NO: 48958 - protein, 9 aa, Homo sapiens
  Table A; Target 48958; HLA-B*39:01; MYH4; ENSG00000264424; TAA
EQTVKDLQL

SEQ ID NO: 48959 - protein, 10 aa, Homo sapiens
  Table A; Target 48959; HLA-B*27:02; MYH4; ENSG00000264424; TAA
EQYEEEQEAK

SEQ ID NO: 48960 - protein, 10 aa, Homo sapiens
  Table A; Target 48960; HLA-B*27:05; MYH4; ENSG00000264424; TAA
EQYEEEQEAK

SEQ ID NO: 48961 - protein, 10 aa, Homo sapiens
  Table A; Target 48961; HLA-B*27:02; MYH4; ENSG00000264424; TAA
ERIEAQNKPF

SEQ ID NO: 48962 - protein, 10 aa, Homo sapiens
  Table A; Target 48962; HLA-C*16:04; MYH4; ENSG00000264424; TAA
ERIEAQNKPF

SEQ ID NO: 48963 - protein, 8 aa, Homo sapiens
  Table A; Target 48963; HLA-C*07:01; MYH4; ENSG00000264424; TAA
ERSYHIFY

SEQ ID NO: 48964 - protein, 9 aa, Homo sapiens
  Table A; Target 48964; HLA-A*01:01; MYH4; ENSG00000264424; TAA
ESEVESEQK

SEQ ID NO: 48965 - protein, 11 aa, Homo sapiens
  Table A; Target 48965; HLA-A*68:01; MYH4; ENSG00000264424; TAA
ESGAGKTVNTK

SEQ ID NO: 48966 - protein, 8 aa, Homo sapiens
  Table A; Target 48966; HLA-C*07:01; MYH4; ENSG00000264424; TAA
ESIFCIQY

SEQ ID NO: 48967 - protein, 9 aa, Homo sapiens
  Table A; Target 48967; HLA-A*02:04; MYH4; ENSG00000264424; TAA
ESLDHLETL

SEQ ID NO: 48968 - protein, 9 aa, Homo sapiens
  Table A; Target 48968; HLA-A*23:01; MYH4; ENSG00000264424; TAA
ESLDHLETL

SEQ ID NO: 48969 - protein, 9 aa, Homo sapiens
  Table A; Target 48969; HLA-A*24:02; MYH4; ENSG00000264424; TAA
ESLDHLETL

SEQ ID NO: 48970 - protein, 9 aa, Homo sapiens
  Table A; Target 48970; HLA-A*25:01; MYH4; ENSG00000264424; TAA
ESLDHLETL

SEQ ID NO: 48971 - protein, 9 aa, Homo sapiens
  Table A; Target 48971; HLA-A*26:01; MYH4; ENSG00000264424; TAA
ESLDHLETL

SEQ ID NO: 48972 - protein, 9 aa, Homo sapiens
  Table A; Target 48972; HLA-A*33:01; MYH4; ENSG00000264424; TAA
ESLDHLETL

SEQ ID NO: 48973 - protein, 9 aa, Homo sapiens
  Table A; Target 48973; HLA-A*33:03; MYH4; ENSG00000264424; TAA
ESLDHLETL

SEQ ID NO: 48974 - protein, 9 aa, Homo sapiens
  Table A; Target 48974; HLA-A*68:01; MYH4; ENSG00000264424; TAA
ESLDHLETL

SEQ ID NO: 48975 - protein, 9 aa, Homo sapiens
  Table A; Target 48975; HLA-A*68:02; MYH4; ENSG00000264424; TAA
ESLDHLETL

SEQ ID NO: 48976 - protein, 9 aa, Homo sapiens
  Table A; Target 48976; HLA-B*18:01; MYH4; ENSG00000264424; TAA
ESLDHLETL

SEQ ID NO: 48977 - protein, 9 aa, Homo sapiens
  Table A; Target 48977; HLA-B*35:03; MYH4; ENSG00000264424; TAA
ESLDHLETL

SEQ ID NO: 48978 - protein, 9 aa, Homo sapiens
  Table A; Target 48978; HLA-B*38:01; MYH4; ENSG00000264424; TAA
ESLDHLETL

SEQ ID NO: 48979 - protein, 9 aa, Homo sapiens
  Table A; Target 48979; HLA-B*40:02; MYH4; ENSG00000264424; TAA
ESLDHLETL

SEQ ID NO: 48980 - protein, 9 aa, Homo sapiens
  Table A; Target 48980; HLA-B*57:01; MYH4; ENSG00000264424; TAA
ESLDHLETL

SEQ ID NO: 48981 - protein, 9 aa, Homo sapiens
  Table A; Target 48981; HLA-B*58:01; MYH4; ENSG00000264424; TAA
ESLDHLETL

SEQ ID NO: 48982 - protein, 9 aa, Homo sapiens
  Table A; Target 48982; HLA-C*03:04; MYH4; ENSG00000264424; TAA
ESLDHLETL

SEQ ID NO: 48983 - protein, 9 aa, Homo sapiens
  Table A; Target 48983; HLA-C*05:01; MYH4; ENSG00000264424; TAA
ESLDHLETL

SEQ ID NO: 48984 - protein, 9 aa, Homo sapiens
  Table A; Target 48984; HLA-C*07:01; MYH4; ENSG00000264424; TAA
ESLDHLETL

SEQ ID NO: 48985 - protein, 9 aa, Homo sapiens
  Table A; Target 48985; HLA-C*12:03; MYH4; ENSG00000264424; TAA
ESLDHLETL

SEQ ID NO: 48986 - protein, 10 aa, Homo sapiens
  Table A; Target 48986; HLA-A*33:03; MYH4; ENSG00000264424; TAA
ESLDHLETLK

SEQ ID NO: 48987 - protein, 8 aa, Homo sapiens
  Table A; Target 48987; HLA-A*33:01; MYH4; ENSG00000264424; TAA
ESQVNKLR

SEQ ID NO: 48988 - protein, 8 aa, Homo sapiens
  Table A; Target 48988; HLA-A*33:03; MYH4; ENSG00000264424; TAA
ESQVNKLR

SEQ ID NO: 48989 - protein, 9 aa, Homo sapiens
  Table A; Target 48989; HLA-A*26:01; MYH4; ENSG00000264424; TAA
ESRSLSTEL

SEQ ID NO: 48990 - protein, 9 aa, Homo sapiens
  Table A; Target 48990; HLA-B*07:02; MYH4; ENSG00000264424; TAA
ESRSLSTEL

SEQ ID NO: 48991 - protein, 8 aa, Homo sapiens
  Table A; Target 48991; HLA-B*08:01; MYH4; ENSG00000264424; TAA
ESYVKAIV

SEQ ID NO: 48992 - protein, 11 aa, Homo sapiens
  Table A; Target 48992; HLA-A*33:01; MYH4; ENSG00000264424; TAA
ESYVKAIVQSR

SEQ ID NO: 48993 - protein, 11 aa, Homo sapiens
  Table A; Target 48993; HLA-A*33:03; MYH4; ENSG00000264424; TAA
ESYVKAIVQSR

SEQ ID NO: 48994 - protein, 11 aa, Homo sapiens
  Table A; Target 48994; HLA-A*68:01; MYH4; ENSG00000264424; TAA
ESYVKAIVQSR

SEQ ID NO: 48995 - protein, 11 aa, Homo sapiens
  Table A; Target 48995; HLA-C*07:06; MYH4; ENSG00000264424; TAA
ESYVKAIVQSR

SEQ ID NO: 48996 - protein, 11 aa, Homo sapiens
  Table A; Target 48996; HLA-A*01:01; MYH4; ENSG00000264424; TAA
ETDAIQRTEEL

SEQ ID NO: 48997 - protein, 9 aa, Homo sapiens
  Table A; Target 48997; HLA-A*01:01; MYH4; ENSG00000264424; TAA
ETDISQIQG

SEQ ID NO: 48998 - protein, 11 aa, Homo sapiens
  Table A; Target 48998; HLA-A*01:01; MYH4; ENSG00000264424; TAA
ETDISQIQGEM

SEQ ID NO: 48999 - protein, 9 aa, Homo sapiens
  Table A; Target 48999; HLA-A*25:01; MYH4; ENSG00000264424; TAA
ETEKEMANM

SEQ ID NO: 49000 - protein, 9 aa, Homo sapiens
  Table A; Target 49000; HLA-A*26:01; MYH4; ENSG00000264424; TAA
ETEKEMANM

SEQ ID NO: 49001 - protein, 9 aa, Homo sapiens
  Table A; Target 49001; HLA-A*33:03; MYH4; ENSG00000264424; TAA
ETEKEMANM

SEQ ID NO: 49002 - protein, 10 aa, Homo sapiens
  Table A; Target 49002; HLA-A*01:01; MYH4; ENSG00000264424; TAA
ETEKEMANMK

SEQ ID NO: 49003 - protein, 10 aa, Homo sapiens
  Table A; Target 49003; HLA-A*68:01; MYH4; ENSG00000264424; TAA
ETEKEMANMK

SEQ ID NO: 49004 - protein, 9 aa, Homo sapiens
  Table A; Target 49004; HLA-A*26:01; MYH4; ENSG00000264424; TAA
ETIAKLTKE

SEQ ID NO: 49005 - protein, 9 aa, Homo sapiens
  Table A; Target 49005; HLA-A*33:03; MYH4; ENSG00000264424; TAA
ETIAKLTKE

SEQ ID NO: 49006 - protein, 10 aa, Homo sapiens
  Table A; Target 49006; HLA-A*33:01; MYH4; ENSG00000264424; TAA
ETIAKLTKEK

SEQ ID NO: 49007 - protein, 10 aa, Homo sapiens
  Table A; Target 49007; HLA-A*33:03; MYH4; ENSG00000264424; TAA
ETIAKLTKEK

SEQ ID NO: 49008 - protein, 10 aa, Homo sapiens
  Table A; Target 49008; HLA-A*68:01; MYH4; ENSG00000264424; TAA
ETIAKLTKEK

SEQ ID NO: 49009 - protein, 8 aa, Homo sapiens
  Table A; Target 49009; HLA-B*08:01; MYH4; ENSG00000264424; TAA
ETKAKSTL

SEQ ID NO: 49010 - protein, 10 aa, Homo sapiens
  Table A; Target 49010; HLA-A*33:01; MYH4; ENSG00000264424; TAA
ETKTPGAMEH

SEQ ID NO: 49011 - protein, 10 aa, Homo sapiens
  Table A; Target 49011; HLA-A*33:03; MYH4; ENSG00000264424; TAA
ETKTPGAMEH

SEQ ID NO: 49012 - protein, 11 aa, Homo sapiens
  Table A; Target 49012; HLA-A*03:02; MYH4; ENSG00000264424; TAA
ETQAELEASQK

SEQ ID NO: 49013 - protein, 11 aa, Homo sapiens
  Table A; Target 49013; HLA-A*11:01; MYH4; ENSG00000264424; TAA
ETQAELEASQK

SEQ ID NO: 49014 - protein, 11 aa, Homo sapiens
  Table A; Target 49014; HLA-A*33:03; MYH4; ENSG00000264424; TAA
ETQAELEASQK

SEQ ID NO: 49015 - protein, 11 aa, Homo sapiens
  Table A; Target 49015; HLA-A*68:01; MYH4; ENSG00000264424; TAA
ETQAELEASQK

SEQ ID NO: 49016 - protein, 11 aa, Homo sapiens
  Table A; Target 49016; HLA-B*27:02; MYH4; ENSG00000264424; TAA
ETQAELEASQK

SEQ ID NO: 49017 - protein, 11 aa, Homo sapiens
  Table A; Target 49017; HLA-C*07:06; MYH4; ENSG00000264424; TAA
ETQAELEASQK

SEQ ID NO: 49018 - protein, 10 aa, Homo sapiens
  Table A; Target 49018; HLA-A*25:01; MYH4; ENSG00000264424; TAA
ETVSKAKANF

SEQ ID NO: 49019 - protein, 10 aa, Homo sapiens
  Table A; Target 49019; HLA-A*26:01; MYH4; ENSG00000264424; TAA
ETVSKAKANF

SEQ ID NO: 49020 - protein, 10 aa, Homo sapiens
  Table A; Target 49020; HLA-A*33:03; MYH4; ENSG00000264424; TAA
ETVSKAKANF

SEQ ID NO: 49021 - protein, 9 aa, Homo sapiens
  Table A; Target 49021; HLA-A*11:01; MYH4; ENSG00000264424; TAA
ETVVGLYQK

SEQ ID NO: 49022 - protein, 9 aa, Homo sapiens
  Table A; Target 49022; HLA-A*33:01; MYH4; ENSG00000264424; TAA
ETVVGLYQK

SEQ ID NO: 49023 - protein, 9 aa, Homo sapiens
  Table A; Target 49023; HLA-A*33:03; MYH4; ENSG00000264424; TAA
ETVVGLYQK

SEQ ID NO: 49024 - protein, 9 aa, Homo sapiens
  Table A; Target 49024; HLA-A*68:01; MYH4; ENSG00000264424; TAA
ETVVGLYQK

SEQ ID NO: 49025 - protein, 9 aa, Homo sapiens
  Table A; Target 49025; HLA-A*68:02; MYH4; ENSG00000264424; TAA
ETVVGLYQK

SEQ ID NO: 49026 - protein, 9 aa, Homo sapiens
  Table A; Target 49026; HLA-B*27:02; MYH4; ENSG00000264424; TAA
ETVVGLYQK

SEQ ID NO: 49027 - protein, 9 aa, Homo sapiens
  Table A; Target 49027; HLA-C*07:06; MYH4; ENSG00000264424; TAA
ETVVGLYQK

SEQ ID NO: 49028 - protein, 10 aa, Homo sapiens
  Table A; Target 49028; HLA-A*68:01; MYH4; ENSG00000264424; TAA
ETVVGLYQKS

SEQ ID NO: 49029 - protein, 9 aa, Homo sapiens
  Table A; Target 49029; HLA-A*33:01; MYH4; ENSG00000264424; TAA
ETYLLEKSR

SEQ ID NO: 49030 - protein, 9 aa, Homo sapiens
  Table A; Target 49030; HLA-A*33:03; MYH4; ENSG00000264424; TAA
ETYLLEKSR

SEQ ID NO: 49031 - protein, 10 aa, Homo sapiens
  Table A; Target 49031; HLA-A*68:02; MYH4; ENSG00000264424; TAA
ETYLLEKSRV

SEQ ID NO: 49032 - protein, 8 aa, Homo sapiens
  Table A; Target 49032; HLA-A*25:01; MYH4; ENSG00000264424; TAA
EVADKAAY

SEQ ID NO: 49033 - protein, 8 aa, Homo sapiens
  Table A; Target 49033; HLA-A*26:01; MYH4; ENSG00000264424; TAA
EVADKAAY

SEQ ID NO: 49034 - protein, 9 aa, Homo sapiens
  Table A; Target 49034; HLA-A*25:01; MYH4; ENSG00000264424; TAA
EVADKAAYL

SEQ ID NO: 49035 - protein, 9 aa, Homo sapiens
  Table A; Target 49035; HLA-A*26:01; MYH4; ENSG00000264424; TAA
EVADKAAYL

SEQ ID NO: 49036 - protein, 9 aa, Homo sapiens
  Table A; Target 49036; HLA-A*32:01; MYH4; ENSG00000264424; TAA
EVADKAAYL

SEQ ID NO: 49037 - protein, 9 aa, Homo sapiens
  Table A; Target 49037; HLA-A*33:01; MYH4; ENSG00000264424; TAA
EVADKAAYL

SEQ ID NO: 49038 - protein, 9 aa, Homo sapiens
  Table A; Target 49038; HLA-A*33:03; MYH4; ENSG00000264424; TAA
EVADKAAYL

SEQ ID NO: 49039 - protein, 9 aa, Homo sapiens
  Table A; Target 49039; HLA-A*68:01; MYH4; ENSG00000264424; TAA
EVADKAAYL

SEQ ID NO: 49040 - protein, 9 aa, Homo sapiens
  Table A; Target 49040; HLA-A*68:02; MYH4; ENSG00000264424; TAA
EVADKAAYL

SEQ ID NO: 49041 - protein, 9 aa, Homo sapiens
  Table A; Target 49041; HLA-B*08:01; MYH4; ENSG00000264424; TAA
EVADKAAYL

SEQ ID NO: 49042 - protein, 9 aa, Homo sapiens
  Table A; Target 49042; HLA-B*35:03; MYH4; ENSG00000264424; TAA
EVADKAAYL

SEQ ID NO: 49043 - protein, 9 aa, Homo sapiens
  Table A; Target 49043; HLA-C*07:06; MYH4; ENSG00000264424; TAA
EVADKAAYL

SEQ ID NO: 49044 - protein, 9 aa, Homo sapiens
  Table A; Target 49044; HLA-A*25:01; MYH4; ENSG00000264424; TAA
EVAQWRTKY

SEQ ID NO: 49045 - protein, 9 aa, Homo sapiens
  Table A; Target 49045; HLA-A*26:01; MYH4; ENSG00000264424; TAA
EVAQWRTKY

SEQ ID NO: 49046 - protein, 9 aa, Homo sapiens
  Table A; Target 49046; HLA-A*32:01; MYH4; ENSG00000264424; TAA
EVAQWRTKY

SEQ ID NO: 49047 - protein, 9 aa, Homo sapiens
  Table A; Target 49047; HLA-A*26:01; MYH4; ENSG00000264424; TAA
EVEDLMIDV

SEQ ID NO: 49048 - protein, 9 aa, Homo sapiens
  Table A; Target 49048; HLA-A*68:02; MYH4; ENSG00000264424; TAA
EVEDLMIDV

SEQ ID NO: 49049 - protein, 11 aa, Homo sapiens
  Table A; Target 49049; HLA-A*33:01; MYH4; ENSG00000264424; TAA
EVEDLMIDVER

SEQ ID NO: 49050 - protein, 11 aa, Homo sapiens
  Table A; Target 49050; HLA-A*33:03; MYH4; ENSG00000264424; TAA
EVEDLMIDVER

SEQ ID NO: 49051 - protein, 11 aa, Homo sapiens
  Table A; Target 49051; HLA-A*68:01; MYH4; ENSG00000264424; TAA
EVEDLMIDVER

SEQ ID NO: 49052 - protein, 11 aa, Homo sapiens
  Table A; Target 49052; HLA-A*68:02; MYH4; ENSG00000264424; TAA
EVEDLMIDVER

SEQ ID NO: 49053 - protein, 9 aa, Homo sapiens
  Table A; Target 49053; HLA-A*25:01; MYH4; ENSG00000264424; TAA
EVEELRASL

SEQ ID NO: 49054 - protein, 9 aa, Homo sapiens
  Table A; Target 49054; HLA-A*26:01; MYH4; ENSG00000264424; TAA
EVEELRASL

SEQ ID NO: 49055 - protein, 9 aa, Homo sapiens
  Table A; Target 49055; HLA-A*33:01; MYH4; ENSG00000264424; TAA
EVEELRASL

SEQ ID NO: 49056 - protein, 9 aa, Homo sapiens
  Table A; Target 49056; HLA-A*33:03; MYH4; ENSG00000264424; TAA
EVEELRASL

SEQ ID NO: 49057 - protein, 9 aa, Homo sapiens
  Table A; Target 49057; HLA-A*68:01; MYH4; ENSG00000264424; TAA
EVEELRASL

SEQ ID NO: 49058 - protein, 9 aa, Homo sapiens
  Table A; Target 49058; HLA-A*68:02; MYH4; ENSG00000264424; TAA
EVEELRASL

SEQ ID NO: 49059 - protein, 9 aa, Homo sapiens
  Table A; Target 49059; HLA-B*07:02; MYH4; ENSG00000264424; TAA
EVEELRASL

SEQ ID NO: 49060 - protein, 9 aa, Homo sapiens
  Table A; Target 49060; HLA-B*08:01; MYH4; ENSG00000264424; TAA
EVEELRASL

SEQ ID NO: 49061 - protein, 9 aa, Homo sapiens
  Table A; Target 49061; HLA-B*18:01; MYH4; ENSG00000264424; TAA
EVEELRASL

SEQ ID NO: 49062 - protein, 9 aa, Homo sapiens
  Table A; Target 49062; HLA-B*44:02; MYH4; ENSG00000264424; TAA
EVEELRASL

SEQ ID NO: 49063 - protein, 9 aa, Homo sapiens
  Table A; Target 49063; HLA-C*01:02; MYH4; ENSG00000264424; TAA
EVEELRASL

SEQ ID NO: 49064 - protein, 9 aa, Homo sapiens
  Table A; Target 49064; HLA-C*05:01; MYH4; ENSG00000264424; TAA
EVEELRASL

SEQ ID NO: 49065 - protein, 9 aa, Homo sapiens
  Table A; Target 49065; HLA-C*07:02; MYH4; ENSG00000264424; TAA
EVEELRASL

SEQ ID NO: 49066 - protein, 9 aa, Homo sapiens
  Table A; Target 49066; HLA-C*07:06; MYH4; ENSG00000264424; TAA
EVEELRASL

SEQ ID NO: 49067 - protein, 11 aa, Homo sapiens
  Table A; Target 49067; HLA-A*33:03; MYH4; ENSG00000264424; TAA
EVEELRASLER

SEQ ID NO: 49068 - protein, 11 aa, Homo sapiens
  Table A; Target 49068; HLA-A*68:01; MYH4; ENSG00000264424; TAA
EVEELRASLER

SEQ ID NO: 49069 - protein, 9 aa, Homo sapiens
  Table A; Target 49069; HLA-B*08:01; MYH4; ENSG00000264424; TAA
EVHTKVISE

SEQ ID NO: 49070 - protein, 9 aa, Homo sapiens
  Table A; Target 49070; HLA-A*25:01; MYH4; ENSG00000264424; TAA
EVVTAYRGK

SEQ ID NO: 49071 - protein, 9 aa, Homo sapiens
  Table A; Target 49071; HLA-A*26:01; MYH4; ENSG00000264424; TAA
EVVTAYRGK

SEQ ID NO: 49072 - protein, 9 aa, Homo sapiens
  Table A; Target 49072; HLA-A*33:03; MYH4; ENSG00000264424; TAA
EVVTAYRGK

SEQ ID NO: 49073 - protein, 9 aa, Homo sapiens
  Table A; Target 49073; HLA-A*68:01; MYH4; ENSG00000264424; TAA
EVVTAYRGK

SEQ ID NO: 49074 - protein, 9 aa, Homo sapiens
  Table A; Target 49074; HLA-A*33:03; MYH4; ENSG00000264424; TAA
EYKKEGIEW

SEQ ID NO: 49075 - protein, 11 aa, Homo sapiens
  Table A; Target 49075; HLA-A*24:02; MYH4; ENSG00000264424; TAA
EYKKEGIEWEF

SEQ ID NO: 49076 - protein, 9 aa, Homo sapiens
  Table A; Target 49076; HLA-B*39:01; MYH4; ENSG00000264424; TAA
FAFVSQGEI

SEQ ID NO: 49077 - protein, 9 aa, Homo sapiens
  Table A; Target 49077; HLA-B*40:01; MYH4; ENSG00000264424; TAA
FAFVSQGEI

SEQ ID NO: 49078 - protein, 9 aa, Homo sapiens
  Table A; Target 49078; HLA-B*46:01; MYH4; ENSG00000264424; TAA
FAFVSQGEI

SEQ ID NO: 49079 - protein, 9 aa, Homo sapiens
  Table A; Target 49079; HLA-B*51:01; MYH4; ENSG00000264424; TAA
FAFVSQGEI

SEQ ID NO: 49080 - protein, 9 aa, Homo sapiens
  Table A; Target 49080; HLA-B*54:01; MYH4; ENSG00000264424; TAA
FAFVSQGEI

SEQ ID NO: 49081 - protein, 9 aa, Homo sapiens
  Table A; Target 49081; HLA-C*02:02; MYH4; ENSG00000264424; TAA
FAFVSQGEI

SEQ ID NO: 49082 - protein, 9 aa, Homo sapiens
  Table A; Target 49082; HLA-C*03:03; MYH4; ENSG00000264424; TAA
FAFVSQGEI

SEQ ID NO: 49083 - protein, 9 aa, Homo sapiens
  Table A; Target 49083; HLA-C*03:04; MYH4; ENSG00000264424; TAA
FAFVSQGEI

SEQ ID NO: 49084 - protein, 9 aa, Homo sapiens
  Table A; Target 49084; HLA-C*16:04; MYH4; ENSG00000264424; TAA
FAFVSQGEI

SEQ ID NO: 49085 - protein, 11 aa, Homo sapiens
  Table A; Target 49085; HLA-A*68:02; MYH4; ENSG00000264424; TAA
FAFVSQGEITV

SEQ ID NO: 49086 - protein, 11 aa, Homo sapiens
  Table A; Target 49086; HLA-B*35:03; MYH4; ENSG00000264424; TAA
FAFVSQGEITV

SEQ ID NO: 49087 - protein, 11 aa, Homo sapiens
  Table A; Target 49087; HLA-B*51:01; MYH4; ENSG00000264424; TAA
FAFVSQGEITV

SEQ ID NO: 49088 - protein, 11 aa, Homo sapiens
  Table A; Target 49088; HLA-B*54:01; MYH4; ENSG00000264424; TAA
FAFVSQGEITV

SEQ ID NO: 49089 - protein, 11 aa, Homo sapiens
  Table A; Target 49089; HLA-C*02:02; MYH4; ENSG00000264424; TAA
FAFVSQGEITV

SEQ ID NO: 49090 - protein, 11 aa, Homo sapiens
  Table A; Target 49090; HLA-C*03:04; MYH4; ENSG00000264424; TAA
FAFVSQGEITV

SEQ ID NO: 49091 - protein, 11 aa, Homo sapiens
  Table A; Target 49091; HLA-C*12:03; MYH4; ENSG00000264424; TAA
FAFVSQGEITV

SEQ ID NO: 49092 - protein, 8 aa, Homo sapiens
  Table A; Target 49092; HLA-C*07:04; MYH4; ENSG00000264424; TAA
FATIAVTG

SEQ ID NO: 49093 - protein, 9 aa, Homo sapiens
  Table A; Target 49093; HLA-C*07:04; MYH4; ENSG00000264424; TAA
FATIAVTGE

SEQ ID NO: 49094 - protein, 10 aa, Homo sapiens
  Table A; Target 49094; HLA-A*68:01; MYH4; ENSG00000264424; TAA
FATIAVTGEK

SEQ ID NO: 49095 - protein, 10 aa, Homo sapiens
  Table A; Target 49095; HLA-B*27:02; MYH4; ENSG00000264424; TAA
FATIAVTGEK

SEQ ID NO: 49096 - protein, 10 aa, Homo sapiens
  Table A; Target 49096; HLA-C*07:02; MYH4; ENSG00000264424; TAA
FATIAVTGEK

SEQ ID NO: 49097 - protein, 10 aa, Homo sapiens
  Table A; Target 49097; HLA-C*07:06; MYH4; ENSG00000264424; TAA
FATIAVTGEK

SEQ ID NO: 49098 - protein, 11 aa, Homo sapiens
  Table A; Target 49098; HLA-B*27:02; MYH4; ENSG00000264424; TAA
FATIAVTGEKK

SEQ ID NO: 49099 - protein, 8 aa, Homo sapiens
  Table A; Target 49099; HLA-B*18:01; MYH4; ENSG00000264424; TAA
FDAKTSVF

SEQ ID NO: 49100 - protein, 8 aa, Homo sapiens
  Table A; Target 49100; HLA-B*37:01; MYH4; ENSG00000264424; TAA
FDAKTSVF

SEQ ID NO: 49101 - protein, 9 aa, Homo sapiens
  Table A; Target 49101; HLA-A*30:01; MYH4; ENSG00000264424; TAA
FDFNSLEQL

SEQ ID NO: 49102 - protein, 9 aa, Homo sapiens
  Table A; Target 49102; HLA-B*40:01; MYH4; ENSG00000264424; TAA
FDFNSLEQL

SEQ ID NO: 49103 - protein, 9 aa, Homo sapiens
  Table A; Target 49103; HLA-A*30:01; MYH4; ENSG00000264424; TAA
FEIFDFNSL

SEQ ID NO: 49104 - protein, 9 aa, Homo sapiens
  Table A; Target 49104; HLA-B*18:01; MYH4; ENSG00000264424; TAA
FEIFDFNSL

SEQ ID NO: 49105 - protein, 9 aa, Homo sapiens
  Table A; Target 49105; HLA-B*40:01; MYH4; ENSG00000264424; TAA
FEIFDFNSL

SEQ ID NO: 49106 - protein, 9 aa, Homo sapiens
  Table A; Target 49106; HLA-B*40:02; MYH4; ENSG00000264424; TAA
FEIFDFNSL

SEQ ID NO: 49107 - protein, 9 aa, Homo sapiens
  Table A; Target 49107; HLA-B*44:02; MYH4; ENSG00000264424; TAA
FEIFDFNSL

SEQ ID NO: 49108 - protein, 9 aa, Homo sapiens
  Table A; Target 49108; HLA-B*49:01; MYH4; ENSG00000264424; TAA
FEIFDFNSL

SEQ ID NO: 49109 - protein, 9 aa, Homo sapiens
  Table A; Target 49109; HLA-C*03:04; MYH4; ENSG00000264424; TAA
FEIFDFNSL

SEQ ID NO: 49110 - protein, 8 aa, Homo sapiens
  Table A; Target 49110; HLA-B*08:01; MYH4; ENSG00000264424; TAA
FEKTKEEL

SEQ ID NO: 49111 - protein, 8 aa, Homo sapiens
  Table A; Target 49111; HLA-B*37:01; MYH4; ENSG00000264424; TAA
FEKTKEEL

SEQ ID NO: 49112 - protein, 8 aa, Homo sapiens
  Table A; Target 49112; HLA-B*40:02; MYH4; ENSG00000264424; TAA
FEKTKEEL

SEQ ID NO: 49113 - protein, 8 aa, Homo sapiens
  Table A; Target 49113; HLA-C*16:01; MYH4; ENSG00000264424; TAA
FEKTKEEL

SEQ ID NO: 49114 - protein, 9 aa, Homo sapiens
  Table A; Target 49114; HLA-B*40:02; MYH4; ENSG00000264424; TAA
FEKTKEELA

SEQ ID NO: 49115 - protein, 10 aa, Homo sapiens
  Table A; Target 49115; HLA-A*30:01; MYH4; ENSG00000264424; TAA
FEMSNLQGKI

SEQ ID NO: 49116 - protein, 10 aa, Homo sapiens
  Table A; Target 49116; HLA-B*44:02; MYH4; ENSG00000264424; TAA
FEMSNLQGKI

SEQ ID NO: 49117 - protein, 10 aa, Homo sapiens
  Table A; Target 49117; HLA-B*44:03; MYH4; ENSG00000264424; TAA
FEMSNLQGKI

SEQ ID NO: 49118 - protein, 10 aa, Homo sapiens
  Table A; Target 49118; HLA-B*49:01; MYH4; ENSG00000264424; TAA
FEMSNLQGKI

SEQ ID NO: 49119 - protein, 10 aa, Homo sapiens
  Table A; Target 49119; HLA-A*02:03; MYH4; ENSG00000264424; TAA
FGATGKLASA

SEQ ID NO: 49120 - protein, 10 aa, Homo sapiens
  Table A; Target 49120; HLA-B*54:01; MYH4; ENSG00000264424; TAA
FGATGKLASA

SEQ ID NO: 49121 - protein, 8 aa, Homo sapiens
  Table A; Target 49121; HLA-C*03:04; MYH4; ENSG00000264424; TAA
FGEAAPFL

SEQ ID NO: 49122 - protein, 8 aa, Homo sapiens
  Table A; Target 49122; HLA-C*05:01; MYH4; ENSG00000264424; TAA
FGEAAPFL

SEQ ID NO: 49123 - protein, 8 aa, Homo sapiens
  Table A; Target 49123; HLA-B*08:01; MYH4; ENSG00000264424; TAA
FGHTKVFF

SEQ ID NO: 49124 - protein, 9 aa, Homo sapiens
  Table A; Target 49124; HLA-B*13:02; MYH4; ENSG00000264424; TAA
FGMDLAACI

SEQ ID NO: 49125 - protein, 9 aa, Homo sapiens
  Table A; Target 49125; HLA-B*51:01; MYH4; ENSG00000264424; TAA
FGMDLAACI

SEQ ID NO: 49126 - protein, 8 aa, Homo sapiens
  Table A; Target 49126; HLA-C*03:03; MYH4; ENSG00000264424; TAA
FIDFGMDL

SEQ ID NO: 49127 - protein, 8 aa, Homo sapiens
  Table A; Target 49127; HLA-C*03:04; MYH4; ENSG00000264424; TAA
FIDFGMDL

SEQ ID NO: 49128 - protein, 8 aa, Homo sapiens
  Table A; Target 49128; HLA-C*05:01; MYH4; ENSG00000264424; TAA
FIDFGMDL

SEQ ID NO: 49129 - protein, 9 aa, Homo sapiens
  Table A; Target 49129; HLA-B*15:03; MYH4; ENSG00000264424; TAA
FKAGLLGTL

SEQ ID NO: 49130 - protein, 9 aa, Homo sapiens
  Table A; Target 49130; HLA-A*02:01; MYH4; ENSG00000264424; TAA
FLFSGAQTA

SEQ ID NO: 49131 - protein, 9 aa, Homo sapiens
  Table A; Target 49131; HLA-A*02:03; MYH4; ENSG00000264424; TAA
FLFSGAQTA

SEQ ID NO: 49132 - protein, 9 aa, Homo sapiens
  Table A; Target 49132; HLA-A*02:04; MYH4; ENSG00000264424; TAA
FLFSGAQTA

SEQ ID NO: 49133 - protein, 9 aa, Homo sapiens
  Table A; Target 49133; HLA-A*02:07; MYH4; ENSG00000264424; TAA
FLFSGAQTA

SEQ ID NO: 49134 - protein, 9 aa, Homo sapiens
  Table A; Target 49134; HLA-A*30:01; MYH4; ENSG00000264424; TAA
FLFSGAQTA

SEQ ID NO: 49135 - protein, 9 aa, Homo sapiens
  Table A; Target 49135; HLA-A*32:01; MYH4; ENSG00000264424; TAA
FLFSGAQTA

SEQ ID NO: 49136 - protein, 9 aa, Homo sapiens
  Table A; Target 49136; HLA-B*13:02; MYH4; ENSG00000264424; TAA
FLFSGAQTA

SEQ ID NO: 49137 - protein, 9 aa, Homo sapiens
  Table A; Target 49137; HLA-B*15:01; MYH4; ENSG00000264424; TAA
FLFSGAQTA

SEQ ID NO: 49138 - protein, 9 aa, Homo sapiens
  Table A; Target 49138; HLA-B*27:05; MYH4; ENSG00000264424; TAA
FLFSGAQTA

SEQ ID NO: 49139 - protein, 9 aa, Homo sapiens
  Table A; Target 49139; HLA-B*35:03; MYH4; ENSG00000264424; TAA
FLFSGAQTA

SEQ ID NO: 49140 - protein, 9 aa, Homo sapiens
  Table A; Target 49140; HLA-B*39:01; MYH4; ENSG00000264424; TAA
FLFSGAQTA

SEQ ID NO: 49141 - protein, 9 aa, Homo sapiens
  Table A; Target 49141; HLA-B*46:01; MYH4; ENSG00000264424; TAA
FLFSGAQTA

SEQ ID NO: 49142 - protein, 9 aa, Homo sapiens
  Table A; Target 49142; HLA-B*54:01; MYH4; ENSG00000264424; TAA
FLFSGAQTA

SEQ ID NO: 49143 - protein, 9 aa, Homo sapiens
  Table A; Target 49143; HLA-B*55:01; MYH4; ENSG00000264424; TAA
FLFSGAQTA

SEQ ID NO: 49144 - protein, 9 aa, Homo sapiens
  Table A; Target 49144; HLA-B*56:01; MYH4; ENSG00000264424; TAA
FLFSGAQTA

SEQ ID NO: 49145 - protein, 9 aa, Homo sapiens
  Table A; Target 49145; HLA-C*01:02; MYH4; ENSG00000264424; TAA
FLFSGAQTA

SEQ ID NO: 49146 - protein, 9 aa, Homo sapiens
  Table A; Target 49146; HLA-C*02:02; MYH4; ENSG00000264424; TAA
FLFSGAQTA

SEQ ID NO: 49147 - protein, 9 aa, Homo sapiens
  Table A; Target 49147; HLA-C*03:03; MYH4; ENSG00000264424; TAA
FLFSGAQTA

SEQ ID NO: 49148 - protein, 9 aa, Homo sapiens
  Table A; Target 49148; HLA-C*03:04; MYH4; ENSG00000264424; TAA
FLFSGAQTA

SEQ ID NO: 49149 - protein, 9 aa, Homo sapiens
  Table A; Target 49149; HLA-C*06:02; MYH4; ENSG00000264424; TAA
FLFSGAQTA

SEQ ID NO: 49150 - protein, 9 aa, Homo sapiens
  Table A; Target 49150; HLA-C*07:04; MYH4; ENSG00000264424; TAA
FLFSGAQTA

SEQ ID NO: 49151 - protein, 9 aa, Homo sapiens
  Table A; Target 49151; HLA-C*12:03; MYH4; ENSG00000264424; TAA
FLFSGAQTA

SEQ ID NO: 49152 - protein, 9 aa, Homo sapiens
  Table A; Target 49152; HLA-C*14:02; MYH4; ENSG00000264424; TAA
FLFSGAQTA

SEQ ID NO: 49153 - protein, 10 aa, Homo sapiens
  Table A; Target 49153; HLA-A*02:03; MYH4; ENSG00000264424; TAA
FLFSGAQTAE

SEQ ID NO: 49154 - protein, 10 aa, Homo sapiens
  Table A; Target 49154; HLA-C*07:04; MYH4; ENSG00000264424; TAA
FLFSGAQTAE

SEQ ID NO: 49155 - protein, 11 aa, Homo sapiens
  Table A; Target 49155; HLA-A*02:01; MYH4; ENSG00000264424; TAA
FLFSGAQTAEA

SEQ ID NO: 49156 - protein, 11 aa, Homo sapiens
  Table A; Target 49156; HLA-A*02:03; MYH4; ENSG00000264424; TAA
FLFSGAQTAEA

SEQ ID NO: 49157 - protein, 11 aa, Homo sapiens
  Table A; Target 49157; HLA-A*02:04; MYH4; ENSG00000264424; TAA
FLFSGAQTAEA

SEQ ID NO: 49158 - protein, 11 aa, Homo sapiens
  Table A; Target 49158; HLA-A*02:07; MYH4; ENSG00000264424; TAA
FLFSGAQTAEA

SEQ ID NO: 49159 - protein, 11 aa, Homo sapiens
  Table A; Target 49159; HLA-A*68:02; MYH4; ENSG00000264424; TAA
FLFSGAQTAEA

SEQ ID NO: 49160 - protein, 11 aa, Homo sapiens
  Table A; Target 49160; HLA-B*46:01; MYH4; ENSG00000264424; TAA
FLFSGAQTAEA

SEQ ID NO: 49161 - protein, 11 aa, Homo sapiens
  Table A; Target 49161; HLA-B*54:01; MYH4; ENSG00000264424; TAA
FLFSGAQTAEA

SEQ ID NO: 49162 - protein, 11 aa, Homo sapiens
  Table A; Target 49162; HLA-B*55:01; MYH4; ENSG00000264424; TAA
FLFSGAQTAEA

SEQ ID NO: 49163 - protein, 8 aa, Homo sapiens
  Table A; Target 49163; HLA-A*02:04; MYH4; ENSG00000264424; TAA
FLWMVTRI

SEQ ID NO: 49164 - protein, 11 aa, Homo sapiens
  Table A; Target 49164; HLA-A*02:01; MYH4; ENSG00000264424; TAA
FMLTDRENQSI

SEQ ID NO: 49165 - protein, 9 aa, Homo sapiens
  Table A; Target 49165; HLA-A*24:02; MYH4; ENSG00000264424; TAA
FMNVKHWPW

SEQ ID NO: 49166 - protein, 9 aa, Homo sapiens
  Table A; Target 49166; HLA-A*23:01; MYH4; ENSG00000264424; TAA
FPKATDTSF

SEQ ID NO: 49167 - protein, 9 aa, Homo sapiens
  Table A; Target 49167; HLA-A*26:01; MYH4; ENSG00000264424; TAA
FPKATDTSF

SEQ ID NO: 49168 - protein, 9 aa, Homo sapiens
  Table A; Target 49168; HLA-A*32:01; MYH4; ENSG00000264424; TAA
FPKATDTSF

SEQ ID NO: 49169 - protein, 9 aa, Homo sapiens
  Table A; Target 49169; HLA-A*33:03; MYH4; ENSG00000264424; TAA
FPKATDTSF

SEQ ID NO: 49170 - protein, 9 aa, Homo sapiens
  Table A; Target 49170; HLA-B*07:02; MYH4; ENSG00000264424; TAA
FPKATDTSF

SEQ ID NO: 49171 - protein, 9 aa, Homo sapiens
  Table A; Target 49171; HLA-B*08:01; MYH4; ENSG00000264424; TAA
FPKATDTSF

SEQ ID NO: 49172 - protein, 9 aa, Homo sapiens
  Table A; Target 49172; HLA-B*15:01; MYH4; ENSG00000264424; TAA
FPKATDTSF

SEQ ID NO: 49173 - protein, 9 aa, Homo sapiens
  Table A; Target 49173; HLA-B*15:03; MYH4; ENSG00000264424; TAA
FPKATDTSF

SEQ ID NO: 49174 - protein, 9 aa, Homo sapiens
  Table A; Target 49174; HLA-B*35:01; MYH4; ENSG00000264424; TAA
FPKATDTSF

SEQ ID NO: 49175 - protein, 9 aa, Homo sapiens
  Table A; Target 49175; HLA-B*35:03; MYH4; ENSG00000264424; TAA
FPKATDTSF

SEQ ID NO: 49176 - protein, 9 aa, Homo sapiens
  Table A; Target 49176; HLA-B*40:02; MYH4; ENSG00000264424; TAA
FPKATDTSF

SEQ ID NO: 49177 - protein, 9 aa, Homo sapiens
  Table A; Target 49177; HLA-B*46:01; MYH4; ENSG00000264424; TAA
FPKATDTSF

SEQ ID NO: 49178 - protein, 9 aa, Homo sapiens
  Table A; Target 49178; HLA-B*51:01; MYH4; ENSG00000264424; TAA
FPKATDTSF

SEQ ID NO: 49179 - protein, 9 aa, Homo sapiens
  Table A; Target 49179; HLA-B*54:01; MYH4; ENSG00000264424; TAA
FPKATDTSF

SEQ ID NO: 49180 - protein, 9 aa, Homo sapiens
  Table A; Target 49180; HLA-B*55:01; MYH4; ENSG00000264424; TAA
FPKATDTSF

SEQ ID NO: 49181 - protein, 9 aa, Homo sapiens
  Table A; Target 49181; HLA-B*56:01; MYH4; ENSG00000264424; TAA
FPKATDTSF

SEQ ID NO: 49182 - protein, 9 aa, Homo sapiens
  Table A; Target 49182; HLA-C*01:02; MYH4; ENSG00000264424; TAA
FPKATDTSF

SEQ ID NO: 49183 - protein, 9 aa, Homo sapiens
  Table A; Target 49183; HLA-C*02:02; MYH4; ENSG00000264424; TAA
FPKATDTSF

SEQ ID NO: 49184 - protein, 9 aa, Homo sapiens
  Table A; Target 49184; HLA-C*03:03; MYH4; ENSG00000264424; TAA
FPKATDTSF

SEQ ID NO: 49185 - protein, 9 aa, Homo sapiens
  Table A; Target 49185; HLA-C*03:04; MYH4; ENSG00000264424; TAA
FPKATDTSF

SEQ ID NO: 49186 - protein, 9 aa, Homo sapiens
  Table A; Target 49186; HLA-C*04:01; MYH4; ENSG00000264424; TAA
FPKATDTSF

SEQ ID NO: 49187 - protein, 9 aa, Homo sapiens
  Table A; Target 49187; HLA-C*05:01; MYH4; ENSG00000264424; TAA
FPKATDTSF

SEQ ID NO: 49188 - protein, 9 aa, Homo sapiens
  Table A; Target 49188; HLA-C*07:02; MYH4; ENSG00000264424; TAA
FPKATDTSF

SEQ ID NO: 49189 - protein, 9 aa, Homo sapiens
  Table A; Target 49189; HLA-C*07:04; MYH4; ENSG00000264424; TAA
FPKATDTSF

SEQ ID NO: 49190 - protein, 9 aa, Homo sapiens
  Table A; Target 49190; HLA-C*14:02; MYH4; ENSG00000264424; TAA
FPKATDTSF

SEQ ID NO: 49191 - protein, 9 aa, Homo sapiens
  Table A; Target 49191; HLA-C*16:01; MYH4; ENSG00000264424; TAA
FPKATDTSF

SEQ ID NO: 49192 - protein, 8 aa, Homo sapiens
  Table A; Target 49192; HLA-B*54:01; MYH4; ENSG00000264424; TAA
FPSRILYA

SEQ ID NO: 49193 - protein, 8 aa, Homo sapiens
  Table A; Target 49193; HLA-B*56:01; MYH4; ENSG00000264424; TAA
FPSRILYA

SEQ ID NO: 49194 - protein, 9 aa, Homo sapiens
  Table A; Target 49194; HLA-A*30:02; MYH4; ENSG00000264424; TAA
FQLKAERSY

SEQ ID NO: 49195 - protein, 9 aa, Homo sapiens
  Table A; Target 49195; HLA-B*15:03; MYH4; ENSG00000264424; TAA
FQLKAERSY

SEQ ID NO: 49196 - protein, 8 aa, Homo sapiens
  Table A; Target 49196; HLA-B*15:01; MYH4; ENSG00000264424; TAA
FQTVSALF

SEQ ID NO: 49197 - protein, 8 aa, Homo sapiens
  Table A; Target 49197; HLA-B*15:03; MYH4; ENSG00000264424; TAA
FQTVSALF

SEQ ID NO: 49198 - protein, 8 aa, Homo sapiens
  Table A; Target 49198; HLA-C*07:04; MYH4; ENSG00000264424; TAA
FQTVSALF

SEQ ID NO: 49199 - protein, 9 aa, Homo sapiens
  Table A; Target 49199; HLA-B*13:02; MYH4; ENSG00000264424; TAA
FQTVSALFR

SEQ ID NO: 49200 - protein, 9 aa, Homo sapiens
  Table A; Target 49200; HLA-B*54:01; MYH4; ENSG00000264424; TAA
FSGAQTAEA

SEQ ID NO: 49201 - protein, 10 aa, Homo sapiens
  Table A; Target 49201; HLA-B*57:01; MYH4; ENSG00000264424; TAA
FSISDNAYQF

SEQ ID NO: 49202 - protein, 10 aa, Homo sapiens
  Table A; Target 49202; HLA-B*58:01; MYH4; ENSG00000264424; TAA
FSISDNAYQF

SEQ ID NO: 49203 - protein, 10 aa, Homo sapiens
  Table A; Target 49203; HLA-C*02:02; MYH4; ENSG00000264424; TAA
FSISDNAYQF

SEQ ID NO: 49204 - protein, 8 aa, Homo sapiens
  Table A; Target 49204; HLA-A*01:01; MYH4; ENSG00000264424; TAA
FSMNPPKY

SEQ ID NO: 49205 - protein, 8 aa, Homo sapiens
  Table A; Target 49205; HLA-A*30:02; MYH4; ENSG00000264424; TAA
FSMNPPKY

SEQ ID NO: 49206 - protein, 8 aa, Homo sapiens
  Table A; Target 49206; HLA-B*39:01; MYH4; ENSG00000264424; TAA
FSMNPPKY

SEQ ID NO: 49207 - protein, 8 aa, Homo sapiens
  Table A; Target 49207; HLA-B*46:01; MYH4; ENSG00000264424; TAA
FSMNPPKY

SEQ ID NO: 49208 - protein, 8 aa, Homo sapiens
  Table A; Target 49208; HLA-B*58:01; MYH4; ENSG00000264424; TAA
FSMNPPKY

SEQ ID NO: 49209 - protein, 8 aa, Homo sapiens
  Table A; Target 49209; HLA-C*02:02; MYH4; ENSG00000264424; TAA
FSMNPPKY

SEQ ID NO: 49210 - protein, 8 aa, Homo sapiens
  Table A; Target 49210; HLA-C*16:01; MYH4; ENSG00000264424; TAA
FSMNPPKY

SEQ ID NO: 49211 - protein, 10 aa, Homo sapiens
  Table A; Target 49211; HLA-A*11:01; MYH4; ENSG00000264424; TAA
FSMNPPKYDK

SEQ ID NO: 49212 - protein, 9 aa, Homo sapiens
  Table A; Target 49212; HLA-A*25:01; MYH4; ENSG00000264424; TAA
FTADEKVAI

SEQ ID NO: 49213 - protein, 9 aa, Homo sapiens
  Table A; Target 49213; HLA-A*32:01; MYH4; ENSG00000264424; TAA
FTADEKVAI

SEQ ID NO: 49214 - protein, 9 aa, Homo sapiens
  Table A; Target 49214; HLA-A*68:02; MYH4; ENSG00000264424; TAA
FTADEKVAI

SEQ ID NO: 49215 - protein, 9 aa, Homo sapiens
  Table A; Target 49215; HLA-B*13:02; MYH4; ENSG00000264424; TAA
FTADEKVAI

SEQ ID NO: 49216 - protein, 9 aa, Homo sapiens
  Table A; Target 49216; HLA-B*35:03; MYH4; ENSG00000264424; TAA
FTADEKVAI

SEQ ID NO: 49217 - protein, 9 aa, Homo sapiens
  Table A; Target 49217; HLA-B*38:01; MYH4; ENSG00000264424; TAA
FTADEKVAI

SEQ ID NO: 49218 - protein, 9 aa, Homo sapiens
  Table A; Target 49218; HLA-B*58:01; MYH4; ENSG00000264424; TAA
FTADEKVAI

SEQ ID NO: 49219 - protein, 9 aa, Homo sapiens
  Table A; Target 49219; HLA-C*02:02; MYH4; ENSG00000264424; TAA
FTADEKVAI

SEQ ID NO: 49220 - protein, 9 aa, Homo sapiens
  Table A; Target 49220; HLA-C*03:03; MYH4; ENSG00000264424; TAA
FTADEKVAI

SEQ ID NO: 49221 - protein, 9 aa, Homo sapiens
  Table A; Target 49221; HLA-C*03:04; MYH4; ENSG00000264424; TAA
FTADEKVAI

SEQ ID NO: 49222 - protein, 9 aa, Homo sapiens
  Table A; Target 49222; HLA-C*07:04; MYH4; ENSG00000264424; TAA
FTADEKVAI

SEQ ID NO: 49223 - protein, 9 aa, Homo sapiens
  Table A; Target 49223; HLA-C*12:03; MYH4; ENSG00000264424; TAA
FTADEKVAI

SEQ ID NO: 49224 - protein, 9 aa, Homo sapiens
  Table A; Target 49224; HLA-C*16:01; MYH4; ENSG00000264424; TAA
FTADEKVAI

SEQ ID NO: 49225 - protein, 9 aa, Homo sapiens
  Table A; Target 49225; HLA-C*16:02; MYH4; ENSG00000264424; TAA
FTADEKVAI

SEQ ID NO: 49226 - protein, 10 aa, Homo sapiens
  Table A; Target 49226; HLA-A*01:01; MYH4; ENSG00000264424; TAA
FTADEKVAIY

SEQ ID NO: 49227 - protein, 10 aa, Homo sapiens
  Table A; Target 49227; HLA-A*25:01; MYH4; ENSG00000264424; TAA
FTADEKVAIY

SEQ ID NO: 49228 - protein, 10 aa, Homo sapiens
  Table A; Target 49228; HLA-A*26:01; MYH4; ENSG00000264424; TAA
FTADEKVAIY

SEQ ID NO: 49229 - protein, 10 aa, Homo sapiens
  Table A; Target 49229; HLA-A*29:02; MYH4; ENSG00000264424; TAA
FTADEKVAIY

SEQ ID NO: 49230 - protein, 10 aa, Homo sapiens
  Table A; Target 49230; HLA-A*30:02; MYH4; ENSG00000264424; TAA
FTADEKVAIY

SEQ ID NO: 49231 - protein, 10 aa, Homo sapiens
  Table A; Target 49231; HLA-A*32:01; MYH4; ENSG00000264424; TAA
FTADEKVAIY

SEQ ID NO: 49232 - protein, 10 aa, Homo sapiens
  Table A; Target 49232; HLA-A*68:01; MYH4; ENSG00000264424; TAA
FTADEKVAIY

SEQ ID NO: 49233 - protein, 10 aa, Homo sapiens
  Table A; Target 49233; HLA-B*15:01; MYH4; ENSG00000264424; TAA
FTADEKVAIY

SEQ ID NO: 49234 - protein, 10 aa, Homo sapiens
  Table A; Target 49234; HLA-B*27:02; MYH4; ENSG00000264424; TAA
FTADEKVAIY

SEQ ID NO: 49235 - protein, 10 aa, Homo sapiens
  Table A; Target 49235; HLA-B*46:01; MYH4; ENSG00000264424; TAA
FTADEKVAIY

SEQ ID NO: 49236 - protein, 10 aa, Homo sapiens
  Table A; Target 49236; HLA-C*02:02; MYH4; ENSG00000264424; TAA
FTADEKVAIY

SEQ ID NO: 49237 - protein, 10 aa, Homo sapiens
  Table A; Target 49237; HLA-C*07:04; MYH4; ENSG00000264424; TAA
FTADEKVAIY

SEQ ID NO: 49238 - protein, 10 aa, Homo sapiens
  Table A; Target 49238; HLA-C*12:03; MYH4; ENSG00000264424; TAA
FTADEKVAIY

SEQ ID NO: 49239 - protein, 10 aa, Homo sapiens
  Table A; Target 49239; HLA-C*16:01; MYH4; ENSG00000264424; TAA
FTADEKVAIY

SEQ ID NO: 49240 - protein, 10 aa, Homo sapiens
  Table A; Target 49240; HLA-C*16:02; MYH4; ENSG00000264424; TAA
FTADEKVAIY

SEQ ID NO: 49241 - protein, 11 aa, Homo sapiens
  Table A; Target 49241; HLA-A*01:01; MYH4; ENSG00000264424; TAA
FTADEKVAIYK

SEQ ID NO: 49242 - protein, 11 aa, Homo sapiens
  Table A; Target 49242; HLA-A*03:01; MYH4; ENSG00000264424; TAA
FTADEKVAIYK

SEQ ID NO: 49243 - protein, 11 aa, Homo sapiens
  Table A; Target 49243; HLA-A*03:02; MYH4; ENSG00000264424; TAA
FTADEKVAIYK

SEQ ID NO: 49244 - protein, 11 aa, Homo sapiens
  Table A; Target 49244; HLA-A*11:01; MYH4; ENSG00000264424; TAA
FTADEKVAIYK

SEQ ID NO: 49245 - protein, 11 aa, Homo sapiens
  Table A; Target 49245; HLA-A*68:01; MYH4; ENSG00000264424; TAA
FTADEKVAIYK

SEQ ID NO: 49246 - protein, 11 aa, Homo sapiens
  Table A; Target 49246; HLA-A*68:02; MYH4; ENSG00000264424; TAA
FTADEKVAIYK

SEQ ID NO: 49247 - protein, 11 aa, Homo sapiens
  Table A; Target 49247; HLA-B*27:02; MYH4; ENSG00000264424; TAA
FTADEKVAIYK

SEQ ID NO: 49248 - protein, 9 aa, Homo sapiens
  Table A; Target 49248; HLA-A*02:04; MYH4; ENSG00000264424; TAA
FTNEKLQQF

SEQ ID NO: 49249 - protein, 9 aa, Homo sapiens
  Table A; Target 49249; HLA-A*02:07; MYH4; ENSG00000264424; TAA
FTNEKLQQF

SEQ ID NO: 49250 - protein, 9 aa, Homo sapiens
  Table A; Target 49250; HLA-A*23:01; MYH4; ENSG00000264424; TAA
FTNEKLQQF

SEQ ID NO: 49251 - protein, 9 aa, Homo sapiens
  Table A; Target 49251; HLA-A*24:02; MYH4; ENSG00000264424; TAA
FTNEKLQQF

SEQ ID NO: 49252 - protein, 9 aa, Homo sapiens
  Table A; Target 49252; HLA-A*25:01; MYH4; ENSG00000264424; TAA
FTNEKLQQF

SEQ ID NO: 49253 - protein, 9 aa, Homo sapiens
  Table A; Target 49253; HLA-A*26:01; MYH4; ENSG00000264424; TAA
FTNEKLQQF

SEQ ID NO: 49254 - protein, 9 aa, Homo sapiens
  Table A; Target 49254; HLA-A*29:02; MYH4; ENSG00000264424; TAA
FTNEKLQQF

SEQ ID NO: 49255 - protein, 9 aa, Homo sapiens
  Table A; Target 49255; HLA-A*30:02; MYH4; ENSG00000264424; TAA
FTNEKLQQF

SEQ ID NO: 49256 - protein, 9 aa, Homo sapiens
  Table A; Target 49256; HLA-A*31:01; MYH4; ENSG00000264424; TAA
FTNEKLQQF

SEQ ID NO: 49257 - protein, 9 aa, Homo sapiens
  Table A; Target 49257; HLA-A*32:01; MYH4; ENSG00000264424; TAA
FTNEKLQQF

SEQ ID NO: 49258 - protein, 9 aa, Homo sapiens
  Table A; Target 49258; HLA-A*33:01; MYH4; ENSG00000264424; TAA
FTNEKLQQF

SEQ ID NO: 49259 - protein, 9 aa, Homo sapiens
  Table A; Target 49259; HLA-A*33:03; MYH4; ENSG00000264424; TAA
FTNEKLQQF

SEQ ID NO: 49260 - protein, 9 aa, Homo sapiens
  Table A; Target 49260; HLA-B*08:01; MYH4; ENSG00000264424; TAA
FTNEKLQQF

SEQ ID NO: 49261 - protein, 9 aa, Homo sapiens
  Table A; Target 49261; HLA-B*15:01; MYH4; ENSG00000264424; TAA
FTNEKLQQF

SEQ ID NO: 49262 - protein, 9 aa, Homo sapiens
  Table A; Target 49262; HLA-B*46:01; MYH4; ENSG00000264424; TAA
FTNEKLQQF

SEQ ID NO: 49263 - protein, 9 aa, Homo sapiens
  Table A; Target 49263; HLA-B*57:01; MYH4; ENSG00000264424; TAA
FTNEKLQQF

SEQ ID NO: 49264 - protein, 9 aa, Homo sapiens
  Table A; Target 49264; HLA-B*58:01; MYH4; ENSG00000264424; TAA
FTNEKLQQF

SEQ ID NO: 49265 - protein, 9 aa, Homo sapiens
  Table A; Target 49265; HLA-C*01:02; MYH4; ENSG00000264424; TAA
FTNEKLQQF

SEQ ID NO: 49266 - protein, 9 aa, Homo sapiens
  Table A; Target 49266; HLA-C*02:02; MYH4; ENSG00000264424; TAA
FTNEKLQQF

SEQ ID NO: 49267 - protein, 9 aa, Homo sapiens
  Table A; Target 49267; HLA-C*03:03; MYH4; ENSG00000264424; TAA
FTNEKLQQF

SEQ ID NO: 49268 - protein, 9 aa, Homo sapiens
  Table A; Target 49268; HLA-C*03:04; MYH4; ENSG00000264424; TAA
FTNEKLQQF

SEQ ID NO: 49269 - protein, 9 aa, Homo sapiens
  Table A; Target 49269; HLA-C*07:04; MYH4; ENSG00000264424; TAA
FTNEKLQQF

SEQ ID NO: 49270 - protein, 9 aa, Homo sapiens
  Table A; Target 49270; HLA-C*12:03; MYH4; ENSG00000264424; TAA
FTNEKLQQF

SEQ ID NO: 49271 - protein, 9 aa, Homo sapiens
  Table A; Target 49271; HLA-C*14:02; MYH4; ENSG00000264424; TAA
FTNEKLQQF

SEQ ID NO: 49272 - protein, 9 aa, Homo sapiens
  Table A; Target 49272; HLA-C*16:01; MYH4; ENSG00000264424; TAA
FTNEKLQQF

SEQ ID NO: 49273 - protein, 9 aa, Homo sapiens
  Table A; Target 49273; HLA-C*16:02; MYH4; ENSG00000264424; TAA
FTNEKLQQF

SEQ ID NO: 49274 - protein, 9 aa, Homo sapiens
  Table A; Target 49274; HLA-C*16:04; MYH4; ENSG00000264424; TAA
FTNEKLQQF

SEQ ID NO: 49275 - protein, 10 aa, Homo sapiens
  Table A; Target 49275; HLA-A*29:02; MYH4; ENSG00000264424; TAA
FTNEKLQQFF

SEQ ID NO: 49276 - protein, 10 aa, Homo sapiens
  Table A; Target 49276; HLA-A*33:01; MYH4; ENSG00000264424; TAA
FTNEKLQQFF

SEQ ID NO: 49277 - protein, 10 aa, Homo sapiens
  Table A; Target 49277; HLA-B*57:01; MYH4; ENSG00000264424; TAA
FTNEKLQQFF

SEQ ID NO: 49278 - protein, 8 aa, Homo sapiens
  Table A; Target 49278; HLA-B*39:01; MYH4; ENSG00000264424; TAA
FTQQIEEL

SEQ ID NO: 49279 - protein, 8 aa, Homo sapiens
  Table A; Target 49279; HLA-B*46:01; MYH4; ENSG00000264424; TAA
FTQQIEEL

SEQ ID NO: 49280 - protein, 8 aa, Homo sapiens
  Table A; Target 49280; HLA-C*01:02; MYH4; ENSG00000264424; TAA
FTQQIEEL

SEQ ID NO: 49281 - protein, 8 aa, Homo sapiens
  Table A; Target 49281; HLA-C*02:02; MYH4; ENSG00000264424; TAA
FTQQIEEL

SEQ ID NO: 49282 - protein, 8 aa, Homo sapiens
  Table A; Target 49282; HLA-C*03:03; MYH4; ENSG00000264424; TAA
FTQQIEEL

SEQ ID NO: 49283 - protein, 8 aa, Homo sapiens
  Table A; Target 49283; HLA-C*03:04; MYH4; ENSG00000264424; TAA
FTQQIEEL

SEQ ID NO: 49284 - protein, 8 aa, Homo sapiens
  Table A; Target 49284; HLA-C*04:01; MYH4; ENSG00000264424; TAA
FTQQIEEL

SEQ ID NO: 49285 - protein, 8 aa, Homo sapiens
  Table A; Target 49285; HLA-C*05:01; MYH4; ENSG00000264424; TAA
FTQQIEEL

SEQ ID NO: 49286 - protein, 8 aa, Homo sapiens
  Table A; Target 49286; HLA-C*07:04; MYH4; ENSG00000264424; TAA
FTQQIEEL

SEQ ID NO: 49287 - protein, 8 aa, Homo sapiens
  Table A; Target 49287; HLA-C*12:03; MYH4; ENSG00000264424; TAA
FTQQIEEL

SEQ ID NO: 49288 - protein, 8 aa, Homo sapiens
  Table A; Target 49288; HLA-C*14:02; MYH4; ENSG00000264424; TAA
FTQQIEEL

SEQ ID NO: 49289 - protein, 8 aa, Homo sapiens
  Table A; Target 49289; HLA-C*16:01; MYH4; ENSG00000264424; TAA
FTQQIEEL

SEQ ID NO: 49290 - protein, 9 aa, Homo sapiens
  Table A; Target 49290; HLA-A*01:01; MYH4; ENSG00000264424; TAA
FTQQIEELK

SEQ ID NO: 49291 - protein, 9 aa, Homo sapiens
  Table A; Target 49291; HLA-A*03:02; MYH4; ENSG00000264424; TAA
FTQQIEELK

SEQ ID NO: 49292 - protein, 9 aa, Homo sapiens
  Table A; Target 49292; HLA-A*11:01; MYH4; ENSG00000264424; TAA
FTQQIEELK

SEQ ID NO: 49293 - protein, 9 aa, Homo sapiens
  Table A; Target 49293; HLA-A*33:03; MYH4; ENSG00000264424; TAA
FTQQIEELK

SEQ ID NO: 49294 - protein, 9 aa, Homo sapiens
  Table A; Target 49294; HLA-A*68:01; MYH4; ENSG00000264424; TAA
FTQQIEELK

SEQ ID NO: 49295 - protein, 9 aa, Homo sapiens
  Table A; Target 49295; HLA-A*68:02; MYH4; ENSG00000264424; TAA
FTQQIEELK

SEQ ID NO: 49296 - protein, 9 aa, Homo sapiens
  Table A; Target 49296; HLA-B*27:02; MYH4; ENSG00000264424; TAA
FTQQIEELK

SEQ ID NO: 49297 - protein, 10 aa, Homo sapiens
  Table A; Target 49297; HLA-A*31:01; MYH4; ENSG00000264424; TAA
FTQQIEELKR

SEQ ID NO: 49298 - protein, 10 aa, Homo sapiens
  Table A; Target 49298; HLA-A*33:01; MYH4; ENSG00000264424; TAA
FTQQIEELKR

SEQ ID NO: 49299 - protein, 10 aa, Homo sapiens
  Table A; Target 49299; HLA-A*33:03; MYH4; ENSG00000264424; TAA
FTQQIEELKR

SEQ ID NO: 49300 - protein, 10 aa, Homo sapiens
  Table A; Target 49300; HLA-A*68:01; MYH4; ENSG00000264424; TAA
FTQQIEELKR

SEQ ID NO: 49301 - protein, 10 aa, Homo sapiens
  Table A; Target 49301; HLA-B*27:02; MYH4; ENSG00000264424; TAA
FTQQIEELKR

SEQ ID NO: 49302 - protein, 10 aa, Homo sapiens
  Table A; Target 49302; HLA-B*57:01; MYH4; ENSG00000264424; TAA
FTQQIEELKR

SEQ ID NO: 49303 - protein, 10 aa, Homo sapiens
  Table A; Target 49303; HLA-C*07:06; MYH4; ENSG00000264424; TAA
FTQQIEELKR

SEQ ID NO: 49304 - protein, 8 aa, Homo sapiens
  Table A; Target 49304; HLA-A*01:01; MYH4; ENSG00000264424; TAA
FVLEQEEY

SEQ ID NO: 49305 - protein, 8 aa, Homo sapiens
  Table A; Target 49305; HLA-A*29:02; MYH4; ENSG00000264424; TAA
FVLEQEEY

SEQ ID NO: 49306 - protein, 8 aa, Homo sapiens
  Table A; Target 49306; HLA-A*30:02; MYH4; ENSG00000264424; TAA
FVLEQEEY

SEQ ID NO: 49307 - protein, 8 aa, Homo sapiens
  Table A; Target 49307; HLA-B*15:01; MYH4; ENSG00000264424; TAA
FVLEQEEY

SEQ ID NO: 49308 - protein, 8 aa, Homo sapiens
  Table A; Target 49308; HLA-B*15:03; MYH4; ENSG00000264424; TAA
FVLEQEEY

SEQ ID NO: 49309 - protein, 8 aa, Homo sapiens
  Table A; Target 49309; HLA-B*18:01; MYH4; ENSG00000264424; TAA
FVLEQEEY

SEQ ID NO: 49310 - protein, 8 aa, Homo sapiens
  Table A; Target 49310; HLA-B*35:01; MYH4; ENSG00000264424; TAA
FVLEQEEY

SEQ ID NO: 49311 - protein, 8 aa, Homo sapiens
  Table A; Target 49311; HLA-B*39:01; MYH4; ENSG00000264424; TAA
FVLEQEEY

SEQ ID NO: 49312 - protein, 8 aa, Homo sapiens
  Table A; Target 49312; HLA-B*46:01; MYH4; ENSG00000264424; TAA
FVLEQEEY

SEQ ID NO: 49313 - protein, 8 aa, Homo sapiens
  Table A; Target 49313; HLA-C*02:02; MYH4; ENSG00000264424; TAA
FVLEQEEY

SEQ ID NO: 49314 - protein, 8 aa, Homo sapiens
  Table A; Target 49314; HLA-C*03:03; MYH4; ENSG00000264424; TAA
FVLEQEEY

SEQ ID NO: 49315 - protein, 8 aa, Homo sapiens
  Table A; Target 49315; HLA-C*05:01; MYH4; ENSG00000264424; TAA
FVLEQEEY

SEQ ID NO: 49316 - protein, 8 aa, Homo sapiens
  Table A; Target 49316; HLA-C*07:01; MYH4; ENSG00000264424; TAA
FVLEQEEY

SEQ ID NO: 49317 - protein, 8 aa, Homo sapiens
  Table A; Target 49317; HLA-C*07:04; MYH4; ENSG00000264424; TAA
FVLEQEEY

SEQ ID NO: 49318 - protein, 8 aa, Homo sapiens
  Table A; Target 49318; HLA-C*12:03; MYH4; ENSG00000264424; TAA
FVLEQEEY

SEQ ID NO: 49319 - protein, 8 aa, Homo sapiens
  Table A; Target 49319; HLA-C*14:02; MYH4; ENSG00000264424; TAA
FVLEQEEY

SEQ ID NO: 49320 - protein, 8 aa, Homo sapiens
  Table A; Target 49320; HLA-C*16:01; MYH4; ENSG00000264424; TAA
FVLEQEEY

SEQ ID NO: 49321 - protein, 9 aa, Homo sapiens
  Table A; Target 49321; HLA-A*11:01; MYH4; ENSG00000264424; TAA
FVLEQEEYK

SEQ ID NO: 49322 - protein, 9 aa, Homo sapiens
  Table A; Target 49322; HLA-B*27:02; MYH4; ENSG00000264424; TAA
FVLEQEEYK

SEQ ID NO: 49323 - protein, 10 aa, Homo sapiens
  Table A; Target 49323; HLA-A*11:01; MYH4; ENSG00000264424; TAA
FVLEQEEYKK

SEQ ID NO: 49324 - protein, 10 aa, Homo sapiens
  Table A; Target 49324; HLA-B*27:02; MYH4; ENSG00000264424; TAA
FVLEQEEYKK

SEQ ID NO: 49325 - protein, 9 aa, Homo sapiens
  Table A; Target 49325; HLA-A*02:01; MYH4; ENSG00000264424; TAA
FVSQGEITV

SEQ ID NO: 49326 - protein, 9 aa, Homo sapiens
  Table A; Target 49326; HLA-A*02:03; MYH4; ENSG00000264424; TAA
FVSQGEITV

SEQ ID NO: 49327 - protein, 9 aa, Homo sapiens
  Table A; Target 49327; HLA-A*68:02; MYH4; ENSG00000264424; TAA
FVSQGEITV

SEQ ID NO: 49328 - protein, 9 aa, Homo sapiens
  Table A; Target 49328; HLA-B*13:02; MYH4; ENSG00000264424; TAA
FVSQGEITV

SEQ ID NO: 49329 - protein, 9 aa, Homo sapiens
  Table A; Target 49329; HLA-B*35:03; MYH4; ENSG00000264424; TAA
FVSQGEITV

SEQ ID NO: 49330 - protein, 9 aa, Homo sapiens
  Table A; Target 49330; HLA-B*38:01; MYH4; ENSG00000264424; TAA
FVSQGEITV

SEQ ID NO: 49331 - protein, 9 aa, Homo sapiens
  Table A; Target 49331; HLA-B*39:01; MYH4; ENSG00000264424; TAA
FVSQGEITV

SEQ ID NO: 49332 - protein, 9 aa, Homo sapiens
  Table A; Target 49332; HLA-B*51:01; MYH4; ENSG00000264424; TAA
FVSQGEITV

SEQ ID NO: 49333 - protein, 9 aa, Homo sapiens
  Table A; Target 49333; HLA-C*02:02; MYH4; ENSG00000264424; TAA
FVSQGEITV

SEQ ID NO: 49334 - protein, 9 aa, Homo sapiens
  Table A; Target 49334; HLA-C*03:03; MYH4; ENSG00000264424; TAA
FVSQGEITV

SEQ ID NO: 49335 - protein, 9 aa, Homo sapiens
  Table A; Target 49335; HLA-C*03:04; MYH4; ENSG00000264424; TAA
FVSQGEITV

SEQ ID NO: 49336 - protein, 9 aa, Homo sapiens
  Table A; Target 49336; HLA-C*05:01; MYH4; ENSG00000264424; TAA
FVSQGEITV

SEQ ID NO: 49337 - protein, 8 aa, Homo sapiens
  Table A; Target 49337; HLA-B*13:02; MYH4; ENSG00000264424; TAA
FVTKGQTV

SEQ ID NO: 49338 - protein, 8 aa, Homo sapiens
  Table A; Target 49338; HLA-B*39:01; MYH4; ENSG00000264424; TAA
FVTKGQTV

SEQ ID NO: 49339 - protein, 8 aa, Homo sapiens
  Table A; Target 49339; HLA-C*03:03; MYH4; ENSG00000264424; TAA
FVTKGQTV

SEQ ID NO: 49340 - protein, 8 aa, Homo sapiens
  Table A; Target 49340; HLA-C*03:04; MYH4; ENSG00000264424; TAA
FVTKGQTV

SEQ ID NO: 49341 - protein, 9 aa, Homo sapiens
  Table A; Target 49341; HLA-A*01:01; MYH4; ENSG00000264424; TAA
FVVDPKESY

SEQ ID NO: 49342 - protein, 9 aa, Homo sapiens
  Table A; Target 49342; HLA-A*23:01; MYH4; ENSG00000264424; TAA
FVVDPKESY

SEQ ID NO: 49343 - protein, 9 aa, Homo sapiens
  Table A; Target 49343; HLA-A*25:01; MYH4; ENSG00000264424; TAA
FVVDPKESY

SEQ ID NO: 49344 - protein, 9 aa, Homo sapiens
  Table A; Target 49344; HLA-A*26:01; MYH4; ENSG00000264424; TAA
FVVDPKESY

SEQ ID NO: 49345 - protein, 9 aa, Homo sapiens
  Table A; Target 49345; HLA-A*29:02; MYH4; ENSG00000264424; TAA
FVVDPKESY

SEQ ID NO: 49346 - protein, 9 aa, Homo sapiens
  Table A; Target 49346; HLA-A*30:02; MYH4; ENSG00000264424; TAA
FVVDPKESY

SEQ ID NO: 49347 - protein, 9 aa, Homo sapiens
  Table A; Target 49347; HLA-A*32:01; MYH4; ENSG00000264424; TAA
FVVDPKESY

SEQ ID NO: 49348 - protein, 9 aa, Homo sapiens
  Table A; Target 49348; HLA-A*68:01; MYH4; ENSG00000264424; TAA
FVVDPKESY

SEQ ID NO: 49349 - protein, 9 aa, Homo sapiens
  Table A; Target 49349; HLA-B*08:01; MYH4; ENSG00000264424; TAA
FVVDPKESY

SEQ ID NO: 49350 - protein, 9 aa, Homo sapiens
  Table A; Target 49350; HLA-B*15:01; MYH4; ENSG00000264424; TAA
FVVDPKESY

SEQ ID NO: 49351 - protein, 9 aa, Homo sapiens
  Table A; Target 49351; HLA-B*15:03; MYH4; ENSG00000264424; TAA
FVVDPKESY

SEQ ID NO: 49352 - protein, 9 aa, Homo sapiens
  Table A; Target 49352; HLA-B*18:01; MYH4; ENSG00000264424; TAA
FVVDPKESY

SEQ ID NO: 49353 - protein, 9 aa, Homo sapiens
  Table A; Target 49353; HLA-B*35:01; MYH4; ENSG00000264424; TAA
FVVDPKESY

SEQ ID NO: 49354 - protein, 9 aa, Homo sapiens
  Table A; Target 49354; HLA-B*35:03; MYH4; ENSG00000264424; TAA
FVVDPKESY

SEQ ID NO: 49355 - protein, 9 aa, Homo sapiens
  Table A; Target 49355; HLA-B*39:01; MYH4; ENSG00000264424; TAA
FVVDPKESY

SEQ ID NO: 49356 - protein, 9 aa, Homo sapiens
  Table A; Target 49356; HLA-B*44:03; MYH4; ENSG00000264424; TAA
FVVDPKESY

SEQ ID NO: 49357 - protein, 9 aa, Homo sapiens
  Table A; Target 49357; HLA-B*46:01; MYH4; ENSG00000264424; TAA
FVVDPKESY

SEQ ID NO: 49358 - protein, 9 aa, Homo sapiens
  Table A; Target 49358; HLA-B*54:01; MYH4; ENSG00000264424; TAA
FVVDPKESY

SEQ ID NO: 49359 - protein, 9 aa, Homo sapiens
  Table A; Target 49359; HLA-B*55:01; MYH4; ENSG00000264424; TAA
FVVDPKESY

SEQ ID NO: 49360 - protein, 9 aa, Homo sapiens
  Table A; Target 49360; HLA-B*57:01; MYH4; ENSG00000264424; TAA
FVVDPKESY

SEQ ID NO: 49361 - protein, 9 aa, Homo sapiens
  Table A; Target 49361; HLA-B*58:01; MYH4; ENSG00000264424; TAA
FVVDPKESY

SEQ ID NO: 49362 - protein, 9 aa, Homo sapiens
  Table A; Target 49362; HLA-C*01:02; MYH4; ENSG00000264424; TAA
FVVDPKESY

SEQ ID NO: 49363 - protein, 9 aa, Homo sapiens
  Table A; Target 49363; HLA-C*02:02; MYH4; ENSG00000264424; TAA
FVVDPKESY

SEQ ID NO: 49364 - protein, 9 aa, Homo sapiens
  Table A; Target 49364; HLA-C*03:03; MYH4; ENSG00000264424; TAA
FVVDPKESY

SEQ ID NO: 49365 - protein, 9 aa, Homo sapiens
  Table A; Target 49365; HLA-C*03:04; MYH4; ENSG00000264424; TAA
FVVDPKESY

SEQ ID NO: 49366 - protein, 9 aa, Homo sapiens
  Table A; Target 49366; HLA-C*05:01; MYH4; ENSG00000264424; TAA
FVVDPKESY

SEQ ID NO: 49367 - protein, 9 aa, Homo sapiens
  Table A; Target 49367; HLA-C*07:04; MYH4; ENSG00000264424; TAA
FVVDPKESY

SEQ ID NO: 49368 - protein, 9 aa, Homo sapiens
  Table A; Target 49368; HLA-C*07:06; MYH4; ENSG00000264424; TAA
FVVDPKESY

SEQ ID NO: 49369 - protein, 9 aa, Homo sapiens
  Table A; Target 49369; HLA-C*12:03; MYH4; ENSG00000264424; TAA
FVVDPKESY

SEQ ID NO: 49370 - protein, 9 aa, Homo sapiens
  Table A; Target 49370; HLA-C*14:02; MYH4; ENSG00000264424; TAA
FVVDPKESY

SEQ ID NO: 49371 - protein, 9 aa, Homo sapiens
  Table A; Target 49371; HLA-C*16:01; MYH4; ENSG00000264424; TAA
FVVDPKESY

SEQ ID NO: 49372 - protein, 9 aa, Homo sapiens
  Table A; Target 49372; HLA-C*16:02; MYH4; ENSG00000264424; TAA
FVVDPKESY

SEQ ID NO: 49373 - protein, 9 aa, Homo sapiens
  Table A; Target 49373; HLA-C*16:04; MYH4; ENSG00000264424; TAA
FVVDPKESY

SEQ ID NO: 49374 - protein, 10 aa, Homo sapiens
  Table A; Target 49374; HLA-A*01:01; MYH4; ENSG00000264424; TAA
FVVDPKESYV

SEQ ID NO: 49375 - protein, 10 aa, Homo sapiens
  Table A; Target 49375; HLA-A*02:01; MYH4; ENSG00000264424; TAA
FVVDPKESYV

SEQ ID NO: 49376 - protein, 10 aa, Homo sapiens
  Table A; Target 49376; HLA-A*02:03; MYH4; ENSG00000264424; TAA
FVVDPKESYV

SEQ ID NO: 49377 - protein, 10 aa, Homo sapiens
  Table A; Target 49377; HLA-A*02:04; MYH4; ENSG00000264424; TAA
FVVDPKESYV

SEQ ID NO: 49378 - protein, 10 aa, Homo sapiens
  Table A; Target 49378; HLA-A*02:07; MYH4; ENSG00000264424; TAA
FVVDPKESYV

SEQ ID NO: 49379 - protein, 10 aa, Homo sapiens
  Table A; Target 49379; HLA-A*25:01; MYH4; ENSG00000264424; TAA
FVVDPKESYV

SEQ ID NO: 49380 - protein, 10 aa, Homo sapiens
  Table A; Target 49380; HLA-A*26:01; MYH4; ENSG00000264424; TAA
FVVDPKESYV

SEQ ID NO: 49381 - protein, 10 aa, Homo sapiens
  Table A; Target 49381; HLA-A*68:02; MYH4; ENSG00000264424; TAA
FVVDPKESYV

SEQ ID NO: 49382 - protein, 10 aa, Homo sapiens
  Table A; Target 49382; HLA-B*27:05; MYH4; ENSG00000264424; TAA
FVVDPKESYV

SEQ ID NO: 49383 - protein, 10 aa, Homo sapiens
  Table A; Target 49383; HLA-C*02:02; MYH4; ENSG00000264424; TAA
FVVDPKESYV

SEQ ID NO: 49384 - protein, 10 aa, Homo sapiens
  Table A; Target 49384; HLA-C*03:04; MYH4; ENSG00000264424; TAA
FVVDPKESYV

SEQ ID NO: 49385 - protein, 10 aa, Homo sapiens
  Table A; Target 49385; HLA-C*05:01; MYH4; ENSG00000264424; TAA
FVVDPKESYV

SEQ ID NO: 49386 - protein, 10 aa, Homo sapiens
  Table A; Target 49386; HLA-C*12:03; MYH4; ENSG00000264424; TAA
FVVDPKESYV

SEQ ID NO: 49387 - protein, 11 aa, Homo sapiens
  Table A; Target 49387; HLA-A*03:02; MYH4; ENSG00000264424; TAA
FVVDPKESYVK

SEQ ID NO: 49388 - protein, 11 aa, Homo sapiens
  Table A; Target 49388; HLA-A*11:01; MYH4; ENSG00000264424; TAA
FVVDPKESYVK

SEQ ID NO: 49389 - protein, 11 aa, Homo sapiens
  Table A; Target 49389; HLA-A*68:01; MYH4; ENSG00000264424; TAA
FVVDPKESYVK

SEQ ID NO: 49390 - protein, 11 aa, Homo sapiens
  Table A; Target 49390; HLA-A*68:02; MYH4; ENSG00000264424; TAA
FVVDPKESYVK

SEQ ID NO: 49391 - protein, 11 aa, Homo sapiens
  Table A; Target 49391; HLA-C*07:06; MYH4; ENSG00000264424; TAA
FVVDPKESYVK

SEQ ID NO: 49392 - protein, 9 aa, Homo sapiens
  Table A; Target 49392; HLA-A*03:01; MYH4; ENSG00000264424; TAA
GAGKTVNTK

SEQ ID NO: 49393 - protein, 9 aa, Homo sapiens
  Table A; Target 49393; HLA-A*03:02; MYH4; ENSG00000264424; TAA
GAGKTVNTK

SEQ ID NO: 49394 - protein, 9 aa, Homo sapiens
  Table A; Target 49394; HLA-A*11:01; MYH4; ENSG00000264424; TAA
GAGKTVNTK

SEQ ID NO: 49395 - protein, 9 aa, Homo sapiens
  Table A; Target 49395; HLA-C*07:06; MYH4; ENSG00000264424; TAA
GAGKTVNTK

SEQ ID NO: 49396 - protein, 10 aa, Homo sapiens
  Table A; Target 49396; HLA-A*03:02; MYH4; ENSG00000264424; TAA
GALAKAIYEK

SEQ ID NO: 49397 - protein, 10 aa, Homo sapiens
  Table A; Target 49397; HLA-A*11:01; MYH4; ENSG00000264424; TAA
GALAKAIYEK

SEQ ID NO: 49398 - protein, 10 aa, Homo sapiens
  Table A; Target 49398; HLA-B*27:02; MYH4; ENSG00000264424; TAA
GALAKAIYEK

SEQ ID NO: 49399 - protein, 9 aa, Homo sapiens
  Table A; Target 49399; HLA-A*02:01; MYH4; ENSG00000264424; TAA
GAMEHELVL

SEQ ID NO: 49400 - protein, 9 aa, Homo sapiens
  Table A; Target 49400; HLA-A*23:01; MYH4; ENSG00000264424; TAA
GAMEHELVL

SEQ ID NO: 49401 - protein, 9 aa, Homo sapiens
  Table A; Target 49401; HLA-A*30:01; MYH4; ENSG00000264424; TAA
GAMEHELVL

SEQ ID NO: 49402 - protein, 9 aa, Homo sapiens
  Table A; Target 49402; HLA-B*07:02; MYH4; ENSG00000264424; TAA
GAMEHELVL

SEQ ID NO: 49403 - protein, 9 aa, Homo sapiens
  Table A; Target 49403; HLA-B*13:02; MYH4; ENSG00000264424; TAA
GAMEHELVL

SEQ ID NO: 49404 - protein, 9 aa, Homo sapiens
  Table A; Target 49404; HLA-B*15:01; MYH4; ENSG00000264424; TAA
GAMEHELVL

SEQ ID NO: 49405 - protein, 9 aa, Homo sapiens
  Table A; Target 49405; HLA-B*15:03; MYH4; ENSG00000264424; TAA
GAMEHELVL

SEQ ID NO: 49406 - protein, 9 aa, Homo sapiens
  Table A; Target 49406; HLA-B*35:03; MYH4; ENSG00000264424; TAA
GAMEHELVL

SEQ ID NO: 49407 - protein, 9 aa, Homo sapiens
  Table A; Target 49407; HLA-B*38:01; MYH4; ENSG00000264424; TAA
GAMEHELVL

SEQ ID NO: 49408 - protein, 9 aa, Homo sapiens
  Table A; Target 49408; HLA-B*39:01; MYH4; ENSG00000264424; TAA
GAMEHELVL

SEQ ID NO: 49409 - protein, 9 aa, Homo sapiens
  Table A; Target 49409; HLA-B*40:01; MYH4; ENSG00000264424; TAA
GAMEHELVL

SEQ ID NO: 49410 - protein, 9 aa, Homo sapiens
  Table A; Target 49410; HLA-B*46:01; MYH4; ENSG00000264424; TAA
GAMEHELVL

SEQ ID NO: 49411 - protein, 9 aa, Homo sapiens
  Table A; Target 49411; HLA-B*51:01; MYH4; ENSG00000264424; TAA
GAMEHELVL

SEQ ID NO: 49412 - protein, 9 aa, Homo sapiens
  Table A; Target 49412; HLA-B*55:01; MYH4; ENSG00000264424; TAA
GAMEHELVL

SEQ ID NO: 49413 - protein, 9 aa, Homo sapiens
  Table A; Target 49413; HLA-B*58:01; MYH4; ENSG00000264424; TAA
GAMEHELVL

SEQ ID NO: 49414 - protein, 9 aa, Homo sapiens
  Table A; Target 49414; HLA-C*02:02; MYH4; ENSG00000264424; TAA
GAMEHELVL

SEQ ID NO: 49415 - protein, 9 aa, Homo sapiens
  Table A; Target 49415; HLA-C*03:03; MYH4; ENSG00000264424; TAA
GAMEHELVL

SEQ ID NO: 49416 - protein, 9 aa, Homo sapiens
  Table A; Target 49416; HLA-C*03:04; MYH4; ENSG00000264424; TAA
GAMEHELVL

SEQ ID NO: 49417 - protein, 9 aa, Homo sapiens
  Table A; Target 49417; HLA-C*05:01; MYH4; ENSG00000264424; TAA
GAMEHELVL

SEQ ID NO: 49418 - protein, 9 aa, Homo sapiens
  Table A; Target 49418; HLA-C*07:04; MYH4; ENSG00000264424; TAA
GAMEHELVL

SEQ ID NO: 49419 - protein, 9 aa, Homo sapiens
  Table A; Target 49419; HLA-C*12:03; MYH4; ENSG00000264424; TAA
GAMEHELVL

SEQ ID NO: 49420 - protein, 9 aa, Homo sapiens
  Table A; Target 49420; HLA-C*14:02; MYH4; ENSG00000264424; TAA
GAMEHELVL

SEQ ID NO: 49421 - protein, 9 aa, Homo sapiens
  Table A; Target 49421; HLA-C*16:01; MYH4; ENSG00000264424; TAA
GAMEHELVL

SEQ ID NO: 49422 - protein, 9 aa, Homo sapiens
  Table A; Target 49422; HLA-C*16:02; MYH4; ENSG00000264424; TAA
GAMEHELVL

SEQ ID NO: 49423 - protein, 9 aa, Homo sapiens
  Table A; Target 49423; HLA-C*16:04; MYH4; ENSG00000264424; TAA
GAMEHELVL

SEQ ID NO: 49424 - protein, 9 aa, Homo sapiens
  Table A; Target 49424; HLA-B*54:01; MYH4; ENSG00000264424; TAA
GATGKLASA

SEQ ID NO: 49425 - protein, 9 aa, Homo sapiens
  Table A; Target 49425; HLA-B*56:01; MYH4; ENSG00000264424; TAA
GATGKLASA

SEQ ID NO: 49426 - protein, 9 aa, Homo sapiens
  Table A; Target 49426; HLA-C*16:02; MYH4; ENSG00000264424; TAA
GATGKLASA

SEQ ID NO: 49427 - protein, 9 aa, Homo sapiens
  Table A; Target 49427; HLA-A*30:01; MYH4; ENSG00000264424; TAA
GATSAQIEM

SEQ ID NO: 49428 - protein, 9 aa, Homo sapiens
  Table A; Target 49428; HLA-B*07:02; MYH4; ENSG00000264424; TAA
GATSAQIEM

SEQ ID NO: 49429 - protein, 9 aa, Homo sapiens
  Table A; Target 49429; HLA-B*13:02; MYH4; ENSG00000264424; TAA
GATSAQIEM

SEQ ID NO: 49430 - protein, 9 aa, Homo sapiens
  Table A; Target 49430; HLA-B*15:01; MYH4; ENSG00000264424; TAA
GATSAQIEM

SEQ ID NO: 49431 - protein, 9 aa, Homo sapiens
  Table A; Target 49431; HLA-B*15:03; MYH4; ENSG00000264424; TAA
GATSAQIEM

SEQ ID NO: 49432 - protein, 9 aa, Homo sapiens
  Table A; Target 49432; HLA-B*27:05; MYH4; ENSG00000264424; TAA
GATSAQIEM

SEQ ID NO: 49433 - protein, 9 aa, Homo sapiens
  Table A; Target 49433; HLA-B*35:01; MYH4; ENSG00000264424; TAA
GATSAQIEM

SEQ ID NO: 49434 - protein, 9 aa, Homo sapiens
  Table A; Target 49434; HLA-B*35:03; MYH4; ENSG00000264424; TAA
GATSAQIEM

SEQ ID NO: 49435 - protein, 9 aa, Homo sapiens
  Table A; Target 49435; HLA-B*39:01; MYH4; ENSG00000264424; TAA
GATSAQIEM

SEQ ID NO: 49436 - protein, 9 aa, Homo sapiens
  Table A; Target 49436; HLA-B*40:01; MYH4; ENSG00000264424; TAA
GATSAQIEM

SEQ ID NO: 49437 - protein, 9 aa, Homo sapiens
  Table A; Target 49437; HLA-B*46:01; MYH4; ENSG00000264424; TAA
GATSAQIEM

SEQ ID NO: 49438 - protein, 9 aa, Homo sapiens
  Table A; Target 49438; HLA-B*55:01; MYH4; ENSG00000264424; TAA
GATSAQIEM

SEQ ID NO: 49439 - protein, 9 aa, Homo sapiens
  Table A; Target 49439; HLA-B*58:01; MYH4; ENSG00000264424; TAA
GATSAQIEM

SEQ ID NO: 49440 - protein, 9 aa, Homo sapiens
  Table A; Target 49440; HLA-C*01:02; MYH4; ENSG00000264424; TAA
GATSAQIEM

SEQ ID NO: 49441 - protein, 9 aa, Homo sapiens
  Table A; Target 49441; HLA-C*02:02; MYH4; ENSG00000264424; TAA
GATSAQIEM

SEQ ID NO: 49442 - protein, 9 aa, Homo sapiens
  Table A; Target 49442; HLA-C*03:03; MYH4; ENSG00000264424; TAA
GATSAQIEM

SEQ ID NO: 49443 - protein, 9 aa, Homo sapiens
  Table A; Target 49443; HLA-C*03:04; MYH4; ENSG00000264424; TAA
GATSAQIEM

SEQ ID NO: 49444 - protein, 9 aa, Homo sapiens
  Table A; Target 49444; HLA-C*07:04; MYH4; ENSG00000264424; TAA
GATSAQIEM

SEQ ID NO: 49445 - protein, 9 aa, Homo sapiens
  Table A; Target 49445; HLA-C*07:06; MYH4; ENSG00000264424; TAA
GATSAQIEM

SEQ ID NO: 49446 - protein, 9 aa, Homo sapiens
  Table A; Target 49446; HLA-C*12:03; MYH4; ENSG00000264424; TAA
GATSAQIEM

SEQ ID NO: 49447 - protein, 9 aa, Homo sapiens
  Table A; Target 49447; HLA-C*16:01; MYH4; ENSG00000264424; TAA
GATSAQIEM

SEQ ID NO: 49448 - protein, 9 aa, Homo sapiens
  Table A; Target 49448; HLA-C*16:02; MYH4; ENSG00000264424; TAA
GATSAQIEM

SEQ ID NO: 49449 - protein, 9 aa, Homo sapiens
  Table A; Target 49449; HLA-C*16:04; MYH4; ENSG00000264424; TAA
GATSAQIEM

SEQ ID NO: 49450 - protein, 11 aa, Homo sapiens
  Table A; Target 49450; HLA-A*03:01; MYH4; ENSG00000264424; TAA
GATSAQIEMNK

SEQ ID NO: 49451 - protein, 11 aa, Homo sapiens
  Table A; Target 49451; HLA-A*03:02; MYH4; ENSG00000264424; TAA
GATSAQIEMNK

SEQ ID NO: 49452 - protein, 11 aa, Homo sapiens
  Table A; Target 49452; HLA-A*11:01; MYH4; ENSG00000264424; TAA
GATSAQIEMNK

SEQ ID NO: 49453 - protein, 11 aa, Homo sapiens
  Table A; Target 49453; HLA-B*27:02; MYH4; ENSG00000264424; TAA
GATSAQIEMNK

SEQ ID NO: 49454 - protein, 11 aa, Homo sapiens
  Table A; Target 49454; HLA-B*27:05; MYH4; ENSG00000264424; TAA
GATSAQIEMNK

SEQ ID NO: 49455 - protein, 11 aa, Homo sapiens
  Table A; Target 49455; HLA-C*07:06; MYH4; ENSG00000264424; TAA
GATSAQIEMNK

SEQ ID NO: 49456 - protein, 10 aa, Homo sapiens
  Table A; Target 49456; HLA-B*40:01; MYH4; ENSG00000264424; TAA
GDLNEMEIQL

SEQ ID NO: 49457 - protein, 9 aa, Homo sapiens
  Table A; Target 49457; HLA-A*11:01; MYH4; ENSG00000264424; TAA
GEAAPFLRK

SEQ ID NO: 49458 - protein, 9 aa, Homo sapiens
  Table A; Target 49458; HLA-B*27:05; MYH4; ENSG00000264424; TAA
GEAAPFLRK

SEQ ID NO: 49459 - protein, 9 aa, Homo sapiens
  Table A; Target 49459; HLA-B*44:02; MYH4; ENSG00000264424; TAA
GEAAPFLRK

SEQ ID NO: 49460 - protein, 9 aa, Homo sapiens
  Table A; Target 49460; HLA-B*44:03; MYH4; ENSG00000264424; TAA
GEAAPFLRK

SEQ ID NO: 49461 - protein, 9 aa, Homo sapiens
  Table A; Target 49461; HLA-B*49:01; MYH4; ENSG00000264424; TAA
GEAAPFLRK

SEQ ID NO: 49462 - protein, 8 aa, Homo sapiens
  Table A; Target 49462; HLA-A*30:01; MYH4; ENSG00000264424; TAA
GEITVPSI

SEQ ID NO: 49463 - protein, 8 aa, Homo sapiens
  Table A; Target 49463; HLA-B*13:02; MYH4; ENSG00000264424; TAA
GEITVPSI

SEQ ID NO: 49464 - protein, 8 aa, Homo sapiens
  Table A; Target 49464; HLA-B*18:01; MYH4; ENSG00000264424; TAA
GEITVPSI

SEQ ID NO: 49465 - protein, 8 aa, Homo sapiens
  Table A; Target 49465; HLA-B*37:01; MYH4; ENSG00000264424; TAA
GEITVPSI

SEQ ID NO: 49466 - protein, 8 aa, Homo sapiens
  Table A; Target 49466; HLA-B*40:01; MYH4; ENSG00000264424; TAA
GEITVPSI

SEQ ID NO: 49467 - protein, 8 aa, Homo sapiens
  Table A; Target 49467; HLA-B*40:02; MYH4; ENSG00000264424; TAA
GEITVPSI

SEQ ID NO: 49468 - protein, 8 aa, Homo sapiens
  Table A; Target 49468; HLA-B*44:02; MYH4; ENSG00000264424; TAA
GEITVPSI

SEQ ID NO: 49469 - protein, 8 aa, Homo sapiens
  Table A; Target 49469; HLA-B*44:03; MYH4; ENSG00000264424; TAA
GEITVPSI

SEQ ID NO: 49470 - protein, 8 aa, Homo sapiens
  Table A; Target 49470; HLA-B*49:01; MYH4; ENSG00000264424; TAA
GEITVPSI

SEQ ID NO: 49471 - protein, 10 aa, Homo sapiens
  Table A; Target 49471; HLA-A*30:01; MYH4; ENSG00000264424; TAA
GEMEDIVQEA

SEQ ID NO: 49472 - protein, 10 aa, Homo sapiens
  Table A; Target 49472; HLA-B*40:01; MYH4; ENSG00000264424; TAA
GEMEDIVQEA

SEQ ID NO: 49473 - protein, 10 aa, Homo sapiens
  Table A; Target 49473; HLA-B*49:01; MYH4; ENSG00000264424; TAA
GEMEDIVQEA

SEQ ID NO: 49474 - protein, 10 aa, Homo sapiens
  Table A; Target 49474; HLA-A*30:01; MYH4; ENSG00000264424; TAA
GEQIDSLQRV

SEQ ID NO: 49475 - protein, 10 aa, Homo sapiens
  Table A; Target 49475; HLA-B*40:01; MYH4; ENSG00000264424; TAA
GEQIDSLQRV

SEQ ID NO: 49476 - protein, 10 aa, Homo sapiens
  Table A; Target 49476; HLA-B*40:02; MYH4; ENSG00000264424; TAA
GEQIDSLQRV

SEQ ID NO: 49477 - protein, 10 aa, Homo sapiens
  Table A; Target 49477; HLA-B*44:02; MYH4; ENSG00000264424; TAA
GEQIDSLQRV

SEQ ID NO: 49478 - protein, 10 aa, Homo sapiens
  Table A; Target 49478; HLA-B*49:01; MYH4; ENSG00000264424; TAA
GEQIDSLQRV

SEQ ID NO: 49479 - protein, 11 aa, Homo sapiens
  Table A; Target 49479; HLA-B*44:02; MYH4; ENSG00000264424; TAA
GEQIDSLQRVK

SEQ ID NO: 49480 - protein, 9 aa, Homo sapiens
  Table A; Target 49480; HLA-A*30:01; MYH4; ENSG00000264424; TAA
GESGAGKTV

SEQ ID NO: 49481 - protein, 9 aa, Homo sapiens
  Table A; Target 49481; HLA-B*13:02; MYH4; ENSG00000264424; TAA
GESGAGKTV

SEQ ID NO: 49482 - protein, 9 aa, Homo sapiens
  Table A; Target 49482; HLA-B*37:01; MYH4; ENSG00000264424; TAA
GESGAGKTV

SEQ ID NO: 49483 - protein, 9 aa, Homo sapiens
  Table A; Target 49483; HLA-B*40:01; MYH4; ENSG00000264424; TAA
GESGAGKTV

SEQ ID NO: 49484 - protein, 9 aa, Homo sapiens
  Table A; Target 49484; HLA-B*40:02; MYH4; ENSG00000264424; TAA
GESGAGKTV

SEQ ID NO: 49485 - protein, 9 aa, Homo sapiens
  Table A; Target 49485; HLA-B*44:02; MYH4; ENSG00000264424; TAA
GESGAGKTV

SEQ ID NO: 49486 - protein, 9 aa, Homo sapiens
  Table A; Target 49486; HLA-B*44:03; MYH4; ENSG00000264424; TAA
GESGAGKTV

SEQ ID NO: 49487 - protein, 9 aa, Homo sapiens
  Table A; Target 49487; HLA-B*49:01; MYH4; ENSG00000264424; TAA
GESGAGKTV

SEQ ID NO: 49488 - protein, 9 aa, Homo sapiens
  Table A; Target 49488; HLA-C*02:02; MYH4; ENSG00000264424; TAA
GESGAGKTV

SEQ ID NO: 49489 - protein, 9 aa, Homo sapiens
  Table A; Target 49489; HLA-C*16:02; MYH4; ENSG00000264424; TAA
GESGAGKTV

SEQ ID NO: 49490 - protein, 9 aa, Homo sapiens
  Table A; Target 49490; HLA-C*16:04; MYH4; ENSG00000264424; TAA
GESGAGKTV

SEQ ID NO: 49491 - protein, 11 aa, Homo sapiens
  Table A; Target 49491; HLA-B*40:01; MYH4; ENSG00000264424; TAA
GESGAGKTVNT

SEQ ID NO: 49492 - protein, 9 aa, Homo sapiens
  Table A; Target 49492; HLA-A*31:01; MYH4; ENSG00000264424; TAA
GFLMRVEFR

SEQ ID NO: 49493 - protein, 10 aa, Homo sapiens
  Table A; Target 49493; HLA-B*39:01; MYH4; ENSG00000264424; TAA
GGATSAQIEM

SEQ ID NO: 49494 - protein, 9 aa, Homo sapiens
  Table A; Target 49494; HLA-B*08:01; MYH4; ENSG00000264424; TAA
GGKKKGSSF

SEQ ID NO: 49495 - protein, 9 aa, Homo sapiens
  Table A; Target 49495; HLA-B*15:03; MYH4; ENSG00000264424; TAA
GKIEDEQAL

SEQ ID NO: 49496 - protein, 9 aa, Homo sapiens
  Table A; Target 49496; HLA-B*38:01; MYH4; ENSG00000264424; TAA
GKIEDEQAL

SEQ ID NO: 49497 - protein, 9 aa, Homo sapiens
  Table A; Target 49497; HLA-B*39:01; MYH4; ENSG00000264424; TAA
GKIEDEQAL

SEQ ID NO: 49498 - protein, 9 aa, Homo sapiens
  Table A; Target 49498; HLA-B*40:01; MYH4; ENSG00000264424; TAA
GKIEDEQAL

SEQ ID NO: 49499 - protein, 8 aa, Homo sapiens
  Table A; Target 49499; HLA-B*15:03; MYH4; ENSG00000264424; TAA
GKKKGSSF

SEQ ID NO: 49500 - protein, 11 aa, Homo sapiens
  Table A; Target 49500; HLA-B*15:03; MYH4; ENSG00000264424; TAA
GKLASADIETY

SEQ ID NO: 49501 - protein, 9 aa, Homo sapiens
  Table A; Target 49501; HLA-B*15:03; MYH4; ENSG00000264424; TAA
GKPEAHFSL

SEQ ID NO: 49502 - protein, 9 aa, Homo sapiens
  Table A; Target 49502; HLA-B*13:02; MYH4; ENSG00000264424; TAA
GKQAFTQQI

SEQ ID NO: 49503 - protein, 9 aa, Homo sapiens
  Table A; Target 49503; HLA-B*15:03; MYH4; ENSG00000264424; TAA
GKVTAKTEA

SEQ ID NO: 49504 - protein, 8 aa, Homo sapiens
  Table A; Target 49504; HLA-A*03:01; MYH4; ENSG00000264424; TAA
GLDETIAK

SEQ ID NO: 49505 - protein, 8 aa, Homo sapiens
  Table A; Target 49505; HLA-A*03:02; MYH4; ENSG00000264424; TAA
GLDETIAK

SEQ ID NO: 49506 - protein, 9 aa, Homo sapiens
  Table A; Target 49506; HLA-A*01:01; MYH4; ENSG00000264424; TAA
GLDETIAKL

SEQ ID NO: 49507 - protein, 9 aa, Homo sapiens
  Table A; Target 49507; HLA-A*02:01; MYH4; ENSG00000264424; TAA
GLDETIAKL

SEQ ID NO: 49508 - protein, 9 aa, Homo sapiens
  Table A; Target 49508; HLA-A*02:03; MYH4; ENSG00000264424; TAA
GLDETIAKL

SEQ ID NO: 49509 - protein, 9 aa, Homo sapiens
  Table A; Target 49509; HLA-A*02:04; MYH4; ENSG00000264424; TAA
GLDETIAKL

SEQ ID NO: 49510 - protein, 9 aa, Homo sapiens
  Table A; Target 49510; HLA-A*02:07; MYH4; ENSG00000264424; TAA
GLDETIAKL

SEQ ID NO: 49511 - protein, 9 aa, Homo sapiens
  Table A; Target 49511; HLA-A*03:02; MYH4; ENSG00000264424; TAA
GLDETIAKL

SEQ ID NO: 49512 - protein, 9 aa, Homo sapiens
  Table A; Target 49512; HLA-A*30:01; MYH4; ENSG00000264424; TAA
GLDETIAKL

SEQ ID NO: 49513 - protein, 9 aa, Homo sapiens
  Table A; Target 49513; HLA-A*32:01; MYH4; ENSG00000264424; TAA
GLDETIAKL

SEQ ID NO: 49514 - protein, 9 aa, Homo sapiens
  Table A; Target 49514; HLA-B*13:02; MYH4; ENSG00000264424; TAA
GLDETIAKL

SEQ ID NO: 49515 - protein, 9 aa, Homo sapiens
  Table A; Target 49515; HLA-B*27:05; MYH4; ENSG00000264424; TAA
GLDETIAKL

SEQ ID NO: 49516 - protein, 9 aa, Homo sapiens
  Table A; Target 49516; HLA-B*35:03; MYH4; ENSG00000264424; TAA
GLDETIAKL

SEQ ID NO: 49517 - protein, 9 aa, Homo sapiens
  Table A; Target 49517; HLA-B*38:01; MYH4; ENSG00000264424; TAA
GLDETIAKL

SEQ ID NO: 49518 - protein, 9 aa, Homo sapiens
  Table A; Target 49518; HLA-B*40:01; MYH4; ENSG00000264424; TAA
GLDETIAKL

SEQ ID NO: 49519 - protein, 9 aa, Homo sapiens
  Table A; Target 49519; HLA-B*55:01; MYH4; ENSG00000264424; TAA
GLDETIAKL

SEQ ID NO: 49520 - protein, 9 aa, Homo sapiens
  Table A; Target 49520; HLA-C*04:01; MYH4; ENSG00000264424; TAA
GLDETIAKL

SEQ ID NO: 49521 - protein, 9 aa, Homo sapiens
  Table A; Target 49521; HLA-C*05:01; MYH4; ENSG00000264424; TAA
GLDETIAKL

SEQ ID NO: 49522 - protein, 9 aa, Homo sapiens
  Table A; Target 49522; HLA-C*07:04; MYH4; ENSG00000264424; TAA
GLDETIAKL

SEQ ID NO: 49523 - protein, 11 aa, Homo sapiens
  Table A; Target 49523; HLA-A*01:01; MYH4; ENSG00000264424; TAA
GLDETIAKLTK

SEQ ID NO: 49524 - protein, 11 aa, Homo sapiens
  Table A; Target 49524; HLA-A*02:07; MYH4; ENSG00000264424; TAA
GLDETIAKLTK

SEQ ID NO: 49525 - protein, 11 aa, Homo sapiens
  Table A; Target 49525; HLA-A*03:01; MYH4; ENSG00000264424; TAA
GLDETIAKLTK

SEQ ID NO: 49526 - protein, 11 aa, Homo sapiens
  Table A; Target 49526; HLA-A*03:02; MYH4; ENSG00000264424; TAA
GLDETIAKLTK

SEQ ID NO: 49527 - protein, 11 aa, Homo sapiens
  Table A; Target 49527; HLA-A*11:01; MYH4; ENSG00000264424; TAA
GLDETIAKLTK

SEQ ID NO: 49528 - protein, 9 aa, Homo sapiens
  Table A; Target 49528; HLA-A*02:01; MYH4; ENSG00000264424; TAA
GLLGTLEEM

SEQ ID NO: 49529 - protein, 9 aa, Homo sapiens
  Table A; Target 49529; HLA-A*02:04; MYH4; ENSG00000264424; TAA
GLLGTLEEM

SEQ ID NO: 49530 - protein, 9 aa, Homo sapiens
  Table A; Target 49530; HLA-B*13:02; MYH4; ENSG00000264424; TAA
GLLGTLEEM

SEQ ID NO: 49531 - protein, 9 aa, Homo sapiens
  Table A; Target 49531; HLA-B*15:01; MYH4; ENSG00000264424; TAA
GLLGTLEEM

SEQ ID NO: 49532 - protein, 9 aa, Homo sapiens
  Table A; Target 49532; HLA-B*15:03; MYH4; ENSG00000264424; TAA
GLLGTLEEM

SEQ ID NO: 49533 - protein, 9 aa, Homo sapiens
  Table A; Target 49533; HLA-B*46:01; MYH4; ENSG00000264424; TAA
GLLGTLEEM

SEQ ID NO: 49534 - protein, 9 aa, Homo sapiens
  Table A; Target 49534; HLA-B*55:01; MYH4; ENSG00000264424; TAA
GLLGTLEEM

SEQ ID NO: 49535 - protein, 9 aa, Homo sapiens
  Table A; Target 49535; HLA-C*14:02; MYH4; ENSG00000264424; TAA
GLLGTLEEM

SEQ ID NO: 49536 - protein, 8 aa, Homo sapiens
  Table A; Target 49536; HLA-B*08:01; MYH4; ENSG00000264424; TAA
GLYQKSAM

SEQ ID NO: 49537 - protein, 8 aa, Homo sapiens
  Table A; Target 49537; HLA-B*37:01; MYH4; ENSG00000264424; TAA
GLYQKSAM

SEQ ID NO: 49538 - protein, 9 aa, Homo sapiens
  Table A; Target 49538; HLA-A*03:01; MYH4; ENSG00000264424; TAA
GLYQKSAMK

SEQ ID NO: 49539 - protein, 9 aa, Homo sapiens
  Table A; Target 49539; HLA-A*03:02; MYH4; ENSG00000264424; TAA
GLYQKSAMK

SEQ ID NO: 49540 - protein, 9 aa, Homo sapiens
  Table A; Target 49540; HLA-A*11:01; MYH4; ENSG00000264424; TAA
GLYQKSAMK

SEQ ID NO: 49541 - protein, 11 aa, Homo sapiens
  Table A; Target 49541; HLA-A*02:03; MYH4; ENSG00000264424; TAA
GLYQKSAMKTL

SEQ ID NO: 49542 - protein, 9 aa, Homo sapiens
  Table A; Target 49542; HLA-A*02:01; MYH4; ENSG00000264424; TAA
GMSKANSEV

SEQ ID NO: 49543 - protein, 9 aa, Homo sapiens
  Table A; Target 49543; HLA-A*02:03; MYH4; ENSG00000264424; TAA
GMSKANSEV

SEQ ID NO: 49544 - protein, 9 aa, Homo sapiens
  Table A; Target 49544; HLA-B*13:02; MYH4; ENSG00000264424; TAA
GMSKANSEV

SEQ ID NO: 49545 - protein, 9 aa, Homo sapiens
  Table A; Target 49545; HLA-B*55:01; MYH4; ENSG00000264424; TAA
GMSKANSEV

SEQ ID NO: 49546 - protein, 11 aa, Homo sapiens
  Table A; Target 49546; HLA-C*04:01; MYH4; ENSG00000264424; TAA
GNEFVTKGQTV

SEQ ID NO: 49547 - protein, 9 aa, Homo sapiens
  Table A; Target 49547; HLA-A*02:07; MYH4; ENSG00000264424; TAA
GQDDLKEQL

SEQ ID NO: 49548 - protein, 9 aa, Homo sapiens
  Table A; Target 49548; HLA-B*13:02; MYH4; ENSG00000264424; TAA
GQDDLKEQL

SEQ ID NO: 49549 - protein, 9 aa, Homo sapiens
  Table A; Target 49549; HLA-B*15:03; MYH4; ENSG00000264424; TAA
GQDDLKEQL

SEQ ID NO: 49550 - protein, 9 aa, Homo sapiens
  Table A; Target 49550; HLA-B*27:05; MYH4; ENSG00000264424; TAA
GQDDLKEQL

SEQ ID NO: 49551 - protein, 9 aa, Homo sapiens
  Table A; Target 49551; HLA-B*38:01; MYH4; ENSG00000264424; TAA
GQDDLKEQL

SEQ ID NO: 49552 - protein, 9 aa, Homo sapiens
  Table A; Target 49552; HLA-B*39:01; MYH4; ENSG00000264424; TAA
GQDDLKEQL

SEQ ID NO: 49553 - protein, 9 aa, Homo sapiens
  Table A; Target 49553; HLA-B*40:01; MYH4; ENSG00000264424; TAA
GQDDLKEQL

SEQ ID NO: 49554 - protein, 9 aa, Homo sapiens
  Table A; Target 49554; HLA-C*05:01; MYH4; ENSG00000264424; TAA
GQDDLKEQL

SEQ ID NO: 49555 - protein, 9 aa, Homo sapiens
  Table A; Target 49555; HLA-B*13:02; MYH4; ENSG00000264424; TAA
GQFIDSKKA

SEQ ID NO: 49556 - protein, 9 aa, Homo sapiens
  Table A; Target 49556; HLA-B*15:03; MYH4; ENSG00000264424; TAA
GQFIDSKKA

SEQ ID NO: 49557 - protein, 8 aa, Homo sapiens
  Table A; Target 49557; HLA-A*30:02; MYH4; ENSG00000264424; TAA
GQTVQQVY

SEQ ID NO: 49558 - protein, 8 aa, Homo sapiens
  Table A; Target 49558; HLA-B*13:02; MYH4; ENSG00000264424; TAA
GQTVQQVY

SEQ ID NO: 49559 - protein, 8 aa, Homo sapiens
  Table A; Target 49559; HLA-B*15:01; MYH4; ENSG00000264424; TAA
GQTVQQVY

SEQ ID NO: 49560 - protein, 8 aa, Homo sapiens
  Table A; Target 49560; HLA-B*15:03; MYH4; ENSG00000264424; TAA
GQTVQQVY

SEQ ID NO: 49561 - protein, 8 aa, Homo sapiens
  Table A; Target 49561; HLA-B*18:01; MYH4; ENSG00000264424; TAA
GQTVQQVY

SEQ ID NO: 49562 - protein, 8 aa, Homo sapiens
  Table A; Target 49562; HLA-B*27:02; MYH4; ENSG00000264424; TAA
GQTVQQVY

SEQ ID NO: 49563 - protein, 8 aa, Homo sapiens
  Table A; Target 49563; HLA-B*27:05; MYH4; ENSG00000264424; TAA
GQTVQQVY

SEQ ID NO: 49564 - protein, 8 aa, Homo sapiens
  Table A; Target 49564; HLA-B*39:01; MYH4; ENSG00000264424; TAA
GQTVQQVY

SEQ ID NO: 49565 - protein, 8 aa, Homo sapiens
  Table A; Target 49565; HLA-C*02:02; MYH4; ENSG00000264424; TAA
GQTVQQVY

SEQ ID NO: 49566 - protein, 8 aa, Homo sapiens
  Table A; Target 49566; HLA-C*07:04; MYH4; ENSG00000264424; TAA
GQTVQQVY

SEQ ID NO: 49567 - protein, 8 aa, Homo sapiens
  Table A; Target 49567; HLA-C*14:02; MYH4; ENSG00000264424; TAA
GQTVQQVY

SEQ ID NO: 49568 - protein, 8 aa, Homo sapiens
  Table A; Target 49568; HLA-C*16:01; MYH4; ENSG00000264424; TAA
GQTVQQVY

SEQ ID NO: 49569 - protein, 8 aa, Homo sapiens
  Table A; Target 49569; HLA-C*16:04; MYH4; ENSG00000264424; TAA
GQTVQQVY

SEQ ID NO: 49570 - protein, 10 aa, Homo sapiens
  Table A; Target 49570; HLA-B*13:02; MYH4; ENSG00000264424; TAA
GQTVQQVYNA

SEQ ID NO: 49571 - protein, 10 aa, Homo sapiens
  Table A; Target 49571; HLA-B*27:05; MYH4; ENSG00000264424; TAA
GQTVQQVYNA

SEQ ID NO: 49572 - protein, 11 aa, Homo sapiens
  Table A; Target 49572; HLA-B*13:02; MYH4; ENSG00000264424; TAA
GQTVQQVYNAV

SEQ ID NO: 49573 - protein, 11 aa, Homo sapiens
  Table A; Target 49573; HLA-B*27:05; MYH4; ENSG00000264424; TAA
GQTVQQVYNAV

SEQ ID NO: 49574 - protein, 9 aa, Homo sapiens
  Table A; Target 49574; HLA-B*27:05; MYH4; ENSG00000264424; TAA
GRKMAEQEL

SEQ ID NO: 49575 - protein, 10 aa, Homo sapiens
  Table A; Target 49575; HLA-A*01:01; MYH4; ENSG00000264424; TAA
GSIEIDHTQY

SEQ ID NO: 49576 - protein, 10 aa, Homo sapiens
  Table A; Target 49576; HLA-A*25:01; MYH4; ENSG00000264424; TAA
GSIEIDHTQY

SEQ ID NO: 49577 - protein, 10 aa, Homo sapiens
  Table A; Target 49577; HLA-A*26:01; MYH4; ENSG00000264424; TAA
GSIEIDHTQY

SEQ ID NO: 49578 - protein, 10 aa, Homo sapiens
  Table A; Target 49578; HLA-A*29:02; MYH4; ENSG00000264424; TAA
GSIEIDHTQY

SEQ ID NO: 49579 - protein, 10 aa, Homo sapiens
  Table A; Target 49579; HLA-A*30:02; MYH4; ENSG00000264424; TAA
GSIEIDHTQY

SEQ ID NO: 49580 - protein, 10 aa, Homo sapiens
  Table A; Target 49580; HLA-A*32:01; MYH4; ENSG00000264424; TAA
GSIEIDHTQY

SEQ ID NO: 49581 - protein, 10 aa, Homo sapiens
  Table A; Target 49581; HLA-B*15:01; MYH4; ENSG00000264424; TAA
GSIEIDHTQY

SEQ ID NO: 49582 - protein, 10 aa, Homo sapiens
  Table A; Target 49582; HLA-B*15:03; MYH4; ENSG00000264424; TAA
GSIEIDHTQY

SEQ ID NO: 49583 - protein, 10 aa, Homo sapiens
  Table A; Target 49583; HLA-B*35:01; MYH4; ENSG00000264424; TAA
GSIEIDHTQY

SEQ ID NO: 49584 - protein, 10 aa, Homo sapiens
  Table A; Target 49584; HLA-B*44:02; MYH4; ENSG00000264424; TAA
GSIEIDHTQY

SEQ ID NO: 49585 - protein, 10 aa, Homo sapiens
  Table A; Target 49585; HLA-B*44:03; MYH4; ENSG00000264424; TAA
GSIEIDHTQY

SEQ ID NO: 49586 - protein, 10 aa, Homo sapiens
  Table A; Target 49586; HLA-B*46:01; MYH4; ENSG00000264424; TAA
GSIEIDHTQY

SEQ ID NO: 49587 - protein, 10 aa, Homo sapiens
  Table A; Target 49587; HLA-B*57:01; MYH4; ENSG00000264424; TAA
GSIEIDHTQY

SEQ ID NO: 49588 - protein, 10 aa, Homo sapiens
  Table A; Target 49588; HLA-B*58:01; MYH4; ENSG00000264424; TAA
GSIEIDHTQY

SEQ ID NO: 49589 - protein, 10 aa, Homo sapiens
  Table A; Target 49589; HLA-C*02:02; MYH4; ENSG00000264424; TAA
GSIEIDHTQY

SEQ ID NO: 49590 - protein, 10 aa, Homo sapiens
  Table A; Target 49590; HLA-C*07:04; MYH4; ENSG00000264424; TAA
GSIEIDHTQY

SEQ ID NO: 49591 - protein, 10 aa, Homo sapiens
  Table A; Target 49591; HLA-C*12:03; MYH4; ENSG00000264424; TAA
GSIEIDHTQY

SEQ ID NO: 49592 - protein, 10 aa, Homo sapiens
  Table A; Target 49592; HLA-C*16:04; MYH4; ENSG00000264424; TAA
GSIEIDHTQY

SEQ ID NO: 49593 - protein, 11 aa, Homo sapiens
  Table A; Target 49593; HLA-A*01:01; MYH4; ENSG00000264424; TAA
GSIEIDHTQYK

SEQ ID NO: 49594 - protein, 11 aa, Homo sapiens
  Table A; Target 49594; HLA-A*03:01; MYH4; ENSG00000264424; TAA
GSIEIDHTQYK

SEQ ID NO: 49595 - protein, 11 aa, Homo sapiens
  Table A; Target 49595; HLA-A*03:02; MYH4; ENSG00000264424; TAA
GSIEIDHTQYK

SEQ ID NO: 49596 - protein, 11 aa, Homo sapiens
  Table A; Target 49596; HLA-A*11:01; MYH4; ENSG00000264424; TAA
GSIEIDHTQYK

SEQ ID NO: 49597 - protein, 11 aa, Homo sapiens
  Table A; Target 49597; HLA-A*31:01; MYH4; ENSG00000264424; TAA
GSIEIDHTQYK

SEQ ID NO: 49598 - protein, 11 aa, Homo sapiens
  Table A; Target 49598; HLA-A*68:01; MYH4; ENSG00000264424; TAA
GSIEIDHTQYK

SEQ ID NO: 49599 - protein, 11 aa, Homo sapiens
  Table A; Target 49599; HLA-A*30:02; MYH4; ENSG00000264424; TAA
GSSFQTVSALF

SEQ ID NO: 49600 - protein, 10 aa, Homo sapiens
  Table A; Target 49600; HLA-A*01:01; MYH4; ENSG00000264424; TAA
GTEVADKAAY

SEQ ID NO: 49601 - protein, 10 aa, Homo sapiens
  Table A; Target 49601; HLA-A*30:02; MYH4; ENSG00000264424; TAA
GTEVADKAAY

SEQ ID NO: 49602 - protein, 10 aa, Homo sapiens
  Table A; Target 49602; HLA-A*25:01; MYH4; ENSG00000264424; TAA
GTVDYNIAGW

SEQ ID NO: 49603 - protein, 10 aa, Homo sapiens
  Table A; Target 49603; HLA-A*26:01; MYH4; ENSG00000264424; TAA
GTVDYNIAGW

SEQ ID NO: 49604 - protein, 10 aa, Homo sapiens
  Table A; Target 49604; HLA-A*32:01; MYH4; ENSG00000264424; TAA
GTVDYNIAGW

SEQ ID NO: 49605 - protein, 10 aa, Homo sapiens
  Table A; Target 49605; HLA-A*68:02; MYH4; ENSG00000264424; TAA
GTVDYNIAGW

SEQ ID NO: 49606 - protein, 10 aa, Homo sapiens
  Table A; Target 49606; HLA-B*44:02; MYH4; ENSG00000264424; TAA
GTVDYNIAGW

SEQ ID NO: 49607 - protein, 10 aa, Homo sapiens
  Table A; Target 49607; HLA-B*44:03; MYH4; ENSG00000264424; TAA
GTVDYNIAGW

SEQ ID NO: 49608 - protein, 10 aa, Homo sapiens
  Table A; Target 49608; HLA-B*57:01; MYH4; ENSG00000264424; TAA
GTVDYNIAGW

SEQ ID NO: 49609 - protein, 10 aa, Homo sapiens
  Table A; Target 49609; HLA-B*58:01; MYH4; ENSG00000264424; TAA
GTVDYNIAGW

SEQ ID NO: 49610 - protein, 10 aa, Homo sapiens
  Table A; Target 49610; HLA-C*16:04; MYH4; ENSG00000264424; TAA
GTVDYNIAGW

SEQ ID NO: 49611 - protein, 10 aa, Homo sapiens
  Table A; Target 49611; HLA-A*02:01; MYH4; ENSG00000264424; TAA
GVLDIAGFEI

SEQ ID NO: 49612 - protein, 10 aa, Homo sapiens
  Table A; Target 49612; HLA-A*02:04; MYH4; ENSG00000264424; TAA
GVLDIAGFEI

SEQ ID NO: 49613 - protein, 10 aa, Homo sapiens
  Table A; Target 49613; HLA-B*13:02; MYH4; ENSG00000264424; TAA
GVLDIAGFEI

SEQ ID NO: 49614 - protein, 10 aa, Homo sapiens
  Table A; Target 49614; HLA-A*31:01; MYH4; ENSG00000264424; TAA
GVLEGIRICR

SEQ ID NO: 49615 - protein, 8 aa, Homo sapiens
  Table A; Target 49615; HLA-A*32:01; MYH4; ENSG00000264424; TAA
HADSVAEL

SEQ ID NO: 49616 - protein, 8 aa, Homo sapiens
  Table A; Target 49616; HLA-B*07:02; MYH4; ENSG00000264424; TAA
HADSVAEL

SEQ ID NO: 49617 - protein, 8 aa, Homo sapiens
  Table A; Target 49617; HLA-B*35:01; MYH4; ENSG00000264424; TAA
HADSVAEL

SEQ ID NO: 49618 - protein, 8 aa, Homo sapiens
  Table A; Target 49618; HLA-B*35:03; MYH4; ENSG00000264424; TAA
HADSVAEL

SEQ ID NO: 49619 - protein, 8 aa, Homo sapiens
  Table A; Target 49619; HLA-B*38:01; MYH4; ENSG00000264424; TAA
HADSVAEL

SEQ ID NO: 49620 - protein, 8 aa, Homo sapiens
  Table A; Target 49620; HLA-B*39:01; MYH4; ENSG00000264424; TAA
HADSVAEL

SEQ ID NO: 49621 - protein, 8 aa, Homo sapiens
  Table A; Target 49621; HLA-B*40:01; MYH4; ENSG00000264424; TAA
HADSVAEL

SEQ ID NO: 49622 - protein, 8 aa, Homo sapiens
  Table A; Target 49622; HLA-B*51:01; MYH4; ENSG00000264424; TAA
HADSVAEL

SEQ ID NO: 49623 - protein, 8 aa, Homo sapiens
  Table A; Target 49623; HLA-B*55:01; MYH4; ENSG00000264424; TAA
HADSVAEL

SEQ ID NO: 49624 - protein, 8 aa, Homo sapiens
  Table A; Target 49624; HLA-B*58:01; MYH4; ENSG00000264424; TAA
HADSVAEL

SEQ ID NO: 49625 - protein, 8 aa, Homo sapiens
  Table A; Target 49625; HLA-C*01:02; MYH4; ENSG00000264424; TAA
HADSVAEL

SEQ ID NO: 49626 - protein, 8 aa, Homo sapiens
  Table A; Target 49626; HLA-C*03:03; MYH4; ENSG00000264424; TAA
HADSVAEL

SEQ ID NO: 49627 - protein, 8 aa, Homo sapiens
  Table A; Target 49627; HLA-C*03:04; MYH4; ENSG00000264424; TAA
HADSVAEL

SEQ ID NO: 49628 - protein, 8 aa, Homo sapiens
  Table A; Target 49628; HLA-C*04:01; MYH4; ENSG00000264424; TAA
HADSVAEL

SEQ ID NO: 49629 - protein, 8 aa, Homo sapiens
  Table A; Target 49629; HLA-C*05:01; MYH4; ENSG00000264424; TAA
HADSVAEL

SEQ ID NO: 49630 - protein, 8 aa, Homo sapiens
  Table A; Target 49630; HLA-C*07:04; MYH4; ENSG00000264424; TAA
HADSVAEL

SEQ ID NO: 49631 - protein, 8 aa, Homo sapiens
  Table A; Target 49631; HLA-C*07:06; MYH4; ENSG00000264424; TAA
HADSVAEL

SEQ ID NO: 49632 - protein, 8 aa, Homo sapiens
  Table A; Target 49632; HLA-C*12:03; MYH4; ENSG00000264424; TAA
HADSVAEL

SEQ ID NO: 49633 - protein, 8 aa, Homo sapiens
  Table A; Target 49633; HLA-C*16:02; MYH4; ENSG00000264424; TAA
HADSVAEL

SEQ ID NO: 49634 - protein, 9 aa, Homo sapiens
  Table A; Target 49634; HLA-B*54:01; MYH4; ENSG00000264424; TAA
HANRQAAEA

SEQ ID NO: 49635 - protein, 9 aa, Homo sapiens
  Table A; Target 49635; HLA-B*56:01; MYH4; ENSG00000264424; TAA
HANRQAAEA

SEQ ID NO: 49636 - protein, 10 aa, Homo sapiens
  Table A; Target 49636; HLA-B*35:01; MYH4; ENSG00000264424; TAA
HANRQAAEAL

SEQ ID NO: 49637 - protein, 10 aa, Homo sapiens
  Table A; Target 49637; HLA-B*35:03; MYH4; ENSG00000264424; TAA
HANRQAAEAL

SEQ ID NO: 49638 - protein, 10 aa, Homo sapiens
  Table A; Target 49638; HLA-B*40:01; MYH4; ENSG00000264424; TAA
HANRQAAEAL

SEQ ID NO: 49639 - protein, 11 aa, Homo sapiens
  Table A; Target 49639; HLA-A*31:01; MYH4; ENSG00000264424; TAA
HANRQAAEALR

SEQ ID NO: 49640 - protein, 11 aa, Homo sapiens
  Table A; Target 49640; HLA-A*33:01; MYH4; ENSG00000264424; TAA
HANRQAAEALR

SEQ ID NO: 49641 - protein, 11 aa, Homo sapiens
  Table A; Target 49641; HLA-A*33:03; MYH4; ENSG00000264424; TAA
HANRQAAEALR

SEQ ID NO: 49642 - protein, 11 aa, Homo sapiens
  Table A; Target 49642; HLA-A*68:01; MYH4; ENSG00000264424; TAA
HANRQAAEALR

SEQ ID NO: 49643 - protein, 11 aa, Homo sapiens
  Table A; Target 49643; HLA-C*07:06; MYH4; ENSG00000264424; TAA
HANRQAAEALR

SEQ ID NO: 49644 - protein, 8 aa, Homo sapiens
  Table A; Target 49644; HLA-C*16:01; MYH4; ENSG00000264424; TAA
HATENKVK

SEQ ID NO: 49645 - protein, 8 aa, Homo sapiens
  Table A; Target 49645; HLA-C*16:02; MYH4; ENSG00000264424; TAA
HATENKVK

SEQ ID NO: 49646 - protein, 10 aa, Homo sapiens
  Table A; Target 49646; HLA-C*16:02; MYH4; ENSG00000264424; TAA
HATENKVKNL

SEQ ID NO: 49647 - protein, 8 aa, Homo sapiens
  Table A; Target 49647; HLA-A*30:01; MYH4; ENSG00000264424; TAA
HEATAAAL

SEQ ID NO: 49648 - protein, 8 aa, Homo sapiens
  Table A; Target 49648; HLA-B*18:01; MYH4; ENSG00000264424; TAA
HEATAAAL

SEQ ID NO: 49649 - protein, 8 aa, Homo sapiens
  Table A; Target 49649; HLA-B*35:03; MYH4; ENSG00000264424; TAA
HEATAAAL

SEQ ID NO: 49650 - protein, 8 aa, Homo sapiens
  Table A; Target 49650; HLA-B*37:01; MYH4; ENSG00000264424; TAA
HEATAAAL

SEQ ID NO: 49651 - protein, 8 aa, Homo sapiens
  Table A; Target 49651; HLA-B*40:01; MYH4; ENSG00000264424; TAA
HEATAAAL

SEQ ID NO: 49652 - protein, 8 aa, Homo sapiens
  Table A; Target 49652; HLA-B*40:02; MYH4; ENSG00000264424; TAA
HEATAAAL

SEQ ID NO: 49653 - protein, 8 aa, Homo sapiens
  Table A; Target 49653; HLA-B*49:01; MYH4; ENSG00000264424; TAA
HEATAAAL

SEQ ID NO: 49654 - protein, 9 aa, Homo sapiens
  Table A; Target 49654; HLA-A*33:03; MYH4; ENSG00000264424; TAA
HEATAAALR

SEQ ID NO: 49655 - protein, 9 aa, Homo sapiens
  Table A; Target 49655; HLA-A*68:01; MYH4; ENSG00000264424; TAA
HEATAAALR

SEQ ID NO: 49656 - protein, 9 aa, Homo sapiens
  Table A; Target 49656; HLA-B*27:02; MYH4; ENSG00000264424; TAA
HEATAAALR

SEQ ID NO: 49657 - protein, 9 aa, Homo sapiens
  Table A; Target 49657; HLA-C*07:06; MYH4; ENSG00000264424; TAA
HEATAAALR

SEQ ID NO: 49658 - protein, 9 aa, Homo sapiens
  Table A; Target 49658; HLA-A*30:01; MYH4; ENSG00000264424; TAA
HEEGKILRI

SEQ ID NO: 49659 - protein, 9 aa, Homo sapiens
  Table A; Target 49659; HLA-B*40:01; MYH4; ENSG00000264424; TAA
HEEGKILRI

SEQ ID NO: 49660 - protein, 9 aa, Homo sapiens
  Table A; Target 49660; HLA-B*44:02; MYH4; ENSG00000264424; TAA
HEEGKILRI

SEQ ID NO: 49661 - protein, 9 aa, Homo sapiens
  Table A; Target 49661; HLA-B*44:03; MYH4; ENSG00000264424; TAA
HEEGKILRI

SEQ ID NO: 49662 - protein, 9 aa, Homo sapiens
  Table A; Target 49662; HLA-B*49:01; MYH4; ENSG00000264424; TAA
HEEGKILRI

SEQ ID NO: 49663 - protein, 10 aa, Homo sapiens
  Table A; Target 49663; HLA-A*30:01; MYH4; ENSG00000264424; TAA
HEKSELQTSL

SEQ ID NO: 49664 - protein, 10 aa, Homo sapiens
  Table A; Target 49664; HLA-B*18:01; MYH4; ENSG00000264424; TAA
HEKSELQTSL

SEQ ID NO: 49665 - protein, 10 aa, Homo sapiens
  Table A; Target 49665; HLA-B*40:01; MYH4; ENSG00000264424; TAA
HEKSELQTSL

SEQ ID NO: 49666 - protein, 10 aa, Homo sapiens
  Table A; Target 49666; HLA-B*40:02; MYH4; ENSG00000264424; TAA
HEKSELQTSL

SEQ ID NO: 49667 - protein, 10 aa, Homo sapiens
  Table A; Target 49667; HLA-B*44:02; MYH4; ENSG00000264424; TAA
HEKSELQTSL

SEQ ID NO: 49668 - protein, 10 aa, Homo sapiens
  Table A; Target 49668; HLA-B*49:01; MYH4; ENSG00000264424; TAA
HEKSELQTSL

SEQ ID NO: 49669 - protein, 8 aa, Homo sapiens
  Table A; Target 49669; HLA-A*30:01; MYH4; ENSG00000264424; TAA
HELVLHQL

SEQ ID NO: 49670 - protein, 8 aa, Homo sapiens
  Table A; Target 49670; HLA-B*18:01; MYH4; ENSG00000264424; TAA
HELVLHQL

SEQ ID NO: 49671 - protein, 8 aa, Homo sapiens
  Table A; Target 49671; HLA-B*37:01; MYH4; ENSG00000264424; TAA
HELVLHQL

SEQ ID NO: 49672 - protein, 8 aa, Homo sapiens
  Table A; Target 49672; HLA-B*40:01; MYH4; ENSG00000264424; TAA
HELVLHQL

SEQ ID NO: 49673 - protein, 8 aa, Homo sapiens
  Table A; Target 49673; HLA-B*40:02; MYH4; ENSG00000264424; TAA
HELVLHQL

SEQ ID NO: 49674 - protein, 8 aa, Homo sapiens
  Table A; Target 49674; HLA-B*44:02; MYH4; ENSG00000264424; TAA
HELVLHQL

SEQ ID NO: 49675 - protein, 8 aa, Homo sapiens
  Table A; Target 49675; HLA-B*44:03; MYH4; ENSG00000264424; TAA
HELVLHQL

SEQ ID NO: 49676 - protein, 8 aa, Homo sapiens
  Table A; Target 49676; HLA-B*49:01; MYH4; ENSG00000264424; TAA
HELVLHQL

SEQ ID NO: 49677 - protein, 9 aa, Homo sapiens
  Table A; Target 49677; HLA-A*02:07; MYH4; ENSG00000264424; TAA
HEPAVLYNL

SEQ ID NO: 49678 - protein, 9 aa, Homo sapiens
  Table A; Target 49678; HLA-A*24:02; MYH4; ENSG00000264424; TAA
HEPAVLYNL

SEQ ID NO: 49679 - protein, 9 aa, Homo sapiens
  Table A; Target 49679; HLA-A*30:01; MYH4; ENSG00000264424; TAA
HEPAVLYNL

SEQ ID NO: 49680 - protein, 9 aa, Homo sapiens
  Table A; Target 49680; HLA-A*68:02; MYH4; ENSG00000264424; TAA
HEPAVLYNL

SEQ ID NO: 49681 - protein, 9 aa, Homo sapiens
  Table A; Target 49681; HLA-B*18:01; MYH4; ENSG00000264424; TAA
HEPAVLYNL

SEQ ID NO: 49682 - protein, 9 aa, Homo sapiens
  Table A; Target 49682; HLA-B*37:01; MYH4; ENSG00000264424; TAA
HEPAVLYNL

SEQ ID NO: 49683 - protein, 9 aa, Homo sapiens
  Table A; Target 49683; HLA-B*38:01; MYH4; ENSG00000264424; TAA
HEPAVLYNL

SEQ ID NO: 49684 - protein, 9 aa, Homo sapiens
  Table A; Target 49684; HLA-B*40:01; MYH4; ENSG00000264424; TAA
HEPAVLYNL

SEQ ID NO: 49685 - protein, 9 aa, Homo sapiens
  Table A; Target 49685; HLA-B*40:02; MYH4; ENSG00000264424; TAA
HEPAVLYNL

SEQ ID NO: 49686 - protein, 9 aa, Homo sapiens
  Table A; Target 49686; HLA-B*44:02; MYH4; ENSG00000264424; TAA
HEPAVLYNL

SEQ ID NO: 49687 - protein, 9 aa, Homo sapiens
  Table A; Target 49687; HLA-B*44:03; MYH4; ENSG00000264424; TAA
HEPAVLYNL

SEQ ID NO: 49688 - protein, 9 aa, Homo sapiens
  Table A; Target 49688; HLA-B*49:01; MYH4; ENSG00000264424; TAA
HEPAVLYNL

SEQ ID NO: 49689 - protein, 8 aa, Homo sapiens
  Table A; Target 49689; HLA-C*04:01; MYH4; ENSG00000264424; TAA
HFGATGKL

SEQ ID NO: 49690 - protein, 8 aa, Homo sapiens
  Table A; Target 49690; HLA-C*07:01; MYH4; ENSG00000264424; TAA
HFGATGKL

SEQ ID NO: 49691 - protein, 10 aa, Homo sapiens
  Table A; Target 49691; HLA-A*26:01; MYH4; ENSG00000264424; TAA
HIFSISDNAY

SEQ ID NO: 49692 - protein, 10 aa, Homo sapiens
  Table A; Target 49692; HLA-A*30:02; MYH4; ENSG00000264424; TAA
HIFSISDNAY

SEQ ID NO: 49693 - protein, 10 aa, Homo sapiens
  Table A; Target 49693; HLA-B*15:01; MYH4; ENSG00000264424; TAA
HIFSISDNAY

SEQ ID NO: 49694 - protein, 10 aa, Homo sapiens
  Table A; Target 49694; HLA-B*35:01; MYH4; ENSG00000264424; TAA
HIFSISDNAY

SEQ ID NO: 49695 - protein, 10 aa, Homo sapiens
  Table A; Target 49695; HLA-C*07:04; MYH4; ENSG00000264424; TAA
HIFSISDNAY

SEQ ID NO: 49696 - protein, 10 aa, Homo sapiens
  Table A; Target 49696; HLA-A*03:01; MYH4; ENSG00000264424; TAA
HIFYQILSNK

SEQ ID NO: 49697 - protein, 10 aa, Homo sapiens
  Table A; Target 49697; HLA-A*03:02; MYH4; ENSG00000264424; TAA
HIFYQILSNK

SEQ ID NO: 49698 - protein, 10 aa, Homo sapiens
  Table A; Target 49698; HLA-A*68:02; MYH4; ENSG00000264424; TAA
HIFYQILSNK

SEQ ID NO: 49699 - protein, 10 aa, Homo sapiens
  Table A; Target 49699; HLA-A*03:02; MYH4; ENSG00000264424; TAA
HLGKSNNFQK

SEQ ID NO: 49700 - protein, 8 aa, Homo sapiens
  Table A; Target 49700; HLA-B*08:01; MYH4; ENSG00000264424; TAA
HLHEPAVL

SEQ ID NO: 49701 - protein, 9 aa, Homo sapiens
  Table A; Target 49701; HLA-A*01:01; MYH4; ENSG00000264424; TAA
HLHEPAVLY

SEQ ID NO: 49702 - protein, 9 aa, Homo sapiens
  Table A; Target 49702; HLA-A*03:01; MYH4; ENSG00000264424; TAA
HLHEPAVLY

SEQ ID NO: 49703 - protein, 9 aa, Homo sapiens
  Table A; Target 49703; HLA-A*25:01; MYH4; ENSG00000264424; TAA
HLHEPAVLY

SEQ ID NO: 49704 - protein, 9 aa, Homo sapiens
  Table A; Target 49704; HLA-A*26:01; MYH4; ENSG00000264424; TAA
HLHEPAVLY

SEQ ID NO: 49705 - protein, 9 aa, Homo sapiens
  Table A; Target 49705; HLA-A*29:02; MYH4; ENSG00000264424; TAA
HLHEPAVLY

SEQ ID NO: 49706 - protein, 9 aa, Homo sapiens
  Table A; Target 49706; HLA-A*30:02; MYH4; ENSG00000264424; TAA
HLHEPAVLY

SEQ ID NO: 49707 - protein, 9 aa, Homo sapiens
  Table A; Target 49707; HLA-A*32:01; MYH4; ENSG00000264424; TAA
HLHEPAVLY

SEQ ID NO: 49708 - protein, 9 aa, Homo sapiens
  Table A; Target 49708; HLA-A*33:01; MYH4; ENSG00000264424; TAA
HLHEPAVLY

SEQ ID NO: 49709 - protein, 9 aa, Homo sapiens
  Table A; Target 49709; HLA-B*08:01; MYH4; ENSG00000264424; TAA
HLHEPAVLY

SEQ ID NO: 49710 - protein, 9 aa, Homo sapiens
  Table A; Target 49710; HLA-B*15:01; MYH4; ENSG00000264424; TAA
HLHEPAVLY

SEQ ID NO: 49711 - protein, 9 aa, Homo sapiens
  Table A; Target 49711; HLA-B*15:03; MYH4; ENSG00000264424; TAA
HLHEPAVLY

SEQ ID NO: 49712 - protein, 9 aa, Homo sapiens
  Table A; Target 49712; HLA-B*35:01; MYH4; ENSG00000264424; TAA
HLHEPAVLY

SEQ ID NO: 49713 - protein, 9 aa, Homo sapiens
  Table A; Target 49713; HLA-B*46:01; MYH4; ENSG00000264424; TAA
HLHEPAVLY

SEQ ID NO: 49714 - protein, 9 aa, Homo sapiens
  Table A; Target 49714; HLA-C*02:02; MYH4; ENSG00000264424; TAA
HLHEPAVLY

SEQ ID NO: 49715 - protein, 9 aa, Homo sapiens
  Table A; Target 49715; HLA-C*03:03; MYH4; ENSG00000264424; TAA
HLHEPAVLY

SEQ ID NO: 49716 - protein, 9 aa, Homo sapiens
  Table A; Target 49716; HLA-C*07:04; MYH4; ENSG00000264424; TAA
HLHEPAVLY

SEQ ID NO: 49717 - protein, 11 aa, Homo sapiens
  Table A; Target 49717; HLA-A*02:04; MYH4; ENSG00000264424; TAA
HLHEPAVLYNL

SEQ ID NO: 49718 - protein, 11 aa, Homo sapiens
  Table A; Target 49718; HLA-A*02:07; MYH4; ENSG00000264424; TAA
HLHEPAVLYNL

SEQ ID NO: 49719 - protein, 8 aa, Homo sapiens
  Table A; Target 49719; HLA-B*08:01; MYH4; ENSG00000264424; TAA
HLRVVESM

SEQ ID NO: 49720 - protein, 10 aa, Homo sapiens
  Table A; Target 49720; HLA-A*01:01; MYH4; ENSG00000264424; TAA
HMFVLEQEEY

SEQ ID NO: 49721 - protein, 10 aa, Homo sapiens
  Table A; Target 49721; HLA-A*29:02; MYH4; ENSG00000264424; TAA
HMFVLEQEEY

SEQ ID NO: 49722 - protein, 10 aa, Homo sapiens
  Table A; Target 49722; HLA-A*30:02; MYH4; ENSG00000264424; TAA
HMFVLEQEEY

SEQ ID NO: 49723 - protein, 10 aa, Homo sapiens
  Table A; Target 49723; HLA-B*15:01; MYH4; ENSG00000264424; TAA
HMFVLEQEEY

SEQ ID NO: 49724 - protein, 10 aa, Homo sapiens
  Table A; Target 49724; HLA-B*15:03; MYH4; ENSG00000264424; TAA
HMFVLEQEEY

SEQ ID NO: 49725 - protein, 10 aa, Homo sapiens
  Table A; Target 49725; HLA-B*35:01; MYH4; ENSG00000264424; TAA
HMFVLEQEEY

SEQ ID NO: 49726 - protein, 10 aa, Homo sapiens
  Table A; Target 49726; HLA-C*07:01; MYH4; ENSG00000264424; TAA
HMFVLEQEEY

SEQ ID NO: 49727 - protein, 10 aa, Homo sapiens
  Table A; Target 49727; HLA-C*16:04; MYH4; ENSG00000264424; TAA
HMFVLEQEEY

SEQ ID NO: 49728 - protein, 10 aa, Homo sapiens
  Table A; Target 49728; HLA-B*38:01; MYH4; ENSG00000264424; TAA
HQQTLDDLQM

SEQ ID NO: 49729 - protein, 9 aa, Homo sapiens
  Table A; Target 49729; HLA-A*03:02; MYH4; ENSG00000264424; TAA
HTESGEFSR

SEQ ID NO: 49730 - protein, 9 aa, Homo sapiens
  Table A; Target 49730; HLA-A*11:01; MYH4; ENSG00000264424; TAA
HTESGEFSR

SEQ ID NO: 49731 - protein, 9 aa, Homo sapiens
  Table A; Target 49731; HLA-A*31:01; MYH4; ENSG00000264424; TAA
HTESGEFSR

SEQ ID NO: 49732 - protein, 9 aa, Homo sapiens
  Table A; Target 49732; HLA-A*33:01; MYH4; ENSG00000264424; TAA
HTESGEFSR

SEQ ID NO: 49733 - protein, 9 aa, Homo sapiens
  Table A; Target 49733; HLA-A*33:03; MYH4; ENSG00000264424; TAA
HTESGEFSR

SEQ ID NO: 49734 - protein, 9 aa, Homo sapiens
  Table A; Target 49734; HLA-A*68:01; MYH4; ENSG00000264424; TAA
HTESGEFSR

SEQ ID NO: 49735 - protein, 9 aa, Homo sapiens
  Table A; Target 49735; HLA-C*07:06; MYH4; ENSG00000264424; TAA
HTESGEFSR

SEQ ID NO: 49736 - protein, 10 aa, Homo sapiens
  Table A; Target 49736; HLA-A*01:01; MYH4; ENSG00000264424; TAA
HTESGEFSRQ

SEQ ID NO: 49737 - protein, 11 aa, Homo sapiens
  Table A; Target 49737; HLA-A*68:02; MYH4; ENSG00000264424; TAA
HTESGEFSRQL

SEQ ID NO: 49738 - protein, 8 aa, Homo sapiens
  Table A; Target 49738; HLA-C*04:01; MYH4; ENSG00000264424; TAA
HTKVISEE

SEQ ID NO: 49739 - protein, 8 aa, Homo sapiens
  Table A; Target 49739; HLA-C*12:03; MYH4; ENSG00000264424; TAA
HTKVISEE

SEQ ID NO: 49740 - protein, 11 aa, Homo sapiens
  Table A; Target 49740; HLA-A*03:01; MYH4; ENSG00000264424; TAA
HTQNTSLINTK

SEQ ID NO: 49741 - protein, 11 aa, Homo sapiens
  Table A; Target 49741; HLA-A*03:02; MYH4; ENSG00000264424; TAA
HTQNTSLINTK

SEQ ID NO: 49742 - protein, 11 aa, Homo sapiens
  Table A; Target 49742; HLA-A*11:01; MYH4; ENSG00000264424; TAA
HTQNTSLINTK

SEQ ID NO: 49743 - protein, 11 aa, Homo sapiens
  Table A; Target 49743; HLA-A*31:01; MYH4; ENSG00000264424; TAA
HTQNTSLINTK

SEQ ID NO: 49744 - protein, 11 aa, Homo sapiens
  Table A; Target 49744; HLA-A*33:01; MYH4; ENSG00000264424; TAA
HTQNTSLINTK

SEQ ID NO: 49745 - protein, 11 aa, Homo sapiens
  Table A; Target 49745; HLA-A*33:03; MYH4; ENSG00000264424; TAA
HTQNTSLINTK

SEQ ID NO: 49746 - protein, 11 aa, Homo sapiens
  Table A; Target 49746; HLA-A*68:01; MYH4; ENSG00000264424; TAA
HTQNTSLINTK

SEQ ID NO: 49747 - protein, 11 aa, Homo sapiens
  Table A; Target 49747; HLA-A*68:02; MYH4; ENSG00000264424; TAA
HTQNTSLINTK

SEQ ID NO: 49748 - protein, 11 aa, Homo sapiens
  Table A; Target 49748; HLA-B*27:02; MYH4; ENSG00000264424; TAA
HTQNTSLINTK

SEQ ID NO: 49749 - protein, 11 aa, Homo sapiens
  Table A; Target 49749; HLA-B*27:05; MYH4; ENSG00000264424; TAA
HTQNTSLINTK

SEQ ID NO: 49750 - protein, 11 aa, Homo sapiens
  Table A; Target 49750; HLA-C*06:02; MYH4; ENSG00000264424; TAA
HTQNTSLINTK

SEQ ID NO: 49751 - protein, 11 aa, Homo sapiens
  Table A; Target 49751; HLA-C*07:06; MYH4; ENSG00000264424; TAA
HTQNTSLINTK

SEQ ID NO: 49752 - protein, 8 aa, Homo sapiens
  Table A; Target 49752; HLA-A*03:02; MYH4; ENSG00000264424; TAA
HVEAVNSK

SEQ ID NO: 49753 - protein, 8 aa, Homo sapiens
  Table A; Target 49753; HLA-B*15:03; MYH4; ENSG00000264424; TAA
HYAGTVDY

SEQ ID NO: 49754 - protein, 8 aa, Homo sapiens
  Table A; Target 49754; HLA-C*14:02; MYH4; ENSG00000264424; TAA
HYAGTVDY

SEQ ID NO: 49755 - protein, 10 aa, Homo sapiens
  Table A; Target 49755; HLA-A*23:01; MYH4; ENSG00000264424; TAA
HYAGTVDYNI

SEQ ID NO: 49756 - protein, 10 aa, Homo sapiens
  Table A; Target 49756; HLA-A*24:02; MYH4; ENSG00000264424; TAA
HYAGTVDYNI

SEQ ID NO: 49757 - protein, 10 aa, Homo sapiens
  Table A; Target 49757; HLA-C*06:02; MYH4; ENSG00000264424; TAA
HYAGTVDYNI

SEQ ID NO: 49758 - protein, 11 aa, Homo sapiens
  Table A; Target 49758; HLA-C*03:03; MYH4; ENSG00000264424; TAA
IAEGGKHIHEL

SEQ ID NO: 49759 - protein, 8 aa, Homo sapiens
  Table A; Target 49759; HLA-C*05:01; MYH4; ENSG00000264424; TAA
IAEKDEEL

SEQ ID NO: 49760 - protein, 11 aa, Homo sapiens
  Table A; Target 49760; HLA-C*05:01; MYH4; ENSG00000264424; TAA
IAEKDEELDQL

SEQ ID NO: 49761 - protein, 8 aa, Homo sapiens
  Table A; Target 49761; HLA-A*03:02; MYH4; ENSG00000264424; TAA
IAESQVNK

SEQ ID NO: 49762 - protein, 8 aa, Homo sapiens
  Table A; Target 49762; HLA-B*27:02; MYH4; ENSG00000264424; TAA
IAESQVNK

SEQ ID NO: 49763 - protein, 9 aa, Homo sapiens
  Table A; Target 49763; HLA-A*02:07; MYH4; ENSG00000264424; TAA
IAESQVNKL

SEQ ID NO: 49764 - protein, 9 aa, Homo sapiens
  Table A; Target 49764; HLA-A*23:01; MYH4; ENSG00000264424; TAA
IAESQVNKL

SEQ ID NO: 49765 - protein, 9 aa, Homo sapiens
  Table A; Target 49765; HLA-A*24:02; MYH4; ENSG00000264424; TAA
IAESQVNKL

SEQ ID NO: 49766 - protein, 9 aa, Homo sapiens
  Table A; Target 49766; HLA-A*68:02; MYH4; ENSG00000264424; TAA
IAESQVNKL

SEQ ID NO: 49767 - protein, 9 aa, Homo sapiens
  Table A; Target 49767; HLA-B*27:05; MYH4; ENSG00000264424; TAA
IAESQVNKL

SEQ ID NO: 49768 - protein, 9 aa, Homo sapiens
  Table A; Target 49768; HLA-B*35:01; MYH4; ENSG00000264424; TAA
IAESQVNKL

SEQ ID NO: 49769 - protein, 9 aa, Homo sapiens
  Table A; Target 49769; HLA-B*35:03; MYH4; ENSG00000264424; TAA
IAESQVNKL

SEQ ID NO: 49770 - protein, 9 aa, Homo sapiens
  Table A; Target 49770; HLA-B*38:01; MYH4; ENSG00000264424; TAA
IAESQVNKL

SEQ ID NO: 49771 - protein, 9 aa, Homo sapiens
  Table A; Target 49771; HLA-B*39:01; MYH4; ENSG00000264424; TAA
IAESQVNKL

SEQ ID NO: 49772 - protein, 9 aa, Homo sapiens
  Table A; Target 49772; HLA-B*40:01; MYH4; ENSG00000264424; TAA
IAESQVNKL

SEQ ID NO: 49773 - protein, 9 aa, Homo sapiens
  Table A; Target 49773; HLA-B*51:01; MYH4; ENSG00000264424; TAA
IAESQVNKL

SEQ ID NO: 49774 - protein, 9 aa, Homo sapiens
  Table A; Target 49774; HLA-B*55:01; MYH4; ENSG00000264424; TAA
IAESQVNKL

SEQ ID NO: 49775 - protein, 9 aa, Homo sapiens
  Table A; Target 49775; HLA-B*58:01; MYH4; ENSG00000264424; TAA
IAESQVNKL

SEQ ID NO: 49776 - protein, 9 aa, Homo sapiens
  Table A; Target 49776; HLA-C*01:02; MYH4; ENSG00000264424; TAA
IAESQVNKL

SEQ ID NO: 49777 - protein, 9 aa, Homo sapiens
  Table A; Target 49777; HLA-C*02:02; MYH4; ENSG00000264424; TAA
IAESQVNKL

SEQ ID NO: 49778 - protein, 9 aa, Homo sapiens
  Table A; Target 49778; HLA-C*03:03; MYH4; ENSG00000264424; TAA
IAESQVNKL

SEQ ID NO: 49779 - protein, 9 aa, Homo sapiens
  Table A; Target 49779; HLA-C*03:04; MYH4; ENSG00000264424; TAA
IAESQVNKL

SEQ ID NO: 49780 - protein, 9 aa, Homo sapiens
  Table A; Target 49780; HLA-C*04:01; MYH4; ENSG00000264424; TAA
IAESQVNKL

SEQ ID NO: 49781 - protein, 9 aa, Homo sapiens
  Table A; Target 49781; HLA-C*05:01; MYH4; ENSG00000264424; TAA
IAESQVNKL

SEQ ID NO: 49782 - protein, 9 aa, Homo sapiens
  Table A; Target 49782; HLA-C*07:04; MYH4; ENSG00000264424; TAA
IAESQVNKL

SEQ ID NO: 49783 - protein, 9 aa, Homo sapiens
  Table A; Target 49783; HLA-C*12:03; MYH4; ENSG00000264424; TAA
IAESQVNKL

SEQ ID NO: 49784 - protein, 9 aa, Homo sapiens
  Table A; Target 49784; HLA-C*14:02; MYH4; ENSG00000264424; TAA
IAESQVNKL

SEQ ID NO: 49785 - protein, 9 aa, Homo sapiens
  Table A; Target 49785; HLA-C*16:01; MYH4; ENSG00000264424; TAA
IAESQVNKL

SEQ ID NO: 49786 - protein, 9 aa, Homo sapiens
  Table A; Target 49786; HLA-C*16:02; MYH4; ENSG00000264424; TAA
IAESQVNKL

SEQ ID NO: 49787 - protein, 10 aa, Homo sapiens
  Table A; Target 49787; HLA-A*33:03; MYH4; ENSG00000264424; TAA
IAESQVNKLR

SEQ ID NO: 49788 - protein, 10 aa, Homo sapiens
  Table A; Target 49788; HLA-A*68:01; MYH4; ENSG00000264424; TAA
IAESQVNKLR

SEQ ID NO: 49789 - protein, 10 aa, Homo sapiens
  Table A; Target 49789; HLA-C*07:06; MYH4; ENSG00000264424; TAA
IAESQVNKLR

SEQ ID NO: 49790 - protein, 10 aa, Homo sapiens
  Table A; Target 49790; HLA-B*57:01; MYH4; ENSG00000264424; TAA
IALDKKQRNF

SEQ ID NO: 49791 - protein, 8 aa, Homo sapiens
  Table A; Target 49791; HLA-B*58:01; MYH4; ENSG00000264424; TAA
IAVTGEKK

SEQ ID NO: 49792 - protein, 8 aa, Homo sapiens
  Table A; Target 49792; HLA-C*05:01; MYH4; ENSG00000264424; TAA
IAVTGEKK

SEQ ID NO: 49793 - protein, 10 aa, Homo sapiens
  Table A; Target 49793; HLA-B*27:02; MYH4; ENSG00000264424; TAA
IDDLELTLAK

SEQ ID NO: 49794 - protein, 8 aa, Homo sapiens
  Table A; Target 49794; HLA-C*05:01; MYH4; ENSG00000264424; TAA
IDDQEELM

SEQ ID NO: 49795 - protein, 8 aa, Homo sapiens
  Table A; Target 49795; HLA-B*37:01; MYH4; ENSG00000264424; TAA
IDHTQYKF

SEQ ID NO: 49796 - protein, 8 aa, Homo sapiens
  Table A; Target 49796; HLA-B*40:02; MYH4; ENSG00000264424; TAA
IDHTQYKF

SEQ ID NO: 49797 - protein, 8 aa, Homo sapiens
  Table A; Target 49797; HLA-B*37:01; MYH4; ENSG00000264424; TAA
IDSLQRVK

SEQ ID NO: 49798 - protein, 8 aa, Homo sapiens
  Table A; Target 49798; HLA-C*06:02; MYH4; ENSG00000264424; TAA
IDSLQRVK

SEQ ID NO: 49799 - protein, 8 aa, Homo sapiens
  Table A; Target 49799; HLA-C*16:01; MYH4; ENSG00000264424; TAA
IDSLQRVK

SEQ ID NO: 49800 - protein, 9 aa, Homo sapiens
  Table A; Target 49800; HLA-A*30:01; MYH4; ENSG00000264424; TAA
IDVERSNAA

SEQ ID NO: 49801 - protein, 9 aa, Homo sapiens
  Table A; Target 49801; HLA-B*37:01; MYH4; ENSG00000264424; TAA
IDVERSNAA

SEQ ID NO: 49802 - protein, 9 aa, Homo sapiens
  Table A; Target 49802; HLA-B*40:02; MYH4; ENSG00000264424; TAA
IDVERSNAA

SEQ ID NO: 49803 - protein, 9 aa, Homo sapiens
  Table A; Target 49803; HLA-B*54:01; MYH4; ENSG00000264424; TAA
IDVERSNAA

SEQ ID NO: 49804 - protein, 9 aa, Homo sapiens
  Table A; Target 49804; HLA-B*37:01; MYH4; ENSG00000264424; TAA
IEAERASRA

SEQ ID NO: 49805 - protein, 9 aa, Homo sapiens
  Table A; Target 49805; HLA-B*49:01; MYH4; ENSG00000264424; TAA
IEAERASRA

SEQ ID NO: 49806 - protein, 8 aa, Homo sapiens
  Table A; Target 49806; HLA-B*18:01; MYH4; ENSG00000264424; TAA
IEAQNKPF

SEQ ID NO: 49807 - protein, 8 aa, Homo sapiens
  Table A; Target 49807; HLA-B*37:01; MYH4; ENSG00000264424; TAA
IEAQNKPF

SEQ ID NO: 49808 - protein, 9 aa, Homo sapiens
  Table A; Target 49808; HLA-A*30:01; MYH4; ENSG00000264424; TAA
IEDEQALAI

SEQ ID NO: 49809 - protein, 9 aa, Homo sapiens
  Table A; Target 49809; HLA-B*13:02; MYH4; ENSG00000264424; TAA
IEDEQALAI

SEQ ID NO: 49810 - protein, 9 aa, Homo sapiens
  Table A; Target 49810; HLA-B*18:01; MYH4; ENSG00000264424; TAA
IEDEQALAI

SEQ ID NO: 49811 - protein, 9 aa, Homo sapiens
  Table A; Target 49811; HLA-B*38:01; MYH4; ENSG00000264424; TAA
IEDEQALAI

SEQ ID NO: 49812 - protein, 9 aa, Homo sapiens
  Table A; Target 49812; HLA-B*40:01; MYH4; ENSG00000264424; TAA
IEDEQALAI

SEQ ID NO: 49813 - protein, 9 aa, Homo sapiens
  Table A; Target 49813; HLA-B*44:02; MYH4; ENSG00000264424; TAA
IEDEQALAI

SEQ ID NO: 49814 - protein, 9 aa, Homo sapiens
  Table A; Target 49814; HLA-B*44:03; MYH4; ENSG00000264424; TAA
IEDEQALAI

SEQ ID NO: 49815 - protein, 9 aa, Homo sapiens
  Table A; Target 49815; HLA-B*49:01; MYH4; ENSG00000264424; TAA
IEDEQALAI

SEQ ID NO: 49816 - protein, 9 aa, Homo sapiens
  Table A; Target 49816; HLA-C*05:01; MYH4; ENSG00000264424; TAA
IEDEQALAI

SEQ ID NO: 49817 - protein, 11 aa, Homo sapiens
  Table A; Target 49817; HLA-A*30:01; MYH4; ENSG00000264424; TAA
IEDEQALAIQL

SEQ ID NO: 49818 - protein, 11 aa, Homo sapiens
  Table A; Target 49818; HLA-B*40:01; MYH4; ENSG00000264424; TAA
IEDEQALAIQL

SEQ ID NO: 49819 - protein, 11 aa, Homo sapiens
  Table A; Target 49819; HLA-B*49:01; MYH4; ENSG00000264424; TAA
IEDEQALAIQL

SEQ ID NO: 49820 - protein, 9 aa, Homo sapiens
  Table A; Target 49820; HLA-B*18:01; MYH4; ENSG00000264424; TAA
IEDMAMMTH

SEQ ID NO: 49821 - protein, 10 aa, Homo sapiens
  Table A; Target 49821; HLA-A*30:01; MYH4; ENSG00000264424; TAA
IEDMAMMTHL

SEQ ID NO: 49822 - protein, 10 aa, Homo sapiens
  Table A; Target 49822; HLA-B*40:01; MYH4; ENSG00000264424; TAA
IEDMAMMTHL

SEQ ID NO: 49823 - protein, 10 aa, Homo sapiens
  Table A; Target 49823; HLA-B*40:02; MYH4; ENSG00000264424; TAA
IEDMAMMTHL

SEQ ID NO: 49824 - protein, 10 aa, Homo sapiens
  Table A; Target 49824; HLA-B*49:01; MYH4; ENSG00000264424; TAA
IEDMAMMTHL

SEQ ID NO: 49825 - protein, 8 aa, Homo sapiens
  Table A; Target 49825; HLA-A*30:01; MYH4; ENSG00000264424; TAA
IEIDHTQY

SEQ ID NO: 49826 - protein, 8 aa, Homo sapiens
  Table A; Target 49826; HLA-A*32:01; MYH4; ENSG00000264424; TAA
IEIDHTQY

SEQ ID NO: 49827 - protein, 8 aa, Homo sapiens
  Table A; Target 49827; HLA-B*15:01; MYH4; ENSG00000264424; TAA
IEIDHTQY

SEQ ID NO: 49828 - protein, 8 aa, Homo sapiens
  Table A; Target 49828; HLA-B*15:03; MYH4; ENSG00000264424; TAA
IEIDHTQY

SEQ ID NO: 49829 - protein, 8 aa, Homo sapiens
  Table A; Target 49829; HLA-B*18:01; MYH4; ENSG00000264424; TAA
IEIDHTQY

SEQ ID NO: 49830 - protein, 8 aa, Homo sapiens
  Table A; Target 49830; HLA-B*27:02; MYH4; ENSG00000264424; TAA
IEIDHTQY

SEQ ID NO: 49831 - protein, 8 aa, Homo sapiens
  Table A; Target 49831; HLA-B*37:01; MYH4; ENSG00000264424; TAA
IEIDHTQY

SEQ ID NO: 49832 - protein, 8 aa, Homo sapiens
  Table A; Target 49832; HLA-B*44:02; MYH4; ENSG00000264424; TAA
IEIDHTQY

SEQ ID NO: 49833 - protein, 8 aa, Homo sapiens
  Table A; Target 49833; HLA-B*44:03; MYH4; ENSG00000264424; TAA
IEIDHTQY

SEQ ID NO: 49834 - protein, 8 aa, Homo sapiens
  Table A; Target 49834; HLA-B*46:01; MYH4; ENSG00000264424; TAA
IEIDHTQY

SEQ ID NO: 49835 - protein, 8 aa, Homo sapiens
  Table A; Target 49835; HLA-B*49:01; MYH4; ENSG00000264424; TAA
IEIDHTQY

SEQ ID NO: 49836 - protein, 8 aa, Homo sapiens
  Table A; Target 49836; HLA-C*02:02; MYH4; ENSG00000264424; TAA
IEIDHTQY

SEQ ID NO: 49837 - protein, 8 aa, Homo sapiens
  Table A; Target 49837; HLA-C*07:01; MYH4; ENSG00000264424; TAA
IEIDHTQY

SEQ ID NO: 49838 - protein, 8 aa, Homo sapiens
  Table A; Target 49838; HLA-C*14:02; MYH4; ENSG00000264424; TAA
IEIDHTQY

SEQ ID NO: 49839 - protein, 8 aa, Homo sapiens
  Table A; Target 49839; HLA-C*16:04; MYH4; ENSG00000264424; TAA
IEIDHTQY

SEQ ID NO: 49840 - protein, 9 aa, Homo sapiens
  Table A; Target 49840; HLA-A*11:01; MYH4; ENSG00000264424; TAA
IEIDHTQYK

SEQ ID NO: 49841 - protein, 9 aa, Homo sapiens
  Table A; Target 49841; HLA-B*27:05; MYH4; ENSG00000264424; TAA
IEIDHTQYK

SEQ ID NO: 49842 - protein, 9 aa, Homo sapiens
  Table A; Target 49842; HLA-B*44:02; MYH4; ENSG00000264424; TAA
IEIDHTQYK

SEQ ID NO: 49843 - protein, 9 aa, Homo sapiens
  Table A; Target 49843; HLA-B*44:03; MYH4; ENSG00000264424; TAA
IEIDHTQYK

SEQ ID NO: 49844 - protein, 9 aa, Homo sapiens
  Table A; Target 49844; HLA-B*49:01; MYH4; ENSG00000264424; TAA
IEIDHTQYK

SEQ ID NO: 49845 - protein, 10 aa, Homo sapiens
  Table A; Target 49845; HLA-A*23:01; MYH4; ENSG00000264424; TAA
IEIDHTQYKF

SEQ ID NO: 49846 - protein, 10 aa, Homo sapiens
  Table A; Target 49846; HLA-A*24:02; MYH4; ENSG00000264424; TAA
IEIDHTQYKF

SEQ ID NO: 49847 - protein, 10 aa, Homo sapiens
  Table A; Target 49847; HLA-A*30:01; MYH4; ENSG00000264424; TAA
IEIDHTQYKF

SEQ ID NO: 49848 - protein, 10 aa, Homo sapiens
  Table A; Target 49848; HLA-B*18:01; MYH4; ENSG00000264424; TAA
IEIDHTQYKF

SEQ ID NO: 49849 - protein, 10 aa, Homo sapiens
  Table A; Target 49849; HLA-B*44:02; MYH4; ENSG00000264424; TAA
IEIDHTQYKF

SEQ ID NO: 49850 - protein, 10 aa, Homo sapiens
  Table A; Target 49850; HLA-B*44:03; MYH4; ENSG00000264424; TAA
IEIDHTQYKF

SEQ ID NO: 49851 - protein, 10 aa, Homo sapiens
  Table A; Target 49851; HLA-B*57:01; MYH4; ENSG00000264424; TAA
IEIDHTQYKF

SEQ ID NO: 49852 - protein, 10 aa, Homo sapiens
  Table A; Target 49852; HLA-C*16:04; MYH4; ENSG00000264424; TAA
IEIDHTQYKF

SEQ ID NO: 49853 - protein, 8 aa, Homo sapiens
  Table A; Target 49853; HLA-B*18:01; MYH4; ENSG00000264424; TAA
IEKPMGIF

SEQ ID NO: 49854 - protein, 8 aa, Homo sapiens
  Table A; Target 49854; HLA-B*40:02; MYH4; ENSG00000264424; TAA
IEKPMGIF

SEQ ID NO: 49855 - protein, 10 aa, Homo sapiens
  Table A; Target 49855; HLA-A*30:01; MYH4; ENSG00000264424; TAA
IEKPMGIFSI

SEQ ID NO: 49856 - protein, 10 aa, Homo sapiens
  Table A; Target 49856; HLA-B*49:01; MYH4; ENSG00000264424; TAA
IEKPMGIFSI

SEQ ID NO: 49857 - protein, 8 aa, Homo sapiens
  Table A; Target 49857; HLA-B*18:01; MYH4; ENSG00000264424; TAA
IELIEKPM

SEQ ID NO: 49858 - protein, 10 aa, Homo sapiens
  Table A; Target 49858; HLA-B*49:01; MYH4; ENSG00000264424; TAA
IELIEKPMGI

SEQ ID NO: 49859 - protein, 8 aa, Homo sapiens
  Table A; Target 49859; HLA-B*18:01; MYH4; ENSG00000264424; TAA
IEMLLITT

SEQ ID NO: 49860 - protein, 9 aa, Homo sapiens
  Table A; Target 49860; HLA-B*18:01; MYH4; ENSG00000264424; TAA
IEMLLITTN

SEQ ID NO: 49861 - protein, 9 aa, Homo sapiens
  Table A; Target 49861; HLA-B*49:01; MYH4; ENSG00000264424; TAA
IEMLLITTN

SEQ ID NO: 49862 - protein, 11 aa, Homo sapiens
  Table A; Target 49862; HLA-B*18:01; MYH4; ENSG00000264424; TAA
IEMLLITTNPY

SEQ ID NO: 49863 - protein, 11 aa, Homo sapiens
  Table A; Target 49863; HLA-B*44:02; MYH4; ENSG00000264424; TAA
IEMLLITTNPY

SEQ ID NO: 49864 - protein, 8 aa, Homo sapiens
  Table A; Target 49864; HLA-B*27:02; MYH4; ENSG00000264424; TAA
IETYLLEK

SEQ ID NO: 49865 - protein, 8 aa, Homo sapiens
  Table A; Target 49865; HLA-B*18:01; MYH4; ENSG00000264424; TAA
IEWEFIDF

SEQ ID NO: 49866 - protein, 10 aa, Homo sapiens
  Table A; Target 49866; HLA-B*35:03; MYH4; ENSG00000264424; TAA
IFDFNSLEQL

SEQ ID NO: 49867 - protein, 10 aa, Homo sapiens
  Table A; Target 49867; HLA-C*04:01; MYH4; ENSG00000264424; TAA
IFDFNSLEQL

SEQ ID NO: 49868 - protein, 8 aa, Homo sapiens
  Table A; Target 49868; HLA-C*14:02; MYH4; ENSG00000264424; TAA
IFGEAAPF

SEQ ID NO: 49869 - protein, 9 aa, Homo sapiens
  Table A; Target 49869; HLA-A*23:01; MYH4; ENSG00000264424; TAA
IFGEAAPFL

SEQ ID NO: 49870 - protein, 9 aa, Homo sapiens
  Table A; Target 49870; HLA-A*24:02; MYH4; ENSG00000264424; TAA
IFGEAAPFL

SEQ ID NO: 49871 - protein, 9 aa, Homo sapiens
  Table A; Target 49871; HLA-A*29:02; MYH4; ENSG00000264424; TAA
IFGEAAPFL

SEQ ID NO: 49872 - protein, 9 aa, Homo sapiens
  Table A; Target 49872; HLA-C*01:02; MYH4; ENSG00000264424; TAA
IFGEAAPFL

SEQ ID NO: 49873 - protein, 9 aa, Homo sapiens
  Table A; Target 49873; HLA-C*04:01; MYH4; ENSG00000264424; TAA
IFGEAAPFL

SEQ ID NO: 49874 - protein, 9 aa, Homo sapiens
  Table A; Target 49874; HLA-C*14:02; MYH4; ENSG00000264424; TAA
IFGEAAPFL

SEQ ID NO: 49875 - protein, 9 aa, Homo sapiens
  Table A; Target 49875; HLA-A*29:02; MYH4; ENSG00000264424; TAA
IFSISDNAY

SEQ ID NO: 49876 - protein, 9 aa, Homo sapiens
  Table A; Target 49876; HLA-A*30:02; MYH4; ENSG00000264424; TAA
IFSISDNAY

SEQ ID NO: 49877 - protein, 9 aa, Homo sapiens
  Table A; Target 49877; HLA-C*14:02; MYH4; ENSG00000264424; TAA
IFSISDNAY

SEQ ID NO: 49878 - protein, 11 aa, Homo sapiens
  Table A; Target 49878; HLA-A*23:01; MYH4; ENSG00000264424; TAA
IFSISDNAYQF

SEQ ID NO: 49879 - protein, 11 aa, Homo sapiens
  Table A; Target 49879; HLA-A*24:02; MYH4; ENSG00000264424; TAA
IFSISDNAYQF

SEQ ID NO: 49880 - protein, 9 aa, Homo sapiens
  Table A; Target 49880; HLA-A*33:03; MYH4; ENSG00000264424; TAA
IFYQILSNK

SEQ ID NO: 49881 - protein, 9 aa, Homo sapiens
  Table A; Target 49881; HLA-B*38:01; MYH4; ENSG00000264424; TAA
IHFGATGKL

SEQ ID NO: 49882 - protein, 9 aa, Homo sapiens
  Table A; Target 49882; HLA-B*39:01; MYH4; ENSG00000264424; TAA
IHFGATGKL

SEQ ID NO: 49883 - protein, 8 aa, Homo sapiens
  Table A; Target 49883; HLA-A*23:01; MYH4; ENSG00000264424; TAA
IISANPLL

SEQ ID NO: 49884 - protein, 9 aa, Homo sapiens
  Table A; Target 49884; HLA-A*03:02; MYH4; ENSG00000264424; TAA
ILGFTADEK

SEQ ID NO: 49885 - protein, 9 aa, Homo sapiens
  Table A; Target 49885; HLA-B*27:02; MYH4; ENSG00000264424; TAA
ILGFTADEK

SEQ ID NO: 49886 - protein, 9 aa, Homo sapiens
  Table A; Target 49886; HLA-A*02:01; MYH4; ENSG00000264424; TAA
ILITGESGA

SEQ ID NO: 49887 - protein, 9 aa, Homo sapiens
  Table A; Target 49887; HLA-A*02:03; MYH4; ENSG00000264424; TAA
ILITGESGA

SEQ ID NO: 49888 - protein, 11 aa, Homo sapiens
  Table A; Target 49888; HLA-A*02:03; MYH4; ENSG00000264424; TAA
ILITGESGAGK

SEQ ID NO: 49889 - protein, 11 aa, Homo sapiens
  Table A; Target 49889; HLA-A*03:01; MYH4; ENSG00000264424; TAA
ILITGESGAGK

SEQ ID NO: 49890 - protein, 11 aa, Homo sapiens
  Table A; Target 49890; HLA-A*03:02; MYH4; ENSG00000264424; TAA
ILITGESGAGK

SEQ ID NO: 49891 - protein, 11 aa, Homo sapiens
  Table A; Target 49891; HLA-A*11:01; MYH4; ENSG00000264424; TAA
ILITGESGAGK

SEQ ID NO: 49892 - protein, 11 aa, Homo sapiens
  Table A; Target 49892; HLA-A*31:01; MYH4; ENSG00000264424; TAA
ILITGESGAGK

SEQ ID NO: 49893 - protein, 11 aa, Homo sapiens
  Table A; Target 49893; HLA-A*68:01; MYH4; ENSG00000264424; TAA
ILITGESGAGK

SEQ ID NO: 49894 - protein, 11 aa, Homo sapiens
  Table A; Target 49894; HLA-B*27:02; MYH4; ENSG00000264424; TAA
ILITGESGAGK

SEQ ID NO: 49895 - protein, 11 aa, Homo sapiens
  Table A; Target 49895; HLA-B*27:05; MYH4; ENSG00000264424; TAA
ILITGESGAGK

SEQ ID NO: 49896 - protein, 11 aa, Homo sapiens
  Table A; Target 49896; HLA-C*01:02; MYH4; ENSG00000264424; TAA
ILITGESGAGK

SEQ ID NO: 49897 - protein, 9 aa, Homo sapiens
  Table A; Target 49897; HLA-A*02:01; MYH4; ENSG00000264424; TAA
ILKDTQLHL

SEQ ID NO: 49898 - protein, 9 aa, Homo sapiens
  Table A; Target 49898; HLA-A*02:03; MYH4; ENSG00000264424; TAA
ILKDTQLHL

SEQ ID NO: 49899 - protein, 9 aa, Homo sapiens
  Table A; Target 49899; HLA-A*02:04; MYH4; ENSG00000264424; TAA
ILKDTQLHL

SEQ ID NO: 49900 - protein, 9 aa, Homo sapiens
  Table A; Target 49900; HLA-A*02:07; MYH4; ENSG00000264424; TAA
ILKDTQLHL

SEQ ID NO: 49901 - protein, 9 aa, Homo sapiens
  Table A; Target 49901; HLA-A*03:01; MYH4; ENSG00000264424; TAA
ILKDTQLHL

SEQ ID NO: 49902 - protein, 9 aa, Homo sapiens
  Table A; Target 49902; HLA-A*23:01; MYH4; ENSG00000264424; TAA
ILKDTQLHL

SEQ ID NO: 49903 - protein, 9 aa, Homo sapiens
  Table A; Target 49903; HLA-A*29:02; MYH4; ENSG00000264424; TAA
ILKDTQLHL

SEQ ID NO: 49904 - protein, 9 aa, Homo sapiens
  Table A; Target 49904; HLA-B*13:02; MYH4; ENSG00000264424; TAA
ILKDTQLHL

SEQ ID NO: 49905 - protein, 11 aa, Homo sapiens
  Table A; Target 49905; HLA-A*02:03; MYH4; ENSG00000264424; TAA
ILRIQLELNQV

SEQ ID NO: 49906 - protein, 9 aa, Homo sapiens
  Table A; Target 49906; HLA-A*02:01; MYH4; ENSG00000264424; TAA
ILSNKKPEL

SEQ ID NO: 49907 - protein, 9 aa, Homo sapiens
  Table A; Target 49907; HLA-A*02:04; MYH4; ENSG00000264424; TAA
ILSNKKPEL

SEQ ID NO: 49908 - protein, 9 aa, Homo sapiens
  Table A; Target 49908; HLA-C*16:01; MYH4; ENSG00000264424; TAA
ILSNKKPEL

SEQ ID NO: 49909 - protein, 9 aa, Homo sapiens
  Table A; Target 49909; HLA-A*03:01; MYH4; ENSG00000264424; TAA
ILYADFKQR

SEQ ID NO: 49910 - protein, 9 aa, Homo sapiens
  Table A; Target 49910; HLA-A*31:01; MYH4; ENSG00000264424; TAA
ILYADFKQR

SEQ ID NO: 49911 - protein, 9 aa, Homo sapiens
  Table A; Target 49911; HLA-A*33:01; MYH4; ENSG00000264424; TAA
ILYADFKQR

SEQ ID NO: 49912 - protein, 10 aa, Homo sapiens
  Table A; Target 49912; HLA-A*01:01; MYH4; ENSG00000264424; TAA
ILYADFKQRY

SEQ ID NO: 49913 - protein, 10 aa, Homo sapiens
  Table A; Target 49913; HLA-A*29:02; MYH4; ENSG00000264424; TAA
ILYADFKQRY

SEQ ID NO: 49914 - protein, 10 aa, Homo sapiens
  Table A; Target 49914; HLA-A*30:02; MYH4; ENSG00000264424; TAA
ILYADFKQRY

SEQ ID NO: 49915 - protein, 11 aa, Homo sapiens
  Table A; Target 49915; HLA-A*03:01; MYH4; ENSG00000264424; TAA
ILYADFKQRYK

SEQ ID NO: 49916 - protein, 10 aa, Homo sapiens
  Table A; Target 49916; HLA-A*68:01; MYH4; ENSG00000264424; TAA
INAELTAKKR

SEQ ID NO: 49917 - protein, 8 aa, Homo sapiens
  Table A; Target 49917; HLA-C*04:01; MYH4; ENSG00000264424; TAA
INDLASNM

SEQ ID NO: 49918 - protein, 8 aa, Homo sapiens
  Table A; Target 49918; HLA-C*05:01; MYH4; ENSG00000264424; TAA
INDLASNM

SEQ ID NO: 49919 - protein, 8 aa, Homo sapiens
  Table A; Target 49919; HLA-B*27:02; MYH4; ENSG00000264424; TAA
INELSAQK

SEQ ID NO: 49920 - protein, 8 aa, Homo sapiens
  Table A; Target 49920; HLA-C*06:02; MYH4; ENSG00000264424; TAA
INFTNEKL

SEQ ID NO: 49921 - protein, 8 aa, Homo sapiens
  Table A; Target 49921; HLA-C*07:01; MYH4; ENSG00000264424; TAA
INFTNEKL

SEQ ID NO: 49922 - protein, 11 aa, Homo sapiens
  Table A; Target 49922; HLA-A*23:01; MYH4; ENSG00000264424; TAA
INFTNEKLQQF

SEQ ID NO: 49923 - protein, 11 aa, Homo sapiens
  Table A; Target 49923; HLA-B*57:01; MYH4; ENSG00000264424; TAA
INFTNEKLQQF

SEQ ID NO: 49924 - protein, 8 aa, Homo sapiens
  Table A; Target 49924; HLA-B*27:02; MYH4; ENSG00000264424; TAA
INQQLDTK

SEQ ID NO: 49925 - protein, 11 aa, Homo sapiens
  Table A; Target 49925; HLA-A*31:01; MYH4; ENSG00000264424; TAA
INQQLDTKQPR

SEQ ID NO: 49926 - protein, 11 aa, Homo sapiens
  Table A; Target 49926; HLA-A*33:01; MYH4; ENSG00000264424; TAA
INQQLDTKQPR

SEQ ID NO: 49927 - protein, 11 aa, Homo sapiens
  Table A; Target 49927; HLA-A*33:03; MYH4; ENSG00000264424; TAA
INQQLDTKQPR

SEQ ID NO: 49928 - protein, 10 aa, Homo sapiens
  Table A; Target 49928; HLA-B*27:02; MYH4; ENSG00000264424; TAA
IPEGQFIDSK

SEQ ID NO: 49929 - protein, 9 aa, Homo sapiens
  Table A; Target 49929; HLA-B*55:01; MYH4; ENSG00000264424; TAA
IPNETKTPG

SEQ ID NO: 49930 - protein, 9 aa, Homo sapiens
  Table A; Target 49930; HLA-B*56:01; MYH4; ENSG00000264424; TAA
IPNETKTPG

SEQ ID NO: 49931 - protein, 10 aa, Homo sapiens
  Table A; Target 49931; HLA-B*54:01; MYH4; ENSG00000264424; TAA
IPNETKTPGA

SEQ ID NO: 49932 - protein, 10 aa, Homo sapiens
  Table A; Target 49932; HLA-B*55:01; MYH4; ENSG00000264424; TAA
IPNETKTPGA

SEQ ID NO: 49933 - protein, 10 aa, Homo sapiens
  Table A; Target 49933; HLA-B*56:01; MYH4; ENSG00000264424; TAA
IPNETKTPGA

SEQ ID NO: 49934 - protein, 11 aa, Homo sapiens
  Table A; Target 49934; HLA-B*07:02; MYH4; ENSG00000264424; TAA
IPNETKTPGAM

SEQ ID NO: 49935 - protein, 11 aa, Homo sapiens
  Table A; Target 49935; HLA-B*35:01; MYH4; ENSG00000264424; TAA
IPNETKTPGAM

SEQ ID NO: 49936 - protein, 11 aa, Homo sapiens
  Table A; Target 49936; HLA-B*35:03; MYH4; ENSG00000264424; TAA
IPNETKTPGAM

SEQ ID NO: 49937 - protein, 11 aa, Homo sapiens
  Table A; Target 49937; HLA-B*55:01; MYH4; ENSG00000264424; TAA
IPNETKTPGAM

SEQ ID NO: 49938 - protein, 10 aa, Homo sapiens
  Table A; Target 49938; HLA-A*02:01; MYH4; ENSG00000264424; TAA
IQLEAKIKEV

SEQ ID NO: 49939 - protein, 10 aa, Homo sapiens
  Table A; Target 49939; HLA-A*02:03; MYH4; ENSG00000264424; TAA
IQLEAKIKEV

SEQ ID NO: 49940 - protein, 8 aa, Homo sapiens
  Table A; Target 49940; HLA-A*02:01; MYH4; ENSG00000264424; TAA
IQLELNQV

SEQ ID NO: 49941 - protein, 8 aa, Homo sapiens
  Table A; Target 49941; HLA-B*13:02; MYH4; ENSG00000264424; TAA
IQLELNQV

SEQ ID NO: 49942 - protein, 8 aa, Homo sapiens
  Table A; Target 49942; HLA-C*06:02; MYH4; ENSG00000264424; TAA
IQLELNQV

SEQ ID NO: 49943 - protein, 8 aa, Homo sapiens
  Table A; Target 49943; HLA-A*31:01; MYH4; ENSG00000264424; TAA
IQLNHANR

SEQ ID NO: 49944 - protein, 9 aa, Homo sapiens
  Table A; Target 49944; HLA-A*02:01; MYH4; ENSG00000264424; TAA
IQYFATIAV

SEQ ID NO: 49945 - protein, 9 aa, Homo sapiens
  Table A; Target 49945; HLA-A*02:03; MYH4; ENSG00000264424; TAA
IQYFATIAV

SEQ ID NO: 49946 - protein, 9 aa, Homo sapiens
  Table A; Target 49946; HLA-A*30:01; MYH4; ENSG00000264424; TAA
IQYFATIAV

SEQ ID NO: 49947 - protein, 9 aa, Homo sapiens
  Table A; Target 49947; HLA-B*13:02; MYH4; ENSG00000264424; TAA
IQYFATIAV

SEQ ID NO: 49948 - protein, 9 aa, Homo sapiens
  Table A; Target 49948; HLA-B*49:01; MYH4; ENSG00000264424; TAA
IQYFATIAV

SEQ ID NO: 49949 - protein, 9 aa, Homo sapiens
  Table A; Target 49949; HLA-C*02:02; MYH4; ENSG00000264424; TAA
IQYFATIAV

SEQ ID NO: 49950 - protein, 8 aa, Homo sapiens
  Table A; Target 49950; HLA-B*15:01; MYH4; ENSG00000264424; TAA
IQYNIRAF

SEQ ID NO: 49951 - protein, 8 aa, Homo sapiens
  Table A; Target 49951; HLA-B*15:03; MYH4; ENSG00000264424; TAA
IQYNIRAF

SEQ ID NO: 49952 - protein, 9 aa, Homo sapiens
  Table A; Target 49952; HLA-B*54:01; MYH4; ENSG00000264424; TAA
ISANPLLEA

SEQ ID NO: 49953 - protein, 9 aa, Homo sapiens
  Table A; Target 49953; HLA-B*56:01; MYH4; ENSG00000264424; TAA
ISANPLLEA

SEQ ID NO: 49954 - protein, 9 aa, Homo sapiens
  Table A; Target 49954; HLA-C*03:03; MYH4; ENSG00000264424; TAA
ISANPLLEA

SEQ ID NO: 49955 - protein, 9 aa, Homo sapiens
  Table A; Target 49955; HLA-C*03:04; MYH4; ENSG00000264424; TAA
ISANPLLEA

SEQ ID NO: 49956 - protein, 10 aa, Homo sapiens
  Table A; Target 49956; HLA-A*23:01; MYH4; ENSG00000264424; TAA
ISANPLLEAF

SEQ ID NO: 49957 - protein, 10 aa, Homo sapiens
  Table A; Target 49957; HLA-B*27:02; MYH4; ENSG00000264424; TAA
ISANPLLEAF

SEQ ID NO: 49958 - protein, 10 aa, Homo sapiens
  Table A; Target 49958; HLA-B*46:01; MYH4; ENSG00000264424; TAA
ISANPLLEAF

SEQ ID NO: 49959 - protein, 10 aa, Homo sapiens
  Table A; Target 49959; HLA-B*57:01; MYH4; ENSG00000264424; TAA
ISANPLLEAF

SEQ ID NO: 49960 - protein, 10 aa, Homo sapiens
  Table A; Target 49960; HLA-B*58:01; MYH4; ENSG00000264424; TAA
ISANPLLEAF

SEQ ID NO: 49961 - protein, 8 aa, Homo sapiens
  Table A; Target 49961; HLA-A*01:01; MYH4; ENSG00000264424; TAA
ISDLTEQI

SEQ ID NO: 49962 - protein, 8 aa, Homo sapiens
  Table A; Target 49962; HLA-C*05:01; MYH4; ENSG00000264424; TAA
ISDLTEQI

SEQ ID NO: 49963 - protein, 8 aa, Homo sapiens
  Table A; Target 49963; HLA-A*23:01; MYH4; ENSG00000264424; TAA
ISDNAYQF

SEQ ID NO: 49964 - protein, 8 aa, Homo sapiens
  Table A; Target 49964; HLA-A*32:01; MYH4; ENSG00000264424; TAA
ISDNAYQF

SEQ ID NO: 49965 - protein, 8 aa, Homo sapiens
  Table A; Target 49965; HLA-B*38:01; MYH4; ENSG00000264424; TAA
ISDNAYQF

SEQ ID NO: 49966 - protein, 8 aa, Homo sapiens
  Table A; Target 49966; HLA-B*39:01; MYH4; ENSG00000264424; TAA
ISDNAYQF

SEQ ID NO: 49967 - protein, 8 aa, Homo sapiens
  Table A; Target 49967; HLA-B*58:01; MYH4; ENSG00000264424; TAA
ISDNAYQF

SEQ ID NO: 49968 - protein, 8 aa, Homo sapiens
  Table A; Target 49968; HLA-C*04:01; MYH4; ENSG00000264424; TAA
ISDNAYQF

SEQ ID NO: 49969 - protein, 8 aa, Homo sapiens
  Table A; Target 49969; HLA-C*05:01; MYH4; ENSG00000264424; TAA
ISDNAYQF

SEQ ID NO: 49970 - protein, 8 aa, Homo sapiens
  Table A; Target 49970; HLA-C*07:04; MYH4; ENSG00000264424; TAA
ISDNAYQF

SEQ ID NO: 49971 - protein, 8 aa, Homo sapiens
  Table A; Target 49971; HLA-C*16:01; MYH4; ENSG00000264424; TAA
ISDNAYQF

SEQ ID NO: 49972 - protein, 9 aa, Homo sapiens
  Table A; Target 49972; HLA-A*01:01; MYH4; ENSG00000264424; TAA
ISDNAYQFM

SEQ ID NO: 49973 - protein, 9 aa, Homo sapiens
  Table A; Target 49973; HLA-C*05:01; MYH4; ENSG00000264424; TAA
ISDNAYQFM

SEQ ID NO: 49974 - protein, 10 aa, Homo sapiens
  Table A; Target 49974; HLA-A*01:01; MYH4; ENSG00000264424; TAA
ISDNAYQFML

SEQ ID NO: 49975 - protein, 8 aa, Homo sapiens
  Table A; Target 49975; HLA-C*03:04; MYH4; ENSG00000264424; TAA
ISQIQGEM

SEQ ID NO: 49976 - protein, 8 aa, Homo sapiens
  Table A; Target 49976; HLA-C*16:01; MYH4; ENSG00000264424; TAA
ISQIQGEM

SEQ ID NO: 49977 - protein, 9 aa, Homo sapiens
  Table A; Target 49977; HLA-A*01:01; MYH4; ENSG00000264424; TAA
ITDAAMMAE

SEQ ID NO: 49978 - protein, 11 aa, Homo sapiens
  Table A; Target 49978; HLA-C*05:01; MYH4; ENSG00000264424; TAA
ITDAAMMAEEL

SEQ ID NO: 49979 - protein, 9 aa, Homo sapiens
  Table A; Target 49979; HLA-A*03:01; MYH4; ENSG00000264424; TAA
ITGESGAGK

SEQ ID NO: 49980 - protein, 9 aa, Homo sapiens
  Table A; Target 49980; HLA-A*03:02; MYH4; ENSG00000264424; TAA
ITGESGAGK

SEQ ID NO: 49981 - protein, 9 aa, Homo sapiens
  Table A; Target 49981; HLA-A*11:01; MYH4; ENSG00000264424; TAA
ITGESGAGK

SEQ ID NO: 49982 - protein, 11 aa, Homo sapiens
  Table A; Target 49982; HLA-C*16:02; MYH4; ENSG00000264424; TAA
ITGESGAGKTV

SEQ ID NO: 49983 - protein, 9 aa, Homo sapiens
  Table A; Target 49983; HLA-A*31:01; MYH4; ENSG00000264424; TAA
ITRTQAICR

SEQ ID NO: 49984 - protein, 9 aa, Homo sapiens
  Table A; Target 49984; HLA-A*33:01; MYH4; ENSG00000264424; TAA
ITRTQAICR

SEQ ID NO: 49985 - protein, 9 aa, Homo sapiens
  Table A; Target 49985; HLA-A*33:03; MYH4; ENSG00000264424; TAA
ITRTQAICR

SEQ ID NO: 49986 - protein, 9 aa, Homo sapiens
  Table A; Target 49986; HLA-A*68:01; MYH4; ENSG00000264424; TAA
ITRTQAICR

SEQ ID NO: 49987 - protein, 8 aa, Homo sapiens
  Table A; Target 49987; HLA-B*57:01; MYH4; ENSG00000264424; TAA
ITTNPYDF

SEQ ID NO: 49988 - protein, 10 aa, Homo sapiens
  Table A; Target 49988; HLA-A*29:02; MYH4; ENSG00000264424; TAA
ITTNPYDFAF

SEQ ID NO: 49989 - protein, 10 aa, Homo sapiens
  Table A; Target 49989; HLA-B*27:02; MYH4; ENSG00000264424; TAA
ITTNPYDFAF

SEQ ID NO: 49990 - protein, 10 aa, Homo sapiens
  Table A; Target 49990; HLA-B*57:01; MYH4; ENSG00000264424; TAA
ITTNPYDFAF

SEQ ID NO: 49991 - protein, 10 aa, Homo sapiens
  Table A; Target 49991; HLA-C*16:02; MYH4; ENSG00000264424; TAA
ITTNPYDFAF

SEQ ID NO: 49992 - protein, 11 aa, Homo sapiens
  Table A; Target 49992; HLA-A*03:02; MYH4; ENSG00000264424; TAA
IVQEARNAEEK

SEQ ID NO: 49993 - protein, 11 aa, Homo sapiens
  Table A; Target 49993; HLA-A*11:01; MYH4; ENSG00000264424; TAA
IVQEARNAEEK

SEQ ID NO: 49994 - protein, 8 aa, Homo sapiens
  Table A; Target 49994; HLA-A*24:02; MYH4; ENSG00000264424; TAA
IYEKMFLW

SEQ ID NO: 49995 - protein, 8 aa, Homo sapiens
  Table A; Target 49995; HLA-C*14:02; MYH4; ENSG00000264424; TAA
IYKLTGAV

SEQ ID NO: 49996 - protein, 9 aa, Homo sapiens
  Table A; Target 49996; HLA-A*23:01; MYH4; ENSG00000264424; TAA
IYKLTGAVM

SEQ ID NO: 49997 - protein, 9 aa, Homo sapiens
  Table A; Target 49997; HLA-A*24:02; MYH4; ENSG00000264424; TAA
IYKLTGAVM

SEQ ID NO: 49998 - protein, 9 aa, Homo sapiens
  Table A; Target 49998; HLA-B*15:01; MYH4; ENSG00000264424; TAA
IYKLTGAVM

SEQ ID NO: 49999 - protein, 9 aa, Homo sapiens
  Table A; Target 49999; HLA-B*15:03; MYH4; ENSG00000264424; TAA
IYKLTGAVM

SEQ ID NO: 50000 - protein, 9 aa, Homo sapiens
  Table A; Target 50000; HLA-B*46:01; MYH4; ENSG00000264424; TAA
IYKLTGAVM

SEQ ID NO: 50001 - protein, 9 aa, Homo sapiens
  Table A; Target 50001; HLA-C*01:02; MYH4; ENSG00000264424; TAA
IYKLTGAVM

SEQ ID NO: 50002 - protein, 9 aa, Homo sapiens
  Table A; Target 50002; HLA-C*04:01; MYH4; ENSG00000264424; TAA
IYKLTGAVM

SEQ ID NO: 50003 - protein, 9 aa, Homo sapiens
  Table A; Target 50003; HLA-C*14:02; MYH4; ENSG00000264424; TAA
IYKLTGAVM

SEQ ID NO: 50004 - protein, 11 aa, Homo sapiens
  Table A; Target 50004; HLA-A*24:02; MYH4; ENSG00000264424; TAA
IYKLTGAVMHY

SEQ ID NO: 50005 - protein, 11 aa, Homo sapiens
  Table A; Target 50005; HLA-A*29:02; MYH4; ENSG00000264424; TAA
IYKLTGAVMHY

SEQ ID NO: 50006 - protein, 8 aa, Homo sapiens
  Table A; Target 50006; HLA-A*23:01; MYH4; ENSG00000264424; TAA
IYTYSGLF

SEQ ID NO: 50007 - protein, 8 aa, Homo sapiens
  Table A; Target 50007; HLA-A*24:02; MYH4; ENSG00000264424; TAA
IYTYSGLF

SEQ ID NO: 50008 - protein, 8 aa, Homo sapiens
  Table A; Target 50008; HLA-C*04:01; MYH4; ENSG00000264424; TAA
IYTYSGLF

SEQ ID NO: 50009 - protein, 8 aa, Homo sapiens
  Table A; Target 50009; HLA-B*08:01; MYH4; ENSG00000264424; TAA
KAAYLTSL

SEQ ID NO: 50010 - protein, 8 aa, Homo sapiens
  Table A; Target 50010; HLA-B*46:01; MYH4; ENSG00000264424; TAA
KAAYLTSL

SEQ ID NO: 50011 - protein, 8 aa, Homo sapiens
  Table A; Target 50011; HLA-B*58:01; MYH4; ENSG00000264424; TAA
KAAYLTSL

SEQ ID NO: 50012 - protein, 8 aa, Homo sapiens
  Table A; Target 50012; HLA-C*03:03; MYH4; ENSG00000264424; TAA
KAAYLTSL

SEQ ID NO: 50013 - protein, 8 aa, Homo sapiens
  Table A; Target 50013; HLA-C*03:04; MYH4; ENSG00000264424; TAA
KAAYLTSL

SEQ ID NO: 50014 - protein, 8 aa, Homo sapiens
  Table A; Target 50014; HLA-C*16:01; MYH4; ENSG00000264424; TAA
KAAYLTSL

SEQ ID NO: 50015 - protein, 8 aa, Homo sapiens
  Table A; Target 50015; HLA-C*16:02; MYH4; ENSG00000264424; TAA
KAAYLTSL

SEQ ID NO: 50016 - protein, 11 aa, Homo sapiens
  Table A; Target 50016; HLA-B*56:01; MYH4; ENSG00000264424; TAA
KAAYLTSLNSA

SEQ ID NO: 50017 - protein, 8 aa, Homo sapiens
  Table A; Target 50017; HLA-C*16:01; MYH4; ENSG00000264424; TAA
KAELQRGM

SEQ ID NO: 50018 - protein, 8 aa, Homo sapiens
  Table A; Target 50018; HLA-B*08:01; MYH4; ENSG00000264424; TAA
KAITDAAM

SEQ ID NO: 50019 - protein, 8 aa, Homo sapiens
  Table A; Target 50019; HLA-B*35:03; MYH4; ENSG00000264424; TAA
KAITDAAM

SEQ ID NO: 50020 - protein, 8 aa, Homo sapiens
  Table A; Target 50020; HLA-C*03:03; MYH4; ENSG00000264424; TAA
KAITDAAM

SEQ ID NO: 50021 - protein, 8 aa, Homo sapiens
  Table A; Target 50021; HLA-C*03:04; MYH4; ENSG00000264424; TAA
KAITDAAM

SEQ ID NO: 50022 - protein, 9 aa, Homo sapiens
  Table A; Target 50022; HLA-B*15:01; MYH4; ENSG00000264424; TAA
KAITDAAMM

SEQ ID NO: 50023 - protein, 9 aa, Homo sapiens
  Table A; Target 50023; HLA-B*15:03; MYH4; ENSG00000264424; TAA
KAITDAAMM

SEQ ID NO: 50024 - protein, 9 aa, Homo sapiens
  Table A; Target 50024; HLA-B*35:03; MYH4; ENSG00000264424; TAA
KAITDAAMM

SEQ ID NO: 50025 - protein, 9 aa, Homo sapiens
  Table A; Target 50025; HLA-B*40:01; MYH4; ENSG00000264424; TAA
KAITDAAMM

SEQ ID NO: 50026 - protein, 9 aa, Homo sapiens
  Table A; Target 50026; HLA-B*46:01; MYH4; ENSG00000264424; TAA
KAITDAAMM

SEQ ID NO: 50027 - protein, 9 aa, Homo sapiens
  Table A; Target 50027; HLA-B*55:01; MYH4; ENSG00000264424; TAA
KAITDAAMM

SEQ ID NO: 50028 - protein, 9 aa, Homo sapiens
  Table A; Target 50028; HLA-B*58:01; MYH4; ENSG00000264424; TAA
KAITDAAMM

SEQ ID NO: 50029 - protein, 9 aa, Homo sapiens
  Table A; Target 50029; HLA-C*01:02; MYH4; ENSG00000264424; TAA
KAITDAAMM

SEQ ID NO: 50030 - protein, 9 aa, Homo sapiens
  Table A; Target 50030; HLA-C*02:02; MYH4; ENSG00000264424; TAA
KAITDAAMM

SEQ ID NO: 50031 - protein, 9 aa, Homo sapiens
  Table A; Target 50031; HLA-C*03:03; MYH4; ENSG00000264424; TAA
KAITDAAMM

SEQ ID NO: 50032 - protein, 9 aa, Homo sapiens
  Table A; Target 50032; HLA-C*03:04; MYH4; ENSG00000264424; TAA
KAITDAAMM

SEQ ID NO: 50033 - protein, 9 aa, Homo sapiens
  Table A; Target 50033; HLA-C*04:01; MYH4; ENSG00000264424; TAA
KAITDAAMM

SEQ ID NO: 50034 - protein, 9 aa, Homo sapiens
  Table A; Target 50034; HLA-C*06:02; MYH4; ENSG00000264424; TAA
KAITDAAMM

SEQ ID NO: 50035 - protein, 9 aa, Homo sapiens
  Table A; Target 50035; HLA-C*07:04; MYH4; ENSG00000264424; TAA
KAITDAAMM

SEQ ID NO: 50036 - protein, 9 aa, Homo sapiens
  Table A; Target 50036; HLA-C*12:03; MYH4; ENSG00000264424; TAA
KAITDAAMM

SEQ ID NO: 50037 - protein, 9 aa, Homo sapiens
  Table A; Target 50037; HLA-C*14:02; MYH4; ENSG00000264424; TAA
KAITDAAMM

SEQ ID NO: 50038 - protein, 9 aa, Homo sapiens
  Table A; Target 50038; HLA-C*16:01; MYH4; ENSG00000264424; TAA
KAITDAAMM

SEQ ID NO: 50039 - protein, 9 aa, Homo sapiens
  Table A; Target 50039; HLA-C*16:02; MYH4; ENSG00000264424; TAA
KAITDAAMM

SEQ ID NO: 50040 - protein, 9 aa, Homo sapiens
  Table A; Target 50040; HLA-C*16:04; MYH4; ENSG00000264424; TAA
KAITDAAMM

SEQ ID NO: 50041 - protein, 10 aa, Homo sapiens
  Table A; Target 50041; HLA-B*57:01; MYH4; ENSG00000264424; TAA
KAIYEKMFLW

SEQ ID NO: 50042 - protein, 9 aa, Homo sapiens
  Table A; Target 50042; HLA-B*40:02; MYH4; ENSG00000264424; TAA
KAKANFEKM

SEQ ID NO: 50043 - protein, 9 aa, Homo sapiens
  Table A; Target 50043; HLA-B*46:01; MYH4; ENSG00000264424; TAA
KAKANFEKM

SEQ ID NO: 50044 - protein, 9 aa, Homo sapiens
  Table A; Target 50044; HLA-B*57:01; MYH4; ENSG00000264424; TAA
KAKANFEKM

SEQ ID NO: 50045 - protein, 9 aa, Homo sapiens
  Table A; Target 50045; HLA-B*58:01; MYH4; ENSG00000264424; TAA
KAKANFEKM

SEQ ID NO: 50046 - protein, 9 aa, Homo sapiens
  Table A; Target 50046; HLA-C*02:02; MYH4; ENSG00000264424; TAA
KAKANFEKM

SEQ ID NO: 50047 - protein, 9 aa, Homo sapiens
  Table A; Target 50047; HLA-C*12:03; MYH4; ENSG00000264424; TAA
KAKANFEKM

SEQ ID NO: 50048 - protein, 9 aa, Homo sapiens
  Table A; Target 50048; HLA-C*16:02; MYH4; ENSG00000264424; TAA
KAKANFEKM

SEQ ID NO: 50049 - protein, 10 aa, Homo sapiens
  Table A; Target 50049; HLA-C*07:02; MYH4; ENSG00000264424; TAA
KAKSTLAHAL

SEQ ID NO: 50050 - protein, 11 aa, Homo sapiens
  Table A; Target 50050; HLA-A*30:01; MYH4; ENSG00000264424; TAA
KALQEAHQQTL

SEQ ID NO: 50051 - protein, 11 aa, Homo sapiens
  Table A; Target 50051; HLA-B*40:01; MYH4; ENSG00000264424; TAA
KALQEAHQQTL

SEQ ID NO: 50052 - protein, 11 aa, Homo sapiens
  Table A; Target 50052; HLA-B*40:02; MYH4; ENSG00000264424; TAA
KALQEAHQQTL

SEQ ID NO: 50053 - protein, 11 aa, Homo sapiens
  Table A; Target 50053; HLA-B*57:01; MYH4; ENSG00000264424; TAA
KALQEAHQQTL

SEQ ID NO: 50054 - protein, 11 aa, Homo sapiens
  Table A; Target 50054; HLA-B*58:01; MYH4; ENSG00000264424; TAA
KALQEAHQQTL

SEQ ID NO: 50055 - protein, 11 aa, Homo sapiens
  Table A; Target 50055; HLA-C*16:02; MYH4; ENSG00000264424; TAA
KALQEAHQQTL

SEQ ID NO: 50056 - protein, 11 aa, Homo sapiens
  Table A; Target 50056; HLA-C*16:04; MYH4; ENSG00000264424; TAA
KALQEAHQQTL

SEQ ID NO: 50057 - protein, 9 aa, Homo sapiens
  Table A; Target 50057; HLA-A*03:02; MYH4; ENSG00000264424; TAA
KANSEVAQW

SEQ ID NO: 50058 - protein, 9 aa, Homo sapiens
  Table A; Target 50058; HLA-A*24:02; MYH4; ENSG00000264424; TAA
KANSEVAQW

SEQ ID NO: 50059 - protein, 9 aa, Homo sapiens
  Table A; Target 50059; HLA-A*25:01; MYH4; ENSG00000264424; TAA
KANSEVAQW

SEQ ID NO: 50060 - protein, 9 aa, Homo sapiens
  Table A; Target 50060; HLA-A*30:02; MYH4; ENSG00000264424; TAA
KANSEVAQW

SEQ ID NO: 50061 - protein, 9 aa, Homo sapiens
  Table A; Target 50061; HLA-A*31:01; MYH4; ENSG00000264424; TAA
KANSEVAQW

SEQ ID NO: 50062 - protein, 9 aa, Homo sapiens
  Table A; Target 50062; HLA-A*32:01; MYH4; ENSG00000264424; TAA
KANSEVAQW

SEQ ID NO: 50063 - protein, 9 aa, Homo sapiens
  Table A; Target 50063; HLA-A*33:01; MYH4; ENSG00000264424; TAA
KANSEVAQW

SEQ ID NO: 50064 - protein, 9 aa, Homo sapiens
  Table A; Target 50064; HLA-A*33:03; MYH4; ENSG00000264424; TAA
KANSEVAQW

SEQ ID NO: 50065 - protein, 9 aa, Homo sapiens
  Table A; Target 50065; HLA-B*44:02; MYH4; ENSG00000264424; TAA
KANSEVAQW

SEQ ID NO: 50066 - protein, 9 aa, Homo sapiens
  Table A; Target 50066; HLA-B*44:03; MYH4; ENSG00000264424; TAA
KANSEVAQW

SEQ ID NO: 50067 - protein, 9 aa, Homo sapiens
  Table A; Target 50067; HLA-B*57:01; MYH4; ENSG00000264424; TAA
KANSEVAQW

SEQ ID NO: 50068 - protein, 9 aa, Homo sapiens
  Table A; Target 50068; HLA-B*58:01; MYH4; ENSG00000264424; TAA
KANSEVAQW

SEQ ID NO: 50069 - protein, 9 aa, Homo sapiens
  Table A; Target 50069; HLA-C*07:06; MYH4; ENSG00000264424; TAA
KANSEVAQW

SEQ ID NO: 50070 - protein, 9 aa, Homo sapiens
  Table A; Target 50070; HLA-C*12:03; MYH4; ENSG00000264424; TAA
KANSEVAQW

SEQ ID NO: 50071 - protein, 9 aa, Homo sapiens
  Table A; Target 50071; HLA-C*16:01; MYH4; ENSG00000264424; TAA
KANSEVAQW

SEQ ID NO: 50072 - protein, 9 aa, Homo sapiens
  Table A; Target 50072; HLA-C*16:02; MYH4; ENSG00000264424; TAA
KANSEVAQW

SEQ ID NO: 50073 - protein, 9 aa, Homo sapiens
  Table A; Target 50073; HLA-C*16:04; MYH4; ENSG00000264424; TAA
KANSEVAQW

SEQ ID NO: 50074 - protein, 10 aa, Homo sapiens
  Table A; Target 50074; HLA-A*31:01; MYH4; ENSG00000264424; TAA
KANSEVAQWR

SEQ ID NO: 50075 - protein, 11 aa, Homo sapiens
  Table A; Target 50075; HLA-B*57:01; MYH4; ENSG00000264424; TAA
KARLHTESGEF

SEQ ID NO: 50076 - protein, 10 aa, Homo sapiens
  Table A; Target 50076; HLA-A*03:01; MYH4; ENSG00000264424; TAA
KATDTSFKNK

SEQ ID NO: 50077 - protein, 10 aa, Homo sapiens
  Table A; Target 50077; HLA-A*03:02; MYH4; ENSG00000264424; TAA
KATDTSFKNK

SEQ ID NO: 50078 - protein, 10 aa, Homo sapiens
  Table A; Target 50078; HLA-A*11:01; MYH4; ENSG00000264424; TAA
KATDTSFKNK

SEQ ID NO: 50079 - protein, 8 aa, Homo sapiens
  Table A; Target 50079; HLA-A*30:01; MYH4; ENSG00000264424; TAA
KDAMVSQL

SEQ ID NO: 50080 - protein, 8 aa, Homo sapiens
  Table A; Target 50080; HLA-B*37:01; MYH4; ENSG00000264424; TAA
KDAMVSQL

SEQ ID NO: 50081 - protein, 8 aa, Homo sapiens
  Table A; Target 50081; HLA-B*40:02; MYH4; ENSG00000264424; TAA
KDAMVSQL

SEQ ID NO: 50082 - protein, 8 aa, Homo sapiens
  Table A; Target 50082; HLA-C*07:04; MYH4; ENSG00000264424; TAA
KDAMVSQL

SEQ ID NO: 50083 - protein, 8 aa, Homo sapiens
  Table A; Target 50083; HLA-C*12:03; MYH4; ENSG00000264424; TAA
KDAMVSQL

SEQ ID NO: 50084 - protein, 8 aa, Homo sapiens
  Table A; Target 50084; HLA-C*16:02; MYH4; ENSG00000264424; TAA
KDAMVSQL

SEQ ID NO: 50085 - protein, 9 aa, Homo sapiens
  Table A; Target 50085; HLA-C*06:02; MYH4; ENSG00000264424; TAA
KDAMVSQLS

SEQ ID NO: 50086 - protein, 10 aa, Homo sapiens
  Table A; Target 50086; HLA-A*30:01; MYH4; ENSG00000264424; TAA
KDIDDLELTL

SEQ ID NO: 50087 - protein, 10 aa, Homo sapiens
  Table A; Target 50087; HLA-B*40:01; MYH4; ENSG00000264424; TAA
KDIDDLELTL

SEQ ID NO: 50088 - protein, 9 aa, Homo sapiens
  Table A; Target 50088; HLA-B*40:02; MYH4; ENSG00000264424; TAA
KDPLNETVV

SEQ ID NO: 50089 - protein, 8 aa, Homo sapiens
  Table A; Target 50089; HLA-A*30:01; MYH4; ENSG00000264424; TAA
KEDQVFSM

SEQ ID NO: 50090 - protein, 8 aa, Homo sapiens
  Table A; Target 50090; HLA-B*18:01; MYH4; ENSG00000264424; TAA
KEDQVFSM

SEQ ID NO: 50091 - protein, 8 aa, Homo sapiens
  Table A; Target 50091; HLA-B*37:01; MYH4; ENSG00000264424; TAA
KEDQVFSM

SEQ ID NO: 50092 - protein, 8 aa, Homo sapiens
  Table A; Target 50092; HLA-B*40:01; MYH4; ENSG00000264424; TAA
KEDQVFSM

SEQ ID NO: 50093 - protein, 9 aa, Homo sapiens
  Table A; Target 50093; HLA-A*30:01; MYH4; ENSG00000264424; TAA
KEEEQQRLI

SEQ ID NO: 50094 - protein, 9 aa, Homo sapiens
  Table A; Target 50094; HLA-B*40:01; MYH4; ENSG00000264424; TAA
KEEEQQRLI

SEQ ID NO: 50095 - protein, 9 aa, Homo sapiens
  Table A; Target 50095; HLA-B*44:02; MYH4; ENSG00000264424; TAA
KEEEQQRLI

SEQ ID NO: 50096 - protein, 9 aa, Homo sapiens
  Table A; Target 50096; HLA-B*44:03; MYH4; ENSG00000264424; TAA
KEEEQQRLI

SEQ ID NO: 50097 - protein, 9 aa, Homo sapiens
  Table A; Target 50097; HLA-B*49:01; MYH4; ENSG00000264424; TAA
KEEEQQRLI

SEQ ID NO: 50098 - protein, 9 aa, Homo sapiens
  Table A; Target 50098; HLA-B*40:01; MYH4; ENSG00000264424; TAA
KEELAKTEA

SEQ ID NO: 50099 - protein, 9 aa, Homo sapiens
  Table A; Target 50099; HLA-B*40:02; MYH4; ENSG00000264424; TAA
KEELAKTEA

SEQ ID NO: 50100 - protein, 9 aa, Homo sapiens
  Table A; Target 50100; HLA-A*30:01; MYH4; ENSG00000264424; TAA
KEEPASGKM

SEQ ID NO: 50101 - protein, 9 aa, Homo sapiens
  Table A; Target 50101; HLA-B*37:01; MYH4; ENSG00000264424; TAA
KEEPASGKM

SEQ ID NO: 50102 - protein, 9 aa, Homo sapiens
  Table A; Target 50102; HLA-B*40:01; MYH4; ENSG00000264424; TAA
KEEPASGKM

SEQ ID NO: 50103 - protein, 9 aa, Homo sapiens
  Table A; Target 50103; HLA-B*40:02; MYH4; ENSG00000264424; TAA
KEEPASGKM

SEQ ID NO: 50104 - protein, 9 aa, Homo sapiens
  Table A; Target 50104; HLA-B*44:03; MYH4; ENSG00000264424; TAA
KEEPASGKM

SEQ ID NO: 50105 - protein, 9 aa, Homo sapiens
  Table A; Target 50105; HLA-B*49:01; MYH4; ENSG00000264424; TAA
KEEPASGKM

SEQ ID NO: 50106 - protein, 8 aa, Homo sapiens
  Table A; Target 50106; HLA-A*30:01; MYH4; ENSG00000264424; TAA
KEFEMSNL

SEQ ID NO: 50107 - protein, 8 aa, Homo sapiens
  Table A; Target 50107; HLA-B*18:01; MYH4; ENSG00000264424; TAA
KEFEMSNL

SEQ ID NO: 50108 - protein, 8 aa, Homo sapiens
  Table A; Target 50108; HLA-B*37:01; MYH4; ENSG00000264424; TAA
KEFEMSNL

SEQ ID NO: 50109 - protein, 8 aa, Homo sapiens
  Table A; Target 50109; HLA-B*40:01; MYH4; ENSG00000264424; TAA
KEFEMSNL

SEQ ID NO: 50110 - protein, 8 aa, Homo sapiens
  Table A; Target 50110; HLA-B*40:02; MYH4; ENSG00000264424; TAA
KEFEMSNL

SEQ ID NO: 50111 - protein, 8 aa, Homo sapiens
  Table A; Target 50111; HLA-B*49:01; MYH4; ENSG00000264424; TAA
KEFEMSNL

SEQ ID NO: 50112 - protein, 10 aa, Homo sapiens
  Table A; Target 50112; HLA-B*49:01; MYH4; ENSG00000264424; TAA
KEFEMSNLQG

SEQ ID NO: 50113 - protein, 10 aa, Homo sapiens
  Table A; Target 50113; HLA-B*40:02; MYH4; ENSG00000264424; TAA
KEKHATENKV

SEQ ID NO: 50114 - protein, 11 aa, Homo sapiens
  Table A; Target 50114; HLA-B*40:02; MYH4; ENSG00000264424; TAA
KEKHATENKVK

SEQ ID NO: 50115 - protein, 9 aa, Homo sapiens
  Table A; Target 50115; HLA-B*40:02; MYH4; ENSG00000264424; TAA
KEKKALQEA

SEQ ID NO: 50116 - protein, 10 aa, Homo sapiens
  Table A; Target 50116; HLA-B*40:02; MYH4; ENSG00000264424; TAA
KEKSELKMEI

SEQ ID NO: 50117 - protein, 9 aa, Homo sapiens
  Table A; Target 50117; HLA-B*40:02; MYH4; ENSG00000264424; TAA
KELEEKMVT

SEQ ID NO: 50118 - protein, 10 aa, Homo sapiens
  Table A; Target 50118; HLA-A*30:01; MYH4; ENSG00000264424; TAA
KELEEKMVTL

SEQ ID NO: 50119 - protein, 10 aa, Homo sapiens
  Table A; Target 50119; HLA-B*37:01; MYH4; ENSG00000264424; TAA
KELEEKMVTL

SEQ ID NO: 50120 - protein, 10 aa, Homo sapiens
  Table A; Target 50120; HLA-B*40:01; MYH4; ENSG00000264424; TAA
KELEEKMVTL

SEQ ID NO: 50121 - protein, 10 aa, Homo sapiens
  Table A; Target 50121; HLA-B*40:02; MYH4; ENSG00000264424; TAA
KELEEKMVTL

SEQ ID NO: 50122 - protein, 10 aa, Homo sapiens
  Table A; Target 50122; HLA-B*44:02; MYH4; ENSG00000264424; TAA
KELEEKMVTL

SEQ ID NO: 50123 - protein, 10 aa, Homo sapiens
  Table A; Target 50123; HLA-B*44:03; MYH4; ENSG00000264424; TAA
KELEEKMVTL

SEQ ID NO: 50124 - protein, 10 aa, Homo sapiens
  Table A; Target 50124; HLA-B*49:01; MYH4; ENSG00000264424; TAA
KELEEKMVTL

SEQ ID NO: 50125 - protein, 11 aa, Homo sapiens
  Table A; Target 50125; HLA-A*30:01; MYH4; ENSG00000264424; TAA
KELEEKMVTLM

SEQ ID NO: 50126 - protein, 11 aa, Homo sapiens
  Table A; Target 50126; HLA-B*37:01; MYH4; ENSG00000264424; TAA
KELEEKMVTLM

SEQ ID NO: 50127 - protein, 11 aa, Homo sapiens
  Table A; Target 50127; HLA-B*40:01; MYH4; ENSG00000264424; TAA
KELEEKMVTLM

SEQ ID NO: 50128 - protein, 10 aa, Homo sapiens
  Table A; Target 50128; HLA-A*30:01; MYH4; ENSG00000264424; TAA
KELQARIEEL

SEQ ID NO: 50129 - protein, 10 aa, Homo sapiens
  Table A; Target 50129; HLA-B*37:01; MYH4; ENSG00000264424; TAA
KELQARIEEL

SEQ ID NO: 50130 - protein, 10 aa, Homo sapiens
  Table A; Target 50130; HLA-B*40:01; MYH4; ENSG00000264424; TAA
KELQARIEEL

SEQ ID NO: 50131 - protein, 10 aa, Homo sapiens
  Table A; Target 50131; HLA-B*40:02; MYH4; ENSG00000264424; TAA
KELQARIEEL

SEQ ID NO: 50132 - protein, 10 aa, Homo sapiens
  Table A; Target 50132; HLA-B*44:02; MYH4; ENSG00000264424; TAA
KELQARIEEL

SEQ ID NO: 50133 - protein, 10 aa, Homo sapiens
  Table A; Target 50133; HLA-B*49:01; MYH4; ENSG00000264424; TAA
KELQARIEEL

SEQ ID NO: 50134 - protein, 10 aa, Homo sapiens
  Table A; Target 50134; HLA-A*30:01; MYH4; ENSG00000264424; TAA
KEMANMKEEF

SEQ ID NO: 50135 - protein, 10 aa, Homo sapiens
  Table A; Target 50135; HLA-B*18:01; MYH4; ENSG00000264424; TAA
KEMANMKEEF

SEQ ID NO: 50136 - protein, 10 aa, Homo sapiens
  Table A; Target 50136; HLA-B*37:01; MYH4; ENSG00000264424; TAA
KEMANMKEEF

SEQ ID NO: 50137 - protein, 10 aa, Homo sapiens
  Table A; Target 50137; HLA-B*40:01; MYH4; ENSG00000264424; TAA
KEMANMKEEF

SEQ ID NO: 50138 - protein, 10 aa, Homo sapiens
  Table A; Target 50138; HLA-B*40:02; MYH4; ENSG00000264424; TAA
KEMANMKEEF

SEQ ID NO: 50139 - protein, 10 aa, Homo sapiens
  Table A; Target 50139; HLA-B*44:02; MYH4; ENSG00000264424; TAA
KEMANMKEEF

SEQ ID NO: 50140 - protein, 10 aa, Homo sapiens
  Table A; Target 50140; HLA-B*44:03; MYH4; ENSG00000264424; TAA
KEMANMKEEF

SEQ ID NO: 50141 - protein, 10 aa, Homo sapiens
  Table A; Target 50141; HLA-C*16:04; MYH4; ENSG00000264424; TAA
KEMANMKEEF

SEQ ID NO: 50142 - protein, 9 aa, Homo sapiens
  Table A; Target 50142; HLA-A*30:01; MYH4; ENSG00000264424; TAA
KEQDTSAHL

SEQ ID NO: 50143 - protein, 9 aa, Homo sapiens
  Table A; Target 50143; HLA-B*27:02; MYH4; ENSG00000264424; TAA
KEQDTSAHL

SEQ ID NO: 50144 - protein, 9 aa, Homo sapiens
  Table A; Target 50144; HLA-B*37:01; MYH4; ENSG00000264424; TAA
KEQDTSAHL

SEQ ID NO: 50145 - protein, 9 aa, Homo sapiens
  Table A; Target 50145; HLA-B*40:01; MYH4; ENSG00000264424; TAA
KEQDTSAHL

SEQ ID NO: 50146 - protein, 9 aa, Homo sapiens
  Table A; Target 50146; HLA-B*40:02; MYH4; ENSG00000264424; TAA
KEQDTSAHL

SEQ ID NO: 50147 - protein, 9 aa, Homo sapiens
  Table A; Target 50147; HLA-B*44:02; MYH4; ENSG00000264424; TAA
KEQDTSAHL

SEQ ID NO: 50148 - protein, 9 aa, Homo sapiens
  Table A; Target 50148; HLA-B*44:03; MYH4; ENSG00000264424; TAA
KEQDTSAHL

SEQ ID NO: 50149 - protein, 9 aa, Homo sapiens
  Table A; Target 50149; HLA-B*49:01; MYH4; ENSG00000264424; TAA
KEQDTSAHL

SEQ ID NO: 50150 - protein, 9 aa, Homo sapiens
  Table A; Target 50150; HLA-C*16:04; MYH4; ENSG00000264424; TAA
KEQDTSAHL

SEQ ID NO: 50151 - protein, 11 aa, Homo sapiens
  Table A; Target 50151; HLA-A*31:01; MYH4; ENSG00000264424; TAA
KEQDTSAHLER

SEQ ID NO: 50152 - protein, 11 aa, Homo sapiens
  Table A; Target 50152; HLA-A*33:01; MYH4; ENSG00000264424; TAA
KEQDTSAHLER

SEQ ID NO: 50153 - protein, 11 aa, Homo sapiens
  Table A; Target 50153; HLA-B*44:02; MYH4; ENSG00000264424; TAA
KEQDTSAHLER

SEQ ID NO: 50154 - protein, 9 aa, Homo sapiens
  Table A; Target 50154; HLA-A*31:01; MYH4; ENSG00000264424; TAA
KEQLAMVER

SEQ ID NO: 50155 - protein, 11 aa, Homo sapiens
  Table A; Target 50155; HLA-B*40:02; MYH4; ENSG00000264424; TAA
KERADIAESQV

SEQ ID NO: 50156 - protein, 10 aa, Homo sapiens
  Table A; Target 50156; HLA-B*40:02; MYH4; ENSG00000264424; TAA
KERIEAQNKP

SEQ ID NO: 50157 - protein, 10 aa, Homo sapiens
  Table A; Target 50157; HLA-A*30:01; MYH4; ENSG00000264424; TAA
KESRSLSTEL

SEQ ID NO: 50158 - protein, 10 aa, Homo sapiens
  Table A; Target 50158; HLA-B*40:01; MYH4; ENSG00000264424; TAA
KESRSLSTEL

SEQ ID NO: 50159 - protein, 10 aa, Homo sapiens
  Table A; Target 50159; HLA-B*40:02; MYH4; ENSG00000264424; TAA
KESRSLSTEL

SEQ ID NO: 50160 - protein, 8 aa, Homo sapiens
  Table A; Target 50160; HLA-B*37:01; MYH4; ENSG00000264424; TAA
KESYVKAI

SEQ ID NO: 50161 - protein, 9 aa, Homo sapiens
  Table A; Target 50161; HLA-B*37:01; MYH4; ENSG00000264424; TAA
KESYVKAIV

SEQ ID NO: 50162 - protein, 9 aa, Homo sapiens
  Table A; Target 50162; HLA-B*40:01; MYH4; ENSG00000264424; TAA
KESYVKAIV

SEQ ID NO: 50163 - protein, 9 aa, Homo sapiens
  Table A; Target 50163; HLA-B*49:01; MYH4; ENSG00000264424; TAA
KESYVKAIV

SEQ ID NO: 50164 - protein, 8 aa, Homo sapiens
  Table A; Target 50164; HLA-C*12:03; MYH4; ENSG00000264424; TAA
KGFPSRIL

SEQ ID NO: 50165 - protein, 9 aa, Homo sapiens
  Table A; Target 50165; HLA-A*29:02; MYH4; ENSG00000264424; TAA
KGFPSRILY

SEQ ID NO: 50166 - protein, 9 aa, Homo sapiens
  Table A; Target 50166; HLA-A*30:02; MYH4; ENSG00000264424; TAA
KGFPSRILY

SEQ ID NO: 50167 - protein, 9 aa, Homo sapiens
  Table A; Target 50167; HLA-A*31:01; MYH4; ENSG00000264424; TAA
KGFPSRILY

SEQ ID NO: 50168 - protein, 9 aa, Homo sapiens
  Table A; Target 50168; HLA-A*32:01; MYH4; ENSG00000264424; TAA
KGFPSRILY

SEQ ID NO: 50169 - protein, 9 aa, Homo sapiens
  Table A; Target 50169; HLA-B*13:02; MYH4; ENSG00000264424; TAA
KGFPSRILY

SEQ ID NO: 50170 - protein, 9 aa, Homo sapiens
  Table A; Target 50170; HLA-B*15:01; MYH4; ENSG00000264424; TAA
KGFPSRILY

SEQ ID NO: 50171 - protein, 9 aa, Homo sapiens
  Table A; Target 50171; HLA-B*15:03; MYH4; ENSG00000264424; TAA
KGFPSRILY

SEQ ID NO: 50172 - protein, 9 aa, Homo sapiens
  Table A; Target 50172; HLA-B*46:01; MYH4; ENSG00000264424; TAA
KGFPSRILY

SEQ ID NO: 50173 - protein, 9 aa, Homo sapiens
  Table A; Target 50173; HLA-B*57:01; MYH4; ENSG00000264424; TAA
KGFPSRILY

SEQ ID NO: 50174 - protein, 9 aa, Homo sapiens
  Table A; Target 50174; HLA-B*58:01; MYH4; ENSG00000264424; TAA
KGFPSRILY

SEQ ID NO: 50175 - protein, 9 aa, Homo sapiens
  Table A; Target 50175; HLA-C*02:02; MYH4; ENSG00000264424; TAA
KGFPSRILY

SEQ ID NO: 50176 - protein, 9 aa, Homo sapiens
  Table A; Target 50176; HLA-C*12:03; MYH4; ENSG00000264424; TAA
KGFPSRILY

SEQ ID NO: 50177 - protein, 9 aa, Homo sapiens
  Table A; Target 50177; HLA-C*16:01; MYH4; ENSG00000264424; TAA
KGFPSRILY

SEQ ID NO: 50178 - protein, 10 aa, Homo sapiens
  Table A; Target 50178; HLA-A*02:03; MYH4; ENSG00000264424; TAA
KGFPSRILYA

SEQ ID NO: 50179 - protein, 8 aa, Homo sapiens
  Table A; Target 50179; HLA-C*16:02; MYH4; ENSG00000264424; TAA
KGQTVQQV

SEQ ID NO: 50180 - protein, 9 aa, Homo sapiens
  Table A; Target 50180; HLA-A*30:02; MYH4; ENSG00000264424; TAA
KGQTVQQVY

SEQ ID NO: 50181 - protein, 9 aa, Homo sapiens
  Table A; Target 50181; HLA-A*32:01; MYH4; ENSG00000264424; TAA
KGQTVQQVY

SEQ ID NO: 50182 - protein, 9 aa, Homo sapiens
  Table A; Target 50182; HLA-B*15:01; MYH4; ENSG00000264424; TAA
KGQTVQQVY

SEQ ID NO: 50183 - protein, 9 aa, Homo sapiens
  Table A; Target 50183; HLA-B*15:03; MYH4; ENSG00000264424; TAA
KGQTVQQVY

SEQ ID NO: 50184 - protein, 9 aa, Homo sapiens
  Table A; Target 50184; HLA-B*46:01; MYH4; ENSG00000264424; TAA
KGQTVQQVY

SEQ ID NO: 50185 - protein, 9 aa, Homo sapiens
  Table A; Target 50185; HLA-B*58:01; MYH4; ENSG00000264424; TAA
KGQTVQQVY

SEQ ID NO: 50186 - protein, 9 aa, Homo sapiens
  Table A; Target 50186; HLA-C*16:01; MYH4; ENSG00000264424; TAA
KGQTVQQVY

SEQ ID NO: 50187 - protein, 9 aa, Homo sapiens
  Table A; Target 50187; HLA-C*16:02; MYH4; ENSG00000264424; TAA
KGQTVQQVY

SEQ ID NO: 50188 - protein, 9 aa, Homo sapiens
  Table A; Target 50188; HLA-C*16:04; MYH4; ENSG00000264424; TAA
KGQTVQQVY

SEQ ID NO: 50189 - protein, 8 aa, Homo sapiens
  Table A; Target 50189; HLA-C*16:02; MYH4; ENSG00000264424; TAA
KGSSFQTV

SEQ ID NO: 50190 - protein, 10 aa, Homo sapiens
  Table A; Target 50190; HLA-B*56:01; MYH4; ENSG00000264424; TAA
KGSSFQTVSA

SEQ ID NO: 50191 - protein, 9 aa, Homo sapiens
  Table A; Target 50191; HLA-A*32:01; MYH4; ENSG00000264424; TAA
KHADSVAEL

SEQ ID NO: 50192 - protein, 9 aa, Homo sapiens
  Table A; Target 50192; HLA-B*15:03; MYH4; ENSG00000264424; TAA
KHADSVAEL

SEQ ID NO: 50193 - protein, 9 aa, Homo sapiens
  Table A; Target 50193; HLA-B*27:05; MYH4; ENSG00000264424; TAA
KHADSVAEL

SEQ ID NO: 50194 - protein, 9 aa, Homo sapiens
  Table A; Target 50194; HLA-B*38:01; MYH4; ENSG00000264424; TAA
KHADSVAEL

SEQ ID NO: 50195 - protein, 9 aa, Homo sapiens
  Table A; Target 50195; HLA-B*39:01; MYH4; ENSG00000264424; TAA
KHADSVAEL

SEQ ID NO: 50196 - protein, 9 aa, Homo sapiens
  Table A; Target 50196; HLA-B*40:01; MYH4; ENSG00000264424; TAA
KHADSVAEL

SEQ ID NO: 50197 - protein, 9 aa, Homo sapiens
  Table A; Target 50197; HLA-B*40:02; MYH4; ENSG00000264424; TAA
KHADSVAEL

SEQ ID NO: 50198 - protein, 9 aa, Homo sapiens
  Table A; Target 50198; HLA-B*58:01; MYH4; ENSG00000264424; TAA
KHADSVAEL

SEQ ID NO: 50199 - protein, 9 aa, Homo sapiens
  Table A; Target 50199; HLA-C*03:04; MYH4; ENSG00000264424; TAA
KHADSVAEL

SEQ ID NO: 50200 - protein, 9 aa, Homo sapiens
  Table A; Target 50200; HLA-C*07:04; MYH4; ENSG00000264424; TAA
KHADSVAEL

SEQ ID NO: 50201 - protein, 9 aa, Homo sapiens
  Table A; Target 50201; HLA-C*12:03; MYH4; ENSG00000264424; TAA
KHADSVAEL

SEQ ID NO: 50202 - protein, 9 aa, Homo sapiens
  Table A; Target 50202; HLA-C*16:02; MYH4; ENSG00000264424; TAA
KHADSVAEL

SEQ ID NO: 50203 - protein, 9 aa, Homo sapiens
  Table A; Target 50203; HLA-C*16:04; MYH4; ENSG00000264424; TAA
KHADSVAEL

SEQ ID NO: 50204 - protein, 9 aa, Homo sapiens
  Table A; Target 50204; HLA-B*40:01; MYH4; ENSG00000264424; TAA
KIAEKDEEL

SEQ ID NO: 50205 - protein, 9 aa, Homo sapiens
  Table A; Target 50205; HLA-B*58:01; MYH4; ENSG00000264424; TAA
KIAEKDEEL

SEQ ID NO: 50206 - protein, 9 aa, Homo sapiens
  Table A; Target 50206; HLA-C*01:02; MYH4; ENSG00000264424; TAA
KIAEKDEEL

SEQ ID NO: 50207 - protein, 8 aa, Homo sapiens
  Table A; Target 50207; HLA-C*05:01; MYH4; ENSG00000264424; TAA
KIEDEQAL

SEQ ID NO: 50208 - protein, 8 aa, Homo sapiens
  Table A; Target 50208; HLA-A*31:01; MYH4; ENSG00000264424; TAA
KIKEVTER

SEQ ID NO: 50209 - protein, 8 aa, Homo sapiens
  Table A; Target 50209; HLA-A*33:03; MYH4; ENSG00000264424; TAA
KIKEVTER

SEQ ID NO: 50210 - protein, 9 aa, Homo sapiens
  Table A; Target 50210; HLA-A*02:04; MYH4; ENSG00000264424; TAA
KILRIQLEL

SEQ ID NO: 50211 - protein, 9 aa, Homo sapiens
  Table A; Target 50211; HLA-B*15:03; MYH4; ENSG00000264424; TAA
KKAITDAAM

SEQ ID NO: 50212 - protein, 10 aa, Homo sapiens
  Table A; Target 50212; HLA-B*15:03; MYH4; ENSG00000264424; TAA
KKMEGDLNEM

SEQ ID NO: 50213 - protein, 8 aa, Homo sapiens
  Table A; Target 50213; HLA-A*03:01; MYH4; ENSG00000264424; TAA
KLAQLITR

SEQ ID NO: 50214 - protein, 8 aa, Homo sapiens
  Table A; Target 50214; HLA-A*31:01; MYH4; ENSG00000264424; TAA
KLAQLITR

SEQ ID NO: 50215 - protein, 9 aa, Homo sapiens
  Table A; Target 50215; HLA-A*02:03; MYH4; ENSG00000264424; TAA
KLAQLITRT

SEQ ID NO: 50216 - protein, 9 aa, Homo sapiens
  Table A; Target 50216; HLA-A*02:04; MYH4; ENSG00000264424; TAA
KLAQLITRT

SEQ ID NO: 50217 - protein, 10 aa, Homo sapiens
  Table A; Target 50217; HLA-A*01:01; MYH4; ENSG00000264424; TAA
KLASADIETY

SEQ ID NO: 50218 - protein, 10 aa, Homo sapiens
  Table A; Target 50218; HLA-A*25:01; MYH4; ENSG00000264424; TAA
KLASADIETY

SEQ ID NO: 50219 - protein, 10 aa, Homo sapiens
  Table A; Target 50219; HLA-A*26:01; MYH4; ENSG00000264424; TAA
KLASADIETY

SEQ ID NO: 50220 - protein, 10 aa, Homo sapiens
  Table A; Target 50220; HLA-A*30:02; MYH4; ENSG00000264424; TAA
KLASADIETY

SEQ ID NO: 50221 - protein, 10 aa, Homo sapiens
  Table A; Target 50221; HLA-A*32:01; MYH4; ENSG00000264424; TAA
KLASADIETY

SEQ ID NO: 50222 - protein, 10 aa, Homo sapiens
  Table A; Target 50222; HLA-B*15:01; MYH4; ENSG00000264424; TAA
KLASADIETY

SEQ ID NO: 50223 - protein, 10 aa, Homo sapiens
  Table A; Target 50223; HLA-B*15:03; MYH4; ENSG00000264424; TAA
KLASADIETY

SEQ ID NO: 50224 - protein, 10 aa, Homo sapiens
  Table A; Target 50224; HLA-B*27:02; MYH4; ENSG00000264424; TAA
KLASADIETY

SEQ ID NO: 50225 - protein, 10 aa, Homo sapiens
  Table A; Target 50225; HLA-B*44:03; MYH4; ENSG00000264424; TAA
KLASADIETY

SEQ ID NO: 50226 - protein, 10 aa, Homo sapiens
  Table A; Target 50226; HLA-B*46:01; MYH4; ENSG00000264424; TAA
KLASADIETY

SEQ ID NO: 50227 - protein, 10 aa, Homo sapiens
  Table A; Target 50227; HLA-B*58:01; MYH4; ENSG00000264424; TAA
KLASADIETY

SEQ ID NO: 50228 - protein, 10 aa, Homo sapiens
  Table A; Target 50228; HLA-C*07:04; MYH4; ENSG00000264424; TAA
KLASADIETY

SEQ ID NO: 50229 - protein, 10 aa, Homo sapiens
  Table A; Target 50229; HLA-C*16:04; MYH4; ENSG00000264424; TAA
KLASADIETY

SEQ ID NO: 50230 - protein, 11 aa, Homo sapiens
  Table A; Target 50230; HLA-A*02:01; MYH4; ENSG00000264424; TAA
KLASADIETYL

SEQ ID NO: 50231 - protein, 11 aa, Homo sapiens
  Table A; Target 50231; HLA-A*02:03; MYH4; ENSG00000264424; TAA
KLASADIETYL

SEQ ID NO: 50232 - protein, 11 aa, Homo sapiens
  Table A; Target 50232; HLA-A*02:04; MYH4; ENSG00000264424; TAA
KLASADIETYL

SEQ ID NO: 50233 - protein, 11 aa, Homo sapiens
  Table A; Target 50233; HLA-A*02:07; MYH4; ENSG00000264424; TAA
KLASADIETYL

SEQ ID NO: 50234 - protein, 9 aa, Homo sapiens
  Table A; Target 50234; HLA-C*05:01; MYH4; ENSG00000264424; TAA
KLEDECSEL

SEQ ID NO: 50235 - protein, 10 aa, Homo sapiens
  Table A; Target 50235; HLA-A*03:02; MYH4; ENSG00000264424; TAA
KLEDECSELK

SEQ ID NO: 50236 - protein, 9 aa, Homo sapiens
  Table A; Target 50236; HLA-A*02:07; MYH4; ENSG00000264424; TAA
KLETDISQI

SEQ ID NO: 50237 - protein, 9 aa, Homo sapiens
  Table A; Target 50237; HLA-A*02:01; MYH4; ENSG00000264424; TAA
KLQHELEEA

SEQ ID NO: 50238 - protein, 9 aa, Homo sapiens
  Table A; Target 50238; HLA-B*55:01; MYH4; ENSG00000264424; TAA
KLQHELEEA

SEQ ID NO: 50239 - protein, 10 aa, Homo sapiens
  Table A; Target 50239; HLA-A*03:02; MYH4; ENSG00000264424; TAA
KLQHELEEAK

SEQ ID NO: 50240 - protein, 9 aa, Homo sapiens
  Table A; Target 50240; HLA-A*03:01; MYH4; ENSG00000264424; TAA
KLQTKVKAY

SEQ ID NO: 50241 - protein, 9 aa, Homo sapiens
  Table A; Target 50241; HLA-A*03:02; MYH4; ENSG00000264424; TAA
KLQTKVKAY

SEQ ID NO: 50242 - protein, 9 aa, Homo sapiens
  Table A; Target 50242; HLA-A*30:02; MYH4; ENSG00000264424; TAA
KLQTKVKAY

SEQ ID NO: 50243 - protein, 9 aa, Homo sapiens
  Table A; Target 50243; HLA-A*32:01; MYH4; ENSG00000264424; TAA
KLQTKVKAY

SEQ ID NO: 50244 - protein, 9 aa, Homo sapiens
  Table A; Target 50244; HLA-B*15:01; MYH4; ENSG00000264424; TAA
KLQTKVKAY

SEQ ID NO: 50245 - protein, 9 aa, Homo sapiens
  Table A; Target 50245; HLA-C*16:01; MYH4; ENSG00000264424; TAA
KLQTKVKAY

SEQ ID NO: 50246 - protein, 9 aa, Homo sapiens
  Table A; Target 50246; HLA-C*16:02; MYH4; ENSG00000264424; TAA
KLQTKVKAY

SEQ ID NO: 50247 - protein, 9 aa, Homo sapiens
  Table A; Target 50247; HLA-A*01:01; MYH4; ENSG00000264424; TAA
KLTGAVMHY

SEQ ID NO: 50248 - protein, 9 aa, Homo sapiens
  Table A; Target 50248; HLA-A*03:01; MYH4; ENSG00000264424; TAA
KLTGAVMHY

SEQ ID NO: 50249 - protein, 9 aa, Homo sapiens
  Table A; Target 50249; HLA-A*03:02; MYH4; ENSG00000264424; TAA
KLTGAVMHY

SEQ ID NO: 50250 - protein, 9 aa, Homo sapiens
  Table A; Target 50250; HLA-A*26:01; MYH4; ENSG00000264424; TAA
KLTGAVMHY

SEQ ID NO: 50251 - protein, 9 aa, Homo sapiens
  Table A; Target 50251; HLA-A*29:02; MYH4; ENSG00000264424; TAA
KLTGAVMHY

SEQ ID NO: 50252 - protein, 9 aa, Homo sapiens
  Table A; Target 50252; HLA-A*30:02; MYH4; ENSG00000264424; TAA
KLTGAVMHY

SEQ ID NO: 50253 - protein, 9 aa, Homo sapiens
  Table A; Target 50253; HLA-A*32:01; MYH4; ENSG00000264424; TAA
KLTGAVMHY

SEQ ID NO: 50254 - protein, 9 aa, Homo sapiens
  Table A; Target 50254; HLA-B*15:01; MYH4; ENSG00000264424; TAA
KLTGAVMHY

SEQ ID NO: 50255 - protein, 9 aa, Homo sapiens
  Table A; Target 50255; HLA-B*15:03; MYH4; ENSG00000264424; TAA
KLTGAVMHY

SEQ ID NO: 50256 - protein, 9 aa, Homo sapiens
  Table A; Target 50256; HLA-B*44:03; MYH4; ENSG00000264424; TAA
KLTGAVMHY

SEQ ID NO: 50257 - protein, 9 aa, Homo sapiens
  Table A; Target 50257; HLA-B*46:01; MYH4; ENSG00000264424; TAA
KLTGAVMHY

SEQ ID NO: 50258 - protein, 9 aa, Homo sapiens
  Table A; Target 50258; HLA-B*57:01; MYH4; ENSG00000264424; TAA
KLTGAVMHY

SEQ ID NO: 50259 - protein, 9 aa, Homo sapiens
  Table A; Target 50259; HLA-B*58:01; MYH4; ENSG00000264424; TAA
KLTGAVMHY

SEQ ID NO: 50260 - protein, 9 aa, Homo sapiens
  Table A; Target 50260; HLA-C*02:02; MYH4; ENSG00000264424; TAA
KLTGAVMHY

SEQ ID NO: 50261 - protein, 9 aa, Homo sapiens
  Table A; Target 50261; HLA-C*07:04; MYH4; ENSG00000264424; TAA
KLTGAVMHY

SEQ ID NO: 50262 - protein, 9 aa, Homo sapiens
  Table A; Target 50262; HLA-C*12:03; MYH4; ENSG00000264424; TAA
KLTGAVMHY

SEQ ID NO: 50263 - protein, 9 aa, Homo sapiens
  Table A; Target 50263; HLA-C*16:01; MYH4; ENSG00000264424; TAA
KLTGAVMHY

SEQ ID NO: 50264 - protein, 9 aa, Homo sapiens
  Table A; Target 50264; HLA-C*16:02; MYH4; ENSG00000264424; TAA
KLTGAVMHY

SEQ ID NO: 50265 - protein, 10 aa, Homo sapiens
  Table A; Target 50265; HLA-C*06:02; MYH4; ENSG00000264424; TAA
KLTGAVMHYG

SEQ ID NO: 50266 - protein, 9 aa, Homo sapiens
  Table A; Target 50266; HLA-A*03:01; MYH4; ENSG00000264424; TAA
KLYEQHLGK

SEQ ID NO: 50267 - protein, 9 aa, Homo sapiens
  Table A; Target 50267; HLA-A*03:02; MYH4; ENSG00000264424; TAA
KLYEQHLGK

SEQ ID NO: 50268 - protein, 9 aa, Homo sapiens
  Table A; Target 50268; HLA-A*11:01; MYH4; ENSG00000264424; TAA
KLYEQHLGK

SEQ ID NO: 50269 - protein, 11 aa, Homo sapiens
  Table A; Target 50269; HLA-A*03:01; MYH4; ENSG00000264424; TAA
KLYFKIKPLLK

SEQ ID NO: 50270 - protein, 10 aa, Homo sapiens
  Table A; Target 50270; HLA-A*02:01; MYH4; ENSG00000264424; TAA
KMAEQELLDA

SEQ ID NO: 50271 - protein, 10 aa, Homo sapiens
  Table A; Target 50271; HLA-A*02:03; MYH4; ENSG00000264424; TAA
KMAEQELLDA

SEQ ID NO: 50272 - protein, 9 aa, Homo sapiens
  Table A; Target 50272; HLA-A*31:01; MYH4; ENSG00000264424; TAA
KMFLWMVTR

SEQ ID NO: 50273 - protein, 9 aa, Homo sapiens
  Table A; Target 50273; HLA-A*03:01; MYH4; ENSG00000264424; TAA
KMVTLMQEK

SEQ ID NO: 50274 - protein, 9 aa, Homo sapiens
  Table A; Target 50274; HLA-A*03:02; MYH4; ENSG00000264424; TAA
KMVTLMQEK

SEQ ID NO: 50275 - protein, 11 aa, Homo sapiens
  Table A; Target 50275; HLA-C*16:02; MYH4; ENSG00000264424; TAA
KNKDPLNETVV

SEQ ID NO: 50276 - protein, 8 aa, Homo sapiens
  Table A; Target 50276; HLA-B*08:01; MYH4; ENSG00000264424; TAA
KPEAHFSL

SEQ ID NO: 50277 - protein, 9 aa, Homo sapiens
  Table A; Target 50277; HLA-A*02:03; MYH4; ENSG00000264424; TAA
KPFDAKTSV

SEQ ID NO: 50278 - protein, 9 aa, Homo sapiens
  Table A; Target 50278; HLA-A*32:01; MYH4; ENSG00000264424; TAA
KPFDAKTSV

SEQ ID NO: 50279 - protein, 9 aa, Homo sapiens
  Table A; Target 50279; HLA-B*07:02; MYH4; ENSG00000264424; TAA
KPFDAKTSV

SEQ ID NO: 50280 - protein, 9 aa, Homo sapiens
  Table A; Target 50280; HLA-B*08:01; MYH4; ENSG00000264424; TAA
KPFDAKTSV

SEQ ID NO: 50281 - protein, 9 aa, Homo sapiens
  Table A; Target 50281; HLA-B*13:02; MYH4; ENSG00000264424; TAA
KPFDAKTSV

SEQ ID NO: 50282 - protein, 9 aa, Homo sapiens
  Table A; Target 50282; HLA-B*35:03; MYH4; ENSG00000264424; TAA
KPFDAKTSV

SEQ ID NO: 50283 - protein, 9 aa, Homo sapiens
  Table A; Target 50283; HLA-B*40:02; MYH4; ENSG00000264424; TAA
KPFDAKTSV

SEQ ID NO: 50284 - protein, 9 aa, Homo sapiens
  Table A; Target 50284; HLA-B*46:01; MYH4; ENSG00000264424; TAA
KPFDAKTSV

SEQ ID NO: 50285 - protein, 9 aa, Homo sapiens
  Table A; Target 50285; HLA-B*51:01; MYH4; ENSG00000264424; TAA
KPFDAKTSV

SEQ ID NO: 50286 - protein, 9 aa, Homo sapiens
  Table A; Target 50286; HLA-B*54:01; MYH4; ENSG00000264424; TAA
KPFDAKTSV

SEQ ID NO: 50287 - protein, 9 aa, Homo sapiens
  Table A; Target 50287; HLA-B*55:01; MYH4; ENSG00000264424; TAA
KPFDAKTSV

SEQ ID NO: 50288 - protein, 9 aa, Homo sapiens
  Table A; Target 50288; HLA-B*56:01; MYH4; ENSG00000264424; TAA
KPFDAKTSV

SEQ ID NO: 50289 - protein, 9 aa, Homo sapiens
  Table A; Target 50289; HLA-C*01:02; MYH4; ENSG00000264424; TAA
KPFDAKTSV

SEQ ID NO: 50290 - protein, 9 aa, Homo sapiens
  Table A; Target 50290; HLA-C*02:02; MYH4; ENSG00000264424; TAA
KPFDAKTSV

SEQ ID NO: 50291 - protein, 9 aa, Homo sapiens
  Table A; Target 50291; HLA-C*07:02; MYH4; ENSG00000264424; TAA
KPFDAKTSV

SEQ ID NO: 50292 - protein, 9 aa, Homo sapiens
  Table A; Target 50292; HLA-C*12:03; MYH4; ENSG00000264424; TAA
KPFDAKTSV

SEQ ID NO: 50293 - protein, 9 aa, Homo sapiens
  Table A; Target 50293; HLA-C*14:02; MYH4; ENSG00000264424; TAA
KPFDAKTSV

SEQ ID NO: 50294 - protein, 9 aa, Homo sapiens
  Table A; Target 50294; HLA-C*16:01; MYH4; ENSG00000264424; TAA
KPFDAKTSV

SEQ ID NO: 50295 - protein, 9 aa, Homo sapiens
  Table A; Target 50295; HLA-C*16:02; MYH4; ENSG00000264424; TAA
KPFDAKTSV

SEQ ID NO: 50296 - protein, 10 aa, Homo sapiens
  Table A; Target 50296; HLA-A*23:01; MYH4; ENSG00000264424; TAA
KPFDAKTSVF

SEQ ID NO: 50297 - protein, 10 aa, Homo sapiens
  Table A; Target 50297; HLA-A*24:02; MYH4; ENSG00000264424; TAA
KPFDAKTSVF

SEQ ID NO: 50298 - protein, 10 aa, Homo sapiens
  Table A; Target 50298; HLA-A*25:01; MYH4; ENSG00000264424; TAA
KPFDAKTSVF

SEQ ID NO: 50299 - protein, 10 aa, Homo sapiens
  Table A; Target 50299; HLA-B*07:02; MYH4; ENSG00000264424; TAA
KPFDAKTSVF

SEQ ID NO: 50300 - protein, 10 aa, Homo sapiens
  Table A; Target 50300; HLA-B*15:01; MYH4; ENSG00000264424; TAA
KPFDAKTSVF

SEQ ID NO: 50301 - protein, 10 aa, Homo sapiens
  Table A; Target 50301; HLA-B*15:03; MYH4; ENSG00000264424; TAA
KPFDAKTSVF

SEQ ID NO: 50302 - protein, 10 aa, Homo sapiens
  Table A; Target 50302; HLA-B*35:01; MYH4; ENSG00000264424; TAA
KPFDAKTSVF

SEQ ID NO: 50303 - protein, 10 aa, Homo sapiens
  Table A; Target 50303; HLA-B*35:03; MYH4; ENSG00000264424; TAA
KPFDAKTSVF

SEQ ID NO: 50304 - protein, 10 aa, Homo sapiens
  Table A; Target 50304; HLA-B*44:02; MYH4; ENSG00000264424; TAA
KPFDAKTSVF

SEQ ID NO: 50305 - protein, 10 aa, Homo sapiens
  Table A; Target 50305; HLA-B*44:03; MYH4; ENSG00000264424; TAA
KPFDAKTSVF

SEQ ID NO: 50306 - protein, 10 aa, Homo sapiens
  Table A; Target 50306; HLA-B*46:01; MYH4; ENSG00000264424; TAA
KPFDAKTSVF

SEQ ID NO: 50307 - protein, 10 aa, Homo sapiens
  Table A; Target 50307; HLA-B*54:01; MYH4; ENSG00000264424; TAA
KPFDAKTSVF

SEQ ID NO: 50308 - protein, 10 aa, Homo sapiens
  Table A; Target 50308; HLA-B*55:01; MYH4; ENSG00000264424; TAA
KPFDAKTSVF

SEQ ID NO: 50309 - protein, 10 aa, Homo sapiens
  Table A; Target 50309; HLA-B*56:01; MYH4; ENSG00000264424; TAA
KPFDAKTSVF

SEQ ID NO: 50310 - protein, 10 aa, Homo sapiens
  Table A; Target 50310; HLA-B*57:01; MYH4; ENSG00000264424; TAA
KPFDAKTSVF

SEQ ID NO: 50311 - protein, 10 aa, Homo sapiens
  Table A; Target 50311; HLA-C*02:02; MYH4; ENSG00000264424; TAA
KPFDAKTSVF

SEQ ID NO: 50312 - protein, 10 aa, Homo sapiens
  Table A; Target 50312; HLA-C*07:02; MYH4; ENSG00000264424; TAA
KPFDAKTSVF

SEQ ID NO: 50313 - protein, 10 aa, Homo sapiens
  Table A; Target 50313; HLA-C*12:03; MYH4; ENSG00000264424; TAA
KPFDAKTSVF

SEQ ID NO: 50314 - protein, 11 aa, Homo sapiens
  Table A; Target 50314; HLA-A*02:01; MYH4; ENSG00000264424; TAA
KPFDAKTSVFV

SEQ ID NO: 50315 - protein, 11 aa, Homo sapiens
  Table A; Target 50315; HLA-B*07:02; MYH4; ENSG00000264424; TAA
KPFDAKTSVFV

SEQ ID NO: 50316 - protein, 11 aa, Homo sapiens
  Table A; Target 50316; HLA-B*56:01; MYH4; ENSG00000264424; TAA
KPFDAKTSVFV

SEQ ID NO: 50317 - protein, 8 aa, Homo sapiens
  Table A; Target 50317; HLA-B*56:01; MYH4; ENSG00000264424; TAA
KPMGIFSI

SEQ ID NO: 50318 - protein, 9 aa, Homo sapiens
  Table A; Target 50318; HLA-B*07:02; MYH4; ENSG00000264424; TAA
KPMGIFSIL

SEQ ID NO: 50319 - protein, 9 aa, Homo sapiens
  Table A; Target 50319; HLA-B*56:01; MYH4; ENSG00000264424; TAA
KPMGIFSIL

SEQ ID NO: 50320 - protein, 9 aa, Homo sapiens
  Table A; Target 50320; HLA-C*07:02; MYH4; ENSG00000264424; TAA
KPMGIFSIL

SEQ ID NO: 50321 - protein, 8 aa, Homo sapiens
  Table A; Target 50321; HLA-B*13:02; MYH4; ENSG00000264424; TAA
KQAFTQQI

SEQ ID NO: 50322 - protein, 9 aa, Homo sapiens
  Table A; Target 50322; HLA-A*31:01; MYH4; ENSG00000264424; TAA
KQIQKLEAR

SEQ ID NO: 50323 - protein, 10 aa, Homo sapiens
  Table A; Target 50323; HLA-A*02:07; MYH4; ENSG00000264424; TAA
KQPRQYFIGV

SEQ ID NO: 50324 - protein, 9 aa, Homo sapiens
  Table A; Target 50324; HLA-B*27:05; MYH4; ENSG00000264424; TAA
KRQLEEETK

SEQ ID NO: 50325 - protein, 9 aa, Homo sapiens
  Table A; Target 50325; HLA-A*32:01; MYH4; ENSG00000264424; TAA
KSAETEKEM

SEQ ID NO: 50326 - protein, 9 aa, Homo sapiens
  Table A; Target 50326; HLA-B*46:01; MYH4; ENSG00000264424; TAA
KSAETEKEM

SEQ ID NO: 50327 - protein, 9 aa, Homo sapiens
  Table A; Target 50327; HLA-B*58:01; MYH4; ENSG00000264424; TAA
KSAETEKEM

SEQ ID NO: 50328 - protein, 9 aa, Homo sapiens
  Table A; Target 50328; HLA-C*01:02; MYH4; ENSG00000264424; TAA
KSAETEKEM

SEQ ID NO: 50329 - protein, 9 aa, Homo sapiens
  Table A; Target 50329; HLA-C*03:03; MYH4; ENSG00000264424; TAA
KSAETEKEM

SEQ ID NO: 50330 - protein, 9 aa, Homo sapiens
  Table A; Target 50330; HLA-C*03:04; MYH4; ENSG00000264424; TAA
KSAETEKEM

SEQ ID NO: 50331 - protein, 9 aa, Homo sapiens
  Table A; Target 50331; HLA-C*12:03; MYH4; ENSG00000264424; TAA
KSAETEKEM

SEQ ID NO: 50332 - protein, 9 aa, Homo sapiens
  Table A; Target 50332; HLA-C*16:01; MYH4; ENSG00000264424; TAA
KSAETEKEM

SEQ ID NO: 50333 - protein, 9 aa, Homo sapiens
  Table A; Target 50333; HLA-C*16:02; MYH4; ENSG00000264424; TAA
KSAETEKEM

SEQ ID NO: 50334 - protein, 9 aa, Homo sapiens
  Table A; Target 50334; HLA-B*58:01; MYH4; ENSG00000264424; TAA
KSAMKTLAF

SEQ ID NO: 50335 - protein, 9 aa, Homo sapiens
  Table A; Target 50335; HLA-C*16:01; MYH4; ENSG00000264424; TAA
KSAMKTLAF

SEQ ID NO: 50336 - protein, 9 aa, Homo sapiens
  Table A; Target 50336; HLA-A*03:01; MYH4; ENSG00000264424; TAA
KSNNFQKPK

SEQ ID NO: 50337 - protein, 9 aa, Homo sapiens
  Table A; Target 50337; HLA-A*03:02; MYH4; ENSG00000264424; TAA
KSNNFQKPK

SEQ ID NO: 50338 - protein, 9 aa, Homo sapiens
  Table A; Target 50338; HLA-A*11:01; MYH4; ENSG00000264424; TAA
KSNNFQKPK

SEQ ID NO: 50339 - protein, 9 aa, Homo sapiens
  Table A; Target 50339; HLA-A*31:01; MYH4; ENSG00000264424; TAA
KSNNFQKPK

SEQ ID NO: 50340 - protein, 10 aa, Homo sapiens
  Table A; Target 50340; HLA-C*06:02; MYH4; ENSG00000264424; TAA
KSNNFQKPKP

SEQ ID NO: 50341 - protein, 8 aa, Homo sapiens
  Table A; Target 50341; HLA-B*57:01; MYH4; ENSG00000264424; TAA
KSRVTFQL

SEQ ID NO: 50342 - protein, 9 aa, Homo sapiens
  Table A; Target 50342; HLA-A*03:01; MYH4; ENSG00000264424; TAA
KSRVTFQLK

SEQ ID NO: 50343 - protein, 9 aa, Homo sapiens
  Table A; Target 50343; HLA-A*31:01; MYH4; ENSG00000264424; TAA
KSRVTFQLK

SEQ ID NO: 50344 - protein, 9 aa, Homo sapiens
  Table A; Target 50344; HLA-B*57:01; MYH4; ENSG00000264424; TAA
KSRVTFQLK

SEQ ID NO: 50345 - protein, 8 aa, Homo sapiens
  Table A; Target 50345; HLA-A*32:01; MYH4; ENSG00000264424; TAA
KSTLAHAL

SEQ ID NO: 50346 - protein, 8 aa, Homo sapiens
  Table A; Target 50346; HLA-B*08:01; MYH4; ENSG00000264424; TAA
KSTLAHAL

SEQ ID NO: 50347 - protein, 8 aa, Homo sapiens
  Table A; Target 50347; HLA-B*37:01; MYH4; ENSG00000264424; TAA
KSTLAHAL

SEQ ID NO: 50348 - protein, 8 aa, Homo sapiens
  Table A; Target 50348; HLA-B*40:02; MYH4; ENSG00000264424; TAA
KSTLAHAL

SEQ ID NO: 50349 - protein, 8 aa, Homo sapiens
  Table A; Target 50349; HLA-B*58:01; MYH4; ENSG00000264424; TAA
KSTLAHAL

SEQ ID NO: 50350 - protein, 8 aa, Homo sapiens
  Table A; Target 50350; HLA-C*03:04; MYH4; ENSG00000264424; TAA
KSTLAHAL

SEQ ID NO: 50351 - protein, 8 aa, Homo sapiens
  Table A; Target 50351; HLA-C*06:02; MYH4; ENSG00000264424; TAA
KSTLAHAL

SEQ ID NO: 50352 - protein, 8 aa, Homo sapiens
  Table A; Target 50352; HLA-C*16:01; MYH4; ENSG00000264424; TAA
KSTLAHAL

SEQ ID NO: 50353 - protein, 8 aa, Homo sapiens
  Table A; Target 50353; HLA-C*16:02; MYH4; ENSG00000264424; TAA
KSTLAHAL

SEQ ID NO: 50354 - protein, 8 aa, Homo sapiens
  Table A; Target 50354; HLA-C*05:01; MYH4; ENSG00000264424; TAA
KTEAGATV

SEQ ID NO: 50355 - protein, 10 aa, Homo sapiens
  Table A; Target 50355; HLA-A*01:01; MYH4; ENSG00000264424; TAA
KTEAGATVTV

SEQ ID NO: 50356 - protein, 10 aa, Homo sapiens
  Table A; Target 50356; HLA-B*40:01; MYH4; ENSG00000264424; TAA
KTEAGATVTV

SEQ ID NO: 50357 - protein, 10 aa, Homo sapiens
  Table A; Target 50357; HLA-B*58:01; MYH4; ENSG00000264424; TAA
KTEAGATVTV

SEQ ID NO: 50358 - protein, 10 aa, Homo sapiens
  Table A; Target 50358; HLA-C*05:01; MYH4; ENSG00000264424; TAA
KTEAGATVTV

SEQ ID NO: 50359 - protein, 11 aa, Homo sapiens
  Table A; Target 50359; HLA-A*01:01; MYH4; ENSG00000264424; TAA
KTEAGATVTVK

SEQ ID NO: 50360 - protein, 11 aa, Homo sapiens
  Table A; Target 50360; HLA-A*03:01; MYH4; ENSG00000264424; TAA
KTEAGATVTVK

SEQ ID NO: 50361 - protein, 11 aa, Homo sapiens
  Table A; Target 50361; HLA-A*03:02; MYH4; ENSG00000264424; TAA
KTEAGATVTVK

SEQ ID NO: 50362 - protein, 11 aa, Homo sapiens
  Table A; Target 50362; HLA-A*11:01; MYH4; ENSG00000264424; TAA
KTEAGATVTVK

SEQ ID NO: 50363 - protein, 11 aa, Homo sapiens
  Table A; Target 50363; HLA-B*27:02; MYH4; ENSG00000264424; TAA
KTEAGATVTVK

SEQ ID NO: 50364 - protein, 11 aa, Homo sapiens
  Table A; Target 50364; HLA-C*07:06; MYH4; ENSG00000264424; TAA
KTEAGATVTVK

SEQ ID NO: 50365 - protein, 9 aa, Homo sapiens
  Table A; Target 50365; HLA-A*31:01; MYH4; ENSG00000264424; TAA
KTKEEEQQR

SEQ ID NO: 50366 - protein, 9 aa, Homo sapiens
  Table A; Target 50366; HLA-A*33:03; MYH4; ENSG00000264424; TAA
KTKEEEQQR

SEQ ID NO: 50367 - protein, 9 aa, Homo sapiens
  Table A; Target 50367; HLA-C*07:06; MYH4; ENSG00000264424; TAA
KTKEEEQQR

SEQ ID NO: 50368 - protein, 9 aa, Homo sapiens
  Table A; Target 50368; HLA-A*03:01; MYH4; ENSG00000264424; TAA
KTKIQLEAK

SEQ ID NO: 50369 - protein, 9 aa, Homo sapiens
  Table A; Target 50369; HLA-A*03:02; MYH4; ENSG00000264424; TAA
KTKIQLEAK

SEQ ID NO: 50370 - protein, 10 aa, Homo sapiens
  Table A; Target 50370; HLA-B*40:02; MYH4; ENSG00000264424; TAA
KTPGAMEHEL

SEQ ID NO: 50371 - protein, 10 aa, Homo sapiens
  Table A; Target 50371; HLA-B*58:01; MYH4; ENSG00000264424; TAA
KTPGAMEHEL

SEQ ID NO: 50372 - protein, 10 aa, Homo sapiens
  Table A; Target 50372; HLA-C*01:02; MYH4; ENSG00000264424; TAA
KTPGAMEHEL

SEQ ID NO: 50373 - protein, 10 aa, Homo sapiens
  Table A; Target 50373; HLA-C*06:02; MYH4; ENSG00000264424; TAA
KTPGAMEHEL

SEQ ID NO: 50374 - protein, 10 aa, Homo sapiens
  Table A; Target 50374; HLA-C*07:02; MYH4; ENSG00000264424; TAA
KTPGAMEHEL

SEQ ID NO: 50375 - protein, 10 aa, Homo sapiens
  Table A; Target 50375; HLA-A*03:01; MYH4; ENSG00000264424; TAA
KTSVFVVDPK

SEQ ID NO: 50376 - protein, 10 aa, Homo sapiens
  Table A; Target 50376; HLA-A*03:02; MYH4; ENSG00000264424; TAA
KTSVFVVDPK

SEQ ID NO: 50377 - protein, 10 aa, Homo sapiens
  Table A; Target 50377; HLA-A*11:01; MYH4; ENSG00000264424; TAA
KTSVFVVDPK

SEQ ID NO: 50378 - protein, 10 aa, Homo sapiens
  Table A; Target 50378; HLA-B*27:02; MYH4; ENSG00000264424; TAA
KTSVFVVDPK

SEQ ID NO: 50379 - protein, 11 aa, Homo sapiens
  Table A; Target 50379; HLA-B*57:01; MYH4; ENSG00000264424; TAA
KTVRNDNSSRF

SEQ ID NO: 50380 - protein, 11 aa, Homo sapiens
  Table A; Target 50380; HLA-B*58:01; MYH4; ENSG00000264424; TAA
KTVRNDNSSRF

SEQ ID NO: 50381 - protein, 9 aa, Homo sapiens
  Table A; Target 50381; HLA-A*03:01; MYH4; ENSG00000264424; TAA
KVGNEFVTK

SEQ ID NO: 50382 - protein, 9 aa, Homo sapiens
  Table A; Target 50382; HLA-A*03:02; MYH4; ENSG00000264424; TAA
KVGNEFVTK

SEQ ID NO: 50383 - protein, 9 aa, Homo sapiens
  Table A; Target 50383; HLA-A*11:01; MYH4; ENSG00000264424; TAA
KVGNEFVTK

SEQ ID NO: 50384 - protein, 9 aa, Homo sapiens
  Table A; Target 50384; HLA-A*31:01; MYH4; ENSG00000264424; TAA
KVGNEFVTK

SEQ ID NO: 50385 - protein, 9 aa, Homo sapiens
  Table A; Target 50385; HLA-B*27:05; MYH4; ENSG00000264424; TAA
KVGNEFVTK

SEQ ID NO: 50386 - protein, 9 aa, Homo sapiens
  Table A; Target 50386; HLA-B*57:01; MYH4; ENSG00000264424; TAA
KVGNEFVTK

SEQ ID NO: 50387 - protein, 9 aa, Homo sapiens
  Table A; Target 50387; HLA-A*30:02; MYH4; ENSG00000264424; TAA
KVKNLTEEM

SEQ ID NO: 50388 - protein, 9 aa, Homo sapiens
  Table A; Target 50388; HLA-A*31:01; MYH4; ENSG00000264424; TAA
KVKNLTEEM

SEQ ID NO: 50389 - protein, 9 aa, Homo sapiens
  Table A; Target 50389; HLA-A*32:01; MYH4; ENSG00000264424; TAA
KVKNLTEEM

SEQ ID NO: 50390 - protein, 9 aa, Homo sapiens
  Table A; Target 50390; HLA-B*07:02; MYH4; ENSG00000264424; TAA
KVKNLTEEM

SEQ ID NO: 50391 - protein, 9 aa, Homo sapiens
  Table A; Target 50391; HLA-B*08:01; MYH4; ENSG00000264424; TAA
KVKNLTEEM

SEQ ID NO: 50392 - protein, 9 aa, Homo sapiens
  Table A; Target 50392; HLA-B*15:01; MYH4; ENSG00000264424; TAA
KVKNLTEEM

SEQ ID NO: 50393 - protein, 9 aa, Homo sapiens
  Table A; Target 50393; HLA-B*15:03; MYH4; ENSG00000264424; TAA
KVKNLTEEM

SEQ ID NO: 50394 - protein, 9 aa, Homo sapiens
  Table A; Target 50394; HLA-B*40:02; MYH4; ENSG00000264424; TAA
KVKNLTEEM

SEQ ID NO: 50395 - protein, 9 aa, Homo sapiens
  Table A; Target 50395; HLA-B*46:01; MYH4; ENSG00000264424; TAA
KVKNLTEEM

SEQ ID NO: 50396 - protein, 9 aa, Homo sapiens
  Table A; Target 50396; HLA-B*57:01; MYH4; ENSG00000264424; TAA
KVKNLTEEM

SEQ ID NO: 50397 - protein, 9 aa, Homo sapiens
  Table A; Target 50397; HLA-B*58:01; MYH4; ENSG00000264424; TAA
KVKNLTEEM

SEQ ID NO: 50398 - protein, 9 aa, Homo sapiens
  Table A; Target 50398; HLA-C*01:02; MYH4; ENSG00000264424; TAA
KVKNLTEEM

SEQ ID NO: 50399 - protein, 9 aa, Homo sapiens
  Table A; Target 50399; HLA-C*02:02; MYH4; ENSG00000264424; TAA
KVKNLTEEM

SEQ ID NO: 50400 - protein, 9 aa, Homo sapiens
  Table A; Target 50400; HLA-C*07:04; MYH4; ENSG00000264424; TAA
KVKNLTEEM

SEQ ID NO: 50401 - protein, 9 aa, Homo sapiens
  Table A; Target 50401; HLA-C*12:03; MYH4; ENSG00000264424; TAA
KVKNLTEEM

SEQ ID NO: 50402 - protein, 9 aa, Homo sapiens
  Table A; Target 50402; HLA-C*14:02; MYH4; ENSG00000264424; TAA
KVKNLTEEM

SEQ ID NO: 50403 - protein, 9 aa, Homo sapiens
  Table A; Target 50403; HLA-C*16:01; MYH4; ENSG00000264424; TAA
KVKNLTEEM

SEQ ID NO: 50404 - protein, 10 aa, Homo sapiens
  Table A; Target 50404; HLA-A*30:02; MYH4; ENSG00000264424; TAA
KVLAEWKQKY

SEQ ID NO: 50405 - protein, 9 aa, Homo sapiens
  Table A; Target 50405; HLA-A*03:01; MYH4; ENSG00000264424; TAA
KVNTLTKAK

SEQ ID NO: 50406 - protein, 9 aa, Homo sapiens
  Table A; Target 50406; HLA-A*03:02; MYH4; ENSG00000264424; TAA
KVNTLTKAK

SEQ ID NO: 50407 - protein, 9 aa, Homo sapiens
  Table A; Target 50407; HLA-A*11:01; MYH4; ENSG00000264424; TAA
KVNTLTKAK

SEQ ID NO: 50408 - protein, 9 aa, Homo sapiens
  Table A; Target 50408; HLA-A*31:01; MYH4; ENSG00000264424; TAA
KVNTLTKAK

SEQ ID NO: 50409 - protein, 9 aa, Homo sapiens
  Table A; Target 50409; HLA-A*32:01; MYH4; ENSG00000264424; TAA
KVNTLTKAK

SEQ ID NO: 50410 - protein, 11 aa, Homo sapiens
  Table A; Target 50410; HLA-A*03:02; MYH4; ENSG00000264424; TAA
KVNTLTKAKTK

SEQ ID NO: 50411 - protein, 9 aa, Homo sapiens
  Table A; Target 50411; HLA-A*23:01; MYH4; ENSG00000264424; TAA
KYEETQAEL

SEQ ID NO: 50412 - protein, 9 aa, Homo sapiens
  Table A; Target 50412; HLA-A*24:02; MYH4; ENSG00000264424; TAA
KYEETQAEL

SEQ ID NO: 50413 - protein, 9 aa, Homo sapiens
  Table A; Target 50413; HLA-B*35:03; MYH4; ENSG00000264424; TAA
KYEETQAEL

SEQ ID NO: 50414 - protein, 9 aa, Homo sapiens
  Table A; Target 50414; HLA-B*40:01; MYH4; ENSG00000264424; TAA
KYEETQAEL

SEQ ID NO: 50415 - protein, 9 aa, Homo sapiens
  Table A; Target 50415; HLA-C*01:02; MYH4; ENSG00000264424; TAA
KYEETQAEL

SEQ ID NO: 50416 - protein, 9 aa, Homo sapiens
  Table A; Target 50416; HLA-C*04:01; MYH4; ENSG00000264424; TAA
KYEETQAEL

SEQ ID NO: 50417 - protein, 9 aa, Homo sapiens
  Table A; Target 50417; HLA-C*05:01; MYH4; ENSG00000264424; TAA
KYEETQAEL

SEQ ID NO: 50418 - protein, 9 aa, Homo sapiens
  Table A; Target 50418; HLA-C*14:02; MYH4; ENSG00000264424; TAA
KYEETQAEL

SEQ ID NO: 50419 - protein, 9 aa, Homo sapiens
  Table A; Target 50419; HLA-A*31:01; MYH4; ENSG00000264424; TAA
KYETDAIQR

SEQ ID NO: 50420 - protein, 9 aa, Homo sapiens
  Table A; Target 50420; HLA-A*33:01; MYH4; ENSG00000264424; TAA
KYETDAIQR

SEQ ID NO: 50421 - protein, 9 aa, Homo sapiens
  Table A; Target 50421; HLA-A*33:03; MYH4; ENSG00000264424; TAA
KYETDAIQR

SEQ ID NO: 50422 - protein, 10 aa, Homo sapiens
  Table A; Target 50422; HLA-B*27:02; MYH4; ENSG00000264424; TAA
LAACIELIEK

SEQ ID NO: 50423 - protein, 8 aa, Homo sapiens
  Table A; Target 50423; HLA-B*54:01; MYH4; ENSG00000264424; TAA
LAFLFSGA

SEQ ID NO: 50424 - protein, 11 aa, Homo sapiens
  Table A; Target 50424; HLA-B*54:01; MYH4; ENSG00000264424; TAA
LAFLFSGAQTA

SEQ ID NO: 50425 - protein, 8 aa, Homo sapiens
  Table A; Target 50425; HLA-B*54:01; MYH4; ENSG00000264424; TAA
LAHALQSA

SEQ ID NO: 50426 - protein, 9 aa, Homo sapiens
  Table A; Target 50426; HLA-A*33:01; MYH4; ENSG00000264424; TAA
LAHALQSAR

SEQ ID NO: 50427 - protein, 9 aa, Homo sapiens
  Table A; Target 50427; HLA-A*33:03; MYH4; ENSG00000264424; TAA
LAHALQSAR

SEQ ID NO: 50428 - protein, 9 aa, Homo sapiens
  Table A; Target 50428; HLA-A*68:01; MYH4; ENSG00000264424; TAA
LAHALQSAR

SEQ ID NO: 50429 - protein, 9 aa, Homo sapiens
  Table A; Target 50429; HLA-C*07:06; MYH4; ENSG00000264424; TAA
LAHALQSAR

SEQ ID NO: 50430 - protein, 9 aa, Homo sapiens
  Table A; Target 50430; HLA-C*16:02; MYH4; ENSG00000264424; TAA
LAIQLQKKI

SEQ ID NO: 50431 - protein, 9 aa, Homo sapiens
  Table A; Target 50431; HLA-B*46:01; MYH4; ENSG00000264424; TAA
LAKAIYEKM

SEQ ID NO: 50432 - protein, 9 aa, Homo sapiens
  Table A; Target 50432; HLA-C*02:02; MYH4; ENSG00000264424; TAA
LAKAIYEKM

SEQ ID NO: 50433 - protein, 9 aa, Homo sapiens
  Table A; Target 50433; HLA-C*12:03; MYH4; ENSG00000264424; TAA
LAKAIYEKM

SEQ ID NO: 50434 - protein, 9 aa, Homo sapiens
  Table A; Target 50434; HLA-C*16:04; MYH4; ENSG00000264424; TAA
LAKAIYEKM

SEQ ID NO: 50435 - protein, 9 aa, Homo sapiens
  Table A; Target 50435; HLA-A*01:01; MYH4; ENSG00000264424; TAA
LASADIETY

SEQ ID NO: 50436 - protein, 9 aa, Homo sapiens
  Table A; Target 50436; HLA-A*25:01; MYH4; ENSG00000264424; TAA
LASADIETY

SEQ ID NO: 50437 - protein, 9 aa, Homo sapiens
  Table A; Target 50437; HLA-A*29:02; MYH4; ENSG00000264424; TAA
LASADIETY

SEQ ID NO: 50438 - protein, 9 aa, Homo sapiens
  Table A; Target 50438; HLA-A*30:02; MYH4; ENSG00000264424; TAA
LASADIETY

SEQ ID NO: 50439 - protein, 9 aa, Homo sapiens
  Table A; Target 50439; HLA-B*15:01; MYH4; ENSG00000264424; TAA
LASADIETY

SEQ ID NO: 50440 - protein, 9 aa, Homo sapiens
  Table A; Target 50440; HLA-B*15:03; MYH4; ENSG00000264424; TAA
LASADIETY

SEQ ID NO: 50441 - protein, 9 aa, Homo sapiens
  Table A; Target 50441; HLA-B*18:01; MYH4; ENSG00000264424; TAA
LASADIETY

SEQ ID NO: 50442 - protein, 9 aa, Homo sapiens
  Table A; Target 50442; HLA-B*27:02; MYH4; ENSG00000264424; TAA
LASADIETY

SEQ ID NO: 50443 - protein, 9 aa, Homo sapiens
  Table A; Target 50443; HLA-B*27:05; MYH4; ENSG00000264424; TAA
LASADIETY

SEQ ID NO: 50444 - protein, 9 aa, Homo sapiens
  Table A; Target 50444; HLA-B*35:01; MYH4; ENSG00000264424; TAA
LASADIETY

SEQ ID NO: 50445 - protein, 9 aa, Homo sapiens
  Table A; Target 50445; HLA-B*35:03; MYH4; ENSG00000264424; TAA
LASADIETY

SEQ ID NO: 50446 - protein, 9 aa, Homo sapiens
  Table A; Target 50446; HLA-B*39:01; MYH4; ENSG00000264424; TAA
LASADIETY

SEQ ID NO: 50447 - protein, 9 aa, Homo sapiens
  Table A; Target 50447; HLA-B*46:01; MYH4; ENSG00000264424; TAA
LASADIETY

SEQ ID NO: 50448 - protein, 9 aa, Homo sapiens
  Table A; Target 50448; HLA-B*55:01; MYH4; ENSG00000264424; TAA
LASADIETY

SEQ ID NO: 50449 - protein, 9 aa, Homo sapiens
  Table A; Target 50449; HLA-B*57:01; MYH4; ENSG00000264424; TAA
LASADIETY

SEQ ID NO: 50450 - protein, 9 aa, Homo sapiens
  Table A; Target 50450; HLA-B*58:01; MYH4; ENSG00000264424; TAA
LASADIETY

SEQ ID NO: 50451 - protein, 9 aa, Homo sapiens
  Table A; Target 50451; HLA-C*02:02; MYH4; ENSG00000264424; TAA
LASADIETY

SEQ ID NO: 50452 - protein, 9 aa, Homo sapiens
  Table A; Target 50452; HLA-C*03:03; MYH4; ENSG00000264424; TAA
LASADIETY

SEQ ID NO: 50453 - protein, 9 aa, Homo sapiens
  Table A; Target 50453; HLA-C*03:04; MYH4; ENSG00000264424; TAA
LASADIETY

SEQ ID NO: 50454 - protein, 9 aa, Homo sapiens
  Table A; Target 50454; HLA-C*07:04; MYH4; ENSG00000264424; TAA
LASADIETY

SEQ ID NO: 50455 - protein, 9 aa, Homo sapiens
  Table A; Target 50455; HLA-C*07:06; MYH4; ENSG00000264424; TAA
LASADIETY

SEQ ID NO: 50456 - protein, 9 aa, Homo sapiens
  Table A; Target 50456; HLA-C*12:03; MYH4; ENSG00000264424; TAA
LASADIETY

SEQ ID NO: 50457 - protein, 9 aa, Homo sapiens
  Table A; Target 50457; HLA-C*16:01; MYH4; ENSG00000264424; TAA
LASADIETY

SEQ ID NO: 50458 - protein, 9 aa, Homo sapiens
  Table A; Target 50458; HLA-C*16:02; MYH4; ENSG00000264424; TAA
LASADIETY

SEQ ID NO: 50459 - protein, 9 aa, Homo sapiens
  Table A; Target 50459; HLA-C*16:04; MYH4; ENSG00000264424; TAA
LASADIETY

SEQ ID NO: 50460 - protein, 8 aa, Homo sapiens
  Table A; Target 50460; HLA-B*51:01; MYH4; ENSG00000264424; TAA
LASNMETV

SEQ ID NO: 50461 - protein, 8 aa, Homo sapiens
  Table A; Target 50461; HLA-C*02:02; MYH4; ENSG00000264424; TAA
LASNMETV

SEQ ID NO: 50462 - protein, 10 aa, Homo sapiens
  Table A; Target 50462; HLA-B*27:02; MYH4; ENSG00000264424; TAA
LASNMETVSK

SEQ ID NO: 50463 - protein, 10 aa, Homo sapiens
  Table A; Target 50463; HLA-C*07:06; MYH4; ENSG00000264424; TAA
LASNMETVSK

SEQ ID NO: 50464 - protein, 9 aa, Homo sapiens
  Table A; Target 50464; HLA-A*30:01; MYH4; ENSG00000264424; TAA
LDASERVQL

SEQ ID NO: 50465 - protein, 9 aa, Homo sapiens
  Table A; Target 50465; HLA-B*37:01; MYH4; ENSG00000264424; TAA
LDASERVQL

SEQ ID NO: 50466 - protein, 9 aa, Homo sapiens
  Table A; Target 50466; HLA-B*38:01; MYH4; ENSG00000264424; TAA
LDASERVQL

SEQ ID NO: 50467 - protein, 9 aa, Homo sapiens
  Table A; Target 50467; HLA-B*40:01; MYH4; ENSG00000264424; TAA
LDASERVQL

SEQ ID NO: 50468 - protein, 9 aa, Homo sapiens
  Table A; Target 50468; HLA-B*40:01; MYH4; ENSG00000264424; TAA
LDEAEQLAL

SEQ ID NO: 50469 - protein, 10 aa, Homo sapiens
  Table A; Target 50469; HLA-B*27:02; MYH4; ENSG00000264424; TAA
LDEAEQLALK

SEQ ID NO: 50470 - protein, 8 aa, Homo sapiens
  Table A; Target 50470; HLA-B*37:01; MYH4; ENSG00000264424; TAA
LDETIAKL

SEQ ID NO: 50471 - protein, 8 aa, Homo sapiens
  Table A; Target 50471; HLA-B*08:01; MYH4; ENSG00000264424; TAA
LDHEKSEL

SEQ ID NO: 50472 - protein, 8 aa, Homo sapiens
  Table A; Target 50472; HLA-B*37:01; MYH4; ENSG00000264424; TAA
LDHEKSEL

SEQ ID NO: 50473 - protein, 8 aa, Homo sapiens
  Table A; Target 50473; HLA-B*40:02; MYH4; ENSG00000264424; TAA
LDHEKSEL

SEQ ID NO: 50474 - protein, 8 aa, Homo sapiens
  Table A; Target 50474; HLA-C*06:02; MYH4; ENSG00000264424; TAA
LDHLETLK

SEQ ID NO: 50475 - protein, 9 aa, Homo sapiens
  Table A; Target 50475; HLA-A*30:02; MYH4; ENSG00000264424; TAA
LDTKQPRQY

SEQ ID NO: 50476 - protein, 9 aa, Homo sapiens
  Table A; Target 50476; HLA-C*16:01; MYH4; ENSG00000264424; TAA
LDTKQPRQY

SEQ ID NO: 50477 - protein, 9 aa, Homo sapiens
  Table A; Target 50477; HLA-C*16:02; MYH4; ENSG00000264424; TAA
LDTKQPRQY

SEQ ID NO: 50478 - protein, 10 aa, Homo sapiens
  Table A; Target 50478; HLA-B*49:01; MYH4; ENSG00000264424; TAA
LEAFGNAKTV

SEQ ID NO: 50479 - protein, 8 aa, Homo sapiens
  Table A; Target 50479; HLA-B*49:01; MYH4; ENSG00000264424; TAA
LEAKIKEV

SEQ ID NO: 50480 - protein, 8 aa, Homo sapiens
  Table A; Target 50480; HLA-B*49:01; MYH4; ENSG00000264424; TAA
LEDECSEL

SEQ ID NO: 50481 - protein, 8 aa, Homo sapiens
  Table A; Target 50481; HLA-C*05:01; MYH4; ENSG00000264424; TAA
LEDECSEL

SEQ ID NO: 50482 - protein, 8 aa, Homo sapiens
  Table A; Target 50482; HLA-B*18:01; MYH4; ENSG00000264424; TAA
LEDQIISA

SEQ ID NO: 50483 - protein, 8 aa, Homo sapiens
  Table A; Target 50483; HLA-B*49:01; MYH4; ENSG00000264424; TAA
LEDQIISA

SEQ ID NO: 50484 - protein, 11 aa, Homo sapiens
  Table A; Target 50484; HLA-B*40:01; MYH4; ENSG00000264424; TAA
LEDQIISANPL

SEQ ID NO: 50485 - protein, 8 aa, Homo sapiens
  Table A; Target 50485; HLA-B*49:01; MYH4; ENSG00000264424; TAA
LEDQLSEI

SEQ ID NO: 50486 - protein, 8 aa, Homo sapiens
  Table A; Target 50486; HLA-B*40:01; MYH4; ENSG00000264424; TAA
LEEAEASL

SEQ ID NO: 50487 - protein, 10 aa, Homo sapiens
  Table A; Target 50487; HLA-A*30:01; MYH4; ENSG00000264424; TAA
LEEAGGATSA

SEQ ID NO: 50488 - protein, 10 aa, Homo sapiens
  Table A; Target 50488; HLA-B*40:01; MYH4; ENSG00000264424; TAA
LEEAGGATSA

SEQ ID NO: 50489 - protein, 10 aa, Homo sapiens
  Table A; Target 50489; HLA-B*49:01; MYH4; ENSG00000264424; TAA
LEEAGGATSA

SEQ ID NO: 50490 - protein, 11 aa, Homo sapiens
  Table A; Target 50490; HLA-A*30:01; MYH4; ENSG00000264424; TAA
LEEETKAKSTL

SEQ ID NO: 50491 - protein, 11 aa, Homo sapiens
  Table A; Target 50491; HLA-B*40:01; MYH4; ENSG00000264424; TAA
LEEETKAKSTL

SEQ ID NO: 50492 - protein, 11 aa, Homo sapiens
  Table A; Target 50492; HLA-B*40:02; MYH4; ENSG00000264424; TAA
LEEETKAKSTL

SEQ ID NO: 50493 - protein, 8 aa, Homo sapiens
  Table A; Target 50493; HLA-B*40:01; MYH4; ENSG00000264424; TAA
LEEISERL

SEQ ID NO: 50494 - protein, 8 aa, Homo sapiens
  Table A; Target 50494; HLA-A*30:01; MYH4; ENSG00000264424; TAA
LEEKMVTL

SEQ ID NO: 50495 - protein, 8 aa, Homo sapiens
  Table A; Target 50495; HLA-B*18:01; MYH4; ENSG00000264424; TAA
LEEKMVTL

SEQ ID NO: 50496 - protein, 8 aa, Homo sapiens
  Table A; Target 50496; HLA-B*40:01; MYH4; ENSG00000264424; TAA
LEEKMVTL

SEQ ID NO: 50497 - protein, 8 aa, Homo sapiens
  Table A; Target 50497; HLA-B*40:02; MYH4; ENSG00000264424; TAA
LEEKMVTL

SEQ ID NO: 50498 - protein, 8 aa, Homo sapiens
  Table A; Target 50498; HLA-B*49:01; MYH4; ENSG00000264424; TAA
LEEKMVTL

SEQ ID NO: 50499 - protein, 9 aa, Homo sapiens
  Table A; Target 50499; HLA-A*30:01; MYH4; ENSG00000264424; TAA
LEEKMVTLM

SEQ ID NO: 50500 - protein, 9 aa, Homo sapiens
  Table A; Target 50500; HLA-B*18:01; MYH4; ENSG00000264424; TAA
LEEKMVTLM

SEQ ID NO: 50501 - protein, 9 aa, Homo sapiens
  Table A; Target 50501; HLA-B*37:01; MYH4; ENSG00000264424; TAA
LEEKMVTLM

SEQ ID NO: 50502 - protein, 9 aa, Homo sapiens
  Table A; Target 50502; HLA-B*40:01; MYH4; ENSG00000264424; TAA
LEEKMVTLM

SEQ ID NO: 50503 - protein, 9 aa, Homo sapiens
  Table A; Target 50503; HLA-B*49:01; MYH4; ENSG00000264424; TAA
LEEKMVTLM

SEQ ID NO: 50504 - protein, 9 aa, Homo sapiens
  Table A; Target 50504; HLA-B*40:01; MYH4; ENSG00000264424; TAA
LEEMRDEKL

SEQ ID NO: 50505 - protein, 10 aa, Homo sapiens
  Table A; Target 50505; HLA-B*40:02; MYH4; ENSG00000264424; TAA
LEESTLQHEA

SEQ ID NO: 50506 - protein, 10 aa, Homo sapiens
  Table A; Target 50506; HLA-B*49:01; MYH4; ENSG00000264424; TAA
LEESTLQHEA

SEQ ID NO: 50507 - protein, 9 aa, Homo sapiens
  Table A; Target 50507; HLA-A*30:01; MYH4; ENSG00000264424; TAA
LEHEEGKIL

SEQ ID NO: 50508 - protein, 9 aa, Homo sapiens
  Table A; Target 50508; HLA-B*40:01; MYH4; ENSG00000264424; TAA
LEHEEGKIL

SEQ ID NO: 50509 - protein, 9 aa, Homo sapiens
  Table A; Target 50509; HLA-B*40:02; MYH4; ENSG00000264424; TAA
LEHEEGKIL

SEQ ID NO: 50510 - protein, 9 aa, Homo sapiens
  Table A; Target 50510; HLA-B*44:02; MYH4; ENSG00000264424; TAA
LEHEEGKIL

SEQ ID NO: 50511 - protein, 9 aa, Homo sapiens
  Table A; Target 50511; HLA-B*44:03; MYH4; ENSG00000264424; TAA
LEHEEGKIL

SEQ ID NO: 50512 - protein, 8 aa, Homo sapiens
  Table A; Target 50512; HLA-B*08:01; MYH4; ENSG00000264424; TAA
LEKEKSEL

SEQ ID NO: 50513 - protein, 8 aa, Homo sapiens
  Table A; Target 50513; HLA-B*40:02; MYH4; ENSG00000264424; TAA
LEKEKSEL

SEQ ID NO: 50514 - protein, 8 aa, Homo sapiens
  Table A; Target 50514; HLA-B*08:01; MYH4; ENSG00000264424; TAA
LEKSRVTF

SEQ ID NO: 50515 - protein, 8 aa, Homo sapiens
  Table A; Target 50515; HLA-B*08:01; MYH4; ENSG00000264424; TAA
LEKTKQRL

SEQ ID NO: 50516 - protein, 10 aa, Homo sapiens
  Table A; Target 50516; HLA-B*49:01; MYH4; ENSG00000264424; TAA
LELNQVKSEI

SEQ ID NO: 50517 - protein, 8 aa, Homo sapiens
  Table A; Target 50517; HLA-B*18:01; MYH4; ENSG00000264424; TAA
LELTLAKV

SEQ ID NO: 50518 - protein, 8 aa, Homo sapiens
  Table A; Target 50518; HLA-B*49:01; MYH4; ENSG00000264424; TAA
LELTLAKV

SEQ ID NO: 50519 - protein, 8 aa, Homo sapiens
  Table A; Target 50519; HLA-B*18:01; MYH4; ENSG00000264424; TAA
LEQLCINF

SEQ ID NO: 50520 - protein, 10 aa, Homo sapiens
  Table A; Target 50520; HLA-B*27:02; MYH4; ENSG00000264424; TAA
LESEVESEQK

SEQ ID NO: 50521 - protein, 8 aa, Homo sapiens
  Table A; Target 50521; HLA-A*30:01; MYH4; ENSG00000264424; TAA
LETDISQI

SEQ ID NO: 50522 - protein, 8 aa, Homo sapiens
  Table A; Target 50522; HLA-B*13:02; MYH4; ENSG00000264424; TAA
LETDISQI

SEQ ID NO: 50523 - protein, 8 aa, Homo sapiens
  Table A; Target 50523; HLA-B*18:01; MYH4; ENSG00000264424; TAA
LETDISQI

SEQ ID NO: 50524 - protein, 8 aa, Homo sapiens
  Table A; Target 50524; HLA-B*40:01; MYH4; ENSG00000264424; TAA
LETDISQI

SEQ ID NO: 50525 - protein, 8 aa, Homo sapiens
  Table A; Target 50525; HLA-B*49:01; MYH4; ENSG00000264424; TAA
LETDISQI

SEQ ID NO: 50526 - protein, 9 aa, Homo sapiens
  Table A; Target 50526; HLA-C*12:03; MYH4; ENSG00000264424; TAA
LETDISQIQ

SEQ ID NO: 50527 - protein, 9 aa, Homo sapiens
  Table A; Target 50527; HLA-C*14:02; MYH4; ENSG00000264424; TAA
LFCVTVNPY

SEQ ID NO: 50528 - protein, 8 aa, Homo sapiens
  Table A; Target 50528; HLA-C*14:02; MYH4; ENSG00000264424; TAA
LFSGAQTA

SEQ ID NO: 50529 - protein, 10 aa, Homo sapiens
  Table A; Target 50529; HLA-C*14:02; MYH4; ENSG00000264424; TAA
LFSGAQTAEA

SEQ ID NO: 50530 - protein, 11 aa, Homo sapiens
  Table A; Target 50530; HLA-A*01:01; MYH4; ENSG00000264424; TAA
LGSIEIDHTQY

SEQ ID NO: 50531 - protein, 8 aa, Homo sapiens
  Table A; Target 50531; HLA-B*39:01; MYH4; ENSG00000264424; TAA
LHEPAVLY

SEQ ID NO: 50532 - protein, 8 aa, Homo sapiens
  Table A; Target 50532; HLA-C*07:04; MYH4; ENSG00000264424; TAA
LHEPAVLY

SEQ ID NO: 50533 - protein, 10 aa, Homo sapiens
  Table A; Target 50533; HLA-B*38:01; MYH4; ENSG00000264424; TAA
LHEPAVLYNL

SEQ ID NO: 50534 - protein, 8 aa, Homo sapiens
  Table A; Target 50534; HLA-B*39:01; MYH4; ENSG00000264424; TAA
LHTESGEF

SEQ ID NO: 50535 - protein, 8 aa, Homo sapiens
  Table A; Target 50535; HLA-C*05:01; MYH4; ENSG00000264424; TAA
LHTESGEF

SEQ ID NO: 50536 - protein, 8 aa, Homo sapiens
  Table A; Target 50536; HLA-B*38:01; MYH4; ENSG00000264424; TAA
LHTQNTSL

SEQ ID NO: 50537 - protein, 8 aa, Homo sapiens
  Table A; Target 50537; HLA-B*39:01; MYH4; ENSG00000264424; TAA
LHTQNTSL

SEQ ID NO: 50538 - protein, 9 aa, Homo sapiens
  Table A; Target 50538; HLA-B*38:01; MYH4; ENSG00000264424; TAA
LHTQNTSLI

SEQ ID NO: 50539 - protein, 8 aa, Homo sapiens
  Table A; Target 50539; HLA-B*08:01; MYH4; ENSG00000264424; TAA
LIKTKIQL

SEQ ID NO: 50540 - protein, 9 aa, Homo sapiens
  Table A; Target 50540; HLA-A*03:01; MYH4; ENSG00000264424; TAA
LINELSAQK

SEQ ID NO: 50541 - protein, 9 aa, Homo sapiens
  Table A; Target 50541; HLA-A*03:02; MYH4; ENSG00000264424; TAA
LINELSAQK

SEQ ID NO: 50542 - protein, 9 aa, Homo sapiens
  Table A; Target 50542; HLA-A*11:01; MYH4; ENSG00000264424; TAA
LINELSAQK

SEQ ID NO: 50543 - protein, 9 aa, Homo sapiens
  Table A; Target 50543; HLA-A*33:03; MYH4; ENSG00000264424; TAA
LINELSAQK

SEQ ID NO: 50544 - protein, 9 aa, Homo sapiens
  Table A; Target 50544; HLA-A*68:01; MYH4; ENSG00000264424; TAA
LINELSAQK

SEQ ID NO: 50545 - protein, 9 aa, Homo sapiens
  Table A; Target 50545; HLA-B*27:02; MYH4; ENSG00000264424; TAA
LINELSAQK

SEQ ID NO: 50546 - protein, 9 aa, Homo sapiens
  Table A; Target 50546; HLA-C*07:06; MYH4; ENSG00000264424; TAA
LINELSAQK

SEQ ID NO: 50547 - protein, 8 aa, Homo sapiens
  Table A; Target 50547; HLA-B*08:01; MYH4; ENSG00000264424; TAA
LINTKKKL

SEQ ID NO: 50548 - protein, 10 aa, Homo sapiens
  Table A; Target 50548; HLA-A*03:02; MYH4; ENSG00000264424; TAA
LITGESGAGK

SEQ ID NO: 50549 - protein, 9 aa, Homo sapiens
  Table A; Target 50549; HLA-B*15:03; MYH4; ENSG00000264424; TAA
LKLAQESTM

SEQ ID NO: 50550 - protein, 8 aa, Homo sapiens
  Table A; Target 50550; HLA-C*05:01; MYH4; ENSG00000264424; TAA
LLDASERV

SEQ ID NO: 50551 - protein, 10 aa, Homo sapiens
  Table A; Target 50551; HLA-A*02:07; MYH4; ENSG00000264424; TAA
LLDASERVQL

SEQ ID NO: 50552 - protein, 10 aa, Homo sapiens
  Table A; Target 50552; HLA-B*38:01; MYH4; ENSG00000264424; TAA
LLDASERVQL

SEQ ID NO: 50553 - protein, 10 aa, Homo sapiens
  Table A; Target 50553; HLA-B*55:01; MYH4; ENSG00000264424; TAA
LLDASERVQL

SEQ ID NO: 50554 - protein, 10 aa, Homo sapiens
  Table A; Target 50554; HLA-C*05:01; MYH4; ENSG00000264424; TAA
LLDASERVQL

SEQ ID NO: 50555 - protein, 11 aa, Homo sapiens
  Table A; Target 50555; HLA-A*02:07; MYH4; ENSG00000264424; TAA
LLDASERVQLL

SEQ ID NO: 50556 - protein, 9 aa, Homo sapiens
  Table A; Target 50556; HLA-A*01:01; MYH4; ENSG00000264424; TAA
LLEAFGNAK

SEQ ID NO: 50557 - protein, 9 aa, Homo sapiens
  Table A; Target 50557; HLA-A*03:01; MYH4; ENSG00000264424; TAA
LLEAFGNAK

SEQ ID NO: 50558 - protein, 9 aa, Homo sapiens
  Table A; Target 50558; HLA-A*03:02; MYH4; ENSG00000264424; TAA
LLEAFGNAK

SEQ ID NO: 50559 - protein, 11 aa, Homo sapiens
  Table A; Target 50559; HLA-A*02:03; MYH4; ENSG00000264424; TAA
LLEAFGNAKTV

SEQ ID NO: 50560 - protein, 11 aa, Homo sapiens
  Table A; Target 50560; HLA-C*16:02; MYH4; ENSG00000264424; TAA
LLEAFGNAKTV

SEQ ID NO: 50561 - protein, 8 aa, Homo sapiens
  Table A; Target 50561; HLA-B*46:01; MYH4; ENSG00000264424; TAA
LLGTLEEM

SEQ ID NO: 50562 - protein, 9 aa, Homo sapiens
  Table A; Target 50562; HLA-A*02:01; MYH4; ENSG00000264424; TAA
LLHTQNTSL

SEQ ID NO: 50563 - protein, 9 aa, Homo sapiens
  Table A; Target 50563; HLA-A*02:03; MYH4; ENSG00000264424; TAA
LLHTQNTSL

SEQ ID NO: 50564 - protein, 9 aa, Homo sapiens
  Table A; Target 50564; HLA-A*02:04; MYH4; ENSG00000264424; TAA
LLHTQNTSL

SEQ ID NO: 50565 - protein, 9 aa, Homo sapiens
  Table A; Target 50565; HLA-A*02:07; MYH4; ENSG00000264424; TAA
LLHTQNTSL

SEQ ID NO: 50566 - protein, 9 aa, Homo sapiens
  Table A; Target 50566; HLA-A*32:01; MYH4; ENSG00000264424; TAA
LLHTQNTSL

SEQ ID NO: 50567 - protein, 9 aa, Homo sapiens
  Table A; Target 50567; HLA-B*07:02; MYH4; ENSG00000264424; TAA
LLHTQNTSL

SEQ ID NO: 50568 - protein, 9 aa, Homo sapiens
  Table A; Target 50568; HLA-B*08:01; MYH4; ENSG00000264424; TAA
LLHTQNTSL

SEQ ID NO: 50569 - protein, 9 aa, Homo sapiens
  Table A; Target 50569; HLA-B*15:01; MYH4; ENSG00000264424; TAA
LLHTQNTSL

SEQ ID NO: 50570 - protein, 9 aa, Homo sapiens
  Table A; Target 50570; HLA-B*46:01; MYH4; ENSG00000264424; TAA
LLHTQNTSL

SEQ ID NO: 50571 - protein, 9 aa, Homo sapiens
  Table A; Target 50571; HLA-B*55:01; MYH4; ENSG00000264424; TAA
LLHTQNTSL

SEQ ID NO: 50572 - protein, 9 aa, Homo sapiens
  Table A; Target 50572; HLA-C*01:02; MYH4; ENSG00000264424; TAA
LLHTQNTSL

SEQ ID NO: 50573 - protein, 9 aa, Homo sapiens
  Table A; Target 50573; HLA-C*03:03; MYH4; ENSG00000264424; TAA
LLHTQNTSL

SEQ ID NO: 50574 - protein, 9 aa, Homo sapiens
  Table A; Target 50574; HLA-C*03:04; MYH4; ENSG00000264424; TAA
LLHTQNTSL

SEQ ID NO: 50575 - protein, 9 aa, Homo sapiens
  Table A; Target 50575; HLA-C*14:02; MYH4; ENSG00000264424; TAA
LLHTQNTSL

SEQ ID NO: 50576 - protein, 8 aa, Homo sapiens
  Table A; Target 50576; HLA-B*46:01; MYH4; ENSG00000264424; TAA
LLITTNPY

SEQ ID NO: 50577 - protein, 10 aa, Homo sapiens
  Table A; Target 50577; HLA-A*02:01; MYH4; ENSG00000264424; TAA
LMIDVERSNA

SEQ ID NO: 50578 - protein, 10 aa, Homo sapiens
  Table A; Target 50578; HLA-A*02:03; MYH4; ENSG00000264424; TAA
LMIDVERSNA

SEQ ID NO: 50579 - protein, 11 aa, Homo sapiens
  Table A; Target 50579; HLA-A*02:01; MYH4; ENSG00000264424; TAA
LMIDVERSNAA

SEQ ID NO: 50580 - protein, 11 aa, Homo sapiens
  Table A; Target 50580; HLA-A*02:03; MYH4; ENSG00000264424; TAA
LMIDVERSNAA

SEQ ID NO: 50581 - protein, 11 aa, Homo sapiens
  Table A; Target 50581; HLA-A*02:07; MYH4; ENSG00000264424; TAA
LMIDVERSNAA

SEQ ID NO: 50582 - protein, 11 aa, Homo sapiens
  Table A; Target 50582; HLA-A*32:01; MYH4; ENSG00000264424; TAA
LMIDVERSNAA

SEQ ID NO: 50583 - protein, 9 aa, Homo sapiens
  Table A; Target 50583; HLA-A*02:01; MYH4; ENSG00000264424; TAA
LMQAEVEEL

SEQ ID NO: 50584 - protein, 9 aa, Homo sapiens
  Table A; Target 50584; HLA-A*02:03; MYH4; ENSG00000264424; TAA
LMQAEVEEL

SEQ ID NO: 50585 - protein, 9 aa, Homo sapiens
  Table A; Target 50585; HLA-A*02:04; MYH4; ENSG00000264424; TAA
LMQAEVEEL

SEQ ID NO: 50586 - protein, 9 aa, Homo sapiens
  Table A; Target 50586; HLA-A*02:07; MYH4; ENSG00000264424; TAA
LMQAEVEEL

SEQ ID NO: 50587 - protein, 9 aa, Homo sapiens
  Table A; Target 50587; HLA-B*27:05; MYH4; ENSG00000264424; TAA
LMQAEVEEL

SEQ ID NO: 50588 - protein, 9 aa, Homo sapiens
  Table A; Target 50588; HLA-B*55:01; MYH4; ENSG00000264424; TAA
LMQAEVEEL

SEQ ID NO: 50589 - protein, 9 aa, Homo sapiens
  Table A; Target 50589; HLA-C*01:02; MYH4; ENSG00000264424; TAA
LMQAEVEEL

SEQ ID NO: 50590 - protein, 9 aa, Homo sapiens
  Table A; Target 50590; HLA-C*03:04; MYH4; ENSG00000264424; TAA
LMQAEVEEL

SEQ ID NO: 50591 - protein, 9 aa, Homo sapiens
  Table A; Target 50591; HLA-C*07:04; MYH4; ENSG00000264424; TAA
LMQAEVEEL

SEQ ID NO: 50592 - protein, 9 aa, Homo sapiens
  Table A; Target 50592; HLA-C*14:02; MYH4; ENSG00000264424; TAA
LMQAEVEEL

SEQ ID NO: 50593 - protein, 10 aa, Homo sapiens
  Table A; Target 50593; HLA-B*27:02; MYH4; ENSG00000264424; TAA
LMQAEVEELR

SEQ ID NO: 50594 - protein, 8 aa, Homo sapiens
  Table A; Target 50594; HLA-B*08:01; MYH4; ENSG00000264424; TAA
LMQEKNDL

SEQ ID NO: 50595 - protein, 9 aa, Homo sapiens
  Table A; Target 50595; HLA-A*01:01; MYH4; ENSG00000264424; TAA
LNETVVGLY

SEQ ID NO: 50596 - protein, 11 aa, Homo sapiens
  Table A; Target 50596; HLA-B*27:02; MYH4; ENSG00000264424; TAA
LNETVVGLYQK

SEQ ID NO: 50597 - protein, 8 aa, Homo sapiens
  Table A; Target 50597; HLA-B*08:01; MYH4; ENSG00000264424; TAA
LNKLMTNL

SEQ ID NO: 50598 - protein, 8 aa, Homo sapiens
  Table A; Target 50598; HLA-C*07:02; MYH4; ENSG00000264424; TAA
LNKLMTNL

SEQ ID NO: 50599 - protein, 8 aa, Homo sapiens
  Table A; Target 50599; HLA-B*08:01; MYH4; ENSG00000264424; TAA
LNQVKSEI

SEQ ID NO: 50600 - protein, 8 aa, Homo sapiens
  Table A; Target 50600; HLA-B*35:01; MYH4; ENSG00000264424; TAA
LPVYNPEV

SEQ ID NO: 50601 - protein, 8 aa, Homo sapiens
  Table A; Target 50601; HLA-B*35:03; MYH4; ENSG00000264424; TAA
LPVYNPEV

SEQ ID NO: 50602 - protein, 8 aa, Homo sapiens
  Table A; Target 50602; HLA-B*51:01; MYH4; ENSG00000264424; TAA
LPVYNPEV

SEQ ID NO: 50603 - protein, 8 aa, Homo sapiens
  Table A; Target 50603; HLA-B*54:01; MYH4; ENSG00000264424; TAA
LPVYNPEV

SEQ ID NO: 50604 - protein, 8 aa, Homo sapiens
  Table A; Target 50604; HLA-B*55:01; MYH4; ENSG00000264424; TAA
LPVYNPEV

SEQ ID NO: 50605 - protein, 8 aa, Homo sapiens
  Table A; Target 50605; HLA-B*56:01; MYH4; ENSG00000264424; TAA
LPVYNPEV

SEQ ID NO: 50606 - protein, 9 aa, Homo sapiens
  Table A; Target 50606; HLA-B*07:02; MYH4; ENSG00000264424; TAA
LPVYNPEVV

SEQ ID NO: 50607 - protein, 9 aa, Homo sapiens
  Table A; Target 50607; HLA-B*35:01; MYH4; ENSG00000264424; TAA
LPVYNPEVV

SEQ ID NO: 50608 - protein, 9 aa, Homo sapiens
  Table A; Target 50608; HLA-B*35:03; MYH4; ENSG00000264424; TAA
LPVYNPEVV

SEQ ID NO: 50609 - protein, 9 aa, Homo sapiens
  Table A; Target 50609; HLA-B*51:01; MYH4; ENSG00000264424; TAA
LPVYNPEVV

SEQ ID NO: 50610 - protein, 9 aa, Homo sapiens
  Table A; Target 50610; HLA-B*54:01; MYH4; ENSG00000264424; TAA
LPVYNPEVV

SEQ ID NO: 50611 - protein, 9 aa, Homo sapiens
  Table A; Target 50611; HLA-B*55:01; MYH4; ENSG00000264424; TAA
LPVYNPEVV

SEQ ID NO: 50612 - protein, 9 aa, Homo sapiens
  Table A; Target 50612; HLA-B*56:01; MYH4; ENSG00000264424; TAA
LPVYNPEVV

SEQ ID NO: 50613 - protein, 9 aa, Homo sapiens
  Table A; Target 50613; HLA-C*07:02; MYH4; ENSG00000264424; TAA
LPVYNPEVV

SEQ ID NO: 50614 - protein, 10 aa, Homo sapiens
  Table A; Target 50614; HLA-B*35:03; MYH4; ENSG00000264424; TAA
LPVYNPEVVT

SEQ ID NO: 50615 - protein, 10 aa, Homo sapiens
  Table A; Target 50615; HLA-B*54:01; MYH4; ENSG00000264424; TAA
LPVYNPEVVT

SEQ ID NO: 50616 - protein, 10 aa, Homo sapiens
  Table A; Target 50616; HLA-B*56:01; MYH4; ENSG00000264424; TAA
LPVYNPEVVT

SEQ ID NO: 50617 - protein, 11 aa, Homo sapiens
  Table A; Target 50617; HLA-B*35:03; MYH4; ENSG00000264424; TAA
LPVYNPEVVTA

SEQ ID NO: 50618 - protein, 11 aa, Homo sapiens
  Table A; Target 50618; HLA-B*54:01; MYH4; ENSG00000264424; TAA
LPVYNPEVVTA

SEQ ID NO: 50619 - protein, 11 aa, Homo sapiens
  Table A; Target 50619; HLA-B*55:01; MYH4; ENSG00000264424; TAA
LPVYNPEVVTA

SEQ ID NO: 50620 - protein, 11 aa, Homo sapiens
  Table A; Target 50620; HLA-B*56:01; MYH4; ENSG00000264424; TAA
LPVYNPEVVTA

SEQ ID NO: 50621 - protein, 8 aa, Homo sapiens
  Table A; Target 50621; HLA-C*05:01; MYH4; ENSG00000264424; TAA
LQDLVDKL

SEQ ID NO: 50622 - protein, 9 aa, Homo sapiens
  Table A; Target 50622; HLA-B*13:02; MYH4; ENSG00000264424; TAA
LQEAHQQTL

SEQ ID NO: 50623 - protein, 9 aa, Homo sapiens
  Table A; Target 50623; HLA-B*15:01; MYH4; ENSG00000264424; TAA
LQEAHQQTL

SEQ ID NO: 50624 - protein, 9 aa, Homo sapiens
  Table A; Target 50624; HLA-B*15:03; MYH4; ENSG00000264424; TAA
LQEAHQQTL

SEQ ID NO: 50625 - protein, 9 aa, Homo sapiens
  Table A; Target 50625; HLA-B*27:05; MYH4; ENSG00000264424; TAA
LQEAHQQTL

SEQ ID NO: 50626 - protein, 9 aa, Homo sapiens
  Table A; Target 50626; HLA-B*38:01; MYH4; ENSG00000264424; TAA
LQEAHQQTL

SEQ ID NO: 50627 - protein, 9 aa, Homo sapiens
  Table A; Target 50627; HLA-B*39:01; MYH4; ENSG00000264424; TAA
LQEAHQQTL

SEQ ID NO: 50628 - protein, 9 aa, Homo sapiens
  Table A; Target 50628; HLA-B*40:01; MYH4; ENSG00000264424; TAA
LQEAHQQTL

SEQ ID NO: 50629 - protein, 9 aa, Homo sapiens
  Table A; Target 50629; HLA-C*02:02; MYH4; ENSG00000264424; TAA
LQEAHQQTL

SEQ ID NO: 50630 - protein, 9 aa, Homo sapiens
  Table A; Target 50630; HLA-C*03:03; MYH4; ENSG00000264424; TAA
LQEAHQQTL

SEQ ID NO: 50631 - protein, 9 aa, Homo sapiens
  Table A; Target 50631; HLA-C*03:04; MYH4; ENSG00000264424; TAA
LQEAHQQTL

SEQ ID NO: 50632 - protein, 9 aa, Homo sapiens
  Table A; Target 50632; HLA-C*05:01; MYH4; ENSG00000264424; TAA
LQEAHQQTL

SEQ ID NO: 50633 - protein, 9 aa, Homo sapiens
  Table A; Target 50633; HLA-C*07:04; MYH4; ENSG00000264424; TAA
LQEAHQQTL

SEQ ID NO: 50634 - protein, 9 aa, Homo sapiens
  Table A; Target 50634; HLA-C*16:02; MYH4; ENSG00000264424; TAA
LQEAHQQTL

SEQ ID NO: 50635 - protein, 10 aa, Homo sapiens
  Table A; Target 50635; HLA-A*30:01; MYH4; ENSG00000264424; TAA
LQHEATAAAL

SEQ ID NO: 50636 - protein, 10 aa, Homo sapiens
  Table A; Target 50636; HLA-B*13:02; MYH4; ENSG00000264424; TAA
LQHEATAAAL

SEQ ID NO: 50637 - protein, 10 aa, Homo sapiens
  Table A; Target 50637; HLA-B*15:01; MYH4; ENSG00000264424; TAA
LQHEATAAAL

SEQ ID NO: 50638 - protein, 10 aa, Homo sapiens
  Table A; Target 50638; HLA-B*39:01; MYH4; ENSG00000264424; TAA
LQHEATAAAL

SEQ ID NO: 50639 - protein, 10 aa, Homo sapiens
  Table A; Target 50639; HLA-B*40:01; MYH4; ENSG00000264424; TAA
LQHEATAAAL

SEQ ID NO: 50640 - protein, 10 aa, Homo sapiens
  Table A; Target 50640; HLA-B*40:02; MYH4; ENSG00000264424; TAA
LQHEATAAAL

SEQ ID NO: 50641 - protein, 10 aa, Homo sapiens
  Table A; Target 50641; HLA-B*46:01; MYH4; ENSG00000264424; TAA
LQHEATAAAL

SEQ ID NO: 50642 - protein, 10 aa, Homo sapiens
  Table A; Target 50642; HLA-C*03:03; MYH4; ENSG00000264424; TAA
LQHEATAAAL

SEQ ID NO: 50643 - protein, 10 aa, Homo sapiens
  Table A; Target 50643; HLA-C*03:04; MYH4; ENSG00000264424; TAA
LQHEATAAAL

SEQ ID NO: 50644 - protein, 10 aa, Homo sapiens
  Table A; Target 50644; HLA-C*07:02; MYH4; ENSG00000264424; TAA
LQHEATAAAL

SEQ ID NO: 50645 - protein, 10 aa, Homo sapiens
  Table A; Target 50645; HLA-C*07:04; MYH4; ENSG00000264424; TAA
LQHEATAAAL

SEQ ID NO: 50646 - protein, 11 aa, Homo sapiens
  Table A; Target 50646; HLA-A*31:01; MYH4; ENSG00000264424; TAA
LQHEATAAALR

SEQ ID NO: 50647 - protein, 11 aa, Homo sapiens
  Table A; Target 50647; HLA-B*27:02; MYH4; ENSG00000264424; TAA
LQHEATAAALR

SEQ ID NO: 50648 - protein, 11 aa, Homo sapiens
  Table A; Target 50648; HLA-C*07:06; MYH4; ENSG00000264424; TAA
LQHEATAAALR

SEQ ID NO: 50649 - protein, 11 aa, Homo sapiens
  Table A; Target 50649; HLA-A*02:01; MYH4; ENSG00000264424; TAA
LQMEEDKVNTL

SEQ ID NO: 50650 - protein, 11 aa, Homo sapiens
  Table A; Target 50650; HLA-A*02:03; MYH4; ENSG00000264424; TAA
LQMEEDKVNTL

SEQ ID NO: 50651 - protein, 11 aa, Homo sapiens
  Table A; Target 50651; HLA-A*02:04; MYH4; ENSG00000264424; TAA
LQMEEDKVNTL

SEQ ID NO: 50652 - protein, 11 aa, Homo sapiens
  Table A; Target 50652; HLA-B*15:01; MYH4; ENSG00000264424; TAA
LQMEEDKVNTL

SEQ ID NO: 50653 - protein, 11 aa, Homo sapiens
  Table A; Target 50653; HLA-B*38:01; MYH4; ENSG00000264424; TAA
LQMEEDKVNTL

SEQ ID NO: 50654 - protein, 11 aa, Homo sapiens
  Table A; Target 50654; HLA-B*39:01; MYH4; ENSG00000264424; TAA
LQMEEDKVNTL

SEQ ID NO: 50655 - protein, 10 aa, Homo sapiens
  Table A; Target 50655; HLA-B*13:02; MYH4; ENSG00000264424; TAA
LQNEVEDLMI

SEQ ID NO: 50656 - protein, 10 aa, Homo sapiens
  Table A; Target 50656; HLA-B*38:01; MYH4; ENSG00000264424; TAA
LQNEVEDLMI

SEQ ID NO: 50657 - protein, 8 aa, Homo sapiens
  Table A; Target 50657; HLA-B*08:01; MYH4; ENSG00000264424; TAA
LQRVKQKL

SEQ ID NO: 50658 - protein, 8 aa, Homo sapiens
  Table A; Target 50658; HLA-A*30:02; MYH4; ENSG00000264424; TAA
LQTKVKAY

SEQ ID NO: 50659 - protein, 8 aa, Homo sapiens
  Table A; Target 50659; HLA-A*32:01; MYH4; ENSG00000264424; TAA
LQTKVKAY

SEQ ID NO: 50660 - protein, 8 aa, Homo sapiens
  Table A; Target 50660; HLA-B*15:01; MYH4; ENSG00000264424; TAA
LQTKVKAY

SEQ ID NO: 50661 - protein, 8 aa, Homo sapiens
  Table A; Target 50661; HLA-B*15:03; MYH4; ENSG00000264424; TAA
LQTKVKAY

SEQ ID NO: 50662 - protein, 8 aa, Homo sapiens
  Table A; Target 50662; HLA-B*18:01; MYH4; ENSG00000264424; TAA
LQTKVKAY

SEQ ID NO: 50663 - protein, 8 aa, Homo sapiens
  Table A; Target 50663; HLA-B*37:01; MYH4; ENSG00000264424; TAA
LQTKVKAY

SEQ ID NO: 50664 - protein, 8 aa, Homo sapiens
  Table A; Target 50664; HLA-B*44:03; MYH4; ENSG00000264424; TAA
LQTKVKAY

SEQ ID NO: 50665 - protein, 8 aa, Homo sapiens
  Table A; Target 50665; HLA-B*46:01; MYH4; ENSG00000264424; TAA
LQTKVKAY

SEQ ID NO: 50666 - protein, 8 aa, Homo sapiens
  Table A; Target 50666; HLA-B*58:01; MYH4; ENSG00000264424; TAA
LQTKVKAY

SEQ ID NO: 50667 - protein, 8 aa, Homo sapiens
  Table A; Target 50667; HLA-C*07:01; MYH4; ENSG00000264424; TAA
LQTKVKAY

SEQ ID NO: 50668 - protein, 8 aa, Homo sapiens
  Table A; Target 50668; HLA-C*07:04; MYH4; ENSG00000264424; TAA
LQTKVKAY

SEQ ID NO: 50669 - protein, 8 aa, Homo sapiens
  Table A; Target 50669; HLA-C*12:03; MYH4; ENSG00000264424; TAA
LQTKVKAY

SEQ ID NO: 50670 - protein, 8 aa, Homo sapiens
  Table A; Target 50670; HLA-C*16:01; MYH4; ENSG00000264424; TAA
LQTKVKAY

SEQ ID NO: 50671 - protein, 8 aa, Homo sapiens
  Table A; Target 50671; HLA-C*16:02; MYH4; ENSG00000264424; TAA
LQTKVKAY

SEQ ID NO: 50672 - protein, 8 aa, Homo sapiens
  Table A; Target 50672; HLA-C*16:04; MYH4; ENSG00000264424; TAA
LQTKVKAY

SEQ ID NO: 50673 - protein, 10 aa, Homo sapiens
  Table A; Target 50673; HLA-B*27:05; MYH4; ENSG00000264424; TAA
LQVQAEADAL

SEQ ID NO: 50674 - protein, 10 aa, Homo sapiens
  Table A; Target 50674; HLA-B*38:01; MYH4; ENSG00000264424; TAA
LQVQAEADAL

SEQ ID NO: 50675 - protein, 10 aa, Homo sapiens
  Table A; Target 50675; HLA-B*39:01; MYH4; ENSG00000264424; TAA
LQVQAEADAL

SEQ ID NO: 50676 - protein, 9 aa, Homo sapiens
  Table A; Target 50676; HLA-B*27:02; MYH4; ENSG00000264424; TAA
LRLDEAEQL

SEQ ID NO: 50677 - protein, 9 aa, Homo sapiens
  Table A; Target 50677; HLA-B*27:05; MYH4; ENSG00000264424; TAA
LRLDEAEQL

SEQ ID NO: 50678 - protein, 9 aa, Homo sapiens
  Table A; Target 50678; HLA-B*38:01; MYH4; ENSG00000264424; TAA
LRLDEAEQL

SEQ ID NO: 50679 - protein, 9 aa, Homo sapiens
  Table A; Target 50679; HLA-B*39:01; MYH4; ENSG00000264424; TAA
LRLDEAEQL

SEQ ID NO: 50680 - protein, 9 aa, Homo sapiens
  Table A; Target 50680; HLA-B*27:05; MYH4; ENSG00000264424; TAA
LRNTQGILK

SEQ ID NO: 50681 - protein, 8 aa, Homo sapiens
  Table A; Target 50681; HLA-B*08:01; MYH4; ENSG00000264424; TAA
LSAQKARL

SEQ ID NO: 50682 - protein, 8 aa, Homo sapiens
  Table A; Target 50682; HLA-C*16:01; MYH4; ENSG00000264424; TAA
LSNKKPEL

SEQ ID NO: 50683 - protein, 11 aa, Homo sapiens
  Table A; Target 50683; HLA-A*33:01; MYH4; ENSG00000264424; TAA
LSRELEEISER

SEQ ID NO: 50684 - protein, 8 aa, Homo sapiens
  Table A; Target 50684; HLA-B*08:01; MYH4; ENSG00000264424; TAA
LSRGKQAF

SEQ ID NO: 50685 - protein, 9 aa, Homo sapiens
  Table A; Target 50685; HLA-A*11:01; MYH4; ENSG00000264424; TAA
LSTELFKVK

SEQ ID NO: 50686 - protein, 9 aa, Homo sapiens
  Table A; Target 50686; HLA-B*57:01; MYH4; ENSG00000264424; TAA
LSTELFKVK

SEQ ID NO: 50687 - protein, 9 aa, Homo sapiens
  Table A; Target 50687; HLA-C*16:01; MYH4; ENSG00000264424; TAA
LSTELFKVK

SEQ ID NO: 50688 - protein, 9 aa, Homo sapiens
  Table A; Target 50688; HLA-C*05:01; MYH4; ENSG00000264424; TAA
LTDRENQSI

SEQ ID NO: 50689 - protein, 11 aa, Homo sapiens
  Table A; Target 50689; HLA-A*01:01; MYH4; ENSG00000264424; TAA
LTDRENQSILI

SEQ ID NO: 50690 - protein, 8 aa, Homo sapiens
  Table A; Target 50690; HLA-C*05:01; MYH4; ENSG00000264424; TAA
LTEEMAGL

SEQ ID NO: 50691 - protein, 10 aa, Homo sapiens
  Table A; Target 50691; HLA-B*27:02; MYH4; ENSG00000264424; TAA
LTEQIAEGGK

SEQ ID NO: 50692 - protein, 8 aa, Homo sapiens
  Table A; Target 50692; HLA-A*01:01; MYH4; ENSG00000264424; TAA
LTGAVMHY

SEQ ID NO: 50693 - protein, 8 aa, Homo sapiens
  Table A; Target 50693; HLA-A*29:02; MYH4; ENSG00000264424; TAA
LTGAVMHY

SEQ ID NO: 50694 - protein, 8 aa, Homo sapiens
  Table A; Target 50694; HLA-A*30:02; MYH4; ENSG00000264424; TAA
LTGAVMHY

SEQ ID NO: 50695 - protein, 8 aa, Homo sapiens
  Table A; Target 50695; HLA-A*32:01; MYH4; ENSG00000264424; TAA
LTGAVMHY

SEQ ID NO: 50696 - protein, 8 aa, Homo sapiens
  Table A; Target 50696; HLA-B*15:01; MYH4; ENSG00000264424; TAA
LTGAVMHY

SEQ ID NO: 50697 - protein, 8 aa, Homo sapiens
  Table A; Target 50697; HLA-B*46:01; MYH4; ENSG00000264424; TAA
LTGAVMHY

SEQ ID NO: 50698 - protein, 8 aa, Homo sapiens
  Table A; Target 50698; HLA-B*57:01; MYH4; ENSG00000264424; TAA
LTGAVMHY

SEQ ID NO: 50699 - protein, 8 aa, Homo sapiens
  Table A; Target 50699; HLA-B*58:01; MYH4; ENSG00000264424; TAA
LTGAVMHY

SEQ ID NO: 50700 - protein, 8 aa, Homo sapiens
  Table A; Target 50700; HLA-C*01:02; MYH4; ENSG00000264424; TAA
LTGAVMHY

SEQ ID NO: 50701 - protein, 8 aa, Homo sapiens
  Table A; Target 50701; HLA-C*04:01; MYH4; ENSG00000264424; TAA
LTGAVMHY

SEQ ID NO: 50702 - protein, 8 aa, Homo sapiens
  Table A; Target 50702; HLA-C*06:02; MYH4; ENSG00000264424; TAA
LTGAVMHY

SEQ ID NO: 50703 - protein, 8 aa, Homo sapiens
  Table A; Target 50703; HLA-C*07:01; MYH4; ENSG00000264424; TAA
LTGAVMHY

SEQ ID NO: 50704 - protein, 8 aa, Homo sapiens
  Table A; Target 50704; HLA-C*07:04; MYH4; ENSG00000264424; TAA
LTGAVMHY

SEQ ID NO: 50705 - protein, 8 aa, Homo sapiens
  Table A; Target 50705; HLA-C*12:03; MYH4; ENSG00000264424; TAA
LTGAVMHY

SEQ ID NO: 50706 - protein, 8 aa, Homo sapiens
  Table A; Target 50706; HLA-C*16:01; MYH4; ENSG00000264424; TAA
LTGAVMHY

SEQ ID NO: 50707 - protein, 8 aa, Homo sapiens
  Table A; Target 50707; HLA-C*16:02; MYH4; ENSG00000264424; TAA
LTGAVMHY

SEQ ID NO: 50708 - protein, 8 aa, Homo sapiens
  Table A; Target 50708; HLA-B*08:01; MYH4; ENSG00000264424; TAA
LTKAKTKL

SEQ ID NO: 50709 - protein, 8 aa, Homo sapiens
  Table A; Target 50709; HLA-B*08:01; MYH4; ENSG00000264424; TAA
LTKEKKAL

SEQ ID NO: 50710 - protein, 11 aa, Homo sapiens
  Table A; Target 50710; HLA-A*01:01; MYH4; ENSG00000264424; TAA
LTSLNSADLLK

SEQ ID NO: 50711 - protein, 11 aa, Homo sapiens
  Table A; Target 50711; HLA-A*03:02; MYH4; ENSG00000264424; TAA
LTSLNSADLLK

SEQ ID NO: 50712 - protein, 11 aa, Homo sapiens
  Table A; Target 50712; HLA-A*11:01; MYH4; ENSG00000264424; TAA
LTSLNSADLLK

SEQ ID NO: 50713 - protein, 11 aa, Homo sapiens
  Table A; Target 50713; HLA-B*27:02; MYH4; ENSG00000264424; TAA
LTSLNSADLLK

SEQ ID NO: 50714 - protein, 8 aa, Homo sapiens
  Table A; Target 50714; HLA-A*03:02; MYH4; ENSG00000264424; TAA
LVDKLQTK

SEQ ID NO: 50715 - protein, 8 aa, Homo sapiens
  Table A; Target 50715; HLA-C*05:01; MYH4; ENSG00000264424; TAA
LVDKLQTK

SEQ ID NO: 50716 - protein, 9 aa, Homo sapiens
  Table A; Target 50716; HLA-A*01:01; MYH4; ENSG00000264424; TAA
LVDKLQTKV

SEQ ID NO: 50717 - protein, 9 aa, Homo sapiens
  Table A; Target 50717; HLA-A*02:01; MYH4; ENSG00000264424; TAA
LVDKLQTKV

SEQ ID NO: 50718 - protein, 9 aa, Homo sapiens
  Table A; Target 50718; HLA-A*02:07; MYH4; ENSG00000264424; TAA
LVDKLQTKV

SEQ ID NO: 50719 - protein, 9 aa, Homo sapiens
  Table A; Target 50719; HLA-A*68:02; MYH4; ENSG00000264424; TAA
LVDKLQTKV

SEQ ID NO: 50720 - protein, 9 aa, Homo sapiens
  Table A; Target 50720; HLA-C*05:01; MYH4; ENSG00000264424; TAA
LVDKLQTKV

SEQ ID NO: 50721 - protein, 10 aa, Homo sapiens
  Table A; Target 50721; HLA-A*03:02; MYH4; ENSG00000264424; TAA
LVDKLQTKVK

SEQ ID NO: 50722 - protein, 10 aa, Homo sapiens
  Table A; Target 50722; HLA-A*01:01; MYH4; ENSG00000264424; TAA
LVHYAGTVDY

SEQ ID NO: 50723 - protein, 10 aa, Homo sapiens
  Table A; Target 50723; HLA-A*29:02; MYH4; ENSG00000264424; TAA
LVHYAGTVDY

SEQ ID NO: 50724 - protein, 10 aa, Homo sapiens
  Table A; Target 50724; HLA-A*30:02; MYH4; ENSG00000264424; TAA
LVHYAGTVDY

SEQ ID NO: 50725 - protein, 10 aa, Homo sapiens
  Table A; Target 50725; HLA-B*15:01; MYH4; ENSG00000264424; TAA
LVHYAGTVDY

SEQ ID NO: 50726 - protein, 10 aa, Homo sapiens
  Table A; Target 50726; HLA-B*46:01; MYH4; ENSG00000264424; TAA
LVHYAGTVDY

SEQ ID NO: 50727 - protein, 10 aa, Homo sapiens
  Table A; Target 50727; HLA-C*04:01; MYH4; ENSG00000264424; TAA
LVHYAGTVDY

SEQ ID NO: 50728 - protein, 9 aa, Homo sapiens
  Table A; Target 50728; HLA-A*24:02; MYH4; ENSG00000264424; TAA
LYADFKQRY

SEQ ID NO: 50729 - protein, 9 aa, Homo sapiens
  Table A; Target 50729; HLA-A*29:02; MYH4; ENSG00000264424; TAA
LYADFKQRY

SEQ ID NO: 50730 - protein, 9 aa, Homo sapiens
  Table A; Target 50730; HLA-A*24:02; MYH4; ENSG00000264424; TAA
LYFKIKPLL

SEQ ID NO: 50731 - protein, 10 aa, Homo sapiens
  Table A; Target 50731; HLA-A*24:02; MYH4; ENSG00000264424; TAA
LYFKIKPLLK

SEQ ID NO: 50732 - protein, 10 aa, Homo sapiens
  Table A; Target 50732; HLA-A*24:02; MYH4; ENSG00000264424; TAA
LYQKSAMKTL

SEQ ID NO: 50733 - protein, 8 aa, Homo sapiens
  Table A; Target 50733; HLA-B*35:03; MYH4; ENSG00000264424; TAA
MAGLDETI

SEQ ID NO: 50734 - protein, 8 aa, Homo sapiens
  Table A; Target 50734; HLA-C*07:01; MYH4; ENSG00000264424; TAA
MAGLDETI

SEQ ID NO: 50735 - protein, 8 aa, Homo sapiens
  Table A; Target 50735; HLA-C*07:04; MYH4; ENSG00000264424; TAA
MAGLDETI

SEQ ID NO: 50736 - protein, 10 aa, Homo sapiens
  Table A; Target 50736; HLA-B*27:02; MYH4; ENSG00000264424; TAA
MAGLDETIAK

SEQ ID NO: 50737 - protein, 8 aa, Homo sapiens
  Table A; Target 50737; HLA-B*54:01; MYH4; ENSG00000264424; TAA
MAIFGEAA

SEQ ID NO: 50738 - protein, 8 aa, Homo sapiens
  Table A; Target 50738; HLA-C*03:04; MYH4; ENSG00000264424; TAA
MAIFGEAA

SEQ ID NO: 50739 - protein, 10 aa, Homo sapiens
  Table A; Target 50739; HLA-B*35:01; MYH4; ENSG00000264424; TAA
MAIFGEAAPF

SEQ ID NO: 50740 - protein, 10 aa, Homo sapiens
  Table A; Target 50740; HLA-B*35:03; MYH4; ENSG00000264424; TAA
MAIFGEAAPF

SEQ ID NO: 50741 - protein, 10 aa, Homo sapiens
  Table A; Target 50741; HLA-B*46:01; MYH4; ENSG00000264424; TAA
MAIFGEAAPF

SEQ ID NO: 50742 - protein, 10 aa, Homo sapiens
  Table A; Target 50742; HLA-C*02:02; MYH4; ENSG00000264424; TAA
MAIFGEAAPF

SEQ ID NO: 50743 - protein, 10 aa, Homo sapiens
  Table A; Target 50743; HLA-C*03:04; MYH4; ENSG00000264424; TAA
MAIFGEAAPF

SEQ ID NO: 50744 - protein, 8 aa, Homo sapiens
  Table A; Target 50744; HLA-B*08:01; MYH4; ENSG00000264424; TAA
MANMKEEF

SEQ ID NO: 50745 - protein, 8 aa, Homo sapiens
  Table A; Target 50745; HLA-B*46:01; MYH4; ENSG00000264424; TAA
MANMKEEF

SEQ ID NO: 50746 - protein, 8 aa, Homo sapiens
  Table A; Target 50746; HLA-C*16:01; MYH4; ENSG00000264424; TAA
MANMKEEF

SEQ ID NO: 50747 - protein, 10 aa, Homo sapiens
  Table A; Target 50747; HLA-B*27:02; MYH4; ENSG00000264424; TAA
MANMKEEFEK

SEQ ID NO: 50748 - protein, 9 aa, Homo sapiens
  Table A; Target 50748; HLA-B*35:03; MYH4; ENSG00000264424; TAA
MATDSAVDI

SEQ ID NO: 50749 - protein, 9 aa, Homo sapiens
  Table A; Target 50749; HLA-B*38:01; MYH4; ENSG00000264424; TAA
MATDSAVDI

SEQ ID NO: 50750 - protein, 9 aa, Homo sapiens
  Table A; Target 50750; HLA-B*39:01; MYH4; ENSG00000264424; TAA
MATDSAVDI

SEQ ID NO: 50751 - protein, 9 aa, Homo sapiens
  Table A; Target 50751; HLA-B*51:01; MYH4; ENSG00000264424; TAA
MATDSAVDI

SEQ ID NO: 50752 - protein, 9 aa, Homo sapiens
  Table A; Target 50752; HLA-C*02:02; MYH4; ENSG00000264424; TAA
MATDSAVDI

SEQ ID NO: 50753 - protein, 9 aa, Homo sapiens
  Table A; Target 50753; HLA-C*03:03; MYH4; ENSG00000264424; TAA
MATDSAVDI

SEQ ID NO: 50754 - protein, 9 aa, Homo sapiens
  Table A; Target 50754; HLA-C*03:04; MYH4; ENSG00000264424; TAA
MATDSAVDI

SEQ ID NO: 50755 - protein, 9 aa, Homo sapiens
  Table A; Target 50755; HLA-C*04:01; MYH4; ENSG00000264424; TAA
MATDSAVDI

SEQ ID NO: 50756 - protein, 9 aa, Homo sapiens
  Table A; Target 50756; HLA-C*05:01; MYH4; ENSG00000264424; TAA
MATDSAVDI

SEQ ID NO: 50757 - protein, 9 aa, Homo sapiens
  Table A; Target 50757; HLA-C*07:04; MYH4; ENSG00000264424; TAA
MATDSAVDI

SEQ ID NO: 50758 - protein, 9 aa, Homo sapiens
  Table A; Target 50758; HLA-C*12:03; MYH4; ENSG00000264424; TAA
MATDSAVDI

SEQ ID NO: 50759 - protein, 9 aa, Homo sapiens
  Table A; Target 50759; HLA-C*16:02; MYH4; ENSG00000264424; TAA
MATDSAVDI

SEQ ID NO: 50760 - protein, 10 aa, Homo sapiens
  Table A; Target 50760; HLA-B*35:03; MYH4; ENSG00000264424; TAA
MATDSAVDIL

SEQ ID NO: 50761 - protein, 10 aa, Homo sapiens
  Table A; Target 50761; HLA-C*07:06; MYH4; ENSG00000264424; TAA
MATDSAVDIL

SEQ ID NO: 50762 - protein, 10 aa, Homo sapiens
  Table A; Target 50762; HLA-A*30:01; MYH4; ENSG00000264424; TAA
MDTENDKQQL

SEQ ID NO: 50763 - protein, 10 aa, Homo sapiens
  Table A; Target 50763; HLA-B*40:01; MYH4; ENSG00000264424; TAA
MDTENDKQQL

SEQ ID NO: 50764 - protein, 10 aa, Homo sapiens
  Table A; Target 50764; HLA-C*16:02; MYH4; ENSG00000264424; TAA
MDTENDKQQL

SEQ ID NO: 50765 - protein, 8 aa, Homo sapiens
  Table A; Target 50765; HLA-B*18:01; MYH4; ENSG00000264424; TAA
MEDIVQEA

SEQ ID NO: 50766 - protein, 8 aa, Homo sapiens
  Table A; Target 50766; HLA-B*49:01; MYH4; ENSG00000264424; TAA
MEDIVQEA

SEQ ID NO: 50767 - protein, 9 aa, Homo sapiens
  Table A; Target 50767; HLA-B*18:01; MYH4; ENSG00000264424; TAA
MEDIVQEAR

SEQ ID NO: 50768 - protein, 9 aa, Homo sapiens
  Table A; Target 50768; HLA-A*30:01; MYH4; ENSG00000264424; TAA
MEEDKVNTL

SEQ ID NO: 50769 - protein, 9 aa, Homo sapiens
  Table A; Target 50769; HLA-B*18:01; MYH4; ENSG00000264424; TAA
MEEDKVNTL

SEQ ID NO: 50770 - protein, 9 aa, Homo sapiens
  Table A; Target 50770; HLA-B*37:01; MYH4; ENSG00000264424; TAA
MEEDKVNTL

SEQ ID NO: 50771 - protein, 9 aa, Homo sapiens
  Table A; Target 50771; HLA-B*38:01; MYH4; ENSG00000264424; TAA
MEEDKVNTL

SEQ ID NO: 50772 - protein, 9 aa, Homo sapiens
  Table A; Target 50772; HLA-B*39:01; MYH4; ENSG00000264424; TAA
MEEDKVNTL

SEQ ID NO: 50773 - protein, 9 aa, Homo sapiens
  Table A; Target 50773; HLA-B*40:01; MYH4; ENSG00000264424; TAA
MEEDKVNTL

SEQ ID NO: 50774 - protein, 9 aa, Homo sapiens
  Table A; Target 50774; HLA-B*40:02; MYH4; ENSG00000264424; TAA
MEEDKVNTL

SEQ ID NO: 50775 - protein, 9 aa, Homo sapiens
  Table A; Target 50775; HLA-B*44:02; MYH4; ENSG00000264424; TAA
MEEDKVNTL

SEQ ID NO: 50776 - protein, 9 aa, Homo sapiens
  Table A; Target 50776; HLA-B*44:03; MYH4; ENSG00000264424; TAA
MEEDKVNTL

SEQ ID NO: 50777 - protein, 9 aa, Homo sapiens
  Table A; Target 50777; HLA-B*49:01; MYH4; ENSG00000264424; TAA
MEEDKVNTL

SEQ ID NO: 50778 - protein, 9 aa, Homo sapiens
  Table A; Target 50778; HLA-C*05:01; MYH4; ENSG00000264424; TAA
MEEDKVNTL

SEQ ID NO: 50779 - protein, 9 aa, Homo sapiens
  Table A; Target 50779; HLA-C*07:04; MYH4; ENSG00000264424; TAA
MEEDKVNTL

SEQ ID NO: 50780 - protein, 9 aa, Homo sapiens
  Table A; Target 50780; HLA-C*16:04; MYH4; ENSG00000264424; TAA
MEEDKVNTL

SEQ ID NO: 50781 - protein, 8 aa, Homo sapiens
  Table A; Target 50781; HLA-B*18:01; MYH4; ENSG00000264424; TAA
MEGDLNEM

SEQ ID NO: 50782 - protein, 10 aa, Homo sapiens
  Table A; Target 50782; HLA-A*30:01; MYH4; ENSG00000264424; TAA
MEGDLNEMEI

SEQ ID NO: 50783 - protein, 10 aa, Homo sapiens
  Table A; Target 50783; HLA-B*40:02; MYH4; ENSG00000264424; TAA
MEGDLNEMEI

SEQ ID NO: 50784 - protein, 10 aa, Homo sapiens
  Table A; Target 50784; HLA-B*44:03; MYH4; ENSG00000264424; TAA
MEGDLNEMEI

SEQ ID NO: 50785 - protein, 10 aa, Homo sapiens
  Table A; Target 50785; HLA-B*49:01; MYH4; ENSG00000264424; TAA
MEGDLNEMEI

SEQ ID NO: 50786 - protein, 10 aa, Homo sapiens
  Table A; Target 50786; HLA-C*07:01; MYH4; ENSG00000264424; TAA
MEGDLNEMEI

SEQ ID NO: 50787 - protein, 8 aa, Homo sapiens
  Table A; Target 50787; HLA-B*18:01; MYH4; ENSG00000264424; TAA
MEHELVLH

SEQ ID NO: 50788 - protein, 10 aa, Homo sapiens
  Table A; Target 50788; HLA-A*30:01; MYH4; ENSG00000264424; TAA
MEHELVLHQL

SEQ ID NO: 50789 - protein, 10 aa, Homo sapiens
  Table A; Target 50789; HLA-B*18:01; MYH4; ENSG00000264424; TAA
MEHELVLHQL

SEQ ID NO: 50790 - protein, 10 aa, Homo sapiens
  Table A; Target 50790; HLA-B*40:01; MYH4; ENSG00000264424; TAA
MEHELVLHQL

SEQ ID NO: 50791 - protein, 10 aa, Homo sapiens
  Table A; Target 50791; HLA-B*40:02; MYH4; ENSG00000264424; TAA
MEHELVLHQL

SEQ ID NO: 50792 - protein, 10 aa, Homo sapiens
  Table A; Target 50792; HLA-B*44:02; MYH4; ENSG00000264424; TAA
MEHELVLHQL

SEQ ID NO: 50793 - protein, 10 aa, Homo sapiens
  Table A; Target 50793; HLA-B*44:03; MYH4; ENSG00000264424; TAA
MEHELVLHQL

SEQ ID NO: 50794 - protein, 9 aa, Homo sapiens
  Table A; Target 50794; HLA-B*49:01; MYH4; ENSG00000264424; TAA
MEINDLASN

SEQ ID NO: 50795 - protein, 10 aa, Homo sapiens
  Table A; Target 50795; HLA-A*30:01; MYH4; ENSG00000264424; TAA
MEINDLASNM

SEQ ID NO: 50796 - protein, 10 aa, Homo sapiens
  Table A; Target 50796; HLA-B*27:02; MYH4; ENSG00000264424; TAA
MEINDLASNM

SEQ ID NO: 50797 - protein, 10 aa, Homo sapiens
  Table A; Target 50797; HLA-B*38:01; MYH4; ENSG00000264424; TAA
MEINDLASNM

SEQ ID NO: 50798 - protein, 10 aa, Homo sapiens
  Table A; Target 50798; HLA-B*40:01; MYH4; ENSG00000264424; TAA
MEINDLASNM

SEQ ID NO: 50799 - protein, 10 aa, Homo sapiens
  Table A; Target 50799; HLA-B*40:02; MYH4; ENSG00000264424; TAA
MEINDLASNM

SEQ ID NO: 50800 - protein, 10 aa, Homo sapiens
  Table A; Target 50800; HLA-B*44:02; MYH4; ENSG00000264424; TAA
MEINDLASNM

SEQ ID NO: 50801 - protein, 10 aa, Homo sapiens
  Table A; Target 50801; HLA-B*44:03; MYH4; ENSG00000264424; TAA
MEINDLASNM

SEQ ID NO: 50802 - protein, 10 aa, Homo sapiens
  Table A; Target 50802; HLA-B*49:01; MYH4; ENSG00000264424; TAA
MEINDLASNM

SEQ ID NO: 50803 - protein, 8 aa, Homo sapiens
  Table A; Target 50803; HLA-B*18:01; MYH4; ENSG00000264424; TAA
MEIQLNHA

SEQ ID NO: 50804 - protein, 8 aa, Homo sapiens
  Table A; Target 50804; HLA-B*40:02; MYH4; ENSG00000264424; TAA
MEIQLNHA

SEQ ID NO: 50805 - protein, 8 aa, Homo sapiens
  Table A; Target 50805; HLA-B*49:01; MYH4; ENSG00000264424; TAA
MEIQLNHA

SEQ ID NO: 50806 - protein, 9 aa, Homo sapiens
  Table A; Target 50806; HLA-B*18:01; MYH4; ENSG00000264424; TAA
MEIQLNHAN

SEQ ID NO: 50807 - protein, 10 aa, Homo sapiens
  Table A; Target 50807; HLA-A*33:03; MYH4; ENSG00000264424; TAA
MEIQLNHANR

SEQ ID NO: 50808 - protein, 10 aa, Homo sapiens
  Table A; Target 50808; HLA-B*44:02; MYH4; ENSG00000264424; TAA
MEIQLNHANR

SEQ ID NO: 50809 - protein, 8 aa, Homo sapiens
  Table A; Target 50809; HLA-A*30:01; MYH4; ENSG00000264424; TAA
MEQTVKDL

SEQ ID NO: 50810 - protein, 8 aa, Homo sapiens
  Table A; Target 50810; HLA-B*18:01; MYH4; ENSG00000264424; TAA
MEQTVKDL

SEQ ID NO: 50811 - protein, 8 aa, Homo sapiens
  Table A; Target 50811; HLA-B*37:01; MYH4; ENSG00000264424; TAA
MEQTVKDL

SEQ ID NO: 50812 - protein, 8 aa, Homo sapiens
  Table A; Target 50812; HLA-B*40:02; MYH4; ENSG00000264424; TAA
MEQTVKDL

SEQ ID NO: 50813 - protein, 8 aa, Homo sapiens
  Table A; Target 50813; HLA-B*44:02; MYH4; ENSG00000264424; TAA
MEQTVKDL

SEQ ID NO: 50814 - protein, 10 aa, Homo sapiens
  Table A; Target 50814; HLA-A*30:01; MYH4; ENSG00000264424; TAA
MEQTVKDLQL

SEQ ID NO: 50815 - protein, 10 aa, Homo sapiens
  Table A; Target 50815; HLA-B*40:01; MYH4; ENSG00000264424; TAA
MEQTVKDLQL

SEQ ID NO: 50816 - protein, 10 aa, Homo sapiens
  Table A; Target 50816; HLA-B*40:02; MYH4; ENSG00000264424; TAA
MEQTVKDLQL

SEQ ID NO: 50817 - protein, 10 aa, Homo sapiens
  Table A; Target 50817; HLA-B*44:02; MYH4; ENSG00000264424; TAA
MEQTVKDLQL

SEQ ID NO: 50818 - protein, 10 aa, Homo sapiens
  Table A; Target 50818; HLA-B*44:03; MYH4; ENSG00000264424; TAA
MEQTVKDLQL

SEQ ID NO: 50819 - protein, 8 aa, Homo sapiens
  Table A; Target 50819; HLA-B*18:01; MYH4; ENSG00000264424; TAA
METVSKAK

SEQ ID NO: 50820 - protein, 9 aa, Homo sapiens
  Table A; Target 50820; HLA-B*40:02; MYH4; ENSG00000264424; TAA
METVSKAKA

SEQ ID NO: 50821 - protein, 11 aa, Homo sapiens
  Table A; Target 50821; HLA-B*44:03; MYH4; ENSG00000264424; TAA
METVSKAKANF

SEQ ID NO: 50822 - protein, 10 aa, Homo sapiens
  Table A; Target 50822; HLA-A*23:01; MYH4; ENSG00000264424; TAA
MFPKATDTSF

SEQ ID NO: 50823 - protein, 10 aa, Homo sapiens
  Table A; Target 50823; HLA-A*24:02; MYH4; ENSG00000264424; TAA
MFPKATDTSF

SEQ ID NO: 50824 - protein, 10 aa, Homo sapiens
  Table A; Target 50824; HLA-C*14:02; MYH4; ENSG00000264424; TAA
MFPKATDTSF

SEQ ID NO: 50825 - protein, 9 aa, Homo sapiens
  Table A; Target 50825; HLA-A*29:02; MYH4; ENSG00000264424; TAA
MFVLEQEEY

SEQ ID NO: 50826 - protein, 9 aa, Homo sapiens
  Table A; Target 50826; HLA-B*15:01; MYH4; ENSG00000264424; TAA
MFVLEQEEY

SEQ ID NO: 50827 - protein, 9 aa, Homo sapiens
  Table A; Target 50827; HLA-B*15:03; MYH4; ENSG00000264424; TAA
MFVLEQEEY

SEQ ID NO: 50828 - protein, 9 aa, Homo sapiens
  Table A; Target 50828; HLA-B*18:01; MYH4; ENSG00000264424; TAA
MFVLEQEEY

SEQ ID NO: 50829 - protein, 9 aa, Homo sapiens
  Table A; Target 50829; HLA-B*35:01; MYH4; ENSG00000264424; TAA
MFVLEQEEY

SEQ ID NO: 50830 - protein, 9 aa, Homo sapiens
  Table A; Target 50830; HLA-B*46:01; MYH4; ENSG00000264424; TAA
MFVLEQEEY

SEQ ID NO: 50831 - protein, 9 aa, Homo sapiens
  Table A; Target 50831; HLA-B*55:01; MYH4; ENSG00000264424; TAA
MFVLEQEEY

SEQ ID NO: 50832 - protein, 9 aa, Homo sapiens
  Table A; Target 50832; HLA-C*04:01; MYH4; ENSG00000264424; TAA
MFVLEQEEY

SEQ ID NO: 50833 - protein, 9 aa, Homo sapiens
  Table A; Target 50833; HLA-C*07:01; MYH4; ENSG00000264424; TAA
MFVLEQEEY

SEQ ID NO: 50834 - protein, 9 aa, Homo sapiens
  Table A; Target 50834; HLA-C*07:04; MYH4; ENSG00000264424; TAA
MFVLEQEEY

SEQ ID NO: 50835 - protein, 9 aa, Homo sapiens
  Table A; Target 50835; HLA-C*14:02; MYH4; ENSG00000264424; TAA
MFVLEQEEY

SEQ ID NO: 50836 - protein, 10 aa, Homo sapiens
  Table A; Target 50836; HLA-B*27:02; MYH4; ENSG00000264424; TAA
MFVLEQEEYK

SEQ ID NO: 50837 - protein, 8 aa, Homo sapiens
  Table A; Target 50837; HLA-C*07:01; MYH4; ENSG00000264424; TAA
MHYGNMKF

SEQ ID NO: 50838 - protein, 9 aa, Homo sapiens
  Table A; Target 50838; HLA-A*29:02; MYH4; ENSG00000264424; TAA
MIYTYSGLF

SEQ ID NO: 50839 - protein, 9 aa, Homo sapiens
  Table A; Target 50839; HLA-C*02:02; MYH4; ENSG00000264424; TAA
MIYTYSGLF

SEQ ID NO: 50840 - protein, 9 aa, Homo sapiens
  Table A; Target 50840; HLA-A*01:01; MYH4; ENSG00000264424; TAA
MLLITTNPY

SEQ ID NO: 50841 - protein, 9 aa, Homo sapiens
  Table A; Target 50841; HLA-A*29:02; MYH4; ENSG00000264424; TAA
MLLITTNPY

SEQ ID NO: 50842 - protein, 9 aa, Homo sapiens
  Table A; Target 50842; HLA-B*46:01; MYH4; ENSG00000264424; TAA
MLLITTNPY

SEQ ID NO: 50843 - protein, 9 aa, Homo sapiens
  Table A; Target 50843; HLA-C*07:04; MYH4; ENSG00000264424; TAA
MLLITTNPY

SEQ ID NO: 50844 - protein, 10 aa, Homo sapiens
  Table A; Target 50844; HLA-A*02:03; MYH4; ENSG00000264424; TAA
MLTDRENQSI

SEQ ID NO: 50845 - protein, 9 aa, Homo sapiens
  Table A; Target 50845; HLA-B*54:01; MYH4; ENSG00000264424; TAA
MMTHLHEPA

SEQ ID NO: 50846 - protein, 8 aa, Homo sapiens
  Table A; Target 50846; HLA-B*13:02; MYH4; ENSG00000264424; TAA
MQAEVEEL

SEQ ID NO: 50847 - protein, 8 aa, Homo sapiens
  Table A; Target 50847; HLA-B*15:01; MYH4; ENSG00000264424; TAA
MQAEVEEL

SEQ ID NO: 50848 - protein, 8 aa, Homo sapiens
  Table A; Target 50848; HLA-B*27:05; MYH4; ENSG00000264424; TAA
MQAEVEEL

SEQ ID NO: 50849 - protein, 8 aa, Homo sapiens
  Table A; Target 50849; HLA-B*37:01; MYH4; ENSG00000264424; TAA
MQAEVEEL

SEQ ID NO: 50850 - protein, 8 aa, Homo sapiens
  Table A; Target 50850; HLA-B*38:01; MYH4; ENSG00000264424; TAA
MQAEVEEL

SEQ ID NO: 50851 - protein, 8 aa, Homo sapiens
  Table A; Target 50851; HLA-B*39:01; MYH4; ENSG00000264424; TAA
MQAEVEEL

SEQ ID NO: 50852 - protein, 8 aa, Homo sapiens
  Table A; Target 50852; HLA-B*40:01; MYH4; ENSG00000264424; TAA
MQAEVEEL

SEQ ID NO: 50853 - protein, 8 aa, Homo sapiens
  Table A; Target 50853; HLA-C*03:03; MYH4; ENSG00000264424; TAA
MQAEVEEL

SEQ ID NO: 50854 - protein, 8 aa, Homo sapiens
  Table A; Target 50854; HLA-C*05:01; MYH4; ENSG00000264424; TAA
MQAEVEEL

SEQ ID NO: 50855 - protein, 8 aa, Homo sapiens
  Table A; Target 50855; HLA-C*07:04; MYH4; ENSG00000264424; TAA
MQAEVEEL

SEQ ID NO: 50856 - protein, 9 aa, Homo sapiens
  Table A; Target 50856; HLA-A*33:03; MYH4; ENSG00000264424; TAA
MQAEVEELR

SEQ ID NO: 50857 - protein, 9 aa, Homo sapiens
  Table A; Target 50857; HLA-A*68:01; MYH4; ENSG00000264424; TAA
MQAEVEELR

SEQ ID NO: 50858 - protein, 9 aa, Homo sapiens
  Table A; Target 50858; HLA-A*68:02; MYH4; ENSG00000264424; TAA
MQAEVEELR

SEQ ID NO: 50859 - protein, 9 aa, Homo sapiens
  Table A; Target 50859; HLA-B*27:02; MYH4; ENSG00000264424; TAA
MQAEVEELR

SEQ ID NO: 50860 - protein, 9 aa, Homo sapiens
  Table A; Target 50860; HLA-B*38:01; MYH4; ENSG00000264424; TAA
MQAEVEELR

SEQ ID NO: 50861 - protein, 9 aa, Homo sapiens
  Table A; Target 50861; HLA-C*07:06; MYH4; ENSG00000264424; TAA
MQAEVEELR

SEQ ID NO: 50862 - protein, 10 aa, Homo sapiens
  Table A; Target 50862; HLA-B*13:02; MYH4; ENSG00000264424; TAA
MQAEVEELRA

SEQ ID NO: 50863 - protein, 9 aa, Homo sapiens
  Table A; Target 50863; HLA-B*38:01; MYH4; ENSG00000264424; TAA
MQEKNDLQL

SEQ ID NO: 50864 - protein, 11 aa, Homo sapiens
  Table A; Target 50864; HLA-A*01:01; MYH4; ENSG00000264424; TAA
MQEKNDLQLQV

SEQ ID NO: 50865 - protein, 9 aa, Homo sapiens
  Table A; Target 50865; HLA-B*13:02; MYH4; ENSG00000264424; TAA
MQGTLEDQI

SEQ ID NO: 50866 - protein, 9 aa, Homo sapiens
  Table A; Target 50866; HLA-B*38:01; MYH4; ENSG00000264424; TAA
MQGTLEDQI

SEQ ID NO: 50867 - protein, 10 aa, Homo sapiens
  Table A; Target 50867; HLA-B*38:01; MYH4; ENSG00000264424; TAA
MQGTLEDQII

SEQ ID NO: 50868 - protein, 9 aa, Homo sapiens
  Table A; Target 50868; HLA-A*30:01; MYH4; ENSG00000264424; TAA
MQSTLDAEI

SEQ ID NO: 50869 - protein, 9 aa, Homo sapiens
  Table A; Target 50869; HLA-B*13:02; MYH4; ENSG00000264424; TAA
MQSTLDAEI

SEQ ID NO: 50870 - protein, 9 aa, Homo sapiens
  Table A; Target 50870; HLA-B*27:05; MYH4; ENSG00000264424; TAA
MQSTLDAEI

SEQ ID NO: 50871 - protein, 9 aa, Homo sapiens
  Table A; Target 50871; HLA-B*38:01; MYH4; ENSG00000264424; TAA
MQSTLDAEI

SEQ ID NO: 50872 - protein, 9 aa, Homo sapiens
  Table A; Target 50872; HLA-B*39:01; MYH4; ENSG00000264424; TAA
MQSTLDAEI

SEQ ID NO: 50873 - protein, 9 aa, Homo sapiens
  Table A; Target 50873; HLA-C*06:02; MYH4; ENSG00000264424; TAA
MQSTLDAEI

SEQ ID NO: 50874 - protein, 10 aa, Homo sapiens
  Table A; Target 50874; HLA-B*27:02; MYH4; ENSG00000264424; TAA
MQSTLDAEIR

SEQ ID NO: 50875 - protein, 8 aa, Homo sapiens
  Table A; Target 50875; HLA-C*12:03; MYH4; ENSG00000264424; TAA
MSKANSEV

SEQ ID NO: 50876 - protein, 9 aa, Homo sapiens
  Table A; Target 50876; HLA-B*54:01; MYH4; ENSG00000264424; TAA
MSKANSEVA

SEQ ID NO: 50877 - protein, 11 aa, Homo sapiens
  Table A; Target 50877; HLA-A*25:01; MYH4; ENSG00000264424; TAA
MSKANSEVAQW

SEQ ID NO: 50878 - protein, 11 aa, Homo sapiens
  Table A; Target 50878; HLA-A*33:03; MYH4; ENSG00000264424; TAA
MSKANSEVAQW

SEQ ID NO: 50879 - protein, 11 aa, Homo sapiens
  Table A; Target 50879; HLA-B*57:01; MYH4; ENSG00000264424; TAA
MSKANSEVAQW

SEQ ID NO: 50880 - protein, 11 aa, Homo sapiens
  Table A; Target 50880; HLA-B*58:01; MYH4; ENSG00000264424; TAA
MSKANSEVAQW

SEQ ID NO: 50881 - protein, 9 aa, Homo sapiens
  Table A; Target 50881; HLA-B*40:02; MYH4; ENSG00000264424; TAA
MTHLHEPAV

SEQ ID NO: 50882 - protein, 9 aa, Homo sapiens
  Table A; Target 50882; HLA-B*54:01; MYH4; ENSG00000264424; TAA
MTHLHEPAV

SEQ ID NO: 50883 - protein, 11 aa, Homo sapiens
  Table A; Target 50883; HLA-A*01:01; MYH4; ENSG00000264424; TAA
MTHLHEPAVLY

SEQ ID NO: 50884 - protein, 9 aa, Homo sapiens
  Table A; Target 50884; HLA-A*03:01; MYH4; ENSG00000264424; TAA
MVSQLSRGK

SEQ ID NO: 50885 - protein, 9 aa, Homo sapiens
  Table A; Target 50885; HLA-A*03:02; MYH4; ENSG00000264424; TAA
MVSQLSRGK

SEQ ID NO: 50886 - protein, 9 aa, Homo sapiens
  Table A; Target 50886; HLA-A*11:01; MYH4; ENSG00000264424; TAA
MVSQLSRGK

SEQ ID NO: 50887 - protein, 9 aa, Homo sapiens
  Table A; Target 50887; HLA-C*16:01; MYH4; ENSG00000264424; TAA
MVSQLSRGK

SEQ ID NO: 50888 - protein, 8 aa, Homo sapiens
  Table A; Target 50888; HLA-C*04:01; MYH4; ENSG00000264424; TAA
MVTLMQEK

SEQ ID NO: 50889 - protein, 9 aa, Homo sapiens
  Table A; Target 50889; HLA-A*02:04; MYH4; ENSG00000264424; TAA
MVTRINQQL

SEQ ID NO: 50890 - protein, 9 aa, Homo sapiens
  Table A; Target 50890; HLA-A*23:01; MYH4; ENSG00000264424; TAA
MVTRINQQL

SEQ ID NO: 50891 - protein, 9 aa, Homo sapiens
  Table A; Target 50891; HLA-A*24:02; MYH4; ENSG00000264424; TAA
MVTRINQQL

SEQ ID NO: 50892 - protein, 9 aa, Homo sapiens
  Table A; Target 50892; HLA-A*26:01; MYH4; ENSG00000264424; TAA
MVTRINQQL

SEQ ID NO: 50893 - protein, 9 aa, Homo sapiens
  Table A; Target 50893; HLA-A*32:01; MYH4; ENSG00000264424; TAA
MVTRINQQL

SEQ ID NO: 50894 - protein, 9 aa, Homo sapiens
  Table A; Target 50894; HLA-A*68:01; MYH4; ENSG00000264424; TAA
MVTRINQQL

SEQ ID NO: 50895 - protein, 9 aa, Homo sapiens
  Table A; Target 50895; HLA-A*68:02; MYH4; ENSG00000264424; TAA
MVTRINQQL

SEQ ID NO: 50896 - protein, 9 aa, Homo sapiens
  Table A; Target 50896; HLA-B*27:05; MYH4; ENSG00000264424; TAA
MVTRINQQL

SEQ ID NO: 50897 - protein, 9 aa, Homo sapiens
  Table A; Target 50897; HLA-B*35:01; MYH4; ENSG00000264424; TAA
MVTRINQQL

SEQ ID NO: 50898 - protein, 9 aa, Homo sapiens
  Table A; Target 50898; HLA-B*35:03; MYH4; ENSG00000264424; TAA
MVTRINQQL

SEQ ID NO: 50899 - protein, 9 aa, Homo sapiens
  Table A; Target 50899; HLA-B*38:01; MYH4; ENSG00000264424; TAA
MVTRINQQL

SEQ ID NO: 50900 - protein, 9 aa, Homo sapiens
  Table A; Target 50900; HLA-B*55:01; MYH4; ENSG00000264424; TAA
MVTRINQQL

SEQ ID NO: 50901 - protein, 9 aa, Homo sapiens
  Table A; Target 50901; HLA-B*58:01; MYH4; ENSG00000264424; TAA
MVTRINQQL

SEQ ID NO: 50902 - protein, 9 aa, Homo sapiens
  Table A; Target 50902; HLA-C*03:03; MYH4; ENSG00000264424; TAA
MVTRINQQL

SEQ ID NO: 50903 - protein, 9 aa, Homo sapiens
  Table A; Target 50903; HLA-C*03:04; MYH4; ENSG00000264424; TAA
MVTRINQQL

SEQ ID NO: 50904 - protein, 9 aa, Homo sapiens
  Table A; Target 50904; HLA-C*06:02; MYH4; ENSG00000264424; TAA
MVTRINQQL

SEQ ID NO: 50905 - protein, 9 aa, Homo sapiens
  Table A; Target 50905; HLA-C*07:04; MYH4; ENSG00000264424; TAA
MVTRINQQL

SEQ ID NO: 50906 - protein, 9 aa, Homo sapiens
  Table A; Target 50906; HLA-C*07:06; MYH4; ENSG00000264424; TAA
MVTRINQQL

SEQ ID NO: 50907 - protein, 9 aa, Homo sapiens
  Table A; Target 50907; HLA-C*16:01; MYH4; ENSG00000264424; TAA
MVTRINQQL

SEQ ID NO: 50908 - protein, 9 aa, Homo sapiens
  Table A; Target 50908; HLA-C*16:02; MYH4; ENSG00000264424; TAA
MVTRINQQL

SEQ ID NO: 50909 - protein, 9 aa, Homo sapiens
  Table A; Target 50909; HLA-A*68:01; MYH4; ENSG00000264424; TAA
NAACIALDK

SEQ ID NO: 50910 - protein, 9 aa, Homo sapiens
  Table A; Target 50910; HLA-A*68:01; MYH4; ENSG00000264424; TAA
NAELTAKKR

SEQ ID NO: 50911 - protein, 10 aa, Homo sapiens
  Table A; Target 50911; HLA-B*35:01; MYH4; ENSG00000264424; TAA
NASAIPEGQF

SEQ ID NO: 50912 - protein, 10 aa, Homo sapiens
  Table A; Target 50912; HLA-C*05:01; MYH4; ENSG00000264424; TAA
NASAIPEGQF

SEQ ID NO: 50913 - protein, 8 aa, Homo sapiens
  Table A; Target 50913; HLA-B*27:02; MYH4; ENSG00000264424; TAA
NAVGALAK

SEQ ID NO: 50914 - protein, 9 aa, Homo sapiens
  Table A; Target 50914; HLA-B*54:01; MYH4; ENSG00000264424; TAA
NAVGALAKA

SEQ ID NO: 50915 - protein, 9 aa, Homo sapiens
  Table A; Target 50915; HLA-B*56:01; MYH4; ENSG00000264424; TAA
NAVGALAKA

SEQ ID NO: 50916 - protein, 11 aa, Homo sapiens
  Table A; Target 50916; HLA-A*30:02; MYH4; ENSG00000264424; TAA
NAVGALAKAIY

SEQ ID NO: 50917 - protein, 11 aa, Homo sapiens
  Table A; Target 50917; HLA-B*35:01; MYH4; ENSG00000264424; TAA
NAVGALAKAIY

SEQ ID NO: 50918 - protein, 10 aa, Homo sapiens
  Table A; Target 50918; HLA-B*27:05; MYH4; ENSG00000264424; TAA
NAYEESLDHL

SEQ ID NO: 50919 - protein, 10 aa, Homo sapiens
  Table A; Target 50919; HLA-B*40:02; MYH4; ENSG00000264424; TAA
NDLASNMETV

SEQ ID NO: 50920 - protein, 9 aa, Homo sapiens
  Table A; Target 50920; HLA-B*18:01; MYH4; ENSG00000264424; TAA
NEFVTKGQT

SEQ ID NO: 50921 - protein, 9 aa, Homo sapiens
  Table A; Target 50921; HLA-B*44:03; MYH4; ENSG00000264424; TAA
NEFVTKGQT

SEQ ID NO: 50922 - protein, 10 aa, Homo sapiens
  Table A; Target 50922; HLA-A*30:01; MYH4; ENSG00000264424; TAA
NEFVTKGQTV

SEQ ID NO: 50923 - protein, 10 aa, Homo sapiens
  Table A; Target 50923; HLA-B*18:01; MYH4; ENSG00000264424; TAA
NEFVTKGQTV

SEQ ID NO: 50924 - protein, 10 aa, Homo sapiens
  Table A; Target 50924; HLA-B*37:01; MYH4; ENSG00000264424; TAA
NEFVTKGQTV

SEQ ID NO: 50925 - protein, 10 aa, Homo sapiens
  Table A; Target 50925; HLA-B*40:01; MYH4; ENSG00000264424; TAA
NEFVTKGQTV

SEQ ID NO: 50926 - protein, 10 aa, Homo sapiens
  Table A; Target 50926; HLA-B*40:02; MYH4; ENSG00000264424; TAA
NEFVTKGQTV

SEQ ID NO: 50927 - protein, 10 aa, Homo sapiens
  Table A; Target 50927; HLA-B*44:02; MYH4; ENSG00000264424; TAA
NEFVTKGQTV

SEQ ID NO: 50928 - protein, 10 aa, Homo sapiens
  Table A; Target 50928; HLA-B*44:03; MYH4; ENSG00000264424; TAA
NEFVTKGQTV

SEQ ID NO: 50929 - protein, 10 aa, Homo sapiens
  Table A; Target 50929; HLA-B*49:01; MYH4; ENSG00000264424; TAA
NEFVTKGQTV

SEQ ID NO: 50930 - protein, 8 aa, Homo sapiens
  Table A; Target 50930; HLA-B*18:01; MYH4; ENSG00000264424; TAA
NEKLQQFF

SEQ ID NO: 50931 - protein, 8 aa, Homo sapiens
  Table A; Target 50931; HLA-B*37:01; MYH4; ENSG00000264424; TAA
NEKLQQFF

SEQ ID NO: 50932 - protein, 8 aa, Homo sapiens
  Table A; Target 50932; HLA-B*18:01; MYH4; ENSG00000264424; TAA
NELSAQKA

SEQ ID NO: 50933 - protein, 9 aa, Homo sapiens
  Table A; Target 50933; HLA-B*44:02; MYH4; ENSG00000264424; TAA
NELSAQKAR

SEQ ID NO: 50934 - protein, 9 aa, Homo sapiens
  Table A; Target 50934; HLA-B*44:03; MYH4; ENSG00000264424; TAA
NELSAQKAR

SEQ ID NO: 50935 - protein, 10 aa, Homo sapiens
  Table A; Target 50935; HLA-B*40:01; MYH4; ENSG00000264424; TAA
NELSAQKARL

SEQ ID NO: 50936 - protein, 10 aa, Homo sapiens
  Table A; Target 50936; HLA-B*44:03; MYH4; ENSG00000264424; TAA
NELSAQKARL

SEQ ID NO: 50937 - protein, 8 aa, Homo sapiens
  Table A; Target 50937; HLA-B*18:01; MYH4; ENSG00000264424; TAA
NEMEIQLN

SEQ ID NO: 50938 - protein, 9 aa, Homo sapiens
  Table A; Target 50938; HLA-B*18:01; MYH4; ENSG00000264424; TAA
NEMEIQLNH

SEQ ID NO: 50939 - protein, 9 aa, Homo sapiens
  Table A; Target 50939; HLA-B*27:02; MYH4; ENSG00000264424; TAA
NEMEIQLNH

SEQ ID NO: 50940 - protein, 9 aa, Homo sapiens
  Table A; Target 50940; HLA-B*27:05; MYH4; ENSG00000264424; TAA
NEMEIQLNH

SEQ ID NO: 50941 - protein, 9 aa, Homo sapiens
  Table A; Target 50941; HLA-B*44:02; MYH4; ENSG00000264424; TAA
NEMEIQLNH

SEQ ID NO: 50942 - protein, 9 aa, Homo sapiens
  Table A; Target 50942; HLA-B*44:03; MYH4; ENSG00000264424; TAA
NEMEIQLNH

SEQ ID NO: 50943 - protein, 9 aa, Homo sapiens
  Table A; Target 50943; HLA-B*49:01; MYH4; ENSG00000264424; TAA
NEMEIQLNH

SEQ ID NO: 50944 - protein, 9 aa, Homo sapiens
  Table A; Target 50944; HLA-C*16:04; MYH4; ENSG00000264424; TAA
NEMEIQLNH

SEQ ID NO: 50945 - protein, 10 aa, Homo sapiens
  Table A; Target 50945; HLA-A*30:01; MYH4; ENSG00000264424; TAA
NEMEIQLNHA

SEQ ID NO: 50946 - protein, 10 aa, Homo sapiens
  Table A; Target 50946; HLA-B*18:01; MYH4; ENSG00000264424; TAA
NEMEIQLNHA

SEQ ID NO: 50947 - protein, 10 aa, Homo sapiens
  Table A; Target 50947; HLA-B*44:02; MYH4; ENSG00000264424; TAA
NEMEIQLNHA

SEQ ID NO: 50948 - protein, 10 aa, Homo sapiens
  Table A; Target 50948; HLA-B*44:03; MYH4; ENSG00000264424; TAA
NEMEIQLNHA

SEQ ID NO: 50949 - protein, 10 aa, Homo sapiens
  Table A; Target 50949; HLA-B*49:01; MYH4; ENSG00000264424; TAA
NEMEIQLNHA

SEQ ID NO: 50950 - protein, 8 aa, Homo sapiens
  Table A; Target 50950; HLA-B*18:01; MYH4; ENSG00000264424; TAA
NETKTPGA

SEQ ID NO: 50951 - protein, 9 aa, Homo sapiens
  Table A; Target 50951; HLA-A*30:01; MYH4; ENSG00000264424; TAA
NETKTPGAM

SEQ ID NO: 50952 - protein, 9 aa, Homo sapiens
  Table A; Target 50952; HLA-B*18:01; MYH4; ENSG00000264424; TAA
NETKTPGAM

SEQ ID NO: 50953 - protein, 9 aa, Homo sapiens
  Table A; Target 50953; HLA-B*40:01; MYH4; ENSG00000264424; TAA
NETKTPGAM

SEQ ID NO: 50954 - protein, 8 aa, Homo sapiens
  Table A; Target 50954; HLA-B*15:03; MYH4; ENSG00000264424; TAA
NETVVGLY

SEQ ID NO: 50955 - protein, 8 aa, Homo sapiens
  Table A; Target 50955; HLA-B*18:01; MYH4; ENSG00000264424; TAA
NETVVGLY

SEQ ID NO: 50956 - protein, 8 aa, Homo sapiens
  Table A; Target 50956; HLA-B*37:01; MYH4; ENSG00000264424; TAA
NETVVGLY

SEQ ID NO: 50957 - protein, 8 aa, Homo sapiens
  Table A; Target 50957; HLA-B*44:02; MYH4; ENSG00000264424; TAA
NETVVGLY

SEQ ID NO: 50958 - protein, 8 aa, Homo sapiens
  Table A; Target 50958; HLA-B*44:03; MYH4; ENSG00000264424; TAA
NETVVGLY

SEQ ID NO: 50959 - protein, 8 aa, Homo sapiens
  Table A; Target 50959; HLA-B*49:01; MYH4; ENSG00000264424; TAA
NETVVGLY

SEQ ID NO: 50960 - protein, 8 aa, Homo sapiens
  Table A; Target 50960; HLA-C*07:01; MYH4; ENSG00000264424; TAA
NETVVGLY

SEQ ID NO: 50961 - protein, 8 aa, Homo sapiens
  Table A; Target 50961; HLA-B*49:01; MYH4; ENSG00000264424; TAA
NEVEDLMI

SEQ ID NO: 50962 - protein, 10 aa, Homo sapiens
  Table A; Target 50962; HLA-B*49:01; MYH4; ENSG00000264424; TAA
NEVEDLMIDV

SEQ ID NO: 50963 - protein, 9 aa, Homo sapiens
  Table A; Target 50963; HLA-A*24:02; MYH4; ENSG00000264424; TAA
NFDKVLAEW

SEQ ID NO: 50964 - protein, 9 aa, Homo sapiens
  Table A; Target 50964; HLA-C*04:01; MYH4; ENSG00000264424; TAA
NFDKVLAEW

SEQ ID NO: 50965 - protein, 10 aa, Homo sapiens
  Table A; Target 50965; HLA-A*24:02; MYH4; ENSG00000264424; TAA
NFTNEKLQQF

SEQ ID NO: 50966 - protein, 11 aa, Homo sapiens
  Table A; Target 50966; HLA-B*38:01; MYH4; ENSG00000264424; TAA
NHANRQAAEAL

SEQ ID NO: 50967 - protein, 11 aa, Homo sapiens
  Table A; Target 50967; HLA-B*39:01; MYH4; ENSG00000264424; TAA
NHANRQAAEAL

SEQ ID NO: 50968 - protein, 9 aa, Homo sapiens
  Table A; Target 50968; HLA-B*38:01; MYH4; ENSG00000264424; TAA
NHLRVVESM

SEQ ID NO: 50969 - protein, 9 aa, Homo sapiens
  Table A; Target 50969; HLA-A*03:01; MYH4; ENSG00000264424; TAA
NIRAFMNVK

SEQ ID NO: 50970 - protein, 9 aa, Homo sapiens
  Table A; Target 50970; HLA-A*25:01; MYH4; ENSG00000264424; TAA
NLKERYAAW

SEQ ID NO: 50971 - protein, 9 aa, Homo sapiens
  Table A; Target 50971; HLA-B*08:01; MYH4; ENSG00000264424; TAA
NLKERYAAW

SEQ ID NO: 50972 - protein, 10 aa, Homo sapiens
  Table A; Target 50972; HLA-A*02:01; MYH4; ENSG00000264424; TAA
NLMQAEVEEL

SEQ ID NO: 50973 - protein, 10 aa, Homo sapiens
  Table A; Target 50973; HLA-A*02:04; MYH4; ENSG00000264424; TAA
NLMQAEVEEL

SEQ ID NO: 50974 - protein, 10 aa, Homo sapiens
  Table A; Target 50974; HLA-A*25:01; MYH4; ENSG00000264424; TAA
NLMQAEVEEL

SEQ ID NO: 50975 - protein, 10 aa, Homo sapiens
  Table A; Target 50975; HLA-B*27:05; MYH4; ENSG00000264424; TAA
NLMQAEVEEL

SEQ ID NO: 50976 - protein, 10 aa, Homo sapiens
  Table A; Target 50976; HLA-B*35:03; MYH4; ENSG00000264424; TAA
NLMQAEVEEL

SEQ ID NO: 50977 - protein, 10 aa, Homo sapiens
  Table A; Target 50977; HLA-B*38:01; MYH4; ENSG00000264424; TAA
NLMQAEVEEL

SEQ ID NO: 50978 - protein, 10 aa, Homo sapiens
  Table A; Target 50978; HLA-B*55:01; MYH4; ENSG00000264424; TAA
NLMQAEVEEL

SEQ ID NO: 50979 - protein, 11 aa, Homo sapiens
  Table A; Target 50979; HLA-A*33:01; MYH4; ENSG00000264424; TAA
NLMQAEVEELR

SEQ ID NO: 50980 - protein, 9 aa, Homo sapiens
  Table A; Target 50980; HLA-A*02:03; MYH4; ENSG00000264424; TAA
NLNKLMTNL

SEQ ID NO: 50981 - protein, 9 aa, Homo sapiens
  Table A; Target 50981; HLA-A*02:04; MYH4; ENSG00000264424; TAA
NLNKLMTNL

SEQ ID NO: 50982 - protein, 9 aa, Homo sapiens
  Table A; Target 50982; HLA-A*02:07; MYH4; ENSG00000264424; TAA
NLNKLMTNL

SEQ ID NO: 50983 - protein, 9 aa, Homo sapiens
  Table A; Target 50983; HLA-A*03:01; MYH4; ENSG00000264424; TAA
NLNKLMTNL

SEQ ID NO: 50984 - protein, 9 aa, Homo sapiens
  Table A; Target 50984; HLA-A*03:02; MYH4; ENSG00000264424; TAA
NLNKLMTNL

SEQ ID NO: 50985 - protein, 9 aa, Homo sapiens
  Table A; Target 50985; HLA-C*01:02; MYH4; ENSG00000264424; TAA
NLNKLMTNL

SEQ ID NO: 50986 - protein, 9 aa, Homo sapiens
  Table A; Target 50986; HLA-B*07:02; MYH4; ENSG00000264424; TAA
NLRNTQGIL

SEQ ID NO: 50987 - protein, 10 aa, Homo sapiens
  Table A; Target 50987; HLA-A*03:01; MYH4; ENSG00000264424; TAA
NLRNTQGILK

SEQ ID NO: 50988 - protein, 9 aa, Homo sapiens
  Table A; Target 50988; HLA-A*03:02; MYH4; ENSG00000264424; TAA
NMETVSKAK

SEQ ID NO: 50989 - protein, 10 aa, Homo sapiens
  Table A; Target 50989; HLA-A*33:01; MYH4; ENSG00000264424; TAA
NNFQKPKPAK

SEQ ID NO: 50990 - protein, 8 aa, Homo sapiens
  Table A; Target 50990; HLA-B*18:01; MYH4; ENSG00000264424; TAA
NPEVVTAY

SEQ ID NO: 50991 - protein, 8 aa, Homo sapiens
  Table A; Target 50991; HLA-B*35:01; MYH4; ENSG00000264424; TAA
NPEVVTAY

SEQ ID NO: 50992 - protein, 8 aa, Homo sapiens
  Table A; Target 50992; HLA-B*55:01; MYH4; ENSG00000264424; TAA
NPEVVTAY

SEQ ID NO: 50993 - protein, 8 aa, Homo sapiens
  Table A; Target 50993; HLA-C*03:03; MYH4; ENSG00000264424; TAA
NPEVVTAY

SEQ ID NO: 50994 - protein, 8 aa, Homo sapiens
  Table A; Target 50994; HLA-C*14:02; MYH4; ENSG00000264424; TAA
NPEVVTAY

SEQ ID NO: 50995 - protein, 9 aa, Homo sapiens
  Table A; Target 50995; HLA-A*68:01; MYH4; ENSG00000264424; TAA
NPEVVTAYR

SEQ ID NO: 50996 - protein, 9 aa, Homo sapiens
  Table A; Target 50996; HLA-C*07:06; MYH4; ENSG00000264424; TAA
NPEVVTAYR

SEQ ID NO: 50997 - protein, 10 aa, Homo sapiens
  Table A; Target 50997; HLA-B*54:01; MYH4; ENSG00000264424; TAA
NPLLEAFGNA

SEQ ID NO: 50998 - protein, 8 aa, Homo sapiens
  Table A; Target 50998; HLA-B*51:01; MYH4; ENSG00000264424; TAA
NPPKYDKI

SEQ ID NO: 50999 - protein, 8 aa, Homo sapiens
  Table A; Target 50999; HLA-B*51:01; MYH4; ENSG00000264424; TAA
NPYDFAFV

SEQ ID NO: 51000 - protein, 8 aa, Homo sapiens
  Table A; Target 51000; HLA-B*54:01; MYH4; ENSG00000264424; TAA
NPYDFAFV

SEQ ID NO: 51001 - protein, 8 aa, Homo sapiens
  Table A; Target 51001; HLA-B*56:01; MYH4; ENSG00000264424; TAA
NPYDFAFV

SEQ ID NO: 51002 - protein, 9 aa, Homo sapiens
  Table A; Target 51002; HLA-B*54:01; MYH4; ENSG00000264424; TAA
NPYDFAFVS

SEQ ID NO: 51003 - protein, 10 aa, Homo sapiens
  Table A; Target 51003; HLA-B*54:01; MYH4; ENSG00000264424; TAA
NPYDFAFVSQ

SEQ ID NO: 51004 - protein, 9 aa, Homo sapiens
  Table A; Target 51004; HLA-B*35:01; MYH4; ENSG00000264424; TAA
NPYKWLPVY

SEQ ID NO: 51005 - protein, 9 aa, Homo sapiens
  Table A; Target 51005; HLA-B*51:01; MYH4; ENSG00000264424; TAA
NPYKWLPVY

SEQ ID NO: 51006 - protein, 10 aa, Homo sapiens
  Table A; Target 51006; HLA-A*31:01; MYH4; ENSG00000264424; TAA
NQQLDTKQPR

SEQ ID NO: 51007 - protein, 10 aa, Homo sapiens
  Table A; Target 51007; HLA-A*33:01; MYH4; ENSG00000264424; TAA
NQQLDTKQPR

SEQ ID NO: 51008 - protein, 10 aa, Homo sapiens
  Table A; Target 51008; HLA-A*33:03; MYH4; ENSG00000264424; TAA
NQQLDTKQPR

SEQ ID NO: 51009 - protein, 10 aa, Homo sapiens
  Table A; Target 51009; HLA-A*68:01; MYH4; ENSG00000264424; TAA
NQQLDTKQPR

SEQ ID NO: 51010 - protein, 9 aa, Homo sapiens
  Table A; Target 51010; HLA-B*27:05; MYH4; ENSG00000264424; TAA
NRQAAEALR

SEQ ID NO: 51011 - protein, 9 aa, Homo sapiens
  Table A; Target 51011; HLA-A*02:03; MYH4; ENSG00000264424; TAA
NSADLLKSL

SEQ ID NO: 51012 - protein, 9 aa, Homo sapiens
  Table A; Target 51012; HLA-A*25:01; MYH4; ENSG00000264424; TAA
NSADLLKSL

SEQ ID NO: 51013 - protein, 9 aa, Homo sapiens
  Table A; Target 51013; HLA-A*32:01; MYH4; ENSG00000264424; TAA
NSADLLKSL

SEQ ID NO: 51014 - protein, 9 aa, Homo sapiens
  Table A; Target 51014; HLA-A*33:01; MYH4; ENSG00000264424; TAA
NSADLLKSL

SEQ ID NO: 51015 - protein, 9 aa, Homo sapiens
  Table A; Target 51015; HLA-A*33:03; MYH4; ENSG00000264424; TAA
NSADLLKSL

SEQ ID NO: 51016 - protein, 9 aa, Homo sapiens
  Table A; Target 51016; HLA-A*68:01; MYH4; ENSG00000264424; TAA
NSADLLKSL

SEQ ID NO: 51017 - protein, 9 aa, Homo sapiens
  Table A; Target 51017; HLA-A*68:02; MYH4; ENSG00000264424; TAA
NSADLLKSL

SEQ ID NO: 51018 - protein, 9 aa, Homo sapiens
  Table A; Target 51018; HLA-B*27:05; MYH4; ENSG00000264424; TAA
NSADLLKSL

SEQ ID NO: 51019 - protein, 9 aa, Homo sapiens
  Table A; Target 51019; HLA-B*40:02; MYH4; ENSG00000264424; TAA
NSADLLKSL

SEQ ID NO: 51020 - protein, 9 aa, Homo sapiens
  Table A; Target 51020; HLA-B*44:02; MYH4; ENSG00000264424; TAA
NSADLLKSL

SEQ ID NO: 51021 - protein, 9 aa, Homo sapiens
  Table A; Target 51021; HLA-B*44:03; MYH4; ENSG00000264424; TAA
NSADLLKSL

SEQ ID NO: 51022 - protein, 9 aa, Homo sapiens
  Table A; Target 51022; HLA-C*01:02; MYH4; ENSG00000264424; TAA
NSADLLKSL

SEQ ID NO: 51023 - protein, 9 aa, Homo sapiens
  Table A; Target 51023; HLA-C*02:02; MYH4; ENSG00000264424; TAA
NSADLLKSL

SEQ ID NO: 51024 - protein, 9 aa, Homo sapiens
  Table A; Target 51024; HLA-C*03:04; MYH4; ENSG00000264424; TAA
NSADLLKSL

SEQ ID NO: 51025 - protein, 9 aa, Homo sapiens
  Table A; Target 51025; HLA-C*06:02; MYH4; ENSG00000264424; TAA
NSADLLKSL

SEQ ID NO: 51026 - protein, 9 aa, Homo sapiens
  Table A; Target 51026; HLA-C*07:06; MYH4; ENSG00000264424; TAA
NSADLLKSL

SEQ ID NO: 51027 - protein, 9 aa, Homo sapiens
  Table A; Target 51027; HLA-C*12:03; MYH4; ENSG00000264424; TAA
NSADLLKSL

SEQ ID NO: 51028 - protein, 9 aa, Homo sapiens
  Table A; Target 51028; HLA-C*14:02; MYH4; ENSG00000264424; TAA
NSADLLKSL

SEQ ID NO: 51029 - protein, 9 aa, Homo sapiens
  Table A; Target 51029; HLA-C*16:01; MYH4; ENSG00000264424; TAA
NSADLLKSL

SEQ ID NO: 51030 - protein, 9 aa, Homo sapiens
  Table A; Target 51030; HLA-C*16:02; MYH4; ENSG00000264424; TAA
NSADLLKSL

SEQ ID NO: 51031 - protein, 11 aa, Homo sapiens
  Table A; Target 51031; HLA-A*01:01; MYH4; ENSG00000264424; TAA
NSADLLKSLCY

SEQ ID NO: 51032 - protein, 11 aa, Homo sapiens
  Table A; Target 51032; HLA-A*29:02; MYH4; ENSG00000264424; TAA
NSADLLKSLCY

SEQ ID NO: 51033 - protein, 11 aa, Homo sapiens
  Table A; Target 51033; HLA-A*01:01; MYH4; ENSG00000264424; TAA
NSEVAQWRTKY

SEQ ID NO: 51034 - protein, 8 aa, Homo sapiens
  Table A; Target 51034; HLA-B*15:01; MYH4; ENSG00000264424; TAA
NTKRVIQY

SEQ ID NO: 51035 - protein, 8 aa, Homo sapiens
  Table A; Target 51035; HLA-C*16:01; MYH4; ENSG00000264424; TAA
NTKRVIQY

SEQ ID NO: 51036 - protein, 9 aa, Homo sapiens
  Table A; Target 51036; HLA-A*25:01; MYH4; ENSG00000264424; TAA
NTKRVIQYF

SEQ ID NO: 51037 - protein, 9 aa, Homo sapiens
  Table A; Target 51037; HLA-A*33:01; MYH4; ENSG00000264424; TAA
NTKRVIQYF

SEQ ID NO: 51038 - protein, 9 aa, Homo sapiens
  Table A; Target 51038; HLA-B*57:01; MYH4; ENSG00000264424; TAA
NTKRVIQYF

SEQ ID NO: 51039 - protein, 8 aa, Homo sapiens
  Table A; Target 51039; HLA-A*03:02; MYH4; ENSG00000264424; TAA
NTSLINTK

SEQ ID NO: 51040 - protein, 8 aa, Homo sapiens
  Table A; Target 51040; HLA-A*11:01; MYH4; ENSG00000264424; TAA
NTSLINTK

SEQ ID NO: 51041 - protein, 9 aa, Homo sapiens
  Table A; Target 51041; HLA-A*01:01; MYH4; ENSG00000264424; TAA
NTSLINTKK

SEQ ID NO: 51042 - protein, 9 aa, Homo sapiens
  Table A; Target 51042; HLA-A*03:01; MYH4; ENSG00000264424; TAA
NTSLINTKK

SEQ ID NO: 51043 - protein, 9 aa, Homo sapiens
  Table A; Target 51043; HLA-A*03:02; MYH4; ENSG00000264424; TAA
NTSLINTKK

SEQ ID NO: 51044 - protein, 9 aa, Homo sapiens
  Table A; Target 51044; HLA-A*11:01; MYH4; ENSG00000264424; TAA
NTSLINTKK

SEQ ID NO: 51045 - protein, 9 aa, Homo sapiens
  Table A; Target 51045; HLA-A*33:03; MYH4; ENSG00000264424; TAA
NTSLINTKK

SEQ ID NO: 51046 - protein, 9 aa, Homo sapiens
  Table A; Target 51046; HLA-A*68:01; MYH4; ENSG00000264424; TAA
NTSLINTKK

SEQ ID NO: 51047 - protein, 9 aa, Homo sapiens
  Table A; Target 51047; HLA-A*68:02; MYH4; ENSG00000264424; TAA
NTSLINTKK

SEQ ID NO: 51048 - protein, 9 aa, Homo sapiens
  Table A; Target 51048; HLA-C*07:06; MYH4; ENSG00000264424; TAA
NTSLINTKK

SEQ ID NO: 51049 - protein, 9 aa, Homo sapiens
  Table A; Target 51049; HLA-A*33:01; MYH4; ENSG00000264424; TAA
NVEAVKGLR

SEQ ID NO: 51050 - protein, 9 aa, Homo sapiens
  Table A; Target 51050; HLA-A*33:03; MYH4; ENSG00000264424; TAA
NVEAVKGLR

SEQ ID NO: 51051 - protein, 9 aa, Homo sapiens
  Table A; Target 51051; HLA-A*68:01; MYH4; ENSG00000264424; TAA
NVEAVKGLR

SEQ ID NO: 51052 - protein, 9 aa, Homo sapiens
  Table A; Target 51052; HLA-C*07:06; MYH4; ENSG00000264424; TAA
NVEAVKGLR

SEQ ID NO: 51053 - protein, 9 aa, Homo sapiens
  Table A; Target 51053; HLA-B*27:02; MYH4; ENSG00000264424; TAA
PDGTEVADK

SEQ ID NO: 51054 - protein, 9 aa, Homo sapiens
  Table A; Target 51054; HLA-B*27:02; MYH4; ENSG00000264424; TAA
PEGQFIDSK

SEQ ID NO: 51055 - protein, 8 aa, Homo sapiens
  Table A; Target 51055; HLA-B*27:02; MYH4; ENSG00000264424; TAA
PEVVTAYR

SEQ ID NO: 51056 - protein, 9 aa, Homo sapiens
  Table A; Target 51056; HLA-A*23:01; MYH4; ENSG00000264424; TAA
PFDAKTSVF

SEQ ID NO: 51057 - protein, 9 aa, Homo sapiens
  Table A; Target 51057; HLA-A*24:02; MYH4; ENSG00000264424; TAA
PFDAKTSVF

SEQ ID NO: 51058 - protein, 9 aa, Homo sapiens
  Table A; Target 51058; HLA-C*04:01; MYH4; ENSG00000264424; TAA
PFDAKTSVF

SEQ ID NO: 51059 - protein, 9 aa, Homo sapiens
  Table A; Target 51059; HLA-C*07:01; MYH4; ENSG00000264424; TAA
PFDAKTSVF

SEQ ID NO: 51060 - protein, 8 aa, Homo sapiens
  Table A; Target 51060; HLA-C*07:04; MYH4; ENSG00000264424; TAA
PGAMEHEL

SEQ ID NO: 51061 - protein, 9 aa, Homo sapiens
  Table A; Target 51061; HLA-A*02:03; MYH4; ENSG00000264424; TAA
PLNETVVGL

SEQ ID NO: 51062 - protein, 9 aa, Homo sapiens
  Table A; Target 51062; HLA-A*02:04; MYH4; ENSG00000264424; TAA
PLNETVVGL

SEQ ID NO: 51063 - protein, 10 aa, Homo sapiens
  Table A; Target 51063; HLA-A*01:01; MYH4; ENSG00000264424; TAA
PLNETVVGLY

SEQ ID NO: 51064 - protein, 10 aa, Homo sapiens
  Table A; Target 51064; HLA-A*30:02; MYH4; ENSG00000264424; TAA
PLNETVVGLY

SEQ ID NO: 51065 - protein, 11 aa, Homo sapiens
  Table A; Target 51065; HLA-A*03:01; MYH4; ENSG00000264424; TAA
PVYNPEVVTAY

SEQ ID NO: 51066 - protein, 11 aa, Homo sapiens
  Table A; Target 51066; HLA-A*25:01; MYH4; ENSG00000264424; TAA
PVYNPEVVTAY

SEQ ID NO: 51067 - protein, 11 aa, Homo sapiens
  Table A; Target 51067; HLA-A*26:01; MYH4; ENSG00000264424; TAA
PVYNPEVVTAY

SEQ ID NO: 51068 - protein, 11 aa, Homo sapiens
  Table A; Target 51068; HLA-A*29:02; MYH4; ENSG00000264424; TAA
PVYNPEVVTAY

SEQ ID NO: 51069 - protein, 11 aa, Homo sapiens
  Table A; Target 51069; HLA-A*30:02; MYH4; ENSG00000264424; TAA
PVYNPEVVTAY

SEQ ID NO: 51070 - protein, 11 aa, Homo sapiens
  Table A; Target 51070; HLA-A*33:01; MYH4; ENSG00000264424; TAA
PVYNPEVVTAY

SEQ ID NO: 51071 - protein, 11 aa, Homo sapiens
  Table A; Target 51071; HLA-B*15:01; MYH4; ENSG00000264424; TAA
PVYNPEVVTAY

SEQ ID NO: 51072 - protein, 11 aa, Homo sapiens
  Table A; Target 51072; HLA-B*27:02; MYH4; ENSG00000264424; TAA
PVYNPEVVTAY

SEQ ID NO: 51073 - protein, 9 aa, Homo sapiens
  Table A; Target 51073; HLA-A*25:01; MYH4; ENSG00000264424; TAA
QAAEALRNL

SEQ ID NO: 51074 - protein, 9 aa, Homo sapiens
  Table A; Target 51074; HLA-A*32:01; MYH4; ENSG00000264424; TAA
QAAEALRNL

SEQ ID NO: 51075 - protein, 9 aa, Homo sapiens
  Table A; Target 51075; HLA-B*07:02; MYH4; ENSG00000264424; TAA
QAAEALRNL

SEQ ID NO: 51076 - protein, 9 aa, Homo sapiens
  Table A; Target 51076; HLA-B*15:03; MYH4; ENSG00000264424; TAA
QAAEALRNL

SEQ ID NO: 51077 - protein, 9 aa, Homo sapiens
  Table A; Target 51077; HLA-B*27:05; MYH4; ENSG00000264424; TAA
QAAEALRNL

SEQ ID NO: 51078 - protein, 9 aa, Homo sapiens
  Table A; Target 51078; HLA-B*35:03; MYH4; ENSG00000264424; TAA
QAAEALRNL

SEQ ID NO: 51079 - protein, 9 aa, Homo sapiens
  Table A; Target 51079; HLA-B*38:01; MYH4; ENSG00000264424; TAA
QAAEALRNL

SEQ ID NO: 51080 - protein, 9 aa, Homo sapiens
  Table A; Target 51080; HLA-B*40:02; MYH4; ENSG00000264424; TAA
QAAEALRNL

SEQ ID NO: 51081 - protein, 9 aa, Homo sapiens
  Table A; Target 51081; HLA-B*46:01; MYH4; ENSG00000264424; TAA
QAAEALRNL

SEQ ID NO: 51082 - protein, 9 aa, Homo sapiens
  Table A; Target 51082; HLA-B*51:01; MYH4; ENSG00000264424; TAA
QAAEALRNL

SEQ ID NO: 51083 - protein, 9 aa, Homo sapiens
  Table A; Target 51083; HLA-B*58:01; MYH4; ENSG00000264424; TAA
QAAEALRNL

SEQ ID NO: 51084 - protein, 9 aa, Homo sapiens
  Table A; Target 51084; HLA-C*01:02; MYH4; ENSG00000264424; TAA
QAAEALRNL

SEQ ID NO: 51085 - protein, 9 aa, Homo sapiens
  Table A; Target 51085; HLA-C*02:02; MYH4; ENSG00000264424; TAA
QAAEALRNL

SEQ ID NO: 51086 - protein, 9 aa, Homo sapiens
  Table A; Target 51086; HLA-C*03:03; MYH4; ENSG00000264424; TAA
QAAEALRNL

SEQ ID NO: 51087 - protein, 9 aa, Homo sapiens
  Table A; Target 51087; HLA-C*03:04; MYH4; ENSG00000264424; TAA
QAAEALRNL

SEQ ID NO: 51088 - protein, 9 aa, Homo sapiens
  Table A; Target 51088; HLA-C*06:02; MYH4; ENSG00000264424; TAA
QAAEALRNL

SEQ ID NO: 51089 - protein, 9 aa, Homo sapiens
  Table A; Target 51089; HLA-C*07:04; MYH4; ENSG00000264424; TAA
QAAEALRNL

SEQ ID NO: 51090 - protein, 9 aa, Homo sapiens
  Table A; Target 51090; HLA-C*07:06; MYH4; ENSG00000264424; TAA
QAAEALRNL

SEQ ID NO: 51091 - protein, 9 aa, Homo sapiens
  Table A; Target 51091; HLA-C*12:03; MYH4; ENSG00000264424; TAA
QAAEALRNL

SEQ ID NO: 51092 - protein, 9 aa, Homo sapiens
  Table A; Target 51092; HLA-C*16:01; MYH4; ENSG00000264424; TAA
QAAEALRNL

SEQ ID NO: 51093 - protein, 9 aa, Homo sapiens
  Table A; Target 51093; HLA-C*16:02; MYH4; ENSG00000264424; TAA
QAAEALRNL

SEQ ID NO: 51094 - protein, 9 aa, Homo sapiens
  Table A; Target 51094; HLA-C*16:04; MYH4; ENSG00000264424; TAA
QAAEALRNL

SEQ ID NO: 51095 - protein, 10 aa, Homo sapiens
  Table A; Target 51095; HLA-A*31:01; MYH4; ENSG00000264424; TAA
QAAEALRNLR

SEQ ID NO: 51096 - protein, 10 aa, Homo sapiens
  Table A; Target 51096; HLA-A*33:03; MYH4; ENSG00000264424; TAA
QAAEALRNLR

SEQ ID NO: 51097 - protein, 10 aa, Homo sapiens
  Table A; Target 51097; HLA-A*68:01; MYH4; ENSG00000264424; TAA
QAAEALRNLR

SEQ ID NO: 51098 - protein, 10 aa, Homo sapiens
  Table A; Target 51098; HLA-C*07:06; MYH4; ENSG00000264424; TAA
QAAEALRNLR

SEQ ID NO: 51099 - protein, 10 aa, Homo sapiens
  Table A; Target 51099; HLA-C*16:02; MYH4; ENSG00000264424; TAA
QAAEALRNLR

SEQ ID NO: 51100 - protein, 11 aa, Homo sapiens
  Table A; Target 51100; HLA-C*05:01; MYH4; ENSG00000264424; TAA
QAEEAEEQSNV

SEQ ID NO: 51101 - protein, 9 aa, Homo sapiens
  Table A; Target 51101; HLA-B*35:03; MYH4; ENSG00000264424; TAA
QAEPDGTEV

SEQ ID NO: 51102 - protein, 9 aa, Homo sapiens
  Table A; Target 51102; HLA-B*39:01; MYH4; ENSG00000264424; TAA
QAEPDGTEV

SEQ ID NO: 51103 - protein, 9 aa, Homo sapiens
  Table A; Target 51103; HLA-C*05:01; MYH4; ENSG00000264424; TAA
QAEPDGTEV

SEQ ID NO: 51104 - protein, 10 aa, Homo sapiens
  Table A; Target 51104; HLA-B*27:05; MYH4; ENSG00000264424; TAA
QAFTQQIEEL

SEQ ID NO: 51105 - protein, 10 aa, Homo sapiens
  Table A; Target 51105; HLA-B*35:03; MYH4; ENSG00000264424; TAA
QAFTQQIEEL

SEQ ID NO: 51106 - protein, 10 aa, Homo sapiens
  Table A; Target 51106; HLA-B*38:01; MYH4; ENSG00000264424; TAA
QAFTQQIEEL

SEQ ID NO: 51107 - protein, 11 aa, Homo sapiens
  Table A; Target 51107; HLA-B*27:02; MYH4; ENSG00000264424; TAA
QAFTQQIEELK

SEQ ID NO: 51108 - protein, 9 aa, Homo sapiens
  Table A; Target 51108; HLA-A*03:01; MYH4; ENSG00000264424; TAA
QALAIQLQK

SEQ ID NO: 51109 - protein, 9 aa, Homo sapiens
  Table A; Target 51109; HLA-A*03:02; MYH4; ENSG00000264424; TAA
QALAIQLQK

SEQ ID NO: 51110 - protein, 9 aa, Homo sapiens
  Table A; Target 51110; HLA-A*11:01; MYH4; ENSG00000264424; TAA
QALAIQLQK

SEQ ID NO: 51111 - protein, 9 aa, Homo sapiens
  Table A; Target 51111; HLA-A*33:03; MYH4; ENSG00000264424; TAA
QALAIQLQK

SEQ ID NO: 51112 - protein, 9 aa, Homo sapiens
  Table A; Target 51112; HLA-A*68:01; MYH4; ENSG00000264424; TAA
QALAIQLQK

SEQ ID NO: 51113 - protein, 9 aa, Homo sapiens
  Table A; Target 51113; HLA-B*27:02; MYH4; ENSG00000264424; TAA
QALAIQLQK

SEQ ID NO: 51114 - protein, 9 aa, Homo sapiens
  Table A; Target 51114; HLA-C*07:06; MYH4; ENSG00000264424; TAA
QALAIQLQK

SEQ ID NO: 51115 - protein, 8 aa, Homo sapiens
  Table A; Target 51115; HLA-B*37:01; MYH4; ENSG00000264424; TAA
QDDLKEQL

SEQ ID NO: 51116 - protein, 10 aa, Homo sapiens
  Table A; Target 51116; HLA-B*27:02; MYH4; ENSG00000264424; TAA
QDLVDKLQTK

SEQ ID NO: 51117 - protein, 10 aa, Homo sapiens
  Table A; Target 51117; HLA-C*04:01; MYH4; ENSG00000264424; TAA
QDLVDKLQTK

SEQ ID NO: 51118 - protein, 10 aa, Homo sapiens
  Table A; Target 51118; HLA-C*07:01; MYH4; ENSG00000264424; TAA
QDLVDKLQTK

SEQ ID NO: 51119 - protein, 10 aa, Homo sapiens
  Table A; Target 51119; HLA-C*07:02; MYH4; ENSG00000264424; TAA
QDLVDKLQTK

SEQ ID NO: 51120 - protein, 9 aa, Homo sapiens
  Table A; Target 51120; HLA-A*33:01; MYH4; ENSG00000264424; TAA
QDTSAHLER

SEQ ID NO: 51121 - protein, 9 aa, Homo sapiens
  Table A; Target 51121; HLA-A*33:03; MYH4; ENSG00000264424; TAA
QDTSAHLER

SEQ ID NO: 51122 - protein, 9 aa, Homo sapiens
  Table A; Target 51122; HLA-A*68:01; MYH4; ENSG00000264424; TAA
QDTSAHLER

SEQ ID NO: 51123 - protein, 9 aa, Homo sapiens
  Table A; Target 51123; HLA-C*16:02; MYH4; ENSG00000264424; TAA
QDTSAHLER

SEQ ID NO: 51124 - protein, 10 aa, Homo sapiens
  Table A; Target 51124; HLA-B*37:01; MYH4; ENSG00000264424; TAA
QDTSAHLERM

SEQ ID NO: 51125 - protein, 8 aa, Homo sapiens
  Table A; Target 51125; HLA-A*30:01; MYH4; ENSG00000264424; TAA
QEAHQQTL

SEQ ID NO: 51126 - protein, 8 aa, Homo sapiens
  Table A; Target 51126; HLA-B*40:01; MYH4; ENSG00000264424; TAA
QEAHQQTL

SEQ ID NO: 51127 - protein, 11 aa, Homo sapiens
  Table A; Target 51127; HLA-B*40:01; MYH4; ENSG00000264424; TAA
QEAHQQTLDDL

SEQ ID NO: 51128 - protein, 9 aa, Homo sapiens
  Table A; Target 51128; HLA-B*44:03; MYH4; ENSG00000264424; TAA
QEAKAELQR

SEQ ID NO: 51129 - protein, 11 aa, Homo sapiens
  Table A; Target 51129; HLA-A*30:01; MYH4; ENSG00000264424; TAA
QEAKAELQRGM

SEQ ID NO: 51130 - protein, 11 aa, Homo sapiens
  Table A; Target 51130; HLA-B*44:02; MYH4; ENSG00000264424; TAA
QEAKAELQRGM

SEQ ID NO: 51131 - protein, 11 aa, Homo sapiens
  Table A; Target 51131; HLA-B*44:03; MYH4; ENSG00000264424; TAA
QEAKAELQRGM

SEQ ID NO: 51132 - protein, 8 aa, Homo sapiens
  Table A; Target 51132; HLA-A*30:01; MYH4; ENSG00000264424; TAA
QEAPPHIF

SEQ ID NO: 51133 - protein, 8 aa, Homo sapiens
  Table A; Target 51133; HLA-B*18:01; MYH4; ENSG00000264424; TAA
QEAPPHIF

SEQ ID NO: 51134 - protein, 8 aa, Homo sapiens
  Table A; Target 51134; HLA-B*37:01; MYH4; ENSG00000264424; TAA
QEAPPHIF

SEQ ID NO: 51135 - protein, 8 aa, Homo sapiens
  Table A; Target 51135; HLA-B*40:01; MYH4; ENSG00000264424; TAA
QEAPPHIF

SEQ ID NO: 51136 - protein, 8 aa, Homo sapiens
  Table A; Target 51136; HLA-B*44:02; MYH4; ENSG00000264424; TAA
QEAPPHIF

SEQ ID NO: 51137 - protein, 8 aa, Homo sapiens
  Table A; Target 51137; HLA-B*44:03; MYH4; ENSG00000264424; TAA
QEAPPHIF

SEQ ID NO: 51138 - protein, 8 aa, Homo sapiens
  Table A; Target 51138; HLA-B*49:01; MYH4; ENSG00000264424; TAA
QEAPPHIF

SEQ ID NO: 51139 - protein, 8 aa, Homo sapiens
  Table A; Target 51139; HLA-C*16:04; MYH4; ENSG00000264424; TAA
QEAPPHIF

SEQ ID NO: 51140 - protein, 10 aa, Homo sapiens
  Table A; Target 51140; HLA-A*30:01; MYH4; ENSG00000264424; TAA
QEAPPHIFSI

SEQ ID NO: 51141 - protein, 10 aa, Homo sapiens
  Table A; Target 51141; HLA-B*37:01; MYH4; ENSG00000264424; TAA
QEAPPHIFSI

SEQ ID NO: 51142 - protein, 10 aa, Homo sapiens
  Table A; Target 51142; HLA-B*38:01; MYH4; ENSG00000264424; TAA
QEAPPHIFSI

SEQ ID NO: 51143 - protein, 10 aa, Homo sapiens
  Table A; Target 51143; HLA-B*40:01; MYH4; ENSG00000264424; TAA
QEAPPHIFSI

SEQ ID NO: 51144 - protein, 10 aa, Homo sapiens
  Table A; Target 51144; HLA-B*44:02; MYH4; ENSG00000264424; TAA
QEAPPHIFSI

SEQ ID NO: 51145 - protein, 10 aa, Homo sapiens
  Table A; Target 51145; HLA-B*44:03; MYH4; ENSG00000264424; TAA
QEAPPHIFSI

SEQ ID NO: 51146 - protein, 10 aa, Homo sapiens
  Table A; Target 51146; HLA-B*49:01; MYH4; ENSG00000264424; TAA
QEAPPHIFSI

SEQ ID NO: 51147 - protein, 9 aa, Homo sapiens
  Table A; Target 51147; HLA-B*44:03; MYH4; ENSG00000264424; TAA
QEEYKKEGI

SEQ ID NO: 51148 - protein, 10 aa, Homo sapiens
  Table A; Target 51148; HLA-A*30:01; MYH4; ENSG00000264424; TAA
QEISDLTEQI

SEQ ID NO: 51149 - protein, 10 aa, Homo sapiens
  Table A; Target 51149; HLA-B*38:01; MYH4; ENSG00000264424; TAA
QEISDLTEQI

SEQ ID NO: 51150 - protein, 10 aa, Homo sapiens
  Table A; Target 51150; HLA-B*40:01; MYH4; ENSG00000264424; TAA
QEISDLTEQI

SEQ ID NO: 51151 - protein, 10 aa, Homo sapiens
  Table A; Target 51151; HLA-B*44:02; MYH4; ENSG00000264424; TAA
QEISDLTEQI

SEQ ID NO: 51152 - protein, 10 aa, Homo sapiens
  Table A; Target 51152; HLA-B*44:03; MYH4; ENSG00000264424; TAA
QEISDLTEQI

SEQ ID NO: 51153 - protein, 10 aa, Homo sapiens
  Table A; Target 51153; HLA-B*49:01; MYH4; ENSG00000264424; TAA
QEISDLTEQI

SEQ ID NO: 51154 - protein, 10 aa, Homo sapiens
  Table A; Target 51154; HLA-A*30:01; MYH4; ENSG00000264424; TAA
QEKNDLQLQV

SEQ ID NO: 51155 - protein, 10 aa, Homo sapiens
  Table A; Target 51155; HLA-B*49:01; MYH4; ENSG00000264424; TAA
QEKNDLQLQV

SEQ ID NO: 51156 - protein, 10 aa, Homo sapiens
  Table A; Target 51156; HLA-B*49:01; MYH4; ENSG00000264424; TAA
QELLDASERV

SEQ ID NO: 51157 - protein, 9 aa, Homo sapiens
  Table A; Target 51157; HLA-B*08:01; MYH4; ENSG00000264424; TAA
QGILKDTQL

SEQ ID NO: 51158 - protein, 9 aa, Homo sapiens
  Table A; Target 51158; HLA-B*35:03; MYH4; ENSG00000264424; TAA
QGILKDTQL

SEQ ID NO: 51159 - protein, 9 aa, Homo sapiens
  Table A; Target 51159; HLA-B*40:01; MYH4; ENSG00000264424; TAA
QGILKDTQL

SEQ ID NO: 51160 - protein, 9 aa, Homo sapiens
  Table A; Target 51160; HLA-B*27:05; MYH4; ENSG00000264424; TAA
QHEATAAAL

SEQ ID NO: 51161 - protein, 9 aa, Homo sapiens
  Table A; Target 51161; HLA-B*35:03; MYH4; ENSG00000264424; TAA
QHEATAAAL

SEQ ID NO: 51162 - protein, 9 aa, Homo sapiens
  Table A; Target 51162; HLA-B*38:01; MYH4; ENSG00000264424; TAA
QHEATAAAL

SEQ ID NO: 51163 - protein, 9 aa, Homo sapiens
  Table A; Target 51163; HLA-B*39:01; MYH4; ENSG00000264424; TAA
QHEATAAAL

SEQ ID NO: 51164 - protein, 10 aa, Homo sapiens
  Table A; Target 51164; HLA-B*38:01; MYH4; ENSG00000264424; TAA
QHEATAAALR

SEQ ID NO: 51165 - protein, 9 aa, Homo sapiens
  Table A; Target 51165; HLA-B*38:01; MYH4; ENSG00000264424; TAA
QHLGKSNNF

SEQ ID NO: 51166 - protein, 8 aa, Homo sapiens
  Table A; Target 51166; HLA-C*05:01; MYH4; ENSG00000264424; TAA
QIDSLQRV

SEQ ID NO: 51167 - protein, 9 aa, Homo sapiens
  Table A; Target 51167; HLA-A*01:01; MYH4; ENSG00000264424; TAA
QIDSLQRVK

SEQ ID NO: 51168 - protein, 9 aa, Homo sapiens
  Table A; Target 51168; HLA-A*03:01; MYH4; ENSG00000264424; TAA
QIDSLQRVK

SEQ ID NO: 51169 - protein, 9 aa, Homo sapiens
  Table A; Target 51169; HLA-A*03:02; MYH4; ENSG00000264424; TAA
QIDSLQRVK

SEQ ID NO: 51170 - protein, 9 aa, Homo sapiens
  Table A; Target 51170; HLA-A*11:01; MYH4; ENSG00000264424; TAA
QIDSLQRVK

SEQ ID NO: 51171 - protein, 8 aa, Homo sapiens
  Table A; Target 51171; HLA-C*01:02; MYH4; ENSG00000264424; TAA
QIISANPL

SEQ ID NO: 51172 - protein, 9 aa, Homo sapiens
  Table A; Target 51172; HLA-A*02:01; MYH4; ENSG00000264424; TAA
QIISANPLL

SEQ ID NO: 51173 - protein, 9 aa, Homo sapiens
  Table A; Target 51173; HLA-A*02:04; MYH4; ENSG00000264424; TAA
QIISANPLL

SEQ ID NO: 51174 - protein, 9 aa, Homo sapiens
  Table A; Target 51174; HLA-A*02:07; MYH4; ENSG00000264424; TAA
QIISANPLL

SEQ ID NO: 51175 - protein, 9 aa, Homo sapiens
  Table A; Target 51175; HLA-A*23:01; MYH4; ENSG00000264424; TAA
QIISANPLL

SEQ ID NO: 51176 - protein, 9 aa, Homo sapiens
  Table A; Target 51176; HLA-A*24:02; MYH4; ENSG00000264424; TAA
QIISANPLL

SEQ ID NO: 51177 - protein, 9 aa, Homo sapiens
  Table A; Target 51177; HLA-B*07:02; MYH4; ENSG00000264424; TAA
QIISANPLL

SEQ ID NO: 51178 - protein, 9 aa, Homo sapiens
  Table A; Target 51178; HLA-B*27:05; MYH4; ENSG00000264424; TAA
QIISANPLL

SEQ ID NO: 51179 - protein, 9 aa, Homo sapiens
  Table A; Target 51179; HLA-B*35:03; MYH4; ENSG00000264424; TAA
QIISANPLL

SEQ ID NO: 51180 - protein, 9 aa, Homo sapiens
  Table A; Target 51180; HLA-B*38:01; MYH4; ENSG00000264424; TAA
QIISANPLL

SEQ ID NO: 51181 - protein, 9 aa, Homo sapiens
  Table A; Target 51181; HLA-B*58:01; MYH4; ENSG00000264424; TAA
QIISANPLL

SEQ ID NO: 51182 - protein, 9 aa, Homo sapiens
  Table A; Target 51182; HLA-C*03:03; MYH4; ENSG00000264424; TAA
QIISANPLL

SEQ ID NO: 51183 - protein, 9 aa, Homo sapiens
  Table A; Target 51183; HLA-C*03:04; MYH4; ENSG00000264424; TAA
QIISANPLL

SEQ ID NO: 51184 - protein, 11 aa, Homo sapiens
  Table A; Target 51184; HLA-B*54:01; MYH4; ENSG00000264424; TAA
QIISANPLLEA

SEQ ID NO: 51185 - protein, 11 aa, Homo sapiens
  Table A; Target 51185; HLA-B*56:01; MYH4; ENSG00000264424; TAA
QIISANPLLEA

SEQ ID NO: 51186 - protein, 10 aa, Homo sapiens
  Table A; Target 51186; HLA-B*15:03; MYH4; ENSG00000264424; TAA
QKYEETQAEL

SEQ ID NO: 51187 - protein, 10 aa, Homo sapiens
  Table A; Target 51187; HLA-B*39:01; MYH4; ENSG00000264424; TAA
QKYEETQAEL

SEQ ID NO: 51188 - protein, 8 aa, Homo sapiens
  Table A; Target 51188; HLA-C*05:01; MYH4; ENSG00000264424; TAA
QLDEKDAM

SEQ ID NO: 51189 - protein, 9 aa, Homo sapiens
  Table A; Target 51189; HLA-A*02:01; MYH4; ENSG00000264424; TAA
QLDEKDAMV

SEQ ID NO: 51190 - protein, 9 aa, Homo sapiens
  Table A; Target 51190; HLA-A*02:07; MYH4; ENSG00000264424; TAA
QLDEKDAMV

SEQ ID NO: 51191 - protein, 9 aa, Homo sapiens
  Table A; Target 51191; HLA-B*55:01; MYH4; ENSG00000264424; TAA
QLDEKDAMV

SEQ ID NO: 51192 - protein, 9 aa, Homo sapiens
  Table A; Target 51192; HLA-C*05:01; MYH4; ENSG00000264424; TAA
QLDEKDAMV

SEQ ID NO: 51193 - protein, 9 aa, Homo sapiens
  Table A; Target 51193; HLA-C*05:01; MYH4; ENSG00000264424; TAA
QLDHEKSEL

SEQ ID NO: 51194 - protein, 10 aa, Homo sapiens
  Table A; Target 51194; HLA-A*01:01; MYH4; ENSG00000264424; TAA
QLDTKQPRQY

SEQ ID NO: 51195 - protein, 9 aa, Homo sapiens
  Table A; Target 51195; HLA-A*02:03; MYH4; ENSG00000264424; TAA
QLEAKIKEV

SEQ ID NO: 51196 - protein, 9 aa, Homo sapiens
  Table A; Target 51196; HLA-B*55:01; MYH4; ENSG00000264424; TAA
QLEAKIKEV

SEQ ID NO: 51197 - protein, 9 aa, Homo sapiens
  Table A; Target 51197; HLA-C*16:02; MYH4; ENSG00000264424; TAA
QLEAKIKEV

SEQ ID NO: 51198 - protein, 9 aa, Homo sapiens
  Table A; Target 51198; HLA-A*03:02; MYH4; ENSG00000264424; TAA
QLEEETKAK

SEQ ID NO: 51199 - protein, 9 aa, Homo sapiens
  Table A; Target 51199; HLA-A*02:01; MYH4; ENSG00000264424; TAA
QLIKTKIQL

SEQ ID NO: 51200 - protein, 9 aa, Homo sapiens
  Table A; Target 51200; HLA-A*02:04; MYH4; ENSG00000264424; TAA
QLIKTKIQL

SEQ ID NO: 51201 - protein, 9 aa, Homo sapiens
  Table A; Target 51201; HLA-B*08:01; MYH4; ENSG00000264424; TAA
QLIKTKIQL

SEQ ID NO: 51202 - protein, 9 aa, Homo sapiens
  Table A; Target 51202; HLA-A*02:01; MYH4; ENSG00000264424; TAA
QLITRTQAI

SEQ ID NO: 51203 - protein, 9 aa, Homo sapiens
  Table A; Target 51203; HLA-A*02:03; MYH4; ENSG00000264424; TAA
QLITRTQAI

SEQ ID NO: 51204 - protein, 9 aa, Homo sapiens
  Table A; Target 51204; HLA-A*02:04; MYH4; ENSG00000264424; TAA
QLITRTQAI

SEQ ID NO: 51205 - protein, 9 aa, Homo sapiens
  Table A; Target 51205; HLA-A*02:07; MYH4; ENSG00000264424; TAA
QLITRTQAI

SEQ ID NO: 51206 - protein, 9 aa, Homo sapiens
  Table A; Target 51206; HLA-A*23:01; MYH4; ENSG00000264424; TAA
QLITRTQAI

SEQ ID NO: 51207 - protein, 9 aa, Homo sapiens
  Table A; Target 51207; HLA-A*24:02; MYH4; ENSG00000264424; TAA
QLITRTQAI

SEQ ID NO: 51208 - protein, 9 aa, Homo sapiens
  Table A; Target 51208; HLA-A*25:01; MYH4; ENSG00000264424; TAA
QLITRTQAI

SEQ ID NO: 51209 - protein, 9 aa, Homo sapiens
  Table A; Target 51209; HLA-A*26:01; MYH4; ENSG00000264424; TAA
QLITRTQAI

SEQ ID NO: 51210 - protein, 9 aa, Homo sapiens
  Table A; Target 51210; HLA-A*30:01; MYH4; ENSG00000264424; TAA
QLITRTQAI

SEQ ID NO: 51211 - protein, 9 aa, Homo sapiens
  Table A; Target 51211; HLA-A*32:01; MYH4; ENSG00000264424; TAA
QLITRTQAI

SEQ ID NO: 51212 - protein, 9 aa, Homo sapiens
  Table A; Target 51212; HLA-B*08:01; MYH4; ENSG00000264424; TAA
QLITRTQAI

SEQ ID NO: 51213 - protein, 9 aa, Homo sapiens
  Table A; Target 51213; HLA-B*13:02; MYH4; ENSG00000264424; TAA
QLITRTQAI

SEQ ID NO: 51214 - protein, 9 aa, Homo sapiens
  Table A; Target 51214; HLA-B*15:01; MYH4; ENSG00000264424; TAA
QLITRTQAI

SEQ ID NO: 51215 - protein, 9 aa, Homo sapiens
  Table A; Target 51215; HLA-B*37:01; MYH4; ENSG00000264424; TAA
QLITRTQAI

SEQ ID NO: 51216 - protein, 9 aa, Homo sapiens
  Table A; Target 51216; HLA-B*44:02; MYH4; ENSG00000264424; TAA
QLITRTQAI

SEQ ID NO: 51217 - protein, 9 aa, Homo sapiens
  Table A; Target 51217; HLA-B*46:01; MYH4; ENSG00000264424; TAA
QLITRTQAI

SEQ ID NO: 51218 - protein, 9 aa, Homo sapiens
  Table A; Target 51218; HLA-B*55:01; MYH4; ENSG00000264424; TAA
QLITRTQAI

SEQ ID NO: 51219 - protein, 9 aa, Homo sapiens
  Table A; Target 51219; HLA-B*58:01; MYH4; ENSG00000264424; TAA
QLITRTQAI

SEQ ID NO: 51220 - protein, 9 aa, Homo sapiens
  Table A; Target 51220; HLA-C*01:02; MYH4; ENSG00000264424; TAA
QLITRTQAI

SEQ ID NO: 51221 - protein, 9 aa, Homo sapiens
  Table A; Target 51221; HLA-C*07:02; MYH4; ENSG00000264424; TAA
QLITRTQAI

SEQ ID NO: 51222 - protein, 9 aa, Homo sapiens
  Table A; Target 51222; HLA-C*16:02; MYH4; ENSG00000264424; TAA
QLITRTQAI

SEQ ID NO: 51223 - protein, 9 aa, Homo sapiens
  Table A; Target 51223; HLA-A*02:04; MYH4; ENSG00000264424; TAA
QLQKKIKEL

SEQ ID NO: 51224 - protein, 9 aa, Homo sapiens
  Table A; Target 51224; HLA-B*08:01; MYH4; ENSG00000264424; TAA
QLQKKIKEL

SEQ ID NO: 51225 - protein, 11 aa, Homo sapiens
  Table A; Target 51225; HLA-B*27:05; MYH4; ENSG00000264424; TAA
QLQVQAEADAL

SEQ ID NO: 51226 - protein, 9 aa, Homo sapiens
  Table A; Target 51226; HLA-A*03:02; MYH4; ENSG00000264424; TAA
QNTSLINTK

SEQ ID NO: 51227 - protein, 9 aa, Homo sapiens
  Table A; Target 51227; HLA-A*11:01; MYH4; ENSG00000264424; TAA
QNTSLINTK

SEQ ID NO: 51228 - protein, 9 aa, Homo sapiens
  Table A; Target 51228; HLA-A*33:01; MYH4; ENSG00000264424; TAA
QNTSLINTK

SEQ ID NO: 51229 - protein, 9 aa, Homo sapiens
  Table A; Target 51229; HLA-A*33:03; MYH4; ENSG00000264424; TAA
QNTSLINTK

SEQ ID NO: 51230 - protein, 9 aa, Homo sapiens
  Table A; Target 51230; HLA-A*68:01; MYH4; ENSG00000264424; TAA
QNTSLINTK

SEQ ID NO: 51231 - protein, 9 aa, Homo sapiens
  Table A; Target 51231; HLA-B*27:02; MYH4; ENSG00000264424; TAA
QNTSLINTK

SEQ ID NO: 51232 - protein, 9 aa, Homo sapiens
  Table A; Target 51232; HLA-B*27:05; MYH4; ENSG00000264424; TAA
QNTSLINTK

SEQ ID NO: 51233 - protein, 9 aa, Homo sapiens
  Table A; Target 51233; HLA-C*07:06; MYH4; ENSG00000264424; TAA
QNTSLINTK

SEQ ID NO: 51234 - protein, 10 aa, Homo sapiens
  Table A; Target 51234; HLA-B*27:02; MYH4; ENSG00000264424; TAA
QNTSLINTKK

SEQ ID NO: 51235 - protein, 9 aa, Homo sapiens
  Table A; Target 51235; HLA-B*07:02; MYH4; ENSG00000264424; TAA
QPRQYFIGV

SEQ ID NO: 51236 - protein, 9 aa, Homo sapiens
  Table A; Target 51236; HLA-B*54:01; MYH4; ENSG00000264424; TAA
QPRQYFIGV

SEQ ID NO: 51237 - protein, 9 aa, Homo sapiens
  Table A; Target 51237; HLA-B*56:01; MYH4; ENSG00000264424; TAA
QPRQYFIGV

SEQ ID NO: 51238 - protein, 9 aa, Homo sapiens
  Table A; Target 51238; HLA-C*07:02; MYH4; ENSG00000264424; TAA
QPRQYFIGV

SEQ ID NO: 51239 - protein, 10 aa, Homo sapiens
  Table A; Target 51239; HLA-B*07:02; MYH4; ENSG00000264424; TAA
QPRQYFIGVL

SEQ ID NO: 51240 - protein, 11 aa, Homo sapiens
  Table A; Target 51240; HLA-B*38:01; MYH4; ENSG00000264424; TAA
QQEISDLTEQI

SEQ ID NO: 51241 - protein, 9 aa, Homo sapiens
  Table A; Target 51241; HLA-A*31:01; MYH4; ENSG00000264424; TAA
QQLDTKQPR

SEQ ID NO: 51242 - protein, 9 aa, Homo sapiens
  Table A; Target 51242; HLA-A*33:03; MYH4; ENSG00000264424; TAA
QQLDTKQPR

SEQ ID NO: 51243 - protein, 11 aa, Homo sapiens
  Table A; Target 51243; HLA-A*30:02; MYH4; ENSG00000264424; TAA
QQLDTKQPRQY

SEQ ID NO: 51244 - protein, 11 aa, Homo sapiens
  Table A; Target 51244; HLA-A*32:01; MYH4; ENSG00000264424; TAA
QQLDTKQPRQY

SEQ ID NO: 51245 - protein, 11 aa, Homo sapiens
  Table A; Target 51245; HLA-B*15:01; MYH4; ENSG00000264424; TAA
QQLDTKQPRQY

SEQ ID NO: 51246 - protein, 11 aa, Homo sapiens
  Table A; Target 51246; HLA-B*15:03; MYH4; ENSG00000264424; TAA
QQLDTKQPRQY

SEQ ID NO: 51247 - protein, 8 aa, Homo sapiens
  Table A; Target 51247; HLA-B*08:01; MYH4; ENSG00000264424; TAA
QQRLINEL

SEQ ID NO: 51248 - protein, 8 aa, Homo sapiens
  Table A; Target 51248; HLA-B*15:01; MYH4; ENSG00000264424; TAA
QQRLINEL

SEQ ID NO: 51249 - protein, 8 aa, Homo sapiens
  Table A; Target 51249; HLA-B*15:03; MYH4; ENSG00000264424; TAA
QQRLINEL

SEQ ID NO: 51250 - protein, 8 aa, Homo sapiens
  Table A; Target 51250; HLA-B*37:01; MYH4; ENSG00000264424; TAA
QQRLINEL

SEQ ID NO: 51251 - protein, 8 aa, Homo sapiens
  Table A; Target 51251; HLA-C*07:04; MYH4; ENSG00000264424; TAA
QQRLINEL

SEQ ID NO: 51252 - protein, 9 aa, Homo sapiens
  Table A; Target 51252; HLA-B*38:01; MYH4; ENSG00000264424; TAA
QQTLDDLQM

SEQ ID NO: 51253 - protein, 9 aa, Homo sapiens
  Table A; Target 51253; HLA-B*39:01; MYH4; ENSG00000264424; TAA
QQTLDDLQM

SEQ ID NO: 51254 - protein, 10 aa, Homo sapiens
  Table A; Target 51254; HLA-B*38:01; MYH4; ENSG00000264424; TAA
QQVDDLEGSL

SEQ ID NO: 51255 - protein, 10 aa, Homo sapiens
  Table A; Target 51255; HLA-B*39:01; MYH4; ENSG00000264424; TAA
QQVDDLEGSL

SEQ ID NO: 51256 - protein, 10 aa, Homo sapiens
  Table A; Target 51256; HLA-B*39:01; MYH4; ENSG00000264424; TAA
QQVYNAVGAL

SEQ ID NO: 51257 - protein, 10 aa, Homo sapiens
  Table A; Target 51257; HLA-C*07:04; MYH4; ENSG00000264424; TAA
QQVYNAVGAL

SEQ ID NO: 51258 - protein, 11 aa, Homo sapiens
  Table A; Target 51258; HLA-B*27:05; MYH4; ENSG00000264424; TAA
QRLINELSAQK

SEQ ID NO: 51259 - protein, 9 aa, Homo sapiens
  Table A; Target 51259; HLA-B*27:05; MYH4; ENSG00000264424; TAA
QRSDLSREL

SEQ ID NO: 51260 - protein, 9 aa, Homo sapiens
  Table A; Target 51260; HLA-B*38:01; MYH4; ENSG00000264424; TAA
QRSDLSREL

SEQ ID NO: 51261 - protein, 9 aa, Homo sapiens
  Table A; Target 51261; HLA-B*39:01; MYH4; ENSG00000264424; TAA
QRSDLSREL

SEQ ID NO: 51262 - protein, 9 aa, Homo sapiens
  Table A; Target 51262; HLA-C*06:02; MYH4; ENSG00000264424; TAA
QRSDLSREL

SEQ ID NO: 51263 - protein, 9 aa, Homo sapiens
  Table A; Target 51263; HLA-C*16:01; MYH4; ENSG00000264424; TAA
QRSDLSREL

SEQ ID NO: 51264 - protein, 10 aa, Homo sapiens
  Table A; Target 51264; HLA-B*27:02; MYH4; ENSG00000264424; TAA
QRTEELEEAK

SEQ ID NO: 51265 - protein, 9 aa, Homo sapiens
  Table A; Target 51265; HLA-A*23:01; MYH4; ENSG00000264424; TAA
QSNVNLAKF

SEQ ID NO: 51266 - protein, 9 aa, Homo sapiens
  Table A; Target 51266; HLA-A*24:02; MYH4; ENSG00000264424; TAA
QSNVNLAKF

SEQ ID NO: 51267 - protein, 9 aa, Homo sapiens
  Table A; Target 51267; HLA-A*25:01; MYH4; ENSG00000264424; TAA
QSNVNLAKF

SEQ ID NO: 51268 - protein, 9 aa, Homo sapiens
  Table A; Target 51268; HLA-A*26:01; MYH4; ENSG00000264424; TAA
QSNVNLAKF

SEQ ID NO: 51269 - protein, 9 aa, Homo sapiens
  Table A; Target 51269; HLA-A*30:02; MYH4; ENSG00000264424; TAA
QSNVNLAKF

SEQ ID NO: 51270 - protein, 9 aa, Homo sapiens
  Table A; Target 51270; HLA-A*32:01; MYH4; ENSG00000264424; TAA
QSNVNLAKF

SEQ ID NO: 51271 - protein, 9 aa, Homo sapiens
  Table A; Target 51271; HLA-B*15:01; MYH4; ENSG00000264424; TAA
QSNVNLAKF

SEQ ID NO: 51272 - protein, 9 aa, Homo sapiens
  Table A; Target 51272; HLA-B*46:01; MYH4; ENSG00000264424; TAA
QSNVNLAKF

SEQ ID NO: 51273 - protein, 9 aa, Homo sapiens
  Table A; Target 51273; HLA-B*57:01; MYH4; ENSG00000264424; TAA
QSNVNLAKF

SEQ ID NO: 51274 - protein, 9 aa, Homo sapiens
  Table A; Target 51274; HLA-B*58:01; MYH4; ENSG00000264424; TAA
QSNVNLAKF

SEQ ID NO: 51275 - protein, 9 aa, Homo sapiens
  Table A; Target 51275; HLA-C*16:04; MYH4; ENSG00000264424; TAA
QSNVNLAKF

SEQ ID NO: 51276 - protein, 11 aa, Homo sapiens
  Table A; Target 51276; HLA-A*03:02; MYH4; ENSG00000264424; TAA
QTAEAEGGGGK

SEQ ID NO: 51277 - protein, 11 aa, Homo sapiens
  Table A; Target 51277; HLA-A*11:01; MYH4; ENSG00000264424; TAA
QTAEAEGGGGK

SEQ ID NO: 51278 - protein, 11 aa, Homo sapiens
  Table A; Target 51278; HLA-A*68:01; MYH4; ENSG00000264424; TAA
QTAEAEGGGGK

SEQ ID NO: 51279 - protein, 11 aa, Homo sapiens
  Table A; Target 51279; HLA-B*27:02; MYH4; ENSG00000264424; TAA
QTAEAEGGGGK

SEQ ID NO: 51280 - protein, 11 aa, Homo sapiens
  Table A; Target 51280; HLA-C*07:06; MYH4; ENSG00000264424; TAA
QTAEAEGGGGK

SEQ ID NO: 51281 - protein, 11 aa, Homo sapiens
  Table A; Target 51281; HLA-A*01:01; MYH4; ENSG00000264424; TAA
QTEEDRKNILR

SEQ ID NO: 51282 - protein, 9 aa, Homo sapiens
  Table A; Target 51282; HLA-A*31:01; MYH4; ENSG00000264424; TAA
QTKVKAYKR

SEQ ID NO: 51283 - protein, 9 aa, Homo sapiens
  Table A; Target 51283; HLA-A*33:01; MYH4; ENSG00000264424; TAA
QTKVKAYKR

SEQ ID NO: 51284 - protein, 9 aa, Homo sapiens
  Table A; Target 51284; HLA-A*33:03; MYH4; ENSG00000264424; TAA
QTKVKAYKR

SEQ ID NO: 51285 - protein, 9 aa, Homo sapiens
  Table A; Target 51285; HLA-A*31:01; MYH4; ENSG00000264424; TAA
QTVKDLQLR

SEQ ID NO: 51286 - protein, 9 aa, Homo sapiens
  Table A; Target 51286; HLA-A*33:03; MYH4; ENSG00000264424; TAA
QTVKDLQLR

SEQ ID NO: 51287 - protein, 9 aa, Homo sapiens
  Table A; Target 51287; HLA-A*68:01; MYH4; ENSG00000264424; TAA
QTVKDLQLR

SEQ ID NO: 51288 - protein, 9 aa, Homo sapiens
  Table A; Target 51288; HLA-C*07:06; MYH4; ENSG00000264424; TAA
QTVKDLQLR

SEQ ID NO: 51289 - protein, 9 aa, Homo sapiens
  Table A; Target 51289; HLA-A*68:02; MYH4; ENSG00000264424; TAA
QTVQQVYNA

SEQ ID NO: 51290 - protein, 9 aa, Homo sapiens
  Table A; Target 51290; HLA-B*54:01; MYH4; ENSG00000264424; TAA
QTVQQVYNA

SEQ ID NO: 51291 - protein, 9 aa, Homo sapiens
  Table A; Target 51291; HLA-B*56:01; MYH4; ENSG00000264424; TAA
QTVQQVYNA

SEQ ID NO: 51292 - protein, 10 aa, Homo sapiens
  Table A; Target 51292; HLA-A*68:01; MYH4; ENSG00000264424; TAA
QTVQQVYNAV

SEQ ID NO: 51293 - protein, 10 aa, Homo sapiens
  Table A; Target 51293; HLA-A*68:02; MYH4; ENSG00000264424; TAA
QTVQQVYNAV

SEQ ID NO: 51294 - protein, 11 aa, Homo sapiens
  Table A; Target 51294; HLA-A*68:02; MYH4; ENSG00000264424; TAA
QTVSALFRENL

SEQ ID NO: 51295 - protein, 9 aa, Homo sapiens
  Table A; Target 51295; HLA-A*02:07; MYH4; ENSG00000264424; TAA
QVDDLEGSL

SEQ ID NO: 51296 - protein, 9 aa, Homo sapiens
  Table A; Target 51296; HLA-B*38:01; MYH4; ENSG00000264424; TAA
QVDDLEGSL

SEQ ID NO: 51297 - protein, 9 aa, Homo sapiens
  Table A; Target 51297; HLA-B*39:01; MYH4; ENSG00000264424; TAA
QVDDLEGSL

SEQ ID NO: 51298 - protein, 9 aa, Homo sapiens
  Table A; Target 51298; HLA-C*05:01; MYH4; ENSG00000264424; TAA
QVDDLEGSL

SEQ ID NO: 51299 - protein, 9 aa, Homo sapiens
  Table A; Target 51299; HLA-A*03:01; MYH4; ENSG00000264424; TAA
QVFSMNPPK

SEQ ID NO: 51300 - protein, 9 aa, Homo sapiens
  Table A; Target 51300; HLA-A*03:02; MYH4; ENSG00000264424; TAA
QVFSMNPPK

SEQ ID NO: 51301 - protein, 9 aa, Homo sapiens
  Table A; Target 51301; HLA-A*11:01; MYH4; ENSG00000264424; TAA
QVFSMNPPK

SEQ ID NO: 51302 - protein, 9 aa, Homo sapiens
  Table A; Target 51302; HLA-A*31:01; MYH4; ENSG00000264424; TAA
QVFSMNPPK

SEQ ID NO: 51303 - protein, 9 aa, Homo sapiens
  Table A; Target 51303; HLA-A*68:01; MYH4; ENSG00000264424; TAA
QVFSMNPPK

SEQ ID NO: 51304 - protein, 9 aa, Homo sapiens
  Table A; Target 51304; HLA-B*27:05; MYH4; ENSG00000264424; TAA
QVFSMNPPK

SEQ ID NO: 51305 - protein, 9 aa, Homo sapiens
  Table A; Target 51305; HLA-C*06:02; MYH4; ENSG00000264424; TAA
QVFSMNPPK

SEQ ID NO: 51306 - protein, 9 aa, Homo sapiens
  Table A; Target 51306; HLA-C*07:06; MYH4; ENSG00000264424; TAA
QVFSMNPPK

SEQ ID NO: 51307 - protein, 10 aa, Homo sapiens
  Table A; Target 51307; HLA-A*25:01; MYH4; ENSG00000264424; TAA
QVFSMNPPKY

SEQ ID NO: 51308 - protein, 10 aa, Homo sapiens
  Table A; Target 51308; HLA-A*26:01; MYH4; ENSG00000264424; TAA
QVFSMNPPKY

SEQ ID NO: 51309 - protein, 10 aa, Homo sapiens
  Table A; Target 51309; HLA-A*29:02; MYH4; ENSG00000264424; TAA
QVFSMNPPKY

SEQ ID NO: 51310 - protein, 10 aa, Homo sapiens
  Table A; Target 51310; HLA-A*30:02; MYH4; ENSG00000264424; TAA
QVFSMNPPKY

SEQ ID NO: 51311 - protein, 10 aa, Homo sapiens
  Table A; Target 51311; HLA-A*32:01; MYH4; ENSG00000264424; TAA
QVFSMNPPKY

SEQ ID NO: 51312 - protein, 10 aa, Homo sapiens
  Table A; Target 51312; HLA-B*15:01; MYH4; ENSG00000264424; TAA
QVFSMNPPKY

SEQ ID NO: 51313 - protein, 10 aa, Homo sapiens
  Table A; Target 51313; HLA-B*44:03; MYH4; ENSG00000264424; TAA
QVFSMNPPKY

SEQ ID NO: 51314 - protein, 10 aa, Homo sapiens
  Table A; Target 51314; HLA-B*58:01; MYH4; ENSG00000264424; TAA
QVFSMNPPKY

SEQ ID NO: 51315 - protein, 10 aa, Homo sapiens
  Table A; Target 51315; HLA-C*12:03; MYH4; ENSG00000264424; TAA
QVFSMNPPKY

SEQ ID NO: 51316 - protein, 10 aa, Homo sapiens
  Table A; Target 51316; HLA-C*16:04; MYH4; ENSG00000264424; TAA
QVFSMNPPKY

SEQ ID NO: 51317 - protein, 9 aa, Homo sapiens
  Table A; Target 51317; HLA-A*03:02; MYH4; ENSG00000264424; TAA
QVKSEIDRK

SEQ ID NO: 51318 - protein, 9 aa, Homo sapiens
  Table A; Target 51318; HLA-A*33:03; MYH4; ENSG00000264424; TAA
QVKSEIDRK

SEQ ID NO: 51319 - protein, 8 aa, Homo sapiens
  Table A; Target 51319; HLA-A*03:01; MYH4; ENSG00000264424; TAA
QVNKLRVK

SEQ ID NO: 51320 - protein, 9 aa, Homo sapiens
  Table A; Target 51320; HLA-B*27:05; MYH4; ENSG00000264424; TAA
QVQAEADAL

SEQ ID NO: 51321 - protein, 9 aa, Homo sapiens
  Table A; Target 51321; HLA-B*35:03; MYH4; ENSG00000264424; TAA
QVQAEADAL

SEQ ID NO: 51322 - protein, 9 aa, Homo sapiens
  Table A; Target 51322; HLA-B*38:01; MYH4; ENSG00000264424; TAA
QVQAEADAL

SEQ ID NO: 51323 - protein, 9 aa, Homo sapiens
  Table A; Target 51323; HLA-B*39:01; MYH4; ENSG00000264424; TAA
QVQAEADAL

SEQ ID NO: 51324 - protein, 9 aa, Homo sapiens
  Table A; Target 51324; HLA-C*01:02; MYH4; ENSG00000264424; TAA
QVQAEADAL

SEQ ID NO: 51325 - protein, 9 aa, Homo sapiens
  Table A; Target 51325; HLA-A*02:03; MYH4; ENSG00000264424; TAA
QVYNAVGAL

SEQ ID NO: 51326 - protein, 9 aa, Homo sapiens
  Table A; Target 51326; HLA-A*03:01; MYH4; ENSG00000264424; TAA
QVYNAVGAL

SEQ ID NO: 51327 - protein, 9 aa, Homo sapiens
  Table A; Target 51327; HLA-A*03:02; MYH4; ENSG00000264424; TAA
QVYNAVGAL

SEQ ID NO: 51328 - protein, 9 aa, Homo sapiens
  Table A; Target 51328; HLA-A*11:01; MYH4; ENSG00000264424; TAA
QVYNAVGAL

SEQ ID NO: 51329 - protein, 9 aa, Homo sapiens
  Table A; Target 51329; HLA-A*25:01; MYH4; ENSG00000264424; TAA
QVYNAVGAL

SEQ ID NO: 51330 - protein, 9 aa, Homo sapiens
  Table A; Target 51330; HLA-A*26:01; MYH4; ENSG00000264424; TAA
QVYNAVGAL

SEQ ID NO: 51331 - protein, 9 aa, Homo sapiens
  Table A; Target 51331; HLA-A*32:01; MYH4; ENSG00000264424; TAA
QVYNAVGAL

SEQ ID NO: 51332 - protein, 9 aa, Homo sapiens
  Table A; Target 51332; HLA-A*68:01; MYH4; ENSG00000264424; TAA
QVYNAVGAL

SEQ ID NO: 51333 - protein, 9 aa, Homo sapiens
  Table A; Target 51333; HLA-A*68:02; MYH4; ENSG00000264424; TAA
QVYNAVGAL

SEQ ID NO: 51334 - protein, 9 aa, Homo sapiens
  Table A; Target 51334; HLA-B*07:02; MYH4; ENSG00000264424; TAA
QVYNAVGAL

SEQ ID NO: 51335 - protein, 9 aa, Homo sapiens
  Table A; Target 51335; HLA-B*15:01; MYH4; ENSG00000264424; TAA
QVYNAVGAL

SEQ ID NO: 51336 - protein, 9 aa, Homo sapiens
  Table A; Target 51336; HLA-B*15:03; MYH4; ENSG00000264424; TAA
QVYNAVGAL

SEQ ID NO: 51337 - protein, 9 aa, Homo sapiens
  Table A; Target 51337; HLA-B*27:05; MYH4; ENSG00000264424; TAA
QVYNAVGAL

SEQ ID NO: 51338 - protein, 9 aa, Homo sapiens
  Table A; Target 51338; HLA-B*35:01; MYH4; ENSG00000264424; TAA
QVYNAVGAL

SEQ ID NO: 51339 - protein, 9 aa, Homo sapiens
  Table A; Target 51339; HLA-B*35:03; MYH4; ENSG00000264424; TAA
QVYNAVGAL

SEQ ID NO: 51340 - protein, 9 aa, Homo sapiens
  Table A; Target 51340; HLA-B*39:01; MYH4; ENSG00000264424; TAA
QVYNAVGAL

SEQ ID NO: 51341 - protein, 9 aa, Homo sapiens
  Table A; Target 51341; HLA-B*40:02; MYH4; ENSG00000264424; TAA
QVYNAVGAL

SEQ ID NO: 51342 - protein, 9 aa, Homo sapiens
  Table A; Target 51342; HLA-B*46:01; MYH4; ENSG00000264424; TAA
QVYNAVGAL

SEQ ID NO: 51343 - protein, 9 aa, Homo sapiens
  Table A; Target 51343; HLA-C*01:02; MYH4; ENSG00000264424; TAA
QVYNAVGAL

SEQ ID NO: 51344 - protein, 9 aa, Homo sapiens
  Table A; Target 51344; HLA-C*02:02; MYH4; ENSG00000264424; TAA
QVYNAVGAL

SEQ ID NO: 51345 - protein, 9 aa, Homo sapiens
  Table A; Target 51345; HLA-C*03:03; MYH4; ENSG00000264424; TAA
QVYNAVGAL

SEQ ID NO: 51346 - protein, 9 aa, Homo sapiens
  Table A; Target 51346; HLA-C*03:04; MYH4; ENSG00000264424; TAA
QVYNAVGAL

SEQ ID NO: 51347 - protein, 9 aa, Homo sapiens
  Table A; Target 51347; HLA-C*05:01; MYH4; ENSG00000264424; TAA
QVYNAVGAL

SEQ ID NO: 51348 - protein, 9 aa, Homo sapiens
  Table A; Target 51348; HLA-C*06:02; MYH4; ENSG00000264424; TAA
QVYNAVGAL

SEQ ID NO: 51349 - protein, 9 aa, Homo sapiens
  Table A; Target 51349; HLA-C*07:02; MYH4; ENSG00000264424; TAA
QVYNAVGAL

SEQ ID NO: 51350 - protein, 9 aa, Homo sapiens
  Table A; Target 51350; HLA-C*07:04; MYH4; ENSG00000264424; TAA
QVYNAVGAL

SEQ ID NO: 51351 - protein, 9 aa, Homo sapiens
  Table A; Target 51351; HLA-C*07:06; MYH4; ENSG00000264424; TAA
QVYNAVGAL

SEQ ID NO: 51352 - protein, 9 aa, Homo sapiens
  Table A; Target 51352; HLA-C*14:02; MYH4; ENSG00000264424; TAA
QVYNAVGAL

SEQ ID NO: 51353 - protein, 10 aa, Homo sapiens
  Table A; Target 51353; HLA-B*56:01; MYH4; ENSG00000264424; TAA
QVYNAVGALA

SEQ ID NO: 51354 - protein, 11 aa, Homo sapiens
  Table A; Target 51354; HLA-A*01:01; MYH4; ENSG00000264424; TAA
QVYNAVGALAK

SEQ ID NO: 51355 - protein, 11 aa, Homo sapiens
  Table A; Target 51355; HLA-A*03:01; MYH4; ENSG00000264424; TAA
QVYNAVGALAK

SEQ ID NO: 51356 - protein, 11 aa, Homo sapiens
  Table A; Target 51356; HLA-A*03:02; MYH4; ENSG00000264424; TAA
QVYNAVGALAK

SEQ ID NO: 51357 - protein, 11 aa, Homo sapiens
  Table A; Target 51357; HLA-A*11:01; MYH4; ENSG00000264424; TAA
QVYNAVGALAK

SEQ ID NO: 51358 - protein, 11 aa, Homo sapiens
  Table A; Target 51358; HLA-A*31:01; MYH4; ENSG00000264424; TAA
QVYNAVGALAK

SEQ ID NO: 51359 - protein, 11 aa, Homo sapiens
  Table A; Target 51359; HLA-A*33:03; MYH4; ENSG00000264424; TAA
QVYNAVGALAK

SEQ ID NO: 51360 - protein, 11 aa, Homo sapiens
  Table A; Target 51360; HLA-A*68:01; MYH4; ENSG00000264424; TAA
QVYNAVGALAK

SEQ ID NO: 51361 - protein, 11 aa, Homo sapiens
  Table A; Target 51361; HLA-B*13:02; MYH4; ENSG00000264424; TAA
QVYNAVGALAK

SEQ ID NO: 51362 - protein, 11 aa, Homo sapiens
  Table A; Target 51362; HLA-B*27:02; MYH4; ENSG00000264424; TAA
QVYNAVGALAK

SEQ ID NO: 51363 - protein, 11 aa, Homo sapiens
  Table A; Target 51363; HLA-B*27:05; MYH4; ENSG00000264424; TAA
QVYNAVGALAK

SEQ ID NO: 51364 - protein, 11 aa, Homo sapiens
  Table A; Target 51364; HLA-C*06:02; MYH4; ENSG00000264424; TAA
QVYNAVGALAK

SEQ ID NO: 51365 - protein, 11 aa, Homo sapiens
  Table A; Target 51365; HLA-C*07:06; MYH4; ENSG00000264424; TAA
QVYNAVGALAK

SEQ ID NO: 51366 - protein, 8 aa, Homo sapiens
  Table A; Target 51366; HLA-C*14:02; MYH4; ENSG00000264424; TAA
QYFATIAV

SEQ ID NO: 51367 - protein, 9 aa, Homo sapiens
  Table A; Target 51367; HLA-A*23:01; MYH4; ENSG00000264424; TAA
QYFIGVLDI

SEQ ID NO: 51368 - protein, 9 aa, Homo sapiens
  Table A; Target 51368; HLA-A*24:02; MYH4; ENSG00000264424; TAA
QYFIGVLDI

SEQ ID NO: 51369 - protein, 9 aa, Homo sapiens
  Table A; Target 51369; HLA-B*13:02; MYH4; ENSG00000264424; TAA
QYFIGVLDI

SEQ ID NO: 51370 - protein, 9 aa, Homo sapiens
  Table A; Target 51370; HLA-C*05:01; MYH4; ENSG00000264424; TAA
RADIAESQV

SEQ ID NO: 51371 - protein, 11 aa, Homo sapiens
  Table A; Target 51371; HLA-A*03:02; MYH4; ENSG00000264424; TAA
RADIAESQVNK

SEQ ID NO: 51372 - protein, 11 aa, Homo sapiens
  Table A; Target 51372; HLA-A*11:01; MYH4; ENSG00000264424; TAA
RADIAESQVNK

SEQ ID NO: 51373 - protein, 11 aa, Homo sapiens
  Table A; Target 51373; HLA-B*27:02; MYH4; ENSG00000264424; TAA
RADIAESQVNK

SEQ ID NO: 51374 - protein, 9 aa, Homo sapiens
  Table A; Target 51374; HLA-B*57:01; MYH4; ENSG00000264424; TAA
RAFMNVKHW

SEQ ID NO: 51375 - protein, 9 aa, Homo sapiens
  Table A; Target 51375; HLA-B*46:01; MYH4; ENSG00000264424; TAA
RANLMQAEV

SEQ ID NO: 51376 - protein, 9 aa, Homo sapiens
  Table A; Target 51376; HLA-B*56:01; MYH4; ENSG00000264424; TAA
RANLMQAEV

SEQ ID NO: 51377 - protein, 9 aa, Homo sapiens
  Table A; Target 51377; HLA-B*58:01; MYH4; ENSG00000264424; TAA
RANLMQAEV

SEQ ID NO: 51378 - protein, 9 aa, Homo sapiens
  Table A; Target 51378; HLA-C*16:04; MYH4; ENSG00000264424; TAA
RANLMQAEV

SEQ ID NO: 51379 - protein, 8 aa, Homo sapiens
  Table A; Target 51379; HLA-B*37:01; MYH4; ENSG00000264424; TAA
RDEKLAQL

SEQ ID NO: 51380 - protein, 11 aa, Homo sapiens
  Table A; Target 51380; HLA-A*31:01; MYH4; ENSG00000264424; TAA
RDEKLAQLITR

SEQ ID NO: 51381 - protein, 8 aa, Homo sapiens
  Table A; Target 51381; HLA-B*37:01; MYH4; ENSG00000264424; TAA
RDLEESTL

SEQ ID NO: 51382 - protein, 8 aa, Homo sapiens
  Table A; Target 51382; HLA-A*30:01; MYH4; ENSG00000264424; TAA
REAEFQKM

SEQ ID NO: 51383 - protein, 8 aa, Homo sapiens
  Table A; Target 51383; HLA-B*18:01; MYH4; ENSG00000264424; TAA
REAEFQKM

SEQ ID NO: 51384 - protein, 8 aa, Homo sapiens
  Table A; Target 51384; HLA-B*37:01; MYH4; ENSG00000264424; TAA
REAEFQKM

SEQ ID NO: 51385 - protein, 8 aa, Homo sapiens
  Table A; Target 51385; HLA-B*40:01; MYH4; ENSG00000264424; TAA
REAEFQKM

SEQ ID NO: 51386 - protein, 8 aa, Homo sapiens
  Table A; Target 51386; HLA-B*40:02; MYH4; ENSG00000264424; TAA
REAEFQKM

SEQ ID NO: 51387 - protein, 8 aa, Homo sapiens
  Table A; Target 51387; HLA-B*44:02; MYH4; ENSG00000264424; TAA
REAEFQKM

SEQ ID NO: 51388 - protein, 8 aa, Homo sapiens
  Table A; Target 51388; HLA-B*44:03; MYH4; ENSG00000264424; TAA
REAEFQKM

SEQ ID NO: 51389 - protein, 8 aa, Homo sapiens
  Table A; Target 51389; HLA-B*49:01; MYH4; ENSG00000264424; TAA
REAEFQKM

SEQ ID NO: 51390 - protein, 10 aa, Homo sapiens
  Table A; Target 51390; HLA-A*30:01; MYH4; ENSG00000264424; TAA
RELEEISERL

SEQ ID NO: 51391 - protein, 10 aa, Homo sapiens
  Table A; Target 51391; HLA-B*40:01; MYH4; ENSG00000264424; TAA
RELEEISERL

SEQ ID NO: 51392 - protein, 10 aa, Homo sapiens
  Table A; Target 51392; HLA-B*40:02; MYH4; ENSG00000264424; TAA
RELEEISERL

SEQ ID NO: 51393 - protein, 10 aa, Homo sapiens
  Table A; Target 51393; HLA-B*44:02; MYH4; ENSG00000264424; TAA
RELEEISERL

SEQ ID NO: 51394 - protein, 10 aa, Homo sapiens
  Table A; Target 51394; HLA-B*44:03; MYH4; ENSG00000264424; TAA
RELEEISERL

SEQ ID NO: 51395 - protein, 10 aa, Homo sapiens
  Table A; Target 51395; HLA-A*30:01; MYH4; ENSG00000264424; TAA
RENKNLQQEI

SEQ ID NO: 51396 - protein, 10 aa, Homo sapiens
  Table A; Target 51396; HLA-B*44:02; MYH4; ENSG00000264424; TAA
RENKNLQQEI

SEQ ID NO: 51397 - protein, 10 aa, Homo sapiens
  Table A; Target 51397; HLA-B*44:03; MYH4; ENSG00000264424; TAA
RENKNLQQEI

SEQ ID NO: 51398 - protein, 10 aa, Homo sapiens
  Table A; Target 51398; HLA-B*49:01; MYH4; ENSG00000264424; TAA
RENKNLQQEI

SEQ ID NO: 51399 - protein, 8 aa, Homo sapiens
  Table A; Target 51399; HLA-B*37:01; MYH4; ENSG00000264424; TAA
RENLNKLM

SEQ ID NO: 51400 - protein, 8 aa, Homo sapiens
  Table A; Target 51400; HLA-B*37:01; MYH4; ENSG00000264424; TAA
RENQSILI

SEQ ID NO: 51401 - protein, 8 aa, Homo sapiens
  Table A; Target 51401; HLA-B*49:01; MYH4; ENSG00000264424; TAA
RENQSILI

SEQ ID NO: 51402 - protein, 10 aa, Homo sapiens
  Table A; Target 51402; HLA-B*40:02; MYH4; ENSG00000264424; TAA
RENQSILITG

SEQ ID NO: 51403 - protein, 11 aa, Homo sapiens
  Table A; Target 51403; HLA-B*27:02; MYH4; ENSG00000264424; TAA
REQYEEEQEAK

SEQ ID NO: 51404 - protein, 9 aa, Homo sapiens
  Table A; Target 51404; HLA-B*18:01; MYH4; ENSG00000264424; TAA
RESIFCIQY

SEQ ID NO: 51405 - protein, 9 aa, Homo sapiens
  Table A; Target 51405; HLA-B*44:02; MYH4; ENSG00000264424; TAA
RESIFCIQY

SEQ ID NO: 51406 - protein, 9 aa, Homo sapiens
  Table A; Target 51406; HLA-B*44:03; MYH4; ENSG00000264424; TAA
RESIFCIQY

SEQ ID NO: 51407 - protein, 9 aa, Homo sapiens
  Table A; Target 51407; HLA-B*57:01; MYH4; ENSG00000264424; TAA
RGFLMRVEF

SEQ ID NO: 51408 - protein, 9 aa, Homo sapiens
  Table A; Target 51408; HLA-A*03:01; MYH4; ENSG00000264424; TAA
RIHFGATGK

SEQ ID NO: 51409 - protein, 9 aa, Homo sapiens
  Table A; Target 51409; HLA-A*03:02; MYH4; ENSG00000264424; TAA
RIHFGATGK

SEQ ID NO: 51410 - protein, 10 aa, Homo sapiens
  Table A; Target 51410; HLA-A*03:01; MYH4; ENSG00000264424; TAA
RIHFGATGKL

SEQ ID NO: 51411 - protein, 9 aa, Homo sapiens
  Table A; Target 51411; HLA-A*03:01; MYH4; ENSG00000264424; TAA
RINQQLDTK

SEQ ID NO: 51412 - protein, 9 aa, Homo sapiens
  Table A; Target 51412; HLA-A*03:02; MYH4; ENSG00000264424; TAA
RINQQLDTK

SEQ ID NO: 51413 - protein, 9 aa, Homo sapiens
  Table A; Target 51413; HLA-A*11:01; MYH4; ENSG00000264424; TAA
RINQQLDTK

SEQ ID NO: 51414 - protein, 9 aa, Homo sapiens
  Table A; Target 51414; HLA-A*02:01; MYH4; ENSG00000264424; TAA
RIQLELNQV

SEQ ID NO: 51415 - protein, 9 aa, Homo sapiens
  Table A; Target 51415; HLA-A*02:03; MYH4; ENSG00000264424; TAA
RIQLELNQV

SEQ ID NO: 51416 - protein, 9 aa, Homo sapiens
  Table A; Target 51416; HLA-A*02:04; MYH4; ENSG00000264424; TAA
RIQLELNQV

SEQ ID NO: 51417 - protein, 10 aa, Homo sapiens
  Table A; Target 51417; HLA-A*03:02; MYH4; ENSG00000264424; TAA
RIQLELNQVK

SEQ ID NO: 51418 - protein, 8 aa, Homo sapiens
  Table A; Target 51418; HLA-C*05:01; MYH4; ENSG00000264424; TAA
RLDEAEQL

SEQ ID NO: 51419 - protein, 10 aa, Homo sapiens
  Table A; Target 51419; HLA-A*01:01; MYH4; ENSG00000264424; TAA
RLDEAEQLAL

SEQ ID NO: 51420 - protein, 10 aa, Homo sapiens
  Table A; Target 51420; HLA-A*02:07; MYH4; ENSG00000264424; TAA
RLDEAEQLAL

SEQ ID NO: 51421 - protein, 10 aa, Homo sapiens
  Table A; Target 51421; HLA-B*38:01; MYH4; ENSG00000264424; TAA
RLDEAEQLAL

SEQ ID NO: 51422 - protein, 10 aa, Homo sapiens
  Table A; Target 51422; HLA-B*40:01; MYH4; ENSG00000264424; TAA
RLDEAEQLAL

SEQ ID NO: 51423 - protein, 10 aa, Homo sapiens
  Table A; Target 51423; HLA-C*05:01; MYH4; ENSG00000264424; TAA
RLDEAEQLAL

SEQ ID NO: 51424 - protein, 11 aa, Homo sapiens
  Table A; Target 51424; HLA-A*01:01; MYH4; ENSG00000264424; TAA
RLDEAEQLALK

SEQ ID NO: 51425 - protein, 11 aa, Homo sapiens
  Table A; Target 51425; HLA-A*03:01; MYH4; ENSG00000264424; TAA
RLDEAEQLALK

SEQ ID NO: 51426 - protein, 11 aa, Homo sapiens
  Table A; Target 51426; HLA-A*03:02; MYH4; ENSG00000264424; TAA
RLDEAEQLALK

SEQ ID NO: 51427 - protein, 9 aa, Homo sapiens
  Table A; Target 51427; HLA-A*30:02; MYH4; ENSG00000264424; TAA
RLHTESGEF

SEQ ID NO: 51428 - protein, 9 aa, Homo sapiens
  Table A; Target 51428; HLA-A*32:01; MYH4; ENSG00000264424; TAA
RLHTESGEF

SEQ ID NO: 51429 - protein, 9 aa, Homo sapiens
  Table A; Target 51429; HLA-B*15:01; MYH4; ENSG00000264424; TAA
RLHTESGEF

SEQ ID NO: 51430 - protein, 9 aa, Homo sapiens
  Table A; Target 51430; HLA-B*46:01; MYH4; ENSG00000264424; TAA
RLHTESGEF

SEQ ID NO: 51431 - protein, 9 aa, Homo sapiens
  Table A; Target 51431; HLA-B*58:01; MYH4; ENSG00000264424; TAA
RLHTESGEF

SEQ ID NO: 51432 - protein, 11 aa, Homo sapiens
  Table A; Target 51432; HLA-A*31:01; MYH4; ENSG00000264424; TAA
RLHTESGEFSR

SEQ ID NO: 51433 - protein, 10 aa, Homo sapiens
  Table A; Target 51433; HLA-A*03:01; MYH4; ENSG00000264424; TAA
RLINELSAQK

SEQ ID NO: 51434 - protein, 10 aa, Homo sapiens
  Table A; Target 51434; HLA-A*03:02; MYH4; ENSG00000264424; TAA
RLINELSAQK

SEQ ID NO: 51435 - protein, 10 aa, Homo sapiens
  Table A; Target 51435; HLA-A*11:01; MYH4; ENSG00000264424; TAA
RLINELSAQK

SEQ ID NO: 51436 - protein, 10 aa, Homo sapiens
  Table A; Target 51436; HLA-A*30:02; MYH4; ENSG00000264424; TAA
RLINELSAQK

SEQ ID NO: 51437 - protein, 10 aa, Homo sapiens
  Table A; Target 51437; HLA-B*27:02; MYH4; ENSG00000264424; TAA
RLINELSAQK

SEQ ID NO: 51438 - protein, 9 aa, Homo sapiens
  Table A; Target 51438; HLA-A*02:01; MYH4; ENSG00000264424; TAA
RLQDAEEHV

SEQ ID NO: 51439 - protein, 9 aa, Homo sapiens
  Table A; Target 51439; HLA-A*02:01; MYH4; ENSG00000264424; TAA
RLQDLVDKL

SEQ ID NO: 51440 - protein, 9 aa, Homo sapiens
  Table A; Target 51440; HLA-A*02:03; MYH4; ENSG00000264424; TAA
RLQDLVDKL

SEQ ID NO: 51441 - protein, 9 aa, Homo sapiens
  Table A; Target 51441; HLA-A*02:04; MYH4; ENSG00000264424; TAA
RLQDLVDKL

SEQ ID NO: 51442 - protein, 9 aa, Homo sapiens
  Table A; Target 51442; HLA-A*02:07; MYH4; ENSG00000264424; TAA
RLQDLVDKL

SEQ ID NO: 51443 - protein, 9 aa, Homo sapiens
  Table A; Target 51443; HLA-A*03:02; MYH4; ENSG00000264424; TAA
RLQDLVDKL

SEQ ID NO: 51444 - protein, 9 aa, Homo sapiens
  Table A; Target 51444; HLA-B*55:01; MYH4; ENSG00000264424; TAA
RLQDLVDKL

SEQ ID NO: 51445 - protein, 11 aa, Homo sapiens
  Table A; Target 51445; HLA-A*03:01; MYH4; ENSG00000264424; TAA
RMKKNMEQTVK

SEQ ID NO: 51446 - protein, 10 aa, Homo sapiens
  Table A; Target 51446; HLA-B*57:01; MYH4; ENSG00000264424; TAA
RNFDKVLAEW

SEQ ID NO: 51447 - protein, 10 aa, Homo sapiens
  Table A; Target 51447; HLA-B*15:01; MYH4; ENSG00000264424; TAA
RQAAEALRNL

SEQ ID NO: 51448 - protein, 10 aa, Homo sapiens
  Table A; Target 51448; HLA-B*27:05; MYH4; ENSG00000264424; TAA
RQAAEALRNL

SEQ ID NO: 51449 - protein, 10 aa, Homo sapiens
  Table A; Target 51449; HLA-B*58:01; MYH4; ENSG00000264424; TAA
RQAAEALRNL

SEQ ID NO: 51450 - protein, 11 aa, Homo sapiens
  Table A; Target 51450; HLA-A*31:01; MYH4; ENSG00000264424; TAA
RQAAEALRNLR

SEQ ID NO: 51451 - protein, 9 aa, Homo sapiens
  Table A; Target 51451; HLA-B*15:01; MYH4; ENSG00000264424; TAA
RQEAPPHIF

SEQ ID NO: 51452 - protein, 9 aa, Homo sapiens
  Table A; Target 51452; HLA-B*37:01; MYH4; ENSG00000264424; TAA
RQEAPPHIF

SEQ ID NO: 51453 - protein, 9 aa, Homo sapiens
  Table A; Target 51453; HLA-B*38:01; MYH4; ENSG00000264424; TAA
RQEAPPHIF

SEQ ID NO: 51454 - protein, 11 aa, Homo sapiens
  Table A; Target 51454; HLA-A*02:04; MYH4; ENSG00000264424; TAA
RQEAPPHIFSI

SEQ ID NO: 51455 - protein, 10 aa, Homo sapiens
  Table A; Target 51455; HLA-A*02:01; MYH4; ENSG00000264424; TAA
RQLDEKDAMV

SEQ ID NO: 51456 - protein, 10 aa, Homo sapiens
  Table A; Target 51456; HLA-B*13:02; MYH4; ENSG00000264424; TAA
RQYFIGVLDI

SEQ ID NO: 51457 - protein, 9 aa, Homo sapiens
  Table A; Target 51457; HLA-B*38:01; MYH4; ENSG00000264424; TAA
RRDLEESTL

SEQ ID NO: 51458 - protein, 9 aa, Homo sapiens
  Table A; Target 51458; HLA-A*03:01; MYH4; ENSG00000264424; TAA
RSLSTELFK

SEQ ID NO: 51459 - protein, 9 aa, Homo sapiens
  Table A; Target 51459; HLA-A*03:02; MYH4; ENSG00000264424; TAA
RSLSTELFK

SEQ ID NO: 51460 - protein, 9 aa, Homo sapiens
  Table A; Target 51460; HLA-A*11:01; MYH4; ENSG00000264424; TAA
RSLSTELFK

SEQ ID NO: 51461 - protein, 10 aa, Homo sapiens
  Table A; Target 51461; HLA-A*02:04; MYH4; ENSG00000264424; TAA
RSLSTELFKV

SEQ ID NO: 51462 - protein, 10 aa, Homo sapiens
  Table A; Target 51462; HLA-A*03:01; MYH4; ENSG00000264424; TAA
RSLSTELFKV

SEQ ID NO: 51463 - protein, 11 aa, Homo sapiens
  Table A; Target 51463; HLA-A*03:01; MYH4; ENSG00000264424; TAA
RSLSTELFKVK

SEQ ID NO: 51464 - protein, 11 aa, Homo sapiens
  Table A; Target 51464; HLA-A*03:02; MYH4; ENSG00000264424; TAA
RSLSTELFKVK

SEQ ID NO: 51465 - protein, 11 aa, Homo sapiens
  Table A; Target 51465; HLA-A*11:01; MYH4; ENSG00000264424; TAA
RSLSTELFKVK

SEQ ID NO: 51466 - protein, 11 aa, Homo sapiens
  Table A; Target 51466; HLA-A*31:01; MYH4; ENSG00000264424; TAA
RSLSTELFKVK

SEQ ID NO: 51467 - protein, 11 aa, Homo sapiens
  Table A; Target 51467; HLA-B*57:01; MYH4; ENSG00000264424; TAA
RSLSTELFKVK

SEQ ID NO: 51468 - protein, 9 aa, Homo sapiens
  Table A; Target 51468; HLA-A*31:01; MYH4; ENSG00000264424; TAA
RSTHPHFVR

SEQ ID NO: 51469 - protein, 9 aa, Homo sapiens
  Table A; Target 51469; HLA-B*57:01; MYH4; ENSG00000264424; TAA
RSTHPHFVR

SEQ ID NO: 51470 - protein, 9 aa, Homo sapiens
  Table A; Target 51470; HLA-B*57:01; MYH4; ENSG00000264424; TAA
RSYHIFYQI

SEQ ID NO: 51471 - protein, 10 aa, Homo sapiens
  Table A; Target 51471; HLA-A*03:02; MYH4; ENSG00000264424; TAA
RTEELEEAKK

SEQ ID NO: 51472 - protein, 10 aa, Homo sapiens
  Table A; Target 51472; HLA-A*11:01; MYH4; ENSG00000264424; TAA
RTEELEEAKK

SEQ ID NO: 51473 - protein, 11 aa, Homo sapiens
  Table A; Target 51473; HLA-A*03:02; MYH4; ENSG00000264424; TAA
RTEELEEAKKK

SEQ ID NO: 51474 - protein, 11 aa, Homo sapiens
  Table A; Target 51474; HLA-A*11:01; MYH4; ENSG00000264424; TAA
RTEELEEAKKK

SEQ ID NO: 51475 - protein, 11 aa, Homo sapiens
  Table A; Target 51475; HLA-A*03:01; MYH4; ENSG00000264424; TAA
RTKYETDAIQR

SEQ ID NO: 51476 - protein, 11 aa, Homo sapiens
  Table A; Target 51476; HLA-A*03:02; MYH4; ENSG00000264424; TAA
RTKYETDAIQR

SEQ ID NO: 51477 - protein, 11 aa, Homo sapiens
  Table A; Target 51477; HLA-A*11:01; MYH4; ENSG00000264424; TAA
RTKYETDAIQR

SEQ ID NO: 51478 - protein, 11 aa, Homo sapiens
  Table A; Target 51478; HLA-A*31:01; MYH4; ENSG00000264424; TAA
RTKYETDAIQR

SEQ ID NO: 51479 - protein, 11 aa, Homo sapiens
  Table A; Target 51479; HLA-A*33:01; MYH4; ENSG00000264424; TAA
RTKYETDAIQR

SEQ ID NO: 51480 - protein, 11 aa, Homo sapiens
  Table A; Target 51480; HLA-A*33:03; MYH4; ENSG00000264424; TAA
RTKYETDAIQR

SEQ ID NO: 51481 - protein, 11 aa, Homo sapiens
  Table A; Target 51481; HLA-A*68:01; MYH4; ENSG00000264424; TAA
RTKYETDAIQR

SEQ ID NO: 51482 - protein, 11 aa, Homo sapiens
  Table A; Target 51482; HLA-B*57:01; MYH4; ENSG00000264424; TAA
RTKYETDAIQR

SEQ ID NO: 51483 - protein, 11 aa, Homo sapiens
  Table A; Target 51483; HLA-A*03:02; MYH4; ENSG00000264424; TAA
RTLEDQLSEIK

SEQ ID NO: 51484 - protein, 11 aa, Homo sapiens
  Table A; Target 51484; HLA-A*11:01; MYH4; ENSG00000264424; TAA
RTLEDQLSEIK

SEQ ID NO: 51485 - protein, 11 aa, Homo sapiens
  Table A; Target 51485; HLA-B*57:01; MYH4; ENSG00000264424; TAA
RTLEDQLSEIK

SEQ ID NO: 51486 - protein, 9 aa, Homo sapiens
  Table A; Target 51486; HLA-B*57:01; MYH4; ENSG00000264424; TAA
RTQAICRGF

SEQ ID NO: 51487 - protein, 9 aa, Homo sapiens
  Table A; Target 51487; HLA-A*02:03; MYH4; ENSG00000264424; TAA
RVIQYFATI

SEQ ID NO: 51488 - protein, 9 aa, Homo sapiens
  Table A; Target 51488; HLA-A*02:04; MYH4; ENSG00000264424; TAA
RVIQYFATI

SEQ ID NO: 51489 - protein, 9 aa, Homo sapiens
  Table A; Target 51489; HLA-A*02:07; MYH4; ENSG00000264424; TAA
RVIQYFATI

SEQ ID NO: 51490 - protein, 9 aa, Homo sapiens
  Table A; Target 51490; HLA-A*24:02; MYH4; ENSG00000264424; TAA
RVIQYFATI

SEQ ID NO: 51491 - protein, 9 aa, Homo sapiens
  Table A; Target 51491; HLA-A*25:01; MYH4; ENSG00000264424; TAA
RVIQYFATI

SEQ ID NO: 51492 - protein, 9 aa, Homo sapiens
  Table A; Target 51492; HLA-A*68:02; MYH4; ENSG00000264424; TAA
RVIQYFATI

SEQ ID NO: 51493 - protein, 9 aa, Homo sapiens
  Table A; Target 51493; HLA-B*57:01; MYH4; ENSG00000264424; TAA
RVIQYFATI

SEQ ID NO: 51494 - protein, 8 aa, Homo sapiens
  Table A; Target 51494; HLA-A*32:01; MYH4; ENSG00000264424; TAA
RVKVGNEF

SEQ ID NO: 51495 - protein, 8 aa, Homo sapiens
  Table A; Target 51495; HLA-B*08:01; MYH4; ENSG00000264424; TAA
RVKVGNEF

SEQ ID NO: 51496 - protein, 8 aa, Homo sapiens
  Table A; Target 51496; HLA-B*46:01; MYH4; ENSG00000264424; TAA
RVKVGNEF

SEQ ID NO: 51497 - protein, 11 aa, Homo sapiens
  Table A; Target 51497; HLA-A*03:01; MYH4; ENSG00000264424; TAA
RVKVGNEFVTK

SEQ ID NO: 51498 - protein, 11 aa, Homo sapiens
  Table A; Target 51498; HLA-A*03:02; MYH4; ENSG00000264424; TAA
RVKVGNEFVTK

SEQ ID NO: 51499 - protein, 11 aa, Homo sapiens
  Table A; Target 51499; HLA-A*11:01; MYH4; ENSG00000264424; TAA
RVKVGNEFVTK

SEQ ID NO: 51500 - protein, 11 aa, Homo sapiens
  Table A; Target 51500; HLA-A*31:01; MYH4; ENSG00000264424; TAA
RVKVGNEFVTK

SEQ ID NO: 51501 - protein, 9 aa, Homo sapiens
  Table A; Target 51501; HLA-B*07:02; MYH4; ENSG00000264424; TAA
RVRELESEV

SEQ ID NO: 51502 - protein, 10 aa, Homo sapiens
  Table A; Target 51502; HLA-A*31:01; MYH4; ENSG00000264424; TAA
RVTFQLKAER

SEQ ID NO: 51503 - protein, 9 aa, Homo sapiens
  Table A; Target 51503; HLA-B*58:01; MYH4; ENSG00000264424; TAA
RVVESMQST

SEQ ID NO: 51504 - protein, 10 aa, Homo sapiens
  Table A; Target 51504; HLA-A*25:01; MYH4; ENSG00000264424; TAA
RVVESMQSTL

SEQ ID NO: 51505 - protein, 10 aa, Homo sapiens
  Table A; Target 51505; HLA-A*30:01; MYH4; ENSG00000264424; TAA
RVVESMQSTL

SEQ ID NO: 51506 - protein, 10 aa, Homo sapiens
  Table A; Target 51506; HLA-B*07:02; MYH4; ENSG00000264424; TAA
RVVESMQSTL

SEQ ID NO: 51507 - protein, 10 aa, Homo sapiens
  Table A; Target 51507; HLA-B*15:01; MYH4; ENSG00000264424; TAA
RVVESMQSTL

SEQ ID NO: 51508 - protein, 10 aa, Homo sapiens
  Table A; Target 51508; HLA-B*27:05; MYH4; ENSG00000264424; TAA
RVVESMQSTL

SEQ ID NO: 51509 - protein, 10 aa, Homo sapiens
  Table A; Target 51509; HLA-B*40:01; MYH4; ENSG00000264424; TAA
RVVESMQSTL

SEQ ID NO: 51510 - protein, 10 aa, Homo sapiens
  Table A; Target 51510; HLA-B*40:02; MYH4; ENSG00000264424; TAA
RVVESMQSTL

SEQ ID NO: 51511 - protein, 10 aa, Homo sapiens
  Table A; Target 51511; HLA-B*58:01; MYH4; ENSG00000264424; TAA
RVVESMQSTL

SEQ ID NO: 51512 - protein, 10 aa, Homo sapiens
  Table A; Target 51512; HLA-C*03:03; MYH4; ENSG00000264424; TAA
RVVESMQSTL

SEQ ID NO: 51513 - protein, 10 aa, Homo sapiens
  Table A; Target 51513; HLA-C*03:04; MYH4; ENSG00000264424; TAA
RVVESMQSTL

SEQ ID NO: 51514 - protein, 10 aa, Homo sapiens
  Table A; Target 51514; HLA-C*07:02; MYH4; ENSG00000264424; TAA
RVVESMQSTL

SEQ ID NO: 51515 - protein, 10 aa, Homo sapiens
  Table A; Target 51515; HLA-A*24:02; MYH4; ENSG00000264424; TAA
RYAAWMIYTY

SEQ ID NO: 51516 - protein, 10 aa, Homo sapiens
  Table A; Target 51516; HLA-A*29:02; MYH4; ENSG00000264424; TAA
RYAAWMIYTY

SEQ ID NO: 51517 - protein, 8 aa, Homo sapiens
  Table A; Target 51517; HLA-C*04:01; MYH4; ENSG00000264424; TAA
SADIETYL

SEQ ID NO: 51518 - protein, 8 aa, Homo sapiens
  Table A; Target 51518; HLA-C*05:01; MYH4; ENSG00000264424; TAA
SADIETYL

SEQ ID NO: 51519 - protein, 9 aa, Homo sapiens
  Table A; Target 51519; HLA-A*02:07; MYH4; ENSG00000264424; TAA
SADIETYLL

SEQ ID NO: 51520 - protein, 9 aa, Homo sapiens
  Table A; Target 51520; HLA-B*35:03; MYH4; ENSG00000264424; TAA
SADIETYLL

SEQ ID NO: 51521 - protein, 9 aa, Homo sapiens
  Table A; Target 51521; HLA-B*38:01; MYH4; ENSG00000264424; TAA
SADIETYLL

SEQ ID NO: 51522 - protein, 9 aa, Homo sapiens
  Table A; Target 51522; HLA-B*40:01; MYH4; ENSG00000264424; TAA
SADIETYLL

SEQ ID NO: 51523 - protein, 9 aa, Homo sapiens
  Table A; Target 51523; HLA-C*04:01; MYH4; ENSG00000264424; TAA
SADIETYLL

SEQ ID NO: 51524 - protein, 9 aa, Homo sapiens
  Table A; Target 51524; HLA-C*05:01; MYH4; ENSG00000264424; TAA
SADIETYLL

SEQ ID NO: 51525 - protein, 11 aa, Homo sapiens
  Table A; Target 51525; HLA-A*11:01; MYH4; ENSG00000264424; TAA
SADIETYLLEK

SEQ ID NO: 51526 - protein, 11 aa, Homo sapiens
  Table A; Target 51526; HLA-B*27:02; MYH4; ENSG00000264424; TAA
SADIETYLLEK

SEQ ID NO: 51527 - protein, 8 aa, Homo sapiens
  Table A; Target 51527; HLA-B*08:01; MYH4; ENSG00000264424; TAA
SADLLKSL

SEQ ID NO: 51528 - protein, 8 aa, Homo sapiens
  Table A; Target 51528; HLA-C*03:04; MYH4; ENSG00000264424; TAA
SADLLKSL

SEQ ID NO: 51529 - protein, 8 aa, Homo sapiens
  Table A; Target 51529; HLA-C*05:01; MYH4; ENSG00000264424; TAA
SADLLKSL

SEQ ID NO: 51530 - protein, 10 aa, Homo sapiens
  Table A; Target 51530; HLA-A*01:01; MYH4; ENSG00000264424; TAA
SADLLKSLCY

SEQ ID NO: 51531 - protein, 8 aa, Homo sapiens
  Table A; Target 51531; HLA-C*03:03; MYH4; ENSG00000264424; TAA
SAETEKEM

SEQ ID NO: 51532 - protein, 8 aa, Homo sapiens
  Table A; Target 51532; HLA-C*05:01; MYH4; ENSG00000264424; TAA
SAETEKEM

SEQ ID NO: 51533 - protein, 8 aa, Homo sapiens
  Table A; Target 51533; HLA-C*16:01; MYH4; ENSG00000264424; TAA
SAETEKEM

SEQ ID NO: 51534 - protein, 8 aa, Homo sapiens
  Table A; Target 51534; HLA-C*16:02; MYH4; ENSG00000264424; TAA
SAETEKEM

SEQ ID NO: 51535 - protein, 8 aa, Homo sapiens
  Table A; Target 51535; HLA-C*05:01; MYH4; ENSG00000264424; TAA
SAIPEGQF

SEQ ID NO: 51536 - protein, 9 aa, Homo sapiens
  Table A; Target 51536; HLA-A*23:01; MYH4; ENSG00000264424; TAA
SAIPEGQFI

SEQ ID NO: 51537 - protein, 9 aa, Homo sapiens
  Table A; Target 51537; HLA-A*25:01; MYH4; ENSG00000264424; TAA
SAIPEGQFI

SEQ ID NO: 51538 - protein, 9 aa, Homo sapiens
  Table A; Target 51538; HLA-B*13:02; MYH4; ENSG00000264424; TAA
SAIPEGQFI

SEQ ID NO: 51539 - protein, 9 aa, Homo sapiens
  Table A; Target 51539; HLA-B*35:03; MYH4; ENSG00000264424; TAA
SAIPEGQFI

SEQ ID NO: 51540 - protein, 9 aa, Homo sapiens
  Table A; Target 51540; HLA-B*38:01; MYH4; ENSG00000264424; TAA
SAIPEGQFI

SEQ ID NO: 51541 - protein, 9 aa, Homo sapiens
  Table A; Target 51541; HLA-B*39:01; MYH4; ENSG00000264424; TAA
SAIPEGQFI

SEQ ID NO: 51542 - protein, 9 aa, Homo sapiens
  Table A; Target 51542; HLA-B*44:02; MYH4; ENSG00000264424; TAA
SAIPEGQFI

SEQ ID NO: 51543 - protein, 9 aa, Homo sapiens
  Table A; Target 51543; HLA-B*44:03; MYH4; ENSG00000264424; TAA
SAIPEGQFI

SEQ ID NO: 51544 - protein, 9 aa, Homo sapiens
  Table A; Target 51544; HLA-B*49:01; MYH4; ENSG00000264424; TAA
SAIPEGQFI

SEQ ID NO: 51545 - protein, 9 aa, Homo sapiens
  Table A; Target 51545; HLA-B*51:01; MYH4; ENSG00000264424; TAA
SAIPEGQFI

SEQ ID NO: 51546 - protein, 9 aa, Homo sapiens
  Table A; Target 51546; HLA-B*58:01; MYH4; ENSG00000264424; TAA
SAIPEGQFI

SEQ ID NO: 51547 - protein, 9 aa, Homo sapiens
  Table A; Target 51547; HLA-C*02:02; MYH4; ENSG00000264424; TAA
SAIPEGQFI

SEQ ID NO: 51548 - protein, 9 aa, Homo sapiens
  Table A; Target 51548; HLA-C*03:03; MYH4; ENSG00000264424; TAA
SAIPEGQFI

SEQ ID NO: 51549 - protein, 9 aa, Homo sapiens
  Table A; Target 51549; HLA-C*03:04; MYH4; ENSG00000264424; TAA
SAIPEGQFI

SEQ ID NO: 51550 - protein, 9 aa, Homo sapiens
  Table A; Target 51550; HLA-C*05:01; MYH4; ENSG00000264424; TAA
SAIPEGQFI

SEQ ID NO: 51551 - protein, 9 aa, Homo sapiens
  Table A; Target 51551; HLA-C*16:02; MYH4; ENSG00000264424; TAA
SAIPEGQFI

SEQ ID NO: 51552 - protein, 9 aa, Homo sapiens
  Table A; Target 51552; HLA-C*16:04; MYH4; ENSG00000264424; TAA
SAIPEGQFI

SEQ ID NO: 51553 - protein, 8 aa, Homo sapiens
  Table A; Target 51553; HLA-B*08:01; MYH4; ENSG00000264424; TAA
SALFRENL

SEQ ID NO: 51554 - protein, 8 aa, Homo sapiens
  Table A; Target 51554; HLA-C*16:01; MYH4; ENSG00000264424; TAA
SALFRENL

SEQ ID NO: 51555 - protein, 8 aa, Homo sapiens
  Table A; Target 51555; HLA-B*08:01; MYH4; ENSG00000264424; TAA
SAMKTLAF

SEQ ID NO: 51556 - protein, 8 aa, Homo sapiens
  Table A; Target 51556; HLA-B*15:01; MYH4; ENSG00000264424; TAA
SAMKTLAF

SEQ ID NO: 51557 - protein, 8 aa, Homo sapiens
  Table A; Target 51557; HLA-B*15:03; MYH4; ENSG00000264424; TAA
SAMKTLAF

SEQ ID NO: 51558 - protein, 8 aa, Homo sapiens
  Table A; Target 51558; HLA-B*37:01; MYH4; ENSG00000264424; TAA
SAMKTLAF

SEQ ID NO: 51559 - protein, 8 aa, Homo sapiens
  Table A; Target 51559; HLA-B*46:01; MYH4; ENSG00000264424; TAA
SAMKTLAF

SEQ ID NO: 51560 - protein, 8 aa, Homo sapiens
  Table A; Target 51560; HLA-B*58:01; MYH4; ENSG00000264424; TAA
SAMKTLAF

SEQ ID NO: 51561 - protein, 8 aa, Homo sapiens
  Table A; Target 51561; HLA-C*03:03; MYH4; ENSG00000264424; TAA
SAMKTLAF

SEQ ID NO: 51562 - protein, 8 aa, Homo sapiens
  Table A; Target 51562; HLA-C*03:04; MYH4; ENSG00000264424; TAA
SAMKTLAF

SEQ ID NO: 51563 - protein, 8 aa, Homo sapiens
  Table A; Target 51563; HLA-C*16:01; MYH4; ENSG00000264424; TAA
SAMKTLAF

SEQ ID NO: 51564 - protein, 9 aa, Homo sapiens
  Table A; Target 51564; HLA-A*02:04; MYH4; ENSG00000264424; TAA
SAMKTLAFL

SEQ ID NO: 51565 - protein, 10 aa, Homo sapiens
  Table A; Target 51565; HLA-B*57:01; MYH4; ENSG00000264424; TAA
SAMKTLAFLF

SEQ ID NO: 51566 - protein, 8 aa, Homo sapiens
  Table A; Target 51566; HLA-B*54:01; MYH4; ENSG00000264424; TAA
SANPLLEA

SEQ ID NO: 51567 - protein, 8 aa, Homo sapiens
  Table A; Target 51567; HLA-B*56:01; MYH4; ENSG00000264424; TAA
SANPLLEA

SEQ ID NO: 51568 - protein, 9 aa, Homo sapiens
  Table A; Target 51568; HLA-A*23:01; MYH4; ENSG00000264424; TAA
SANPLLEAF

SEQ ID NO: 51569 - protein, 9 aa, Homo sapiens
  Table A; Target 51569; HLA-A*24:02; MYH4; ENSG00000264424; TAA
SANPLLEAF

SEQ ID NO: 51570 - protein, 9 aa, Homo sapiens
  Table A; Target 51570; HLA-A*25:01; MYH4; ENSG00000264424; TAA
SANPLLEAF

SEQ ID NO: 51571 - protein, 9 aa, Homo sapiens
  Table A; Target 51571; HLA-A*26:01; MYH4; ENSG00000264424; TAA
SANPLLEAF

SEQ ID NO: 51572 - protein, 9 aa, Homo sapiens
  Table A; Target 51572; HLA-A*29:02; MYH4; ENSG00000264424; TAA
SANPLLEAF

SEQ ID NO: 51573 - protein, 9 aa, Homo sapiens
  Table A; Target 51573; HLA-A*30:02; MYH4; ENSG00000264424; TAA
SANPLLEAF

SEQ ID NO: 51574 - protein, 9 aa, Homo sapiens
  Table A; Target 51574; HLA-A*31:01; MYH4; ENSG00000264424; TAA
SANPLLEAF

SEQ ID NO: 51575 - protein, 9 aa, Homo sapiens
  Table A; Target 51575; HLA-A*32:01; MYH4; ENSG00000264424; TAA
SANPLLEAF

SEQ ID NO: 51576 - protein, 9 aa, Homo sapiens
  Table A; Target 51576; HLA-A*33:01; MYH4; ENSG00000264424; TAA
SANPLLEAF

SEQ ID NO: 51577 - protein, 9 aa, Homo sapiens
  Table A; Target 51577; HLA-A*33:03; MYH4; ENSG00000264424; TAA
SANPLLEAF

SEQ ID NO: 51578 - protein, 9 aa, Homo sapiens
  Table A; Target 51578; HLA-B*07:02; MYH4; ENSG00000264424; TAA
SANPLLEAF

SEQ ID NO: 51579 - protein, 9 aa, Homo sapiens
  Table A; Target 51579; HLA-B*15:01; MYH4; ENSG00000264424; TAA
SANPLLEAF

SEQ ID NO: 51580 - protein, 9 aa, Homo sapiens
  Table A; Target 51580; HLA-B*15:03; MYH4; ENSG00000264424; TAA
SANPLLEAF

SEQ ID NO: 51581 - protein, 9 aa, Homo sapiens
  Table A; Target 51581; HLA-B*18:01; MYH4; ENSG00000264424; TAA
SANPLLEAF

SEQ ID NO: 51582 - protein, 9 aa, Homo sapiens
  Table A; Target 51582; HLA-B*27:02; MYH4; ENSG00000264424; TAA
SANPLLEAF

SEQ ID NO: 51583 - protein, 9 aa, Homo sapiens
  Table A; Target 51583; HLA-B*27:05; MYH4; ENSG00000264424; TAA
SANPLLEAF

SEQ ID NO: 51584 - protein, 9 aa, Homo sapiens
  Table A; Target 51584; HLA-B*35:01; MYH4; ENSG00000264424; TAA
SANPLLEAF

SEQ ID NO: 51585 - protein, 9 aa, Homo sapiens
  Table A; Target 51585; HLA-B*35:03; MYH4; ENSG00000264424; TAA
SANPLLEAF

SEQ ID NO: 51586 - protein, 9 aa, Homo sapiens
  Table A; Target 51586; HLA-B*37:01; MYH4; ENSG00000264424; TAA
SANPLLEAF

SEQ ID NO: 51587 - protein, 9 aa, Homo sapiens
  Table A; Target 51587; HLA-B*38:01; MYH4; ENSG00000264424; TAA
SANPLLEAF

SEQ ID NO: 51588 - protein, 9 aa, Homo sapiens
  Table A; Target 51588; HLA-B*44:02; MYH4; ENSG00000264424; TAA
SANPLLEAF

SEQ ID NO: 51589 - protein, 9 aa, Homo sapiens
  Table A; Target 51589; HLA-B*44:03; MYH4; ENSG00000264424; TAA
SANPLLEAF

SEQ ID NO: 51590 - protein, 9 aa, Homo sapiens
  Table A; Target 51590; HLA-B*46:01; MYH4; ENSG00000264424; TAA
SANPLLEAF

SEQ ID NO: 51591 - protein, 9 aa, Homo sapiens
  Table A; Target 51591; HLA-B*55:01; MYH4; ENSG00000264424; TAA
SANPLLEAF

SEQ ID NO: 51592 - protein, 9 aa, Homo sapiens
  Table A; Target 51592; HLA-B*56:01; MYH4; ENSG00000264424; TAA
SANPLLEAF

SEQ ID NO: 51593 - protein, 9 aa, Homo sapiens
  Table A; Target 51593; HLA-B*57:01; MYH4; ENSG00000264424; TAA
SANPLLEAF

SEQ ID NO: 51594 - protein, 9 aa, Homo sapiens
  Table A; Target 51594; HLA-B*58:01; MYH4; ENSG00000264424; TAA
SANPLLEAF

SEQ ID NO: 51595 - protein, 9 aa, Homo sapiens
  Table A; Target 51595; HLA-C*01:02; MYH4; ENSG00000264424; TAA
SANPLLEAF

SEQ ID NO: 51596 - protein, 9 aa, Homo sapiens
  Table A; Target 51596; HLA-C*02:02; MYH4; ENSG00000264424; TAA
SANPLLEAF

SEQ ID NO: 51597 - protein, 9 aa, Homo sapiens
  Table A; Target 51597; HLA-C*03:03; MYH4; ENSG00000264424; TAA
SANPLLEAF

SEQ ID NO: 51598 - protein, 9 aa, Homo sapiens
  Table A; Target 51598; HLA-C*03:04; MYH4; ENSG00000264424; TAA
SANPLLEAF

SEQ ID NO: 51599 - protein, 9 aa, Homo sapiens
  Table A; Target 51599; HLA-C*05:01; MYH4; ENSG00000264424; TAA
SANPLLEAF

SEQ ID NO: 51600 - protein, 9 aa, Homo sapiens
  Table A; Target 51600; HLA-C*07:04; MYH4; ENSG00000264424; TAA
SANPLLEAF

SEQ ID NO: 51601 - protein, 9 aa, Homo sapiens
  Table A; Target 51601; HLA-C*07:06; MYH4; ENSG00000264424; TAA
SANPLLEAF

SEQ ID NO: 51602 - protein, 9 aa, Homo sapiens
  Table A; Target 51602; HLA-C*12:03; MYH4; ENSG00000264424; TAA
SANPLLEAF

SEQ ID NO: 51603 - protein, 9 aa, Homo sapiens
  Table A; Target 51603; HLA-C*14:02; MYH4; ENSG00000264424; TAA
SANPLLEAF

SEQ ID NO: 51604 - protein, 9 aa, Homo sapiens
  Table A; Target 51604; HLA-C*16:01; MYH4; ENSG00000264424; TAA
SANPLLEAF

SEQ ID NO: 51605 - protein, 9 aa, Homo sapiens
  Table A; Target 51605; HLA-C*16:02; MYH4; ENSG00000264424; TAA
SANPLLEAF

SEQ ID NO: 51606 - protein, 9 aa, Homo sapiens
  Table A; Target 51606; HLA-C*16:04; MYH4; ENSG00000264424; TAA
SANPLLEAF

SEQ ID NO: 51607 - protein, 9 aa, Homo sapiens
  Table A; Target 51607; HLA-A*03:02; MYH4; ENSG00000264424; TAA
SAQIEMNKK

SEQ ID NO: 51608 - protein, 9 aa, Homo sapiens
  Table A; Target 51608; HLA-A*11:01; MYH4; ENSG00000264424; TAA
SAQIEMNKK

SEQ ID NO: 51609 - protein, 9 aa, Homo sapiens
  Table A; Target 51609; HLA-C*07:06; MYH4; ENSG00000264424; TAA
SAQIEMNKK

SEQ ID NO: 51610 - protein, 8 aa, Homo sapiens
  Table A; Target 51610; HLA-A*23:01; MYH4; ENSG00000264424; TAA
SAVDILGF

SEQ ID NO: 51611 - protein, 8 aa, Homo sapiens
  Table A; Target 51611; HLA-A*25:01; MYH4; ENSG00000264424; TAA
SAVDILGF

SEQ ID NO: 51612 - protein, 8 aa, Homo sapiens
  Table A; Target 51612; HLA-A*26:01; MYH4; ENSG00000264424; TAA
SAVDILGF

SEQ ID NO: 51613 - protein, 8 aa, Homo sapiens
  Table A; Target 51613; HLA-B*35:01; MYH4; ENSG00000264424; TAA
SAVDILGF

SEQ ID NO: 51614 - protein, 8 aa, Homo sapiens
  Table A; Target 51614; HLA-B*58:01; MYH4; ENSG00000264424; TAA
SAVDILGF

SEQ ID NO: 51615 - protein, 8 aa, Homo sapiens
  Table A; Target 51615; HLA-C*02:02; MYH4; ENSG00000264424; TAA
SAVDILGF

SEQ ID NO: 51616 - protein, 10 aa, Homo sapiens
  Table A; Target 51616; HLA-A*68:02; MYH4; ENSG00000264424; TAA
SAVDILGFTA

SEQ ID NO: 51617 - protein, 10 aa, Homo sapiens
  Table A; Target 51617; HLA-B*54:01; MYH4; ENSG00000264424; TAA
SAVDILGFTA

SEQ ID NO: 51618 - protein, 10 aa, Homo sapiens
  Table A; Target 51618; HLA-B*56:01; MYH4; ENSG00000264424; TAA
SAVDILGFTA

SEQ ID NO: 51619 - protein, 10 aa, Homo sapiens
  Table A; Target 51619; HLA-C*16:04; MYH4; ENSG00000264424; TAA
SAVDILGFTA

SEQ ID NO: 51620 - protein, 8 aa, Homo sapiens
  Table A; Target 51620; HLA-B*37:01; MYH4; ENSG00000264424; TAA
SDNAYQFM

SEQ ID NO: 51621 - protein, 8 aa, Homo sapiens
  Table A; Target 51621; HLA-B*18:01; MYH4; ENSG00000264424; TAA
SDSEMAIF

SEQ ID NO: 51622 - protein, 8 aa, Homo sapiens
  Table A; Target 51622; HLA-B*37:01; MYH4; ENSG00000264424; TAA
SDSEMAIF

SEQ ID NO: 51623 - protein, 10 aa, Homo sapiens
  Table A; Target 51623; HLA-B*49:01; MYH4; ENSG00000264424; TAA
SEKLLGSIEI

SEQ ID NO: 51624 - protein, 10 aa, Homo sapiens
  Table A; Target 51624; HLA-B*40:01; MYH4; ENSG00000264424; TAA
SELKKDIDDL

SEQ ID NO: 51625 - protein, 10 aa, Homo sapiens
  Table A; Target 51625; HLA-A*30:01; MYH4; ENSG00000264424; TAA
SELKMEINDL

SEQ ID NO: 51626 - protein, 10 aa, Homo sapiens
  Table A; Target 51626; HLA-B*40:01; MYH4; ENSG00000264424; TAA
SELKMEINDL

SEQ ID NO: 51627 - protein, 10 aa, Homo sapiens
  Table A; Target 51627; HLA-B*40:02; MYH4; ENSG00000264424; TAA
SELKMEINDL

SEQ ID NO: 51628 - protein, 9 aa, Homo sapiens
  Table A; Target 51628; HLA-A*30:01; MYH4; ENSG00000264424; TAA
SEMAIFGEA

SEQ ID NO: 51629 - protein, 9 aa, Homo sapiens
  Table A; Target 51629; HLA-B*18:01; MYH4; ENSG00000264424; TAA
SEMAIFGEA

SEQ ID NO: 51630 - protein, 9 aa, Homo sapiens
  Table A; Target 51630; HLA-B*40:01; MYH4; ENSG00000264424; TAA
SEMAIFGEA

SEQ ID NO: 51631 - protein, 9 aa, Homo sapiens
  Table A; Target 51631; HLA-B*40:02; MYH4; ENSG00000264424; TAA
SEMAIFGEA

SEQ ID NO: 51632 - protein, 9 aa, Homo sapiens
  Table A; Target 51632; HLA-B*44:02; MYH4; ENSG00000264424; TAA
SEMAIFGEA

SEQ ID NO: 51633 - protein, 9 aa, Homo sapiens
  Table A; Target 51633; HLA-B*44:03; MYH4; ENSG00000264424; TAA
SEMAIFGEA

SEQ ID NO: 51634 - protein, 9 aa, Homo sapiens
  Table A; Target 51634; HLA-B*49:01; MYH4; ENSG00000264424; TAA
SEMAIFGEA

SEQ ID NO: 51635 - protein, 9 aa, Homo sapiens
  Table A; Target 51635; HLA-B*54:01; MYH4; ENSG00000264424; TAA
SEMAIFGEA

SEQ ID NO: 51636 - protein, 9 aa, Homo sapiens
  Table A; Target 51636; HLA-B*56:01; MYH4; ENSG00000264424; TAA
SEMAIFGEA

SEQ ID NO: 51637 - protein, 9 aa, Homo sapiens
  Table A; Target 51637; HLA-C*16:04; MYH4; ENSG00000264424; TAA
SEMAIFGEA

SEQ ID NO: 51638 - protein, 10 aa, Homo sapiens
  Table A; Target 51638; HLA-A*30:01; MYH4; ENSG00000264424; TAA
SEMAIFGEAA

SEQ ID NO: 51639 - protein, 10 aa, Homo sapiens
  Table A; Target 51639; HLA-B*18:01; MYH4; ENSG00000264424; TAA
SEMAIFGEAA

SEQ ID NO: 51640 - protein, 10 aa, Homo sapiens
  Table A; Target 51640; HLA-B*49:01; MYH4; ENSG00000264424; TAA
SEMAIFGEAA

SEQ ID NO: 51641 - protein, 10 aa, Homo sapiens
  Table A; Target 51641; HLA-A*30:01; MYH4; ENSG00000264424; TAA
SEQKHNVEAV

SEQ ID NO: 51642 - protein, 10 aa, Homo sapiens
  Table A; Target 51642; HLA-B*44:02; MYH4; ENSG00000264424; TAA
SEVAQWRTKY

SEQ ID NO: 51643 - protein, 10 aa, Homo sapiens
  Table A; Target 51643; HLA-B*44:03; MYH4; ENSG00000264424; TAA
SEVAQWRTKY

SEQ ID NO: 51644 - protein, 9 aa, Homo sapiens
  Table A; Target 51644; HLA-B*44:03; MYH4; ENSG00000264424; TAA
SEVESEQKH

SEQ ID NO: 51645 - protein, 11 aa, Homo sapiens
  Table A; Target 51645; HLA-B*49:01; MYH4; ENSG00000264424; TAA
SEVESEQKHNV

SEQ ID NO: 51646 - protein, 8 aa, Homo sapiens
  Table A; Target 51646; HLA-C*01:02; MYH4; ENSG00000264424; TAA
SFQTVSAL

SEQ ID NO: 51647 - protein, 8 aa, Homo sapiens
  Table A; Target 51647; HLA-C*14:02; MYH4; ENSG00000264424; TAA
SFQTVSAL

SEQ ID NO: 51648 - protein, 9 aa, Homo sapiens
  Table A; Target 51648; HLA-A*23:01; MYH4; ENSG00000264424; TAA
SFQTVSALF

SEQ ID NO: 51649 - protein, 9 aa, Homo sapiens
  Table A; Target 51649; HLA-A*24:02; MYH4; ENSG00000264424; TAA
SFQTVSALF

SEQ ID NO: 51650 - protein, 9 aa, Homo sapiens
  Table A; Target 51650; HLA-A*29:02; MYH4; ENSG00000264424; TAA
SFQTVSALF

SEQ ID NO: 51651 - protein, 9 aa, Homo sapiens
  Table A; Target 51651; HLA-A*30:02; MYH4; ENSG00000264424; TAA
SFQTVSALF

SEQ ID NO: 51652 - protein, 9 aa, Homo sapiens
  Table A; Target 51652; HLA-C*04:01; MYH4; ENSG00000264424; TAA
SFQTVSALF

SEQ ID NO: 51653 - protein, 9 aa, Homo sapiens
  Table A; Target 51653; HLA-C*14:02; MYH4; ENSG00000264424; TAA
SFQTVSALF

SEQ ID NO: 51654 - protein, 10 aa, Homo sapiens
  Table A; Target 51654; HLA-A*33:03; MYH4; ENSG00000264424; TAA
SFQTVSALFR

SEQ ID NO: 51655 - protein, 10 aa, Homo sapiens
  Table A; Target 51655; HLA-A*03:02; MYH4; ENSG00000264424; TAA
SGAGKTVNTK

SEQ ID NO: 51656 - protein, 10 aa, Homo sapiens
  Table A; Target 51656; HLA-A*11:01; MYH4; ENSG00000264424; TAA
SGAGKTVNTK

SEQ ID NO: 51657 - protein, 11 aa, Homo sapiens
  Table A; Target 51657; HLA-A*31:01; MYH4; ENSG00000264424; TAA
SGAGKTVNTKR

SEQ ID NO: 51658 - protein, 11 aa, Homo sapiens
  Table A; Target 51658; HLA-A*68:01; MYH4; ENSG00000264424; TAA
SGAGKTVNTKR

SEQ ID NO: 51659 - protein, 8 aa, Homo sapiens
  Table A; Target 51659; HLA-C*05:01; MYH4; ENSG00000264424; TAA
SIDDQEEL

SEQ ID NO: 51660 - protein, 9 aa, Homo sapiens
  Table A; Target 51660; HLA-A*02:07; MYH4; ENSG00000264424; TAA
SIDDQEELM

SEQ ID NO: 51661 - protein, 9 aa, Homo sapiens
  Table A; Target 51661; HLA-B*38:01; MYH4; ENSG00000264424; TAA
SIDDQEELM

SEQ ID NO: 51662 - protein, 9 aa, Homo sapiens
  Table A; Target 51662; HLA-C*05:01; MYH4; ENSG00000264424; TAA
SIDDQEELM

SEQ ID NO: 51663 - protein, 9 aa, Homo sapiens
  Table A; Target 51663; HLA-A*01:01; MYH4; ENSG00000264424; TAA
SIEIDHTQY

SEQ ID NO: 51664 - protein, 9 aa, Homo sapiens
  Table A; Target 51664; HLA-A*29:02; MYH4; ENSG00000264424; TAA
SIEIDHTQY

SEQ ID NO: 51665 - protein, 9 aa, Homo sapiens
  Table A; Target 51665; HLA-A*30:02; MYH4; ENSG00000264424; TAA
SIEIDHTQY

SEQ ID NO: 51666 - protein, 9 aa, Homo sapiens
  Table A; Target 51666; HLA-B*15:01; MYH4; ENSG00000264424; TAA
SIEIDHTQY

SEQ ID NO: 51667 - protein, 9 aa, Homo sapiens
  Table A; Target 51667; HLA-C*07:04; MYH4; ENSG00000264424; TAA
SIEIDHTQY

SEQ ID NO: 51668 - protein, 10 aa, Homo sapiens
  Table A; Target 51668; HLA-A*01:01; MYH4; ENSG00000264424; TAA
SIEIDHTQYK

SEQ ID NO: 51669 - protein, 10 aa, Homo sapiens
  Table A; Target 51669; HLA-A*03:02; MYH4; ENSG00000264424; TAA
SIEIDHTQYK

SEQ ID NO: 51670 - protein, 10 aa, Homo sapiens
  Table A; Target 51670; HLA-A*11:01; MYH4; ENSG00000264424; TAA
SIEIDHTQYK

SEQ ID NO: 51671 - protein, 9 aa, Homo sapiens
  Table A; Target 51671; HLA-A*68:02; MYH4; ENSG00000264424; TAA
SIFCIQYNI

SEQ ID NO: 51672 - protein, 9 aa, Homo sapiens
  Table A; Target 51672; HLA-B*13:02; MYH4; ENSG00000264424; TAA
SIFCIQYNI

SEQ ID NO: 51673 - protein, 9 aa, Homo sapiens
  Table A; Target 51673; HLA-A*03:02; MYH4; ENSG00000264424; TAA
SISDNAYQF

SEQ ID NO: 51674 - protein, 9 aa, Homo sapiens
  Table A; Target 51674; HLA-A*11:01; MYH4; ENSG00000264424; TAA
SISDNAYQF

SEQ ID NO: 51675 - protein, 9 aa, Homo sapiens
  Table A; Target 51675; HLA-A*23:01; MYH4; ENSG00000264424; TAA
SISDNAYQF

SEQ ID NO: 51676 - protein, 9 aa, Homo sapiens
  Table A; Target 51676; HLA-A*24:02; MYH4; ENSG00000264424; TAA
SISDNAYQF

SEQ ID NO: 51677 - protein, 9 aa, Homo sapiens
  Table A; Target 51677; HLA-A*26:01; MYH4; ENSG00000264424; TAA
SISDNAYQF

SEQ ID NO: 51678 - protein, 9 aa, Homo sapiens
  Table A; Target 51678; HLA-A*29:02; MYH4; ENSG00000264424; TAA
SISDNAYQF

SEQ ID NO: 51679 - protein, 9 aa, Homo sapiens
  Table A; Target 51679; HLA-A*32:01; MYH4; ENSG00000264424; TAA
SISDNAYQF

SEQ ID NO: 51680 - protein, 9 aa, Homo sapiens
  Table A; Target 51680; HLA-B*15:01; MYH4; ENSG00000264424; TAA
SISDNAYQF

SEQ ID NO: 51681 - protein, 9 aa, Homo sapiens
  Table A; Target 51681; HLA-B*27:05; MYH4; ENSG00000264424; TAA
SISDNAYQF

SEQ ID NO: 51682 - protein, 9 aa, Homo sapiens
  Table A; Target 51682; HLA-B*35:01; MYH4; ENSG00000264424; TAA
SISDNAYQF

SEQ ID NO: 51683 - protein, 9 aa, Homo sapiens
  Table A; Target 51683; HLA-B*37:01; MYH4; ENSG00000264424; TAA
SISDNAYQF

SEQ ID NO: 51684 - protein, 9 aa, Homo sapiens
  Table A; Target 51684; HLA-B*38:01; MYH4; ENSG00000264424; TAA
SISDNAYQF

SEQ ID NO: 51685 - protein, 9 aa, Homo sapiens
  Table A; Target 51685; HLA-B*44:03; MYH4; ENSG00000264424; TAA
SISDNAYQF

SEQ ID NO: 51686 - protein, 9 aa, Homo sapiens
  Table A; Target 51686; HLA-B*58:01; MYH4; ENSG00000264424; TAA
SISDNAYQF

SEQ ID NO: 51687 - protein, 9 aa, Homo sapiens
  Table A; Target 51687; HLA-C*02:02; MYH4; ENSG00000264424; TAA
SISDNAYQF

SEQ ID NO: 51688 - protein, 9 aa, Homo sapiens
  Table A; Target 51688; HLA-C*07:04; MYH4; ENSG00000264424; TAA
SISDNAYQF

SEQ ID NO: 51689 - protein, 9 aa, Homo sapiens
  Table A; Target 51689; HLA-C*07:06; MYH4; ENSG00000264424; TAA
SISDNAYQF

SEQ ID NO: 51690 - protein, 9 aa, Homo sapiens
  Table A; Target 51690; HLA-C*16:04; MYH4; ENSG00000264424; TAA
SISDNAYQF

SEQ ID NO: 51691 - protein, 8 aa, Homo sapiens
  Table A; Target 51691; HLA-A*02:07; MYH4; ENSG00000264424; TAA
SLDHLETL

SEQ ID NO: 51692 - protein, 8 aa, Homo sapiens
  Table A; Target 51692; HLA-C*05:01; MYH4; ENSG00000264424; TAA
SLDHLETL

SEQ ID NO: 51693 - protein, 9 aa, Homo sapiens
  Table A; Target 51693; HLA-A*01:01; MYH4; ENSG00000264424; TAA
SLDHLETLK

SEQ ID NO: 51694 - protein, 9 aa, Homo sapiens
  Table A; Target 51694; HLA-A*03:02; MYH4; ENSG00000264424; TAA
SLDHLETLK

SEQ ID NO: 51695 - protein, 9 aa, Homo sapiens
  Table A; Target 51695; HLA-A*02:01; MYH4; ENSG00000264424; TAA
SLEEAEASL

SEQ ID NO: 51696 - protein, 9 aa, Homo sapiens
  Table A; Target 51696; HLA-B*35:03; MYH4; ENSG00000264424; TAA
SLEEAEASL

SEQ ID NO: 51697 - protein, 9 aa, Homo sapiens
  Table A; Target 51697; HLA-C*01:02; MYH4; ENSG00000264424; TAA
SLEEAEASL

SEQ ID NO: 51698 - protein, 9 aa, Homo sapiens
  Table A; Target 51698; HLA-C*05:01; MYH4; ENSG00000264424; TAA
SLEEAEASL

SEQ ID NO: 51699 - protein, 9 aa, Homo sapiens
  Table A; Target 51699; HLA-A*03:01; MYH4; ENSG00000264424; TAA
SLNSADLLK

SEQ ID NO: 51700 - protein, 9 aa, Homo sapiens
  Table A; Target 51700; HLA-A*03:02; MYH4; ENSG00000264424; TAA
SLNSADLLK

SEQ ID NO: 51701 - protein, 9 aa, Homo sapiens
  Table A; Target 51701; HLA-A*11:01; MYH4; ENSG00000264424; TAA
SLNSADLLK

SEQ ID NO: 51702 - protein, 9 aa, Homo sapiens
  Table A; Target 51702; HLA-B*13:02; MYH4; ENSG00000264424; TAA
SLNSADLLK

SEQ ID NO: 51703 - protein, 11 aa, Homo sapiens
  Table A; Target 51703; HLA-A*02:03; MYH4; ENSG00000264424; TAA
SLNSADLLKSL

SEQ ID NO: 51704 - protein, 11 aa, Homo sapiens
  Table A; Target 51704; HLA-A*02:04; MYH4; ENSG00000264424; TAA
SLNSADLLKSL

SEQ ID NO: 51705 - protein, 9 aa, Homo sapiens
  Table A; Target 51705; HLA-A*02:01; MYH4; ENSG00000264424; TAA
SLSTELFKV

SEQ ID NO: 51706 - protein, 9 aa, Homo sapiens
  Table A; Target 51706; HLA-A*02:03; MYH4; ENSG00000264424; TAA
SLSTELFKV

SEQ ID NO: 51707 - protein, 9 aa, Homo sapiens
  Table A; Target 51707; HLA-A*02:04; MYH4; ENSG00000264424; TAA
SLSTELFKV

SEQ ID NO: 51708 - protein, 9 aa, Homo sapiens
  Table A; Target 51708; HLA-A*02:07; MYH4; ENSG00000264424; TAA
SLSTELFKV

SEQ ID NO: 51709 - protein, 9 aa, Homo sapiens
  Table A; Target 51709; HLA-A*68:02; MYH4; ENSG00000264424; TAA
SLSTELFKV

SEQ ID NO: 51710 - protein, 9 aa, Homo sapiens
  Table A; Target 51710; HLA-B*13:02; MYH4; ENSG00000264424; TAA
SLSTELFKV

SEQ ID NO: 51711 - protein, 9 aa, Homo sapiens
  Table A; Target 51711; HLA-B*55:01; MYH4; ENSG00000264424; TAA
SLSTELFKV

SEQ ID NO: 51712 - protein, 10 aa, Homo sapiens
  Table A; Target 51712; HLA-A*03:01; MYH4; ENSG00000264424; TAA
SLSTELFKVK

SEQ ID NO: 51713 - protein, 10 aa, Homo sapiens
  Table A; Target 51713; HLA-A*03:02; MYH4; ENSG00000264424; TAA
SLSTELFKVK

SEQ ID NO: 51714 - protein, 10 aa, Homo sapiens
  Table A; Target 51714; HLA-A*11:01; MYH4; ENSG00000264424; TAA
SLSTELFKVK

SEQ ID NO: 51715 - protein, 9 aa, Homo sapiens
  Table A; Target 51715; HLA-A*02:03; MYH4; ENSG00000264424; TAA
SLVHYAGTV

SEQ ID NO: 51716 - protein, 11 aa, Homo sapiens
  Table A; Target 51716; HLA-C*07:01; MYH4; ENSG00000264424; TAA
SLVHYAGTVDY

SEQ ID NO: 51717 - protein, 9 aa, Homo sapiens
  Table A; Target 51717; HLA-A*03:02; MYH4; ENSG00000264424; TAA
SMNPPKYDK

SEQ ID NO: 51718 - protein, 9 aa, Homo sapiens
  Table A; Target 51718; HLA-A*11:01; MYH4; ENSG00000264424; TAA
SMNPPKYDK

SEQ ID NO: 51719 - protein, 8 aa, Homo sapiens
  Table A; Target 51719; HLA-A*03:02; MYH4; ENSG00000264424; TAA
SNMETVSK

SEQ ID NO: 51720 - protein, 8 aa, Homo sapiens
  Table A; Target 51720; HLA-A*11:01; MYH4; ENSG00000264424; TAA
SNMETVSK

SEQ ID NO: 51721 - protein, 8 aa, Homo sapiens
  Table A; Target 51721; HLA-A*33:01; MYH4; ENSG00000264424; TAA
SNMETVSK

SEQ ID NO: 51722 - protein, 8 aa, Homo sapiens
  Table A; Target 51722; HLA-A*33:03; MYH4; ENSG00000264424; TAA
SNMETVSK

SEQ ID NO: 51723 - protein, 8 aa, Homo sapiens
  Table A; Target 51723; HLA-B*27:02; MYH4; ENSG00000264424; TAA
SNMETVSK

SEQ ID NO: 51724 - protein, 9 aa, Homo sapiens
  Table A; Target 51724; HLA-B*55:01; MYH4; ENSG00000264424; TAA
SNMETVSKA

SEQ ID NO: 51725 - protein, 10 aa, Homo sapiens
  Table A; Target 51725; HLA-A*03:02; MYH4; ENSG00000264424; TAA
SNMETVSKAK

SEQ ID NO: 51726 - protein, 10 aa, Homo sapiens
  Table A; Target 51726; HLA-C*07:06; MYH4; ENSG00000264424; TAA
SNMETVSKAK

SEQ ID NO: 51727 - protein, 10 aa, Homo sapiens
  Table A; Target 51727; HLA-B*13:02; MYH4; ENSG00000264424; TAA
SQIQGEMEDI

SEQ ID NO: 51728 - protein, 8 aa, Homo sapiens
  Table A; Target 51728; HLA-B*08:01; MYH4; ENSG00000264424; TAA
SQKESRSL

SEQ ID NO: 51729 - protein, 8 aa, Homo sapiens
  Table A; Target 51729; HLA-B*15:01; MYH4; ENSG00000264424; TAA
SQKESRSL

SEQ ID NO: 51730 - protein, 9 aa, Homo sapiens
  Table A; Target 51730; HLA-A*11:01; MYH4; ENSG00000264424; TAA
SQVNKLRVK

SEQ ID NO: 51731 - protein, 9 aa, Homo sapiens
  Table A; Target 51731; HLA-C*16:01; MYH4; ENSG00000264424; TAA
SQVNKLRVK

SEQ ID NO: 51732 - protein, 9 aa, Homo sapiens
  Table A; Target 51732; HLA-B*27:05; MYH4; ENSG00000264424; TAA
SRAKAEKQR

SEQ ID NO: 51733 - protein, 9 aa, Homo sapiens
  Table A; Target 51733; HLA-B*27:05; MYH4; ENSG00000264424; TAA
SRNDALRIK

SEQ ID NO: 51734 - protein, 9 aa, Homo sapiens
  Table A; Target 51734; HLA-C*06:02; MYH4; ENSG00000264424; TAA
SRNDALRIK

SEQ ID NO: 51735 - protein, 10 aa, Homo sapiens
  Table A; Target 51735; HLA-B*27:05; MYH4; ENSG00000264424; TAA
SRNDALRIKK

SEQ ID NO: 51736 - protein, 9 aa, Homo sapiens
  Table A; Target 51736; HLA-B*27:02; MYH4; ENSG00000264424; TAA
SRSLSTELF

SEQ ID NO: 51737 - protein, 9 aa, Homo sapiens
  Table A; Target 51737; HLA-B*27:05; MYH4; ENSG00000264424; TAA
SRSLSTELF

SEQ ID NO: 51738 - protein, 9 aa, Homo sapiens
  Table A; Target 51738; HLA-B*38:01; MYH4; ENSG00000264424; TAA
SRSLSTELF

SEQ ID NO: 51739 - protein, 9 aa, Homo sapiens
  Table A; Target 51739; HLA-C*16:04; MYH4; ENSG00000264424; TAA
SRSLSTELF

SEQ ID NO: 51740 - protein, 8 aa, Homo sapiens
  Table A; Target 51740; HLA-C*05:01; MYH4; ENSG00000264424; TAA
SSDSEMAI

SEQ ID NO: 51741 - protein, 9 aa, Homo sapiens
  Table A; Target 51741; HLA-A*01:01; MYH4; ENSG00000264424; TAA
SSDSEMAIF

SEQ ID NO: 51742 - protein, 9 aa, Homo sapiens
  Table A; Target 51742; HLA-C*05:01; MYH4; ENSG00000264424; TAA
SSDSEMAIF

SEQ ID NO: 51743 - protein, 9 aa, Homo sapiens
  Table A; Target 51743; HLA-A*25:01; MYH4; ENSG00000264424; TAA
SSFQTVSAL

SEQ ID NO: 51744 - protein, 9 aa, Homo sapiens
  Table A; Target 51744; HLA-A*30:01; MYH4; ENSG00000264424; TAA
SSFQTVSAL

SEQ ID NO: 51745 - protein, 9 aa, Homo sapiens
  Table A; Target 51745; HLA-B*08:01; MYH4; ENSG00000264424; TAA
SSFQTVSAL

SEQ ID NO: 51746 - protein, 9 aa, Homo sapiens
  Table A; Target 51746; HLA-B*15:01; MYH4; ENSG00000264424; TAA
SSFQTVSAL

SEQ ID NO: 51747 - protein, 9 aa, Homo sapiens
  Table A; Target 51747; HLA-B*15:03; MYH4; ENSG00000264424; TAA
SSFQTVSAL

SEQ ID NO: 51748 - protein, 9 aa, Homo sapiens
  Table A; Target 51748; HLA-B*27:05; MYH4; ENSG00000264424; TAA
SSFQTVSAL

SEQ ID NO: 51749 - protein, 9 aa, Homo sapiens
  Table A; Target 51749; HLA-B*39:01; MYH4; ENSG00000264424; TAA
SSFQTVSAL

SEQ ID NO: 51750 - protein, 9 aa, Homo sapiens
  Table A; Target 51750; HLA-B*40:01; MYH4; ENSG00000264424; TAA
SSFQTVSAL

SEQ ID NO: 51751 - protein, 9 aa, Homo sapiens
  Table A; Target 51751; HLA-B*40:02; MYH4; ENSG00000264424; TAA
SSFQTVSAL

SEQ ID NO: 51752 - protein, 9 aa, Homo sapiens
  Table A; Target 51752; HLA-B*46:01; MYH4; ENSG00000264424; TAA
SSFQTVSAL

SEQ ID NO: 51753 - protein, 9 aa, Homo sapiens
  Table A; Target 51753; HLA-B*58:01; MYH4; ENSG00000264424; TAA
SSFQTVSAL

SEQ ID NO: 51754 - protein, 9 aa, Homo sapiens
  Table A; Target 51754; HLA-C*01:02; MYH4; ENSG00000264424; TAA
SSFQTVSAL

SEQ ID NO: 51755 - protein, 9 aa, Homo sapiens
  Table A; Target 51755; HLA-C*02:02; MYH4; ENSG00000264424; TAA
SSFQTVSAL

SEQ ID NO: 51756 - protein, 9 aa, Homo sapiens
  Table A; Target 51756; HLA-C*03:03; MYH4; ENSG00000264424; TAA
SSFQTVSAL

SEQ ID NO: 51757 - protein, 9 aa, Homo sapiens
  Table A; Target 51757; HLA-C*03:04; MYH4; ENSG00000264424; TAA
SSFQTVSAL

SEQ ID NO: 51758 - protein, 9 aa, Homo sapiens
  Table A; Target 51758; HLA-C*05:01; MYH4; ENSG00000264424; TAA
SSFQTVSAL

SEQ ID NO: 51759 - protein, 9 aa, Homo sapiens
  Table A; Target 51759; HLA-C*07:06; MYH4; ENSG00000264424; TAA
SSFQTVSAL

SEQ ID NO: 51760 - protein, 9 aa, Homo sapiens
  Table A; Target 51760; HLA-C*12:03; MYH4; ENSG00000264424; TAA
SSFQTVSAL

SEQ ID NO: 51761 - protein, 9 aa, Homo sapiens
  Table A; Target 51761; HLA-C*14:02; MYH4; ENSG00000264424; TAA
SSFQTVSAL

SEQ ID NO: 51762 - protein, 9 aa, Homo sapiens
  Table A; Target 51762; HLA-C*16:04; MYH4; ENSG00000264424; TAA
SSFQTVSAL

SEQ ID NO: 51763 - protein, 10 aa, Homo sapiens
  Table A; Target 51763; HLA-B*57:01; MYH4; ENSG00000264424; TAA
SSFQTVSALF

SEQ ID NO: 51764 - protein, 11 aa, Homo sapiens
  Table A; Target 51764; HLA-A*11:01; MYH4; ENSG00000264424; TAA
SSFQTVSALFR

SEQ ID NO: 51765 - protein, 11 aa, Homo sapiens
  Table A; Target 51765; HLA-A*31:01; MYH4; ENSG00000264424; TAA
SSFQTVSALFR

SEQ ID NO: 51766 - protein, 11 aa, Homo sapiens
  Table A; Target 51766; HLA-A*33:01; MYH4; ENSG00000264424; TAA
SSFQTVSALFR

SEQ ID NO: 51767 - protein, 11 aa, Homo sapiens
  Table A; Target 51767; HLA-A*68:01; MYH4; ENSG00000264424; TAA
SSFQTVSALFR

SEQ ID NO: 51768 - protein, 11 aa, Homo sapiens
  Table A; Target 51768; HLA-C*07:06; MYH4; ENSG00000264424; TAA
SSFQTVSALFR

SEQ ID NO: 51769 - protein, 11 aa, Homo sapiens
  Table A; Target 51769; HLA-A*01:01; MYH4; ENSG00000264424; TAA
STELFKVKNAY

SEQ ID NO: 51770 - protein, 11 aa, Homo sapiens
  Table A; Target 51770; HLA-A*30:02; MYH4; ENSG00000264424; TAA
STELFKVKNAY

SEQ ID NO: 51771 - protein, 8 aa, Homo sapiens
  Table A; Target 51771; HLA-A*31:01; MYH4; ENSG00000264424; TAA
STHPHFVR

SEQ ID NO: 51772 - protein, 11 aa, Homo sapiens
  Table A; Target 51772; HLA-A*31:01; MYH4; ENSG00000264424; TAA
STLAHALQSAR

SEQ ID NO: 51773 - protein, 11 aa, Homo sapiens
  Table A; Target 51773; HLA-A*33:01; MYH4; ENSG00000264424; TAA
STLAHALQSAR

SEQ ID NO: 51774 - protein, 11 aa, Homo sapiens
  Table A; Target 51774; HLA-A*33:03; MYH4; ENSG00000264424; TAA
STLAHALQSAR

SEQ ID NO: 51775 - protein, 10 aa, Homo sapiens
  Table A; Target 51775; HLA-A*11:01; MYH4; ENSG00000264424; TAA
STLDAEIRSR

SEQ ID NO: 51776 - protein, 10 aa, Homo sapiens
  Table A; Target 51776; HLA-A*25:01; MYH4; ENSG00000264424; TAA
STLDAEIRSR

SEQ ID NO: 51777 - protein, 10 aa, Homo sapiens
  Table A; Target 51777; HLA-A*31:01; MYH4; ENSG00000264424; TAA
STLDAEIRSR

SEQ ID NO: 51778 - protein, 10 aa, Homo sapiens
  Table A; Target 51778; HLA-A*33:01; MYH4; ENSG00000264424; TAA
STLDAEIRSR

SEQ ID NO: 51779 - protein, 10 aa, Homo sapiens
  Table A; Target 51779; HLA-A*33:03; MYH4; ENSG00000264424; TAA
STLDAEIRSR

SEQ ID NO: 51780 - protein, 10 aa, Homo sapiens
  Table A; Target 51780; HLA-A*68:01; MYH4; ENSG00000264424; TAA
STLDAEIRSR

SEQ ID NO: 51781 - protein, 10 aa, Homo sapiens
  Table A; Target 51781; HLA-B*57:01; MYH4; ENSG00000264424; TAA
STLDAEIRSR

SEQ ID NO: 51782 - protein, 10 aa, Homo sapiens
  Table A; Target 51782; HLA-C*07:06; MYH4; ENSG00000264424; TAA
STLDAEIRSR

SEQ ID NO: 51783 - protein, 9 aa, Homo sapiens
  Table A; Target 51783; HLA-A*03:02; MYH4; ENSG00000264424; TAA
STMDTENDK

SEQ ID NO: 51784 - protein, 9 aa, Homo sapiens
  Table A; Target 51784; HLA-A*11:01; MYH4; ENSG00000264424; TAA
STMDTENDK

SEQ ID NO: 51785 - protein, 9 aa, Homo sapiens
  Table A; Target 51785; HLA-A*02:01; MYH4; ENSG00000264424; TAA
SVAELGEQI

SEQ ID NO: 51786 - protein, 9 aa, Homo sapiens
  Table A; Target 51786; HLA-A*02:03; MYH4; ENSG00000264424; TAA
SVAELGEQI

SEQ ID NO: 51787 - protein, 9 aa, Homo sapiens
  Table A; Target 51787; HLA-A*25:01; MYH4; ENSG00000264424; TAA
SVAELGEQI

SEQ ID NO: 51788 - protein, 9 aa, Homo sapiens
  Table A; Target 51788; HLA-A*26:01; MYH4; ENSG00000264424; TAA
SVAELGEQI

SEQ ID NO: 51789 - protein, 9 aa, Homo sapiens
  Table A; Target 51789; HLA-A*68:02; MYH4; ENSG00000264424; TAA
SVAELGEQI

SEQ ID NO: 51790 - protein, 9 aa, Homo sapiens
  Table A; Target 51790; HLA-B*13:02; MYH4; ENSG00000264424; TAA
SVAELGEQI

SEQ ID NO: 51791 - protein, 9 aa, Homo sapiens
  Table A; Target 51791; HLA-B*38:01; MYH4; ENSG00000264424; TAA
SVAELGEQI

SEQ ID NO: 51792 - protein, 9 aa, Homo sapiens
  Table A; Target 51792; HLA-B*39:01; MYH4; ENSG00000264424; TAA
SVAELGEQI

SEQ ID NO: 51793 - protein, 9 aa, Homo sapiens
  Table A; Target 51793; HLA-C*02:02; MYH4; ENSG00000264424; TAA
SVAELGEQI

SEQ ID NO: 51794 - protein, 9 aa, Homo sapiens
  Table A; Target 51794; HLA-C*05:01; MYH4; ENSG00000264424; TAA
SVAELGEQI

SEQ ID NO: 51795 - protein, 9 aa, Homo sapiens
  Table A; Target 51795; HLA-C*07:06; MYH4; ENSG00000264424; TAA
SVAELGEQI

SEQ ID NO: 51796 - protein, 8 aa, Homo sapiens
  Table A; Target 51796; HLA-A*03:02; MYH4; ENSG00000264424; TAA
SVFVVDPK

SEQ ID NO: 51797 - protein, 8 aa, Homo sapiens
  Table A; Target 51797; HLA-A*11:01; MYH4; ENSG00000264424; TAA
SVFVVDPK

SEQ ID NO: 51798 - protein, 11 aa, Homo sapiens
  Table A; Target 51798; HLA-A*25:01; MYH4; ENSG00000264424; TAA
SVFVVDPKESY

SEQ ID NO: 51799 - protein, 11 aa, Homo sapiens
  Table A; Target 51799; HLA-A*26:01; MYH4; ENSG00000264424; TAA
SVFVVDPKESY

SEQ ID NO: 51800 - protein, 11 aa, Homo sapiens
  Table A; Target 51800; HLA-A*29:02; MYH4; ENSG00000264424; TAA
SVFVVDPKESY

SEQ ID NO: 51801 - protein, 11 aa, Homo sapiens
  Table A; Target 51801; HLA-A*30:02; MYH4; ENSG00000264424; TAA
SVFVVDPKESY

SEQ ID NO: 51802 - protein, 11 aa, Homo sapiens
  Table A; Target 51802; HLA-A*32:01; MYH4; ENSG00000264424; TAA
SVFVVDPKESY

SEQ ID NO: 51803 - protein, 11 aa, Homo sapiens
  Table A; Target 51803; HLA-B*15:01; MYH4; ENSG00000264424; TAA
SVFVVDPKESY

SEQ ID NO: 51804 - protein, 11 aa, Homo sapiens
  Table A; Target 51804; HLA-B*35:01; MYH4; ENSG00000264424; TAA
SVFVVDPKESY

SEQ ID NO: 51805 - protein, 11 aa, Homo sapiens
  Table A; Target 51805; HLA-B*46:01; MYH4; ENSG00000264424; TAA
SVFVVDPKESY

SEQ ID NO: 51806 - protein, 8 aa, Homo sapiens
  Table A; Target 51806; HLA-A*24:02; MYH4; ENSG00000264424; TAA
SYHIFYQI

SEQ ID NO: 51807 - protein, 9 aa, Homo sapiens
  Table A; Target 51807; HLA-A*24:02; MYH4; ENSG00000264424; TAA
SYHIFYQIL

SEQ ID NO: 51808 - protein, 8 aa, Homo sapiens
  Table A; Target 51808; HLA-C*07:01; MYH4; ENSG00000264424; TAA
SYVKAIVQ

SEQ ID NO: 51809 - protein, 10 aa, Homo sapiens
  Table A; Target 51809; HLA-A*31:01; MYH4; ENSG00000264424; TAA
SYVKAIVQSR

SEQ ID NO: 51810 - protein, 10 aa, Homo sapiens
  Table A; Target 51810; HLA-A*33:01; MYH4; ENSG00000264424; TAA
SYVKAIVQSR

SEQ ID NO: 51811 - protein, 10 aa, Homo sapiens
  Table A; Target 51811; HLA-A*33:03; MYH4; ENSG00000264424; TAA
SYVKAIVQSR

SEQ ID NO: 51812 - protein, 10 aa, Homo sapiens
  Table A; Target 51812; HLA-C*07:06; MYH4; ENSG00000264424; TAA
SYVKAIVQSR

SEQ ID NO: 51813 - protein, 8 aa, Homo sapiens
  Table A; Target 51813; HLA-C*06:02; MYH4; ENSG00000264424; TAA
TAAALRKK

SEQ ID NO: 51814 - protein, 8 aa, Homo sapiens
  Table A; Target 51814; HLA-B*08:01; MYH4; ENSG00000264424; TAA
TADEKVAI

SEQ ID NO: 51815 - protein, 8 aa, Homo sapiens
  Table A; Target 51815; HLA-C*05:01; MYH4; ENSG00000264424; TAA
TADEKVAI

SEQ ID NO: 51816 - protein, 9 aa, Homo sapiens
  Table A; Target 51816; HLA-A*01:01; MYH4; ENSG00000264424; TAA
TADEKVAIY

SEQ ID NO: 51817 - protein, 9 aa, Homo sapiens
  Table A; Target 51817; HLA-A*03:02; MYH4; ENSG00000264424; TAA
TADEKVAIY

SEQ ID NO: 51818 - protein, 9 aa, Homo sapiens
  Table A; Target 51818; HLA-A*11:01; MYH4; ENSG00000264424; TAA
TADEKVAIY

SEQ ID NO: 51819 - protein, 9 aa, Homo sapiens
  Table A; Target 51819; HLA-A*25:01; MYH4; ENSG00000264424; TAA
TADEKVAIY

SEQ ID NO: 51820 - protein, 9 aa, Homo sapiens
  Table A; Target 51820; HLA-A*26:01; MYH4; ENSG00000264424; TAA
TADEKVAIY

SEQ ID NO: 51821 - protein, 9 aa, Homo sapiens
  Table A; Target 51821; HLA-A*29:02; MYH4; ENSG00000264424; TAA
TADEKVAIY

SEQ ID NO: 51822 - protein, 9 aa, Homo sapiens
  Table A; Target 51822; HLA-A*30:02; MYH4; ENSG00000264424; TAA
TADEKVAIY

SEQ ID NO: 51823 - protein, 9 aa, Homo sapiens
  Table A; Target 51823; HLA-A*32:01; MYH4; ENSG00000264424; TAA
TADEKVAIY

SEQ ID NO: 51824 - protein, 9 aa, Homo sapiens
  Table A; Target 51824; HLA-A*33:03; MYH4; ENSG00000264424; TAA
TADEKVAIY

SEQ ID NO: 51825 - protein, 9 aa, Homo sapiens
  Table A; Target 51825; HLA-A*68:01; MYH4; ENSG00000264424; TAA
TADEKVAIY

SEQ ID NO: 51826 - protein, 9 aa, Homo sapiens
  Table A; Target 51826; HLA-B*15:01; MYH4; ENSG00000264424; TAA
TADEKVAIY

SEQ ID NO: 51827 - protein, 9 aa, Homo sapiens
  Table A; Target 51827; HLA-B*15:03; MYH4; ENSG00000264424; TAA
TADEKVAIY

SEQ ID NO: 51828 - protein, 9 aa, Homo sapiens
  Table A; Target 51828; HLA-B*18:01; MYH4; ENSG00000264424; TAA
TADEKVAIY

SEQ ID NO: 51829 - protein, 9 aa, Homo sapiens
  Table A; Target 51829; HLA-B*27:05; MYH4; ENSG00000264424; TAA
TADEKVAIY

SEQ ID NO: 51830 - protein, 9 aa, Homo sapiens
  Table A; Target 51830; HLA-B*35:01; MYH4; ENSG00000264424; TAA
TADEKVAIY

SEQ ID NO: 51831 - protein, 9 aa, Homo sapiens
  Table A; Target 51831; HLA-B*35:03; MYH4; ENSG00000264424; TAA
TADEKVAIY

SEQ ID NO: 51832 - protein, 9 aa, Homo sapiens
  Table A; Target 51832; HLA-B*38:01; MYH4; ENSG00000264424; TAA
TADEKVAIY

SEQ ID NO: 51833 - protein, 9 aa, Homo sapiens
  Table A; Target 51833; HLA-B*39:01; MYH4; ENSG00000264424; TAA
TADEKVAIY

SEQ ID NO: 51834 - protein, 9 aa, Homo sapiens
  Table A; Target 51834; HLA-B*44:03; MYH4; ENSG00000264424; TAA
TADEKVAIY

SEQ ID NO: 51835 - protein, 9 aa, Homo sapiens
  Table A; Target 51835; HLA-B*46:01; MYH4; ENSG00000264424; TAA
TADEKVAIY

SEQ ID NO: 51836 - protein, 9 aa, Homo sapiens
  Table A; Target 51836; HLA-B*55:01; MYH4; ENSG00000264424; TAA
TADEKVAIY

SEQ ID NO: 51837 - protein, 9 aa, Homo sapiens
  Table A; Target 51837; HLA-B*58:01; MYH4; ENSG00000264424; TAA
TADEKVAIY

SEQ ID NO: 51838 - protein, 9 aa, Homo sapiens
  Table A; Target 51838; HLA-C*01:02; MYH4; ENSG00000264424; TAA
TADEKVAIY

SEQ ID NO: 51839 - protein, 9 aa, Homo sapiens
  Table A; Target 51839; HLA-C*02:02; MYH4; ENSG00000264424; TAA
TADEKVAIY

SEQ ID NO: 51840 - protein, 9 aa, Homo sapiens
  Table A; Target 51840; HLA-C*03:03; MYH4; ENSG00000264424; TAA
TADEKVAIY

SEQ ID NO: 51841 - protein, 9 aa, Homo sapiens
  Table A; Target 51841; HLA-C*03:04; MYH4; ENSG00000264424; TAA
TADEKVAIY

SEQ ID NO: 51842 - protein, 9 aa, Homo sapiens
  Table A; Target 51842; HLA-C*04:01; MYH4; ENSG00000264424; TAA
TADEKVAIY

SEQ ID NO: 51843 - protein, 9 aa, Homo sapiens
  Table A; Target 51843; HLA-C*05:01; MYH4; ENSG00000264424; TAA
TADEKVAIY

SEQ ID NO: 51844 - protein, 9 aa, Homo sapiens
  Table A; Target 51844; HLA-C*07:01; MYH4; ENSG00000264424; TAA
TADEKVAIY

SEQ ID NO: 51845 - protein, 9 aa, Homo sapiens
  Table A; Target 51845; HLA-C*07:04; MYH4; ENSG00000264424; TAA
TADEKVAIY

SEQ ID NO: 51846 - protein, 9 aa, Homo sapiens
  Table A; Target 51846; HLA-C*07:06; MYH4; ENSG00000264424; TAA
TADEKVAIY

SEQ ID NO: 51847 - protein, 9 aa, Homo sapiens
  Table A; Target 51847; HLA-C*12:03; MYH4; ENSG00000264424; TAA
TADEKVAIY

SEQ ID NO: 51848 - protein, 9 aa, Homo sapiens
  Table A; Target 51848; HLA-C*14:02; MYH4; ENSG00000264424; TAA
TADEKVAIY

SEQ ID NO: 51849 - protein, 9 aa, Homo sapiens
  Table A; Target 51849; HLA-C*16:01; MYH4; ENSG00000264424; TAA
TADEKVAIY

SEQ ID NO: 51850 - protein, 9 aa, Homo sapiens
  Table A; Target 51850; HLA-C*16:02; MYH4; ENSG00000264424; TAA
TADEKVAIY

SEQ ID NO: 51851 - protein, 9 aa, Homo sapiens
  Table A; Target 51851; HLA-C*16:04; MYH4; ENSG00000264424; TAA
TADEKVAIY

SEQ ID NO: 51852 - protein, 10 aa, Homo sapiens
  Table A; Target 51852; HLA-A*03:01; MYH4; ENSG00000264424; TAA
TADEKVAIYK

SEQ ID NO: 51853 - protein, 10 aa, Homo sapiens
  Table A; Target 51853; HLA-A*03:02; MYH4; ENSG00000264424; TAA
TADEKVAIYK

SEQ ID NO: 51854 - protein, 10 aa, Homo sapiens
  Table A; Target 51854; HLA-A*11:01; MYH4; ENSG00000264424; TAA
TADEKVAIYK

SEQ ID NO: 51855 - protein, 10 aa, Homo sapiens
  Table A; Target 51855; HLA-A*68:01; MYH4; ENSG00000264424; TAA
TADEKVAIYK

SEQ ID NO: 51856 - protein, 10 aa, Homo sapiens
  Table A; Target 51856; HLA-B*27:02; MYH4; ENSG00000264424; TAA
TADEKVAIYK

SEQ ID NO: 51857 - protein, 10 aa, Homo sapiens
  Table A; Target 51857; HLA-C*07:06; MYH4; ENSG00000264424; TAA
TADEKVAIYK

SEQ ID NO: 51858 - protein, 11 aa, Homo sapiens
  Table A; Target 51858; HLA-A*02:07; MYH4; ENSG00000264424; TAA
TADEKVAIYKL

SEQ ID NO: 51859 - protein, 11 aa, Homo sapiens
  Table A; Target 51859; HLA-B*38:01; MYH4; ENSG00000264424; TAA
TADEKVAIYKL

SEQ ID NO: 51860 - protein, 11 aa, Homo sapiens
  Table A; Target 51860; HLA-C*05:01; MYH4; ENSG00000264424; TAA
TADEKVAIYKL

SEQ ID NO: 51861 - protein, 11 aa, Homo sapiens
  Table A; Target 51861; HLA-B*27:02; MYH4; ENSG00000264424; TAA
TDAAMMAEELK

SEQ ID NO: 51862 - protein, 10 aa, Homo sapiens
  Table A; Target 51862; HLA-B*37:01; MYH4; ENSG00000264424; TAA
TDAIQRTEEL

SEQ ID NO: 51863 - protein, 10 aa, Homo sapiens
  Table A; Target 51863; HLA-A*30:01; MYH4; ENSG00000264424; TAA
TDISQIQGEM

SEQ ID NO: 51864 - protein, 8 aa, Homo sapiens
  Table A; Target 51864; HLA-B*37:01; MYH4; ENSG00000264424; TAA
TDSAVDIL

SEQ ID NO: 51865 - protein, 10 aa, Homo sapiens
  Table A; Target 51865; HLA-B*27:02; MYH4; ENSG00000264424; TAA
TDSAVDILGF

SEQ ID NO: 51866 - protein, 10 aa, Homo sapiens
  Table A; Target 51866; HLA-B*37:01; MYH4; ENSG00000264424; TAA
TDSAVDILGF

SEQ ID NO: 51867 - protein, 10 aa, Homo sapiens
  Table A; Target 51867; HLA-B*38:01; MYH4; ENSG00000264424; TAA
TDSAVDILGF

SEQ ID NO: 51868 - protein, 10 aa, Homo sapiens
  Table A; Target 51868; HLA-B*44:02; MYH4; ENSG00000264424; TAA
TDSAVDILGF

SEQ ID NO: 51869 - protein, 10 aa, Homo sapiens
  Table A; Target 51869; HLA-C*07:01; MYH4; ENSG00000264424; TAA
TDSAVDILGF

SEQ ID NO: 51870 - protein, 8 aa, Homo sapiens
  Table A; Target 51870; HLA-A*03:02; MYH4; ENSG00000264424; TAA
TDTSFKNK

SEQ ID NO: 51871 - protein, 9 aa, Homo sapiens
  Table A; Target 51871; HLA-B*37:01; MYH4; ENSG00000264424; TAA
TDTSFKNKL

SEQ ID NO: 51872 - protein, 9 aa, Homo sapiens
  Table A; Target 51872; HLA-C*16:02; MYH4; ENSG00000264424; TAA
TDTSFKNKL

SEQ ID NO: 51873 - protein, 10 aa, Homo sapiens
  Table A; Target 51873; HLA-B*44:02; MYH4; ENSG00000264424; TAA
TDTSFKNKLY

SEQ ID NO: 51874 - protein, 10 aa, Homo sapiens
  Table A; Target 51874; HLA-C*06:02; MYH4; ENSG00000264424; TAA
TDTSFKNKLY

SEQ ID NO: 51875 - protein, 10 aa, Homo sapiens
  Table A; Target 51875; HLA-C*07:01; MYH4; ENSG00000264424; TAA
TDTSFKNKLY

SEQ ID NO: 51876 - protein, 10 aa, Homo sapiens
  Table A; Target 51876; HLA-C*12:03; MYH4; ENSG00000264424; TAA
TDTSFKNKLY

SEQ ID NO: 51877 - protein, 10 aa, Homo sapiens
  Table A; Target 51877; HLA-C*16:02; MYH4; ENSG00000264424; TAA
TDTSFKNKLY

SEQ ID NO: 51878 - protein, 9 aa, Homo sapiens
  Table A; Target 51878; HLA-A*02:01; MYH4; ENSG00000264424; TAA
TEAGATVTV

SEQ ID NO: 51879 - protein, 9 aa, Homo sapiens
  Table A; Target 51879; HLA-A*02:03; MYH4; ENSG00000264424; TAA
TEAGATVTV

SEQ ID NO: 51880 - protein, 9 aa, Homo sapiens
  Table A; Target 51880; HLA-A*30:01; MYH4; ENSG00000264424; TAA
TEAGATVTV

SEQ ID NO: 51881 - protein, 9 aa, Homo sapiens
  Table A; Target 51881; HLA-A*68:02; MYH4; ENSG00000264424; TAA
TEAGATVTV

SEQ ID NO: 51882 - protein, 9 aa, Homo sapiens
  Table A; Target 51882; HLA-B*13:02; MYH4; ENSG00000264424; TAA
TEAGATVTV

SEQ ID NO: 51883 - protein, 9 aa, Homo sapiens
  Table A; Target 51883; HLA-B*18:01; MYH4; ENSG00000264424; TAA
TEAGATVTV

SEQ ID NO: 51884 - protein, 9 aa, Homo sapiens
  Table A; Target 51884; HLA-B*27:05; MYH4; ENSG00000264424; TAA
TEAGATVTV

SEQ ID NO: 51885 - protein, 9 aa, Homo sapiens
  Table A; Target 51885; HLA-B*35:03; MYH4; ENSG00000264424; TAA
TEAGATVTV

SEQ ID NO: 51886 - protein, 9 aa, Homo sapiens
  Table A; Target 51886; HLA-B*37:01; MYH4; ENSG00000264424; TAA
TEAGATVTV

SEQ ID NO: 51887 - protein, 9 aa, Homo sapiens
  Table A; Target 51887; HLA-B*38:01; MYH4; ENSG00000264424; TAA
TEAGATVTV

SEQ ID NO: 51888 - protein, 9 aa, Homo sapiens
  Table A; Target 51888; HLA-B*39:01; MYH4; ENSG00000264424; TAA
TEAGATVTV

SEQ ID NO: 51889 - protein, 9 aa, Homo sapiens
  Table A; Target 51889; HLA-B*40:01; MYH4; ENSG00000264424; TAA
TEAGATVTV

SEQ ID NO: 51890 - protein, 9 aa, Homo sapiens
  Table A; Target 51890; HLA-B*40:02; MYH4; ENSG00000264424; TAA
TEAGATVTV

SEQ ID NO: 51891 - protein, 9 aa, Homo sapiens
  Table A; Target 51891; HLA-B*44:02; MYH4; ENSG00000264424; TAA
TEAGATVTV

SEQ ID NO: 51892 - protein, 9 aa, Homo sapiens
  Table A; Target 51892; HLA-B*44:03; MYH4; ENSG00000264424; TAA
TEAGATVTV

SEQ ID NO: 51893 - protein, 9 aa, Homo sapiens
  Table A; Target 51893; HLA-B*49:01; MYH4; ENSG00000264424; TAA
TEAGATVTV

SEQ ID NO: 51894 - protein, 9 aa, Homo sapiens
  Table A; Target 51894; HLA-B*51:01; MYH4; ENSG00000264424; TAA
TEAGATVTV

SEQ ID NO: 51895 - protein, 9 aa, Homo sapiens
  Table A; Target 51895; HLA-B*55:01; MYH4; ENSG00000264424; TAA
TEAGATVTV

SEQ ID NO: 51896 - protein, 9 aa, Homo sapiens
  Table A; Target 51896; HLA-C*02:02; MYH4; ENSG00000264424; TAA
TEAGATVTV

SEQ ID NO: 51897 - protein, 9 aa, Homo sapiens
  Table A; Target 51897; HLA-C*03:04; MYH4; ENSG00000264424; TAA
TEAGATVTV

SEQ ID NO: 51898 - protein, 9 aa, Homo sapiens
  Table A; Target 51898; HLA-C*04:01; MYH4; ENSG00000264424; TAA
TEAGATVTV

SEQ ID NO: 51899 - protein, 9 aa, Homo sapiens
  Table A; Target 51899; HLA-C*06:02; MYH4; ENSG00000264424; TAA
TEAGATVTV

SEQ ID NO: 51900 - protein, 9 aa, Homo sapiens
  Table A; Target 51900; HLA-C*07:04; MYH4; ENSG00000264424; TAA
TEAGATVTV

SEQ ID NO: 51901 - protein, 9 aa, Homo sapiens
  Table A; Target 51901; HLA-C*12:03; MYH4; ENSG00000264424; TAA
TEAGATVTV

SEQ ID NO: 51902 - protein, 9 aa, Homo sapiens
  Table A; Target 51902; HLA-C*16:02; MYH4; ENSG00000264424; TAA
TEAGATVTV

SEQ ID NO: 51903 - protein, 9 aa, Homo sapiens
  Table A; Target 51903; HLA-C*16:04; MYH4; ENSG00000264424; TAA
TEAGATVTV

SEQ ID NO: 51904 - protein, 10 aa, Homo sapiens
  Table A; Target 51904; HLA-A*30:01; MYH4; ENSG00000264424; TAA
TEAGATVTVK

SEQ ID NO: 51905 - protein, 10 aa, Homo sapiens
  Table A; Target 51905; HLA-A*68:01; MYH4; ENSG00000264424; TAA
TEAGATVTVK

SEQ ID NO: 51906 - protein, 10 aa, Homo sapiens
  Table A; Target 51906; HLA-B*27:02; MYH4; ENSG00000264424; TAA
TEAGATVTVK

SEQ ID NO: 51907 - protein, 10 aa, Homo sapiens
  Table A; Target 51907; HLA-B*27:05; MYH4; ENSG00000264424; TAA
TEAGATVTVK

SEQ ID NO: 51908 - protein, 10 aa, Homo sapiens
  Table A; Target 51908; HLA-B*40:01; MYH4; ENSG00000264424; TAA
TEAGATVTVK

SEQ ID NO: 51909 - protein, 10 aa, Homo sapiens
  Table A; Target 51909; HLA-B*49:01; MYH4; ENSG00000264424; TAA
TEAGATVTVK

SEQ ID NO: 51910 - protein, 10 aa, Homo sapiens
  Table A; Target 51910; HLA-C*07:06; MYH4; ENSG00000264424; TAA
TEAGATVTVK

SEQ ID NO: 51911 - protein, 9 aa, Homo sapiens
  Table A; Target 51911; HLA-A*30:01; MYH4; ENSG00000264424; TAA
TEEDRKNIL

SEQ ID NO: 51912 - protein, 9 aa, Homo sapiens
  Table A; Target 51912; HLA-B*37:01; MYH4; ENSG00000264424; TAA
TEEDRKNIL

SEQ ID NO: 51913 - protein, 9 aa, Homo sapiens
  Table A; Target 51913; HLA-B*40:01; MYH4; ENSG00000264424; TAA
TEEDRKNIL

SEQ ID NO: 51914 - protein, 9 aa, Homo sapiens
  Table A; Target 51914; HLA-B*40:02; MYH4; ENSG00000264424; TAA
TEEDRKNIL

SEQ ID NO: 51915 - protein, 9 aa, Homo sapiens
  Table A; Target 51915; HLA-B*44:02; MYH4; ENSG00000264424; TAA
TEEDRKNIL

SEQ ID NO: 51916 - protein, 11 aa, Homo sapiens
  Table A; Target 51916; HLA-B*40:01; MYH4; ENSG00000264424; TAA
TEELEEAKKKL

SEQ ID NO: 51917 - protein, 11 aa, Homo sapiens
  Table A; Target 51917; HLA-B*44:03; MYH4; ENSG00000264424; TAA
TEELEEAKKKL

SEQ ID NO: 51918 - protein, 11 aa, Homo sapiens
  Table A; Target 51918; HLA-B*38:01; MYH4; ENSG00000264424; TAA
TEEMAGLDETI

SEQ ID NO: 51919 - protein, 11 aa, Homo sapiens
  Table A; Target 51919; HLA-B*40:01; MYH4; ENSG00000264424; TAA
TEEMAGLDETI

SEQ ID NO: 51920 - protein, 11 aa, Homo sapiens
  Table A; Target 51920; HLA-B*49:01; MYH4; ENSG00000264424; TAA
TEEMAGLDETI

SEQ ID NO: 51921 - protein, 8 aa, Homo sapiens
  Table A; Target 51921; HLA-A*30:01; MYH4; ENSG00000264424; TAA
TEKEMANM

SEQ ID NO: 51922 - protein, 8 aa, Homo sapiens
  Table A; Target 51922; HLA-B*18:01; MYH4; ENSG00000264424; TAA
TEKEMANM

SEQ ID NO: 51923 - protein, 8 aa, Homo sapiens
  Table A; Target 51923; HLA-B*37:01; MYH4; ENSG00000264424; TAA
TEKEMANM

SEQ ID NO: 51924 - protein, 8 aa, Homo sapiens
  Table A; Target 51924; HLA-B*40:02; MYH4; ENSG00000264424; TAA
TEKEMANM

SEQ ID NO: 51925 - protein, 10 aa, Homo sapiens
  Table A; Target 51925; HLA-B*18:01; MYH4; ENSG00000264424; TAA
TELFKVKNAY

SEQ ID NO: 51926 - protein, 10 aa, Homo sapiens
  Table A; Target 51926; HLA-B*44:02; MYH4; ENSG00000264424; TAA
TELFKVKNAY

SEQ ID NO: 51927 - protein, 10 aa, Homo sapiens
  Table A; Target 51927; HLA-B*44:03; MYH4; ENSG00000264424; TAA
TELFKVKNAY

SEQ ID NO: 51928 - protein, 8 aa, Homo sapiens
  Table A; Target 51928; HLA-B*08:01; MYH4; ENSG00000264424; TAA
TENDKQQL

SEQ ID NO: 51929 - protein, 8 aa, Homo sapiens
  Table A; Target 51929; HLA-B*18:01; MYH4; ENSG00000264424; TAA
TENDKQQL

SEQ ID NO: 51930 - protein, 8 aa, Homo sapiens
  Table A; Target 51930; HLA-B*37:01; MYH4; ENSG00000264424; TAA
TENDKQQL

SEQ ID NO: 51931 - protein, 8 aa, Homo sapiens
  Table A; Target 51931; HLA-B*44:02; MYH4; ENSG00000264424; TAA
TENDKQQL

SEQ ID NO: 51932 - protein, 8 aa, Homo sapiens
  Table A; Target 51932; HLA-B*44:03; MYH4; ENSG00000264424; TAA
TENDKQQL

SEQ ID NO: 51933 - protein, 8 aa, Homo sapiens
  Table A; Target 51933; HLA-B*18:01; MYH4; ENSG00000264424; TAA
TENKVKNL

SEQ ID NO: 51934 - protein, 8 aa, Homo sapiens
  Table A; Target 51934; HLA-B*37:01; MYH4; ENSG00000264424; TAA
TENKVKNL

SEQ ID NO: 51935 - protein, 8 aa, Homo sapiens
  Table A; Target 51935; HLA-B*44:02; MYH4; ENSG00000264424; TAA
TENKVKNL

SEQ ID NO: 51936 - protein, 8 aa, Homo sapiens
  Table A; Target 51936; HLA-B*44:03; MYH4; ENSG00000264424; TAA
TENKVKNL

SEQ ID NO: 51937 - protein, 11 aa, Homo sapiens
  Table A; Target 51937; HLA-B*44:02; MYH4; ENSG00000264424; TAA
TEQIAEGGKHI

SEQ ID NO: 51938 - protein, 11 aa, Homo sapiens
  Table A; Target 51938; HLA-B*44:03; MYH4; ENSG00000264424; TAA
TEQIAEGGKHI

SEQ ID NO: 51939 - protein, 11 aa, Homo sapiens
  Table A; Target 51939; HLA-B*49:01; MYH4; ENSG00000264424; TAA
TEQIAEGGKHI

SEQ ID NO: 51940 - protein, 10 aa, Homo sapiens
  Table A; Target 51940; HLA-A*30:01; MYH4; ENSG00000264424; TAA
TESGEFSRQL

SEQ ID NO: 51941 - protein, 10 aa, Homo sapiens
  Table A; Target 51941; HLA-B*40:01; MYH4; ENSG00000264424; TAA
TESGEFSRQL

SEQ ID NO: 51942 - protein, 10 aa, Homo sapiens
  Table A; Target 51942; HLA-B*40:02; MYH4; ENSG00000264424; TAA
TESGEFSRQL

SEQ ID NO: 51943 - protein, 10 aa, Homo sapiens
  Table A; Target 51943; HLA-B*44:02; MYH4; ENSG00000264424; TAA
TESGEFSRQL

SEQ ID NO: 51944 - protein, 10 aa, Homo sapiens
  Table A; Target 51944; HLA-B*44:03; MYH4; ENSG00000264424; TAA
TESGEFSRQL

SEQ ID NO: 51945 - protein, 10 aa, Homo sapiens
  Table A; Target 51945; HLA-B*49:01; MYH4; ENSG00000264424; TAA
TESGEFSRQL

SEQ ID NO: 51946 - protein, 9 aa, Homo sapiens
  Table A; Target 51946; HLA-A*30:02; MYH4; ENSG00000264424; TAA
TEVADKAAY

SEQ ID NO: 51947 - protein, 9 aa, Homo sapiens
  Table A; Target 51947; HLA-A*32:01; MYH4; ENSG00000264424; TAA
TEVADKAAY

SEQ ID NO: 51948 - protein, 9 aa, Homo sapiens
  Table A; Target 51948; HLA-B*15:01; MYH4; ENSG00000264424; TAA
TEVADKAAY

SEQ ID NO: 51949 - protein, 9 aa, Homo sapiens
  Table A; Target 51949; HLA-B*15:03; MYH4; ENSG00000264424; TAA
TEVADKAAY

SEQ ID NO: 51950 - protein, 9 aa, Homo sapiens
  Table A; Target 51950; HLA-B*18:01; MYH4; ENSG00000264424; TAA
TEVADKAAY

SEQ ID NO: 51951 - protein, 9 aa, Homo sapiens
  Table A; Target 51951; HLA-B*27:02; MYH4; ENSG00000264424; TAA
TEVADKAAY

SEQ ID NO: 51952 - protein, 9 aa, Homo sapiens
  Table A; Target 51952; HLA-B*35:01; MYH4; ENSG00000264424; TAA
TEVADKAAY

SEQ ID NO: 51953 - protein, 9 aa, Homo sapiens
  Table A; Target 51953; HLA-B*37:01; MYH4; ENSG00000264424; TAA
TEVADKAAY

SEQ ID NO: 51954 - protein, 9 aa, Homo sapiens
  Table A; Target 51954; HLA-B*40:01; MYH4; ENSG00000264424; TAA
TEVADKAAY

SEQ ID NO: 51955 - protein, 9 aa, Homo sapiens
  Table A; Target 51955; HLA-B*44:02; MYH4; ENSG00000264424; TAA
TEVADKAAY

SEQ ID NO: 51956 - protein, 9 aa, Homo sapiens
  Table A; Target 51956; HLA-B*44:03; MYH4; ENSG00000264424; TAA
TEVADKAAY

SEQ ID NO: 51957 - protein, 9 aa, Homo sapiens
  Table A; Target 51957; HLA-C*02:02; MYH4; ENSG00000264424; TAA
TEVADKAAY

SEQ ID NO: 51958 - protein, 9 aa, Homo sapiens
  Table A; Target 51958; HLA-C*03:03; MYH4; ENSG00000264424; TAA
TEVADKAAY

SEQ ID NO: 51959 - protein, 9 aa, Homo sapiens
  Table A; Target 51959; HLA-C*16:01; MYH4; ENSG00000264424; TAA
TEVADKAAY

SEQ ID NO: 51960 - protein, 9 aa, Homo sapiens
  Table A; Target 51960; HLA-C*16:04; MYH4; ENSG00000264424; TAA
TEVADKAAY

SEQ ID NO: 51961 - protein, 10 aa, Homo sapiens
  Table A; Target 51961; HLA-A*30:01; MYH4; ENSG00000264424; TAA
TEVADKAAYL

SEQ ID NO: 51962 - protein, 10 aa, Homo sapiens
  Table A; Target 51962; HLA-B*40:01; MYH4; ENSG00000264424; TAA
TEVADKAAYL

SEQ ID NO: 51963 - protein, 10 aa, Homo sapiens
  Table A; Target 51963; HLA-B*40:02; MYH4; ENSG00000264424; TAA
TEVADKAAYL

SEQ ID NO: 51964 - protein, 10 aa, Homo sapiens
  Table A; Target 51964; HLA-B*44:02; MYH4; ENSG00000264424; TAA
TEVADKAAYL

SEQ ID NO: 51965 - protein, 10 aa, Homo sapiens
  Table A; Target 51965; HLA-B*44:03; MYH4; ENSG00000264424; TAA
TEVADKAAYL

SEQ ID NO: 51966 - protein, 10 aa, Homo sapiens
  Table A; Target 51966; HLA-B*49:01; MYH4; ENSG00000264424; TAA
TEVADKAAYL

SEQ ID NO: 51967 - protein, 8 aa, Homo sapiens
  Table A; Target 51967; HLA-C*04:01; MYH4; ENSG00000264424; TAA
TGAVMHYG

SEQ ID NO: 51968 - protein, 8 aa, Homo sapiens
  Table A; Target 51968; HLA-C*06:02; MYH4; ENSG00000264424; TAA
TGAVMHYG

SEQ ID NO: 51969 - protein, 8 aa, Homo sapiens
  Table A; Target 51969; HLA-C*07:01; MYH4; ENSG00000264424; TAA
TGAVMHYG

SEQ ID NO: 51970 - protein, 9 aa, Homo sapiens
  Table A; Target 51970; HLA-C*06:02; MYH4; ENSG00000264424; TAA
TGAVMHYGN

SEQ ID NO: 51971 - protein, 9 aa, Homo sapiens
  Table A; Target 51971; HLA-B*38:01; MYH4; ENSG00000264424; TAA
THLHEPAVL

SEQ ID NO: 51972 - protein, 9 aa, Homo sapiens
  Table A; Target 51972; HLA-B*39:01; MYH4; ENSG00000264424; TAA
THLHEPAVL

SEQ ID NO: 51973 - protein, 10 aa, Homo sapiens
  Table A; Target 51973; HLA-A*29:02; MYH4; ENSG00000264424; TAA
THLHEPAVLY

SEQ ID NO: 51974 - protein, 10 aa, Homo sapiens
  Table A; Target 51974; HLA-C*07:01; MYH4; ENSG00000264424; TAA
THLHEPAVLY

SEQ ID NO: 51975 - protein, 9 aa, Homo sapiens
  Table A; Target 51975; HLA-A*03:01; MYH4; ENSG00000264424; TAA
TIAKLTKEK

SEQ ID NO: 51976 - protein, 9 aa, Homo sapiens
  Table A; Target 51976; HLA-A*03:02; MYH4; ENSG00000264424; TAA
TIAKLTKEK

SEQ ID NO: 51977 - protein, 8 aa, Homo sapiens
  Table A; Target 51977; HLA-A*03:01; MYH4; ENSG00000264424; TAA
TIAVTGEK

SEQ ID NO: 51978 - protein, 8 aa, Homo sapiens
  Table A; Target 51978; HLA-A*03:02; MYH4; ENSG00000264424; TAA
TIAVTGEK

SEQ ID NO: 51979 - protein, 8 aa, Homo sapiens
  Table A; Target 51979; HLA-A*68:01; MYH4; ENSG00000264424; TAA
TIAVTGEK

SEQ ID NO: 51980 - protein, 9 aa, Homo sapiens
  Table A; Target 51980; HLA-A*03:01; MYH4; ENSG00000264424; TAA
TIAVTGEKK

SEQ ID NO: 51981 - protein, 9 aa, Homo sapiens
  Table A; Target 51981; HLA-A*03:02; MYH4; ENSG00000264424; TAA
TIAVTGEKK

SEQ ID NO: 51982 - protein, 9 aa, Homo sapiens
  Table A; Target 51982; HLA-A*11:01; MYH4; ENSG00000264424; TAA
TIAVTGEKK

SEQ ID NO: 51983 - protein, 9 aa, Homo sapiens
  Table A; Target 51983; HLA-A*68:01; MYH4; ENSG00000264424; TAA
TIAVTGEKK

SEQ ID NO: 51984 - protein, 9 aa, Homo sapiens
  Table A; Target 51984; HLA-C*07:06; MYH4; ENSG00000264424; TAA
TIAVTGEKK

SEQ ID NO: 51985 - protein, 10 aa, Homo sapiens
  Table A; Target 51985; HLA-B*15:03; MYH4; ENSG00000264424; TAA
TKGQTVQQVY

SEQ ID NO: 51986 - protein, 10 aa, Homo sapiens
  Table A; Target 51986; HLA-A*68:01; MYH4; ENSG00000264424; TAA
TKYETDAIQR

SEQ ID NO: 51987 - protein, 9 aa, Homo sapiens
  Table A; Target 51987; HLA-A*02:03; MYH4; ENSG00000264424; TAA
TLAFLFSGA

SEQ ID NO: 51988 - protein, 9 aa, Homo sapiens
  Table A; Target 51988; HLA-A*02:01; MYH4; ENSG00000264424; TAA
TLAHALQSA

SEQ ID NO: 51989 - protein, 9 aa, Homo sapiens
  Table A; Target 51989; HLA-A*02:03; MYH4; ENSG00000264424; TAA
TLAHALQSA

SEQ ID NO: 51990 - protein, 9 aa, Homo sapiens
  Table A; Target 51990; HLA-A*02:04; MYH4; ENSG00000264424; TAA
TLAHALQSA

SEQ ID NO: 51991 - protein, 9 aa, Homo sapiens
  Table A; Target 51991; HLA-B*54:01; MYH4; ENSG00000264424; TAA
TLAHALQSA

SEQ ID NO: 51992 - protein, 9 aa, Homo sapiens
  Table A; Target 51992; HLA-B*55:01; MYH4; ENSG00000264424; TAA
TLAHALQSA

SEQ ID NO: 51993 - protein, 9 aa, Homo sapiens
  Table A; Target 51993; HLA-B*56:01; MYH4; ENSG00000264424; TAA
TLAHALQSA

SEQ ID NO: 51994 - protein, 10 aa, Homo sapiens
  Table A; Target 51994; HLA-A*68:01; MYH4; ENSG00000264424; TAA
TLAHALQSAR

SEQ ID NO: 51995 - protein, 9 aa, Homo sapiens
  Table A; Target 51995; HLA-A*03:01; MYH4; ENSG00000264424; TAA
TLAKVEKEK

SEQ ID NO: 51996 - protein, 9 aa, Homo sapiens
  Table A; Target 51996; HLA-A*03:02; MYH4; ENSG00000264424; TAA
TLAKVEKEK

SEQ ID NO: 51997 - protein, 9 aa, Homo sapiens
  Table A; Target 51997; HLA-A*03:01; MYH4; ENSG00000264424; TAA
TLDAEIRSR

SEQ ID NO: 51998 - protein, 9 aa, Homo sapiens
  Table A; Target 51998; HLA-A*31:01; MYH4; ENSG00000264424; TAA
TLDAEIRSR

SEQ ID NO: 51999 - protein, 9 aa, Homo sapiens
  Table A; Target 51999; HLA-A*33:01; MYH4; ENSG00000264424; TAA
TLDAEIRSR

SEQ ID NO: 52000 - protein, 9 aa, Homo sapiens
  Table A; Target 52000; HLA-A*33:03; MYH4; ENSG00000264424; TAA
TLDAEIRSR

SEQ ID NO: 52001 - protein, 9 aa, Homo sapiens
  Table A; Target 52001; HLA-A*02:01; MYH4; ENSG00000264424; TAA
TLEDQIISA

SEQ ID NO: 52002 - protein, 9 aa, Homo sapiens
  Table A; Target 52002; HLA-A*02:01; MYH4; ENSG00000264424; TAA
TLEDQLSEI

SEQ ID NO: 52003 - protein, 9 aa, Homo sapiens
  Table A; Target 52003; HLA-A*02:07; MYH4; ENSG00000264424; TAA
TLEDQLSEI

SEQ ID NO: 52004 - protein, 9 aa, Homo sapiens
  Table A; Target 52004; HLA-B*55:01; MYH4; ENSG00000264424; TAA
TLEDQLSEI

SEQ ID NO: 52005 - protein, 9 aa, Homo sapiens
  Table A; Target 52005; HLA-C*05:01; MYH4; ENSG00000264424; TAA
TLEDQLSEI

SEQ ID NO: 52006 - protein, 10 aa, Homo sapiens
  Table A; Target 52006; HLA-B*27:02; MYH4; ENSG00000264424; TAA
TLEDQLSEIK

SEQ ID NO: 52007 - protein, 11 aa, Homo sapiens
  Table A; Target 52007; HLA-C*06:02; MYH4; ENSG00000264424; TAA
TLEDQLSEIKT

SEQ ID NO: 52008 - protein, 9 aa, Homo sapiens
  Table A; Target 52008; HLA-B*08:01; MYH4; ENSG00000264424; TAA
TLMQEKNDL

SEQ ID NO: 52009 - protein, 11 aa, Homo sapiens
  Table A; Target 52009; HLA-A*02:01; MYH4; ENSG00000264424; TAA
TLMQEKNDLQL

SEQ ID NO: 52010 - protein, 11 aa, Homo sapiens
  Table A; Target 52010; HLA-B*38:01; MYH4; ENSG00000264424; TAA
TMDTENDKQQL

SEQ ID NO: 52011 - protein, 11 aa, Homo sapiens
  Table A; Target 52011; HLA-B*55:01; MYH4; ENSG00000264424; TAA
TMDTENDKQQL

SEQ ID NO: 52012 - protein, 11 aa, Homo sapiens
  Table A; Target 52012; HLA-C*04:01; MYH4; ENSG00000264424; TAA
TMDTENDKQQL

SEQ ID NO: 52013 - protein, 11 aa, Homo sapiens
  Table A; Target 52013; HLA-C*05:01; MYH4; ENSG00000264424; TAA
TMDTENDKQQL

SEQ ID NO: 52014 - protein, 9 aa, Homo sapiens
  Table A; Target 52014; HLA-A*68:02; MYH4; ENSG00000264424; TAA
TNPYDFAFV

SEQ ID NO: 52015 - protein, 9 aa, Homo sapiens
  Table A; Target 52015; HLA-B*07:02; MYH4; ENSG00000264424; TAA
TPGAMEHEL

SEQ ID NO: 52016 - protein, 9 aa, Homo sapiens
  Table A; Target 52016; HLA-B*35:01; MYH4; ENSG00000264424; TAA
TPGAMEHEL

SEQ ID NO: 52017 - protein, 9 aa, Homo sapiens
  Table A; Target 52017; HLA-B*35:03; MYH4; ENSG00000264424; TAA
TPGAMEHEL

SEQ ID NO: 52018 - protein, 9 aa, Homo sapiens
  Table A; Target 52018; HLA-B*55:01; MYH4; ENSG00000264424; TAA
TPGAMEHEL

SEQ ID NO: 52019 - protein, 9 aa, Homo sapiens
  Table A; Target 52019; HLA-C*03:03; MYH4; ENSG00000264424; TAA
TPGAMEHEL

SEQ ID NO: 52020 - protein, 9 aa, Homo sapiens
  Table A; Target 52020; HLA-C*07:02; MYH4; ENSG00000264424; TAA
TPGAMEHEL

SEQ ID NO: 52021 - protein, 11 aa, Homo sapiens
  Table A; Target 52021; HLA-B*35:03; MYH4; ENSG00000264424; TAA
TPGAMEHELVL

SEQ ID NO: 52022 - protein, 9 aa, Homo sapiens
  Table A; Target 52022; HLA-B*39:01; MYH4; ENSG00000264424; TAA
TQAELEASQ

SEQ ID NO: 52023 - protein, 10 aa, Homo sapiens
  Table A; Target 52023; HLA-B*27:02; MYH4; ENSG00000264424; TAA
TQAELEASQK

SEQ ID NO: 52024 - protein, 10 aa, Homo sapiens
  Table A; Target 52024; HLA-B*27:05; MYH4; ENSG00000264424; TAA
TQAELEASQK

SEQ ID NO: 52025 - protein, 10 aa, Homo sapiens
  Table A; Target 52025; HLA-C*07:06; MYH4; ENSG00000264424; TAA
TQAELEASQK

SEQ ID NO: 52026 - protein, 9 aa, Homo sapiens
  Table A; Target 52026; HLA-B*13:02; MYH4; ENSG00000264424; TAA
TQLHLDDAI

SEQ ID NO: 52027 - protein, 9 aa, Homo sapiens
  Table A; Target 52027; HLA-B*38:01; MYH4; ENSG00000264424; TAA
TQLHLDDAI

SEQ ID NO: 52028 - protein, 9 aa, Homo sapiens
  Table A; Target 52028; HLA-A*31:01; MYH4; ENSG00000264424; TAA
TQNTSLINT

SEQ ID NO: 52029 - protein, 10 aa, Homo sapiens
  Table A; Target 52029; HLA-A*03:01; MYH4; ENSG00000264424; TAA
TQNTSLINTK

SEQ ID NO: 52030 - protein, 10 aa, Homo sapiens
  Table A; Target 52030; HLA-A*03:02; MYH4; ENSG00000264424; TAA
TQNTSLINTK

SEQ ID NO: 52031 - protein, 10 aa, Homo sapiens
  Table A; Target 52031; HLA-A*11:01; MYH4; ENSG00000264424; TAA
TQNTSLINTK

SEQ ID NO: 52032 - protein, 10 aa, Homo sapiens
  Table A; Target 52032; HLA-B*27:02; MYH4; ENSG00000264424; TAA
TQNTSLINTK

SEQ ID NO: 52033 - protein, 10 aa, Homo sapiens
  Table A; Target 52033; HLA-B*27:05; MYH4; ENSG00000264424; TAA
TQNTSLINTK

SEQ ID NO: 52034 - protein, 10 aa, Homo sapiens
  Table A; Target 52034; HLA-C*07:06; MYH4; ENSG00000264424; TAA
TQNTSLINTK

SEQ ID NO: 52035 - protein, 11 aa, Homo sapiens
  Table A; Target 52035; HLA-A*03:02; MYH4; ENSG00000264424; TAA
TQNTSLINTKK

SEQ ID NO: 52036 - protein, 11 aa, Homo sapiens
  Table A; Target 52036; HLA-A*11:01; MYH4; ENSG00000264424; TAA
TQNTSLINTKK

SEQ ID NO: 52037 - protein, 11 aa, Homo sapiens
  Table A; Target 52037; HLA-A*68:01; MYH4; ENSG00000264424; TAA
TQNTSLINTKK

SEQ ID NO: 52038 - protein, 11 aa, Homo sapiens
  Table A; Target 52038; HLA-B*27:02; MYH4; ENSG00000264424; TAA
TQNTSLINTKK

SEQ ID NO: 52039 - protein, 11 aa, Homo sapiens
  Table A; Target 52039; HLA-B*27:05; MYH4; ENSG00000264424; TAA
TQNTSLINTKK

SEQ ID NO: 52040 - protein, 11 aa, Homo sapiens
  Table A; Target 52040; HLA-C*06:02; MYH4; ENSG00000264424; TAA
TQNTSLINTKK

SEQ ID NO: 52041 - protein, 11 aa, Homo sapiens
  Table A; Target 52041; HLA-C*07:06; MYH4; ENSG00000264424; TAA
TQNTSLINTKK

SEQ ID NO: 52042 - protein, 9 aa, Homo sapiens
  Table A; Target 52042; HLA-A*11:01; MYH4; ENSG00000264424; TAA
TQYKFGHTK

SEQ ID NO: 52043 - protein, 10 aa, Homo sapiens
  Table A; Target 52043; HLA-A*02:03; MYH4; ENSG00000264424; TAA
TQYKFGHTKV

SEQ ID NO: 52044 - protein, 10 aa, Homo sapiens
  Table A; Target 52044; HLA-B*27:02; MYH4; ENSG00000264424; TAA
TRINQQLDTK

SEQ ID NO: 52045 - protein, 10 aa, Homo sapiens
  Table A; Target 52045; HLA-B*27:05; MYH4; ENSG00000264424; TAA
TRINQQLDTK

SEQ ID NO: 52046 - protein, 8 aa, Homo sapiens
  Table A; Target 52046; HLA-B*58:01; MYH4; ENSG00000264424; TAA
TSAHLERM

SEQ ID NO: 52047 - protein, 9 aa, Homo sapiens
  Table A; Target 52047; HLA-A*03:01; MYH4; ENSG00000264424; TAA
TSAQIEMNK

SEQ ID NO: 52048 - protein, 9 aa, Homo sapiens
  Table A; Target 52048; HLA-A*03:02; MYH4; ENSG00000264424; TAA
TSAQIEMNK

SEQ ID NO: 52049 - protein, 9 aa, Homo sapiens
  Table A; Target 52049; HLA-A*11:01; MYH4; ENSG00000264424; TAA
TSAQIEMNK

SEQ ID NO: 52050 - protein, 9 aa, Homo sapiens
  Table A; Target 52050; HLA-A*33:03; MYH4; ENSG00000264424; TAA
TSAQIEMNK

SEQ ID NO: 52051 - protein, 9 aa, Homo sapiens
  Table A; Target 52051; HLA-A*68:01; MYH4; ENSG00000264424; TAA
TSAQIEMNK

SEQ ID NO: 52052 - protein, 9 aa, Homo sapiens
  Table A; Target 52052; HLA-A*68:02; MYH4; ENSG00000264424; TAA
TSAQIEMNK

SEQ ID NO: 52053 - protein, 9 aa, Homo sapiens
  Table A; Target 52053; HLA-B*27:02; MYH4; ENSG00000264424; TAA
TSAQIEMNK

SEQ ID NO: 52054 - protein, 9 aa, Homo sapiens
  Table A; Target 52054; HLA-B*27:05; MYH4; ENSG00000264424; TAA
TSAQIEMNK

SEQ ID NO: 52055 - protein, 9 aa, Homo sapiens
  Table A; Target 52055; HLA-C*06:02; MYH4; ENSG00000264424; TAA
TSAQIEMNK

SEQ ID NO: 52056 - protein, 9 aa, Homo sapiens
  Table A; Target 52056; HLA-C*07:06; MYH4; ENSG00000264424; TAA
TSAQIEMNK

SEQ ID NO: 52057 - protein, 10 aa, Homo sapiens
  Table A; Target 52057; HLA-A*03:02; MYH4; ENSG00000264424; TAA
TSAQIEMNKK

SEQ ID NO: 52058 - protein, 10 aa, Homo sapiens
  Table A; Target 52058; HLA-A*11:01; MYH4; ENSG00000264424; TAA
TSAQIEMNKK

SEQ ID NO: 52059 - protein, 10 aa, Homo sapiens
  Table A; Target 52059; HLA-A*68:01; MYH4; ENSG00000264424; TAA
TSAQIEMNKK

SEQ ID NO: 52060 - protein, 10 aa, Homo sapiens
  Table A; Target 52060; HLA-B*27:02; MYH4; ENSG00000264424; TAA
TSAQIEMNKK

SEQ ID NO: 52061 - protein, 10 aa, Homo sapiens
  Table A; Target 52061; HLA-C*07:06; MYH4; ENSG00000264424; TAA
TSAQIEMNKK

SEQ ID NO: 52062 - protein, 11 aa, Homo sapiens
  Table A; Target 52062; HLA-A*68:01; MYH4; ENSG00000264424; TAA
TSAQIEMNKKR

SEQ ID NO: 52063 - protein, 8 aa, Homo sapiens
  Table A; Target 52063; HLA-A*11:01; MYH4; ENSG00000264424; TAA
TSLINTKK

SEQ ID NO: 52064 - protein, 9 aa, Homo sapiens
  Table A; Target 52064; HLA-C*05:01; MYH4; ENSG00000264424; TAA
TSLNSADLL

SEQ ID NO: 52065 - protein, 10 aa, Homo sapiens
  Table A; Target 52065; HLA-A*11:01; MYH4; ENSG00000264424; TAA
TSLNSADLLK

SEQ ID NO: 52066 - protein, 10 aa, Homo sapiens
  Table A; Target 52066; HLA-B*27:02; MYH4; ENSG00000264424; TAA
TSLNSADLLK

SEQ ID NO: 52067 - protein, 9 aa, Homo sapiens
  Table A; Target 52067; HLA-A*03:02; MYH4; ENSG00000264424; TAA
TSVFVVDPK

SEQ ID NO: 52068 - protein, 9 aa, Homo sapiens
  Table A; Target 52068; HLA-A*11:01; MYH4; ENSG00000264424; TAA
TSVFVVDPK

SEQ ID NO: 52069 - protein, 9 aa, Homo sapiens
  Table A; Target 52069; HLA-A*68:01; MYH4; ENSG00000264424; TAA
TSVFVVDPK

SEQ ID NO: 52070 - protein, 9 aa, Homo sapiens
  Table A; Target 52070; HLA-B*27:02; MYH4; ENSG00000264424; TAA
TSVFVVDPK

SEQ ID NO: 52071 - protein, 9 aa, Homo sapiens
  Table A; Target 52071; HLA-C*06:02; MYH4; ENSG00000264424; TAA
TSVFVVDPK

SEQ ID NO: 52072 - protein, 9 aa, Homo sapiens
  Table A; Target 52072; HLA-C*07:06; MYH4; ENSG00000264424; TAA
TSVFVVDPK

SEQ ID NO: 52073 - protein, 10 aa, Homo sapiens
  Table A; Target 52073; HLA-C*06:02; MYH4; ENSG00000264424; TAA
TSVFVVDPKE

SEQ ID NO: 52074 - protein, 9 aa, Homo sapiens
  Table A; Target 52074; HLA-A*29:02; MYH4; ENSG00000264424; TAA
TTNPYDFAF

SEQ ID NO: 52075 - protein, 9 aa, Homo sapiens
  Table A; Target 52075; HLA-A*30:02; MYH4; ENSG00000264424; TAA
TTNPYDFAF

SEQ ID NO: 52076 - protein, 9 aa, Homo sapiens
  Table A; Target 52076; HLA-A*32:01; MYH4; ENSG00000264424; TAA
TTNPYDFAF

SEQ ID NO: 52077 - protein, 9 aa, Homo sapiens
  Table A; Target 52077; HLA-B*27:02; MYH4; ENSG00000264424; TAA
TTNPYDFAF

SEQ ID NO: 52078 - protein, 9 aa, Homo sapiens
  Table A; Target 52078; HLA-B*35:01; MYH4; ENSG00000264424; TAA
TTNPYDFAF

SEQ ID NO: 52079 - protein, 9 aa, Homo sapiens
  Table A; Target 52079; HLA-B*35:03; MYH4; ENSG00000264424; TAA
TTNPYDFAF

SEQ ID NO: 52080 - protein, 9 aa, Homo sapiens
  Table A; Target 52080; HLA-B*57:01; MYH4; ENSG00000264424; TAA
TTNPYDFAF

SEQ ID NO: 52081 - protein, 9 aa, Homo sapiens
  Table A; Target 52081; HLA-B*58:01; MYH4; ENSG00000264424; TAA
TTNPYDFAF

SEQ ID NO: 52082 - protein, 9 aa, Homo sapiens
  Table A; Target 52082; HLA-C*16:01; MYH4; ENSG00000264424; TAA
TTNPYDFAF

SEQ ID NO: 52083 - protein, 10 aa, Homo sapiens
  Table A; Target 52083; HLA-A*68:02; MYH4; ENSG00000264424; TAA
TTNPYDFAFV

SEQ ID NO: 52084 - protein, 9 aa, Homo sapiens
  Table A; Target 52084; HLA-A*01:01; MYH4; ENSG00000264424; TAA
TVDYNIAGW

SEQ ID NO: 52085 - protein, 9 aa, Homo sapiens
  Table A; Target 52085; HLA-A*25:01; MYH4; ENSG00000264424; TAA
TVDYNIAGW

SEQ ID NO: 52086 - protein, 9 aa, Homo sapiens
  Table A; Target 52086; HLA-A*26:01; MYH4; ENSG00000264424; TAA
TVDYNIAGW

SEQ ID NO: 52087 - protein, 9 aa, Homo sapiens
  Table A; Target 52087; HLA-A*32:01; MYH4; ENSG00000264424; TAA
TVDYNIAGW

SEQ ID NO: 52088 - protein, 9 aa, Homo sapiens
  Table A; Target 52088; HLA-B*44:02; MYH4; ENSG00000264424; TAA
TVDYNIAGW

SEQ ID NO: 52089 - protein, 9 aa, Homo sapiens
  Table A; Target 52089; HLA-B*44:03; MYH4; ENSG00000264424; TAA
TVDYNIAGW

SEQ ID NO: 52090 - protein, 9 aa, Homo sapiens
  Table A; Target 52090; HLA-B*57:01; MYH4; ENSG00000264424; TAA
TVDYNIAGW

SEQ ID NO: 52091 - protein, 9 aa, Homo sapiens
  Table A; Target 52091; HLA-B*58:01; MYH4; ENSG00000264424; TAA
TVDYNIAGW

SEQ ID NO: 52092 - protein, 8 aa, Homo sapiens
  Table A; Target 52092; HLA-A*31:01; MYH4; ENSG00000264424; TAA
TVKDLQLR

SEQ ID NO: 52093 - protein, 8 aa, Homo sapiens
  Table A; Target 52093; HLA-A*33:03; MYH4; ENSG00000264424; TAA
TVKDLQLR

SEQ ID NO: 52094 - protein, 9 aa, Homo sapiens
  Table A; Target 52094; HLA-A*02:03; MYH4; ENSG00000264424; TAA
TVKDLQLRL

SEQ ID NO: 52095 - protein, 9 aa, Homo sapiens
  Table A; Target 52095; HLA-A*02:04; MYH4; ENSG00000264424; TAA
TVKDLQLRL

SEQ ID NO: 52096 - protein, 9 aa, Homo sapiens
  Table A; Target 52096; HLA-A*31:01; MYH4; ENSG00000264424; TAA
TVKDLQLRL

SEQ ID NO: 52097 - protein, 9 aa, Homo sapiens
  Table A; Target 52097; HLA-A*68:02; MYH4; ENSG00000264424; TAA
TVKDLQLRL

SEQ ID NO: 52098 - protein, 9 aa, Homo sapiens
  Table A; Target 52098; HLA-B*08:01; MYH4; ENSG00000264424; TAA
TVKDLQLRL

SEQ ID NO: 52099 - protein, 8 aa, Homo sapiens
  Table A; Target 52099; HLA-B*08:01; MYH4; ENSG00000264424; TAA
TVKEDQVF

SEQ ID NO: 52100 - protein, 8 aa, Homo sapiens
  Table A; Target 52100; HLA-B*15:01; MYH4; ENSG00000264424; TAA
TVKEDQVF

SEQ ID NO: 52101 - protein, 8 aa, Homo sapiens
  Table A; Target 52101; HLA-B*46:01; MYH4; ENSG00000264424; TAA
TVKEDQVF

SEQ ID NO: 52102 - protein, 10 aa, Homo sapiens
  Table A; Target 52102; HLA-A*25:01; MYH4; ENSG00000264424; TAA
TVKEDQVFSM

SEQ ID NO: 52103 - protein, 10 aa, Homo sapiens
  Table A; Target 52103; HLA-A*26:01; MYH4; ENSG00000264424; TAA
TVKEDQVFSM

SEQ ID NO: 52104 - protein, 8 aa, Homo sapiens
  Table A; Target 52104; HLA-B*08:01; MYH4; ENSG00000264424; TAA
TVNTKRVI

SEQ ID NO: 52105 - protein, 10 aa, Homo sapiens
  Table A; Target 52105; HLA-A*03:01; MYH4; ENSG00000264424; TAA
TVNTKRVIQY

SEQ ID NO: 52106 - protein, 10 aa, Homo sapiens
  Table A; Target 52106; HLA-A*25:01; MYH4; ENSG00000264424; TAA
TVNTKRVIQY

SEQ ID NO: 52107 - protein, 10 aa, Homo sapiens
  Table A; Target 52107; HLA-A*30:02; MYH4; ENSG00000264424; TAA
TVNTKRVIQY

SEQ ID NO: 52108 - protein, 10 aa, Homo sapiens
  Table A; Target 52108; HLA-A*32:01; MYH4; ENSG00000264424; TAA
TVNTKRVIQY

SEQ ID NO: 52109 - protein, 10 aa, Homo sapiens
  Table A; Target 52109; HLA-B*15:01; MYH4; ENSG00000264424; TAA
TVNTKRVIQY

SEQ ID NO: 52110 - protein, 9 aa, Homo sapiens
  Table A; Target 52110; HLA-A*02:03; MYH4; ENSG00000264424; TAA
TVQQVYNAV

SEQ ID NO: 52111 - protein, 9 aa, Homo sapiens
  Table A; Target 52111; HLA-A*02:07; MYH4; ENSG00000264424; TAA
TVQQVYNAV

SEQ ID NO: 52112 - protein, 9 aa, Homo sapiens
  Table A; Target 52112; HLA-A*68:02; MYH4; ENSG00000264424; TAA
TVQQVYNAV

SEQ ID NO: 52113 - protein, 9 aa, Homo sapiens
  Table A; Target 52113; HLA-B*13:02; MYH4; ENSG00000264424; TAA
TVQQVYNAV

SEQ ID NO: 52114 - protein, 9 aa, Homo sapiens
  Table A; Target 52114; HLA-B*35:03; MYH4; ENSG00000264424; TAA
TVQQVYNAV

SEQ ID NO: 52115 - protein, 9 aa, Homo sapiens
  Table A; Target 52115; HLA-B*56:01; MYH4; ENSG00000264424; TAA
TVQQVYNAV

SEQ ID NO: 52116 - protein, 9 aa, Homo sapiens
  Table A; Target 52116; HLA-C*01:02; MYH4; ENSG00000264424; TAA
TVQQVYNAV

SEQ ID NO: 52117 - protein, 9 aa, Homo sapiens
  Table A; Target 52117; HLA-C*06:02; MYH4; ENSG00000264424; TAA
TVQQVYNAV

SEQ ID NO: 52118 - protein, 9 aa, Homo sapiens
  Table A; Target 52118; HLA-C*14:02; MYH4; ENSG00000264424; TAA
TVQQVYNAV

SEQ ID NO: 52119 - protein, 9 aa, Homo sapiens
  Table A; Target 52119; HLA-A*31:01; MYH4; ENSG00000264424; TAA
TVRNDNSSR

SEQ ID NO: 52120 - protein, 9 aa, Homo sapiens
  Table A; Target 52120; HLA-A*33:01; MYH4; ENSG00000264424; TAA
TVRNDNSSR

SEQ ID NO: 52121 - protein, 9 aa, Homo sapiens
  Table A; Target 52121; HLA-A*33:03; MYH4; ENSG00000264424; TAA
TVRNDNSSR

SEQ ID NO: 52122 - protein, 9 aa, Homo sapiens
  Table A; Target 52122; HLA-A*68:01; MYH4; ENSG00000264424; TAA
TVRNDNSSR

SEQ ID NO: 52123 - protein, 9 aa, Homo sapiens
  Table A; Target 52123; HLA-C*07:06; MYH4; ENSG00000264424; TAA
TVRNDNSSR

SEQ ID NO: 52124 - protein, 10 aa, Homo sapiens
  Table A; Target 52124; HLA-A*25:01; MYH4; ENSG00000264424; TAA
TVRNDNSSRF

SEQ ID NO: 52125 - protein, 10 aa, Homo sapiens
  Table A; Target 52125; HLA-A*26:01; MYH4; ENSG00000264424; TAA
TVRNDNSSRF

SEQ ID NO: 52126 - protein, 10 aa, Homo sapiens
  Table A; Target 52126; HLA-A*68:02; MYH4; ENSG00000264424; TAA
TVSALFRENL

SEQ ID NO: 52127 - protein, 9 aa, Homo sapiens
  Table A; Target 52127; HLA-A*32:01; MYH4; ENSG00000264424; TAA
TVSKAKANF

SEQ ID NO: 52128 - protein, 10 aa, Homo sapiens
  Table A; Target 52128; HLA-B*38:01; MYH4; ENSG00000264424; TAA
TVTVKEDQVF

SEQ ID NO: 52129 - protein, 10 aa, Homo sapiens
  Table A; Target 52129; HLA-B*39:01; MYH4; ENSG00000264424; TAA
TVTVKEDQVF

SEQ ID NO: 52130 - protein, 8 aa, Homo sapiens
  Table A; Target 52130; HLA-A*03:02; MYH4; ENSG00000264424; TAA
TVVGLYQK

SEQ ID NO: 52131 - protein, 8 aa, Homo sapiens
  Table A; Target 52131; HLA-A*11:01; MYH4; ENSG00000264424; TAA
TVVGLYQK

SEQ ID NO: 52132 - protein, 10 aa, Homo sapiens
  Table A; Target 52132; HLA-B*56:01; MYH4; ENSG00000264424; TAA
TVVGLYQKSA

SEQ ID NO: 52133 - protein, 11 aa, Homo sapiens
  Table A; Target 52133; HLA-A*23:01; MYH4; ENSG00000264424; TAA
TYLLEKSRVTF

SEQ ID NO: 52134 - protein, 11 aa, Homo sapiens
  Table A; Target 52134; HLA-A*24:02; MYH4; ENSG00000264424; TAA
TYLLEKSRVTF

SEQ ID NO: 52135 - protein, 8 aa, Homo sapiens
  Table A; Target 52135; HLA-A*32:01; MYH4; ENSG00000264424; TAA
VADKAAYL

SEQ ID NO: 52136 - protein, 8 aa, Homo sapiens
  Table A; Target 52136; HLA-B*51:01; MYH4; ENSG00000264424; TAA
VADKAAYL

SEQ ID NO: 52137 - protein, 8 aa, Homo sapiens
  Table A; Target 52137; HLA-C*03:03; MYH4; ENSG00000264424; TAA
VADKAAYL

SEQ ID NO: 52138 - protein, 8 aa, Homo sapiens
  Table A; Target 52138; HLA-C*03:04; MYH4; ENSG00000264424; TAA
VADKAAYL

SEQ ID NO: 52139 - protein, 8 aa, Homo sapiens
  Table A; Target 52139; HLA-C*04:01; MYH4; ENSG00000264424; TAA
VADKAAYL

SEQ ID NO: 52140 - protein, 8 aa, Homo sapiens
  Table A; Target 52140; HLA-C*05:01; MYH4; ENSG00000264424; TAA
VADKAAYL

SEQ ID NO: 52141 - protein, 8 aa, Homo sapiens
  Table A; Target 52141; HLA-C*07:04; MYH4; ENSG00000264424; TAA
VADKAAYL

SEQ ID NO: 52142 - protein, 9 aa, Homo sapiens
  Table A; Target 52142; HLA-A*01:01; MYH4; ENSG00000264424; TAA
VADKAAYLT

SEQ ID NO: 52143 - protein, 11 aa, Homo sapiens
  Table A; Target 52143; HLA-A*01:01; MYH4; ENSG00000264424; TAA
VADKAAYLTSL

SEQ ID NO: 52144 - protein, 11 aa, Homo sapiens
  Table A; Target 52144; HLA-C*05:01; MYH4; ENSG00000264424; TAA
VADKAAYLTSL

SEQ ID NO: 52145 - protein, 8 aa, Homo sapiens
  Table A; Target 52145; HLA-C*05:01; MYH4; ENSG00000264424; TAA
VAELGEQI

SEQ ID NO: 52146 - protein, 11 aa, Homo sapiens
  Table A; Target 52146; HLA-B*39:01; MYH4; ENSG00000264424; TAA
VAELGEQIDSL

SEQ ID NO: 52147 - protein, 11 aa, Homo sapiens
  Table A; Target 52147; HLA-C*05:01; MYH4; ENSG00000264424; TAA
VAELGEQIDSL

SEQ ID NO: 52148 - protein, 9 aa, Homo sapiens
  Table A; Target 52148; HLA-A*02:03; MYH4; ENSG00000264424; TAA
VAIYKLTGA

SEQ ID NO: 52149 - protein, 9 aa, Homo sapiens
  Table A; Target 52149; HLA-B*46:01; MYH4; ENSG00000264424; TAA
VAIYKLTGA

SEQ ID NO: 52150 - protein, 9 aa, Homo sapiens
  Table A; Target 52150; HLA-B*54:01; MYH4; ENSG00000264424; TAA
VAIYKLTGA

SEQ ID NO: 52151 - protein, 9 aa, Homo sapiens
  Table A; Target 52151; HLA-B*56:01; MYH4; ENSG00000264424; TAA
VAIYKLTGA

SEQ ID NO: 52152 - protein, 9 aa, Homo sapiens
  Table A; Target 52152; HLA-C*16:02; MYH4; ENSG00000264424; TAA
VAIYKLTGA

SEQ ID NO: 52153 - protein, 8 aa, Homo sapiens
  Table A; Target 52153; HLA-C*16:01; MYH4; ENSG00000264424; TAA
VAQWRTKY

SEQ ID NO: 52154 - protein, 8 aa, Homo sapiens
  Table A; Target 52154; HLA-C*05:01; MYH4; ENSG00000264424; TAA
VDDLEGSL

SEQ ID NO: 52155 - protein, 8 aa, Homo sapiens
  Table A; Target 52155; HLA-A*30:01; MYH4; ENSG00000264424; TAA
VDILGFTA

SEQ ID NO: 52156 - protein, 8 aa, Homo sapiens
  Table A; Target 52156; HLA-B*37:01; MYH4; ENSG00000264424; TAA
VDILGFTA

SEQ ID NO: 52157 - protein, 11 aa, Homo sapiens
  Table A; Target 52157; HLA-B*27:02; MYH4; ENSG00000264424; TAA
VDILGFTADEK

SEQ ID NO: 52158 - protein, 8 aa, Homo sapiens
  Table A; Target 52158; HLA-A*30:01; MYH4; ENSG00000264424; TAA
VDKLQTKV

SEQ ID NO: 52159 - protein, 8 aa, Homo sapiens
  Table A; Target 52159; HLA-B*37:01; MYH4; ENSG00000264424; TAA
VDKLQTKV

SEQ ID NO: 52160 - protein, 8 aa, Homo sapiens
  Table A; Target 52160; HLA-B*40:02; MYH4; ENSG00000264424; TAA
VDKLQTKV

SEQ ID NO: 52161 - protein, 8 aa, Homo sapiens
  Table A; Target 52161; HLA-C*06:02; MYH4; ENSG00000264424; TAA
VDKLQTKV

SEQ ID NO: 52162 - protein, 8 aa, Homo sapiens
  Table A; Target 52162; HLA-C*12:03; MYH4; ENSG00000264424; TAA
VDKLQTKV

SEQ ID NO: 52163 - protein, 9 aa, Homo sapiens
  Table A; Target 52163; HLA-C*04:01; MYH4; ENSG00000264424; TAA
VDKLQTKVK

SEQ ID NO: 52164 - protein, 9 aa, Homo sapiens
  Table A; Target 52164; HLA-C*06:02; MYH4; ENSG00000264424; TAA
VDKLQTKVK

SEQ ID NO: 52165 - protein, 9 aa, Homo sapiens
  Table A; Target 52165; HLA-C*07:01; MYH4; ENSG00000264424; TAA
VDKLQTKVK

SEQ ID NO: 52166 - protein, 8 aa, Homo sapiens
  Table A; Target 52166; HLA-B*37:01; MYH4; ENSG00000264424; TAA
VDYNIAGW

SEQ ID NO: 52167 - protein, 9 aa, Homo sapiens
  Table A; Target 52167; HLA-B*49:01; MYH4; ENSG00000264424; TAA
VEAVNSKCA

SEQ ID NO: 52168 - protein, 8 aa, Homo sapiens
  Table A; Target 52168; HLA-B*49:01; MYH4; ENSG00000264424; TAA
VEDLMIDV

SEQ ID NO: 52169 - protein, 10 aa, Homo sapiens
  Table A; Target 52169; HLA-B*27:02; MYH4; ENSG00000264424; TAA
VEDLMIDVER

SEQ ID NO: 52170 - protein, 8 aa, Homo sapiens
  Table A; Target 52170; HLA-B*08:01; MYH4; ENSG00000264424; TAA
VEELRASL

SEQ ID NO: 52171 - protein, 8 aa, Homo sapiens
  Table A; Target 52171; HLA-B*18:01; MYH4; ENSG00000264424; TAA
VEELRASL

SEQ ID NO: 52172 - protein, 8 aa, Homo sapiens
  Table A; Target 52172; HLA-B*37:01; MYH4; ENSG00000264424; TAA
VEELRASL

SEQ ID NO: 52173 - protein, 8 aa, Homo sapiens
  Table A; Target 52173; HLA-B*40:01; MYH4; ENSG00000264424; TAA
VEELRASL

SEQ ID NO: 52174 - protein, 8 aa, Homo sapiens
  Table A; Target 52174; HLA-B*40:02; MYH4; ENSG00000264424; TAA
VEELRASL

SEQ ID NO: 52175 - protein, 8 aa, Homo sapiens
  Table A; Target 52175; HLA-B*18:01; MYH4; ENSG00000264424; TAA
VERRANLM

SEQ ID NO: 52176 - protein, 8 aa, Homo sapiens
  Table A; Target 52176; HLA-B*37:01; MYH4; ENSG00000264424; TAA
VERRANLM

SEQ ID NO: 52177 - protein, 9 aa, Homo sapiens
  Table A; Target 52177; HLA-B*40:02; MYH4; ENSG00000264424; TAA
VERSNAACI

SEQ ID NO: 52178 - protein, 9 aa, Homo sapiens
  Table A; Target 52178; HLA-B*49:01; MYH4; ENSG00000264424; TAA
VERSNAACI

SEQ ID NO: 52179 - protein, 9 aa, Homo sapiens
  Table A; Target 52179; HLA-B*13:02; MYH4; ENSG00000264424; TAA
VESEQKHNV

SEQ ID NO: 52180 - protein, 9 aa, Homo sapiens
  Table A; Target 52180; HLA-B*37:01; MYH4; ENSG00000264424; TAA
VESEQKHNV

SEQ ID NO: 52181 - protein, 9 aa, Homo sapiens
  Table A; Target 52181; HLA-B*40:01; MYH4; ENSG00000264424; TAA
VESEQKHNV

SEQ ID NO: 52182 - protein, 9 aa, Homo sapiens
  Table A; Target 52182; HLA-B*44:02; MYH4; ENSG00000264424; TAA
VESEQKHNV

SEQ ID NO: 52183 - protein, 9 aa, Homo sapiens
  Table A; Target 52183; HLA-B*44:03; MYH4; ENSG00000264424; TAA
VESEQKHNV

SEQ ID NO: 52184 - protein, 9 aa, Homo sapiens
  Table A; Target 52184; HLA-B*49:01; MYH4; ENSG00000264424; TAA
VESEQKHNV

SEQ ID NO: 52185 - protein, 9 aa, Homo sapiens
  Table A; Target 52185; HLA-C*02:02; MYH4; ENSG00000264424; TAA
VESEQKHNV

SEQ ID NO: 52186 - protein, 9 aa, Homo sapiens
  Table A; Target 52186; HLA-C*16:02; MYH4; ENSG00000264424; TAA
VESEQKHNV

SEQ ID NO: 52187 - protein, 9 aa, Homo sapiens
  Table A; Target 52187; HLA-C*16:04; MYH4; ENSG00000264424; TAA
VESEQKHNV

SEQ ID NO: 52188 - protein, 8 aa, Homo sapiens
  Table A; Target 52188; HLA-A*30:01; MYH4; ENSG00000264424; TAA
VESMQSTL

SEQ ID NO: 52189 - protein, 8 aa, Homo sapiens
  Table A; Target 52189; HLA-B*18:01; MYH4; ENSG00000264424; TAA
VESMQSTL

SEQ ID NO: 52190 - protein, 8 aa, Homo sapiens
  Table A; Target 52190; HLA-B*37:01; MYH4; ENSG00000264424; TAA
VESMQSTL

SEQ ID NO: 52191 - protein, 8 aa, Homo sapiens
  Table A; Target 52191; HLA-B*40:01; MYH4; ENSG00000264424; TAA
VESMQSTL

SEQ ID NO: 52192 - protein, 8 aa, Homo sapiens
  Table A; Target 52192; HLA-B*49:01; MYH4; ENSG00000264424; TAA
VESMQSTL

SEQ ID NO: 52193 - protein, 9 aa, Homo sapiens
  Table A; Target 52193; HLA-A*23:01; MYH4; ENSG00000264424; TAA
VFSMNPPKY

SEQ ID NO: 52194 - protein, 9 aa, Homo sapiens
  Table A; Target 52194; HLA-A*24:02; MYH4; ENSG00000264424; TAA
VFSMNPPKY

SEQ ID NO: 52195 - protein, 9 aa, Homo sapiens
  Table A; Target 52195; HLA-A*29:02; MYH4; ENSG00000264424; TAA
VFSMNPPKY

SEQ ID NO: 52196 - protein, 9 aa, Homo sapiens
  Table A; Target 52196; HLA-A*30:02; MYH4; ENSG00000264424; TAA
VFSMNPPKY

SEQ ID NO: 52197 - protein, 9 aa, Homo sapiens
  Table A; Target 52197; HLA-B*15:03; MYH4; ENSG00000264424; TAA
VFSMNPPKY

SEQ ID NO: 52198 - protein, 9 aa, Homo sapiens
  Table A; Target 52198; HLA-C*16:01; MYH4; ENSG00000264424; TAA
VFSMNPPKY

SEQ ID NO: 52199 - protein, 10 aa, Homo sapiens
  Table A; Target 52199; HLA-A*23:01; MYH4; ENSG00000264424; TAA
VFVVDPKESY

SEQ ID NO: 52200 - protein, 10 aa, Homo sapiens
  Table A; Target 52200; HLA-A*29:02; MYH4; ENSG00000264424; TAA
VFVVDPKESY

SEQ ID NO: 52201 - protein, 10 aa, Homo sapiens
  Table A; Target 52201; HLA-A*30:02; MYH4; ENSG00000264424; TAA
VFVVDPKESY

SEQ ID NO: 52202 - protein, 10 aa, Homo sapiens
  Table A; Target 52202; HLA-B*15:01; MYH4; ENSG00000264424; TAA
VFVVDPKESY

SEQ ID NO: 52203 - protein, 10 aa, Homo sapiens
  Table A; Target 52203; HLA-B*15:03; MYH4; ENSG00000264424; TAA
VFVVDPKESY

SEQ ID NO: 52204 - protein, 10 aa, Homo sapiens
  Table A; Target 52204; HLA-B*46:01; MYH4; ENSG00000264424; TAA
VFVVDPKESY

SEQ ID NO: 52205 - protein, 10 aa, Homo sapiens
  Table A; Target 52205; HLA-C*14:02; MYH4; ENSG00000264424; TAA
VFVVDPKESY

SEQ ID NO: 52206 - protein, 9 aa, Homo sapiens
  Table A; Target 52206; HLA-A*30:02; MYH4; ENSG00000264424; TAA
VGALAKAIY

SEQ ID NO: 52207 - protein, 9 aa, Homo sapiens
  Table A; Target 52207; HLA-A*32:01; MYH4; ENSG00000264424; TAA
VGALAKAIY

SEQ ID NO: 52208 - protein, 9 aa, Homo sapiens
  Table A; Target 52208; HLA-B*15:01; MYH4; ENSG00000264424; TAA
VGALAKAIY

SEQ ID NO: 52209 - protein, 9 aa, Homo sapiens
  Table A; Target 52209; HLA-B*15:03; MYH4; ENSG00000264424; TAA
VGALAKAIY

SEQ ID NO: 52210 - protein, 9 aa, Homo sapiens
  Table A; Target 52210; HLA-B*46:01; MYH4; ENSG00000264424; TAA
VGALAKAIY

SEQ ID NO: 52211 - protein, 9 aa, Homo sapiens
  Table A; Target 52211; HLA-C*07:04; MYH4; ENSG00000264424; TAA
VGALAKAIY

SEQ ID NO: 52212 - protein, 9 aa, Homo sapiens
  Table A; Target 52212; HLA-C*16:01; MYH4; ENSG00000264424; TAA
VGALAKAIY

SEQ ID NO: 52213 - protein, 9 aa, Homo sapiens
  Table A; Target 52213; HLA-B*08:01; MYH4; ENSG00000264424; TAA
VGLYQKSAM

SEQ ID NO: 52214 - protein, 9 aa, Homo sapiens
  Table A; Target 52214; HLA-B*46:01; MYH4; ENSG00000264424; TAA
VGLYQKSAM

SEQ ID NO: 52215 - protein, 9 aa, Homo sapiens
  Table A; Target 52215; HLA-C*01:02; MYH4; ENSG00000264424; TAA
VGLYQKSAM

SEQ ID NO: 52216 - protein, 9 aa, Homo sapiens
  Table A; Target 52216; HLA-C*14:02; MYH4; ENSG00000264424; TAA
VGLYQKSAM

SEQ ID NO: 52217 - protein, 8 aa, Homo sapiens
  Table A; Target 52217; HLA-A*03:02; MYH4; ENSG00000264424; TAA
VGNEFVTK

SEQ ID NO: 52218 - protein, 8 aa, Homo sapiens
  Table A; Target 52218; HLA-A*11:01; MYH4; ENSG00000264424; TAA
VGNEFVTK

SEQ ID NO: 52219 - protein, 8 aa, Homo sapiens
  Table A; Target 52219; HLA-B*27:02; MYH4; ENSG00000264424; TAA
VGNEFVTK

SEQ ID NO: 52220 - protein, 9 aa, Homo sapiens
  Table A; Target 52220; HLA-A*29:02; MYH4; ENSG00000264424; TAA
VHYAGTVDY

SEQ ID NO: 52221 - protein, 9 aa, Homo sapiens
  Table A; Target 52221; HLA-A*30:02; MYH4; ENSG00000264424; TAA
VHYAGTVDY

SEQ ID NO: 52222 - protein, 9 aa, Homo sapiens
  Table A; Target 52222; HLA-A*32:01; MYH4; ENSG00000264424; TAA
VHYAGTVDY

SEQ ID NO: 52223 - protein, 9 aa, Homo sapiens
  Table A; Target 52223; HLA-B*15:01; MYH4; ENSG00000264424; TAA
VHYAGTVDY

SEQ ID NO: 52224 - protein, 9 aa, Homo sapiens
  Table A; Target 52224; HLA-B*15:03; MYH4; ENSG00000264424; TAA
VHYAGTVDY

SEQ ID NO: 52225 - protein, 9 aa, Homo sapiens
  Table A; Target 52225; HLA-B*18:01; MYH4; ENSG00000264424; TAA
VHYAGTVDY

SEQ ID NO: 52226 - protein, 9 aa, Homo sapiens
  Table A; Target 52226; HLA-B*27:05; MYH4; ENSG00000264424; TAA
VHYAGTVDY

SEQ ID NO: 52227 - protein, 9 aa, Homo sapiens
  Table A; Target 52227; HLA-B*35:01; MYH4; ENSG00000264424; TAA
VHYAGTVDY

SEQ ID NO: 52228 - protein, 9 aa, Homo sapiens
  Table A; Target 52228; HLA-B*38:01; MYH4; ENSG00000264424; TAA
VHYAGTVDY

SEQ ID NO: 52229 - protein, 9 aa, Homo sapiens
  Table A; Target 52229; HLA-B*39:01; MYH4; ENSG00000264424; TAA
VHYAGTVDY

SEQ ID NO: 52230 - protein, 9 aa, Homo sapiens
  Table A; Target 52230; HLA-B*46:01; MYH4; ENSG00000264424; TAA
VHYAGTVDY

SEQ ID NO: 52231 - protein, 9 aa, Homo sapiens
  Table A; Target 52231; HLA-C*01:02; MYH4; ENSG00000264424; TAA
VHYAGTVDY

SEQ ID NO: 52232 - protein, 9 aa, Homo sapiens
  Table A; Target 52232; HLA-C*02:02; MYH4; ENSG00000264424; TAA
VHYAGTVDY

SEQ ID NO: 52233 - protein, 9 aa, Homo sapiens
  Table A; Target 52233; HLA-C*04:01; MYH4; ENSG00000264424; TAA
VHYAGTVDY

SEQ ID NO: 52234 - protein, 9 aa, Homo sapiens
  Table A; Target 52234; HLA-C*06:02; MYH4; ENSG00000264424; TAA
VHYAGTVDY

SEQ ID NO: 52235 - protein, 9 aa, Homo sapiens
  Table A; Target 52235; HLA-C*07:01; MYH4; ENSG00000264424; TAA
VHYAGTVDY

SEQ ID NO: 52236 - protein, 9 aa, Homo sapiens
  Table A; Target 52236; HLA-C*07:04; MYH4; ENSG00000264424; TAA
VHYAGTVDY

SEQ ID NO: 52237 - protein, 9 aa, Homo sapiens
  Table A; Target 52237; HLA-C*12:03; MYH4; ENSG00000264424; TAA
VHYAGTVDY

SEQ ID NO: 52238 - protein, 9 aa, Homo sapiens
  Table A; Target 52238; HLA-C*14:02; MYH4; ENSG00000264424; TAA
VHYAGTVDY

SEQ ID NO: 52239 - protein, 9 aa, Homo sapiens
  Table A; Target 52239; HLA-C*16:04; MYH4; ENSG00000264424; TAA
VHYAGTVDY

SEQ ID NO: 52240 - protein, 11 aa, Homo sapiens
  Table A; Target 52240; HLA-B*38:01; MYH4; ENSG00000264424; TAA
VHYAGTVDYNI

SEQ ID NO: 52241 - protein, 9 aa, Homo sapiens
  Table A; Target 52241; HLA-B*15:03; MYH4; ENSG00000264424; TAA
VKNAYEESL

SEQ ID NO: 52242 - protein, 8 aa, Homo sapiens
  Table A; Target 52242; HLA-B*15:03; MYH4; ENSG00000264424; TAA
VKNLTEEM

SEQ ID NO: 52243 - protein, 9 aa, Homo sapiens
  Table A; Target 52243; HLA-A*01:01; MYH4; ENSG00000264424; TAA
VLAEWKQKY

SEQ ID NO: 52244 - protein, 9 aa, Homo sapiens
  Table A; Target 52244; HLA-A*03:01; MYH4; ENSG00000264424; TAA
VLAEWKQKY

SEQ ID NO: 52245 - protein, 9 aa, Homo sapiens
  Table A; Target 52245; HLA-A*29:02; MYH4; ENSG00000264424; TAA
VLAEWKQKY

SEQ ID NO: 52246 - protein, 9 aa, Homo sapiens
  Table A; Target 52246; HLA-A*32:01; MYH4; ENSG00000264424; TAA
VLAEWKQKY

SEQ ID NO: 52247 - protein, 9 aa, Homo sapiens
  Table A; Target 52247; HLA-B*15:01; MYH4; ENSG00000264424; TAA
VLAEWKQKY

SEQ ID NO: 52248 - protein, 9 aa, Homo sapiens
  Table A; Target 52248; HLA-A*02:01; MYH4; ENSG00000264424; TAA
VLDIAGFEI

SEQ ID NO: 52249 - protein, 9 aa, Homo sapiens
  Table A; Target 52249; HLA-A*02:07; MYH4; ENSG00000264424; TAA
VLDIAGFEI

SEQ ID NO: 52250 - protein, 9 aa, Homo sapiens
  Table A; Target 52250; HLA-B*13:02; MYH4; ENSG00000264424; TAA
VLDIAGFEI

SEQ ID NO: 52251 - protein, 9 aa, Homo sapiens
  Table A; Target 52251; HLA-B*38:01; MYH4; ENSG00000264424; TAA
VLDIAGFEI

SEQ ID NO: 52252 - protein, 9 aa, Homo sapiens
  Table A; Target 52252; HLA-C*05:01; MYH4; ENSG00000264424; TAA
VLDIAGFEI

SEQ ID NO: 52253 - protein, 9 aa, Homo sapiens
  Table A; Target 52253; HLA-A*31:01; MYH4; ENSG00000264424; TAA
VLEGIRICR

SEQ ID NO: 52254 - protein, 9 aa, Homo sapiens
  Table A; Target 52254; HLA-A*03:02; MYH4; ENSG00000264424; TAA
VLEQEEYKK

SEQ ID NO: 52255 - protein, 9 aa, Homo sapiens
  Table A; Target 52255; HLA-A*01:01; MYH4; ENSG00000264424; TAA
VLYNLKERY

SEQ ID NO: 52256 - protein, 9 aa, Homo sapiens
  Table A; Target 52256; HLA-A*03:01; MYH4; ENSG00000264424; TAA
VLYNLKERY

SEQ ID NO: 52257 - protein, 9 aa, Homo sapiens
  Table A; Target 52257; HLA-A*29:02; MYH4; ENSG00000264424; TAA
VLYNLKERY

SEQ ID NO: 52258 - protein, 9 aa, Homo sapiens
  Table A; Target 52258; HLA-A*30:02; MYH4; ENSG00000264424; TAA
VLYNLKERY

SEQ ID NO: 52259 - protein, 9 aa, Homo sapiens
  Table A; Target 52259; HLA-A*32:01; MYH4; ENSG00000264424; TAA
VLYNLKERY

SEQ ID NO: 52260 - protein, 9 aa, Homo sapiens
  Table A; Target 52260; HLA-B*15:01; MYH4; ENSG00000264424; TAA
VLYNLKERY

SEQ ID NO: 52261 - protein, 9 aa, Homo sapiens
  Table A; Target 52261; HLA-B*46:01; MYH4; ENSG00000264424; TAA
VLYNLKERY

SEQ ID NO: 52262 - protein, 9 aa, Homo sapiens
  Table A; Target 52262; HLA-C*02:02; MYH4; ENSG00000264424; TAA
VLYNLKERY

SEQ ID NO: 52263 - protein, 9 aa, Homo sapiens
  Table A; Target 52263; HLA-A*24:02; MYH4; ENSG00000264424; TAA
VMHYGNMKF

SEQ ID NO: 52264 - protein, 9 aa, Homo sapiens
  Table A; Target 52264; HLA-C*04:01; MYH4; ENSG00000264424; TAA
VMHYGNMKF

SEQ ID NO: 52265 - protein, 9 aa, Homo sapiens
  Table A; Target 52265; HLA-C*16:01; MYH4; ENSG00000264424; TAA
VNTKRVIQY

SEQ ID NO: 52266 - protein, 9 aa, Homo sapiens
  Table A; Target 52266; HLA-C*16:02; MYH4; ENSG00000264424; TAA
VNTKRVIQY

SEQ ID NO: 52267 - protein, 10 aa, Homo sapiens
  Table A; Target 52267; HLA-B*35:03; MYH4; ENSG00000264424; TAA
VPSIDDQEEL

SEQ ID NO: 52268 - protein, 8 aa, Homo sapiens
  Table A; Target 52268; HLA-B*27:05; MYH4; ENSG00000264424; TAA
VQAEADAL

SEQ ID NO: 52269 - protein, 8 aa, Homo sapiens
  Table A; Target 52269; HLA-B*39:01; MYH4; ENSG00000264424; TAA
VQAEADAL

SEQ ID NO: 52270 - protein, 8 aa, Homo sapiens
  Table A; Target 52270; HLA-C*05:01; MYH4; ENSG00000264424; TAA
VQAEADAL

SEQ ID NO: 52271 - protein, 11 aa, Homo sapiens
  Table A; Target 52271; HLA-B*15:01; MYH4; ENSG00000264424; TAA
VQLLHTQNTSL

SEQ ID NO: 52272 - protein, 8 aa, Homo sapiens
  Table A; Target 52272; HLA-B*13:02; MYH4; ENSG00000264424; TAA
VQQVYNAV

SEQ ID NO: 52273 - protein, 9 aa, Homo sapiens
  Table A; Target 52273; HLA-A*32:01; MYH4; ENSG00000264424; TAA
VRNDNSSRF

SEQ ID NO: 52274 - protein, 9 aa, Homo sapiens
  Table A; Target 52274; HLA-B*27:02; MYH4; ENSG00000264424; TAA
VRNDNSSRF

SEQ ID NO: 52275 - protein, 9 aa, Homo sapiens
  Table A; Target 52275; HLA-B*27:05; MYH4; ENSG00000264424; TAA
VRNDNSSRF

SEQ ID NO: 52276 - protein, 9 aa, Homo sapiens
  Table A; Target 52276; HLA-B*38:01; MYH4; ENSG00000264424; TAA
VRNDNSSRF

SEQ ID NO: 52277 - protein, 9 aa, Homo sapiens
  Table A; Target 52277; HLA-C*06:02; MYH4; ENSG00000264424; TAA
VRNDNSSRF

SEQ ID NO: 52278 - protein, 9 aa, Homo sapiens
  Table A; Target 52278; HLA-C*12:03; MYH4; ENSG00000264424; TAA
VRNDNSSRF

SEQ ID NO: 52279 - protein, 9 aa, Homo sapiens
  Table A; Target 52279; HLA-C*16:01; MYH4; ENSG00000264424; TAA
VRNDNSSRF

SEQ ID NO: 52280 - protein, 9 aa, Homo sapiens
  Table A; Target 52280; HLA-C*16:04; MYH4; ENSG00000264424; TAA
VRNDNSSRF

SEQ ID NO: 52281 - protein, 9 aa, Homo sapiens
  Table A; Target 52281; HLA-C*16:01; MYH4; ENSG00000264424; TAA
VSALFRENL

SEQ ID NO: 52282 - protein, 8 aa, Homo sapiens
  Table A; Target 52282; HLA-B*08:01; MYH4; ENSG00000264424; TAA
VSKAKANF

SEQ ID NO: 52283 - protein, 9 aa, Homo sapiens
  Table A; Target 52283; HLA-A*11:01; MYH4; ENSG00000264424; TAA
VTFQLKAER

SEQ ID NO: 52284 - protein, 9 aa, Homo sapiens
  Table A; Target 52284; HLA-A*31:01; MYH4; ENSG00000264424; TAA
VTFQLKAER

SEQ ID NO: 52285 - protein, 9 aa, Homo sapiens
  Table A; Target 52285; HLA-A*33:01; MYH4; ENSG00000264424; TAA
VTFQLKAER

SEQ ID NO: 52286 - protein, 9 aa, Homo sapiens
  Table A; Target 52286; HLA-A*33:03; MYH4; ENSG00000264424; TAA
VTFQLKAER

SEQ ID NO: 52287 - protein, 9 aa, Homo sapiens
  Table A; Target 52287; HLA-A*68:01; MYH4; ENSG00000264424; TAA
VTFQLKAER

SEQ ID NO: 52288 - protein, 9 aa, Homo sapiens
  Table A; Target 52288; HLA-B*57:01; MYH4; ENSG00000264424; TAA
VTFQLKAER

SEQ ID NO: 52289 - protein, 9 aa, Homo sapiens
  Table A; Target 52289; HLA-C*07:06; MYH4; ENSG00000264424; TAA
VTFQLKAER

SEQ ID NO: 52290 - protein, 11 aa, Homo sapiens
  Table A; Target 52290; HLA-B*57:01; MYH4; ENSG00000264424; TAA
VTFQLKAERSY

SEQ ID NO: 52291 - protein, 10 aa, Homo sapiens
  Table A; Target 52291; HLA-A*02:03; MYH4; ENSG00000264424; TAA
VTKGQTVQQV

SEQ ID NO: 52292 - protein, 11 aa, Homo sapiens
  Table A; Target 52292; HLA-A*01:01; MYH4; ENSG00000264424; TAA
VTKGQTVQQVY

SEQ ID NO: 52293 - protein, 11 aa, Homo sapiens
  Table A; Target 52293; HLA-A*23:01; MYH4; ENSG00000264424; TAA
VTKGQTVQQVY

SEQ ID NO: 52294 - protein, 11 aa, Homo sapiens
  Table A; Target 52294; HLA-A*25:01; MYH4; ENSG00000264424; TAA
VTKGQTVQQVY

SEQ ID NO: 52295 - protein, 11 aa, Homo sapiens
  Table A; Target 52295; HLA-A*26:01; MYH4; ENSG00000264424; TAA
VTKGQTVQQVY

SEQ ID NO: 52296 - protein, 11 aa, Homo sapiens
  Table A; Target 52296; HLA-A*29:02; MYH4; ENSG00000264424; TAA
VTKGQTVQQVY

SEQ ID NO: 52297 - protein, 11 aa, Homo sapiens
  Table A; Target 52297; HLA-A*30:02; MYH4; ENSG00000264424; TAA
VTKGQTVQQVY

SEQ ID NO: 52298 - protein, 11 aa, Homo sapiens
  Table A; Target 52298; HLA-A*31:01; MYH4; ENSG00000264424; TAA
VTKGQTVQQVY

SEQ ID NO: 52299 - protein, 11 aa, Homo sapiens
  Table A; Target 52299; HLA-A*32:01; MYH4; ENSG00000264424; TAA
VTKGQTVQQVY

SEQ ID NO: 52300 - protein, 11 aa, Homo sapiens
  Table A; Target 52300; HLA-B*15:01; MYH4; ENSG00000264424; TAA
VTKGQTVQQVY

SEQ ID NO: 52301 - protein, 11 aa, Homo sapiens
  Table A; Target 52301; HLA-B*15:03; MYH4; ENSG00000264424; TAA
VTKGQTVQQVY

SEQ ID NO: 52302 - protein, 11 aa, Homo sapiens
  Table A; Target 52302; HLA-B*46:01; MYH4; ENSG00000264424; TAA
VTKGQTVQQVY

SEQ ID NO: 52303 - protein, 11 aa, Homo sapiens
  Table A; Target 52303; HLA-B*57:01; MYH4; ENSG00000264424; TAA
VTKGQTVQQVY

SEQ ID NO: 52304 - protein, 11 aa, Homo sapiens
  Table A; Target 52304; HLA-B*58:01; MYH4; ENSG00000264424; TAA
VTKGQTVQQVY

SEQ ID NO: 52305 - protein, 11 aa, Homo sapiens
  Table A; Target 52305; HLA-C*02:02; MYH4; ENSG00000264424; TAA
VTKGQTVQQVY

SEQ ID NO: 52306 - protein, 11 aa, Homo sapiens
  Table A; Target 52306; HLA-C*06:02; MYH4; ENSG00000264424; TAA
VTKGQTVQQVY

SEQ ID NO: 52307 - protein, 11 aa, Homo sapiens
  Table A; Target 52307; HLA-C*07:04; MYH4; ENSG00000264424; TAA
VTKGQTVQQVY

SEQ ID NO: 52308 - protein, 11 aa, Homo sapiens
  Table A; Target 52308; HLA-C*12:03; MYH4; ENSG00000264424; TAA
VTKGQTVQQVY

SEQ ID NO: 52309 - protein, 11 aa, Homo sapiens
  Table A; Target 52309; HLA-C*16:01; MYH4; ENSG00000264424; TAA
VTKGQTVQQVY

SEQ ID NO: 52310 - protein, 11 aa, Homo sapiens
  Table A; Target 52310; HLA-C*16:02; MYH4; ENSG00000264424; TAA
VTKGQTVQQVY

SEQ ID NO: 52311 - protein, 11 aa, Homo sapiens
  Table A; Target 52311; HLA-C*16:04; MYH4; ENSG00000264424; TAA
VTKGQTVQQVY

SEQ ID NO: 52312 - protein, 8 aa, Homo sapiens
  Table A; Target 52312; HLA-B*08:01; MYH4; ENSG00000264424; TAA
VTRINQQL

SEQ ID NO: 52313 - protein, 11 aa, Homo sapiens
  Table A; Target 52313; HLA-A*03:01; MYH4; ENSG00000264424; TAA
VTRINQQLDTK

SEQ ID NO: 52314 - protein, 11 aa, Homo sapiens
  Table A; Target 52314; HLA-A*03:02; MYH4; ENSG00000264424; TAA
VTRINQQLDTK

SEQ ID NO: 52315 - protein, 11 aa, Homo sapiens
  Table A; Target 52315; HLA-A*11:01; MYH4; ENSG00000264424; TAA
VTRINQQLDTK

SEQ ID NO: 52316 - protein, 9 aa, Homo sapiens
  Table A; Target 52316; HLA-A*23:01; MYH4; ENSG00000264424; TAA
VTVKEDQVF

SEQ ID NO: 52317 - protein, 9 aa, Homo sapiens
  Table A; Target 52317; HLA-A*32:01; MYH4; ENSG00000264424; TAA
VTVKEDQVF

SEQ ID NO: 52318 - protein, 9 aa, Homo sapiens
  Table A; Target 52318; HLA-B*15:01; MYH4; ENSG00000264424; TAA
VTVKEDQVF

SEQ ID NO: 52319 - protein, 9 aa, Homo sapiens
  Table A; Target 52319; HLA-B*15:03; MYH4; ENSG00000264424; TAA
VTVKEDQVF

SEQ ID NO: 52320 - protein, 9 aa, Homo sapiens
  Table A; Target 52320; HLA-B*38:01; MYH4; ENSG00000264424; TAA
VTVKEDQVF

SEQ ID NO: 52321 - protein, 9 aa, Homo sapiens
  Table A; Target 52321; HLA-B*39:01; MYH4; ENSG00000264424; TAA
VTVKEDQVF

SEQ ID NO: 52322 - protein, 9 aa, Homo sapiens
  Table A; Target 52322; HLA-B*57:01; MYH4; ENSG00000264424; TAA
VTVKEDQVF

SEQ ID NO: 52323 - protein, 9 aa, Homo sapiens
  Table A; Target 52323; HLA-B*58:01; MYH4; ENSG00000264424; TAA
VTVKEDQVF

SEQ ID NO: 52324 - protein, 8 aa, Homo sapiens
  Table A; Target 52324; HLA-B*57:01; MYH4; ENSG00000264424; TAA
VTVNPYKW

SEQ ID NO: 52325 - protein, 8 aa, Homo sapiens
  Table A; Target 52325; HLA-B*58:01; MYH4; ENSG00000264424; TAA
VTVNPYKW

SEQ ID NO: 52326 - protein, 8 aa, Homo sapiens
  Table A; Target 52326; HLA-A*01:01; MYH4; ENSG00000264424; TAA
VVDPKESY

SEQ ID NO: 52327 - protein, 8 aa, Homo sapiens
  Table A; Target 52327; HLA-A*30:02; MYH4; ENSG00000264424; TAA
VVDPKESY

SEQ ID NO: 52328 - protein, 8 aa, Homo sapiens
  Table A; Target 52328; HLA-A*32:01; MYH4; ENSG00000264424; TAA
VVDPKESY

SEQ ID NO: 52329 - protein, 8 aa, Homo sapiens
  Table A; Target 52329; HLA-B*15:01; MYH4; ENSG00000264424; TAA
VVDPKESY

SEQ ID NO: 52330 - protein, 8 aa, Homo sapiens
  Table A; Target 52330; HLA-C*04:01; MYH4; ENSG00000264424; TAA
VVDPKESY

SEQ ID NO: 52331 - protein, 8 aa, Homo sapiens
  Table A; Target 52331; HLA-C*05:01; MYH4; ENSG00000264424; TAA
VVDPKESY

SEQ ID NO: 52332 - protein, 8 aa, Homo sapiens
  Table A; Target 52332; HLA-C*16:01; MYH4; ENSG00000264424; TAA
VVDPKESY

SEQ ID NO: 52333 - protein, 8 aa, Homo sapiens
  Table A; Target 52333; HLA-C*16:02; MYH4; ENSG00000264424; TAA
VVDPKESY

SEQ ID NO: 52334 - protein, 9 aa, Homo sapiens
  Table A; Target 52334; HLA-A*01:01; MYH4; ENSG00000264424; TAA
VVDPKESYV

SEQ ID NO: 52335 - protein, 9 aa, Homo sapiens
  Table A; Target 52335; HLA-A*02:01; MYH4; ENSG00000264424; TAA
VVDPKESYV

SEQ ID NO: 52336 - protein, 9 aa, Homo sapiens
  Table A; Target 52336; HLA-A*02:03; MYH4; ENSG00000264424; TAA
VVDPKESYV

SEQ ID NO: 52337 - protein, 9 aa, Homo sapiens
  Table A; Target 52337; HLA-A*02:07; MYH4; ENSG00000264424; TAA
VVDPKESYV

SEQ ID NO: 52338 - protein, 9 aa, Homo sapiens
  Table A; Target 52338; HLA-B*13:02; MYH4; ENSG00000264424; TAA
VVDPKESYV

SEQ ID NO: 52339 - protein, 9 aa, Homo sapiens
  Table A; Target 52339; HLA-B*38:01; MYH4; ENSG00000264424; TAA
VVDPKESYV

SEQ ID NO: 52340 - protein, 9 aa, Homo sapiens
  Table A; Target 52340; HLA-B*39:01; MYH4; ENSG00000264424; TAA
VVDPKESYV

SEQ ID NO: 52341 - protein, 9 aa, Homo sapiens
  Table A; Target 52341; HLA-B*55:01; MYH4; ENSG00000264424; TAA
VVDPKESYV

SEQ ID NO: 52342 - protein, 9 aa, Homo sapiens
  Table A; Target 52342; HLA-C*03:03; MYH4; ENSG00000264424; TAA
VVDPKESYV

SEQ ID NO: 52343 - protein, 9 aa, Homo sapiens
  Table A; Target 52343; HLA-C*03:04; MYH4; ENSG00000264424; TAA
VVDPKESYV

SEQ ID NO: 52344 - protein, 9 aa, Homo sapiens
  Table A; Target 52344; HLA-C*04:01; MYH4; ENSG00000264424; TAA
VVDPKESYV

SEQ ID NO: 52345 - protein, 9 aa, Homo sapiens
  Table A; Target 52345; HLA-C*05:01; MYH4; ENSG00000264424; TAA
VVDPKESYV

SEQ ID NO: 52346 - protein, 9 aa, Homo sapiens
  Table A; Target 52346; HLA-C*07:04; MYH4; ENSG00000264424; TAA
VVDPKESYV

SEQ ID NO: 52347 - protein, 10 aa, Homo sapiens
  Table A; Target 52347; HLA-A*01:01; MYH4; ENSG00000264424; TAA
VVDPKESYVK

SEQ ID NO: 52348 - protein, 10 aa, Homo sapiens
  Table A; Target 52348; HLA-A*03:01; MYH4; ENSG00000264424; TAA
VVDPKESYVK

SEQ ID NO: 52349 - protein, 10 aa, Homo sapiens
  Table A; Target 52349; HLA-A*03:02; MYH4; ENSG00000264424; TAA
VVDPKESYVK

SEQ ID NO: 52350 - protein, 10 aa, Homo sapiens
  Table A; Target 52350; HLA-A*11:01; MYH4; ENSG00000264424; TAA
VVDPKESYVK

SEQ ID NO: 52351 - protein, 10 aa, Homo sapiens
  Table A; Target 52351; HLA-A*29:02; MYH4; ENSG00000264424; TAA
VVDPKESYVK

SEQ ID NO: 52352 - protein, 10 aa, Homo sapiens
  Table A; Target 52352; HLA-A*31:01; MYH4; ENSG00000264424; TAA
VVDPKESYVK

SEQ ID NO: 52353 - protein, 10 aa, Homo sapiens
  Table A; Target 52353; HLA-A*68:01; MYH4; ENSG00000264424; TAA
VVDPKESYVK

SEQ ID NO: 52354 - protein, 10 aa, Homo sapiens
  Table A; Target 52354; HLA-B*27:02; MYH4; ENSG00000264424; TAA
VVDPKESYVK

SEQ ID NO: 52355 - protein, 10 aa, Homo sapiens
  Table A; Target 52355; HLA-B*27:05; MYH4; ENSG00000264424; TAA
VVDPKESYVK

SEQ ID NO: 52356 - protein, 9 aa, Homo sapiens
  Table A; Target 52356; HLA-B*27:05; MYH4; ENSG00000264424; TAA
VVESMQSTL

SEQ ID NO: 52357 - protein, 9 aa, Homo sapiens
  Table A; Target 52357; HLA-B*38:01; MYH4; ENSG00000264424; TAA
VVESMQSTL

SEQ ID NO: 52358 - protein, 9 aa, Homo sapiens
  Table A; Target 52358; HLA-B*39:01; MYH4; ENSG00000264424; TAA
VVESMQSTL

SEQ ID NO: 52359 - protein, 9 aa, Homo sapiens
  Table A; Target 52359; HLA-B*40:01; MYH4; ENSG00000264424; TAA
VVESMQSTL

SEQ ID NO: 52360 - protein, 9 aa, Homo sapiens
  Table A; Target 52360; HLA-B*58:01; MYH4; ENSG00000264424; TAA
VVESMQSTL

SEQ ID NO: 52361 - protein, 9 aa, Homo sapiens
  Table A; Target 52361; HLA-C*01:02; MYH4; ENSG00000264424; TAA
VVESMQSTL

SEQ ID NO: 52362 - protein, 9 aa, Homo sapiens
  Table A; Target 52362; HLA-C*03:03; MYH4; ENSG00000264424; TAA
VVESMQSTL

SEQ ID NO: 52363 - protein, 9 aa, Homo sapiens
  Table A; Target 52363; HLA-C*03:04; MYH4; ENSG00000264424; TAA
VVESMQSTL

SEQ ID NO: 52364 - protein, 9 aa, Homo sapiens
  Table A; Target 52364; HLA-C*05:01; MYH4; ENSG00000264424; TAA
VVESMQSTL

SEQ ID NO: 52365 - protein, 9 aa, Homo sapiens
  Table A; Target 52365; HLA-C*07:04; MYH4; ENSG00000264424; TAA
VVESMQSTL

SEQ ID NO: 52366 - protein, 9 aa, Homo sapiens
  Table A; Target 52366; HLA-C*16:02; MYH4; ENSG00000264424; TAA
VVESMQSTL

SEQ ID NO: 52367 - protein, 8 aa, Homo sapiens
  Table A; Target 52367; HLA-A*23:01; MYH4; ENSG00000264424; TAA
VYNAVGAL

SEQ ID NO: 52368 - protein, 8 aa, Homo sapiens
  Table A; Target 52368; HLA-A*24:02; MYH4; ENSG00000264424; TAA
VYNAVGAL

SEQ ID NO: 52369 - protein, 8 aa, Homo sapiens
  Table A; Target 52369; HLA-A*30:02; MYH4; ENSG00000264424; TAA
VYNAVGAL

SEQ ID NO: 52370 - protein, 8 aa, Homo sapiens
  Table A; Target 52370; HLA-B*07:02; MYH4; ENSG00000264424; TAA
VYNAVGAL

SEQ ID NO: 52371 - protein, 8 aa, Homo sapiens
  Table A; Target 52371; HLA-B*39:01; MYH4; ENSG00000264424; TAA
VYNAVGAL

SEQ ID NO: 52372 - protein, 8 aa, Homo sapiens
  Table A; Target 52372; HLA-B*46:01; MYH4; ENSG00000264424; TAA
VYNAVGAL

SEQ ID NO: 52373 - protein, 8 aa, Homo sapiens
  Table A; Target 52373; HLA-C*01:02; MYH4; ENSG00000264424; TAA
VYNAVGAL

SEQ ID NO: 52374 - protein, 8 aa, Homo sapiens
  Table A; Target 52374; HLA-C*04:01; MYH4; ENSG00000264424; TAA
VYNAVGAL

SEQ ID NO: 52375 - protein, 8 aa, Homo sapiens
  Table A; Target 52375; HLA-C*06:02; MYH4; ENSG00000264424; TAA
VYNAVGAL

SEQ ID NO: 52376 - protein, 8 aa, Homo sapiens
  Table A; Target 52376; HLA-C*07:02; MYH4; ENSG00000264424; TAA
VYNAVGAL

SEQ ID NO: 52377 - protein, 8 aa, Homo sapiens
  Table A; Target 52377; HLA-C*07:04; MYH4; ENSG00000264424; TAA
VYNAVGAL

SEQ ID NO: 52378 - protein, 8 aa, Homo sapiens
  Table A; Target 52378; HLA-C*14:02; MYH4; ENSG00000264424; TAA
VYNAVGAL

SEQ ID NO: 52379 - protein, 8 aa, Homo sapiens
  Table A; Target 52379; HLA-C*16:02; MYH4; ENSG00000264424; TAA
VYNAVGAL

SEQ ID NO: 52380 - protein, 9 aa, Homo sapiens
  Table A; Target 52380; HLA-A*23:01; MYH4; ENSG00000264424; TAA
VYNAVGALA

SEQ ID NO: 52381 - protein, 9 aa, Homo sapiens
  Table A; Target 52381; HLA-A*24:02; MYH4; ENSG00000264424; TAA
VYNAVGALA

SEQ ID NO: 52382 - protein, 9 aa, Homo sapiens
  Table A; Target 52382; HLA-A*29:02; MYH4; ENSG00000264424; TAA
VYNAVGALA

SEQ ID NO: 52383 - protein, 9 aa, Homo sapiens
  Table A; Target 52383; HLA-A*30:02; MYH4; ENSG00000264424; TAA
VYNAVGALA

SEQ ID NO: 52384 - protein, 9 aa, Homo sapiens
  Table A; Target 52384; HLA-B*46:01; MYH4; ENSG00000264424; TAA
VYNAVGALA

SEQ ID NO: 52385 - protein, 9 aa, Homo sapiens
  Table A; Target 52385; HLA-C*01:02; MYH4; ENSG00000264424; TAA
VYNAVGALA

SEQ ID NO: 52386 - protein, 9 aa, Homo sapiens
  Table A; Target 52386; HLA-C*14:02; MYH4; ENSG00000264424; TAA
VYNAVGALA

SEQ ID NO: 52387 - protein, 10 aa, Homo sapiens
  Table A; Target 52387; HLA-A*03:01; MYH4; ENSG00000264424; TAA
VYNAVGALAK

SEQ ID NO: 52388 - protein, 10 aa, Homo sapiens
  Table A; Target 52388; HLA-A*03:02; MYH4; ENSG00000264424; TAA
VYNAVGALAK

SEQ ID NO: 52389 - protein, 10 aa, Homo sapiens
  Table A; Target 52389; HLA-A*23:01; MYH4; ENSG00000264424; TAA
VYNAVGALAK

SEQ ID NO: 52390 - protein, 10 aa, Homo sapiens
  Table A; Target 52390; HLA-A*24:02; MYH4; ENSG00000264424; TAA
VYNAVGALAK

SEQ ID NO: 52391 - protein, 10 aa, Homo sapiens
  Table A; Target 52391; HLA-A*29:02; MYH4; ENSG00000264424; TAA
VYNAVGALAK

SEQ ID NO: 52392 - protein, 10 aa, Homo sapiens
  Table A; Target 52392; HLA-A*31:01; MYH4; ENSG00000264424; TAA
VYNAVGALAK

SEQ ID NO: 52393 - protein, 10 aa, Homo sapiens
  Table A; Target 52393; HLA-A*33:01; MYH4; ENSG00000264424; TAA
VYNAVGALAK

SEQ ID NO: 52394 - protein, 10 aa, Homo sapiens
  Table A; Target 52394; HLA-A*33:03; MYH4; ENSG00000264424; TAA
VYNAVGALAK

SEQ ID NO: 52395 - protein, 10 aa, Homo sapiens
  Table A; Target 52395; HLA-B*27:02; MYH4; ENSG00000264424; TAA
VYNAVGALAK

SEQ ID NO: 52396 - protein, 10 aa, Homo sapiens
  Table A; Target 52396; HLA-B*27:05; MYH4; ENSG00000264424; TAA
VYNAVGALAK

SEQ ID NO: 52397 - protein, 10 aa, Homo sapiens
  Table A; Target 52397; HLA-C*01:02; MYH4; ENSG00000264424; TAA
VYNAVGALAK

SEQ ID NO: 52398 - protein, 10 aa, Homo sapiens
  Table A; Target 52398; HLA-C*07:02; MYH4; ENSG00000264424; TAA
VYNAVGALAK

SEQ ID NO: 52399 - protein, 10 aa, Homo sapiens
  Table A; Target 52399; HLA-C*14:02; MYH4; ENSG00000264424; TAA
VYNAVGALAK

SEQ ID NO: 52400 - protein, 9 aa, Homo sapiens
  Table A; Target 52400; HLA-A*23:01; MYH4; ENSG00000264424; TAA
VYNPEVVTA

SEQ ID NO: 52401 - protein, 9 aa, Homo sapiens
  Table A; Target 52401; HLA-A*24:02; MYH4; ENSG00000264424; TAA
VYNPEVVTA

SEQ ID NO: 52402 - protein, 9 aa, Homo sapiens
  Table A; Target 52402; HLA-B*56:01; MYH4; ENSG00000264424; TAA
VYNPEVVTA

SEQ ID NO: 52403 - protein, 9 aa, Homo sapiens
  Table A; Target 52403; HLA-C*14:02; MYH4; ENSG00000264424; TAA
VYNPEVVTA

SEQ ID NO: 52404 - protein, 10 aa, Homo sapiens
  Table A; Target 52404; HLA-A*23:01; MYH4; ENSG00000264424; TAA
VYNPEVVTAY

SEQ ID NO: 52405 - protein, 10 aa, Homo sapiens
  Table A; Target 52405; HLA-A*24:02; MYH4; ENSG00000264424; TAA
VYNPEVVTAY

SEQ ID NO: 52406 - protein, 10 aa, Homo sapiens
  Table A; Target 52406; HLA-A*25:01; MYH4; ENSG00000264424; TAA
VYNPEVVTAY

SEQ ID NO: 52407 - protein, 10 aa, Homo sapiens
  Table A; Target 52407; HLA-A*26:01; MYH4; ENSG00000264424; TAA
VYNPEVVTAY

SEQ ID NO: 52408 - protein, 10 aa, Homo sapiens
  Table A; Target 52408; HLA-A*29:02; MYH4; ENSG00000264424; TAA
VYNPEVVTAY

SEQ ID NO: 52409 - protein, 10 aa, Homo sapiens
  Table A; Target 52409; HLA-A*30:02; MYH4; ENSG00000264424; TAA
VYNPEVVTAY

SEQ ID NO: 52410 - protein, 10 aa, Homo sapiens
  Table A; Target 52410; HLA-A*31:01; MYH4; ENSG00000264424; TAA
VYNPEVVTAY

SEQ ID NO: 52411 - protein, 10 aa, Homo sapiens
  Table A; Target 52411; HLA-A*32:01; MYH4; ENSG00000264424; TAA
VYNPEVVTAY

SEQ ID NO: 52412 - protein, 10 aa, Homo sapiens
  Table A; Target 52412; HLA-A*33:03; MYH4; ENSG00000264424; TAA
VYNPEVVTAY

SEQ ID NO: 52413 - protein, 10 aa, Homo sapiens
  Table A; Target 52413; HLA-B*15:01; MYH4; ENSG00000264424; TAA
VYNPEVVTAY

SEQ ID NO: 52414 - protein, 10 aa, Homo sapiens
  Table A; Target 52414; HLA-B*15:03; MYH4; ENSG00000264424; TAA
VYNPEVVTAY

SEQ ID NO: 52415 - protein, 10 aa, Homo sapiens
  Table A; Target 52415; HLA-B*27:02; MYH4; ENSG00000264424; TAA
VYNPEVVTAY

SEQ ID NO: 52416 - protein, 10 aa, Homo sapiens
  Table A; Target 52416; HLA-B*44:02; MYH4; ENSG00000264424; TAA
VYNPEVVTAY

SEQ ID NO: 52417 - protein, 10 aa, Homo sapiens
  Table A; Target 52417; HLA-B*46:01; MYH4; ENSG00000264424; TAA
VYNPEVVTAY

SEQ ID NO: 52418 - protein, 10 aa, Homo sapiens
  Table A; Target 52418; HLA-B*57:01; MYH4; ENSG00000264424; TAA
VYNPEVVTAY

SEQ ID NO: 52419 - protein, 10 aa, Homo sapiens
  Table A; Target 52419; HLA-B*58:01; MYH4; ENSG00000264424; TAA
VYNPEVVTAY

SEQ ID NO: 52420 - protein, 10 aa, Homo sapiens
  Table A; Target 52420; HLA-C*01:02; MYH4; ENSG00000264424; TAA
VYNPEVVTAY

SEQ ID NO: 52421 - protein, 10 aa, Homo sapiens
  Table A; Target 52421; HLA-C*02:02; MYH4; ENSG00000264424; TAA
VYNPEVVTAY

SEQ ID NO: 52422 - protein, 10 aa, Homo sapiens
  Table A; Target 52422; HLA-C*07:04; MYH4; ENSG00000264424; TAA
VYNPEVVTAY

SEQ ID NO: 52423 - protein, 10 aa, Homo sapiens
  Table A; Target 52423; HLA-C*14:02; MYH4; ENSG00000264424; TAA
VYNPEVVTAY

SEQ ID NO: 52424 - protein, 10 aa, Homo sapiens
  Table A; Target 52424; HLA-C*16:04; MYH4; ENSG00000264424; TAA
VYNPEVVTAY

SEQ ID NO: 52425 - protein, 11 aa, Homo sapiens
  Table A; Target 52425; HLA-A*31:01; MYH4; ENSG00000264424; TAA
VYNPEVVTAYR

SEQ ID NO: 52426 - protein, 11 aa, Homo sapiens
  Table A; Target 52426; HLA-A*33:01; MYH4; ENSG00000264424; TAA
VYNPEVVTAYR

SEQ ID NO: 52427 - protein, 11 aa, Homo sapiens
  Table A; Target 52427; HLA-A*33:03; MYH4; ENSG00000264424; TAA
VYNPEVVTAYR

SEQ ID NO: 52428 - protein, 9 aa, Homo sapiens
  Table A; Target 52428; HLA-A*02:01; MYH4; ENSG00000264424; TAA
WLPVYNPEV

SEQ ID NO: 52429 - protein, 9 aa, Homo sapiens
  Table A; Target 52429; HLA-A*02:07; MYH4; ENSG00000264424; TAA
WLPVYNPEV

SEQ ID NO: 52430 - protein, 9 aa, Homo sapiens
  Table A; Target 52430; HLA-A*01:01; MYH4; ENSG00000264424; TAA
YAAWMIYTY

SEQ ID NO: 52431 - protein, 9 aa, Homo sapiens
  Table A; Target 52431; HLA-A*26:01; MYH4; ENSG00000264424; TAA
YAAWMIYTY

SEQ ID NO: 52432 - protein, 9 aa, Homo sapiens
  Table A; Target 52432; HLA-A*29:02; MYH4; ENSG00000264424; TAA
YAAWMIYTY

SEQ ID NO: 52433 - protein, 9 aa, Homo sapiens
  Table A; Target 52433; HLA-B*35:01; MYH4; ENSG00000264424; TAA
YAAWMIYTY

SEQ ID NO: 52434 - protein, 9 aa, Homo sapiens
  Table A; Target 52434; HLA-B*54:01; MYH4; ENSG00000264424; TAA
YAAWMIYTY

SEQ ID NO: 52435 - protein, 9 aa, Homo sapiens
  Table A; Target 52435; HLA-B*57:01; MYH4; ENSG00000264424; TAA
YAAWMIYTY

SEQ ID NO: 52436 - protein, 9 aa, Homo sapiens
  Table A; Target 52436; HLA-C*02:02; MYH4; ENSG00000264424; TAA
YAAWMIYTY

SEQ ID NO: 52437 - protein, 9 aa, Homo sapiens
  Table A; Target 52437; HLA-C*12:03; MYH4; ENSG00000264424; TAA
YAAWMIYTY

SEQ ID NO: 52438 - protein, 9 aa, Homo sapiens
  Table A; Target 52438; HLA-C*16:04; MYH4; ENSG00000264424; TAA
YAAWMIYTY

SEQ ID NO: 52439 - protein, 8 aa, Homo sapiens
  Table A; Target 52439; HLA-A*01:01; MYH4; ENSG00000264424; TAA
YADFKQRY

SEQ ID NO: 52440 - protein, 8 aa, Homo sapiens
  Table A; Target 52440; HLA-B*08:01; MYH4; ENSG00000264424; TAA
YADFKQRY

SEQ ID NO: 52441 - protein, 9 aa, Homo sapiens
  Table A; Target 52441; HLA-A*03:01; MYH4; ENSG00000264424; TAA
YADFKQRYK

SEQ ID NO: 52442 - protein, 8 aa, Homo sapiens
  Table A; Target 52442; HLA-C*07:04; MYH4; ENSG00000264424; TAA
YAGTVDYN

SEQ ID NO: 52443 - protein, 8 aa, Homo sapiens
  Table A; Target 52443; HLA-C*12:03; MYH4; ENSG00000264424; TAA
YAGTVDYN

SEQ ID NO: 52444 - protein, 9 aa, Homo sapiens
  Table A; Target 52444; HLA-A*23:01; MYH4; ENSG00000264424; TAA
YAGTVDYNI

SEQ ID NO: 52445 - protein, 9 aa, Homo sapiens
  Table A; Target 52445; HLA-A*68:02; MYH4; ENSG00000264424; TAA
YAGTVDYNI

SEQ ID NO: 52446 - protein, 9 aa, Homo sapiens
  Table A; Target 52446; HLA-B*13:02; MYH4; ENSG00000264424; TAA
YAGTVDYNI

SEQ ID NO: 52447 - protein, 9 aa, Homo sapiens
  Table A; Target 52447; HLA-B*35:03; MYH4; ENSG00000264424; TAA
YAGTVDYNI

SEQ ID NO: 52448 - protein, 9 aa, Homo sapiens
  Table A; Target 52448; HLA-B*38:01; MYH4; ENSG00000264424; TAA
YAGTVDYNI

SEQ ID NO: 52449 - protein, 9 aa, Homo sapiens
  Table A; Target 52449; HLA-B*51:01; MYH4; ENSG00000264424; TAA
YAGTVDYNI

SEQ ID NO: 52450 - protein, 9 aa, Homo sapiens
  Table A; Target 52450; HLA-B*58:01; MYH4; ENSG00000264424; TAA
YAGTVDYNI

SEQ ID NO: 52451 - protein, 9 aa, Homo sapiens
  Table A; Target 52451; HLA-C*16:04; MYH4; ENSG00000264424; TAA
YAGTVDYNI

SEQ ID NO: 52452 - protein, 9 aa, Homo sapiens
  Table A; Target 52452; HLA-A*30:01; MYH4; ENSG00000264424; TAA
YDKIEDMAM

SEQ ID NO: 52453 - protein, 9 aa, Homo sapiens
  Table A; Target 52453; HLA-B*40:02; MYH4; ENSG00000264424; TAA
YDKIEDMAM

SEQ ID NO: 52454 - protein, 9 aa, Homo sapiens
  Table A; Target 52454; HLA-B*40:01; MYH4; ENSG00000264424; TAA
YEEEQEAKA

SEQ ID NO: 52455 - protein, 9 aa, Homo sapiens
  Table A; Target 52455; HLA-B*49:01; MYH4; ENSG00000264424; TAA
YEEEQEAKA

SEQ ID NO: 52456 - protein, 11 aa, Homo sapiens
  Table A; Target 52456; HLA-A*30:01; MYH4; ENSG00000264424; TAA
YEEEQEAKAEL

SEQ ID NO: 52457 - protein, 11 aa, Homo sapiens
  Table A; Target 52457; HLA-B*18:01; MYH4; ENSG00000264424; TAA
YEEEQEAKAEL

SEQ ID NO: 52458 - protein, 11 aa, Homo sapiens
  Table A; Target 52458; HLA-B*27:05; MYH4; ENSG00000264424; TAA
YEEEQEAKAEL

SEQ ID NO: 52459 - protein, 11 aa, Homo sapiens
  Table A; Target 52459; HLA-B*38:01; MYH4; ENSG00000264424; TAA
YEEEQEAKAEL

SEQ ID NO: 52460 - protein, 11 aa, Homo sapiens
  Table A; Target 52460; HLA-B*39:01; MYH4; ENSG00000264424; TAA
YEEEQEAKAEL

SEQ ID NO: 52461 - protein, 11 aa, Homo sapiens
  Table A; Target 52461; HLA-B*40:01; MYH4; ENSG00000264424; TAA
YEEEQEAKAEL

SEQ ID NO: 52462 - protein, 11 aa, Homo sapiens
  Table A; Target 52462; HLA-B*40:02; MYH4; ENSG00000264424; TAA
YEEEQEAKAEL

SEQ ID NO: 52463 - protein, 11 aa, Homo sapiens
  Table A; Target 52463; HLA-B*49:01; MYH4; ENSG00000264424; TAA
YEEEQEAKAEL

SEQ ID NO: 52464 - protein, 11 aa, Homo sapiens
  Table A; Target 52464; HLA-C*03:04; MYH4; ENSG00000264424; TAA
YEEEQEAKAEL

SEQ ID NO: 52465 - protein, 11 aa, Homo sapiens
  Table A; Target 52465; HLA-C*05:01; MYH4; ENSG00000264424; TAA
YEEEQEAKAEL

SEQ ID NO: 52466 - protein, 8 aa, Homo sapiens
  Table A; Target 52466; HLA-A*30:01; MYH4; ENSG00000264424; TAA
YEESLDHL

SEQ ID NO: 52467 - protein, 8 aa, Homo sapiens
  Table A; Target 52467; HLA-B*40:01; MYH4; ENSG00000264424; TAA
YEESLDHL

SEQ ID NO: 52468 - protein, 8 aa, Homo sapiens
  Table A; Target 52468; HLA-B*40:02; MYH4; ENSG00000264424; TAA
YEESLDHL

SEQ ID NO: 52469 - protein, 8 aa, Homo sapiens
  Table A; Target 52469; HLA-B*49:01; MYH4; ENSG00000264424; TAA
YEESLDHL

SEQ ID NO: 52470 - protein, 11 aa, Homo sapiens
  Table A; Target 52470; HLA-A*30:01; MYH4; ENSG00000264424; TAA
YEESLDHLETL

SEQ ID NO: 52471 - protein, 11 aa, Homo sapiens
  Table A; Target 52471; HLA-B*18:01; MYH4; ENSG00000264424; TAA
YEESLDHLETL

SEQ ID NO: 52472 - protein, 11 aa, Homo sapiens
  Table A; Target 52472; HLA-B*40:01; MYH4; ENSG00000264424; TAA
YEESLDHLETL

SEQ ID NO: 52473 - protein, 11 aa, Homo sapiens
  Table A; Target 52473; HLA-B*40:02; MYH4; ENSG00000264424; TAA
YEESLDHLETL

SEQ ID NO: 52474 - protein, 11 aa, Homo sapiens
  Table A; Target 52474; HLA-B*49:01; MYH4; ENSG00000264424; TAA
YEESLDHLETL

SEQ ID NO: 52475 - protein, 11 aa, Homo sapiens
  Table A; Target 52475; HLA-C*04:01; MYH4; ENSG00000264424; TAA
YEESLDHLETL

SEQ ID NO: 52476 - protein, 8 aa, Homo sapiens
  Table A; Target 52476; HLA-A*30:01; MYH4; ENSG00000264424; TAA
YEETQAEL

SEQ ID NO: 52477 - protein, 8 aa, Homo sapiens
  Table A; Target 52477; HLA-B*18:01; MYH4; ENSG00000264424; TAA
YEETQAEL

SEQ ID NO: 52478 - protein, 8 aa, Homo sapiens
  Table A; Target 52478; HLA-B*39:01; MYH4; ENSG00000264424; TAA
YEETQAEL

SEQ ID NO: 52479 - protein, 8 aa, Homo sapiens
  Table A; Target 52479; HLA-B*40:01; MYH4; ENSG00000264424; TAA
YEETQAEL

SEQ ID NO: 52480 - protein, 8 aa, Homo sapiens
  Table A; Target 52480; HLA-B*40:02; MYH4; ENSG00000264424; TAA
YEETQAEL

SEQ ID NO: 52481 - protein, 8 aa, Homo sapiens
  Table A; Target 52481; HLA-B*49:01; MYH4; ENSG00000264424; TAA
YEETQAEL

SEQ ID NO: 52482 - protein, 8 aa, Homo sapiens
  Table A; Target 52482; HLA-C*05:01; MYH4; ENSG00000264424; TAA
YEETQAEL

SEQ ID NO: 52483 - protein, 8 aa, Homo sapiens
  Table A; Target 52483; HLA-C*07:04; MYH4; ENSG00000264424; TAA
YEETQAEL

SEQ ID NO: 52484 - protein, 10 aa, Homo sapiens
  Table A; Target 52484; HLA-B*39:01; MYH4; ENSG00000264424; TAA
YEETQAELEA

SEQ ID NO: 52485 - protein, 10 aa, Homo sapiens
  Table A; Target 52485; HLA-C*07:01; MYH4; ENSG00000264424; TAA
YEQHLGKSNN

SEQ ID NO: 52486 - protein, 11 aa, Homo sapiens
  Table A; Target 52486; HLA-B*44:02; MYH4; ENSG00000264424; TAA
YEQHLGKSNNF

SEQ ID NO: 52487 - protein, 8 aa, Homo sapiens
  Table A; Target 52487; HLA-B*18:01; MYH4; ENSG00000264424; TAA
YETDAIQR

SEQ ID NO: 52488 - protein, 8 aa, Homo sapiens
  Table A; Target 52488; HLA-B*27:02; MYH4; ENSG00000264424; TAA
YETDAIQR

SEQ ID NO: 52489 - protein, 8 aa, Homo sapiens
  Table A; Target 52489; HLA-B*27:05; MYH4; ENSG00000264424; TAA
YETDAIQR

SEQ ID NO: 52490 - protein, 8 aa, Homo sapiens
  Table A; Target 52490; HLA-B*49:01; MYH4; ENSG00000264424; TAA
YETDAIQR

SEQ ID NO: 52491 - protein, 9 aa, Homo sapiens
  Table A; Target 52491; HLA-A*30:01; MYH4; ENSG00000264424; TAA
YETDAIQRT

SEQ ID NO: 52492 - protein, 9 aa, Homo sapiens
  Table A; Target 52492; HLA-A*32:01; MYH4; ENSG00000264424; TAA
YETDAIQRT

SEQ ID NO: 52493 - protein, 9 aa, Homo sapiens
  Table A; Target 52493; HLA-B*13:02; MYH4; ENSG00000264424; TAA
YETDAIQRT

SEQ ID NO: 52494 - protein, 9 aa, Homo sapiens
  Table A; Target 52494; HLA-B*18:01; MYH4; ENSG00000264424; TAA
YETDAIQRT

SEQ ID NO: 52495 - protein, 9 aa, Homo sapiens
  Table A; Target 52495; HLA-B*27:05; MYH4; ENSG00000264424; TAA
YETDAIQRT

SEQ ID NO: 52496 - protein, 9 aa, Homo sapiens
  Table A; Target 52496; HLA-B*40:01; MYH4; ENSG00000264424; TAA
YETDAIQRT

SEQ ID NO: 52497 - protein, 9 aa, Homo sapiens
  Table A; Target 52497; HLA-B*40:02; MYH4; ENSG00000264424; TAA
YETDAIQRT

SEQ ID NO: 52498 - protein, 9 aa, Homo sapiens
  Table A; Target 52498; HLA-B*44:02; MYH4; ENSG00000264424; TAA
YETDAIQRT

SEQ ID NO: 52499 - protein, 9 aa, Homo sapiens
  Table A; Target 52499; HLA-B*44:03; MYH4; ENSG00000264424; TAA
YETDAIQRT

SEQ ID NO: 52500 - protein, 9 aa, Homo sapiens
  Table A; Target 52500; HLA-B*49:01; MYH4; ENSG00000264424; TAA
YETDAIQRT

SEQ ID NO: 52501 - protein, 9 aa, Homo sapiens
  Table A; Target 52501; HLA-C*07:04; MYH4; ENSG00000264424; TAA
YETDAIQRT

SEQ ID NO: 52502 - protein, 9 aa, Homo sapiens
  Table A; Target 52502; HLA-C*12:03; MYH4; ENSG00000264424; TAA
YETDAIQRT

SEQ ID NO: 52503 - protein, 9 aa, Homo sapiens
  Table A; Target 52503; HLA-C*16:02; MYH4; ENSG00000264424; TAA
YETDAIQRT

SEQ ID NO: 52504 - protein, 9 aa, Homo sapiens
  Table A; Target 52504; HLA-C*16:04; MYH4; ENSG00000264424; TAA
YETDAIQRT

SEQ ID NO: 52505 - protein, 9 aa, Homo sapiens
  Table A; Target 52505; HLA-A*23:01; MYH4; ENSG00000264424; TAA
YFATIAVTG

SEQ ID NO: 52506 - protein, 9 aa, Homo sapiens
  Table A; Target 52506; HLA-C*14:02; MYH4; ENSG00000264424; TAA
YFATIAVTG

SEQ ID NO: 52507 - protein, 8 aa, Homo sapiens
  Table A; Target 52507; HLA-A*23:01; MYH4; ENSG00000264424; TAA
YFIGVLDI

SEQ ID NO: 52508 - protein, 8 aa, Homo sapiens
  Table A; Target 52508; HLA-B*08:01; MYH4; ENSG00000264424; TAA
YFKIKPLL

SEQ ID NO: 52509 - protein, 8 aa, Homo sapiens
  Table A; Target 52509; HLA-B*15:03; MYH4; ENSG00000264424; TAA
YKLTGAVM

SEQ ID NO: 52510 - protein, 10 aa, Homo sapiens
  Table A; Target 52510; HLA-B*15:03; MYH4; ENSG00000264424; TAA
YKLTGAVMHY

SEQ ID NO: 52511 - protein, 10 aa, Homo sapiens
  Table A; Target 52511; HLA-C*07:01; MYH4; ENSG00000264424; TAA
YKLTGAVMHY

SEQ ID NO: 52512 - protein, 9 aa, Homo sapiens
  Table A; Target 52512; HLA-B*15:03; MYH4; ENSG00000264424; TAA
YKVLNASAI

SEQ ID NO: 52513 - protein, 8 aa, Homo sapiens
  Table A; Target 52513; HLA-B*08:01; MYH4; ENSG00000264424; TAA
YLLEKSRV

SEQ ID NO: 52514 - protein, 10 aa, Homo sapiens
  Table A; Target 52514; HLA-A*02:04; MYH4; ENSG00000264424; TAA
YLLEKSRVTF

SEQ ID NO: 52515 - protein, 10 aa, Homo sapiens
  Table A; Target 52515; HLA-A*23:01; MYH4; ENSG00000264424; TAA
YLLEKSRVTF

SEQ ID NO: 52516 - protein, 10 aa, Homo sapiens
  Table A; Target 52516; HLA-A*24:02; MYH4; ENSG00000264424; TAA
YLLEKSRVTF

SEQ ID NO: 52517 - protein, 8 aa, Homo sapiens
  Table A; Target 52517; HLA-A*02:01; MYH4; ENSG00000264424; TAA
YLTSLNSA

SEQ ID NO: 52518 - protein, 8 aa, Homo sapiens
  Table A; Target 52518; HLA-B*56:01; MYH4; ENSG00000264424; TAA
YLTSLNSA

SEQ ID NO: 52519 - protein, 8 aa, Homo sapiens
  Table A; Target 52519; HLA-C*16:02; MYH4; ENSG00000264424; TAA
YLTSLNSA

SEQ ID NO: 52520 - protein, 11 aa, Homo sapiens
  Table A; Target 52520; HLA-A*02:01; MYH4; ENSG00000264424; TAA
YLTSLNSADLL

SEQ ID NO: 52521 - protein, 11 aa, Homo sapiens
  Table A; Target 52521; HLA-A*02:04; MYH4; ENSG00000264424; TAA
YLTSLNSADLL

SEQ ID NO: 52522 - protein, 11 aa, Homo sapiens
  Table A; Target 52522; HLA-C*14:02; MYH4; ENSG00000264424; TAA
YLTSLNSADLL

SEQ ID NO: 52523 - protein, 9 aa, Homo sapiens
  Table A; Target 52523; HLA-A*01:01; MYH4; ENSG00000264424; TAA
YNPEVVTAY

SEQ ID NO: 52524 - protein, 9 aa, Homo sapiens
  Table A; Target 52524; HLA-A*02:07; MYH4; ENSG00000264424; TAA
YNPEVVTAY

SEQ ID NO: 52525 - protein, 9 aa, Homo sapiens
  Table A; Target 52525; HLA-A*23:01; MYH4; ENSG00000264424; TAA
YNPEVVTAY

SEQ ID NO: 52526 - protein, 9 aa, Homo sapiens
  Table A; Target 52526; HLA-A*25:01; MYH4; ENSG00000264424; TAA
YNPEVVTAY

SEQ ID NO: 52527 - protein, 9 aa, Homo sapiens
  Table A; Target 52527; HLA-A*26:01; MYH4; ENSG00000264424; TAA
YNPEVVTAY

SEQ ID NO: 52528 - protein, 9 aa, Homo sapiens
  Table A; Target 52528; HLA-A*29:02; MYH4; ENSG00000264424; TAA
YNPEVVTAY

SEQ ID NO: 52529 - protein, 9 aa, Homo sapiens
  Table A; Target 52529; HLA-A*30:02; MYH4; ENSG00000264424; TAA
YNPEVVTAY

SEQ ID NO: 52530 - protein, 9 aa, Homo sapiens
  Table A; Target 52530; HLA-A*33:01; MYH4; ENSG00000264424; TAA
YNPEVVTAY

SEQ ID NO: 52531 - protein, 9 aa, Homo sapiens
  Table A; Target 52531; HLA-B*15:01; MYH4; ENSG00000264424; TAA
YNPEVVTAY

SEQ ID NO: 52532 - protein, 9 aa, Homo sapiens
  Table A; Target 52532; HLA-B*15:03; MYH4; ENSG00000264424; TAA
YNPEVVTAY

SEQ ID NO: 52533 - protein, 9 aa, Homo sapiens
  Table A; Target 52533; HLA-B*18:01; MYH4; ENSG00000264424; TAA
YNPEVVTAY

SEQ ID NO: 52534 - protein, 9 aa, Homo sapiens
  Table A; Target 52534; HLA-B*35:01; MYH4; ENSG00000264424; TAA
YNPEVVTAY

SEQ ID NO: 52535 - protein, 9 aa, Homo sapiens
  Table A; Target 52535; HLA-B*46:01; MYH4; ENSG00000264424; TAA
YNPEVVTAY

SEQ ID NO: 52536 - protein, 9 aa, Homo sapiens
  Table A; Target 52536; HLA-C*01:02; MYH4; ENSG00000264424; TAA
YNPEVVTAY

SEQ ID NO: 52537 - protein, 9 aa, Homo sapiens
  Table A; Target 52537; HLA-C*02:02; MYH4; ENSG00000264424; TAA
YNPEVVTAY

SEQ ID NO: 52538 - protein, 9 aa, Homo sapiens
  Table A; Target 52538; HLA-C*07:04; MYH4; ENSG00000264424; TAA
YNPEVVTAY

SEQ ID NO: 52539 - protein, 9 aa, Homo sapiens
  Table A; Target 52539; HLA-C*14:02; MYH4; ENSG00000264424; TAA
YNPEVVTAY

SEQ ID NO: 52540 - protein, 9 aa, Homo sapiens
  Table A; Target 52540; HLA-C*16:01; MYH4; ENSG00000264424; TAA
YNPEVVTAY

SEQ ID NO: 52541 - protein, 9 aa, Homo sapiens
  Table A; Target 52541; HLA-C*16:04; MYH4; ENSG00000264424; TAA
YNPEVVTAY

SEQ ID NO: 52542 - protein, 10 aa, Homo sapiens
  Table A; Target 52542; HLA-B*07:02; MYH4; ENSG00000264424; TAA
YPRVKVGNEF

SEQ ID NO: 52543 - protein, 10 aa, Homo sapiens
  Table A; Target 52543; HLA-B*35:01; MYH4; ENSG00000264424; TAA
YPRVKVGNEF

SEQ ID NO: 52544 - protein, 10 aa, Homo sapiens
  Table A; Target 52544; HLA-C*07:02; MYH4; ENSG00000264424; TAA
YPRVKVGNEF

SEQ ID NO: 52545 - protein, 9 aa, Homo sapiens
  Table A; Target 52545; HLA-A*02:03; MYH4; ENSG00000264424; TAA
YQKSAMKTL

SEQ ID NO: 52546 - protein, 9 aa, Homo sapiens
  Table A; Target 52546; HLA-A*25:01; MYH4; ENSG00000264424; TAA
YQKSAMKTL

SEQ ID NO: 52547 - protein, 9 aa, Homo sapiens
  Table A; Target 52547; HLA-A*26:01; MYH4; ENSG00000264424; TAA
YQKSAMKTL

SEQ ID NO: 52548 - protein, 9 aa, Homo sapiens
  Table A; Target 52548; HLA-A*32:01; MYH4; ENSG00000264424; TAA
YQKSAMKTL

SEQ ID NO: 52549 - protein, 9 aa, Homo sapiens
  Table A; Target 52549; HLA-B*08:01; MYH4; ENSG00000264424; TAA
YQKSAMKTL

SEQ ID NO: 52550 - protein, 9 aa, Homo sapiens
  Table A; Target 52550; HLA-B*15:01; MYH4; ENSG00000264424; TAA
YQKSAMKTL

SEQ ID NO: 52551 - protein, 9 aa, Homo sapiens
  Table A; Target 52551; HLA-B*15:03; MYH4; ENSG00000264424; TAA
YQKSAMKTL

SEQ ID NO: 52552 - protein, 9 aa, Homo sapiens
  Table A; Target 52552; HLA-B*40:02; MYH4; ENSG00000264424; TAA
YQKSAMKTL

SEQ ID NO: 52553 - protein, 9 aa, Homo sapiens
  Table A; Target 52553; HLA-B*46:01; MYH4; ENSG00000264424; TAA
YQKSAMKTL

SEQ ID NO: 52554 - protein, 9 aa, Homo sapiens
  Table A; Target 52554; HLA-C*02:02; MYH4; ENSG00000264424; TAA
YQKSAMKTL

SEQ ID NO: 52555 - protein, 9 aa, Homo sapiens
  Table A; Target 52555; HLA-C*03:04; MYH4; ENSG00000264424; TAA
YQKSAMKTL

SEQ ID NO: 52556 - protein, 9 aa, Homo sapiens
  Table A; Target 52556; HLA-C*07:04; MYH4; ENSG00000264424; TAA
YQKSAMKTL

SEQ ID NO: 52557 - protein, 9 aa, Homo sapiens
  Table A; Target 52557; HLA-C*12:03; MYH4; ENSG00000264424; TAA
YQKSAMKTL

SEQ ID NO: 52558 - protein, 9 aa, Homo sapiens
  Table A; Target 52558; HLA-A*68:02; MYH4; ENSG00000264424; TAA
YSGLFCVTV

SEQ ID NO: 52559 - protein, 9 aa, Homo sapiens
  Table A; Target 52559; HLA-A*02:01; MYH4; ENSG00000264424; TAA
YTYSGLFCV

SEQ ID NO: 52560 - protein, 9 aa, Homo sapiens
  Table A; Target 52560; HLA-A*02:04; MYH4; ENSG00000264424; TAA
YTYSGLFCV

SEQ ID NO: 52561 - protein, 9 aa, Homo sapiens
  Table A; Target 52561; HLA-A*68:02; MYH4; ENSG00000264424; TAA
YTYSGLFCV

SEQ ID NO: 52562 - protein, 9 aa, Homo sapiens
  Table A; Target 52562; HLA-B*13:02; MYH4; ENSG00000264424; TAA
YTYSGLFCV

SEQ ID NO: 52563 - protein, 9 aa, Homo sapiens
  Table A; Target 52563; HLA-B*54:01; MYH4; ENSG00000264424; TAA
YTYSGLFCV

SEQ ID NO: 52564 - protein, 11 aa, Homo sapiens
  Table A; Target 52564; HLA-A*68:02; MYH4; ENSG00000264424; TAA
YTYSGLFCVTV

SEQ ID NO: 52565 - protein, 9 aa, Homo sapiens
  Table A; Target 52565; HLA-A*02:03; MYH4; ENSG00000264424; TAA
YVKAIVQSR

SEQ ID NO: 52566 - protein, 9 aa, Homo sapiens
  Table A; Target 52566; HLA-A*25:01; MYH4; ENSG00000264424; TAA
YVKAIVQSR

SEQ ID NO: 52567 - protein, 9 aa, Homo sapiens
  Table A; Target 52567; HLA-A*26:01; MYH4; ENSG00000264424; TAA
YVKAIVQSR

SEQ ID NO: 52568 - protein, 9 aa, Homo sapiens
  Table A; Target 52568; HLA-A*31:01; MYH4; ENSG00000264424; TAA
YVKAIVQSR

SEQ ID NO: 52569 - protein, 9 aa, Homo sapiens
  Table A; Target 52569; HLA-A*32:01; MYH4; ENSG00000264424; TAA
YVKAIVQSR

SEQ ID NO: 52570 - protein, 9 aa, Homo sapiens
  Table A; Target 52570; HLA-A*33:01; MYH4; ENSG00000264424; TAA
YVKAIVQSR

SEQ ID NO: 52571 - protein, 9 aa, Homo sapiens
  Table A; Target 52571; HLA-A*33:03; MYH4; ENSG00000264424; TAA
YVKAIVQSR

SEQ ID NO: 52572 - protein, 9 aa, Homo sapiens
  Table A; Target 52572; HLA-A*68:01; MYH4; ENSG00000264424; TAA
YVKAIVQSR

SEQ ID NO: 52573 - protein, 9 aa, Homo sapiens
  Table A; Target 52573; HLA-A*68:02; MYH4; ENSG00000264424; TAA
YVKAIVQSR

SEQ ID NO: 52574 - protein, 9 aa, Homo sapiens
  Table A; Target 52574; HLA-B*08:01; MYH4; ENSG00000264424; TAA
YVKAIVQSR

SEQ ID NO: 52575 - protein, 9 aa, Homo sapiens
  Table A; Target 52575; HLA-B*13:02; MYH4; ENSG00000264424; TAA
YVKAIVQSR

SEQ ID NO: 52576 - protein, 9 aa, Homo sapiens
  Table A; Target 52576; HLA-B*46:01; MYH4; ENSG00000264424; TAA
YVKAIVQSR

SEQ ID NO: 52577 - protein, 9 aa, Homo sapiens
  Table A; Target 52577; HLA-B*54:01; MYH4; ENSG00000264424; TAA
YVKAIVQSR

SEQ ID NO: 52578 - protein, 9 aa, Homo sapiens
  Table A; Target 52578; HLA-B*57:01; MYH4; ENSG00000264424; TAA
YVKAIVQSR

SEQ ID NO: 52579 - protein, 9 aa, Homo sapiens
  Table A; Target 52579; HLA-C*02:02; MYH4; ENSG00000264424; TAA
YVKAIVQSR

SEQ ID NO: 52580 - protein, 9 aa, Homo sapiens
  Table A; Target 52580; HLA-C*07:06; MYH4; ENSG00000264424; TAA
YVKAIVQSR

SEQ ID NO: 52581 - protein, 9 aa, Homo sapiens
  Table A; Target 52581; HLA-C*16:02; MYH4; ENSG00000264424; TAA
YVKAIVQSR

SEQ ID NO: 52582 - protein, 8 aa, Homo sapiens
  Table A; Target 52582; HLA-B*15:01; NPFFR2; ENSG00000056291; TAA
AAIFIISY

SEQ ID NO: 52583 - protein, 8 aa, Homo sapiens
  Table A; Target 52583; HLA-C*02:02; NPFFR2; ENSG00000056291; TAA
AAIFIISY

SEQ ID NO: 52584 - protein, 9 aa, Homo sapiens
  Table A; Target 52584; HLA-C*02:02; NPFFR2; ENSG00000056291; TAA
AAIFIISYF

SEQ ID NO: 52585 - protein, 9 aa, Homo sapiens
  Table A; Target 52585; HLA-C*12:03; NPFFR2; ENSG00000056291; TAA
AAIFIISYF

SEQ ID NO: 52586 - protein, 8 aa, Homo sapiens
  Table A; Target 52586; HLA-B*37:01; NPFFR2; ENSG00000056291; TAA
AASVFTLV

SEQ ID NO: 52587 - protein, 8 aa, Homo sapiens
  Table A; Target 52587; HLA-B*49:01; NPFFR2; ENSG00000056291; TAA
AASVFTLV

SEQ ID NO: 52588 - protein, 9 aa, Homo sapiens
  Table A; Target 52588; HLA-B*56:01; NPFFR2; ENSG00000056291; TAA
AASVFTLVA

SEQ ID NO: 52589 - protein, 8 aa, Homo sapiens
  Table A; Target 52589; HLA-B*37:01; NPFFR2; ENSG00000056291; TAA
ADLSPNEL

SEQ ID NO: 52590 - protein, 8 aa, Homo sapiens
  Table A; Target 52590; HLA-A*30:01; NPFFR2; ENSG00000056291; TAA
AEKPQQEL

SEQ ID NO: 52591 - protein, 8 aa, Homo sapiens
  Table A; Target 52591; HLA-B*37:01; NPFFR2; ENSG00000056291; TAA
AEKPQQEL

SEQ ID NO: 52592 - protein, 8 aa, Homo sapiens
  Table A; Target 52592; HLA-B*40:01; NPFFR2; ENSG00000056291; TAA
AEKPQQEL

SEQ ID NO: 52593 - protein, 8 aa, Homo sapiens
  Table A; Target 52593; HLA-B*40:02; NPFFR2; ENSG00000056291; TAA
AEKPQQEL

SEQ ID NO: 52594 - protein, 8 aa, Homo sapiens
  Table A; Target 52594; HLA-B*44:02; NPFFR2; ENSG00000056291; TAA
AEKPQQEL

SEQ ID NO: 52595 - protein, 8 aa, Homo sapiens
  Table A; Target 52595; HLA-B*44:03; NPFFR2; ENSG00000056291; TAA
AEKPQQEL

SEQ ID NO: 52596 - protein, 8 aa, Homo sapiens
  Table A; Target 52596; HLA-C*16:04; NPFFR2; ENSG00000056291; TAA
AEKPQQEL

SEQ ID NO: 52597 - protein, 9 aa, Homo sapiens
  Table A; Target 52597; HLA-A*30:01; NPFFR2; ENSG00000056291; TAA
AEKPQQELV

SEQ ID NO: 52598 - protein, 9 aa, Homo sapiens
  Table A; Target 52598; HLA-B*13:02; NPFFR2; ENSG00000056291; TAA
AEKPQQELV

SEQ ID NO: 52599 - protein, 9 aa, Homo sapiens
  Table A; Target 52599; HLA-B*37:01; NPFFR2; ENSG00000056291; TAA
AEKPQQELV

SEQ ID NO: 52600 - protein, 9 aa, Homo sapiens
  Table A; Target 52600; HLA-B*40:01; NPFFR2; ENSG00000056291; TAA
AEKPQQELV

SEQ ID NO: 52601 - protein, 9 aa, Homo sapiens
  Table A; Target 52601; HLA-B*40:02; NPFFR2; ENSG00000056291; TAA
AEKPQQELV

SEQ ID NO: 52602 - protein, 9 aa, Homo sapiens
  Table A; Target 52602; HLA-B*44:02; NPFFR2; ENSG00000056291; TAA
AEKPQQELV

SEQ ID NO: 52603 - protein, 9 aa, Homo sapiens
  Table A; Target 52603; HLA-B*44:03; NPFFR2; ENSG00000056291; TAA
AEKPQQELV

SEQ ID NO: 52604 - protein, 9 aa, Homo sapiens
  Table A; Target 52604; HLA-B*49:01; NPFFR2; ENSG00000056291; TAA
AEKPQQELV

SEQ ID NO: 52605 - protein, 9 aa, Homo sapiens
  Table A; Target 52605; HLA-C*02:02; NPFFR2; ENSG00000056291; TAA
AEKPQQELV

SEQ ID NO: 52606 - protein, 9 aa, Homo sapiens
  Table A; Target 52606; HLA-C*16:04; NPFFR2; ENSG00000056291; TAA
AEKPQQELV

SEQ ID NO: 52607 - protein, 10 aa, Homo sapiens
  Table A; Target 52607; HLA-A*30:01; NPFFR2; ENSG00000056291; TAA
AEKPQQELVM

SEQ ID NO: 52608 - protein, 10 aa, Homo sapiens
  Table A; Target 52608; HLA-B*40:01; NPFFR2; ENSG00000056291; TAA
AEKPQQELVM

SEQ ID NO: 52609 - protein, 10 aa, Homo sapiens
  Table A; Target 52609; HLA-B*40:02; NPFFR2; ENSG00000056291; TAA
AEKPQQELVM

SEQ ID NO: 52610 - protein, 10 aa, Homo sapiens
  Table A; Target 52610; HLA-B*44:02; NPFFR2; ENSG00000056291; TAA
AEKPQQELVM

SEQ ID NO: 52611 - protein, 10 aa, Homo sapiens
  Table A; Target 52611; HLA-B*44:03; NPFFR2; ENSG00000056291; TAA
AEKPQQELVM

SEQ ID NO: 52612 - protein, 10 aa, Homo sapiens
  Table A; Target 52612; HLA-B*49:01; NPFFR2; ENSG00000056291; TAA
AEKPQQELVM

SEQ ID NO: 52613 - protein, 10 aa, Homo sapiens
  Table A; Target 52613; HLA-C*02:02; NPFFR2; ENSG00000056291; TAA
AEKPQQELVM

SEQ ID NO: 52614 - protein, 10 aa, Homo sapiens
  Table A; Target 52614; HLA-C*16:04; NPFFR2; ENSG00000056291; TAA
AEKPQQELVM

SEQ ID NO: 52615 - protein, 9 aa, Homo sapiens
  Table A; Target 52615; HLA-B*15:03; NPFFR2; ENSG00000056291; TAA
AGWPFGNTM

SEQ ID NO: 52616 - protein, 9 aa, Homo sapiens
  Table A; Target 52616; HLA-A*02:01; NPFFR2; ENSG00000056291; TAA
AISDLLVGI

SEQ ID NO: 52617 - protein, 9 aa, Homo sapiens
  Table A; Target 52617; HLA-A*02:03; NPFFR2; ENSG00000056291; TAA
AISDLLVGI

SEQ ID NO: 52618 - protein, 9 aa, Homo sapiens
  Table A; Target 52618; HLA-A*02:04; NPFFR2; ENSG00000056291; TAA
AISDLLVGI

SEQ ID NO: 52619 - protein, 9 aa, Homo sapiens
  Table A; Target 52619; HLA-A*02:07; NPFFR2; ENSG00000056291; TAA
AISDLLVGI

SEQ ID NO: 52620 - protein, 9 aa, Homo sapiens
  Table A; Target 52620; HLA-B*13:02; NPFFR2; ENSG00000056291; TAA
AISDLLVGI

SEQ ID NO: 52621 - protein, 9 aa, Homo sapiens
  Table A; Target 52621; HLA-B*55:01; NPFFR2; ENSG00000056291; TAA
AISDLLVGI

SEQ ID NO: 52622 - protein, 9 aa, Homo sapiens
  Table A; Target 52622; HLA-B*56:01; NPFFR2; ENSG00000056291; TAA
AITIMSPSA

SEQ ID NO: 52623 - protein, 9 aa, Homo sapiens
  Table A; Target 52623; HLA-B*15:03; NPFFR2; ENSG00000056291; TAA
AKPMEAYAL

SEQ ID NO: 52624 - protein, 9 aa, Homo sapiens
  Table A; Target 52624; HLA-A*02:03; NPFFR2; ENSG00000056291; TAA
ALKAKSHVL

SEQ ID NO: 52625 - protein, 9 aa, Homo sapiens
  Table A; Target 52625; HLA-B*08:01; NPFFR2; ENSG00000056291; TAA
ALKAKSHVL

SEQ ID NO: 52626 - protein, 9 aa, Homo sapiens
  Table A; Target 52626; HLA-A*02:04; NPFFR2; ENSG00000056291; TAA
ALLFILSWL

SEQ ID NO: 52627 - protein, 8 aa, Homo sapiens
  Table A; Target 52627; HLA-B*51:01; NPFFR2; ENSG00000056291; TAA
APLSLIVI

SEQ ID NO: 52628 - protein, 8 aa, Homo sapiens
  Table A; Target 52628; HLA-B*56:01; NPFFR2; ENSG00000056291; TAA
APLSLIVI

SEQ ID NO: 52629 - protein, 9 aa, Homo sapiens
  Table A; Target 52629; HLA-B*07:02; NPFFR2; ENSG00000056291; TAA
APLSLIVIM

SEQ ID NO: 52630 - protein, 9 aa, Homo sapiens
  Table A; Target 52630; HLA-B*35:01; NPFFR2; ENSG00000056291; TAA
APLSLIVIM

SEQ ID NO: 52631 - protein, 9 aa, Homo sapiens
  Table A; Target 52631; HLA-B*35:03; NPFFR2; ENSG00000056291; TAA
APLSLIVIM

SEQ ID NO: 52632 - protein, 9 aa, Homo sapiens
  Table A; Target 52632; HLA-B*54:01; NPFFR2; ENSG00000056291; TAA
APLSLIVIM

SEQ ID NO: 52633 - protein, 9 aa, Homo sapiens
  Table A; Target 52633; HLA-B*55:01; NPFFR2; ENSG00000056291; TAA
APLSLIVIM

SEQ ID NO: 52634 - protein, 9 aa, Homo sapiens
  Table A; Target 52634; HLA-B*56:01; NPFFR2; ENSG00000056291; TAA
APLSLIVIM

SEQ ID NO: 52635 - protein, 10 aa, Homo sapiens
  Table A; Target 52635; HLA-B*35:01; NPFFR2; ENSG00000056291; TAA
APLSLIVIMY

SEQ ID NO: 52636 - protein, 9 aa, Homo sapiens
  Table A; Target 52636; HLA-B*13:02; NPFFR2; ENSG00000056291; TAA
ASVFTLVAI

SEQ ID NO: 52637 - protein, 9 aa, Homo sapiens
  Table A; Target 52637; HLA-B*58:01; NPFFR2; ENSG00000056291; TAA
ASVFTLVAI

SEQ ID NO: 52638 - protein, 9 aa, Homo sapiens
  Table A; Target 52638; HLA-A*02:07; NPFFR2; ENSG00000056291; TAA
AVDRFQCVV

SEQ ID NO: 52639 - protein, 10 aa, Homo sapiens
  Table A; Target 52639; HLA-A*01:01; NPFFR2; ENSG00000056291; TAA
AVDRFQCVVY

SEQ ID NO: 52640 - protein, 10 aa, Homo sapiens
  Table A; Target 52640; HLA-A*03:01; NPFFR2; ENSG00000056291; TAA
AVMLHVQEEK

SEQ ID NO: 52641 - protein, 10 aa, Homo sapiens
  Table A; Target 52641; HLA-A*03:02; NPFFR2; ENSG00000056291; TAA
AVMLHVQEEK

SEQ ID NO: 52642 - protein, 10 aa, Homo sapiens
  Table A; Target 52642; HLA-A*11:01; NPFFR2; ENSG00000056291; TAA
AVMLHVQEEK

SEQ ID NO: 52643 - protein, 11 aa, Homo sapiens
  Table A; Target 52643; HLA-A*30:02; NPFFR2; ENSG00000056291; TAA
AVMLHVQEEKY

SEQ ID NO: 52644 - protein, 11 aa, Homo sapiens
  Table A; Target 52644; HLA-B*15:01; NPFFR2; ENSG00000056291; TAA
AVMLHVQEEKY

SEQ ID NO: 52645 - protein, 10 aa, Homo sapiens
  Table A; Target 52645; HLA-A*02:01; NPFFR2; ENSG00000056291; TAA
CLLESDVSSA

SEQ ID NO: 52646 - protein, 10 aa, Homo sapiens
  Table A; Target 52646; HLA-A*02:03; NPFFR2; ENSG00000056291; TAA
CLLESDVSSA

SEQ ID NO: 52647 - protein, 9 aa, Homo sapiens
  Table A; Target 52647; HLA-A*03:01; NPFFR2; ENSG00000056291; TAA
CVVYPFKPK

SEQ ID NO: 52648 - protein, 9 aa, Homo sapiens
  Table A; Target 52648; HLA-A*25:01; NPFFR2; ENSG00000056291; TAA
DINITYVNY

SEQ ID NO: 52649 - protein, 9 aa, Homo sapiens
  Table A; Target 52649; HLA-A*26:01; NPFFR2; ENSG00000056291; TAA
DINITYVNY

SEQ ID NO: 52650 - protein, 9 aa, Homo sapiens
  Table A; Target 52650; HLA-A*29:02; NPFFR2; ENSG00000056291; TAA
DINITYVNY

SEQ ID NO: 52651 - protein, 9 aa, Homo sapiens
  Table A; Target 52651; HLA-A*30:02; NPFFR2; ENSG00000056291; TAA
DINITYVNY

SEQ ID NO: 52652 - protein, 9 aa, Homo sapiens
  Table A; Target 52652; HLA-A*33:01; NPFFR2; ENSG00000056291; TAA
DINITYVNY

SEQ ID NO: 52653 - protein, 9 aa, Homo sapiens
  Table A; Target 52653; HLA-A*33:03; NPFFR2; ENSG00000056291; TAA
DINITYVNY

SEQ ID NO: 52654 - protein, 9 aa, Homo sapiens
  Table A; Target 52654; HLA-A*68:01; NPFFR2; ENSG00000056291; TAA
DINITYVNY

SEQ ID NO: 52655 - protein, 9 aa, Homo sapiens
  Table A; Target 52655; HLA-B*18:01; NPFFR2; ENSG00000056291; TAA
DINITYVNY

SEQ ID NO: 52656 - protein, 9 aa, Homo sapiens
  Table A; Target 52656; HLA-B*35:01; NPFFR2; ENSG00000056291; TAA
DINITYVNY

SEQ ID NO: 52657 - protein, 9 aa, Homo sapiens
  Table A; Target 52657; HLA-C*07:06; NPFFR2; ENSG00000056291; TAA
DINITYVNY

SEQ ID NO: 52658 - protein, 10 aa, Homo sapiens
  Table A; Target 52658; HLA-A*26:01; NPFFR2; ENSG00000056291; TAA
DINITYVNYY

SEQ ID NO: 52659 - protein, 9 aa, Homo sapiens
  Table A; Target 52659; HLA-B*38:01; NPFFR2; ENSG00000056291; TAA
DLSPNELQI

SEQ ID NO: 52660 - protein, 10 aa, Homo sapiens
  Table A; Target 52660; HLA-A*23:01; NPFFR2; ENSG00000056291; TAA
DYADLSPNEL

SEQ ID NO: 52661 - protein, 10 aa, Homo sapiens
  Table A; Target 52661; HLA-A*24:02; NPFFR2; ENSG00000056291; TAA
DYADLSPNEL

SEQ ID NO: 52662 - protein, 10 aa, Homo sapiens
  Table A; Target 52662; HLA-A*33:03; NPFFR2; ENSG00000056291; TAA
DYADLSPNEL

SEQ ID NO: 52663 - protein, 10 aa, Homo sapiens
  Table A; Target 52663; HLA-C*14:02; NPFFR2; ENSG00000056291; TAA
DYADLSPNEL

SEQ ID NO: 52664 - protein, 8 aa, Homo sapiens
  Table A; Target 52664; HLA-B*51:01; NPFFR2; ENSG00000056291; TAA
EAFQLQLC

SEQ ID NO: 52665 - protein, 10 aa, Homo sapiens
  Table A; Target 52665; HLA-A*33:01; NPFFR2; ENSG00000056291; TAA
EAFQLQLCQK

SEQ ID NO: 52666 - protein, 10 aa, Homo sapiens
  Table A; Target 52666; HLA-A*33:03; NPFFR2; ENSG00000056291; TAA
EAFQLQLCQK

SEQ ID NO: 52667 - protein, 10 aa, Homo sapiens
  Table A; Target 52667; HLA-A*68:01; NPFFR2; ENSG00000056291; TAA
EAFQLQLCQK

SEQ ID NO: 52668 - protein, 8 aa, Homo sapiens
  Table A; Target 52668; HLA-A*33:03; NPFFR2; ENSG00000056291; TAA
EAYALKAK

SEQ ID NO: 52669 - protein, 8 aa, Homo sapiens
  Table A; Target 52669; HLA-B*37:01; NPFFR2; ENSG00000056291; TAA
EDWPNQEM

SEQ ID NO: 52670 - protein, 8 aa, Homo sapiens
  Table A; Target 52670; HLA-A*33:01; NPFFR2; ENSG00000056291; TAA
EQWHVVSR

SEQ ID NO: 52671 - protein, 8 aa, Homo sapiens
  Table A; Target 52671; HLA-A*33:03; NPFFR2; ENSG00000056291; TAA
EQWHVVSR

SEQ ID NO: 52672 - protein, 9 aa, Homo sapiens
  Table A; Target 52672; HLA-A*23:01; NPFFR2; ENSG00000056291; TAA
FFGTPAASW

SEQ ID NO: 52673 - protein, 9 aa, Homo sapiens
  Table A; Target 52673; HLA-A*24:02; NPFFR2; ENSG00000056291; TAA
FFGTPAASW

SEQ ID NO: 52674 - protein, 9 aa, Homo sapiens
  Table A; Target 52674; HLA-A*29:02; NPFFR2; ENSG00000056291; TAA
FFGTPAASW

SEQ ID NO: 52675 - protein, 9 aa, Homo sapiens
  Table A; Target 52675; HLA-B*57:01; NPFFR2; ENSG00000056291; TAA
FFGTPAASW

SEQ ID NO: 52676 - protein, 9 aa, Homo sapiens
  Table A; Target 52676; HLA-C*14:02; NPFFR2; ENSG00000056291; TAA
FFGTPAASW

SEQ ID NO: 52677 - protein, 9 aa, Homo sapiens
  Table A; Target 52677; HLA-C*01:02; NPFFR2; ENSG00000056291; TAA
FGNSSVNPI

SEQ ID NO: 52678 - protein, 9 aa, Homo sapiens
  Table A; Target 52678; HLA-C*14:02; NPFFR2; ENSG00000056291; TAA
FGNSSVNPI

SEQ ID NO: 52679 - protein, 11 aa, Homo sapiens
  Table A; Target 52679; HLA-C*12:03; NPFFR2; ENSG00000056291; TAA
FGNSSVNPIIY

SEQ ID NO: 52680 - protein, 8 aa, Homo sapiens
  Table A; Target 52680; HLA-B*57:01; NPFFR2; ENSG00000056291; TAA
FGTPAASW

SEQ ID NO: 52681 - protein, 8 aa, Homo sapiens
  Table A; Target 52681; HLA-B*58:01; NPFFR2; ENSG00000056291; TAA
FGTPAASW

SEQ ID NO: 52682 - protein, 9 aa, Homo sapiens
  Table A; Target 52682; HLA-A*02:04; NPFFR2; ENSG00000056291; TAA
FILSWLPLW

SEQ ID NO: 52683 - protein, 9 aa, Homo sapiens
  Table A; Target 52683; HLA-A*02:07; NPFFR2; ENSG00000056291; TAA
FQEAFQLQL

SEQ ID NO: 52684 - protein, 9 aa, Homo sapiens
  Table A; Target 52684; HLA-A*30:01; NPFFR2; ENSG00000056291; TAA
FQEAFQLQL

SEQ ID NO: 52685 - protein, 9 aa, Homo sapiens
  Table A; Target 52685; HLA-B*13:02; NPFFR2; ENSG00000056291; TAA
FQEAFQLQL

SEQ ID NO: 52686 - protein, 9 aa, Homo sapiens
  Table A; Target 52686; HLA-B*27:05; NPFFR2; ENSG00000056291; TAA
FQEAFQLQL

SEQ ID NO: 52687 - protein, 9 aa, Homo sapiens
  Table A; Target 52687; HLA-B*38:01; NPFFR2; ENSG00000056291; TAA
FQEAFQLQL

SEQ ID NO: 52688 - protein, 9 aa, Homo sapiens
  Table A; Target 52688; HLA-B*39:01; NPFFR2; ENSG00000056291; TAA
FQEAFQLQL

SEQ ID NO: 52689 - protein, 9 aa, Homo sapiens
  Table A; Target 52689; HLA-C*02:02; NPFFR2; ENSG00000056291; TAA
FQEAFQLQL

SEQ ID NO: 52690 - protein, 9 aa, Homo sapiens
  Table A; Target 52690; HLA-A*02:01; NPFFR2; ENSG00000056291; TAA
FQNPHGETL

SEQ ID NO: 52691 - protein, 9 aa, Homo sapiens
  Table A; Target 52691; HLA-A*02:03; NPFFR2; ENSG00000056291; TAA
FQNPHGETL

SEQ ID NO: 52692 - protein, 9 aa, Homo sapiens
  Table A; Target 52692; HLA-A*02:04; NPFFR2; ENSG00000056291; TAA
FQNPHGETL

SEQ ID NO: 52693 - protein, 9 aa, Homo sapiens
  Table A; Target 52693; HLA-A*25:01; NPFFR2; ENSG00000056291; TAA
FQNPHGETL

SEQ ID NO: 52694 - protein, 9 aa, Homo sapiens
  Table A; Target 52694; HLA-A*30:01; NPFFR2; ENSG00000056291; TAA
FQNPHGETL

SEQ ID NO: 52695 - protein, 9 aa, Homo sapiens
  Table A; Target 52695; HLA-A*32:01; NPFFR2; ENSG00000056291; TAA
FQNPHGETL

SEQ ID NO: 52696 - protein, 9 aa, Homo sapiens
  Table A; Target 52696; HLA-B*07:02; NPFFR2; ENSG00000056291; TAA
FQNPHGETL

SEQ ID NO: 52697 - protein, 9 aa, Homo sapiens
  Table A; Target 52697; HLA-B*08:01; NPFFR2; ENSG00000056291; TAA
FQNPHGETL

SEQ ID NO: 52698 - protein, 9 aa, Homo sapiens
  Table A; Target 52698; HLA-B*13:02; NPFFR2; ENSG00000056291; TAA
FQNPHGETL

SEQ ID NO: 52699 - protein, 9 aa, Homo sapiens
  Table A; Target 52699; HLA-B*15:01; NPFFR2; ENSG00000056291; TAA
FQNPHGETL

SEQ ID NO: 52700 - protein, 9 aa, Homo sapiens
  Table A; Target 52700; HLA-B*15:03; NPFFR2; ENSG00000056291; TAA
FQNPHGETL

SEQ ID NO: 52701 - protein, 9 aa, Homo sapiens
  Table A; Target 52701; HLA-B*27:05; NPFFR2; ENSG00000056291; TAA
FQNPHGETL

SEQ ID NO: 52702 - protein, 9 aa, Homo sapiens
  Table A; Target 52702; HLA-B*35:03; NPFFR2; ENSG00000056291; TAA
FQNPHGETL

SEQ ID NO: 52703 - protein, 9 aa, Homo sapiens
  Table A; Target 52703; HLA-B*37:01; NPFFR2; ENSG00000056291; TAA
FQNPHGETL

SEQ ID NO: 52704 - protein, 9 aa, Homo sapiens
  Table A; Target 52704; HLA-B*38:01; NPFFR2; ENSG00000056291; TAA
FQNPHGETL

SEQ ID NO: 52705 - protein, 9 aa, Homo sapiens
  Table A; Target 52705; HLA-B*39:01; NPFFR2; ENSG00000056291; TAA
FQNPHGETL

SEQ ID NO: 52706 - protein, 9 aa, Homo sapiens
  Table A; Target 52706; HLA-B*40:01; NPFFR2; ENSG00000056291; TAA
FQNPHGETL

SEQ ID NO: 52707 - protein, 9 aa, Homo sapiens
  Table A; Target 52707; HLA-B*40:02; NPFFR2; ENSG00000056291; TAA
FQNPHGETL

SEQ ID NO: 52708 - protein, 9 aa, Homo sapiens
  Table A; Target 52708; HLA-B*46:01; NPFFR2; ENSG00000056291; TAA
FQNPHGETL

SEQ ID NO: 52709 - protein, 9 aa, Homo sapiens
  Table A; Target 52709; HLA-B*58:01; NPFFR2; ENSG00000056291; TAA
FQNPHGETL

SEQ ID NO: 52710 - protein, 9 aa, Homo sapiens
  Table A; Target 52710; HLA-C*01:02; NPFFR2; ENSG00000056291; TAA
FQNPHGETL

SEQ ID NO: 52711 - protein, 9 aa, Homo sapiens
  Table A; Target 52711; HLA-C*02:02; NPFFR2; ENSG00000056291; TAA
FQNPHGETL

SEQ ID NO: 52712 - protein, 9 aa, Homo sapiens
  Table A; Target 52712; HLA-C*03:03; NPFFR2; ENSG00000056291; TAA
FQNPHGETL

SEQ ID NO: 52713 - protein, 9 aa, Homo sapiens
  Table A; Target 52713; HLA-C*03:04; NPFFR2; ENSG00000056291; TAA
FQNPHGETL

SEQ ID NO: 52714 - protein, 9 aa, Homo sapiens
  Table A; Target 52714; HLA-C*05:01; NPFFR2; ENSG00000056291; TAA
FQNPHGETL

SEQ ID NO: 52715 - protein, 9 aa, Homo sapiens
  Table A; Target 52715; HLA-C*07:02; NPFFR2; ENSG00000056291; TAA
FQNPHGETL

SEQ ID NO: 52716 - protein, 9 aa, Homo sapiens
  Table A; Target 52716; HLA-C*07:04; NPFFR2; ENSG00000056291; TAA
FQNPHGETL

SEQ ID NO: 52717 - protein, 9 aa, Homo sapiens
  Table A; Target 52717; HLA-C*12:03; NPFFR2; ENSG00000056291; TAA
FQNPHGETL

SEQ ID NO: 52718 - protein, 9 aa, Homo sapiens
  Table A; Target 52718; HLA-C*14:02; NPFFR2; ENSG00000056291; TAA
FQNPHGETL

SEQ ID NO: 52719 - protein, 9 aa, Homo sapiens
  Table A; Target 52719; HLA-C*16:01; NPFFR2; ENSG00000056291; TAA
FQNPHGETL

SEQ ID NO: 52720 - protein, 9 aa, Homo sapiens
  Table A; Target 52720; HLA-C*16:02; NPFFR2; ENSG00000056291; TAA
FQNPHGETL

SEQ ID NO: 52721 - protein, 9 aa, Homo sapiens
  Table A; Target 52721; HLA-C*16:04; NPFFR2; ENSG00000056291; TAA
FQNPHGETL

SEQ ID NO: 52722 - protein, 10 aa, Homo sapiens
  Table A; Target 52722; HLA-A*02:01; NPFFR2; ENSG00000056291; TAA
FQNPHGETLL

SEQ ID NO: 52723 - protein, 10 aa, Homo sapiens
  Table A; Target 52723; HLA-A*02:03; NPFFR2; ENSG00000056291; TAA
FQNPHGETLL

SEQ ID NO: 52724 - protein, 10 aa, Homo sapiens
  Table A; Target 52724; HLA-A*02:04; NPFFR2; ENSG00000056291; TAA
FQNPHGETLL

SEQ ID NO: 52725 - protein, 10 aa, Homo sapiens
  Table A; Target 52725; HLA-A*32:01; NPFFR2; ENSG00000056291; TAA
FQNPHGETLL

SEQ ID NO: 52726 - protein, 10 aa, Homo sapiens
  Table A; Target 52726; HLA-B*13:02; NPFFR2; ENSG00000056291; TAA
FQNPHGETLL

SEQ ID NO: 52727 - protein, 10 aa, Homo sapiens
  Table A; Target 52727; HLA-B*15:01; NPFFR2; ENSG00000056291; TAA
FQNPHGETLL

SEQ ID NO: 52728 - protein, 10 aa, Homo sapiens
  Table A; Target 52728; HLA-B*27:05; NPFFR2; ENSG00000056291; TAA
FQNPHGETLL

SEQ ID NO: 52729 - protein, 10 aa, Homo sapiens
  Table A; Target 52729; HLA-B*38:01; NPFFR2; ENSG00000056291; TAA
FQNPHGETLL

SEQ ID NO: 52730 - protein, 10 aa, Homo sapiens
  Table A; Target 52730; HLA-B*39:01; NPFFR2; ENSG00000056291; TAA
FQNPHGETLL

SEQ ID NO: 52731 - protein, 10 aa, Homo sapiens
  Table A; Target 52731; HLA-B*40:01; NPFFR2; ENSG00000056291; TAA
FQNPHGETLL

SEQ ID NO: 52732 - protein, 10 aa, Homo sapiens
  Table A; Target 52732; HLA-C*02:02; NPFFR2; ENSG00000056291; TAA
FQNPHGETLL

SEQ ID NO: 52733 - protein, 10 aa, Homo sapiens
  Table A; Target 52733; HLA-C*07:04; NPFFR2; ENSG00000056291; TAA
FQNPHGETLL

SEQ ID NO: 52734 - protein, 11 aa, Homo sapiens
  Table A; Target 52734; HLA-A*01:01; NPFFR2; ENSG00000056291; TAA
FQNPHGETLLY

SEQ ID NO: 52735 - protein, 11 aa, Homo sapiens
  Table A; Target 52735; HLA-A*03:01; NPFFR2; ENSG00000056291; TAA
FQNPHGETLLY

SEQ ID NO: 52736 - protein, 11 aa, Homo sapiens
  Table A; Target 52736; HLA-A*26:01; NPFFR2; ENSG00000056291; TAA
FQNPHGETLLY

SEQ ID NO: 52737 - protein, 11 aa, Homo sapiens
  Table A; Target 52737; HLA-A*29:02; NPFFR2; ENSG00000056291; TAA
FQNPHGETLLY

SEQ ID NO: 52738 - protein, 11 aa, Homo sapiens
  Table A; Target 52738; HLA-A*30:02; NPFFR2; ENSG00000056291; TAA
FQNPHGETLLY

SEQ ID NO: 52739 - protein, 11 aa, Homo sapiens
  Table A; Target 52739; HLA-A*31:01; NPFFR2; ENSG00000056291; TAA
FQNPHGETLLY

SEQ ID NO: 52740 - protein, 11 aa, Homo sapiens
  Table A; Target 52740; HLA-A*32:01; NPFFR2; ENSG00000056291; TAA
FQNPHGETLLY

SEQ ID NO: 52741 - protein, 11 aa, Homo sapiens
  Table A; Target 52741; HLA-B*15:01; NPFFR2; ENSG00000056291; TAA
FQNPHGETLLY

SEQ ID NO: 52742 - protein, 11 aa, Homo sapiens
  Table A; Target 52742; HLA-B*15:03; NPFFR2; ENSG00000056291; TAA
FQNPHGETLLY

SEQ ID NO: 52743 - protein, 11 aa, Homo sapiens
  Table A; Target 52743; HLA-B*44:03; NPFFR2; ENSG00000056291; TAA
FQNPHGETLLY

SEQ ID NO: 52744 - protein, 11 aa, Homo sapiens
  Table A; Target 52744; HLA-C*02:02; NPFFR2; ENSG00000056291; TAA
FQNPHGETLLY

SEQ ID NO: 52745 - protein, 11 aa, Homo sapiens
  Table A; Target 52745; HLA-C*12:03; NPFFR2; ENSG00000056291; TAA
FQNPHGETLLY

SEQ ID NO: 52746 - protein, 11 aa, Homo sapiens
  Table A; Target 52746; HLA-C*16:04; NPFFR2; ENSG00000056291; TAA
FQNPHGETLLY

SEQ ID NO: 52747 - protein, 10 aa, Homo sapiens
  Table A; Target 52747; HLA-B*27:02; NPFFR2; ENSG00000056291; TAA
FTLVAIAVDR

SEQ ID NO: 52748 - protein, 8 aa, Homo sapiens
  Table A; Target 52748; HLA-C*14:02; NPFFR2; ENSG00000056291; TAA
GFQEAFQL

SEQ ID NO: 52749 - protein, 9 aa, Homo sapiens
  Table A; Target 52749; HLA-C*01:02; NPFFR2; ENSG00000056291; TAA
GGPAWSGSL

SEQ ID NO: 52750 - protein, 9 aa, Homo sapiens
  Table A; Target 52750; HLA-B*15:01; NPFFR2; ENSG00000056291; TAA
GISVAASVF

SEQ ID NO: 52751 - protein, 9 aa, Homo sapiens
  Table A; Target 52751; HLA-B*15:03; NPFFR2; ENSG00000056291; TAA
GISVAASVF

SEQ ID NO: 52752 - protein, 8 aa, Homo sapiens
  Table A; Target 52752; HLA-B*13:02; NPFFR2; ENSG00000056291; TAA
GLVQGISV

SEQ ID NO: 52753 - protein, 9 aa, Homo sapiens
  Table A; Target 52753; HLA-A*02:01; NPFFR2; ENSG00000056291; TAA
GLVQGISVA

SEQ ID NO: 52754 - protein, 9 aa, Homo sapiens
  Table A; Target 52754; HLA-A*02:03; NPFFR2; ENSG00000056291; TAA
GLVQGISVA

SEQ ID NO: 52755 - protein, 9 aa, Homo sapiens
  Table A; Target 52755; HLA-B*15:01; NPFFR2; ENSG00000056291; TAA
GLVQGISVA

SEQ ID NO: 52756 - protein, 9 aa, Homo sapiens
  Table A; Target 52756; HLA-B*55:01; NPFFR2; ENSG00000056291; TAA
GLVQGISVA

SEQ ID NO: 52757 - protein, 10 aa, Homo sapiens
  Table A; Target 52757; HLA-B*56:01; NPFFR2; ENSG00000056291; TAA
GLVQGISVAA

SEQ ID NO: 52758 - protein, 9 aa, Homo sapiens
  Table A; Target 52758; HLA-B*13:02; NPFFR2; ENSG00000056291; TAA
GNSSVNPII

SEQ ID NO: 52759 - protein, 10 aa, Homo sapiens
  Table A; Target 52759; HLA-A*29:02; NPFFR2; ENSG00000056291; TAA
GNSSVNPIIY

SEQ ID NO: 52760 - protein, 10 aa, Homo sapiens
  Table A; Target 52760; HLA-A*30:02; NPFFR2; ENSG00000056291; TAA
GNSSVNPIIY

SEQ ID NO: 52761 - protein, 8 aa, Homo sapiens
  Table A; Target 52761; HLA-B*07:02; NPFFR2; ENSG00000056291; TAA
GPAWSGSL

SEQ ID NO: 52762 - protein, 9 aa, Homo sapiens
  Table A; Target 52762; HLA-B*27:05; NPFFR2; ENSG00000056291; TAA
GRIGISLFR

SEQ ID NO: 52763 - protein, 9 aa, Homo sapiens
  Table A; Target 52763; HLA-B*38:01; NPFFR2; ENSG00000056291; TAA
HHLYSDINI

SEQ ID NO: 52764 - protein, 10 aa, Homo sapiens
  Table A; Target 52764; HLA-A*01:01; NPFFR2; ENSG00000056291; TAA
HLYSDINITY

SEQ ID NO: 52765 - protein, 10 aa, Homo sapiens
  Table A; Target 52765; HLA-A*03:01; NPFFR2; ENSG00000056291; TAA
HLYSDINITY

SEQ ID NO: 52766 - protein, 10 aa, Homo sapiens
  Table A; Target 52766; HLA-A*25:01; NPFFR2; ENSG00000056291; TAA
HLYSDINITY

SEQ ID NO: 52767 - protein, 10 aa, Homo sapiens
  Table A; Target 52767; HLA-A*26:01; NPFFR2; ENSG00000056291; TAA
HLYSDINITY

SEQ ID NO: 52768 - protein, 10 aa, Homo sapiens
  Table A; Target 52768; HLA-A*29:02; NPFFR2; ENSG00000056291; TAA
HLYSDINITY

SEQ ID NO: 52769 - protein, 10 aa, Homo sapiens
  Table A; Target 52769; HLA-A*30:02; NPFFR2; ENSG00000056291; TAA
HLYSDINITY

SEQ ID NO: 52770 - protein, 10 aa, Homo sapiens
  Table A; Target 52770; HLA-A*32:01; NPFFR2; ENSG00000056291; TAA
HLYSDINITY

SEQ ID NO: 52771 - protein, 10 aa, Homo sapiens
  Table A; Target 52771; HLA-B*15:01; NPFFR2; ENSG00000056291; TAA
HLYSDINITY

SEQ ID NO: 52772 - protein, 10 aa, Homo sapiens
  Table A; Target 52772; HLA-B*15:03; NPFFR2; ENSG00000056291; TAA
HLYSDINITY

SEQ ID NO: 52773 - protein, 10 aa, Homo sapiens
  Table A; Target 52773; HLA-B*35:01; NPFFR2; ENSG00000056291; TAA
HLYSDINITY

SEQ ID NO: 52774 - protein, 10 aa, Homo sapiens
  Table A; Target 52774; HLA-B*46:01; NPFFR2; ENSG00000056291; TAA
HLYSDINITY

SEQ ID NO: 52775 - protein, 10 aa, Homo sapiens
  Table A; Target 52775; HLA-C*02:02; NPFFR2; ENSG00000056291; TAA
HLYSDINITY

SEQ ID NO: 52776 - protein, 10 aa, Homo sapiens
  Table A; Target 52776; HLA-C*07:04; NPFFR2; ENSG00000056291; TAA
HLYSDINITY

SEQ ID NO: 52777 - protein, 11 aa, Homo sapiens
  Table A; Target 52777; HLA-A*02:01; NPFFR2; ENSG00000056291; TAA
HLYSDINITYV

SEQ ID NO: 52778 - protein, 11 aa, Homo sapiens
  Table A; Target 52778; HLA-A*02:03; NPFFR2; ENSG00000056291; TAA
HLYSDINITYV

SEQ ID NO: 52779 - protein, 11 aa, Homo sapiens
  Table A; Target 52779; HLA-A*02:04; NPFFR2; ENSG00000056291; TAA
HLYSDINITYV

SEQ ID NO: 52780 - protein, 11 aa, Homo sapiens
  Table A; Target 52780; HLA-A*02:07; NPFFR2; ENSG00000056291; TAA
HLYSDINITYV

SEQ ID NO: 52781 - protein, 8 aa, Homo sapiens
  Table A; Target 52781; HLA-B*08:01; NPFFR2; ENSG00000056291; TAA
HMHTVTNL

SEQ ID NO: 52782 - protein, 9 aa, Homo sapiens
  Table A; Target 52782; HLA-A*23:01; NPFFR2; ENSG00000056291; TAA
HMHTVTNLF

SEQ ID NO: 52783 - protein, 9 aa, Homo sapiens
  Table A; Target 52783; HLA-A*24:02; NPFFR2; ENSG00000056291; TAA
HMHTVTNLF

SEQ ID NO: 52784 - protein, 8 aa, Homo sapiens
  Table A; Target 52784; HLA-B*13:02; NPFFR2; ENSG00000056291; TAA
HQPQVAAI

SEQ ID NO: 52785 - protein, 8 aa, Homo sapiens
  Table A; Target 52785; HLA-B*51:01; NPFFR2; ENSG00000056291; TAA
HQPQVAAI

SEQ ID NO: 52786 - protein, 9 aa, Homo sapiens
  Table A; Target 52786; HLA-A*24:02; NPFFR2; ENSG00000056291; TAA
HQPQVAAIF

SEQ ID NO: 52787 - protein, 10 aa, Homo sapiens
  Table A; Target 52787; HLA-B*13:02; NPFFR2; ENSG00000056291; TAA
HQPQVAAIFI

SEQ ID NO: 52788 - protein, 9 aa, Homo sapiens
  Table A; Target 52788; HLA-A*68:02; NPFFR2; ENSG00000056291; TAA
HTVTNLFIL

SEQ ID NO: 52789 - protein, 9 aa, Homo sapiens
  Table A; Target 52789; HLA-A*11:01; NPFFR2; ENSG00000056291; TAA
HVQEEKYYR

SEQ ID NO: 52790 - protein, 9 aa, Homo sapiens
  Table A; Target 52790; HLA-A*31:01; NPFFR2; ENSG00000056291; TAA
HVQEEKYYR

SEQ ID NO: 52791 - protein, 9 aa, Homo sapiens
  Table A; Target 52791; HLA-A*33:01; NPFFR2; ENSG00000056291; TAA
HVQEEKYYR

SEQ ID NO: 52792 - protein, 9 aa, Homo sapiens
  Table A; Target 52792; HLA-A*33:03; NPFFR2; ENSG00000056291; TAA
HVQEEKYYR

SEQ ID NO: 52793 - protein, 9 aa, Homo sapiens
  Table A; Target 52793; HLA-A*68:01; NPFFR2; ENSG00000056291; TAA
HVQEEKYYR

SEQ ID NO: 52794 - protein, 9 aa, Homo sapiens
  Table A; Target 52794; HLA-C*07:06; NPFFR2; ENSG00000056291; TAA
HVQEEKYYR

SEQ ID NO: 52795 - protein, 9 aa, Homo sapiens
  Table A; Target 52795; HLA-B*51:01; NPFFR2; ENSG00000056291; TAA
IAVDRFQCV

SEQ ID NO: 52796 - protein, 9 aa, Homo sapiens
  Table A; Target 52796; HLA-B*54:01; NPFFR2; ENSG00000056291; TAA
IAVDRFQCV

SEQ ID NO: 52797 - protein, 9 aa, Homo sapiens
  Table A; Target 52797; HLA-C*02:02; NPFFR2; ENSG00000056291; TAA
IAVDRFQCV

SEQ ID NO: 52798 - protein, 9 aa, Homo sapiens
  Table A; Target 52798; HLA-C*03:04; NPFFR2; ENSG00000056291; TAA
IAVDRFQCV

SEQ ID NO: 52799 - protein, 9 aa, Homo sapiens
  Table A; Target 52799; HLA-C*12:03; NPFFR2; ENSG00000056291; TAA
IAVDRFQCV

SEQ ID NO: 52800 - protein, 9 aa, Homo sapiens
  Table A; Target 52800; HLA-C*16:01; NPFFR2; ENSG00000056291; TAA
IAVDRFQCV

SEQ ID NO: 52801 - protein, 9 aa, Homo sapiens
  Table A; Target 52801; HLA-C*16:02; NPFFR2; ENSG00000056291; TAA
IAVDRFQCV

SEQ ID NO: 52802 - protein, 9 aa, Homo sapiens
  Table A; Target 52802; HLA-A*24:02; NPFFR2; ENSG00000056291; TAA
IFIISYFLI

SEQ ID NO: 52803 - protein, 9 aa, Homo sapiens
  Table A; Target 52803; HLA-B*54:01; NPFFR2; ENSG00000056291; TAA
IGISLFRAA

SEQ ID NO: 52804 - protein, 9 aa, Homo sapiens
  Table A; Target 52804; HLA-A*02:04; NPFFR2; ENSG00000056291; TAA
ILNLAISDL

SEQ ID NO: 52805 - protein, 9 aa, Homo sapiens
  Table A; Target 52805; HLA-C*01:02; NPFFR2; ENSG00000056291; TAA
ILNLAISDL

SEQ ID NO: 52806 - protein, 9 aa, Homo sapiens
  Table A; Target 52806; HLA-C*14:02; NPFFR2; ENSG00000056291; TAA
ILNLAISDL

SEQ ID NO: 52807 - protein, 10 aa, Homo sapiens
  Table A; Target 52807; HLA-A*02:04; NPFFR2; ENSG00000056291; TAA
ILSWLPLWTL

SEQ ID NO: 52808 - protein, 8 aa, Homo sapiens
  Table A; Target 52808; HLA-B*46:01; NPFFR2; ENSG00000056291; TAA
IMSPSAVM

SEQ ID NO: 52809 - protein, 8 aa, Homo sapiens
  Table A; Target 52809; HLA-C*05:01; NPFFR2; ENSG00000056291; TAA
IMSPSAVM

SEQ ID NO: 52810 - protein, 8 aa, Homo sapiens
  Table A; Target 52810; HLA-C*14:02; NPFFR2; ENSG00000056291; TAA
IMSPSAVM

SEQ ID NO: 52811 - protein, 9 aa, Homo sapiens
  Table A; Target 52811; HLA-A*02:01; NPFFR2; ENSG00000056291; TAA
IMSPSAVML

SEQ ID NO: 52812 - protein, 9 aa, Homo sapiens
  Table A; Target 52812; HLA-A*02:04; NPFFR2; ENSG00000056291; TAA
IMSPSAVML

SEQ ID NO: 52813 - protein, 9 aa, Homo sapiens
  Table A; Target 52813; HLA-A*02:07; NPFFR2; ENSG00000056291; TAA
IMSPSAVML

SEQ ID NO: 52814 - protein, 9 aa, Homo sapiens
  Table A; Target 52814; HLA-A*23:01; NPFFR2; ENSG00000056291; TAA
IMSPSAVML

SEQ ID NO: 52815 - protein, 9 aa, Homo sapiens
  Table A; Target 52815; HLA-A*24:02; NPFFR2; ENSG00000056291; TAA
IMSPSAVML

SEQ ID NO: 52816 - protein, 9 aa, Homo sapiens
  Table A; Target 52816; HLA-A*32:01; NPFFR2; ENSG00000056291; TAA
IMSPSAVML

SEQ ID NO: 52817 - protein, 9 aa, Homo sapiens
  Table A; Target 52817; HLA-B*13:02; NPFFR2; ENSG00000056291; TAA
IMSPSAVML

SEQ ID NO: 52818 - protein, 9 aa, Homo sapiens
  Table A; Target 52818; HLA-B*15:01; NPFFR2; ENSG00000056291; TAA
IMSPSAVML

SEQ ID NO: 52819 - protein, 9 aa, Homo sapiens
  Table A; Target 52819; HLA-B*38:01; NPFFR2; ENSG00000056291; TAA
IMSPSAVML

SEQ ID NO: 52820 - protein, 9 aa, Homo sapiens
  Table A; Target 52820; HLA-B*39:01; NPFFR2; ENSG00000056291; TAA
IMSPSAVML

SEQ ID NO: 52821 - protein, 9 aa, Homo sapiens
  Table A; Target 52821; HLA-B*55:01; NPFFR2; ENSG00000056291; TAA
IMSPSAVML

SEQ ID NO: 52822 - protein, 9 aa, Homo sapiens
  Table A; Target 52822; HLA-C*01:02; NPFFR2; ENSG00000056291; TAA
IMSPSAVML

SEQ ID NO: 52823 - protein, 9 aa, Homo sapiens
  Table A; Target 52823; HLA-C*02:02; NPFFR2; ENSG00000056291; TAA
IMSPSAVML

SEQ ID NO: 52824 - protein, 9 aa, Homo sapiens
  Table A; Target 52824; HLA-C*03:03; NPFFR2; ENSG00000056291; TAA
IMSPSAVML

SEQ ID NO: 52825 - protein, 9 aa, Homo sapiens
  Table A; Target 52825; HLA-C*03:04; NPFFR2; ENSG00000056291; TAA
IMSPSAVML

SEQ ID NO: 52826 - protein, 9 aa, Homo sapiens
  Table A; Target 52826; HLA-C*04:01; NPFFR2; ENSG00000056291; TAA
IMSPSAVML

SEQ ID NO: 52827 - protein, 9 aa, Homo sapiens
  Table A; Target 52827; HLA-C*07:04; NPFFR2; ENSG00000056291; TAA
IMSPSAVML

SEQ ID NO: 52828 - protein, 9 aa, Homo sapiens
  Table A; Target 52828; HLA-C*14:02; NPFFR2; ENSG00000056291; TAA
IMSPSAVML

SEQ ID NO: 52829 - protein, 9 aa, Homo sapiens
  Table A; Target 52829; HLA-C*16:02; NPFFR2; ENSG00000056291; TAA
IMSPSAVML

SEQ ID NO: 52830 - protein, 10 aa, Homo sapiens
  Table A; Target 52830; HLA-A*02:03; NPFFR2; ENSG00000056291; TAA
IMYGRIGISL

SEQ ID NO: 52831 - protein, 9 aa, Homo sapiens
  Table A; Target 52831; HLA-A*29:02; NPFFR2; ENSG00000056291; TAA
INITYVNYY

SEQ ID NO: 52832 - protein, 8 aa, Homo sapiens
  Table A; Target 52832; HLA-C*05:01; NPFFR2; ENSG00000056291; TAA
ISDLLVGI

SEQ ID NO: 52833 - protein, 9 aa, Homo sapiens
  Table A; Target 52833; HLA-A*01:01; NPFFR2; ENSG00000056291; TAA
ISDLLVGIF

SEQ ID NO: 52834 - protein, 9 aa, Homo sapiens
  Table A; Target 52834; HLA-C*04:01; NPFFR2; ENSG00000056291; TAA
ISDLLVGIF

SEQ ID NO: 52835 - protein, 9 aa, Homo sapiens
  Table A; Target 52835; HLA-C*05:01; NPFFR2; ENSG00000056291; TAA
ISDLLVGIF

SEQ ID NO: 52836 - protein, 8 aa, Homo sapiens
  Table A; Target 52836; HLA-B*15:01; NPFFR2; ENSG00000056291; TAA
ISVAASVF

SEQ ID NO: 52837 - protein, 8 aa, Homo sapiens
  Table A; Target 52837; HLA-B*15:03; NPFFR2; ENSG00000056291; TAA
ISVAASVF

SEQ ID NO: 52838 - protein, 8 aa, Homo sapiens
  Table A; Target 52838; HLA-B*18:01; NPFFR2; ENSG00000056291; TAA
ISVAASVF

SEQ ID NO: 52839 - protein, 8 aa, Homo sapiens
  Table A; Target 52839; HLA-B*46:01; NPFFR2; ENSG00000056291; TAA
ISVAASVF

SEQ ID NO: 52840 - protein, 8 aa, Homo sapiens
  Table A; Target 52840; HLA-B*58:01; NPFFR2; ENSG00000056291; TAA
ISVAASVF

SEQ ID NO: 52841 - protein, 8 aa, Homo sapiens
  Table A; Target 52841; HLA-C*02:02; NPFFR2; ENSG00000056291; TAA
ISVAASVF

SEQ ID NO: 52842 - protein, 8 aa, Homo sapiens
  Table A; Target 52842; HLA-C*03:04; NPFFR2; ENSG00000056291; TAA
ISVAASVF

SEQ ID NO: 52843 - protein, 8 aa, Homo sapiens
  Table A; Target 52843; HLA-C*14:02; NPFFR2; ENSG00000056291; TAA
ISVAASVF

SEQ ID NO: 52844 - protein, 9 aa, Homo sapiens
  Table A; Target 52844; HLA-A*02:03; NPFFR2; ENSG00000056291; TAA
ITIMSPSAV

SEQ ID NO: 52845 - protein, 9 aa, Homo sapiens
  Table A; Target 52845; HLA-A*26:01; NPFFR2; ENSG00000056291; TAA
ITIMSPSAV

SEQ ID NO: 52846 - protein, 9 aa, Homo sapiens
  Table A; Target 52846; HLA-A*68:02; NPFFR2; ENSG00000056291; TAA
ITIMSPSAV

SEQ ID NO: 52847 - protein, 9 aa, Homo sapiens
  Table A; Target 52847; HLA-C*03:03; NPFFR2; ENSG00000056291; TAA
ITIMSPSAV

SEQ ID NO: 52848 - protein, 9 aa, Homo sapiens
  Table A; Target 52848; HLA-C*03:04; NPFFR2; ENSG00000056291; TAA
ITIMSPSAV

SEQ ID NO: 52849 - protein, 11 aa, Homo sapiens
  Table A; Target 52849; HLA-B*57:01; NPFFR2; ENSG00000056291; TAA
ITLLDNIIAGW

SEQ ID NO: 52850 - protein, 9 aa, Homo sapiens
  Table A; Target 52850; HLA-A*23:01; NPFFR2; ENSG00000056291; TAA
IYGFFNENF

SEQ ID NO: 52851 - protein, 9 aa, Homo sapiens
  Table A; Target 52851; HLA-A*24:02; NPFFR2; ENSG00000056291; TAA
IYGFFNENF

SEQ ID NO: 52852 - protein, 9 aa, Homo sapiens
  Table A; Target 52852; HLA-A*29:02; NPFFR2; ENSG00000056291; TAA
IYGFFNENF

SEQ ID NO: 52853 - protein, 9 aa, Homo sapiens
  Table A; Target 52853; HLA-A*24:02; NPFFR2; ENSG00000056291; TAA
IYIYPFAHW

SEQ ID NO: 52854 - protein, 8 aa, Homo sapiens
  Table A; Target 52854; HLA-A*23:01; NPFFR2; ENSG00000056291; TAA
IYLAPLSL

SEQ ID NO: 52855 - protein, 8 aa, Homo sapiens
  Table A; Target 52855; HLA-A*24:02; NPFFR2; ENSG00000056291; TAA
IYLAPLSL

SEQ ID NO: 52856 - protein, 8 aa, Homo sapiens
  Table A; Target 52856; HLA-C*14:02; NPFFR2; ENSG00000056291; TAA
IYLAPLSL

SEQ ID NO: 52857 - protein, 9 aa, Homo sapiens
  Table A; Target 52857; HLA-A*23:01; NPFFR2; ENSG00000056291; TAA
IYLAPLSLI

SEQ ID NO: 52858 - protein, 9 aa, Homo sapiens
  Table A; Target 52858; HLA-A*24:02; NPFFR2; ENSG00000056291; TAA
IYLAPLSLI

SEQ ID NO: 52859 - protein, 10 aa, Homo sapiens
  Table A; Target 52859; HLA-A*24:02; NPFFR2; ENSG00000056291; TAA
IYPFAHWLAF

SEQ ID NO: 52860 - protein, 10 aa, Homo sapiens
  Table A; Target 52860; HLA-A*23:01; NPFFR2; ENSG00000056291; TAA
IYTTVLFANI

SEQ ID NO: 52861 - protein, 10 aa, Homo sapiens
  Table A; Target 52861; HLA-A*24:02; NPFFR2; ENSG00000056291; TAA
IYTTVLFANI

SEQ ID NO: 52862 - protein, 8 aa, Homo sapiens
  Table A; Target 52862; HLA-B*08:01; NPFFR2; ENSG00000056291; TAA
KAKSHVLI

SEQ ID NO: 52863 - protein, 9 aa, Homo sapiens
  Table A; Target 52863; HLA-A*30:01; NPFFR2; ENSG00000056291; TAA
KETTNSSEI

SEQ ID NO: 52864 - protein, 9 aa, Homo sapiens
  Table A; Target 52864; HLA-B*13:02; NPFFR2; ENSG00000056291; TAA
KETTNSSEI

SEQ ID NO: 52865 - protein, 9 aa, Homo sapiens
  Table A; Target 52865; HLA-B*37:01; NPFFR2; ENSG00000056291; TAA
KETTNSSEI

SEQ ID NO: 52866 - protein, 9 aa, Homo sapiens
  Table A; Target 52866; HLA-B*38:01; NPFFR2; ENSG00000056291; TAA
KETTNSSEI

SEQ ID NO: 52867 - protein, 9 aa, Homo sapiens
  Table A; Target 52867; HLA-B*40:01; NPFFR2; ENSG00000056291; TAA
KETTNSSEI

SEQ ID NO: 52868 - protein, 9 aa, Homo sapiens
  Table A; Target 52868; HLA-B*40:02; NPFFR2; ENSG00000056291; TAA
KETTNSSEI

SEQ ID NO: 52869 - protein, 9 aa, Homo sapiens
  Table A; Target 52869; HLA-B*44:02; NPFFR2; ENSG00000056291; TAA
KETTNSSEI

SEQ ID NO: 52870 - protein, 9 aa, Homo sapiens
  Table A; Target 52870; HLA-B*44:03; NPFFR2; ENSG00000056291; TAA
KETTNSSEI

SEQ ID NO: 52871 - protein, 9 aa, Homo sapiens
  Table A; Target 52871; HLA-B*49:01; NPFFR2; ENSG00000056291; TAA
KETTNSSEI

SEQ ID NO: 52872 - protein, 9 aa, Homo sapiens
  Table A; Target 52872; HLA-B*58:01; NPFFR2; ENSG00000056291; TAA
KETTNSSEI

SEQ ID NO: 52873 - protein, 9 aa, Homo sapiens
  Table A; Target 52873; HLA-C*06:02; NPFFR2; ENSG00000056291; TAA
KETTNSSEI

SEQ ID NO: 52874 - protein, 9 aa, Homo sapiens
  Table A; Target 52874; HLA-C*16:02; NPFFR2; ENSG00000056291; TAA
KETTNSSEI

SEQ ID NO: 52875 - protein, 9 aa, Homo sapiens
  Table A; Target 52875; HLA-C*16:04; NPFFR2; ENSG00000056291; TAA
KETTNSSEI

SEQ ID NO: 52876 - protein, 9 aa, Homo sapiens
  Table A; Target 52876; HLA-B*38:01; NPFFR2; ENSG00000056291; TAA
KHMHTVTNL

SEQ ID NO: 52877 - protein, 9 aa, Homo sapiens
  Table A; Target 52877; HLA-A*02:03; NPFFR2; ENSG00000056291; TAA
KISGLVQGI

SEQ ID NO: 52878 - protein, 9 aa, Homo sapiens
  Table A; Target 52878; HLA-A*32:01; NPFFR2; ENSG00000056291; TAA
KISGLVQGI

SEQ ID NO: 52879 - protein, 9 aa, Homo sapiens
  Table A; Target 52879; HLA-B*13:02; NPFFR2; ENSG00000056291; TAA
KISGLVQGI

SEQ ID NO: 52880 - protein, 9 aa, Homo sapiens
  Table A; Target 52880; HLA-B*58:01; NPFFR2; ENSG00000056291; TAA
KISGLVQGI

SEQ ID NO: 52881 - protein, 9 aa, Homo sapiens
  Table A; Target 52881; HLA-C*06:02; NPFFR2; ENSG00000056291; TAA
KISGLVQGI

SEQ ID NO: 52882 - protein, 8 aa, Homo sapiens
  Table A; Target 52882; HLA-B*57:01; NPFFR2; ENSG00000056291; TAA
KIYTTVLF

SEQ ID NO: 52883 - protein, 9 aa, Homo sapiens
  Table A; Target 52883; HLA-A*02:01; NPFFR2; ENSG00000056291; TAA
KIYTTVLFA

SEQ ID NO: 52884 - protein, 9 aa, Homo sapiens
  Table A; Target 52884; HLA-A*02:03; NPFFR2; ENSG00000056291; TAA
KIYTTVLFA

SEQ ID NO: 52885 - protein, 9 aa, Homo sapiens
  Table A; Target 52885; HLA-A*02:04; NPFFR2; ENSG00000056291; TAA
KMLLIVALL

SEQ ID NO: 52886 - protein, 9 aa, Homo sapiens
  Table A; Target 52886; HLA-B*55:01; NPFFR2; ENSG00000056291; TAA
KPKLTIKTA

SEQ ID NO: 52887 - protein, 9 aa, Homo sapiens
  Table A; Target 52887; HLA-B*56:01; NPFFR2; ENSG00000056291; TAA
KPKLTIKTA

SEQ ID NO: 52888 - protein, 10 aa, Homo sapiens
  Table A; Target 52888; HLA-B*07:02; NPFFR2; ENSG00000056291; TAA
KPKLTIKTAF

SEQ ID NO: 52889 - protein, 10 aa, Homo sapiens
  Table A; Target 52889; HLA-C*07:02; NPFFR2; ENSG00000056291; TAA
KPKLTIKTAF

SEQ ID NO: 52890 - protein, 8 aa, Homo sapiens
  Table A; Target 52890; HLA-B*07:02; NPFFR2; ENSG00000056291; TAA
KPMEAYAL

SEQ ID NO: 52891 - protein, 8 aa, Homo sapiens
  Table A; Target 52891; HLA-B*08:01; NPFFR2; ENSG00000056291; TAA
KPMEAYAL

SEQ ID NO: 52892 - protein, 8 aa, Homo sapiens
  Table A; Target 52892; HLA-B*35:01; NPFFR2; ENSG00000056291; TAA
KPMEAYAL

SEQ ID NO: 52893 - protein, 8 aa, Homo sapiens
  Table A; Target 52893; HLA-B*35:03; NPFFR2; ENSG00000056291; TAA
KPMEAYAL

SEQ ID NO: 52894 - protein, 8 aa, Homo sapiens
  Table A; Target 52894; HLA-B*37:01; NPFFR2; ENSG00000056291; TAA
KPMEAYAL

SEQ ID NO: 52895 - protein, 8 aa, Homo sapiens
  Table A; Target 52895; HLA-B*55:01; NPFFR2; ENSG00000056291; TAA
KPMEAYAL

SEQ ID NO: 52896 - protein, 8 aa, Homo sapiens
  Table A; Target 52896; HLA-B*56:01; NPFFR2; ENSG00000056291; TAA
KPMEAYAL

SEQ ID NO: 52897 - protein, 8 aa, Homo sapiens
  Table A; Target 52897; HLA-C*07:02; NPFFR2; ENSG00000056291; TAA
KPMEAYAL

SEQ ID NO: 52898 - protein, 8 aa, Homo sapiens
  Table A; Target 52898; HLA-C*16:01; NPFFR2; ENSG00000056291; TAA
KPMEAYAL

SEQ ID NO: 52899 - protein, 9 aa, Homo sapiens
  Table A; Target 52899; HLA-A*03:02; NPFFR2; ENSG00000056291; TAA
KPMEAYALK

SEQ ID NO: 52900 - protein, 9 aa, Homo sapiens
  Table A; Target 52900; HLA-A*11:01; NPFFR2; ENSG00000056291; TAA
KPMEAYALK

SEQ ID NO: 52901 - protein, 9 aa, Homo sapiens
  Table A; Target 52901; HLA-B*27:02; NPFFR2; ENSG00000056291; TAA
KPMEAYALK

SEQ ID NO: 52902 - protein, 10 aa, Homo sapiens
  Table A; Target 52902; HLA-B*54:01; NPFFR2; ENSG00000056291; TAA
KPMEAYALKA

SEQ ID NO: 52903 - protein, 10 aa, Homo sapiens
  Table A; Target 52903; HLA-B*55:01; NPFFR2; ENSG00000056291; TAA
KPMEAYALKA

SEQ ID NO: 52904 - protein, 10 aa, Homo sapiens
  Table A; Target 52904; HLA-B*56:01; NPFFR2; ENSG00000056291; TAA
KPMEAYALKA

SEQ ID NO: 52905 - protein, 11 aa, Homo sapiens
  Table A; Target 52905; HLA-B*07:02; NPFFR2; ENSG00000056291; TAA
KPQQELVMEEL

SEQ ID NO: 52906 - protein, 11 aa, Homo sapiens
  Table A; Target 52906; HLA-C*07:02; NPFFR2; ENSG00000056291; TAA
KPQQELVMEEL

SEQ ID NO: 52907 - protein, 9 aa, Homo sapiens
  Table A; Target 52907; HLA-C*16:04; NPFFR2; ENSG00000056291; TAA
KRAKPMEAY

SEQ ID NO: 52908 - protein, 10 aa, Homo sapiens
  Table A; Target 52908; HLA-B*58:01; NPFFR2; ENSG00000056291; TAA
KSAEKPQQEL

SEQ ID NO: 52909 - protein, 9 aa, Homo sapiens
  Table A; Target 52909; HLA-B*58:01; NPFFR2; ENSG00000056291; TAA
KSHVLINTS

SEQ ID NO: 52910 - protein, 9 aa, Homo sapiens
  Table A; Target 52910; HLA-A*68:02; NPFFR2; ENSG00000056291; TAA
KTAFVIIMI

SEQ ID NO: 52911 - protein, 9 aa, Homo sapiens
  Table A; Target 52911; HLA-A*31:01; NPFFR2; ENSG00000056291; TAA
KTSPVYWCR

SEQ ID NO: 52912 - protein, 9 aa, Homo sapiens
  Table A; Target 52912; HLA-B*57:01; NPFFR2; ENSG00000056291; TAA
KTSPVYWCR

SEQ ID NO: 52913 - protein, 8 aa, Homo sapiens
  Table A; Target 52913; HLA-C*12:03; NPFFR2; ENSG00000056291; TAA
LAFGNSSV

SEQ ID NO: 52914 - protein, 9 aa, Homo sapiens
  Table A; Target 52914; HLA-C*12:03; NPFFR2; ENSG00000056291; TAA
LAFGNSSVN

SEQ ID NO: 52915 - protein, 10 aa, Homo sapiens
  Table A; Target 52915; HLA-B*54:01; NPFFR2; ENSG00000056291; TAA
LAITIMSPSA

SEQ ID NO: 52916 - protein, 8 aa, Homo sapiens
  Table A; Target 52916; HLA-B*51:01; NPFFR2; ENSG00000056291; TAA
LAPLSLIV

SEQ ID NO: 52917 - protein, 9 aa, Homo sapiens
  Table A; Target 52917; HLA-B*51:01; NPFFR2; ENSG00000056291; TAA
LAPLSLIVI

SEQ ID NO: 52918 - protein, 9 aa, Homo sapiens
  Table A; Target 52918; HLA-B*49:01; NPFFR2; ENSG00000056291; TAA
LESDVSSAP

SEQ ID NO: 52919 - protein, 9 aa, Homo sapiens
  Table A; Target 52919; HLA-A*03:01; NPFFR2; ENSG00000056291; TAA
LGLSRQTAK

SEQ ID NO: 52920 - protein, 9 aa, Homo sapiens
  Table A; Target 52920; HLA-A*11:01; NPFFR2; ENSG00000056291; TAA
LGLSRQTAK

SEQ ID NO: 52921 - protein, 9 aa, Homo sapiens
  Table A; Target 52921; HLA-B*38:01; NPFFR2; ENSG00000056291; TAA
LHQPQVAAI

SEQ ID NO: 52922 - protein, 9 aa, Homo sapiens
  Table A; Target 52922; HLA-B*39:01; NPFFR2; ENSG00000056291; TAA
LHQPQVAAI

SEQ ID NO: 52923 - protein, 9 aa, Homo sapiens
  Table A; Target 52923; HLA-C*07:04; NPFFR2; ENSG00000056291; TAA
LHQPQVAAI

SEQ ID NO: 52924 - protein, 8 aa, Homo sapiens
  Table A; Target 52924; HLA-C*01:02; NPFFR2; ENSG00000056291; TAA
LINTSNQL

SEQ ID NO: 52925 - protein, 8 aa, Homo sapiens
  Table A; Target 52925; HLA-C*05:01; NPFFR2; ENSG00000056291; TAA
LINTSNQL

SEQ ID NO: 52926 - protein, 9 aa, Homo sapiens
  Table A; Target 52926; HLA-A*01:01; NPFFR2; ENSG00000056291; TAA
LLDNIIAGW

SEQ ID NO: 52927 - protein, 9 aa, Homo sapiens
  Table A; Target 52927; HLA-A*02:07; NPFFR2; ENSG00000056291; TAA
LLDNIIAGW

SEQ ID NO: 52928 - protein, 9 aa, Homo sapiens
  Table A; Target 52928; HLA-A*03:01; NPFFR2; ENSG00000056291; TAA
LLYRKSAEK

SEQ ID NO: 52929 - protein, 10 aa, Homo sapiens
  Table A; Target 52929; HLA-B*57:01; NPFFR2; ENSG00000056291; TAA
LSRQTAKSSW

SEQ ID NO: 52930 - protein, 11 aa, Homo sapiens
  Table A; Target 52930; HLA-B*57:01; NPFFR2; ENSG00000056291; TAA
LSVQQRGGPAW

SEQ ID NO: 52931 - protein, 11 aa, Homo sapiens
  Table A; Target 52931; HLA-B*58:01; NPFFR2; ENSG00000056291; TAA
LSVQQRGGPAW

SEQ ID NO: 52932 - protein, 9 aa, Homo sapiens
  Table A; Target 52932; HLA-B*54:01; NPFFR2; ENSG00000056291; TAA
LVQGISVAA

SEQ ID NO: 52933 - protein, 9 aa, Homo sapiens
  Table A; Target 52933; HLA-B*56:01; NPFFR2; ENSG00000056291; TAA
LVQGISVAA

SEQ ID NO: 52934 - protein, 9 aa, Homo sapiens
  Table A; Target 52934; HLA-A*23:01; NPFFR2; ENSG00000056291; TAA
LYSDINITY

SEQ ID NO: 52935 - protein, 9 aa, Homo sapiens
  Table A; Target 52935; HLA-A*24:02; NPFFR2; ENSG00000056291; TAA
LYSDINITY

SEQ ID NO: 52936 - protein, 9 aa, Homo sapiens
  Table A; Target 52936; HLA-A*26:01; NPFFR2; ENSG00000056291; TAA
LYSDINITY

SEQ ID NO: 52937 - protein, 9 aa, Homo sapiens
  Table A; Target 52937; HLA-A*29:02; NPFFR2; ENSG00000056291; TAA
LYSDINITY

SEQ ID NO: 52938 - protein, 9 aa, Homo sapiens
  Table A; Target 52938; HLA-A*30:02; NPFFR2; ENSG00000056291; TAA
LYSDINITY

SEQ ID NO: 52939 - protein, 9 aa, Homo sapiens
  Table A; Target 52939; HLA-A*32:01; NPFFR2; ENSG00000056291; TAA
LYSDINITY

SEQ ID NO: 52940 - protein, 9 aa, Homo sapiens
  Table A; Target 52940; HLA-A*33:01; NPFFR2; ENSG00000056291; TAA
LYSDINITY

SEQ ID NO: 52941 - protein, 9 aa, Homo sapiens
  Table A; Target 52941; HLA-A*33:03; NPFFR2; ENSG00000056291; TAA
LYSDINITY

SEQ ID NO: 52942 - protein, 9 aa, Homo sapiens
  Table A; Target 52942; HLA-B*15:01; NPFFR2; ENSG00000056291; TAA
LYSDINITY

SEQ ID NO: 52943 - protein, 9 aa, Homo sapiens
  Table A; Target 52943; HLA-B*15:03; NPFFR2; ENSG00000056291; TAA
LYSDINITY

SEQ ID NO: 52944 - protein, 9 aa, Homo sapiens
  Table A; Target 52944; HLA-B*18:01; NPFFR2; ENSG00000056291; TAA
LYSDINITY

SEQ ID NO: 52945 - protein, 9 aa, Homo sapiens
  Table A; Target 52945; HLA-B*27:05; NPFFR2; ENSG00000056291; TAA
LYSDINITY

SEQ ID NO: 52946 - protein, 9 aa, Homo sapiens
  Table A; Target 52946; HLA-B*35:01; NPFFR2; ENSG00000056291; TAA
LYSDINITY

SEQ ID NO: 52947 - protein, 9 aa, Homo sapiens
  Table A; Target 52947; HLA-B*39:01; NPFFR2; ENSG00000056291; TAA
LYSDINITY

SEQ ID NO: 52948 - protein, 9 aa, Homo sapiens
  Table A; Target 52948; HLA-B*46:01; NPFFR2; ENSG00000056291; TAA
LYSDINITY

SEQ ID NO: 52949 - protein, 9 aa, Homo sapiens
  Table A; Target 52949; HLA-B*57:01; NPFFR2; ENSG00000056291; TAA
LYSDINITY

SEQ ID NO: 52950 - protein, 9 aa, Homo sapiens
  Table A; Target 52950; HLA-B*58:01; NPFFR2; ENSG00000056291; TAA
LYSDINITY

SEQ ID NO: 52951 - protein, 9 aa, Homo sapiens
  Table A; Target 52951; HLA-C*01:02; NPFFR2; ENSG00000056291; TAA
LYSDINITY

SEQ ID NO: 52952 - protein, 9 aa, Homo sapiens
  Table A; Target 52952; HLA-C*02:02; NPFFR2; ENSG00000056291; TAA
LYSDINITY

SEQ ID NO: 52953 - protein, 9 aa, Homo sapiens
  Table A; Target 52953; HLA-C*04:01; NPFFR2; ENSG00000056291; TAA
LYSDINITY

SEQ ID NO: 52954 - protein, 9 aa, Homo sapiens
  Table A; Target 52954; HLA-C*07:04; NPFFR2; ENSG00000056291; TAA
LYSDINITY

SEQ ID NO: 52955 - protein, 9 aa, Homo sapiens
  Table A; Target 52955; HLA-C*12:03; NPFFR2; ENSG00000056291; TAA
LYSDINITY

SEQ ID NO: 52956 - protein, 9 aa, Homo sapiens
  Table A; Target 52956; HLA-C*14:02; NPFFR2; ENSG00000056291; TAA
LYSDINITY

SEQ ID NO: 52957 - protein, 9 aa, Homo sapiens
  Table A; Target 52957; HLA-C*16:01; NPFFR2; ENSG00000056291; TAA
LYSDINITY

SEQ ID NO: 52958 - protein, 9 aa, Homo sapiens
  Table A; Target 52958; HLA-C*16:02; NPFFR2; ENSG00000056291; TAA
LYSDINITY

SEQ ID NO: 52959 - protein, 9 aa, Homo sapiens
  Table A; Target 52959; HLA-C*16:04; NPFFR2; ENSG00000056291; TAA
LYSDINITY

SEQ ID NO: 52960 - protein, 10 aa, Homo sapiens
  Table A; Target 52960; HLA-A*23:01; NPFFR2; ENSG00000056291; TAA
LYSDINITYV

SEQ ID NO: 52961 - protein, 10 aa, Homo sapiens
  Table A; Target 52961; HLA-A*24:02; NPFFR2; ENSG00000056291; TAA
LYSDINITYV

SEQ ID NO: 52962 - protein, 8 aa, Homo sapiens
  Table A; Target 52962; HLA-B*18:01; NPFFR2; ENSG00000056291; TAA
MEAYALKA

SEQ ID NO: 52963 - protein, 8 aa, Homo sapiens
  Table A; Target 52963; HLA-B*49:01; NPFFR2; ENSG00000056291; TAA
MEAYALKA

SEQ ID NO: 52964 - protein, 8 aa, Homo sapiens
  Table A; Target 52964; HLA-B*38:01; NPFFR2; ENSG00000056291; TAA
MHTVTNLF

SEQ ID NO: 52965 - protein, 9 aa, Homo sapiens
  Table A; Target 52965; HLA-B*38:01; NPFFR2; ENSG00000056291; TAA
MHTVTNLFI

SEQ ID NO: 52966 - protein, 9 aa, Homo sapiens
  Table A; Target 52966; HLA-A*01:01; NPFFR2; ENSG00000056291; TAA
MLHVQEEKY

SEQ ID NO: 52967 - protein, 9 aa, Homo sapiens
  Table A; Target 52967; HLA-A*29:02; NPFFR2; ENSG00000056291; TAA
MLHVQEEKY

SEQ ID NO: 52968 - protein, 9 aa, Homo sapiens
  Table A; Target 52968; HLA-A*30:02; NPFFR2; ENSG00000056291; TAA
MLHVQEEKY

SEQ ID NO: 52969 - protein, 9 aa, Homo sapiens
  Table A; Target 52969; HLA-B*15:01; NPFFR2; ENSG00000056291; TAA
MLHVQEEKY

SEQ ID NO: 52970 - protein, 9 aa, Homo sapiens
  Table A; Target 52970; HLA-B*15:03; NPFFR2; ENSG00000056291; TAA
MLHVQEEKY

SEQ ID NO: 52971 - protein, 9 aa, Homo sapiens
  Table A; Target 52971; HLA-B*46:01; NPFFR2; ENSG00000056291; TAA
MLHVQEEKY

SEQ ID NO: 52972 - protein, 9 aa, Homo sapiens
  Table A; Target 52972; HLA-C*07:04; NPFFR2; ENSG00000056291; TAA
MLHVQEEKY

SEQ ID NO: 52973 - protein, 9 aa, Homo sapiens
  Table A; Target 52973; HLA-A*29:02; NPFFR2; ENSG00000056291; TAA
MLLIVALLF

SEQ ID NO: 52974 - protein, 9 aa, Homo sapiens
  Table A; Target 52974; HLA-A*23:01; NPFFR2; ENSG00000056291; TAA
MMGNTVVCF

SEQ ID NO: 52975 - protein, 9 aa, Homo sapiens
  Table A; Target 52975; HLA-C*07:04; NPFFR2; ENSG00000056291; TAA
MMGNTVVCF

SEQ ID NO: 52976 - protein, 9 aa, Homo sapiens
  Table A; Target 52976; HLA-C*14:02; NPFFR2; ENSG00000056291; TAA
MMGNTVVCF

SEQ ID NO: 52977 - protein, 9 aa, Homo sapiens
  Table A; Target 52977; HLA-B*35:03; NPFFR2; ENSG00000056291; TAA
MPITLLDNI

SEQ ID NO: 52978 - protein, 9 aa, Homo sapiens
  Table A; Target 52978; HLA-B*51:01; NPFFR2; ENSG00000056291; TAA
MPITLLDNI

SEQ ID NO: 52979 - protein, 9 aa, Homo sapiens
  Table A; Target 52979; HLA-B*54:01; NPFFR2; ENSG00000056291; TAA
MPITLLDNI

SEQ ID NO: 52980 - protein, 9 aa, Homo sapiens
  Table A; Target 52980; HLA-B*56:01; NPFFR2; ENSG00000056291; TAA
MPITLLDNI

SEQ ID NO: 52981 - protein, 10 aa, Homo sapiens
  Table A; Target 52981; HLA-B*35:03; NPFFR2; ENSG00000056291; TAA
MPITLLDNII

SEQ ID NO: 52982 - protein, 10 aa, Homo sapiens
  Table A; Target 52982; HLA-B*51:01; NPFFR2; ENSG00000056291; TAA
MPITLLDNII

SEQ ID NO: 52983 - protein, 10 aa, Homo sapiens
  Table A; Target 52983; HLA-B*54:01; NPFFR2; ENSG00000056291; TAA
MPITLLDNII

SEQ ID NO: 52984 - protein, 11 aa, Homo sapiens
  Table A; Target 52984; HLA-B*54:01; NPFFR2; ENSG00000056291; TAA
MPITLLDNIIA

SEQ ID NO: 52985 - protein, 8 aa, Homo sapiens
  Table A; Target 52985; HLA-C*01:02; NPFFR2; ENSG00000056291; TAA
MSPSAVML

SEQ ID NO: 52986 - protein, 10 aa, Homo sapiens
  Table A; Target 52986; HLA-A*68:02; NPFFR2; ENSG00000056291; TAA
MSPSAVMLHV

SEQ ID NO: 52987 - protein, 9 aa, Homo sapiens
  Table A; Target 52987; HLA-A*23:01; NPFFR2; ENSG00000056291; TAA
MYGRIGISL

SEQ ID NO: 52988 - protein, 9 aa, Homo sapiens
  Table A; Target 52988; HLA-A*24:02; NPFFR2; ENSG00000056291; TAA
MYGRIGISL

SEQ ID NO: 52989 - protein, 9 aa, Homo sapiens
  Table A; Target 52989; HLA-C*14:02; NPFFR2; ENSG00000056291; TAA
MYGRIGISL

SEQ ID NO: 52990 - protein, 10 aa, Homo sapiens
  Table A; Target 52990; HLA-A*24:02; NPFFR2; ENSG00000056291; TAA
MYGRIGISLF

SEQ ID NO: 52991 - protein, 8 aa, Homo sapiens
  Table A; Target 52991; HLA-B*37:01; NPFFR2; ENSG00000056291; TAA
NDTKHHLY

SEQ ID NO: 52992 - protein, 8 aa, Homo sapiens
  Table A; Target 52992; HLA-C*07:01; NPFFR2; ENSG00000056291; TAA
NDTKHHLY

SEQ ID NO: 52993 - protein, 8 aa, Homo sapiens
  Table A; Target 52993; HLA-B*18:01; NPFFR2; ENSG00000056291; TAA
NELQIINI

SEQ ID NO: 52994 - protein, 8 aa, Homo sapiens
  Table A; Target 52994; HLA-B*49:01; NPFFR2; ENSG00000056291; TAA
NELQIINI

SEQ ID NO: 52995 - protein, 9 aa, Homo sapiens
  Table A; Target 52995; HLA-B*18:01; NPFFR2; ENSG00000056291; TAA
NELQIINIY

SEQ ID NO: 52996 - protein, 9 aa, Homo sapiens
  Table A; Target 52996; HLA-B*44:02; NPFFR2; ENSG00000056291; TAA
NELQIINIY

SEQ ID NO: 52997 - protein, 9 aa, Homo sapiens
  Table A; Target 52997; HLA-B*44:03; NPFFR2; ENSG00000056291; TAA
NELQIINIY

SEQ ID NO: 52998 - protein, 8 aa, Homo sapiens
  Table A; Target 52998; HLA-A*01:01; NPFFR2; ENSG00000056291; TAA
NITYVNYY

SEQ ID NO: 52999 - protein, 9 aa, Homo sapiens
  Table A; Target 52999; HLA-A*02:04; NPFFR2; ENSG00000056291; TAA
NITYVNYYL

SEQ ID NO: 53000 - protein, 9 aa, Homo sapiens
  Table A; Target 53000; HLA-A*68:02; NPFFR2; ENSG00000056291; TAA
NITYVNYYL

SEQ ID NO: 53001 - protein, 9 aa, Homo sapiens
  Table A; Target 53001; HLA-B*08:01; NPFFR2; ENSG00000056291; TAA
NIYLAPLSL

SEQ ID NO: 53002 - protein, 9 aa, Homo sapiens
  Table A; Target 53002; HLA-C*01:02; NPFFR2; ENSG00000056291; TAA
NIYLAPLSL

SEQ ID NO: 53003 - protein, 9 aa, Homo sapiens
  Table A; Target 53003; HLA-C*07:02; NPFFR2; ENSG00000056291; TAA
NIYLAPLSL

SEQ ID NO: 53004 - protein, 9 aa, Homo sapiens
  Table A; Target 53004; HLA-C*14:02; NPFFR2; ENSG00000056291; TAA
NIYLAPLSL

SEQ ID NO: 53005 - protein, 9 aa, Homo sapiens
  Table A; Target 53005; HLA-A*01:01; NPFFR2; ENSG00000056291; TAA
NPHGETLLY

SEQ ID NO: 53006 - protein, 9 aa, Homo sapiens
  Table A; Target 53006; HLA-A*26:01; NPFFR2; ENSG00000056291; TAA
NPHGETLLY

SEQ ID NO: 53007 - protein, 9 aa, Homo sapiens
  Table A; Target 53007; HLA-A*29:02; NPFFR2; ENSG00000056291; TAA
NPHGETLLY

SEQ ID NO: 53008 - protein, 9 aa, Homo sapiens
  Table A; Target 53008; HLA-A*30:02; NPFFR2; ENSG00000056291; TAA
NPHGETLLY

SEQ ID NO: 53009 - protein, 9 aa, Homo sapiens
  Table A; Target 53009; HLA-B*35:01; NPFFR2; ENSG00000056291; TAA
NPHGETLLY

SEQ ID NO: 53010 - protein, 9 aa, Homo sapiens
  Table A; Target 53010; HLA-B*55:01; NPFFR2; ENSG00000056291; TAA
NPHGETLLY

SEQ ID NO: 53011 - protein, 9 aa, Homo sapiens
  Table A; Target 53011; HLA-C*03:03; NPFFR2; ENSG00000056291; TAA
NPHGETLLY

SEQ ID NO: 53012 - protein, 10 aa, Homo sapiens
  Table A; Target 53012; HLA-A*33:01; NPFFR2; ENSG00000056291; TAA
NPHGETLLYR

SEQ ID NO: 53013 - protein, 10 aa, Homo sapiens
  Table A; Target 53013; HLA-A*33:03; NPFFR2; ENSG00000056291; TAA
NPHGETLLYR

SEQ ID NO: 53014 - protein, 9 aa, Homo sapiens
  Table A; Target 53014; HLA-A*23:01; NPFFR2; ENSG00000056291; TAA
NQLVQESTF

SEQ ID NO: 53015 - protein, 9 aa, Homo sapiens
  Table A; Target 53015; HLA-A*24:02; NPFFR2; ENSG00000056291; TAA
NQLVQESTF

SEQ ID NO: 53016 - protein, 9 aa, Homo sapiens
  Table A; Target 53016; HLA-A*32:01; NPFFR2; ENSG00000056291; TAA
NQLVQESTF

SEQ ID NO: 53017 - protein, 9 aa, Homo sapiens
  Table A; Target 53017; HLA-B*15:01; NPFFR2; ENSG00000056291; TAA
NQLVQESTF

SEQ ID NO: 53018 - protein, 9 aa, Homo sapiens
  Table A; Target 53018; HLA-B*15:03; NPFFR2; ENSG00000056291; TAA
NQLVQESTF

SEQ ID NO: 53019 - protein, 9 aa, Homo sapiens
  Table A; Target 53019; HLA-B*18:01; NPFFR2; ENSG00000056291; TAA
NQLVQESTF

SEQ ID NO: 53020 - protein, 9 aa, Homo sapiens
  Table A; Target 53020; HLA-B*38:01; NPFFR2; ENSG00000056291; TAA
NQLVQESTF

SEQ ID NO: 53021 - protein, 9 aa, Homo sapiens
  Table A; Target 53021; HLA-B*39:01; NPFFR2; ENSG00000056291; TAA
NQLVQESTF

SEQ ID NO: 53022 - protein, 9 aa, Homo sapiens
  Table A; Target 53022; HLA-C*04:01; NPFFR2; ENSG00000056291; TAA
NQLVQESTF

SEQ ID NO: 53023 - protein, 9 aa, Homo sapiens
  Table A; Target 53023; HLA-C*07:04; NPFFR2; ENSG00000056291; TAA
NQLVQESTF

SEQ ID NO: 53024 - protein, 9 aa, Homo sapiens
  Table A; Target 53024; HLA-C*14:02; NPFFR2; ENSG00000056291; TAA
NQLVQESTF

SEQ ID NO: 53025 - protein, 9 aa, Homo sapiens
  Table A; Target 53025; HLA-C*16:04; NPFFR2; ENSG00000056291; TAA
NQLVQESTF

SEQ ID NO: 53026 - protein, 9 aa, Homo sapiens
  Table A; Target 53026; HLA-B*54:01; NPFFR2; ENSG00000056291; TAA
NSFFGTPAA

SEQ ID NO: 53027 - protein, 9 aa, Homo sapiens
  Table A; Target 53027; HLA-B*56:01; NPFFR2; ENSG00000056291; TAA
NSFFGTPAA

SEQ ID NO: 53028 - protein, 9 aa, Homo sapiens
  Table A; Target 53028; HLA-C*02:02; NPFFR2; ENSG00000056291; TAA
NSFFGTPAA

SEQ ID NO: 53029 - protein, 9 aa, Homo sapiens
  Table A; Target 53029; HLA-C*03:03; NPFFR2; ENSG00000056291; TAA
NSFFGTPAA

SEQ ID NO: 53030 - protein, 9 aa, Homo sapiens
  Table A; Target 53030; HLA-C*03:04; NPFFR2; ENSG00000056291; TAA
NSFFGTPAA

SEQ ID NO: 53031 - protein, 9 aa, Homo sapiens
  Table A; Target 53031; HLA-C*12:03; NPFFR2; ENSG00000056291; TAA
NSFFGTPAA

SEQ ID NO: 53032 - protein, 11 aa, Homo sapiens
  Table A; Target 53032; HLA-A*25:01; NPFFR2; ENSG00000056291; TAA
NSFFGTPAASW

SEQ ID NO: 53033 - protein, 11 aa, Homo sapiens
  Table A; Target 53033; HLA-B*44:02; NPFFR2; ENSG00000056291; TAA
NSFFGTPAASW

SEQ ID NO: 53034 - protein, 11 aa, Homo sapiens
  Table A; Target 53034; HLA-B*44:03; NPFFR2; ENSG00000056291; TAA
NSFFGTPAASW

SEQ ID NO: 53035 - protein, 11 aa, Homo sapiens
  Table A; Target 53035; HLA-B*57:01; NPFFR2; ENSG00000056291; TAA
NSFFGTPAASW

SEQ ID NO: 53036 - protein, 11 aa, Homo sapiens
  Table A; Target 53036; HLA-B*58:01; NPFFR2; ENSG00000056291; TAA
NSFFGTPAASW

SEQ ID NO: 53037 - protein, 11 aa, Homo sapiens
  Table A; Target 53037; HLA-C*16:04; NPFFR2; ENSG00000056291; TAA
NSFFGTPAASW

SEQ ID NO: 53038 - protein, 10 aa, Homo sapiens
  Table A; Target 53038; HLA-A*30:02; NPFFR2; ENSG00000056291; TAA
NSQNKTSPVY

SEQ ID NO: 53039 - protein, 11 aa, Homo sapiens
  Table A; Target 53039; HLA-A*33:01; NPFFR2; ENSG00000056291; TAA
NSQNKTSPVYW

SEQ ID NO: 53040 - protein, 11 aa, Homo sapiens
  Table A; Target 53040; HLA-B*57:01; NPFFR2; ENSG00000056291; TAA
NSQNKTSPVYW

SEQ ID NO: 53041 - protein, 9 aa, Homo sapiens
  Table A; Target 53041; HLA-A*01:01; NPFFR2; ENSG00000056291; TAA
NSSVNPIIY

SEQ ID NO: 53042 - protein, 9 aa, Homo sapiens
  Table A; Target 53042; HLA-A*29:02; NPFFR2; ENSG00000056291; TAA
NSSVNPIIY

SEQ ID NO: 53043 - protein, 9 aa, Homo sapiens
  Table A; Target 53043; HLA-A*30:02; NPFFR2; ENSG00000056291; TAA
NSSVNPIIY

SEQ ID NO: 53044 - protein, 9 aa, Homo sapiens
  Table A; Target 53044; HLA-C*12:03; NPFFR2; ENSG00000056291; TAA
NSSVNPIIY

SEQ ID NO: 53045 - protein, 9 aa, Homo sapiens
  Table A; Target 53045; HLA-C*16:01; NPFFR2; ENSG00000056291; TAA
NSSVNPIIY

SEQ ID NO: 53046 - protein, 10 aa, Homo sapiens
  Table A; Target 53046; HLA-A*26:01; NPFFR2; ENSG00000056291; TAA
NVNDTKHHLY

SEQ ID NO: 53047 - protein, 10 aa, Homo sapiens
  Table A; Target 53047; HLA-A*29:02; NPFFR2; ENSG00000056291; TAA
NVNDTKHHLY

SEQ ID NO: 53048 - protein, 10 aa, Homo sapiens
  Table A; Target 53048; HLA-A*30:02; NPFFR2; ENSG00000056291; TAA
NVNDTKHHLY

SEQ ID NO: 53049 - protein, 9 aa, Homo sapiens
  Table A; Target 53049; HLA-A*23:01; NPFFR2; ENSG00000056291; TAA
NYYLHQPQV

SEQ ID NO: 53050 - protein, 9 aa, Homo sapiens
  Table A; Target 53050; HLA-A*24:02; NPFFR2; ENSG00000056291; TAA
NYYLHQPQV

SEQ ID NO: 53051 - protein, 9 aa, Homo sapiens
  Table A; Target 53051; HLA-B*51:01; NPFFR2; ENSG00000056291; TAA
NYYLHQPQV

SEQ ID NO: 53052 - protein, 9 aa, Homo sapiens
  Table A; Target 53052; HLA-C*14:02; NPFFR2; ENSG00000056291; TAA
NYYLHQPQV

SEQ ID NO: 53053 - protein, 8 aa, Homo sapiens
  Table A; Target 53053; HLA-C*07:01; NPFFR2; ENSG00000056291; TAA
PHGETLLY

SEQ ID NO: 53054 - protein, 8 aa, Homo sapiens
  Table A; Target 53054; HLA-B*13:02; NPFFR2; ENSG00000056291; TAA
PQVAAIFI

SEQ ID NO: 53055 - protein, 8 aa, Homo sapiens
  Table A; Target 53055; HLA-A*30:01; NPFFR2; ENSG00000056291; TAA
QEAFQLQL

SEQ ID NO: 53056 - protein, 8 aa, Homo sapiens
  Table A; Target 53056; HLA-B*49:01; NPFFR2; ENSG00000056291; TAA
QEAFQLQL

SEQ ID NO: 53057 - protein, 9 aa, Homo sapiens
  Table A; Target 53057; HLA-B*49:01; NPFFR2; ENSG00000056291; TAA
QEAFQLQLC

SEQ ID NO: 53058 - protein, 8 aa, Homo sapiens
  Table A; Target 53058; HLA-A*30:01; NPFFR2; ENSG00000056291; TAA
QELVMEEL

SEQ ID NO: 53059 - protein, 8 aa, Homo sapiens
  Table A; Target 53059; HLA-B*18:01; NPFFR2; ENSG00000056291; TAA
QELVMEEL

SEQ ID NO: 53060 - protein, 8 aa, Homo sapiens
  Table A; Target 53060; HLA-B*40:01; NPFFR2; ENSG00000056291; TAA
QELVMEEL

SEQ ID NO: 53061 - protein, 8 aa, Homo sapiens
  Table A; Target 53061; HLA-B*49:01; NPFFR2; ENSG00000056291; TAA
QELVMEEL

SEQ ID NO: 53062 - protein, 10 aa, Homo sapiens
  Table A; Target 53062; HLA-B*49:01; NPFFR2; ENSG00000056291; TAA
QEMRKIYTTV

SEQ ID NO: 53063 - protein, 9 aa, Homo sapiens
  Table A; Target 53063; HLA-A*31:01; NPFFR2; ENSG00000056291; TAA
QEQWHVVSR

SEQ ID NO: 53064 - protein, 9 aa, Homo sapiens
  Table A; Target 53064; HLA-B*37:01; NPFFR2; ENSG00000056291; TAA
QEQWHVVSR

SEQ ID NO: 53065 - protein, 9 aa, Homo sapiens
  Table A; Target 53065; HLA-A*33:01; NPFFR2; ENSG00000056291; TAA
QNKTSPVYW

SEQ ID NO: 53066 - protein, 9 aa, Homo sapiens
  Table A; Target 53066; HLA-B*57:01; NPFFR2; ENSG00000056291; TAA
QNKTSPVYW

SEQ ID NO: 53067 - protein, 10 aa, Homo sapiens
  Table A; Target 53067; HLA-A*01:01; NPFFR2; ENSG00000056291; TAA
QNPHGETLLY

SEQ ID NO: 53068 - protein, 10 aa, Homo sapiens
  Table A; Target 53068; HLA-A*26:01; NPFFR2; ENSG00000056291; TAA
QNPHGETLLY

SEQ ID NO: 53069 - protein, 10 aa, Homo sapiens
  Table A; Target 53069; HLA-A*29:02; NPFFR2; ENSG00000056291; TAA
QNPHGETLLY

SEQ ID NO: 53070 - protein, 11 aa, Homo sapiens
  Table A; Target 53070; HLA-A*33:01; NPFFR2; ENSG00000056291; TAA
QNPHGETLLYR

SEQ ID NO: 53071 - protein, 11 aa, Homo sapiens
  Table A; Target 53071; HLA-A*33:03; NPFFR2; ENSG00000056291; TAA
QNPHGETLLYR

SEQ ID NO: 53072 - protein, 9 aa, Homo sapiens
  Table A; Target 53072; HLA-B*38:01; NPFFR2; ENSG00000056291; TAA
QQELVMEEL

SEQ ID NO: 53073 - protein, 9 aa, Homo sapiens
  Table A; Target 53073; HLA-B*39:01; NPFFR2; ENSG00000056291; TAA
QQELVMEEL

SEQ ID NO: 53074 - protein, 10 aa, Homo sapiens
  Table A; Target 53074; HLA-A*25:01; NPFFR2; ENSG00000056291; TAA
QVAAIFIISY

SEQ ID NO: 53075 - protein, 10 aa, Homo sapiens
  Table A; Target 53075; HLA-A*26:01; NPFFR2; ENSG00000056291; TAA
QVAAIFIISY

SEQ ID NO: 53076 - protein, 9 aa, Homo sapiens
  Table A; Target 53076; HLA-A*03:01; NPFFR2; ENSG00000056291; TAA
RAAVPHTGR

SEQ ID NO: 53077 - protein, 9 aa, Homo sapiens
  Table A; Target 53077; HLA-A*03:02; NPFFR2; ENSG00000056291; TAA
RAAVPHTGR

SEQ ID NO: 53078 - protein, 9 aa, Homo sapiens
  Table A; Target 53078; HLA-A*31:01; NPFFR2; ENSG00000056291; TAA
RAAVPHTGR

SEQ ID NO: 53079 - protein, 9 aa, Homo sapiens
  Table A; Target 53079; HLA-A*33:01; NPFFR2; ENSG00000056291; TAA
RAAVPHTGR

SEQ ID NO: 53080 - protein, 9 aa, Homo sapiens
  Table A; Target 53080; HLA-A*33:03; NPFFR2; ENSG00000056291; TAA
RAAVPHTGR

SEQ ID NO: 53081 - protein, 9 aa, Homo sapiens
  Table A; Target 53081; HLA-A*68:01; NPFFR2; ENSG00000056291; TAA
RAAVPHTGR

SEQ ID NO: 53082 - protein, 9 aa, Homo sapiens
  Table A; Target 53082; HLA-B*27:05; NPFFR2; ENSG00000056291; TAA
RAAVPHTGR

SEQ ID NO: 53083 - protein, 9 aa, Homo sapiens
  Table A; Target 53083; HLA-B*57:01; NPFFR2; ENSG00000056291; TAA
RAAVPHTGR

SEQ ID NO: 53084 - protein, 9 aa, Homo sapiens
  Table A; Target 53084; HLA-C*07:06; NPFFR2; ENSG00000056291; TAA
RAAVPHTGR

SEQ ID NO: 53085 - protein, 8 aa, Homo sapiens
  Table A; Target 53085; HLA-A*30:02; NPFFR2; ENSG00000056291; TAA
RAKPMEAY

SEQ ID NO: 53086 - protein, 8 aa, Homo sapiens
  Table A; Target 53086; HLA-A*32:01; NPFFR2; ENSG00000056291; TAA
RAKPMEAY

SEQ ID NO: 53087 - protein, 8 aa, Homo sapiens
  Table A; Target 53087; HLA-B*15:01; NPFFR2; ENSG00000056291; TAA
RAKPMEAY

SEQ ID NO: 53088 - protein, 8 aa, Homo sapiens
  Table A; Target 53088; HLA-B*46:01; NPFFR2; ENSG00000056291; TAA
RAKPMEAY

SEQ ID NO: 53089 - protein, 11 aa, Homo sapiens
  Table A; Target 53089; HLA-A*03:01; NPFFR2; ENSG00000056291; TAA
RAKPMEAYALK

SEQ ID NO: 53090 - protein, 11 aa, Homo sapiens
  Table A; Target 53090; HLA-A*31:01; NPFFR2; ENSG00000056291; TAA
RAKPMEAYALK

SEQ ID NO: 53091 - protein, 8 aa, Homo sapiens
  Table A; Target 53091; HLA-A*31:01; NPFFR2; ENSG00000056291; TAA
RALSVQQR

SEQ ID NO: 53092 - protein, 9 aa, Homo sapiens
  Table A; Target 53092; HLA-B*37:01; NPFFR2; ENSG00000056291; TAA
REDWPNQEM

SEQ ID NO: 53093 - protein, 9 aa, Homo sapiens
  Table A; Target 53093; HLA-B*40:01; NPFFR2; ENSG00000056291; TAA
REDWPNQEM

SEQ ID NO: 53094 - protein, 10 aa, Homo sapiens
  Table A; Target 53094; HLA-A*03:01; NPFFR2; ENSG00000056291; TAA
RLGLSRQTAK

SEQ ID NO: 53095 - protein, 8 aa, Homo sapiens
  Table A; Target 53095; HLA-A*32:01; NPFFR2; ENSG00000056291; TAA
RQTAKSSW

SEQ ID NO: 53096 - protein, 9 aa, Homo sapiens
  Table A; Target 53096; HLA-B*27:05; NPFFR2; ENSG00000056291; TAA
RRALSVQQR

SEQ ID NO: 53097 - protein, 9 aa, Homo sapiens
  Table A; Target 53097; HLA-A*03:01; NPFFR2; ENSG00000056291; TAA
RVRLNSQNK

SEQ ID NO: 53098 - protein, 9 aa, Homo sapiens
  Table A; Target 53098; HLA-B*07:02; NPFFR2; ENSG00000056291; TAA
SAEKPQQEL

SEQ ID NO: 53099 - protein, 9 aa, Homo sapiens
  Table A; Target 53099; HLA-B*35:03; NPFFR2; ENSG00000056291; TAA
SAEKPQQEL

SEQ ID NO: 53100 - protein, 9 aa, Homo sapiens
  Table A; Target 53100; HLA-B*40:01; NPFFR2; ENSG00000056291; TAA
SAEKPQQEL

SEQ ID NO: 53101 - protein, 9 aa, Homo sapiens
  Table A; Target 53101; HLA-B*58:01; NPFFR2; ENSG00000056291; TAA
SAEKPQQEL

SEQ ID NO: 53102 - protein, 9 aa, Homo sapiens
  Table A; Target 53102; HLA-C*01:02; NPFFR2; ENSG00000056291; TAA
SAEKPQQEL

SEQ ID NO: 53103 - protein, 9 aa, Homo sapiens
  Table A; Target 53103; HLA-C*03:03; NPFFR2; ENSG00000056291; TAA
SAEKPQQEL

SEQ ID NO: 53104 - protein, 9 aa, Homo sapiens
  Table A; Target 53104; HLA-C*03:04; NPFFR2; ENSG00000056291; TAA
SAEKPQQEL

SEQ ID NO: 53105 - protein, 9 aa, Homo sapiens
  Table A; Target 53105; HLA-C*05:01; NPFFR2; ENSG00000056291; TAA
SAEKPQQEL

SEQ ID NO: 53106 - protein, 9 aa, Homo sapiens
  Table A; Target 53106; HLA-C*07:06; NPFFR2; ENSG00000056291; TAA
SAEKPQQEL

SEQ ID NO: 53107 - protein, 10 aa, Homo sapiens
  Table A; Target 53107; HLA-C*05:01; NPFFR2; ENSG00000056291; TAA
SAEKPQQELV

SEQ ID NO: 53108 - protein, 11 aa, Homo sapiens
  Table A; Target 53108; HLA-C*05:01; NPFFR2; ENSG00000056291; TAA
SAEKPQQELVM

SEQ ID NO: 53109 - protein, 8 aa, Homo sapiens
  Table A; Target 53109; HLA-A*30:01; NPFFR2; ENSG00000056291; TAA
SDINITYV

SEQ ID NO: 53110 - protein, 8 aa, Homo sapiens
  Table A; Target 53110; HLA-B*37:01; NPFFR2; ENSG00000056291; TAA
SDINITYV

SEQ ID NO: 53111 - protein, 8 aa, Homo sapiens
  Table A; Target 53111; HLA-B*49:01; NPFFR2; ENSG00000056291; TAA
SDINITYV

SEQ ID NO: 53112 - protein, 10 aa, Homo sapiens
  Table A; Target 53112; HLA-A*25:01; NPFFR2; ENSG00000056291; TAA
SDINITYVNY

SEQ ID NO: 53113 - protein, 10 aa, Homo sapiens
  Table A; Target 53113; HLA-A*26:01; NPFFR2; ENSG00000056291; TAA
SDINITYVNY

SEQ ID NO: 53114 - protein, 10 aa, Homo sapiens
  Table A; Target 53114; HLA-B*44:02; NPFFR2; ENSG00000056291; TAA
SDINITYVNY

SEQ ID NO: 53115 - protein, 10 aa, Homo sapiens
  Table A; Target 53115; HLA-B*44:03; NPFFR2; ENSG00000056291; TAA
SDINITYVNY

SEQ ID NO: 53116 - protein, 8 aa, Homo sapiens
  Table A; Target 53116; HLA-B*37:01; NPFFR2; ENSG00000056291; TAA
SDLLVGIF

SEQ ID NO: 53117 - protein, 11 aa, Homo sapiens
  Table A; Target 53117; HLA-A*30:01; NPFFR2; ENSG00000056291; TAA
SDYADLSPNEL

SEQ ID NO: 53118 - protein, 11 aa, Homo sapiens
  Table A; Target 53118; HLA-B*40:02; NPFFR2; ENSG00000056291; TAA
SDYADLSPNEL

SEQ ID NO: 53119 - protein, 8 aa, Homo sapiens
  Table A; Target 53119; HLA-C*14:02; NPFFR2; ENSG00000056291; TAA
SFFGTPAA

SEQ ID NO: 53120 - protein, 10 aa, Homo sapiens
  Table A; Target 53120; HLA-A*23:01; NPFFR2; ENSG00000056291; TAA
SFFGTPAASW

SEQ ID NO: 53121 - protein, 10 aa, Homo sapiens
  Table A; Target 53121; HLA-A*24:02; NPFFR2; ENSG00000056291; TAA
SFFGTPAASW

SEQ ID NO: 53122 - protein, 10 aa, Homo sapiens
  Table A; Target 53122; HLA-A*25:01; NPFFR2; ENSG00000056291; TAA
SFFGTPAASW

SEQ ID NO: 53123 - protein, 10 aa, Homo sapiens
  Table A; Target 53123; HLA-A*29:02; NPFFR2; ENSG00000056291; TAA
SFFGTPAASW

SEQ ID NO: 53124 - protein, 10 aa, Homo sapiens
  Table A; Target 53124; HLA-A*30:02; NPFFR2; ENSG00000056291; TAA
SFFGTPAASW

SEQ ID NO: 53125 - protein, 9 aa, Homo sapiens
  Table A; Target 53125; HLA-A*02:01; NPFFR2; ENSG00000056291; TAA
SGLVQGISV

SEQ ID NO: 53126 - protein, 9 aa, Homo sapiens
  Table A; Target 53126; HLA-B*13:02; NPFFR2; ENSG00000056291; TAA
SGLVQGISV

SEQ ID NO: 53127 - protein, 9 aa, Homo sapiens
  Table A; Target 53127; HLA-B*46:01; NPFFR2; ENSG00000056291; TAA
SGLVQGISV

SEQ ID NO: 53128 - protein, 9 aa, Homo sapiens
  Table A; Target 53128; HLA-B*51:01; NPFFR2; ENSG00000056291; TAA
SGLVQGISV

SEQ ID NO: 53129 - protein, 9 aa, Homo sapiens
  Table A; Target 53129; HLA-C*01:02; NPFFR2; ENSG00000056291; TAA
SGLVQGISV

SEQ ID NO: 53130 - protein, 9 aa, Homo sapiens
  Table A; Target 53130; HLA-C*03:03; NPFFR2; ENSG00000056291; TAA
SGLVQGISV

SEQ ID NO: 53131 - protein, 9 aa, Homo sapiens
  Table A; Target 53131; HLA-C*03:04; NPFFR2; ENSG00000056291; TAA
SGLVQGISV

SEQ ID NO: 53132 - protein, 9 aa, Homo sapiens
  Table A; Target 53132; HLA-C*14:02; NPFFR2; ENSG00000056291; TAA
SGLVQGISV

SEQ ID NO: 53133 - protein, 11 aa, Homo sapiens
  Table A; Target 53133; HLA-B*38:01; NPFFR2; ENSG00000056291; TAA
SHVLINTSNQL

SEQ ID NO: 53134 - protein, 11 aa, Homo sapiens
  Table A; Target 53134; HLA-B*39:01; NPFFR2; ENSG00000056291; TAA
SHVLINTSNQL

SEQ ID NO: 53135 - protein, 8 aa, Homo sapiens
  Table A; Target 53135; HLA-B*56:01; NPFFR2; ENSG00000056291; TAA
SPNELQII

SEQ ID NO: 53136 - protein, 10 aa, Homo sapiens
  Table A; Target 53136; HLA-B*56:01; NPFFR2; ENSG00000056291; TAA
SPNELQIINI

SEQ ID NO: 53137 - protein, 11 aa, Homo sapiens
  Table A; Target 53137; HLA-B*35:01; NPFFR2; ENSG00000056291; TAA
SPNELQIINIY

SEQ ID NO: 53138 - protein, 9 aa, Homo sapiens
  Table A; Target 53138; HLA-A*68:02; NPFFR2; ENSG00000056291; TAA
SPSAVMLHV

SEQ ID NO: 53139 - protein, 9 aa, Homo sapiens
  Table A; Target 53139; HLA-B*07:02; NPFFR2; ENSG00000056291; TAA
SPSAVMLHV

SEQ ID NO: 53140 - protein, 9 aa, Homo sapiens
  Table A; Target 53140; HLA-B*13:02; NPFFR2; ENSG00000056291; TAA
SPSAVMLHV

SEQ ID NO: 53141 - protein, 9 aa, Homo sapiens
  Table A; Target 53141; HLA-B*35:03; NPFFR2; ENSG00000056291; TAA
SPSAVMLHV

SEQ ID NO: 53142 - protein, 9 aa, Homo sapiens
  Table A; Target 53142; HLA-B*51:01; NPFFR2; ENSG00000056291; TAA
SPSAVMLHV

SEQ ID NO: 53143 - protein, 9 aa, Homo sapiens
  Table A; Target 53143; HLA-B*54:01; NPFFR2; ENSG00000056291; TAA
SPSAVMLHV

SEQ ID NO: 53144 - protein, 9 aa, Homo sapiens
  Table A; Target 53144; HLA-B*55:01; NPFFR2; ENSG00000056291; TAA
SPSAVMLHV

SEQ ID NO: 53145 - protein, 9 aa, Homo sapiens
  Table A; Target 53145; HLA-B*56:01; NPFFR2; ENSG00000056291; TAA
SPSAVMLHV

SEQ ID NO: 53146 - protein, 9 aa, Homo sapiens
  Table A; Target 53146; HLA-C*07:02; NPFFR2; ENSG00000056291; TAA
SPSAVMLHV

SEQ ID NO: 53147 - protein, 9 aa, Homo sapiens
  Table A; Target 53147; HLA-C*16:02; NPFFR2; ENSG00000056291; TAA
SPSAVMLHV

SEQ ID NO: 53148 - protein, 9 aa, Homo sapiens
  Table A; Target 53148; HLA-A*26:01; NPFFR2; ENSG00000056291; TAA
SQNKTSPVY

SEQ ID NO: 53149 - protein, 9 aa, Homo sapiens
  Table A; Target 53149; HLA-A*30:02; NPFFR2; ENSG00000056291; TAA
SQNKTSPVY

SEQ ID NO: 53150 - protein, 9 aa, Homo sapiens
  Table A; Target 53150; HLA-A*32:01; NPFFR2; ENSG00000056291; TAA
SQNKTSPVY

SEQ ID NO: 53151 - protein, 9 aa, Homo sapiens
  Table A; Target 53151; HLA-B*15:01; NPFFR2; ENSG00000056291; TAA
SQNKTSPVY

SEQ ID NO: 53152 - protein, 9 aa, Homo sapiens
  Table A; Target 53152; HLA-B*15:03; NPFFR2; ENSG00000056291; TAA
SQNKTSPVY

SEQ ID NO: 53153 - protein, 9 aa, Homo sapiens
  Table A; Target 53153; HLA-B*18:01; NPFFR2; ENSG00000056291; TAA
SQNKTSPVY

SEQ ID NO: 53154 - protein, 9 aa, Homo sapiens
  Table A; Target 53154; HLA-B*44:03; NPFFR2; ENSG00000056291; TAA
SQNKTSPVY

SEQ ID NO: 53155 - protein, 9 aa, Homo sapiens
  Table A; Target 53155; HLA-B*46:01; NPFFR2; ENSG00000056291; TAA
SQNKTSPVY

SEQ ID NO: 53156 - protein, 9 aa, Homo sapiens
  Table A; Target 53156; HLA-C*02:02; NPFFR2; ENSG00000056291; TAA
SQNKTSPVY

SEQ ID NO: 53157 - protein, 9 aa, Homo sapiens
  Table A; Target 53157; HLA-C*07:04; NPFFR2; ENSG00000056291; TAA
SQNKTSPVY

SEQ ID NO: 53158 - protein, 9 aa, Homo sapiens
  Table A; Target 53158; HLA-C*14:02; NPFFR2; ENSG00000056291; TAA
SQNKTSPVY

SEQ ID NO: 53159 - protein, 9 aa, Homo sapiens
  Table A; Target 53159; HLA-C*16:01; NPFFR2; ENSG00000056291; TAA
SQNKTSPVY

SEQ ID NO: 53160 - protein, 9 aa, Homo sapiens
  Table A; Target 53160; HLA-C*16:04; NPFFR2; ENSG00000056291; TAA
SQNKTSPVY

SEQ ID NO: 53161 - protein, 10 aa, Homo sapiens
  Table A; Target 53161; HLA-A*32:01; NPFFR2; ENSG00000056291; TAA
SQNKTSPVYW

SEQ ID NO: 53162 - protein, 10 aa, Homo sapiens
  Table A; Target 53162; HLA-B*27:02; NPFFR2; ENSG00000056291; TAA
SQNKTSPVYW

SEQ ID NO: 53163 - protein, 10 aa, Homo sapiens
  Table A; Target 53163; HLA-B*44:02; NPFFR2; ENSG00000056291; TAA
SQNKTSPVYW

SEQ ID NO: 53164 - protein, 10 aa, Homo sapiens
  Table A; Target 53164; HLA-B*44:03; NPFFR2; ENSG00000056291; TAA
SQNKTSPVYW

SEQ ID NO: 53165 - protein, 10 aa, Homo sapiens
  Table A; Target 53165; HLA-B*57:01; NPFFR2; ENSG00000056291; TAA
SQNKTSPVYW

SEQ ID NO: 53166 - protein, 10 aa, Homo sapiens
  Table A; Target 53166; HLA-B*58:01; NPFFR2; ENSG00000056291; TAA
SQNKTSPVYW

SEQ ID NO: 53167 - protein, 9 aa, Homo sapiens
  Table A; Target 53167; HLA-A*32:01; NPFFR2; ENSG00000056291; TAA
SRQTAKSSW

SEQ ID NO: 53168 - protein, 9 aa, Homo sapiens
  Table A; Target 53168; HLA-B*27:02; NPFFR2; ENSG00000056291; TAA
SRQTAKSSW

SEQ ID NO: 53169 - protein, 9 aa, Homo sapiens
  Table A; Target 53169; HLA-B*27:05; NPFFR2; ENSG00000056291; TAA
SRQTAKSSW

SEQ ID NO: 53170 - protein, 9 aa, Homo sapiens
  Table A; Target 53170; HLA-C*16:04; NPFFR2; ENSG00000056291; TAA
SRQTAKSSW

SEQ ID NO: 53171 - protein, 9 aa, Homo sapiens
  Table A; Target 53171; HLA-B*57:01; NPFFR2; ENSG00000056291; TAA
SSENWHPIW

SEQ ID NO: 53172 - protein, 8 aa, Homo sapiens
  Table A; Target 53172; HLA-A*30:02; NPFFR2; ENSG00000056291; TAA
SSVNPIIY

SEQ ID NO: 53173 - protein, 8 aa, Homo sapiens
  Table A; Target 53173; HLA-C*16:01; NPFFR2; ENSG00000056291; TAA
SSVNPIIY

SEQ ID NO: 53174 - protein, 10 aa, Homo sapiens
  Table A; Target 53174; HLA-B*57:01; NPFFR2; ENSG00000056291; TAA
SSVNPIIYGF

SEQ ID NO: 53175 - protein, 11 aa, Homo sapiens
  Table A; Target 53175; HLA-A*68:02; NPFFR2; ENSG00000056291; TAA
STFQNPHGETL

SEQ ID NO: 53176 - protein, 9 aa, Homo sapiens
  Table A; Target 53176; HLA-A*02:01; NPFFR2; ENSG00000056291; TAA
SVAASVFTL

SEQ ID NO: 53177 - protein, 9 aa, Homo sapiens
  Table A; Target 53177; HLA-A*02:03; NPFFR2; ENSG00000056291; TAA
SVAASVFTL

SEQ ID NO: 53178 - protein, 9 aa, Homo sapiens
  Table A; Target 53178; HLA-A*02:04; NPFFR2; ENSG00000056291; TAA
SVAASVFTL

SEQ ID NO: 53179 - protein, 9 aa, Homo sapiens
  Table A; Target 53179; HLA-A*02:07; NPFFR2; ENSG00000056291; TAA
SVAASVFTL

SEQ ID NO: 53180 - protein, 9 aa, Homo sapiens
  Table A; Target 53180; HLA-A*03:01; NPFFR2; ENSG00000056291; TAA
SVAASVFTL

SEQ ID NO: 53181 - protein, 9 aa, Homo sapiens
  Table A; Target 53181; HLA-A*03:02; NPFFR2; ENSG00000056291; TAA
SVAASVFTL

SEQ ID NO: 53182 - protein, 9 aa, Homo sapiens
  Table A; Target 53182; HLA-A*11:01; NPFFR2; ENSG00000056291; TAA
SVAASVFTL

SEQ ID NO: 53183 - protein, 9 aa, Homo sapiens
  Table A; Target 53183; HLA-A*25:01; NPFFR2; ENSG00000056291; TAA
SVAASVFTL

SEQ ID NO: 53184 - protein, 9 aa, Homo sapiens
  Table A; Target 53184; HLA-A*26:01; NPFFR2; ENSG00000056291; TAA
SVAASVFTL

SEQ ID NO: 53185 - protein, 9 aa, Homo sapiens
  Table A; Target 53185; HLA-A*30:01; NPFFR2; ENSG00000056291; TAA
SVAASVFTL

SEQ ID NO: 53186 - protein, 9 aa, Homo sapiens
  Table A; Target 53186; HLA-A*30:02; NPFFR2; ENSG00000056291; TAA
SVAASVFTL

SEQ ID NO: 53187 - protein, 9 aa, Homo sapiens
  Table A; Target 53187; HLA-A*32:01; NPFFR2; ENSG00000056291; TAA
SVAASVFTL

SEQ ID NO: 53188 - protein, 9 aa, Homo sapiens
  Table A; Target 53188; HLA-A*68:01; NPFFR2; ENSG00000056291; TAA
SVAASVFTL

SEQ ID NO: 53189 - protein, 9 aa, Homo sapiens
  Table A; Target 53189; HLA-A*68:02; NPFFR2; ENSG00000056291; TAA
SVAASVFTL

SEQ ID NO: 53190 - protein, 9 aa, Homo sapiens
  Table A; Target 53190; HLA-B*07:02; NPFFR2; ENSG00000056291; TAA
SVAASVFTL

SEQ ID NO: 53191 - protein, 9 aa, Homo sapiens
  Table A; Target 53191; HLA-B*13:02; NPFFR2; ENSG00000056291; TAA
SVAASVFTL

SEQ ID NO: 53192 - protein, 9 aa, Homo sapiens
  Table A; Target 53192; HLA-B*15:01; NPFFR2; ENSG00000056291; TAA
SVAASVFTL

SEQ ID NO: 53193 - protein, 9 aa, Homo sapiens
  Table A; Target 53193; HLA-B*27:05; NPFFR2; ENSG00000056291; TAA
SVAASVFTL

SEQ ID NO: 53194 - protein, 9 aa, Homo sapiens
  Table A; Target 53194; HLA-B*35:01; NPFFR2; ENSG00000056291; TAA
SVAASVFTL

SEQ ID NO: 53195 - protein, 9 aa, Homo sapiens
  Table A; Target 53195; HLA-B*35:03; NPFFR2; ENSG00000056291; TAA
SVAASVFTL

SEQ ID NO: 53196 - protein, 9 aa, Homo sapiens
  Table A; Target 53196; HLA-B*38:01; NPFFR2; ENSG00000056291; TAA
SVAASVFTL

SEQ ID NO: 53197 - protein, 9 aa, Homo sapiens
  Table A; Target 53197; HLA-B*39:01; NPFFR2; ENSG00000056291; TAA
SVAASVFTL

SEQ ID NO: 53198 - protein, 9 aa, Homo sapiens
  Table A; Target 53198; HLA-B*58:01; NPFFR2; ENSG00000056291; TAA
SVAASVFTL

SEQ ID NO: 53199 - protein, 9 aa, Homo sapiens
  Table A; Target 53199; HLA-C*01:02; NPFFR2; ENSG00000056291; TAA
SVAASVFTL

SEQ ID NO: 53200 - protein, 9 aa, Homo sapiens
  Table A; Target 53200; HLA-C*02:02; NPFFR2; ENSG00000056291; TAA
SVAASVFTL

SEQ ID NO: 53201 - protein, 9 aa, Homo sapiens
  Table A; Target 53201; HLA-C*03:03; NPFFR2; ENSG00000056291; TAA
SVAASVFTL

SEQ ID NO: 53202 - protein, 9 aa, Homo sapiens
  Table A; Target 53202; HLA-C*03:04; NPFFR2; ENSG00000056291; TAA
SVAASVFTL

SEQ ID NO: 53203 - protein, 9 aa, Homo sapiens
  Table A; Target 53203; HLA-C*07:04; NPFFR2; ENSG00000056291; TAA
SVAASVFTL

SEQ ID NO: 53204 - protein, 9 aa, Homo sapiens
  Table A; Target 53204; HLA-C*07:06; NPFFR2; ENSG00000056291; TAA
SVAASVFTL

SEQ ID NO: 53205 - protein, 9 aa, Homo sapiens
  Table A; Target 53205; HLA-C*12:03; NPFFR2; ENSG00000056291; TAA
SVAASVFTL

SEQ ID NO: 53206 - protein, 9 aa, Homo sapiens
  Table A; Target 53206; HLA-C*14:02; NPFFR2; ENSG00000056291; TAA
SVAASVFTL

SEQ ID NO: 53207 - protein, 9 aa, Homo sapiens
  Table A; Target 53207; HLA-C*16:02; NPFFR2; ENSG00000056291; TAA
SVAASVFTL

SEQ ID NO: 53208 - protein, 10 aa, Homo sapiens
  Table A; Target 53208; HLA-A*02:01; NPFFR2; ENSG00000056291; TAA
SVAASVFTLV

SEQ ID NO: 53209 - protein, 10 aa, Homo sapiens
  Table A; Target 53209; HLA-A*02:03; NPFFR2; ENSG00000056291; TAA
SVAASVFTLV

SEQ ID NO: 53210 - protein, 10 aa, Homo sapiens
  Table A; Target 53210; HLA-A*25:01; NPFFR2; ENSG00000056291; TAA
SVAASVFTLV

SEQ ID NO: 53211 - protein, 10 aa, Homo sapiens
  Table A; Target 53211; HLA-A*26:01; NPFFR2; ENSG00000056291; TAA
SVAASVFTLV

SEQ ID NO: 53212 - protein, 10 aa, Homo sapiens
  Table A; Target 53212; HLA-A*68:02; NPFFR2; ENSG00000056291; TAA
SVAASVFTLV

SEQ ID NO: 53213 - protein, 8 aa, Homo sapiens
  Table A; Target 53213; HLA-B*13:02; NPFFR2; ENSG00000056291; TAA
SVFTLVAI

SEQ ID NO: 53214 - protein, 9 aa, Homo sapiens
  Table A; Target 53214; HLA-B*56:01; NPFFR2; ENSG00000056291; TAA
SVFTLVAIA

SEQ ID NO: 53215 - protein, 10 aa, Homo sapiens
  Table A; Target 53215; HLA-A*68:02; NPFFR2; ENSG00000056291; TAA
SVFTLVAIAV

SEQ ID NO: 53216 - protein, 9 aa, Homo sapiens
  Table A; Target 53216; HLA-A*02:04; NPFFR2; ENSG00000056291; TAA
SVNPIIYGF

SEQ ID NO: 53217 - protein, 9 aa, Homo sapiens
  Table A; Target 53217; HLA-A*02:07; NPFFR2; ENSG00000056291; TAA
SVNPIIYGF

SEQ ID NO: 53218 - protein, 9 aa, Homo sapiens
  Table A; Target 53218; HLA-A*03:01; NPFFR2; ENSG00000056291; TAA
SVNPIIYGF

SEQ ID NO: 53219 - protein, 9 aa, Homo sapiens
  Table A; Target 53219; HLA-A*03:02; NPFFR2; ENSG00000056291; TAA
SVNPIIYGF

SEQ ID NO: 53220 - protein, 9 aa, Homo sapiens
  Table A; Target 53220; HLA-A*11:01; NPFFR2; ENSG00000056291; TAA
SVNPIIYGF

SEQ ID NO: 53221 - protein, 9 aa, Homo sapiens
  Table A; Target 53221; HLA-A*23:01; NPFFR2; ENSG00000056291; TAA
SVNPIIYGF

SEQ ID NO: 53222 - protein, 9 aa, Homo sapiens
  Table A; Target 53222; HLA-A*24:02; NPFFR2; ENSG00000056291; TAA
SVNPIIYGF

SEQ ID NO: 53223 - protein, 9 aa, Homo sapiens
  Table A; Target 53223; HLA-A*25:01; NPFFR2; ENSG00000056291; TAA
SVNPIIYGF

SEQ ID NO: 53224 - protein, 9 aa, Homo sapiens
  Table A; Target 53224; HLA-A*26:01; NPFFR2; ENSG00000056291; TAA
SVNPIIYGF

SEQ ID NO: 53225 - protein, 9 aa, Homo sapiens
  Table A; Target 53225; HLA-A*29:02; NPFFR2; ENSG00000056291; TAA
SVNPIIYGF

SEQ ID NO: 53226 - protein, 9 aa, Homo sapiens
  Table A; Target 53226; HLA-A*30:02; NPFFR2; ENSG00000056291; TAA
SVNPIIYGF

SEQ ID NO: 53227 - protein, 9 aa, Homo sapiens
  Table A; Target 53227; HLA-A*31:01; NPFFR2; ENSG00000056291; TAA
SVNPIIYGF

SEQ ID NO: 53228 - protein, 9 aa, Homo sapiens
  Table A; Target 53228; HLA-A*32:01; NPFFR2; ENSG00000056291; TAA
SVNPIIYGF

SEQ ID NO: 53229 - protein, 9 aa, Homo sapiens
  Table A; Target 53229; HLA-A*33:01; NPFFR2; ENSG00000056291; TAA
SVNPIIYGF

SEQ ID NO: 53230 - protein, 9 aa, Homo sapiens
  Table A; Target 53230; HLA-A*33:03; NPFFR2; ENSG00000056291; TAA
SVNPIIYGF

SEQ ID NO: 53231 - protein, 9 aa, Homo sapiens
  Table A; Target 53231; HLA-A*68:01; NPFFR2; ENSG00000056291; TAA
SVNPIIYGF

SEQ ID NO: 53232 - protein, 9 aa, Homo sapiens
  Table A; Target 53232; HLA-A*68:02; NPFFR2; ENSG00000056291; TAA
SVNPIIYGF

SEQ ID NO: 53233 - protein, 9 aa, Homo sapiens
  Table A; Target 53233; HLA-B*13:02; NPFFR2; ENSG00000056291; TAA
SVNPIIYGF

SEQ ID NO: 53234 - protein, 9 aa, Homo sapiens
  Table A; Target 53234; HLA-B*15:01; NPFFR2; ENSG00000056291; TAA
SVNPIIYGF

SEQ ID NO: 53235 - protein, 9 aa, Homo sapiens
  Table A; Target 53235; HLA-B*27:02; NPFFR2; ENSG00000056291; TAA
SVNPIIYGF

SEQ ID NO: 53236 - protein, 9 aa, Homo sapiens
  Table A; Target 53236; HLA-B*27:05; NPFFR2; ENSG00000056291; TAA
SVNPIIYGF

SEQ ID NO: 53237 - protein, 9 aa, Homo sapiens
  Table A; Target 53237; HLA-B*35:01; NPFFR2; ENSG00000056291; TAA
SVNPIIYGF

SEQ ID NO: 53238 - protein, 9 aa, Homo sapiens
  Table A; Target 53238; HLA-B*44:02; NPFFR2; ENSG00000056291; TAA
SVNPIIYGF

SEQ ID NO: 53239 - protein, 9 aa, Homo sapiens
  Table A; Target 53239; HLA-B*44:03; NPFFR2; ENSG00000056291; TAA
SVNPIIYGF

SEQ ID NO: 53240 - protein, 9 aa, Homo sapiens
  Table A; Target 53240; HLA-B*57:01; NPFFR2; ENSG00000056291; TAA
SVNPIIYGF

SEQ ID NO: 53241 - protein, 9 aa, Homo sapiens
  Table A; Target 53241; HLA-B*58:01; NPFFR2; ENSG00000056291; TAA
SVNPIIYGF

SEQ ID NO: 53242 - protein, 9 aa, Homo sapiens
  Table A; Target 53242; HLA-C*02:02; NPFFR2; ENSG00000056291; TAA
SVNPIIYGF

SEQ ID NO: 53243 - protein, 9 aa, Homo sapiens
  Table A; Target 53243; HLA-C*07:06; NPFFR2; ENSG00000056291; TAA
SVNPIIYGF

SEQ ID NO: 53244 - protein, 9 aa, Homo sapiens
  Table A; Target 53244; HLA-C*16:04; NPFFR2; ENSG00000056291; TAA
SVNPIIYGF

SEQ ID NO: 53245 - protein, 10 aa, Homo sapiens
  Table A; Target 53245; HLA-A*25:01; NPFFR2; ENSG00000056291; TAA
SVNPIIYGFF

SEQ ID NO: 53246 - protein, 10 aa, Homo sapiens
  Table A; Target 53246; HLA-A*29:02; NPFFR2; ENSG00000056291; TAA
SVNPIIYGFF

SEQ ID NO: 53247 - protein, 10 aa, Homo sapiens
  Table A; Target 53247; HLA-A*25:01; NPFFR2; ENSG00000056291; TAA
SVQQRGGPAW

SEQ ID NO: 53248 - protein, 10 aa, Homo sapiens
  Table A; Target 53248; HLA-A*32:01; NPFFR2; ENSG00000056291; TAA
SVQQRGGPAW

SEQ ID NO: 53249 - protein, 8 aa, Homo sapiens
  Table A; Target 53249; HLA-B*51:01; NPFFR2; ENSG00000056291; TAA
TAFVIIMI

SEQ ID NO: 53250 - protein, 9 aa, Homo sapiens
  Table A; Target 53250; HLA-B*51:01; NPFFR2; ENSG00000056291; TAA
TAFVIIMII

SEQ ID NO: 53251 - protein, 9 aa, Homo sapiens
  Table A; Target 53251; HLA-C*12:03; NPFFR2; ENSG00000056291; TAA
TAFVIIMII

SEQ ID NO: 53252 - protein, 8 aa, Homo sapiens
  Table A; Target 53252; HLA-A*31:01; NPFFR2; ENSG00000056291; TAA
TAKSSWSR

SEQ ID NO: 53253 - protein, 8 aa, Homo sapiens
  Table A; Target 53253; HLA-A*33:03; NPFFR2; ENSG00000056291; TAA
TAKSSWSR

SEQ ID NO: 53254 - protein, 10 aa, Homo sapiens
  Table A; Target 53254; HLA-A*23:01; NPFFR2; ENSG00000056291; TAA
TFQNPHGETL

SEQ ID NO: 53255 - protein, 10 aa, Homo sapiens
  Table A; Target 53255; HLA-C*04:01; NPFFR2; ENSG00000056291; TAA
TFQNPHGETL

SEQ ID NO: 53256 - protein, 10 aa, Homo sapiens
  Table A; Target 53256; HLA-C*14:02; NPFFR2; ENSG00000056291; TAA
TFQNPHGETL

SEQ ID NO: 53257 - protein, 8 aa, Homo sapiens
  Table A; Target 53257; HLA-B*08:01; NPFFR2; ENSG00000056291; TAA
TIKTAFVI

SEQ ID NO: 53258 - protein, 9 aa, Homo sapiens
  Table A; Target 53258; HLA-A*23:01; NPFFR2; ENSG00000056291; TAA
TIMSPSAVM

SEQ ID NO: 53259 - protein, 9 aa, Homo sapiens
  Table A; Target 53259; HLA-A*26:01; NPFFR2; ENSG00000056291; TAA
TIMSPSAVM

SEQ ID NO: 53260 - protein, 9 aa, Homo sapiens
  Table A; Target 53260; HLA-A*32:01; NPFFR2; ENSG00000056291; TAA
TIMSPSAVM

SEQ ID NO: 53261 - protein, 9 aa, Homo sapiens
  Table A; Target 53261; HLA-B*07:02; NPFFR2; ENSG00000056291; TAA
TIMSPSAVM

SEQ ID NO: 53262 - protein, 9 aa, Homo sapiens
  Table A; Target 53262; HLA-B*15:01; NPFFR2; ENSG00000056291; TAA
TIMSPSAVM

SEQ ID NO: 53263 - protein, 9 aa, Homo sapiens
  Table A; Target 53263; HLA-B*15:03; NPFFR2; ENSG00000056291; TAA
TIMSPSAVM

SEQ ID NO: 53264 - protein, 9 aa, Homo sapiens
  Table A; Target 53264; HLA-B*35:01; NPFFR2; ENSG00000056291; TAA
TIMSPSAVM

SEQ ID NO: 53265 - protein, 9 aa, Homo sapiens
  Table A; Target 53265; HLA-B*35:03; NPFFR2; ENSG00000056291; TAA
TIMSPSAVM

SEQ ID NO: 53266 - protein, 9 aa, Homo sapiens
  Table A; Target 53266; HLA-B*39:01; NPFFR2; ENSG00000056291; TAA
TIMSPSAVM

SEQ ID NO: 53267 - protein, 9 aa, Homo sapiens
  Table A; Target 53267; HLA-B*46:01; NPFFR2; ENSG00000056291; TAA
TIMSPSAVM

SEQ ID NO: 53268 - protein, 9 aa, Homo sapiens
  Table A; Target 53268; HLA-C*01:02; NPFFR2; ENSG00000056291; TAA
TIMSPSAVM

SEQ ID NO: 53269 - protein, 9 aa, Homo sapiens
  Table A; Target 53269; HLA-C*03:03; NPFFR2; ENSG00000056291; TAA
TIMSPSAVM

SEQ ID NO: 53270 - protein, 9 aa, Homo sapiens
  Table A; Target 53270; HLA-C*03:04; NPFFR2; ENSG00000056291; TAA
TIMSPSAVM

SEQ ID NO: 53271 - protein, 9 aa, Homo sapiens
  Table A; Target 53271; HLA-C*07:02; NPFFR2; ENSG00000056291; TAA
TIMSPSAVM

SEQ ID NO: 53272 - protein, 9 aa, Homo sapiens
  Table A; Target 53272; HLA-C*07:04; NPFFR2; ENSG00000056291; TAA
TIMSPSAVM

SEQ ID NO: 53273 - protein, 9 aa, Homo sapiens
  Table A; Target 53273; HLA-C*14:02; NPFFR2; ENSG00000056291; TAA
TIMSPSAVM

SEQ ID NO: 53274 - protein, 10 aa, Homo sapiens
  Table A; Target 53274; HLA-C*01:02; NPFFR2; ENSG00000056291; TAA
TIMSPSAVML

SEQ ID NO: 53275 - protein, 11 aa, Homo sapiens
  Table A; Target 53275; HLA-A*03:02; NPFFR2; ENSG00000056291; TAA
TIMSPSAVMLH

SEQ ID NO: 53276 - protein, 10 aa, Homo sapiens
  Table A; Target 53276; HLA-A*25:01; NPFFR2; ENSG00000056291; TAA
TLLDNIIAGW

SEQ ID NO: 53277 - protein, 9 aa, Homo sapiens
  Table A; Target 53277; HLA-A*68:01; NPFFR2; ENSG00000056291; TAA
TLVAIAVDR

SEQ ID NO: 53278 - protein, 9 aa, Homo sapiens
  Table A; Target 53278; HLA-B*27:02; NPFFR2; ENSG00000056291; TAA
TLVAIAVDR

SEQ ID NO: 53279 - protein, 9 aa, Homo sapiens
  Table A; Target 53279; HLA-C*07:06; NPFFR2; ENSG00000056291; TAA
TLVAIAVDR

SEQ ID NO: 53280 - protein, 9 aa, Homo sapiens
  Table A; Target 53280; HLA-B*07:02; NPFFR2; ENSG00000056291; TAA
TPAASWCLL

SEQ ID NO: 53281 - protein, 11 aa, Homo sapiens
  Table A; Target 53281; HLA-B*58:01; NPFFR2; ENSG00000056291; TAA
TSNQLVQESTF

SEQ ID NO: 53282 - protein, 9 aa, Homo sapiens
  Table A; Target 53282; HLA-A*29:02; NPFFR2; ENSG00000056291; TAA
TTVLFANIY

SEQ ID NO: 53283 - protein, 9 aa, Homo sapiens
  Table A; Target 53283; HLA-A*30:02; NPFFR2; ENSG00000056291; TAA
TTVLFANIY

SEQ ID NO: 53284 - protein, 10 aa, Homo sapiens
  Table A; Target 53284; HLA-A*68:02; NPFFR2; ENSG00000056291; TAA
TTVLFANIYL

SEQ ID NO: 53285 - protein, 10 aa, Homo sapiens
  Table A; Target 53285; HLA-A*68:02; NPFFR2; ENSG00000056291; TAA
TVTNLFILNL

SEQ ID NO: 53286 - protein, 9 aa, Homo sapiens
  Table A; Target 53286; HLA-A*31:01; NPFFR2; ENSG00000056291; TAA
TVVCFIVMR

SEQ ID NO: 53287 - protein, 9 aa, Homo sapiens
  Table A; Target 53287; HLA-A*68:01; NPFFR2; ENSG00000056291; TAA
TVVCFIVMR

SEQ ID NO: 53288 - protein, 9 aa, Homo sapiens
  Table A; Target 53288; HLA-A*26:01; NPFFR2; ENSG00000056291; TAA
VAAIFIISY

SEQ ID NO: 53289 - protein, 9 aa, Homo sapiens
  Table A; Target 53289; HLA-A*30:02; NPFFR2; ENSG00000056291; TAA
VAAIFIISY

SEQ ID NO: 53290 - protein, 9 aa, Homo sapiens
  Table A; Target 53290; HLA-B*15:01; NPFFR2; ENSG00000056291; TAA
VAAIFIISY

SEQ ID NO: 53291 - protein, 9 aa, Homo sapiens
  Table A; Target 53291; HLA-B*15:03; NPFFR2; ENSG00000056291; TAA
VAAIFIISY

SEQ ID NO: 53292 - protein, 9 aa, Homo sapiens
  Table A; Target 53292; HLA-B*18:01; NPFFR2; ENSG00000056291; TAA
VAAIFIISY

SEQ ID NO: 53293 - protein, 9 aa, Homo sapiens
  Table A; Target 53293; HLA-B*35:01; NPFFR2; ENSG00000056291; TAA
VAAIFIISY

SEQ ID NO: 53294 - protein, 9 aa, Homo sapiens
  Table A; Target 53294; HLA-B*46:01; NPFFR2; ENSG00000056291; TAA
VAAIFIISY

SEQ ID NO: 53295 - protein, 9 aa, Homo sapiens
  Table A; Target 53295; HLA-C*02:02; NPFFR2; ENSG00000056291; TAA
VAAIFIISY

SEQ ID NO: 53296 - protein, 9 aa, Homo sapiens
  Table A; Target 53296; HLA-C*12:03; NPFFR2; ENSG00000056291; TAA
VAAIFIISY

SEQ ID NO: 53297 - protein, 9 aa, Homo sapiens
  Table A; Target 53297; HLA-C*16:01; NPFFR2; ENSG00000056291; TAA
VAAIFIISY

SEQ ID NO: 53298 - protein, 9 aa, Homo sapiens
  Table A; Target 53298; HLA-C*16:04; NPFFR2; ENSG00000056291; TAA
VAAIFIISY

SEQ ID NO: 53299 - protein, 8 aa, Homo sapiens
  Table A; Target 53299; HLA-A*23:01; NPFFR2; ENSG00000056291; TAA
VAASVFTL

SEQ ID NO: 53300 - protein, 8 aa, Homo sapiens
  Table A; Target 53300; HLA-A*30:01; NPFFR2; ENSG00000056291; TAA
VAASVFTL

SEQ ID NO: 53301 - protein, 8 aa, Homo sapiens
  Table A; Target 53301; HLA-B*46:01; NPFFR2; ENSG00000056291; TAA
VAASVFTL

SEQ ID NO: 53302 - protein, 8 aa, Homo sapiens
  Table A; Target 53302; HLA-B*51:01; NPFFR2; ENSG00000056291; TAA
VAASVFTL

SEQ ID NO: 53303 - protein, 8 aa, Homo sapiens
  Table A; Target 53303; HLA-B*58:01; NPFFR2; ENSG00000056291; TAA
VAASVFTL

SEQ ID NO: 53304 - protein, 8 aa, Homo sapiens
  Table A; Target 53304; HLA-C*02:02; NPFFR2; ENSG00000056291; TAA
VAASVFTL

SEQ ID NO: 53305 - protein, 8 aa, Homo sapiens
  Table A; Target 53305; HLA-C*03:03; NPFFR2; ENSG00000056291; TAA
VAASVFTL

SEQ ID NO: 53306 - protein, 8 aa, Homo sapiens
  Table A; Target 53306; HLA-C*03:04; NPFFR2; ENSG00000056291; TAA
VAASVFTL

SEQ ID NO: 53307 - protein, 8 aa, Homo sapiens
  Table A; Target 53307; HLA-C*05:01; NPFFR2; ENSG00000056291; TAA
VAASVFTL

SEQ ID NO: 53308 - protein, 8 aa, Homo sapiens
  Table A; Target 53308; HLA-C*12:03; NPFFR2; ENSG00000056291; TAA
VAASVFTL

SEQ ID NO: 53309 - protein, 8 aa, Homo sapiens
  Table A; Target 53309; HLA-C*16:01; NPFFR2; ENSG00000056291; TAA
VAASVFTL

SEQ ID NO: 53310 - protein, 8 aa, Homo sapiens
  Table A; Target 53310; HLA-C*16:02; NPFFR2; ENSG00000056291; TAA
VAASVFTL

SEQ ID NO: 53311 - protein, 8 aa, Homo sapiens
  Table A; Target 53311; HLA-C*16:04; NPFFR2; ENSG00000056291; TAA
VAASVFTL

SEQ ID NO: 53312 - protein, 9 aa, Homo sapiens
  Table A; Target 53312; HLA-A*02:01; NPFFR2; ENSG00000056291; TAA
VAASVFTLV

SEQ ID NO: 53313 - protein, 9 aa, Homo sapiens
  Table A; Target 53313; HLA-A*02:03; NPFFR2; ENSG00000056291; TAA
VAASVFTLV

SEQ ID NO: 53314 - protein, 9 aa, Homo sapiens
  Table A; Target 53314; HLA-A*02:07; NPFFR2; ENSG00000056291; TAA
VAASVFTLV

SEQ ID NO: 53315 - protein, 9 aa, Homo sapiens
  Table A; Target 53315; HLA-A*23:01; NPFFR2; ENSG00000056291; TAA
VAASVFTLV

SEQ ID NO: 53316 - protein, 9 aa, Homo sapiens
  Table A; Target 53316; HLA-A*24:02; NPFFR2; ENSG00000056291; TAA
VAASVFTLV

SEQ ID NO: 53317 - protein, 9 aa, Homo sapiens
  Table A; Target 53317; HLA-A*26:01; NPFFR2; ENSG00000056291; TAA
VAASVFTLV

SEQ ID NO: 53318 - protein, 9 aa, Homo sapiens
  Table A; Target 53318; HLA-A*32:01; NPFFR2; ENSG00000056291; TAA
VAASVFTLV

SEQ ID NO: 53319 - protein, 9 aa, Homo sapiens
  Table A; Target 53319; HLA-A*68:02; NPFFR2; ENSG00000056291; TAA
VAASVFTLV

SEQ ID NO: 53320 - protein, 9 aa, Homo sapiens
  Table A; Target 53320; HLA-B*13:02; NPFFR2; ENSG00000056291; TAA
VAASVFTLV

SEQ ID NO: 53321 - protein, 9 aa, Homo sapiens
  Table A; Target 53321; HLA-B*35:03; NPFFR2; ENSG00000056291; TAA
VAASVFTLV

SEQ ID NO: 53322 - protein, 9 aa, Homo sapiens
  Table A; Target 53322; HLA-B*39:01; NPFFR2; ENSG00000056291; TAA
VAASVFTLV

SEQ ID NO: 53323 - protein, 9 aa, Homo sapiens
  Table A; Target 53323; HLA-B*46:01; NPFFR2; ENSG00000056291; TAA
VAASVFTLV

SEQ ID NO: 53324 - protein, 9 aa, Homo sapiens
  Table A; Target 53324; HLA-B*49:01; NPFFR2; ENSG00000056291; TAA
VAASVFTLV

SEQ ID NO: 53325 - protein, 9 aa, Homo sapiens
  Table A; Target 53325; HLA-B*51:01; NPFFR2; ENSG00000056291; TAA
VAASVFTLV

SEQ ID NO: 53326 - protein, 9 aa, Homo sapiens
  Table A; Target 53326; HLA-B*54:01; NPFFR2; ENSG00000056291; TAA
VAASVFTLV

SEQ ID NO: 53327 - protein, 9 aa, Homo sapiens
  Table A; Target 53327; HLA-B*55:01; NPFFR2; ENSG00000056291; TAA
VAASVFTLV

SEQ ID NO: 53328 - protein, 9 aa, Homo sapiens
  Table A; Target 53328; HLA-B*56:01; NPFFR2; ENSG00000056291; TAA
VAASVFTLV

SEQ ID NO: 53329 - protein, 9 aa, Homo sapiens
  Table A; Target 53329; HLA-B*58:01; NPFFR2; ENSG00000056291; TAA
VAASVFTLV

SEQ ID NO: 53330 - protein, 9 aa, Homo sapiens
  Table A; Target 53330; HLA-C*02:02; NPFFR2; ENSG00000056291; TAA
VAASVFTLV

SEQ ID NO: 53331 - protein, 9 aa, Homo sapiens
  Table A; Target 53331; HLA-C*03:03; NPFFR2; ENSG00000056291; TAA
VAASVFTLV

SEQ ID NO: 53332 - protein, 9 aa, Homo sapiens
  Table A; Target 53332; HLA-C*03:04; NPFFR2; ENSG00000056291; TAA
VAASVFTLV

SEQ ID NO: 53333 - protein, 9 aa, Homo sapiens
  Table A; Target 53333; HLA-C*05:01; NPFFR2; ENSG00000056291; TAA
VAASVFTLV

SEQ ID NO: 53334 - protein, 9 aa, Homo sapiens
  Table A; Target 53334; HLA-C*12:03; NPFFR2; ENSG00000056291; TAA
VAASVFTLV

SEQ ID NO: 53335 - protein, 9 aa, Homo sapiens
  Table A; Target 53335; HLA-C*16:02; NPFFR2; ENSG00000056291; TAA
VAASVFTLV

SEQ ID NO: 53336 - protein, 9 aa, Homo sapiens
  Table A; Target 53336; HLA-C*16:04; NPFFR2; ENSG00000056291; TAA
VAASVFTLV

SEQ ID NO: 53337 - protein, 8 aa, Homo sapiens
  Table A; Target 53337; HLA-B*58:01; NPFFR2; ENSG00000056291; TAA
VAIAVDRF

SEQ ID NO: 53338 - protein, 9 aa, Homo sapiens
  Table A; Target 53338; HLA-B*57:01; NPFFR2; ENSG00000056291; TAA
VALLFILSW

SEQ ID NO: 53339 - protein, 9 aa, Homo sapiens
  Table A; Target 53339; HLA-A*23:01; NPFFR2; ENSG00000056291; TAA
VFTLVAIAV

SEQ ID NO: 53340 - protein, 9 aa, Homo sapiens
  Table A; Target 53340; HLA-C*14:02; NPFFR2; ENSG00000056291; TAA
VFTLVAIAV

SEQ ID NO: 53341 - protein, 9 aa, Homo sapiens
  Table A; Target 53341; HLA-A*02:04; NPFFR2; ENSG00000056291; TAA
VIIMIIWVL

SEQ ID NO: 53342 - protein, 9 aa, Homo sapiens
  Table A; Target 53342; HLA-A*02:01; NPFFR2; ENSG00000056291; TAA
VLFANIYLA

SEQ ID NO: 53343 - protein, 9 aa, Homo sapiens
  Table A; Target 53343; HLA-A*02:03; NPFFR2; ENSG00000056291; TAA
VLFANIYLA

SEQ ID NO: 53344 - protein, 9 aa, Homo sapiens
  Table A; Target 53344; HLA-A*02:04; NPFFR2; ENSG00000056291; TAA
VLFANIYLA

SEQ ID NO: 53345 - protein, 11 aa, Homo sapiens
  Table A; Target 53345; HLA-A*02:01; NPFFR2; ENSG00000056291; TAA
VLFANIYLAPL

SEQ ID NO: 53346 - protein, 11 aa, Homo sapiens
  Table A; Target 53346; HLA-A*02:03; NPFFR2; ENSG00000056291; TAA
VLFANIYLAPL

SEQ ID NO: 53347 - protein, 11 aa, Homo sapiens
  Table A; Target 53347; HLA-A*02:04; NPFFR2; ENSG00000056291; TAA
VLFANIYLAPL

SEQ ID NO: 53348 - protein, 9 aa, Homo sapiens
  Table A; Target 53348; HLA-A*02:01; NPFFR2; ENSG00000056291; TAA
VLINTSNQL

SEQ ID NO: 53349 - protein, 9 aa, Homo sapiens
  Table A; Target 53349; HLA-A*02:03; NPFFR2; ENSG00000056291; TAA
VLINTSNQL

SEQ ID NO: 53350 - protein, 9 aa, Homo sapiens
  Table A; Target 53350; HLA-A*02:04; NPFFR2; ENSG00000056291; TAA
VLINTSNQL

SEQ ID NO: 53351 - protein, 9 aa, Homo sapiens
  Table A; Target 53351; HLA-A*02:07; NPFFR2; ENSG00000056291; TAA
VLINTSNQL

SEQ ID NO: 53352 - protein, 9 aa, Homo sapiens
  Table A; Target 53352; HLA-A*23:01; NPFFR2; ENSG00000056291; TAA
VLINTSNQL

SEQ ID NO: 53353 - protein, 9 aa, Homo sapiens
  Table A; Target 53353; HLA-A*24:02; NPFFR2; ENSG00000056291; TAA
VLINTSNQL

SEQ ID NO: 53354 - protein, 9 aa, Homo sapiens
  Table A; Target 53354; HLA-A*32:01; NPFFR2; ENSG00000056291; TAA
VLINTSNQL

SEQ ID NO: 53355 - protein, 9 aa, Homo sapiens
  Table A; Target 53355; HLA-B*13:02; NPFFR2; ENSG00000056291; TAA
VLINTSNQL

SEQ ID NO: 53356 - protein, 9 aa, Homo sapiens
  Table A; Target 53356; HLA-B*15:01; NPFFR2; ENSG00000056291; TAA
VLINTSNQL

SEQ ID NO: 53357 - protein, 9 aa, Homo sapiens
  Table A; Target 53357; HLA-B*35:03; NPFFR2; ENSG00000056291; TAA
VLINTSNQL

SEQ ID NO: 53358 - protein, 9 aa, Homo sapiens
  Table A; Target 53358; HLA-B*38:01; NPFFR2; ENSG00000056291; TAA
VLINTSNQL

SEQ ID NO: 53359 - protein, 9 aa, Homo sapiens
  Table A; Target 53359; HLA-B*39:01; NPFFR2; ENSG00000056291; TAA
VLINTSNQL

SEQ ID NO: 53360 - protein, 9 aa, Homo sapiens
  Table A; Target 53360; HLA-B*40:01; NPFFR2; ENSG00000056291; TAA
VLINTSNQL

SEQ ID NO: 53361 - protein, 9 aa, Homo sapiens
  Table A; Target 53361; HLA-B*46:01; NPFFR2; ENSG00000056291; TAA
VLINTSNQL

SEQ ID NO: 53362 - protein, 9 aa, Homo sapiens
  Table A; Target 53362; HLA-B*55:01; NPFFR2; ENSG00000056291; TAA
VLINTSNQL

SEQ ID NO: 53363 - protein, 9 aa, Homo sapiens
  Table A; Target 53363; HLA-B*58:01; NPFFR2; ENSG00000056291; TAA
VLINTSNQL

SEQ ID NO: 53364 - protein, 9 aa, Homo sapiens
  Table A; Target 53364; HLA-C*01:02; NPFFR2; ENSG00000056291; TAA
VLINTSNQL

SEQ ID NO: 53365 - protein, 9 aa, Homo sapiens
  Table A; Target 53365; HLA-C*03:03; NPFFR2; ENSG00000056291; TAA
VLINTSNQL

SEQ ID NO: 53366 - protein, 9 aa, Homo sapiens
  Table A; Target 53366; HLA-C*03:04; NPFFR2; ENSG00000056291; TAA
VLINTSNQL

SEQ ID NO: 53367 - protein, 9 aa, Homo sapiens
  Table A; Target 53367; HLA-C*07:04; NPFFR2; ENSG00000056291; TAA
VLINTSNQL

SEQ ID NO: 53368 - protein, 9 aa, Homo sapiens
  Table A; Target 53368; HLA-C*14:02; NPFFR2; ENSG00000056291; TAA
VLINTSNQL

SEQ ID NO: 53369 - protein, 9 aa, Homo sapiens
  Table A; Target 53369; HLA-C*16:01; NPFFR2; ENSG00000056291; TAA
VLINTSNQL

SEQ ID NO: 53370 - protein, 9 aa, Homo sapiens
  Table A; Target 53370; HLA-C*16:02; NPFFR2; ENSG00000056291; TAA
VLINTSNQL

SEQ ID NO: 53371 - protein, 10 aa, Homo sapiens
  Table A; Target 53371; HLA-A*02:01; NPFFR2; ENSG00000056291; TAA
VLINTSNQLV

SEQ ID NO: 53372 - protein, 10 aa, Homo sapiens
  Table A; Target 53372; HLA-A*02:03; NPFFR2; ENSG00000056291; TAA
VLINTSNQLV

SEQ ID NO: 53373 - protein, 9 aa, Homo sapiens
  Table A; Target 53373; HLA-A*03:02; NPFFR2; ENSG00000056291; TAA
VMLHVQEEK

SEQ ID NO: 53374 - protein, 10 aa, Homo sapiens
  Table A; Target 53374; HLA-A*29:02; NPFFR2; ENSG00000056291; TAA
VMLHVQEEKY

SEQ ID NO: 53375 - protein, 10 aa, Homo sapiens
  Table A; Target 53375; HLA-A*30:02; NPFFR2; ENSG00000056291; TAA
VMLHVQEEKY

SEQ ID NO: 53376 - protein, 8 aa, Homo sapiens
  Table A; Target 53376; HLA-B*08:01; NPFFR2; ENSG00000056291; TAA
VNDTKHHL

SEQ ID NO: 53377 - protein, 9 aa, Homo sapiens
  Table A; Target 53377; HLA-A*01:01; NPFFR2; ENSG00000056291; TAA
VNDTKHHLY

SEQ ID NO: 53378 - protein, 9 aa, Homo sapiens
  Table A; Target 53378; HLA-A*29:02; NPFFR2; ENSG00000056291; TAA
VNDTKHHLY

SEQ ID NO: 53379 - protein, 9 aa, Homo sapiens
  Table A; Target 53379; HLA-A*02:01; NPFFR2; ENSG00000056291; TAA
VQEEKYYRV

SEQ ID NO: 53380 - protein, 9 aa, Homo sapiens
  Table A; Target 53380; HLA-A*02:04; NPFFR2; ENSG00000056291; TAA
VQEEKYYRV

SEQ ID NO: 53381 - protein, 9 aa, Homo sapiens
  Table A; Target 53381; HLA-A*02:07; NPFFR2; ENSG00000056291; TAA
VQEEKYYRV

SEQ ID NO: 53382 - protein, 11 aa, Homo sapiens
  Table A; Target 53382; HLA-B*15:01; NPFFR2; ENSG00000056291; TAA
VQGISVAASVF

SEQ ID NO: 53383 - protein, 9 aa, Homo sapiens
  Table A; Target 53383; HLA-A*32:01; NPFFR2; ENSG00000056291; TAA
VQQRGGPAW

SEQ ID NO: 53384 - protein, 9 aa, Homo sapiens
  Table A; Target 53384; HLA-B*15:01; NPFFR2; ENSG00000056291; TAA
VQQRGGPAW

SEQ ID NO: 53385 - protein, 8 aa, Homo sapiens
  Table A; Target 53385; HLA-B*27:05; NPFFR2; ENSG00000056291; TAA
VRLNSQNK

SEQ ID NO: 53386 - protein, 11 aa, Homo sapiens
  Table A; Target 53386; HLA-C*07:06; NPFFR2; ENSG00000056291; TAA
VSSAPDKEAGR

SEQ ID NO: 53387 - protein, 9 aa, Homo sapiens
  Table A; Target 53387; HLA-A*02:04; NPFFR2; ENSG00000056291; TAA
VTNLFILNL

SEQ ID NO: 53388 - protein, 9 aa, Homo sapiens
  Table A; Target 53388; HLA-A*03:01; NPFFR2; ENSG00000056291; TAA
VTNLFILNL

SEQ ID NO: 53389 - protein, 9 aa, Homo sapiens
  Table A; Target 53389; HLA-A*02:01; NPFFR2; ENSG00000056291; TAA
VVYPFKPKL

SEQ ID NO: 53390 - protein, 9 aa, Homo sapiens
  Table A; Target 53390; HLA-A*02:04; NPFFR2; ENSG00000056291; TAA
VVYPFKPKL

SEQ ID NO: 53391 - protein, 9 aa, Homo sapiens
  Table A; Target 53391; HLA-A*02:07; NPFFR2; ENSG00000056291; TAA
VVYPFKPKL

SEQ ID NO: 53392 - protein, 9 aa, Homo sapiens
  Table A; Target 53392; HLA-A*03:01; NPFFR2; ENSG00000056291; TAA
VVYPFKPKL

SEQ ID NO: 53393 - protein, 9 aa, Homo sapiens
  Table A; Target 53393; HLA-A*11:01; NPFFR2; ENSG00000056291; TAA
VVYPFKPKL

SEQ ID NO: 53394 - protein, 9 aa, Homo sapiens
  Table A; Target 53394; HLA-A*23:01; NPFFR2; ENSG00000056291; TAA
VVYPFKPKL

SEQ ID NO: 53395 - protein, 9 aa, Homo sapiens
  Table A; Target 53395; HLA-A*24:02; NPFFR2; ENSG00000056291; TAA
VVYPFKPKL

SEQ ID NO: 53396 - protein, 9 aa, Homo sapiens
  Table A; Target 53396; HLA-A*31:01; NPFFR2; ENSG00000056291; TAA
VVYPFKPKL

SEQ ID NO: 53397 - protein, 9 aa, Homo sapiens
  Table A; Target 53397; HLA-A*32:01; NPFFR2; ENSG00000056291; TAA
VVYPFKPKL

SEQ ID NO: 53398 - protein, 9 aa, Homo sapiens
  Table A; Target 53398; HLA-A*68:02; NPFFR2; ENSG00000056291; TAA
VVYPFKPKL

SEQ ID NO: 53399 - protein, 9 aa, Homo sapiens
  Table A; Target 53399; HLA-B*13:02; NPFFR2; ENSG00000056291; TAA
VVYPFKPKL

SEQ ID NO: 53400 - protein, 9 aa, Homo sapiens
  Table A; Target 53400; HLA-B*40:02; NPFFR2; ENSG00000056291; TAA
VVYPFKPKL

SEQ ID NO: 53401 - protein, 9 aa, Homo sapiens
  Table A; Target 53401; HLA-B*51:01; NPFFR2; ENSG00000056291; TAA
VVYPFKPKL

SEQ ID NO: 53402 - protein, 9 aa, Homo sapiens
  Table A; Target 53402; HLA-B*57:01; NPFFR2; ENSG00000056291; TAA
VVYPFKPKL

SEQ ID NO: 53403 - protein, 9 aa, Homo sapiens
  Table A; Target 53403; HLA-B*58:01; NPFFR2; ENSG00000056291; TAA
VVYPFKPKL

SEQ ID NO: 53404 - protein, 9 aa, Homo sapiens
  Table A; Target 53404; HLA-C*02:02; NPFFR2; ENSG00000056291; TAA
VVYPFKPKL

SEQ ID NO: 53405 - protein, 9 aa, Homo sapiens
  Table A; Target 53405; HLA-C*12:03; NPFFR2; ENSG00000056291; TAA
VVYPFKPKL

SEQ ID NO: 53406 - protein, 8 aa, Homo sapiens
  Table A; Target 53406; HLA-A*24:02; NPFFR2; ENSG00000056291; TAA
VYPFKPKL

SEQ ID NO: 53407 - protein, 10 aa, Homo sapiens
  Table A; Target 53407; HLA-A*24:02; NPFFR2; ENSG00000056291; TAA
VYPFKPKLTI

SEQ ID NO: 53408 - protein, 9 aa, Homo sapiens
  Table A; Target 53408; HLA-A*02:03; NPFFR2; ENSG00000056291; TAA
WLAFGNSSV

SEQ ID NO: 53409 - protein, 9 aa, Homo sapiens
  Table A; Target 53409; HLA-A*01:01; NPFFR2; ENSG00000056291; TAA
YADLSPNEL

SEQ ID NO: 53410 - protein, 9 aa, Homo sapiens
  Table A; Target 53410; HLA-A*02:07; NPFFR2; ENSG00000056291; TAA
YADLSPNEL

SEQ ID NO: 53411 - protein, 9 aa, Homo sapiens
  Table A; Target 53411; HLA-A*23:01; NPFFR2; ENSG00000056291; TAA
YADLSPNEL

SEQ ID NO: 53412 - protein, 9 aa, Homo sapiens
  Table A; Target 53412; HLA-A*30:01; NPFFR2; ENSG00000056291; TAA
YADLSPNEL

SEQ ID NO: 53413 - protein, 9 aa, Homo sapiens
  Table A; Target 53413; HLA-A*32:01; NPFFR2; ENSG00000056291; TAA
YADLSPNEL

SEQ ID NO: 53414 - protein, 9 aa, Homo sapiens
  Table A; Target 53414; HLA-B*18:01; NPFFR2; ENSG00000056291; TAA
YADLSPNEL

SEQ ID NO: 53415 - protein, 9 aa, Homo sapiens
  Table A; Target 53415; HLA-B*27:05; NPFFR2; ENSG00000056291; TAA
YADLSPNEL

SEQ ID NO: 53416 - protein, 9 aa, Homo sapiens
  Table A; Target 53416; HLA-B*35:01; NPFFR2; ENSG00000056291; TAA
YADLSPNEL

SEQ ID NO: 53417 - protein, 9 aa, Homo sapiens
  Table A; Target 53417; HLA-B*35:03; NPFFR2; ENSG00000056291; TAA
YADLSPNEL

SEQ ID NO: 53418 - protein, 9 aa, Homo sapiens
  Table A; Target 53418; HLA-B*38:01; NPFFR2; ENSG00000056291; TAA
YADLSPNEL

SEQ ID NO: 53419 - protein, 9 aa, Homo sapiens
  Table A; Target 53419; HLA-B*39:01; NPFFR2; ENSG00000056291; TAA
YADLSPNEL

SEQ ID NO: 53420 - protein, 9 aa, Homo sapiens
  Table A; Target 53420; HLA-B*40:01; NPFFR2; ENSG00000056291; TAA
YADLSPNEL

SEQ ID NO: 53421 - protein, 9 aa, Homo sapiens
  Table A; Target 53421; HLA-B*46:01; NPFFR2; ENSG00000056291; TAA
YADLSPNEL

SEQ ID NO: 53422 - protein, 9 aa, Homo sapiens
  Table A; Target 53422; HLA-B*51:01; NPFFR2; ENSG00000056291; TAA
YADLSPNEL

SEQ ID NO: 53423 - protein, 9 aa, Homo sapiens
  Table A; Target 53423; HLA-B*54:01; NPFFR2; ENSG00000056291; TAA
YADLSPNEL

SEQ ID NO: 53424 - protein, 9 aa, Homo sapiens
  Table A; Target 53424; HLA-B*55:01; NPFFR2; ENSG00000056291; TAA
YADLSPNEL

SEQ ID NO: 53425 - protein, 9 aa, Homo sapiens
  Table A; Target 53425; HLA-B*58:01; NPFFR2; ENSG00000056291; TAA
YADLSPNEL

SEQ ID NO: 53426 - protein, 9 aa, Homo sapiens
  Table A; Target 53426; HLA-C*01:02; NPFFR2; ENSG00000056291; TAA
YADLSPNEL

SEQ ID NO: 53427 - protein, 9 aa, Homo sapiens
  Table A; Target 53427; HLA-C*02:02; NPFFR2; ENSG00000056291; TAA
YADLSPNEL

SEQ ID NO: 53428 - protein, 9 aa, Homo sapiens
  Table A; Target 53428; HLA-C*03:03; NPFFR2; ENSG00000056291; TAA
YADLSPNEL

SEQ ID NO: 53429 - protein, 9 aa, Homo sapiens
  Table A; Target 53429; HLA-C*03:04; NPFFR2; ENSG00000056291; TAA
YADLSPNEL

SEQ ID NO: 53430 - protein, 9 aa, Homo sapiens
  Table A; Target 53430; HLA-C*04:01; NPFFR2; ENSG00000056291; TAA
YADLSPNEL

SEQ ID NO: 53431 - protein, 9 aa, Homo sapiens
  Table A; Target 53431; HLA-C*05:01; NPFFR2; ENSG00000056291; TAA
YADLSPNEL

SEQ ID NO: 53432 - protein, 9 aa, Homo sapiens
  Table A; Target 53432; HLA-C*07:04; NPFFR2; ENSG00000056291; TAA
YADLSPNEL

SEQ ID NO: 53433 - protein, 9 aa, Homo sapiens
  Table A; Target 53433; HLA-C*12:03; NPFFR2; ENSG00000056291; TAA
YADLSPNEL

SEQ ID NO: 53434 - protein, 9 aa, Homo sapiens
  Table A; Target 53434; HLA-C*14:02; NPFFR2; ENSG00000056291; TAA
YADLSPNEL

SEQ ID NO: 53435 - protein, 9 aa, Homo sapiens
  Table A; Target 53435; HLA-C*16:01; NPFFR2; ENSG00000056291; TAA
YADLSPNEL

SEQ ID NO: 53436 - protein, 9 aa, Homo sapiens
  Table A; Target 53436; HLA-C*16:02; NPFFR2; ENSG00000056291; TAA
YADLSPNEL

SEQ ID NO: 53437 - protein, 9 aa, Homo sapiens
  Table A; Target 53437; HLA-C*16:04; NPFFR2; ENSG00000056291; TAA
YADLSPNEL

SEQ ID NO: 53438 - protein, 11 aa, Homo sapiens
  Table A; Target 53438; HLA-B*38:01; NPFFR2; ENSG00000056291; TAA
YADLSPNELQI

SEQ ID NO: 53439 - protein, 9 aa, Homo sapiens
  Table A; Target 53439; HLA-B*51:01; NPFFR2; ENSG00000056291; TAA
YALKAKSHV

SEQ ID NO: 53440 - protein, 8 aa, Homo sapiens
  Table A; Target 53440; HLA-B*08:01; NPFFR2; ENSG00000056291; TAA
YGRIGISL

SEQ ID NO: 53441 - protein, 8 aa, Homo sapiens
  Table A; Target 53441; HLA-C*03:04; NPFFR2; ENSG00000056291; TAA
YGRIGISL

SEQ ID NO: 53442 - protein, 9 aa, Homo sapiens
  Table A; Target 53442; HLA-A*02:01; NPFFR2; ENSG00000056291; TAA
YIYPFAHWL

SEQ ID NO: 53443 - protein, 9 aa, Homo sapiens
  Table A; Target 53443; HLA-A*02:04; NPFFR2; ENSG00000056291; TAA
YIYPFAHWL

SEQ ID NO: 53444 - protein, 9 aa, Homo sapiens
  Table A; Target 53444; HLA-A*02:07; NPFFR2; ENSG00000056291; TAA
YIYPFAHWL

SEQ ID NO: 53445 - protein, 9 aa, Homo sapiens
  Table A; Target 53445; HLA-A*68:02; NPFFR2; ENSG00000056291; TAA
YIYPFAHWL

SEQ ID NO: 53446 - protein, 8 aa, Homo sapiens
  Table A; Target 53446; HLA-A*02:03; NPFFR2; ENSG00000056291; TAA
YLAPLSLI

SEQ ID NO: 53447 - protein, 8 aa, Homo sapiens
  Table A; Target 53447; HLA-A*02:04; NPFFR2; ENSG00000056291; TAA
YLAPLSLI

SEQ ID NO: 53448 - protein, 9 aa, Homo sapiens
  Table A; Target 53448; HLA-A*02:01; NPFFR2; ENSG00000056291; TAA
YLAPLSLIV

SEQ ID NO: 53449 - protein, 9 aa, Homo sapiens
  Table A; Target 53449; HLA-A*02:03; NPFFR2; ENSG00000056291; TAA
YLAPLSLIV

SEQ ID NO: 53450 - protein, 9 aa, Homo sapiens
  Table A; Target 53450; HLA-A*02:04; NPFFR2; ENSG00000056291; TAA
YLAPLSLIV

SEQ ID NO: 53451 - protein, 9 aa, Homo sapiens
  Table A; Target 53451; HLA-A*02:07; NPFFR2; ENSG00000056291; TAA
YLAPLSLIV

SEQ ID NO: 53452 - protein, 9 aa, Homo sapiens
  Table A; Target 53452; HLA-B*13:02; NPFFR2; ENSG00000056291; TAA
YLAPLSLIV

SEQ ID NO: 53453 - protein, 9 aa, Homo sapiens
  Table A; Target 53453; HLA-C*02:02; NPFFR2; ENSG00000056291; TAA
YLAPLSLIV

SEQ ID NO: 53454 - protein, 10 aa, Homo sapiens
  Table A; Target 53454; HLA-A*02:01; NPFFR2; ENSG00000056291; TAA
YLAPLSLIVI

SEQ ID NO: 53455 - protein, 10 aa, Homo sapiens
  Table A; Target 53455; HLA-A*02:03; NPFFR2; ENSG00000056291; TAA
YLAPLSLIVI

SEQ ID NO: 53456 - protein, 10 aa, Homo sapiens
  Table A; Target 53456; HLA-A*02:04; NPFFR2; ENSG00000056291; TAA
YLAPLSLIVI

SEQ ID NO: 53457 - protein, 11 aa, Homo sapiens
  Table A; Target 53457; HLA-A*02:01; NPFFR2; ENSG00000056291; TAA
YLAPLSLIVIM

SEQ ID NO: 53458 - protein, 11 aa, Homo sapiens
  Table A; Target 53458; HLA-A*02:04; NPFFR2; ENSG00000056291; TAA
YLAPLSLIVIM

SEQ ID NO: 53459 - protein, 9 aa, Homo sapiens
  Table A; Target 53459; HLA-B*54:01; NPFFR2; ENSG00000056291; TAA
YLHQPQVAA

SEQ ID NO: 53460 - protein, 10 aa, Homo sapiens
  Table A; Target 53460; HLA-A*02:03; NPFFR2; ENSG00000056291; TAA
YLHQPQVAAI

SEQ ID NO: 53461 - protein, 10 aa, Homo sapiens
  Table A; Target 53461; HLA-A*02:04; NPFFR2; ENSG00000056291; TAA
YLHQPQVAAI

SEQ ID NO: 53462 - protein, 8 aa, Homo sapiens
  Table A; Target 53462; HLA-B*54:01; NPFFR2; ENSG00000056291; TAA
YPFAHWLA

SEQ ID NO: 53463 - protein, 9 aa, Homo sapiens
  Table A; Target 53463; HLA-A*29:02; NPFFR2; ENSG00000056291; TAA
YPFAHWLAF

SEQ ID NO: 53464 - protein, 9 aa, Homo sapiens
  Table A; Target 53464; HLA-B*35:01; NPFFR2; ENSG00000056291; TAA
YPFAHWLAF

SEQ ID NO: 53465 - protein, 9 aa, Homo sapiens
  Table A; Target 53465; HLA-B*54:01; NPFFR2; ENSG00000056291; TAA
YPFAHWLAF

SEQ ID NO: 53466 - protein, 9 aa, Homo sapiens
  Table A; Target 53466; HLA-B*07:02; NPFFR2; ENSG00000056291; TAA
YPFKPKLTI

SEQ ID NO: 53467 - protein, 9 aa, Homo sapiens
  Table A; Target 53467; HLA-B*08:01; NPFFR2; ENSG00000056291; TAA
YPFKPKLTI

SEQ ID NO: 53468 - protein, 9 aa, Homo sapiens
  Table A; Target 53468; HLA-B*13:02; NPFFR2; ENSG00000056291; TAA
YPFKPKLTI

SEQ ID NO: 53469 - protein, 9 aa, Homo sapiens
  Table A; Target 53469; HLA-B*51:01; NPFFR2; ENSG00000056291; TAA
YPFKPKLTI

SEQ ID NO: 53470 - protein, 9 aa, Homo sapiens
  Table A; Target 53470; HLA-B*54:01; NPFFR2; ENSG00000056291; TAA
YPFKPKLTI

SEQ ID NO: 53471 - protein, 9 aa, Homo sapiens
  Table A; Target 53471; HLA-B*56:01; NPFFR2; ENSG00000056291; TAA
YPFKPKLTI

SEQ ID NO: 53472 - protein, 9 aa, Homo sapiens
  Table A; Target 53472; HLA-C*07:02; NPFFR2; ENSG00000056291; TAA
YPFKPKLTI

SEQ ID NO: 53473 - protein, 8 aa, Homo sapiens
  Table A; Target 53473; HLA-A*01:01; NPFFR2; ENSG00000056291; TAA
YSDINITY

SEQ ID NO: 53474 - protein, 8 aa, Homo sapiens
  Table A; Target 53474; HLA-B*58:01; NPFFR2; ENSG00000056291; TAA
YSDINITY

SEQ ID NO: 53475 - protein, 8 aa, Homo sapiens
  Table A; Target 53475; HLA-C*05:01; NPFFR2; ENSG00000056291; TAA
YSDINITY

SEQ ID NO: 53476 - protein, 9 aa, Homo sapiens
  Table A; Target 53476; HLA-A*01:01; NPFFR2; ENSG00000056291; TAA
YSDINITYV

SEQ ID NO: 53477 - protein, 9 aa, Homo sapiens
  Table A; Target 53477; HLA-A*02:01; NPFFR2; ENSG00000056291; TAA
YSDINITYV

SEQ ID NO: 53478 - protein, 9 aa, Homo sapiens
  Table A; Target 53478; HLA-A*02:07; NPFFR2; ENSG00000056291; TAA
YSDINITYV

SEQ ID NO: 53479 - protein, 9 aa, Homo sapiens
  Table A; Target 53479; HLA-C*05:01; NPFFR2; ENSG00000056291; TAA
YSDINITYV

SEQ ID NO: 53480 - protein, 10 aa, Homo sapiens
  Table A; Target 53480; HLA-A*01:01; NPFFR2; ENSG00000056291; TAA
YSDINITYVN

SEQ ID NO: 53481 - protein, 11 aa, Homo sapiens
  Table A; Target 53481; HLA-A*01:01; NPFFR2; ENSG00000056291; TAA
YSDINITYVNY

SEQ ID NO: 53482 - protein, 11 aa, Homo sapiens
  Table A; Target 53482; HLA-A*29:02; NPFFR2; ENSG00000056291; TAA
YSDINITYVNY

SEQ ID NO: 53483 - protein, 9 aa, Homo sapiens
  Table A; Target 53483; HLA-A*68:02; NPFFR2; ENSG00000056291; TAA
YTTVLFANI

SEQ ID NO: 53484 - protein, 8 aa, Homo sapiens
  Table A; Target 53484; HLA-A*23:01; NPFFR2; ENSG00000056291; TAA
YYLHQPQV

SEQ ID NO: 53485 - protein, 9 aa, Homo sapiens
  Table A; Target 53485; HLA-A*23:01; NPFFR2; ENSG00000056291; TAA
YYLHQPQVA

SEQ ID NO: 53486 - protein, 9 aa, Homo sapiens
  Table A; Target 53486; HLA-A*24:02; NPFFR2; ENSG00000056291; TAA
YYLHQPQVA

SEQ ID NO: 53487 - protein, 9 aa, Homo sapiens
  Table A; Target 53487; HLA-B*54:01; NPFFR2; ENSG00000056291; TAA
YYLHQPQVA

SEQ ID NO: 53488 - protein, 9 aa, Homo sapiens
  Table A; Target 53488; HLA-C*14:02; NPFFR2; ENSG00000056291; TAA
YYLHQPQVA

SEQ ID NO: 53489 - protein, 11 aa, Homo sapiens
  Table A; Target 53489; HLA-A*23:01; NPFFR2; ENSG00000056291; TAA
YYLHQPQVAAI

SEQ ID NO: 53490 - protein, 11 aa, Homo sapiens
  Table A; Target 53490; HLA-A*24:02; NPFFR2; ENSG00000056291; TAA
YYLHQPQVAAI

SEQ ID NO: 53491 - protein, 9 aa, Homo sapiens
  Table A; Target 53491; HLA-A*02:01; NPSR1; ENSG00000187258; TAA
AINPLIYCV

SEQ ID NO: 53492 - protein, 9 aa, Homo sapiens
  Table A; Target 53492; HLA-A*02:03; NPSR1; ENSG00000187258; TAA
AINPLIYCV

SEQ ID NO: 53493 - protein, 9 aa, Homo sapiens
  Table A; Target 53493; HLA-A*02:04; NPSR1; ENSG00000187258; TAA
AINPLIYCV

SEQ ID NO: 53494 - protein, 9 aa, Homo sapiens
  Table A; Target 53494; HLA-A*02:07; NPSR1; ENSG00000187258; TAA
AINPLIYCV

SEQ ID NO: 53495 - protein, 9 aa, Homo sapiens
  Table A; Target 53495; HLA-A*30:01; NPSR1; ENSG00000187258; TAA
AINPLIYCV

SEQ ID NO: 53496 - protein, 9 aa, Homo sapiens
  Table A; Target 53496; HLA-A*32:01; NPSR1; ENSG00000187258; TAA
AINPLIYCV

SEQ ID NO: 53497 - protein, 9 aa, Homo sapiens
  Table A; Target 53497; HLA-B*13:02; NPSR1; ENSG00000187258; TAA
AINPLIYCV

SEQ ID NO: 53498 - protein, 9 aa, Homo sapiens
  Table A; Target 53498; HLA-B*55:01; NPSR1; ENSG00000187258; TAA
AINPLIYCV

SEQ ID NO: 53499 - protein, 9 aa, Homo sapiens
  Table A; Target 53499; HLA-B*56:01; NPSR1; ENSG00000187258; TAA
AINPLIYCV

SEQ ID NO: 53500 - protein, 9 aa, Homo sapiens
  Table A; Target 53500; HLA-C*02:02; NPSR1; ENSG00000187258; TAA
AINPLIYCV

SEQ ID NO: 53501 - protein, 9 aa, Homo sapiens
  Table A; Target 53501; HLA-C*06:02; NPSR1; ENSG00000187258; TAA
AINPLIYCV

SEQ ID NO: 53502 - protein, 10 aa, Homo sapiens
  Table A; Target 53502; HLA-A*25:01; NPSR1; ENSG00000187258; TAA
AINPLIYCVF

SEQ ID NO: 53503 - protein, 10 aa, Homo sapiens
  Table A; Target 53503; HLA-B*44:02; NPSR1; ENSG00000187258; TAA
AINPLIYCVF

SEQ ID NO: 53504 - protein, 9 aa, Homo sapiens
  Table A; Target 53504; HLA-A*02:01; NPSR1; ENSG00000187258; TAA
AITDSFTGL

SEQ ID NO: 53505 - protein, 9 aa, Homo sapiens
  Table A; Target 53505; HLA-A*02:03; NPSR1; ENSG00000187258; TAA
AITDSFTGL

SEQ ID NO: 53506 - protein, 9 aa, Homo sapiens
  Table A; Target 53506; HLA-A*02:04; NPSR1; ENSG00000187258; TAA
AITDSFTGL

SEQ ID NO: 53507 - protein, 9 aa, Homo sapiens
  Table A; Target 53507; HLA-A*02:07; NPSR1; ENSG00000187258; TAA
AITDSFTGL

SEQ ID NO: 53508 - protein, 9 aa, Homo sapiens
  Table A; Target 53508; HLA-A*25:01; NPSR1; ENSG00000187258; TAA
AITDSFTGL

SEQ ID NO: 53509 - protein, 9 aa, Homo sapiens
  Table A; Target 53509; HLA-A*26:01; NPSR1; ENSG00000187258; TAA
AITDSFTGL

SEQ ID NO: 53510 - protein, 9 aa, Homo sapiens
  Table A; Target 53510; HLA-A*32:01; NPSR1; ENSG00000187258; TAA
AITDSFTGL

SEQ ID NO: 53511 - protein, 9 aa, Homo sapiens
  Table A; Target 53511; HLA-B*15:01; NPSR1; ENSG00000187258; TAA
AITDSFTGL

SEQ ID NO: 53512 - protein, 9 aa, Homo sapiens
  Table A; Target 53512; HLA-B*15:03; NPSR1; ENSG00000187258; TAA
AITDSFTGL

SEQ ID NO: 53513 - protein, 9 aa, Homo sapiens
  Table A; Target 53513; HLA-B*27:05; NPSR1; ENSG00000187258; TAA
AITDSFTGL

SEQ ID NO: 53514 - protein, 9 aa, Homo sapiens
  Table A; Target 53514; HLA-B*39:01; NPSR1; ENSG00000187258; TAA
AITDSFTGL

SEQ ID NO: 53515 - protein, 9 aa, Homo sapiens
  Table A; Target 53515; HLA-B*40:01; NPSR1; ENSG00000187258; TAA
AITDSFTGL

SEQ ID NO: 53516 - protein, 9 aa, Homo sapiens
  Table A; Target 53516; HLA-B*46:01; NPSR1; ENSG00000187258; TAA
AITDSFTGL

SEQ ID NO: 53517 - protein, 9 aa, Homo sapiens
  Table A; Target 53517; HLA-B*55:01; NPSR1; ENSG00000187258; TAA
AITDSFTGL

SEQ ID NO: 53518 - protein, 9 aa, Homo sapiens
  Table A; Target 53518; HLA-B*58:01; NPSR1; ENSG00000187258; TAA
AITDSFTGL

SEQ ID NO: 53519 - protein, 9 aa, Homo sapiens
  Table A; Target 53519; HLA-C*01:02; NPSR1; ENSG00000187258; TAA
AITDSFTGL

SEQ ID NO: 53520 - protein, 9 aa, Homo sapiens
  Table A; Target 53520; HLA-C*02:02; NPSR1; ENSG00000187258; TAA
AITDSFTGL

SEQ ID NO: 53521 - protein, 9 aa, Homo sapiens
  Table A; Target 53521; HLA-C*03:04; NPSR1; ENSG00000187258; TAA
AITDSFTGL

SEQ ID NO: 53522 - protein, 9 aa, Homo sapiens
  Table A; Target 53522; HLA-C*05:01; NPSR1; ENSG00000187258; TAA
AITDSFTGL

SEQ ID NO: 53523 - protein, 9 aa, Homo sapiens
  Table A; Target 53523; HLA-C*14:02; NPSR1; ENSG00000187258; TAA
AITDSFTGL

SEQ ID NO: 53524 - protein, 8 aa, Homo sapiens
  Table A; Target 53524; HLA-B*15:03; NPSR1; ENSG00000187258; TAA
AKIKAIKY

SEQ ID NO: 53525 - protein, 9 aa, Homo sapiens
  Table A; Target 53525; HLA-A*02:04; NPSR1; ENSG00000187258; TAA
ALNSAINPL

SEQ ID NO: 53526 - protein, 9 aa, Homo sapiens
  Table A; Target 53526; HLA-C*01:02; NPSR1; ENSG00000187258; TAA
ALNSAINPL

SEQ ID NO: 53527 - protein, 11 aa, Homo sapiens
  Table A; Target 53527; HLA-A*03:01; NPSR1; ENSG00000187258; TAA
ALNSAINPLIY

SEQ ID NO: 53528 - protein, 11 aa, Homo sapiens
  Table A; Target 53528; HLA-A*29:02; NPSR1; ENSG00000187258; TAA
ALNSAINPLIY

SEQ ID NO: 53529 - protein, 11 aa, Homo sapiens
  Table A; Target 53529; HLA-A*30:02; NPSR1; ENSG00000187258; TAA
ALNSAINPLIY

SEQ ID NO: 53530 - protein, 11 aa, Homo sapiens
  Table A; Target 53530; HLA-B*15:01; NPSR1; ENSG00000187258; TAA
ALNSAINPLIY

SEQ ID NO: 53531 - protein, 9 aa, Homo sapiens
  Table A; Target 53531; HLA-B*07:02; NPSR1; ENSG00000187258; TAA
APDLVCRVV

SEQ ID NO: 53532 - protein, 9 aa, Homo sapiens
  Table A; Target 53532; HLA-B*51:01; NPSR1; ENSG00000187258; TAA
APDLVCRVV

SEQ ID NO: 53533 - protein, 9 aa, Homo sapiens
  Table A; Target 53533; HLA-B*54:01; NPSR1; ENSG00000187258; TAA
APDLVCRVV

SEQ ID NO: 53534 - protein, 9 aa, Homo sapiens
  Table A; Target 53534; HLA-B*55:01; NPSR1; ENSG00000187258; TAA
APDLVCRVV

SEQ ID NO: 53535 - protein, 9 aa, Homo sapiens
  Table A; Target 53535; HLA-B*56:01; NPSR1; ENSG00000187258; TAA
APDLVCRVV

SEQ ID NO: 53536 - protein, 9 aa, Homo sapiens
  Table A; Target 53536; HLA-C*07:02; NPSR1; ENSG00000187258; TAA
APDLVCRVV

SEQ ID NO: 53537 - protein, 9 aa, Homo sapiens
  Table A; Target 53537; HLA-B*27:02; NPSR1; ENSG00000187258; TAA
ARVLIVIAW

SEQ ID NO: 53538 - protein, 9 aa, Homo sapiens
  Table A; Target 53538; HLA-B*44:02; NPSR1; ENSG00000187258; TAA
ARVLIVIAW

SEQ ID NO: 53539 - protein, 9 aa, Homo sapiens
  Table A; Target 53539; HLA-B*44:03; NPSR1; ENSG00000187258; TAA
ARVLIVIAW

SEQ ID NO: 53540 - protein, 9 aa, Homo sapiens
  Table A; Target 53540; HLA-B*57:01; NPSR1; ENSG00000187258; TAA
ARVLIVIAW

SEQ ID NO: 53541 - protein, 9 aa, Homo sapiens
  Table A; Target 53541; HLA-C*16:04; NPSR1; ENSG00000187258; TAA
ARVLIVIAW

SEQ ID NO: 53542 - protein, 9 aa, Homo sapiens
  Table A; Target 53542; HLA-A*23:01; NPSR1; ENSG00000187258; TAA
ASTYVLVSL

SEQ ID NO: 53543 - protein, 9 aa, Homo sapiens
  Table A; Target 53543; HLA-A*30:01; NPSR1; ENSG00000187258; TAA
ASTYVLVSL

SEQ ID NO: 53544 - protein, 9 aa, Homo sapiens
  Table A; Target 53544; HLA-A*31:01; NPSR1; ENSG00000187258; TAA
ASTYVLVSL

SEQ ID NO: 53545 - protein, 9 aa, Homo sapiens
  Table A; Target 53545; HLA-A*68:02; NPSR1; ENSG00000187258; TAA
ASTYVLVSL

SEQ ID NO: 53546 - protein, 9 aa, Homo sapiens
  Table A; Target 53546; HLA-B*13:02; NPSR1; ENSG00000187258; TAA
ASTYVLVSL

SEQ ID NO: 53547 - protein, 9 aa, Homo sapiens
  Table A; Target 53547; HLA-B*40:02; NPSR1; ENSG00000187258; TAA
ASTYVLVSL

SEQ ID NO: 53548 - protein, 9 aa, Homo sapiens
  Table A; Target 53548; HLA-B*46:01; NPSR1; ENSG00000187258; TAA
ASTYVLVSL

SEQ ID NO: 53549 - protein, 9 aa, Homo sapiens
  Table A; Target 53549; HLA-B*57:01; NPSR1; ENSG00000187258; TAA
ASTYVLVSL

SEQ ID NO: 53550 - protein, 9 aa, Homo sapiens
  Table A; Target 53550; HLA-B*58:01; NPSR1; ENSG00000187258; TAA
ASTYVLVSL

SEQ ID NO: 53551 - protein, 9 aa, Homo sapiens
  Table A; Target 53551; HLA-C*01:02; NPSR1; ENSG00000187258; TAA
ASTYVLVSL

SEQ ID NO: 53552 - protein, 9 aa, Homo sapiens
  Table A; Target 53552; HLA-C*02:02; NPSR1; ENSG00000187258; TAA
ASTYVLVSL

SEQ ID NO: 53553 - protein, 9 aa, Homo sapiens
  Table A; Target 53553; HLA-C*03:03; NPSR1; ENSG00000187258; TAA
ASTYVLVSL

SEQ ID NO: 53554 - protein, 9 aa, Homo sapiens
  Table A; Target 53554; HLA-C*03:04; NPSR1; ENSG00000187258; TAA
ASTYVLVSL

SEQ ID NO: 53555 - protein, 9 aa, Homo sapiens
  Table A; Target 53555; HLA-C*06:02; NPSR1; ENSG00000187258; TAA
ASTYVLVSL

SEQ ID NO: 53556 - protein, 9 aa, Homo sapiens
  Table A; Target 53556; HLA-C*07:02; NPSR1; ENSG00000187258; TAA
ASTYVLVSL

SEQ ID NO: 53557 - protein, 9 aa, Homo sapiens
  Table A; Target 53557; HLA-C*07:04; NPSR1; ENSG00000187258; TAA
ASTYVLVSL

SEQ ID NO: 53558 - protein, 9 aa, Homo sapiens
  Table A; Target 53558; HLA-C*12:03; NPSR1; ENSG00000187258; TAA
ASTYVLVSL

SEQ ID NO: 53559 - protein, 9 aa, Homo sapiens
  Table A; Target 53559; HLA-C*14:02; NPSR1; ENSG00000187258; TAA
ASTYVLVSL

SEQ ID NO: 53560 - protein, 9 aa, Homo sapiens
  Table A; Target 53560; HLA-C*16:01; NPSR1; ENSG00000187258; TAA
ASTYVLVSL

SEQ ID NO: 53561 - protein, 9 aa, Homo sapiens
  Table A; Target 53561; HLA-C*16:02; NPSR1; ENSG00000187258; TAA
ASTYVLVSL

SEQ ID NO: 53562 - protein, 9 aa, Homo sapiens
  Table A; Target 53562; HLA-C*16:04; NPSR1; ENSG00000187258; TAA
ASTYVLVSL

SEQ ID NO: 53563 - protein, 8 aa, Homo sapiens
  Table A; Target 53563; HLA-B*58:01; NPSR1; ENSG00000187258; TAA
ASVIIQNL

SEQ ID NO: 53564 - protein, 10 aa, Homo sapiens
  Table A; Target 53564; HLA-A*01:01; NPSR1; ENSG00000187258; TAA
CSDGKLCSSY

SEQ ID NO: 53565 - protein, 10 aa, Homo sapiens
  Table A; Target 53565; HLA-C*07:01; NPSR1; ENSG00000187258; TAA
CSDGKLCSSY

SEQ ID NO: 53566 - protein, 10 aa, Homo sapiens
  Table A; Target 53566; HLA-A*01:01; NPSR1; ENSG00000187258; TAA
CTETVTFTEV

SEQ ID NO: 53567 - protein, 9 aa, Homo sapiens
  Table A; Target 53567; HLA-A*30:02; NPSR1; ENSG00000187258; TAA
CVFSSSISF

SEQ ID NO: 53568 - protein, 9 aa, Homo sapiens
  Table A; Target 53568; HLA-A*32:01; NPSR1; ENSG00000187258; TAA
CVFSSSISF

SEQ ID NO: 53569 - protein, 9 aa, Homo sapiens
  Table A; Target 53569; HLA-B*15:01; NPSR1; ENSG00000187258; TAA
CVFSSSISF

SEQ ID NO: 53570 - protein, 9 aa, Homo sapiens
  Table A; Target 53570; HLA-B*15:03; NPSR1; ENSG00000187258; TAA
CVFSSSISF

SEQ ID NO: 53571 - protein, 9 aa, Homo sapiens
  Table A; Target 53571; HLA-B*35:01; NPSR1; ENSG00000187258; TAA
CVFSSSISF

SEQ ID NO: 53572 - protein, 9 aa, Homo sapiens
  Table A; Target 53572; HLA-B*46:01; NPSR1; ENSG00000187258; TAA
CVFSSSISF

SEQ ID NO: 53573 - protein, 9 aa, Homo sapiens
  Table A; Target 53573; HLA-C*02:02; NPSR1; ENSG00000187258; TAA
CVFSSSISF

SEQ ID NO: 53574 - protein, 9 aa, Homo sapiens
  Table A; Target 53574; HLA-C*07:04; NPSR1; ENSG00000187258; TAA
CVFSSSISF

SEQ ID NO: 53575 - protein, 9 aa, Homo sapiens
  Table A; Target 53575; HLA-C*16:04; NPSR1; ENSG00000187258; TAA
CVFSSSISF

SEQ ID NO: 53576 - protein, 10 aa, Homo sapiens
  Table A; Target 53576; HLA-A*33:01; NPSR1; ENSG00000187258; TAA
DFTAPDLVCR

SEQ ID NO: 53577 - protein, 10 aa, Homo sapiens
  Table A; Target 53577; HLA-A*33:03; NPSR1; ENSG00000187258; TAA
DFTAPDLVCR

SEQ ID NO: 53578 - protein, 8 aa, Homo sapiens
  Table A; Target 53578; HLA-B*08:01; NPSR1; ENSG00000187258; TAA
DGKLCSSY

SEQ ID NO: 53579 - protein, 8 aa, Homo sapiens
  Table A; Target 53579; HLA-C*07:01; NPSR1; ENSG00000187258; TAA
DGKLCSSY

SEQ ID NO: 53580 - protein, 9 aa, Homo sapiens
  Table A; Target 53580; HLA-A*25:01; NPSR1; ENSG00000187258; TAA
DILDNFNLL

SEQ ID NO: 53581 - protein, 8 aa, Homo sapiens
  Table A; Target 53581; HLA-B*18:01; NPSR1; ENSG00000187258; TAA
DRYHAIVY

SEQ ID NO: 53582 - protein, 8 aa, Homo sapiens
  Table A; Target 53582; HLA-C*07:01; NPSR1; ENSG00000187258; TAA
DRYHAIVY

SEQ ID NO: 53583 - protein, 9 aa, Homo sapiens
  Table A; Target 53583; HLA-A*25:01; NPSR1; ENSG00000187258; TAA
DSFTGLVNI

SEQ ID NO: 53584 - protein, 9 aa, Homo sapiens
  Table A; Target 53584; HLA-A*33:01; NPSR1; ENSG00000187258; TAA
DSFTGLVNI

SEQ ID NO: 53585 - protein, 9 aa, Homo sapiens
  Table A; Target 53585; HLA-A*68:02; NPSR1; ENSG00000187258; TAA
DSFTGLVNI

SEQ ID NO: 53586 - protein, 9 aa, Homo sapiens
  Table A; Target 53586; HLA-B*51:01; NPSR1; ENSG00000187258; TAA
DSFTGLVNI

SEQ ID NO: 53587 - protein, 10 aa, Homo sapiens
  Table A; Target 53587; HLA-A*25:01; NPSR1; ENSG00000187258; TAA
DSFTGLVNIL

SEQ ID NO: 53588 - protein, 9 aa, Homo sapiens
  Table A; Target 53588; HLA-A*33:01; NPSR1; ENSG00000187258; TAA
DSRMTFRER

SEQ ID NO: 53589 - protein, 9 aa, Homo sapiens
  Table A; Target 53589; HLA-A*68:01; NPSR1; ENSG00000187258; TAA
DSSGTGQTL

SEQ ID NO: 53590 - protein, 9 aa, Homo sapiens
  Table A; Target 53590; HLA-B*35:03; NPSR1; ENSG00000187258; TAA
DSSGTGQTL

SEQ ID NO: 53591 - protein, 9 aa, Homo sapiens
  Table A; Target 53591; HLA-B*38:01; NPSR1; ENSG00000187258; TAA
DSSGTGQTL

SEQ ID NO: 53592 - protein, 9 aa, Homo sapiens
  Table A; Target 53592; HLA-B*39:01; NPSR1; ENSG00000187258; TAA
DSSGTGQTL

SEQ ID NO: 53593 - protein, 9 aa, Homo sapiens
  Table A; Target 53593; HLA-C*01:02; NPSR1; ENSG00000187258; TAA
DSSGTGQTL

SEQ ID NO: 53594 - protein, 9 aa, Homo sapiens
  Table A; Target 53594; HLA-C*03:04; NPSR1; ENSG00000187258; TAA
DSSGTGQTL

SEQ ID NO: 53595 - protein, 9 aa, Homo sapiens
  Table A; Target 53595; HLA-C*07:06; NPSR1; ENSG00000187258; TAA
DSSGTGQTL

SEQ ID NO: 53596 - protein, 8 aa, Homo sapiens
  Table A; Target 53596; HLA-B*51:01; NPSR1; ENSG00000187258; TAA
DSYWTPYM

SEQ ID NO: 53597 - protein, 9 aa, Homo sapiens
  Table A; Target 53597; HLA-A*33:01; NPSR1; ENSG00000187258; TAA
DTQERFYAS

SEQ ID NO: 53598 - protein, 11 aa, Homo sapiens
  Table A; Target 53598; HLA-A*25:01; NPSR1; ENSG00000187258; TAA
EQRSQDSRMTF

SEQ ID NO: 53599 - protein, 11 aa, Homo sapiens
  Table A; Target 53599; HLA-B*15:01; NPSR1; ENSG00000187258; TAA
EQRSQDSRMTF

SEQ ID NO: 53600 - protein, 8 aa, Homo sapiens
  Table A; Target 53600; HLA-A*25:01; NPSR1; ENSG00000187258; TAA
ETVTFTEV

SEQ ID NO: 53601 - protein, 8 aa, Homo sapiens
  Table A; Target 53601; HLA-A*26:01; NPSR1; ENSG00000187258; TAA
ETVTFTEV

SEQ ID NO: 53602 - protein, 8 aa, Homo sapiens
  Table A; Target 53602; HLA-A*68:02; NPSR1; ENSG00000187258; TAA
ETVTFTEV

SEQ ID NO: 53603 - protein, 9 aa, Homo sapiens
  Table A; Target 53603; HLA-A*25:01; NPSR1; ENSG00000187258; TAA
ETVTFTEVV

SEQ ID NO: 53604 - protein, 9 aa, Homo sapiens
  Table A; Target 53604; HLA-A*26:01; NPSR1; ENSG00000187258; TAA
ETVTFTEVV

SEQ ID NO: 53605 - protein, 9 aa, Homo sapiens
  Table A; Target 53605; HLA-A*68:01; NPSR1; ENSG00000187258; TAA
ETVTFTEVV

SEQ ID NO: 53606 - protein, 9 aa, Homo sapiens
  Table A; Target 53606; HLA-A*68:02; NPSR1; ENSG00000187258; TAA
ETVTFTEVV

SEQ ID NO: 53607 - protein, 11 aa, Homo sapiens
  Table A; Target 53607; HLA-A*26:01; NPSR1; ENSG00000187258; TAA
ETVTFTEVVEG

SEQ ID NO: 53608 - protein, 8 aa, Homo sapiens
  Table A; Target 53608; HLA-A*25:01; NPSR1; ENSG00000187258; TAA
EVVEGKEW

SEQ ID NO: 53609 - protein, 11 aa, Homo sapiens
  Table A; Target 53609; HLA-A*25:01; NPSR1; ENSG00000187258; TAA
EVVEGKEWGSF

SEQ ID NO: 53610 - protein, 11 aa, Homo sapiens
  Table A; Target 53610; HLA-A*26:01; NPSR1; ENSG00000187258; TAA
EVVEGKEWGSF

SEQ ID NO: 53611 - protein, 9 aa, Homo sapiens
  Table A; Target 53611; HLA-A*24:02; NPSR1; ENSG00000187258; TAA
EWGSFYYSF

SEQ ID NO: 53612 - protein, 10 aa, Homo sapiens
  Table A; Target 53612; HLA-A*30:01; NPSR1; ENSG00000187258; TAA
FDSSGTGQTL

SEQ ID NO: 53613 - protein, 10 aa, Homo sapiens
  Table A; Target 53613; HLA-B*27:05; NPSR1; ENSG00000187258; TAA
FDSSGTGQTL

SEQ ID NO: 53614 - protein, 10 aa, Homo sapiens
  Table A; Target 53614; HLA-B*38:01; NPSR1; ENSG00000187258; TAA
FDSSGTGQTL

SEQ ID NO: 53615 - protein, 10 aa, Homo sapiens
  Table A; Target 53615; HLA-B*39:01; NPSR1; ENSG00000187258; TAA
FDSSGTGQTL

SEQ ID NO: 53616 - protein, 10 aa, Homo sapiens
  Table A; Target 53616; HLA-B*40:01; NPSR1; ENSG00000187258; TAA
FDSSGTGQTL

SEQ ID NO: 53617 - protein, 10 aa, Homo sapiens
  Table A; Target 53617; HLA-B*40:02; NPSR1; ENSG00000187258; TAA
FDSSGTGQTL

SEQ ID NO: 53618 - protein, 10 aa, Homo sapiens
  Table A; Target 53618; HLA-C*03:03; NPSR1; ENSG00000187258; TAA
FDSSGTGQTL

SEQ ID NO: 53619 - protein, 10 aa, Homo sapiens
  Table A; Target 53619; HLA-C*03:04; NPSR1; ENSG00000187258; TAA
FDSSGTGQTL

SEQ ID NO: 53620 - protein, 10 aa, Homo sapiens
  Table A; Target 53620; HLA-C*04:01; NPSR1; ENSG00000187258; TAA
FDSSGTGQTL

SEQ ID NO: 53621 - protein, 10 aa, Homo sapiens
  Table A; Target 53621; HLA-C*07:02; NPSR1; ENSG00000187258; TAA
FDSSGTGQTL

SEQ ID NO: 53622 - protein, 10 aa, Homo sapiens
  Table A; Target 53622; HLA-C*12:03; NPSR1; ENSG00000187258; TAA
FDSSGTGQTL

SEQ ID NO: 53623 - protein, 10 aa, Homo sapiens
  Table A; Target 53623; HLA-C*16:02; NPSR1; ENSG00000187258; TAA
FDSSGTGQTL

SEQ ID NO: 53624 - protein, 9 aa, Homo sapiens
  Table A; Target 53624; HLA-A*02:07; NPSR1; ENSG00000187258; TAA
FIPLTIISI

SEQ ID NO: 53625 - protein, 9 aa, Homo sapiens
  Table A; Target 53625; HLA-A*68:02; NPSR1; ENSG00000187258; TAA
FIPLTIISI

SEQ ID NO: 53626 - protein, 9 aa, Homo sapiens
  Table A; Target 53626; HLA-B*13:02; NPSR1; ENSG00000187258; TAA
FIPLTIISI

SEQ ID NO: 53627 - protein, 9 aa, Homo sapiens
  Table A; Target 53627; HLA-B*51:01; NPSR1; ENSG00000187258; TAA
FIPLTIISI

SEQ ID NO: 53628 - protein, 9 aa, Homo sapiens
  Table A; Target 53628; HLA-B*54:01; NPSR1; ENSG00000187258; TAA
FIPLTIISI

SEQ ID NO: 53629 - protein, 9 aa, Homo sapiens
  Table A; Target 53629; HLA-C*01:02; NPSR1; ENSG00000187258; TAA
FIPLTIISI

SEQ ID NO: 53630 - protein, 9 aa, Homo sapiens
  Table A; Target 53630; HLA-B*15:03; NPSR1; ENSG00000187258; TAA
FKTEQLITL

SEQ ID NO: 53631 - protein, 9 aa, Homo sapiens
  Table A; Target 53631; HLA-A*02:01; NPSR1; ENSG00000187258; TAA
FLFDILDNF

SEQ ID NO: 53632 - protein, 9 aa, Homo sapiens
  Table A; Target 53632; HLA-A*02:03; NPSR1; ENSG00000187258; TAA
FLFDILDNF

SEQ ID NO: 53633 - protein, 9 aa, Homo sapiens
  Table A; Target 53633; HLA-A*02:04; NPSR1; ENSG00000187258; TAA
FLFDILDNF

SEQ ID NO: 53634 - protein, 9 aa, Homo sapiens
  Table A; Target 53634; HLA-A*02:07; NPSR1; ENSG00000187258; TAA
FLFDILDNF

SEQ ID NO: 53635 - protein, 9 aa, Homo sapiens
  Table A; Target 53635; HLA-A*29:02; NPSR1; ENSG00000187258; TAA
FLFDILDNF

SEQ ID NO: 53636 - protein, 9 aa, Homo sapiens
  Table A; Target 53636; HLA-A*68:02; NPSR1; ENSG00000187258; TAA
FLFDILDNF

SEQ ID NO: 53637 - protein, 9 aa, Homo sapiens
  Table A; Target 53637; HLA-C*02:02; NPSR1; ENSG00000187258; TAA
FLFDILDNF

SEQ ID NO: 53638 - protein, 11 aa, Homo sapiens
  Table A; Target 53638; HLA-A*02:01; NPSR1; ENSG00000187258; TAA
FLFDILDNFNL

SEQ ID NO: 53639 - protein, 11 aa, Homo sapiens
  Table A; Target 53639; HLA-A*02:04; NPSR1; ENSG00000187258; TAA
FLFDILDNFNL

SEQ ID NO: 53640 - protein, 11 aa, Homo sapiens
  Table A; Target 53640; HLA-A*02:07; NPSR1; ENSG00000187258; TAA
FLFDILDNFNL

SEQ ID NO: 53641 - protein, 8 aa, Homo sapiens
  Table A; Target 53641; HLA-A*02:01; NPSR1; ENSG00000187258; TAA
FLFSIPTL

SEQ ID NO: 53642 - protein, 8 aa, Homo sapiens
  Table A; Target 53642; HLA-A*02:03; NPSR1; ENSG00000187258; TAA
FLFSIPTL

SEQ ID NO: 53643 - protein, 8 aa, Homo sapiens
  Table A; Target 53643; HLA-A*02:04; NPSR1; ENSG00000187258; TAA
FLFSIPTL

SEQ ID NO: 53644 - protein, 8 aa, Homo sapiens
  Table A; Target 53644; HLA-A*02:07; NPSR1; ENSG00000187258; TAA
FLFSIPTL

SEQ ID NO: 53645 - protein, 8 aa, Homo sapiens
  Table A; Target 53645; HLA-B*51:01; NPSR1; ENSG00000187258; TAA
FLFSIPTL

SEQ ID NO: 53646 - protein, 8 aa, Homo sapiens
  Table A; Target 53646; HLA-C*02:02; NPSR1; ENSG00000187258; TAA
FLFSIPTL

SEQ ID NO: 53647 - protein, 8 aa, Homo sapiens
  Table A; Target 53647; HLA-C*03:03; NPSR1; ENSG00000187258; TAA
FLFSIPTL

SEQ ID NO: 53648 - protein, 8 aa, Homo sapiens
  Table A; Target 53648; HLA-C*03:04; NPSR1; ENSG00000187258; TAA
FLFSIPTL

SEQ ID NO: 53649 - protein, 9 aa, Homo sapiens
  Table A; Target 53649; HLA-A*02:01; NPSR1; ENSG00000187258; TAA
FLFSIPTLI

SEQ ID NO: 53650 - protein, 9 aa, Homo sapiens
  Table A; Target 53650; HLA-A*02:03; NPSR1; ENSG00000187258; TAA
FLFSIPTLI

SEQ ID NO: 53651 - protein, 9 aa, Homo sapiens
  Table A; Target 53651; HLA-A*02:04; NPSR1; ENSG00000187258; TAA
FLFSIPTLI

SEQ ID NO: 53652 - protein, 9 aa, Homo sapiens
  Table A; Target 53652; HLA-A*02:07; NPSR1; ENSG00000187258; TAA
FLFSIPTLI

SEQ ID NO: 53653 - protein, 9 aa, Homo sapiens
  Table A; Target 53653; HLA-A*23:01; NPSR1; ENSG00000187258; TAA
FLFSIPTLI

SEQ ID NO: 53654 - protein, 9 aa, Homo sapiens
  Table A; Target 53654; HLA-A*29:02; NPSR1; ENSG00000187258; TAA
FLFSIPTLI

SEQ ID NO: 53655 - protein, 9 aa, Homo sapiens
  Table A; Target 53655; HLA-A*68:02; NPSR1; ENSG00000187258; TAA
FLFSIPTLI

SEQ ID NO: 53656 - protein, 9 aa, Homo sapiens
  Table A; Target 53656; HLA-B*13:02; NPSR1; ENSG00000187258; TAA
FLFSIPTLI

SEQ ID NO: 53657 - protein, 9 aa, Homo sapiens
  Table A; Target 53657; HLA-C*02:02; NPSR1; ENSG00000187258; TAA
FLFSIPTLI

SEQ ID NO: 53658 - protein, 10 aa, Homo sapiens
  Table A; Target 53658; HLA-A*02:03; NPSR1; ENSG00000187258; TAA
FLFSIPTLII

SEQ ID NO: 53659 - protein, 10 aa, Homo sapiens
  Table A; Target 53659; HLA-A*02:04; NPSR1; ENSG00000187258; TAA
FLFSIPTLII

SEQ ID NO: 53660 - protein, 11 aa, Homo sapiens
  Table A; Target 53660; HLA-A*02:04; NPSR1; ENSG00000187258; TAA
FLFSIPTLIIF

SEQ ID NO: 53661 - protein, 11 aa, Homo sapiens
  Table A; Target 53661; HLA-A*02:07; NPSR1; ENSG00000187258; TAA
FLFSIPTLIIF

SEQ ID NO: 53662 - protein, 10 aa, Homo sapiens
  Table A; Target 53662; HLA-A*02:03; NPSR1; ENSG00000187258; TAA
FLQGEKQARV

SEQ ID NO: 53663 - protein, 9 aa, Homo sapiens
  Table A; Target 53663; HLA-A*23:01; NPSR1; ENSG00000187258; TAA
FSIPTLIIF

SEQ ID NO: 53664 - protein, 9 aa, Homo sapiens
  Table A; Target 53664; HLA-B*46:01; NPSR1; ENSG00000187258; TAA
FSIPTLIIF

SEQ ID NO: 53665 - protein, 9 aa, Homo sapiens
  Table A; Target 53665; HLA-B*57:01; NPSR1; ENSG00000187258; TAA
FSIPTLIIF

SEQ ID NO: 53666 - protein, 9 aa, Homo sapiens
  Table A; Target 53666; HLA-C*02:02; NPSR1; ENSG00000187258; TAA
FSIPTLIIF

SEQ ID NO: 53667 - protein, 9 aa, Homo sapiens
  Table A; Target 53667; HLA-C*03:04; NPSR1; ENSG00000187258; TAA
FSIPTLIIF

SEQ ID NO: 53668 - protein, 9 aa, Homo sapiens
  Table A; Target 53668; HLA-A*01:01; NPSR1; ENSG00000187258; TAA
FTAPDLVCR

SEQ ID NO: 53669 - protein, 9 aa, Homo sapiens
  Table A; Target 53669; HLA-A*11:01; NPSR1; ENSG00000187258; TAA
FTAPDLVCR

SEQ ID NO: 53670 - protein, 9 aa, Homo sapiens
  Table A; Target 53670; HLA-A*31:01; NPSR1; ENSG00000187258; TAA
FTAPDLVCR

SEQ ID NO: 53671 - protein, 9 aa, Homo sapiens
  Table A; Target 53671; HLA-A*33:01; NPSR1; ENSG00000187258; TAA
FTAPDLVCR

SEQ ID NO: 53672 - protein, 9 aa, Homo sapiens
  Table A; Target 53672; HLA-A*33:03; NPSR1; ENSG00000187258; TAA
FTAPDLVCR

SEQ ID NO: 53673 - protein, 9 aa, Homo sapiens
  Table A; Target 53673; HLA-A*68:01; NPSR1; ENSG00000187258; TAA
FTAPDLVCR

SEQ ID NO: 53674 - protein, 9 aa, Homo sapiens
  Table A; Target 53674; HLA-A*68:02; NPSR1; ENSG00000187258; TAA
FTAPDLVCR

SEQ ID NO: 53675 - protein, 9 aa, Homo sapiens
  Table A; Target 53675; HLA-B*27:05; NPSR1; ENSG00000187258; TAA
FTAPDLVCR

SEQ ID NO: 53676 - protein, 9 aa, Homo sapiens
  Table A; Target 53676; HLA-C*02:02; NPSR1; ENSG00000187258; TAA
FTAPDLVCR

SEQ ID NO: 53677 - protein, 9 aa, Homo sapiens
  Table A; Target 53677; HLA-C*07:06; NPSR1; ENSG00000187258; TAA
FTAPDLVCR

SEQ ID NO: 53678 - protein, 10 aa, Homo sapiens
  Table A; Target 53678; HLA-A*02:01; NPSR1; ENSG00000187258; TAA
FTAPDLVCRV

SEQ ID NO: 53679 - protein, 10 aa, Homo sapiens
  Table A; Target 53679; HLA-A*02:03; NPSR1; ENSG00000187258; TAA
FTAPDLVCRV

SEQ ID NO: 53680 - protein, 10 aa, Homo sapiens
  Table A; Target 53680; HLA-A*68:02; NPSR1; ENSG00000187258; TAA
FTAPDLVCRV

SEQ ID NO: 53681 - protein, 10 aa, Homo sapiens
  Table A; Target 53681; HLA-A*01:01; NPSR1; ENSG00000187258; TAA
FTEVVEGKEW

SEQ ID NO: 53682 - protein, 10 aa, Homo sapiens
  Table A; Target 53682; HLA-A*25:01; NPSR1; ENSG00000187258; TAA
FTEVVEGKEW

SEQ ID NO: 53683 - protein, 10 aa, Homo sapiens
  Table A; Target 53683; HLA-B*57:01; NPSR1; ENSG00000187258; TAA
FTEVVEGKEW

SEQ ID NO: 53684 - protein, 11 aa, Homo sapiens
  Table A; Target 53684; HLA-A*68:02; NPSR1; ENSG00000187258; TAA
FTGDFTAPDLV

SEQ ID NO: 53685 - protein, 8 aa, Homo sapiens
  Table A; Target 53685; HLA-C*03:04; NPSR1; ENSG00000187258; TAA
FTGLVNIL

SEQ ID NO: 53686 - protein, 8 aa, Homo sapiens
  Table A; Target 53686; HLA-C*07:04; NPSR1; ENSG00000187258; TAA
FTGLVNIL

SEQ ID NO: 53687 - protein, 8 aa, Homo sapiens
  Table A; Target 53687; HLA-C*12:03; NPSR1; ENSG00000187258; TAA
FTGLVNIL

SEQ ID NO: 53688 - protein, 8 aa, Homo sapiens
  Table A; Target 53688; HLA-B*08:01; NPSR1; ENSG00000187258; TAA
FTIVGNSV

SEQ ID NO: 53689 - protein, 8 aa, Homo sapiens
  Table A; Target 53689; HLA-B*40:02; NPSR1; ENSG00000187258; TAA
FTIVGNSV

SEQ ID NO: 53690 - protein, 8 aa, Homo sapiens
  Table A; Target 53690; HLA-B*46:01; NPSR1; ENSG00000187258; TAA
FTIVGNSV

SEQ ID NO: 53691 - protein, 8 aa, Homo sapiens
  Table A; Target 53691; HLA-B*51:01; NPSR1; ENSG00000187258; TAA
FTIVGNSV

SEQ ID NO: 53692 - protein, 8 aa, Homo sapiens
  Table A; Target 53692; HLA-C*01:02; NPSR1; ENSG00000187258; TAA
FTIVGNSV

SEQ ID NO: 53693 - protein, 8 aa, Homo sapiens
  Table A; Target 53693; HLA-C*02:02; NPSR1; ENSG00000187258; TAA
FTIVGNSV

SEQ ID NO: 53694 - protein, 8 aa, Homo sapiens
  Table A; Target 53694; HLA-C*03:03; NPSR1; ENSG00000187258; TAA
FTIVGNSV

SEQ ID NO: 53695 - protein, 8 aa, Homo sapiens
  Table A; Target 53695; HLA-C*03:04; NPSR1; ENSG00000187258; TAA
FTIVGNSV

SEQ ID NO: 53696 - protein, 8 aa, Homo sapiens
  Table A; Target 53696; HLA-C*05:01; NPSR1; ENSG00000187258; TAA
FTIVGNSV

SEQ ID NO: 53697 - protein, 8 aa, Homo sapiens
  Table A; Target 53697; HLA-C*12:03; NPSR1; ENSG00000187258; TAA
FTIVGNSV

SEQ ID NO: 53698 - protein, 8 aa, Homo sapiens
  Table A; Target 53698; HLA-C*14:02; NPSR1; ENSG00000187258; TAA
FTIVGNSV

SEQ ID NO: 53699 - protein, 8 aa, Homo sapiens
  Table A; Target 53699; HLA-C*16:04; NPSR1; ENSG00000187258; TAA
FTIVGNSV

SEQ ID NO: 53700 - protein, 9 aa, Homo sapiens
  Table A; Target 53700; HLA-A*01:01; NPSR1; ENSG00000187258; TAA
FTIVGNSVV

SEQ ID NO: 53701 - protein, 9 aa, Homo sapiens
  Table A; Target 53701; HLA-A*26:01; NPSR1; ENSG00000187258; TAA
FTIVGNSVV

SEQ ID NO: 53702 - protein, 9 aa, Homo sapiens
  Table A; Target 53702; HLA-A*68:02; NPSR1; ENSG00000187258; TAA
FTIVGNSVV

SEQ ID NO: 53703 - protein, 9 aa, Homo sapiens
  Table A; Target 53703; HLA-B*46:01; NPSR1; ENSG00000187258; TAA
FTIVGNSVV

SEQ ID NO: 53704 - protein, 9 aa, Homo sapiens
  Table A; Target 53704; HLA-B*49:01; NPSR1; ENSG00000187258; TAA
FTIVGNSVV

SEQ ID NO: 53705 - protein, 9 aa, Homo sapiens
  Table A; Target 53705; HLA-C*01:02; NPSR1; ENSG00000187258; TAA
FTIVGNSVV

SEQ ID NO: 53706 - protein, 9 aa, Homo sapiens
  Table A; Target 53706; HLA-C*02:02; NPSR1; ENSG00000187258; TAA
FTIVGNSVV

SEQ ID NO: 53707 - protein, 9 aa, Homo sapiens
  Table A; Target 53707; HLA-C*03:03; NPSR1; ENSG00000187258; TAA
FTIVGNSVV

SEQ ID NO: 53708 - protein, 9 aa, Homo sapiens
  Table A; Target 53708; HLA-C*03:04; NPSR1; ENSG00000187258; TAA
FTIVGNSVV

SEQ ID NO: 53709 - protein, 9 aa, Homo sapiens
  Table A; Target 53709; HLA-C*05:01; NPSR1; ENSG00000187258; TAA
FTIVGNSVV

SEQ ID NO: 53710 - protein, 10 aa, Homo sapiens
  Table A; Target 53710; HLA-C*03:03; NPSR1; ENSG00000187258; TAA
FTIVGNSVVL

SEQ ID NO: 53711 - protein, 10 aa, Homo sapiens
  Table A; Target 53711; HLA-C*03:04; NPSR1; ENSG00000187258; TAA
FTIVGNSVVL

SEQ ID NO: 53712 - protein, 10 aa, Homo sapiens
  Table A; Target 53712; HLA-A*02:01; NPSR1; ENSG00000187258; TAA
FVFTIVGNSV

SEQ ID NO: 53713 - protein, 10 aa, Homo sapiens
  Table A; Target 53713; HLA-A*02:03; NPSR1; ENSG00000187258; TAA
FVFTIVGNSV

SEQ ID NO: 53714 - protein, 10 aa, Homo sapiens
  Table A; Target 53714; HLA-A*02:04; NPSR1; ENSG00000187258; TAA
FVFTIVGNSV

SEQ ID NO: 53715 - protein, 10 aa, Homo sapiens
  Table A; Target 53715; HLA-A*02:07; NPSR1; ENSG00000187258; TAA
FVFTIVGNSV

SEQ ID NO: 53716 - protein, 10 aa, Homo sapiens
  Table A; Target 53716; HLA-A*25:01; NPSR1; ENSG00000187258; TAA
FVFTIVGNSV

SEQ ID NO: 53717 - protein, 10 aa, Homo sapiens
  Table A; Target 53717; HLA-A*26:01; NPSR1; ENSG00000187258; TAA
FVFTIVGNSV

SEQ ID NO: 53718 - protein, 10 aa, Homo sapiens
  Table A; Target 53718; HLA-A*68:02; NPSR1; ENSG00000187258; TAA
FVFTIVGNSV

SEQ ID NO: 53719 - protein, 10 aa, Homo sapiens
  Table A; Target 53719; HLA-B*13:02; NPSR1; ENSG00000187258; TAA
FVFTIVGNSV

SEQ ID NO: 53720 - protein, 10 aa, Homo sapiens
  Table A; Target 53720; HLA-B*51:01; NPSR1; ENSG00000187258; TAA
FVFTIVGNSV

SEQ ID NO: 53721 - protein, 10 aa, Homo sapiens
  Table A; Target 53721; HLA-B*54:01; NPSR1; ENSG00000187258; TAA
FVFTIVGNSV

SEQ ID NO: 53722 - protein, 10 aa, Homo sapiens
  Table A; Target 53722; HLA-C*02:02; NPSR1; ENSG00000187258; TAA
FVFTIVGNSV

SEQ ID NO: 53723 - protein, 10 aa, Homo sapiens
  Table A; Target 53723; HLA-C*03:04; NPSR1; ENSG00000187258; TAA
FVFTIVGNSV

SEQ ID NO: 53724 - protein, 11 aa, Homo sapiens
  Table A; Target 53724; HLA-A*68:02; NPSR1; ENSG00000187258; TAA
FVFTIVGNSVV

SEQ ID NO: 53725 - protein, 11 aa, Homo sapiens
  Table A; Target 53725; HLA-A*26:01; NPSR1; ENSG00000187258; TAA
FVTQLAITDSF

SEQ ID NO: 53726 - protein, 10 aa, Homo sapiens
  Table A; Target 53726; HLA-A*23:01; NPSR1; ENSG00000187258; TAA
FYASVIIQNL

SEQ ID NO: 53727 - protein, 10 aa, Homo sapiens
  Table A; Target 53727; HLA-A*24:02; NPSR1; ENSG00000187258; TAA
FYASVIIQNL

SEQ ID NO: 53728 - protein, 10 aa, Homo sapiens
  Table A; Target 53728; HLA-A*33:03; NPSR1; ENSG00000187258; TAA
FYASVIIQNL

SEQ ID NO: 53729 - protein, 10 aa, Homo sapiens
  Table A; Target 53729; HLA-A*68:02; NPSR1; ENSG00000187258; TAA
FYASVIIQNL

SEQ ID NO: 53730 - protein, 10 aa, Homo sapiens
  Table A; Target 53730; HLA-A*24:02; NPSR1; ENSG00000187258; TAA
FYYSFKTEQL

SEQ ID NO: 53731 - protein, 8 aa, Homo sapiens
  Table A; Target 53731; HLA-A*30:01; NPSR1; ENSG00000187258; TAA
GDFTAPDL

SEQ ID NO: 53732 - protein, 8 aa, Homo sapiens
  Table A; Target 53732; HLA-B*37:01; NPSR1; ENSG00000187258; TAA
GDFTAPDL

SEQ ID NO: 53733 - protein, 8 aa, Homo sapiens
  Table A; Target 53733; HLA-B*40:02; NPSR1; ENSG00000187258; TAA
GDFTAPDL

SEQ ID NO: 53734 - protein, 11 aa, Homo sapiens
  Table A; Target 53734; HLA-A*31:01; NPSR1; ENSG00000187258; TAA
GDFTAPDLVCR

SEQ ID NO: 53735 - protein, 11 aa, Homo sapiens
  Table A; Target 53735; HLA-B*27:02; NPSR1; ENSG00000187258; TAA
GDFTAPDLVCR

SEQ ID NO: 53736 - protein, 9 aa, Homo sapiens
  Table A; Target 53736; HLA-B*49:01; NPSR1; ENSG00000187258; TAA
GEKQARVLI

SEQ ID NO: 53737 - protein, 9 aa, Homo sapiens
  Table A; Target 53737; HLA-B*44:02; NPSR1; ENSG00000187258; TAA
GEVQCWALW

SEQ ID NO: 53738 - protein, 9 aa, Homo sapiens
  Table A; Target 53738; HLA-B*44:03; NPSR1; ENSG00000187258; TAA
GEVQCWALW

SEQ ID NO: 53739 - protein, 9 aa, Homo sapiens
  Table A; Target 53739; HLA-A*03:01; NPSR1; ENSG00000187258; TAA
GLISKAKIK

SEQ ID NO: 53740 - protein, 9 aa, Homo sapiens
  Table A; Target 53740; HLA-A*03:02; NPSR1; ENSG00000187258; TAA
GLISKAKIK

SEQ ID NO: 53741 - protein, 11 aa, Homo sapiens
  Table A; Target 53741; HLA-A*02:03; NPSR1; ENSG00000187258; TAA
GLISKAKIKAI

SEQ ID NO: 53742 - protein, 9 aa, Homo sapiens
  Table A; Target 53742; HLA-A*02:01; NPSR1; ENSG00000187258; TAA
GLVNILTDI

SEQ ID NO: 53743 - protein, 9 aa, Homo sapiens
  Table A; Target 53743; HLA-A*02:03; NPSR1; ENSG00000187258; TAA
GLVNILTDI

SEQ ID NO: 53744 - protein, 9 aa, Homo sapiens
  Table A; Target 53744; HLA-A*02:04; NPSR1; ENSG00000187258; TAA
GLVNILTDI

SEQ ID NO: 53745 - protein, 9 aa, Homo sapiens
  Table A; Target 53745; HLA-B*13:02; NPSR1; ENSG00000187258; TAA
GLVNILTDI

SEQ ID NO: 53746 - protein, 10 aa, Homo sapiens
  Table A; Target 53746; HLA-A*25:01; NPSR1; ENSG00000187258; TAA
GNSVVLFSTW

SEQ ID NO: 53747 - protein, 10 aa, Homo sapiens
  Table A; Target 53747; HLA-B*44:02; NPSR1; ENSG00000187258; TAA
GNSVVLFSTW

SEQ ID NO: 53748 - protein, 9 aa, Homo sapiens
  Table A; Target 53748; HLA-B*13:02; NPSR1; ENSG00000187258; TAA
GQTLDSSPV

SEQ ID NO: 53749 - protein, 9 aa, Homo sapiens
  Table A; Target 53749; HLA-B*35:01; NPSR1; ENSG00000187258; TAA
HAIVYPMKF

SEQ ID NO: 53750 - protein, 9 aa, Homo sapiens
  Table A; Target 53750; HLA-B*57:01; NPSR1; ENSG00000187258; TAA
HAIVYPMKF

SEQ ID NO: 53751 - protein, 9 aa, Homo sapiens
  Table A; Target 53751; HLA-C*02:02; NPSR1; ENSG00000187258; TAA
HAIVYPMKF

SEQ ID NO: 53752 - protein, 9 aa, Homo sapiens
  Table A; Target 53752; HLA-C*12:03; NPSR1; ENSG00000187258; TAA
HAIVYPMKF

SEQ ID NO: 53753 - protein, 8 aa, Homo sapiens
  Table A; Target 53753; HLA-B*18:01; NPSR1; ENSG00000187258; TAA
HEMQILSK

SEQ ID NO: 53754 - protein, 9 aa, Homo sapiens
  Table A; Target 53754; HLA-B*49:01; NPSR1; ENSG00000187258; TAA
HEMQILSKP

SEQ ID NO: 53755 - protein, 9 aa, Homo sapiens
  Table A; Target 53755; HLA-A*29:02; NPSR1; ENSG00000187258; TAA
IAWSLSFLF

SEQ ID NO: 53756 - protein, 9 aa, Homo sapiens
  Table A; Target 53756; HLA-B*57:01; NPSR1; ENSG00000187258; TAA
IAWSLSFLF

SEQ ID NO: 53757 - protein, 8 aa, Homo sapiens
  Table A; Target 53757; HLA-B*08:01; NPSR1; ENSG00000187258; TAA
IIFGKRTL

SEQ ID NO: 53758 - protein, 8 aa, Homo sapiens
  Table A; Target 53758; HLA-A*02:04; NPSR1; ENSG00000187258; TAA
IIQNLPAL

SEQ ID NO: 53759 - protein, 8 aa, Homo sapiens
  Table A; Target 53759; HLA-A*23:01; NPSR1; ENSG00000187258; TAA
IIQNLPAL

SEQ ID NO: 53760 - protein, 8 aa, Homo sapiens
  Table A; Target 53760; HLA-B*46:01; NPSR1; ENSG00000187258; TAA
IIQNLPAL

SEQ ID NO: 53761 - protein, 8 aa, Homo sapiens
  Table A; Target 53761; HLA-C*01:02; NPSR1; ENSG00000187258; TAA
IIQNLPAL

SEQ ID NO: 53762 - protein, 8 aa, Homo sapiens
  Table A; Target 53762; HLA-C*03:03; NPSR1; ENSG00000187258; TAA
IIQNLPAL

SEQ ID NO: 53763 - protein, 8 aa, Homo sapiens
  Table A; Target 53763; HLA-C*03:04; NPSR1; ENSG00000187258; TAA
IIQNLPAL

SEQ ID NO: 53764 - protein, 8 aa, Homo sapiens
  Table A; Target 53764; HLA-C*14:02; NPSR1; ENSG00000187258; TAA
IIQNLPAL

SEQ ID NO: 53765 - protein, 8 aa, Homo sapiens
  Table A; Target 53765; HLA-C*16:01; NPSR1; ENSG00000187258; TAA
IIQNLPAL

SEQ ID NO: 53766 - protein, 8 aa, Homo sapiens
  Table A; Target 53766; HLA-C*16:02; NPSR1; ENSG00000187258; TAA
IIQNLPAL

SEQ ID NO: 53767 - protein, 8 aa, Homo sapiens
  Table A; Target 53767; HLA-A*02:07; NPSR1; ENSG00000187258; TAA
ILDNFNLL

SEQ ID NO: 53768 - protein, 8 aa, Homo sapiens
  Table A; Target 53768; HLA-C*05:01; NPSR1; ENSG00000187258; TAA
ILDNFNLL

SEQ ID NO: 53769 - protein, 9 aa, Homo sapiens
  Table A; Target 53769; HLA-A*02:01; NPSR1; ENSG00000187258; TAA
ILTDINWRF

SEQ ID NO: 53770 - protein, 9 aa, Homo sapiens
  Table A; Target 53770; HLA-A*02:04; NPSR1; ENSG00000187258; TAA
ILTDINWRF

SEQ ID NO: 53771 - protein, 9 aa, Homo sapiens
  Table A; Target 53771; HLA-A*02:07; NPSR1; ENSG00000187258; TAA
ILTDINWRF

SEQ ID NO: 53772 - protein, 9 aa, Homo sapiens
  Table A; Target 53772; HLA-A*23:01; NPSR1; ENSG00000187258; TAA
ILTDINWRF

SEQ ID NO: 53773 - protein, 9 aa, Homo sapiens
  Table A; Target 53773; HLA-A*24:02; NPSR1; ENSG00000187258; TAA
ILTDINWRF

SEQ ID NO: 53774 - protein, 9 aa, Homo sapiens
  Table A; Target 53774; HLA-A*29:02; NPSR1; ENSG00000187258; TAA
ILTDINWRF

SEQ ID NO: 53775 - protein, 9 aa, Homo sapiens
  Table A; Target 53775; HLA-A*02:03; NPSR1; ENSG00000187258; TAA
IMYGIVIRT

SEQ ID NO: 53776 - protein, 10 aa, Homo sapiens
  Table A; Target 53776; HLA-A*02:03; NPSR1; ENSG00000187258; TAA
IMYGIVIRTI

SEQ ID NO: 53777 - protein, 8 aa, Homo sapiens
  Table A; Target 53777; HLA-A*23:01; NPSR1; ENSG00000187258; TAA
IPLTIISI

SEQ ID NO: 53778 - protein, 8 aa, Homo sapiens
  Table A; Target 53778; HLA-B*08:01; NPSR1; ENSG00000187258; TAA
IPLTIISI

SEQ ID NO: 53779 - protein, 8 aa, Homo sapiens
  Table A; Target 53779; HLA-B*35:01; NPSR1; ENSG00000187258; TAA
IPLTIISI

SEQ ID NO: 53780 - protein, 8 aa, Homo sapiens
  Table A; Target 53780; HLA-B*35:03; NPSR1; ENSG00000187258; TAA
IPLTIISI

SEQ ID NO: 53781 - protein, 8 aa, Homo sapiens
  Table A; Target 53781; HLA-B*51:01; NPSR1; ENSG00000187258; TAA
IPLTIISI

SEQ ID NO: 53782 - protein, 8 aa, Homo sapiens
  Table A; Target 53782; HLA-B*54:01; NPSR1; ENSG00000187258; TAA
IPLTIISI

SEQ ID NO: 53783 - protein, 8 aa, Homo sapiens
  Table A; Target 53783; HLA-B*56:01; NPSR1; ENSG00000187258; TAA
IPLTIISI

SEQ ID NO: 53784 - protein, 9 aa, Homo sapiens
  Table A; Target 53784; HLA-B*07:02; NPSR1; ENSG00000187258; TAA
IPLTIISIM

SEQ ID NO: 53785 - protein, 9 aa, Homo sapiens
  Table A; Target 53785; HLA-B*35:01; NPSR1; ENSG00000187258; TAA
IPLTIISIM

SEQ ID NO: 53786 - protein, 9 aa, Homo sapiens
  Table A; Target 53786; HLA-B*35:03; NPSR1; ENSG00000187258; TAA
IPLTIISIM

SEQ ID NO: 53787 - protein, 9 aa, Homo sapiens
  Table A; Target 53787; HLA-B*51:01; NPSR1; ENSG00000187258; TAA
IPLTIISIM

SEQ ID NO: 53788 - protein, 9 aa, Homo sapiens
  Table A; Target 53788; HLA-B*54:01; NPSR1; ENSG00000187258; TAA
IPLTIISIM

SEQ ID NO: 53789 - protein, 9 aa, Homo sapiens
  Table A; Target 53789; HLA-B*56:01; NPSR1; ENSG00000187258; TAA
IPLTIISIM

SEQ ID NO: 53790 - protein, 9 aa, Homo sapiens
  Table A; Target 53790; HLA-C*07:02; NPSR1; ENSG00000187258; TAA
IPLTIISIM

SEQ ID NO: 53791 - protein, 10 aa, Homo sapiens
  Table A; Target 53791; HLA-A*23:01; NPSR1; ENSG00000187258; TAA
IPLTIISIMY

SEQ ID NO: 53792 - protein, 10 aa, Homo sapiens
  Table A; Target 53792; HLA-A*29:02; NPSR1; ENSG00000187258; TAA
IPLTIISIMY

SEQ ID NO: 53793 - protein, 10 aa, Homo sapiens
  Table A; Target 53793; HLA-B*35:01; NPSR1; ENSG00000187258; TAA
IPLTIISIMY

SEQ ID NO: 53794 - protein, 9 aa, Homo sapiens
  Table A; Target 53794; HLA-B*27:02; NPSR1; ENSG00000187258; TAA
IPTLIIFGK

SEQ ID NO: 53795 - protein, 9 aa, Homo sapiens
  Table A; Target 53795; HLA-B*54:01; NPSR1; ENSG00000187258; TAA
IPTLIIFGK

SEQ ID NO: 53796 - protein, 9 aa, Homo sapiens
  Table A; Target 53796; HLA-B*56:01; NPSR1; ENSG00000187258; TAA
IPTLIIFGK

SEQ ID NO: 53797 - protein, 9 aa, Homo sapiens
  Table A; Target 53797; HLA-A*31:01; NPSR1; ENSG00000187258; TAA
ISFPCREQR

SEQ ID NO: 53798 - protein, 9 aa, Homo sapiens
  Table A; Target 53798; HLA-B*57:01; NPSR1; ENSG00000187258; TAA
ISFPCREQR

SEQ ID NO: 53799 - protein, 9 aa, Homo sapiens
  Table A; Target 53799; HLA-B*08:01; NPSR1; ENSG00000187258; TAA
ISKAKIKAI

SEQ ID NO: 53800 - protein, 8 aa, Homo sapiens
  Table A; Target 53800; HLA-A*02:07; NPSR1; ENSG00000187258; TAA
ITDSFTGL

SEQ ID NO: 53801 - protein, 8 aa, Homo sapiens
  Table A; Target 53801; HLA-B*39:01; NPSR1; ENSG00000187258; TAA
ITDSFTGL

SEQ ID NO: 53802 - protein, 8 aa, Homo sapiens
  Table A; Target 53802; HLA-C*03:03; NPSR1; ENSG00000187258; TAA
ITDSFTGL

SEQ ID NO: 53803 - protein, 8 aa, Homo sapiens
  Table A; Target 53803; HLA-C*03:04; NPSR1; ENSG00000187258; TAA
ITDSFTGL

SEQ ID NO: 53804 - protein, 8 aa, Homo sapiens
  Table A; Target 53804; HLA-C*04:01; NPSR1; ENSG00000187258; TAA
ITDSFTGL

SEQ ID NO: 53805 - protein, 8 aa, Homo sapiens
  Table A; Target 53805; HLA-C*05:01; NPSR1; ENSG00000187258; TAA
ITDSFTGL

SEQ ID NO: 53806 - protein, 9 aa, Homo sapiens
  Table A; Target 53806; HLA-A*01:01; NPSR1; ENSG00000187258; TAA
ITDSFTGLV

SEQ ID NO: 53807 - protein, 9 aa, Homo sapiens
  Table A; Target 53807; HLA-A*68:02; NPSR1; ENSG00000187258; TAA
ITDSFTGLV

SEQ ID NO: 53808 - protein, 9 aa, Homo sapiens
  Table A; Target 53808; HLA-C*05:01; NPSR1; ENSG00000187258; TAA
ITDSFTGLV

SEQ ID NO: 53809 - protein, 10 aa, Homo sapiens
  Table A; Target 53809; HLA-A*01:01; NPSR1; ENSG00000187258; TAA
ITDSFTGLVN

SEQ ID NO: 53810 - protein, 11 aa, Homo sapiens
  Table A; Target 53810; HLA-A*02:01; NPSR1; ENSG00000187258; TAA
ITDSFTGLVNI

SEQ ID NO: 53811 - protein, 11 aa, Homo sapiens
  Table A; Target 53811; HLA-A*02:07; NPSR1; ENSG00000187258; TAA
ITDSFTGLVNI

SEQ ID NO: 53812 - protein, 11 aa, Homo sapiens
  Table A; Target 53812; HLA-A*68:02; NPSR1; ENSG00000187258; TAA
ITDSFTGLVNI

SEQ ID NO: 53813 - protein, 11 aa, Homo sapiens
  Table A; Target 53813; HLA-C*05:01; NPSR1; ENSG00000187258; TAA
ITDSFTGLVNI

SEQ ID NO: 53814 - protein, 9 aa, Homo sapiens
  Table A; Target 53814; HLA-B*57:01; NPSR1; ENSG00000187258; TAA
ITLWVLFVF

SEQ ID NO: 53815 - protein, 9 aa, Homo sapiens
  Table A; Target 53815; HLA-A*68:02; NPSR1; ENSG00000187258; TAA
IVAFLVYFI

SEQ ID NO: 53816 - protein, 8 aa, Homo sapiens
  Table A; Target 53816; HLA-C*07:04; NPSR1; ENSG00000187258; TAA
IVGNSVVL

SEQ ID NO: 53817 - protein, 9 aa, Homo sapiens
  Table A; Target 53817; HLA-A*23:01; NPSR1; ENSG00000187258; TAA
IVGNSVVLF

SEQ ID NO: 53818 - protein, 9 aa, Homo sapiens
  Table A; Target 53818; HLA-A*24:02; NPSR1; ENSG00000187258; TAA
IVGNSVVLF

SEQ ID NO: 53819 - protein, 9 aa, Homo sapiens
  Table A; Target 53819; HLA-A*26:01; NPSR1; ENSG00000187258; TAA
IVGNSVVLF

SEQ ID NO: 53820 - protein, 9 aa, Homo sapiens
  Table A; Target 53820; HLA-A*29:02; NPSR1; ENSG00000187258; TAA
IVGNSVVLF

SEQ ID NO: 53821 - protein, 9 aa, Homo sapiens
  Table A; Target 53821; HLA-A*32:01; NPSR1; ENSG00000187258; TAA
IVGNSVVLF

SEQ ID NO: 53822 - protein, 9 aa, Homo sapiens
  Table A; Target 53822; HLA-B*57:01; NPSR1; ENSG00000187258; TAA
IVGNSVVLF

SEQ ID NO: 53823 - protein, 9 aa, Homo sapiens
  Table A; Target 53823; HLA-C*07:04; NPSR1; ENSG00000187258; TAA
IVGNSVVLF

SEQ ID NO: 53824 - protein, 9 aa, Homo sapiens
  Table A; Target 53824; HLA-A*23:01; NPSR1; ENSG00000187258; TAA
IVIAWSLSF

SEQ ID NO: 53825 - protein, 9 aa, Homo sapiens
  Table A; Target 53825; HLA-B*57:01; NPSR1; ENSG00000187258; TAA
IVIAWSLSF

SEQ ID NO: 53826 - protein, 9 aa, Homo sapiens
  Table A; Target 53826; HLA-C*02:02; NPSR1; ENSG00000187258; TAA
KAKIKAIKY

SEQ ID NO: 53827 - protein, 10 aa, Homo sapiens
  Table A; Target 53827; HLA-B*44:02; NPSR1; ENSG00000187258; TAA
KEWGSFYYSF

SEQ ID NO: 53828 - protein, 9 aa, Homo sapiens
  Table A; Target 53828; HLA-B*08:01; NPSR1; ENSG00000187258; TAA
KIKAIKYSI

SEQ ID NO: 53829 - protein, 9 aa, Homo sapiens
  Table A; Target 53829; HLA-A*30:01; NPSR1; ENSG00000187258; TAA
KQARVLIVI

SEQ ID NO: 53830 - protein, 9 aa, Homo sapiens
  Table A; Target 53830; HLA-B*13:02; NPSR1; ENSG00000187258; TAA
KQARVLIVI

SEQ ID NO: 53831 - protein, 11 aa, Homo sapiens
  Table A; Target 53831; HLA-B*57:01; NPSR1; ENSG00000187258; TAA
KQARVLIVIAW

SEQ ID NO: 53832 - protein, 9 aa, Homo sapiens
  Table A; Target 53832; HLA-A*32:01; NPSR1; ENSG00000187258; TAA
KSKTYETVI

SEQ ID NO: 53833 - protein, 9 aa, Homo sapiens
  Table A; Target 53833; HLA-B*40:02; NPSR1; ENSG00000187258; TAA
KSKTYETVI

SEQ ID NO: 53834 - protein, 9 aa, Homo sapiens
  Table A; Target 53834; HLA-B*57:01; NPSR1; ENSG00000187258; TAA
KSKTYETVI

SEQ ID NO: 53835 - protein, 9 aa, Homo sapiens
  Table A; Target 53835; HLA-B*58:01; NPSR1; ENSG00000187258; TAA
KSKTYETVI

SEQ ID NO: 53836 - protein, 9 aa, Homo sapiens
  Table A; Target 53836; HLA-C*16:02; NPSR1; ENSG00000187258; TAA
KSKTYETVI

SEQ ID NO: 53837 - protein, 9 aa, Homo sapiens
  Table A; Target 53837; HLA-A*01:01; NPSR1; ENSG00000187258; TAA
KTEQLITLW

SEQ ID NO: 53838 - protein, 9 aa, Homo sapiens
  Table A; Target 53838; HLA-B*44:02; NPSR1; ENSG00000187258; TAA
KTEQLITLW

SEQ ID NO: 53839 - protein, 9 aa, Homo sapiens
  Table A; Target 53839; HLA-B*57:01; NPSR1; ENSG00000187258; TAA
KTEQLITLW

SEQ ID NO: 53840 - protein, 9 aa, Homo sapiens
  Table A; Target 53840; HLA-B*58:01; NPSR1; ENSG00000187258; TAA
KTEQLITLW

SEQ ID NO: 53841 - protein, 9 aa, Homo sapiens
  Table A; Target 53841; HLA-A*03:01; NPSR1; ENSG00000187258; TAA
KTYETVISN

SEQ ID NO: 53842 - protein, 9 aa, Homo sapiens
  Table A; Target 53842; HLA-A*11:01; NPSR1; ENSG00000187258; TAA
KTYETVISN

SEQ ID NO: 53843 - protein, 9 aa, Homo sapiens
  Table A; Target 53843; HLA-A*31:01; NPSR1; ENSG00000187258; TAA
KTYETVISN

SEQ ID NO: 53844 - protein, 9 aa, Homo sapiens
  Table A; Target 53844; HLA-B*40:02; NPSR1; ENSG00000187258; TAA
KTYETVISN

SEQ ID NO: 53845 - protein, 9 aa, Homo sapiens
  Table A; Target 53845; HLA-C*12:03; NPSR1; ENSG00000187258; TAA
KTYETVISN

SEQ ID NO: 53846 - protein, 10 aa, Homo sapiens
  Table A; Target 53846; HLA-A*02:03; NPSR1; ENSG00000187258; TAA
KTYETVISNC

SEQ ID NO: 53847 - protein, 10 aa, Homo sapiens
  Table A; Target 53847; HLA-A*03:01; NPSR1; ENSG00000187258; TAA
KTYETVISNC

SEQ ID NO: 53848 - protein, 10 aa, Homo sapiens
  Table A; Target 53848; HLA-A*03:02; NPSR1; ENSG00000187258; TAA
KTYETVISNC

SEQ ID NO: 53849 - protein, 10 aa, Homo sapiens
  Table A; Target 53849; HLA-A*24:02; NPSR1; ENSG00000187258; TAA
KYSIIIILAF

SEQ ID NO: 53850 - protein, 10 aa, Homo sapiens
  Table A; Target 53850; HLA-C*02:02; NPSR1; ENSG00000187258; TAA
LAITDSFTGL

SEQ ID NO: 53851 - protein, 10 aa, Homo sapiens
  Table A; Target 53851; HLA-C*03:03; NPSR1; ENSG00000187258; TAA
LAITDSFTGL

SEQ ID NO: 53852 - protein, 10 aa, Homo sapiens
  Table A; Target 53852; HLA-C*03:04; NPSR1; ENSG00000187258; TAA
LAITDSFTGL

SEQ ID NO: 53853 - protein, 8 aa, Homo sapiens
  Table A; Target 53853; HLA-C*04:01; NPSR1; ENSG00000187258; TAA
LFDILDNF

SEQ ID NO: 53854 - protein, 9 aa, Homo sapiens
  Table A; Target 53854; HLA-A*02:07; NPSR1; ENSG00000187258; TAA
LLPDTQERF

SEQ ID NO: 53855 - protein, 9 aa, Homo sapiens
  Table A; Target 53855; HLA-A*24:02; NPSR1; ENSG00000187258; TAA
LLPDTQERF

SEQ ID NO: 53856 - protein, 9 aa, Homo sapiens
  Table A; Target 53856; HLA-A*29:02; NPSR1; ENSG00000187258; TAA
LLPDTQERF

SEQ ID NO: 53857 - protein, 10 aa, Homo sapiens
  Table A; Target 53857; HLA-A*29:02; NPSR1; ENSG00000187258; TAA
LLPDTQERFY

SEQ ID NO: 53858 - protein, 11 aa, Homo sapiens
  Table A; Target 53858; HLA-A*02:01; NPSR1; ENSG00000187258; TAA
LLPDTQERFYA

SEQ ID NO: 53859 - protein, 11 aa, Homo sapiens
  Table A; Target 53859; HLA-A*02:07; NPSR1; ENSG00000187258; TAA
LLPDTQERFYA

SEQ ID NO: 53860 - protein, 9 aa, Homo sapiens
  Table A; Target 53860; HLA-A*02:01; NPSR1; ENSG00000187258; TAA
LLYASTYVL

SEQ ID NO: 53861 - protein, 9 aa, Homo sapiens
  Table A; Target 53861; HLA-A*02:04; NPSR1; ENSG00000187258; TAA
LLYASTYVL

SEQ ID NO: 53862 - protein, 9 aa, Homo sapiens
  Table A; Target 53862; HLA-C*14:02; NPSR1; ENSG00000187258; TAA
LLYASTYVL

SEQ ID NO: 53863 - protein, 10 aa, Homo sapiens
  Table A; Target 53863; HLA-A*02:03; NPSR1; ENSG00000187258; TAA
LLYASTYVLV

SEQ ID NO: 53864 - protein, 10 aa, Homo sapiens
  Table A; Target 53864; HLA-A*02:07; NPSR1; ENSG00000187258; TAA
LLYASTYVLV

SEQ ID NO: 53865 - protein, 10 aa, Homo sapiens
  Table A; Target 53865; HLA-A*29:02; NPSR1; ENSG00000187258; TAA
LNSAINPLIY

SEQ ID NO: 53866 - protein, 8 aa, Homo sapiens
  Table A; Target 53866; HLA-B*07:02; NPSR1; ENSG00000187258; TAA
LPALNSAI

SEQ ID NO: 53867 - protein, 8 aa, Homo sapiens
  Table A; Target 53867; HLA-B*35:03; NPSR1; ENSG00000187258; TAA
LPALNSAI

SEQ ID NO: 53868 - protein, 8 aa, Homo sapiens
  Table A; Target 53868; HLA-B*51:01; NPSR1; ENSG00000187258; TAA
LPALNSAI

SEQ ID NO: 53869 - protein, 11 aa, Homo sapiens
  Table A; Target 53869; HLA-B*07:02; NPSR1; ENSG00000187258; TAA
LPALNSAINPL

SEQ ID NO: 53870 - protein, 11 aa, Homo sapiens
  Table A; Target 53870; HLA-B*35:03; NPSR1; ENSG00000187258; TAA
LPALNSAINPL

SEQ ID NO: 53871 - protein, 8 aa, Homo sapiens
  Table A; Target 53871; HLA-B*55:01; NPSR1; ENSG00000187258; TAA
LPDTQERF

SEQ ID NO: 53872 - protein, 8 aa, Homo sapiens
  Table A; Target 53872; HLA-C*03:03; NPSR1; ENSG00000187258; TAA
LPDTQERF

SEQ ID NO: 53873 - protein, 8 aa, Homo sapiens
  Table A; Target 53873; HLA-C*05:01; NPSR1; ENSG00000187258; TAA
LPDTQERF

SEQ ID NO: 53874 - protein, 9 aa, Homo sapiens
  Table A; Target 53874; HLA-A*01:01; NPSR1; ENSG00000187258; TAA
LPDTQERFY

SEQ ID NO: 53875 - protein, 9 aa, Homo sapiens
  Table A; Target 53875; HLA-B*35:01; NPSR1; ENSG00000187258; TAA
LPDTQERFY

SEQ ID NO: 53876 - protein, 9 aa, Homo sapiens
  Table A; Target 53876; HLA-B*51:01; NPSR1; ENSG00000187258; TAA
LPDTQERFY

SEQ ID NO: 53877 - protein, 9 aa, Homo sapiens
  Table A; Target 53877; HLA-B*55:01; NPSR1; ENSG00000187258; TAA
LPDTQERFY

SEQ ID NO: 53878 - protein, 9 aa, Homo sapiens
  Table A; Target 53878; HLA-C*03:03; NPSR1; ENSG00000187258; TAA
LPDTQERFY

SEQ ID NO: 53879 - protein, 10 aa, Homo sapiens
  Table A; Target 53879; HLA-B*57:01; NPSR1; ENSG00000187258; TAA
LSFLFSIPTL

SEQ ID NO: 53880 - protein, 9 aa, Homo sapiens
  Table A; Target 53880; HLA-A*24:02; NPSR1; ENSG00000187258; TAA
LSIDRYHAI

SEQ ID NO: 53881 - protein, 11 aa, Homo sapiens
  Table A; Target 53881; HLA-A*01:01; NPSR1; ENSG00000187258; TAA
LSIDRYHAIVY

SEQ ID NO: 53882 - protein, 9 aa, Homo sapiens
  Table A; Target 53882; HLA-A*25:01; NPSR1; ENSG00000187258; TAA
LSNGEVQCW

SEQ ID NO: 53883 - protein, 9 aa, Homo sapiens
  Table A; Target 53883; HLA-A*32:01; NPSR1; ENSG00000187258; TAA
LSNGEVQCW

SEQ ID NO: 53884 - protein, 9 aa, Homo sapiens
  Table A; Target 53884; HLA-A*33:03; NPSR1; ENSG00000187258; TAA
LSNGEVQCW

SEQ ID NO: 53885 - protein, 9 aa, Homo sapiens
  Table A; Target 53885; HLA-B*57:01; NPSR1; ENSG00000187258; TAA
LSNGEVQCW

SEQ ID NO: 53886 - protein, 9 aa, Homo sapiens
  Table A; Target 53886; HLA-B*58:01; NPSR1; ENSG00000187258; TAA
LSNGEVQCW

SEQ ID NO: 53887 - protein, 9 aa, Homo sapiens
  Table A; Target 53887; HLA-C*16:04; NPSR1; ENSG00000187258; TAA
LSNGEVQCW

SEQ ID NO: 53888 - protein, 10 aa, Homo sapiens
  Table A; Target 53888; HLA-B*57:01; NPSR1; ENSG00000187258; TAA
LVNILTDINW

SEQ ID NO: 53889 - protein, 9 aa, Homo sapiens
  Table A; Target 53889; HLA-A*01:01; NPSR1; ENSG00000187258; TAA
LVSLSIDRY

SEQ ID NO: 53890 - protein, 9 aa, Homo sapiens
  Table A; Target 53890; HLA-A*29:02; NPSR1; ENSG00000187258; TAA
LVSLSIDRY

SEQ ID NO: 53891 - protein, 9 aa, Homo sapiens
  Table A; Target 53891; HLA-A*30:02; NPSR1; ENSG00000187258; TAA
LVSLSIDRY

SEQ ID NO: 53892 - protein, 9 aa, Homo sapiens
  Table A; Target 53892; HLA-B*15:01; NPSR1; ENSG00000187258; TAA
LVSLSIDRY

SEQ ID NO: 53893 - protein, 9 aa, Homo sapiens
  Table A; Target 53893; HLA-B*58:01; NPSR1; ENSG00000187258; TAA
LVSLSIDRY

SEQ ID NO: 53894 - protein, 9 aa, Homo sapiens
  Table A; Target 53894; HLA-C*16:01; NPSR1; ENSG00000187258; TAA
LVSLSIDRY

SEQ ID NO: 53895 - protein, 9 aa, Homo sapiens
  Table A; Target 53895; HLA-A*02:03; NPSR1; ENSG00000187258; TAA
LVYFIPLTI

SEQ ID NO: 53896 - protein, 9 aa, Homo sapiens
  Table A; Target 53896; HLA-A*68:02; NPSR1; ENSG00000187258; TAA
LVYFIPLTI

SEQ ID NO: 53897 - protein, 9 aa, Homo sapiens
  Table A; Target 53897; HLA-B*13:02; NPSR1; ENSG00000187258; TAA
LVYFIPLTI

SEQ ID NO: 53898 - protein, 9 aa, Homo sapiens
  Table A; Target 53898; HLA-B*51:01; NPSR1; ENSG00000187258; TAA
LVYFIPLTI

SEQ ID NO: 53899 - protein, 9 aa, Homo sapiens
  Table A; Target 53899; HLA-C*02:02; NPSR1; ENSG00000187258; TAA
LVYFIPLTI

SEQ ID NO: 53900 - protein, 9 aa, Homo sapiens
  Table A; Target 53900; HLA-A*24:02; NPSR1; ENSG00000187258; TAA
LWVLFVFTI

SEQ ID NO: 53901 - protein, 8 aa, Homo sapiens
  Table A; Target 53901; HLA-A*23:01; NPSR1; ENSG00000187258; TAA
LYASTYVL

SEQ ID NO: 53902 - protein, 8 aa, Homo sapiens
  Table A; Target 53902; HLA-A*24:02; NPSR1; ENSG00000187258; TAA
LYASTYVL

SEQ ID NO: 53903 - protein, 8 aa, Homo sapiens
  Table A; Target 53903; HLA-C*14:02; NPSR1; ENSG00000187258; TAA
LYASTYVL

SEQ ID NO: 53904 - protein, 9 aa, Homo sapiens
  Table A; Target 53904; HLA-A*23:01; NPSR1; ENSG00000187258; TAA
LYASTYVLV

SEQ ID NO: 53905 - protein, 9 aa, Homo sapiens
  Table A; Target 53905; HLA-A*24:02; NPSR1; ENSG00000187258; TAA
LYASTYVLV

SEQ ID NO: 53906 - protein, 11 aa, Homo sapiens
  Table A; Target 53906; HLA-A*24:02; NPSR1; ENSG00000187258; TAA
LYASTYVLVSL

SEQ ID NO: 53907 - protein, 10 aa, Homo sapiens
  Table A; Target 53907; HLA-A*25:01; NPSR1; ENSG00000187258; TAA
MPANFTEGSF

SEQ ID NO: 53908 - protein, 10 aa, Homo sapiens
  Table A; Target 53908; HLA-B*35:01; NPSR1; ENSG00000187258; TAA
MPANFTEGSF

SEQ ID NO: 53909 - protein, 10 aa, Homo sapiens
  Table A; Target 53909; HLA-B*35:03; NPSR1; ENSG00000187258; TAA
MPANFTEGSF

SEQ ID NO: 53910 - protein, 10 aa, Homo sapiens
  Table A; Target 53910; HLA-B*55:01; NPSR1; ENSG00000187258; TAA
MPANFTEGSF

SEQ ID NO: 53911 - protein, 9 aa, Homo sapiens
  Table A; Target 53911; HLA-B*15:01; NPSR1; ENSG00000187258; TAA
MQILSKPEF

SEQ ID NO: 53912 - protein, 9 aa, Homo sapiens
  Table A; Target 53912; HLA-B*15:03; NPSR1; ENSG00000187258; TAA
MQILSKPEF

SEQ ID NO: 53913 - protein, 8 aa, Homo sapiens
  Table A; Target 53913; HLA-A*68:02; NPSR1; ENSG00000187258; TAA
MTFFVTQL

SEQ ID NO: 53914 - protein, 8 aa, Homo sapiens
  Table A; Target 53914; HLA-B*18:01; NPSR1; ENSG00000187258; TAA
MTFFVTQL

SEQ ID NO: 53915 - protein, 9 aa, Homo sapiens
  Table A; Target 53915; HLA-A*68:02; NPSR1; ENSG00000187258; TAA
MTFFVTQLA

SEQ ID NO: 53916 - protein, 10 aa, Homo sapiens
  Table A; Target 53916; HLA-A*68:02; NPSR1; ENSG00000187258; TAA
MTFFVTQLAI

SEQ ID NO: 53917 - protein, 9 aa, Homo sapiens
  Table A; Target 53917; HLA-A*01:01; NPSR1; ENSG00000187258; TAA
MTIVAFLVY

SEQ ID NO: 53918 - protein, 9 aa, Homo sapiens
  Table A; Target 53918; HLA-A*25:01; NPSR1; ENSG00000187258; TAA
MTIVAFLVY

SEQ ID NO: 53919 - protein, 9 aa, Homo sapiens
  Table A; Target 53919; HLA-A*29:02; NPSR1; ENSG00000187258; TAA
MTIVAFLVY

SEQ ID NO: 53920 - protein, 9 aa, Homo sapiens
  Table A; Target 53920; HLA-B*57:01; NPSR1; ENSG00000187258; TAA
MTIVAFLVY

SEQ ID NO: 53921 - protein, 9 aa, Homo sapiens
  Table A; Target 53921; HLA-A*23:01; NPSR1; ENSG00000187258; TAA
MYGIVIRTI

SEQ ID NO: 53922 - protein, 9 aa, Homo sapiens
  Table A; Target 53922; HLA-A*24:02; NPSR1; ENSG00000187258; TAA
MYGIVIRTI

SEQ ID NO: 53923 - protein, 10 aa, Homo sapiens
  Table A; Target 53923; HLA-A*24:02; NPSR1; ENSG00000187258; TAA
MYGIVIRTIW

SEQ ID NO: 53924 - protein, 9 aa, Homo sapiens
  Table A; Target 53924; HLA-A*33:01; NPSR1; ENSG00000187258; TAA
NLLPDTQER

SEQ ID NO: 53925 - protein, 9 aa, Homo sapiens
  Table A; Target 53925; HLA-A*33:03; NPSR1; ENSG00000187258; TAA
NLLPDTQER

SEQ ID NO: 53926 - protein, 10 aa, Homo sapiens
  Table A; Target 53926; HLA-A*29:02; NPSR1; ENSG00000187258; TAA
NLLPDTQERF

SEQ ID NO: 53927 - protein, 11 aa, Homo sapiens
  Table A; Target 53927; HLA-A*29:02; NPSR1; ENSG00000187258; TAA
NLLPDTQERFY

SEQ ID NO: 53928 - protein, 11 aa, Homo sapiens
  Table A; Target 53928; HLA-A*30:02; NPSR1; ENSG00000187258; TAA
NLLPDTQERFY

SEQ ID NO: 53929 - protein, 9 aa, Homo sapiens
  Table A; Target 53929; HLA-A*02:07; NPSR1; ENSG00000187258; TAA
NLPALNSAI

SEQ ID NO: 53930 - protein, 9 aa, Homo sapiens
  Table A; Target 53930; HLA-C*01:02; NPSR1; ENSG00000187258; TAA
NLPALNSAI

SEQ ID NO: 53931 - protein, 9 aa, Homo sapiens
  Table A; Target 53931; HLA-B*27:05; NPSR1; ENSG00000187258; TAA
NRGLISKAK

SEQ ID NO: 53932 - protein, 9 aa, Homo sapiens
  Table A; Target 53932; HLA-A*01:01; NPSR1; ENSG00000187258; TAA
NSAINPLIY

SEQ ID NO: 53933 - protein, 9 aa, Homo sapiens
  Table A; Target 53933; HLA-A*26:01; NPSR1; ENSG00000187258; TAA
NSAINPLIY

SEQ ID NO: 53934 - protein, 9 aa, Homo sapiens
  Table A; Target 53934; HLA-A*29:02; NPSR1; ENSG00000187258; TAA
NSAINPLIY

SEQ ID NO: 53935 - protein, 9 aa, Homo sapiens
  Table A; Target 53935; HLA-A*30:02; NPSR1; ENSG00000187258; TAA
NSAINPLIY

SEQ ID NO: 53936 - protein, 9 aa, Homo sapiens
  Table A; Target 53936; HLA-B*15:03; NPSR1; ENSG00000187258; TAA
NSAINPLIY

SEQ ID NO: 53937 - protein, 9 aa, Homo sapiens
  Table A; Target 53937; HLA-B*18:01; NPSR1; ENSG00000187258; TAA
NSAINPLIY

SEQ ID NO: 53938 - protein, 9 aa, Homo sapiens
  Table A; Target 53938; HLA-B*35:01; NPSR1; ENSG00000187258; TAA
NSAINPLIY

SEQ ID NO: 53939 - protein, 9 aa, Homo sapiens
  Table A; Target 53939; HLA-B*58:01; NPSR1; ENSG00000187258; TAA
NSAINPLIY

SEQ ID NO: 53940 - protein, 9 aa, Homo sapiens
  Table A; Target 53940; HLA-C*02:02; NPSR1; ENSG00000187258; TAA
NSAINPLIY

SEQ ID NO: 53941 - protein, 9 aa, Homo sapiens
  Table A; Target 53941; HLA-C*07:01; NPSR1; ENSG00000187258; TAA
NSAINPLIY

SEQ ID NO: 53942 - protein, 9 aa, Homo sapiens
  Table A; Target 53942; HLA-C*07:04; NPSR1; ENSG00000187258; TAA
NSAINPLIY

SEQ ID NO: 53943 - protein, 9 aa, Homo sapiens
  Table A; Target 53943; HLA-C*12:03; NPSR1; ENSG00000187258; TAA
NSAINPLIY

SEQ ID NO: 53944 - protein, 9 aa, Homo sapiens
  Table A; Target 53944; HLA-C*16:01; NPSR1; ENSG00000187258; TAA
NSAINPLIY

SEQ ID NO: 53945 - protein, 9 aa, Homo sapiens
  Table A; Target 53945; HLA-C*16:02; NPSR1; ENSG00000187258; TAA
NSAINPLIY

SEQ ID NO: 53946 - protein, 9 aa, Homo sapiens
  Table A; Target 53946; HLA-A*25:01; NPSR1; ENSG00000187258; TAA
NSVVLFSTW

SEQ ID NO: 53947 - protein, 9 aa, Homo sapiens
  Table A; Target 53947; HLA-B*44:02; NPSR1; ENSG00000187258; TAA
NSVVLFSTW

SEQ ID NO: 53948 - protein, 9 aa, Homo sapiens
  Table A; Target 53948; HLA-B*44:03; NPSR1; ENSG00000187258; TAA
NSVVLFSTW

SEQ ID NO: 53949 - protein, 9 aa, Homo sapiens
  Table A; Target 53949; HLA-B*57:01; NPSR1; ENSG00000187258; TAA
NSVVLFSTW

SEQ ID NO: 53950 - protein, 9 aa, Homo sapiens
  Table A; Target 53950; HLA-B*58:01; NPSR1; ENSG00000187258; TAA
NSVVLFSTW

SEQ ID NO: 53951 - protein, 11 aa, Homo sapiens
  Table A; Target 53951; HLA-A*24:02; NPSR1; ENSG00000187258; TAA
PYFLFDILDNF

SEQ ID NO: 53952 - protein, 8 aa, Homo sapiens
  Table A; Target 53952; HLA-A*23:01; NPSR1; ENSG00000187258; TAA
PYMTIVAF

SEQ ID NO: 53953 - protein, 8 aa, Homo sapiens
  Table A; Target 53953; HLA-A*24:02; NPSR1; ENSG00000187258; TAA
PYMTIVAF

SEQ ID NO: 53954 - protein, 9 aa, Homo sapiens
  Table A; Target 53954; HLA-A*23:01; NPSR1; ENSG00000187258; TAA
PYMTIVAFL

SEQ ID NO: 53955 - protein, 9 aa, Homo sapiens
  Table A; Target 53955; HLA-A*24:02; NPSR1; ENSG00000187258; TAA
PYMTIVAFL

SEQ ID NO: 53956 - protein, 8 aa, Homo sapiens
  Table A; Target 53956; HLA-B*51:01; NPSR1; ENSG00000187258; TAA
QARVLIVI

SEQ ID NO: 53957 - protein, 10 aa, Homo sapiens
  Table A; Target 53957; HLA-B*57:01; NPSR1; ENSG00000187258; TAA
QARVLIVIAW

SEQ ID NO: 53958 - protein, 9 aa, Homo sapiens
  Table A; Target 53958; HLA-B*49:01; NPSR1; ENSG00000187258; TAA
QERFYASVI

SEQ ID NO: 53959 - protein, 9 aa, Homo sapiens
  Table A; Target 53959; HLA-C*03:04; NPSR1; ENSG00000187258; TAA
QGEKQARVL

SEQ ID NO: 53960 - protein, 9 aa, Homo sapiens
  Table A; Target 53960; HLA-B*13:02; NPSR1; ENSG00000187258; TAA
QILSKPEFI

SEQ ID NO: 53961 - protein, 8 aa, Homo sapiens
  Table A; Target 53961; HLA-A*02:04; NPSR1; ENSG00000187258; TAA
QLITLWVL

SEQ ID NO: 53962 - protein, 10 aa, Homo sapiens
  Table A; Target 53962; HLA-B*27:02; NPSR1; ENSG00000187258; TAA
QRSQDSRMTF

SEQ ID NO: 53963 - protein, 10 aa, Homo sapiens
  Table A; Target 53963; HLA-B*27:05; NPSR1; ENSG00000187258; TAA
QRSQDSRMTF

SEQ ID NO: 53964 - protein, 10 aa, Homo sapiens
  Table A; Target 53964; HLA-B*38:01; NPSR1; ENSG00000187258; TAA
QRSQDSRMTF

SEQ ID NO: 53965 - protein, 10 aa, Homo sapiens
  Table A; Target 53965; HLA-C*16:04; NPSR1; ENSG00000187258; TAA
QRSQDSRMTF

SEQ ID NO: 53966 - protein, 9 aa, Homo sapiens
  Table A; Target 53966; HLA-B*39:01; NPSR1; ENSG00000187258; TAA
QTLDSSPVA

SEQ ID NO: 53967 - protein, 10 aa, Homo sapiens
  Table A; Target 53967; HLA-A*25:01; NPSR1; ENSG00000187258; TAA
QVVLLYASTY

SEQ ID NO: 53968 - protein, 10 aa, Homo sapiens
  Table A; Target 53968; HLA-A*26:01; NPSR1; ENSG00000187258; TAA
QVVLLYASTY

SEQ ID NO: 53969 - protein, 10 aa, Homo sapiens
  Table A; Target 53969; HLA-A*30:02; NPSR1; ENSG00000187258; TAA
QVVLLYASTY

SEQ ID NO: 53970 - protein, 10 aa, Homo sapiens
  Table A; Target 53970; HLA-B*15:01; NPSR1; ENSG00000187258; TAA
QVVLLYASTY

SEQ ID NO: 53971 - protein, 10 aa, Homo sapiens
  Table A; Target 53971; HLA-B*35:01; NPSR1; ENSG00000187258; TAA
QVVLLYASTY

SEQ ID NO: 53972 - protein, 10 aa, Homo sapiens
  Table A; Target 53972; HLA-C*07:01; NPSR1; ENSG00000187258; TAA
QVVLLYASTY

SEQ ID NO: 53973 - protein, 9 aa, Homo sapiens
  Table A; Target 53973; HLA-A*02:01; NPSR1; ENSG00000187258; TAA
RMTFFVTQL

SEQ ID NO: 53974 - protein, 9 aa, Homo sapiens
  Table A; Target 53974; HLA-A*02:03; NPSR1; ENSG00000187258; TAA
RMTFFVTQL

SEQ ID NO: 53975 - protein, 9 aa, Homo sapiens
  Table A; Target 53975; HLA-A*02:04; NPSR1; ENSG00000187258; TAA
RMTFFVTQL

SEQ ID NO: 53976 - protein, 9 aa, Homo sapiens
  Table A; Target 53976; HLA-A*02:07; NPSR1; ENSG00000187258; TAA
RMTFFVTQL

SEQ ID NO: 53977 - protein, 9 aa, Homo sapiens
  Table A; Target 53977; HLA-A*23:01; NPSR1; ENSG00000187258; TAA
RMTFFVTQL

SEQ ID NO: 53978 - protein, 9 aa, Homo sapiens
  Table A; Target 53978; HLA-A*24:02; NPSR1; ENSG00000187258; TAA
RMTFFVTQL

SEQ ID NO: 53979 - protein, 9 aa, Homo sapiens
  Table A; Target 53979; HLA-A*30:02; NPSR1; ENSG00000187258; TAA
RSQDSRMTF

SEQ ID NO: 53980 - protein, 9 aa, Homo sapiens
  Table A; Target 53980; HLA-A*31:01; NPSR1; ENSG00000187258; TAA
RSQDSRMTF

SEQ ID NO: 53981 - protein, 9 aa, Homo sapiens
  Table A; Target 53981; HLA-A*32:01; NPSR1; ENSG00000187258; TAA
RSQDSRMTF

SEQ ID NO: 53982 - protein, 9 aa, Homo sapiens
  Table A; Target 53982; HLA-B*07:02; NPSR1; ENSG00000187258; TAA
RSQDSRMTF

SEQ ID NO: 53983 - protein, 9 aa, Homo sapiens
  Table A; Target 53983; HLA-B*15:01; NPSR1; ENSG00000187258; TAA
RSQDSRMTF

SEQ ID NO: 53984 - protein, 9 aa, Homo sapiens
  Table A; Target 53984; HLA-B*46:01; NPSR1; ENSG00000187258; TAA
RSQDSRMTF

SEQ ID NO: 53985 - protein, 9 aa, Homo sapiens
  Table A; Target 53985; HLA-B*57:01; NPSR1; ENSG00000187258; TAA
RSQDSRMTF

SEQ ID NO: 53986 - protein, 9 aa, Homo sapiens
  Table A; Target 53986; HLA-B*58:01; NPSR1; ENSG00000187258; TAA
RSQDSRMTF

SEQ ID NO: 53987 - protein, 9 aa, Homo sapiens
  Table A; Target 53987; HLA-C*03:04; NPSR1; ENSG00000187258; TAA
RSQDSRMTF

SEQ ID NO: 53988 - protein, 9 aa, Homo sapiens
  Table A; Target 53988; HLA-C*07:02; NPSR1; ENSG00000187258; TAA
RSQDSRMTF

SEQ ID NO: 53989 - protein, 9 aa, Homo sapiens
  Table A; Target 53989; HLA-C*12:03; NPSR1; ENSG00000187258; TAA
RSQDSRMTF

SEQ ID NO: 53990 - protein, 9 aa, Homo sapiens
  Table A; Target 53990; HLA-C*16:01; NPSR1; ENSG00000187258; TAA
RSQDSRMTF

SEQ ID NO: 53991 - protein, 9 aa, Homo sapiens
  Table A; Target 53991; HLA-C*16:02; NPSR1; ENSG00000187258; TAA
RSQDSRMTF

SEQ ID NO: 53992 - protein, 10 aa, Homo sapiens
  Table A; Target 53992; HLA-A*31:01; NPSR1; ENSG00000187258; TAA
RSQDSRMTFR

SEQ ID NO: 53993 - protein, 10 aa, Homo sapiens
  Table A; Target 53993; HLA-B*57:01; NPSR1; ENSG00000187258; TAA
RTIWIKSKTY

SEQ ID NO: 53994 - protein, 11 aa, Homo sapiens
  Table A; Target 53994; HLA-A*25:01; NPSR1; ENSG00000187258; TAA
RTLSNGEVQCW

SEQ ID NO: 53995 - protein, 11 aa, Homo sapiens
  Table A; Target 53995; HLA-A*32:01; NPSR1; ENSG00000187258; TAA
RTLSNGEVQCW

SEQ ID NO: 53996 - protein, 11 aa, Homo sapiens
  Table A; Target 53996; HLA-B*44:03; NPSR1; ENSG00000187258; TAA
RTLSNGEVQCW

SEQ ID NO: 53997 - protein, 11 aa, Homo sapiens
  Table A; Target 53997; HLA-B*57:01; NPSR1; ENSG00000187258; TAA
RTLSNGEVQCW

SEQ ID NO: 53998 - protein, 11 aa, Homo sapiens
  Table A; Target 53998; HLA-B*58:01; NPSR1; ENSG00000187258; TAA
RTLSNGEVQCW

SEQ ID NO: 53999 - protein, 11 aa, Homo sapiens
  Table A; Target 53999; HLA-C*16:04; NPSR1; ENSG00000187258; TAA
RTLSNGEVQCW

SEQ ID NO: 54000 - protein, 8 aa, Homo sapiens
  Table A; Target 54000; HLA-B*57:01; NPSR1; ENSG00000187258; TAA
RVLIVIAW

SEQ ID NO: 54001 - protein, 8 aa, Homo sapiens
  Table A; Target 54001; HLA-A*23:01; NPSR1; ENSG00000187258; TAA
RYLQVVLL

SEQ ID NO: 54002 - protein, 8 aa, Homo sapiens
  Table A; Target 54002; HLA-A*24:02; NPSR1; ENSG00000187258; TAA
RYLQVVLL

SEQ ID NO: 54003 - protein, 9 aa, Homo sapiens
  Table A; Target 54003; HLA-A*23:01; NPSR1; ENSG00000187258; TAA
RYLQVVLLY

SEQ ID NO: 54004 - protein, 9 aa, Homo sapiens
  Table A; Target 54004; HLA-A*24:02; NPSR1; ENSG00000187258; TAA
RYLQVVLLY

SEQ ID NO: 54005 - protein, 9 aa, Homo sapiens
  Table A; Target 54005; HLA-A*29:02; NPSR1; ENSG00000187258; TAA
RYLQVVLLY

SEQ ID NO: 54006 - protein, 9 aa, Homo sapiens
  Table A; Target 54006; HLA-A*30:02; NPSR1; ENSG00000187258; TAA
RYLQVVLLY

SEQ ID NO: 54007 - protein, 9 aa, Homo sapiens
  Table A; Target 54007; HLA-B*57:01; NPSR1; ENSG00000187258; TAA
RYLQVVLLY

SEQ ID NO: 54008 - protein, 8 aa, Homo sapiens
  Table A; Target 54008; HLA-A*29:02; NPSR1; ENSG00000187258; TAA
SAINPLIY

SEQ ID NO: 54009 - protein, 8 aa, Homo sapiens
  Table A; Target 54009; HLA-A*30:02; NPSR1; ENSG00000187258; TAA
SAINPLIY

SEQ ID NO: 54010 - protein, 8 aa, Homo sapiens
  Table A; Target 54010; HLA-B*15:01; NPSR1; ENSG00000187258; TAA
SAINPLIY

SEQ ID NO: 54011 - protein, 8 aa, Homo sapiens
  Table A; Target 54011; HLA-B*15:03; NPSR1; ENSG00000187258; TAA
SAINPLIY

SEQ ID NO: 54012 - protein, 8 aa, Homo sapiens
  Table A; Target 54012; HLA-B*35:01; NPSR1; ENSG00000187258; TAA
SAINPLIY

SEQ ID NO: 54013 - protein, 8 aa, Homo sapiens
  Table A; Target 54013; HLA-B*39:01; NPSR1; ENSG00000187258; TAA
SAINPLIY

SEQ ID NO: 54014 - protein, 8 aa, Homo sapiens
  Table A; Target 54014; HLA-B*46:01; NPSR1; ENSG00000187258; TAA
SAINPLIY

SEQ ID NO: 54015 - protein, 8 aa, Homo sapiens
  Table A; Target 54015; HLA-B*58:01; NPSR1; ENSG00000187258; TAA
SAINPLIY

SEQ ID NO: 54016 - protein, 8 aa, Homo sapiens
  Table A; Target 54016; HLA-C*02:02; NPSR1; ENSG00000187258; TAA
SAINPLIY

SEQ ID NO: 54017 - protein, 8 aa, Homo sapiens
  Table A; Target 54017; HLA-C*03:03; NPSR1; ENSG00000187258; TAA
SAINPLIY

SEQ ID NO: 54018 - protein, 8 aa, Homo sapiens
  Table A; Target 54018; HLA-C*07:01; NPSR1; ENSG00000187258; TAA
SAINPLIY

SEQ ID NO: 54019 - protein, 8 aa, Homo sapiens
  Table A; Target 54019; HLA-C*12:03; NPSR1; ENSG00000187258; TAA
SAINPLIY

SEQ ID NO: 54020 - protein, 8 aa, Homo sapiens
  Table A; Target 54020; HLA-C*14:02; NPSR1; ENSG00000187258; TAA
SAINPLIY

SEQ ID NO: 54021 - protein, 8 aa, Homo sapiens
  Table A; Target 54021; HLA-C*16:01; NPSR1; ENSG00000187258; TAA
SAINPLIY

SEQ ID NO: 54022 - protein, 8 aa, Homo sapiens
  Table A; Target 54022; HLA-C*16:02; NPSR1; ENSG00000187258; TAA
SAINPLIY

SEQ ID NO: 54023 - protein, 8 aa, Homo sapiens
  Table A; Target 54023; HLA-C*16:04; NPSR1; ENSG00000187258; TAA
SAINPLIY

SEQ ID NO: 54024 - protein, 9 aa, Homo sapiens
  Table A; Target 54024; HLA-C*02:02; NPSR1; ENSG00000187258; TAA
SAINPLIYC

SEQ ID NO: 54025 - protein, 9 aa, Homo sapiens
  Table A; Target 54025; HLA-C*12:03; NPSR1; ENSG00000187258; TAA
SAINPLIYC

SEQ ID NO: 54026 - protein, 10 aa, Homo sapiens
  Table A; Target 54026; HLA-A*68:02; NPSR1; ENSG00000187258; TAA
SAINPLIYCV

SEQ ID NO: 54027 - protein, 9 aa, Homo sapiens
  Table A; Target 54027; HLA-A*30:02; NPSR1; ENSG00000187258; TAA
SDGKLCSSY

SEQ ID NO: 54028 - protein, 9 aa, Homo sapiens
  Table A; Target 54028; HLA-B*18:01; NPSR1; ENSG00000187258; TAA
SDGKLCSSY

SEQ ID NO: 54029 - protein, 9 aa, Homo sapiens
  Table A; Target 54029; HLA-C*07:01; NPSR1; ENSG00000187258; TAA
SDGKLCSSY

SEQ ID NO: 54030 - protein, 8 aa, Homo sapiens
  Table A; Target 54030; HLA-C*04:01; NPSR1; ENSG00000187258; TAA
SFDSSGTG

SEQ ID NO: 54031 - protein, 9 aa, Homo sapiens
  Table A; Target 54031; HLA-C*04:01; NPSR1; ENSG00000187258; TAA
SFDSSGTGQ

SEQ ID NO: 54032 - protein, 10 aa, Homo sapiens
  Table A; Target 54032; HLA-C*04:01; NPSR1; ENSG00000187258; TAA
SFDSSGTGQT

SEQ ID NO: 54033 - protein, 11 aa, Homo sapiens
  Table A; Target 54033; HLA-A*23:01; NPSR1; ENSG00000187258; TAA
SFDSSGTGQTL

SEQ ID NO: 54034 - protein, 11 aa, Homo sapiens
  Table A; Target 54034; HLA-A*30:01; NPSR1; ENSG00000187258; TAA
SFDSSGTGQTL

SEQ ID NO: 54035 - protein, 11 aa, Homo sapiens
  Table A; Target 54035; HLA-A*32:01; NPSR1; ENSG00000187258; TAA
SFDSSGTGQTL

SEQ ID NO: 54036 - protein, 11 aa, Homo sapiens
  Table A; Target 54036; HLA-B*35:01; NPSR1; ENSG00000187258; TAA
SFDSSGTGQTL

SEQ ID NO: 54037 - protein, 11 aa, Homo sapiens
  Table A; Target 54037; HLA-B*35:03; NPSR1; ENSG00000187258; TAA
SFDSSGTGQTL

SEQ ID NO: 54038 - protein, 11 aa, Homo sapiens
  Table A; Target 54038; HLA-B*38:01; NPSR1; ENSG00000187258; TAA
SFDSSGTGQTL

SEQ ID NO: 54039 - protein, 11 aa, Homo sapiens
  Table A; Target 54039; HLA-B*39:01; NPSR1; ENSG00000187258; TAA
SFDSSGTGQTL

SEQ ID NO: 54040 - protein, 11 aa, Homo sapiens
  Table A; Target 54040; HLA-B*40:01; NPSR1; ENSG00000187258; TAA
SFDSSGTGQTL

SEQ ID NO: 54041 - protein, 11 aa, Homo sapiens
  Table A; Target 54041; HLA-B*55:01; NPSR1; ENSG00000187258; TAA
SFDSSGTGQTL

SEQ ID NO: 54042 - protein, 11 aa, Homo sapiens
  Table A; Target 54042; HLA-C*01:02; NPSR1; ENSG00000187258; TAA
SFDSSGTGQTL

SEQ ID NO: 54043 - protein, 11 aa, Homo sapiens
  Table A; Target 54043; HLA-C*04:01; NPSR1; ENSG00000187258; TAA
SFDSSGTGQTL

SEQ ID NO: 54044 - protein, 11 aa, Homo sapiens
  Table A; Target 54044; HLA-C*05:01; NPSR1; ENSG00000187258; TAA
SFDSSGTGQTL

SEQ ID NO: 54045 - protein, 11 aa, Homo sapiens
  Table A; Target 54045; HLA-C*07:02; NPSR1; ENSG00000187258; TAA
SFDSSGTGQTL

SEQ ID NO: 54046 - protein, 11 aa, Homo sapiens
  Table A; Target 54046; HLA-C*07:04; NPSR1; ENSG00000187258; TAA
SFDSSGTGQTL

SEQ ID NO: 54047 - protein, 11 aa, Homo sapiens
  Table A; Target 54047; HLA-C*14:02; NPSR1; ENSG00000187258; TAA
SFDSSGTGQTL

SEQ ID NO: 54048 - protein, 11 aa, Homo sapiens
  Table A; Target 54048; HLA-B*57:01; NPSR1; ENSG00000187258; TAA
SFKTEQLITLW

SEQ ID NO: 54049 - protein, 9 aa, Homo sapiens
  Table A; Target 54049; HLA-A*02:04; NPSR1; ENSG00000187258; TAA
SFLFSIPTL

SEQ ID NO: 54050 - protein, 9 aa, Homo sapiens
  Table A; Target 54050; HLA-A*23:01; NPSR1; ENSG00000187258; TAA
SFLFSIPTL

SEQ ID NO: 54051 - protein, 9 aa, Homo sapiens
  Table A; Target 54051; HLA-A*24:02; NPSR1; ENSG00000187258; TAA
SFLFSIPTL

SEQ ID NO: 54052 - protein, 9 aa, Homo sapiens
  Table A; Target 54052; HLA-C*14:02; NPSR1; ENSG00000187258; TAA
SFLFSIPTL

SEQ ID NO: 54053 - protein, 9 aa, Homo sapiens
  Table A; Target 54053; HLA-A*23:01; NPSR1; ENSG00000187258; TAA
SFTGLVNIL

SEQ ID NO: 54054 - protein, 9 aa, Homo sapiens
  Table A; Target 54054; HLA-A*24:02; NPSR1; ENSG00000187258; TAA
SFTGLVNIL

SEQ ID NO: 54055 - protein, 9 aa, Homo sapiens
  Table A; Target 54055; HLA-A*02:07; NPSR1; ENSG00000187258; TAA
SIDRYHAIV

SEQ ID NO: 54056 - protein, 10 aa, Homo sapiens
  Table A; Target 54056; HLA-A*01:01; NPSR1; ENSG00000187258; TAA
SIDRYHAIVY

SEQ ID NO: 54057 - protein, 9 aa, Homo sapiens
  Table A; Target 54057; HLA-A*02:03; NPSR1; ENSG00000187258; TAA
SIIIILAFI

SEQ ID NO: 54058 - protein, 9 aa, Homo sapiens
  Table A; Target 54058; HLA-A*02:04; NPSR1; ENSG00000187258; TAA
SIIIILAFI

SEQ ID NO: 54059 - protein, 9 aa, Homo sapiens
  Table A; Target 54059; HLA-A*02:07; NPSR1; ENSG00000187258; TAA
SIIIILAFI

SEQ ID NO: 54060 - protein, 9 aa, Homo sapiens
  Table A; Target 54060; HLA-A*68:02; NPSR1; ENSG00000187258; TAA
SIIIILAFI

SEQ ID NO: 54061 - protein, 9 aa, Homo sapiens
  Table A; Target 54061; HLA-A*02:07; NPSR1; ENSG00000187258; TAA
SIPTLIIFG

SEQ ID NO: 54062 - protein, 10 aa, Homo sapiens
  Table A; Target 54062; HLA-A*03:01; NPSR1; ENSG00000187258; TAA
SIPTLIIFGK

SEQ ID NO: 54063 - protein, 10 aa, Homo sapiens
  Table A; Target 54063; HLA-A*11:01; NPSR1; ENSG00000187258; TAA
SIPTLIIFGK

SEQ ID NO: 54064 - protein, 8 aa, Homo sapiens
  Table A; Target 54064; HLA-A*02:04; NPSR1; ENSG00000187258; TAA
SLSFLFSI

SEQ ID NO: 54065 - protein, 11 aa, Homo sapiens
  Table A; Target 54065; HLA-A*02:04; NPSR1; ENSG00000187258; TAA
SLSFLFSIPTL

SEQ ID NO: 54066 - protein, 9 aa, Homo sapiens
  Table A; Target 54066; HLA-B*07:02; NPSR1; ENSG00000187258; TAA
SPVACTETV

SEQ ID NO: 54067 - protein, 9 aa, Homo sapiens
  Table A; Target 54067; HLA-B*35:03; NPSR1; ENSG00000187258; TAA
SPVACTETV

SEQ ID NO: 54068 - protein, 9 aa, Homo sapiens
  Table A; Target 54068; HLA-B*51:01; NPSR1; ENSG00000187258; TAA
SPVACTETV

SEQ ID NO: 54069 - protein, 9 aa, Homo sapiens
  Table A; Target 54069; HLA-B*55:01; NPSR1; ENSG00000187258; TAA
SPVACTETV

SEQ ID NO: 54070 - protein, 9 aa, Homo sapiens
  Table A; Target 54070; HLA-B*56:01; NPSR1; ENSG00000187258; TAA
SPVACTETV

SEQ ID NO: 54071 - protein, 9 aa, Homo sapiens
  Table A; Target 54071; HLA-C*07:02; NPSR1; ENSG00000187258; TAA
SPVACTETV

SEQ ID NO: 54072 - protein, 11 aa, Homo sapiens
  Table A; Target 54072; HLA-B*35:01; NPSR1; ENSG00000187258; TAA
SPVACTETVTF

SEQ ID NO: 54073 - protein, 11 aa, Homo sapiens
  Table A; Target 54073; HLA-B*35:03; NPSR1; ENSG00000187258; TAA
SPVACTETVTF

SEQ ID NO: 54074 - protein, 11 aa, Homo sapiens
  Table A; Target 54074; HLA-B*55:01; NPSR1; ENSG00000187258; TAA
SPVACTETVTF

SEQ ID NO: 54075 - protein, 8 aa, Homo sapiens
  Table A; Target 54075; HLA-B*51:01; NPSR1; ENSG00000187258; TAA
SPYFLFDI

SEQ ID NO: 54076 - protein, 9 aa, Homo sapiens
  Table A; Target 54076; HLA-B*54:01; NPSR1; ENSG00000187258; TAA
SPYFLFDIL

SEQ ID NO: 54077 - protein, 8 aa, Homo sapiens
  Table A; Target 54077; HLA-A*32:01; NPSR1; ENSG00000187258; TAA
SQDSRMTF

SEQ ID NO: 54078 - protein, 8 aa, Homo sapiens
  Table A; Target 54078; HLA-B*15:01; NPSR1; ENSG00000187258; TAA
SQDSRMTF

SEQ ID NO: 54079 - protein, 8 aa, Homo sapiens
  Table A; Target 54079; HLA-B*15:03; NPSR1; ENSG00000187258; TAA
SQDSRMTF

SEQ ID NO: 54080 - protein, 8 aa, Homo sapiens
  Table A; Target 54080; HLA-B*37:01; NPSR1; ENSG00000187258; TAA
SQDSRMTF

SEQ ID NO: 54081 - protein, 8 aa, Homo sapiens
  Table A; Target 54081; HLA-B*38:01; NPSR1; ENSG00000187258; TAA
SQDSRMTF

SEQ ID NO: 54082 - protein, 8 aa, Homo sapiens
  Table A; Target 54082; HLA-C*04:01; NPSR1; ENSG00000187258; TAA
SQDSRMTF

SEQ ID NO: 54083 - protein, 8 aa, Homo sapiens
  Table A; Target 54083; HLA-C*05:01; NPSR1; ENSG00000187258; TAA
SQDSRMTF

SEQ ID NO: 54084 - protein, 9 aa, Homo sapiens
  Table A; Target 54084; HLA-A*31:01; NPSR1; ENSG00000187258; TAA
SQDSRMTFR

SEQ ID NO: 54085 - protein, 8 aa, Homo sapiens
  Table A; Target 54085; HLA-C*01:02; NPSR1; ENSG00000187258; TAA
SSGTGQTL

SEQ ID NO: 54086 - protein, 8 aa, Homo sapiens
  Table A; Target 54086; HLA-C*03:03; NPSR1; ENSG00000187258; TAA
SSGTGQTL

SEQ ID NO: 54087 - protein, 8 aa, Homo sapiens
  Table A; Target 54087; HLA-C*03:04; NPSR1; ENSG00000187258; TAA
SSGTGQTL

SEQ ID NO: 54088 - protein, 8 aa, Homo sapiens
  Table A; Target 54088; HLA-C*05:01; NPSR1; ENSG00000187258; TAA
SSGTGQTL

SEQ ID NO: 54089 - protein, 11 aa, Homo sapiens
  Table A; Target 54089; HLA-A*31:01; NPSR1; ENSG00000187258; TAA
SSISFPCREQR

SEQ ID NO: 54090 - protein, 9 aa, Homo sapiens
  Table A; Target 54090; HLA-A*11:01; NPSR1; ENSG00000187258; TAA
SSSISFPCR

SEQ ID NO: 54091 - protein, 9 aa, Homo sapiens
  Table A; Target 54091; HLA-A*31:01; NPSR1; ENSG00000187258; TAA
SSSISFPCR

SEQ ID NO: 54092 - protein, 9 aa, Homo sapiens
  Table A; Target 54092; HLA-A*68:01; NPSR1; ENSG00000187258; TAA
SSSISFPCR

SEQ ID NO: 54093 - protein, 9 aa, Homo sapiens
  Table A; Target 54093; HLA-C*07:06; NPSR1; ENSG00000187258; TAA
SSSISFPCR

SEQ ID NO: 54094 - protein, 10 aa, Homo sapiens
  Table A; Target 54094; HLA-A*03:01; NPSR1; ENSG00000187258; TAA
SSYNRGLISK

SEQ ID NO: 54095 - protein, 10 aa, Homo sapiens
  Table A; Target 54095; HLA-A*03:02; NPSR1; ENSG00000187258; TAA
SSYNRGLISK

SEQ ID NO: 54096 - protein, 10 aa, Homo sapiens
  Table A; Target 54096; HLA-A*11:01; NPSR1; ENSG00000187258; TAA
SSYNRGLISK

SEQ ID NO: 54097 - protein, 10 aa, Homo sapiens
  Table A; Target 54097; HLA-A*31:01; NPSR1; ENSG00000187258; TAA
SSYNRGLISK

SEQ ID NO: 54098 - protein, 10 aa, Homo sapiens
  Table A; Target 54098; HLA-A*33:01; NPSR1; ENSG00000187258; TAA
SSYNRGLISK

SEQ ID NO: 54099 - protein, 10 aa, Homo sapiens
  Table A; Target 54099; HLA-A*33:03; NPSR1; ENSG00000187258; TAA
SSYNRGLISK

SEQ ID NO: 54100 - protein, 10 aa, Homo sapiens
  Table A; Target 54100; HLA-A*68:01; NPSR1; ENSG00000187258; TAA
SSYNRGLISK

SEQ ID NO: 54101 - protein, 8 aa, Homo sapiens
  Table A; Target 54101; HLA-B*08:01; NPSR1; ENSG00000187258; TAA
STYVLVSL

SEQ ID NO: 54102 - protein, 8 aa, Homo sapiens
  Table A; Target 54102; HLA-B*40:02; NPSR1; ENSG00000187258; TAA
STYVLVSL

SEQ ID NO: 54103 - protein, 8 aa, Homo sapiens
  Table A; Target 54103; HLA-B*46:01; NPSR1; ENSG00000187258; TAA
STYVLVSL

SEQ ID NO: 54104 - protein, 8 aa, Homo sapiens
  Table A; Target 54104; HLA-B*51:01; NPSR1; ENSG00000187258; TAA
STYVLVSL

SEQ ID NO: 54105 - protein, 8 aa, Homo sapiens
  Table A; Target 54105; HLA-C*03:03; NPSR1; ENSG00000187258; TAA
STYVLVSL

SEQ ID NO: 54106 - protein, 8 aa, Homo sapiens
  Table A; Target 54106; HLA-C*03:04; NPSR1; ENSG00000187258; TAA
STYVLVSL

SEQ ID NO: 54107 - protein, 8 aa, Homo sapiens
  Table A; Target 54107; HLA-C*14:02; NPSR1; ENSG00000187258; TAA
STYVLVSL

SEQ ID NO: 54108 - protein, 9 aa, Homo sapiens
  Table A; Target 54108; HLA-B*54:01; NPSR1; ENSG00000187258; TAA
SVIIQNLPA

SEQ ID NO: 54109 - protein, 9 aa, Homo sapiens
  Table A; Target 54109; HLA-B*56:01; NPSR1; ENSG00000187258; TAA
SVIIQNLPA

SEQ ID NO: 54110 - protein, 10 aa, Homo sapiens
  Table A; Target 54110; HLA-A*02:04; NPSR1; ENSG00000187258; TAA
SVIIQNLPAL

SEQ ID NO: 54111 - protein, 10 aa, Homo sapiens
  Table A; Target 54111; HLA-A*25:01; NPSR1; ENSG00000187258; TAA
SVIIQNLPAL

SEQ ID NO: 54112 - protein, 8 aa, Homo sapiens
  Table A; Target 54112; HLA-A*25:01; NPSR1; ENSG00000187258; TAA
SVVLFSTW

SEQ ID NO: 54113 - protein, 8 aa, Homo sapiens
  Table A; Target 54113; HLA-B*57:01; NPSR1; ENSG00000187258; TAA
SVVLFSTW

SEQ ID NO: 54114 - protein, 8 aa, Homo sapiens
  Table A; Target 54114; HLA-B*58:01; NPSR1; ENSG00000187258; TAA
SVVLFSTW

SEQ ID NO: 54115 - protein, 9 aa, Homo sapiens
  Table A; Target 54115; HLA-A*31:01; NPSR1; ENSG00000187258; TAA
SVVLFSTWR

SEQ ID NO: 54116 - protein, 9 aa, Homo sapiens
  Table A; Target 54116; HLA-A*03:01; NPSR1; ENSG00000187258; TAA
SYNRGLISK

SEQ ID NO: 54117 - protein, 9 aa, Homo sapiens
  Table A; Target 54117; HLA-A*03:02; NPSR1; ENSG00000187258; TAA
SYNRGLISK

SEQ ID NO: 54118 - protein, 9 aa, Homo sapiens
  Table A; Target 54118; HLA-A*11:01; NPSR1; ENSG00000187258; TAA
SYNRGLISK

SEQ ID NO: 54119 - protein, 9 aa, Homo sapiens
  Table A; Target 54119; HLA-A*31:01; NPSR1; ENSG00000187258; TAA
SYNRGLISK

SEQ ID NO: 54120 - protein, 9 aa, Homo sapiens
  Table A; Target 54120; HLA-A*33:01; NPSR1; ENSG00000187258; TAA
SYNRGLISK

SEQ ID NO: 54121 - protein, 9 aa, Homo sapiens
  Table A; Target 54121; HLA-A*33:03; NPSR1; ENSG00000187258; TAA
SYNRGLISK

SEQ ID NO: 54122 - protein, 9 aa, Homo sapiens
  Table A; Target 54122; HLA-C*01:02; NPSR1; ENSG00000187258; TAA
SYNRGLISK

SEQ ID NO: 54123 - protein, 9 aa, Homo sapiens
  Table A; Target 54123; HLA-C*06:02; NPSR1; ENSG00000187258; TAA
SYNRGLISK

SEQ ID NO: 54124 - protein, 9 aa, Homo sapiens
  Table A; Target 54124; HLA-C*07:02; NPSR1; ENSG00000187258; TAA
SYNRGLISK

SEQ ID NO: 54125 - protein, 9 aa, Homo sapiens
  Table A; Target 54125; HLA-A*24:02; NPSR1; ENSG00000187258; TAA
SYWTPYMTI

SEQ ID NO: 54126 - protein, 9 aa, Homo sapiens
  Table A; Target 54126; HLA-A*02:07; NPSR1; ENSG00000187258; TAA
TAPDLVCRV

SEQ ID NO: 54127 - protein, 9 aa, Homo sapiens
  Table A; Target 54127; HLA-A*68:02; NPSR1; ENSG00000187258; TAA
TAPDLVCRV

SEQ ID NO: 54128 - protein, 9 aa, Homo sapiens
  Table A; Target 54128; HLA-B*51:01; NPSR1; ENSG00000187258; TAA
TAPDLVCRV

SEQ ID NO: 54129 - protein, 9 aa, Homo sapiens
  Table A; Target 54129; HLA-C*06:02; NPSR1; ENSG00000187258; TAA
TAPDLVCRV

SEQ ID NO: 54130 - protein, 9 aa, Homo sapiens
  Table A; Target 54130; HLA-C*12:03; NPSR1; ENSG00000187258; TAA
TAPDLVCRV

SEQ ID NO: 54131 - protein, 8 aa, Homo sapiens
  Table A; Target 54131; HLA-B*37:01; NPSR1; ENSG00000187258; TAA
TDSFTGLV

SEQ ID NO: 54132 - protein, 8 aa, Homo sapiens
  Table A; Target 54132; HLA-B*18:01; NPSR1; ENSG00000187258; TAA
TEQLITLW

SEQ ID NO: 54133 - protein, 8 aa, Homo sapiens
  Table A; Target 54133; HLA-B*37:01; NPSR1; ENSG00000187258; TAA
TEQLITLW

SEQ ID NO: 54134 - protein, 8 aa, Homo sapiens
  Table A; Target 54134; HLA-B*44:02; NPSR1; ENSG00000187258; TAA
TEQLITLW

SEQ ID NO: 54135 - protein, 8 aa, Homo sapiens
  Table A; Target 54135; HLA-B*44:03; NPSR1; ENSG00000187258; TAA
TEQLITLW

SEQ ID NO: 54136 - protein, 9 aa, Homo sapiens
  Table A; Target 54136; HLA-B*49:01; NPSR1; ENSG00000187258; TAA
TEQLITLWV

SEQ ID NO: 54137 - protein, 10 aa, Homo sapiens
  Table A; Target 54137; HLA-B*44:02; NPSR1; ENSG00000187258; TAA
TEQLITLWVL

SEQ ID NO: 54138 - protein, 9 aa, Homo sapiens
  Table A; Target 54138; HLA-B*40:02; NPSR1; ENSG00000187258; TAA
TERHEMQIL

SEQ ID NO: 54139 - protein, 9 aa, Homo sapiens
  Table A; Target 54139; HLA-C*07:01; NPSR1; ENSG00000187258; TAA
TERHEMQIL

SEQ ID NO: 54140 - protein, 9 aa, Homo sapiens
  Table A; Target 54140; HLA-A*30:01; NPSR1; ENSG00000187258; TAA
TETVTFTEV

SEQ ID NO: 54141 - protein, 9 aa, Homo sapiens
  Table A; Target 54141; HLA-B*13:02; NPSR1; ENSG00000187258; TAA
TETVTFTEV

SEQ ID NO: 54142 - protein, 9 aa, Homo sapiens
  Table A; Target 54142; HLA-B*18:01; NPSR1; ENSG00000187258; TAA
TETVTFTEV

SEQ ID NO: 54143 - protein, 9 aa, Homo sapiens
  Table A; Target 54143; HLA-B*37:01; NPSR1; ENSG00000187258; TAA
TETVTFTEV

SEQ ID NO: 54144 - protein, 9 aa, Homo sapiens
  Table A; Target 54144; HLA-B*40:01; NPSR1; ENSG00000187258; TAA
TETVTFTEV

SEQ ID NO: 54145 - protein, 9 aa, Homo sapiens
  Table A; Target 54145; HLA-B*40:02; NPSR1; ENSG00000187258; TAA
TETVTFTEV

SEQ ID NO: 54146 - protein, 9 aa, Homo sapiens
  Table A; Target 54146; HLA-B*44:02; NPSR1; ENSG00000187258; TAA
TETVTFTEV

SEQ ID NO: 54147 - protein, 9 aa, Homo sapiens
  Table A; Target 54147; HLA-B*44:03; NPSR1; ENSG00000187258; TAA
TETVTFTEV

SEQ ID NO: 54148 - protein, 9 aa, Homo sapiens
  Table A; Target 54148; HLA-B*49:01; NPSR1; ENSG00000187258; TAA
TETVTFTEV

SEQ ID NO: 54149 - protein, 9 aa, Homo sapiens
  Table A; Target 54149; HLA-C*02:02; NPSR1; ENSG00000187258; TAA
TETVTFTEV

SEQ ID NO: 54150 - protein, 9 aa, Homo sapiens
  Table A; Target 54150; HLA-C*16:02; NPSR1; ENSG00000187258; TAA
TETVTFTEV

SEQ ID NO: 54151 - protein, 9 aa, Homo sapiens
  Table A; Target 54151; HLA-C*16:04; NPSR1; ENSG00000187258; TAA
TETVTFTEV

SEQ ID NO: 54152 - protein, 10 aa, Homo sapiens
  Table A; Target 54152; HLA-B*49:01; NPSR1; ENSG00000187258; TAA
TETVTFTEVV

SEQ ID NO: 54153 - protein, 9 aa, Homo sapiens
  Table A; Target 54153; HLA-B*27:02; NPSR1; ENSG00000187258; TAA
TEVVEGKEW

SEQ ID NO: 54154 - protein, 9 aa, Homo sapiens
  Table A; Target 54154; HLA-B*44:02; NPSR1; ENSG00000187258; TAA
TEVVEGKEW

SEQ ID NO: 54155 - protein, 9 aa, Homo sapiens
  Table A; Target 54155; HLA-B*44:03; NPSR1; ENSG00000187258; TAA
TEVVEGKEW

SEQ ID NO: 54156 - protein, 9 aa, Homo sapiens
  Table A; Target 54156; HLA-B*57:01; NPSR1; ENSG00000187258; TAA
TEVVEGKEW

SEQ ID NO: 54157 - protein, 9 aa, Homo sapiens
  Table A; Target 54157; HLA-C*16:04; NPSR1; ENSG00000187258; TAA
TEVVEGKEW

SEQ ID NO: 54158 - protein, 9 aa, Homo sapiens
  Table A; Target 54158; HLA-A*23:01; NPSR1; ENSG00000187258; TAA
TFFVTQLAI

SEQ ID NO: 54159 - protein, 9 aa, Homo sapiens
  Table A; Target 54159; HLA-B*13:02; NPSR1; ENSG00000187258; TAA
TFFVTQLAI

SEQ ID NO: 54160 - protein, 9 aa, Homo sapiens
  Table A; Target 54160; HLA-A*33:03; NPSR1; ENSG00000187258; TAA
TFTEVVEGK

SEQ ID NO: 54161 - protein, 9 aa, Homo sapiens
  Table A; Target 54161; HLA-B*27:02; NPSR1; ENSG00000187258; TAA
TFTEVVEGK

SEQ ID NO: 54162 - protein, 9 aa, Homo sapiens
  Table A; Target 54162; HLA-B*35:03; NPSR1; ENSG00000187258; TAA
TGDFTAPDL

SEQ ID NO: 54163 - protein, 9 aa, Homo sapiens
  Table A; Target 54163; HLA-B*39:01; NPSR1; ENSG00000187258; TAA
TGDFTAPDL

SEQ ID NO: 54164 - protein, 9 aa, Homo sapiens
  Table A; Target 54164; HLA-C*05:01; NPSR1; ENSG00000187258; TAA
TGDFTAPDL

SEQ ID NO: 54165 - protein, 9 aa, Homo sapiens
  Table A; Target 54165; HLA-A*02:01; NPSR1; ENSG00000187258; TAA
TIISIMYGI

SEQ ID NO: 54166 - protein, 9 aa, Homo sapiens
  Table A; Target 54166; HLA-A*02:04; NPSR1; ENSG00000187258; TAA
TIISIMYGI

SEQ ID NO: 54167 - protein, 9 aa, Homo sapiens
  Table A; Target 54167; HLA-A*02:07; NPSR1; ENSG00000187258; TAA
TIISIMYGI

SEQ ID NO: 54168 - protein, 9 aa, Homo sapiens
  Table A; Target 54168; HLA-A*68:02; NPSR1; ENSG00000187258; TAA
TIISIMYGI

SEQ ID NO: 54169 - protein, 9 aa, Homo sapiens
  Table A; Target 54169; HLA-B*35:03; NPSR1; ENSG00000187258; TAA
TIVGNSVVL

SEQ ID NO: 54170 - protein, 9 aa, Homo sapiens
  Table A; Target 54170; HLA-B*39:01; NPSR1; ENSG00000187258; TAA
TIVGNSVVL

SEQ ID NO: 54171 - protein, 9 aa, Homo sapiens
  Table A; Target 54171; HLA-B*40:01; NPSR1; ENSG00000187258; TAA
TIVGNSVVL

SEQ ID NO: 54172 - protein, 9 aa, Homo sapiens
  Table A; Target 54172; HLA-C*03:03; NPSR1; ENSG00000187258; TAA
TIVGNSVVL

SEQ ID NO: 54173 - protein, 9 aa, Homo sapiens
  Table A; Target 54173; HLA-C*03:04; NPSR1; ENSG00000187258; TAA
TIVGNSVVL

SEQ ID NO: 54174 - protein, 9 aa, Homo sapiens
  Table A; Target 54174; HLA-C*07:04; NPSR1; ENSG00000187258; TAA
TIVGNSVVL

SEQ ID NO: 54175 - protein, 10 aa, Homo sapiens
  Table A; Target 54175; HLA-A*26:01; NPSR1; ENSG00000187258; TAA
TIVGNSVVLF

SEQ ID NO: 54176 - protein, 9 aa, Homo sapiens
  Table A; Target 54176; HLA-A*02:01; NPSR1; ENSG00000187258; TAA
TLDSSPVAC

SEQ ID NO: 54177 - protein, 9 aa, Homo sapiens
  Table A; Target 54177; HLA-A*02:07; NPSR1; ENSG00000187258; TAA
TLDSSPVAC

SEQ ID NO: 54178 - protein, 9 aa, Homo sapiens
  Table A; Target 54178; HLA-B*39:01; NPSR1; ENSG00000187258; TAA
TLDSSPVAC

SEQ ID NO: 54179 - protein, 9 aa, Homo sapiens
  Table A; Target 54179; HLA-B*55:01; NPSR1; ENSG00000187258; TAA
TLDSSPVAC

SEQ ID NO: 54180 - protein, 9 aa, Homo sapiens
  Table A; Target 54180; HLA-C*04:01; NPSR1; ENSG00000187258; TAA
TLDSSPVAC

SEQ ID NO: 54181 - protein, 9 aa, Homo sapiens
  Table A; Target 54181; HLA-C*05:01; NPSR1; ENSG00000187258; TAA
TLDSSPVAC

SEQ ID NO: 54182 - protein, 10 aa, Homo sapiens
  Table A; Target 54182; HLA-A*25:01; NPSR1; ENSG00000187258; TAA
TLSNGEVQCW

SEQ ID NO: 54183 - protein, 10 aa, Homo sapiens
  Table A; Target 54183; HLA-A*32:01; NPSR1; ENSG00000187258; TAA
TLSNGEVQCW

SEQ ID NO: 54184 - protein, 10 aa, Homo sapiens
  Table A; Target 54184; HLA-A*68:01; NPSR1; ENSG00000187258; TAA
TLSNGEVQCW

SEQ ID NO: 54185 - protein, 10 aa, Homo sapiens
  Table A; Target 54185; HLA-B*38:01; NPSR1; ENSG00000187258; TAA
TLSNGEVQCW

SEQ ID NO: 54186 - protein, 10 aa, Homo sapiens
  Table A; Target 54186; HLA-B*57:01; NPSR1; ENSG00000187258; TAA
TLSNGEVQCW

SEQ ID NO: 54187 - protein, 10 aa, Homo sapiens
  Table A; Target 54187; HLA-B*58:01; NPSR1; ENSG00000187258; TAA
TLSNGEVQCW

SEQ ID NO: 54188 - protein, 8 aa, Homo sapiens
  Table A; Target 54188; HLA-B*51:01; NPSR1; ENSG00000187258; TAA
TPYMTIVA

SEQ ID NO: 54189 - protein, 8 aa, Homo sapiens
  Table A; Target 54189; HLA-B*54:01; NPSR1; ENSG00000187258; TAA
TPYMTIVA

SEQ ID NO: 54190 - protein, 8 aa, Homo sapiens
  Table A; Target 54190; HLA-B*55:01; NPSR1; ENSG00000187258; TAA
TPYMTIVA

SEQ ID NO: 54191 - protein, 8 aa, Homo sapiens
  Table A; Target 54191; HLA-B*56:01; NPSR1; ENSG00000187258; TAA
TPYMTIVA

SEQ ID NO: 54192 - protein, 9 aa, Homo sapiens
  Table A; Target 54192; HLA-A*25:01; NPSR1; ENSG00000187258; TAA
TPYMTIVAF

SEQ ID NO: 54193 - protein, 9 aa, Homo sapiens
  Table A; Target 54193; HLA-B*07:02; NPSR1; ENSG00000187258; TAA
TPYMTIVAF

SEQ ID NO: 54194 - protein, 9 aa, Homo sapiens
  Table A; Target 54194; HLA-B*08:01; NPSR1; ENSG00000187258; TAA
TPYMTIVAF

SEQ ID NO: 54195 - protein, 9 aa, Homo sapiens
  Table A; Target 54195; HLA-B*15:03; NPSR1; ENSG00000187258; TAA
TPYMTIVAF

SEQ ID NO: 54196 - protein, 9 aa, Homo sapiens
  Table A; Target 54196; HLA-B*18:01; NPSR1; ENSG00000187258; TAA
TPYMTIVAF

SEQ ID NO: 54197 - protein, 9 aa, Homo sapiens
  Table A; Target 54197; HLA-B*35:01; NPSR1; ENSG00000187258; TAA
TPYMTIVAF

SEQ ID NO: 54198 - protein, 9 aa, Homo sapiens
  Table A; Target 54198; HLA-B*35:03; NPSR1; ENSG00000187258; TAA
TPYMTIVAF

SEQ ID NO: 54199 - protein, 9 aa, Homo sapiens
  Table A; Target 54199; HLA-B*46:01; NPSR1; ENSG00000187258; TAA
TPYMTIVAF

SEQ ID NO: 54200 - protein, 9 aa, Homo sapiens
  Table A; Target 54200; HLA-B*51:01; NPSR1; ENSG00000187258; TAA
TPYMTIVAF

SEQ ID NO: 54201 - protein, 9 aa, Homo sapiens
  Table A; Target 54201; HLA-B*54:01; NPSR1; ENSG00000187258; TAA
TPYMTIVAF

SEQ ID NO: 54202 - protein, 9 aa, Homo sapiens
  Table A; Target 54202; HLA-B*55:01; NPSR1; ENSG00000187258; TAA
TPYMTIVAF

SEQ ID NO: 54203 - protein, 9 aa, Homo sapiens
  Table A; Target 54203; HLA-B*56:01; NPSR1; ENSG00000187258; TAA
TPYMTIVAF

SEQ ID NO: 54204 - protein, 9 aa, Homo sapiens
  Table A; Target 54204; HLA-C*02:02; NPSR1; ENSG00000187258; TAA
TPYMTIVAF

SEQ ID NO: 54205 - protein, 9 aa, Homo sapiens
  Table A; Target 54205; HLA-C*03:03; NPSR1; ENSG00000187258; TAA
TPYMTIVAF

SEQ ID NO: 54206 - protein, 9 aa, Homo sapiens
  Table A; Target 54206; HLA-C*07:02; NPSR1; ENSG00000187258; TAA
TPYMTIVAF

SEQ ID NO: 54207 - protein, 9 aa, Homo sapiens
  Table A; Target 54207; HLA-C*12:03; NPSR1; ENSG00000187258; TAA
TPYMTIVAF

SEQ ID NO: 54208 - protein, 9 aa, Homo sapiens
  Table A; Target 54208; HLA-C*14:02; NPSR1; ENSG00000187258; TAA
TPYMTIVAF

SEQ ID NO: 54209 - protein, 9 aa, Homo sapiens
  Table A; Target 54209; HLA-A*23:01; NPSR1; ENSG00000187258; TAA
TQLAITDSF

SEQ ID NO: 54210 - protein, 9 aa, Homo sapiens
  Table A; Target 54210; HLA-A*24:02; NPSR1; ENSG00000187258; TAA
TQLAITDSF

SEQ ID NO: 54211 - protein, 9 aa, Homo sapiens
  Table A; Target 54211; HLA-A*30:02; NPSR1; ENSG00000187258; TAA
TQLAITDSF

SEQ ID NO: 54212 - protein, 9 aa, Homo sapiens
  Table A; Target 54212; HLA-A*32:01; NPSR1; ENSG00000187258; TAA
TQLAITDSF

SEQ ID NO: 54213 - protein, 9 aa, Homo sapiens
  Table A; Target 54213; HLA-B*13:02; NPSR1; ENSG00000187258; TAA
TQLAITDSF

SEQ ID NO: 54214 - protein, 9 aa, Homo sapiens
  Table A; Target 54214; HLA-B*15:01; NPSR1; ENSG00000187258; TAA
TQLAITDSF

SEQ ID NO: 54215 - protein, 9 aa, Homo sapiens
  Table A; Target 54215; HLA-B*15:03; NPSR1; ENSG00000187258; TAA
TQLAITDSF

SEQ ID NO: 54216 - protein, 9 aa, Homo sapiens
  Table A; Target 54216; HLA-B*18:01; NPSR1; ENSG00000187258; TAA
TQLAITDSF

SEQ ID NO: 54217 - protein, 9 aa, Homo sapiens
  Table A; Target 54217; HLA-B*27:02; NPSR1; ENSG00000187258; TAA
TQLAITDSF

SEQ ID NO: 54218 - protein, 9 aa, Homo sapiens
  Table A; Target 54218; HLA-B*27:05; NPSR1; ENSG00000187258; TAA
TQLAITDSF

SEQ ID NO: 54219 - protein, 9 aa, Homo sapiens
  Table A; Target 54219; HLA-B*35:01; NPSR1; ENSG00000187258; TAA
TQLAITDSF

SEQ ID NO: 54220 - protein, 9 aa, Homo sapiens
  Table A; Target 54220; HLA-B*37:01; NPSR1; ENSG00000187258; TAA
TQLAITDSF

SEQ ID NO: 54221 - protein, 9 aa, Homo sapiens
  Table A; Target 54221; HLA-B*38:01; NPSR1; ENSG00000187258; TAA
TQLAITDSF

SEQ ID NO: 54222 - protein, 9 aa, Homo sapiens
  Table A; Target 54222; HLA-B*39:01; NPSR1; ENSG00000187258; TAA
TQLAITDSF

SEQ ID NO: 54223 - protein, 9 aa, Homo sapiens
  Table A; Target 54223; HLA-B*44:02; NPSR1; ENSG00000187258; TAA
TQLAITDSF

SEQ ID NO: 54224 - protein, 9 aa, Homo sapiens
  Table A; Target 54224; HLA-B*44:03; NPSR1; ENSG00000187258; TAA
TQLAITDSF

SEQ ID NO: 54225 - protein, 9 aa, Homo sapiens
  Table A; Target 54225; HLA-B*46:01; NPSR1; ENSG00000187258; TAA
TQLAITDSF

SEQ ID NO: 54226 - protein, 9 aa, Homo sapiens
  Table A; Target 54226; HLA-B*58:01; NPSR1; ENSG00000187258; TAA
TQLAITDSF

SEQ ID NO: 54227 - protein, 9 aa, Homo sapiens
  Table A; Target 54227; HLA-C*02:02; NPSR1; ENSG00000187258; TAA
TQLAITDSF

SEQ ID NO: 54228 - protein, 9 aa, Homo sapiens
  Table A; Target 54228; HLA-C*05:01; NPSR1; ENSG00000187258; TAA
TQLAITDSF

SEQ ID NO: 54229 - protein, 9 aa, Homo sapiens
  Table A; Target 54229; HLA-C*07:04; NPSR1; ENSG00000187258; TAA
TQLAITDSF

SEQ ID NO: 54230 - protein, 9 aa, Homo sapiens
  Table A; Target 54230; HLA-C*14:02; NPSR1; ENSG00000187258; TAA
TQLAITDSF

SEQ ID NO: 54231 - protein, 9 aa, Homo sapiens
  Table A; Target 54231; HLA-C*16:04; NPSR1; ENSG00000187258; TAA
TQLAITDSF

SEQ ID NO: 54232 - protein, 11 aa, Homo sapiens
  Table A; Target 54232; HLA-A*11:01; NPSR1; ENSG00000187258; TAA
TVTFTEVVEGK

SEQ ID NO: 54233 - protein, 11 aa, Homo sapiens
  Table A; Target 54233; HLA-A*68:01; NPSR1; ENSG00000187258; TAA
TVTFTEVVEGK

SEQ ID NO: 54234 - protein, 11 aa, Homo sapiens
  Table A; Target 54234; HLA-B*27:02; NPSR1; ENSG00000187258; TAA
TVTFTEVVEGK

SEQ ID NO: 54235 - protein, 9 aa, Homo sapiens
  Table A; Target 54235; HLA-C*04:01; NPSR1; ENSG00000187258; TAA
TYETVISNC

SEQ ID NO: 54236 - protein, 9 aa, Homo sapiens
  Table A; Target 54236; HLA-A*23:01; NPSR1; ENSG00000187258; TAA
TYVLVSLSI

SEQ ID NO: 54237 - protein, 9 aa, Homo sapiens
  Table A; Target 54237; HLA-A*24:02; NPSR1; ENSG00000187258; TAA
TYVLVSLSI

SEQ ID NO: 54238 - protein, 9 aa, Homo sapiens
  Table A; Target 54238; HLA-A*30:01; NPSR1; ENSG00000187258; TAA
TYVLVSLSI

SEQ ID NO: 54239 - protein, 9 aa, Homo sapiens
  Table A; Target 54239; HLA-B*13:02; NPSR1; ENSG00000187258; TAA
TYVLVSLSI

SEQ ID NO: 54240 - protein, 9 aa, Homo sapiens
  Table A; Target 54240; HLA-C*14:02; NPSR1; ENSG00000187258; TAA
TYVLVSLSI

SEQ ID NO: 54241 - protein, 11 aa, Homo sapiens
  Table A; Target 54241; HLA-A*31:01; NPSR1; ENSG00000187258; TAA
TYVLVSLSIDR

SEQ ID NO: 54242 - protein, 11 aa, Homo sapiens
  Table A; Target 54242; HLA-B*27:02; NPSR1; ENSG00000187258; TAA
TYVLVSLSIDR

SEQ ID NO: 54243 - protein, 9 aa, Homo sapiens
  Table A; Target 54243; HLA-A*23:01; NPSR1; ENSG00000187258; TAA
VACTETVTF

SEQ ID NO: 54244 - protein, 9 aa, Homo sapiens
  Table A; Target 54244; HLA-A*32:01; NPSR1; ENSG00000187258; TAA
VACTETVTF

SEQ ID NO: 54245 - protein, 9 aa, Homo sapiens
  Table A; Target 54245; HLA-B*15:03; NPSR1; ENSG00000187258; TAA
VACTETVTF

SEQ ID NO: 54246 - protein, 9 aa, Homo sapiens
  Table A; Target 54246; HLA-B*35:01; NPSR1; ENSG00000187258; TAA
VACTETVTF

SEQ ID NO: 54247 - protein, 9 aa, Homo sapiens
  Table A; Target 54247; HLA-B*38:01; NPSR1; ENSG00000187258; TAA
VACTETVTF

SEQ ID NO: 54248 - protein, 9 aa, Homo sapiens
  Table A; Target 54248; HLA-B*46:01; NPSR1; ENSG00000187258; TAA
VACTETVTF

SEQ ID NO: 54249 - protein, 9 aa, Homo sapiens
  Table A; Target 54249; HLA-B*58:01; NPSR1; ENSG00000187258; TAA
VACTETVTF

SEQ ID NO: 54250 - protein, 9 aa, Homo sapiens
  Table A; Target 54250; HLA-C*02:02; NPSR1; ENSG00000187258; TAA
VACTETVTF

SEQ ID NO: 54251 - protein, 9 aa, Homo sapiens
  Table A; Target 54251; HLA-C*03:03; NPSR1; ENSG00000187258; TAA
VACTETVTF

SEQ ID NO: 54252 - protein, 9 aa, Homo sapiens
  Table A; Target 54252; HLA-C*03:04; NPSR1; ENSG00000187258; TAA
VACTETVTF

SEQ ID NO: 54253 - protein, 9 aa, Homo sapiens
  Table A; Target 54253; HLA-C*05:01; NPSR1; ENSG00000187258; TAA
VACTETVTF

SEQ ID NO: 54254 - protein, 9 aa, Homo sapiens
  Table A; Target 54254; HLA-C*12:03; NPSR1; ENSG00000187258; TAA
VACTETVTF

SEQ ID NO: 54255 - protein, 9 aa, Homo sapiens
  Table A; Target 54255; HLA-C*16:04; NPSR1; ENSG00000187258; TAA
VACTETVTF

SEQ ID NO: 54256 - protein, 8 aa, Homo sapiens
  Table A; Target 54256; HLA-B*51:01; NPSR1; ENSG00000187258; TAA
VAFLVYFI

SEQ ID NO: 54257 - protein, 8 aa, Homo sapiens
  Table A; Target 54257; HLA-A*23:01; NPSR1; ENSG00000187258; TAA
VFSSSISF

SEQ ID NO: 54258 - protein, 8 aa, Homo sapiens
  Table A; Target 54258; HLA-C*14:02; NPSR1; ENSG00000187258; TAA
VFSSSISF

SEQ ID NO: 54259 - protein, 9 aa, Homo sapiens
  Table A; Target 54259; HLA-A*23:01; NPSR1; ENSG00000187258; TAA
VFTIVGNSV

SEQ ID NO: 54260 - protein, 9 aa, Homo sapiens
  Table A; Target 54260; HLA-A*24:02; NPSR1; ENSG00000187258; TAA
VFTIVGNSV

SEQ ID NO: 54261 - protein, 9 aa, Homo sapiens
  Table A; Target 54261; HLA-A*30:01; NPSR1; ENSG00000187258; TAA
VFTIVGNSV

SEQ ID NO: 54262 - protein, 9 aa, Homo sapiens
  Table A; Target 54262; HLA-B*13:02; NPSR1; ENSG00000187258; TAA
VFTIVGNSV

SEQ ID NO: 54263 - protein, 9 aa, Homo sapiens
  Table A; Target 54263; HLA-B*35:03; NPSR1; ENSG00000187258; TAA
VFTIVGNSV

SEQ ID NO: 54264 - protein, 9 aa, Homo sapiens
  Table A; Target 54264; HLA-B*46:01; NPSR1; ENSG00000187258; TAA
VFTIVGNSV

SEQ ID NO: 54265 - protein, 9 aa, Homo sapiens
  Table A; Target 54265; HLA-C*01:02; NPSR1; ENSG00000187258; TAA
VFTIVGNSV

SEQ ID NO: 54266 - protein, 9 aa, Homo sapiens
  Table A; Target 54266; HLA-C*04:01; NPSR1; ENSG00000187258; TAA
VFTIVGNSV

SEQ ID NO: 54267 - protein, 9 aa, Homo sapiens
  Table A; Target 54267; HLA-C*14:02; NPSR1; ENSG00000187258; TAA
VFTIVGNSV

SEQ ID NO: 54268 - protein, 9 aa, Homo sapiens
  Table A; Target 54268; HLA-C*16:01; NPSR1; ENSG00000187258; TAA
VFTIVGNSV

SEQ ID NO: 54269 - protein, 9 aa, Homo sapiens
  Table A; Target 54269; HLA-C*16:02; NPSR1; ENSG00000187258; TAA
VFTIVGNSV

SEQ ID NO: 54270 - protein, 11 aa, Homo sapiens
  Table A; Target 54270; HLA-A*23:01; NPSR1; ENSG00000187258; TAA
VFTIVGNSVVL

SEQ ID NO: 54271 - protein, 8 aa, Homo sapiens
  Table A; Target 54271; HLA-B*37:01; NPSR1; ENSG00000187258; TAA
VGNSVVLF

SEQ ID NO: 54272 - protein, 8 aa, Homo sapiens
  Table A; Target 54272; HLA-C*12:03; NPSR1; ENSG00000187258; TAA
VGNSVVLF

SEQ ID NO: 54273 - protein, 11 aa, Homo sapiens
  Table A; Target 54273; HLA-B*57:01; NPSR1; ENSG00000187258; TAA
VGNSVVLFSTW

SEQ ID NO: 54274 - protein, 9 aa, Homo sapiens
  Table A; Target 54274; HLA-A*02:01; NPSR1; ENSG00000187258; TAA
VIIQNLPAL

SEQ ID NO: 54275 - protein, 9 aa, Homo sapiens
  Table A; Target 54275; HLA-A*02:03; NPSR1; ENSG00000187258; TAA
VIIQNLPAL

SEQ ID NO: 54276 - protein, 9 aa, Homo sapiens
  Table A; Target 54276; HLA-A*02:04; NPSR1; ENSG00000187258; TAA
VIIQNLPAL

SEQ ID NO: 54277 - protein, 9 aa, Homo sapiens
  Table A; Target 54277; HLA-A*02:07; NPSR1; ENSG00000187258; TAA
VIIQNLPAL

SEQ ID NO: 54278 - protein, 9 aa, Homo sapiens
  Table A; Target 54278; HLA-A*11:01; NPSR1; ENSG00000187258; TAA
VIIQNLPAL

SEQ ID NO: 54279 - protein, 9 aa, Homo sapiens
  Table A; Target 54279; HLA-A*23:01; NPSR1; ENSG00000187258; TAA
VIIQNLPAL

SEQ ID NO: 54280 - protein, 9 aa, Homo sapiens
  Table A; Target 54280; HLA-A*24:02; NPSR1; ENSG00000187258; TAA
VIIQNLPAL

SEQ ID NO: 54281 - protein, 9 aa, Homo sapiens
  Table A; Target 54281; HLA-A*25:01; NPSR1; ENSG00000187258; TAA
VIIQNLPAL

SEQ ID NO: 54282 - protein, 9 aa, Homo sapiens
  Table A; Target 54282; HLA-A*26:01; NPSR1; ENSG00000187258; TAA
VIIQNLPAL

SEQ ID NO: 54283 - protein, 9 aa, Homo sapiens
  Table A; Target 54283; HLA-A*30:01; NPSR1; ENSG00000187258; TAA
VIIQNLPAL

SEQ ID NO: 54284 - protein, 9 aa, Homo sapiens
  Table A; Target 54284; HLA-A*32:01; NPSR1; ENSG00000187258; TAA
VIIQNLPAL

SEQ ID NO: 54285 - protein, 9 aa, Homo sapiens
  Table A; Target 54285; HLA-B*07:02; NPSR1; ENSG00000187258; TAA
VIIQNLPAL

SEQ ID NO: 54286 - protein, 9 aa, Homo sapiens
  Table A; Target 54286; HLA-B*08:01; NPSR1; ENSG00000187258; TAA
VIIQNLPAL

SEQ ID NO: 54287 - protein, 9 aa, Homo sapiens
  Table A; Target 54287; HLA-B*13:02; NPSR1; ENSG00000187258; TAA
VIIQNLPAL

SEQ ID NO: 54288 - protein, 9 aa, Homo sapiens
  Table A; Target 54288; HLA-B*15:01; NPSR1; ENSG00000187258; TAA
VIIQNLPAL

SEQ ID NO: 54289 - protein, 9 aa, Homo sapiens
  Table A; Target 54289; HLA-B*35:03; NPSR1; ENSG00000187258; TAA
VIIQNLPAL

SEQ ID NO: 54290 - protein, 9 aa, Homo sapiens
  Table A; Target 54290; HLA-B*40:01; NPSR1; ENSG00000187258; TAA
VIIQNLPAL

SEQ ID NO: 54291 - protein, 9 aa, Homo sapiens
  Table A; Target 54291; HLA-B*40:02; NPSR1; ENSG00000187258; TAA
VIIQNLPAL

SEQ ID NO: 54292 - protein, 9 aa, Homo sapiens
  Table A; Target 54292; HLA-B*46:01; NPSR1; ENSG00000187258; TAA
VIIQNLPAL

SEQ ID NO: 54293 - protein, 9 aa, Homo sapiens
  Table A; Target 54293; HLA-B*55:01; NPSR1; ENSG00000187258; TAA
VIIQNLPAL

SEQ ID NO: 54294 - protein, 9 aa, Homo sapiens
  Table A; Target 54294; HLA-B*58:01; NPSR1; ENSG00000187258; TAA
VIIQNLPAL

SEQ ID NO: 54295 - protein, 9 aa, Homo sapiens
  Table A; Target 54295; HLA-C*01:02; NPSR1; ENSG00000187258; TAA
VIIQNLPAL

SEQ ID NO: 54296 - protein, 9 aa, Homo sapiens
  Table A; Target 54296; HLA-C*02:02; NPSR1; ENSG00000187258; TAA
VIIQNLPAL

SEQ ID NO: 54297 - protein, 9 aa, Homo sapiens
  Table A; Target 54297; HLA-C*03:03; NPSR1; ENSG00000187258; TAA
VIIQNLPAL

SEQ ID NO: 54298 - protein, 9 aa, Homo sapiens
  Table A; Target 54298; HLA-C*03:04; NPSR1; ENSG00000187258; TAA
VIIQNLPAL

SEQ ID NO: 54299 - protein, 9 aa, Homo sapiens
  Table A; Target 54299; HLA-C*07:04; NPSR1; ENSG00000187258; TAA
VIIQNLPAL

SEQ ID NO: 54300 - protein, 9 aa, Homo sapiens
  Table A; Target 54300; HLA-C*14:02; NPSR1; ENSG00000187258; TAA
VIIQNLPAL

SEQ ID NO: 54301 - protein, 9 aa, Homo sapiens
  Table A; Target 54301; HLA-C*16:01; NPSR1; ENSG00000187258; TAA
VIIQNLPAL

SEQ ID NO: 54302 - protein, 9 aa, Homo sapiens
  Table A; Target 54302; HLA-C*16:02; NPSR1; ENSG00000187258; TAA
VIIQNLPAL

SEQ ID NO: 54303 - protein, 9 aa, Homo sapiens
  Table A; Target 54303; HLA-C*16:04; NPSR1; ENSG00000187258; TAA
VIIQNLPAL

SEQ ID NO: 54304 - protein, 9 aa, Homo sapiens
  Table A; Target 54304; HLA-A*03:01; NPSR1; ENSG00000187258; TAA
VLFSTWRRK

SEQ ID NO: 54305 - protein, 9 aa, Homo sapiens
  Table A; Target 54305; HLA-A*02:01; NPSR1; ENSG00000187258; TAA
VLIVIAWSL

SEQ ID NO: 54306 - protein, 9 aa, Homo sapiens
  Table A; Target 54306; HLA-A*02:04; NPSR1; ENSG00000187258; TAA
VLIVIAWSL

SEQ ID NO: 54307 - protein, 9 aa, Homo sapiens
  Table A; Target 54307; HLA-A*02:07; NPSR1; ENSG00000187258; TAA
VLIVIAWSL

SEQ ID NO: 54308 - protein, 8 aa, Homo sapiens
  Table A; Target 54308; HLA-B*15:01; NPSR1; ENSG00000187258; TAA
VLLYASTY

SEQ ID NO: 54309 - protein, 8 aa, Homo sapiens
  Table A; Target 54309; HLA-B*15:03; NPSR1; ENSG00000187258; TAA
VLLYASTY

SEQ ID NO: 54310 - protein, 8 aa, Homo sapiens
  Table A; Target 54310; HLA-B*46:01; NPSR1; ENSG00000187258; TAA
VLLYASTY

SEQ ID NO: 54311 - protein, 8 aa, Homo sapiens
  Table A; Target 54311; HLA-C*14:02; NPSR1; ENSG00000187258; TAA
VLLYASTY

SEQ ID NO: 54312 - protein, 9 aa, Homo sapiens
  Table A; Target 54312; HLA-A*02:01; NPSR1; ENSG00000187258; TAA
VLLYASTYV

SEQ ID NO: 54313 - protein, 10 aa, Homo sapiens
  Table A; Target 54313; HLA-A*01:01; NPSR1; ENSG00000187258; TAA
VLVSLSIDRY

SEQ ID NO: 54314 - protein, 10 aa, Homo sapiens
  Table A; Target 54314; HLA-A*29:02; NPSR1; ENSG00000187258; TAA
VLVSLSIDRY

SEQ ID NO: 54315 - protein, 10 aa, Homo sapiens
  Table A; Target 54315; HLA-A*30:02; NPSR1; ENSG00000187258; TAA
VLVSLSIDRY

SEQ ID NO: 54316 - protein, 10 aa, Homo sapiens
  Table A; Target 54316; HLA-B*15:01; NPSR1; ENSG00000187258; TAA
VLVSLSIDRY

SEQ ID NO: 54317 - protein, 9 aa, Homo sapiens
  Table A; Target 54317; HLA-B*57:01; NPSR1; ENSG00000187258; TAA
VNILTDINW

SEQ ID NO: 54318 - protein, 8 aa, Homo sapiens
  Table A; Target 54318; HLA-A*01:01; NPSR1; ENSG00000187258; TAA
VSLSIDRY

SEQ ID NO: 54319 - protein, 8 aa, Homo sapiens
  Table A; Target 54319; HLA-A*30:02; NPSR1; ENSG00000187258; TAA
VSLSIDRY

SEQ ID NO: 54320 - protein, 10 aa, Homo sapiens
  Table A; Target 54320; HLA-A*01:01; NPSR1; ENSG00000187258; TAA
VTFTEVVEGK

SEQ ID NO: 54321 - protein, 10 aa, Homo sapiens
  Table A; Target 54321; HLA-A*03:01; NPSR1; ENSG00000187258; TAA
VTFTEVVEGK

SEQ ID NO: 54322 - protein, 10 aa, Homo sapiens
  Table A; Target 54322; HLA-A*03:02; NPSR1; ENSG00000187258; TAA
VTFTEVVEGK

SEQ ID NO: 54323 - protein, 10 aa, Homo sapiens
  Table A; Target 54323; HLA-A*11:01; NPSR1; ENSG00000187258; TAA
VTFTEVVEGK

SEQ ID NO: 54324 - protein, 10 aa, Homo sapiens
  Table A; Target 54324; HLA-A*68:01; NPSR1; ENSG00000187258; TAA
VTFTEVVEGK

SEQ ID NO: 54325 - protein, 10 aa, Homo sapiens
  Table A; Target 54325; HLA-B*27:02; NPSR1; ENSG00000187258; TAA
VTFTEVVEGK

SEQ ID NO: 54326 - protein, 10 aa, Homo sapiens
  Table A; Target 54326; HLA-A*01:01; NPSR1; ENSG00000187258; TAA
VTQLAITDSF

SEQ ID NO: 54327 - protein, 10 aa, Homo sapiens
  Table A; Target 54327; HLA-A*24:02; NPSR1; ENSG00000187258; TAA
VTQLAITDSF

SEQ ID NO: 54328 - protein, 10 aa, Homo sapiens
  Table A; Target 54328; HLA-B*57:01; NPSR1; ENSG00000187258; TAA
VTQLAITDSF

SEQ ID NO: 54329 - protein, 10 aa, Homo sapiens
  Table A; Target 54329; HLA-B*58:01; NPSR1; ENSG00000187258; TAA
VTQLAITDSF

SEQ ID NO: 54330 - protein, 11 aa, Homo sapiens
  Table A; Target 54330; HLA-A*01:01; NPSR1; ENSG00000187258; TAA
VVEGKEWGSFY

SEQ ID NO: 54331 - protein, 9 aa, Homo sapiens
  Table A; Target 54331; HLA-A*03:01; NPSR1; ENSG00000187258; TAA
VVLLYASTY

SEQ ID NO: 54332 - protein, 9 aa, Homo sapiens
  Table A; Target 54332; HLA-A*29:02; NPSR1; ENSG00000187258; TAA
VVLLYASTY

SEQ ID NO: 54333 - protein, 9 aa, Homo sapiens
  Table A; Target 54333; HLA-A*30:02; NPSR1; ENSG00000187258; TAA
VVLLYASTY

SEQ ID NO: 54334 - protein, 9 aa, Homo sapiens
  Table A; Target 54334; HLA-A*32:01; NPSR1; ENSG00000187258; TAA
VVLLYASTY

SEQ ID NO: 54335 - protein, 9 aa, Homo sapiens
  Table A; Target 54335; HLA-B*15:01; NPSR1; ENSG00000187258; TAA
VVLLYASTY

SEQ ID NO: 54336 - protein, 9 aa, Homo sapiens
  Table A; Target 54336; HLA-B*15:03; NPSR1; ENSG00000187258; TAA
VVLLYASTY

SEQ ID NO: 54337 - protein, 9 aa, Homo sapiens
  Table A; Target 54337; HLA-B*35:01; NPSR1; ENSG00000187258; TAA
VVLLYASTY

SEQ ID NO: 54338 - protein, 9 aa, Homo sapiens
  Table A; Target 54338; HLA-B*46:01; NPSR1; ENSG00000187258; TAA
VVLLYASTY

SEQ ID NO: 54339 - protein, 9 aa, Homo sapiens
  Table A; Target 54339; HLA-C*01:02; NPSR1; ENSG00000187258; TAA
VVLLYASTY

SEQ ID NO: 54340 - protein, 9 aa, Homo sapiens
  Table A; Target 54340; HLA-C*02:02; NPSR1; ENSG00000187258; TAA
VVLLYASTY

SEQ ID NO: 54341 - protein, 9 aa, Homo sapiens
  Table A; Target 54341; HLA-C*07:04; NPSR1; ENSG00000187258; TAA
VVLLYASTY

SEQ ID NO: 54342 - protein, 9 aa, Homo sapiens
  Table A; Target 54342; HLA-C*14:02; NPSR1; ENSG00000187258; TAA
VVLLYASTY

SEQ ID NO: 54343 - protein, 8 aa, Homo sapiens
  Table A; Target 54343; HLA-A*23:01; NPSR1; ENSG00000187258; TAA
VYFIPLTI

SEQ ID NO: 54344 - protein, 8 aa, Homo sapiens
  Table A; Target 54344; HLA-A*24:02; NPSR1; ENSG00000187258; TAA
VYFIPLTI

SEQ ID NO: 54345 - protein, 8 aa, Homo sapiens
  Table A; Target 54345; HLA-B*51:01; NPSR1; ENSG00000187258; TAA
VYFIPLTI

SEQ ID NO: 54346 - protein, 9 aa, Homo sapiens
  Table A; Target 54346; HLA-A*23:01; NPSR1; ENSG00000187258; TAA
VYFIPLTII

SEQ ID NO: 54347 - protein, 9 aa, Homo sapiens
  Table A; Target 54347; HLA-A*24:02; NPSR1; ENSG00000187258; TAA
VYFIPLTII

SEQ ID NO: 54348 - protein, 11 aa, Homo sapiens
  Table A; Target 54348; HLA-A*24:02; NPSR1; ENSG00000187258; TAA
VYFIPLTIISI

SEQ ID NO: 54349 - protein, 9 aa, Homo sapiens
  Table A; Target 54349; HLA-A*24:02; NPSR1; ENSG00000187258; TAA
VYPMKFLQG

SEQ ID NO: 54350 - protein, 8 aa, Homo sapiens
  Table A; Target 54350; HLA-B*51:01; NPSR1; ENSG00000187258; TAA
YASTYVLV

SEQ ID NO: 54351 - protein, 8 aa, Homo sapiens
  Table A; Target 54351; HLA-C*02:02; NPSR1; ENSG00000187258; TAA
YASTYVLV

SEQ ID NO: 54352 - protein, 8 aa, Homo sapiens
  Table A; Target 54352; HLA-C*12:03; NPSR1; ENSG00000187258; TAA
YASTYVLV

SEQ ID NO: 54353 - protein, 9 aa, Homo sapiens
  Table A; Target 54353; HLA-C*12:03; NPSR1; ENSG00000187258; TAA
YASTYVLVS

SEQ ID NO: 54354 - protein, 10 aa, Homo sapiens
  Table A; Target 54354; HLA-A*30:01; NPSR1; ENSG00000187258; TAA
YASTYVLVSL

SEQ ID NO: 54355 - protein, 10 aa, Homo sapiens
  Table A; Target 54355; HLA-A*68:02; NPSR1; ENSG00000187258; TAA
YASTYVLVSL

SEQ ID NO: 54356 - protein, 10 aa, Homo sapiens
  Table A; Target 54356; HLA-B*35:03; NPSR1; ENSG00000187258; TAA
YASTYVLVSL

SEQ ID NO: 54357 - protein, 10 aa, Homo sapiens
  Table A; Target 54357; HLA-B*51:01; NPSR1; ENSG00000187258; TAA
YASTYVLVSL

SEQ ID NO: 54358 - protein, 10 aa, Homo sapiens
  Table A; Target 54358; HLA-B*54:01; NPSR1; ENSG00000187258; TAA
YASTYVLVSL

SEQ ID NO: 54359 - protein, 10 aa, Homo sapiens
  Table A; Target 54359; HLA-C*02:02; NPSR1; ENSG00000187258; TAA
YASTYVLVSL

SEQ ID NO: 54360 - protein, 10 aa, Homo sapiens
  Table A; Target 54360; HLA-C*03:03; NPSR1; ENSG00000187258; TAA
YASTYVLVSL

SEQ ID NO: 54361 - protein, 10 aa, Homo sapiens
  Table A; Target 54361; HLA-C*03:04; NPSR1; ENSG00000187258; TAA
YASTYVLVSL

SEQ ID NO: 54362 - protein, 10 aa, Homo sapiens
  Table A; Target 54362; HLA-C*12:03; NPSR1; ENSG00000187258; TAA
YASTYVLVSL

SEQ ID NO: 54363 - protein, 10 aa, Homo sapiens
  Table A; Target 54363; HLA-C*16:02; NPSR1; ENSG00000187258; TAA
YASTYVLVSL

SEQ ID NO: 54364 - protein, 10 aa, Homo sapiens
  Table A; Target 54364; HLA-C*16:04; NPSR1; ENSG00000187258; TAA
YASTYVLVSL

SEQ ID NO: 54365 - protein, 9 aa, Homo sapiens
  Table A; Target 54365; HLA-A*02:01; NPSR1; ENSG00000187258; TAA
YASVIIQNL

SEQ ID NO: 54366 - protein, 9 aa, Homo sapiens
  Table A; Target 54366; HLA-A*02:03; NPSR1; ENSG00000187258; TAA
YASVIIQNL

SEQ ID NO: 54367 - protein, 9 aa, Homo sapiens
  Table A; Target 54367; HLA-A*02:04; NPSR1; ENSG00000187258; TAA
YASVIIQNL

SEQ ID NO: 54368 - protein, 9 aa, Homo sapiens
  Table A; Target 54368; HLA-A*02:07; NPSR1; ENSG00000187258; TAA
YASVIIQNL

SEQ ID NO: 54369 - protein, 9 aa, Homo sapiens
  Table A; Target 54369; HLA-A*23:01; NPSR1; ENSG00000187258; TAA
YASVIIQNL

SEQ ID NO: 54370 - protein, 9 aa, Homo sapiens
  Table A; Target 54370; HLA-A*24:02; NPSR1; ENSG00000187258; TAA
YASVIIQNL

SEQ ID NO: 54371 - protein, 9 aa, Homo sapiens
  Table A; Target 54371; HLA-A*25:01; NPSR1; ENSG00000187258; TAA
YASVIIQNL

SEQ ID NO: 54372 - protein, 9 aa, Homo sapiens
  Table A; Target 54372; HLA-A*26:01; NPSR1; ENSG00000187258; TAA
YASVIIQNL

SEQ ID NO: 54373 - protein, 9 aa, Homo sapiens
  Table A; Target 54373; HLA-A*30:01; NPSR1; ENSG00000187258; TAA
YASVIIQNL

SEQ ID NO: 54374 - protein, 9 aa, Homo sapiens
  Table A; Target 54374; HLA-A*32:01; NPSR1; ENSG00000187258; TAA
YASVIIQNL

SEQ ID NO: 54375 - protein, 9 aa, Homo sapiens
  Table A; Target 54375; HLA-A*33:03; NPSR1; ENSG00000187258; TAA
YASVIIQNL

SEQ ID NO: 54376 - protein, 9 aa, Homo sapiens
  Table A; Target 54376; HLA-A*68:01; NPSR1; ENSG00000187258; TAA
YASVIIQNL

SEQ ID NO: 54377 - protein, 9 aa, Homo sapiens
  Table A; Target 54377; HLA-A*68:02; NPSR1; ENSG00000187258; TAA
YASVIIQNL

SEQ ID NO: 54378 - protein, 9 aa, Homo sapiens
  Table A; Target 54378; HLA-B*08:01; NPSR1; ENSG00000187258; TAA
YASVIIQNL

SEQ ID NO: 54379 - protein, 9 aa, Homo sapiens
  Table A; Target 54379; HLA-B*13:02; NPSR1; ENSG00000187258; TAA
YASVIIQNL

SEQ ID NO: 54380 - protein, 9 aa, Homo sapiens
  Table A; Target 54380; HLA-B*15:03; NPSR1; ENSG00000187258; TAA
YASVIIQNL

SEQ ID NO: 54381 - protein, 9 aa, Homo sapiens
  Table A; Target 54381; HLA-B*27:02; NPSR1; ENSG00000187258; TAA
YASVIIQNL

SEQ ID NO: 54382 - protein, 9 aa, Homo sapiens
  Table A; Target 54382; HLA-B*27:05; NPSR1; ENSG00000187258; TAA
YASVIIQNL

SEQ ID NO: 54383 - protein, 9 aa, Homo sapiens
  Table A; Target 54383; HLA-B*35:01; NPSR1; ENSG00000187258; TAA
YASVIIQNL

SEQ ID NO: 54384 - protein, 9 aa, Homo sapiens
  Table A; Target 54384; HLA-B*35:03; NPSR1; ENSG00000187258; TAA
YASVIIQNL

SEQ ID NO: 54385 - protein, 9 aa, Homo sapiens
  Table A; Target 54385; HLA-B*38:01; NPSR1; ENSG00000187258; TAA
YASVIIQNL

SEQ ID NO: 54386 - protein, 9 aa, Homo sapiens
  Table A; Target 54386; HLA-B*39:01; NPSR1; ENSG00000187258; TAA
YASVIIQNL

SEQ ID NO: 54387 - protein, 9 aa, Homo sapiens
  Table A; Target 54387; HLA-B*40:01; NPSR1; ENSG00000187258; TAA
YASVIIQNL

SEQ ID NO: 54388 - protein, 9 aa, Homo sapiens
  Table A; Target 54388; HLA-B*40:02; NPSR1; ENSG00000187258; TAA
YASVIIQNL

SEQ ID NO: 54389 - protein, 9 aa, Homo sapiens
  Table A; Target 54389; HLA-B*44:02; NPSR1; ENSG00000187258; TAA
YASVIIQNL

SEQ ID NO: 54390 - protein, 9 aa, Homo sapiens
  Table A; Target 54390; HLA-B*46:01; NPSR1; ENSG00000187258; TAA
YASVIIQNL

SEQ ID NO: 54391 - protein, 9 aa, Homo sapiens
  Table A; Target 54391; HLA-B*51:01; NPSR1; ENSG00000187258; TAA
YASVIIQNL

SEQ ID NO: 54392 - protein, 9 aa, Homo sapiens
  Table A; Target 54392; HLA-B*55:01; NPSR1; ENSG00000187258; TAA
YASVIIQNL

SEQ ID NO: 54393 - protein, 9 aa, Homo sapiens
  Table A; Target 54393; HLA-B*58:01; NPSR1; ENSG00000187258; TAA
YASVIIQNL

SEQ ID NO: 54394 - protein, 9 aa, Homo sapiens
  Table A; Target 54394; HLA-C*01:02; NPSR1; ENSG00000187258; TAA
YASVIIQNL

SEQ ID NO: 54395 - protein, 9 aa, Homo sapiens
  Table A; Target 54395; HLA-C*02:02; NPSR1; ENSG00000187258; TAA
YASVIIQNL

SEQ ID NO: 54396 - protein, 9 aa, Homo sapiens
  Table A; Target 54396; HLA-C*03:03; NPSR1; ENSG00000187258; TAA
YASVIIQNL

SEQ ID NO: 54397 - protein, 9 aa, Homo sapiens
  Table A; Target 54397; HLA-C*03:04; NPSR1; ENSG00000187258; TAA
YASVIIQNL

SEQ ID NO: 54398 - protein, 9 aa, Homo sapiens
  Table A; Target 54398; HLA-C*05:01; NPSR1; ENSG00000187258; TAA
YASVIIQNL

SEQ ID NO: 54399 - protein, 9 aa, Homo sapiens
  Table A; Target 54399; HLA-C*06:02; NPSR1; ENSG00000187258; TAA
YASVIIQNL

SEQ ID NO: 54400 - protein, 9 aa, Homo sapiens
  Table A; Target 54400; HLA-C*07:04; NPSR1; ENSG00000187258; TAA
YASVIIQNL

SEQ ID NO: 54401 - protein, 9 aa, Homo sapiens
  Table A; Target 54401; HLA-C*07:06; NPSR1; ENSG00000187258; TAA
YASVIIQNL

SEQ ID NO: 54402 - protein, 9 aa, Homo sapiens
  Table A; Target 54402; HLA-C*12:03; NPSR1; ENSG00000187258; TAA
YASVIIQNL

SEQ ID NO: 54403 - protein, 9 aa, Homo sapiens
  Table A; Target 54403; HLA-C*14:02; NPSR1; ENSG00000187258; TAA
YASVIIQNL

SEQ ID NO: 54404 - protein, 9 aa, Homo sapiens
  Table A; Target 54404; HLA-C*16:01; NPSR1; ENSG00000187258; TAA
YASVIIQNL

SEQ ID NO: 54405 - protein, 9 aa, Homo sapiens
  Table A; Target 54405; HLA-C*16:02; NPSR1; ENSG00000187258; TAA
YASVIIQNL

SEQ ID NO: 54406 - protein, 9 aa, Homo sapiens
  Table A; Target 54406; HLA-C*16:04; NPSR1; ENSG00000187258; TAA
YASVIIQNL

SEQ ID NO: 54407 - protein, 11 aa, Homo sapiens
  Table A; Target 54407; HLA-B*54:01; NPSR1; ENSG00000187258; TAA
YASVIIQNLPA

SEQ ID NO: 54408 - protein, 8 aa, Homo sapiens
  Table A; Target 54408; HLA-A*30:01; NPSR1; ENSG00000187258; TAA
YETVISNC

SEQ ID NO: 54409 - protein, 8 aa, Homo sapiens
  Table A; Target 54409; HLA-B*18:01; NPSR1; ENSG00000187258; TAA
YETVISNC

SEQ ID NO: 54410 - protein, 8 aa, Homo sapiens
  Table A; Target 54410; HLA-B*37:01; NPSR1; ENSG00000187258; TAA
YETVISNC

SEQ ID NO: 54411 - protein, 8 aa, Homo sapiens
  Table A; Target 54411; HLA-B*40:02; NPSR1; ENSG00000187258; TAA
YETVISNC

SEQ ID NO: 54412 - protein, 8 aa, Homo sapiens
  Table A; Target 54412; HLA-B*49:01; NPSR1; ENSG00000187258; TAA
YETVISNC

SEQ ID NO: 54413 - protein, 8 aa, Homo sapiens
  Table A; Target 54413; HLA-C*12:03; NPSR1; ENSG00000187258; TAA
YETVISNC

SEQ ID NO: 54414 - protein, 9 aa, Homo sapiens
  Table A; Target 54414; HLA-B*49:01; NPSR1; ENSG00000187258; TAA
YETVISNCS

SEQ ID NO: 54415 - protein, 8 aa, Homo sapiens
  Table A; Target 54415; HLA-A*23:01; NPSR1; ENSG00000187258; TAA
YFIPLTII

SEQ ID NO: 54416 - protein, 10 aa, Homo sapiens
  Table A; Target 54416; HLA-A*23:01; NPSR1; ENSG00000187258; TAA
YFIPLTIISI

SEQ ID NO: 54417 - protein, 10 aa, Homo sapiens
  Table A; Target 54417; HLA-A*24:02; NPSR1; ENSG00000187258; TAA
YFIPLTIISI

SEQ ID NO: 54418 - protein, 10 aa, Homo sapiens
  Table A; Target 54418; HLA-A*29:02; NPSR1; ENSG00000187258; TAA
YFLFDILDNF

SEQ ID NO: 54419 - protein, 8 aa, Homo sapiens
  Table A; Target 54419; HLA-B*51:01; NPSR1; ENSG00000187258; TAA
YGIVIRTI

SEQ ID NO: 54420 - protein, 9 aa, Homo sapiens
  Table A; Target 54420; HLA-B*57:01; NPSR1; ENSG00000187258; TAA
YGIVIRTIW

SEQ ID NO: 54421 - protein, 8 aa, Homo sapiens
  Table A; Target 54421; HLA-A*01:01; NPSR1; ENSG00000187258; TAA
YLQVVLLY

SEQ ID NO: 54422 - protein, 8 aa, Homo sapiens
  Table A; Target 54422; HLA-A*29:02; NPSR1; ENSG00000187258; TAA
YLQVVLLY

SEQ ID NO: 54423 - protein, 8 aa, Homo sapiens
  Table A; Target 54423; HLA-C*07:01; NPSR1; ENSG00000187258; TAA
YLQVVLLY

SEQ ID NO: 54424 - protein, 9 aa, Homo sapiens
  Table A; Target 54424; HLA-A*02:01; NPSR1; ENSG00000187258; TAA
YLQVVLLYA

SEQ ID NO: 54425 - protein, 9 aa, Homo sapiens
  Table A; Target 54425; HLA-A*02:03; NPSR1; ENSG00000187258; TAA
YLQVVLLYA

SEQ ID NO: 54426 - protein, 9 aa, Homo sapiens
  Table A; Target 54426; HLA-A*02:04; NPSR1; ENSG00000187258; TAA
YLQVVLLYA

SEQ ID NO: 54427 - protein, 9 aa, Homo sapiens
  Table A; Target 54427; HLA-A*02:07; NPSR1; ENSG00000187258; TAA
YLQVVLLYA

SEQ ID NO: 54428 - protein, 8 aa, Homo sapiens
  Table A; Target 54428; HLA-A*33:01; NPSR1; ENSG00000187258; TAA
YNRGLISK

SEQ ID NO: 54429 - protein, 8 aa, Homo sapiens
  Table A; Target 54429; HLA-B*54:01; NPSR1; ENSG00000187258; TAA
YPMKFLQG

SEQ ID NO: 54430 - protein, 8 aa, Homo sapiens
  Table A; Target 54430; HLA-B*58:01; NPSR1; ENSG00000187258; TAA
YSFKTEQL

SEQ ID NO: 54431 - protein, 8 aa, Homo sapiens
  Table A; Target 54431; HLA-C*03:03; NPSR1; ENSG00000187258; TAA
YSFKTEQL

SEQ ID NO: 54432 - protein, 8 aa, Homo sapiens
  Table A; Target 54432; HLA-C*03:04; NPSR1; ENSG00000187258; TAA
YSFKTEQL

SEQ ID NO: 54433 - protein, 9 aa, Homo sapiens
  Table A; Target 54433; HLA-A*68:02; NPSR1; ENSG00000187258; TAA
YSFKTEQLI

SEQ ID NO: 54434 - protein, 9 aa, Homo sapiens
  Table A; Target 54434; HLA-B*13:02; NPSR1; ENSG00000187258; TAA
YSFKTEQLI

SEQ ID NO: 54435 - protein, 9 aa, Homo sapiens
  Table A; Target 54435; HLA-B*51:01; NPSR1; ENSG00000187258; TAA
YSFKTEQLI

SEQ ID NO: 54436 - protein, 9 aa, Homo sapiens
  Table A; Target 54436; HLA-B*57:01; NPSR1; ENSG00000187258; TAA
YSFKTEQLI

SEQ ID NO: 54437 - protein, 9 aa, Homo sapiens
  Table A; Target 54437; HLA-B*58:01; NPSR1; ENSG00000187258; TAA
YSFKTEQLI

SEQ ID NO: 54438 - protein, 8 aa, Homo sapiens
  Table A; Target 54438; HLA-B*51:01; NPSR1; ENSG00000187258; TAA
YVLVSLSI

SEQ ID NO: 54439 - protein, 10 aa, Homo sapiens
  Table A; Target 54439; HLA-B*27:02; NPSR1; ENSG00000187258; TAA
YVLVSLSIDR

SEQ ID NO: 54440 - protein, 11 aa, Homo sapiens
  Table A; Target 54440; HLA-A*01:01; NPSR1; ENSG00000187258; TAA
YVLVSLSIDRY

SEQ ID NO: 54441 - protein, 11 aa, Homo sapiens
  Table A; Target 54441; HLA-A*29:02; NPSR1; ENSG00000187258; TAA
YVLVSLSIDRY

SEQ ID NO: 54442 - protein, 9 aa, Homo sapiens
  Table A; Target 54442; HLA-A*23:01; NPSR1; ENSG00000187258; TAA
YYSFKTEQL

SEQ ID NO: 54443 - protein, 9 aa, Homo sapiens
  Table A; Target 54443; HLA-A*24:02; NPSR1; ENSG00000187258; TAA
YYSFKTEQL

SEQ ID NO: 54444 - protein, 9 aa, Homo sapiens
  Table A; Target 54444; HLA-C*07:04; NPSR1; ENSG00000187258; TAA
YYSFKTEQL

SEQ ID NO: 54445 - protein, 9 aa, Homo sapiens
  Table A; Target 54445; HLA-C*14:02; NPSR1; ENSG00000187258; TAA
YYSFKTEQL

SEQ ID NO: 54446 - protein, 10 aa, Homo sapiens
  Table A; Target 54446; HLA-A*24:02; NPSR1; ENSG00000187258; TAA
YYSFKTEQLI

SEQ ID NO: 54447 - protein, 8 aa, Homo sapiens
  Table A; Target 54447; HLA-A*23:01; OBP2B; ENSG00000171102; TAA
AAALSFTL

SEQ ID NO: 54448 - protein, 8 aa, Homo sapiens
  Table A; Target 54448; HLA-A*30:01; OBP2B; ENSG00000171102; TAA
AAALSFTL

SEQ ID NO: 54449 - protein, 8 aa, Homo sapiens
  Table A; Target 54449; HLA-B*08:01; OBP2B; ENSG00000171102; TAA
AAALSFTL

SEQ ID NO: 54450 - protein, 8 aa, Homo sapiens
  Table A; Target 54450; HLA-B*35:03; OBP2B; ENSG00000171102; TAA
AAALSFTL

SEQ ID NO: 54451 - protein, 8 aa, Homo sapiens
  Table A; Target 54451; HLA-B*37:01; OBP2B; ENSG00000171102; TAA
AAALSFTL

SEQ ID NO: 54452 - protein, 8 aa, Homo sapiens
  Table A; Target 54452; HLA-B*40:01; OBP2B; ENSG00000171102; TAA
AAALSFTL

SEQ ID NO: 54453 - protein, 8 aa, Homo sapiens
  Table A; Target 54453; HLA-B*58:01; OBP2B; ENSG00000171102; TAA
AAALSFTL

SEQ ID NO: 54454 - protein, 8 aa, Homo sapiens
  Table A; Target 54454; HLA-C*01:02; OBP2B; ENSG00000171102; TAA
AAALSFTL

SEQ ID NO: 54455 - protein, 8 aa, Homo sapiens
  Table A; Target 54455; HLA-C*02:02; OBP2B; ENSG00000171102; TAA
AAALSFTL

SEQ ID NO: 54456 - protein, 8 aa, Homo sapiens
  Table A; Target 54456; HLA-C*03:03; OBP2B; ENSG00000171102; TAA
AAALSFTL

SEQ ID NO: 54457 - protein, 8 aa, Homo sapiens
  Table A; Target 54457; HLA-C*03:04; OBP2B; ENSG00000171102; TAA
AAALSFTL

SEQ ID NO: 54458 - protein, 8 aa, Homo sapiens
  Table A; Target 54458; HLA-C*14:02; OBP2B; ENSG00000171102; TAA
AAALSFTL

SEQ ID NO: 54459 - protein, 8 aa, Homo sapiens
  Table A; Target 54459; HLA-C*16:01; OBP2B; ENSG00000171102; TAA
AAALSFTL

SEQ ID NO: 54460 - protein, 8 aa, Homo sapiens
  Table A; Target 54460; HLA-C*16:04; OBP2B; ENSG00000171102; TAA
AAALSFTL

SEQ ID NO: 54461 - protein, 9 aa, Homo sapiens
  Table A; Target 54461; HLA-A*02:07; OBP2B; ENSG00000171102; TAA
ALEEFKKLV

SEQ ID NO: 54462 - protein, 11 aa, Homo sapiens
  Table A; Target 54462; HLA-A*31:01; OBP2B; ENSG00000171102; TAA
ALEEFKKLVQR

SEQ ID NO: 54463 - protein, 8 aa, Homo sapiens
  Table A; Target 54463; HLA-B*08:01; OBP2B; ENSG00000171102; TAA
CIQKKILM

SEQ ID NO: 54464 - protein, 9 aa, Homo sapiens
  Table A; Target 54464; HLA-A*33:01; OBP2B; ENSG00000171102; TAA
DITGTWYVK

SEQ ID NO: 54465 - protein, 9 aa, Homo sapiens
  Table A; Target 54465; HLA-A*68:01; OBP2B; ENSG00000171102; TAA
DITGTWYVK

SEQ ID NO: 54466 - protein, 10 aa, Homo sapiens
  Table A; Target 54466; HLA-A*25:01; OBP2B; ENSG00000171102; TAA
DTNREALEEF

SEQ ID NO: 54467 - protein, 10 aa, Homo sapiens
  Table A; Target 54467; HLA-A*26:01; OBP2B; ENSG00000171102; TAA
DTNREALEEF

SEQ ID NO: 54468 - protein, 10 aa, Homo sapiens
  Table A; Target 54468; HLA-A*33:01; OBP2B; ENSG00000171102; TAA
DTNREALEEF

SEQ ID NO: 54469 - protein, 9 aa, Homo sapiens
  Table A; Target 54469; HLA-A*33:01; OBP2B; ENSG00000171102; TAA
EALEEFKKL

SEQ ID NO: 54470 - protein, 8 aa, Homo sapiens
  Table A; Target 54470; HLA-A*33:03; OBP2B; ENSG00000171102; TAA
EATFTFMR

SEQ ID NO: 54471 - protein, 8 aa, Homo sapiens
  Table A; Target 54471; HLA-C*07:01; OBP2B; ENSG00000171102; TAA
EDITGTWY

SEQ ID NO: 54472 - protein, 9 aa, Homo sapiens
  Table A; Target 54472; HLA-A*68:02; OBP2B; ENSG00000171102; TAA
EDITGTWYV

SEQ ID NO: 54473 - protein, 8 aa, Homo sapiens
  Table A; Target 54473; HLA-B*18:01; OBP2B; ENSG00000171102; TAA
EEDIFTPL

SEQ ID NO: 54474 - protein, 11 aa, Homo sapiens
  Table A; Target 54474; HLA-B*39:01; OBP2B; ENSG00000171102; TAA
EEDIFTPLQTG

SEQ ID NO: 54475 - protein, 8 aa, Homo sapiens
  Table A; Target 54475; HLA-B*44:02; OBP2B; ENSG00000171102; TAA
EEDITGTW

SEQ ID NO: 54476 - protein, 8 aa, Homo sapiens
  Table A; Target 54476; HLA-B*44:03; OBP2B; ENSG00000171102; TAA
EEDITGTW

SEQ ID NO: 54477 - protein, 9 aa, Homo sapiens
  Table A; Target 54477; HLA-B*18:01; OBP2B; ENSG00000171102; TAA
EEDITGTWY

SEQ ID NO: 54478 - protein, 9 aa, Homo sapiens
  Table A; Target 54478; HLA-B*44:02; OBP2B; ENSG00000171102; TAA
EEDITGTWY

SEQ ID NO: 54479 - protein, 9 aa, Homo sapiens
  Table A; Target 54479; HLA-B*44:03; OBP2B; ENSG00000171102; TAA
EEDITGTWY

SEQ ID NO: 54480 - protein, 9 aa, Homo sapiens
  Table A; Target 54480; HLA-A*25:01; OBP2B; ENSG00000171102; TAA
EEEDITGTW

SEQ ID NO: 54481 - protein, 9 aa, Homo sapiens
  Table A; Target 54481; HLA-B*18:01; OBP2B; ENSG00000171102; TAA
EEEDITGTW

SEQ ID NO: 54482 - protein, 9 aa, Homo sapiens
  Table A; Target 54482; HLA-B*27:02; OBP2B; ENSG00000171102; TAA
EEEDITGTW

SEQ ID NO: 54483 - protein, 9 aa, Homo sapiens
  Table A; Target 54483; HLA-B*44:02; OBP2B; ENSG00000171102; TAA
EEEDITGTW

SEQ ID NO: 54484 - protein, 9 aa, Homo sapiens
  Table A; Target 54484; HLA-B*44:03; OBP2B; ENSG00000171102; TAA
EEEDITGTW

SEQ ID NO: 54485 - protein, 9 aa, Homo sapiens
  Table A; Target 54485; HLA-C*16:04; OBP2B; ENSG00000171102; TAA
EEEDITGTW

SEQ ID NO: 54486 - protein, 10 aa, Homo sapiens
  Table A; Target 54486; HLA-B*18:01; OBP2B; ENSG00000171102; TAA
EEEDITGTWY

SEQ ID NO: 54487 - protein, 10 aa, Homo sapiens
  Table A; Target 54487; HLA-B*44:02; OBP2B; ENSG00000171102; TAA
EEEDITGTWY

SEQ ID NO: 54488 - protein, 10 aa, Homo sapiens
  Table A; Target 54488; HLA-B*44:03; OBP2B; ENSG00000171102; TAA
EEEDITGTWY

SEQ ID NO: 54489 - protein, 9 aa, Homo sapiens
  Table A; Target 54489; HLA-A*33:01; OBP2B; ENSG00000171102; TAA
EEFKKLVQR

SEQ ID NO: 54490 - protein, 9 aa, Homo sapiens
  Table A; Target 54490; HLA-A*33:03; OBP2B; ENSG00000171102; TAA
EEFKKLVQR

SEQ ID NO: 54491 - protein, 9 aa, Homo sapiens
  Table A; Target 54491; HLA-B*44:03; OBP2B; ENSG00000171102; TAA
EEFKKLVQR

SEQ ID NO: 54492 - protein, 9 aa, Homo sapiens
  Table A; Target 54492; HLA-A*25:01; OBP2B; ENSG00000171102; TAA
EEPGKYSAY

SEQ ID NO: 54493 - protein, 9 aa, Homo sapiens
  Table A; Target 54493; HLA-A*26:01; OBP2B; ENSG00000171102; TAA
EEPGKYSAY

SEQ ID NO: 54494 - protein, 9 aa, Homo sapiens
  Table A; Target 54494; HLA-B*18:01; OBP2B; ENSG00000171102; TAA
EEPGKYSAY

SEQ ID NO: 54495 - protein, 9 aa, Homo sapiens
  Table A; Target 54495; HLA-B*44:02; OBP2B; ENSG00000171102; TAA
EEPGKYSAY

SEQ ID NO: 54496 - protein, 9 aa, Homo sapiens
  Table A; Target 54496; HLA-B*44:03; OBP2B; ENSG00000171102; TAA
EEPGKYSAY

SEQ ID NO: 54497 - protein, 8 aa, Homo sapiens
  Table A; Target 54497; HLA-A*33:01; OBP2B; ENSG00000171102; TAA
EFKKLVQR

SEQ ID NO: 54498 - protein, 8 aa, Homo sapiens
  Table A; Target 54498; HLA-A*33:03; OBP2B; ENSG00000171102; TAA
EFKKLVQR

SEQ ID NO: 54499 - protein, 8 aa, Homo sapiens
  Table A; Target 54499; HLA-B*35:01; OBP2B; ENSG00000171102; TAA
EPGKYSAY

SEQ ID NO: 54500 - protein, 8 aa, Homo sapiens
  Table A; Target 54500; HLA-A*02:01; OBP2B; ENSG00000171102; TAA
FLGVTLGL

SEQ ID NO: 54501 - protein, 8 aa, Homo sapiens
  Table A; Target 54501; HLA-A*02:03; OBP2B; ENSG00000171102; TAA
FLGVTLGL

SEQ ID NO: 54502 - protein, 8 aa, Homo sapiens
  Table A; Target 54502; HLA-A*02:04; OBP2B; ENSG00000171102; TAA
FLGVTLGL

SEQ ID NO: 54503 - protein, 10 aa, Homo sapiens
  Table A; Target 54503; HLA-C*01:02; OBP2B; ENSG00000171102; TAA
FTPLQTGSCV

SEQ ID NO: 54504 - protein, 9 aa, Homo sapiens
  Table A; Target 54504; HLA-B*15:03; OBP2B; ENSG00000171102; TAA
GKLEATFTF

SEQ ID NO: 54505 - protein, 10 aa, Homo sapiens
  Table A; Target 54505; HLA-A*02:01; OBP2B; ENSG00000171102; TAA
GLAAALSFTL

SEQ ID NO: 54506 - protein, 10 aa, Homo sapiens
  Table A; Target 54506; HLA-A*02:04; OBP2B; ENSG00000171102; TAA
GLAAALSFTL

SEQ ID NO: 54507 - protein, 11 aa, Homo sapiens
  Table A; Target 54507; HLA-A*31:01; OBP2B; ENSG00000171102; TAA
GLLHMGKLVGR

SEQ ID NO: 54508 - protein, 11 aa, Homo sapiens
  Table A; Target 54508; HLA-A*02:01; OBP2B; ENSG00000171102; TAA
GLSEEDIFTPL

SEQ ID NO: 54509 - protein, 11 aa, Homo sapiens
  Table A; Target 54509; HLA-A*02:04; OBP2B; ENSG00000171102; TAA
GLSEEDIFTPL

SEQ ID NO: 54510 - protein, 11 aa, Homo sapiens
  Table A; Target 54510; HLA-A*02:07; OBP2B; ENSG00000171102; TAA
GLSEEDIFTPL

SEQ ID NO: 54511 - protein, 9 aa, Homo sapiens
  Table A; Target 54511; HLA-B*56:01; OBP2B; ENSG00000171102; TAA
GVTLGLAAA

SEQ ID NO: 54512 - protein, 8 aa, Homo sapiens
  Table A; Target 54512; HLA-A*33:01; OBP2B; ENSG00000171102; TAA
HMGKLVGR

SEQ ID NO: 54513 - protein, 9 aa, Homo sapiens
  Table A; Target 54513; HLA-B*57:01; OBP2B; ENSG00000171102; TAA
KAMVVDKDF

SEQ ID NO: 54514 - protein, 9 aa, Homo sapiens
  Table A; Target 54514; HLA-B*37:01; OBP2B; ENSG00000171102; TAA
KDQHHGGLL

SEQ ID NO: 54515 - protein, 9 aa, Homo sapiens
  Table A; Target 54515; HLA-A*02:07; OBP2B; ENSG00000171102; TAA
KLEATFTFM

SEQ ID NO: 54516 - protein, 8 aa, Homo sapiens
  Table A; Target 54516; HLA-A*01:01; OBP2B; ENSG00000171102; TAA
KTEEPGKY

SEQ ID NO: 54517 - protein, 8 aa, Homo sapiens
  Table A; Target 54517; HLA-A*30:02; OBP2B; ENSG00000171102; TAA
KTEEPGKY

SEQ ID NO: 54518 - protein, 8 aa, Homo sapiens
  Table A; Target 54518; HLA-B*39:01; OBP2B; ENSG00000171102; TAA
KTEEPGKY

SEQ ID NO: 54519 - protein, 8 aa, Homo sapiens
  Table A; Target 54519; HLA-C*05:01; OBP2B; ENSG00000171102; TAA
KTEEPGKY

SEQ ID NO: 54520 - protein, 10 aa, Homo sapiens
  Table A; Target 54520; HLA-A*01:01; OBP2B; ENSG00000171102; TAA
KTEEPGKYSA

SEQ ID NO: 54521 - protein, 11 aa, Homo sapiens
  Table A; Target 54521; HLA-A*01:01; OBP2B; ENSG00000171102; TAA
KTEEPGKYSAY

SEQ ID NO: 54522 - protein, 11 aa, Homo sapiens
  Table A; Target 54522; HLA-A*03:01; OBP2B; ENSG00000171102; TAA
KTEEPGKYSAY

SEQ ID NO: 54523 - protein, 11 aa, Homo sapiens
  Table A; Target 54523; HLA-A*03:02; OBP2B; ENSG00000171102; TAA
KTEEPGKYSAY

SEQ ID NO: 54524 - protein, 11 aa, Homo sapiens
  Table A; Target 54524; HLA-A*25:01; OBP2B; ENSG00000171102; TAA
KTEEPGKYSAY

SEQ ID NO: 54525 - protein, 11 aa, Homo sapiens
  Table A; Target 54525; HLA-A*26:01; OBP2B; ENSG00000171102; TAA
KTEEPGKYSAY

SEQ ID NO: 54526 - protein, 11 aa, Homo sapiens
  Table A; Target 54526; HLA-A*29:02; OBP2B; ENSG00000171102; TAA
KTEEPGKYSAY

SEQ ID NO: 54527 - protein, 11 aa, Homo sapiens
  Table A; Target 54527; HLA-A*30:02; OBP2B; ENSG00000171102; TAA
KTEEPGKYSAY

SEQ ID NO: 54528 - protein, 11 aa, Homo sapiens
  Table A; Target 54528; HLA-A*32:01; OBP2B; ENSG00000171102; TAA
KTEEPGKYSAY

SEQ ID NO: 54529 - protein, 11 aa, Homo sapiens
  Table A; Target 54529; HLA-C*01:02; OBP2B; ENSG00000171102; TAA
KTEEPGKYSAY

SEQ ID NO: 54530 - protein, 11 aa, Homo sapiens
  Table A; Target 54530; HLA-C*12:03; OBP2B; ENSG00000171102; TAA
KTEEPGKYSAY

SEQ ID NO: 54531 - protein, 11 aa, Homo sapiens
  Table A; Target 54531; HLA-C*16:01; OBP2B; ENSG00000171102; TAA
KTEEPGKYSAY

SEQ ID NO: 54532 - protein, 11 aa, Homo sapiens
  Table A; Target 54532; HLA-C*16:02; OBP2B; ENSG00000171102; TAA
KTEEPGKYSAY

SEQ ID NO: 54533 - protein, 9 aa, Homo sapiens
  Table A; Target 54533; HLA-A*02:04; OBP2B; ENSG00000171102; TAA
KTLFLGVTL

SEQ ID NO: 54534 - protein, 9 aa, Homo sapiens
  Table A; Target 54534; HLA-A*31:01; OBP2B; ENSG00000171102; TAA
KTLFLGVTL

SEQ ID NO: 54535 - protein, 9 aa, Homo sapiens
  Table A; Target 54535; HLA-B*57:01; OBP2B; ENSG00000171102; TAA
KTLFLGVTL

SEQ ID NO: 54536 - protein, 9 aa, Homo sapiens
  Table A; Target 54536; HLA-B*58:01; OBP2B; ENSG00000171102; TAA
KTLFLGVTL

SEQ ID NO: 54537 - protein, 9 aa, Homo sapiens
  Table A; Target 54537; HLA-C*03:04; OBP2B; ENSG00000171102; TAA
KTLFLGVTL

SEQ ID NO: 54538 - protein, 9 aa, Homo sapiens
  Table A; Target 54538; HLA-A*32:01; OBP2B; ENSG00000171102; TAA
KVSPVKVTA

SEQ ID NO: 54539 - protein, 9 aa, Homo sapiens
  Table A; Target 54539; HLA-B*37:01; OBP2B; ENSG00000171102; TAA
KVSPVKVTA

SEQ ID NO: 54540 - protein, 9 aa, Homo sapiens
  Table A; Target 54540; HLA-B*55:01; OBP2B; ENSG00000171102; TAA
KVSPVKVTA

SEQ ID NO: 54541 - protein, 9 aa, Homo sapiens
  Table A; Target 54541; HLA-B*56:01; OBP2B; ENSG00000171102; TAA
KVSPVKVTA

SEQ ID NO: 54542 - protein, 9 aa, Homo sapiens
  Table A; Target 54542; HLA-B*58:01; OBP2B; ENSG00000171102; TAA
KVSPVKVTA

SEQ ID NO: 54543 - protein, 9 aa, Homo sapiens
  Table A; Target 54543; HLA-C*16:01; OBP2B; ENSG00000171102; TAA
KVSPVKVTA

SEQ ID NO: 54544 - protein, 10 aa, Homo sapiens
  Table A; Target 54544; HLA-A*02:03; OBP2B; ENSG00000171102; TAA
KVSPVKVTAL

SEQ ID NO: 54545 - protein, 10 aa, Homo sapiens
  Table A; Target 54545; HLA-A*02:04; OBP2B; ENSG00000171102; TAA
KVSPVKVTAL

SEQ ID NO: 54546 - protein, 10 aa, Homo sapiens
  Table A; Target 54546; HLA-A*03:01; OBP2B; ENSG00000171102; TAA
KVSPVKVTAL

SEQ ID NO: 54547 - protein, 10 aa, Homo sapiens
  Table A; Target 54547; HLA-A*03:02; OBP2B; ENSG00000171102; TAA
KVSPVKVTAL

SEQ ID NO: 54548 - protein, 10 aa, Homo sapiens
  Table A; Target 54548; HLA-A*25:01; OBP2B; ENSG00000171102; TAA
KVSPVKVTAL

SEQ ID NO: 54549 - protein, 10 aa, Homo sapiens
  Table A; Target 54549; HLA-A*32:01; OBP2B; ENSG00000171102; TAA
KVSPVKVTAL

SEQ ID NO: 54550 - protein, 10 aa, Homo sapiens
  Table A; Target 54550; HLA-B*07:02; OBP2B; ENSG00000171102; TAA
KVSPVKVTAL

SEQ ID NO: 54551 - protein, 10 aa, Homo sapiens
  Table A; Target 54551; HLA-C*01:02; OBP2B; ENSG00000171102; TAA
KVSPVKVTAL

SEQ ID NO: 54552 - protein, 9 aa, Homo sapiens
  Table A; Target 54552; HLA-B*35:01; OBP2B; ENSG00000171102; TAA
LAAALSFTL

SEQ ID NO: 54553 - protein, 9 aa, Homo sapiens
  Table A; Target 54553; HLA-B*35:03; OBP2B; ENSG00000171102; TAA
LAAALSFTL

SEQ ID NO: 54554 - protein, 9 aa, Homo sapiens
  Table A; Target 54554; HLA-B*58:01; OBP2B; ENSG00000171102; TAA
LAAALSFTL

SEQ ID NO: 54555 - protein, 9 aa, Homo sapiens
  Table A; Target 54555; HLA-C*02:02; OBP2B; ENSG00000171102; TAA
LAAALSFTL

SEQ ID NO: 54556 - protein, 9 aa, Homo sapiens
  Table A; Target 54556; HLA-C*03:03; OBP2B; ENSG00000171102; TAA
LAAALSFTL

SEQ ID NO: 54557 - protein, 9 aa, Homo sapiens
  Table A; Target 54557; HLA-C*03:04; OBP2B; ENSG00000171102; TAA
LAAALSFTL

SEQ ID NO: 54558 - protein, 9 aa, Homo sapiens
  Table A; Target 54558; HLA-C*12:03; OBP2B; ENSG00000171102; TAA
LAAALSFTL

SEQ ID NO: 54559 - protein, 9 aa, Homo sapiens
  Table A; Target 54559; HLA-C*16:04; OBP2B; ENSG00000171102; TAA
LAAALSFTL

SEQ ID NO: 54560 - protein, 8 aa, Homo sapiens
  Table A; Target 54560; HLA-B*18:01; OBP2B; ENSG00000171102; TAA
LEATFTFM

SEQ ID NO: 54561 - protein, 8 aa, Homo sapiens
  Table A; Target 54561; HLA-B*49:01; OBP2B; ENSG00000171102; TAA
LEATFTFM

SEQ ID NO: 54562 - protein, 10 aa, Homo sapiens
  Table A; Target 54562; HLA-B*44:02; OBP2B; ENSG00000171102; TAA
LEEEDITGTW

SEQ ID NO: 54563 - protein, 10 aa, Homo sapiens
  Table A; Target 54563; HLA-B*44:03; OBP2B; ENSG00000171102; TAA
LEEEDITGTW

SEQ ID NO: 54564 - protein, 9 aa, Homo sapiens
  Table A; Target 54564; HLA-A*23:01; OBP2B; ENSG00000171102; TAA
LFLGVTLGL

SEQ ID NO: 54565 - protein, 9 aa, Homo sapiens
  Table A; Target 54565; HLA-B*54:01; OBP2B; ENSG00000171102; TAA
LGVTLGLAA

SEQ ID NO: 54566 - protein, 9 aa, Homo sapiens
  Table A; Target 54566; HLA-A*31:01; OBP2B; ENSG00000171102; TAA
LHMGKLVGR

SEQ ID NO: 54567 - protein, 9 aa, Homo sapiens
  Table A; Target 54567; HLA-A*01:01; OBP2B; ENSG00000171102; TAA
NSDTNREAL

SEQ ID NO: 54568 - protein, 9 aa, Homo sapiens
  Table A; Target 54568; HLA-B*35:03; OBP2B; ENSG00000171102; TAA
NSDTNREAL

SEQ ID NO: 54569 - protein, 9 aa, Homo sapiens
  Table A; Target 54569; HLA-C*01:02; OBP2B; ENSG00000171102; TAA
NSDTNREAL

SEQ ID NO: 54570 - protein, 9 aa, Homo sapiens
  Table A; Target 54570; HLA-C*03:03; OBP2B; ENSG00000171102; TAA
NSDTNREAL

SEQ ID NO: 54571 - protein, 9 aa, Homo sapiens
  Table A; Target 54571; HLA-C*03:04; OBP2B; ENSG00000171102; TAA
NSDTNREAL

SEQ ID NO: 54572 - protein, 9 aa, Homo sapiens
  Table A; Target 54572; HLA-C*05:01; OBP2B; ENSG00000171102; TAA
NSDTNREAL

SEQ ID NO: 54573 - protein, 9 aa, Homo sapiens
  Table A; Target 54573; HLA-C*16:01; OBP2B; ENSG00000171102; TAA
NSDTNREAL

SEQ ID NO: 54574 - protein, 9 aa, Homo sapiens
  Table A; Target 54574; HLA-B*44:02; OBP2B; ENSG00000171102; TAA
QELPRRDHY

SEQ ID NO: 54575 - protein, 9 aa, Homo sapiens
  Table A; Target 54575; HLA-B*44:03; OBP2B; ENSG00000171102; TAA
QELPRRDHY

SEQ ID NO: 54576 - protein, 9 aa, Homo sapiens
  Table A; Target 54576; HLA-B*38:01; OBP2B; ENSG00000171102; TAA
QHHGGLLHM

SEQ ID NO: 54577 - protein, 9 aa, Homo sapiens
  Table A; Target 54577; HLA-C*07:01; OBP2B; ENSG00000171102; TAA
QHHGGLLHM

SEQ ID NO: 54578 - protein, 9 aa, Homo sapiens
  Table A; Target 54578; HLA-C*07:01; OBP2B; ENSG00000171102; TAA
QTGSCVPEH

SEQ ID NO: 54579 - protein, 10 aa, Homo sapiens
  Table A; Target 54579; HLA-B*44:02; OBP2B; ENSG00000171102; TAA
REALEEFKKL

SEQ ID NO: 54580 - protein, 10 aa, Homo sapiens
  Table A; Target 54580; HLA-B*44:03; OBP2B; ENSG00000171102; TAA
REALEEFKKL

SEQ ID NO: 54581 - protein, 9 aa, Homo sapiens
  Table A; Target 54581; HLA-B*15:03; OBP2B; ENSG00000171102; TAA
RKTEEPGKY

SEQ ID NO: 54582 - protein, 10 aa, Homo sapiens
  Table A; Target 54582; HLA-B*07:02; OBP2B; ENSG00000171102; TAA
RPRKVSPVKV

SEQ ID NO: 54583 - protein, 8 aa, Homo sapiens
  Table A; Target 54583; HLA-C*03:03; OBP2B; ENSG00000171102; TAA
SAYGGRKL

SEQ ID NO: 54584 - protein, 8 aa, Homo sapiens
  Table A; Target 54584; HLA-C*03:04; OBP2B; ENSG00000171102; TAA
SAYGGRKL

SEQ ID NO: 54585 - protein, 8 aa, Homo sapiens
  Table A; Target 54585; HLA-C*16:01; OBP2B; ENSG00000171102; TAA
SAYGGRKL

SEQ ID NO: 54586 - protein, 9 aa, Homo sapiens
  Table A; Target 54586; HLA-C*02:02; OBP2B; ENSG00000171102; TAA
SAYGGRKLM

SEQ ID NO: 54587 - protein, 9 aa, Homo sapiens
  Table A; Target 54587; HLA-C*12:03; OBP2B; ENSG00000171102; TAA
SAYGGRKLM

SEQ ID NO: 54588 - protein, 9 aa, Homo sapiens
  Table A; Target 54588; HLA-C*16:01; OBP2B; ENSG00000171102; TAA
SAYGGRKLM

SEQ ID NO: 54589 - protein, 9 aa, Homo sapiens
  Table A; Target 54589; HLA-C*16:02; OBP2B; ENSG00000171102; TAA
SAYGGRKLM

SEQ ID NO: 54590 - protein, 10 aa, Homo sapiens
  Table A; Target 54590; HLA-A*03:01; OBP2B; ENSG00000171102; TAA
SAYGGRKLMY

SEQ ID NO: 54591 - protein, 10 aa, Homo sapiens
  Table A; Target 54591; HLA-A*29:02; OBP2B; ENSG00000171102; TAA
SAYGGRKLMY

SEQ ID NO: 54592 - protein, 10 aa, Homo sapiens
  Table A; Target 54592; HLA-C*02:02; OBP2B; ENSG00000171102; TAA
SAYGGRKLMY

SEQ ID NO: 54593 - protein, 8 aa, Homo sapiens
  Table A; Target 54593; HLA-B*37:01; OBP2B; ENSG00000171102; TAA
SDTNREAL

SEQ ID NO: 54594 - protein, 8 aa, Homo sapiens
  Table A; Target 54594; HLA-C*16:01; OBP2B; ENSG00000171102; TAA
SDTNREAL

SEQ ID NO: 54595 - protein, 9 aa, Homo sapiens
  Table A; Target 54595; HLA-A*30:01; OBP2B; ENSG00000171102; TAA
SEEDIFTPL

SEQ ID NO: 54596 - protein, 9 aa, Homo sapiens
  Table A; Target 54596; HLA-B*18:01; OBP2B; ENSG00000171102; TAA
SEEDIFTPL

SEQ ID NO: 54597 - protein, 9 aa, Homo sapiens
  Table A; Target 54597; HLA-B*37:01; OBP2B; ENSG00000171102; TAA
SEEDIFTPL

SEQ ID NO: 54598 - protein, 9 aa, Homo sapiens
  Table A; Target 54598; HLA-B*40:01; OBP2B; ENSG00000171102; TAA
SEEDIFTPL

SEQ ID NO: 54599 - protein, 9 aa, Homo sapiens
  Table A; Target 54599; HLA-B*40:02; OBP2B; ENSG00000171102; TAA
SEEDIFTPL

SEQ ID NO: 54600 - protein, 9 aa, Homo sapiens
  Table A; Target 54600; HLA-B*44:02; OBP2B; ENSG00000171102; TAA
SEEDIFTPL

SEQ ID NO: 54601 - protein, 9 aa, Homo sapiens
  Table A; Target 54601; HLA-B*44:03; OBP2B; ENSG00000171102; TAA
SEEDIFTPL

SEQ ID NO: 54602 - protein, 9 aa, Homo sapiens
  Table A; Target 54602; HLA-B*49:01; OBP2B; ENSG00000171102; TAA
SEEDIFTPL

SEQ ID NO: 54603 - protein, 8 aa, Homo sapiens
  Table A; Target 54603; HLA-B*07:02; OBP2B; ENSG00000171102; TAA
SPVKVTAL

SEQ ID NO: 54604 - protein, 8 aa, Homo sapiens
  Table A; Target 54604; HLA-B*08:01; OBP2B; ENSG00000171102; TAA
SPVKVTAL

SEQ ID NO: 54605 - protein, 8 aa, Homo sapiens
  Table A; Target 54605; HLA-B*35:01; OBP2B; ENSG00000171102; TAA
SPVKVTAL

SEQ ID NO: 54606 - protein, 8 aa, Homo sapiens
  Table A; Target 54606; HLA-B*35:03; OBP2B; ENSG00000171102; TAA
SPVKVTAL

SEQ ID NO: 54607 - protein, 8 aa, Homo sapiens
  Table A; Target 54607; HLA-B*51:01; OBP2B; ENSG00000171102; TAA
SPVKVTAL

SEQ ID NO: 54608 - protein, 8 aa, Homo sapiens
  Table A; Target 54608; HLA-B*55:01; OBP2B; ENSG00000171102; TAA
SPVKVTAL

SEQ ID NO: 54609 - protein, 8 aa, Homo sapiens
  Table A; Target 54609; HLA-B*56:01; OBP2B; ENSG00000171102; TAA
SPVKVTAL

SEQ ID NO: 54610 - protein, 8 aa, Homo sapiens
  Table A; Target 54610; HLA-C*03:04; OBP2B; ENSG00000171102; TAA
SPVKVTAL

SEQ ID NO: 54611 - protein, 8 aa, Homo sapiens
  Table A; Target 54611; HLA-C*07:02; OBP2B; ENSG00000171102; TAA
SPVKVTAL

SEQ ID NO: 54612 - protein, 8 aa, Homo sapiens
  Table A; Target 54612; HLA-C*03:04; OBP2B; ENSG00000171102; TAA
TALGGGKL

SEQ ID NO: 54613 - protein, 10 aa, Homo sapiens
  Table A; Target 54613; HLA-B*54:01; OBP2B; ENSG00000171102; TAA
TALGGGKLEA

SEQ ID NO: 54614 - protein, 10 aa, Homo sapiens
  Table A; Target 54614; HLA-B*56:01; OBP2B; ENSG00000171102; TAA
TALGGGKLEA

SEQ ID NO: 54615 - protein, 9 aa, Homo sapiens
  Table A; Target 54615; HLA-A*30:01; OBP2B; ENSG00000171102; TAA
TEEPGKYSA

SEQ ID NO: 54616 - protein, 9 aa, Homo sapiens
  Table A; Target 54616; HLA-B*18:01; OBP2B; ENSG00000171102; TAA
TEEPGKYSA

SEQ ID NO: 54617 - protein, 9 aa, Homo sapiens
  Table A; Target 54617; HLA-B*37:01; OBP2B; ENSG00000171102; TAA
TEEPGKYSA

SEQ ID NO: 54618 - protein, 9 aa, Homo sapiens
  Table A; Target 54618; HLA-B*40:01; OBP2B; ENSG00000171102; TAA
TEEPGKYSA

SEQ ID NO: 54619 - protein, 9 aa, Homo sapiens
  Table A; Target 54619; HLA-B*40:02; OBP2B; ENSG00000171102; TAA
TEEPGKYSA

SEQ ID NO: 54620 - protein, 9 aa, Homo sapiens
  Table A; Target 54620; HLA-B*44:02; OBP2B; ENSG00000171102; TAA
TEEPGKYSA

SEQ ID NO: 54621 - protein, 9 aa, Homo sapiens
  Table A; Target 54621; HLA-B*44:03; OBP2B; ENSG00000171102; TAA
TEEPGKYSA

SEQ ID NO: 54622 - protein, 9 aa, Homo sapiens
  Table A; Target 54622; HLA-B*49:01; OBP2B; ENSG00000171102; TAA
TEEPGKYSA

SEQ ID NO: 54623 - protein, 10 aa, Homo sapiens
  Table A; Target 54623; HLA-A*01:01; OBP2B; ENSG00000171102; TAA
TEEPGKYSAY

SEQ ID NO: 54624 - protein, 10 aa, Homo sapiens
  Table A; Target 54624; HLA-A*25:01; OBP2B; ENSG00000171102; TAA
TEEPGKYSAY

SEQ ID NO: 54625 - protein, 10 aa, Homo sapiens
  Table A; Target 54625; HLA-A*30:02; OBP2B; ENSG00000171102; TAA
TEEPGKYSAY

SEQ ID NO: 54626 - protein, 10 aa, Homo sapiens
  Table A; Target 54626; HLA-B*18:01; OBP2B; ENSG00000171102; TAA
TEEPGKYSAY

SEQ ID NO: 54627 - protein, 10 aa, Homo sapiens
  Table A; Target 54627; HLA-B*27:02; OBP2B; ENSG00000171102; TAA
TEEPGKYSAY

SEQ ID NO: 54628 - protein, 10 aa, Homo sapiens
  Table A; Target 54628; HLA-B*40:01; OBP2B; ENSG00000171102; TAA
TEEPGKYSAY

SEQ ID NO: 54629 - protein, 10 aa, Homo sapiens
  Table A; Target 54629; HLA-B*44:02; OBP2B; ENSG00000171102; TAA
TEEPGKYSAY

SEQ ID NO: 54630 - protein, 10 aa, Homo sapiens
  Table A; Target 54630; HLA-B*44:03; OBP2B; ENSG00000171102; TAA
TEEPGKYSAY

SEQ ID NO: 54631 - protein, 10 aa, Homo sapiens
  Table A; Target 54631; HLA-C*02:02; OBP2B; ENSG00000171102; TAA
TEEPGKYSAY

SEQ ID NO: 54632 - protein, 10 aa, Homo sapiens
  Table A; Target 54632; HLA-C*07:04; OBP2B; ENSG00000171102; TAA
TEEPGKYSAY

SEQ ID NO: 54633 - protein, 10 aa, Homo sapiens
  Table A; Target 54633; HLA-C*16:04; OBP2B; ENSG00000171102; TAA
TEEPGKYSAY

SEQ ID NO: 54634 - protein, 8 aa, Homo sapiens
  Table A; Target 54634; HLA-C*01:02; OBP2B; ENSG00000171102; TAA
TLFLGVTL

SEQ ID NO: 54635 - protein, 8 aa, Homo sapiens
  Table A; Target 54635; HLA-C*07:04; OBP2B; ENSG00000171102; TAA
TLFLGVTL

SEQ ID NO: 54636 - protein, 10 aa, Homo sapiens
  Table A; Target 54636; HLA-A*02:01; OBP2B; ENSG00000171102; TAA
TLFLGVTLGL

SEQ ID NO: 54637 - protein, 10 aa, Homo sapiens
  Table A; Target 54637; HLA-A*02:03; OBP2B; ENSG00000171102; TAA
TLFLGVTLGL

SEQ ID NO: 54638 - protein, 10 aa, Homo sapiens
  Table A; Target 54638; HLA-A*02:04; OBP2B; ENSG00000171102; TAA
TLFLGVTLGL

SEQ ID NO: 54639 - protein, 11 aa, Homo sapiens
  Table A; Target 54639; HLA-A*02:03; OBP2B; ENSG00000171102; TAA
TLFLGVTLGLA

SEQ ID NO: 54640 - protein, 8 aa, Homo sapiens
  Table A; Target 54640; HLA-B*08:01; OBP2B; ENSG00000171102; TAA
TLGLAAAL

SEQ ID NO: 54641 - protein, 9 aa, Homo sapiens
  Table A; Target 54641; HLA-A*33:01; OBP2B; ENSG00000171102; TAA
TNREALEEF

SEQ ID NO: 54642 - protein, 9 aa, Homo sapiens
  Table A; Target 54642; HLA-B*46:01; OBP2B; ENSG00000171102; TAA
TNREALEEF

SEQ ID NO: 54643 - protein, 9 aa, Homo sapiens
  Table A; Target 54643; HLA-B*07:02; OBP2B; ENSG00000171102; TAA
TPLQTGSCV

SEQ ID NO: 54644 - protein, 9 aa, Homo sapiens
  Table A; Target 54644; HLA-B*51:01; OBP2B; ENSG00000171102; TAA
TPLQTGSCV

SEQ ID NO: 54645 - protein, 9 aa, Homo sapiens
  Table A; Target 54645; HLA-B*56:01; OBP2B; ENSG00000171102; TAA
TPLQTGSCV

SEQ ID NO: 54646 - protein, 9 aa, Homo sapiens
  Table A; Target 54646; HLA-A*31:01; OBP2B; ENSG00000171102; TAA
VDKDFPEDR

SEQ ID NO: 54647 - protein, 9 aa, Homo sapiens
  Table A; Target 54647; HLA-A*33:01; OBP2B; ENSG00000171102; TAA
VDKDFPEDR

SEQ ID NO: 54648 - protein, 9 aa, Homo sapiens
  Table A; Target 54648; HLA-C*07:06; OBP2B; ENSG00000171102; TAA
VGRNSDTNR

SEQ ID NO: 54649 - protein, 9 aa, Homo sapiens
  Table A; Target 54649; HLA-A*02:07; OBP2B; ENSG00000171102; TAA
VSPVKVTAL

SEQ ID NO: 54650 - protein, 9 aa, Homo sapiens
  Table A; Target 54650; HLA-A*24:02; OBP2B; ENSG00000171102; TAA
VSPVKVTAL

SEQ ID NO: 54651 - protein, 9 aa, Homo sapiens
  Table A; Target 54651; HLA-B*08:01; OBP2B; ENSG00000171102; TAA
VSPVKVTAL

SEQ ID NO: 54652 - protein, 9 aa, Homo sapiens
  Table A; Target 54652; HLA-B*46:01; OBP2B; ENSG00000171102; TAA
VSPVKVTAL

SEQ ID NO: 54653 - protein, 9 aa, Homo sapiens
  Table A; Target 54653; HLA-C*01:02; OBP2B; ENSG00000171102; TAA
VSPVKVTAL

SEQ ID NO: 54654 - protein, 9 aa, Homo sapiens
  Table A; Target 54654; HLA-C*14:02; OBP2B; ENSG00000171102; TAA
VSPVKVTAL

SEQ ID NO: 54655 - protein, 9 aa, Homo sapiens
  Table A; Target 54655; HLA-C*03:04; OBP2B; ENSG00000171102; TAA
VTALGGGKL

SEQ ID NO: 54656 - protein, 9 aa, Homo sapiens
  Table A; Target 54656; HLA-A*23:01; OBP2B; ENSG00000171102; TAA
VTLGLAAAL

SEQ ID NO: 54657 - protein, 9 aa, Homo sapiens
  Table A; Target 54657; HLA-C*01:02; OBP2B; ENSG00000171102; TAA
VTLGLAAAL

SEQ ID NO: 54658 - protein, 9 aa, Homo sapiens
  Table A; Target 54658; HLA-C*03:03; OBP2B; ENSG00000171102; TAA
VTLGLAAAL

SEQ ID NO: 54659 - protein, 9 aa, Homo sapiens
  Table A; Target 54659; HLA-C*03:04; OBP2B; ENSG00000171102; TAA
VTLGLAAAL

SEQ ID NO: 54660 - protein, 9 aa, Homo sapiens
  Table A; Target 54660; HLA-C*14:02; OBP2B; ENSG00000171102; TAA
VTLGLAAAL

SEQ ID NO: 54661 - protein, 11 aa, Homo sapiens
  Table A; Target 54661; HLA-A*23:01; OBP2B; ENSG00000171102; TAA
VTLGLAAALSF

SEQ ID NO: 54662 - protein, 8 aa, Homo sapiens
  Table A; Target 54662; HLA-C*07:01; OBP2B; ENSG00000171102; TAA
YGGRKLMY

SEQ ID NO: 54663 - protein, 9 aa, Homo sapiens
  Table A; Target 54663; HLA-C*03:03; OBP2B; ENSG00000171102; TAA
YSAYGGRKL

SEQ ID NO: 54664 - protein, 9 aa, Homo sapiens
  Table A; Target 54664; HLA-C*03:04; OBP2B; ENSG00000171102; TAA
YSAYGGRKL

SEQ ID NO: 54665 - protein, 11 aa, Homo sapiens
  Table A; Target 54665; HLA-A*01:01; OBP2B; ENSG00000171102; TAA
YSAYGGRKLMY

SEQ ID NO: 54666 - protein, 9 aa, Homo sapiens
  Table A; Target 54666; HLA-A*02:01; ONECUT3; ENSG00000205922; TAA
AAAAAVAGA

SEQ ID NO: 54667 - protein, 9 aa, Homo sapiens
  Table A; Target 54667; HLA-A*02:03; ONECUT3; ENSG00000205922; TAA
AAAAAVAGA

SEQ ID NO: 54668 - protein, 9 aa, Homo sapiens
  Table A; Target 54668; HLA-B*56:01; ONECUT3; ENSG00000205922; TAA
AAAAAVAGA

SEQ ID NO: 54669 - protein, 9 aa, Homo sapiens
  Table A; Target 54669; HLA-A*30:02; ONECUT3; ENSG00000205922; TAA
AAAAVAGAH

SEQ ID NO: 54670 - protein, 9 aa, Homo sapiens
  Table A; Target 54670; HLA-B*46:01; ONECUT3; ENSG00000205922; TAA
AAAAVAGAH

SEQ ID NO: 54671 - protein, 9 aa, Homo sapiens
  Table A; Target 54671; HLA-C*02:02; ONECUT3; ENSG00000205922; TAA
AAAAVAGAH

SEQ ID NO: 54672 - protein, 9 aa, Homo sapiens
  Table A; Target 54672; HLA-C*07:06; ONECUT3; ENSG00000205922; TAA
AAAAVAGAH

SEQ ID NO: 54673 - protein, 9 aa, Homo sapiens
  Table A; Target 54673; HLA-C*16:04; ONECUT3; ENSG00000205922; TAA
AAAAVAGAH

SEQ ID NO: 54674 - protein, 9 aa, Homo sapiens
  Table A; Target 54674; HLA-A*03:02; ONECUT3; ENSG00000205922; TAA
AAAEEINTK

SEQ ID NO: 54675 - protein, 9 aa, Homo sapiens
  Table A; Target 54675; HLA-A*11:01; ONECUT3; ENSG00000205922; TAA
AAAEEINTK

SEQ ID NO: 54676 - protein, 9 aa, Homo sapiens
  Table A; Target 54676; HLA-C*05:01; ONECUT3; ENSG00000205922; TAA
AAAEEINTK

SEQ ID NO: 54677 - protein, 9 aa, Homo sapiens
  Table A; Target 54677; HLA-C*07:06; ONECUT3; ENSG00000205922; TAA
AAAEEINTK

SEQ ID NO: 54678 - protein, 11 aa, Homo sapiens
  Table A; Target 54678; HLA-C*16:02; ONECUT3; ENSG00000205922; TAA
AAAEEINTKEV

SEQ ID NO: 54679 - protein, 8 aa, Homo sapiens
  Table A; Target 54679; HLA-C*16:01; ONECUT3; ENSG00000205922; TAA
AAAQHRGL

SEQ ID NO: 54680 - protein, 10 aa, Homo sapiens
  Table A; Target 54680; HLA-C*16:01; ONECUT3; ENSG00000205922; TAA
AAAQHRGLVA

SEQ ID NO: 54681 - protein, 10 aa, Homo sapiens
  Table A; Target 54681; HLA-C*16:02; ONECUT3; ENSG00000205922; TAA
AAEEINTKEV

SEQ ID NO: 54682 - protein, 8 aa, Homo sapiens
  Table A; Target 54682; HLA-B*54:01; ONECUT3; ENSG00000205922; TAA
AAFEPHAA

SEQ ID NO: 54683 - protein, 8 aa, Homo sapiens
  Table A; Target 54683; HLA-B*56:01; ONECUT3; ENSG00000205922; TAA
AAFEPHAA

SEQ ID NO: 54684 - protein, 9 aa, Homo sapiens
  Table A; Target 54684; HLA-B*07:02; ONECUT3; ENSG00000205922; TAA
AAFEPHAAL

SEQ ID NO: 54685 - protein, 9 aa, Homo sapiens
  Table A; Target 54685; HLA-B*08:01; ONECUT3; ENSG00000205922; TAA
AAFEPHAAL

SEQ ID NO: 54686 - protein, 9 aa, Homo sapiens
  Table A; Target 54686; HLA-B*15:03; ONECUT3; ENSG00000205922; TAA
AAFEPHAAL

SEQ ID NO: 54687 - protein, 9 aa, Homo sapiens
  Table A; Target 54687; HLA-B*35:03; ONECUT3; ENSG00000205922; TAA
AAFEPHAAL

SEQ ID NO: 54688 - protein, 9 aa, Homo sapiens
  Table A; Target 54688; HLA-B*37:01; ONECUT3; ENSG00000205922; TAA
AAFEPHAAL

SEQ ID NO: 54689 - protein, 9 aa, Homo sapiens
  Table A; Target 54689; HLA-B*40:01; ONECUT3; ENSG00000205922; TAA
AAFEPHAAL

SEQ ID NO: 54690 - protein, 9 aa, Homo sapiens
  Table A; Target 54690; HLA-B*46:01; ONECUT3; ENSG00000205922; TAA
AAFEPHAAL

SEQ ID NO: 54691 - protein, 9 aa, Homo sapiens
  Table A; Target 54691; HLA-B*56:01; ONECUT3; ENSG00000205922; TAA
AAFEPHAAL

SEQ ID NO: 54692 - protein, 9 aa, Homo sapiens
  Table A; Target 54692; HLA-C*01:02; ONECUT3; ENSG00000205922; TAA
AAFEPHAAL

SEQ ID NO: 54693 - protein, 9 aa, Homo sapiens
  Table A; Target 54693; HLA-C*02:02; ONECUT3; ENSG00000205922; TAA
AAFEPHAAL

SEQ ID NO: 54694 - protein, 9 aa, Homo sapiens
  Table A; Target 54694; HLA-C*03:03; ONECUT3; ENSG00000205922; TAA
AAFEPHAAL

SEQ ID NO: 54695 - protein, 9 aa, Homo sapiens
  Table A; Target 54695; HLA-C*03:04; ONECUT3; ENSG00000205922; TAA
AAFEPHAAL

SEQ ID NO: 54696 - protein, 9 aa, Homo sapiens
  Table A; Target 54696; HLA-C*05:01; ONECUT3; ENSG00000205922; TAA
AAFEPHAAL

SEQ ID NO: 54697 - protein, 9 aa, Homo sapiens
  Table A; Target 54697; HLA-C*07:02; ONECUT3; ENSG00000205922; TAA
AAFEPHAAL

SEQ ID NO: 54698 - protein, 9 aa, Homo sapiens
  Table A; Target 54698; HLA-C*12:03; ONECUT3; ENSG00000205922; TAA
AAFEPHAAL

SEQ ID NO: 54699 - protein, 9 aa, Homo sapiens
  Table A; Target 54699; HLA-C*14:02; ONECUT3; ENSG00000205922; TAA
AAFEPHAAL

SEQ ID NO: 54700 - protein, 9 aa, Homo sapiens
  Table A; Target 54700; HLA-C*16:01; ONECUT3; ENSG00000205922; TAA
AAFEPHAAL

SEQ ID NO: 54701 - protein, 9 aa, Homo sapiens
  Table A; Target 54701; HLA-C*16:04; ONECUT3; ENSG00000205922; TAA
AAFEPHAAL

SEQ ID NO: 54702 - protein, 10 aa, Homo sapiens
  Table A; Target 54702; HLA-C*02:02; ONECUT3; ENSG00000205922; TAA
AAFEPHAALL

SEQ ID NO: 54703 - protein, 9 aa, Homo sapiens
  Table A; Target 54703; HLA-C*03:03; ONECUT3; ENSG00000205922; TAA
AALASVGHL

SEQ ID NO: 54704 - protein, 9 aa, Homo sapiens
  Table A; Target 54704; HLA-C*03:04; ONECUT3; ENSG00000205922; TAA
AALASVGHL

SEQ ID NO: 54705 - protein, 10 aa, Homo sapiens
  Table A; Target 54705; HLA-A*01:01; ONECUT3; ENSG00000205922; TAA
AALASVGHLY

SEQ ID NO: 54706 - protein, 10 aa, Homo sapiens
  Table A; Target 54706; HLA-A*26:01; ONECUT3; ENSG00000205922; TAA
AALASVGHLY

SEQ ID NO: 54707 - protein, 10 aa, Homo sapiens
  Table A; Target 54707; HLA-A*29:02; ONECUT3; ENSG00000205922; TAA
AALASVGHLY

SEQ ID NO: 54708 - protein, 10 aa, Homo sapiens
  Table A; Target 54708; HLA-A*30:02; ONECUT3; ENSG00000205922; TAA
AALASVGHLY

SEQ ID NO: 54709 - protein, 10 aa, Homo sapiens
  Table A; Target 54709; HLA-B*15:03; ONECUT3; ENSG00000205922; TAA
AALASVGHLY

SEQ ID NO: 54710 - protein, 10 aa, Homo sapiens
  Table A; Target 54710; HLA-B*35:01; ONECUT3; ENSG00000205922; TAA
AALASVGHLY

SEQ ID NO: 54711 - protein, 10 aa, Homo sapiens
  Table A; Target 54711; HLA-B*44:02; ONECUT3; ENSG00000205922; TAA
AALASVGHLY

SEQ ID NO: 54712 - protein, 10 aa, Homo sapiens
  Table A; Target 54712; HLA-B*44:03; ONECUT3; ENSG00000205922; TAA
AALASVGHLY

SEQ ID NO: 54713 - protein, 10 aa, Homo sapiens
  Table A; Target 54713; HLA-C*02:02; ONECUT3; ENSG00000205922; TAA
AALASVGHLY

SEQ ID NO: 54714 - protein, 10 aa, Homo sapiens
  Table A; Target 54714; HLA-C*16:04; ONECUT3; ENSG00000205922; TAA
AALASVGHLY

SEQ ID NO: 54715 - protein, 9 aa, Homo sapiens
  Table A; Target 54715; HLA-C*04:01; ONECUT3; ENSG00000205922; TAA
AAPPPPPPP

SEQ ID NO: 54716 - protein, 9 aa, Homo sapiens
  Table A; Target 54716; HLA-C*06:02; ONECUT3; ENSG00000205922; TAA
AAPPPPPPP

SEQ ID NO: 54717 - protein, 9 aa, Homo sapiens
  Table A; Target 54717; HLA-C*12:03; ONECUT3; ENSG00000205922; TAA
AAPPPPPPP

SEQ ID NO: 54718 - protein, 9 aa, Homo sapiens
  Table A; Target 54718; HLA-B*54:01; ONECUT3; ENSG00000205922; TAA
AAQHRGLVA

SEQ ID NO: 54719 - protein, 9 aa, Homo sapiens
  Table A; Target 54719; HLA-C*03:04; ONECUT3; ENSG00000205922; TAA
AAQHRGLVA

SEQ ID NO: 54720 - protein, 9 aa, Homo sapiens
  Table A; Target 54720; HLA-C*16:01; ONECUT3; ENSG00000205922; TAA
AAQHRGLVA

SEQ ID NO: 54721 - protein, 8 aa, Homo sapiens
  Table A; Target 54721; HLA-C*03:04; ONECUT3; ENSG00000205922; TAA
AASVSGSF

SEQ ID NO: 54722 - protein, 8 aa, Homo sapiens
  Table A; Target 54722; HLA-C*05:01; ONECUT3; ENSG00000205922; TAA
AASVSGSF

SEQ ID NO: 54723 - protein, 8 aa, Homo sapiens
  Table A; Target 54723; HLA-C*16:01; ONECUT3; ENSG00000205922; TAA
AASVSGSF

SEQ ID NO: 54724 - protein, 9 aa, Homo sapiens
  Table A; Target 54724; HLA-C*02:02; ONECUT3; ENSG00000205922; TAA
AAYGPPGHL

SEQ ID NO: 54725 - protein, 9 aa, Homo sapiens
  Table A; Target 54725; HLA-C*03:03; ONECUT3; ENSG00000205922; TAA
AAYGPPGHL

SEQ ID NO: 54726 - protein, 9 aa, Homo sapiens
  Table A; Target 54726; HLA-C*03:04; ONECUT3; ENSG00000205922; TAA
AAYGPPGHL

SEQ ID NO: 54727 - protein, 9 aa, Homo sapiens
  Table A; Target 54727; HLA-C*05:01; ONECUT3; ENSG00000205922; TAA
AAYGPPGHL

SEQ ID NO: 54728 - protein, 9 aa, Homo sapiens
  Table A; Target 54728; HLA-C*12:03; ONECUT3; ENSG00000205922; TAA
AAYGPPGHL

SEQ ID NO: 54729 - protein, 10 aa, Homo sapiens
  Table A; Target 54729; HLA-B*56:01; ONECUT3; ENSG00000205922; TAA
AAYGPPGHLA

SEQ ID NO: 54730 - protein, 11 aa, Homo sapiens
  Table A; Target 54730; HLA-A*30:02; ONECUT3; ENSG00000205922; TAA
ACEAPGLGGTY

SEQ ID NO: 54731 - protein, 11 aa, Homo sapiens
  Table A; Target 54731; HLA-B*15:03; ONECUT3; ENSG00000205922; TAA
ACEAPGLGGTY

SEQ ID NO: 54732 - protein, 11 aa, Homo sapiens
  Table A; Target 54732; HLA-B*39:01; ONECUT3; ENSG00000205922; TAA
ACEAPGLGGTY

SEQ ID NO: 54733 - protein, 9 aa, Homo sapiens
  Table A; Target 54733; HLA-A*30:01; ONECUT3; ENSG00000205922; TAA
AEDALARGL

SEQ ID NO: 54734 - protein, 9 aa, Homo sapiens
  Table A; Target 54734; HLA-B*18:01; ONECUT3; ENSG00000205922; TAA
AEDALARGL

SEQ ID NO: 54735 - protein, 9 aa, Homo sapiens
  Table A; Target 54735; HLA-B*37:01; ONECUT3; ENSG00000205922; TAA
AEDALARGL

SEQ ID NO: 54736 - protein, 9 aa, Homo sapiens
  Table A; Target 54736; HLA-B*40:01; ONECUT3; ENSG00000205922; TAA
AEDALARGL

SEQ ID NO: 54737 - protein, 9 aa, Homo sapiens
  Table A; Target 54737; HLA-B*40:02; ONECUT3; ENSG00000205922; TAA
AEDALARGL

SEQ ID NO: 54738 - protein, 9 aa, Homo sapiens
  Table A; Target 54738; HLA-B*44:02; ONECUT3; ENSG00000205922; TAA
AEDALARGL

SEQ ID NO: 54739 - protein, 9 aa, Homo sapiens
  Table A; Target 54739; HLA-B*44:03; ONECUT3; ENSG00000205922; TAA
AEDALARGL

SEQ ID NO: 54740 - protein, 9 aa, Homo sapiens
  Table A; Target 54740; HLA-B*49:01; ONECUT3; ENSG00000205922; TAA
AEDALARGL

SEQ ID NO: 54741 - protein, 9 aa, Homo sapiens
  Table A; Target 54741; HLA-C*16:04; ONECUT3; ENSG00000205922; TAA
AEDALARGL

SEQ ID NO: 54742 - protein, 9 aa, Homo sapiens
  Table A; Target 54742; HLA-A*30:01; ONECUT3; ENSG00000205922; TAA
AEEINTKEV

SEQ ID NO: 54743 - protein, 9 aa, Homo sapiens
  Table A; Target 54743; HLA-B*40:01; ONECUT3; ENSG00000205922; TAA
AEEINTKEV

SEQ ID NO: 54744 - protein, 9 aa, Homo sapiens
  Table A; Target 54744; HLA-B*44:02; ONECUT3; ENSG00000205922; TAA
AEEINTKEV

SEQ ID NO: 54745 - protein, 9 aa, Homo sapiens
  Table A; Target 54745; HLA-B*44:03; ONECUT3; ENSG00000205922; TAA
AEEINTKEV

SEQ ID NO: 54746 - protein, 9 aa, Homo sapiens
  Table A; Target 54746; HLA-B*49:01; ONECUT3; ENSG00000205922; TAA
AEEINTKEV

SEQ ID NO: 54747 - protein, 10 aa, Homo sapiens
  Table A; Target 54747; HLA-B*40:01; ONECUT3; ENSG00000205922; TAA
AEEINTKEVA

SEQ ID NO: 54748 - protein, 11 aa, Homo sapiens
  Table A; Target 54748; HLA-B*39:01; ONECUT3; ENSG00000205922; TAA
AEEPSTAPGGP

SEQ ID NO: 54749 - protein, 9 aa, Homo sapiens
  Table A; Target 54749; HLA-A*23:01; ONECUT3; ENSG00000205922; TAA
AFEPHAALL

SEQ ID NO: 54750 - protein, 9 aa, Homo sapiens
  Table A; Target 54750; HLA-A*24:02; ONECUT3; ENSG00000205922; TAA
AFEPHAALL

SEQ ID NO: 54751 - protein, 9 aa, Homo sapiens
  Table A; Target 54751; HLA-A*11:01; ONECUT3; ENSG00000205922; TAA
AGATATFSK

SEQ ID NO: 54752 - protein, 11 aa, Homo sapiens
  Table A; Target 54752; HLA-A*31:01; ONECUT3; ENSG00000205922; TAA
AGELLSPGHAR

SEQ ID NO: 54753 - protein, 8 aa, Homo sapiens
  Table A; Target 54753; HLA-B*08:01; ONECUT3; ENSG00000205922; TAA
AGPLHPAM

SEQ ID NO: 54754 - protein, 8 aa, Homo sapiens
  Table A; Target 54754; HLA-C*01:02; ONECUT3; ENSG00000205922; TAA
AGPLHPAM

SEQ ID NO: 54755 - protein, 8 aa, Homo sapiens
  Table A; Target 54755; HLA-C*16:01; ONECUT3; ENSG00000205922; TAA
AGPLHPAM

SEQ ID NO: 54756 - protein, 9 aa, Homo sapiens
  Table A; Target 54756; HLA-B*27:05; ONECUT3; ENSG00000205922; TAA
AHAQAGELL

SEQ ID NO: 54757 - protein, 9 aa, Homo sapiens
  Table A; Target 54757; HLA-B*39:01; ONECUT3; ENSG00000205922; TAA
AHAQAGELL

SEQ ID NO: 54758 - protein, 9 aa, Homo sapiens
  Table A; Target 54758; HLA-A*01:01; ONECUT3; ENSG00000205922; TAA
ALASVGHLY

SEQ ID NO: 54759 - protein, 9 aa, Homo sapiens
  Table A; Target 54759; HLA-A*03:01; ONECUT3; ENSG00000205922; TAA
ALASVGHLY

SEQ ID NO: 54760 - protein, 9 aa, Homo sapiens
  Table A; Target 54760; HLA-A*03:02; ONECUT3; ENSG00000205922; TAA
ALASVGHLY

SEQ ID NO: 54761 - protein, 9 aa, Homo sapiens
  Table A; Target 54761; HLA-A*25:01; ONECUT3; ENSG00000205922; TAA
ALASVGHLY

SEQ ID NO: 54762 - protein, 9 aa, Homo sapiens
  Table A; Target 54762; HLA-A*26:01; ONECUT3; ENSG00000205922; TAA
ALASVGHLY

SEQ ID NO: 54763 - protein, 9 aa, Homo sapiens
  Table A; Target 54763; HLA-A*29:02; ONECUT3; ENSG00000205922; TAA
ALASVGHLY

SEQ ID NO: 54764 - protein, 9 aa, Homo sapiens
  Table A; Target 54764; HLA-A*30:02; ONECUT3; ENSG00000205922; TAA
ALASVGHLY

SEQ ID NO: 54765 - protein, 9 aa, Homo sapiens
  Table A; Target 54765; HLA-A*32:01; ONECUT3; ENSG00000205922; TAA
ALASVGHLY

SEQ ID NO: 54766 - protein, 9 aa, Homo sapiens
  Table A; Target 54766; HLA-B*15:01; ONECUT3; ENSG00000205922; TAA
ALASVGHLY

SEQ ID NO: 54767 - protein, 9 aa, Homo sapiens
  Table A; Target 54767; HLA-B*15:03; ONECUT3; ENSG00000205922; TAA
ALASVGHLY

SEQ ID NO: 54768 - protein, 9 aa, Homo sapiens
  Table A; Target 54768; HLA-B*44:02; ONECUT3; ENSG00000205922; TAA
ALASVGHLY

SEQ ID NO: 54769 - protein, 9 aa, Homo sapiens
  Table A; Target 54769; HLA-B*44:03; ONECUT3; ENSG00000205922; TAA
ALASVGHLY

SEQ ID NO: 54770 - protein, 9 aa, Homo sapiens
  Table A; Target 54770; HLA-B*46:01; ONECUT3; ENSG00000205922; TAA
ALASVGHLY

SEQ ID NO: 54771 - protein, 9 aa, Homo sapiens
  Table A; Target 54771; HLA-B*58:01; ONECUT3; ENSG00000205922; TAA
ALASVGHLY

SEQ ID NO: 54772 - protein, 9 aa, Homo sapiens
  Table A; Target 54772; HLA-C*02:02; ONECUT3; ENSG00000205922; TAA
ALASVGHLY

SEQ ID NO: 54773 - protein, 9 aa, Homo sapiens
  Table A; Target 54773; HLA-C*07:04; ONECUT3; ENSG00000205922; TAA
ALASVGHLY

SEQ ID NO: 54774 - protein, 9 aa, Homo sapiens
  Table A; Target 54774; HLA-C*16:01; ONECUT3; ENSG00000205922; TAA
ALASVGHLY

SEQ ID NO: 54775 - protein, 9 aa, Homo sapiens
  Table A; Target 54775; HLA-C*16:02; ONECUT3; ENSG00000205922; TAA
ALASVGHLY

SEQ ID NO: 54776 - protein, 9 aa, Homo sapiens
  Table A; Target 54776; HLA-C*16:04; ONECUT3; ENSG00000205922; TAA
ALASVGHLY

SEQ ID NO: 54777 - protein, 9 aa, Homo sapiens
  Table A; Target 54777; HLA-A*02:01; ONECUT3; ENSG00000205922; TAA
ALPPALHGA

SEQ ID NO: 54778 - protein, 9 aa, Homo sapiens
  Table A; Target 54778; HLA-A*02:03; ONECUT3; ENSG00000205922; TAA
ALPPALHGA

SEQ ID NO: 54779 - protein, 9 aa, Homo sapiens
  Table A; Target 54779; HLA-A*02:07; ONECUT3; ENSG00000205922; TAA
ALPPALHGA

SEQ ID NO: 54780 - protein, 10 aa, Homo sapiens
  Table A; Target 54780; HLA-B*56:01; ONECUT3; ENSG00000205922; TAA
APGGPAGATA

SEQ ID NO: 54781 - protein, 8 aa, Homo sapiens
  Table A; Target 54781; HLA-C*14:02; ONECUT3; ENSG00000205922; TAA
APGLGGTY

SEQ ID NO: 54782 - protein, 11 aa, Homo sapiens
  Table A; Target 54782; HLA-B*07:02; ONECUT3; ENSG00000205922; TAA
APGLGGTYTTL

SEQ ID NO: 54783 - protein, 11 aa, Homo sapiens
  Table A; Target 54783; HLA-C*07:02; ONECUT3; ENSG00000205922; TAA
APGLGGTYTTL

SEQ ID NO: 54784 - protein, 9 aa, Homo sapiens
  Table A; Target 54784; HLA-B*07:02; ONECUT3; ENSG00000205922; TAA
APGRPGLVA

SEQ ID NO: 54785 - protein, 9 aa, Homo sapiens
  Table A; Target 54785; HLA-B*54:01; ONECUT3; ENSG00000205922; TAA
APGRPGLVA

SEQ ID NO: 54786 - protein, 9 aa, Homo sapiens
  Table A; Target 54786; HLA-B*56:01; ONECUT3; ENSG00000205922; TAA
APGRPGLVA

SEQ ID NO: 54787 - protein, 9 aa, Homo sapiens
  Table A; Target 54787; HLA-C*07:02; ONECUT3; ENSG00000205922; TAA
APGRPGLVA

SEQ ID NO: 54788 - protein, 8 aa, Homo sapiens
  Table A; Target 54788; HLA-B*56:01; ONECUT3; ENSG00000205922; TAA
APLGGLAA

SEQ ID NO: 54789 - protein, 9 aa, Homo sapiens
  Table A; Target 54789; HLA-B*07:02; ONECUT3; ENSG00000205922; TAA
APLGGLAAA

SEQ ID NO: 54790 - protein, 9 aa, Homo sapiens
  Table A; Target 54790; HLA-B*54:01; ONECUT3; ENSG00000205922; TAA
APLGGLAAA

SEQ ID NO: 54791 - protein, 9 aa, Homo sapiens
  Table A; Target 54791; HLA-B*55:01; ONECUT3; ENSG00000205922; TAA
APLGGLAAA

SEQ ID NO: 54792 - protein, 9 aa, Homo sapiens
  Table A; Target 54792; HLA-B*56:01; ONECUT3; ENSG00000205922; TAA
APLGGLAAA

SEQ ID NO: 54793 - protein, 9 aa, Homo sapiens
  Table A; Target 54793; HLA-C*07:02; ONECUT3; ENSG00000205922; TAA
APLGGLAAA

SEQ ID NO: 54794 - protein, 10 aa, Homo sapiens
  Table A; Target 54794; HLA-B*56:01; ONECUT3; ENSG00000205922; TAA
APLGGLAAAG

SEQ ID NO: 54795 - protein, 11 aa, Homo sapiens
  Table A; Target 54795; HLA-B*56:01; ONECUT3; ENSG00000205922; TAA
APLGGLAAAGA

SEQ ID NO: 54796 - protein, 9 aa, Homo sapiens
  Table A; Target 54796; HLA-C*04:01; ONECUT3; ENSG00000205922; TAA
APPPPPPPQ

SEQ ID NO: 54797 - protein, 9 aa, Homo sapiens
  Table A; Target 54797; HLA-B*56:01; ONECUT3; ENSG00000205922; TAA
APQPPPPPP

SEQ ID NO: 54798 - protein, 10 aa, Homo sapiens
  Table A; Target 54798; HLA-B*56:01; ONECUT3; ENSG00000205922; TAA
APQPPPPPPP

SEQ ID NO: 54799 - protein, 8 aa, Homo sapiens
  Table A; Target 54799; HLA-B*15:01; ONECUT3; ENSG00000205922; TAA
AQRITAEL

SEQ ID NO: 54800 - protein, 8 aa, Homo sapiens
  Table A; Target 54800; HLA-B*15:03; ONECUT3; ENSG00000205922; TAA
AQRITAEL

SEQ ID NO: 54801 - protein, 9 aa, Homo sapiens
  Table A; Target 54801; HLA-B*27:05; ONECUT3; ENSG00000205922; TAA
ARSAAAQHR

SEQ ID NO: 54802 - protein, 10 aa, Homo sapiens
  Table A; Target 54802; HLA-A*30:02; ONECUT3; ENSG00000205922; TAA
ASVGHLYGPY

SEQ ID NO: 54803 - protein, 9 aa, Homo sapiens
  Table A; Target 54803; HLA-B*40:01; ONECUT3; ENSG00000205922; TAA
ASVSGSFTL

SEQ ID NO: 54804 - protein, 9 aa, Homo sapiens
  Table A; Target 54804; HLA-B*58:01; ONECUT3; ENSG00000205922; TAA
ASVSGSFTL

SEQ ID NO: 54805 - protein, 9 aa, Homo sapiens
  Table A; Target 54805; HLA-C*01:02; ONECUT3; ENSG00000205922; TAA
ASVSGSFTL

SEQ ID NO: 54806 - protein, 9 aa, Homo sapiens
  Table A; Target 54806; HLA-C*02:02; ONECUT3; ENSG00000205922; TAA
ASVSGSFTL

SEQ ID NO: 54807 - protein, 9 aa, Homo sapiens
  Table A; Target 54807; HLA-C*03:03; ONECUT3; ENSG00000205922; TAA
ASVSGSFTL

SEQ ID NO: 54808 - protein, 9 aa, Homo sapiens
  Table A; Target 54808; HLA-C*03:04; ONECUT3; ENSG00000205922; TAA
ASVSGSFTL

SEQ ID NO: 54809 - protein, 9 aa, Homo sapiens
  Table A; Target 54809; HLA-C*16:01; ONECUT3; ENSG00000205922; TAA
ASVSGSFTL

SEQ ID NO: 54810 - protein, 9 aa, Homo sapiens
  Table A; Target 54810; HLA-C*16:04; ONECUT3; ENSG00000205922; TAA
ASVSGSFTL

SEQ ID NO: 54811 - protein, 10 aa, Homo sapiens
  Table A; Target 54811; HLA-C*02:02; ONECUT3; ENSG00000205922; TAA
ASVSGSFTLM

SEQ ID NO: 54812 - protein, 9 aa, Homo sapiens
  Table A; Target 54812; HLA-A*03:01; ONECUT3; ENSG00000205922; TAA
AVADKFHQH

SEQ ID NO: 54813 - protein, 9 aa, Homo sapiens
  Table A; Target 54813; HLA-A*03:02; ONECUT3; ENSG00000205922; TAA
AVADKFHQH

SEQ ID NO: 54814 - protein, 9 aa, Homo sapiens
  Table A; Target 54814; HLA-A*11:01; ONECUT3; ENSG00000205922; TAA
AVADKFHQH

SEQ ID NO: 54815 - protein, 9 aa, Homo sapiens
  Table A; Target 54815; HLA-A*23:01; ONECUT3; ENSG00000205922; TAA
AYGPPGHLA

SEQ ID NO: 54816 - protein, 9 aa, Homo sapiens
  Table A; Target 54816; HLA-A*24:02; ONECUT3; ENSG00000205922; TAA
AYGPPGHLA

SEQ ID NO: 54817 - protein, 9 aa, Homo sapiens
  Table A; Target 54817; HLA-C*14:02; ONECUT3; ENSG00000205922; TAA
AYGPPGHLA

SEQ ID NO: 54818 - protein, 10 aa, Homo sapiens
  Table A; Target 54818; HLA-A*25:01; ONECUT3; ENSG00000205922; TAA
CEAPGLGGTY

SEQ ID NO: 54819 - protein, 10 aa, Homo sapiens
  Table A; Target 54819; HLA-A*26:01; ONECUT3; ENSG00000205922; TAA
CEAPGLGGTY

SEQ ID NO: 54820 - protein, 10 aa, Homo sapiens
  Table A; Target 54820; HLA-A*29:02; ONECUT3; ENSG00000205922; TAA
CEAPGLGGTY

SEQ ID NO: 54821 - protein, 10 aa, Homo sapiens
  Table A; Target 54821; HLA-A*30:01; ONECUT3; ENSG00000205922; TAA
CEAPGLGGTY

SEQ ID NO: 54822 - protein, 10 aa, Homo sapiens
  Table A; Target 54822; HLA-A*30:02; ONECUT3; ENSG00000205922; TAA
CEAPGLGGTY

SEQ ID NO: 54823 - protein, 10 aa, Homo sapiens
  Table A; Target 54823; HLA-A*32:01; ONECUT3; ENSG00000205922; TAA
CEAPGLGGTY

SEQ ID NO: 54824 - protein, 10 aa, Homo sapiens
  Table A; Target 54824; HLA-B*15:01; ONECUT3; ENSG00000205922; TAA
CEAPGLGGTY

SEQ ID NO: 54825 - protein, 10 aa, Homo sapiens
  Table A; Target 54825; HLA-B*15:03; ONECUT3; ENSG00000205922; TAA
CEAPGLGGTY

SEQ ID NO: 54826 - protein, 10 aa, Homo sapiens
  Table A; Target 54826; HLA-B*18:01; ONECUT3; ENSG00000205922; TAA
CEAPGLGGTY

SEQ ID NO: 54827 - protein, 10 aa, Homo sapiens
  Table A; Target 54827; HLA-B*27:02; ONECUT3; ENSG00000205922; TAA
CEAPGLGGTY

SEQ ID NO: 54828 - protein, 10 aa, Homo sapiens
  Table A; Target 54828; HLA-B*27:05; ONECUT3; ENSG00000205922; TAA
CEAPGLGGTY

SEQ ID NO: 54829 - protein, 10 aa, Homo sapiens
  Table A; Target 54829; HLA-B*39:01; ONECUT3; ENSG00000205922; TAA
CEAPGLGGTY

SEQ ID NO: 54830 - protein, 10 aa, Homo sapiens
  Table A; Target 54830; HLA-B*40:01; ONECUT3; ENSG00000205922; TAA
CEAPGLGGTY

SEQ ID NO: 54831 - protein, 10 aa, Homo sapiens
  Table A; Target 54831; HLA-B*44:02; ONECUT3; ENSG00000205922; TAA
CEAPGLGGTY

SEQ ID NO: 54832 - protein, 10 aa, Homo sapiens
  Table A; Target 54832; HLA-B*44:03; ONECUT3; ENSG00000205922; TAA
CEAPGLGGTY

SEQ ID NO: 54833 - protein, 10 aa, Homo sapiens
  Table A; Target 54833; HLA-B*49:01; ONECUT3; ENSG00000205922; TAA
CEAPGLGGTY

SEQ ID NO: 54834 - protein, 10 aa, Homo sapiens
  Table A; Target 54834; HLA-C*02:02; ONECUT3; ENSG00000205922; TAA
CEAPGLGGTY

SEQ ID NO: 54835 - protein, 10 aa, Homo sapiens
  Table A; Target 54835; HLA-C*07:04; ONECUT3; ENSG00000205922; TAA
CEAPGLGGTY

SEQ ID NO: 54836 - protein, 10 aa, Homo sapiens
  Table A; Target 54836; HLA-C*16:01; ONECUT3; ENSG00000205922; TAA
CEAPGLGGTY

SEQ ID NO: 54837 - protein, 10 aa, Homo sapiens
  Table A; Target 54837; HLA-C*16:02; ONECUT3; ENSG00000205922; TAA
CEAPGLGGTY

SEQ ID NO: 54838 - protein, 10 aa, Homo sapiens
  Table A; Target 54838; HLA-C*16:04; ONECUT3; ENSG00000205922; TAA
CEAPGLGGTY

SEQ ID NO: 54839 - protein, 9 aa, Homo sapiens
  Table A; Target 54839; HLA-B*18:01; ONECUT3; ENSG00000205922; TAA
DERAALASV

SEQ ID NO: 54840 - protein, 9 aa, Homo sapiens
  Table A; Target 54840; HLA-B*51:01; ONECUT3; ENSG00000205922; TAA
DERAALASV

SEQ ID NO: 54841 - protein, 9 aa, Homo sapiens
  Table A; Target 54841; HLA-A*25:01; ONECUT3; ENSG00000205922; TAA
EAPGLGGTY

SEQ ID NO: 54842 - protein, 9 aa, Homo sapiens
  Table A; Target 54842; HLA-A*26:01; ONECUT3; ENSG00000205922; TAA
EAPGLGGTY

SEQ ID NO: 54843 - protein, 9 aa, Homo sapiens
  Table A; Target 54843; HLA-B*35:01; ONECUT3; ENSG00000205922; TAA
EAPGLGGTY

SEQ ID NO: 54844 - protein, 8 aa, Homo sapiens
  Table A; Target 54844; HLA-B*37:01; ONECUT3; ENSG00000205922; TAA
EDALARGL

SEQ ID NO: 54845 - protein, 8 aa, Homo sapiens
  Table A; Target 54845; HLA-B*18:01; ONECUT3; ENSG00000205922; TAA
EEINTKEV

SEQ ID NO: 54846 - protein, 8 aa, Homo sapiens
  Table A; Target 54846; HLA-B*49:01; ONECUT3; ENSG00000205922; TAA
EEINTKEV

SEQ ID NO: 54847 - protein, 9 aa, Homo sapiens
  Table A; Target 54847; HLA-A*30:01; ONECUT3; ENSG00000205922; TAA
EEINTKEVA

SEQ ID NO: 54848 - protein, 9 aa, Homo sapiens
  Table A; Target 54848; HLA-B*18:01; ONECUT3; ENSG00000205922; TAA
EEINTKEVA

SEQ ID NO: 54849 - protein, 9 aa, Homo sapiens
  Table A; Target 54849; HLA-B*40:01; ONECUT3; ENSG00000205922; TAA
EEINTKEVA

SEQ ID NO: 54850 - protein, 9 aa, Homo sapiens
  Table A; Target 54850; HLA-B*40:02; ONECUT3; ENSG00000205922; TAA
EEINTKEVA

SEQ ID NO: 54851 - protein, 9 aa, Homo sapiens
  Table A; Target 54851; HLA-B*44:02; ONECUT3; ENSG00000205922; TAA
EEINTKEVA

SEQ ID NO: 54852 - protein, 9 aa, Homo sapiens
  Table A; Target 54852; HLA-B*44:03; ONECUT3; ENSG00000205922; TAA
EEINTKEVA

SEQ ID NO: 54853 - protein, 9 aa, Homo sapiens
  Table A; Target 54853; HLA-B*49:01; ONECUT3; ENSG00000205922; TAA
EEINTKEVA

SEQ ID NO: 54854 - protein, 10 aa, Homo sapiens
  Table A; Target 54854; HLA-B*44:02; ONECUT3; ENSG00000205922; TAA
EEINTKEVAQ

SEQ ID NO: 54855 - protein, 11 aa, Homo sapiens
  Table A; Target 54855; HLA-A*33:03; ONECUT3; ENSG00000205922; TAA
EEINTKEVAQR

SEQ ID NO: 54856 - protein, 11 aa, Homo sapiens
  Table A; Target 54856; HLA-A*68:01; ONECUT3; ENSG00000205922; TAA
EEINTKEVAQR

SEQ ID NO: 54857 - protein, 11 aa, Homo sapiens
  Table A; Target 54857; HLA-C*07:06; ONECUT3; ENSG00000205922; TAA
EEINTKEVAQR

SEQ ID NO: 54858 - protein, 10 aa, Homo sapiens
  Table A; Target 54858; HLA-A*33:01; ONECUT3; ENSG00000205922; TAA
EINTKEVAQR

SEQ ID NO: 54859 - protein, 10 aa, Homo sapiens
  Table A; Target 54859; HLA-A*33:03; ONECUT3; ENSG00000205922; TAA
EINTKEVAQR

SEQ ID NO: 54860 - protein, 10 aa, Homo sapiens
  Table A; Target 54860; HLA-A*68:01; ONECUT3; ENSG00000205922; TAA
EINTKEVAQR

SEQ ID NO: 54861 - protein, 10 aa, Homo sapiens
  Table A; Target 54861; HLA-C*07:06; ONECUT3; ENSG00000205922; TAA
EINTKEVAQR

SEQ ID NO: 54862 - protein, 10 aa, Homo sapiens
  Table A; Target 54862; HLA-A*26:01; ONECUT3; ENSG00000205922; TAA
ELAGPLHPAM

SEQ ID NO: 54863 - protein, 9 aa, Homo sapiens
  Table A; Target 54863; HLA-A*33:01; ONECUT3; ENSG00000205922; TAA
ELLSPGHAR

SEQ ID NO: 54864 - protein, 9 aa, Homo sapiens
  Table A; Target 54864; HLA-A*33:03; ONECUT3; ENSG00000205922; TAA
ELLSPGHAR

SEQ ID NO: 54865 - protein, 9 aa, Homo sapiens
  Table A; Target 54865; HLA-A*68:01; ONECUT3; ENSG00000205922; TAA
ELLSPGHAR

SEQ ID NO: 54866 - protein, 9 aa, Homo sapiens
  Table A; Target 54866; HLA-C*07:06; ONECUT3; ENSG00000205922; TAA
ELLSPGHAR

SEQ ID NO: 54867 - protein, 9 aa, Homo sapiens
  Table A; Target 54867; HLA-A*26:01; ONECUT3; ENSG00000205922; TAA
ELNTVSNFF

SEQ ID NO: 54868 - protein, 9 aa, Homo sapiens
  Table A; Target 54868; HLA-A*26:01; ONECUT3; ENSG00000205922; TAA
ELPAMGSPL

SEQ ID NO: 54869 - protein, 9 aa, Homo sapiens
  Table A; Target 54869; HLA-C*01:02; ONECUT3; ENSG00000205922; TAA
ELPAMGSPL

SEQ ID NO: 54870 - protein, 10 aa, Homo sapiens
  Table A; Target 54870; HLA-B*07:02; ONECUT3; ENSG00000205922; TAA
EPEFQRMSAL

SEQ ID NO: 54871 - protein, 10 aa, Homo sapiens
  Table A; Target 54871; HLA-C*07:02; ONECUT3; ENSG00000205922; TAA
EPEFQRMSAL

SEQ ID NO: 54872 - protein, 9 aa, Homo sapiens
  Table A; Target 54872; HLA-A*33:01; ONECUT3; ENSG00000205922; TAA
EPHAALLGR

SEQ ID NO: 54873 - protein, 9 aa, Homo sapiens
  Table A; Target 54873; HLA-A*33:03; ONECUT3; ENSG00000205922; TAA
EPHAALLGR

SEQ ID NO: 54874 - protein, 9 aa, Homo sapiens
  Table A; Target 54874; HLA-A*25:01; ONECUT3; ENSG00000205922; TAA
ESLGGLHSV

SEQ ID NO: 54875 - protein, 9 aa, Homo sapiens
  Table A; Target 54875; HLA-A*26:01; ONECUT3; ENSG00000205922; TAA
ESLGGLHSV

SEQ ID NO: 54876 - protein, 9 aa, Homo sapiens
  Table A; Target 54876; HLA-A*33:01; ONECUT3; ENSG00000205922; TAA
ESLGGLHSV

SEQ ID NO: 54877 - protein, 9 aa, Homo sapiens
  Table A; Target 54877; HLA-A*33:03; ONECUT3; ENSG00000205922; TAA
ESLGGLHSV

SEQ ID NO: 54878 - protein, 9 aa, Homo sapiens
  Table A; Target 54878; HLA-A*68:02; ONECUT3; ENSG00000205922; TAA
ESLGGLHSV

SEQ ID NO: 54879 - protein, 9 aa, Homo sapiens
  Table A; Target 54879; HLA-B*40:02; ONECUT3; ENSG00000205922; TAA
ESLGGLHSV

SEQ ID NO: 54880 - protein, 9 aa, Homo sapiens
  Table A; Target 54880; HLA-B*51:01; ONECUT3; ENSG00000205922; TAA
ESLGGLHSV

SEQ ID NO: 54881 - protein, 9 aa, Homo sapiens
  Table A; Target 54881; HLA-B*54:01; ONECUT3; ENSG00000205922; TAA
ESLGGLHSV

SEQ ID NO: 54882 - protein, 9 aa, Homo sapiens
  Table A; Target 54882; HLA-A*26:01; ONECUT3; ENSG00000205922; TAA
EVAQRITAE

SEQ ID NO: 54883 - protein, 10 aa, Homo sapiens
  Table A; Target 54883; HLA-A*25:01; ONECUT3; ENSG00000205922; TAA
EVAQRITAEL

SEQ ID NO: 54884 - protein, 10 aa, Homo sapiens
  Table A; Target 54884; HLA-A*26:01; ONECUT3; ENSG00000205922; TAA
EVAQRITAEL

SEQ ID NO: 54885 - protein, 10 aa, Homo sapiens
  Table A; Target 54885; HLA-A*33:03; ONECUT3; ENSG00000205922; TAA
EVAQRITAEL

SEQ ID NO: 54886 - protein, 10 aa, Homo sapiens
  Table A; Target 54886; HLA-A*68:01; ONECUT3; ENSG00000205922; TAA
EVAQRITAEL

SEQ ID NO: 54887 - protein, 10 aa, Homo sapiens
  Table A; Target 54887; HLA-A*68:02; ONECUT3; ENSG00000205922; TAA
EVAQRITAEL

SEQ ID NO: 54888 - protein, 9 aa, Homo sapiens
  Table A; Target 54888; HLA-C*03:03; ONECUT3; ENSG00000205922; TAA
FTDLQRRTL

SEQ ID NO: 54889 - protein, 9 aa, Homo sapiens
  Table A; Target 54889; HLA-C*03:04; ONECUT3; ENSG00000205922; TAA
FTDLQRRTL

SEQ ID NO: 54890 - protein, 8 aa, Homo sapiens
  Table A; Target 54890; HLA-C*05:01; ONECUT3; ENSG00000205922; TAA
GADFRGEL

SEQ ID NO: 54891 - protein, 11 aa, Homo sapiens
  Table A; Target 54891; HLA-B*39:01; ONECUT3; ENSG00000205922; TAA
GAGSAGGGADF

SEQ ID NO: 54892 - protein, 9 aa, Homo sapiens
  Table A; Target 54892; HLA-B*56:01; ONECUT3; ENSG00000205922; TAA
GATATFSKA

SEQ ID NO: 54893 - protein, 9 aa, Homo sapiens
  Table A; Target 54893; HLA-B*44:03; ONECUT3; ENSG00000205922; TAA
GELAGPLHP

SEQ ID NO: 54894 - protein, 9 aa, Homo sapiens
  Table A; Target 54894; HLA-B*49:01; ONECUT3; ENSG00000205922; TAA
GELAGPLHP

SEQ ID NO: 54895 - protein, 10 aa, Homo sapiens
  Table A; Target 54895; HLA-B*49:01; ONECUT3; ENSG00000205922; TAA
GELAGPLHPA

SEQ ID NO: 54896 - protein, 11 aa, Homo sapiens
  Table A; Target 54896; HLA-A*30:01; ONECUT3; ENSG00000205922; TAA
GELAGPLHPAM

SEQ ID NO: 54897 - protein, 11 aa, Homo sapiens
  Table A; Target 54897; HLA-B*40:01; ONECUT3; ENSG00000205922; TAA
GELAGPLHPAM

SEQ ID NO: 54898 - protein, 10 aa, Homo sapiens
  Table A; Target 54898; HLA-B*44:02; ONECUT3; ENSG00000205922; TAA
GELLSPGHAR

SEQ ID NO: 54899 - protein, 10 aa, Homo sapiens
  Table A; Target 54899; HLA-B*44:03; ONECUT3; ENSG00000205922; TAA
GELLSPGHAR

SEQ ID NO: 54900 - protein, 9 aa, Homo sapiens
  Table A; Target 54900; HLA-B*07:02; ONECUT3; ENSG00000205922; TAA
GGADFRGEL

SEQ ID NO: 54901 - protein, 9 aa, Homo sapiens
  Table A; Target 54901; HLA-C*16:01; ONECUT3; ENSG00000205922; TAA
GGADFRGEL

SEQ ID NO: 54902 - protein, 11 aa, Homo sapiens
  Table A; Target 54902; HLA-C*07:04; ONECUT3; ENSG00000205922; TAA
GGGPGGSGGGP

SEQ ID NO: 54903 - protein, 9 aa, Homo sapiens
  Table A; Target 54903; HLA-A*02:04; ONECUT3; ENSG00000205922; TAA
GLLAPLGGL

SEQ ID NO: 54904 - protein, 11 aa, Homo sapiens
  Table A; Target 54904; HLA-A*02:03; ONECUT3; ENSG00000205922; TAA
GLVAPGRPGLV

SEQ ID NO: 54905 - protein, 9 aa, Homo sapiens
  Table A; Target 54905; HLA-A*23:01; ONECUT3; ENSG00000205922; TAA
GPAGATATF

SEQ ID NO: 54906 - protein, 9 aa, Homo sapiens
  Table A; Target 54906; HLA-A*25:01; ONECUT3; ENSG00000205922; TAA
GPAGATATF

SEQ ID NO: 54907 - protein, 9 aa, Homo sapiens
  Table A; Target 54907; HLA-A*26:01; ONECUT3; ENSG00000205922; TAA
GPAGATATF

SEQ ID NO: 54908 - protein, 9 aa, Homo sapiens
  Table A; Target 54908; HLA-B*07:02; ONECUT3; ENSG00000205922; TAA
GPAGATATF

SEQ ID NO: 54909 - protein, 9 aa, Homo sapiens
  Table A; Target 54909; HLA-B*15:01; ONECUT3; ENSG00000205922; TAA
GPAGATATF

SEQ ID NO: 54910 - protein, 9 aa, Homo sapiens
  Table A; Target 54910; HLA-B*15:03; ONECUT3; ENSG00000205922; TAA
GPAGATATF

SEQ ID NO: 54911 - protein, 9 aa, Homo sapiens
  Table A; Target 54911; HLA-B*35:01; ONECUT3; ENSG00000205922; TAA
GPAGATATF

SEQ ID NO: 54912 - protein, 9 aa, Homo sapiens
  Table A; Target 54912; HLA-B*35:03; ONECUT3; ENSG00000205922; TAA
GPAGATATF

SEQ ID NO: 54913 - protein, 9 aa, Homo sapiens
  Table A; Target 54913; HLA-B*55:01; ONECUT3; ENSG00000205922; TAA
GPAGATATF

SEQ ID NO: 54914 - protein, 9 aa, Homo sapiens
  Table A; Target 54914; HLA-B*56:01; ONECUT3; ENSG00000205922; TAA
GPAGATATF

SEQ ID NO: 54915 - protein, 9 aa, Homo sapiens
  Table A; Target 54915; HLA-C*07:02; ONECUT3; ENSG00000205922; TAA
GPAGATATF

SEQ ID NO: 54916 - protein, 9 aa, Homo sapiens
  Table A; Target 54916; HLA-C*14:02; ONECUT3; ENSG00000205922; TAA
GPAGATATF

SEQ ID NO: 54917 - protein, 11 aa, Homo sapiens
  Table A; Target 54917; HLA-B*56:01; ONECUT3; ENSG00000205922; TAA
GPGGSGGGPSA

SEQ ID NO: 54918 - protein, 9 aa, Homo sapiens
  Table A; Target 54918; HLA-B*07:02; ONECUT3; ENSG00000205922; TAA
GPLHPAMGM

SEQ ID NO: 54919 - protein, 9 aa, Homo sapiens
  Table A; Target 54919; HLA-B*54:01; ONECUT3; ENSG00000205922; TAA
GPYGKELPA

SEQ ID NO: 54920 - protein, 9 aa, Homo sapiens
  Table A; Target 54920; HLA-B*56:01; ONECUT3; ENSG00000205922; TAA
GPYGKELPA

SEQ ID NO: 54921 - protein, 10 aa, Homo sapiens
  Table A; Target 54921; HLA-B*07:02; ONECUT3; ENSG00000205922; TAA
GPYGKELPAM

SEQ ID NO: 54922 - protein, 10 aa, Homo sapiens
  Table A; Target 54922; HLA-B*55:01; ONECUT3; ENSG00000205922; TAA
GPYGKELPAM

SEQ ID NO: 54923 - protein, 9 aa, Homo sapiens
  Table A; Target 54923; HLA-B*27:05; ONECUT3; ENSG00000205922; TAA
GRAEDALAR

SEQ ID NO: 54924 - protein, 11 aa, Homo sapiens
  Table A; Target 54924; HLA-B*27:05; ONECUT3; ENSG00000205922; TAA
GRAEDALARGL

SEQ ID NO: 54925 - protein, 9 aa, Homo sapiens
  Table A; Target 54925; HLA-B*27:05; ONECUT3; ENSG00000205922; TAA
GRPGLVAGM

SEQ ID NO: 54926 - protein, 11 aa, Homo sapiens
  Table A; Target 54926; HLA-A*03:01; ONECUT3; ENSG00000205922; TAA
GTLSDLLRNPK

SEQ ID NO: 54927 - protein, 11 aa, Homo sapiens
  Table A; Target 54927; HLA-A*11:01; ONECUT3; ENSG00000205922; TAA
GTLSDLLRNPK

SEQ ID NO: 54928 - protein, 11 aa, Homo sapiens
  Table A; Target 54928; HLA-A*03:01; ONECUT3; ENSG00000205922; TAA
GTYTTLTPLQH

SEQ ID NO: 54929 - protein, 8 aa, Homo sapiens
  Table A; Target 54929; HLA-B*54:01; ONECUT3; ENSG00000205922; TAA
HAHPHPAA

SEQ ID NO: 54930 - protein, 9 aa, Homo sapiens
  Table A; Target 54930; HLA-B*54:01; ONECUT3; ENSG00000205922; TAA
HAHPHPAAA

SEQ ID NO: 54931 - protein, 8 aa, Homo sapiens
  Table A; Target 54931; HLA-C*03:04; ONECUT3; ENSG00000205922; TAA
HAQAGELL

SEQ ID NO: 54932 - protein, 10 aa, Homo sapiens
  Table A; Target 54932; HLA-C*04:01; ONECUT3; ENSG00000205922; TAA
HGPHGGGGGP

SEQ ID NO: 54933 - protein, 10 aa, Homo sapiens
  Table A; Target 54933; HLA-A*02:03; ONECUT3; ENSG00000205922; TAA
HLYGPYGKEL

SEQ ID NO: 54934 - protein, 9 aa, Homo sapiens
  Table A; Target 54934; HLA-B*54:01; ONECUT3; ENSG00000205922; TAA
HPHAHPHPA

SEQ ID NO: 54935 - protein, 10 aa, Homo sapiens
  Table A; Target 54935; HLA-B*54:01; ONECUT3; ENSG00000205922; TAA
HPHAHPHPAA

SEQ ID NO: 54936 - protein, 9 aa, Homo sapiens
  Table A; Target 54936; HLA-B*13:02; ONECUT3; ENSG00000205922; TAA
HQHAAAAAV

SEQ ID NO: 54937 - protein, 9 aa, Homo sapiens
  Table A; Target 54937; HLA-B*15:03; ONECUT3; ENSG00000205922; TAA
HQHAAAAAV

SEQ ID NO: 54938 - protein, 9 aa, Homo sapiens
  Table A; Target 54938; HLA-B*37:01; ONECUT3; ENSG00000205922; TAA
HQHAAAAAV

SEQ ID NO: 54939 - protein, 9 aa, Homo sapiens
  Table A; Target 54939; HLA-B*39:01; ONECUT3; ENSG00000205922; TAA
HQHAAAAAV

SEQ ID NO: 54940 - protein, 9 aa, Homo sapiens
  Table A; Target 54940; HLA-C*07:04; ONECUT3; ENSG00000205922; TAA
HQHAAAAAV

SEQ ID NO: 54941 - protein, 9 aa, Homo sapiens
  Table A; Target 54941; HLA-A*33:01; ONECUT3; ENSG00000205922; TAA
INTKEVAQR

SEQ ID NO: 54942 - protein, 9 aa, Homo sapiens
  Table A; Target 54942; HLA-A*31:01; ONECUT3; ENSG00000205922; TAA
IPQAIFAQR

SEQ ID NO: 54943 - protein, 9 aa, Homo sapiens
  Table A; Target 54943; HLA-A*33:01; ONECUT3; ENSG00000205922; TAA
IPQAIFAQR

SEQ ID NO: 54944 - protein, 9 aa, Homo sapiens
  Table A; Target 54944; HLA-A*33:03; ONECUT3; ENSG00000205922; TAA
IPQAIFAQR

SEQ ID NO: 54945 - protein, 9 aa, Homo sapiens
  Table A; Target 54945; HLA-A*68:01; ONECUT3; ENSG00000205922; TAA
IPQAIFAQR

SEQ ID NO: 54946 - protein, 9 aa, Homo sapiens
  Table A; Target 54946; HLA-B*56:01; ONECUT3; ENSG00000205922; TAA
IPQAIFAQR

SEQ ID NO: 54947 - protein, 9 aa, Homo sapiens
  Table A; Target 54947; HLA-C*07:06; ONECUT3; ENSG00000205922; TAA
IPQAIFAQR

SEQ ID NO: 54948 - protein, 10 aa, Homo sapiens
  Table A; Target 54948; HLA-B*51:01; ONECUT3; ENSG00000205922; TAA
IPQAIFAQRI

SEQ ID NO: 54949 - protein, 10 aa, Homo sapiens
  Table A; Target 54949; HLA-B*56:01; ONECUT3; ENSG00000205922; TAA
IPQAIFAQRI

SEQ ID NO: 54950 - protein, 9 aa, Homo sapiens
  Table A; Target 54950; HLA-C*03:03; ONECUT3; ENSG00000205922; TAA
ISQQLGLEL

SEQ ID NO: 54951 - protein, 9 aa, Homo sapiens
  Table A; Target 54951; HLA-C*03:04; ONECUT3; ENSG00000205922; TAA
ISQQLGLEL

SEQ ID NO: 54952 - protein, 8 aa, Homo sapiens
  Table A; Target 54952; HLA-C*16:01; ONECUT3; ENSG00000205922; TAA
ITAELKRY

SEQ ID NO: 54953 - protein, 8 aa, Homo sapiens
  Table A; Target 54953; HLA-C*16:02; ONECUT3; ENSG00000205922; TAA
ITAELKRY

SEQ ID NO: 54954 - protein, 10 aa, Homo sapiens
  Table A; Target 54954; HLA-B*37:01; ONECUT3; ENSG00000205922; TAA
KELPAMGSPL

SEQ ID NO: 54955 - protein, 10 aa, Homo sapiens
  Table A; Target 54955; HLA-B*40:01; ONECUT3; ENSG00000205922; TAA
KELPAMGSPL

SEQ ID NO: 54956 - protein, 11 aa, Homo sapiens
  Table A; Target 54956; HLA-A*30:01; ONECUT3; ENSG00000205922; TAA
KEMQVTISQQL

SEQ ID NO: 54957 - protein, 11 aa, Homo sapiens
  Table A; Target 54957; HLA-B*40:01; ONECUT3; ENSG00000205922; TAA
KEMQVTISQQL

SEQ ID NO: 54958 - protein, 11 aa, Homo sapiens
  Table A; Target 54958; HLA-B*40:02; ONECUT3; ENSG00000205922; TAA
KEMQVTISQQL

SEQ ID NO: 54959 - protein, 11 aa, Homo sapiens
  Table A; Target 54959; HLA-B*44:02; ONECUT3; ENSG00000205922; TAA
KEMQVTISQQL

SEQ ID NO: 54960 - protein, 11 aa, Homo sapiens
  Table A; Target 54960; HLA-B*44:03; ONECUT3; ENSG00000205922; TAA
KEMQVTISQQL

SEQ ID NO: 54961 - protein, 11 aa, Homo sapiens
  Table A; Target 54961; HLA-C*16:04; ONECUT3; ENSG00000205922; TAA
KEMQVTISQQL

SEQ ID NO: 54962 - protein, 9 aa, Homo sapiens
  Table A; Target 54962; HLA-A*30:01; ONECUT3; ENSG00000205922; TAA
KEVAQRITA

SEQ ID NO: 54963 - protein, 9 aa, Homo sapiens
  Table A; Target 54963; HLA-B*40:02; ONECUT3; ENSG00000205922; TAA
KEVAQRITA

SEQ ID NO: 54964 - protein, 11 aa, Homo sapiens
  Table A; Target 54964; HLA-A*30:01; ONECUT3; ENSG00000205922; TAA
KEVAQRITAEL

SEQ ID NO: 54965 - protein, 11 aa, Homo sapiens
  Table A; Target 54965; HLA-B*40:01; ONECUT3; ENSG00000205922; TAA
KEVAQRITAEL

SEQ ID NO: 54966 - protein, 9 aa, Homo sapiens
  Table A; Target 54966; HLA-A*32:01; ONECUT3; ENSG00000205922; TAA
KLKSGRETF

SEQ ID NO: 54967 - protein, 9 aa, Homo sapiens
  Table A; Target 54967; HLA-A*23:01; ONECUT3; ENSG00000205922; TAA
LAASVSGSF

SEQ ID NO: 54968 - protein, 9 aa, Homo sapiens
  Table A; Target 54968; HLA-A*32:01; ONECUT3; ENSG00000205922; TAA
LAASVSGSF

SEQ ID NO: 54969 - protein, 9 aa, Homo sapiens
  Table A; Target 54969; HLA-B*15:01; ONECUT3; ENSG00000205922; TAA
LAASVSGSF

SEQ ID NO: 54970 - protein, 9 aa, Homo sapiens
  Table A; Target 54970; HLA-B*15:03; ONECUT3; ENSG00000205922; TAA
LAASVSGSF

SEQ ID NO: 54971 - protein, 9 aa, Homo sapiens
  Table A; Target 54971; HLA-B*35:01; ONECUT3; ENSG00000205922; TAA
LAASVSGSF

SEQ ID NO: 54972 - protein, 9 aa, Homo sapiens
  Table A; Target 54972; HLA-B*39:01; ONECUT3; ENSG00000205922; TAA
LAASVSGSF

SEQ ID NO: 54973 - protein, 9 aa, Homo sapiens
  Table A; Target 54973; HLA-B*46:01; ONECUT3; ENSG00000205922; TAA
LAASVSGSF

SEQ ID NO: 54974 - protein, 9 aa, Homo sapiens
  Table A; Target 54974; HLA-B*58:01; ONECUT3; ENSG00000205922; TAA
LAASVSGSF

SEQ ID NO: 54975 - protein, 9 aa, Homo sapiens
  Table A; Target 54975; HLA-C*02:02; ONECUT3; ENSG00000205922; TAA
LAASVSGSF

SEQ ID NO: 54976 - protein, 9 aa, Homo sapiens
  Table A; Target 54976; HLA-C*03:03; ONECUT3; ENSG00000205922; TAA
LAASVSGSF

SEQ ID NO: 54977 - protein, 9 aa, Homo sapiens
  Table A; Target 54977; HLA-C*03:04; ONECUT3; ENSG00000205922; TAA
LAASVSGSF

SEQ ID NO: 54978 - protein, 9 aa, Homo sapiens
  Table A; Target 54978; HLA-C*05:01; ONECUT3; ENSG00000205922; TAA
LAASVSGSF

SEQ ID NO: 54979 - protein, 9 aa, Homo sapiens
  Table A; Target 54979; HLA-C*14:02; ONECUT3; ENSG00000205922; TAA
LAASVSGSF

SEQ ID NO: 54980 - protein, 9 aa, Homo sapiens
  Table A; Target 54980; HLA-C*16:01; ONECUT3; ENSG00000205922; TAA
LAASVSGSF

SEQ ID NO: 54981 - protein, 9 aa, Homo sapiens
  Table A; Target 54981; HLA-C*16:04; ONECUT3; ENSG00000205922; TAA
LAASVSGSF

SEQ ID NO: 54982 - protein, 9 aa, Homo sapiens
  Table A; Target 54982; HLA-A*23:01; ONECUT3; ENSG00000205922; TAA
LAGPLHPAM

SEQ ID NO: 54983 - protein, 9 aa, Homo sapiens
  Table A; Target 54983; HLA-A*32:01; ONECUT3; ENSG00000205922; TAA
LAGPLHPAM

SEQ ID NO: 54984 - protein, 9 aa, Homo sapiens
  Table A; Target 54984; HLA-B*15:03; ONECUT3; ENSG00000205922; TAA
LAGPLHPAM

SEQ ID NO: 54985 - protein, 9 aa, Homo sapiens
  Table A; Target 54985; HLA-B*35:01; ONECUT3; ENSG00000205922; TAA
LAGPLHPAM

SEQ ID NO: 54986 - protein, 9 aa, Homo sapiens
  Table A; Target 54986; HLA-B*35:03; ONECUT3; ENSG00000205922; TAA
LAGPLHPAM

SEQ ID NO: 54987 - protein, 9 aa, Homo sapiens
  Table A; Target 54987; HLA-B*46:01; ONECUT3; ENSG00000205922; TAA
LAGPLHPAM

SEQ ID NO: 54988 - protein, 9 aa, Homo sapiens
  Table A; Target 54988; HLA-B*54:01; ONECUT3; ENSG00000205922; TAA
LAGPLHPAM

SEQ ID NO: 54989 - protein, 9 aa, Homo sapiens
  Table A; Target 54989; HLA-B*55:01; ONECUT3; ENSG00000205922; TAA
LAGPLHPAM

SEQ ID NO: 54990 - protein, 9 aa, Homo sapiens
  Table A; Target 54990; HLA-B*58:01; ONECUT3; ENSG00000205922; TAA
LAGPLHPAM

SEQ ID NO: 54991 - protein, 9 aa, Homo sapiens
  Table A; Target 54991; HLA-C*02:02; ONECUT3; ENSG00000205922; TAA
LAGPLHPAM

SEQ ID NO: 54992 - protein, 9 aa, Homo sapiens
  Table A; Target 54992; HLA-C*03:03; ONECUT3; ENSG00000205922; TAA
LAGPLHPAM

SEQ ID NO: 54993 - protein, 9 aa, Homo sapiens
  Table A; Target 54993; HLA-C*03:04; ONECUT3; ENSG00000205922; TAA
LAGPLHPAM

SEQ ID NO: 54994 - protein, 9 aa, Homo sapiens
  Table A; Target 54994; HLA-C*07:01; ONECUT3; ENSG00000205922; TAA
LAGPLHPAM

SEQ ID NO: 54995 - protein, 9 aa, Homo sapiens
  Table A; Target 54995; HLA-C*07:04; ONECUT3; ENSG00000205922; TAA
LAGPLHPAM

SEQ ID NO: 54996 - protein, 9 aa, Homo sapiens
  Table A; Target 54996; HLA-C*12:03; ONECUT3; ENSG00000205922; TAA
LAGPLHPAM

SEQ ID NO: 54997 - protein, 9 aa, Homo sapiens
  Table A; Target 54997; HLA-C*14:02; ONECUT3; ENSG00000205922; TAA
LAGPLHPAM

SEQ ID NO: 54998 - protein, 9 aa, Homo sapiens
  Table A; Target 54998; HLA-C*16:01; ONECUT3; ENSG00000205922; TAA
LAGPLHPAM

SEQ ID NO: 54999 - protein, 9 aa, Homo sapiens
  Table A; Target 54999; HLA-C*16:02; ONECUT3; ENSG00000205922; TAA
LAGPLHPAM

SEQ ID NO: 55000 - protein, 9 aa, Homo sapiens
  Table A; Target 55000; HLA-C*16:04; ONECUT3; ENSG00000205922; TAA
LAGPLHPAM

SEQ ID NO: 55001 - protein, 9 aa, Homo sapiens
  Table A; Target 55001; HLA-B*46:01; ONECUT3; ENSG00000205922; TAA
LAPLGGLAA

SEQ ID NO: 55002 - protein, 9 aa, Homo sapiens
  Table A; Target 55002; HLA-B*54:01; ONECUT3; ENSG00000205922; TAA
LAPLGGLAA

SEQ ID NO: 55003 - protein, 9 aa, Homo sapiens
  Table A; Target 55003; HLA-B*56:01; ONECUT3; ENSG00000205922; TAA
LAPLGGLAA

SEQ ID NO: 55004 - protein, 9 aa, Homo sapiens
  Table A; Target 55004; HLA-C*01:02; ONECUT3; ENSG00000205922; TAA
LAPLGGLAA

SEQ ID NO: 55005 - protein, 9 aa, Homo sapiens
  Table A; Target 55005; HLA-C*03:03; ONECUT3; ENSG00000205922; TAA
LAPLGGLAA

SEQ ID NO: 55006 - protein, 9 aa, Homo sapiens
  Table A; Target 55006; HLA-C*03:04; ONECUT3; ENSG00000205922; TAA
LAPLGGLAA

SEQ ID NO: 55007 - protein, 9 aa, Homo sapiens
  Table A; Target 55007; HLA-C*14:02; ONECUT3; ENSG00000205922; TAA
LAPLGGLAA

SEQ ID NO: 55008 - protein, 10 aa, Homo sapiens
  Table A; Target 55008; HLA-B*54:01; ONECUT3; ENSG00000205922; TAA
LAPLGGLAAA

SEQ ID NO: 55009 - protein, 10 aa, Homo sapiens
  Table A; Target 55009; HLA-B*56:01; ONECUT3; ENSG00000205922; TAA
LAPLGGLAAA

SEQ ID NO: 55010 - protein, 8 aa, Homo sapiens
  Table A; Target 55010; HLA-A*01:01; ONECUT3; ENSG00000205922; TAA
LASVGHLY

SEQ ID NO: 55011 - protein, 8 aa, Homo sapiens
  Table A; Target 55011; HLA-A*29:02; ONECUT3; ENSG00000205922; TAA
LASVGHLY

SEQ ID NO: 55012 - protein, 8 aa, Homo sapiens
  Table A; Target 55012; HLA-A*30:02; ONECUT3; ENSG00000205922; TAA
LASVGHLY

SEQ ID NO: 55013 - protein, 8 aa, Homo sapiens
  Table A; Target 55013; HLA-B*15:03; ONECUT3; ENSG00000205922; TAA
LASVGHLY

SEQ ID NO: 55014 - protein, 8 aa, Homo sapiens
  Table A; Target 55014; HLA-B*46:01; ONECUT3; ENSG00000205922; TAA
LASVGHLY

SEQ ID NO: 55015 - protein, 8 aa, Homo sapiens
  Table A; Target 55015; HLA-B*58:01; ONECUT3; ENSG00000205922; TAA
LASVGHLY

SEQ ID NO: 55016 - protein, 8 aa, Homo sapiens
  Table A; Target 55016; HLA-C*02:02; ONECUT3; ENSG00000205922; TAA
LASVGHLY

SEQ ID NO: 55017 - protein, 8 aa, Homo sapiens
  Table A; Target 55017; HLA-C*03:03; ONECUT3; ENSG00000205922; TAA
LASVGHLY

SEQ ID NO: 55018 - protein, 8 aa, Homo sapiens
  Table A; Target 55018; HLA-C*03:04; ONECUT3; ENSG00000205922; TAA
LASVGHLY

SEQ ID NO: 55019 - protein, 8 aa, Homo sapiens
  Table A; Target 55019; HLA-C*05:01; ONECUT3; ENSG00000205922; TAA
LASVGHLY

SEQ ID NO: 55020 - protein, 8 aa, Homo sapiens
  Table A; Target 55020; HLA-C*16:01; ONECUT3; ENSG00000205922; TAA
LASVGHLY

SEQ ID NO: 55021 - protein, 8 aa, Homo sapiens
  Table A; Target 55021; HLA-C*16:02; ONECUT3; ENSG00000205922; TAA
LASVGHLY

SEQ ID NO: 55022 - protein, 9 aa, Homo sapiens
  Table A; Target 55022; HLA-A*30:01; ONECUT3; ENSG00000205922; TAA
LELNTVSNF

SEQ ID NO: 55023 - protein, 9 aa, Homo sapiens
  Table A; Target 55023; HLA-B*18:01; ONECUT3; ENSG00000205922; TAA
LELNTVSNF

SEQ ID NO: 55024 - protein, 9 aa, Homo sapiens
  Table A; Target 55024; HLA-B*37:01; ONECUT3; ENSG00000205922; TAA
LELNTVSNF

SEQ ID NO: 55025 - protein, 9 aa, Homo sapiens
  Table A; Target 55025; HLA-B*40:01; ONECUT3; ENSG00000205922; TAA
LELNTVSNF

SEQ ID NO: 55026 - protein, 9 aa, Homo sapiens
  Table A; Target 55026; HLA-B*44:02; ONECUT3; ENSG00000205922; TAA
LELNTVSNF

SEQ ID NO: 55027 - protein, 9 aa, Homo sapiens
  Table A; Target 55027; HLA-B*44:03; ONECUT3; ENSG00000205922; TAA
LELNTVSNF

SEQ ID NO: 55028 - protein, 9 aa, Homo sapiens
  Table A; Target 55028; HLA-B*49:01; ONECUT3; ENSG00000205922; TAA
LELNTVSNF

SEQ ID NO: 55029 - protein, 9 aa, Homo sapiens
  Table A; Target 55029; HLA-C*16:04; ONECUT3; ENSG00000205922; TAA
LELNTVSNF

SEQ ID NO: 55030 - protein, 10 aa, Homo sapiens
  Table A; Target 55030; HLA-B*49:01; ONECUT3; ENSG00000205922; TAA
LESLGGLHSV

SEQ ID NO: 55031 - protein, 9 aa, Homo sapiens
  Table A; Target 55031; HLA-C*06:02; ONECUT3; ENSG00000205922; TAA
LLAPLGGLA

SEQ ID NO: 55032 - protein, 10 aa, Homo sapiens
  Table A; Target 55032; HLA-A*02:01; ONECUT3; ENSG00000205922; TAA
LLAPLGGLAA

SEQ ID NO: 55033 - protein, 10 aa, Homo sapiens
  Table A; Target 55033; HLA-A*02:03; ONECUT3; ENSG00000205922; TAA
LLAPLGGLAA

SEQ ID NO: 55034 - protein, 10 aa, Homo sapiens
  Table A; Target 55034; HLA-A*02:04; ONECUT3; ENSG00000205922; TAA
LLAPLGGLAA

SEQ ID NO: 55035 - protein, 10 aa, Homo sapiens
  Table A; Target 55035; HLA-B*54:01; ONECUT3; ENSG00000205922; TAA
LLAPLGGLAA

SEQ ID NO: 55036 - protein, 10 aa, Homo sapiens
  Table A; Target 55036; HLA-B*56:01; ONECUT3; ENSG00000205922; TAA
LLAPLGGLAA

SEQ ID NO: 55037 - protein, 11 aa, Homo sapiens
  Table A; Target 55037; HLA-A*02:01; ONECUT3; ENSG00000205922; TAA
LLAPLGGLAAA

SEQ ID NO: 55038 - protein, 11 aa, Homo sapiens
  Table A; Target 55038; HLA-A*02:03; ONECUT3; ENSG00000205922; TAA
LLAPLGGLAAA

SEQ ID NO: 55039 - protein, 11 aa, Homo sapiens
  Table A; Target 55039; HLA-A*02:04; ONECUT3; ENSG00000205922; TAA
LLAPLGGLAAA

SEQ ID NO: 55040 - protein, 11 aa, Homo sapiens
  Table A; Target 55040; HLA-A*02:07; ONECUT3; ENSG00000205922; TAA
LLAPLGGLAAA

SEQ ID NO: 55041 - protein, 11 aa, Homo sapiens
  Table A; Target 55041; HLA-B*56:01; ONECUT3; ENSG00000205922; TAA
LLAPLGGLAAA

SEQ ID NO: 55042 - protein, 11 aa, Homo sapiens
  Table A; Target 55042; HLA-A*02:07; ONECUT3; ENSG00000205922; TAA
LLPPAAFEPHA

SEQ ID NO: 55043 - protein, 9 aa, Homo sapiens
  Table A; Target 55043; HLA-B*07:02; ONECUT3; ENSG00000205922; TAA
LPNALPPAL

SEQ ID NO: 55044 - protein, 9 aa, Homo sapiens
  Table A; Target 55044; HLA-B*35:01; ONECUT3; ENSG00000205922; TAA
LPNALPPAL

SEQ ID NO: 55045 - protein, 9 aa, Homo sapiens
  Table A; Target 55045; HLA-B*35:03; ONECUT3; ENSG00000205922; TAA
LPNALPPAL

SEQ ID NO: 55046 - protein, 9 aa, Homo sapiens
  Table A; Target 55046; HLA-B*51:01; ONECUT3; ENSG00000205922; TAA
LPNALPPAL

SEQ ID NO: 55047 - protein, 9 aa, Homo sapiens
  Table A; Target 55047; HLA-B*54:01; ONECUT3; ENSG00000205922; TAA
LPNALPPAL

SEQ ID NO: 55048 - protein, 9 aa, Homo sapiens
  Table A; Target 55048; HLA-B*56:01; ONECUT3; ENSG00000205922; TAA
LPNALPPAL

SEQ ID NO: 55049 - protein, 9 aa, Homo sapiens
  Table A; Target 55049; HLA-C*07:02; ONECUT3; ENSG00000205922; TAA
LPNALPPAL

SEQ ID NO: 55050 - protein, 9 aa, Homo sapiens
  Table A; Target 55050; HLA-C*14:02; ONECUT3; ENSG00000205922; TAA
LPNALPPAL

SEQ ID NO: 55051 - protein, 10 aa, Homo sapiens
  Table A; Target 55051; HLA-B*54:01; ONECUT3; ENSG00000205922; TAA
LPPAAFEPHA

SEQ ID NO: 55052 - protein, 11 aa, Homo sapiens
  Table A; Target 55052; HLA-B*54:01; ONECUT3; ENSG00000205922; TAA
LPPAAFEPHAA

SEQ ID NO: 55053 - protein, 8 aa, Homo sapiens
  Table A; Target 55053; HLA-B*51:01; ONECUT3; ENSG00000205922; TAA
LPPLAAVA

SEQ ID NO: 55054 - protein, 11 aa, Homo sapiens
  Table A; Target 55054; HLA-B*35:01; ONECUT3; ENSG00000205922; TAA
LPPLAAVADKF

SEQ ID NO: 55055 - protein, 8 aa, Homo sapiens
  Table A; Target 55055; HLA-C*01:02; ONECUT3; ENSG00000205922; TAA
LSPLPNAL

SEQ ID NO: 55056 - protein, 9 aa, Homo sapiens
  Table A; Target 55056; HLA-A*32:01; ONECUT3; ENSG00000205922; TAA
LVAPGRPGL

SEQ ID NO: 55057 - protein, 9 aa, Homo sapiens
  Table A; Target 55057; HLA-C*16:01; ONECUT3; ENSG00000205922; TAA
LVAPGRPGL

SEQ ID NO: 55058 - protein, 9 aa, Homo sapiens
  Table A; Target 55058; HLA-A*24:02; ONECUT3; ENSG00000205922; TAA
LYGPYGKEL

SEQ ID NO: 55059 - protein, 9 aa, Homo sapiens
  Table A; Target 55059; HLA-C*14:02; ONECUT3; ENSG00000205922; TAA
LYGPYGKEL

SEQ ID NO: 55060 - protein, 8 aa, Homo sapiens
  Table A; Target 55060; HLA-B*18:01; ONECUT3; ENSG00000205922; TAA
MELSLESL

SEQ ID NO: 55061 - protein, 9 aa, Homo sapiens
  Table A; Target 55061; HLA-A*23:01; ONECUT3; ENSG00000205922; TAA
MQVTISQQL

SEQ ID NO: 55062 - protein, 9 aa, Homo sapiens
  Table A; Target 55062; HLA-A*30:01; ONECUT3; ENSG00000205922; TAA
MQVTISQQL

SEQ ID NO: 55063 - protein, 9 aa, Homo sapiens
  Table A; Target 55063; HLA-B*13:02; ONECUT3; ENSG00000205922; TAA
MQVTISQQL

SEQ ID NO: 55064 - protein, 9 aa, Homo sapiens
  Table A; Target 55064; HLA-B*15:01; ONECUT3; ENSG00000205922; TAA
MQVTISQQL

SEQ ID NO: 55065 - protein, 9 aa, Homo sapiens
  Table A; Target 55065; HLA-B*15:03; ONECUT3; ENSG00000205922; TAA
MQVTISQQL

SEQ ID NO: 55066 - protein, 9 aa, Homo sapiens
  Table A; Target 55066; HLA-B*27:05; ONECUT3; ENSG00000205922; TAA
MQVTISQQL

SEQ ID NO: 55067 - protein, 9 aa, Homo sapiens
  Table A; Target 55067; HLA-B*35:03; ONECUT3; ENSG00000205922; TAA
MQVTISQQL

SEQ ID NO: 55068 - protein, 9 aa, Homo sapiens
  Table A; Target 55068; HLA-B*38:01; ONECUT3; ENSG00000205922; TAA
MQVTISQQL

SEQ ID NO: 55069 - protein, 9 aa, Homo sapiens
  Table A; Target 55069; HLA-B*39:01; ONECUT3; ENSG00000205922; TAA
MQVTISQQL

SEQ ID NO: 55070 - protein, 9 aa, Homo sapiens
  Table A; Target 55070; HLA-B*40:01; ONECUT3; ENSG00000205922; TAA
MQVTISQQL

SEQ ID NO: 55071 - protein, 9 aa, Homo sapiens
  Table A; Target 55071; HLA-C*02:02; ONECUT3; ENSG00000205922; TAA
MQVTISQQL

SEQ ID NO: 55072 - protein, 9 aa, Homo sapiens
  Table A; Target 55072; HLA-C*16:04; ONECUT3; ENSG00000205922; TAA
MQVTISQQL

SEQ ID NO: 55073 - protein, 8 aa, Homo sapiens
  Table A; Target 55073; HLA-C*16:01; ONECUT3; ENSG00000205922; TAA
MSALRLAA

SEQ ID NO: 55074 - protein, 8 aa, Homo sapiens
  Table A; Target 55074; HLA-A*33:01; ONECUT3; ENSG00000205922; TAA
NTKEVAQR

SEQ ID NO: 55075 - protein, 8 aa, Homo sapiens
  Table A; Target 55075; HLA-A*33:03; ONECUT3; ENSG00000205922; TAA
NTKEVAQR

SEQ ID NO: 55076 - protein, 11 aa, Homo sapiens
  Table A; Target 55076; HLA-A*23:01; ONECUT3; ENSG00000205922; TAA
PGGPAGATATF

SEQ ID NO: 55077 - protein, 11 aa, Homo sapiens
  Table A; Target 55077; HLA-A*24:02; ONECUT3; ENSG00000205922; TAA
PGGPAGATATF

SEQ ID NO: 55078 - protein, 11 aa, Homo sapiens
  Table A; Target 55078; HLA-A*30:02; ONECUT3; ENSG00000205922; TAA
PGGPAGATATF

SEQ ID NO: 55079 - protein, 11 aa, Homo sapiens
  Table A; Target 55079; HLA-B*07:02; ONECUT3; ENSG00000205922; TAA
PGGPAGATATF

SEQ ID NO: 55080 - protein, 11 aa, Homo sapiens
  Table A; Target 55080; HLA-C*04:01; ONECUT3; ENSG00000205922; TAA
PGGPAGATATF

SEQ ID NO: 55081 - protein, 11 aa, Homo sapiens
  Table A; Target 55081; HLA-C*07:02; ONECUT3; ENSG00000205922; TAA
PGGPAGATATF

SEQ ID NO: 55082 - protein, 9 aa, Homo sapiens
  Table A; Target 55082; HLA-A*24:02; ONECUT3; ENSG00000205922; TAA
PLAAVADKF

SEQ ID NO: 55083 - protein, 9 aa, Homo sapiens
  Table A; Target 55083; HLA-B*13:02; ONECUT3; ENSG00000205922; TAA
PQAIFAQRI

SEQ ID NO: 55084 - protein, 9 aa, Homo sapiens
  Table A; Target 55084; HLA-C*03:04; ONECUT3; ENSG00000205922; TAA
QAIFAQRIL

SEQ ID NO: 55085 - protein, 10 aa, Homo sapiens
  Table A; Target 55085; HLA-A*30:01; ONECUT3; ENSG00000205922; TAA
QEPEFQRMSA

SEQ ID NO: 55086 - protein, 9 aa, Homo sapiens
  Table A; Target 55086; HLA-B*37:01; ONECUT3; ENSG00000205922; TAA
QEQQKERAL

SEQ ID NO: 55087 - protein, 9 aa, Homo sapiens
  Table A; Target 55087; HLA-B*40:01; ONECUT3; ENSG00000205922; TAA
QEQQKERAL

SEQ ID NO: 55088 - protein, 9 aa, Homo sapiens
  Table A; Target 55088; HLA-B*44:02; ONECUT3; ENSG00000205922; TAA
QEQQKERAL

SEQ ID NO: 55089 - protein, 9 aa, Homo sapiens
  Table A; Target 55089; HLA-B*44:03; ONECUT3; ENSG00000205922; TAA
QEQQKERAL

SEQ ID NO: 55090 - protein, 9 aa, Homo sapiens
  Table A; Target 55090; HLA-B*39:01; ONECUT3; ENSG00000205922; TAA
QHAAAAAVA

SEQ ID NO: 55091 - protein, 9 aa, Homo sapiens
  Table A; Target 55091; HLA-A*02:01; ONECUT3; ENSG00000205922; TAA
QLGLELNTV

SEQ ID NO: 55092 - protein, 9 aa, Homo sapiens
  Table A; Target 55092; HLA-A*02:03; ONECUT3; ENSG00000205922; TAA
QLGLELNTV

SEQ ID NO: 55093 - protein, 9 aa, Homo sapiens
  Table A; Target 55093; HLA-B*56:01; ONECUT3; ENSG00000205922; TAA
QPPPPPPPP

SEQ ID NO: 55094 - protein, 9 aa, Homo sapiens
  Table A; Target 55094; HLA-C*04:01; ONECUT3; ENSG00000205922; TAA
QPPPPPPPP

SEQ ID NO: 55095 - protein, 10 aa, Homo sapiens
  Table A; Target 55095; HLA-A*02:01; ONECUT3; ENSG00000205922; TAA
QQLGLELNTV

SEQ ID NO: 55096 - protein, 10 aa, Homo sapiens
  Table A; Target 55096; HLA-B*13:02; ONECUT3; ENSG00000205922; TAA
QQLGLELNTV

SEQ ID NO: 55097 - protein, 11 aa, Homo sapiens
  Table A; Target 55097; HLA-A*01:01; ONECUT3; ENSG00000205922; TAA
RAALASVGHLY

SEQ ID NO: 55098 - protein, 11 aa, Homo sapiens
  Table A; Target 55098; HLA-A*30:02; ONECUT3; ENSG00000205922; TAA
RAALASVGHLY

SEQ ID NO: 55099 - protein, 11 aa, Homo sapiens
  Table A; Target 55099; HLA-B*57:01; ONECUT3; ENSG00000205922; TAA
RAALASVGHLY

SEQ ID NO: 55100 - protein, 10 aa, Homo sapiens
  Table A; Target 55100; HLA-A*30:02; ONECUT3; ENSG00000205922; TAA
RLAASVSGSF

SEQ ID NO: 55101 - protein, 11 aa, Homo sapiens
  Table A; Target 55101; HLA-B*07:02; ONECUT3; ENSG00000205922; TAA
RPGLVAGMASL

SEQ ID NO: 55102 - protein, 10 aa, Homo sapiens
  Table A; Target 55102; HLA-B*07:02; ONECUT3; ENSG00000205922; TAA
RPSKEMQVTI

SEQ ID NO: 55103 - protein, 10 aa, Homo sapiens
  Table A; Target 55103; HLA-B*56:01; ONECUT3; ENSG00000205922; TAA
RPSKEMQVTI

SEQ ID NO: 55104 - protein, 9 aa, Homo sapiens
  Table A; Target 55104; HLA-A*23:01; ONECUT3; ENSG00000205922; TAA
RYSIPQAIF

SEQ ID NO: 55105 - protein, 9 aa, Homo sapiens
  Table A; Target 55105; HLA-A*24:02; ONECUT3; ENSG00000205922; TAA
RYSIPQAIF

SEQ ID NO: 55106 - protein, 9 aa, Homo sapiens
  Table A; Target 55106; HLA-C*03:04; ONECUT3; ENSG00000205922; TAA
SAAAQHRGL

SEQ ID NO: 55107 - protein, 9 aa, Homo sapiens
  Table A; Target 55107; HLA-C*16:01; ONECUT3; ENSG00000205922; TAA
SAAAQHRGL

SEQ ID NO: 55108 - protein, 9 aa, Homo sapiens
  Table A; Target 55108; HLA-C*16:02; ONECUT3; ENSG00000205922; TAA
SAAAQHRGL

SEQ ID NO: 55109 - protein, 11 aa, Homo sapiens
  Table A; Target 55109; HLA-A*02:01; ONECUT3; ENSG00000205922; TAA
SLESLGGLHSV

SEQ ID NO: 55110 - protein, 11 aa, Homo sapiens
  Table A; Target 55110; HLA-A*02:04; ONECUT3; ENSG00000205922; TAA
SLESLGGLHSV

SEQ ID NO: 55111 - protein, 11 aa, Homo sapiens
  Table A; Target 55111; HLA-A*02:07; ONECUT3; ENSG00000205922; TAA
SLESLGGLHSV

SEQ ID NO: 55112 - protein, 11 aa, Homo sapiens
  Table A; Target 55112; HLA-B*55:01; ONECUT3; ENSG00000205922; TAA
SLESLGGLHSV

SEQ ID NO: 55113 - protein, 8 aa, Homo sapiens
  Table A; Target 55113; HLA-A*02:01; ONECUT3; ENSG00000205922; TAA
SLGGLHSV

SEQ ID NO: 55114 - protein, 8 aa, Homo sapiens
  Table A; Target 55114; HLA-A*02:03; ONECUT3; ENSG00000205922; TAA
SLGGLHSV

SEQ ID NO: 55115 - protein, 8 aa, Homo sapiens
  Table A; Target 55115; HLA-B*55:01; ONECUT3; ENSG00000205922; TAA
SLGGLHSV

SEQ ID NO: 55116 - protein, 9 aa, Homo sapiens
  Table A; Target 55116; HLA-B*07:02; ONECUT3; ENSG00000205922; TAA
SPGHARSAA

SEQ ID NO: 55117 - protein, 9 aa, Homo sapiens
  Table A; Target 55117; HLA-B*56:01; ONECUT3; ENSG00000205922; TAA
SPGHARSAA

SEQ ID NO: 55118 - protein, 10 aa, Homo sapiens
  Table A; Target 55118; HLA-B*56:01; ONECUT3; ENSG00000205922; TAA
SPGHARSAAA

SEQ ID NO: 55119 - protein, 10 aa, Homo sapiens
  Table A; Target 55119; HLA-B*56:01; ONECUT3; ENSG00000205922; TAA
SPLPNALPPA

SEQ ID NO: 55120 - protein, 9 aa, Homo sapiens
  Table A; Target 55120; HLA-B*54:01; ONECUT3; ENSG00000205922; TAA
SPLSPLPNA

SEQ ID NO: 55121 - protein, 9 aa, Homo sapiens
  Table A; Target 55121; HLA-B*55:01; ONECUT3; ENSG00000205922; TAA
SPLSPLPNA

SEQ ID NO: 55122 - protein, 9 aa, Homo sapiens
  Table A; Target 55122; HLA-B*56:01; ONECUT3; ENSG00000205922; TAA
SPLSPLPNA

SEQ ID NO: 55123 - protein, 10 aa, Homo sapiens
  Table A; Target 55123; HLA-B*07:02; ONECUT3; ENSG00000205922; TAA
SPLSPLPNAL

SEQ ID NO: 55124 - protein, 10 aa, Homo sapiens
  Table A; Target 55124; HLA-B*56:01; ONECUT3; ENSG00000205922; TAA
SPLSPLPNAL

SEQ ID NO: 55125 - protein, 10 aa, Homo sapiens
  Table A; Target 55125; HLA-C*07:02; ONECUT3; ENSG00000205922; TAA
SPLSPLPNAL

SEQ ID NO: 55126 - protein, 9 aa, Homo sapiens
  Table A; Target 55126; HLA-B*27:05; ONECUT3; ENSG00000205922; TAA
SQGTLSDLL

SEQ ID NO: 55127 - protein, 9 aa, Homo sapiens
  Table A; Target 55127; HLA-B*38:01; ONECUT3; ENSG00000205922; TAA
SQGTLSDLL

SEQ ID NO: 55128 - protein, 9 aa, Homo sapiens
  Table A; Target 55128; HLA-B*39:01; ONECUT3; ENSG00000205922; TAA
SQGTLSDLL

SEQ ID NO: 55129 - protein, 9 aa, Homo sapiens
  Table A; Target 55129; HLA-A*26:01; ONECUT3; ENSG00000205922; TAA
SVGHLYGPY

SEQ ID NO: 55130 - protein, 9 aa, Homo sapiens
  Table A; Target 55130; HLA-A*29:02; ONECUT3; ENSG00000205922; TAA
SVGHLYGPY

SEQ ID NO: 55131 - protein, 9 aa, Homo sapiens
  Table A; Target 55131; HLA-A*30:02; ONECUT3; ENSG00000205922; TAA
SVGHLYGPY

SEQ ID NO: 55132 - protein, 9 aa, Homo sapiens
  Table A; Target 55132; HLA-A*25:01; ONECUT3; ENSG00000205922; TAA
SVSGSFTLM

SEQ ID NO: 55133 - protein, 9 aa, Homo sapiens
  Table A; Target 55133; HLA-A*26:01; ONECUT3; ENSG00000205922; TAA
SVSGSFTLM

SEQ ID NO: 55134 - protein, 9 aa, Homo sapiens
  Table A; Target 55134; HLA-A*29:02; ONECUT3; ENSG00000205922; TAA
SVSGSFTLM

SEQ ID NO: 55135 - protein, 9 aa, Homo sapiens
  Table A; Target 55135; HLA-A*32:01; ONECUT3; ENSG00000205922; TAA
SVSGSFTLM

SEQ ID NO: 55136 - protein, 9 aa, Homo sapiens
  Table A; Target 55136; HLA-A*68:01; ONECUT3; ENSG00000205922; TAA
SVSGSFTLM

SEQ ID NO: 55137 - protein, 9 aa, Homo sapiens
  Table A; Target 55137; HLA-B*15:01; ONECUT3; ENSG00000205922; TAA
SVSGSFTLM

SEQ ID NO: 55138 - protein, 9 aa, Homo sapiens
  Table A; Target 55138; HLA-C*02:02; ONECUT3; ENSG00000205922; TAA
SVSGSFTLM

SEQ ID NO: 55139 - protein, 9 aa, Homo sapiens
  Table A; Target 55139; HLA-C*07:04; ONECUT3; ENSG00000205922; TAA
SVSGSFTLM

SEQ ID NO: 55140 - protein, 9 aa, Homo sapiens
  Table A; Target 55140; HLA-C*07:06; ONECUT3; ENSG00000205922; TAA
SVSGSFTLM

SEQ ID NO: 55141 - protein, 9 aa, Homo sapiens
  Table A; Target 55141; HLA-C*12:03; ONECUT3; ENSG00000205922; TAA
SVSGSFTLM

SEQ ID NO: 55142 - protein, 10 aa, Homo sapiens
  Table A; Target 55142; HLA-A*68:01; ONECUT3; ENSG00000205922; TAA
SVSGSFTLMR

SEQ ID NO: 55143 - protein, 9 aa, Homo sapiens
  Table A; Target 55143; HLA-B*08:01; ONECUT3; ENSG00000205922; TAA
TAELKRYSI

SEQ ID NO: 55144 - protein, 9 aa, Homo sapiens
  Table A; Target 55144; HLA-B*37:01; ONECUT3; ENSG00000205922; TAA
TDLQRRTLI

SEQ ID NO: 55145 - protein, 9 aa, Homo sapiens
  Table A; Target 55145; HLA-B*07:02; ONECUT3; ENSG00000205922; TAA
TPLQHLPPL

SEQ ID NO: 55146 - protein, 10 aa, Homo sapiens
  Table A; Target 55146; HLA-B*54:01; ONECUT3; ENSG00000205922; TAA
TPLQHLPPLA

SEQ ID NO: 55147 - protein, 11 aa, Homo sapiens
  Table A; Target 55147; HLA-B*54:01; ONECUT3; ENSG00000205922; TAA
TPLQHLPPLAA

SEQ ID NO: 55148 - protein, 11 aa, Homo sapiens
  Table A; Target 55148; HLA-B*56:01; ONECUT3; ENSG00000205922; TAA
TPLQHLPPLAA

SEQ ID NO: 55149 - protein, 10 aa, Homo sapiens
  Table A; Target 55149; HLA-A*68:01; ONECUT3; ENSG00000205922; TAA
TVSNFFMNAR

SEQ ID NO: 55150 - protein, 10 aa, Homo sapiens
  Table A; Target 55150; HLA-C*07:06; ONECUT3; ENSG00000205922; TAA
TVSNFFMNAR

SEQ ID NO: 55151 - protein, 8 aa, Homo sapiens
  Table A; Target 55151; HLA-C*05:01; ONECUT3; ENSG00000205922; TAA
VAGMASLL

SEQ ID NO: 55152 - protein, 9 aa, Homo sapiens
  Table A; Target 55152; HLA-B*46:01; ONECUT3; ENSG00000205922; TAA
VAHAQAGEL

SEQ ID NO: 55153 - protein, 9 aa, Homo sapiens
  Table A; Target 55153; HLA-C*01:02; ONECUT3; ENSG00000205922; TAA
VAHAQAGEL

SEQ ID NO: 55154 - protein, 9 aa, Homo sapiens
  Table A; Target 55154; HLA-C*03:03; ONECUT3; ENSG00000205922; TAA
VAHAQAGEL

SEQ ID NO: 55155 - protein, 9 aa, Homo sapiens
  Table A; Target 55155; HLA-C*03:04; ONECUT3; ENSG00000205922; TAA
VAHAQAGEL

SEQ ID NO: 55156 - protein, 9 aa, Homo sapiens
  Table A; Target 55156; HLA-C*14:02; ONECUT3; ENSG00000205922; TAA
VAHAQAGEL

SEQ ID NO: 55157 - protein, 9 aa, Homo sapiens
  Table A; Target 55157; HLA-C*16:02; ONECUT3; ENSG00000205922; TAA
VAHAQAGEL

SEQ ID NO: 55158 - protein, 9 aa, Homo sapiens
  Table A; Target 55158; HLA-B*51:01; ONECUT3; ENSG00000205922; TAA
VAPGRPGLV

SEQ ID NO: 55159 - protein, 9 aa, Homo sapiens
  Table A; Target 55159; HLA-A*23:01; ONECUT3; ENSG00000205922; TAA
VAQRITAEL

SEQ ID NO: 55160 - protein, 9 aa, Homo sapiens
  Table A; Target 55160; HLA-A*24:02; ONECUT3; ENSG00000205922; TAA
VAQRITAEL

SEQ ID NO: 55161 - protein, 9 aa, Homo sapiens
  Table A; Target 55161; HLA-B*07:02; ONECUT3; ENSG00000205922; TAA
VAQRITAEL

SEQ ID NO: 55162 - protein, 9 aa, Homo sapiens
  Table A; Target 55162; HLA-B*15:01; ONECUT3; ENSG00000205922; TAA
VAQRITAEL

SEQ ID NO: 55163 - protein, 9 aa, Homo sapiens
  Table A; Target 55163; HLA-B*35:03; ONECUT3; ENSG00000205922; TAA
VAQRITAEL

SEQ ID NO: 55164 - protein, 9 aa, Homo sapiens
  Table A; Target 55164; HLA-B*46:01; ONECUT3; ENSG00000205922; TAA
VAQRITAEL

SEQ ID NO: 55165 - protein, 9 aa, Homo sapiens
  Table A; Target 55165; HLA-B*58:01; ONECUT3; ENSG00000205922; TAA
VAQRITAEL

SEQ ID NO: 55166 - protein, 9 aa, Homo sapiens
  Table A; Target 55166; HLA-C*01:02; ONECUT3; ENSG00000205922; TAA
VAQRITAEL

SEQ ID NO: 55167 - protein, 9 aa, Homo sapiens
  Table A; Target 55167; HLA-C*02:02; ONECUT3; ENSG00000205922; TAA
VAQRITAEL

SEQ ID NO: 55168 - protein, 9 aa, Homo sapiens
  Table A; Target 55168; HLA-C*03:03; ONECUT3; ENSG00000205922; TAA
VAQRITAEL

SEQ ID NO: 55169 - protein, 9 aa, Homo sapiens
  Table A; Target 55169; HLA-C*03:04; ONECUT3; ENSG00000205922; TAA
VAQRITAEL

SEQ ID NO: 55170 - protein, 9 aa, Homo sapiens
  Table A; Target 55170; HLA-C*05:01; ONECUT3; ENSG00000205922; TAA
VAQRITAEL

SEQ ID NO: 55171 - protein, 9 aa, Homo sapiens
  Table A; Target 55171; HLA-C*12:03; ONECUT3; ENSG00000205922; TAA
VAQRITAEL

SEQ ID NO: 55172 - protein, 9 aa, Homo sapiens
  Table A; Target 55172; HLA-C*14:02; ONECUT3; ENSG00000205922; TAA
VAQRITAEL

SEQ ID NO: 55173 - protein, 9 aa, Homo sapiens
  Table A; Target 55173; HLA-C*16:01; ONECUT3; ENSG00000205922; TAA
VAQRITAEL

SEQ ID NO: 55174 - protein, 9 aa, Homo sapiens
  Table A; Target 55174; HLA-C*16:02; ONECUT3; ENSG00000205922; TAA
VAQRITAEL

SEQ ID NO: 55175 - protein, 9 aa, Homo sapiens
  Table A; Target 55175; HLA-C*16:04; ONECUT3; ENSG00000205922; TAA
VAQRITAEL

SEQ ID NO: 55176 - protein, 10 aa, Homo sapiens
  Table A; Target 55176; HLA-A*03:02; ONECUT3; ENSG00000205922; TAA
VAQRITAELK

SEQ ID NO: 55177 - protein, 9 aa, Homo sapiens
  Table A; Target 55177; HLA-A*31:01; ONECUT3; ENSG00000205922; TAA
VSNFFMNAR

SEQ ID NO: 55178 - protein, 9 aa, Homo sapiens
  Table A; Target 55178; HLA-A*33:01; ONECUT3; ENSG00000205922; TAA
VSNFFMNAR

SEQ ID NO: 55179 - protein, 9 aa, Homo sapiens
  Table A; Target 55179; HLA-B*58:01; ONECUT3; ENSG00000205922; TAA
VTISQQLGL

SEQ ID NO: 55180 - protein, 8 aa, Homo sapiens
  Table A; Target 55180; HLA-B*46:01; ONECUT3; ENSG00000205922; TAA
YGKELPAM

SEQ ID NO: 55181 - protein, 8 aa, Homo sapiens
  Table A; Target 55181; HLA-C*01:02; ONECUT3; ENSG00000205922; TAA
YGPYGKEL

SEQ ID NO: 55182 - protein, 8 aa, Homo sapiens
  Table A; Target 55182; HLA-C*03:03; ONECUT3; ENSG00000205922; TAA
YGPYGKEL

SEQ ID NO: 55183 - protein, 8 aa, Homo sapiens
  Table A; Target 55183; HLA-C*03:04; ONECUT3; ENSG00000205922; TAA
YGPYGKEL

SEQ ID NO: 55184 - protein, 9 aa, Homo sapiens
  Table A; Target 55184; HLA-B*54:01; ONECUT3; ENSG00000205922; TAA
YSIPQAIFA

SEQ ID NO: 55185 - protein, 11 aa, Homo sapiens
  Table A; Target 55185; HLA-A*31:01; ONECUT3; ENSG00000205922; TAA
YSIPQAIFAQR

SEQ ID NO: 55186 - protein, 9 aa, Homo sapiens
  Table A; Target 55186; HLA-A*01:01; ONECUT3; ENSG00000205922; TAA
YTTLTPLQH

SEQ ID NO: 55187 - protein, 9 aa, Homo sapiens
  Table A; Target 55187; HLA-C*16:01; OR2A4; ENSG00000180658; TAA
ACNTVPRML

SEQ ID NO: 55188 - protein, 9 aa, Homo sapiens
  Table A; Target 55188; HLA-B*37:01; OR2A4; ENSG00000180658; TAA
ADTHINENM

SEQ ID NO: 55189 - protein, 10 aa, Homo sapiens
  Table A; Target 55189; HLA-A*30:02; OR2A4; ENSG00000180658; TAA
AIIMYVGPRY

SEQ ID NO: 55190 - protein, 10 aa, Homo sapiens
  Table A; Target 55190; HLA-A*02:01; OR2A4; ENSG00000180658; TAA
AILQIQSREV

SEQ ID NO: 55191 - protein, 9 aa, Homo sapiens
  Table A; Target 55191; HLA-C*01:02; OR2A4; ENSG00000180658; TAA
AISGLVGPL

SEQ ID NO: 55192 - protein, 9 aa, Homo sapiens
  Table A; Target 55192; HLA-C*14:02; OR2A4; ENSG00000180658; TAA
AISGLVGPL

SEQ ID NO: 55193 - protein, 9 aa, Homo sapiens
  Table A; Target 55193; HLA-A*02:01; OR2A4; ENSG00000180658; TAA
AVTECLLLV

SEQ ID NO: 55194 - protein, 9 aa, Homo sapiens
  Table A; Target 55194; HLA-B*13:02; OR2A4; ENSG00000180658; TAA
AVTECLLLV

SEQ ID NO: 55195 - protein, 9 aa, Homo sapiens
  Table A; Target 55195; HLA-A*02:01; OR2A4; ENSG00000180658; TAA
AVTSWTTGV

SEQ ID NO: 55196 - protein, 9 aa, Homo sapiens
  Table A; Target 55196; HLA-A*02:03; OR2A4; ENSG00000180658; TAA
AVTSWTTGV

SEQ ID NO: 55197 - protein, 9 aa, Homo sapiens
  Table A; Target 55197; HLA-A*02:04; OR2A4; ENSG00000180658; TAA
AVTSWTTGV

SEQ ID NO: 55198 - protein, 9 aa, Homo sapiens
  Table A; Target 55198; HLA-B*13:02; OR2A4; ENSG00000180658; TAA
AVTSWTTGV

SEQ ID NO: 55199 - protein, 9 aa, Homo sapiens
  Table A; Target 55199; HLA-B*56:01; OR2A4; ENSG00000180658; TAA
AVVDIAYAC

SEQ ID NO: 55200 - protein, 9 aa, Homo sapiens
  Table A; Target 55200; HLA-A*68:01; OR2A4; ENSG00000180658; TAA
CAILQIQSR

SEQ ID NO: 55201 - protein, 9 aa, Homo sapiens
  Table A; Target 55201; HLA-C*07:06; OR2A4; ENSG00000180658; TAA
CAILQIQSR

SEQ ID NO: 55202 - protein, 9 aa, Homo sapiens
  Table A; Target 55202; HLA-A*30:01; OR2A4; ENSG00000180658; TAA
CEILAVLKL

SEQ ID NO: 55203 - protein, 9 aa, Homo sapiens
  Table A; Target 55203; HLA-B*40:01; OR2A4; ENSG00000180658; TAA
CEILAVLKL

SEQ ID NO: 55204 - protein, 9 aa, Homo sapiens
  Table A; Target 55204; HLA-B*40:02; OR2A4; ENSG00000180658; TAA
CEILAVLKL

SEQ ID NO: 55205 - protein, 9 aa, Homo sapiens
  Table A; Target 55205; HLA-B*44:02; OR2A4; ENSG00000180658; TAA
CEILAVLKL

SEQ ID NO: 55206 - protein, 9 aa, Homo sapiens
  Table A; Target 55206; HLA-B*44:03; OR2A4; ENSG00000180658; TAA
CEILAVLKL

SEQ ID NO: 55207 - protein, 9 aa, Homo sapiens
  Table A; Target 55207; HLA-B*49:01; OR2A4; ENSG00000180658; TAA
CEILAVLKL

SEQ ID NO: 55208 - protein, 9 aa, Homo sapiens
  Table A; Target 55208; HLA-A*25:01; OR2A4; ENSG00000180658; TAA
CITLAVTSW

SEQ ID NO: 55209 - protein, 9 aa, Homo sapiens
  Table A; Target 55209; HLA-A*32:01; OR2A4; ENSG00000180658; TAA
CITLAVTSW

SEQ ID NO: 55210 - protein, 9 aa, Homo sapiens
  Table A; Target 55210; HLA-A*29:02; OR2A4; ENSG00000180658; TAA
CLLLVVMSY

SEQ ID NO: 55211 - protein, 9 aa, Homo sapiens
  Table A; Target 55211; HLA-A*25:01; OR2A4; ENSG00000180658; TAA
DNITSIREF

SEQ ID NO: 55212 - protein, 9 aa, Homo sapiens
  Table A; Target 55212; HLA-A*26:01; OR2A4; ENSG00000180658; TAA
DNITSIREF

SEQ ID NO: 55213 - protein, 9 aa, Homo sapiens
  Table A; Target 55213; HLA-A*33:01; OR2A4; ENSG00000180658; TAA
DNITSIREF

SEQ ID NO: 55214 - protein, 8 aa, Homo sapiens
  Table A; Target 55214; HLA-B*08:01; OR2A4; ENSG00000180658; TAA
DSRLHAPM

SEQ ID NO: 55215 - protein, 8 aa, Homo sapiens
  Table A; Target 55215; HLA-A*33:03; OR2A4; ENSG00000180658; TAA
EVKNTLKR

SEQ ID NO: 55216 - protein, 9 aa, Homo sapiens
  Table A; Target 55216; HLA-B*38:01; OR2A4; ENSG00000180658; TAA
FHSLFNPML

SEQ ID NO: 55217 - protein, 8 aa, Homo sapiens
  Table A; Target 55217; HLA-A*02:04; OR2A4; ENSG00000180658; TAA
FLFSTFAV

SEQ ID NO: 55218 - protein, 9 aa, Homo sapiens
  Table A; Target 55218; HLA-B*07:02; OR2A4; ENSG00000180658; TAA
FPVGPRIQM

SEQ ID NO: 55219 - protein, 9 aa, Homo sapiens
  Table A; Target 55219; HLA-B*35:01; OR2A4; ENSG00000180658; TAA
FPVGPRIQM

SEQ ID NO: 55220 - protein, 9 aa, Homo sapiens
  Table A; Target 55220; HLA-B*35:03; OR2A4; ENSG00000180658; TAA
FPVGPRIQM

SEQ ID NO: 55221 - protein, 9 aa, Homo sapiens
  Table A; Target 55221; HLA-B*54:01; OR2A4; ENSG00000180658; TAA
FPVGPRIQM

SEQ ID NO: 55222 - protein, 9 aa, Homo sapiens
  Table A; Target 55222; HLA-B*55:01; OR2A4; ENSG00000180658; TAA
FPVGPRIQM

SEQ ID NO: 55223 - protein, 9 aa, Homo sapiens
  Table A; Target 55223; HLA-B*56:01; OR2A4; ENSG00000180658; TAA
FPVGPRIQM

SEQ ID NO: 55224 - protein, 9 aa, Homo sapiens
  Table A; Target 55224; HLA-C*07:02; OR2A4; ENSG00000180658; TAA
FPVGPRIQM

SEQ ID NO: 55225 - protein, 10 aa, Homo sapiens
  Table A; Target 55225; HLA-B*35:03; OR2A4; ENSG00000180658; TAA
FPVGPRIQML

SEQ ID NO: 55226 - protein, 10 aa, Homo sapiens
  Table A; Target 55226; HLA-C*07:02; OR2A4; ENSG00000180658; TAA
FPVGPRIQML

SEQ ID NO: 55227 - protein, 9 aa, Homo sapiens
  Table A; Target 55227; HLA-A*02:04; OR2A4; ENSG00000180658; TAA
FSLFYVFTL

SEQ ID NO: 55228 - protein, 10 aa, Homo sapiens
  Table A; Target 55228; HLA-B*44:02; OR2A4; ENSG00000180658; TAA
GDNITSIREF

SEQ ID NO: 55229 - protein, 8 aa, Homo sapiens
  Table A; Target 55229; HLA-A*02:04; OR2A4; ENSG00000180658; TAA
GLFSLFYV

SEQ ID NO: 55230 - protein, 9 aa, Homo sapiens
  Table A; Target 55230; HLA-A*29:02; OR2A4; ENSG00000180658; TAA
GLFSLFYVF

SEQ ID NO: 55231 - protein, 11 aa, Homo sapiens
  Table A; Target 55231; HLA-A*02:04; OR2A4; ENSG00000180658; TAA
GLFSLFYVFTL

SEQ ID NO: 55232 - protein, 9 aa, Homo sapiens
  Table A; Target 55232; HLA-A*02:04; OR2A4; ENSG00000180658; TAA
GLISLDSRL

SEQ ID NO: 55233 - protein, 9 aa, Homo sapiens
  Table A; Target 55233; HLA-A*02:01; OR2A4; ENSG00000180658; TAA
GLVGPLSTI

SEQ ID NO: 55234 - protein, 9 aa, Homo sapiens
  Table A; Target 55234; HLA-A*02:03; OR2A4; ENSG00000180658; TAA
GLVGPLSTI

SEQ ID NO: 55235 - protein, 9 aa, Homo sapiens
  Table A; Target 55235; HLA-B*13:02; OR2A4; ENSG00000180658; TAA
GLVGPLSTI

SEQ ID NO: 55236 - protein, 9 aa, Homo sapiens
  Table A; Target 55236; HLA-B*46:01; OR2A4; ENSG00000180658; TAA
GLVGPLSTI

SEQ ID NO: 55237 - protein, 9 aa, Homo sapiens
  Table A; Target 55237; HLA-B*55:01; OR2A4; ENSG00000180658; TAA
GLVGPLSTI

SEQ ID NO: 55238 - protein, 10 aa, Homo sapiens
  Table A; Target 55238; HLA-A*30:02; OR2A4; ENSG00000180658; TAA
GPLSTIVVSY

SEQ ID NO: 55239 - protein, 10 aa, Homo sapiens
  Table A; Target 55239; HLA-B*35:01; OR2A4; ENSG00000180658; TAA
GPLSTIVVSY

SEQ ID NO: 55240 - protein, 9 aa, Homo sapiens
  Table A; Target 55240; HLA-C*01:02; OR2A4; ENSG00000180658; TAA
GTILGLISL

SEQ ID NO: 55241 - protein, 8 aa, Homo sapiens
  Table A; Target 55241; HLA-B*08:01; OR2A4; ENSG00000180658; TAA
HINENMVL

SEQ ID NO: 55242 - protein, 8 aa, Homo sapiens
  Table A; Target 55242; HLA-C*03:04; OR2A4; ENSG00000180658; TAA
HINENMVL

SEQ ID NO: 55243 - protein, 9 aa, Homo sapiens
  Table A; Target 55243; HLA-B*54:01; OR2A4; ENSG00000180658; TAA
HINENMVLA

SEQ ID NO: 55244 - protein, 9 aa, Homo sapiens
  Table A; Target 55244; HLA-A*01:01; OR2A4; ENSG00000180658; TAA
HLAVVDIAY

SEQ ID NO: 55245 - protein, 9 aa, Homo sapiens
  Table A; Target 55245; HLA-A*25:01; OR2A4; ENSG00000180658; TAA
HLAVVDIAY

SEQ ID NO: 55246 - protein, 9 aa, Homo sapiens
  Table A; Target 55246; HLA-A*26:01; OR2A4; ENSG00000180658; TAA
HLAVVDIAY

SEQ ID NO: 55247 - protein, 9 aa, Homo sapiens
  Table A; Target 55247; HLA-A*29:02; OR2A4; ENSG00000180658; TAA
HLAVVDIAY

SEQ ID NO: 55248 - protein, 9 aa, Homo sapiens
  Table A; Target 55248; HLA-A*30:02; OR2A4; ENSG00000180658; TAA
HLAVVDIAY

SEQ ID NO: 55249 - protein, 9 aa, Homo sapiens
  Table A; Target 55249; HLA-A*32:01; OR2A4; ENSG00000180658; TAA
HLAVVDIAY

SEQ ID NO: 55250 - protein, 9 aa, Homo sapiens
  Table A; Target 55250; HLA-B*15:01; OR2A4; ENSG00000180658; TAA
HLAVVDIAY

SEQ ID NO: 55251 - protein, 9 aa, Homo sapiens
  Table A; Target 55251; HLA-B*15:03; OR2A4; ENSG00000180658; TAA
HLAVVDIAY

SEQ ID NO: 55252 - protein, 9 aa, Homo sapiens
  Table A; Target 55252; HLA-B*18:01; OR2A4; ENSG00000180658; TAA
HLAVVDIAY

SEQ ID NO: 55253 - protein, 9 aa, Homo sapiens
  Table A; Target 55253; HLA-B*35:01; OR2A4; ENSG00000180658; TAA
HLAVVDIAY

SEQ ID NO: 55254 - protein, 9 aa, Homo sapiens
  Table A; Target 55254; HLA-B*46:01; OR2A4; ENSG00000180658; TAA
HLAVVDIAY

SEQ ID NO: 55255 - protein, 9 aa, Homo sapiens
  Table A; Target 55255; HLA-B*55:01; OR2A4; ENSG00000180658; TAA
HLAVVDIAY

SEQ ID NO: 55256 - protein, 9 aa, Homo sapiens
  Table A; Target 55256; HLA-C*02:02; OR2A4; ENSG00000180658; TAA
HLAVVDIAY

SEQ ID NO: 55257 - protein, 9 aa, Homo sapiens
  Table A; Target 55257; HLA-C*03:03; OR2A4; ENSG00000180658; TAA
HLAVVDIAY

SEQ ID NO: 55258 - protein, 9 aa, Homo sapiens
  Table A; Target 55258; HLA-C*07:04; OR2A4; ENSG00000180658; TAA
HLAVVDIAY

SEQ ID NO: 55259 - protein, 9 aa, Homo sapiens
  Table A; Target 55259; HLA-C*16:01; OR2A4; ENSG00000180658; TAA
HLAVVDIAY

SEQ ID NO: 55260 - protein, 10 aa, Homo sapiens
  Table A; Target 55260; HLA-A*02:03; OR2A4; ENSG00000180658; TAA
HLAVVDIAYA

SEQ ID NO: 55261 - protein, 9 aa, Homo sapiens
  Table A; Target 55261; HLA-A*01:01; OR2A4; ENSG00000180658; TAA
HLCVIGLVY

SEQ ID NO: 55262 - protein, 9 aa, Homo sapiens
  Table A; Target 55262; HLA-A*29:02; OR2A4; ENSG00000180658; TAA
HLCVIGLVY

SEQ ID NO: 55263 - protein, 8 aa, Homo sapiens
  Table A; Target 55263; HLA-B*07:02; OR2A4; ENSG00000180658; TAA
HPAKPISF

SEQ ID NO: 55264 - protein, 8 aa, Homo sapiens
  Table A; Target 55264; HLA-B*08:01; OR2A4; ENSG00000180658; TAA
HPAKPISF

SEQ ID NO: 55265 - protein, 8 aa, Homo sapiens
  Table A; Target 55265; HLA-B*35:01; OR2A4; ENSG00000180658; TAA
HPAKPISF

SEQ ID NO: 55266 - protein, 8 aa, Homo sapiens
  Table A; Target 55266; HLA-C*07:02; OR2A4; ENSG00000180658; TAA
HPAKPISF

SEQ ID NO: 55267 - protein, 9 aa, Homo sapiens
  Table A; Target 55267; HLA-B*54:01; OR2A4; ENSG00000180658; TAA
HPAKPISFA

SEQ ID NO: 55268 - protein, 9 aa, Homo sapiens
  Table A; Target 55268; HLA-B*55:01; OR2A4; ENSG00000180658; TAA
HPAKPISFA

SEQ ID NO: 55269 - protein, 9 aa, Homo sapiens
  Table A; Target 55269; HLA-B*56:01; OR2A4; ENSG00000180658; TAA
HPAKPISFA

SEQ ID NO: 55270 - protein, 8 aa, Homo sapiens
  Table A; Target 55270; HLA-B*51:01; OR2A4; ENSG00000180658; TAA
IAYACNTV

SEQ ID NO: 55271 - protein, 9 aa, Homo sapiens
  Table A; Target 55271; HLA-A*29:02; OR2A4; ENSG00000180658; TAA
IIMYVGPRY

SEQ ID NO: 55272 - protein, 9 aa, Homo sapiens
  Table A; Target 55272; HLA-A*02:01; OR2A4; ENSG00000180658; TAA
ILQIQSREV

SEQ ID NO: 55273 - protein, 9 aa, Homo sapiens
  Table A; Target 55273; HLA-A*02:03; OR2A4; ENSG00000180658; TAA
ILQIQSREV

SEQ ID NO: 55274 - protein, 9 aa, Homo sapiens
  Table A; Target 55274; HLA-C*16:02; OR2A4; ENSG00000180658; TAA
ILQIQSREV

SEQ ID NO: 55275 - protein, 11 aa, Homo sapiens
  Table A; Target 55275; HLA-A*31:01; OR2A4; ENSG00000180658; TAA
ILQIQSREVQR

SEQ ID NO: 55276 - protein, 8 aa, Homo sapiens
  Table A; Target 55276; HLA-B*15:03; OR2A4; ENSG00000180658; TAA
IMYVGPRY

SEQ ID NO: 55277 - protein, 8 aa, Homo sapiens
  Table A; Target 55277; HLA-B*46:01; OR2A4; ENSG00000180658; TAA
IMYVGPRY

SEQ ID NO: 55278 - protein, 8 aa, Homo sapiens
  Table A; Target 55278; HLA-C*16:01; OR2A4; ENSG00000180658; TAA
IMYVGPRY

SEQ ID NO: 55279 - protein, 9 aa, Homo sapiens
  Table A; Target 55279; HLA-B*27:05; OR2A4; ENSG00000180658; TAA
IQSREVQRK

SEQ ID NO: 55280 - protein, 8 aa, Homo sapiens
  Table A; Target 55280; HLA-A*25:01; OR2A4; ENSG00000180658; TAA
ITLAVTSW

SEQ ID NO: 55281 - protein, 8 aa, Homo sapiens
  Table A; Target 55281; HLA-A*32:01; OR2A4; ENSG00000180658; TAA
ITLAVTSW

SEQ ID NO: 55282 - protein, 8 aa, Homo sapiens
  Table A; Target 55282; HLA-B*57:01; OR2A4; ENSG00000180658; TAA
ITLAVTSW

SEQ ID NO: 55283 - protein, 8 aa, Homo sapiens
  Table A; Target 55283; HLA-B*58:01; OR2A4; ENSG00000180658; TAA
ITLAVTSW

SEQ ID NO: 55284 - protein, 8 aa, Homo sapiens
  Table A; Target 55284; HLA-B*08:01; OR2A4; ENSG00000180658; TAA
KNTLKRVL

SEQ ID NO: 55285 - protein, 10 aa, Homo sapiens
  Table A; Target 55285; HLA-C*06:02; OR2A4; ENSG00000180658; TAA
KRVLGVERAL

SEQ ID NO: 55286 - protein, 10 aa, Homo sapiens
  Table A; Target 55286; HLA-C*07:02; OR2A4; ENSG00000180658; TAA
KRVLGVERAL

SEQ ID NO: 55287 - protein, 9 aa, Homo sapiens
  Table A; Target 55287; HLA-A*24:02; OR2A4; ENSG00000180658; TAA
KYLLLFHSL

SEQ ID NO: 55288 - protein, 8 aa, Homo sapiens
  Table A; Target 55288; HLA-B*15:01; OR2A4; ENSG00000180658; TAA
LAVVDIAY

SEQ ID NO: 55289 - protein, 8 aa, Homo sapiens
  Table A; Target 55289; HLA-B*35:01; OR2A4; ENSG00000180658; TAA
LAVVDIAY

SEQ ID NO: 55290 - protein, 8 aa, Homo sapiens
  Table A; Target 55290; HLA-B*39:01; OR2A4; ENSG00000180658; TAA
LAVVDIAY

SEQ ID NO: 55291 - protein, 8 aa, Homo sapiens
  Table A; Target 55291; HLA-B*46:01; OR2A4; ENSG00000180658; TAA
LAVVDIAY

SEQ ID NO: 55292 - protein, 8 aa, Homo sapiens
  Table A; Target 55292; HLA-B*55:01; OR2A4; ENSG00000180658; TAA
LAVVDIAY

SEQ ID NO: 55293 - protein, 8 aa, Homo sapiens
  Table A; Target 55293; HLA-C*03:03; OR2A4; ENSG00000180658; TAA
LAVVDIAY

SEQ ID NO: 55294 - protein, 8 aa, Homo sapiens
  Table A; Target 55294; HLA-C*07:04; OR2A4; ENSG00000180658; TAA
LAVVDIAY

SEQ ID NO: 55295 - protein, 9 aa, Homo sapiens
  Table A; Target 55295; HLA-C*02:02; OR2A4; ENSG00000180658; TAA
LAVVDIAYA

SEQ ID NO: 55296 - protein, 9 aa, Homo sapiens
  Table A; Target 55296; HLA-A*29:02; OR2A4; ENSG00000180658; TAA
LFGLFSLFY

SEQ ID NO: 55297 - protein, 9 aa, Homo sapiens
  Table A; Target 55297; HLA-B*51:01; OR2A4; ENSG00000180658; TAA
LGFPVGPRI

SEQ ID NO: 55298 - protein, 9 aa, Homo sapiens
  Table A; Target 55298; HLA-A*24:02; OR2A4; ENSG00000180658; TAA
LHPAKPISF

SEQ ID NO: 55299 - protein, 8 aa, Homo sapiens
  Table A; Target 55299; HLA-A*02:04; OR2A4; ENSG00000180658; TAA
LLFGLFSL

SEQ ID NO: 55300 - protein, 10 aa, Homo sapiens
  Table A; Target 55300; HLA-A*29:02; OR2A4; ENSG00000180658; TAA
LLFGLFSLFY

SEQ ID NO: 55301 - protein, 10 aa, Homo sapiens
  Table A; Target 55301; HLA-A*24:02; OR2A4; ENSG00000180658; TAA
LLHPAKPISF

SEQ ID NO: 55302 - protein, 10 aa, Homo sapiens
  Table A; Target 55302; HLA-B*08:01; OR2A4; ENSG00000180658; TAA
LLHPAKPISF

SEQ ID NO: 55303 - protein, 10 aa, Homo sapiens
  Table A; Target 55303; HLA-B*46:01; OR2A4; ENSG00000180658; TAA
LLHPAKPISF

SEQ ID NO: 55304 - protein, 9 aa, Homo sapiens
  Table A; Target 55304; HLA-A*02:01; OR2A4; ENSG00000180658; TAA
LLLGFPVGP

SEQ ID NO: 55305 - protein, 11 aa, Homo sapiens
  Table A; Target 55305; HLA-A*02:04; OR2A4; ENSG00000180658; TAA
LLLGFPVGPRI

SEQ ID NO: 55306 - protein, 9 aa, Homo sapiens
  Table A; Target 55306; HLA-B*51:01; OR2A4; ENSG00000180658; TAA
LPFCRPQKI

SEQ ID NO: 55307 - protein, 11 aa, Homo sapiens
  Table A; Target 55307; HLA-A*01:01; OR2A4; ENSG00000180658; TAA
LSHLAVVDIAY

SEQ ID NO: 55308 - protein, 9 aa, Homo sapiens
  Table A; Target 55308; HLA-A*29:02; OR2A4; ENSG00000180658; TAA
LVLLLPLPF

SEQ ID NO: 55309 - protein, 8 aa, Homo sapiens
  Table A; Target 55309; HLA-C*05:01; OR2A4; ENSG00000180658; TAA
MGDNITSI

SEQ ID NO: 55310 - protein, 9 aa, Homo sapiens
  Table A; Target 55310; HLA-A*02:04; OR2A4; ENSG00000180658; TAA
MLLFGLFSL

SEQ ID NO: 55311 - protein, 9 aa, Homo sapiens
  Table A; Target 55311; HLA-A*02:01; OR2A4; ENSG00000180658; TAA
MLNPLICSL

SEQ ID NO: 55312 - protein, 9 aa, Homo sapiens
  Table A; Target 55312; HLA-A*02:03; OR2A4; ENSG00000180658; TAA
MLNPLICSL

SEQ ID NO: 55313 - protein, 9 aa, Homo sapiens
  Table A; Target 55313; HLA-A*02:04; OR2A4; ENSG00000180658; TAA
MLNPLICSL

SEQ ID NO: 55314 - protein, 9 aa, Homo sapiens
  Table A; Target 55314; HLA-A*32:01; OR2A4; ENSG00000180658; TAA
MLNPLICSL

SEQ ID NO: 55315 - protein, 9 aa, Homo sapiens
  Table A; Target 55315; HLA-B*08:01; OR2A4; ENSG00000180658; TAA
MLNPLICSL

SEQ ID NO: 55316 - protein, 9 aa, Homo sapiens
  Table A; Target 55316; HLA-A*68:02; OR2A4; ENSG00000180658; TAA
MSYDLYVAI

SEQ ID NO: 55317 - protein, 10 aa, Homo sapiens
  Table A; Target 55317; HLA-A*25:01; OR2A4; ENSG00000180658; TAA
MVLAGAISGL

SEQ ID NO: 55318 - protein, 10 aa, Homo sapiens
  Table A; Target 55318; HLA-A*26:01; OR2A4; ENSG00000180658; TAA
MVLAGAISGL

SEQ ID NO: 55319 - protein, 10 aa, Homo sapiens
  Table A; Target 55319; HLA-B*18:01; OR2A4; ENSG00000180658; TAA
NENMVLAGAI

SEQ ID NO: 55320 - protein, 8 aa, Homo sapiens
  Table A; Target 55320; HLA-C*16:01; OR2A4; ENSG00000180658; TAA
NITSIREF

SEQ ID NO: 55321 - protein, 9 aa, Homo sapiens
  Table A; Target 55321; HLA-A*68:02; OR2A4; ENSG00000180658; TAA
NITSIREFL

SEQ ID NO: 55322 - protein, 8 aa, Homo sapiens
  Table A; Target 55322; HLA-B*51:01; OR2A4; ENSG00000180658; TAA
NPMLNPLI

SEQ ID NO: 55323 - protein, 9 aa, Homo sapiens
  Table A; Target 55323; HLA-B*54:01; OR2A4; ENSG00000180658; TAA
NPMLNPLIC

SEQ ID NO: 55324 - protein, 9 aa, Homo sapiens
  Table A; Target 55324; HLA-B*56:01; OR2A4; ENSG00000180658; TAA
NPMLNPLIC

SEQ ID NO: 55325 - protein, 10 aa, Homo sapiens
  Table A; Target 55325; HLA-B*56:01; OR2A4; ENSG00000180658; TAA
NPMLNPLICS

SEQ ID NO: 55326 - protein, 8 aa, Homo sapiens
  Table A; Target 55326; HLA-B*08:01; OR2A4; ENSG00000180658; TAA
NSEVKNTL

SEQ ID NO: 55327 - protein, 8 aa, Homo sapiens
  Table A; Target 55327; HLA-C*01:02; OR2A4; ENSG00000180658; TAA
NSEVKNTL

SEQ ID NO: 55328 - protein, 8 aa, Homo sapiens
  Table A; Target 55328; HLA-C*05:01; OR2A4; ENSG00000180658; TAA
NSEVKNTL

SEQ ID NO: 55329 - protein, 8 aa, Homo sapiens
  Table A; Target 55329; HLA-C*16:01; OR2A4; ENSG00000180658; TAA
NSEVKNTL

SEQ ID NO: 55330 - protein, 9 aa, Homo sapiens
  Table A; Target 55330; HLA-A*01:01; OR2A4; ENSG00000180658; TAA
NSEVKNTLK

SEQ ID NO: 55331 - protein, 9 aa, Homo sapiens
  Table A; Target 55331; HLA-B*08:01; OR2A4; ENSG00000180658; TAA
NTLKRVLGV

SEQ ID NO: 55332 - protein, 11 aa, Homo sapiens
  Table A; Target 55332; HLA-A*33:01; OR2A4; ENSG00000180658; TAA
NTLKRVLGVER

SEQ ID NO: 55333 - protein, 10 aa, Homo sapiens
  Table A; Target 55333; HLA-A*31:01; OR2A4; ENSG00000180658; TAA
PAKPISFAGR

SEQ ID NO: 55334 - protein, 9 aa, Homo sapiens
  Table A; Target 55334; HLA-A*29:02; OR2A4; ENSG00000180658; TAA
PLSTIVVSY

SEQ ID NO: 55335 - protein, 9 aa, Homo sapiens
  Table A; Target 55335; HLA-A*30:02; OR2A4; ENSG00000180658; TAA
PLSTIVVSY

SEQ ID NO: 55336 - protein, 9 aa, Homo sapiens
  Table A; Target 55336; HLA-B*15:01; OR2A4; ENSG00000180658; TAA
PLSTIVVSY

SEQ ID NO: 55337 - protein, 9 aa, Homo sapiens
  Table A; Target 55337; HLA-A*31:01; OR2A4; ENSG00000180658; TAA
QIQSREVQR

SEQ ID NO: 55338 - protein, 9 aa, Homo sapiens
  Table A; Target 55338; HLA-A*33:03; OR2A4; ENSG00000180658; TAA
QIQSREVQR

SEQ ID NO: 55339 - protein, 9 aa, Homo sapiens
  Table A; Target 55339; HLA-A*32:01; OR2A4; ENSG00000180658; TAA
RNSEVKNTL

SEQ ID NO: 55340 - protein, 9 aa, Homo sapiens
  Table A; Target 55340; HLA-C*16:01; OR2A4; ENSG00000180658; TAA
RNSEVKNTL

SEQ ID NO: 55341 - protein, 9 aa, Homo sapiens
  Table A; Target 55341; HLA-B*57:01; OR2A4; ENSG00000180658; TAA
RVLGVERAL

SEQ ID NO: 55342 - protein, 9 aa, Homo sapiens
  Table A; Target 55342; HLA-A*31:01; OR2A4; ENSG00000180658; TAA
RYLAIMTWR

SEQ ID NO: 55343 - protein, 10 aa, Homo sapiens
  Table A; Target 55343; HLA-A*30:02; OR2A4; ENSG00000180658; TAA
SHLAVVDIAY

SEQ ID NO: 55344 - protein, 11 aa, Homo sapiens
  Table A; Target 55344; HLA-A*01:01; OR2A4; ENSG00000180658; TAA
SLDSRLHAPMY

SEQ ID NO: 55345 - protein, 8 aa, Homo sapiens
  Table A; Target 55345; HLA-A*02:04; OR2A4; ENSG00000180658; TAA
SLFYVFTL

SEQ ID NO: 55346 - protein, 9 aa, Homo sapiens
  Table A; Target 55346; HLA-A*02:01; OR2A4; ENSG00000180658; TAA
SLFYVFTLL

SEQ ID NO: 55347 - protein, 9 aa, Homo sapiens
  Table A; Target 55347; HLA-A*02:03; OR2A4; ENSG00000180658; TAA
SLFYVFTLL

SEQ ID NO: 55348 - protein, 9 aa, Homo sapiens
  Table A; Target 55348; HLA-A*02:04; OR2A4; ENSG00000180658; TAA
SLFYVFTLL

SEQ ID NO: 55349 - protein, 9 aa, Homo sapiens
  Table A; Target 55349; HLA-A*02:07; OR2A4; ENSG00000180658; TAA
SLFYVFTLL

SEQ ID NO: 55350 - protein, 9 aa, Homo sapiens
  Table A; Target 55350; HLA-A*68:02; OR2A4; ENSG00000180658; TAA
SLFYVFTLL

SEQ ID NO: 55351 - protein, 9 aa, Homo sapiens
  Table A; Target 55351; HLA-A*02:04; OR2A4; ENSG00000180658; TAA
SLIHLVLLL

SEQ ID NO: 55352 - protein, 11 aa, Homo sapiens
  Table A; Target 55352; HLA-C*07:02; OR2A4; ENSG00000180658; TAA
SLRNSEVKNTL

SEQ ID NO: 55353 - protein, 9 aa, Homo sapiens
  Table A; Target 55353; HLA-A*68:02; OR2A4; ENSG00000180658; TAA
STFAVTECL

SEQ ID NO: 55354 - protein, 9 aa, Homo sapiens
  Table A; Target 55354; HLA-B*40:01; OR2A4; ENSG00000180658; TAA
STFAVTECL

SEQ ID NO: 55355 - protein, 9 aa, Homo sapiens
  Table A; Target 55355; HLA-C*06:02; OR2A4; ENSG00000180658; TAA
TAIIMYVGP

SEQ ID NO: 55356 - protein, 9 aa, Homo sapiens
  Table A; Target 55356; HLA-B*18:01; OR2A4; ENSG00000180658; TAA
TECLLLVVM

SEQ ID NO: 55357 - protein, 8 aa, Homo sapiens
  Table A; Target 55357; HLA-B*51:01; OR2A4; ENSG00000180658; TAA
TGVLLSLI

SEQ ID NO: 55358 - protein, 9 aa, Homo sapiens
  Table A; Target 55358; HLA-B*27:05; OR2A4; ENSG00000180658; TAA
THINENMVL

SEQ ID NO: 55359 - protein, 9 aa, Homo sapiens
  Table A; Target 55359; HLA-B*35:03; OR2A4; ENSG00000180658; TAA
THINENMVL

SEQ ID NO: 55360 - protein, 9 aa, Homo sapiens
  Table A; Target 55360; HLA-B*38:01; OR2A4; ENSG00000180658; TAA
THINENMVL

SEQ ID NO: 55361 - protein, 9 aa, Homo sapiens
  Table A; Target 55361; HLA-B*39:01; OR2A4; ENSG00000180658; TAA
THINENMVL

SEQ ID NO: 55362 - protein, 10 aa, Homo sapiens
  Table A; Target 55362; HLA-A*31:01; OR2A4; ENSG00000180658; TAA
TLKRVLGVER

SEQ ID NO: 55363 - protein, 11 aa, Homo sapiens
  Table A; Target 55363; HLA-A*02:04; OR2A4; ENSG00000180658; TAA
TLLGNGTILGL

SEQ ID NO: 55364 - protein, 9 aa, Homo sapiens
  Table A; Target 55364; HLA-A*02:07; OR2A4; ENSG00000180658; TAA
TVPRMLVNL

SEQ ID NO: 55365 - protein, 9 aa, Homo sapiens
  Table A; Target 55365; HLA-A*29:02; OR2A4; ENSG00000180658; TAA
VAICHPLRY

SEQ ID NO: 55366 - protein, 10 aa, Homo sapiens
  Table A; Target 55366; HLA-A*25:01; OR2A4; ENSG00000180658; TAA
VCITLAVTSW

SEQ ID NO: 55367 - protein, 9 aa, Homo sapiens
  Table A; Target 55367; HLA-C*01:02; OR2A4; ENSG00000180658; TAA
VGPLSTIVV

SEQ ID NO: 55368 - protein, 9 aa, Homo sapiens
  Table A; Target 55368; HLA-C*01:02; OR2A4; ENSG00000180658; TAA
VGPRYGNPK

SEQ ID NO: 55369 - protein, 9 aa, Homo sapiens
  Table A; Target 55369; HLA-A*02:01; OR2A4; ENSG00000180658; TAA
VLAGAISGL

SEQ ID NO: 55370 - protein, 9 aa, Homo sapiens
  Table A; Target 55370; HLA-A*02:03; OR2A4; ENSG00000180658; TAA
VLAGAISGL

SEQ ID NO: 55371 - protein, 9 aa, Homo sapiens
  Table A; Target 55371; HLA-A*02:04; OR2A4; ENSG00000180658; TAA
VLAGAISGL

SEQ ID NO: 55372 - protein, 9 aa, Homo sapiens
  Table A; Target 55372; HLA-B*15:01; OR2A4; ENSG00000180658; TAA
VLAGAISGL

SEQ ID NO: 55373 - protein, 9 aa, Homo sapiens
  Table A; Target 55373; HLA-B*46:01; OR2A4; ENSG00000180658; TAA
VLAGAISGL

SEQ ID NO: 55374 - protein, 9 aa, Homo sapiens
  Table A; Target 55374; HLA-C*01:02; OR2A4; ENSG00000180658; TAA
VLAGAISGL

SEQ ID NO: 55375 - protein, 8 aa, Homo sapiens
  Table A; Target 55375; HLA-C*01:02; OR2A4; ENSG00000180658; TAA
VLGVERAL

SEQ ID NO: 55376 - protein, 8 aa, Homo sapiens
  Table A; Target 55376; HLA-C*16:01; OR2A4; ENSG00000180658; TAA
VLGVERAL

SEQ ID NO: 55377 - protein, 8 aa, Homo sapiens
  Table A; Target 55377; HLA-A*02:04; OR2A4; ENSG00000180658; TAA
VLLSLIHL

SEQ ID NO: 55378 - protein, 9 aa, Homo sapiens
  Table A; Target 55378; HLA-A*02:01; OR2A4; ENSG00000180658; TAA
VLLSLIHLV

SEQ ID NO: 55379 - protein, 9 aa, Homo sapiens
  Table A; Target 55379; HLA-A*02:03; OR2A4; ENSG00000180658; TAA
VLLSLIHLV

SEQ ID NO: 55380 - protein, 9 aa, Homo sapiens
  Table A; Target 55380; HLA-A*02:04; OR2A4; ENSG00000180658; TAA
VLLSLIHLV

SEQ ID NO: 55381 - protein, 9 aa, Homo sapiens
  Table A; Target 55381; HLA-A*02:07; OR2A4; ENSG00000180658; TAA
VLLSLIHLV

SEQ ID NO: 55382 - protein, 11 aa, Homo sapiens
  Table A; Target 55382; HLA-A*02:04; OR2A4; ENSG00000180658; TAA
VLLSLIHLVLL

SEQ ID NO: 55383 - protein, 9 aa, Homo sapiens
  Table A; Target 55383; HLA-B*07:02; OR2A4; ENSG00000180658; TAA
VPRMLVNLL

SEQ ID NO: 55384 - protein, 9 aa, Homo sapiens
  Table A; Target 55384; HLA-A*02:01; OR2A4; ENSG00000180658; TAA
VVMSYDLYV

SEQ ID NO: 55385 - protein, 9 aa, Homo sapiens
  Table A; Target 55385; HLA-A*02:04; OR2A4; ENSG00000180658; TAA
VVMSYDLYV

SEQ ID NO: 55386 - protein, 9 aa, Homo sapiens
  Table A; Target 55386; HLA-A*02:07; OR2A4; ENSG00000180658; TAA
VVMSYDLYV

SEQ ID NO: 55387 - protein, 9 aa, Homo sapiens
  Table A; Target 55387; HLA-B*13:02; OR2A4; ENSG00000180658; TAA
VVMSYDLYV

SEQ ID NO: 55388 - protein, 8 aa, Homo sapiens
  Table A; Target 55388; HLA-A*23:01; OR2A4; ENSG00000180658; TAA
VYGTAIIM

SEQ ID NO: 55389 - protein, 8 aa, Homo sapiens
  Table A; Target 55389; HLA-C*14:02; OR2A4; ENSG00000180658; TAA
VYGTAIIM

SEQ ID NO: 55390 - protein, 9 aa, Homo sapiens
  Table A; Target 55390; HLA-A*23:01; OR2A4; ENSG00000180658; TAA
VYGTAIIMY

SEQ ID NO: 55391 - protein, 9 aa, Homo sapiens
  Table A; Target 55391; HLA-A*24:02; OR2A4; ENSG00000180658; TAA
VYGTAIIMY

SEQ ID NO: 55392 - protein, 9 aa, Homo sapiens
  Table A; Target 55392; HLA-A*29:02; OR2A4; ENSG00000180658; TAA
VYGTAIIMY

SEQ ID NO: 55393 - protein, 9 aa, Homo sapiens
  Table A; Target 55393; HLA-C*14:02; OR2A4; ENSG00000180658; TAA
VYGTAIIMY

SEQ ID NO: 55394 - protein, 9 aa, Homo sapiens
  Table A; Target 55394; HLA-C*12:03; OR2A4; ENSG00000180658; TAA
YACNTVPRM

SEQ ID NO: 55395 - protein, 9 aa, Homo sapiens
  Table A; Target 55395; HLA-A*68:02; OR2A4; ENSG00000180658; TAA
YGTAIIMYV

SEQ ID NO: 55396 - protein, 9 aa, Homo sapiens
  Table A; Target 55396; HLA-C*02:02; OR2A4; ENSG00000180658; TAA
YGTAIIMYV

SEQ ID NO: 55397 - protein, 9 aa, Homo sapiens
  Table A; Target 55397; HLA-A*02:04; OR2A4; ENSG00000180658; TAA
YLAIMTWRV

SEQ ID NO: 55398 - protein, 8 aa, Homo sapiens
  Table A; Target 55398; HLA-A*02:04; OR2A4; ENSG00000180658; TAA
YLLLFHSL

SEQ ID NO: 55399 - protein, 10 aa, Homo sapiens
  Table A; Target 55399; HLA-A*01:01; OR2A4; ENSG00000180658; TAA
YVAICHPLRY

SEQ ID NO: 55400 - protein, 9 aa, Homo sapiens
  Table A; Target 55400; HLA-B*56:01; OR51E1; ENSG00000180785; TAA
AALMAPLPV

SEQ ID NO: 55401 - protein, 8 aa, Homo sapiens
  Table A; Target 55401; HLA-C*16:01; OR51E1; ENSG00000180785; TAA
AAVVRGAA

SEQ ID NO: 55402 - protein, 9 aa, Homo sapiens
  Table A; Target 55402; HLA-A*30:01; OR51E1; ENSG00000180785; TAA
AAVVRGAAL

SEQ ID NO: 55403 - protein, 9 aa, Homo sapiens
  Table A; Target 55403; HLA-A*32:01; OR51E1; ENSG00000180785; TAA
AAVVRGAAL

SEQ ID NO: 55404 - protein, 9 aa, Homo sapiens
  Table A; Target 55404; HLA-B*07:02; OR51E1; ENSG00000180785; TAA
AAVVRGAAL

SEQ ID NO: 55405 - protein, 9 aa, Homo sapiens
  Table A; Target 55405; HLA-B*08:01; OR51E1; ENSG00000180785; TAA
AAVVRGAAL

SEQ ID NO: 55406 - protein, 9 aa, Homo sapiens
  Table A; Target 55406; HLA-B*15:01; OR51E1; ENSG00000180785; TAA
AAVVRGAAL

SEQ ID NO: 55407 - protein, 9 aa, Homo sapiens
  Table A; Target 55407; HLA-B*15:03; OR51E1; ENSG00000180785; TAA
AAVVRGAAL

SEQ ID NO: 55408 - protein, 9 aa, Homo sapiens
  Table A; Target 55408; HLA-B*35:03; OR51E1; ENSG00000180785; TAA
AAVVRGAAL

SEQ ID NO: 55409 - protein, 9 aa, Homo sapiens
  Table A; Target 55409; HLA-B*37:01; OR51E1; ENSG00000180785; TAA
AAVVRGAAL

SEQ ID NO: 55410 - protein, 9 aa, Homo sapiens
  Table A; Target 55410; HLA-B*39:01; OR51E1; ENSG00000180785; TAA
AAVVRGAAL

SEQ ID NO: 55411 - protein, 9 aa, Homo sapiens
  Table A; Target 55411; HLA-B*40:01; OR51E1; ENSG00000180785; TAA
AAVVRGAAL

SEQ ID NO: 55412 - protein, 9 aa, Homo sapiens
  Table A; Target 55412; HLA-B*40:02; OR51E1; ENSG00000180785; TAA
AAVVRGAAL

SEQ ID NO: 55413 - protein, 9 aa, Homo sapiens
  Table A; Target 55413; HLA-B*46:01; OR51E1; ENSG00000180785; TAA
AAVVRGAAL

SEQ ID NO: 55414 - protein, 9 aa, Homo sapiens
  Table A; Target 55414; HLA-B*58:01; OR51E1; ENSG00000180785; TAA
AAVVRGAAL

SEQ ID NO: 55415 - protein, 9 aa, Homo sapiens
  Table A; Target 55415; HLA-C*01:02; OR51E1; ENSG00000180785; TAA
AAVVRGAAL

SEQ ID NO: 55416 - protein, 9 aa, Homo sapiens
  Table A; Target 55416; HLA-C*02:02; OR51E1; ENSG00000180785; TAA
AAVVRGAAL

SEQ ID NO: 55417 - protein, 9 aa, Homo sapiens
  Table A; Target 55417; HLA-C*03:03; OR51E1; ENSG00000180785; TAA
AAVVRGAAL

SEQ ID NO: 55418 - protein, 9 aa, Homo sapiens
  Table A; Target 55418; HLA-C*03:04; OR51E1; ENSG00000180785; TAA
AAVVRGAAL

SEQ ID NO: 55419 - protein, 9 aa, Homo sapiens
  Table A; Target 55419; HLA-C*05:01; OR51E1; ENSG00000180785; TAA
AAVVRGAAL

SEQ ID NO: 55420 - protein, 9 aa, Homo sapiens
  Table A; Target 55420; HLA-C*07:02; OR51E1; ENSG00000180785; TAA
AAVVRGAAL

SEQ ID NO: 55421 - protein, 9 aa, Homo sapiens
  Table A; Target 55421; HLA-C*12:03; OR51E1; ENSG00000180785; TAA
AAVVRGAAL

SEQ ID NO: 55422 - protein, 9 aa, Homo sapiens
  Table A; Target 55422; HLA-C*14:02; OR51E1; ENSG00000180785; TAA
AAVVRGAAL

SEQ ID NO: 55423 - protein, 9 aa, Homo sapiens
  Table A; Target 55423; HLA-C*16:01; OR51E1; ENSG00000180785; TAA
AAVVRGAAL

SEQ ID NO: 55424 - protein, 9 aa, Homo sapiens
  Table A; Target 55424; HLA-C*16:02; OR51E1; ENSG00000180785; TAA
AAVVRGAAL

SEQ ID NO: 55425 - protein, 9 aa, Homo sapiens
  Table A; Target 55425; HLA-C*16:04; OR51E1; ENSG00000180785; TAA
AAVVRGAAL

SEQ ID NO: 55426 - protein, 9 aa, Homo sapiens
  Table A; Target 55426; HLA-A*02:01; OR51E1; ENSG00000180785; TAA
ACDDIRVNV

SEQ ID NO: 55427 - protein, 9 aa, Homo sapiens
  Table A; Target 55427; HLA-A*02:07; OR51E1; ENSG00000180785; TAA
ACDDIRVNV

SEQ ID NO: 55428 - protein, 9 aa, Homo sapiens
  Table A; Target 55428; HLA-B*38:01; OR51E1; ENSG00000180785; TAA
ACDDIRVNV

SEQ ID NO: 55429 - protein, 9 aa, Homo sapiens
  Table A; Target 55429; HLA-B*39:01; OR51E1; ENSG00000180785; TAA
ACDDIRVNV

SEQ ID NO: 55430 - protein, 9 aa, Homo sapiens
  Table A; Target 55430; HLA-B*55:01; OR51E1; ENSG00000180785; TAA
ACDDIRVNV

SEQ ID NO: 55431 - protein, 9 aa, Homo sapiens
  Table A; Target 55431; HLA-C*04:01; OR51E1; ENSG00000180785; TAA
ACDDIRVNV

SEQ ID NO: 55432 - protein, 9 aa, Homo sapiens
  Table A; Target 55432; HLA-C*05:01; OR51E1; ENSG00000180785; TAA
ACDDIRVNV

SEQ ID NO: 55433 - protein, 8 aa, Homo sapiens
  Table A; Target 55433; HLA-C*04:01; OR51E1; ENSG00000180785; TAA
AFDRYVAI

SEQ ID NO: 55434 - protein, 10 aa, Homo sapiens
  Table A; Target 55434; HLA-A*02:03; OR51E1; ENSG00000180785; TAA
AIFWFNSTTI

SEQ ID NO: 55435 - protein, 9 aa, Homo sapiens
  Table A; Target 55435; HLA-A*02:01; OR51E1; ENSG00000180785; TAA
ALMAPLPVF

SEQ ID NO: 55436 - protein, 9 aa, Homo sapiens
  Table A; Target 55436; HLA-A*02:03; OR51E1; ENSG00000180785; TAA
ALMAPLPVF

SEQ ID NO: 55437 - protein, 9 aa, Homo sapiens
  Table A; Target 55437; HLA-A*02:04; OR51E1; ENSG00000180785; TAA
ALMAPLPVF

SEQ ID NO: 55438 - protein, 9 aa, Homo sapiens
  Table A; Target 55438; HLA-A*02:07; OR51E1; ENSG00000180785; TAA
ALMAPLPVF

SEQ ID NO: 55439 - protein, 9 aa, Homo sapiens
  Table A; Target 55439; HLA-A*03:01; OR51E1; ENSG00000180785; TAA
ALMAPLPVF

SEQ ID NO: 55440 - protein, 9 aa, Homo sapiens
  Table A; Target 55440; HLA-A*03:02; OR51E1; ENSG00000180785; TAA
ALMAPLPVF

SEQ ID NO: 55441 - protein, 9 aa, Homo sapiens
  Table A; Target 55441; HLA-A*23:01; OR51E1; ENSG00000180785; TAA
ALMAPLPVF

SEQ ID NO: 55442 - protein, 9 aa, Homo sapiens
  Table A; Target 55442; HLA-A*24:02; OR51E1; ENSG00000180785; TAA
ALMAPLPVF

SEQ ID NO: 55443 - protein, 9 aa, Homo sapiens
  Table A; Target 55443; HLA-A*25:01; OR51E1; ENSG00000180785; TAA
ALMAPLPVF

SEQ ID NO: 55444 - protein, 9 aa, Homo sapiens
  Table A; Target 55444; HLA-A*26:01; OR51E1; ENSG00000180785; TAA
ALMAPLPVF

SEQ ID NO: 55445 - protein, 9 aa, Homo sapiens
  Table A; Target 55445; HLA-A*29:02; OR51E1; ENSG00000180785; TAA
ALMAPLPVF

SEQ ID NO: 55446 - protein, 9 aa, Homo sapiens
  Table A; Target 55446; HLA-A*30:02; OR51E1; ENSG00000180785; TAA
ALMAPLPVF

SEQ ID NO: 55447 - protein, 9 aa, Homo sapiens
  Table A; Target 55447; HLA-A*32:01; OR51E1; ENSG00000180785; TAA
ALMAPLPVF

SEQ ID NO: 55448 - protein, 9 aa, Homo sapiens
  Table A; Target 55448; HLA-B*07:02; OR51E1; ENSG00000180785; TAA
ALMAPLPVF

SEQ ID NO: 55449 - protein, 9 aa, Homo sapiens
  Table A; Target 55449; HLA-B*13:02; OR51E1; ENSG00000180785; TAA
ALMAPLPVF

SEQ ID NO: 55450 - protein, 9 aa, Homo sapiens
  Table A; Target 55450; HLA-B*15:01; OR51E1; ENSG00000180785; TAA
ALMAPLPVF

SEQ ID NO: 55451 - protein, 9 aa, Homo sapiens
  Table A; Target 55451; HLA-B*15:03; OR51E1; ENSG00000180785; TAA
ALMAPLPVF

SEQ ID NO: 55452 - protein, 9 aa, Homo sapiens
  Table A; Target 55452; HLA-B*37:01; OR51E1; ENSG00000180785; TAA
ALMAPLPVF

SEQ ID NO: 55453 - protein, 9 aa, Homo sapiens
  Table A; Target 55453; HLA-B*40:02; OR51E1; ENSG00000180785; TAA
ALMAPLPVF

SEQ ID NO: 55454 - protein, 9 aa, Homo sapiens
  Table A; Target 55454; HLA-B*44:02; OR51E1; ENSG00000180785; TAA
ALMAPLPVF

SEQ ID NO: 55455 - protein, 9 aa, Homo sapiens
  Table A; Target 55455; HLA-B*46:01; OR51E1; ENSG00000180785; TAA
ALMAPLPVF

SEQ ID NO: 55456 - protein, 9 aa, Homo sapiens
  Table A; Target 55456; HLA-B*55:01; OR51E1; ENSG00000180785; TAA
ALMAPLPVF

SEQ ID NO: 55457 - protein, 9 aa, Homo sapiens
  Table A; Target 55457; HLA-B*56:01; OR51E1; ENSG00000180785; TAA
ALMAPLPVF

SEQ ID NO: 55458 - protein, 9 aa, Homo sapiens
  Table A; Target 55458; HLA-B*57:01; OR51E1; ENSG00000180785; TAA
ALMAPLPVF

SEQ ID NO: 55459 - protein, 9 aa, Homo sapiens
  Table A; Target 55459; HLA-B*58:01; OR51E1; ENSG00000180785; TAA
ALMAPLPVF

SEQ ID NO: 55460 - protein, 9 aa, Homo sapiens
  Table A; Target 55460; HLA-C*02:02; OR51E1; ENSG00000180785; TAA
ALMAPLPVF

SEQ ID NO: 55461 - protein, 9 aa, Homo sapiens
  Table A; Target 55461; HLA-C*03:03; OR51E1; ENSG00000180785; TAA
ALMAPLPVF

SEQ ID NO: 55462 - protein, 9 aa, Homo sapiens
  Table A; Target 55462; HLA-C*03:04; OR51E1; ENSG00000180785; TAA
ALMAPLPVF

SEQ ID NO: 55463 - protein, 9 aa, Homo sapiens
  Table A; Target 55463; HLA-C*07:04; OR51E1; ENSG00000180785; TAA
ALMAPLPVF

SEQ ID NO: 55464 - protein, 9 aa, Homo sapiens
  Table A; Target 55464; HLA-C*14:02; OR51E1; ENSG00000180785; TAA
ALMAPLPVF

SEQ ID NO: 55465 - protein, 9 aa, Homo sapiens
  Table A; Target 55465; HLA-C*16:01; OR51E1; ENSG00000180785; TAA
ALMAPLPVF

SEQ ID NO: 55466 - protein, 10 aa, Homo sapiens
  Table A; Target 55466; HLA-A*02:01; OR51E1; ENSG00000180785; TAA
ALMAPLPVFI

SEQ ID NO: 55467 - protein, 10 aa, Homo sapiens
  Table A; Target 55467; HLA-A*02:03; OR51E1; ENSG00000180785; TAA
ALMAPLPVFI

SEQ ID NO: 55468 - protein, 10 aa, Homo sapiens
  Table A; Target 55468; HLA-A*02:04; OR51E1; ENSG00000180785; TAA
ALMAPLPVFI

SEQ ID NO: 55469 - protein, 10 aa, Homo sapiens
  Table A; Target 55469; HLA-A*02:07; OR51E1; ENSG00000180785; TAA
ALMAPLPVFI

SEQ ID NO: 55470 - protein, 10 aa, Homo sapiens
  Table A; Target 55470; HLA-B*13:02; OR51E1; ENSG00000180785; TAA
ALMAPLPVFI

SEQ ID NO: 55471 - protein, 11 aa, Homo sapiens
  Table A; Target 55471; HLA-A*03:01; OR51E1; ENSG00000180785; TAA
ALMAPLPVFIK

SEQ ID NO: 55472 - protein, 11 aa, Homo sapiens
  Table A; Target 55472; HLA-A*03:02; OR51E1; ENSG00000180785; TAA
ALMAPLPVFIK

SEQ ID NO: 55473 - protein, 11 aa, Homo sapiens
  Table A; Target 55473; HLA-A*11:01; OR51E1; ENSG00000180785; TAA
ALMAPLPVFIK

SEQ ID NO: 55474 - protein, 9 aa, Homo sapiens
  Table A; Target 55474; HLA-A*31:01; OR51E1; ENSG00000180785; TAA
APLPVFIKQ

SEQ ID NO: 55475 - protein, 9 aa, Homo sapiens
  Table A; Target 55475; HLA-B*54:01; OR51E1; ENSG00000180785; TAA
APLPVFIKQ

SEQ ID NO: 55476 - protein, 10 aa, Homo sapiens
  Table A; Target 55476; HLA-B*07:02; OR51E1; ENSG00000180785; TAA
APLPVFIKQL

SEQ ID NO: 55477 - protein, 10 aa, Homo sapiens
  Table A; Target 55477; HLA-C*07:02; OR51E1; ENSG00000180785; TAA
APLPVFIKQL

SEQ ID NO: 55478 - protein, 8 aa, Homo sapiens
  Table A; Target 55478; HLA-B*13:02; OR51E1; ENSG00000180785; TAA
AQAKAFGT

SEQ ID NO: 55479 - protein, 10 aa, Homo sapiens
  Table A; Target 55479; HLA-A*30:01; OR51E1; ENSG00000180785; TAA
AQAKAFGTCV

SEQ ID NO: 55480 - protein, 10 aa, Homo sapiens
  Table A; Target 55480; HLA-B*13:02; OR51E1; ENSG00000180785; TAA
AQAKAFGTCV

SEQ ID NO: 55481 - protein, 10 aa, Homo sapiens
  Table A; Target 55481; HLA-B*40:02; OR51E1; ENSG00000180785; TAA
AQAKAFGTCV

SEQ ID NO: 55482 - protein, 10 aa, Homo sapiens
  Table A; Target 55482; HLA-C*06:02; OR51E1; ENSG00000180785; TAA
AQAKAFGTCV

SEQ ID NO: 55483 - protein, 9 aa, Homo sapiens
  Table A; Target 55483; HLA-A*02:04; OR51E1; ENSG00000180785; TAA
ATVLTLPRV

SEQ ID NO: 55484 - protein, 10 aa, Homo sapiens
  Table A; Target 55484; HLA-C*06:02; OR51E1; ENSG00000180785; TAA
ATVLTLPRVT

SEQ ID NO: 55485 - protein, 11 aa, Homo sapiens
  Table A; Target 55485; HLA-A*03:02; OR51E1; ENSG00000180785; TAA
ATVLTLPRVTK

SEQ ID NO: 55486 - protein, 11 aa, Homo sapiens
  Table A; Target 55486; HLA-A*11:01; OR51E1; ENSG00000180785; TAA
ATVLTLPRVTK

SEQ ID NO: 55487 - protein, 9 aa, Homo sapiens
  Table A; Target 55487; HLA-A*02:04; OR51E1; ENSG00000180785; TAA
ATYFILIGL

SEQ ID NO: 55488 - protein, 9 aa, Homo sapiens
  Table A; Target 55488; HLA-A*03:01; OR51E1; ENSG00000180785; TAA
ATYFILIGL

SEQ ID NO: 55489 - protein, 9 aa, Homo sapiens
  Table A; Target 55489; HLA-A*68:02; OR51E1; ENSG00000180785; TAA
ATYFILIGL

SEQ ID NO: 55490 - protein, 9 aa, Homo sapiens
  Table A; Target 55490; HLA-A*23:01; OR51E1; ENSG00000180785; TAA
AVLGNLTII

SEQ ID NO: 55491 - protein, 10 aa, Homo sapiens
  Table A; Target 55491; HLA-A*29:02; OR51E1; ENSG00000180785; TAA
AVLGNLTIIY

SEQ ID NO: 55492 - protein, 10 aa, Homo sapiens
  Table A; Target 55492; HLA-A*30:02; OR51E1; ENSG00000180785; TAA
AVLGNLTIIY

SEQ ID NO: 55493 - protein, 11 aa, Homo sapiens
  Table A; Target 55493; HLA-A*02:04; OR51E1; ENSG00000180785; TAA
AVLGNLTIIYI

SEQ ID NO: 55494 - protein, 8 aa, Homo sapiens
  Table A; Target 55494; HLA-B*07:02; OR51E1; ENSG00000180785; TAA
AVVRGAAL

SEQ ID NO: 55495 - protein, 8 aa, Homo sapiens
  Table A; Target 55495; HLA-B*08:01; OR51E1; ENSG00000180785; TAA
AVVRGAAL

SEQ ID NO: 55496 - protein, 8 aa, Homo sapiens
  Table A; Target 55496; HLA-B*46:01; OR51E1; ENSG00000180785; TAA
AVVRGAAL

SEQ ID NO: 55497 - protein, 8 aa, Homo sapiens
  Table A; Target 55497; HLA-C*01:02; OR51E1; ENSG00000180785; TAA
AVVRGAAL

SEQ ID NO: 55498 - protein, 8 aa, Homo sapiens
  Table A; Target 55498; HLA-C*03:03; OR51E1; ENSG00000180785; TAA
AVVRGAAL

SEQ ID NO: 55499 - protein, 8 aa, Homo sapiens
  Table A; Target 55499; HLA-C*03:04; OR51E1; ENSG00000180785; TAA
AVVRGAAL

SEQ ID NO: 55500 - protein, 8 aa, Homo sapiens
  Table A; Target 55500; HLA-C*07:02; OR51E1; ENSG00000180785; TAA
AVVRGAAL

SEQ ID NO: 55501 - protein, 8 aa, Homo sapiens
  Table A; Target 55501; HLA-C*14:02; OR51E1; ENSG00000180785; TAA
AVVRGAAL

SEQ ID NO: 55502 - protein, 9 aa, Homo sapiens
  Table A; Target 55502; HLA-A*26:01; OR51E1; ENSG00000180785; TAA
AVVRGAALM

SEQ ID NO: 55503 - protein, 9 aa, Homo sapiens
  Table A; Target 55503; HLA-B*58:01; OR51E1; ENSG00000180785; TAA
AVVRGAALM

SEQ ID NO: 55504 - protein, 8 aa, Homo sapiens
  Table A; Target 55504; HLA-B*37:01; OR51E1; ENSG00000180785; TAA
CDDIRVNV

SEQ ID NO: 55505 - protein, 9 aa, Homo sapiens
  Table A; Target 55505; HLA-B*37:01; OR51E1; ENSG00000180785; TAA
CDDIRVNVV

SEQ ID NO: 55506 - protein, 9 aa, Homo sapiens
  Table A; Target 55506; HLA-B*49:01; OR51E1; ENSG00000180785; TAA
CDDIRVNVV

SEQ ID NO: 55507 - protein, 10 aa, Homo sapiens
  Table A; Target 55507; HLA-C*04:01; OR51E1; ENSG00000180785; TAA
CDDIRVNVVY

SEQ ID NO: 55508 - protein, 10 aa, Homo sapiens
  Table A; Target 55508; HLA-C*07:01; OR51E1; ENSG00000180785; TAA
CDDIRVNVVY

SEQ ID NO: 55509 - protein, 9 aa, Homo sapiens
  Table A; Target 55509; HLA-A*02:03; OR51E1; ENSG00000180785; TAA
CLHQDVMKL

SEQ ID NO: 55510 - protein, 8 aa, Homo sapiens
  Table A; Target 55510; HLA-B*51:01; OR51E1; ENSG00000180785; TAA
DACLLQMF

SEQ ID NO: 55511 - protein, 8 aa, Homo sapiens
  Table A; Target 55511; HLA-C*07:01; OR51E1; ENSG00000180785; TAA
DACLLQMF

SEQ ID NO: 55512 - protein, 8 aa, Homo sapiens
  Table A; Target 55512; HLA-B*08:01; OR51E1; ENSG00000180785; TAA
DDIRVNVV

SEQ ID NO: 55513 - protein, 8 aa, Homo sapiens
  Table A; Target 55513; HLA-B*18:01; OR51E1; ENSG00000180785; TAA
DDIRVNVV

SEQ ID NO: 55514 - protein, 8 aa, Homo sapiens
  Table A; Target 55514; HLA-B*37:01; OR51E1; ENSG00000180785; TAA
DDIRVNVV

SEQ ID NO: 55515 - protein, 8 aa, Homo sapiens
  Table A; Target 55515; HLA-B*40:02; OR51E1; ENSG00000180785; TAA
DDIRVNVV

SEQ ID NO: 55516 - protein, 8 aa, Homo sapiens
  Table A; Target 55516; HLA-B*51:01; OR51E1; ENSG00000180785; TAA
DDIRVNVV

SEQ ID NO: 55517 - protein, 8 aa, Homo sapiens
  Table A; Target 55517; HLA-C*12:03; OR51E1; ENSG00000180785; TAA
DDIRVNVV

SEQ ID NO: 55518 - protein, 9 aa, Homo sapiens
  Table A; Target 55518; HLA-A*25:01; OR51E1; ENSG00000180785; TAA
DDIRVNVVY

SEQ ID NO: 55519 - protein, 9 aa, Homo sapiens
  Table A; Target 55519; HLA-A*26:01; OR51E1; ENSG00000180785; TAA
DDIRVNVVY

SEQ ID NO: 55520 - protein, 9 aa, Homo sapiens
  Table A; Target 55520; HLA-A*33:01; OR51E1; ENSG00000180785; TAA
DDIRVNVVY

SEQ ID NO: 55521 - protein, 9 aa, Homo sapiens
  Table A; Target 55521; HLA-B*15:03; OR51E1; ENSG00000180785; TAA
DDIRVNVVY

SEQ ID NO: 55522 - protein, 9 aa, Homo sapiens
  Table A; Target 55522; HLA-B*18:01; OR51E1; ENSG00000180785; TAA
DDIRVNVVY

SEQ ID NO: 55523 - protein, 9 aa, Homo sapiens
  Table A; Target 55523; HLA-B*35:01; OR51E1; ENSG00000180785; TAA
DDIRVNVVY

SEQ ID NO: 55524 - protein, 9 aa, Homo sapiens
  Table A; Target 55524; HLA-B*44:02; OR51E1; ENSG00000180785; TAA
DDIRVNVVY

SEQ ID NO: 55525 - protein, 9 aa, Homo sapiens
  Table A; Target 55525; HLA-B*44:03; OR51E1; ENSG00000180785; TAA
DDIRVNVVY

SEQ ID NO: 55526 - protein, 9 aa, Homo sapiens
  Table A; Target 55526; HLA-C*04:01; OR51E1; ENSG00000180785; TAA
DDIRVNVVY

SEQ ID NO: 55527 - protein, 9 aa, Homo sapiens
  Table A; Target 55527; HLA-C*07:01; OR51E1; ENSG00000180785; TAA
DDIRVNVVY

SEQ ID NO: 55528 - protein, 9 aa, Homo sapiens
  Table A; Target 55528; HLA-C*12:03; OR51E1; ENSG00000180785; TAA
DDIRVNVVY

SEQ ID NO: 55529 - protein, 9 aa, Homo sapiens
  Table A; Target 55529; HLA-C*16:04; OR51E1; ENSG00000180785; TAA
DDIRVNVVY

SEQ ID NO: 55530 - protein, 10 aa, Homo sapiens
  Table A; Target 55530; HLA-A*33:01; OR51E1; ENSG00000180785; TAA
DDIRVNVVYG

SEQ ID NO: 55531 - protein, 9 aa, Homo sapiens
  Table A; Target 55531; HLA-A*25:01; OR51E1; ENSG00000180785; TAA
DILISTSSM

SEQ ID NO: 55532 - protein, 9 aa, Homo sapiens
  Table A; Target 55532; HLA-A*26:01; OR51E1; ENSG00000180785; TAA
DILISTSSM

SEQ ID NO: 55533 - protein, 9 aa, Homo sapiens
  Table A; Target 55533; HLA-A*33:01; OR51E1; ENSG00000180785; TAA
DILISTSSM

SEQ ID NO: 55534 - protein, 9 aa, Homo sapiens
  Table A; Target 55534; HLA-B*08:01; OR51E1; ENSG00000180785; TAA
DILISTSSM

SEQ ID NO: 55535 - protein, 9 aa, Homo sapiens
  Table A; Target 55535; HLA-B*18:01; OR51E1; ENSG00000180785; TAA
DILISTSSM

SEQ ID NO: 55536 - protein, 9 aa, Homo sapiens
  Table A; Target 55536; HLA-B*35:01; OR51E1; ENSG00000180785; TAA
DILISTSSM

SEQ ID NO: 55537 - protein, 9 aa, Homo sapiens
  Table A; Target 55537; HLA-B*51:01; OR51E1; ENSG00000180785; TAA
DILISTSSM

SEQ ID NO: 55538 - protein, 9 aa, Homo sapiens
  Table A; Target 55538; HLA-C*01:02; OR51E1; ENSG00000180785; TAA
DILISTSSM

SEQ ID NO: 55539 - protein, 9 aa, Homo sapiens
  Table A; Target 55539; HLA-C*14:02; OR51E1; ENSG00000180785; TAA
DILISTSSM

SEQ ID NO: 55540 - protein, 11 aa, Homo sapiens
  Table A; Target 55540; HLA-A*03:01; OR51E1; ENSG00000180785; TAA
DILISTSSMPK

SEQ ID NO: 55541 - protein, 11 aa, Homo sapiens
  Table A; Target 55541; HLA-A*11:01; OR51E1; ENSG00000180785; TAA
DILISTSSMPK

SEQ ID NO: 55542 - protein, 11 aa, Homo sapiens
  Table A; Target 55542; HLA-A*33:01; OR51E1; ENSG00000180785; TAA
DILISTSSMPK

SEQ ID NO: 55543 - protein, 11 aa, Homo sapiens
  Table A; Target 55543; HLA-A*68:01; OR51E1; ENSG00000180785; TAA
DILISTSSMPK

SEQ ID NO: 55544 - protein, 11 aa, Homo sapiens
  Table A; Target 55544; HLA-B*27:02; OR51E1; ENSG00000180785; TAA
DILISTSSMPK

SEQ ID NO: 55545 - protein, 8 aa, Homo sapiens
  Table A; Target 55545; HLA-A*33:01; OR51E1; ENSG00000180785; TAA
DIRVNVVY

SEQ ID NO: 55546 - protein, 8 aa, Homo sapiens
  Table A; Target 55546; HLA-B*08:01; OR51E1; ENSG00000180785; TAA
DIRVNVVY

SEQ ID NO: 55547 - protein, 8 aa, Homo sapiens
  Table A; Target 55547; HLA-B*15:03; OR51E1; ENSG00000180785; TAA
DIRVNVVY

SEQ ID NO: 55548 - protein, 8 aa, Homo sapiens
  Table A; Target 55548; HLA-B*18:01; OR51E1; ENSG00000180785; TAA
DIRVNVVY

SEQ ID NO: 55549 - protein, 8 aa, Homo sapiens
  Table A; Target 55549; HLA-C*07:01; OR51E1; ENSG00000180785; TAA
DIRVNVVY

SEQ ID NO: 55550 - protein, 9 aa, Homo sapiens
  Table A; Target 55550; HLA-A*33:01; OR51E1; ENSG00000180785; TAA
DIRVNVVYG

SEQ ID NO: 55551 - protein, 11 aa, Homo sapiens
  Table A; Target 55551; HLA-B*35:01; OR51E1; ENSG00000180785; TAA
DPNGNESSATY

SEQ ID NO: 55552 - protein, 9 aa, Homo sapiens
  Table A; Target 55552; HLA-A*01:01; OR51E1; ENSG00000180785; TAA
DSLLISFSY

SEQ ID NO: 55553 - protein, 9 aa, Homo sapiens
  Table A; Target 55553; HLA-A*26:01; OR51E1; ENSG00000180785; TAA
DSLLISFSY

SEQ ID NO: 55554 - protein, 9 aa, Homo sapiens
  Table A; Target 55554; HLA-A*29:02; OR51E1; ENSG00000180785; TAA
DSLLISFSY

SEQ ID NO: 55555 - protein, 9 aa, Homo sapiens
  Table A; Target 55555; HLA-A*33:01; OR51E1; ENSG00000180785; TAA
DSLLISFSY

SEQ ID NO: 55556 - protein, 9 aa, Homo sapiens
  Table A; Target 55556; HLA-A*33:03; OR51E1; ENSG00000180785; TAA
DSLLISFSY

SEQ ID NO: 55557 - protein, 9 aa, Homo sapiens
  Table A; Target 55557; HLA-B*18:01; OR51E1; ENSG00000180785; TAA
DSLLISFSY

SEQ ID NO: 55558 - protein, 9 aa, Homo sapiens
  Table A; Target 55558; HLA-B*35:01; OR51E1; ENSG00000180785; TAA
DSLLISFSY

SEQ ID NO: 55559 - protein, 8 aa, Homo sapiens
  Table A; Target 55559; HLA-B*51:01; OR51E1; ENSG00000180785; TAA
DSPLPVIL

SEQ ID NO: 55560 - protein, 11 aa, Homo sapiens
  Table A; Target 55560; HLA-A*68:02; OR51E1; ENSG00000180785; TAA
DSPLPVILANI

SEQ ID NO: 55561 - protein, 9 aa, Homo sapiens
  Table A; Target 55561; HLA-B*18:01; OR51E1; ENSG00000180785; TAA
EEAQFWLAF

SEQ ID NO: 55562 - protein, 9 aa, Homo sapiens
  Table A; Target 55562; HLA-B*44:02; OR51E1; ENSG00000180785; TAA
EEAQFWLAF

SEQ ID NO: 55563 - protein, 9 aa, Homo sapiens
  Table A; Target 55563; HLA-B*44:03; OR51E1; ENSG00000180785; TAA
EEAQFWLAF

SEQ ID NO: 55564 - protein, 9 aa, Homo sapiens
  Table A; Target 55564; HLA-B*38:01; OR51E1; ENSG00000180785; TAA
EHSLHEPMY

SEQ ID NO: 55565 - protein, 9 aa, Homo sapiens
  Table A; Target 55565; HLA-B*39:01; OR51E1; ENSG00000180785; TAA
EHSLHEPMY

SEQ ID NO: 55566 - protein, 10 aa, Homo sapiens
  Table A; Target 55566; HLA-B*38:01; OR51E1; ENSG00000180785; TAA
EHSLHEPMYI

SEQ ID NO: 55567 - protein, 10 aa, Homo sapiens
  Table A; Target 55567; HLA-A*68:02; OR51E1; ENSG00000180785; TAA
ESSATYFILI

SEQ ID NO: 55568 - protein, 10 aa, Homo sapiens
  Table A; Target 55568; HLA-A*25:01; OR51E1; ENSG00000180785; TAA
ESTVLLAMAF

SEQ ID NO: 55569 - protein, 9 aa, Homo sapiens
  Table A; Target 55569; HLA-A*26:01; OR51E1; ENSG00000180785; TAA
FAIHSLSGM

SEQ ID NO: 55570 - protein, 9 aa, Homo sapiens
  Table A; Target 55570; HLA-B*35:01; OR51E1; ENSG00000180785; TAA
FAIHSLSGM

SEQ ID NO: 55571 - protein, 9 aa, Homo sapiens
  Table A; Target 55571; HLA-B*35:03; OR51E1; ENSG00000180785; TAA
FAIHSLSGM

SEQ ID NO: 55572 - protein, 9 aa, Homo sapiens
  Table A; Target 55572; HLA-B*46:01; OR51E1; ENSG00000180785; TAA
FAIHSLSGM

SEQ ID NO: 55573 - protein, 9 aa, Homo sapiens
  Table A; Target 55573; HLA-C*01:02; OR51E1; ENSG00000180785; TAA
FAIHSLSGM

SEQ ID NO: 55574 - protein, 9 aa, Homo sapiens
  Table A; Target 55574; HLA-C*02:02; OR51E1; ENSG00000180785; TAA
FAIHSLSGM

SEQ ID NO: 55575 - protein, 9 aa, Homo sapiens
  Table A; Target 55575; HLA-C*03:03; OR51E1; ENSG00000180785; TAA
FAIHSLSGM

SEQ ID NO: 55576 - protein, 9 aa, Homo sapiens
  Table A; Target 55576; HLA-C*03:04; OR51E1; ENSG00000180785; TAA
FAIHSLSGM

SEQ ID NO: 55577 - protein, 10 aa, Homo sapiens
  Table A; Target 55577; HLA-B*07:02; OR51E1; ENSG00000180785; TAA
FHVATHASEP

SEQ ID NO: 55578 - protein, 10 aa, Homo sapiens
  Table A; Target 55578; HLA-C*06:02; OR51E1; ENSG00000180785; TAA
FHVATHASEP

SEQ ID NO: 55579 - protein, 10 aa, Homo sapiens
  Table A; Target 55579; HLA-C*07:01; OR51E1; ENSG00000180785; TAA
FHVATHASEP

SEQ ID NO: 55580 - protein, 10 aa, Homo sapiens
  Table A; Target 55580; HLA-C*07:04; OR51E1; ENSG00000180785; TAA
FHVATHASEP

SEQ ID NO: 55581 - protein, 10 aa, Homo sapiens
  Table A; Target 55581; HLA-A*02:07; OR51E1; ENSG00000180785; TAA
FIFYVPFIGL

SEQ ID NO: 55582 - protein, 10 aa, Homo sapiens
  Table A; Target 55582; HLA-A*68:02; OR51E1; ENSG00000180785; TAA
FIFYVPFIGL

SEQ ID NO: 55583 - protein, 9 aa, Homo sapiens
  Table A; Target 55583; HLA-A*02:01; OR51E1; ENSG00000180785; TAA
FILIGLPGL

SEQ ID NO: 55584 - protein, 9 aa, Homo sapiens
  Table A; Target 55584; HLA-A*02:04; OR51E1; ENSG00000180785; TAA
FILIGLPGL

SEQ ID NO: 55585 - protein, 9 aa, Homo sapiens
  Table A; Target 55585; HLA-A*02:07; OR51E1; ENSG00000180785; TAA
FILIGLPGL

SEQ ID NO: 55586 - protein, 8 aa, Homo sapiens
  Table A; Target 55586; HLA-B*37:01; OR51E1; ENSG00000180785; TAA
FNSTTIQF

SEQ ID NO: 55587 - protein, 10 aa, Homo sapiens
  Table A; Target 55587; HLA-B*54:01; OR51E1; ENSG00000180785; TAA
FPLCSLYLIA

SEQ ID NO: 55588 - protein, 8 aa, Homo sapiens
  Table A; Target 55588; HLA-A*23:01; OR51E1; ENSG00000180785; TAA
FWFNSTTI

SEQ ID NO: 55589 - protein, 10 aa, Homo sapiens
  Table A; Target 55589; HLA-A*23:01; OR51E1; ENSG00000180785; TAA
FWFNSTTIQF

SEQ ID NO: 55590 - protein, 10 aa, Homo sapiens
  Table A; Target 55590; HLA-A*24:02; OR51E1; ENSG00000180785; TAA
FWFNSTTIQF

SEQ ID NO: 55591 - protein, 10 aa, Homo sapiens
  Table A; Target 55591; HLA-A*23:01; OR51E1; ENSG00000180785; TAA
FYVPFIGLSM

SEQ ID NO: 55592 - protein, 10 aa, Homo sapiens
  Table A; Target 55592; HLA-A*24:02; OR51E1; ENSG00000180785; TAA
FYVPFIGLSM

SEQ ID NO: 55593 - protein, 10 aa, Homo sapiens
  Table A; Target 55593; HLA-A*29:02; OR51E1; ENSG00000180785; TAA
FYVPFIGLSM

SEQ ID NO: 55594 - protein, 11 aa, Homo sapiens
  Table A; Target 55594; HLA-C*04:01; OR51E1; ENSG00000180785; TAA
GIDILISTSSM

SEQ ID NO: 55595 - protein, 9 aa, Homo sapiens
  Table A; Target 55595; HLA-A*01:01; OR51E1; ENSG00000180785; TAA
GLDSLLISF

SEQ ID NO: 55596 - protein, 9 aa, Homo sapiens
  Table A; Target 55596; HLA-A*02:01; OR51E1; ENSG00000180785; TAA
GLDSLLISF

SEQ ID NO: 55597 - protein, 9 aa, Homo sapiens
  Table A; Target 55597; HLA-A*02:04; OR51E1; ENSG00000180785; TAA
GLDSLLISF

SEQ ID NO: 55598 - protein, 9 aa, Homo sapiens
  Table A; Target 55598; HLA-A*02:07; OR51E1; ENSG00000180785; TAA
GLDSLLISF

SEQ ID NO: 55599 - protein, 9 aa, Homo sapiens
  Table A; Target 55599; HLA-A*03:01; OR51E1; ENSG00000180785; TAA
GLDSLLISF

SEQ ID NO: 55600 - protein, 9 aa, Homo sapiens
  Table A; Target 55600; HLA-A*29:02; OR51E1; ENSG00000180785; TAA
GLDSLLISF

SEQ ID NO: 55601 - protein, 9 aa, Homo sapiens
  Table A; Target 55601; HLA-B*55:01; OR51E1; ENSG00000180785; TAA
GLDSLLISF

SEQ ID NO: 55602 - protein, 9 aa, Homo sapiens
  Table A; Target 55602; HLA-C*05:01; OR51E1; ENSG00000180785; TAA
GLDSLLISF

SEQ ID NO: 55603 - protein, 11 aa, Homo sapiens
  Table A; Target 55603; HLA-A*01:01; OR51E1; ENSG00000180785; TAA
GLDSLLISFSY

SEQ ID NO: 55604 - protein, 11 aa, Homo sapiens
  Table A; Target 55604; HLA-A*29:02; OR51E1; ENSG00000180785; TAA
GLDSLLISFSY

SEQ ID NO: 55605 - protein, 9 aa, Homo sapiens
  Table A; Target 55605; HLA-A*02:01; OR51E1; ENSG00000180785; TAA
GLIVIISAI

SEQ ID NO: 55606 - protein, 9 aa, Homo sapiens
  Table A; Target 55606; HLA-A*02:03; OR51E1; ENSG00000180785; TAA
GLIVIISAI

SEQ ID NO: 55607 - protein, 9 aa, Homo sapiens
  Table A; Target 55607; HLA-A*02:04; OR51E1; ENSG00000180785; TAA
GLIVIISAI

SEQ ID NO: 55608 - protein, 9 aa, Homo sapiens
  Table A; Target 55608; HLA-A*02:07; OR51E1; ENSG00000180785; TAA
GLIVIISAI

SEQ ID NO: 55609 - protein, 9 aa, Homo sapiens
  Table A; Target 55609; HLA-A*30:01; OR51E1; ENSG00000180785; TAA
GLIVIISAI

SEQ ID NO: 55610 - protein, 9 aa, Homo sapiens
  Table A; Target 55610; HLA-B*13:02; OR51E1; ENSG00000180785; TAA
GLIVIISAI

SEQ ID NO: 55611 - protein, 9 aa, Homo sapiens
  Table A; Target 55611; HLA-B*15:01; OR51E1; ENSG00000180785; TAA
GLIVIISAI

SEQ ID NO: 55612 - protein, 9 aa, Homo sapiens
  Table A; Target 55612; HLA-B*46:01; OR51E1; ENSG00000180785; TAA
GLIVIISAI

SEQ ID NO: 55613 - protein, 9 aa, Homo sapiens
  Table A; Target 55613; HLA-B*55:01; OR51E1; ENSG00000180785; TAA
GLIVIISAI

SEQ ID NO: 55614 - protein, 11 aa, Homo sapiens
  Table A; Target 55614; HLA-A*02:04; OR51E1; ENSG00000180785; TAA
GLIVIISAIGL

SEQ ID NO: 55615 - protein, 8 aa, Homo sapiens
  Table A; Target 55615; HLA-B*37:01; OR51E1; ENSG00000180785; TAA
GLSMVHRF

SEQ ID NO: 55616 - protein, 9 aa, Homo sapiens
  Table A; Target 55616; HLA-A*03:02; OR51E1; ENSG00000180785; TAA
GLTREAQAK

SEQ ID NO: 55617 - protein, 9 aa, Homo sapiens
  Table A; Target 55617; HLA-A*02:01; OR51E1; ENSG00000180785; TAA
GVAAVVRGA

SEQ ID NO: 55618 - protein, 9 aa, Homo sapiens
  Table A; Target 55618; HLA-A*02:03; OR51E1; ENSG00000180785; TAA
GVAAVVRGA

SEQ ID NO: 55619 - protein, 9 aa, Homo sapiens
  Table A; Target 55619; HLA-A*32:01; OR51E1; ENSG00000180785; TAA
GVAAVVRGA

SEQ ID NO: 55620 - protein, 9 aa, Homo sapiens
  Table A; Target 55620; HLA-B*13:02; OR51E1; ENSG00000180785; TAA
GVAAVVRGA

SEQ ID NO: 55621 - protein, 9 aa, Homo sapiens
  Table A; Target 55621; HLA-B*55:01; OR51E1; ENSG00000180785; TAA
GVAAVVRGA

SEQ ID NO: 55622 - protein, 9 aa, Homo sapiens
  Table A; Target 55622; HLA-B*56:01; OR51E1; ENSG00000180785; TAA
GVAAVVRGA

SEQ ID NO: 55623 - protein, 9 aa, Homo sapiens
  Table A; Target 55623; HLA-C*06:02; OR51E1; ENSG00000180785; TAA
GVAAVVRGA

SEQ ID NO: 55624 - protein, 10 aa, Homo sapiens
  Table A; Target 55624; HLA-B*56:01; OR51E1; ENSG00000180785; TAA
GVAAVVRGAA

SEQ ID NO: 55625 - protein, 11 aa, Homo sapiens
  Table A; Target 55625; HLA-B*07:02; OR51E1; ENSG00000180785; TAA
GVAAVVRGAAL

SEQ ID NO: 55626 - protein, 11 aa, Homo sapiens
  Table A; Target 55626; HLA-B*27:05; OR51E1; ENSG00000180785; TAA
GVAAVVRGAAL

SEQ ID NO: 55627 - protein, 11 aa, Homo sapiens
  Table A; Target 55627; HLA-C*01:02; OR51E1; ENSG00000180785; TAA
GVAAVVRGAAL

SEQ ID NO: 55628 - protein, 9 aa, Homo sapiens
  Table A; Target 55628; HLA-A*31:01; OR51E1; ENSG00000180785; TAA
HATVLTLPR

SEQ ID NO: 55629 - protein, 9 aa, Homo sapiens
  Table A; Target 55629; HLA-A*33:01; OR51E1; ENSG00000180785; TAA
HATVLTLPR

SEQ ID NO: 55630 - protein, 9 aa, Homo sapiens
  Table A; Target 55630; HLA-A*33:03; OR51E1; ENSG00000180785; TAA
HATVLTLPR

SEQ ID NO: 55631 - protein, 9 aa, Homo sapiens
  Table A; Target 55631; HLA-A*68:01; OR51E1; ENSG00000180785; TAA
HATVLTLPR

SEQ ID NO: 55632 - protein, 9 aa, Homo sapiens
  Table A; Target 55632; HLA-B*27:02; OR51E1; ENSG00000180785; TAA
HATVLTLPR

SEQ ID NO: 55633 - protein, 9 aa, Homo sapiens
  Table A; Target 55633; HLA-C*07:06; OR51E1; ENSG00000180785; TAA
HATVLTLPR

SEQ ID NO: 55634 - protein, 8 aa, Homo sapiens
  Table A; Target 55634; HLA-B*08:01; OR51E1; ENSG00000180785; TAA
HPLRHATV

SEQ ID NO: 55635 - protein, 8 aa, Homo sapiens
  Table A; Target 55635; HLA-B*51:01; OR51E1; ENSG00000180785; TAA
HPLRHATV

SEQ ID NO: 55636 - protein, 9 aa, Homo sapiens
  Table A; Target 55636; HLA-B*07:02; OR51E1; ENSG00000180785; TAA
HPLRHATVL

SEQ ID NO: 55637 - protein, 9 aa, Homo sapiens
  Table A; Target 55637; HLA-B*08:01; OR51E1; ENSG00000180785; TAA
HPLRHATVL

SEQ ID NO: 55638 - protein, 9 aa, Homo sapiens
  Table A; Target 55638; HLA-B*35:01; OR51E1; ENSG00000180785; TAA
HPLRHATVL

SEQ ID NO: 55639 - protein, 9 aa, Homo sapiens
  Table A; Target 55639; HLA-B*35:03; OR51E1; ENSG00000180785; TAA
HPLRHATVL

SEQ ID NO: 55640 - protein, 9 aa, Homo sapiens
  Table A; Target 55640; HLA-C*07:02; OR51E1; ENSG00000180785; TAA
HPLRHATVL

SEQ ID NO: 55641 - protein, 10 aa, Homo sapiens
  Table A; Target 55641; HLA-B*57:01; OR51E1; ENSG00000180785; TAA
HSLHEPMYIF

SEQ ID NO: 55642 - protein, 9 aa, Homo sapiens
  Table A; Target 55642; HLA-A*02:03; OR51E1; ENSG00000180785; TAA
HVATHASEP

SEQ ID NO: 55643 - protein, 9 aa, Homo sapiens
  Table A; Target 55643; HLA-A*26:01; OR51E1; ENSG00000180785; TAA
HVATHASEP

SEQ ID NO: 55644 - protein, 9 aa, Homo sapiens
  Table A; Target 55644; HLA-A*32:01; OR51E1; ENSG00000180785; TAA
HVATHASEP

SEQ ID NO: 55645 - protein, 9 aa, Homo sapiens
  Table A; Target 55645; HLA-B*27:05; OR51E1; ENSG00000180785; TAA
HVATHASEP

SEQ ID NO: 55646 - protein, 9 aa, Homo sapiens
  Table A; Target 55646; HLA-C*04:01; OR51E1; ENSG00000180785; TAA
HVATHASEP

SEQ ID NO: 55647 - protein, 9 aa, Homo sapiens
  Table A; Target 55647; HLA-C*06:02; OR51E1; ENSG00000180785; TAA
HVATHASEP

SEQ ID NO: 55648 - protein, 9 aa, Homo sapiens
  Table A; Target 55648; HLA-C*07:01; OR51E1; ENSG00000180785; TAA
HVATHASEP

SEQ ID NO: 55649 - protein, 9 aa, Homo sapiens
  Table A; Target 55649; HLA-C*07:02; OR51E1; ENSG00000180785; TAA
HVATHASEP

SEQ ID NO: 55650 - protein, 9 aa, Homo sapiens
  Table A; Target 55650; HLA-C*07:04; OR51E1; ENSG00000180785; TAA
HVATHASEP

SEQ ID NO: 55651 - protein, 9 aa, Homo sapiens
  Table A; Target 55651; HLA-C*07:06; OR51E1; ENSG00000180785; TAA
HVATHASEP

SEQ ID NO: 55652 - protein, 9 aa, Homo sapiens
  Table A; Target 55652; HLA-C*12:03; OR51E1; ENSG00000180785; TAA
HVATHASEP

SEQ ID NO: 55653 - protein, 9 aa, Homo sapiens
  Table A; Target 55653; HLA-C*16:01; OR51E1; ENSG00000180785; TAA
HVATHASEP

SEQ ID NO: 55654 - protein, 9 aa, Homo sapiens
  Table A; Target 55654; HLA-C*16:02; OR51E1; ENSG00000180785; TAA
HVATHASEP

SEQ ID NO: 55655 - protein, 9 aa, Homo sapiens
  Table A; Target 55655; HLA-A*29:02; OR51E1; ENSG00000180785; TAA
HVCAVFIFY

SEQ ID NO: 55656 - protein, 9 aa, Homo sapiens
  Table A; Target 55656; HLA-B*35:03; OR51E1; ENSG00000180785; TAA
IAVLGNLTI

SEQ ID NO: 55657 - protein, 9 aa, Homo sapiens
  Table A; Target 55657; HLA-B*49:01; OR51E1; ENSG00000180785; TAA
IAVLGNLTI

SEQ ID NO: 55658 - protein, 9 aa, Homo sapiens
  Table A; Target 55658; HLA-B*51:01; OR51E1; ENSG00000180785; TAA
IAVLGNLTI

SEQ ID NO: 55659 - protein, 9 aa, Homo sapiens
  Table A; Target 55659; HLA-B*58:01; OR51E1; ENSG00000180785; TAA
IAVLGNLTI

SEQ ID NO: 55660 - protein, 10 aa, Homo sapiens
  Table A; Target 55660; HLA-A*30:01; OR51E1; ENSG00000180785; TAA
IDILISTSSM

SEQ ID NO: 55661 - protein, 10 aa, Homo sapiens
  Table A; Target 55661; HLA-B*40:02; OR51E1; ENSG00000180785; TAA
IDILISTSSM

SEQ ID NO: 55662 - protein, 9 aa, Homo sapiens
  Table A; Target 55662; HLA-A*23:01; OR51E1; ENSG00000180785; TAA
IFWFNSTTI

SEQ ID NO: 55663 - protein, 9 aa, Homo sapiens
  Table A; Target 55663; HLA-A*24:02; OR51E1; ENSG00000180785; TAA
IFWFNSTTI

SEQ ID NO: 55664 - protein, 11 aa, Homo sapiens
  Table A; Target 55664; HLA-A*23:01; OR51E1; ENSG00000180785; TAA
IFWFNSTTIQF

SEQ ID NO: 55665 - protein, 9 aa, Homo sapiens
  Table A; Target 55665; HLA-A*23:01; OR51E1; ENSG00000180785; TAA
IFYVPFIGL

SEQ ID NO: 55666 - protein, 9 aa, Homo sapiens
  Table A; Target 55666; HLA-A*29:02; OR51E1; ENSG00000180785; TAA
IFYVPFIGL

SEQ ID NO: 55667 - protein, 9 aa, Homo sapiens
  Table A; Target 55667; HLA-A*31:01; OR51E1; ENSG00000180785; TAA
IFYVPFIGL

SEQ ID NO: 55668 - protein, 8 aa, Homo sapiens
  Table A; Target 55668; HLA-B*51:01; OR51E1; ENSG00000180785; TAA
IGLDSLLI

SEQ ID NO: 55669 - protein, 10 aa, Homo sapiens
  Table A; Target 55669; HLA-A*23:01; OR51E1; ENSG00000180785; TAA
IGLDSLLISF

SEQ ID NO: 55670 - protein, 10 aa, Homo sapiens
  Table A; Target 55670; HLA-A*24:02; OR51E1; ENSG00000180785; TAA
IGLDSLLISF

SEQ ID NO: 55671 - protein, 10 aa, Homo sapiens
  Table A; Target 55671; HLA-B*57:01; OR51E1; ENSG00000180785; TAA
IGLDSLLISF

SEQ ID NO: 55672 - protein, 9 aa, Homo sapiens
  Table A; Target 55672; HLA-A*02:01; OR51E1; ENSG00000180785; TAA
IGLPGLEEA

SEQ ID NO: 55673 - protein, 11 aa, Homo sapiens
  Table A; Target 55673; HLA-A*23:01; OR51E1; ENSG00000180785; TAA
IGLPGLEEAQF

SEQ ID NO: 55674 - protein, 9 aa, Homo sapiens
  Table A; Target 55674; HLA-A*24:02; OR51E1; ENSG00000180785; TAA
IGLSMVHRF

SEQ ID NO: 55675 - protein, 9 aa, Homo sapiens
  Table A; Target 55675; HLA-B*57:01; OR51E1; ENSG00000180785; TAA
IGLSMVHRF

SEQ ID NO: 55676 - protein, 11 aa, Homo sapiens
  Table A; Target 55676; HLA-B*38:01; OR51E1; ENSG00000180785; TAA
IHSLSGMESTV

SEQ ID NO: 55677 - protein, 11 aa, Homo sapiens
  Table A; Target 55677; HLA-B*39:01; OR51E1; ENSG00000180785; TAA
IHSLSGMESTV

SEQ ID NO: 55678 - protein, 9 aa, Homo sapiens
  Table A; Target 55678; HLA-A*03:01; OR51E1; ENSG00000180785; TAA
IIYIVRTEH

SEQ ID NO: 55679 - protein, 8 aa, Homo sapiens
  Table A; Target 55679; HLA-A*02:04; OR51E1; ENSG00000180785; TAA
ILANIYLL

SEQ ID NO: 55680 - protein, 8 aa, Homo sapiens
  Table A; Target 55680; HLA-A*23:01; OR51E1; ENSG00000180785; TAA
ILANIYLL

SEQ ID NO: 55681 - protein, 9 aa, Homo sapiens
  Table A; Target 55681; HLA-A*02:03; OR51E1; ENSG00000180785; TAA
ILANIYLLV

SEQ ID NO: 55682 - protein, 9 aa, Homo sapiens
  Table A; Target 55682; HLA-A*02:07; OR51E1; ENSG00000180785; TAA
ILANIYLLV

SEQ ID NO: 55683 - protein, 9 aa, Homo sapiens
  Table A; Target 55683; HLA-B*13:02; OR51E1; ENSG00000180785; TAA
ILANIYLLV

SEQ ID NO: 55684 - protein, 8 aa, Homo sapiens
  Table A; Target 55684; HLA-A*02:04; OR51E1; ENSG00000180785; TAA
ILIGLPGL

SEQ ID NO: 55685 - protein, 8 aa, Homo sapiens
  Table A; Target 55685; HLA-A*23:01; OR51E1; ENSG00000180785; TAA
ILIGLPGL

SEQ ID NO: 55686 - protein, 8 aa, Homo sapiens
  Table A; Target 55686; HLA-B*55:01; OR51E1; ENSG00000180785; TAA
ILIGLPGL

SEQ ID NO: 55687 - protein, 11 aa, Homo sapiens
  Table A; Target 55687; HLA-A*02:01; OR51E1; ENSG00000180785; TAA
ILIGLPGLEEA

SEQ ID NO: 55688 - protein, 11 aa, Homo sapiens
  Table A; Target 55688; HLA-A*02:03; OR51E1; ENSG00000180785; TAA
ILIGLPGLEEA

SEQ ID NO: 55689 - protein, 11 aa, Homo sapiens
  Table A; Target 55689; HLA-A*02:04; OR51E1; ENSG00000180785; TAA
ILIGLPGLEEA

SEQ ID NO: 55690 - protein, 8 aa, Homo sapiens
  Table A; Target 55690; HLA-B*15:01; OR51E1; ENSG00000180785; TAA
ILISTSSM

SEQ ID NO: 55691 - protein, 8 aa, Homo sapiens
  Table A; Target 55691; HLA-B*46:01; OR51E1; ENSG00000180785; TAA
ILISTSSM

SEQ ID NO: 55692 - protein, 8 aa, Homo sapiens
  Table A; Target 55692; HLA-C*01:02; OR51E1; ENSG00000180785; TAA
ILISTSSM

SEQ ID NO: 55693 - protein, 8 aa, Homo sapiens
  Table A; Target 55693; HLA-C*14:02; OR51E1; ENSG00000180785; TAA
ILISTSSM

SEQ ID NO: 55694 - protein, 10 aa, Homo sapiens
  Table A; Target 55694; HLA-A*03:01; OR51E1; ENSG00000180785; TAA
ILISTSSMPK

SEQ ID NO: 55695 - protein, 10 aa, Homo sapiens
  Table A; Target 55695; HLA-A*03:02; OR51E1; ENSG00000180785; TAA
ILISTSSMPK

SEQ ID NO: 55696 - protein, 10 aa, Homo sapiens
  Table A; Target 55696; HLA-A*11:01; OR51E1; ENSG00000180785; TAA
ILISTSSMPK

SEQ ID NO: 55697 - protein, 10 aa, Homo sapiens
  Table A; Target 55697; HLA-B*27:02; OR51E1; ENSG00000180785; TAA
ILISTSSMPK

SEQ ID NO: 55698 - protein, 8 aa, Homo sapiens
  Table A; Target 55698; HLA-A*02:03; OR51E1; ENSG00000180785; TAA
ILKTVLGL

SEQ ID NO: 55699 - protein, 8 aa, Homo sapiens
  Table A; Target 55699; HLA-B*08:01; OR51E1; ENSG00000180785; TAA
ILKTVLGL

SEQ ID NO: 55700 - protein, 8 aa, Homo sapiens
  Table A; Target 55700; HLA-C*06:02; OR51E1; ENSG00000180785; TAA
ILKTVLGL

SEQ ID NO: 55701 - protein, 8 aa, Homo sapiens
  Table A; Target 55701; HLA-C*07:04; OR51E1; ENSG00000180785; TAA
ILKTVLGL

SEQ ID NO: 55702 - protein, 9 aa, Homo sapiens
  Table A; Target 55702; HLA-A*02:03; OR51E1; ENSG00000180785; TAA
ILKTVLGLT

SEQ ID NO: 55703 - protein, 10 aa, Homo sapiens
  Table A; Target 55703; HLA-A*31:01; OR51E1; ENSG00000180785; TAA
ILKTVLGLTR

SEQ ID NO: 55704 - protein, 10 aa, Homo sapiens
  Table A; Target 55704; HLA-A*33:03; OR51E1; ENSG00000180785; TAA
ILKTVLGLTR

SEQ ID NO: 55705 - protein, 8 aa, Homo sapiens
  Table A; Target 55705; HLA-B*13:02; OR51E1; ENSG00000180785; TAA
IQFDACLL

SEQ ID NO: 55706 - protein, 8 aa, Homo sapiens
  Table A; Target 55706; HLA-B*15:03; OR51E1; ENSG00000180785; TAA
IQFDACLL

SEQ ID NO: 55707 - protein, 9 aa, Homo sapiens
  Table A; Target 55707; HLA-B*27:02; OR51E1; ENSG00000180785; TAA
IRVNVVYGL

SEQ ID NO: 55708 - protein, 9 aa, Homo sapiens
  Table A; Target 55708; HLA-B*27:05; OR51E1; ENSG00000180785; TAA
IRVNVVYGL

SEQ ID NO: 55709 - protein, 9 aa, Homo sapiens
  Table A; Target 55709; HLA-C*06:02; OR51E1; ENSG00000180785; TAA
IRVNVVYGL

SEQ ID NO: 55710 - protein, 9 aa, Homo sapiens
  Table A; Target 55710; HLA-B*39:01; OR51E1; ENSG00000180785; TAA
ISAIGLDSL

SEQ ID NO: 55711 - protein, 9 aa, Homo sapiens
  Table A; Target 55711; HLA-C*01:02; OR51E1; ENSG00000180785; TAA
ISAIGLDSL

SEQ ID NO: 55712 - protein, 9 aa, Homo sapiens
  Table A; Target 55712; HLA-C*03:04; OR51E1; ENSG00000180785; TAA
ISAIGLDSL

SEQ ID NO: 55713 - protein, 8 aa, Homo sapiens
  Table A; Target 55713; HLA-A*03:02; OR51E1; ENSG00000180785; TAA
ISTSSMPK

SEQ ID NO: 55714 - protein, 8 aa, Homo sapiens
  Table A; Target 55714; HLA-A*11:01; OR51E1; ENSG00000180785; TAA
ISTSSMPK

SEQ ID NO: 55715 - protein, 9 aa, Homo sapiens
  Table A; Target 55715; HLA-B*58:01; OR51E1; ENSG00000180785; TAA
ISTSSMPKM

SEQ ID NO: 55716 - protein, 9 aa, Homo sapiens
  Table A; Target 55716; HLA-C*02:02; OR51E1; ENSG00000180785; TAA
ISTSSMPKM

SEQ ID NO: 55717 - protein, 9 aa, Homo sapiens
  Table A; Target 55717; HLA-C*03:03; OR51E1; ENSG00000180785; TAA
ISTSSMPKM

SEQ ID NO: 55718 - protein, 9 aa, Homo sapiens
  Table A; Target 55718; HLA-C*03:04; OR51E1; ENSG00000180785; TAA
ISTSSMPKM

SEQ ID NO: 55719 - protein, 9 aa, Homo sapiens
  Table A; Target 55719; HLA-C*12:03; OR51E1; ENSG00000180785; TAA
ISTSSMPKM

SEQ ID NO: 55720 - protein, 9 aa, Homo sapiens
  Table A; Target 55720; HLA-C*16:01; OR51E1; ENSG00000180785; TAA
ISTSSMPKM

SEQ ID NO: 55721 - protein, 9 aa, Homo sapiens
  Table A; Target 55721; HLA-C*16:02; OR51E1; ENSG00000180785; TAA
ISTSSMPKM

SEQ ID NO: 55722 - protein, 10 aa, Homo sapiens
  Table A; Target 55722; HLA-B*07:02; OR51E1; ENSG00000180785; TAA
ISTSSMPKML

SEQ ID NO: 55723 - protein, 10 aa, Homo sapiens
  Table A; Target 55723; HLA-C*07:02; OR51E1; ENSG00000180785; TAA
ISTSSMPKML

SEQ ID NO: 55724 - protein, 10 aa, Homo sapiens
  Table A; Target 55724; HLA-C*16:02; OR51E1; ENSG00000180785; TAA
ISTSSMPKML

SEQ ID NO: 55725 - protein, 9 aa, Homo sapiens
  Table A; Target 55725; HLA-B*58:01; OR51E1; ENSG00000180785; TAA
IVIISAIGL

SEQ ID NO: 55726 - protein, 9 aa, Homo sapiens
  Table A; Target 55726; HLA-C*01:02; OR51E1; ENSG00000180785; TAA
IVIISAIGL

SEQ ID NO: 55727 - protein, 9 aa, Homo sapiens
  Table A; Target 55727; HLA-C*03:03; OR51E1; ENSG00000180785; TAA
IVIISAIGL

SEQ ID NO: 55728 - protein, 9 aa, Homo sapiens
  Table A; Target 55728; HLA-C*03:04; OR51E1; ENSG00000180785; TAA
IVIISAIGL

SEQ ID NO: 55729 - protein, 8 aa, Homo sapiens
  Table A; Target 55729; HLA-B*07:02; OR51E1; ENSG00000180785; TAA
IVRTEHSL

SEQ ID NO: 55730 - protein, 8 aa, Homo sapiens
  Table A; Target 55730; HLA-B*08:01; OR51E1; ENSG00000180785; TAA
IVRTEHSL

SEQ ID NO: 55731 - protein, 8 aa, Homo sapiens
  Table A; Target 55731; HLA-C*16:01; OR51E1; ENSG00000180785; TAA
IVRTEHSL

SEQ ID NO: 55732 - protein, 8 aa, Homo sapiens
  Table A; Target 55732; HLA-A*03:01; OR51E1; ENSG00000180785; TAA
IVYGVKTK

SEQ ID NO: 55733 - protein, 8 aa, Homo sapiens
  Table A; Target 55733; HLA-A*03:02; OR51E1; ENSG00000180785; TAA
IVYGVKTK

SEQ ID NO: 55734 - protein, 10 aa, Homo sapiens
  Table A; Target 55734; HLA-A*23:01; OR51E1; ENSG00000180785; TAA
IYIVRTEHSL

SEQ ID NO: 55735 - protein, 10 aa, Homo sapiens
  Table A; Target 55735; HLA-A*24:02; OR51E1; ENSG00000180785; TAA
IYIVRTEHSL

SEQ ID NO: 55736 - protein, 9 aa, Homo sapiens
  Table A; Target 55736; HLA-A*23:01; OR51E1; ENSG00000180785; TAA
IYLLVPPVL

SEQ ID NO: 55737 - protein, 9 aa, Homo sapiens
  Table A; Target 55737; HLA-A*24:02; OR51E1; ENSG00000180785; TAA
IYLLVPPVL

SEQ ID NO: 55738 - protein, 9 aa, Homo sapiens
  Table A; Target 55738; HLA-B*35:03; OR51E1; ENSG00000180785; TAA
IYLLVPPVL

SEQ ID NO: 55739 - protein, 9 aa, Homo sapiens
  Table A; Target 55739; HLA-C*14:02; OR51E1; ENSG00000180785; TAA
IYLLVPPVL

SEQ ID NO: 55740 - protein, 9 aa, Homo sapiens
  Table A; Target 55740; HLA-A*32:01; OR51E1; ENSG00000180785; TAA
KAFGTCVSH

SEQ ID NO: 55741 - protein, 9 aa, Homo sapiens
  Table A; Target 55741; HLA-B*15:03; OR51E1; ENSG00000180785; TAA
KAFGTCVSH

SEQ ID NO: 55742 - protein, 9 aa, Homo sapiens
  Table A; Target 55742; HLA-C*02:02; OR51E1; ENSG00000180785; TAA
KAFGTCVSH

SEQ ID NO: 55743 - protein, 9 aa, Homo sapiens
  Table A; Target 55743; HLA-C*06:02; OR51E1; ENSG00000180785; TAA
KAFGTCVSH

SEQ ID NO: 55744 - protein, 9 aa, Homo sapiens
  Table A; Target 55744; HLA-C*07:01; OR51E1; ENSG00000180785; TAA
KAFGTCVSH

SEQ ID NO: 55745 - protein, 10 aa, Homo sapiens
  Table A; Target 55745; HLA-A*02:03; OR51E1; ENSG00000180785; TAA
KAFGTCVSHV

SEQ ID NO: 55746 - protein, 10 aa, Homo sapiens
  Table A; Target 55746; HLA-C*12:03; OR51E1; ENSG00000180785; TAA
KAFGTCVSHV

SEQ ID NO: 55747 - protein, 9 aa, Homo sapiens
  Table A; Target 55747; HLA-A*03:01; OR51E1; ENSG00000180785; TAA
KIGVAAVVR

SEQ ID NO: 55748 - protein, 9 aa, Homo sapiens
  Table A; Target 55748; HLA-A*03:02; OR51E1; ENSG00000180785; TAA
KIGVAAVVR

SEQ ID NO: 55749 - protein, 9 aa, Homo sapiens
  Table A; Target 55749; HLA-C*06:02; OR51E1; ENSG00000180785; TAA
KRRDSPLPV

SEQ ID NO: 55750 - protein, 8 aa, Homo sapiens
  Table A; Target 55750; HLA-A*31:01; OR51E1; ENSG00000180785; TAA
KTKEIRQR

SEQ ID NO: 55751 - protein, 8 aa, Homo sapiens
  Table A; Target 55751; HLA-B*57:01; OR51E1; ENSG00000180785; TAA
KTVLGLTR

SEQ ID NO: 55752 - protein, 10 aa, Homo sapiens
  Table A; Target 55752; HLA-C*06:02; OR51E1; ENSG00000180785; TAA
KTVLGLTREA

SEQ ID NO: 55753 - protein, 10 aa, Homo sapiens
  Table A; Target 55753; HLA-A*68:02; OR51E1; ENSG00000180785; TAA
LACDDIRVNV

SEQ ID NO: 55754 - protein, 8 aa, Homo sapiens
  Table A; Target 55754; HLA-B*46:01; OR51E1; ENSG00000180785; TAA
LAFPLCSL

SEQ ID NO: 55755 - protein, 8 aa, Homo sapiens
  Table A; Target 55755; HLA-B*51:01; OR51E1; ENSG00000180785; TAA
LAFPLCSL

SEQ ID NO: 55756 - protein, 8 aa, Homo sapiens
  Table A; Target 55756; HLA-C*03:04; OR51E1; ENSG00000180785; TAA
LAFPLCSL

SEQ ID NO: 55757 - protein, 9 aa, Homo sapiens
  Table A; Target 55757; HLA-A*01:01; OR51E1; ENSG00000180785; TAA
LAFPLCSLY

SEQ ID NO: 55758 - protein, 9 aa, Homo sapiens
  Table A; Target 55758; HLA-A*29:02; OR51E1; ENSG00000180785; TAA
LAFPLCSLY

SEQ ID NO: 55759 - protein, 9 aa, Homo sapiens
  Table A; Target 55759; HLA-A*30:02; OR51E1; ENSG00000180785; TAA
LAFPLCSLY

SEQ ID NO: 55760 - protein, 9 aa, Homo sapiens
  Table A; Target 55760; HLA-B*15:03; OR51E1; ENSG00000180785; TAA
LAFPLCSLY

SEQ ID NO: 55761 - protein, 9 aa, Homo sapiens
  Table A; Target 55761; HLA-B*35:01; OR51E1; ENSG00000180785; TAA
LAFPLCSLY

SEQ ID NO: 55762 - protein, 9 aa, Homo sapiens
  Table A; Target 55762; HLA-B*57:01; OR51E1; ENSG00000180785; TAA
LAFPLCSLY

SEQ ID NO: 55763 - protein, 9 aa, Homo sapiens
  Table A; Target 55763; HLA-C*02:02; OR51E1; ENSG00000180785; TAA
LAFPLCSLY

SEQ ID NO: 55764 - protein, 9 aa, Homo sapiens
  Table A; Target 55764; HLA-C*07:01; OR51E1; ENSG00000180785; TAA
LAFPLCSLY

SEQ ID NO: 55765 - protein, 9 aa, Homo sapiens
  Table A; Target 55765; HLA-C*12:03; OR51E1; ENSG00000180785; TAA
LAFPLCSLY

SEQ ID NO: 55766 - protein, 8 aa, Homo sapiens
  Table A; Target 55766; HLA-B*18:01; OR51E1; ENSG00000180785; TAA
LDSLLISF

SEQ ID NO: 55767 - protein, 8 aa, Homo sapiens
  Table A; Target 55767; HLA-B*37:01; OR51E1; ENSG00000180785; TAA
LDSLLISF

SEQ ID NO: 55768 - protein, 8 aa, Homo sapiens
  Table A; Target 55768; HLA-C*14:02; OR51E1; ENSG00000180785; TAA
LFHVATHA

SEQ ID NO: 55769 - protein, 9 aa, Homo sapiens
  Table A; Target 55769; HLA-B*38:01; OR51E1; ENSG00000180785; TAA
LHEPMYIFL

SEQ ID NO: 55770 - protein, 8 aa, Homo sapiens
  Table A; Target 55770; HLA-B*38:01; OR51E1; ENSG00000180785; TAA
LHQDVMKL

SEQ ID NO: 55771 - protein, 8 aa, Homo sapiens
  Table A; Target 55771; HLA-B*39:01; OR51E1; ENSG00000180785; TAA
LHQDVMKL

SEQ ID NO: 55772 - protein, 8 aa, Homo sapiens
  Table A; Target 55772; HLA-C*06:02; OR51E1; ENSG00000180785; TAA
LHQDVMKL

SEQ ID NO: 55773 - protein, 8 aa, Homo sapiens
  Table A; Target 55773; HLA-C*07:04; OR51E1; ENSG00000180785; TAA
LHQDVMKL

SEQ ID NO: 55774 - protein, 8 aa, Homo sapiens
  Table A; Target 55774; HLA-C*12:03; OR51E1; ENSG00000180785; TAA
LHQDVMKL

SEQ ID NO: 55775 - protein, 9 aa, Homo sapiens
  Table A; Target 55775; HLA-A*02:01; OR51E1; ENSG00000180785; TAA
LILKTVLGL

SEQ ID NO: 55776 - protein, 9 aa, Homo sapiens
  Table A; Target 55776; HLA-A*02:04; OR51E1; ENSG00000180785; TAA
LILKTVLGL

SEQ ID NO: 55777 - protein, 9 aa, Homo sapiens
  Table A; Target 55777; HLA-A*02:07; OR51E1; ENSG00000180785; TAA
LILKTVLGL

SEQ ID NO: 55778 - protein, 9 aa, Homo sapiens
  Table A; Target 55778; HLA-A*03:01; OR51E1; ENSG00000180785; TAA
LISTSSMPK

SEQ ID NO: 55779 - protein, 9 aa, Homo sapiens
  Table A; Target 55779; HLA-A*03:02; OR51E1; ENSG00000180785; TAA
LISTSSMPK

SEQ ID NO: 55780 - protein, 9 aa, Homo sapiens
  Table A; Target 55780; HLA-A*11:01; OR51E1; ENSG00000180785; TAA
LISTSSMPK

SEQ ID NO: 55781 - protein, 9 aa, Homo sapiens
  Table A; Target 55781; HLA-C*16:01; OR51E1; ENSG00000180785; TAA
LISTSSMPK

SEQ ID NO: 55782 - protein, 9 aa, Homo sapiens
  Table A; Target 55782; HLA-A*29:02; OR51E1; ENSG00000180785; TAA
LLAMAFDRY

SEQ ID NO: 55783 - protein, 8 aa, Homo sapiens
  Table A; Target 55783; HLA-B*08:01; OR51E1; ENSG00000180785; TAA
LLILKTVL

SEQ ID NO: 55784 - protein, 9 aa, Homo sapiens
  Table A; Target 55784; HLA-A*02:01; OR51E1; ENSG00000180785; TAA
LLISFSYLL

SEQ ID NO: 55785 - protein, 9 aa, Homo sapiens
  Table A; Target 55785; HLA-A*02:04; OR51E1; ENSG00000180785; TAA
LLISFSYLL

SEQ ID NO: 55786 - protein, 9 aa, Homo sapiens
  Table A; Target 55786; HLA-A*02:07; OR51E1; ENSG00000180785; TAA
LLISFSYLL

SEQ ID NO: 55787 - protein, 11 aa, Homo sapiens
  Table A; Target 55787; HLA-A*02:04; OR51E1; ENSG00000180785; TAA
LLISFSYLLIL

SEQ ID NO: 55788 - protein, 10 aa, Homo sapiens
  Table A; Target 55788; HLA-A*02:03; OR51E1; ENSG00000180785; TAA
LLQMFAIHSL

SEQ ID NO: 55789 - protein, 10 aa, Homo sapiens
  Table A; Target 55789; HLA-A*02:04; OR51E1; ENSG00000180785; TAA
LLQMFAIHSL

SEQ ID NO: 55790 - protein, 10 aa, Homo sapiens
  Table A; Target 55790; HLA-A*02:01; OR51E1; ENSG00000180785; TAA
LLVPPVLNPI

SEQ ID NO: 55791 - protein, 10 aa, Homo sapiens
  Table A; Target 55791; HLA-A*02:03; OR51E1; ENSG00000180785; TAA
LLVPPVLNPI

SEQ ID NO: 55792 - protein, 10 aa, Homo sapiens
  Table A; Target 55792; HLA-A*02:04; OR51E1; ENSG00000180785; TAA
LLVPPVLNPI

SEQ ID NO: 55793 - protein, 10 aa, Homo sapiens
  Table A; Target 55793; HLA-A*02:07; OR51E1; ENSG00000180785; TAA
LLVPPVLNPI

SEQ ID NO: 55794 - protein, 8 aa, Homo sapiens
  Table A; Target 55794; HLA-A*23:01; OR51E1; ENSG00000180785; TAA
LMAPLPVF

SEQ ID NO: 55795 - protein, 8 aa, Homo sapiens
  Table A; Target 55795; HLA-B*15:03; OR51E1; ENSG00000180785; TAA
LMAPLPVF

SEQ ID NO: 55796 - protein, 8 aa, Homo sapiens
  Table A; Target 55796; HLA-B*46:01; OR51E1; ENSG00000180785; TAA
LMAPLPVF

SEQ ID NO: 55797 - protein, 8 aa, Homo sapiens
  Table A; Target 55797; HLA-B*57:01; OR51E1; ENSG00000180785; TAA
LMAPLPVF

SEQ ID NO: 55798 - protein, 8 aa, Homo sapiens
  Table A; Target 55798; HLA-B*58:01; OR51E1; ENSG00000180785; TAA
LMAPLPVF

SEQ ID NO: 55799 - protein, 9 aa, Homo sapiens
  Table A; Target 55799; HLA-A*02:01; OR51E1; ENSG00000180785; TAA
LMAPLPVFI

SEQ ID NO: 55800 - protein, 9 aa, Homo sapiens
  Table A; Target 55800; HLA-A*02:03; OR51E1; ENSG00000180785; TAA
LMAPLPVFI

SEQ ID NO: 55801 - protein, 9 aa, Homo sapiens
  Table A; Target 55801; HLA-A*02:04; OR51E1; ENSG00000180785; TAA
LMAPLPVFI

SEQ ID NO: 55802 - protein, 9 aa, Homo sapiens
  Table A; Target 55802; HLA-A*02:07; OR51E1; ENSG00000180785; TAA
LMAPLPVFI

SEQ ID NO: 55803 - protein, 9 aa, Homo sapiens
  Table A; Target 55803; HLA-A*23:01; OR51E1; ENSG00000180785; TAA
LMAPLPVFI

SEQ ID NO: 55804 - protein, 9 aa, Homo sapiens
  Table A; Target 55804; HLA-A*24:02; OR51E1; ENSG00000180785; TAA
LMAPLPVFI

SEQ ID NO: 55805 - protein, 9 aa, Homo sapiens
  Table A; Target 55805; HLA-A*68:02; OR51E1; ENSG00000180785; TAA
LMAPLPVFI

SEQ ID NO: 55806 - protein, 9 aa, Homo sapiens
  Table A; Target 55806; HLA-B*13:02; OR51E1; ENSG00000180785; TAA
LMAPLPVFI

SEQ ID NO: 55807 - protein, 9 aa, Homo sapiens
  Table A; Target 55807; HLA-B*49:01; OR51E1; ENSG00000180785; TAA
LMAPLPVFI

SEQ ID NO: 55808 - protein, 9 aa, Homo sapiens
  Table A; Target 55808; HLA-C*06:02; OR51E1; ENSG00000180785; TAA
LMAPLPVFI

SEQ ID NO: 55809 - protein, 9 aa, Homo sapiens
  Table A; Target 55809; HLA-B*07:02; OR51E1; ENSG00000180785; TAA
LPFCRSNIL

SEQ ID NO: 55810 - protein, 9 aa, Homo sapiens
  Table A; Target 55810; HLA-B*08:01; OR51E1; ENSG00000180785; TAA
LPFCRSNIL

SEQ ID NO: 55811 - protein, 9 aa, Homo sapiens
  Table A; Target 55811; HLA-B*51:01; OR51E1; ENSG00000180785; TAA
LPFCRSNIL

SEQ ID NO: 55812 - protein, 9 aa, Homo sapiens
  Table A; Target 55812; HLA-B*35:01; OR51E1; ENSG00000180785; TAA
LPGLEEAQF

SEQ ID NO: 55813 - protein, 9 aa, Homo sapiens
  Table A; Target 55813; HLA-B*35:03; OR51E1; ENSG00000180785; TAA
LPGLEEAQF

SEQ ID NO: 55814 - protein, 9 aa, Homo sapiens
  Table A; Target 55814; HLA-B*55:01; OR51E1; ENSG00000180785; TAA
LPGLEEAQF

SEQ ID NO: 55815 - protein, 9 aa, Homo sapiens
  Table A; Target 55815; HLA-C*03:03; OR51E1; ENSG00000180785; TAA
LPGLEEAQF

SEQ ID NO: 55816 - protein, 9 aa, Homo sapiens
  Table A; Target 55816; HLA-B*07:02; OR51E1; ENSG00000180785; TAA
LPRVTKIGV

SEQ ID NO: 55817 - protein, 9 aa, Homo sapiens
  Table A; Target 55817; HLA-B*08:01; OR51E1; ENSG00000180785; TAA
LPRVTKIGV

SEQ ID NO: 55818 - protein, 9 aa, Homo sapiens
  Table A; Target 55818; HLA-B*51:01; OR51E1; ENSG00000180785; TAA
LPRVTKIGV

SEQ ID NO: 55819 - protein, 9 aa, Homo sapiens
  Table A; Target 55819; HLA-B*54:01; OR51E1; ENSG00000180785; TAA
LPRVTKIGV

SEQ ID NO: 55820 - protein, 9 aa, Homo sapiens
  Table A; Target 55820; HLA-B*56:01; OR51E1; ENSG00000180785; TAA
LPRVTKIGV

SEQ ID NO: 55821 - protein, 9 aa, Homo sapiens
  Table A; Target 55821; HLA-C*07:02; OR51E1; ENSG00000180785; TAA
LPRVTKIGV

SEQ ID NO: 55822 - protein, 10 aa, Homo sapiens
  Table A; Target 55822; HLA-B*07:02; OR51E1; ENSG00000180785; TAA
LPRVTKIGVA

SEQ ID NO: 55823 - protein, 10 aa, Homo sapiens
  Table A; Target 55823; HLA-B*54:01; OR51E1; ENSG00000180785; TAA
LPRVTKIGVA

SEQ ID NO: 55824 - protein, 11 aa, Homo sapiens
  Table A; Target 55824; HLA-B*07:02; OR51E1; ENSG00000180785; TAA
LPRVTKIGVAA

SEQ ID NO: 55825 - protein, 11 aa, Homo sapiens
  Table A; Target 55825; HLA-B*54:01; OR51E1; ENSG00000180785; TAA
LPRVTKIGVAA

SEQ ID NO: 55826 - protein, 11 aa, Homo sapiens
  Table A; Target 55826; HLA-B*56:01; OR51E1; ENSG00000180785; TAA
LPRVTKIGVAA

SEQ ID NO: 55827 - protein, 11 aa, Homo sapiens
  Table A; Target 55827; HLA-C*07:02; OR51E1; ENSG00000180785; TAA
LPRVTKIGVAA

SEQ ID NO: 55828 - protein, 8 aa, Homo sapiens
  Table A; Target 55828; HLA-B*51:01; OR51E1; ENSG00000180785; TAA
LPVILANI

SEQ ID NO: 55829 - protein, 8 aa, Homo sapiens
  Table A; Target 55829; HLA-B*56:01; OR51E1; ENSG00000180785; TAA
LPVILANI

SEQ ID NO: 55830 - protein, 9 aa, Homo sapiens
  Table A; Target 55830; HLA-B*35:01; OR51E1; ENSG00000180785; TAA
LPVILANIY

SEQ ID NO: 55831 - protein, 9 aa, Homo sapiens
  Table A; Target 55831; HLA-A*02:01; OR51E1; ENSG00000180785; TAA
LQMFAIHSL

SEQ ID NO: 55832 - protein, 9 aa, Homo sapiens
  Table A; Target 55832; HLA-A*02:03; OR51E1; ENSG00000180785; TAA
LQMFAIHSL

SEQ ID NO: 55833 - protein, 9 aa, Homo sapiens
  Table A; Target 55833; HLA-A*02:04; OR51E1; ENSG00000180785; TAA
LQMFAIHSL

SEQ ID NO: 55834 - protein, 9 aa, Homo sapiens
  Table A; Target 55834; HLA-A*02:07; OR51E1; ENSG00000180785; TAA
LQMFAIHSL

SEQ ID NO: 55835 - protein, 9 aa, Homo sapiens
  Table A; Target 55835; HLA-A*24:02; OR51E1; ENSG00000180785; TAA
LQMFAIHSL

SEQ ID NO: 55836 - protein, 9 aa, Homo sapiens
  Table A; Target 55836; HLA-A*30:01; OR51E1; ENSG00000180785; TAA
LQMFAIHSL

SEQ ID NO: 55837 - protein, 9 aa, Homo sapiens
  Table A; Target 55837; HLA-A*32:01; OR51E1; ENSG00000180785; TAA
LQMFAIHSL

SEQ ID NO: 55838 - protein, 9 aa, Homo sapiens
  Table A; Target 55838; HLA-B*08:01; OR51E1; ENSG00000180785; TAA
LQMFAIHSL

SEQ ID NO: 55839 - protein, 9 aa, Homo sapiens
  Table A; Target 55839; HLA-B*13:02; OR51E1; ENSG00000180785; TAA
LQMFAIHSL

SEQ ID NO: 55840 - protein, 9 aa, Homo sapiens
  Table A; Target 55840; HLA-B*15:01; OR51E1; ENSG00000180785; TAA
LQMFAIHSL

SEQ ID NO: 55841 - protein, 9 aa, Homo sapiens
  Table A; Target 55841; HLA-B*15:03; OR51E1; ENSG00000180785; TAA
LQMFAIHSL

SEQ ID NO: 55842 - protein, 9 aa, Homo sapiens
  Table A; Target 55842; HLA-B*27:05; OR51E1; ENSG00000180785; TAA
LQMFAIHSL

SEQ ID NO: 55843 - protein, 9 aa, Homo sapiens
  Table A; Target 55843; HLA-B*38:01; OR51E1; ENSG00000180785; TAA
LQMFAIHSL

SEQ ID NO: 55844 - protein, 9 aa, Homo sapiens
  Table A; Target 55844; HLA-B*39:01; OR51E1; ENSG00000180785; TAA
LQMFAIHSL

SEQ ID NO: 55845 - protein, 9 aa, Homo sapiens
  Table A; Target 55845; HLA-B*44:02; OR51E1; ENSG00000180785; TAA
LQMFAIHSL

SEQ ID NO: 55846 - protein, 9 aa, Homo sapiens
  Table A; Target 55846; HLA-C*02:02; OR51E1; ENSG00000180785; TAA
LQMFAIHSL

SEQ ID NO: 55847 - protein, 9 aa, Homo sapiens
  Table A; Target 55847; HLA-C*03:03; OR51E1; ENSG00000180785; TAA
LQMFAIHSL

SEQ ID NO: 55848 - protein, 9 aa, Homo sapiens
  Table A; Target 55848; HLA-C*03:04; OR51E1; ENSG00000180785; TAA
LQMFAIHSL

SEQ ID NO: 55849 - protein, 9 aa, Homo sapiens
  Table A; Target 55849; HLA-C*07:04; OR51E1; ENSG00000180785; TAA
LQMFAIHSL

SEQ ID NO: 55850 - protein, 9 aa, Homo sapiens
  Table A; Target 55850; HLA-C*06:02; OR51E1; ENSG00000180785; TAA
LRHATVLTL

SEQ ID NO: 55851 - protein, 10 aa, Homo sapiens
  Table A; Target 55851; HLA-C*07:02; OR51E1; ENSG00000180785; TAA
LSGMESTVLL

SEQ ID NO: 55852 - protein, 9 aa, Homo sapiens
  Table A; Target 55852; HLA-A*02:04; OR51E1; ENSG00000180785; TAA
LTLPRVTKI

SEQ ID NO: 55853 - protein, 9 aa, Homo sapiens
  Table A; Target 55853; HLA-A*24:02; OR51E1; ENSG00000180785; TAA
LTLPRVTKI

SEQ ID NO: 55854 - protein, 10 aa, Homo sapiens
  Table A; Target 55854; HLA-B*57:01; OR51E1; ENSG00000180785; TAA
LTREAQAKAF

SEQ ID NO: 55855 - protein, 9 aa, Homo sapiens
  Table A; Target 55855; HLA-A*02:01; OR51E1; ENSG00000180785; TAA
LVPPVLNPI

SEQ ID NO: 55856 - protein, 9 aa, Homo sapiens
  Table A; Target 55856; HLA-A*02:04; OR51E1; ENSG00000180785; TAA
LVPPVLNPI

SEQ ID NO: 55857 - protein, 9 aa, Homo sapiens
  Table A; Target 55857; HLA-A*02:07; OR51E1; ENSG00000180785; TAA
LVPPVLNPI

SEQ ID NO: 55858 - protein, 9 aa, Homo sapiens
  Table A; Target 55858; HLA-A*24:02; OR51E1; ENSG00000180785; TAA
LVPPVLNPI

SEQ ID NO: 55859 - protein, 9 aa, Homo sapiens
  Table A; Target 55859; HLA-A*68:02; OR51E1; ENSG00000180785; TAA
LVPPVLNPI

SEQ ID NO: 55860 - protein, 9 aa, Homo sapiens
  Table A; Target 55860; HLA-B*51:01; OR51E1; ENSG00000180785; TAA
LVPPVLNPI

SEQ ID NO: 55861 - protein, 9 aa, Homo sapiens
  Table A; Target 55861; HLA-C*01:02; OR51E1; ENSG00000180785; TAA
LVPPVLNPI

SEQ ID NO: 55862 - protein, 10 aa, Homo sapiens
  Table A; Target 55862; HLA-A*02:07; OR51E1; ENSG00000180785; TAA
LVPPVLNPIV

SEQ ID NO: 55863 - protein, 11 aa, Homo sapiens
  Table A; Target 55863; HLA-A*26:01; OR51E1; ENSG00000180785; TAA
LVPPVLNPIVY

SEQ ID NO: 55864 - protein, 11 aa, Homo sapiens
  Table A; Target 55864; HLA-A*29:02; OR51E1; ENSG00000180785; TAA
LVPPVLNPIVY

SEQ ID NO: 55865 - protein, 11 aa, Homo sapiens
  Table A; Target 55865; HLA-B*15:01; OR51E1; ENSG00000180785; TAA
LVPPVLNPIVY

SEQ ID NO: 55866 - protein, 11 aa, Homo sapiens
  Table A; Target 55866; HLA-C*07:04; OR51E1; ENSG00000180785; TAA
LVPPVLNPIVY

SEQ ID NO: 55867 - protein, 8 aa, Homo sapiens
  Table A; Target 55867; HLA-B*08:01; OR51E1; ENSG00000180785; TAA
MAFDRYVA

SEQ ID NO: 55868 - protein, 8 aa, Homo sapiens
  Table A; Target 55868; HLA-B*56:01; OR51E1; ENSG00000180785; TAA
MAFDRYVA

SEQ ID NO: 55869 - protein, 8 aa, Homo sapiens
  Table A; Target 55869; HLA-C*16:01; OR51E1; ENSG00000180785; TAA
MAFDRYVA

SEQ ID NO: 55870 - protein, 9 aa, Homo sapiens
  Table A; Target 55870; HLA-A*02:01; OR51E1; ENSG00000180785; TAA
MAFDRYVAI

SEQ ID NO: 55871 - protein, 9 aa, Homo sapiens
  Table A; Target 55871; HLA-A*02:03; OR51E1; ENSG00000180785; TAA
MAFDRYVAI

SEQ ID NO: 55872 - protein, 9 aa, Homo sapiens
  Table A; Target 55872; HLA-A*02:04; OR51E1; ENSG00000180785; TAA
MAFDRYVAI

SEQ ID NO: 55873 - protein, 9 aa, Homo sapiens
  Table A; Target 55873; HLA-A*02:07; OR51E1; ENSG00000180785; TAA
MAFDRYVAI

SEQ ID NO: 55874 - protein, 9 aa, Homo sapiens
  Table A; Target 55874; HLA-A*23:01; OR51E1; ENSG00000180785; TAA
MAFDRYVAI

SEQ ID NO: 55875 - protein, 9 aa, Homo sapiens
  Table A; Target 55875; HLA-A*24:02; OR51E1; ENSG00000180785; TAA
MAFDRYVAI

SEQ ID NO: 55876 - protein, 9 aa, Homo sapiens
  Table A; Target 55876; HLA-A*33:01; OR51E1; ENSG00000180785; TAA
MAFDRYVAI

SEQ ID NO: 55877 - protein, 9 aa, Homo sapiens
  Table A; Target 55877; HLA-B*35:03; OR51E1; ENSG00000180785; TAA
MAFDRYVAI

SEQ ID NO: 55878 - protein, 9 aa, Homo sapiens
  Table A; Target 55878; HLA-B*57:01; OR51E1; ENSG00000180785; TAA
MAFDRYVAI

SEQ ID NO: 55879 - protein, 9 aa, Homo sapiens
  Table A; Target 55879; HLA-B*58:01; OR51E1; ENSG00000180785; TAA
MAFDRYVAI

SEQ ID NO: 55880 - protein, 9 aa, Homo sapiens
  Table A; Target 55880; HLA-C*01:02; OR51E1; ENSG00000180785; TAA
MAFDRYVAI

SEQ ID NO: 55881 - protein, 9 aa, Homo sapiens
  Table A; Target 55881; HLA-C*16:02; OR51E1; ENSG00000180785; TAA
MAFDRYVAI

SEQ ID NO: 55882 - protein, 8 aa, Homo sapiens
  Table A; Target 55882; HLA-B*51:01; OR51E1; ENSG00000180785; TAA
MAPLPVFI

SEQ ID NO: 55883 - protein, 8 aa, Homo sapiens
  Table A; Target 55883; HLA-C*07:01; OR51E1; ENSG00000180785; TAA
MAPLPVFI

SEQ ID NO: 55884 - protein, 9 aa, Homo sapiens
  Table A; Target 55884; HLA-A*11:01; OR51E1; ENSG00000180785; TAA
MAPLPVFIK

SEQ ID NO: 55885 - protein, 8 aa, Homo sapiens
  Table A; Target 55885; HLA-B*18:01; OR51E1; ENSG00000180785; TAA
MESTVLLA

SEQ ID NO: 55886 - protein, 8 aa, Homo sapiens
  Table A; Target 55886; HLA-B*37:01; OR51E1; ENSG00000180785; TAA
MESTVLLA

SEQ ID NO: 55887 - protein, 8 aa, Homo sapiens
  Table A; Target 55887; HLA-B*49:01; OR51E1; ENSG00000180785; TAA
MESTVLLA

SEQ ID NO: 55888 - protein, 9 aa, Homo sapiens
  Table A; Target 55888; HLA-A*30:01; OR51E1; ENSG00000180785; TAA
MESTVLLAM

SEQ ID NO: 55889 - protein, 9 aa, Homo sapiens
  Table A; Target 55889; HLA-B*18:01; OR51E1; ENSG00000180785; TAA
MESTVLLAM

SEQ ID NO: 55890 - protein, 9 aa, Homo sapiens
  Table A; Target 55890; HLA-B*35:01; OR51E1; ENSG00000180785; TAA
MESTVLLAM

SEQ ID NO: 55891 - protein, 9 aa, Homo sapiens
  Table A; Target 55891; HLA-B*37:01; OR51E1; ENSG00000180785; TAA
MESTVLLAM

SEQ ID NO: 55892 - protein, 9 aa, Homo sapiens
  Table A; Target 55892; HLA-B*40:01; OR51E1; ENSG00000180785; TAA
MESTVLLAM

SEQ ID NO: 55893 - protein, 9 aa, Homo sapiens
  Table A; Target 55893; HLA-B*40:02; OR51E1; ENSG00000180785; TAA
MESTVLLAM

SEQ ID NO: 55894 - protein, 9 aa, Homo sapiens
  Table A; Target 55894; HLA-B*44:02; OR51E1; ENSG00000180785; TAA
MESTVLLAM

SEQ ID NO: 55895 - protein, 9 aa, Homo sapiens
  Table A; Target 55895; HLA-B*44:03; OR51E1; ENSG00000180785; TAA
MESTVLLAM

SEQ ID NO: 55896 - protein, 9 aa, Homo sapiens
  Table A; Target 55896; HLA-B*49:01; OR51E1; ENSG00000180785; TAA
MESTVLLAM

SEQ ID NO: 55897 - protein, 9 aa, Homo sapiens
  Table A; Target 55897; HLA-C*02:02; OR51E1; ENSG00000180785; TAA
MESTVLLAM

SEQ ID NO: 55898 - protein, 9 aa, Homo sapiens
  Table A; Target 55898; HLA-C*16:04; OR51E1; ENSG00000180785; TAA
MESTVLLAM

SEQ ID NO: 55899 - protein, 11 aa, Homo sapiens
  Table A; Target 55899; HLA-B*18:01; OR51E1; ENSG00000180785; TAA
MESTVLLAMAF

SEQ ID NO: 55900 - protein, 11 aa, Homo sapiens
  Table A; Target 55900; HLA-B*44:02; OR51E1; ENSG00000180785; TAA
MESTVLLAMAF

SEQ ID NO: 55901 - protein, 8 aa, Homo sapiens
  Table A; Target 55901; HLA-C*07:01; OR51E1; ENSG00000180785; TAA
MFAIHSLS

SEQ ID NO: 55902 - protein, 9 aa, Homo sapiens
  Table A; Target 55902; HLA-A*02:01; OR51E1; ENSG00000180785; TAA
MLSGIDILI

SEQ ID NO: 55903 - protein, 9 aa, Homo sapiens
  Table A; Target 55903; HLA-A*02:03; OR51E1; ENSG00000180785; TAA
MLSGIDILI

SEQ ID NO: 55904 - protein, 9 aa, Homo sapiens
  Table A; Target 55904; HLA-A*02:04; OR51E1; ENSG00000180785; TAA
MLSGIDILI

SEQ ID NO: 55905 - protein, 9 aa, Homo sapiens
  Table A; Target 55905; HLA-A*02:07; OR51E1; ENSG00000180785; TAA
MLSGIDILI

SEQ ID NO: 55906 - protein, 9 aa, Homo sapiens
  Table A; Target 55906; HLA-A*68:02; OR51E1; ENSG00000180785; TAA
MLSGIDILI

SEQ ID NO: 55907 - protein, 9 aa, Homo sapiens
  Table A; Target 55907; HLA-B*13:02; OR51E1; ENSG00000180785; TAA
MLSGIDILI

SEQ ID NO: 55908 - protein, 9 aa, Homo sapiens
  Table A; Target 55908; HLA-B*38:01; OR51E1; ENSG00000180785; TAA
MLSGIDILI

SEQ ID NO: 55909 - protein, 9 aa, Homo sapiens
  Table A; Target 55909; HLA-C*04:01; OR51E1; ENSG00000180785; TAA
MLSGIDILI

SEQ ID NO: 55910 - protein, 11 aa, Homo sapiens
  Table A; Target 55910; HLA-B*35:03; OR51E1; ENSG00000180785; TAA
MVDPNGNESSA

SEQ ID NO: 55911 - protein, 11 aa, Homo sapiens
  Table A; Target 55911; HLA-B*54:01; OR51E1; ENSG00000180785; TAA
MVDPNGNESSA

SEQ ID NO: 55912 - protein, 8 aa, Homo sapiens
  Table A; Target 55912; HLA-A*33:01; OR51E1; ENSG00000180785; TAA
MVHRFSKR

SEQ ID NO: 55913 - protein, 8 aa, Homo sapiens
  Table A; Target 55913; HLA-B*18:01; OR51E1; ENSG00000180785; TAA
NESSATYF

SEQ ID NO: 55914 - protein, 8 aa, Homo sapiens
  Table A; Target 55914; HLA-B*37:01; OR51E1; ENSG00000180785; TAA
NESSATYF

SEQ ID NO: 55915 - protein, 8 aa, Homo sapiens
  Table A; Target 55915; HLA-B*44:02; OR51E1; ENSG00000180785; TAA
NESSATYF

SEQ ID NO: 55916 - protein, 8 aa, Homo sapiens
  Table A; Target 55916; HLA-B*44:03; OR51E1; ENSG00000180785; TAA
NESSATYF

SEQ ID NO: 55917 - protein, 9 aa, Homo sapiens
  Table A; Target 55917; HLA-B*38:01; OR51E1; ENSG00000180785; TAA
NESSATYFI

SEQ ID NO: 55918 - protein, 9 aa, Homo sapiens
  Table A; Target 55918; HLA-B*44:02; OR51E1; ENSG00000180785; TAA
NESSATYFI

SEQ ID NO: 55919 - protein, 9 aa, Homo sapiens
  Table A; Target 55919; HLA-B*44:03; OR51E1; ENSG00000180785; TAA
NESSATYFI

SEQ ID NO: 55920 - protein, 9 aa, Homo sapiens
  Table A; Target 55920; HLA-B*49:01; OR51E1; ENSG00000180785; TAA
NESSATYFI

SEQ ID NO: 55921 - protein, 10 aa, Homo sapiens
  Table A; Target 55921; HLA-A*30:01; OR51E1; ENSG00000180785; TAA
NESSATYFIL

SEQ ID NO: 55922 - protein, 9 aa, Homo sapiens
  Table A; Target 55922; HLA-A*30:02; OR51E1; ENSG00000180785; TAA
NGNESSATY

SEQ ID NO: 55923 - protein, 9 aa, Homo sapiens
  Table A; Target 55923; HLA-A*32:01; OR51E1; ENSG00000180785; TAA
NGNESSATY

SEQ ID NO: 55924 - protein, 9 aa, Homo sapiens
  Table A; Target 55924; HLA-B*15:01; OR51E1; ENSG00000180785; TAA
NGNESSATY

SEQ ID NO: 55925 - protein, 9 aa, Homo sapiens
  Table A; Target 55925; HLA-B*15:03; OR51E1; ENSG00000180785; TAA
NGNESSATY

SEQ ID NO: 55926 - protein, 9 aa, Homo sapiens
  Table A; Target 55926; HLA-B*18:01; OR51E1; ENSG00000180785; TAA
NGNESSATY

SEQ ID NO: 55927 - protein, 9 aa, Homo sapiens
  Table A; Target 55927; HLA-B*35:01; OR51E1; ENSG00000180785; TAA
NGNESSATY

SEQ ID NO: 55928 - protein, 9 aa, Homo sapiens
  Table A; Target 55928; HLA-B*39:01; OR51E1; ENSG00000180785; TAA
NGNESSATY

SEQ ID NO: 55929 - protein, 9 aa, Homo sapiens
  Table A; Target 55929; HLA-B*46:01; OR51E1; ENSG00000180785; TAA
NGNESSATY

SEQ ID NO: 55930 - protein, 9 aa, Homo sapiens
  Table A; Target 55930; HLA-C*01:02; OR51E1; ENSG00000180785; TAA
NGNESSATY

SEQ ID NO: 55931 - protein, 9 aa, Homo sapiens
  Table A; Target 55931; HLA-C*03:03; OR51E1; ENSG00000180785; TAA
NGNESSATY

SEQ ID NO: 55932 - protein, 9 aa, Homo sapiens
  Table A; Target 55932; HLA-C*07:04; OR51E1; ENSG00000180785; TAA
NGNESSATY

SEQ ID NO: 55933 - protein, 9 aa, Homo sapiens
  Table A; Target 55933; HLA-C*07:06; OR51E1; ENSG00000180785; TAA
NGNESSATY

SEQ ID NO: 55934 - protein, 9 aa, Homo sapiens
  Table A; Target 55934; HLA-C*14:02; OR51E1; ENSG00000180785; TAA
NGNESSATY

SEQ ID NO: 55935 - protein, 8 aa, Homo sapiens
  Table A; Target 55935; HLA-A*02:04; OR51E1; ENSG00000180785; TAA
NLTIIYIV

SEQ ID NO: 55936 - protein, 9 aa, Homo sapiens
  Table A; Target 55936; HLA-A*33:01; OR51E1; ENSG00000180785; TAA
NLTIIYIVR

SEQ ID NO: 55937 - protein, 9 aa, Homo sapiens
  Table A; Target 55937; HLA-A*33:03; OR51E1; ENSG00000180785; TAA
NLTIIYIVR

SEQ ID NO: 55938 - protein, 9 aa, Homo sapiens
  Table A; Target 55938; HLA-B*35:03; OR51E1; ENSG00000180785; TAA
NPIVYGVKT

SEQ ID NO: 55939 - protein, 9 aa, Homo sapiens
  Table A; Target 55939; HLA-A*68:02; OR51E1; ENSG00000180785; TAA
NVVYGLIVI

SEQ ID NO: 55940 - protein, 9 aa, Homo sapiens
  Table A; Target 55940; HLA-A*02:07; OR51E1; ENSG00000180785; TAA
PLPVFIKQL

SEQ ID NO: 55941 - protein, 9 aa, Homo sapiens
  Table A; Target 55941; HLA-A*02:07; OR51E1; ENSG00000180785; TAA
PLPVILANI

SEQ ID NO: 55942 - protein, 9 aa, Homo sapiens
  Table A; Target 55942; HLA-A*24:02; OR51E1; ENSG00000180785; TAA
PLPVILANI

SEQ ID NO: 55943 - protein, 9 aa, Homo sapiens
  Table A; Target 55943; HLA-B*35:01; OR51E1; ENSG00000180785; TAA
PPVLNPIVY

SEQ ID NO: 55944 - protein, 9 aa, Homo sapiens
  Table A; Target 55944; HLA-C*04:01; OR51E1; ENSG00000180785; TAA
PPVLNPIVY

SEQ ID NO: 55945 - protein, 8 aa, Homo sapiens
  Table A; Target 55945; HLA-A*30:02; OR51E1; ENSG00000180785; TAA
PVLNPIVY

SEQ ID NO: 55946 - protein, 9 aa, Homo sapiens
  Table A; Target 55946; HLA-B*07:02; OR51E1; ENSG00000180785; TAA
QAKAFGTCV

SEQ ID NO: 55947 - protein, 9 aa, Homo sapiens
  Table A; Target 55947; HLA-B*08:01; OR51E1; ENSG00000180785; TAA
QAKAFGTCV

SEQ ID NO: 55948 - protein, 9 aa, Homo sapiens
  Table A; Target 55948; HLA-B*13:02; OR51E1; ENSG00000180785; TAA
QAKAFGTCV

SEQ ID NO: 55949 - protein, 9 aa, Homo sapiens
  Table A; Target 55949; HLA-B*40:02; OR51E1; ENSG00000180785; TAA
QAKAFGTCV

SEQ ID NO: 55950 - protein, 9 aa, Homo sapiens
  Table A; Target 55950; HLA-B*46:01; OR51E1; ENSG00000180785; TAA
QAKAFGTCV

SEQ ID NO: 55951 - protein, 9 aa, Homo sapiens
  Table A; Target 55951; HLA-B*51:01; OR51E1; ENSG00000180785; TAA
QAKAFGTCV

SEQ ID NO: 55952 - protein, 9 aa, Homo sapiens
  Table A; Target 55952; HLA-B*54:01; OR51E1; ENSG00000180785; TAA
QAKAFGTCV

SEQ ID NO: 55953 - protein, 9 aa, Homo sapiens
  Table A; Target 55953; HLA-B*56:01; OR51E1; ENSG00000180785; TAA
QAKAFGTCV

SEQ ID NO: 55954 - protein, 9 aa, Homo sapiens
  Table A; Target 55954; HLA-C*02:02; OR51E1; ENSG00000180785; TAA
QAKAFGTCV

SEQ ID NO: 55955 - protein, 9 aa, Homo sapiens
  Table A; Target 55955; HLA-C*07:02; OR51E1; ENSG00000180785; TAA
QAKAFGTCV

SEQ ID NO: 55956 - protein, 9 aa, Homo sapiens
  Table A; Target 55956; HLA-C*12:03; OR51E1; ENSG00000180785; TAA
QAKAFGTCV

SEQ ID NO: 55957 - protein, 9 aa, Homo sapiens
  Table A; Target 55957; HLA-C*16:02; OR51E1; ENSG00000180785; TAA
QAKAFGTCV

SEQ ID NO: 55958 - protein, 9 aa, Homo sapiens
  Table A; Target 55958; HLA-B*35:03; OR51E1; ENSG00000180785; TAA
QFDACLLQM

SEQ ID NO: 55959 - protein, 9 aa, Homo sapiens
  Table A; Target 55959; HLA-C*04:01; OR51E1; ENSG00000180785; TAA
QFDACLLQM

SEQ ID NO: 55960 - protein, 8 aa, Homo sapiens
  Table A; Target 55960; HLA-A*02:01; OR51E1; ENSG00000180785; TAA
QMFAIHSL

SEQ ID NO: 55961 - protein, 8 aa, Homo sapiens
  Table A; Target 55961; HLA-A*02:03; OR51E1; ENSG00000180785; TAA
QMFAIHSL

SEQ ID NO: 55962 - protein, 8 aa, Homo sapiens
  Table A; Target 55962; HLA-A*02:04; OR51E1; ENSG00000180785; TAA
QMFAIHSL

SEQ ID NO: 55963 - protein, 8 aa, Homo sapiens
  Table A; Target 55963; HLA-A*32:01; OR51E1; ENSG00000180785; TAA
QMFAIHSL

SEQ ID NO: 55964 - protein, 8 aa, Homo sapiens
  Table A; Target 55964; HLA-B*08:01; OR51E1; ENSG00000180785; TAA
QMFAIHSL

SEQ ID NO: 55965 - protein, 8 aa, Homo sapiens
  Table A; Target 55965; HLA-B*13:02; OR51E1; ENSG00000180785; TAA
QMFAIHSL

SEQ ID NO: 55966 - protein, 8 aa, Homo sapiens
  Table A; Target 55966; HLA-B*15:01; OR51E1; ENSG00000180785; TAA
QMFAIHSL

SEQ ID NO: 55967 - protein, 8 aa, Homo sapiens
  Table A; Target 55967; HLA-B*15:03; OR51E1; ENSG00000180785; TAA
QMFAIHSL

SEQ ID NO: 55968 - protein, 8 aa, Homo sapiens
  Table A; Target 55968; HLA-B*18:01; OR51E1; ENSG00000180785; TAA
QMFAIHSL

SEQ ID NO: 55969 - protein, 8 aa, Homo sapiens
  Table A; Target 55969; HLA-B*37:01; OR51E1; ENSG00000180785; TAA
QMFAIHSL

SEQ ID NO: 55970 - protein, 8 aa, Homo sapiens
  Table A; Target 55970; HLA-B*40:02; OR51E1; ENSG00000180785; TAA
QMFAIHSL

SEQ ID NO: 55971 - protein, 8 aa, Homo sapiens
  Table A; Target 55971; HLA-B*51:01; OR51E1; ENSG00000180785; TAA
QMFAIHSL

SEQ ID NO: 55972 - protein, 8 aa, Homo sapiens
  Table A; Target 55972; HLA-C*07:04; OR51E1; ENSG00000180785; TAA
QMFAIHSL

SEQ ID NO: 55973 - protein, 8 aa, Homo sapiens
  Table A; Target 55973; HLA-B*37:01; OR51E1; ENSG00000180785; TAA
RDSPLPVI

SEQ ID NO: 55974 - protein, 9 aa, Homo sapiens
  Table A; Target 55974; HLA-A*30:01; OR51E1; ENSG00000180785; TAA
RDSPLPVIL

SEQ ID NO: 55975 - protein, 9 aa, Homo sapiens
  Table A; Target 55975; HLA-B*37:01; OR51E1; ENSG00000180785; TAA
RDSPLPVIL

SEQ ID NO: 55976 - protein, 9 aa, Homo sapiens
  Table A; Target 55976; HLA-B*38:01; OR51E1; ENSG00000180785; TAA
RDSPLPVIL

SEQ ID NO: 55977 - protein, 9 aa, Homo sapiens
  Table A; Target 55977; HLA-B*40:01; OR51E1; ENSG00000180785; TAA
RDSPLPVIL

SEQ ID NO: 55978 - protein, 9 aa, Homo sapiens
  Table A; Target 55978; HLA-B*40:02; OR51E1; ENSG00000180785; TAA
RDSPLPVIL

SEQ ID NO: 55979 - protein, 9 aa, Homo sapiens
  Table A; Target 55979; HLA-C*06:02; OR51E1; ENSG00000180785; TAA
RDSPLPVIL

SEQ ID NO: 55980 - protein, 9 aa, Homo sapiens
  Table A; Target 55980; HLA-C*07:04; OR51E1; ENSG00000180785; TAA
RDSPLPVIL

SEQ ID NO: 55981 - protein, 9 aa, Homo sapiens
  Table A; Target 55981; HLA-C*12:03; OR51E1; ENSG00000180785; TAA
RDSPLPVIL

SEQ ID NO: 55982 - protein, 8 aa, Homo sapiens
  Table A; Target 55982; HLA-B*18:01; OR51E1; ENSG00000180785; TAA
REAQAKAF

SEQ ID NO: 55983 - protein, 8 aa, Homo sapiens
  Table A; Target 55983; HLA-B*37:01; OR51E1; ENSG00000180785; TAA
REAQAKAF

SEQ ID NO: 55984 - protein, 8 aa, Homo sapiens
  Table A; Target 55984; HLA-B*44:02; OR51E1; ENSG00000180785; TAA
REAQAKAF

SEQ ID NO: 55985 - protein, 8 aa, Homo sapiens
  Table A; Target 55985; HLA-B*44:03; OR51E1; ENSG00000180785; TAA
REAQAKAF

SEQ ID NO: 55986 - protein, 8 aa, Homo sapiens
  Table A; Target 55986; HLA-A*02:04; OR51E1; ENSG00000180785; TAA
RILRLFHV

SEQ ID NO: 55987 - protein, 9 aa, Homo sapiens
  Table A; Target 55987; HLA-A*02:03; OR51E1; ENSG00000180785; TAA
RLFHVATHA

SEQ ID NO: 55988 - protein, 9 aa, Homo sapiens
  Table A; Target 55988; HLA-A*02:04; OR51E1; ENSG00000180785; TAA
RLFHVATHA

SEQ ID NO: 55989 - protein, 9 aa, Homo sapiens
  Table A; Target 55989; HLA-A*02:07; OR51E1; ENSG00000180785; TAA
RLFHVATHA

SEQ ID NO: 55990 - protein, 9 aa, Homo sapiens
  Table A; Target 55990; HLA-A*01:01; OR51E1; ENSG00000180785; TAA
RSNILSHSY

SEQ ID NO: 55991 - protein, 9 aa, Homo sapiens
  Table A; Target 55991; HLA-A*03:02; OR51E1; ENSG00000180785; TAA
RSNILSHSY

SEQ ID NO: 55992 - protein, 9 aa, Homo sapiens
  Table A; Target 55992; HLA-A*29:02; OR51E1; ENSG00000180785; TAA
RSNILSHSY

SEQ ID NO: 55993 - protein, 9 aa, Homo sapiens
  Table A; Target 55993; HLA-A*30:02; OR51E1; ENSG00000180785; TAA
RSNILSHSY

SEQ ID NO: 55994 - protein, 9 aa, Homo sapiens
  Table A; Target 55994; HLA-A*31:01; OR51E1; ENSG00000180785; TAA
RSNILSHSY

SEQ ID NO: 55995 - protein, 9 aa, Homo sapiens
  Table A; Target 55995; HLA-A*32:01; OR51E1; ENSG00000180785; TAA
RSNILSHSY

SEQ ID NO: 55996 - protein, 9 aa, Homo sapiens
  Table A; Target 55996; HLA-B*15:01; OR51E1; ENSG00000180785; TAA
RSNILSHSY

SEQ ID NO: 55997 - protein, 9 aa, Homo sapiens
  Table A; Target 55997; HLA-B*15:03; OR51E1; ENSG00000180785; TAA
RSNILSHSY

SEQ ID NO: 55998 - protein, 9 aa, Homo sapiens
  Table A; Target 55998; HLA-B*27:02; OR51E1; ENSG00000180785; TAA
RSNILSHSY

SEQ ID NO: 55999 - protein, 9 aa, Homo sapiens
  Table A; Target 55999; HLA-B*44:02; OR51E1; ENSG00000180785; TAA
RSNILSHSY

SEQ ID NO: 56000 - protein, 9 aa, Homo sapiens
  Table A; Target 56000; HLA-B*44:03; OR51E1; ENSG00000180785; TAA
RSNILSHSY

SEQ ID NO: 56001 - protein, 9 aa, Homo sapiens
  Table A; Target 56001; HLA-B*46:01; OR51E1; ENSG00000180785; TAA
RSNILSHSY

SEQ ID NO: 56002 - protein, 9 aa, Homo sapiens
  Table A; Target 56002; HLA-B*57:01; OR51E1; ENSG00000180785; TAA
RSNILSHSY

SEQ ID NO: 56003 - protein, 9 aa, Homo sapiens
  Table A; Target 56003; HLA-B*58:01; OR51E1; ENSG00000180785; TAA
RSNILSHSY

SEQ ID NO: 56004 - protein, 9 aa, Homo sapiens
  Table A; Target 56004; HLA-C*02:02; OR51E1; ENSG00000180785; TAA
RSNILSHSY

SEQ ID NO: 56005 - protein, 9 aa, Homo sapiens
  Table A; Target 56005; HLA-C*16:01; OR51E1; ENSG00000180785; TAA
RSNILSHSY

SEQ ID NO: 56006 - protein, 9 aa, Homo sapiens
  Table A; Target 56006; HLA-C*16:02; OR51E1; ENSG00000180785; TAA
RSNILSHSY

SEQ ID NO: 56007 - protein, 9 aa, Homo sapiens
  Table A; Target 56007; HLA-C*16:04; OR51E1; ENSG00000180785; TAA
RSNILSHSY

SEQ ID NO: 56008 - protein, 11 aa, Homo sapiens
  Table A; Target 56008; HLA-A*01:01; OR51E1; ENSG00000180785; TAA
RTEHSLHEPMY

SEQ ID NO: 56009 - protein, 8 aa, Homo sapiens
  Table A; Target 56009; HLA-B*37:01; OR51E1; ENSG00000180785; TAA
RVNVVYGL

SEQ ID NO: 56010 - protein, 9 aa, Homo sapiens
  Table A; Target 56010; HLA-B*54:01; OR51E1; ENSG00000180785; TAA
RVTKIGVAA

SEQ ID NO: 56011 - protein, 9 aa, Homo sapiens
  Table A; Target 56011; HLA-B*56:01; OR51E1; ENSG00000180785; TAA
RVTKIGVAA

SEQ ID NO: 56012 - protein, 9 aa, Homo sapiens
  Table A; Target 56012; HLA-A*23:01; OR51E1; ENSG00000180785; TAA
RYVAICHPL

SEQ ID NO: 56013 - protein, 9 aa, Homo sapiens
  Table A; Target 56013; HLA-A*31:01; OR51E1; ENSG00000180785; TAA
RYVAICHPL

SEQ ID NO: 56014 - protein, 9 aa, Homo sapiens
  Table A; Target 56014; HLA-C*06:02; OR51E1; ENSG00000180785; TAA
RYVAICHPL

SEQ ID NO: 56015 - protein, 9 aa, Homo sapiens
  Table A; Target 56015; HLA-C*07:01; OR51E1; ENSG00000180785; TAA
RYVAICHPL

SEQ ID NO: 56016 - protein, 8 aa, Homo sapiens
  Table A; Target 56016; HLA-C*03:04; OR51E1; ENSG00000180785; TAA
SAIGLDSL

SEQ ID NO: 56017 - protein, 9 aa, Homo sapiens
  Table A; Target 56017; HLA-B*35:03; OR51E1; ENSG00000180785; TAA
SAIGLDSLL

SEQ ID NO: 56018 - protein, 9 aa, Homo sapiens
  Table A; Target 56018; HLA-B*38:01; OR51E1; ENSG00000180785; TAA
SAIGLDSLL

SEQ ID NO: 56019 - protein, 9 aa, Homo sapiens
  Table A; Target 56019; HLA-B*39:01; OR51E1; ENSG00000180785; TAA
SAIGLDSLL

SEQ ID NO: 56020 - protein, 9 aa, Homo sapiens
  Table A; Target 56020; HLA-C*02:02; OR51E1; ENSG00000180785; TAA
SAIGLDSLL

SEQ ID NO: 56021 - protein, 9 aa, Homo sapiens
  Table A; Target 56021; HLA-C*05:01; OR51E1; ENSG00000180785; TAA
SAIGLDSLL

SEQ ID NO: 56022 - protein, 8 aa, Homo sapiens
  Table A; Target 56022; HLA-B*51:01; OR51E1; ENSG00000180785; TAA
SATYFILI

SEQ ID NO: 56023 - protein, 9 aa, Homo sapiens
  Table A; Target 56023; HLA-B*54:01; OR51E1; ENSG00000180785; TAA
SGIDILIST

SEQ ID NO: 56024 - protein, 9 aa, Homo sapiens
  Table A; Target 56024; HLA-B*56:01; OR51E1; ENSG00000180785; TAA
SGIDILIST

SEQ ID NO: 56025 - protein, 8 aa, Homo sapiens
  Table A; Target 56025; HLA-B*08:01; OR51E1; ENSG00000180785; TAA
SGMESTVL

SEQ ID NO: 56026 - protein, 8 aa, Homo sapiens
  Table A; Target 56026; HLA-B*15:01; OR51E1; ENSG00000180785; TAA
SGMESTVL

SEQ ID NO: 56027 - protein, 8 aa, Homo sapiens
  Table A; Target 56027; HLA-B*15:03; OR51E1; ENSG00000180785; TAA
SGMESTVL

SEQ ID NO: 56028 - protein, 8 aa, Homo sapiens
  Table A; Target 56028; HLA-B*35:03; OR51E1; ENSG00000180785; TAA
SGMESTVL

SEQ ID NO: 56029 - protein, 8 aa, Homo sapiens
  Table A; Target 56029; HLA-C*03:03; OR51E1; ENSG00000180785; TAA
SGMESTVL

SEQ ID NO: 56030 - protein, 8 aa, Homo sapiens
  Table A; Target 56030; HLA-C*03:04; OR51E1; ENSG00000180785; TAA
SGMESTVL

SEQ ID NO: 56031 - protein, 8 aa, Homo sapiens
  Table A; Target 56031; HLA-C*05:01; OR51E1; ENSG00000180785; TAA
SGMESTVL

SEQ ID NO: 56032 - protein, 9 aa, Homo sapiens
  Table A; Target 56032; HLA-A*02:01; OR51E1; ENSG00000180785; TAA
SGMESTVLL

SEQ ID NO: 56033 - protein, 9 aa, Homo sapiens
  Table A; Target 56033; HLA-A*02:04; OR51E1; ENSG00000180785; TAA
SGMESTVLL

SEQ ID NO: 56034 - protein, 9 aa, Homo sapiens
  Table A; Target 56034; HLA-A*02:07; OR51E1; ENSG00000180785; TAA
SGMESTVLL

SEQ ID NO: 56035 - protein, 9 aa, Homo sapiens
  Table A; Target 56035; HLA-A*23:01; OR51E1; ENSG00000180785; TAA
SGMESTVLL

SEQ ID NO: 56036 - protein, 9 aa, Homo sapiens
  Table A; Target 56036; HLA-A*30:01; OR51E1; ENSG00000180785; TAA
SGMESTVLL

SEQ ID NO: 56037 - protein, 9 aa, Homo sapiens
  Table A; Target 56037; HLA-B*35:03; OR51E1; ENSG00000180785; TAA
SGMESTVLL

SEQ ID NO: 56038 - protein, 9 aa, Homo sapiens
  Table A; Target 56038; HLA-B*38:01; OR51E1; ENSG00000180785; TAA
SGMESTVLL

SEQ ID NO: 56039 - protein, 9 aa, Homo sapiens
  Table A; Target 56039; HLA-B*40:01; OR51E1; ENSG00000180785; TAA
SGMESTVLL

SEQ ID NO: 56040 - protein, 9 aa, Homo sapiens
  Table A; Target 56040; HLA-C*01:02; OR51E1; ENSG00000180785; TAA
SGMESTVLL

SEQ ID NO: 56041 - protein, 9 aa, Homo sapiens
  Table A; Target 56041; HLA-C*02:02; OR51E1; ENSG00000180785; TAA
SGMESTVLL

SEQ ID NO: 56042 - protein, 9 aa, Homo sapiens
  Table A; Target 56042; HLA-C*03:03; OR51E1; ENSG00000180785; TAA
SGMESTVLL

SEQ ID NO: 56043 - protein, 9 aa, Homo sapiens
  Table A; Target 56043; HLA-C*03:04; OR51E1; ENSG00000180785; TAA
SGMESTVLL

SEQ ID NO: 56044 - protein, 9 aa, Homo sapiens
  Table A; Target 56044; HLA-C*05:01; OR51E1; ENSG00000180785; TAA
SGMESTVLL

SEQ ID NO: 56045 - protein, 9 aa, Homo sapiens
  Table A; Target 56045; HLA-C*07:04; OR51E1; ENSG00000180785; TAA
SGMESTVLL

SEQ ID NO: 56046 - protein, 9 aa, Homo sapiens
  Table A; Target 56046; HLA-C*14:02; OR51E1; ENSG00000180785; TAA
SGMESTVLL

SEQ ID NO: 56047 - protein, 8 aa, Homo sapiens
  Table A; Target 56047; HLA-A*02:03; OR51E1; ENSG00000180785; TAA
SLHEPMYI

SEQ ID NO: 56048 - protein, 8 aa, Homo sapiens
  Table A; Target 56048; HLA-B*13:02; OR51E1; ENSG00000180785; TAA
SLHEPMYI

SEQ ID NO: 56049 - protein, 10 aa, Homo sapiens
  Table A; Target 56049; HLA-A*02:01; OR51E1; ENSG00000180785; TAA
SLHEPMYIFL

SEQ ID NO: 56050 - protein, 10 aa, Homo sapiens
  Table A; Target 56050; HLA-A*02:03; OR51E1; ENSG00000180785; TAA
SLHEPMYIFL

SEQ ID NO: 56051 - protein, 10 aa, Homo sapiens
  Table A; Target 56051; HLA-A*02:04; OR51E1; ENSG00000180785; TAA
SLHEPMYIFL

SEQ ID NO: 56052 - protein, 10 aa, Homo sapiens
  Table A; Target 56052; HLA-A*02:07; OR51E1; ENSG00000180785; TAA
SLHEPMYIFL

SEQ ID NO: 56053 - protein, 8 aa, Homo sapiens
  Table A; Target 56053; HLA-A*29:02; OR51E1; ENSG00000180785; TAA
SLLISFSY

SEQ ID NO: 56054 - protein, 9 aa, Homo sapiens
  Table A; Target 56054; HLA-A*02:01; OR51E1; ENSG00000180785; TAA
SLLISFSYL

SEQ ID NO: 56055 - protein, 9 aa, Homo sapiens
  Table A; Target 56055; HLA-A*02:04; OR51E1; ENSG00000180785; TAA
SLLISFSYL

SEQ ID NO: 56056 - protein, 9 aa, Homo sapiens
  Table A; Target 56056; HLA-A*02:07; OR51E1; ENSG00000180785; TAA
SLLISFSYL

SEQ ID NO: 56057 - protein, 9 aa, Homo sapiens
  Table A; Target 56057; HLA-A*02:01; OR51E1; ENSG00000180785; TAA
SLSGMESTV

SEQ ID NO: 56058 - protein, 9 aa, Homo sapiens
  Table A; Target 56058; HLA-A*02:03; OR51E1; ENSG00000180785; TAA
SLSGMESTV

SEQ ID NO: 56059 - protein, 9 aa, Homo sapiens
  Table A; Target 56059; HLA-B*13:02; OR51E1; ENSG00000180785; TAA
SLSGMESTV

SEQ ID NO: 56060 - protein, 9 aa, Homo sapiens
  Table A; Target 56060; HLA-B*55:01; OR51E1; ENSG00000180785; TAA
SLSGMESTV

SEQ ID NO: 56061 - protein, 11 aa, Homo sapiens
  Table A; Target 56061; HLA-A*02:04; OR51E1; ENSG00000180785; TAA
SLSGMESTVLL

SEQ ID NO: 56062 - protein, 8 aa, Homo sapiens
  Table A; Target 56062; HLA-A*02:04; OR51E1; ENSG00000180785; TAA
SLYLIAVL

SEQ ID NO: 56063 - protein, 8 aa, Homo sapiens
  Table A; Target 56063; HLA-B*08:01; OR51E1; ENSG00000180785; TAA
SLYLIAVL

SEQ ID NO: 56064 - protein, 9 aa, Homo sapiens
  Table A; Target 56064; HLA-A*24:02; OR51E1; ENSG00000180785; TAA
SMPKMLAIF

SEQ ID NO: 56065 - protein, 9 aa, Homo sapiens
  Table A; Target 56065; HLA-A*31:01; OR51E1; ENSG00000180785; TAA
SMVHRFSKR

SEQ ID NO: 56066 - protein, 8 aa, Homo sapiens
  Table A; Target 56066; HLA-A*29:02; OR51E1; ENSG00000180785; TAA
SNILSHSY

SEQ ID NO: 56067 - protein, 8 aa, Homo sapiens
  Table A; Target 56067; HLA-A*30:02; OR51E1; ENSG00000180785; TAA
SNILSHSY

SEQ ID NO: 56068 - protein, 8 aa, Homo sapiens
  Table A; Target 56068; HLA-A*32:01; OR51E1; ENSG00000180785; TAA
SNILSHSY

SEQ ID NO: 56069 - protein, 8 aa, Homo sapiens
  Table A; Target 56069; HLA-B*15:01; OR51E1; ENSG00000180785; TAA
SNILSHSY

SEQ ID NO: 56070 - protein, 8 aa, Homo sapiens
  Table A; Target 56070; HLA-B*15:03; OR51E1; ENSG00000180785; TAA
SNILSHSY

SEQ ID NO: 56071 - protein, 8 aa, Homo sapiens
  Table A; Target 56071; HLA-B*18:01; OR51E1; ENSG00000180785; TAA
SNILSHSY

SEQ ID NO: 56072 - protein, 8 aa, Homo sapiens
  Table A; Target 56072; HLA-B*37:01; OR51E1; ENSG00000180785; TAA
SNILSHSY

SEQ ID NO: 56073 - protein, 8 aa, Homo sapiens
  Table A; Target 56073; HLA-B*44:02; OR51E1; ENSG00000180785; TAA
SNILSHSY

SEQ ID NO: 56074 - protein, 8 aa, Homo sapiens
  Table A; Target 56074; HLA-B*44:03; OR51E1; ENSG00000180785; TAA
SNILSHSY

SEQ ID NO: 56075 - protein, 8 aa, Homo sapiens
  Table A; Target 56075; HLA-C*07:01; OR51E1; ENSG00000180785; TAA
SNILSHSY

SEQ ID NO: 56076 - protein, 8 aa, Homo sapiens
  Table A; Target 56076; HLA-C*14:02; OR51E1; ENSG00000180785; TAA
SNILSHSY

SEQ ID NO: 56077 - protein, 8 aa, Homo sapiens
  Table A; Target 56077; HLA-C*16:01; OR51E1; ENSG00000180785; TAA
SNILSHSY

SEQ ID NO: 56078 - protein, 8 aa, Homo sapiens
  Table A; Target 56078; HLA-B*54:01; OR51E1; ENSG00000180785; TAA
SPLPVILA

SEQ ID NO: 56079 - protein, 8 aa, Homo sapiens
  Table A; Target 56079; HLA-B*55:01; OR51E1; ENSG00000180785; TAA
SPLPVILA

SEQ ID NO: 56080 - protein, 8 aa, Homo sapiens
  Table A; Target 56080; HLA-B*56:01; OR51E1; ENSG00000180785; TAA
SPLPVILA

SEQ ID NO: 56081 - protein, 9 aa, Homo sapiens
  Table A; Target 56081; HLA-B*54:01; OR51E1; ENSG00000180785; TAA
SPLPVILAN

SEQ ID NO: 56082 - protein, 9 aa, Homo sapiens
  Table A; Target 56082; HLA-B*56:01; OR51E1; ENSG00000180785; TAA
SPLPVILAN

SEQ ID NO: 56083 - protein, 10 aa, Homo sapiens
  Table A; Target 56083; HLA-A*23:01; OR51E1; ENSG00000180785; TAA
SPLPVILANI

SEQ ID NO: 56084 - protein, 10 aa, Homo sapiens
  Table A; Target 56084; HLA-B*51:01; OR51E1; ENSG00000180785; TAA
SPLPVILANI

SEQ ID NO: 56085 - protein, 10 aa, Homo sapiens
  Table A; Target 56085; HLA-B*56:01; OR51E1; ENSG00000180785; TAA
SPLPVILANI

SEQ ID NO: 56086 - protein, 11 aa, Homo sapiens
  Table A; Target 56086; HLA-A*29:02; OR51E1; ENSG00000180785; TAA
SPLPVILANIY

SEQ ID NO: 56087 - protein, 11 aa, Homo sapiens
  Table A; Target 56087; HLA-A*30:02; OR51E1; ENSG00000180785; TAA
SPLPVILANIY

SEQ ID NO: 56088 - protein, 11 aa, Homo sapiens
  Table A; Target 56088; HLA-B*35:01; OR51E1; ENSG00000180785; TAA
SPLPVILANIY

SEQ ID NO: 56089 - protein, 9 aa, Homo sapiens
  Table A; Target 56089; HLA-A*68:02; OR51E1; ENSG00000180785; TAA
SSATYFILI

SEQ ID NO: 56090 - protein, 9 aa, Homo sapiens
  Table A; Target 56090; HLA-A*25:01; OR51E1; ENSG00000180785; TAA
SSMPKMLAI

SEQ ID NO: 56091 - protein, 9 aa, Homo sapiens
  Table A; Target 56091; HLA-B*08:01; OR51E1; ENSG00000180785; TAA
SSMPKMLAI

SEQ ID NO: 56092 - protein, 9 aa, Homo sapiens
  Table A; Target 56092; HLA-B*13:02; OR51E1; ENSG00000180785; TAA
SSMPKMLAI

SEQ ID NO: 56093 - protein, 9 aa, Homo sapiens
  Table A; Target 56093; HLA-B*58:01; OR51E1; ENSG00000180785; TAA
SSMPKMLAI

SEQ ID NO: 56094 - protein, 11 aa, Homo sapiens
  Table A; Target 56094; HLA-B*57:01; OR51E1; ENSG00000180785; TAA
SSMPKMLAIFW

SEQ ID NO: 56095 - protein, 9 aa, Homo sapiens
  Table A; Target 56095; HLA-A*68:02; OR51E1; ENSG00000180785; TAA
STSSMPKML

SEQ ID NO: 56096 - protein, 9 aa, Homo sapiens
  Table A; Target 56096; HLA-B*07:02; OR51E1; ENSG00000180785; TAA
STSSMPKML

SEQ ID NO: 56097 - protein, 9 aa, Homo sapiens
  Table A; Target 56097; HLA-B*27:05; OR51E1; ENSG00000180785; TAA
STSSMPKML

SEQ ID NO: 56098 - protein, 9 aa, Homo sapiens
  Table A; Target 56098; HLA-C*04:01; OR51E1; ENSG00000180785; TAA
STSSMPKML

SEQ ID NO: 56099 - protein, 9 aa, Homo sapiens
  Table A; Target 56099; HLA-C*06:02; OR51E1; ENSG00000180785; TAA
STSSMPKML

SEQ ID NO: 56100 - protein, 9 aa, Homo sapiens
  Table A; Target 56100; HLA-C*12:03; OR51E1; ENSG00000180785; TAA
STSSMPKML

SEQ ID NO: 56101 - protein, 9 aa, Homo sapiens
  Table A; Target 56101; HLA-C*16:01; OR51E1; ENSG00000180785; TAA
STSSMPKML

SEQ ID NO: 56102 - protein, 9 aa, Homo sapiens
  Table A; Target 56102; HLA-C*16:02; OR51E1; ENSG00000180785; TAA
STSSMPKML

SEQ ID NO: 56103 - protein, 9 aa, Homo sapiens
  Table A; Target 56103; HLA-B*57:01; OR51E1; ENSG00000180785; TAA
STVLLAMAF

SEQ ID NO: 56104 - protein, 9 aa, Homo sapiens
  Table A; Target 56104; HLA-C*07:01; OR51E1; ENSG00000180785; TAA
SYCLHQDVM

SEQ ID NO: 56105 - protein, 9 aa, Homo sapiens
  Table A; Target 56105; HLA-A*23:01; OR51E1; ENSG00000180785; TAA
SYLLILKTV

SEQ ID NO: 56106 - protein, 9 aa, Homo sapiens
  Table A; Target 56106; HLA-A*24:02; OR51E1; ENSG00000180785; TAA
SYLLILKTV

SEQ ID NO: 56107 - protein, 10 aa, Homo sapiens
  Table A; Target 56107; HLA-A*23:01; OR51E1; ENSG00000180785; TAA
SYLLILKTVL

SEQ ID NO: 56108 - protein, 10 aa, Homo sapiens
  Table A; Target 56108; HLA-A*24:02; OR51E1; ENSG00000180785; TAA
SYLLILKTVL

SEQ ID NO: 56109 - protein, 9 aa, Homo sapiens
  Table A; Target 56109; HLA-A*30:01; OR51E1; ENSG00000180785; TAA
TEHSLHEPM

SEQ ID NO: 56110 - protein, 9 aa, Homo sapiens
  Table A; Target 56110; HLA-B*18:01; OR51E1; ENSG00000180785; TAA
TEHSLHEPM

SEQ ID NO: 56111 - protein, 9 aa, Homo sapiens
  Table A; Target 56111; HLA-B*37:01; OR51E1; ENSG00000180785; TAA
TEHSLHEPM

SEQ ID NO: 56112 - protein, 9 aa, Homo sapiens
  Table A; Target 56112; HLA-B*40:01; OR51E1; ENSG00000180785; TAA
TEHSLHEPM

SEQ ID NO: 56113 - protein, 9 aa, Homo sapiens
  Table A; Target 56113; HLA-B*40:02; OR51E1; ENSG00000180785; TAA
TEHSLHEPM

SEQ ID NO: 56114 - protein, 9 aa, Homo sapiens
  Table A; Target 56114; HLA-C*06:02; OR51E1; ENSG00000180785; TAA
TEHSLHEPM

SEQ ID NO: 56115 - protein, 9 aa, Homo sapiens
  Table A; Target 56115; HLA-C*07:01; OR51E1; ENSG00000180785; TAA
TEHSLHEPM

SEQ ID NO: 56116 - protein, 9 aa, Homo sapiens
  Table A; Target 56116; HLA-C*07:04; OR51E1; ENSG00000180785; TAA
TEHSLHEPM

SEQ ID NO: 56117 - protein, 10 aa, Homo sapiens
  Table A; Target 56117; HLA-A*30:02; OR51E1; ENSG00000180785; TAA
TEHSLHEPMY

SEQ ID NO: 56118 - protein, 10 aa, Homo sapiens
  Table A; Target 56118; HLA-B*44:02; OR51E1; ENSG00000180785; TAA
TEHSLHEPMY

SEQ ID NO: 56119 - protein, 10 aa, Homo sapiens
  Table A; Target 56119; HLA-B*44:03; OR51E1; ENSG00000180785; TAA
TEHSLHEPMY

SEQ ID NO: 56120 - protein, 9 aa, Homo sapiens
  Table A; Target 56120; HLA-A*68:02; OR51E1; ENSG00000180785; TAA
TKIGVAAVV

SEQ ID NO: 56121 - protein, 9 aa, Homo sapiens
  Table A; Target 56121; HLA-B*15:03; OR51E1; ENSG00000180785; TAA
TKIGVAAVV

SEQ ID NO: 56122 - protein, 10 aa, Homo sapiens
  Table A; Target 56122; HLA-A*02:07; OR51E1; ENSG00000180785; TAA
TLPRVTKIGV

SEQ ID NO: 56123 - protein, 9 aa, Homo sapiens
  Table A; Target 56123; HLA-B*27:02; OR51E1; ENSG00000180785; TAA
TREAQAKAF

SEQ ID NO: 56124 - protein, 9 aa, Homo sapiens
  Table A; Target 56124; HLA-B*27:05; OR51E1; ENSG00000180785; TAA
TREAQAKAF

SEQ ID NO: 56125 - protein, 9 aa, Homo sapiens
  Table A; Target 56125; HLA-B*38:01; OR51E1; ENSG00000180785; TAA
TREAQAKAF

SEQ ID NO: 56126 - protein, 9 aa, Homo sapiens
  Table A; Target 56126; HLA-C*06:02; OR51E1; ENSG00000180785; TAA
TREAQAKAF

SEQ ID NO: 56127 - protein, 9 aa, Homo sapiens
  Table A; Target 56127; HLA-C*07:01; OR51E1; ENSG00000180785; TAA
TREAQAKAF

SEQ ID NO: 56128 - protein, 9 aa, Homo sapiens
  Table A; Target 56128; HLA-C*16:04; OR51E1; ENSG00000180785; TAA
TREAQAKAF

SEQ ID NO: 56129 - protein, 9 aa, Homo sapiens
  Table A; Target 56129; HLA-B*35:03; OR51E1; ENSG00000180785; TAA
TTIQFDACL

SEQ ID NO: 56130 - protein, 10 aa, Homo sapiens
  Table A; Target 56130; HLA-A*68:02; OR51E1; ENSG00000180785; TAA
TTIQFDACLL

SEQ ID NO: 56131 - protein, 10 aa, Homo sapiens
  Table A; Target 56131; HLA-C*06:02; OR51E1; ENSG00000180785; TAA
TTIQFDACLL

SEQ ID NO: 56132 - protein, 9 aa, Homo sapiens
  Table A; Target 56132; HLA-B*54:01; OR51E1; ENSG00000180785; TAA
TVLGLTREA

SEQ ID NO: 56133 - protein, 9 aa, Homo sapiens
  Table A; Target 56133; HLA-B*56:01; OR51E1; ENSG00000180785; TAA
TVLGLTREA

SEQ ID NO: 56134 - protein, 8 aa, Homo sapiens
  Table A; Target 56134; HLA-B*37:01; OR51E1; ENSG00000180785; TAA
TVLLAMAF

SEQ ID NO: 56135 - protein, 10 aa, Homo sapiens
  Table A; Target 56135; HLA-B*27:02; OR51E1; ENSG00000180785; TAA
TVLLAMAFDR

SEQ ID NO: 56136 - protein, 8 aa, Homo sapiens
  Table A; Target 56136; HLA-A*02:01; OR51E1; ENSG00000180785; TAA
TVLTLPRV

SEQ ID NO: 56137 - protein, 8 aa, Homo sapiens
  Table A; Target 56137; HLA-A*02:04; OR51E1; ENSG00000180785; TAA
TVLTLPRV

SEQ ID NO: 56138 - protein, 8 aa, Homo sapiens
  Table A; Target 56138; HLA-B*51:01; OR51E1; ENSG00000180785; TAA
TVLTLPRV

SEQ ID NO: 56139 - protein, 9 aa, Homo sapiens
  Table A; Target 56139; HLA-C*06:02; OR51E1; ENSG00000180785; TAA
TVLTLPRVT

SEQ ID NO: 56140 - protein, 10 aa, Homo sapiens
  Table A; Target 56140; HLA-A*03:01; OR51E1; ENSG00000180785; TAA
TVLTLPRVTK

SEQ ID NO: 56141 - protein, 10 aa, Homo sapiens
  Table A; Target 56141; HLA-A*03:02; OR51E1; ENSG00000180785; TAA
TVLTLPRVTK

SEQ ID NO: 56142 - protein, 10 aa, Homo sapiens
  Table A; Target 56142; HLA-A*11:01; OR51E1; ENSG00000180785; TAA
TVLTLPRVTK

SEQ ID NO: 56143 - protein, 10 aa, Homo sapiens
  Table A; Target 56143; HLA-A*31:01; OR51E1; ENSG00000180785; TAA
TVLTLPRVTK

SEQ ID NO: 56144 - protein, 10 aa, Homo sapiens
  Table A; Target 56144; HLA-A*33:03; OR51E1; ENSG00000180785; TAA
TVLTLPRVTK

SEQ ID NO: 56145 - protein, 10 aa, Homo sapiens
  Table A; Target 56145; HLA-B*57:01; OR51E1; ENSG00000180785; TAA
TVLTLPRVTK

SEQ ID NO: 56146 - protein, 8 aa, Homo sapiens
  Table A; Target 56146; HLA-C*16:01; OR51E1; ENSG00000180785; TAA
VAAVVRGA

SEQ ID NO: 56147 - protein, 9 aa, Homo sapiens
  Table A; Target 56147; HLA-B*54:01; OR51E1; ENSG00000180785; TAA
VAAVVRGAA

SEQ ID NO: 56148 - protein, 9 aa, Homo sapiens
  Table A; Target 56148; HLA-C*16:01; OR51E1; ENSG00000180785; TAA
VAAVVRGAA

SEQ ID NO: 56149 - protein, 10 aa, Homo sapiens
  Table A; Target 56149; HLA-A*32:01; OR51E1; ENSG00000180785; TAA
VAAVVRGAAL

SEQ ID NO: 56150 - protein, 10 aa, Homo sapiens
  Table A; Target 56150; HLA-B*07:02; OR51E1; ENSG00000180785; TAA
VAAVVRGAAL

SEQ ID NO: 56151 - protein, 10 aa, Homo sapiens
  Table A; Target 56151; HLA-B*08:01; OR51E1; ENSG00000180785; TAA
VAAVVRGAAL

SEQ ID NO: 56152 - protein, 10 aa, Homo sapiens
  Table A; Target 56152; HLA-B*40:01; OR51E1; ENSG00000180785; TAA
VAAVVRGAAL

SEQ ID NO: 56153 - protein, 10 aa, Homo sapiens
  Table A; Target 56153; HLA-B*46:01; OR51E1; ENSG00000180785; TAA
VAAVVRGAAL

SEQ ID NO: 56154 - protein, 10 aa, Homo sapiens
  Table A; Target 56154; HLA-C*01:02; OR51E1; ENSG00000180785; TAA
VAAVVRGAAL

SEQ ID NO: 56155 - protein, 10 aa, Homo sapiens
  Table A; Target 56155; HLA-C*03:03; OR51E1; ENSG00000180785; TAA
VAAVVRGAAL

SEQ ID NO: 56156 - protein, 10 aa, Homo sapiens
  Table A; Target 56156; HLA-C*03:04; OR51E1; ENSG00000180785; TAA
VAAVVRGAAL

SEQ ID NO: 56157 - protein, 10 aa, Homo sapiens
  Table A; Target 56157; HLA-C*05:01; OR51E1; ENSG00000180785; TAA
VAAVVRGAAL

SEQ ID NO: 56158 - protein, 10 aa, Homo sapiens
  Table A; Target 56158; HLA-C*07:02; OR51E1; ENSG00000180785; TAA
VAAVVRGAAL

SEQ ID NO: 56159 - protein, 10 aa, Homo sapiens
  Table A; Target 56159; HLA-C*14:02; OR51E1; ENSG00000180785; TAA
VAAVVRGAAL

SEQ ID NO: 56160 - protein, 10 aa, Homo sapiens
  Table A; Target 56160; HLA-C*16:01; OR51E1; ENSG00000180785; TAA
VAAVVRGAAL

SEQ ID NO: 56161 - protein, 10 aa, Homo sapiens
  Table A; Target 56161; HLA-C*16:02; OR51E1; ENSG00000180785; TAA
VAAVVRGAAL

SEQ ID NO: 56162 - protein, 10 aa, Homo sapiens
  Table A; Target 56162; HLA-C*16:04; OR51E1; ENSG00000180785; TAA
VAAVVRGAAL

SEQ ID NO: 56163 - protein, 11 aa, Homo sapiens
  Table A; Target 56163; HLA-C*04:01; OR51E1; ENSG00000180785; TAA
VAAVVRGAALM

SEQ ID NO: 56164 - protein, 11 aa, Homo sapiens
  Table A; Target 56164; HLA-C*06:02; OR51E1; ENSG00000180785; TAA
VAAVVRGAALM

SEQ ID NO: 56165 - protein, 11 aa, Homo sapiens
  Table A; Target 56165; HLA-C*12:03; OR51E1; ENSG00000180785; TAA
VAAVVRGAALM

SEQ ID NO: 56166 - protein, 11 aa, Homo sapiens
  Table A; Target 56166; HLA-C*16:01; OR51E1; ENSG00000180785; TAA
VAAVVRGAALM

SEQ ID NO: 56167 - protein, 11 aa, Homo sapiens
  Table A; Target 56167; HLA-C*16:02; OR51E1; ENSG00000180785; TAA
VAAVVRGAALM

SEQ ID NO: 56168 - protein, 8 aa, Homo sapiens
  Table A; Target 56168; HLA-C*16:02; OR51E1; ENSG00000180785; TAA
VATHASEP

SEQ ID NO: 56169 - protein, 9 aa, Homo sapiens
  Table A; Target 56169; HLA-A*24:02; OR51E1; ENSG00000180785; TAA
VFIFYVPFI

SEQ ID NO: 56170 - protein, 8 aa, Homo sapiens
  Table A; Target 56170; HLA-A*23:01; OR51E1; ENSG00000180785; TAA
VFIKQLPF

SEQ ID NO: 56171 - protein, 9 aa, Homo sapiens
  Table A; Target 56171; HLA-A*02:01; OR51E1; ENSG00000180785; TAA
VILANIYLL

SEQ ID NO: 56172 - protein, 9 aa, Homo sapiens
  Table A; Target 56172; HLA-A*02:04; OR51E1; ENSG00000180785; TAA
VILANIYLL

SEQ ID NO: 56173 - protein, 9 aa, Homo sapiens
  Table A; Target 56173; HLA-A*23:01; OR51E1; ENSG00000180785; TAA
VILANIYLL

SEQ ID NO: 56174 - protein, 11 aa, Homo sapiens
  Table A; Target 56174; HLA-A*03:02; OR51E1; ENSG00000180785; TAA
VLGLTREAQAK

SEQ ID NO: 56175 - protein, 11 aa, Homo sapiens
  Table A; Target 56175; HLA-C*07:01; OR51E1; ENSG00000180785; TAA
VLGLTREAQAK

SEQ ID NO: 56176 - protein, 11 aa, Homo sapiens
  Table A; Target 56176; HLA-C*07:02; OR51E1; ENSG00000180785; TAA
VLGLTREAQAK

SEQ ID NO: 56177 - protein, 9 aa, Homo sapiens
  Table A; Target 56177; HLA-A*01:01; OR51E1; ENSG00000180785; TAA
VLGNLTIIY

SEQ ID NO: 56178 - protein, 9 aa, Homo sapiens
  Table A; Target 56178; HLA-A*03:01; OR51E1; ENSG00000180785; TAA
VLGNLTIIY

SEQ ID NO: 56179 - protein, 9 aa, Homo sapiens
  Table A; Target 56179; HLA-A*29:02; OR51E1; ENSG00000180785; TAA
VLGNLTIIY

SEQ ID NO: 56180 - protein, 9 aa, Homo sapiens
  Table A; Target 56180; HLA-B*46:01; OR51E1; ENSG00000180785; TAA
VLGNLTIIY

SEQ ID NO: 56181 - protein, 9 aa, Homo sapiens
  Table A; Target 56181; HLA-C*07:04; OR51E1; ENSG00000180785; TAA
VLGNLTIIY

SEQ ID NO: 56182 - protein, 10 aa, Homo sapiens
  Table A; Target 56182; HLA-A*02:03; OR51E1; ENSG00000180785; TAA
VLGNLTIIYI

SEQ ID NO: 56183 - protein, 10 aa, Homo sapiens
  Table A; Target 56183; HLA-A*02:04; OR51E1; ENSG00000180785; TAA
VLGNLTIIYI

SEQ ID NO: 56184 - protein, 10 aa, Homo sapiens
  Table A; Target 56184; HLA-A*29:02; OR51E1; ENSG00000180785; TAA
VLLAMAFDRY

SEQ ID NO: 56185 - protein, 9 aa, Homo sapiens
  Table A; Target 56185; HLA-A*02:01; OR51E1; ENSG00000180785; TAA
VLNPIVYGV

SEQ ID NO: 56186 - protein, 9 aa, Homo sapiens
  Table A; Target 56186; HLA-A*02:03; OR51E1; ENSG00000180785; TAA
VLNPIVYGV

SEQ ID NO: 56187 - protein, 9 aa, Homo sapiens
  Table A; Target 56187; HLA-A*02:04; OR51E1; ENSG00000180785; TAA
VLNPIVYGV

SEQ ID NO: 56188 - protein, 9 aa, Homo sapiens
  Table A; Target 56188; HLA-A*02:07; OR51E1; ENSG00000180785; TAA
VLNPIVYGV

SEQ ID NO: 56189 - protein, 9 aa, Homo sapiens
  Table A; Target 56189; HLA-A*23:01; OR51E1; ENSG00000180785; TAA
VLNPIVYGV

SEQ ID NO: 56190 - protein, 9 aa, Homo sapiens
  Table A; Target 56190; HLA-A*32:01; OR51E1; ENSG00000180785; TAA
VLNPIVYGV

SEQ ID NO: 56191 - protein, 9 aa, Homo sapiens
  Table A; Target 56191; HLA-A*68:02; OR51E1; ENSG00000180785; TAA
VLNPIVYGV

SEQ ID NO: 56192 - protein, 9 aa, Homo sapiens
  Table A; Target 56192; HLA-B*13:02; OR51E1; ENSG00000180785; TAA
VLNPIVYGV

SEQ ID NO: 56193 - protein, 9 aa, Homo sapiens
  Table A; Target 56193; HLA-B*55:01; OR51E1; ENSG00000180785; TAA
VLNPIVYGV

SEQ ID NO: 56194 - protein, 9 aa, Homo sapiens
  Table A; Target 56194; HLA-C*02:02; OR51E1; ENSG00000180785; TAA
VLNPIVYGV

SEQ ID NO: 56195 - protein, 9 aa, Homo sapiens
  Table A; Target 56195; HLA-C*16:02; OR51E1; ENSG00000180785; TAA
VLNPIVYGV

SEQ ID NO: 56196 - protein, 10 aa, Homo sapiens
  Table A; Target 56196; HLA-A*03:01; OR51E1; ENSG00000180785; TAA
VLNPIVYGVK

SEQ ID NO: 56197 - protein, 10 aa, Homo sapiens
  Table A; Target 56197; HLA-A*03:02; OR51E1; ENSG00000180785; TAA
VLNPIVYGVK

SEQ ID NO: 56198 - protein, 10 aa, Homo sapiens
  Table A; Target 56198; HLA-B*27:02; OR51E1; ENSG00000180785; TAA
VLNPIVYGVK

SEQ ID NO: 56199 - protein, 9 aa, Homo sapiens
  Table A; Target 56199; HLA-A*03:01; OR51E1; ENSG00000180785; TAA
VLTLPRVTK

SEQ ID NO: 56200 - protein, 9 aa, Homo sapiens
  Table A; Target 56200; HLA-A*03:02; OR51E1; ENSG00000180785; TAA
VLTLPRVTK

SEQ ID NO: 56201 - protein, 9 aa, Homo sapiens
  Table A; Target 56201; HLA-C*16:01; OR51E1; ENSG00000180785; TAA
VLTLPRVTK

SEQ ID NO: 56202 - protein, 8 aa, Homo sapiens
  Table A; Target 56202; HLA-B*07:02; OR51E1; ENSG00000180785; TAA
VPFIGLSM

SEQ ID NO: 56203 - protein, 8 aa, Homo sapiens
  Table A; Target 56203; HLA-B*08:01; OR51E1; ENSG00000180785; TAA
VPFIGLSM

SEQ ID NO: 56204 - protein, 8 aa, Homo sapiens
  Table A; Target 56204; HLA-B*35:01; OR51E1; ENSG00000180785; TAA
VPFIGLSM

SEQ ID NO: 56205 - protein, 8 aa, Homo sapiens
  Table A; Target 56205; HLA-B*51:01; OR51E1; ENSG00000180785; TAA
VPFIGLSM

SEQ ID NO: 56206 - protein, 8 aa, Homo sapiens
  Table A; Target 56206; HLA-B*54:01; OR51E1; ENSG00000180785; TAA
VPFIGLSM

SEQ ID NO: 56207 - protein, 9 aa, Homo sapiens
  Table A; Target 56207; HLA-A*02:03; OR51E1; ENSG00000180785; TAA
VPFIGLSMV

SEQ ID NO: 56208 - protein, 9 aa, Homo sapiens
  Table A; Target 56208; HLA-B*07:02; OR51E1; ENSG00000180785; TAA
VPFIGLSMV

SEQ ID NO: 56209 - protein, 9 aa, Homo sapiens
  Table A; Target 56209; HLA-B*49:01; OR51E1; ENSG00000180785; TAA
VPFIGLSMV

SEQ ID NO: 56210 - protein, 9 aa, Homo sapiens
  Table A; Target 56210; HLA-B*51:01; OR51E1; ENSG00000180785; TAA
VPFIGLSMV

SEQ ID NO: 56211 - protein, 9 aa, Homo sapiens
  Table A; Target 56211; HLA-B*54:01; OR51E1; ENSG00000180785; TAA
VPFIGLSMV

SEQ ID NO: 56212 - protein, 9 aa, Homo sapiens
  Table A; Target 56212; HLA-B*55:01; OR51E1; ENSG00000180785; TAA
VPFIGLSMV

SEQ ID NO: 56213 - protein, 9 aa, Homo sapiens
  Table A; Target 56213; HLA-B*56:01; OR51E1; ENSG00000180785; TAA
VPFIGLSMV

SEQ ID NO: 56214 - protein, 9 aa, Homo sapiens
  Table A; Target 56214; HLA-C*07:02; OR51E1; ENSG00000180785; TAA
VPFIGLSMV

SEQ ID NO: 56215 - protein, 8 aa, Homo sapiens
  Table A; Target 56215; HLA-B*51:01; OR51E1; ENSG00000180785; TAA
VPPVLNPI

SEQ ID NO: 56216 - protein, 9 aa, Homo sapiens
  Table A; Target 56216; HLA-B*51:01; OR51E1; ENSG00000180785; TAA
VPPVLNPIV

SEQ ID NO: 56217 - protein, 9 aa, Homo sapiens
  Table A; Target 56217; HLA-B*54:01; OR51E1; ENSG00000180785; TAA
VPPVLNPIV

SEQ ID NO: 56218 - protein, 9 aa, Homo sapiens
  Table A; Target 56218; HLA-B*56:01; OR51E1; ENSG00000180785; TAA
VPPVLNPIV

SEQ ID NO: 56219 - protein, 10 aa, Homo sapiens
  Table A; Target 56219; HLA-A*29:02; OR51E1; ENSG00000180785; TAA
VPPVLNPIVY

SEQ ID NO: 56220 - protein, 10 aa, Homo sapiens
  Table A; Target 56220; HLA-B*35:01; OR51E1; ENSG00000180785; TAA
VPPVLNPIVY

SEQ ID NO: 56221 - protein, 10 aa, Homo sapiens
  Table A; Target 56221; HLA-B*55:01; OR51E1; ENSG00000180785; TAA
VPPVLNPIVY

SEQ ID NO: 56222 - protein, 10 aa, Homo sapiens
  Table A; Target 56222; HLA-C*04:01; OR51E1; ENSG00000180785; TAA
VPPVLNPIVY

SEQ ID NO: 56223 - protein, 10 aa, Homo sapiens
  Table A; Target 56223; HLA-C*07:01; OR51E1; ENSG00000180785; TAA
VPPVLNPIVY

SEQ ID NO: 56224 - protein, 10 aa, Homo sapiens
  Table A; Target 56224; HLA-C*07:04; OR51E1; ENSG00000180785; TAA
VPPVLNPIVY

SEQ ID NO: 56225 - protein, 8 aa, Homo sapiens
  Table A; Target 56225; HLA-B*46:01; OR51E1; ENSG00000180785; TAA
VTKIGVAA

SEQ ID NO: 56226 - protein, 9 aa, Homo sapiens
  Table A; Target 56226; HLA-A*02:03; OR51E1; ENSG00000180785; TAA
VTKIGVAAV

SEQ ID NO: 56227 - protein, 9 aa, Homo sapiens
  Table A; Target 56227; HLA-A*02:04; OR51E1; ENSG00000180785; TAA
VTKIGVAAV

SEQ ID NO: 56228 - protein, 9 aa, Homo sapiens
  Table A; Target 56228; HLA-A*32:01; OR51E1; ENSG00000180785; TAA
VTKIGVAAV

SEQ ID NO: 56229 - protein, 9 aa, Homo sapiens
  Table A; Target 56229; HLA-B*08:01; OR51E1; ENSG00000180785; TAA
VTKIGVAAV

SEQ ID NO: 56230 - protein, 9 aa, Homo sapiens
  Table A; Target 56230; HLA-B*40:02; OR51E1; ENSG00000180785; TAA
VTKIGVAAV

SEQ ID NO: 56231 - protein, 9 aa, Homo sapiens
  Table A; Target 56231; HLA-B*46:01; OR51E1; ENSG00000180785; TAA
VTKIGVAAV

SEQ ID NO: 56232 - protein, 9 aa, Homo sapiens
  Table A; Target 56232; HLA-C*01:02; OR51E1; ENSG00000180785; TAA
VTKIGVAAV

SEQ ID NO: 56233 - protein, 9 aa, Homo sapiens
  Table A; Target 56233; HLA-C*06:02; OR51E1; ENSG00000180785; TAA
VTKIGVAAV

SEQ ID NO: 56234 - protein, 11 aa, Homo sapiens
  Table A; Target 56234; HLA-A*31:01; OR51E1; ENSG00000180785; TAA
VTKIGVAAVVR

SEQ ID NO: 56235 - protein, 11 aa, Homo sapiens
  Table A; Target 56235; HLA-A*33:01; OR51E1; ENSG00000180785; TAA
VTKIGVAAVVR

SEQ ID NO: 56236 - protein, 11 aa, Homo sapiens
  Table A; Target 56236; HLA-A*33:03; OR51E1; ENSG00000180785; TAA
VTKIGVAAVVR

SEQ ID NO: 56237 - protein, 11 aa, Homo sapiens
  Table A; Target 56237; HLA-A*68:01; OR51E1; ENSG00000180785; TAA
VTKIGVAAVVR

SEQ ID NO: 56238 - protein, 9 aa, Homo sapiens
  Table A; Target 56238; HLA-B*56:01; OR51E1; ENSG00000180785; TAA
VVRGAALMA

SEQ ID NO: 56239 - protein, 8 aa, Homo sapiens
  Table A; Target 56239; HLA-B*51:01; OR51E1; ENSG00000180785; TAA
VVYGLIVI

SEQ ID NO: 56240 - protein, 9 aa, Homo sapiens
  Table A; Target 56240; HLA-A*02:01; OR51E1; ENSG00000180785; TAA
VVYGLIVII

SEQ ID NO: 56241 - protein, 9 aa, Homo sapiens
  Table A; Target 56241; HLA-A*02:03; OR51E1; ENSG00000180785; TAA
VVYGLIVII

SEQ ID NO: 56242 - protein, 9 aa, Homo sapiens
  Table A; Target 56242; HLA-A*02:04; OR51E1; ENSG00000180785; TAA
VVYGLIVII

SEQ ID NO: 56243 - protein, 9 aa, Homo sapiens
  Table A; Target 56243; HLA-A*02:07; OR51E1; ENSG00000180785; TAA
VVYGLIVII

SEQ ID NO: 56244 - protein, 9 aa, Homo sapiens
  Table A; Target 56244; HLA-A*23:01; OR51E1; ENSG00000180785; TAA
VVYGLIVII

SEQ ID NO: 56245 - protein, 9 aa, Homo sapiens
  Table A; Target 56245; HLA-A*24:02; OR51E1; ENSG00000180785; TAA
VVYGLIVII

SEQ ID NO: 56246 - protein, 9 aa, Homo sapiens
  Table A; Target 56246; HLA-A*68:02; OR51E1; ENSG00000180785; TAA
VVYGLIVII

SEQ ID NO: 56247 - protein, 9 aa, Homo sapiens
  Table A; Target 56247; HLA-B*13:02; OR51E1; ENSG00000180785; TAA
VVYGLIVII

SEQ ID NO: 56248 - protein, 9 aa, Homo sapiens
  Table A; Target 56248; HLA-B*51:01; OR51E1; ENSG00000180785; TAA
VVYGLIVII

SEQ ID NO: 56249 - protein, 9 aa, Homo sapiens
  Table A; Target 56249; HLA-C*02:02; OR51E1; ENSG00000180785; TAA
VVYGLIVII

SEQ ID NO: 56250 - protein, 9 aa, Homo sapiens
  Table A; Target 56250; HLA-C*12:03; OR51E1; ENSG00000180785; TAA
VVYGLIVII

SEQ ID NO: 56251 - protein, 11 aa, Homo sapiens
  Table A; Target 56251; HLA-B*54:01; OR51E1; ENSG00000180785; TAA
VVYGLIVIISA

SEQ ID NO: 56252 - protein, 8 aa, Homo sapiens
  Table A; Target 56252; HLA-A*23:01; OR51E1; ENSG00000180785; TAA
VYGLIVII

SEQ ID NO: 56253 - protein, 8 aa, Homo sapiens
  Table A; Target 56253; HLA-A*24:02; OR51E1; ENSG00000180785; TAA
VYGLIVII

SEQ ID NO: 56254 - protein, 11 aa, Homo sapiens
  Table A; Target 56254; HLA-A*24:02; OR51E1; ENSG00000180785; TAA
VYGLIVIISAI

SEQ ID NO: 56255 - protein, 9 aa, Homo sapiens
  Table A; Target 56255; HLA-A*24:02; OR51E1; ENSG00000180785; TAA
VYGVKTKEI

SEQ ID NO: 56256 - protein, 9 aa, Homo sapiens
  Table A; Target 56256; HLA-A*23:01; OR51E1; ENSG00000180785; TAA
WFNSTTIQF

SEQ ID NO: 56257 - protein, 9 aa, Homo sapiens
  Table A; Target 56257; HLA-A*24:02; OR51E1; ENSG00000180785; TAA
WFNSTTIQF

SEQ ID NO: 56258 - protein, 9 aa, Homo sapiens
  Table A; Target 56258; HLA-A*29:02; OR51E1; ENSG00000180785; TAA
WFNSTTIQF

SEQ ID NO: 56259 - protein, 9 aa, Homo sapiens
  Table A; Target 56259; HLA-C*14:02; OR51E1; ENSG00000180785; TAA
WFNSTTIQF

SEQ ID NO: 56260 - protein, 9 aa, Homo sapiens
  Table A; Target 56260; HLA-A*02:03; OR51E1; ENSG00000180785; TAA
WLAFPLCSL

SEQ ID NO: 56261 - protein, 10 aa, Homo sapiens
  Table A; Target 56261; HLA-C*07:01; OR51E1; ENSG00000180785; TAA
YCLHQDVMKL

SEQ ID NO: 56262 - protein, 9 aa, Homo sapiens
  Table A; Target 56262; HLA-B*54:01; OR51E1; ENSG00000180785; TAA
YGLIVIISA

SEQ ID NO: 56263 - protein, 8 aa, Homo sapiens
  Table A; Target 56263; HLA-B*51:01; OR51E1; ENSG00000180785; TAA
YGVKTKEI

SEQ ID NO: 56264 - protein, 9 aa, Homo sapiens
  Table A; Target 56264; HLA-A*02:07; OR51E1; ENSG00000180785; TAA
YIVRTEHSL

SEQ ID NO: 56265 - protein, 9 aa, Homo sapiens
  Table A; Target 56265; HLA-B*08:01; OR51E1; ENSG00000180785; TAA
YIVRTEHSL

SEQ ID NO: 56266 - protein, 9 aa, Homo sapiens
  Table A; Target 56266; HLA-B*35:03; OR51E1; ENSG00000180785; TAA
YIVRTEHSL

SEQ ID NO: 56267 - protein, 9 aa, Homo sapiens
  Table A; Target 56267; HLA-B*58:01; OR51E1; ENSG00000180785; TAA
YIVRTEHSL

SEQ ID NO: 56268 - protein, 9 aa, Homo sapiens
  Table A; Target 56268; HLA-C*03:03; OR51E1; ENSG00000180785; TAA
YIVRTEHSL

SEQ ID NO: 56269 - protein, 9 aa, Homo sapiens
  Table A; Target 56269; HLA-C*03:04; OR51E1; ENSG00000180785; TAA
YIVRTEHSL

SEQ ID NO: 56270 - protein, 9 aa, Homo sapiens
  Table A; Target 56270; HLA-A*02:01; OR51E1; ENSG00000180785; TAA
YLIAVLGNL

SEQ ID NO: 56271 - protein, 9 aa, Homo sapiens
  Table A; Target 56271; HLA-A*02:03; OR51E1; ENSG00000180785; TAA
YLIAVLGNL

SEQ ID NO: 56272 - protein, 9 aa, Homo sapiens
  Table A; Target 56272; HLA-A*02:04; OR51E1; ENSG00000180785; TAA
YLIAVLGNL

SEQ ID NO: 56273 - protein, 9 aa, Homo sapiens
  Table A; Target 56273; HLA-A*02:07; OR51E1; ENSG00000180785; TAA
YLIAVLGNL

SEQ ID NO: 56274 - protein, 9 aa, Homo sapiens
  Table A; Target 56274; HLA-A*23:01; OR51E1; ENSG00000180785; TAA
YLIAVLGNL

SEQ ID NO: 56275 - protein, 9 aa, Homo sapiens
  Table A; Target 56275; HLA-A*24:02; OR51E1; ENSG00000180785; TAA
YLIAVLGNL

SEQ ID NO: 56276 - protein, 9 aa, Homo sapiens
  Table A; Target 56276; HLA-A*68:02; OR51E1; ENSG00000180785; TAA
YLIAVLGNL

SEQ ID NO: 56277 - protein, 9 aa, Homo sapiens
  Table A; Target 56277; HLA-B*13:02; OR51E1; ENSG00000180785; TAA
YLIAVLGNL

SEQ ID NO: 56278 - protein, 9 aa, Homo sapiens
  Table A; Target 56278; HLA-B*40:02; OR51E1; ENSG00000180785; TAA
YLIAVLGNL

SEQ ID NO: 56279 - protein, 9 aa, Homo sapiens
  Table A; Target 56279; HLA-B*46:01; OR51E1; ENSG00000180785; TAA
YLIAVLGNL

SEQ ID NO: 56280 - protein, 9 aa, Homo sapiens
  Table A; Target 56280; HLA-C*01:02; OR51E1; ENSG00000180785; TAA
YLIAVLGNL

SEQ ID NO: 56281 - protein, 11 aa, Homo sapiens
  Table A; Target 56281; HLA-A*02:01; OR51E1; ENSG00000180785; TAA
YLIAVLGNLTI

SEQ ID NO: 56282 - protein, 8 aa, Homo sapiens
  Table A; Target 56282; HLA-A*02:01; OR51E1; ENSG00000180785; TAA
YLLILKTV

SEQ ID NO: 56283 - protein, 8 aa, Homo sapiens
  Table A; Target 56283; HLA-A*02:03; OR51E1; ENSG00000180785; TAA
YLLILKTV

SEQ ID NO: 56284 - protein, 8 aa, Homo sapiens
  Table A; Target 56284; HLA-A*02:04; OR51E1; ENSG00000180785; TAA
YLLILKTV

SEQ ID NO: 56285 - protein, 9 aa, Homo sapiens
  Table A; Target 56285; HLA-A*02:01; OR51E1; ENSG00000180785; TAA
YLLILKTVL

SEQ ID NO: 56286 - protein, 9 aa, Homo sapiens
  Table A; Target 56286; HLA-A*02:03; OR51E1; ENSG00000180785; TAA
YLLILKTVL

SEQ ID NO: 56287 - protein, 9 aa, Homo sapiens
  Table A; Target 56287; HLA-A*02:04; OR51E1; ENSG00000180785; TAA
YLLILKTVL

SEQ ID NO: 56288 - protein, 9 aa, Homo sapiens
  Table A; Target 56288; HLA-A*02:07; OR51E1; ENSG00000180785; TAA
YLLILKTVL

SEQ ID NO: 56289 - protein, 9 aa, Homo sapiens
  Table A; Target 56289; HLA-B*08:01; OR51E1; ENSG00000180785; TAA
YLLILKTVL

SEQ ID NO: 56290 - protein, 9 aa, Homo sapiens
  Table A; Target 56290; HLA-B*40:02; OR51E1; ENSG00000180785; TAA
YLLILKTVL

SEQ ID NO: 56291 - protein, 11 aa, Homo sapiens
  Table A; Target 56291; HLA-A*02:04; OR51E1; ENSG00000180785; TAA
YLLILKTVLGL

SEQ ID NO: 56292 - protein, 8 aa, Homo sapiens
  Table A; Target 56292; HLA-A*02:01; OR51E1; ENSG00000180785; TAA
YLLVPPVL

SEQ ID NO: 56293 - protein, 8 aa, Homo sapiens
  Table A; Target 56293; HLA-A*02:04; OR51E1; ENSG00000180785; TAA
YLLVPPVL

SEQ ID NO: 56294 - protein, 8 aa, Homo sapiens
  Table A; Target 56294; HLA-A*23:01; OR51E1; ENSG00000180785; TAA
YLLVPPVL

SEQ ID NO: 56295 - protein, 8 aa, Homo sapiens
  Table A; Target 56295; HLA-C*03:03; OR51E1; ENSG00000180785; TAA
YLLVPPVL

SEQ ID NO: 56296 - protein, 8 aa, Homo sapiens
  Table A; Target 56296; HLA-C*03:04; OR51E1; ENSG00000180785; TAA
YLLVPPVL

SEQ ID NO: 56297 - protein, 11 aa, Homo sapiens
  Table A; Target 56297; HLA-A*02:01; OR51E1; ENSG00000180785; TAA
YLLVPPVLNPI

SEQ ID NO: 56298 - protein, 11 aa, Homo sapiens
  Table A; Target 56298; HLA-A*02:04; OR51E1; ENSG00000180785; TAA
YLLVPPVLNPI

SEQ ID NO: 56299 - protein, 9 aa, Homo sapiens
  Table A; Target 56299; HLA-A*02:07; OR51E1; ENSG00000180785; TAA
YVPFIGLSM

SEQ ID NO: 56300 - protein, 9 aa, Homo sapiens
  Table A; Target 56300; HLA-A*26:01; OR51E1; ENSG00000180785; TAA
YVPFIGLSM

SEQ ID NO: 56301 - protein, 9 aa, Homo sapiens
  Table A; Target 56301; HLA-A*29:02; OR51E1; ENSG00000180785; TAA
YVPFIGLSM

SEQ ID NO: 56302 - protein, 9 aa, Homo sapiens
  Table A; Target 56302; HLA-B*08:01; OR51E1; ENSG00000180785; TAA
YVPFIGLSM

SEQ ID NO: 56303 - protein, 9 aa, Homo sapiens
  Table A; Target 56303; HLA-B*46:01; OR51E1; ENSG00000180785; TAA
YVPFIGLSM

SEQ ID NO: 56304 - protein, 9 aa, Homo sapiens
  Table A; Target 56304; HLA-C*01:02; OR51E1; ENSG00000180785; TAA
YVPFIGLSM

SEQ ID NO: 56305 - protein, 10 aa, Homo sapiens
  Table A; Target 56305; HLA-A*02:01; OR51E1; ENSG00000180785; TAA
YVPFIGLSMV

SEQ ID NO: 56306 - protein, 10 aa, Homo sapiens
  Table A; Target 56306; HLA-A*02:03; OR51E1; ENSG00000180785; TAA
YVPFIGLSMV

SEQ ID NO: 56307 - protein, 10 aa, Homo sapiens
  Table A; Target 56307; HLA-A*02:07; OR51E1; ENSG00000180785; TAA
YVPFIGLSMV

SEQ ID NO: 56308 - protein, 10 aa, Homo sapiens
  Table A; Target 56308; HLA-A*68:02; OR51E1; ENSG00000180785; TAA
YVPFIGLSMV

SEQ ID NO: 56309 - protein, 9 aa, Homo sapiens
  Table A; Target 56309; HLA-C*12:03; OR51E1,OR51E2; ENSG00000180785,ENSG00000167332; TAA,TAA
KAFGTCVSH

SEQ ID NO: 56310 - protein, 9 aa, Homo sapiens
  Table A; Target 56310; HLA-A*01:01; OR51E1,OR51E2; ENSG00000180785,ENSG00000167332; TAA,TAA
LLAMAFDRY

SEQ ID NO: 56311 - protein, 8 aa, Homo sapiens
  Table A; Target 56311; HLA-B*54:01; OR51E1,OR51E2; ENSG00000180785,ENSG00000167332; TAA,TAA
MAFDRYVA

SEQ ID NO: 56312 - protein, 9 aa, Homo sapiens
  Table A; Target 56312; HLA-A*25:01; OR51E1,OR51E2; ENSG00000180785,ENSG00000167332; TAA,TAA
MAFDRYVAI

SEQ ID NO: 56313 - protein, 9 aa, Homo sapiens
  Table A; Target 56313; HLA-A*68:02; OR51E1,OR51E2; ENSG00000180785,ENSG00000167332; TAA,TAA
MAFDRYVAI

SEQ ID NO: 56314 - protein, 9 aa, Homo sapiens
  Table A; Target 56314; HLA-B*08:01; OR51E1,OR51E2; ENSG00000180785,ENSG00000167332; TAA,TAA
MAFDRYVAI

SEQ ID NO: 56315 - protein, 9 aa, Homo sapiens
  Table A; Target 56315; HLA-B*35:01; OR51E1,OR51E2; ENSG00000180785,ENSG00000167332; TAA,TAA
MAFDRYVAI

SEQ ID NO: 56316 - protein, 9 aa, Homo sapiens
  Table A; Target 56316; HLA-B*46:01; OR51E1,OR51E2; ENSG00000180785,ENSG00000167332; TAA,TAA
MAFDRYVAI

SEQ ID NO: 56317 - protein, 9 aa, Homo sapiens
  Table A; Target 56317; HLA-B*51:01; OR51E1,OR51E2; ENSG00000180785,ENSG00000167332; TAA,TAA
MAFDRYVAI

SEQ ID NO: 56318 - protein, 9 aa, Homo sapiens
  Table A; Target 56318; HLA-B*54:01; OR51E1,OR51E2; ENSG00000180785,ENSG00000167332; TAA,TAA
MAFDRYVAI

SEQ ID NO: 56319 - protein, 9 aa, Homo sapiens
  Table A; Target 56319; HLA-B*56:01; OR51E1,OR51E2; ENSG00000180785,ENSG00000167332; TAA,TAA
MAFDRYVAI

SEQ ID NO: 56320 - protein, 9 aa, Homo sapiens
  Table A; Target 56320; HLA-C*02:02; OR51E1,OR51E2; ENSG00000180785,ENSG00000167332; TAA,TAA
MAFDRYVAI

SEQ ID NO: 56321 - protein, 9 aa, Homo sapiens
  Table A; Target 56321; HLA-C*03:03; OR51E1,OR51E2; ENSG00000180785,ENSG00000167332; TAA,TAA
MAFDRYVAI

SEQ ID NO: 56322 - protein, 9 aa, Homo sapiens
  Table A; Target 56322; HLA-C*03:04; OR51E1,OR51E2; ENSG00000180785,ENSG00000167332; TAA,TAA
MAFDRYVAI

SEQ ID NO: 56323 - protein, 9 aa, Homo sapiens
  Table A; Target 56323; HLA-C*12:03; OR51E1,OR51E2; ENSG00000180785,ENSG00000167332; TAA,TAA
MAFDRYVAI

SEQ ID NO: 56324 - protein, 9 aa, Homo sapiens
  Table A; Target 56324; HLA-C*16:01; OR51E1,OR51E2; ENSG00000180785,ENSG00000167332; TAA,TAA
MAFDRYVAI

SEQ ID NO: 56325 - protein, 9 aa, Homo sapiens
  Table A; Target 56325; HLA-C*16:04; OR51E1,OR51E2; ENSG00000180785,ENSG00000167332; TAA,TAA
MAFDRYVAI

SEQ ID NO: 56326 - protein, 9 aa, Homo sapiens
  Table A; Target 56326; HLA-A*24:02; OR51E1,OR51E2; ENSG00000180785,ENSG00000167332; TAA,TAA
RYVAICHPL

SEQ ID NO: 56327 - protein, 9 aa, Homo sapiens
  Table A; Target 56327; HLA-B*13:02; OR51E2; ENSG00000167332; TAA
AAIDLALST

SEQ ID NO: 56328 - protein, 9 aa, Homo sapiens
  Table A; Target 56328; HLA-C*03:04; OR51E2; ENSG00000167332; TAA
AAIDLALST

SEQ ID NO: 56329 - protein, 9 aa, Homo sapiens
  Table A; Target 56329; HLA-C*16:04; OR51E2; ENSG00000167332; TAA
AAIDLALST

SEQ ID NO: 56330 - protein, 10 aa, Homo sapiens
  Table A; Target 56330; HLA-B*56:01; OR51E2; ENSG00000167332; TAA
AAVLNNTVTA

SEQ ID NO: 56331 - protein, 8 aa, Homo sapiens
  Table A; Target 56331; HLA-B*37:01; OR51E2; ENSG00000167332; TAA
ADTLPNVV

SEQ ID NO: 56332 - protein, 9 aa, Homo sapiens
  Table A; Target 56332; HLA-B*15:01; OR51E2; ENSG00000167332; TAA
ADTLPNVVY

SEQ ID NO: 56333 - protein, 9 aa, Homo sapiens
  Table A; Target 56333; HLA-B*15:03; OR51E2; ENSG00000167332; TAA
ADTLPNVVY

SEQ ID NO: 56334 - protein, 9 aa, Homo sapiens
  Table A; Target 56334; HLA-B*18:01; OR51E2; ENSG00000167332; TAA
ADTLPNVVY

SEQ ID NO: 56335 - protein, 9 aa, Homo sapiens
  Table A; Target 56335; HLA-B*37:01; OR51E2; ENSG00000167332; TAA
ADTLPNVVY

SEQ ID NO: 56336 - protein, 9 aa, Homo sapiens
  Table A; Target 56336; HLA-B*44:02; OR51E2; ENSG00000167332; TAA
ADTLPNVVY

SEQ ID NO: 56337 - protein, 9 aa, Homo sapiens
  Table A; Target 56337; HLA-B*44:03; OR51E2; ENSG00000167332; TAA
ADTLPNVVY

SEQ ID NO: 56338 - protein, 9 aa, Homo sapiens
  Table A; Target 56338; HLA-C*16:01; OR51E2; ENSG00000167332; TAA
ADTLPNVVY

SEQ ID NO: 56339 - protein, 9 aa, Homo sapiens
  Table A; Target 56339; HLA-C*16:04; OR51E2; ENSG00000167332; TAA
ADTLPNVVY

SEQ ID NO: 56340 - protein, 11 aa, Homo sapiens
  Table A; Target 56340; HLA-C*05:01; OR51E2; ENSG00000167332; TAA
AIDLALSTSTM

SEQ ID NO: 56341 - protein, 10 aa, Homo sapiens
  Table A; Target 56341; HLA-A*02:03; OR51E2; ENSG00000167332; TAA
ALFWFDSREI

SEQ ID NO: 56342 - protein, 9 aa, Homo sapiens
  Table A; Target 56342; HLA-A*02:01; OR51E2; ENSG00000167332; TAA
ALSAIESTI

SEQ ID NO: 56343 - protein, 9 aa, Homo sapiens
  Table A; Target 56343; HLA-A*02:03; OR51E2; ENSG00000167332; TAA
ALSAIESTI

SEQ ID NO: 56344 - protein, 9 aa, Homo sapiens
  Table A; Target 56344; HLA-A*32:01; OR51E2; ENSG00000167332; TAA
ALSAIESTI

SEQ ID NO: 56345 - protein, 9 aa, Homo sapiens
  Table A; Target 56345; HLA-B*13:02; OR51E2; ENSG00000167332; TAA
ALSAIESTI

SEQ ID NO: 56346 - protein, 11 aa, Homo sapiens
  Table A; Target 56346; HLA-A*02:04; OR51E2; ENSG00000167332; TAA
ALSAIESTILL

SEQ ID NO: 56347 - protein, 9 aa, Homo sapiens
  Table A; Target 56347; HLA-A*03:01; OR51E2; ENSG00000167332; TAA
ALSTSTMPK

SEQ ID NO: 56348 - protein, 9 aa, Homo sapiens
  Table A; Target 56348; HLA-A*03:02; OR51E2; ENSG00000167332; TAA
ALSTSTMPK

SEQ ID NO: 56349 - protein, 9 aa, Homo sapiens
  Table A; Target 56349; HLA-A*11:01; OR51E2; ENSG00000167332; TAA
ALSTSTMPK

SEQ ID NO: 56350 - protein, 9 aa, Homo sapiens
  Table A; Target 56350; HLA-A*02:03; OR51E2; ENSG00000167332; TAA
AMFGNCIVV

SEQ ID NO: 56351 - protein, 9 aa, Homo sapiens
  Table A; Target 56351; HLA-B*13:02; OR51E2; ENSG00000167332; TAA
AMFGNCIVV

SEQ ID NO: 56352 - protein, 9 aa, Homo sapiens
  Table A; Target 56352; HLA-A*03:02; OR51E2; ENSG00000167332; TAA
AMFKISCDK

SEQ ID NO: 56353 - protein, 8 aa, Homo sapiens
  Table A; Target 56353; HLA-A*02:01; OR51E2; ENSG00000167332; TAA
AQIGIVAV

SEQ ID NO: 56354 - protein, 8 aa, Homo sapiens
  Table A; Target 56354; HLA-B*13:02; OR51E2; ENSG00000167332; TAA
AQIGIVAV

SEQ ID NO: 56355 - protein, 8 aa, Homo sapiens
  Table A; Target 56355; HLA-B*15:01; OR51E2; ENSG00000167332; TAA
AQIGIVAV

SEQ ID NO: 56356 - protein, 9 aa, Homo sapiens
  Table A; Target 56356; HLA-A*02:01; OR51E2; ENSG00000167332; TAA
AQIGIVAVV

SEQ ID NO: 56357 - protein, 9 aa, Homo sapiens
  Table A; Target 56357; HLA-A*02:03; OR51E2; ENSG00000167332; TAA
AQIGIVAVV

SEQ ID NO: 56358 - protein, 9 aa, Homo sapiens
  Table A; Target 56358; HLA-A*02:04; OR51E2; ENSG00000167332; TAA
AQIGIVAVV

SEQ ID NO: 56359 - protein, 9 aa, Homo sapiens
  Table A; Target 56359; HLA-A*02:07; OR51E2; ENSG00000167332; TAA
AQIGIVAVV

SEQ ID NO: 56360 - protein, 9 aa, Homo sapiens
  Table A; Target 56360; HLA-A*26:01; OR51E2; ENSG00000167332; TAA
AQIGIVAVV

SEQ ID NO: 56361 - protein, 9 aa, Homo sapiens
  Table A; Target 56361; HLA-A*30:01; OR51E2; ENSG00000167332; TAA
AQIGIVAVV

SEQ ID NO: 56362 - protein, 9 aa, Homo sapiens
  Table A; Target 56362; HLA-A*32:01; OR51E2; ENSG00000167332; TAA
AQIGIVAVV

SEQ ID NO: 56363 - protein, 9 aa, Homo sapiens
  Table A; Target 56363; HLA-A*68:02; OR51E2; ENSG00000167332; TAA
AQIGIVAVV

SEQ ID NO: 56364 - protein, 9 aa, Homo sapiens
  Table A; Target 56364; HLA-B*13:02; OR51E2; ENSG00000167332; TAA
AQIGIVAVV

SEQ ID NO: 56365 - protein, 9 aa, Homo sapiens
  Table A; Target 56365; HLA-B*15:01; OR51E2; ENSG00000167332; TAA
AQIGIVAVV

SEQ ID NO: 56366 - protein, 9 aa, Homo sapiens
  Table A; Target 56366; HLA-B*15:03; OR51E2; ENSG00000167332; TAA
AQIGIVAVV

SEQ ID NO: 56367 - protein, 9 aa, Homo sapiens
  Table A; Target 56367; HLA-B*27:05; OR51E2; ENSG00000167332; TAA
AQIGIVAVV

SEQ ID NO: 56368 - protein, 9 aa, Homo sapiens
  Table A; Target 56368; HLA-B*39:01; OR51E2; ENSG00000167332; TAA
AQIGIVAVV

SEQ ID NO: 56369 - protein, 9 aa, Homo sapiens
  Table A; Target 56369; HLA-B*40:02; OR51E2; ENSG00000167332; TAA
AQIGIVAVV

SEQ ID NO: 56370 - protein, 9 aa, Homo sapiens
  Table A; Target 56370; HLA-B*46:01; OR51E2; ENSG00000167332; TAA
AQIGIVAVV

SEQ ID NO: 56371 - protein, 9 aa, Homo sapiens
  Table A; Target 56371; HLA-B*49:01; OR51E2; ENSG00000167332; TAA
AQIGIVAVV

SEQ ID NO: 56372 - protein, 9 aa, Homo sapiens
  Table A; Target 56372; HLA-B*55:01; OR51E2; ENSG00000167332; TAA
AQIGIVAVV

SEQ ID NO: 56373 - protein, 9 aa, Homo sapiens
  Table A; Target 56373; HLA-B*56:01; OR51E2; ENSG00000167332; TAA
AQIGIVAVV

SEQ ID NO: 56374 - protein, 9 aa, Homo sapiens
  Table A; Target 56374; HLA-C*02:02; OR51E2; ENSG00000167332; TAA
AQIGIVAVV

SEQ ID NO: 56375 - protein, 9 aa, Homo sapiens
  Table A; Target 56375; HLA-C*06:02; OR51E2; ENSG00000167332; TAA
AQIGIVAVV

SEQ ID NO: 56376 - protein, 9 aa, Homo sapiens
  Table A; Target 56376; HLA-C*12:03; OR51E2; ENSG00000167332; TAA
AQIGIVAVV

SEQ ID NO: 56377 - protein, 9 aa, Homo sapiens
  Table A; Target 56377; HLA-C*16:04; OR51E2; ENSG00000167332; TAA
AQIGIVAVV

SEQ ID NO: 56378 - protein, 10 aa, Homo sapiens
  Table A; Target 56378; HLA-A*31:01; OR51E2; ENSG00000167332; TAA
AQIGIVAVVR

SEQ ID NO: 56379 - protein, 10 aa, Homo sapiens
  Table A; Target 56379; HLA-C*07:06; OR51E2; ENSG00000167332; TAA
AQIGIVAVVR

SEQ ID NO: 56380 - protein, 9 aa, Homo sapiens
  Table A; Target 56380; HLA-B*55:01; OR51E2; ENSG00000167332; TAA
AVLNNTVTA

SEQ ID NO: 56381 - protein, 9 aa, Homo sapiens
  Table A; Target 56381; HLA-B*56:01; OR51E2; ENSG00000167332; TAA
AVLNNTVTA

SEQ ID NO: 56382 - protein, 11 aa, Homo sapiens
  Table A; Target 56382; HLA-A*23:01; OR51E2; ENSG00000167332; TAA
AVLNNTVTAQI

SEQ ID NO: 56383 - protein, 9 aa, Homo sapiens
  Table A; Target 56383; HLA-A*02:01; OR51E2; ENSG00000167332; TAA
AYADTLPNV

SEQ ID NO: 56384 - protein, 9 aa, Homo sapiens
  Table A; Target 56384; HLA-A*23:01; OR51E2; ENSG00000167332; TAA
AYADTLPNV

SEQ ID NO: 56385 - protein, 9 aa, Homo sapiens
  Table A; Target 56385; HLA-A*24:02; OR51E2; ENSG00000167332; TAA
AYADTLPNV

SEQ ID NO: 56386 - protein, 9 aa, Homo sapiens
  Table A; Target 56386; HLA-A*32:01; OR51E2; ENSG00000167332; TAA
AYADTLPNV

SEQ ID NO: 56387 - protein, 9 aa, Homo sapiens
  Table A; Target 56387; HLA-B*46:01; OR51E2; ENSG00000167332; TAA
AYADTLPNV

SEQ ID NO: 56388 - protein, 9 aa, Homo sapiens
  Table A; Target 56388; HLA-B*55:01; OR51E2; ENSG00000167332; TAA
AYADTLPNV

SEQ ID NO: 56389 - protein, 9 aa, Homo sapiens
  Table A; Target 56389; HLA-C*14:02; OR51E2; ENSG00000167332; TAA
AYADTLPNV

SEQ ID NO: 56390 - protein, 9 aa, Homo sapiens
  Table A; Target 56390; HLA-C*16:02; OR51E2; ENSG00000167332; TAA
AYADTLPNV

SEQ ID NO: 56391 - protein, 10 aa, Homo sapiens
  Table A; Target 56391; HLA-A*23:01; OR51E2; ENSG00000167332; TAA
AYADTLPNVV

SEQ ID NO: 56392 - protein, 10 aa, Homo sapiens
  Table A; Target 56392; HLA-A*24:02; OR51E2; ENSG00000167332; TAA
AYADTLPNVV

SEQ ID NO: 56393 - protein, 11 aa, Homo sapiens
  Table A; Target 56393; HLA-A*24:02; OR51E2; ENSG00000167332; TAA
AYADTLPNVVY

SEQ ID NO: 56394 - protein, 11 aa, Homo sapiens
  Table A; Target 56394; HLA-A*29:02; OR51E2; ENSG00000167332; TAA
AYADTLPNVVY

SEQ ID NO: 56395 - protein, 11 aa, Homo sapiens
  Table A; Target 56395; HLA-A*30:02; OR51E2; ENSG00000167332; TAA
AYADTLPNVVY

SEQ ID NO: 56396 - protein, 11 aa, Homo sapiens
  Table A; Target 56396; HLA-B*15:01; OR51E2; ENSG00000167332; TAA
AYADTLPNVVY

SEQ ID NO: 56397 - protein, 11 aa, Homo sapiens
  Table A; Target 56397; HLA-C*14:02; OR51E2; ENSG00000167332; TAA
AYADTLPNVVY

SEQ ID NO: 56398 - protein, 10 aa, Homo sapiens
  Table A; Target 56398; HLA-A*30:02; OR51E2; ENSG00000167332; TAA
CHSNVLSHSY

SEQ ID NO: 56399 - protein, 9 aa, Homo sapiens
  Table A; Target 56399; HLA-C*07:04; OR51E2; ENSG00000167332; TAA
CVSHIGVVL

SEQ ID NO: 56400 - protein, 10 aa, Homo sapiens
  Table A; Target 56400; HLA-B*51:01; OR51E2; ENSG00000167332; TAA
DIYLLLPPVI

SEQ ID NO: 56401 - protein, 9 aa, Homo sapiens
  Table A; Target 56401; HLA-A*25:01; OR51E2; ENSG00000167332; TAA
DLALSTSTM

SEQ ID NO: 56402 - protein, 9 aa, Homo sapiens
  Table A; Target 56402; HLA-A*26:01; OR51E2; ENSG00000167332; TAA
DLALSTSTM

SEQ ID NO: 56403 - protein, 9 aa, Homo sapiens
  Table A; Target 56403; HLA-B*08:01; OR51E2; ENSG00000167332; TAA
DLALSTSTM

SEQ ID NO: 56404 - protein, 8 aa, Homo sapiens
  Table A; Target 56404; HLA-B*18:01; OR51E2; ENSG00000167332; TAA
DTLPNVVY

SEQ ID NO: 56405 - protein, 8 aa, Homo sapiens
  Table A; Target 56405; HLA-B*35:01; OR51E2; ENSG00000167332; TAA
DTLPNVVY

SEQ ID NO: 56406 - protein, 9 aa, Homo sapiens
  Table A; Target 56406; HLA-A*33:01; OR51E2; ENSG00000167332; TAA
DTLPNVVYG

SEQ ID NO: 56407 - protein, 10 aa, Homo sapiens
  Table A; Target 56407; HLA-A*25:01; OR51E2; ENSG00000167332; TAA
DTLPNVVYGL

SEQ ID NO: 56408 - protein, 10 aa, Homo sapiens
  Table A; Target 56408; HLA-A*33:03; OR51E2; ENSG00000167332; TAA
DTLPNVVYGL

SEQ ID NO: 56409 - protein, 9 aa, Homo sapiens
  Table A; Target 56409; HLA-A*25:01; OR51E2; ENSG00000167332; TAA
DVMFISLSY

SEQ ID NO: 56410 - protein, 9 aa, Homo sapiens
  Table A; Target 56410; HLA-A*26:01; OR51E2; ENSG00000167332; TAA
DVMFISLSY

SEQ ID NO: 56411 - protein, 9 aa, Homo sapiens
  Table A; Target 56411; HLA-A*29:02; OR51E2; ENSG00000167332; TAA
DVMFISLSY

SEQ ID NO: 56412 - protein, 9 aa, Homo sapiens
  Table A; Target 56412; HLA-B*35:01; OR51E2; ENSG00000167332; TAA
DVMFISLSY

SEQ ID NO: 56413 - protein, 10 aa, Homo sapiens
  Table A; Target 56413; HLA-A*25:01; OR51E2; ENSG00000167332; TAA
DVMFISLSYF

SEQ ID NO: 56414 - protein, 10 aa, Homo sapiens
  Table A; Target 56414; HLA-A*26:01; OR51E2; ENSG00000167332; TAA
DVMFISLSYF

SEQ ID NO: 56415 - protein, 11 aa, Homo sapiens
  Table A; Target 56415; HLA-A*30:02; OR51E2; ENSG00000167332; TAA
FCHSNVLSHSY

SEQ ID NO: 56416 - protein, 8 aa, Homo sapiens
  Table A; Target 56416; HLA-B*37:01; OR51E2; ENSG00000167332; TAA
FDSREISF

SEQ ID NO: 56417 - protein, 9 aa, Homo sapiens
  Table A; Target 56417; HLA-B*18:01; OR51E2; ENSG00000167332; TAA
FEACLTQMF

SEQ ID NO: 56418 - protein, 9 aa, Homo sapiens
  Table A; Target 56418; HLA-B*44:02; OR51E2; ENSG00000167332; TAA
FEACLTQMF

SEQ ID NO: 56419 - protein, 9 aa, Homo sapiens
  Table A; Target 56419; HLA-A*23:01; OR51E2; ENSG00000167332; TAA
FFFPLPLLI

SEQ ID NO: 56420 - protein, 9 aa, Homo sapiens
  Table A; Target 56420; HLA-A*24:02; OR51E2; ENSG00000167332; TAA
FFFPLPLLI

SEQ ID NO: 56421 - protein, 9 aa, Homo sapiens
  Table A; Target 56421; HLA-A*29:02; OR51E2; ENSG00000167332; TAA
FFFPLPLLI

SEQ ID NO: 56422 - protein, 9 aa, Homo sapiens
  Table A; Target 56422; HLA-A*29:02; OR51E2; ENSG00000167332; TAA
FFPLPLLIK

SEQ ID NO: 56423 - protein, 9 aa, Homo sapiens
  Table A; Target 56423; HLA-C*12:03; OR51E2; ENSG00000167332; TAA
FGNSLHPIV

SEQ ID NO: 56424 - protein, 10 aa, Homo sapiens
  Table A; Target 56424; HLA-A*31:01; OR51E2; ENSG00000167332; TAA
FGNSLHPIVR

SEQ ID NO: 56425 - protein, 8 aa, Homo sapiens
  Table A; Target 56425; HLA-B*08:01; OR51E2; ENSG00000167332; TAA
FLIIRTVL

SEQ ID NO: 56426 - protein, 10 aa, Homo sapiens
  Table A; Target 56426; HLA-A*02:03; OR51E2; ENSG00000167332; TAA
FLIIRTVLQL

SEQ ID NO: 56427 - protein, 8 aa, Homo sapiens
  Table A; Target 56427; HLA-B*51:01; OR51E2; ENSG00000167332; TAA
FPLLSMYV

SEQ ID NO: 56428 - protein, 9 aa, Homo sapiens
  Table A; Target 56428; HLA-B*51:01; OR51E2; ENSG00000167332; TAA
FPLLSMYVV

SEQ ID NO: 56429 - protein, 9 aa, Homo sapiens
  Table A; Target 56429; HLA-B*54:01; OR51E2; ENSG00000167332; TAA
FPLLSMYVV

SEQ ID NO: 56430 - protein, 9 aa, Homo sapiens
  Table A; Target 56430; HLA-B*56:01; OR51E2; ENSG00000167332; TAA
FPLLSMYVV

SEQ ID NO: 56431 - protein, 10 aa, Homo sapiens
  Table A; Target 56431; HLA-B*54:01; OR51E2; ENSG00000167332; TAA
FPLLSMYVVA

SEQ ID NO: 56432 - protein, 9 aa, Homo sapiens
  Table A; Target 56432; HLA-A*68:02; OR51E2; ENSG00000167332; TAA
FTHATFVLI

SEQ ID NO: 56433 - protein, 9 aa, Homo sapiens
  Table A; Target 56433; HLA-A*02:01; OR51E2; ENSG00000167332; TAA
FVLIGIPGL

SEQ ID NO: 56434 - protein, 9 aa, Homo sapiens
  Table A; Target 56434; HLA-A*02:04; OR51E2; ENSG00000167332; TAA
FVLIGIPGL

SEQ ID NO: 56435 - protein, 9 aa, Homo sapiens
  Table A; Target 56435; HLA-A*02:07; OR51E2; ENSG00000167332; TAA
FVLIGIPGL

SEQ ID NO: 56436 - protein, 10 aa, Homo sapiens
  Table A; Target 56436; HLA-A*24:02; OR51E2; ENSG00000167332; TAA
FWFDSREISF

SEQ ID NO: 56437 - protein, 10 aa, Homo sapiens
  Table A; Target 56437; HLA-A*29:02; OR51E2; ENSG00000167332; TAA
FYVPLIGLSV

SEQ ID NO: 56438 - protein, 8 aa, Homo sapiens
  Table A; Target 56438; HLA-B*37:01; OR51E2; ENSG00000167332; TAA
GLSVVHRF

SEQ ID NO: 56439 - protein, 8 aa, Homo sapiens
  Table A; Target 56439; HLA-B*13:02; OR51E2; ENSG00000167332; TAA
GLTAILLV

SEQ ID NO: 56440 - protein, 9 aa, Homo sapiens
  Table A; Target 56440; HLA-A*02:07; OR51E2; ENSG00000167332; TAA
GVDVMFISL

SEQ ID NO: 56441 - protein, 9 aa, Homo sapiens
  Table A; Target 56441; HLA-A*68:02; OR51E2; ENSG00000167332; TAA
HAAVLNNTV

SEQ ID NO: 56442 - protein, 9 aa, Homo sapiens
  Table A; Target 56442; HLA-B*13:02; OR51E2; ENSG00000167332; TAA
HAAVLNNTV

SEQ ID NO: 56443 - protein, 9 aa, Homo sapiens
  Table A; Target 56443; HLA-B*35:03; OR51E2; ENSG00000167332; TAA
HAAVLNNTV

SEQ ID NO: 56444 - protein, 9 aa, Homo sapiens
  Table A; Target 56444; HLA-B*38:01; OR51E2; ENSG00000167332; TAA
HAAVLNNTV

SEQ ID NO: 56445 - protein, 9 aa, Homo sapiens
  Table A; Target 56445; HLA-B*39:01; OR51E2; ENSG00000167332; TAA
HAAVLNNTV

SEQ ID NO: 56446 - protein, 9 aa, Homo sapiens
  Table A; Target 56446; HLA-B*51:01; OR51E2; ENSG00000167332; TAA
HAAVLNNTV

SEQ ID NO: 56447 - protein, 9 aa, Homo sapiens
  Table A; Target 56447; HLA-B*54:01; OR51E2; ENSG00000167332; TAA
HAAVLNNTV

SEQ ID NO: 56448 - protein, 9 aa, Homo sapiens
  Table A; Target 56448; HLA-B*58:01; OR51E2; ENSG00000167332; TAA
HAAVLNNTV

SEQ ID NO: 56449 - protein, 9 aa, Homo sapiens
  Table A; Target 56449; HLA-C*02:02; OR51E2; ENSG00000167332; TAA
HAAVLNNTV

SEQ ID NO: 56450 - protein, 9 aa, Homo sapiens
  Table A; Target 56450; HLA-C*03:03; OR51E2; ENSG00000167332; TAA
HAAVLNNTV

SEQ ID NO: 56451 - protein, 9 aa, Homo sapiens
  Table A; Target 56451; HLA-C*03:04; OR51E2; ENSG00000167332; TAA
HAAVLNNTV

SEQ ID NO: 56452 - protein, 9 aa, Homo sapiens
  Table A; Target 56452; HLA-C*07:06; OR51E2; ENSG00000167332; TAA
HAAVLNNTV

SEQ ID NO: 56453 - protein, 9 aa, Homo sapiens
  Table A; Target 56453; HLA-C*12:03; OR51E2; ENSG00000167332; TAA
HAAVLNNTV

SEQ ID NO: 56454 - protein, 9 aa, Homo sapiens
  Table A; Target 56454; HLA-C*16:02; OR51E2; ENSG00000167332; TAA
HAAVLNNTV

SEQ ID NO: 56455 - protein, 9 aa, Homo sapiens
  Table A; Target 56455; HLA-C*16:04; OR51E2; ENSG00000167332; TAA
HAAVLNNTV

SEQ ID NO: 56456 - protein, 11 aa, Homo sapiens
  Table A; Target 56456; HLA-B*54:01; OR51E2; ENSG00000167332; TAA
HAAVLNNTVTA

SEQ ID NO: 56457 - protein, 10 aa, Homo sapiens
  Table A; Target 56457; HLA-B*51:01; OR51E2; ENSG00000167332; TAA
HALSAIESTI

SEQ ID NO: 56458 - protein, 11 aa, Homo sapiens
  Table A; Target 56458; HLA-B*35:03; OR51E2; ENSG00000167332; TAA
HALSAIESTIL

SEQ ID NO: 56459 - protein, 9 aa, Homo sapiens
  Table A; Target 56459; HLA-A*68:02; OR51E2; ENSG00000167332; TAA
HATFVLIGI

SEQ ID NO: 56460 - protein, 9 aa, Homo sapiens
  Table A; Target 56460; HLA-B*51:01; OR51E2; ENSG00000167332; TAA
HATFVLIGI

SEQ ID NO: 56461 - protein, 9 aa, Homo sapiens
  Table A; Target 56461; HLA-A*29:02; OR51E2; ENSG00000167332; TAA
HIGVVLAFY

SEQ ID NO: 56462 - protein, 8 aa, Homo sapiens
  Table A; Target 56462; HLA-B*07:02; OR51E2; ENSG00000167332; TAA
HPIVRVVM

SEQ ID NO: 56463 - protein, 8 aa, Homo sapiens
  Table A; Target 56463; HLA-B*08:01; OR51E2; ENSG00000167332; TAA
HPIVRVVM

SEQ ID NO: 56464 - protein, 8 aa, Homo sapiens
  Table A; Target 56464; HLA-B*08:01; OR51E2; ENSG00000167332; TAA
HPLRHAAV

SEQ ID NO: 56465 - protein, 9 aa, Homo sapiens
  Table A; Target 56465; HLA-B*07:02; OR51E2; ENSG00000167332; TAA
HPLRHAAVL

SEQ ID NO: 56466 - protein, 9 aa, Homo sapiens
  Table A; Target 56466; HLA-B*08:01; OR51E2; ENSG00000167332; TAA
HPLRHAAVL

SEQ ID NO: 56467 - protein, 9 aa, Homo sapiens
  Table A; Target 56467; HLA-C*07:02; OR51E2; ENSG00000167332; TAA
HPLRHAAVL

SEQ ID NO: 56468 - protein, 9 aa, Homo sapiens
  Table A; Target 56468; HLA-A*01:01; OR51E2; ENSG00000167332; TAA
HQDVMKLAY

SEQ ID NO: 56469 - protein, 9 aa, Homo sapiens
  Table A; Target 56469; HLA-A*29:02; OR51E2; ENSG00000167332; TAA
HQDVMKLAY

SEQ ID NO: 56470 - protein, 9 aa, Homo sapiens
  Table A; Target 56470; HLA-A*30:02; OR51E2; ENSG00000167332; TAA
HQDVMKLAY

SEQ ID NO: 56471 - protein, 9 aa, Homo sapiens
  Table A; Target 56471; HLA-A*32:01; OR51E2; ENSG00000167332; TAA
HQDVMKLAY

SEQ ID NO: 56472 - protein, 9 aa, Homo sapiens
  Table A; Target 56472; HLA-B*15:01; OR51E2; ENSG00000167332; TAA
HQDVMKLAY

SEQ ID NO: 56473 - protein, 9 aa, Homo sapiens
  Table A; Target 56473; HLA-B*15:03; OR51E2; ENSG00000167332; TAA
HQDVMKLAY

SEQ ID NO: 56474 - protein, 9 aa, Homo sapiens
  Table A; Target 56474; HLA-B*18:01; OR51E2; ENSG00000167332; TAA
HQDVMKLAY

SEQ ID NO: 56475 - protein, 9 aa, Homo sapiens
  Table A; Target 56475; HLA-B*35:01; OR51E2; ENSG00000167332; TAA
HQDVMKLAY

SEQ ID NO: 56476 - protein, 9 aa, Homo sapiens
  Table A; Target 56476; HLA-B*44:03; OR51E2; ENSG00000167332; TAA
HQDVMKLAY

SEQ ID NO: 56477 - protein, 9 aa, Homo sapiens
  Table A; Target 56477; HLA-C*03:03; OR51E2; ENSG00000167332; TAA
HQDVMKLAY

SEQ ID NO: 56478 - protein, 9 aa, Homo sapiens
  Table A; Target 56478; HLA-C*16:02; OR51E2; ENSG00000167332; TAA
HQDVMKLAY

SEQ ID NO: 56479 - protein, 9 aa, Homo sapiens
  Table A; Target 56479; HLA-C*16:04; OR51E2; ENSG00000167332; TAA
HQDVMKLAY

SEQ ID NO: 56480 - protein, 9 aa, Homo sapiens
  Table A; Target 56480; HLA-A*01:01; OR51E2; ENSG00000167332; TAA
HSNVLSHSY

SEQ ID NO: 56481 - protein, 9 aa, Homo sapiens
  Table A; Target 56481; HLA-A*25:01; OR51E2; ENSG00000167332; TAA
HSNVLSHSY

SEQ ID NO: 56482 - protein, 9 aa, Homo sapiens
  Table A; Target 56482; HLA-A*26:01; OR51E2; ENSG00000167332; TAA
HSNVLSHSY

SEQ ID NO: 56483 - protein, 9 aa, Homo sapiens
  Table A; Target 56483; HLA-A*29:02; OR51E2; ENSG00000167332; TAA
HSNVLSHSY

SEQ ID NO: 56484 - protein, 9 aa, Homo sapiens
  Table A; Target 56484; HLA-A*30:02; OR51E2; ENSG00000167332; TAA
HSNVLSHSY

SEQ ID NO: 56485 - protein, 9 aa, Homo sapiens
  Table A; Target 56485; HLA-A*32:01; OR51E2; ENSG00000167332; TAA
HSNVLSHSY

SEQ ID NO: 56486 - protein, 9 aa, Homo sapiens
  Table A; Target 56486; HLA-A*33:01; OR51E2; ENSG00000167332; TAA
HSNVLSHSY

SEQ ID NO: 56487 - protein, 9 aa, Homo sapiens
  Table A; Target 56487; HLA-A*33:03; OR51E2; ENSG00000167332; TAA
HSNVLSHSY

SEQ ID NO: 56488 - protein, 9 aa, Homo sapiens
  Table A; Target 56488; HLA-B*15:01; OR51E2; ENSG00000167332; TAA
HSNVLSHSY

SEQ ID NO: 56489 - protein, 9 aa, Homo sapiens
  Table A; Target 56489; HLA-B*15:03; OR51E2; ENSG00000167332; TAA
HSNVLSHSY

SEQ ID NO: 56490 - protein, 9 aa, Homo sapiens
  Table A; Target 56490; HLA-B*18:01; OR51E2; ENSG00000167332; TAA
HSNVLSHSY

SEQ ID NO: 56491 - protein, 9 aa, Homo sapiens
  Table A; Target 56491; HLA-B*35:01; OR51E2; ENSG00000167332; TAA
HSNVLSHSY

SEQ ID NO: 56492 - protein, 9 aa, Homo sapiens
  Table A; Target 56492; HLA-B*44:02; OR51E2; ENSG00000167332; TAA
HSNVLSHSY

SEQ ID NO: 56493 - protein, 9 aa, Homo sapiens
  Table A; Target 56493; HLA-B*44:03; OR51E2; ENSG00000167332; TAA
HSNVLSHSY

SEQ ID NO: 56494 - protein, 9 aa, Homo sapiens
  Table A; Target 56494; HLA-B*46:01; OR51E2; ENSG00000167332; TAA
HSNVLSHSY

SEQ ID NO: 56495 - protein, 9 aa, Homo sapiens
  Table A; Target 56495; HLA-B*57:01; OR51E2; ENSG00000167332; TAA
HSNVLSHSY

SEQ ID NO: 56496 - protein, 9 aa, Homo sapiens
  Table A; Target 56496; HLA-B*58:01; OR51E2; ENSG00000167332; TAA
HSNVLSHSY

SEQ ID NO: 56497 - protein, 9 aa, Homo sapiens
  Table A; Target 56497; HLA-C*02:02; OR51E2; ENSG00000167332; TAA
HSNVLSHSY

SEQ ID NO: 56498 - protein, 9 aa, Homo sapiens
  Table A; Target 56498; HLA-C*07:04; OR51E2; ENSG00000167332; TAA
HSNVLSHSY

SEQ ID NO: 56499 - protein, 9 aa, Homo sapiens
  Table A; Target 56499; HLA-C*07:06; OR51E2; ENSG00000167332; TAA
HSNVLSHSY

SEQ ID NO: 56500 - protein, 9 aa, Homo sapiens
  Table A; Target 56500; HLA-C*16:01; OR51E2; ENSG00000167332; TAA
HSNVLSHSY

SEQ ID NO: 56501 - protein, 9 aa, Homo sapiens
  Table A; Target 56501; HLA-C*16:02; OR51E2; ENSG00000167332; TAA
HSNVLSHSY

SEQ ID NO: 56502 - protein, 9 aa, Homo sapiens
  Table A; Target 56502; HLA-C*16:04; OR51E2; ENSG00000167332; TAA
HSNVLSHSY

SEQ ID NO: 56503 - protein, 8 aa, Homo sapiens
  Table A; Target 56503; HLA-B*18:01; OR51E2; ENSG00000167332; TAA
IESTILLA

SEQ ID NO: 56504 - protein, 8 aa, Homo sapiens
  Table A; Target 56504; HLA-B*49:01; OR51E2; ENSG00000167332; TAA
IESTILLA

SEQ ID NO: 56505 - protein, 9 aa, Homo sapiens
  Table A; Target 56505; HLA-A*30:01; OR51E2; ENSG00000167332; TAA
IESTILLAM

SEQ ID NO: 56506 - protein, 9 aa, Homo sapiens
  Table A; Target 56506; HLA-B*18:01; OR51E2; ENSG00000167332; TAA
IESTILLAM

SEQ ID NO: 56507 - protein, 9 aa, Homo sapiens
  Table A; Target 56507; HLA-B*37:01; OR51E2; ENSG00000167332; TAA
IESTILLAM

SEQ ID NO: 56508 - protein, 9 aa, Homo sapiens
  Table A; Target 56508; HLA-B*40:01; OR51E2; ENSG00000167332; TAA
IESTILLAM

SEQ ID NO: 56509 - protein, 9 aa, Homo sapiens
  Table A; Target 56509; HLA-B*40:02; OR51E2; ENSG00000167332; TAA
IESTILLAM

SEQ ID NO: 56510 - protein, 9 aa, Homo sapiens
  Table A; Target 56510; HLA-B*44:02; OR51E2; ENSG00000167332; TAA
IESTILLAM

SEQ ID NO: 56511 - protein, 9 aa, Homo sapiens
  Table A; Target 56511; HLA-B*44:03; OR51E2; ENSG00000167332; TAA
IESTILLAM

SEQ ID NO: 56512 - protein, 9 aa, Homo sapiens
  Table A; Target 56512; HLA-B*49:01; OR51E2; ENSG00000167332; TAA
IESTILLAM

SEQ ID NO: 56513 - protein, 9 aa, Homo sapiens
  Table A; Target 56513; HLA-C*16:04; OR51E2; ENSG00000167332; TAA
IESTILLAM

SEQ ID NO: 56514 - protein, 9 aa, Homo sapiens
  Table A; Target 56514; HLA-A*24:02; OR51E2; ENSG00000167332; TAA
IGLSVVHRF

SEQ ID NO: 56515 - protein, 9 aa, Homo sapiens
  Table A; Target 56515; HLA-B*57:01; OR51E2; ENSG00000167332; TAA
IGLSVVHRF

SEQ ID NO: 56516 - protein, 11 aa, Homo sapiens
  Table A; Target 56516; HLA-B*38:01; OR51E2; ENSG00000167332; TAA
IHALSAIESTI

SEQ ID NO: 56517 - protein, 9 aa, Homo sapiens
  Table A; Target 56517; HLA-A*32:01; OR51E2; ENSG00000167332; TAA
IVAVVRGSL

SEQ ID NO: 56518 - protein, 9 aa, Homo sapiens
  Table A; Target 56518; HLA-B*07:02; OR51E2; ENSG00000167332; TAA
IVAVVRGSL

SEQ ID NO: 56519 - protein, 9 aa, Homo sapiens
  Table A; Target 56519; HLA-C*07:02; OR51E2; ENSG00000167332; TAA
IVAVVRGSL

SEQ ID NO: 56520 - protein, 9 aa, Homo sapiens
  Table A; Target 56520; HLA-A*24:02; OR51E2; ENSG00000167332; TAA
IYGAKTKQI

SEQ ID NO: 56521 - protein, 9 aa, Homo sapiens
  Table A; Target 56521; HLA-A*23:01; OR51E2; ENSG00000167332; TAA
IYLLLPPVI

SEQ ID NO: 56522 - protein, 9 aa, Homo sapiens
  Table A; Target 56522; HLA-A*24:02; OR51E2; ENSG00000167332; TAA
IYLLLPPVI

SEQ ID NO: 56523 - protein, 8 aa, Homo sapiens
  Table A; Target 56523; HLA-C*03:03; OR51E2; ENSG00000167332; TAA
LAAIDLAL

SEQ ID NO: 56524 - protein, 9 aa, Homo sapiens
  Table A; Target 56524; HLA-B*46:01; OR51E2; ENSG00000167332; TAA
LAFCHSNVL

SEQ ID NO: 56525 - protein, 9 aa, Homo sapiens
  Table A; Target 56525; HLA-C*02:02; OR51E2; ENSG00000167332; TAA
LAFCHSNVL

SEQ ID NO: 56526 - protein, 9 aa, Homo sapiens
  Table A; Target 56526; HLA-C*03:03; OR51E2; ENSG00000167332; TAA
LAFCHSNVL

SEQ ID NO: 56527 - protein, 9 aa, Homo sapiens
  Table A; Target 56527; HLA-C*03:04; OR51E2; ENSG00000167332; TAA
LAFCHSNVL

SEQ ID NO: 56528 - protein, 9 aa, Homo sapiens
  Table A; Target 56528; HLA-C*12:03; OR51E2; ENSG00000167332; TAA
LAFCHSNVL

SEQ ID NO: 56529 - protein, 8 aa, Homo sapiens
  Table A; Target 56529; HLA-B*51:01; OR51E2; ENSG00000167332; TAA
LAFYVPLI

SEQ ID NO: 56530 - protein, 8 aa, Homo sapiens
  Table A; Target 56530; HLA-C*03:03; OR51E2; ENSG00000167332; TAA
LALSTSTM

SEQ ID NO: 56531 - protein, 8 aa, Homo sapiens
  Table A; Target 56531; HLA-C*03:04; OR51E2; ENSG00000167332; TAA
LALSTSTM

SEQ ID NO: 56532 - protein, 9 aa, Homo sapiens
  Table A; Target 56532; HLA-A*29:02; OR51E2; ENSG00000167332; TAA
LFFFPLPLL

SEQ ID NO: 56533 - protein, 9 aa, Homo sapiens
  Table A; Target 56533; HLA-A*03:01; OR51E2; ENSG00000167332; TAA
LIGIPGLEK

SEQ ID NO: 56534 - protein, 11 aa, Homo sapiens
  Table A; Target 56534; HLA-A*02:04; OR51E2; ENSG00000167332; TAA
LLLPPVINPII

SEQ ID NO: 56535 - protein, 9 aa, Homo sapiens
  Table A; Target 56535; HLA-A*02:01; OR51E2; ENSG00000167332; TAA
LLPPVINPI

SEQ ID NO: 56536 - protein, 9 aa, Homo sapiens
  Table A; Target 56536; HLA-A*02:04; OR51E2; ENSG00000167332; TAA
LLPPVINPI

SEQ ID NO: 56537 - protein, 9 aa, Homo sapiens
  Table A; Target 56537; HLA-A*02:07; OR51E2; ENSG00000167332; TAA
LLPPVINPI

SEQ ID NO: 56538 - protein, 9 aa, Homo sapiens
  Table A; Target 56538; HLA-A*24:02; OR51E2; ENSG00000167332; TAA
LLPPVINPI

SEQ ID NO: 56539 - protein, 9 aa, Homo sapiens
  Table A; Target 56539; HLA-C*01:02; OR51E2; ENSG00000167332; TAA
LLPPVINPI

SEQ ID NO: 56540 - protein, 10 aa, Homo sapiens
  Table A; Target 56540; HLA-A*02:07; OR51E2; ENSG00000167332; TAA
LLPPVINPII

SEQ ID NO: 56541 - protein, 11 aa, Homo sapiens
  Table A; Target 56541; HLA-A*29:02; OR51E2; ENSG00000167332; TAA
LLPPVINPIIY

SEQ ID NO: 56542 - protein, 8 aa, Homo sapiens
  Table A; Target 56542; HLA-B*08:01; OR51E2; ENSG00000167332; TAA
LPNVVYGL

SEQ ID NO: 56543 - protein, 8 aa, Homo sapiens
  Table A; Target 56543; HLA-B*35:01; OR51E2; ENSG00000167332; TAA
LPNVVYGL

SEQ ID NO: 56544 - protein, 10 aa, Homo sapiens
  Table A; Target 56544; HLA-B*54:01; OR51E2; ENSG00000167332; TAA
LPNVVYGLTA

SEQ ID NO: 56545 - protein, 10 aa, Homo sapiens
  Table A; Target 56545; HLA-B*56:01; OR51E2; ENSG00000167332; TAA
LPNVVYGLTA

SEQ ID NO: 56546 - protein, 8 aa, Homo sapiens
  Table A; Target 56546; HLA-B*51:01; OR51E2; ENSG00000167332; TAA
LPPVINPI

SEQ ID NO: 56547 - protein, 9 aa, Homo sapiens
  Table A; Target 56547; HLA-B*35:03; OR51E2; ENSG00000167332; TAA
LPPVINPII

SEQ ID NO: 56548 - protein, 9 aa, Homo sapiens
  Table A; Target 56548; HLA-B*51:01; OR51E2; ENSG00000167332; TAA
LPPVINPII

SEQ ID NO: 56549 - protein, 10 aa, Homo sapiens
  Table A; Target 56549; HLA-B*35:01; OR51E2; ENSG00000167332; TAA
LPPVINPIIY

SEQ ID NO: 56550 - protein, 9 aa, Homo sapiens
  Table A; Target 56550; HLA-B*58:01; OR51E2; ENSG00000167332; TAA
LSTSTMPKI

SEQ ID NO: 56551 - protein, 8 aa, Homo sapiens
  Table A; Target 56551; HLA-B*51:01; OR51E2; ENSG00000167332; TAA
MGVDVMFI

SEQ ID NO: 56552 - protein, 9 aa, Homo sapiens
  Table A; Target 56552; HLA-A*02:01; OR51E2; ENSG00000167332; TAA
MLAAIDLAL

SEQ ID NO: 56553 - protein, 9 aa, Homo sapiens
  Table A; Target 56553; HLA-A*02:03; OR51E2; ENSG00000167332; TAA
MLAAIDLAL

SEQ ID NO: 56554 - protein, 9 aa, Homo sapiens
  Table A; Target 56554; HLA-A*02:04; OR51E2; ENSG00000167332; TAA
MLAAIDLAL

SEQ ID NO: 56555 - protein, 9 aa, Homo sapiens
  Table A; Target 56555; HLA-A*02:07; OR51E2; ENSG00000167332; TAA
MLAAIDLAL

SEQ ID NO: 56556 - protein, 9 aa, Homo sapiens
  Table A; Target 56556; HLA-A*68:02; OR51E2; ENSG00000167332; TAA
MLAAIDLAL

SEQ ID NO: 56557 - protein, 9 aa, Homo sapiens
  Table A; Target 56557; HLA-B*13:02; OR51E2; ENSG00000167332; TAA
MLAAIDLAL

SEQ ID NO: 56558 - protein, 9 aa, Homo sapiens
  Table A; Target 56558; HLA-B*35:03; OR51E2; ENSG00000167332; TAA
MLAAIDLAL

SEQ ID NO: 56559 - protein, 9 aa, Homo sapiens
  Table A; Target 56559; HLA-B*55:01; OR51E2; ENSG00000167332; TAA
MLAAIDLAL

SEQ ID NO: 56560 - protein, 9 aa, Homo sapiens
  Table A; Target 56560; HLA-A*33:01; OR51E2; ENSG00000167332; TAA
NCIVVFIVR

SEQ ID NO: 56561 - protein, 9 aa, Homo sapiens
  Table A; Target 56561; HLA-A*23:01; OR51E2; ENSG00000167332; TAA
NFTHATFVL

SEQ ID NO: 56562 - protein, 8 aa, Homo sapiens
  Table A; Target 56562; HLA-A*33:01; OR51E2; ENSG00000167332; TAA
NSLHPIVR

SEQ ID NO: 56563 - protein, 9 aa, Homo sapiens
  Table A; Target 56563; HLA-A*02:04; OR51E2; ENSG00000167332; TAA
NSLHPIVRV

SEQ ID NO: 56564 - protein, 9 aa, Homo sapiens
  Table A; Target 56564; HLA-A*68:02; OR51E2; ENSG00000167332; TAA
NSLHPIVRV

SEQ ID NO: 56565 - protein, 11 aa, Homo sapiens
  Table A; Target 56565; HLA-A*68:02; OR51E2; ENSG00000167332; TAA
NTVTAQIGIVA

SEQ ID NO: 56566 - protein, 9 aa, Homo sapiens
  Table A; Target 56566; HLA-A*25:01; OR51E2; ENSG00000167332; TAA
NVVYGLTAI

SEQ ID NO: 56567 - protein, 9 aa, Homo sapiens
  Table A; Target 56567; HLA-B*35:01; OR51E2; ENSG00000167332; TAA
PPVINPIIY

SEQ ID NO: 56568 - protein, 8 aa, Homo sapiens
  Table A; Target 56568; HLA-C*07:01; OR51E2; ENSG00000167332; TAA
QDVMKLAY

SEQ ID NO: 56569 - protein, 9 aa, Homo sapiens
  Table A; Target 56569; HLA-A*31:01; OR51E2; ENSG00000167332; TAA
QIGIVAVVR

SEQ ID NO: 56570 - protein, 9 aa, Homo sapiens
  Table A; Target 56570; HLA-A*33:03; OR51E2; ENSG00000167332; TAA
QIGIVAVVR

SEQ ID NO: 56571 - protein, 9 aa, Homo sapiens
  Table A; Target 56571; HLA-A*68:01; OR51E2; ENSG00000167332; TAA
QIGIVAVVR

SEQ ID NO: 56572 - protein, 9 aa, Homo sapiens
  Table A; Target 56572; HLA-C*07:06; OR51E2; ENSG00000167332; TAA
QIGIVAVVR

SEQ ID NO: 56573 - protein, 9 aa, Homo sapiens
  Table A; Target 56573; HLA-B*08:01; OR51E2; ENSG00000167332; TAA
QIRTRVLAM

SEQ ID NO: 56574 - protein, 8 aa, Homo sapiens
  Table A; Target 56574; HLA-A*02:04; OR51E2; ENSG00000167332; TAA
QMFFIHAL

SEQ ID NO: 56575 - protein, 9 aa, Homo sapiens
  Table A; Target 56575; HLA-A*30:01; OR51E2; ENSG00000167332; TAA
REISFEACL

SEQ ID NO: 56576 - protein, 9 aa, Homo sapiens
  Table A; Target 56576; HLA-B*40:01; OR51E2; ENSG00000167332; TAA
REISFEACL

SEQ ID NO: 56577 - protein, 9 aa, Homo sapiens
  Table A; Target 56577; HLA-B*44:02; OR51E2; ENSG00000167332; TAA
REISFEACL

SEQ ID NO: 56578 - protein, 9 aa, Homo sapiens
  Table A; Target 56578; HLA-B*44:03; OR51E2; ENSG00000167332; TAA
REISFEACL

SEQ ID NO: 56579 - protein, 10 aa, Homo sapiens
  Table A; Target 56579; HLA-B*38:01; OR51E2; ENSG00000167332; TAA
RHAAVLNNTV

SEQ ID NO: 56580 - protein, 10 aa, Homo sapiens
  Table A; Target 56580; HLA-B*57:01; OR51E2; ENSG00000167332; TAA
RSLHAPMYLF

SEQ ID NO: 56581 - protein, 11 aa, Homo sapiens
  Table A; Target 56581; HLA-A*01:01; OR51E2; ENSG00000167332; TAA
RTERSLHAPMY

SEQ ID NO: 56582 - protein, 9 aa, Homo sapiens
  Table A; Target 56582; HLA-A*03:01; OR51E2; ENSG00000167332; TAA
RTVLQLPSK

SEQ ID NO: 56583 - protein, 9 aa, Homo sapiens
  Table A; Target 56583; HLA-A*03:02; OR51E2; ENSG00000167332; TAA
RTVLQLPSK

SEQ ID NO: 56584 - protein, 9 aa, Homo sapiens
  Table A; Target 56584; HLA-A*11:01; OR51E2; ENSG00000167332; TAA
RTVLQLPSK

SEQ ID NO: 56585 - protein, 8 aa, Homo sapiens
  Table A; Target 56585; HLA-B*35:03; OR51E2; ENSG00000167332; TAA
SAIESTIL

SEQ ID NO: 56586 - protein, 8 aa, Homo sapiens
  Table A; Target 56586; HLA-C*03:03; OR51E2; ENSG00000167332; TAA
SAIESTIL

SEQ ID NO: 56587 - protein, 8 aa, Homo sapiens
  Table A; Target 56587; HLA-C*03:04; OR51E2; ENSG00000167332; TAA
SAIESTIL

SEQ ID NO: 56588 - protein, 8 aa, Homo sapiens
  Table A; Target 56588; HLA-C*05:01; OR51E2; ENSG00000167332; TAA
SAIESTIL

SEQ ID NO: 56589 - protein, 9 aa, Homo sapiens
  Table A; Target 56589; HLA-A*02:01; OR51E2; ENSG00000167332; TAA
SAIESTILL

SEQ ID NO: 56590 - protein, 9 aa, Homo sapiens
  Table A; Target 56590; HLA-A*02:04; OR51E2; ENSG00000167332; TAA
SAIESTILL

SEQ ID NO: 56591 - protein, 9 aa, Homo sapiens
  Table A; Target 56591; HLA-A*02:07; OR51E2; ENSG00000167332; TAA
SAIESTILL

SEQ ID NO: 56592 - protein, 9 aa, Homo sapiens
  Table A; Target 56592; HLA-A*11:01; OR51E2; ENSG00000167332; TAA
SAIESTILL

SEQ ID NO: 56593 - protein, 9 aa, Homo sapiens
  Table A; Target 56593; HLA-A*23:01; OR51E2; ENSG00000167332; TAA
SAIESTILL

SEQ ID NO: 56594 - protein, 9 aa, Homo sapiens
  Table A; Target 56594; HLA-A*24:02; OR51E2; ENSG00000167332; TAA
SAIESTILL

SEQ ID NO: 56595 - protein, 9 aa, Homo sapiens
  Table A; Target 56595; HLA-A*25:01; OR51E2; ENSG00000167332; TAA
SAIESTILL

SEQ ID NO: 56596 - protein, 9 aa, Homo sapiens
  Table A; Target 56596; HLA-A*26:01; OR51E2; ENSG00000167332; TAA
SAIESTILL

SEQ ID NO: 56597 - protein, 9 aa, Homo sapiens
  Table A; Target 56597; HLA-A*30:01; OR51E2; ENSG00000167332; TAA
SAIESTILL

SEQ ID NO: 56598 - protein, 9 aa, Homo sapiens
  Table A; Target 56598; HLA-A*32:01; OR51E2; ENSG00000167332; TAA
SAIESTILL

SEQ ID NO: 56599 - protein, 9 aa, Homo sapiens
  Table A; Target 56599; HLA-A*68:02; OR51E2; ENSG00000167332; TAA
SAIESTILL

SEQ ID NO: 56600 - protein, 9 aa, Homo sapiens
  Table A; Target 56600; HLA-B*07:02; OR51E2; ENSG00000167332; TAA
SAIESTILL

SEQ ID NO: 56601 - protein, 9 aa, Homo sapiens
  Table A; Target 56601; HLA-B*15:01; OR51E2; ENSG00000167332; TAA
SAIESTILL

SEQ ID NO: 56602 - protein, 9 aa, Homo sapiens
  Table A; Target 56602; HLA-B*15:03; OR51E2; ENSG00000167332; TAA
SAIESTILL

SEQ ID NO: 56603 - protein, 9 aa, Homo sapiens
  Table A; Target 56603; HLA-B*27:05; OR51E2; ENSG00000167332; TAA
SAIESTILL

SEQ ID NO: 56604 - protein, 9 aa, Homo sapiens
  Table A; Target 56604; HLA-B*35:01; OR51E2; ENSG00000167332; TAA
SAIESTILL

SEQ ID NO: 56605 - protein, 9 aa, Homo sapiens
  Table A; Target 56605; HLA-B*35:03; OR51E2; ENSG00000167332; TAA
SAIESTILL

SEQ ID NO: 56606 - protein, 9 aa, Homo sapiens
  Table A; Target 56606; HLA-B*38:01; OR51E2; ENSG00000167332; TAA
SAIESTILL

SEQ ID NO: 56607 - protein, 9 aa, Homo sapiens
  Table A; Target 56607; HLA-B*39:01; OR51E2; ENSG00000167332; TAA
SAIESTILL

SEQ ID NO: 56608 - protein, 9 aa, Homo sapiens
  Table A; Target 56608; HLA-B*40:01; OR51E2; ENSG00000167332; TAA
SAIESTILL

SEQ ID NO: 56609 - protein, 9 aa, Homo sapiens
  Table A; Target 56609; HLA-B*44:03; OR51E2; ENSG00000167332; TAA
SAIESTILL

SEQ ID NO: 56610 - protein, 9 aa, Homo sapiens
  Table A; Target 56610; HLA-B*46:01; OR51E2; ENSG00000167332; TAA
SAIESTILL

SEQ ID NO: 56611 - protein, 9 aa, Homo sapiens
  Table A; Target 56611; HLA-B*55:01; OR51E2; ENSG00000167332; TAA
SAIESTILL

SEQ ID NO: 56612 - protein, 9 aa, Homo sapiens
  Table A; Target 56612; HLA-B*57:01; OR51E2; ENSG00000167332; TAA
SAIESTILL

SEQ ID NO: 56613 - protein, 9 aa, Homo sapiens
  Table A; Target 56613; HLA-B*58:01; OR51E2; ENSG00000167332; TAA
SAIESTILL

SEQ ID NO: 56614 - protein, 9 aa, Homo sapiens
  Table A; Target 56614; HLA-C*01:02; OR51E2; ENSG00000167332; TAA
SAIESTILL

SEQ ID NO: 56615 - protein, 9 aa, Homo sapiens
  Table A; Target 56615; HLA-C*02:02; OR51E2; ENSG00000167332; TAA
SAIESTILL

SEQ ID NO: 56616 - protein, 9 aa, Homo sapiens
  Table A; Target 56616; HLA-C*03:03; OR51E2; ENSG00000167332; TAA
SAIESTILL

SEQ ID NO: 56617 - protein, 9 aa, Homo sapiens
  Table A; Target 56617; HLA-C*03:04; OR51E2; ENSG00000167332; TAA
SAIESTILL

SEQ ID NO: 56618 - protein, 9 aa, Homo sapiens
  Table A; Target 56618; HLA-C*05:01; OR51E2; ENSG00000167332; TAA
SAIESTILL

SEQ ID NO: 56619 - protein, 9 aa, Homo sapiens
  Table A; Target 56619; HLA-C*07:04; OR51E2; ENSG00000167332; TAA
SAIESTILL

SEQ ID NO: 56620 - protein, 9 aa, Homo sapiens
  Table A; Target 56620; HLA-C*07:06; OR51E2; ENSG00000167332; TAA
SAIESTILL

SEQ ID NO: 56621 - protein, 9 aa, Homo sapiens
  Table A; Target 56621; HLA-C*12:03; OR51E2; ENSG00000167332; TAA
SAIESTILL

SEQ ID NO: 56622 - protein, 9 aa, Homo sapiens
  Table A; Target 56622; HLA-C*14:02; OR51E2; ENSG00000167332; TAA
SAIESTILL

SEQ ID NO: 56623 - protein, 9 aa, Homo sapiens
  Table A; Target 56623; HLA-C*16:01; OR51E2; ENSG00000167332; TAA
SAIESTILL

SEQ ID NO: 56624 - protein, 9 aa, Homo sapiens
  Table A; Target 56624; HLA-C*16:02; OR51E2; ENSG00000167332; TAA
SAIESTILL

SEQ ID NO: 56625 - protein, 9 aa, Homo sapiens
  Table A; Target 56625; HLA-C*16:04; OR51E2; ENSG00000167332; TAA
SAIESTILL

SEQ ID NO: 56626 - protein, 11 aa, Homo sapiens
  Table A; Target 56626; HLA-A*11:01; OR51E2; ENSG00000167332; TAA
SAIESTILLAM

SEQ ID NO: 56627 - protein, 11 aa, Homo sapiens
  Table A; Target 56627; HLA-B*35:01; OR51E2; ENSG00000167332; TAA
SAIESTILLAM

SEQ ID NO: 56628 - protein, 11 aa, Homo sapiens
  Table A; Target 56628; HLA-C*07:06; OR51E2; ENSG00000167332; TAA
SAIESTILLAM

SEQ ID NO: 56629 - protein, 9 aa, Homo sapiens
  Table A; Target 56629; HLA-A*32:01; OR51E2; ENSG00000167332; TAA
SCNFTHATF

SEQ ID NO: 56630 - protein, 9 aa, Homo sapiens
  Table A; Target 56630; HLA-A*23:01; OR51E2; ENSG00000167332; TAA
SHIGVVLAF

SEQ ID NO: 56631 - protein, 9 aa, Homo sapiens
  Table A; Target 56631; HLA-B*38:01; OR51E2; ENSG00000167332; TAA
SHIGVVLAF

SEQ ID NO: 56632 - protein, 9 aa, Homo sapiens
  Table A; Target 56632; HLA-B*39:01; OR51E2; ENSG00000167332; TAA
SHIGVVLAF

SEQ ID NO: 56633 - protein, 9 aa, Homo sapiens
  Table A; Target 56633; HLA-A*02:01; OR51E2; ENSG00000167332; TAA
SLFFFPLPL

SEQ ID NO: 56634 - protein, 9 aa, Homo sapiens
  Table A; Target 56634; HLA-A*02:03; OR51E2; ENSG00000167332; TAA
SLFFFPLPL

SEQ ID NO: 56635 - protein, 9 aa, Homo sapiens
  Table A; Target 56635; HLA-A*02:04; OR51E2; ENSG00000167332; TAA
SLFFFPLPL

SEQ ID NO: 56636 - protein, 10 aa, Homo sapiens
  Table A; Target 56636; HLA-A*02:03; OR51E2; ENSG00000167332; TAA
SLFFFPLPLL

SEQ ID NO: 56637 - protein, 10 aa, Homo sapiens
  Table A; Target 56637; HLA-A*02:04; OR51E2; ENSG00000167332; TAA
SLFFFPLPLL

SEQ ID NO: 56638 - protein, 8 aa, Homo sapiens
  Table A; Target 56638; HLA-A*02:03; OR51E2; ENSG00000167332; TAA
SLHPIVRV

SEQ ID NO: 56639 - protein, 8 aa, Homo sapiens
  Table A; Target 56639; HLA-A*02:04; OR51E2; ENSG00000167332; TAA
SLHPIVRV

SEQ ID NO: 56640 - protein, 9 aa, Homo sapiens
  Table A; Target 56640; HLA-A*02:01; OR51E2; ENSG00000167332; TAA
SLHPIVRVV

SEQ ID NO: 56641 - protein, 9 aa, Homo sapiens
  Table A; Target 56641; HLA-A*02:03; OR51E2; ENSG00000167332; TAA
SLHPIVRVV

SEQ ID NO: 56642 - protein, 9 aa, Homo sapiens
  Table A; Target 56642; HLA-A*02:04; OR51E2; ENSG00000167332; TAA
SLHPIVRVV

SEQ ID NO: 56643 - protein, 9 aa, Homo sapiens
  Table A; Target 56643; HLA-A*02:07; OR51E2; ENSG00000167332; TAA
SLHPIVRVV

SEQ ID NO: 56644 - protein, 9 aa, Homo sapiens
  Table A; Target 56644; HLA-A*68:02; OR51E2; ENSG00000167332; TAA
SLHPIVRVV

SEQ ID NO: 56645 - protein, 9 aa, Homo sapiens
  Table A; Target 56645; HLA-B*13:02; OR51E2; ENSG00000167332; TAA
SLHPIVRVV

SEQ ID NO: 56646 - protein, 9 aa, Homo sapiens
  Table A; Target 56646; HLA-B*55:01; OR51E2; ENSG00000167332; TAA
SLHPIVRVV

SEQ ID NO: 56647 - protein, 8 aa, Homo sapiens
  Table A; Target 56647; HLA-A*30:02; OR51E2; ENSG00000167332; TAA
SNVLSHSY

SEQ ID NO: 56648 - protein, 8 aa, Homo sapiens
  Table A; Target 56648; HLA-B*15:01; OR51E2; ENSG00000167332; TAA
SNVLSHSY

SEQ ID NO: 56649 - protein, 8 aa, Homo sapiens
  Table A; Target 56649; HLA-B*15:03; OR51E2; ENSG00000167332; TAA
SNVLSHSY

SEQ ID NO: 56650 - protein, 8 aa, Homo sapiens
  Table A; Target 56650; HLA-B*18:01; OR51E2; ENSG00000167332; TAA
SNVLSHSY

SEQ ID NO: 56651 - protein, 10 aa, Homo sapiens
  Table A; Target 56651; HLA-A*32:01; OR51E2; ENSG00000167332; TAA
SSCNFTHATF

SEQ ID NO: 56652 - protein, 9 aa, Homo sapiens
  Table A; Target 56652; HLA-A*02:01; OR51E2; ENSG00000167332; TAA
STMPKILAL

SEQ ID NO: 56653 - protein, 9 aa, Homo sapiens
  Table A; Target 56653; HLA-A*02:04; OR51E2; ENSG00000167332; TAA
STMPKILAL

SEQ ID NO: 56654 - protein, 9 aa, Homo sapiens
  Table A; Target 56654; HLA-A*03:01; OR51E2; ENSG00000167332; TAA
STMPKILAL

SEQ ID NO: 56655 - protein, 9 aa, Homo sapiens
  Table A; Target 56655; HLA-A*11:01; OR51E2; ENSG00000167332; TAA
STMPKILAL

SEQ ID NO: 56656 - protein, 9 aa, Homo sapiens
  Table A; Target 56656; HLA-A*25:01; OR51E2; ENSG00000167332; TAA
STMPKILAL

SEQ ID NO: 56657 - protein, 9 aa, Homo sapiens
  Table A; Target 56657; HLA-A*26:01; OR51E2; ENSG00000167332; TAA
STMPKILAL

SEQ ID NO: 56658 - protein, 9 aa, Homo sapiens
  Table A; Target 56658; HLA-A*32:01; OR51E2; ENSG00000167332; TAA
STMPKILAL

SEQ ID NO: 56659 - protein, 9 aa, Homo sapiens
  Table A; Target 56659; HLA-A*68:02; OR51E2; ENSG00000167332; TAA
STMPKILAL

SEQ ID NO: 56660 - protein, 9 aa, Homo sapiens
  Table A; Target 56660; HLA-B*08:01; OR51E2; ENSG00000167332; TAA
STMPKILAL

SEQ ID NO: 56661 - protein, 9 aa, Homo sapiens
  Table A; Target 56661; HLA-C*03:03; OR51E2; ENSG00000167332; TAA
STMPKILAL

SEQ ID NO: 56662 - protein, 9 aa, Homo sapiens
  Table A; Target 56662; HLA-C*03:04; OR51E2; ENSG00000167332; TAA
STMPKILAL

SEQ ID NO: 56663 - protein, 11 aa, Homo sapiens
  Table A; Target 56663; HLA-B*57:01; OR51E2; ENSG00000167332; TAA
STMPKILALFW

SEQ ID NO: 56664 - protein, 9 aa, Homo sapiens
  Table A; Target 56664; HLA-C*12:03; OR51E2; ENSG00000167332; TAA
STSTMPKIL

SEQ ID NO: 56665 - protein, 9 aa, Homo sapiens
  Table A; Target 56665; HLA-C*16:01; OR51E2; ENSG00000167332; TAA
STSTMPKIL

SEQ ID NO: 56666 - protein, 9 aa, Homo sapiens
  Table A; Target 56666; HLA-A*68:02; OR51E2; ENSG00000167332; TAA
SYFLIIRTV

SEQ ID NO: 56667 - protein, 10 aa, Homo sapiens
  Table A; Target 56667; HLA-A*24:02; OR51E2; ENSG00000167332; TAA
SYFLIIRTVL

SEQ ID NO: 56668 - protein, 9 aa, Homo sapiens
  Table A; Target 56668; HLA-B*51:01; OR51E2; ENSG00000167332; TAA
TAILLVMGV

SEQ ID NO: 56669 - protein, 9 aa, Homo sapiens
  Table A; Target 56669; HLA-B*54:01; OR51E2; ENSG00000167332; TAA
TAILLVMGV

SEQ ID NO: 56670 - protein, 9 aa, Homo sapiens
  Table A; Target 56670; HLA-B*56:01; OR51E2; ENSG00000167332; TAA
TAILLVMGV

SEQ ID NO: 56671 - protein, 9 aa, Homo sapiens
  Table A; Target 56671; HLA-C*12:03; OR51E2; ENSG00000167332; TAA
TAILLVMGV

SEQ ID NO: 56672 - protein, 9 aa, Homo sapiens
  Table A; Target 56672; HLA-B*08:01; OR51E2; ENSG00000167332; TAA
TAQIGIVAV

SEQ ID NO: 56673 - protein, 9 aa, Homo sapiens
  Table A; Target 56673; HLA-B*13:02; OR51E2; ENSG00000167332; TAA
TAQIGIVAV

SEQ ID NO: 56674 - protein, 9 aa, Homo sapiens
  Table A; Target 56674; HLA-B*35:03; OR51E2; ENSG00000167332; TAA
TAQIGIVAV

SEQ ID NO: 56675 - protein, 9 aa, Homo sapiens
  Table A; Target 56675; HLA-B*39:01; OR51E2; ENSG00000167332; TAA
TAQIGIVAV

SEQ ID NO: 56676 - protein, 9 aa, Homo sapiens
  Table A; Target 56676; HLA-B*46:01; OR51E2; ENSG00000167332; TAA
TAQIGIVAV

SEQ ID NO: 56677 - protein, 9 aa, Homo sapiens
  Table A; Target 56677; HLA-B*51:01; OR51E2; ENSG00000167332; TAA
TAQIGIVAV

SEQ ID NO: 56678 - protein, 9 aa, Homo sapiens
  Table A; Target 56678; HLA-B*54:01; OR51E2; ENSG00000167332; TAA
TAQIGIVAV

SEQ ID NO: 56679 - protein, 9 aa, Homo sapiens
  Table A; Target 56679; HLA-B*56:01; OR51E2; ENSG00000167332; TAA
TAQIGIVAV

SEQ ID NO: 56680 - protein, 9 aa, Homo sapiens
  Table A; Target 56680; HLA-C*01:02; OR51E2; ENSG00000167332; TAA
TAQIGIVAV

SEQ ID NO: 56681 - protein, 9 aa, Homo sapiens
  Table A; Target 56681; HLA-C*03:03; OR51E2; ENSG00000167332; TAA
TAQIGIVAV

SEQ ID NO: 56682 - protein, 9 aa, Homo sapiens
  Table A; Target 56682; HLA-C*03:04; OR51E2; ENSG00000167332; TAA
TAQIGIVAV

SEQ ID NO: 56683 - protein, 9 aa, Homo sapiens
  Table A; Target 56683; HLA-C*16:02; OR51E2; ENSG00000167332; TAA
TAQIGIVAV

SEQ ID NO: 56684 - protein, 11 aa, Homo sapiens
  Table A; Target 56684; HLA-A*33:01; OR51E2; ENSG00000167332; TAA
TAQIGIVAVVR

SEQ ID NO: 56685 - protein, 11 aa, Homo sapiens
  Table A; Target 56685; HLA-A*68:01; OR51E2; ENSG00000167332; TAA
TAQIGIVAVVR

SEQ ID NO: 56686 - protein, 11 aa, Homo sapiens
  Table A; Target 56686; HLA-C*07:06; OR51E2; ENSG00000167332; TAA
TAQIGIVAVVR

SEQ ID NO: 56687 - protein, 8 aa, Homo sapiens
  Table A; Target 56687; HLA-B*38:01; OR51E2; ENSG00000167332; TAA
THATFVLI

SEQ ID NO: 56688 - protein, 9 aa, Homo sapiens
  Table A; Target 56688; HLA-A*02:01; OR51E2; ENSG00000167332; TAA
TLPNVVYGL

SEQ ID NO: 56689 - protein, 9 aa, Homo sapiens
  Table A; Target 56689; HLA-A*02:03; OR51E2; ENSG00000167332; TAA
TLPNVVYGL

SEQ ID NO: 56690 - protein, 9 aa, Homo sapiens
  Table A; Target 56690; HLA-A*02:04; OR51E2; ENSG00000167332; TAA
TLPNVVYGL

SEQ ID NO: 56691 - protein, 9 aa, Homo sapiens
  Table A; Target 56691; HLA-A*02:07; OR51E2; ENSG00000167332; TAA
TLPNVVYGL

SEQ ID NO: 56692 - protein, 9 aa, Homo sapiens
  Table A; Target 56692; HLA-A*23:01; OR51E2; ENSG00000167332; TAA
TLPNVVYGL

SEQ ID NO: 56693 - protein, 9 aa, Homo sapiens
  Table A; Target 56693; HLA-C*01:02; OR51E2; ENSG00000167332; TAA
TLPNVVYGL

SEQ ID NO: 56694 - protein, 9 aa, Homo sapiens
  Table A; Target 56694; HLA-A*24:02; OR51E2; ENSG00000167332; TAA
TMPKILALF

SEQ ID NO: 56695 - protein, 9 aa, Homo sapiens
  Table A; Target 56695; HLA-A*02:01; OR51E2; ENSG00000167332; TAA
TQMFFIHAL

SEQ ID NO: 56696 - protein, 9 aa, Homo sapiens
  Table A; Target 56696; HLA-A*02:03; OR51E2; ENSG00000167332; TAA
TQMFFIHAL

SEQ ID NO: 56697 - protein, 9 aa, Homo sapiens
  Table A; Target 56697; HLA-A*02:04; OR51E2; ENSG00000167332; TAA
TQMFFIHAL

SEQ ID NO: 56698 - protein, 9 aa, Homo sapiens
  Table A; Target 56698; HLA-A*30:01; OR51E2; ENSG00000167332; TAA
TQMFFIHAL

SEQ ID NO: 56699 - protein, 9 aa, Homo sapiens
  Table A; Target 56699; HLA-B*08:01; OR51E2; ENSG00000167332; TAA
TQMFFIHAL

SEQ ID NO: 56700 - protein, 9 aa, Homo sapiens
  Table A; Target 56700; HLA-B*13:02; OR51E2; ENSG00000167332; TAA
TQMFFIHAL

SEQ ID NO: 56701 - protein, 9 aa, Homo sapiens
  Table A; Target 56701; HLA-B*38:01; OR51E2; ENSG00000167332; TAA
TQMFFIHAL

SEQ ID NO: 56702 - protein, 9 aa, Homo sapiens
  Table A; Target 56702; HLA-B*44:02; OR51E2; ENSG00000167332; TAA
TQMFFIHAL

SEQ ID NO: 56703 - protein, 11 aa, Homo sapiens
  Table A; Target 56703; HLA-A*31:01; OR51E2; ENSG00000167332; TAA
TVLQLPSKSER

SEQ ID NO: 56704 - protein, 11 aa, Homo sapiens
  Table A; Target 56704; HLA-A*33:01; OR51E2; ENSG00000167332; TAA
TVLQLPSKSER

SEQ ID NO: 56705 - protein, 11 aa, Homo sapiens
  Table A; Target 56705; HLA-A*33:03; OR51E2; ENSG00000167332; TAA
TVLQLPSKSER

SEQ ID NO: 56706 - protein, 11 aa, Homo sapiens
  Table A; Target 56706; HLA-A*68:01; OR51E2; ENSG00000167332; TAA
TVLQLPSKSER

SEQ ID NO: 56707 - protein, 11 aa, Homo sapiens
  Table A; Target 56707; HLA-C*07:06; OR51E2; ENSG00000167332; TAA
TVLQLPSKSER

SEQ ID NO: 56708 - protein, 8 aa, Homo sapiens
  Table A; Target 56708; HLA-B*08:01; OR51E2; ENSG00000167332; TAA
VAVVRGSL

SEQ ID NO: 56709 - protein, 8 aa, Homo sapiens
  Table A; Target 56709; HLA-C*03:04; OR51E2; ENSG00000167332; TAA
VAVVRGSL

SEQ ID NO: 56710 - protein, 8 aa, Homo sapiens
  Table A; Target 56710; HLA-C*16:01; OR51E2; ENSG00000167332; TAA
VAVVRGSL

SEQ ID NO: 56711 - protein, 9 aa, Homo sapiens
  Table A; Target 56711; HLA-B*46:01; OR51E2; ENSG00000167332; TAA
VAVVRGSLF

SEQ ID NO: 56712 - protein, 9 aa, Homo sapiens
  Table A; Target 56712; HLA-C*02:02; OR51E2; ENSG00000167332; TAA
VAVVRGSLF

SEQ ID NO: 56713 - protein, 9 aa, Homo sapiens
  Table A; Target 56713; HLA-C*16:01; OR51E2; ENSG00000167332; TAA
VAVVRGSLF

SEQ ID NO: 56714 - protein, 9 aa, Homo sapiens
  Table A; Target 56714; HLA-C*16:04; OR51E2; ENSG00000167332; TAA
VAVVRGSLF

SEQ ID NO: 56715 - protein, 8 aa, Homo sapiens
  Table A; Target 56715; HLA-A*30:01; OR51E2; ENSG00000167332; TAA
VDVMFISL

SEQ ID NO: 56716 - protein, 8 aa, Homo sapiens
  Table A; Target 56716; HLA-B*37:01; OR51E2; ENSG00000167332; TAA
VDVMFISL

SEQ ID NO: 56717 - protein, 9 aa, Homo sapiens
  Table A; Target 56717; HLA-A*30:02; OR51E2; ENSG00000167332; TAA
VGFPLLSMY

SEQ ID NO: 56718 - protein, 9 aa, Homo sapiens
  Table A; Target 56718; HLA-B*15:03; OR51E2; ENSG00000167332; TAA
VGFPLLSMY

SEQ ID NO: 56719 - protein, 9 aa, Homo sapiens
  Table A; Target 56719; HLA-B*46:01; OR51E2; ENSG00000167332; TAA
VGFPLLSMY

SEQ ID NO: 56720 - protein, 9 aa, Homo sapiens
  Table A; Target 56720; HLA-C*02:02; OR51E2; ENSG00000167332; TAA
VGFPLLSMY

SEQ ID NO: 56721 - protein, 8 aa, Homo sapiens
  Table A; Target 56721; HLA-B*38:01; OR51E2; ENSG00000167332; TAA
VHQDVMKL

SEQ ID NO: 56722 - protein, 8 aa, Homo sapiens
  Table A; Target 56722; HLA-B*39:01; OR51E2; ENSG00000167332; TAA
VHQDVMKL

SEQ ID NO: 56723 - protein, 10 aa, Homo sapiens
  Table A; Target 56723; HLA-A*29:02; OR51E2; ENSG00000167332; TAA
VHQDVMKLAY

SEQ ID NO: 56724 - protein, 10 aa, Homo sapiens
  Table A; Target 56724; HLA-A*30:02; OR51E2; ENSG00000167332; TAA
VHQDVMKLAY

SEQ ID NO: 56725 - protein, 9 aa, Homo sapiens
  Table A; Target 56725; HLA-A*02:01; OR51E2; ENSG00000167332; TAA
VINPIIYGA

SEQ ID NO: 56726 - protein, 9 aa, Homo sapiens
  Table A; Target 56726; HLA-A*02:03; OR51E2; ENSG00000167332; TAA
VINPIIYGA

SEQ ID NO: 56727 - protein, 9 aa, Homo sapiens
  Table A; Target 56727; HLA-A*02:04; OR51E2; ENSG00000167332; TAA
VINPIIYGA

SEQ ID NO: 56728 - protein, 9 aa, Homo sapiens
  Table A; Target 56728; HLA-A*02:07; OR51E2; ENSG00000167332; TAA
VINPIIYGA

SEQ ID NO: 56729 - protein, 9 aa, Homo sapiens
  Table A; Target 56729; HLA-B*56:01; OR51E2; ENSG00000167332; TAA
VINPIIYGA

SEQ ID NO: 56730 - protein, 10 aa, Homo sapiens
  Table A; Target 56730; HLA-A*03:01; OR51E2; ENSG00000167332; TAA
VINPIIYGAK

SEQ ID NO: 56731 - protein, 10 aa, Homo sapiens
  Table A; Target 56731; HLA-A*03:02; OR51E2; ENSG00000167332; TAA
VINPIIYGAK

SEQ ID NO: 56732 - protein, 9 aa, Homo sapiens
  Table A; Target 56732; HLA-A*02:01; OR51E2; ENSG00000167332; TAA
VLAFYVPLI

SEQ ID NO: 56733 - protein, 9 aa, Homo sapiens
  Table A; Target 56733; HLA-A*02:03; OR51E2; ENSG00000167332; TAA
VLAFYVPLI

SEQ ID NO: 56734 - protein, 9 aa, Homo sapiens
  Table A; Target 56734; HLA-A*02:04; OR51E2; ENSG00000167332; TAA
VLAFYVPLI

SEQ ID NO: 56735 - protein, 8 aa, Homo sapiens
  Table A; Target 56735; HLA-A*02:04; OR51E2; ENSG00000167332; TAA
VLIGIPGL

SEQ ID NO: 56736 - protein, 10 aa, Homo sapiens
  Table A; Target 56736; HLA-A*03:01; OR51E2; ENSG00000167332; TAA
VLIGIPGLEK

SEQ ID NO: 56737 - protein, 10 aa, Homo sapiens
  Table A; Target 56737; HLA-A*03:02; OR51E2; ENSG00000167332; TAA
VLIGIPGLEK

SEQ ID NO: 56738 - protein, 10 aa, Homo sapiens
  Table A; Target 56738; HLA-A*11:01; OR51E2; ENSG00000167332; TAA
VLIGIPGLEK

SEQ ID NO: 56739 - protein, 11 aa, Homo sapiens
  Table A; Target 56739; HLA-A*02:01; OR51E2; ENSG00000167332; TAA
VLIGIPGLEKA

SEQ ID NO: 56740 - protein, 11 aa, Homo sapiens
  Table A; Target 56740; HLA-A*02:03; OR51E2; ENSG00000167332; TAA
VLIGIPGLEKA

SEQ ID NO: 56741 - protein, 11 aa, Homo sapiens
  Table A; Target 56741; HLA-A*02:04; OR51E2; ENSG00000167332; TAA
VLIGIPGLEKA

SEQ ID NO: 56742 - protein, 10 aa, Homo sapiens
  Table A; Target 56742; HLA-A*31:01; OR51E2; ENSG00000167332; TAA
VLQLPSKSER

SEQ ID NO: 56743 - protein, 8 aa, Homo sapiens
  Table A; Target 56743; HLA-B*51:01; OR51E2; ENSG00000167332; TAA
VPLIGLSV

SEQ ID NO: 56744 - protein, 8 aa, Homo sapiens
  Table A; Target 56744; HLA-B*56:01; OR51E2; ENSG00000167332; TAA
VPLIGLSV

SEQ ID NO: 56745 - protein, 9 aa, Homo sapiens
  Table A; Target 56745; HLA-B*07:02; OR51E2; ENSG00000167332; TAA
VPLIGLSVV

SEQ ID NO: 56746 - protein, 9 aa, Homo sapiens
  Table A; Target 56746; HLA-B*51:01; OR51E2; ENSG00000167332; TAA
VPLIGLSVV

SEQ ID NO: 56747 - protein, 9 aa, Homo sapiens
  Table A; Target 56747; HLA-B*54:01; OR51E2; ENSG00000167332; TAA
VPLIGLSVV

SEQ ID NO: 56748 - protein, 9 aa, Homo sapiens
  Table A; Target 56748; HLA-B*55:01; OR51E2; ENSG00000167332; TAA
VPLIGLSVV

SEQ ID NO: 56749 - protein, 9 aa, Homo sapiens
  Table A; Target 56749; HLA-B*56:01; OR51E2; ENSG00000167332; TAA
VPLIGLSVV

SEQ ID NO: 56750 - protein, 9 aa, Homo sapiens
  Table A; Target 56750; HLA-C*16:04; OR51E2; ENSG00000167332; TAA
VRVVMGDIY

SEQ ID NO: 56751 - protein, 8 aa, Homo sapiens
  Table A; Target 56751; HLA-B*08:01; OR51E2; ENSG00000167332; TAA
VSHIGVVL

SEQ ID NO: 56752 - protein, 8 aa, Homo sapiens
  Table A; Target 56752; HLA-B*40:02; OR51E2; ENSG00000167332; TAA
VSHIGVVL

SEQ ID NO: 56753 - protein, 8 aa, Homo sapiens
  Table A; Target 56753; HLA-C*01:02; OR51E2; ENSG00000167332; TAA
VSHIGVVL

SEQ ID NO: 56754 - protein, 8 aa, Homo sapiens
  Table A; Target 56754; HLA-C*03:03; OR51E2; ENSG00000167332; TAA
VSHIGVVL

SEQ ID NO: 56755 - protein, 8 aa, Homo sapiens
  Table A; Target 56755; HLA-C*03:04; OR51E2; ENSG00000167332; TAA
VSHIGVVL

SEQ ID NO: 56756 - protein, 8 aa, Homo sapiens
  Table A; Target 56756; HLA-C*07:04; OR51E2; ENSG00000167332; TAA
VSHIGVVL

SEQ ID NO: 56757 - protein, 8 aa, Homo sapiens
  Table A; Target 56757; HLA-C*16:01; OR51E2; ENSG00000167332; TAA
VSHIGVVL

SEQ ID NO: 56758 - protein, 9 aa, Homo sapiens
  Table A; Target 56758; HLA-C*12:03; OR51E2; ENSG00000167332; TAA
VTAQIGIVA

SEQ ID NO: 56759 - protein, 10 aa, Homo sapiens
  Table A; Target 56759; HLA-A*02:01; OR51E2; ENSG00000167332; TAA
VTAQIGIVAV

SEQ ID NO: 56760 - protein, 10 aa, Homo sapiens
  Table A; Target 56760; HLA-A*02:03; OR51E2; ENSG00000167332; TAA
VTAQIGIVAV

SEQ ID NO: 56761 - protein, 10 aa, Homo sapiens
  Table A; Target 56761; HLA-A*68:02; OR51E2; ENSG00000167332; TAA
VTAQIGIVAV

SEQ ID NO: 56762 - protein, 11 aa, Homo sapiens
  Table A; Target 56762; HLA-A*68:02; OR51E2; ENSG00000167332; TAA
VTAQIGIVAVV

SEQ ID NO: 56763 - protein, 9 aa, Homo sapiens
  Table A; Target 56763; HLA-B*13:02; OR51E2; ENSG00000167332; TAA
VVAMFGNCI

SEQ ID NO: 56764 - protein, 9 aa, Homo sapiens
  Table A; Target 56764; HLA-A*31:01; OR51E2; ENSG00000167332; TAA
VVFIVRTER

SEQ ID NO: 56765 - protein, 9 aa, Homo sapiens
  Table A; Target 56765; HLA-C*03:04; OR51E2; ENSG00000167332; TAA
VVHRFGNSL

SEQ ID NO: 56766 - protein, 9 aa, Homo sapiens
  Table A; Target 56766; HLA-A*02:04; OR51E2; ENSG00000167332; TAA
VVMGDIYLL

SEQ ID NO: 56767 - protein, 9 aa, Homo sapiens
  Table A; Target 56767; HLA-A*23:01; OR51E2; ENSG00000167332; TAA
VVMGDIYLL

SEQ ID NO: 56768 - protein, 9 aa, Homo sapiens
  Table A; Target 56768; HLA-A*23:01; OR51E2; ENSG00000167332; TAA
VYGLTAILL

SEQ ID NO: 56769 - protein, 9 aa, Homo sapiens
  Table A; Target 56769; HLA-A*24:02; OR51E2; ENSG00000167332; TAA
VYGLTAILL

SEQ ID NO: 56770 - protein, 9 aa, Homo sapiens
  Table A; Target 56770; HLA-C*04:01; OR51E2; ENSG00000167332; TAA
WFDSREISF

SEQ ID NO: 56771 - protein, 8 aa, Homo sapiens
  Table A; Target 56771; HLA-B*51:01; OR51E2; ENSG00000167332; TAA
YADTLPNV

SEQ ID NO: 56772 - protein, 8 aa, Homo sapiens
  Table A; Target 56772; HLA-C*03:04; OR51E2; ENSG00000167332; TAA
YADTLPNV

SEQ ID NO: 56773 - protein, 8 aa, Homo sapiens
  Table A; Target 56773; HLA-C*05:01; OR51E2; ENSG00000167332; TAA
YADTLPNV

SEQ ID NO: 56774 - protein, 9 aa, Homo sapiens
  Table A; Target 56774; HLA-A*01:01; OR51E2; ENSG00000167332; TAA
YADTLPNVV

SEQ ID NO: 56775 - protein, 9 aa, Homo sapiens
  Table A; Target 56775; HLA-B*35:03; OR51E2; ENSG00000167332; TAA
YADTLPNVV

SEQ ID NO: 56776 - protein, 9 aa, Homo sapiens
  Table A; Target 56776; HLA-B*38:01; OR51E2; ENSG00000167332; TAA
YADTLPNVV

SEQ ID NO: 56777 - protein, 9 aa, Homo sapiens
  Table A; Target 56777; HLA-B*39:01; OR51E2; ENSG00000167332; TAA
YADTLPNVV

SEQ ID NO: 56778 - protein, 9 aa, Homo sapiens
  Table A; Target 56778; HLA-B*51:01; OR51E2; ENSG00000167332; TAA
YADTLPNVV

SEQ ID NO: 56779 - protein, 9 aa, Homo sapiens
  Table A; Target 56779; HLA-B*54:01; OR51E2; ENSG00000167332; TAA
YADTLPNVV

SEQ ID NO: 56780 - protein, 9 aa, Homo sapiens
  Table A; Target 56780; HLA-B*55:01; OR51E2; ENSG00000167332; TAA
YADTLPNVV

SEQ ID NO: 56781 - protein, 9 aa, Homo sapiens
  Table A; Target 56781; HLA-C*02:02; OR51E2; ENSG00000167332; TAA
YADTLPNVV

SEQ ID NO: 56782 - protein, 9 aa, Homo sapiens
  Table A; Target 56782; HLA-C*03:03; OR51E2; ENSG00000167332; TAA
YADTLPNVV

SEQ ID NO: 56783 - protein, 9 aa, Homo sapiens
  Table A; Target 56783; HLA-C*03:04; OR51E2; ENSG00000167332; TAA
YADTLPNVV

SEQ ID NO: 56784 - protein, 9 aa, Homo sapiens
  Table A; Target 56784; HLA-C*05:01; OR51E2; ENSG00000167332; TAA
YADTLPNVV

SEQ ID NO: 56785 - protein, 9 aa, Homo sapiens
  Table A; Target 56785; HLA-C*07:04; OR51E2; ENSG00000167332; TAA
YADTLPNVV

SEQ ID NO: 56786 - protein, 9 aa, Homo sapiens
  Table A; Target 56786; HLA-C*12:03; OR51E2; ENSG00000167332; TAA
YADTLPNVV

SEQ ID NO: 56787 - protein, 9 aa, Homo sapiens
  Table A; Target 56787; HLA-C*16:02; OR51E2; ENSG00000167332; TAA
YADTLPNVV

SEQ ID NO: 56788 - protein, 9 aa, Homo sapiens
  Table A; Target 56788; HLA-C*16:04; OR51E2; ENSG00000167332; TAA
YADTLPNVV

SEQ ID NO: 56789 - protein, 10 aa, Homo sapiens
  Table A; Target 56789; HLA-A*01:01; OR51E2; ENSG00000167332; TAA
YADTLPNVVY

SEQ ID NO: 56790 - protein, 10 aa, Homo sapiens
  Table A; Target 56790; HLA-A*23:01; OR51E2; ENSG00000167332; TAA
YADTLPNVVY

SEQ ID NO: 56791 - protein, 10 aa, Homo sapiens
  Table A; Target 56791; HLA-A*26:01; OR51E2; ENSG00000167332; TAA
YADTLPNVVY

SEQ ID NO: 56792 - protein, 10 aa, Homo sapiens
  Table A; Target 56792; HLA-A*29:02; OR51E2; ENSG00000167332; TAA
YADTLPNVVY

SEQ ID NO: 56793 - protein, 10 aa, Homo sapiens
  Table A; Target 56793; HLA-A*30:02; OR51E2; ENSG00000167332; TAA
YADTLPNVVY

SEQ ID NO: 56794 - protein, 10 aa, Homo sapiens
  Table A; Target 56794; HLA-B*15:03; OR51E2; ENSG00000167332; TAA
YADTLPNVVY

SEQ ID NO: 56795 - protein, 10 aa, Homo sapiens
  Table A; Target 56795; HLA-B*35:01; OR51E2; ENSG00000167332; TAA
YADTLPNVVY

SEQ ID NO: 56796 - protein, 10 aa, Homo sapiens
  Table A; Target 56796; HLA-B*35:03; OR51E2; ENSG00000167332; TAA
YADTLPNVVY

SEQ ID NO: 56797 - protein, 10 aa, Homo sapiens
  Table A; Target 56797; HLA-B*38:01; OR51E2; ENSG00000167332; TAA
YADTLPNVVY

SEQ ID NO: 56798 - protein, 10 aa, Homo sapiens
  Table A; Target 56798; HLA-B*39:01; OR51E2; ENSG00000167332; TAA
YADTLPNVVY

SEQ ID NO: 56799 - protein, 10 aa, Homo sapiens
  Table A; Target 56799; HLA-B*46:01; OR51E2; ENSG00000167332; TAA
YADTLPNVVY

SEQ ID NO: 56800 - protein, 10 aa, Homo sapiens
  Table A; Target 56800; HLA-B*55:01; OR51E2; ENSG00000167332; TAA
YADTLPNVVY

SEQ ID NO: 56801 - protein, 10 aa, Homo sapiens
  Table A; Target 56801; HLA-B*58:01; OR51E2; ENSG00000167332; TAA
YADTLPNVVY

SEQ ID NO: 56802 - protein, 10 aa, Homo sapiens
  Table A; Target 56802; HLA-C*02:02; OR51E2; ENSG00000167332; TAA
YADTLPNVVY

SEQ ID NO: 56803 - protein, 10 aa, Homo sapiens
  Table A; Target 56803; HLA-C*03:03; OR51E2; ENSG00000167332; TAA
YADTLPNVVY

SEQ ID NO: 56804 - protein, 10 aa, Homo sapiens
  Table A; Target 56804; HLA-C*03:04; OR51E2; ENSG00000167332; TAA
YADTLPNVVY

SEQ ID NO: 56805 - protein, 10 aa, Homo sapiens
  Table A; Target 56805; HLA-C*05:01; OR51E2; ENSG00000167332; TAA
YADTLPNVVY

SEQ ID NO: 56806 - protein, 10 aa, Homo sapiens
  Table A; Target 56806; HLA-C*07:04; OR51E2; ENSG00000167332; TAA
YADTLPNVVY

SEQ ID NO: 56807 - protein, 10 aa, Homo sapiens
  Table A; Target 56807; HLA-C*07:06; OR51E2; ENSG00000167332; TAA
YADTLPNVVY

SEQ ID NO: 56808 - protein, 10 aa, Homo sapiens
  Table A; Target 56808; HLA-C*12:03; OR51E2; ENSG00000167332; TAA
YADTLPNVVY

SEQ ID NO: 56809 - protein, 9 aa, Homo sapiens
  Table A; Target 56809; HLA-A*23:01; OR51E2; ENSG00000167332; TAA
YFLIIRTVL

SEQ ID NO: 56810 - protein, 9 aa, Homo sapiens
  Table A; Target 56810; HLA-A*24:02; OR51E2; ENSG00000167332; TAA
YFLIIRTVL

SEQ ID NO: 56811 - protein, 8 aa, Homo sapiens
  Table A; Target 56811; HLA-B*51:01; OR51E2; ENSG00000167332; TAA
YGAKTKQI

SEQ ID NO: 56812 - protein, 9 aa, Homo sapiens
  Table A; Target 56812; HLA-A*02:07; OR51E2; ENSG00000167332; TAA
YVPLIGLSV

SEQ ID NO: 56813 - protein, 9 aa, Homo sapiens
  Table A; Target 56813; HLA-A*30:01; OR51E2; ENSG00000167332; TAA
YVPLIGLSV

SEQ ID NO: 56814 - protein, 9 aa, Homo sapiens
  Table A; Target 56814; HLA-A*68:02; OR51E2; ENSG00000167332; TAA
YVPLIGLSV

SEQ ID NO: 56815 - protein, 9 aa, Homo sapiens
  Table A; Target 56815; HLA-B*13:02; OR51E2; ENSG00000167332; TAA
YVPLIGLSV

SEQ ID NO: 56816 - protein, 9 aa, Homo sapiens
  Table A; Target 56816; HLA-B*51:01; OR51E2; ENSG00000167332; TAA
YVPLIGLSV

SEQ ID NO: 56817 - protein, 9 aa, Homo sapiens
  Table A; Target 56817; HLA-B*54:01; OR51E2; ENSG00000167332; TAA
YVPLIGLSV

SEQ ID NO: 56818 - protein, 9 aa, Homo sapiens
  Table A; Target 56818; HLA-C*01:02; OR51E2; ENSG00000167332; TAA
YVPLIGLSV

SEQ ID NO: 56819 - protein, 9 aa, Homo sapiens
  Table A; Target 56819; HLA-C*02:02; OR51E2; ENSG00000167332; TAA
YVPLIGLSV

SEQ ID NO: 56820 - protein, 10 aa, Homo sapiens
  Table A; Target 56820; HLA-A*02:07; OR51E2; ENSG00000167332; TAA
YVPLIGLSVV

SEQ ID NO: 56821 - protein, 10 aa, Homo sapiens
  Table A; Target 56821; HLA-A*68:02; OR51E2; ENSG00000167332; TAA
YVPLIGLSVV

SEQ ID NO: 56822 - protein, 9 aa, Homo sapiens
  Table A; Target 56822; HLA-C*16:01; PAEP; ENSG00000122133; TAA
AGTWHSMAM

SEQ ID NO: 56823 - protein, 9 aa, Homo sapiens
  Table A; Target 56823; HLA-A*02:01; PAEP; ENSG00000122133; TAA
ALVCGVPAM

SEQ ID NO: 56824 - protein, 9 aa, Homo sapiens
  Table A; Target 56824; HLA-B*46:01; PAEP; ENSG00000122133; TAA
ALVCGVPAM

SEQ ID NO: 56825 - protein, 9 aa, Homo sapiens
  Table A; Target 56825; HLA-A*02:01; PAEP; ENSG00000122133; TAA
AMATNNISL

SEQ ID NO: 56826 - protein, 9 aa, Homo sapiens
  Table A; Target 56826; HLA-A*02:03; PAEP; ENSG00000122133; TAA
AMATNNISL

SEQ ID NO: 56827 - protein, 9 aa, Homo sapiens
  Table A; Target 56827; HLA-A*02:04; PAEP; ENSG00000122133; TAA
AMATNNISL

SEQ ID NO: 56828 - protein, 9 aa, Homo sapiens
  Table A; Target 56828; HLA-A*03:01; PAEP; ENSG00000122133; TAA
AMATNNISL

SEQ ID NO: 56829 - protein, 9 aa, Homo sapiens
  Table A; Target 56829; HLA-A*32:01; PAEP; ENSG00000122133; TAA
AMATNNISL

SEQ ID NO: 56830 - protein, 9 aa, Homo sapiens
  Table A; Target 56830; HLA-B*07:02; PAEP; ENSG00000122133; TAA
AMATNNISL

SEQ ID NO: 56831 - protein, 9 aa, Homo sapiens
  Table A; Target 56831; HLA-B*15:01; PAEP; ENSG00000122133; TAA
AMATNNISL

SEQ ID NO: 56832 - protein, 9 aa, Homo sapiens
  Table A; Target 56832; HLA-B*40:01; PAEP; ENSG00000122133; TAA
AMATNNISL

SEQ ID NO: 56833 - protein, 9 aa, Homo sapiens
  Table A; Target 56833; HLA-B*46:01; PAEP; ENSG00000122133; TAA
AMATNNISL

SEQ ID NO: 56834 - protein, 9 aa, Homo sapiens
  Table A; Target 56834; HLA-B*55:01; PAEP; ENSG00000122133; TAA
AMATNNISL

SEQ ID NO: 56835 - protein, 9 aa, Homo sapiens
  Table A; Target 56835; HLA-B*58:01; PAEP; ENSG00000122133; TAA
AMATNNISL

SEQ ID NO: 56836 - protein, 9 aa, Homo sapiens
  Table A; Target 56836; HLA-C*01:02; PAEP; ENSG00000122133; TAA
AMATNNISL

SEQ ID NO: 56837 - protein, 9 aa, Homo sapiens
  Table A; Target 56837; HLA-C*07:04; PAEP; ENSG00000122133; TAA
AMATNNISL

SEQ ID NO: 56838 - protein, 9 aa, Homo sapiens
  Table A; Target 56838; HLA-C*14:02; PAEP; ENSG00000122133; TAA
AMATNNISL

SEQ ID NO: 56839 - protein, 9 aa, Homo sapiens
  Table A; Target 56839; HLA-C*16:01; PAEP; ENSG00000122133; TAA
AMATNNISL

SEQ ID NO: 56840 - protein, 10 aa, Homo sapiens
  Table A; Target 56840; HLA-A*02:03; PAEP; ENSG00000122133; TAA
AMATNNISLM

SEQ ID NO: 56841 - protein, 10 aa, Homo sapiens
  Table A; Target 56841; HLA-A*26:01; PAEP; ENSG00000122133; TAA
AMATNNISLM

SEQ ID NO: 56842 - protein, 10 aa, Homo sapiens
  Table A; Target 56842; HLA-B*07:02; PAEP; ENSG00000122133; TAA
APLRVHITSL

SEQ ID NO: 56843 - protein, 10 aa, Homo sapiens
  Table A; Target 56843; HLA-B*56:01; PAEP; ENSG00000122133; TAA
APLRVHITSL

SEQ ID NO: 56844 - protein, 10 aa, Homo sapiens
  Table A; Target 56844; HLA-C*07:02; PAEP; ENSG00000122133; TAA
APLRVHITSL

SEQ ID NO: 56845 - protein, 8 aa, Homo sapiens
  Table A; Target 56845; HLA-A*11:01; PAEP; ENSG00000122133; TAA
ATLKAPLR

SEQ ID NO: 56846 - protein, 8 aa, Homo sapiens
  Table A; Target 56846; HLA-A*31:01; PAEP; ENSG00000122133; TAA
ATLKAPLR

SEQ ID NO: 56847 - protein, 9 aa, Homo sapiens
  Table A; Target 56847; HLA-A*02:01; PAEP; ENSG00000122133; TAA
ATLKAPLRV

SEQ ID NO: 56848 - protein, 9 aa, Homo sapiens
  Table A; Target 56848; HLA-A*02:03; PAEP; ENSG00000122133; TAA
ATLKAPLRV

SEQ ID NO: 56849 - protein, 9 aa, Homo sapiens
  Table A; Target 56849; HLA-A*02:04; PAEP; ENSG00000122133; TAA
ATLKAPLRV

SEQ ID NO: 56850 - protein, 9 aa, Homo sapiens
  Table A; Target 56850; HLA-A*03:01; PAEP; ENSG00000122133; TAA
ATLKAPLRV

SEQ ID NO: 56851 - protein, 9 aa, Homo sapiens
  Table A; Target 56851; HLA-A*11:01; PAEP; ENSG00000122133; TAA
ATLKAPLRV

SEQ ID NO: 56852 - protein, 9 aa, Homo sapiens
  Table A; Target 56852; HLA-B*13:02; PAEP; ENSG00000122133; TAA
ATLKAPLRV

SEQ ID NO: 56853 - protein, 8 aa, Homo sapiens
  Table A; Target 56853; HLA-B*39:01; PAEP; ENSG00000122133; TAA
ATLLDTDY

SEQ ID NO: 56854 - protein, 8 aa, Homo sapiens
  Table A; Target 56854; HLA-A*32:01; PAEP; ENSG00000122133; TAA
ATNNISLM

SEQ ID NO: 56855 - protein, 8 aa, Homo sapiens
  Table A; Target 56855; HLA-C*05:01; PAEP; ENSG00000122133; TAA
ATNNISLM

SEQ ID NO: 56856 - protein, 9 aa, Homo sapiens
  Table A; Target 56856; HLA-A*11:01; PAEP; ENSG00000122133; TAA
ATNNISLMA

SEQ ID NO: 56857 - protein, 9 aa, Homo sapiens
  Table A; Target 56857; HLA-B*56:01; PAEP; ENSG00000122133; TAA
ATNNISLMA

SEQ ID NO: 56858 - protein, 11 aa, Homo sapiens
  Table A; Target 56858; HLA-A*03:02; PAEP; ENSG00000122133; TAA
ATNNISLMATL

SEQ ID NO: 56859 - protein, 11 aa, Homo sapiens
  Table A; Target 56859; HLA-A*23:01; PAEP; ENSG00000122133; TAA
ATNNISLMATL

SEQ ID NO: 56860 - protein, 11 aa, Homo sapiens
  Table A; Target 56860; HLA-A*31:01; PAEP; ENSG00000122133; TAA
ATNNISLMATL

SEQ ID NO: 56861 - protein, 11 aa, Homo sapiens
  Table A; Target 56861; HLA-A*03:02; PAEP; ENSG00000122133; TAA
CLQDTTTPIQS

SEQ ID NO: 56862 - protein, 8 aa, Homo sapiens
  Table A; Target 56862; HLA-B*08:01; PAEP; ENSG00000122133; TAA
CQYLARVL

SEQ ID NO: 56863 - protein, 8 aa, Homo sapiens
  Table A; Target 56863; HLA-B*15:03; PAEP; ENSG00000122133; TAA
CQYLARVL

SEQ ID NO: 56864 - protein, 8 aa, Homo sapiens
  Table A; Target 56864; HLA-B*18:01; PAEP; ENSG00000122133; TAA
DDEIMQGF

SEQ ID NO: 56865 - protein, 8 aa, Homo sapiens
  Table A; Target 56865; HLA-B*18:01; PAEP; ENSG00000122133; TAA
DEIMQGFI

SEQ ID NO: 56866 - protein, 8 aa, Homo sapiens
  Table A; Target 56866; HLA-B*49:01; PAEP; ENSG00000122133; TAA
DEIMQGFI

SEQ ID NO: 56867 - protein, 10 aa, Homo sapiens
  Table A; Target 56867; HLA-B*18:01; PAEP; ENSG00000122133; TAA
DEIMQGFIRA

SEQ ID NO: 56868 - protein, 11 aa, Homo sapiens
  Table A; Target 56868; HLA-B*18:01; PAEP; ENSG00000122133; TAA
DEIMQGFIRAF

SEQ ID NO: 56869 - protein, 11 aa, Homo sapiens
  Table A; Target 56869; HLA-B*44:02; PAEP; ENSG00000122133; TAA
DEIMQGFIRAF

SEQ ID NO: 56870 - protein, 11 aa, Homo sapiens
  Table A; Target 56870; HLA-B*44:03; PAEP; ENSG00000122133; TAA
DEIMQGFIRAF

SEQ ID NO: 56871 - protein, 9 aa, Homo sapiens
  Table A; Target 56871; HLA-A*33:01; PAEP; ENSG00000122133; TAA
DNLEIVLHR

SEQ ID NO: 56872 - protein, 9 aa, Homo sapiens
  Table A; Target 56872; HLA-A*33:03; PAEP; ENSG00000122133; TAA
DNLEIVLHR

SEQ ID NO: 56873 - protein, 8 aa, Homo sapiens
  Table A; Target 56873; HLA-C*05:01; PAEP; ENSG00000122133; TAA
DTDYDNFL

SEQ ID NO: 56874 - protein, 9 aa, Homo sapiens
  Table A; Target 56874; HLA-A*01:01; PAEP; ENSG00000122133; TAA
DTDYDNFLF

SEQ ID NO: 56875 - protein, 10 aa, Homo sapiens
  Table A; Target 56875; HLA-A*01:01; PAEP; ENSG00000122133; TAA
DTDYDNFLFL

SEQ ID NO: 56876 - protein, 9 aa, Homo sapiens
  Table A; Target 56876; HLA-A*25:01; PAEP; ENSG00000122133; TAA
DTTTPIQSM

SEQ ID NO: 56877 - protein, 9 aa, Homo sapiens
  Table A; Target 56877; HLA-A*26:01; PAEP; ENSG00000122133; TAA
DTTTPIQSM

SEQ ID NO: 56878 - protein, 9 aa, Homo sapiens
  Table A; Target 56878; HLA-A*33:01; PAEP; ENSG00000122133; TAA
DTTTPIQSM

SEQ ID NO: 56879 - protein, 9 aa, Homo sapiens
  Table A; Target 56879; HLA-A*33:03; PAEP; ENSG00000122133; TAA
DTTTPIQSM

SEQ ID NO: 56880 - protein, 9 aa, Homo sapiens
  Table A; Target 56880; HLA-A*68:01; PAEP; ENSG00000122133; TAA
DTTTPIQSM

SEQ ID NO: 56881 - protein, 9 aa, Homo sapiens
  Table A; Target 56881; HLA-A*68:02; PAEP; ENSG00000122133; TAA
DTTTPIQSM

SEQ ID NO: 56882 - protein, 9 aa, Homo sapiens
  Table A; Target 56882; HLA-B*18:01; PAEP; ENSG00000122133; TAA
DTTTPIQSM

SEQ ID NO: 56883 - protein, 9 aa, Homo sapiens
  Table A; Target 56883; HLA-B*35:01; PAEP; ENSG00000122133; TAA
DTTTPIQSM

SEQ ID NO: 56884 - protein, 9 aa, Homo sapiens
  Table A; Target 56884; HLA-B*35:03; PAEP; ENSG00000122133; TAA
DTTTPIQSM

SEQ ID NO: 56885 - protein, 9 aa, Homo sapiens
  Table A; Target 56885; HLA-B*39:01; PAEP; ENSG00000122133; TAA
DTTTPIQSM

SEQ ID NO: 56886 - protein, 9 aa, Homo sapiens
  Table A; Target 56886; HLA-B*51:01; PAEP; ENSG00000122133; TAA
DTTTPIQSM

SEQ ID NO: 56887 - protein, 9 aa, Homo sapiens
  Table A; Target 56887; HLA-C*07:06; PAEP; ENSG00000122133; TAA
DTTTPIQSM

SEQ ID NO: 56888 - protein, 9 aa, Homo sapiens
  Table A; Target 56888; HLA-C*12:03; PAEP; ENSG00000122133; TAA
DTTTPIQSM

SEQ ID NO: 56889 - protein, 10 aa, Homo sapiens
  Table A; Target 56889; HLA-A*26:01; PAEP; ENSG00000122133; TAA
DTTTPIQSMM

SEQ ID NO: 56890 - protein, 10 aa, Homo sapiens
  Table A; Target 56890; HLA-A*68:01; PAEP; ENSG00000122133; TAA
DTTTPIQSMM

SEQ ID NO: 56891 - protein, 10 aa, Homo sapiens
  Table A; Target 56891; HLA-A*68:02; PAEP; ENSG00000122133; TAA
DTTTPIQSMM

SEQ ID NO: 56892 - protein, 9 aa, Homo sapiens
  Table A; Target 56892; HLA-A*01:01; PAEP; ENSG00000122133; TAA
EATLLDTDY

SEQ ID NO: 56893 - protein, 9 aa, Homo sapiens
  Table A; Target 56893; HLA-A*26:01; PAEP; ENSG00000122133; TAA
EATLLDTDY

SEQ ID NO: 56894 - protein, 9 aa, Homo sapiens
  Table A; Target 56894; HLA-B*35:01; PAEP; ENSG00000122133; TAA
EATLLDTDY

SEQ ID NO: 56895 - protein, 9 aa, Homo sapiens
  Table A; Target 56895; HLA-B*39:01; PAEP; ENSG00000122133; TAA
EATLLDTDY

SEQ ID NO: 56896 - protein, 9 aa, Homo sapiens
  Table A; Target 56896; HLA-B*55:01; PAEP; ENSG00000122133; TAA
EATLLDTDY

SEQ ID NO: 56897 - protein, 9 aa, Homo sapiens
  Table A; Target 56897; HLA-C*03:03; PAEP; ENSG00000122133; TAA
EATLLDTDY

SEQ ID NO: 56898 - protein, 9 aa, Homo sapiens
  Table A; Target 56898; HLA-C*07:01; PAEP; ENSG00000122133; TAA
EATLLDTDY

SEQ ID NO: 56899 - protein, 9 aa, Homo sapiens
  Table A; Target 56899; HLA-B*18:01; PAEP; ENSG00000122133; TAA
EDDEIMQGF

SEQ ID NO: 56900 - protein, 9 aa, Homo sapiens
  Table A; Target 56900; HLA-B*44:02; PAEP; ENSG00000122133; TAA
EDDEIMQGF

SEQ ID NO: 56901 - protein, 9 aa, Homo sapiens
  Table A; Target 56901; HLA-B*44:03; PAEP; ENSG00000122133; TAA
EDDEIMQGF

SEQ ID NO: 56902 - protein, 11 aa, Homo sapiens
  Table A; Target 56902; HLA-B*44:02; PAEP; ENSG00000122133; TAA
EDNLEIVLHRW

SEQ ID NO: 56903 - protein, 11 aa, Homo sapiens
  Table A; Target 56903; HLA-B*44:03; PAEP; ENSG00000122133; TAA
EDNLEIVLHRW

SEQ ID NO: 56904 - protein, 8 aa, Homo sapiens
  Table A; Target 56904; HLA-A*33:03; PAEP; ENSG00000122133; TAA
EIMQGFIR

SEQ ID NO: 56905 - protein, 9 aa, Homo sapiens
  Table A; Target 56905; HLA-A*68:02; PAEP; ENSG00000122133; TAA
EIMQGFIRA

SEQ ID NO: 56906 - protein, 9 aa, Homo sapiens
  Table A; Target 56906; HLA-B*54:01; PAEP; ENSG00000122133; TAA
EIMQGFIRA

SEQ ID NO: 56907 - protein, 10 aa, Homo sapiens
  Table A; Target 56907; HLA-A*25:01; PAEP; ENSG00000122133; TAA
EIMQGFIRAF

SEQ ID NO: 56908 - protein, 10 aa, Homo sapiens
  Table A; Target 56908; HLA-A*26:01; PAEP; ENSG00000122133; TAA
EIMQGFIRAF

SEQ ID NO: 56909 - protein, 10 aa, Homo sapiens
  Table A; Target 56909; HLA-B*44:02; PAEP; ENSG00000122133; TAA
EIMQGFIRAF

SEQ ID NO: 56910 - protein, 9 aa, Homo sapiens
  Table A; Target 56910; HLA-A*25:01; PAEP; ENSG00000122133; TAA
ELPKLAGTW

SEQ ID NO: 56911 - protein, 9 aa, Homo sapiens
  Table A; Target 56911; HLA-A*26:01; PAEP; ENSG00000122133; TAA
ELPKLAGTW

SEQ ID NO: 56912 - protein, 9 aa, Homo sapiens
  Table A; Target 56912; HLA-A*33:03; PAEP; ENSG00000122133; TAA
ENNSCVEKK

SEQ ID NO: 56913 - protein, 10 aa, Homo sapiens
  Table A; Target 56913; HLA-B*40:02; PAEP; ENSG00000122133; TAA
GEKTENPKKF

SEQ ID NO: 56914 - protein, 10 aa, Homo sapiens
  Table A; Target 56914; HLA-B*44:02; PAEP; ENSG00000122133; TAA
GEKTENPKKF

SEQ ID NO: 56915 - protein, 10 aa, Homo sapiens
  Table A; Target 56915; HLA-B*44:03; PAEP; ENSG00000122133; TAA
GEKTENPKKF

SEQ ID NO: 56916 - protein, 11 aa, Homo sapiens
  Table A; Target 56916; HLA-A*03:02; PAEP; ENSG00000122133; TAA
GVPAMDIPQTK

SEQ ID NO: 56917 - protein, 11 aa, Homo sapiens
  Table A; Target 56917; HLA-A*11:01; PAEP; ENSG00000122133; TAA
GVPAMDIPQTK

SEQ ID NO: 56918 - protein, 9 aa, Homo sapiens
  Table A; Target 56918; HLA-A*02:04; PAEP; ENSG00000122133; TAA
IMQGFIRAF

SEQ ID NO: 56919 - protein, 9 aa, Homo sapiens
  Table A; Target 56919; HLA-A*31:01; PAEP; ENSG00000122133; TAA
IMQGFIRAF

SEQ ID NO: 56920 - protein, 9 aa, Homo sapiens
  Table A; Target 56920; HLA-A*32:01; PAEP; ENSG00000122133; TAA
IMQGFIRAF

SEQ ID NO: 56921 - protein, 9 aa, Homo sapiens
  Table A; Target 56921; HLA-B*57:01; PAEP; ENSG00000122133; TAA
IMQGFIRAF

SEQ ID NO: 56922 - protein, 10 aa, Homo sapiens
  Table A; Target 56922; HLA-A*31:01; PAEP; ENSG00000122133; TAA
IMQGFIRAFR

SEQ ID NO: 56923 - protein, 8 aa, Homo sapiens
  Table A; Target 56923; HLA-B*07:02; PAEP; ENSG00000122133; TAA
IPQTKQDL

SEQ ID NO: 56924 - protein, 8 aa, Homo sapiens
  Table A; Target 56924; HLA-B*08:01; PAEP; ENSG00000122133; TAA
IPQTKQDL

SEQ ID NO: 56925 - protein, 8 aa, Homo sapiens
  Table A; Target 56925; HLA-C*07:02; PAEP; ENSG00000122133; TAA
IPQTKQDL

SEQ ID NO: 56926 - protein, 10 aa, Homo sapiens
  Table A; Target 56926; HLA-B*07:02; PAEP; ENSG00000122133; TAA
IPQTKQDLEL

SEQ ID NO: 56927 - protein, 10 aa, Homo sapiens
  Table A; Target 56927; HLA-B*35:03; PAEP; ENSG00000122133; TAA
IPQTKQDLEL

SEQ ID NO: 56928 - protein, 10 aa, Homo sapiens
  Table A; Target 56928; HLA-C*07:02; PAEP; ENSG00000122133; TAA
IPQTKQDLEL

SEQ ID NO: 56929 - protein, 8 aa, Homo sapiens
  Table A; Target 56929; HLA-B*15:01; PAEP; ENSG00000122133; TAA
IQSMMCQY

SEQ ID NO: 56930 - protein, 8 aa, Homo sapiens
  Table A; Target 56930; HLA-B*15:03; PAEP; ENSG00000122133; TAA
IQSMMCQY

SEQ ID NO: 56931 - protein, 8 aa, Homo sapiens
  Table A; Target 56931; HLA-C*07:04; PAEP; ENSG00000122133; TAA
IQSMMCQY

SEQ ID NO: 56932 - protein, 9 aa, Homo sapiens
  Table A; Target 56932; HLA-B*13:02; PAEP; ENSG00000122133; TAA
IQSMMCQYL

SEQ ID NO: 56933 - protein, 8 aa, Homo sapiens
  Table A; Target 56933; HLA-A*11:01; PAEP; ENSG00000122133; TAA
ISLMATLK

SEQ ID NO: 56934 - protein, 10 aa, Homo sapiens
  Table A; Target 56934; HLA-C*01:02; PAEP; ENSG00000122133; TAA
KINYTVANEA

SEQ ID NO: 56935 - protein, 9 aa, Homo sapiens
  Table A; Target 56935; HLA-A*02:07; PAEP; ENSG00000122133; TAA
KQDLELPKL

SEQ ID NO: 56936 - protein, 9 aa, Homo sapiens
  Table A; Target 56936; HLA-B*38:01; PAEP; ENSG00000122133; TAA
KQDLELPKL

SEQ ID NO: 56937 - protein, 9 aa, Homo sapiens
  Table A; Target 56937; HLA-B*40:01; PAEP; ENSG00000122133; TAA
KQDLELPKL

SEQ ID NO: 56938 - protein, 9 aa, Homo sapiens
  Table A; Target 56938; HLA-A*02:04; PAEP; ENSG00000122133; TAA
KQMEEPCRF

SEQ ID NO: 56939 - protein, 9 aa, Homo sapiens
  Table A; Target 56939; HLA-A*24:02; PAEP; ENSG00000122133; TAA
KQMEEPCRF

SEQ ID NO: 56940 - protein, 9 aa, Homo sapiens
  Table A; Target 56940; HLA-A*26:01; PAEP; ENSG00000122133; TAA
KQMEEPCRF

SEQ ID NO: 56941 - protein, 9 aa, Homo sapiens
  Table A; Target 56941; HLA-A*30:02; PAEP; ENSG00000122133; TAA
KQMEEPCRF

SEQ ID NO: 56942 - protein, 9 aa, Homo sapiens
  Table A; Target 56942; HLA-A*31:01; PAEP; ENSG00000122133; TAA
KQMEEPCRF

SEQ ID NO: 56943 - protein, 9 aa, Homo sapiens
  Table A; Target 56943; HLA-A*32:01; PAEP; ENSG00000122133; TAA
KQMEEPCRF

SEQ ID NO: 56944 - protein, 9 aa, Homo sapiens
  Table A; Target 56944; HLA-B*13:02; PAEP; ENSG00000122133; TAA
KQMEEPCRF

SEQ ID NO: 56945 - protein, 9 aa, Homo sapiens
  Table A; Target 56945; HLA-B*15:01; PAEP; ENSG00000122133; TAA
KQMEEPCRF

SEQ ID NO: 56946 - protein, 9 aa, Homo sapiens
  Table A; Target 56946; HLA-B*15:03; PAEP; ENSG00000122133; TAA
KQMEEPCRF

SEQ ID NO: 56947 - protein, 9 aa, Homo sapiens
  Table A; Target 56947; HLA-B*27:02; PAEP; ENSG00000122133; TAA
KQMEEPCRF

SEQ ID NO: 56948 - protein, 9 aa, Homo sapiens
  Table A; Target 56948; HLA-B*27:05; PAEP; ENSG00000122133; TAA
KQMEEPCRF

SEQ ID NO: 56949 - protein, 9 aa, Homo sapiens
  Table A; Target 56949; HLA-B*37:01; PAEP; ENSG00000122133; TAA
KQMEEPCRF

SEQ ID NO: 56950 - protein, 9 aa, Homo sapiens
  Table A; Target 56950; HLA-B*38:01; PAEP; ENSG00000122133; TAA
KQMEEPCRF

SEQ ID NO: 56951 - protein, 9 aa, Homo sapiens
  Table A; Target 56951; HLA-B*40:02; PAEP; ENSG00000122133; TAA
KQMEEPCRF

SEQ ID NO: 56952 - protein, 9 aa, Homo sapiens
  Table A; Target 56952; HLA-B*44:02; PAEP; ENSG00000122133; TAA
KQMEEPCRF

SEQ ID NO: 56953 - protein, 9 aa, Homo sapiens
  Table A; Target 56953; HLA-B*44:03; PAEP; ENSG00000122133; TAA
KQMEEPCRF

SEQ ID NO: 56954 - protein, 9 aa, Homo sapiens
  Table A; Target 56954; HLA-B*55:01; PAEP; ENSG00000122133; TAA
KQMEEPCRF

SEQ ID NO: 56955 - protein, 9 aa, Homo sapiens
  Table A; Target 56955; HLA-B*57:01; PAEP; ENSG00000122133; TAA
KQMEEPCRF

SEQ ID NO: 56956 - protein, 9 aa, Homo sapiens
  Table A; Target 56956; HLA-B*58:01; PAEP; ENSG00000122133; TAA
KQMEEPCRF

SEQ ID NO: 56957 - protein, 9 aa, Homo sapiens
  Table A; Target 56957; HLA-C*02:02; PAEP; ENSG00000122133; TAA
KQMEEPCRF

SEQ ID NO: 56958 - protein, 9 aa, Homo sapiens
  Table A; Target 56958; HLA-C*04:01; PAEP; ENSG00000122133; TAA
KQMEEPCRF

SEQ ID NO: 56959 - protein, 9 aa, Homo sapiens
  Table A; Target 56959; HLA-C*05:01; PAEP; ENSG00000122133; TAA
KQMEEPCRF

SEQ ID NO: 56960 - protein, 9 aa, Homo sapiens
  Table A; Target 56960; HLA-C*06:02; PAEP; ENSG00000122133; TAA
KQMEEPCRF

SEQ ID NO: 56961 - protein, 9 aa, Homo sapiens
  Table A; Target 56961; HLA-C*07:04; PAEP; ENSG00000122133; TAA
KQMEEPCRF

SEQ ID NO: 56962 - protein, 9 aa, Homo sapiens
  Table A; Target 56962; HLA-C*12:03; PAEP; ENSG00000122133; TAA
KQMEEPCRF

SEQ ID NO: 56963 - protein, 9 aa, Homo sapiens
  Table A; Target 56963; HLA-C*16:01; PAEP; ENSG00000122133; TAA
KQMEEPCRF

SEQ ID NO: 56964 - protein, 9 aa, Homo sapiens
  Table A; Target 56964; HLA-C*16:04; PAEP; ENSG00000122133; TAA
KQMEEPCRF

SEQ ID NO: 56965 - protein, 9 aa, Homo sapiens
  Table A; Target 56965; HLA-A*03:02; PAEP; ENSG00000122133; TAA
KTENPKKFK

SEQ ID NO: 56966 - protein, 11 aa, Homo sapiens
  Table A; Target 56966; HLA-A*03:01; PAEP; ENSG00000122133; TAA
KVLGEKTENPK

SEQ ID NO: 56967 - protein, 11 aa, Homo sapiens
  Table A; Target 56967; HLA-A*03:02; PAEP; ENSG00000122133; TAA
KVLGEKTENPK

SEQ ID NO: 56968 - protein, 11 aa, Homo sapiens
  Table A; Target 56968; HLA-A*11:01; PAEP; ENSG00000122133; TAA
KVLGEKTENPK

SEQ ID NO: 56969 - protein, 11 aa, Homo sapiens
  Table A; Target 56969; HLA-A*31:01; PAEP; ENSG00000122133; TAA
KVLGEKTENPK

SEQ ID NO: 56970 - protein, 8 aa, Homo sapiens
  Table A; Target 56970; HLA-B*44:02; PAEP; ENSG00000122133; TAA
LEIVLHRW

SEQ ID NO: 56971 - protein, 8 aa, Homo sapiens
  Table A; Target 56971; HLA-B*44:03; PAEP; ENSG00000122133; TAA
LEIVLHRW

SEQ ID NO: 56972 - protein, 10 aa, Homo sapiens
  Table A; Target 56972; HLA-B*44:02; PAEP; ENSG00000122133; TAA
LELPKLAGTW

SEQ ID NO: 56973 - protein, 10 aa, Homo sapiens
  Table A; Target 56973; HLA-B*44:03; PAEP; ENSG00000122133; TAA
LELPKLAGTW

SEQ ID NO: 56974 - protein, 10 aa, Homo sapiens
  Table A; Target 56974; HLA-B*57:01; PAEP; ENSG00000122133; TAA
LELPKLAGTW

SEQ ID NO: 56975 - protein, 10 aa, Homo sapiens
  Table A; Target 56975; HLA-C*16:04; PAEP; ENSG00000122133; TAA
LELPKLAGTW

SEQ ID NO: 56976 - protein, 9 aa, Homo sapiens
  Table A; Target 56976; HLA-C*06:02; PAEP; ENSG00000122133; TAA
LGVALVCGV

SEQ ID NO: 56977 - protein, 9 aa, Homo sapiens
  Table A; Target 56977; HLA-A*01:01; PAEP; ENSG00000122133; TAA
LLDTDYDNF

SEQ ID NO: 56978 - protein, 9 aa, Homo sapiens
  Table A; Target 56978; HLA-A*02:07; PAEP; ENSG00000122133; TAA
LLDTDYDNF

SEQ ID NO: 56979 - protein, 9 aa, Homo sapiens
  Table A; Target 56979; HLA-B*55:01; PAEP; ENSG00000122133; TAA
LLDTDYDNF

SEQ ID NO: 56980 - protein, 9 aa, Homo sapiens
  Table A; Target 56980; HLA-C*05:01; PAEP; ENSG00000122133; TAA
LLDTDYDNF

SEQ ID NO: 56981 - protein, 10 aa, Homo sapiens
  Table A; Target 56981; HLA-A*02:07; PAEP; ENSG00000122133; TAA
LLDTDYDNFL

SEQ ID NO: 56982 - protein, 11 aa, Homo sapiens
  Table A; Target 56982; HLA-A*02:07; PAEP; ENSG00000122133; TAA
LLDTDYDNFLF

SEQ ID NO: 56983 - protein, 9 aa, Homo sapiens
  Table A; Target 56983; HLA-A*02:01; PAEP; ENSG00000122133; TAA
LLLTLGVAL

SEQ ID NO: 56984 - protein, 9 aa, Homo sapiens
  Table A; Target 56984; HLA-A*02:04; PAEP; ENSG00000122133; TAA
LLLTLGVAL

SEQ ID NO: 56985 - protein, 9 aa, Homo sapiens
  Table A; Target 56985; HLA-A*02:07; PAEP; ENSG00000122133; TAA
LLLTLGVAL

SEQ ID NO: 56986 - protein, 9 aa, Homo sapiens
  Table A; Target 56986; HLA-A*23:01; PAEP; ENSG00000122133; TAA
LLLTLGVAL

SEQ ID NO: 56987 - protein, 9 aa, Homo sapiens
  Table A; Target 56987; HLA-C*01:02; PAEP; ENSG00000122133; TAA
LLLTLGVAL

SEQ ID NO: 56988 - protein, 9 aa, Homo sapiens
  Table A; Target 56988; HLA-C*14:02; PAEP; ENSG00000122133; TAA
LLLTLGVAL

SEQ ID NO: 56989 - protein, 10 aa, Homo sapiens
  Table A; Target 56989; HLA-A*02:01; PAEP; ENSG00000122133; TAA
LLLTLGVALV

SEQ ID NO: 56990 - protein, 10 aa, Homo sapiens
  Table A; Target 56990; HLA-A*02:03; PAEP; ENSG00000122133; TAA
LLLTLGVALV

SEQ ID NO: 56991 - protein, 10 aa, Homo sapiens
  Table A; Target 56991; HLA-A*02:04; PAEP; ENSG00000122133; TAA
LLLTLGVALV

SEQ ID NO: 56992 - protein, 9 aa, Homo sapiens
  Table A; Target 56992; HLA-A*02:07; PAEP; ENSG00000122133; TAA
LLPTPEDNL

SEQ ID NO: 56993 - protein, 9 aa, Homo sapiens
  Table A; Target 56993; HLA-C*01:02; PAEP; ENSG00000122133; TAA
LLPTPEDNL

SEQ ID NO: 56994 - protein, 9 aa, Homo sapiens
  Table A; Target 56994; HLA-C*05:01; PAEP; ENSG00000122133; TAA
LLPTPEDNL

SEQ ID NO: 56995 - protein, 11 aa, Homo sapiens
  Table A; Target 56995; HLA-A*02:07; PAEP; ENSG00000122133; TAA
LLPTPEDNLEI

SEQ ID NO: 56996 - protein, 8 aa, Homo sapiens
  Table A; Target 56996; HLA-C*01:02; PAEP; ENSG00000122133; TAA
LLTLGVAL

SEQ ID NO: 56997 - protein, 8 aa, Homo sapiens
  Table A; Target 56997; HLA-C*03:03; PAEP; ENSG00000122133; TAA
LLTLGVAL

SEQ ID NO: 56998 - protein, 8 aa, Homo sapiens
  Table A; Target 56998; HLA-C*03:04; PAEP; ENSG00000122133; TAA
LLTLGVAL

SEQ ID NO: 56999 - protein, 8 aa, Homo sapiens
  Table A; Target 56999; HLA-C*14:02; PAEP; ENSG00000122133; TAA
LLTLGVAL

SEQ ID NO: 57000 - protein, 9 aa, Homo sapiens
  Table A; Target 57000; HLA-A*02:01; PAEP; ENSG00000122133; TAA
LLTLGVALV

SEQ ID NO: 57001 - protein, 9 aa, Homo sapiens
  Table A; Target 57001; HLA-A*02:03; PAEP; ENSG00000122133; TAA
LLTLGVALV

SEQ ID NO: 57002 - protein, 9 aa, Homo sapiens
  Table A; Target 57002; HLA-A*02:04; PAEP; ENSG00000122133; TAA
LLTLGVALV

SEQ ID NO: 57003 - protein, 9 aa, Homo sapiens
  Table A; Target 57003; HLA-B*08:01; PAEP; ENSG00000122133; TAA
LMATLKAPL

SEQ ID NO: 57004 - protein, 8 aa, Homo sapiens
  Table A; Target 57004; HLA-B*08:01; PAEP; ENSG00000122133; TAA
LPKLAGTW

SEQ ID NO: 57005 - protein, 8 aa, Homo sapiens
  Table A; Target 57005; HLA-B*35:03; PAEP; ENSG00000122133; TAA
LPTPEDNL

SEQ ID NO: 57006 - protein, 10 aa, Homo sapiens
  Table A; Target 57006; HLA-B*35:03; PAEP; ENSG00000122133; TAA
LPTPEDNLEI

SEQ ID NO: 57007 - protein, 8 aa, Homo sapiens
  Table A; Target 57007; HLA-C*05:01; PAEP; ENSG00000122133; TAA
LQDTTTPI

SEQ ID NO: 57008 - protein, 11 aa, Homo sapiens
  Table A; Target 57008; HLA-B*27:05; PAEP; ENSG00000122133; TAA
LQDTTTPIQSM

SEQ ID NO: 57009 - protein, 11 aa, Homo sapiens
  Table A; Target 57009; HLA-B*38:01; PAEP; ENSG00000122133; TAA
LQDTTTPIQSM

SEQ ID NO: 57010 - protein, 11 aa, Homo sapiens
  Table A; Target 57010; HLA-B*39:01; PAEP; ENSG00000122133; TAA
LQDTTTPIQSM

SEQ ID NO: 57011 - protein, 11 aa, Homo sapiens
  Table A; Target 57011; HLA-C*04:01; PAEP; ENSG00000122133; TAA
LQDTTTPIQSM

SEQ ID NO: 57012 - protein, 11 aa, Homo sapiens
  Table A; Target 57012; HLA-C*05:01; PAEP; ENSG00000122133; TAA
LQDTTTPIQSM

SEQ ID NO: 57013 - protein, 10 aa, Homo sapiens
  Table A; Target 57013; HLA-C*04:01; PAEP; ENSG00000122133; TAA
LTLGVALVCG

SEQ ID NO: 57014 - protein, 11 aa, Homo sapiens
  Table A; Target 57014; HLA-A*25:01; PAEP; ENSG00000122133; TAA
LVEDDEIMQGF

SEQ ID NO: 57015 - protein, 11 aa, Homo sapiens
  Table A; Target 57015; HLA-A*26:01; PAEP; ENSG00000122133; TAA
LVEDDEIMQGF

SEQ ID NO: 57016 - protein, 8 aa, Homo sapiens
  Table A; Target 57016; HLA-B*51:01; PAEP; ENSG00000122133; TAA
MAMATNNI

SEQ ID NO: 57017 - protein, 10 aa, Homo sapiens
  Table A; Target 57017; HLA-A*68:01; PAEP; ENSG00000122133; TAA
MAMATNNISL

SEQ ID NO: 57018 - protein, 10 aa, Homo sapiens
  Table A; Target 57018; HLA-B*07:02; PAEP; ENSG00000122133; TAA
MAMATNNISL

SEQ ID NO: 57019 - protein, 10 aa, Homo sapiens
  Table A; Target 57019; HLA-B*35:01; PAEP; ENSG00000122133; TAA
MAMATNNISL

SEQ ID NO: 57020 - protein, 10 aa, Homo sapiens
  Table A; Target 57020; HLA-B*35:03; PAEP; ENSG00000122133; TAA
MAMATNNISL

SEQ ID NO: 57021 - protein, 10 aa, Homo sapiens
  Table A; Target 57021; HLA-B*40:01; PAEP; ENSG00000122133; TAA
MAMATNNISL

SEQ ID NO: 57022 - protein, 10 aa, Homo sapiens
  Table A; Target 57022; HLA-B*40:02; PAEP; ENSG00000122133; TAA
MAMATNNISL

SEQ ID NO: 57023 - protein, 10 aa, Homo sapiens
  Table A; Target 57023; HLA-B*46:01; PAEP; ENSG00000122133; TAA
MAMATNNISL

SEQ ID NO: 57024 - protein, 10 aa, Homo sapiens
  Table A; Target 57024; HLA-B*54:01; PAEP; ENSG00000122133; TAA
MAMATNNISL

SEQ ID NO: 57025 - protein, 10 aa, Homo sapiens
  Table A; Target 57025; HLA-B*55:01; PAEP; ENSG00000122133; TAA
MAMATNNISL

SEQ ID NO: 57026 - protein, 10 aa, Homo sapiens
  Table A; Target 57026; HLA-B*56:01; PAEP; ENSG00000122133; TAA
MAMATNNISL

SEQ ID NO: 57027 - protein, 10 aa, Homo sapiens
  Table A; Target 57027; HLA-B*58:01; PAEP; ENSG00000122133; TAA
MAMATNNISL

SEQ ID NO: 57028 - protein, 10 aa, Homo sapiens
  Table A; Target 57028; HLA-C*02:02; PAEP; ENSG00000122133; TAA
MAMATNNISL

SEQ ID NO: 57029 - protein, 10 aa, Homo sapiens
  Table A; Target 57029; HLA-C*03:03; PAEP; ENSG00000122133; TAA
MAMATNNISL

SEQ ID NO: 57030 - protein, 10 aa, Homo sapiens
  Table A; Target 57030; HLA-C*03:04; PAEP; ENSG00000122133; TAA
MAMATNNISL

SEQ ID NO: 57031 - protein, 10 aa, Homo sapiens
  Table A; Target 57031; HLA-C*07:06; PAEP; ENSG00000122133; TAA
MAMATNNISL

SEQ ID NO: 57032 - protein, 10 aa, Homo sapiens
  Table A; Target 57032; HLA-C*12:03; PAEP; ENSG00000122133; TAA
MAMATNNISL

SEQ ID NO: 57033 - protein, 10 aa, Homo sapiens
  Table A; Target 57033; HLA-C*14:02; PAEP; ENSG00000122133; TAA
MAMATNNISL

SEQ ID NO: 57034 - protein, 11 aa, Homo sapiens
  Table A; Target 57034; HLA-A*26:01; PAEP; ENSG00000122133; TAA
MAMATNNISLM

SEQ ID NO: 57035 - protein, 8 aa, Homo sapiens
  Table A; Target 57035; HLA-B*07:02; PAEP; ENSG00000122133; TAA
MATLKAPL

SEQ ID NO: 57036 - protein, 8 aa, Homo sapiens
  Table A; Target 57036; HLA-B*08:01; PAEP; ENSG00000122133; TAA
MATLKAPL

SEQ ID NO: 57037 - protein, 8 aa, Homo sapiens
  Table A; Target 57037; HLA-C*03:04; PAEP; ENSG00000122133; TAA
MATLKAPL

SEQ ID NO: 57038 - protein, 8 aa, Homo sapiens
  Table A; Target 57038; HLA-C*16:01; PAEP; ENSG00000122133; TAA
MATLKAPL

SEQ ID NO: 57039 - protein, 8 aa, Homo sapiens
  Table A; Target 57039; HLA-B*27:05; PAEP; ENSG00000122133; TAA
MATNNISL

SEQ ID NO: 57040 - protein, 8 aa, Homo sapiens
  Table A; Target 57040; HLA-B*35:03; PAEP; ENSG00000122133; TAA
MATNNISL

SEQ ID NO: 57041 - protein, 8 aa, Homo sapiens
  Table A; Target 57041; HLA-B*54:01; PAEP; ENSG00000122133; TAA
MATNNISL

SEQ ID NO: 57042 - protein, 8 aa, Homo sapiens
  Table A; Target 57042; HLA-B*58:01; PAEP; ENSG00000122133; TAA
MATNNISL

SEQ ID NO: 57043 - protein, 8 aa, Homo sapiens
  Table A; Target 57043; HLA-C*01:02; PAEP; ENSG00000122133; TAA
MATNNISL

SEQ ID NO: 57044 - protein, 8 aa, Homo sapiens
  Table A; Target 57044; HLA-C*03:03; PAEP; ENSG00000122133; TAA
MATNNISL

SEQ ID NO: 57045 - protein, 8 aa, Homo sapiens
  Table A; Target 57045; HLA-C*03:04; PAEP; ENSG00000122133; TAA
MATNNISL

SEQ ID NO: 57046 - protein, 8 aa, Homo sapiens
  Table A; Target 57046; HLA-C*07:02; PAEP; ENSG00000122133; TAA
MATNNISL

SEQ ID NO: 57047 - protein, 8 aa, Homo sapiens
  Table A; Target 57047; HLA-C*07:04; PAEP; ENSG00000122133; TAA
MATNNISL

SEQ ID NO: 57048 - protein, 8 aa, Homo sapiens
  Table A; Target 57048; HLA-C*14:02; PAEP; ENSG00000122133; TAA
MATNNISL

SEQ ID NO: 57049 - protein, 8 aa, Homo sapiens
  Table A; Target 57049; HLA-C*16:01; PAEP; ENSG00000122133; TAA
MATNNISL

SEQ ID NO: 57050 - protein, 8 aa, Homo sapiens
  Table A; Target 57050; HLA-C*16:02; PAEP; ENSG00000122133; TAA
MATNNISL

SEQ ID NO: 57051 - protein, 9 aa, Homo sapiens
  Table A; Target 57051; HLA-A*25:01; PAEP; ENSG00000122133; TAA
MATNNISLM

SEQ ID NO: 57052 - protein, 9 aa, Homo sapiens
  Table A; Target 57052; HLA-A*26:01; PAEP; ENSG00000122133; TAA
MATNNISLM

SEQ ID NO: 57053 - protein, 9 aa, Homo sapiens
  Table A; Target 57053; HLA-A*33:01; PAEP; ENSG00000122133; TAA
MATNNISLM

SEQ ID NO: 57054 - protein, 9 aa, Homo sapiens
  Table A; Target 57054; HLA-A*33:03; PAEP; ENSG00000122133; TAA
MATNNISLM

SEQ ID NO: 57055 - protein, 9 aa, Homo sapiens
  Table A; Target 57055; HLA-A*68:01; PAEP; ENSG00000122133; TAA
MATNNISLM

SEQ ID NO: 57056 - protein, 9 aa, Homo sapiens
  Table A; Target 57056; HLA-B*27:05; PAEP; ENSG00000122133; TAA
MATNNISLM

SEQ ID NO: 57057 - protein, 9 aa, Homo sapiens
  Table A; Target 57057; HLA-B*35:01; PAEP; ENSG00000122133; TAA
MATNNISLM

SEQ ID NO: 57058 - protein, 9 aa, Homo sapiens
  Table A; Target 57058; HLA-B*35:03; PAEP; ENSG00000122133; TAA
MATNNISLM

SEQ ID NO: 57059 - protein, 9 aa, Homo sapiens
  Table A; Target 57059; HLA-B*38:01; PAEP; ENSG00000122133; TAA
MATNNISLM

SEQ ID NO: 57060 - protein, 9 aa, Homo sapiens
  Table A; Target 57060; HLA-B*39:01; PAEP; ENSG00000122133; TAA
MATNNISLM

SEQ ID NO: 57061 - protein, 9 aa, Homo sapiens
  Table A; Target 57061; HLA-B*46:01; PAEP; ENSG00000122133; TAA
MATNNISLM

SEQ ID NO: 57062 - protein, 9 aa, Homo sapiens
  Table A; Target 57062; HLA-B*51:01; PAEP; ENSG00000122133; TAA
MATNNISLM

SEQ ID NO: 57063 - protein, 9 aa, Homo sapiens
  Table A; Target 57063; HLA-B*54:01; PAEP; ENSG00000122133; TAA
MATNNISLM

SEQ ID NO: 57064 - protein, 9 aa, Homo sapiens
  Table A; Target 57064; HLA-B*55:01; PAEP; ENSG00000122133; TAA
MATNNISLM

SEQ ID NO: 57065 - protein, 9 aa, Homo sapiens
  Table A; Target 57065; HLA-B*58:01; PAEP; ENSG00000122133; TAA
MATNNISLM

SEQ ID NO: 57066 - protein, 9 aa, Homo sapiens
  Table A; Target 57066; HLA-C*02:02; PAEP; ENSG00000122133; TAA
MATNNISLM

SEQ ID NO: 57067 - protein, 9 aa, Homo sapiens
  Table A; Target 57067; HLA-C*03:03; PAEP; ENSG00000122133; TAA
MATNNISLM

SEQ ID NO: 57068 - protein, 9 aa, Homo sapiens
  Table A; Target 57068; HLA-C*03:04; PAEP; ENSG00000122133; TAA
MATNNISLM

SEQ ID NO: 57069 - protein, 9 aa, Homo sapiens
  Table A; Target 57069; HLA-C*04:01; PAEP; ENSG00000122133; TAA
MATNNISLM

SEQ ID NO: 57070 - protein, 9 aa, Homo sapiens
  Table A; Target 57070; HLA-C*07:01; PAEP; ENSG00000122133; TAA
MATNNISLM

SEQ ID NO: 57071 - protein, 9 aa, Homo sapiens
  Table A; Target 57071; HLA-C*07:04; PAEP; ENSG00000122133; TAA
MATNNISLM

SEQ ID NO: 57072 - protein, 9 aa, Homo sapiens
  Table A; Target 57072; HLA-C*07:06; PAEP; ENSG00000122133; TAA
MATNNISLM

SEQ ID NO: 57073 - protein, 9 aa, Homo sapiens
  Table A; Target 57073; HLA-C*12:03; PAEP; ENSG00000122133; TAA
MATNNISLM

SEQ ID NO: 57074 - protein, 9 aa, Homo sapiens
  Table A; Target 57074; HLA-C*14:02; PAEP; ENSG00000122133; TAA
MATNNISLM

SEQ ID NO: 57075 - protein, 9 aa, Homo sapiens
  Table A; Target 57075; HLA-C*16:01; PAEP; ENSG00000122133; TAA
MATNNISLM

SEQ ID NO: 57076 - protein, 9 aa, Homo sapiens
  Table A; Target 57076; HLA-C*16:02; PAEP; ENSG00000122133; TAA
MATNNISLM

SEQ ID NO: 57077 - protein, 9 aa, Homo sapiens
  Table A; Target 57077; HLA-C*16:04; PAEP; ENSG00000122133; TAA
MATNNISLM

SEQ ID NO: 57078 - protein, 10 aa, Homo sapiens
  Table A; Target 57078; HLA-B*54:01; PAEP; ENSG00000122133; TAA
MATNNISLMA

SEQ ID NO: 57079 - protein, 10 aa, Homo sapiens
  Table A; Target 57079; HLA-B*18:01; PAEP; ENSG00000122133; TAA
NEATLLDTDY

SEQ ID NO: 57080 - protein, 10 aa, Homo sapiens
  Table A; Target 57080; HLA-B*44:03; PAEP; ENSG00000122133; TAA
NEATLLDTDY

SEQ ID NO: 57081 - protein, 8 aa, Homo sapiens
  Table A; Target 57081; HLA-B*39:01; PAEP; ENSG00000122133; TAA
NISLMATL

SEQ ID NO: 57082 - protein, 8 aa, Homo sapiens
  Table A; Target 57082; HLA-C*01:02; PAEP; ENSG00000122133; TAA
NISLMATL

SEQ ID NO: 57083 - protein, 8 aa, Homo sapiens
  Table A; Target 57083; HLA-C*14:02; PAEP; ENSG00000122133; TAA
NISLMATL

SEQ ID NO: 57084 - protein, 9 aa, Homo sapiens
  Table A; Target 57084; HLA-A*03:02; PAEP; ENSG00000122133; TAA
NISLMATLK

SEQ ID NO: 57085 - protein, 9 aa, Homo sapiens
  Table A; Target 57085; HLA-A*23:01; PAEP; ENSG00000122133; TAA
NNISLMATL

SEQ ID NO: 57086 - protein, 9 aa, Homo sapiens
  Table A; Target 57086; HLA-A*25:01; PAEP; ENSG00000122133; TAA
NNISLMATL

SEQ ID NO: 57087 - protein, 9 aa, Homo sapiens
  Table A; Target 57087; HLA-A*26:01; PAEP; ENSG00000122133; TAA
NNISLMATL

SEQ ID NO: 57088 - protein, 9 aa, Homo sapiens
  Table A; Target 57088; HLA-B*18:01; PAEP; ENSG00000122133; TAA
NNISLMATL

SEQ ID NO: 57089 - protein, 9 aa, Homo sapiens
  Table A; Target 57089; HLA-B*39:01; PAEP; ENSG00000122133; TAA
NNISLMATL

SEQ ID NO: 57090 - protein, 10 aa, Homo sapiens
  Table A; Target 57090; HLA-B*27:02; PAEP; ENSG00000122133; TAA
NNISLMATLK

SEQ ID NO: 57091 - protein, 8 aa, Homo sapiens
  Table A; Target 57091; HLA-C*01:02; PAEP; ENSG00000122133; TAA
NYTVANEA

SEQ ID NO: 57092 - protein, 8 aa, Homo sapiens
  Table A; Target 57092; HLA-C*14:02; PAEP; ENSG00000122133; TAA
NYTVANEA

SEQ ID NO: 57093 - protein, 9 aa, Homo sapiens
  Table A; Target 57093; HLA-C*14:02; PAEP; ENSG00000122133; TAA
NYTVANEAT

SEQ ID NO: 57094 - protein, 10 aa, Homo sapiens
  Table A; Target 57094; HLA-A*24:02; PAEP; ENSG00000122133; TAA
NYTVANEATL

SEQ ID NO: 57095 - protein, 10 aa, Homo sapiens
  Table A; Target 57095; HLA-C*14:02; PAEP; ENSG00000122133; TAA
NYTVANEATL

SEQ ID NO: 57096 - protein, 11 aa, Homo sapiens
  Table A; Target 57096; HLA-A*24:02; PAEP; ENSG00000122133; TAA
NYTVANEATLL

SEQ ID NO: 57097 - protein, 9 aa, Homo sapiens
  Table A; Target 57097; HLA-A*03:02; PAEP; ENSG00000122133; TAA
PAMDIPQTK

SEQ ID NO: 57098 - protein, 9 aa, Homo sapiens
  Table A; Target 57098; HLA-A*11:01; PAEP; ENSG00000122133; TAA
PAMDIPQTK

SEQ ID NO: 57099 - protein, 9 aa, Homo sapiens
  Table A; Target 57099; HLA-A*68:01; PAEP; ENSG00000122133; TAA
PAMDIPQTK

SEQ ID NO: 57100 - protein, 9 aa, Homo sapiens
  Table A; Target 57100; HLA-B*40:01; PAEP; ENSG00000122133; TAA
PEDNLEIVL

SEQ ID NO: 57101 - protein, 8 aa, Homo sapiens
  Table A; Target 57101; HLA-A*30:01; PAEP; ENSG00000122133; TAA
QDLELPKL

SEQ ID NO: 57102 - protein, 8 aa, Homo sapiens
  Table A; Target 57102; HLA-B*37:01; PAEP; ENSG00000122133; TAA
QDLELPKL

SEQ ID NO: 57103 - protein, 8 aa, Homo sapiens
  Table A; Target 57103; HLA-B*40:02; PAEP; ENSG00000122133; TAA
QDLELPKL

SEQ ID NO: 57104 - protein, 10 aa, Homo sapiens
  Table A; Target 57104; HLA-A*30:01; PAEP; ENSG00000122133; TAA
QDTTTPIQSM

SEQ ID NO: 57105 - protein, 10 aa, Homo sapiens
  Table A; Target 57105; HLA-B*40:02; PAEP; ENSG00000122133; TAA
QDTTTPIQSM

SEQ ID NO: 57106 - protein, 10 aa, Homo sapiens
  Table A; Target 57106; HLA-C*04:01; PAEP; ENSG00000122133; TAA
QDTTTPIQSM

SEQ ID NO: 57107 - protein, 10 aa, Homo sapiens
  Table A; Target 57107; HLA-C*16:02; PAEP; ENSG00000122133; TAA
QDTTTPIQSM

SEQ ID NO: 57108 - protein, 8 aa, Homo sapiens
  Table A; Target 57108; HLA-C*05:01; PAEP; ENSG00000122133; TAA
QMEEPCRF

SEQ ID NO: 57109 - protein, 8 aa, Homo sapiens
  Table A; Target 57109; HLA-A*31:01; PAEP; ENSG00000122133; TAA
RAFRPLPR

SEQ ID NO: 57110 - protein, 11 aa, Homo sapiens
  Table A; Target 57110; HLA-B*57:01; PAEP; ENSG00000122133; TAA
RAFRPLPRHLW

SEQ ID NO: 57111 - protein, 8 aa, Homo sapiens
  Table A; Target 57111; HLA-B*57:01; PAEP; ENSG00000122133; TAA
RPLPRHLW

SEQ ID NO: 57112 - protein, 8 aa, Homo sapiens
  Table A; Target 57112; HLA-B*08:01; PAEP; ENSG00000122133; TAA
SCVEKKVL

SEQ ID NO: 57113 - protein, 8 aa, Homo sapiens
  Table A; Target 57113; HLA-C*16:01; PAEP; ENSG00000122133; TAA
SCVEKKVL

SEQ ID NO: 57114 - protein, 9 aa, Homo sapiens
  Table A; Target 57114; HLA-A*02:03; PAEP; ENSG00000122133; TAA
SMAMATNNI

SEQ ID NO: 57115 - protein, 9 aa, Homo sapiens
  Table A; Target 57115; HLA-B*13:02; PAEP; ENSG00000122133; TAA
SMAMATNNI

SEQ ID NO: 57116 - protein, 9 aa, Homo sapiens
  Table A; Target 57116; HLA-B*38:01; PAEP; ENSG00000122133; TAA
SMAMATNNI

SEQ ID NO: 57117 - protein, 9 aa, Homo sapiens
  Table A; Target 57117; HLA-C*06:02; PAEP; ENSG00000122133; TAA
SMAMATNNI

SEQ ID NO: 57118 - protein, 9 aa, Homo sapiens
  Table A; Target 57118; HLA-C*07:04; PAEP; ENSG00000122133; TAA
SMAMATNNI

SEQ ID NO: 57119 - protein, 11 aa, Homo sapiens
  Table A; Target 57119; HLA-A*02:01; PAEP; ENSG00000122133; TAA
SMAMATNNISL

SEQ ID NO: 57120 - protein, 8 aa, Homo sapiens
  Table A; Target 57120; HLA-B*37:01; PAEP; ENSG00000122133; TAA
TDYDNFLF

SEQ ID NO: 57121 - protein, 9 aa, Homo sapiens
  Table A; Target 57121; HLA-A*68:02; PAEP; ENSG00000122133; TAA
TDYDNFLFL

SEQ ID NO: 57122 - protein, 9 aa, Homo sapiens
  Table A; Target 57122; HLA-B*44:02; PAEP; ENSG00000122133; TAA
TDYDNFLFL

SEQ ID NO: 57123 - protein, 9 aa, Homo sapiens
  Table A; Target 57123; HLA-B*37:01; PAEP; ENSG00000122133; TAA
TENPKKFKI

SEQ ID NO: 57124 - protein, 9 aa, Homo sapiens
  Table A; Target 57124; HLA-B*44:02; PAEP; ENSG00000122133; TAA
TENPKKFKI

SEQ ID NO: 57125 - protein, 9 aa, Homo sapiens
  Table A; Target 57125; HLA-B*44:03; PAEP; ENSG00000122133; TAA
TENPKKFKI

SEQ ID NO: 57126 - protein, 9 aa, Homo sapiens
  Table A; Target 57126; HLA-B*49:01; PAEP; ENSG00000122133; TAA
TENPKKFKI

SEQ ID NO: 57127 - protein, 10 aa, Homo sapiens
  Table A; Target 57127; HLA-A*02:03; PAEP; ENSG00000122133; TAA
TLGVALVCGV

SEQ ID NO: 57128 - protein, 8 aa, Homo sapiens
  Table A; Target 57128; HLA-A*02:03; PAEP; ENSG00000122133; TAA
TLKAPLRV

SEQ ID NO: 57129 - protein, 10 aa, Homo sapiens
  Table A; Target 57129; HLA-A*23:01; PAEP; ENSG00000122133; TAA
TLLDTDYDNF

SEQ ID NO: 57130 - protein, 10 aa, Homo sapiens
  Table A; Target 57130; HLA-B*38:01; PAEP; ENSG00000122133; TAA
TLLDTDYDNF

SEQ ID NO: 57131 - protein, 11 aa, Homo sapiens
  Table A; Target 57131; HLA-A*02:01; PAEP; ENSG00000122133; TAA
TLLDTDYDNFL

SEQ ID NO: 57132 - protein, 11 aa, Homo sapiens
  Table A; Target 57132; HLA-A*02:04; PAEP; ENSG00000122133; TAA
TLLDTDYDNFL

SEQ ID NO: 57133 - protein, 10 aa, Homo sapiens
  Table A; Target 57133; HLA-C*07:02; PAEP; ENSG00000122133; TAA
TNNISLMATL

SEQ ID NO: 57134 - protein, 11 aa, Homo sapiens
  Table A; Target 57134; HLA-B*27:02; PAEP; ENSG00000122133; TAA
TNNISLMATLK

SEQ ID NO: 57135 - protein, 10 aa, Homo sapiens
  Table A; Target 57135; HLA-B*35:01; PAEP; ENSG00000122133; TAA
TPEDNLEIVL

SEQ ID NO: 57136 - protein, 10 aa, Homo sapiens
  Table A; Target 57136; HLA-B*35:03; PAEP; ENSG00000122133; TAA
TPEDNLEIVL

SEQ ID NO: 57137 - protein, 10 aa, Homo sapiens
  Table A; Target 57137; HLA-B*35:01; PAEP; ENSG00000122133; TAA
TPIQSMMCQY

SEQ ID NO: 57138 - protein, 10 aa, Homo sapiens
  Table A; Target 57138; HLA-B*55:01; PAEP; ENSG00000122133; TAA
TPIQSMMCQY

SEQ ID NO: 57139 - protein, 11 aa, Homo sapiens
  Table A; Target 57139; HLA-B*39:01; PAEP; ENSG00000122133; TAA
TSLLPTPEDNL

SEQ ID NO: 57140 - protein, 8 aa, Homo sapiens
  Table A; Target 57140; HLA-C*01:02; PAEP; ENSG00000122133; TAA
TTPIQSMM

SEQ ID NO: 57141 - protein, 8 aa, Homo sapiens
  Table A; Target 57141; HLA-C*04:01; PAEP; ENSG00000122133; TAA
TTPIQSMM

SEQ ID NO: 57142 - protein, 11 aa, Homo sapiens
  Table A; Target 57142; HLA-C*07:01; PAEP; ENSG00000122133; TAA
TTPIQSMMCQY

SEQ ID NO: 57143 - protein, 8 aa, Homo sapiens
  Table A; Target 57143; HLA-A*32:01; PAEP; ENSG00000122133; TAA
TTTPIQSM

SEQ ID NO: 57144 - protein, 8 aa, Homo sapiens
  Table A; Target 57144; HLA-C*04:01; PAEP; ENSG00000122133; TAA
TTTPIQSM

SEQ ID NO: 57145 - protein, 8 aa, Homo sapiens
  Table A; Target 57145; HLA-C*16:02; PAEP; ENSG00000122133; TAA
TTTPIQSM

SEQ ID NO: 57146 - protein, 9 aa, Homo sapiens
  Table A; Target 57146; HLA-A*26:01; PAEP; ENSG00000122133; TAA
TTTPIQSMM

SEQ ID NO: 57147 - protein, 9 aa, Homo sapiens
  Table A; Target 57147; HLA-A*32:01; PAEP; ENSG00000122133; TAA
TTTPIQSMM

SEQ ID NO: 57148 - protein, 9 aa, Homo sapiens
  Table A; Target 57148; HLA-A*68:01; PAEP; ENSG00000122133; TAA
TTTPIQSMM

SEQ ID NO: 57149 - protein, 9 aa, Homo sapiens
  Table A; Target 57149; HLA-A*68:02; PAEP; ENSG00000122133; TAA
TTTPIQSMM

SEQ ID NO: 57150 - protein, 9 aa, Homo sapiens
  Table A; Target 57150; HLA-B*27:05; PAEP; ENSG00000122133; TAA
TTTPIQSMM

SEQ ID NO: 57151 - protein, 9 aa, Homo sapiens
  Table A; Target 57151; HLA-B*57:01; PAEP; ENSG00000122133; TAA
TTTPIQSMM

SEQ ID NO: 57152 - protein, 9 aa, Homo sapiens
  Table A; Target 57152; HLA-B*58:01; PAEP; ENSG00000122133; TAA
TTTPIQSMM

SEQ ID NO: 57153 - protein, 9 aa, Homo sapiens
  Table A; Target 57153; HLA-C*02:02; PAEP; ENSG00000122133; TAA
TTTPIQSMM

SEQ ID NO: 57154 - protein, 9 aa, Homo sapiens
  Table A; Target 57154; HLA-C*04:01; PAEP; ENSG00000122133; TAA
TTTPIQSMM

SEQ ID NO: 57155 - protein, 9 aa, Homo sapiens
  Table A; Target 57155; HLA-C*07:06; PAEP; ENSG00000122133; TAA
TTTPIQSMM

SEQ ID NO: 57156 - protein, 9 aa, Homo sapiens
  Table A; Target 57156; HLA-C*12:03; PAEP; ENSG00000122133; TAA
TTTPIQSMM

SEQ ID NO: 57157 - protein, 9 aa, Homo sapiens
  Table A; Target 57157; HLA-C*16:01; PAEP; ENSG00000122133; TAA
TTTPIQSMM

SEQ ID NO: 57158 - protein, 9 aa, Homo sapiens
  Table A; Target 57158; HLA-C*16:02; PAEP; ENSG00000122133; TAA
TTTPIQSMM

SEQ ID NO: 57159 - protein, 9 aa, Homo sapiens
  Table A; Target 57159; HLA-A*25:01; PAEP; ENSG00000122133; TAA
TVANEATLL

SEQ ID NO: 57160 - protein, 9 aa, Homo sapiens
  Table A; Target 57160; HLA-A*26:01; PAEP; ENSG00000122133; TAA
TVANEATLL

SEQ ID NO: 57161 - protein, 9 aa, Homo sapiens
  Table A; Target 57161; HLA-A*68:01; PAEP; ENSG00000122133; TAA
TVANEATLL

SEQ ID NO: 57162 - protein, 9 aa, Homo sapiens
  Table A; Target 57162; HLA-A*68:02; PAEP; ENSG00000122133; TAA
TVANEATLL

SEQ ID NO: 57163 - protein, 9 aa, Homo sapiens
  Table A; Target 57163; HLA-B*27:05; PAEP; ENSG00000122133; TAA
TVANEATLL

SEQ ID NO: 57164 - protein, 9 aa, Homo sapiens
  Table A; Target 57164; HLA-B*35:03; PAEP; ENSG00000122133; TAA
TVANEATLL

SEQ ID NO: 57165 - protein, 9 aa, Homo sapiens
  Table A; Target 57165; HLA-B*38:01; PAEP; ENSG00000122133; TAA
TVANEATLL

SEQ ID NO: 57166 - protein, 9 aa, Homo sapiens
  Table A; Target 57166; HLA-B*39:01; PAEP; ENSG00000122133; TAA
TVANEATLL

SEQ ID NO: 57167 - protein, 9 aa, Homo sapiens
  Table A; Target 57167; HLA-C*05:01; PAEP; ENSG00000122133; TAA
TVANEATLL

SEQ ID NO: 57168 - protein, 9 aa, Homo sapiens
  Table A; Target 57168; HLA-C*07:04; PAEP; ENSG00000122133; TAA
TVANEATLL

SEQ ID NO: 57169 - protein, 9 aa, Homo sapiens
  Table A; Target 57169; HLA-C*07:06; PAEP; ENSG00000122133; TAA
TVANEATLL

SEQ ID NO: 57170 - protein, 9 aa, Homo sapiens
  Table A; Target 57170; HLA-B*54:01; PAEP; ENSG00000122133; TAA
VALVCGVPA

SEQ ID NO: 57171 - protein, 8 aa, Homo sapiens
  Table A; Target 57171; HLA-A*23:01; PAEP; ENSG00000122133; TAA
VANEATLL

SEQ ID NO: 57172 - protein, 8 aa, Homo sapiens
  Table A; Target 57172; HLA-B*46:01; PAEP; ENSG00000122133; TAA
VANEATLL

SEQ ID NO: 57173 - protein, 8 aa, Homo sapiens
  Table A; Target 57173; HLA-B*51:01; PAEP; ENSG00000122133; TAA
VANEATLL

SEQ ID NO: 57174 - protein, 8 aa, Homo sapiens
  Table A; Target 57174; HLA-C*01:02; PAEP; ENSG00000122133; TAA
VANEATLL

SEQ ID NO: 57175 - protein, 8 aa, Homo sapiens
  Table A; Target 57175; HLA-C*03:03; PAEP; ENSG00000122133; TAA
VANEATLL

SEQ ID NO: 57176 - protein, 8 aa, Homo sapiens
  Table A; Target 57176; HLA-C*03:04; PAEP; ENSG00000122133; TAA
VANEATLL

SEQ ID NO: 57177 - protein, 8 aa, Homo sapiens
  Table A; Target 57177; HLA-C*05:01; PAEP; ENSG00000122133; TAA
VANEATLL

SEQ ID NO: 57178 - protein, 8 aa, Homo sapiens
  Table A; Target 57178; HLA-C*07:04; PAEP; ENSG00000122133; TAA
VANEATLL

SEQ ID NO: 57179 - protein, 8 aa, Homo sapiens
  Table A; Target 57179; HLA-C*14:02; PAEP; ENSG00000122133; TAA
VANEATLL

SEQ ID NO: 57180 - protein, 8 aa, Homo sapiens
  Table A; Target 57180; HLA-C*16:02; PAEP; ENSG00000122133; TAA
VANEATLL

SEQ ID NO: 57181 - protein, 10 aa, Homo sapiens
  Table A; Target 57181; HLA-A*30:01; PAEP; ENSG00000122133; TAA
VEDDEIMQGF

SEQ ID NO: 57182 - protein, 10 aa, Homo sapiens
  Table A; Target 57182; HLA-B*18:01; PAEP; ENSG00000122133; TAA
VEDDEIMQGF

SEQ ID NO: 57183 - protein, 10 aa, Homo sapiens
  Table A; Target 57183; HLA-B*27:02; PAEP; ENSG00000122133; TAA
VEDDEIMQGF

SEQ ID NO: 57184 - protein, 10 aa, Homo sapiens
  Table A; Target 57184; HLA-B*27:05; PAEP; ENSG00000122133; TAA
VEDDEIMQGF

SEQ ID NO: 57185 - protein, 10 aa, Homo sapiens
  Table A; Target 57185; HLA-B*37:01; PAEP; ENSG00000122133; TAA
VEDDEIMQGF

SEQ ID NO: 57186 - protein, 10 aa, Homo sapiens
  Table A; Target 57186; HLA-B*38:01; PAEP; ENSG00000122133; TAA
VEDDEIMQGF

SEQ ID NO: 57187 - protein, 10 aa, Homo sapiens
  Table A; Target 57187; HLA-B*40:01; PAEP; ENSG00000122133; TAA
VEDDEIMQGF

SEQ ID NO: 57188 - protein, 10 aa, Homo sapiens
  Table A; Target 57188; HLA-B*44:02; PAEP; ENSG00000122133; TAA
VEDDEIMQGF

SEQ ID NO: 57189 - protein, 10 aa, Homo sapiens
  Table A; Target 57189; HLA-B*44:03; PAEP; ENSG00000122133; TAA
VEDDEIMQGF

SEQ ID NO: 57190 - protein, 10 aa, Homo sapiens
  Table A; Target 57190; HLA-B*49:01; PAEP; ENSG00000122133; TAA
VEDDEIMQGF

SEQ ID NO: 57191 - protein, 10 aa, Homo sapiens
  Table A; Target 57191; HLA-C*05:01; PAEP; ENSG00000122133; TAA
VEDDEIMQGF

SEQ ID NO: 57192 - protein, 10 aa, Homo sapiens
  Table A; Target 57192; HLA-C*16:04; PAEP; ENSG00000122133; TAA
VEDDEIMQGF

SEQ ID NO: 57193 - protein, 11 aa, Homo sapiens
  Table A; Target 57193; HLA-B*49:01; PAEP; ENSG00000122133; TAA
VEDDEIMQGFI

SEQ ID NO: 57194 - protein, 9 aa, Homo sapiens
  Table A; Target 57194; HLA-A*02:03; PAEP; ENSG00000122133; TAA
VLGEKTENP

SEQ ID NO: 57195 - protein, 10 aa, Homo sapiens
  Table A; Target 57195; HLA-A*03:01; PAEP; ENSG00000122133; TAA
VLGEKTENPK

SEQ ID NO: 57196 - protein, 10 aa, Homo sapiens
  Table A; Target 57196; HLA-A*03:02; PAEP; ENSG00000122133; TAA
VLGEKTENPK

SEQ ID NO: 57197 - protein, 11 aa, Homo sapiens
  Table A; Target 57197; HLA-A*03:02; PAEP; ENSG00000122133; TAA
VLGEKTENPKK

SEQ ID NO: 57198 - protein, 9 aa, Homo sapiens
  Table A; Target 57198; HLA-B*35:03; PAEP; ENSG00000122133; TAA
VLVEDDEIM

SEQ ID NO: 57199 - protein, 9 aa, Homo sapiens
  Table A; Target 57199; HLA-B*55:01; PAEP; ENSG00000122133; TAA
VLVEDDEIM

SEQ ID NO: 57200 - protein, 9 aa, Homo sapiens
  Table A; Target 57200; HLA-B*56:01; PAEP; ENSG00000122133; TAA
VPAMDIPQT

SEQ ID NO: 57201 - protein, 10 aa, Homo sapiens
  Table A; Target 57201; HLA-A*68:01; PAEP; ENSG00000122133; TAA
VPAMDIPQTK

SEQ ID NO: 57202 - protein, 10 aa, Homo sapiens
  Table A; Target 57202; HLA-B*56:01; PAEP; ENSG00000122133; TAA
VPAMDIPQTK

SEQ ID NO: 57203 - protein, 9 aa, Homo sapiens
  Table A; Target 57203; HLA-A*02:01; PAEP; ENSG00000122133; TAA
YTVANEATL

SEQ ID NO: 57204 - protein, 9 aa, Homo sapiens
  Table A; Target 57204; HLA-A*23:01; PAEP; ENSG00000122133; TAA
YTVANEATL

SEQ ID NO: 57205 - protein, 9 aa, Homo sapiens
  Table A; Target 57205; HLA-A*30:01; PAEP; ENSG00000122133; TAA
YTVANEATL

SEQ ID NO: 57206 - protein, 9 aa, Homo sapiens
  Table A; Target 57206; HLA-A*68:02; PAEP; ENSG00000122133; TAA
YTVANEATL

SEQ ID NO: 57207 - protein, 9 aa, Homo sapiens
  Table A; Target 57207; HLA-B*35:03; PAEP; ENSG00000122133; TAA
YTVANEATL

SEQ ID NO: 57208 - protein, 9 aa, Homo sapiens
  Table A; Target 57208; HLA-B*38:01; PAEP; ENSG00000122133; TAA
YTVANEATL

SEQ ID NO: 57209 - protein, 9 aa, Homo sapiens
  Table A; Target 57209; HLA-B*39:01; PAEP; ENSG00000122133; TAA
YTVANEATL

SEQ ID NO: 57210 - protein, 9 aa, Homo sapiens
  Table A; Target 57210; HLA-B*40:01; PAEP; ENSG00000122133; TAA
YTVANEATL

SEQ ID NO: 57211 - protein, 9 aa, Homo sapiens
  Table A; Target 57211; HLA-B*40:02; PAEP; ENSG00000122133; TAA
YTVANEATL

SEQ ID NO: 57212 - protein, 9 aa, Homo sapiens
  Table A; Target 57212; HLA-B*46:01; PAEP; ENSG00000122133; TAA
YTVANEATL

SEQ ID NO: 57213 - protein, 9 aa, Homo sapiens
  Table A; Target 57213; HLA-B*58:01; PAEP; ENSG00000122133; TAA
YTVANEATL

SEQ ID NO: 57214 - protein, 9 aa, Homo sapiens
  Table A; Target 57214; HLA-C*01:02; PAEP; ENSG00000122133; TAA
YTVANEATL

SEQ ID NO: 57215 - protein, 9 aa, Homo sapiens
  Table A; Target 57215; HLA-C*02:02; PAEP; ENSG00000122133; TAA
YTVANEATL

SEQ ID NO: 57216 - protein, 9 aa, Homo sapiens
  Table A; Target 57216; HLA-C*03:03; PAEP; ENSG00000122133; TAA
YTVANEATL

SEQ ID NO: 57217 - protein, 9 aa, Homo sapiens
  Table A; Target 57217; HLA-C*03:04; PAEP; ENSG00000122133; TAA
YTVANEATL

SEQ ID NO: 57218 - protein, 9 aa, Homo sapiens
  Table A; Target 57218; HLA-C*05:01; PAEP; ENSG00000122133; TAA
YTVANEATL

SEQ ID NO: 57219 - protein, 9 aa, Homo sapiens
  Table A; Target 57219; HLA-C*07:04; PAEP; ENSG00000122133; TAA
YTVANEATL

SEQ ID NO: 57220 - protein, 9 aa, Homo sapiens
  Table A; Target 57220; HLA-C*16:02; PAEP; ENSG00000122133; TAA
YTVANEATL

SEQ ID NO: 57221 - protein, 10 aa, Homo sapiens
  Table A; Target 57221; HLA-A*11:01; PAGE1; ENSG00000068985; CTA
ADSQELVQPK

SEQ ID NO: 57222 - protein, 10 aa, Homo sapiens
  Table A; Target 57222; HLA-B*27:02; PAGE1; ENSG00000068985; CTA
ADSQELVQPK

SEQ ID NO: 57223 - protein, 10 aa, Homo sapiens
  Table A; Target 57223; HLA-A*03:02; PAGE1; ENSG00000068985; CTA
ADSQEQVHPK

SEQ ID NO: 57224 - protein, 10 aa, Homo sapiens
  Table A; Target 57224; HLA-A*11:01; PAGE1; ENSG00000068985; CTA
ADSQEQVHPK

SEQ ID NO: 57225 - protein, 10 aa, Homo sapiens
  Table A; Target 57225; HLA-B*27:02; PAGE1; ENSG00000068985; CTA
ADSQEQVHPK

SEQ ID NO: 57226 - protein, 8 aa, Homo sapiens
  Table A; Target 57226; HLA-B*18:01; PAGE1; ENSG00000068985; CTA
DEVESPTQ

SEQ ID NO: 57227 - protein, 9 aa, Homo sapiens
  Table A; Target 57227; HLA-B*18:01; PAGE1; ENSG00000068985; CTA
DEVESPTQS

SEQ ID NO: 57228 - protein, 8 aa, Homo sapiens
  Table A; Target 57228; HLA-B*51:01; PAGE1; ENSG00000068985; CTA
DGPDTKRV

SEQ ID NO: 57229 - protein, 8 aa, Homo sapiens
  Table A; Target 57229; HLA-B*39:01; PAGE1; ENSG00000068985; CTA
DGPDVQEL

SEQ ID NO: 57230 - protein, 8 aa, Homo sapiens
  Table A; Target 57230; HLA-B*51:01; PAGE1; ENSG00000068985; CTA
DGPDVQEL

SEQ ID NO: 57231 - protein, 8 aa, Homo sapiens
  Table A; Target 57231; HLA-C*01:02; PAGE1; ENSG00000068985; CTA
DGPDVQEL

SEQ ID NO: 57232 - protein, 9 aa, Homo sapiens
  Table A; Target 57232; HLA-A*03:02; PAGE1; ENSG00000068985; CTA
DSQELVQPK

SEQ ID NO: 57233 - protein, 9 aa, Homo sapiens
  Table A; Target 57233; HLA-A*11:01; PAGE1; ENSG00000068985; CTA
DSQELVQPK

SEQ ID NO: 57234 - protein, 9 aa, Homo sapiens
  Table A; Target 57234; HLA-A*33:01; PAGE1; ENSG00000068985; CTA
DSQELVQPK

SEQ ID NO: 57235 - protein, 9 aa, Homo sapiens
  Table A; Target 57235; HLA-A*33:03; PAGE1; ENSG00000068985; CTA
DSQELVQPK

SEQ ID NO: 57236 - protein, 9 aa, Homo sapiens
  Table A; Target 57236; HLA-A*68:01; PAGE1; ENSG00000068985; CTA
DSQELVQPK

SEQ ID NO: 57237 - protein, 9 aa, Homo sapiens
  Table A; Target 57237; HLA-B*27:02; PAGE1; ENSG00000068985; CTA
DSQELVQPK

SEQ ID NO: 57238 - protein, 9 aa, Homo sapiens
  Table A; Target 57238; HLA-C*07:06; PAGE1; ENSG00000068985; CTA
DSQELVQPK

SEQ ID NO: 57239 - protein, 9 aa, Homo sapiens
  Table A; Target 57239; HLA-A*03:02; PAGE1; ENSG00000068985; CTA
DSQEQVHPK

SEQ ID NO: 57240 - protein, 9 aa, Homo sapiens
  Table A; Target 57240; HLA-A*11:01; PAGE1; ENSG00000068985; CTA
DSQEQVHPK

SEQ ID NO: 57241 - protein, 9 aa, Homo sapiens
  Table A; Target 57241; HLA-A*33:01; PAGE1; ENSG00000068985; CTA
DSQEQVHPK

SEQ ID NO: 57242 - protein, 9 aa, Homo sapiens
  Table A; Target 57242; HLA-A*33:03; PAGE1; ENSG00000068985; CTA
DSQEQVHPK

SEQ ID NO: 57243 - protein, 9 aa, Homo sapiens
  Table A; Target 57243; HLA-A*68:01; PAGE1; ENSG00000068985; CTA
DSQEQVHPK

SEQ ID NO: 57244 - protein, 9 aa, Homo sapiens
  Table A; Target 57244; HLA-B*27:02; PAGE1; ENSG00000068985; CTA
DSQEQVHPK

SEQ ID NO: 57245 - protein, 9 aa, Homo sapiens
  Table A; Target 57245; HLA-C*06:02; PAGE1; ENSG00000068985; CTA
DSQEQVHPK

SEQ ID NO: 57246 - protein, 9 aa, Homo sapiens
  Table A; Target 57246; HLA-C*07:06; PAGE1; ENSG00000068985; CTA
DSQEQVHPK

SEQ ID NO: 57247 - protein, 8 aa, Homo sapiens
  Table A; Target 57247; HLA-A*33:01; PAGE1; ENSG00000068985; CTA
DTKRVCLR

SEQ ID NO: 57248 - protein, 8 aa, Homo sapiens
  Table A; Target 57248; HLA-C*05:01; PAGE1; ENSG00000068985; CTA
EADSQELV

SEQ ID NO: 57249 - protein, 11 aa, Homo sapiens
  Table A; Target 57249; HLA-A*11:01; PAGE1; ENSG00000068985; CTA
EADSQELVQPK

SEQ ID NO: 57250 - protein, 11 aa, Homo sapiens
  Table A; Target 57250; HLA-A*33:01; PAGE1; ENSG00000068985; CTA
EADSQELVQPK

SEQ ID NO: 57251 - protein, 11 aa, Homo sapiens
  Table A; Target 57251; HLA-A*33:03; PAGE1; ENSG00000068985; CTA
EADSQELVQPK

SEQ ID NO: 57252 - protein, 11 aa, Homo sapiens
  Table A; Target 57252; HLA-A*68:01; PAGE1; ENSG00000068985; CTA
EADSQELVQPK

SEQ ID NO: 57253 - protein, 11 aa, Homo sapiens
  Table A; Target 57253; HLA-B*27:02; PAGE1; ENSG00000068985; CTA
EADSQELVQPK

SEQ ID NO: 57254 - protein, 11 aa, Homo sapiens
  Table A; Target 57254; HLA-B*27:05; PAGE1; ENSG00000068985; CTA
EADSQELVQPK

SEQ ID NO: 57255 - protein, 11 aa, Homo sapiens
  Table A; Target 57255; HLA-C*07:06; PAGE1; ENSG00000068985; CTA
EADSQELVQPK

SEQ ID NO: 57256 - protein, 8 aa, Homo sapiens
  Table A; Target 57256; HLA-C*05:01; PAGE1; ENSG00000068985; CTA
EADSQEQV

SEQ ID NO: 57257 - protein, 11 aa, Homo sapiens
  Table A; Target 57257; HLA-A*33:01; PAGE1; ENSG00000068985; CTA
EADSQEQVHPK

SEQ ID NO: 57258 - protein, 11 aa, Homo sapiens
  Table A; Target 57258; HLA-A*33:03; PAGE1; ENSG00000068985; CTA
EADSQEQVHPK

SEQ ID NO: 57259 - protein, 11 aa, Homo sapiens
  Table A; Target 57259; HLA-A*68:01; PAGE1; ENSG00000068985; CTA
EADSQEQVHPK

SEQ ID NO: 57260 - protein, 11 aa, Homo sapiens
  Table A; Target 57260; HLA-B*27:02; PAGE1; ENSG00000068985; CTA
EADSQEQVHPK

SEQ ID NO: 57261 - protein, 11 aa, Homo sapiens
  Table A; Target 57261; HLA-C*07:06; PAGE1; ENSG00000068985; CTA
EADSQEQVHPK

SEQ ID NO: 57262 - protein, 10 aa, Homo sapiens
  Table A; Target 57262; HLA-A*33:01; PAGE1; ENSG00000068985; CTA
ELGDGPDTKR

SEQ ID NO: 57263 - protein, 10 aa, Homo sapiens
  Table A; Target 57263; HLA-A*33:03; PAGE1; ENSG00000068985; CTA
ELGDGPDTKR

SEQ ID NO: 57264 - protein, 10 aa, Homo sapiens
  Table A; Target 57264; HLA-A*68:01; PAGE1; ENSG00000068985; CTA
ELGDGPDTKR

SEQ ID NO: 57265 - protein, 10 aa, Homo sapiens
  Table A; Target 57265; HLA-C*07:06; PAGE1; ENSG00000068985; CTA
ELGDGPDTKR

SEQ ID NO: 57266 - protein, 9 aa, Homo sapiens
  Table A; Target 57266; HLA-B*35:03; PAGE1; ENSG00000068985; CTA
EPEADSQEL

SEQ ID NO: 57267 - protein, 11 aa, Homo sapiens
  Table A; Target 57267; HLA-B*38:01; PAGE1; ENSG00000068985; CTA
ERGDGPDVQEL

SEQ ID NO: 57268 - protein, 9 aa, Homo sapiens
  Table A; Target 57268; HLA-B*37:01; PAGE1; ENSG00000068985; CTA
GDGPDTKRV

SEQ ID NO: 57269 - protein, 9 aa, Homo sapiens
  Table A; Target 57269; HLA-C*16:02; PAGE1; ENSG00000068985; CTA
GDGPDTKRV

SEQ ID NO: 57270 - protein, 11 aa, Homo sapiens
  Table A; Target 57270; HLA-A*30:01; PAGE1; ENSG00000068985; CTA
GDGPDTKRVCL

SEQ ID NO: 57271 - protein, 9 aa, Homo sapiens
  Table A; Target 57271; HLA-A*30:01; PAGE1; ENSG00000068985; CTA
GDGPDVQEL

SEQ ID NO: 57272 - protein, 9 aa, Homo sapiens
  Table A; Target 57272; HLA-B*37:01; PAGE1; ENSG00000068985; CTA
GDGPDVQEL

SEQ ID NO: 57273 - protein, 9 aa, Homo sapiens
  Table A; Target 57273; HLA-B*38:01; PAGE1; ENSG00000068985; CTA
GDGPDVQEL

SEQ ID NO: 57274 - protein, 9 aa, Homo sapiens
  Table A; Target 57274; HLA-B*40:01; PAGE1; ENSG00000068985; CTA
GDGPDVQEL

SEQ ID NO: 57275 - protein, 9 aa, Homo sapiens
  Table A; Target 57275; HLA-B*40:02; PAGE1; ENSG00000068985; CTA
GDGPDVQEL

SEQ ID NO: 57276 - protein, 9 aa, Homo sapiens
  Table A; Target 57276; HLA-B*07:02; PAGE1; ENSG00000068985; CTA
GPDTKRVCL

SEQ ID NO: 57277 - protein, 9 aa, Homo sapiens
  Table A; Target 57277; HLA-B*08:01; PAGE1; ENSG00000068985; CTA
GPDTKRVCL

SEQ ID NO: 57278 - protein, 9 aa, Homo sapiens
  Table A; Target 57278; HLA-C*07:02; PAGE1; ENSG00000068985; CTA
GPDTKRVCL

SEQ ID NO: 57279 - protein, 9 aa, Homo sapiens
  Table A; Target 57279; HLA-B*35:03; PAGE1; ENSG00000068985; CTA
GPDVQELGL

SEQ ID NO: 57280 - protein, 11 aa, Homo sapiens
  Table A; Target 57280; HLA-B*27:05; PAGE1; ENSG00000068985; CTA
GQEPEADSQEL

SEQ ID NO: 57281 - protein, 11 aa, Homo sapiens
  Table A; Target 57281; HLA-B*38:01; PAGE1; ENSG00000068985; CTA
GQEPEADSQEL

SEQ ID NO: 57282 - protein, 11 aa, Homo sapiens
  Table A; Target 57282; HLA-B*39:01; PAGE1; ENSG00000068985; CTA
GQEPEADSQEL

SEQ ID NO: 57283 - protein, 8 aa, Homo sapiens
  Table A; Target 57283; HLA-C*14:02; PAGE1; ENSG00000068985; CTA
IYVESSEE

SEQ ID NO: 57284 - protein, 9 aa, Homo sapiens
  Table A; Target 57284; HLA-C*14:02; PAGE1; ENSG00000068985; CTA
IYVESSEES

SEQ ID NO: 57285 - protein, 11 aa, Homo sapiens
  Table A; Target 57285; HLA-A*02:01; PAGE1; ENSG00000068985; CTA
KLPAEGPEPEA

SEQ ID NO: 57286 - protein, 11 aa, Homo sapiens
  Table A; Target 57286; HLA-A*02:07; PAGE1; ENSG00000068985; CTA
KLPAEGPEPEA

SEQ ID NO: 57287 - protein, 9 aa, Homo sapiens
  Table A; Target 57287; HLA-C*05:01; PAGE1; ENSG00000068985; CTA
LGDGPDTKR

SEQ ID NO: 57288 - protein, 9 aa, Homo sapiens
  Table A; Target 57288; HLA-A*02:01; PAGE1; ENSG00000068985; CTA
LGLPNPEEV

SEQ ID NO: 57289 - protein, 8 aa, Homo sapiens
  Table A; Target 57289; HLA-B*51:01; PAGE1; ENSG00000068985; CTA
LPAEGPEP

SEQ ID NO: 57290 - protein, 8 aa, Homo sapiens
  Table A; Target 57290; HLA-B*54:01; PAGE1; ENSG00000068985; CTA
LPAEGPEP

SEQ ID NO: 57291 - protein, 10 aa, Homo sapiens
  Table A; Target 57291; HLA-B*35:01; PAGE1; ENSG00000068985; CTA
LPAEGPEPEA

SEQ ID NO: 57292 - protein, 10 aa, Homo sapiens
  Table A; Target 57292; HLA-B*35:03; PAGE1; ENSG00000068985; CTA
LPAEGPEPEA

SEQ ID NO: 57293 - protein, 10 aa, Homo sapiens
  Table A; Target 57293; HLA-B*51:01; PAGE1; ENSG00000068985; CTA
LPAEGPEPEA

SEQ ID NO: 57294 - protein, 10 aa, Homo sapiens
  Table A; Target 57294; HLA-B*54:01; PAGE1; ENSG00000068985; CTA
LPAEGPEPEA

SEQ ID NO: 57295 - protein, 10 aa, Homo sapiens
  Table A; Target 57295; HLA-B*55:01; PAGE1; ENSG00000068985; CTA
LPAEGPEPEA

SEQ ID NO: 57296 - protein, 10 aa, Homo sapiens
  Table A; Target 57296; HLA-B*56:01; PAGE1; ENSG00000068985; CTA
LPAEGPEPEA

SEQ ID NO: 57297 - protein, 9 aa, Homo sapiens
  Table A; Target 57297; HLA-B*35:03; PAGE1; ENSG00000068985; CTA
LPNPEEVKT

SEQ ID NO: 57298 - protein, 9 aa, Homo sapiens
  Table A; Target 57298; HLA-B*55:01; PAGE1; ENSG00000068985; CTA
LPNPEEVKT

SEQ ID NO: 57299 - protein, 9 aa, Homo sapiens
  Table A; Target 57299; HLA-B*56:01; PAGE1; ENSG00000068985; CTA
LPNPEEVKT

SEQ ID NO: 57300 - protein, 9 aa, Homo sapiens
  Table A; Target 57300; HLA-B*27:05; PAGE1; ENSG00000068985; CTA
LRNEEQMKL

SEQ ID NO: 57301 - protein, 9 aa, Homo sapiens
  Table A; Target 57301; HLA-B*38:01; PAGE1; ENSG00000068985; CTA
LRNEEQMKL

SEQ ID NO: 57302 - protein, 9 aa, Homo sapiens
  Table A; Target 57302; HLA-B*18:01; PAGE1; ENSG00000068985; CTA
NEEQMKLPA

SEQ ID NO: 57303 - protein, 9 aa, Homo sapiens
  Table A; Target 57303; HLA-B*49:01; PAGE1; ENSG00000068985; CTA
PEADSQELV

SEQ ID NO: 57304 - protein, 9 aa, Homo sapiens
  Table A; Target 57304; HLA-A*68:01; PAGE1; ENSG00000068985; CTA
QDSTPAEER

SEQ ID NO: 57305 - protein, 9 aa, Homo sapiens
  Table A; Target 57305; HLA-B*27:02; PAGE1; ENSG00000068985; CTA
QDSTPAEER

SEQ ID NO: 57306 - protein, 9 aa, Homo sapiens
  Table A; Target 57306; HLA-C*07:06; PAGE1; ENSG00000068985; CTA
QDSTPAEER

SEQ ID NO: 57307 - protein, 8 aa, Homo sapiens
  Table A; Target 57307; HLA-B*40:02; PAGE1; ENSG00000068985; CTA
QELVQPKT

SEQ ID NO: 57308 - protein, 8 aa, Homo sapiens
  Table A; Target 57308; HLA-C*16:02; PAGE1; ENSG00000068985; CTA
QELVQPKT

SEQ ID NO: 57309 - protein, 10 aa, Homo sapiens
  Table A; Target 57309; HLA-A*30:01; PAGE1; ENSG00000068985; CTA
QEPEADSQEL

SEQ ID NO: 57310 - protein, 10 aa, Homo sapiens
  Table A; Target 57310; HLA-B*40:01; PAGE1; ENSG00000068985; CTA
QEPEADSQEL

SEQ ID NO: 57311 - protein, 10 aa, Homo sapiens
  Table A; Target 57311; HLA-B*40:02; PAGE1; ENSG00000068985; CTA
QEPEADSQEL

SEQ ID NO: 57312 - protein, 10 aa, Homo sapiens
  Table A; Target 57312; HLA-B*44:02; PAGE1; ENSG00000068985; CTA
QEPEADSQEL

SEQ ID NO: 57313 - protein, 10 aa, Homo sapiens
  Table A; Target 57313; HLA-B*44:03; PAGE1; ENSG00000068985; CTA
QEPEADSQEL

SEQ ID NO: 57314 - protein, 10 aa, Homo sapiens
  Table A; Target 57314; HLA-B*49:01; PAGE1; ENSG00000068985; CTA
QEPEADSQEL

SEQ ID NO: 57315 - protein, 10 aa, Homo sapiens
  Table A; Target 57315; HLA-C*16:04; PAGE1; ENSG00000068985; CTA
QEPEADSQEL

SEQ ID NO: 57316 - protein, 11 aa, Homo sapiens
  Table A; Target 57316; HLA-B*49:01; PAGE1; ENSG00000068985; CTA
QEPEADSQELV

SEQ ID NO: 57317 - protein, 8 aa, Homo sapiens
  Table A; Target 57317; HLA-C*16:02; PAGE1; ENSG00000068985; CTA
QEQVHPKT

SEQ ID NO: 57318 - protein, 8 aa, Homo sapiens
  Table A; Target 57318; HLA-B*07:02; PAGE1; ENSG00000068985; CTA
QPKTGCEL

SEQ ID NO: 57319 - protein, 8 aa, Homo sapiens
  Table A; Target 57319; HLA-B*08:01; PAGE1; ENSG00000068985; CTA
QPKTGCEL

SEQ ID NO: 57320 - protein, 8 aa, Homo sapiens
  Table A; Target 57320; HLA-C*07:02; PAGE1; ENSG00000068985; CTA
QPKTGCEL

SEQ ID NO: 57321 - protein, 11 aa, Homo sapiens
  Table A; Target 57321; HLA-A*33:01; PAGE1; ENSG00000068985; CTA
QSQDSTPAEER

SEQ ID NO: 57322 - protein, 11 aa, Homo sapiens
  Table A; Target 57322; HLA-A*33:03; PAGE1; ENSG00000068985; CTA
QSQDSTPAEER

SEQ ID NO: 57323 - protein, 11 aa, Homo sapiens
  Table A; Target 57323; HLA-A*68:01; PAGE1; ENSG00000068985; CTA
QSQDSTPAEER

SEQ ID NO: 57324 - protein, 11 aa, Homo sapiens
  Table A; Target 57324; HLA-C*07:06; PAGE1; ENSG00000068985; CTA
QSQDSTPAEER

SEQ ID NO: 57325 - protein, 10 aa, Homo sapiens
  Table A; Target 57325; HLA-A*31:01; PAGE1; ENSG00000068985; CTA
QVHPKTGCER

SEQ ID NO: 57326 - protein, 9 aa, Homo sapiens
  Table A; Target 57326; HLA-B*40:01; PAGE1; ENSG00000068985; CTA
REDEGASAA

SEQ ID NO: 57327 - protein, 9 aa, Homo sapiens
  Table A; Target 57327; HLA-B*49:01; PAGE1; ENSG00000068985; CTA
REDEGASAA

SEQ ID NO: 57328 - protein, 10 aa, Homo sapiens
  Table A; Target 57328; HLA-B*40:01; PAGE1; ENSG00000068985; CTA
RGDGPDVQEL

SEQ ID NO: 57329 - protein, 10 aa, Homo sapiens
  Table A; Target 57329; HLA-C*05:01; PAGE1; ENSG00000068985; CTA
RGDGPDVQEL

SEQ ID NO: 57330 - protein, 9 aa, Homo sapiens
  Table A; Target 57330; HLA-B*56:01; PAGE1; ENSG00000068985; CTA
RPMIYVESS

SEQ ID NO: 57331 - protein, 9 aa, Homo sapiens
  Table A; Target 57331; HLA-B*13:02; PAGE1; ENSG00000068985; CTA
SQELVQPKT

SEQ ID NO: 57332 - protein, 8 aa, Homo sapiens
  Table A; Target 57332; HLA-A*03:02; PAGE1; ENSG00000068985; CTA
SQEQVHPK

SEQ ID NO: 57333 - protein, 8 aa, Homo sapiens
  Table A; Target 57333; HLA-A*11:01; PAGE1; ENSG00000068985; CTA
SQEQVHPK

SEQ ID NO: 57334 - protein, 9 aa, Homo sapiens
  Table A; Target 57334; HLA-C*05:01; PAGE1; ENSG00000068985; CTA
SSDEQPDEV

SEQ ID NO: 57335 - protein, 8 aa, Homo sapiens
  Table A; Target 57335; HLA-B*37:01; PAGE1; ENSG00000068985; CTA
VESPTQSQ

SEQ ID NO: 57336 - protein, 11 aa, Homo sapiens
  Table A; Target 57336; HLA-B*39:01; PAGE1; ENSG00000068985; CTA
VESPTQSQDST

SEQ ID NO: 57337 - protein, 9 aa, Homo sapiens
  Table A; Target 57337; HLA-B*15:03; PAGE1; ENSG00000068985; CTA
VQPKTGCEL

SEQ ID NO: 57338 - protein, 9 aa, Homo sapiens
  Table A; Target 57338; HLA-B*46:01; PAGE1; ENSG00000068985; CTA
VQPKTGCEL

SEQ ID NO: 57339 - protein, 9 aa, Homo sapiens
  Table A; Target 57339; HLA-C*01:02; PAGE1; ENSG00000068985; CTA
VQPKTGCEL

SEQ ID NO: 57340 - protein, 10 aa, Homo sapiens
  Table A; Target 57340; HLA-C*14:02; PAGE2; ENSG00000234068; TAA
AFQGPDMEAF

SEQ ID NO: 57341 - protein, 10 aa, Homo sapiens
  Table A; Target 57341; HLA-B*56:01; PAGE2; ENSG00000234068; TAA
APSGEIENQA

SEQ ID NO: 57342 - protein, 11 aa, Homo sapiens
  Table A; Target 57342; HLA-B*56:01; PAGE2; ENSG00000234068; TAA
APSGEIENQAV

SEQ ID NO: 57343 - protein, 10 aa, Homo sapiens
  Table A; Target 57343; HLA-A*26:01; PAGE2; ENSG00000234068; TAA
AVPAFQGPDM

SEQ ID NO: 57344 - protein, 10 aa, Homo sapiens
  Table A; Target 57344; HLA-C*04:01; PAGE2; ENSG00000234068; TAA
AVPAFQGPDM

SEQ ID NO: 57345 - protein, 9 aa, Homo sapiens
  Table A; Target 57345; HLA-B*35:03; PAGE2; ENSG00000234068; TAA
DMEAFQQEL

SEQ ID NO: 57346 - protein, 9 aa, Homo sapiens
  Table A; Target 57346; HLA-B*38:01; PAGE2; ENSG00000234068; TAA
DMEAFQQEL

SEQ ID NO: 57347 - protein, 9 aa, Homo sapiens
  Table A; Target 57347; HLA-A*68:02; PAGE2; ENSG00000234068; TAA
EAFQQELAL

SEQ ID NO: 57348 - protein, 11 aa, Homo sapiens
  Table A; Target 57348; HLA-A*11:01; PAGE2; ENSG00000234068; TAA
EAFQQELALLK

SEQ ID NO: 57349 - protein, 10 aa, Homo sapiens
  Table A; Target 57349; HLA-A*25:01; PAGE2; ENSG00000234068; TAA
EIENQAVPAF

SEQ ID NO: 57350 - protein, 10 aa, Homo sapiens
  Table A; Target 57350; HLA-A*26:01; PAGE2; ENSG00000234068; TAA
EIENQAVPAF

SEQ ID NO: 57351 - protein, 10 aa, Homo sapiens
  Table A; Target 57351; HLA-B*38:01; PAGE2; ENSG00000234068; TAA
ESSQPVGSVI

SEQ ID NO: 57352 - protein, 9 aa, Homo sapiens
  Table A; Target 57352; HLA-A*24:02; PAGE2; ENSG00000234068; TAA
FQGPDMEAF

SEQ ID NO: 57353 - protein, 9 aa, Homo sapiens
  Table A; Target 57353; HLA-A*25:01; PAGE2; ENSG00000234068; TAA
FQGPDMEAF

SEQ ID NO: 57354 - protein, 9 aa, Homo sapiens
  Table A; Target 57354; HLA-A*32:01; PAGE2; ENSG00000234068; TAA
FQGPDMEAF

SEQ ID NO: 57355 - protein, 9 aa, Homo sapiens
  Table A; Target 57355; HLA-B*15:01; PAGE2; ENSG00000234068; TAA
FQGPDMEAF

SEQ ID NO: 57356 - protein, 9 aa, Homo sapiens
  Table A; Target 57356; HLA-B*15:03; PAGE2; ENSG00000234068; TAA
FQGPDMEAF

SEQ ID NO: 57357 - protein, 9 aa, Homo sapiens
  Table A; Target 57357; HLA-B*18:01; PAGE2; ENSG00000234068; TAA
FQGPDMEAF

SEQ ID NO: 57358 - protein, 9 aa, Homo sapiens
  Table A; Target 57358; HLA-B*27:02; PAGE2; ENSG00000234068; TAA
FQGPDMEAF

SEQ ID NO: 57359 - protein, 9 aa, Homo sapiens
  Table A; Target 57359; HLA-B*27:05; PAGE2; ENSG00000234068; TAA
FQGPDMEAF

SEQ ID NO: 57360 - protein, 9 aa, Homo sapiens
  Table A; Target 57360; HLA-B*35:01; PAGE2; ENSG00000234068; TAA
FQGPDMEAF

SEQ ID NO: 57361 - protein, 9 aa, Homo sapiens
  Table A; Target 57361; HLA-B*35:03; PAGE2; ENSG00000234068; TAA
FQGPDMEAF

SEQ ID NO: 57362 - protein, 9 aa, Homo sapiens
  Table A; Target 57362; HLA-B*38:01; PAGE2; ENSG00000234068; TAA
FQGPDMEAF

SEQ ID NO: 57363 - protein, 9 aa, Homo sapiens
  Table A; Target 57363; HLA-B*39:01; PAGE2; ENSG00000234068; TAA
FQGPDMEAF

SEQ ID NO: 57364 - protein, 9 aa, Homo sapiens
  Table A; Target 57364; HLA-B*46:01; PAGE2; ENSG00000234068; TAA
FQGPDMEAF

SEQ ID NO: 57365 - protein, 9 aa, Homo sapiens
  Table A; Target 57365; HLA-B*58:01; PAGE2; ENSG00000234068; TAA
FQGPDMEAF

SEQ ID NO: 57366 - protein, 9 aa, Homo sapiens
  Table A; Target 57366; HLA-C*02:02; PAGE2; ENSG00000234068; TAA
FQGPDMEAF

SEQ ID NO: 57367 - protein, 9 aa, Homo sapiens
  Table A; Target 57367; HLA-C*03:03; PAGE2; ENSG00000234068; TAA
FQGPDMEAF

SEQ ID NO: 57368 - protein, 9 aa, Homo sapiens
  Table A; Target 57368; HLA-C*03:04; PAGE2; ENSG00000234068; TAA
FQGPDMEAF

SEQ ID NO: 57369 - protein, 9 aa, Homo sapiens
  Table A; Target 57369; HLA-C*07:04; PAGE2; ENSG00000234068; TAA
FQGPDMEAF

SEQ ID NO: 57370 - protein, 9 aa, Homo sapiens
  Table A; Target 57370; HLA-C*16:04; PAGE2; ENSG00000234068; TAA
FQGPDMEAF

SEQ ID NO: 57371 - protein, 8 aa, Homo sapiens
  Table A; Target 57371; HLA-A*30:01; PAGE2; ENSG00000234068; TAA
GEIENQAV

SEQ ID NO: 57372 - protein, 8 aa, Homo sapiens
  Table A; Target 57372; HLA-B*18:01; PAGE2; ENSG00000234068; TAA
GEIENQAV

SEQ ID NO: 57373 - protein, 8 aa, Homo sapiens
  Table A; Target 57373; HLA-B*40:01; PAGE2; ENSG00000234068; TAA
GEIENQAV

SEQ ID NO: 57374 - protein, 8 aa, Homo sapiens
  Table A; Target 57374; HLA-B*49:01; PAGE2; ENSG00000234068; TAA
GEIENQAV

SEQ ID NO: 57375 - protein, 9 aa, Homo sapiens
  Table A; Target 57375; HLA-A*30:01; PAGE2; ENSG00000234068; TAA
GEIENQAVP

SEQ ID NO: 57376 - protein, 9 aa, Homo sapiens
  Table A; Target 57376; HLA-B*27:05; PAGE2; ENSG00000234068; TAA
GEIENQAVP

SEQ ID NO: 57377 - protein, 9 aa, Homo sapiens
  Table A; Target 57377; HLA-B*40:01; PAGE2; ENSG00000234068; TAA
GEIENQAVP

SEQ ID NO: 57378 - protein, 9 aa, Homo sapiens
  Table A; Target 57378; HLA-B*40:02; PAGE2; ENSG00000234068; TAA
GEIENQAVP

SEQ ID NO: 57379 - protein, 9 aa, Homo sapiens
  Table A; Target 57379; HLA-B*49:01; PAGE2; ENSG00000234068; TAA
GEIENQAVP

SEQ ID NO: 57380 - protein, 9 aa, Homo sapiens
  Table A; Target 57380; HLA-C*16:04; PAGE2; ENSG00000234068; TAA
GEIENQAVP

SEQ ID NO: 57381 - protein, 10 aa, Homo sapiens
  Table A; Target 57381; HLA-A*30:01; PAGE2; ENSG00000234068; TAA
GEIENQAVPA

SEQ ID NO: 57382 - protein, 10 aa, Homo sapiens
  Table A; Target 57382; HLA-B*40:01; PAGE2; ENSG00000234068; TAA
GEIENQAVPA

SEQ ID NO: 57383 - protein, 10 aa, Homo sapiens
  Table A; Target 57383; HLA-B*40:02; PAGE2; ENSG00000234068; TAA
GEIENQAVPA

SEQ ID NO: 57384 - protein, 10 aa, Homo sapiens
  Table A; Target 57384; HLA-B*49:01; PAGE2; ENSG00000234068; TAA
GEIENQAVPA

SEQ ID NO: 57385 - protein, 11 aa, Homo sapiens
  Table A; Target 57385; HLA-A*25:01; PAGE2; ENSG00000234068; TAA
GEIENQAVPAF

SEQ ID NO: 57386 - protein, 11 aa, Homo sapiens
  Table A; Target 57386; HLA-A*30:01; PAGE2; ENSG00000234068; TAA
GEIENQAVPAF

SEQ ID NO: 57387 - protein, 11 aa, Homo sapiens
  Table A; Target 57387; HLA-B*18:01; PAGE2; ENSG00000234068; TAA
GEIENQAVPAF

SEQ ID NO: 57388 - protein, 11 aa, Homo sapiens
  Table A; Target 57388; HLA-B*27:02; PAGE2; ENSG00000234068; TAA
GEIENQAVPAF

SEQ ID NO: 57389 - protein, 11 aa, Homo sapiens
  Table A; Target 57389; HLA-B*27:05; PAGE2; ENSG00000234068; TAA
GEIENQAVPAF

SEQ ID NO: 57390 - protein, 11 aa, Homo sapiens
  Table A; Target 57390; HLA-B*40:01; PAGE2; ENSG00000234068; TAA
GEIENQAVPAF

SEQ ID NO: 57391 - protein, 11 aa, Homo sapiens
  Table A; Target 57391; HLA-B*40:02; PAGE2; ENSG00000234068; TAA
GEIENQAVPAF

SEQ ID NO: 57392 - protein, 11 aa, Homo sapiens
  Table A; Target 57392; HLA-B*44:02; PAGE2; ENSG00000234068; TAA
GEIENQAVPAF

SEQ ID NO: 57393 - protein, 11 aa, Homo sapiens
  Table A; Target 57393; HLA-B*44:03; PAGE2; ENSG00000234068; TAA
GEIENQAVPAF

SEQ ID NO: 57394 - protein, 11 aa, Homo sapiens
  Table A; Target 57394; HLA-B*49:01; PAGE2; ENSG00000234068; TAA
GEIENQAVPAF

SEQ ID NO: 57395 - protein, 11 aa, Homo sapiens
  Table A; Target 57395; HLA-C*16:04; PAGE2; ENSG00000234068; TAA
GEIENQAVPAF

SEQ ID NO: 57396 - protein, 8 aa, Homo sapiens
  Table A; Target 57396; HLA-B*18:01; PAGE2; ENSG00000234068; TAA
IENQAVPA

SEQ ID NO: 57397 - protein, 9 aa, Homo sapiens
  Table A; Target 57397; HLA-A*23:01; PAGE2; ENSG00000234068; TAA
IENQAVPAF

SEQ ID NO: 57398 - protein, 9 aa, Homo sapiens
  Table A; Target 57398; HLA-A*24:02; PAGE2; ENSG00000234068; TAA
IENQAVPAF

SEQ ID NO: 57399 - protein, 9 aa, Homo sapiens
  Table A; Target 57399; HLA-A*25:01; PAGE2; ENSG00000234068; TAA
IENQAVPAF

SEQ ID NO: 57400 - protein, 9 aa, Homo sapiens
  Table A; Target 57400; HLA-A*30:01; PAGE2; ENSG00000234068; TAA
IENQAVPAF

SEQ ID NO: 57401 - protein, 9 aa, Homo sapiens
  Table A; Target 57401; HLA-A*32:01; PAGE2; ENSG00000234068; TAA
IENQAVPAF

SEQ ID NO: 57402 - protein, 9 aa, Homo sapiens
  Table A; Target 57402; HLA-B*15:01; PAGE2; ENSG00000234068; TAA
IENQAVPAF

SEQ ID NO: 57403 - protein, 9 aa, Homo sapiens
  Table A; Target 57403; HLA-B*15:03; PAGE2; ENSG00000234068; TAA
IENQAVPAF

SEQ ID NO: 57404 - protein, 9 aa, Homo sapiens
  Table A; Target 57404; HLA-B*18:01; PAGE2; ENSG00000234068; TAA
IENQAVPAF

SEQ ID NO: 57405 - protein, 9 aa, Homo sapiens
  Table A; Target 57405; HLA-B*27:02; PAGE2; ENSG00000234068; TAA
IENQAVPAF

SEQ ID NO: 57406 - protein, 9 aa, Homo sapiens
  Table A; Target 57406; HLA-B*35:01; PAGE2; ENSG00000234068; TAA
IENQAVPAF

SEQ ID NO: 57407 - protein, 9 aa, Homo sapiens
  Table A; Target 57407; HLA-B*37:01; PAGE2; ENSG00000234068; TAA
IENQAVPAF

SEQ ID NO: 57408 - protein, 9 aa, Homo sapiens
  Table A; Target 57408; HLA-B*38:01; PAGE2; ENSG00000234068; TAA
IENQAVPAF

SEQ ID NO: 57409 - protein, 9 aa, Homo sapiens
  Table A; Target 57409; HLA-B*40:01; PAGE2; ENSG00000234068; TAA
IENQAVPAF

SEQ ID NO: 57410 - protein, 9 aa, Homo sapiens
  Table A; Target 57410; HLA-B*40:02; PAGE2; ENSG00000234068; TAA
IENQAVPAF

SEQ ID NO: 57411 - protein, 9 aa, Homo sapiens
  Table A; Target 57411; HLA-B*44:02; PAGE2; ENSG00000234068; TAA
IENQAVPAF

SEQ ID NO: 57412 - protein, 9 aa, Homo sapiens
  Table A; Target 57412; HLA-B*44:03; PAGE2; ENSG00000234068; TAA
IENQAVPAF

SEQ ID NO: 57413 - protein, 9 aa, Homo sapiens
  Table A; Target 57413; HLA-B*49:01; PAGE2; ENSG00000234068; TAA
IENQAVPAF

SEQ ID NO: 57414 - protein, 9 aa, Homo sapiens
  Table A; Target 57414; HLA-C*02:02; PAGE2; ENSG00000234068; TAA
IENQAVPAF

SEQ ID NO: 57415 - protein, 9 aa, Homo sapiens
  Table A; Target 57415; HLA-C*07:04; PAGE2; ENSG00000234068; TAA
IENQAVPAF

SEQ ID NO: 57416 - protein, 9 aa, Homo sapiens
  Table A; Target 57416; HLA-C*14:02; PAGE2; ENSG00000234068; TAA
IENQAVPAF

SEQ ID NO: 57417 - protein, 9 aa, Homo sapiens
  Table A; Target 57417; HLA-C*16:01; PAGE2; ENSG00000234068; TAA
IENQAVPAF

SEQ ID NO: 57418 - protein, 9 aa, Homo sapiens
  Table A; Target 57418; HLA-C*16:04; PAGE2; ENSG00000234068; TAA
IENQAVPAF

SEQ ID NO: 57419 - protein, 10 aa, Homo sapiens
  Table A; Target 57419; HLA-A*02:01; PAGE2; ENSG00000234068; TAA
IMPTFDLTKV

SEQ ID NO: 57420 - protein, 9 aa, Homo sapiens
  Table A; Target 57420; HLA-B*27:05; PAGE2; ENSG00000234068; TAA
IVQEPTEEK

SEQ ID NO: 57421 - protein, 9 aa, Homo sapiens
  Table A; Target 57421; HLA-B*46:01; PAGE2; ENSG00000234068; TAA
IVQEPTEEK

SEQ ID NO: 57422 - protein, 10 aa, Homo sapiens
  Table A; Target 57422; HLA-B*58:01; PAGE2; ENSG00000234068; TAA
KVLEAGDAQP

SEQ ID NO: 57423 - protein, 10 aa, Homo sapiens
  Table A; Target 57423; HLA-B*54:01; PAGE2; ENSG00000234068; TAA
MPTFDLTKVL

SEQ ID NO: 57424 - protein, 11 aa, Homo sapiens
  Table A; Target 57424; HLA-B*27:02; PAGE2; ENSG00000234068; TAA
PAFQGPDMEAF

SEQ ID NO: 57425 - protein, 9 aa, Homo sapiens
  Table A; Target 57425; HLA-A*31:01; PAGE2; ENSG00000234068; TAA
RARSQSSER

SEQ ID NO: 57426 - protein, 9 aa, Homo sapiens
  Table A; Target 57426; HLA-C*04:01; PAGE2; ENSG00000234068; TAA
TFDLTKVLE

SEQ ID NO: 57427 - protein, 9 aa, Homo sapiens
  Table A; Target 57427; HLA-B*07:02; PAGE2; ENSG00000234068; TAA
VPAFQGPDM

SEQ ID NO: 57428 - protein, 9 aa, Homo sapiens
  Table A; Target 57428; HLA-B*35:01; PAGE2; ENSG00000234068; TAA
VPAFQGPDM

SEQ ID NO: 57429 - protein, 9 aa, Homo sapiens
  Table A; Target 57429; HLA-B*35:03; PAGE2; ENSG00000234068; TAA
VPAFQGPDM

SEQ ID NO: 57430 - protein, 9 aa, Homo sapiens
  Table A; Target 57430; HLA-B*51:01; PAGE2; ENSG00000234068; TAA
VPAFQGPDM

SEQ ID NO: 57431 - protein, 9 aa, Homo sapiens
  Table A; Target 57431; HLA-B*55:01; PAGE2; ENSG00000234068; TAA
VPAFQGPDM

SEQ ID NO: 57432 - protein, 9 aa, Homo sapiens
  Table A; Target 57432; HLA-B*56:01; PAGE2; ENSG00000234068; TAA
VPAFQGPDM

SEQ ID NO: 57433 - protein, 9 aa, Homo sapiens
  Table A; Target 57433; HLA-C*03:03; PAGE2; ENSG00000234068; TAA
VPAFQGPDM

SEQ ID NO: 57434 - protein, 9 aa, Homo sapiens
  Table A; Target 57434; HLA-C*07:02; PAGE2; ENSG00000234068; TAA
VPAFQGPDM

SEQ ID NO: 57435 - protein, 11 aa, Homo sapiens
  Table A; Target 57435; HLA-B*35:03; PAGE2; ENSG00000234068; TAA
VPAFQGPDMEA

SEQ ID NO: 57436 - protein, 11 aa, Homo sapiens
  Table A; Target 57436; HLA-B*54:01; PAGE2; ENSG00000234068; TAA
VPAFQGPDMEA

SEQ ID NO: 57437 - protein, 11 aa, Homo sapiens
  Table A; Target 57437; HLA-B*55:01; PAGE2; ENSG00000234068; TAA
VPAFQGPDMEA

SEQ ID NO: 57438 - protein, 11 aa, Homo sapiens
  Table A; Target 57438; HLA-B*56:01; PAGE2; ENSG00000234068; TAA
VPAFQGPDMEA

SEQ ID NO: 57439 - protein, 11 aa, Homo sapiens
  Table A; Target 57439; HLA-C*06:02; PAGE2; ENSG00000234068; TAA
VPAFQGPDMEA

SEQ ID NO: 57440 - protein, 9 aa, Homo sapiens
  Table A; Target 57440; HLA-B*39:01; PAGE2,PAGE2B; ENSG00000234068,ENSG00000238269; TAA,TAA
DEPGDGPDV

SEQ ID NO: 57441 - protein, 10 aa, Homo sapiens
  Table A; Target 57441; HLA-B*39:01; PAGE2,PAGE2B; ENSG00000234068,ENSG00000238269; TAA,TAA
DEPGDGPDVR

SEQ ID NO: 57442 - protein, 9 aa, Homo sapiens
  Table A; Target 57442; HLA-B*51:01; PAGE2,PAGE2B; ENSG00000234068,ENSG00000238269; TAA,TAA
DGPDVREGI

SEQ ID NO: 57443 - protein, 11 aa, Homo sapiens
  Table A; Target 57443; HLA-B*39:01; PAGE2,PAGE2B; ENSG00000234068,ENSG00000238269; TAA,TAA
DQESSQPVGSV

SEQ ID NO: 57444 - protein, 10 aa, Homo sapiens
  Table A; Target 57444; HLA-A*25:01; PAGE2,PAGE2B; ENSG00000234068,ENSG00000238269; TAA,TAA
DVREGIMPTF

SEQ ID NO: 57445 - protein, 10 aa, Homo sapiens
  Table A; Target 57445; HLA-A*26:01; PAGE2,PAGE2B; ENSG00000234068,ENSG00000238269; TAA,TAA
DVREGIMPTF

SEQ ID NO: 57446 - protein, 10 aa, Homo sapiens
  Table A; Target 57446; HLA-A*33:01; PAGE2,PAGE2B; ENSG00000234068,ENSG00000238269; TAA,TAA
DVREGIMPTF

SEQ ID NO: 57447 - protein, 10 aa, Homo sapiens
  Table A; Target 57447; HLA-A*33:03; PAGE2,PAGE2B; ENSG00000234068,ENSG00000238269; TAA,TAA
DVREGIMPTF

SEQ ID NO: 57448 - protein, 11 aa, Homo sapiens
  Table A; Target 57448; HLA-C*07:06; PAGE2,PAGE2B; ENSG00000234068,ENSG00000238269; TAA,TAA
EAFQQELALLK

SEQ ID NO: 57449 - protein, 10 aa, Homo sapiens
  Table A; Target 57449; HLA-A*25:01; PAGE2,PAGE2B; ENSG00000234068,ENSG00000238269; TAA,TAA
ESSQPVGSVI

SEQ ID NO: 57450 - protein, 10 aa, Homo sapiens
  Table A; Target 57450; HLA-A*68:01; PAGE2,PAGE2B; ENSG00000234068,ENSG00000238269; TAA,TAA
ESSQPVGSVI

SEQ ID NO: 57451 - protein, 10 aa, Homo sapiens
  Table A; Target 57451; HLA-A*68:02; PAGE2,PAGE2B; ENSG00000234068,ENSG00000238269; TAA,TAA
ESSQPVGSVI

SEQ ID NO: 57452 - protein, 10 aa, Homo sapiens
  Table A; Target 57452; HLA-C*07:06; PAGE2,PAGE2B; ENSG00000234068,ENSG00000238269; TAA,TAA
ESSQPVGSVI

SEQ ID NO: 57453 - protein, 9 aa, Homo sapiens
  Table A; Target 57453; HLA-B*08:01; PAGE2,PAGE2B; ENSG00000234068,ENSG00000238269; TAA,TAA
FDLTKVLEA

SEQ ID NO: 57454 - protein, 9 aa, Homo sapiens
  Table A; Target 57454; HLA-B*54:01; PAGE2,PAGE2B; ENSG00000234068,ENSG00000238269; TAA,TAA
FDLTKVLEA

SEQ ID NO: 57455 - protein, 10 aa, Homo sapiens
  Table A; Target 57455; HLA-A*03:01; PAGE2,PAGE2B; ENSG00000234068,ENSG00000238269; TAA,TAA
GIMPTFDLTK

SEQ ID NO: 57456 - protein, 10 aa, Homo sapiens
  Table A; Target 57456; HLA-A*03:02; PAGE2,PAGE2B; ENSG00000234068,ENSG00000238269; TAA,TAA
GIMPTFDLTK

SEQ ID NO: 57457 - protein, 10 aa, Homo sapiens
  Table A; Target 57457; HLA-A*11:01; PAGE2,PAGE2B; ENSG00000234068,ENSG00000238269; TAA,TAA
GIMPTFDLTK

SEQ ID NO: 57458 - protein, 10 aa, Homo sapiens
  Table A; Target 57458; HLA-B*27:02; PAGE2,PAGE2B; ENSG00000234068,ENSG00000238269; TAA,TAA
GIMPTFDLTK

SEQ ID NO: 57459 - protein, 11 aa, Homo sapiens
  Table A; Target 57459; HLA-A*02:04; PAGE2,PAGE2B; ENSG00000234068,ENSG00000238269; TAA,TAA
GIMPTFDLTKV

SEQ ID NO: 57460 - protein, 9 aa, Homo sapiens
  Table A; Target 57460; HLA-B*07:02; PAGE2,PAGE2B; ENSG00000234068,ENSG00000238269; TAA,TAA
GPDVREGIM

SEQ ID NO: 57461 - protein, 9 aa, Homo sapiens
  Table A; Target 57461; HLA-B*55:01; PAGE2,PAGE2B; ENSG00000234068,ENSG00000238269; TAA,TAA
GPDVREGIM

SEQ ID NO: 57462 - protein, 9 aa, Homo sapiens
  Table A; Target 57462; HLA-C*03:03; PAGE2,PAGE2B; ENSG00000234068,ENSG00000238269; TAA,TAA
GPDVREGIM

SEQ ID NO: 57463 - protein, 9 aa, Homo sapiens
  Table A; Target 57463; HLA-C*07:02; PAGE2,PAGE2B; ENSG00000234068,ENSG00000238269; TAA,TAA
GPDVREGIM

SEQ ID NO: 57464 - protein, 9 aa, Homo sapiens
  Table A; Target 57464; HLA-C*01:02; PAGE2,PAGE2B; ENSG00000234068,ENSG00000238269; TAA,TAA
IAPSGEIEN

SEQ ID NO: 57465 - protein, 9 aa, Homo sapiens
  Table A; Target 57465; HLA-C*05:01; PAGE2,PAGE2B; ENSG00000234068,ENSG00000238269; TAA,TAA
IEDEPGDGP

SEQ ID NO: 57466 - protein, 9 aa, Homo sapiens
  Table A; Target 57466; HLA-A*03:01; PAGE2,PAGE2B; ENSG00000234068,ENSG00000238269; TAA,TAA
IMPTFDLTK

SEQ ID NO: 57467 - protein, 10 aa, Homo sapiens
  Table A; Target 57467; HLA-A*02:03; PAGE2,PAGE2B; ENSG00000234068,ENSG00000238269; TAA,TAA
IMPTFDLTKV

SEQ ID NO: 57468 - protein, 10 aa, Homo sapiens
  Table A; Target 57468; HLA-A*02:07; PAGE2,PAGE2B; ENSG00000234068,ENSG00000238269; TAA,TAA
IMPTFDLTKV

SEQ ID NO: 57469 - protein, 11 aa, Homo sapiens
  Table A; Target 57469; HLA-A*02:07; PAGE2,PAGE2B; ENSG00000234068,ENSG00000238269; TAA,TAA
IMPTFDLTKVL

SEQ ID NO: 57470 - protein, 9 aa, Homo sapiens
  Table A; Target 57470; HLA-A*01:01; PAGE2,PAGE2B; ENSG00000234068,ENSG00000238269; TAA,TAA
IVQEPTEEK

SEQ ID NO: 57471 - protein, 9 aa, Homo sapiens
  Table A; Target 57471; HLA-A*03:01; PAGE2,PAGE2B; ENSG00000234068,ENSG00000238269; TAA,TAA
IVQEPTEEK

SEQ ID NO: 57472 - protein, 9 aa, Homo sapiens
  Table A; Target 57472; HLA-A*03:02; PAGE2,PAGE2B; ENSG00000234068,ENSG00000238269; TAA,TAA
IVQEPTEEK

SEQ ID NO: 57473 - protein, 9 aa, Homo sapiens
  Table A; Target 57473; HLA-A*11:01; PAGE2,PAGE2B; ENSG00000234068,ENSG00000238269; TAA,TAA
IVQEPTEEK

SEQ ID NO: 57474 - protein, 9 aa, Homo sapiens
  Table A; Target 57474; HLA-A*33:01; PAGE2,PAGE2B; ENSG00000234068,ENSG00000238269; TAA,TAA
IVQEPTEEK

SEQ ID NO: 57475 - protein, 9 aa, Homo sapiens
  Table A; Target 57475; HLA-A*33:03; PAGE2,PAGE2B; ENSG00000234068,ENSG00000238269; TAA,TAA
IVQEPTEEK

SEQ ID NO: 57476 - protein, 9 aa, Homo sapiens
  Table A; Target 57476; HLA-A*68:01; PAGE2,PAGE2B; ENSG00000234068,ENSG00000238269; TAA,TAA
IVQEPTEEK

SEQ ID NO: 57477 - protein, 9 aa, Homo sapiens
  Table A; Target 57477; HLA-B*27:02; PAGE2,PAGE2B; ENSG00000234068,ENSG00000238269; TAA,TAA
IVQEPTEEK

SEQ ID NO: 57478 - protein, 9 aa, Homo sapiens
  Table A; Target 57478; HLA-C*05:01; PAGE2,PAGE2B; ENSG00000234068,ENSG00000238269; TAA,TAA
IVQEPTEEK

SEQ ID NO: 57479 - protein, 9 aa, Homo sapiens
  Table A; Target 57479; HLA-C*07:06; PAGE2,PAGE2B; ENSG00000234068,ENSG00000238269; TAA,TAA
IVQEPTEEK

SEQ ID NO: 57480 - protein, 10 aa, Homo sapiens
  Table A; Target 57480; HLA-A*03:02; PAGE2,PAGE2B; ENSG00000234068,ENSG00000238269; TAA,TAA
IVQEPTEEKR

SEQ ID NO: 57481 - protein, 10 aa, Homo sapiens
  Table A; Target 57481; HLA-A*33:01; PAGE2,PAGE2B; ENSG00000234068,ENSG00000238269; TAA,TAA
IVQEPTEEKR

SEQ ID NO: 57482 - protein, 10 aa, Homo sapiens
  Table A; Target 57482; HLA-A*33:03; PAGE2,PAGE2B; ENSG00000234068,ENSG00000238269; TAA,TAA
IVQEPTEEKR

SEQ ID NO: 57483 - protein, 10 aa, Homo sapiens
  Table A; Target 57483; HLA-A*68:01; PAGE2,PAGE2B; ENSG00000234068,ENSG00000238269; TAA,TAA
IVQEPTEEKR

SEQ ID NO: 57484 - protein, 10 aa, Homo sapiens
  Table A; Target 57484; HLA-B*57:01; PAGE2,PAGE2B; ENSG00000234068,ENSG00000238269; TAA,TAA
IVQEPTEEKR

SEQ ID NO: 57485 - protein, 10 aa, Homo sapiens
  Table A; Target 57485; HLA-C*07:06; PAGE2,PAGE2B; ENSG00000234068,ENSG00000238269; TAA,TAA
IVQEPTEEKR

SEQ ID NO: 57486 - protein, 10 aa, Homo sapiens
  Table A; Target 57486; HLA-C*07:04; PAGE2,PAGE2B; ENSG00000234068,ENSG00000238269; TAA,TAA
KVLEAGDAQP

SEQ ID NO: 57487 - protein, 8 aa, Homo sapiens
  Table A; Target 57487; HLA-A*30:01; PAGE2,PAGE2B; ENSG00000234068,ENSG00000238269; TAA,TAA
MEAFQQEL

SEQ ID NO: 57488 - protein, 8 aa, Homo sapiens
  Table A; Target 57488; HLA-B*18:01; PAGE2,PAGE2B; ENSG00000234068,ENSG00000238269; TAA,TAA
MEAFQQEL

SEQ ID NO: 57489 - protein, 8 aa, Homo sapiens
  Table A; Target 57489; HLA-B*27:05; PAGE2,PAGE2B; ENSG00000234068,ENSG00000238269; TAA,TAA
MEAFQQEL

SEQ ID NO: 57490 - protein, 8 aa, Homo sapiens
  Table A; Target 57490; HLA-B*37:01; PAGE2,PAGE2B; ENSG00000234068,ENSG00000238269; TAA,TAA
MEAFQQEL

SEQ ID NO: 57491 - protein, 8 aa, Homo sapiens
  Table A; Target 57491; HLA-B*39:01; PAGE2,PAGE2B; ENSG00000234068,ENSG00000238269; TAA,TAA
MEAFQQEL

SEQ ID NO: 57492 - protein, 8 aa, Homo sapiens
  Table A; Target 57492; HLA-B*40:01; PAGE2,PAGE2B; ENSG00000234068,ENSG00000238269; TAA,TAA
MEAFQQEL

SEQ ID NO: 57493 - protein, 8 aa, Homo sapiens
  Table A; Target 57493; HLA-B*40:02; PAGE2,PAGE2B; ENSG00000234068,ENSG00000238269; TAA,TAA
MEAFQQEL

SEQ ID NO: 57494 - protein, 8 aa, Homo sapiens
  Table A; Target 57494; HLA-B*44:02; PAGE2,PAGE2B; ENSG00000234068,ENSG00000238269; TAA,TAA
MEAFQQEL

SEQ ID NO: 57495 - protein, 8 aa, Homo sapiens
  Table A; Target 57495; HLA-B*49:01; PAGE2,PAGE2B; ENSG00000234068,ENSG00000238269; TAA,TAA
MEAFQQEL

SEQ ID NO: 57496 - protein, 8 aa, Homo sapiens
  Table A; Target 57496; HLA-C*03:04; PAGE2,PAGE2B; ENSG00000234068,ENSG00000238269; TAA,TAA
MEAFQQEL

SEQ ID NO: 57497 - protein, 8 aa, Homo sapiens
  Table A; Target 57497; HLA-C*07:04; PAGE2,PAGE2B; ENSG00000234068,ENSG00000238269; TAA,TAA
MEAFQQEL

SEQ ID NO: 57498 - protein, 8 aa, Homo sapiens
  Table A; Target 57498; HLA-C*16:04; PAGE2,PAGE2B; ENSG00000234068,ENSG00000238269; TAA,TAA
MEAFQQEL

SEQ ID NO: 57499 - protein, 9 aa, Homo sapiens
  Table A; Target 57499; HLA-B*49:01; PAGE2,PAGE2B; ENSG00000234068,ENSG00000238269; TAA,TAA
MEAFQQELA

SEQ ID NO: 57500 - protein, 10 aa, Homo sapiens
  Table A; Target 57500; HLA-A*30:01; PAGE2,PAGE2B; ENSG00000234068,ENSG00000238269; TAA,TAA
MEAFQQELAL

SEQ ID NO: 57501 - protein, 10 aa, Homo sapiens
  Table A; Target 57501; HLA-B*40:01; PAGE2,PAGE2B; ENSG00000234068,ENSG00000238269; TAA,TAA
MEAFQQELAL

SEQ ID NO: 57502 - protein, 9 aa, Homo sapiens
  Table A; Target 57502; HLA-B*35:01; PAGE2,PAGE2B; ENSG00000234068,ENSG00000238269; TAA,TAA
MPTFDLTKV

SEQ ID NO: 57503 - protein, 9 aa, Homo sapiens
  Table A; Target 57503; HLA-B*35:03; PAGE2,PAGE2B; ENSG00000234068,ENSG00000238269; TAA,TAA
MPTFDLTKV

SEQ ID NO: 57504 - protein, 9 aa, Homo sapiens
  Table A; Target 57504; HLA-B*51:01; PAGE2,PAGE2B; ENSG00000234068,ENSG00000238269; TAA,TAA
MPTFDLTKV

SEQ ID NO: 57505 - protein, 9 aa, Homo sapiens
  Table A; Target 57505; HLA-B*54:01; PAGE2,PAGE2B; ENSG00000234068,ENSG00000238269; TAA,TAA
MPTFDLTKV

SEQ ID NO: 57506 - protein, 9 aa, Homo sapiens
  Table A; Target 57506; HLA-B*55:01; PAGE2,PAGE2B; ENSG00000234068,ENSG00000238269; TAA,TAA
MPTFDLTKV

SEQ ID NO: 57507 - protein, 9 aa, Homo sapiens
  Table A; Target 57507; HLA-B*56:01; PAGE2,PAGE2B; ENSG00000234068,ENSG00000238269; TAA,TAA
MPTFDLTKV

SEQ ID NO: 57508 - protein, 10 aa, Homo sapiens
  Table A; Target 57508; HLA-B*35:01; PAGE2,PAGE2B; ENSG00000234068,ENSG00000238269; TAA,TAA
MPTFDLTKVL

SEQ ID NO: 57509 - protein, 10 aa, Homo sapiens
  Table A; Target 57509; HLA-B*35:03; PAGE2,PAGE2B; ENSG00000234068,ENSG00000238269; TAA,TAA
MPTFDLTKVL

SEQ ID NO: 57510 - protein, 9 aa, Homo sapiens
  Table A; Target 57510; HLA-B*37:01; PAGE2,PAGE2B; ENSG00000234068,ENSG00000238269; TAA,TAA
NDQESSQPV

SEQ ID NO: 57511 - protein, 10 aa, Homo sapiens
  Table A; Target 57511; HLA-B*49:01; PAGE2,PAGE2B; ENSG00000234068,ENSG00000238269; TAA,TAA
QESSQPVGSV

SEQ ID NO: 57512 - protein, 11 aa, Homo sapiens
  Table A; Target 57512; HLA-A*30:01; PAGE2,PAGE2B; ENSG00000234068,ENSG00000238269; TAA,TAA
QESSQPVGSVI

SEQ ID NO: 57513 - protein, 11 aa, Homo sapiens
  Table A; Target 57513; HLA-B*38:01; PAGE2,PAGE2B; ENSG00000234068,ENSG00000238269; TAA,TAA
QESSQPVGSVI

SEQ ID NO: 57514 - protein, 11 aa, Homo sapiens
  Table A; Target 57514; HLA-B*40:01; PAGE2,PAGE2B; ENSG00000234068,ENSG00000238269; TAA,TAA
QESSQPVGSVI

SEQ ID NO: 57515 - protein, 11 aa, Homo sapiens
  Table A; Target 57515; HLA-B*44:02; PAGE2,PAGE2B; ENSG00000234068,ENSG00000238269; TAA,TAA
QESSQPVGSVI

SEQ ID NO: 57516 - protein, 11 aa, Homo sapiens
  Table A; Target 57516; HLA-B*44:03; PAGE2,PAGE2B; ENSG00000234068,ENSG00000238269; TAA,TAA
QESSQPVGSVI

SEQ ID NO: 57517 - protein, 11 aa, Homo sapiens
  Table A; Target 57517; HLA-B*49:01; PAGE2,PAGE2B; ENSG00000234068,ENSG00000238269; TAA,TAA
QESSQPVGSVI

SEQ ID NO: 57518 - protein, 8 aa, Homo sapiens
  Table A; Target 57518; HLA-B*56:01; PAGE2,PAGE2B; ENSG00000234068,ENSG00000238269; TAA,TAA
QPVGSVIV

SEQ ID NO: 57519 - protein, 9 aa, Homo sapiens
  Table A; Target 57519; HLA-B*35:01; PAGE2,PAGE2B; ENSG00000234068,ENSG00000238269; TAA,TAA
QPVGSVIVQ

SEQ ID NO: 57520 - protein, 11 aa, Homo sapiens
  Table A; Target 57520; HLA-B*56:01; PAGE2,PAGE2B; ENSG00000234068,ENSG00000238269; TAA,TAA
QPVGSVIVQEP

SEQ ID NO: 57521 - protein, 8 aa, Homo sapiens
  Table A; Target 57521; HLA-B*18:01; PAGE2,PAGE2B; ENSG00000234068,ENSG00000238269; TAA,TAA
REGIMPTF

SEQ ID NO: 57522 - protein, 8 aa, Homo sapiens
  Table A; Target 57522; HLA-B*37:01; PAGE2,PAGE2B; ENSG00000234068,ENSG00000238269; TAA,TAA
REGIMPTF

SEQ ID NO: 57523 - protein, 8 aa, Homo sapiens
  Table A; Target 57523; HLA-B*44:02; PAGE2,PAGE2B; ENSG00000234068,ENSG00000238269; TAA,TAA
REGIMPTF

SEQ ID NO: 57524 - protein, 8 aa, Homo sapiens
  Table A; Target 57524; HLA-B*44:03; PAGE2,PAGE2B; ENSG00000234068,ENSG00000238269; TAA,TAA
REGIMPTF

SEQ ID NO: 57525 - protein, 8 aa, Homo sapiens
  Table A; Target 57525; HLA-B*13:02; PAGE2,PAGE2B; ENSG00000234068,ENSG00000238269; TAA,TAA
SQPVGSVI

SEQ ID NO: 57526 - protein, 8 aa, Homo sapiens
  Table A; Target 57526; HLA-B*15:01; PAGE2,PAGE2B; ENSG00000234068,ENSG00000238269; TAA,TAA
SQPVGSVI

SEQ ID NO: 57527 - protein, 8 aa, Homo sapiens
  Table A; Target 57527; HLA-B*15:03; PAGE2,PAGE2B; ENSG00000234068,ENSG00000238269; TAA,TAA
SQPVGSVI

SEQ ID NO: 57528 - protein, 8 aa, Homo sapiens
  Table A; Target 57528; HLA-B*39:01; PAGE2,PAGE2B; ENSG00000234068,ENSG00000238269; TAA,TAA
SQPVGSVI

SEQ ID NO: 57529 - protein, 8 aa, Homo sapiens
  Table A; Target 57529; HLA-C*01:02; PAGE2,PAGE2B; ENSG00000234068,ENSG00000238269; TAA,TAA
SQPVGSVI

SEQ ID NO: 57530 - protein, 8 aa, Homo sapiens
  Table A; Target 57530; HLA-C*05:01; PAGE2,PAGE2B; ENSG00000234068,ENSG00000238269; TAA,TAA
SQPVGSVI

SEQ ID NO: 57531 - protein, 8 aa, Homo sapiens
  Table A; Target 57531; HLA-C*14:02; PAGE2,PAGE2B; ENSG00000234068,ENSG00000238269; TAA,TAA
SQPVGSVI

SEQ ID NO: 57532 - protein, 9 aa, Homo sapiens
  Table A; Target 57532; HLA-B*13:02; PAGE2,PAGE2B; ENSG00000234068,ENSG00000238269; TAA,TAA
SQPVGSVIV

SEQ ID NO: 57533 - protein, 9 aa, Homo sapiens
  Table A; Target 57533; HLA-A*32:01; PAGE2,PAGE2B; ENSG00000234068,ENSG00000238269; TAA,TAA
SSQPVGSVI

SEQ ID NO: 57534 - protein, 9 aa, Homo sapiens
  Table A; Target 57534; HLA-B*13:02; PAGE2,PAGE2B; ENSG00000234068,ENSG00000238269; TAA,TAA
SSQPVGSVI

SEQ ID NO: 57535 - protein, 9 aa, Homo sapiens
  Table A; Target 57535; HLA-B*38:01; PAGE2,PAGE2B; ENSG00000234068,ENSG00000238269; TAA,TAA
SSQPVGSVI

SEQ ID NO: 57536 - protein, 9 aa, Homo sapiens
  Table A; Target 57536; HLA-B*39:01; PAGE2,PAGE2B; ENSG00000234068,ENSG00000238269; TAA,TAA
SSQPVGSVI

SEQ ID NO: 57537 - protein, 9 aa, Homo sapiens
  Table A; Target 57537; HLA-B*46:01; PAGE2,PAGE2B; ENSG00000234068,ENSG00000238269; TAA,TAA
SSQPVGSVI

SEQ ID NO: 57538 - protein, 9 aa, Homo sapiens
  Table A; Target 57538; HLA-B*58:01; PAGE2,PAGE2B; ENSG00000234068,ENSG00000238269; TAA,TAA
SSQPVGSVI

SEQ ID NO: 57539 - protein, 9 aa, Homo sapiens
  Table A; Target 57539; HLA-C*03:03; PAGE2,PAGE2B; ENSG00000234068,ENSG00000238269; TAA,TAA
SSQPVGSVI

SEQ ID NO: 57540 - protein, 9 aa, Homo sapiens
  Table A; Target 57540; HLA-C*03:04; PAGE2,PAGE2B; ENSG00000234068,ENSG00000238269; TAA,TAA
SSQPVGSVI

SEQ ID NO: 57541 - protein, 9 aa, Homo sapiens
  Table A; Target 57541; HLA-C*05:01; PAGE2,PAGE2B; ENSG00000234068,ENSG00000238269; TAA,TAA
SSQPVGSVI

SEQ ID NO: 57542 - protein, 9 aa, Homo sapiens
  Table A; Target 57542; HLA-C*16:02; PAGE2,PAGE2B; ENSG00000234068,ENSG00000238269; TAA,TAA
SSQPVGSVI

SEQ ID NO: 57543 - protein, 11 aa, Homo sapiens
  Table A; Target 57543; HLA-A*03:01; PAGE2,PAGE2B; ENSG00000234068,ENSG00000238269; TAA,TAA
SVIVQEPTEEK

SEQ ID NO: 57544 - protein, 11 aa, Homo sapiens
  Table A; Target 57544; HLA-A*11:01; PAGE2,PAGE2B; ENSG00000234068,ENSG00000238269; TAA,TAA
SVIVQEPTEEK

SEQ ID NO: 57545 - protein, 11 aa, Homo sapiens
  Table A; Target 57545; HLA-C*07:06; PAGE2,PAGE2B; ENSG00000234068,ENSG00000238269; TAA,TAA
SVIVQEPTEEK

SEQ ID NO: 57546 - protein, 8 aa, Homo sapiens
  Table A; Target 57546; HLA-B*35:01; PAGE2,PAGE2B; ENSG00000234068,ENSG00000238269; TAA,TAA
TFDLTKVL

SEQ ID NO: 57547 - protein, 8 aa, Homo sapiens
  Table A; Target 57547; HLA-B*35:03; PAGE2,PAGE2B; ENSG00000234068,ENSG00000238269; TAA,TAA
TFDLTKVL

SEQ ID NO: 57548 - protein, 8 aa, Homo sapiens
  Table A; Target 57548; HLA-C*04:01; PAGE2,PAGE2B; ENSG00000234068,ENSG00000238269; TAA,TAA
TFDLTKVL

SEQ ID NO: 57549 - protein, 10 aa, Homo sapiens
  Table A; Target 57549; HLA-A*03:02; PAGE2,PAGE2B; ENSG00000234068,ENSG00000238269; TAA,TAA
VIVQEPTEEK

SEQ ID NO: 57550 - protein, 10 aa, Homo sapiens
  Table A; Target 57550; HLA-A*11:01; PAGE2,PAGE2B; ENSG00000234068,ENSG00000238269; TAA,TAA
VIVQEPTEEK

SEQ ID NO: 57551 - protein, 10 aa, Homo sapiens
  Table A; Target 57551; HLA-B*27:02; PAGE2,PAGE2B; ENSG00000234068,ENSG00000238269; TAA,TAA
VIVQEPTEEK

SEQ ID NO: 57552 - protein, 9 aa, Homo sapiens
  Table A; Target 57552; HLA-B*27:02; PAGE2,PAGE2B; ENSG00000234068,ENSG00000238269; TAA,TAA
VREGIMPTF

SEQ ID NO: 57553 - protein, 9 aa, Homo sapiens
  Table A; Target 57553; HLA-B*27:05; PAGE2,PAGE2B; ENSG00000234068,ENSG00000238269; TAA,TAA
VREGIMPTF

SEQ ID NO: 57554 - protein, 9 aa, Homo sapiens
  Table A; Target 57554; HLA-B*38:01; PAGE2,PAGE2B; ENSG00000234068,ENSG00000238269; TAA,TAA
VREGIMPTF

SEQ ID NO: 57555 - protein, 9 aa, Homo sapiens
  Table A; Target 57555; HLA-B*39:01; PAGE2,PAGE2B; ENSG00000234068,ENSG00000238269; TAA,TAA
VREGIMPTF

SEQ ID NO: 57556 - protein, 9 aa, Homo sapiens
  Table A; Target 57556; HLA-C*06:02; PAGE2,PAGE2B; ENSG00000234068,ENSG00000238269; TAA,TAA
VREGIMPTF

SEQ ID NO: 57557 - protein, 9 aa, Homo sapiens
  Table A; Target 57557; HLA-C*16:04; PAGE2,PAGE2B; ENSG00000234068,ENSG00000238269; TAA,TAA
VREGIMPTF

SEQ ID NO: 57558 - protein, 8 aa, Homo sapiens
  Table A; Target 57558; HLA-C*14:02; PAGE2,PAGE2B,PAGE5; ENSG00000234068,ENSG00000238269,ENSG00000158639; TAA,TAA,TAA
AFQQELAL

SEQ ID NO: 57559 - protein, 10 aa, Homo sapiens
  Table A; Target 57559; HLA-B*27:02; PAGE2,PAGE2B,PAGE5; ENSG00000234068,ENSG00000238269,ENSG00000158639; TAA,TAA,TAA
AFQQELALLK

SEQ ID NO: 57560 - protein, 9 aa, Homo sapiens
  Table A; Target 57560; HLA-A*25:01; PAGE2,PAGE2B,PAGE5; ENSG00000234068,ENSG00000238269,ENSG00000158639; TAA,TAA,TAA
EAFQQELAL

SEQ ID NO: 57561 - protein, 9 aa, Homo sapiens
  Table A; Target 57561; HLA-A*68:01; PAGE2,PAGE2B,PAGE5; ENSG00000234068,ENSG00000238269,ENSG00000158639; TAA,TAA,TAA
EAFQQELAL

SEQ ID NO: 57562 - protein, 9 aa, Homo sapiens
  Table A; Target 57562; HLA-B*35:01; PAGE2,PAGE2B,PAGE5; ENSG00000234068,ENSG00000238269,ENSG00000158639; TAA,TAA,TAA
EAFQQELAL

SEQ ID NO: 57563 - protein, 9 aa, Homo sapiens
  Table A; Target 57563; HLA-B*35:03; PAGE2,PAGE2B,PAGE5; ENSG00000234068,ENSG00000238269,ENSG00000158639; TAA,TAA,TAA
EAFQQELAL

SEQ ID NO: 57564 - protein, 9 aa, Homo sapiens
  Table A; Target 57564; HLA-B*39:01; PAGE2,PAGE2B,PAGE5; ENSG00000234068,ENSG00000238269,ENSG00000158639; TAA,TAA,TAA
EAFQQELAL

SEQ ID NO: 57565 - protein, 9 aa, Homo sapiens
  Table A; Target 57565; HLA-B*40:01; PAGE2,PAGE2B,PAGE5; ENSG00000234068,ENSG00000238269,ENSG00000158639; TAA,TAA,TAA
EAFQQELAL

SEQ ID NO: 57566 - protein, 9 aa, Homo sapiens
  Table A; Target 57566; HLA-B*51:01; PAGE2,PAGE2B,PAGE5; ENSG00000234068,ENSG00000238269,ENSG00000158639; TAA,TAA,TAA
EAFQQELAL

SEQ ID NO: 57567 - protein, 9 aa, Homo sapiens
  Table A; Target 57567; HLA-C*03:03; PAGE2,PAGE2B,PAGE5; ENSG00000234068,ENSG00000238269,ENSG00000158639; TAA,TAA,TAA
EAFQQELAL

SEQ ID NO: 57568 - protein, 9 aa, Homo sapiens
  Table A; Target 57568; HLA-C*07:06; PAGE2,PAGE2B,PAGE5; ENSG00000234068,ENSG00000238269,ENSG00000158639; TAA,TAA,TAA
EAFQQELAL

SEQ ID NO: 57569 - protein, 10 aa, Homo sapiens
  Table A; Target 57569; HLA-A*25:01; PAGE2,PAGE2B,PAGE5; ENSG00000234068,ENSG00000238269,ENSG00000158639; TAA,TAA,TAA
EAFQQELALL

SEQ ID NO: 57570 - protein, 10 aa, Homo sapiens
  Table A; Target 57570; HLA-A*26:01; PAGE2,PAGE2B,PAGE5; ENSG00000234068,ENSG00000238269,ENSG00000158639; TAA,TAA,TAA
EAFQQELALL

SEQ ID NO: 57571 - protein, 10 aa, Homo sapiens
  Table A; Target 57571; HLA-A*33:03; PAGE2,PAGE2B,PAGE5; ENSG00000234068,ENSG00000238269,ENSG00000158639; TAA,TAA,TAA
EAFQQELALL

SEQ ID NO: 57572 - protein, 10 aa, Homo sapiens
  Table A; Target 57572; HLA-A*68:01; PAGE2,PAGE2B,PAGE5; ENSG00000234068,ENSG00000238269,ENSG00000158639; TAA,TAA,TAA
EAFQQELALL

SEQ ID NO: 57573 - protein, 10 aa, Homo sapiens
  Table A; Target 57573; HLA-A*68:02; PAGE2,PAGE2B,PAGE5; ENSG00000234068,ENSG00000238269,ENSG00000158639; TAA,TAA,TAA
EAFQQELALL

SEQ ID NO: 57574 - protein, 11 aa, Homo sapiens
  Table A; Target 57574; HLA-A*68:01; PAGE2,PAGE2B,PAGE5; ENSG00000234068,ENSG00000238269,ENSG00000158639; TAA,TAA,TAA
EAFQQELALLK

SEQ ID NO: 57575 - protein, 11 aa, Homo sapiens
  Table A; Target 57575; HLA-B*27:02; PAGE2,PAGE2B,PAGE5; ENSG00000234068,ENSG00000238269,ENSG00000158639; TAA,TAA,TAA
EAFQQELALLK

SEQ ID NO: 57576 - protein, 11 aa, Homo sapiens
  Table A; Target 57576; HLA-B*38:01; PAGE2,PAGE2B,PAGE5; ENSG00000234068,ENSG00000238269,ENSG00000158639; TAA,TAA,TAA
EEEPPTDNQGI

SEQ ID NO: 57577 - protein, 11 aa, Homo sapiens
  Table A; Target 57577; HLA-B*44:02; PAGE2,PAGE2B,PAGE5; ENSG00000234068,ENSG00000238269,ENSG00000158639; TAA,TAA,TAA
EEEPPTDNQGI

SEQ ID NO: 57578 - protein, 10 aa, Homo sapiens
  Table A; Target 57578; HLA-B*44:02; PAGE2,PAGE2B,PAGE5; ENSG00000234068,ENSG00000238269,ENSG00000158639; TAA,TAA,TAA
EEPPTDNQGI

SEQ ID NO: 57579 - protein, 10 aa, Homo sapiens
  Table A; Target 57579; HLA-B*44:03; PAGE2,PAGE2B,PAGE5; ENSG00000234068,ENSG00000238269,ENSG00000158639; TAA,TAA,TAA
EEPPTDNQGI

SEQ ID NO: 57580 - protein, 10 aa, Homo sapiens
  Table A; Target 57580; HLA-A*02:01; PAGE2,PAGE2B,PAGE5; ENSG00000234068,ENSG00000238269,ENSG00000158639; TAA,TAA,TAA
FQQELALLKI

SEQ ID NO: 57581 - protein, 10 aa, Homo sapiens
  Table A; Target 57581; HLA-A*02:03; PAGE2,PAGE2B,PAGE5; ENSG00000234068,ENSG00000238269,ENSG00000158639; TAA,TAA,TAA
FQQELALLKI

SEQ ID NO: 57582 - protein, 10 aa, Homo sapiens
  Table A; Target 57582; HLA-A*02:04; PAGE2,PAGE2B,PAGE5; ENSG00000234068,ENSG00000238269,ENSG00000158639; TAA,TAA,TAA
FQQELALLKI

SEQ ID NO: 57583 - protein, 10 aa, Homo sapiens
  Table A; Target 57583; HLA-B*13:02; PAGE2,PAGE2B,PAGE5; ENSG00000234068,ENSG00000238269,ENSG00000158639; TAA,TAA,TAA
FQQELALLKI

SEQ ID NO: 57584 - protein, 8 aa, Homo sapiens
  Table A; Target 57584; HLA-B*44:03; PAGE2,PAGE2B,PAGE5; ENSG00000234068,ENSG00000238269,ENSG00000158639; TAA,TAA,TAA
QELALLKI

SEQ ID NO: 57585 - protein, 8 aa, Homo sapiens
  Table A; Target 57585; HLA-B*49:01; PAGE2,PAGE2B,PAGE5; ENSG00000234068,ENSG00000238269,ENSG00000158639; TAA,TAA,TAA
QELALLKI

SEQ ID NO: 57586 - protein, 9 aa, Homo sapiens
  Table A; Target 57586; HLA-B*13:02; PAGE2,PAGE2B,PAGE5; ENSG00000234068,ENSG00000238269,ENSG00000158639; TAA,TAA,TAA
QQELALLKI

SEQ ID NO: 57587 - protein, 9 aa, Homo sapiens
  Table A; Target 57587; HLA-B*38:01; PAGE2,PAGE2B,PAGE5; ENSG00000234068,ENSG00000238269,ENSG00000158639; TAA,TAA,TAA
QQELALLKI

SEQ ID NO: 57588 - protein, 10 aa, Homo sapiens
  Table A; Target 57588; HLA-A*33:01; PAGE2,PAGE5; ENSG00000234068,ENSG00000158639; TAA,TAA
EAFQQELALL

SEQ ID NO: 57589 - protein, 9 aa, Homo sapiens
  Table A; Target 57589; HLA-B*07:02; PAGE2B; ENSG00000238269; TAA
APAVQGPDM

SEQ ID NO: 57590 - protein, 9 aa, Homo sapiens
  Table A; Target 57590; HLA-B*35:01; PAGE2B; ENSG00000238269; TAA
APAVQGPDM

SEQ ID NO: 57591 - protein, 9 aa, Homo sapiens
  Table A; Target 57591; HLA-B*35:03; PAGE2B; ENSG00000238269; TAA
APAVQGPDM

SEQ ID NO: 57592 - protein, 9 aa, Homo sapiens
  Table A; Target 57592; HLA-B*39:01; PAGE2B; ENSG00000238269; TAA
APAVQGPDM

SEQ ID NO: 57593 - protein, 9 aa, Homo sapiens
  Table A; Target 57593; HLA-B*55:01; PAGE2B; ENSG00000238269; TAA
APAVQGPDM

SEQ ID NO: 57594 - protein, 9 aa, Homo sapiens
  Table A; Target 57594; HLA-B*56:01; PAGE2B; ENSG00000238269; TAA
APAVQGPDM

SEQ ID NO: 57595 - protein, 9 aa, Homo sapiens
  Table A; Target 57595; HLA-C*07:02; PAGE2B; ENSG00000238269; TAA
APAVQGPDM

SEQ ID NO: 57596 - protein, 9 aa, Homo sapiens
  Table A; Target 57596; HLA-C*16:01; PAGE2B; ENSG00000238269; TAA
APAVQGPDM

SEQ ID NO: 57597 - protein, 11 aa, Homo sapiens
  Table A; Target 57597; HLA-B*07:02; PAGE2B; ENSG00000238269; TAA
APAVQGPDMEA

SEQ ID NO: 57598 - protein, 11 aa, Homo sapiens
  Table A; Target 57598; HLA-B*54:01; PAGE2B; ENSG00000238269; TAA
APAVQGPDMEA

SEQ ID NO: 57599 - protein, 11 aa, Homo sapiens
  Table A; Target 57599; HLA-B*55:01; PAGE2B; ENSG00000238269; TAA
APAVQGPDMEA

SEQ ID NO: 57600 - protein, 11 aa, Homo sapiens
  Table A; Target 57600; HLA-B*56:01; PAGE2B; ENSG00000238269; TAA
APAVQGPDMEA

SEQ ID NO: 57601 - protein, 10 aa, Homo sapiens
  Table A; Target 57601; HLA-A*25:01; PAGE2B; ENSG00000238269; TAA
AVQGPDMEAF

SEQ ID NO: 57602 - protein, 10 aa, Homo sapiens
  Table A; Target 57602; HLA-A*26:01; PAGE2B; ENSG00000238269; TAA
AVQGPDMEAF

SEQ ID NO: 57603 - protein, 10 aa, Homo sapiens
  Table A; Target 57603; HLA-A*30:02; PAGE2B; ENSG00000238269; TAA
AVQGPDMEAF

SEQ ID NO: 57604 - protein, 10 aa, Homo sapiens
  Table A; Target 57604; HLA-B*15:01; PAGE2B; ENSG00000238269; TAA
AVQGPDMEAF

SEQ ID NO: 57605 - protein, 11 aa, Homo sapiens
  Table A; Target 57605; HLA-B*39:01; PAGE2B; ENSG00000238269; TAA
EGAPAVQGPDM

SEQ ID NO: 57606 - protein, 9 aa, Homo sapiens
  Table A; Target 57606; HLA-B*49:01; PAGE2B; ENSG00000238269; TAA
GEIENEGAP

SEQ ID NO: 57607 - protein, 10 aa, Homo sapiens
  Table A; Target 57607; HLA-A*30:01; PAGE2B; ENSG00000238269; TAA
GEIENEGAPA

SEQ ID NO: 57608 - protein, 10 aa, Homo sapiens
  Table A; Target 57608; HLA-B*40:01; PAGE2B; ENSG00000238269; TAA
GEIENEGAPA

SEQ ID NO: 57609 - protein, 10 aa, Homo sapiens
  Table A; Target 57609; HLA-B*40:02; PAGE2B; ENSG00000238269; TAA
GEIENEGAPA

SEQ ID NO: 57610 - protein, 10 aa, Homo sapiens
  Table A; Target 57610; HLA-B*49:01; PAGE2B; ENSG00000238269; TAA
GEIENEGAPA

SEQ ID NO: 57611 - protein, 11 aa, Homo sapiens
  Table A; Target 57611; HLA-A*30:01; PAGE2B; ENSG00000238269; TAA
GEIENEGAPAV

SEQ ID NO: 57612 - protein, 11 aa, Homo sapiens
  Table A; Target 57612; HLA-B*13:02; PAGE2B; ENSG00000238269; TAA
GEIENEGAPAV

SEQ ID NO: 57613 - protein, 11 aa, Homo sapiens
  Table A; Target 57613; HLA-B*40:01; PAGE2B; ENSG00000238269; TAA
GEIENEGAPAV

SEQ ID NO: 57614 - protein, 11 aa, Homo sapiens
  Table A; Target 57614; HLA-B*40:02; PAGE2B; ENSG00000238269; TAA
GEIENEGAPAV

SEQ ID NO: 57615 - protein, 11 aa, Homo sapiens
  Table A; Target 57615; HLA-B*44:02; PAGE2B; ENSG00000238269; TAA
GEIENEGAPAV

SEQ ID NO: 57616 - protein, 11 aa, Homo sapiens
  Table A; Target 57616; HLA-B*44:03; PAGE2B; ENSG00000238269; TAA
GEIENEGAPAV

SEQ ID NO: 57617 - protein, 11 aa, Homo sapiens
  Table A; Target 57617; HLA-B*49:01; PAGE2B; ENSG00000238269; TAA
GEIENEGAPAV

SEQ ID NO: 57618 - protein, 11 aa, Homo sapiens
  Table A; Target 57618; HLA-C*16:04; PAGE2B; ENSG00000238269; TAA
GEIENEGAPAV

SEQ ID NO: 57619 - protein, 11 aa, Homo sapiens
  Table A; Target 57619; HLA-A*33:01; PAGE2B; ENSG00000238269; TAA
HVRTRSQSSER

SEQ ID NO: 57620 - protein, 8 aa, Homo sapiens
  Table A; Target 57620; HLA-B*18:01; PAGE2B; ENSG00000238269; TAA
IENEGAPA

SEQ ID NO: 57621 - protein, 9 aa, Homo sapiens
  Table A; Target 57621; HLA-A*02:01; PAGE2B; ENSG00000238269; TAA
IENEGAPAV

SEQ ID NO: 57622 - protein, 9 aa, Homo sapiens
  Table A; Target 57622; HLA-A*30:01; PAGE2B; ENSG00000238269; TAA
IENEGAPAV

SEQ ID NO: 57623 - protein, 9 aa, Homo sapiens
  Table A; Target 57623; HLA-B*13:02; PAGE2B; ENSG00000238269; TAA
IENEGAPAV

SEQ ID NO: 57624 - protein, 9 aa, Homo sapiens
  Table A; Target 57624; HLA-B*18:01; PAGE2B; ENSG00000238269; TAA
IENEGAPAV

SEQ ID NO: 57625 - protein, 9 aa, Homo sapiens
  Table A; Target 57625; HLA-B*37:01; PAGE2B; ENSG00000238269; TAA
IENEGAPAV

SEQ ID NO: 57626 - protein, 9 aa, Homo sapiens
  Table A; Target 57626; HLA-B*39:01; PAGE2B; ENSG00000238269; TAA
IENEGAPAV

SEQ ID NO: 57627 - protein, 9 aa, Homo sapiens
  Table A; Target 57627; HLA-B*40:01; PAGE2B; ENSG00000238269; TAA
IENEGAPAV

SEQ ID NO: 57628 - protein, 9 aa, Homo sapiens
  Table A; Target 57628; HLA-B*40:02; PAGE2B; ENSG00000238269; TAA
IENEGAPAV

SEQ ID NO: 57629 - protein, 9 aa, Homo sapiens
  Table A; Target 57629; HLA-B*44:02; PAGE2B; ENSG00000238269; TAA
IENEGAPAV

SEQ ID NO: 57630 - protein, 9 aa, Homo sapiens
  Table A; Target 57630; HLA-B*44:03; PAGE2B; ENSG00000238269; TAA
IENEGAPAV

SEQ ID NO: 57631 - protein, 9 aa, Homo sapiens
  Table A; Target 57631; HLA-B*49:01; PAGE2B; ENSG00000238269; TAA
IENEGAPAV

SEQ ID NO: 57632 - protein, 9 aa, Homo sapiens
  Table A; Target 57632; HLA-C*02:02; PAGE2B; ENSG00000238269; TAA
IENEGAPAV

SEQ ID NO: 57633 - protein, 9 aa, Homo sapiens
  Table A; Target 57633; HLA-C*03:04; PAGE2B; ENSG00000238269; TAA
IENEGAPAV

SEQ ID NO: 57634 - protein, 9 aa, Homo sapiens
  Table A; Target 57634; HLA-C*14:02; PAGE2B; ENSG00000238269; TAA
IENEGAPAV

SEQ ID NO: 57635 - protein, 9 aa, Homo sapiens
  Table A; Target 57635; HLA-C*16:02; PAGE2B; ENSG00000238269; TAA
IENEGAPAV

SEQ ID NO: 57636 - protein, 9 aa, Homo sapiens
  Table A; Target 57636; HLA-C*16:04; PAGE2B; ENSG00000238269; TAA
IENEGAPAV

SEQ ID NO: 57637 - protein, 10 aa, Homo sapiens
  Table A; Target 57637; HLA-B*27:02; PAGE2B; ENSG00000238269; TAA
IENEGAPAVQ

SEQ ID NO: 57638 - protein, 11 aa, Homo sapiens
  Table A; Target 57638; HLA-B*27:02; PAGE2B; ENSG00000238269; TAA
PAVQGPDMEAF

SEQ ID NO: 57639 - protein, 9 aa, Homo sapiens
  Table A; Target 57639; HLA-A*31:01; PAGE2B; ENSG00000238269; TAA
RTRSQSSER

SEQ ID NO: 57640 - protein, 9 aa, Homo sapiens
  Table A; Target 57640; HLA-A*33:03; PAGE2B; ENSG00000238269; TAA
RTRSQSSER

SEQ ID NO: 57641 - protein, 9 aa, Homo sapiens
  Table A; Target 57641; HLA-A*23:01; PAGE2B; ENSG00000238269; TAA
VQGPDMEAF

SEQ ID NO: 57642 - protein, 9 aa, Homo sapiens
  Table A; Target 57642; HLA-A*24:02; PAGE2B; ENSG00000238269; TAA
VQGPDMEAF

SEQ ID NO: 57643 - protein, 9 aa, Homo sapiens
  Table A; Target 57643; HLA-A*32:01; PAGE2B; ENSG00000238269; TAA
VQGPDMEAF

SEQ ID NO: 57644 - protein, 9 aa, Homo sapiens
  Table A; Target 57644; HLA-B*15:01; PAGE2B; ENSG00000238269; TAA
VQGPDMEAF

SEQ ID NO: 57645 - protein, 9 aa, Homo sapiens
  Table A; Target 57645; HLA-B*15:03; PAGE2B; ENSG00000238269; TAA
VQGPDMEAF

SEQ ID NO: 57646 - protein, 9 aa, Homo sapiens
  Table A; Target 57646; HLA-B*27:02; PAGE2B; ENSG00000238269; TAA
VQGPDMEAF

SEQ ID NO: 57647 - protein, 9 aa, Homo sapiens
  Table A; Target 57647; HLA-B*27:05; PAGE2B; ENSG00000238269; TAA
VQGPDMEAF

SEQ ID NO: 57648 - protein, 9 aa, Homo sapiens
  Table A; Target 57648; HLA-B*37:01; PAGE2B; ENSG00000238269; TAA
VQGPDMEAF

SEQ ID NO: 57649 - protein, 9 aa, Homo sapiens
  Table A; Target 57649; HLA-B*38:01; PAGE2B; ENSG00000238269; TAA
VQGPDMEAF

SEQ ID NO: 57650 - protein, 9 aa, Homo sapiens
  Table A; Target 57650; HLA-B*39:01; PAGE2B; ENSG00000238269; TAA
VQGPDMEAF

SEQ ID NO: 57651 - protein, 9 aa, Homo sapiens
  Table A; Target 57651; HLA-B*46:01; PAGE2B; ENSG00000238269; TAA
VQGPDMEAF

SEQ ID NO: 57652 - protein, 9 aa, Homo sapiens
  Table A; Target 57652; HLA-B*58:01; PAGE2B; ENSG00000238269; TAA
VQGPDMEAF

SEQ ID NO: 57653 - protein, 9 aa, Homo sapiens
  Table A; Target 57653; HLA-C*07:04; PAGE2B; ENSG00000238269; TAA
VQGPDMEAF

SEQ ID NO: 57654 - protein, 9 aa, Homo sapiens
  Table A; Target 57654; HLA-C*16:04; PAGE2B; ENSG00000238269; TAA
VQGPDMEAF

SEQ ID NO: 57655 - protein, 10 aa, Homo sapiens
  Table A; Target 57655; HLA-A*31:01; PAGE5; ENSG00000158639; TAA
AGNRGWAGTR

SEQ ID NO: 57656 - protein, 9 aa, Homo sapiens
  Table A; Target 57656; HLA-B*07:02; PAGE5; ENSG00000158639; TAA
APAVQGTDV

SEQ ID NO: 57657 - protein, 9 aa, Homo sapiens
  Table A; Target 57657; HLA-B*55:01; PAGE5; ENSG00000158639; TAA
APAVQGTDV

SEQ ID NO: 57658 - protein, 9 aa, Homo sapiens
  Table A; Target 57658; HLA-B*56:01; PAGE5; ENSG00000158639; TAA
APAVQGTDV

SEQ ID NO: 57659 - protein, 9 aa, Homo sapiens
  Table A; Target 57659; HLA-C*07:02; PAGE5; ENSG00000158639; TAA
APAVQGTDV

SEQ ID NO: 57660 - protein, 11 aa, Homo sapiens
  Table A; Target 57660; HLA-B*54:01; PAGE5; ENSG00000158639; TAA
APAVQGTDVEA

SEQ ID NO: 57661 - protein, 11 aa, Homo sapiens
  Table A; Target 57661; HLA-B*55:01; PAGE5; ENSG00000158639; TAA
APAVQGTDVEA

SEQ ID NO: 57662 - protein, 11 aa, Homo sapiens
  Table A; Target 57662; HLA-B*56:01; PAGE5; ENSG00000158639; TAA
APAVQGTDVEA

SEQ ID NO: 57663 - protein, 10 aa, Homo sapiens
  Table A; Target 57663; HLA-B*56:01; PAGE5; ENSG00000158639; TAA
APSGEIKNEG

SEQ ID NO: 57664 - protein, 10 aa, Homo sapiens
  Table A; Target 57664; HLA-A*25:01; PAGE5; ENSG00000158639; TAA
AVQGTDVEAF

SEQ ID NO: 57665 - protein, 10 aa, Homo sapiens
  Table A; Target 57665; HLA-A*30:02; PAGE5; ENSG00000158639; TAA
AVQGTDVEAF

SEQ ID NO: 57666 - protein, 10 aa, Homo sapiens
  Table A; Target 57666; HLA-B*15:01; PAGE5; ENSG00000158639; TAA
AVQGTDVEAF

SEQ ID NO: 57667 - protein, 9 aa, Homo sapiens
  Table A; Target 57667; HLA-B*51:01; PAGE5; ENSG00000158639; TAA
DAPGDGPDV

SEQ ID NO: 57668 - protein, 10 aa, Homo sapiens
  Table A; Target 57668; HLA-A*68:01; PAGE5; ENSG00000158639; TAA
DAPGDGPDVR

SEQ ID NO: 57669 - protein, 8 aa, Homo sapiens
  Table A; Target 57669; HLA-A*33:01; PAGE5; ENSG00000158639; TAA
DMSEHVTR

SEQ ID NO: 57670 - protein, 8 aa, Homo sapiens
  Table A; Target 57670; HLA-A*33:03; PAGE5; ENSG00000158639; TAA
DMSEHVTR

SEQ ID NO: 57671 - protein, 8 aa, Homo sapiens
  Table A; Target 57671; HLA-A*68:01; PAGE5; ENSG00000158639; TAA
DMSEHVTR

SEQ ID NO: 57672 - protein, 8 aa, Homo sapiens
  Table A; Target 57672; HLA-B*08:01; PAGE5; ENSG00000158639; TAA
DMSEHVTR

SEQ ID NO: 57673 - protein, 8 aa, Homo sapiens
  Table A; Target 57673; HLA-C*07:06; PAGE5; ENSG00000158639; TAA
DMSEHVTR

SEQ ID NO: 57674 - protein, 8 aa, Homo sapiens
  Table A; Target 57674; HLA-B*51:01; PAGE5; ENSG00000158639; TAA
DPTKVLEA

SEQ ID NO: 57675 - protein, 8 aa, Homo sapiens
  Table A; Target 57675; HLA-B*54:01; PAGE5; ENSG00000158639; TAA
DPTKVLEA

SEQ ID NO: 57676 - protein, 8 aa, Homo sapiens
  Table A; Target 57676; HLA-B*55:01; PAGE5; ENSG00000158639; TAA
DPTKVLEA

SEQ ID NO: 57677 - protein, 8 aa, Homo sapiens
  Table A; Target 57677; HLA-B*56:01; PAGE5; ENSG00000158639; TAA
DPTKVLEA

SEQ ID NO: 57678 - protein, 9 aa, Homo sapiens
  Table A; Target 57678; HLA-A*33:01; PAGE5; ENSG00000158639; TAA
DVEAFQQEL

SEQ ID NO: 57679 - protein, 9 aa, Homo sapiens
  Table A; Target 57679; HLA-A*68:01; PAGE5; ENSG00000158639; TAA
DVEAFQQEL

SEQ ID NO: 57680 - protein, 9 aa, Homo sapiens
  Table A; Target 57680; HLA-A*68:02; PAGE5; ENSG00000158639; TAA
DVEAFQQEL

SEQ ID NO: 57681 - protein, 9 aa, Homo sapiens
  Table A; Target 57681; HLA-B*35:01; PAGE5; ENSG00000158639; TAA
DVEAFQQEL

SEQ ID NO: 57682 - protein, 9 aa, Homo sapiens
  Table A; Target 57682; HLA-B*35:03; PAGE5; ENSG00000158639; TAA
DVEAFQQEL

SEQ ID NO: 57683 - protein, 9 aa, Homo sapiens
  Table A; Target 57683; HLA-B*38:01; PAGE5; ENSG00000158639; TAA
DVEAFQQEL

SEQ ID NO: 57684 - protein, 9 aa, Homo sapiens
  Table A; Target 57684; HLA-C*05:01; PAGE5; ENSG00000158639; TAA
DVEAFQQEL

SEQ ID NO: 57685 - protein, 9 aa, Homo sapiens
  Table A; Target 57685; HLA-C*07:06; PAGE5; ENSG00000158639; TAA
DVEAFQQEL

SEQ ID NO: 57686 - protein, 10 aa, Homo sapiens
  Table A; Target 57686; HLA-A*25:01; PAGE5; ENSG00000158639; TAA
DVREGTLPTF

SEQ ID NO: 57687 - protein, 10 aa, Homo sapiens
  Table A; Target 57687; HLA-A*26:01; PAGE5; ENSG00000158639; TAA
DVREGTLPTF

SEQ ID NO: 57688 - protein, 10 aa, Homo sapiens
  Table A; Target 57688; HLA-A*33:01; PAGE5; ENSG00000158639; TAA
DVREGTLPTF

SEQ ID NO: 57689 - protein, 10 aa, Homo sapiens
  Table A; Target 57689; HLA-A*33:03; PAGE5; ENSG00000158639; TAA
DVREGTLPTF

SEQ ID NO: 57690 - protein, 11 aa, Homo sapiens
  Table A; Target 57690; HLA-A*33:01; PAGE5; ENSG00000158639; TAA
EDAPGDGPDVR

SEQ ID NO: 57691 - protein, 11 aa, Homo sapiens
  Table A; Target 57691; HLA-A*68:01; PAGE5; ENSG00000158639; TAA
EDAPGDGPDVR

SEQ ID NO: 57692 - protein, 11 aa, Homo sapiens
  Table A; Target 57692; HLA-A*68:02; PAGE5; ENSG00000158639; TAA
EDAPGDGPDVR

SEQ ID NO: 57693 - protein, 11 aa, Homo sapiens
  Table A; Target 57693; HLA-A*33:01; PAGE5; ENSG00000158639; TAA
EHVTRSQSSER

SEQ ID NO: 57694 - protein, 11 aa, Homo sapiens
  Table A; Target 57694; HLA-A*33:03; PAGE5; ENSG00000158639; TAA
EHVTRSQSSER

SEQ ID NO: 57695 - protein, 10 aa, Homo sapiens
  Table A; Target 57695; HLA-A*25:01; PAGE5; ENSG00000158639; TAA
EIKNEGAPAV

SEQ ID NO: 57696 - protein, 10 aa, Homo sapiens
  Table A; Target 57696; HLA-A*26:01; PAGE5; ENSG00000158639; TAA
EIKNEGAPAV

SEQ ID NO: 57697 - protein, 10 aa, Homo sapiens
  Table A; Target 57697; HLA-A*68:01; PAGE5; ENSG00000158639; TAA
ESSQPVGPVI

SEQ ID NO: 57698 - protein, 10 aa, Homo sapiens
  Table A; Target 57698; HLA-A*68:02; PAGE5; ENSG00000158639; TAA
ESSQPVGPVI

SEQ ID NO: 57699 - protein, 10 aa, Homo sapiens
  Table A; Target 57699; HLA-B*38:01; PAGE5; ENSG00000158639; TAA
ESSQPVGPVI

SEQ ID NO: 57700 - protein, 9 aa, Homo sapiens
  Table A; Target 57700; HLA-A*26:01; PAGE5; ENSG00000158639; TAA
EVRDMSEHV

SEQ ID NO: 57701 - protein, 9 aa, Homo sapiens
  Table A; Target 57701; HLA-A*68:02; PAGE5; ENSG00000158639; TAA
EVRDMSEHV

SEQ ID NO: 57702 - protein, 11 aa, Homo sapiens
  Table A; Target 57702; HLA-A*31:01; PAGE5; ENSG00000158639; TAA
EVRDMSEHVTR

SEQ ID NO: 57703 - protein, 11 aa, Homo sapiens
  Table A; Target 57703; HLA-A*33:01; PAGE5; ENSG00000158639; TAA
EVRDMSEHVTR

SEQ ID NO: 57704 - protein, 11 aa, Homo sapiens
  Table A; Target 57704; HLA-A*68:01; PAGE5; ENSG00000158639; TAA
EVRDMSEHVTR

SEQ ID NO: 57705 - protein, 11 aa, Homo sapiens
  Table A; Target 57705; HLA-B*57:01; PAGE5; ENSG00000158639; TAA
EVRDMSEHVTR

SEQ ID NO: 57706 - protein, 11 aa, Homo sapiens
  Table A; Target 57706; HLA-C*07:06; PAGE5; ENSG00000158639; TAA
EVRDMSEHVTR

SEQ ID NO: 57707 - protein, 9 aa, Homo sapiens
  Table A; Target 57707; HLA-B*27:02; PAGE5; ENSG00000158639; TAA
FQQELALLK

SEQ ID NO: 57708 - protein, 10 aa, Homo sapiens
  Table A; Target 57708; HLA-C*01:02; PAGE5; ENSG00000158639; TAA
GAPAVQGTDV

SEQ ID NO: 57709 - protein, 9 aa, Homo sapiens
  Table A; Target 57709; HLA-B*40:01; PAGE5; ENSG00000158639; TAA
GEIKNEGAP

SEQ ID NO: 57710 - protein, 9 aa, Homo sapiens
  Table A; Target 57710; HLA-B*40:02; PAGE5; ENSG00000158639; TAA
GEIKNEGAP

SEQ ID NO: 57711 - protein, 10 aa, Homo sapiens
  Table A; Target 57711; HLA-A*30:01; PAGE5; ENSG00000158639; TAA
GEIKNEGAPA

SEQ ID NO: 57712 - protein, 10 aa, Homo sapiens
  Table A; Target 57712; HLA-B*40:01; PAGE5; ENSG00000158639; TAA
GEIKNEGAPA

SEQ ID NO: 57713 - protein, 10 aa, Homo sapiens
  Table A; Target 57713; HLA-B*40:02; PAGE5; ENSG00000158639; TAA
GEIKNEGAPA

SEQ ID NO: 57714 - protein, 10 aa, Homo sapiens
  Table A; Target 57714; HLA-B*49:01; PAGE5; ENSG00000158639; TAA
GEIKNEGAPA

SEQ ID NO: 57715 - protein, 11 aa, Homo sapiens
  Table A; Target 57715; HLA-A*30:01; PAGE5; ENSG00000158639; TAA
GEIKNEGAPAV

SEQ ID NO: 57716 - protein, 11 aa, Homo sapiens
  Table A; Target 57716; HLA-B*13:02; PAGE5; ENSG00000158639; TAA
GEIKNEGAPAV

SEQ ID NO: 57717 - protein, 11 aa, Homo sapiens
  Table A; Target 57717; HLA-B*40:01; PAGE5; ENSG00000158639; TAA
GEIKNEGAPAV

SEQ ID NO: 57718 - protein, 11 aa, Homo sapiens
  Table A; Target 57718; HLA-B*40:02; PAGE5; ENSG00000158639; TAA
GEIKNEGAPAV

SEQ ID NO: 57719 - protein, 11 aa, Homo sapiens
  Table A; Target 57719; HLA-B*44:03; PAGE5; ENSG00000158639; TAA
GEIKNEGAPAV

SEQ ID NO: 57720 - protein, 11 aa, Homo sapiens
  Table A; Target 57720; HLA-B*49:01; PAGE5; ENSG00000158639; TAA
GEIKNEGAPAV

SEQ ID NO: 57721 - protein, 11 aa, Homo sapiens
  Table A; Target 57721; HLA-C*16:04; PAGE5; ENSG00000158639; TAA
GEIKNEGAPAV

SEQ ID NO: 57722 - protein, 9 aa, Homo sapiens
  Table A; Target 57722; HLA-A*03:02; PAGE5; ENSG00000158639; TAA
GIAPSGEIK

SEQ ID NO: 57723 - protein, 9 aa, Homo sapiens
  Table A; Target 57723; HLA-B*07:02; PAGE5; ENSG00000158639; TAA
GPDVREGTL

SEQ ID NO: 57724 - protein, 9 aa, Homo sapiens
  Table A; Target 57724; HLA-B*08:01; PAGE5; ENSG00000158639; TAA
GPDVREGTL

SEQ ID NO: 57725 - protein, 9 aa, Homo sapiens
  Table A; Target 57725; HLA-B*35:03; PAGE5; ENSG00000158639; TAA
GPDVREGTL

SEQ ID NO: 57726 - protein, 9 aa, Homo sapiens
  Table A; Target 57726; HLA-C*05:01; PAGE5; ENSG00000158639; TAA
GPDVREGTL

SEQ ID NO: 57727 - protein, 9 aa, Homo sapiens
  Table A; Target 57727; HLA-C*07:02; PAGE5; ENSG00000158639; TAA
GPDVREGTL

SEQ ID NO: 57728 - protein, 10 aa, Homo sapiens
  Table A; Target 57728; HLA-A*01:01; PAGE5; ENSG00000158639; TAA
GTDVEAFQQE

SEQ ID NO: 57729 - protein, 11 aa, Homo sapiens
  Table A; Target 57729; HLA-B*39:01; PAGE5; ENSG00000158639; TAA
GTDVEAFQQEL

SEQ ID NO: 57730 - protein, 10 aa, Homo sapiens
  Table A; Target 57730; HLA-A*03:01; PAGE5; ENSG00000158639; TAA
GTLPTFDPTK

SEQ ID NO: 57731 - protein, 10 aa, Homo sapiens
  Table A; Target 57731; HLA-A*03:02; PAGE5; ENSG00000158639; TAA
GTLPTFDPTK

SEQ ID NO: 57732 - protein, 10 aa, Homo sapiens
  Table A; Target 57732; HLA-A*11:01; PAGE5; ENSG00000158639; TAA
GTLPTFDPTK

SEQ ID NO: 57733 - protein, 10 aa, Homo sapiens
  Table A; Target 57733; HLA-B*27:02; PAGE5; ENSG00000158639; TAA
GTLPTFDPTK

SEQ ID NO: 57734 - protein, 10 aa, Homo sapiens
  Table A; Target 57734; HLA-B*57:01; PAGE5; ENSG00000158639; TAA
GTLPTFDPTK

SEQ ID NO: 57735 - protein, 9 aa, Homo sapiens
  Table A; Target 57735; HLA-C*16:01; PAGE5; ENSG00000158639; TAA
GTREEVRDM

SEQ ID NO: 57736 - protein, 10 aa, Homo sapiens
  Table A; Target 57736; HLA-A*68:01; PAGE5; ENSG00000158639; TAA
HVTRSQSSER

SEQ ID NO: 57737 - protein, 10 aa, Homo sapiens
  Table A; Target 57737; HLA-C*07:06; PAGE5; ENSG00000158639; TAA
HVTRSQSSER

SEQ ID NO: 57738 - protein, 11 aa, Homo sapiens
  Table A; Target 57738; HLA-B*49:01; PAGE5; ENSG00000158639; TAA
IEDAPGDGPDV

SEQ ID NO: 57739 - protein, 9 aa, Homo sapiens
  Table A; Target 57739; HLA-B*15:03; PAGE5; ENSG00000158639; TAA
IKNEGAPAV

SEQ ID NO: 57740 - protein, 9 aa, Homo sapiens
  Table A; Target 57740; HLA-A*03:01; PAGE5; ENSG00000158639; TAA
IVQQPTEEK

SEQ ID NO: 57741 - protein, 9 aa, Homo sapiens
  Table A; Target 57741; HLA-A*03:02; PAGE5; ENSG00000158639; TAA
IVQQPTEEK

SEQ ID NO: 57742 - protein, 9 aa, Homo sapiens
  Table A; Target 57742; HLA-A*11:01; PAGE5; ENSG00000158639; TAA
IVQQPTEEK

SEQ ID NO: 57743 - protein, 9 aa, Homo sapiens
  Table A; Target 57743; HLA-C*05:01; PAGE5; ENSG00000158639; TAA
IVQQPTEEK

SEQ ID NO: 57744 - protein, 9 aa, Homo sapiens
  Table A; Target 57744; HLA-C*07:06; PAGE5; ENSG00000158639; TAA
IVQQPTEEK

SEQ ID NO: 57745 - protein, 10 aa, Homo sapiens
  Table A; Target 57745; HLA-A*68:01; PAGE5; ENSG00000158639; TAA
IVQQPTEEKR

SEQ ID NO: 57746 - protein, 10 aa, Homo sapiens
  Table A; Target 57746; HLA-C*07:06; PAGE5; ENSG00000158639; TAA
IVQQPTEEKR

SEQ ID NO: 57747 - protein, 10 aa, Homo sapiens
  Table A; Target 57747; HLA-B*27:05; PAGE5; ENSG00000158639; TAA
KVLEAGEGQL

SEQ ID NO: 57748 - protein, 10 aa, Homo sapiens
  Table A; Target 57748; HLA-B*40:01; PAGE5; ENSG00000158639; TAA
KVLEAGEGQL

SEQ ID NO: 57749 - protein, 10 aa, Homo sapiens
  Table A; Target 57749; HLA-B*40:02; PAGE5; ENSG00000158639; TAA
KVLEAGEGQL

SEQ ID NO: 57750 - protein, 10 aa, Homo sapiens
  Table A; Target 57750; HLA-B*58:01; PAGE5; ENSG00000158639; TAA
KVLEAGEGQL

SEQ ID NO: 57751 - protein, 8 aa, Homo sapiens
  Table A; Target 57751; HLA-B*39:01; PAGE5; ENSG00000158639; TAA
LEAGEGQL

SEQ ID NO: 57752 - protein, 8 aa, Homo sapiens
  Table A; Target 57752; HLA-B*40:01; PAGE5; ENSG00000158639; TAA
LEAGEGQL

SEQ ID NO: 57753 - protein, 8 aa, Homo sapiens
  Table A; Target 57753; HLA-B*27:02; PAGE5; ENSG00000158639; TAA
LPTFDPTK

SEQ ID NO: 57754 - protein, 9 aa, Homo sapiens
  Table A; Target 57754; HLA-B*35:03; PAGE5; ENSG00000158639; TAA
LPTFDPTKV

SEQ ID NO: 57755 - protein, 9 aa, Homo sapiens
  Table A; Target 57755; HLA-B*51:01; PAGE5; ENSG00000158639; TAA
LPTFDPTKV

SEQ ID NO: 57756 - protein, 9 aa, Homo sapiens
  Table A; Target 57756; HLA-B*54:01; PAGE5; ENSG00000158639; TAA
LPTFDPTKV

SEQ ID NO: 57757 - protein, 9 aa, Homo sapiens
  Table A; Target 57757; HLA-B*56:01; PAGE5; ENSG00000158639; TAA
LPTFDPTKV

SEQ ID NO: 57758 - protein, 10 aa, Homo sapiens
  Table A; Target 57758; HLA-B*35:01; PAGE5; ENSG00000158639; TAA
LPTFDPTKVL

SEQ ID NO: 57759 - protein, 10 aa, Homo sapiens
  Table A; Target 57759; HLA-B*35:03; PAGE5; ENSG00000158639; TAA
LPTFDPTKVL

SEQ ID NO: 57760 - protein, 9 aa, Homo sapiens
  Table A; Target 57760; HLA-A*31:01; PAGE5; ENSG00000158639; TAA
MQAPWAGNR

SEQ ID NO: 57761 - protein, 11 aa, Homo sapiens
  Table A; Target 57761; HLA-B*57:01; PAGE5; ENSG00000158639; TAA
MQAPWAGNRGW

SEQ ID NO: 57762 - protein, 11 aa, Homo sapiens
  Table A; Target 57762; HLA-B*27:02; PAGE5; ENSG00000158639; TAA
PAVQGTDVEAF

SEQ ID NO: 57763 - protein, 9 aa, Homo sapiens
  Table A; Target 57763; HLA-C*12:03; PAGE5; ENSG00000158639; TAA
PTFDPTKVL

SEQ ID NO: 57764 - protein, 11 aa, Homo sapiens
  Table A; Target 57764; HLA-A*30:01; PAGE5; ENSG00000158639; TAA
QESSQPVGPVI

SEQ ID NO: 57765 - protein, 11 aa, Homo sapiens
  Table A; Target 57765; HLA-B*38:01; PAGE5; ENSG00000158639; TAA
QESSQPVGPVI

SEQ ID NO: 57766 - protein, 11 aa, Homo sapiens
  Table A; Target 57766; HLA-B*40:01; PAGE5; ENSG00000158639; TAA
QESSQPVGPVI

SEQ ID NO: 57767 - protein, 11 aa, Homo sapiens
  Table A; Target 57767; HLA-B*44:02; PAGE5; ENSG00000158639; TAA
QESSQPVGPVI

SEQ ID NO: 57768 - protein, 11 aa, Homo sapiens
  Table A; Target 57768; HLA-B*44:03; PAGE5; ENSG00000158639; TAA
QESSQPVGPVI

SEQ ID NO: 57769 - protein, 11 aa, Homo sapiens
  Table A; Target 57769; HLA-B*49:01; PAGE5; ENSG00000158639; TAA
QESSQPVGPVI

SEQ ID NO: 57770 - protein, 9 aa, Homo sapiens
  Table A; Target 57770; HLA-B*07:02; PAGE5; ENSG00000158639; TAA
QGIAPSGEI

SEQ ID NO: 57771 - protein, 9 aa, Homo sapiens
  Table A; Target 57771; HLA-C*05:01; PAGE5; ENSG00000158639; TAA
QGIAPSGEI

SEQ ID NO: 57772 - protein, 10 aa, Homo sapiens
  Table A; Target 57772; HLA-A*11:01; PAGE5; ENSG00000158639; TAA
QGIAPSGEIK

SEQ ID NO: 57773 - protein, 10 aa, Homo sapiens
  Table A; Target 57773; HLA-B*27:02; PAGE5; ENSG00000158639; TAA
QGIAPSGEIK

SEQ ID NO: 57774 - protein, 8 aa, Homo sapiens
  Table A; Target 57774; HLA-B*37:01; PAGE5; ENSG00000158639; TAA
QGTDVEAF

SEQ ID NO: 57775 - protein, 8 aa, Homo sapiens
  Table A; Target 57775; HLA-B*56:01; PAGE5; ENSG00000158639; TAA
QPVGPVIV

SEQ ID NO: 57776 - protein, 9 aa, Homo sapiens
  Table A; Target 57776; HLA-B*35:01; PAGE5; ENSG00000158639; TAA
QPVGPVIVQ

SEQ ID NO: 57777 - protein, 9 aa, Homo sapiens
  Table A; Target 57777; HLA-B*56:01; PAGE5; ENSG00000158639; TAA
QPVGPVIVQ

SEQ ID NO: 57778 - protein, 11 aa, Homo sapiens
  Table A; Target 57778; HLA-B*56:01; PAGE5; ENSG00000158639; TAA
QPVGPVIVQQP

SEQ ID NO: 57779 - protein, 9 aa, Homo sapiens
  Table A; Target 57779; HLA-A*31:01; PAGE5; ENSG00000158639; TAA
RDMSEHVTR

SEQ ID NO: 57780 - protein, 8 aa, Homo sapiens
  Table A; Target 57780; HLA-B*18:01; PAGE5; ENSG00000158639; TAA
REGTLPTF

SEQ ID NO: 57781 - protein, 8 aa, Homo sapiens
  Table A; Target 57781; HLA-B*37:01; PAGE5; ENSG00000158639; TAA
REGTLPTF

SEQ ID NO: 57782 - protein, 8 aa, Homo sapiens
  Table A; Target 57782; HLA-B*13:02; PAGE5; ENSG00000158639; TAA
SQPVGPVI

SEQ ID NO: 57783 - protein, 8 aa, Homo sapiens
  Table A; Target 57783; HLA-B*15:03; PAGE5; ENSG00000158639; TAA
SQPVGPVI

SEQ ID NO: 57784 - protein, 8 aa, Homo sapiens
  Table A; Target 57784; HLA-B*39:01; PAGE5; ENSG00000158639; TAA
SQPVGPVI

SEQ ID NO: 57785 - protein, 8 aa, Homo sapiens
  Table A; Target 57785; HLA-B*51:01; PAGE5; ENSG00000158639; TAA
SQPVGPVI

SEQ ID NO: 57786 - protein, 9 aa, Homo sapiens
  Table A; Target 57786; HLA-A*02:07; PAGE5; ENSG00000158639; TAA
SQPVGPVIV

SEQ ID NO: 57787 - protein, 9 aa, Homo sapiens
  Table A; Target 57787; HLA-B*13:02; PAGE5; ENSG00000158639; TAA
SQPVGPVIV

SEQ ID NO: 57788 - protein, 9 aa, Homo sapiens
  Table A; Target 57788; HLA-A*23:01; PAGE5; ENSG00000158639; TAA
SSQPVGPVI

SEQ ID NO: 57789 - protein, 9 aa, Homo sapiens
  Table A; Target 57789; HLA-A*32:01; PAGE5; ENSG00000158639; TAA
SSQPVGPVI

SEQ ID NO: 57790 - protein, 9 aa, Homo sapiens
  Table A; Target 57790; HLA-B*13:02; PAGE5; ENSG00000158639; TAA
SSQPVGPVI

SEQ ID NO: 57791 - protein, 9 aa, Homo sapiens
  Table A; Target 57791; HLA-B*15:03; PAGE5; ENSG00000158639; TAA
SSQPVGPVI

SEQ ID NO: 57792 - protein, 9 aa, Homo sapiens
  Table A; Target 57792; HLA-B*38:01; PAGE5; ENSG00000158639; TAA
SSQPVGPVI

SEQ ID NO: 57793 - protein, 9 aa, Homo sapiens
  Table A; Target 57793; HLA-B*39:01; PAGE5; ENSG00000158639; TAA
SSQPVGPVI

SEQ ID NO: 57794 - protein, 9 aa, Homo sapiens
  Table A; Target 57794; HLA-B*46:01; PAGE5; ENSG00000158639; TAA
SSQPVGPVI

SEQ ID NO: 57795 - protein, 9 aa, Homo sapiens
  Table A; Target 57795; HLA-B*51:01; PAGE5; ENSG00000158639; TAA
SSQPVGPVI

SEQ ID NO: 57796 - protein, 9 aa, Homo sapiens
  Table A; Target 57796; HLA-B*58:01; PAGE5; ENSG00000158639; TAA
SSQPVGPVI

SEQ ID NO: 57797 - protein, 9 aa, Homo sapiens
  Table A; Target 57797; HLA-C*03:03; PAGE5; ENSG00000158639; TAA
SSQPVGPVI

SEQ ID NO: 57798 - protein, 9 aa, Homo sapiens
  Table A; Target 57798; HLA-C*03:04; PAGE5; ENSG00000158639; TAA
SSQPVGPVI

SEQ ID NO: 57799 - protein, 9 aa, Homo sapiens
  Table A; Target 57799; HLA-C*06:02; PAGE5; ENSG00000158639; TAA
SSQPVGPVI

SEQ ID NO: 57800 - protein, 9 aa, Homo sapiens
  Table A; Target 57800; HLA-C*16:01; PAGE5; ENSG00000158639; TAA
SSQPVGPVI

SEQ ID NO: 57801 - protein, 9 aa, Homo sapiens
  Table A; Target 57801; HLA-C*16:02; PAGE5; ENSG00000158639; TAA
SSQPVGPVI

SEQ ID NO: 57802 - protein, 9 aa, Homo sapiens
  Table A; Target 57802; HLA-C*16:04; PAGE5; ENSG00000158639; TAA
SSQPVGPVI

SEQ ID NO: 57803 - protein, 10 aa, Homo sapiens
  Table A; Target 57803; HLA-C*12:03; PAGE5; ENSG00000158639; TAA
SSQPVGPVIV

SEQ ID NO: 57804 - protein, 10 aa, Homo sapiens
  Table A; Target 57804; HLA-A*30:01; PAGE5; ENSG00000158639; TAA
TDVEAFQQEL

SEQ ID NO: 57805 - protein, 10 aa, Homo sapiens
  Table A; Target 57805; HLA-B*38:01; PAGE5; ENSG00000158639; TAA
TDVEAFQQEL

SEQ ID NO: 57806 - protein, 10 aa, Homo sapiens
  Table A; Target 57806; HLA-B*39:01; PAGE5; ENSG00000158639; TAA
TDVEAFQQEL

SEQ ID NO: 57807 - protein, 10 aa, Homo sapiens
  Table A; Target 57807; HLA-B*40:01; PAGE5; ENSG00000158639; TAA
TDVEAFQQEL

SEQ ID NO: 57808 - protein, 10 aa, Homo sapiens
  Table A; Target 57808; HLA-B*40:02; PAGE5; ENSG00000158639; TAA
TDVEAFQQEL

SEQ ID NO: 57809 - protein, 10 aa, Homo sapiens
  Table A; Target 57809; HLA-B*44:02; PAGE5; ENSG00000158639; TAA
TDVEAFQQEL

SEQ ID NO: 57810 - protein, 10 aa, Homo sapiens
  Table A; Target 57810; HLA-B*49:01; PAGE5; ENSG00000158639; TAA
TDVEAFQQEL

SEQ ID NO: 57811 - protein, 10 aa, Homo sapiens
  Table A; Target 57811; HLA-C*03:04; PAGE5; ENSG00000158639; TAA
TDVEAFQQEL

SEQ ID NO: 57812 - protein, 8 aa, Homo sapiens
  Table A; Target 57812; HLA-B*35:01; PAGE5; ENSG00000158639; TAA
TFDPTKVL

SEQ ID NO: 57813 - protein, 8 aa, Homo sapiens
  Table A; Target 57813; HLA-C*04:01; PAGE5; ENSG00000158639; TAA
TFDPTKVL

SEQ ID NO: 57814 - protein, 9 aa, Homo sapiens
  Table A; Target 57814; HLA-C*04:01; PAGE5; ENSG00000158639; TAA
TFDPTKVLE

SEQ ID NO: 57815 - protein, 9 aa, Homo sapiens
  Table A; Target 57815; HLA-A*02:07; PAGE5; ENSG00000158639; TAA
TLPTFDPTK

SEQ ID NO: 57816 - protein, 10 aa, Homo sapiens
  Table A; Target 57816; HLA-A*02:01; PAGE5; ENSG00000158639; TAA
TLPTFDPTKV

SEQ ID NO: 57817 - protein, 10 aa, Homo sapiens
  Table A; Target 57817; HLA-A*02:03; PAGE5; ENSG00000158639; TAA
TLPTFDPTKV

SEQ ID NO: 57818 - protein, 10 aa, Homo sapiens
  Table A; Target 57818; HLA-A*02:04; PAGE5; ENSG00000158639; TAA
TLPTFDPTKV

SEQ ID NO: 57819 - protein, 10 aa, Homo sapiens
  Table A; Target 57819; HLA-A*02:07; PAGE5; ENSG00000158639; TAA
TLPTFDPTKV

SEQ ID NO: 57820 - protein, 10 aa, Homo sapiens
  Table A; Target 57820; HLA-A*68:02; PAGE5; ENSG00000158639; TAA
TLPTFDPTKV

SEQ ID NO: 57821 - protein, 11 aa, Homo sapiens
  Table A; Target 57821; HLA-A*02:03; PAGE5; ENSG00000158639; TAA
TLPTFDPTKVL

SEQ ID NO: 57822 - protein, 11 aa, Homo sapiens
  Table A; Target 57822; HLA-A*02:07; PAGE5; ENSG00000158639; TAA
TLPTFDPTKVL

SEQ ID NO: 57823 - protein, 11 aa, Homo sapiens
  Table A; Target 57823; HLA-A*24:02; PAGE5; ENSG00000158639; TAA
TLPTFDPTKVL

SEQ ID NO: 57824 - protein, 8 aa, Homo sapiens
  Table A; Target 57824; HLA-A*30:01; PAGE5; ENSG00000158639; TAA
VEAFQQEL

SEQ ID NO: 57825 - protein, 8 aa, Homo sapiens
  Table A; Target 57825; HLA-B*18:01; PAGE5; ENSG00000158639; TAA
VEAFQQEL

SEQ ID NO: 57826 - protein, 8 aa, Homo sapiens
  Table A; Target 57826; HLA-B*37:01; PAGE5; ENSG00000158639; TAA
VEAFQQEL

SEQ ID NO: 57827 - protein, 8 aa, Homo sapiens
  Table A; Target 57827; HLA-B*39:01; PAGE5; ENSG00000158639; TAA
VEAFQQEL

SEQ ID NO: 57828 - protein, 8 aa, Homo sapiens
  Table A; Target 57828; HLA-B*40:01; PAGE5; ENSG00000158639; TAA
VEAFQQEL

SEQ ID NO: 57829 - protein, 8 aa, Homo sapiens
  Table A; Target 57829; HLA-B*40:02; PAGE5; ENSG00000158639; TAA
VEAFQQEL

SEQ ID NO: 57830 - protein, 8 aa, Homo sapiens
  Table A; Target 57830; HLA-B*44:02; PAGE5; ENSG00000158639; TAA
VEAFQQEL

SEQ ID NO: 57831 - protein, 8 aa, Homo sapiens
  Table A; Target 57831; HLA-B*44:03; PAGE5; ENSG00000158639; TAA
VEAFQQEL

SEQ ID NO: 57832 - protein, 8 aa, Homo sapiens
  Table A; Target 57832; HLA-B*49:01; PAGE5; ENSG00000158639; TAA
VEAFQQEL

SEQ ID NO: 57833 - protein, 8 aa, Homo sapiens
  Table A; Target 57833; HLA-C*03:04; PAGE5; ENSG00000158639; TAA
VEAFQQEL

SEQ ID NO: 57834 - protein, 8 aa, Homo sapiens
  Table A; Target 57834; HLA-C*07:04; PAGE5; ENSG00000158639; TAA
VEAFQQEL

SEQ ID NO: 57835 - protein, 8 aa, Homo sapiens
  Table A; Target 57835; HLA-C*12:03; PAGE5; ENSG00000158639; TAA
VEAFQQEL

SEQ ID NO: 57836 - protein, 8 aa, Homo sapiens
  Table A; Target 57836; HLA-C*16:01; PAGE5; ENSG00000158639; TAA
VEAFQQEL

SEQ ID NO: 57837 - protein, 8 aa, Homo sapiens
  Table A; Target 57837; HLA-C*16:04; PAGE5; ENSG00000158639; TAA
VEAFQQEL

SEQ ID NO: 57838 - protein, 9 aa, Homo sapiens
  Table A; Target 57838; HLA-B*49:01; PAGE5; ENSG00000158639; TAA
VEAFQQELA

SEQ ID NO: 57839 - protein, 10 aa, Homo sapiens
  Table A; Target 57839; HLA-A*30:01; PAGE5; ENSG00000158639; TAA
VEAFQQELAL

SEQ ID NO: 57840 - protein, 10 aa, Homo sapiens
  Table A; Target 57840; HLA-B*40:01; PAGE5; ENSG00000158639; TAA
VEAFQQELAL

SEQ ID NO: 57841 - protein, 11 aa, Homo sapiens
  Table A; Target 57841; HLA-B*40:01; PAGE5; ENSG00000158639; TAA
VEAFQQELALL

SEQ ID NO: 57842 - protein, 10 aa, Homo sapiens
  Table A; Target 57842; HLA-A*03:01; PAGE5; ENSG00000158639; TAA
VIVQQPTEEK

SEQ ID NO: 57843 - protein, 10 aa, Homo sapiens
  Table A; Target 57843; HLA-A*03:02; PAGE5; ENSG00000158639; TAA
VIVQQPTEEK

SEQ ID NO: 57844 - protein, 10 aa, Homo sapiens
  Table A; Target 57844; HLA-A*11:01; PAGE5; ENSG00000158639; TAA
VIVQQPTEEK

SEQ ID NO: 57845 - protein, 9 aa, Homo sapiens
  Table A; Target 57845; HLA-A*02:01; PAGE5; ENSG00000158639; TAA
VLEAGEGQL

SEQ ID NO: 57846 - protein, 9 aa, Homo sapiens
  Table A; Target 57846; HLA-B*38:01; PAGE5; ENSG00000158639; TAA
VLEAGEGQL

SEQ ID NO: 57847 - protein, 9 aa, Homo sapiens
  Table A; Target 57847; HLA-B*39:01; PAGE5; ENSG00000158639; TAA
VLEAGEGQL

SEQ ID NO: 57848 - protein, 9 aa, Homo sapiens
  Table A; Target 57848; HLA-C*01:02; PAGE5; ENSG00000158639; TAA
VLEAGEGQL

SEQ ID NO: 57849 - protein, 9 aa, Homo sapiens
  Table A; Target 57849; HLA-C*05:01; PAGE5; ENSG00000158639; TAA
VLEAGEGQL

SEQ ID NO: 57850 - protein, 9 aa, Homo sapiens
  Table A; Target 57850; HLA-C*07:04; PAGE5; ENSG00000158639; TAA
VLEAGEGQL

SEQ ID NO: 57851 - protein, 9 aa, Homo sapiens
  Table A; Target 57851; HLA-A*32:01; PAGE5; ENSG00000158639; TAA
VQGTDVEAF

SEQ ID NO: 57852 - protein, 9 aa, Homo sapiens
  Table A; Target 57852; HLA-B*15:01; PAGE5; ENSG00000158639; TAA
VQGTDVEAF

SEQ ID NO: 57853 - protein, 9 aa, Homo sapiens
  Table A; Target 57853; HLA-B*15:03; PAGE5; ENSG00000158639; TAA
VQGTDVEAF

SEQ ID NO: 57854 - protein, 9 aa, Homo sapiens
  Table A; Target 57854; HLA-B*38:01; PAGE5; ENSG00000158639; TAA
VQGTDVEAF

SEQ ID NO: 57855 - protein, 9 aa, Homo sapiens
  Table A; Target 57855; HLA-B*39:01; PAGE5; ENSG00000158639; TAA
VQGTDVEAF

SEQ ID NO: 57856 - protein, 9 aa, Homo sapiens
  Table A; Target 57856; HLA-C*07:04; PAGE5; ENSG00000158639; TAA
VQGTDVEAF

SEQ ID NO: 57857 - protein, 10 aa, Homo sapiens
  Table A; Target 57857; HLA-B*27:05; PAGE5; ENSG00000158639; TAA
VRDMSEHVTR

SEQ ID NO: 57858 - protein, 9 aa, Homo sapiens
  Table A; Target 57858; HLA-B*27:02; PAGE5; ENSG00000158639; TAA
VREGTLPTF

SEQ ID NO: 57859 - protein, 9 aa, Homo sapiens
  Table A; Target 57859; HLA-B*27:05; PAGE5; ENSG00000158639; TAA
VREGTLPTF

SEQ ID NO: 57860 - protein, 9 aa, Homo sapiens
  Table A; Target 57860; HLA-B*38:01; PAGE5; ENSG00000158639; TAA
VREGTLPTF

SEQ ID NO: 57861 - protein, 9 aa, Homo sapiens
  Table A; Target 57861; HLA-C*16:04; PAGE5; ENSG00000158639; TAA
VREGTLPTF

SEQ ID NO: 57862 - protein, 9 aa, Homo sapiens
  Table A; Target 57862; HLA-A*31:01; PAGE5; ENSG00000158639; TAA
VTRSQSSER

SEQ ID NO: 57863 - protein, 9 aa, Homo sapiens
  Table A; Target 57863; HLA-A*33:01; PAGE5; ENSG00000158639; TAA
VTRSQSSER

SEQ ID NO: 57864 - protein, 9 aa, Homo sapiens
  Table A; Target 57864; HLA-A*33:03; PAGE5; ENSG00000158639; TAA
VTRSQSSER

SEQ ID NO: 57865 - protein, 9 aa, Homo sapiens
  Table A; Target 57865; HLA-C*07:06; PAGE5; ENSG00000158639; TAA
VTRSQSSER

SEQ ID NO: 57866 - protein, 9 aa, Homo sapiens
  Table A; Target 57866; HLA-C*05:01; PASD1; ENSG00000166049; CTA
AAEQQPSGF

SEQ ID NO: 57867 - protein, 10 aa, Homo sapiens
  Table A; Target 57867; HLA-A*01:01; PASD1; ENSG00000166049; CTA
AAEQQPSGFY

SEQ ID NO: 57868 - protein, 10 aa, Homo sapiens
  Table A; Target 57868; HLA-A*30:02; PASD1; ENSG00000166049; CTA
AAEQQPSGFY

SEQ ID NO: 57869 - protein, 9 aa, Homo sapiens
  Table A; Target 57869; HLA-C*01:02; PASD1; ENSG00000166049; CTA
AAGASAQPL

SEQ ID NO: 57870 - protein, 9 aa, Homo sapiens
  Table A; Target 57870; HLA-C*03:03; PASD1; ENSG00000166049; CTA
AAGASAQPL

SEQ ID NO: 57871 - protein, 9 aa, Homo sapiens
  Table A; Target 57871; HLA-C*03:04; PASD1; ENSG00000166049; CTA
AAGASAQPL

SEQ ID NO: 57872 - protein, 9 aa, Homo sapiens
  Table A; Target 57872; HLA-C*14:02; PASD1; ENSG00000166049; CTA
AAGASAQPL

SEQ ID NO: 57873 - protein, 10 aa, Homo sapiens
  Table A; Target 57873; HLA-B*58:01; PASD1; ENSG00000166049; CTA
AAISDDQIDI

SEQ ID NO: 57874 - protein, 8 aa, Homo sapiens
  Table A; Target 57874; HLA-C*05:01; PASD1; ENSG00000166049; CTA
AAYQPDQM

SEQ ID NO: 57875 - protein, 9 aa, Homo sapiens
  Table A; Target 57875; HLA-A*33:03; PASD1; ENSG00000166049; CTA
AAYQPDQMR

SEQ ID NO: 57876 - protein, 9 aa, Homo sapiens
  Table A; Target 57876; HLA-A*68:01; PASD1; ENSG00000166049; CTA
AAYQPDQMR

SEQ ID NO: 57877 - protein, 9 aa, Homo sapiens
  Table A; Target 57877; HLA-C*07:06; PASD1; ENSG00000166049; CTA
AAYQPDQMR

SEQ ID NO: 57878 - protein, 11 aa, Homo sapiens
  Table A; Target 57878; HLA-B*54:01; PASD1; ENSG00000166049; CTA
AAYQPDQMRSA

SEQ ID NO: 57879 - protein, 11 aa, Homo sapiens
  Table A; Target 57879; HLA-B*56:01; PASD1; ENSG00000166049; CTA
AAYQPDQMRSA

SEQ ID NO: 57880 - protein, 10 aa, Homo sapiens
  Table A; Target 57880; HLA-A*30:02; PASD1; ENSG00000166049; CTA
ACVPQEDRLY

SEQ ID NO: 57881 - protein, 10 aa, Homo sapiens
  Table A; Target 57881; HLA-B*15:03; PASD1; ENSG00000166049; CTA
ACVPQEDRLY

SEQ ID NO: 57882 - protein, 10 aa, Homo sapiens
  Table A; Target 57882; HLA-C*16:01; PASD1; ENSG00000166049; CTA
ACVPQEDRLY

SEQ ID NO: 57883 - protein, 8 aa, Homo sapiens
  Table A; Target 57883; HLA-B*37:01; PASD1; ENSG00000166049; CTA
ADPVDLEF

SEQ ID NO: 57884 - protein, 8 aa, Homo sapiens
  Table A; Target 57884; HLA-A*30:01; PASD1; ENSG00000166049; CTA
AEIVGKKL

SEQ ID NO: 57885 - protein, 8 aa, Homo sapiens
  Table A; Target 57885; HLA-B*37:01; PASD1; ENSG00000166049; CTA
AEIVGKKL

SEQ ID NO: 57886 - protein, 8 aa, Homo sapiens
  Table A; Target 57886; HLA-B*40:01; PASD1; ENSG00000166049; CTA
AEIVGKKL

SEQ ID NO: 57887 - protein, 8 aa, Homo sapiens
  Table A; Target 57887; HLA-B*44:02; PASD1; ENSG00000166049; CTA
AEIVGKKL

SEQ ID NO: 57888 - protein, 8 aa, Homo sapiens
  Table A; Target 57888; HLA-B*44:03; PASD1; ENSG00000166049; CTA
AEIVGKKL

SEQ ID NO: 57889 - protein, 9 aa, Homo sapiens
  Table A; Target 57889; HLA-A*30:01; PASD1; ENSG00000166049; CTA
AEIVGKKLL

SEQ ID NO: 57890 - protein, 9 aa, Homo sapiens
  Table A; Target 57890; HLA-B*37:01; PASD1; ENSG00000166049; CTA
AEIVGKKLL

SEQ ID NO: 57891 - protein, 9 aa, Homo sapiens
  Table A; Target 57891; HLA-B*40:01; PASD1; ENSG00000166049; CTA
AEIVGKKLL

SEQ ID NO: 57892 - protein, 9 aa, Homo sapiens
  Table A; Target 57892; HLA-B*40:02; PASD1; ENSG00000166049; CTA
AEIVGKKLL

SEQ ID NO: 57893 - protein, 9 aa, Homo sapiens
  Table A; Target 57893; HLA-B*44:02; PASD1; ENSG00000166049; CTA
AEIVGKKLL

SEQ ID NO: 57894 - protein, 9 aa, Homo sapiens
  Table A; Target 57894; HLA-B*44:03; PASD1; ENSG00000166049; CTA
AEIVGKKLL

SEQ ID NO: 57895 - protein, 9 aa, Homo sapiens
  Table A; Target 57895; HLA-B*49:01; PASD1; ENSG00000166049; CTA
AEIVGKKLL

SEQ ID NO: 57896 - protein, 8 aa, Homo sapiens
  Table A; Target 57896; HLA-A*30:01; PASD1; ENSG00000166049; CTA
AENISSLL

SEQ ID NO: 57897 - protein, 8 aa, Homo sapiens
  Table A; Target 57897; HLA-B*37:01; PASD1; ENSG00000166049; CTA
AENISSLL

SEQ ID NO: 57898 - protein, 8 aa, Homo sapiens
  Table A; Target 57898; HLA-B*40:01; PASD1; ENSG00000166049; CTA
AENISSLL

SEQ ID NO: 57899 - protein, 8 aa, Homo sapiens
  Table A; Target 57899; HLA-B*44:02; PASD1; ENSG00000166049; CTA
AENISSLL

SEQ ID NO: 57900 - protein, 8 aa, Homo sapiens
  Table A; Target 57900; HLA-B*44:03; PASD1; ENSG00000166049; CTA
AENISSLL

SEQ ID NO: 57901 - protein, 8 aa, Homo sapiens
  Table A; Target 57901; HLA-B*49:01; PASD1; ENSG00000166049; CTA
AENISSLL

SEQ ID NO: 57902 - protein, 9 aa, Homo sapiens
  Table A; Target 57902; HLA-B*49:01; PASD1; ENSG00000166049; CTA
AENISSLLG

SEQ ID NO: 57903 - protein, 11 aa, Homo sapiens
  Table A; Target 57903; HLA-A*30:01; PASD1; ENSG00000166049; CTA
AENISSLLGHL

SEQ ID NO: 57904 - protein, 11 aa, Homo sapiens
  Table A; Target 57904; HLA-B*40:01; PASD1; ENSG00000166049; CTA
AENISSLLGHL

SEQ ID NO: 57905 - protein, 11 aa, Homo sapiens
  Table A; Target 57905; HLA-B*44:02; PASD1; ENSG00000166049; CTA
AENISSLLGHL

SEQ ID NO: 57906 - protein, 11 aa, Homo sapiens
  Table A; Target 57906; HLA-B*44:03; PASD1; ENSG00000166049; CTA
AENISSLLGHL

SEQ ID NO: 57907 - protein, 11 aa, Homo sapiens
  Table A; Target 57907; HLA-B*49:01; PASD1; ENSG00000166049; CTA
AENISSLLGHL

SEQ ID NO: 57908 - protein, 8 aa, Homo sapiens
  Table A; Target 57908; HLA-B*37:01; PASD1; ENSG00000166049; CTA
AEQQPSGF

SEQ ID NO: 57909 - protein, 8 aa, Homo sapiens
  Table A; Target 57909; HLA-B*44:02; PASD1; ENSG00000166049; CTA
AEQQPSGF

SEQ ID NO: 57910 - protein, 8 aa, Homo sapiens
  Table A; Target 57910; HLA-B*44:03; PASD1; ENSG00000166049; CTA
AEQQPSGF

SEQ ID NO: 57911 - protein, 8 aa, Homo sapiens
  Table A; Target 57911; HLA-C*16:04; PASD1; ENSG00000166049; CTA
AEQQPSGF

SEQ ID NO: 57912 - protein, 9 aa, Homo sapiens
  Table A; Target 57912; HLA-A*30:02; PASD1; ENSG00000166049; CTA
AEQQPSGFY

SEQ ID NO: 57913 - protein, 9 aa, Homo sapiens
  Table A; Target 57913; HLA-B*15:01; PASD1; ENSG00000166049; CTA
AEQQPSGFY

SEQ ID NO: 57914 - protein, 9 aa, Homo sapiens
  Table A; Target 57914; HLA-B*15:03; PASD1; ENSG00000166049; CTA
AEQQPSGFY

SEQ ID NO: 57915 - protein, 9 aa, Homo sapiens
  Table A; Target 57915; HLA-B*27:02; PASD1; ENSG00000166049; CTA
AEQQPSGFY

SEQ ID NO: 57916 - protein, 9 aa, Homo sapiens
  Table A; Target 57916; HLA-B*37:01; PASD1; ENSG00000166049; CTA
AEQQPSGFY

SEQ ID NO: 57917 - protein, 9 aa, Homo sapiens
  Table A; Target 57917; HLA-B*44:02; PASD1; ENSG00000166049; CTA
AEQQPSGFY

SEQ ID NO: 57918 - protein, 9 aa, Homo sapiens
  Table A; Target 57918; HLA-B*44:03; PASD1; ENSG00000166049; CTA
AEQQPSGFY

SEQ ID NO: 57919 - protein, 9 aa, Homo sapiens
  Table A; Target 57919; HLA-C*16:04; PASD1; ENSG00000166049; CTA
AEQQPSGFY

SEQ ID NO: 57920 - protein, 10 aa, Homo sapiens
  Table A; Target 57920; HLA-B*44:02; PASD1; ENSG00000166049; CTA
AEQQPSGFYQ

SEQ ID NO: 57921 - protein, 9 aa, Homo sapiens
  Table A; Target 57921; HLA-B*37:01; PASD1; ENSG00000166049; CTA
AEQTRLMPA

SEQ ID NO: 57922 - protein, 8 aa, Homo sapiens
  Table A; Target 57922; HLA-A*30:02; PASD1; ENSG00000166049; CTA
AFQGPAAY

SEQ ID NO: 57923 - protein, 8 aa, Homo sapiens
  Table A; Target 57923; HLA-C*14:02; PASD1; ENSG00000166049; CTA
AFQGPAAY

SEQ ID NO: 57924 - protein, 8 aa, Homo sapiens
  Table A; Target 57924; HLA-B*08:01; PASD1; ENSG00000166049; CTA
AGQVKRPL

SEQ ID NO: 57925 - protein, 8 aa, Homo sapiens
  Table A; Target 57925; HLA-C*16:01; PASD1; ENSG00000166049; CTA
AGQVKRPL

SEQ ID NO: 57926 - protein, 9 aa, Homo sapiens
  Table A; Target 57926; HLA-C*01:02; PASD1; ENSG00000166049; CTA
AIQNQQNAL

SEQ ID NO: 57927 - protein, 9 aa, Homo sapiens
  Table A; Target 57927; HLA-C*14:02; PASD1; ENSG00000166049; CTA
AIQNQQNAL

SEQ ID NO: 57928 - protein, 10 aa, Homo sapiens
  Table A; Target 57928; HLA-A*25:01; PASD1; ENSG00000166049; CTA
AISSSSIPQF

SEQ ID NO: 57929 - protein, 10 aa, Homo sapiens
  Table A; Target 57929; HLA-A*26:01; PASD1; ENSG00000166049; CTA
AISSSSIPQF

SEQ ID NO: 57930 - protein, 9 aa, Homo sapiens
  Table A; Target 57930; HLA-A*03:02; PASD1; ENSG00000166049; CTA
AQPIVPVQR

SEQ ID NO: 57931 - protein, 9 aa, Homo sapiens
  Table A; Target 57931; HLA-A*11:01; PASD1; ENSG00000166049; CTA
AQPIVPVQR

SEQ ID NO: 57932 - protein, 9 aa, Homo sapiens
  Table A; Target 57932; HLA-A*31:01; PASD1; ENSG00000166049; CTA
AQPIVPVQR

SEQ ID NO: 57933 - protein, 9 aa, Homo sapiens
  Table A; Target 57933; HLA-A*33:03; PASD1; ENSG00000166049; CTA
AQPIVPVQR

SEQ ID NO: 57934 - protein, 9 aa, Homo sapiens
  Table A; Target 57934; HLA-A*68:01; PASD1; ENSG00000166049; CTA
AQPIVPVQR

SEQ ID NO: 57935 - protein, 9 aa, Homo sapiens
  Table A; Target 57935; HLA-B*13:02; PASD1; ENSG00000166049; CTA
AQPIVPVQR

SEQ ID NO: 57936 - protein, 9 aa, Homo sapiens
  Table A; Target 57936; HLA-B*27:05; PASD1; ENSG00000166049; CTA
AQPIVPVQR

SEQ ID NO: 57937 - protein, 9 aa, Homo sapiens
  Table A; Target 57937; HLA-C*07:06; PASD1; ENSG00000166049; CTA
AQPIVPVQR

SEQ ID NO: 57938 - protein, 8 aa, Homo sapiens
  Table A; Target 57938; HLA-B*56:01; PASD1; ENSG00000166049; CTA
AVYVEPAA

SEQ ID NO: 57939 - protein, 9 aa, Homo sapiens
  Table A; Target 57939; HLA-A*02:01; PASD1; ENSG00000166049; CTA
AVYVEPAAA

SEQ ID NO: 57940 - protein, 9 aa, Homo sapiens
  Table A; Target 57940; HLA-A*02:03; PASD1; ENSG00000166049; CTA
AVYVEPAAA

SEQ ID NO: 57941 - protein, 9 aa, Homo sapiens
  Table A; Target 57941; HLA-A*03:01; PASD1; ENSG00000166049; CTA
AVYVEPAAA

SEQ ID NO: 57942 - protein, 9 aa, Homo sapiens
  Table A; Target 57942; HLA-A*11:01; PASD1; ENSG00000166049; CTA
AVYVEPAAA

SEQ ID NO: 57943 - protein, 9 aa, Homo sapiens
  Table A; Target 57943; HLA-A*25:01; PASD1; ENSG00000166049; CTA
AVYVEPAAA

SEQ ID NO: 57944 - protein, 9 aa, Homo sapiens
  Table A; Target 57944; HLA-A*32:01; PASD1; ENSG00000166049; CTA
AVYVEPAAA

SEQ ID NO: 57945 - protein, 9 aa, Homo sapiens
  Table A; Target 57945; HLA-B*13:02; PASD1; ENSG00000166049; CTA
AVYVEPAAA

SEQ ID NO: 57946 - protein, 9 aa, Homo sapiens
  Table A; Target 57946; HLA-B*27:05; PASD1; ENSG00000166049; CTA
AVYVEPAAA

SEQ ID NO: 57947 - protein, 9 aa, Homo sapiens
  Table A; Target 57947; HLA-B*37:01; PASD1; ENSG00000166049; CTA
AVYVEPAAA

SEQ ID NO: 57948 - protein, 9 aa, Homo sapiens
  Table A; Target 57948; HLA-B*40:02; PASD1; ENSG00000166049; CTA
AVYVEPAAA

SEQ ID NO: 57949 - protein, 9 aa, Homo sapiens
  Table A; Target 57949; HLA-B*46:01; PASD1; ENSG00000166049; CTA
AVYVEPAAA

SEQ ID NO: 57950 - protein, 9 aa, Homo sapiens
  Table A; Target 57950; HLA-B*54:01; PASD1; ENSG00000166049; CTA
AVYVEPAAA

SEQ ID NO: 57951 - protein, 9 aa, Homo sapiens
  Table A; Target 57951; HLA-B*55:01; PASD1; ENSG00000166049; CTA
AVYVEPAAA

SEQ ID NO: 57952 - protein, 9 aa, Homo sapiens
  Table A; Target 57952; HLA-B*56:01; PASD1; ENSG00000166049; CTA
AVYVEPAAA

SEQ ID NO: 57953 - protein, 9 aa, Homo sapiens
  Table A; Target 57953; HLA-C*01:02; PASD1; ENSG00000166049; CTA
AVYVEPAAA

SEQ ID NO: 57954 - protein, 9 aa, Homo sapiens
  Table A; Target 57954; HLA-C*03:03; PASD1; ENSG00000166049; CTA
AVYVEPAAA

SEQ ID NO: 57955 - protein, 9 aa, Homo sapiens
  Table A; Target 57955; HLA-C*03:04; PASD1; ENSG00000166049; CTA
AVYVEPAAA

SEQ ID NO: 57956 - protein, 9 aa, Homo sapiens
  Table A; Target 57956; HLA-C*14:02; PASD1; ENSG00000166049; CTA
AVYVEPAAA

SEQ ID NO: 57957 - protein, 10 aa, Homo sapiens
  Table A; Target 57957; HLA-A*02:03; PASD1; ENSG00000166049; CTA
AVYVEPAAAA

SEQ ID NO: 57958 - protein, 10 aa, Homo sapiens
  Table A; Target 57958; HLA-A*03:01; PASD1; ENSG00000166049; CTA
AVYVEPAAAA

SEQ ID NO: 57959 - protein, 10 aa, Homo sapiens
  Table A; Target 57959; HLA-B*54:01; PASD1; ENSG00000166049; CTA
AVYVEPAAAA

SEQ ID NO: 57960 - protein, 10 aa, Homo sapiens
  Table A; Target 57960; HLA-B*56:01; PASD1; ENSG00000166049; CTA
AVYVEPAAAA

SEQ ID NO: 57961 - protein, 11 aa, Homo sapiens
  Table A; Target 57961; HLA-B*56:01; PASD1; ENSG00000166049; CTA
AVYVEPAAAAA

SEQ ID NO: 57962 - protein, 9 aa, Homo sapiens
  Table A; Target 57962; HLA-A*23:01; PASD1; ENSG00000166049; CTA
AYDIISQEL

SEQ ID NO: 57963 - protein, 9 aa, Homo sapiens
  Table A; Target 57963; HLA-A*24:02; PASD1; ENSG00000166049; CTA
AYDIISQEL

SEQ ID NO: 57964 - protein, 9 aa, Homo sapiens
  Table A; Target 57964; HLA-A*32:01; PASD1; ENSG00000166049; CTA
AYDIISQEL

SEQ ID NO: 57965 - protein, 9 aa, Homo sapiens
  Table A; Target 57965; HLA-B*35:01; PASD1; ENSG00000166049; CTA
AYDIISQEL

SEQ ID NO: 57966 - protein, 9 aa, Homo sapiens
  Table A; Target 57966; HLA-B*35:03; PASD1; ENSG00000166049; CTA
AYDIISQEL

SEQ ID NO: 57967 - protein, 9 aa, Homo sapiens
  Table A; Target 57967; HLA-B*38:01; PASD1; ENSG00000166049; CTA
AYDIISQEL

SEQ ID NO: 57968 - protein, 9 aa, Homo sapiens
  Table A; Target 57968; HLA-C*04:01; PASD1; ENSG00000166049; CTA
AYDIISQEL

SEQ ID NO: 57969 - protein, 9 aa, Homo sapiens
  Table A; Target 57969; HLA-C*05:01; PASD1; ENSG00000166049; CTA
AYDIISQEL

SEQ ID NO: 57970 - protein, 9 aa, Homo sapiens
  Table A; Target 57970; HLA-C*07:04; PASD1; ENSG00000166049; CTA
AYDIISQEL

SEQ ID NO: 57971 - protein, 9 aa, Homo sapiens
  Table A; Target 57971; HLA-C*14:02; PASD1; ENSG00000166049; CTA
AYDIISQEL

SEQ ID NO: 57972 - protein, 11 aa, Homo sapiens
  Table A; Target 57972; HLA-A*24:02; PASD1; ENSG00000166049; CTA
AYDIISQELEL

SEQ ID NO: 57973 - protein, 10 aa, Homo sapiens
  Table A; Target 57973; HLA-A*23:01; PASD1; ENSG00000166049; CTA
AYQGPPVNQL

SEQ ID NO: 57974 - protein, 10 aa, Homo sapiens
  Table A; Target 57974; HLA-A*24:02; PASD1; ENSG00000166049; CTA
AYQGPPVNQL

SEQ ID NO: 57975 - protein, 10 aa, Homo sapiens
  Table A; Target 57975; HLA-C*14:02; PASD1; ENSG00000166049; CTA
AYQGPPVNQL

SEQ ID NO: 57976 - protein, 10 aa, Homo sapiens
  Table A; Target 57976; HLA-C*14:02; PASD1; ENSG00000166049; CTA
AYQPDQMRSA

SEQ ID NO: 57977 - protein, 9 aa, Homo sapiens
  Table A; Target 57977; HLA-A*02:01; PASD1; ENSG00000166049; CTA
CVAENISSL

SEQ ID NO: 57978 - protein, 9 aa, Homo sapiens
  Table A; Target 57978; HLA-A*02:03; PASD1; ENSG00000166049; CTA
CVAENISSL

SEQ ID NO: 57979 - protein, 9 aa, Homo sapiens
  Table A; Target 57979; HLA-A*25:01; PASD1; ENSG00000166049; CTA
CVAENISSL

SEQ ID NO: 57980 - protein, 9 aa, Homo sapiens
  Table A; Target 57980; HLA-A*26:01; PASD1; ENSG00000166049; CTA
CVAENISSL

SEQ ID NO: 57981 - protein, 9 aa, Homo sapiens
  Table A; Target 57981; HLA-A*32:01; PASD1; ENSG00000166049; CTA
CVAENISSL

SEQ ID NO: 57982 - protein, 9 aa, Homo sapiens
  Table A; Target 57982; HLA-B*27:05; PASD1; ENSG00000166049; CTA
CVAENISSL

SEQ ID NO: 57983 - protein, 9 aa, Homo sapiens
  Table A; Target 57983; HLA-B*46:01; PASD1; ENSG00000166049; CTA
CVAENISSL

SEQ ID NO: 57984 - protein, 9 aa, Homo sapiens
  Table A; Target 57984; HLA-C*01:02; PASD1; ENSG00000166049; CTA
CVAENISSL

SEQ ID NO: 57985 - protein, 9 aa, Homo sapiens
  Table A; Target 57985; HLA-C*03:03; PASD1; ENSG00000166049; CTA
CVAENISSL

SEQ ID NO: 57986 - protein, 9 aa, Homo sapiens
  Table A; Target 57986; HLA-C*03:04; PASD1; ENSG00000166049; CTA
CVAENISSL

SEQ ID NO: 57987 - protein, 9 aa, Homo sapiens
  Table A; Target 57987; HLA-C*12:03; PASD1; ENSG00000166049; CTA
CVAENISSL

SEQ ID NO: 57988 - protein, 9 aa, Homo sapiens
  Table A; Target 57988; HLA-C*14:02; PASD1; ENSG00000166049; CTA
CVAENISSL

SEQ ID NO: 57989 - protein, 9 aa, Homo sapiens
  Table A; Target 57989; HLA-B*51:01; PASD1; ENSG00000166049; CTA
DAIQNQQNA

SEQ ID NO: 57990 - protein, 10 aa, Homo sapiens
  Table A; Target 57990; HLA-A*25:01; PASD1; ENSG00000166049; CTA
DAIQNQQNAL

SEQ ID NO: 57991 - protein, 10 aa, Homo sapiens
  Table A; Target 57991; HLA-A*68:01; PASD1; ENSG00000166049; CTA
DAIQNQQNAL

SEQ ID NO: 57992 - protein, 10 aa, Homo sapiens
  Table A; Target 57992; HLA-B*35:03; PASD1; ENSG00000166049; CTA
DAIQNQQNAL

SEQ ID NO: 57993 - protein, 10 aa, Homo sapiens
  Table A; Target 57993; HLA-B*51:01; PASD1; ENSG00000166049; CTA
DAIQNQQNAL

SEQ ID NO: 57994 - protein, 10 aa, Homo sapiens
  Table A; Target 57994; HLA-C*03:03; PASD1; ENSG00000166049; CTA
DAIQNQQNAL

SEQ ID NO: 57995 - protein, 10 aa, Homo sapiens
  Table A; Target 57995; HLA-C*03:04; PASD1; ENSG00000166049; CTA
DAIQNQQNAL

SEQ ID NO: 57996 - protein, 10 aa, Homo sapiens
  Table A; Target 57996; HLA-C*07:06; PASD1; ENSG00000166049; CTA
DAIQNQQNAL

SEQ ID NO: 57997 - protein, 8 aa, Homo sapiens
  Table A; Target 57997; HLA-B*18:01; PASD1; ENSG00000166049; CTA
DEEKDEVY

SEQ ID NO: 57998 - protein, 9 aa, Homo sapiens
  Table A; Target 57998; HLA-A*30:01; PASD1; ENSG00000166049; CTA
DEEPFVGEL

SEQ ID NO: 57999 - protein, 9 aa, Homo sapiens
  Table A; Target 57999; HLA-B*18:01; PASD1; ENSG00000166049; CTA
DEEPFVGEL

SEQ ID NO: 58000 - protein, 9 aa, Homo sapiens
  Table A; Target 58000; HLA-B*39:01; PASD1; ENSG00000166049; CTA
DEEPFVGEL

SEQ ID NO: 58001 - protein, 9 aa, Homo sapiens
  Table A; Target 58001; HLA-B*40:01; PASD1; ENSG00000166049; CTA
DEEPFVGEL

SEQ ID NO: 58002 - protein, 9 aa, Homo sapiens
  Table A; Target 58002; HLA-B*40:02; PASD1; ENSG00000166049; CTA
DEEPFVGEL

SEQ ID NO: 58003 - protein, 9 aa, Homo sapiens
  Table A; Target 58003; HLA-B*49:01; PASD1; ENSG00000166049; CTA
DEEPFVGEL

SEQ ID NO: 58004 - protein, 11 aa, Homo sapiens
  Table A; Target 58004; HLA-B*18:01; PASD1; ENSG00000166049; CTA
DESQSFYPEAY

SEQ ID NO: 58005 - protein, 9 aa, Homo sapiens
  Table A; Target 58005; HLA-B*18:01; PASD1; ENSG00000166049; CTA
DEVYQKIIL

SEQ ID NO: 58006 - protein, 10 aa, Homo sapiens
  Table A; Target 58006; HLA-B*38:01; PASD1; ENSG00000166049; CTA
DHLQKQPNTL

SEQ ID NO: 58007 - protein, 10 aa, Homo sapiens
  Table A; Target 58007; HLA-B*39:01; PASD1; ENSG00000166049; CTA
DHLQKQPNTL

SEQ ID NO: 58008 - protein, 8 aa, Homo sapiens
  Table A; Target 58008; HLA-A*26:01; PASD1; ENSG00000166049; CTA
DIAEVEQY

SEQ ID NO: 58009 - protein, 8 aa, Homo sapiens
  Table A; Target 58009; HLA-B*18:01; PASD1; ENSG00000166049; CTA
DIAEVEQY

SEQ ID NO: 58010 - protein, 10 aa, Homo sapiens
  Table A; Target 58010; HLA-A*25:01; PASD1; ENSG00000166049; CTA
DICNEFPVVF

SEQ ID NO: 58011 - protein, 9 aa, Homo sapiens
  Table A; Target 58011; HLA-A*25:01; PASD1; ENSG00000166049; CTA
DIISQELEL

SEQ ID NO: 58012 - protein, 9 aa, Homo sapiens
  Table A; Target 58012; HLA-A*26:01; PASD1; ENSG00000166049; CTA
DIISQELEL

SEQ ID NO: 58013 - protein, 9 aa, Homo sapiens
  Table A; Target 58013; HLA-B*35:03; PASD1; ENSG00000166049; CTA
DIISQELEL

SEQ ID NO: 58014 - protein, 10 aa, Homo sapiens
  Table A; Target 58014; HLA-A*25:01; PASD1; ENSG00000166049; CTA
DIISQELELM

SEQ ID NO: 58015 - protein, 10 aa, Homo sapiens
  Table A; Target 58015; HLA-A*26:01; PASD1; ENSG00000166049; CTA
DIISQELELM

SEQ ID NO: 58016 - protein, 10 aa, Homo sapiens
  Table A; Target 58016; HLA-A*03:02; PASD1; ENSG00000166049; CTA
DLQSSEAVPK

SEQ ID NO: 58017 - protein, 10 aa, Homo sapiens
  Table A; Target 58017; HLA-A*11:01; PASD1; ENSG00000166049; CTA
DLQSSEAVPK

SEQ ID NO: 58018 - protein, 10 aa, Homo sapiens
  Table A; Target 58018; HLA-A*33:01; PASD1; ENSG00000166049; CTA
DLQSSEAVPK

SEQ ID NO: 58019 - protein, 10 aa, Homo sapiens
  Table A; Target 58019; HLA-A*68:01; PASD1; ENSG00000166049; CTA
DLQSSEAVPK

SEQ ID NO: 58020 - protein, 10 aa, Homo sapiens
  Table A; Target 58020; HLA-B*27:02; PASD1; ENSG00000166049; CTA
DLQSSEAVPK

SEQ ID NO: 58021 - protein, 10 aa, Homo sapiens
  Table A; Target 58021; HLA-C*07:06; PASD1; ENSG00000166049; CTA
DLQSSEAVPK

SEQ ID NO: 58022 - protein, 11 aa, Homo sapiens
  Table A; Target 58022; HLA-A*03:02; PASD1; ENSG00000166049; CTA
DLQSSEAVPKK

SEQ ID NO: 58023 - protein, 11 aa, Homo sapiens
  Table A; Target 58023; HLA-A*11:01; PASD1; ENSG00000166049; CTA
DLQSSEAVPKK

SEQ ID NO: 58024 - protein, 11 aa, Homo sapiens
  Table A; Target 58024; HLA-A*33:01; PASD1; ENSG00000166049; CTA
DLQSSEAVPKK

SEQ ID NO: 58025 - protein, 11 aa, Homo sapiens
  Table A; Target 58025; HLA-A*68:01; PASD1; ENSG00000166049; CTA
DLQSSEAVPKK

SEQ ID NO: 58026 - protein, 9 aa, Homo sapiens
  Table A; Target 58026; HLA-B*35:03; PASD1; ENSG00000166049; CTA
DPENPVAPL

SEQ ID NO: 58027 - protein, 9 aa, Homo sapiens
  Table A; Target 58027; HLA-B*35:01; PASD1; ENSG00000166049; CTA
DPVDLEFSV

SEQ ID NO: 58028 - protein, 9 aa, Homo sapiens
  Table A; Target 58028; HLA-B*35:03; PASD1; ENSG00000166049; CTA
DPVDLEFSV

SEQ ID NO: 58029 - protein, 9 aa, Homo sapiens
  Table A; Target 58029; HLA-B*51:01; PASD1; ENSG00000166049; CTA
DPVDLEFSV

SEQ ID NO: 58030 - protein, 9 aa, Homo sapiens
  Table A; Target 58030; HLA-B*54:01; PASD1; ENSG00000166049; CTA
DPVDLEFSV

SEQ ID NO: 58031 - protein, 9 aa, Homo sapiens
  Table A; Target 58031; HLA-B*56:01; PASD1; ENSG00000166049; CTA
DPVDLEFSV

SEQ ID NO: 58032 - protein, 9 aa, Homo sapiens
  Table A; Target 58032; HLA-B*35:03; PASD1; ENSG00000166049; CTA
DPVDPEDSV

SEQ ID NO: 58033 - protein, 9 aa, Homo sapiens
  Table A; Target 58033; HLA-B*51:01; PASD1; ENSG00000166049; CTA
DPVDPEDSV

SEQ ID NO: 58034 - protein, 11 aa, Homo sapiens
  Table A; Target 58034; HLA-B*35:03; PASD1; ENSG00000166049; CTA
DPVDPEDSVDL

SEQ ID NO: 58035 - protein, 8 aa, Homo sapiens
  Table A; Target 58035; HLA-B*18:01; PASD1; ENSG00000166049; CTA
DQIDIAEV

SEQ ID NO: 58036 - protein, 11 aa, Homo sapiens
  Table A; Target 58036; HLA-A*25:01; PASD1; ENSG00000166049; CTA
DQIDIAEVEQY

SEQ ID NO: 58037 - protein, 11 aa, Homo sapiens
  Table A; Target 58037; HLA-A*26:01; PASD1; ENSG00000166049; CTA
DQIDIAEVEQY

SEQ ID NO: 58038 - protein, 11 aa, Homo sapiens
  Table A; Target 58038; HLA-A*30:02; PASD1; ENSG00000166049; CTA
DQIDIAEVEQY

SEQ ID NO: 58039 - protein, 11 aa, Homo sapiens
  Table A; Target 58039; HLA-B*15:01; PASD1; ENSG00000166049; CTA
DQIDIAEVEQY

SEQ ID NO: 58040 - protein, 11 aa, Homo sapiens
  Table A; Target 58040; HLA-B*18:01; PASD1; ENSG00000166049; CTA
DQIDIAEVEQY

SEQ ID NO: 58041 - protein, 11 aa, Homo sapiens
  Table A; Target 58041; HLA-B*27:05; PASD1; ENSG00000166049; CTA
DQIDIAEVEQY

SEQ ID NO: 58042 - protein, 11 aa, Homo sapiens
  Table A; Target 58042; HLA-B*35:01; PASD1; ENSG00000166049; CTA
DQIDIAEVEQY

SEQ ID NO: 58043 - protein, 11 aa, Homo sapiens
  Table A; Target 58043; HLA-C*07:06; PASD1; ENSG00000166049; CTA
DQIDIAEVEQY

SEQ ID NO: 58044 - protein, 9 aa, Homo sapiens
  Table A; Target 58044; HLA-B*39:01; PASD1; ENSG00000166049; CTA
DQQDPENPV

SEQ ID NO: 58045 - protein, 9 aa, Homo sapiens
  Table A; Target 58045; HLA-A*26:01; PASD1; ENSG00000166049; CTA
DSLGPVVQV

SEQ ID NO: 58046 - protein, 9 aa, Homo sapiens
  Table A; Target 58046; HLA-A*33:01; PASD1; ENSG00000166049; CTA
DSLGPVVQV

SEQ ID NO: 58047 - protein, 9 aa, Homo sapiens
  Table A; Target 58047; HLA-A*33:03; PASD1; ENSG00000166049; CTA
DSLGPVVQV

SEQ ID NO: 58048 - protein, 9 aa, Homo sapiens
  Table A; Target 58048; HLA-A*68:02; PASD1; ENSG00000166049; CTA
DSLGPVVQV

SEQ ID NO: 58049 - protein, 9 aa, Homo sapiens
  Table A; Target 58049; HLA-B*51:01; PASD1; ENSG00000166049; CTA
DSLGPVVQV

SEQ ID NO: 58050 - protein, 9 aa, Homo sapiens
  Table A; Target 58050; HLA-A*68:01; PASD1; ENSG00000166049; CTA
DSSAYENVK

SEQ ID NO: 58051 - protein, 10 aa, Homo sapiens
  Table A; Target 58051; HLA-A*33:01; PASD1; ENSG00000166049; CTA
DSSAYENVKF

SEQ ID NO: 58052 - protein, 10 aa, Homo sapiens
  Table A; Target 58052; HLA-C*12:03; PASD1; ENSG00000166049; CTA
DSSAYENVKF

SEQ ID NO: 58053 - protein, 9 aa, Homo sapiens
  Table A; Target 58053; HLA-A*23:01; PASD1; ENSG00000166049; CTA
DTMPESPAL

SEQ ID NO: 58054 - protein, 9 aa, Homo sapiens
  Table A; Target 58054; HLA-A*25:01; PASD1; ENSG00000166049; CTA
DTMPESPAL

SEQ ID NO: 58055 - protein, 9 aa, Homo sapiens
  Table A; Target 58055; HLA-A*26:01; PASD1; ENSG00000166049; CTA
DTMPESPAL

SEQ ID NO: 58056 - protein, 9 aa, Homo sapiens
  Table A; Target 58056; HLA-A*33:01; PASD1; ENSG00000166049; CTA
DTMPESPAL

SEQ ID NO: 58057 - protein, 9 aa, Homo sapiens
  Table A; Target 58057; HLA-A*33:03; PASD1; ENSG00000166049; CTA
DTMPESPAL

SEQ ID NO: 58058 - protein, 9 aa, Homo sapiens
  Table A; Target 58058; HLA-A*68:01; PASD1; ENSG00000166049; CTA
DTMPESPAL

SEQ ID NO: 58059 - protein, 9 aa, Homo sapiens
  Table A; Target 58059; HLA-A*68:02; PASD1; ENSG00000166049; CTA
DTMPESPAL

SEQ ID NO: 58060 - protein, 9 aa, Homo sapiens
  Table A; Target 58060; HLA-B*08:01; PASD1; ENSG00000166049; CTA
DTMPESPAL

SEQ ID NO: 58061 - protein, 9 aa, Homo sapiens
  Table A; Target 58061; HLA-B*18:01; PASD1; ENSG00000166049; CTA
DTMPESPAL

SEQ ID NO: 58062 - protein, 9 aa, Homo sapiens
  Table A; Target 58062; HLA-B*27:02; PASD1; ENSG00000166049; CTA
DTMPESPAL

SEQ ID NO: 58063 - protein, 9 aa, Homo sapiens
  Table A; Target 58063; HLA-B*27:05; PASD1; ENSG00000166049; CTA
DTMPESPAL

SEQ ID NO: 58064 - protein, 9 aa, Homo sapiens
  Table A; Target 58064; HLA-B*35:01; PASD1; ENSG00000166049; CTA
DTMPESPAL

SEQ ID NO: 58065 - protein, 9 aa, Homo sapiens
  Table A; Target 58065; HLA-B*35:03; PASD1; ENSG00000166049; CTA
DTMPESPAL

SEQ ID NO: 58066 - protein, 9 aa, Homo sapiens
  Table A; Target 58066; HLA-B*38:01; PASD1; ENSG00000166049; CTA
DTMPESPAL

SEQ ID NO: 58067 - protein, 9 aa, Homo sapiens
  Table A; Target 58067; HLA-B*39:01; PASD1; ENSG00000166049; CTA
DTMPESPAL

SEQ ID NO: 58068 - protein, 9 aa, Homo sapiens
  Table A; Target 58068; HLA-B*40:01; PASD1; ENSG00000166049; CTA
DTMPESPAL

SEQ ID NO: 58069 - protein, 9 aa, Homo sapiens
  Table A; Target 58069; HLA-B*40:02; PASD1; ENSG00000166049; CTA
DTMPESPAL

SEQ ID NO: 58070 - protein, 9 aa, Homo sapiens
  Table A; Target 58070; HLA-B*51:01; PASD1; ENSG00000166049; CTA
DTMPESPAL

SEQ ID NO: 58071 - protein, 9 aa, Homo sapiens
  Table A; Target 58071; HLA-B*58:01; PASD1; ENSG00000166049; CTA
DTMPESPAL

SEQ ID NO: 58072 - protein, 9 aa, Homo sapiens
  Table A; Target 58072; HLA-C*01:02; PASD1; ENSG00000166049; CTA
DTMPESPAL

SEQ ID NO: 58073 - protein, 9 aa, Homo sapiens
  Table A; Target 58073; HLA-C*03:03; PASD1; ENSG00000166049; CTA
DTMPESPAL

SEQ ID NO: 58074 - protein, 9 aa, Homo sapiens
  Table A; Target 58074; HLA-C*03:04; PASD1; ENSG00000166049; CTA
DTMPESPAL

SEQ ID NO: 58075 - protein, 9 aa, Homo sapiens
  Table A; Target 58075; HLA-C*05:01; PASD1; ENSG00000166049; CTA
DTMPESPAL

SEQ ID NO: 58076 - protein, 9 aa, Homo sapiens
  Table A; Target 58076; HLA-C*07:04; PASD1; ENSG00000166049; CTA
DTMPESPAL

SEQ ID NO: 58077 - protein, 9 aa, Homo sapiens
  Table A; Target 58077; HLA-C*07:06; PASD1; ENSG00000166049; CTA
DTMPESPAL

SEQ ID NO: 58078 - protein, 9 aa, Homo sapiens
  Table A; Target 58078; HLA-C*16:01; PASD1; ENSG00000166049; CTA
DTMPESPAL

SEQ ID NO: 58079 - protein, 11 aa, Homo sapiens
  Table A; Target 58079; HLA-A*25:01; PASD1; ENSG00000166049; CTA
DTMPESPALSL

SEQ ID NO: 58080 - protein, 11 aa, Homo sapiens
  Table A; Target 58080; HLA-A*26:01; PASD1; ENSG00000166049; CTA
DTMPESPALSL

SEQ ID NO: 58081 - protein, 11 aa, Homo sapiens
  Table A; Target 58081; HLA-A*33:01; PASD1; ENSG00000166049; CTA
DTMPESPALSL

SEQ ID NO: 58082 - protein, 11 aa, Homo sapiens
  Table A; Target 58082; HLA-A*33:03; PASD1; ENSG00000166049; CTA
DTMPESPALSL

SEQ ID NO: 58083 - protein, 11 aa, Homo sapiens
  Table A; Target 58083; HLA-A*68:01; PASD1; ENSG00000166049; CTA
DTMPESPALSL

SEQ ID NO: 58084 - protein, 11 aa, Homo sapiens
  Table A; Target 58084; HLA-C*07:06; PASD1; ENSG00000166049; CTA
DTMPESPALSL

SEQ ID NO: 58085 - protein, 9 aa, Homo sapiens
  Table A; Target 58085; HLA-A*33:01; PASD1; ENSG00000166049; CTA
DVSVPLCNH

SEQ ID NO: 58086 - protein, 8 aa, Homo sapiens
  Table A; Target 58086; HLA-A*23:01; PASD1; ENSG00000166049; CTA
DYFNQVTL

SEQ ID NO: 58087 - protein, 8 aa, Homo sapiens
  Table A; Target 58087; HLA-C*14:02; PASD1; ENSG00000166049; CTA
DYFNQVTL

SEQ ID NO: 58088 - protein, 10 aa, Homo sapiens
  Table A; Target 58088; HLA-A*23:01; PASD1; ENSG00000166049; CTA
DYFNQVTLQL

SEQ ID NO: 58089 - protein, 9 aa, Homo sapiens
  Table A; Target 58089; HLA-A*24:02; PASD1; ENSG00000166049; CTA
DYIRLWQEL

SEQ ID NO: 58090 - protein, 8 aa, Homo sapiens
  Table A; Target 58090; HLA-B*51:01; PASD1; ENSG00000166049; CTA
EAISSSSI

SEQ ID NO: 58091 - protein, 11 aa, Homo sapiens
  Table A; Target 58091; HLA-A*23:01; PASD1; ENSG00000166049; CTA
EAISSSSIPQF

SEQ ID NO: 58092 - protein, 11 aa, Homo sapiens
  Table A; Target 58092; HLA-A*25:01; PASD1; ENSG00000166049; CTA
EAISSSSIPQF

SEQ ID NO: 58093 - protein, 11 aa, Homo sapiens
  Table A; Target 58093; HLA-A*26:01; PASD1; ENSG00000166049; CTA
EAISSSSIPQF

SEQ ID NO: 58094 - protein, 11 aa, Homo sapiens
  Table A; Target 58094; HLA-A*68:01; PASD1; ENSG00000166049; CTA
EAISSSSIPQF

SEQ ID NO: 58095 - protein, 11 aa, Homo sapiens
  Table A; Target 58095; HLA-B*35:01; PASD1; ENSG00000166049; CTA
EAISSSSIPQF

SEQ ID NO: 58096 - protein, 11 aa, Homo sapiens
  Table A; Target 58096; HLA-B*58:01; PASD1; ENSG00000166049; CTA
EAISSSSIPQF

SEQ ID NO: 58097 - protein, 9 aa, Homo sapiens
  Table A; Target 58097; HLA-A*33:03; PASD1; ENSG00000166049; CTA
EAVPKKQQK

SEQ ID NO: 58098 - protein, 9 aa, Homo sapiens
  Table A; Target 58098; HLA-A*68:01; PASD1; ENSG00000166049; CTA
EAVPKKQQK

SEQ ID NO: 58099 - protein, 8 aa, Homo sapiens
  Table A; Target 58099; HLA-B*51:01; PASD1; ENSG00000166049; CTA
EAYQGPPV

SEQ ID NO: 58100 - protein, 11 aa, Homo sapiens
  Table A; Target 58100; HLA-A*25:01; PASD1; ENSG00000166049; CTA
EAYQGPPVNQL

SEQ ID NO: 58101 - protein, 11 aa, Homo sapiens
  Table A; Target 58101; HLA-A*26:01; PASD1; ENSG00000166049; CTA
EAYQGPPVNQL

SEQ ID NO: 58102 - protein, 11 aa, Homo sapiens
  Table A; Target 58102; HLA-A*68:01; PASD1; ENSG00000166049; CTA
EAYQGPPVNQL

SEQ ID NO: 58103 - protein, 9 aa, Homo sapiens
  Table A; Target 58103; HLA-B*40:01; PASD1; ENSG00000166049; CTA
EEEQQKQQL

SEQ ID NO: 58104 - protein, 9 aa, Homo sapiens
  Table A; Target 58104; HLA-B*44:02; PASD1; ENSG00000166049; CTA
EEEQQKQQL

SEQ ID NO: 58105 - protein, 9 aa, Homo sapiens
  Table A; Target 58105; HLA-B*44:03; PASD1; ENSG00000166049; CTA
EEEQQKQQL

SEQ ID NO: 58106 - protein, 10 aa, Homo sapiens
  Table A; Target 58106; HLA-B*44:02; PASD1; ENSG00000166049; CTA
EEKDEVYQKI

SEQ ID NO: 58107 - protein, 10 aa, Homo sapiens
  Table A; Target 58107; HLA-B*44:03; PASD1; ENSG00000166049; CTA
EEKDEVYQKI

SEQ ID NO: 58108 - protein, 9 aa, Homo sapiens
  Table A; Target 58108; HLA-A*23:01; PASD1; ENSG00000166049; CTA
EFPVVFSGL

SEQ ID NO: 58109 - protein, 9 aa, Homo sapiens
  Table A; Target 58109; HLA-A*24:02; PASD1; ENSG00000166049; CTA
EFPVVFSGL

SEQ ID NO: 58110 - protein, 9 aa, Homo sapiens
  Table A; Target 58110; HLA-A*26:01; PASD1; ENSG00000166049; CTA
EFPVVFSGL

SEQ ID NO: 58111 - protein, 9 aa, Homo sapiens
  Table A; Target 58111; HLA-C*01:02; PASD1; ENSG00000166049; CTA
EFPVVFSGL

SEQ ID NO: 58112 - protein, 9 aa, Homo sapiens
  Table A; Target 58112; HLA-A*25:01; PASD1; ENSG00000166049; CTA
EGPPDPQAF

SEQ ID NO: 58113 - protein, 8 aa, Homo sapiens
  Table A; Target 58113; HLA-B*08:01; PASD1; ENSG00000166049; CTA
EIVGKKLL

SEQ ID NO: 58114 - protein, 10 aa, Homo sapiens
  Table A; Target 58114; HLA-A*25:01; PASD1; ENSG00000166049; CTA
EIVGKKLLSL

SEQ ID NO: 58115 - protein, 9 aa, Homo sapiens
  Table A; Target 58115; HLA-A*25:01; PASD1; ENSG00000166049; CTA
ELQEPCVAF

SEQ ID NO: 58116 - protein, 9 aa, Homo sapiens
  Table A; Target 58116; HLA-A*26:01; PASD1; ENSG00000166049; CTA
ELQEPCVAF

SEQ ID NO: 58117 - protein, 9 aa, Homo sapiens
  Table A; Target 58117; HLA-A*33:03; PASD1; ENSG00000166049; CTA
ELQEPCVAF

SEQ ID NO: 58118 - protein, 9 aa, Homo sapiens
  Table A; Target 58118; HLA-A*33:03; PASD1; ENSG00000166049; CTA
ELSSSQGQR

SEQ ID NO: 58119 - protein, 9 aa, Homo sapiens
  Table A; Target 58119; HLA-A*26:01; PASD1; ENSG00000166049; CTA
ENISSLLGH

SEQ ID NO: 58120 - protein, 9 aa, Homo sapiens
  Table A; Target 58120; HLA-A*68:02; PASD1; ENSG00000166049; CTA
ENVKFIVNV

SEQ ID NO: 58121 - protein, 10 aa, Homo sapiens
  Table A; Target 58121; HLA-A*33:03; PASD1; ENSG00000166049; CTA
ENVKFIVNVR

SEQ ID NO: 58122 - protein, 9 aa, Homo sapiens
  Table A; Target 58122; HLA-B*35:03; PASD1; ENSG00000166049; CTA
EPAAAAAAA

SEQ ID NO: 58123 - protein, 9 aa, Homo sapiens
  Table A; Target 58123; HLA-B*54:01; PASD1; ENSG00000166049; CTA
EPAAAAAAA

SEQ ID NO: 58124 - protein, 9 aa, Homo sapiens
  Table A; Target 58124; HLA-B*56:01; PASD1; ENSG00000166049; CTA
EPAAAAAAA

SEQ ID NO: 58125 - protein, 8 aa, Homo sapiens
  Table A; Target 58125; HLA-A*01:01; PASD1; ENSG00000166049; CTA
EPEVNPLY

SEQ ID NO: 58126 - protein, 8 aa, Homo sapiens
  Table A; Target 58126; HLA-B*35:01; PASD1; ENSG00000166049; CTA
EPEVNPLY

SEQ ID NO: 58127 - protein, 8 aa, Homo sapiens
  Table A; Target 58127; HLA-B*55:01; PASD1; ENSG00000166049; CTA
EPEVNPLY

SEQ ID NO: 58128 - protein, 8 aa, Homo sapiens
  Table A; Target 58128; HLA-C*03:03; PASD1; ENSG00000166049; CTA
EPEVNPLY

SEQ ID NO: 58129 - protein, 9 aa, Homo sapiens
  Table A; Target 58129; HLA-A*33:03; PASD1; ENSG00000166049; CTA
EPEVNPLYR

SEQ ID NO: 58130 - protein, 9 aa, Homo sapiens
  Table A; Target 58130; HLA-A*68:01; PASD1; ENSG00000166049; CTA
EPEVNPLYR

SEQ ID NO: 58131 - protein, 9 aa, Homo sapiens
  Table A; Target 58131; HLA-C*07:06; PASD1; ENSG00000166049; CTA
EPEVNPLYR

SEQ ID NO: 58132 - protein, 11 aa, Homo sapiens
  Table A; Target 58132; HLA-A*26:01; PASD1; ENSG00000166049; CTA
EQGTLHGQPTY

SEQ ID NO: 58133 - protein, 9 aa, Homo sapiens
  Table A; Target 58133; HLA-A*33:03; PASD1; ENSG00000166049; CTA
EQHLKEQQR

SEQ ID NO: 58134 - protein, 8 aa, Homo sapiens
  Table A; Target 58134; HLA-B*08:01; PASD1; ENSG00000166049; CTA
EQPLKHNV

SEQ ID NO: 58135 - protein, 9 aa, Homo sapiens
  Table A; Target 58135; HLA-B*08:01; PASD1; ENSG00000166049; CTA
EQPLKHNVI

SEQ ID NO: 58136 - protein, 8 aa, Homo sapiens
  Table A; Target 58136; HLA-A*30:02; PASD1; ENSG00000166049; CTA
EQQPSGFY

SEQ ID NO: 58137 - protein, 8 aa, Homo sapiens
  Table A; Target 58137; HLA-B*39:01; PASD1; ENSG00000166049; CTA
EQQPSGFY

SEQ ID NO: 58138 - protein, 9 aa, Homo sapiens
  Table A; Target 58138; HLA-A*30:01; PASD1; ENSG00000166049; CTA
EQYGPQENV

SEQ ID NO: 58139 - protein, 9 aa, Homo sapiens
  Table A; Target 58139; HLA-B*13:02; PASD1; ENSG00000166049; CTA
EQYGPQENV

SEQ ID NO: 58140 - protein, 9 aa, Homo sapiens
  Table A; Target 58140; HLA-B*39:01; PASD1; ENSG00000166049; CTA
EQYGPQENV

SEQ ID NO: 58141 - protein, 9 aa, Homo sapiens
  Table A; Target 58141; HLA-C*06:02; PASD1; ENSG00000166049; CTA
EQYGPQENV

SEQ ID NO: 58142 - protein, 11 aa, Homo sapiens
  Table A; Target 58142; HLA-A*26:01; PASD1; ENSG00000166049; CTA
EQYGPQENVHM

SEQ ID NO: 58143 - protein, 11 aa, Homo sapiens
  Table A; Target 58143; HLA-B*27:05; PASD1; ENSG00000166049; CTA
EQYGPQENVHM

SEQ ID NO: 58144 - protein, 11 aa, Homo sapiens
  Table A; Target 58144; HLA-B*38:01; PASD1; ENSG00000166049; CTA
EQYGPQENVHM

SEQ ID NO: 58145 - protein, 11 aa, Homo sapiens
  Table A; Target 58145; HLA-B*39:01; PASD1; ENSG00000166049; CTA
EQYGPQENVHM

SEQ ID NO: 58146 - protein, 10 aa, Homo sapiens
  Table A; Target 58146; HLA-A*26:01; PASD1; ENSG00000166049; CTA
ESPALSLQDF

SEQ ID NO: 58147 - protein, 10 aa, Homo sapiens
  Table A; Target 58147; HLA-A*01:01; PASD1; ENSG00000166049; CTA
ESQSFYPEAY

SEQ ID NO: 58148 - protein, 10 aa, Homo sapiens
  Table A; Target 58148; HLA-A*25:01; PASD1; ENSG00000166049; CTA
ESQSFYPEAY

SEQ ID NO: 58149 - protein, 10 aa, Homo sapiens
  Table A; Target 58149; HLA-A*26:01; PASD1; ENSG00000166049; CTA
ESQSFYPEAY

SEQ ID NO: 58150 - protein, 10 aa, Homo sapiens
  Table A; Target 58150; HLA-A*30:02; PASD1; ENSG00000166049; CTA
ESQSFYPEAY

SEQ ID NO: 58151 - protein, 9 aa, Homo sapiens
  Table A; Target 58151; HLA-A*68:02; PASD1; ENSG00000166049; CTA
ETPQDYIRL

SEQ ID NO: 58152 - protein, 10 aa, Homo sapiens
  Table A; Target 58152; HLA-A*25:01; PASD1; ENSG00000166049; CTA
ETPQDYIRLW

SEQ ID NO: 58153 - protein, 10 aa, Homo sapiens
  Table A; Target 58153; HLA-B*44:02; PASD1; ENSG00000166049; CTA
ETPQDYIRLW

SEQ ID NO: 58154 - protein, 10 aa, Homo sapiens
  Table A; Target 58154; HLA-B*57:01; PASD1; ENSG00000166049; CTA
ETPQDYIRLW

SEQ ID NO: 58155 - protein, 11 aa, Homo sapiens
  Table A; Target 58155; HLA-A*68:02; PASD1; ENSG00000166049; CTA
EVEQYGPQENV

SEQ ID NO: 58156 - protein, 8 aa, Homo sapiens
  Table A; Target 58156; HLA-B*08:01; PASD1; ENSG00000166049; CTA
EVYQKIIL

SEQ ID NO: 58157 - protein, 9 aa, Homo sapiens
  Table A; Target 58157; HLA-A*03:01; PASD1; ENSG00000166049; CTA
EVYQKIILK

SEQ ID NO: 58158 - protein, 9 aa, Homo sapiens
  Table A; Target 58158; HLA-A*11:01; PASD1; ENSG00000166049; CTA
EVYQKIILK

SEQ ID NO: 58159 - protein, 9 aa, Homo sapiens
  Table A; Target 58159; HLA-A*26:01; PASD1; ENSG00000166049; CTA
EVYQKIILK

SEQ ID NO: 58160 - protein, 9 aa, Homo sapiens
  Table A; Target 58160; HLA-A*33:01; PASD1; ENSG00000166049; CTA
EVYQKIILK

SEQ ID NO: 58161 - protein, 9 aa, Homo sapiens
  Table A; Target 58161; HLA-A*33:03; PASD1; ENSG00000166049; CTA
EVYQKIILK

SEQ ID NO: 58162 - protein, 9 aa, Homo sapiens
  Table A; Target 58162; HLA-A*68:01; PASD1; ENSG00000166049; CTA
EVYQKIILK

SEQ ID NO: 58163 - protein, 9 aa, Homo sapiens
  Table A; Target 58163; HLA-C*07:06; PASD1; ENSG00000166049; CTA
EVYQKIILK

SEQ ID NO: 58164 - protein, 10 aa, Homo sapiens
  Table A; Target 58164; HLA-A*25:01; PASD1; ENSG00000166049; CTA
EVYQKIILKF

SEQ ID NO: 58165 - protein, 10 aa, Homo sapiens
  Table A; Target 58165; HLA-A*26:01; PASD1; ENSG00000166049; CTA
EVYQKIILKF

SEQ ID NO: 58166 - protein, 10 aa, Homo sapiens
  Table A; Target 58166; HLA-A*33:01; PASD1; ENSG00000166049; CTA
EVYQKIILKF

SEQ ID NO: 58167 - protein, 10 aa, Homo sapiens
  Table A; Target 58167; HLA-A*33:03; PASD1; ENSG00000166049; CTA
EVYQKIILKF

SEQ ID NO: 58168 - protein, 10 aa, Homo sapiens
  Table A; Target 58168; HLA-A*68:02; PASD1; ENSG00000166049; CTA
EVYQKIILKF

SEQ ID NO: 58169 - protein, 11 aa, Homo sapiens
  Table A; Target 58169; HLA-A*02:01; PASD1; ENSG00000166049; CTA
FLDTMPESPAL

SEQ ID NO: 58170 - protein, 11 aa, Homo sapiens
  Table A; Target 58170; HLA-A*02:07; PASD1; ENSG00000166049; CTA
FLDTMPESPAL

SEQ ID NO: 58171 - protein, 11 aa, Homo sapiens
  Table A; Target 58171; HLA-B*38:01; PASD1; ENSG00000166049; CTA
FLDTMPESPAL

SEQ ID NO: 58172 - protein, 10 aa, Homo sapiens
  Table A; Target 58172; HLA-A*02:01; PASD1; ENSG00000166049; CTA
FLQAQPIVPV

SEQ ID NO: 58173 - protein, 10 aa, Homo sapiens
  Table A; Target 58173; HLA-A*02:03; PASD1; ENSG00000166049; CTA
FLQAQPIVPV

SEQ ID NO: 58174 - protein, 10 aa, Homo sapiens
  Table A; Target 58174; HLA-A*02:01; PASD1; ENSG00000166049; CTA
FMITLSTDGV

SEQ ID NO: 58175 - protein, 10 aa, Homo sapiens
  Table A; Target 58175; HLA-A*02:03; PASD1; ENSG00000166049; CTA
FMITLSTDGV

SEQ ID NO: 58176 - protein, 9 aa, Homo sapiens
  Table A; Target 58176; HLA-B*35:01; PASD1; ENSG00000166049; CTA
FPITSDSTI

SEQ ID NO: 58177 - protein, 9 aa, Homo sapiens
  Table A; Target 58177; HLA-B*35:03; PASD1; ENSG00000166049; CTA
FPITSDSTI

SEQ ID NO: 58178 - protein, 9 aa, Homo sapiens
  Table A; Target 58178; HLA-B*51:01; PASD1; ENSG00000166049; CTA
FPITSDSTI

SEQ ID NO: 58179 - protein, 9 aa, Homo sapiens
  Table A; Target 58179; HLA-B*54:01; PASD1; ENSG00000166049; CTA
FPITSDSTI

SEQ ID NO: 58180 - protein, 9 aa, Homo sapiens
  Table A; Target 58180; HLA-B*56:01; PASD1; ENSG00000166049; CTA
FPITSDSTI

SEQ ID NO: 58181 - protein, 9 aa, Homo sapiens
  Table A; Target 58181; HLA-C*03:03; PASD1; ENSG00000166049; CTA
FPITSDSTI

SEQ ID NO: 58182 - protein, 9 aa, Homo sapiens
  Table A; Target 58182; HLA-C*07:02; PASD1; ENSG00000166049; CTA
FPITSDSTI

SEQ ID NO: 58183 - protein, 8 aa, Homo sapiens
  Table A; Target 58183; HLA-B*54:01; PASD1; ENSG00000166049; CTA
FPLLNSET

SEQ ID NO: 58184 - protein, 9 aa, Homo sapiens
  Table A; Target 58184; HLA-B*35:01; PASD1; ENSG00000166049; CTA
FPLLNSETH

SEQ ID NO: 58185 - protein, 9 aa, Homo sapiens
  Table A; Target 58185; HLA-B*35:03; PASD1; ENSG00000166049; CTA
FPLLNSETH

SEQ ID NO: 58186 - protein, 10 aa, Homo sapiens
  Table A; Target 58186; HLA-B*51:01; PASD1; ENSG00000166049; CTA
FPLLNSETHI

SEQ ID NO: 58187 - protein, 10 aa, Homo sapiens
  Table A; Target 58187; HLA-B*54:01; PASD1; ENSG00000166049; CTA
FPTYDYFNQV

SEQ ID NO: 58188 - protein, 8 aa, Homo sapiens
  Table A; Target 58188; HLA-B*08:01; PASD1; ENSG00000166049; CTA
FPVVFSGL

SEQ ID NO: 58189 - protein, 8 aa, Homo sapiens
  Table A; Target 58189; HLA-B*35:01; PASD1; ENSG00000166049; CTA
FPVVFSGL

SEQ ID NO: 58190 - protein, 8 aa, Homo sapiens
  Table A; Target 58190; HLA-B*35:03; PASD1; ENSG00000166049; CTA
FPVVFSGL

SEQ ID NO: 58191 - protein, 8 aa, Homo sapiens
  Table A; Target 58191; HLA-B*51:01; PASD1; ENSG00000166049; CTA
FPVVFSGL

SEQ ID NO: 58192 - protein, 8 aa, Homo sapiens
  Table A; Target 58192; HLA-B*54:01; PASD1; ENSG00000166049; CTA
FPVVFSGL

SEQ ID NO: 58193 - protein, 9 aa, Homo sapiens
  Table A; Target 58193; HLA-B*35:01; PASD1; ENSG00000166049; CTA
FPVVFSGLF

SEQ ID NO: 58194 - protein, 9 aa, Homo sapiens
  Table A; Target 58194; HLA-B*27:05; PASD1; ENSG00000166049; CTA
FQGPAAYQP

SEQ ID NO: 58195 - protein, 10 aa, Homo sapiens
  Table A; Target 58195; HLA-B*27:05; PASD1; ENSG00000166049; CTA
FRGEPEVNPL

SEQ ID NO: 58196 - protein, 9 aa, Homo sapiens
  Table A; Target 58196; HLA-A*02:01; PASD1; ENSG00000166049; CTA
FSVDQVDSV

SEQ ID NO: 58197 - protein, 9 aa, Homo sapiens
  Table A; Target 58197; HLA-A*68:02; PASD1; ENSG00000166049; CTA
FSVDQVDSV

SEQ ID NO: 58198 - protein, 9 aa, Homo sapiens
  Table A; Target 58198; HLA-C*02:02; PASD1; ENSG00000166049; CTA
FSVDQVDSV

SEQ ID NO: 58199 - protein, 9 aa, Homo sapiens
  Table A; Target 58199; HLA-C*03:03; PASD1; ENSG00000166049; CTA
FSVDQVDSV

SEQ ID NO: 58200 - protein, 9 aa, Homo sapiens
  Table A; Target 58200; HLA-C*03:04; PASD1; ENSG00000166049; CTA
FSVDQVDSV

SEQ ID NO: 58201 - protein, 8 aa, Homo sapiens
  Table A; Target 58201; HLA-A*01:01; PASD1; ENSG00000166049; CTA
FVDSDSTY

SEQ ID NO: 58202 - protein, 8 aa, Homo sapiens
  Table A; Target 58202; HLA-B*39:01; PASD1; ENSG00000166049; CTA
FVDSDSTY

SEQ ID NO: 58203 - protein, 8 aa, Homo sapiens
  Table A; Target 58203; HLA-B*55:01; PASD1; ENSG00000166049; CTA
FVDSDSTY

SEQ ID NO: 58204 - protein, 8 aa, Homo sapiens
  Table A; Target 58204; HLA-C*04:01; PASD1; ENSG00000166049; CTA
FVDSDSTY

SEQ ID NO: 58205 - protein, 8 aa, Homo sapiens
  Table A; Target 58205; HLA-C*05:01; PASD1; ENSG00000166049; CTA
FVDSDSTY

SEQ ID NO: 58206 - protein, 9 aa, Homo sapiens
  Table A; Target 58206; HLA-A*02:01; PASD1; ENSG00000166049; CTA
FVDSDSTYC

SEQ ID NO: 58207 - protein, 9 aa, Homo sapiens
  Table A; Target 58207; HLA-B*35:03; PASD1; ENSG00000166049; CTA
FVDSDSTYC

SEQ ID NO: 58208 - protein, 9 aa, Homo sapiens
  Table A; Target 58208; HLA-C*05:01; PASD1; ENSG00000166049; CTA
FVDSDSTYC

SEQ ID NO: 58209 - protein, 10 aa, Homo sapiens
  Table A; Target 58209; HLA-B*40:01; PASD1; ENSG00000166049; CTA
GAAGASAQPL

SEQ ID NO: 58210 - protein, 10 aa, Homo sapiens
  Table A; Target 58210; HLA-C*03:03; PASD1; ENSG00000166049; CTA
GAAGASAQPL

SEQ ID NO: 58211 - protein, 10 aa, Homo sapiens
  Table A; Target 58211; HLA-C*03:04; PASD1; ENSG00000166049; CTA
GAAGASAQPL

SEQ ID NO: 58212 - protein, 10 aa, Homo sapiens
  Table A; Target 58212; HLA-B*27:02; PASD1; ENSG00000166049; CTA
GDSSAYENVK

SEQ ID NO: 58213 - protein, 9 aa, Homo sapiens
  Table A; Target 58213; HLA-A*30:01; PASD1; ENSG00000166049; CTA
GELQEPCVA

SEQ ID NO: 58214 - protein, 9 aa, Homo sapiens
  Table A; Target 58214; HLA-B*40:01; PASD1; ENSG00000166049; CTA
GELQEPCVA

SEQ ID NO: 58215 - protein, 9 aa, Homo sapiens
  Table A; Target 58215; HLA-B*49:01; PASD1; ENSG00000166049; CTA
GELQEPCVA

SEQ ID NO: 58216 - protein, 10 aa, Homo sapiens
  Table A; Target 58216; HLA-A*30:01; PASD1; ENSG00000166049; CTA
GELQEPCVAF

SEQ ID NO: 58217 - protein, 10 aa, Homo sapiens
  Table A; Target 58217; HLA-B*18:01; PASD1; ENSG00000166049; CTA
GELQEPCVAF

SEQ ID NO: 58218 - protein, 10 aa, Homo sapiens
  Table A; Target 58218; HLA-B*40:01; PASD1; ENSG00000166049; CTA
GELQEPCVAF

SEQ ID NO: 58219 - protein, 10 aa, Homo sapiens
  Table A; Target 58219; HLA-B*40:02; PASD1; ENSG00000166049; CTA
GELQEPCVAF

SEQ ID NO: 58220 - protein, 10 aa, Homo sapiens
  Table A; Target 58220; HLA-B*44:02; PASD1; ENSG00000166049; CTA
GELQEPCVAF

SEQ ID NO: 58221 - protein, 10 aa, Homo sapiens
  Table A; Target 58221; HLA-B*44:03; PASD1; ENSG00000166049; CTA
GELQEPCVAF

SEQ ID NO: 58222 - protein, 8 aa, Homo sapiens
  Table A; Target 58222; HLA-B*37:01; PASD1; ENSG00000166049; CTA
GEPEVNPL

SEQ ID NO: 58223 - protein, 9 aa, Homo sapiens
  Table A; Target 58223; HLA-A*26:01; PASD1; ENSG00000166049; CTA
GEPEVNPLY

SEQ ID NO: 58224 - protein, 9 aa, Homo sapiens
  Table A; Target 58224; HLA-A*29:02; PASD1; ENSG00000166049; CTA
GEPEVNPLY

SEQ ID NO: 58225 - protein, 9 aa, Homo sapiens
  Table A; Target 58225; HLA-A*30:01; PASD1; ENSG00000166049; CTA
GEPEVNPLY

SEQ ID NO: 58226 - protein, 9 aa, Homo sapiens
  Table A; Target 58226; HLA-A*30:02; PASD1; ENSG00000166049; CTA
GEPEVNPLY

SEQ ID NO: 58227 - protein, 9 aa, Homo sapiens
  Table A; Target 58227; HLA-B*15:01; PASD1; ENSG00000166049; CTA
GEPEVNPLY

SEQ ID NO: 58228 - protein, 9 aa, Homo sapiens
  Table A; Target 58228; HLA-B*15:03; PASD1; ENSG00000166049; CTA
GEPEVNPLY

SEQ ID NO: 58229 - protein, 9 aa, Homo sapiens
  Table A; Target 58229; HLA-B*18:01; PASD1; ENSG00000166049; CTA
GEPEVNPLY

SEQ ID NO: 58230 - protein, 9 aa, Homo sapiens
  Table A; Target 58230; HLA-B*27:02; PASD1; ENSG00000166049; CTA
GEPEVNPLY

SEQ ID NO: 58231 - protein, 9 aa, Homo sapiens
  Table A; Target 58231; HLA-B*27:05; PASD1; ENSG00000166049; CTA
GEPEVNPLY

SEQ ID NO: 58232 - protein, 9 aa, Homo sapiens
  Table A; Target 58232; HLA-B*37:01; PASD1; ENSG00000166049; CTA
GEPEVNPLY

SEQ ID NO: 58233 - protein, 9 aa, Homo sapiens
  Table A; Target 58233; HLA-B*40:01; PASD1; ENSG00000166049; CTA
GEPEVNPLY

SEQ ID NO: 58234 - protein, 9 aa, Homo sapiens
  Table A; Target 58234; HLA-B*44:02; PASD1; ENSG00000166049; CTA
GEPEVNPLY

SEQ ID NO: 58235 - protein, 9 aa, Homo sapiens
  Table A; Target 58235; HLA-B*44:03; PASD1; ENSG00000166049; CTA
GEPEVNPLY

SEQ ID NO: 58236 - protein, 9 aa, Homo sapiens
  Table A; Target 58236; HLA-B*49:01; PASD1; ENSG00000166049; CTA
GEPEVNPLY

SEQ ID NO: 58237 - protein, 9 aa, Homo sapiens
  Table A; Target 58237; HLA-B*58:01; PASD1; ENSG00000166049; CTA
GEPEVNPLY

SEQ ID NO: 58238 - protein, 9 aa, Homo sapiens
  Table A; Target 58238; HLA-C*02:02; PASD1; ENSG00000166049; CTA
GEPEVNPLY

SEQ ID NO: 58239 - protein, 9 aa, Homo sapiens
  Table A; Target 58239; HLA-C*07:01; PASD1; ENSG00000166049; CTA
GEPEVNPLY

SEQ ID NO: 58240 - protein, 9 aa, Homo sapiens
  Table A; Target 58240; HLA-C*16:02; PASD1; ENSG00000166049; CTA
GEPEVNPLY

SEQ ID NO: 58241 - protein, 9 aa, Homo sapiens
  Table A; Target 58241; HLA-C*16:04; PASD1; ENSG00000166049; CTA
GEPEVNPLY

SEQ ID NO: 58242 - protein, 10 aa, Homo sapiens
  Table A; Target 58242; HLA-B*27:02; PASD1; ENSG00000166049; CTA
GEPEVNPLYR

SEQ ID NO: 58243 - protein, 10 aa, Homo sapiens
  Table A; Target 58243; HLA-B*40:01; PASD1; ENSG00000166049; CTA
GEPEVNPLYR

SEQ ID NO: 58244 - protein, 10 aa, Homo sapiens
  Table A; Target 58244; HLA-B*44:03; PASD1; ENSG00000166049; CTA
GEPEVNPLYR

SEQ ID NO: 58245 - protein, 10 aa, Homo sapiens
  Table A; Target 58245; HLA-B*49:01; PASD1; ENSG00000166049; CTA
GEPEVNPLYR

SEQ ID NO: 58246 - protein, 10 aa, Homo sapiens
  Table A; Target 58246; HLA-C*16:04; PASD1; ENSG00000166049; CTA
GEPEVNPLYR

SEQ ID NO: 58247 - protein, 10 aa, Homo sapiens
  Table A; Target 58247; HLA-B*27:02; PASD1; ENSG00000166049; CTA
GHLPAEIVGK

SEQ ID NO: 58248 - protein, 10 aa, Homo sapiens
  Table A; Target 58248; HLA-B*27:05; PASD1; ENSG00000166049; CTA
GHLPAEIVGK

SEQ ID NO: 58249 - protein, 9 aa, Homo sapiens
  Table A; Target 58249; HLA-B*15:03; PASD1; ENSG00000166049; CTA
GHTSMKAVY

SEQ ID NO: 58250 - protein, 9 aa, Homo sapiens
  Table A; Target 58250; HLA-A*03:01; PASD1; ENSG00000166049; CTA
GLSLSNSLK

SEQ ID NO: 58251 - protein, 9 aa, Homo sapiens
  Table A; Target 58251; HLA-A*03:02; PASD1; ENSG00000166049; CTA
GLSLSNSLK

SEQ ID NO: 58252 - protein, 11 aa, Homo sapiens
  Table A; Target 58252; HLA-A*29:02; PASD1; ENSG00000166049; CTA
GNVEHGDSSAY

SEQ ID NO: 58253 - protein, 11 aa, Homo sapiens
  Table A; Target 58253; HLA-A*30:02; PASD1; ENSG00000166049; CTA
GNVEHGDSSAY

SEQ ID NO: 58254 - protein, 11 aa, Homo sapiens
  Table A; Target 58254; HLA-B*15:01; PASD1; ENSG00000166049; CTA
GNVEHGDSSAY

SEQ ID NO: 58255 - protein, 9 aa, Homo sapiens
  Table A; Target 58255; HLA-B*07:02; PASD1; ENSG00000166049; CTA
GPQENVHMF

SEQ ID NO: 58256 - protein, 9 aa, Homo sapiens
  Table A; Target 58256; HLA-B*35:01; PASD1; ENSG00000166049; CTA
GPQENVHMF

SEQ ID NO: 58257 - protein, 9 aa, Homo sapiens
  Table A; Target 58257; HLA-B*55:01; PASD1; ENSG00000166049; CTA
GPQENVHMF

SEQ ID NO: 58258 - protein, 9 aa, Homo sapiens
  Table A; Target 58258; HLA-B*56:01; PASD1; ENSG00000166049; CTA
GPQENVHMF

SEQ ID NO: 58259 - protein, 9 aa, Homo sapiens
  Table A; Target 58259; HLA-C*07:02; PASD1; ENSG00000166049; CTA
GPQENVHMF

SEQ ID NO: 58260 - protein, 9 aa, Homo sapiens
  Table A; Target 58260; HLA-C*16:02; PASD1; ENSG00000166049; CTA
GPQENVHMF

SEQ ID NO: 58261 - protein, 10 aa, Homo sapiens
  Table A; Target 58261; HLA-B*56:01; PASD1; ENSG00000166049; CTA
GPQENVHMFV

SEQ ID NO: 58262 - protein, 9 aa, Homo sapiens
  Table A; Target 58262; HLA-A*25:01; PASD1; ENSG00000166049; CTA
GPVVQVNTW

SEQ ID NO: 58263 - protein, 9 aa, Homo sapiens
  Table A; Target 58263; HLA-B*35:01; PASD1; ENSG00000166049; CTA
GPVVQVNTW

SEQ ID NO: 58264 - protein, 9 aa, Homo sapiens
  Table A; Target 58264; HLA-B*44:02; PASD1; ENSG00000166049; CTA
GPVVQVNTW

SEQ ID NO: 58265 - protein, 9 aa, Homo sapiens
  Table A; Target 58265; HLA-B*44:03; PASD1; ENSG00000166049; CTA
GPVVQVNTW

SEQ ID NO: 58266 - protein, 9 aa, Homo sapiens
  Table A; Target 58266; HLA-B*57:01; PASD1; ENSG00000166049; CTA
GPVVQVNTW

SEQ ID NO: 58267 - protein, 9 aa, Homo sapiens
  Table A; Target 58267; HLA-B*58:01; PASD1; ENSG00000166049; CTA
GPVVQVNTW

SEQ ID NO: 58268 - protein, 9 aa, Homo sapiens
  Table A; Target 58268; HLA-C*16:04; PASD1; ENSG00000166049; CTA
GPVVQVNTW

SEQ ID NO: 58269 - protein, 8 aa, Homo sapiens
  Table A; Target 58269; HLA-B*13:02; PASD1; ENSG00000166049; CTA
GQPTYHQV

SEQ ID NO: 58270 - protein, 10 aa, Homo sapiens
  Table A; Target 58270; HLA-A*30:01; PASD1; ENSG00000166049; CTA
GQPTYHQVQV

SEQ ID NO: 58271 - protein, 10 aa, Homo sapiens
  Table A; Target 58271; HLA-B*13:02; PASD1; ENSG00000166049; CTA
GQPTYHQVQV

SEQ ID NO: 58272 - protein, 10 aa, Homo sapiens
  Table A; Target 58272; HLA-B*15:01; PASD1; ENSG00000166049; CTA
GQQEDESQSF

SEQ ID NO: 58273 - protein, 11 aa, Homo sapiens
  Table A; Target 58273; HLA-A*30:02; PASD1; ENSG00000166049; CTA
GQQEDESQSFY

SEQ ID NO: 58274 - protein, 11 aa, Homo sapiens
  Table A; Target 58274; HLA-B*15:01; PASD1; ENSG00000166049; CTA
GQQEDESQSFY

SEQ ID NO: 58275 - protein, 11 aa, Homo sapiens
  Table A; Target 58275; HLA-B*27:05; PASD1; ENSG00000166049; CTA
GQQEDESQSFY

SEQ ID NO: 58276 - protein, 8 aa, Homo sapiens
  Table A; Target 58276; HLA-B*15:01; PASD1; ENSG00000166049; CTA
GQRGHTSM

SEQ ID NO: 58277 - protein, 8 aa, Homo sapiens
  Table A; Target 58277; HLA-B*15:03; PASD1; ENSG00000166049; CTA
GQRGHTSM

SEQ ID NO: 58278 - protein, 9 aa, Homo sapiens
  Table A; Target 58278; HLA-A*03:01; PASD1; ENSG00000166049; CTA
GQVKRPLPH

SEQ ID NO: 58279 - protein, 9 aa, Homo sapiens
  Table A; Target 58279; HLA-A*01:01; PASD1; ENSG00000166049; CTA
GTLHGQPTY

SEQ ID NO: 58280 - protein, 9 aa, Homo sapiens
  Table A; Target 58280; HLA-A*11:01; PASD1; ENSG00000166049; CTA
GTLHGQPTY

SEQ ID NO: 58281 - protein, 9 aa, Homo sapiens
  Table A; Target 58281; HLA-A*26:01; PASD1; ENSG00000166049; CTA
GTLHGQPTY

SEQ ID NO: 58282 - protein, 9 aa, Homo sapiens
  Table A; Target 58282; HLA-A*29:02; PASD1; ENSG00000166049; CTA
GTLHGQPTY

SEQ ID NO: 58283 - protein, 9 aa, Homo sapiens
  Table A; Target 58283; HLA-A*30:02; PASD1; ENSG00000166049; CTA
GTLHGQPTY

SEQ ID NO: 58284 - protein, 9 aa, Homo sapiens
  Table A; Target 58284; HLA-A*32:01; PASD1; ENSG00000166049; CTA
GTLHGQPTY

SEQ ID NO: 58285 - protein, 9 aa, Homo sapiens
  Table A; Target 58285; HLA-B*15:01; PASD1; ENSG00000166049; CTA
GTLHGQPTY

SEQ ID NO: 58286 - protein, 9 aa, Homo sapiens
  Table A; Target 58286; HLA-B*15:03; PASD1; ENSG00000166049; CTA
GTLHGQPTY

SEQ ID NO: 58287 - protein, 9 aa, Homo sapiens
  Table A; Target 58287; HLA-B*27:02; PASD1; ENSG00000166049; CTA
GTLHGQPTY

SEQ ID NO: 58288 - protein, 9 aa, Homo sapiens
  Table A; Target 58288; HLA-B*39:01; PASD1; ENSG00000166049; CTA
GTLHGQPTY

SEQ ID NO: 58289 - protein, 9 aa, Homo sapiens
  Table A; Target 58289; HLA-B*57:01; PASD1; ENSG00000166049; CTA
GTLHGQPTY

SEQ ID NO: 58290 - protein, 9 aa, Homo sapiens
  Table A; Target 58290; HLA-B*58:01; PASD1; ENSG00000166049; CTA
GTLHGQPTY

SEQ ID NO: 58291 - protein, 9 aa, Homo sapiens
  Table A; Target 58291; HLA-C*16:01; PASD1; ENSG00000166049; CTA
GTLHGQPTY

SEQ ID NO: 58292 - protein, 9 aa, Homo sapiens
  Table A; Target 58292; HLA-C*16:02; PASD1; ENSG00000166049; CTA
GTLHGQPTY

SEQ ID NO: 58293 - protein, 11 aa, Homo sapiens
  Table A; Target 58293; HLA-B*39:01; PASD1; ENSG00000166049; CTA
GVEGPPDPQAF

SEQ ID NO: 58294 - protein, 11 aa, Homo sapiens
  Table A; Target 58294; HLA-A*30:01; PASD1; ENSG00000166049; CTA
HDAIQNQQNAL

SEQ ID NO: 58295 - protein, 9 aa, Homo sapiens
  Table A; Target 58295; HLA-A*32:01; PASD1; ENSG00000166049; CTA
HGQPTYHQV

SEQ ID NO: 58296 - protein, 9 aa, Homo sapiens
  Table A; Target 58296; HLA-B*13:02; PASD1; ENSG00000166049; CTA
HGQPTYHQV

SEQ ID NO: 58297 - protein, 9 aa, Homo sapiens
  Table A; Target 58297; HLA-C*06:02; PASD1; ENSG00000166049; CTA
HGQPTYHQV

SEQ ID NO: 58298 - protein, 9 aa, Homo sapiens
  Table A; Target 58298; HLA-C*16:02; PASD1; ENSG00000166049; CTA
HGQPTYHQV

SEQ ID NO: 58299 - protein, 9 aa, Homo sapiens
  Table A; Target 58299; HLA-A*02:03; PASD1; ENSG00000166049; CTA
HLKEQQRQL

SEQ ID NO: 58300 - protein, 9 aa, Homo sapiens
  Table A; Target 58300; HLA-B*08:01; PASD1; ENSG00000166049; CTA
HLKEQQRQL

SEQ ID NO: 58301 - protein, 9 aa, Homo sapiens
  Table A; Target 58301; HLA-A*02:07; PASD1; ENSG00000166049; CTA
HLPAEIVGK

SEQ ID NO: 58302 - protein, 9 aa, Homo sapiens
  Table A; Target 58302; HLA-A*03:01; PASD1; ENSG00000166049; CTA
HLPAEIVGK

SEQ ID NO: 58303 - protein, 9 aa, Homo sapiens
  Table A; Target 58303; HLA-A*03:02; PASD1; ENSG00000166049; CTA
HLPAEIVGK

SEQ ID NO: 58304 - protein, 9 aa, Homo sapiens
  Table A; Target 58304; HLA-A*11:01; PASD1; ENSG00000166049; CTA
HLPAEIVGK

SEQ ID NO: 58305 - protein, 9 aa, Homo sapiens
  Table A; Target 58305; HLA-A*68:01; PASD1; ENSG00000166049; CTA
HLPAEIVGK

SEQ ID NO: 58306 - protein, 10 aa, Homo sapiens
  Table A; Target 58306; HLA-A*03:01; PASD1; ENSG00000166049; CTA
HLPAEIVGKK

SEQ ID NO: 58307 - protein, 11 aa, Homo sapiens
  Table A; Target 58307; HLA-A*02:07; PASD1; ENSG00000166049; CTA
HLPAEIVGKKL

SEQ ID NO: 58308 - protein, 9 aa, Homo sapiens
  Table A; Target 58308; HLA-A*02:03; PASD1; ENSG00000166049; CTA
HLQKQPNTL

SEQ ID NO: 58309 - protein, 9 aa, Homo sapiens
  Table A; Target 58309; HLA-A*02:04; PASD1; ENSG00000166049; CTA
HLQKQPNTL

SEQ ID NO: 58310 - protein, 9 aa, Homo sapiens
  Table A; Target 58310; HLA-A*03:02; PASD1; ENSG00000166049; CTA
HLQKQPNTL

SEQ ID NO: 58311 - protein, 9 aa, Homo sapiens
  Table A; Target 58311; HLA-B*08:01; PASD1; ENSG00000166049; CTA
HLQKQPNTL

SEQ ID NO: 58312 - protein, 9 aa, Homo sapiens
  Table A; Target 58312; HLA-B*38:01; PASD1; ENSG00000166049; CTA
HLQKQPNTL

SEQ ID NO: 58313 - protein, 9 aa, Homo sapiens
  Table A; Target 58313; HLA-C*14:02; PASD1; ENSG00000166049; CTA
HLQKQPNTL

SEQ ID NO: 58314 - protein, 10 aa, Homo sapiens
  Table A; Target 58314; HLA-A*01:01; PASD1; ENSG00000166049; CTA
HMFVDSDSTY

SEQ ID NO: 58315 - protein, 10 aa, Homo sapiens
  Table A; Target 58315; HLA-A*25:01; PASD1; ENSG00000166049; CTA
HMFVDSDSTY

SEQ ID NO: 58316 - protein, 10 aa, Homo sapiens
  Table A; Target 58316; HLA-A*26:01; PASD1; ENSG00000166049; CTA
HMFVDSDSTY

SEQ ID NO: 58317 - protein, 10 aa, Homo sapiens
  Table A; Target 58317; HLA-A*29:02; PASD1; ENSG00000166049; CTA
HMFVDSDSTY

SEQ ID NO: 58318 - protein, 10 aa, Homo sapiens
  Table A; Target 58318; HLA-A*30:02; PASD1; ENSG00000166049; CTA
HMFVDSDSTY

SEQ ID NO: 58319 - protein, 10 aa, Homo sapiens
  Table A; Target 58319; HLA-A*32:01; PASD1; ENSG00000166049; CTA
HMFVDSDSTY

SEQ ID NO: 58320 - protein, 10 aa, Homo sapiens
  Table A; Target 58320; HLA-B*15:01; PASD1; ENSG00000166049; CTA
HMFVDSDSTY

SEQ ID NO: 58321 - protein, 10 aa, Homo sapiens
  Table A; Target 58321; HLA-B*15:03; PASD1; ENSG00000166049; CTA
HMFVDSDSTY

SEQ ID NO: 58322 - protein, 10 aa, Homo sapiens
  Table A; Target 58322; HLA-B*35:01; PASD1; ENSG00000166049; CTA
HMFVDSDSTY

SEQ ID NO: 58323 - protein, 10 aa, Homo sapiens
  Table A; Target 58323; HLA-B*46:01; PASD1; ENSG00000166049; CTA
HMFVDSDSTY

SEQ ID NO: 58324 - protein, 10 aa, Homo sapiens
  Table A; Target 58324; HLA-B*55:01; PASD1; ENSG00000166049; CTA
HMFVDSDSTY

SEQ ID NO: 58325 - protein, 10 aa, Homo sapiens
  Table A; Target 58325; HLA-B*58:01; PASD1; ENSG00000166049; CTA
HMFVDSDSTY

SEQ ID NO: 58326 - protein, 10 aa, Homo sapiens
  Table A; Target 58326; HLA-C*02:02; PASD1; ENSG00000166049; CTA
HMFVDSDSTY

SEQ ID NO: 58327 - protein, 10 aa, Homo sapiens
  Table A; Target 58327; HLA-C*04:01; PASD1; ENSG00000166049; CTA
HMFVDSDSTY

SEQ ID NO: 58328 - protein, 10 aa, Homo sapiens
  Table A; Target 58328; HLA-C*07:04; PASD1; ENSG00000166049; CTA
HMFVDSDSTY

SEQ ID NO: 58329 - protein, 9 aa, Homo sapiens
  Table A; Target 58329; HLA-A*33:01; PASD1; ENSG00000166049; CTA
HNVIVGNER

SEQ ID NO: 58330 - protein, 9 aa, Homo sapiens
  Table A; Target 58330; HLA-A*33:03; PASD1; ENSG00000166049; CTA
HNVIVGNER

SEQ ID NO: 58331 - protein, 9 aa, Homo sapiens
  Table A; Target 58331; HLA-A*68:01; PASD1; ENSG00000166049; CTA
HNVIVGNER

SEQ ID NO: 58332 - protein, 9 aa, Homo sapiens
  Table A; Target 58332; HLA-C*07:06; PASD1; ENSG00000166049; CTA
HNVIVGNER

SEQ ID NO: 58333 - protein, 8 aa, Homo sapiens
  Table A; Target 58333; HLA-B*54:01; PASD1; ENSG00000166049; CTA
HPVRFLQA

SEQ ID NO: 58334 - protein, 8 aa, Homo sapiens
  Table A; Target 58334; HLA-B*56:01; PASD1; ENSG00000166049; CTA
HPVRFLQA

SEQ ID NO: 58335 - protein, 8 aa, Homo sapiens
  Table A; Target 58335; HLA-A*30:01; PASD1; ENSG00000166049; CTA
HQVQVSEV

SEQ ID NO: 58336 - protein, 8 aa, Homo sapiens
  Table A; Target 58336; HLA-B*13:02; PASD1; ENSG00000166049; CTA
HQVQVSEV

SEQ ID NO: 58337 - protein, 8 aa, Homo sapiens
  Table A; Target 58337; HLA-B*39:01; PASD1; ENSG00000166049; CTA
HQVQVSEV

SEQ ID NO: 58338 - protein, 8 aa, Homo sapiens
  Table A; Target 58338; HLA-B*40:02; PASD1; ENSG00000166049; CTA
HQVQVSEV

SEQ ID NO: 58339 - protein, 10 aa, Homo sapiens
  Table A; Target 58339; HLA-B*13:02; PASD1; ENSG00000166049; CTA
HQVQVSEVGV

SEQ ID NO: 58340 - protein, 10 aa, Homo sapiens
  Table A; Target 58340; HLA-B*39:01; PASD1; ENSG00000166049; CTA
HQVQVSEVGV

SEQ ID NO: 58341 - protein, 8 aa, Homo sapiens
  Table A; Target 58341; HLA-C*16:01; PASD1; ENSG00000166049; CTA
HTSMKAVY

SEQ ID NO: 58342 - protein, 9 aa, Homo sapiens
  Table A; Target 58342; HLA-A*68:02; PASD1; ENSG00000166049; CTA
HTSMKAVYV

SEQ ID NO: 58343 - protein, 10 aa, Homo sapiens
  Table A; Target 58343; HLA-C*03:03; PASD1; ENSG00000166049; CTA
ICVAENISSL

SEQ ID NO: 58344 - protein, 10 aa, Homo sapiens
  Table A; Target 58344; HLA-C*03:04; PASD1; ENSG00000166049; CTA
ICVAENISSL

SEQ ID NO: 58345 - protein, 9 aa, Homo sapiens
  Table A; Target 58345; HLA-A*30:02; PASD1; ENSG00000166049; CTA
IDIAEVEQY

SEQ ID NO: 58346 - protein, 9 aa, Homo sapiens
  Table A; Target 58346; HLA-B*15:01; PASD1; ENSG00000166049; CTA
IDIAEVEQY

SEQ ID NO: 58347 - protein, 9 aa, Homo sapiens
  Table A; Target 58347; HLA-B*15:03; PASD1; ENSG00000166049; CTA
IDIAEVEQY

SEQ ID NO: 58348 - protein, 9 aa, Homo sapiens
  Table A; Target 58348; HLA-B*18:01; PASD1; ENSG00000166049; CTA
IDIAEVEQY

SEQ ID NO: 58349 - protein, 9 aa, Homo sapiens
  Table A; Target 58349; HLA-B*27:02; PASD1; ENSG00000166049; CTA
IDIAEVEQY

SEQ ID NO: 58350 - protein, 9 aa, Homo sapiens
  Table A; Target 58350; HLA-B*35:01; PASD1; ENSG00000166049; CTA
IDIAEVEQY

SEQ ID NO: 58351 - protein, 9 aa, Homo sapiens
  Table A; Target 58351; HLA-B*44:02; PASD1; ENSG00000166049; CTA
IDIAEVEQY

SEQ ID NO: 58352 - protein, 9 aa, Homo sapiens
  Table A; Target 58352; HLA-B*44:03; PASD1; ENSG00000166049; CTA
IDIAEVEQY

SEQ ID NO: 58353 - protein, 9 aa, Homo sapiens
  Table A; Target 58353; HLA-C*16:04; PASD1; ENSG00000166049; CTA
IDIAEVEQY

SEQ ID NO: 58354 - protein, 8 aa, Homo sapiens
  Table A; Target 58354; HLA-C*03:04; PASD1; ENSG00000166049; CTA
IISQELEL

SEQ ID NO: 58355 - protein, 10 aa, Homo sapiens
  Table A; Target 58355; HLA-B*27:02; PASD1; ENSG00000166049; CTA
IISQELELMK

SEQ ID NO: 58356 - protein, 9 aa, Homo sapiens
  Table A; Target 58356; HLA-B*56:01; PASD1; ENSG00000166049; CTA
IPDLQSSEA

SEQ ID NO: 58357 - protein, 9 aa, Homo sapiens
  Table A; Target 58357; HLA-A*29:02; PASD1; ENSG00000166049; CTA
IPSFPTYDY

SEQ ID NO: 58358 - protein, 9 aa, Homo sapiens
  Table A; Target 58358; HLA-B*35:01; PASD1; ENSG00000166049; CTA
IPSFPTYDY

SEQ ID NO: 58359 - protein, 9 aa, Homo sapiens
  Table A; Target 58359; HLA-B*55:01; PASD1; ENSG00000166049; CTA
IPSFPTYDY

SEQ ID NO: 58360 - protein, 8 aa, Homo sapiens
  Table A; Target 58360; HLA-B*15:01; PASD1; ENSG00000166049; CTA
IQNQQNAL

SEQ ID NO: 58361 - protein, 8 aa, Homo sapiens
  Table A; Target 58361; HLA-B*15:03; PASD1; ENSG00000166049; CTA
IQNQQNAL

SEQ ID NO: 58362 - protein, 8 aa, Homo sapiens
  Table A; Target 58362; HLA-B*39:01; PASD1; ENSG00000166049; CTA
IQNQQNAL

SEQ ID NO: 58363 - protein, 8 aa, Homo sapiens
  Table A; Target 58363; HLA-C*14:02; PASD1; ENSG00000166049; CTA
IQNQQNAL

SEQ ID NO: 58364 - protein, 11 aa, Homo sapiens
  Table A; Target 58364; HLA-B*15:01; PASD1; ENSG00000166049; CTA
IQNQQNALELM

SEQ ID NO: 58365 - protein, 8 aa, Homo sapiens
  Table A; Target 58365; HLA-C*05:01; PASD1; ENSG00000166049; CTA
ISDDQIDI

SEQ ID NO: 58366 - protein, 9 aa, Homo sapiens
  Table A; Target 58366; HLA-A*11:01; PASD1; ENSG00000166049; CTA
ISQELELMK

SEQ ID NO: 58367 - protein, 9 aa, Homo sapiens
  Table A; Target 58367; HLA-B*27:02; PASD1; ENSG00000166049; CTA
ISQELELMK

SEQ ID NO: 58368 - protein, 10 aa, Homo sapiens
  Table A; Target 58368; HLA-A*11:01; PASD1; ENSG00000166049; CTA
ISQELELMKK

SEQ ID NO: 58369 - protein, 9 aa, Homo sapiens
  Table A; Target 58369; HLA-A*23:01; PASD1; ENSG00000166049; CTA
ISSSSIPQF

SEQ ID NO: 58370 - protein, 9 aa, Homo sapiens
  Table A; Target 58370; HLA-A*24:02; PASD1; ENSG00000166049; CTA
ISSSSIPQF

SEQ ID NO: 58371 - protein, 9 aa, Homo sapiens
  Table A; Target 58371; HLA-A*25:01; PASD1; ENSG00000166049; CTA
ISSSSIPQF

SEQ ID NO: 58372 - protein, 9 aa, Homo sapiens
  Table A; Target 58372; HLA-A*26:01; PASD1; ENSG00000166049; CTA
ISSSSIPQF

SEQ ID NO: 58373 - protein, 9 aa, Homo sapiens
  Table A; Target 58373; HLA-A*30:02; PASD1; ENSG00000166049; CTA
ISSSSIPQF

SEQ ID NO: 58374 - protein, 9 aa, Homo sapiens
  Table A; Target 58374; HLA-A*32:01; PASD1; ENSG00000166049; CTA
ISSSSIPQF

SEQ ID NO: 58375 - protein, 9 aa, Homo sapiens
  Table A; Target 58375; HLA-B*57:01; PASD1; ENSG00000166049; CTA
ISSSSIPQF

SEQ ID NO: 58376 - protein, 9 aa, Homo sapiens
  Table A; Target 58376; HLA-B*58:01; PASD1; ENSG00000166049; CTA
ISSSSIPQF

SEQ ID NO: 58377 - protein, 9 aa, Homo sapiens
  Table A; Target 58377; HLA-C*02:02; PASD1; ENSG00000166049; CTA
ISSSSIPQF

SEQ ID NO: 58378 - protein, 9 aa, Homo sapiens
  Table A; Target 58378; HLA-C*07:04; PASD1; ENSG00000166049; CTA
ISSSSIPQF

SEQ ID NO: 58379 - protein, 9 aa, Homo sapiens
  Table A; Target 58379; HLA-C*12:03; PASD1; ENSG00000166049; CTA
ISSSSIPQF

SEQ ID NO: 58380 - protein, 9 aa, Homo sapiens
  Table A; Target 58380; HLA-C*16:01; PASD1; ENSG00000166049; CTA
ISSSSIPQF

SEQ ID NO: 58381 - protein, 9 aa, Homo sapiens
  Table A; Target 58381; HLA-C*16:02; PASD1; ENSG00000166049; CTA
ISSSSIPQF

SEQ ID NO: 58382 - protein, 10 aa, Homo sapiens
  Table A; Target 58382; HLA-A*01:01; PASD1; ENSG00000166049; CTA
ISTLETPQDY

SEQ ID NO: 58383 - protein, 10 aa, Homo sapiens
  Table A; Target 58383; HLA-A*25:01; PASD1; ENSG00000166049; CTA
ITSDSTISTL

SEQ ID NO: 58384 - protein, 10 aa, Homo sapiens
  Table A; Target 58384; HLA-A*68:01; PASD1; ENSG00000166049; CTA
ITSDSTISTL

SEQ ID NO: 58385 - protein, 9 aa, Homo sapiens
  Table A; Target 58385; HLA-B*08:01; PASD1; ENSG00000166049; CTA
IVGKKLLSL

SEQ ID NO: 58386 - protein, 9 aa, Homo sapiens
  Table A; Target 58386; HLA-A*30:01; PASD1; ENSG00000166049; CTA
KAVSDEAVL

SEQ ID NO: 58387 - protein, 9 aa, Homo sapiens
  Table A; Target 58387; HLA-B*35:03; PASD1; ENSG00000166049; CTA
KAVSDEAVL

SEQ ID NO: 58388 - protein, 9 aa, Homo sapiens
  Table A; Target 58388; HLA-B*40:01; PASD1; ENSG00000166049; CTA
KAVSDEAVL

SEQ ID NO: 58389 - protein, 9 aa, Homo sapiens
  Table A; Target 58389; HLA-B*58:01; PASD1; ENSG00000166049; CTA
KAVSDEAVL

SEQ ID NO: 58390 - protein, 9 aa, Homo sapiens
  Table A; Target 58390; HLA-C*03:03; PASD1; ENSG00000166049; CTA
KAVSDEAVL

SEQ ID NO: 58391 - protein, 9 aa, Homo sapiens
  Table A; Target 58391; HLA-C*03:04; PASD1; ENSG00000166049; CTA
KAVSDEAVL

SEQ ID NO: 58392 - protein, 9 aa, Homo sapiens
  Table A; Target 58392; HLA-C*16:01; PASD1; ENSG00000166049; CTA
KAVSDEAVL

SEQ ID NO: 58393 - protein, 9 aa, Homo sapiens
  Table A; Target 58393; HLA-C*16:02; PASD1; ENSG00000166049; CTA
KAVSDEAVL

SEQ ID NO: 58394 - protein, 9 aa, Homo sapiens
  Table A; Target 58394; HLA-B*07:02; PASD1; ENSG00000166049; CTA
KAVYVEPAA

SEQ ID NO: 58395 - protein, 9 aa, Homo sapiens
  Table A; Target 58395; HLA-B*40:02; PASD1; ENSG00000166049; CTA
KAVYVEPAA

SEQ ID NO: 58396 - protein, 9 aa, Homo sapiens
  Table A; Target 58396; HLA-B*54:01; PASD1; ENSG00000166049; CTA
KAVYVEPAA

SEQ ID NO: 58397 - protein, 9 aa, Homo sapiens
  Table A; Target 58397; HLA-B*56:01; PASD1; ENSG00000166049; CTA
KAVYVEPAA

SEQ ID NO: 58398 - protein, 9 aa, Homo sapiens
  Table A; Target 58398; HLA-B*58:01; PASD1; ENSG00000166049; CTA
KAVYVEPAA

SEQ ID NO: 58399 - protein, 9 aa, Homo sapiens
  Table A; Target 58399; HLA-C*03:03; PASD1; ENSG00000166049; CTA
KAVYVEPAA

SEQ ID NO: 58400 - protein, 9 aa, Homo sapiens
  Table A; Target 58400; HLA-C*03:04; PASD1; ENSG00000166049; CTA
KAVYVEPAA

SEQ ID NO: 58401 - protein, 10 aa, Homo sapiens
  Table A; Target 58401; HLA-B*56:01; PASD1; ENSG00000166049; CTA
KAVYVEPAAA

SEQ ID NO: 58402 - protein, 11 aa, Homo sapiens
  Table A; Target 58402; HLA-B*56:01; PASD1; ENSG00000166049; CTA
KAVYVEPAAAA

SEQ ID NO: 58403 - protein, 9 aa, Homo sapiens
  Table A; Target 58403; HLA-B*44:02; PASD1; ENSG00000166049; CTA
KEQLEERTW

SEQ ID NO: 58404 - protein, 9 aa, Homo sapiens
  Table A; Target 58404; HLA-B*44:03; PASD1; ENSG00000166049; CTA
KEQLEERTW

SEQ ID NO: 58405 - protein, 9 aa, Homo sapiens
  Table A; Target 58405; HLA-C*16:04; PASD1; ENSG00000166049; CTA
KEQLEERTW

SEQ ID NO: 58406 - protein, 10 aa, Homo sapiens
  Table A; Target 58406; HLA-A*31:01; PASD1; ENSG00000166049; CTA
KHNVIVGNER

SEQ ID NO: 58407 - protein, 9 aa, Homo sapiens
  Table A; Target 58407; HLA-A*02:04; PASD1; ENSG00000166049; CTA
KIILKFPLL

SEQ ID NO: 58408 - protein, 9 aa, Homo sapiens
  Table A; Target 58408; HLA-A*02:07; PASD1; ENSG00000166049; CTA
KIILKFPLL

SEQ ID NO: 58409 - protein, 9 aa, Homo sapiens
  Table A; Target 58409; HLA-A*24:02; PASD1; ENSG00000166049; CTA
KIILKFPLL

SEQ ID NO: 58410 - protein, 9 aa, Homo sapiens
  Table A; Target 58410; HLA-A*31:01; PASD1; ENSG00000166049; CTA
KLKEQLEER

SEQ ID NO: 58411 - protein, 9 aa, Homo sapiens
  Table A; Target 58411; HLA-B*46:01; PASD1; ENSG00000166049; CTA
KLKEQLEER

SEQ ID NO: 58412 - protein, 11 aa, Homo sapiens
  Table A; Target 58412; HLA-B*57:01; PASD1; ENSG00000166049; CTA
KLKEQLEERTW

SEQ ID NO: 58413 - protein, 10 aa, Homo sapiens
  Table A; Target 58413; HLA-A*03:01; PASD1; ENSG00000166049; CTA
KLQEQKMQEK

SEQ ID NO: 58414 - protein, 10 aa, Homo sapiens
  Table A; Target 58414; HLA-A*03:02; PASD1; ENSG00000166049; CTA
KLQEQKMQEK

SEQ ID NO: 58415 - protein, 10 aa, Homo sapiens
  Table A; Target 58415; HLA-A*03:02; PASD1; ENSG00000166049; CTA
KQQLQEQPLK

SEQ ID NO: 58416 - protein, 9 aa, Homo sapiens
  Table A; Target 58416; HLA-A*03:01; PASD1; ENSG00000166049; CTA
KVNPKSSQR

SEQ ID NO: 58417 - protein, 9 aa, Homo sapiens
  Table A; Target 58417; HLA-A*03:02; PASD1; ENSG00000166049; CTA
KVNPKSSQR

SEQ ID NO: 58418 - protein, 9 aa, Homo sapiens
  Table A; Target 58418; HLA-A*31:01; PASD1; ENSG00000166049; CTA
KVNPKSSQR

SEQ ID NO: 58419 - protein, 9 aa, Homo sapiens
  Table A; Target 58419; HLA-A*32:01; PASD1; ENSG00000166049; CTA
KVNPKSSQR

SEQ ID NO: 58420 - protein, 9 aa, Homo sapiens
  Table A; Target 58420; HLA-A*33:03; PASD1; ENSG00000166049; CTA
KVNPKSSQR

SEQ ID NO: 58421 - protein, 10 aa, Homo sapiens
  Table A; Target 58421; HLA-A*03:01; PASD1; ENSG00000166049; CTA
KVNPKSSQRK

SEQ ID NO: 58422 - protein, 10 aa, Homo sapiens
  Table A; Target 58422; HLA-A*03:02; PASD1; ENSG00000166049; CTA
KVNPKSSQRK

SEQ ID NO: 58423 - protein, 8 aa, Homo sapiens
  Table A; Target 58423; HLA-B*18:01; PASD1; ENSG00000166049; CTA
LEFSVDQV

SEQ ID NO: 58424 - protein, 8 aa, Homo sapiens
  Table A; Target 58424; HLA-B*49:01; PASD1; ENSG00000166049; CTA
LEFSVDQV

SEQ ID NO: 58425 - protein, 11 aa, Homo sapiens
  Table A; Target 58425; HLA-B*49:01; PASD1; ENSG00000166049; CTA
LEFSVDQVDSV

SEQ ID NO: 58426 - protein, 8 aa, Homo sapiens
  Table A; Target 58426; HLA-B*49:01; PASD1; ENSG00000166049; CTA
LETPQDYI

SEQ ID NO: 58427 - protein, 11 aa, Homo sapiens
  Table A; Target 58427; HLA-B*44:02; PASD1; ENSG00000166049; CTA
LETPQDYIRLW

SEQ ID NO: 58428 - protein, 11 aa, Homo sapiens
  Table A; Target 58428; HLA-B*44:03; PASD1; ENSG00000166049; CTA
LETPQDYIRLW

SEQ ID NO: 58429 - protein, 11 aa, Homo sapiens
  Table A; Target 58429; HLA-B*57:01; PASD1; ENSG00000166049; CTA
LETPQDYIRLW

SEQ ID NO: 58430 - protein, 11 aa, Homo sapiens
  Table A; Target 58430; HLA-B*27:02; PASD1; ENSG00000166049; CTA
LGHLPAEIVGK

SEQ ID NO: 58431 - protein, 10 aa, Homo sapiens
  Table A; Target 58431; HLA-B*57:01; PASD1; ENSG00000166049; CTA
LGPVVQVNTW

SEQ ID NO: 58432 - protein, 10 aa, Homo sapiens
  Table A; Target 58432; HLA-B*58:01; PASD1; ENSG00000166049; CTA
LGPVVQVNTW

SEQ ID NO: 58433 - protein, 9 aa, Homo sapiens
  Table A; Target 58433; HLA-C*05:01; PASD1; ENSG00000166049; CTA
LIDTSNSEA

SEQ ID NO: 58434 - protein, 9 aa, Homo sapiens
  Table A; Target 58434; HLA-A*02:01; PASD1; ENSG00000166049; CTA
LLDGFMITL

SEQ ID NO: 58435 - protein, 9 aa, Homo sapiens
  Table A; Target 58435; HLA-A*02:04; PASD1; ENSG00000166049; CTA
LLDGFMITL

SEQ ID NO: 58436 - protein, 9 aa, Homo sapiens
  Table A; Target 58436; HLA-A*02:07; PASD1; ENSG00000166049; CTA
LLDGFMITL

SEQ ID NO: 58437 - protein, 9 aa, Homo sapiens
  Table A; Target 58437; HLA-B*38:01; PASD1; ENSG00000166049; CTA
LLDGFMITL

SEQ ID NO: 58438 - protein, 9 aa, Homo sapiens
  Table A; Target 58438; HLA-A*02:01; PASD1; ENSG00000166049; CTA
LLGHLPAEI

SEQ ID NO: 58439 - protein, 9 aa, Homo sapiens
  Table A; Target 58439; HLA-A*02:03; PASD1; ENSG00000166049; CTA
LLGHLPAEI

SEQ ID NO: 58440 - protein, 9 aa, Homo sapiens
  Table A; Target 58440; HLA-A*02:04; PASD1; ENSG00000166049; CTA
LLGHLPAEI

SEQ ID NO: 58441 - protein, 10 aa, Homo sapiens
  Table A; Target 58441; HLA-A*32:01; PASD1; ENSG00000166049; CTA
LLNSETHIEF

SEQ ID NO: 58442 - protein, 10 aa, Homo sapiens
  Table A; Target 58442; HLA-B*15:01; PASD1; ENSG00000166049; CTA
LLNSETHIEF

SEQ ID NO: 58443 - protein, 11 aa, Homo sapiens
  Table A; Target 58443; HLA-B*15:01; PASD1; ENSG00000166049; CTA
LLPDEEKDEVY

SEQ ID NO: 58444 - protein, 9 aa, Homo sapiens
  Table A; Target 58444; HLA-A*03:02; PASD1; ENSG00000166049; CTA
LLQQLYTSK

SEQ ID NO: 58445 - protein, 9 aa, Homo sapiens
  Table A; Target 58445; HLA-A*11:01; PASD1; ENSG00000166049; CTA
LLQQLYTSK

SEQ ID NO: 58446 - protein, 11 aa, Homo sapiens
  Table A; Target 58446; HLA-A*02:07; PASD1; ENSG00000166049; CTA
LMDPVDPEDSV

SEQ ID NO: 58447 - protein, 10 aa, Homo sapiens
  Table A; Target 58447; HLA-C*04:01; PASD1; ENSG00000166049; CTA
LMMDHLQKQP

SEQ ID NO: 58448 - protein, 9 aa, Homo sapiens
  Table A; Target 58448; HLA-A*29:02; PASD1; ENSG00000166049; CTA
LNSETHIEF

SEQ ID NO: 58449 - protein, 9 aa, Homo sapiens
  Table A; Target 58449; HLA-C*12:03; PASD1; ENSG00000166049; CTA
LNSETHIEF

SEQ ID NO: 58450 - protein, 9 aa, Homo sapiens
  Table A; Target 58450; HLA-C*16:01; PASD1; ENSG00000166049; CTA
LNSETHIEF

SEQ ID NO: 58451 - protein, 9 aa, Homo sapiens
  Table A; Target 58451; HLA-B*51:01; PASD1; ENSG00000166049; CTA
LPAEIVGKK

SEQ ID NO: 58452 - protein, 10 aa, Homo sapiens
  Table A; Target 58452; HLA-B*07:02; PASD1; ENSG00000166049; CTA
LPAEIVGKKL

SEQ ID NO: 58453 - protein, 10 aa, Homo sapiens
  Table A; Target 58453; HLA-B*35:01; PASD1; ENSG00000166049; CTA
LPAEIVGKKL

SEQ ID NO: 58454 - protein, 10 aa, Homo sapiens
  Table A; Target 58454; HLA-B*35:03; PASD1; ENSG00000166049; CTA
LPAEIVGKKL

SEQ ID NO: 58455 - protein, 10 aa, Homo sapiens
  Table A; Target 58455; HLA-B*51:01; PASD1; ENSG00000166049; CTA
LPAEIVGKKL

SEQ ID NO: 58456 - protein, 10 aa, Homo sapiens
  Table A; Target 58456; HLA-B*56:01; PASD1; ENSG00000166049; CTA
LPAEIVGKKL

SEQ ID NO: 58457 - protein, 10 aa, Homo sapiens
  Table A; Target 58457; HLA-C*07:02; PASD1; ENSG00000166049; CTA
LPAEIVGKKL

SEQ ID NO: 58458 - protein, 9 aa, Homo sapiens
  Table A; Target 58458; HLA-B*35:03; PASD1; ENSG00000166049; CTA
LPDEEKDEV

SEQ ID NO: 58459 - protein, 9 aa, Homo sapiens
  Table A; Target 58459; HLA-B*51:01; PASD1; ENSG00000166049; CTA
LPDEEKDEV

SEQ ID NO: 58460 - protein, 9 aa, Homo sapiens
  Table A; Target 58460; HLA-B*55:01; PASD1; ENSG00000166049; CTA
LPDEEKDEV

SEQ ID NO: 58461 - protein, 9 aa, Homo sapiens
  Table A; Target 58461; HLA-C*03:03; PASD1; ENSG00000166049; CTA
LPDEEKDEV

SEQ ID NO: 58462 - protein, 10 aa, Homo sapiens
  Table A; Target 58462; HLA-A*01:01; PASD1; ENSG00000166049; CTA
LPDEEKDEVY

SEQ ID NO: 58463 - protein, 10 aa, Homo sapiens
  Table A; Target 58463; HLA-B*35:01; PASD1; ENSG00000166049; CTA
LPDEEKDEVY

SEQ ID NO: 58464 - protein, 10 aa, Homo sapiens
  Table A; Target 58464; HLA-B*35:03; PASD1; ENSG00000166049; CTA
LPDEEKDEVY

SEQ ID NO: 58465 - protein, 10 aa, Homo sapiens
  Table A; Target 58465; HLA-B*55:01; PASD1; ENSG00000166049; CTA
LPDEEKDEVY

SEQ ID NO: 58466 - protein, 10 aa, Homo sapiens
  Table A; Target 58466; HLA-C*03:03; PASD1; ENSG00000166049; CTA
LPDEEKDEVY

SEQ ID NO: 58467 - protein, 11 aa, Homo sapiens
  Table A; Target 58467; HLA-B*54:01; PASD1; ENSG00000166049; CTA
LPLIDTSNSEA

SEQ ID NO: 58468 - protein, 11 aa, Homo sapiens
  Table A; Target 58468; HLA-B*56:01; PASD1; ENSG00000166049; CTA
LPLIDTSNSEA

SEQ ID NO: 58469 - protein, 9 aa, Homo sapiens
  Table A; Target 58469; HLA-A*02:01; PASD1; ENSG00000166049; CTA
LQAQPIVPV

SEQ ID NO: 58470 - protein, 9 aa, Homo sapiens
  Table A; Target 58470; HLA-A*02:03; PASD1; ENSG00000166049; CTA
LQAQPIVPV

SEQ ID NO: 58471 - protein, 9 aa, Homo sapiens
  Table A; Target 58471; HLA-B*13:02; PASD1; ENSG00000166049; CTA
LQAQPIVPV

SEQ ID NO: 58472 - protein, 11 aa, Homo sapiens
  Table A; Target 58472; HLA-A*31:01; PASD1; ENSG00000166049; CTA
LQAQPIVPVQR

SEQ ID NO: 58473 - protein, 11 aa, Homo sapiens
  Table A; Target 58473; HLA-A*68:01; PASD1; ENSG00000166049; CTA
LQAQPIVPVQR

SEQ ID NO: 58474 - protein, 11 aa, Homo sapiens
  Table A; Target 58474; HLA-C*07:06; PASD1; ENSG00000166049; CTA
LQAQPIVPVQR

SEQ ID NO: 58475 - protein, 8 aa, Homo sapiens
  Table A; Target 58475; HLA-B*08:01; PASD1; ENSG00000166049; CTA
LQKQPNTL

SEQ ID NO: 58476 - protein, 9 aa, Homo sapiens
  Table A; Target 58476; HLA-A*31:01; PASD1; ENSG00000166049; CTA
LQKQPNTLR

SEQ ID NO: 58477 - protein, 9 aa, Homo sapiens
  Table A; Target 58477; HLA-A*02:01; PASD1; ENSG00000166049; CTA
LQNPRDVSV

SEQ ID NO: 58478 - protein, 9 aa, Homo sapiens
  Table A; Target 58478; HLA-A*32:01; PASD1; ENSG00000166049; CTA
LQNPRDVSV

SEQ ID NO: 58479 - protein, 9 aa, Homo sapiens
  Table A; Target 58479; HLA-B*08:01; PASD1; ENSG00000166049; CTA
LQNPRDVSV

SEQ ID NO: 58480 - protein, 9 aa, Homo sapiens
  Table A; Target 58480; HLA-B*13:02; PASD1; ENSG00000166049; CTA
LQNPRDVSV

SEQ ID NO: 58481 - protein, 9 aa, Homo sapiens
  Table A; Target 58481; HLA-B*37:01; PASD1; ENSG00000166049; CTA
LQNPRDVSV

SEQ ID NO: 58482 - protein, 9 aa, Homo sapiens
  Table A; Target 58482; HLA-C*03:04; PASD1; ENSG00000166049; CTA
LQNPRDVSV

SEQ ID NO: 58483 - protein, 9 aa, Homo sapiens
  Table A; Target 58483; HLA-C*16:01; PASD1; ENSG00000166049; CTA
LQNPRDVSV

SEQ ID NO: 58484 - protein, 9 aa, Homo sapiens
  Table A; Target 58484; HLA-C*16:02; PASD1; ENSG00000166049; CTA
LQNPRDVSV

SEQ ID NO: 58485 - protein, 9 aa, Homo sapiens
  Table A; Target 58485; HLA-A*01:01; PASD1; ENSG00000166049; CTA
LQPSSPVAY

SEQ ID NO: 58486 - protein, 9 aa, Homo sapiens
  Table A; Target 58486; HLA-A*29:02; PASD1; ENSG00000166049; CTA
LQPSSPVAY

SEQ ID NO: 58487 - protein, 9 aa, Homo sapiens
  Table A; Target 58487; HLA-A*30:02; PASD1; ENSG00000166049; CTA
LQPSSPVAY

SEQ ID NO: 58488 - protein, 9 aa, Homo sapiens
  Table A; Target 58488; HLA-A*32:01; PASD1; ENSG00000166049; CTA
LQPSSPVAY

SEQ ID NO: 58489 - protein, 9 aa, Homo sapiens
  Table A; Target 58489; HLA-B*15:01; PASD1; ENSG00000166049; CTA
LQPSSPVAY

SEQ ID NO: 58490 - protein, 9 aa, Homo sapiens
  Table A; Target 58490; HLA-B*15:03; PASD1; ENSG00000166049; CTA
LQPSSPVAY

SEQ ID NO: 58491 - protein, 9 aa, Homo sapiens
  Table A; Target 58491; HLA-B*46:01; PASD1; ENSG00000166049; CTA
LQPSSPVAY

SEQ ID NO: 58492 - protein, 9 aa, Homo sapiens
  Table A; Target 58492; HLA-C*01:02; PASD1; ENSG00000166049; CTA
LQPSSPVAY

SEQ ID NO: 58493 - protein, 9 aa, Homo sapiens
  Table A; Target 58493; HLA-C*02:02; PASD1; ENSG00000166049; CTA
LQPSSPVAY

SEQ ID NO: 58494 - protein, 9 aa, Homo sapiens
  Table A; Target 58494; HLA-C*07:04; PASD1; ENSG00000166049; CTA
LQPSSPVAY

SEQ ID NO: 58495 - protein, 9 aa, Homo sapiens
  Table A; Target 58495; HLA-C*14:02; PASD1; ENSG00000166049; CTA
LQPSSPVAY

SEQ ID NO: 58496 - protein, 9 aa, Homo sapiens
  Table A; Target 58496; HLA-C*16:04; PASD1; ENSG00000166049; CTA
LQPSSPVAY

SEQ ID NO: 58497 - protein, 9 aa, Homo sapiens
  Table A; Target 58497; HLA-B*27:05; PASD1; ENSG00000166049; CTA
LRTQLLQQL

SEQ ID NO: 58498 - protein, 9 aa, Homo sapiens
  Table A; Target 58498; HLA-A*01:01; PASD1; ENSG00000166049; CTA
LSDSLGPVV

SEQ ID NO: 58499 - protein, 9 aa, Homo sapiens
  Table A; Target 58499; HLA-C*05:01; PASD1; ENSG00000166049; CTA
LSDSLGPVV

SEQ ID NO: 58500 - protein, 9 aa, Homo sapiens
  Table A; Target 58500; HLA-A*03:02; PASD1; ENSG00000166049; CTA
LVQQEQHLK

SEQ ID NO: 58501 - protein, 9 aa, Homo sapiens
  Table A; Target 58501; HLA-A*11:01; PASD1; ENSG00000166049; CTA
LVQQEQHLK

SEQ ID NO: 58502 - protein, 8 aa, Homo sapiens
  Table A; Target 58502; HLA-C*14:02; PASD1; ENSG00000166049; CTA
LYLVGNVC

SEQ ID NO: 58503 - protein, 9 aa, Homo sapiens
  Table A; Target 58503; HLA-A*23:01; PASD1; ENSG00000166049; CTA
LYLVGNVCI

SEQ ID NO: 58504 - protein, 9 aa, Homo sapiens
  Table A; Target 58504; HLA-A*24:02; PASD1; ENSG00000166049; CTA
LYLVGNVCI

SEQ ID NO: 58505 - protein, 9 aa, Homo sapiens
  Table A; Target 58505; HLA-C*14:02; PASD1; ENSG00000166049; CTA
LYRADPVDL

SEQ ID NO: 58506 - protein, 11 aa, Homo sapiens
  Table A; Target 58506; HLA-A*23:01; PASD1; ENSG00000166049; CTA
LYRADPVDLEF

SEQ ID NO: 58507 - protein, 11 aa, Homo sapiens
  Table A; Target 58507; HLA-A*24:02; PASD1; ENSG00000166049; CTA
LYRADPVDLEF

SEQ ID NO: 58508 - protein, 9 aa, Homo sapiens
  Table A; Target 58508; HLA-A*23:01; PASD1; ENSG00000166049; CTA
MFVDSDSTY

SEQ ID NO: 58509 - protein, 9 aa, Homo sapiens
  Table A; Target 58509; HLA-A*29:02; PASD1; ENSG00000166049; CTA
MFVDSDSTY

SEQ ID NO: 58510 - protein, 9 aa, Homo sapiens
  Table A; Target 58510; HLA-A*30:02; PASD1; ENSG00000166049; CTA
MFVDSDSTY

SEQ ID NO: 58511 - protein, 9 aa, Homo sapiens
  Table A; Target 58511; HLA-B*15:01; PASD1; ENSG00000166049; CTA
MFVDSDSTY

SEQ ID NO: 58512 - protein, 9 aa, Homo sapiens
  Table A; Target 58512; HLA-B*15:03; PASD1; ENSG00000166049; CTA
MFVDSDSTY

SEQ ID NO: 58513 - protein, 9 aa, Homo sapiens
  Table A; Target 58513; HLA-B*35:01; PASD1; ENSG00000166049; CTA
MFVDSDSTY

SEQ ID NO: 58514 - protein, 9 aa, Homo sapiens
  Table A; Target 58514; HLA-B*35:03; PASD1; ENSG00000166049; CTA
MFVDSDSTY

SEQ ID NO: 58515 - protein, 9 aa, Homo sapiens
  Table A; Target 58515; HLA-B*39:01; PASD1; ENSG00000166049; CTA
MFVDSDSTY

SEQ ID NO: 58516 - protein, 9 aa, Homo sapiens
  Table A; Target 58516; HLA-B*46:01; PASD1; ENSG00000166049; CTA
MFVDSDSTY

SEQ ID NO: 58517 - protein, 9 aa, Homo sapiens
  Table A; Target 58517; HLA-B*55:01; PASD1; ENSG00000166049; CTA
MFVDSDSTY

SEQ ID NO: 58518 - protein, 9 aa, Homo sapiens
  Table A; Target 58518; HLA-C*01:02; PASD1; ENSG00000166049; CTA
MFVDSDSTY

SEQ ID NO: 58519 - protein, 9 aa, Homo sapiens
  Table A; Target 58519; HLA-C*04:01; PASD1; ENSG00000166049; CTA
MFVDSDSTY

SEQ ID NO: 58520 - protein, 9 aa, Homo sapiens
  Table A; Target 58520; HLA-C*07:04; PASD1; ENSG00000166049; CTA
MFVDSDSTY

SEQ ID NO: 58521 - protein, 9 aa, Homo sapiens
  Table A; Target 58521; HLA-C*14:02; PASD1; ENSG00000166049; CTA
MFVDSDSTY

SEQ ID NO: 58522 - protein, 11 aa, Homo sapiens
  Table A; Target 58522; HLA-B*55:01; PASD1; ENSG00000166049; CTA
MPAEQRDSNKP

SEQ ID NO: 58523 - protein, 9 aa, Homo sapiens
  Table A; Target 58523; HLA-B*07:02; PASD1; ENSG00000166049; CTA
MPESPALSL

SEQ ID NO: 58524 - protein, 9 aa, Homo sapiens
  Table A; Target 58524; HLA-B*08:01; PASD1; ENSG00000166049; CTA
MPESPALSL

SEQ ID NO: 58525 - protein, 9 aa, Homo sapiens
  Table A; Target 58525; HLA-B*35:01; PASD1; ENSG00000166049; CTA
MPESPALSL

SEQ ID NO: 58526 - protein, 9 aa, Homo sapiens
  Table A; Target 58526; HLA-B*35:03; PASD1; ENSG00000166049; CTA
MPESPALSL

SEQ ID NO: 58527 - protein, 9 aa, Homo sapiens
  Table A; Target 58527; HLA-B*51:01; PASD1; ENSG00000166049; CTA
MPESPALSL

SEQ ID NO: 58528 - protein, 9 aa, Homo sapiens
  Table A; Target 58528; HLA-B*54:01; PASD1; ENSG00000166049; CTA
MPESPALSL

SEQ ID NO: 58529 - protein, 9 aa, Homo sapiens
  Table A; Target 58529; HLA-B*55:01; PASD1; ENSG00000166049; CTA
MPESPALSL

SEQ ID NO: 58530 - protein, 9 aa, Homo sapiens
  Table A; Target 58530; HLA-B*56:01; PASD1; ENSG00000166049; CTA
MPESPALSL

SEQ ID NO: 58531 - protein, 9 aa, Homo sapiens
  Table A; Target 58531; HLA-C*01:02; PASD1; ENSG00000166049; CTA
MPESPALSL

SEQ ID NO: 58532 - protein, 9 aa, Homo sapiens
  Table A; Target 58532; HLA-C*03:03; PASD1; ENSG00000166049; CTA
MPESPALSL

SEQ ID NO: 58533 - protein, 9 aa, Homo sapiens
  Table A; Target 58533; HLA-C*03:04; PASD1; ENSG00000166049; CTA
MPESPALSL

SEQ ID NO: 58534 - protein, 9 aa, Homo sapiens
  Table A; Target 58534; HLA-C*05:01; PASD1; ENSG00000166049; CTA
MPESPALSL

SEQ ID NO: 58535 - protein, 9 aa, Homo sapiens
  Table A; Target 58535; HLA-C*07:02; PASD1; ENSG00000166049; CTA
MPESPALSL

SEQ ID NO: 58536 - protein, 9 aa, Homo sapiens
  Table A; Target 58536; HLA-C*14:02; PASD1; ENSG00000166049; CTA
MPESPALSL

SEQ ID NO: 58537 - protein, 9 aa, Homo sapiens
  Table A; Target 58537; HLA-B*27:05; PASD1; ENSG00000166049; CTA
MRSAEQTRL

SEQ ID NO: 58538 - protein, 8 aa, Homo sapiens
  Table A; Target 58538; HLA-B*18:01; PASD1; ENSG00000166049; CTA
NEFPVVFS

SEQ ID NO: 58539 - protein, 9 aa, Homo sapiens
  Table A; Target 58539; HLA-B*18:01; PASD1; ENSG00000166049; CTA
NEFPVVFSG

SEQ ID NO: 58540 - protein, 10 aa, Homo sapiens
  Table A; Target 58540; HLA-A*30:01; PASD1; ENSG00000166049; CTA
NEFPVVFSGL

SEQ ID NO: 58541 - protein, 10 aa, Homo sapiens
  Table A; Target 58541; HLA-B*18:01; PASD1; ENSG00000166049; CTA
NEFPVVFSGL

SEQ ID NO: 58542 - protein, 10 aa, Homo sapiens
  Table A; Target 58542; HLA-B*40:01; PASD1; ENSG00000166049; CTA
NEFPVVFSGL

SEQ ID NO: 58543 - protein, 10 aa, Homo sapiens
  Table A; Target 58543; HLA-B*44:02; PASD1; ENSG00000166049; CTA
NEFPVVFSGL

SEQ ID NO: 58544 - protein, 10 aa, Homo sapiens
  Table A; Target 58544; HLA-B*44:03; PASD1; ENSG00000166049; CTA
NEFPVVFSGL

SEQ ID NO: 58545 - protein, 10 aa, Homo sapiens
  Table A; Target 58545; HLA-B*49:01; PASD1; ENSG00000166049; CTA
NEFPVVFSGL

SEQ ID NO: 58546 - protein, 11 aa, Homo sapiens
  Table A; Target 58546; HLA-B*44:02; PASD1; ENSG00000166049; CTA
NEFPVVFSGLF

SEQ ID NO: 58547 - protein, 11 aa, Homo sapiens
  Table A; Target 58547; HLA-B*44:03; PASD1; ENSG00000166049; CTA
NEFPVVFSGLF

SEQ ID NO: 58548 - protein, 9 aa, Homo sapiens
  Table A; Target 58548; HLA-B*07:02; PASD1; ENSG00000166049; CTA
NPKSSQRKL

SEQ ID NO: 58549 - protein, 9 aa, Homo sapiens
  Table A; Target 58549; HLA-B*07:02; PASD1; ENSG00000166049; CTA
NPRDVSVPL

SEQ ID NO: 58550 - protein, 9 aa, Homo sapiens
  Table A; Target 58550; HLA-B*35:01; PASD1; ENSG00000166049; CTA
NPRDVSVPL

SEQ ID NO: 58551 - protein, 9 aa, Homo sapiens
  Table A; Target 58551; HLA-B*35:03; PASD1; ENSG00000166049; CTA
NPRDVSVPL

SEQ ID NO: 58552 - protein, 9 aa, Homo sapiens
  Table A; Target 58552; HLA-B*56:01; PASD1; ENSG00000166049; CTA
NPRDVSVPL

SEQ ID NO: 58553 - protein, 9 aa, Homo sapiens
  Table A; Target 58553; HLA-C*07:02; PASD1; ENSG00000166049; CTA
NPRDVSVPL

SEQ ID NO: 58554 - protein, 9 aa, Homo sapiens
  Table A; Target 58554; HLA-B*54:01; PASD1; ENSG00000166049; CTA
NPVAPLDQA

SEQ ID NO: 58555 - protein, 9 aa, Homo sapiens
  Table A; Target 58555; HLA-B*55:01; PASD1; ENSG00000166049; CTA
NPVAPLDQA

SEQ ID NO: 58556 - protein, 9 aa, Homo sapiens
  Table A; Target 58556; HLA-B*56:01; PASD1; ENSG00000166049; CTA
NPVAPLDQA

SEQ ID NO: 58557 - protein, 11 aa, Homo sapiens
  Table A; Target 58557; HLA-B*35:03; PASD1; ENSG00000166049; CTA
NPVAPLDQAGL

SEQ ID NO: 58558 - protein, 8 aa, Homo sapiens
  Table A; Target 58558; HLA-B*39:01; PASD1; ENSG00000166049; CTA
NQQNALEL

SEQ ID NO: 58559 - protein, 8 aa, Homo sapiens
  Table A; Target 58559; HLA-C*14:02; PASD1; ENSG00000166049; CTA
NQQNALEL

SEQ ID NO: 58560 - protein, 8 aa, Homo sapiens
  Table A; Target 58560; HLA-C*05:01; PASD1; ENSG00000166049; CTA
NSETHIEF

SEQ ID NO: 58561 - protein, 8 aa, Homo sapiens
  Table A; Target 58561; HLA-C*16:01; PASD1; ENSG00000166049; CTA
NSETHIEF

SEQ ID NO: 58562 - protein, 10 aa, Homo sapiens
  Table A; Target 58562; HLA-A*01:01; PASD1; ENSG00000166049; CTA
NVEHGDSSAY

SEQ ID NO: 58563 - protein, 8 aa, Homo sapiens
  Table A; Target 58563; HLA-A*68:01; PASD1; ENSG00000166049; CTA
NVIVGNER

SEQ ID NO: 58564 - protein, 9 aa, Homo sapiens
  Table A; Target 58564; HLA-A*31:01; PASD1; ENSG00000166049; CTA
NVKFIVNVR

SEQ ID NO: 58565 - protein, 9 aa, Homo sapiens
  Table A; Target 58565; HLA-A*33:01; PASD1; ENSG00000166049; CTA
NVKFIVNVR

SEQ ID NO: 58566 - protein, 9 aa, Homo sapiens
  Table A; Target 58566; HLA-A*33:03; PASD1; ENSG00000166049; CTA
NVKFIVNVR

SEQ ID NO: 58567 - protein, 9 aa, Homo sapiens
  Table A; Target 58567; HLA-A*68:01; PASD1; ENSG00000166049; CTA
NVKFIVNVR

SEQ ID NO: 58568 - protein, 9 aa, Homo sapiens
  Table A; Target 58568; HLA-C*07:06; PASD1; ENSG00000166049; CTA
NVKFIVNVR

SEQ ID NO: 58569 - protein, 9 aa, Homo sapiens
  Table A; Target 58569; HLA-A*23:01; PASD1; ENSG00000166049; CTA
NWIPSFPTY

SEQ ID NO: 58570 - protein, 9 aa, Homo sapiens
  Table A; Target 58570; HLA-A*24:02; PASD1; ENSG00000166049; CTA
NWIPSFPTY

SEQ ID NO: 58571 - protein, 9 aa, Homo sapiens
  Table A; Target 58571; HLA-A*29:02; PASD1; ENSG00000166049; CTA
NWIPSFPTY

SEQ ID NO: 58572 - protein, 10 aa, Homo sapiens
  Table A; Target 58572; HLA-B*07:02; PASD1; ENSG00000166049; CTA
PAAAAAAAAI

SEQ ID NO: 58573 - protein, 10 aa, Homo sapiens
  Table A; Target 58573; HLA-B*07:02; PASD1; ENSG00000166049; CTA
PAEIVGKKLL

SEQ ID NO: 58574 - protein, 11 aa, Homo sapiens
  Table A; Target 58574; HLA-A*03:02; PASD1; ENSG00000166049; CTA
PDLQSSEAVPK

SEQ ID NO: 58575 - protein, 11 aa, Homo sapiens
  Table A; Target 58575; HLA-A*11:01; PASD1; ENSG00000166049; CTA
PDLQSSEAVPK

SEQ ID NO: 58576 - protein, 11 aa, Homo sapiens
  Table A; Target 58576; HLA-B*27:02; PASD1; ENSG00000166049; CTA
PDLQSSEAVPK

SEQ ID NO: 58577 - protein, 10 aa, Homo sapiens
  Table A; Target 58577; HLA-B*40:01; PASD1; ENSG00000166049; CTA
PEEEQQKQQL

SEQ ID NO: 58578 - protein, 8 aa, Homo sapiens
  Table A; Target 58578; HLA-B*37:01; PASD1; ENSG00000166049; CTA
PESPALSL

SEQ ID NO: 58579 - protein, 10 aa, Homo sapiens
  Table A; Target 58579; HLA-A*30:02; PASD1; ENSG00000166049; CTA
PLQPSSPVAY

SEQ ID NO: 58580 - protein, 10 aa, Homo sapiens
  Table A; Target 58580; HLA-B*15:01; PASD1; ENSG00000166049; CTA
PLQPSSPVAY

SEQ ID NO: 58581 - protein, 10 aa, Homo sapiens
  Table A; Target 58581; HLA-A*30:02; PASD1; ENSG00000166049; CTA
PQAFQGPAAY

SEQ ID NO: 58582 - protein, 9 aa, Homo sapiens
  Table A; Target 58582; HLA-A*68:02; PASD1; ENSG00000166049; CTA
PTYDYFNQV

SEQ ID NO: 58583 - protein, 8 aa, Homo sapiens
  Table A; Target 58583; HLA-C*05:01; PASD1; ENSG00000166049; CTA
PVDPEDSV

SEQ ID NO: 58584 - protein, 8 aa, Homo sapiens
  Table A; Target 58584; HLA-B*58:01; PASD1; ENSG00000166049; CTA
PVVQVNTW

SEQ ID NO: 58585 - protein, 8 aa, Homo sapiens
  Table A; Target 58585; HLA-B*54:01; PASD1; ENSG00000166049; CTA
QAFQGPAA

SEQ ID NO: 58586 - protein, 9 aa, Homo sapiens
  Table A; Target 58586; HLA-A*01:01; PASD1; ENSG00000166049; CTA
QAFQGPAAY

SEQ ID NO: 58587 - protein, 9 aa, Homo sapiens
  Table A; Target 58587; HLA-A*25:01; PASD1; ENSG00000166049; CTA
QAFQGPAAY

SEQ ID NO: 58588 - protein, 9 aa, Homo sapiens
  Table A; Target 58588; HLA-A*26:01; PASD1; ENSG00000166049; CTA
QAFQGPAAY

SEQ ID NO: 58589 - protein, 9 aa, Homo sapiens
  Table A; Target 58589; HLA-A*29:02; PASD1; ENSG00000166049; CTA
QAFQGPAAY

SEQ ID NO: 58590 - protein, 9 aa, Homo sapiens
  Table A; Target 58590; HLA-A*30:02; PASD1; ENSG00000166049; CTA
QAFQGPAAY

SEQ ID NO: 58591 - protein, 9 aa, Homo sapiens
  Table A; Target 58591; HLA-A*32:01; PASD1; ENSG00000166049; CTA
QAFQGPAAY

SEQ ID NO: 58592 - protein, 9 aa, Homo sapiens
  Table A; Target 58592; HLA-B*15:01; PASD1; ENSG00000166049; CTA
QAFQGPAAY

SEQ ID NO: 58593 - protein, 9 aa, Homo sapiens
  Table A; Target 58593; HLA-B*15:03; PASD1; ENSG00000166049; CTA
QAFQGPAAY

SEQ ID NO: 58594 - protein, 9 aa, Homo sapiens
  Table A; Target 58594; HLA-B*18:01; PASD1; ENSG00000166049; CTA
QAFQGPAAY

SEQ ID NO: 58595 - protein, 9 aa, Homo sapiens
  Table A; Target 58595; HLA-B*35:01; PASD1; ENSG00000166049; CTA
QAFQGPAAY

SEQ ID NO: 58596 - protein, 9 aa, Homo sapiens
  Table A; Target 58596; HLA-B*39:01; PASD1; ENSG00000166049; CTA
QAFQGPAAY

SEQ ID NO: 58597 - protein, 9 aa, Homo sapiens
  Table A; Target 58597; HLA-B*46:01; PASD1; ENSG00000166049; CTA
QAFQGPAAY

SEQ ID NO: 58598 - protein, 9 aa, Homo sapiens
  Table A; Target 58598; HLA-B*58:01; PASD1; ENSG00000166049; CTA
QAFQGPAAY

SEQ ID NO: 58599 - protein, 9 aa, Homo sapiens
  Table A; Target 58599; HLA-C*02:02; PASD1; ENSG00000166049; CTA
QAFQGPAAY

SEQ ID NO: 58600 - protein, 9 aa, Homo sapiens
  Table A; Target 58600; HLA-C*03:03; PASD1; ENSG00000166049; CTA
QAFQGPAAY

SEQ ID NO: 58601 - protein, 9 aa, Homo sapiens
  Table A; Target 58601; HLA-C*03:04; PASD1; ENSG00000166049; CTA
QAFQGPAAY

SEQ ID NO: 58602 - protein, 9 aa, Homo sapiens
  Table A; Target 58602; HLA-C*07:04; PASD1; ENSG00000166049; CTA
QAFQGPAAY

SEQ ID NO: 58603 - protein, 9 aa, Homo sapiens
  Table A; Target 58603; HLA-C*07:06; PASD1; ENSG00000166049; CTA
QAFQGPAAY

SEQ ID NO: 58604 - protein, 9 aa, Homo sapiens
  Table A; Target 58604; HLA-C*12:03; PASD1; ENSG00000166049; CTA
QAFQGPAAY

SEQ ID NO: 58605 - protein, 9 aa, Homo sapiens
  Table A; Target 58605; HLA-C*14:02; PASD1; ENSG00000166049; CTA
QAFQGPAAY

SEQ ID NO: 58606 - protein, 9 aa, Homo sapiens
  Table A; Target 58606; HLA-C*16:01; PASD1; ENSG00000166049; CTA
QAFQGPAAY

SEQ ID NO: 58607 - protein, 9 aa, Homo sapiens
  Table A; Target 58607; HLA-C*16:04; PASD1; ENSG00000166049; CTA
QAFQGPAAY

SEQ ID NO: 58608 - protein, 9 aa, Homo sapiens
  Table A; Target 58608; HLA-A*32:01; PASD1; ENSG00000166049; CTA
QAQPIVPVQ

SEQ ID NO: 58609 - protein, 9 aa, Homo sapiens
  Table A; Target 58609; HLA-C*06:02; PASD1; ENSG00000166049; CTA
QAQPIVPVQ

SEQ ID NO: 58610 - protein, 9 aa, Homo sapiens
  Table A; Target 58610; HLA-C*12:03; PASD1; ENSG00000166049; CTA
QAQPIVPVQ

SEQ ID NO: 58611 - protein, 9 aa, Homo sapiens
  Table A; Target 58611; HLA-C*16:01; PASD1; ENSG00000166049; CTA
QAQPIVPVQ

SEQ ID NO: 58612 - protein, 10 aa, Homo sapiens
  Table A; Target 58612; HLA-A*03:02; PASD1; ENSG00000166049; CTA
QAQPIVPVQR

SEQ ID NO: 58613 - protein, 10 aa, Homo sapiens
  Table A; Target 58613; HLA-A*11:01; PASD1; ENSG00000166049; CTA
QAQPIVPVQR

SEQ ID NO: 58614 - protein, 10 aa, Homo sapiens
  Table A; Target 58614; HLA-A*31:01; PASD1; ENSG00000166049; CTA
QAQPIVPVQR

SEQ ID NO: 58615 - protein, 10 aa, Homo sapiens
  Table A; Target 58615; HLA-A*33:01; PASD1; ENSG00000166049; CTA
QAQPIVPVQR

SEQ ID NO: 58616 - protein, 10 aa, Homo sapiens
  Table A; Target 58616; HLA-A*33:03; PASD1; ENSG00000166049; CTA
QAQPIVPVQR

SEQ ID NO: 58617 - protein, 10 aa, Homo sapiens
  Table A; Target 58617; HLA-A*68:01; PASD1; ENSG00000166049; CTA
QAQPIVPVQR

SEQ ID NO: 58618 - protein, 10 aa, Homo sapiens
  Table A; Target 58618; HLA-A*68:02; PASD1; ENSG00000166049; CTA
QAQPIVPVQR

SEQ ID NO: 58619 - protein, 10 aa, Homo sapiens
  Table A; Target 58619; HLA-B*57:01; PASD1; ENSG00000166049; CTA
QAQPIVPVQR

SEQ ID NO: 58620 - protein, 10 aa, Homo sapiens
  Table A; Target 58620; HLA-C*07:06; PASD1; ENSG00000166049; CTA
QAQPIVPVQR

SEQ ID NO: 58621 - protein, 9 aa, Homo sapiens
  Table A; Target 58621; HLA-A*30:01; PASD1; ENSG00000166049; CTA
QDFRGEPEV

SEQ ID NO: 58622 - protein, 9 aa, Homo sapiens
  Table A; Target 58622; HLA-B*37:01; PASD1; ENSG00000166049; CTA
QDFRGEPEV

SEQ ID NO: 58623 - protein, 8 aa, Homo sapiens
  Table A; Target 58623; HLA-B*18:01; PASD1; ENSG00000166049; CTA
QEDESQSF

SEQ ID NO: 58624 - protein, 8 aa, Homo sapiens
  Table A; Target 58624; HLA-B*37:01; PASD1; ENSG00000166049; CTA
QEDESQSF

SEQ ID NO: 58625 - protein, 8 aa, Homo sapiens
  Table A; Target 58625; HLA-B*44:02; PASD1; ENSG00000166049; CTA
QEDESQSF

SEQ ID NO: 58626 - protein, 9 aa, Homo sapiens
  Table A; Target 58626; HLA-A*01:01; PASD1; ENSG00000166049; CTA
QEDESQSFY

SEQ ID NO: 58627 - protein, 9 aa, Homo sapiens
  Table A; Target 58627; HLA-B*18:01; PASD1; ENSG00000166049; CTA
QEDESQSFY

SEQ ID NO: 58628 - protein, 9 aa, Homo sapiens
  Table A; Target 58628; HLA-B*44:02; PASD1; ENSG00000166049; CTA
QEDESQSFY

SEQ ID NO: 58629 - protein, 9 aa, Homo sapiens
  Table A; Target 58629; HLA-B*44:03; PASD1; ENSG00000166049; CTA
QEDESQSFY

SEQ ID NO: 58630 - protein, 9 aa, Homo sapiens
  Table A; Target 58630; HLA-A*30:01; PASD1; ENSG00000166049; CTA
QELELMKKL

SEQ ID NO: 58631 - protein, 9 aa, Homo sapiens
  Table A; Target 58631; HLA-B*18:01; PASD1; ENSG00000166049; CTA
QELELMKKL

SEQ ID NO: 58632 - protein, 9 aa, Homo sapiens
  Table A; Target 58632; HLA-B*37:01; PASD1; ENSG00000166049; CTA
QELELMKKL

SEQ ID NO: 58633 - protein, 9 aa, Homo sapiens
  Table A; Target 58633; HLA-B*40:01; PASD1; ENSG00000166049; CTA
QELELMKKL

SEQ ID NO: 58634 - protein, 9 aa, Homo sapiens
  Table A; Target 58634; HLA-B*44:02; PASD1; ENSG00000166049; CTA
QELELMKKL

SEQ ID NO: 58635 - protein, 9 aa, Homo sapiens
  Table A; Target 58635; HLA-B*44:03; PASD1; ENSG00000166049; CTA
QELELMKKL

SEQ ID NO: 58636 - protein, 9 aa, Homo sapiens
  Table A; Target 58636; HLA-B*49:01; PASD1; ENSG00000166049; CTA
QELELMKKL

SEQ ID NO: 58637 - protein, 10 aa, Homo sapiens
  Table A; Target 58637; HLA-B*49:01; PASD1; ENSG00000166049; CTA
QELSDSLGPV

SEQ ID NO: 58638 - protein, 11 aa, Homo sapiens
  Table A; Target 58638; HLA-B*49:01; PASD1; ENSG00000166049; CTA
QELSDSLGPVV

SEQ ID NO: 58639 - protein, 8 aa, Homo sapiens
  Table A; Target 58639; HLA-B*49:01; PASD1; ENSG00000166049; CTA
QENVHMFV

SEQ ID NO: 58640 - protein, 9 aa, Homo sapiens
  Table A; Target 58640; HLA-B*37:01; PASD1; ENSG00000166049; CTA
QEQPLKHNV

SEQ ID NO: 58641 - protein, 9 aa, Homo sapiens
  Table A; Target 58641; HLA-B*44:02; PASD1; ENSG00000166049; CTA
QEQPLKHNV

SEQ ID NO: 58642 - protein, 9 aa, Homo sapiens
  Table A; Target 58642; HLA-B*44:03; PASD1; ENSG00000166049; CTA
QEQPLKHNV

SEQ ID NO: 58643 - protein, 9 aa, Homo sapiens
  Table A; Target 58643; HLA-B*49:01; PASD1; ENSG00000166049; CTA
QEQPLKHNV

SEQ ID NO: 58644 - protein, 10 aa, Homo sapiens
  Table A; Target 58644; HLA-B*44:02; PASD1; ENSG00000166049; CTA
QEQPLKHNVI

SEQ ID NO: 58645 - protein, 10 aa, Homo sapiens
  Table A; Target 58645; HLA-B*44:03; PASD1; ENSG00000166049; CTA
QEQPLKHNVI

SEQ ID NO: 58646 - protein, 10 aa, Homo sapiens
  Table A; Target 58646; HLA-B*49:01; PASD1; ENSG00000166049; CTA
QEQPLKHNVI

SEQ ID NO: 58647 - protein, 8 aa, Homo sapiens
  Table A; Target 58647; HLA-C*01:02; PASD1; ENSG00000166049; CTA
QGPPVNQL

SEQ ID NO: 58648 - protein, 9 aa, Homo sapiens
  Table A; Target 58648; HLA-C*14:02; PASD1; ENSG00000166049; CTA
QGQRGHTSM

SEQ ID NO: 58649 - protein, 10 aa, Homo sapiens
  Table A; Target 58649; HLA-A*01:01; PASD1; ENSG00000166049; CTA
QIDIAEVEQY

SEQ ID NO: 58650 - protein, 9 aa, Homo sapiens
  Table A; Target 58650; HLA-A*01:01; PASD1; ENSG00000166049; CTA
QLEERTWLL

SEQ ID NO: 58651 - protein, 9 aa, Homo sapiens
  Table A; Target 58651; HLA-A*02:01; PASD1; ENSG00000166049; CTA
QLEERTWLL

SEQ ID NO: 58652 - protein, 9 aa, Homo sapiens
  Table A; Target 58652; HLA-A*02:04; PASD1; ENSG00000166049; CTA
QLEERTWLL

SEQ ID NO: 58653 - protein, 9 aa, Homo sapiens
  Table A; Target 58653; HLA-A*02:07; PASD1; ENSG00000166049; CTA
QLEERTWLL

SEQ ID NO: 58654 - protein, 10 aa, Homo sapiens
  Table A; Target 58654; HLA-A*02:01; PASD1; ENSG00000166049; CTA
QLLDGFMITL

SEQ ID NO: 58655 - protein, 10 aa, Homo sapiens
  Table A; Target 58655; HLA-A*02:03; PASD1; ENSG00000166049; CTA
QLLDGFMITL

SEQ ID NO: 58656 - protein, 10 aa, Homo sapiens
  Table A; Target 58656; HLA-A*02:04; PASD1; ENSG00000166049; CTA
QLLDGFMITL

SEQ ID NO: 58657 - protein, 10 aa, Homo sapiens
  Table A; Target 58657; HLA-A*02:07; PASD1; ENSG00000166049; CTA
QLLDGFMITL

SEQ ID NO: 58658 - protein, 10 aa, Homo sapiens
  Table A; Target 58658; HLA-A*03:01; PASD1; ENSG00000166049; CTA
QLLDGFMITL

SEQ ID NO: 58659 - protein, 10 aa, Homo sapiens
  Table A; Target 58659; HLA-A*03:01; PASD1; ENSG00000166049; CTA
QLLQQLYTSK

SEQ ID NO: 58660 - protein, 10 aa, Homo sapiens
  Table A; Target 58660; HLA-A*03:02; PASD1; ENSG00000166049; CTA
QLLQQLYTSK

SEQ ID NO: 58661 - protein, 10 aa, Homo sapiens
  Table A; Target 58661; HLA-A*11:01; PASD1; ENSG00000166049; CTA
QLLQQLYTSK

SEQ ID NO: 58662 - protein, 10 aa, Homo sapiens
  Table A; Target 58662; HLA-B*27:02; PASD1; ENSG00000166049; CTA
QLLQQLYTSK

SEQ ID NO: 58663 - protein, 8 aa, Homo sapiens
  Table A; Target 58663; HLA-A*03:02; PASD1; ENSG00000166049; CTA
QLQEQPLK

SEQ ID NO: 58664 - protein, 9 aa, Homo sapiens
  Table A; Target 58664; HLA-A*01:01; PASD1; ENSG00000166049; CTA
QLQEQPLKH

SEQ ID NO: 58665 - protein, 9 aa, Homo sapiens
  Table A; Target 58665; HLA-A*03:01; PASD1; ENSG00000166049; CTA
QLQEQPLKH

SEQ ID NO: 58666 - protein, 9 aa, Homo sapiens
  Table A; Target 58666; HLA-A*03:02; PASD1; ENSG00000166049; CTA
QLQEQPLKH

SEQ ID NO: 58667 - protein, 9 aa, Homo sapiens
  Table A; Target 58667; HLA-C*16:02; PASD1; ENSG00000166049; CTA
QLQEQPLKH

SEQ ID NO: 58668 - protein, 9 aa, Homo sapiens
  Table A; Target 58668; HLA-A*02:03; PASD1; ENSG00000166049; CTA
QLREQLQQL

SEQ ID NO: 58669 - protein, 9 aa, Homo sapiens
  Table A; Target 58669; HLA-A*02:04; PASD1; ENSG00000166049; CTA
QLREQLQQL

SEQ ID NO: 58670 - protein, 9 aa, Homo sapiens
  Table A; Target 58670; HLA-B*07:02; PASD1; ENSG00000166049; CTA
QLREQLQQL

SEQ ID NO: 58671 - protein, 9 aa, Homo sapiens
  Table A; Target 58671; HLA-B*08:01; PASD1; ENSG00000166049; CTA
QLREQLQQL

SEQ ID NO: 58672 - protein, 9 aa, Homo sapiens
  Table A; Target 58672; HLA-B*38:01; PASD1; ENSG00000166049; CTA
QLVQQEQHL

SEQ ID NO: 58673 - protein, 10 aa, Homo sapiens
  Table A; Target 58673; HLA-A*03:02; PASD1; ENSG00000166049; CTA
QLVQQEQHLK

SEQ ID NO: 58674 - protein, 8 aa, Homo sapiens
  Table A; Target 58674; HLA-B*08:01; PASD1; ENSG00000166049; CTA
QLYTSKAV

SEQ ID NO: 58675 - protein, 10 aa, Homo sapiens
  Table A; Target 58675; HLA-C*07:02; PASD1; ENSG00000166049; CTA
QNPRDVSVPL

SEQ ID NO: 58676 - protein, 8 aa, Homo sapiens
  Table A; Target 58676; HLA-B*55:01; PASD1; ENSG00000166049; CTA
QPDQMRSA

SEQ ID NO: 58677 - protein, 8 aa, Homo sapiens
  Table A; Target 58677; HLA-B*56:01; PASD1; ENSG00000166049; CTA
QPDQMRSA

SEQ ID NO: 58678 - protein, 8 aa, Homo sapiens
  Table A; Target 58678; HLA-A*31:01; PASD1; ENSG00000166049; CTA
QPIVPVQR

SEQ ID NO: 58679 - protein, 8 aa, Homo sapiens
  Table A; Target 58679; HLA-A*33:01; PASD1; ENSG00000166049; CTA
QPIVPVQR

SEQ ID NO: 58680 - protein, 8 aa, Homo sapiens
  Table A; Target 58680; HLA-A*33:03; PASD1; ENSG00000166049; CTA
QPIVPVQR

SEQ ID NO: 58681 - protein, 8 aa, Homo sapiens
  Table A; Target 58681; HLA-A*68:01; PASD1; ENSG00000166049; CTA
QPIVPVQR

SEQ ID NO: 58682 - protein, 9 aa, Homo sapiens
  Table A; Target 58682; HLA-B*07:02; PASD1; ENSG00000166049; CTA
QPIVPVQRA

SEQ ID NO: 58683 - protein, 9 aa, Homo sapiens
  Table A; Target 58683; HLA-B*51:01; PASD1; ENSG00000166049; CTA
QPIVPVQRA

SEQ ID NO: 58684 - protein, 9 aa, Homo sapiens
  Table A; Target 58684; HLA-B*54:01; PASD1; ENSG00000166049; CTA
QPIVPVQRA

SEQ ID NO: 58685 - protein, 9 aa, Homo sapiens
  Table A; Target 58685; HLA-B*55:01; PASD1; ENSG00000166049; CTA
QPIVPVQRA

SEQ ID NO: 58686 - protein, 9 aa, Homo sapiens
  Table A; Target 58686; HLA-B*56:01; PASD1; ENSG00000166049; CTA
QPIVPVQRA

SEQ ID NO: 58687 - protein, 9 aa, Homo sapiens
  Table A; Target 58687; HLA-C*07:02; PASD1; ENSG00000166049; CTA
QPIVPVQRA

SEQ ID NO: 58688 - protein, 10 aa, Homo sapiens
  Table A; Target 58688; HLA-B*54:01; PASD1; ENSG00000166049; CTA
QPIVPVQRAA

SEQ ID NO: 58689 - protein, 10 aa, Homo sapiens
  Table A; Target 58689; HLA-B*56:01; PASD1; ENSG00000166049; CTA
QPIVPVQRAA

SEQ ID NO: 58690 - protein, 8 aa, Homo sapiens
  Table A; Target 58690; HLA-B*07:02; PASD1; ENSG00000166049; CTA
QPLKHNVI

SEQ ID NO: 58691 - protein, 8 aa, Homo sapiens
  Table A; Target 58691; HLA-B*08:01; PASD1; ENSG00000166049; CTA
QPLKHNVI

SEQ ID NO: 58692 - protein, 8 aa, Homo sapiens
  Table A; Target 58692; HLA-B*51:01; PASD1; ENSG00000166049; CTA
QPLKHNVI

SEQ ID NO: 58693 - protein, 9 aa, Homo sapiens
  Table A; Target 58693; HLA-B*07:02; PASD1; ENSG00000166049; CTA
QPLQPSSPV

SEQ ID NO: 58694 - protein, 9 aa, Homo sapiens
  Table A; Target 58694; HLA-B*51:01; PASD1; ENSG00000166049; CTA
QPLQPSSPV

SEQ ID NO: 58695 - protein, 9 aa, Homo sapiens
  Table A; Target 58695; HLA-B*54:01; PASD1; ENSG00000166049; CTA
QPLQPSSPV

SEQ ID NO: 58696 - protein, 9 aa, Homo sapiens
  Table A; Target 58696; HLA-B*56:01; PASD1; ENSG00000166049; CTA
QPLQPSSPV

SEQ ID NO: 58697 - protein, 9 aa, Homo sapiens
  Table A; Target 58697; HLA-C*07:02; PASD1; ENSG00000166049; CTA
QPLQPSSPV

SEQ ID NO: 58698 - protein, 10 aa, Homo sapiens
  Table A; Target 58698; HLA-B*54:01; PASD1; ENSG00000166049; CTA
QPLQPSSPVA

SEQ ID NO: 58699 - protein, 10 aa, Homo sapiens
  Table A; Target 58699; HLA-B*55:01; PASD1; ENSG00000166049; CTA
QPLQPSSPVA

SEQ ID NO: 58700 - protein, 10 aa, Homo sapiens
  Table A; Target 58700; HLA-B*56:01; PASD1; ENSG00000166049; CTA
QPLQPSSPVA

SEQ ID NO: 58701 - protein, 11 aa, Homo sapiens
  Table A; Target 58701; HLA-A*29:02; PASD1; ENSG00000166049; CTA
QPLQPSSPVAY

SEQ ID NO: 58702 - protein, 11 aa, Homo sapiens
  Table A; Target 58702; HLA-A*30:02; PASD1; ENSG00000166049; CTA
QPLQPSSPVAY

SEQ ID NO: 58703 - protein, 11 aa, Homo sapiens
  Table A; Target 58703; HLA-B*15:03; PASD1; ENSG00000166049; CTA
QPLQPSSPVAY

SEQ ID NO: 58704 - protein, 11 aa, Homo sapiens
  Table A; Target 58704; HLA-B*35:01; PASD1; ENSG00000166049; CTA
QPLQPSSPVAY

SEQ ID NO: 58705 - protein, 11 aa, Homo sapiens
  Table A; Target 58705; HLA-B*55:01; PASD1; ENSG00000166049; CTA
QPLQPSSPVAY

SEQ ID NO: 58706 - protein, 11 aa, Homo sapiens
  Table A; Target 58706; HLA-C*03:03; PASD1; ENSG00000166049; CTA
QPLQPSSPVAY

SEQ ID NO: 58707 - protein, 9 aa, Homo sapiens
  Table A; Target 58707; HLA-B*07:02; PASD1; ENSG00000166049; CTA
QPNTLRHVV

SEQ ID NO: 58708 - protein, 9 aa, Homo sapiens
  Table A; Target 58708; HLA-B*08:01; PASD1; ENSG00000166049; CTA
QPNTLRHVV

SEQ ID NO: 58709 - protein, 9 aa, Homo sapiens
  Table A; Target 58709; HLA-B*56:01; PASD1; ENSG00000166049; CTA
QPNTLRHVV

SEQ ID NO: 58710 - protein, 9 aa, Homo sapiens
  Table A; Target 58710; HLA-C*07:02; PASD1; ENSG00000166049; CTA
QPNTLRHVV

SEQ ID NO: 58711 - protein, 8 aa, Homo sapiens
  Table A; Target 58711; HLA-B*35:01; PASD1; ENSG00000166049; CTA
QPSSPVAY

SEQ ID NO: 58712 - protein, 9 aa, Homo sapiens
  Table A; Target 58712; HLA-B*07:02; PASD1; ENSG00000166049; CTA
QPTYHQVQV

SEQ ID NO: 58713 - protein, 9 aa, Homo sapiens
  Table A; Target 58713; HLA-B*35:03; PASD1; ENSG00000166049; CTA
QPTYHQVQV

SEQ ID NO: 58714 - protein, 9 aa, Homo sapiens
  Table A; Target 58714; HLA-B*51:01; PASD1; ENSG00000166049; CTA
QPTYHQVQV

SEQ ID NO: 58715 - protein, 9 aa, Homo sapiens
  Table A; Target 58715; HLA-B*54:01; PASD1; ENSG00000166049; CTA
QPTYHQVQV

SEQ ID NO: 58716 - protein, 9 aa, Homo sapiens
  Table A; Target 58716; HLA-B*55:01; PASD1; ENSG00000166049; CTA
QPTYHQVQV

SEQ ID NO: 58717 - protein, 9 aa, Homo sapiens
  Table A; Target 58717; HLA-B*56:01; PASD1; ENSG00000166049; CTA
QPTYHQVQV

SEQ ID NO: 58718 - protein, 9 aa, Homo sapiens
  Table A; Target 58718; HLA-C*16:02; PASD1; ENSG00000166049; CTA
QPTYHQVQV

SEQ ID NO: 58719 - protein, 9 aa, Homo sapiens
  Table A; Target 58719; HLA-B*38:01; PASD1; ENSG00000166049; CTA
QQDPENPVA

SEQ ID NO: 58720 - protein, 9 aa, Homo sapiens
  Table A; Target 58720; HLA-B*39:01; PASD1; ENSG00000166049; CTA
QQDPENPVA

SEQ ID NO: 58721 - protein, 10 aa, Homo sapiens
  Table A; Target 58721; HLA-B*39:01; PASD1; ENSG00000166049; CTA
QQDPENPVAP

SEQ ID NO: 58722 - protein, 11 aa, Homo sapiens
  Table A; Target 58722; HLA-B*27:05; PASD1; ENSG00000166049; CTA
QQDPENPVAPL

SEQ ID NO: 58723 - protein, 11 aa, Homo sapiens
  Table A; Target 58723; HLA-B*38:01; PASD1; ENSG00000166049; CTA
QQDPENPVAPL

SEQ ID NO: 58724 - protein, 11 aa, Homo sapiens
  Table A; Target 58724; HLA-B*39:01; PASD1; ENSG00000166049; CTA
QQDPENPVAPL

SEQ ID NO: 58725 - protein, 11 aa, Homo sapiens
  Table A; Target 58725; HLA-C*05:01; PASD1; ENSG00000166049; CTA
QQDPENPVAPL

SEQ ID NO: 58726 - protein, 9 aa, Homo sapiens
  Table A; Target 58726; HLA-B*15:01; PASD1; ENSG00000166049; CTA
QQEDESQSF

SEQ ID NO: 58727 - protein, 9 aa, Homo sapiens
  Table A; Target 58727; HLA-B*15:03; PASD1; ENSG00000166049; CTA
QQEDESQSF

SEQ ID NO: 58728 - protein, 9 aa, Homo sapiens
  Table A; Target 58728; HLA-B*38:01; PASD1; ENSG00000166049; CTA
QQEDESQSF

SEQ ID NO: 58729 - protein, 9 aa, Homo sapiens
  Table A; Target 58729; HLA-B*39:01; PASD1; ENSG00000166049; CTA
QQEDESQSF

SEQ ID NO: 58730 - protein, 9 aa, Homo sapiens
  Table A; Target 58730; HLA-C*05:01; PASD1; ENSG00000166049; CTA
QQEDESQSF

SEQ ID NO: 58731 - protein, 10 aa, Homo sapiens
  Table A; Target 58731; HLA-A*01:01; PASD1; ENSG00000166049; CTA
QQEDESQSFY

SEQ ID NO: 58732 - protein, 10 aa, Homo sapiens
  Table A; Target 58732; HLA-A*30:02; PASD1; ENSG00000166049; CTA
QQEDESQSFY

SEQ ID NO: 58733 - protein, 9 aa, Homo sapiens
  Table A; Target 58733; HLA-A*03:02; PASD1; ENSG00000166049; CTA
QQLQEQPLK

SEQ ID NO: 58734 - protein, 9 aa, Homo sapiens
  Table A; Target 58734; HLA-A*11:01; PASD1; ENSG00000166049; CTA
QQLQEQPLK

SEQ ID NO: 58735 - protein, 9 aa, Homo sapiens
  Table A; Target 58735; HLA-B*13:02; PASD1; ENSG00000166049; CTA
QQLYTSKAV

SEQ ID NO: 58736 - protein, 9 aa, Homo sapiens
  Table A; Target 58736; HLA-B*13:02; PASD1; ENSG00000166049; CTA
QQNALELMM

SEQ ID NO: 58737 - protein, 9 aa, Homo sapiens
  Table A; Target 58737; HLA-B*38:01; PASD1; ENSG00000166049; CTA
QQNALELMM

SEQ ID NO: 58738 - protein, 11 aa, Homo sapiens
  Table A; Target 58738; HLA-B*27:05; PASD1; ENSG00000166049; CTA
QQQLVQQEQHL

SEQ ID NO: 58739 - protein, 11 aa, Homo sapiens
  Table A; Target 58739; HLA-B*38:01; PASD1; ENSG00000166049; CTA
QQQLVQQEQHL

SEQ ID NO: 58740 - protein, 11 aa, Homo sapiens
  Table A; Target 58740; HLA-B*39:01; PASD1; ENSG00000166049; CTA
QRAAEQQPSGF

SEQ ID NO: 58741 - protein, 8 aa, Homo sapiens
  Table A; Target 58741; HLA-A*01:01; PASD1; ENSG00000166049; CTA
QSFYPEAY

SEQ ID NO: 58742 - protein, 8 aa, Homo sapiens
  Table A; Target 58742; HLA-A*30:02; PASD1; ENSG00000166049; CTA
QSFYPEAY

SEQ ID NO: 58743 - protein, 9 aa, Homo sapiens
  Table A; Target 58743; HLA-A*03:01; PASD1; ENSG00000166049; CTA
QSSEAVPKK

SEQ ID NO: 58744 - protein, 9 aa, Homo sapiens
  Table A; Target 58744; HLA-A*03:02; PASD1; ENSG00000166049; CTA
QSSEAVPKK

SEQ ID NO: 58745 - protein, 9 aa, Homo sapiens
  Table A; Target 58745; HLA-A*11:01; PASD1; ENSG00000166049; CTA
QSSEAVPKK

SEQ ID NO: 58746 - protein, 9 aa, Homo sapiens
  Table A; Target 58746; HLA-A*68:01; PASD1; ENSG00000166049; CTA
QSSEAVPKK

SEQ ID NO: 58747 - protein, 9 aa, Homo sapiens
  Table A; Target 58747; HLA-C*07:06; PASD1; ENSG00000166049; CTA
QSSEAVPKK

SEQ ID NO: 58748 - protein, 10 aa, Homo sapiens
  Table A; Target 58748; HLA-A*31:01; PASD1; ENSG00000166049; CTA
QTRLMPAEQR

SEQ ID NO: 58749 - protein, 10 aa, Homo sapiens
  Table A; Target 58749; HLA-A*33:03; PASD1; ENSG00000166049; CTA
QTRLMPAEQR

SEQ ID NO: 58750 - protein, 11 aa, Homo sapiens
  Table A; Target 58750; HLA-A*23:01; PASD1; ENSG00000166049; CTA
QYGPQENVHMF

SEQ ID NO: 58751 - protein, 11 aa, Homo sapiens
  Table A; Target 58751; HLA-A*24:02; PASD1; ENSG00000166049; CTA
QYGPQENVHMF

SEQ ID NO: 58752 - protein, 11 aa, Homo sapiens
  Table A; Target 58752; HLA-A*30:02; PASD1; ENSG00000166049; CTA
RAAEQQPSGFY

SEQ ID NO: 58753 - protein, 11 aa, Homo sapiens
  Table A; Target 58753; HLA-B*15:01; PASD1; ENSG00000166049; CTA
RAAEQQPSGFY

SEQ ID NO: 58754 - protein, 9 aa, Homo sapiens
  Table A; Target 58754; HLA-A*01:01; PASD1; ENSG00000166049; CTA
RADPVDLEF

SEQ ID NO: 58755 - protein, 9 aa, Homo sapiens
  Table A; Target 58755; HLA-A*02:07; PASD1; ENSG00000166049; CTA
RADPVDLEF

SEQ ID NO: 58756 - protein, 9 aa, Homo sapiens
  Table A; Target 58756; HLA-A*23:01; PASD1; ENSG00000166049; CTA
RADPVDLEF

SEQ ID NO: 58757 - protein, 9 aa, Homo sapiens
  Table A; Target 58757; HLA-A*32:01; PASD1; ENSG00000166049; CTA
RADPVDLEF

SEQ ID NO: 58758 - protein, 9 aa, Homo sapiens
  Table A; Target 58758; HLA-B*35:01; PASD1; ENSG00000166049; CTA
RADPVDLEF

SEQ ID NO: 58759 - protein, 9 aa, Homo sapiens
  Table A; Target 58759; HLA-B*35:03; PASD1; ENSG00000166049; CTA
RADPVDLEF

SEQ ID NO: 58760 - protein, 9 aa, Homo sapiens
  Table A; Target 58760; HLA-B*38:01; PASD1; ENSG00000166049; CTA
RADPVDLEF

SEQ ID NO: 58761 - protein, 9 aa, Homo sapiens
  Table A; Target 58761; HLA-B*55:01; PASD1; ENSG00000166049; CTA
RADPVDLEF

SEQ ID NO: 58762 - protein, 9 aa, Homo sapiens
  Table A; Target 58762; HLA-B*57:01; PASD1; ENSG00000166049; CTA
RADPVDLEF

SEQ ID NO: 58763 - protein, 9 aa, Homo sapiens
  Table A; Target 58763; HLA-B*58:01; PASD1; ENSG00000166049; CTA
RADPVDLEF

SEQ ID NO: 58764 - protein, 9 aa, Homo sapiens
  Table A; Target 58764; HLA-C*02:02; PASD1; ENSG00000166049; CTA
RADPVDLEF

SEQ ID NO: 58765 - protein, 9 aa, Homo sapiens
  Table A; Target 58765; HLA-C*03:03; PASD1; ENSG00000166049; CTA
RADPVDLEF

SEQ ID NO: 58766 - protein, 9 aa, Homo sapiens
  Table A; Target 58766; HLA-C*03:04; PASD1; ENSG00000166049; CTA
RADPVDLEF

SEQ ID NO: 58767 - protein, 9 aa, Homo sapiens
  Table A; Target 58767; HLA-C*05:01; PASD1; ENSG00000166049; CTA
RADPVDLEF

SEQ ID NO: 58768 - protein, 9 aa, Homo sapiens
  Table A; Target 58768; HLA-C*16:02; PASD1; ENSG00000166049; CTA
RADPVDLEF

SEQ ID NO: 58769 - protein, 10 aa, Homo sapiens
  Table A; Target 58769; HLA-A*01:01; PASD1; ENSG00000166049; CTA
RGEPEVNPLY

SEQ ID NO: 58770 - protein, 10 aa, Homo sapiens
  Table A; Target 58770; HLA-A*30:02; PASD1; ENSG00000166049; CTA
RGEPEVNPLY

SEQ ID NO: 58771 - protein, 10 aa, Homo sapiens
  Table A; Target 58771; HLA-B*57:01; PASD1; ENSG00000166049; CTA
RGEPEVNPLY

SEQ ID NO: 58772 - protein, 10 aa, Homo sapiens
  Table A; Target 58772; HLA-B*58:01; PASD1; ENSG00000166049; CTA
RGEPEVNPLY

SEQ ID NO: 58773 - protein, 11 aa, Homo sapiens
  Table A; Target 58773; HLA-A*31:01; PASD1; ENSG00000166049; CTA
RGEPEVNPLYR

SEQ ID NO: 58774 - protein, 10 aa, Homo sapiens
  Table A; Target 58774; HLA-A*30:02; PASD1; ENSG00000166049; CTA
RGHTSMKAVY

SEQ ID NO: 58775 - protein, 9 aa, Homo sapiens
  Table A; Target 58775; HLA-B*57:01; PASD1; ENSG00000166049; CTA
RSAEQTRLM

SEQ ID NO: 58776 - protein, 9 aa, Homo sapiens
  Table A; Target 58776; HLA-B*58:01; PASD1; ENSG00000166049; CTA
RSAEQTRLM

SEQ ID NO: 58777 - protein, 9 aa, Homo sapiens
  Table A; Target 58777; HLA-C*16:01; PASD1; ENSG00000166049; CTA
RSAEQTRLM

SEQ ID NO: 58778 - protein, 9 aa, Homo sapiens
  Table A; Target 58778; HLA-C*16:02; PASD1; ENSG00000166049; CTA
RSAEQTRLM

SEQ ID NO: 58779 - protein, 9 aa, Homo sapiens
  Table A; Target 58779; HLA-A*01:01; PASD1; ENSG00000166049; CTA
RTQLLQQLY

SEQ ID NO: 58780 - protein, 9 aa, Homo sapiens
  Table A; Target 58780; HLA-A*29:02; PASD1; ENSG00000166049; CTA
RTQLLQQLY

SEQ ID NO: 58781 - protein, 9 aa, Homo sapiens
  Table A; Target 58781; HLA-A*30:02; PASD1; ENSG00000166049; CTA
RTQLLQQLY

SEQ ID NO: 58782 - protein, 9 aa, Homo sapiens
  Table A; Target 58782; HLA-A*32:01; PASD1; ENSG00000166049; CTA
RTQLLQQLY

SEQ ID NO: 58783 - protein, 9 aa, Homo sapiens
  Table A; Target 58783; HLA-B*15:01; PASD1; ENSG00000166049; CTA
RTQLLQQLY

SEQ ID NO: 58784 - protein, 9 aa, Homo sapiens
  Table A; Target 58784; HLA-B*57:01; PASD1; ENSG00000166049; CTA
RTQLLQQLY

SEQ ID NO: 58785 - protein, 9 aa, Homo sapiens
  Table A; Target 58785; HLA-B*58:01; PASD1; ENSG00000166049; CTA
RTQLLQQLY

SEQ ID NO: 58786 - protein, 8 aa, Homo sapiens
  Table A; Target 58786; HLA-C*16:01; PASD1; ENSG00000166049; CTA
SAEQTRLM

SEQ ID NO: 58787 - protein, 8 aa, Homo sapiens
  Table A; Target 58787; HLA-B*08:01; PASD1; ENSG00000166049; CTA
SAYENVKF

SEQ ID NO: 58788 - protein, 8 aa, Homo sapiens
  Table A; Target 58788; HLA-B*37:01; PASD1; ENSG00000166049; CTA
SAYENVKF

SEQ ID NO: 58789 - protein, 8 aa, Homo sapiens
  Table A; Target 58789; HLA-B*46:01; PASD1; ENSG00000166049; CTA
SAYENVKF

SEQ ID NO: 58790 - protein, 8 aa, Homo sapiens
  Table A; Target 58790; HLA-B*58:01; PASD1; ENSG00000166049; CTA
SAYENVKF

SEQ ID NO: 58791 - protein, 8 aa, Homo sapiens
  Table A; Target 58791; HLA-C*02:02; PASD1; ENSG00000166049; CTA
SAYENVKF

SEQ ID NO: 58792 - protein, 8 aa, Homo sapiens
  Table A; Target 58792; HLA-C*05:01; PASD1; ENSG00000166049; CTA
SAYENVKF

SEQ ID NO: 58793 - protein, 8 aa, Homo sapiens
  Table A; Target 58793; HLA-C*12:03; PASD1; ENSG00000166049; CTA
SAYENVKF

SEQ ID NO: 58794 - protein, 8 aa, Homo sapiens
  Table A; Target 58794; HLA-C*16:01; PASD1; ENSG00000166049; CTA
SAYENVKF

SEQ ID NO: 58795 - protein, 9 aa, Homo sapiens
  Table A; Target 58795; HLA-A*02:01; PASD1; ENSG00000166049; CTA
SAYENVKFI

SEQ ID NO: 58796 - protein, 9 aa, Homo sapiens
  Table A; Target 58796; HLA-A*02:03; PASD1; ENSG00000166049; CTA
SAYENVKFI

SEQ ID NO: 58797 - protein, 9 aa, Homo sapiens
  Table A; Target 58797; HLA-A*68:02; PASD1; ENSG00000166049; CTA
SAYENVKFI

SEQ ID NO: 58798 - protein, 9 aa, Homo sapiens
  Table A; Target 58798; HLA-B*13:02; PASD1; ENSG00000166049; CTA
SAYENVKFI

SEQ ID NO: 58799 - protein, 9 aa, Homo sapiens
  Table A; Target 58799; HLA-B*49:01; PASD1; ENSG00000166049; CTA
SAYENVKFI

SEQ ID NO: 58800 - protein, 9 aa, Homo sapiens
  Table A; Target 58800; HLA-B*51:01; PASD1; ENSG00000166049; CTA
SAYENVKFI

SEQ ID NO: 58801 - protein, 9 aa, Homo sapiens
  Table A; Target 58801; HLA-C*02:02; PASD1; ENSG00000166049; CTA
SAYENVKFI

SEQ ID NO: 58802 - protein, 9 aa, Homo sapiens
  Table A; Target 58802; HLA-C*12:03; PASD1; ENSG00000166049; CTA
SAYENVKFI

SEQ ID NO: 58803 - protein, 9 aa, Homo sapiens
  Table A; Target 58803; HLA-C*16:02; PASD1; ENSG00000166049; CTA
SAYENVKFI

SEQ ID NO: 58804 - protein, 9 aa, Homo sapiens
  Table A; Target 58804; HLA-C*16:04; PASD1; ENSG00000166049; CTA
SAYENVKFI

SEQ ID NO: 58805 - protein, 8 aa, Homo sapiens
  Table A; Target 58805; HLA-C*05:01; PASD1; ENSG00000166049; CTA
SCDEQGTL

SEQ ID NO: 58806 - protein, 8 aa, Homo sapiens
  Table A; Target 58806; HLA-B*37:01; PASD1; ENSG00000166049; CTA
SDSLGPVV

SEQ ID NO: 58807 - protein, 8 aa, Homo sapiens
  Table A; Target 58807; HLA-B*40:02; PASD1; ENSG00000166049; CTA
SDSLGPVV

SEQ ID NO: 58808 - protein, 10 aa, Homo sapiens
  Table A; Target 58808; HLA-B*37:01; PASD1; ENSG00000166049; CTA
SDSLGPVVQV

SEQ ID NO: 58809 - protein, 8 aa, Homo sapiens
  Table A; Target 58809; HLA-B*37:01; PASD1; ENSG00000166049; CTA
SDSTISTL

SEQ ID NO: 58810 - protein, 9 aa, Homo sapiens
  Table A; Target 58810; HLA-A*30:01; PASD1; ENSG00000166049; CTA
SEAISSSSI

SEQ ID NO: 58811 - protein, 9 aa, Homo sapiens
  Table A; Target 58811; HLA-B*13:02; PASD1; ENSG00000166049; CTA
SEAISSSSI

SEQ ID NO: 58812 - protein, 9 aa, Homo sapiens
  Table A; Target 58812; HLA-B*37:01; PASD1; ENSG00000166049; CTA
SEAISSSSI

SEQ ID NO: 58813 - protein, 9 aa, Homo sapiens
  Table A; Target 58813; HLA-B*40:01; PASD1; ENSG00000166049; CTA
SEAISSSSI

SEQ ID NO: 58814 - protein, 9 aa, Homo sapiens
  Table A; Target 58814; HLA-B*40:02; PASD1; ENSG00000166049; CTA
SEAISSSSI

SEQ ID NO: 58815 - protein, 9 aa, Homo sapiens
  Table A; Target 58815; HLA-B*44:02; PASD1; ENSG00000166049; CTA
SEAISSSSI

SEQ ID NO: 58816 - protein, 9 aa, Homo sapiens
  Table A; Target 58816; HLA-B*44:03; PASD1; ENSG00000166049; CTA
SEAISSSSI

SEQ ID NO: 58817 - protein, 9 aa, Homo sapiens
  Table A; Target 58817; HLA-B*49:01; PASD1; ENSG00000166049; CTA
SEAISSSSI

SEQ ID NO: 58818 - protein, 9 aa, Homo sapiens
  Table A; Target 58818; HLA-C*16:04; PASD1; ENSG00000166049; CTA
SEAISSSSI

SEQ ID NO: 58819 - protein, 9 aa, Homo sapiens
  Table A; Target 58819; HLA-B*44:03; PASD1; ENSG00000166049; CTA
SEAVPKKQQ

SEQ ID NO: 58820 - protein, 8 aa, Homo sapiens
  Table A; Target 58820; HLA-A*02:03; PASD1; ENSG00000166049; CTA
SLGPVVQV

SEQ ID NO: 58821 - protein, 8 aa, Homo sapiens
  Table A; Target 58821; HLA-A*02:04; PASD1; ENSG00000166049; CTA
SLGPVVQV

SEQ ID NO: 58822 - protein, 8 aa, Homo sapiens
  Table A; Target 58822; HLA-A*02:07; PASD1; ENSG00000166049; CTA
SLGPVVQV

SEQ ID NO: 58823 - protein, 8 aa, Homo sapiens
  Table A; Target 58823; HLA-B*13:02; PASD1; ENSG00000166049; CTA
SLGPVVQV

SEQ ID NO: 58824 - protein, 8 aa, Homo sapiens
  Table A; Target 58824; HLA-B*37:01; PASD1; ENSG00000166049; CTA
SLGPVVQV

SEQ ID NO: 58825 - protein, 8 aa, Homo sapiens
  Table A; Target 58825; HLA-B*55:01; PASD1; ENSG00000166049; CTA
SLGPVVQV

SEQ ID NO: 58826 - protein, 8 aa, Homo sapiens
  Table A; Target 58826; HLA-C*06:02; PASD1; ENSG00000166049; CTA
SLGPVVQV

SEQ ID NO: 58827 - protein, 8 aa, Homo sapiens
  Table A; Target 58827; HLA-C*16:02; PASD1; ENSG00000166049; CTA
SLGPVVQV

SEQ ID NO: 58828 - protein, 9 aa, Homo sapiens
  Table A; Target 58828; HLA-A*32:01; PASD1; ENSG00000166049; CTA
SLGPVVQVN

SEQ ID NO: 58829 - protein, 9 aa, Homo sapiens
  Table A; Target 58829; HLA-C*06:02; PASD1; ENSG00000166049; CTA
SLGPVVQVN

SEQ ID NO: 58830 - protein, 9 aa, Homo sapiens
  Table A; Target 58830; HLA-C*07:04; PASD1; ENSG00000166049; CTA
SLGPVVQVN

SEQ ID NO: 58831 - protein, 9 aa, Homo sapiens
  Table A; Target 58831; HLA-C*12:03; PASD1; ENSG00000166049; CTA
SLGPVVQVN

SEQ ID NO: 58832 - protein, 11 aa, Homo sapiens
  Table A; Target 58832; HLA-A*25:01; PASD1; ENSG00000166049; CTA
SLGPVVQVNTW

SEQ ID NO: 58833 - protein, 11 aa, Homo sapiens
  Table A; Target 58833; HLA-A*32:01; PASD1; ENSG00000166049; CTA
SLGPVVQVNTW

SEQ ID NO: 58834 - protein, 11 aa, Homo sapiens
  Table A; Target 58834; HLA-B*44:02; PASD1; ENSG00000166049; CTA
SLGPVVQVNTW

SEQ ID NO: 58835 - protein, 11 aa, Homo sapiens
  Table A; Target 58835; HLA-B*44:03; PASD1; ENSG00000166049; CTA
SLGPVVQVNTW

SEQ ID NO: 58836 - protein, 11 aa, Homo sapiens
  Table A; Target 58836; HLA-B*57:01; PASD1; ENSG00000166049; CTA
SLGPVVQVNTW

SEQ ID NO: 58837 - protein, 11 aa, Homo sapiens
  Table A; Target 58837; HLA-B*58:01; PASD1; ENSG00000166049; CTA
SLGPVVQVNTW

SEQ ID NO: 58838 - protein, 8 aa, Homo sapiens
  Table A; Target 58838; HLA-B*08:01; PASD1; ENSG00000166049; CTA
SLKNTGEL

SEQ ID NO: 58839 - protein, 10 aa, Homo sapiens
  Table A; Target 58839; HLA-A*02:01; PASD1; ENSG00000166049; CTA
SLLGHLPAEI

SEQ ID NO: 58840 - protein, 10 aa, Homo sapiens
  Table A; Target 58840; HLA-A*02:03; PASD1; ENSG00000166049; CTA
SLLGHLPAEI

SEQ ID NO: 58841 - protein, 10 aa, Homo sapiens
  Table A; Target 58841; HLA-A*02:04; PASD1; ENSG00000166049; CTA
SLLGHLPAEI

SEQ ID NO: 58842 - protein, 9 aa, Homo sapiens
  Table A; Target 58842; HLA-B*07:02; PASD1; ENSG00000166049; CTA
SPALSLQDF

SEQ ID NO: 58843 - protein, 9 aa, Homo sapiens
  Table A; Target 58843; HLA-B*35:01; PASD1; ENSG00000166049; CTA
SPALSLQDF

SEQ ID NO: 58844 - protein, 9 aa, Homo sapiens
  Table A; Target 58844; HLA-C*07:02; PASD1; ENSG00000166049; CTA
SPALSLQDF

SEQ ID NO: 58845 - protein, 9 aa, Homo sapiens
  Table A; Target 58845; HLA-A*30:02; PASD1; ENSG00000166049; CTA
SQSFYPEAY

SEQ ID NO: 58846 - protein, 9 aa, Homo sapiens
  Table A; Target 58846; HLA-B*15:01; PASD1; ENSG00000166049; CTA
SQSFYPEAY

SEQ ID NO: 58847 - protein, 9 aa, Homo sapiens
  Table A; Target 58847; HLA-B*15:03; PASD1; ENSG00000166049; CTA
SQSFYPEAY

SEQ ID NO: 58848 - protein, 9 aa, Homo sapiens
  Table A; Target 58848; HLA-B*18:01; PASD1; ENSG00000166049; CTA
SQSFYPEAY

SEQ ID NO: 58849 - protein, 9 aa, Homo sapiens
  Table A; Target 58849; HLA-B*27:02; PASD1; ENSG00000166049; CTA
SQSFYPEAY

SEQ ID NO: 58850 - protein, 9 aa, Homo sapiens
  Table A; Target 58850; HLA-B*27:05; PASD1; ENSG00000166049; CTA
SQSFYPEAY

SEQ ID NO: 58851 - protein, 9 aa, Homo sapiens
  Table A; Target 58851; HLA-C*02:02; PASD1; ENSG00000166049; CTA
SQSFYPEAY

SEQ ID NO: 58852 - protein, 9 aa, Homo sapiens
  Table A; Target 58852; HLA-C*04:01; PASD1; ENSG00000166049; CTA
SQSFYPEAY

SEQ ID NO: 58853 - protein, 9 aa, Homo sapiens
  Table A; Target 58853; HLA-C*07:04; PASD1; ENSG00000166049; CTA
SQSFYPEAY

SEQ ID NO: 58854 - protein, 9 aa, Homo sapiens
  Table A; Target 58854; HLA-C*16:04; PASD1; ENSG00000166049; CTA
SQSFYPEAY

SEQ ID NO: 58855 - protein, 9 aa, Homo sapiens
  Table A; Target 58855; HLA-B*58:01; PASD1; ENSG00000166049; CTA
SSAYENVKF

SEQ ID NO: 58856 - protein, 8 aa, Homo sapiens
  Table A; Target 58856; HLA-A*11:01; PASD1; ENSG00000166049; CTA
SSEAVPKK

SEQ ID NO: 58857 - protein, 9 aa, Homo sapiens
  Table A; Target 58857; HLA-A*01:01; PASD1; ENSG00000166049; CTA
STDGVIICV

SEQ ID NO: 58858 - protein, 9 aa, Homo sapiens
  Table A; Target 58858; HLA-A*02:01; PASD1; ENSG00000166049; CTA
STDGVIICV

SEQ ID NO: 58859 - protein, 9 aa, Homo sapiens
  Table A; Target 58859; HLA-A*02:04; PASD1; ENSG00000166049; CTA
STDGVIICV

SEQ ID NO: 58860 - protein, 9 aa, Homo sapiens
  Table A; Target 58860; HLA-A*02:07; PASD1; ENSG00000166049; CTA
STDGVIICV

SEQ ID NO: 58861 - protein, 9 aa, Homo sapiens
  Table A; Target 58861; HLA-A*03:01; PASD1; ENSG00000166049; CTA
STDGVIICV

SEQ ID NO: 58862 - protein, 9 aa, Homo sapiens
  Table A; Target 58862; HLA-A*11:01; PASD1; ENSG00000166049; CTA
STDGVIICV

SEQ ID NO: 58863 - protein, 9 aa, Homo sapiens
  Table A; Target 58863; HLA-A*30:01; PASD1; ENSG00000166049; CTA
STDGVIICV

SEQ ID NO: 58864 - protein, 9 aa, Homo sapiens
  Table A; Target 58864; HLA-A*68:01; PASD1; ENSG00000166049; CTA
STDGVIICV

SEQ ID NO: 58865 - protein, 9 aa, Homo sapiens
  Table A; Target 58865; HLA-A*68:02; PASD1; ENSG00000166049; CTA
STDGVIICV

SEQ ID NO: 58866 - protein, 9 aa, Homo sapiens
  Table A; Target 58866; HLA-B*13:02; PASD1; ENSG00000166049; CTA
STDGVIICV

SEQ ID NO: 58867 - protein, 9 aa, Homo sapiens
  Table A; Target 58867; HLA-B*35:01; PASD1; ENSG00000166049; CTA
STDGVIICV

SEQ ID NO: 58868 - protein, 9 aa, Homo sapiens
  Table A; Target 58868; HLA-B*35:03; PASD1; ENSG00000166049; CTA
STDGVIICV

SEQ ID NO: 58869 - protein, 9 aa, Homo sapiens
  Table A; Target 58869; HLA-B*38:01; PASD1; ENSG00000166049; CTA
STDGVIICV

SEQ ID NO: 58870 - protein, 9 aa, Homo sapiens
  Table A; Target 58870; HLA-B*55:01; PASD1; ENSG00000166049; CTA
STDGVIICV

SEQ ID NO: 58871 - protein, 9 aa, Homo sapiens
  Table A; Target 58871; HLA-C*02:02; PASD1; ENSG00000166049; CTA
STDGVIICV

SEQ ID NO: 58872 - protein, 9 aa, Homo sapiens
  Table A; Target 58872; HLA-C*04:01; PASD1; ENSG00000166049; CTA
STDGVIICV

SEQ ID NO: 58873 - protein, 9 aa, Homo sapiens
  Table A; Target 58873; HLA-C*05:01; PASD1; ENSG00000166049; CTA
STDGVIICV

SEQ ID NO: 58874 - protein, 9 aa, Homo sapiens
  Table A; Target 58874; HLA-C*07:04; PASD1; ENSG00000166049; CTA
STDGVIICV

SEQ ID NO: 58875 - protein, 9 aa, Homo sapiens
  Table A; Target 58875; HLA-C*07:06; PASD1; ENSG00000166049; CTA
STDGVIICV

SEQ ID NO: 58876 - protein, 9 aa, Homo sapiens
  Table A; Target 58876; HLA-A*01:01; PASD1; ENSG00000166049; CTA
STLETPQDY

SEQ ID NO: 58877 - protein, 9 aa, Homo sapiens
  Table A; Target 58877; HLA-A*29:02; PASD1; ENSG00000166049; CTA
STLETPQDY

SEQ ID NO: 58878 - protein, 9 aa, Homo sapiens
  Table A; Target 58878; HLA-A*30:02; PASD1; ENSG00000166049; CTA
STLETPQDY

SEQ ID NO: 58879 - protein, 9 aa, Homo sapiens
  Table A; Target 58879; HLA-A*25:01; PASD1; ENSG00000166049; CTA
STYCSSTVF

SEQ ID NO: 58880 - protein, 9 aa, Homo sapiens
  Table A; Target 58880; HLA-A*26:01; PASD1; ENSG00000166049; CTA
STYCSSTVF

SEQ ID NO: 58881 - protein, 9 aa, Homo sapiens
  Table A; Target 58881; HLA-B*15:01; PASD1; ENSG00000166049; CTA
STYCSSTVF

SEQ ID NO: 58882 - protein, 9 aa, Homo sapiens
  Table A; Target 58882; HLA-B*15:03; PASD1; ENSG00000166049; CTA
STYCSSTVF

SEQ ID NO: 58883 - protein, 9 aa, Homo sapiens
  Table A; Target 58883; HLA-B*46:01; PASD1; ENSG00000166049; CTA
STYCSSTVF

SEQ ID NO: 58884 - protein, 9 aa, Homo sapiens
  Table A; Target 58884; HLA-C*07:04; PASD1; ENSG00000166049; CTA
STYCSSTVF

SEQ ID NO: 58885 - protein, 8 aa, Homo sapiens
  Table A; Target 58885; HLA-C*05:01; PASD1; ENSG00000166049; CTA
SVDQEGPM

SEQ ID NO: 58886 - protein, 8 aa, Homo sapiens
  Table A; Target 58886; HLA-C*05:01; PASD1; ENSG00000166049; CTA
SVDQVDSV

SEQ ID NO: 58887 - protein, 8 aa, Homo sapiens
  Table A; Target 58887; HLA-A*30:01; PASD1; ENSG00000166049; CTA
TDGVIICV

SEQ ID NO: 58888 - protein, 9 aa, Homo sapiens
  Table A; Target 58888; HLA-C*05:01; PASD1; ENSG00000166049; CTA
TLETPQDYI

SEQ ID NO: 58889 - protein, 8 aa, Homo sapiens
  Table A; Target 58889; HLA-A*30:02; PASD1; ENSG00000166049; CTA
TLHGQPTY

SEQ ID NO: 58890 - protein, 8 aa, Homo sapiens
  Table A; Target 58890; HLA-B*15:03; PASD1; ENSG00000166049; CTA
TLHGQPTY

SEQ ID NO: 58891 - protein, 8 aa, Homo sapiens
  Table A; Target 58891; HLA-B*39:01; PASD1; ENSG00000166049; CTA
TLHGQPTY

SEQ ID NO: 58892 - protein, 9 aa, Homo sapiens
  Table A; Target 58892; HLA-B*38:01; PASD1; ENSG00000166049; CTA
TLSTDGVII

SEQ ID NO: 58893 - protein, 11 aa, Homo sapiens
  Table A; Target 58893; HLA-A*02:01; PASD1; ENSG00000166049; CTA
TLSTDGVIICV

SEQ ID NO: 58894 - protein, 8 aa, Homo sapiens
  Table A; Target 58894; HLA-A*02:07; PASD1; ENSG00000166049; CTA
TMPESPAL

SEQ ID NO: 58895 - protein, 8 aa, Homo sapiens
  Table A; Target 58895; HLA-B*08:01; PASD1; ENSG00000166049; CTA
TMPESPAL

SEQ ID NO: 58896 - protein, 8 aa, Homo sapiens
  Table A; Target 58896; HLA-B*37:01; PASD1; ENSG00000166049; CTA
TMPESPAL

SEQ ID NO: 58897 - protein, 8 aa, Homo sapiens
  Table A; Target 58897; HLA-C*01:02; PASD1; ENSG00000166049; CTA
TMPESPAL

SEQ ID NO: 58898 - protein, 10 aa, Homo sapiens
  Table A; Target 58898; HLA-A*02:07; PASD1; ENSG00000166049; CTA
TMPESPALSL

SEQ ID NO: 58899 - protein, 10 aa, Homo sapiens
  Table A; Target 58899; HLA-C*01:02; PASD1; ENSG00000166049; CTA
TMPESPALSL

SEQ ID NO: 58900 - protein, 9 aa, Homo sapiens
  Table A; Target 58900; HLA-B*44:02; PASD1; ENSG00000166049; CTA
TPQDYIRLW

SEQ ID NO: 58901 - protein, 9 aa, Homo sapiens
  Table A; Target 58901; HLA-B*57:01; PASD1; ENSG00000166049; CTA
TPQDYIRLW

SEQ ID NO: 58902 - protein, 9 aa, Homo sapiens
  Table A; Target 58902; HLA-B*38:01; PASD1; ENSG00000166049; CTA
TQDSDEEPF

SEQ ID NO: 58903 - protein, 9 aa, Homo sapiens
  Table A; Target 58903; HLA-C*05:01; PASD1; ENSG00000166049; CTA
TQDSDEEPF

SEQ ID NO: 58904 - protein, 8 aa, Homo sapiens
  Table A; Target 58904; HLA-B*15:01; PASD1; ENSG00000166049; CTA
TQLLQQLY

SEQ ID NO: 58905 - protein, 8 aa, Homo sapiens
  Table A; Target 58905; HLA-B*15:03; PASD1; ENSG00000166049; CTA
TQLLQQLY

SEQ ID NO: 58906 - protein, 8 aa, Homo sapiens
  Table A; Target 58906; HLA-B*39:01; PASD1; ENSG00000166049; CTA
TQLLQQLY

SEQ ID NO: 58907 - protein, 9 aa, Homo sapiens
  Table A; Target 58907; HLA-B*13:02; PASD1; ENSG00000166049; CTA
TQLLQQLYT

SEQ ID NO: 58908 - protein, 11 aa, Homo sapiens
  Table A; Target 58908; HLA-A*11:01; PASD1; ENSG00000166049; CTA
TQLLQQLYTSK

SEQ ID NO: 58909 - protein, 11 aa, Homo sapiens
  Table A; Target 58909; HLA-B*27:02; PASD1; ENSG00000166049; CTA
TQLLQQLYTSK

SEQ ID NO: 58910 - protein, 9 aa, Homo sapiens
  Table A; Target 58910; HLA-B*27:02; PASD1; ENSG00000166049; CTA
TRLMPAEQR

SEQ ID NO: 58911 - protein, 9 aa, Homo sapiens
  Table A; Target 58911; HLA-B*27:05; PASD1; ENSG00000166049; CTA
TRLMPAEQR

SEQ ID NO: 58912 - protein, 9 aa, Homo sapiens
  Table A; Target 58912; HLA-C*05:01; PASD1; ENSG00000166049; CTA
TSDSTISTL

SEQ ID NO: 58913 - protein, 8 aa, Homo sapiens
  Table A; Target 58913; HLA-C*14:02; PASD1; ENSG00000166049; CTA
TYCSSTVF

SEQ ID NO: 58914 - protein, 9 aa, Homo sapiens
  Table A; Target 58914; HLA-A*23:01; PASD1; ENSG00000166049; CTA
TYCSSTVFL

SEQ ID NO: 58915 - protein, 9 aa, Homo sapiens
  Table A; Target 58915; HLA-A*24:02; PASD1; ENSG00000166049; CTA
TYCSSTVFL

SEQ ID NO: 58916 - protein, 10 aa, Homo sapiens
  Table A; Target 58916; HLA-A*23:01; PASD1; ENSG00000166049; CTA
TYDYFNQVTL

SEQ ID NO: 58917 - protein, 10 aa, Homo sapiens
  Table A; Target 58917; HLA-A*24:02; PASD1; ENSG00000166049; CTA
TYDYFNQVTL

SEQ ID NO: 58918 - protein, 10 aa, Homo sapiens
  Table A; Target 58918; HLA-B*35:03; PASD1; ENSG00000166049; CTA
TYDYFNQVTL

SEQ ID NO: 58919 - protein, 8 aa, Homo sapiens
  Table A; Target 58919; HLA-C*03:04; PASD1; ENSG00000166049; CTA
VAENISSL

SEQ ID NO: 58920 - protein, 8 aa, Homo sapiens
  Table A; Target 58920; HLA-C*05:01; PASD1; ENSG00000166049; CTA
VAENISSL

SEQ ID NO: 58921 - protein, 9 aa, Homo sapiens
  Table A; Target 58921; HLA-A*23:01; PASD1; ENSG00000166049; CTA
VAENISSLL

SEQ ID NO: 58922 - protein, 9 aa, Homo sapiens
  Table A; Target 58922; HLA-B*38:01; PASD1; ENSG00000166049; CTA
VAENISSLL

SEQ ID NO: 58923 - protein, 9 aa, Homo sapiens
  Table A; Target 58923; HLA-C*03:03; PASD1; ENSG00000166049; CTA
VAENISSLL

SEQ ID NO: 58924 - protein, 9 aa, Homo sapiens
  Table A; Target 58924; HLA-C*03:04; PASD1; ENSG00000166049; CTA
VAENISSLL

SEQ ID NO: 58925 - protein, 9 aa, Homo sapiens
  Table A; Target 58925; HLA-C*05:01; PASD1; ENSG00000166049; CTA
VAENISSLL

SEQ ID NO: 58926 - protein, 8 aa, Homo sapiens
  Table A; Target 58926; HLA-B*58:01; PASD1; ENSG00000166049; CTA
VAFNQQQL

SEQ ID NO: 58927 - protein, 8 aa, Homo sapiens
  Table A; Target 58927; HLA-C*03:03; PASD1; ENSG00000166049; CTA
VAFNQQQL

SEQ ID NO: 58928 - protein, 8 aa, Homo sapiens
  Table A; Target 58928; HLA-C*03:04; PASD1; ENSG00000166049; CTA
VAFNQQQL

SEQ ID NO: 58929 - protein, 8 aa, Homo sapiens
  Table A; Target 58929; HLA-C*16:01; PASD1; ENSG00000166049; CTA
VAFNQQQL

SEQ ID NO: 58930 - protein, 9 aa, Homo sapiens
  Table A; Target 58930; HLA-B*13:02; PASD1; ENSG00000166049; CTA
VAFNQQQLV

SEQ ID NO: 58931 - protein, 9 aa, Homo sapiens
  Table A; Target 58931; HLA-B*51:01; PASD1; ENSG00000166049; CTA
VAFNQQQLV

SEQ ID NO: 58932 - protein, 9 aa, Homo sapiens
  Table A; Target 58932; HLA-C*02:02; PASD1; ENSG00000166049; CTA
VAFNQQQLV

SEQ ID NO: 58933 - protein, 9 aa, Homo sapiens
  Table A; Target 58933; HLA-C*12:03; PASD1; ENSG00000166049; CTA
VAFNQQQLV

SEQ ID NO: 58934 - protein, 9 aa, Homo sapiens
  Table A; Target 58934; HLA-C*16:02; PASD1; ENSG00000166049; CTA
VAFNQQQLV

SEQ ID NO: 58935 - protein, 9 aa, Homo sapiens
  Table A; Target 58935; HLA-C*16:04; PASD1; ENSG00000166049; CTA
VAFNQQQLV

SEQ ID NO: 58936 - protein, 9 aa, Homo sapiens
  Table A; Target 58936; HLA-C*01:02; PASD1; ENSG00000166049; CTA
VAPLDQAGL

SEQ ID NO: 58937 - protein, 9 aa, Homo sapiens
  Table A; Target 58937; HLA-C*12:03; PASD1; ENSG00000166049; CTA
VAYDIISQE

SEQ ID NO: 58938 - protein, 10 aa, Homo sapiens
  Table A; Target 58938; HLA-A*23:01; PASD1; ENSG00000166049; CTA
VAYDIISQEL

SEQ ID NO: 58939 - protein, 10 aa, Homo sapiens
  Table A; Target 58939; HLA-A*25:01; PASD1; ENSG00000166049; CTA
VAYDIISQEL

SEQ ID NO: 58940 - protein, 10 aa, Homo sapiens
  Table A; Target 58940; HLA-A*30:01; PASD1; ENSG00000166049; CTA
VAYDIISQEL

SEQ ID NO: 58941 - protein, 10 aa, Homo sapiens
  Table A; Target 58941; HLA-B*35:03; PASD1; ENSG00000166049; CTA
VAYDIISQEL

SEQ ID NO: 58942 - protein, 10 aa, Homo sapiens
  Table A; Target 58942; HLA-C*02:02; PASD1; ENSG00000166049; CTA
VAYDIISQEL

SEQ ID NO: 58943 - protein, 10 aa, Homo sapiens
  Table A; Target 58943; HLA-C*03:03; PASD1; ENSG00000166049; CTA
VAYDIISQEL

SEQ ID NO: 58944 - protein, 10 aa, Homo sapiens
  Table A; Target 58944; HLA-C*03:04; PASD1; ENSG00000166049; CTA
VAYDIISQEL

SEQ ID NO: 58945 - protein, 10 aa, Homo sapiens
  Table A; Target 58945; HLA-C*12:03; PASD1; ENSG00000166049; CTA
VAYDIISQEL

SEQ ID NO: 58946 - protein, 10 aa, Homo sapiens
  Table A; Target 58946; HLA-C*16:04; PASD1; ENSG00000166049; CTA
VAYDIISQEL

SEQ ID NO: 58947 - protein, 9 aa, Homo sapiens
  Table A; Target 58947; HLA-A*24:02; PASD1; ENSG00000166049; CTA
VCILRTQLL

SEQ ID NO: 58948 - protein, 9 aa, Homo sapiens
  Table A; Target 58948; HLA-B*08:01; PASD1; ENSG00000166049; CTA
VCILRTQLL

SEQ ID NO: 58949 - protein, 9 aa, Homo sapiens
  Table A; Target 58949; HLA-A*30:01; PASD1; ENSG00000166049; CTA
VEGPPDPQA

SEQ ID NO: 58950 - protein, 9 aa, Homo sapiens
  Table A; Target 58950; HLA-B*18:01; PASD1; ENSG00000166049; CTA
VEGPPDPQA

SEQ ID NO: 58951 - protein, 9 aa, Homo sapiens
  Table A; Target 58951; HLA-B*40:01; PASD1; ENSG00000166049; CTA
VEGPPDPQA

SEQ ID NO: 58952 - protein, 9 aa, Homo sapiens
  Table A; Target 58952; HLA-B*40:02; PASD1; ENSG00000166049; CTA
VEGPPDPQA

SEQ ID NO: 58953 - protein, 9 aa, Homo sapiens
  Table A; Target 58953; HLA-B*49:01; PASD1; ENSG00000166049; CTA
VEGPPDPQA

SEQ ID NO: 58954 - protein, 10 aa, Homo sapiens
  Table A; Target 58954; HLA-A*23:01; PASD1; ENSG00000166049; CTA
VEGPPDPQAF

SEQ ID NO: 58955 - protein, 10 aa, Homo sapiens
  Table A; Target 58955; HLA-A*24:02; PASD1; ENSG00000166049; CTA
VEGPPDPQAF

SEQ ID NO: 58956 - protein, 10 aa, Homo sapiens
  Table A; Target 58956; HLA-A*30:01; PASD1; ENSG00000166049; CTA
VEGPPDPQAF

SEQ ID NO: 58957 - protein, 10 aa, Homo sapiens
  Table A; Target 58957; HLA-A*32:01; PASD1; ENSG00000166049; CTA
VEGPPDPQAF

SEQ ID NO: 58958 - protein, 10 aa, Homo sapiens
  Table A; Target 58958; HLA-B*18:01; PASD1; ENSG00000166049; CTA
VEGPPDPQAF

SEQ ID NO: 58959 - protein, 10 aa, Homo sapiens
  Table A; Target 58959; HLA-B*27:02; PASD1; ENSG00000166049; CTA
VEGPPDPQAF

SEQ ID NO: 58960 - protein, 10 aa, Homo sapiens
  Table A; Target 58960; HLA-B*27:05; PASD1; ENSG00000166049; CTA
VEGPPDPQAF

SEQ ID NO: 58961 - protein, 10 aa, Homo sapiens
  Table A; Target 58961; HLA-B*37:01; PASD1; ENSG00000166049; CTA
VEGPPDPQAF

SEQ ID NO: 58962 - protein, 10 aa, Homo sapiens
  Table A; Target 58962; HLA-B*38:01; PASD1; ENSG00000166049; CTA
VEGPPDPQAF

SEQ ID NO: 58963 - protein, 10 aa, Homo sapiens
  Table A; Target 58963; HLA-B*39:01; PASD1; ENSG00000166049; CTA
VEGPPDPQAF

SEQ ID NO: 58964 - protein, 10 aa, Homo sapiens
  Table A; Target 58964; HLA-B*40:01; PASD1; ENSG00000166049; CTA
VEGPPDPQAF

SEQ ID NO: 58965 - protein, 10 aa, Homo sapiens
  Table A; Target 58965; HLA-B*40:02; PASD1; ENSG00000166049; CTA
VEGPPDPQAF

SEQ ID NO: 58966 - protein, 10 aa, Homo sapiens
  Table A; Target 58966; HLA-B*44:02; PASD1; ENSG00000166049; CTA
VEGPPDPQAF

SEQ ID NO: 58967 - protein, 10 aa, Homo sapiens
  Table A; Target 58967; HLA-B*44:03; PASD1; ENSG00000166049; CTA
VEGPPDPQAF

SEQ ID NO: 58968 - protein, 10 aa, Homo sapiens
  Table A; Target 58968; HLA-B*49:01; PASD1; ENSG00000166049; CTA
VEGPPDPQAF

SEQ ID NO: 58969 - protein, 10 aa, Homo sapiens
  Table A; Target 58969; HLA-C*02:02; PASD1; ENSG00000166049; CTA
VEGPPDPQAF

SEQ ID NO: 58970 - protein, 10 aa, Homo sapiens
  Table A; Target 58970; HLA-C*16:04; PASD1; ENSG00000166049; CTA
VEGPPDPQAF

SEQ ID NO: 58971 - protein, 9 aa, Homo sapiens
  Table A; Target 58971; HLA-A*30:02; PASD1; ENSG00000166049; CTA
VEHGDSSAY

SEQ ID NO: 58972 - protein, 9 aa, Homo sapiens
  Table A; Target 58972; HLA-A*32:01; PASD1; ENSG00000166049; CTA
VEHGDSSAY

SEQ ID NO: 58973 - protein, 9 aa, Homo sapiens
  Table A; Target 58973; HLA-B*15:01; PASD1; ENSG00000166049; CTA
VEHGDSSAY

SEQ ID NO: 58974 - protein, 9 aa, Homo sapiens
  Table A; Target 58974; HLA-B*15:03; PASD1; ENSG00000166049; CTA
VEHGDSSAY

SEQ ID NO: 58975 - protein, 9 aa, Homo sapiens
  Table A; Target 58975; HLA-B*18:01; PASD1; ENSG00000166049; CTA
VEHGDSSAY

SEQ ID NO: 58976 - protein, 9 aa, Homo sapiens
  Table A; Target 58976; HLA-B*37:01; PASD1; ENSG00000166049; CTA
VEHGDSSAY

SEQ ID NO: 58977 - protein, 9 aa, Homo sapiens
  Table A; Target 58977; HLA-B*40:01; PASD1; ENSG00000166049; CTA
VEHGDSSAY

SEQ ID NO: 58978 - protein, 9 aa, Homo sapiens
  Table A; Target 58978; HLA-B*44:02; PASD1; ENSG00000166049; CTA
VEHGDSSAY

SEQ ID NO: 58979 - protein, 9 aa, Homo sapiens
  Table A; Target 58979; HLA-B*44:03; PASD1; ENSG00000166049; CTA
VEHGDSSAY

SEQ ID NO: 58980 - protein, 9 aa, Homo sapiens
  Table A; Target 58980; HLA-B*46:01; PASD1; ENSG00000166049; CTA
VEHGDSSAY

SEQ ID NO: 58981 - protein, 9 aa, Homo sapiens
  Table A; Target 58981; HLA-C*14:02; PASD1; ENSG00000166049; CTA
VEHGDSSAY

SEQ ID NO: 58982 - protein, 9 aa, Homo sapiens
  Table A; Target 58982; HLA-C*16:04; PASD1; ENSG00000166049; CTA
VEHGDSSAY

SEQ ID NO: 58983 - protein, 9 aa, Homo sapiens
  Table A; Target 58983; HLA-C*01:02; PASD1; ENSG00000166049; CTA
VEPAAAAAA

SEQ ID NO: 58984 - protein, 10 aa, Homo sapiens
  Table A; Target 58984; HLA-B*49:01; PASD1; ENSG00000166049; CTA
VEQYGPQENV

SEQ ID NO: 58985 - protein, 8 aa, Homo sapiens
  Table A; Target 58985; HLA-B*08:01; PASD1; ENSG00000166049; CTA
VGNERVQI

SEQ ID NO: 58986 - protein, 8 aa, Homo sapiens
  Table A; Target 58986; HLA-C*16:01; PASD1; ENSG00000166049; CTA
VGNERVQI

SEQ ID NO: 58987 - protein, 9 aa, Homo sapiens
  Table A; Target 58987; HLA-C*12:03; PASD1; ENSG00000166049; CTA
VGNERVQIC

SEQ ID NO: 58988 - protein, 9 aa, Homo sapiens
  Table A; Target 58988; HLA-B*13:02; PASD1; ENSG00000166049; CTA
VIICVAENI

SEQ ID NO: 58989 - protein, 10 aa, Homo sapiens
  Table A; Target 58989; HLA-C*01:02; PASD1; ENSG00000166049; CTA
VIPDLQSSEA

SEQ ID NO: 58990 - protein, 11 aa, Homo sapiens
  Table A; Target 58990; HLA-A*02:07; PASD1; ENSG00000166049; CTA
VIPDLQSSEAV

SEQ ID NO: 58991 - protein, 11 aa, Homo sapiens
  Table A; Target 58991; HLA-C*01:02; PASD1; ENSG00000166049; CTA
VIPDLQSSEAV

SEQ ID NO: 58992 - protein, 8 aa, Homo sapiens
  Table A; Target 58992; HLA-C*03:03; PASD1; ENSG00000166049; CTA
VPQEDRLY

SEQ ID NO: 58993 - protein, 9 aa, Homo sapiens
  Table A; Target 58993; HLA-A*23:01; PASD1; ENSG00000166049; CTA
VPQEDRLYL

SEQ ID NO: 58994 - protein, 9 aa, Homo sapiens
  Table A; Target 58994; HLA-B*07:02; PASD1; ENSG00000166049; CTA
VPQEDRLYL

SEQ ID NO: 58995 - protein, 9 aa, Homo sapiens
  Table A; Target 58995; HLA-B*08:01; PASD1; ENSG00000166049; CTA
VPQEDRLYL

SEQ ID NO: 58996 - protein, 9 aa, Homo sapiens
  Table A; Target 58996; HLA-B*35:01; PASD1; ENSG00000166049; CTA
VPQEDRLYL

SEQ ID NO: 58997 - protein, 9 aa, Homo sapiens
  Table A; Target 58997; HLA-B*35:03; PASD1; ENSG00000166049; CTA
VPQEDRLYL

SEQ ID NO: 58998 - protein, 9 aa, Homo sapiens
  Table A; Target 58998; HLA-B*51:01; PASD1; ENSG00000166049; CTA
VPQEDRLYL

SEQ ID NO: 58999 - protein, 9 aa, Homo sapiens
  Table A; Target 58999; HLA-B*55:01; PASD1; ENSG00000166049; CTA
VPQEDRLYL

SEQ ID NO: 59000 - protein, 9 aa, Homo sapiens
  Table A; Target 59000; HLA-B*56:01; PASD1; ENSG00000166049; CTA
VPQEDRLYL

SEQ ID NO: 59001 - protein, 9 aa, Homo sapiens
  Table A; Target 59001; HLA-C*03:03; PASD1; ENSG00000166049; CTA
VPQEDRLYL

SEQ ID NO: 59002 - protein, 9 aa, Homo sapiens
  Table A; Target 59002; HLA-C*07:02; PASD1; ENSG00000166049; CTA
VPQEDRLYL

SEQ ID NO: 59003 - protein, 9 aa, Homo sapiens
  Table A; Target 59003; HLA-C*16:01; PASD1; ENSG00000166049; CTA
VPQEDRLYL

SEQ ID NO: 59004 - protein, 10 aa, Homo sapiens
  Table A; Target 59004; HLA-B*55:01; PASD1; ENSG00000166049; CTA
VPQEDRLYLV

SEQ ID NO: 59005 - protein, 10 aa, Homo sapiens
  Table A; Target 59005; HLA-B*56:01; PASD1; ENSG00000166049; CTA
VPQEDRLYLV

SEQ ID NO: 59006 - protein, 8 aa, Homo sapiens
  Table A; Target 59006; HLA-B*13:02; PASD1; ENSG00000166049; CTA
VQVSEVGV

SEQ ID NO: 59007 - protein, 8 aa, Homo sapiens
  Table A; Target 59007; HLA-C*05:01; PASD1; ENSG00000166049; CTA
VSDEAVLT

SEQ ID NO: 59008 - protein, 9 aa, Homo sapiens
  Table A; Target 59008; HLA-B*57:01; PASD1; ENSG00000166049; CTA
VTLQLLDGF

SEQ ID NO: 59009 - protein, 9 aa, Homo sapiens
  Table A; Target 59009; HLA-A*23:01; PASD1; ENSG00000166049; CTA
VYQKIILKF

SEQ ID NO: 59010 - protein, 9 aa, Homo sapiens
  Table A; Target 59010; HLA-A*29:02; PASD1; ENSG00000166049; CTA
VYQKIILKF

SEQ ID NO: 59011 - protein, 8 aa, Homo sapiens
  Table A; Target 59011; HLA-B*39:01; PASD1; ENSG00000166049; CTA
VYVEPAAA

SEQ ID NO: 59012 - protein, 8 aa, Homo sapiens
  Table A; Target 59012; HLA-C*14:02; PASD1; ENSG00000166049; CTA
VYVEPAAA

SEQ ID NO: 59013 - protein, 9 aa, Homo sapiens
  Table A; Target 59013; HLA-A*23:01; PASD1; ENSG00000166049; CTA
VYVEPAAAA

SEQ ID NO: 59014 - protein, 9 aa, Homo sapiens
  Table A; Target 59014; HLA-A*24:02; PASD1; ENSG00000166049; CTA
VYVEPAAAA

SEQ ID NO: 59015 - protein, 9 aa, Homo sapiens
  Table A; Target 59015; HLA-B*39:01; PASD1; ENSG00000166049; CTA
VYVEPAAAA

SEQ ID NO: 59016 - protein, 9 aa, Homo sapiens
  Table A; Target 59016; HLA-B*46:01; PASD1; ENSG00000166049; CTA
VYVEPAAAA

SEQ ID NO: 59017 - protein, 9 aa, Homo sapiens
  Table A; Target 59017; HLA-B*54:01; PASD1; ENSG00000166049; CTA
VYVEPAAAA

SEQ ID NO: 59018 - protein, 9 aa, Homo sapiens
  Table A; Target 59018; HLA-B*56:01; PASD1; ENSG00000166049; CTA
VYVEPAAAA

SEQ ID NO: 59019 - protein, 9 aa, Homo sapiens
  Table A; Target 59019; HLA-C*01:02; PASD1; ENSG00000166049; CTA
VYVEPAAAA

SEQ ID NO: 59020 - protein, 9 aa, Homo sapiens
  Table A; Target 59020; HLA-C*03:03; PASD1; ENSG00000166049; CTA
VYVEPAAAA

SEQ ID NO: 59021 - protein, 9 aa, Homo sapiens
  Table A; Target 59021; HLA-C*03:04; PASD1; ENSG00000166049; CTA
VYVEPAAAA

SEQ ID NO: 59022 - protein, 9 aa, Homo sapiens
  Table A; Target 59022; HLA-C*14:02; PASD1; ENSG00000166049; CTA
VYVEPAAAA

SEQ ID NO: 59023 - protein, 10 aa, Homo sapiens
  Table A; Target 59023; HLA-C*14:02; PASD1; ENSG00000166049; CTA
VYVEPAAAAA

SEQ ID NO: 59024 - protein, 11 aa, Homo sapiens
  Table A; Target 59024; HLA-C*14:02; PASD1; ENSG00000166049; CTA
VYVEPAAAAAA

SEQ ID NO: 59025 - protein, 10 aa, Homo sapiens
  Table A; Target 59025; HLA-A*29:02; PASD1; ENSG00000166049; CTA
WIPSFPTYDY

SEQ ID NO: 59026 - protein, 8 aa, Homo sapiens
  Table A; Target 59026; HLA-A*30:01; PASD1; ENSG00000166049; CTA
YDIISQEL

SEQ ID NO: 59027 - protein, 8 aa, Homo sapiens
  Table A; Target 59027; HLA-B*13:02; PASD1; ENSG00000166049; CTA
YDIISQEL

SEQ ID NO: 59028 - protein, 8 aa, Homo sapiens
  Table A; Target 59028; HLA-B*18:01; PASD1; ENSG00000166049; CTA
YDIISQEL

SEQ ID NO: 59029 - protein, 8 aa, Homo sapiens
  Table A; Target 59029; HLA-B*37:01; PASD1; ENSG00000166049; CTA
YDIISQEL

SEQ ID NO: 59030 - protein, 8 aa, Homo sapiens
  Table A; Target 59030; HLA-B*38:01; PASD1; ENSG00000166049; CTA
YDIISQEL

SEQ ID NO: 59031 - protein, 8 aa, Homo sapiens
  Table A; Target 59031; HLA-B*40:01; PASD1; ENSG00000166049; CTA
YDIISQEL

SEQ ID NO: 59032 - protein, 8 aa, Homo sapiens
  Table A; Target 59032; HLA-B*40:02; PASD1; ENSG00000166049; CTA
YDIISQEL

SEQ ID NO: 59033 - protein, 8 aa, Homo sapiens
  Table A; Target 59033; HLA-B*49:01; PASD1; ENSG00000166049; CTA
YDIISQEL

SEQ ID NO: 59034 - protein, 8 aa, Homo sapiens
  Table A; Target 59034; HLA-C*03:03; PASD1; ENSG00000166049; CTA
YDIISQEL

SEQ ID NO: 59035 - protein, 8 aa, Homo sapiens
  Table A; Target 59035; HLA-C*03:04; PASD1; ENSG00000166049; CTA
YDIISQEL

SEQ ID NO: 59036 - protein, 8 aa, Homo sapiens
  Table A; Target 59036; HLA-C*07:04; PASD1; ENSG00000166049; CTA
YDIISQEL

SEQ ID NO: 59037 - protein, 8 aa, Homo sapiens
  Table A; Target 59037; HLA-C*12:03; PASD1; ENSG00000166049; CTA
YDIISQEL

SEQ ID NO: 59038 - protein, 8 aa, Homo sapiens
  Table A; Target 59038; HLA-C*16:02; PASD1; ENSG00000166049; CTA
YDIISQEL

SEQ ID NO: 59039 - protein, 9 aa, Homo sapiens
  Table A; Target 59039; HLA-A*30:01; PASD1; ENSG00000166049; CTA
YDYFNQVTL

SEQ ID NO: 59040 - protein, 9 aa, Homo sapiens
  Table A; Target 59040; HLA-B*37:01; PASD1; ENSG00000166049; CTA
YDYFNQVTL

SEQ ID NO: 59041 - protein, 9 aa, Homo sapiens
  Table A; Target 59041; HLA-B*40:01; PASD1; ENSG00000166049; CTA
YDYFNQVTL

SEQ ID NO: 59042 - protein, 9 aa, Homo sapiens
  Table A; Target 59042; HLA-B*40:02; PASD1; ENSG00000166049; CTA
YDYFNQVTL

SEQ ID NO: 59043 - protein, 8 aa, Homo sapiens
  Table A; Target 59043; HLA-B*37:01; PASD1; ENSG00000166049; CTA
YENVKFIV

SEQ ID NO: 59044 - protein, 8 aa, Homo sapiens
  Table A; Target 59044; HLA-B*49:01; PASD1; ENSG00000166049; CTA
YENVKFIV

SEQ ID NO: 59045 - protein, 10 aa, Homo sapiens
  Table A; Target 59045; HLA-B*49:01; PASD1; ENSG00000166049; CTA
YENVKFIVNV

SEQ ID NO: 59046 - protein, 9 aa, Homo sapiens
  Table A; Target 59046; HLA-A*23:01; PASD1; ENSG00000166049; CTA
YFNQVTLQL

SEQ ID NO: 59047 - protein, 9 aa, Homo sapiens
  Table A; Target 59047; HLA-A*24:02; PASD1; ENSG00000166049; CTA
YFNQVTLQL

SEQ ID NO: 59048 - protein, 9 aa, Homo sapiens
  Table A; Target 59048; HLA-A*29:02; PASD1; ENSG00000166049; CTA
YFNQVTLQL

SEQ ID NO: 59049 - protein, 9 aa, Homo sapiens
  Table A; Target 59049; HLA-C*14:02; PASD1; ENSG00000166049; CTA
YFNQVTLQL

SEQ ID NO: 59050 - protein, 9 aa, Homo sapiens
  Table A; Target 59050; HLA-B*38:01; PASD1; ENSG00000166049; CTA
YHQVQVSEV

SEQ ID NO: 59051 - protein, 9 aa, Homo sapiens
  Table A; Target 59051; HLA-B*39:01; PASD1; ENSG00000166049; CTA
YHQVQVSEV

SEQ ID NO: 59052 - protein, 9 aa, Homo sapiens
  Table A; Target 59052; HLA-A*02:01; PASD1; ENSG00000166049; CTA
YLVGNVCIL

SEQ ID NO: 59053 - protein, 9 aa, Homo sapiens
  Table A; Target 59053; HLA-A*02:03; PASD1; ENSG00000166049; CTA
YLVGNVCIL

SEQ ID NO: 59054 - protein, 9 aa, Homo sapiens
  Table A; Target 59054; HLA-A*02:04; PASD1; ENSG00000166049; CTA
YLVGNVCIL

SEQ ID NO: 59055 - protein, 9 aa, Homo sapiens
  Table A; Target 59055; HLA-C*07:04; PASD1; ENSG00000166049; CTA
YLVGNVCIL

SEQ ID NO: 59056 - protein, 10 aa, Homo sapiens
  Table A; Target 59056; HLA-B*51:01; PASD1; ENSG00000166049; CTA
YPEAYQGPPV

SEQ ID NO: 59057 - protein, 10 aa, Homo sapiens
  Table A; Target 59057; HLA-B*54:01; PASD1; ENSG00000166049; CTA
YPEAYQGPPV

SEQ ID NO: 59058 - protein, 9 aa, Homo sapiens
  Table A; Target 59058; HLA-A*02:01; PASD1; ENSG00000166049; CTA
YQGPPVNQL

SEQ ID NO: 59059 - protein, 9 aa, Homo sapiens
  Table A; Target 59059; HLA-A*02:03; PASD1; ENSG00000166049; CTA
YQGPPVNQL

SEQ ID NO: 59060 - protein, 9 aa, Homo sapiens
  Table A; Target 59060; HLA-A*02:04; PASD1; ENSG00000166049; CTA
YQGPPVNQL

SEQ ID NO: 59061 - protein, 9 aa, Homo sapiens
  Table A; Target 59061; HLA-A*23:01; PASD1; ENSG00000166049; CTA
YQGPPVNQL

SEQ ID NO: 59062 - protein, 9 aa, Homo sapiens
  Table A; Target 59062; HLA-A*24:02; PASD1; ENSG00000166049; CTA
YQGPPVNQL

SEQ ID NO: 59063 - protein, 9 aa, Homo sapiens
  Table A; Target 59063; HLA-A*30:01; PASD1; ENSG00000166049; CTA
YQGPPVNQL

SEQ ID NO: 59064 - protein, 9 aa, Homo sapiens
  Table A; Target 59064; HLA-A*32:01; PASD1; ENSG00000166049; CTA
YQGPPVNQL

SEQ ID NO: 59065 - protein, 9 aa, Homo sapiens
  Table A; Target 59065; HLA-B*13:02; PASD1; ENSG00000166049; CTA
YQGPPVNQL

SEQ ID NO: 59066 - protein, 9 aa, Homo sapiens
  Table A; Target 59066; HLA-B*15:01; PASD1; ENSG00000166049; CTA
YQGPPVNQL

SEQ ID NO: 59067 - protein, 9 aa, Homo sapiens
  Table A; Target 59067; HLA-B*15:03; PASD1; ENSG00000166049; CTA
YQGPPVNQL

SEQ ID NO: 59068 - protein, 9 aa, Homo sapiens
  Table A; Target 59068; HLA-B*27:05; PASD1; ENSG00000166049; CTA
YQGPPVNQL

SEQ ID NO: 59069 - protein, 9 aa, Homo sapiens
  Table A; Target 59069; HLA-B*37:01; PASD1; ENSG00000166049; CTA
YQGPPVNQL

SEQ ID NO: 59070 - protein, 9 aa, Homo sapiens
  Table A; Target 59070; HLA-B*38:01; PASD1; ENSG00000166049; CTA
YQGPPVNQL

SEQ ID NO: 59071 - protein, 9 aa, Homo sapiens
  Table A; Target 59071; HLA-B*39:01; PASD1; ENSG00000166049; CTA
YQGPPVNQL

SEQ ID NO: 59072 - protein, 9 aa, Homo sapiens
  Table A; Target 59072; HLA-B*40:01; PASD1; ENSG00000166049; CTA
YQGPPVNQL

SEQ ID NO: 59073 - protein, 9 aa, Homo sapiens
  Table A; Target 59073; HLA-B*40:02; PASD1; ENSG00000166049; CTA
YQGPPVNQL

SEQ ID NO: 59074 - protein, 9 aa, Homo sapiens
  Table A; Target 59074; HLA-B*58:01; PASD1; ENSG00000166049; CTA
YQGPPVNQL

SEQ ID NO: 59075 - protein, 9 aa, Homo sapiens
  Table A; Target 59075; HLA-C*02:02; PASD1; ENSG00000166049; CTA
YQGPPVNQL

SEQ ID NO: 59076 - protein, 9 aa, Homo sapiens
  Table A; Target 59076; HLA-C*03:03; PASD1; ENSG00000166049; CTA
YQGPPVNQL

SEQ ID NO: 59077 - protein, 9 aa, Homo sapiens
  Table A; Target 59077; HLA-C*03:04; PASD1; ENSG00000166049; CTA
YQGPPVNQL

SEQ ID NO: 59078 - protein, 9 aa, Homo sapiens
  Table A; Target 59078; HLA-C*05:01; PASD1; ENSG00000166049; CTA
YQGPPVNQL

SEQ ID NO: 59079 - protein, 9 aa, Homo sapiens
  Table A; Target 59079; HLA-C*07:04; PASD1; ENSG00000166049; CTA
YQGPPVNQL

SEQ ID NO: 59080 - protein, 9 aa, Homo sapiens
  Table A; Target 59080; HLA-C*12:03; PASD1; ENSG00000166049; CTA
YQGPPVNQL

SEQ ID NO: 59081 - protein, 9 aa, Homo sapiens
  Table A; Target 59081; HLA-C*14:02; PASD1; ENSG00000166049; CTA
YQGPPVNQL

SEQ ID NO: 59082 - protein, 9 aa, Homo sapiens
  Table A; Target 59082; HLA-C*16:02; PASD1; ENSG00000166049; CTA
YQGPPVNQL

SEQ ID NO: 59083 - protein, 9 aa, Homo sapiens
  Table A; Target 59083; HLA-C*16:04; PASD1; ENSG00000166049; CTA
YQGPPVNQL

SEQ ID NO: 59084 - protein, 8 aa, Homo sapiens
  Table A; Target 59084; HLA-B*08:01; PASD1; ENSG00000166049; CTA
YQKIILKF

SEQ ID NO: 59085 - protein, 10 aa, Homo sapiens
  Table A; Target 59085; HLA-B*27:02; PASD1; ENSG00000166049; CTA
YRADPVDLEF

SEQ ID NO: 59086 - protein, 10 aa, Homo sapiens
  Table A; Target 59086; HLA-B*27:05; PASD1; ENSG00000166049; CTA
YRADPVDLEF

SEQ ID NO: 59087 - protein, 10 aa, Homo sapiens
  Table A; Target 59087; HLA-B*38:01; PASD1; ENSG00000166049; CTA
YRADPVDLEF

SEQ ID NO: 59088 - protein, 10 aa, Homo sapiens
  Table A; Target 59088; HLA-C*16:04; PASD1; ENSG00000166049; CTA
YRADPVDLEF

SEQ ID NO: 59089 - protein, 8 aa, Homo sapiens
  Table A; Target 59089; HLA-B*39:01; PASD1; ENSG00000166049; CTA
YVEPAAAA

SEQ ID NO: 59090 - protein, 9 aa, Homo sapiens
  Table A; Target 59090; HLA-B*35:03; PASD1; ENSG00000166049; CTA
YVEPAAAAA

SEQ ID NO: 59091 - protein, 9 aa, Homo sapiens
  Table A; Target 59091; HLA-B*39:01; PASD1; ENSG00000166049; CTA
YVEPAAAAA

SEQ ID NO: 59092 - protein, 9 aa, Homo sapiens
  Table A; Target 59092; HLA-B*54:01; PASD1; ENSG00000166049; CTA
YVEPAAAAA

SEQ ID NO: 59093 - protein, 9 aa, Homo sapiens
  Table A; Target 59093; HLA-B*56:01; PASD1; ENSG00000166049; CTA
YVEPAAAAA

SEQ ID NO: 59094 - protein, 9 aa, Homo sapiens
  Table A; Target 59094; HLA-C*01:02; PASD1; ENSG00000166049; CTA
YVEPAAAAA

SEQ ID NO: 59095 - protein, 9 aa, Homo sapiens
  Table A; Target 59095; HLA-C*03:03; PASD1; ENSG00000166049; CTA
YVEPAAAAA

SEQ ID NO: 59096 - protein, 9 aa, Homo sapiens
  Table A; Target 59096; HLA-C*03:04; PASD1; ENSG00000166049; CTA
YVEPAAAAA

SEQ ID NO: 59097 - protein, 9 aa, Homo sapiens
  Table A; Target 59097; HLA-C*05:01; PASD1; ENSG00000166049; CTA
YVEPAAAAA

SEQ ID NO: 59098 - protein, 11 aa, Homo sapiens
  Table A; Target 59098; HLA-A*30:01; PAX3; ENSG00000135903; TAA
AEQLEELERAF

SEQ ID NO: 59099 - protein, 11 aa, Homo sapiens
  Table A; Target 59099; HLA-B*27:02; PAX3; ENSG00000135903; TAA
AEQLEELERAF

SEQ ID NO: 59100 - protein, 11 aa, Homo sapiens
  Table A; Target 59100; HLA-B*37:01; PAX3; ENSG00000135903; TAA
AEQLEELERAF

SEQ ID NO: 59101 - protein, 11 aa, Homo sapiens
  Table A; Target 59101; HLA-B*44:02; PAX3; ENSG00000135903; TAA
AEQLEELERAF

SEQ ID NO: 59102 - protein, 11 aa, Homo sapiens
  Table A; Target 59102; HLA-B*44:03; PAX3; ENSG00000135903; TAA
AEQLEELERAF

SEQ ID NO: 59103 - protein, 11 aa, Homo sapiens
  Table A; Target 59103; HLA-C*16:04; PAX3; ENSG00000135903; TAA
AEQLEELERAF

SEQ ID NO: 59104 - protein, 9 aa, Homo sapiens
  Table A; Target 59104; HLA-A*23:01; PAX3; ENSG00000135903; TAA
AGANQLMAF

SEQ ID NO: 59105 - protein, 9 aa, Homo sapiens
  Table A; Target 59105; HLA-B*15:01; PAX3; ENSG00000135903; TAA
AGANQLMAF

SEQ ID NO: 59106 - protein, 9 aa, Homo sapiens
  Table A; Target 59106; HLA-B*15:03; PAX3; ENSG00000135903; TAA
AGANQLMAF

SEQ ID NO: 59107 - protein, 9 aa, Homo sapiens
  Table A; Target 59107; HLA-B*46:01; PAX3; ENSG00000135903; TAA
AGANQLMAF

SEQ ID NO: 59108 - protein, 9 aa, Homo sapiens
  Table A; Target 59108; HLA-C*02:02; PAX3; ENSG00000135903; TAA
AGANQLMAF

SEQ ID NO: 59109 - protein, 9 aa, Homo sapiens
  Table A; Target 59109; HLA-C*14:02; PAX3; ENSG00000135903; TAA
AGANQLMAF

SEQ ID NO: 59110 - protein, 9 aa, Homo sapiens
  Table A; Target 59110; HLA-C*16:01; PAX3; ENSG00000135903; TAA
AGANQLMAF

SEQ ID NO: 59111 - protein, 9 aa, Homo sapiens
  Table A; Target 59111; HLA-C*16:04; PAX3; ENSG00000135903; TAA
AGANQLMAF

SEQ ID NO: 59112 - protein, 8 aa, Homo sapiens
  Table A; Target 59112; HLA-C*16:01; PAX3; ENSG00000135903; TAA
AGAVPRMM

SEQ ID NO: 59113 - protein, 9 aa, Homo sapiens
  Table A; Target 59113; HLA-A*02:01; PAX3; ENSG00000135903; TAA
ALSPLTGGL

SEQ ID NO: 59114 - protein, 9 aa, Homo sapiens
  Table A; Target 59114; HLA-A*02:03; PAX3; ENSG00000135903; TAA
ALSPLTGGL

SEQ ID NO: 59115 - protein, 9 aa, Homo sapiens
  Table A; Target 59115; HLA-A*02:04; PAX3; ENSG00000135903; TAA
ALSPLTGGL

SEQ ID NO: 59116 - protein, 9 aa, Homo sapiens
  Table A; Target 59116; HLA-A*32:01; PAX3; ENSG00000135903; TAA
ALSPLTGGL

SEQ ID NO: 59117 - protein, 9 aa, Homo sapiens
  Table A; Target 59117; HLA-B*15:01; PAX3; ENSG00000135903; TAA
ALSPLTGGL

SEQ ID NO: 59118 - protein, 9 aa, Homo sapiens
  Table A; Target 59118; HLA-B*37:01; PAX3; ENSG00000135903; TAA
ALSPLTGGL

SEQ ID NO: 59119 - protein, 8 aa, Homo sapiens
  Table A; Target 59119; HLA-B*15:03; PAX3; ENSG00000135903; TAA
AMPTLPTY

SEQ ID NO: 59120 - protein, 10 aa, Homo sapiens
  Table A; Target 59120; HLA-A*02:07; PAX3; ENSG00000135903; TAA
AMPTLPTYQL

SEQ ID NO: 59121 - protein, 9 aa, Homo sapiens
  Table A; Target 59121; HLA-A*02:03; PAX3; ENSG00000135903; TAA
AQRAKLTEA

SEQ ID NO: 59122 - protein, 9 aa, Homo sapiens
  Table A; Target 59122; HLA-A*02:01; PAX3; ENSG00000135903; TAA
AVSDPSSTV

SEQ ID NO: 59123 - protein, 9 aa, Homo sapiens
  Table A; Target 59123; HLA-A*02:03; PAX3; ENSG00000135903; TAA
AVSDPSSTV

SEQ ID NO: 59124 - protein, 9 aa, Homo sapiens
  Table A; Target 59124; HLA-A*25:01; PAX3; ENSG00000135903; TAA
AVSDPSSTV

SEQ ID NO: 59125 - protein, 9 aa, Homo sapiens
  Table A; Target 59125; HLA-A*26:01; PAX3; ENSG00000135903; TAA
AVSDPSSTV

SEQ ID NO: 59126 - protein, 9 aa, Homo sapiens
  Table A; Target 59126; HLA-A*32:01; PAX3; ENSG00000135903; TAA
AVSDPSSTV

SEQ ID NO: 59127 - protein, 9 aa, Homo sapiens
  Table A; Target 59127; HLA-B*13:02; PAX3; ENSG00000135903; TAA
AVSDPSSTV

SEQ ID NO: 59128 - protein, 9 aa, Homo sapiens
  Table A; Target 59128; HLA-B*15:01; PAX3; ENSG00000135903; TAA
AVSDPSSTV

SEQ ID NO: 59129 - protein, 9 aa, Homo sapiens
  Table A; Target 59129; HLA-B*27:05; PAX3; ENSG00000135903; TAA
AVSDPSSTV

SEQ ID NO: 59130 - protein, 9 aa, Homo sapiens
  Table A; Target 59130; HLA-B*46:01; PAX3; ENSG00000135903; TAA
AVSDPSSTV

SEQ ID NO: 59131 - protein, 9 aa, Homo sapiens
  Table A; Target 59131; HLA-B*55:01; PAX3; ENSG00000135903; TAA
AVSDPSSTV

SEQ ID NO: 59132 - protein, 9 aa, Homo sapiens
  Table A; Target 59132; HLA-B*56:01; PAX3; ENSG00000135903; TAA
AVSDPSSTV

SEQ ID NO: 59133 - protein, 9 aa, Homo sapiens
  Table A; Target 59133; HLA-C*01:02; PAX3; ENSG00000135903; TAA
AVSDPSSTV

SEQ ID NO: 59134 - protein, 9 aa, Homo sapiens
  Table A; Target 59134; HLA-C*03:04; PAX3; ENSG00000135903; TAA
AVSDPSSTV

SEQ ID NO: 59135 - protein, 9 aa, Homo sapiens
  Table A; Target 59135; HLA-C*05:01; PAX3; ENSG00000135903; TAA
AVSDPSSTV

SEQ ID NO: 59136 - protein, 10 aa, Homo sapiens
  Table A; Target 59136; HLA-A*03:02; PAX3; ENSG00000135903; TAA
AVSDPSSTVH

SEQ ID NO: 59137 - protein, 10 aa, Homo sapiens
  Table A; Target 59137; HLA-A*11:01; PAX3; ENSG00000135903; TAA
AVSDPSSTVH

SEQ ID NO: 59138 - protein, 10 aa, Homo sapiens
  Table A; Target 59138; HLA-C*07:06; PAX3; ENSG00000135903; TAA
AVSDPSSTVH

SEQ ID NO: 59139 - protein, 11 aa, Homo sapiens
  Table A; Target 59139; HLA-A*03:01; PAX3; ENSG00000135903; TAA
AVSDPSSTVHR

SEQ ID NO: 59140 - protein, 11 aa, Homo sapiens
  Table A; Target 59140; HLA-A*03:02; PAX3; ENSG00000135903; TAA
AVSDPSSTVHR

SEQ ID NO: 59141 - protein, 11 aa, Homo sapiens
  Table A; Target 59141; HLA-A*11:01; PAX3; ENSG00000135903; TAA
AVSDPSSTVHR

SEQ ID NO: 59142 - protein, 11 aa, Homo sapiens
  Table A; Target 59142; HLA-A*31:01; PAX3; ENSG00000135903; TAA
AVSDPSSTVHR

SEQ ID NO: 59143 - protein, 11 aa, Homo sapiens
  Table A; Target 59143; HLA-A*33:03; PAX3; ENSG00000135903; TAA
AVSDPSSTVHR

SEQ ID NO: 59144 - protein, 11 aa, Homo sapiens
  Table A; Target 59144; HLA-A*68:01; PAX3; ENSG00000135903; TAA
AVSDPSSTVHR

SEQ ID NO: 59145 - protein, 11 aa, Homo sapiens
  Table A; Target 59145; HLA-C*07:06; PAX3; ENSG00000135903; TAA
AVSDPSSTVHR

SEQ ID NO: 59146 - protein, 9 aa, Homo sapiens
  Table A; Target 59146; HLA-A*32:01; PAX3; ENSG00000135903; TAA
CLPSTRHGF

SEQ ID NO: 59147 - protein, 9 aa, Homo sapiens
  Table A; Target 59147; HLA-B*51:01; PAX3; ENSG00000135903; TAA
DAVCDRNTV

SEQ ID NO: 59148 - protein, 9 aa, Homo sapiens
  Table A; Target 59148; HLA-B*27:05; PAX3; ENSG00000135903; TAA
DHMKSLDSL

SEQ ID NO: 59149 - protein, 9 aa, Homo sapiens
  Table A; Target 59149; HLA-B*38:01; PAX3; ENSG00000135903; TAA
DHMKSLDSL

SEQ ID NO: 59150 - protein, 9 aa, Homo sapiens
  Table A; Target 59150; HLA-B*39:01; PAX3; ENSG00000135903; TAA
DHMKSLDSL

SEQ ID NO: 59151 - protein, 8 aa, Homo sapiens
  Table A; Target 59151; HLA-C*05:01; PAX3; ENSG00000135903; TAA
DIDSEPDL

SEQ ID NO: 59152 - protein, 10 aa, Homo sapiens
  Table A; Target 59152; HLA-C*05:01; PAX3; ENSG00000135903; TAA
DIDSEPDLPL

SEQ ID NO: 59153 - protein, 11 aa, Homo sapiens
  Table A; Target 59153; HLA-A*01:01; PAX3; ENSG00000135903; TAA
DIDSEPDLPLK

SEQ ID NO: 59154 - protein, 11 aa, Homo sapiens
  Table A; Target 59154; HLA-B*27:02; PAX3; ENSG00000135903; TAA
DIDSEPDLPLK

SEQ ID NO: 59155 - protein, 8 aa, Homo sapiens
  Table A; Target 59155; HLA-A*33:01; PAX3; ENSG00000135903; TAA
DPSSTVHR

SEQ ID NO: 59156 - protein, 8 aa, Homo sapiens
  Table A; Target 59156; HLA-A*33:03; PAX3; ENSG00000135903; TAA
DPSSTVHR

SEQ ID NO: 59157 - protein, 8 aa, Homo sapiens
  Table A; Target 59157; HLA-A*68:01; PAX3; ENSG00000135903; TAA
DPSSTVHR

SEQ ID NO: 59158 - protein, 8 aa, Homo sapiens
  Table A; Target 59158; HLA-A*26:01; PAX3; ENSG00000135903; TAA
DPVTGYQY

SEQ ID NO: 59159 - protein, 8 aa, Homo sapiens
  Table A; Target 59159; HLA-B*18:01; PAX3; ENSG00000135903; TAA
DPVTGYQY

SEQ ID NO: 59160 - protein, 8 aa, Homo sapiens
  Table A; Target 59160; HLA-B*35:01; PAX3; ENSG00000135903; TAA
DPVTGYQY

SEQ ID NO: 59161 - protein, 8 aa, Homo sapiens
  Table A; Target 59161; HLA-B*35:03; PAX3; ENSG00000135903; TAA
DPVTGYQY

SEQ ID NO: 59162 - protein, 8 aa, Homo sapiens
  Table A; Target 59162; HLA-B*39:01; PAX3; ENSG00000135903; TAA
DPVTGYQY

SEQ ID NO: 59163 - protein, 8 aa, Homo sapiens
  Table A; Target 59163; HLA-B*55:01; PAX3; ENSG00000135903; TAA
DPVTGYQY

SEQ ID NO: 59164 - protein, 8 aa, Homo sapiens
  Table A; Target 59164; HLA-C*07:01; PAX3; ENSG00000135903; TAA
DPVTGYQY

SEQ ID NO: 59165 - protein, 11 aa, Homo sapiens
  Table A; Target 59165; HLA-A*25:01; PAX3; ENSG00000135903; TAA
DPVTGYQYGQY

SEQ ID NO: 59166 - protein, 11 aa, Homo sapiens
  Table A; Target 59166; HLA-A*26:01; PAX3; ENSG00000135903; TAA
DPVTGYQYGQY

SEQ ID NO: 59167 - protein, 11 aa, Homo sapiens
  Table A; Target 59167; HLA-A*68:01; PAX3; ENSG00000135903; TAA
DPVTGYQYGQY

SEQ ID NO: 59168 - protein, 11 aa, Homo sapiens
  Table A; Target 59168; HLA-B*35:01; PAX3; ENSG00000135903; TAA
DPVTGYQYGQY

SEQ ID NO: 59169 - protein, 9 aa, Homo sapiens
  Table A; Target 59169; HLA-A*01:01; PAX3; ENSG00000135903; TAA
DSEPDLPLK

SEQ ID NO: 59170 - protein, 9 aa, Homo sapiens
  Table A; Target 59170; HLA-A*11:01; PAX3; ENSG00000135903; TAA
DSEPDLPLK

SEQ ID NO: 59171 - protein, 9 aa, Homo sapiens
  Table A; Target 59171; HLA-A*33:01; PAX3; ENSG00000135903; TAA
DSEPDLPLK

SEQ ID NO: 59172 - protein, 9 aa, Homo sapiens
  Table A; Target 59172; HLA-A*68:01; PAX3; ENSG00000135903; TAA
DSEPDLPLK

SEQ ID NO: 59173 - protein, 10 aa, Homo sapiens
  Table A; Target 59173; HLA-A*01:01; PAX3; ENSG00000135903; TAA
DSEPDLPLKR

SEQ ID NO: 59174 - protein, 10 aa, Homo sapiens
  Table A; Target 59174; HLA-A*33:01; PAX3; ENSG00000135903; TAA
DSEPDLPLKR

SEQ ID NO: 59175 - protein, 10 aa, Homo sapiens
  Table A; Target 59175; HLA-A*33:03; PAX3; ENSG00000135903; TAA
DSEPDLPLKR

SEQ ID NO: 59176 - protein, 10 aa, Homo sapiens
  Table A; Target 59176; HLA-A*68:01; PAX3; ENSG00000135903; TAA
DSEPDLPLKR

SEQ ID NO: 59177 - protein, 10 aa, Homo sapiens
  Table A; Target 59177; HLA-C*07:06; PAX3; ENSG00000135903; TAA
DSEPDLPLKR

SEQ ID NO: 59178 - protein, 9 aa, Homo sapiens
  Table A; Target 59178; HLA-A*01:01; PAX3; ENSG00000135903; TAA
DSLPTSQSY

SEQ ID NO: 59179 - protein, 9 aa, Homo sapiens
  Table A; Target 59179; HLA-A*25:01; PAX3; ENSG00000135903; TAA
DSLPTSQSY

SEQ ID NO: 59180 - protein, 9 aa, Homo sapiens
  Table A; Target 59180; HLA-A*26:01; PAX3; ENSG00000135903; TAA
DSLPTSQSY

SEQ ID NO: 59181 - protein, 9 aa, Homo sapiens
  Table A; Target 59181; HLA-A*29:02; PAX3; ENSG00000135903; TAA
DSLPTSQSY

SEQ ID NO: 59182 - protein, 9 aa, Homo sapiens
  Table A; Target 59182; HLA-A*30:02; PAX3; ENSG00000135903; TAA
DSLPTSQSY

SEQ ID NO: 59183 - protein, 9 aa, Homo sapiens
  Table A; Target 59183; HLA-A*32:01; PAX3; ENSG00000135903; TAA
DSLPTSQSY

SEQ ID NO: 59184 - protein, 9 aa, Homo sapiens
  Table A; Target 59184; HLA-A*33:01; PAX3; ENSG00000135903; TAA
DSLPTSQSY

SEQ ID NO: 59185 - protein, 9 aa, Homo sapiens
  Table A; Target 59185; HLA-A*33:03; PAX3; ENSG00000135903; TAA
DSLPTSQSY

SEQ ID NO: 59186 - protein, 9 aa, Homo sapiens
  Table A; Target 59186; HLA-A*68:01; PAX3; ENSG00000135903; TAA
DSLPTSQSY

SEQ ID NO: 59187 - protein, 9 aa, Homo sapiens
  Table A; Target 59187; HLA-B*15:01; PAX3; ENSG00000135903; TAA
DSLPTSQSY

SEQ ID NO: 59188 - protein, 9 aa, Homo sapiens
  Table A; Target 59188; HLA-B*15:03; PAX3; ENSG00000135903; TAA
DSLPTSQSY

SEQ ID NO: 59189 - protein, 9 aa, Homo sapiens
  Table A; Target 59189; HLA-B*18:01; PAX3; ENSG00000135903; TAA
DSLPTSQSY

SEQ ID NO: 59190 - protein, 9 aa, Homo sapiens
  Table A; Target 59190; HLA-B*35:01; PAX3; ENSG00000135903; TAA
DSLPTSQSY

SEQ ID NO: 59191 - protein, 9 aa, Homo sapiens
  Table A; Target 59191; HLA-B*39:01; PAX3; ENSG00000135903; TAA
DSLPTSQSY

SEQ ID NO: 59192 - protein, 9 aa, Homo sapiens
  Table A; Target 59192; HLA-B*44:02; PAX3; ENSG00000135903; TAA
DSLPTSQSY

SEQ ID NO: 59193 - protein, 9 aa, Homo sapiens
  Table A; Target 59193; HLA-B*44:03; PAX3; ENSG00000135903; TAA
DSLPTSQSY

SEQ ID NO: 59194 - protein, 9 aa, Homo sapiens
  Table A; Target 59194; HLA-B*46:01; PAX3; ENSG00000135903; TAA
DSLPTSQSY

SEQ ID NO: 59195 - protein, 9 aa, Homo sapiens
  Table A; Target 59195; HLA-B*57:01; PAX3; ENSG00000135903; TAA
DSLPTSQSY

SEQ ID NO: 59196 - protein, 9 aa, Homo sapiens
  Table A; Target 59196; HLA-B*58:01; PAX3; ENSG00000135903; TAA
DSLPTSQSY

SEQ ID NO: 59197 - protein, 9 aa, Homo sapiens
  Table A; Target 59197; HLA-C*01:02; PAX3; ENSG00000135903; TAA
DSLPTSQSY

SEQ ID NO: 59198 - protein, 9 aa, Homo sapiens
  Table A; Target 59198; HLA-C*03:03; PAX3; ENSG00000135903; TAA
DSLPTSQSY

SEQ ID NO: 59199 - protein, 9 aa, Homo sapiens
  Table A; Target 59199; HLA-C*07:01; PAX3; ENSG00000135903; TAA
DSLPTSQSY

SEQ ID NO: 59200 - protein, 9 aa, Homo sapiens
  Table A; Target 59200; HLA-C*07:04; PAX3; ENSG00000135903; TAA
DSLPTSQSY

SEQ ID NO: 59201 - protein, 9 aa, Homo sapiens
  Table A; Target 59201; HLA-C*07:06; PAX3; ENSG00000135903; TAA
DSLPTSQSY

SEQ ID NO: 59202 - protein, 9 aa, Homo sapiens
  Table A; Target 59202; HLA-C*14:02; PAX3; ENSG00000135903; TAA
DSLPTSQSY

SEQ ID NO: 59203 - protein, 9 aa, Homo sapiens
  Table A; Target 59203; HLA-C*16:04; PAX3; ENSG00000135903; TAA
DSLPTSQSY

SEQ ID NO: 59204 - protein, 9 aa, Homo sapiens
  Table A; Target 59204; HLA-B*18:01; PAX3; ENSG00000135903; TAA
EELAQRAKL

SEQ ID NO: 59205 - protein, 9 aa, Homo sapiens
  Table A; Target 59205; HLA-B*37:01; PAX3; ENSG00000135903; TAA
EELAQRAKL

SEQ ID NO: 59206 - protein, 9 aa, Homo sapiens
  Table A; Target 59206; HLA-B*40:01; PAX3; ENSG00000135903; TAA
EELAQRAKL

SEQ ID NO: 59207 - protein, 9 aa, Homo sapiens
  Table A; Target 59207; HLA-B*40:02; PAX3; ENSG00000135903; TAA
EELAQRAKL

SEQ ID NO: 59208 - protein, 9 aa, Homo sapiens
  Table A; Target 59208; HLA-B*44:02; PAX3; ENSG00000135903; TAA
EELAQRAKL

SEQ ID NO: 59209 - protein, 9 aa, Homo sapiens
  Table A; Target 59209; HLA-B*44:03; PAX3; ENSG00000135903; TAA
EELAQRAKL

SEQ ID NO: 59210 - protein, 9 aa, Homo sapiens
  Table A; Target 59210; HLA-A*33:01; PAX3; ENSG00000135903; TAA
EELERAFER

SEQ ID NO: 59211 - protein, 9 aa, Homo sapiens
  Table A; Target 59211; HLA-A*33:03; PAX3; ENSG00000135903; TAA
EELERAFER

SEQ ID NO: 59212 - protein, 8 aa, Homo sapiens
  Table A; Target 59212; HLA-B*08:01; PAX3; ENSG00000135903; TAA
ELAQRAKL

SEQ ID NO: 59213 - protein, 8 aa, Homo sapiens
  Table A; Target 59213; HLA-B*54:01; PAX3; ENSG00000135903; TAA
EPTTTVSA

SEQ ID NO: 59214 - protein, 8 aa, Homo sapiens
  Table A; Target 59214; HLA-B*55:01; PAX3; ENSG00000135903; TAA
EPTTTVSA

SEQ ID NO: 59215 - protein, 8 aa, Homo sapiens
  Table A; Target 59215; HLA-B*56:01; PAX3; ENSG00000135903; TAA
EPTTTVSA

SEQ ID NO: 59216 - protein, 10 aa, Homo sapiens
  Table A; Target 59216; HLA-A*25:01; PAX3; ENSG00000135903; TAA
EQLEELERAF

SEQ ID NO: 59217 - protein, 10 aa, Homo sapiens
  Table A; Target 59217; HLA-B*44:02; PAX3; ENSG00000135903; TAA
EQLEELERAF

SEQ ID NO: 59218 - protein, 10 aa, Homo sapiens
  Table A; Target 59218; HLA-B*44:03; PAX3; ENSG00000135903; TAA
EQLEELERAF

SEQ ID NO: 59219 - protein, 9 aa, Homo sapiens
  Table A; Target 59219; HLA-A*25:01; PAX3; ENSG00000135903; TAA
ETSYQPTSI

SEQ ID NO: 59220 - protein, 9 aa, Homo sapiens
  Table A; Target 59220; HLA-A*26:01; PAX3; ENSG00000135903; TAA
ETSYQPTSI

SEQ ID NO: 59221 - protein, 9 aa, Homo sapiens
  Table A; Target 59221; HLA-A*33:03; PAX3; ENSG00000135903; TAA
ETSYQPTSI

SEQ ID NO: 59222 - protein, 9 aa, Homo sapiens
  Table A; Target 59222; HLA-A*68:01; PAX3; ENSG00000135903; TAA
ETSYQPTSI

SEQ ID NO: 59223 - protein, 9 aa, Homo sapiens
  Table A; Target 59223; HLA-A*68:02; PAX3; ENSG00000135903; TAA
ETSYQPTSI

SEQ ID NO: 59224 - protein, 9 aa, Homo sapiens
  Table A; Target 59224; HLA-A*23:01; PAX3; ENSG00000135903; TAA
FPPTAMPTL

SEQ ID NO: 59225 - protein, 9 aa, Homo sapiens
  Table A; Target 59225; HLA-A*24:02; PAX3; ENSG00000135903; TAA
FPPTAMPTL

SEQ ID NO: 59226 - protein, 9 aa, Homo sapiens
  Table A; Target 59226; HLA-B*07:02; PAX3; ENSG00000135903; TAA
FPPTAMPTL

SEQ ID NO: 59227 - protein, 9 aa, Homo sapiens
  Table A; Target 59227; HLA-B*35:01; PAX3; ENSG00000135903; TAA
FPPTAMPTL

SEQ ID NO: 59228 - protein, 9 aa, Homo sapiens
  Table A; Target 59228; HLA-B*35:03; PAX3; ENSG00000135903; TAA
FPPTAMPTL

SEQ ID NO: 59229 - protein, 9 aa, Homo sapiens
  Table A; Target 59229; HLA-B*51:01; PAX3; ENSG00000135903; TAA
FPPTAMPTL

SEQ ID NO: 59230 - protein, 9 aa, Homo sapiens
  Table A; Target 59230; HLA-B*54:01; PAX3; ENSG00000135903; TAA
FPPTAMPTL

SEQ ID NO: 59231 - protein, 9 aa, Homo sapiens
  Table A; Target 59231; HLA-B*56:01; PAX3; ENSG00000135903; TAA
FPPTAMPTL

SEQ ID NO: 59232 - protein, 9 aa, Homo sapiens
  Table A; Target 59232; HLA-C*01:02; PAX3; ENSG00000135903; TAA
FPPTAMPTL

SEQ ID NO: 59233 - protein, 9 aa, Homo sapiens
  Table A; Target 59233; HLA-C*07:02; PAX3; ENSG00000135903; TAA
FPPTAMPTL

SEQ ID NO: 59234 - protein, 11 aa, Homo sapiens
  Table A; Target 59234; HLA-A*68:01; PAX3; ENSG00000135903; TAA
FTAEQLEELER

SEQ ID NO: 59235 - protein, 11 aa, Homo sapiens
  Table A; Target 59235; HLA-B*27:02; PAX3; ENSG00000135903; TAA
FTAEQLEELER

SEQ ID NO: 59236 - protein, 11 aa, Homo sapiens
  Table A; Target 59236; HLA-C*07:06; PAX3; ENSG00000135903; TAA
FTAEQLEELER

SEQ ID NO: 59237 - protein, 9 aa, Homo sapiens
  Table A; Target 59237; HLA-C*01:02; PAX3; ENSG00000135903; TAA
FVPPSGPSN

SEQ ID NO: 59238 - protein, 11 aa, Homo sapiens
  Table A; Target 59238; HLA-A*02:07; PAX3; ENSG00000135903; TAA
FVPPSGPSNPM

SEQ ID NO: 59239 - protein, 11 aa, Homo sapiens
  Table A; Target 59239; HLA-A*26:01; PAX3; ENSG00000135903; TAA
FVPPSGPSNPM

SEQ ID NO: 59240 - protein, 11 aa, Homo sapiens
  Table A; Target 59240; HLA-B*27:05; PAX3; ENSG00000135903; TAA
FVPPSGPSNPM

SEQ ID NO: 59241 - protein, 11 aa, Homo sapiens
  Table A; Target 59241; HLA-B*35:01; PAX3; ENSG00000135903; TAA
FVPPSGPSNPM

SEQ ID NO: 59242 - protein, 11 aa, Homo sapiens
  Table A; Target 59242; HLA-B*46:01; PAX3; ENSG00000135903; TAA
FVPPSGPSNPM

SEQ ID NO: 59243 - protein, 11 aa, Homo sapiens
  Table A; Target 59243; HLA-C*07:02; PAX3; ENSG00000135903; TAA
FVPPSGPSNPM

SEQ ID NO: 59244 - protein, 11 aa, Homo sapiens
  Table A; Target 59244; HLA-C*07:04; PAX3; ENSG00000135903; TAA
FVPPSGPSNPM

SEQ ID NO: 59245 - protein, 9 aa, Homo sapiens
  Table A; Target 59245; HLA-A*03:01; PAX3; ENSG00000135903; TAA
GAIGGSKPK

SEQ ID NO: 59246 - protein, 9 aa, Homo sapiens
  Table A; Target 59246; HLA-A*03:02; PAX3; ENSG00000135903; TAA
GAIGGSKPK

SEQ ID NO: 59247 - protein, 9 aa, Homo sapiens
  Table A; Target 59247; HLA-A*11:01; PAX3; ENSG00000135903; TAA
GAIGGSKPK

SEQ ID NO: 59248 - protein, 8 aa, Homo sapiens
  Table A; Target 59248; HLA-B*46:01; PAX3; ENSG00000135903; TAA
GANQLMAF

SEQ ID NO: 59249 - protein, 9 aa, Homo sapiens
  Table A; Target 59249; HLA-A*23:01; PAX3; ENSG00000135903; TAA
GFSSYTDSF

SEQ ID NO: 59250 - protein, 9 aa, Homo sapiens
  Table A; Target 59250; HLA-A*29:02; PAX3; ENSG00000135903; TAA
GFSSYTDSF

SEQ ID NO: 59251 - protein, 9 aa, Homo sapiens
  Table A; Target 59251; HLA-C*14:02; PAX3; ENSG00000135903; TAA
GFSSYTDSF

SEQ ID NO: 59252 - protein, 9 aa, Homo sapiens
  Table A; Target 59252; HLA-A*02:01; PAX3; ENSG00000135903; TAA
GGLEPTTTV

SEQ ID NO: 59253 - protein, 9 aa, Homo sapiens
  Table A; Target 59253; HLA-A*02:03; PAX3; ENSG00000135903; TAA
GGLEPTTTV

SEQ ID NO: 59254 - protein, 9 aa, Homo sapiens
  Table A; Target 59254; HLA-B*13:02; PAX3; ENSG00000135903; TAA
GGLEPTTTV

SEQ ID NO: 59255 - protein, 9 aa, Homo sapiens
  Table A; Target 59255; HLA-B*49:01; PAX3; ENSG00000135903; TAA
GGLEPTTTV

SEQ ID NO: 59256 - protein, 9 aa, Homo sapiens
  Table A; Target 59256; HLA-C*05:01; PAX3; ENSG00000135903; TAA
GGLEPTTTV

SEQ ID NO: 59257 - protein, 11 aa, Homo sapiens
  Table A; Target 59257; HLA-A*30:02; PAX3; ENSG00000135903; TAA
GGVPHQPQTDY

SEQ ID NO: 59258 - protein, 11 aa, Homo sapiens
  Table A; Target 59258; HLA-B*15:01; PAX3; ENSG00000135903; TAA
GGVPHQPQTDY

SEQ ID NO: 59259 - protein, 11 aa, Homo sapiens
  Table A; Target 59259; HLA-B*15:03; PAX3; ENSG00000135903; TAA
GGVPHQPQTDY

SEQ ID NO: 59260 - protein, 11 aa, Homo sapiens
  Table A; Target 59260; HLA-B*39:01; PAX3; ENSG00000135903; TAA
GGVPHQPQTDY

SEQ ID NO: 59261 - protein, 9 aa, Homo sapiens
  Table A; Target 59261; HLA-A*02:01; PAX3; ENSG00000135903; TAA
GLSPQVMGL

SEQ ID NO: 59262 - protein, 9 aa, Homo sapiens
  Table A; Target 59262; HLA-A*02:03; PAX3; ENSG00000135903; TAA
GLSPQVMGL

SEQ ID NO: 59263 - protein, 9 aa, Homo sapiens
  Table A; Target 59263; HLA-A*02:04; PAX3; ENSG00000135903; TAA
GLSPQVMGL

SEQ ID NO: 59264 - protein, 9 aa, Homo sapiens
  Table A; Target 59264; HLA-A*02:07; PAX3; ENSG00000135903; TAA
GLSPQVMGL

SEQ ID NO: 59265 - protein, 9 aa, Homo sapiens
  Table A; Target 59265; HLA-B*13:02; PAX3; ENSG00000135903; TAA
GLSPQVMGL

SEQ ID NO: 59266 - protein, 9 aa, Homo sapiens
  Table A; Target 59266; HLA-B*37:01; PAX3; ENSG00000135903; TAA
GLSPQVMGL

SEQ ID NO: 59267 - protein, 9 aa, Homo sapiens
  Table A; Target 59267; HLA-B*55:01; PAX3; ENSG00000135903; TAA
GLSPQVMGL

SEQ ID NO: 59268 - protein, 10 aa, Homo sapiens
  Table A; Target 59268; HLA-A*02:03; PAX3; ENSG00000135903; TAA
GLSPQVMGLL

SEQ ID NO: 59269 - protein, 10 aa, Homo sapiens
  Table A; Target 59269; HLA-B*56:01; PAX3; ENSG00000135903; TAA
GPSNPMNPTI

SEQ ID NO: 59270 - protein, 9 aa, Homo sapiens
  Table A; Target 59270; HLA-A*30:02; PAX3; ENSG00000135903; TAA
GQNYPRSGF

SEQ ID NO: 59271 - protein, 9 aa, Homo sapiens
  Table A; Target 59271; HLA-A*32:01; PAX3; ENSG00000135903; TAA
GQNYPRSGF

SEQ ID NO: 59272 - protein, 9 aa, Homo sapiens
  Table A; Target 59272; HLA-B*15:01; PAX3; ENSG00000135903; TAA
GQNYPRSGF

SEQ ID NO: 59273 - protein, 9 aa, Homo sapiens
  Table A; Target 59273; HLA-B*15:03; PAX3; ENSG00000135903; TAA
GQNYPRSGF

SEQ ID NO: 59274 - protein, 9 aa, Homo sapiens
  Table A; Target 59274; HLA-B*37:01; PAX3; ENSG00000135903; TAA
GQNYPRSGF

SEQ ID NO: 59275 - protein, 9 aa, Homo sapiens
  Table A; Target 59275; HLA-C*16:04; PAX3; ENSG00000135903; TAA
GQNYPRSGF

SEQ ID NO: 59276 - protein, 8 aa, Homo sapiens
  Table A; Target 59276; HLA-B*13:02; PAX3; ENSG00000135903; TAA
GQSKPWTF

SEQ ID NO: 59277 - protein, 8 aa, Homo sapiens
  Table A; Target 59277; HLA-B*15:01; PAX3; ENSG00000135903; TAA
GQSKPWTF

SEQ ID NO: 59278 - protein, 8 aa, Homo sapiens
  Table A; Target 59278; HLA-B*15:03; PAX3; ENSG00000135903; TAA
GQSKPWTF

SEQ ID NO: 59279 - protein, 8 aa, Homo sapiens
  Table A; Target 59279; HLA-B*38:01; PAX3; ENSG00000135903; TAA
GQSKPWTF

SEQ ID NO: 59280 - protein, 9 aa, Homo sapiens
  Table A; Target 59280; HLA-A*25:01; PAX3; ENSG00000135903; TAA
GQYGQSKPW

SEQ ID NO: 59281 - protein, 9 aa, Homo sapiens
  Table A; Target 59281; HLA-A*32:01; PAX3; ENSG00000135903; TAA
GQYGQSKPW

SEQ ID NO: 59282 - protein, 9 aa, Homo sapiens
  Table A; Target 59282; HLA-B*15:01; PAX3; ENSG00000135903; TAA
GQYGQSKPW

SEQ ID NO: 59283 - protein, 9 aa, Homo sapiens
  Table A; Target 59283; HLA-B*15:03; PAX3; ENSG00000135903; TAA
GQYGQSKPW

SEQ ID NO: 59284 - protein, 9 aa, Homo sapiens
  Table A; Target 59284; HLA-C*16:04; PAX3; ENSG00000135903; TAA
GQYGQSKPW

SEQ ID NO: 59285 - protein, 11 aa, Homo sapiens
  Table A; Target 59285; HLA-A*02:01; PAX3; ENSG00000135903; TAA
GQYGQSKPWTF

SEQ ID NO: 59286 - protein, 11 aa, Homo sapiens
  Table A; Target 59286; HLA-A*02:03; PAX3; ENSG00000135903; TAA
GQYGQSKPWTF

SEQ ID NO: 59287 - protein, 11 aa, Homo sapiens
  Table A; Target 59287; HLA-A*02:04; PAX3; ENSG00000135903; TAA
GQYGQSKPWTF

SEQ ID NO: 59288 - protein, 11 aa, Homo sapiens
  Table A; Target 59288; HLA-A*02:07; PAX3; ENSG00000135903; TAA
GQYGQSKPWTF

SEQ ID NO: 59289 - protein, 11 aa, Homo sapiens
  Table A; Target 59289; HLA-A*03:01; PAX3; ENSG00000135903; TAA
GQYGQSKPWTF

SEQ ID NO: 59290 - protein, 11 aa, Homo sapiens
  Table A; Target 59290; HLA-A*03:02; PAX3; ENSG00000135903; TAA
GQYGQSKPWTF

SEQ ID NO: 59291 - protein, 11 aa, Homo sapiens
  Table A; Target 59291; HLA-A*11:01; PAX3; ENSG00000135903; TAA
GQYGQSKPWTF

SEQ ID NO: 59292 - protein, 11 aa, Homo sapiens
  Table A; Target 59292; HLA-A*23:01; PAX3; ENSG00000135903; TAA
GQYGQSKPWTF

SEQ ID NO: 59293 - protein, 11 aa, Homo sapiens
  Table A; Target 59293; HLA-A*24:02; PAX3; ENSG00000135903; TAA
GQYGQSKPWTF

SEQ ID NO: 59294 - protein, 11 aa, Homo sapiens
  Table A; Target 59294; HLA-A*29:02; PAX3; ENSG00000135903; TAA
GQYGQSKPWTF

SEQ ID NO: 59295 - protein, 11 aa, Homo sapiens
  Table A; Target 59295; HLA-A*30:01; PAX3; ENSG00000135903; TAA
GQYGQSKPWTF

SEQ ID NO: 59296 - protein, 11 aa, Homo sapiens
  Table A; Target 59296; HLA-A*30:02; PAX3; ENSG00000135903; TAA
GQYGQSKPWTF

SEQ ID NO: 59297 - protein, 11 aa, Homo sapiens
  Table A; Target 59297; HLA-A*31:01; PAX3; ENSG00000135903; TAA
GQYGQSKPWTF

SEQ ID NO: 59298 - protein, 11 aa, Homo sapiens
  Table A; Target 59298; HLA-A*32:01; PAX3; ENSG00000135903; TAA
GQYGQSKPWTF

SEQ ID NO: 59299 - protein, 11 aa, Homo sapiens
  Table A; Target 59299; HLA-B*13:02; PAX3; ENSG00000135903; TAA
GQYGQSKPWTF

SEQ ID NO: 59300 - protein, 11 aa, Homo sapiens
  Table A; Target 59300; HLA-B*15:01; PAX3; ENSG00000135903; TAA
GQYGQSKPWTF

SEQ ID NO: 59301 - protein, 11 aa, Homo sapiens
  Table A; Target 59301; HLA-B*15:03; PAX3; ENSG00000135903; TAA
GQYGQSKPWTF

SEQ ID NO: 59302 - protein, 11 aa, Homo sapiens
  Table A; Target 59302; HLA-B*27:02; PAX3; ENSG00000135903; TAA
GQYGQSKPWTF

SEQ ID NO: 59303 - protein, 11 aa, Homo sapiens
  Table A; Target 59303; HLA-B*27:05; PAX3; ENSG00000135903; TAA
GQYGQSKPWTF

SEQ ID NO: 59304 - protein, 11 aa, Homo sapiens
  Table A; Target 59304; HLA-B*38:01; PAX3; ENSG00000135903; TAA
GQYGQSKPWTF

SEQ ID NO: 59305 - protein, 11 aa, Homo sapiens
  Table A; Target 59305; HLA-B*40:02; PAX3; ENSG00000135903; TAA
GQYGQSKPWTF

SEQ ID NO: 59306 - protein, 11 aa, Homo sapiens
  Table A; Target 59306; HLA-B*44:02; PAX3; ENSG00000135903; TAA
GQYGQSKPWTF

SEQ ID NO: 59307 - protein, 11 aa, Homo sapiens
  Table A; Target 59307; HLA-B*44:03; PAX3; ENSG00000135903; TAA
GQYGQSKPWTF

SEQ ID NO: 59308 - protein, 11 aa, Homo sapiens
  Table A; Target 59308; HLA-B*55:01; PAX3; ENSG00000135903; TAA
GQYGQSKPWTF

SEQ ID NO: 59309 - protein, 11 aa, Homo sapiens
  Table A; Target 59309; HLA-B*57:01; PAX3; ENSG00000135903; TAA
GQYGQSKPWTF

SEQ ID NO: 59310 - protein, 11 aa, Homo sapiens
  Table A; Target 59310; HLA-B*58:01; PAX3; ENSG00000135903; TAA
GQYGQSKPWTF

SEQ ID NO: 59311 - protein, 11 aa, Homo sapiens
  Table A; Target 59311; HLA-C*02:02; PAX3; ENSG00000135903; TAA
GQYGQSKPWTF

SEQ ID NO: 59312 - protein, 11 aa, Homo sapiens
  Table A; Target 59312; HLA-C*04:01; PAX3; ENSG00000135903; TAA
GQYGQSKPWTF

SEQ ID NO: 59313 - protein, 11 aa, Homo sapiens
  Table A; Target 59313; HLA-C*06:02; PAX3; ENSG00000135903; TAA
GQYGQSKPWTF

SEQ ID NO: 59314 - protein, 11 aa, Homo sapiens
  Table A; Target 59314; HLA-C*07:01; PAX3; ENSG00000135903; TAA
GQYGQSKPWTF

SEQ ID NO: 59315 - protein, 11 aa, Homo sapiens
  Table A; Target 59315; HLA-C*07:04; PAX3; ENSG00000135903; TAA
GQYGQSKPWTF

SEQ ID NO: 59316 - protein, 11 aa, Homo sapiens
  Table A; Target 59316; HLA-C*12:03; PAX3; ENSG00000135903; TAA
GQYGQSKPWTF

SEQ ID NO: 59317 - protein, 11 aa, Homo sapiens
  Table A; Target 59317; HLA-C*16:01; PAX3; ENSG00000135903; TAA
GQYGQSKPWTF

SEQ ID NO: 59318 - protein, 11 aa, Homo sapiens
  Table A; Target 59318; HLA-C*16:02; PAX3; ENSG00000135903; TAA
GQYGQSKPWTF

SEQ ID NO: 59319 - protein, 11 aa, Homo sapiens
  Table A; Target 59319; HLA-C*16:04; PAX3; ENSG00000135903; TAA
GQYGQSKPWTF

SEQ ID NO: 59320 - protein, 10 aa, Homo sapiens
  Table A; Target 59320; HLA-A*29:02; PAX3; ENSG00000135903; TAA
GVPHQPQTDY

SEQ ID NO: 59321 - protein, 10 aa, Homo sapiens
  Table A; Target 59321; HLA-A*30:02; PAX3; ENSG00000135903; TAA
GVPHQPQTDY

SEQ ID NO: 59322 - protein, 10 aa, Homo sapiens
  Table A; Target 59322; HLA-B*15:01; PAX3; ENSG00000135903; TAA
GVPHQPQTDY

SEQ ID NO: 59323 - protein, 10 aa, Homo sapiens
  Table A; Target 59323; HLA-A*29:02; PAX3; ENSG00000135903; TAA
GYSMDPVTGY

SEQ ID NO: 59324 - protein, 10 aa, Homo sapiens
  Table A; Target 59324; HLA-A*30:02; PAX3; ENSG00000135903; TAA
GYSMDPVTGY

SEQ ID NO: 59325 - protein, 10 aa, Homo sapiens
  Table A; Target 59325; HLA-B*15:01; PAX3; ENSG00000135903; TAA
GYSMDPVTGY

SEQ ID NO: 59326 - protein, 10 aa, Homo sapiens
  Table A; Target 59326; HLA-C*14:02; PAX3; ENSG00000135903; TAA
GYSMDPVTGY

SEQ ID NO: 59327 - protein, 10 aa, Homo sapiens
  Table A; Target 59327; HLA-C*16:04; PAX3; ENSG00000135903; TAA
GYSMDPVTGY

SEQ ID NO: 59328 - protein, 10 aa, Homo sapiens
  Table A; Target 59328; HLA-B*35:01; PAX3; ENSG00000135903; TAA
HGFSSYTDSF

SEQ ID NO: 59329 - protein, 9 aa, Homo sapiens
  Table A; Target 59329; HLA-B*54:01; PAX3; ENSG00000135903; TAA
HLIPGGFPP

SEQ ID NO: 59330 - protein, 11 aa, Homo sapiens
  Table A; Target 59330; HLA-A*02:01; PAX3; ENSG00000135903; TAA
HLIPGGFPPTA

SEQ ID NO: 59331 - protein, 11 aa, Homo sapiens
  Table A; Target 59331; HLA-A*02:03; PAX3; ENSG00000135903; TAA
HLIPGGFPPTA

SEQ ID NO: 59332 - protein, 11 aa, Homo sapiens
  Table A; Target 59332; HLA-B*54:01; PAX3; ENSG00000135903; TAA
HLIPGGFPPTA

SEQ ID NO: 59333 - protein, 8 aa, Homo sapiens
  Table A; Target 59333; HLA-B*08:01; PAX3; ENSG00000135903; TAA
HMKSLDSL

SEQ ID NO: 59334 - protein, 9 aa, Homo sapiens
  Table A; Target 59334; HLA-B*13:02; PAX3; ENSG00000135903; TAA
HQPQTDYAL

SEQ ID NO: 59335 - protein, 9 aa, Homo sapiens
  Table A; Target 59335; HLA-B*27:05; PAX3; ENSG00000135903; TAA
HQPQTDYAL

SEQ ID NO: 59336 - protein, 9 aa, Homo sapiens
  Table A; Target 59336; HLA-B*35:03; PAX3; ENSG00000135903; TAA
HQPQTDYAL

SEQ ID NO: 59337 - protein, 9 aa, Homo sapiens
  Table A; Target 59337; HLA-B*38:01; PAX3; ENSG00000135903; TAA
HQPQTDYAL

SEQ ID NO: 59338 - protein, 9 aa, Homo sapiens
  Table A; Target 59338; HLA-B*39:01; PAX3; ENSG00000135903; TAA
HQPQTDYAL

SEQ ID NO: 59339 - protein, 10 aa, Homo sapiens
  Table A; Target 59339; HLA-A*03:01; PAX3; ENSG00000135903; TAA
HSIDGILSER

SEQ ID NO: 59340 - protein, 10 aa, Homo sapiens
  Table A; Target 59340; HLA-A*03:02; PAX3; ENSG00000135903; TAA
HSIDGILSER

SEQ ID NO: 59341 - protein, 10 aa, Homo sapiens
  Table A; Target 59341; HLA-A*11:01; PAX3; ENSG00000135903; TAA
HSIDGILSER

SEQ ID NO: 59342 - protein, 10 aa, Homo sapiens
  Table A; Target 59342; HLA-A*25:01; PAX3; ENSG00000135903; TAA
HSIDGILSER

SEQ ID NO: 59343 - protein, 10 aa, Homo sapiens
  Table A; Target 59343; HLA-A*26:01; PAX3; ENSG00000135903; TAA
HSIDGILSER

SEQ ID NO: 59344 - protein, 10 aa, Homo sapiens
  Table A; Target 59344; HLA-A*31:01; PAX3; ENSG00000135903; TAA
HSIDGILSER

SEQ ID NO: 59345 - protein, 10 aa, Homo sapiens
  Table A; Target 59345; HLA-A*33:01; PAX3; ENSG00000135903; TAA
HSIDGILSER

SEQ ID NO: 59346 - protein, 10 aa, Homo sapiens
  Table A; Target 59346; HLA-A*33:03; PAX3; ENSG00000135903; TAA
HSIDGILSER

SEQ ID NO: 59347 - protein, 10 aa, Homo sapiens
  Table A; Target 59347; HLA-A*68:01; PAX3; ENSG00000135903; TAA
HSIDGILSER

SEQ ID NO: 59348 - protein, 10 aa, Homo sapiens
  Table A; Target 59348; HLA-A*68:02; PAX3; ENSG00000135903; TAA
HSIDGILSER

SEQ ID NO: 59349 - protein, 10 aa, Homo sapiens
  Table A; Target 59349; HLA-B*27:02; PAX3; ENSG00000135903; TAA
HSIDGILSER

SEQ ID NO: 59350 - protein, 10 aa, Homo sapiens
  Table A; Target 59350; HLA-B*46:01; PAX3; ENSG00000135903; TAA
HSIDGILSER

SEQ ID NO: 59351 - protein, 10 aa, Homo sapiens
  Table A; Target 59351; HLA-B*54:01; PAX3; ENSG00000135903; TAA
HSIDGILSER

SEQ ID NO: 59352 - protein, 10 aa, Homo sapiens
  Table A; Target 59352; HLA-B*57:01; PAX3; ENSG00000135903; TAA
HSIDGILSER

SEQ ID NO: 59353 - protein, 10 aa, Homo sapiens
  Table A; Target 59353; HLA-C*07:06; PAX3; ENSG00000135903; TAA
HSIDGILSER

SEQ ID NO: 59354 - protein, 11 aa, Homo sapiens
  Table A; Target 59354; HLA-A*68:02; PAX3; ENSG00000135903; TAA
HSIDGILSERA

SEQ ID NO: 59355 - protein, 8 aa, Homo sapiens
  Table A; Target 59355; HLA-B*27:02; PAX3; ENSG00000135903; TAA
IDGILSER

SEQ ID NO: 59356 - protein, 10 aa, Homo sapiens
  Table A; Target 59356; HLA-C*07:01; PAX3; ENSG00000135903; TAA
IDGILSERAS

SEQ ID NO: 59357 - protein, 9 aa, Homo sapiens
  Table A; Target 59357; HLA-B*35:03; PAX3; ENSG00000135903; TAA
IDSEPDLPL

SEQ ID NO: 59358 - protein, 9 aa, Homo sapiens
  Table A; Target 59358; HLA-B*37:01; PAX3; ENSG00000135903; TAA
IDSEPDLPL

SEQ ID NO: 59359 - protein, 10 aa, Homo sapiens
  Table A; Target 59359; HLA-A*11:01; PAX3; ENSG00000135903; TAA
IDSEPDLPLK

SEQ ID NO: 59360 - protein, 10 aa, Homo sapiens
  Table A; Target 59360; HLA-B*27:02; PAX3; ENSG00000135903; TAA
IDSEPDLPLK

SEQ ID NO: 59361 - protein, 11 aa, Homo sapiens
  Table A; Target 59361; HLA-A*68:01; PAX3; ENSG00000135903; TAA
IDSEPDLPLKR

SEQ ID NO: 59362 - protein, 11 aa, Homo sapiens
  Table A; Target 59362; HLA-C*07:06; PAX3; ENSG00000135903; TAA
IDSEPDLPLKR

SEQ ID NO: 59363 - protein, 9 aa, Homo sapiens
  Table A; Target 59363; HLA-C*16:02; PAX3; ENSG00000135903; TAA
IGGSKPKQV

SEQ ID NO: 59364 - protein, 9 aa, Homo sapiens
  Table A; Target 59364; HLA-B*13:02; PAX3; ENSG00000135903; TAA
IGNGLSPQV

SEQ ID NO: 59365 - protein, 9 aa, Homo sapiens
  Table A; Target 59365; HLA-C*06:02; PAX3; ENSG00000135903; TAA
IGNGLSPQV

SEQ ID NO: 59366 - protein, 9 aa, Homo sapiens
  Table A; Target 59366; HLA-C*16:02; PAX3; ENSG00000135903; TAA
IGNGLSPQV

SEQ ID NO: 59367 - protein, 9 aa, Homo sapiens
  Table A; Target 59367; HLA-C*16:01; PAX3; ENSG00000135903; TAA
ILSERASAP

SEQ ID NO: 59368 - protein, 9 aa, Homo sapiens
  Table A; Target 59368; HLA-C*16:02; PAX3; ENSG00000135903; TAA
ILSERASAP

SEQ ID NO: 59369 - protein, 10 aa, Homo sapiens
  Table A; Target 59369; HLA-C*04:01; PAX3; ENSG00000135903; TAA
ILSERASAPQ

SEQ ID NO: 59370 - protein, 9 aa, Homo sapiens
  Table A; Target 59370; HLA-B*07:02; PAX3; ENSG00000135903; TAA
IPGGFPPTA

SEQ ID NO: 59371 - protein, 9 aa, Homo sapiens
  Table A; Target 59371; HLA-B*35:03; PAX3; ENSG00000135903; TAA
IPGGFPPTA

SEQ ID NO: 59372 - protein, 9 aa, Homo sapiens
  Table A; Target 59372; HLA-B*51:01; PAX3; ENSG00000135903; TAA
IPGGFPPTA

SEQ ID NO: 59373 - protein, 9 aa, Homo sapiens
  Table A; Target 59373; HLA-B*54:01; PAX3; ENSG00000135903; TAA
IPGGFPPTA

SEQ ID NO: 59374 - protein, 9 aa, Homo sapiens
  Table A; Target 59374; HLA-B*55:01; PAX3; ENSG00000135903; TAA
IPGGFPPTA

SEQ ID NO: 59375 - protein, 9 aa, Homo sapiens
  Table A; Target 59375; HLA-B*56:01; PAX3; ENSG00000135903; TAA
IPGGFPPTA

SEQ ID NO: 59376 - protein, 10 aa, Homo sapiens
  Table A; Target 59376; HLA-B*07:02; PAX3; ENSG00000135903; TAA
IPGGFPPTAM

SEQ ID NO: 59377 - protein, 10 aa, Homo sapiens
  Table A; Target 59377; HLA-B*35:01; PAX3; ENSG00000135903; TAA
IPGGFPPTAM

SEQ ID NO: 59378 - protein, 10 aa, Homo sapiens
  Table A; Target 59378; HLA-B*35:03; PAX3; ENSG00000135903; TAA
IPGGFPPTAM

SEQ ID NO: 59379 - protein, 10 aa, Homo sapiens
  Table A; Target 59379; HLA-B*56:01; PAX3; ENSG00000135903; TAA
IPGGFPPTAM

SEQ ID NO: 59380 - protein, 10 aa, Homo sapiens
  Table A; Target 59380; HLA-C*07:02; PAX3; ENSG00000135903; TAA
IPGGFPPTAM

SEQ ID NO: 59381 - protein, 10 aa, Homo sapiens
  Table A; Target 59381; HLA-B*56:01; PAX3; ENSG00000135903; TAA
IPSNPDSSSA

SEQ ID NO: 59382 - protein, 11 aa, Homo sapiens
  Table A; Target 59382; HLA-A*01:01; PAX3; ENSG00000135903; TAA
IPSNPDSSSAY

SEQ ID NO: 59383 - protein, 11 aa, Homo sapiens
  Table A; Target 59383; HLA-A*26:01; PAX3; ENSG00000135903; TAA
IPSNPDSSSAY

SEQ ID NO: 59384 - protein, 11 aa, Homo sapiens
  Table A; Target 59384; HLA-A*30:02; PAX3; ENSG00000135903; TAA
IPSNPDSSSAY

SEQ ID NO: 59385 - protein, 11 aa, Homo sapiens
  Table A; Target 59385; HLA-B*15:01; PAX3; ENSG00000135903; TAA
IPSNPDSSSAY

SEQ ID NO: 59386 - protein, 11 aa, Homo sapiens
  Table A; Target 59386; HLA-B*15:03; PAX3; ENSG00000135903; TAA
IPSNPDSSSAY

SEQ ID NO: 59387 - protein, 11 aa, Homo sapiens
  Table A; Target 59387; HLA-B*35:01; PAX3; ENSG00000135903; TAA
IPSNPDSSSAY

SEQ ID NO: 59388 - protein, 11 aa, Homo sapiens
  Table A; Target 59388; HLA-B*39:01; PAX3; ENSG00000135903; TAA
IPSNPDSSSAY

SEQ ID NO: 59389 - protein, 11 aa, Homo sapiens
  Table A; Target 59389; HLA-B*46:01; PAX3; ENSG00000135903; TAA
IPSNPDSSSAY

SEQ ID NO: 59390 - protein, 11 aa, Homo sapiens
  Table A; Target 59390; HLA-B*55:01; PAX3; ENSG00000135903; TAA
IPSNPDSSSAY

SEQ ID NO: 59391 - protein, 11 aa, Homo sapiens
  Table A; Target 59391; HLA-C*02:02; PAX3; ENSG00000135903; TAA
IPSNPDSSSAY

SEQ ID NO: 59392 - protein, 11 aa, Homo sapiens
  Table A; Target 59392; HLA-C*03:03; PAX3; ENSG00000135903; TAA
IPSNPDSSSAY

SEQ ID NO: 59393 - protein, 11 aa, Homo sapiens
  Table A; Target 59393; HLA-C*04:01; PAX3; ENSG00000135903; TAA
IPSNPDSSSAY

SEQ ID NO: 59394 - protein, 11 aa, Homo sapiens
  Table A; Target 59394; HLA-C*05:01; PAX3; ENSG00000135903; TAA
IPSNPDSSSAY

SEQ ID NO: 59395 - protein, 11 aa, Homo sapiens
  Table A; Target 59395; HLA-C*07:04; PAX3; ENSG00000135903; TAA
IPSNPDSSSAY

SEQ ID NO: 59396 - protein, 11 aa, Homo sapiens
  Table A; Target 59396; HLA-C*07:06; PAX3; ENSG00000135903; TAA
IPSNPDSSSAY

SEQ ID NO: 59397 - protein, 11 aa, Homo sapiens
  Table A; Target 59397; HLA-C*14:02; PAX3; ENSG00000135903; TAA
IPSNPDSSSAY

SEQ ID NO: 59398 - protein, 9 aa, Homo sapiens
  Table A; Target 59398; HLA-A*32:01; PAX3; ENSG00000135903; TAA
KQAGANQLM

SEQ ID NO: 59399 - protein, 9 aa, Homo sapiens
  Table A; Target 59399; HLA-B*13:02; PAX3; ENSG00000135903; TAA
KQAGANQLM

SEQ ID NO: 59400 - protein, 9 aa, Homo sapiens
  Table A; Target 59400; HLA-B*15:01; PAX3; ENSG00000135903; TAA
KQAGANQLM

SEQ ID NO: 59401 - protein, 9 aa, Homo sapiens
  Table A; Target 59401; HLA-B*15:03; PAX3; ENSG00000135903; TAA
KQAGANQLM

SEQ ID NO: 59402 - protein, 9 aa, Homo sapiens
  Table A; Target 59402; HLA-B*27:05; PAX3; ENSG00000135903; TAA
KQAGANQLM

SEQ ID NO: 59403 - protein, 9 aa, Homo sapiens
  Table A; Target 59403; HLA-B*38:01; PAX3; ENSG00000135903; TAA
KQAGANQLM

SEQ ID NO: 59404 - protein, 9 aa, Homo sapiens
  Table A; Target 59404; HLA-B*58:01; PAX3; ENSG00000135903; TAA
KQAGANQLM

SEQ ID NO: 59405 - protein, 9 aa, Homo sapiens
  Table A; Target 59405; HLA-C*06:02; PAX3; ENSG00000135903; TAA
KQAGANQLM

SEQ ID NO: 59406 - protein, 9 aa, Homo sapiens
  Table A; Target 59406; HLA-C*07:04; PAX3; ENSG00000135903; TAA
KQAGANQLM

SEQ ID NO: 59407 - protein, 9 aa, Homo sapiens
  Table A; Target 59407; HLA-C*12:03; PAX3; ENSG00000135903; TAA
KQAGANQLM

SEQ ID NO: 59408 - protein, 10 aa, Homo sapiens
  Table A; Target 59408; HLA-C*06:02; PAX3; ENSG00000135903; TAA
KQAGANQLMA

SEQ ID NO: 59409 - protein, 11 aa, Homo sapiens
  Table A; Target 59409; HLA-A*24:02; PAX3; ENSG00000135903; TAA
KQAGANQLMAF

SEQ ID NO: 59410 - protein, 11 aa, Homo sapiens
  Table A; Target 59410; HLA-A*26:01; PAX3; ENSG00000135903; TAA
KQAGANQLMAF

SEQ ID NO: 59411 - protein, 11 aa, Homo sapiens
  Table A; Target 59411; HLA-A*30:02; PAX3; ENSG00000135903; TAA
KQAGANQLMAF

SEQ ID NO: 59412 - protein, 11 aa, Homo sapiens
  Table A; Target 59412; HLA-A*32:01; PAX3; ENSG00000135903; TAA
KQAGANQLMAF

SEQ ID NO: 59413 - protein, 11 aa, Homo sapiens
  Table A; Target 59413; HLA-B*15:01; PAX3; ENSG00000135903; TAA
KQAGANQLMAF

SEQ ID NO: 59414 - protein, 11 aa, Homo sapiens
  Table A; Target 59414; HLA-B*15:03; PAX3; ENSG00000135903; TAA
KQAGANQLMAF

SEQ ID NO: 59415 - protein, 11 aa, Homo sapiens
  Table A; Target 59415; HLA-B*46:01; PAX3; ENSG00000135903; TAA
KQAGANQLMAF

SEQ ID NO: 59416 - protein, 11 aa, Homo sapiens
  Table A; Target 59416; HLA-C*02:02; PAX3; ENSG00000135903; TAA
KQAGANQLMAF

SEQ ID NO: 59417 - protein, 11 aa, Homo sapiens
  Table A; Target 59417; HLA-C*16:04; PAX3; ENSG00000135903; TAA
KQAGANQLMAF

SEQ ID NO: 59418 - protein, 8 aa, Homo sapiens
  Table A; Target 59418; HLA-B*13:02; PAX3; ENSG00000135903; TAA
KQVTTPDV

SEQ ID NO: 59419 - protein, 10 aa, Homo sapiens
  Table A; Target 59419; HLA-A*03:02; PAX3; ENSG00000135903; TAA
KQVTTPDVEK

SEQ ID NO: 59420 - protein, 10 aa, Homo sapiens
  Table A; Target 59420; HLA-A*11:01; PAX3; ENSG00000135903; TAA
KQVTTPDVEK

SEQ ID NO: 59421 - protein, 10 aa, Homo sapiens
  Table A; Target 59421; HLA-A*30:02; PAX3; ENSG00000135903; TAA
KSLDSLPTSQ

SEQ ID NO: 59422 - protein, 10 aa, Homo sapiens
  Table A; Target 59422; HLA-A*32:01; PAX3; ENSG00000135903; TAA
KSLDSLPTSQ

SEQ ID NO: 59423 - protein, 10 aa, Homo sapiens
  Table A; Target 59423; HLA-B*58:01; PAX3; ENSG00000135903; TAA
KSLDSLPTSQ

SEQ ID NO: 59424 - protein, 10 aa, Homo sapiens
  Table A; Target 59424; HLA-C*06:02; PAX3; ENSG00000135903; TAA
KSLDSLPTSQ

SEQ ID NO: 59425 - protein, 10 aa, Homo sapiens
  Table A; Target 59425; HLA-C*07:02; PAX3; ENSG00000135903; TAA
KSLDSLPTSQ

SEQ ID NO: 59426 - protein, 10 aa, Homo sapiens
  Table A; Target 59426; HLA-C*12:03; PAX3; ENSG00000135903; TAA
KSLDSLPTSQ

SEQ ID NO: 59427 - protein, 8 aa, Homo sapiens
  Table A; Target 59427; HLA-B*51:01; PAX3; ENSG00000135903; TAA
LAGAVPRM

SEQ ID NO: 59428 - protein, 8 aa, Homo sapiens
  Table A; Target 59428; HLA-B*58:01; PAX3; ENSG00000135903; TAA
LAGAVPRM

SEQ ID NO: 59429 - protein, 8 aa, Homo sapiens
  Table A; Target 59429; HLA-C*12:03; PAX3; ENSG00000135903; TAA
LAGAVPRM

SEQ ID NO: 59430 - protein, 8 aa, Homo sapiens
  Table A; Target 59430; HLA-C*16:01; PAX3; ENSG00000135903; TAA
LAGAVPRM

SEQ ID NO: 59431 - protein, 9 aa, Homo sapiens
  Table A; Target 59431; HLA-C*02:02; PAX3; ENSG00000135903; TAA
LAGAVPRMM

SEQ ID NO: 59432 - protein, 9 aa, Homo sapiens
  Table A; Target 59432; HLA-C*12:03; PAX3; ENSG00000135903; TAA
LAGAVPRMM

SEQ ID NO: 59433 - protein, 9 aa, Homo sapiens
  Table A; Target 59433; HLA-C*16:01; PAX3; ENSG00000135903; TAA
LAGAVPRMM

SEQ ID NO: 59434 - protein, 10 aa, Homo sapiens
  Table A; Target 59434; HLA-A*30:02; PAX3; ENSG00000135903; TAA
LDSLPTSQSY

SEQ ID NO: 59435 - protein, 10 aa, Homo sapiens
  Table A; Target 59435; HLA-B*15:03; PAX3; ENSG00000135903; TAA
LDSLPTSQSY

SEQ ID NO: 59436 - protein, 10 aa, Homo sapiens
  Table A; Target 59436; HLA-B*18:01; PAX3; ENSG00000135903; TAA
LDSLPTSQSY

SEQ ID NO: 59437 - protein, 10 aa, Homo sapiens
  Table A; Target 59437; HLA-B*27:02; PAX3; ENSG00000135903; TAA
LDSLPTSQSY

SEQ ID NO: 59438 - protein, 10 aa, Homo sapiens
  Table A; Target 59438; HLA-B*44:02; PAX3; ENSG00000135903; TAA
LDSLPTSQSY

SEQ ID NO: 59439 - protein, 10 aa, Homo sapiens
  Table A; Target 59439; HLA-B*44:03; PAX3; ENSG00000135903; TAA
LDSLPTSQSY

SEQ ID NO: 59440 - protein, 10 aa, Homo sapiens
  Table A; Target 59440; HLA-C*04:01; PAX3; ENSG00000135903; TAA
LDSLPTSQSY

SEQ ID NO: 59441 - protein, 10 aa, Homo sapiens
  Table A; Target 59441; HLA-C*07:01; PAX3; ENSG00000135903; TAA
LDSLPTSQSY

SEQ ID NO: 59442 - protein, 10 aa, Homo sapiens
  Table A; Target 59442; HLA-C*07:02; PAX3; ENSG00000135903; TAA
LDSLPTSQSY

SEQ ID NO: 59443 - protein, 10 aa, Homo sapiens
  Table A; Target 59443; HLA-C*16:02; PAX3; ENSG00000135903; TAA
LDSLPTSQSY

SEQ ID NO: 59444 - protein, 10 aa, Homo sapiens
  Table A; Target 59444; HLA-C*16:04; PAX3; ENSG00000135903; TAA
LDSLPTSQSY

SEQ ID NO: 59445 - protein, 8 aa, Homo sapiens
  Table A; Target 59445; HLA-B*18:01; PAX3; ENSG00000135903; TAA
LEELERAF

SEQ ID NO: 59446 - protein, 9 aa, Homo sapiens
  Table A; Target 59446; HLA-A*30:01; PAX3; ENSG00000135903; TAA
LEPTTTVSA

SEQ ID NO: 59447 - protein, 9 aa, Homo sapiens
  Table A; Target 59447; HLA-B*40:01; PAX3; ENSG00000135903; TAA
LEPTTTVSA

SEQ ID NO: 59448 - protein, 9 aa, Homo sapiens
  Table A; Target 59448; HLA-B*40:02; PAX3; ENSG00000135903; TAA
LEPTTTVSA

SEQ ID NO: 59449 - protein, 9 aa, Homo sapiens
  Table A; Target 59449; HLA-B*49:01; PAX3; ENSG00000135903; TAA
LEPTTTVSA

SEQ ID NO: 59450 - protein, 9 aa, Homo sapiens
  Table A; Target 59450; HLA-B*56:01; PAX3; ENSG00000135903; TAA
LEPTTTVSA

SEQ ID NO: 59451 - protein, 9 aa, Homo sapiens
  Table A; Target 59451; HLA-C*01:02; PAX3; ENSG00000135903; TAA
LEPTTTVSA

SEQ ID NO: 59452 - protein, 9 aa, Homo sapiens
  Table A; Target 59452; HLA-C*14:02; PAX3; ENSG00000135903; TAA
LEPTTTVSA

SEQ ID NO: 59453 - protein, 10 aa, Homo sapiens
  Table A; Target 59453; HLA-A*02:01; PAX3; ENSG00000135903; TAA
LIPGGFPPTA

SEQ ID NO: 59454 - protein, 10 aa, Homo sapiens
  Table A; Target 59454; HLA-A*02:07; PAX3; ENSG00000135903; TAA
LIPGGFPPTA

SEQ ID NO: 59455 - protein, 11 aa, Homo sapiens
  Table A; Target 59455; HLA-B*51:01; PAX3; ENSG00000135903; TAA
LPPSTVHQSTI

SEQ ID NO: 59456 - protein, 8 aa, Homo sapiens
  Table A; Target 59456; HLA-B*08:01; PAX3; ENSG00000135903; TAA
LPSTRHGF

SEQ ID NO: 59457 - protein, 8 aa, Homo sapiens
  Table A; Target 59457; HLA-C*16:01; PAX3; ENSG00000135903; TAA
LPSTRHGF

SEQ ID NO: 59458 - protein, 9 aa, Homo sapiens
  Table A; Target 59458; HLA-B*07:02; PAX3; ENSG00000135903; TAA
LPTSQSYCP

SEQ ID NO: 59459 - protein, 9 aa, Homo sapiens
  Table A; Target 59459; HLA-B*54:01; PAX3; ENSG00000135903; TAA
LPTSQSYCP

SEQ ID NO: 59460 - protein, 9 aa, Homo sapiens
  Table A; Target 59460; HLA-B*56:01; PAX3; ENSG00000135903; TAA
LPTSQSYCP

SEQ ID NO: 59461 - protein, 9 aa, Homo sapiens
  Table A; Target 59461; HLA-B*54:01; PAX3; ENSG00000135903; TAA
LPTYQLSET

SEQ ID NO: 59462 - protein, 11 aa, Homo sapiens
  Table A; Target 59462; HLA-B*35:01; PAX3; ENSG00000135903; TAA
LPTYQLSETSY

SEQ ID NO: 59463 - protein, 11 aa, Homo sapiens
  Table A; Target 59463; HLA-B*55:01; PAX3; ENSG00000135903; TAA
LPTYQLSETSY

SEQ ID NO: 59464 - protein, 8 aa, Homo sapiens
  Table A; Target 59464; HLA-C*01:02; PAX3; ENSG00000135903; TAA
LSPLTGGL

SEQ ID NO: 59465 - protein, 9 aa, Homo sapiens
  Table A; Target 59465; HLA-B*54:01; PAX3; ENSG00000135903; TAA
MAFNHLIPG

SEQ ID NO: 59466 - protein, 8 aa, Homo sapiens
  Table A; Target 59466; HLA-C*06:02; PAX3; ENSG00000135903; TAA
MDPVTGYQ

SEQ ID NO: 59467 - protein, 9 aa, Homo sapiens
  Table A; Target 59467; HLA-A*29:02; PAX3; ENSG00000135903; TAA
MDPVTGYQY

SEQ ID NO: 59468 - protein, 9 aa, Homo sapiens
  Table A; Target 59468; HLA-B*15:03; PAX3; ENSG00000135903; TAA
MDPVTGYQY

SEQ ID NO: 59469 - protein, 9 aa, Homo sapiens
  Table A; Target 59469; HLA-B*18:01; PAX3; ENSG00000135903; TAA
MDPVTGYQY

SEQ ID NO: 59470 - protein, 9 aa, Homo sapiens
  Table A; Target 59470; HLA-B*35:01; PAX3; ENSG00000135903; TAA
MDPVTGYQY

SEQ ID NO: 59471 - protein, 9 aa, Homo sapiens
  Table A; Target 59471; HLA-C*01:02; PAX3; ENSG00000135903; TAA
MDPVTGYQY

SEQ ID NO: 59472 - protein, 9 aa, Homo sapiens
  Table A; Target 59472; HLA-C*04:01; PAX3; ENSG00000135903; TAA
MDPVTGYQY

SEQ ID NO: 59473 - protein, 9 aa, Homo sapiens
  Table A; Target 59473; HLA-C*07:01; PAX3; ENSG00000135903; TAA
MDPVTGYQY

SEQ ID NO: 59474 - protein, 9 aa, Homo sapiens
  Table A; Target 59474; HLA-C*07:04; PAX3; ENSG00000135903; TAA
MDPVTGYQY

SEQ ID NO: 59475 - protein, 9 aa, Homo sapiens
  Table A; Target 59475; HLA-C*14:02; PAX3; ENSG00000135903; TAA
MDPVTGYQY

SEQ ID NO: 59476 - protein, 10 aa, Homo sapiens
  Table A; Target 59476; HLA-C*04:01; PAX3; ENSG00000135903; TAA
MDPVTGYQYG

SEQ ID NO: 59477 - protein, 10 aa, Homo sapiens
  Table A; Target 59477; HLA-A*29:02; PAX3; ENSG00000135903; TAA
MMRPGPGQNY

SEQ ID NO: 59478 - protein, 10 aa, Homo sapiens
  Table A; Target 59478; HLA-A*30:02; PAX3; ENSG00000135903; TAA
MMRPGPGQNY

SEQ ID NO: 59479 - protein, 10 aa, Homo sapiens
  Table A; Target 59479; HLA-A*32:01; PAX3; ENSG00000135903; TAA
MMRPGPGQNY

SEQ ID NO: 59480 - protein, 10 aa, Homo sapiens
  Table A; Target 59480; HLA-B*15:01; PAX3; ENSG00000135903; TAA
MMRPGPGQNY

SEQ ID NO: 59481 - protein, 10 aa, Homo sapiens
  Table A; Target 59481; HLA-B*15:03; PAX3; ENSG00000135903; TAA
MMRPGPGQNY

SEQ ID NO: 59482 - protein, 10 aa, Homo sapiens
  Table A; Target 59482; HLA-B*46:01; PAX3; ENSG00000135903; TAA
MMRPGPGQNY

SEQ ID NO: 59483 - protein, 10 aa, Homo sapiens
  Table A; Target 59483; HLA-B*58:01; PAX3; ENSG00000135903; TAA
MMRPGPGQNY

SEQ ID NO: 59484 - protein, 10 aa, Homo sapiens
  Table A; Target 59484; HLA-C*07:04; PAX3; ENSG00000135903; TAA
MMRPGPGQNY

SEQ ID NO: 59485 - protein, 10 aa, Homo sapiens
  Table A; Target 59485; HLA-C*14:02; PAX3; ENSG00000135903; TAA
MMRPGPGQNY

SEQ ID NO: 59486 - protein, 9 aa, Homo sapiens
  Table A; Target 59486; HLA-C*01:02; PAX3; ENSG00000135903; TAA
MNPTIGNGL

SEQ ID NO: 59487 - protein, 9 aa, Homo sapiens
  Table A; Target 59487; HLA-A*23:01; PAX3; ENSG00000135903; TAA
MPTLPTYQL

SEQ ID NO: 59488 - protein, 9 aa, Homo sapiens
  Table A; Target 59488; HLA-B*07:02; PAX3; ENSG00000135903; TAA
MPTLPTYQL

SEQ ID NO: 59489 - protein, 9 aa, Homo sapiens
  Table A; Target 59489; HLA-B*08:01; PAX3; ENSG00000135903; TAA
MPTLPTYQL

SEQ ID NO: 59490 - protein, 9 aa, Homo sapiens
  Table A; Target 59490; HLA-B*35:01; PAX3; ENSG00000135903; TAA
MPTLPTYQL

SEQ ID NO: 59491 - protein, 9 aa, Homo sapiens
  Table A; Target 59491; HLA-B*35:03; PAX3; ENSG00000135903; TAA
MPTLPTYQL

SEQ ID NO: 59492 - protein, 9 aa, Homo sapiens
  Table A; Target 59492; HLA-B*51:01; PAX3; ENSG00000135903; TAA
MPTLPTYQL

SEQ ID NO: 59493 - protein, 9 aa, Homo sapiens
  Table A; Target 59493; HLA-B*54:01; PAX3; ENSG00000135903; TAA
MPTLPTYQL

SEQ ID NO: 59494 - protein, 9 aa, Homo sapiens
  Table A; Target 59494; HLA-B*55:01; PAX3; ENSG00000135903; TAA
MPTLPTYQL

SEQ ID NO: 59495 - protein, 9 aa, Homo sapiens
  Table A; Target 59495; HLA-B*56:01; PAX3; ENSG00000135903; TAA
MPTLPTYQL

SEQ ID NO: 59496 - protein, 9 aa, Homo sapiens
  Table A; Target 59496; HLA-C*03:04; PAX3; ENSG00000135903; TAA
MPTLPTYQL

SEQ ID NO: 59497 - protein, 9 aa, Homo sapiens
  Table A; Target 59497; HLA-C*04:01; PAX3; ENSG00000135903; TAA
MPTLPTYQL

SEQ ID NO: 59498 - protein, 9 aa, Homo sapiens
  Table A; Target 59498; HLA-C*07:02; PAX3; ENSG00000135903; TAA
MPTLPTYQL

SEQ ID NO: 59499 - protein, 9 aa, Homo sapiens
  Table A; Target 59499; HLA-B*07:02; PAX3; ENSG00000135903; TAA
MRPGPGQNY

SEQ ID NO: 59500 - protein, 9 aa, Homo sapiens
  Table A; Target 59500; HLA-B*15:03; PAX3; ENSG00000135903; TAA
MRPGPGQNY

SEQ ID NO: 59501 - protein, 9 aa, Homo sapiens
  Table A; Target 59501; HLA-B*27:05; PAX3; ENSG00000135903; TAA
MRPGPGQNY

SEQ ID NO: 59502 - protein, 9 aa, Homo sapiens
  Table A; Target 59502; HLA-B*39:01; PAX3; ENSG00000135903; TAA
MRPGPGQNY

SEQ ID NO: 59503 - protein, 9 aa, Homo sapiens
  Table A; Target 59503; HLA-C*01:02; PAX3; ENSG00000135903; TAA
MRPGPGQNY

SEQ ID NO: 59504 - protein, 9 aa, Homo sapiens
  Table A; Target 59504; HLA-C*06:02; PAX3; ENSG00000135903; TAA
MRPGPGQNY

SEQ ID NO: 59505 - protein, 9 aa, Homo sapiens
  Table A; Target 59505; HLA-C*07:01; PAX3; ENSG00000135903; TAA
MRPGPGQNY

SEQ ID NO: 59506 - protein, 9 aa, Homo sapiens
  Table A; Target 59506; HLA-C*07:04; PAX3; ENSG00000135903; TAA
MRPGPGQNY

SEQ ID NO: 59507 - protein, 9 aa, Homo sapiens
  Table A; Target 59507; HLA-C*16:01; PAX3; ENSG00000135903; TAA
MRPGPGQNY

SEQ ID NO: 59508 - protein, 9 aa, Homo sapiens
  Table A; Target 59508; HLA-C*16:04; PAX3; ENSG00000135903; TAA
MRPGPGQNY

SEQ ID NO: 59509 - protein, 10 aa, Homo sapiens
  Table A; Target 59509; HLA-C*06:02; PAX3; ENSG00000135903; TAA
MRPGPGQNYP

SEQ ID NO: 59510 - protein, 10 aa, Homo sapiens
  Table A; Target 59510; HLA-A*33:03; PAX3; ENSG00000135903; TAA
MTTLAGAVPR

SEQ ID NO: 59511 - protein, 10 aa, Homo sapiens
  Table A; Target 59511; HLA-A*68:01; PAX3; ENSG00000135903; TAA
MTTLAGAVPR

SEQ ID NO: 59512 - protein, 10 aa, Homo sapiens
  Table A; Target 59512; HLA-B*27:02; PAX3; ENSG00000135903; TAA
MTTLAGAVPR

SEQ ID NO: 59513 - protein, 10 aa, Homo sapiens
  Table A; Target 59513; HLA-C*07:06; PAX3; ENSG00000135903; TAA
MTTLAGAVPR

SEQ ID NO: 59514 - protein, 8 aa, Homo sapiens
  Table A; Target 59514; HLA-B*35:01; PAX3; ENSG00000135903; TAA
NPDSSSAY

SEQ ID NO: 59515 - protein, 8 aa, Homo sapiens
  Table A; Target 59515; HLA-B*55:01; PAX3; ENSG00000135903; TAA
NPDSSSAY

SEQ ID NO: 59516 - protein, 8 aa, Homo sapiens
  Table A; Target 59516; HLA-C*03:03; PAX3; ENSG00000135903; TAA
NPDSSSAY

SEQ ID NO: 59517 - protein, 8 aa, Homo sapiens
  Table A; Target 59517; HLA-C*05:01; PAX3; ENSG00000135903; TAA
NPDSSSAY

SEQ ID NO: 59518 - protein, 9 aa, Homo sapiens
  Table A; Target 59518; HLA-B*35:03; PAX3; ENSG00000135903; TAA
NPDSSSAYC

SEQ ID NO: 59519 - protein, 10 aa, Homo sapiens
  Table A; Target 59519; HLA-B*07:02; PAX3; ENSG00000135903; TAA
NPDSSSAYCL

SEQ ID NO: 59520 - protein, 10 aa, Homo sapiens
  Table A; Target 59520; HLA-B*35:01; PAX3; ENSG00000135903; TAA
NPDSSSAYCL

SEQ ID NO: 59521 - protein, 10 aa, Homo sapiens
  Table A; Target 59521; HLA-B*35:03; PAX3; ENSG00000135903; TAA
NPDSSSAYCL

SEQ ID NO: 59522 - protein, 10 aa, Homo sapiens
  Table A; Target 59522; HLA-B*55:01; PAX3; ENSG00000135903; TAA
NPDSSSAYCL

SEQ ID NO: 59523 - protein, 11 aa, Homo sapiens
  Table A; Target 59523; HLA-B*07:02; PAX3; ENSG00000135903; TAA
NPMNPTIGNGL

SEQ ID NO: 59524 - protein, 11 aa, Homo sapiens
  Table A; Target 59524; HLA-B*35:01; PAX3; ENSG00000135903; TAA
NPMNPTIGNGL

SEQ ID NO: 59525 - protein, 11 aa, Homo sapiens
  Table A; Target 59525; HLA-B*35:03; PAX3; ENSG00000135903; TAA
NPMNPTIGNGL

SEQ ID NO: 59526 - protein, 11 aa, Homo sapiens
  Table A; Target 59526; HLA-B*38:01; PAX3; ENSG00000135903; TAA
NPMNPTIGNGL

SEQ ID NO: 59527 - protein, 11 aa, Homo sapiens
  Table A; Target 59527; HLA-C*07:02; PAX3; ENSG00000135903; TAA
NPMNPTIGNGL

SEQ ID NO: 59528 - protein, 8 aa, Homo sapiens
  Table A; Target 59528; HLA-B*07:02; PAX3; ENSG00000135903; TAA
NPTIGNGL

SEQ ID NO: 59529 - protein, 8 aa, Homo sapiens
  Table A; Target 59529; HLA-B*08:01; PAX3; ENSG00000135903; TAA
NPTIGNGL

SEQ ID NO: 59530 - protein, 8 aa, Homo sapiens
  Table A; Target 59530; HLA-B*35:03; PAX3; ENSG00000135903; TAA
NPTIGNGL

SEQ ID NO: 59531 - protein, 8 aa, Homo sapiens
  Table A; Target 59531; HLA-C*07:02; PAX3; ENSG00000135903; TAA
NPTIGNGL

SEQ ID NO: 59532 - protein, 9 aa, Homo sapiens
  Table A; Target 59532; HLA-A*02:03; PAX3; ENSG00000135903; TAA
NTVPSVSSI

SEQ ID NO: 59533 - protein, 9 aa, Homo sapiens
  Table A; Target 59533; HLA-A*23:01; PAX3; ENSG00000135903; TAA
NTVPSVSSI

SEQ ID NO: 59534 - protein, 9 aa, Homo sapiens
  Table A; Target 59534; HLA-A*24:02; PAX3; ENSG00000135903; TAA
NTVPSVSSI

SEQ ID NO: 59535 - protein, 9 aa, Homo sapiens
  Table A; Target 59535; HLA-A*25:01; PAX3; ENSG00000135903; TAA
NTVPSVSSI

SEQ ID NO: 59536 - protein, 9 aa, Homo sapiens
  Table A; Target 59536; HLA-A*26:01; PAX3; ENSG00000135903; TAA
NTVPSVSSI

SEQ ID NO: 59537 - protein, 9 aa, Homo sapiens
  Table A; Target 59537; HLA-A*32:01; PAX3; ENSG00000135903; TAA
NTVPSVSSI

SEQ ID NO: 59538 - protein, 9 aa, Homo sapiens
  Table A; Target 59538; HLA-A*68:02; PAX3; ENSG00000135903; TAA
NTVPSVSSI

SEQ ID NO: 59539 - protein, 9 aa, Homo sapiens
  Table A; Target 59539; HLA-B*46:01; PAX3; ENSG00000135903; TAA
NTVPSVSSI

SEQ ID NO: 59540 - protein, 9 aa, Homo sapiens
  Table A; Target 59540; HLA-B*51:01; PAX3; ENSG00000135903; TAA
NTVPSVSSI

SEQ ID NO: 59541 - protein, 9 aa, Homo sapiens
  Table A; Target 59541; HLA-B*58:01; PAX3; ENSG00000135903; TAA
NTVPSVSSI

SEQ ID NO: 59542 - protein, 9 aa, Homo sapiens
  Table A; Target 59542; HLA-C*01:02; PAX3; ENSG00000135903; TAA
NTVPSVSSI

SEQ ID NO: 59543 - protein, 9 aa, Homo sapiens
  Table A; Target 59543; HLA-C*03:03; PAX3; ENSG00000135903; TAA
NTVPSVSSI

SEQ ID NO: 59544 - protein, 9 aa, Homo sapiens
  Table A; Target 59544; HLA-C*03:04; PAX3; ENSG00000135903; TAA
NTVPSVSSI

SEQ ID NO: 59545 - protein, 9 aa, Homo sapiens
  Table A; Target 59545; HLA-C*12:03; PAX3; ENSG00000135903; TAA
NTVPSVSSI

SEQ ID NO: 59546 - protein, 9 aa, Homo sapiens
  Table A; Target 59546; HLA-C*14:02; PAX3; ENSG00000135903; TAA
NTVPSVSSI

SEQ ID NO: 59547 - protein, 9 aa, Homo sapiens
  Table A; Target 59547; HLA-C*16:02; PAX3; ENSG00000135903; TAA
NTVPSVSSI

SEQ ID NO: 59548 - protein, 11 aa, Homo sapiens
  Table A; Target 59548; HLA-A*31:01; PAX3; ENSG00000135903; TAA
NTVPSVSSISR

SEQ ID NO: 59549 - protein, 11 aa, Homo sapiens
  Table A; Target 59549; HLA-A*33:01; PAX3; ENSG00000135903; TAA
NTVPSVSSISR

SEQ ID NO: 59550 - protein, 11 aa, Homo sapiens
  Table A; Target 59550; HLA-A*33:03; PAX3; ENSG00000135903; TAA
NTVPSVSSISR

SEQ ID NO: 59551 - protein, 11 aa, Homo sapiens
  Table A; Target 59551; HLA-A*68:01; PAX3; ENSG00000135903; TAA
NTVPSVSSISR

SEQ ID NO: 59552 - protein, 11 aa, Homo sapiens
  Table A; Target 59552; HLA-C*07:06; PAX3; ENSG00000135903; TAA
NTVPSVSSISR

SEQ ID NO: 59553 - protein, 9 aa, Homo sapiens
  Table A; Target 59553; HLA-A*24:02; PAX3; ENSG00000135903; TAA
NYPRSGFPL

SEQ ID NO: 59554 - protein, 9 aa, Homo sapiens
  Table A; Target 59554; HLA-C*01:02; PAX3; ENSG00000135903; TAA
NYPRSGFPL

SEQ ID NO: 59555 - protein, 9 aa, Homo sapiens
  Table A; Target 59555; HLA-B*07:02; PAX3; ENSG00000135903; TAA
PDSSSAYCL

SEQ ID NO: 59556 - protein, 9 aa, Homo sapiens
  Table A; Target 59556; HLA-B*07:02; PAX3; ENSG00000135903; TAA
PGPGQNYPR

SEQ ID NO: 59557 - protein, 10 aa, Homo sapiens
  Table A; Target 59557; HLA-A*30:02; PAX3; ENSG00000135903; TAA
PSNPDSSSAY

SEQ ID NO: 59558 - protein, 9 aa, Homo sapiens
  Table A; Target 59558; HLA-A*24:02; PAX3; ENSG00000135903; TAA
PSNPMNPTI

SEQ ID NO: 59559 - protein, 9 aa, Homo sapiens
  Table A; Target 59559; HLA-B*58:01; PAX3; ENSG00000135903; TAA
PSNPMNPTI

SEQ ID NO: 59560 - protein, 9 aa, Homo sapiens
  Table A; Target 59560; HLA-C*06:02; PAX3; ENSG00000135903; TAA
PSNPMNPTI

SEQ ID NO: 59561 - protein, 9 aa, Homo sapiens
  Table A; Target 59561; HLA-C*07:02; PAX3; ENSG00000135903; TAA
PSNPMNPTI

SEQ ID NO: 59562 - protein, 9 aa, Homo sapiens
  Table A; Target 59562; HLA-C*16:02; PAX3; ENSG00000135903; TAA
PSNPMNPTI

SEQ ID NO: 59563 - protein, 10 aa, Homo sapiens
  Table A; Target 59563; HLA-B*07:02; PAX3; ENSG00000135903; TAA
PSVSSISRIL

SEQ ID NO: 59564 - protein, 10 aa, Homo sapiens
  Table A; Target 59564; HLA-A*01:01; PAX3; ENSG00000135903; TAA
PTAMPTLPTY

SEQ ID NO: 59565 - protein, 8 aa, Homo sapiens
  Table A; Target 59565; HLA-A*23:01; PAX3; ENSG00000135903; TAA
PTLPTYQL

SEQ ID NO: 59566 - protein, 10 aa, Homo sapiens
  Table A; Target 59566; HLA-A*26:01; PAX3; ENSG00000135903; TAA
PTYQLSETSY

SEQ ID NO: 59567 - protein, 10 aa, Homo sapiens
  Table A; Target 59567; HLA-A*30:02; PAX3; ENSG00000135903; TAA
PTYQLSETSY

SEQ ID NO: 59568 - protein, 9 aa, Homo sapiens
  Table A; Target 59568; HLA-B*15:01; PAX3; ENSG00000135903; TAA
QLEELERAF

SEQ ID NO: 59569 - protein, 9 aa, Homo sapiens
  Table A; Target 59569; HLA-B*44:02; PAX3; ENSG00000135903; TAA
QLEELERAF

SEQ ID NO: 59570 - protein, 9 aa, Homo sapiens
  Table A; Target 59570; HLA-B*44:03; PAX3; ENSG00000135903; TAA
QLEELERAF

SEQ ID NO: 59571 - protein, 9 aa, Homo sapiens
  Table A; Target 59571; HLA-C*03:03; PAX3; ENSG00000135903; TAA
QLEELERAF

SEQ ID NO: 59572 - protein, 8 aa, Homo sapiens
  Table A; Target 59572; HLA-B*08:01; PAX3; ENSG00000135903; TAA
QLMAFNHL

SEQ ID NO: 59573 - protein, 9 aa, Homo sapiens
  Table A; Target 59573; HLA-A*02:01; PAX3; ENSG00000135903; TAA
QLMAFNHLI

SEQ ID NO: 59574 - protein, 9 aa, Homo sapiens
  Table A; Target 59574; HLA-A*02:04; PAX3; ENSG00000135903; TAA
QLMAFNHLI

SEQ ID NO: 59575 - protein, 9 aa, Homo sapiens
  Table A; Target 59575; HLA-B*13:02; PAX3; ENSG00000135903; TAA
QLMAFNHLI

SEQ ID NO: 59576 - protein, 8 aa, Homo sapiens
  Table A; Target 59576; HLA-B*51:01; PAX3; ENSG00000135903; TAA
QPLPPSTV

SEQ ID NO: 59577 - protein, 8 aa, Homo sapiens
  Table A; Target 59577; HLA-B*56:01; PAX3; ENSG00000135903; TAA
QPLPPSTV

SEQ ID NO: 59578 - protein, 9 aa, Homo sapiens
  Table A; Target 59578; HLA-B*35:01; PAX3; ENSG00000135903; TAA
QPLPPSTVH

SEQ ID NO: 59579 - protein, 8 aa, Homo sapiens
  Table A; Target 59579; HLA-B*35:03; PAX3; ENSG00000135903; TAA
QPQTDYAL

SEQ ID NO: 59580 - protein, 8 aa, Homo sapiens
  Table A; Target 59580; HLA-B*54:01; PAX3; ENSG00000135903; TAA
QPTSIPQA

SEQ ID NO: 59581 - protein, 8 aa, Homo sapiens
  Table A; Target 59581; HLA-B*55:01; PAX3; ENSG00000135903; TAA
QPTSIPQA

SEQ ID NO: 59582 - protein, 8 aa, Homo sapiens
  Table A; Target 59582; HLA-B*56:01; PAX3; ENSG00000135903; TAA
QPTSIPQA

SEQ ID NO: 59583 - protein, 9 aa, Homo sapiens
  Table A; Target 59583; HLA-A*68:02; PAX3; ENSG00000135903; TAA
QPTSIPQAV

SEQ ID NO: 59584 - protein, 9 aa, Homo sapiens
  Table A; Target 59584; HLA-B*07:02; PAX3; ENSG00000135903; TAA
QPTSIPQAV

SEQ ID NO: 59585 - protein, 9 aa, Homo sapiens
  Table A; Target 59585; HLA-B*13:02; PAX3; ENSG00000135903; TAA
QPTSIPQAV

SEQ ID NO: 59586 - protein, 9 aa, Homo sapiens
  Table A; Target 59586; HLA-B*35:01; PAX3; ENSG00000135903; TAA
QPTSIPQAV

SEQ ID NO: 59587 - protein, 9 aa, Homo sapiens
  Table A; Target 59587; HLA-B*35:03; PAX3; ENSG00000135903; TAA
QPTSIPQAV

SEQ ID NO: 59588 - protein, 9 aa, Homo sapiens
  Table A; Target 59588; HLA-B*51:01; PAX3; ENSG00000135903; TAA
QPTSIPQAV

SEQ ID NO: 59589 - protein, 9 aa, Homo sapiens
  Table A; Target 59589; HLA-B*54:01; PAX3; ENSG00000135903; TAA
QPTSIPQAV

SEQ ID NO: 59590 - protein, 9 aa, Homo sapiens
  Table A; Target 59590; HLA-B*55:01; PAX3; ENSG00000135903; TAA
QPTSIPQAV

SEQ ID NO: 59591 - protein, 9 aa, Homo sapiens
  Table A; Target 59591; HLA-B*56:01; PAX3; ENSG00000135903; TAA
QPTSIPQAV

SEQ ID NO: 59592 - protein, 9 aa, Homo sapiens
  Table A; Target 59592; HLA-C*07:02; PAX3; ENSG00000135903; TAA
QPTSIPQAV

SEQ ID NO: 59593 - protein, 9 aa, Homo sapiens
  Table A; Target 59593; HLA-C*06:02; PAX3; ENSG00000135903; TAA
QRLDHMKSL

SEQ ID NO: 59594 - protein, 8 aa, Homo sapiens
  Table A; Target 59594; HLA-C*05:01; PAX3; ENSG00000135903; TAA
QSDEGSDI

SEQ ID NO: 59595 - protein, 8 aa, Homo sapiens
  Table A; Target 59595; HLA-A*30:02; PAX3; ENSG00000135903; TAA
QSYCPPTY

SEQ ID NO: 59596 - protein, 8 aa, Homo sapiens
  Table A; Target 59596; HLA-B*15:03; PAX3; ENSG00000135903; TAA
QSYCPPTY

SEQ ID NO: 59597 - protein, 8 aa, Homo sapiens
  Table A; Target 59597; HLA-B*58:01; PAX3; ENSG00000135903; TAA
QSYCPPTY

SEQ ID NO: 59598 - protein, 9 aa, Homo sapiens
  Table A; Target 59598; HLA-A*03:01; PAX3; ENSG00000135903; TAA
QVMGLLTNH

SEQ ID NO: 59599 - protein, 9 aa, Homo sapiens
  Table A; Target 59599; HLA-A*03:02; PAX3; ENSG00000135903; TAA
QVMGLLTNH

SEQ ID NO: 59600 - protein, 9 aa, Homo sapiens
  Table A; Target 59600; HLA-A*11:01; PAX3; ENSG00000135903; TAA
QVMGLLTNH

SEQ ID NO: 59601 - protein, 9 aa, Homo sapiens
  Table A; Target 59601; HLA-A*31:01; PAX3; ENSG00000135903; TAA
QVMGLLTNH

SEQ ID NO: 59602 - protein, 9 aa, Homo sapiens
  Table A; Target 59602; HLA-C*07:06; PAX3; ENSG00000135903; TAA
QVMGLLTNH

SEQ ID NO: 59603 - protein, 9 aa, Homo sapiens
  Table A; Target 59603; HLA-A*03:01; PAX3; ENSG00000135903; TAA
QVTTPDVEK

SEQ ID NO: 59604 - protein, 9 aa, Homo sapiens
  Table A; Target 59604; HLA-A*03:02; PAX3; ENSG00000135903; TAA
QVTTPDVEK

SEQ ID NO: 59605 - protein, 9 aa, Homo sapiens
  Table A; Target 59605; HLA-A*11:01; PAX3; ENSG00000135903; TAA
QVTTPDVEK

SEQ ID NO: 59606 - protein, 9 aa, Homo sapiens
  Table A; Target 59606; HLA-A*68:01; PAX3; ENSG00000135903; TAA
QVTTPDVEK

SEQ ID NO: 59607 - protein, 9 aa, Homo sapiens
  Table A; Target 59607; HLA-C*07:06; PAX3; ENSG00000135903; TAA
QVTTPDVEK

SEQ ID NO: 59608 - protein, 10 aa, Homo sapiens
  Table A; Target 59608; HLA-A*23:01; PAX3; ENSG00000135903; TAA
QYGQSKPWTF

SEQ ID NO: 59609 - protein, 10 aa, Homo sapiens
  Table A; Target 59609; HLA-A*24:02; PAX3; ENSG00000135903; TAA
QYGQSKPWTF

SEQ ID NO: 59610 - protein, 10 aa, Homo sapiens
  Table A; Target 59610; HLA-B*07:02; PAX3; ENSG00000135903; TAA
QYGQSKPWTF

SEQ ID NO: 59611 - protein, 10 aa, Homo sapiens
  Table A; Target 59611; HLA-C*04:01; PAX3; ENSG00000135903; TAA
QYGQSKPWTF

SEQ ID NO: 59612 - protein, 10 aa, Homo sapiens
  Table A; Target 59612; HLA-C*07:01; PAX3; ENSG00000135903; TAA
QYGQSKPWTF

SEQ ID NO: 59613 - protein, 10 aa, Homo sapiens
  Table A; Target 59613; HLA-C*07:02; PAX3; ENSG00000135903; TAA
QYGQSKPWTF

SEQ ID NO: 59614 - protein, 9 aa, Homo sapiens
  Table A; Target 59614; HLA-A*33:03; PAX3; ENSG00000135903; TAA
QYGQYGQSK

SEQ ID NO: 59615 - protein, 9 aa, Homo sapiens
  Table A; Target 59615; HLA-C*14:02; PAX3; ENSG00000135903; TAA
QYGQYGQSK

SEQ ID NO: 59616 - protein, 10 aa, Homo sapiens
  Table A; Target 59616; HLA-B*37:01; PAX3; ENSG00000135903; TAA
REELAQRAKL

SEQ ID NO: 59617 - protein, 10 aa, Homo sapiens
  Table A; Target 59617; HLA-B*40:01; PAX3; ENSG00000135903; TAA
REELAQRAKL

SEQ ID NO: 59618 - protein, 10 aa, Homo sapiens
  Table A; Target 59618; HLA-B*15:03; PAX3; ENSG00000135903; TAA
RKQAGANQLM

SEQ ID NO: 59619 - protein, 11 aa, Homo sapiens
  Table A; Target 59619; HLA-A*30:02; PAX3; ENSG00000135903; TAA
RMMRPGPGQNY

SEQ ID NO: 59620 - protein, 11 aa, Homo sapiens
  Table A; Target 59620; HLA-B*15:01; PAX3; ENSG00000135903; TAA
RMMRPGPGQNY

SEQ ID NO: 59621 - protein, 8 aa, Homo sapiens
  Table A; Target 59621; HLA-A*30:02; PAX3; ENSG00000135903; TAA
RPGPGQNY

SEQ ID NO: 59622 - protein, 8 aa, Homo sapiens
  Table A; Target 59622; HLA-B*07:02; PAX3; ENSG00000135903; TAA
RPGPGQNY

SEQ ID NO: 59623 - protein, 8 aa, Homo sapiens
  Table A; Target 59623; HLA-C*01:02; PAX3; ENSG00000135903; TAA
RPGPGQNY

SEQ ID NO: 59624 - protein, 10 aa, Homo sapiens
  Table A; Target 59624; HLA-A*31:01; PAX3; ENSG00000135903; TAA
RPGPGQNYPR

SEQ ID NO: 59625 - protein, 10 aa, Homo sapiens
  Table A; Target 59625; HLA-B*07:02; PAX3; ENSG00000135903; TAA
RPQPLPPSTV

SEQ ID NO: 59626 - protein, 10 aa, Homo sapiens
  Table A; Target 59626; HLA-B*51:01; PAX3; ENSG00000135903; TAA
RPQPLPPSTV

SEQ ID NO: 59627 - protein, 10 aa, Homo sapiens
  Table A; Target 59627; HLA-B*54:01; PAX3; ENSG00000135903; TAA
RPQPLPPSTV

SEQ ID NO: 59628 - protein, 10 aa, Homo sapiens
  Table A; Target 59628; HLA-B*55:01; PAX3; ENSG00000135903; TAA
RPQPLPPSTV

SEQ ID NO: 59629 - protein, 10 aa, Homo sapiens
  Table A; Target 59629; HLA-B*56:01; PAX3; ENSG00000135903; TAA
RPQPLPPSTV

SEQ ID NO: 59630 - protein, 10 aa, Homo sapiens
  Table A; Target 59630; HLA-C*07:02; PAX3; ENSG00000135903; TAA
RPQPLPPSTV

SEQ ID NO: 59631 - protein, 9 aa, Homo sapiens
  Table A; Target 59631; HLA-A*03:01; PAX3; ENSG00000135903; TAA
SAYCLPSTR

SEQ ID NO: 59632 - protein, 9 aa, Homo sapiens
  Table A; Target 59632; HLA-A*31:01; PAX3; ENSG00000135903; TAA
SAYCLPSTR

SEQ ID NO: 59633 - protein, 9 aa, Homo sapiens
  Table A; Target 59633; HLA-A*33:01; PAX3; ENSG00000135903; TAA
SAYCLPSTR

SEQ ID NO: 59634 - protein, 9 aa, Homo sapiens
  Table A; Target 59634; HLA-A*33:03; PAX3; ENSG00000135903; TAA
SAYCLPSTR

SEQ ID NO: 59635 - protein, 9 aa, Homo sapiens
  Table A; Target 59635; HLA-A*68:01; PAX3; ENSG00000135903; TAA
SAYCLPSTR

SEQ ID NO: 59636 - protein, 9 aa, Homo sapiens
  Table A; Target 59636; HLA-C*07:06; PAX3; ENSG00000135903; TAA
SAYCLPSTR

SEQ ID NO: 59637 - protein, 9 aa, Homo sapiens
  Table A; Target 59637; HLA-C*12:03; PAX3; ENSG00000135903; TAA
SAYCLPSTR

SEQ ID NO: 59638 - protein, 9 aa, Homo sapiens
  Table A; Target 59638; HLA-A*30:01; PAX3; ENSG00000135903; TAA
SDIDSEPDL

SEQ ID NO: 59639 - protein, 9 aa, Homo sapiens
  Table A; Target 59639; HLA-B*39:01; PAX3; ENSG00000135903; TAA
SDIDSEPDL

SEQ ID NO: 59640 - protein, 9 aa, Homo sapiens
  Table A; Target 59640; HLA-B*40:01; PAX3; ENSG00000135903; TAA
SDIDSEPDL

SEQ ID NO: 59641 - protein, 10 aa, Homo sapiens
  Table A; Target 59641; HLA-A*30:01; PAX3; ENSG00000135903; TAA
SETSYQPTSI

SEQ ID NO: 59642 - protein, 10 aa, Homo sapiens
  Table A; Target 59642; HLA-B*40:01; PAX3; ENSG00000135903; TAA
SETSYQPTSI

SEQ ID NO: 59643 - protein, 10 aa, Homo sapiens
  Table A; Target 59643; HLA-B*40:02; PAX3; ENSG00000135903; TAA
SETSYQPTSI

SEQ ID NO: 59644 - protein, 10 aa, Homo sapiens
  Table A; Target 59644; HLA-B*44:02; PAX3; ENSG00000135903; TAA
SETSYQPTSI

SEQ ID NO: 59645 - protein, 10 aa, Homo sapiens
  Table A; Target 59645; HLA-B*44:03; PAX3; ENSG00000135903; TAA
SETSYQPTSI

SEQ ID NO: 59646 - protein, 10 aa, Homo sapiens
  Table A; Target 59646; HLA-B*49:01; PAX3; ENSG00000135903; TAA
SETSYQPTSI

SEQ ID NO: 59647 - protein, 11 aa, Homo sapiens
  Table A; Target 59647; HLA-A*31:01; PAX3; ENSG00000135903; TAA
SGFPLEVSTPL

SEQ ID NO: 59648 - protein, 9 aa, Homo sapiens
  Table A; Target 59648; HLA-A*01:01; PAX3; ENSG00000135903; TAA
SIDGILSER

SEQ ID NO: 59649 - protein, 9 aa, Homo sapiens
  Table A; Target 59649; HLA-A*02:07; PAX3; ENSG00000135903; TAA
SIDGILSER

SEQ ID NO: 59650 - protein, 9 aa, Homo sapiens
  Table A; Target 59650; HLA-A*03:01; PAX3; ENSG00000135903; TAA
SIDGILSER

SEQ ID NO: 59651 - protein, 9 aa, Homo sapiens
  Table A; Target 59651; HLA-A*03:02; PAX3; ENSG00000135903; TAA
SIDGILSER

SEQ ID NO: 59652 - protein, 9 aa, Homo sapiens
  Table A; Target 59652; HLA-A*11:01; PAX3; ENSG00000135903; TAA
SIDGILSER

SEQ ID NO: 59653 - protein, 9 aa, Homo sapiens
  Table A; Target 59653; HLA-A*31:01; PAX3; ENSG00000135903; TAA
SIDGILSER

SEQ ID NO: 59654 - protein, 9 aa, Homo sapiens
  Table A; Target 59654; HLA-A*33:01; PAX3; ENSG00000135903; TAA
SIDGILSER

SEQ ID NO: 59655 - protein, 9 aa, Homo sapiens
  Table A; Target 59655; HLA-A*33:03; PAX3; ENSG00000135903; TAA
SIDGILSER

SEQ ID NO: 59656 - protein, 9 aa, Homo sapiens
  Table A; Target 59656; HLA-A*68:01; PAX3; ENSG00000135903; TAA
SIDGILSER

SEQ ID NO: 59657 - protein, 9 aa, Homo sapiens
  Table A; Target 59657; HLA-C*05:01; PAX3; ENSG00000135903; TAA
SIDGILSER

SEQ ID NO: 59658 - protein, 9 aa, Homo sapiens
  Table A; Target 59658; HLA-C*07:06; PAX3; ENSG00000135903; TAA
SIDGILSER

SEQ ID NO: 59659 - protein, 9 aa, Homo sapiens
  Table A; Target 59659; HLA-A*03:01; PAX3; ENSG00000135903; TAA
SISRILRSK

SEQ ID NO: 59660 - protein, 9 aa, Homo sapiens
  Table A; Target 59660; HLA-A*03:02; PAX3; ENSG00000135903; TAA
SISRILRSK

SEQ ID NO: 59661 - protein, 9 aa, Homo sapiens
  Table A; Target 59661; HLA-A*11:01; PAX3; ENSG00000135903; TAA
SISRILRSK

SEQ ID NO: 59662 - protein, 9 aa, Homo sapiens
  Table A; Target 59662; HLA-C*05:01; PAX3; ENSG00000135903; TAA
SLDSLPTSQ

SEQ ID NO: 59663 - protein, 11 aa, Homo sapiens
  Table A; Target 59663; HLA-A*01:01; PAX3; ENSG00000135903; TAA
SLDSLPTSQSY

SEQ ID NO: 59664 - protein, 11 aa, Homo sapiens
  Table A; Target 59664; HLA-A*29:02; PAX3; ENSG00000135903; TAA
SLDSLPTSQSY

SEQ ID NO: 59665 - protein, 11 aa, Homo sapiens
  Table A; Target 59665; HLA-A*30:02; PAX3; ENSG00000135903; TAA
SLDSLPTSQSY

SEQ ID NO: 59666 - protein, 11 aa, Homo sapiens
  Table A; Target 59666; HLA-A*32:01; PAX3; ENSG00000135903; TAA
SLDSLPTSQSY

SEQ ID NO: 59667 - protein, 11 aa, Homo sapiens
  Table A; Target 59667; HLA-B*15:01; PAX3; ENSG00000135903; TAA
SLDSLPTSQSY

SEQ ID NO: 59668 - protein, 11 aa, Homo sapiens
  Table A; Target 59668; HLA-B*44:03; PAX3; ENSG00000135903; TAA
SLDSLPTSQSY

SEQ ID NO: 59669 - protein, 11 aa, Homo sapiens
  Table A; Target 59669; HLA-B*55:01; PAX3; ENSG00000135903; TAA
SLDSLPTSQSY

SEQ ID NO: 59670 - protein, 11 aa, Homo sapiens
  Table A; Target 59670; HLA-C*16:02; PAX3; ENSG00000135903; TAA
SLDSLPTSQSY

SEQ ID NO: 59671 - protein, 8 aa, Homo sapiens
  Table A; Target 59671; HLA-A*32:01; PAX3; ENSG00000135903; TAA
SLPTSQSY

SEQ ID NO: 59672 - protein, 8 aa, Homo sapiens
  Table A; Target 59672; HLA-B*15:01; PAX3; ENSG00000135903; TAA
SLPTSQSY

SEQ ID NO: 59673 - protein, 8 aa, Homo sapiens
  Table A; Target 59673; HLA-B*15:03; PAX3; ENSG00000135903; TAA
SLPTSQSY

SEQ ID NO: 59674 - protein, 8 aa, Homo sapiens
  Table A; Target 59674; HLA-B*46:01; PAX3; ENSG00000135903; TAA
SLPTSQSY

SEQ ID NO: 59675 - protein, 8 aa, Homo sapiens
  Table A; Target 59675; HLA-C*01:02; PAX3; ENSG00000135903; TAA
SLPTSQSY

SEQ ID NO: 59676 - protein, 8 aa, Homo sapiens
  Table A; Target 59676; HLA-C*14:02; PAX3; ENSG00000135903; TAA
SLPTSQSY

SEQ ID NO: 59677 - protein, 9 aa, Homo sapiens
  Table A; Target 59677; HLA-C*01:02; PAX3; ENSG00000135903; TAA
SLPTSQSYC

SEQ ID NO: 59678 - protein, 8 aa, Homo sapiens
  Table A; Target 59678; HLA-A*01:01; PAX3; ENSG00000135903; TAA
SMDPVTGY

SEQ ID NO: 59679 - protein, 8 aa, Homo sapiens
  Table A; Target 59679; HLA-A*30:02; PAX3; ENSG00000135903; TAA
SMDPVTGY

SEQ ID NO: 59680 - protein, 8 aa, Homo sapiens
  Table A; Target 59680; HLA-A*32:01; PAX3; ENSG00000135903; TAA
SMDPVTGY

SEQ ID NO: 59681 - protein, 8 aa, Homo sapiens
  Table A; Target 59681; HLA-B*15:01; PAX3; ENSG00000135903; TAA
SMDPVTGY

SEQ ID NO: 59682 - protein, 8 aa, Homo sapiens
  Table A; Target 59682; HLA-B*15:03; PAX3; ENSG00000135903; TAA
SMDPVTGY

SEQ ID NO: 59683 - protein, 8 aa, Homo sapiens
  Table A; Target 59683; HLA-B*18:01; PAX3; ENSG00000135903; TAA
SMDPVTGY

SEQ ID NO: 59684 - protein, 8 aa, Homo sapiens
  Table A; Target 59684; HLA-B*35:01; PAX3; ENSG00000135903; TAA
SMDPVTGY

SEQ ID NO: 59685 - protein, 8 aa, Homo sapiens
  Table A; Target 59685; HLA-B*39:01; PAX3; ENSG00000135903; TAA
SMDPVTGY

SEQ ID NO: 59686 - protein, 8 aa, Homo sapiens
  Table A; Target 59686; HLA-B*46:01; PAX3; ENSG00000135903; TAA
SMDPVTGY

SEQ ID NO: 59687 - protein, 8 aa, Homo sapiens
  Table A; Target 59687; HLA-C*04:01; PAX3; ENSG00000135903; TAA
SMDPVTGY

SEQ ID NO: 59688 - protein, 8 aa, Homo sapiens
  Table A; Target 59688; HLA-C*05:01; PAX3; ENSG00000135903; TAA
SMDPVTGY

SEQ ID NO: 59689 - protein, 8 aa, Homo sapiens
  Table A; Target 59689; HLA-C*07:04; PAX3; ENSG00000135903; TAA
SMDPVTGY

SEQ ID NO: 59690 - protein, 8 aa, Homo sapiens
  Table A; Target 59690; HLA-C*16:02; PAX3; ENSG00000135903; TAA
SMDPVTGY

SEQ ID NO: 59691 - protein, 10 aa, Homo sapiens
  Table A; Target 59691; HLA-A*01:01; PAX3; ENSG00000135903; TAA
SMDPVTGYQY

SEQ ID NO: 59692 - protein, 10 aa, Homo sapiens
  Table A; Target 59692; HLA-A*02:07; PAX3; ENSG00000135903; TAA
SMDPVTGYQY

SEQ ID NO: 59693 - protein, 10 aa, Homo sapiens
  Table A; Target 59693; HLA-A*03:01; PAX3; ENSG00000135903; TAA
SMDPVTGYQY

SEQ ID NO: 59694 - protein, 10 aa, Homo sapiens
  Table A; Target 59694; HLA-A*03:02; PAX3; ENSG00000135903; TAA
SMDPVTGYQY

SEQ ID NO: 59695 - protein, 10 aa, Homo sapiens
  Table A; Target 59695; HLA-A*11:01; PAX3; ENSG00000135903; TAA
SMDPVTGYQY

SEQ ID NO: 59696 - protein, 10 aa, Homo sapiens
  Table A; Target 59696; HLA-A*23:01; PAX3; ENSG00000135903; TAA
SMDPVTGYQY

SEQ ID NO: 59697 - protein, 10 aa, Homo sapiens
  Table A; Target 59697; HLA-A*25:01; PAX3; ENSG00000135903; TAA
SMDPVTGYQY

SEQ ID NO: 59698 - protein, 10 aa, Homo sapiens
  Table A; Target 59698; HLA-A*26:01; PAX3; ENSG00000135903; TAA
SMDPVTGYQY

SEQ ID NO: 59699 - protein, 10 aa, Homo sapiens
  Table A; Target 59699; HLA-A*29:02; PAX3; ENSG00000135903; TAA
SMDPVTGYQY

SEQ ID NO: 59700 - protein, 10 aa, Homo sapiens
  Table A; Target 59700; HLA-A*30:02; PAX3; ENSG00000135903; TAA
SMDPVTGYQY

SEQ ID NO: 59701 - protein, 10 aa, Homo sapiens
  Table A; Target 59701; HLA-A*32:01; PAX3; ENSG00000135903; TAA
SMDPVTGYQY

SEQ ID NO: 59702 - protein, 10 aa, Homo sapiens
  Table A; Target 59702; HLA-A*33:03; PAX3; ENSG00000135903; TAA
SMDPVTGYQY

SEQ ID NO: 59703 - protein, 10 aa, Homo sapiens
  Table A; Target 59703; HLA-A*68:01; PAX3; ENSG00000135903; TAA
SMDPVTGYQY

SEQ ID NO: 59704 - protein, 10 aa, Homo sapiens
  Table A; Target 59704; HLA-B*15:01; PAX3; ENSG00000135903; TAA
SMDPVTGYQY

SEQ ID NO: 59705 - protein, 10 aa, Homo sapiens
  Table A; Target 59705; HLA-B*15:03; PAX3; ENSG00000135903; TAA
SMDPVTGYQY

SEQ ID NO: 59706 - protein, 10 aa, Homo sapiens
  Table A; Target 59706; HLA-B*18:01; PAX3; ENSG00000135903; TAA
SMDPVTGYQY

SEQ ID NO: 59707 - protein, 10 aa, Homo sapiens
  Table A; Target 59707; HLA-B*27:02; PAX3; ENSG00000135903; TAA
SMDPVTGYQY

SEQ ID NO: 59708 - protein, 10 aa, Homo sapiens
  Table A; Target 59708; HLA-B*27:05; PAX3; ENSG00000135903; TAA
SMDPVTGYQY

SEQ ID NO: 59709 - protein, 10 aa, Homo sapiens
  Table A; Target 59709; HLA-B*35:01; PAX3; ENSG00000135903; TAA
SMDPVTGYQY

SEQ ID NO: 59710 - protein, 10 aa, Homo sapiens
  Table A; Target 59710; HLA-B*35:03; PAX3; ENSG00000135903; TAA
SMDPVTGYQY

SEQ ID NO: 59711 - protein, 10 aa, Homo sapiens
  Table A; Target 59711; HLA-B*38:01; PAX3; ENSG00000135903; TAA
SMDPVTGYQY

SEQ ID NO: 59712 - protein, 10 aa, Homo sapiens
  Table A; Target 59712; HLA-B*39:01; PAX3; ENSG00000135903; TAA
SMDPVTGYQY

SEQ ID NO: 59713 - protein, 10 aa, Homo sapiens
  Table A; Target 59713; HLA-B*44:03; PAX3; ENSG00000135903; TAA
SMDPVTGYQY

SEQ ID NO: 59714 - protein, 10 aa, Homo sapiens
  Table A; Target 59714; HLA-B*46:01; PAX3; ENSG00000135903; TAA
SMDPVTGYQY

SEQ ID NO: 59715 - protein, 10 aa, Homo sapiens
  Table A; Target 59715; HLA-B*55:01; PAX3; ENSG00000135903; TAA
SMDPVTGYQY

SEQ ID NO: 59716 - protein, 10 aa, Homo sapiens
  Table A; Target 59716; HLA-B*57:01; PAX3; ENSG00000135903; TAA
SMDPVTGYQY

SEQ ID NO: 59717 - protein, 10 aa, Homo sapiens
  Table A; Target 59717; HLA-B*58:01; PAX3; ENSG00000135903; TAA
SMDPVTGYQY

SEQ ID NO: 59718 - protein, 10 aa, Homo sapiens
  Table A; Target 59718; HLA-C*02:02; PAX3; ENSG00000135903; TAA
SMDPVTGYQY

SEQ ID NO: 59719 - protein, 10 aa, Homo sapiens
  Table A; Target 59719; HLA-C*04:01; PAX3; ENSG00000135903; TAA
SMDPVTGYQY

SEQ ID NO: 59720 - protein, 10 aa, Homo sapiens
  Table A; Target 59720; HLA-C*05:01; PAX3; ENSG00000135903; TAA
SMDPVTGYQY

SEQ ID NO: 59721 - protein, 10 aa, Homo sapiens
  Table A; Target 59721; HLA-C*07:01; PAX3; ENSG00000135903; TAA
SMDPVTGYQY

SEQ ID NO: 59722 - protein, 10 aa, Homo sapiens
  Table A; Target 59722; HLA-C*07:04; PAX3; ENSG00000135903; TAA
SMDPVTGYQY

SEQ ID NO: 59723 - protein, 10 aa, Homo sapiens
  Table A; Target 59723; HLA-C*07:06; PAX3; ENSG00000135903; TAA
SMDPVTGYQY

SEQ ID NO: 59724 - protein, 10 aa, Homo sapiens
  Table A; Target 59724; HLA-C*12:03; PAX3; ENSG00000135903; TAA
SMDPVTGYQY

SEQ ID NO: 59725 - protein, 10 aa, Homo sapiens
  Table A; Target 59725; HLA-C*14:02; PAX3; ENSG00000135903; TAA
SMDPVTGYQY

SEQ ID NO: 59726 - protein, 10 aa, Homo sapiens
  Table A; Target 59726; HLA-C*16:01; PAX3; ENSG00000135903; TAA
SMDPVTGYQY

SEQ ID NO: 59727 - protein, 10 aa, Homo sapiens
  Table A; Target 59727; HLA-C*16:02; PAX3; ENSG00000135903; TAA
SMDPVTGYQY

SEQ ID NO: 59728 - protein, 10 aa, Homo sapiens
  Table A; Target 59728; HLA-C*16:04; PAX3; ENSG00000135903; TAA
SMDPVTGYQY

SEQ ID NO: 59729 - protein, 11 aa, Homo sapiens
  Table A; Target 59729; HLA-A*01:01; PAX3; ENSG00000135903; TAA
SMDPVTGYQYG

SEQ ID NO: 59730 - protein, 11 aa, Homo sapiens
  Table A; Target 59730; HLA-A*02:07; PAX3; ENSG00000135903; TAA
SMDPVTGYQYG

SEQ ID NO: 59731 - protein, 11 aa, Homo sapiens
  Table A; Target 59731; HLA-C*04:01; PAX3; ENSG00000135903; TAA
SMDPVTGYQYG

SEQ ID NO: 59732 - protein, 9 aa, Homo sapiens
  Table A; Target 59732; HLA-A*26:01; PAX3; ENSG00000135903; TAA
SNPDSSSAY

SEQ ID NO: 59733 - protein, 9 aa, Homo sapiens
  Table A; Target 59733; HLA-A*30:02; PAX3; ENSG00000135903; TAA
SNPDSSSAY

SEQ ID NO: 59734 - protein, 9 aa, Homo sapiens
  Table A; Target 59734; HLA-C*01:02; PAX3; ENSG00000135903; TAA
SNPDSSSAY

SEQ ID NO: 59735 - protein, 9 aa, Homo sapiens
  Table A; Target 59735; HLA-C*14:02; PAX3; ENSG00000135903; TAA
SNPDSSSAY

SEQ ID NO: 59736 - protein, 9 aa, Homo sapiens
  Table A; Target 59736; HLA-B*56:01; PAX3; ENSG00000135903; TAA
SPLTGGLEP

SEQ ID NO: 59737 - protein, 8 aa, Homo sapiens
  Table A; Target 59737; HLA-B*07:02; PAX3; ENSG00000135903; TAA
SPQVMGLL

SEQ ID NO: 59738 - protein, 8 aa, Homo sapiens
  Table A; Target 59738; HLA-C*07:02; PAX3; ENSG00000135903; TAA
SPQVMGLL

SEQ ID NO: 59739 - protein, 9 aa, Homo sapiens
  Table A; Target 59739; HLA-A*30:02; PAX3; ENSG00000135903; TAA
SQSYCPPTY

SEQ ID NO: 59740 - protein, 9 aa, Homo sapiens
  Table A; Target 59740; HLA-A*32:01; PAX3; ENSG00000135903; TAA
SQSYCPPTY

SEQ ID NO: 59741 - protein, 9 aa, Homo sapiens
  Table A; Target 59741; HLA-B*15:01; PAX3; ENSG00000135903; TAA
SQSYCPPTY

SEQ ID NO: 59742 - protein, 9 aa, Homo sapiens
  Table A; Target 59742; HLA-B*15:03; PAX3; ENSG00000135903; TAA
SQSYCPPTY

SEQ ID NO: 59743 - protein, 9 aa, Homo sapiens
  Table A; Target 59743; HLA-B*39:01; PAX3; ENSG00000135903; TAA
SQSYCPPTY

SEQ ID NO: 59744 - protein, 9 aa, Homo sapiens
  Table A; Target 59744; HLA-C*07:04; PAX3; ENSG00000135903; TAA
SQSYCPPTY

SEQ ID NO: 59745 - protein, 10 aa, Homo sapiens
  Table A; Target 59745; HLA-A*68:01; PAX3; ENSG00000135903; TAA
SSAYCLPSTR

SEQ ID NO: 59746 - protein, 8 aa, Homo sapiens
  Table A; Target 59746; HLA-A*31:01; PAX3; ENSG00000135903; TAA
SSISRILR

SEQ ID NO: 59747 - protein, 9 aa, Homo sapiens
  Table A; Target 59747; HLA-A*25:01; PAX3; ENSG00000135903; TAA
STRHGFSSY

SEQ ID NO: 59748 - protein, 9 aa, Homo sapiens
  Table A; Target 59748; HLA-A*26:01; PAX3; ENSG00000135903; TAA
STRHGFSSY

SEQ ID NO: 59749 - protein, 9 aa, Homo sapiens
  Table A; Target 59749; HLA-A*30:02; PAX3; ENSG00000135903; TAA
STRHGFSSY

SEQ ID NO: 59750 - protein, 9 aa, Homo sapiens
  Table A; Target 59750; HLA-A*32:01; PAX3; ENSG00000135903; TAA
STRHGFSSY

SEQ ID NO: 59751 - protein, 9 aa, Homo sapiens
  Table A; Target 59751; HLA-B*46:01; PAX3; ENSG00000135903; TAA
STRHGFSSY

SEQ ID NO: 59752 - protein, 9 aa, Homo sapiens
  Table A; Target 59752; HLA-B*57:01; PAX3; ENSG00000135903; TAA
STRHGFSSY

SEQ ID NO: 59753 - protein, 9 aa, Homo sapiens
  Table A; Target 59753; HLA-A*32:01; PAX3; ENSG00000135903; TAA
SVSSISRIL

SEQ ID NO: 59754 - protein, 9 aa, Homo sapiens
  Table A; Target 59754; HLA-A*68:02; PAX3; ENSG00000135903; TAA
SVSSISRIL

SEQ ID NO: 59755 - protein, 9 aa, Homo sapiens
  Table A; Target 59755; HLA-B*07:02; PAX3; ENSG00000135903; TAA
SVSSISRIL

SEQ ID NO: 59756 - protein, 9 aa, Homo sapiens
  Table A; Target 59756; HLA-B*27:05; PAX3; ENSG00000135903; TAA
SVSSISRIL

SEQ ID NO: 59757 - protein, 9 aa, Homo sapiens
  Table A; Target 59757; HLA-C*03:03; PAX3; ENSG00000135903; TAA
SVSSISRIL

SEQ ID NO: 59758 - protein, 9 aa, Homo sapiens
  Table A; Target 59758; HLA-C*03:04; PAX3; ENSG00000135903; TAA
SVSSISRIL

SEQ ID NO: 59759 - protein, 9 aa, Homo sapiens
  Table A; Target 59759; HLA-C*06:02; PAX3; ENSG00000135903; TAA
SVSSISRIL

SEQ ID NO: 59760 - protein, 9 aa, Homo sapiens
  Table A; Target 59760; HLA-C*12:03; PAX3; ENSG00000135903; TAA
SVSSISRIL

SEQ ID NO: 59761 - protein, 9 aa, Homo sapiens
  Table A; Target 59761; HLA-C*16:01; PAX3; ENSG00000135903; TAA
SVSSISRIL

SEQ ID NO: 59762 - protein, 9 aa, Homo sapiens
  Table A; Target 59762; HLA-C*16:02; PAX3; ENSG00000135903; TAA
SVSSISRIL

SEQ ID NO: 59763 - protein, 10 aa, Homo sapiens
  Table A; Target 59763; HLA-A*11:01; PAX3; ENSG00000135903; TAA
SVSSISRILR

SEQ ID NO: 59764 - protein, 10 aa, Homo sapiens
  Table A; Target 59764; HLA-A*31:01; PAX3; ENSG00000135903; TAA
SVSSISRILR

SEQ ID NO: 59765 - protein, 10 aa, Homo sapiens
  Table A; Target 59765; HLA-A*33:03; PAX3; ENSG00000135903; TAA
SVSSISRILR

SEQ ID NO: 59766 - protein, 10 aa, Homo sapiens
  Table A; Target 59766; HLA-A*68:01; PAX3; ENSG00000135903; TAA
SVSSISRILR

SEQ ID NO: 59767 - protein, 10 aa, Homo sapiens
  Table A; Target 59767; HLA-C*07:06; PAX3; ENSG00000135903; TAA
SVSSISRILR

SEQ ID NO: 59768 - protein, 9 aa, Homo sapiens
  Table A; Target 59768; HLA-C*06:02; PAX3; ENSG00000135903; TAA
SYQPTSIPQ

SEQ ID NO: 59769 - protein, 11 aa, Homo sapiens
  Table A; Target 59769; HLA-A*23:01; PAX3; ENSG00000135903; TAA
SYQPTSIPQAV

SEQ ID NO: 59770 - protein, 11 aa, Homo sapiens
  Table A; Target 59770; HLA-A*24:02; PAX3; ENSG00000135903; TAA
SYQPTSIPQAV

SEQ ID NO: 59771 - protein, 11 aa, Homo sapiens
  Table A; Target 59771; HLA-C*14:02; PAX3; ENSG00000135903; TAA
SYQPTSIPQAV

SEQ ID NO: 59772 - protein, 10 aa, Homo sapiens
  Table A; Target 59772; HLA-A*68:01; PAX3; ENSG00000135903; TAA
TAEQLEELER

SEQ ID NO: 59773 - protein, 10 aa, Homo sapiens
  Table A; Target 59773; HLA-B*27:02; PAX3; ENSG00000135903; TAA
TAEQLEELER

SEQ ID NO: 59774 - protein, 10 aa, Homo sapiens
  Table A; Target 59774; HLA-C*07:06; PAX3; ENSG00000135903; TAA
TAEQLEELER

SEQ ID NO: 59775 - protein, 9 aa, Homo sapiens
  Table A; Target 59775; HLA-A*23:01; PAX3; ENSG00000135903; TAA
TAMPTLPTY

SEQ ID NO: 59776 - protein, 9 aa, Homo sapiens
  Table A; Target 59776; HLA-A*25:01; PAX3; ENSG00000135903; TAA
TAMPTLPTY

SEQ ID NO: 59777 - protein, 9 aa, Homo sapiens
  Table A; Target 59777; HLA-A*26:01; PAX3; ENSG00000135903; TAA
TAMPTLPTY

SEQ ID NO: 59778 - protein, 9 aa, Homo sapiens
  Table A; Target 59778; HLA-A*29:02; PAX3; ENSG00000135903; TAA
TAMPTLPTY

SEQ ID NO: 59779 - protein, 9 aa, Homo sapiens
  Table A; Target 59779; HLA-A*30:02; PAX3; ENSG00000135903; TAA
TAMPTLPTY

SEQ ID NO: 59780 - protein, 9 aa, Homo sapiens
  Table A; Target 59780; HLA-A*32:01; PAX3; ENSG00000135903; TAA
TAMPTLPTY

SEQ ID NO: 59781 - protein, 9 aa, Homo sapiens
  Table A; Target 59781; HLA-B*15:01; PAX3; ENSG00000135903; TAA
TAMPTLPTY

SEQ ID NO: 59782 - protein, 9 aa, Homo sapiens
  Table A; Target 59782; HLA-B*15:03; PAX3; ENSG00000135903; TAA
TAMPTLPTY

SEQ ID NO: 59783 - protein, 9 aa, Homo sapiens
  Table A; Target 59783; HLA-B*18:01; PAX3; ENSG00000135903; TAA
TAMPTLPTY

SEQ ID NO: 59784 - protein, 9 aa, Homo sapiens
  Table A; Target 59784; HLA-B*35:01; PAX3; ENSG00000135903; TAA
TAMPTLPTY

SEQ ID NO: 59785 - protein, 9 aa, Homo sapiens
  Table A; Target 59785; HLA-B*35:03; PAX3; ENSG00000135903; TAA
TAMPTLPTY

SEQ ID NO: 59786 - protein, 9 aa, Homo sapiens
  Table A; Target 59786; HLA-B*39:01; PAX3; ENSG00000135903; TAA
TAMPTLPTY

SEQ ID NO: 59787 - protein, 9 aa, Homo sapiens
  Table A; Target 59787; HLA-B*46:01; PAX3; ENSG00000135903; TAA
TAMPTLPTY

SEQ ID NO: 59788 - protein, 9 aa, Homo sapiens
  Table A; Target 59788; HLA-B*51:01; PAX3; ENSG00000135903; TAA
TAMPTLPTY

SEQ ID NO: 59789 - protein, 9 aa, Homo sapiens
  Table A; Target 59789; HLA-B*54:01; PAX3; ENSG00000135903; TAA
TAMPTLPTY

SEQ ID NO: 59790 - protein, 9 aa, Homo sapiens
  Table A; Target 59790; HLA-B*55:01; PAX3; ENSG00000135903; TAA
TAMPTLPTY

SEQ ID NO: 59791 - protein, 9 aa, Homo sapiens
  Table A; Target 59791; HLA-B*56:01; PAX3; ENSG00000135903; TAA
TAMPTLPTY

SEQ ID NO: 59792 - protein, 9 aa, Homo sapiens
  Table A; Target 59792; HLA-B*57:01; PAX3; ENSG00000135903; TAA
TAMPTLPTY

SEQ ID NO: 59793 - protein, 9 aa, Homo sapiens
  Table A; Target 59793; HLA-B*58:01; PAX3; ENSG00000135903; TAA
TAMPTLPTY

SEQ ID NO: 59794 - protein, 9 aa, Homo sapiens
  Table A; Target 59794; HLA-C*01:02; PAX3; ENSG00000135903; TAA
TAMPTLPTY

SEQ ID NO: 59795 - protein, 9 aa, Homo sapiens
  Table A; Target 59795; HLA-C*02:02; PAX3; ENSG00000135903; TAA
TAMPTLPTY

SEQ ID NO: 59796 - protein, 9 aa, Homo sapiens
  Table A; Target 59796; HLA-C*03:03; PAX3; ENSG00000135903; TAA
TAMPTLPTY

SEQ ID NO: 59797 - protein, 9 aa, Homo sapiens
  Table A; Target 59797; HLA-C*03:04; PAX3; ENSG00000135903; TAA
TAMPTLPTY

SEQ ID NO: 59798 - protein, 9 aa, Homo sapiens
  Table A; Target 59798; HLA-C*07:04; PAX3; ENSG00000135903; TAA
TAMPTLPTY

SEQ ID NO: 59799 - protein, 9 aa, Homo sapiens
  Table A; Target 59799; HLA-C*07:06; PAX3; ENSG00000135903; TAA
TAMPTLPTY

SEQ ID NO: 59800 - protein, 9 aa, Homo sapiens
  Table A; Target 59800; HLA-C*12:03; PAX3; ENSG00000135903; TAA
TAMPTLPTY

SEQ ID NO: 59801 - protein, 9 aa, Homo sapiens
  Table A; Target 59801; HLA-C*14:02; PAX3; ENSG00000135903; TAA
TAMPTLPTY

SEQ ID NO: 59802 - protein, 9 aa, Homo sapiens
  Table A; Target 59802; HLA-C*16:01; PAX3; ENSG00000135903; TAA
TAMPTLPTY

SEQ ID NO: 59803 - protein, 9 aa, Homo sapiens
  Table A; Target 59803; HLA-C*16:02; PAX3; ENSG00000135903; TAA
TAMPTLPTY

SEQ ID NO: 59804 - protein, 9 aa, Homo sapiens
  Table A; Target 59804; HLA-C*16:04; PAX3; ENSG00000135903; TAA
TAMPTLPTY

SEQ ID NO: 59805 - protein, 10 aa, Homo sapiens
  Table A; Target 59805; HLA-C*06:02; PAX3; ENSG00000135903; TAA
TDSFVPPSGP

SEQ ID NO: 59806 - protein, 10 aa, Homo sapiens
  Table A; Target 59806; HLA-C*07:02; PAX3; ENSG00000135903; TAA
TDSFVPPSGP

SEQ ID NO: 59807 - protein, 11 aa, Homo sapiens
  Table A; Target 59807; HLA-C*06:02; PAX3; ENSG00000135903; TAA
TDSFVPPSGPS

SEQ ID NO: 59808 - protein, 8 aa, Homo sapiens
  Table A; Target 59808; HLA-B*37:01; PAX3; ENSG00000135903; TAA
TDYALSPL

SEQ ID NO: 59809 - protein, 10 aa, Homo sapiens
  Table A; Target 59809; HLA-C*12:03; PAX3; ENSG00000135903; TAA
TDYALSPLTG

SEQ ID NO: 59810 - protein, 11 aa, Homo sapiens
  Table A; Target 59810; HLA-A*26:01; PAX3; ENSG00000135903; TAA
TGYSMDPVTGY

SEQ ID NO: 59811 - protein, 11 aa, Homo sapiens
  Table A; Target 59811; HLA-A*30:02; PAX3; ENSG00000135903; TAA
TGYSMDPVTGY

SEQ ID NO: 59812 - protein, 11 aa, Homo sapiens
  Table A; Target 59812; HLA-B*15:03; PAX3; ENSG00000135903; TAA
TGYSMDPVTGY

SEQ ID NO: 59813 - protein, 11 aa, Homo sapiens
  Table A; Target 59813; HLA-B*39:01; PAX3; ENSG00000135903; TAA
TGYSMDPVTGY

SEQ ID NO: 59814 - protein, 11 aa, Homo sapiens
  Table A; Target 59814; HLA-C*12:03; PAX3; ENSG00000135903; TAA
TGYSMDPVTGY

SEQ ID NO: 59815 - protein, 11 aa, Homo sapiens
  Table A; Target 59815; HLA-C*07:04; PAX3; ENSG00000135903; TAA
TIGNGLSPQVM

SEQ ID NO: 59816 - protein, 8 aa, Homo sapiens
  Table A; Target 59816; HLA-A*68:01; PAX3; ENSG00000135903; TAA
TLAGAVPR

SEQ ID NO: 59817 - protein, 8 aa, Homo sapiens
  Table A; Target 59817; HLA-C*07:06; PAX3; ENSG00000135903; TAA
TLAGAVPR

SEQ ID NO: 59818 - protein, 9 aa, Homo sapiens
  Table A; Target 59818; HLA-A*02:01; PAX3; ENSG00000135903; TAA
TLAGAVPRM

SEQ ID NO: 59819 - protein, 9 aa, Homo sapiens
  Table A; Target 59819; HLA-A*02:03; PAX3; ENSG00000135903; TAA
TLAGAVPRM

SEQ ID NO: 59820 - protein, 9 aa, Homo sapiens
  Table A; Target 59820; HLA-A*02:04; PAX3; ENSG00000135903; TAA
TLAGAVPRM

SEQ ID NO: 59821 - protein, 9 aa, Homo sapiens
  Table A; Target 59821; HLA-A*02:07; PAX3; ENSG00000135903; TAA
TLAGAVPRM

SEQ ID NO: 59822 - protein, 9 aa, Homo sapiens
  Table A; Target 59822; HLA-A*03:02; PAX3; ENSG00000135903; TAA
TLAGAVPRM

SEQ ID NO: 59823 - protein, 9 aa, Homo sapiens
  Table A; Target 59823; HLA-A*26:01; PAX3; ENSG00000135903; TAA
TLAGAVPRM

SEQ ID NO: 59824 - protein, 9 aa, Homo sapiens
  Table A; Target 59824; HLA-A*32:01; PAX3; ENSG00000135903; TAA
TLAGAVPRM

SEQ ID NO: 59825 - protein, 9 aa, Homo sapiens
  Table A; Target 59825; HLA-B*13:02; PAX3; ENSG00000135903; TAA
TLAGAVPRM

SEQ ID NO: 59826 - protein, 9 aa, Homo sapiens
  Table A; Target 59826; HLA-B*27:05; PAX3; ENSG00000135903; TAA
TLAGAVPRM

SEQ ID NO: 59827 - protein, 9 aa, Homo sapiens
  Table A; Target 59827; HLA-B*38:01; PAX3; ENSG00000135903; TAA
TLAGAVPRM

SEQ ID NO: 59828 - protein, 9 aa, Homo sapiens
  Table A; Target 59828; HLA-B*39:01; PAX3; ENSG00000135903; TAA
TLAGAVPRM

SEQ ID NO: 59829 - protein, 9 aa, Homo sapiens
  Table A; Target 59829; HLA-B*55:01; PAX3; ENSG00000135903; TAA
TLAGAVPRM

SEQ ID NO: 59830 - protein, 9 aa, Homo sapiens
  Table A; Target 59830; HLA-C*07:04; PAX3; ENSG00000135903; TAA
TLAGAVPRM

SEQ ID NO: 59831 - protein, 9 aa, Homo sapiens
  Table A; Target 59831; HLA-C*16:01; PAX3; ENSG00000135903; TAA
TLAGAVPRM

SEQ ID NO: 59832 - protein, 9 aa, Homo sapiens
  Table A; Target 59832; HLA-C*16:02; PAX3; ENSG00000135903; TAA
TLAGAVPRM

SEQ ID NO: 59833 - protein, 10 aa, Homo sapiens
  Table A; Target 59833; HLA-A*30:02; PAX3; ENSG00000135903; TAA
TSQSYCPPTY

SEQ ID NO: 59834 - protein, 10 aa, Homo sapiens
  Table A; Target 59834; HLA-B*39:01; PAX3; ENSG00000135903; TAA
TSQSYCPPTY

SEQ ID NO: 59835 - protein, 10 aa, Homo sapiens
  Table A; Target 59835; HLA-C*07:01; PAX3; ENSG00000135903; TAA
TSQSYCPPTY

SEQ ID NO: 59836 - protein, 8 aa, Homo sapiens
  Table A; Target 59836; HLA-B*13:02; PAX3; ENSG00000135903; TAA
TSYQPTSI

SEQ ID NO: 59837 - protein, 8 aa, Homo sapiens
  Table A; Target 59837; HLA-B*51:01; PAX3; ENSG00000135903; TAA
TSYQPTSI

SEQ ID NO: 59838 - protein, 8 aa, Homo sapiens
  Table A; Target 59838; HLA-C*05:01; PAX3; ENSG00000135903; TAA
TSYQPTSI

SEQ ID NO: 59839 - protein, 9 aa, Homo sapiens
  Table A; Target 59839; HLA-A*03:01; PAX3; ENSG00000135903; TAA
TTLAGAVPR

SEQ ID NO: 59840 - protein, 9 aa, Homo sapiens
  Table A; Target 59840; HLA-A*03:02; PAX3; ENSG00000135903; TAA
TTLAGAVPR

SEQ ID NO: 59841 - protein, 9 aa, Homo sapiens
  Table A; Target 59841; HLA-A*11:01; PAX3; ENSG00000135903; TAA
TTLAGAVPR

SEQ ID NO: 59842 - protein, 9 aa, Homo sapiens
  Table A; Target 59842; HLA-A*31:01; PAX3; ENSG00000135903; TAA
TTLAGAVPR

SEQ ID NO: 59843 - protein, 9 aa, Homo sapiens
  Table A; Target 59843; HLA-A*33:01; PAX3; ENSG00000135903; TAA
TTLAGAVPR

SEQ ID NO: 59844 - protein, 9 aa, Homo sapiens
  Table A; Target 59844; HLA-A*33:03; PAX3; ENSG00000135903; TAA
TTLAGAVPR

SEQ ID NO: 59845 - protein, 9 aa, Homo sapiens
  Table A; Target 59845; HLA-A*68:01; PAX3; ENSG00000135903; TAA
TTLAGAVPR

SEQ ID NO: 59846 - protein, 9 aa, Homo sapiens
  Table A; Target 59846; HLA-B*27:02; PAX3; ENSG00000135903; TAA
TTLAGAVPR

SEQ ID NO: 59847 - protein, 9 aa, Homo sapiens
  Table A; Target 59847; HLA-B*27:05; PAX3; ENSG00000135903; TAA
TTLAGAVPR

SEQ ID NO: 59848 - protein, 9 aa, Homo sapiens
  Table A; Target 59848; HLA-C*07:06; PAX3; ENSG00000135903; TAA
TTLAGAVPR

SEQ ID NO: 59849 - protein, 10 aa, Homo sapiens
  Table A; Target 59849; HLA-A*02:01; PAX3; ENSG00000135903; TAA
TTLAGAVPRM

SEQ ID NO: 59850 - protein, 10 aa, Homo sapiens
  Table A; Target 59850; HLA-A*02:04; PAX3; ENSG00000135903; TAA
TTLAGAVPRM

SEQ ID NO: 59851 - protein, 10 aa, Homo sapiens
  Table A; Target 59851; HLA-A*03:02; PAX3; ENSG00000135903; TAA
TTLAGAVPRM

SEQ ID NO: 59852 - protein, 10 aa, Homo sapiens
  Table A; Target 59852; HLA-A*11:01; PAX3; ENSG00000135903; TAA
TTLAGAVPRM

SEQ ID NO: 59853 - protein, 10 aa, Homo sapiens
  Table A; Target 59853; HLA-A*26:01; PAX3; ENSG00000135903; TAA
TTLAGAVPRM

SEQ ID NO: 59854 - protein, 10 aa, Homo sapiens
  Table A; Target 59854; HLA-A*68:01; PAX3; ENSG00000135903; TAA
TTVSASCSQR

SEQ ID NO: 59855 - protein, 10 aa, Homo sapiens
  Table A; Target 59855; HLA-C*07:06; PAX3; ENSG00000135903; TAA
TTVSASCSQR

SEQ ID NO: 59856 - protein, 8 aa, Homo sapiens
  Table A; Target 59856; HLA-B*51:01; PAX3; ENSG00000135903; TAA
TVPSVSSI

SEQ ID NO: 59857 - protein, 8 aa, Homo sapiens
  Table A; Target 59857; HLA-C*01:02; PAX3; ENSG00000135903; TAA
TVPSVSSI

SEQ ID NO: 59858 - protein, 10 aa, Homo sapiens
  Table A; Target 59858; HLA-A*31:01; PAX3; ENSG00000135903; TAA
TVPSVSSISR

SEQ ID NO: 59859 - protein, 10 aa, Homo sapiens
  Table A; Target 59859; HLA-A*33:03; PAX3; ENSG00000135903; TAA
TVPSVSSISR

SEQ ID NO: 59860 - protein, 10 aa, Homo sapiens
  Table A; Target 59860; HLA-A*68:01; PAX3; ENSG00000135903; TAA
TVPSVSSISR

SEQ ID NO: 59861 - protein, 10 aa, Homo sapiens
  Table A; Target 59861; HLA-C*07:06; PAX3; ENSG00000135903; TAA
TVPSVSSISR

SEQ ID NO: 59862 - protein, 11 aa, Homo sapiens
  Table A; Target 59862; HLA-A*02:07; PAX3; ENSG00000135903; TAA
TVPSVSSISRI

SEQ ID NO: 59863 - protein, 11 aa, Homo sapiens
  Table A; Target 59863; HLA-A*68:02; PAX3; ENSG00000135903; TAA
TVPSVSSISRI

SEQ ID NO: 59864 - protein, 9 aa, Homo sapiens
  Table A; Target 59864; HLA-A*33:03; PAX3; ENSG00000135903; TAA
TVSASCSQR

SEQ ID NO: 59865 - protein, 9 aa, Homo sapiens
  Table A; Target 59865; HLA-A*68:01; PAX3; ENSG00000135903; TAA
TVSASCSQR

SEQ ID NO: 59866 - protein, 9 aa, Homo sapiens
  Table A; Target 59866; HLA-C*07:06; PAX3; ENSG00000135903; TAA
TVSASCSQR

SEQ ID NO: 59867 - protein, 9 aa, Homo sapiens
  Table A; Target 59867; HLA-A*23:01; PAX3; ENSG00000135903; TAA
TYQLSETSY

SEQ ID NO: 59868 - protein, 9 aa, Homo sapiens
  Table A; Target 59868; HLA-A*30:02; PAX3; ENSG00000135903; TAA
TYQLSETSY

SEQ ID NO: 59869 - protein, 9 aa, Homo sapiens
  Table A; Target 59869; HLA-A*32:01; PAX3; ENSG00000135903; TAA
TYQLSETSY

SEQ ID NO: 59870 - protein, 9 aa, Homo sapiens
  Table A; Target 59870; HLA-B*15:01; PAX3; ENSG00000135903; TAA
TYQLSETSY

SEQ ID NO: 59871 - protein, 9 aa, Homo sapiens
  Table A; Target 59871; HLA-B*15:03; PAX3; ENSG00000135903; TAA
TYQLSETSY

SEQ ID NO: 59872 - protein, 9 aa, Homo sapiens
  Table A; Target 59872; HLA-C*01:02; PAX3; ENSG00000135903; TAA
TYQLSETSY

SEQ ID NO: 59873 - protein, 9 aa, Homo sapiens
  Table A; Target 59873; HLA-C*04:01; PAX3; ENSG00000135903; TAA
TYQLSETSY

SEQ ID NO: 59874 - protein, 9 aa, Homo sapiens
  Table A; Target 59874; HLA-C*07:04; PAX3; ENSG00000135903; TAA
TYQLSETSY

SEQ ID NO: 59875 - protein, 9 aa, Homo sapiens
  Table A; Target 59875; HLA-C*14:02; PAX3; ENSG00000135903; TAA
TYQLSETSY

SEQ ID NO: 59876 - protein, 9 aa, Homo sapiens
  Table A; Target 59876; HLA-A*23:01; PAX3; ENSG00000135903; TAA
TYSTTGYSM

SEQ ID NO: 59877 - protein, 9 aa, Homo sapiens
  Table A; Target 59877; HLA-A*24:02; PAX3; ENSG00000135903; TAA
TYSTTGYSM

SEQ ID NO: 59878 - protein, 9 aa, Homo sapiens
  Table A; Target 59878; HLA-C*14:02; PAX3; ENSG00000135903; TAA
TYSTTGYSM

SEQ ID NO: 59879 - protein, 9 aa, Homo sapiens
  Table A; Target 59879; HLA-A*30:02; PAX3; ENSG00000135903; TAA
VPHQPQTDY

SEQ ID NO: 59880 - protein, 9 aa, Homo sapiens
  Table A; Target 59880; HLA-B*07:02; PAX3; ENSG00000135903; TAA
VPHQPQTDY

SEQ ID NO: 59881 - protein, 9 aa, Homo sapiens
  Table A; Target 59881; HLA-B*15:01; PAX3; ENSG00000135903; TAA
VPHQPQTDY

SEQ ID NO: 59882 - protein, 9 aa, Homo sapiens
  Table A; Target 59882; HLA-B*15:03; PAX3; ENSG00000135903; TAA
VPHQPQTDY

SEQ ID NO: 59883 - protein, 9 aa, Homo sapiens
  Table A; Target 59883; HLA-B*35:01; PAX3; ENSG00000135903; TAA
VPHQPQTDY

SEQ ID NO: 59884 - protein, 9 aa, Homo sapiens
  Table A; Target 59884; HLA-B*46:01; PAX3; ENSG00000135903; TAA
VPHQPQTDY

SEQ ID NO: 59885 - protein, 9 aa, Homo sapiens
  Table A; Target 59885; HLA-B*55:01; PAX3; ENSG00000135903; TAA
VPHQPQTDY

SEQ ID NO: 59886 - protein, 9 aa, Homo sapiens
  Table A; Target 59886; HLA-C*07:02; PAX3; ENSG00000135903; TAA
VPHQPQTDY

SEQ ID NO: 59887 - protein, 11 aa, Homo sapiens
  Table A; Target 59887; HLA-B*35:03; PAX3; ENSG00000135903; TAA
VPHQPQTDYAL

SEQ ID NO: 59888 - protein, 11 aa, Homo sapiens
  Table A; Target 59888; HLA-B*55:01; PAX3; ENSG00000135903; TAA
VPHQPQTDYAL

SEQ ID NO: 59889 - protein, 10 aa, Homo sapiens
  Table A; Target 59889; HLA-B*07:02; PAX3; ENSG00000135903; TAA
VPPSGPSNPM

SEQ ID NO: 59890 - protein, 10 aa, Homo sapiens
  Table A; Target 59890; HLA-B*35:01; PAX3; ENSG00000135903; TAA
VPPSGPSNPM

SEQ ID NO: 59891 - protein, 10 aa, Homo sapiens
  Table A; Target 59891; HLA-B*35:03; PAX3; ENSG00000135903; TAA
VPPSGPSNPM

SEQ ID NO: 59892 - protein, 10 aa, Homo sapiens
  Table A; Target 59892; HLA-B*51:01; PAX3; ENSG00000135903; TAA
VPPSGPSNPM

SEQ ID NO: 59893 - protein, 10 aa, Homo sapiens
  Table A; Target 59893; HLA-B*56:01; PAX3; ENSG00000135903; TAA
VPPSGPSNPM

SEQ ID NO: 59894 - protein, 10 aa, Homo sapiens
  Table A; Target 59894; HLA-C*01:02; PAX3; ENSG00000135903; TAA
VPPSGPSNPM

SEQ ID NO: 59895 - protein, 10 aa, Homo sapiens
  Table A; Target 59895; HLA-C*05:01; PAX3; ENSG00000135903; TAA
VPPSGPSNPM

SEQ ID NO: 59896 - protein, 10 aa, Homo sapiens
  Table A; Target 59896; HLA-C*07:02; PAX3; ENSG00000135903; TAA
VPPSGPSNPM

SEQ ID NO: 59897 - protein, 9 aa, Homo sapiens
  Table A; Target 59897; HLA-A*68:01; PAX3; ENSG00000135903; TAA
VPSVSSISR

SEQ ID NO: 59898 - protein, 9 aa, Homo sapiens
  Table A; Target 59898; HLA-C*07:06; PAX3; ENSG00000135903; TAA
VPSVSSISR

SEQ ID NO: 59899 - protein, 10 aa, Homo sapiens
  Table A; Target 59899; HLA-B*07:02; PAX3; ENSG00000135903; TAA
VPSVSSISRI

SEQ ID NO: 59900 - protein, 11 aa, Homo sapiens
  Table A; Target 59900; HLA-B*07:02; PAX3; ENSG00000135903; TAA
VPSVSSISRIL

SEQ ID NO: 59901 - protein, 11 aa, Homo sapiens
  Table A; Target 59901; HLA-C*07:02; PAX3; ENSG00000135903; TAA
VPSVSSISRIL

SEQ ID NO: 59902 - protein, 9 aa, Homo sapiens
  Table A; Target 59902; HLA-C*03:04; PAX3; ENSG00000135903; TAA
VSASCSQRL

SEQ ID NO: 59903 - protein, 9 aa, Homo sapiens
  Table A; Target 59903; HLA-C*16:01; PAX3; ENSG00000135903; TAA
VSASCSQRL

SEQ ID NO: 59904 - protein, 8 aa, Homo sapiens
  Table A; Target 59904; HLA-C*05:01; PAX3; ENSG00000135903; TAA
VSDPSSTV

SEQ ID NO: 59905 - protein, 9 aa, Homo sapiens
  Table A; Target 59905; HLA-A*01:01; PAX3; ENSG00000135903; TAA
VSDPSSTVH

SEQ ID NO: 59906 - protein, 9 aa, Homo sapiens
  Table A; Target 59906; HLA-C*03:03; PAX3; ENSG00000135903; TAA
VSDPSSTVH

SEQ ID NO: 59907 - protein, 9 aa, Homo sapiens
  Table A; Target 59907; HLA-C*05:01; PAX3; ENSG00000135903; TAA
VSDPSSTVH

SEQ ID NO: 59908 - protein, 10 aa, Homo sapiens
  Table A; Target 59908; HLA-A*01:01; PAX3; ENSG00000135903; TAA
VSDPSSTVHR

SEQ ID NO: 59909 - protein, 10 aa, Homo sapiens
  Table A; Target 59909; HLA-A*11:01; PAX3; ENSG00000135903; TAA
VSDPSSTVHR

SEQ ID NO: 59910 - protein, 10 aa, Homo sapiens
  Table A; Target 59910; HLA-A*68:01; PAX3; ENSG00000135903; TAA
VSDPSSTVHR

SEQ ID NO: 59911 - protein, 10 aa, Homo sapiens
  Table A; Target 59911; HLA-C*07:06; PAX3; ENSG00000135903; TAA
VSDPSSTVHR

SEQ ID NO: 59912 - protein, 8 aa, Homo sapiens
  Table A; Target 59912; HLA-C*03:04; PAX3; ENSG00000135903; TAA
VSSISRIL

SEQ ID NO: 59913 - protein, 8 aa, Homo sapiens
  Table A; Target 59913; HLA-C*16:01; PAX3; ENSG00000135903; TAA
VSSISRIL

SEQ ID NO: 59914 - protein, 9 aa, Homo sapiens
  Table A; Target 59914; HLA-A*31:01; PAX3; ENSG00000135903; TAA
VSSISRILR

SEQ ID NO: 59915 - protein, 9 aa, Homo sapiens
  Table A; Target 59915; HLA-A*01:01; PAX3; ENSG00000135903; TAA
VTGYQYGQY

SEQ ID NO: 59916 - protein, 9 aa, Homo sapiens
  Table A; Target 59916; HLA-A*26:01; PAX3; ENSG00000135903; TAA
VTGYQYGQY

SEQ ID NO: 59917 - protein, 9 aa, Homo sapiens
  Table A; Target 59917; HLA-A*30:02; PAX3; ENSG00000135903; TAA
VTGYQYGQY

SEQ ID NO: 59918 - protein, 9 aa, Homo sapiens
  Table A; Target 59918; HLA-A*03:02; PAX3; ENSG00000135903; TAA
VTTPDVEKK

SEQ ID NO: 59919 - protein, 9 aa, Homo sapiens
  Table A; Target 59919; HLA-A*11:01; PAX3; ENSG00000135903; TAA
VTTPDVEKK

SEQ ID NO: 59920 - protein, 10 aa, Homo sapiens
  Table A; Target 59920; HLA-B*57:01; PAX3; ENSG00000135903; TAA
YCLPSTRHGF

SEQ ID NO: 59921 - protein, 10 aa, Homo sapiens
  Table A; Target 59921; HLA-C*07:02; PAX3; ENSG00000135903; TAA
YCPPTYSTTG

SEQ ID NO: 59922 - protein, 9 aa, Homo sapiens
  Table A; Target 59922; HLA-A*02:04; PAX3; ENSG00000135903; TAA
YGQSKPWTF

SEQ ID NO: 59923 - protein, 9 aa, Homo sapiens
  Table A; Target 59923; HLA-A*23:01; PAX3; ENSG00000135903; TAA
YGQSKPWTF

SEQ ID NO: 59924 - protein, 9 aa, Homo sapiens
  Table A; Target 59924; HLA-A*24:02; PAX3; ENSG00000135903; TAA
YGQSKPWTF

SEQ ID NO: 59925 - protein, 9 aa, Homo sapiens
  Table A; Target 59925; HLA-A*31:01; PAX3; ENSG00000135903; TAA
YGQSKPWTF

SEQ ID NO: 59926 - protein, 9 aa, Homo sapiens
  Table A; Target 59926; HLA-A*32:01; PAX3; ENSG00000135903; TAA
YGQSKPWTF

SEQ ID NO: 59927 - protein, 9 aa, Homo sapiens
  Table A; Target 59927; HLA-B*08:01; PAX3; ENSG00000135903; TAA
YGQSKPWTF

SEQ ID NO: 59928 - protein, 9 aa, Homo sapiens
  Table A; Target 59928; HLA-B*54:01; PAX3; ENSG00000135903; TAA
YGQSKPWTF

SEQ ID NO: 59929 - protein, 9 aa, Homo sapiens
  Table A; Target 59929; HLA-B*57:01; PAX3; ENSG00000135903; TAA
YGQSKPWTF

SEQ ID NO: 59930 - protein, 9 aa, Homo sapiens
  Table A; Target 59930; HLA-B*58:01; PAX3; ENSG00000135903; TAA
YGQSKPWTF

SEQ ID NO: 59931 - protein, 9 aa, Homo sapiens
  Table A; Target 59931; HLA-C*02:02; PAX3; ENSG00000135903; TAA
YGQSKPWTF

SEQ ID NO: 59932 - protein, 9 aa, Homo sapiens
  Table A; Target 59932; HLA-C*04:01; PAX3; ENSG00000135903; TAA
YGQSKPWTF

SEQ ID NO: 59933 - protein, 9 aa, Homo sapiens
  Table A; Target 59933; HLA-C*06:02; PAX3; ENSG00000135903; TAA
YGQSKPWTF

SEQ ID NO: 59934 - protein, 9 aa, Homo sapiens
  Table A; Target 59934; HLA-C*07:01; PAX3; ENSG00000135903; TAA
YGQSKPWTF

SEQ ID NO: 59935 - protein, 9 aa, Homo sapiens
  Table A; Target 59935; HLA-C*07:02; PAX3; ENSG00000135903; TAA
YGQSKPWTF

SEQ ID NO: 59936 - protein, 9 aa, Homo sapiens
  Table A; Target 59936; HLA-C*07:04; PAX3; ENSG00000135903; TAA
YGQSKPWTF

SEQ ID NO: 59937 - protein, 9 aa, Homo sapiens
  Table A; Target 59937; HLA-C*12:03; PAX3; ENSG00000135903; TAA
YGQSKPWTF

SEQ ID NO: 59938 - protein, 9 aa, Homo sapiens
  Table A; Target 59938; HLA-C*16:01; PAX3; ENSG00000135903; TAA
YGQSKPWTF

SEQ ID NO: 59939 - protein, 9 aa, Homo sapiens
  Table A; Target 59939; HLA-C*16:02; PAX3; ENSG00000135903; TAA
YGQSKPWTF

SEQ ID NO: 59940 - protein, 8 aa, Homo sapiens
  Table A; Target 59940; HLA-B*07:02; PAX3; ENSG00000135903; TAA
YPRSGFPL

SEQ ID NO: 59941 - protein, 10 aa, Homo sapiens
  Table A; Target 59941; HLA-B*07:02; PAX3; ENSG00000135903; TAA
YPRSGFPLEV

SEQ ID NO: 59942 - protein, 10 aa, Homo sapiens
  Table A; Target 59942; HLA-B*51:01; PAX3; ENSG00000135903; TAA
YPRSGFPLEV

SEQ ID NO: 59943 - protein, 10 aa, Homo sapiens
  Table A; Target 59943; HLA-B*54:01; PAX3; ENSG00000135903; TAA
YPRSGFPLEV

SEQ ID NO: 59944 - protein, 10 aa, Homo sapiens
  Table A; Target 59944; HLA-B*56:01; PAX3; ENSG00000135903; TAA
YPRSGFPLEV

SEQ ID NO: 59945 - protein, 10 aa, Homo sapiens
  Table A; Target 59945; HLA-C*07:02; PAX3; ENSG00000135903; TAA
YPRSGFPLEV

SEQ ID NO: 59946 - protein, 8 aa, Homo sapiens
  Table A; Target 59946; HLA-B*15:01; PAX3; ENSG00000135903; TAA
YQLSETSY

SEQ ID NO: 59947 - protein, 8 aa, Homo sapiens
  Table A; Target 59947; HLA-B*15:03; PAX3; ENSG00000135903; TAA
YQLSETSY

SEQ ID NO: 59948 - protein, 8 aa, Homo sapiens
  Table A; Target 59948; HLA-B*39:01; PAX3; ENSG00000135903; TAA
YQLSETSY

SEQ ID NO: 59949 - protein, 10 aa, Homo sapiens
  Table A; Target 59949; HLA-B*27:05; PAX3; ENSG00000135903; TAA
YQLSETSYQP

SEQ ID NO: 59950 - protein, 9 aa, Homo sapiens
  Table A; Target 59950; HLA-A*02:01; PAX3; ENSG00000135903; TAA
YQPTSIPQA

SEQ ID NO: 59951 - protein, 9 aa, Homo sapiens
  Table A; Target 59951; HLA-A*02:03; PAX3; ENSG00000135903; TAA
YQPTSIPQA

SEQ ID NO: 59952 - protein, 9 aa, Homo sapiens
  Table A; Target 59952; HLA-A*02:04; PAX3; ENSG00000135903; TAA
YQPTSIPQA

SEQ ID NO: 59953 - protein, 9 aa, Homo sapiens
  Table A; Target 59953; HLA-A*02:07; PAX3; ENSG00000135903; TAA
YQPTSIPQA

SEQ ID NO: 59954 - protein, 9 aa, Homo sapiens
  Table A; Target 59954; HLA-B*13:02; PAX3; ENSG00000135903; TAA
YQPTSIPQA

SEQ ID NO: 59955 - protein, 10 aa, Homo sapiens
  Table A; Target 59955; HLA-A*02:01; PAX3; ENSG00000135903; TAA
YQPTSIPQAV

SEQ ID NO: 59956 - protein, 10 aa, Homo sapiens
  Table A; Target 59956; HLA-A*02:03; PAX3; ENSG00000135903; TAA
YQPTSIPQAV

SEQ ID NO: 59957 - protein, 10 aa, Homo sapiens
  Table A; Target 59957; HLA-A*02:07; PAX3; ENSG00000135903; TAA
YQPTSIPQAV

SEQ ID NO: 59958 - protein, 10 aa, Homo sapiens
  Table A; Target 59958; HLA-A*26:01; PAX3; ENSG00000135903; TAA
YQPTSIPQAV

SEQ ID NO: 59959 - protein, 10 aa, Homo sapiens
  Table A; Target 59959; HLA-A*30:01; PAX3; ENSG00000135903; TAA
YQPTSIPQAV

SEQ ID NO: 59960 - protein, 10 aa, Homo sapiens
  Table A; Target 59960; HLA-B*13:02; PAX3; ENSG00000135903; TAA
YQPTSIPQAV

SEQ ID NO: 59961 - protein, 10 aa, Homo sapiens
  Table A; Target 59961; HLA-C*06:02; PAX3; ENSG00000135903; TAA
YQPTSIPQAV

SEQ ID NO: 59962 - protein, 10 aa, Homo sapiens
  Table A; Target 59962; HLA-A*03:01; PAX3; ENSG00000135903; TAA
YQYGQYGQSK

SEQ ID NO: 59963 - protein, 10 aa, Homo sapiens
  Table A; Target 59963; HLA-A*03:02; PAX3; ENSG00000135903; TAA
YQYGQYGQSK

SEQ ID NO: 59964 - protein, 10 aa, Homo sapiens
  Table A; Target 59964; HLA-A*11:01; PAX3; ENSG00000135903; TAA
YQYGQYGQSK

SEQ ID NO: 59965 - protein, 10 aa, Homo sapiens
  Table A; Target 59965; HLA-B*13:02; PAX3; ENSG00000135903; TAA
YQYGQYGQSK

SEQ ID NO: 59966 - protein, 10 aa, Homo sapiens
  Table A; Target 59966; HLA-B*15:03; PAX3; ENSG00000135903; TAA
YQYGQYGQSK

SEQ ID NO: 59967 - protein, 10 aa, Homo sapiens
  Table A; Target 59967; HLA-B*27:02; PAX3; ENSG00000135903; TAA
YQYGQYGQSK

SEQ ID NO: 59968 - protein, 10 aa, Homo sapiens
  Table A; Target 59968; HLA-B*27:05; PAX3; ENSG00000135903; TAA
YQYGQYGQSK

SEQ ID NO: 59969 - protein, 10 aa, Homo sapiens
  Table A; Target 59969; HLA-B*39:01; PAX3; ENSG00000135903; TAA
YQYGQYGQSK

SEQ ID NO: 59970 - protein, 10 aa, Homo sapiens
  Table A; Target 59970; HLA-B*40:02; PAX3; ENSG00000135903; TAA
YQYGQYGQSK

SEQ ID NO: 59971 - protein, 10 aa, Homo sapiens
  Table A; Target 59971; HLA-C*02:02; PAX3; ENSG00000135903; TAA
YQYGQYGQSK

SEQ ID NO: 59972 - protein, 10 aa, Homo sapiens
  Table A; Target 59972; HLA-C*03:03; PAX3; ENSG00000135903; TAA
YQYGQYGQSK

SEQ ID NO: 59973 - protein, 9 aa, Homo sapiens
  Table A; Target 59973; HLA-A*01:01; PAX3; ENSG00000135903; TAA
YSMDPVTGY

SEQ ID NO: 59974 - protein, 9 aa, Homo sapiens
  Table A; Target 59974; HLA-A*02:03; PAX3; ENSG00000135903; TAA
YSMDPVTGY

SEQ ID NO: 59975 - protein, 9 aa, Homo sapiens
  Table A; Target 59975; HLA-A*02:07; PAX3; ENSG00000135903; TAA
YSMDPVTGY

SEQ ID NO: 59976 - protein, 9 aa, Homo sapiens
  Table A; Target 59976; HLA-A*03:01; PAX3; ENSG00000135903; TAA
YSMDPVTGY

SEQ ID NO: 59977 - protein, 9 aa, Homo sapiens
  Table A; Target 59977; HLA-A*03:02; PAX3; ENSG00000135903; TAA
YSMDPVTGY

SEQ ID NO: 59978 - protein, 9 aa, Homo sapiens
  Table A; Target 59978; HLA-A*11:01; PAX3; ENSG00000135903; TAA
YSMDPVTGY

SEQ ID NO: 59979 - protein, 9 aa, Homo sapiens
  Table A; Target 59979; HLA-A*23:01; PAX3; ENSG00000135903; TAA
YSMDPVTGY

SEQ ID NO: 59980 - protein, 9 aa, Homo sapiens
  Table A; Target 59980; HLA-A*25:01; PAX3; ENSG00000135903; TAA
YSMDPVTGY

SEQ ID NO: 59981 - protein, 9 aa, Homo sapiens
  Table A; Target 59981; HLA-A*26:01; PAX3; ENSG00000135903; TAA
YSMDPVTGY

SEQ ID NO: 59982 - protein, 9 aa, Homo sapiens
  Table A; Target 59982; HLA-A*29:02; PAX3; ENSG00000135903; TAA
YSMDPVTGY

SEQ ID NO: 59983 - protein, 9 aa, Homo sapiens
  Table A; Target 59983; HLA-A*30:02; PAX3; ENSG00000135903; TAA
YSMDPVTGY

SEQ ID NO: 59984 - protein, 9 aa, Homo sapiens
  Table A; Target 59984; HLA-A*31:01; PAX3; ENSG00000135903; TAA
YSMDPVTGY

SEQ ID NO: 59985 - protein, 9 aa, Homo sapiens
  Table A; Target 59985; HLA-A*32:01; PAX3; ENSG00000135903; TAA
YSMDPVTGY

SEQ ID NO: 59986 - protein, 9 aa, Homo sapiens
  Table A; Target 59986; HLA-A*33:01; PAX3; ENSG00000135903; TAA
YSMDPVTGY

SEQ ID NO: 59987 - protein, 9 aa, Homo sapiens
  Table A; Target 59987; HLA-A*33:03; PAX3; ENSG00000135903; TAA
YSMDPVTGY

SEQ ID NO: 59988 - protein, 9 aa, Homo sapiens
  Table A; Target 59988; HLA-A*68:01; PAX3; ENSG00000135903; TAA
YSMDPVTGY

SEQ ID NO: 59989 - protein, 9 aa, Homo sapiens
  Table A; Target 59989; HLA-B*13:02; PAX3; ENSG00000135903; TAA
YSMDPVTGY

SEQ ID NO: 59990 - protein, 9 aa, Homo sapiens
  Table A; Target 59990; HLA-B*15:01; PAX3; ENSG00000135903; TAA
YSMDPVTGY

SEQ ID NO: 59991 - protein, 9 aa, Homo sapiens
  Table A; Target 59991; HLA-B*15:03; PAX3; ENSG00000135903; TAA
YSMDPVTGY

SEQ ID NO: 59992 - protein, 9 aa, Homo sapiens
  Table A; Target 59992; HLA-B*18:01; PAX3; ENSG00000135903; TAA
YSMDPVTGY

SEQ ID NO: 59993 - protein, 9 aa, Homo sapiens
  Table A; Target 59993; HLA-B*27:02; PAX3; ENSG00000135903; TAA
YSMDPVTGY

SEQ ID NO: 59994 - protein, 9 aa, Homo sapiens
  Table A; Target 59994; HLA-B*27:05; PAX3; ENSG00000135903; TAA
YSMDPVTGY

SEQ ID NO: 59995 - protein, 9 aa, Homo sapiens
  Table A; Target 59995; HLA-B*35:01; PAX3; ENSG00000135903; TAA
YSMDPVTGY

SEQ ID NO: 59996 - protein, 9 aa, Homo sapiens
  Table A; Target 59996; HLA-B*37:01; PAX3; ENSG00000135903; TAA
YSMDPVTGY

SEQ ID NO: 59997 - protein, 9 aa, Homo sapiens
  Table A; Target 59997; HLA-B*38:01; PAX3; ENSG00000135903; TAA
YSMDPVTGY

SEQ ID NO: 59998 - protein, 9 aa, Homo sapiens
  Table A; Target 59998; HLA-B*39:01; PAX3; ENSG00000135903; TAA
YSMDPVTGY

SEQ ID NO: 59999 - protein, 9 aa, Homo sapiens
  Table A; Target 59999; HLA-B*44:02; PAX3; ENSG00000135903; TAA
YSMDPVTGY

SEQ ID NO: 60000 - protein, 9 aa, Homo sapiens
  Table A; Target 60000; HLA-B*44:03; PAX3; ENSG00000135903; TAA
YSMDPVTGY

SEQ ID NO: 60001 - protein, 9 aa, Homo sapiens
  Table A; Target 60001; HLA-B*46:01; PAX3; ENSG00000135903; TAA
YSMDPVTGY

SEQ ID NO: 60002 - protein, 9 aa, Homo sapiens
  Table A; Target 60002; HLA-B*55:01; PAX3; ENSG00000135903; TAA
YSMDPVTGY

SEQ ID NO: 60003 - protein, 9 aa, Homo sapiens
  Table A; Target 60003; HLA-B*57:01; PAX3; ENSG00000135903; TAA
YSMDPVTGY

SEQ ID NO: 60004 - protein, 9 aa, Homo sapiens
  Table A; Target 60004; HLA-B*58:01; PAX3; ENSG00000135903; TAA
YSMDPVTGY

SEQ ID NO: 60005 - protein, 9 aa, Homo sapiens
  Table A; Target 60005; HLA-C*01:02; PAX3; ENSG00000135903; TAA
YSMDPVTGY

SEQ ID NO: 60006 - protein, 9 aa, Homo sapiens
  Table A; Target 60006; HLA-C*02:02; PAX3; ENSG00000135903; TAA
YSMDPVTGY

SEQ ID NO: 60007 - protein, 9 aa, Homo sapiens
  Table A; Target 60007; HLA-C*03:03; PAX3; ENSG00000135903; TAA
YSMDPVTGY

SEQ ID NO: 60008 - protein, 9 aa, Homo sapiens
  Table A; Target 60008; HLA-C*03:04; PAX3; ENSG00000135903; TAA
YSMDPVTGY

SEQ ID NO: 60009 - protein, 9 aa, Homo sapiens
  Table A; Target 60009; HLA-C*04:01; PAX3; ENSG00000135903; TAA
YSMDPVTGY

SEQ ID NO: 60010 - protein, 9 aa, Homo sapiens
  Table A; Target 60010; HLA-C*05:01; PAX3; ENSG00000135903; TAA
YSMDPVTGY

SEQ ID NO: 60011 - protein, 9 aa, Homo sapiens
  Table A; Target 60011; HLA-C*07:01; PAX3; ENSG00000135903; TAA
YSMDPVTGY

SEQ ID NO: 60012 - protein, 9 aa, Homo sapiens
  Table A; Target 60012; HLA-C*07:04; PAX3; ENSG00000135903; TAA
YSMDPVTGY

SEQ ID NO: 60013 - protein, 9 aa, Homo sapiens
  Table A; Target 60013; HLA-C*07:06; PAX3; ENSG00000135903; TAA
YSMDPVTGY

SEQ ID NO: 60014 - protein, 9 aa, Homo sapiens
  Table A; Target 60014; HLA-C*12:03; PAX3; ENSG00000135903; TAA
YSMDPVTGY

SEQ ID NO: 60015 - protein, 9 aa, Homo sapiens
  Table A; Target 60015; HLA-C*14:02; PAX3; ENSG00000135903; TAA
YSMDPVTGY

SEQ ID NO: 60016 - protein, 9 aa, Homo sapiens
  Table A; Target 60016; HLA-C*16:01; PAX3; ENSG00000135903; TAA
YSMDPVTGY

SEQ ID NO: 60017 - protein, 9 aa, Homo sapiens
  Table A; Target 60017; HLA-C*16:02; PAX3; ENSG00000135903; TAA
YSMDPVTGY

SEQ ID NO: 60018 - protein, 9 aa, Homo sapiens
  Table A; Target 60018; HLA-C*16:04; PAX3; ENSG00000135903; TAA
YSMDPVTGY

SEQ ID NO: 60019 - protein, 10 aa, Homo sapiens
  Table A; Target 60019; HLA-A*01:01; PAX3; ENSG00000135903; TAA
YSMDPVTGYQ

SEQ ID NO: 60020 - protein, 11 aa, Homo sapiens
  Table A; Target 60020; HLA-A*01:01; PAX3; ENSG00000135903; TAA
YSMDPVTGYQY

SEQ ID NO: 60021 - protein, 11 aa, Homo sapiens
  Table A; Target 60021; HLA-A*03:01; PAX3; ENSG00000135903; TAA
YSMDPVTGYQY

SEQ ID NO: 60022 - protein, 11 aa, Homo sapiens
  Table A; Target 60022; HLA-A*03:02; PAX3; ENSG00000135903; TAA
YSMDPVTGYQY

SEQ ID NO: 60023 - protein, 11 aa, Homo sapiens
  Table A; Target 60023; HLA-A*11:01; PAX3; ENSG00000135903; TAA
YSMDPVTGYQY

SEQ ID NO: 60024 - protein, 11 aa, Homo sapiens
  Table A; Target 60024; HLA-A*23:01; PAX3; ENSG00000135903; TAA
YSMDPVTGYQY

SEQ ID NO: 60025 - protein, 11 aa, Homo sapiens
  Table A; Target 60025; HLA-A*25:01; PAX3; ENSG00000135903; TAA
YSMDPVTGYQY

SEQ ID NO: 60026 - protein, 11 aa, Homo sapiens
  Table A; Target 60026; HLA-A*26:01; PAX3; ENSG00000135903; TAA
YSMDPVTGYQY

SEQ ID NO: 60027 - protein, 11 aa, Homo sapiens
  Table A; Target 60027; HLA-A*29:02; PAX3; ENSG00000135903; TAA
YSMDPVTGYQY

SEQ ID NO: 60028 - protein, 11 aa, Homo sapiens
  Table A; Target 60028; HLA-A*30:02; PAX3; ENSG00000135903; TAA
YSMDPVTGYQY

SEQ ID NO: 60029 - protein, 11 aa, Homo sapiens
  Table A; Target 60029; HLA-A*31:01; PAX3; ENSG00000135903; TAA
YSMDPVTGYQY

SEQ ID NO: 60030 - protein, 11 aa, Homo sapiens
  Table A; Target 60030; HLA-A*32:01; PAX3; ENSG00000135903; TAA
YSMDPVTGYQY

SEQ ID NO: 60031 - protein, 11 aa, Homo sapiens
  Table A; Target 60031; HLA-A*33:01; PAX3; ENSG00000135903; TAA
YSMDPVTGYQY

SEQ ID NO: 60032 - protein, 11 aa, Homo sapiens
  Table A; Target 60032; HLA-A*33:03; PAX3; ENSG00000135903; TAA
YSMDPVTGYQY

SEQ ID NO: 60033 - protein, 11 aa, Homo sapiens
  Table A; Target 60033; HLA-A*68:01; PAX3; ENSG00000135903; TAA
YSMDPVTGYQY

SEQ ID NO: 60034 - protein, 11 aa, Homo sapiens
  Table A; Target 60034; HLA-A*68:02; PAX3; ENSG00000135903; TAA
YSMDPVTGYQY

SEQ ID NO: 60035 - protein, 11 aa, Homo sapiens
  Table A; Target 60035; HLA-B*13:02; PAX3; ENSG00000135903; TAA
YSMDPVTGYQY

SEQ ID NO: 60036 - protein, 11 aa, Homo sapiens
  Table A; Target 60036; HLA-B*15:01; PAX3; ENSG00000135903; TAA
YSMDPVTGYQY

SEQ ID NO: 60037 - protein, 11 aa, Homo sapiens
  Table A; Target 60037; HLA-B*15:03; PAX3; ENSG00000135903; TAA
YSMDPVTGYQY

SEQ ID NO: 60038 - protein, 11 aa, Homo sapiens
  Table A; Target 60038; HLA-B*18:01; PAX3; ENSG00000135903; TAA
YSMDPVTGYQY

SEQ ID NO: 60039 - protein, 11 aa, Homo sapiens
  Table A; Target 60039; HLA-B*27:02; PAX3; ENSG00000135903; TAA
YSMDPVTGYQY

SEQ ID NO: 60040 - protein, 11 aa, Homo sapiens
  Table A; Target 60040; HLA-B*27:05; PAX3; ENSG00000135903; TAA
YSMDPVTGYQY

SEQ ID NO: 60041 - protein, 11 aa, Homo sapiens
  Table A; Target 60041; HLA-B*35:01; PAX3; ENSG00000135903; TAA
YSMDPVTGYQY

SEQ ID NO: 60042 - protein, 11 aa, Homo sapiens
  Table A; Target 60042; HLA-B*39:01; PAX3; ENSG00000135903; TAA
YSMDPVTGYQY

SEQ ID NO: 60043 - protein, 11 aa, Homo sapiens
  Table A; Target 60043; HLA-B*44:03; PAX3; ENSG00000135903; TAA
YSMDPVTGYQY

SEQ ID NO: 60044 - protein, 11 aa, Homo sapiens
  Table A; Target 60044; HLA-B*46:01; PAX3; ENSG00000135903; TAA
YSMDPVTGYQY

SEQ ID NO: 60045 - protein, 11 aa, Homo sapiens
  Table A; Target 60045; HLA-B*57:01; PAX3; ENSG00000135903; TAA
YSMDPVTGYQY

SEQ ID NO: 60046 - protein, 11 aa, Homo sapiens
  Table A; Target 60046; HLA-B*58:01; PAX3; ENSG00000135903; TAA
YSMDPVTGYQY

SEQ ID NO: 60047 - protein, 11 aa, Homo sapiens
  Table A; Target 60047; HLA-C*01:02; PAX3; ENSG00000135903; TAA
YSMDPVTGYQY

SEQ ID NO: 60048 - protein, 11 aa, Homo sapiens
  Table A; Target 60048; HLA-C*02:02; PAX3; ENSG00000135903; TAA
YSMDPVTGYQY

SEQ ID NO: 60049 - protein, 11 aa, Homo sapiens
  Table A; Target 60049; HLA-C*03:03; PAX3; ENSG00000135903; TAA
YSMDPVTGYQY

SEQ ID NO: 60050 - protein, 11 aa, Homo sapiens
  Table A; Target 60050; HLA-C*03:04; PAX3; ENSG00000135903; TAA
YSMDPVTGYQY

SEQ ID NO: 60051 - protein, 11 aa, Homo sapiens
  Table A; Target 60051; HLA-C*04:01; PAX3; ENSG00000135903; TAA
YSMDPVTGYQY

SEQ ID NO: 60052 - protein, 11 aa, Homo sapiens
  Table A; Target 60052; HLA-C*05:01; PAX3; ENSG00000135903; TAA
YSMDPVTGYQY

SEQ ID NO: 60053 - protein, 11 aa, Homo sapiens
  Table A; Target 60053; HLA-C*06:02; PAX3; ENSG00000135903; TAA
YSMDPVTGYQY

SEQ ID NO: 60054 - protein, 11 aa, Homo sapiens
  Table A; Target 60054; HLA-C*07:01; PAX3; ENSG00000135903; TAA
YSMDPVTGYQY

SEQ ID NO: 60055 - protein, 11 aa, Homo sapiens
  Table A; Target 60055; HLA-C*07:04; PAX3; ENSG00000135903; TAA
YSMDPVTGYQY

SEQ ID NO: 60056 - protein, 11 aa, Homo sapiens
  Table A; Target 60056; HLA-C*07:06; PAX3; ENSG00000135903; TAA
YSMDPVTGYQY

SEQ ID NO: 60057 - protein, 11 aa, Homo sapiens
  Table A; Target 60057; HLA-C*12:03; PAX3; ENSG00000135903; TAA
YSMDPVTGYQY

SEQ ID NO: 60058 - protein, 11 aa, Homo sapiens
  Table A; Target 60058; HLA-C*14:02; PAX3; ENSG00000135903; TAA
YSMDPVTGYQY

SEQ ID NO: 60059 - protein, 11 aa, Homo sapiens
  Table A; Target 60059; HLA-C*16:01; PAX3; ENSG00000135903; TAA
YSMDPVTGYQY

SEQ ID NO: 60060 - protein, 11 aa, Homo sapiens
  Table A; Target 60060; HLA-C*16:02; PAX3; ENSG00000135903; TAA
YSMDPVTGYQY

SEQ ID NO: 60061 - protein, 11 aa, Homo sapiens
  Table A; Target 60061; HLA-C*16:04; PAX3; ENSG00000135903; TAA
YSMDPVTGYQY

SEQ ID NO: 60062 - protein, 8 aa, Homo sapiens
  Table A; Target 60062; HLA-C*03:03; PAX3; ENSG00000135903; TAA
YSTTGYSM

SEQ ID NO: 60063 - protein, 8 aa, Homo sapiens
  Table A; Target 60063; HLA-C*03:04; PAX3; ENSG00000135903; TAA
YSTTGYSM

SEQ ID NO: 60064 - protein, 8 aa, Homo sapiens
  Table A; Target 60064; HLA-C*14:02; PAX3; ENSG00000135903; TAA
YSTTGYSM

SEQ ID NO: 60065 - protein, 8 aa, Homo sapiens
  Table A; Target 60065; HLA-C*16:01; PAX3; ENSG00000135903; TAA
YSTTGYSM

SEQ ID NO: 60066 - protein, 10 aa, Homo sapiens
  Table A; Target 60066; HLA-A*01:01; PAX3; ENSG00000135903; TAA
YTDSFVPPSG

SEQ ID NO: 60067 - protein, 11 aa, Homo sapiens
  Table A; Target 60067; HLA-A*01:01; PAX3; ENSG00000135903; TAA
YTDSFVPPSGP

SEQ ID NO: 60068 - protein, 10 aa, Homo sapiens
  Table A; Target 60068; HLA-B*35:01; PAX3,PAX7; ENSG00000135903,ENSG00000009709; TAA,TAA
CPPTYSTTGY

SEQ ID NO: 60069 - protein, 10 aa, Homo sapiens
  Table A; Target 60069; HLA-C*04:01; PAX3,PAX7; ENSG00000135903,ENSG00000009709; TAA,TAA
CPPTYSTTGY

SEQ ID NO: 60070 - protein, 10 aa, Homo sapiens
  Table A; Target 60070; HLA-C*07:01; PAX3,PAX7; ENSG00000135903,ENSG00000009709; TAA,TAA
CPPTYSTTGY

SEQ ID NO: 60071 - protein, 9 aa, Homo sapiens
  Table A; Target 60071; HLA-A*29:02; PAX3,PAX7; ENSG00000135903,ENSG00000009709; TAA,TAA
CVSKILCRY

SEQ ID NO: 60072 - protein, 8 aa, Homo sapiens
  Table A; Target 60072; HLA-B*08:01; PAX3,PAX7; ENSG00000135903,ENSG00000009709; TAA,TAA
DIYTREEL

SEQ ID NO: 60073 - protein, 8 aa, Homo sapiens
  Table A; Target 60073; HLA-B*51:01; PAX3,PAX7; ENSG00000135903,ENSG00000009709; TAA,TAA
DIYTREEL

SEQ ID NO: 60074 - protein, 8 aa, Homo sapiens
  Table A; Target 60074; HLA-C*16:01; PAX3,PAX7; ENSG00000135903,ENSG00000009709; TAA,TAA
DIYTREEL

SEQ ID NO: 60075 - protein, 11 aa, Homo sapiens
  Table A; Target 60075; HLA-A*33:01; PAX3,PAX7; ENSG00000135903,ENSG00000009709; TAA,TAA
DIYTREELAQR

SEQ ID NO: 60076 - protein, 11 aa, Homo sapiens
  Table A; Target 60076; HLA-A*33:03; PAX3,PAX7; ENSG00000135903,ENSG00000009709; TAA,TAA
DIYTREELAQR

SEQ ID NO: 60077 - protein, 11 aa, Homo sapiens
  Table A; Target 60077; HLA-A*68:01; PAX3,PAX7; ENSG00000135903,ENSG00000009709; TAA,TAA
DIYTREELAQR

SEQ ID NO: 60078 - protein, 9 aa, Homo sapiens
  Table A; Target 60078; HLA-A*01:01; PAX3,PAX7; ENSG00000135903,ENSG00000009709; TAA,TAA
DVEKKIEEY

SEQ ID NO: 60079 - protein, 9 aa, Homo sapiens
  Table A; Target 60079; HLA-A*25:01; PAX3,PAX7; ENSG00000135903,ENSG00000009709; TAA,TAA
DVEKKIEEY

SEQ ID NO: 60080 - protein, 9 aa, Homo sapiens
  Table A; Target 60080; HLA-A*26:01; PAX3,PAX7; ENSG00000135903,ENSG00000009709; TAA,TAA
DVEKKIEEY

SEQ ID NO: 60081 - protein, 9 aa, Homo sapiens
  Table A; Target 60081; HLA-A*33:01; PAX3,PAX7; ENSG00000135903,ENSG00000009709; TAA,TAA
DVEKKIEEY

SEQ ID NO: 60082 - protein, 9 aa, Homo sapiens
  Table A; Target 60082; HLA-B*18:01; PAX3,PAX7; ENSG00000135903,ENSG00000009709; TAA,TAA
DVEKKIEEY

SEQ ID NO: 60083 - protein, 9 aa, Homo sapiens
  Table A; Target 60083; HLA-B*35:01; PAX3,PAX7; ENSG00000135903,ENSG00000009709; TAA,TAA
DVEKKIEEY

SEQ ID NO: 60084 - protein, 9 aa, Homo sapiens
  Table A; Target 60084; HLA-C*07:04; PAX3,PAX7; ENSG00000135903,ENSG00000009709; TAA,TAA
DVEKKIEEY

SEQ ID NO: 60085 - protein, 11 aa, Homo sapiens
  Table A; Target 60085; HLA-A*33:01; PAX3,PAX7; ENSG00000135903,ENSG00000009709; TAA,TAA
DVEKKIEEYKR

SEQ ID NO: 60086 - protein, 10 aa, Homo sapiens
  Table A; Target 60086; HLA-A*30:01; PAX3,PAX7; ENSG00000135903,ENSG00000009709; TAA,TAA
EEYKRENPGM

SEQ ID NO: 60087 - protein, 10 aa, Homo sapiens
  Table A; Target 60087; HLA-B*40:02; PAX3,PAX7; ENSG00000135903,ENSG00000009709; TAA,TAA
EEYKRENPGM

SEQ ID NO: 60088 - protein, 9 aa, Homo sapiens
  Table A; Target 60088; HLA-A*26:01; PAX3,PAX7; ENSG00000135903,ENSG00000009709; TAA,TAA
ETGSIRPGA

SEQ ID NO: 60089 - protein, 10 aa, Homo sapiens
  Table A; Target 60089; HLA-A*25:01; PAX3,PAX7; ENSG00000135903,ENSG00000009709; TAA,TAA
ETGSIRPGAI

SEQ ID NO: 60090 - protein, 10 aa, Homo sapiens
  Table A; Target 60090; HLA-A*26:01; PAX3,PAX7; ENSG00000135903,ENSG00000009709; TAA,TAA
ETGSIRPGAI

SEQ ID NO: 60091 - protein, 10 aa, Homo sapiens
  Table A; Target 60091; HLA-A*68:02; PAX3,PAX7; ENSG00000135903,ENSG00000009709; TAA,TAA
ETGSIRPGAI

SEQ ID NO: 60092 - protein, 10 aa, Homo sapiens
  Table A; Target 60092; HLA-A*26:01; PAX3,PAX7; ENSG00000135903,ENSG00000009709; TAA,TAA
EVSTPLGQGR

SEQ ID NO: 60093 - protein, 10 aa, Homo sapiens
  Table A; Target 60093; HLA-A*33:01; PAX3,PAX7; ENSG00000135903,ENSG00000009709; TAA,TAA
EVSTPLGQGR

SEQ ID NO: 60094 - protein, 10 aa, Homo sapiens
  Table A; Target 60094; HLA-A*33:03; PAX3,PAX7; ENSG00000135903,ENSG00000009709; TAA,TAA
EVSTPLGQGR

SEQ ID NO: 60095 - protein, 10 aa, Homo sapiens
  Table A; Target 60095; HLA-A*68:01; PAX3,PAX7; ENSG00000135903,ENSG00000009709; TAA,TAA
EVSTPLGQGR

SEQ ID NO: 60096 - protein, 10 aa, Homo sapiens
  Table A; Target 60096; HLA-C*07:06; PAX3,PAX7; ENSG00000135903,ENSG00000009709; TAA,TAA
EVSTPLGQGR

SEQ ID NO: 60097 - protein, 11 aa, Homo sapiens
  Table A; Target 60097; HLA-A*68:02; PAX3,PAX7; ENSG00000135903,ENSG00000009709; TAA,TAA
EVSTPLGQGRV

SEQ ID NO: 60098 - protein, 8 aa, Homo sapiens
  Table A; Target 60098; HLA-B*54:01; PAX3,PAX7; ENSG00000135903,ENSG00000009709; TAA,TAA
FPLEVSTP

SEQ ID NO: 60099 - protein, 8 aa, Homo sapiens
  Table A; Target 60099; HLA-B*56:01; PAX3,PAX7; ENSG00000135903,ENSG00000009709; TAA,TAA
FPLEVSTP

SEQ ID NO: 60100 - protein, 9 aa, Homo sapiens
  Table A; Target 60100; HLA-A*02:01; PAX3,PAX7; ENSG00000135903,ENSG00000009709; TAA,TAA
FPLEVSTPL

SEQ ID NO: 60101 - protein, 9 aa, Homo sapiens
  Table A; Target 60101; HLA-A*23:01; PAX3,PAX7; ENSG00000135903,ENSG00000009709; TAA,TAA
FPLEVSTPL

SEQ ID NO: 60102 - protein, 9 aa, Homo sapiens
  Table A; Target 60102; HLA-A*68:02; PAX3,PAX7; ENSG00000135903,ENSG00000009709; TAA,TAA
FPLEVSTPL

SEQ ID NO: 60103 - protein, 9 aa, Homo sapiens
  Table A; Target 60103; HLA-B*07:02; PAX3,PAX7; ENSG00000135903,ENSG00000009709; TAA,TAA
FPLEVSTPL

SEQ ID NO: 60104 - protein, 9 aa, Homo sapiens
  Table A; Target 60104; HLA-B*08:01; PAX3,PAX7; ENSG00000135903,ENSG00000009709; TAA,TAA
FPLEVSTPL

SEQ ID NO: 60105 - protein, 9 aa, Homo sapiens
  Table A; Target 60105; HLA-B*15:03; PAX3,PAX7; ENSG00000135903,ENSG00000009709; TAA,TAA
FPLEVSTPL

SEQ ID NO: 60106 - protein, 9 aa, Homo sapiens
  Table A; Target 60106; HLA-B*27:02; PAX3,PAX7; ENSG00000135903,ENSG00000009709; TAA,TAA
FPLEVSTPL

SEQ ID NO: 60107 - protein, 9 aa, Homo sapiens
  Table A; Target 60107; HLA-B*27:05; PAX3,PAX7; ENSG00000135903,ENSG00000009709; TAA,TAA
FPLEVSTPL

SEQ ID NO: 60108 - protein, 9 aa, Homo sapiens
  Table A; Target 60108; HLA-B*35:01; PAX3,PAX7; ENSG00000135903,ENSG00000009709; TAA,TAA
FPLEVSTPL

SEQ ID NO: 60109 - protein, 9 aa, Homo sapiens
  Table A; Target 60109; HLA-B*35:03; PAX3,PAX7; ENSG00000135903,ENSG00000009709; TAA,TAA
FPLEVSTPL

SEQ ID NO: 60110 - protein, 9 aa, Homo sapiens
  Table A; Target 60110; HLA-B*46:01; PAX3,PAX7; ENSG00000135903,ENSG00000009709; TAA,TAA
FPLEVSTPL

SEQ ID NO: 60111 - protein, 9 aa, Homo sapiens
  Table A; Target 60111; HLA-B*51:01; PAX3,PAX7; ENSG00000135903,ENSG00000009709; TAA,TAA
FPLEVSTPL

SEQ ID NO: 60112 - protein, 9 aa, Homo sapiens
  Table A; Target 60112; HLA-B*54:01; PAX3,PAX7; ENSG00000135903,ENSG00000009709; TAA,TAA
FPLEVSTPL

SEQ ID NO: 60113 - protein, 9 aa, Homo sapiens
  Table A; Target 60113; HLA-B*55:01; PAX3,PAX7; ENSG00000135903,ENSG00000009709; TAA,TAA
FPLEVSTPL

SEQ ID NO: 60114 - protein, 9 aa, Homo sapiens
  Table A; Target 60114; HLA-B*56:01; PAX3,PAX7; ENSG00000135903,ENSG00000009709; TAA,TAA
FPLEVSTPL

SEQ ID NO: 60115 - protein, 9 aa, Homo sapiens
  Table A; Target 60115; HLA-C*02:02; PAX3,PAX7; ENSG00000135903,ENSG00000009709; TAA,TAA
FPLEVSTPL

SEQ ID NO: 60116 - protein, 9 aa, Homo sapiens
  Table A; Target 60116; HLA-C*03:03; PAX3,PAX7; ENSG00000135903,ENSG00000009709; TAA,TAA
FPLEVSTPL

SEQ ID NO: 60117 - protein, 9 aa, Homo sapiens
  Table A; Target 60117; HLA-C*03:04; PAX3,PAX7; ENSG00000135903,ENSG00000009709; TAA,TAA
FPLEVSTPL

SEQ ID NO: 60118 - protein, 9 aa, Homo sapiens
  Table A; Target 60118; HLA-C*04:01; PAX3,PAX7; ENSG00000135903,ENSG00000009709; TAA,TAA
FPLEVSTPL

SEQ ID NO: 60119 - protein, 9 aa, Homo sapiens
  Table A; Target 60119; HLA-C*05:01; PAX3,PAX7; ENSG00000135903,ENSG00000009709; TAA,TAA
FPLEVSTPL

SEQ ID NO: 60120 - protein, 9 aa, Homo sapiens
  Table A; Target 60120; HLA-C*07:01; PAX3,PAX7; ENSG00000135903,ENSG00000009709; TAA,TAA
FPLEVSTPL

SEQ ID NO: 60121 - protein, 9 aa, Homo sapiens
  Table A; Target 60121; HLA-C*07:02; PAX3,PAX7; ENSG00000135903,ENSG00000009709; TAA,TAA
FPLEVSTPL

SEQ ID NO: 60122 - protein, 9 aa, Homo sapiens
  Table A; Target 60122; HLA-C*07:04; PAX3,PAX7; ENSG00000135903,ENSG00000009709; TAA,TAA
FPLEVSTPL

SEQ ID NO: 60123 - protein, 9 aa, Homo sapiens
  Table A; Target 60123; HLA-C*07:06; PAX3,PAX7; ENSG00000135903,ENSG00000009709; TAA,TAA
FPLEVSTPL

SEQ ID NO: 60124 - protein, 9 aa, Homo sapiens
  Table A; Target 60124; HLA-C*14:02; PAX3,PAX7; ENSG00000135903,ENSG00000009709; TAA,TAA
FPLEVSTPL

SEQ ID NO: 60125 - protein, 10 aa, Homo sapiens
  Table A; Target 60125; HLA-B*27:02; PAX3,PAX7; ENSG00000135903,ENSG00000009709; TAA,TAA
FPLEVSTPLG

SEQ ID NO: 60126 - protein, 10 aa, Homo sapiens
  Table A; Target 60126; HLA-B*54:01; PAX3,PAX7; ENSG00000135903,ENSG00000009709; TAA,TAA
FPLEVSTPLG

SEQ ID NO: 60127 - protein, 10 aa, Homo sapiens
  Table A; Target 60127; HLA-B*56:01; PAX3,PAX7; ENSG00000135903,ENSG00000009709; TAA,TAA
FPLEVSTPLG

SEQ ID NO: 60128 - protein, 11 aa, Homo sapiens
  Table A; Target 60128; HLA-B*54:01; PAX3,PAX7; ENSG00000135903,ENSG00000009709; TAA,TAA
FPLEVSTPLGQ

SEQ ID NO: 60129 - protein, 9 aa, Homo sapiens
  Table A; Target 60129; HLA-A*01:01; PAX3,PAX7; ENSG00000135903,ENSG00000009709; TAA,TAA
FTAEQLEEL

SEQ ID NO: 60130 - protein, 9 aa, Homo sapiens
  Table A; Target 60130; HLA-A*02:01; PAX3,PAX7; ENSG00000135903,ENSG00000009709; TAA,TAA
FTAEQLEEL

SEQ ID NO: 60131 - protein, 9 aa, Homo sapiens
  Table A; Target 60131; HLA-A*02:03; PAX3,PAX7; ENSG00000135903,ENSG00000009709; TAA,TAA
FTAEQLEEL

SEQ ID NO: 60132 - protein, 9 aa, Homo sapiens
  Table A; Target 60132; HLA-A*02:04; PAX3,PAX7; ENSG00000135903,ENSG00000009709; TAA,TAA
FTAEQLEEL

SEQ ID NO: 60133 - protein, 9 aa, Homo sapiens
  Table A; Target 60133; HLA-A*02:07; PAX3,PAX7; ENSG00000135903,ENSG00000009709; TAA,TAA
FTAEQLEEL

SEQ ID NO: 60134 - protein, 9 aa, Homo sapiens
  Table A; Target 60134; HLA-A*25:01; PAX3,PAX7; ENSG00000135903,ENSG00000009709; TAA,TAA
FTAEQLEEL

SEQ ID NO: 60135 - protein, 9 aa, Homo sapiens
  Table A; Target 60135; HLA-A*68:02; PAX3,PAX7; ENSG00000135903,ENSG00000009709; TAA,TAA
FTAEQLEEL

SEQ ID NO: 60136 - protein, 9 aa, Homo sapiens
  Table A; Target 60136; HLA-B*27:05; PAX3,PAX7; ENSG00000135903,ENSG00000009709; TAA,TAA
FTAEQLEEL

SEQ ID NO: 60137 - protein, 9 aa, Homo sapiens
  Table A; Target 60137; HLA-B*35:03; PAX3,PAX7; ENSG00000135903,ENSG00000009709; TAA,TAA
FTAEQLEEL

SEQ ID NO: 60138 - protein, 9 aa, Homo sapiens
  Table A; Target 60138; HLA-B*39:01; PAX3,PAX7; ENSG00000135903,ENSG00000009709; TAA,TAA
FTAEQLEEL

SEQ ID NO: 60139 - protein, 9 aa, Homo sapiens
  Table A; Target 60139; HLA-B*46:01; PAX3,PAX7; ENSG00000135903,ENSG00000009709; TAA,TAA
FTAEQLEEL

SEQ ID NO: 60140 - protein, 9 aa, Homo sapiens
  Table A; Target 60140; HLA-B*58:01; PAX3,PAX7; ENSG00000135903,ENSG00000009709; TAA,TAA
FTAEQLEEL

SEQ ID NO: 60141 - protein, 9 aa, Homo sapiens
  Table A; Target 60141; HLA-C*01:02; PAX3,PAX7; ENSG00000135903,ENSG00000009709; TAA,TAA
FTAEQLEEL

SEQ ID NO: 60142 - protein, 9 aa, Homo sapiens
  Table A; Target 60142; HLA-C*02:02; PAX3,PAX7; ENSG00000135903,ENSG00000009709; TAA,TAA
FTAEQLEEL

SEQ ID NO: 60143 - protein, 9 aa, Homo sapiens
  Table A; Target 60143; HLA-C*03:03; PAX3,PAX7; ENSG00000135903,ENSG00000009709; TAA,TAA
FTAEQLEEL

SEQ ID NO: 60144 - protein, 9 aa, Homo sapiens
  Table A; Target 60144; HLA-C*03:04; PAX3,PAX7; ENSG00000135903,ENSG00000009709; TAA,TAA
FTAEQLEEL

SEQ ID NO: 60145 - protein, 9 aa, Homo sapiens
  Table A; Target 60145; HLA-C*05:01; PAX3,PAX7; ENSG00000135903,ENSG00000009709; TAA,TAA
FTAEQLEEL

SEQ ID NO: 60146 - protein, 9 aa, Homo sapiens
  Table A; Target 60146; HLA-C*07:04; PAX3,PAX7; ENSG00000135903,ENSG00000009709; TAA,TAA
FTAEQLEEL

SEQ ID NO: 60147 - protein, 9 aa, Homo sapiens
  Table A; Target 60147; HLA-C*07:06; PAX3,PAX7; ENSG00000135903,ENSG00000009709; TAA,TAA
FTAEQLEEL

SEQ ID NO: 60148 - protein, 9 aa, Homo sapiens
  Table A; Target 60148; HLA-C*16:02; PAX3,PAX7; ENSG00000135903,ENSG00000009709; TAA,TAA
FTAEQLEEL

SEQ ID NO: 60149 - protein, 9 aa, Homo sapiens
  Table A; Target 60149; HLA-A*03:01; PAX3,PAX7; ENSG00000135903,ENSG00000009709; TAA,TAA
GIRPCVISR

SEQ ID NO: 60150 - protein, 9 aa, Homo sapiens
  Table A; Target 60150; HLA-A*31:01; PAX3,PAX7; ENSG00000135903,ENSG00000009709; TAA,TAA
GIRPCVISR

SEQ ID NO: 60151 - protein, 8 aa, Homo sapiens
  Table A; Target 60151; HLA-B*15:01; PAX3,PAX7; ENSG00000135903,ENSG00000009709; TAA,TAA
GQGRVNQL

SEQ ID NO: 60152 - protein, 9 aa, Homo sapiens
  Table A; Target 60152; HLA-B*27:05; PAX3,PAX7; ENSG00000135903,ENSG00000009709; TAA,TAA
GRVNQLGGV

SEQ ID NO: 60153 - protein, 10 aa, Homo sapiens
  Table A; Target 60153; HLA-B*27:02; PAX3,PAX7; ENSG00000135903,ENSG00000009709; TAA,TAA
GRVNQLGGVF

SEQ ID NO: 60154 - protein, 10 aa, Homo sapiens
  Table A; Target 60154; HLA-B*27:05; PAX3,PAX7; ENSG00000135903,ENSG00000009709; TAA,TAA
GRVNQLGGVF

SEQ ID NO: 60155 - protein, 10 aa, Homo sapiens
  Table A; Target 60155; HLA-C*16:04; PAX3,PAX7; ENSG00000135903,ENSG00000009709; TAA,TAA
GRVNQLGGVF

SEQ ID NO: 60156 - protein, 9 aa, Homo sapiens
  Table A; Target 60156; HLA-B*08:01; PAX3,PAX7; ENSG00000135903,ENSG00000009709; TAA,TAA
HIRHKIVEM

SEQ ID NO: 60157 - protein, 8 aa, Homo sapiens
  Table A; Target 60157; HLA-A*33:01; PAX3,PAX7; ENSG00000135903,ENSG00000009709; TAA,TAA
HYPDIYTR

SEQ ID NO: 60158 - protein, 8 aa, Homo sapiens
  Table A; Target 60158; HLA-A*33:03; PAX3,PAX7; ENSG00000135903,ENSG00000009709; TAA,TAA
HYPDIYTR

SEQ ID NO: 60159 - protein, 11 aa, Homo sapiens
  Table A; Target 60159; HLA-A*24:02; PAX3,PAX7; ENSG00000135903,ENSG00000009709; TAA,TAA
HYPDIYTREEL

SEQ ID NO: 60160 - protein, 10 aa, Homo sapiens
  Table A; Target 60160; HLA-B*27:05; PAX3,PAX7; ENSG00000135903,ENSG00000009709; TAA,TAA
IRPGAIGGSK

SEQ ID NO: 60161 - protein, 10 aa, Homo sapiens
  Table A; Target 60161; HLA-A*33:03; PAX3,PAX7; ENSG00000135903,ENSG00000009709; TAA,TAA
IYTREELAQR

SEQ ID NO: 60162 - protein, 8 aa, Homo sapiens
  Table A; Target 60162; HLA-C*16:02; PAX3,PAX7; ENSG00000135903,ENSG00000009709; TAA,TAA
KLTEARVQ

SEQ ID NO: 60163 - protein, 9 aa, Homo sapiens
  Table A; Target 60163; HLA-A*02:01; PAX3,PAX7; ENSG00000135903,ENSG00000009709; TAA,TAA
KLTEARVQV

SEQ ID NO: 60164 - protein, 9 aa, Homo sapiens
  Table A; Target 60164; HLA-A*02:03; PAX3,PAX7; ENSG00000135903,ENSG00000009709; TAA,TAA
KLTEARVQV

SEQ ID NO: 60165 - protein, 9 aa, Homo sapiens
  Table A; Target 60165; HLA-A*02:04; PAX3,PAX7; ENSG00000135903,ENSG00000009709; TAA,TAA
KLTEARVQV

SEQ ID NO: 60166 - protein, 9 aa, Homo sapiens
  Table A; Target 60166; HLA-A*32:01; PAX3,PAX7; ENSG00000135903,ENSG00000009709; TAA,TAA
KLTEARVQV

SEQ ID NO: 60167 - protein, 9 aa, Homo sapiens
  Table A; Target 60167; HLA-B*55:01; PAX3,PAX7; ENSG00000135903,ENSG00000009709; TAA,TAA
KLTEARVQV

SEQ ID NO: 60168 - protein, 9 aa, Homo sapiens
  Table A; Target 60168; HLA-C*16:02; PAX3,PAX7; ENSG00000135903,ENSG00000009709; TAA,TAA
KLTEARVQV

SEQ ID NO: 60169 - protein, 10 aa, Homo sapiens
  Table A; Target 60169; HLA-A*24:02; PAX3,PAX7; ENSG00000135903,ENSG00000009709; TAA,TAA
KLTEARVQVW

SEQ ID NO: 60170 - protein, 10 aa, Homo sapiens
  Table A; Target 60170; HLA-A*25:01; PAX3,PAX7; ENSG00000135903,ENSG00000009709; TAA,TAA
KLTEARVQVW

SEQ ID NO: 60171 - protein, 10 aa, Homo sapiens
  Table A; Target 60171; HLA-A*32:01; PAX3,PAX7; ENSG00000135903,ENSG00000009709; TAA,TAA
KLTEARVQVW

SEQ ID NO: 60172 - protein, 10 aa, Homo sapiens
  Table A; Target 60172; HLA-B*44:02; PAX3,PAX7; ENSG00000135903,ENSG00000009709; TAA,TAA
KLTEARVQVW

SEQ ID NO: 60173 - protein, 10 aa, Homo sapiens
  Table A; Target 60173; HLA-B*57:01; PAX3,PAX7; ENSG00000135903,ENSG00000009709; TAA,TAA
KLTEARVQVW

SEQ ID NO: 60174 - protein, 10 aa, Homo sapiens
  Table A; Target 60174; HLA-B*58:01; PAX3,PAX7; ENSG00000135903,ENSG00000009709; TAA,TAA
KLTEARVQVW

SEQ ID NO: 60175 - protein, 9 aa, Homo sapiens
  Table A; Target 60175; HLA-B*08:01; PAX3,PAX7; ENSG00000135903,ENSG00000009709; TAA,TAA
LGQGRVNQL

SEQ ID NO: 60176 - protein, 9 aa, Homo sapiens
  Table A; Target 60176; HLA-B*37:01; PAX3,PAX7; ENSG00000135903,ENSG00000009709; TAA,TAA
LGQGRVNQL

SEQ ID NO: 60177 - protein, 9 aa, Homo sapiens
  Table A; Target 60177; HLA-C*01:02; PAX3,PAX7; ENSG00000135903,ENSG00000009709; TAA,TAA
LGQGRVNQL

SEQ ID NO: 60178 - protein, 9 aa, Homo sapiens
  Table A; Target 60178; HLA-C*14:02; PAX3,PAX7; ENSG00000135903,ENSG00000009709; TAA,TAA
LGQGRVNQL

SEQ ID NO: 60179 - protein, 9 aa, Homo sapiens
  Table A; Target 60179; HLA-C*16:01; PAX3,PAX7; ENSG00000135903,ENSG00000009709; TAA,TAA
LGQGRVNQL

SEQ ID NO: 60180 - protein, 9 aa, Homo sapiens
  Table A; Target 60180; HLA-C*16:02; PAX3,PAX7; ENSG00000135903,ENSG00000009709; TAA,TAA
LGQGRVNQL

SEQ ID NO: 60181 - protein, 9 aa, Homo sapiens
  Table A; Target 60181; HLA-A*01:01; PAX3,PAX7; ENSG00000135903,ENSG00000009709; TAA,TAA
LTEARVQVW

SEQ ID NO: 60182 - protein, 9 aa, Homo sapiens
  Table A; Target 60182; HLA-A*25:01; PAX3,PAX7; ENSG00000135903,ENSG00000009709; TAA,TAA
LTEARVQVW

SEQ ID NO: 60183 - protein, 9 aa, Homo sapiens
  Table A; Target 60183; HLA-A*32:01; PAX3,PAX7; ENSG00000135903,ENSG00000009709; TAA,TAA
LTEARVQVW

SEQ ID NO: 60184 - protein, 9 aa, Homo sapiens
  Table A; Target 60184; HLA-B*44:02; PAX3,PAX7; ENSG00000135903,ENSG00000009709; TAA,TAA
LTEARVQVW

SEQ ID NO: 60185 - protein, 9 aa, Homo sapiens
  Table A; Target 60185; HLA-B*57:01; PAX3,PAX7; ENSG00000135903,ENSG00000009709; TAA,TAA
LTEARVQVW

SEQ ID NO: 60186 - protein, 9 aa, Homo sapiens
  Table A; Target 60186; HLA-B*58:01; PAX3,PAX7; ENSG00000135903,ENSG00000009709; TAA,TAA
LTEARVQVW

SEQ ID NO: 60187 - protein, 8 aa, Homo sapiens
  Table A; Target 60187; HLA-B*13:02; PAX3,PAX7; ENSG00000135903,ENSG00000009709; TAA,TAA
NQLGGVFI

SEQ ID NO: 60188 - protein, 8 aa, Homo sapiens
  Table A; Target 60188; HLA-B*39:01; PAX3,PAX7; ENSG00000135903,ENSG00000009709; TAA,TAA
NQLGGVFI

SEQ ID NO: 60189 - protein, 11 aa, Homo sapiens
  Table A; Target 60189; HLA-A*31:01; PAX3,PAX7; ENSG00000135903,ENSG00000009709; TAA,TAA
NQLGGVFINGR

SEQ ID NO: 60190 - protein, 11 aa, Homo sapiens
  Table A; Target 60190; HLA-C*07:06; PAX3,PAX7; ENSG00000135903,ENSG00000009709; TAA,TAA
NQLGGVFINGR

SEQ ID NO: 60191 - protein, 9 aa, Homo sapiens
  Table A; Target 60191; HLA-B*07:02; PAX3,PAX7; ENSG00000135903,ENSG00000009709; TAA,TAA
PDIYTREEL

SEQ ID NO: 60192 - protein, 8 aa, Homo sapiens
  Table A; Target 60192; HLA-A*30:02; PAX3,PAX7; ENSG00000135903,ENSG00000009709; TAA,TAA
PTYSTTGY

SEQ ID NO: 60193 - protein, 8 aa, Homo sapiens
  Table A; Target 60193; HLA-C*07:01; PAX3,PAX7; ENSG00000135903,ENSG00000009709; TAA,TAA
PTYSTTGY

SEQ ID NO: 60194 - protein, 9 aa, Homo sapiens
  Table A; Target 60194; HLA-C*04:01; PAX3,PAX7; ENSG00000135903,ENSG00000009709; TAA,TAA
QETGSIRPG

SEQ ID NO: 60195 - protein, 9 aa, Homo sapiens
  Table A; Target 60195; HLA-C*06:02; PAX3,PAX7; ENSG00000135903,ENSG00000009709; TAA,TAA
QETGSIRPG

SEQ ID NO: 60196 - protein, 9 aa, Homo sapiens
  Table A; Target 60196; HLA-C*07:01; PAX3,PAX7; ENSG00000135903,ENSG00000009709; TAA,TAA
QETGSIRPG

SEQ ID NO: 60197 - protein, 9 aa, Homo sapiens
  Table A; Target 60197; HLA-C*12:03; PAX3,PAX7; ENSG00000135903,ENSG00000009709; TAA,TAA
QETGSIRPG

SEQ ID NO: 60198 - protein, 9 aa, Homo sapiens
  Table A; Target 60198; HLA-C*16:02; PAX3,PAX7; ENSG00000135903,ENSG00000009709; TAA,TAA
QETGSIRPG

SEQ ID NO: 60199 - protein, 11 aa, Homo sapiens
  Table A; Target 60199; HLA-B*49:01; PAX3,PAX7; ENSG00000135903,ENSG00000009709; TAA,TAA
QETGSIRPGAI

SEQ ID NO: 60200 - protein, 9 aa, Homo sapiens
  Table A; Target 60200; HLA-A*24:02; PAX3,PAX7; ENSG00000135903,ENSG00000009709; TAA,TAA
RENPGMFSW

SEQ ID NO: 60201 - protein, 9 aa, Homo sapiens
  Table A; Target 60201; HLA-B*37:01; PAX3,PAX7; ENSG00000135903,ENSG00000009709; TAA,TAA
RENPGMFSW

SEQ ID NO: 60202 - protein, 9 aa, Homo sapiens
  Table A; Target 60202; HLA-B*44:02; PAX3,PAX7; ENSG00000135903,ENSG00000009709; TAA,TAA
RENPGMFSW

SEQ ID NO: 60203 - protein, 9 aa, Homo sapiens
  Table A; Target 60203; HLA-B*44:03; PAX3,PAX7; ENSG00000135903,ENSG00000009709; TAA,TAA
RENPGMFSW

SEQ ID NO: 60204 - protein, 9 aa, Homo sapiens
  Table A; Target 60204; HLA-B*57:01; PAX3,PAX7; ENSG00000135903,ENSG00000009709; TAA,TAA
RENPGMFSW

SEQ ID NO: 60205 - protein, 9 aa, Homo sapiens
  Table A; Target 60205; HLA-C*16:04; PAX3,PAX7; ENSG00000135903,ENSG00000009709; TAA,TAA
RENPGMFSW

SEQ ID NO: 60206 - protein, 9 aa, Homo sapiens
  Table A; Target 60206; HLA-B*07:02; PAX3,PAX7; ENSG00000135903,ENSG00000009709; TAA,TAA
RPCVISRQL

SEQ ID NO: 60207 - protein, 9 aa, Homo sapiens
  Table A; Target 60207; HLA-C*07:02; PAX3,PAX7; ENSG00000135903,ENSG00000009709; TAA,TAA
RPCVISRQL

SEQ ID NO: 60208 - protein, 9 aa, Homo sapiens
  Table A; Target 60208; HLA-B*07:02; PAX3,PAX7; ENSG00000135903,ENSG00000009709; TAA,TAA
RPQPLPPST

SEQ ID NO: 60209 - protein, 9 aa, Homo sapiens
  Table A; Target 60209; HLA-B*56:01; PAX3,PAX7; ENSG00000135903,ENSG00000009709; TAA,TAA
RPQPLPPST

SEQ ID NO: 60210 - protein, 10 aa, Homo sapiens
  Table A; Target 60210; HLA-A*31:01; PAX3,PAX7; ENSG00000135903,ENSG00000009709; TAA,TAA
RTHYPDIYTR

SEQ ID NO: 60211 - protein, 10 aa, Homo sapiens
  Table A; Target 60211; HLA-B*57:01; PAX3,PAX7; ENSG00000135903,ENSG00000009709; TAA,TAA
RTHYPDIYTR

SEQ ID NO: 60212 - protein, 9 aa, Homo sapiens
  Table A; Target 60212; HLA-B*58:01; PAX3,PAX7; ENSG00000135903,ENSG00000009709; TAA,TAA
RTTFTAEQL

SEQ ID NO: 60213 - protein, 9 aa, Homo sapiens
  Table A; Target 60213; HLA-A*25:01; PAX3,PAX7; ENSG00000135903,ENSG00000009709; TAA,TAA
RVNQLGGVF

SEQ ID NO: 60214 - protein, 9 aa, Homo sapiens
  Table A; Target 60214; HLA-A*30:02; PAX3,PAX7; ENSG00000135903,ENSG00000009709; TAA,TAA
RVNQLGGVF

SEQ ID NO: 60215 - protein, 9 aa, Homo sapiens
  Table A; Target 60215; HLA-A*32:01; PAX3,PAX7; ENSG00000135903,ENSG00000009709; TAA,TAA
RVNQLGGVF

SEQ ID NO: 60216 - protein, 9 aa, Homo sapiens
  Table A; Target 60216; HLA-B*15:01; PAX3,PAX7; ENSG00000135903,ENSG00000009709; TAA,TAA
RVNQLGGVF

SEQ ID NO: 60217 - protein, 9 aa, Homo sapiens
  Table A; Target 60217; HLA-B*15:03; PAX3,PAX7; ENSG00000135903,ENSG00000009709; TAA,TAA
RVNQLGGVF

SEQ ID NO: 60218 - protein, 9 aa, Homo sapiens
  Table A; Target 60218; HLA-B*46:01; PAX3,PAX7; ENSG00000135903,ENSG00000009709; TAA,TAA
RVNQLGGVF

SEQ ID NO: 60219 - protein, 9 aa, Homo sapiens
  Table A; Target 60219; HLA-B*57:01; PAX3,PAX7; ENSG00000135903,ENSG00000009709; TAA,TAA
RVNQLGGVF

SEQ ID NO: 60220 - protein, 9 aa, Homo sapiens
  Table A; Target 60220; HLA-B*58:01; PAX3,PAX7; ENSG00000135903,ENSG00000009709; TAA,TAA
RVNQLGGVF

SEQ ID NO: 60221 - protein, 9 aa, Homo sapiens
  Table A; Target 60221; HLA-C*07:04; PAX3,PAX7; ENSG00000135903,ENSG00000009709; TAA,TAA
RVNQLGGVF

SEQ ID NO: 60222 - protein, 9 aa, Homo sapiens
  Table A; Target 60222; HLA-A*03:01; PAX3,PAX7; ENSG00000135903,ENSG00000009709; TAA,TAA
RVQVWFSNR

SEQ ID NO: 60223 - protein, 9 aa, Homo sapiens
  Table A; Target 60223; HLA-A*31:01; PAX3,PAX7; ENSG00000135903,ENSG00000009709; TAA,TAA
RVQVWFSNR

SEQ ID NO: 60224 - protein, 10 aa, Homo sapiens
  Table A; Target 60224; HLA-A*31:01; PAX3,PAX7; ENSG00000135903,ENSG00000009709; TAA,TAA
RVQVWFSNRR

SEQ ID NO: 60225 - protein, 9 aa, Homo sapiens
  Table A; Target 60225; HLA-A*03:02; PAX3,PAX7; ENSG00000135903,ENSG00000009709; TAA,TAA
RVSHGCVSK

SEQ ID NO: 60226 - protein, 8 aa, Homo sapiens
  Table A; Target 60226; HLA-C*14:02; PAX3,PAX7; ENSG00000135903,ENSG00000009709; TAA,TAA
RYQETGSI

SEQ ID NO: 60227 - protein, 9 aa, Homo sapiens
  Table A; Target 60227; HLA-A*31:01; PAX3,PAX7; ENSG00000135903,ENSG00000009709; TAA,TAA
RYQETGSIR

SEQ ID NO: 60228 - protein, 9 aa, Homo sapiens
  Table A; Target 60228; HLA-A*33:01; PAX3,PAX7; ENSG00000135903,ENSG00000009709; TAA,TAA
RYQETGSIR

SEQ ID NO: 60229 - protein, 9 aa, Homo sapiens
  Table A; Target 60229; HLA-A*33:03; PAX3,PAX7; ENSG00000135903,ENSG00000009709; TAA,TAA
RYQETGSIR

SEQ ID NO: 60230 - protein, 9 aa, Homo sapiens
  Table A; Target 60230; HLA-C*14:02; PAX3,PAX7; ENSG00000135903,ENSG00000009709; TAA,TAA
RYQETGSIR

SEQ ID NO: 60231 - protein, 11 aa, Homo sapiens
  Table A; Target 60231; HLA-A*31:01; PAX3,PAX7; ENSG00000135903,ENSG00000009709; TAA,TAA
RYQETGSIRPG

SEQ ID NO: 60232 - protein, 11 aa, Homo sapiens
  Table A; Target 60232; HLA-C*04:01; PAX3,PAX7; ENSG00000135903,ENSG00000009709; TAA,TAA
RYQETGSIRPG

SEQ ID NO: 60233 - protein, 9 aa, Homo sapiens
  Table A; Target 60233; HLA-A*29:02; PAX3,PAX7; ENSG00000135903,ENSG00000009709; TAA,TAA
SEPDLPLKR

SEQ ID NO: 60234 - protein, 9 aa, Homo sapiens
  Table A; Target 60234; HLA-A*68:01; PAX3,PAX7; ENSG00000135903,ENSG00000009709; TAA,TAA
SEPDLPLKR

SEQ ID NO: 60235 - protein, 9 aa, Homo sapiens
  Table A; Target 60235; HLA-B*44:02; PAX3,PAX7; ENSG00000135903,ENSG00000009709; TAA,TAA
SEPDLPLKR

SEQ ID NO: 60236 - protein, 9 aa, Homo sapiens
  Table A; Target 60236; HLA-B*44:03; PAX3,PAX7; ENSG00000135903,ENSG00000009709; TAA,TAA
SEPDLPLKR

SEQ ID NO: 60237 - protein, 9 aa, Homo sapiens
  Table A; Target 60237; HLA-C*06:02; PAX3,PAX7; ENSG00000135903,ENSG00000009709; TAA,TAA
SEPDLPLKR

SEQ ID NO: 60238 - protein, 9 aa, Homo sapiens
  Table A; Target 60238; HLA-C*07:06; PAX3,PAX7; ENSG00000135903,ENSG00000009709; TAA,TAA
SEPDLPLKR

SEQ ID NO: 60239 - protein, 9 aa, Homo sapiens
  Table A; Target 60239; HLA-C*12:03; PAX3,PAX7; ENSG00000135903,ENSG00000009709; TAA,TAA
SEPDLPLKR

SEQ ID NO: 60240 - protein, 9 aa, Homo sapiens
  Table A; Target 60240; HLA-C*16:04; PAX3,PAX7; ENSG00000135903,ENSG00000009709; TAA,TAA
SEPDLPLKR

SEQ ID NO: 60241 - protein, 11 aa, Homo sapiens
  Table A; Target 60241; HLA-A*03:01; PAX3,PAX7; ENSG00000135903,ENSG00000009709; TAA,TAA
SIRPGAIGGSK

SEQ ID NO: 60242 - protein, 11 aa, Homo sapiens
  Table A; Target 60242; HLA-A*03:02; PAX3,PAX7; ENSG00000135903,ENSG00000009709; TAA,TAA
SIRPGAIGGSK

SEQ ID NO: 60243 - protein, 11 aa, Homo sapiens
  Table A; Target 60243; HLA-A*31:01; PAX3,PAX7; ENSG00000135903,ENSG00000009709; TAA,TAA
SIRPGAIGGSK

SEQ ID NO: 60244 - protein, 8 aa, Homo sapiens
  Table A; Target 60244; HLA-C*05:01; PAX3,PAX7; ENSG00000135903,ENSG00000009709; TAA,TAA
TAEQLEEL

SEQ ID NO: 60245 - protein, 8 aa, Homo sapiens
  Table A; Target 60245; HLA-B*18:01; PAX3,PAX7; ENSG00000135903,ENSG00000009709; TAA,TAA
TEARVQVW

SEQ ID NO: 60246 - protein, 8 aa, Homo sapiens
  Table A; Target 60246; HLA-B*37:01; PAX3,PAX7; ENSG00000135903,ENSG00000009709; TAA,TAA
TEARVQVW

SEQ ID NO: 60247 - protein, 8 aa, Homo sapiens
  Table A; Target 60247; HLA-B*44:02; PAX3,PAX7; ENSG00000135903,ENSG00000009709; TAA,TAA
TEARVQVW

SEQ ID NO: 60248 - protein, 8 aa, Homo sapiens
  Table A; Target 60248; HLA-B*44:03; PAX3,PAX7; ENSG00000135903,ENSG00000009709; TAA,TAA
TEARVQVW

SEQ ID NO: 60249 - protein, 9 aa, Homo sapiens
  Table A; Target 60249; HLA-B*44:02; PAX3,PAX7; ENSG00000135903,ENSG00000009709; TAA,TAA
TEARVQVWF

SEQ ID NO: 60250 - protein, 9 aa, Homo sapiens
  Table A; Target 60250; HLA-B*44:03; PAX3,PAX7; ENSG00000135903,ENSG00000009709; TAA,TAA
TEARVQVWF

SEQ ID NO: 60251 - protein, 9 aa, Homo sapiens
  Table A; Target 60251; HLA-B*57:01; PAX3,PAX7; ENSG00000135903,ENSG00000009709; TAA,TAA
TEARVQVWF

SEQ ID NO: 60252 - protein, 9 aa, Homo sapiens
  Table A; Target 60252; HLA-B*08:01; PAX3,PAX7; ENSG00000135903,ENSG00000009709; TAA,TAA
TGSIRPGAI

SEQ ID NO: 60253 - protein, 9 aa, Homo sapiens
  Table A; Target 60253; HLA-A*31:01; PAX3,PAX7; ENSG00000135903,ENSG00000009709; TAA,TAA
THYPDIYTR

SEQ ID NO: 60254 - protein, 9 aa, Homo sapiens
  Table A; Target 60254; HLA-A*33:01; PAX3,PAX7; ENSG00000135903,ENSG00000009709; TAA,TAA
THYPDIYTR

SEQ ID NO: 60255 - protein, 9 aa, Homo sapiens
  Table A; Target 60255; HLA-A*33:03; PAX3,PAX7; ENSG00000135903,ENSG00000009709; TAA,TAA
THYPDIYTR

SEQ ID NO: 60256 - protein, 9 aa, Homo sapiens
  Table A; Target 60256; HLA-B*27:05; PAX3,PAX7; ENSG00000135903,ENSG00000009709; TAA,TAA
THYPDIYTR

SEQ ID NO: 60257 - protein, 9 aa, Homo sapiens
  Table A; Target 60257; HLA-B*38:01; PAX3,PAX7; ENSG00000135903,ENSG00000009709; TAA,TAA
THYPDIYTR

SEQ ID NO: 60258 - protein, 11 aa, Homo sapiens
  Table A; Target 60258; HLA-B*35:01; PAX3,PAX7; ENSG00000135903,ENSG00000009709; TAA,TAA
TPDVEKKIEEY

SEQ ID NO: 60259 - protein, 11 aa, Homo sapiens
  Table A; Target 60259; HLA-B*55:01; PAX3,PAX7; ENSG00000135903,ENSG00000009709; TAA,TAA
TPDVEKKIEEY

SEQ ID NO: 60260 - protein, 11 aa, Homo sapiens
  Table A; Target 60260; HLA-C*03:03; PAX3,PAX7; ENSG00000135903,ENSG00000009709; TAA,TAA
TPDVEKKIEEY

SEQ ID NO: 60261 - protein, 11 aa, Homo sapiens
  Table A; Target 60261; HLA-B*07:02; PAX3,PAX7; ENSG00000135903,ENSG00000009709; TAA,TAA
TPLGQGRVNQL

SEQ ID NO: 60262 - protein, 11 aa, Homo sapiens
  Table A; Target 60262; HLA-B*08:01; PAX3,PAX7; ENSG00000135903,ENSG00000009709; TAA,TAA
TPLGQGRVNQL

SEQ ID NO: 60263 - protein, 11 aa, Homo sapiens
  Table A; Target 60263; HLA-B*35:03; PAX3,PAX7; ENSG00000135903,ENSG00000009709; TAA,TAA
TPLGQGRVNQL

SEQ ID NO: 60264 - protein, 11 aa, Homo sapiens
  Table A; Target 60264; HLA-B*55:01; PAX3,PAX7; ENSG00000135903,ENSG00000009709; TAA,TAA
TPLGQGRVNQL

SEQ ID NO: 60265 - protein, 11 aa, Homo sapiens
  Table A; Target 60265; HLA-C*07:02; PAX3,PAX7; ENSG00000135903,ENSG00000009709; TAA,TAA
TPLGQGRVNQL

SEQ ID NO: 60266 - protein, 8 aa, Homo sapiens
  Table A; Target 60266; HLA-B*18:01; PAX3,PAX7; ENSG00000135903,ENSG00000009709; TAA,TAA
TTFTAEQL

SEQ ID NO: 60267 - protein, 11 aa, Homo sapiens
  Table A; Target 60267; HLA-A*68:02; PAX3,PAX7; ENSG00000135903,ENSG00000009709; TAA,TAA
TTFTAEQLEEL

SEQ ID NO: 60268 - protein, 8 aa, Homo sapiens
  Table A; Target 60268; HLA-A*30:02; PAX3,PAX7; ENSG00000135903,ENSG00000009709; TAA,TAA
VEKKIEEY

SEQ ID NO: 60269 - protein, 8 aa, Homo sapiens
  Table A; Target 60269; HLA-B*08:01; PAX3,PAX7; ENSG00000135903,ENSG00000009709; TAA,TAA
VEKKIEEY

SEQ ID NO: 60270 - protein, 8 aa, Homo sapiens
  Table A; Target 60270; HLA-B*15:01; PAX3,PAX7; ENSG00000135903,ENSG00000009709; TAA,TAA
VEKKIEEY

SEQ ID NO: 60271 - protein, 8 aa, Homo sapiens
  Table A; Target 60271; HLA-B*15:03; PAX3,PAX7; ENSG00000135903,ENSG00000009709; TAA,TAA
VEKKIEEY

SEQ ID NO: 60272 - protein, 8 aa, Homo sapiens
  Table A; Target 60272; HLA-B*18:01; PAX3,PAX7; ENSG00000135903,ENSG00000009709; TAA,TAA
VEKKIEEY

SEQ ID NO: 60273 - protein, 8 aa, Homo sapiens
  Table A; Target 60273; HLA-B*37:01; PAX3,PAX7; ENSG00000135903,ENSG00000009709; TAA,TAA
VEKKIEEY

SEQ ID NO: 60274 - protein, 8 aa, Homo sapiens
  Table A; Target 60274; HLA-B*40:02; PAX3,PAX7; ENSG00000135903,ENSG00000009709; TAA,TAA
VEKKIEEY

SEQ ID NO: 60275 - protein, 8 aa, Homo sapiens
  Table A; Target 60275; HLA-B*44:02; PAX3,PAX7; ENSG00000135903,ENSG00000009709; TAA,TAA
VEKKIEEY

SEQ ID NO: 60276 - protein, 8 aa, Homo sapiens
  Table A; Target 60276; HLA-B*46:01; PAX3,PAX7; ENSG00000135903,ENSG00000009709; TAA,TAA
VEKKIEEY

SEQ ID NO: 60277 - protein, 8 aa, Homo sapiens
  Table A; Target 60277; HLA-C*04:01; PAX3,PAX7; ENSG00000135903,ENSG00000009709; TAA,TAA
VEKKIEEY

SEQ ID NO: 60278 - protein, 8 aa, Homo sapiens
  Table A; Target 60278; HLA-C*07:01; PAX3,PAX7; ENSG00000135903,ENSG00000009709; TAA,TAA
VEKKIEEY

SEQ ID NO: 60279 - protein, 8 aa, Homo sapiens
  Table A; Target 60279; HLA-C*07:04; PAX3,PAX7; ENSG00000135903,ENSG00000009709; TAA,TAA
VEKKIEEY

SEQ ID NO: 60280 - protein, 8 aa, Homo sapiens
  Table A; Target 60280; HLA-C*12:03; PAX3,PAX7; ENSG00000135903,ENSG00000009709; TAA,TAA
VEKKIEEY

SEQ ID NO: 60281 - protein, 8 aa, Homo sapiens
  Table A; Target 60281; HLA-C*16:04; PAX3,PAX7; ENSG00000135903,ENSG00000009709; TAA,TAA
VEKKIEEY

SEQ ID NO: 60282 - protein, 8 aa, Homo sapiens
  Table A; Target 60282; HLA-B*37:01; PAX3,PAX7; ENSG00000135903,ENSG00000009709; TAA,TAA
VEMAHHGI

SEQ ID NO: 60283 - protein, 8 aa, Homo sapiens
  Table A; Target 60283; HLA-B*44:02; PAX3,PAX7; ENSG00000135903,ENSG00000009709; TAA,TAA
VEMAHHGI

SEQ ID NO: 60284 - protein, 8 aa, Homo sapiens
  Table A; Target 60284; HLA-B*49:01; PAX3,PAX7; ENSG00000135903,ENSG00000009709; TAA,TAA
VEMAHHGI

SEQ ID NO: 60285 - protein, 8 aa, Homo sapiens
  Table A; Target 60285; HLA-C*01:02; PAX3,PAX7; ENSG00000135903,ENSG00000009709; TAA,TAA
VFINGRPL

SEQ ID NO: 60286 - protein, 8 aa, Homo sapiens
  Table A; Target 60286; HLA-C*14:02; PAX3,PAX7; ENSG00000135903,ENSG00000009709; TAA,TAA
VFINGRPL

SEQ ID NO: 60287 - protein, 9 aa, Homo sapiens
  Table A; Target 60287; HLA-C*06:02; PAX3,PAX7; ENSG00000135903,ENSG00000009709; TAA,TAA
VHRPQPLPP

SEQ ID NO: 60288 - protein, 8 aa, Homo sapiens
  Table A; Target 60288; HLA-C*14:02; PAX3,PAX7; ENSG00000135903,ENSG00000009709; TAA,TAA
VNQLGGVF

SEQ ID NO: 60289 - protein, 8 aa, Homo sapiens
  Table A; Target 60289; HLA-A*31:01; PAX3,PAX7; ENSG00000135903,ENSG00000009709; TAA,TAA
VQVWFSNR

SEQ ID NO: 60290 - protein, 9 aa, Homo sapiens
  Table A; Target 60290; HLA-A*31:01; PAX3,PAX7; ENSG00000135903,ENSG00000009709; TAA,TAA
VSTPLGQGR

SEQ ID NO: 60291 - protein, 9 aa, Homo sapiens
  Table A; Target 60291; HLA-A*33:01; PAX3,PAX7; ENSG00000135903,ENSG00000009709; TAA,TAA
VSTPLGQGR

SEQ ID NO: 60292 - protein, 9 aa, Homo sapiens
  Table A; Target 60292; HLA-A*33:03; PAX3,PAX7; ENSG00000135903,ENSG00000009709; TAA,TAA
VSTPLGQGR

SEQ ID NO: 60293 - protein, 9 aa, Homo sapiens
  Table A; Target 60293; HLA-A*68:01; PAX3,PAX7; ENSG00000135903,ENSG00000009709; TAA,TAA
VSTPLGQGR

SEQ ID NO: 60294 - protein, 9 aa, Homo sapiens
  Table A; Target 60294; HLA-B*57:01; PAX3,PAX7; ENSG00000135903,ENSG00000009709; TAA,TAA
VSTPLGQGR

SEQ ID NO: 60295 - protein, 9 aa, Homo sapiens
  Table A; Target 60295; HLA-C*07:06; PAX3,PAX7; ENSG00000135903,ENSG00000009709; TAA,TAA
VSTPLGQGR

SEQ ID NO: 60296 - protein, 11 aa, Homo sapiens
  Table A; Target 60296; HLA-A*01:01; PAX3,PAX7; ENSG00000135903,ENSG00000009709; TAA,TAA
YCPPTYSTTGY

SEQ ID NO: 60297 - protein, 11 aa, Homo sapiens
  Table A; Target 60297; HLA-A*26:01; PAX3,PAX7; ENSG00000135903,ENSG00000009709; TAA,TAA
YCPPTYSTTGY

SEQ ID NO: 60298 - protein, 11 aa, Homo sapiens
  Table A; Target 60298; HLA-A*29:02; PAX3,PAX7; ENSG00000135903,ENSG00000009709; TAA,TAA
YCPPTYSTTGY

SEQ ID NO: 60299 - protein, 11 aa, Homo sapiens
  Table A; Target 60299; HLA-B*46:01; PAX3,PAX7; ENSG00000135903,ENSG00000009709; TAA,TAA
YCPPTYSTTGY

SEQ ID NO: 60300 - protein, 11 aa, Homo sapiens
  Table A; Target 60300; HLA-C*07:01; PAX3,PAX7; ENSG00000135903,ENSG00000009709; TAA,TAA
YCPPTYSTTGY

SEQ ID NO: 60301 - protein, 11 aa, Homo sapiens
  Table A; Target 60301; HLA-C*07:04; PAX3,PAX7; ENSG00000135903,ENSG00000009709; TAA,TAA
YCPPTYSTTGY

SEQ ID NO: 60302 - protein, 10 aa, Homo sapiens
  Table A; Target 60302; HLA-B*07:02; PAX3,PAX7; ENSG00000135903,ENSG00000009709; TAA,TAA
YPDIYTREEL

SEQ ID NO: 60303 - protein, 10 aa, Homo sapiens
  Table A; Target 60303; HLA-B*35:01; PAX3,PAX7; ENSG00000135903,ENSG00000009709; TAA,TAA
YPDIYTREEL

SEQ ID NO: 60304 - protein, 10 aa, Homo sapiens
  Table A; Target 60304; HLA-B*35:03; PAX3,PAX7; ENSG00000135903,ENSG00000009709; TAA,TAA
YPDIYTREEL

SEQ ID NO: 60305 - protein, 10 aa, Homo sapiens
  Table A; Target 60305; HLA-B*54:01; PAX3,PAX7; ENSG00000135903,ENSG00000009709; TAA,TAA
YPDIYTREEL

SEQ ID NO: 60306 - protein, 10 aa, Homo sapiens
  Table A; Target 60306; HLA-B*55:01; PAX3,PAX7; ENSG00000135903,ENSG00000009709; TAA,TAA
YPDIYTREEL

SEQ ID NO: 60307 - protein, 10 aa, Homo sapiens
  Table A; Target 60307; HLA-C*03:03; PAX3,PAX7; ENSG00000135903,ENSG00000009709; TAA,TAA
YPDIYTREEL

SEQ ID NO: 60308 - protein, 10 aa, Homo sapiens
  Table A; Target 60308; HLA-C*07:02; PAX3,PAX7; ENSG00000135903,ENSG00000009709; TAA,TAA
YPDIYTREEL

SEQ ID NO: 60309 - protein, 11 aa, Homo sapiens
  Table A; Target 60309; HLA-B*54:01; PAX3,PAX7; ENSG00000135903,ENSG00000009709; TAA,TAA
YPDIYTREELA

SEQ ID NO: 60310 - protein, 8 aa, Homo sapiens
  Table A; Target 60310; HLA-C*05:01; PAX3,PAX7; ENSG00000135903,ENSG00000009709; TAA,TAA
YQETGSIR

SEQ ID NO: 60311 - protein, 9 aa, Homo sapiens
  Table A; Target 60311; HLA-B*27:05; PAX3,PAX7; ENSG00000135903,ENSG00000009709; TAA,TAA
YQETGSIRP

SEQ ID NO: 60312 - protein, 9 aa, Homo sapiens
  Table A; Target 60312; HLA-C*05:01; PAX3,PAX7; ENSG00000135903,ENSG00000009709; TAA,TAA
YQETGSIRP

SEQ ID NO: 60313 - protein, 9 aa, Homo sapiens
  Table A; Target 60313; HLA-C*07:04; PAX3,PAX7; ENSG00000135903,ENSG00000009709; TAA,TAA
YQETGSIRP

SEQ ID NO: 60314 - protein, 10 aa, Homo sapiens
  Table A; Target 60314; HLA-B*07:02; PAX3,PAX7; ENSG00000135903,ENSG00000009709; TAA,TAA
YQETGSIRPG

SEQ ID NO: 60315 - protein, 10 aa, Homo sapiens
  Table A; Target 60315; HLA-B*27:05; PAX3,PAX7; ENSG00000135903,ENSG00000009709; TAA,TAA
YQETGSIRPG

SEQ ID NO: 60316 - protein, 10 aa, Homo sapiens
  Table A; Target 60316; HLA-B*39:01; PAX3,PAX7; ENSG00000135903,ENSG00000009709; TAA,TAA
YQETGSIRPG

SEQ ID NO: 60317 - protein, 10 aa, Homo sapiens
  Table A; Target 60317; HLA-B*40:02; PAX3,PAX7; ENSG00000135903,ENSG00000009709; TAA,TAA
YQETGSIRPG

SEQ ID NO: 60318 - protein, 10 aa, Homo sapiens
  Table A; Target 60318; HLA-C*04:01; PAX3,PAX7; ENSG00000135903,ENSG00000009709; TAA,TAA
YQETGSIRPG

SEQ ID NO: 60319 - protein, 10 aa, Homo sapiens
  Table A; Target 60319; HLA-C*06:02; PAX3,PAX7; ENSG00000135903,ENSG00000009709; TAA,TAA
YQETGSIRPG

SEQ ID NO: 60320 - protein, 10 aa, Homo sapiens
  Table A; Target 60320; HLA-C*07:01; PAX3,PAX7; ENSG00000135903,ENSG00000009709; TAA,TAA
YQETGSIRPG

SEQ ID NO: 60321 - protein, 10 aa, Homo sapiens
  Table A; Target 60321; HLA-C*07:02; PAX3,PAX7; ENSG00000135903,ENSG00000009709; TAA,TAA
YQETGSIRPG

SEQ ID NO: 60322 - protein, 10 aa, Homo sapiens
  Table A; Target 60322; HLA-C*07:04; PAX3,PAX7; ENSG00000135903,ENSG00000009709; TAA,TAA
YQETGSIRPG

SEQ ID NO: 60323 - protein, 10 aa, Homo sapiens
  Table A; Target 60323; HLA-C*12:03; PAX3,PAX7; ENSG00000135903,ENSG00000009709; TAA,TAA
YQETGSIRPG

SEQ ID NO: 60324 - protein, 8 aa, Homo sapiens
  Table A; Target 60324; HLA-B*13:02; PAX3,PAX7; ENSG00000135903,ENSG00000009709; TAA,TAA
YQYGQYGQ

SEQ ID NO: 60325 - protein, 9 aa, Homo sapiens
  Table A; Target 60325; HLA-A*31:01; PAX3,PAX7; ENSG00000135903,ENSG00000009709; TAA,TAA
YTREELAQR

SEQ ID NO: 60326 - protein, 9 aa, Homo sapiens
  Table A; Target 60326; HLA-A*33:01; PAX3,PAX7; ENSG00000135903,ENSG00000009709; TAA,TAA
YTREELAQR

SEQ ID NO: 60327 - protein, 9 aa, Homo sapiens
  Table A; Target 60327; HLA-A*33:03; PAX3,PAX7; ENSG00000135903,ENSG00000009709; TAA,TAA
YTREELAQR

SEQ ID NO: 60328 - protein, 9 aa, Homo sapiens
  Table A; Target 60328; HLA-A*68:01; PAX3,PAX7; ENSG00000135903,ENSG00000009709; TAA,TAA
YTREELAQR

SEQ ID NO: 60329 - protein, 9 aa, Homo sapiens
  Table A; Target 60329; HLA-C*07:06; PAX3,PAX7; ENSG00000135903,ENSG00000009709; TAA,TAA
YTREELAQR

SEQ ID NO: 60330 - protein, 11 aa, Homo sapiens
  Table A; Target 60330; HLA-B*56:01; PAX7; ENSG00000009709; TAA
AAAAAADTSSA

SEQ ID NO: 60331 - protein, 10 aa, Homo sapiens
  Table A; Target 60331; HLA-B*56:01; PAX7; ENSG00000009709; TAA
AAAAADTSSA

SEQ ID NO: 60332 - protein, 11 aa, Homo sapiens
  Table A; Target 60332; HLA-A*01:01; PAX7; ENSG00000009709; TAA
AAAAADTSSAY

SEQ ID NO: 60333 - protein, 11 aa, Homo sapiens
  Table A; Target 60333; HLA-A*25:01; PAX7; ENSG00000009709; TAA
AAAAADTSSAY

SEQ ID NO: 60334 - protein, 11 aa, Homo sapiens
  Table A; Target 60334; HLA-A*26:01; PAX7; ENSG00000009709; TAA
AAAAADTSSAY

SEQ ID NO: 60335 - protein, 11 aa, Homo sapiens
  Table A; Target 60335; HLA-A*29:02; PAX7; ENSG00000009709; TAA
AAAAADTSSAY

SEQ ID NO: 60336 - protein, 11 aa, Homo sapiens
  Table A; Target 60336; HLA-A*30:02; PAX7; ENSG00000009709; TAA
AAAAADTSSAY

SEQ ID NO: 60337 - protein, 11 aa, Homo sapiens
  Table A; Target 60337; HLA-A*32:01; PAX7; ENSG00000009709; TAA
AAAAADTSSAY

SEQ ID NO: 60338 - protein, 11 aa, Homo sapiens
  Table A; Target 60338; HLA-B*15:01; PAX7; ENSG00000009709; TAA
AAAAADTSSAY

SEQ ID NO: 60339 - protein, 11 aa, Homo sapiens
  Table A; Target 60339; HLA-B*15:03; PAX7; ENSG00000009709; TAA
AAAAADTSSAY

SEQ ID NO: 60340 - protein, 11 aa, Homo sapiens
  Table A; Target 60340; HLA-B*27:02; PAX7; ENSG00000009709; TAA
AAAAADTSSAY

SEQ ID NO: 60341 - protein, 11 aa, Homo sapiens
  Table A; Target 60341; HLA-B*27:05; PAX7; ENSG00000009709; TAA
AAAAADTSSAY

SEQ ID NO: 60342 - protein, 11 aa, Homo sapiens
  Table A; Target 60342; HLA-B*35:01; PAX7; ENSG00000009709; TAA
AAAAADTSSAY

SEQ ID NO: 60343 - protein, 11 aa, Homo sapiens
  Table A; Target 60343; HLA-B*39:01; PAX7; ENSG00000009709; TAA
AAAAADTSSAY

SEQ ID NO: 60344 - protein, 11 aa, Homo sapiens
  Table A; Target 60344; HLA-B*44:03; PAX7; ENSG00000009709; TAA
AAAAADTSSAY

SEQ ID NO: 60345 - protein, 11 aa, Homo sapiens
  Table A; Target 60345; HLA-B*46:01; PAX7; ENSG00000009709; TAA
AAAAADTSSAY

SEQ ID NO: 60346 - protein, 11 aa, Homo sapiens
  Table A; Target 60346; HLA-B*55:01; PAX7; ENSG00000009709; TAA
AAAAADTSSAY

SEQ ID NO: 60347 - protein, 11 aa, Homo sapiens
  Table A; Target 60347; HLA-B*58:01; PAX7; ENSG00000009709; TAA
AAAAADTSSAY

SEQ ID NO: 60348 - protein, 11 aa, Homo sapiens
  Table A; Target 60348; HLA-C*01:02; PAX7; ENSG00000009709; TAA
AAAAADTSSAY

SEQ ID NO: 60349 - protein, 11 aa, Homo sapiens
  Table A; Target 60349; HLA-C*02:02; PAX7; ENSG00000009709; TAA
AAAAADTSSAY

SEQ ID NO: 60350 - protein, 11 aa, Homo sapiens
  Table A; Target 60350; HLA-C*03:03; PAX7; ENSG00000009709; TAA
AAAAADTSSAY

SEQ ID NO: 60351 - protein, 11 aa, Homo sapiens
  Table A; Target 60351; HLA-C*03:04; PAX7; ENSG00000009709; TAA
AAAAADTSSAY

SEQ ID NO: 60352 - protein, 11 aa, Homo sapiens
  Table A; Target 60352; HLA-C*04:01; PAX7; ENSG00000009709; TAA
AAAAADTSSAY

SEQ ID NO: 60353 - protein, 11 aa, Homo sapiens
  Table A; Target 60353; HLA-C*07:04; PAX7; ENSG00000009709; TAA
AAAAADTSSAY

SEQ ID NO: 60354 - protein, 11 aa, Homo sapiens
  Table A; Target 60354; HLA-C*07:06; PAX7; ENSG00000009709; TAA
AAAAADTSSAY

SEQ ID NO: 60355 - protein, 11 aa, Homo sapiens
  Table A; Target 60355; HLA-C*14:02; PAX7; ENSG00000009709; TAA
AAAAADTSSAY

SEQ ID NO: 60356 - protein, 11 aa, Homo sapiens
  Table A; Target 60356; HLA-C*16:02; PAX7; ENSG00000009709; TAA
AAAAADTSSAY

SEQ ID NO: 60357 - protein, 11 aa, Homo sapiens
  Table A; Target 60357; HLA-C*16:04; PAX7; ENSG00000009709; TAA
AAAAADTSSAY

SEQ ID NO: 60358 - protein, 9 aa, Homo sapiens
  Table A; Target 60358; HLA-B*54:01; PAX7; ENSG00000009709; TAA
AAAADTSSA

SEQ ID NO: 60359 - protein, 9 aa, Homo sapiens
  Table A; Target 60359; HLA-B*55:01; PAX7; ENSG00000009709; TAA
AAAADTSSA

SEQ ID NO: 60360 - protein, 9 aa, Homo sapiens
  Table A; Target 60360; HLA-B*56:01; PAX7; ENSG00000009709; TAA
AAAADTSSA

SEQ ID NO: 60361 - protein, 9 aa, Homo sapiens
  Table A; Target 60361; HLA-C*03:03; PAX7; ENSG00000009709; TAA
AAAADTSSA

SEQ ID NO: 60362 - protein, 9 aa, Homo sapiens
  Table A; Target 60362; HLA-C*03:04; PAX7; ENSG00000009709; TAA
AAAADTSSA

SEQ ID NO: 60363 - protein, 9 aa, Homo sapiens
  Table A; Target 60363; HLA-C*14:02; PAX7; ENSG00000009709; TAA
AAAADTSSA

SEQ ID NO: 60364 - protein, 10 aa, Homo sapiens
  Table A; Target 60364; HLA-A*01:01; PAX7; ENSG00000009709; TAA
AAAADTSSAY

SEQ ID NO: 60365 - protein, 10 aa, Homo sapiens
  Table A; Target 60365; HLA-A*25:01; PAX7; ENSG00000009709; TAA
AAAADTSSAY

SEQ ID NO: 60366 - protein, 10 aa, Homo sapiens
  Table A; Target 60366; HLA-A*26:01; PAX7; ENSG00000009709; TAA
AAAADTSSAY

SEQ ID NO: 60367 - protein, 10 aa, Homo sapiens
  Table A; Target 60367; HLA-A*29:02; PAX7; ENSG00000009709; TAA
AAAADTSSAY

SEQ ID NO: 60368 - protein, 10 aa, Homo sapiens
  Table A; Target 60368; HLA-A*30:02; PAX7; ENSG00000009709; TAA
AAAADTSSAY

SEQ ID NO: 60369 - protein, 10 aa, Homo sapiens
  Table A; Target 60369; HLA-A*32:01; PAX7; ENSG00000009709; TAA
AAAADTSSAY

SEQ ID NO: 60370 - protein, 10 aa, Homo sapiens
  Table A; Target 60370; HLA-A*68:01; PAX7; ENSG00000009709; TAA
AAAADTSSAY

SEQ ID NO: 60371 - protein, 10 aa, Homo sapiens
  Table A; Target 60371; HLA-B*15:01; PAX7; ENSG00000009709; TAA
AAAADTSSAY

SEQ ID NO: 60372 - protein, 10 aa, Homo sapiens
  Table A; Target 60372; HLA-B*15:03; PAX7; ENSG00000009709; TAA
AAAADTSSAY

SEQ ID NO: 60373 - protein, 10 aa, Homo sapiens
  Table A; Target 60373; HLA-B*35:01; PAX7; ENSG00000009709; TAA
AAAADTSSAY

SEQ ID NO: 60374 - protein, 10 aa, Homo sapiens
  Table A; Target 60374; HLA-B*39:01; PAX7; ENSG00000009709; TAA
AAAADTSSAY

SEQ ID NO: 60375 - protein, 10 aa, Homo sapiens
  Table A; Target 60375; HLA-B*44:03; PAX7; ENSG00000009709; TAA
AAAADTSSAY

SEQ ID NO: 60376 - protein, 10 aa, Homo sapiens
  Table A; Target 60376; HLA-B*46:01; PAX7; ENSG00000009709; TAA
AAAADTSSAY

SEQ ID NO: 60377 - protein, 10 aa, Homo sapiens
  Table A; Target 60377; HLA-B*55:01; PAX7; ENSG00000009709; TAA
AAAADTSSAY

SEQ ID NO: 60378 - protein, 10 aa, Homo sapiens
  Table A; Target 60378; HLA-B*58:01; PAX7; ENSG00000009709; TAA
AAAADTSSAY

SEQ ID NO: 60379 - protein, 10 aa, Homo sapiens
  Table A; Target 60379; HLA-C*01:02; PAX7; ENSG00000009709; TAA
AAAADTSSAY

SEQ ID NO: 60380 - protein, 10 aa, Homo sapiens
  Table A; Target 60380; HLA-C*02:02; PAX7; ENSG00000009709; TAA
AAAADTSSAY

SEQ ID NO: 60381 - protein, 10 aa, Homo sapiens
  Table A; Target 60381; HLA-C*03:03; PAX7; ENSG00000009709; TAA
AAAADTSSAY

SEQ ID NO: 60382 - protein, 10 aa, Homo sapiens
  Table A; Target 60382; HLA-C*03:04; PAX7; ENSG00000009709; TAA
AAAADTSSAY

SEQ ID NO: 60383 - protein, 10 aa, Homo sapiens
  Table A; Target 60383; HLA-C*07:04; PAX7; ENSG00000009709; TAA
AAAADTSSAY

SEQ ID NO: 60384 - protein, 10 aa, Homo sapiens
  Table A; Target 60384; HLA-C*07:06; PAX7; ENSG00000009709; TAA
AAAADTSSAY

SEQ ID NO: 60385 - protein, 10 aa, Homo sapiens
  Table A; Target 60385; HLA-C*14:02; PAX7; ENSG00000009709; TAA
AAAADTSSAY

SEQ ID NO: 60386 - protein, 10 aa, Homo sapiens
  Table A; Target 60386; HLA-C*16:02; PAX7; ENSG00000009709; TAA
AAAADTSSAY

SEQ ID NO: 60387 - protein, 10 aa, Homo sapiens
  Table A; Target 60387; HLA-C*16:04; PAX7; ENSG00000009709; TAA
AAAADTSSAY

SEQ ID NO: 60388 - protein, 11 aa, Homo sapiens
  Table A; Target 60388; HLA-B*39:01; PAX7; ENSG00000009709; TAA
AAAADTSSAYG

SEQ ID NO: 60389 - protein, 11 aa, Homo sapiens
  Table A; Target 60389; HLA-C*04:01; PAX7; ENSG00000009709; TAA
AAAADTSSAYG

SEQ ID NO: 60390 - protein, 9 aa, Homo sapiens
  Table A; Target 60390; HLA-A*01:01; PAX7; ENSG00000009709; TAA
AAADTSSAY

SEQ ID NO: 60391 - protein, 9 aa, Homo sapiens
  Table A; Target 60391; HLA-A*03:01; PAX7; ENSG00000009709; TAA
AAADTSSAY

SEQ ID NO: 60392 - protein, 9 aa, Homo sapiens
  Table A; Target 60392; HLA-A*03:02; PAX7; ENSG00000009709; TAA
AAADTSSAY

SEQ ID NO: 60393 - protein, 9 aa, Homo sapiens
  Table A; Target 60393; HLA-A*11:01; PAX7; ENSG00000009709; TAA
AAADTSSAY

SEQ ID NO: 60394 - protein, 9 aa, Homo sapiens
  Table A; Target 60394; HLA-A*25:01; PAX7; ENSG00000009709; TAA
AAADTSSAY

SEQ ID NO: 60395 - protein, 9 aa, Homo sapiens
  Table A; Target 60395; HLA-A*26:01; PAX7; ENSG00000009709; TAA
AAADTSSAY

SEQ ID NO: 60396 - protein, 9 aa, Homo sapiens
  Table A; Target 60396; HLA-A*29:02; PAX7; ENSG00000009709; TAA
AAADTSSAY

SEQ ID NO: 60397 - protein, 9 aa, Homo sapiens
  Table A; Target 60397; HLA-A*30:02; PAX7; ENSG00000009709; TAA
AAADTSSAY

SEQ ID NO: 60398 - protein, 9 aa, Homo sapiens
  Table A; Target 60398; HLA-A*32:01; PAX7; ENSG00000009709; TAA
AAADTSSAY

SEQ ID NO: 60399 - protein, 9 aa, Homo sapiens
  Table A; Target 60399; HLA-A*68:01; PAX7; ENSG00000009709; TAA
AAADTSSAY

SEQ ID NO: 60400 - protein, 9 aa, Homo sapiens
  Table A; Target 60400; HLA-B*13:02; PAX7; ENSG00000009709; TAA
AAADTSSAY

SEQ ID NO: 60401 - protein, 9 aa, Homo sapiens
  Table A; Target 60401; HLA-B*15:01; PAX7; ENSG00000009709; TAA
AAADTSSAY

SEQ ID NO: 60402 - protein, 9 aa, Homo sapiens
  Table A; Target 60402; HLA-B*15:03; PAX7; ENSG00000009709; TAA
AAADTSSAY

SEQ ID NO: 60403 - protein, 9 aa, Homo sapiens
  Table A; Target 60403; HLA-B*18:01; PAX7; ENSG00000009709; TAA
AAADTSSAY

SEQ ID NO: 60404 - protein, 9 aa, Homo sapiens
  Table A; Target 60404; HLA-B*27:02; PAX7; ENSG00000009709; TAA
AAADTSSAY

SEQ ID NO: 60405 - protein, 9 aa, Homo sapiens
  Table A; Target 60405; HLA-B*27:05; PAX7; ENSG00000009709; TAA
AAADTSSAY

SEQ ID NO: 60406 - protein, 9 aa, Homo sapiens
  Table A; Target 60406; HLA-B*35:01; PAX7; ENSG00000009709; TAA
AAADTSSAY

SEQ ID NO: 60407 - protein, 9 aa, Homo sapiens
  Table A; Target 60407; HLA-B*35:03; PAX7; ENSG00000009709; TAA
AAADTSSAY

SEQ ID NO: 60408 - protein, 9 aa, Homo sapiens
  Table A; Target 60408; HLA-B*39:01; PAX7; ENSG00000009709; TAA
AAADTSSAY

SEQ ID NO: 60409 - protein, 9 aa, Homo sapiens
  Table A; Target 60409; HLA-B*44:02; PAX7; ENSG00000009709; TAA
AAADTSSAY

SEQ ID NO: 60410 - protein, 9 aa, Homo sapiens
  Table A; Target 60410; HLA-B*44:03; PAX7; ENSG00000009709; TAA
AAADTSSAY

SEQ ID NO: 60411 - protein, 9 aa, Homo sapiens
  Table A; Target 60411; HLA-B*46:01; PAX7; ENSG00000009709; TAA
AAADTSSAY

SEQ ID NO: 60412 - protein, 9 aa, Homo sapiens
  Table A; Target 60412; HLA-B*55:01; PAX7; ENSG00000009709; TAA
AAADTSSAY

SEQ ID NO: 60413 - protein, 9 aa, Homo sapiens
  Table A; Target 60413; HLA-B*57:01; PAX7; ENSG00000009709; TAA
AAADTSSAY

SEQ ID NO: 60414 - protein, 9 aa, Homo sapiens
  Table A; Target 60414; HLA-B*58:01; PAX7; ENSG00000009709; TAA
AAADTSSAY

SEQ ID NO: 60415 - protein, 9 aa, Homo sapiens
  Table A; Target 60415; HLA-C*01:02; PAX7; ENSG00000009709; TAA
AAADTSSAY

SEQ ID NO: 60416 - protein, 9 aa, Homo sapiens
  Table A; Target 60416; HLA-C*02:02; PAX7; ENSG00000009709; TAA
AAADTSSAY

SEQ ID NO: 60417 - protein, 9 aa, Homo sapiens
  Table A; Target 60417; HLA-C*03:03; PAX7; ENSG00000009709; TAA
AAADTSSAY

SEQ ID NO: 60418 - protein, 9 aa, Homo sapiens
  Table A; Target 60418; HLA-C*03:04; PAX7; ENSG00000009709; TAA
AAADTSSAY

SEQ ID NO: 60419 - protein, 9 aa, Homo sapiens
  Table A; Target 60419; HLA-C*04:01; PAX7; ENSG00000009709; TAA
AAADTSSAY

SEQ ID NO: 60420 - protein, 9 aa, Homo sapiens
  Table A; Target 60420; HLA-C*05:01; PAX7; ENSG00000009709; TAA
AAADTSSAY

SEQ ID NO: 60421 - protein, 9 aa, Homo sapiens
  Table A; Target 60421; HLA-C*07:02; PAX7; ENSG00000009709; TAA
AAADTSSAY

SEQ ID NO: 60422 - protein, 9 aa, Homo sapiens
  Table A; Target 60422; HLA-C*07:04; PAX7; ENSG00000009709; TAA
AAADTSSAY

SEQ ID NO: 60423 - protein, 9 aa, Homo sapiens
  Table A; Target 60423; HLA-C*07:06; PAX7; ENSG00000009709; TAA
AAADTSSAY

SEQ ID NO: 60424 - protein, 9 aa, Homo sapiens
  Table A; Target 60424; HLA-C*12:03; PAX7; ENSG00000009709; TAA
AAADTSSAY

SEQ ID NO: 60425 - protein, 9 aa, Homo sapiens
  Table A; Target 60425; HLA-C*14:02; PAX7; ENSG00000009709; TAA
AAADTSSAY

SEQ ID NO: 60426 - protein, 9 aa, Homo sapiens
  Table A; Target 60426; HLA-C*16:01; PAX7; ENSG00000009709; TAA
AAADTSSAY

SEQ ID NO: 60427 - protein, 9 aa, Homo sapiens
  Table A; Target 60427; HLA-C*16:02; PAX7; ENSG00000009709; TAA
AAADTSSAY

SEQ ID NO: 60428 - protein, 9 aa, Homo sapiens
  Table A; Target 60428; HLA-C*16:04; PAX7; ENSG00000009709; TAA
AAADTSSAY

SEQ ID NO: 60429 - protein, 10 aa, Homo sapiens
  Table A; Target 60429; HLA-C*01:02; PAX7; ENSG00000009709; TAA
AAADTSSAYG

SEQ ID NO: 60430 - protein, 10 aa, Homo sapiens
  Table A; Target 60430; HLA-C*04:01; PAX7; ENSG00000009709; TAA
AAADTSSAYG

SEQ ID NO: 60431 - protein, 10 aa, Homo sapiens
  Table A; Target 60431; HLA-C*06:02; PAX7; ENSG00000009709; TAA
AAADTSSAYG

SEQ ID NO: 60432 - protein, 10 aa, Homo sapiens
  Table A; Target 60432; HLA-C*07:01; PAX7; ENSG00000009709; TAA
AAADTSSAYG

SEQ ID NO: 60433 - protein, 10 aa, Homo sapiens
  Table A; Target 60433; HLA-C*07:02; PAX7; ENSG00000009709; TAA
AAADTSSAYG

SEQ ID NO: 60434 - protein, 10 aa, Homo sapiens
  Table A; Target 60434; HLA-C*07:04; PAX7; ENSG00000009709; TAA
AAADTSSAYG

SEQ ID NO: 60435 - protein, 10 aa, Homo sapiens
  Table A; Target 60435; HLA-C*12:03; PAX7; ENSG00000009709; TAA
AAADTSSAYG

SEQ ID NO: 60436 - protein, 10 aa, Homo sapiens
  Table A; Target 60436; HLA-C*16:02; PAX7; ENSG00000009709; TAA
AAADTSSAYG

SEQ ID NO: 60437 - protein, 11 aa, Homo sapiens
  Table A; Target 60437; HLA-A*03:02; PAX7; ENSG00000009709; TAA
AAADTSSAYGA

SEQ ID NO: 60438 - protein, 11 aa, Homo sapiens
  Table A; Target 60438; HLA-A*11:01; PAX7; ENSG00000009709; TAA
AAADTSSAYGA

SEQ ID NO: 60439 - protein, 11 aa, Homo sapiens
  Table A; Target 60439; HLA-B*56:01; PAX7; ENSG00000009709; TAA
AAADTSSAYGA

SEQ ID NO: 60440 - protein, 8 aa, Homo sapiens
  Table A; Target 60440; HLA-A*01:01; PAX7; ENSG00000009709; TAA
AADTSSAY

SEQ ID NO: 60441 - protein, 8 aa, Homo sapiens
  Table A; Target 60441; HLA-A*30:02; PAX7; ENSG00000009709; TAA
AADTSSAY

SEQ ID NO: 60442 - protein, 8 aa, Homo sapiens
  Table A; Target 60442; HLA-A*32:01; PAX7; ENSG00000009709; TAA
AADTSSAY

SEQ ID NO: 60443 - protein, 8 aa, Homo sapiens
  Table A; Target 60443; HLA-B*15:01; PAX7; ENSG00000009709; TAA
AADTSSAY

SEQ ID NO: 60444 - protein, 8 aa, Homo sapiens
  Table A; Target 60444; HLA-B*15:03; PAX7; ENSG00000009709; TAA
AADTSSAY

SEQ ID NO: 60445 - protein, 8 aa, Homo sapiens
  Table A; Target 60445; HLA-B*35:01; PAX7; ENSG00000009709; TAA
AADTSSAY

SEQ ID NO: 60446 - protein, 8 aa, Homo sapiens
  Table A; Target 60446; HLA-B*39:01; PAX7; ENSG00000009709; TAA
AADTSSAY

SEQ ID NO: 60447 - protein, 8 aa, Homo sapiens
  Table A; Target 60447; HLA-B*46:01; PAX7; ENSG00000009709; TAA
AADTSSAY

SEQ ID NO: 60448 - protein, 8 aa, Homo sapiens
  Table A; Target 60448; HLA-B*55:01; PAX7; ENSG00000009709; TAA
AADTSSAY

SEQ ID NO: 60449 - protein, 8 aa, Homo sapiens
  Table A; Target 60449; HLA-B*58:01; PAX7; ENSG00000009709; TAA
AADTSSAY

SEQ ID NO: 60450 - protein, 8 aa, Homo sapiens
  Table A; Target 60450; HLA-C*01:02; PAX7; ENSG00000009709; TAA
AADTSSAY

SEQ ID NO: 60451 - protein, 8 aa, Homo sapiens
  Table A; Target 60451; HLA-C*03:03; PAX7; ENSG00000009709; TAA
AADTSSAY

SEQ ID NO: 60452 - protein, 8 aa, Homo sapiens
  Table A; Target 60452; HLA-C*03:04; PAX7; ENSG00000009709; TAA
AADTSSAY

SEQ ID NO: 60453 - protein, 8 aa, Homo sapiens
  Table A; Target 60453; HLA-C*04:01; PAX7; ENSG00000009709; TAA
AADTSSAY

SEQ ID NO: 60454 - protein, 8 aa, Homo sapiens
  Table A; Target 60454; HLA-C*05:01; PAX7; ENSG00000009709; TAA
AADTSSAY

SEQ ID NO: 60455 - protein, 8 aa, Homo sapiens
  Table A; Target 60455; HLA-C*07:01; PAX7; ENSG00000009709; TAA
AADTSSAY

SEQ ID NO: 60456 - protein, 8 aa, Homo sapiens
  Table A; Target 60456; HLA-C*07:04; PAX7; ENSG00000009709; TAA
AADTSSAY

SEQ ID NO: 60457 - protein, 8 aa, Homo sapiens
  Table A; Target 60457; HLA-C*14:02; PAX7; ENSG00000009709; TAA
AADTSSAY

SEQ ID NO: 60458 - protein, 8 aa, Homo sapiens
  Table A; Target 60458; HLA-C*16:01; PAX7; ENSG00000009709; TAA
AADTSSAY

SEQ ID NO: 60459 - protein, 8 aa, Homo sapiens
  Table A; Target 60459; HLA-C*16:02; PAX7; ENSG00000009709; TAA
AADTSSAY

SEQ ID NO: 60460 - protein, 8 aa, Homo sapiens
  Table A; Target 60460; HLA-C*16:04; PAX7; ENSG00000009709; TAA
AADTSSAY

SEQ ID NO: 60461 - protein, 9 aa, Homo sapiens
  Table A; Target 60461; HLA-C*05:01; PAX7; ENSG00000009709; TAA
AADTSSAYG

SEQ ID NO: 60462 - protein, 11 aa, Homo sapiens
  Table A; Target 60462; HLA-A*01:01; PAX7; ENSG00000009709; TAA
AADTSSAYGAR

SEQ ID NO: 60463 - protein, 11 aa, Homo sapiens
  Table A; Target 60463; HLA-A*11:01; PAX7; ENSG00000009709; TAA
AADTSSAYGAR

SEQ ID NO: 60464 - protein, 11 aa, Homo sapiens
  Table A; Target 60464; HLA-A*31:01; PAX7; ENSG00000009709; TAA
AADTSSAYGAR

SEQ ID NO: 60465 - protein, 11 aa, Homo sapiens
  Table A; Target 60465; HLA-A*68:01; PAX7; ENSG00000009709; TAA
AADTSSAYGAR

SEQ ID NO: 60466 - protein, 11 aa, Homo sapiens
  Table A; Target 60466; HLA-C*05:01; PAX7; ENSG00000009709; TAA
AADTSSAYGAR

SEQ ID NO: 60467 - protein, 11 aa, Homo sapiens
  Table A; Target 60467; HLA-C*07:06; PAX7; ENSG00000009709; TAA
AADTSSAYGAR

SEQ ID NO: 60468 - protein, 9 aa, Homo sapiens
  Table A; Target 60468; HLA-A*03:01; PAX7; ENSG00000009709; TAA
AALPGTVPR

SEQ ID NO: 60469 - protein, 9 aa, Homo sapiens
  Table A; Target 60469; HLA-A*03:02; PAX7; ENSG00000009709; TAA
AALPGTVPR

SEQ ID NO: 60470 - protein, 9 aa, Homo sapiens
  Table A; Target 60470; HLA-A*11:01; PAX7; ENSG00000009709; TAA
AALPGTVPR

SEQ ID NO: 60471 - protein, 9 aa, Homo sapiens
  Table A; Target 60471; HLA-A*29:02; PAX7; ENSG00000009709; TAA
AALPGTVPR

SEQ ID NO: 60472 - protein, 9 aa, Homo sapiens
  Table A; Target 60472; HLA-A*30:02; PAX7; ENSG00000009709; TAA
AALPGTVPR

SEQ ID NO: 60473 - protein, 9 aa, Homo sapiens
  Table A; Target 60473; HLA-A*31:01; PAX7; ENSG00000009709; TAA
AALPGTVPR

SEQ ID NO: 60474 - protein, 9 aa, Homo sapiens
  Table A; Target 60474; HLA-A*33:01; PAX7; ENSG00000009709; TAA
AALPGTVPR

SEQ ID NO: 60475 - protein, 9 aa, Homo sapiens
  Table A; Target 60475; HLA-A*33:03; PAX7; ENSG00000009709; TAA
AALPGTVPR

SEQ ID NO: 60476 - protein, 9 aa, Homo sapiens
  Table A; Target 60476; HLA-A*68:01; PAX7; ENSG00000009709; TAA
AALPGTVPR

SEQ ID NO: 60477 - protein, 9 aa, Homo sapiens
  Table A; Target 60477; HLA-B*27:02; PAX7; ENSG00000009709; TAA
AALPGTVPR

SEQ ID NO: 60478 - protein, 9 aa, Homo sapiens
  Table A; Target 60478; HLA-B*27:05; PAX7; ENSG00000009709; TAA
AALPGTVPR

SEQ ID NO: 60479 - protein, 9 aa, Homo sapiens
  Table A; Target 60479; HLA-B*35:01; PAX7; ENSG00000009709; TAA
AALPGTVPR

SEQ ID NO: 60480 - protein, 9 aa, Homo sapiens
  Table A; Target 60480; HLA-B*46:01; PAX7; ENSG00000009709; TAA
AALPGTVPR

SEQ ID NO: 60481 - protein, 9 aa, Homo sapiens
  Table A; Target 60481; HLA-B*56:01; PAX7; ENSG00000009709; TAA
AALPGTVPR

SEQ ID NO: 60482 - protein, 9 aa, Homo sapiens
  Table A; Target 60482; HLA-B*57:01; PAX7; ENSG00000009709; TAA
AALPGTVPR

SEQ ID NO: 60483 - protein, 9 aa, Homo sapiens
  Table A; Target 60483; HLA-B*58:01; PAX7; ENSG00000009709; TAA
AALPGTVPR

SEQ ID NO: 60484 - protein, 9 aa, Homo sapiens
  Table A; Target 60484; HLA-C*01:02; PAX7; ENSG00000009709; TAA
AALPGTVPR

SEQ ID NO: 60485 - protein, 9 aa, Homo sapiens
  Table A; Target 60485; HLA-C*02:02; PAX7; ENSG00000009709; TAA
AALPGTVPR

SEQ ID NO: 60486 - protein, 9 aa, Homo sapiens
  Table A; Target 60486; HLA-C*03:03; PAX7; ENSG00000009709; TAA
AALPGTVPR

SEQ ID NO: 60487 - protein, 9 aa, Homo sapiens
  Table A; Target 60487; HLA-C*03:04; PAX7; ENSG00000009709; TAA
AALPGTVPR

SEQ ID NO: 60488 - protein, 9 aa, Homo sapiens
  Table A; Target 60488; HLA-C*07:06; PAX7; ENSG00000009709; TAA
AALPGTVPR

SEQ ID NO: 60489 - protein, 9 aa, Homo sapiens
  Table A; Target 60489; HLA-C*16:01; PAX7; ENSG00000009709; TAA
AALPGTVPR

SEQ ID NO: 60490 - protein, 9 aa, Homo sapiens
  Table A; Target 60490; HLA-C*16:04; PAX7; ENSG00000009709; TAA
AALPGTVPR

SEQ ID NO: 60491 - protein, 10 aa, Homo sapiens
  Table A; Target 60491; HLA-A*02:01; PAX7; ENSG00000009709; TAA
AALPGTVPRM

SEQ ID NO: 60492 - protein, 10 aa, Homo sapiens
  Table A; Target 60492; HLA-A*02:04; PAX7; ENSG00000009709; TAA
AALPGTVPRM

SEQ ID NO: 60493 - protein, 10 aa, Homo sapiens
  Table A; Target 60493; HLA-A*11:01; PAX7; ENSG00000009709; TAA
AALPGTVPRM

SEQ ID NO: 60494 - protein, 10 aa, Homo sapiens
  Table A; Target 60494; HLA-A*23:01; PAX7; ENSG00000009709; TAA
AALPGTVPRM

SEQ ID NO: 60495 - protein, 10 aa, Homo sapiens
  Table A; Target 60495; HLA-A*26:01; PAX7; ENSG00000009709; TAA
AALPGTVPRM

SEQ ID NO: 60496 - protein, 10 aa, Homo sapiens
  Table A; Target 60496; HLA-B*57:01; PAX7; ENSG00000009709; TAA
AALPGTVPRM

SEQ ID NO: 60497 - protein, 10 aa, Homo sapiens
  Table A; Target 60497; HLA-B*58:01; PAX7; ENSG00000009709; TAA
AALPGTVPRM

SEQ ID NO: 60498 - protein, 10 aa, Homo sapiens
  Table A; Target 60498; HLA-C*02:02; PAX7; ENSG00000009709; TAA
AALPGTVPRM

SEQ ID NO: 60499 - protein, 11 aa, Homo sapiens
  Table A; Target 60499; HLA-C*02:02; PAX7; ENSG00000009709; TAA
AALPGTVPRMM

SEQ ID NO: 60500 - protein, 9 aa, Homo sapiens
  Table A; Target 60500; HLA-C*01:02; PAX7; ENSG00000009709; TAA
AAPSNHMNP

SEQ ID NO: 60501 - protein, 10 aa, Homo sapiens
  Table A; Target 60501; HLA-C*16:02; PAX7; ENSG00000009709; TAA
AAPSNHMNPV

SEQ ID NO: 60502 - protein, 8 aa, Homo sapiens
  Table A; Target 60502; HLA-B*37:01; PAX7; ENSG00000009709; TAA
ADFSISPL

SEQ ID NO: 60503 - protein, 10 aa, Homo sapiens
  Table A; Target 60503; HLA-B*37:01; PAX7; ENSG00000009709; TAA
ADSIKPGDSL

SEQ ID NO: 60504 - protein, 8 aa, Homo sapiens
  Table A; Target 60504; HLA-C*04:01; PAX7; ENSG00000009709; TAA
ADTSSAYG

SEQ ID NO: 60505 - protein, 11 aa, Homo sapiens
  Table A; Target 60505; HLA-A*30:01; PAX7; ENSG00000009709; TAA
AEQLEELEKAF

SEQ ID NO: 60506 - protein, 11 aa, Homo sapiens
  Table A; Target 60506; HLA-B*27:02; PAX7; ENSG00000009709; TAA
AEQLEELEKAF

SEQ ID NO: 60507 - protein, 11 aa, Homo sapiens
  Table A; Target 60507; HLA-B*44:02; PAX7; ENSG00000009709; TAA
AEQLEELEKAF

SEQ ID NO: 60508 - protein, 11 aa, Homo sapiens
  Table A; Target 60508; HLA-B*44:03; PAX7; ENSG00000009709; TAA
AEQLEELEKAF

SEQ ID NO: 60509 - protein, 11 aa, Homo sapiens
  Table A; Target 60509; HLA-C*16:04; PAX7; ENSG00000009709; TAA
AEQLEELEKAF

SEQ ID NO: 60510 - protein, 9 aa, Homo sapiens
  Table A; Target 60510; HLA-A*30:02; PAX7; ENSG00000009709; TAA
AGANQLAAF

SEQ ID NO: 60511 - protein, 9 aa, Homo sapiens
  Table A; Target 60511; HLA-A*32:01; PAX7; ENSG00000009709; TAA
AGANQLAAF

SEQ ID NO: 60512 - protein, 9 aa, Homo sapiens
  Table A; Target 60512; HLA-B*15:01; PAX7; ENSG00000009709; TAA
AGANQLAAF

SEQ ID NO: 60513 - protein, 9 aa, Homo sapiens
  Table A; Target 60513; HLA-B*15:03; PAX7; ENSG00000009709; TAA
AGANQLAAF

SEQ ID NO: 60514 - protein, 9 aa, Homo sapiens
  Table A; Target 60514; HLA-B*27:05; PAX7; ENSG00000009709; TAA
AGANQLAAF

SEQ ID NO: 60515 - protein, 9 aa, Homo sapiens
  Table A; Target 60515; HLA-B*46:01; PAX7; ENSG00000009709; TAA
AGANQLAAF

SEQ ID NO: 60516 - protein, 9 aa, Homo sapiens
  Table A; Target 60516; HLA-B*58:01; PAX7; ENSG00000009709; TAA
AGANQLAAF

SEQ ID NO: 60517 - protein, 9 aa, Homo sapiens
  Table A; Target 60517; HLA-C*02:02; PAX7; ENSG00000009709; TAA
AGANQLAAF

SEQ ID NO: 60518 - protein, 9 aa, Homo sapiens
  Table A; Target 60518; HLA-C*03:03; PAX7; ENSG00000009709; TAA
AGANQLAAF

SEQ ID NO: 60519 - protein, 9 aa, Homo sapiens
  Table A; Target 60519; HLA-C*03:04; PAX7; ENSG00000009709; TAA
AGANQLAAF

SEQ ID NO: 60520 - protein, 9 aa, Homo sapiens
  Table A; Target 60520; HLA-C*14:02; PAX7; ENSG00000009709; TAA
AGANQLAAF

SEQ ID NO: 60521 - protein, 9 aa, Homo sapiens
  Table A; Target 60521; HLA-C*16:01; PAX7; ENSG00000009709; TAA
AGANQLAAF

SEQ ID NO: 60522 - protein, 9 aa, Homo sapiens
  Table A; Target 60522; HLA-C*16:04; PAX7; ENSG00000009709; TAA
AGANQLAAF

SEQ ID NO: 60523 - protein, 8 aa, Homo sapiens
  Table A; Target 60523; HLA-A*30:02; PAX7; ENSG00000009709; TAA
AGYQYGQY

SEQ ID NO: 60524 - protein, 10 aa, Homo sapiens
  Table A; Target 60524; HLA-A*02:03; PAX7; ENSG00000009709; TAA
AIGGSKPRQV

SEQ ID NO: 60525 - protein, 9 aa, Homo sapiens
  Table A; Target 60525; HLA-A*02:01; PAX7; ENSG00000009709; TAA
ALPGTVPRM

SEQ ID NO: 60526 - protein, 9 aa, Homo sapiens
  Table A; Target 60526; HLA-A*02:03; PAX7; ENSG00000009709; TAA
ALPGTVPRM

SEQ ID NO: 60527 - protein, 9 aa, Homo sapiens
  Table A; Target 60527; HLA-A*02:04; PAX7; ENSG00000009709; TAA
ALPGTVPRM

SEQ ID NO: 60528 - protein, 9 aa, Homo sapiens
  Table A; Target 60528; HLA-A*02:07; PAX7; ENSG00000009709; TAA
ALPGTVPRM

SEQ ID NO: 60529 - protein, 9 aa, Homo sapiens
  Table A; Target 60529; HLA-A*03:02; PAX7; ENSG00000009709; TAA
ALPGTVPRM

SEQ ID NO: 60530 - protein, 9 aa, Homo sapiens
  Table A; Target 60530; HLA-A*24:02; PAX7; ENSG00000009709; TAA
ALPGTVPRM

SEQ ID NO: 60531 - protein, 9 aa, Homo sapiens
  Table A; Target 60531; HLA-A*26:01; PAX7; ENSG00000009709; TAA
ALPGTVPRM

SEQ ID NO: 60532 - protein, 9 aa, Homo sapiens
  Table A; Target 60532; HLA-A*29:02; PAX7; ENSG00000009709; TAA
ALPGTVPRM

SEQ ID NO: 60533 - protein, 9 aa, Homo sapiens
  Table A; Target 60533; HLA-B*13:02; PAX7; ENSG00000009709; TAA
ALPGTVPRM

SEQ ID NO: 60534 - protein, 9 aa, Homo sapiens
  Table A; Target 60534; HLA-B*55:01; PAX7; ENSG00000009709; TAA
ALPGTVPRM

SEQ ID NO: 60535 - protein, 9 aa, Homo sapiens
  Table A; Target 60535; HLA-C*01:02; PAX7; ENSG00000009709; TAA
ALPGTVPRM

SEQ ID NO: 60536 - protein, 9 aa, Homo sapiens
  Table A; Target 60536; HLA-C*07:04; PAX7; ENSG00000009709; TAA
ALPGTVPRM

SEQ ID NO: 60537 - protein, 10 aa, Homo sapiens
  Table A; Target 60537; HLA-C*07:02; PAX7; ENSG00000009709; TAA
ALPGTVPRMM

SEQ ID NO: 60538 - protein, 11 aa, Homo sapiens
  Table A; Target 60538; HLA-B*07:02; PAX7; ENSG00000009709; TAA
APGQNYPRTGF

SEQ ID NO: 60539 - protein, 11 aa, Homo sapiens
  Table A; Target 60539; HLA-C*07:02; PAX7; ENSG00000009709; TAA
APGQNYPRTGF

SEQ ID NO: 60540 - protein, 9 aa, Homo sapiens
  Table A; Target 60540; HLA-B*07:02; PAX7; ENSG00000009709; TAA
APSNHMNPV

SEQ ID NO: 60541 - protein, 9 aa, Homo sapiens
  Table A; Target 60541; HLA-B*37:01; PAX7; ENSG00000009709; TAA
APSNHMNPV

SEQ ID NO: 60542 - protein, 9 aa, Homo sapiens
  Table A; Target 60542; HLA-B*55:01; PAX7; ENSG00000009709; TAA
APSNHMNPV

SEQ ID NO: 60543 - protein, 9 aa, Homo sapiens
  Table A; Target 60543; HLA-B*56:01; PAX7; ENSG00000009709; TAA
APSNHMNPV

SEQ ID NO: 60544 - protein, 9 aa, Homo sapiens
  Table A; Target 60544; HLA-C*07:02; PAX7; ENSG00000009709; TAA
APSNHMNPV

SEQ ID NO: 60545 - protein, 9 aa, Homo sapiens
  Table A; Target 60545; HLA-A*02:03; PAX7; ENSG00000009709; TAA
AQRTKLTEA

SEQ ID NO: 60546 - protein, 9 aa, Homo sapiens
  Table A; Target 60546; HLA-B*40:02; PAX7; ENSG00000009709; TAA
AQRTKLTEA

SEQ ID NO: 60547 - protein, 8 aa, Homo sapiens
  Table A; Target 60547; HLA-B*27:02; PAX7; ENSG00000009709; TAA
ARHSFSSY

SEQ ID NO: 60548 - protein, 8 aa, Homo sapiens
  Table A; Target 60548; HLA-C*16:04; PAX7; ENSG00000009709; TAA
ARHSFSSY

SEQ ID NO: 60549 - protein, 9 aa, Homo sapiens
  Table A; Target 60549; HLA-A*02:07; PAX7; ENSG00000009709; TAA
ATPDVEKKI

SEQ ID NO: 60550 - protein, 9 aa, Homo sapiens
  Table A; Target 60550; HLA-A*32:01; PAX7; ENSG00000009709; TAA
ATPDVEKKI

SEQ ID NO: 60551 - protein, 9 aa, Homo sapiens
  Table A; Target 60551; HLA-C*16:02; PAX7; ENSG00000009709; TAA
ATPDVEKKI

SEQ ID NO: 60552 - protein, 9 aa, Homo sapiens
  Table A; Target 60552; HLA-A*02:07; PAX7; ENSG00000009709; TAA
AVDYLAKNV

SEQ ID NO: 60553 - protein, 9 aa, Homo sapiens
  Table A; Target 60553; HLA-B*13:02; PAX7; ENSG00000009709; TAA
AVDYLAKNV

SEQ ID NO: 60554 - protein, 9 aa, Homo sapiens
  Table A; Target 60554; HLA-B*55:01; PAX7; ENSG00000009709; TAA
AVDYLAKNV

SEQ ID NO: 60555 - protein, 9 aa, Homo sapiens
  Table A; Target 60555; HLA-C*04:01; PAX7; ENSG00000009709; TAA
AVDYLAKNV

SEQ ID NO: 60556 - protein, 9 aa, Homo sapiens
  Table A; Target 60556; HLA-C*05:01; PAX7; ENSG00000009709; TAA
AVDYLAKNV

SEQ ID NO: 60557 - protein, 9 aa, Homo sapiens
  Table A; Target 60557; HLA-C*06:02; PAX7; ENSG00000009709; TAA
AVDYLAKNV

SEQ ID NO: 60558 - protein, 9 aa, Homo sapiens
  Table A; Target 60558; HLA-C*16:02; PAX7; ENSG00000009709; TAA
AVDYLAKNV

SEQ ID NO: 60559 - protein, 11 aa, Homo sapiens
  Table A; Target 60559; HLA-A*02:07; PAX7; ENSG00000009709; TAA
AVDYLAKNVSL

SEQ ID NO: 60560 - protein, 10 aa, Homo sapiens
  Table A; Target 60560; HLA-A*29:02; PAX7; ENSG00000009709; TAA
AVPPQPQADF

SEQ ID NO: 60561 - protein, 10 aa, Homo sapiens
  Table A; Target 60561; HLA-A*30:02; PAX7; ENSG00000009709; TAA
AVPPQPQADF

SEQ ID NO: 60562 - protein, 8 aa, Homo sapiens
  Table A; Target 60562; HLA-A*24:02; PAX7; ENSG00000009709; TAA
AYGARHSF

SEQ ID NO: 60563 - protein, 8 aa, Homo sapiens
  Table A; Target 60563; HLA-A*32:01; PAX7; ENSG00000009709; TAA
AYGARHSF

SEQ ID NO: 60564 - protein, 8 aa, Homo sapiens
  Table A; Target 60564; HLA-C*14:02; PAX7; ENSG00000009709; TAA
AYGARHSF

SEQ ID NO: 60565 - protein, 8 aa, Homo sapiens
  Table A; Target 60565; HLA-C*16:01; PAX7; ENSG00000009709; TAA
AYGARHSF

SEQ ID NO: 60566 - protein, 8 aa, Homo sapiens
  Table A; Target 60566; HLA-A*33:01; PAX7; ENSG00000009709; TAA
DGGSTVHR

SEQ ID NO: 60567 - protein, 8 aa, Homo sapiens
  Table A; Target 60567; HLA-A*33:03; PAX7; ENSG00000009709; TAA
DGGSTVHR

SEQ ID NO: 60568 - protein, 10 aa, Homo sapiens
  Table A; Target 60568; HLA-A*33:01; PAX7; ENSG00000009709; TAA
DGILGDKGNR

SEQ ID NO: 60569 - protein, 8 aa, Homo sapiens
  Table A; Target 60569; HLA-C*07:01; PAX7; ENSG00000009709; TAA
DIYTREEL

SEQ ID NO: 60570 - protein, 8 aa, Homo sapiens
  Table A; Target 60570; HLA-B*18:01; PAX7; ENSG00000009709; TAA
DPVAGYQY

SEQ ID NO: 60571 - protein, 8 aa, Homo sapiens
  Table A; Target 60571; HLA-B*35:01; PAX7; ENSG00000009709; TAA
DPVAGYQY

SEQ ID NO: 60572 - protein, 8 aa, Homo sapiens
  Table A; Target 60572; HLA-B*55:01; PAX7; ENSG00000009709; TAA
DPVAGYQY

SEQ ID NO: 60573 - protein, 8 aa, Homo sapiens
  Table A; Target 60573; HLA-C*03:03; PAX7; ENSG00000009709; TAA
DPVAGYQY

SEQ ID NO: 60574 - protein, 8 aa, Homo sapiens
  Table A; Target 60574; HLA-C*07:01; PAX7; ENSG00000009709; TAA
DPVAGYQY

SEQ ID NO: 60575 - protein, 11 aa, Homo sapiens
  Table A; Target 60575; HLA-A*25:01; PAX7; ENSG00000009709; TAA
DPVAGYQYGQY

SEQ ID NO: 60576 - protein, 11 aa, Homo sapiens
  Table A; Target 60576; HLA-A*26:01; PAX7; ENSG00000009709; TAA
DPVAGYQYGQY

SEQ ID NO: 60577 - protein, 11 aa, Homo sapiens
  Table A; Target 60577; HLA-A*68:01; PAX7; ENSG00000009709; TAA
DPVAGYQYGQY

SEQ ID NO: 60578 - protein, 11 aa, Homo sapiens
  Table A; Target 60578; HLA-B*35:01; PAX7; ENSG00000009709; TAA
DPVAGYQYGQY

SEQ ID NO: 60579 - protein, 9 aa, Homo sapiens
  Table A; Target 60579; HLA-B*27:05; PAX7; ENSG00000009709; TAA
DRSTVPSGL

SEQ ID NO: 60580 - protein, 9 aa, Homo sapiens
  Table A; Target 60580; HLA-B*38:01; PAX7; ENSG00000009709; TAA
DRSTVPSGL

SEQ ID NO: 60581 - protein, 9 aa, Homo sapiens
  Table A; Target 60581; HLA-B*39:01; PAX7; ENSG00000009709; TAA
DRSTVPSGL

SEQ ID NO: 60582 - protein, 8 aa, Homo sapiens
  Table A; Target 60582; HLA-B*54:01; PAX7; ENSG00000009709; TAA
DSFMNPAA

SEQ ID NO: 60583 - protein, 9 aa, Homo sapiens
  Table A; Target 60583; HLA-A*33:01; PAX7; ENSG00000009709; TAA
DSFMNPAAP

SEQ ID NO: 60584 - protein, 9 aa, Homo sapiens
  Table A; Target 60584; HLA-A*68:01; PAX7; ENSG00000009709; TAA
DSFMNPAAP

SEQ ID NO: 60585 - protein, 9 aa, Homo sapiens
  Table A; Target 60585; HLA-A*25:01; PAX7; ENSG00000009709; TAA
DSIKPGDSL

SEQ ID NO: 60586 - protein, 9 aa, Homo sapiens
  Table A; Target 60586; HLA-B*07:02; PAX7; ENSG00000009709; TAA
DSIKPGDSL

SEQ ID NO: 60587 - protein, 9 aa, Homo sapiens
  Table A; Target 60587; HLA-B*35:03; PAX7; ENSG00000009709; TAA
DSIKPGDSL

SEQ ID NO: 60588 - protein, 9 aa, Homo sapiens
  Table A; Target 60588; HLA-B*38:01; PAX7; ENSG00000009709; TAA
DSIKPGDSL

SEQ ID NO: 60589 - protein, 9 aa, Homo sapiens
  Table A; Target 60589; HLA-B*39:01; PAX7; ENSG00000009709; TAA
DSIKPGDSL

SEQ ID NO: 60590 - protein, 9 aa, Homo sapiens
  Table A; Target 60590; HLA-B*40:02; PAX7; ENSG00000009709; TAA
DSIKPGDSL

SEQ ID NO: 60591 - protein, 9 aa, Homo sapiens
  Table A; Target 60591; HLA-B*51:01; PAX7; ENSG00000009709; TAA
DSIKPGDSL

SEQ ID NO: 60592 - protein, 9 aa, Homo sapiens
  Table A; Target 60592; HLA-C*01:02; PAX7; ENSG00000009709; TAA
DSIKPGDSL

SEQ ID NO: 60593 - protein, 9 aa, Homo sapiens
  Table A; Target 60593; HLA-C*03:03; PAX7; ENSG00000009709; TAA
DSIKPGDSL

SEQ ID NO: 60594 - protein, 9 aa, Homo sapiens
  Table A; Target 60594; HLA-C*03:04; PAX7; ENSG00000009709; TAA
DSIKPGDSL

SEQ ID NO: 60595 - protein, 9 aa, Homo sapiens
  Table A; Target 60595; HLA-C*05:01; PAX7; ENSG00000009709; TAA
DSIKPGDSL

SEQ ID NO: 60596 - protein, 9 aa, Homo sapiens
  Table A; Target 60596; HLA-C*07:06; PAX7; ENSG00000009709; TAA
DSIKPGDSL

SEQ ID NO: 60597 - protein, 9 aa, Homo sapiens
  Table A; Target 60597; HLA-A*01:01; PAX7; ENSG00000009709; TAA
DSLPTSQAY

SEQ ID NO: 60598 - protein, 9 aa, Homo sapiens
  Table A; Target 60598; HLA-A*25:01; PAX7; ENSG00000009709; TAA
DSLPTSQAY

SEQ ID NO: 60599 - protein, 9 aa, Homo sapiens
  Table A; Target 60599; HLA-A*26:01; PAX7; ENSG00000009709; TAA
DSLPTSQAY

SEQ ID NO: 60600 - protein, 9 aa, Homo sapiens
  Table A; Target 60600; HLA-A*29:02; PAX7; ENSG00000009709; TAA
DSLPTSQAY

SEQ ID NO: 60601 - protein, 9 aa, Homo sapiens
  Table A; Target 60601; HLA-A*30:02; PAX7; ENSG00000009709; TAA
DSLPTSQAY

SEQ ID NO: 60602 - protein, 9 aa, Homo sapiens
  Table A; Target 60602; HLA-A*32:01; PAX7; ENSG00000009709; TAA
DSLPTSQAY

SEQ ID NO: 60603 - protein, 9 aa, Homo sapiens
  Table A; Target 60603; HLA-A*33:01; PAX7; ENSG00000009709; TAA
DSLPTSQAY

SEQ ID NO: 60604 - protein, 9 aa, Homo sapiens
  Table A; Target 60604; HLA-A*33:03; PAX7; ENSG00000009709; TAA
DSLPTSQAY

SEQ ID NO: 60605 - protein, 9 aa, Homo sapiens
  Table A; Target 60605; HLA-B*15:01; PAX7; ENSG00000009709; TAA
DSLPTSQAY

SEQ ID NO: 60606 - protein, 9 aa, Homo sapiens
  Table A; Target 60606; HLA-B*15:03; PAX7; ENSG00000009709; TAA
DSLPTSQAY

SEQ ID NO: 60607 - protein, 9 aa, Homo sapiens
  Table A; Target 60607; HLA-B*18:01; PAX7; ENSG00000009709; TAA
DSLPTSQAY

SEQ ID NO: 60608 - protein, 9 aa, Homo sapiens
  Table A; Target 60608; HLA-B*35:01; PAX7; ENSG00000009709; TAA
DSLPTSQAY

SEQ ID NO: 60609 - protein, 9 aa, Homo sapiens
  Table A; Target 60609; HLA-B*46:01; PAX7; ENSG00000009709; TAA
DSLPTSQAY

SEQ ID NO: 60610 - protein, 9 aa, Homo sapiens
  Table A; Target 60610; HLA-B*58:01; PAX7; ENSG00000009709; TAA
DSLPTSQAY

SEQ ID NO: 60611 - protein, 9 aa, Homo sapiens
  Table A; Target 60611; HLA-C*03:03; PAX7; ENSG00000009709; TAA
DSLPTSQAY

SEQ ID NO: 60612 - protein, 9 aa, Homo sapiens
  Table A; Target 60612; HLA-C*07:04; PAX7; ENSG00000009709; TAA
DSLPTSQAY

SEQ ID NO: 60613 - protein, 9 aa, Homo sapiens
  Table A; Target 60613; HLA-C*07:06; PAX7; ENSG00000009709; TAA
DSLPTSQAY

SEQ ID NO: 60614 - protein, 9 aa, Homo sapiens
  Table A; Target 60614; HLA-C*14:02; PAX7; ENSG00000009709; TAA
DSLPTSQAY

SEQ ID NO: 60615 - protein, 9 aa, Homo sapiens
  Table A; Target 60615; HLA-A*25:01; PAX7; ENSG00000009709; TAA
DSTYPTTTI

SEQ ID NO: 60616 - protein, 9 aa, Homo sapiens
  Table A; Target 60616; HLA-A*33:01; PAX7; ENSG00000009709; TAA
DSTYPTTTI

SEQ ID NO: 60617 - protein, 9 aa, Homo sapiens
  Table A; Target 60617; HLA-A*68:02; PAX7; ENSG00000009709; TAA
DSTYPTTTI

SEQ ID NO: 60618 - protein, 9 aa, Homo sapiens
  Table A; Target 60618; HLA-B*38:01; PAX7; ENSG00000009709; TAA
DSTYPTTTI

SEQ ID NO: 60619 - protein, 9 aa, Homo sapiens
  Table A; Target 60619; HLA-B*51:01; PAX7; ENSG00000009709; TAA
DSTYPTTTI

SEQ ID NO: 60620 - protein, 9 aa, Homo sapiens
  Table A; Target 60620; HLA-A*26:01; PAX7; ENSG00000009709; TAA
DTSSAYGAR

SEQ ID NO: 60621 - protein, 9 aa, Homo sapiens
  Table A; Target 60621; HLA-A*33:01; PAX7; ENSG00000009709; TAA
DTSSAYGAR

SEQ ID NO: 60622 - protein, 9 aa, Homo sapiens
  Table A; Target 60622; HLA-A*33:03; PAX7; ENSG00000009709; TAA
DTSSAYGAR

SEQ ID NO: 60623 - protein, 9 aa, Homo sapiens
  Table A; Target 60623; HLA-A*68:01; PAX7; ENSG00000009709; TAA
DTSSAYGAR

SEQ ID NO: 60624 - protein, 9 aa, Homo sapiens
  Table A; Target 60624; HLA-C*07:06; PAX7; ENSG00000009709; TAA
DTSSAYGAR

SEQ ID NO: 60625 - protein, 10 aa, Homo sapiens
  Table A; Target 60625; HLA-A*68:01; PAX7; ENSG00000009709; TAA
DTSSAYGARH

SEQ ID NO: 60626 - protein, 11 aa, Homo sapiens
  Table A; Target 60626; HLA-A*01:01; PAX7; ENSG00000009709; TAA
DVESEPDLPLK

SEQ ID NO: 60627 - protein, 11 aa, Homo sapiens
  Table A; Target 60627; HLA-A*03:02; PAX7; ENSG00000009709; TAA
DVESEPDLPLK

SEQ ID NO: 60628 - protein, 11 aa, Homo sapiens
  Table A; Target 60628; HLA-A*11:01; PAX7; ENSG00000009709; TAA
DVESEPDLPLK

SEQ ID NO: 60629 - protein, 11 aa, Homo sapiens
  Table A; Target 60629; HLA-A*33:01; PAX7; ENSG00000009709; TAA
DVESEPDLPLK

SEQ ID NO: 60630 - protein, 11 aa, Homo sapiens
  Table A; Target 60630; HLA-A*68:01; PAX7; ENSG00000009709; TAA
DVESEPDLPLK

SEQ ID NO: 60631 - protein, 11 aa, Homo sapiens
  Table A; Target 60631; HLA-B*27:02; PAX7; ENSG00000009709; TAA
DVESEPDLPLK

SEQ ID NO: 60632 - protein, 9 aa, Homo sapiens
  Table A; Target 60632; HLA-A*23:01; PAX7; ENSG00000009709; TAA
DYLAKNVSL

SEQ ID NO: 60633 - protein, 9 aa, Homo sapiens
  Table A; Target 60633; HLA-A*24:02; PAX7; ENSG00000009709; TAA
DYLAKNVSL

SEQ ID NO: 60634 - protein, 9 aa, Homo sapiens
  Table A; Target 60634; HLA-A*33:01; PAX7; ENSG00000009709; TAA
DYLAKNVSL

SEQ ID NO: 60635 - protein, 9 aa, Homo sapiens
  Table A; Target 60635; HLA-A*33:03; PAX7; ENSG00000009709; TAA
DYLAKNVSL

SEQ ID NO: 60636 - protein, 9 aa, Homo sapiens
  Table A; Target 60636; HLA-B*08:01; PAX7; ENSG00000009709; TAA
DYLAKNVSL

SEQ ID NO: 60637 - protein, 9 aa, Homo sapiens
  Table A; Target 60637; HLA-B*35:01; PAX7; ENSG00000009709; TAA
DYLAKNVSL

SEQ ID NO: 60638 - protein, 9 aa, Homo sapiens
  Table A; Target 60638; HLA-B*35:03; PAX7; ENSG00000009709; TAA
DYLAKNVSL

SEQ ID NO: 60639 - protein, 9 aa, Homo sapiens
  Table A; Target 60639; HLA-B*40:02; PAX7; ENSG00000009709; TAA
DYLAKNVSL

SEQ ID NO: 60640 - protein, 9 aa, Homo sapiens
  Table A; Target 60640; HLA-C*01:02; PAX7; ENSG00000009709; TAA
DYLAKNVSL

SEQ ID NO: 60641 - protein, 9 aa, Homo sapiens
  Table A; Target 60641; HLA-C*14:02; PAX7; ENSG00000009709; TAA
DYLAKNVSL

SEQ ID NO: 60642 - protein, 10 aa, Homo sapiens
  Table A; Target 60642; HLA-A*33:01; PAX7; ENSG00000009709; TAA
DYLAKNVSLS

SEQ ID NO: 60643 - protein, 9 aa, Homo sapiens
  Table A; Target 60643; HLA-A*30:01; PAX7; ENSG00000009709; TAA
EELAQRTKL

SEQ ID NO: 60644 - protein, 9 aa, Homo sapiens
  Table A; Target 60644; HLA-B*18:01; PAX7; ENSG00000009709; TAA
EELAQRTKL

SEQ ID NO: 60645 - protein, 9 aa, Homo sapiens
  Table A; Target 60645; HLA-B*37:01; PAX7; ENSG00000009709; TAA
EELAQRTKL

SEQ ID NO: 60646 - protein, 9 aa, Homo sapiens
  Table A; Target 60646; HLA-B*40:01; PAX7; ENSG00000009709; TAA
EELAQRTKL

SEQ ID NO: 60647 - protein, 9 aa, Homo sapiens
  Table A; Target 60647; HLA-B*40:02; PAX7; ENSG00000009709; TAA
EELAQRTKL

SEQ ID NO: 60648 - protein, 9 aa, Homo sapiens
  Table A; Target 60648; HLA-B*44:02; PAX7; ENSG00000009709; TAA
EELAQRTKL

SEQ ID NO: 60649 - protein, 9 aa, Homo sapiens
  Table A; Target 60649; HLA-B*44:03; PAX7; ENSG00000009709; TAA
EELAQRTKL

SEQ ID NO: 60650 - protein, 9 aa, Homo sapiens
  Table A; Target 60650; HLA-B*49:01; PAX7; ENSG00000009709; TAA
EELAQRTKL

SEQ ID NO: 60651 - protein, 9 aa, Homo sapiens
  Table A; Target 60651; HLA-A*33:01; PAX7; ENSG00000009709; TAA
EELEKAFER

SEQ ID NO: 60652 - protein, 9 aa, Homo sapiens
  Table A; Target 60652; HLA-A*33:03; PAX7; ENSG00000009709; TAA
EELEKAFER

SEQ ID NO: 60653 - protein, 9 aa, Homo sapiens
  Table A; Target 60653; HLA-C*07:06; PAX7; ENSG00000009709; TAA
EELEKAFER

SEQ ID NO: 60654 - protein, 8 aa, Homo sapiens
  Table A; Target 60654; HLA-B*38:01; PAX7; ENSG00000009709; TAA
EHSAVLGL

SEQ ID NO: 60655 - protein, 8 aa, Homo sapiens
  Table A; Target 60655; HLA-B*39:01; PAX7; ENSG00000009709; TAA
EHSAVLGL

SEQ ID NO: 60656 - protein, 9 aa, Homo sapiens
  Table A; Target 60656; HLA-B*27:05; PAX7; ENSG00000009709; TAA
EHSAVLGLL

SEQ ID NO: 60657 - protein, 9 aa, Homo sapiens
  Table A; Target 60657; HLA-B*38:01; PAX7; ENSG00000009709; TAA
EHSAVLGLL

SEQ ID NO: 60658 - protein, 9 aa, Homo sapiens
  Table A; Target 60658; HLA-B*39:01; PAX7; ENSG00000009709; TAA
EHSAVLGLL

SEQ ID NO: 60659 - protein, 8 aa, Homo sapiens
  Table A; Target 60659; HLA-B*07:02; PAX7; ENSG00000009709; TAA
ELAQRTKL

SEQ ID NO: 60660 - protein, 8 aa, Homo sapiens
  Table A; Target 60660; HLA-B*08:01; PAX7; ENSG00000009709; TAA
ELAQRTKL

SEQ ID NO: 60661 - protein, 8 aa, Homo sapiens
  Table A; Target 60661; HLA-A*33:01; PAX7; ENSG00000009709; TAA
ELEKAFER

SEQ ID NO: 60662 - protein, 8 aa, Homo sapiens
  Table A; Target 60662; HLA-A*33:03; PAX7; ENSG00000009709; TAA
ELEKAFER

SEQ ID NO: 60663 - protein, 8 aa, Homo sapiens
  Table A; Target 60663; HLA-A*33:03; PAX7; ENSG00000009709; TAA
EPDLPLKR

SEQ ID NO: 60664 - protein, 10 aa, Homo sapiens
  Table A; Target 60664; HLA-B*44:02; PAX7; ENSG00000009709; TAA
EQLEELEKAF

SEQ ID NO: 60665 - protein, 10 aa, Homo sapiens
  Table A; Target 60665; HLA-B*44:03; PAX7; ENSG00000009709; TAA
EQLEELEKAF

SEQ ID NO: 60666 - protein, 9 aa, Homo sapiens
  Table A; Target 60666; HLA-A*01:01; PAX7; ENSG00000009709; TAA
ESEPDLPLK

SEQ ID NO: 60667 - protein, 9 aa, Homo sapiens
  Table A; Target 60667; HLA-A*03:02; PAX7; ENSG00000009709; TAA
ESEPDLPLK

SEQ ID NO: 60668 - protein, 9 aa, Homo sapiens
  Table A; Target 60668; HLA-A*11:01; PAX7; ENSG00000009709; TAA
ESEPDLPLK

SEQ ID NO: 60669 - protein, 9 aa, Homo sapiens
  Table A; Target 60669; HLA-A*33:03; PAX7; ENSG00000009709; TAA
ESEPDLPLK

SEQ ID NO: 60670 - protein, 9 aa, Homo sapiens
  Table A; Target 60670; HLA-A*68:01; PAX7; ENSG00000009709; TAA
ESEPDLPLK

SEQ ID NO: 60671 - protein, 9 aa, Homo sapiens
  Table A; Target 60671; HLA-B*27:02; PAX7; ENSG00000009709; TAA
ESEPDLPLK

SEQ ID NO: 60672 - protein, 9 aa, Homo sapiens
  Table A; Target 60672; HLA-C*07:06; PAX7; ENSG00000009709; TAA
ESEPDLPLK

SEQ ID NO: 60673 - protein, 10 aa, Homo sapiens
  Table A; Target 60673; HLA-A*01:01; PAX7; ENSG00000009709; TAA
ESEPDLPLKR

SEQ ID NO: 60674 - protein, 10 aa, Homo sapiens
  Table A; Target 60674; HLA-A*33:01; PAX7; ENSG00000009709; TAA
ESEPDLPLKR

SEQ ID NO: 60675 - protein, 10 aa, Homo sapiens
  Table A; Target 60675; HLA-A*33:03; PAX7; ENSG00000009709; TAA
ESEPDLPLKR

SEQ ID NO: 60676 - protein, 10 aa, Homo sapiens
  Table A; Target 60676; HLA-A*68:01; PAX7; ENSG00000009709; TAA
ESEPDLPLKR

SEQ ID NO: 60677 - protein, 10 aa, Homo sapiens
  Table A; Target 60677; HLA-C*07:06; PAX7; ENSG00000009709; TAA
ESEPDLPLKR

SEQ ID NO: 60678 - protein, 9 aa, Homo sapiens
  Table A; Target 60678; HLA-A*32:01; PAX7; ENSG00000009709; TAA
FMNPAAPSN

SEQ ID NO: 60679 - protein, 9 aa, Homo sapiens
  Table A; Target 60679; HLA-B*46:01; PAX7; ENSG00000009709; TAA
FMNPAAPSN

SEQ ID NO: 60680 - protein, 9 aa, Homo sapiens
  Table A; Target 60680; HLA-C*07:01; PAX7; ENSG00000009709; TAA
FMNPAAPSN

SEQ ID NO: 60681 - protein, 9 aa, Homo sapiens
  Table A; Target 60681; HLA-C*12:03; PAX7; ENSG00000009709; TAA
FMNPAAPSN

SEQ ID NO: 60682 - protein, 8 aa, Homo sapiens
  Table A; Target 60682; HLA-B*51:01; PAX7; ENSG00000009709; TAA
FPLEVSTP

SEQ ID NO: 60683 - protein, 10 aa, Homo sapiens
  Table A; Target 60683; HLA-B*35:01; PAX7; ENSG00000009709; TAA
FPLEVSTPLG

SEQ ID NO: 60684 - protein, 10 aa, Homo sapiens
  Table A; Target 60684; HLA-C*07:02; PAX7; ENSG00000009709; TAA
FPLEVSTPLG

SEQ ID NO: 60685 - protein, 9 aa, Homo sapiens
  Table A; Target 60685; HLA-A*23:01; PAX7; ENSG00000009709; TAA
FPPTGMPTL

SEQ ID NO: 60686 - protein, 9 aa, Homo sapiens
  Table A; Target 60686; HLA-A*24:02; PAX7; ENSG00000009709; TAA
FPPTGMPTL

SEQ ID NO: 60687 - protein, 9 aa, Homo sapiens
  Table A; Target 60687; HLA-B*07:02; PAX7; ENSG00000009709; TAA
FPPTGMPTL

SEQ ID NO: 60688 - protein, 9 aa, Homo sapiens
  Table A; Target 60688; HLA-B*35:01; PAX7; ENSG00000009709; TAA
FPPTGMPTL

SEQ ID NO: 60689 - protein, 9 aa, Homo sapiens
  Table A; Target 60689; HLA-B*35:03; PAX7; ENSG00000009709; TAA
FPPTGMPTL

SEQ ID NO: 60690 - protein, 9 aa, Homo sapiens
  Table A; Target 60690; HLA-B*51:01; PAX7; ENSG00000009709; TAA
FPPTGMPTL

SEQ ID NO: 60691 - protein, 9 aa, Homo sapiens
  Table A; Target 60691; HLA-B*54:01; PAX7; ENSG00000009709; TAA
FPPTGMPTL

SEQ ID NO: 60692 - protein, 9 aa, Homo sapiens
  Table A; Target 60692; HLA-B*55:01; PAX7; ENSG00000009709; TAA
FPPTGMPTL

SEQ ID NO: 60693 - protein, 9 aa, Homo sapiens
  Table A; Target 60693; HLA-B*56:01; PAX7; ENSG00000009709; TAA
FPPTGMPTL

SEQ ID NO: 60694 - protein, 9 aa, Homo sapiens
  Table A; Target 60694; HLA-C*01:02; PAX7; ENSG00000009709; TAA
FPPTGMPTL

SEQ ID NO: 60695 - protein, 9 aa, Homo sapiens
  Table A; Target 60695; HLA-C*03:03; PAX7; ENSG00000009709; TAA
FPPTGMPTL

SEQ ID NO: 60696 - protein, 9 aa, Homo sapiens
  Table A; Target 60696; HLA-C*03:04; PAX7; ENSG00000009709; TAA
FPPTGMPTL

SEQ ID NO: 60697 - protein, 9 aa, Homo sapiens
  Table A; Target 60697; HLA-C*07:02; PAX7; ENSG00000009709; TAA
FPPTGMPTL

SEQ ID NO: 60698 - protein, 10 aa, Homo sapiens
  Table A; Target 60698; HLA-C*06:02; PAX7; ENSG00000009709; TAA
FSISPLHGGL

SEQ ID NO: 60699 - protein, 8 aa, Homo sapiens
  Table A; Target 60699; HLA-C*03:04; PAX7; ENSG00000009709; TAA
FSSYSDSF

SEQ ID NO: 60700 - protein, 9 aa, Homo sapiens
  Table A; Target 60700; HLA-A*01:01; PAX7; ENSG00000009709; TAA
FSSYSDSFM

SEQ ID NO: 60701 - protein, 9 aa, Homo sapiens
  Table A; Target 60701; HLA-A*26:01; PAX7; ENSG00000009709; TAA
FTAEQLEEL

SEQ ID NO: 60702 - protein, 9 aa, Homo sapiens
  Table A; Target 60702; HLA-C*12:03; PAX7; ENSG00000009709; TAA
FTAEQLEEL

SEQ ID NO: 60703 - protein, 9 aa, Homo sapiens
  Table A; Target 60703; HLA-C*14:02; PAX7; ENSG00000009709; TAA
FTAEQLEEL

SEQ ID NO: 60704 - protein, 11 aa, Homo sapiens
  Table A; Target 60704; HLA-B*27:02; PAX7; ENSG00000009709; TAA
FTAEQLEELEK

SEQ ID NO: 60705 - protein, 9 aa, Homo sapiens
  Table A; Target 60705; HLA-A*11:01; PAX7; ENSG00000009709; TAA
GAIGGSKPR

SEQ ID NO: 60706 - protein, 9 aa, Homo sapiens
  Table A; Target 60706; HLA-A*31:01; PAX7; ENSG00000009709; TAA
GAIGGSKPR

SEQ ID NO: 60707 - protein, 9 aa, Homo sapiens
  Table A; Target 60707; HLA-A*68:01; PAX7; ENSG00000009709; TAA
GAIGGSKPR

SEQ ID NO: 60708 - protein, 9 aa, Homo sapiens
  Table A; Target 60708; HLA-C*07:06; PAX7; ENSG00000009709; TAA
GAIGGSKPR

SEQ ID NO: 60709 - protein, 9 aa, Homo sapiens
  Table A; Target 60709; HLA-C*16:02; PAX7; ENSG00000009709; TAA
GAIGGSKPR

SEQ ID NO: 60710 - protein, 11 aa, Homo sapiens
  Table A; Target 60710; HLA-C*12:03; PAX7; ENSG00000009709; TAA
GAIGGSKPRQV

SEQ ID NO: 60711 - protein, 11 aa, Homo sapiens
  Table A; Target 60711; HLA-C*16:02; PAX7; ENSG00000009709; TAA
GAIGGSKPRQV

SEQ ID NO: 60712 - protein, 8 aa, Homo sapiens
  Table A; Target 60712; HLA-B*46:01; PAX7; ENSG00000009709; TAA
GANQLAAF

SEQ ID NO: 60713 - protein, 9 aa, Homo sapiens
  Table A; Target 60713; HLA-A*30:02; PAX7; ENSG00000009709; TAA
GARHSFSSY

SEQ ID NO: 60714 - protein, 9 aa, Homo sapiens
  Table A; Target 60714; HLA-B*15:01; PAX7; ENSG00000009709; TAA
GARHSFSSY

SEQ ID NO: 60715 - protein, 9 aa, Homo sapiens
  Table A; Target 60715; HLA-B*15:03; PAX7; ENSG00000009709; TAA
GARHSFSSY

SEQ ID NO: 60716 - protein, 9 aa, Homo sapiens
  Table A; Target 60716; HLA-B*46:01; PAX7; ENSG00000009709; TAA
GARHSFSSY

SEQ ID NO: 60717 - protein, 9 aa, Homo sapiens
  Table A; Target 60717; HLA-C*02:02; PAX7; ENSG00000009709; TAA
GARHSFSSY

SEQ ID NO: 60718 - protein, 10 aa, Homo sapiens
  Table A; Target 60718; HLA-C*16:04; PAX7; ENSG00000009709; TAA
GDSLPTSQAY

SEQ ID NO: 60719 - protein, 9 aa, Homo sapiens
  Table A; Target 60719; HLA-A*30:01; PAX7; ENSG00000009709; TAA
GEHSAVLGL

SEQ ID NO: 60720 - protein, 9 aa, Homo sapiens
  Table A; Target 60720; HLA-B*27:02; PAX7; ENSG00000009709; TAA
GEHSAVLGL

SEQ ID NO: 60721 - protein, 9 aa, Homo sapiens
  Table A; Target 60721; HLA-B*37:01; PAX7; ENSG00000009709; TAA
GEHSAVLGL

SEQ ID NO: 60722 - protein, 9 aa, Homo sapiens
  Table A; Target 60722; HLA-B*40:01; PAX7; ENSG00000009709; TAA
GEHSAVLGL

SEQ ID NO: 60723 - protein, 9 aa, Homo sapiens
  Table A; Target 60723; HLA-B*40:02; PAX7; ENSG00000009709; TAA
GEHSAVLGL

SEQ ID NO: 60724 - protein, 9 aa, Homo sapiens
  Table A; Target 60724; HLA-B*44:02; PAX7; ENSG00000009709; TAA
GEHSAVLGL

SEQ ID NO: 60725 - protein, 9 aa, Homo sapiens
  Table A; Target 60725; HLA-B*44:03; PAX7; ENSG00000009709; TAA
GEHSAVLGL

SEQ ID NO: 60726 - protein, 9 aa, Homo sapiens
  Table A; Target 60726; HLA-B*49:01; PAX7; ENSG00000009709; TAA
GEHSAVLGL

SEQ ID NO: 60727 - protein, 9 aa, Homo sapiens
  Table A; Target 60727; HLA-C*16:04; PAX7; ENSG00000009709; TAA
GEHSAVLGL

SEQ ID NO: 60728 - protein, 10 aa, Homo sapiens
  Table A; Target 60728; HLA-A*30:01; PAX7; ENSG00000009709; TAA
GEHSAVLGLL

SEQ ID NO: 60729 - protein, 10 aa, Homo sapiens
  Table A; Target 60729; HLA-B*40:01; PAX7; ENSG00000009709; TAA
GEHSAVLGLL

SEQ ID NO: 60730 - protein, 10 aa, Homo sapiens
  Table A; Target 60730; HLA-B*40:02; PAX7; ENSG00000009709; TAA
GEHSAVLGLL

SEQ ID NO: 60731 - protein, 10 aa, Homo sapiens
  Table A; Target 60731; HLA-B*49:01; PAX7; ENSG00000009709; TAA
GEHSAVLGLL

SEQ ID NO: 60732 - protein, 9 aa, Homo sapiens
  Table A; Target 60732; HLA-B*13:02; PAX7; ENSG00000009709; TAA
GGLDSATSI

SEQ ID NO: 60733 - protein, 9 aa, Homo sapiens
  Table A; Target 60733; HLA-B*15:03; PAX7; ENSG00000009709; TAA
GGLDSATSI

SEQ ID NO: 60734 - protein, 9 aa, Homo sapiens
  Table A; Target 60734; HLA-C*01:02; PAX7; ENSG00000009709; TAA
GGLDSATSI

SEQ ID NO: 60735 - protein, 9 aa, Homo sapiens
  Table A; Target 60735; HLA-C*14:02; PAX7; ENSG00000009709; TAA
GGLDSATSI

SEQ ID NO: 60736 - protein, 9 aa, Homo sapiens
  Table A; Target 60736; HLA-A*33:03; PAX7; ENSG00000009709; TAA
GIRPCVISR

SEQ ID NO: 60737 - protein, 9 aa, Homo sapiens
  Table A; Target 60737; HLA-A*02:01; PAX7; ENSG00000009709; TAA
GLAAAAAAA

SEQ ID NO: 60738 - protein, 9 aa, Homo sapiens
  Table A; Target 60738; HLA-A*02:03; PAX7; ENSG00000009709; TAA
GLAAAAAAA

SEQ ID NO: 60739 - protein, 9 aa, Homo sapiens
  Table A; Target 60739; HLA-B*13:02; PAX7; ENSG00000009709; TAA
GLAAAAAAA

SEQ ID NO: 60740 - protein, 9 aa, Homo sapiens
  Table A; Target 60740; HLA-B*55:01; PAX7; ENSG00000009709; TAA
GLAAAAAAA

SEQ ID NO: 60741 - protein, 8 aa, Homo sapiens
  Table A; Target 60741; HLA-A*02:01; PAX7; ENSG00000009709; TAA
GLDSATSI

SEQ ID NO: 60742 - protein, 8 aa, Homo sapiens
  Table A; Target 60742; HLA-B*13:02; PAX7; ENSG00000009709; TAA
GLDSATSI

SEQ ID NO: 60743 - protein, 8 aa, Homo sapiens
  Table A; Target 60743; HLA-C*05:01; PAX7; ENSG00000009709; TAA
GLDSATSI

SEQ ID NO: 60744 - protein, 10 aa, Homo sapiens
  Table A; Target 60744; HLA-A*02:01; PAX7; ENSG00000009709; TAA
GLDSATSISA

SEQ ID NO: 60745 - protein, 10 aa, Homo sapiens
  Table A; Target 60745; HLA-A*02:07; PAX7; ENSG00000009709; TAA
GLDSATSISA

SEQ ID NO: 60746 - protein, 10 aa, Homo sapiens
  Table A; Target 60746; HLA-B*55:01; PAX7; ENSG00000009709; TAA
GLDSATSISA

SEQ ID NO: 60747 - protein, 10 aa, Homo sapiens
  Table A; Target 60747; HLA-A*02:01; PAX7; ENSG00000009709; TAA
GLLPVETGQA

SEQ ID NO: 60748 - protein, 10 aa, Homo sapiens
  Table A; Target 60748; HLA-A*02:03; PAX7; ENSG00000009709; TAA
GLLPVETGQA

SEQ ID NO: 60749 - protein, 11 aa, Homo sapiens
  Table A; Target 60749; HLA-A*01:01; PAX7; ENSG00000009709; TAA
GLLPVETGQAY

SEQ ID NO: 60750 - protein, 11 aa, Homo sapiens
  Table A; Target 60750; HLA-A*02:07; PAX7; ENSG00000009709; TAA
GLLPVETGQAY

SEQ ID NO: 60751 - protein, 11 aa, Homo sapiens
  Table A; Target 60751; HLA-A*03:01; PAX7; ENSG00000009709; TAA
GLLPVETGQAY

SEQ ID NO: 60752 - protein, 11 aa, Homo sapiens
  Table A; Target 60752; HLA-A*03:02; PAX7; ENSG00000009709; TAA
GLLPVETGQAY

SEQ ID NO: 60753 - protein, 11 aa, Homo sapiens
  Table A; Target 60753; HLA-A*11:01; PAX7; ENSG00000009709; TAA
GLLPVETGQAY

SEQ ID NO: 60754 - protein, 11 aa, Homo sapiens
  Table A; Target 60754; HLA-A*23:01; PAX7; ENSG00000009709; TAA
GLLPVETGQAY

SEQ ID NO: 60755 - protein, 11 aa, Homo sapiens
  Table A; Target 60755; HLA-A*25:01; PAX7; ENSG00000009709; TAA
GLLPVETGQAY

SEQ ID NO: 60756 - protein, 11 aa, Homo sapiens
  Table A; Target 60756; HLA-A*26:01; PAX7; ENSG00000009709; TAA
GLLPVETGQAY

SEQ ID NO: 60757 - protein, 11 aa, Homo sapiens
  Table A; Target 60757; HLA-A*29:02; PAX7; ENSG00000009709; TAA
GLLPVETGQAY

SEQ ID NO: 60758 - protein, 11 aa, Homo sapiens
  Table A; Target 60758; HLA-A*30:02; PAX7; ENSG00000009709; TAA
GLLPVETGQAY

SEQ ID NO: 60759 - protein, 11 aa, Homo sapiens
  Table A; Target 60759; HLA-A*31:01; PAX7; ENSG00000009709; TAA
GLLPVETGQAY

SEQ ID NO: 60760 - protein, 11 aa, Homo sapiens
  Table A; Target 60760; HLA-A*32:01; PAX7; ENSG00000009709; TAA
GLLPVETGQAY

SEQ ID NO: 60761 - protein, 11 aa, Homo sapiens
  Table A; Target 60761; HLA-B*07:02; PAX7; ENSG00000009709; TAA
GLLPVETGQAY

SEQ ID NO: 60762 - protein, 11 aa, Homo sapiens
  Table A; Target 60762; HLA-B*13:02; PAX7; ENSG00000009709; TAA
GLLPVETGQAY

SEQ ID NO: 60763 - protein, 11 aa, Homo sapiens
  Table A; Target 60763; HLA-B*15:01; PAX7; ENSG00000009709; TAA
GLLPVETGQAY

SEQ ID NO: 60764 - protein, 11 aa, Homo sapiens
  Table A; Target 60764; HLA-B*15:03; PAX7; ENSG00000009709; TAA
GLLPVETGQAY

SEQ ID NO: 60765 - protein, 11 aa, Homo sapiens
  Table A; Target 60765; HLA-B*18:01; PAX7; ENSG00000009709; TAA
GLLPVETGQAY

SEQ ID NO: 60766 - protein, 11 aa, Homo sapiens
  Table A; Target 60766; HLA-B*27:02; PAX7; ENSG00000009709; TAA
GLLPVETGQAY

SEQ ID NO: 60767 - protein, 11 aa, Homo sapiens
  Table A; Target 60767; HLA-B*27:05; PAX7; ENSG00000009709; TAA
GLLPVETGQAY

SEQ ID NO: 60768 - protein, 11 aa, Homo sapiens
  Table A; Target 60768; HLA-B*35:01; PAX7; ENSG00000009709; TAA
GLLPVETGQAY

SEQ ID NO: 60769 - protein, 11 aa, Homo sapiens
  Table A; Target 60769; HLA-B*39:01; PAX7; ENSG00000009709; TAA
GLLPVETGQAY

SEQ ID NO: 60770 - protein, 11 aa, Homo sapiens
  Table A; Target 60770; HLA-B*44:02; PAX7; ENSG00000009709; TAA
GLLPVETGQAY

SEQ ID NO: 60771 - protein, 11 aa, Homo sapiens
  Table A; Target 60771; HLA-B*44:03; PAX7; ENSG00000009709; TAA
GLLPVETGQAY

SEQ ID NO: 60772 - protein, 11 aa, Homo sapiens
  Table A; Target 60772; HLA-B*46:01; PAX7; ENSG00000009709; TAA
GLLPVETGQAY

SEQ ID NO: 60773 - protein, 11 aa, Homo sapiens
  Table A; Target 60773; HLA-B*55:01; PAX7; ENSG00000009709; TAA
GLLPVETGQAY

SEQ ID NO: 60774 - protein, 11 aa, Homo sapiens
  Table A; Target 60774; HLA-B*57:01; PAX7; ENSG00000009709; TAA
GLLPVETGQAY

SEQ ID NO: 60775 - protein, 11 aa, Homo sapiens
  Table A; Target 60775; HLA-B*58:01; PAX7; ENSG00000009709; TAA
GLLPVETGQAY

SEQ ID NO: 60776 - protein, 11 aa, Homo sapiens
  Table A; Target 60776; HLA-C*01:02; PAX7; ENSG00000009709; TAA
GLLPVETGQAY

SEQ ID NO: 60777 - protein, 11 aa, Homo sapiens
  Table A; Target 60777; HLA-C*02:02; PAX7; ENSG00000009709; TAA
GLLPVETGQAY

SEQ ID NO: 60778 - protein, 11 aa, Homo sapiens
  Table A; Target 60778; HLA-C*04:01; PAX7; ENSG00000009709; TAA
GLLPVETGQAY

SEQ ID NO: 60779 - protein, 11 aa, Homo sapiens
  Table A; Target 60779; HLA-C*06:02; PAX7; ENSG00000009709; TAA
GLLPVETGQAY

SEQ ID NO: 60780 - protein, 11 aa, Homo sapiens
  Table A; Target 60780; HLA-C*07:01; PAX7; ENSG00000009709; TAA
GLLPVETGQAY

SEQ ID NO: 60781 - protein, 11 aa, Homo sapiens
  Table A; Target 60781; HLA-C*07:02; PAX7; ENSG00000009709; TAA
GLLPVETGQAY

SEQ ID NO: 60782 - protein, 11 aa, Homo sapiens
  Table A; Target 60782; HLA-C*07:04; PAX7; ENSG00000009709; TAA
GLLPVETGQAY

SEQ ID NO: 60783 - protein, 11 aa, Homo sapiens
  Table A; Target 60783; HLA-C*12:03; PAX7; ENSG00000009709; TAA
GLLPVETGQAY

SEQ ID NO: 60784 - protein, 11 aa, Homo sapiens
  Table A; Target 60784; HLA-C*14:02; PAX7; ENSG00000009709; TAA
GLLPVETGQAY

SEQ ID NO: 60785 - protein, 11 aa, Homo sapiens
  Table A; Target 60785; HLA-C*16:01; PAX7; ENSG00000009709; TAA
GLLPVETGQAY

SEQ ID NO: 60786 - protein, 11 aa, Homo sapiens
  Table A; Target 60786; HLA-C*16:04; PAX7; ENSG00000009709; TAA
GLLPVETGQAY

SEQ ID NO: 60787 - protein, 9 aa, Homo sapiens
  Table A; Target 60787; HLA-A*02:01; PAX7; ENSG00000009709; TAA
GLSPQVMSI

SEQ ID NO: 60788 - protein, 9 aa, Homo sapiens
  Table A; Target 60788; HLA-A*02:03; PAX7; ENSG00000009709; TAA
GLSPQVMSI

SEQ ID NO: 60789 - protein, 9 aa, Homo sapiens
  Table A; Target 60789; HLA-A*02:04; PAX7; ENSG00000009709; TAA
GLSPQVMSI

SEQ ID NO: 60790 - protein, 9 aa, Homo sapiens
  Table A; Target 60790; HLA-A*02:07; PAX7; ENSG00000009709; TAA
GLSPQVMSI

SEQ ID NO: 60791 - protein, 9 aa, Homo sapiens
  Table A; Target 60791; HLA-A*30:01; PAX7; ENSG00000009709; TAA
GLSPQVMSI

SEQ ID NO: 60792 - protein, 9 aa, Homo sapiens
  Table A; Target 60792; HLA-A*32:01; PAX7; ENSG00000009709; TAA
GLSPQVMSI

SEQ ID NO: 60793 - protein, 9 aa, Homo sapiens
  Table A; Target 60793; HLA-B*13:02; PAX7; ENSG00000009709; TAA
GLSPQVMSI

SEQ ID NO: 60794 - protein, 9 aa, Homo sapiens
  Table A; Target 60794; HLA-B*15:01; PAX7; ENSG00000009709; TAA
GLSPQVMSI

SEQ ID NO: 60795 - protein, 9 aa, Homo sapiens
  Table A; Target 60795; HLA-B*37:01; PAX7; ENSG00000009709; TAA
GLSPQVMSI

SEQ ID NO: 60796 - protein, 9 aa, Homo sapiens
  Table A; Target 60796; HLA-B*49:01; PAX7; ENSG00000009709; TAA
GLSPQVMSI

SEQ ID NO: 60797 - protein, 9 aa, Homo sapiens
  Table A; Target 60797; HLA-B*55:01; PAX7; ENSG00000009709; TAA
GLSPQVMSI

SEQ ID NO: 60798 - protein, 9 aa, Homo sapiens
  Table A; Target 60798; HLA-C*02:02; PAX7; ENSG00000009709; TAA
GLSPQVMSI

SEQ ID NO: 60799 - protein, 9 aa, Homo sapiens
  Table A; Target 60799; HLA-C*06:02; PAX7; ENSG00000009709; TAA
GLSPQVMSI

SEQ ID NO: 60800 - protein, 9 aa, Homo sapiens
  Table A; Target 60800; HLA-C*16:02; PAX7; ENSG00000009709; TAA
GLSPQVMSI

SEQ ID NO: 60801 - protein, 10 aa, Homo sapiens
  Table A; Target 60801; HLA-A*02:03; PAX7; ENSG00000009709; TAA
GLSPQVMSIL

SEQ ID NO: 60802 - protein, 9 aa, Homo sapiens
  Table A; Target 60802; HLA-A*02:01; PAX7; ENSG00000009709; TAA
GLVSSISRV

SEQ ID NO: 60803 - protein, 9 aa, Homo sapiens
  Table A; Target 60803; HLA-A*02:03; PAX7; ENSG00000009709; TAA
GLVSSISRV

SEQ ID NO: 60804 - protein, 9 aa, Homo sapiens
  Table A; Target 60804; HLA-A*02:04; PAX7; ENSG00000009709; TAA
GLVSSISRV

SEQ ID NO: 60805 - protein, 9 aa, Homo sapiens
  Table A; Target 60805; HLA-A*02:07; PAX7; ENSG00000009709; TAA
GLVSSISRV

SEQ ID NO: 60806 - protein, 9 aa, Homo sapiens
  Table A; Target 60806; HLA-B*13:02; PAX7; ENSG00000009709; TAA
GLVSSISRV

SEQ ID NO: 60807 - protein, 9 aa, Homo sapiens
  Table A; Target 60807; HLA-B*55:01; PAX7; ENSG00000009709; TAA
GLVSSISRV

SEQ ID NO: 60808 - protein, 9 aa, Homo sapiens
  Table A; Target 60808; HLA-A*30:02; PAX7; ENSG00000009709; TAA
GQNYPRTGF

SEQ ID NO: 60809 - protein, 9 aa, Homo sapiens
  Table A; Target 60809; HLA-A*32:01; PAX7; ENSG00000009709; TAA
GQNYPRTGF

SEQ ID NO: 60810 - protein, 9 aa, Homo sapiens
  Table A; Target 60810; HLA-B*13:02; PAX7; ENSG00000009709; TAA
GQNYPRTGF

SEQ ID NO: 60811 - protein, 9 aa, Homo sapiens
  Table A; Target 60811; HLA-B*15:01; PAX7; ENSG00000009709; TAA
GQNYPRTGF

SEQ ID NO: 60812 - protein, 9 aa, Homo sapiens
  Table A; Target 60812; HLA-B*15:03; PAX7; ENSG00000009709; TAA
GQNYPRTGF

SEQ ID NO: 60813 - protein, 9 aa, Homo sapiens
  Table A; Target 60813; HLA-B*27:02; PAX7; ENSG00000009709; TAA
GQNYPRTGF

SEQ ID NO: 60814 - protein, 9 aa, Homo sapiens
  Table A; Target 60814; HLA-B*27:05; PAX7; ENSG00000009709; TAA
GQNYPRTGF

SEQ ID NO: 60815 - protein, 9 aa, Homo sapiens
  Table A; Target 60815; HLA-B*37:01; PAX7; ENSG00000009709; TAA
GQNYPRTGF

SEQ ID NO: 60816 - protein, 9 aa, Homo sapiens
  Table A; Target 60816; HLA-B*46:01; PAX7; ENSG00000009709; TAA
GQNYPRTGF

SEQ ID NO: 60817 - protein, 9 aa, Homo sapiens
  Table A; Target 60817; HLA-B*58:01; PAX7; ENSG00000009709; TAA
GQNYPRTGF

SEQ ID NO: 60818 - protein, 9 aa, Homo sapiens
  Table A; Target 60818; HLA-C*02:02; PAX7; ENSG00000009709; TAA
GQNYPRTGF

SEQ ID NO: 60819 - protein, 9 aa, Homo sapiens
  Table A; Target 60819; HLA-C*07:04; PAX7; ENSG00000009709; TAA
GQNYPRTGF

SEQ ID NO: 60820 - protein, 9 aa, Homo sapiens
  Table A; Target 60820; HLA-C*14:02; PAX7; ENSG00000009709; TAA
GQNYPRTGF

SEQ ID NO: 60821 - protein, 9 aa, Homo sapiens
  Table A; Target 60821; HLA-C*16:01; PAX7; ENSG00000009709; TAA
GQNYPRTGF

SEQ ID NO: 60822 - protein, 9 aa, Homo sapiens
  Table A; Target 60822; HLA-C*16:04; PAX7; ENSG00000009709; TAA
GQNYPRTGF

SEQ ID NO: 60823 - protein, 8 aa, Homo sapiens
  Table A; Target 60823; HLA-B*13:02; PAX7; ENSG00000009709; TAA
GQTAVDYL

SEQ ID NO: 60824 - protein, 8 aa, Homo sapiens
  Table A; Target 60824; HLA-B*15:01; PAX7; ENSG00000009709; TAA
GQTAVDYL

SEQ ID NO: 60825 - protein, 8 aa, Homo sapiens
  Table A; Target 60825; HLA-B*27:05; PAX7; ENSG00000009709; TAA
GQTAVDYL

SEQ ID NO: 60826 - protein, 8 aa, Homo sapiens
  Table A; Target 60826; HLA-B*39:01; PAX7; ENSG00000009709; TAA
GQTAVDYL

SEQ ID NO: 60827 - protein, 8 aa, Homo sapiens
  Table A; Target 60827; HLA-C*07:04; PAX7; ENSG00000009709; TAA
GQTAVDYL

SEQ ID NO: 60828 - protein, 9 aa, Homo sapiens
  Table A; Target 60828; HLA-A*30:01; PAX7; ENSG00000009709; TAA
GQTAVDYLA

SEQ ID NO: 60829 - protein, 9 aa, Homo sapiens
  Table A; Target 60829; HLA-B*13:02; PAX7; ENSG00000009709; TAA
GQTAVDYLA

SEQ ID NO: 60830 - protein, 9 aa, Homo sapiens
  Table A; Target 60830; HLA-B*27:05; PAX7; ENSG00000009709; TAA
GQTAVDYLA

SEQ ID NO: 60831 - protein, 9 aa, Homo sapiens
  Table A; Target 60831; HLA-C*06:02; PAX7; ENSG00000009709; TAA
GQTAVDYLA

SEQ ID NO: 60832 - protein, 10 aa, Homo sapiens
  Table A; Target 60832; HLA-B*27:02; PAX7; ENSG00000009709; TAA
GQTAVDYLAK

SEQ ID NO: 60833 - protein, 10 aa, Homo sapiens
  Table A; Target 60833; HLA-B*27:05; PAX7; ENSG00000009709; TAA
GQTAVDYLAK

SEQ ID NO: 60834 - protein, 8 aa, Homo sapiens
  Table A; Target 60834; HLA-B*13:02; PAX7; ENSG00000009709; TAA
GQYGQTAV

SEQ ID NO: 60835 - protein, 8 aa, Homo sapiens
  Table A; Target 60835; HLA-B*15:01; PAX7; ENSG00000009709; TAA
GQYGQTAV

SEQ ID NO: 60836 - protein, 8 aa, Homo sapiens
  Table A; Target 60836; HLA-B*15:03; PAX7; ENSG00000009709; TAA
GQYGQTAV

SEQ ID NO: 60837 - protein, 8 aa, Homo sapiens
  Table A; Target 60837; HLA-B*39:01; PAX7; ENSG00000009709; TAA
GQYGQTAV

SEQ ID NO: 60838 - protein, 10 aa, Homo sapiens
  Table A; Target 60838; HLA-A*03:01; PAX7; ENSG00000009709; TAA
GQYGQTAVDY

SEQ ID NO: 60839 - protein, 10 aa, Homo sapiens
  Table A; Target 60839; HLA-A*11:01; PAX7; ENSG00000009709; TAA
GQYGQTAVDY

SEQ ID NO: 60840 - protein, 10 aa, Homo sapiens
  Table A; Target 60840; HLA-A*26:01; PAX7; ENSG00000009709; TAA
GQYGQTAVDY

SEQ ID NO: 60841 - protein, 10 aa, Homo sapiens
  Table A; Target 60841; HLA-A*29:02; PAX7; ENSG00000009709; TAA
GQYGQTAVDY

SEQ ID NO: 60842 - protein, 10 aa, Homo sapiens
  Table A; Target 60842; HLA-A*30:02; PAX7; ENSG00000009709; TAA
GQYGQTAVDY

SEQ ID NO: 60843 - protein, 10 aa, Homo sapiens
  Table A; Target 60843; HLA-A*32:01; PAX7; ENSG00000009709; TAA
GQYGQTAVDY

SEQ ID NO: 60844 - protein, 10 aa, Homo sapiens
  Table A; Target 60844; HLA-B*13:02; PAX7; ENSG00000009709; TAA
GQYGQTAVDY

SEQ ID NO: 60845 - protein, 10 aa, Homo sapiens
  Table A; Target 60845; HLA-B*15:01; PAX7; ENSG00000009709; TAA
GQYGQTAVDY

SEQ ID NO: 60846 - protein, 10 aa, Homo sapiens
  Table A; Target 60846; HLA-B*15:03; PAX7; ENSG00000009709; TAA
GQYGQTAVDY

SEQ ID NO: 60847 - protein, 10 aa, Homo sapiens
  Table A; Target 60847; HLA-B*27:02; PAX7; ENSG00000009709; TAA
GQYGQTAVDY

SEQ ID NO: 60848 - protein, 10 aa, Homo sapiens
  Table A; Target 60848; HLA-B*27:05; PAX7; ENSG00000009709; TAA
GQYGQTAVDY

SEQ ID NO: 60849 - protein, 10 aa, Homo sapiens
  Table A; Target 60849; HLA-B*39:01; PAX7; ENSG00000009709; TAA
GQYGQTAVDY

SEQ ID NO: 60850 - protein, 10 aa, Homo sapiens
  Table A; Target 60850; HLA-B*44:03; PAX7; ENSG00000009709; TAA
GQYGQTAVDY

SEQ ID NO: 60851 - protein, 10 aa, Homo sapiens
  Table A; Target 60851; HLA-B*46:01; PAX7; ENSG00000009709; TAA
GQYGQTAVDY

SEQ ID NO: 60852 - protein, 10 aa, Homo sapiens
  Table A; Target 60852; HLA-C*02:02; PAX7; ENSG00000009709; TAA
GQYGQTAVDY

SEQ ID NO: 60853 - protein, 10 aa, Homo sapiens
  Table A; Target 60853; HLA-C*04:01; PAX7; ENSG00000009709; TAA
GQYGQTAVDY

SEQ ID NO: 60854 - protein, 10 aa, Homo sapiens
  Table A; Target 60854; HLA-C*07:01; PAX7; ENSG00000009709; TAA
GQYGQTAVDY

SEQ ID NO: 60855 - protein, 10 aa, Homo sapiens
  Table A; Target 60855; HLA-C*07:04; PAX7; ENSG00000009709; TAA
GQYGQTAVDY

SEQ ID NO: 60856 - protein, 10 aa, Homo sapiens
  Table A; Target 60856; HLA-C*12:03; PAX7; ENSG00000009709; TAA
GQYGQTAVDY

SEQ ID NO: 60857 - protein, 10 aa, Homo sapiens
  Table A; Target 60857; HLA-C*14:02; PAX7; ENSG00000009709; TAA
GQYGQTAVDY

SEQ ID NO: 60858 - protein, 10 aa, Homo sapiens
  Table A; Target 60858; HLA-C*16:04; PAX7; ENSG00000009709; TAA
GQYGQTAVDY

SEQ ID NO: 60859 - protein, 11 aa, Homo sapiens
  Table A; Target 60859; HLA-A*02:03; PAX7; ENSG00000009709; TAA
GQYGQTAVDYL

SEQ ID NO: 60860 - protein, 11 aa, Homo sapiens
  Table A; Target 60860; HLA-A*03:02; PAX7; ENSG00000009709; TAA
GQYGQTAVDYL

SEQ ID NO: 60861 - protein, 11 aa, Homo sapiens
  Table A; Target 60861; HLA-A*30:01; PAX7; ENSG00000009709; TAA
GQYGQTAVDYL

SEQ ID NO: 60862 - protein, 11 aa, Homo sapiens
  Table A; Target 60862; HLA-A*30:02; PAX7; ENSG00000009709; TAA
GQYGQTAVDYL

SEQ ID NO: 60863 - protein, 11 aa, Homo sapiens
  Table A; Target 60863; HLA-B*13:02; PAX7; ENSG00000009709; TAA
GQYGQTAVDYL

SEQ ID NO: 60864 - protein, 11 aa, Homo sapiens
  Table A; Target 60864; HLA-B*15:01; PAX7; ENSG00000009709; TAA
GQYGQTAVDYL

SEQ ID NO: 60865 - protein, 11 aa, Homo sapiens
  Table A; Target 60865; HLA-B*15:03; PAX7; ENSG00000009709; TAA
GQYGQTAVDYL

SEQ ID NO: 60866 - protein, 11 aa, Homo sapiens
  Table A; Target 60866; HLA-B*27:05; PAX7; ENSG00000009709; TAA
GQYGQTAVDYL

SEQ ID NO: 60867 - protein, 11 aa, Homo sapiens
  Table A; Target 60867; HLA-B*38:01; PAX7; ENSG00000009709; TAA
GQYGQTAVDYL

SEQ ID NO: 60868 - protein, 11 aa, Homo sapiens
  Table A; Target 60868; HLA-B*39:01; PAX7; ENSG00000009709; TAA
GQYGQTAVDYL

SEQ ID NO: 60869 - protein, 11 aa, Homo sapiens
  Table A; Target 60869; HLA-B*40:01; PAX7; ENSG00000009709; TAA
GQYGQTAVDYL

SEQ ID NO: 60870 - protein, 11 aa, Homo sapiens
  Table A; Target 60870; HLA-B*40:02; PAX7; ENSG00000009709; TAA
GQYGQTAVDYL

SEQ ID NO: 60871 - protein, 11 aa, Homo sapiens
  Table A; Target 60871; HLA-C*06:02; PAX7; ENSG00000009709; TAA
GQYGQTAVDYL

SEQ ID NO: 60872 - protein, 11 aa, Homo sapiens
  Table A; Target 60872; HLA-C*07:04; PAX7; ENSG00000009709; TAA
GQYGQTAVDYL

SEQ ID NO: 60873 - protein, 11 aa, Homo sapiens
  Table A; Target 60873; HLA-C*16:04; PAX7; ENSG00000009709; TAA
GQYGQTAVDYL

SEQ ID NO: 60874 - protein, 9 aa, Homo sapiens
  Table A; Target 60874; HLA-B*07:02; PAX7; ENSG00000009709; TAA
GVFINGRPL

SEQ ID NO: 60875 - protein, 11 aa, Homo sapiens
  Table A; Target 60875; HLA-C*14:02; PAX7; ENSG00000009709; TAA
GYQYGQYGQTA

SEQ ID NO: 60876 - protein, 10 aa, Homo sapiens
  Table A; Target 60876; HLA-A*29:02; PAX7; ENSG00000009709; TAA
GYSVDPVAGY

SEQ ID NO: 60877 - protein, 10 aa, Homo sapiens
  Table A; Target 60877; HLA-A*30:02; PAX7; ENSG00000009709; TAA
GYSVDPVAGY

SEQ ID NO: 60878 - protein, 10 aa, Homo sapiens
  Table A; Target 60878; HLA-C*14:02; PAX7; ENSG00000009709; TAA
GYSVDPVAGY

SEQ ID NO: 60879 - protein, 9 aa, Homo sapiens
  Table A; Target 60879; HLA-A*02:01; PAX7; ENSG00000009709; TAA
HMNPVSNGL

SEQ ID NO: 60880 - protein, 9 aa, Homo sapiens
  Table A; Target 60880; HLA-A*02:03; PAX7; ENSG00000009709; TAA
HMNPVSNGL

SEQ ID NO: 60881 - protein, 9 aa, Homo sapiens
  Table A; Target 60881; HLA-A*02:04; PAX7; ENSG00000009709; TAA
HMNPVSNGL

SEQ ID NO: 60882 - protein, 9 aa, Homo sapiens
  Table A; Target 60882; HLA-A*02:07; PAX7; ENSG00000009709; TAA
HMNPVSNGL

SEQ ID NO: 60883 - protein, 9 aa, Homo sapiens
  Table A; Target 60883; HLA-A*03:01; PAX7; ENSG00000009709; TAA
HMNPVSNGL

SEQ ID NO: 60884 - protein, 9 aa, Homo sapiens
  Table A; Target 60884; HLA-A*03:02; PAX7; ENSG00000009709; TAA
HMNPVSNGL

SEQ ID NO: 60885 - protein, 9 aa, Homo sapiens
  Table A; Target 60885; HLA-A*23:01; PAX7; ENSG00000009709; TAA
HMNPVSNGL

SEQ ID NO: 60886 - protein, 9 aa, Homo sapiens
  Table A; Target 60886; HLA-A*24:02; PAX7; ENSG00000009709; TAA
HMNPVSNGL

SEQ ID NO: 60887 - protein, 9 aa, Homo sapiens
  Table A; Target 60887; HLA-A*25:01; PAX7; ENSG00000009709; TAA
HMNPVSNGL

SEQ ID NO: 60888 - protein, 9 aa, Homo sapiens
  Table A; Target 60888; HLA-A*26:01; PAX7; ENSG00000009709; TAA
HMNPVSNGL

SEQ ID NO: 60889 - protein, 9 aa, Homo sapiens
  Table A; Target 60889; HLA-A*29:02; PAX7; ENSG00000009709; TAA
HMNPVSNGL

SEQ ID NO: 60890 - protein, 9 aa, Homo sapiens
  Table A; Target 60890; HLA-A*30:01; PAX7; ENSG00000009709; TAA
HMNPVSNGL

SEQ ID NO: 60891 - protein, 9 aa, Homo sapiens
  Table A; Target 60891; HLA-A*30:02; PAX7; ENSG00000009709; TAA
HMNPVSNGL

SEQ ID NO: 60892 - protein, 9 aa, Homo sapiens
  Table A; Target 60892; HLA-A*31:01; PAX7; ENSG00000009709; TAA
HMNPVSNGL

SEQ ID NO: 60893 - protein, 9 aa, Homo sapiens
  Table A; Target 60893; HLA-A*32:01; PAX7; ENSG00000009709; TAA
HMNPVSNGL

SEQ ID NO: 60894 - protein, 9 aa, Homo sapiens
  Table A; Target 60894; HLA-B*07:02; PAX7; ENSG00000009709; TAA
HMNPVSNGL

SEQ ID NO: 60895 - protein, 9 aa, Homo sapiens
  Table A; Target 60895; HLA-B*08:01; PAX7; ENSG00000009709; TAA
HMNPVSNGL

SEQ ID NO: 60896 - protein, 9 aa, Homo sapiens
  Table A; Target 60896; HLA-B*13:02; PAX7; ENSG00000009709; TAA
HMNPVSNGL

SEQ ID NO: 60897 - protein, 9 aa, Homo sapiens
  Table A; Target 60897; HLA-B*15:01; PAX7; ENSG00000009709; TAA
HMNPVSNGL

SEQ ID NO: 60898 - protein, 9 aa, Homo sapiens
  Table A; Target 60898; HLA-B*15:03; PAX7; ENSG00000009709; TAA
HMNPVSNGL

SEQ ID NO: 60899 - protein, 9 aa, Homo sapiens
  Table A; Target 60899; HLA-B*27:05; PAX7; ENSG00000009709; TAA
HMNPVSNGL

SEQ ID NO: 60900 - protein, 9 aa, Homo sapiens
  Table A; Target 60900; HLA-B*35:01; PAX7; ENSG00000009709; TAA
HMNPVSNGL

SEQ ID NO: 60901 - protein, 9 aa, Homo sapiens
  Table A; Target 60901; HLA-B*35:03; PAX7; ENSG00000009709; TAA
HMNPVSNGL

SEQ ID NO: 60902 - protein, 9 aa, Homo sapiens
  Table A; Target 60902; HLA-B*37:01; PAX7; ENSG00000009709; TAA
HMNPVSNGL

SEQ ID NO: 60903 - protein, 9 aa, Homo sapiens
  Table A; Target 60903; HLA-B*38:01; PAX7; ENSG00000009709; TAA
HMNPVSNGL

SEQ ID NO: 60904 - protein, 9 aa, Homo sapiens
  Table A; Target 60904; HLA-B*39:01; PAX7; ENSG00000009709; TAA
HMNPVSNGL

SEQ ID NO: 60905 - protein, 9 aa, Homo sapiens
  Table A; Target 60905; HLA-B*40:01; PAX7; ENSG00000009709; TAA
HMNPVSNGL

SEQ ID NO: 60906 - protein, 9 aa, Homo sapiens
  Table A; Target 60906; HLA-B*40:02; PAX7; ENSG00000009709; TAA
HMNPVSNGL

SEQ ID NO: 60907 - protein, 9 aa, Homo sapiens
  Table A; Target 60907; HLA-B*46:01; PAX7; ENSG00000009709; TAA
HMNPVSNGL

SEQ ID NO: 60908 - protein, 9 aa, Homo sapiens
  Table A; Target 60908; HLA-B*55:01; PAX7; ENSG00000009709; TAA
HMNPVSNGL

SEQ ID NO: 60909 - protein, 9 aa, Homo sapiens
  Table A; Target 60909; HLA-B*58:01; PAX7; ENSG00000009709; TAA
HMNPVSNGL

SEQ ID NO: 60910 - protein, 9 aa, Homo sapiens
  Table A; Target 60910; HLA-C*01:02; PAX7; ENSG00000009709; TAA
HMNPVSNGL

SEQ ID NO: 60911 - protein, 9 aa, Homo sapiens
  Table A; Target 60911; HLA-C*02:02; PAX7; ENSG00000009709; TAA
HMNPVSNGL

SEQ ID NO: 60912 - protein, 9 aa, Homo sapiens
  Table A; Target 60912; HLA-C*03:03; PAX7; ENSG00000009709; TAA
HMNPVSNGL

SEQ ID NO: 60913 - protein, 9 aa, Homo sapiens
  Table A; Target 60913; HLA-C*03:04; PAX7; ENSG00000009709; TAA
HMNPVSNGL

SEQ ID NO: 60914 - protein, 9 aa, Homo sapiens
  Table A; Target 60914; HLA-C*04:01; PAX7; ENSG00000009709; TAA
HMNPVSNGL

SEQ ID NO: 60915 - protein, 9 aa, Homo sapiens
  Table A; Target 60915; HLA-C*06:02; PAX7; ENSG00000009709; TAA
HMNPVSNGL

SEQ ID NO: 60916 - protein, 9 aa, Homo sapiens
  Table A; Target 60916; HLA-C*07:02; PAX7; ENSG00000009709; TAA
HMNPVSNGL

SEQ ID NO: 60917 - protein, 9 aa, Homo sapiens
  Table A; Target 60917; HLA-C*07:04; PAX7; ENSG00000009709; TAA
HMNPVSNGL

SEQ ID NO: 60918 - protein, 9 aa, Homo sapiens
  Table A; Target 60918; HLA-C*07:06; PAX7; ENSG00000009709; TAA
HMNPVSNGL

SEQ ID NO: 60919 - protein, 9 aa, Homo sapiens
  Table A; Target 60919; HLA-C*12:03; PAX7; ENSG00000009709; TAA
HMNPVSNGL

SEQ ID NO: 60920 - protein, 9 aa, Homo sapiens
  Table A; Target 60920; HLA-C*14:02; PAX7; ENSG00000009709; TAA
HMNPVSNGL

SEQ ID NO: 60921 - protein, 9 aa, Homo sapiens
  Table A; Target 60921; HLA-C*16:01; PAX7; ENSG00000009709; TAA
HMNPVSNGL

SEQ ID NO: 60922 - protein, 9 aa, Homo sapiens
  Table A; Target 60922; HLA-C*16:02; PAX7; ENSG00000009709; TAA
HMNPVSNGL

SEQ ID NO: 60923 - protein, 9 aa, Homo sapiens
  Table A; Target 60923; HLA-C*16:04; PAX7; ENSG00000009709; TAA
HMNPVSNGL

SEQ ID NO: 60924 - protein, 9 aa, Homo sapiens
  Table A; Target 60924; HLA-B*13:02; PAX7; ENSG00000009709; TAA
HQGGLAAAA

SEQ ID NO: 60925 - protein, 9 aa, Homo sapiens
  Table A; Target 60925; HLA-B*39:01; PAX7; ENSG00000009709; TAA
HQGGLAAAA

SEQ ID NO: 60926 - protein, 9 aa, Homo sapiens
  Table A; Target 60926; HLA-C*06:02; PAX7; ENSG00000009709; TAA
HQGGLAAAA

SEQ ID NO: 60927 - protein, 9 aa, Homo sapiens
  Table A; Target 60927; HLA-C*07:04; PAX7; ENSG00000009709; TAA
HQGGLAAAA

SEQ ID NO: 60928 - protein, 10 aa, Homo sapiens
  Table A; Target 60928; HLA-C*07:04; PAX7; ENSG00000009709; TAA
HQGGLAAAAA

SEQ ID NO: 60929 - protein, 10 aa, Homo sapiens
  Table A; Target 60929; HLA-A*25:01; PAX7; ENSG00000009709; TAA
HSFSSYSDSF

SEQ ID NO: 60930 - protein, 10 aa, Homo sapiens
  Table A; Target 60930; HLA-B*35:01; PAX7; ENSG00000009709; TAA
HSFSSYSDSF

SEQ ID NO: 60931 - protein, 10 aa, Homo sapiens
  Table A; Target 60931; HLA-B*57:01; PAX7; ENSG00000009709; TAA
HSFSSYSDSF

SEQ ID NO: 60932 - protein, 10 aa, Homo sapiens
  Table A; Target 60932; HLA-C*02:02; PAX7; ENSG00000009709; TAA
HSFSSYSDSF

SEQ ID NO: 60933 - protein, 10 aa, Homo sapiens
  Table A; Target 60933; HLA-A*03:01; PAX7; ENSG00000009709; TAA
HSIDGILGDK

SEQ ID NO: 60934 - protein, 10 aa, Homo sapiens
  Table A; Target 60934; HLA-A*03:02; PAX7; ENSG00000009709; TAA
HSIDGILGDK

SEQ ID NO: 60935 - protein, 10 aa, Homo sapiens
  Table A; Target 60935; HLA-A*11:01; PAX7; ENSG00000009709; TAA
HSIDGILGDK

SEQ ID NO: 60936 - protein, 10 aa, Homo sapiens
  Table A; Target 60936; HLA-A*68:01; PAX7; ENSG00000009709; TAA
HSIDGILGDK

SEQ ID NO: 60937 - protein, 10 aa, Homo sapiens
  Table A; Target 60937; HLA-B*27:02; PAX7; ENSG00000009709; TAA
HSIDGILGDK

SEQ ID NO: 60938 - protein, 8 aa, Homo sapiens
  Table A; Target 60938; HLA-B*27:02; PAX7; ENSG00000009709; TAA
IDGILGDK

SEQ ID NO: 60939 - protein, 9 aa, Homo sapiens
  Table A; Target 60939; HLA-C*16:02; PAX7; ENSG00000009709; TAA
IGGSKPRQV

SEQ ID NO: 60940 - protein, 8 aa, Homo sapiens
  Table A; Target 60940; HLA-A*02:01; PAX7; ENSG00000009709; TAA
ILGNPSAV

SEQ ID NO: 60941 - protein, 8 aa, Homo sapiens
  Table A; Target 60941; HLA-A*02:03; PAX7; ENSG00000009709; TAA
ILGNPSAV

SEQ ID NO: 60942 - protein, 8 aa, Homo sapiens
  Table A; Target 60942; HLA-C*05:01; PAX7; ENSG00000009709; TAA
ILGNPSAV

SEQ ID NO: 60943 - protein, 8 aa, Homo sapiens
  Table A; Target 60943; HLA-C*06:02; PAX7; ENSG00000009709; TAA
ILGNPSAV

SEQ ID NO: 60944 - protein, 8 aa, Homo sapiens
  Table A; Target 60944; HLA-C*14:02; PAX7; ENSG00000009709; TAA
ILGNPSAV

SEQ ID NO: 60945 - protein, 8 aa, Homo sapiens
  Table A; Target 60945; HLA-C*01:02; PAX7; ENSG00000009709; TAA
ISPLHGGL

SEQ ID NO: 60946 - protein, 9 aa, Homo sapiens
  Table A; Target 60946; HLA-A*02:03; PAX7; ENSG00000009709; TAA
ISQDGGSTV

SEQ ID NO: 60947 - protein, 9 aa, Homo sapiens
  Table A; Target 60947; HLA-B*46:01; PAX7; ENSG00000009709; TAA
ISQDGGSTV

SEQ ID NO: 60948 - protein, 9 aa, Homo sapiens
  Table A; Target 60948; HLA-B*51:01; PAX7; ENSG00000009709; TAA
ISQDGGSTV

SEQ ID NO: 60949 - protein, 9 aa, Homo sapiens
  Table A; Target 60949; HLA-C*01:02; PAX7; ENSG00000009709; TAA
ISQDGGSTV

SEQ ID NO: 60950 - protein, 9 aa, Homo sapiens
  Table A; Target 60950; HLA-C*03:03; PAX7; ENSG00000009709; TAA
ISQDGGSTV

SEQ ID NO: 60951 - protein, 9 aa, Homo sapiens
  Table A; Target 60951; HLA-C*03:04; PAX7; ENSG00000009709; TAA
ISQDGGSTV

SEQ ID NO: 60952 - protein, 9 aa, Homo sapiens
  Table A; Target 60952; HLA-C*05:01; PAX7; ENSG00000009709; TAA
ISQDGGSTV

SEQ ID NO: 60953 - protein, 9 aa, Homo sapiens
  Table A; Target 60953; HLA-C*14:02; PAX7; ENSG00000009709; TAA
ISQDGGSTV

SEQ ID NO: 60954 - protein, 10 aa, Homo sapiens
  Table A; Target 60954; HLA-B*39:01; PAX7; ENSG00000009709; TAA
ISQDGGSTVH

SEQ ID NO: 60955 - protein, 11 aa, Homo sapiens
  Table A; Target 60955; HLA-A*11:01; PAX7; ENSG00000009709; TAA
ISQDGGSTVHR

SEQ ID NO: 60956 - protein, 11 aa, Homo sapiens
  Table A; Target 60956; HLA-A*31:01; PAX7; ENSG00000009709; TAA
ISQDGGSTVHR

SEQ ID NO: 60957 - protein, 11 aa, Homo sapiens
  Table A; Target 60957; HLA-A*33:01; PAX7; ENSG00000009709; TAA
ISQDGGSTVHR

SEQ ID NO: 60958 - protein, 11 aa, Homo sapiens
  Table A; Target 60958; HLA-A*33:03; PAX7; ENSG00000009709; TAA
ISQDGGSTVHR

SEQ ID NO: 60959 - protein, 11 aa, Homo sapiens
  Table A; Target 60959; HLA-A*68:01; PAX7; ENSG00000009709; TAA
ISQDGGSTVHR

SEQ ID NO: 60960 - protein, 11 aa, Homo sapiens
  Table A; Target 60960; HLA-C*07:06; PAX7; ENSG00000009709; TAA
ISQDGGSTVHR

SEQ ID NO: 60961 - protein, 9 aa, Homo sapiens
  Table A; Target 60961; HLA-B*57:01; PAX7; ENSG00000009709; TAA
ISRVLRIKF

SEQ ID NO: 60962 - protein, 9 aa, Homo sapiens
  Table A; Target 60962; HLA-A*02:01; PAX7; ENSG00000009709; TAA
KLGEHSAVL

SEQ ID NO: 60963 - protein, 9 aa, Homo sapiens
  Table A; Target 60963; HLA-A*02:03; PAX7; ENSG00000009709; TAA
KLGEHSAVL

SEQ ID NO: 60964 - protein, 9 aa, Homo sapiens
  Table A; Target 60964; HLA-A*02:04; PAX7; ENSG00000009709; TAA
KLGEHSAVL

SEQ ID NO: 60965 - protein, 9 aa, Homo sapiens
  Table A; Target 60965; HLA-A*02:07; PAX7; ENSG00000009709; TAA
KLGEHSAVL

SEQ ID NO: 60966 - protein, 9 aa, Homo sapiens
  Table A; Target 60966; HLA-A*03:01; PAX7; ENSG00000009709; TAA
KLGEHSAVL

SEQ ID NO: 60967 - protein, 9 aa, Homo sapiens
  Table A; Target 60967; HLA-A*03:02; PAX7; ENSG00000009709; TAA
KLGEHSAVL

SEQ ID NO: 60968 - protein, 9 aa, Homo sapiens
  Table A; Target 60968; HLA-A*32:01; PAX7; ENSG00000009709; TAA
KLGEHSAVL

SEQ ID NO: 60969 - protein, 9 aa, Homo sapiens
  Table A; Target 60969; HLA-B*08:01; PAX7; ENSG00000009709; TAA
KLGEHSAVL

SEQ ID NO: 60970 - protein, 9 aa, Homo sapiens
  Table A; Target 60970; HLA-B*15:01; PAX7; ENSG00000009709; TAA
KLGEHSAVL

SEQ ID NO: 60971 - protein, 9 aa, Homo sapiens
  Table A; Target 60971; HLA-B*37:01; PAX7; ENSG00000009709; TAA
KLGEHSAVL

SEQ ID NO: 60972 - protein, 9 aa, Homo sapiens
  Table A; Target 60972; HLA-B*40:01; PAX7; ENSG00000009709; TAA
KLGEHSAVL

SEQ ID NO: 60973 - protein, 9 aa, Homo sapiens
  Table A; Target 60973; HLA-B*40:02; PAX7; ENSG00000009709; TAA
KLGEHSAVL

SEQ ID NO: 60974 - protein, 9 aa, Homo sapiens
  Table A; Target 60974; HLA-B*46:01; PAX7; ENSG00000009709; TAA
KLGEHSAVL

SEQ ID NO: 60975 - protein, 9 aa, Homo sapiens
  Table A; Target 60975; HLA-B*55:01; PAX7; ENSG00000009709; TAA
KLGEHSAVL

SEQ ID NO: 60976 - protein, 11 aa, Homo sapiens
  Table A; Target 60976; HLA-A*03:01; PAX7; ENSG00000009709; TAA
KLGEHSAVLGL

SEQ ID NO: 60977 - protein, 9 aa, Homo sapiens
  Table A; Target 60977; HLA-A*29:02; PAX7; ENSG00000009709; TAA
KNVSLSTQR

SEQ ID NO: 60978 - protein, 9 aa, Homo sapiens
  Table A; Target 60978; HLA-A*31:01; PAX7; ENSG00000009709; TAA
KNVSLSTQR

SEQ ID NO: 60979 - protein, 9 aa, Homo sapiens
  Table A; Target 60979; HLA-A*33:01; PAX7; ENSG00000009709; TAA
KNVSLSTQR

SEQ ID NO: 60980 - protein, 9 aa, Homo sapiens
  Table A; Target 60980; HLA-A*33:03; PAX7; ENSG00000009709; TAA
KNVSLSTQR

SEQ ID NO: 60981 - protein, 9 aa, Homo sapiens
  Table A; Target 60981; HLA-A*68:01; PAX7; ENSG00000009709; TAA
KNVSLSTQR

SEQ ID NO: 60982 - protein, 9 aa, Homo sapiens
  Table A; Target 60982; HLA-B*27:05; PAX7; ENSG00000009709; TAA
KNVSLSTQR

SEQ ID NO: 60983 - protein, 9 aa, Homo sapiens
  Table A; Target 60983; HLA-C*07:06; PAX7; ENSG00000009709; TAA
KNVSLSTQR

SEQ ID NO: 60984 - protein, 11 aa, Homo sapiens
  Table A; Target 60984; HLA-B*55:01; PAX7; ENSG00000009709; TAA
KPGDSLPTSQA

SEQ ID NO: 60985 - protein, 11 aa, Homo sapiens
  Table A; Target 60985; HLA-B*56:01; PAX7; ENSG00000009709; TAA
KPGDSLPTSQA

SEQ ID NO: 60986 - protein, 8 aa, Homo sapiens
  Table A; Target 60986; HLA-B*07:02; PAX7; ENSG00000009709; TAA
KPRQVATP

SEQ ID NO: 60987 - protein, 10 aa, Homo sapiens
  Table A; Target 60987; HLA-B*07:02; PAX7; ENSG00000009709; TAA
KPRQVATPDV

SEQ ID NO: 60988 - protein, 10 aa, Homo sapiens
  Table A; Target 60988; HLA-B*56:01; PAX7; ENSG00000009709; TAA
KPRQVATPDV

SEQ ID NO: 60989 - protein, 9 aa, Homo sapiens
  Table A; Target 60989; HLA-C*06:02; PAX7; ENSG00000009709; TAA
KQAGANQLA

SEQ ID NO: 60990 - protein, 11 aa, Homo sapiens
  Table A; Target 60990; HLA-A*30:02; PAX7; ENSG00000009709; TAA
KQAGANQLAAF

SEQ ID NO: 60991 - protein, 11 aa, Homo sapiens
  Table A; Target 60991; HLA-A*32:01; PAX7; ENSG00000009709; TAA
KQAGANQLAAF

SEQ ID NO: 60992 - protein, 11 aa, Homo sapiens
  Table A; Target 60992; HLA-B*15:01; PAX7; ENSG00000009709; TAA
KQAGANQLAAF

SEQ ID NO: 60993 - protein, 11 aa, Homo sapiens
  Table A; Target 60993; HLA-B*15:03; PAX7; ENSG00000009709; TAA
KQAGANQLAAF

SEQ ID NO: 60994 - protein, 11 aa, Homo sapiens
  Table A; Target 60994; HLA-B*27:05; PAX7; ENSG00000009709; TAA
KQAGANQLAAF

SEQ ID NO: 60995 - protein, 11 aa, Homo sapiens
  Table A; Target 60995; HLA-B*39:01; PAX7; ENSG00000009709; TAA
KQAGANQLAAF

SEQ ID NO: 60996 - protein, 11 aa, Homo sapiens
  Table A; Target 60996; HLA-B*46:01; PAX7; ENSG00000009709; TAA
KQAGANQLAAF

SEQ ID NO: 60997 - protein, 11 aa, Homo sapiens
  Table A; Target 60997; HLA-C*07:04; PAX7; ENSG00000009709; TAA
KQAGANQLAAF

SEQ ID NO: 60998 - protein, 11 aa, Homo sapiens
  Table A; Target 60998; HLA-C*16:04; PAX7; ENSG00000009709; TAA
KQAGANQLAAF

SEQ ID NO: 60999 - protein, 10 aa, Homo sapiens
  Table A; Target 60999; HLA-C*16:04; PAX7; ENSG00000009709; TAA
KRENPGMFSW

SEQ ID NO: 61000 - protein, 8 aa, Homo sapiens
  Table A; Target 61000; HLA-B*08:01; PAX7; ENSG00000009709; TAA
LAAFNHLL

SEQ ID NO: 61001 - protein, 11 aa, Homo sapiens
  Table A; Target 61001; HLA-A*31:01; PAX7; ENSG00000009709; TAA
LAKNVSLSTQR

SEQ ID NO: 61002 - protein, 11 aa, Homo sapiens
  Table A; Target 61002; HLA-A*33:01; PAX7; ENSG00000009709; TAA
LAKNVSLSTQR

SEQ ID NO: 61003 - protein, 11 aa, Homo sapiens
  Table A; Target 61003; HLA-A*33:03; PAX7; ENSG00000009709; TAA
LAKNVSLSTQR

SEQ ID NO: 61004 - protein, 11 aa, Homo sapiens
  Table A; Target 61004; HLA-A*68:01; PAX7; ENSG00000009709; TAA
LAKNVSLSTQR

SEQ ID NO: 61005 - protein, 11 aa, Homo sapiens
  Table A; Target 61005; HLA-C*07:06; PAX7; ENSG00000009709; TAA
LAKNVSLSTQR

SEQ ID NO: 61006 - protein, 10 aa, Homo sapiens
  Table A; Target 61006; HLA-B*07:02; PAX7; ENSG00000009709; TAA
LDSATSISAS

SEQ ID NO: 61007 - protein, 10 aa, Homo sapiens
  Table A; Target 61007; HLA-B*27:02; PAX7; ENSG00000009709; TAA
LDSATSISAS

SEQ ID NO: 61008 - protein, 8 aa, Homo sapiens
  Table A; Target 61008; HLA-B*18:01; PAX7; ENSG00000009709; TAA
LEELEKAF

SEQ ID NO: 61009 - protein, 8 aa, Homo sapiens
  Table A; Target 61009; HLA-C*05:01; PAX7; ENSG00000009709; TAA
LGDKGNRL

SEQ ID NO: 61010 - protein, 8 aa, Homo sapiens
  Table A; Target 61010; HLA-C*03:04; PAX7; ENSG00000009709; TAA
LGEHSAVL

SEQ ID NO: 61011 - protein, 9 aa, Homo sapiens
  Table A; Target 61011; HLA-C*07:04; PAX7; ENSG00000009709; TAA
LGNPSAVPP

SEQ ID NO: 61012 - protein, 9 aa, Homo sapiens
  Table A; Target 61012; HLA-C*07:04; PAX7; ENSG00000009709; TAA
LGQGRVNQL

SEQ ID NO: 61013 - protein, 9 aa, Homo sapiens
  Table A; Target 61013; HLA-A*02:07; PAX7; ENSG00000009709; TAA
LLPGGFPPT

SEQ ID NO: 61014 - protein, 11 aa, Homo sapiens
  Table A; Target 61014; HLA-A*02:07; PAX7; ENSG00000009709; TAA
LLPGGFPPTGM

SEQ ID NO: 61015 - protein, 10 aa, Homo sapiens
  Table A; Target 61015; HLA-A*01:01; PAX7; ENSG00000009709; TAA
LLPVETGQAY

SEQ ID NO: 61016 - protein, 10 aa, Homo sapiens
  Table A; Target 61016; HLA-A*02:07; PAX7; ENSG00000009709; TAA
LLPVETGQAY

SEQ ID NO: 61017 - protein, 10 aa, Homo sapiens
  Table A; Target 61017; HLA-A*03:01; PAX7; ENSG00000009709; TAA
LLPVETGQAY

SEQ ID NO: 61018 - protein, 10 aa, Homo sapiens
  Table A; Target 61018; HLA-A*25:01; PAX7; ENSG00000009709; TAA
LLPVETGQAY

SEQ ID NO: 61019 - protein, 10 aa, Homo sapiens
  Table A; Target 61019; HLA-A*26:01; PAX7; ENSG00000009709; TAA
LLPVETGQAY

SEQ ID NO: 61020 - protein, 10 aa, Homo sapiens
  Table A; Target 61020; HLA-A*29:02; PAX7; ENSG00000009709; TAA
LLPVETGQAY

SEQ ID NO: 61021 - protein, 10 aa, Homo sapiens
  Table A; Target 61021; HLA-A*30:02; PAX7; ENSG00000009709; TAA
LLPVETGQAY

SEQ ID NO: 61022 - protein, 10 aa, Homo sapiens
  Table A; Target 61022; HLA-A*32:01; PAX7; ENSG00000009709; TAA
LLPVETGQAY

SEQ ID NO: 61023 - protein, 10 aa, Homo sapiens
  Table A; Target 61023; HLA-B*07:02; PAX7; ENSG00000009709; TAA
LLPVETGQAY

SEQ ID NO: 61024 - protein, 10 aa, Homo sapiens
  Table A; Target 61024; HLA-B*15:01; PAX7; ENSG00000009709; TAA
LLPVETGQAY

SEQ ID NO: 61025 - protein, 10 aa, Homo sapiens
  Table A; Target 61025; HLA-B*15:03; PAX7; ENSG00000009709; TAA
LLPVETGQAY

SEQ ID NO: 61026 - protein, 10 aa, Homo sapiens
  Table A; Target 61026; HLA-B*27:02; PAX7; ENSG00000009709; TAA
LLPVETGQAY

SEQ ID NO: 61027 - protein, 10 aa, Homo sapiens
  Table A; Target 61027; HLA-B*27:05; PAX7; ENSG00000009709; TAA
LLPVETGQAY

SEQ ID NO: 61028 - protein, 10 aa, Homo sapiens
  Table A; Target 61028; HLA-B*35:01; PAX7; ENSG00000009709; TAA
LLPVETGQAY

SEQ ID NO: 61029 - protein, 10 aa, Homo sapiens
  Table A; Target 61029; HLA-B*39:01; PAX7; ENSG00000009709; TAA
LLPVETGQAY

SEQ ID NO: 61030 - protein, 10 aa, Homo sapiens
  Table A; Target 61030; HLA-B*44:03; PAX7; ENSG00000009709; TAA
LLPVETGQAY

SEQ ID NO: 61031 - protein, 10 aa, Homo sapiens
  Table A; Target 61031; HLA-B*46:01; PAX7; ENSG00000009709; TAA
LLPVETGQAY

SEQ ID NO: 61032 - protein, 10 aa, Homo sapiens
  Table A; Target 61032; HLA-B*55:01; PAX7; ENSG00000009709; TAA
LLPVETGQAY

SEQ ID NO: 61033 - protein, 10 aa, Homo sapiens
  Table A; Target 61033; HLA-B*57:01; PAX7; ENSG00000009709; TAA
LLPVETGQAY

SEQ ID NO: 61034 - protein, 10 aa, Homo sapiens
  Table A; Target 61034; HLA-B*58:01; PAX7; ENSG00000009709; TAA
LLPVETGQAY

SEQ ID NO: 61035 - protein, 10 aa, Homo sapiens
  Table A; Target 61035; HLA-C*01:02; PAX7; ENSG00000009709; TAA
LLPVETGQAY

SEQ ID NO: 61036 - protein, 10 aa, Homo sapiens
  Table A; Target 61036; HLA-C*02:02; PAX7; ENSG00000009709; TAA
LLPVETGQAY

SEQ ID NO: 61037 - protein, 10 aa, Homo sapiens
  Table A; Target 61037; HLA-C*03:03; PAX7; ENSG00000009709; TAA
LLPVETGQAY

SEQ ID NO: 61038 - protein, 10 aa, Homo sapiens
  Table A; Target 61038; HLA-C*04:01; PAX7; ENSG00000009709; TAA
LLPVETGQAY

SEQ ID NO: 61039 - protein, 10 aa, Homo sapiens
  Table A; Target 61039; HLA-C*07:01; PAX7; ENSG00000009709; TAA
LLPVETGQAY

SEQ ID NO: 61040 - protein, 10 aa, Homo sapiens
  Table A; Target 61040; HLA-C*07:02; PAX7; ENSG00000009709; TAA
LLPVETGQAY

SEQ ID NO: 61041 - protein, 10 aa, Homo sapiens
  Table A; Target 61041; HLA-C*07:04; PAX7; ENSG00000009709; TAA
LLPVETGQAY

SEQ ID NO: 61042 - protein, 10 aa, Homo sapiens
  Table A; Target 61042; HLA-C*14:02; PAX7; ENSG00000009709; TAA
LLPVETGQAY

SEQ ID NO: 61043 - protein, 10 aa, Homo sapiens
  Table A; Target 61043; HLA-C*16:01; PAX7; ENSG00000009709; TAA
LLPVETGQAY

SEQ ID NO: 61044 - protein, 10 aa, Homo sapiens
  Table A; Target 61044; HLA-C*16:02; PAX7; ENSG00000009709; TAA
LLPVETGQAY

SEQ ID NO: 61045 - protein, 10 aa, Homo sapiens
  Table A; Target 61045; HLA-C*16:04; PAX7; ENSG00000009709; TAA
LLPVETGQAY

SEQ ID NO: 61046 - protein, 9 aa, Homo sapiens
  Table A; Target 61046; HLA-B*35:01; PAX7; ENSG00000009709; TAA
LPDSTYPTT

SEQ ID NO: 61047 - protein, 9 aa, Homo sapiens
  Table A; Target 61047; HLA-B*35:03; PAX7; ENSG00000009709; TAA
LPDSTYPTT

SEQ ID NO: 61048 - protein, 9 aa, Homo sapiens
  Table A; Target 61048; HLA-B*51:01; PAX7; ENSG00000009709; TAA
LPDSTYPTT

SEQ ID NO: 61049 - protein, 9 aa, Homo sapiens
  Table A; Target 61049; HLA-B*54:01; PAX7; ENSG00000009709; TAA
LPDSTYPTT

SEQ ID NO: 61050 - protein, 9 aa, Homo sapiens
  Table A; Target 61050; HLA-B*55:01; PAX7; ENSG00000009709; TAA
LPDSTYPTT

SEQ ID NO: 61051 - protein, 9 aa, Homo sapiens
  Table A; Target 61051; HLA-B*56:01; PAX7; ENSG00000009709; TAA
LPDSTYPTT

SEQ ID NO: 61052 - protein, 10 aa, Homo sapiens
  Table A; Target 61052; HLA-B*35:03; PAX7; ENSG00000009709; TAA
LPDSTYPTTT

SEQ ID NO: 61053 - protein, 11 aa, Homo sapiens
  Table A; Target 61053; HLA-B*35:03; PAX7; ENSG00000009709; TAA
LPDSTYPTTTI

SEQ ID NO: 61054 - protein, 11 aa, Homo sapiens
  Table A; Target 61054; HLA-B*38:01; PAX7; ENSG00000009709; TAA
LPDSTYPTTTI

SEQ ID NO: 61055 - protein, 11 aa, Homo sapiens
  Table A; Target 61055; HLA-B*51:01; PAX7; ENSG00000009709; TAA
LPDSTYPTTTI

SEQ ID NO: 61056 - protein, 11 aa, Homo sapiens
  Table A; Target 61056; HLA-C*05:01; PAX7; ENSG00000009709; TAA
LPDSTYPTTTI

SEQ ID NO: 61057 - protein, 11 aa, Homo sapiens
  Table A; Target 61057; HLA-C*07:02; PAX7; ENSG00000009709; TAA
LPDSTYPTTTI

SEQ ID NO: 61058 - protein, 9 aa, Homo sapiens
  Table A; Target 61058; HLA-B*54:01; PAX7; ENSG00000009709; TAA
LPGGFPPTG

SEQ ID NO: 61059 - protein, 9 aa, Homo sapiens
  Table A; Target 61059; HLA-B*56:01; PAX7; ENSG00000009709; TAA
LPGGFPPTG

SEQ ID NO: 61060 - protein, 10 aa, Homo sapiens
  Table A; Target 61060; HLA-B*07:02; PAX7; ENSG00000009709; TAA
LPGGFPPTGM

SEQ ID NO: 61061 - protein, 10 aa, Homo sapiens
  Table A; Target 61061; HLA-B*35:01; PAX7; ENSG00000009709; TAA
LPGGFPPTGM

SEQ ID NO: 61062 - protein, 10 aa, Homo sapiens
  Table A; Target 61062; HLA-B*35:03; PAX7; ENSG00000009709; TAA
LPGGFPPTGM

SEQ ID NO: 61063 - protein, 10 aa, Homo sapiens
  Table A; Target 61063; HLA-B*56:01; PAX7; ENSG00000009709; TAA
LPGGFPPTGM

SEQ ID NO: 61064 - protein, 8 aa, Homo sapiens
  Table A; Target 61064; HLA-B*35:01; PAX7; ENSG00000009709; TAA
LPGTVPRM

SEQ ID NO: 61065 - protein, 8 aa, Homo sapiens
  Table A; Target 61065; HLA-B*35:03; PAX7; ENSG00000009709; TAA
LPGTVPRM

SEQ ID NO: 61066 - protein, 8 aa, Homo sapiens
  Table A; Target 61066; HLA-B*51:01; PAX7; ENSG00000009709; TAA
LPGTVPRM

SEQ ID NO: 61067 - protein, 8 aa, Homo sapiens
  Table A; Target 61067; HLA-B*55:01; PAX7; ENSG00000009709; TAA
LPGTVPRM

SEQ ID NO: 61068 - protein, 9 aa, Homo sapiens
  Table A; Target 61068; HLA-B*35:03; PAX7; ENSG00000009709; TAA
LPGTVPRMM

SEQ ID NO: 61069 - protein, 11 aa, Homo sapiens
  Table A; Target 61069; HLA-B*35:01; PAX7; ENSG00000009709; TAA
LPPYQLPDSTY

SEQ ID NO: 61070 - protein, 11 aa, Homo sapiens
  Table A; Target 61070; HLA-B*55:01; PAX7; ENSG00000009709; TAA
LPPYQLPDSTY

SEQ ID NO: 61071 - protein, 11 aa, Homo sapiens
  Table A; Target 61071; HLA-C*03:03; PAX7; ENSG00000009709; TAA
LPPYQLPDSTY

SEQ ID NO: 61072 - protein, 9 aa, Homo sapiens
  Table A; Target 61072; HLA-B*54:01; PAX7; ENSG00000009709; TAA
LPTSQAYCP

SEQ ID NO: 61073 - protein, 9 aa, Homo sapiens
  Table A; Target 61073; HLA-B*56:01; PAX7; ENSG00000009709; TAA
LPTSQAYCP

SEQ ID NO: 61074 - protein, 8 aa, Homo sapiens
  Table A; Target 61074; HLA-B*54:01; PAX7; ENSG00000009709; TAA
LPVETGQA

SEQ ID NO: 61075 - protein, 8 aa, Homo sapiens
  Table A; Target 61075; HLA-B*55:01; PAX7; ENSG00000009709; TAA
LPVETGQA

SEQ ID NO: 61076 - protein, 8 aa, Homo sapiens
  Table A; Target 61076; HLA-B*56:01; PAX7; ENSG00000009709; TAA
LPVETGQA

SEQ ID NO: 61077 - protein, 9 aa, Homo sapiens
  Table A; Target 61077; HLA-A*01:01; PAX7; ENSG00000009709; TAA
LPVETGQAY

SEQ ID NO: 61078 - protein, 9 aa, Homo sapiens
  Table A; Target 61078; HLA-A*03:02; PAX7; ENSG00000009709; TAA
LPVETGQAY

SEQ ID NO: 61079 - protein, 9 aa, Homo sapiens
  Table A; Target 61079; HLA-A*11:01; PAX7; ENSG00000009709; TAA
LPVETGQAY

SEQ ID NO: 61080 - protein, 9 aa, Homo sapiens
  Table A; Target 61080; HLA-A*23:01; PAX7; ENSG00000009709; TAA
LPVETGQAY

SEQ ID NO: 61081 - protein, 9 aa, Homo sapiens
  Table A; Target 61081; HLA-A*24:02; PAX7; ENSG00000009709; TAA
LPVETGQAY

SEQ ID NO: 61082 - protein, 9 aa, Homo sapiens
  Table A; Target 61082; HLA-A*25:01; PAX7; ENSG00000009709; TAA
LPVETGQAY

SEQ ID NO: 61083 - protein, 9 aa, Homo sapiens
  Table A; Target 61083; HLA-A*26:01; PAX7; ENSG00000009709; TAA
LPVETGQAY

SEQ ID NO: 61084 - protein, 9 aa, Homo sapiens
  Table A; Target 61084; HLA-A*29:02; PAX7; ENSG00000009709; TAA
LPVETGQAY

SEQ ID NO: 61085 - protein, 9 aa, Homo sapiens
  Table A; Target 61085; HLA-A*30:01; PAX7; ENSG00000009709; TAA
LPVETGQAY

SEQ ID NO: 61086 - protein, 9 aa, Homo sapiens
  Table A; Target 61086; HLA-A*30:02; PAX7; ENSG00000009709; TAA
LPVETGQAY

SEQ ID NO: 61087 - protein, 9 aa, Homo sapiens
  Table A; Target 61087; HLA-A*32:01; PAX7; ENSG00000009709; TAA
LPVETGQAY

SEQ ID NO: 61088 - protein, 9 aa, Homo sapiens
  Table A; Target 61088; HLA-A*33:01; PAX7; ENSG00000009709; TAA
LPVETGQAY

SEQ ID NO: 61089 - protein, 9 aa, Homo sapiens
  Table A; Target 61089; HLA-A*33:03; PAX7; ENSG00000009709; TAA
LPVETGQAY

SEQ ID NO: 61090 - protein, 9 aa, Homo sapiens
  Table A; Target 61090; HLA-A*68:01; PAX7; ENSG00000009709; TAA
LPVETGQAY

SEQ ID NO: 61091 - protein, 9 aa, Homo sapiens
  Table A; Target 61091; HLA-B*07:02; PAX7; ENSG00000009709; TAA
LPVETGQAY

SEQ ID NO: 61092 - protein, 9 aa, Homo sapiens
  Table A; Target 61092; HLA-B*08:01; PAX7; ENSG00000009709; TAA
LPVETGQAY

SEQ ID NO: 61093 - protein, 9 aa, Homo sapiens
  Table A; Target 61093; HLA-B*13:02; PAX7; ENSG00000009709; TAA
LPVETGQAY

SEQ ID NO: 61094 - protein, 9 aa, Homo sapiens
  Table A; Target 61094; HLA-B*15:01; PAX7; ENSG00000009709; TAA
LPVETGQAY

SEQ ID NO: 61095 - protein, 9 aa, Homo sapiens
  Table A; Target 61095; HLA-B*15:03; PAX7; ENSG00000009709; TAA
LPVETGQAY

SEQ ID NO: 61096 - protein, 9 aa, Homo sapiens
  Table A; Target 61096; HLA-B*18:01; PAX7; ENSG00000009709; TAA
LPVETGQAY

SEQ ID NO: 61097 - protein, 9 aa, Homo sapiens
  Table A; Target 61097; HLA-B*27:02; PAX7; ENSG00000009709; TAA
LPVETGQAY

SEQ ID NO: 61098 - protein, 9 aa, Homo sapiens
  Table A; Target 61098; HLA-B*27:05; PAX7; ENSG00000009709; TAA
LPVETGQAY

SEQ ID NO: 61099 - protein, 9 aa, Homo sapiens
  Table A; Target 61099; HLA-B*35:01; PAX7; ENSG00000009709; TAA
LPVETGQAY

SEQ ID NO: 61100 - protein, 9 aa, Homo sapiens
  Table A; Target 61100; HLA-B*35:03; PAX7; ENSG00000009709; TAA
LPVETGQAY

SEQ ID NO: 61101 - protein, 9 aa, Homo sapiens
  Table A; Target 61101; HLA-B*38:01; PAX7; ENSG00000009709; TAA
LPVETGQAY

SEQ ID NO: 61102 - protein, 9 aa, Homo sapiens
  Table A; Target 61102; HLA-B*39:01; PAX7; ENSG00000009709; TAA
LPVETGQAY

SEQ ID NO: 61103 - protein, 9 aa, Homo sapiens
  Table A; Target 61103; HLA-B*40:01; PAX7; ENSG00000009709; TAA
LPVETGQAY

SEQ ID NO: 61104 - protein, 9 aa, Homo sapiens
  Table A; Target 61104; HLA-B*40:02; PAX7; ENSG00000009709; TAA
LPVETGQAY

SEQ ID NO: 61105 - protein, 9 aa, Homo sapiens
  Table A; Target 61105; HLA-B*44:02; PAX7; ENSG00000009709; TAA
LPVETGQAY

SEQ ID NO: 61106 - protein, 9 aa, Homo sapiens
  Table A; Target 61106; HLA-B*44:03; PAX7; ENSG00000009709; TAA
LPVETGQAY

SEQ ID NO: 61107 - protein, 9 aa, Homo sapiens
  Table A; Target 61107; HLA-B*46:01; PAX7; ENSG00000009709; TAA
LPVETGQAY

SEQ ID NO: 61108 - protein, 9 aa, Homo sapiens
  Table A; Target 61108; HLA-B*51:01; PAX7; ENSG00000009709; TAA
LPVETGQAY

SEQ ID NO: 61109 - protein, 9 aa, Homo sapiens
  Table A; Target 61109; HLA-B*54:01; PAX7; ENSG00000009709; TAA
LPVETGQAY

SEQ ID NO: 61110 - protein, 9 aa, Homo sapiens
  Table A; Target 61110; HLA-B*55:01; PAX7; ENSG00000009709; TAA
LPVETGQAY

SEQ ID NO: 61111 - protein, 9 aa, Homo sapiens
  Table A; Target 61111; HLA-B*56:01; PAX7; ENSG00000009709; TAA
LPVETGQAY

SEQ ID NO: 61112 - protein, 9 aa, Homo sapiens
  Table A; Target 61112; HLA-B*57:01; PAX7; ENSG00000009709; TAA
LPVETGQAY

SEQ ID NO: 61113 - protein, 9 aa, Homo sapiens
  Table A; Target 61113; HLA-B*58:01; PAX7; ENSG00000009709; TAA
LPVETGQAY

SEQ ID NO: 61114 - protein, 9 aa, Homo sapiens
  Table A; Target 61114; HLA-C*01:02; PAX7; ENSG00000009709; TAA
LPVETGQAY

SEQ ID NO: 61115 - protein, 9 aa, Homo sapiens
  Table A; Target 61115; HLA-C*02:02; PAX7; ENSG00000009709; TAA
LPVETGQAY

SEQ ID NO: 61116 - protein, 9 aa, Homo sapiens
  Table A; Target 61116; HLA-C*03:03; PAX7; ENSG00000009709; TAA
LPVETGQAY

SEQ ID NO: 61117 - protein, 9 aa, Homo sapiens
  Table A; Target 61117; HLA-C*03:04; PAX7; ENSG00000009709; TAA
LPVETGQAY

SEQ ID NO: 61118 - protein, 9 aa, Homo sapiens
  Table A; Target 61118; HLA-C*04:01; PAX7; ENSG00000009709; TAA
LPVETGQAY

SEQ ID NO: 61119 - protein, 9 aa, Homo sapiens
  Table A; Target 61119; HLA-C*05:01; PAX7; ENSG00000009709; TAA
LPVETGQAY

SEQ ID NO: 61120 - protein, 9 aa, Homo sapiens
  Table A; Target 61120; HLA-C*06:02; PAX7; ENSG00000009709; TAA
LPVETGQAY

SEQ ID NO: 61121 - protein, 9 aa, Homo sapiens
  Table A; Target 61121; HLA-C*07:01; PAX7; ENSG00000009709; TAA
LPVETGQAY

SEQ ID NO: 61122 - protein, 9 aa, Homo sapiens
  Table A; Target 61122; HLA-C*07:02; PAX7; ENSG00000009709; TAA
LPVETGQAY

SEQ ID NO: 61123 - protein, 9 aa, Homo sapiens
  Table A; Target 61123; HLA-C*07:04; PAX7; ENSG00000009709; TAA
LPVETGQAY

SEQ ID NO: 61124 - protein, 9 aa, Homo sapiens
  Table A; Target 61124; HLA-C*07:06; PAX7; ENSG00000009709; TAA
LPVETGQAY

SEQ ID NO: 61125 - protein, 9 aa, Homo sapiens
  Table A; Target 61125; HLA-C*12:03; PAX7; ENSG00000009709; TAA
LPVETGQAY

SEQ ID NO: 61126 - protein, 9 aa, Homo sapiens
  Table A; Target 61126; HLA-C*14:02; PAX7; ENSG00000009709; TAA
LPVETGQAY

SEQ ID NO: 61127 - protein, 9 aa, Homo sapiens
  Table A; Target 61127; HLA-C*16:01; PAX7; ENSG00000009709; TAA
LPVETGQAY

SEQ ID NO: 61128 - protein, 9 aa, Homo sapiens
  Table A; Target 61128; HLA-C*16:02; PAX7; ENSG00000009709; TAA
LPVETGQAY

SEQ ID NO: 61129 - protein, 9 aa, Homo sapiens
  Table A; Target 61129; HLA-C*16:04; PAX7; ENSG00000009709; TAA
LPVETGQAY

SEQ ID NO: 61130 - protein, 8 aa, Homo sapiens
  Table A; Target 61130; HLA-B*51:01; PAX7; ENSG00000009709; TAA
LSPQVMSI

SEQ ID NO: 61131 - protein, 9 aa, Homo sapiens
  Table A; Target 61131; HLA-C*01:02; PAX7; ENSG00000009709; TAA
LSPQVMSIL

SEQ ID NO: 61132 - protein, 9 aa, Homo sapiens
  Table A; Target 61132; HLA-A*32:01; PAX7; ENSG00000009709; TAA
LVSSISRVL

SEQ ID NO: 61133 - protein, 9 aa, Homo sapiens
  Table A; Target 61133; HLA-A*68:02; PAX7; ENSG00000009709; TAA
LVSSISRVL

SEQ ID NO: 61134 - protein, 9 aa, Homo sapiens
  Table A; Target 61134; HLA-B*07:02; PAX7; ENSG00000009709; TAA
LVSSISRVL

SEQ ID NO: 61135 - protein, 9 aa, Homo sapiens
  Table A; Target 61135; HLA-B*27:05; PAX7; ENSG00000009709; TAA
LVSSISRVL

SEQ ID NO: 61136 - protein, 9 aa, Homo sapiens
  Table A; Target 61136; HLA-B*35:03; PAX7; ENSG00000009709; TAA
LVSSISRVL

SEQ ID NO: 61137 - protein, 9 aa, Homo sapiens
  Table A; Target 61137; HLA-B*58:01; PAX7; ENSG00000009709; TAA
LVSSISRVL

SEQ ID NO: 61138 - protein, 9 aa, Homo sapiens
  Table A; Target 61138; HLA-C*02:02; PAX7; ENSG00000009709; TAA
LVSSISRVL

SEQ ID NO: 61139 - protein, 9 aa, Homo sapiens
  Table A; Target 61139; HLA-C*03:03; PAX7; ENSG00000009709; TAA
LVSSISRVL

SEQ ID NO: 61140 - protein, 9 aa, Homo sapiens
  Table A; Target 61140; HLA-C*03:04; PAX7; ENSG00000009709; TAA
LVSSISRVL

SEQ ID NO: 61141 - protein, 9 aa, Homo sapiens
  Table A; Target 61141; HLA-C*06:02; PAX7; ENSG00000009709; TAA
LVSSISRVL

SEQ ID NO: 61142 - protein, 9 aa, Homo sapiens
  Table A; Target 61142; HLA-C*07:04; PAX7; ENSG00000009709; TAA
LVSSISRVL

SEQ ID NO: 61143 - protein, 9 aa, Homo sapiens
  Table A; Target 61143; HLA-C*12:03; PAX7; ENSG00000009709; TAA
LVSSISRVL

SEQ ID NO: 61144 - protein, 9 aa, Homo sapiens
  Table A; Target 61144; HLA-C*16:01; PAX7; ENSG00000009709; TAA
LVSSISRVL

SEQ ID NO: 61145 - protein, 9 aa, Homo sapiens
  Table A; Target 61145; HLA-C*16:02; PAX7; ENSG00000009709; TAA
LVSSISRVL

SEQ ID NO: 61146 - protein, 8 aa, Homo sapiens
  Table A; Target 61146; HLA-B*51:01; PAX7; ENSG00000009709; TAA
MAALPGTV

SEQ ID NO: 61147 - protein, 9 aa, Homo sapiens
  Table A; Target 61147; HLA-B*54:01; PAX7; ENSG00000009709; TAA
MAALPGTVP

SEQ ID NO: 61148 - protein, 9 aa, Homo sapiens
  Table A; Target 61148; HLA-C*03:04; PAX7; ENSG00000009709; TAA
MAALPGTVP

SEQ ID NO: 61149 - protein, 10 aa, Homo sapiens
  Table A; Target 61149; HLA-A*33:01; PAX7; ENSG00000009709; TAA
MAALPGTVPR

SEQ ID NO: 61150 - protein, 10 aa, Homo sapiens
  Table A; Target 61150; HLA-A*33:03; PAX7; ENSG00000009709; TAA
MAALPGTVPR

SEQ ID NO: 61151 - protein, 10 aa, Homo sapiens
  Table A; Target 61151; HLA-A*68:01; PAX7; ENSG00000009709; TAA
MAALPGTVPR

SEQ ID NO: 61152 - protein, 10 aa, Homo sapiens
  Table A; Target 61152; HLA-C*07:06; PAX7; ENSG00000009709; TAA
MAALPGTVPR

SEQ ID NO: 61153 - protein, 9 aa, Homo sapiens
  Table A; Target 61153; HLA-B*27:05; PAX7; ENSG00000009709; TAA
MHQGGLAAA

SEQ ID NO: 61154 - protein, 9 aa, Homo sapiens
  Table A; Target 61154; HLA-B*39:01; PAX7; ENSG00000009709; TAA
MHQGGLAAA

SEQ ID NO: 61155 - protein, 10 aa, Homo sapiens
  Table A; Target 61155; HLA-B*39:01; PAX7; ENSG00000009709; TAA
MHQGGLAAAA

SEQ ID NO: 61156 - protein, 10 aa, Homo sapiens
  Table A; Target 61156; HLA-B*15:03; PAX7; ENSG00000009709; TAA
MKLGEHSAVL

SEQ ID NO: 61157 - protein, 10 aa, Homo sapiens
  Table A; Target 61157; HLA-C*07:01; PAX7; ENSG00000009709; TAA
MKLGEHSAVL

SEQ ID NO: 61158 - protein, 10 aa, Homo sapiens
  Table A; Target 61158; HLA-A*29:02; PAX7; ENSG00000009709; TAA
MMRPAPGQNY

SEQ ID NO: 61159 - protein, 10 aa, Homo sapiens
  Table A; Target 61159; HLA-A*30:02; PAX7; ENSG00000009709; TAA
MMRPAPGQNY

SEQ ID NO: 61160 - protein, 10 aa, Homo sapiens
  Table A; Target 61160; HLA-A*31:01; PAX7; ENSG00000009709; TAA
MMRPAPGQNY

SEQ ID NO: 61161 - protein, 10 aa, Homo sapiens
  Table A; Target 61161; HLA-A*32:01; PAX7; ENSG00000009709; TAA
MMRPAPGQNY

SEQ ID NO: 61162 - protein, 10 aa, Homo sapiens
  Table A; Target 61162; HLA-B*15:01; PAX7; ENSG00000009709; TAA
MMRPAPGQNY

SEQ ID NO: 61163 - protein, 10 aa, Homo sapiens
  Table A; Target 61163; HLA-B*15:03; PAX7; ENSG00000009709; TAA
MMRPAPGQNY

SEQ ID NO: 61164 - protein, 10 aa, Homo sapiens
  Table A; Target 61164; HLA-B*46:01; PAX7; ENSG00000009709; TAA
MMRPAPGQNY

SEQ ID NO: 61165 - protein, 10 aa, Homo sapiens
  Table A; Target 61165; HLA-B*58:01; PAX7; ENSG00000009709; TAA
MMRPAPGQNY

SEQ ID NO: 61166 - protein, 10 aa, Homo sapiens
  Table A; Target 61166; HLA-C*14:02; PAX7; ENSG00000009709; TAA
MMRPAPGQNY

SEQ ID NO: 61167 - protein, 8 aa, Homo sapiens
  Table A; Target 61167; HLA-C*01:02; PAX7; ENSG00000009709; TAA
MNPVSNGL

SEQ ID NO: 61168 - protein, 9 aa, Homo sapiens
  Table A; Target 61168; HLA-B*07:02; PAX7; ENSG00000009709; TAA
MPTLPPYQL

SEQ ID NO: 61169 - protein, 9 aa, Homo sapiens
  Table A; Target 61169; HLA-B*35:01; PAX7; ENSG00000009709; TAA
MPTLPPYQL

SEQ ID NO: 61170 - protein, 9 aa, Homo sapiens
  Table A; Target 61170; HLA-B*35:03; PAX7; ENSG00000009709; TAA
MPTLPPYQL

SEQ ID NO: 61171 - protein, 9 aa, Homo sapiens
  Table A; Target 61171; HLA-B*54:01; PAX7; ENSG00000009709; TAA
MPTLPPYQL

SEQ ID NO: 61172 - protein, 9 aa, Homo sapiens
  Table A; Target 61172; HLA-B*55:01; PAX7; ENSG00000009709; TAA
MPTLPPYQL

SEQ ID NO: 61173 - protein, 9 aa, Homo sapiens
  Table A; Target 61173; HLA-B*56:01; PAX7; ENSG00000009709; TAA
MPTLPPYQL

SEQ ID NO: 61174 - protein, 9 aa, Homo sapiens
  Table A; Target 61174; HLA-B*07:02; PAX7; ENSG00000009709; TAA
MRPAPGQNY

SEQ ID NO: 61175 - protein, 9 aa, Homo sapiens
  Table A; Target 61175; HLA-B*15:03; PAX7; ENSG00000009709; TAA
MRPAPGQNY

SEQ ID NO: 61176 - protein, 9 aa, Homo sapiens
  Table A; Target 61176; HLA-B*27:05; PAX7; ENSG00000009709; TAA
MRPAPGQNY

SEQ ID NO: 61177 - protein, 9 aa, Homo sapiens
  Table A; Target 61177; HLA-B*39:01; PAX7; ENSG00000009709; TAA
MRPAPGQNY

SEQ ID NO: 61178 - protein, 9 aa, Homo sapiens
  Table A; Target 61178; HLA-C*01:02; PAX7; ENSG00000009709; TAA
MRPAPGQNY

SEQ ID NO: 61179 - protein, 9 aa, Homo sapiens
  Table A; Target 61179; HLA-C*06:02; PAX7; ENSG00000009709; TAA
MRPAPGQNY

SEQ ID NO: 61180 - protein, 9 aa, Homo sapiens
  Table A; Target 61180; HLA-C*07:01; PAX7; ENSG00000009709; TAA
MRPAPGQNY

SEQ ID NO: 61181 - protein, 9 aa, Homo sapiens
  Table A; Target 61181; HLA-C*07:04; PAX7; ENSG00000009709; TAA
MRPAPGQNY

SEQ ID NO: 61182 - protein, 9 aa, Homo sapiens
  Table A; Target 61182; HLA-C*14:02; PAX7; ENSG00000009709; TAA
MRPAPGQNY

SEQ ID NO: 61183 - protein, 9 aa, Homo sapiens
  Table A; Target 61183; HLA-C*16:01; PAX7; ENSG00000009709; TAA
MRPAPGQNY

SEQ ID NO: 61184 - protein, 9 aa, Homo sapiens
  Table A; Target 61184; HLA-C*16:04; PAX7; ENSG00000009709; TAA
MRPAPGQNY

SEQ ID NO: 61185 - protein, 9 aa, Homo sapiens
  Table A; Target 61185; HLA-B*54:01; PAX7; ENSG00000009709; TAA
MSILGNPSA

SEQ ID NO: 61186 - protein, 10 aa, Homo sapiens
  Table A; Target 61186; HLA-B*27:05; PAX7; ENSG00000009709; TAA
NHMNPVSNGL

SEQ ID NO: 61187 - protein, 10 aa, Homo sapiens
  Table A; Target 61187; HLA-B*38:01; PAX7; ENSG00000009709; TAA
NHMNPVSNGL

SEQ ID NO: 61188 - protein, 10 aa, Homo sapiens
  Table A; Target 61188; HLA-B*39:01; PAX7; ENSG00000009709; TAA
NHMNPVSNGL

SEQ ID NO: 61189 - protein, 9 aa, Homo sapiens
  Table A; Target 61189; HLA-B*07:02; PAX7; ENSG00000009709; TAA
NPAAPSNHM

SEQ ID NO: 61190 - protein, 9 aa, Homo sapiens
  Table A; Target 61190; HLA-B*35:01; PAX7; ENSG00000009709; TAA
NPAAPSNHM

SEQ ID NO: 61191 - protein, 9 aa, Homo sapiens
  Table A; Target 61191; HLA-B*35:03; PAX7; ENSG00000009709; TAA
NPAAPSNHM

SEQ ID NO: 61192 - protein, 9 aa, Homo sapiens
  Table A; Target 61192; HLA-B*51:01; PAX7; ENSG00000009709; TAA
NPAAPSNHM

SEQ ID NO: 61193 - protein, 9 aa, Homo sapiens
  Table A; Target 61193; HLA-B*55:01; PAX7; ENSG00000009709; TAA
NPAAPSNHM

SEQ ID NO: 61194 - protein, 9 aa, Homo sapiens
  Table A; Target 61194; HLA-B*56:01; PAX7; ENSG00000009709; TAA
NPAAPSNHM

SEQ ID NO: 61195 - protein, 9 aa, Homo sapiens
  Table A; Target 61195; HLA-C*03:03; PAX7; ENSG00000009709; TAA
NPAAPSNHM

SEQ ID NO: 61196 - protein, 9 aa, Homo sapiens
  Table A; Target 61196; HLA-C*07:02; PAX7; ENSG00000009709; TAA
NPAAPSNHM

SEQ ID NO: 61197 - protein, 9 aa, Homo sapiens
  Table A; Target 61197; HLA-C*07:06; PAX7; ENSG00000009709; TAA
NPAAPSNHM

SEQ ID NO: 61198 - protein, 11 aa, Homo sapiens
  Table A; Target 61198; HLA-B*54:01; PAX7; ENSG00000009709; TAA
NPSAVPPQPQA

SEQ ID NO: 61199 - protein, 11 aa, Homo sapiens
  Table A; Target 61199; HLA-B*56:01; PAX7; ENSG00000009709; TAA
NPSAVPPQPQA

SEQ ID NO: 61200 - protein, 9 aa, Homo sapiens
  Table A; Target 61200; HLA-B*54:01; PAX7; ENSG00000009709; TAA
NPVSNGLSP

SEQ ID NO: 61201 - protein, 9 aa, Homo sapiens
  Table A; Target 61201; HLA-B*56:01; PAX7; ENSG00000009709; TAA
NPVSNGLSP

SEQ ID NO: 61202 - protein, 11 aa, Homo sapiens
  Table A; Target 61202; HLA-B*56:01; PAX7; ENSG00000009709; TAA
NPVSNGLSPQV

SEQ ID NO: 61203 - protein, 9 aa, Homo sapiens
  Table A; Target 61203; HLA-A*24:02; PAX7; ENSG00000009709; TAA
NQLAAFNHL

SEQ ID NO: 61204 - protein, 9 aa, Homo sapiens
  Table A; Target 61204; HLA-B*38:01; PAX7; ENSG00000009709; TAA
NQLAAFNHL

SEQ ID NO: 61205 - protein, 8 aa, Homo sapiens
  Table A; Target 61205; HLA-B*38:01; PAX7; ENSG00000009709; TAA
NQLGGVFI

SEQ ID NO: 61206 - protein, 8 aa, Homo sapiens
  Table A; Target 61206; HLA-C*07:06; PAX7; ENSG00000009709; TAA
NVSLSTQR

SEQ ID NO: 61207 - protein, 9 aa, Homo sapiens
  Table A; Target 61207; HLA-A*33:01; PAX7; ENSG00000009709; TAA
NVSLSTQRR

SEQ ID NO: 61208 - protein, 9 aa, Homo sapiens
  Table A; Target 61208; HLA-A*33:03; PAX7; ENSG00000009709; TAA
NVSLSTQRR

SEQ ID NO: 61209 - protein, 9 aa, Homo sapiens
  Table A; Target 61209; HLA-A*68:01; PAX7; ENSG00000009709; TAA
NVSLSTQRR

SEQ ID NO: 61210 - protein, 9 aa, Homo sapiens
  Table A; Target 61210; HLA-A*24:02; PAX7; ENSG00000009709; TAA
NYPRTGFPL

SEQ ID NO: 61211 - protein, 9 aa, Homo sapiens
  Table A; Target 61211; HLA-C*01:02; PAX7; ENSG00000009709; TAA
NYPRTGFPL

SEQ ID NO: 61212 - protein, 8 aa, Homo sapiens
  Table A; Target 61212; HLA-C*16:02; PAX7; ENSG00000009709; TAA
PAAPSNHM

SEQ ID NO: 61213 - protein, 9 aa, Homo sapiens
  Table A; Target 61213; HLA-A*68:01; PAX7; ENSG00000009709; TAA
PAPGQNYPR

SEQ ID NO: 61214 - protein, 10 aa, Homo sapiens
  Table A; Target 61214; HLA-B*07:02; PAX7; ENSG00000009709; TAA
PDSTYPTTTI

SEQ ID NO: 61215 - protein, 9 aa, Homo sapiens
  Table A; Target 61215; HLA-B*15:01; PAX7; ENSG00000009709; TAA
PQPLPPSTM

SEQ ID NO: 61216 - protein, 9 aa, Homo sapiens
  Table A; Target 61216; HLA-B*15:03; PAX7; ENSG00000009709; TAA
PQPLPPSTM

SEQ ID NO: 61217 - protein, 9 aa, Homo sapiens
  Table A; Target 61217; HLA-C*07:02; PAX7; ENSG00000009709; TAA
PQPLPPSTM

SEQ ID NO: 61218 - protein, 8 aa, Homo sapiens
  Table A; Target 61218; HLA-A*23:01; PAX7; ENSG00000009709; TAA
PTLPPYQL

SEQ ID NO: 61219 - protein, 8 aa, Homo sapiens
  Table A; Target 61219; HLA-B*15:01; PAX7; ENSG00000009709; TAA
PTYSTTGY

SEQ ID NO: 61220 - protein, 10 aa, Homo sapiens
  Table A; Target 61220; HLA-A*26:01; PAX7; ENSG00000009709; TAA
PVAGYQYGQY

SEQ ID NO: 61221 - protein, 8 aa, Homo sapiens
  Table A; Target 61221; HLA-A*01:01; PAX7; ENSG00000009709; TAA
PVETGQAY

SEQ ID NO: 61222 - protein, 8 aa, Homo sapiens
  Table A; Target 61222; HLA-B*15:01; PAX7; ENSG00000009709; TAA
PVETGQAY

SEQ ID NO: 61223 - protein, 8 aa, Homo sapiens
  Table A; Target 61223; HLA-C*01:02; PAX7; ENSG00000009709; TAA
PVETGQAY

SEQ ID NO: 61224 - protein, 8 aa, Homo sapiens
  Table A; Target 61224; HLA-C*04:01; PAX7; ENSG00000009709; TAA
PVETGQAY

SEQ ID NO: 61225 - protein, 8 aa, Homo sapiens
  Table A; Target 61225; HLA-C*05:01; PAX7; ENSG00000009709; TAA
PVETGQAY

SEQ ID NO: 61226 - protein, 8 aa, Homo sapiens
  Table A; Target 61226; HLA-C*06:02; PAX7; ENSG00000009709; TAA
PVETGQAY

SEQ ID NO: 61227 - protein, 8 aa, Homo sapiens
  Table A; Target 61227; HLA-C*07:01; PAX7; ENSG00000009709; TAA
PVETGQAY

SEQ ID NO: 61228 - protein, 8 aa, Homo sapiens
  Table A; Target 61228; HLA-C*07:02; PAX7; ENSG00000009709; TAA
PVETGQAY

SEQ ID NO: 61229 - protein, 8 aa, Homo sapiens
  Table A; Target 61229; HLA-C*07:04; PAX7; ENSG00000009709; TAA
PVETGQAY

SEQ ID NO: 61230 - protein, 8 aa, Homo sapiens
  Table A; Target 61230; HLA-C*12:03; PAX7; ENSG00000009709; TAA
PVETGQAY

SEQ ID NO: 61231 - protein, 8 aa, Homo sapiens
  Table A; Target 61231; HLA-C*14:02; PAX7; ENSG00000009709; TAA
PVETGQAY

SEQ ID NO: 61232 - protein, 8 aa, Homo sapiens
  Table A; Target 61232; HLA-C*16:02; PAX7; ENSG00000009709; TAA
PVETGQAY

SEQ ID NO: 61233 - protein, 9 aa, Homo sapiens
  Table A; Target 61233; HLA-A*30:02; PAX7; ENSG00000009709; TAA
PYQLPDSTY

SEQ ID NO: 61234 - protein, 9 aa, Homo sapiens
  Table A; Target 61234; HLA-C*14:02; PAX7; ENSG00000009709; TAA
PYQLPDSTY

SEQ ID NO: 61235 - protein, 9 aa, Homo sapiens
  Table A; Target 61235; HLA-C*05:01; PAX7; ENSG00000009709; TAA
QADFSISPL

SEQ ID NO: 61236 - protein, 9 aa, Homo sapiens
  Table A; Target 61236; HLA-B*54:01; PAX7; ENSG00000009709; TAA
QAGANQLAA

SEQ ID NO: 61237 - protein, 9 aa, Homo sapiens
  Table A; Target 61237; HLA-B*56:01; PAX7; ENSG00000009709; TAA
QAGANQLAA

SEQ ID NO: 61238 - protein, 8 aa, Homo sapiens
  Table A; Target 61238; HLA-B*15:03; PAX7; ENSG00000009709; TAA
QAYCPPTY

SEQ ID NO: 61239 - protein, 8 aa, Homo sapiens
  Table A; Target 61239; HLA-B*39:01; PAX7; ENSG00000009709; TAA
QAYCPPTY

SEQ ID NO: 61240 - protein, 8 aa, Homo sapiens
  Table A; Target 61240; HLA-B*51:01; PAX7; ENSG00000009709; TAA
QAYCPPTY

SEQ ID NO: 61241 - protein, 8 aa, Homo sapiens
  Table A; Target 61241; HLA-B*58:01; PAX7; ENSG00000009709; TAA
QAYCPPTY

SEQ ID NO: 61242 - protein, 8 aa, Homo sapiens
  Table A; Target 61242; HLA-C*07:01; PAX7; ENSG00000009709; TAA
QAYCPPTY

SEQ ID NO: 61243 - protein, 8 aa, Homo sapiens
  Table A; Target 61243; HLA-C*12:03; PAX7; ENSG00000009709; TAA
QAYCPPTY

SEQ ID NO: 61244 - protein, 9 aa, Homo sapiens
  Table A; Target 61244; HLA-A*33:03; PAX7; ENSG00000009709; TAA
QDGGSTVHR

SEQ ID NO: 61245 - protein, 9 aa, Homo sapiens
  Table A; Target 61245; HLA-A*68:01; PAX7; ENSG00000009709; TAA
QDGGSTVHR

SEQ ID NO: 61246 - protein, 11 aa, Homo sapiens
  Table A; Target 61246; HLA-B*44:02; PAX7; ENSG00000009709; TAA
QETGSIRPGAI

SEQ ID NO: 61247 - protein, 9 aa, Homo sapiens
  Table A; Target 61247; HLA-A*02:01; PAX7; ENSG00000009709; TAA
QLAAFNHLL

SEQ ID NO: 61248 - protein, 9 aa, Homo sapiens
  Table A; Target 61248; HLA-A*02:03; PAX7; ENSG00000009709; TAA
QLAAFNHLL

SEQ ID NO: 61249 - protein, 9 aa, Homo sapiens
  Table A; Target 61249; HLA-A*02:04; PAX7; ENSG00000009709; TAA
QLAAFNHLL

SEQ ID NO: 61250 - protein, 9 aa, Homo sapiens
  Table A; Target 61250; HLA-A*02:07; PAX7; ENSG00000009709; TAA
QLAAFNHLL

SEQ ID NO: 61251 - protein, 9 aa, Homo sapiens
  Table A; Target 61251; HLA-A*24:02; PAX7; ENSG00000009709; TAA
QLAAFNHLL

SEQ ID NO: 61252 - protein, 9 aa, Homo sapiens
  Table A; Target 61252; HLA-A*68:02; PAX7; ENSG00000009709; TAA
QLAAFNHLL

SEQ ID NO: 61253 - protein, 9 aa, Homo sapiens
  Table A; Target 61253; HLA-B*13:02; PAX7; ENSG00000009709; TAA
QLAAFNHLL

SEQ ID NO: 61254 - protein, 9 aa, Homo sapiens
  Table A; Target 61254; HLA-B*38:01; PAX7; ENSG00000009709; TAA
QLAAFNHLL

SEQ ID NO: 61255 - protein, 9 aa, Homo sapiens
  Table A; Target 61255; HLA-B*55:01; PAX7; ENSG00000009709; TAA
QLAAFNHLL

SEQ ID NO: 61256 - protein, 9 aa, Homo sapiens
  Table A; Target 61256; HLA-B*44:02; PAX7; ENSG00000009709; TAA
QLEELEKAF

SEQ ID NO: 61257 - protein, 9 aa, Homo sapiens
  Table A; Target 61257; HLA-B*44:03; PAX7; ENSG00000009709; TAA
QLEELEKAF

SEQ ID NO: 61258 - protein, 8 aa, Homo sapiens
  Table A; Target 61258; HLA-B*08:01; PAX7; ENSG00000009709; TAA
QNYPRTGF

SEQ ID NO: 61259 - protein, 8 aa, Homo sapiens
  Table A; Target 61259; HLA-B*07:02; PAX7; ENSG00000009709; TAA
QPLPPSTM

SEQ ID NO: 61260 - protein, 8 aa, Homo sapiens
  Table A; Target 61260; HLA-B*35:01; PAX7; ENSG00000009709; TAA
QPLPPSTM

SEQ ID NO: 61261 - protein, 8 aa, Homo sapiens
  Table A; Target 61261; HLA-B*35:03; PAX7; ENSG00000009709; TAA
QPLPPSTM

SEQ ID NO: 61262 - protein, 11 aa, Homo sapiens
  Table A; Target 61262; HLA-B*56:01; PAX7; ENSG00000009709; TAA
QPLPPSTMHQG

SEQ ID NO: 61263 - protein, 9 aa, Homo sapiens
  Table A; Target 61263; HLA-B*27:05; PAX7; ENSG00000009709; TAA
QRTKLTEAR

SEQ ID NO: 61264 - protein, 9 aa, Homo sapiens
  Table A; Target 61264; HLA-A*01:01; PAX7; ENSG00000009709; TAA
QTAVDYLAK

SEQ ID NO: 61265 - protein, 9 aa, Homo sapiens
  Table A; Target 61265; HLA-A*03:01; PAX7; ENSG00000009709; TAA
QTAVDYLAK

SEQ ID NO: 61266 - protein, 9 aa, Homo sapiens
  Table A; Target 61266; HLA-A*03:02; PAX7; ENSG00000009709; TAA
QTAVDYLAK

SEQ ID NO: 61267 - protein, 9 aa, Homo sapiens
  Table A; Target 61267; HLA-A*11:01; PAX7; ENSG00000009709; TAA
QTAVDYLAK

SEQ ID NO: 61268 - protein, 9 aa, Homo sapiens
  Table A; Target 61268; HLA-A*68:01; PAX7; ENSG00000009709; TAA
QTAVDYLAK

SEQ ID NO: 61269 - protein, 9 aa, Homo sapiens
  Table A; Target 61269; HLA-C*07:06; PAX7; ENSG00000009709; TAA
QTAVDYLAK

SEQ ID NO: 61270 - protein, 9 aa, Homo sapiens
  Table A; Target 61270; HLA-A*03:01; PAX7; ENSG00000009709; TAA
QVATPDVEK

SEQ ID NO: 61271 - protein, 9 aa, Homo sapiens
  Table A; Target 61271; HLA-A*03:02; PAX7; ENSG00000009709; TAA
QVATPDVEK

SEQ ID NO: 61272 - protein, 9 aa, Homo sapiens
  Table A; Target 61272; HLA-A*11:01; PAX7; ENSG00000009709; TAA
QVATPDVEK

SEQ ID NO: 61273 - protein, 9 aa, Homo sapiens
  Table A; Target 61273; HLA-A*68:01; PAX7; ENSG00000009709; TAA
QVATPDVEK

SEQ ID NO: 61274 - protein, 9 aa, Homo sapiens
  Table A; Target 61274; HLA-C*07:06; PAX7; ENSG00000009709; TAA
QVATPDVEK

SEQ ID NO: 61275 - protein, 10 aa, Homo sapiens
  Table A; Target 61275; HLA-A*03:02; PAX7; ENSG00000009709; TAA
QVATPDVEKK

SEQ ID NO: 61276 - protein, 10 aa, Homo sapiens
  Table A; Target 61276; HLA-A*11:01; PAX7; ENSG00000009709; TAA
QVATPDVEKK

SEQ ID NO: 61277 - protein, 10 aa, Homo sapiens
  Table A; Target 61277; HLA-A*68:01; PAX7; ENSG00000009709; TAA
QVATPDVEKK

SEQ ID NO: 61278 - protein, 11 aa, Homo sapiens
  Table A; Target 61278; HLA-B*54:01; PAX7; ENSG00000009709; TAA
QVMSILGNPSA

SEQ ID NO: 61279 - protein, 11 aa, Homo sapiens
  Table A; Target 61279; HLA-B*56:01; PAX7; ENSG00000009709; TAA
QVMSILGNPSA

SEQ ID NO: 61280 - protein, 9 aa, Homo sapiens
  Table A; Target 61280; HLA-A*29:02; PAX7; ENSG00000009709; TAA
QYGQTAVDY

SEQ ID NO: 61281 - protein, 9 aa, Homo sapiens
  Table A; Target 61281; HLA-A*30:02; PAX7; ENSG00000009709; TAA
QYGQTAVDY

SEQ ID NO: 61282 - protein, 9 aa, Homo sapiens
  Table A; Target 61282; HLA-C*04:01; PAX7; ENSG00000009709; TAA
QYGQTAVDY

SEQ ID NO: 61283 - protein, 9 aa, Homo sapiens
  Table A; Target 61283; HLA-C*14:02; PAX7; ENSG00000009709; TAA
QYGQTAVDY

SEQ ID NO: 61284 - protein, 10 aa, Homo sapiens
  Table A; Target 61284; HLA-C*07:02; PAX7; ENSG00000009709; TAA
QYGQTAVDYL

SEQ ID NO: 61285 - protein, 9 aa, Homo sapiens
  Table A; Target 61285; HLA-C*14:02; PAX7; ENSG00000009709; TAA
QYGQYGQTA

SEQ ID NO: 61286 - protein, 10 aa, Homo sapiens
  Table A; Target 61286; HLA-B*40:01; PAX7; ENSG00000009709; TAA
REELAQRTKL

SEQ ID NO: 61287 - protein, 11 aa, Homo sapiens
  Table A; Target 61287; HLA-B*38:01; PAX7; ENSG00000009709; TAA
RHSFSSYSDSF

SEQ ID NO: 61288 - protein, 8 aa, Homo sapiens
  Table A; Target 61288; HLA-C*05:01; PAX7; ENSG00000009709; TAA
RLDEGSDV

SEQ ID NO: 61289 - protein, 11 aa, Homo sapiens
  Table A; Target 61289; HLA-A*30:02; PAX7; ENSG00000009709; TAA
RMMRPAPGQNY

SEQ ID NO: 61290 - protein, 11 aa, Homo sapiens
  Table A; Target 61290; HLA-B*15:01; PAX7; ENSG00000009709; TAA
RMMRPAPGQNY

SEQ ID NO: 61291 - protein, 8 aa, Homo sapiens
  Table A; Target 61291; HLA-A*30:02; PAX7; ENSG00000009709; TAA
RPAPGQNY

SEQ ID NO: 61292 - protein, 8 aa, Homo sapiens
  Table A; Target 61292; HLA-B*07:02; PAX7; ENSG00000009709; TAA
RPAPGQNY

SEQ ID NO: 61293 - protein, 9 aa, Homo sapiens
  Table A; Target 61293; HLA-B*55:01; PAX7; ENSG00000009709; TAA
RPAPGQNYP

SEQ ID NO: 61294 - protein, 9 aa, Homo sapiens
  Table A; Target 61294; HLA-B*56:01; PAX7; ENSG00000009709; TAA
RPAPGQNYP

SEQ ID NO: 61295 - protein, 10 aa, Homo sapiens
  Table A; Target 61295; HLA-A*31:01; PAX7; ENSG00000009709; TAA
RPAPGQNYPR

SEQ ID NO: 61296 - protein, 10 aa, Homo sapiens
  Table A; Target 61296; HLA-A*68:01; PAX7; ENSG00000009709; TAA
RPAPGQNYPR

SEQ ID NO: 61297 - protein, 10 aa, Homo sapiens
  Table A; Target 61297; HLA-B*07:02; PAX7; ENSG00000009709; TAA
RPAPGQNYPR

SEQ ID NO: 61298 - protein, 10 aa, Homo sapiens
  Table A; Target 61298; HLA-B*56:01; PAX7; ENSG00000009709; TAA
RPAPGQNYPR

SEQ ID NO: 61299 - protein, 10 aa, Homo sapiens
  Table A; Target 61299; HLA-C*07:06; PAX7; ENSG00000009709; TAA
RPAPGQNYPR

SEQ ID NO: 61300 - protein, 9 aa, Homo sapiens
  Table A; Target 61300; HLA-B*55:01; PAX7; ENSG00000009709; TAA
RPQPLPPST

SEQ ID NO: 61301 - protein, 10 aa, Homo sapiens
  Table A; Target 61301; HLA-B*07:02; PAX7; ENSG00000009709; TAA
RPQPLPPSTM

SEQ ID NO: 61302 - protein, 10 aa, Homo sapiens
  Table A; Target 61302; HLA-B*35:01; PAX7; ENSG00000009709; TAA
RPQPLPPSTM

SEQ ID NO: 61303 - protein, 10 aa, Homo sapiens
  Table A; Target 61303; HLA-B*35:03; PAX7; ENSG00000009709; TAA
RPQPLPPSTM

SEQ ID NO: 61304 - protein, 10 aa, Homo sapiens
  Table A; Target 61304; HLA-B*55:01; PAX7; ENSG00000009709; TAA
RPQPLPPSTM

SEQ ID NO: 61305 - protein, 10 aa, Homo sapiens
  Table A; Target 61305; HLA-B*56:01; PAX7; ENSG00000009709; TAA
RPQPLPPSTM

SEQ ID NO: 61306 - protein, 10 aa, Homo sapiens
  Table A; Target 61306; HLA-C*07:02; PAX7; ENSG00000009709; TAA
RPQPLPPSTM

SEQ ID NO: 61307 - protein, 8 aa, Homo sapiens
  Table A; Target 61307; HLA-B*13:02; PAX7; ENSG00000009709; TAA
RQVATPDV

SEQ ID NO: 61308 - protein, 10 aa, Homo sapiens
  Table A; Target 61308; HLA-A*03:02; PAX7; ENSG00000009709; TAA
RQVATPDVEK

SEQ ID NO: 61309 - protein, 10 aa, Homo sapiens
  Table A; Target 61309; HLA-A*11:01; PAX7; ENSG00000009709; TAA
RQVATPDVEK

SEQ ID NO: 61310 - protein, 9 aa, Homo sapiens
  Table A; Target 61310; HLA-A*33:01; PAX7; ENSG00000009709; TAA
RVQVWFSNR

SEQ ID NO: 61311 - protein, 9 aa, Homo sapiens
  Table A; Target 61311; HLA-B*35:03; PAX7; ENSG00000009709; TAA
SATSISASC

SEQ ID NO: 61312 - protein, 9 aa, Homo sapiens
  Table A; Target 61312; HLA-B*54:01; PAX7; ENSG00000009709; TAA
SATSISASC

SEQ ID NO: 61313 - protein, 9 aa, Homo sapiens
  Table A; Target 61313; HLA-B*56:01; PAX7; ENSG00000009709; TAA
SATSISASC

SEQ ID NO: 61314 - protein, 9 aa, Homo sapiens
  Table A; Target 61314; HLA-C*02:02; PAX7; ENSG00000009709; TAA
SATSISASC

SEQ ID NO: 61315 - protein, 9 aa, Homo sapiens
  Table A; Target 61315; HLA-C*03:03; PAX7; ENSG00000009709; TAA
SATSISASC

SEQ ID NO: 61316 - protein, 9 aa, Homo sapiens
  Table A; Target 61316; HLA-C*03:04; PAX7; ENSG00000009709; TAA
SATSISASC

SEQ ID NO: 61317 - protein, 9 aa, Homo sapiens
  Table A; Target 61317; HLA-C*12:03; PAX7; ENSG00000009709; TAA
SATSISASC

SEQ ID NO: 61318 - protein, 9 aa, Homo sapiens
  Table A; Target 61318; HLA-C*16:01; PAX7; ENSG00000009709; TAA
SATSISASC

SEQ ID NO: 61319 - protein, 9 aa, Homo sapiens
  Table A; Target 61319; HLA-C*16:02; PAX7; ENSG00000009709; TAA
SATSISASC

SEQ ID NO: 61320 - protein, 9 aa, Homo sapiens
  Table A; Target 61320; HLA-C*16:04; PAX7; ENSG00000009709; TAA
SATSISASC

SEQ ID NO: 61321 - protein, 9 aa, Homo sapiens
  Table A; Target 61321; HLA-B*54:01; PAX7; ENSG00000009709; TAA
SAVLGLLPV

SEQ ID NO: 61322 - protein, 9 aa, Homo sapiens
  Table A; Target 61322; HLA-B*56:01; PAX7; ENSG00000009709; TAA
SAVLGLLPV

SEQ ID NO: 61323 - protein, 9 aa, Homo sapiens
  Table A; Target 61323; HLA-B*46:01; PAX7; ENSG00000009709; TAA
SAVPPQPQA

SEQ ID NO: 61324 - protein, 9 aa, Homo sapiens
  Table A; Target 61324; HLA-B*54:01; PAX7; ENSG00000009709; TAA
SAVPPQPQA

SEQ ID NO: 61325 - protein, 9 aa, Homo sapiens
  Table A; Target 61325; HLA-B*56:01; PAX7; ENSG00000009709; TAA
SAVPPQPQA

SEQ ID NO: 61326 - protein, 9 aa, Homo sapiens
  Table A; Target 61326; HLA-B*58:01; PAX7; ENSG00000009709; TAA
SAVPPQPQA

SEQ ID NO: 61327 - protein, 9 aa, Homo sapiens
  Table A; Target 61327; HLA-C*03:03; PAX7; ENSG00000009709; TAA
SAVPPQPQA

SEQ ID NO: 61328 - protein, 9 aa, Homo sapiens
  Table A; Target 61328; HLA-C*03:04; PAX7; ENSG00000009709; TAA
SAVPPQPQA

SEQ ID NO: 61329 - protein, 9 aa, Homo sapiens
  Table A; Target 61329; HLA-C*16:01; PAX7; ENSG00000009709; TAA
SAVPPQPQA

SEQ ID NO: 61330 - protein, 11 aa, Homo sapiens
  Table A; Target 61330; HLA-B*39:01; PAX7; ENSG00000009709; TAA
SAVPPQPQADF

SEQ ID NO: 61331 - protein, 9 aa, Homo sapiens
  Table A; Target 61331; HLA-A*11:01; PAX7; ENSG00000009709; TAA
SAYGARHSF

SEQ ID NO: 61332 - protein, 9 aa, Homo sapiens
  Table A; Target 61332; HLA-A*23:01; PAX7; ENSG00000009709; TAA
SAYGARHSF

SEQ ID NO: 61333 - protein, 9 aa, Homo sapiens
  Table A; Target 61333; HLA-A*24:02; PAX7; ENSG00000009709; TAA
SAYGARHSF

SEQ ID NO: 61334 - protein, 9 aa, Homo sapiens
  Table A; Target 61334; HLA-A*25:01; PAX7; ENSG00000009709; TAA
SAYGARHSF

SEQ ID NO: 61335 - protein, 9 aa, Homo sapiens
  Table A; Target 61335; HLA-A*26:01; PAX7; ENSG00000009709; TAA
SAYGARHSF

SEQ ID NO: 61336 - protein, 9 aa, Homo sapiens
  Table A; Target 61336; HLA-A*29:02; PAX7; ENSG00000009709; TAA
SAYGARHSF

SEQ ID NO: 61337 - protein, 9 aa, Homo sapiens
  Table A; Target 61337; HLA-A*30:02; PAX7; ENSG00000009709; TAA
SAYGARHSF

SEQ ID NO: 61338 - protein, 9 aa, Homo sapiens
  Table A; Target 61338; HLA-A*31:01; PAX7; ENSG00000009709; TAA
SAYGARHSF

SEQ ID NO: 61339 - protein, 9 aa, Homo sapiens
  Table A; Target 61339; HLA-A*32:01; PAX7; ENSG00000009709; TAA
SAYGARHSF

SEQ ID NO: 61340 - protein, 9 aa, Homo sapiens
  Table A; Target 61340; HLA-A*33:01; PAX7; ENSG00000009709; TAA
SAYGARHSF

SEQ ID NO: 61341 - protein, 9 aa, Homo sapiens
  Table A; Target 61341; HLA-A*33:03; PAX7; ENSG00000009709; TAA
SAYGARHSF

SEQ ID NO: 61342 - protein, 9 aa, Homo sapiens
  Table A; Target 61342; HLA-B*07:02; PAX7; ENSG00000009709; TAA
SAYGARHSF

SEQ ID NO: 61343 - protein, 9 aa, Homo sapiens
  Table A; Target 61343; HLA-B*08:01; PAX7; ENSG00000009709; TAA
SAYGARHSF

SEQ ID NO: 61344 - protein, 9 aa, Homo sapiens
  Table A; Target 61344; HLA-B*15:01; PAX7; ENSG00000009709; TAA
SAYGARHSF

SEQ ID NO: 61345 - protein, 9 aa, Homo sapiens
  Table A; Target 61345; HLA-B*15:03; PAX7; ENSG00000009709; TAA
SAYGARHSF

SEQ ID NO: 61346 - protein, 9 aa, Homo sapiens
  Table A; Target 61346; HLA-B*35:01; PAX7; ENSG00000009709; TAA
SAYGARHSF

SEQ ID NO: 61347 - protein, 9 aa, Homo sapiens
  Table A; Target 61347; HLA-B*35:03; PAX7; ENSG00000009709; TAA
SAYGARHSF

SEQ ID NO: 61348 - protein, 9 aa, Homo sapiens
  Table A; Target 61348; HLA-B*37:01; PAX7; ENSG00000009709; TAA
SAYGARHSF

SEQ ID NO: 61349 - protein, 9 aa, Homo sapiens
  Table A; Target 61349; HLA-B*38:01; PAX7; ENSG00000009709; TAA
SAYGARHSF

SEQ ID NO: 61350 - protein, 9 aa, Homo sapiens
  Table A; Target 61350; HLA-B*44:02; PAX7; ENSG00000009709; TAA
SAYGARHSF

SEQ ID NO: 61351 - protein, 9 aa, Homo sapiens
  Table A; Target 61351; HLA-B*44:03; PAX7; ENSG00000009709; TAA
SAYGARHSF

SEQ ID NO: 61352 - protein, 9 aa, Homo sapiens
  Table A; Target 61352; HLA-B*46:01; PAX7; ENSG00000009709; TAA
SAYGARHSF

SEQ ID NO: 61353 - protein, 9 aa, Homo sapiens
  Table A; Target 61353; HLA-B*51:01; PAX7; ENSG00000009709; TAA
SAYGARHSF

SEQ ID NO: 61354 - protein, 9 aa, Homo sapiens
  Table A; Target 61354; HLA-B*54:01; PAX7; ENSG00000009709; TAA
SAYGARHSF

SEQ ID NO: 61355 - protein, 9 aa, Homo sapiens
  Table A; Target 61355; HLA-B*55:01; PAX7; ENSG00000009709; TAA
SAYGARHSF

SEQ ID NO: 61356 - protein, 9 aa, Homo sapiens
  Table A; Target 61356; HLA-B*57:01; PAX7; ENSG00000009709; TAA
SAYGARHSF

SEQ ID NO: 61357 - protein, 9 aa, Homo sapiens
  Table A; Target 61357; HLA-B*58:01; PAX7; ENSG00000009709; TAA
SAYGARHSF

SEQ ID NO: 61358 - protein, 9 aa, Homo sapiens
  Table A; Target 61358; HLA-C*01:02; PAX7; ENSG00000009709; TAA
SAYGARHSF

SEQ ID NO: 61359 - protein, 9 aa, Homo sapiens
  Table A; Target 61359; HLA-C*02:02; PAX7; ENSG00000009709; TAA
SAYGARHSF

SEQ ID NO: 61360 - protein, 9 aa, Homo sapiens
  Table A; Target 61360; HLA-C*03:03; PAX7; ENSG00000009709; TAA
SAYGARHSF

SEQ ID NO: 61361 - protein, 9 aa, Homo sapiens
  Table A; Target 61361; HLA-C*03:04; PAX7; ENSG00000009709; TAA
SAYGARHSF

SEQ ID NO: 61362 - protein, 9 aa, Homo sapiens
  Table A; Target 61362; HLA-C*07:02; PAX7; ENSG00000009709; TAA
SAYGARHSF

SEQ ID NO: 61363 - protein, 9 aa, Homo sapiens
  Table A; Target 61363; HLA-C*07:04; PAX7; ENSG00000009709; TAA
SAYGARHSF

SEQ ID NO: 61364 - protein, 9 aa, Homo sapiens
  Table A; Target 61364; HLA-C*07:06; PAX7; ENSG00000009709; TAA
SAYGARHSF

SEQ ID NO: 61365 - protein, 9 aa, Homo sapiens
  Table A; Target 61365; HLA-C*12:03; PAX7; ENSG00000009709; TAA
SAYGARHSF

SEQ ID NO: 61366 - protein, 9 aa, Homo sapiens
  Table A; Target 61366; HLA-C*14:02; PAX7; ENSG00000009709; TAA
SAYGARHSF

SEQ ID NO: 61367 - protein, 9 aa, Homo sapiens
  Table A; Target 61367; HLA-C*16:01; PAX7; ENSG00000009709; TAA
SAYGARHSF

SEQ ID NO: 61368 - protein, 9 aa, Homo sapiens
  Table A; Target 61368; HLA-C*16:02; PAX7; ENSG00000009709; TAA
SAYGARHSF

SEQ ID NO: 61369 - protein, 9 aa, Homo sapiens
  Table A; Target 61369; HLA-C*16:04; PAX7; ENSG00000009709; TAA
SAYGARHSF

SEQ ID NO: 61370 - protein, 9 aa, Homo sapiens
  Table A; Target 61370; HLA-A*30:01; PAX7; ENSG00000009709; TAA
SDVESEPDL

SEQ ID NO: 61371 - protein, 9 aa, Homo sapiens
  Table A; Target 61371; HLA-B*40:01; PAX7; ENSG00000009709; TAA
SDVESEPDL

SEQ ID NO: 61372 - protein, 8 aa, Homo sapiens
  Table A; Target 61372; HLA-C*14:02; PAX7; ENSG00000009709; TAA
SFMNPAAP

SEQ ID NO: 61373 - protein, 9 aa, Homo sapiens
  Table A; Target 61373; HLA-A*23:01; PAX7; ENSG00000009709; TAA
SFSSYSDSF

SEQ ID NO: 61374 - protein, 9 aa, Homo sapiens
  Table A; Target 61374; HLA-A*24:02; PAX7; ENSG00000009709; TAA
SFSSYSDSF

SEQ ID NO: 61375 - protein, 9 aa, Homo sapiens
  Table A; Target 61375; HLA-A*29:02; PAX7; ENSG00000009709; TAA
SFSSYSDSF

SEQ ID NO: 61376 - protein, 9 aa, Homo sapiens
  Table A; Target 61376; HLA-A*32:01; PAX7; ENSG00000009709; TAA
SFSSYSDSF

SEQ ID NO: 61377 - protein, 9 aa, Homo sapiens
  Table A; Target 61377; HLA-C*01:02; PAX7; ENSG00000009709; TAA
SFSSYSDSF

SEQ ID NO: 61378 - protein, 9 aa, Homo sapiens
  Table A; Target 61378; HLA-C*04:01; PAX7; ENSG00000009709; TAA
SFSSYSDSF

SEQ ID NO: 61379 - protein, 9 aa, Homo sapiens
  Table A; Target 61379; HLA-C*14:02; PAX7; ENSG00000009709; TAA
SFSSYSDSF

SEQ ID NO: 61380 - protein, 9 aa, Homo sapiens
  Table A; Target 61380; HLA-A*31:01; PAX7; ENSG00000009709; TAA
SGLVSSISR

SEQ ID NO: 61381 - protein, 9 aa, Homo sapiens
  Table A; Target 61381; HLA-C*07:06; PAX7; ENSG00000009709; TAA
SGLVSSISR

SEQ ID NO: 61382 - protein, 9 aa, Homo sapiens
  Table A; Target 61382; HLA-A*01:01; PAX7; ENSG00000009709; TAA
SIDGILGDK

SEQ ID NO: 61383 - protein, 9 aa, Homo sapiens
  Table A; Target 61383; HLA-A*03:01; PAX7; ENSG00000009709; TAA
SIDGILGDK

SEQ ID NO: 61384 - protein, 9 aa, Homo sapiens
  Table A; Target 61384; HLA-A*03:02; PAX7; ENSG00000009709; TAA
SIDGILGDK

SEQ ID NO: 61385 - protein, 9 aa, Homo sapiens
  Table A; Target 61385; HLA-A*11:01; PAX7; ENSG00000009709; TAA
SIDGILGDK

SEQ ID NO: 61386 - protein, 8 aa, Homo sapiens
  Table A; Target 61386; HLA-B*08:01; PAX7; ENSG00000009709; TAA
SIKPGDSL

SEQ ID NO: 61387 - protein, 8 aa, Homo sapiens
  Table A; Target 61387; HLA-C*01:02; PAX7; ENSG00000009709; TAA
SIKPGDSL

SEQ ID NO: 61388 - protein, 11 aa, Homo sapiens
  Table A; Target 61388; HLA-A*31:01; PAX7; ENSG00000009709; TAA
SIKPGDSLPTS

SEQ ID NO: 61389 - protein, 9 aa, Homo sapiens
  Table A; Target 61389; HLA-A*02:01; PAX7; ENSG00000009709; TAA
SILGNPSAV

SEQ ID NO: 61390 - protein, 9 aa, Homo sapiens
  Table A; Target 61390; HLA-A*02:03; PAX7; ENSG00000009709; TAA
SILGNPSAV

SEQ ID NO: 61391 - protein, 9 aa, Homo sapiens
  Table A; Target 61391; HLA-A*02:04; PAX7; ENSG00000009709; TAA
SILGNPSAV

SEQ ID NO: 61392 - protein, 9 aa, Homo sapiens
  Table A; Target 61392; HLA-A*02:07; PAX7; ENSG00000009709; TAA
SILGNPSAV

SEQ ID NO: 61393 - protein, 9 aa, Homo sapiens
  Table A; Target 61393; HLA-A*32:01; PAX7; ENSG00000009709; TAA
SILGNPSAV

SEQ ID NO: 61394 - protein, 9 aa, Homo sapiens
  Table A; Target 61394; HLA-B*13:02; PAX7; ENSG00000009709; TAA
SILGNPSAV

SEQ ID NO: 61395 - protein, 9 aa, Homo sapiens
  Table A; Target 61395; HLA-B*46:01; PAX7; ENSG00000009709; TAA
SILGNPSAV

SEQ ID NO: 61396 - protein, 9 aa, Homo sapiens
  Table A; Target 61396; HLA-B*55:01; PAX7; ENSG00000009709; TAA
SILGNPSAV

SEQ ID NO: 61397 - protein, 9 aa, Homo sapiens
  Table A; Target 61397; HLA-C*01:02; PAX7; ENSG00000009709; TAA
SILGNPSAV

SEQ ID NO: 61398 - protein, 9 aa, Homo sapiens
  Table A; Target 61398; HLA-C*12:03; PAX7; ENSG00000009709; TAA
SILGNPSAV

SEQ ID NO: 61399 - protein, 9 aa, Homo sapiens
  Table A; Target 61399; HLA-C*14:02; PAX7; ENSG00000009709; TAA
SILGNPSAV

SEQ ID NO: 61400 - protein, 9 aa, Homo sapiens
  Table A; Target 61400; HLA-C*16:02; PAX7; ENSG00000009709; TAA
SILGNPSAV

SEQ ID NO: 61401 - protein, 9 aa, Homo sapiens
  Table A; Target 61401; HLA-C*16:04; PAX7; ENSG00000009709; TAA
SILGNPSAV

SEQ ID NO: 61402 - protein, 9 aa, Homo sapiens
  Table A; Target 61402; HLA-A*68:01; PAX7; ENSG00000009709; TAA
SISASCSQR

SEQ ID NO: 61403 - protein, 9 aa, Homo sapiens
  Table A; Target 61403; HLA-B*27:05; PAX7; ENSG00000009709; TAA
SISPLHGGL

SEQ ID NO: 61404 - protein, 9 aa, Homo sapiens
  Table A; Target 61404; HLA-B*37:01; PAX7; ENSG00000009709; TAA
SISPLHGGL

SEQ ID NO: 61405 - protein, 9 aa, Homo sapiens
  Table A; Target 61405; HLA-A*03:01; PAX7; ENSG00000009709; TAA
SISRVLRIK

SEQ ID NO: 61406 - protein, 8 aa, Homo sapiens
  Table A; Target 61406; HLA-A*32:01; PAX7; ENSG00000009709; TAA
SLPTSQAY

SEQ ID NO: 61407 - protein, 8 aa, Homo sapiens
  Table A; Target 61407; HLA-B*15:01; PAX7; ENSG00000009709; TAA
SLPTSQAY

SEQ ID NO: 61408 - protein, 8 aa, Homo sapiens
  Table A; Target 61408; HLA-B*15:03; PAX7; ENSG00000009709; TAA
SLPTSQAY

SEQ ID NO: 61409 - protein, 8 aa, Homo sapiens
  Table A; Target 61409; HLA-B*46:01; PAX7; ENSG00000009709; TAA
SLPTSQAY

SEQ ID NO: 61410 - protein, 8 aa, Homo sapiens
  Table A; Target 61410; HLA-C*01:02; PAX7; ENSG00000009709; TAA
SLPTSQAY

SEQ ID NO: 61411 - protein, 8 aa, Homo sapiens
  Table A; Target 61411; HLA-C*14:02; PAX7; ENSG00000009709; TAA
SLPTSQAY

SEQ ID NO: 61412 - protein, 8 aa, Homo sapiens
  Table A; Target 61412; HLA-C*16:01; PAX7; ENSG00000009709; TAA
SLSTQRRM

SEQ ID NO: 61413 - protein, 10 aa, Homo sapiens
  Table A; Target 61413; HLA-B*54:01; PAX7; ENSG00000009709; TAA
SPLHGGLDSA

SEQ ID NO: 61414 - protein, 10 aa, Homo sapiens
  Table A; Target 61414; HLA-B*55:01; PAX7; ENSG00000009709; TAA
SPLHGGLDSA

SEQ ID NO: 61415 - protein, 10 aa, Homo sapiens
  Table A; Target 61415; HLA-B*56:01; PAX7; ENSG00000009709; TAA
SPLHGGLDSA

SEQ ID NO: 61416 - protein, 8 aa, Homo sapiens
  Table A; Target 61416; HLA-B*07:02; PAX7; ENSG00000009709; TAA
SPQVMSIL

SEQ ID NO: 61417 - protein, 8 aa, Homo sapiens
  Table A; Target 61417; HLA-C*07:02; PAX7; ENSG00000009709; TAA
SPQVMSIL

SEQ ID NO: 61418 - protein, 9 aa, Homo sapiens
  Table A; Target 61418; HLA-A*26:01; PAX7; ENSG00000009709; TAA
SQAYCPPTY

SEQ ID NO: 61419 - protein, 9 aa, Homo sapiens
  Table A; Target 61419; HLA-A*30:02; PAX7; ENSG00000009709; TAA
SQAYCPPTY

SEQ ID NO: 61420 - protein, 9 aa, Homo sapiens
  Table A; Target 61420; HLA-A*32:01; PAX7; ENSG00000009709; TAA
SQAYCPPTY

SEQ ID NO: 61421 - protein, 9 aa, Homo sapiens
  Table A; Target 61421; HLA-B*13:02; PAX7; ENSG00000009709; TAA
SQAYCPPTY

SEQ ID NO: 61422 - protein, 9 aa, Homo sapiens
  Table A; Target 61422; HLA-B*15:01; PAX7; ENSG00000009709; TAA
SQAYCPPTY

SEQ ID NO: 61423 - protein, 9 aa, Homo sapiens
  Table A; Target 61423; HLA-B*15:03; PAX7; ENSG00000009709; TAA
SQAYCPPTY

SEQ ID NO: 61424 - protein, 9 aa, Homo sapiens
  Table A; Target 61424; HLA-B*39:01; PAX7; ENSG00000009709; TAA
SQAYCPPTY

SEQ ID NO: 61425 - protein, 9 aa, Homo sapiens
  Table A; Target 61425; HLA-C*02:02; PAX7; ENSG00000009709; TAA
SQAYCPPTY

SEQ ID NO: 61426 - protein, 9 aa, Homo sapiens
  Table A; Target 61426; HLA-C*07:04; PAX7; ENSG00000009709; TAA
SQAYCPPTY

SEQ ID NO: 61427 - protein, 9 aa, Homo sapiens
  Table A; Target 61427; HLA-C*16:01; PAX7; ENSG00000009709; TAA
SQAYCPPTY

SEQ ID NO: 61428 - protein, 8 aa, Homo sapiens
  Table A; Target 61428; HLA-B*39:01; PAX7; ENSG00000009709; TAA
SQDGGSTV

SEQ ID NO: 61429 - protein, 8 aa, Homo sapiens
  Table A; Target 61429; HLA-C*05:01; PAX7; ENSG00000009709; TAA
SQDGGSTV

SEQ ID NO: 61430 - protein, 9 aa, Homo sapiens
  Table A; Target 61430; HLA-B*15:01; PAX7; ENSG00000009709; TAA
SQDGGSTVH

SEQ ID NO: 61431 - protein, 9 aa, Homo sapiens
  Table A; Target 61431; HLA-B*38:01; PAX7; ENSG00000009709; TAA
SQDGGSTVH

SEQ ID NO: 61432 - protein, 9 aa, Homo sapiens
  Table A; Target 61432; HLA-B*39:01; PAX7; ENSG00000009709; TAA
SQDGGSTVH

SEQ ID NO: 61433 - protein, 9 aa, Homo sapiens
  Table A; Target 61433; HLA-C*05:01; PAX7; ENSG00000009709; TAA
SQDGGSTVH

SEQ ID NO: 61434 - protein, 9 aa, Homo sapiens
  Table A; Target 61434; HLA-C*07:04; PAX7; ENSG00000009709; TAA
SQDGGSTVH

SEQ ID NO: 61435 - protein, 10 aa, Homo sapiens
  Table A; Target 61435; HLA-A*68:01; PAX7; ENSG00000009709; TAA
SQDGGSTVHR

SEQ ID NO: 61436 - protein, 10 aa, Homo sapiens
  Table A; Target 61436; HLA-C*07:06; PAX7; ENSG00000009709; TAA
SQDGGSTVHR

SEQ ID NO: 61437 - protein, 10 aa, Homo sapiens
  Table A; Target 61437; HLA-A*30:02; PAX7; ENSG00000009709; TAA
SSAYGARHSF

SEQ ID NO: 61438 - protein, 10 aa, Homo sapiens
  Table A; Target 61438; HLA-A*32:01; PAX7; ENSG00000009709; TAA
SSAYGARHSF

SEQ ID NO: 61439 - protein, 10 aa, Homo sapiens
  Table A; Target 61439; HLA-B*57:01; PAX7; ENSG00000009709; TAA
SSAYGARHSF

SEQ ID NO: 61440 - protein, 10 aa, Homo sapiens
  Table A; Target 61440; HLA-B*58:01; PAX7; ENSG00000009709; TAA
SSAYGARHSF

SEQ ID NO: 61441 - protein, 10 aa, Homo sapiens
  Table A; Target 61441; HLA-C*16:01; PAX7; ENSG00000009709; TAA
SSAYGARHSF

SEQ ID NO: 61442 - protein, 9 aa, Homo sapiens
  Table A; Target 61442; HLA-A*02:03; PAX7; ENSG00000009709; TAA
SSISRVLRI

SEQ ID NO: 61443 - protein, 9 aa, Homo sapiens
  Table A; Target 61443; HLA-C*03:03; PAX7; ENSG00000009709; TAA
STVPSGLVS

SEQ ID NO: 61444 - protein, 9 aa, Homo sapiens
  Table A; Target 61444; HLA-C*03:04; PAX7; ENSG00000009709; TAA
STVPSGLVS

SEQ ID NO: 61445 - protein, 11 aa, Homo sapiens
  Table A; Target 61445; HLA-A*25:01; PAX7; ENSG00000009709; TAA
STVPSGLVSSI

SEQ ID NO: 61446 - protein, 11 aa, Homo sapiens
  Table A; Target 61446; HLA-A*68:02; PAX7; ENSG00000009709; TAA
STVPSGLVSSI

SEQ ID NO: 61447 - protein, 8 aa, Homo sapiens
  Table A; Target 61447; HLA-A*23:01; PAX7; ENSG00000009709; TAA
STYPTTTI

SEQ ID NO: 61448 - protein, 8 aa, Homo sapiens
  Table A; Target 61448; HLA-A*30:01; PAX7; ENSG00000009709; TAA
STYPTTTI

SEQ ID NO: 61449 - protein, 8 aa, Homo sapiens
  Table A; Target 61449; HLA-B*13:02; PAX7; ENSG00000009709; TAA
STYPTTTI

SEQ ID NO: 61450 - protein, 8 aa, Homo sapiens
  Table A; Target 61450; HLA-B*49:01; PAX7; ENSG00000009709; TAA
STYPTTTI

SEQ ID NO: 61451 - protein, 8 aa, Homo sapiens
  Table A; Target 61451; HLA-B*51:01; PAX7; ENSG00000009709; TAA
STYPTTTI

SEQ ID NO: 61452 - protein, 10 aa, Homo sapiens
  Table A; Target 61452; HLA-A*03:01; PAX7; ENSG00000009709; TAA
STYPTTTISQ

SEQ ID NO: 61453 - protein, 10 aa, Homo sapiens
  Table A; Target 61453; HLA-A*11:01; PAX7; ENSG00000009709; TAA
STYPTTTISQ

SEQ ID NO: 61454 - protein, 8 aa, Homo sapiens
  Table A; Target 61454; HLA-A*01:01; PAX7; ENSG00000009709; TAA
SVDPVAGY

SEQ ID NO: 61455 - protein, 8 aa, Homo sapiens
  Table A; Target 61455; HLA-A*03:02; PAX7; ENSG00000009709; TAA
SVDPVAGY

SEQ ID NO: 61456 - protein, 8 aa, Homo sapiens
  Table A; Target 61456; HLA-A*26:01; PAX7; ENSG00000009709; TAA
SVDPVAGY

SEQ ID NO: 61457 - protein, 8 aa, Homo sapiens
  Table A; Target 61457; HLA-A*29:02; PAX7; ENSG00000009709; TAA
SVDPVAGY

SEQ ID NO: 61458 - protein, 8 aa, Homo sapiens
  Table A; Target 61458; HLA-A*30:02; PAX7; ENSG00000009709; TAA
SVDPVAGY

SEQ ID NO: 61459 - protein, 8 aa, Homo sapiens
  Table A; Target 61459; HLA-A*32:01; PAX7; ENSG00000009709; TAA
SVDPVAGY

SEQ ID NO: 61460 - protein, 8 aa, Homo sapiens
  Table A; Target 61460; HLA-B*15:01; PAX7; ENSG00000009709; TAA
SVDPVAGY

SEQ ID NO: 61461 - protein, 8 aa, Homo sapiens
  Table A; Target 61461; HLA-B*18:01; PAX7; ENSG00000009709; TAA
SVDPVAGY

SEQ ID NO: 61462 - protein, 8 aa, Homo sapiens
  Table A; Target 61462; HLA-B*35:01; PAX7; ENSG00000009709; TAA
SVDPVAGY

SEQ ID NO: 61463 - protein, 8 aa, Homo sapiens
  Table A; Target 61463; HLA-C*04:01; PAX7; ENSG00000009709; TAA
SVDPVAGY

SEQ ID NO: 61464 - protein, 8 aa, Homo sapiens
  Table A; Target 61464; HLA-C*05:01; PAX7; ENSG00000009709; TAA
SVDPVAGY

SEQ ID NO: 61465 - protein, 8 aa, Homo sapiens
  Table A; Target 61465; HLA-C*16:02; PAX7; ENSG00000009709; TAA
SVDPVAGY

SEQ ID NO: 61466 - protein, 10 aa, Homo sapiens
  Table A; Target 61466; HLA-A*01:01; PAX7; ENSG00000009709; TAA
SVDPVAGYQY

SEQ ID NO: 61467 - protein, 10 aa, Homo sapiens
  Table A; Target 61467; HLA-A*02:07; PAX7; ENSG00000009709; TAA
SVDPVAGYQY

SEQ ID NO: 61468 - protein, 10 aa, Homo sapiens
  Table A; Target 61468; HLA-A*03:01; PAX7; ENSG00000009709; TAA
SVDPVAGYQY

SEQ ID NO: 61469 - protein, 10 aa, Homo sapiens
  Table A; Target 61469; HLA-A*03:02; PAX7; ENSG00000009709; TAA
SVDPVAGYQY

SEQ ID NO: 61470 - protein, 10 aa, Homo sapiens
  Table A; Target 61470; HLA-A*11:01; PAX7; ENSG00000009709; TAA
SVDPVAGYQY

SEQ ID NO: 61471 - protein, 10 aa, Homo sapiens
  Table A; Target 61471; HLA-A*23:01; PAX7; ENSG00000009709; TAA
SVDPVAGYQY

SEQ ID NO: 61472 - protein, 10 aa, Homo sapiens
  Table A; Target 61472; HLA-A*25:01; PAX7; ENSG00000009709; TAA
SVDPVAGYQY

SEQ ID NO: 61473 - protein, 10 aa, Homo sapiens
  Table A; Target 61473; HLA-A*26:01; PAX7; ENSG00000009709; TAA
SVDPVAGYQY

SEQ ID NO: 61474 - protein, 10 aa, Homo sapiens
  Table A; Target 61474; HLA-A*29:02; PAX7; ENSG00000009709; TAA
SVDPVAGYQY

SEQ ID NO: 61475 - protein, 10 aa, Homo sapiens
  Table A; Target 61475; HLA-A*30:02; PAX7; ENSG00000009709; TAA
SVDPVAGYQY

SEQ ID NO: 61476 - protein, 10 aa, Homo sapiens
  Table A; Target 61476; HLA-A*31:01; PAX7; ENSG00000009709; TAA
SVDPVAGYQY

SEQ ID NO: 61477 - protein, 10 aa, Homo sapiens
  Table A; Target 61477; HLA-A*32:01; PAX7; ENSG00000009709; TAA
SVDPVAGYQY

SEQ ID NO: 61478 - protein, 10 aa, Homo sapiens
  Table A; Target 61478; HLA-A*33:01; PAX7; ENSG00000009709; TAA
SVDPVAGYQY

SEQ ID NO: 61479 - protein, 10 aa, Homo sapiens
  Table A; Target 61479; HLA-A*33:03; PAX7; ENSG00000009709; TAA
SVDPVAGYQY

SEQ ID NO: 61480 - protein, 10 aa, Homo sapiens
  Table A; Target 61480; HLA-A*68:01; PAX7; ENSG00000009709; TAA
SVDPVAGYQY

SEQ ID NO: 61481 - protein, 10 aa, Homo sapiens
  Table A; Target 61481; HLA-B*15:01; PAX7; ENSG00000009709; TAA
SVDPVAGYQY

SEQ ID NO: 61482 - protein, 10 aa, Homo sapiens
  Table A; Target 61482; HLA-B*15:03; PAX7; ENSG00000009709; TAA
SVDPVAGYQY

SEQ ID NO: 61483 - protein, 10 aa, Homo sapiens
  Table A; Target 61483; HLA-B*18:01; PAX7; ENSG00000009709; TAA
SVDPVAGYQY

SEQ ID NO: 61484 - protein, 10 aa, Homo sapiens
  Table A; Target 61484; HLA-B*27:02; PAX7; ENSG00000009709; TAA
SVDPVAGYQY

SEQ ID NO: 61485 - protein, 10 aa, Homo sapiens
  Table A; Target 61485; HLA-B*27:05; PAX7; ENSG00000009709; TAA
SVDPVAGYQY

SEQ ID NO: 61486 - protein, 10 aa, Homo sapiens
  Table A; Target 61486; HLA-B*35:01; PAX7; ENSG00000009709; TAA
SVDPVAGYQY

SEQ ID NO: 61487 - protein, 10 aa, Homo sapiens
  Table A; Target 61487; HLA-B*35:03; PAX7; ENSG00000009709; TAA
SVDPVAGYQY

SEQ ID NO: 61488 - protein, 10 aa, Homo sapiens
  Table A; Target 61488; HLA-B*38:01; PAX7; ENSG00000009709; TAA
SVDPVAGYQY

SEQ ID NO: 61489 - protein, 10 aa, Homo sapiens
  Table A; Target 61489; HLA-B*39:01; PAX7; ENSG00000009709; TAA
SVDPVAGYQY

SEQ ID NO: 61490 - protein, 10 aa, Homo sapiens
  Table A; Target 61490; HLA-B*44:03; PAX7; ENSG00000009709; TAA
SVDPVAGYQY

SEQ ID NO: 61491 - protein, 10 aa, Homo sapiens
  Table A; Target 61491; HLA-B*46:01; PAX7; ENSG00000009709; TAA
SVDPVAGYQY

SEQ ID NO: 61492 - protein, 10 aa, Homo sapiens
  Table A; Target 61492; HLA-B*55:01; PAX7; ENSG00000009709; TAA
SVDPVAGYQY

SEQ ID NO: 61493 - protein, 10 aa, Homo sapiens
  Table A; Target 61493; HLA-B*57:01; PAX7; ENSG00000009709; TAA
SVDPVAGYQY

SEQ ID NO: 61494 - protein, 10 aa, Homo sapiens
  Table A; Target 61494; HLA-B*58:01; PAX7; ENSG00000009709; TAA
SVDPVAGYQY

SEQ ID NO: 61495 - protein, 10 aa, Homo sapiens
  Table A; Target 61495; HLA-C*01:02; PAX7; ENSG00000009709; TAA
SVDPVAGYQY

SEQ ID NO: 61496 - protein, 10 aa, Homo sapiens
  Table A; Target 61496; HLA-C*02:02; PAX7; ENSG00000009709; TAA
SVDPVAGYQY

SEQ ID NO: 61497 - protein, 10 aa, Homo sapiens
  Table A; Target 61497; HLA-C*03:03; PAX7; ENSG00000009709; TAA
SVDPVAGYQY

SEQ ID NO: 61498 - protein, 10 aa, Homo sapiens
  Table A; Target 61498; HLA-C*03:04; PAX7; ENSG00000009709; TAA
SVDPVAGYQY

SEQ ID NO: 61499 - protein, 10 aa, Homo sapiens
  Table A; Target 61499; HLA-C*04:01; PAX7; ENSG00000009709; TAA
SVDPVAGYQY

SEQ ID NO: 61500 - protein, 10 aa, Homo sapiens
  Table A; Target 61500; HLA-C*05:01; PAX7; ENSG00000009709; TAA
SVDPVAGYQY

SEQ ID NO: 61501 - protein, 10 aa, Homo sapiens
  Table A; Target 61501; HLA-C*07:01; PAX7; ENSG00000009709; TAA
SVDPVAGYQY

SEQ ID NO: 61502 - protein, 10 aa, Homo sapiens
  Table A; Target 61502; HLA-C*07:04; PAX7; ENSG00000009709; TAA
SVDPVAGYQY

SEQ ID NO: 61503 - protein, 10 aa, Homo sapiens
  Table A; Target 61503; HLA-C*07:06; PAX7; ENSG00000009709; TAA
SVDPVAGYQY

SEQ ID NO: 61504 - protein, 10 aa, Homo sapiens
  Table A; Target 61504; HLA-C*12:03; PAX7; ENSG00000009709; TAA
SVDPVAGYQY

SEQ ID NO: 61505 - protein, 10 aa, Homo sapiens
  Table A; Target 61505; HLA-C*14:02; PAX7; ENSG00000009709; TAA
SVDPVAGYQY

SEQ ID NO: 61506 - protein, 10 aa, Homo sapiens
  Table A; Target 61506; HLA-C*16:01; PAX7; ENSG00000009709; TAA
SVDPVAGYQY

SEQ ID NO: 61507 - protein, 10 aa, Homo sapiens
  Table A; Target 61507; HLA-C*16:02; PAX7; ENSG00000009709; TAA
SVDPVAGYQY

SEQ ID NO: 61508 - protein, 10 aa, Homo sapiens
  Table A; Target 61508; HLA-C*16:04; PAX7; ENSG00000009709; TAA
SVDPVAGYQY

SEQ ID NO: 61509 - protein, 11 aa, Homo sapiens
  Table A; Target 61509; HLA-A*02:07; PAX7; ENSG00000009709; TAA
SVDPVAGYQYG

SEQ ID NO: 61510 - protein, 11 aa, Homo sapiens
  Table A; Target 61510; HLA-C*04:01; PAX7; ENSG00000009709; TAA
SVDPVAGYQYG

SEQ ID NO: 61511 - protein, 9 aa, Homo sapiens
  Table A; Target 61511; HLA-A*24:02; PAX7; ENSG00000009709; TAA
SYSDSFMNP

SEQ ID NO: 61512 - protein, 10 aa, Homo sapiens
  Table A; Target 61512; HLA-B*27:02; PAX7; ENSG00000009709; TAA
TAEQLEELEK

SEQ ID NO: 61513 - protein, 10 aa, Homo sapiens
  Table A; Target 61513; HLA-A*68:02; PAX7; ENSG00000009709; TAA
TAVDYLAKNV

SEQ ID NO: 61514 - protein, 10 aa, Homo sapiens
  Table A; Target 61514; HLA-B*51:01; PAX7; ENSG00000009709; TAA
TAVDYLAKNV

SEQ ID NO: 61515 - protein, 10 aa, Homo sapiens
  Table A; Target 61515; HLA-C*06:02; PAX7; ENSG00000009709; TAA
TAVDYLAKNV

SEQ ID NO: 61516 - protein, 10 aa, Homo sapiens
  Table A; Target 61516; HLA-C*12:03; PAX7; ENSG00000009709; TAA
TAVDYLAKNV

SEQ ID NO: 61517 - protein, 10 aa, Homo sapiens
  Table A; Target 61517; HLA-C*16:02; PAX7; ENSG00000009709; TAA
TAVDYLAKNV

SEQ ID NO: 61518 - protein, 11 aa, Homo sapiens
  Table A; Target 61518; HLA-A*31:01; PAX7; ENSG00000009709; TAA
TGFPLEVSTPL

SEQ ID NO: 61519 - protein, 9 aa, Homo sapiens
  Table A; Target 61519; HLA-A*30:02; PAX7; ENSG00000009709; TAA
TGMPTLPPY

SEQ ID NO: 61520 - protein, 9 aa, Homo sapiens
  Table A; Target 61520; HLA-B*35:01; PAX7; ENSG00000009709; TAA
TGMPTLPPY

SEQ ID NO: 61521 - protein, 9 aa, Homo sapiens
  Table A; Target 61521; HLA-B*46:01; PAX7; ENSG00000009709; TAA
TGMPTLPPY

SEQ ID NO: 61522 - protein, 9 aa, Homo sapiens
  Table A; Target 61522; HLA-B*35:03; PAX7; ENSG00000009709; TAA
TGYSVDPVA

SEQ ID NO: 61523 - protein, 9 aa, Homo sapiens
  Table A; Target 61523; HLA-B*54:01; PAX7; ENSG00000009709; TAA
TGYSVDPVA

SEQ ID NO: 61524 - protein, 10 aa, Homo sapiens
  Table A; Target 61524; HLA-A*68:02; PAX7; ENSG00000009709; TAA
TGYSVDPVAG

SEQ ID NO: 61525 - protein, 10 aa, Homo sapiens
  Table A; Target 61525; HLA-B*27:05; PAX7; ENSG00000009709; TAA
TGYSVDPVAG

SEQ ID NO: 61526 - protein, 11 aa, Homo sapiens
  Table A; Target 61526; HLA-A*26:01; PAX7; ENSG00000009709; TAA
TGYSVDPVAGY

SEQ ID NO: 61527 - protein, 11 aa, Homo sapiens
  Table A; Target 61527; HLA-A*30:02; PAX7; ENSG00000009709; TAA
TGYSVDPVAGY

SEQ ID NO: 61528 - protein, 11 aa, Homo sapiens
  Table A; Target 61528; HLA-B*35:01; PAX7; ENSG00000009709; TAA
TGYSVDPVAGY

SEQ ID NO: 61529 - protein, 11 aa, Homo sapiens
  Table A; Target 61529; HLA-C*16:04; PAX7; ENSG00000009709; TAA
TGYSVDPVAGY

SEQ ID NO: 61530 - protein, 9 aa, Homo sapiens
  Table A; Target 61530; HLA-B*57:01; PAX7; ENSG00000009709; TAA
THYPDIYTR

SEQ ID NO: 61531 - protein, 9 aa, Homo sapiens
  Table A; Target 61531; HLA-B*46:01; PAX7; ENSG00000009709; TAA
TMHQGGLAA

SEQ ID NO: 61532 - protein, 9 aa, Homo sapiens
  Table A; Target 61532; HLA-B*54:01; PAX7; ENSG00000009709; TAA
TMHQGGLAA

SEQ ID NO: 61533 - protein, 9 aa, Homo sapiens
  Table A; Target 61533; HLA-C*01:02; PAX7; ENSG00000009709; TAA
TMHQGGLAA

SEQ ID NO: 61534 - protein, 9 aa, Homo sapiens
  Table A; Target 61534; HLA-C*14:02; PAX7; ENSG00000009709; TAA
TMHQGGLAA

SEQ ID NO: 61535 - protein, 10 aa, Homo sapiens
  Table A; Target 61535; HLA-A*02:01; PAX7; ENSG00000009709; TAA
TMHQGGLAAA

SEQ ID NO: 61536 - protein, 10 aa, Homo sapiens
  Table A; Target 61536; HLA-A*02:03; PAX7; ENSG00000009709; TAA
TMHQGGLAAA

SEQ ID NO: 61537 - protein, 11 aa, Homo sapiens
  Table A; Target 61537; HLA-A*01:01; PAX7; ENSG00000009709; TAA
TPDVEKKIEEY

SEQ ID NO: 61538 - protein, 11 aa, Homo sapiens
  Table A; Target 61538; HLA-B*35:01; PAX7; ENSG00000009709; TAA
TPLGQGRVNQL

SEQ ID NO: 61539 - protein, 10 aa, Homo sapiens
  Table A; Target 61539; HLA-B*27:05; PAX7; ENSG00000009709; TAA
TREELAQRTK

SEQ ID NO: 61540 - protein, 10 aa, Homo sapiens
  Table A; Target 61540; HLA-A*33:01; PAX7; ENSG00000009709; TAA
TSISASCSQR

SEQ ID NO: 61541 - protein, 10 aa, Homo sapiens
  Table A; Target 61541; HLA-A*33:03; PAX7; ENSG00000009709; TAA
TSISASCSQR

SEQ ID NO: 61542 - protein, 10 aa, Homo sapiens
  Table A; Target 61542; HLA-A*68:01; PAX7; ENSG00000009709; TAA
TSISASCSQR

SEQ ID NO: 61543 - protein, 10 aa, Homo sapiens
  Table A; Target 61543; HLA-C*07:06; PAX7; ENSG00000009709; TAA
TSISASCSQR

SEQ ID NO: 61544 - protein, 10 aa, Homo sapiens
  Table A; Target 61544; HLA-A*30:02; PAX7; ENSG00000009709; TAA
TSQAYCPPTY

SEQ ID NO: 61545 - protein, 10 aa, Homo sapiens
  Table A; Target 61545; HLA-B*39:01; PAX7; ENSG00000009709; TAA
TSQAYCPPTY

SEQ ID NO: 61546 - protein, 11 aa, Homo sapiens
  Table A; Target 61546; HLA-A*32:01; PAX7; ENSG00000009709; TAA
TSSAYGARHSF

SEQ ID NO: 61547 - protein, 11 aa, Homo sapiens
  Table A; Target 61547; HLA-B*57:01; PAX7; ENSG00000009709; TAA
TSSAYGARHSF

SEQ ID NO: 61548 - protein, 11 aa, Homo sapiens
  Table A; Target 61548; HLA-C*16:01; PAX7; ENSG00000009709; TAA
TSSAYGARHSF

SEQ ID NO: 61549 - protein, 11 aa, Homo sapiens
  Table A; Target 61549; HLA-B*39:01; PAX7; ENSG00000009709; TAA
TTISQDGGSTV

SEQ ID NO: 61550 - protein, 9 aa, Homo sapiens
  Table A; Target 61550; HLA-C*01:02; PAX7; ENSG00000009709; TAA
TVPSGLVSS

SEQ ID NO: 61551 - protein, 10 aa, Homo sapiens
  Table A; Target 61551; HLA-A*02:03; PAX7; ENSG00000009709; TAA
TVPSGLVSSI

SEQ ID NO: 61552 - protein, 10 aa, Homo sapiens
  Table A; Target 61552; HLA-A*02:07; PAX7; ENSG00000009709; TAA
TVPSGLVSSI

SEQ ID NO: 61553 - protein, 10 aa, Homo sapiens
  Table A; Target 61553; HLA-A*25:01; PAX7; ENSG00000009709; TAA
TVPSGLVSSI

SEQ ID NO: 61554 - protein, 10 aa, Homo sapiens
  Table A; Target 61554; HLA-A*26:01; PAX7; ENSG00000009709; TAA
TVPSGLVSSI

SEQ ID NO: 61555 - protein, 10 aa, Homo sapiens
  Table A; Target 61555; HLA-A*68:02; PAX7; ENSG00000009709; TAA
TVPSGLVSSI

SEQ ID NO: 61556 - protein, 10 aa, Homo sapiens
  Table A; Target 61556; HLA-C*01:02; PAX7; ENSG00000009709; TAA
TVPSGLVSSI

SEQ ID NO: 61557 - protein, 9 aa, Homo sapiens
  Table A; Target 61557; HLA-C*01:02; PAX7; ENSG00000009709; TAA
TYPTTTISQ

SEQ ID NO: 61558 - protein, 9 aa, Homo sapiens
  Table A; Target 61558; HLA-C*14:02; PAX7; ENSG00000009709; TAA
TYPTTTISQ

SEQ ID NO: 61559 - protein, 9 aa, Homo sapiens
  Table A; Target 61559; HLA-A*23:01; PAX7; ENSG00000009709; TAA
TYSTTGYSV

SEQ ID NO: 61560 - protein, 9 aa, Homo sapiens
  Table A; Target 61560; HLA-A*24:02; PAX7; ENSG00000009709; TAA
TYSTTGYSV

SEQ ID NO: 61561 - protein, 9 aa, Homo sapiens
  Table A; Target 61561; HLA-C*14:02; PAX7; ENSG00000009709; TAA
TYSTTGYSV

SEQ ID NO: 61562 - protein, 9 aa, Homo sapiens
  Table A; Target 61562; HLA-A*01:01; PAX7; ENSG00000009709; TAA
VAGYQYGQY

SEQ ID NO: 61563 - protein, 9 aa, Homo sapiens
  Table A; Target 61563; HLA-A*30:02; PAX7; ENSG00000009709; TAA
VAGYQYGQY

SEQ ID NO: 61564 - protein, 9 aa, Homo sapiens
  Table A; Target 61564; HLA-C*02:02; PAX7; ENSG00000009709; TAA
VAGYQYGQY

SEQ ID NO: 61565 - protein, 10 aa, Homo sapiens
  Table A; Target 61565; HLA-C*16:02; PAX7; ENSG00000009709; TAA
VATPDVEKKI

SEQ ID NO: 61566 - protein, 8 aa, Homo sapiens
  Table A; Target 61566; HLA-C*04:01; PAX7; ENSG00000009709; TAA
VDPVAGYQ

SEQ ID NO: 61567 - protein, 9 aa, Homo sapiens
  Table A; Target 61567; HLA-A*29:02; PAX7; ENSG00000009709; TAA
VDPVAGYQY

SEQ ID NO: 61568 - protein, 9 aa, Homo sapiens
  Table A; Target 61568; HLA-B*15:03; PAX7; ENSG00000009709; TAA
VDPVAGYQY

SEQ ID NO: 61569 - protein, 9 aa, Homo sapiens
  Table A; Target 61569; HLA-B*37:01; PAX7; ENSG00000009709; TAA
VDPVAGYQY

SEQ ID NO: 61570 - protein, 9 aa, Homo sapiens
  Table A; Target 61570; HLA-C*01:02; PAX7; ENSG00000009709; TAA
VDPVAGYQY

SEQ ID NO: 61571 - protein, 9 aa, Homo sapiens
  Table A; Target 61571; HLA-C*04:01; PAX7; ENSG00000009709; TAA
VDPVAGYQY

SEQ ID NO: 61572 - protein, 9 aa, Homo sapiens
  Table A; Target 61572; HLA-C*07:04; PAX7; ENSG00000009709; TAA
VDPVAGYQY

SEQ ID NO: 61573 - protein, 9 aa, Homo sapiens
  Table A; Target 61573; HLA-C*14:02; PAX7; ENSG00000009709; TAA
VDPVAGYQY

SEQ ID NO: 61574 - protein, 8 aa, Homo sapiens
  Table A; Target 61574; HLA-A*30:01; PAX7; ENSG00000009709; TAA
VDYLAKNV

SEQ ID NO: 61575 - protein, 8 aa, Homo sapiens
  Table A; Target 61575; HLA-B*37:01; PAX7; ENSG00000009709; TAA
VDYLAKNV

SEQ ID NO: 61576 - protein, 8 aa, Homo sapiens
  Table A; Target 61576; HLA-B*40:02; PAX7; ENSG00000009709; TAA
VDYLAKNV

SEQ ID NO: 61577 - protein, 8 aa, Homo sapiens
  Table A; Target 61577; HLA-B*49:01; PAX7; ENSG00000009709; TAA
VDYLAKNV

SEQ ID NO: 61578 - protein, 8 aa, Homo sapiens
  Table A; Target 61578; HLA-B*51:01; PAX7; ENSG00000009709; TAA
VDYLAKNV

SEQ ID NO: 61579 - protein, 8 aa, Homo sapiens
  Table A; Target 61579; HLA-C*06:02; PAX7; ENSG00000009709; TAA
VDYLAKNV

SEQ ID NO: 61580 - protein, 8 aa, Homo sapiens
  Table A; Target 61580; HLA-C*16:02; PAX7; ENSG00000009709; TAA
VDYLAKNV

SEQ ID NO: 61581 - protein, 10 aa, Homo sapiens
  Table A; Target 61581; HLA-A*30:01; PAX7; ENSG00000009709; TAA
VDYLAKNVSL

SEQ ID NO: 61582 - protein, 10 aa, Homo sapiens
  Table A; Target 61582; HLA-B*08:01; PAX7; ENSG00000009709; TAA
VDYLAKNVSL

SEQ ID NO: 61583 - protein, 10 aa, Homo sapiens
  Table A; Target 61583; HLA-B*37:01; PAX7; ENSG00000009709; TAA
VDYLAKNVSL

SEQ ID NO: 61584 - protein, 10 aa, Homo sapiens
  Table A; Target 61584; HLA-B*40:01; PAX7; ENSG00000009709; TAA
VDYLAKNVSL

SEQ ID NO: 61585 - protein, 10 aa, Homo sapiens
  Table A; Target 61585; HLA-B*40:02; PAX7; ENSG00000009709; TAA
VDYLAKNVSL

SEQ ID NO: 61586 - protein, 10 aa, Homo sapiens
  Table A; Target 61586; HLA-C*06:02; PAX7; ENSG00000009709; TAA
VDYLAKNVSL

SEQ ID NO: 61587 - protein, 8 aa, Homo sapiens
  Table A; Target 61587; HLA-C*02:02; PAX7; ENSG00000009709; TAA
VEKKIEEY

SEQ ID NO: 61588 - protein, 8 aa, Homo sapiens
  Table A; Target 61588; HLA-B*18:01; PAX7; ENSG00000009709; TAA
VEMAHHGI

SEQ ID NO: 61589 - protein, 9 aa, Homo sapiens
  Table A; Target 61589; HLA-A*30:01; PAX7; ENSG00000009709; TAA
VESEPDLPL

SEQ ID NO: 61590 - protein, 9 aa, Homo sapiens
  Table A; Target 61590; HLA-B*18:01; PAX7; ENSG00000009709; TAA
VESEPDLPL

SEQ ID NO: 61591 - protein, 9 aa, Homo sapiens
  Table A; Target 61591; HLA-B*27:05; PAX7; ENSG00000009709; TAA
VESEPDLPL

SEQ ID NO: 61592 - protein, 9 aa, Homo sapiens
  Table A; Target 61592; HLA-B*35:03; PAX7; ENSG00000009709; TAA
VESEPDLPL

SEQ ID NO: 61593 - protein, 9 aa, Homo sapiens
  Table A; Target 61593; HLA-B*37:01; PAX7; ENSG00000009709; TAA
VESEPDLPL

SEQ ID NO: 61594 - protein, 9 aa, Homo sapiens
  Table A; Target 61594; HLA-B*40:01; PAX7; ENSG00000009709; TAA
VESEPDLPL

SEQ ID NO: 61595 - protein, 9 aa, Homo sapiens
  Table A; Target 61595; HLA-B*40:02; PAX7; ENSG00000009709; TAA
VESEPDLPL

SEQ ID NO: 61596 - protein, 9 aa, Homo sapiens
  Table A; Target 61596; HLA-B*49:01; PAX7; ENSG00000009709; TAA
VESEPDLPL

SEQ ID NO: 61597 - protein, 9 aa, Homo sapiens
  Table A; Target 61597; HLA-C*03:03; PAX7; ENSG00000009709; TAA
VESEPDLPL

SEQ ID NO: 61598 - protein, 9 aa, Homo sapiens
  Table A; Target 61598; HLA-C*03:04; PAX7; ENSG00000009709; TAA
VESEPDLPL

SEQ ID NO: 61599 - protein, 10 aa, Homo sapiens
  Table A; Target 61599; HLA-A*11:01; PAX7; ENSG00000009709; TAA
VESEPDLPLK

SEQ ID NO: 61600 - protein, 10 aa, Homo sapiens
  Table A; Target 61600; HLA-B*27:02; PAX7; ENSG00000009709; TAA
VESEPDLPLK

SEQ ID NO: 61601 - protein, 10 aa, Homo sapiens
  Table A; Target 61601; HLA-B*27:05; PAX7; ENSG00000009709; TAA
VESEPDLPLK

SEQ ID NO: 61602 - protein, 11 aa, Homo sapiens
  Table A; Target 61602; HLA-A*68:01; PAX7; ENSG00000009709; TAA
VESEPDLPLKR

SEQ ID NO: 61603 - protein, 11 aa, Homo sapiens
  Table A; Target 61603; HLA-B*27:02; PAX7; ENSG00000009709; TAA
VESEPDLPLKR

SEQ ID NO: 61604 - protein, 11 aa, Homo sapiens
  Table A; Target 61604; HLA-B*44:03; PAX7; ENSG00000009709; TAA
VESEPDLPLKR

SEQ ID NO: 61605 - protein, 11 aa, Homo sapiens
  Table A; Target 61605; HLA-C*07:06; PAX7; ENSG00000009709; TAA
VESEPDLPLKR

SEQ ID NO: 61606 - protein, 9 aa, Homo sapiens
  Table A; Target 61606; HLA-A*02:01; PAX7; ENSG00000009709; TAA
VLGLLPVET

SEQ ID NO: 61607 - protein, 8 aa, Homo sapiens
  Table A; Target 61607; HLA-C*04:01; PAX7; ENSG00000009709; TAA
VNQLGGVF

SEQ ID NO: 61608 - protein, 9 aa, Homo sapiens
  Table A; Target 61608; HLA-B*07:02; PAX7; ENSG00000009709; TAA
VPPQPQADF

SEQ ID NO: 61609 - protein, 9 aa, Homo sapiens
  Table A; Target 61609; HLA-B*35:01; PAX7; ENSG00000009709; TAA
VPPQPQADF

SEQ ID NO: 61610 - protein, 9 aa, Homo sapiens
  Table A; Target 61610; HLA-B*51:01; PAX7; ENSG00000009709; TAA
VPPQPQADF

SEQ ID NO: 61611 - protein, 9 aa, Homo sapiens
  Table A; Target 61611; HLA-C*07:02; PAX7; ENSG00000009709; TAA
VPPQPQADF

SEQ ID NO: 61612 - protein, 9 aa, Homo sapiens
  Table A; Target 61612; HLA-A*02:03; PAX7; ENSG00000009709; TAA
VPSGLVSSI

SEQ ID NO: 61613 - protein, 9 aa, Homo sapiens
  Table A; Target 61613; HLA-A*25:01; PAX7; ENSG00000009709; TAA
VPSGLVSSI

SEQ ID NO: 61614 - protein, 9 aa, Homo sapiens
  Table A; Target 61614; HLA-A*30:01; PAX7; ENSG00000009709; TAA
VPSGLVSSI

SEQ ID NO: 61615 - protein, 9 aa, Homo sapiens
  Table A; Target 61615; HLA-B*07:02; PAX7; ENSG00000009709; TAA
VPSGLVSSI

SEQ ID NO: 61616 - protein, 9 aa, Homo sapiens
  Table A; Target 61616; HLA-B*08:01; PAX7; ENSG00000009709; TAA
VPSGLVSSI

SEQ ID NO: 61617 - protein, 9 aa, Homo sapiens
  Table A; Target 61617; HLA-B*13:02; PAX7; ENSG00000009709; TAA
VPSGLVSSI

SEQ ID NO: 61618 - protein, 9 aa, Homo sapiens
  Table A; Target 61618; HLA-B*35:01; PAX7; ENSG00000009709; TAA
VPSGLVSSI

SEQ ID NO: 61619 - protein, 9 aa, Homo sapiens
  Table A; Target 61619; HLA-B*35:03; PAX7; ENSG00000009709; TAA
VPSGLVSSI

SEQ ID NO: 61620 - protein, 9 aa, Homo sapiens
  Table A; Target 61620; HLA-B*38:01; PAX7; ENSG00000009709; TAA
VPSGLVSSI

SEQ ID NO: 61621 - protein, 9 aa, Homo sapiens
  Table A; Target 61621; HLA-B*39:01; PAX7; ENSG00000009709; TAA
VPSGLVSSI

SEQ ID NO: 61622 - protein, 9 aa, Homo sapiens
  Table A; Target 61622; HLA-B*49:01; PAX7; ENSG00000009709; TAA
VPSGLVSSI

SEQ ID NO: 61623 - protein, 9 aa, Homo sapiens
  Table A; Target 61623; HLA-B*51:01; PAX7; ENSG00000009709; TAA
VPSGLVSSI

SEQ ID NO: 61624 - protein, 9 aa, Homo sapiens
  Table A; Target 61624; HLA-B*54:01; PAX7; ENSG00000009709; TAA
VPSGLVSSI

SEQ ID NO: 61625 - protein, 9 aa, Homo sapiens
  Table A; Target 61625; HLA-B*55:01; PAX7; ENSG00000009709; TAA
VPSGLVSSI

SEQ ID NO: 61626 - protein, 9 aa, Homo sapiens
  Table A; Target 61626; HLA-B*56:01; PAX7; ENSG00000009709; TAA
VPSGLVSSI

SEQ ID NO: 61627 - protein, 9 aa, Homo sapiens
  Table A; Target 61627; HLA-C*02:02; PAX7; ENSG00000009709; TAA
VPSGLVSSI

SEQ ID NO: 61628 - protein, 9 aa, Homo sapiens
  Table A; Target 61628; HLA-C*07:02; PAX7; ENSG00000009709; TAA
VPSGLVSSI

SEQ ID NO: 61629 - protein, 9 aa, Homo sapiens
  Table A; Target 61629; HLA-C*12:03; PAX7; ENSG00000009709; TAA
VPSGLVSSI

SEQ ID NO: 61630 - protein, 9 aa, Homo sapiens
  Table A; Target 61630; HLA-C*14:02; PAX7; ENSG00000009709; TAA
VPSGLVSSI

SEQ ID NO: 61631 - protein, 9 aa, Homo sapiens
  Table A; Target 61631; HLA-C*16:02; PAX7; ENSG00000009709; TAA
VPSGLVSSI

SEQ ID NO: 61632 - protein, 11 aa, Homo sapiens
  Table A; Target 61632; HLA-A*68:01; PAX7; ENSG00000009709; TAA
VPSGLVSSISR

SEQ ID NO: 61633 - protein, 11 aa, Homo sapiens
  Table A; Target 61633; HLA-B*27:02; PAX7; ENSG00000009709; TAA
VPSGLVSSISR

SEQ ID NO: 61634 - protein, 11 aa, Homo sapiens
  Table A; Target 61634; HLA-C*07:06; PAX7; ENSG00000009709; TAA
VPSGLVSSISR

SEQ ID NO: 61635 - protein, 9 aa, Homo sapiens
  Table A; Target 61635; HLA-C*16:01; PAX7; ENSG00000009709; TAA
VSLSTQRRM

SEQ ID NO: 61636 - protein, 9 aa, Homo sapiens
  Table A; Target 61636; HLA-B*13:02; PAX7; ENSG00000009709; TAA
VSNGLSPQV

SEQ ID NO: 61637 - protein, 9 aa, Homo sapiens
  Table A; Target 61637; HLA-C*06:02; PAX7; ENSG00000009709; TAA
VSNGLSPQV

SEQ ID NO: 61638 - protein, 9 aa, Homo sapiens
  Table A; Target 61638; HLA-C*16:02; PAX7; ENSG00000009709; TAA
VSNGLSPQV

SEQ ID NO: 61639 - protein, 9 aa, Homo sapiens
  Table A; Target 61639; HLA-C*16:04; PAX7; ENSG00000009709; TAA
VSNGLSPQV

SEQ ID NO: 61640 - protein, 10 aa, Homo sapiens
  Table A; Target 61640; HLA-B*39:01; PAX7; ENSG00000009709; TAA
VSNGLSPQVM

SEQ ID NO: 61641 - protein, 10 aa, Homo sapiens
  Table A; Target 61641; HLA-C*01:02; PAX7; ENSG00000009709; TAA
VSNGLSPQVM

SEQ ID NO: 61642 - protein, 10 aa, Homo sapiens
  Table A; Target 61642; HLA-C*07:04; PAX7; ENSG00000009709; TAA
VSNGLSPQVM

SEQ ID NO: 61643 - protein, 10 aa, Homo sapiens
  Table A; Target 61643; HLA-C*12:03; PAX7; ENSG00000009709; TAA
VSNGLSPQVM

SEQ ID NO: 61644 - protein, 10 aa, Homo sapiens
  Table A; Target 61644; HLA-C*16:02; PAX7; ENSG00000009709; TAA
VSNGLSPQVM

SEQ ID NO: 61645 - protein, 8 aa, Homo sapiens
  Table A; Target 61645; HLA-B*07:02; PAX7; ENSG00000009709; TAA
VSSISRVL

SEQ ID NO: 61646 - protein, 8 aa, Homo sapiens
  Table A; Target 61646; HLA-B*08:01; PAX7; ENSG00000009709; TAA
VSSISRVL

SEQ ID NO: 61647 - protein, 8 aa, Homo sapiens
  Table A; Target 61647; HLA-C*01:02; PAX7; ENSG00000009709; TAA
VSSISRVL

SEQ ID NO: 61648 - protein, 8 aa, Homo sapiens
  Table A; Target 61648; HLA-C*03:03; PAX7; ENSG00000009709; TAA
VSSISRVL

SEQ ID NO: 61649 - protein, 8 aa, Homo sapiens
  Table A; Target 61649; HLA-C*03:04; PAX7; ENSG00000009709; TAA
VSSISRVL

SEQ ID NO: 61650 - protein, 8 aa, Homo sapiens
  Table A; Target 61650; HLA-C*06:02; PAX7; ENSG00000009709; TAA
VSSISRVL

SEQ ID NO: 61651 - protein, 8 aa, Homo sapiens
  Table A; Target 61651; HLA-C*07:04; PAX7; ENSG00000009709; TAA
VSSISRVL

SEQ ID NO: 61652 - protein, 8 aa, Homo sapiens
  Table A; Target 61652; HLA-C*12:03; PAX7; ENSG00000009709; TAA
VSSISRVL

SEQ ID NO: 61653 - protein, 8 aa, Homo sapiens
  Table A; Target 61653; HLA-C*16:01; PAX7; ENSG00000009709; TAA
VSSISRVL

SEQ ID NO: 61654 - protein, 8 aa, Homo sapiens
  Table A; Target 61654; HLA-C*16:02; PAX7; ENSG00000009709; TAA
VSSISRVL

SEQ ID NO: 61655 - protein, 9 aa, Homo sapiens
  Table A; Target 61655; HLA-A*31:01; PAX7; ENSG00000009709; TAA
VSSISRVLR

SEQ ID NO: 61656 - protein, 10 aa, Homo sapiens
  Table A; Target 61656; HLA-A*01:01; PAX7; ENSG00000009709; TAA
YGARHSFSSY

SEQ ID NO: 61657 - protein, 10 aa, Homo sapiens
  Table A; Target 61657; HLA-A*25:01; PAX7; ENSG00000009709; TAA
YGARHSFSSY

SEQ ID NO: 61658 - protein, 10 aa, Homo sapiens
  Table A; Target 61658; HLA-B*46:01; PAX7; ENSG00000009709; TAA
YGARHSFSSY

SEQ ID NO: 61659 - protein, 8 aa, Homo sapiens
  Table A; Target 61659; HLA-A*30:02; PAX7; ENSG00000009709; TAA
YGQTAVDY

SEQ ID NO: 61660 - protein, 8 aa, Homo sapiens
  Table A; Target 61660; HLA-B*15:01; PAX7; ENSG00000009709; TAA
YGQTAVDY

SEQ ID NO: 61661 - protein, 8 aa, Homo sapiens
  Table A; Target 61661; HLA-B*18:01; PAX7; ENSG00000009709; TAA
YGQTAVDY

SEQ ID NO: 61662 - protein, 8 aa, Homo sapiens
  Table A; Target 61662; HLA-B*39:01; PAX7; ENSG00000009709; TAA
YGQTAVDY

SEQ ID NO: 61663 - protein, 8 aa, Homo sapiens
  Table A; Target 61663; HLA-B*46:01; PAX7; ENSG00000009709; TAA
YGQTAVDY

SEQ ID NO: 61664 - protein, 8 aa, Homo sapiens
  Table A; Target 61664; HLA-C*01:02; PAX7; ENSG00000009709; TAA
YGQTAVDY

SEQ ID NO: 61665 - protein, 8 aa, Homo sapiens
  Table A; Target 61665; HLA-C*03:03; PAX7; ENSG00000009709; TAA
YGQTAVDY

SEQ ID NO: 61666 - protein, 8 aa, Homo sapiens
  Table A; Target 61666; HLA-C*07:04; PAX7; ENSG00000009709; TAA
YGQTAVDY

SEQ ID NO: 61667 - protein, 8 aa, Homo sapiens
  Table A; Target 61667; HLA-C*12:03; PAX7; ENSG00000009709; TAA
YGQTAVDY

SEQ ID NO: 61668 - protein, 8 aa, Homo sapiens
  Table A; Target 61668; HLA-C*14:02; PAX7; ENSG00000009709; TAA
YGQTAVDY

SEQ ID NO: 61669 - protein, 8 aa, Homo sapiens
  Table A; Target 61669; HLA-C*16:02; PAX7; ENSG00000009709; TAA
YGQTAVDY

SEQ ID NO: 61670 - protein, 9 aa, Homo sapiens
  Table A; Target 61670; HLA-B*27:05; PAX7; ENSG00000009709; TAA
YGQTAVDYL

SEQ ID NO: 61671 - protein, 9 aa, Homo sapiens
  Table A; Target 61671; HLA-B*35:03; PAX7; ENSG00000009709; TAA
YGQTAVDYL

SEQ ID NO: 61672 - protein, 9 aa, Homo sapiens
  Table A; Target 61672; HLA-B*38:01; PAX7; ENSG00000009709; TAA
YGQTAVDYL

SEQ ID NO: 61673 - protein, 9 aa, Homo sapiens
  Table A; Target 61673; HLA-B*39:01; PAX7; ENSG00000009709; TAA
YGQTAVDYL

SEQ ID NO: 61674 - protein, 9 aa, Homo sapiens
  Table A; Target 61674; HLA-C*01:02; PAX7; ENSG00000009709; TAA
YGQTAVDYL

SEQ ID NO: 61675 - protein, 9 aa, Homo sapiens
  Table A; Target 61675; HLA-C*05:01; PAX7; ENSG00000009709; TAA
YGQTAVDYL

SEQ ID NO: 61676 - protein, 9 aa, Homo sapiens
  Table A; Target 61676; HLA-C*06:02; PAX7; ENSG00000009709; TAA
YGQTAVDYL

SEQ ID NO: 61677 - protein, 9 aa, Homo sapiens
  Table A; Target 61677; HLA-C*07:02; PAX7; ENSG00000009709; TAA
YGQTAVDYL

SEQ ID NO: 61678 - protein, 9 aa, Homo sapiens
  Table A; Target 61678; HLA-C*07:04; PAX7; ENSG00000009709; TAA
YGQTAVDYL

SEQ ID NO: 61679 - protein, 9 aa, Homo sapiens
  Table A; Target 61679; HLA-C*12:03; PAX7; ENSG00000009709; TAA
YGQTAVDYL

SEQ ID NO: 61680 - protein, 11 aa, Homo sapiens
  Table A; Target 61680; HLA-A*11:01; PAX7; ENSG00000009709; TAA
YGQTAVDYLAK

SEQ ID NO: 61681 - protein, 11 aa, Homo sapiens
  Table A; Target 61681; HLA-B*27:02; PAX7; ENSG00000009709; TAA
YGQTAVDYLAK

SEQ ID NO: 61682 - protein, 8 aa, Homo sapiens
  Table A; Target 61682; HLA-C*14:02; PAX7; ENSG00000009709; TAA
YGQYGQTA

SEQ ID NO: 61683 - protein, 9 aa, Homo sapiens
  Table A; Target 61683; HLA-B*13:02; PAX7; ENSG00000009709; TAA
YGQYGQTAV

SEQ ID NO: 61684 - protein, 9 aa, Homo sapiens
  Table A; Target 61684; HLA-B*39:01; PAX7; ENSG00000009709; TAA
YGQYGQTAV

SEQ ID NO: 61685 - protein, 9 aa, Homo sapiens
  Table A; Target 61685; HLA-B*56:01; PAX7; ENSG00000009709; TAA
YGQYGQTAV

SEQ ID NO: 61686 - protein, 9 aa, Homo sapiens
  Table A; Target 61686; HLA-C*01:02; PAX7; ENSG00000009709; TAA
YGQYGQTAV

SEQ ID NO: 61687 - protein, 9 aa, Homo sapiens
  Table A; Target 61687; HLA-C*03:03; PAX7; ENSG00000009709; TAA
YGQYGQTAV

SEQ ID NO: 61688 - protein, 9 aa, Homo sapiens
  Table A; Target 61688; HLA-C*03:04; PAX7; ENSG00000009709; TAA
YGQYGQTAV

SEQ ID NO: 61689 - protein, 9 aa, Homo sapiens
  Table A; Target 61689; HLA-C*07:04; PAX7; ENSG00000009709; TAA
YGQYGQTAV

SEQ ID NO: 61690 - protein, 9 aa, Homo sapiens
  Table A; Target 61690; HLA-C*14:02; PAX7; ENSG00000009709; TAA
YGQYGQTAV

SEQ ID NO: 61691 - protein, 9 aa, Homo sapiens
  Table A; Target 61691; HLA-C*16:02; PAX7; ENSG00000009709; TAA
YGQYGQTAV

SEQ ID NO: 61692 - protein, 11 aa, Homo sapiens
  Table A; Target 61692; HLA-B*39:01; PAX7; ENSG00000009709; TAA
YGQYGQTAVDY

SEQ ID NO: 61693 - protein, 11 aa, Homo sapiens
  Table A; Target 61693; HLA-C*04:01; PAX7; ENSG00000009709; TAA
YGQYGQTAVDY

SEQ ID NO: 61694 - protein, 11 aa, Homo sapiens
  Table A; Target 61694; HLA-C*07:01; PAX7; ENSG00000009709; TAA
YGQYGQTAVDY

SEQ ID NO: 61695 - protein, 11 aa, Homo sapiens
  Table A; Target 61695; HLA-C*12:03; PAX7; ENSG00000009709; TAA
YGQYGQTAVDY

SEQ ID NO: 61696 - protein, 9 aa, Homo sapiens
  Table A; Target 61696; HLA-B*15:03; PAX7; ENSG00000009709; TAA
YKRENPGMF

SEQ ID NO: 61697 - protein, 8 aa, Homo sapiens
  Table A; Target 61697; HLA-A*02:01; PAX7; ENSG00000009709; TAA
YLAKNVSL

SEQ ID NO: 61698 - protein, 8 aa, Homo sapiens
  Table A; Target 61698; HLA-A*02:03; PAX7; ENSG00000009709; TAA
YLAKNVSL

SEQ ID NO: 61699 - protein, 8 aa, Homo sapiens
  Table A; Target 61699; HLA-A*02:04; PAX7; ENSG00000009709; TAA
YLAKNVSL

SEQ ID NO: 61700 - protein, 8 aa, Homo sapiens
  Table A; Target 61700; HLA-B*08:01; PAX7; ENSG00000009709; TAA
YLAKNVSL

SEQ ID NO: 61701 - protein, 9 aa, Homo sapiens
  Table A; Target 61701; HLA-A*02:03; PAX7; ENSG00000009709; TAA
YLAKNVSLS

SEQ ID NO: 61702 - protein, 10 aa, Homo sapiens
  Table A; Target 61702; HLA-B*07:02; PAX7; ENSG00000009709; TAA
YPRTGFPLEV

SEQ ID NO: 61703 - protein, 10 aa, Homo sapiens
  Table A; Target 61703; HLA-B*51:01; PAX7; ENSG00000009709; TAA
YPRTGFPLEV

SEQ ID NO: 61704 - protein, 10 aa, Homo sapiens
  Table A; Target 61704; HLA-B*54:01; PAX7; ENSG00000009709; TAA
YPRTGFPLEV

SEQ ID NO: 61705 - protein, 10 aa, Homo sapiens
  Table A; Target 61705; HLA-B*56:01; PAX7; ENSG00000009709; TAA
YPRTGFPLEV

SEQ ID NO: 61706 - protein, 10 aa, Homo sapiens
  Table A; Target 61706; HLA-C*07:02; PAX7; ENSG00000009709; TAA
YPRTGFPLEV

SEQ ID NO: 61707 - protein, 8 aa, Homo sapiens
  Table A; Target 61707; HLA-B*54:01; PAX7; ENSG00000009709; TAA
YPTTTISQ

SEQ ID NO: 61708 - protein, 8 aa, Homo sapiens
  Table A; Target 61708; HLA-B*56:01; PAX7; ENSG00000009709; TAA
YPTTTISQ

SEQ ID NO: 61709 - protein, 10 aa, Homo sapiens
  Table A; Target 61709; HLA-B*27:02; PAX7; ENSG00000009709; TAA
YPTTTISQDG

SEQ ID NO: 61710 - protein, 10 aa, Homo sapiens
  Table A; Target 61710; HLA-B*56:01; PAX7; ENSG00000009709; TAA
YPTTTISQDG

SEQ ID NO: 61711 - protein, 10 aa, Homo sapiens
  Table A; Target 61711; HLA-C*07:02; PAX7; ENSG00000009709; TAA
YPTTTISQDG

SEQ ID NO: 61712 - protein, 8 aa, Homo sapiens
  Table A; Target 61712; HLA-B*39:01; PAX7; ENSG00000009709; TAA
YQETGSIR

SEQ ID NO: 61713 - protein, 8 aa, Homo sapiens
  Table A; Target 61713; HLA-B*15:01; PAX7; ENSG00000009709; TAA
YQLPDSTY

SEQ ID NO: 61714 - protein, 8 aa, Homo sapiens
  Table A; Target 61714; HLA-B*15:03; PAX7; ENSG00000009709; TAA
YQLPDSTY

SEQ ID NO: 61715 - protein, 8 aa, Homo sapiens
  Table A; Target 61715; HLA-B*39:01; PAX7; ENSG00000009709; TAA
YQLPDSTY

SEQ ID NO: 61716 - protein, 9 aa, Homo sapiens
  Table A; Target 61716; HLA-B*13:02; PAX7; ENSG00000009709; TAA
YQYGQYGQT

SEQ ID NO: 61717 - protein, 9 aa, Homo sapiens
  Table A; Target 61717; HLA-B*39:01; PAX7; ENSG00000009709; TAA
YQYGQYGQT

SEQ ID NO: 61718 - protein, 10 aa, Homo sapiens
  Table A; Target 61718; HLA-A*02:03; PAX7; ENSG00000009709; TAA
YQYGQYGQTA

SEQ ID NO: 61719 - protein, 10 aa, Homo sapiens
  Table A; Target 61719; HLA-A*30:01; PAX7; ENSG00000009709; TAA
YQYGQYGQTA

SEQ ID NO: 61720 - protein, 10 aa, Homo sapiens
  Table A; Target 61720; HLA-B*13:02; PAX7; ENSG00000009709; TAA
YQYGQYGQTA

SEQ ID NO: 61721 - protein, 10 aa, Homo sapiens
  Table A; Target 61721; HLA-B*15:01; PAX7; ENSG00000009709; TAA
YQYGQYGQTA

SEQ ID NO: 61722 - protein, 10 aa, Homo sapiens
  Table A; Target 61722; HLA-B*15:03; PAX7; ENSG00000009709; TAA
YQYGQYGQTA

SEQ ID NO: 61723 - protein, 10 aa, Homo sapiens
  Table A; Target 61723; HLA-B*27:05; PAX7; ENSG00000009709; TAA
YQYGQYGQTA

SEQ ID NO: 61724 - protein, 10 aa, Homo sapiens
  Table A; Target 61724; HLA-B*38:01; PAX7; ENSG00000009709; TAA
YQYGQYGQTA

SEQ ID NO: 61725 - protein, 10 aa, Homo sapiens
  Table A; Target 61725; HLA-B*39:01; PAX7; ENSG00000009709; TAA
YQYGQYGQTA

SEQ ID NO: 61726 - protein, 10 aa, Homo sapiens
  Table A; Target 61726; HLA-B*40:02; PAX7; ENSG00000009709; TAA
YQYGQYGQTA

SEQ ID NO: 61727 - protein, 10 aa, Homo sapiens
  Table A; Target 61727; HLA-C*02:02; PAX7; ENSG00000009709; TAA
YQYGQYGQTA

SEQ ID NO: 61728 - protein, 10 aa, Homo sapiens
  Table A; Target 61728; HLA-C*07:04; PAX7; ENSG00000009709; TAA
YQYGQYGQTA

SEQ ID NO: 61729 - protein, 10 aa, Homo sapiens
  Table A; Target 61729; HLA-C*12:03; PAX7; ENSG00000009709; TAA
YQYGQYGQTA

SEQ ID NO: 61730 - protein, 10 aa, Homo sapiens
  Table A; Target 61730; HLA-C*14:02; PAX7; ENSG00000009709; TAA
YQYGQYGQTA

SEQ ID NO: 61731 - protein, 10 aa, Homo sapiens
  Table A; Target 61731; HLA-C*16:04; PAX7; ENSG00000009709; TAA
YQYGQYGQTA

SEQ ID NO: 61732 - protein, 11 aa, Homo sapiens
  Table A; Target 61732; HLA-A*02:01; PAX7; ENSG00000009709; TAA
YQYGQYGQTAV

SEQ ID NO: 61733 - protein, 11 aa, Homo sapiens
  Table A; Target 61733; HLA-A*02:03; PAX7; ENSG00000009709; TAA
YQYGQYGQTAV

SEQ ID NO: 61734 - protein, 11 aa, Homo sapiens
  Table A; Target 61734; HLA-A*02:04; PAX7; ENSG00000009709; TAA
YQYGQYGQTAV

SEQ ID NO: 61735 - protein, 11 aa, Homo sapiens
  Table A; Target 61735; HLA-A*30:01; PAX7; ENSG00000009709; TAA
YQYGQYGQTAV

SEQ ID NO: 61736 - protein, 11 aa, Homo sapiens
  Table A; Target 61736; HLA-A*68:02; PAX7; ENSG00000009709; TAA
YQYGQYGQTAV

SEQ ID NO: 61737 - protein, 11 aa, Homo sapiens
  Table A; Target 61737; HLA-B*13:02; PAX7; ENSG00000009709; TAA
YQYGQYGQTAV

SEQ ID NO: 61738 - protein, 11 aa, Homo sapiens
  Table A; Target 61738; HLA-B*15:03; PAX7; ENSG00000009709; TAA
YQYGQYGQTAV

SEQ ID NO: 61739 - protein, 11 aa, Homo sapiens
  Table A; Target 61739; HLA-B*27:05; PAX7; ENSG00000009709; TAA
YQYGQYGQTAV

SEQ ID NO: 61740 - protein, 11 aa, Homo sapiens
  Table A; Target 61740; HLA-B*39:01; PAX7; ENSG00000009709; TAA
YQYGQYGQTAV

SEQ ID NO: 61741 - protein, 11 aa, Homo sapiens
  Table A; Target 61741; HLA-C*02:02; PAX7; ENSG00000009709; TAA
YQYGQYGQTAV

SEQ ID NO: 61742 - protein, 11 aa, Homo sapiens
  Table A; Target 61742; HLA-C*16:04; PAX7; ENSG00000009709; TAA
YQYGQYGQTAV

SEQ ID NO: 61743 - protein, 9 aa, Homo sapiens
  Table A; Target 61743; HLA-A*01:01; PAX7; ENSG00000009709; TAA
YSDSFMNPA

SEQ ID NO: 61744 - protein, 9 aa, Homo sapiens
  Table A; Target 61744; HLA-B*54:01; PAX7; ENSG00000009709; TAA
YSDSFMNPA

SEQ ID NO: 61745 - protein, 10 aa, Homo sapiens
  Table A; Target 61745; HLA-A*01:01; PAX7; ENSG00000009709; TAA
YSDSFMNPAA

SEQ ID NO: 61746 - protein, 8 aa, Homo sapiens
  Table A; Target 61746; HLA-C*03:04; PAX7; ENSG00000009709; TAA
YSTTGYSV

SEQ ID NO: 61747 - protein, 9 aa, Homo sapiens
  Table A; Target 61747; HLA-A*01:01; PAX7; ENSG00000009709; TAA
YSVDPVAGY

SEQ ID NO: 61748 - protein, 9 aa, Homo sapiens
  Table A; Target 61748; HLA-A*11:01; PAX7; ENSG00000009709; TAA
YSVDPVAGY

SEQ ID NO: 61749 - protein, 9 aa, Homo sapiens
  Table A; Target 61749; HLA-A*23:01; PAX7; ENSG00000009709; TAA
YSVDPVAGY

SEQ ID NO: 61750 - protein, 9 aa, Homo sapiens
  Table A; Target 61750; HLA-A*25:01; PAX7; ENSG00000009709; TAA
YSVDPVAGY

SEQ ID NO: 61751 - protein, 9 aa, Homo sapiens
  Table A; Target 61751; HLA-A*26:01; PAX7; ENSG00000009709; TAA
YSVDPVAGY

SEQ ID NO: 61752 - protein, 9 aa, Homo sapiens
  Table A; Target 61752; HLA-A*29:02; PAX7; ENSG00000009709; TAA
YSVDPVAGY

SEQ ID NO: 61753 - protein, 9 aa, Homo sapiens
  Table A; Target 61753; HLA-A*30:02; PAX7; ENSG00000009709; TAA
YSVDPVAGY

SEQ ID NO: 61754 - protein, 9 aa, Homo sapiens
  Table A; Target 61754; HLA-A*32:01; PAX7; ENSG00000009709; TAA
YSVDPVAGY

SEQ ID NO: 61755 - protein, 9 aa, Homo sapiens
  Table A; Target 61755; HLA-A*33:01; PAX7; ENSG00000009709; TAA
YSVDPVAGY

SEQ ID NO: 61756 - protein, 9 aa, Homo sapiens
  Table A; Target 61756; HLA-A*33:03; PAX7; ENSG00000009709; TAA
YSVDPVAGY

SEQ ID NO: 61757 - protein, 9 aa, Homo sapiens
  Table A; Target 61757; HLA-A*68:01; PAX7; ENSG00000009709; TAA
YSVDPVAGY

SEQ ID NO: 61758 - protein, 9 aa, Homo sapiens
  Table A; Target 61758; HLA-B*15:01; PAX7; ENSG00000009709; TAA
YSVDPVAGY

SEQ ID NO: 61759 - protein, 9 aa, Homo sapiens
  Table A; Target 61759; HLA-B*15:03; PAX7; ENSG00000009709; TAA
YSVDPVAGY

SEQ ID NO: 61760 - protein, 9 aa, Homo sapiens
  Table A; Target 61760; HLA-B*18:01; PAX7; ENSG00000009709; TAA
YSVDPVAGY

SEQ ID NO: 61761 - protein, 9 aa, Homo sapiens
  Table A; Target 61761; HLA-B*27:02; PAX7; ENSG00000009709; TAA
YSVDPVAGY

SEQ ID NO: 61762 - protein, 9 aa, Homo sapiens
  Table A; Target 61762; HLA-B*27:05; PAX7; ENSG00000009709; TAA
YSVDPVAGY

SEQ ID NO: 61763 - protein, 9 aa, Homo sapiens
  Table A; Target 61763; HLA-B*35:01; PAX7; ENSG00000009709; TAA
YSVDPVAGY

SEQ ID NO: 61764 - protein, 9 aa, Homo sapiens
  Table A; Target 61764; HLA-B*39:01; PAX7; ENSG00000009709; TAA
YSVDPVAGY

SEQ ID NO: 61765 - protein, 9 aa, Homo sapiens
  Table A; Target 61765; HLA-B*44:02; PAX7; ENSG00000009709; TAA
YSVDPVAGY

SEQ ID NO: 61766 - protein, 9 aa, Homo sapiens
  Table A; Target 61766; HLA-B*44:03; PAX7; ENSG00000009709; TAA
YSVDPVAGY

SEQ ID NO: 61767 - protein, 9 aa, Homo sapiens
  Table A; Target 61767; HLA-B*46:01; PAX7; ENSG00000009709; TAA
YSVDPVAGY

SEQ ID NO: 61768 - protein, 9 aa, Homo sapiens
  Table A; Target 61768; HLA-B*55:01; PAX7; ENSG00000009709; TAA
YSVDPVAGY

SEQ ID NO: 61769 - protein, 9 aa, Homo sapiens
  Table A; Target 61769; HLA-B*57:01; PAX7; ENSG00000009709; TAA
YSVDPVAGY

SEQ ID NO: 61770 - protein, 9 aa, Homo sapiens
  Table A; Target 61770; HLA-B*58:01; PAX7; ENSG00000009709; TAA
YSVDPVAGY

SEQ ID NO: 61771 - protein, 9 aa, Homo sapiens
  Table A; Target 61771; HLA-C*01:02; PAX7; ENSG00000009709; TAA
YSVDPVAGY

SEQ ID NO: 61772 - protein, 9 aa, Homo sapiens
  Table A; Target 61772; HLA-C*02:02; PAX7; ENSG00000009709; TAA
YSVDPVAGY

SEQ ID NO: 61773 - protein, 9 aa, Homo sapiens
  Table A; Target 61773; HLA-C*03:03; PAX7; ENSG00000009709; TAA
YSVDPVAGY

SEQ ID NO: 61774 - protein, 9 aa, Homo sapiens
  Table A; Target 61774; HLA-C*03:04; PAX7; ENSG00000009709; TAA
YSVDPVAGY

SEQ ID NO: 61775 - protein, 9 aa, Homo sapiens
  Table A; Target 61775; HLA-C*05:01; PAX7; ENSG00000009709; TAA
YSVDPVAGY

SEQ ID NO: 61776 - protein, 9 aa, Homo sapiens
  Table A; Target 61776; HLA-C*07:01; PAX7; ENSG00000009709; TAA
YSVDPVAGY

SEQ ID NO: 61777 - protein, 9 aa, Homo sapiens
  Table A; Target 61777; HLA-C*07:04; PAX7; ENSG00000009709; TAA
YSVDPVAGY

SEQ ID NO: 61778 - protein, 9 aa, Homo sapiens
  Table A; Target 61778; HLA-C*07:06; PAX7; ENSG00000009709; TAA
YSVDPVAGY

SEQ ID NO: 61779 - protein, 9 aa, Homo sapiens
  Table A; Target 61779; HLA-C*12:03; PAX7; ENSG00000009709; TAA
YSVDPVAGY

SEQ ID NO: 61780 - protein, 9 aa, Homo sapiens
  Table A; Target 61780; HLA-C*14:02; PAX7; ENSG00000009709; TAA
YSVDPVAGY

SEQ ID NO: 61781 - protein, 9 aa, Homo sapiens
  Table A; Target 61781; HLA-C*16:01; PAX7; ENSG00000009709; TAA
YSVDPVAGY

SEQ ID NO: 61782 - protein, 9 aa, Homo sapiens
  Table A; Target 61782; HLA-C*16:02; PAX7; ENSG00000009709; TAA
YSVDPVAGY

SEQ ID NO: 61783 - protein, 9 aa, Homo sapiens
  Table A; Target 61783; HLA-C*16:04; PAX7; ENSG00000009709; TAA
YSVDPVAGY

SEQ ID NO: 61784 - protein, 10 aa, Homo sapiens
  Table A; Target 61784; HLA-A*01:01; PAX7; ENSG00000009709; TAA
YSVDPVAGYQ

SEQ ID NO: 61785 - protein, 10 aa, Homo sapiens
  Table A; Target 61785; HLA-A*68:02; PAX7; ENSG00000009709; TAA
YSVDPVAGYQ

SEQ ID NO: 61786 - protein, 10 aa, Homo sapiens
  Table A; Target 61786; HLA-C*06:02; PAX7; ENSG00000009709; TAA
YSVDPVAGYQ

SEQ ID NO: 61787 - protein, 10 aa, Homo sapiens
  Table A; Target 61787; HLA-C*07:01; PAX7; ENSG00000009709; TAA
YSVDPVAGYQ

SEQ ID NO: 61788 - protein, 11 aa, Homo sapiens
  Table A; Target 61788; HLA-A*01:01; PAX7; ENSG00000009709; TAA
YSVDPVAGYQY

SEQ ID NO: 61789 - protein, 11 aa, Homo sapiens
  Table A; Target 61789; HLA-A*11:01; PAX7; ENSG00000009709; TAA
YSVDPVAGYQY

SEQ ID NO: 61790 - protein, 11 aa, Homo sapiens
  Table A; Target 61790; HLA-A*23:01; PAX7; ENSG00000009709; TAA
YSVDPVAGYQY

SEQ ID NO: 61791 - protein, 11 aa, Homo sapiens
  Table A; Target 61791; HLA-A*25:01; PAX7; ENSG00000009709; TAA
YSVDPVAGYQY

SEQ ID NO: 61792 - protein, 11 aa, Homo sapiens
  Table A; Target 61792; HLA-A*26:01; PAX7; ENSG00000009709; TAA
YSVDPVAGYQY

SEQ ID NO: 61793 - protein, 11 aa, Homo sapiens
  Table A; Target 61793; HLA-A*29:02; PAX7; ENSG00000009709; TAA
YSVDPVAGYQY

SEQ ID NO: 61794 - protein, 11 aa, Homo sapiens
  Table A; Target 61794; HLA-A*30:02; PAX7; ENSG00000009709; TAA
YSVDPVAGYQY

SEQ ID NO: 61795 - protein, 11 aa, Homo sapiens
  Table A; Target 61795; HLA-A*32:01; PAX7; ENSG00000009709; TAA
YSVDPVAGYQY

SEQ ID NO: 61796 - protein, 11 aa, Homo sapiens
  Table A; Target 61796; HLA-A*33:01; PAX7; ENSG00000009709; TAA
YSVDPVAGYQY

SEQ ID NO: 61797 - protein, 11 aa, Homo sapiens
  Table A; Target 61797; HLA-A*33:03; PAX7; ENSG00000009709; TAA
YSVDPVAGYQY

SEQ ID NO: 61798 - protein, 11 aa, Homo sapiens
  Table A; Target 61798; HLA-A*68:01; PAX7; ENSG00000009709; TAA
YSVDPVAGYQY

SEQ ID NO: 61799 - protein, 11 aa, Homo sapiens
  Table A; Target 61799; HLA-B*15:01; PAX7; ENSG00000009709; TAA
YSVDPVAGYQY

SEQ ID NO: 61800 - protein, 11 aa, Homo sapiens
  Table A; Target 61800; HLA-B*15:03; PAX7; ENSG00000009709; TAA
YSVDPVAGYQY

SEQ ID NO: 61801 - protein, 11 aa, Homo sapiens
  Table A; Target 61801; HLA-B*27:02; PAX7; ENSG00000009709; TAA
YSVDPVAGYQY

SEQ ID NO: 61802 - protein, 11 aa, Homo sapiens
  Table A; Target 61802; HLA-B*27:05; PAX7; ENSG00000009709; TAA
YSVDPVAGYQY

SEQ ID NO: 61803 - protein, 11 aa, Homo sapiens
  Table A; Target 61803; HLA-B*35:01; PAX7; ENSG00000009709; TAA
YSVDPVAGYQY

SEQ ID NO: 61804 - protein, 11 aa, Homo sapiens
  Table A; Target 61804; HLA-B*39:01; PAX7; ENSG00000009709; TAA
YSVDPVAGYQY

SEQ ID NO: 61805 - protein, 11 aa, Homo sapiens
  Table A; Target 61805; HLA-B*44:03; PAX7; ENSG00000009709; TAA
YSVDPVAGYQY

SEQ ID NO: 61806 - protein, 11 aa, Homo sapiens
  Table A; Target 61806; HLA-B*46:01; PAX7; ENSG00000009709; TAA
YSVDPVAGYQY

SEQ ID NO: 61807 - protein, 11 aa, Homo sapiens
  Table A; Target 61807; HLA-B*57:01; PAX7; ENSG00000009709; TAA
YSVDPVAGYQY

SEQ ID NO: 61808 - protein, 11 aa, Homo sapiens
  Table A; Target 61808; HLA-B*58:01; PAX7; ENSG00000009709; TAA
YSVDPVAGYQY

SEQ ID NO: 61809 - protein, 11 aa, Homo sapiens
  Table A; Target 61809; HLA-C*01:02; PAX7; ENSG00000009709; TAA
YSVDPVAGYQY

SEQ ID NO: 61810 - protein, 11 aa, Homo sapiens
  Table A; Target 61810; HLA-C*02:02; PAX7; ENSG00000009709; TAA
YSVDPVAGYQY

SEQ ID NO: 61811 - protein, 11 aa, Homo sapiens
  Table A; Target 61811; HLA-C*03:03; PAX7; ENSG00000009709; TAA
YSVDPVAGYQY

SEQ ID NO: 61812 - protein, 11 aa, Homo sapiens
  Table A; Target 61812; HLA-C*03:04; PAX7; ENSG00000009709; TAA
YSVDPVAGYQY

SEQ ID NO: 61813 - protein, 11 aa, Homo sapiens
  Table A; Target 61813; HLA-C*04:01; PAX7; ENSG00000009709; TAA
YSVDPVAGYQY

SEQ ID NO: 61814 - protein, 11 aa, Homo sapiens
  Table A; Target 61814; HLA-C*05:01; PAX7; ENSG00000009709; TAA
YSVDPVAGYQY

SEQ ID NO: 61815 - protein, 11 aa, Homo sapiens
  Table A; Target 61815; HLA-C*07:01; PAX7; ENSG00000009709; TAA
YSVDPVAGYQY

SEQ ID NO: 61816 - protein, 11 aa, Homo sapiens
  Table A; Target 61816; HLA-C*07:04; PAX7; ENSG00000009709; TAA
YSVDPVAGYQY

SEQ ID NO: 61817 - protein, 11 aa, Homo sapiens
  Table A; Target 61817; HLA-C*07:06; PAX7; ENSG00000009709; TAA
YSVDPVAGYQY

SEQ ID NO: 61818 - protein, 11 aa, Homo sapiens
  Table A; Target 61818; HLA-C*12:03; PAX7; ENSG00000009709; TAA
YSVDPVAGYQY

SEQ ID NO: 61819 - protein, 11 aa, Homo sapiens
  Table A; Target 61819; HLA-C*16:01; PAX7; ENSG00000009709; TAA
YSVDPVAGYQY

SEQ ID NO: 61820 - protein, 11 aa, Homo sapiens
  Table A; Target 61820; HLA-C*16:02; PAX7; ENSG00000009709; TAA
YSVDPVAGYQY

SEQ ID NO: 61821 - protein, 11 aa, Homo sapiens
  Table A; Target 61821; HLA-C*16:04; PAX7; ENSG00000009709; TAA
YSVDPVAGYQY

SEQ ID NO: 61822 - protein, 11 aa, Homo sapiens
  Table A; Target 61822; HLA-B*57:01; PDX1; ENSG00000139515; TAA
AAEPEENKRTR

SEQ ID NO: 61823 - protein, 9 aa, Homo sapiens
  Table A; Target 61823; HLA-C*01:02; PDX1; ENSG00000139515; TAA
AAPVAAREG

SEQ ID NO: 61824 - protein, 9 aa, Homo sapiens
  Table A; Target 61824; HLA-C*16:02; PDX1; ENSG00000139515; TAA
AATQLYKDP

SEQ ID NO: 61825 - protein, 8 aa, Homo sapiens
  Table A; Target 61825; HLA-B*37:01; PDX1; ENSG00000139515; TAA
ADDPAVAH

SEQ ID NO: 61826 - protein, 9 aa, Homo sapiens
  Table A; Target 61826; HLA-A*02:07; PDX1; ENSG00000139515; TAA
ADDPAVAHL

SEQ ID NO: 61827 - protein, 9 aa, Homo sapiens
  Table A; Target 61827; HLA-A*30:01; PDX1; ENSG00000139515; TAA
ADDPAVAHL

SEQ ID NO: 61828 - protein, 9 aa, Homo sapiens
  Table A; Target 61828; HLA-A*32:01; PDX1; ENSG00000139515; TAA
ADDPAVAHL

SEQ ID NO: 61829 - protein, 9 aa, Homo sapiens
  Table A; Target 61829; HLA-B*37:01; PDX1; ENSG00000139515; TAA
ADDPAVAHL

SEQ ID NO: 61830 - protein, 9 aa, Homo sapiens
  Table A; Target 61830; HLA-B*38:01; PDX1; ENSG00000139515; TAA
ADDPAVAHL

SEQ ID NO: 61831 - protein, 9 aa, Homo sapiens
  Table A; Target 61831; HLA-B*40:01; PDX1; ENSG00000139515; TAA
ADDPAVAHL

SEQ ID NO: 61832 - protein, 9 aa, Homo sapiens
  Table A; Target 61832; HLA-B*40:02; PDX1; ENSG00000139515; TAA
ADDPAVAHL

SEQ ID NO: 61833 - protein, 9 aa, Homo sapiens
  Table A; Target 61833; HLA-B*44:02; PDX1; ENSG00000139515; TAA
ADDPAVAHL

SEQ ID NO: 61834 - protein, 9 aa, Homo sapiens
  Table A; Target 61834; HLA-B*44:03; PDX1; ENSG00000139515; TAA
ADDPAVAHL

SEQ ID NO: 61835 - protein, 9 aa, Homo sapiens
  Table A; Target 61835; HLA-B*49:01; PDX1; ENSG00000139515; TAA
ADDPAVAHL

SEQ ID NO: 61836 - protein, 9 aa, Homo sapiens
  Table A; Target 61836; HLA-C*03:04; PDX1; ENSG00000139515; TAA
ADDPAVAHL

SEQ ID NO: 61837 - protein, 9 aa, Homo sapiens
  Table A; Target 61837; HLA-C*04:01; PDX1; ENSG00000139515; TAA
ADDPAVAHL

SEQ ID NO: 61838 - protein, 9 aa, Homo sapiens
  Table A; Target 61838; HLA-C*05:01; PDX1; ENSG00000139515; TAA
ADDPAVAHL

SEQ ID NO: 61839 - protein, 9 aa, Homo sapiens
  Table A; Target 61839; HLA-C*16:02; PDX1; ENSG00000139515; TAA
ADDPAVAHL

SEQ ID NO: 61840 - protein, 10 aa, Homo sapiens
  Table A; Target 61840; HLA-B*44:02; PDX1; ENSG00000139515; TAA
AEPEENKRTR

SEQ ID NO: 61841 - protein, 10 aa, Homo sapiens
  Table A; Target 61841; HLA-A*23:01; PDX1; ENSG00000139515; TAA
AFQRGPAPEF

SEQ ID NO: 61842 - protein, 10 aa, Homo sapiens
  Table A; Target 61842; HLA-A*24:02; PDX1; ENSG00000139515; TAA
AFQRGPAPEF

SEQ ID NO: 61843 - protein, 9 aa, Homo sapiens
  Table A; Target 61843; HLA-A*02:03; PDX1; ENSG00000139515; TAA
ALPHPPAGP

SEQ ID NO: 61844 - protein, 9 aa, Homo sapiens
  Table A; Target 61844; HLA-A*02:07; PDX1; ENSG00000139515; TAA
ALPHPPAGP

SEQ ID NO: 61845 - protein, 10 aa, Homo sapiens
  Table A; Target 61845; HLA-A*02:07; PDX1; ENSG00000139515; TAA
ALPHPPAGPF

SEQ ID NO: 61846 - protein, 9 aa, Homo sapiens
  Table A; Target 61846; HLA-A*02:01; PDX1; ENSG00000139515; TAA
ALPPPPPPG

SEQ ID NO: 61847 - protein, 9 aa, Homo sapiens
  Table A; Target 61847; HLA-A*02:07; PDX1; ENSG00000139515; TAA
ALPPPPPPG

SEQ ID NO: 61848 - protein, 9 aa, Homo sapiens
  Table A; Target 61848; HLA-B*55:01; PDX1; ENSG00000139515; TAA
ALPPPPPPG

SEQ ID NO: 61849 - protein, 9 aa, Homo sapiens
  Table A; Target 61849; HLA-C*06:02; PDX1; ENSG00000139515; TAA
ALPPPPPPG

SEQ ID NO: 61850 - protein, 10 aa, Homo sapiens
  Table A; Target 61850; HLA-A*02:01; PDX1; ENSG00000139515; TAA
ALPPPPPPGG

SEQ ID NO: 61851 - protein, 10 aa, Homo sapiens
  Table A; Target 61851; HLA-A*02:07; PDX1; ENSG00000139515; TAA
ALPPPPPPGG

SEQ ID NO: 61852 - protein, 11 aa, Homo sapiens
  Table A; Target 61852; HLA-A*02:01; PDX1; ENSG00000139515; TAA
ALPPPPPPGGA

SEQ ID NO: 61853 - protein, 11 aa, Homo sapiens
  Table A; Target 61853; HLA-A*02:03; PDX1; ENSG00000139515; TAA
ALPPPPPPGGA

SEQ ID NO: 61854 - protein, 10 aa, Homo sapiens
  Table A; Target 61854; HLA-B*56:01; PDX1; ENSG00000139515; TAA
APEFSASPPA

SEQ ID NO: 61855 - protein, 9 aa, Homo sapiens
  Table A; Target 61855; HLA-A*31:01; PDX1; ENSG00000139515; TAA
APRRPQEPR

SEQ ID NO: 61856 - protein, 9 aa, Homo sapiens
  Table A; Target 61856; HLA-B*07:02; PDX1; ENSG00000139515; TAA
APRRPQEPR

SEQ ID NO: 61857 - protein, 9 aa, Homo sapiens
  Table A; Target 61857; HLA-B*56:01; PDX1; ENSG00000139515; TAA
APRRPQEPR

SEQ ID NO: 61858 - protein, 9 aa, Homo sapiens
  Table A; Target 61858; HLA-C*07:02; PDX1; ENSG00000139515; TAA
APRRPQEPR

SEQ ID NO: 61859 - protein, 10 aa, Homo sapiens
  Table A; Target 61859; HLA-B*07:02; PDX1; ENSG00000139515; TAA
APVAAREGRL

SEQ ID NO: 61860 - protein, 11 aa, Homo sapiens
  Table A; Target 61860; HLA-A*31:01; PDX1; ENSG00000139515; TAA
ASPQPSSVAPR

SEQ ID NO: 61861 - protein, 11 aa, Homo sapiens
  Table A; Target 61861; HLA-A*68:01; PDX1; ENSG00000139515; TAA
ASPQPSSVAPR

SEQ ID NO: 61862 - protein, 11 aa, Homo sapiens
  Table A; Target 61862; HLA-C*07:06; PDX1; ENSG00000139515; TAA
ASPQPSSVAPR

SEQ ID NO: 61863 - protein, 9 aa, Homo sapiens
  Table A; Target 61863; HLA-A*03:01; PDX1; ENSG00000139515; TAA
AVMLNLTER

SEQ ID NO: 61864 - protein, 9 aa, Homo sapiens
  Table A; Target 61864; HLA-A*03:02; PDX1; ENSG00000139515; TAA
AVMLNLTER

SEQ ID NO: 61865 - protein, 9 aa, Homo sapiens
  Table A; Target 61865; HLA-A*11:01; PDX1; ENSG00000139515; TAA
AVMLNLTER

SEQ ID NO: 61866 - protein, 9 aa, Homo sapiens
  Table A; Target 61866; HLA-A*31:01; PDX1; ENSG00000139515; TAA
AVMLNLTER

SEQ ID NO: 61867 - protein, 9 aa, Homo sapiens
  Table A; Target 61867; HLA-A*33:01; PDX1; ENSG00000139515; TAA
AVMLNLTER

SEQ ID NO: 61868 - protein, 9 aa, Homo sapiens
  Table A; Target 61868; HLA-A*33:03; PDX1; ENSG00000139515; TAA
AVMLNLTER

SEQ ID NO: 61869 - protein, 9 aa, Homo sapiens
  Table A; Target 61869; HLA-A*68:01; PDX1; ENSG00000139515; TAA
AVMLNLTER

SEQ ID NO: 61870 - protein, 9 aa, Homo sapiens
  Table A; Target 61870; HLA-C*07:06; PDX1; ENSG00000139515; TAA
AVMLNLTER

SEQ ID NO: 61871 - protein, 9 aa, Homo sapiens
  Table A; Target 61871; HLA-A*02:07; PDX1; ENSG00000139515; TAA
AVPPAAPVA

SEQ ID NO: 61872 - protein, 9 aa, Homo sapiens
  Table A; Target 61872; HLA-B*56:01; PDX1; ENSG00000139515; TAA
AVPPAAPVA

SEQ ID NO: 61873 - protein, 10 aa, Homo sapiens
  Table A; Target 61873; HLA-A*02:03; PDX1; ENSG00000139515; TAA
AVPPAAPVAA

SEQ ID NO: 61874 - protein, 10 aa, Homo sapiens
  Table A; Target 61874; HLA-A*02:07; PDX1; ENSG00000139515; TAA
AVPPAAPVAA

SEQ ID NO: 61875 - protein, 10 aa, Homo sapiens
  Table A; Target 61875; HLA-B*56:01; PDX1; ENSG00000139515; TAA
AVPPAAPVAA

SEQ ID NO: 61876 - protein, 11 aa, Homo sapiens
  Table A; Target 61876; HLA-A*03:01; PDX1; ENSG00000139515; TAA
AVPPAAPVAAR

SEQ ID NO: 61877 - protein, 11 aa, Homo sapiens
  Table A; Target 61877; HLA-A*03:02; PDX1; ENSG00000139515; TAA
AVPPAAPVAAR

SEQ ID NO: 61878 - protein, 11 aa, Homo sapiens
  Table A; Target 61878; HLA-A*11:01; PDX1; ENSG00000139515; TAA
AVPPAAPVAAR

SEQ ID NO: 61879 - protein, 11 aa, Homo sapiens
  Table A; Target 61879; HLA-A*31:01; PDX1; ENSG00000139515; TAA
AVPPAAPVAAR

SEQ ID NO: 61880 - protein, 8 aa, Homo sapiens
  Table A; Target 61880; HLA-C*01:02; PDX1; ENSG00000139515; TAA
AVTSGEEL

SEQ ID NO: 61881 - protein, 9 aa, Homo sapiens
  Table A; Target 61881; HLA-B*38:01; PDX1; ENSG00000139515; TAA
AVTSGEELL

SEQ ID NO: 61882 - protein, 9 aa, Homo sapiens
  Table A; Target 61882; HLA-B*39:01; PDX1; ENSG00000139515; TAA
AVTSGEELL

SEQ ID NO: 61883 - protein, 8 aa, Homo sapiens
  Table A; Target 61883; HLA-A*23:01; PDX1; ENSG00000139515; TAA
AYTRAQLL

SEQ ID NO: 61884 - protein, 8 aa, Homo sapiens
  Table A; Target 61884; HLA-A*24:02; PDX1; ENSG00000139515; TAA
AYTRAQLL

SEQ ID NO: 61885 - protein, 8 aa, Homo sapiens
  Table A; Target 61885; HLA-C*16:02; PDX1; ENSG00000139515; TAA
AYTRAQLL

SEQ ID NO: 61886 - protein, 10 aa, Homo sapiens
  Table A; Target 61886; HLA-A*23:01; PDX1; ENSG00000139515; TAA
AYTRAQLLEL

SEQ ID NO: 61887 - protein, 10 aa, Homo sapiens
  Table A; Target 61887; HLA-A*24:02; PDX1; ENSG00000139515; TAA
AYTRAQLLEL

SEQ ID NO: 61888 - protein, 9 aa, Homo sapiens
  Table A; Target 61888; HLA-B*35:03; PDX1; ENSG00000139515; TAA
CAVTSGEEL

SEQ ID NO: 61889 - protein, 9 aa, Homo sapiens
  Table A; Target 61889; HLA-B*39:01; PDX1; ENSG00000139515; TAA
CAVTSGEEL

SEQ ID NO: 61890 - protein, 9 aa, Homo sapiens
  Table A; Target 61890; HLA-B*40:01; PDX1; ENSG00000139515; TAA
CAVTSGEEL

SEQ ID NO: 61891 - protein, 9 aa, Homo sapiens
  Table A; Target 61891; HLA-B*46:01; PDX1; ENSG00000139515; TAA
CAVTSGEEL

SEQ ID NO: 61892 - protein, 9 aa, Homo sapiens
  Table A; Target 61892; HLA-B*58:01; PDX1; ENSG00000139515; TAA
CAVTSGEEL

SEQ ID NO: 61893 - protein, 9 aa, Homo sapiens
  Table A; Target 61893; HLA-C*01:02; PDX1; ENSG00000139515; TAA
CAVTSGEEL

SEQ ID NO: 61894 - protein, 9 aa, Homo sapiens
  Table A; Target 61894; HLA-C*02:02; PDX1; ENSG00000139515; TAA
CAVTSGEEL

SEQ ID NO: 61895 - protein, 9 aa, Homo sapiens
  Table A; Target 61895; HLA-C*03:03; PDX1; ENSG00000139515; TAA
CAVTSGEEL

SEQ ID NO: 61896 - protein, 9 aa, Homo sapiens
  Table A; Target 61896; HLA-C*03:04; PDX1; ENSG00000139515; TAA
CAVTSGEEL

SEQ ID NO: 61897 - protein, 9 aa, Homo sapiens
  Table A; Target 61897; HLA-C*05:01; PDX1; ENSG00000139515; TAA
CAVTSGEEL

SEQ ID NO: 61898 - protein, 9 aa, Homo sapiens
  Table A; Target 61898; HLA-C*14:02; PDX1; ENSG00000139515; TAA
CAVTSGEEL

SEQ ID NO: 61899 - protein, 9 aa, Homo sapiens
  Table A; Target 61899; HLA-C*16:02; PDX1; ENSG00000139515; TAA
CAVTSGEEL

SEQ ID NO: 61900 - protein, 8 aa, Homo sapiens
  Table A; Target 61900; HLA-B*51:01; PDX1; ENSG00000139515; TAA
DDPAVAHL

SEQ ID NO: 61901 - protein, 9 aa, Homo sapiens
  Table A; Target 61901; HLA-A*33:01; PDX1; ENSG00000139515; TAA
DPAVAHLHH

SEQ ID NO: 61902 - protein, 10 aa, Homo sapiens
  Table A; Target 61902; HLA-A*25:01; PDX1; ENSG00000139515; TAA
EENKRTRTAY

SEQ ID NO: 61903 - protein, 10 aa, Homo sapiens
  Table A; Target 61903; HLA-B*44:02; PDX1; ENSG00000139515; TAA
EENKRTRTAY

SEQ ID NO: 61904 - protein, 10 aa, Homo sapiens
  Table A; Target 61904; HLA-B*44:03; PDX1; ENSG00000139515; TAA
EENKRTRTAY

SEQ ID NO: 61905 - protein, 10 aa, Homo sapiens
  Table A; Target 61905; HLA-B*44:02; PDX1; ENSG00000139515; TAA
EEPNRVQLPF

SEQ ID NO: 61906 - protein, 10 aa, Homo sapiens
  Table A; Target 61906; HLA-A*30:01; PDX1; ENSG00000139515; TAA
EEQYYAATQL

SEQ ID NO: 61907 - protein, 10 aa, Homo sapiens
  Table A; Target 61907; HLA-B*40:01; PDX1; ENSG00000139515; TAA
EEQYYAATQL

SEQ ID NO: 61908 - protein, 10 aa, Homo sapiens
  Table A; Target 61908; HLA-B*40:02; PDX1; ENSG00000139515; TAA
EEQYYAATQL

SEQ ID NO: 61909 - protein, 10 aa, Homo sapiens
  Table A; Target 61909; HLA-B*44:02; PDX1; ENSG00000139515; TAA
EEQYYAATQL

SEQ ID NO: 61910 - protein, 11 aa, Homo sapiens
  Table A; Target 61910; HLA-B*18:01; PDX1; ENSG00000139515; TAA
EEQYYAATQLY

SEQ ID NO: 61911 - protein, 11 aa, Homo sapiens
  Table A; Target 61911; HLA-B*44:02; PDX1; ENSG00000139515; TAA
EEQYYAATQLY

SEQ ID NO: 61912 - protein, 11 aa, Homo sapiens
  Table A; Target 61912; HLA-B*44:03; PDX1; ENSG00000139515; TAA
EEQYYAATQLY

SEQ ID NO: 61913 - protein, 11 aa, Homo sapiens
  Table A; Target 61913; HLA-A*29:02; PDX1; ENSG00000139515; TAA
EFSASPPACLY

SEQ ID NO: 61914 - protein, 10 aa, Homo sapiens
  Table A; Target 61914; HLA-B*54:01; PDX1; ENSG00000139515; TAA
EGRLPPGLSA

SEQ ID NO: 61915 - protein, 10 aa, Homo sapiens
  Table A; Target 61915; HLA-B*56:01; PDX1; ENSG00000139515; TAA
EGRLPPGLSA

SEQ ID NO: 61916 - protein, 11 aa, Homo sapiens
  Table A; Target 61916; HLA-A*01:01; PDX1; ENSG00000139515; TAA
ELEKEFLFNKY

SEQ ID NO: 61917 - protein, 9 aa, Homo sapiens
  Table A; Target 61917; HLA-A*33:03; PDX1; ENSG00000139515; TAA
EPEENKRTR

SEQ ID NO: 61918 - protein, 9 aa, Homo sapiens
  Table A; Target 61918; HLA-A*25:01; PDX1; ENSG00000139515; TAA
EQYYAATQL

SEQ ID NO: 61919 - protein, 9 aa, Homo sapiens
  Table A; Target 61919; HLA-A*26:01; PDX1; ENSG00000139515; TAA
EQYYAATQL

SEQ ID NO: 61920 - protein, 9 aa, Homo sapiens
  Table A; Target 61920; HLA-B*08:01; PDX1; ENSG00000139515; TAA
EQYYAATQL

SEQ ID NO: 61921 - protein, 9 aa, Homo sapiens
  Table A; Target 61921; HLA-B*13:02; PDX1; ENSG00000139515; TAA
EQYYAATQL

SEQ ID NO: 61922 - protein, 9 aa, Homo sapiens
  Table A; Target 61922; HLA-B*15:01; PDX1; ENSG00000139515; TAA
EQYYAATQL

SEQ ID NO: 61923 - protein, 9 aa, Homo sapiens
  Table A; Target 61923; HLA-B*15:03; PDX1; ENSG00000139515; TAA
EQYYAATQL

SEQ ID NO: 61924 - protein, 9 aa, Homo sapiens
  Table A; Target 61924; HLA-B*27:05; PDX1; ENSG00000139515; TAA
EQYYAATQL

SEQ ID NO: 61925 - protein, 9 aa, Homo sapiens
  Table A; Target 61925; HLA-B*38:01; PDX1; ENSG00000139515; TAA
EQYYAATQL

SEQ ID NO: 61926 - protein, 9 aa, Homo sapiens
  Table A; Target 61926; HLA-B*39:01; PDX1; ENSG00000139515; TAA
EQYYAATQL

SEQ ID NO: 61927 - protein, 9 aa, Homo sapiens
  Table A; Target 61927; HLA-B*40:02; PDX1; ENSG00000139515; TAA
EQYYAATQL

SEQ ID NO: 61928 - protein, 9 aa, Homo sapiens
  Table A; Target 61928; HLA-C*07:04; PDX1; ENSG00000139515; TAA
EQYYAATQL

SEQ ID NO: 61929 - protein, 10 aa, Homo sapiens
  Table A; Target 61929; HLA-A*25:01; PDX1; ENSG00000139515; TAA
EQYYAATQLY

SEQ ID NO: 61930 - protein, 10 aa, Homo sapiens
  Table A; Target 61930; HLA-A*26:01; PDX1; ENSG00000139515; TAA
EQYYAATQLY

SEQ ID NO: 61931 - protein, 10 aa, Homo sapiens
  Table A; Target 61931; HLA-B*15:01; PDX1; ENSG00000139515; TAA
EQYYAATQLY

SEQ ID NO: 61932 - protein, 10 aa, Homo sapiens
  Table A; Target 61932; HLA-B*15:03; PDX1; ENSG00000139515; TAA
EQYYAATQLY

SEQ ID NO: 61933 - protein, 10 aa, Homo sapiens
  Table A; Target 61933; HLA-B*44:02; PDX1; ENSG00000139515; TAA
EQYYAATQLY

SEQ ID NO: 61934 - protein, 10 aa, Homo sapiens
  Table A; Target 61934; HLA-B*44:03; PDX1; ENSG00000139515; TAA
EQYYAATQLY

SEQ ID NO: 61935 - protein, 10 aa, Homo sapiens
  Table A; Target 61935; HLA-C*07:04; PDX1; ENSG00000139515; TAA
EQYYAATQLY

SEQ ID NO: 61936 - protein, 11 aa, Homo sapiens
  Table A; Target 61936; HLA-A*68:01; PDX1; ENSG00000139515; TAA
EQYYAATQLYK

SEQ ID NO: 61937 - protein, 11 aa, Homo sapiens
  Table A; Target 61937; HLA-A*68:02; PDX1; ENSG00000139515; TAA
EVPPLADDPAV

SEQ ID NO: 61938 - protein, 9 aa, Homo sapiens
  Table A; Target 61938; HLA-A*31:01; PDX1; ENSG00000139515; TAA
FLFNKYISR

SEQ ID NO: 61939 - protein, 9 aa, Homo sapiens
  Table A; Target 61939; HLA-A*33:01; PDX1; ENSG00000139515; TAA
FLFNKYISR

SEQ ID NO: 61940 - protein, 10 aa, Homo sapiens
  Table A; Target 61940; HLA-A*02:03; PDX1; ENSG00000139515; TAA
FLFNKYISRP

SEQ ID NO: 61941 - protein, 9 aa, Homo sapiens
  Table A; Target 61941; HLA-B*35:03; PDX1; ENSG00000139515; TAA
FPEGAEPGV

SEQ ID NO: 61942 - protein, 9 aa, Homo sapiens
  Table A; Target 61942; HLA-B*55:01; PDX1; ENSG00000139515; TAA
FPEGAEPGV

SEQ ID NO: 61943 - protein, 10 aa, Homo sapiens
  Table A; Target 61943; HLA-B*35:03; PDX1; ENSG00000139515; TAA
FPEGAEPGVL

SEQ ID NO: 61944 - protein, 8 aa, Homo sapiens
  Table A; Target 61944; HLA-B*35:03; PDX1; ENSG00000139515; TAA
FPGALGAL

SEQ ID NO: 61945 - protein, 9 aa, Homo sapiens
  Table A; Target 61945; HLA-B*54:01; PDX1; ENSG00000139515; TAA
FPWMKSTKA

SEQ ID NO: 61946 - protein, 9 aa, Homo sapiens
  Table A; Target 61946; HLA-B*56:01; PDX1; ENSG00000139515; TAA
FPWMKSTKA

SEQ ID NO: 61947 - protein, 9 aa, Homo sapiens
  Table A; Target 61947; HLA-A*23:01; PDX1; ENSG00000139515; TAA
FQRGPAPEF

SEQ ID NO: 61948 - protein, 9 aa, Homo sapiens
  Table A; Target 61948; HLA-A*24:02; PDX1; ENSG00000139515; TAA
FQRGPAPEF

SEQ ID NO: 61949 - protein, 9 aa, Homo sapiens
  Table A; Target 61949; HLA-A*26:01; PDX1; ENSG00000139515; TAA
FQRGPAPEF

SEQ ID NO: 61950 - protein, 9 aa, Homo sapiens
  Table A; Target 61950; HLA-A*30:02; PDX1; ENSG00000139515; TAA
FQRGPAPEF

SEQ ID NO: 61951 - protein, 9 aa, Homo sapiens
  Table A; Target 61951; HLA-A*31:01; PDX1; ENSG00000139515; TAA
FQRGPAPEF

SEQ ID NO: 61952 - protein, 9 aa, Homo sapiens
  Table A; Target 61952; HLA-A*32:01; PDX1; ENSG00000139515; TAA
FQRGPAPEF

SEQ ID NO: 61953 - protein, 9 aa, Homo sapiens
  Table A; Target 61953; HLA-B*07:02; PDX1; ENSG00000139515; TAA
FQRGPAPEF

SEQ ID NO: 61954 - protein, 9 aa, Homo sapiens
  Table A; Target 61954; HLA-B*08:01; PDX1; ENSG00000139515; TAA
FQRGPAPEF

SEQ ID NO: 61955 - protein, 9 aa, Homo sapiens
  Table A; Target 61955; HLA-B*13:02; PDX1; ENSG00000139515; TAA
FQRGPAPEF

SEQ ID NO: 61956 - protein, 9 aa, Homo sapiens
  Table A; Target 61956; HLA-B*15:01; PDX1; ENSG00000139515; TAA
FQRGPAPEF

SEQ ID NO: 61957 - protein, 9 aa, Homo sapiens
  Table A; Target 61957; HLA-B*15:03; PDX1; ENSG00000139515; TAA
FQRGPAPEF

SEQ ID NO: 61958 - protein, 9 aa, Homo sapiens
  Table A; Target 61958; HLA-B*27:05; PDX1; ENSG00000139515; TAA
FQRGPAPEF

SEQ ID NO: 61959 - protein, 9 aa, Homo sapiens
  Table A; Target 61959; HLA-B*37:01; PDX1; ENSG00000139515; TAA
FQRGPAPEF

SEQ ID NO: 61960 - protein, 9 aa, Homo sapiens
  Table A; Target 61960; HLA-B*40:02; PDX1; ENSG00000139515; TAA
FQRGPAPEF

SEQ ID NO: 61961 - protein, 9 aa, Homo sapiens
  Table A; Target 61961; HLA-B*46:01; PDX1; ENSG00000139515; TAA
FQRGPAPEF

SEQ ID NO: 61962 - protein, 9 aa, Homo sapiens
  Table A; Target 61962; HLA-B*57:01; PDX1; ENSG00000139515; TAA
FQRGPAPEF

SEQ ID NO: 61963 - protein, 9 aa, Homo sapiens
  Table A; Target 61963; HLA-B*58:01; PDX1; ENSG00000139515; TAA
FQRGPAPEF

SEQ ID NO: 61964 - protein, 9 aa, Homo sapiens
  Table A; Target 61964; HLA-C*01:02; PDX1; ENSG00000139515; TAA
FQRGPAPEF

SEQ ID NO: 61965 - protein, 9 aa, Homo sapiens
  Table A; Target 61965; HLA-C*02:02; PDX1; ENSG00000139515; TAA
FQRGPAPEF

SEQ ID NO: 61966 - protein, 9 aa, Homo sapiens
  Table A; Target 61966; HLA-C*03:03; PDX1; ENSG00000139515; TAA
FQRGPAPEF

SEQ ID NO: 61967 - protein, 9 aa, Homo sapiens
  Table A; Target 61967; HLA-C*03:04; PDX1; ENSG00000139515; TAA
FQRGPAPEF

SEQ ID NO: 61968 - protein, 9 aa, Homo sapiens
  Table A; Target 61968; HLA-C*06:02; PDX1; ENSG00000139515; TAA
FQRGPAPEF

SEQ ID NO: 61969 - protein, 9 aa, Homo sapiens
  Table A; Target 61969; HLA-C*07:02; PDX1; ENSG00000139515; TAA
FQRGPAPEF

SEQ ID NO: 61970 - protein, 9 aa, Homo sapiens
  Table A; Target 61970; HLA-C*07:04; PDX1; ENSG00000139515; TAA
FQRGPAPEF

SEQ ID NO: 61971 - protein, 9 aa, Homo sapiens
  Table A; Target 61971; HLA-C*12:03; PDX1; ENSG00000139515; TAA
FQRGPAPEF

SEQ ID NO: 61972 - protein, 9 aa, Homo sapiens
  Table A; Target 61972; HLA-C*14:02; PDX1; ENSG00000139515; TAA
FQRGPAPEF

SEQ ID NO: 61973 - protein, 9 aa, Homo sapiens
  Table A; Target 61973; HLA-C*16:01; PDX1; ENSG00000139515; TAA
FQRGPAPEF

SEQ ID NO: 61974 - protein, 9 aa, Homo sapiens
  Table A; Target 61974; HLA-C*16:04; PDX1; ENSG00000139515; TAA
FQRGPAPEF

SEQ ID NO: 61975 - protein, 9 aa, Homo sapiens
  Table A; Target 61975; HLA-C*02:02; PDX1; ENSG00000139515; TAA
FSASPPACL

SEQ ID NO: 61976 - protein, 9 aa, Homo sapiens
  Table A; Target 61976; HLA-C*03:03; PDX1; ENSG00000139515; TAA
FSASPPACL

SEQ ID NO: 61977 - protein, 9 aa, Homo sapiens
  Table A; Target 61977; HLA-C*03:04; PDX1; ENSG00000139515; TAA
FSASPPACL

SEQ ID NO: 61978 - protein, 9 aa, Homo sapiens
  Table A; Target 61978; HLA-C*05:01; PDX1; ENSG00000139515; TAA
FSASPPACL

SEQ ID NO: 61979 - protein, 9 aa, Homo sapiens
  Table A; Target 61979; HLA-C*16:01; PDX1; ENSG00000139515; TAA
FSASPPACL

SEQ ID NO: 61980 - protein, 10 aa, Homo sapiens
  Table A; Target 61980; HLA-A*01:01; PDX1; ENSG00000139515; TAA
FSASPPACLY

SEQ ID NO: 61981 - protein, 10 aa, Homo sapiens
  Table A; Target 61981; HLA-A*26:01; PDX1; ENSG00000139515; TAA
FSASPPACLY

SEQ ID NO: 61982 - protein, 10 aa, Homo sapiens
  Table A; Target 61982; HLA-A*29:02; PDX1; ENSG00000139515; TAA
FSASPPACLY

SEQ ID NO: 61983 - protein, 10 aa, Homo sapiens
  Table A; Target 61983; HLA-A*30:02; PDX1; ENSG00000139515; TAA
FSASPPACLY

SEQ ID NO: 61984 - protein, 10 aa, Homo sapiens
  Table A; Target 61984; HLA-C*02:02; PDX1; ENSG00000139515; TAA
FSASPPACLY

SEQ ID NO: 61985 - protein, 9 aa, Homo sapiens
  Table A; Target 61985; HLA-B*46:01; PDX1; ENSG00000139515; TAA
GAVPPAAPV

SEQ ID NO: 61986 - protein, 9 aa, Homo sapiens
  Table A; Target 61986; HLA-C*02:02; PDX1; ENSG00000139515; TAA
GAVPPAAPV

SEQ ID NO: 61987 - protein, 9 aa, Homo sapiens
  Table A; Target 61987; HLA-C*03:03; PDX1; ENSG00000139515; TAA
GAVPPAAPV

SEQ ID NO: 61988 - protein, 9 aa, Homo sapiens
  Table A; Target 61988; HLA-C*03:04; PDX1; ENSG00000139515; TAA
GAVPPAAPV

SEQ ID NO: 61989 - protein, 11 aa, Homo sapiens
  Table A; Target 61989; HLA-B*56:01; PDX1; ENSG00000139515; TAA
GAVPPAAPVAA

SEQ ID NO: 61990 - protein, 11 aa, Homo sapiens
  Table A; Target 61990; HLA-A*03:02; PDX1; ENSG00000139515; TAA
GAYAAEPEENK

SEQ ID NO: 61991 - protein, 11 aa, Homo sapiens
  Table A; Target 61991; HLA-A*11:01; PDX1; ENSG00000139515; TAA
GAYAAEPEENK

SEQ ID NO: 61992 - protein, 11 aa, Homo sapiens
  Table A; Target 61992; HLA-B*27:02; PDX1; ENSG00000139515; TAA
GAYAAEPEENK

SEQ ID NO: 61993 - protein, 11 aa, Homo sapiens
  Table A; Target 61993; HLA-A*30:01; PDX1; ENSG00000139515; TAA
GEEQYYAATQL

SEQ ID NO: 61994 - protein, 11 aa, Homo sapiens
  Table A; Target 61994; HLA-B*40:01; PDX1; ENSG00000139515; TAA
GEEQYYAATQL

SEQ ID NO: 61995 - protein, 11 aa, Homo sapiens
  Table A; Target 61995; HLA-A*02:03; PDX1; ENSG00000139515; TAA
GLSASPQPSSV

SEQ ID NO: 61996 - protein, 8 aa, Homo sapiens
  Table A; Target 61996; HLA-B*56:01; PDX1; ENSG00000139515; TAA
GPAPEFSA

SEQ ID NO: 61997 - protein, 9 aa, Homo sapiens
  Table A; Target 61997; HLA-B*56:01; PDX1; ENSG00000139515; TAA
GPFPEGAEP

SEQ ID NO: 61998 - protein, 8 aa, Homo sapiens
  Table A; Target 61998; HLA-A*30:02; PDX1; ENSG00000139515; TAA
GQWAGGAY

SEQ ID NO: 61999 - protein, 8 aa, Homo sapiens
  Table A; Target 61999; HLA-B*15:01; PDX1; ENSG00000139515; TAA
GQWAGGAY

SEQ ID NO: 62000 - protein, 8 aa, Homo sapiens
  Table A; Target 62000; HLA-B*15:03; PDX1; ENSG00000139515; TAA
GQWAGGAY

SEQ ID NO: 62001 - protein, 8 aa, Homo sapiens
  Table A; Target 62001; HLA-B*39:01; PDX1; ENSG00000139515; TAA
GQWAGGAY

SEQ ID NO: 62002 - protein, 8 aa, Homo sapiens
  Table A; Target 62002; HLA-C*07:04; PDX1; ENSG00000139515; TAA
GQWAGGAY

SEQ ID NO: 62003 - protein, 8 aa, Homo sapiens
  Table A; Target 62003; HLA-C*14:02; PDX1; ENSG00000139515; TAA
GQWAGGAY

SEQ ID NO: 62004 - protein, 8 aa, Homo sapiens
  Table A; Target 62004; HLA-C*16:04; PDX1; ENSG00000139515; TAA
GQWAGGAY

SEQ ID NO: 62005 - protein, 9 aa, Homo sapiens
  Table A; Target 62005; HLA-B*13:02; PDX1; ENSG00000139515; TAA
GQWAGGAYA

SEQ ID NO: 62006 - protein, 9 aa, Homo sapiens
  Table A; Target 62006; HLA-B*15:01; PDX1; ENSG00000139515; TAA
GQWAGGAYA

SEQ ID NO: 62007 - protein, 9 aa, Homo sapiens
  Table A; Target 62007; HLA-B*15:03; PDX1; ENSG00000139515; TAA
GQWAGGAYA

SEQ ID NO: 62008 - protein, 10 aa, Homo sapiens
  Table A; Target 62008; HLA-A*30:01; PDX1; ENSG00000139515; TAA
GQWAGGAYAA

SEQ ID NO: 62009 - protein, 10 aa, Homo sapiens
  Table A; Target 62009; HLA-B*13:02; PDX1; ENSG00000139515; TAA
GQWAGGAYAA

SEQ ID NO: 62010 - protein, 10 aa, Homo sapiens
  Table A; Target 62010; HLA-B*27:05; PDX1; ENSG00000139515; TAA
GQWAGGAYAA

SEQ ID NO: 62011 - protein, 9 aa, Homo sapiens
  Table A; Target 62011; HLA-B*27:05; PDX1; ENSG00000139515; TAA
GRLPPGLSA

SEQ ID NO: 62012 - protein, 9 aa, Homo sapiens
  Table A; Target 62012; HLA-C*16:04; PDX1; ENSG00000139515; TAA
GRLPPGLSA

SEQ ID NO: 62013 - protein, 11 aa, Homo sapiens
  Table A; Target 62013; HLA-B*27:05; PDX1; ENSG00000139515; TAA
GRLPPGLSASP

SEQ ID NO: 62014 - protein, 9 aa, Homo sapiens
  Table A; Target 62014; HLA-B*27:05; PDX1; ENSG00000139515; TAA
GRQPPPPPP

SEQ ID NO: 62015 - protein, 9 aa, Homo sapiens
  Table A; Target 62015; HLA-C*06:02; PDX1; ENSG00000139515; TAA
GRQPPPPPP

SEQ ID NO: 62016 - protein, 9 aa, Homo sapiens
  Table A; Target 62016; HLA-A*01:01; PDX1; ENSG00000139515; TAA
GSPPDISPY

SEQ ID NO: 62017 - protein, 9 aa, Homo sapiens
  Table A; Target 62017; HLA-A*30:02; PDX1; ENSG00000139515; TAA
GSPPDISPY

SEQ ID NO: 62018 - protein, 9 aa, Homo sapiens
  Table A; Target 62018; HLA-A*02:03; PDX1; ENSG00000139515; TAA
GTAVGGGGV

SEQ ID NO: 62019 - protein, 10 aa, Homo sapiens
  Table A; Target 62019; HLA-B*39:01; PDX1; ENSG00000139515; TAA
GTAVGGGGVA

SEQ ID NO: 62020 - protein, 9 aa, Homo sapiens
  Table A; Target 62020; HLA-A*02:01; PDX1; ENSG00000139515; TAA
GVLEEPNRV

SEQ ID NO: 62021 - protein, 8 aa, Homo sapiens
  Table A; Target 62021; HLA-B*08:01; PDX1; ENSG00000139515; TAA
HHHLPAQL

SEQ ID NO: 62022 - protein, 8 aa, Homo sapiens
  Table A; Target 62022; HLA-B*38:01; PDX1; ENSG00000139515; TAA
HHHLPAQL

SEQ ID NO: 62023 - protein, 9 aa, Homo sapiens
  Table A; Target 62023; HLA-B*38:01; PDX1; ENSG00000139515; TAA
HHLPAQLAL

SEQ ID NO: 62024 - protein, 9 aa, Homo sapiens
  Table A; Target 62024; HLA-B*39:01; PDX1; ENSG00000139515; TAA
HHLPAQLAL

SEQ ID NO: 62025 - protein, 9 aa, Homo sapiens
  Table A; Target 62025; HLA-A*31:01; PDX1; ENSG00000139515; TAA
HIKIWFQNR

SEQ ID NO: 62026 - protein, 9 aa, Homo sapiens
  Table A; Target 62026; HLA-B*54:01; PDX1; ENSG00000139515; TAA
HPFPGALGA

SEQ ID NO: 62027 - protein, 9 aa, Homo sapiens
  Table A; Target 62027; HLA-B*55:01; PDX1; ENSG00000139515; TAA
HPFPGALGA

SEQ ID NO: 62028 - protein, 9 aa, Homo sapiens
  Table A; Target 62028; HLA-B*56:01; PDX1; ENSG00000139515; TAA
HPFPGALGA

SEQ ID NO: 62029 - protein, 10 aa, Homo sapiens
  Table A; Target 62029; HLA-B*07:02; PDX1; ENSG00000139515; TAA
HPFPGALGAL

SEQ ID NO: 62030 - protein, 10 aa, Homo sapiens
  Table A; Target 62030; HLA-B*35:01; PDX1; ENSG00000139515; TAA
HPFPGALGAL

SEQ ID NO: 62031 - protein, 10 aa, Homo sapiens
  Table A; Target 62031; HLA-B*35:03; PDX1; ENSG00000139515; TAA
HPFPGALGAL

SEQ ID NO: 62032 - protein, 10 aa, Homo sapiens
  Table A; Target 62032; HLA-B*56:01; PDX1; ENSG00000139515; TAA
HPFPGALGAL

SEQ ID NO: 62033 - protein, 10 aa, Homo sapiens
  Table A; Target 62033; HLA-C*07:02; PDX1; ENSG00000139515; TAA
HPFPGALGAL

SEQ ID NO: 62034 - protein, 9 aa, Homo sapiens
  Table A; Target 62034; HLA-B*57:01; PDX1; ENSG00000139515; TAA
KAHAWKGQW

SEQ ID NO: 62035 - protein, 8 aa, Homo sapiens
  Table A; Target 62035; HLA-B*18:01; PDX1; ENSG00000139515; TAA
KEFLFNKY

SEQ ID NO: 62036 - protein, 8 aa, Homo sapiens
  Table A; Target 62036; HLA-B*37:01; PDX1; ENSG00000139515; TAA
KEFLFNKY

SEQ ID NO: 62037 - protein, 8 aa, Homo sapiens
  Table A; Target 62037; HLA-B*44:02; PDX1; ENSG00000139515; TAA
KEFLFNKY

SEQ ID NO: 62038 - protein, 9 aa, Homo sapiens
  Table A; Target 62038; HLA-B*44:02; PDX1; ENSG00000139515; TAA
KEFLFNKYI

SEQ ID NO: 62039 - protein, 9 aa, Homo sapiens
  Table A; Target 62039; HLA-B*44:03; PDX1; ENSG00000139515; TAA
KEFLFNKYI

SEQ ID NO: 62040 - protein, 9 aa, Homo sapiens
  Table A; Target 62040; HLA-A*30:02; PDX1; ENSG00000139515; TAA
KGQWAGGAY

SEQ ID NO: 62041 - protein, 9 aa, Homo sapiens
  Table A; Target 62041; HLA-B*15:01; PDX1; ENSG00000139515; TAA
KGQWAGGAY

SEQ ID NO: 62042 - protein, 9 aa, Homo sapiens
  Table A; Target 62042; HLA-B*46:01; PDX1; ENSG00000139515; TAA
KGQWAGGAY

SEQ ID NO: 62043 - protein, 8 aa, Homo sapiens
  Table A; Target 62043; HLA-A*32:01; PDX1; ENSG00000139515; TAA
KSTKAHAW

SEQ ID NO: 62044 - protein, 8 aa, Homo sapiens
  Table A; Target 62044; HLA-B*57:01; PDX1; ENSG00000139515; TAA
KSTKAHAW

SEQ ID NO: 62045 - protein, 8 aa, Homo sapiens
  Table A; Target 62045; HLA-B*58:01; PDX1; ENSG00000139515; TAA
KSTKAHAW

SEQ ID NO: 62046 - protein, 8 aa, Homo sapiens
  Table A; Target 62046; HLA-C*05:01; PDX1; ENSG00000139515; TAA
LADDPAVA

SEQ ID NO: 62047 - protein, 9 aa, Homo sapiens
  Table A; Target 62047; HLA-C*03:03; PDX1; ENSG00000139515; TAA
LADDPAVAH

SEQ ID NO: 62048 - protein, 9 aa, Homo sapiens
  Table A; Target 62048; HLA-C*03:04; PDX1; ENSG00000139515; TAA
LADDPAVAH

SEQ ID NO: 62049 - protein, 9 aa, Homo sapiens
  Table A; Target 62049; HLA-C*05:01; PDX1; ENSG00000139515; TAA
LADDPAVAH

SEQ ID NO: 62050 - protein, 10 aa, Homo sapiens
  Table A; Target 62050; HLA-A*02:07; PDX1; ENSG00000139515; TAA
LADDPAVAHL

SEQ ID NO: 62051 - protein, 10 aa, Homo sapiens
  Table A; Target 62051; HLA-B*38:01; PDX1; ENSG00000139515; TAA
LADDPAVAHL

SEQ ID NO: 62052 - protein, 10 aa, Homo sapiens
  Table A; Target 62052; HLA-B*39:01; PDX1; ENSG00000139515; TAA
LADDPAVAHL

SEQ ID NO: 62053 - protein, 10 aa, Homo sapiens
  Table A; Target 62053; HLA-B*40:01; PDX1; ENSG00000139515; TAA
LADDPAVAHL

SEQ ID NO: 62054 - protein, 10 aa, Homo sapiens
  Table A; Target 62054; HLA-C*03:03; PDX1; ENSG00000139515; TAA
LADDPAVAHL

SEQ ID NO: 62055 - protein, 10 aa, Homo sapiens
  Table A; Target 62055; HLA-C*03:04; PDX1; ENSG00000139515; TAA
LADDPAVAHL

SEQ ID NO: 62056 - protein, 10 aa, Homo sapiens
  Table A; Target 62056; HLA-C*05:01; PDX1; ENSG00000139515; TAA
LADDPAVAHL

SEQ ID NO: 62057 - protein, 8 aa, Homo sapiens
  Table A; Target 62057; HLA-B*54:01; PDX1; ENSG00000139515; TAA
LALPHPPA

SEQ ID NO: 62058 - protein, 9 aa, Homo sapiens
  Table A; Target 62058; HLA-A*02:01; PDX1; ENSG00000139515; TAA
LALPPPPPP

SEQ ID NO: 62059 - protein, 9 aa, Homo sapiens
  Table A; Target 62059; HLA-B*27:05; PDX1; ENSG00000139515; TAA
LALPPPPPP

SEQ ID NO: 62060 - protein, 9 aa, Homo sapiens
  Table A; Target 62060; HLA-B*39:01; PDX1; ENSG00000139515; TAA
LALPPPPPP

SEQ ID NO: 62061 - protein, 9 aa, Homo sapiens
  Table A; Target 62061; HLA-B*40:02; PDX1; ENSG00000139515; TAA
LALPPPPPP

SEQ ID NO: 62062 - protein, 9 aa, Homo sapiens
  Table A; Target 62062; HLA-B*46:01; PDX1; ENSG00000139515; TAA
LALPPPPPP

SEQ ID NO: 62063 - protein, 9 aa, Homo sapiens
  Table A; Target 62063; HLA-B*54:01; PDX1; ENSG00000139515; TAA
LALPPPPPP

SEQ ID NO: 62064 - protein, 9 aa, Homo sapiens
  Table A; Target 62064; HLA-B*56:01; PDX1; ENSG00000139515; TAA
LALPPPPPP

SEQ ID NO: 62065 - protein, 9 aa, Homo sapiens
  Table A; Target 62065; HLA-C*03:03; PDX1; ENSG00000139515; TAA
LALPPPPPP

SEQ ID NO: 62066 - protein, 9 aa, Homo sapiens
  Table A; Target 62066; HLA-C*03:04; PDX1; ENSG00000139515; TAA
LALPPPPPP

SEQ ID NO: 62067 - protein, 9 aa, Homo sapiens
  Table A; Target 62067; HLA-C*04:01; PDX1; ENSG00000139515; TAA
LALPPPPPP

SEQ ID NO: 62068 - protein, 9 aa, Homo sapiens
  Table A; Target 62068; HLA-C*06:02; PDX1; ENSG00000139515; TAA
LALPPPPPP

SEQ ID NO: 62069 - protein, 9 aa, Homo sapiens
  Table A; Target 62069; HLA-C*07:02; PDX1; ENSG00000139515; TAA
LALPPPPPP

SEQ ID NO: 62070 - protein, 10 aa, Homo sapiens
  Table A; Target 62070; HLA-B*54:01; PDX1; ENSG00000139515; TAA
LALPPPPPPG

SEQ ID NO: 62071 - protein, 10 aa, Homo sapiens
  Table A; Target 62071; HLA-B*27:02; PDX1; ENSG00000139515; TAA
LAVMLNLTER

SEQ ID NO: 62072 - protein, 9 aa, Homo sapiens
  Table A; Target 62072; HLA-A*30:01; PDX1; ENSG00000139515; TAA
LEEPNRVQL

SEQ ID NO: 62073 - protein, 9 aa, Homo sapiens
  Table A; Target 62073; HLA-B*37:01; PDX1; ENSG00000139515; TAA
LEEPNRVQL

SEQ ID NO: 62074 - protein, 9 aa, Homo sapiens
  Table A; Target 62074; HLA-B*40:01; PDX1; ENSG00000139515; TAA
LEEPNRVQL

SEQ ID NO: 62075 - protein, 9 aa, Homo sapiens
  Table A; Target 62075; HLA-B*49:01; PDX1; ENSG00000139515; TAA
LEEPNRVQL

SEQ ID NO: 62076 - protein, 10 aa, Homo sapiens
  Table A; Target 62076; HLA-B*44:02; PDX1; ENSG00000139515; TAA
LEKEFLFNKY

SEQ ID NO: 62077 - protein, 8 aa, Homo sapiens
  Table A; Target 62077; HLA-B*37:01; PDX1; ENSG00000139515; TAA
LELEKEFL

SEQ ID NO: 62078 - protein, 9 aa, Homo sapiens
  Table A; Target 62078; HLA-A*24:02; PDX1; ENSG00000139515; TAA
LELEKEFLF

SEQ ID NO: 62079 - protein, 9 aa, Homo sapiens
  Table A; Target 62079; HLA-B*37:01; PDX1; ENSG00000139515; TAA
LELEKEFLF

SEQ ID NO: 62080 - protein, 9 aa, Homo sapiens
  Table A; Target 62080; HLA-B*44:02; PDX1; ENSG00000139515; TAA
LELEKEFLF

SEQ ID NO: 62081 - protein, 9 aa, Homo sapiens
  Table A; Target 62081; HLA-B*44:03; PDX1; ENSG00000139515; TAA
LELEKEFLF

SEQ ID NO: 62082 - protein, 9 aa, Homo sapiens
  Table A; Target 62082; HLA-B*57:01; PDX1; ENSG00000139515; TAA
LELEKEFLF

SEQ ID NO: 62083 - protein, 9 aa, Homo sapiens
  Table A; Target 62083; HLA-A*30:01; PDX1; ENSG00000139515; TAA
LEQGSPPDI

SEQ ID NO: 62084 - protein, 9 aa, Homo sapiens
  Table A; Target 62084; HLA-B*39:01; PDX1; ENSG00000139515; TAA
LEQGSPPDI

SEQ ID NO: 62085 - protein, 9 aa, Homo sapiens
  Table A; Target 62085; HLA-B*40:01; PDX1; ENSG00000139515; TAA
LEQGSPPDI

SEQ ID NO: 62086 - protein, 9 aa, Homo sapiens
  Table A; Target 62086; HLA-B*44:02; PDX1; ENSG00000139515; TAA
LEQGSPPDI

SEQ ID NO: 62087 - protein, 9 aa, Homo sapiens
  Table A; Target 62087; HLA-B*49:01; PDX1; ENSG00000139515; TAA
LEQGSPPDI

SEQ ID NO: 62088 - protein, 9 aa, Homo sapiens
  Table A; Target 62088; HLA-C*16:04; PDX1; ENSG00000139515; TAA
LEQGSPPDI

SEQ ID NO: 62089 - protein, 9 aa, Homo sapiens
  Table A; Target 62089; HLA-B*35:01; PDX1; ENSG00000139515; TAA
LPAQLALPH

SEQ ID NO: 62090 - protein, 11 aa, Homo sapiens
  Table A; Target 62090; HLA-B*54:01; PDX1; ENSG00000139515; TAA
LPAQLALPHPP

SEQ ID NO: 62091 - protein, 11 aa, Homo sapiens
  Table A; Target 62091; HLA-B*54:01; PDX1; ENSG00000139515; TAA
LPFPWMKSTKA

SEQ ID NO: 62092 - protein, 9 aa, Homo sapiens
  Table A; Target 62092; HLA-B*07:02; PDX1; ENSG00000139515; TAA
LPHPPAGPF

SEQ ID NO: 62093 - protein, 9 aa, Homo sapiens
  Table A; Target 62093; HLA-B*35:01; PDX1; ENSG00000139515; TAA
LPHPPAGPF

SEQ ID NO: 62094 - protein, 9 aa, Homo sapiens
  Table A; Target 62094; HLA-B*35:03; PDX1; ENSG00000139515; TAA
LPHPPAGPF

SEQ ID NO: 62095 - protein, 9 aa, Homo sapiens
  Table A; Target 62095; HLA-B*46:01; PDX1; ENSG00000139515; TAA
LPHPPAGPF

SEQ ID NO: 62096 - protein, 9 aa, Homo sapiens
  Table A; Target 62096; HLA-B*51:01; PDX1; ENSG00000139515; TAA
LPHPPAGPF

SEQ ID NO: 62097 - protein, 9 aa, Homo sapiens
  Table A; Target 62097; HLA-B*54:01; PDX1; ENSG00000139515; TAA
LPHPPAGPF

SEQ ID NO: 62098 - protein, 9 aa, Homo sapiens
  Table A; Target 62098; HLA-C*03:04; PDX1; ENSG00000139515; TAA
LPHPPAGPF

SEQ ID NO: 62099 - protein, 9 aa, Homo sapiens
  Table A; Target 62099; HLA-C*04:01; PDX1; ENSG00000139515; TAA
LPHPPAGPF

SEQ ID NO: 62100 - protein, 9 aa, Homo sapiens
  Table A; Target 62100; HLA-C*07:02; PDX1; ENSG00000139515; TAA
LPHPPAGPF

SEQ ID NO: 62101 - protein, 10 aa, Homo sapiens
  Table A; Target 62101; HLA-B*54:01; PDX1; ENSG00000139515; TAA
LPHPPAGPFP

SEQ ID NO: 62102 - protein, 9 aa, Homo sapiens
  Table A; Target 62102; HLA-B*51:01; PDX1; ENSG00000139515; TAA
LPPPPPPGG

SEQ ID NO: 62103 - protein, 9 aa, Homo sapiens
  Table A; Target 62103; HLA-B*54:01; PDX1; ENSG00000139515; TAA
LPPPPPPGG

SEQ ID NO: 62104 - protein, 9 aa, Homo sapiens
  Table A; Target 62104; HLA-B*56:01; PDX1; ENSG00000139515; TAA
LPPPPPPGG

SEQ ID NO: 62105 - protein, 11 aa, Homo sapiens
  Table A; Target 62105; HLA-A*02:07; PDX1; ENSG00000139515; TAA
LPPPPPPGGAV

SEQ ID NO: 62106 - protein, 11 aa, Homo sapiens
  Table A; Target 62106; HLA-B*51:01; PDX1; ENSG00000139515; TAA
LPPPPPPGGAV

SEQ ID NO: 62107 - protein, 11 aa, Homo sapiens
  Table A; Target 62107; HLA-B*54:01; PDX1; ENSG00000139515; TAA
LPPPPPPGGAV

SEQ ID NO: 62108 - protein, 11 aa, Homo sapiens
  Table A; Target 62108; HLA-B*56:01; PDX1; ENSG00000139515; TAA
LPPPPPPGGAV

SEQ ID NO: 62109 - protein, 9 aa, Homo sapiens
  Table A; Target 62109; HLA-B*57:01; PDX1; ENSG00000139515; TAA
LTERHIKIW

SEQ ID NO: 62110 - protein, 10 aa, Homo sapiens
  Table A; Target 62110; HLA-A*31:01; PDX1; ENSG00000139515; TAA
LYKDPCAFQR

SEQ ID NO: 62111 - protein, 10 aa, Homo sapiens
  Table A; Target 62111; HLA-A*33:01; PDX1; ENSG00000139515; TAA
LYKDPCAFQR

SEQ ID NO: 62112 - protein, 10 aa, Homo sapiens
  Table A; Target 62112; HLA-A*33:03; PDX1; ENSG00000139515; TAA
LYKDPCAFQR

SEQ ID NO: 62113 - protein, 9 aa, Homo sapiens
  Table A; Target 62113; HLA-B*54:01; PDX1; ENSG00000139515; TAA
MGRQPPPPP

SEQ ID NO: 62114 - protein, 10 aa, Homo sapiens
  Table A; Target 62114; HLA-B*54:01; PDX1; ENSG00000139515; TAA
MGRQPPPPPP

SEQ ID NO: 62115 - protein, 8 aa, Homo sapiens
  Table A; Target 62115; HLA-C*07:01; PDX1; ENSG00000139515; TAA
MNGEEQYY

SEQ ID NO: 62116 - protein, 8 aa, Homo sapiens
  Table A; Target 62116; HLA-B*56:01; PDX1; ENSG00000139515; TAA
PPAAPVAA

SEQ ID NO: 62117 - protein, 9 aa, Homo sapiens
  Table A; Target 62117; HLA-A*68:01; PDX1; ENSG00000139515; TAA
PPAAPVAAR

SEQ ID NO: 62118 - protein, 9 aa, Homo sapiens
  Table A; Target 62118; HLA-C*07:06; PDX1; ENSG00000139515; TAA
PPAAPVAAR

SEQ ID NO: 62119 - protein, 9 aa, Homo sapiens
  Table A; Target 62119; HLA-A*24:02; PDX1; ENSG00000139515; TAA
PPPPPPHPF

SEQ ID NO: 62120 - protein, 10 aa, Homo sapiens
  Table A; Target 62120; HLA-A*01:01; PDX1; ENSG00000139515; TAA
QGSPPDISPY

SEQ ID NO: 62121 - protein, 10 aa, Homo sapiens
  Table A; Target 62121; HLA-A*30:02; PDX1; ENSG00000139515; TAA
QGSPPDISPY

SEQ ID NO: 62122 - protein, 10 aa, Homo sapiens
  Table A; Target 62122; HLA-B*27:02; PDX1; ENSG00000139515; TAA
QGSPPDISPY

SEQ ID NO: 62123 - protein, 9 aa, Homo sapiens
  Table A; Target 62123; HLA-B*54:01; PDX1; ENSG00000139515; TAA
QLALPHPPA

SEQ ID NO: 62124 - protein, 9 aa, Homo sapiens
  Table A; Target 62124; HLA-B*56:01; PDX1; ENSG00000139515; TAA
QLALPHPPA

SEQ ID NO: 62125 - protein, 9 aa, Homo sapiens
  Table A; Target 62125; HLA-C*06:02; PDX1; ENSG00000139515; TAA
QLALPHPPA

SEQ ID NO: 62126 - protein, 10 aa, Homo sapiens
  Table A; Target 62126; HLA-A*02:01; PDX1; ENSG00000139515; TAA
QLLELEKEFL

SEQ ID NO: 62127 - protein, 10 aa, Homo sapiens
  Table A; Target 62127; HLA-A*02:04; PDX1; ENSG00000139515; TAA
QLLELEKEFL

SEQ ID NO: 62128 - protein, 10 aa, Homo sapiens
  Table A; Target 62128; HLA-A*02:07; PDX1; ENSG00000139515; TAA
QLLELEKEFL

SEQ ID NO: 62129 - protein, 11 aa, Homo sapiens
  Table A; Target 62129; HLA-A*02:01; PDX1; ENSG00000139515; TAA
QLLELEKEFLF

SEQ ID NO: 62130 - protein, 11 aa, Homo sapiens
  Table A; Target 62130; HLA-A*02:04; PDX1; ENSG00000139515; TAA
QLLELEKEFLF

SEQ ID NO: 62131 - protein, 11 aa, Homo sapiens
  Table A; Target 62131; HLA-A*02:07; PDX1; ENSG00000139515; TAA
QLLELEKEFLF

SEQ ID NO: 62132 - protein, 11 aa, Homo sapiens
  Table A; Target 62132; HLA-A*24:02; PDX1; ENSG00000139515; TAA
QLLELEKEFLF

SEQ ID NO: 62133 - protein, 11 aa, Homo sapiens
  Table A; Target 62133; HLA-A*29:02; PDX1; ENSG00000139515; TAA
QLLELEKEFLF

SEQ ID NO: 62134 - protein, 9 aa, Homo sapiens
  Table A; Target 62134; HLA-A*03:01; PDX1; ENSG00000139515; TAA
QLYKDPCAF

SEQ ID NO: 62135 - protein, 9 aa, Homo sapiens
  Table A; Target 62135; HLA-A*03:02; PDX1; ENSG00000139515; TAA
QLYKDPCAF

SEQ ID NO: 62136 - protein, 9 aa, Homo sapiens
  Table A; Target 62136; HLA-A*32:01; PDX1; ENSG00000139515; TAA
QLYKDPCAF

SEQ ID NO: 62137 - protein, 9 aa, Homo sapiens
  Table A; Target 62137; HLA-B*08:01; PDX1; ENSG00000139515; TAA
QLYKDPCAF

SEQ ID NO: 62138 - protein, 9 aa, Homo sapiens
  Table A; Target 62138; HLA-B*15:01; PDX1; ENSG00000139515; TAA
QLYKDPCAF

SEQ ID NO: 62139 - protein, 9 aa, Homo sapiens
  Table A; Target 62139; HLA-B*15:03; PDX1; ENSG00000139515; TAA
QLYKDPCAF

SEQ ID NO: 62140 - protein, 9 aa, Homo sapiens
  Table A; Target 62140; HLA-B*37:01; PDX1; ENSG00000139515; TAA
QLYKDPCAF

SEQ ID NO: 62141 - protein, 9 aa, Homo sapiens
  Table A; Target 62141; HLA-B*46:01; PDX1; ENSG00000139515; TAA
QLYKDPCAF

SEQ ID NO: 62142 - protein, 9 aa, Homo sapiens
  Table A; Target 62142; HLA-C*07:04; PDX1; ENSG00000139515; TAA
QLYKDPCAF

SEQ ID NO: 62143 - protein, 9 aa, Homo sapiens
  Table A; Target 62143; HLA-C*04:01; PDX1; ENSG00000139515; TAA
QPPPPPPHP

SEQ ID NO: 62144 - protein, 10 aa, Homo sapiens
  Table A; Target 62144; HLA-A*24:02; PDX1; ENSG00000139515; TAA
QPPPPPPHPF

SEQ ID NO: 62145 - protein, 10 aa, Homo sapiens
  Table A; Target 62145; HLA-A*29:02; PDX1; ENSG00000139515; TAA
QPPPPPPHPF

SEQ ID NO: 62146 - protein, 10 aa, Homo sapiens
  Table A; Target 62146; HLA-B*07:02; PDX1; ENSG00000139515; TAA
QPPPPPPHPF

SEQ ID NO: 62147 - protein, 10 aa, Homo sapiens
  Table A; Target 62147; HLA-B*35:01; PDX1; ENSG00000139515; TAA
QPPPPPPHPF

SEQ ID NO: 62148 - protein, 10 aa, Homo sapiens
  Table A; Target 62148; HLA-B*56:01; PDX1; ENSG00000139515; TAA
QPPPPPPHPF

SEQ ID NO: 62149 - protein, 10 aa, Homo sapiens
  Table A; Target 62149; HLA-C*04:01; PDX1; ENSG00000139515; TAA
QPPPPPPHPF

SEQ ID NO: 62150 - protein, 10 aa, Homo sapiens
  Table A; Target 62150; HLA-C*07:02; PDX1; ENSG00000139515; TAA
QPPPPPPHPF

SEQ ID NO: 62151 - protein, 8 aa, Homo sapiens
  Table A; Target 62151; HLA-B*27:02; PDX1; ENSG00000139515; TAA
QRGPAPEF

SEQ ID NO: 62152 - protein, 8 aa, Homo sapiens
  Table A; Target 62152; HLA-B*27:05; PDX1; ENSG00000139515; TAA
QRGPAPEF

SEQ ID NO: 62153 - protein, 8 aa, Homo sapiens
  Table A; Target 62153; HLA-B*38:01; PDX1; ENSG00000139515; TAA
QRGPAPEF

SEQ ID NO: 62154 - protein, 8 aa, Homo sapiens
  Table A; Target 62154; HLA-B*39:01; PDX1; ENSG00000139515; TAA
QRGPAPEF

SEQ ID NO: 62155 - protein, 8 aa, Homo sapiens
  Table A; Target 62155; HLA-C*06:02; PDX1; ENSG00000139515; TAA
QRGPAPEF

SEQ ID NO: 62156 - protein, 8 aa, Homo sapiens
  Table A; Target 62156; HLA-C*07:01; PDX1; ENSG00000139515; TAA
QRGPAPEF

SEQ ID NO: 62157 - protein, 8 aa, Homo sapiens
  Table A; Target 62157; HLA-C*07:02; PDX1; ENSG00000139515; TAA
QRGPAPEF

SEQ ID NO: 62158 - protein, 8 aa, Homo sapiens
  Table A; Target 62158; HLA-C*12:03; PDX1; ENSG00000139515; TAA
QRGPAPEF

SEQ ID NO: 62159 - protein, 8 aa, Homo sapiens
  Table A; Target 62159; HLA-C*16:04; PDX1; ENSG00000139515; TAA
QRGPAPEF

SEQ ID NO: 62160 - protein, 8 aa, Homo sapiens
  Table A; Target 62160; HLA-A*23:01; PDX1; ENSG00000139515; TAA
QYYAATQL

SEQ ID NO: 62161 - protein, 8 aa, Homo sapiens
  Table A; Target 62161; HLA-A*24:02; PDX1; ENSG00000139515; TAA
QYYAATQL

SEQ ID NO: 62162 - protein, 8 aa, Homo sapiens
  Table A; Target 62162; HLA-B*15:03; PDX1; ENSG00000139515; TAA
QYYAATQL

SEQ ID NO: 62163 - protein, 8 aa, Homo sapiens
  Table A; Target 62163; HLA-C*04:01; PDX1; ENSG00000139515; TAA
QYYAATQL

SEQ ID NO: 62164 - protein, 8 aa, Homo sapiens
  Table A; Target 62164; HLA-C*14:02; PDX1; ENSG00000139515; TAA
QYYAATQL

SEQ ID NO: 62165 - protein, 9 aa, Homo sapiens
  Table A; Target 62165; HLA-A*23:01; PDX1; ENSG00000139515; TAA
QYYAATQLY

SEQ ID NO: 62166 - protein, 9 aa, Homo sapiens
  Table A; Target 62166; HLA-A*24:02; PDX1; ENSG00000139515; TAA
QYYAATQLY

SEQ ID NO: 62167 - protein, 9 aa, Homo sapiens
  Table A; Target 62167; HLA-A*26:01; PDX1; ENSG00000139515; TAA
QYYAATQLY

SEQ ID NO: 62168 - protein, 9 aa, Homo sapiens
  Table A; Target 62168; HLA-A*29:02; PDX1; ENSG00000139515; TAA
QYYAATQLY

SEQ ID NO: 62169 - protein, 9 aa, Homo sapiens
  Table A; Target 62169; HLA-A*30:02; PDX1; ENSG00000139515; TAA
QYYAATQLY

SEQ ID NO: 62170 - protein, 9 aa, Homo sapiens
  Table A; Target 62170; HLA-A*33:03; PDX1; ENSG00000139515; TAA
QYYAATQLY

SEQ ID NO: 62171 - protein, 9 aa, Homo sapiens
  Table A; Target 62171; HLA-B*15:01; PDX1; ENSG00000139515; TAA
QYYAATQLY

SEQ ID NO: 62172 - protein, 9 aa, Homo sapiens
  Table A; Target 62172; HLA-B*15:03; PDX1; ENSG00000139515; TAA
QYYAATQLY

SEQ ID NO: 62173 - protein, 9 aa, Homo sapiens
  Table A; Target 62173; HLA-B*35:01; PDX1; ENSG00000139515; TAA
QYYAATQLY

SEQ ID NO: 62174 - protein, 9 aa, Homo sapiens
  Table A; Target 62174; HLA-B*46:01; PDX1; ENSG00000139515; TAA
QYYAATQLY

SEQ ID NO: 62175 - protein, 9 aa, Homo sapiens
  Table A; Target 62175; HLA-C*01:02; PDX1; ENSG00000139515; TAA
QYYAATQLY

SEQ ID NO: 62176 - protein, 9 aa, Homo sapiens
  Table A; Target 62176; HLA-C*02:02; PDX1; ENSG00000139515; TAA
QYYAATQLY

SEQ ID NO: 62177 - protein, 9 aa, Homo sapiens
  Table A; Target 62177; HLA-C*04:01; PDX1; ENSG00000139515; TAA
QYYAATQLY

SEQ ID NO: 62178 - protein, 9 aa, Homo sapiens
  Table A; Target 62178; HLA-C*07:01; PDX1; ENSG00000139515; TAA
QYYAATQLY

SEQ ID NO: 62179 - protein, 9 aa, Homo sapiens
  Table A; Target 62179; HLA-C*14:02; PDX1; ENSG00000139515; TAA
QYYAATQLY

SEQ ID NO: 62180 - protein, 9 aa, Homo sapiens
  Table A; Target 62180; HLA-B*40:01; PDX1; ENSG00000139515; TAA
REGRLPPGL

SEQ ID NO: 62181 - protein, 9 aa, Homo sapiens
  Table A; Target 62181; HLA-B*44:02; PDX1; ENSG00000139515; TAA
REGRLPPGL

SEQ ID NO: 62182 - protein, 9 aa, Homo sapiens
  Table A; Target 62182; HLA-B*44:03; PDX1; ENSG00000139515; TAA
REGRLPPGL

SEQ ID NO: 62183 - protein, 10 aa, Homo sapiens
  Table A; Target 62183; HLA-A*31:01; PDX1; ENSG00000139515; TAA
RHIKIWFQNR

SEQ ID NO: 62184 - protein, 9 aa, Homo sapiens
  Table A; Target 62184; HLA-A*03:01; PDX1; ENSG00000139515; TAA
RQPPPPPPH

SEQ ID NO: 62185 - protein, 9 aa, Homo sapiens
  Table A; Target 62185; HLA-A*03:02; PDX1; ENSG00000139515; TAA
RQPPPPPPH

SEQ ID NO: 62186 - protein, 9 aa, Homo sapiens
  Table A; Target 62186; HLA-A*11:01; PDX1; ENSG00000139515; TAA
RQPPPPPPH

SEQ ID NO: 62187 - protein, 11 aa, Homo sapiens
  Table A; Target 62187; HLA-A*02:01; PDX1; ENSG00000139515; TAA
RQPPPPPPHPF

SEQ ID NO: 62188 - protein, 11 aa, Homo sapiens
  Table A; Target 62188; HLA-A*02:07; PDX1; ENSG00000139515; TAA
RQPPPPPPHPF

SEQ ID NO: 62189 - protein, 11 aa, Homo sapiens
  Table A; Target 62189; HLA-A*24:02; PDX1; ENSG00000139515; TAA
RQPPPPPPHPF

SEQ ID NO: 62190 - protein, 11 aa, Homo sapiens
  Table A; Target 62190; HLA-A*30:02; PDX1; ENSG00000139515; TAA
RQPPPPPPHPF

SEQ ID NO: 62191 - protein, 11 aa, Homo sapiens
  Table A; Target 62191; HLA-A*31:01; PDX1; ENSG00000139515; TAA
RQPPPPPPHPF

SEQ ID NO: 62192 - protein, 11 aa, Homo sapiens
  Table A; Target 62192; HLA-B*15:01; PDX1; ENSG00000139515; TAA
RQPPPPPPHPF

SEQ ID NO: 62193 - protein, 11 aa, Homo sapiens
  Table A; Target 62193; HLA-B*57:01; PDX1; ENSG00000139515; TAA
RQPPPPPPHPF

SEQ ID NO: 62194 - protein, 8 aa, Homo sapiens
  Table A; Target 62194; HLA-C*03:04; PDX1; ENSG00000139515; TAA
SASPPACL

SEQ ID NO: 62195 - protein, 8 aa, Homo sapiens
  Table A; Target 62195; HLA-C*05:01; PDX1; ENSG00000139515; TAA
SASPPACL

SEQ ID NO: 62196 - protein, 9 aa, Homo sapiens
  Table A; Target 62196; HLA-A*01:01; PDX1; ENSG00000139515; TAA
SASPPACLY

SEQ ID NO: 62197 - protein, 9 aa, Homo sapiens
  Table A; Target 62197; HLA-A*03:02; PDX1; ENSG00000139515; TAA
SASPPACLY

SEQ ID NO: 62198 - protein, 9 aa, Homo sapiens
  Table A; Target 62198; HLA-A*11:01; PDX1; ENSG00000139515; TAA
SASPPACLY

SEQ ID NO: 62199 - protein, 9 aa, Homo sapiens
  Table A; Target 62199; HLA-A*25:01; PDX1; ENSG00000139515; TAA
SASPPACLY

SEQ ID NO: 62200 - protein, 9 aa, Homo sapiens
  Table A; Target 62200; HLA-A*26:01; PDX1; ENSG00000139515; TAA
SASPPACLY

SEQ ID NO: 62201 - protein, 9 aa, Homo sapiens
  Table A; Target 62201; HLA-A*29:02; PDX1; ENSG00000139515; TAA
SASPPACLY

SEQ ID NO: 62202 - protein, 9 aa, Homo sapiens
  Table A; Target 62202; HLA-A*30:02; PDX1; ENSG00000139515; TAA
SASPPACLY

SEQ ID NO: 62203 - protein, 9 aa, Homo sapiens
  Table A; Target 62203; HLA-A*32:01; PDX1; ENSG00000139515; TAA
SASPPACLY

SEQ ID NO: 62204 - protein, 9 aa, Homo sapiens
  Table A; Target 62204; HLA-B*15:01; PDX1; ENSG00000139515; TAA
SASPPACLY

SEQ ID NO: 62205 - protein, 9 aa, Homo sapiens
  Table A; Target 62205; HLA-B*15:03; PDX1; ENSG00000139515; TAA
SASPPACLY

SEQ ID NO: 62206 - protein, 9 aa, Homo sapiens
  Table A; Target 62206; HLA-B*35:01; PDX1; ENSG00000139515; TAA
SASPPACLY

SEQ ID NO: 62207 - protein, 9 aa, Homo sapiens
  Table A; Target 62207; HLA-B*37:01; PDX1; ENSG00000139515; TAA
SASPPACLY

SEQ ID NO: 62208 - protein, 9 aa, Homo sapiens
  Table A; Target 62208; HLA-B*39:01; PDX1; ENSG00000139515; TAA
SASPPACLY

SEQ ID NO: 62209 - protein, 9 aa, Homo sapiens
  Table A; Target 62209; HLA-B*44:03; PDX1; ENSG00000139515; TAA
SASPPACLY

SEQ ID NO: 62210 - protein, 9 aa, Homo sapiens
  Table A; Target 62210; HLA-B*46:01; PDX1; ENSG00000139515; TAA
SASPPACLY

SEQ ID NO: 62211 - protein, 9 aa, Homo sapiens
  Table A; Target 62211; HLA-B*58:01; PDX1; ENSG00000139515; TAA
SASPPACLY

SEQ ID NO: 62212 - protein, 9 aa, Homo sapiens
  Table A; Target 62212; HLA-C*02:02; PDX1; ENSG00000139515; TAA
SASPPACLY

SEQ ID NO: 62213 - protein, 9 aa, Homo sapiens
  Table A; Target 62213; HLA-C*03:03; PDX1; ENSG00000139515; TAA
SASPPACLY

SEQ ID NO: 62214 - protein, 9 aa, Homo sapiens
  Table A; Target 62214; HLA-C*03:04; PDX1; ENSG00000139515; TAA
SASPPACLY

SEQ ID NO: 62215 - protein, 9 aa, Homo sapiens
  Table A; Target 62215; HLA-C*07:04; PDX1; ENSG00000139515; TAA
SASPPACLY

SEQ ID NO: 62216 - protein, 9 aa, Homo sapiens
  Table A; Target 62216; HLA-C*07:06; PDX1; ENSG00000139515; TAA
SASPPACLY

SEQ ID NO: 62217 - protein, 9 aa, Homo sapiens
  Table A; Target 62217; HLA-C*12:03; PDX1; ENSG00000139515; TAA
SASPPACLY

SEQ ID NO: 62218 - protein, 9 aa, Homo sapiens
  Table A; Target 62218; HLA-C*14:02; PDX1; ENSG00000139515; TAA
SASPPACLY

SEQ ID NO: 62219 - protein, 9 aa, Homo sapiens
  Table A; Target 62219; HLA-C*16:01; PDX1; ENSG00000139515; TAA
SASPPACLY

SEQ ID NO: 62220 - protein, 9 aa, Homo sapiens
  Table A; Target 62220; HLA-C*16:02; PDX1; ENSG00000139515; TAA
SASPPACLY

SEQ ID NO: 62221 - protein, 9 aa, Homo sapiens
  Table A; Target 62221; HLA-C*16:04; PDX1; ENSG00000139515; TAA
SASPPACLY

SEQ ID NO: 62222 - protein, 9 aa, Homo sapiens
  Table A; Target 62222; HLA-A*02:01; PDX1; ENSG00000139515; TAA
SASPQPSSV

SEQ ID NO: 62223 - protein, 9 aa, Homo sapiens
  Table A; Target 62223; HLA-A*02:03; PDX1; ENSG00000139515; TAA
SASPQPSSV

SEQ ID NO: 62224 - protein, 9 aa, Homo sapiens
  Table A; Target 62224; HLA-A*32:01; PDX1; ENSG00000139515; TAA
SASPQPSSV

SEQ ID NO: 62225 - protein, 9 aa, Homo sapiens
  Table A; Target 62225; HLA-B*13:02; PDX1; ENSG00000139515; TAA
SASPQPSSV

SEQ ID NO: 62226 - protein, 9 aa, Homo sapiens
  Table A; Target 62226; HLA-B*39:01; PDX1; ENSG00000139515; TAA
SASPQPSSV

SEQ ID NO: 62227 - protein, 9 aa, Homo sapiens
  Table A; Target 62227; HLA-B*49:01; PDX1; ENSG00000139515; TAA
SASPQPSSV

SEQ ID NO: 62228 - protein, 9 aa, Homo sapiens
  Table A; Target 62228; HLA-B*51:01; PDX1; ENSG00000139515; TAA
SASPQPSSV

SEQ ID NO: 62229 - protein, 9 aa, Homo sapiens
  Table A; Target 62229; HLA-B*54:01; PDX1; ENSG00000139515; TAA
SASPQPSSV

SEQ ID NO: 62230 - protein, 9 aa, Homo sapiens
  Table A; Target 62230; HLA-B*56:01; PDX1; ENSG00000139515; TAA
SASPQPSSV

SEQ ID NO: 62231 - protein, 9 aa, Homo sapiens
  Table A; Target 62231; HLA-C*02:02; PDX1; ENSG00000139515; TAA
SASPQPSSV

SEQ ID NO: 62232 - protein, 9 aa, Homo sapiens
  Table A; Target 62232; HLA-C*03:03; PDX1; ENSG00000139515; TAA
SASPQPSSV

SEQ ID NO: 62233 - protein, 9 aa, Homo sapiens
  Table A; Target 62233; HLA-C*03:04; PDX1; ENSG00000139515; TAA
SASPQPSSV

SEQ ID NO: 62234 - protein, 9 aa, Homo sapiens
  Table A; Target 62234; HLA-C*05:01; PDX1; ENSG00000139515; TAA
SASPQPSSV

SEQ ID NO: 62235 - protein, 9 aa, Homo sapiens
  Table A; Target 62235; HLA-C*12:03; PDX1; ENSG00000139515; TAA
SASPQPSSV

SEQ ID NO: 62236 - protein, 9 aa, Homo sapiens
  Table A; Target 62236; HLA-C*16:01; PDX1; ENSG00000139515; TAA
SASPQPSSV

SEQ ID NO: 62237 - protein, 9 aa, Homo sapiens
  Table A; Target 62237; HLA-C*16:02; PDX1; ENSG00000139515; TAA
SASPQPSSV

SEQ ID NO: 62238 - protein, 9 aa, Homo sapiens
  Table A; Target 62238; HLA-C*16:04; PDX1; ENSG00000139515; TAA
SASPQPSSV

SEQ ID NO: 62239 - protein, 10 aa, Homo sapiens
  Table A; Target 62239; HLA-B*56:01; PDX1; ENSG00000139515; TAA
SPPDISPYEV

SEQ ID NO: 62240 - protein, 8 aa, Homo sapiens
  Table A; Target 62240; HLA-B*56:01; PDX1; ENSG00000139515; TAA
SPQPSSVA

SEQ ID NO: 62241 - protein, 9 aa, Homo sapiens
  Table A; Target 62241; HLA-B*07:02; PDX1; ENSG00000139515; TAA
SPQPSSVAP

SEQ ID NO: 62242 - protein, 9 aa, Homo sapiens
  Table A; Target 62242; HLA-B*56:01; PDX1; ENSG00000139515; TAA
SPQPSSVAP

SEQ ID NO: 62243 - protein, 9 aa, Homo sapiens
  Table A; Target 62243; HLA-C*07:02; PDX1; ENSG00000139515; TAA
SPQPSSVAP

SEQ ID NO: 62244 - protein, 10 aa, Homo sapiens
  Table A; Target 62244; HLA-A*03:02; PDX1; ENSG00000139515; TAA
SPQPSSVAPR

SEQ ID NO: 62245 - protein, 10 aa, Homo sapiens
  Table A; Target 62245; HLA-A*11:01; PDX1; ENSG00000139515; TAA
SPQPSSVAPR

SEQ ID NO: 62246 - protein, 10 aa, Homo sapiens
  Table A; Target 62246; HLA-A*33:01; PDX1; ENSG00000139515; TAA
SPQPSSVAPR

SEQ ID NO: 62247 - protein, 10 aa, Homo sapiens
  Table A; Target 62247; HLA-A*33:03; PDX1; ENSG00000139515; TAA
SPQPSSVAPR

SEQ ID NO: 62248 - protein, 10 aa, Homo sapiens
  Table A; Target 62248; HLA-A*68:01; PDX1; ENSG00000139515; TAA
SPQPSSVAPR

SEQ ID NO: 62249 - protein, 10 aa, Homo sapiens
  Table A; Target 62249; HLA-B*27:02; PDX1; ENSG00000139515; TAA
SPQPSSVAPR

SEQ ID NO: 62250 - protein, 10 aa, Homo sapiens
  Table A; Target 62250; HLA-C*07:06; PDX1; ENSG00000139515; TAA
SPQPSSVAPR

SEQ ID NO: 62251 - protein, 11 aa, Homo sapiens
  Table A; Target 62251; HLA-A*68:01; PDX1; ENSG00000139515; TAA
SPQPSSVAPRR

SEQ ID NO: 62252 - protein, 8 aa, Homo sapiens
  Table A; Target 62252; HLA-B*35:01; PDX1; ENSG00000139515; TAA
SPYEVPPL

SEQ ID NO: 62253 - protein, 8 aa, Homo sapiens
  Table A; Target 62253; HLA-B*51:01; PDX1; ENSG00000139515; TAA
SPYEVPPL

SEQ ID NO: 62254 - protein, 8 aa, Homo sapiens
  Table A; Target 62254; HLA-B*56:01; PDX1; ENSG00000139515; TAA
SPYEVPPL

SEQ ID NO: 62255 - protein, 8 aa, Homo sapiens
  Table A; Target 62255; HLA-C*07:02; PDX1; ENSG00000139515; TAA
SPYEVPPL

SEQ ID NO: 62256 - protein, 9 aa, Homo sapiens
  Table A; Target 62256; HLA-B*51:01; PDX1; ENSG00000139515; TAA
SPYEVPPLA

SEQ ID NO: 62257 - protein, 9 aa, Homo sapiens
  Table A; Target 62257; HLA-B*54:01; PDX1; ENSG00000139515; TAA
SPYEVPPLA

SEQ ID NO: 62258 - protein, 9 aa, Homo sapiens
  Table A; Target 62258; HLA-B*55:01; PDX1; ENSG00000139515; TAA
SPYEVPPLA

SEQ ID NO: 62259 - protein, 9 aa, Homo sapiens
  Table A; Target 62259; HLA-B*56:01; PDX1; ENSG00000139515; TAA
SPYEVPPLA

SEQ ID NO: 62260 - protein, 11 aa, Homo sapiens
  Table A; Target 62260; HLA-A*31:01; PDX1; ENSG00000139515; TAA
SVAPRRPQEPR

SEQ ID NO: 62261 - protein, 9 aa, Homo sapiens
  Table A; Target 62261; HLA-B*39:01; PDX1; ENSG00000139515; TAA
TAVGGGGVA

SEQ ID NO: 62262 - protein, 9 aa, Homo sapiens
  Table A; Target 62262; HLA-C*03:03; PDX1; ENSG00000139515; TAA
TAVGGGGVA

SEQ ID NO: 62263 - protein, 9 aa, Homo sapiens
  Table A; Target 62263; HLA-C*03:04; PDX1; ENSG00000139515; TAA
TAVGGGGVA

SEQ ID NO: 62264 - protein, 8 aa, Homo sapiens
  Table A; Target 62264; HLA-B*07:02; PDX1; ENSG00000139515; TAA
TAYTRAQL

SEQ ID NO: 62265 - protein, 8 aa, Homo sapiens
  Table A; Target 62265; HLA-B*08:01; PDX1; ENSG00000139515; TAA
TAYTRAQL

SEQ ID NO: 62266 - protein, 8 aa, Homo sapiens
  Table A; Target 62266; HLA-B*51:01; PDX1; ENSG00000139515; TAA
TAYTRAQL

SEQ ID NO: 62267 - protein, 8 aa, Homo sapiens
  Table A; Target 62267; HLA-C*01:02; PDX1; ENSG00000139515; TAA
TAYTRAQL

SEQ ID NO: 62268 - protein, 8 aa, Homo sapiens
  Table A; Target 62268; HLA-C*03:03; PDX1; ENSG00000139515; TAA
TAYTRAQL

SEQ ID NO: 62269 - protein, 8 aa, Homo sapiens
  Table A; Target 62269; HLA-C*03:04; PDX1; ENSG00000139515; TAA
TAYTRAQL

SEQ ID NO: 62270 - protein, 8 aa, Homo sapiens
  Table A; Target 62270; HLA-C*07:02; PDX1; ENSG00000139515; TAA
TAYTRAQL

SEQ ID NO: 62271 - protein, 8 aa, Homo sapiens
  Table A; Target 62271; HLA-C*16:01; PDX1; ENSG00000139515; TAA
TAYTRAQL

SEQ ID NO: 62272 - protein, 8 aa, Homo sapiens
  Table A; Target 62272; HLA-C*16:02; PDX1; ENSG00000139515; TAA
TAYTRAQL

SEQ ID NO: 62273 - protein, 9 aa, Homo sapiens
  Table A; Target 62273; HLA-A*02:03; PDX1; ENSG00000139515; TAA
TAYTRAQLL

SEQ ID NO: 62274 - protein, 9 aa, Homo sapiens
  Table A; Target 62274; HLA-A*23:01; PDX1; ENSG00000139515; TAA
TAYTRAQLL

SEQ ID NO: 62275 - protein, 9 aa, Homo sapiens
  Table A; Target 62275; HLA-A*24:02; PDX1; ENSG00000139515; TAA
TAYTRAQLL

SEQ ID NO: 62276 - protein, 9 aa, Homo sapiens
  Table A; Target 62276; HLA-A*30:01; PDX1; ENSG00000139515; TAA
TAYTRAQLL

SEQ ID NO: 62277 - protein, 9 aa, Homo sapiens
  Table A; Target 62277; HLA-A*32:01; PDX1; ENSG00000139515; TAA
TAYTRAQLL

SEQ ID NO: 62278 - protein, 9 aa, Homo sapiens
  Table A; Target 62278; HLA-A*33:01; PDX1; ENSG00000139515; TAA
TAYTRAQLL

SEQ ID NO: 62279 - protein, 9 aa, Homo sapiens
  Table A; Target 62279; HLA-B*07:02; PDX1; ENSG00000139515; TAA
TAYTRAQLL

SEQ ID NO: 62280 - protein, 9 aa, Homo sapiens
  Table A; Target 62280; HLA-B*08:01; PDX1; ENSG00000139515; TAA
TAYTRAQLL

SEQ ID NO: 62281 - protein, 9 aa, Homo sapiens
  Table A; Target 62281; HLA-B*13:02; PDX1; ENSG00000139515; TAA
TAYTRAQLL

SEQ ID NO: 62282 - protein, 9 aa, Homo sapiens
  Table A; Target 62282; HLA-B*15:03; PDX1; ENSG00000139515; TAA
TAYTRAQLL

SEQ ID NO: 62283 - protein, 9 aa, Homo sapiens
  Table A; Target 62283; HLA-B*35:01; PDX1; ENSG00000139515; TAA
TAYTRAQLL

SEQ ID NO: 62284 - protein, 9 aa, Homo sapiens
  Table A; Target 62284; HLA-B*35:03; PDX1; ENSG00000139515; TAA
TAYTRAQLL

SEQ ID NO: 62285 - protein, 9 aa, Homo sapiens
  Table A; Target 62285; HLA-B*37:01; PDX1; ENSG00000139515; TAA
TAYTRAQLL

SEQ ID NO: 62286 - protein, 9 aa, Homo sapiens
  Table A; Target 62286; HLA-B*38:01; PDX1; ENSG00000139515; TAA
TAYTRAQLL

SEQ ID NO: 62287 - protein, 9 aa, Homo sapiens
  Table A; Target 62287; HLA-B*39:01; PDX1; ENSG00000139515; TAA
TAYTRAQLL

SEQ ID NO: 62288 - protein, 9 aa, Homo sapiens
  Table A; Target 62288; HLA-B*40:01; PDX1; ENSG00000139515; TAA
TAYTRAQLL

SEQ ID NO: 62289 - protein, 9 aa, Homo sapiens
  Table A; Target 62289; HLA-B*40:02; PDX1; ENSG00000139515; TAA
TAYTRAQLL

SEQ ID NO: 62290 - protein, 9 aa, Homo sapiens
  Table A; Target 62290; HLA-B*46:01; PDX1; ENSG00000139515; TAA
TAYTRAQLL

SEQ ID NO: 62291 - protein, 9 aa, Homo sapiens
  Table A; Target 62291; HLA-B*51:01; PDX1; ENSG00000139515; TAA
TAYTRAQLL

SEQ ID NO: 62292 - protein, 9 aa, Homo sapiens
  Table A; Target 62292; HLA-B*54:01; PDX1; ENSG00000139515; TAA
TAYTRAQLL

SEQ ID NO: 62293 - protein, 9 aa, Homo sapiens
  Table A; Target 62293; HLA-B*58:01; PDX1; ENSG00000139515; TAA
TAYTRAQLL

SEQ ID NO: 62294 - protein, 9 aa, Homo sapiens
  Table A; Target 62294; HLA-C*01:02; PDX1; ENSG00000139515; TAA
TAYTRAQLL

SEQ ID NO: 62295 - protein, 9 aa, Homo sapiens
  Table A; Target 62295; HLA-C*02:02; PDX1; ENSG00000139515; TAA
TAYTRAQLL

SEQ ID NO: 62296 - protein, 9 aa, Homo sapiens
  Table A; Target 62296; HLA-C*03:03; PDX1; ENSG00000139515; TAA
TAYTRAQLL

SEQ ID NO: 62297 - protein, 9 aa, Homo sapiens
  Table A; Target 62297; HLA-C*03:04; PDX1; ENSG00000139515; TAA
TAYTRAQLL

SEQ ID NO: 62298 - protein, 9 aa, Homo sapiens
  Table A; Target 62298; HLA-C*05:01; PDX1; ENSG00000139515; TAA
TAYTRAQLL

SEQ ID NO: 62299 - protein, 9 aa, Homo sapiens
  Table A; Target 62299; HLA-C*06:02; PDX1; ENSG00000139515; TAA
TAYTRAQLL

SEQ ID NO: 62300 - protein, 9 aa, Homo sapiens
  Table A; Target 62300; HLA-C*07:01; PDX1; ENSG00000139515; TAA
TAYTRAQLL

SEQ ID NO: 62301 - protein, 9 aa, Homo sapiens
  Table A; Target 62301; HLA-C*07:02; PDX1; ENSG00000139515; TAA
TAYTRAQLL

SEQ ID NO: 62302 - protein, 9 aa, Homo sapiens
  Table A; Target 62302; HLA-C*07:04; PDX1; ENSG00000139515; TAA
TAYTRAQLL

SEQ ID NO: 62303 - protein, 9 aa, Homo sapiens
  Table A; Target 62303; HLA-C*12:03; PDX1; ENSG00000139515; TAA
TAYTRAQLL

SEQ ID NO: 62304 - protein, 9 aa, Homo sapiens
  Table A; Target 62304; HLA-C*14:02; PDX1; ENSG00000139515; TAA
TAYTRAQLL

SEQ ID NO: 62305 - protein, 9 aa, Homo sapiens
  Table A; Target 62305; HLA-C*16:01; PDX1; ENSG00000139515; TAA
TAYTRAQLL

SEQ ID NO: 62306 - protein, 9 aa, Homo sapiens
  Table A; Target 62306; HLA-C*16:02; PDX1; ENSG00000139515; TAA
TAYTRAQLL

SEQ ID NO: 62307 - protein, 9 aa, Homo sapiens
  Table A; Target 62307; HLA-C*16:04; PDX1; ENSG00000139515; TAA
TAYTRAQLL

SEQ ID NO: 62308 - protein, 10 aa, Homo sapiens
  Table A; Target 62308; HLA-C*06:02; PDX1; ENSG00000139515; TAA
TQLYKDPCAF

SEQ ID NO: 62309 - protein, 8 aa, Homo sapiens
  Table A; Target 62309; HLA-B*08:01; PDX1; ENSG00000139515; TAA
VAHLHHHL

SEQ ID NO: 62310 - protein, 10 aa, Homo sapiens
  Table A; Target 62310; HLA-A*31:01; PDX1; ENSG00000139515; TAA
VAPRRPQEPR

SEQ ID NO: 62311 - protein, 9 aa, Homo sapiens
  Table A; Target 62311; HLA-A*23:01; PDX1; ENSG00000139515; TAA
VELAVMLNL

SEQ ID NO: 62312 - protein, 9 aa, Homo sapiens
  Table A; Target 62312; HLA-A*30:01; PDX1; ENSG00000139515; TAA
VELAVMLNL

SEQ ID NO: 62313 - protein, 9 aa, Homo sapiens
  Table A; Target 62313; HLA-B*18:01; PDX1; ENSG00000139515; TAA
VELAVMLNL

SEQ ID NO: 62314 - protein, 9 aa, Homo sapiens
  Table A; Target 62314; HLA-B*40:01; PDX1; ENSG00000139515; TAA
VELAVMLNL

SEQ ID NO: 62315 - protein, 9 aa, Homo sapiens
  Table A; Target 62315; HLA-B*44:02; PDX1; ENSG00000139515; TAA
VELAVMLNL

SEQ ID NO: 62316 - protein, 9 aa, Homo sapiens
  Table A; Target 62316; HLA-B*44:03; PDX1; ENSG00000139515; TAA
VELAVMLNL

SEQ ID NO: 62317 - protein, 9 aa, Homo sapiens
  Table A; Target 62317; HLA-B*49:01; PDX1; ENSG00000139515; TAA
VELAVMLNL

SEQ ID NO: 62318 - protein, 8 aa, Homo sapiens
  Table A; Target 62318; HLA-C*05:01; PDX1; ENSG00000139515; TAA
VLEEPNRV

SEQ ID NO: 62319 - protein, 8 aa, Homo sapiens
  Table A; Target 62319; HLA-A*31:01; PDX1; ENSG00000139515; TAA
VMLNLTER

SEQ ID NO: 62320 - protein, 8 aa, Homo sapiens
  Table A; Target 62320; HLA-A*33:01; PDX1; ENSG00000139515; TAA
VMLNLTER

SEQ ID NO: 62321 - protein, 8 aa, Homo sapiens
  Table A; Target 62321; HLA-B*51:01; PDX1; ENSG00000139515; TAA
VPPAAPVA

SEQ ID NO: 62322 - protein, 8 aa, Homo sapiens
  Table A; Target 62322; HLA-B*54:01; PDX1; ENSG00000139515; TAA
VPPAAPVA

SEQ ID NO: 62323 - protein, 8 aa, Homo sapiens
  Table A; Target 62323; HLA-B*55:01; PDX1; ENSG00000139515; TAA
VPPAAPVA

SEQ ID NO: 62324 - protein, 8 aa, Homo sapiens
  Table A; Target 62324; HLA-B*56:01; PDX1; ENSG00000139515; TAA
VPPAAPVA

SEQ ID NO: 62325 - protein, 9 aa, Homo sapiens
  Table A; Target 62325; HLA-B*07:02; PDX1; ENSG00000139515; TAA
VPPAAPVAA

SEQ ID NO: 62326 - protein, 9 aa, Homo sapiens
  Table A; Target 62326; HLA-B*51:01; PDX1; ENSG00000139515; TAA
VPPAAPVAA

SEQ ID NO: 62327 - protein, 9 aa, Homo sapiens
  Table A; Target 62327; HLA-B*54:01; PDX1; ENSG00000139515; TAA
VPPAAPVAA

SEQ ID NO: 62328 - protein, 9 aa, Homo sapiens
  Table A; Target 62328; HLA-B*55:01; PDX1; ENSG00000139515; TAA
VPPAAPVAA

SEQ ID NO: 62329 - protein, 9 aa, Homo sapiens
  Table A; Target 62329; HLA-B*56:01; PDX1; ENSG00000139515; TAA
VPPAAPVAA

SEQ ID NO: 62330 - protein, 9 aa, Homo sapiens
  Table A; Target 62330; HLA-C*07:02; PDX1; ENSG00000139515; TAA
VPPAAPVAA

SEQ ID NO: 62331 - protein, 10 aa, Homo sapiens
  Table A; Target 62331; HLA-A*68:01; PDX1; ENSG00000139515; TAA
VPPAAPVAAR

SEQ ID NO: 62332 - protein, 10 aa, Homo sapiens
  Table A; Target 62332; HLA-C*07:06; PDX1; ENSG00000139515; TAA
VPPAAPVAAR

SEQ ID NO: 62333 - protein, 9 aa, Homo sapiens
  Table A; Target 62333; HLA-A*03:02; PDX1; ENSG00000139515; TAA
YAAEPEENK

SEQ ID NO: 62334 - protein, 9 aa, Homo sapiens
  Table A; Target 62334; HLA-A*11:01; PDX1; ENSG00000139515; TAA
YAAEPEENK

SEQ ID NO: 62335 - protein, 9 aa, Homo sapiens
  Table A; Target 62335; HLA-A*33:03; PDX1; ENSG00000139515; TAA
YAAEPEENK

SEQ ID NO: 62336 - protein, 9 aa, Homo sapiens
  Table A; Target 62336; HLA-A*68:01; PDX1; ENSG00000139515; TAA
YAAEPEENK

SEQ ID NO: 62337 - protein, 9 aa, Homo sapiens
  Table A; Target 62337; HLA-A*68:02; PDX1; ENSG00000139515; TAA
YAAEPEENK

SEQ ID NO: 62338 - protein, 9 aa, Homo sapiens
  Table A; Target 62338; HLA-B*27:02; PDX1; ENSG00000139515; TAA
YAAEPEENK

SEQ ID NO: 62339 - protein, 9 aa, Homo sapiens
  Table A; Target 62339; HLA-B*27:05; PDX1; ENSG00000139515; TAA
YAAEPEENK

SEQ ID NO: 62340 - protein, 9 aa, Homo sapiens
  Table A; Target 62340; HLA-B*35:01; PDX1; ENSG00000139515; TAA
YAAEPEENK

SEQ ID NO: 62341 - protein, 9 aa, Homo sapiens
  Table A; Target 62341; HLA-B*51:01; PDX1; ENSG00000139515; TAA
YAAEPEENK

SEQ ID NO: 62342 - protein, 9 aa, Homo sapiens
  Table A; Target 62342; HLA-C*01:02; PDX1; ENSG00000139515; TAA
YAAEPEENK

SEQ ID NO: 62343 - protein, 9 aa, Homo sapiens
  Table A; Target 62343; HLA-C*03:03; PDX1; ENSG00000139515; TAA
YAAEPEENK

SEQ ID NO: 62344 - protein, 9 aa, Homo sapiens
  Table A; Target 62344; HLA-C*05:01; PDX1; ENSG00000139515; TAA
YAAEPEENK

SEQ ID NO: 62345 - protein, 9 aa, Homo sapiens
  Table A; Target 62345; HLA-C*07:06; PDX1; ENSG00000139515; TAA
YAAEPEENK

SEQ ID NO: 62346 - protein, 10 aa, Homo sapiens
  Table A; Target 62346; HLA-A*68:01; PDX1; ENSG00000139515; TAA
YAAEPEENKR

SEQ ID NO: 62347 - protein, 10 aa, Homo sapiens
  Table A; Target 62347; HLA-C*07:06; PDX1; ENSG00000139515; TAA
YAAEPEENKR

SEQ ID NO: 62348 - protein, 10 aa, Homo sapiens
  Table A; Target 62348; HLA-C*16:02; PDX1; ENSG00000139515; TAA
YAAEPEENKR

SEQ ID NO: 62349 - protein, 8 aa, Homo sapiens
  Table A; Target 62349; HLA-B*27:02; PDX1; ENSG00000139515; TAA
YAATQLYK

SEQ ID NO: 62350 - protein, 8 aa, Homo sapiens
  Table A; Target 62350; HLA-B*51:01; PDX1; ENSG00000139515; TAA
YAATQLYK

SEQ ID NO: 62351 - protein, 9 aa, Homo sapiens
  Table A; Target 62351; HLA-A*02:03; PDX1; ENSG00000139515; TAA
YTRAQLLEL

SEQ ID NO: 62352 - protein, 9 aa, Homo sapiens
  Table A; Target 62352; HLA-A*02:04; PDX1; ENSG00000139515; TAA
YTRAQLLEL

SEQ ID NO: 62353 - protein, 9 aa, Homo sapiens
  Table A; Target 62353; HLA-B*07:02; PDX1; ENSG00000139515; TAA
YTRAQLLEL

SEQ ID NO: 62354 - protein, 9 aa, Homo sapiens
  Table A; Target 62354; HLA-B*40:02; PDX1; ENSG00000139515; TAA
YTRAQLLEL

SEQ ID NO: 62355 - protein, 9 aa, Homo sapiens
  Table A; Target 62355; HLA-B*46:01; PDX1; ENSG00000139515; TAA
YTRAQLLEL

SEQ ID NO: 62356 - protein, 9 aa, Homo sapiens
  Table A; Target 62356; HLA-C*07:02; PDX1; ENSG00000139515; TAA
YTRAQLLEL

SEQ ID NO: 62357 - protein, 8 aa, Homo sapiens
  Table A; Target 62357; HLA-A*23:01; PDX1; ENSG00000139515; TAA
YYAATQLY

SEQ ID NO: 62358 - protein, 8 aa, Homo sapiens
  Table A; Target 62358; HLA-A*24:02; PDX1; ENSG00000139515; TAA
YYAATQLY

SEQ ID NO: 62359 - protein, 8 aa, Homo sapiens
  Table A; Target 62359; HLA-A*29:02; PDX1; ENSG00000139515; TAA
YYAATQLY

SEQ ID NO: 62360 - protein, 8 aa, Homo sapiens
  Table A; Target 62360; HLA-C*04:01; PDX1; ENSG00000139515; TAA
YYAATQLY

SEQ ID NO: 62361 - protein, 8 aa, Homo sapiens
  Table A; Target 62361; HLA-C*07:01; PDX1; ENSG00000139515; TAA
YYAATQLY

SEQ ID NO: 62362 - protein, 8 aa, Homo sapiens
  Table A; Target 62362; HLA-C*14:02; PDX1; ENSG00000139515; TAA
YYAATQLY

SEQ ID NO: 62363 - protein, 9 aa, Homo sapiens
  Table A; Target 62363; HLA-A*29:02; PDX1; ENSG00000139515; TAA
YYAATQLYK

SEQ ID NO: 62364 - protein, 9 aa, Homo sapiens
  Table A; Target 62364; HLA-B*40:01; PF4V1; ENSG00000109272; TAA
AEAEEDGDL

SEQ ID NO: 62365 - protein, 9 aa, Homo sapiens
  Table A; Target 62365; HLA-B*49:01; PF4V1; ENSG00000109272; TAA
AEEDGDLQC

SEQ ID NO: 62366 - protein, 10 aa, Homo sapiens
  Table A; Target 62366; HLA-A*30:01; PF4V1; ENSG00000109272; TAA
AEEDGDLQCL

SEQ ID NO: 62367 - protein, 10 aa, Homo sapiens
  Table A; Target 62367; HLA-B*27:02; PF4V1; ENSG00000109272; TAA
AEEDGDLQCL

SEQ ID NO: 62368 - protein, 10 aa, Homo sapiens
  Table A; Target 62368; HLA-B*40:01; PF4V1; ENSG00000109272; TAA
AEEDGDLQCL

SEQ ID NO: 62369 - protein, 10 aa, Homo sapiens
  Table A; Target 62369; HLA-B*40:02; PF4V1; ENSG00000109272; TAA
AEEDGDLQCL

SEQ ID NO: 62370 - protein, 10 aa, Homo sapiens
  Table A; Target 62370; HLA-B*44:02; PF4V1; ENSG00000109272; TAA
AEEDGDLQCL

SEQ ID NO: 62371 - protein, 10 aa, Homo sapiens
  Table A; Target 62371; HLA-B*44:03; PF4V1; ENSG00000109272; TAA
AEEDGDLQCL

SEQ ID NO: 62372 - protein, 10 aa, Homo sapiens
  Table A; Target 62372; HLA-B*49:01; PF4V1; ENSG00000109272; TAA
AEEDGDLQCL

SEQ ID NO: 62373 - protein, 10 aa, Homo sapiens
  Table A; Target 62373; HLA-C*16:04; PF4V1; ENSG00000109272; TAA
AEEDGDLQCL

SEQ ID NO: 62374 - protein, 8 aa, Homo sapiens
  Table A; Target 62374; HLA-A*02:04; PF4V1; ENSG00000109272; TAA
ALLLLPVV

SEQ ID NO: 62375 - protein, 8 aa, Homo sapiens
  Table A; Target 62375; HLA-B*55:01; PF4V1; ENSG00000109272; TAA
ALLLLPVV

SEQ ID NO: 62376 - protein, 9 aa, Homo sapiens
  Table A; Target 62376; HLA-A*02:01; PF4V1; ENSG00000109272; TAA
ALLLLPVVV

SEQ ID NO: 62377 - protein, 9 aa, Homo sapiens
  Table A; Target 62377; HLA-A*02:03; PF4V1; ENSG00000109272; TAA
ALLLLPVVV

SEQ ID NO: 62378 - protein, 9 aa, Homo sapiens
  Table A; Target 62378; HLA-A*02:04; PF4V1; ENSG00000109272; TAA
ALLLLPVVV

SEQ ID NO: 62379 - protein, 9 aa, Homo sapiens
  Table A; Target 62379; HLA-A*02:07; PF4V1; ENSG00000109272; TAA
ALLLLPVVV

SEQ ID NO: 62380 - protein, 9 aa, Homo sapiens
  Table A; Target 62380; HLA-A*30:01; PF4V1; ENSG00000109272; TAA
ALLLLPVVV

SEQ ID NO: 62381 - protein, 9 aa, Homo sapiens
  Table A; Target 62381; HLA-B*13:02; PF4V1; ENSG00000109272; TAA
ALLLLPVVV

SEQ ID NO: 62382 - protein, 9 aa, Homo sapiens
  Table A; Target 62382; HLA-B*40:02; PF4V1; ENSG00000109272; TAA
ALLLLPVVV

SEQ ID NO: 62383 - protein, 9 aa, Homo sapiens
  Table A; Target 62383; HLA-B*55:01; PF4V1; ENSG00000109272; TAA
ALLLLPVVV

SEQ ID NO: 62384 - protein, 10 aa, Homo sapiens
  Table A; Target 62384; HLA-A*02:01; PF4V1; ENSG00000109272; TAA
ALLLLPVVVA

SEQ ID NO: 62385 - protein, 11 aa, Homo sapiens
  Table A; Target 62385; HLA-A*02:04; PF4V1; ENSG00000109272; TAA
ALLLLPVVVAF

SEQ ID NO: 62386 - protein, 9 aa, Homo sapiens
  Table A; Target 62386; HLA-A*03:01; PF4V1; ENSG00000109272; TAA
ATRQEMLFL

SEQ ID NO: 62387 - protein, 9 aa, Homo sapiens
  Table A; Target 62387; HLA-A*31:01; PF4V1; ENSG00000109272; TAA
ATRQEMLFL

SEQ ID NO: 62388 - protein, 9 aa, Homo sapiens
  Table A; Target 62388; HLA-B*57:01; PF4V1; ENSG00000109272; TAA
ATRQEMLFL

SEQ ID NO: 62389 - protein, 9 aa, Homo sapiens
  Table A; Target 62389; HLA-A*01:01; PF4V1; ENSG00000109272; TAA
CLDLQALLY

SEQ ID NO: 62390 - protein, 9 aa, Homo sapiens
  Table A; Target 62390; HLA-A*29:02; PF4V1; ENSG00000109272; TAA
CLDLQALLY

SEQ ID NO: 62391 - protein, 10 aa, Homo sapiens
  Table A; Target 62391; HLA-A*03:01; PF4V1; ENSG00000109272; TAA
CLDLQALLYK

SEQ ID NO: 62392 - protein, 9 aa, Homo sapiens
  Table A; Target 62392; HLA-B*56:01; PF4V1; ENSG00000109272; TAA
CPTAQLIAT

SEQ ID NO: 62393 - protein, 10 aa, Homo sapiens
  Table A; Target 62393; HLA-B*07:02; PF4V1; ENSG00000109272; TAA
CPTAQLIATL

SEQ ID NO: 62394 - protein, 10 aa, Homo sapiens
  Table A; Target 62394; HLA-B*56:01; PF4V1; ENSG00000109272; TAA
CPTAQLIATL

SEQ ID NO: 62395 - protein, 10 aa, Homo sapiens
  Table A; Target 62395; HLA-C*07:02; PF4V1; ENSG00000109272; TAA
CPTAQLIATL

SEQ ID NO: 62396 - protein, 8 aa, Homo sapiens
  Table A; Target 62396; HLA-C*12:03; PF4V1; ENSG00000109272; TAA
CVKTTSQV

SEQ ID NO: 62397 - protein, 9 aa, Homo sapiens
  Table A; Target 62397; HLA-A*31:01; PF4V1; ENSG00000109272; TAA
CVKTTSQVR

SEQ ID NO: 62398 - protein, 9 aa, Homo sapiens
  Table A; Target 62398; HLA-A*33:01; PF4V1; ENSG00000109272; TAA
CVKTTSQVR

SEQ ID NO: 62399 - protein, 9 aa, Homo sapiens
  Table A; Target 62399; HLA-A*33:03; PF4V1; ENSG00000109272; TAA
CVKTTSQVR

SEQ ID NO: 62400 - protein, 9 aa, Homo sapiens
  Table A; Target 62400; HLA-A*68:01; PF4V1; ENSG00000109272; TAA
CVKTTSQVR

SEQ ID NO: 62401 - protein, 9 aa, Homo sapiens
  Table A; Target 62401; HLA-C*07:06; PF4V1; ENSG00000109272; TAA
CVKTTSQVR

SEQ ID NO: 62402 - protein, 11 aa, Homo sapiens
  Table A; Target 62402; HLA-A*31:01; PF4V1; ENSG00000109272; TAA
CVKTTSQVRPR

SEQ ID NO: 62403 - protein, 9 aa, Homo sapiens
  Table A; Target 62403; HLA-B*51:01; PF4V1; ENSG00000109272; TAA
DGDLQCLCV

SEQ ID NO: 62404 - protein, 9 aa, Homo sapiens
  Table A; Target 62404; HLA-A*33:01; PF4V1; ENSG00000109272; TAA
DLQALLYKK

SEQ ID NO: 62405 - protein, 8 aa, Homo sapiens
  Table A; Target 62405; HLA-C*05:01; PF4V1; ENSG00000109272; TAA
EAEEDGDL

SEQ ID NO: 62406 - protein, 11 aa, Homo sapiens
  Table A; Target 62406; HLA-B*35:03; PF4V1; ENSG00000109272; TAA
EAEEDGDLQCL

SEQ ID NO: 62407 - protein, 9 aa, Homo sapiens
  Table A; Target 62407; HLA-A*30:01; PF4V1; ENSG00000109272; TAA
EEDGDLQCL

SEQ ID NO: 62408 - protein, 9 aa, Homo sapiens
  Table A; Target 62408; HLA-B*38:01; PF4V1; ENSG00000109272; TAA
EEDGDLQCL

SEQ ID NO: 62409 - protein, 9 aa, Homo sapiens
  Table A; Target 62409; HLA-B*39:01; PF4V1; ENSG00000109272; TAA
EEDGDLQCL

SEQ ID NO: 62410 - protein, 9 aa, Homo sapiens
  Table A; Target 62410; HLA-B*40:01; PF4V1; ENSG00000109272; TAA
EEDGDLQCL

SEQ ID NO: 62411 - protein, 9 aa, Homo sapiens
  Table A; Target 62411; HLA-B*40:02; PF4V1; ENSG00000109272; TAA
EEDGDLQCL

SEQ ID NO: 62412 - protein, 9 aa, Homo sapiens
  Table A; Target 62412; HLA-B*44:02; PF4V1; ENSG00000109272; TAA
EEDGDLQCL

SEQ ID NO: 62413 - protein, 9 aa, Homo sapiens
  Table A; Target 62413; HLA-B*44:03; PF4V1; ENSG00000109272; TAA
EEDGDLQCL

SEQ ID NO: 62414 - protein, 9 aa, Homo sapiens
  Table A; Target 62414; HLA-B*49:01; PF4V1; ENSG00000109272; TAA
EEDGDLQCL

SEQ ID NO: 62415 - protein, 8 aa, Homo sapiens
  Table A; Target 62415; HLA-C*04:01; PF4V1; ENSG00000109272; TAA
EVIKAGPH

SEQ ID NO: 62416 - protein, 9 aa, Homo sapiens
  Table A; Target 62416; HLA-A*26:01; PF4V1; ENSG00000109272; TAA
EVIKAGPHC

SEQ ID NO: 62417 - protein, 10 aa, Homo sapiens
  Table A; Target 62417; HLA-A*02:03; PF4V1; ENSG00000109272; TAA
FLALLLLPVV

SEQ ID NO: 62418 - protein, 10 aa, Homo sapiens
  Table A; Target 62418; HLA-A*02:04; PF4V1; ENSG00000109272; TAA
FLALLLLPVV

SEQ ID NO: 62419 - protein, 9 aa, Homo sapiens
  Table A; Target 62419; HLA-B*07:02; PF4V1; ENSG00000109272; TAA
GPHCPTAQL

SEQ ID NO: 62420 - protein, 9 aa, Homo sapiens
  Table A; Target 62420; HLA-C*07:02; PF4V1; ENSG00000109272; TAA
GPHCPTAQL

SEQ ID NO: 62421 - protein, 8 aa, Homo sapiens
  Table A; Target 62421; HLA-B*51:01; PF4V1; ENSG00000109272; TAA
HCPTAQLI

SEQ ID NO: 62422 - protein, 9 aa, Homo sapiens
  Table A; Target 62422; HLA-A*03:02; PF4V1; ENSG00000109272; TAA
HITSLEVIK

SEQ ID NO: 62423 - protein, 9 aa, Homo sapiens
  Table A; Target 62423; HLA-A*11:01; PF4V1; ENSG00000109272; TAA
HITSLEVIK

SEQ ID NO: 62424 - protein, 9 aa, Homo sapiens
  Table A; Target 62424; HLA-A*68:01; PF4V1; ENSG00000109272; TAA
HITSLEVIK

SEQ ID NO: 62425 - protein, 9 aa, Homo sapiens
  Table A; Target 62425; HLA-B*27:02; PF4V1; ENSG00000109272; TAA
HITSLEVIK

SEQ ID NO: 62426 - protein, 9 aa, Homo sapiens
  Table A; Target 62426; HLA-A*23:01; PF4V1; ENSG00000109272; TAA
ICLDLQALL

SEQ ID NO: 62427 - protein, 10 aa, Homo sapiens
  Table A; Target 62427; HLA-A*03:01; PF4V1; ENSG00000109272; TAA
ICLDLQALLY

SEQ ID NO: 62428 - protein, 10 aa, Homo sapiens
  Table A; Target 62428; HLA-A*29:02; PF4V1; ENSG00000109272; TAA
ICLDLQALLY

SEQ ID NO: 62429 - protein, 10 aa, Homo sapiens
  Table A; Target 62429; HLA-C*07:01; PF4V1; ENSG00000109272; TAA
ICLDLQALLY

SEQ ID NO: 62430 - protein, 9 aa, Homo sapiens
  Table A; Target 62430; HLA-A*03:01; PF4V1; ENSG00000109272; TAA
KTTSQVRPR

SEQ ID NO: 62431 - protein, 9 aa, Homo sapiens
  Table A; Target 62431; HLA-A*11:01; PF4V1; ENSG00000109272; TAA
KTTSQVRPR

SEQ ID NO: 62432 - protein, 9 aa, Homo sapiens
  Table A; Target 62432; HLA-A*31:01; PF4V1; ENSG00000109272; TAA
KTTSQVRPR

SEQ ID NO: 62433 - protein, 9 aa, Homo sapiens
  Table A; Target 62433; HLA-A*33:03; PF4V1; ENSG00000109272; TAA
KTTSQVRPR

SEQ ID NO: 62434 - protein, 9 aa, Homo sapiens
  Table A; Target 62434; HLA-C*06:02; PF4V1; ENSG00000109272; TAA
KTTSQVRPR

SEQ ID NO: 62435 - protein, 9 aa, Homo sapiens
  Table A; Target 62435; HLA-C*07:06; PF4V1; ENSG00000109272; TAA
KTTSQVRPR

SEQ ID NO: 62436 - protein, 9 aa, Homo sapiens
  Table A; Target 62436; HLA-C*16:01; PF4V1; ENSG00000109272; TAA
KTTSQVRPR

SEQ ID NO: 62437 - protein, 9 aa, Homo sapiens
  Table A; Target 62437; HLA-C*16:02; PF4V1; ENSG00000109272; TAA
KTTSQVRPR

SEQ ID NO: 62438 - protein, 9 aa, Homo sapiens
  Table A; Target 62438; HLA-B*51:01; PF4V1; ENSG00000109272; TAA
LALLLLPVV

SEQ ID NO: 62439 - protein, 9 aa, Homo sapiens
  Table A; Target 62439; HLA-B*54:01; PF4V1; ENSG00000109272; TAA
LALLLLPVV

SEQ ID NO: 62440 - protein, 8 aa, Homo sapiens
  Table A; Target 62440; HLA-B*18:01; PF4V1; ENSG00000109272; TAA
LDLQALLY

SEQ ID NO: 62441 - protein, 8 aa, Homo sapiens
  Table A; Target 62441; HLA-C*07:01; PF4V1; ENSG00000109272; TAA
LDLQALLY

SEQ ID NO: 62442 - protein, 9 aa, Homo sapiens
  Table A; Target 62442; HLA-A*02:01; PF4V1; ENSG00000109272; TAA
LLLLPVVVA

SEQ ID NO: 62443 - protein, 9 aa, Homo sapiens
  Table A; Target 62443; HLA-A*02:04; PF4V1; ENSG00000109272; TAA
LLLLPVVVA

SEQ ID NO: 62444 - protein, 9 aa, Homo sapiens
  Table A; Target 62444; HLA-B*54:01; PF4V1; ENSG00000109272; TAA
LLLLPVVVA

SEQ ID NO: 62445 - protein, 10 aa, Homo sapiens
  Table A; Target 62445; HLA-A*23:01; PF4V1; ENSG00000109272; TAA
LLLLPVVVAF

SEQ ID NO: 62446 - protein, 10 aa, Homo sapiens
  Table A; Target 62446; HLA-A*24:02; PF4V1; ENSG00000109272; TAA
LLLLPVVVAF

SEQ ID NO: 62447 - protein, 11 aa, Homo sapiens
  Table A; Target 62447; HLA-A*02:01; PF4V1; ENSG00000109272; TAA
LLLLPVVVAFA

SEQ ID NO: 62448 - protein, 8 aa, Homo sapiens
  Table A; Target 62448; HLA-A*02:01; PF4V1; ENSG00000109272; TAA
LLLPVVVA

SEQ ID NO: 62449 - protein, 8 aa, Homo sapiens
  Table A; Target 62449; HLA-A*02:04; PF4V1; ENSG00000109272; TAA
LLLPVVVA

SEQ ID NO: 62450 - protein, 9 aa, Homo sapiens
  Table A; Target 62450; HLA-A*02:01; PF4V1; ENSG00000109272; TAA
LLLPVVVAF

SEQ ID NO: 62451 - protein, 9 aa, Homo sapiens
  Table A; Target 62451; HLA-A*02:03; PF4V1; ENSG00000109272; TAA
LLLPVVVAF

SEQ ID NO: 62452 - protein, 9 aa, Homo sapiens
  Table A; Target 62452; HLA-A*02:04; PF4V1; ENSG00000109272; TAA
LLLPVVVAF

SEQ ID NO: 62453 - protein, 9 aa, Homo sapiens
  Table A; Target 62453; HLA-A*02:07; PF4V1; ENSG00000109272; TAA
LLLPVVVAF

SEQ ID NO: 62454 - protein, 9 aa, Homo sapiens
  Table A; Target 62454; HLA-A*03:01; PF4V1; ENSG00000109272; TAA
LLLPVVVAF

SEQ ID NO: 62455 - protein, 9 aa, Homo sapiens
  Table A; Target 62455; HLA-A*03:02; PF4V1; ENSG00000109272; TAA
LLLPVVVAF

SEQ ID NO: 62456 - protein, 9 aa, Homo sapiens
  Table A; Target 62456; HLA-A*23:01; PF4V1; ENSG00000109272; TAA
LLLPVVVAF

SEQ ID NO: 62457 - protein, 9 aa, Homo sapiens
  Table A; Target 62457; HLA-A*24:02; PF4V1; ENSG00000109272; TAA
LLLPVVVAF

SEQ ID NO: 62458 - protein, 9 aa, Homo sapiens
  Table A; Target 62458; HLA-A*25:01; PF4V1; ENSG00000109272; TAA
LLLPVVVAF

SEQ ID NO: 62459 - protein, 9 aa, Homo sapiens
  Table A; Target 62459; HLA-A*26:01; PF4V1; ENSG00000109272; TAA
LLLPVVVAF

SEQ ID NO: 62460 - protein, 9 aa, Homo sapiens
  Table A; Target 62460; HLA-A*29:02; PF4V1; ENSG00000109272; TAA
LLLPVVVAF

SEQ ID NO: 62461 - protein, 9 aa, Homo sapiens
  Table A; Target 62461; HLA-A*30:01; PF4V1; ENSG00000109272; TAA
LLLPVVVAF

SEQ ID NO: 62462 - protein, 9 aa, Homo sapiens
  Table A; Target 62462; HLA-A*30:02; PF4V1; ENSG00000109272; TAA
LLLPVVVAF

SEQ ID NO: 62463 - protein, 9 aa, Homo sapiens
  Table A; Target 62463; HLA-A*31:01; PF4V1; ENSG00000109272; TAA
LLLPVVVAF

SEQ ID NO: 62464 - protein, 9 aa, Homo sapiens
  Table A; Target 62464; HLA-A*32:01; PF4V1; ENSG00000109272; TAA
LLLPVVVAF

SEQ ID NO: 62465 - protein, 9 aa, Homo sapiens
  Table A; Target 62465; HLA-A*33:01; PF4V1; ENSG00000109272; TAA
LLLPVVVAF

SEQ ID NO: 62466 - protein, 9 aa, Homo sapiens
  Table A; Target 62466; HLA-A*33:03; PF4V1; ENSG00000109272; TAA
LLLPVVVAF

SEQ ID NO: 62467 - protein, 9 aa, Homo sapiens
  Table A; Target 62467; HLA-A*68:02; PF4V1; ENSG00000109272; TAA
LLLPVVVAF

SEQ ID NO: 62468 - protein, 9 aa, Homo sapiens
  Table A; Target 62468; HLA-B*08:01; PF4V1; ENSG00000109272; TAA
LLLPVVVAF

SEQ ID NO: 62469 - protein, 9 aa, Homo sapiens
  Table A; Target 62469; HLA-B*15:01; PF4V1; ENSG00000109272; TAA
LLLPVVVAF

SEQ ID NO: 62470 - protein, 9 aa, Homo sapiens
  Table A; Target 62470; HLA-B*15:03; PF4V1; ENSG00000109272; TAA
LLLPVVVAF

SEQ ID NO: 62471 - protein, 9 aa, Homo sapiens
  Table A; Target 62471; HLA-B*18:01; PF4V1; ENSG00000109272; TAA
LLLPVVVAF

SEQ ID NO: 62472 - protein, 9 aa, Homo sapiens
  Table A; Target 62472; HLA-B*27:02; PF4V1; ENSG00000109272; TAA
LLLPVVVAF

SEQ ID NO: 62473 - protein, 9 aa, Homo sapiens
  Table A; Target 62473; HLA-B*27:05; PF4V1; ENSG00000109272; TAA
LLLPVVVAF

SEQ ID NO: 62474 - protein, 9 aa, Homo sapiens
  Table A; Target 62474; HLA-B*35:01; PF4V1; ENSG00000109272; TAA
LLLPVVVAF

SEQ ID NO: 62475 - protein, 9 aa, Homo sapiens
  Table A; Target 62475; HLA-B*35:03; PF4V1; ENSG00000109272; TAA
LLLPVVVAF

SEQ ID NO: 62476 - protein, 9 aa, Homo sapiens
  Table A; Target 62476; HLA-B*37:01; PF4V1; ENSG00000109272; TAA
LLLPVVVAF

SEQ ID NO: 62477 - protein, 9 aa, Homo sapiens
  Table A; Target 62477; HLA-B*38:01; PF4V1; ENSG00000109272; TAA
LLLPVVVAF

SEQ ID NO: 62478 - protein, 9 aa, Homo sapiens
  Table A; Target 62478; HLA-B*40:02; PF4V1; ENSG00000109272; TAA
LLLPVVVAF

SEQ ID NO: 62479 - protein, 9 aa, Homo sapiens
  Table A; Target 62479; HLA-B*44:02; PF4V1; ENSG00000109272; TAA
LLLPVVVAF

SEQ ID NO: 62480 - protein, 9 aa, Homo sapiens
  Table A; Target 62480; HLA-B*44:03; PF4V1; ENSG00000109272; TAA
LLLPVVVAF

SEQ ID NO: 62481 - protein, 9 aa, Homo sapiens
  Table A; Target 62481; HLA-B*46:01; PF4V1; ENSG00000109272; TAA
LLLPVVVAF

SEQ ID NO: 62482 - protein, 9 aa, Homo sapiens
  Table A; Target 62482; HLA-B*51:01; PF4V1; ENSG00000109272; TAA
LLLPVVVAF

SEQ ID NO: 62483 - protein, 9 aa, Homo sapiens
  Table A; Target 62483; HLA-B*54:01; PF4V1; ENSG00000109272; TAA
LLLPVVVAF

SEQ ID NO: 62484 - protein, 9 aa, Homo sapiens
  Table A; Target 62484; HLA-B*55:01; PF4V1; ENSG00000109272; TAA
LLLPVVVAF

SEQ ID NO: 62485 - protein, 9 aa, Homo sapiens
  Table A; Target 62485; HLA-B*57:01; PF4V1; ENSG00000109272; TAA
LLLPVVVAF

SEQ ID NO: 62486 - protein, 9 aa, Homo sapiens
  Table A; Target 62486; HLA-B*58:01; PF4V1; ENSG00000109272; TAA
LLLPVVVAF

SEQ ID NO: 62487 - protein, 9 aa, Homo sapiens
  Table A; Target 62487; HLA-C*01:02; PF4V1; ENSG00000109272; TAA
LLLPVVVAF

SEQ ID NO: 62488 - protein, 9 aa, Homo sapiens
  Table A; Target 62488; HLA-C*02:02; PF4V1; ENSG00000109272; TAA
LLLPVVVAF

SEQ ID NO: 62489 - protein, 9 aa, Homo sapiens
  Table A; Target 62489; HLA-C*03:03; PF4V1; ENSG00000109272; TAA
LLLPVVVAF

SEQ ID NO: 62490 - protein, 9 aa, Homo sapiens
  Table A; Target 62490; HLA-C*03:04; PF4V1; ENSG00000109272; TAA
LLLPVVVAF

SEQ ID NO: 62491 - protein, 9 aa, Homo sapiens
  Table A; Target 62491; HLA-C*04:01; PF4V1; ENSG00000109272; TAA
LLLPVVVAF

SEQ ID NO: 62492 - protein, 9 aa, Homo sapiens
  Table A; Target 62492; HLA-C*06:02; PF4V1; ENSG00000109272; TAA
LLLPVVVAF

SEQ ID NO: 62493 - protein, 9 aa, Homo sapiens
  Table A; Target 62493; HLA-C*07:01; PF4V1; ENSG00000109272; TAA
LLLPVVVAF

SEQ ID NO: 62494 - protein, 9 aa, Homo sapiens
  Table A; Target 62494; HLA-C*07:04; PF4V1; ENSG00000109272; TAA
LLLPVVVAF

SEQ ID NO: 62495 - protein, 9 aa, Homo sapiens
  Table A; Target 62495; HLA-C*12:03; PF4V1; ENSG00000109272; TAA
LLLPVVVAF

SEQ ID NO: 62496 - protein, 9 aa, Homo sapiens
  Table A; Target 62496; HLA-C*14:02; PF4V1; ENSG00000109272; TAA
LLLPVVVAF

SEQ ID NO: 62497 - protein, 9 aa, Homo sapiens
  Table A; Target 62497; HLA-C*16:01; PF4V1; ENSG00000109272; TAA
LLLPVVVAF

SEQ ID NO: 62498 - protein, 9 aa, Homo sapiens
  Table A; Target 62498; HLA-C*16:04; PF4V1; ENSG00000109272; TAA
LLLPVVVAF

SEQ ID NO: 62499 - protein, 10 aa, Homo sapiens
  Table A; Target 62499; HLA-A*02:01; PF4V1; ENSG00000109272; TAA
LLLPVVVAFA

SEQ ID NO: 62500 - protein, 10 aa, Homo sapiens
  Table A; Target 62500; HLA-A*02:03; PF4V1; ENSG00000109272; TAA
LLLPVVVAFA

SEQ ID NO: 62501 - protein, 10 aa, Homo sapiens
  Table A; Target 62501; HLA-A*02:04; PF4V1; ENSG00000109272; TAA
LLLPVVVAFA

SEQ ID NO: 62502 - protein, 10 aa, Homo sapiens
  Table A; Target 62502; HLA-A*02:07; PF4V1; ENSG00000109272; TAA
LLLPVVVAFA

SEQ ID NO: 62503 - protein, 11 aa, Homo sapiens
  Table A; Target 62503; HLA-A*31:01; PF4V1; ENSG00000109272; TAA
LLLPVVVAFAR

SEQ ID NO: 62504 - protein, 11 aa, Homo sapiens
  Table A; Target 62504; HLA-B*27:02; PF4V1; ENSG00000109272; TAA
LLLPVVVAFAR

SEQ ID NO: 62505 - protein, 8 aa, Homo sapiens
  Table A; Target 62505; HLA-A*02:07; PF4V1; ENSG00000109272; TAA
LLPVVVAF

SEQ ID NO: 62506 - protein, 8 aa, Homo sapiens
  Table A; Target 62506; HLA-A*23:01; PF4V1; ENSG00000109272; TAA
LLPVVVAF

SEQ ID NO: 62507 - protein, 8 aa, Homo sapiens
  Table A; Target 62507; HLA-A*24:02; PF4V1; ENSG00000109272; TAA
LLPVVVAF

SEQ ID NO: 62508 - protein, 8 aa, Homo sapiens
  Table A; Target 62508; HLA-B*08:01; PF4V1; ENSG00000109272; TAA
LLPVVVAF

SEQ ID NO: 62509 - protein, 8 aa, Homo sapiens
  Table A; Target 62509; HLA-B*37:01; PF4V1; ENSG00000109272; TAA
LLPVVVAF

SEQ ID NO: 62510 - protein, 8 aa, Homo sapiens
  Table A; Target 62510; HLA-B*46:01; PF4V1; ENSG00000109272; TAA
LLPVVVAF

SEQ ID NO: 62511 - protein, 8 aa, Homo sapiens
  Table A; Target 62511; HLA-C*07:04; PF4V1; ENSG00000109272; TAA
LLPVVVAF

SEQ ID NO: 62512 - protein, 9 aa, Homo sapiens
  Table A; Target 62512; HLA-A*02:01; PF4V1; ENSG00000109272; TAA
LLPVVVAFA

SEQ ID NO: 62513 - protein, 9 aa, Homo sapiens
  Table A; Target 62513; HLA-A*02:03; PF4V1; ENSG00000109272; TAA
LLPVVVAFA

SEQ ID NO: 62514 - protein, 9 aa, Homo sapiens
  Table A; Target 62514; HLA-A*02:04; PF4V1; ENSG00000109272; TAA
LLPVVVAFA

SEQ ID NO: 62515 - protein, 9 aa, Homo sapiens
  Table A; Target 62515; HLA-A*02:07; PF4V1; ENSG00000109272; TAA
LLPVVVAFA

SEQ ID NO: 62516 - protein, 9 aa, Homo sapiens
  Table A; Target 62516; HLA-A*68:02; PF4V1; ENSG00000109272; TAA
LLPVVVAFA

SEQ ID NO: 62517 - protein, 11 aa, Homo sapiens
  Table A; Target 62517; HLA-A*02:07; PF4V1; ENSG00000109272; TAA
LLPVVVAFARA

SEQ ID NO: 62518 - protein, 8 aa, Homo sapiens
  Table A; Target 62518; HLA-B*51:01; PF4V1; ENSG00000109272; TAA
LPVVVAFA

SEQ ID NO: 62519 - protein, 8 aa, Homo sapiens
  Table A; Target 62519; HLA-B*54:01; PF4V1; ENSG00000109272; TAA
LPVVVAFA

SEQ ID NO: 62520 - protein, 8 aa, Homo sapiens
  Table A; Target 62520; HLA-B*55:01; PF4V1; ENSG00000109272; TAA
LPVVVAFA

SEQ ID NO: 62521 - protein, 8 aa, Homo sapiens
  Table A; Target 62521; HLA-B*56:01; PF4V1; ENSG00000109272; TAA
LPVVVAFA

SEQ ID NO: 62522 - protein, 9 aa, Homo sapiens
  Table A; Target 62522; HLA-B*35:01; PF4V1; ENSG00000109272; TAA
LPVVVAFAR

SEQ ID NO: 62523 - protein, 10 aa, Homo sapiens
  Table A; Target 62523; HLA-B*54:01; PF4V1; ENSG00000109272; TAA
LPVVVAFARA

SEQ ID NO: 62524 - protein, 10 aa, Homo sapiens
  Table A; Target 62524; HLA-B*56:01; PF4V1; ENSG00000109272; TAA
LPVVVAFARA

SEQ ID NO: 62525 - protein, 11 aa, Homo sapiens
  Table A; Target 62525; HLA-B*57:01; PF4V1; ENSG00000109272; TAA
LTRATRQEMLF

SEQ ID NO: 62526 - protein, 9 aa, Homo sapiens
  Table A; Target 62526; HLA-A*02:04; PF4V1; ENSG00000109272; TAA
MLFLALLLL

SEQ ID NO: 62527 - protein, 9 aa, Homo sapiens
  Table A; Target 62527; HLA-C*16:01; PF4V1; ENSG00000109272; TAA
MSSAARSRL

SEQ ID NO: 62528 - protein, 9 aa, Homo sapiens
  Table A; Target 62528; HLA-A*25:01; PF4V1; ENSG00000109272; TAA
PTAQLIATL

SEQ ID NO: 62529 - protein, 9 aa, Homo sapiens
  Table A; Target 62529; HLA-A*26:01; PF4V1; ENSG00000109272; TAA
PTAQLIATL

SEQ ID NO: 62530 - protein, 9 aa, Homo sapiens
  Table A; Target 62530; HLA-A*68:02; PF4V1; ENSG00000109272; TAA
PTAQLIATL

SEQ ID NO: 62531 - protein, 9 aa, Homo sapiens
  Table A; Target 62531; HLA-C*06:02; PF4V1; ENSG00000109272; TAA
PTAQLIATL

SEQ ID NO: 62532 - protein, 9 aa, Homo sapiens
  Table A; Target 62532; HLA-C*07:02; PF4V1; ENSG00000109272; TAA
PTAQLIATL

SEQ ID NO: 62533 - protein, 10 aa, Homo sapiens
  Table A; Target 62533; HLA-A*03:02; PF4V1; ENSG00000109272; TAA
PTAQLIATLK

SEQ ID NO: 62534 - protein, 10 aa, Homo sapiens
  Table A; Target 62534; HLA-A*11:01; PF4V1; ENSG00000109272; TAA
PTAQLIATLK

SEQ ID NO: 62535 - protein, 10 aa, Homo sapiens
  Table A; Target 62535; HLA-A*68:01; PF4V1; ENSG00000109272; TAA
PTAQLIATLK

SEQ ID NO: 62536 - protein, 10 aa, Homo sapiens
  Table A; Target 62536; HLA-B*27:02; PF4V1; ENSG00000109272; TAA
PTAQLIATLK

SEQ ID NO: 62537 - protein, 8 aa, Homo sapiens
  Table A; Target 62537; HLA-B*27:02; PF4V1; ENSG00000109272; TAA
PVVVAFAR

SEQ ID NO: 62538 - protein, 8 aa, Homo sapiens
  Table A; Target 62538; HLA-B*51:01; PF4V1; ENSG00000109272; TAA
QALLYKKI

SEQ ID NO: 62539 - protein, 8 aa, Homo sapiens
  Table A; Target 62539; HLA-A*30:01; PF4V1; ENSG00000109272; TAA
QEMLFLAL

SEQ ID NO: 62540 - protein, 8 aa, Homo sapiens
  Table A; Target 62540; HLA-B*18:01; PF4V1; ENSG00000109272; TAA
QEMLFLAL

SEQ ID NO: 62541 - protein, 8 aa, Homo sapiens
  Table A; Target 62541; HLA-B*37:01; PF4V1; ENSG00000109272; TAA
QEMLFLAL

SEQ ID NO: 62542 - protein, 8 aa, Homo sapiens
  Table A; Target 62542; HLA-B*44:02; PF4V1; ENSG00000109272; TAA
QEMLFLAL

SEQ ID NO: 62543 - protein, 8 aa, Homo sapiens
  Table A; Target 62543; HLA-B*49:01; PF4V1; ENSG00000109272; TAA
QEMLFLAL

SEQ ID NO: 62544 - protein, 9 aa, Homo sapiens
  Table A; Target 62544; HLA-B*44:02; PF4V1; ENSG00000109272; TAA
QEMLFLALL

SEQ ID NO: 62545 - protein, 9 aa, Homo sapiens
  Table A; Target 62545; HLA-B*44:03; PF4V1; ENSG00000109272; TAA
QEMLFLALL

SEQ ID NO: 62546 - protein, 9 aa, Homo sapiens
  Table A; Target 62546; HLA-B*49:01; PF4V1; ENSG00000109272; TAA
QEMLFLALL

SEQ ID NO: 62547 - protein, 10 aa, Homo sapiens
  Table A; Target 62547; HLA-B*44:02; PF4V1; ENSG00000109272; TAA
QEMLFLALLL

SEQ ID NO: 62548 - protein, 9 aa, Homo sapiens
  Table A; Target 62548; HLA-B*57:01; PF4V1; ENSG00000109272; TAA
RATRQEMLF

SEQ ID NO: 62549 - protein, 9 aa, Homo sapiens
  Table A; Target 62549; HLA-B*38:01; PF4V1; ENSG00000109272; TAA
RHITSLEVI

SEQ ID NO: 62550 - protein, 8 aa, Homo sapiens
  Table A; Target 62550; HLA-B*07:02; PF4V1; ENSG00000109272; TAA
RPRHITSL

SEQ ID NO: 62551 - protein, 8 aa, Homo sapiens
  Table A; Target 62551; HLA-B*08:01; PF4V1; ENSG00000109272; TAA
RPRHITSL

SEQ ID NO: 62552 - protein, 8 aa, Homo sapiens
  Table A; Target 62552; HLA-C*07:02; PF4V1; ENSG00000109272; TAA
RPRHITSL

SEQ ID NO: 62553 - protein, 10 aa, Homo sapiens
  Table A; Target 62553; HLA-B*07:02; PF4V1; ENSG00000109272; TAA
RPRHITSLEV

SEQ ID NO: 62554 - protein, 10 aa, Homo sapiens
  Table A; Target 62554; HLA-C*07:02; PF4V1; ENSG00000109272; TAA
RPRHITSLEV

SEQ ID NO: 62555 - protein, 8 aa, Homo sapiens
  Table A; Target 62555; HLA-C*16:01; PF4V1; ENSG00000109272; TAA
SSAARSRL

SEQ ID NO: 62556 - protein, 9 aa, Homo sapiens
  Table A; Target 62556; HLA-C*16:01; PF4V1; ENSG00000109272; TAA
SSAARSRLT

SEQ ID NO: 62557 - protein, 8 aa, Homo sapiens
  Table A; Target 62557; HLA-B*08:01; PF4V1; ENSG00000109272; TAA
TAQLIATL

SEQ ID NO: 62558 - protein, 8 aa, Homo sapiens
  Table A; Target 62558; HLA-B*35:03; PF4V1; ENSG00000109272; TAA
TAQLIATL

SEQ ID NO: 62559 - protein, 8 aa, Homo sapiens
  Table A; Target 62559; HLA-B*51:01; PF4V1; ENSG00000109272; TAA
TAQLIATL

SEQ ID NO: 62560 - protein, 8 aa, Homo sapiens
  Table A; Target 62560; HLA-C*01:02; PF4V1; ENSG00000109272; TAA
TAQLIATL

SEQ ID NO: 62561 - protein, 8 aa, Homo sapiens
  Table A; Target 62561; HLA-C*03:04; PF4V1; ENSG00000109272; TAA
TAQLIATL

SEQ ID NO: 62562 - protein, 9 aa, Homo sapiens
  Table A; Target 62562; HLA-A*03:02; PF4V1; ENSG00000109272; TAA
TAQLIATLK

SEQ ID NO: 62563 - protein, 9 aa, Homo sapiens
  Table A; Target 62563; HLA-A*11:01; PF4V1; ENSG00000109272; TAA
TAQLIATLK

SEQ ID NO: 62564 - protein, 9 aa, Homo sapiens
  Table A; Target 62564; HLA-A*33:01; PF4V1; ENSG00000109272; TAA
TAQLIATLK

SEQ ID NO: 62565 - protein, 9 aa, Homo sapiens
  Table A; Target 62565; HLA-A*33:03; PF4V1; ENSG00000109272; TAA
TAQLIATLK

SEQ ID NO: 62566 - protein, 9 aa, Homo sapiens
  Table A; Target 62566; HLA-A*68:01; PF4V1; ENSG00000109272; TAA
TAQLIATLK

SEQ ID NO: 62567 - protein, 9 aa, Homo sapiens
  Table A; Target 62567; HLA-B*27:02; PF4V1; ENSG00000109272; TAA
TAQLIATLK

SEQ ID NO: 62568 - protein, 9 aa, Homo sapiens
  Table A; Target 62568; HLA-C*07:06; PF4V1; ENSG00000109272; TAA
TAQLIATLK

SEQ ID NO: 62569 - protein, 8 aa, Homo sapiens
  Table A; Target 62569; HLA-C*16:01; PF4V1; ENSG00000109272; TAA
TRATRQEM

SEQ ID NO: 62570 - protein, 9 aa, Homo sapiens
  Table A; Target 62570; HLA-C*16:01; PF4V1; ENSG00000109272; TAA
TRATRQEML

SEQ ID NO: 62571 - protein, 8 aa, Homo sapiens
  Table A; Target 62571; HLA-B*54:01; PF4V1; ENSG00000109272; TAA
TSLEVIKA

SEQ ID NO: 62572 - protein, 8 aa, Homo sapiens
  Table A; Target 62572; HLA-A*33:03; PF4V1; ENSG00000109272; TAA
TTSQVRPR

SEQ ID NO: 62573 - protein, 8 aa, Homo sapiens
  Table A; Target 62573; HLA-A*68:01; PF4V1; ENSG00000109272; TAA
TTSQVRPR

SEQ ID NO: 62574 - protein, 8 aa, Homo sapiens
  Table A; Target 62574; HLA-B*54:01; PF4V1; ENSG00000109272; TAA
VAFARAEA

SEQ ID NO: 62575 - protein, 8 aa, Homo sapiens
  Table A; Target 62575; HLA-B*56:01; PF4V1; ENSG00000109272; TAA
VAFARAEA

SEQ ID NO: 62576 - protein, 9 aa, Homo sapiens
  Table A; Target 62576; HLA-C*06:02; PF4V1; ENSG00000109272; TAA
VRPRHITSL

SEQ ID NO: 62577 - protein, 9 aa, Homo sapiens
  Table A; Target 62577; HLA-C*07:02; PF4V1; ENSG00000109272; TAA
VRPRHITSL

SEQ ID NO: 62578 - protein, 8 aa, Homo sapiens
  Table A; Target 62578; HLA-C*16:01; PKHD1; ENSG00000170927; TAA
AAASHGVL

SEQ ID NO: 62579 - protein, 9 aa, Homo sapiens
  Table A; Target 62579; HLA-C*02:02; PKHD1; ENSG00000170927; TAA
AAASHGVLL

SEQ ID NO: 62580 - protein, 9 aa, Homo sapiens
  Table A; Target 62580; HLA-C*03:03; PKHD1; ENSG00000170927; TAA
AAASHGVLL

SEQ ID NO: 62581 - protein, 9 aa, Homo sapiens
  Table A; Target 62581; HLA-C*03:04; PKHD1; ENSG00000170927; TAA
AAASHGVLL

SEQ ID NO: 62582 - protein, 9 aa, Homo sapiens
  Table A; Target 62582; HLA-C*16:01; PKHD1; ENSG00000170927; TAA
AAASHGVLL

SEQ ID NO: 62583 - protein, 9 aa, Homo sapiens
  Table A; Target 62583; HLA-B*54:01; PKHD1; ENSG00000170927; TAA
AAATPVVTA

SEQ ID NO: 62584 - protein, 9 aa, Homo sapiens
  Table A; Target 62584; HLA-B*56:01; PKHD1; ENSG00000170927; TAA
AAATPVVTA

SEQ ID NO: 62585 - protein, 9 aa, Homo sapiens
  Table A; Target 62585; HLA-C*02:02; PKHD1; ENSG00000170927; TAA
AAATPVVTA

SEQ ID NO: 62586 - protein, 9 aa, Homo sapiens
  Table A; Target 62586; HLA-C*12:03; PKHD1; ENSG00000170927; TAA
AAATPVVTA

SEQ ID NO: 62587 - protein, 10 aa, Homo sapiens
  Table A; Target 62587; HLA-A*26:01; PKHD1; ENSG00000170927; TAA
AAATPVVTAM

SEQ ID NO: 62588 - protein, 10 aa, Homo sapiens
  Table A; Target 62588; HLA-B*39:01; PKHD1; ENSG00000170927; TAA
AAATPVVTAM

SEQ ID NO: 62589 - protein, 10 aa, Homo sapiens
  Table A; Target 62589; HLA-B*46:01; PKHD1; ENSG00000170927; TAA
AAATPVVTAM

SEQ ID NO: 62590 - protein, 10 aa, Homo sapiens
  Table A; Target 62590; HLA-C*01:02; PKHD1; ENSG00000170927; TAA
AAATPVVTAM

SEQ ID NO: 62591 - protein, 10 aa, Homo sapiens
  Table A; Target 62591; HLA-C*02:02; PKHD1; ENSG00000170927; TAA
AAATPVVTAM

SEQ ID NO: 62592 - protein, 10 aa, Homo sapiens
  Table A; Target 62592; HLA-C*03:03; PKHD1; ENSG00000170927; TAA
AAATPVVTAM

SEQ ID NO: 62593 - protein, 10 aa, Homo sapiens
  Table A; Target 62593; HLA-C*03:04; PKHD1; ENSG00000170927; TAA
AAATPVVTAM

SEQ ID NO: 62594 - protein, 10 aa, Homo sapiens
  Table A; Target 62594; HLA-C*07:06; PKHD1; ENSG00000170927; TAA
AAATPVVTAM

SEQ ID NO: 62595 - protein, 10 aa, Homo sapiens
  Table A; Target 62595; HLA-C*12:03; PKHD1; ENSG00000170927; TAA
AAATPVVTAM

SEQ ID NO: 62596 - protein, 10 aa, Homo sapiens
  Table A; Target 62596; HLA-C*16:04; PKHD1; ENSG00000170927; TAA
AAATPVVTAM

SEQ ID NO: 62597 - protein, 8 aa, Homo sapiens
  Table A; Target 62597; HLA-C*16:01; PKHD1; ENSG00000170927; TAA
AAATRVVY

SEQ ID NO: 62598 - protein, 8 aa, Homo sapiens
  Table A; Target 62598; HLA-C*05:01; PKHD1; ENSG00000170927; TAA
AADIGGLW

SEQ ID NO: 62599 - protein, 9 aa, Homo sapiens
  Table A; Target 62599; HLA-C*07:06; PKHD1; ENSG00000170927; TAA
AAEVGLLTR

SEQ ID NO: 62600 - protein, 8 aa, Homo sapiens
  Table A; Target 62600; HLA-C*16:01; PKHD1; ENSG00000170927; TAA
AASHGVLL

SEQ ID NO: 62601 - protein, 10 aa, Homo sapiens
  Table A; Target 62601; HLA-A*25:01; PKHD1; ENSG00000170927; TAA
AASLSSVASW

SEQ ID NO: 62602 - protein, 8 aa, Homo sapiens
  Table A; Target 62602; HLA-B*56:01; PKHD1; ENSG00000170927; TAA
AATPVVTA

SEQ ID NO: 62603 - protein, 9 aa, Homo sapiens
  Table A; Target 62603; HLA-A*23:01; PKHD1; ENSG00000170927; TAA
AATPVVTAM

SEQ ID NO: 62604 - protein, 9 aa, Homo sapiens
  Table A; Target 62604; HLA-A*24:02; PKHD1; ENSG00000170927; TAA
AATPVVTAM

SEQ ID NO: 62605 - protein, 9 aa, Homo sapiens
  Table A; Target 62605; HLA-A*25:01; PKHD1; ENSG00000170927; TAA
AATPVVTAM

SEQ ID NO: 62606 - protein, 9 aa, Homo sapiens
  Table A; Target 62606; HLA-A*26:01; PKHD1; ENSG00000170927; TAA
AATPVVTAM

SEQ ID NO: 62607 - protein, 9 aa, Homo sapiens
  Table A; Target 62607; HLA-A*30:01; PKHD1; ENSG00000170927; TAA
AATPVVTAM

SEQ ID NO: 62608 - protein, 9 aa, Homo sapiens
  Table A; Target 62608; HLA-A*30:02; PKHD1; ENSG00000170927; TAA
AATPVVTAM

SEQ ID NO: 62609 - protein, 9 aa, Homo sapiens
  Table A; Target 62609; HLA-A*32:01; PKHD1; ENSG00000170927; TAA
AATPVVTAM

SEQ ID NO: 62610 - protein, 9 aa, Homo sapiens
  Table A; Target 62610; HLA-A*68:01; PKHD1; ENSG00000170927; TAA
AATPVVTAM

SEQ ID NO: 62611 - protein, 9 aa, Homo sapiens
  Table A; Target 62611; HLA-B*07:02; PKHD1; ENSG00000170927; TAA
AATPVVTAM

SEQ ID NO: 62612 - protein, 9 aa, Homo sapiens
  Table A; Target 62612; HLA-B*13:02; PKHD1; ENSG00000170927; TAA
AATPVVTAM

SEQ ID NO: 62613 - protein, 9 aa, Homo sapiens
  Table A; Target 62613; HLA-B*15:01; PKHD1; ENSG00000170927; TAA
AATPVVTAM

SEQ ID NO: 62614 - protein, 9 aa, Homo sapiens
  Table A; Target 62614; HLA-B*15:03; PKHD1; ENSG00000170927; TAA
AATPVVTAM

SEQ ID NO: 62615 - protein, 9 aa, Homo sapiens
  Table A; Target 62615; HLA-B*18:01; PKHD1; ENSG00000170927; TAA
AATPVVTAM

SEQ ID NO: 62616 - protein, 9 aa, Homo sapiens
  Table A; Target 62616; HLA-B*27:05; PKHD1; ENSG00000170927; TAA
AATPVVTAM

SEQ ID NO: 62617 - protein, 9 aa, Homo sapiens
  Table A; Target 62617; HLA-B*35:01; PKHD1; ENSG00000170927; TAA
AATPVVTAM

SEQ ID NO: 62618 - protein, 9 aa, Homo sapiens
  Table A; Target 62618; HLA-B*35:03; PKHD1; ENSG00000170927; TAA
AATPVVTAM

SEQ ID NO: 62619 - protein, 9 aa, Homo sapiens
  Table A; Target 62619; HLA-B*37:01; PKHD1; ENSG00000170927; TAA
AATPVVTAM

SEQ ID NO: 62620 - protein, 9 aa, Homo sapiens
  Table A; Target 62620; HLA-B*39:01; PKHD1; ENSG00000170927; TAA
AATPVVTAM

SEQ ID NO: 62621 - protein, 9 aa, Homo sapiens
  Table A; Target 62621; HLA-B*40:01; PKHD1; ENSG00000170927; TAA
AATPVVTAM

SEQ ID NO: 62622 - protein, 9 aa, Homo sapiens
  Table A; Target 62622; HLA-B*44:03; PKHD1; ENSG00000170927; TAA
AATPVVTAM

SEQ ID NO: 62623 - protein, 9 aa, Homo sapiens
  Table A; Target 62623; HLA-B*46:01; PKHD1; ENSG00000170927; TAA
AATPVVTAM

SEQ ID NO: 62624 - protein, 9 aa, Homo sapiens
  Table A; Target 62624; HLA-B*51:01; PKHD1; ENSG00000170927; TAA
AATPVVTAM

SEQ ID NO: 62625 - protein, 9 aa, Homo sapiens
  Table A; Target 62625; HLA-B*55:01; PKHD1; ENSG00000170927; TAA
AATPVVTAM

SEQ ID NO: 62626 - protein, 9 aa, Homo sapiens
  Table A; Target 62626; HLA-B*56:01; PKHD1; ENSG00000170927; TAA
AATPVVTAM

SEQ ID NO: 62627 - protein, 9 aa, Homo sapiens
  Table A; Target 62627; HLA-B*58:01; PKHD1; ENSG00000170927; TAA
AATPVVTAM

SEQ ID NO: 62628 - protein, 9 aa, Homo sapiens
  Table A; Target 62628; HLA-C*01:02; PKHD1; ENSG00000170927; TAA
AATPVVTAM

SEQ ID NO: 62629 - protein, 9 aa, Homo sapiens
  Table A; Target 62629; HLA-C*02:02; PKHD1; ENSG00000170927; TAA
AATPVVTAM

SEQ ID NO: 62630 - protein, 9 aa, Homo sapiens
  Table A; Target 62630; HLA-C*03:03; PKHD1; ENSG00000170927; TAA
AATPVVTAM

SEQ ID NO: 62631 - protein, 9 aa, Homo sapiens
  Table A; Target 62631; HLA-C*03:04; PKHD1; ENSG00000170927; TAA
AATPVVTAM

SEQ ID NO: 62632 - protein, 9 aa, Homo sapiens
  Table A; Target 62632; HLA-C*04:01; PKHD1; ENSG00000170927; TAA
AATPVVTAM

SEQ ID NO: 62633 - protein, 9 aa, Homo sapiens
  Table A; Target 62633; HLA-C*05:01; PKHD1; ENSG00000170927; TAA
AATPVVTAM

SEQ ID NO: 62634 - protein, 9 aa, Homo sapiens
  Table A; Target 62634; HLA-C*07:02; PKHD1; ENSG00000170927; TAA
AATPVVTAM

SEQ ID NO: 62635 - protein, 9 aa, Homo sapiens
  Table A; Target 62635; HLA-C*07:04; PKHD1; ENSG00000170927; TAA
AATPVVTAM

SEQ ID NO: 62636 - protein, 9 aa, Homo sapiens
  Table A; Target 62636; HLA-C*07:06; PKHD1; ENSG00000170927; TAA
AATPVVTAM

SEQ ID NO: 62637 - protein, 9 aa, Homo sapiens
  Table A; Target 62637; HLA-C*12:03; PKHD1; ENSG00000170927; TAA
AATPVVTAM

SEQ ID NO: 62638 - protein, 9 aa, Homo sapiens
  Table A; Target 62638; HLA-C*14:02; PKHD1; ENSG00000170927; TAA
AATPVVTAM

SEQ ID NO: 62639 - protein, 9 aa, Homo sapiens
  Table A; Target 62639; HLA-C*16:01; PKHD1; ENSG00000170927; TAA
AATPVVTAM

SEQ ID NO: 62640 - protein, 9 aa, Homo sapiens
  Table A; Target 62640; HLA-C*16:02; PKHD1; ENSG00000170927; TAA
AATPVVTAM

SEQ ID NO: 62641 - protein, 9 aa, Homo sapiens
  Table A; Target 62641; HLA-C*16:04; PKHD1; ENSG00000170927; TAA
AATPVVTAM

SEQ ID NO: 62642 - protein, 9 aa, Homo sapiens
  Table A; Target 62642; HLA-B*37:01; PKHD1; ENSG00000170927; TAA
ADSQASLHF

SEQ ID NO: 62643 - protein, 9 aa, Homo sapiens
  Table A; Target 62643; HLA-A*30:01; PKHD1; ENSG00000170927; TAA
AEGLSNPEM

SEQ ID NO: 62644 - protein, 9 aa, Homo sapiens
  Table A; Target 62644; HLA-B*40:01; PKHD1; ENSG00000170927; TAA
AEGLSNPEM

SEQ ID NO: 62645 - protein, 9 aa, Homo sapiens
  Table A; Target 62645; HLA-B*44:02; PKHD1; ENSG00000170927; TAA
AEGLSNPEM

SEQ ID NO: 62646 - protein, 9 aa, Homo sapiens
  Table A; Target 62646; HLA-B*44:03; PKHD1; ENSG00000170927; TAA
AEGLSNPEM

SEQ ID NO: 62647 - protein, 9 aa, Homo sapiens
  Table A; Target 62647; HLA-B*49:01; PKHD1; ENSG00000170927; TAA
AEGLSNPEM

SEQ ID NO: 62648 - protein, 9 aa, Homo sapiens
  Table A; Target 62648; HLA-C*16:04; PKHD1; ENSG00000170927; TAA
AEGLSNPEM

SEQ ID NO: 62649 - protein, 10 aa, Homo sapiens
  Table A; Target 62649; HLA-B*40:01; PKHD1; ENSG00000170927; TAA
AEGLSNPEML

SEQ ID NO: 62650 - protein, 10 aa, Homo sapiens
  Table A; Target 62650; HLA-B*44:02; PKHD1; ENSG00000170927; TAA
AENSGIMHPI

SEQ ID NO: 62651 - protein, 10 aa, Homo sapiens
  Table A; Target 62651; HLA-B*44:03; PKHD1; ENSG00000170927; TAA
AENSGIMHPI

SEQ ID NO: 62652 - protein, 10 aa, Homo sapiens
  Table A; Target 62652; HLA-B*49:01; PKHD1; ENSG00000170927; TAA
AENSGIMHPI

SEQ ID NO: 62653 - protein, 8 aa, Homo sapiens
  Table A; Target 62653; HLA-B*18:01; PKHD1; ENSG00000170927; TAA
AESMFPSF

SEQ ID NO: 62654 - protein, 8 aa, Homo sapiens
  Table A; Target 62654; HLA-B*37:01; PKHD1; ENSG00000170927; TAA
AESMFPSF

SEQ ID NO: 62655 - protein, 8 aa, Homo sapiens
  Table A; Target 62655; HLA-B*44:02; PKHD1; ENSG00000170927; TAA
AESMFPSF

SEQ ID NO: 62656 - protein, 10 aa, Homo sapiens
  Table A; Target 62656; HLA-A*30:01; PKHD1; ENSG00000170927; TAA
AETQDGYVSF

SEQ ID NO: 62657 - protein, 10 aa, Homo sapiens
  Table A; Target 62657; HLA-B*40:01; PKHD1; ENSG00000170927; TAA
AETQDGYVSF

SEQ ID NO: 62658 - protein, 10 aa, Homo sapiens
  Table A; Target 62658; HLA-B*44:02; PKHD1; ENSG00000170927; TAA
AETQDGYVSF

SEQ ID NO: 62659 - protein, 10 aa, Homo sapiens
  Table A; Target 62659; HLA-B*44:03; PKHD1; ENSG00000170927; TAA
AETQDGYVSF

SEQ ID NO: 62660 - protein, 10 aa, Homo sapiens
  Table A; Target 62660; HLA-C*16:04; PKHD1; ENSG00000170927; TAA
AETQDGYVSF

SEQ ID NO: 62661 - protein, 11 aa, Homo sapiens
  Table A; Target 62661; HLA-B*44:02; PKHD1; ENSG00000170927; TAA
AETQDGYVSFY

SEQ ID NO: 62662 - protein, 11 aa, Homo sapiens
  Table A; Target 62662; HLA-B*44:03; PKHD1; ENSG00000170927; TAA
AETQDGYVSFY

SEQ ID NO: 62663 - protein, 10 aa, Homo sapiens
  Table A; Target 62663; HLA-B*44:02; PKHD1; ENSG00000170927; TAA
AEVGLLTRNI

SEQ ID NO: 62664 - protein, 10 aa, Homo sapiens
  Table A; Target 62664; HLA-B*44:03; PKHD1; ENSG00000170927; TAA
AEVGLLTRNI

SEQ ID NO: 62665 - protein, 10 aa, Homo sapiens
  Table A; Target 62665; HLA-B*49:01; PKHD1; ENSG00000170927; TAA
AEVGLLTRNI

SEQ ID NO: 62666 - protein, 9 aa, Homo sapiens
  Table A; Target 62666; HLA-A*30:01; PKHD1; ENSG00000170927; TAA
AEVLTVKEV

SEQ ID NO: 62667 - protein, 9 aa, Homo sapiens
  Table A; Target 62667; HLA-B*37:01; PKHD1; ENSG00000170927; TAA
AEVLTVKEV

SEQ ID NO: 62668 - protein, 9 aa, Homo sapiens
  Table A; Target 62668; HLA-B*40:01; PKHD1; ENSG00000170927; TAA
AEVLTVKEV

SEQ ID NO: 62669 - protein, 9 aa, Homo sapiens
  Table A; Target 62669; HLA-B*40:02; PKHD1; ENSG00000170927; TAA
AEVLTVKEV

SEQ ID NO: 62670 - protein, 9 aa, Homo sapiens
  Table A; Target 62670; HLA-B*44:02; PKHD1; ENSG00000170927; TAA
AEVLTVKEV

SEQ ID NO: 62671 - protein, 9 aa, Homo sapiens
  Table A; Target 62671; HLA-B*44:03; PKHD1; ENSG00000170927; TAA
AEVLTVKEV

SEQ ID NO: 62672 - protein, 9 aa, Homo sapiens
  Table A; Target 62672; HLA-B*49:01; PKHD1; ENSG00000170927; TAA
AEVLTVKEV

SEQ ID NO: 62673 - protein, 9 aa, Homo sapiens
  Table A; Target 62673; HLA-C*16:04; PKHD1; ENSG00000170927; TAA
AEVLTVKEV

SEQ ID NO: 62674 - protein, 8 aa, Homo sapiens
  Table A; Target 62674; HLA-B*37:01; PKHD1; ENSG00000170927; TAA
AEWTASFF

SEQ ID NO: 62675 - protein, 9 aa, Homo sapiens
  Table A; Target 62675; HLA-A*30:01; PKHD1; ENSG00000170927; TAA
AEYIDSPVI

SEQ ID NO: 62676 - protein, 9 aa, Homo sapiens
  Table A; Target 62676; HLA-B*37:01; PKHD1; ENSG00000170927; TAA
AEYIDSPVI

SEQ ID NO: 62677 - protein, 9 aa, Homo sapiens
  Table A; Target 62677; HLA-B*40:01; PKHD1; ENSG00000170927; TAA
AEYIDSPVI

SEQ ID NO: 62678 - protein, 9 aa, Homo sapiens
  Table A; Target 62678; HLA-B*40:02; PKHD1; ENSG00000170927; TAA
AEYIDSPVI

SEQ ID NO: 62679 - protein, 9 aa, Homo sapiens
  Table A; Target 62679; HLA-B*44:02; PKHD1; ENSG00000170927; TAA
AEYIDSPVI

SEQ ID NO: 62680 - protein, 9 aa, Homo sapiens
  Table A; Target 62680; HLA-B*44:03; PKHD1; ENSG00000170927; TAA
AEYIDSPVI

SEQ ID NO: 62681 - protein, 9 aa, Homo sapiens
  Table A; Target 62681; HLA-B*49:01; PKHD1; ENSG00000170927; TAA
AEYIDSPVI

SEQ ID NO: 62682 - protein, 9 aa, Homo sapiens
  Table A; Target 62682; HLA-C*16:04; PKHD1; ENSG00000170927; TAA
AEYIDSPVI

SEQ ID NO: 62683 - protein, 10 aa, Homo sapiens
  Table A; Target 62683; HLA-A*30:01; PKHD1; ENSG00000170927; TAA
AEYIDSPVIL

SEQ ID NO: 62684 - protein, 10 aa, Homo sapiens
  Table A; Target 62684; HLA-B*40:01; PKHD1; ENSG00000170927; TAA
AEYIDSPVIL

SEQ ID NO: 62685 - protein, 10 aa, Homo sapiens
  Table A; Target 62685; HLA-B*49:01; PKHD1; ENSG00000170927; TAA
AEYIDSPVIL

SEQ ID NO: 62686 - protein, 9 aa, Homo sapiens
  Table A; Target 62686; HLA-A*23:01; PKHD1; ENSG00000170927; TAA
AFTPELISI

SEQ ID NO: 62687 - protein, 10 aa, Homo sapiens
  Table A; Target 62687; HLA-B*56:01; PKHD1; ENSG00000170927; TAA
AGFSPGNVSA

SEQ ID NO: 62688 - protein, 9 aa, Homo sapiens
  Table A; Target 62688; HLA-A*31:01; PKHD1; ENSG00000170927; TAA
AGIYPLQVR

SEQ ID NO: 62689 - protein, 11 aa, Homo sapiens
  Table A; Target 62689; HLA-A*11:01; PKHD1; ENSG00000170927; TAA
AGIYPLQVRQK

SEQ ID NO: 62690 - protein, 8 aa, Homo sapiens
  Table A; Target 62690; HLA-C*16:01; PKHD1; ENSG00000170927; TAA
AGSERLGF

SEQ ID NO: 62691 - protein, 10 aa, Homo sapiens
  Table A; Target 62691; HLA-B*39:01; PKHD1; ENSG00000170927; TAA
AHALDTVLAL

SEQ ID NO: 62692 - protein, 9 aa, Homo sapiens
  Table A; Target 62692; HLA-A*29:02; PKHD1; ENSG00000170927; TAA
AIWAIQKLY

SEQ ID NO: 62693 - protein, 10 aa, Homo sapiens
  Table A; Target 62693; HLA-A*02:03; PKHD1; ENSG00000170927; TAA
ALAPVHTQSA

SEQ ID NO: 62694 - protein, 11 aa, Homo sapiens
  Table A; Target 62694; HLA-A*25:01; PKHD1; ENSG00000170927; TAA
ALAPVHTQSAW

SEQ ID NO: 62695 - protein, 11 aa, Homo sapiens
  Table A; Target 62695; HLA-A*32:01; PKHD1; ENSG00000170927; TAA
ALAPVHTQSAW

SEQ ID NO: 62696 - protein, 11 aa, Homo sapiens
  Table A; Target 62696; HLA-B*58:01; PKHD1; ENSG00000170927; TAA
ALAPVHTQSAW

SEQ ID NO: 62697 - protein, 9 aa, Homo sapiens
  Table A; Target 62697; HLA-A*30:02; PKHD1; ENSG00000170927; TAA
ALLLDQETY

SEQ ID NO: 62698 - protein, 9 aa, Homo sapiens
  Table A; Target 62698; HLA-B*15:01; PKHD1; ENSG00000170927; TAA
ALLLDQETY

SEQ ID NO: 62699 - protein, 9 aa, Homo sapiens
  Table A; Target 62699; HLA-B*15:03; PKHD1; ENSG00000170927; TAA
ALLLDQETY

SEQ ID NO: 62700 - protein, 9 aa, Homo sapiens
  Table A; Target 62700; HLA-A*02:01; PKHD1; ENSG00000170927; TAA
ALLSRSITI

SEQ ID NO: 62701 - protein, 9 aa, Homo sapiens
  Table A; Target 62701; HLA-A*02:04; PKHD1; ENSG00000170927; TAA
ALLSRSITI

SEQ ID NO: 62702 - protein, 9 aa, Homo sapiens
  Table A; Target 62702; HLA-A*02:01; PKHD1; ENSG00000170927; TAA
ALPPLPAGL

SEQ ID NO: 62703 - protein, 9 aa, Homo sapiens
  Table A; Target 62703; HLA-A*02:03; PKHD1; ENSG00000170927; TAA
ALPPLPAGL

SEQ ID NO: 62704 - protein, 9 aa, Homo sapiens
  Table A; Target 62704; HLA-A*02:07; PKHD1; ENSG00000170927; TAA
ALPPLPAGL

SEQ ID NO: 62705 - protein, 9 aa, Homo sapiens
  Table A; Target 62705; HLA-A*02:01; PKHD1; ENSG00000170927; TAA
AMLHVENSV

SEQ ID NO: 62706 - protein, 9 aa, Homo sapiens
  Table A; Target 62706; HLA-A*26:01; PKHD1; ENSG00000170927; TAA
ANIDIFIGM

SEQ ID NO: 62707 - protein, 10 aa, Homo sapiens
  Table A; Target 62707; HLA-A*23:01; PKHD1; ENSG00000170927; TAA
ANMSVVLQQF

SEQ ID NO: 62708 - protein, 9 aa, Homo sapiens
  Table A; Target 62708; HLA-B*56:01; PKHD1; ENSG00000170927; TAA
APCRVLANA

SEQ ID NO: 62709 - protein, 11 aa, Homo sapiens
  Table A; Target 62709; HLA-B*56:01; PKHD1; ENSG00000170927; TAA
APCRVLANATV

SEQ ID NO: 62710 - protein, 9 aa, Homo sapiens
  Table A; Target 62710; HLA-B*56:01; PKHD1; ENSG00000170927; TAA
APGAPAQQV

SEQ ID NO: 62711 - protein, 9 aa, Homo sapiens
  Table A; Target 62711; HLA-B*07:02; PKHD1; ENSG00000170927; TAA
APGPHYLSV

SEQ ID NO: 62712 - protein, 9 aa, Homo sapiens
  Table A; Target 62712; HLA-B*56:01; PKHD1; ENSG00000170927; TAA
APGPHYLSV

SEQ ID NO: 62713 - protein, 9 aa, Homo sapiens
  Table A; Target 62713; HLA-C*07:02; PKHD1; ENSG00000170927; TAA
APGPHYLSV

SEQ ID NO: 62714 - protein, 9 aa, Homo sapiens
  Table A; Target 62714; HLA-B*56:01; PKHD1; ENSG00000170927; TAA
APGPIELRA

SEQ ID NO: 62715 - protein, 11 aa, Homo sapiens
  Table A; Target 62715; HLA-B*56:01; PKHD1; ENSG00000170927; TAA
APGPIELRAHA

SEQ ID NO: 62716 - protein, 11 aa, Homo sapiens
  Table A; Target 62716; HLA-B*56:01; PKHD1; ENSG00000170927; TAA
APLLSFTQNIA

SEQ ID NO: 62717 - protein, 9 aa, Homo sapiens
  Table A; Target 62717; HLA-B*56:01; PKHD1; ENSG00000170927; TAA
APQNSVKKV

SEQ ID NO: 62718 - protein, 9 aa, Homo sapiens
  Table A; Target 62718; HLA-C*16:02; PKHD1; ENSG00000170927; TAA
APQNSVKKV

SEQ ID NO: 62719 - protein, 8 aa, Homo sapiens
  Table A; Target 62719; HLA-B*56:01; PKHD1; ENSG00000170927; TAA
APTVPAAV

SEQ ID NO: 62720 - protein, 8 aa, Homo sapiens
  Table A; Target 62720; HLA-B*56:01; PKHD1; ENSG00000170927; TAA
APVHTQSA

SEQ ID NO: 62721 - protein, 9 aa, Homo sapiens
  Table A; Target 62721; HLA-B*58:01; PKHD1; ENSG00000170927; TAA
APVHTQSAW

SEQ ID NO: 62722 - protein, 8 aa, Homo sapiens
  Table A; Target 62722; HLA-A*01:01; PKHD1; ENSG00000170927; TAA
AQETGLFY

SEQ ID NO: 62723 - protein, 9 aa, Homo sapiens
  Table A; Target 62723; HLA-B*15:01; PKHD1; ENSG00000170927; TAA
AQIFRSSNL

SEQ ID NO: 62724 - protein, 9 aa, Homo sapiens
  Table A; Target 62724; HLA-B*37:01; PKHD1; ENSG00000170927; TAA
AQIFRSSNL

SEQ ID NO: 62725 - protein, 9 aa, Homo sapiens
  Table A; Target 62725; HLA-B*13:02; PKHD1; ENSG00000170927; TAA
AQISGAANI

SEQ ID NO: 62726 - protein, 10 aa, Homo sapiens
  Table A; Target 62726; HLA-A*26:01; PKHD1; ENSG00000170927; TAA
AQITLYGSSY

SEQ ID NO: 62727 - protein, 10 aa, Homo sapiens
  Table A; Target 62727; HLA-A*30:02; PKHD1; ENSG00000170927; TAA
AQITLYGSSY

SEQ ID NO: 62728 - protein, 10 aa, Homo sapiens
  Table A; Target 62728; HLA-A*32:01; PKHD1; ENSG00000170927; TAA
AQITLYGSSY

SEQ ID NO: 62729 - protein, 10 aa, Homo sapiens
  Table A; Target 62729; HLA-B*15:01; PKHD1; ENSG00000170927; TAA
AQITLYGSSY

SEQ ID NO: 62730 - protein, 10 aa, Homo sapiens
  Table A; Target 62730; HLA-B*15:03; PKHD1; ENSG00000170927; TAA
AQITLYGSSY

SEQ ID NO: 62731 - protein, 10 aa, Homo sapiens
  Table A; Target 62731; HLA-B*27:02; PKHD1; ENSG00000170927; TAA
AQITLYGSSY

SEQ ID NO: 62732 - protein, 10 aa, Homo sapiens
  Table A; Target 62732; HLA-B*39:01; PKHD1; ENSG00000170927; TAA
AQITLYGSSY

SEQ ID NO: 62733 - protein, 10 aa, Homo sapiens
  Table A; Target 62733; HLA-B*44:03; PKHD1; ENSG00000170927; TAA
AQITLYGSSY

SEQ ID NO: 62734 - protein, 10 aa, Homo sapiens
  Table A; Target 62734; HLA-B*46:01; PKHD1; ENSG00000170927; TAA
AQITLYGSSY

SEQ ID NO: 62735 - protein, 10 aa, Homo sapiens
  Table A; Target 62735; HLA-C*02:02; PKHD1; ENSG00000170927; TAA
AQITLYGSSY

SEQ ID NO: 62736 - protein, 10 aa, Homo sapiens
  Table A; Target 62736; HLA-C*07:04; PKHD1; ENSG00000170927; TAA
AQITLYGSSY

SEQ ID NO: 62737 - protein, 10 aa, Homo sapiens
  Table A; Target 62737; HLA-C*14:02; PKHD1; ENSG00000170927; TAA
AQITLYGSSY

SEQ ID NO: 62738 - protein, 10 aa, Homo sapiens
  Table A; Target 62738; HLA-C*16:04; PKHD1; ENSG00000170927; TAA
AQITLYGSSY

SEQ ID NO: 62739 - protein, 10 aa, Homo sapiens
  Table A; Target 62739; HLA-A*30:02; PKHD1; ENSG00000170927; TAA
AQKGYRLDQY

SEQ ID NO: 62740 - protein, 9 aa, Homo sapiens
  Table A; Target 62740; HLA-B*13:02; PKHD1; ENSG00000170927; TAA
AQRLPEVQV

SEQ ID NO: 62741 - protein, 9 aa, Homo sapiens
  Table A; Target 62741; HLA-A*02:01; PKHD1; ENSG00000170927; TAA
AQTPIVHQV

SEQ ID NO: 62742 - protein, 9 aa, Homo sapiens
  Table A; Target 62742; HLA-A*02:03; PKHD1; ENSG00000170927; TAA
AQTPIVHQV

SEQ ID NO: 62743 - protein, 9 aa, Homo sapiens
  Table A; Target 62743; HLA-A*02:04; PKHD1; ENSG00000170927; TAA
AQTPIVHQV

SEQ ID NO: 62744 - protein, 9 aa, Homo sapiens
  Table A; Target 62744; HLA-A*30:01; PKHD1; ENSG00000170927; TAA
AQTPIVHQV

SEQ ID NO: 62745 - protein, 9 aa, Homo sapiens
  Table A; Target 62745; HLA-A*32:01; PKHD1; ENSG00000170927; TAA
AQTPIVHQV

SEQ ID NO: 62746 - protein, 9 aa, Homo sapiens
  Table A; Target 62746; HLA-B*13:02; PKHD1; ENSG00000170927; TAA
AQTPIVHQV

SEQ ID NO: 62747 - protein, 9 aa, Homo sapiens
  Table A; Target 62747; HLA-B*55:01; PKHD1; ENSG00000170927; TAA
AQTPIVHQV

SEQ ID NO: 62748 - protein, 9 aa, Homo sapiens
  Table A; Target 62748; HLA-C*02:02; PKHD1; ENSG00000170927; TAA
AQTPIVHQV

SEQ ID NO: 62749 - protein, 9 aa, Homo sapiens
  Table A; Target 62749; HLA-C*06:02; PKHD1; ENSG00000170927; TAA
AQTPIVHQV

SEQ ID NO: 62750 - protein, 9 aa, Homo sapiens
  Table A; Target 62750; HLA-C*16:02; PKHD1; ENSG00000170927; TAA
AQTPIVHQV

SEQ ID NO: 62751 - protein, 10 aa, Homo sapiens
  Table A; Target 62751; HLA-A*30:02; PKHD1; ENSG00000170927; TAA
AQTPIVHQVY

SEQ ID NO: 62752 - protein, 10 aa, Homo sapiens
  Table A; Target 62752; HLA-A*32:01; PKHD1; ENSG00000170927; TAA
AQTPIVHQVY

SEQ ID NO: 62753 - protein, 10 aa, Homo sapiens
  Table A; Target 62753; HLA-B*15:01; PKHD1; ENSG00000170927; TAA
AQTPIVHQVY

SEQ ID NO: 62754 - protein, 10 aa, Homo sapiens
  Table A; Target 62754; HLA-B*15:03; PKHD1; ENSG00000170927; TAA
AQTPIVHQVY

SEQ ID NO: 62755 - protein, 10 aa, Homo sapiens
  Table A; Target 62755; HLA-B*44:03; PKHD1; ENSG00000170927; TAA
AQTPIVHQVY

SEQ ID NO: 62756 - protein, 8 aa, Homo sapiens
  Table A; Target 62756; HLA-B*13:02; PKHD1; ENSG00000170927; TAA
AQVTIAGI

SEQ ID NO: 62757 - protein, 8 aa, Homo sapiens
  Table A; Target 62757; HLA-B*27:05; PKHD1; ENSG00000170927; TAA
ARGPSPSL

SEQ ID NO: 62758 - protein, 9 aa, Homo sapiens
  Table A; Target 62758; HLA-C*16:04; PKHD1; ENSG00000170927; TAA
ARGPSPSLV

SEQ ID NO: 62759 - protein, 11 aa, Homo sapiens
  Table A; Target 62759; HLA-B*27:05; PKHD1; ENSG00000170927; TAA
ARGPSPSLVGK

SEQ ID NO: 62760 - protein, 9 aa, Homo sapiens
  Table A; Target 62760; HLA-B*58:01; PKHD1; ENSG00000170927; TAA
ASCLVNSSF

SEQ ID NO: 62761 - protein, 11 aa, Homo sapiens
  Table A; Target 62761; HLA-A*01:01; PKHD1; ENSG00000170927; TAA
ASDFTVKEDLY

SEQ ID NO: 62762 - protein, 9 aa, Homo sapiens
  Table A; Target 62762; HLA-B*58:01; PKHD1; ENSG00000170927; TAA
ASFFNAGTF

SEQ ID NO: 62763 - protein, 9 aa, Homo sapiens
  Table A; Target 62763; HLA-C*02:02; PKHD1; ENSG00000170927; TAA
ASFFNAGTF

SEQ ID NO: 62764 - protein, 10 aa, Homo sapiens
  Table A; Target 62764; HLA-B*57:01; PKHD1; ENSG00000170927; TAA
ASISVGTADW

SEQ ID NO: 62765 - protein, 10 aa, Homo sapiens
  Table A; Target 62765; HLA-B*58:01; PKHD1; ENSG00000170927; TAA
ASISVGTADW

SEQ ID NO: 62766 - protein, 9 aa, Homo sapiens
  Table A; Target 62766; HLA-A*25:01; PKHD1; ENSG00000170927; TAA
ASLSSVASW

SEQ ID NO: 62767 - protein, 9 aa, Homo sapiens
  Table A; Target 62767; HLA-A*32:01; PKHD1; ENSG00000170927; TAA
ASLSSVASW

SEQ ID NO: 62768 - protein, 9 aa, Homo sapiens
  Table A; Target 62768; HLA-B*57:01; PKHD1; ENSG00000170927; TAA
ASLSSVASW

SEQ ID NO: 62769 - protein, 9 aa, Homo sapiens
  Table A; Target 62769; HLA-B*58:01; PKHD1; ENSG00000170927; TAA
ASLSSVASW

SEQ ID NO: 62770 - protein, 9 aa, Homo sapiens
  Table A; Target 62770; HLA-C*16:04; PKHD1; ENSG00000170927; TAA
ASLSSVASW

SEQ ID NO: 62771 - protein, 8 aa, Homo sapiens
  Table A; Target 62771; HLA-C*01:02; PKHD1; ENSG00000170927; TAA
ASPVMDAL

SEQ ID NO: 62772 - protein, 10 aa, Homo sapiens
  Table A; Target 62772; HLA-A*31:01; PKHD1; ENSG00000170927; TAA
ASSALVFTSR

SEQ ID NO: 62773 - protein, 10 aa, Homo sapiens
  Table A; Target 62773; HLA-C*07:06; PKHD1; ENSG00000170927; TAA
ASSALVFTSR

SEQ ID NO: 62774 - protein, 9 aa, Homo sapiens
  Table A; Target 62774; HLA-B*58:01; PKHD1; ENSG00000170927; TAA
ATEQLLESW

SEQ ID NO: 62775 - protein, 11 aa, Homo sapiens
  Table A; Target 62775; HLA-A*26:01; PKHD1; ENSG00000170927; TAA
ATFDNFAPGNY

SEQ ID NO: 62776 - protein, 11 aa, Homo sapiens
  Table A; Target 62776; HLA-A*29:02; PKHD1; ENSG00000170927; TAA
ATFDNFAPGNY

SEQ ID NO: 62777 - protein, 11 aa, Homo sapiens
  Table A; Target 62777; HLA-A*30:02; PKHD1; ENSG00000170927; TAA
ATFDNFAPGNY

SEQ ID NO: 62778 - protein, 11 aa, Homo sapiens
  Table A; Target 62778; HLA-A*11:01; PKHD1; ENSG00000170927; TAA
ATGEDLFLNVK

SEQ ID NO: 62779 - protein, 8 aa, Homo sapiens
  Table A; Target 62779; HLA-C*01:02; PKHD1; ENSG00000170927; TAA
ATIRGSSL

SEQ ID NO: 62780 - protein, 8 aa, Homo sapiens
  Table A; Target 62780; HLA-C*03:03; PKHD1; ENSG00000170927; TAA
ATIRGSSL

SEQ ID NO: 62781 - protein, 8 aa, Homo sapiens
  Table A; Target 62781; HLA-C*03:04; PKHD1; ENSG00000170927; TAA
ATIRGSSL

SEQ ID NO: 62782 - protein, 8 aa, Homo sapiens
  Table A; Target 62782; HLA-B*46:01; PKHD1; ENSG00000170927; TAA
ATPVVTAM

SEQ ID NO: 62783 - protein, 8 aa, Homo sapiens
  Table A; Target 62783; HLA-C*01:02; PKHD1; ENSG00000170927; TAA
ATPVVTAM

SEQ ID NO: 62784 - protein, 9 aa, Homo sapiens
  Table A; Target 62784; HLA-A*25:01; PKHD1; ENSG00000170927; TAA
AVLISGSNW

SEQ ID NO: 62785 - protein, 9 aa, Homo sapiens
  Table A; Target 62785; HLA-B*58:01; PKHD1; ENSG00000170927; TAA
AVLISGSNW

SEQ ID NO: 62786 - protein, 9 aa, Homo sapiens
  Table A; Target 62786; HLA-A*03:01; PKHD1; ENSG00000170927; TAA
AVLPRAFTY

SEQ ID NO: 62787 - protein, 9 aa, Homo sapiens
  Table A; Target 62787; HLA-A*29:02; PKHD1; ENSG00000170927; TAA
AVLPRAFTY

SEQ ID NO: 62788 - protein, 9 aa, Homo sapiens
  Table A; Target 62788; HLA-A*30:02; PKHD1; ENSG00000170927; TAA
AVLPRAFTY

SEQ ID NO: 62789 - protein, 9 aa, Homo sapiens
  Table A; Target 62789; HLA-A*32:01; PKHD1; ENSG00000170927; TAA
AVLPRAFTY

SEQ ID NO: 62790 - protein, 9 aa, Homo sapiens
  Table A; Target 62790; HLA-B*57:01; PKHD1; ENSG00000170927; TAA
AVLPRAFTY

SEQ ID NO: 62791 - protein, 9 aa, Homo sapiens
  Table A; Target 62791; HLA-C*02:02; PKHD1; ENSG00000170927; TAA
AVLPRAFTY

SEQ ID NO: 62792 - protein, 9 aa, Homo sapiens
  Table A; Target 62792; HLA-C*16:01; PKHD1; ENSG00000170927; TAA
AVLPRAFTY

SEQ ID NO: 62793 - protein, 9 aa, Homo sapiens
  Table A; Target 62793; HLA-A*02:03; PKHD1; ENSG00000170927; TAA
AVMPRIMAI

SEQ ID NO: 62794 - protein, 9 aa, Homo sapiens
  Table A; Target 62794; HLA-A*02:04; PKHD1; ENSG00000170927; TAA
AVMPRIMAI

SEQ ID NO: 62795 - protein, 9 aa, Homo sapiens
  Table A; Target 62795; HLA-A*25:01; PKHD1; ENSG00000170927; TAA
AVMPRIMAI

SEQ ID NO: 62796 - protein, 9 aa, Homo sapiens
  Table A; Target 62796; HLA-A*32:01; PKHD1; ENSG00000170927; TAA
AVMPRIMAI

SEQ ID NO: 62797 - protein, 9 aa, Homo sapiens
  Table A; Target 62797; HLA-B*08:01; PKHD1; ENSG00000170927; TAA
AVMPRIMAI

SEQ ID NO: 62798 - protein, 9 aa, Homo sapiens
  Table A; Target 62798; HLA-B*37:01; PKHD1; ENSG00000170927; TAA
AVMPRIMAI

SEQ ID NO: 62799 - protein, 9 aa, Homo sapiens
  Table A; Target 62799; HLA-A*25:01; PKHD1; ENSG00000170927; TAA
AVRNGTLSL

SEQ ID NO: 62800 - protein, 9 aa, Homo sapiens
  Table A; Target 62800; HLA-A*32:01; PKHD1; ENSG00000170927; TAA
AVRNGTLSL

SEQ ID NO: 62801 - protein, 9 aa, Homo sapiens
  Table A; Target 62801; HLA-B*07:02; PKHD1; ENSG00000170927; TAA
AVRNGTLSL

SEQ ID NO: 62802 - protein, 9 aa, Homo sapiens
  Table A; Target 62802; HLA-B*46:01; PKHD1; ENSG00000170927; TAA
AVRNGTLSL

SEQ ID NO: 62803 - protein, 9 aa, Homo sapiens
  Table A; Target 62803; HLA-C*01:02; PKHD1; ENSG00000170927; TAA
AVRNGTLSL

SEQ ID NO: 62804 - protein, 9 aa, Homo sapiens
  Table A; Target 62804; HLA-C*07:02; PKHD1; ENSG00000170927; TAA
AVRNGTLSL

SEQ ID NO: 62805 - protein, 9 aa, Homo sapiens
  Table A; Target 62805; HLA-A*25:01; PKHD1; ENSG00000170927; TAA
AVTENFGCL

SEQ ID NO: 62806 - protein, 9 aa, Homo sapiens
  Table A; Target 62806; HLA-A*24:02; PKHD1; ENSG00000170927; TAA
AYKGHMNKI

SEQ ID NO: 62807 - protein, 10 aa, Homo sapiens
  Table A; Target 62807; HLA-A*24:02; PKHD1; ENSG00000170927; TAA
AYPKNSWTHL

SEQ ID NO: 62808 - protein, 8 aa, Homo sapiens
  Table A; Target 62808; HLA-A*24:02; PKHD1; ENSG00000170927; TAA
AYTVTNNL

SEQ ID NO: 62809 - protein, 8 aa, Homo sapiens
  Table A; Target 62809; HLA-C*14:02; PKHD1; ENSG00000170927; TAA
AYTVTNNL

SEQ ID NO: 62810 - protein, 8 aa, Homo sapiens
  Table A; Target 62810; HLA-B*37:01; PKHD1; ENSG00000170927; TAA
CDVETQSF

SEQ ID NO: 62811 - protein, 8 aa, Homo sapiens
  Table A; Target 62811; HLA-C*16:01; PKHD1; ENSG00000170927; TAA
CEAARHTY

SEQ ID NO: 62812 - protein, 9 aa, Homo sapiens
  Table A; Target 62812; HLA-B*49:01; PKHD1; ENSG00000170927; TAA
CEAARHTYV

SEQ ID NO: 62813 - protein, 9 aa, Homo sapiens
  Table A; Target 62813; HLA-A*30:01; PKHD1; ENSG00000170927; TAA
CETLPAPQI

SEQ ID NO: 62814 - protein, 9 aa, Homo sapiens
  Table A; Target 62814; HLA-B*49:01; PKHD1; ENSG00000170927; TAA
CETLPAPQI

SEQ ID NO: 62815 - protein, 10 aa, Homo sapiens
  Table A; Target 62815; HLA-B*49:01; PKHD1; ENSG00000170927; TAA
CETPNQPITV

SEQ ID NO: 62816 - protein, 11 aa, Homo sapiens
  Table A; Target 62816; HLA-A*11:01; PKHD1; ENSG00000170927; TAA
CSQGQGGFTVK

SEQ ID NO: 62817 - protein, 10 aa, Homo sapiens
  Table A; Target 62817; HLA-A*30:02; PKHD1; ENSG00000170927; TAA
CTQAETQDGY

SEQ ID NO: 62818 - protein, 11 aa, Homo sapiens
  Table A; Target 62818; HLA-A*30:02; PKHD1; ENSG00000170927; TAA
CVVPSLPAGEY

SEQ ID NO: 62819 - protein, 9 aa, Homo sapiens
  Table A; Target 62819; HLA-A*25:01; PKHD1; ENSG00000170927; TAA
DAIWAIQKL

SEQ ID NO: 62820 - protein, 9 aa, Homo sapiens
  Table A; Target 62820; HLA-A*26:01; PKHD1; ENSG00000170927; TAA
DAIWAIQKL

SEQ ID NO: 62821 - protein, 9 aa, Homo sapiens
  Table A; Target 62821; HLA-B*51:01; PKHD1; ENSG00000170927; TAA
DAIWAIQKL

SEQ ID NO: 62822 - protein, 9 aa, Homo sapiens
  Table A; Target 62822; HLA-A*33:01; PKHD1; ENSG00000170927; TAA
DALAPVHTQ

SEQ ID NO: 62823 - protein, 9 aa, Homo sapiens
  Table A; Target 62823; HLA-B*51:01; PKHD1; ENSG00000170927; TAA
DALAPVHTQ

SEQ ID NO: 62824 - protein, 8 aa, Homo sapiens
  Table A; Target 62824; HLA-B*35:03; PKHD1; ENSG00000170927; TAA
DAVEGLEL

SEQ ID NO: 62825 - protein, 8 aa, Homo sapiens
  Table A; Target 62825; HLA-B*51:01; PKHD1; ENSG00000170927; TAA
DAVEGLEL

SEQ ID NO: 62826 - protein, 8 aa, Homo sapiens
  Table A; Target 62826; HLA-C*03:03; PKHD1; ENSG00000170927; TAA
DAVEGLEL

SEQ ID NO: 62827 - protein, 8 aa, Homo sapiens
  Table A; Target 62827; HLA-C*03:04; PKHD1; ENSG00000170927; TAA
DAVEGLEL

SEQ ID NO: 62828 - protein, 8 aa, Homo sapiens
  Table A; Target 62828; HLA-B*18:01; PKHD1; ENSG00000170927; TAA
DDILTFAV

SEQ ID NO: 62829 - protein, 9 aa, Homo sapiens
  Table A; Target 62829; HLA-B*18:01; PKHD1; ENSG00000170927; TAA
DDILTFAVA

SEQ ID NO: 62830 - protein, 8 aa, Homo sapiens
  Table A; Target 62830; HLA-B*18:01; PKHD1; ENSG00000170927; TAA
DEIIIADT

SEQ ID NO: 62831 - protein, 9 aa, Homo sapiens
  Table A; Target 62831; HLA-B*18:01; PKHD1; ENSG00000170927; TAA
DEIIIADTN

SEQ ID NO: 62832 - protein, 8 aa, Homo sapiens
  Table A; Target 62832; HLA-B*18:01; PKHD1; ENSG00000170927; TAA
DEVLIYNS

SEQ ID NO: 62833 - protein, 9 aa, Homo sapiens
  Table A; Target 62833; HLA-B*18:01; PKHD1; ENSG00000170927; TAA
DEVLIYNSS

SEQ ID NO: 62834 - protein, 10 aa, Homo sapiens
  Table A; Target 62834; HLA-B*18:01; PKHD1; ENSG00000170927; TAA
DEVLIYNSSC

SEQ ID NO: 62835 - protein, 8 aa, Homo sapiens
  Table A; Target 62835; HLA-B*18:01; PKHD1; ENSG00000170927; TAA
DEVVIISG

SEQ ID NO: 62836 - protein, 9 aa, Homo sapiens
  Table A; Target 62836; HLA-B*18:01; PKHD1; ENSG00000170927; TAA
DEVVIISGT

SEQ ID NO: 62837 - protein, 11 aa, Homo sapiens
  Table A; Target 62837; HLA-B*18:01; PKHD1; ENSG00000170927; TAA
DEVVIISGTGV

SEQ ID NO: 62838 - protein, 11 aa, Homo sapiens
  Table A; Target 62838; HLA-A*23:01; PKHD1; ENSG00000170927; TAA
DFFDNSAQVTI

SEQ ID NO: 62839 - protein, 9 aa, Homo sapiens
  Table A; Target 62839; HLA-B*18:01; PKHD1; ENSG00000170927; TAA
DGLELGVLY

SEQ ID NO: 62840 - protein, 9 aa, Homo sapiens
  Table A; Target 62840; HLA-B*35:01; PKHD1; ENSG00000170927; TAA
DGLELGVLY

SEQ ID NO: 62841 - protein, 9 aa, Homo sapiens
  Table A; Target 62841; HLA-B*51:01; PKHD1; ENSG00000170927; TAA
DGRIVNVTV

SEQ ID NO: 62842 - protein, 11 aa, Homo sapiens
  Table A; Target 62842; HLA-A*33:01; PKHD1; ENSG00000170927; TAA
DGRIVNVTVIR

SEQ ID NO: 62843 - protein, 9 aa, Homo sapiens
  Table A; Target 62843; HLA-B*51:01; PKHD1; ENSG00000170927; TAA
DGYVSFYNL

SEQ ID NO: 62844 - protein, 10 aa, Homo sapiens
  Table A; Target 62844; HLA-B*38:01; PKHD1; ENSG00000170927; TAA
DHSISGIMKL

SEQ ID NO: 62845 - protein, 9 aa, Homo sapiens
  Table A; Target 62845; HLA-B*08:01; PKHD1; ENSG00000170927; TAA
DINLHGNVV

SEQ ID NO: 62846 - protein, 9 aa, Homo sapiens
  Table A; Target 62846; HLA-B*51:01; PKHD1; ENSG00000170927; TAA
DINLHGNVV

SEQ ID NO: 62847 - protein, 11 aa, Homo sapiens
  Table A; Target 62847; HLA-A*25:01; PKHD1; ENSG00000170927; TAA
DIVNLTEASIW

SEQ ID NO: 62848 - protein, 9 aa, Homo sapiens
  Table A; Target 62848; HLA-A*68:02; PKHD1; ENSG00000170927; TAA
DLAPGPHYL

SEQ ID NO: 62849 - protein, 9 aa, Homo sapiens
  Table A; Target 62849; HLA-B*38:01; PKHD1; ENSG00000170927; TAA
DLAPGPHYL

SEQ ID NO: 62850 - protein, 9 aa, Homo sapiens
  Table A; Target 62850; HLA-B*08:01; PKHD1; ENSG00000170927; TAA
DLDGRALGL

SEQ ID NO: 62851 - protein, 9 aa, Homo sapiens
  Table A; Target 62851; HLA-A*33:01; PKHD1; ENSG00000170927; TAA
DLFLNVKPR

SEQ ID NO: 62852 - protein, 9 aa, Homo sapiens
  Table A; Target 62852; HLA-A*33:01; PKHD1; ENSG00000170927; TAA
DLLPVGMHR

SEQ ID NO: 62853 - protein, 9 aa, Homo sapiens
  Table A; Target 62853; HLA-A*33:03; PKHD1; ENSG00000170927; TAA
DLLPVGMHR

SEQ ID NO: 62854 - protein, 8 aa, Homo sapiens
  Table A; Target 62854; HLA-B*51:01; PKHD1; ENSG00000170927; TAA
DLPNFIRV

SEQ ID NO: 62855 - protein, 11 aa, Homo sapiens
  Table A; Target 62855; HLA-A*33:01; PKHD1; ENSG00000170927; TAA
DLPPYPDILLR

SEQ ID NO: 62856 - protein, 8 aa, Homo sapiens
  Table A; Target 62856; HLA-B*08:01; PKHD1; ENSG00000170927; TAA
DLYLKSPL

SEQ ID NO: 62857 - protein, 9 aa, Homo sapiens
  Table A; Target 62857; HLA-A*33:01; PKHD1; ENSG00000170927; TAA
DLYLKSPLR

SEQ ID NO: 62858 - protein, 8 aa, Homo sapiens
  Table A; Target 62858; HLA-B*08:01; PKHD1; ENSG00000170927; TAA
DMRMKVML

SEQ ID NO: 62859 - protein, 8 aa, Homo sapiens
  Table A; Target 62859; HLA-B*08:01; PKHD1; ENSG00000170927; TAA
DNVAHSSL

SEQ ID NO: 62860 - protein, 9 aa, Homo sapiens
  Table A; Target 62860; HLA-B*51:01; PKHD1; ENSG00000170927; TAA
DPALVWVLV

SEQ ID NO: 62861 - protein, 8 aa, Homo sapiens
  Table A; Target 62861; HLA-B*35:01; PKHD1; ENSG00000170927; TAA
DPGTIGVY

SEQ ID NO: 62862 - protein, 8 aa, Homo sapiens
  Table A; Target 62862; HLA-B*35:01; PKHD1; ENSG00000170927; TAA
DPLPGASF

SEQ ID NO: 62863 - protein, 10 aa, Homo sapiens
  Table A; Target 62863; HLA-B*35:03; PKHD1; ENSG00000170927; TAA
DPLPGASFSL

SEQ ID NO: 62864 - protein, 9 aa, Homo sapiens
  Table A; Target 62864; HLA-A*23:01; PKHD1; ENSG00000170927; TAA
DQLPCNVTF

SEQ ID NO: 62865 - protein, 9 aa, Homo sapiens
  Table A; Target 62865; HLA-A*25:01; PKHD1; ENSG00000170927; TAA
DQTPQVLRF

SEQ ID NO: 62866 - protein, 9 aa, Homo sapiens
  Table A; Target 62866; HLA-A*26:01; PKHD1; ENSG00000170927; TAA
DQTPQVLRF

SEQ ID NO: 62867 - protein, 9 aa, Homo sapiens
  Table A; Target 62867; HLA-B*18:01; PKHD1; ENSG00000170927; TAA
DQTPQVLRF

SEQ ID NO: 62868 - protein, 9 aa, Homo sapiens
  Table A; Target 62868; HLA-B*44:03; PKHD1; ENSG00000170927; TAA
DQTPQVLRF

SEQ ID NO: 62869 - protein, 8 aa, Homo sapiens
  Table A; Target 62869; HLA-B*08:01; PKHD1; ENSG00000170927; TAA
DQYTHLCL

SEQ ID NO: 62870 - protein, 10 aa, Homo sapiens
  Table A; Target 62870; HLA-A*25:01; PKHD1; ENSG00000170927; TAA
DSQASLHFSW

SEQ ID NO: 62871 - protein, 9 aa, Homo sapiens
  Table A; Target 62871; HLA-B*51:01; PKHD1; ENSG00000170927; TAA
DSQFLQVTV

SEQ ID NO: 62872 - protein, 9 aa, Homo sapiens
  Table A; Target 62872; HLA-B*08:01; PKHD1; ENSG00000170927; TAA
DSRNKTTTV

SEQ ID NO: 62873 - protein, 9 aa, Homo sapiens
  Table A; Target 62873; HLA-B*51:01; PKHD1; ENSG00000170927; TAA
DSRNKTTTV

SEQ ID NO: 62874 - protein, 11 aa, Homo sapiens
  Table A; Target 62874; HLA-A*33:01; PKHD1; ENSG00000170927; TAA
DSRNKTTTVNY

SEQ ID NO: 62875 - protein, 8 aa, Homo sapiens
  Table A; Target 62875; HLA-A*01:01; PKHD1; ENSG00000170927; TAA
DTDLPFFK

SEQ ID NO: 62876 - protein, 11 aa, Homo sapiens
  Table A; Target 62876; HLA-A*01:01; PKHD1; ENSG00000170927; TAA
DTDLPFFKGLY

SEQ ID NO: 62877 - protein, 9 aa, Homo sapiens
  Table A; Target 62877; HLA-A*25:01; PKHD1; ENSG00000170927; TAA
DTLSNPRGW

SEQ ID NO: 62878 - protein, 9 aa, Homo sapiens
  Table A; Target 62878; HLA-A*25:01; PKHD1; ENSG00000170927; TAA
DTNTSILNL

SEQ ID NO: 62879 - protein, 9 aa, Homo sapiens
  Table A; Target 62879; HLA-A*26:01; PKHD1; ENSG00000170927; TAA
DTNTSILNL

SEQ ID NO: 62880 - protein, 9 aa, Homo sapiens
  Table A; Target 62880; HLA-A*33:01; PKHD1; ENSG00000170927; TAA
DTNTSILNL

SEQ ID NO: 62881 - protein, 8 aa, Homo sapiens
  Table A; Target 62881; HLA-A*33:01; PKHD1; ENSG00000170927; TAA
DVLILPNR

SEQ ID NO: 62882 - protein, 9 aa, Homo sapiens
  Table A; Target 62882; HLA-A*25:01; PKHD1; ENSG00000170927; TAA
DVPVQISAH

SEQ ID NO: 62883 - protein, 9 aa, Homo sapiens
  Table A; Target 62883; HLA-A*26:01; PKHD1; ENSG00000170927; TAA
DVPVQISAH

SEQ ID NO: 62884 - protein, 10 aa, Homo sapiens
  Table A; Target 62884; HLA-A*23:01; PKHD1; ENSG00000170927; TAA
DYIGSQNVSF

SEQ ID NO: 62885 - protein, 10 aa, Homo sapiens
  Table A; Target 62885; HLA-A*24:02; PKHD1; ENSG00000170927; TAA
DYIGSQNVSF

SEQ ID NO: 62886 - protein, 10 aa, Homo sapiens
  Table A; Target 62886; HLA-A*25:01; PKHD1; ENSG00000170927; TAA
DYIGSQNVSF

SEQ ID NO: 62887 - protein, 10 aa, Homo sapiens
  Table A; Target 62887; HLA-A*33:03; PKHD1; ENSG00000170927; TAA
DYIGSQNVSF

SEQ ID NO: 62888 - protein, 10 aa, Homo sapiens
  Table A; Target 62888; HLA-C*14:02; PKHD1; ENSG00000170927; TAA
DYIGSQNVSF

SEQ ID NO: 62889 - protein, 10 aa, Homo sapiens
  Table A; Target 62889; HLA-A*24:02; PKHD1; ENSG00000170927; TAA
DYSAVLPRAF

SEQ ID NO: 62890 - protein, 8 aa, Homo sapiens
  Table A; Target 62890; HLA-B*51:01; PKHD1; ENSG00000170927; TAA
EAAATPVV

SEQ ID NO: 62891 - protein, 11 aa, Homo sapiens
  Table A; Target 62891; HLA-A*26:01; PKHD1; ENSG00000170927; TAA
EAAATPVVTAM

SEQ ID NO: 62892 - protein, 11 aa, Homo sapiens
  Table A; Target 62892; HLA-A*68:01; PKHD1; ENSG00000170927; TAA
EAAATPVVTAM

SEQ ID NO: 62893 - protein, 11 aa, Homo sapiens
  Table A; Target 62893; HLA-B*35:01; PKHD1; ENSG00000170927; TAA
EAAATPVVTAM

SEQ ID NO: 62894 - protein, 11 aa, Homo sapiens
  Table A; Target 62894; HLA-C*07:06; PKHD1; ENSG00000170927; TAA
EAAATPVVTAM

SEQ ID NO: 62895 - protein, 9 aa, Homo sapiens
  Table A; Target 62895; HLA-B*51:01; PKHD1; ENSG00000170927; TAA
EAGIYPLQV

SEQ ID NO: 62896 - protein, 10 aa, Homo sapiens
  Table A; Target 62896; HLA-A*33:03; PKHD1; ENSG00000170927; TAA
EAGIYPLQVR

SEQ ID NO: 62897 - protein, 10 aa, Homo sapiens
  Table A; Target 62897; HLA-A*68:01; PKHD1; ENSG00000170927; TAA
EAGIYPLQVR

SEQ ID NO: 62898 - protein, 9 aa, Homo sapiens
  Table A; Target 62898; HLA-A*25:01; PKHD1; ENSG00000170927; TAA
EASPVMDAL

SEQ ID NO: 62899 - protein, 9 aa, Homo sapiens
  Table A; Target 62899; HLA-A*26:01; PKHD1; ENSG00000170927; TAA
EASPVMDAL

SEQ ID NO: 62900 - protein, 9 aa, Homo sapiens
  Table A; Target 62900; HLA-A*68:01; PKHD1; ENSG00000170927; TAA
EASPVMDAL

SEQ ID NO: 62901 - protein, 9 aa, Homo sapiens
  Table A; Target 62901; HLA-A*68:02; PKHD1; ENSG00000170927; TAA
EASPVMDAL

SEQ ID NO: 62902 - protein, 9 aa, Homo sapiens
  Table A; Target 62902; HLA-B*35:01; PKHD1; ENSG00000170927; TAA
EASPVMDAL

SEQ ID NO: 62903 - protein, 9 aa, Homo sapiens
  Table A; Target 62903; HLA-B*35:03; PKHD1; ENSG00000170927; TAA
EASPVMDAL

SEQ ID NO: 62904 - protein, 9 aa, Homo sapiens
  Table A; Target 62904; HLA-B*38:01; PKHD1; ENSG00000170927; TAA
EASPVMDAL

SEQ ID NO: 62905 - protein, 9 aa, Homo sapiens
  Table A; Target 62905; HLA-B*39:01; PKHD1; ENSG00000170927; TAA
EASPVMDAL

SEQ ID NO: 62906 - protein, 9 aa, Homo sapiens
  Table A; Target 62906; HLA-C*03:03; PKHD1; ENSG00000170927; TAA
EASPVMDAL

SEQ ID NO: 62907 - protein, 9 aa, Homo sapiens
  Table A; Target 62907; HLA-C*03:04; PKHD1; ENSG00000170927; TAA
EASPVMDAL

SEQ ID NO: 62908 - protein, 9 aa, Homo sapiens
  Table A; Target 62908; HLA-C*07:06; PKHD1; ENSG00000170927; TAA
EASPVMDAL

SEQ ID NO: 62909 - protein, 8 aa, Homo sapiens
  Table A; Target 62909; HLA-C*03:03; PKHD1; ENSG00000170927; TAA
EAYFGGQL

SEQ ID NO: 62910 - protein, 8 aa, Homo sapiens
  Table A; Target 62910; HLA-C*03:04; PKHD1; ENSG00000170927; TAA
EAYFGGQL

SEQ ID NO: 62911 - protein, 8 aa, Homo sapiens
  Table A; Target 62911; HLA-C*05:01; PKHD1; ENSG00000170927; TAA
EAYFGGQL

SEQ ID NO: 62912 - protein, 9 aa, Homo sapiens
  Table A; Target 62912; HLA-A*26:01; PKHD1; ENSG00000170927; TAA
EAYFGGQLV

SEQ ID NO: 62913 - protein, 9 aa, Homo sapiens
  Table A; Target 62913; HLA-A*68:02; PKHD1; ENSG00000170927; TAA
EAYFGGQLV

SEQ ID NO: 62914 - protein, 9 aa, Homo sapiens
  Table A; Target 62914; HLA-B*51:01; PKHD1; ENSG00000170927; TAA
EAYFGGQLV

SEQ ID NO: 62915 - protein, 10 aa, Homo sapiens
  Table A; Target 62915; HLA-A*30:01; PKHD1; ENSG00000170927; TAA
EEASPVMDAL

SEQ ID NO: 62916 - protein, 10 aa, Homo sapiens
  Table A; Target 62916; HLA-B*39:01; PKHD1; ENSG00000170927; TAA
EEASPVMDAL

SEQ ID NO: 62917 - protein, 10 aa, Homo sapiens
  Table A; Target 62917; HLA-B*40:01; PKHD1; ENSG00000170927; TAA
EEASPVMDAL

SEQ ID NO: 62918 - protein, 10 aa, Homo sapiens
  Table A; Target 62918; HLA-B*44:03; PKHD1; ENSG00000170927; TAA
EEASPVMDAL

SEQ ID NO: 62919 - protein, 9 aa, Homo sapiens
  Table A; Target 62919; HLA-A*30:01; PKHD1; ENSG00000170927; TAA
EEFSGVLQL

SEQ ID NO: 62920 - protein, 9 aa, Homo sapiens
  Table A; Target 62920; HLA-B*18:01; PKHD1; ENSG00000170927; TAA
EEFSGVLQL

SEQ ID NO: 62921 - protein, 9 aa, Homo sapiens
  Table A; Target 62921; HLA-B*40:01; PKHD1; ENSG00000170927; TAA
EEFSGVLQL

SEQ ID NO: 62922 - protein, 9 aa, Homo sapiens
  Table A; Target 62922; HLA-B*44:02; PKHD1; ENSG00000170927; TAA
EEFSGVLQL

SEQ ID NO: 62923 - protein, 9 aa, Homo sapiens
  Table A; Target 62923; HLA-B*44:03; PKHD1; ENSG00000170927; TAA
EEFSGVLQL

SEQ ID NO: 62924 - protein, 9 aa, Homo sapiens
  Table A; Target 62924; HLA-B*49:01; PKHD1; ENSG00000170927; TAA
EEFSGVLQL

SEQ ID NO: 62925 - protein, 9 aa, Homo sapiens
  Table A; Target 62925; HLA-C*16:04; PKHD1; ENSG00000170927; TAA
EEFSGVLQL

SEQ ID NO: 62926 - protein, 10 aa, Homo sapiens
  Table A; Target 62926; HLA-B*40:01; PKHD1; ENSG00000170927; TAA
EEFSGVLQLL

SEQ ID NO: 62927 - protein, 10 aa, Homo sapiens
  Table A; Target 62927; HLA-B*44:02; PKHD1; ENSG00000170927; TAA
EEFSGVLQLL

SEQ ID NO: 62928 - protein, 10 aa, Homo sapiens
  Table A; Target 62928; HLA-B*44:03; PKHD1; ENSG00000170927; TAA
EEFSGVLQLL

SEQ ID NO: 62929 - protein, 10 aa, Homo sapiens
  Table A; Target 62929; HLA-B*44:02; PKHD1; ENSG00000170927; TAA
EEGSLAGGTW

SEQ ID NO: 62930 - protein, 10 aa, Homo sapiens
  Table A; Target 62930; HLA-B*44:03; PKHD1; ENSG00000170927; TAA
EEGSLAGGTW

SEQ ID NO: 62931 - protein, 9 aa, Homo sapiens
  Table A; Target 62931; HLA-A*30:01; PKHD1; ENSG00000170927; TAA
EEIVTVETV

SEQ ID NO: 62932 - protein, 9 aa, Homo sapiens
  Table A; Target 62932; HLA-B*18:01; PKHD1; ENSG00000170927; TAA
EEIVTVETV

SEQ ID NO: 62933 - protein, 9 aa, Homo sapiens
  Table A; Target 62933; HLA-B*40:01; PKHD1; ENSG00000170927; TAA
EEIVTVETV

SEQ ID NO: 62934 - protein, 9 aa, Homo sapiens
  Table A; Target 62934; HLA-B*44:03; PKHD1; ENSG00000170927; TAA
EEIVTVETV

SEQ ID NO: 62935 - protein, 9 aa, Homo sapiens
  Table A; Target 62935; HLA-B*49:01; PKHD1; ENSG00000170927; TAA
EEIVTVETV

SEQ ID NO: 62936 - protein, 8 aa, Homo sapiens
  Table A; Target 62936; HLA-B*18:01; PKHD1; ENSG00000170927; TAA
EELLAVKC

SEQ ID NO: 62937 - protein, 9 aa, Homo sapiens
  Table A; Target 62937; HLA-A*23:01; PKHD1; ENSG00000170927; TAA
EFSGVLQLL

SEQ ID NO: 62938 - protein, 10 aa, Homo sapiens
  Table A; Target 62938; HLA-A*25:01; PKHD1; ENSG00000170927; TAA
EFSNVSAGSW

SEQ ID NO: 62939 - protein, 9 aa, Homo sapiens
  Table A; Target 62939; HLA-C*07:06; PKHD1; ENSG00000170927; TAA
EGASDSVLK

SEQ ID NO: 62940 - protein, 10 aa, Homo sapiens
  Table A; Target 62940; HLA-A*25:01; PKHD1; ENSG00000170927; TAA
EGDPLPGASF

SEQ ID NO: 62941 - protein, 10 aa, Homo sapiens
  Table A; Target 62941; HLA-C*05:01; PKHD1; ENSG00000170927; TAA
EGDPLPGASF

SEQ ID NO: 62942 - protein, 9 aa, Homo sapiens
  Table A; Target 62942; HLA-B*54:01; PKHD1; ENSG00000170927; TAA
EGMPPTISA

SEQ ID NO: 62943 - protein, 9 aa, Homo sapiens
  Table A; Target 62943; HLA-B*56:01; PKHD1; ENSG00000170927; TAA
EGMPPTISA

SEQ ID NO: 62944 - protein, 9 aa, Homo sapiens
  Table A; Target 62944; HLA-A*33:01; PKHD1; ENSG00000170927; TAA
EGQVQVILR

SEQ ID NO: 62945 - protein, 9 aa, Homo sapiens
  Table A; Target 62945; HLA-A*33:03; PKHD1; ENSG00000170927; TAA
EGQVQVILR

SEQ ID NO: 62946 - protein, 9 aa, Homo sapiens
  Table A; Target 62946; HLA-A*68:01; PKHD1; ENSG00000170927; TAA
EGQVQVILR

SEQ ID NO: 62947 - protein, 9 aa, Homo sapiens
  Table A; Target 62947; HLA-C*07:06; PKHD1; ENSG00000170927; TAA
EGQVQVILR

SEQ ID NO: 62948 - protein, 9 aa, Homo sapiens
  Table A; Target 62948; HLA-A*33:03; PKHD1; ENSG00000170927; TAA
EHHGIAPSR

SEQ ID NO: 62949 - protein, 9 aa, Homo sapiens
  Table A; Target 62949; HLA-A*33:01; PKHD1; ENSG00000170927; TAA
EIGDSPTVR

SEQ ID NO: 62950 - protein, 9 aa, Homo sapiens
  Table A; Target 62950; HLA-A*33:03; PKHD1; ENSG00000170927; TAA
EIGDSPTVR

SEQ ID NO: 62951 - protein, 9 aa, Homo sapiens
  Table A; Target 62951; HLA-A*68:01; PKHD1; ENSG00000170927; TAA
EIGDSPTVR

SEQ ID NO: 62952 - protein, 9 aa, Homo sapiens
  Table A; Target 62952; HLA-C*07:06; PKHD1; ENSG00000170927; TAA
EIGDSPTVR

SEQ ID NO: 62953 - protein, 10 aa, Homo sapiens
  Table A; Target 62953; HLA-A*25:01; PKHD1; ENSG00000170927; TAA
EIQNFGSPLY

SEQ ID NO: 62954 - protein, 10 aa, Homo sapiens
  Table A; Target 62954; HLA-A*26:01; PKHD1; ENSG00000170927; TAA
EIQNFGSPLY

SEQ ID NO: 62955 - protein, 10 aa, Homo sapiens
  Table A; Target 62955; HLA-A*30:02; PKHD1; ENSG00000170927; TAA
EIQNFGSPLY

SEQ ID NO: 62956 - protein, 9 aa, Homo sapiens
  Table A; Target 62956; HLA-A*25:01; PKHD1; ENSG00000170927; TAA
EITNSSLSL

SEQ ID NO: 62957 - protein, 10 aa, Homo sapiens
  Table A; Target 62957; HLA-A*01:01; PKHD1; ENSG00000170927; TAA
ELDCASPRKY

SEQ ID NO: 62958 - protein, 9 aa, Homo sapiens
  Table A; Target 62958; HLA-A*26:01; PKHD1; ENSG00000170927; TAA
ELLGGAMYY

SEQ ID NO: 62959 - protein, 9 aa, Homo sapiens
  Table A; Target 62959; HLA-A*29:02; PKHD1; ENSG00000170927; TAA
ELLGGAMYY

SEQ ID NO: 62960 - protein, 9 aa, Homo sapiens
  Table A; Target 62960; HLA-A*23:01; PKHD1; ENSG00000170927; TAA
ELMVSNTTF

SEQ ID NO: 62961 - protein, 9 aa, Homo sapiens
  Table A; Target 62961; HLA-A*25:01; PKHD1; ENSG00000170927; TAA
ELMVSNTTF

SEQ ID NO: 62962 - protein, 9 aa, Homo sapiens
  Table A; Target 62962; HLA-A*26:01; PKHD1; ENSG00000170927; TAA
ELMVSNTTF

SEQ ID NO: 62963 - protein, 9 aa, Homo sapiens
  Table A; Target 62963; HLA-B*15:01; PKHD1; ENSG00000170927; TAA
ELMVSNTTF

SEQ ID NO: 62964 - protein, 9 aa, Homo sapiens
  Table A; Target 62964; HLA-A*01:01; PKHD1; ENSG00000170927; TAA
ELTEATPGY

SEQ ID NO: 62965 - protein, 9 aa, Homo sapiens
  Table A; Target 62965; HLA-A*25:01; PKHD1; ENSG00000170927; TAA
ELTEATPGY

SEQ ID NO: 62966 - protein, 9 aa, Homo sapiens
  Table A; Target 62966; HLA-A*26:01; PKHD1; ENSG00000170927; TAA
ELTEATPGY

SEQ ID NO: 62967 - protein, 9 aa, Homo sapiens
  Table A; Target 62967; HLA-A*30:02; PKHD1; ENSG00000170927; TAA
ELTEATPGY

SEQ ID NO: 62968 - protein, 9 aa, Homo sapiens
  Table A; Target 62968; HLA-A*68:02; PKHD1; ENSG00000170927; TAA
ENSGIMHPI

SEQ ID NO: 62969 - protein, 8 aa, Homo sapiens
  Table A; Target 62969; HLA-B*35:03; PKHD1; ENSG00000170927; TAA
EPHEAEVL

SEQ ID NO: 62970 - protein, 9 aa, Homo sapiens
  Table A; Target 62970; HLA-B*56:01; PKHD1; ENSG00000170927; TAA
EPIEIRSGV

SEQ ID NO: 62971 - protein, 11 aa, Homo sapiens
  Table A; Target 62971; HLA-A*25:01; PKHD1; ENSG00000170927; TAA
EPIEIRSGVSI

SEQ ID NO: 62972 - protein, 11 aa, Homo sapiens
  Table A; Target 62972; HLA-B*07:02; PKHD1; ENSG00000170927; TAA
EPIEIRSGVSI

SEQ ID NO: 62973 - protein, 11 aa, Homo sapiens
  Table A; Target 62973; HLA-B*35:03; PKHD1; ENSG00000170927; TAA
EPIEIRSGVSI

SEQ ID NO: 62974 - protein, 11 aa, Homo sapiens
  Table A; Target 62974; HLA-B*51:01; PKHD1; ENSG00000170927; TAA
EPIEIRSGVSI

SEQ ID NO: 62975 - protein, 8 aa, Homo sapiens
  Table A; Target 62975; HLA-B*08:01; PKHD1; ENSG00000170927; TAA
EPRTKVKV

SEQ ID NO: 62976 - protein, 9 aa, Homo sapiens
  Table A; Target 62976; HLA-B*35:03; PKHD1; ENSG00000170927; TAA
EPWTISASL

SEQ ID NO: 62977 - protein, 8 aa, Homo sapiens
  Table A; Target 62977; HLA-B*08:01; PKHD1; ENSG00000170927; TAA
EQLLRYQL

SEQ ID NO: 62978 - protein, 9 aa, Homo sapiens
  Table A; Target 62978; HLA-B*08:01; PKHD1; ENSG00000170927; TAA
EQNRRVESL

SEQ ID NO: 62979 - protein, 10 aa, Homo sapiens
  Table A; Target 62979; HLA-A*33:01; PKHD1; ENSG00000170927; TAA
ESAGGAQIFR

SEQ ID NO: 62980 - protein, 10 aa, Homo sapiens
  Table A; Target 62980; HLA-A*33:03; PKHD1; ENSG00000170927; TAA
ESAGGAQIFR

SEQ ID NO: 62981 - protein, 10 aa, Homo sapiens
  Table A; Target 62981; HLA-A*68:01; PKHD1; ENSG00000170927; TAA
ESAGGAQIFR

SEQ ID NO: 62982 - protein, 10 aa, Homo sapiens
  Table A; Target 62982; HLA-C*07:06; PKHD1; ENSG00000170927; TAA
ESAGGAQIFR

SEQ ID NO: 62983 - protein, 8 aa, Homo sapiens
  Table A; Target 62983; HLA-C*05:01; PKHD1; ENSG00000170927; TAA
ESDANTSV

SEQ ID NO: 62984 - protein, 9 aa, Homo sapiens
  Table A; Target 62984; HLA-B*51:01; PKHD1; ENSG00000170927; TAA
ESFIQGCTV

SEQ ID NO: 62985 - protein, 10 aa, Homo sapiens
  Table A; Target 62985; HLA-A*33:03; PKHD1; ENSG00000170927; TAA
ESFIQGCTVR

SEQ ID NO: 62986 - protein, 10 aa, Homo sapiens
  Table A; Target 62986; HLA-A*68:01; PKHD1; ENSG00000170927; TAA
ESFIQGCTVR

SEQ ID NO: 62987 - protein, 10 aa, Homo sapiens
  Table A; Target 62987; HLA-C*07:06; PKHD1; ENSG00000170927; TAA
ESFIQGCTVR

SEQ ID NO: 62988 - protein, 10 aa, Homo sapiens
  Table A; Target 62988; HLA-A*25:01; PKHD1; ENSG00000170927; TAA
ESMFPSFSGL

SEQ ID NO: 62989 - protein, 10 aa, Homo sapiens
  Table A; Target 62989; HLA-A*26:01; PKHD1; ENSG00000170927; TAA
ESMFPSFSGL

SEQ ID NO: 62990 - protein, 9 aa, Homo sapiens
  Table A; Target 62990; HLA-A*01:01; PKHD1; ENSG00000170927; TAA
ETFDFDAEY

SEQ ID NO: 62991 - protein, 9 aa, Homo sapiens
  Table A; Target 62991; HLA-A*25:01; PKHD1; ENSG00000170927; TAA
ETFDFDAEY

SEQ ID NO: 62992 - protein, 9 aa, Homo sapiens
  Table A; Target 62992; HLA-A*26:01; PKHD1; ENSG00000170927; TAA
ETFDFDAEY

SEQ ID NO: 62993 - protein, 10 aa, Homo sapiens
  Table A; Target 62993; HLA-A*68:02; PKHD1; ENSG00000170927; TAA
ETFDFDAEYI

SEQ ID NO: 62994 - protein, 9 aa, Homo sapiens
  Table A; Target 62994; HLA-A*25:01; PKHD1; ENSG00000170927; TAA
ETISKVIVI

SEQ ID NO: 62995 - protein, 9 aa, Homo sapiens
  Table A; Target 62995; HLA-A*26:01; PKHD1; ENSG00000170927; TAA
ETISKVIVI

SEQ ID NO: 62996 - protein, 9 aa, Homo sapiens
  Table A; Target 62996; HLA-A*33:03; PKHD1; ENSG00000170927; TAA
ETISKVIVI

SEQ ID NO: 62997 - protein, 9 aa, Homo sapiens
  Table A; Target 62997; HLA-A*68:02; PKHD1; ENSG00000170927; TAA
ETISKVIVI

SEQ ID NO: 62998 - protein, 11 aa, Homo sapiens
  Table A; Target 62998; HLA-A*68:02; PKHD1; ENSG00000170927; TAA
ETISKVIVIEI

SEQ ID NO: 62999 - protein, 10 aa, Homo sapiens
  Table A; Target 62999; HLA-A*33:03; PKHD1; ENSG00000170927; TAA
ETLKAIADSR

SEQ ID NO: 63000 - protein, 9 aa, Homo sapiens
  Table A; Target 63000; HLA-A*33:01; PKHD1; ENSG00000170927; TAA
ETLVIGVAR

SEQ ID NO: 63001 - protein, 9 aa, Homo sapiens
  Table A; Target 63001; HLA-A*33:03; PKHD1; ENSG00000170927; TAA
ETLVIGVAR

SEQ ID NO: 63002 - protein, 9 aa, Homo sapiens
  Table A; Target 63002; HLA-A*68:01; PKHD1; ENSG00000170927; TAA
ETLVIGVAR

SEQ ID NO: 63003 - protein, 9 aa, Homo sapiens
  Table A; Target 63003; HLA-C*07:06; PKHD1; ENSG00000170927; TAA
ETLVIGVAR

SEQ ID NO: 63004 - protein, 10 aa, Homo sapiens
  Table A; Target 63004; HLA-A*25:01; PKHD1; ENSG00000170927; TAA
ETLVIGVARL

SEQ ID NO: 63005 - protein, 9 aa, Homo sapiens
  Table A; Target 63005; HLA-A*26:01; PKHD1; ENSG00000170927; TAA
ETPNQPITV

SEQ ID NO: 63006 - protein, 9 aa, Homo sapiens
  Table A; Target 63006; HLA-A*68:02; PKHD1; ENSG00000170927; TAA
ETPNQPITV

SEQ ID NO: 63007 - protein, 10 aa, Homo sapiens
  Table A; Target 63007; HLA-A*33:03; PKHD1; ENSG00000170927; TAA
ETPNQPITVK

SEQ ID NO: 63008 - protein, 10 aa, Homo sapiens
  Table A; Target 63008; HLA-A*68:01; PKHD1; ENSG00000170927; TAA
ETPNQPITVK

SEQ ID NO: 63009 - protein, 10 aa, Homo sapiens
  Table A; Target 63009; HLA-C*07:06; PKHD1; ENSG00000170927; TAA
ETPNQPITVK

SEQ ID NO: 63010 - protein, 11 aa, Homo sapiens
  Table A; Target 63010; HLA-A*68:02; PKHD1; ENSG00000170927; TAA
ETPNQPITVKI

SEQ ID NO: 63011 - protein, 9 aa, Homo sapiens
  Table A; Target 63011; HLA-A*25:01; PKHD1; ENSG00000170927; TAA
ETQDGYVSF

SEQ ID NO: 63012 - protein, 9 aa, Homo sapiens
  Table A; Target 63012; HLA-A*26:01; PKHD1; ENSG00000170927; TAA
ETQDGYVSF

SEQ ID NO: 63013 - protein, 9 aa, Homo sapiens
  Table A; Target 63013; HLA-A*33:01; PKHD1; ENSG00000170927; TAA
ETQDGYVSF

SEQ ID NO: 63014 - protein, 9 aa, Homo sapiens
  Table A; Target 63014; HLA-A*33:03; PKHD1; ENSG00000170927; TAA
ETQDGYVSF

SEQ ID NO: 63015 - protein, 10 aa, Homo sapiens
  Table A; Target 63015; HLA-A*01:01; PKHD1; ENSG00000170927; TAA
ETQDGYVSFY

SEQ ID NO: 63016 - protein, 10 aa, Homo sapiens
  Table A; Target 63016; HLA-A*25:01; PKHD1; ENSG00000170927; TAA
ETQDGYVSFY

SEQ ID NO: 63017 - protein, 10 aa, Homo sapiens
  Table A; Target 63017; HLA-A*26:01; PKHD1; ENSG00000170927; TAA
ETQDGYVSFY

SEQ ID NO: 63018 - protein, 10 aa, Homo sapiens
  Table A; Target 63018; HLA-A*30:02; PKHD1; ENSG00000170927; TAA
ETQDGYVSFY

SEQ ID NO: 63019 - protein, 10 aa, Homo sapiens
  Table A; Target 63019; HLA-A*33:01; PKHD1; ENSG00000170927; TAA
ETQDGYVSFY

SEQ ID NO: 63020 - protein, 10 aa, Homo sapiens
  Table A; Target 63020; HLA-A*33:03; PKHD1; ENSG00000170927; TAA
ETQDGYVSFY

SEQ ID NO: 63021 - protein, 10 aa, Homo sapiens
  Table A; Target 63021; HLA-A*68:01; PKHD1; ENSG00000170927; TAA
ETQDGYVSFY

SEQ ID NO: 63022 - protein, 9 aa, Homo sapiens
  Table A; Target 63022; HLA-A*01:01; PKHD1; ENSG00000170927; TAA
ETVQDTDLY

SEQ ID NO: 63023 - protein, 9 aa, Homo sapiens
  Table A; Target 63023; HLA-A*26:01; PKHD1; ENSG00000170927; TAA
ETVQDTDLY

SEQ ID NO: 63024 - protein, 11 aa, Homo sapiens
  Table A; Target 63024; HLA-A*11:01; PKHD1; ENSG00000170927; TAA
ETVQDTDLYLK

SEQ ID NO: 63025 - protein, 11 aa, Homo sapiens
  Table A; Target 63025; HLA-A*68:01; PKHD1; ENSG00000170927; TAA
ETVQDTDLYLK

SEQ ID NO: 63026 - protein, 11 aa, Homo sapiens
  Table A; Target 63026; HLA-A*68:02; PKHD1; ENSG00000170927; TAA
ETVQDTDLYLK

SEQ ID NO: 63027 - protein, 11 aa, Homo sapiens
  Table A; Target 63027; HLA-B*27:02; PKHD1; ENSG00000170927; TAA
ETVQDTDLYLK

SEQ ID NO: 63028 - protein, 10 aa, Homo sapiens
  Table A; Target 63028; HLA-A*25:01; PKHD1; ENSG00000170927; TAA
ETWQGVEEGW

SEQ ID NO: 63029 - protein, 10 aa, Homo sapiens
  Table A; Target 63029; HLA-B*57:01; PKHD1; ENSG00000170927; TAA
ETWQGVEEGW

SEQ ID NO: 63030 - protein, 11 aa, Homo sapiens
  Table A; Target 63030; HLA-A*25:01; PKHD1; ENSG00000170927; TAA
ETYSLQSENLW

SEQ ID NO: 63031 - protein, 10 aa, Homo sapiens
  Table A; Target 63031; HLA-A*26:01; PKHD1; ENSG00000170927; TAA
EVFSIEPCCG

SEQ ID NO: 63032 - protein, 9 aa, Homo sapiens
  Table A; Target 63032; HLA-A*25:01; PKHD1; ENSG00000170927; TAA
EVGDAVEGL

SEQ ID NO: 63033 - protein, 9 aa, Homo sapiens
  Table A; Target 63033; HLA-A*33:01; PKHD1; ENSG00000170927; TAA
EVLTVKEVK

SEQ ID NO: 63034 - protein, 9 aa, Homo sapiens
  Table A; Target 63034; HLA-A*33:03; PKHD1; ENSG00000170927; TAA
EVLTVKEVK

SEQ ID NO: 63035 - protein, 10 aa, Homo sapiens
  Table A; Target 63035; HLA-A*33:01; PKHD1; ENSG00000170927; TAA
EVQVLNVSGR

SEQ ID NO: 63036 - protein, 10 aa, Homo sapiens
  Table A; Target 63036; HLA-A*33:03; PKHD1; ENSG00000170927; TAA
EVQVLNVSGR

SEQ ID NO: 63037 - protein, 10 aa, Homo sapiens
  Table A; Target 63037; HLA-A*68:01; PKHD1; ENSG00000170927; TAA
EVQVLNVSGR

SEQ ID NO: 63038 - protein, 10 aa, Homo sapiens
  Table A; Target 63038; HLA-C*07:06; PKHD1; ENSG00000170927; TAA
EVQVLNVSGR

SEQ ID NO: 63039 - protein, 10 aa, Homo sapiens
  Table A; Target 63039; HLA-A*25:01; PKHD1; ENSG00000170927; TAA
EVVIISGTGV

SEQ ID NO: 63040 - protein, 10 aa, Homo sapiens
  Table A; Target 63040; HLA-A*26:01; PKHD1; ENSG00000170927; TAA
EVVIISGTGV

SEQ ID NO: 63041 - protein, 10 aa, Homo sapiens
  Table A; Target 63041; HLA-A*68:02; PKHD1; ENSG00000170927; TAA
EVVIISGTGV

SEQ ID NO: 63042 - protein, 11 aa, Homo sapiens
  Table A; Target 63042; HLA-A*68:01; PKHD1; ENSG00000170927; TAA
EVVIISGTGVK

SEQ ID NO: 63043 - protein, 8 aa, Homo sapiens
  Table A; Target 63043; HLA-A*23:01; PKHD1; ENSG00000170927; TAA
EYIDSPVI

SEQ ID NO: 63044 - protein, 9 aa, Homo sapiens
  Table A; Target 63044; HLA-A*23:01; PKHD1; ENSG00000170927; TAA
EYIDSPVIL

SEQ ID NO: 63045 - protein, 9 aa, Homo sapiens
  Table A; Target 63045; HLA-A*24:02; PKHD1; ENSG00000170927; TAA
EYIDSPVIL

SEQ ID NO: 63046 - protein, 9 aa, Homo sapiens
  Table A; Target 63046; HLA-C*14:02; PKHD1; ENSG00000170927; TAA
EYIDSPVIL

SEQ ID NO: 63047 - protein, 9 aa, Homo sapiens
  Table A; Target 63047; HLA-C*03:04; PKHD1; ENSG00000170927; TAA
FAHKGSLCM

SEQ ID NO: 63048 - protein, 8 aa, Homo sapiens
  Table A; Target 63048; HLA-B*35:01; PKHD1; ENSG00000170927; TAA
FANMSVVL

SEQ ID NO: 63049 - protein, 8 aa, Homo sapiens
  Table A; Target 63049; HLA-B*35:03; PKHD1; ENSG00000170927; TAA
FANMSVVL

SEQ ID NO: 63050 - protein, 8 aa, Homo sapiens
  Table A; Target 63050; HLA-C*03:03; PKHD1; ENSG00000170927; TAA
FANMSVVL

SEQ ID NO: 63051 - protein, 8 aa, Homo sapiens
  Table A; Target 63051; HLA-C*03:04; PKHD1; ENSG00000170927; TAA
FANMSVVL

SEQ ID NO: 63052 - protein, 9 aa, Homo sapiens
  Table A; Target 63052; HLA-B*07:02; PKHD1; ENSG00000170927; TAA
FARGPSPSL

SEQ ID NO: 63053 - protein, 9 aa, Homo sapiens
  Table A; Target 63053; HLA-B*15:03; PKHD1; ENSG00000170927; TAA
FARGPSPSL

SEQ ID NO: 63054 - protein, 9 aa, Homo sapiens
  Table A; Target 63054; HLA-B*46:01; PKHD1; ENSG00000170927; TAA
FARGPSPSL

SEQ ID NO: 63055 - protein, 9 aa, Homo sapiens
  Table A; Target 63055; HLA-B*51:01; PKHD1; ENSG00000170927; TAA
FARGPSPSL

SEQ ID NO: 63056 - protein, 9 aa, Homo sapiens
  Table A; Target 63056; HLA-B*54:01; PKHD1; ENSG00000170927; TAA
FARGPSPSL

SEQ ID NO: 63057 - protein, 9 aa, Homo sapiens
  Table A; Target 63057; HLA-B*58:01; PKHD1; ENSG00000170927; TAA
FARGPSPSL

SEQ ID NO: 63058 - protein, 9 aa, Homo sapiens
  Table A; Target 63058; HLA-C*01:02; PKHD1; ENSG00000170927; TAA
FARGPSPSL

SEQ ID NO: 63059 - protein, 9 aa, Homo sapiens
  Table A; Target 63059; HLA-C*02:02; PKHD1; ENSG00000170927; TAA
FARGPSPSL

SEQ ID NO: 63060 - protein, 9 aa, Homo sapiens
  Table A; Target 63060; HLA-C*03:03; PKHD1; ENSG00000170927; TAA
FARGPSPSL

SEQ ID NO: 63061 - protein, 9 aa, Homo sapiens
  Table A; Target 63061; HLA-C*03:04; PKHD1; ENSG00000170927; TAA
FARGPSPSL

SEQ ID NO: 63062 - protein, 9 aa, Homo sapiens
  Table A; Target 63062; HLA-C*07:02; PKHD1; ENSG00000170927; TAA
FARGPSPSL

SEQ ID NO: 63063 - protein, 9 aa, Homo sapiens
  Table A; Target 63063; HLA-C*12:03; PKHD1; ENSG00000170927; TAA
FARGPSPSL

SEQ ID NO: 63064 - protein, 9 aa, Homo sapiens
  Table A; Target 63064; HLA-C*14:02; PKHD1; ENSG00000170927; TAA
FARGPSPSL

SEQ ID NO: 63065 - protein, 9 aa, Homo sapiens
  Table A; Target 63065; HLA-C*16:01; PKHD1; ENSG00000170927; TAA
FARGPSPSL

SEQ ID NO: 63066 - protein, 9 aa, Homo sapiens
  Table A; Target 63066; HLA-C*16:04; PKHD1; ENSG00000170927; TAA
FARGPSPSL

SEQ ID NO: 63067 - protein, 9 aa, Homo sapiens
  Table A; Target 63067; HLA-B*54:01; PKHD1; ENSG00000170927; TAA
FAVAQISGA

SEQ ID NO: 63068 - protein, 9 aa, Homo sapiens
  Table A; Target 63068; HLA-B*54:01; PKHD1; ENSG00000170927; TAA
FAVMPRIMA

SEQ ID NO: 63069 - protein, 9 aa, Homo sapiens
  Table A; Target 63069; HLA-A*30:02; PKHD1; ENSG00000170927; TAA
FDNFAPGNY

SEQ ID NO: 63070 - protein, 10 aa, Homo sapiens
  Table A; Target 63070; HLA-B*40:01; PKHD1; ENSG00000170927; TAA
FEVGDAVEGL

SEQ ID NO: 63071 - protein, 10 aa, Homo sapiens
  Table A; Target 63071; HLA-A*23:01; PKHD1; ENSG00000170927; TAA
FFARGPSPSL

SEQ ID NO: 63072 - protein, 8 aa, Homo sapiens
  Table A; Target 63072; HLA-B*35:03; PKHD1; ENSG00000170927; TAA
FFDNSAQV

SEQ ID NO: 63073 - protein, 8 aa, Homo sapiens
  Table A; Target 63073; HLA-C*04:01; PKHD1; ENSG00000170927; TAA
FFDNSAQV

SEQ ID NO: 63074 - protein, 10 aa, Homo sapiens
  Table A; Target 63074; HLA-A*23:01; PKHD1; ENSG00000170927; TAA
FFDNSAQVTI

SEQ ID NO: 63075 - protein, 10 aa, Homo sapiens
  Table A; Target 63075; HLA-B*35:03; PKHD1; ENSG00000170927; TAA
FFDNSAQVTI

SEQ ID NO: 63076 - protein, 10 aa, Homo sapiens
  Table A; Target 63076; HLA-B*38:01; PKHD1; ENSG00000170927; TAA
FFDNSAQVTI

SEQ ID NO: 63077 - protein, 10 aa, Homo sapiens
  Table A; Target 63077; HLA-C*04:01; PKHD1; ENSG00000170927; TAA
FFDNSAQVTI

SEQ ID NO: 63078 - protein, 10 aa, Homo sapiens
  Table A; Target 63078; HLA-C*05:01; PKHD1; ENSG00000170927; TAA
FFDNSAQVTI

SEQ ID NO: 63079 - protein, 10 aa, Homo sapiens
  Table A; Target 63079; HLA-C*07:04; PKHD1; ENSG00000170927; TAA
FFDNSAQVTI

SEQ ID NO: 63080 - protein, 11 aa, Homo sapiens
  Table A; Target 63080; HLA-A*29:02; PKHD1; ENSG00000170927; TAA
FFNSQLRQLTY

SEQ ID NO: 63081 - protein, 10 aa, Homo sapiens
  Table A; Target 63081; HLA-A*29:02; PKHD1; ENSG00000170927; TAA
FFVAPETNNY

SEQ ID NO: 63082 - protein, 10 aa, Homo sapiens
  Table A; Target 63082; HLA-C*14:02; PKHD1; ENSG00000170927; TAA
FFVAPETNNY

SEQ ID NO: 63083 - protein, 9 aa, Homo sapiens
  Table A; Target 63083; HLA-B*54:01; PKHD1; ENSG00000170927; TAA
FGDLQPPPA

SEQ ID NO: 63084 - protein, 9 aa, Homo sapiens
  Table A; Target 63084; HLA-C*02:02; PKHD1; ENSG00000170927; TAA
FGSPLYSSV

SEQ ID NO: 63085 - protein, 10 aa, Homo sapiens
  Table A; Target 63085; HLA-A*02:07; PKHD1; ENSG00000170927; TAA
FIPPTLVQSA

SEQ ID NO: 63086 - protein, 9 aa, Homo sapiens
  Table A; Target 63086; HLA-A*29:02; PKHD1; ENSG00000170927; TAA
FLAFKNFDY

SEQ ID NO: 63087 - protein, 9 aa, Homo sapiens
  Table A; Target 63087; HLA-B*08:01; PKHD1; ENSG00000170927; TAA
FLAVRNGTL

SEQ ID NO: 63088 - protein, 9 aa, Homo sapiens
  Table A; Target 63088; HLA-A*02:01; PKHD1; ENSG00000170927; TAA
FLDEQNRRV

SEQ ID NO: 63089 - protein, 9 aa, Homo sapiens
  Table A; Target 63089; HLA-A*02:07; PKHD1; ENSG00000170927; TAA
FLDEQNRRV

SEQ ID NO: 63090 - protein, 9 aa, Homo sapiens
  Table A; Target 63090; HLA-A*02:01; PKHD1; ENSG00000170927; TAA
FLDLPVVTC

SEQ ID NO: 63091 - protein, 10 aa, Homo sapiens
  Table A; Target 63091; HLA-A*02:04; PKHD1; ENSG00000170927; TAA
FLGPIFGDML

SEQ ID NO: 63092 - protein, 9 aa, Homo sapiens
  Table A; Target 63092; HLA-B*13:02; PKHD1; ENSG00000170927; TAA
FLQIGQNQI

SEQ ID NO: 63093 - protein, 9 aa, Homo sapiens
  Table A; Target 63093; HLA-A*01:01; PKHD1; ENSG00000170927; TAA
FMAPGPIEL

SEQ ID NO: 63094 - protein, 9 aa, Homo sapiens
  Table A; Target 63094; HLA-A*02:01; PKHD1; ENSG00000170927; TAA
FMAPGPIEL

SEQ ID NO: 63095 - protein, 9 aa, Homo sapiens
  Table A; Target 63095; HLA-A*02:03; PKHD1; ENSG00000170927; TAA
FMAPGPIEL

SEQ ID NO: 63096 - protein, 9 aa, Homo sapiens
  Table A; Target 63096; HLA-A*02:04; PKHD1; ENSG00000170927; TAA
FMAPGPIEL

SEQ ID NO: 63097 - protein, 9 aa, Homo sapiens
  Table A; Target 63097; HLA-A*02:07; PKHD1; ENSG00000170927; TAA
FMAPGPIEL

SEQ ID NO: 63098 - protein, 9 aa, Homo sapiens
  Table A; Target 63098; HLA-B*15:01; PKHD1; ENSG00000170927; TAA
FMAPGPIEL

SEQ ID NO: 63099 - protein, 9 aa, Homo sapiens
  Table A; Target 63099; HLA-B*15:03; PKHD1; ENSG00000170927; TAA
FMAPGPIEL

SEQ ID NO: 63100 - protein, 9 aa, Homo sapiens
  Table A; Target 63100; HLA-B*35:03; PKHD1; ENSG00000170927; TAA
FMAPGPIEL

SEQ ID NO: 63101 - protein, 9 aa, Homo sapiens
  Table A; Target 63101; HLA-B*39:01; PKHD1; ENSG00000170927; TAA
FMAPGPIEL

SEQ ID NO: 63102 - protein, 9 aa, Homo sapiens
  Table A; Target 63102; HLA-B*40:01; PKHD1; ENSG00000170927; TAA
FMAPGPIEL

SEQ ID NO: 63103 - protein, 9 aa, Homo sapiens
  Table A; Target 63103; HLA-B*46:01; PKHD1; ENSG00000170927; TAA
FMAPGPIEL

SEQ ID NO: 63104 - protein, 9 aa, Homo sapiens
  Table A; Target 63104; HLA-B*55:01; PKHD1; ENSG00000170927; TAA
FMAPGPIEL

SEQ ID NO: 63105 - protein, 9 aa, Homo sapiens
  Table A; Target 63105; HLA-B*58:01; PKHD1; ENSG00000170927; TAA
FMAPGPIEL

SEQ ID NO: 63106 - protein, 9 aa, Homo sapiens
  Table A; Target 63106; HLA-C*01:02; PKHD1; ENSG00000170927; TAA
FMAPGPIEL

SEQ ID NO: 63107 - protein, 9 aa, Homo sapiens
  Table A; Target 63107; HLA-C*02:02; PKHD1; ENSG00000170927; TAA
FMAPGPIEL

SEQ ID NO: 63108 - protein, 9 aa, Homo sapiens
  Table A; Target 63108; HLA-C*03:03; PKHD1; ENSG00000170927; TAA
FMAPGPIEL

SEQ ID NO: 63109 - protein, 9 aa, Homo sapiens
  Table A; Target 63109; HLA-C*03:04; PKHD1; ENSG00000170927; TAA
FMAPGPIEL

SEQ ID NO: 63110 - protein, 9 aa, Homo sapiens
  Table A; Target 63110; HLA-C*07:04; PKHD1; ENSG00000170927; TAA
FMAPGPIEL

SEQ ID NO: 63111 - protein, 9 aa, Homo sapiens
  Table A; Target 63111; HLA-C*14:02; PKHD1; ENSG00000170927; TAA
FMAPGPIEL

SEQ ID NO: 63112 - protein, 9 aa, Homo sapiens
  Table A; Target 63112; HLA-C*16:01; PKHD1; ENSG00000170927; TAA
FMAPGPIEL

SEQ ID NO: 63113 - protein, 8 aa, Homo sapiens
  Table A; Target 63113; HLA-C*05:01; PKHD1; ENSG00000170927; TAA
FMDQTPQV

SEQ ID NO: 63114 - protein, 9 aa, Homo sapiens
  Table A; Target 63114; HLA-A*01:01; PKHD1; ENSG00000170927; TAA
FMDQTPQVL

SEQ ID NO: 63115 - protein, 9 aa, Homo sapiens
  Table A; Target 63115; HLA-A*02:07; PKHD1; ENSG00000170927; TAA
FMDQTPQVL

SEQ ID NO: 63116 - protein, 9 aa, Homo sapiens
  Table A; Target 63116; HLA-A*32:01; PKHD1; ENSG00000170927; TAA
FMDQTPQVL

SEQ ID NO: 63117 - protein, 9 aa, Homo sapiens
  Table A; Target 63117; HLA-B*35:01; PKHD1; ENSG00000170927; TAA
FMDQTPQVL

SEQ ID NO: 63118 - protein, 9 aa, Homo sapiens
  Table A; Target 63118; HLA-B*35:03; PKHD1; ENSG00000170927; TAA
FMDQTPQVL

SEQ ID NO: 63119 - protein, 9 aa, Homo sapiens
  Table A; Target 63119; HLA-B*38:01; PKHD1; ENSG00000170927; TAA
FMDQTPQVL

SEQ ID NO: 63120 - protein, 9 aa, Homo sapiens
  Table A; Target 63120; HLA-B*55:01; PKHD1; ENSG00000170927; TAA
FMDQTPQVL

SEQ ID NO: 63121 - protein, 9 aa, Homo sapiens
  Table A; Target 63121; HLA-C*03:04; PKHD1; ENSG00000170927; TAA
FMDQTPQVL

SEQ ID NO: 63122 - protein, 9 aa, Homo sapiens
  Table A; Target 63122; HLA-C*04:01; PKHD1; ENSG00000170927; TAA
FMDQTPQVL

SEQ ID NO: 63123 - protein, 9 aa, Homo sapiens
  Table A; Target 63123; HLA-C*05:01; PKHD1; ENSG00000170927; TAA
FMDQTPQVL

SEQ ID NO: 63124 - protein, 9 aa, Homo sapiens
  Table A; Target 63124; HLA-C*07:04; PKHD1; ENSG00000170927; TAA
FMDQTPQVL

SEQ ID NO: 63125 - protein, 9 aa, Homo sapiens
  Table A; Target 63125; HLA-A*29:02; PKHD1; ENSG00000170927; TAA
FNIMDNLLY

SEQ ID NO: 63126 - protein, 10 aa, Homo sapiens
  Table A; Target 63126; HLA-A*29:02; PKHD1; ENSG00000170927; TAA
FNSQLRQLTY

SEQ ID NO: 63127 - protein, 8 aa, Homo sapiens
  Table A; Target 63127; HLA-C*05:01; PKHD1; ENSG00000170927; TAA
FPEEPSQV

SEQ ID NO: 63128 - protein, 10 aa, Homo sapiens
  Table A; Target 63128; HLA-B*35:01; PKHD1; ENSG00000170927; TAA
FPEEPSQVQL

SEQ ID NO: 63129 - protein, 10 aa, Homo sapiens
  Table A; Target 63129; HLA-B*35:03; PKHD1; ENSG00000170927; TAA
FPEEPSQVQL

SEQ ID NO: 63130 - protein, 10 aa, Homo sapiens
  Table A; Target 63130; HLA-B*38:01; PKHD1; ENSG00000170927; TAA
FPEEPSQVQL

SEQ ID NO: 63131 - protein, 10 aa, Homo sapiens
  Table A; Target 63131; HLA-B*55:01; PKHD1; ENSG00000170927; TAA
FPEEPSQVQL

SEQ ID NO: 63132 - protein, 10 aa, Homo sapiens
  Table A; Target 63132; HLA-C*05:01; PKHD1; ENSG00000170927; TAA
FPEEPSQVQL

SEQ ID NO: 63133 - protein, 11 aa, Homo sapiens
  Table A; Target 63133; HLA-A*01:01; PKHD1; ENSG00000170927; TAA
FPEEPSQVQLK

SEQ ID NO: 63134 - protein, 11 aa, Homo sapiens
  Table A; Target 63134; HLA-B*27:02; PKHD1; ENSG00000170927; TAA
FPEEPSQVQLK

SEQ ID NO: 63135 - protein, 9 aa, Homo sapiens
  Table A; Target 63135; HLA-B*54:01; PKHD1; ENSG00000170927; TAA
FPFLPSPGQ

SEQ ID NO: 63136 - protein, 8 aa, Homo sapiens
  Table A; Target 63136; HLA-B*51:01; PKHD1; ENSG00000170927; TAA
FPFPHAAI

SEQ ID NO: 63137 - protein, 9 aa, Homo sapiens
  Table A; Target 63137; HLA-B*35:01; PKHD1; ENSG00000170927; TAA
FPFPHAAIL

SEQ ID NO: 63138 - protein, 9 aa, Homo sapiens
  Table A; Target 63138; HLA-B*35:03; PKHD1; ENSG00000170927; TAA
FPFPHAAIL

SEQ ID NO: 63139 - protein, 9 aa, Homo sapiens
  Table A; Target 63139; HLA-B*51:01; PKHD1; ENSG00000170927; TAA
FPFPHAAIL

SEQ ID NO: 63140 - protein, 10 aa, Homo sapiens
  Table A; Target 63140; HLA-B*54:01; PKHD1; ENSG00000170927; TAA
FPKTEAEWTA

SEQ ID NO: 63141 - protein, 9 aa, Homo sapiens
  Table A; Target 63141; HLA-B*07:02; PKHD1; ENSG00000170927; TAA
FPVDRSNVL

SEQ ID NO: 63142 - protein, 9 aa, Homo sapiens
  Table A; Target 63142; HLA-B*08:01; PKHD1; ENSG00000170927; TAA
FPVDRSNVL

SEQ ID NO: 63143 - protein, 9 aa, Homo sapiens
  Table A; Target 63143; HLA-B*35:01; PKHD1; ENSG00000170927; TAA
FPVDRSNVL

SEQ ID NO: 63144 - protein, 9 aa, Homo sapiens
  Table A; Target 63144; HLA-B*35:03; PKHD1; ENSG00000170927; TAA
FPVDRSNVL

SEQ ID NO: 63145 - protein, 9 aa, Homo sapiens
  Table A; Target 63145; HLA-B*46:01; PKHD1; ENSG00000170927; TAA
FPVDRSNVL

SEQ ID NO: 63146 - protein, 9 aa, Homo sapiens
  Table A; Target 63146; HLA-B*51:01; PKHD1; ENSG00000170927; TAA
FPVDRSNVL

SEQ ID NO: 63147 - protein, 9 aa, Homo sapiens
  Table A; Target 63147; HLA-B*54:01; PKHD1; ENSG00000170927; TAA
FPVDRSNVL

SEQ ID NO: 63148 - protein, 9 aa, Homo sapiens
  Table A; Target 63148; HLA-B*55:01; PKHD1; ENSG00000170927; TAA
FPVDRSNVL

SEQ ID NO: 63149 - protein, 9 aa, Homo sapiens
  Table A; Target 63149; HLA-B*56:01; PKHD1; ENSG00000170927; TAA
FPVDRSNVL

SEQ ID NO: 63150 - protein, 9 aa, Homo sapiens
  Table A; Target 63150; HLA-C*02:02; PKHD1; ENSG00000170927; TAA
FPVDRSNVL

SEQ ID NO: 63151 - protein, 9 aa, Homo sapiens
  Table A; Target 63151; HLA-C*03:03; PKHD1; ENSG00000170927; TAA
FPVDRSNVL

SEQ ID NO: 63152 - protein, 9 aa, Homo sapiens
  Table A; Target 63152; HLA-C*03:04; PKHD1; ENSG00000170927; TAA
FPVDRSNVL

SEQ ID NO: 63153 - protein, 9 aa, Homo sapiens
  Table A; Target 63153; HLA-C*07:02; PKHD1; ENSG00000170927; TAA
FPVDRSNVL

SEQ ID NO: 63154 - protein, 9 aa, Homo sapiens
  Table A; Target 63154; HLA-C*12:03; PKHD1; ENSG00000170927; TAA
FPVDRSNVL

SEQ ID NO: 63155 - protein, 9 aa, Homo sapiens
  Table A; Target 63155; HLA-C*14:02; PKHD1; ENSG00000170927; TAA
FPVDRSNVL

SEQ ID NO: 63156 - protein, 9 aa, Homo sapiens
  Table A; Target 63156; HLA-C*16:01; PKHD1; ENSG00000170927; TAA
FPVDRSNVL

SEQ ID NO: 63157 - protein, 11 aa, Homo sapiens
  Table A; Target 63157; HLA-B*51:01; PKHD1; ENSG00000170927; TAA
FPVDRSNVLSV

SEQ ID NO: 63158 - protein, 11 aa, Homo sapiens
  Table A; Target 63158; HLA-B*54:01; PKHD1; ENSG00000170927; TAA
FPVDRSNVLSV

SEQ ID NO: 63159 - protein, 11 aa, Homo sapiens
  Table A; Target 63159; HLA-B*56:01; PKHD1; ENSG00000170927; TAA
FPVDRSNVLSV

SEQ ID NO: 63160 - protein, 9 aa, Homo sapiens
  Table A; Target 63160; HLA-B*54:01; PKHD1; ENSG00000170927; TAA
FPYGVKFLA

SEQ ID NO: 63161 - protein, 10 aa, Homo sapiens
  Table A; Target 63161; HLA-B*51:01; PKHD1; ENSG00000170927; TAA
FPYGVKFLAV

SEQ ID NO: 63162 - protein, 10 aa, Homo sapiens
  Table A; Target 63162; HLA-B*54:01; PKHD1; ENSG00000170927; TAA
FPYGVKFLAV

SEQ ID NO: 63163 - protein, 10 aa, Homo sapiens
  Table A; Target 63163; HLA-B*56:01; PKHD1; ENSG00000170927; TAA
FPYGVKFLAV

SEQ ID NO: 63164 - protein, 8 aa, Homo sapiens
  Table A; Target 63164; HLA-B*15:01; PKHD1; ENSG00000170927; TAA
FQVLGQAF

SEQ ID NO: 63165 - protein, 8 aa, Homo sapiens
  Table A; Target 63165; HLA-B*15:03; PKHD1; ENSG00000170927; TAA
FQVLGQAF

SEQ ID NO: 63166 - protein, 8 aa, Homo sapiens
  Table A; Target 63166; HLA-C*03:04; PKHD1; ENSG00000170927; TAA
FQVLGQAF

SEQ ID NO: 63167 - protein, 9 aa, Homo sapiens
  Table A; Target 63167; HLA-A*01:01; PKHD1; ENSG00000170927; TAA
FSAPQNSVK

SEQ ID NO: 63168 - protein, 9 aa, Homo sapiens
  Table A; Target 63168; HLA-C*12:03; PKHD1; ENSG00000170927; TAA
FSKAQTPIV

SEQ ID NO: 63169 - protein, 8 aa, Homo sapiens
  Table A; Target 63169; HLA-C*03:04; PKHD1; ENSG00000170927; TAA
FSLHGGSL

SEQ ID NO: 63170 - protein, 9 aa, Homo sapiens
  Table A; Target 63170; HLA-C*03:04; PKHD1; ENSG00000170927; TAA
FSLHGGSLL

SEQ ID NO: 63171 - protein, 9 aa, Homo sapiens
  Table A; Target 63171; HLA-A*25:01; PKHD1; ENSG00000170927; TAA
FSNVSAGSW

SEQ ID NO: 63172 - protein, 9 aa, Homo sapiens
  Table A; Target 63172; HLA-B*57:01; PKHD1; ENSG00000170927; TAA
FSRDPALVW

SEQ ID NO: 63173 - protein, 9 aa, Homo sapiens
  Table A; Target 63173; HLA-A*01:01; PKHD1; ENSG00000170927; TAA
FSSFVKSCY

SEQ ID NO: 63174 - protein, 9 aa, Homo sapiens
  Table A; Target 63174; HLA-A*29:02; PKHD1; ENSG00000170927; TAA
FSSFVKSCY

SEQ ID NO: 63175 - protein, 9 aa, Homo sapiens
  Table A; Target 63175; HLA-A*30:02; PKHD1; ENSG00000170927; TAA
FSSFVKSCY

SEQ ID NO: 63176 - protein, 9 aa, Homo sapiens
  Table A; Target 63176; HLA-A*68:02; PKHD1; ENSG00000170927; TAA
FTIGFQNMV

SEQ ID NO: 63177 - protein, 10 aa, Homo sapiens
  Table A; Target 63177; HLA-A*25:01; PKHD1; ENSG00000170927; TAA
FTNSSNLVAF

SEQ ID NO: 63178 - protein, 9 aa, Homo sapiens
  Table A; Target 63178; HLA-A*68:02; PKHD1; ENSG00000170927; TAA
FTSRVIITA

SEQ ID NO: 63179 - protein, 9 aa, Homo sapiens
  Table A; Target 63179; HLA-B*54:01; PKHD1; ENSG00000170927; TAA
FTSRVIITA

SEQ ID NO: 63180 - protein, 10 aa, Homo sapiens
  Table A; Target 63180; HLA-A*68:02; PKHD1; ENSG00000170927; TAA
FTSRVIITAV

SEQ ID NO: 63181 - protein, 8 aa, Homo sapiens
  Table A; Target 63181; HLA-C*03:03; PKHD1; ENSG00000170927; TAA
FTVKTSQL

SEQ ID NO: 63182 - protein, 8 aa, Homo sapiens
  Table A; Target 63182; HLA-C*03:04; PKHD1; ENSG00000170927; TAA
FTVKTSQL

SEQ ID NO: 63183 - protein, 9 aa, Homo sapiens
  Table A; Target 63183; HLA-A*02:01; PKHD1; ENSG00000170927; TAA
FTVTSPPGV

SEQ ID NO: 63184 - protein, 11 aa, Homo sapiens
  Table A; Target 63184; HLA-B*58:01; PKHD1; ENSG00000170927; TAA
FTVTSPPGVNF

SEQ ID NO: 63185 - protein, 11 aa, Homo sapiens
  Table A; Target 63185; HLA-C*02:02; PKHD1; ENSG00000170927; TAA
FTVTSPPGVNF

SEQ ID NO: 63186 - protein, 9 aa, Homo sapiens
  Table A; Target 63186; HLA-A*01:01; PKHD1; ENSG00000170927; TAA
FVAPETNNY

SEQ ID NO: 63187 - protein, 9 aa, Homo sapiens
  Table A; Target 63187; HLA-A*25:01; PKHD1; ENSG00000170927; TAA
FVAPETNNY

SEQ ID NO: 63188 - protein, 9 aa, Homo sapiens
  Table A; Target 63188; HLA-A*26:01; PKHD1; ENSG00000170927; TAA
FVAPETNNY

SEQ ID NO: 63189 - protein, 9 aa, Homo sapiens
  Table A; Target 63189; HLA-A*29:02; PKHD1; ENSG00000170927; TAA
FVAPETNNY

SEQ ID NO: 63190 - protein, 9 aa, Homo sapiens
  Table A; Target 63190; HLA-A*30:02; PKHD1; ENSG00000170927; TAA
FVAPETNNY

SEQ ID NO: 63191 - protein, 9 aa, Homo sapiens
  Table A; Target 63191; HLA-A*32:01; PKHD1; ENSG00000170927; TAA
FVAPETNNY

SEQ ID NO: 63192 - protein, 9 aa, Homo sapiens
  Table A; Target 63192; HLA-B*15:01; PKHD1; ENSG00000170927; TAA
FVAPETNNY

SEQ ID NO: 63193 - protein, 9 aa, Homo sapiens
  Table A; Target 63193; HLA-B*15:03; PKHD1; ENSG00000170927; TAA
FVAPETNNY

SEQ ID NO: 63194 - protein, 9 aa, Homo sapiens
  Table A; Target 63194; HLA-B*35:01; PKHD1; ENSG00000170927; TAA
FVAPETNNY

SEQ ID NO: 63195 - protein, 9 aa, Homo sapiens
  Table A; Target 63195; HLA-B*39:01; PKHD1; ENSG00000170927; TAA
FVAPETNNY

SEQ ID NO: 63196 - protein, 9 aa, Homo sapiens
  Table A; Target 63196; HLA-B*46:01; PKHD1; ENSG00000170927; TAA
FVAPETNNY

SEQ ID NO: 63197 - protein, 9 aa, Homo sapiens
  Table A; Target 63197; HLA-B*58:01; PKHD1; ENSG00000170927; TAA
FVAPETNNY

SEQ ID NO: 63198 - protein, 9 aa, Homo sapiens
  Table A; Target 63198; HLA-C*02:02; PKHD1; ENSG00000170927; TAA
FVAPETNNY

SEQ ID NO: 63199 - protein, 9 aa, Homo sapiens
  Table A; Target 63199; HLA-C*07:04; PKHD1; ENSG00000170927; TAA
FVAPETNNY

SEQ ID NO: 63200 - protein, 9 aa, Homo sapiens
  Table A; Target 63200; HLA-C*07:06; PKHD1; ENSG00000170927; TAA
FVAPETNNY

SEQ ID NO: 63201 - protein, 9 aa, Homo sapiens
  Table A; Target 63201; HLA-C*16:01; PKHD1; ENSG00000170927; TAA
FVAPETNNY

SEQ ID NO: 63202 - protein, 9 aa, Homo sapiens
  Table A; Target 63202; HLA-C*16:04; PKHD1; ENSG00000170927; TAA
FVAPETNNY

SEQ ID NO: 63203 - protein, 11 aa, Homo sapiens
  Table A; Target 63203; HLA-A*25:01; PKHD1; ENSG00000170927; TAA
FVAPETNNYTF

SEQ ID NO: 63204 - protein, 11 aa, Homo sapiens
  Table A; Target 63204; HLA-A*26:01; PKHD1; ENSG00000170927; TAA
FVAPETNNYTF

SEQ ID NO: 63205 - protein, 11 aa, Homo sapiens
  Table A; Target 63205; HLA-A*32:01; PKHD1; ENSG00000170927; TAA
FVAPETNNYTF

SEQ ID NO: 63206 - protein, 11 aa, Homo sapiens
  Table A; Target 63206; HLA-B*35:01; PKHD1; ENSG00000170927; TAA
FVAPETNNYTF

SEQ ID NO: 63207 - protein, 11 aa, Homo sapiens
  Table A; Target 63207; HLA-B*58:01; PKHD1; ENSG00000170927; TAA
FVAPETNNYTF

SEQ ID NO: 63208 - protein, 11 aa, Homo sapiens
  Table A; Target 63208; HLA-C*02:02; PKHD1; ENSG00000170927; TAA
FVAPETNNYTF

SEQ ID NO: 63209 - protein, 10 aa, Homo sapiens
  Table A; Target 63209; HLA-C*05:01; PKHD1; ENSG00000170927; TAA
FVDDQLPCNV

SEQ ID NO: 63210 - protein, 8 aa, Homo sapiens
  Table A; Target 63210; HLA-C*03:04; PKHD1; ENSG00000170927; TAA
FVDVFSSV

SEQ ID NO: 63211 - protein, 8 aa, Homo sapiens
  Table A; Target 63211; HLA-C*05:01; PKHD1; ENSG00000170927; TAA
FVDVFSSV

SEQ ID NO: 63212 - protein, 9 aa, Homo sapiens
  Table A; Target 63212; HLA-A*31:01; PKHD1; ENSG00000170927; TAA
FYFPSLQPR

SEQ ID NO: 63213 - protein, 9 aa, Homo sapiens
  Table A; Target 63213; HLA-A*33:01; PKHD1; ENSG00000170927; TAA
FYFPSLQPR

SEQ ID NO: 63214 - protein, 9 aa, Homo sapiens
  Table A; Target 63214; HLA-A*33:03; PKHD1; ENSG00000170927; TAA
FYFPSLQPR

SEQ ID NO: 63215 - protein, 10 aa, Homo sapiens
  Table A; Target 63215; HLA-A*29:02; PKHD1; ENSG00000170927; TAA
FYIMPQVFHY

SEQ ID NO: 63216 - protein, 9 aa, Homo sapiens
  Table A; Target 63216; HLA-A*23:01; PKHD1; ENSG00000170927; TAA
FYNILGHAL

SEQ ID NO: 63217 - protein, 9 aa, Homo sapiens
  Table A; Target 63217; HLA-A*24:02; PKHD1; ENSG00000170927; TAA
FYNILGHAL

SEQ ID NO: 63218 - protein, 9 aa, Homo sapiens
  Table A; Target 63218; HLA-C*14:02; PKHD1; ENSG00000170927; TAA
FYNILGHAL

SEQ ID NO: 63219 - protein, 8 aa, Homo sapiens
  Table A; Target 63219; HLA-A*23:01; PKHD1; ENSG00000170927; TAA
FYNLAVLI

SEQ ID NO: 63220 - protein, 9 aa, Homo sapiens
  Table A; Target 63220; HLA-B*13:02; PKHD1; ENSG00000170927; TAA
GAANIDIFI

SEQ ID NO: 63221 - protein, 9 aa, Homo sapiens
  Table A; Target 63221; HLA-B*15:03; PKHD1; ENSG00000170927; TAA
GARVIVQSF

SEQ ID NO: 63222 - protein, 9 aa, Homo sapiens
  Table A; Target 63222; HLA-B*46:01; PKHD1; ENSG00000170927; TAA
GARVIVQSF

SEQ ID NO: 63223 - protein, 9 aa, Homo sapiens
  Table A; Target 63223; HLA-B*37:01; PKHD1; ENSG00000170927; TAA
GCSIPLHSL

SEQ ID NO: 63224 - protein, 9 aa, Homo sapiens
  Table A; Target 63224; HLA-C*03:03; PKHD1; ENSG00000170927; TAA
GCSIPLHSL

SEQ ID NO: 63225 - protein, 9 aa, Homo sapiens
  Table A; Target 63225; HLA-C*03:04; PKHD1; ENSG00000170927; TAA
GCSIPLHSL

SEQ ID NO: 63226 - protein, 9 aa, Homo sapiens
  Table A; Target 63226; HLA-C*16:01; PKHD1; ENSG00000170927; TAA
GCSIPLHSL

SEQ ID NO: 63227 - protein, 8 aa, Homo sapiens
  Table A; Target 63227; HLA-C*16:01; PKHD1; ENSG00000170927; TAA
GCTVRNSF

SEQ ID NO: 63228 - protein, 9 aa, Homo sapiens
  Table A; Target 63228; HLA-B*40:01; PKHD1; ENSG00000170927; TAA
GDAVEGLEL

SEQ ID NO: 63229 - protein, 9 aa, Homo sapiens
  Table A; Target 63229; HLA-B*37:01; PKHD1; ENSG00000170927; TAA
GDLPNFIRV

SEQ ID NO: 63230 - protein, 9 aa, Homo sapiens
  Table A; Target 63230; HLA-B*15:03; PKHD1; ENSG00000170927; TAA
GDPLPGASF

SEQ ID NO: 63231 - protein, 9 aa, Homo sapiens
  Table A; Target 63231; HLA-B*37:01; PKHD1; ENSG00000170927; TAA
GDPLPGASF

SEQ ID NO: 63232 - protein, 11 aa, Homo sapiens
  Table A; Target 63232; HLA-B*37:01; PKHD1; ENSG00000170927; TAA
GDSPTVRSTGM

SEQ ID NO: 63233 - protein, 8 aa, Homo sapiens
  Table A; Target 63233; HLA-B*37:01; PKHD1; ENSG00000170927; TAA
GDSQFLQV

SEQ ID NO: 63234 - protein, 9 aa, Homo sapiens
  Table A; Target 63234; HLA-A*30:01; PKHD1; ENSG00000170927; TAA
GDYIGSQNV

SEQ ID NO: 63235 - protein, 9 aa, Homo sapiens
  Table A; Target 63235; HLA-B*13:02; PKHD1; ENSG00000170927; TAA
GDYIGSQNV

SEQ ID NO: 63236 - protein, 9 aa, Homo sapiens
  Table A; Target 63236; HLA-B*37:01; PKHD1; ENSG00000170927; TAA
GDYIGSQNV

SEQ ID NO: 63237 - protein, 9 aa, Homo sapiens
  Table A; Target 63237; HLA-B*49:01; PKHD1; ENSG00000170927; TAA
GDYIGSQNV

SEQ ID NO: 63238 - protein, 11 aa, Homo sapiens
  Table A; Target 63238; HLA-B*37:01; PKHD1; ENSG00000170927; TAA
GDYIGSQNVSF

SEQ ID NO: 63239 - protein, 8 aa, Homo sapiens
  Table A; Target 63239; HLA-B*49:01; PKHD1; ENSG00000170927; TAA
GEDLFLNV

SEQ ID NO: 63240 - protein, 9 aa, Homo sapiens
  Table A; Target 63240; HLA-B*37:01; PKHD1; ENSG00000170927; TAA
GEDMRMKVM

SEQ ID NO: 63241 - protein, 9 aa, Homo sapiens
  Table A; Target 63241; HLA-B*40:01; PKHD1; ENSG00000170927; TAA
GEDMRMKVM

SEQ ID NO: 63242 - protein, 8 aa, Homo sapiens
  Table A; Target 63242; HLA-B*49:01; PKHD1; ENSG00000170927; TAA
GEGQVQVI

SEQ ID NO: 63243 - protein, 9 aa, Homo sapiens
  Table A; Target 63243; HLA-A*30:01; PKHD1; ENSG00000170927; TAA
GEGQVQVIL

SEQ ID NO: 63244 - protein, 9 aa, Homo sapiens
  Table A; Target 63244; HLA-B*40:01; PKHD1; ENSG00000170927; TAA
GEGQVQVIL

SEQ ID NO: 63245 - protein, 9 aa, Homo sapiens
  Table A; Target 63245; HLA-B*44:02; PKHD1; ENSG00000170927; TAA
GEGQVQVIL

SEQ ID NO: 63246 - protein, 9 aa, Homo sapiens
  Table A; Target 63246; HLA-B*44:03; PKHD1; ENSG00000170927; TAA
GEGQVQVIL

SEQ ID NO: 63247 - protein, 9 aa, Homo sapiens
  Table A; Target 63247; HLA-B*49:01; PKHD1; ENSG00000170927; TAA
GEGQVQVIL

SEQ ID NO: 63248 - protein, 11 aa, Homo sapiens
  Table A; Target 63248; HLA-B*49:01; PKHD1; ENSG00000170927; TAA
GEGQVQVILRV

SEQ ID NO: 63249 - protein, 8 aa, Homo sapiens
  Table A; Target 63249; HLA-A*30:01; PKHD1; ENSG00000170927; TAA
GEITNSSL

SEQ ID NO: 63250 - protein, 8 aa, Homo sapiens
  Table A; Target 63250; HLA-B*40:01; PKHD1; ENSG00000170927; TAA
GEITNSSL

SEQ ID NO: 63251 - protein, 10 aa, Homo sapiens
  Table A; Target 63251; HLA-A*30:01; PKHD1; ENSG00000170927; TAA
GEITNSSLSL

SEQ ID NO: 63252 - protein, 10 aa, Homo sapiens
  Table A; Target 63252; HLA-B*40:01; PKHD1; ENSG00000170927; TAA
GEITNSSLSL

SEQ ID NO: 63253 - protein, 10 aa, Homo sapiens
  Table A; Target 63253; HLA-B*44:03; PKHD1; ENSG00000170927; TAA
GEITNSSLSL

SEQ ID NO: 63254 - protein, 10 aa, Homo sapiens
  Table A; Target 63254; HLA-B*49:01; PKHD1; ENSG00000170927; TAA
GEITNSSLSL

SEQ ID NO: 63255 - protein, 8 aa, Homo sapiens
  Table A; Target 63255; HLA-B*37:01; PKHD1; ENSG00000170927; TAA
GELKVGTL

SEQ ID NO: 63256 - protein, 8 aa, Homo sapiens
  Table A; Target 63256; HLA-B*40:01; PKHD1; ENSG00000170927; TAA
GELKVGTL

SEQ ID NO: 63257 - protein, 9 aa, Homo sapiens
  Table A; Target 63257; HLA-A*30:01; PKHD1; ENSG00000170927; TAA
GESFIPPTL

SEQ ID NO: 63258 - protein, 9 aa, Homo sapiens
  Table A; Target 63258; HLA-B*18:01; PKHD1; ENSG00000170927; TAA
GESFIPPTL

SEQ ID NO: 63259 - protein, 9 aa, Homo sapiens
  Table A; Target 63259; HLA-B*40:01; PKHD1; ENSG00000170927; TAA
GESFIPPTL

SEQ ID NO: 63260 - protein, 9 aa, Homo sapiens
  Table A; Target 63260; HLA-B*40:02; PKHD1; ENSG00000170927; TAA
GESFIPPTL

SEQ ID NO: 63261 - protein, 9 aa, Homo sapiens
  Table A; Target 63261; HLA-B*44:02; PKHD1; ENSG00000170927; TAA
GESFIPPTL

SEQ ID NO: 63262 - protein, 9 aa, Homo sapiens
  Table A; Target 63262; HLA-B*44:03; PKHD1; ENSG00000170927; TAA
GESFIPPTL

SEQ ID NO: 63263 - protein, 9 aa, Homo sapiens
  Table A; Target 63263; HLA-B*49:01; PKHD1; ENSG00000170927; TAA
GESFIPPTL

SEQ ID NO: 63264 - protein, 9 aa, Homo sapiens
  Table A; Target 63264; HLA-C*16:04; PKHD1; ENSG00000170927; TAA
GESFIPPTL

SEQ ID NO: 63265 - protein, 10 aa, Homo sapiens
  Table A; Target 63265; HLA-B*49:01; PKHD1; ENSG00000170927; TAA
GESFIPPTLV

SEQ ID NO: 63266 - protein, 8 aa, Homo sapiens
  Table A; Target 63266; HLA-A*30:01; PKHD1; ENSG00000170927; TAA
GETLVIGV

SEQ ID NO: 63267 - protein, 8 aa, Homo sapiens
  Table A; Target 63267; HLA-B*37:01; PKHD1; ENSG00000170927; TAA
GETLVIGV

SEQ ID NO: 63268 - protein, 8 aa, Homo sapiens
  Table A; Target 63268; HLA-B*49:01; PKHD1; ENSG00000170927; TAA
GETLVIGV

SEQ ID NO: 63269 - protein, 9 aa, Homo sapiens
  Table A; Target 63269; HLA-A*30:01; PKHD1; ENSG00000170927; TAA
GETLVIGVA

SEQ ID NO: 63270 - protein, 9 aa, Homo sapiens
  Table A; Target 63270; HLA-B*40:01; PKHD1; ENSG00000170927; TAA
GETLVIGVA

SEQ ID NO: 63271 - protein, 9 aa, Homo sapiens
  Table A; Target 63271; HLA-B*40:02; PKHD1; ENSG00000170927; TAA
GETLVIGVA

SEQ ID NO: 63272 - protein, 9 aa, Homo sapiens
  Table A; Target 63272; HLA-B*49:01; PKHD1; ENSG00000170927; TAA
GETLVIGVA

SEQ ID NO: 63273 - protein, 11 aa, Homo sapiens
  Table A; Target 63273; HLA-B*40:01; PKHD1; ENSG00000170927; TAA
GETLVIGVARL

SEQ ID NO: 63274 - protein, 9 aa, Homo sapiens
  Table A; Target 63274; HLA-B*49:01; PKHD1; ENSG00000170927; TAA
GEVGNELPV

SEQ ID NO: 63275 - protein, 11 aa, Homo sapiens
  Table A; Target 63275; HLA-A*29:02; PKHD1; ENSG00000170927; TAA
GFFVAPETNNY

SEQ ID NO: 63276 - protein, 10 aa, Homo sapiens
  Table A; Target 63276; HLA-A*29:02; PKHD1; ENSG00000170927; TAA
GFLAFKNFDY

SEQ ID NO: 63277 - protein, 9 aa, Homo sapiens
  Table A; Target 63277; HLA-A*23:01; PKHD1; ENSG00000170927; TAA
GFVDVFSSV

SEQ ID NO: 63278 - protein, 9 aa, Homo sapiens
  Table A; Target 63278; HLA-C*14:02; PKHD1; ENSG00000170927; TAA
GFVDVFSSV

SEQ ID NO: 63279 - protein, 9 aa, Homo sapiens
  Table A; Target 63279; HLA-A*01:01; PKHD1; ENSG00000170927; TAA
GIDLEGQAY

SEQ ID NO: 63280 - protein, 9 aa, Homo sapiens
  Table A; Target 63280; HLA-B*15:01; PKHD1; ENSG00000170927; TAA
GIDLEGQAY

SEQ ID NO: 63281 - protein, 10 aa, Homo sapiens
  Table A; Target 63281; HLA-A*03:01; PKHD1; ENSG00000170927; TAA
GIYPLQVRQK

SEQ ID NO: 63282 - protein, 10 aa, Homo sapiens
  Table A; Target 63282; HLA-A*03:02; PKHD1; ENSG00000170927; TAA
GIYPLQVRQK

SEQ ID NO: 63283 - protein, 10 aa, Homo sapiens
  Table A; Target 63283; HLA-A*11:01; PKHD1; ENSG00000170927; TAA
GIYPLQVRQK

SEQ ID NO: 63284 - protein, 9 aa, Homo sapiens
  Table A; Target 63284; HLA-B*15:03; PKHD1; ENSG00000170927; TAA
GKVHLYSAY

SEQ ID NO: 63285 - protein, 10 aa, Homo sapiens
  Table A; Target 63285; HLA-A*30:02; PKHD1; ENSG00000170927; TAA
GLANTPEVSY

SEQ ID NO: 63286 - protein, 10 aa, Homo sapiens
  Table A; Target 63286; HLA-B*15:01; PKHD1; ENSG00000170927; TAA
GLANTPEVSY

SEQ ID NO: 63287 - protein, 10 aa, Homo sapiens
  Table A; Target 63287; HLA-B*46:01; PKHD1; ENSG00000170927; TAA
GLANTPEVSY

SEQ ID NO: 63288 - protein, 11 aa, Homo sapiens
  Table A; Target 63288; HLA-A*01:01; PKHD1; ENSG00000170927; TAA
GLELTEATPGY

SEQ ID NO: 63289 - protein, 9 aa, Homo sapiens
  Table A; Target 63289; HLA-B*15:01; PKHD1; ENSG00000170927; TAA
GLKVDSNVF

SEQ ID NO: 63290 - protein, 9 aa, Homo sapiens
  Table A; Target 63290; HLA-B*15:03; PKHD1; ENSG00000170927; TAA
GLKVDSNVF

SEQ ID NO: 63291 - protein, 9 aa, Homo sapiens
  Table A; Target 63291; HLA-B*46:01; PKHD1; ENSG00000170927; TAA
GLKVDSNVF

SEQ ID NO: 63292 - protein, 10 aa, Homo sapiens
  Table A; Target 63292; HLA-B*15:01; PKHD1; ENSG00000170927; TAA
GLKVDSNVFY

SEQ ID NO: 63293 - protein, 9 aa, Homo sapiens
  Table A; Target 63293; HLA-B*15:01; PKHD1; ENSG00000170927; TAA
GLPPPVSVF

SEQ ID NO: 63294 - protein, 10 aa, Homo sapiens
  Table A; Target 63294; HLA-A*02:03; PKHD1; ENSG00000170927; TAA
GLRGQNTTSV

SEQ ID NO: 63295 - protein, 11 aa, Homo sapiens
  Table A; Target 63295; HLA-A*30:02; PKHD1; ENSG00000170927; TAA
GLRGQNTTSVY

SEQ ID NO: 63296 - protein, 11 aa, Homo sapiens
  Table A; Target 63296; HLA-B*15:01; PKHD1; ENSG00000170927; TAA
GLRGQNTTSVY

SEQ ID NO: 63297 - protein, 11 aa, Homo sapiens
  Table A; Target 63297; HLA-B*15:03; PKHD1; ENSG00000170927; TAA
GLRGQNTTSVY

SEQ ID NO: 63298 - protein, 11 aa, Homo sapiens
  Table A; Target 63298; HLA-B*46:01; PKHD1; ENSG00000170927; TAA
GLRGQNTTSVY

SEQ ID NO: 63299 - protein, 10 aa, Homo sapiens
  Table A; Target 63299; HLA-A*03:01; PKHD1; ENSG00000170927; TAA
GMISSLSSNK

SEQ ID NO: 63300 - protein, 10 aa, Homo sapiens
  Table A; Target 63300; HLA-A*03:02; PKHD1; ENSG00000170927; TAA
GMISSLSSNK

SEQ ID NO: 63301 - protein, 11 aa, Homo sapiens
  Table A; Target 63301; HLA-B*56:01; PKHD1; ENSG00000170927; TAA
GPIFGDMLATA

SEQ ID NO: 63302 - protein, 9 aa, Homo sapiens
  Table A; Target 63302; HLA-B*13:02; PKHD1; ENSG00000170927; TAA
GQGGFTVKT

SEQ ID NO: 63303 - protein, 8 aa, Homo sapiens
  Table A; Target 63303; HLA-B*13:02; PKHD1; ENSG00000170927; TAA
GQNQIRFI

SEQ ID NO: 63304 - protein, 10 aa, Homo sapiens
  Table A; Target 63304; HLA-B*13:02; PKHD1; ENSG00000170927; TAA
GQNTQGNFSL

SEQ ID NO: 63305 - protein, 8 aa, Homo sapiens
  Table A; Target 63305; HLA-A*30:02; PKHD1; ENSG00000170927; TAA
GQNTTSVY

SEQ ID NO: 63306 - protein, 8 aa, Homo sapiens
  Table A; Target 63306; HLA-B*15:01; PKHD1; ENSG00000170927; TAA
GQNTTSVY

SEQ ID NO: 63307 - protein, 8 aa, Homo sapiens
  Table A; Target 63307; HLA-B*15:03; PKHD1; ENSG00000170927; TAA
GQNTTSVY

SEQ ID NO: 63308 - protein, 9 aa, Homo sapiens
  Table A; Target 63308; HLA-B*13:02; PKHD1; ENSG00000170927; TAA
GQNTTSVYI

SEQ ID NO: 63309 - protein, 9 aa, Homo sapiens
  Table A; Target 63309; HLA-A*02:03; PKHD1; ENSG00000170927; TAA
GQVQVILRV

SEQ ID NO: 63310 - protein, 9 aa, Homo sapiens
  Table A; Target 63310; HLA-A*02:04; PKHD1; ENSG00000170927; TAA
GQVQVILRV

SEQ ID NO: 63311 - protein, 9 aa, Homo sapiens
  Table A; Target 63311; HLA-A*30:01; PKHD1; ENSG00000170927; TAA
GQVQVILRV

SEQ ID NO: 63312 - protein, 9 aa, Homo sapiens
  Table A; Target 63312; HLA-B*13:02; PKHD1; ENSG00000170927; TAA
GQVQVILRV

SEQ ID NO: 63313 - protein, 9 aa, Homo sapiens
  Table A; Target 63313; HLA-C*02:02; PKHD1; ENSG00000170927; TAA
GQVQVILRV

SEQ ID NO: 63314 - protein, 9 aa, Homo sapiens
  Table A; Target 63314; HLA-C*06:02; PKHD1; ENSG00000170927; TAA
GQVQVILRV

SEQ ID NO: 63315 - protein, 9 aa, Homo sapiens
  Table A; Target 63315; HLA-B*27:05; PKHD1; ENSG00000170927; TAA
GRIVNVTVI

SEQ ID NO: 63316 - protein, 9 aa, Homo sapiens
  Table A; Target 63316; HLA-C*16:04; PKHD1; ENSG00000170927; TAA
GRIVNVTVI

SEQ ID NO: 63317 - protein, 9 aa, Homo sapiens
  Table A; Target 63317; HLA-A*03:02; PKHD1; ENSG00000170927; TAA
GSLGLSQEK

SEQ ID NO: 63318 - protein, 9 aa, Homo sapiens
  Table A; Target 63318; HLA-A*11:01; PKHD1; ENSG00000170927; TAA
GSLGLSQEK

SEQ ID NO: 63319 - protein, 10 aa, Homo sapiens
  Table A; Target 63319; HLA-A*11:01; PKHD1; ENSG00000170927; TAA
GSLGLSQEKK

SEQ ID NO: 63320 - protein, 9 aa, Homo sapiens
  Table A; Target 63320; HLA-A*25:01; PKHD1; ENSG00000170927; TAA
GTADWFDSW

SEQ ID NO: 63321 - protein, 9 aa, Homo sapiens
  Table A; Target 63321; HLA-B*57:01; PKHD1; ENSG00000170927; TAA
GTADWFDSW

SEQ ID NO: 63322 - protein, 11 aa, Homo sapiens
  Table A; Target 63322; HLA-A*01:01; PKHD1; ENSG00000170927; TAA
GTEEGSGLVLV

SEQ ID NO: 63323 - protein, 10 aa, Homo sapiens
  Table A; Target 63323; HLA-C*07:06; PKHD1; ENSG00000170927; TAA
GTELPLITAR

SEQ ID NO: 63324 - protein, 9 aa, Homo sapiens
  Table A; Target 63324; HLA-A*11:01; PKHD1; ENSG00000170927; TAA
GTLDFPVDR

SEQ ID NO: 63325 - protein, 9 aa, Homo sapiens
  Table A; Target 63325; HLA-A*31:01; PKHD1; ENSG00000170927; TAA
GTLDFPVDR

SEQ ID NO: 63326 - protein, 9 aa, Homo sapiens
  Table A; Target 63326; HLA-C*07:06; PKHD1; ENSG00000170927; TAA
GTLDFPVDR

SEQ ID NO: 63327 - protein, 9 aa, Homo sapiens
  Table A; Target 63327; HLA-A*03:01; PKHD1; ENSG00000170927; TAA
GTLENPLEK

SEQ ID NO: 63328 - protein, 9 aa, Homo sapiens
  Table A; Target 63328; HLA-A*03:02; PKHD1; ENSG00000170927; TAA
GTLENPLEK

SEQ ID NO: 63329 - protein, 9 aa, Homo sapiens
  Table A; Target 63329; HLA-A*11:01; PKHD1; ENSG00000170927; TAA
GTLENPLEK

SEQ ID NO: 63330 - protein, 9 aa, Homo sapiens
  Table A; Target 63330; HLA-A*03:01; PKHD1; ENSG00000170927; TAA
GTWQQKTPK

SEQ ID NO: 63331 - protein, 9 aa, Homo sapiens
  Table A; Target 63331; HLA-A*11:01; PKHD1; ENSG00000170927; TAA
GTWQQKTPK

SEQ ID NO: 63332 - protein, 9 aa, Homo sapiens
  Table A; Target 63332; HLA-A*02:07; PKHD1; ENSG00000170927; TAA
GVDLHIQYL

SEQ ID NO: 63333 - protein, 11 aa, Homo sapiens
  Table A; Target 63333; HLA-A*25:01; PKHD1; ENSG00000170927; TAA
GVIGYGNTSSF

SEQ ID NO: 63334 - protein, 11 aa, Homo sapiens
  Table A; Target 63334; HLA-A*26:01; PKHD1; ENSG00000170927; TAA
GVIGYGNTSSF

SEQ ID NO: 63335 - protein, 11 aa, Homo sapiens
  Table A; Target 63335; HLA-A*32:01; PKHD1; ENSG00000170927; TAA
GVIGYGNTSSF

SEQ ID NO: 63336 - protein, 11 aa, Homo sapiens
  Table A; Target 63336; HLA-B*15:01; PKHD1; ENSG00000170927; TAA
GVIGYGNTSSF

SEQ ID NO: 63337 - protein, 11 aa, Homo sapiens
  Table A; Target 63337; HLA-B*15:03; PKHD1; ENSG00000170927; TAA
GVIGYGNTSSF

SEQ ID NO: 63338 - protein, 11 aa, Homo sapiens
  Table A; Target 63338; HLA-B*46:01; PKHD1; ENSG00000170927; TAA
GVIGYGNTSSF

SEQ ID NO: 63339 - protein, 11 aa, Homo sapiens
  Table A; Target 63339; HLA-C*07:04; PKHD1; ENSG00000170927; TAA
GVIGYGNTSSF

SEQ ID NO: 63340 - protein, 9 aa, Homo sapiens
  Table A; Target 63340; HLA-A*03:02; PKHD1; ENSG00000170927; TAA
GVNPAAATR

SEQ ID NO: 63341 - protein, 9 aa, Homo sapiens
  Table A; Target 63341; HLA-A*31:01; PKHD1; ENSG00000170927; TAA
GVNPAAATR

SEQ ID NO: 63342 - protein, 9 aa, Homo sapiens
  Table A; Target 63342; HLA-A*33:03; PKHD1; ENSG00000170927; TAA
GVNPAAATR

SEQ ID NO: 63343 - protein, 9 aa, Homo sapiens
  Table A; Target 63343; HLA-C*07:06; PKHD1; ENSG00000170927; TAA
GVNPAAATR

SEQ ID NO: 63344 - protein, 9 aa, Homo sapiens
  Table A; Target 63344; HLA-A*02:07; PKHD1; ENSG00000170927; TAA
GVPGKLIHV

SEQ ID NO: 63345 - protein, 10 aa, Homo sapiens
  Table A; Target 63345; HLA-A*29:02; PKHD1; ENSG00000170927; TAA
GVPGKLIHVY

SEQ ID NO: 63346 - protein, 10 aa, Homo sapiens
  Table A; Target 63346; HLA-A*30:02; PKHD1; ENSG00000170927; TAA
GVPGKLIHVY

SEQ ID NO: 63347 - protein, 9 aa, Homo sapiens
  Table A; Target 63347; HLA-B*13:02; PKHD1; ENSG00000170927; TAA
GVSIHSQGV

SEQ ID NO: 63348 - protein, 10 aa, Homo sapiens
  Table A; Target 63348; HLA-A*29:02; PKHD1; ENSG00000170927; TAA
GVSLILFGSY

SEQ ID NO: 63349 - protein, 10 aa, Homo sapiens
  Table A; Target 63349; HLA-A*30:02; PKHD1; ENSG00000170927; TAA
GVSLILFGSY

SEQ ID NO: 63350 - protein, 9 aa, Homo sapiens
  Table A; Target 63350; HLA-A*01:01; PKHD1; ENSG00000170927; TAA
GVYGKVHLY

SEQ ID NO: 63351 - protein, 9 aa, Homo sapiens
  Table A; Target 63351; HLA-A*03:01; PKHD1; ENSG00000170927; TAA
GVYGKVHLY

SEQ ID NO: 63352 - protein, 9 aa, Homo sapiens
  Table A; Target 63352; HLA-A*26:01; PKHD1; ENSG00000170927; TAA
GVYGKVHLY

SEQ ID NO: 63353 - protein, 9 aa, Homo sapiens
  Table A; Target 63353; HLA-A*29:02; PKHD1; ENSG00000170927; TAA
GVYGKVHLY

SEQ ID NO: 63354 - protein, 9 aa, Homo sapiens
  Table A; Target 63354; HLA-A*30:02; PKHD1; ENSG00000170927; TAA
GVYGKVHLY

SEQ ID NO: 63355 - protein, 9 aa, Homo sapiens
  Table A; Target 63355; HLA-A*32:01; PKHD1; ENSG00000170927; TAA
GVYGKVHLY

SEQ ID NO: 63356 - protein, 9 aa, Homo sapiens
  Table A; Target 63356; HLA-B*15:01; PKHD1; ENSG00000170927; TAA
GVYGKVHLY

SEQ ID NO: 63357 - protein, 9 aa, Homo sapiens
  Table A; Target 63357; HLA-C*02:02; PKHD1; ENSG00000170927; TAA
GVYGKVHLY

SEQ ID NO: 63358 - protein, 8 aa, Homo sapiens
  Table A; Target 63358; HLA-C*14:02; PKHD1; ENSG00000170927; TAA
GYGNTSSF

SEQ ID NO: 63359 - protein, 9 aa, Homo sapiens
  Table A; Target 63359; HLA-A*24:02; PKHD1; ENSG00000170927; TAA
GYGYFFHLM

SEQ ID NO: 63360 - protein, 9 aa, Homo sapiens
  Table A; Target 63360; HLA-B*35:03; PKHD1; ENSG00000170927; TAA
HAAASHGVL

SEQ ID NO: 63361 - protein, 9 aa, Homo sapiens
  Table A; Target 63361; HLA-B*40:01; PKHD1; ENSG00000170927; TAA
HAAASHGVL

SEQ ID NO: 63362 - protein, 9 aa, Homo sapiens
  Table A; Target 63362; HLA-C*03:03; PKHD1; ENSG00000170927; TAA
HAAASHGVL

SEQ ID NO: 63363 - protein, 9 aa, Homo sapiens
  Table A; Target 63363; HLA-C*03:04; PKHD1; ENSG00000170927; TAA
HAAASHGVL

SEQ ID NO: 63364 - protein, 9 aa, Homo sapiens
  Table A; Target 63364; HLA-C*12:03; PKHD1; ENSG00000170927; TAA
HAAASHGVL

SEQ ID NO: 63365 - protein, 9 aa, Homo sapiens
  Table A; Target 63365; HLA-C*16:01; PKHD1; ENSG00000170927; TAA
HAAASHGVL

SEQ ID NO: 63366 - protein, 9 aa, Homo sapiens
  Table A; Target 63366; HLA-C*16:02; PKHD1; ENSG00000170927; TAA
HAAASHGVL

SEQ ID NO: 63367 - protein, 11 aa, Homo sapiens
  Table A; Target 63367; HLA-B*35:01; PKHD1; ENSG00000170927; TAA
HAILVSDGGEL

SEQ ID NO: 63368 - protein, 11 aa, Homo sapiens
  Table A; Target 63368; HLA-B*35:03; PKHD1; ENSG00000170927; TAA
HAILVSDGGEL

SEQ ID NO: 63369 - protein, 11 aa, Homo sapiens
  Table A; Target 63369; HLA-C*03:03; PKHD1; ENSG00000170927; TAA
HAILVSDGGEL

SEQ ID NO: 63370 - protein, 11 aa, Homo sapiens
  Table A; Target 63370; HLA-C*03:04; PKHD1; ENSG00000170927; TAA
HAILVSDGGEL

SEQ ID NO: 63371 - protein, 9 aa, Homo sapiens
  Table A; Target 63371; HLA-A*23:01; PKHD1; ENSG00000170927; TAA
HALDTVLAL

SEQ ID NO: 63372 - protein, 9 aa, Homo sapiens
  Table A; Target 63372; HLA-A*25:01; PKHD1; ENSG00000170927; TAA
HALDTVLAL

SEQ ID NO: 63373 - protein, 9 aa, Homo sapiens
  Table A; Target 63373; HLA-B*13:02; PKHD1; ENSG00000170927; TAA
HALDTVLAL

SEQ ID NO: 63374 - protein, 9 aa, Homo sapiens
  Table A; Target 63374; HLA-B*15:03; PKHD1; ENSG00000170927; TAA
HALDTVLAL

SEQ ID NO: 63375 - protein, 9 aa, Homo sapiens
  Table A; Target 63375; HLA-B*35:01; PKHD1; ENSG00000170927; TAA
HALDTVLAL

SEQ ID NO: 63376 - protein, 9 aa, Homo sapiens
  Table A; Target 63376; HLA-B*35:03; PKHD1; ENSG00000170927; TAA
HALDTVLAL

SEQ ID NO: 63377 - protein, 9 aa, Homo sapiens
  Table A; Target 63377; HLA-B*39:01; PKHD1; ENSG00000170927; TAA
HALDTVLAL

SEQ ID NO: 63378 - protein, 9 aa, Homo sapiens
  Table A; Target 63378; HLA-B*46:01; PKHD1; ENSG00000170927; TAA
HALDTVLAL

SEQ ID NO: 63379 - protein, 9 aa, Homo sapiens
  Table A; Target 63379; HLA-B*51:01; PKHD1; ENSG00000170927; TAA
HALDTVLAL

SEQ ID NO: 63380 - protein, 9 aa, Homo sapiens
  Table A; Target 63380; HLA-B*58:01; PKHD1; ENSG00000170927; TAA
HALDTVLAL

SEQ ID NO: 63381 - protein, 9 aa, Homo sapiens
  Table A; Target 63381; HLA-C*01:02; PKHD1; ENSG00000170927; TAA
HALDTVLAL

SEQ ID NO: 63382 - protein, 9 aa, Homo sapiens
  Table A; Target 63382; HLA-C*02:02; PKHD1; ENSG00000170927; TAA
HALDTVLAL

SEQ ID NO: 63383 - protein, 9 aa, Homo sapiens
  Table A; Target 63383; HLA-C*03:03; PKHD1; ENSG00000170927; TAA
HALDTVLAL

SEQ ID NO: 63384 - protein, 9 aa, Homo sapiens
  Table A; Target 63384; HLA-C*03:04; PKHD1; ENSG00000170927; TAA
HALDTVLAL

SEQ ID NO: 63385 - protein, 9 aa, Homo sapiens
  Table A; Target 63385; HLA-C*05:01; PKHD1; ENSG00000170927; TAA
HALDTVLAL

SEQ ID NO: 63386 - protein, 9 aa, Homo sapiens
  Table A; Target 63386; HLA-C*07:04; PKHD1; ENSG00000170927; TAA
HALDTVLAL

SEQ ID NO: 63387 - protein, 9 aa, Homo sapiens
  Table A; Target 63387; HLA-C*07:06; PKHD1; ENSG00000170927; TAA
HALDTVLAL

SEQ ID NO: 63388 - protein, 9 aa, Homo sapiens
  Table A; Target 63388; HLA-C*12:03; PKHD1; ENSG00000170927; TAA
HALDTVLAL

SEQ ID NO: 63389 - protein, 9 aa, Homo sapiens
  Table A; Target 63389; HLA-C*16:02; PKHD1; ENSG00000170927; TAA
HALDTVLAL

SEQ ID NO: 63390 - protein, 9 aa, Homo sapiens
  Table A; Target 63390; HLA-C*16:04; PKHD1; ENSG00000170927; TAA
HALDTVLAL

SEQ ID NO: 63391 - protein, 8 aa, Homo sapiens
  Table A; Target 63391; HLA-A*30:01; PKHD1; ENSG00000170927; TAA
HEAEVLTV

SEQ ID NO: 63392 - protein, 8 aa, Homo sapiens
  Table A; Target 63392; HLA-B*18:01; PKHD1; ENSG00000170927; TAA
HEAEVLTV

SEQ ID NO: 63393 - protein, 8 aa, Homo sapiens
  Table A; Target 63393; HLA-B*49:01; PKHD1; ENSG00000170927; TAA
HEAEVLTV

SEQ ID NO: 63394 - protein, 8 aa, Homo sapiens
  Table A; Target 63394; HLA-B*49:01; PKHD1; ENSG00000170927; TAA
HELQSPHV

SEQ ID NO: 63395 - protein, 9 aa, Homo sapiens
  Table A; Target 63395; HLA-A*30:01; PKHD1; ENSG00000170927; TAA
HELQSPHVF

SEQ ID NO: 63396 - protein, 9 aa, Homo sapiens
  Table A; Target 63396; HLA-B*18:01; PKHD1; ENSG00000170927; TAA
HELQSPHVF

SEQ ID NO: 63397 - protein, 9 aa, Homo sapiens
  Table A; Target 63397; HLA-B*37:01; PKHD1; ENSG00000170927; TAA
HELQSPHVF

SEQ ID NO: 63398 - protein, 9 aa, Homo sapiens
  Table A; Target 63398; HLA-B*40:01; PKHD1; ENSG00000170927; TAA
HELQSPHVF

SEQ ID NO: 63399 - protein, 9 aa, Homo sapiens
  Table A; Target 63399; HLA-B*44:02; PKHD1; ENSG00000170927; TAA
HELQSPHVF

SEQ ID NO: 63400 - protein, 9 aa, Homo sapiens
  Table A; Target 63400; HLA-B*44:03; PKHD1; ENSG00000170927; TAA
HELQSPHVF

SEQ ID NO: 63401 - protein, 10 aa, Homo sapiens
  Table A; Target 63401; HLA-A*30:01; PKHD1; ENSG00000170927; TAA
HEMPGHEETL

SEQ ID NO: 63402 - protein, 10 aa, Homo sapiens
  Table A; Target 63402; HLA-B*18:01; PKHD1; ENSG00000170927; TAA
HEMPGHEETL

SEQ ID NO: 63403 - protein, 10 aa, Homo sapiens
  Table A; Target 63403; HLA-B*37:01; PKHD1; ENSG00000170927; TAA
HEMPGHEETL

SEQ ID NO: 63404 - protein, 10 aa, Homo sapiens
  Table A; Target 63404; HLA-B*38:01; PKHD1; ENSG00000170927; TAA
HEMPGHEETL

SEQ ID NO: 63405 - protein, 10 aa, Homo sapiens
  Table A; Target 63405; HLA-B*39:01; PKHD1; ENSG00000170927; TAA
HEMPGHEETL

SEQ ID NO: 63406 - protein, 10 aa, Homo sapiens
  Table A; Target 63406; HLA-B*40:01; PKHD1; ENSG00000170927; TAA
HEMPGHEETL

SEQ ID NO: 63407 - protein, 10 aa, Homo sapiens
  Table A; Target 63407; HLA-B*40:02; PKHD1; ENSG00000170927; TAA
HEMPGHEETL

SEQ ID NO: 63408 - protein, 10 aa, Homo sapiens
  Table A; Target 63408; HLA-B*44:02; PKHD1; ENSG00000170927; TAA
HEMPGHEETL

SEQ ID NO: 63409 - protein, 10 aa, Homo sapiens
  Table A; Target 63409; HLA-B*44:03; PKHD1; ENSG00000170927; TAA
HEMPGHEETL

SEQ ID NO: 63410 - protein, 10 aa, Homo sapiens
  Table A; Target 63410; HLA-B*49:01; PKHD1; ENSG00000170927; TAA
HEMPGHEETL

SEQ ID NO: 63411 - protein, 10 aa, Homo sapiens
  Table A; Target 63411; HLA-C*02:02; PKHD1; ENSG00000170927; TAA
HEMPGHEETL

SEQ ID NO: 63412 - protein, 10 aa, Homo sapiens
  Table A; Target 63412; HLA-C*16:04; PKHD1; ENSG00000170927; TAA
HEMPGHEETL

SEQ ID NO: 63413 - protein, 8 aa, Homo sapiens
  Table A; Target 63413; HLA-B*08:01; PKHD1; ENSG00000170927; TAA
HFAHKGSL

SEQ ID NO: 63414 - protein, 8 aa, Homo sapiens
  Table A; Target 63414; HLA-B*51:01; PKHD1; ENSG00000170927; TAA
HGGSLLTI

SEQ ID NO: 63415 - protein, 10 aa, Homo sapiens
  Table A; Target 63415; HLA-A*25:01; PKHD1; ENSG00000170927; TAA
HGIDLEGQAY

SEQ ID NO: 63416 - protein, 10 aa, Homo sapiens
  Table A; Target 63416; HLA-A*26:01; PKHD1; ENSG00000170927; TAA
HGIDLEGQAY

SEQ ID NO: 63417 - protein, 10 aa, Homo sapiens
  Table A; Target 63417; HLA-A*30:02; PKHD1; ENSG00000170927; TAA
HGIDLEGQAY

SEQ ID NO: 63418 - protein, 10 aa, Homo sapiens
  Table A; Target 63418; HLA-B*15:01; PKHD1; ENSG00000170927; TAA
HGIDLEGQAY

SEQ ID NO: 63419 - protein, 10 aa, Homo sapiens
  Table A; Target 63419; HLA-B*15:03; PKHD1; ENSG00000170927; TAA
HGIDLEGQAY

SEQ ID NO: 63420 - protein, 10 aa, Homo sapiens
  Table A; Target 63420; HLA-B*18:01; PKHD1; ENSG00000170927; TAA
HGIDLEGQAY

SEQ ID NO: 63421 - protein, 10 aa, Homo sapiens
  Table A; Target 63421; HLA-B*35:01; PKHD1; ENSG00000170927; TAA
HGIDLEGQAY

SEQ ID NO: 63422 - protein, 10 aa, Homo sapiens
  Table A; Target 63422; HLA-B*35:03; PKHD1; ENSG00000170927; TAA
HGIDLEGQAY

SEQ ID NO: 63423 - protein, 10 aa, Homo sapiens
  Table A; Target 63423; HLA-B*39:01; PKHD1; ENSG00000170927; TAA
HGIDLEGQAY

SEQ ID NO: 63424 - protein, 10 aa, Homo sapiens
  Table A; Target 63424; HLA-B*46:01; PKHD1; ENSG00000170927; TAA
HGIDLEGQAY

SEQ ID NO: 63425 - protein, 10 aa, Homo sapiens
  Table A; Target 63425; HLA-B*55:01; PKHD1; ENSG00000170927; TAA
HGIDLEGQAY

SEQ ID NO: 63426 - protein, 10 aa, Homo sapiens
  Table A; Target 63426; HLA-C*02:02; PKHD1; ENSG00000170927; TAA
HGIDLEGQAY

SEQ ID NO: 63427 - protein, 10 aa, Homo sapiens
  Table A; Target 63427; HLA-C*03:03; PKHD1; ENSG00000170927; TAA
HGIDLEGQAY

SEQ ID NO: 63428 - protein, 10 aa, Homo sapiens
  Table A; Target 63428; HLA-C*07:04; PKHD1; ENSG00000170927; TAA
HGIDLEGQAY

SEQ ID NO: 63429 - protein, 10 aa, Homo sapiens
  Table A; Target 63429; HLA-C*14:02; PKHD1; ENSG00000170927; TAA
HGIDLEGQAY

SEQ ID NO: 63430 - protein, 10 aa, Homo sapiens
  Table A; Target 63430; HLA-C*16:04; PKHD1; ENSG00000170927; TAA
HGIDLEGQAY

SEQ ID NO: 63431 - protein, 10 aa, Homo sapiens
  Table A; Target 63431; HLA-C*07:06; PKHD1; ENSG00000170927; TAA
HGNVVAGSER

SEQ ID NO: 63432 - protein, 9 aa, Homo sapiens
  Table A; Target 63432; HLA-A*01:01; PKHD1; ENSG00000170927; TAA
HIDPGTIGV

SEQ ID NO: 63433 - protein, 9 aa, Homo sapiens
  Table A; Target 63433; HLA-A*02:01; PKHD1; ENSG00000170927; TAA
HIDPGTIGV

SEQ ID NO: 63434 - protein, 9 aa, Homo sapiens
  Table A; Target 63434; HLA-A*02:07; PKHD1; ENSG00000170927; TAA
HIDPGTIGV

SEQ ID NO: 63435 - protein, 9 aa, Homo sapiens
  Table A; Target 63435; HLA-B*55:01; PKHD1; ENSG00000170927; TAA
HIDPGTIGV

SEQ ID NO: 63436 - protein, 9 aa, Homo sapiens
  Table A; Target 63436; HLA-C*05:01; PKHD1; ENSG00000170927; TAA
HIDPGTIGV

SEQ ID NO: 63437 - protein, 10 aa, Homo sapiens
  Table A; Target 63437; HLA-A*01:01; PKHD1; ENSG00000170927; TAA
HIDPGTIGVY

SEQ ID NO: 63438 - protein, 10 aa, Homo sapiens
  Table A; Target 63438; HLA-A*25:01; PKHD1; ENSG00000170927; TAA
HIDPGTIGVY

SEQ ID NO: 63439 - protein, 10 aa, Homo sapiens
  Table A; Target 63439; HLA-A*26:01; PKHD1; ENSG00000170927; TAA
HIDPGTIGVY

SEQ ID NO: 63440 - protein, 10 aa, Homo sapiens
  Table A; Target 63440; HLA-A*30:02; PKHD1; ENSG00000170927; TAA
HIDPGTIGVY

SEQ ID NO: 63441 - protein, 10 aa, Homo sapiens
  Table A; Target 63441; HLA-B*15:01; PKHD1; ENSG00000170927; TAA
HIDPGTIGVY

SEQ ID NO: 63442 - protein, 10 aa, Homo sapiens
  Table A; Target 63442; HLA-B*35:01; PKHD1; ENSG00000170927; TAA
HIDPGTIGVY

SEQ ID NO: 63443 - protein, 10 aa, Homo sapiens
  Table A; Target 63443; HLA-C*07:04; PKHD1; ENSG00000170927; TAA
HIDPGTIGVY

SEQ ID NO: 63444 - protein, 9 aa, Homo sapiens
  Table A; Target 63444; HLA-A*03:01; PKHD1; ENSG00000170927; TAA
HIGVIGYNK

SEQ ID NO: 63445 - protein, 9 aa, Homo sapiens
  Table A; Target 63445; HLA-A*03:02; PKHD1; ENSG00000170927; TAA
HIGVIGYNK

SEQ ID NO: 63446 - protein, 9 aa, Homo sapiens
  Table A; Target 63446; HLA-B*35:03; PKHD1; ENSG00000170927; TAA
HILASMETL

SEQ ID NO: 63447 - protein, 9 aa, Homo sapiens
  Table A; Target 63447; HLA-C*03:04; PKHD1; ENSG00000170927; TAA
HILASMETL

SEQ ID NO: 63448 - protein, 9 aa, Homo sapiens
  Table A; Target 63448; HLA-B*08:01; PKHD1; ENSG00000170927; TAA
HILKATVAL

SEQ ID NO: 63449 - protein, 9 aa, Homo sapiens
  Table A; Target 63449; HLA-B*13:02; PKHD1; ENSG00000170927; TAA
HLVNVNMVV

SEQ ID NO: 63450 - protein, 9 aa, Homo sapiens
  Table A; Target 63450; HLA-B*35:01; PKHD1; ENSG00000170927; TAA
HPETIQEQL

SEQ ID NO: 63451 - protein, 9 aa, Homo sapiens
  Table A; Target 63451; HLA-B*35:03; PKHD1; ENSG00000170927; TAA
HPETIQEQL

SEQ ID NO: 63452 - protein, 10 aa, Homo sapiens
  Table A; Target 63452; HLA-A*68:01; PKHD1; ENSG00000170927; TAA
HSANLTSTDR

SEQ ID NO: 63453 - protein, 10 aa, Homo sapiens
  Table A; Target 63453; HLA-C*07:06; PKHD1; ENSG00000170927; TAA
HSANLTSTDR

SEQ ID NO: 63454 - protein, 9 aa, Homo sapiens
  Table A; Target 63454; HLA-A*25:01; PKHD1; ENSG00000170927; TAA
HSISGIMKL

SEQ ID NO: 63455 - protein, 9 aa, Homo sapiens
  Table A; Target 63455; HLA-C*02:02; PKHD1; ENSG00000170927; TAA
HSISGIMKL

SEQ ID NO: 63456 - protein, 9 aa, Homo sapiens
  Table A; Target 63456; HLA-C*03:03; PKHD1; ENSG00000170927; TAA
HSISGIMKL

SEQ ID NO: 63457 - protein, 9 aa, Homo sapiens
  Table A; Target 63457; HLA-C*03:04; PKHD1; ENSG00000170927; TAA
HSISGIMKL

SEQ ID NO: 63458 - protein, 9 aa, Homo sapiens
  Table A; Target 63458; HLA-B*13:02; PKHD1; ENSG00000170927; TAA
HSQGVDLHI

SEQ ID NO: 63459 - protein, 11 aa, Homo sapiens
  Table A; Target 63459; HLA-A*30:02; PKHD1; ENSG00000170927; TAA
HSQGVDLHIQY

SEQ ID NO: 63460 - protein, 10 aa, Homo sapiens
  Table A; Target 63460; HLA-A*01:01; PKHD1; ENSG00000170927; TAA
HSSLHGLHLY

SEQ ID NO: 63461 - protein, 9 aa, Homo sapiens
  Table A; Target 63461; HLA-A*23:01; PKHD1; ENSG00000170927; TAA
HYFPKNFSL

SEQ ID NO: 63462 - protein, 9 aa, Homo sapiens
  Table A; Target 63462; HLA-A*24:02; PKHD1; ENSG00000170927; TAA
HYFPKNFSL

SEQ ID NO: 63463 - protein, 9 aa, Homo sapiens
  Table A; Target 63463; HLA-A*33:01; PKHD1; ENSG00000170927; TAA
HYLSVFYTR

SEQ ID NO: 63464 - protein, 9 aa, Homo sapiens
  Table A; Target 63464; HLA-A*33:03; PKHD1; ENSG00000170927; TAA
HYLSVFYTR

SEQ ID NO: 63465 - protein, 8 aa, Homo sapiens
  Table A; Target 63465; HLA-C*05:01; PKHD1; ENSG00000170927; TAA
IADTNVTV

SEQ ID NO: 63466 - protein, 9 aa, Homo sapiens
  Table A; Target 63466; HLA-C*16:01; PKHD1; ENSG00000170927; TAA
IASGNERII

SEQ ID NO: 63467 - protein, 9 aa, Homo sapiens
  Table A; Target 63467; HLA-C*16:02; PKHD1; ENSG00000170927; TAA
IASGNERII

SEQ ID NO: 63468 - protein, 8 aa, Homo sapiens
  Table A; Target 63468; HLA-B*18:01; PKHD1; ENSG00000170927; TAA
IDLEGQAY

SEQ ID NO: 63469 - protein, 8 aa, Homo sapiens
  Table A; Target 63469; HLA-C*14:02; PKHD1; ENSG00000170927; TAA
IDLEGQAY

SEQ ID NO: 63470 - protein, 9 aa, Homo sapiens
  Table A; Target 63470; HLA-A*30:01; PKHD1; ENSG00000170927; TAA
IEIGDSPTV

SEQ ID NO: 63471 - protein, 9 aa, Homo sapiens
  Table A; Target 63471; HLA-B*40:01; PKHD1; ENSG00000170927; TAA
IEIGDSPTV

SEQ ID NO: 63472 - protein, 9 aa, Homo sapiens
  Table A; Target 63472; HLA-B*40:02; PKHD1; ENSG00000170927; TAA
IEIGDSPTV

SEQ ID NO: 63473 - protein, 9 aa, Homo sapiens
  Table A; Target 63473; HLA-B*49:01; PKHD1; ENSG00000170927; TAA
IEIGDSPTV

SEQ ID NO: 63474 - protein, 9 aa, Homo sapiens
  Table A; Target 63474; HLA-C*03:04; PKHD1; ENSG00000170927; TAA
IEIGDSPTV

SEQ ID NO: 63475 - protein, 9 aa, Homo sapiens
  Table A; Target 63475; HLA-A*30:01; PKHD1; ENSG00000170927; TAA
IEIRSGVSI

SEQ ID NO: 63476 - protein, 9 aa, Homo sapiens
  Table A; Target 63476; HLA-B*40:01; PKHD1; ENSG00000170927; TAA
IEIRSGVSI

SEQ ID NO: 63477 - protein, 9 aa, Homo sapiens
  Table A; Target 63477; HLA-B*49:01; PKHD1; ENSG00000170927; TAA
IEIRSGVSI

SEQ ID NO: 63478 - protein, 8 aa, Homo sapiens
  Table A; Target 63478; HLA-B*18:01; PKHD1; ENSG00000170927; TAA
IEVLLLAV

SEQ ID NO: 63479 - protein, 8 aa, Homo sapiens
  Table A; Target 63479; HLA-B*49:01; PKHD1; ENSG00000170927; TAA
IEVLLLAV

SEQ ID NO: 63480 - protein, 11 aa, Homo sapiens
  Table A; Target 63480; HLA-A*29:02; PKHD1; ENSG00000170927; TAA
IFDGLELGVLY

SEQ ID NO: 63481 - protein, 10 aa, Homo sapiens
  Table A; Target 63481; HLA-A*23:01; PKHD1; ENSG00000170927; TAA
IFMAPGPIEL

SEQ ID NO: 63482 - protein, 10 aa, Homo sapiens
  Table A; Target 63482; HLA-C*14:02; PKHD1; ENSG00000170927; TAA
IFMAPGPIEL

SEQ ID NO: 63483 - protein, 9 aa, Homo sapiens
  Table A; Target 63483; HLA-C*14:02; PKHD1; ENSG00000170927; TAA
IFPSQGSAC

SEQ ID NO: 63484 - protein, 9 aa, Homo sapiens
  Table A; Target 63484; HLA-C*14:02; PKHD1; ENSG00000170927; TAA
IFSNQTNVV

SEQ ID NO: 63485 - protein, 9 aa, Homo sapiens
  Table A; Target 63485; HLA-C*02:02; PKHD1; ENSG00000170927; TAA
IGANYFNIM

SEQ ID NO: 63486 - protein, 8 aa, Homo sapiens
  Table A; Target 63486; HLA-C*05:01; PKHD1; ENSG00000170927; TAA
IGDLPNFI

SEQ ID NO: 63487 - protein, 9 aa, Homo sapiens
  Table A; Target 63487; HLA-C*03:04; PKHD1; ENSG00000170927; TAA
IGFSRDPAL

SEQ ID NO: 63488 - protein, 9 aa, Homo sapiens
  Table A; Target 63488; HLA-B*57:01; PKHD1; ENSG00000170927; TAA
IGVQIHNTW

SEQ ID NO: 63489 - protein, 9 aa, Homo sapiens
  Table A; Target 63489; HLA-B*58:01; PKHD1; ENSG00000170927; TAA
IGVQIHNTW

SEQ ID NO: 63490 - protein, 9 aa, Homo sapiens
  Table A; Target 63490; HLA-A*23:01; PKHD1; ENSG00000170927; TAA
IGYGNTSSF

SEQ ID NO: 63491 - protein, 9 aa, Homo sapiens
  Table A; Target 63491; HLA-A*25:01; PKHD1; ENSG00000170927; TAA
IGYGNTSSF

SEQ ID NO: 63492 - protein, 9 aa, Homo sapiens
  Table A; Target 63492; HLA-A*32:01; PKHD1; ENSG00000170927; TAA
IGYGNTSSF

SEQ ID NO: 63493 - protein, 9 aa, Homo sapiens
  Table A; Target 63493; HLA-B*15:01; PKHD1; ENSG00000170927; TAA
IGYGNTSSF

SEQ ID NO: 63494 - protein, 9 aa, Homo sapiens
  Table A; Target 63494; HLA-B*15:03; PKHD1; ENSG00000170927; TAA
IGYGNTSSF

SEQ ID NO: 63495 - protein, 9 aa, Homo sapiens
  Table A; Target 63495; HLA-B*46:01; PKHD1; ENSG00000170927; TAA
IGYGNTSSF

SEQ ID NO: 63496 - protein, 9 aa, Homo sapiens
  Table A; Target 63496; HLA-B*58:01; PKHD1; ENSG00000170927; TAA
IGYGNTSSF

SEQ ID NO: 63497 - protein, 9 aa, Homo sapiens
  Table A; Target 63497; HLA-C*01:02; PKHD1; ENSG00000170927; TAA
IGYGNTSSF

SEQ ID NO: 63498 - protein, 9 aa, Homo sapiens
  Table A; Target 63498; HLA-C*02:02; PKHD1; ENSG00000170927; TAA
IGYGNTSSF

SEQ ID NO: 63499 - protein, 9 aa, Homo sapiens
  Table A; Target 63499; HLA-C*03:03; PKHD1; ENSG00000170927; TAA
IGYGNTSSF

SEQ ID NO: 63500 - protein, 9 aa, Homo sapiens
  Table A; Target 63500; HLA-C*03:04; PKHD1; ENSG00000170927; TAA
IGYGNTSSF

SEQ ID NO: 63501 - protein, 9 aa, Homo sapiens
  Table A; Target 63501; HLA-C*05:01; PKHD1; ENSG00000170927; TAA
IGYGNTSSF

SEQ ID NO: 63502 - protein, 9 aa, Homo sapiens
  Table A; Target 63502; HLA-C*12:03; PKHD1; ENSG00000170927; TAA
IGYGNTSSF

SEQ ID NO: 63503 - protein, 9 aa, Homo sapiens
  Table A; Target 63503; HLA-C*14:02; PKHD1; ENSG00000170927; TAA
IGYGNTSSF

SEQ ID NO: 63504 - protein, 9 aa, Homo sapiens
  Table A; Target 63504; HLA-C*16:01; PKHD1; ENSG00000170927; TAA
IGYGNTSSF

SEQ ID NO: 63505 - protein, 9 aa, Homo sapiens
  Table A; Target 63505; HLA-C*16:04; PKHD1; ENSG00000170927; TAA
IGYGNTSSF

SEQ ID NO: 63506 - protein, 10 aa, Homo sapiens
  Table A; Target 63506; HLA-A*03:01; PKHD1; ENSG00000170927; TAA
IGYGNTSSFK

SEQ ID NO: 63507 - protein, 11 aa, Homo sapiens
  Table A; Target 63507; HLA-B*38:01; PKHD1; ENSG00000170927; TAA
IHAAASHGVLL

SEQ ID NO: 63508 - protein, 11 aa, Homo sapiens
  Table A; Target 63508; HLA-B*38:01; PKHD1; ENSG00000170927; TAA
IHEMPGHEETL

SEQ ID NO: 63509 - protein, 10 aa, Homo sapiens
  Table A; Target 63509; HLA-B*38:01; PKHD1; ENSG00000170927; TAA
IHIDPGTIGV

SEQ ID NO: 63510 - protein, 10 aa, Homo sapiens
  Table A; Target 63510; HLA-B*39:01; PKHD1; ENSG00000170927; TAA
IHIDPGTIGV

SEQ ID NO: 63511 - protein, 11 aa, Homo sapiens
  Table A; Target 63511; HLA-A*29:02; PKHD1; ENSG00000170927; TAA
IHIDPGTIGVY

SEQ ID NO: 63512 - protein, 11 aa, Homo sapiens
  Table A; Target 63512; HLA-A*30:02; PKHD1; ENSG00000170927; TAA
IHIDPGTIGVY

SEQ ID NO: 63513 - protein, 11 aa, Homo sapiens
  Table A; Target 63513; HLA-B*15:03; PKHD1; ENSG00000170927; TAA
IHIDPGTIGVY

SEQ ID NO: 63514 - protein, 11 aa, Homo sapiens
  Table A; Target 63514; HLA-B*39:01; PKHD1; ENSG00000170927; TAA
IHIDPGTIGVY

SEQ ID NO: 63515 - protein, 10 aa, Homo sapiens
  Table A; Target 63515; HLA-B*38:01; PKHD1; ENSG00000170927; TAA
IHSQGVDLHI

SEQ ID NO: 63516 - protein, 9 aa, Homo sapiens
  Table A; Target 63516; HLA-A*02:01; PKHD1; ENSG00000170927; TAA
IIADTNVTV

SEQ ID NO: 63517 - protein, 9 aa, Homo sapiens
  Table A; Target 63517; HLA-A*02:03; PKHD1; ENSG00000170927; TAA
IIADTNVTV

SEQ ID NO: 63518 - protein, 9 aa, Homo sapiens
  Table A; Target 63518; HLA-A*02:04; PKHD1; ENSG00000170927; TAA
IIADTNVTV

SEQ ID NO: 63519 - protein, 9 aa, Homo sapiens
  Table A; Target 63519; HLA-A*02:07; PKHD1; ENSG00000170927; TAA
IIADTNVTV

SEQ ID NO: 63520 - protein, 9 aa, Homo sapiens
  Table A; Target 63520; HLA-B*13:02; PKHD1; ENSG00000170927; TAA
IIADTNVTV

SEQ ID NO: 63521 - protein, 9 aa, Homo sapiens
  Table A; Target 63521; HLA-B*46:01; PKHD1; ENSG00000170927; TAA
IIADTNVTV

SEQ ID NO: 63522 - protein, 9 aa, Homo sapiens
  Table A; Target 63522; HLA-B*55:01; PKHD1; ENSG00000170927; TAA
IIADTNVTV

SEQ ID NO: 63523 - protein, 9 aa, Homo sapiens
  Table A; Target 63523; HLA-C*02:02; PKHD1; ENSG00000170927; TAA
IIADTNVTV

SEQ ID NO: 63524 - protein, 9 aa, Homo sapiens
  Table A; Target 63524; HLA-C*05:01; PKHD1; ENSG00000170927; TAA
IIADTNVTV

SEQ ID NO: 63525 - protein, 9 aa, Homo sapiens
  Table A; Target 63525; HLA-A*23:01; PKHD1; ENSG00000170927; TAA
IITAVTENF

SEQ ID NO: 63526 - protein, 9 aa, Homo sapiens
  Table A; Target 63526; HLA-A*24:02; PKHD1; ENSG00000170927; TAA
IITAVTENF

SEQ ID NO: 63527 - protein, 9 aa, Homo sapiens
  Table A; Target 63527; HLA-A*32:01; PKHD1; ENSG00000170927; TAA
IITAVTENF

SEQ ID NO: 63528 - protein, 9 aa, Homo sapiens
  Table A; Target 63528; HLA-B*15:01; PKHD1; ENSG00000170927; TAA
IITAVTENF

SEQ ID NO: 63529 - protein, 9 aa, Homo sapiens
  Table A; Target 63529; HLA-B*15:03; PKHD1; ENSG00000170927; TAA
IITAVTENF

SEQ ID NO: 63530 - protein, 9 aa, Homo sapiens
  Table A; Target 63530; HLA-B*46:01; PKHD1; ENSG00000170927; TAA
IITAVTENF

SEQ ID NO: 63531 - protein, 9 aa, Homo sapiens
  Table A; Target 63531; HLA-B*58:01; PKHD1; ENSG00000170927; TAA
IITAVTENF

SEQ ID NO: 63532 - protein, 9 aa, Homo sapiens
  Table A; Target 63532; HLA-C*05:01; PKHD1; ENSG00000170927; TAA
IITAVTENF

SEQ ID NO: 63533 - protein, 9 aa, Homo sapiens
  Table A; Target 63533; HLA-C*14:02; PKHD1; ENSG00000170927; TAA
IITAVTENF

SEQ ID NO: 63534 - protein, 9 aa, Homo sapiens
  Table A; Target 63534; HLA-A*32:01; PKHD1; ENSG00000170927; TAA
IITGRLETF

SEQ ID NO: 63535 - protein, 9 aa, Homo sapiens
  Table A; Target 63535; HLA-B*46:01; PKHD1; ENSG00000170927; TAA
IITGRLETF

SEQ ID NO: 63536 - protein, 9 aa, Homo sapiens
  Table A; Target 63536; HLA-C*16:01; PKHD1; ENSG00000170927; TAA
IITGRLETF

SEQ ID NO: 63537 - protein, 9 aa, Homo sapiens
  Table A; Target 63537; HLA-B*58:01; PKHD1; ENSG00000170927; TAA
IIVEDAVDW

SEQ ID NO: 63538 - protein, 9 aa, Homo sapiens
  Table A; Target 63538; HLA-A*02:01; PKHD1; ENSG00000170927; TAA
ILAASLSSV

SEQ ID NO: 63539 - protein, 9 aa, Homo sapiens
  Table A; Target 63539; HLA-A*02:03; PKHD1; ENSG00000170927; TAA
ILAASLSSV

SEQ ID NO: 63540 - protein, 9 aa, Homo sapiens
  Table A; Target 63540; HLA-B*13:02; PKHD1; ENSG00000170927; TAA
ILAASLSSV

SEQ ID NO: 63541 - protein, 9 aa, Homo sapiens
  Table A; Target 63541; HLA-B*46:01; PKHD1; ENSG00000170927; TAA
ILAASLSSV

SEQ ID NO: 63542 - protein, 9 aa, Homo sapiens
  Table A; Target 63542; HLA-B*55:01; PKHD1; ENSG00000170927; TAA
ILAASLSSV

SEQ ID NO: 63543 - protein, 9 aa, Homo sapiens
  Table A; Target 63543; HLA-C*14:02; PKHD1; ENSG00000170927; TAA
ILAASLSSV

SEQ ID NO: 63544 - protein, 11 aa, Homo sapiens
  Table A; Target 63544; HLA-A*02:07; PKHD1; ENSG00000170927; TAA
ILDSADAIWAI

SEQ ID NO: 63545 - protein, 9 aa, Homo sapiens
  Table A; Target 63545; HLA-C*05:01; PKHD1; ENSG00000170927; TAA
ILEDLDGSL

SEQ ID NO: 63546 - protein, 8 aa, Homo sapiens
  Table A; Target 63546; HLA-B*08:01; PKHD1; ENSG00000170927; TAA
ILKATVAL

SEQ ID NO: 63547 - protein, 9 aa, Homo sapiens
  Table A; Target 63547; HLA-A*02:03; PKHD1; ENSG00000170927; TAA
ILKATVALL

SEQ ID NO: 63548 - protein, 10 aa, Homo sapiens
  Table A; Target 63548; HLA-A*02:03; PKHD1; ENSG00000170927; TAA
ILMLVRPSGL

SEQ ID NO: 63549 - protein, 9 aa, Homo sapiens
  Table A; Target 63549; HLA-A*02:07; PKHD1; ENSG00000170927; TAA
ILPNRTVLV

SEQ ID NO: 63550 - protein, 9 aa, Homo sapiens
  Table A; Target 63550; HLA-B*15:01; PKHD1; ENSG00000170927; TAA
ILSISGIGF

SEQ ID NO: 63551 - protein, 9 aa, Homo sapiens
  Table A; Target 63551; HLA-B*15:03; PKHD1; ENSG00000170927; TAA
ILSISGIGF

SEQ ID NO: 63552 - protein, 9 aa, Homo sapiens
  Table A; Target 63552; HLA-B*37:01; PKHD1; ENSG00000170927; TAA
ILSISGIGF

SEQ ID NO: 63553 - protein, 9 aa, Homo sapiens
  Table A; Target 63553; HLA-A*02:01; PKHD1; ENSG00000170927; TAA
ILTFAVAQI

SEQ ID NO: 63554 - protein, 9 aa, Homo sapiens
  Table A; Target 63554; HLA-A*02:03; PKHD1; ENSG00000170927; TAA
ILTFAVAQI

SEQ ID NO: 63555 - protein, 9 aa, Homo sapiens
  Table A; Target 63555; HLA-A*02:04; PKHD1; ENSG00000170927; TAA
ILTFAVAQI

SEQ ID NO: 63556 - protein, 9 aa, Homo sapiens
  Table A; Target 63556; HLA-B*13:02; PKHD1; ENSG00000170927; TAA
ILTFAVAQI

SEQ ID NO: 63557 - protein, 9 aa, Homo sapiens
  Table A; Target 63557; HLA-B*15:01; PKHD1; ENSG00000170927; TAA
ILVSDGGEL

SEQ ID NO: 63558 - protein, 9 aa, Homo sapiens
  Table A; Target 63558; HLA-C*03:03; PKHD1; ENSG00000170927; TAA
ILVSDGGEL

SEQ ID NO: 63559 - protein, 9 aa, Homo sapiens
  Table A; Target 63559; HLA-C*03:04; PKHD1; ENSG00000170927; TAA
ILVSDGGEL

SEQ ID NO: 63560 - protein, 9 aa, Homo sapiens
  Table A; Target 63560; HLA-A*02:07; PKHD1; ENSG00000170927; TAA
IMDNLLYVV

SEQ ID NO: 63561 - protein, 10 aa, Homo sapiens
  Table A; Target 63561; HLA-A*02:07; PKHD1; ENSG00000170927; TAA
IMDNLLYVVL

SEQ ID NO: 63562 - protein, 9 aa, Homo sapiens
  Table A; Target 63562; HLA-A*31:01; PKHD1; ENSG00000170927; TAA
IMHPITAER

SEQ ID NO: 63563 - protein, 9 aa, Homo sapiens
  Table A; Target 63563; HLA-A*33:01; PKHD1; ENSG00000170927; TAA
IMHPITAER

SEQ ID NO: 63564 - protein, 9 aa, Homo sapiens
  Table A; Target 63564; HLA-A*33:03; PKHD1; ENSG00000170927; TAA
IMHPITAER

SEQ ID NO: 63565 - protein, 9 aa, Homo sapiens
  Table A; Target 63565; HLA-B*46:01; PKHD1; ENSG00000170927; TAA
IMHPITAER

SEQ ID NO: 63566 - protein, 9 aa, Homo sapiens
  Table A; Target 63566; HLA-A*23:01; PKHD1; ENSG00000170927; TAA
IMKLQDVTF

SEQ ID NO: 63567 - protein, 9 aa, Homo sapiens
  Table A; Target 63567; HLA-B*15:01; PKHD1; ENSG00000170927; TAA
IMKLQDVTF

SEQ ID NO: 63568 - protein, 9 aa, Homo sapiens
  Table A; Target 63568; HLA-B*46:01; PKHD1; ENSG00000170927; TAA
IMKLQDVTF

SEQ ID NO: 63569 - protein, 9 aa, Homo sapiens
  Table A; Target 63569; HLA-A*02:07; PKHD1; ENSG00000170927; TAA
IMPQVFHYF

SEQ ID NO: 63570 - protein, 9 aa, Homo sapiens
  Table A; Target 63570; HLA-A*24:02; PKHD1; ENSG00000170927; TAA
IMPQVFHYF

SEQ ID NO: 63571 - protein, 9 aa, Homo sapiens
  Table A; Target 63571; HLA-B*07:02; PKHD1; ENSG00000170927; TAA
IPANATAHL

SEQ ID NO: 63572 - protein, 9 aa, Homo sapiens
  Table A; Target 63572; HLA-B*35:03; PKHD1; ENSG00000170927; TAA
IPANATAHL

SEQ ID NO: 63573 - protein, 9 aa, Homo sapiens
  Table A; Target 63573; HLA-C*07:02; PKHD1; ENSG00000170927; TAA
IPANATAHL

SEQ ID NO: 63574 - protein, 9 aa, Homo sapiens
  Table A; Target 63574; HLA-B*35:03; PKHD1; ENSG00000170927; TAA
IPDAGAPTV

SEQ ID NO: 63575 - protein, 9 aa, Homo sapiens
  Table A; Target 63575; HLA-B*51:01; PKHD1; ENSG00000170927; TAA
IPDAGAPTV

SEQ ID NO: 63576 - protein, 9 aa, Homo sapiens
  Table A; Target 63576; HLA-B*56:01; PKHD1; ENSG00000170927; TAA
IPDAGAPTV

SEQ ID NO: 63577 - protein, 9 aa, Homo sapiens
  Table A; Target 63577; HLA-B*35:03; PKHD1; ENSG00000170927; TAA
IPGPGDDVL

SEQ ID NO: 63578 - protein, 8 aa, Homo sapiens
  Table A; Target 63578; HLA-B*54:01; PKHD1; ENSG00000170927; TAA
IPLHSLEA

SEQ ID NO: 63579 - protein, 8 aa, Homo sapiens
  Table A; Target 63579; HLA-B*56:01; PKHD1; ENSG00000170927; TAA
IPLHSLEA

SEQ ID NO: 63580 - protein, 9 aa, Homo sapiens
  Table A; Target 63580; HLA-B*56:01; PKHD1; ENSG00000170927; TAA
IPPTLVQSA

SEQ ID NO: 63581 - protein, 9 aa, Homo sapiens
  Table A; Target 63581; HLA-A*30:01; PKHD1; ENSG00000170927; TAA
IQADSQASL

SEQ ID NO: 63582 - protein, 9 aa, Homo sapiens
  Table A; Target 63582; HLA-A*32:01; PKHD1; ENSG00000170927; TAA
IQADSQASL

SEQ ID NO: 63583 - protein, 9 aa, Homo sapiens
  Table A; Target 63583; HLA-B*15:01; PKHD1; ENSG00000170927; TAA
IQADSQASL

SEQ ID NO: 63584 - protein, 9 aa, Homo sapiens
  Table A; Target 63584; HLA-B*15:03; PKHD1; ENSG00000170927; TAA
IQADSQASL

SEQ ID NO: 63585 - protein, 9 aa, Homo sapiens
  Table A; Target 63585; HLA-B*27:05; PKHD1; ENSG00000170927; TAA
IQADSQASL

SEQ ID NO: 63586 - protein, 9 aa, Homo sapiens
  Table A; Target 63586; HLA-B*38:01; PKHD1; ENSG00000170927; TAA
IQADSQASL

SEQ ID NO: 63587 - protein, 9 aa, Homo sapiens
  Table A; Target 63587; HLA-B*39:01; PKHD1; ENSG00000170927; TAA
IQADSQASL

SEQ ID NO: 63588 - protein, 9 aa, Homo sapiens
  Table A; Target 63588; HLA-B*40:01; PKHD1; ENSG00000170927; TAA
IQADSQASL

SEQ ID NO: 63589 - protein, 9 aa, Homo sapiens
  Table A; Target 63589; HLA-C*03:03; PKHD1; ENSG00000170927; TAA
IQADSQASL

SEQ ID NO: 63590 - protein, 9 aa, Homo sapiens
  Table A; Target 63590; HLA-C*03:04; PKHD1; ENSG00000170927; TAA
IQADSQASL

SEQ ID NO: 63591 - protein, 9 aa, Homo sapiens
  Table A; Target 63591; HLA-C*14:02; PKHD1; ENSG00000170927; TAA
IQADSQASL

SEQ ID NO: 63592 - protein, 11 aa, Homo sapiens
  Table A; Target 63592; HLA-B*38:01; PKHD1; ENSG00000170927; TAA
IQADSQASLHF

SEQ ID NO: 63593 - protein, 9 aa, Homo sapiens
  Table A; Target 63593; HLA-A*29:02; PKHD1; ENSG00000170927; TAA
IQNFGSPLY

SEQ ID NO: 63594 - protein, 9 aa, Homo sapiens
  Table A; Target 63594; HLA-A*30:02; PKHD1; ENSG00000170927; TAA
IQNFGSPLY

SEQ ID NO: 63595 - protein, 9 aa, Homo sapiens
  Table A; Target 63595; HLA-B*15:01; PKHD1; ENSG00000170927; TAA
IQNFGSPLY

SEQ ID NO: 63596 - protein, 9 aa, Homo sapiens
  Table A; Target 63596; HLA-B*15:03; PKHD1; ENSG00000170927; TAA
IQNFGSPLY

SEQ ID NO: 63597 - protein, 9 aa, Homo sapiens
  Table A; Target 63597; HLA-A*23:01; PKHD1; ENSG00000170927; TAA
IQTTIEELL

SEQ ID NO: 63598 - protein, 9 aa, Homo sapiens
  Table A; Target 63598; HLA-B*13:02; PKHD1; ENSG00000170927; TAA
IQTTIEELL

SEQ ID NO: 63599 - protein, 9 aa, Homo sapiens
  Table A; Target 63599; HLA-B*27:05; PKHD1; ENSG00000170927; TAA
IQTTIEELL

SEQ ID NO: 63600 - protein, 9 aa, Homo sapiens
  Table A; Target 63600; HLA-B*38:01; PKHD1; ENSG00000170927; TAA
IQTTIEELL

SEQ ID NO: 63601 - protein, 8 aa, Homo sapiens
  Table A; Target 63601; HLA-B*15:01; PKHD1; ENSG00000170927; TAA
IQYLTEVF

SEQ ID NO: 63602 - protein, 8 aa, Homo sapiens
  Table A; Target 63602; HLA-B*15:03; PKHD1; ENSG00000170927; TAA
IQYLTEVF

SEQ ID NO: 63603 - protein, 9 aa, Homo sapiens
  Table A; Target 63603; HLA-B*27:05; PKHD1; ENSG00000170927; TAA
IRSGVSIHL

SEQ ID NO: 63604 - protein, 10 aa, Homo sapiens
  Table A; Target 63604; HLA-A*01:01; PKHD1; ENSG00000170927; TAA
ISAKQDLFLY

SEQ ID NO: 63605 - protein, 8 aa, Homo sapiens
  Table A; Target 63605; HLA-C*03:04; PKHD1; ENSG00000170927; TAA
ISATGEDL

SEQ ID NO: 63606 - protein, 8 aa, Homo sapiens
  Table A; Target 63606; HLA-C*05:01; PKHD1; ENSG00000170927; TAA
ISDVPVQI

SEQ ID NO: 63607 - protein, 9 aa, Homo sapiens
  Table A; Target 63607; HLA-A*31:01; PKHD1; ENSG00000170927; TAA
ISWEAIHGR

SEQ ID NO: 63608 - protein, 9 aa, Homo sapiens
  Table A; Target 63608; HLA-C*16:01; PKHD1; ENSG00000170927; TAA
ITAERTRML

SEQ ID NO: 63609 - protein, 11 aa, Homo sapiens
  Table A; Target 63609; HLA-A*33:01; PKHD1; ENSG00000170927; TAA
ITIQGNLTNER

SEQ ID NO: 63610 - protein, 11 aa, Homo sapiens
  Table A; Target 63610; HLA-A*33:03; PKHD1; ENSG00000170927; TAA
ITIQGNLTNER

SEQ ID NO: 63611 - protein, 11 aa, Homo sapiens
  Table A; Target 63611; HLA-A*68:01; PKHD1; ENSG00000170927; TAA
ITIQGNLTNER

SEQ ID NO: 63612 - protein, 11 aa, Homo sapiens
  Table A; Target 63612; HLA-C*07:06; PKHD1; ENSG00000170927; TAA
ITIQGNLTNER

SEQ ID NO: 63613 - protein, 8 aa, Homo sapiens
  Table A; Target 63613; HLA-C*14:02; PKHD1; ENSG00000170927; TAA
ITLYGSSY

SEQ ID NO: 63614 - protein, 9 aa, Homo sapiens
  Table A; Target 63614; HLA-B*46:01; PKHD1; ENSG00000170927; TAA
ITMETEAEM

SEQ ID NO: 63615 - protein, 9 aa, Homo sapiens
  Table A; Target 63615; HLA-C*03:03; PKHD1; ENSG00000170927; TAA
ITMETEAEM

SEQ ID NO: 63616 - protein, 9 aa, Homo sapiens
  Table A; Target 63616; HLA-C*03:04; PKHD1; ENSG00000170927; TAA
ITMETEAEM

SEQ ID NO: 63617 - protein, 9 aa, Homo sapiens
  Table A; Target 63617; HLA-C*14:02; PKHD1; ENSG00000170927; TAA
ITMETEAEM

SEQ ID NO: 63618 - protein, 8 aa, Homo sapiens
  Table A; Target 63618; HLA-C*03:03; PKHD1; ENSG00000170927; TAA
ITNSSLSL

SEQ ID NO: 63619 - protein, 8 aa, Homo sapiens
  Table A; Target 63619; HLA-C*03:04; PKHD1; ENSG00000170927; TAA
ITNSSLSL

SEQ ID NO: 63620 - protein, 8 aa, Homo sapiens
  Table A; Target 63620; HLA-C*05:01; PKHD1; ENSG00000170927; TAA
IVATSSSF

SEQ ID NO: 63621 - protein, 8 aa, Homo sapiens
  Table A; Target 63621; HLA-C*14:02; PKHD1; ENSG00000170927; TAA
IVATSSSF

SEQ ID NO: 63622 - protein, 11 aa, Homo sapiens
  Table A; Target 63622; HLA-A*02:01; PKHD1; ENSG00000170927; TAA
IVIEIGDSPTV

SEQ ID NO: 63623 - protein, 8 aa, Homo sapiens
  Table A; Target 63623; HLA-A*30:02; PKHD1; ENSG00000170927; TAA
IVLSSSSY

SEQ ID NO: 63624 - protein, 9 aa, Homo sapiens
  Table A; Target 63624; HLA-B*46:01; PKHD1; ENSG00000170927; TAA
IVPNASSPF

SEQ ID NO: 63625 - protein, 9 aa, Homo sapiens
  Table A; Target 63625; HLA-C*01:02; PKHD1; ENSG00000170927; TAA
IVPNASSPF

SEQ ID NO: 63626 - protein, 9 aa, Homo sapiens
  Table A; Target 63626; HLA-C*14:02; PKHD1; ENSG00000170927; TAA
IVPNASSPF

SEQ ID NO: 63627 - protein, 9 aa, Homo sapiens
  Table A; Target 63627; HLA-C*01:02; PKHD1; ENSG00000170927; TAA
IVPTGNGSV

SEQ ID NO: 63628 - protein, 11 aa, Homo sapiens
  Table A; Target 63628; HLA-C*01:02; PKHD1; ENSG00000170927; TAA
IVPTGNGSVAL

SEQ ID NO: 63629 - protein, 9 aa, Homo sapiens
  Table A; Target 63629; HLA-A*23:01; PKHD1; ENSG00000170927; TAA
IYICSPTNV

SEQ ID NO: 63630 - protein, 9 aa, Homo sapiens
  Table A; Target 63630; HLA-A*24:02; PKHD1; ENSG00000170927; TAA
IYICSPTNV

SEQ ID NO: 63631 - protein, 10 aa, Homo sapiens
  Table A; Target 63631; HLA-A*24:02; PKHD1; ENSG00000170927; TAA
IYICSPTNVI

SEQ ID NO: 63632 - protein, 8 aa, Homo sapiens
  Table A; Target 63632; HLA-A*23:01; PKHD1; ENSG00000170927; TAA
IYIRPYAL

SEQ ID NO: 63633 - protein, 8 aa, Homo sapiens
  Table A; Target 63633; HLA-A*23:01; PKHD1; ENSG00000170927; TAA
IYITGTGF

SEQ ID NO: 63634 - protein, 8 aa, Homo sapiens
  Table A; Target 63634; HLA-A*24:02; PKHD1; ENSG00000170927; TAA
IYITGTGF

SEQ ID NO: 63635 - protein, 8 aa, Homo sapiens
  Table A; Target 63635; HLA-B*46:01; PKHD1; ENSG00000170927; TAA
IYITGTGF

SEQ ID NO: 63636 - protein, 8 aa, Homo sapiens
  Table A; Target 63636; HLA-C*01:02; PKHD1; ENSG00000170927; TAA
IYITGTGF

SEQ ID NO: 63637 - protein, 8 aa, Homo sapiens
  Table A; Target 63637; HLA-C*04:01; PKHD1; ENSG00000170927; TAA
IYITGTGF

SEQ ID NO: 63638 - protein, 8 aa, Homo sapiens
  Table A; Target 63638; HLA-C*14:02; PKHD1; ENSG00000170927; TAA
IYITGTGF

SEQ ID NO: 63639 - protein, 10 aa, Homo sapiens
  Table A; Target 63639; HLA-A*23:01; PKHD1; ENSG00000170927; TAA
IYITGTGFSG

SEQ ID NO: 63640 - protein, 10 aa, Homo sapiens
  Table A; Target 63640; HLA-C*14:02; PKHD1; ENSG00000170927; TAA
IYITGTGFSG

SEQ ID NO: 63641 - protein, 10 aa, Homo sapiens
  Table A; Target 63641; HLA-A*23:01; PKHD1; ENSG00000170927; TAA
IYNSSCNITM

SEQ ID NO: 63642 - protein, 10 aa, Homo sapiens
  Table A; Target 63642; HLA-C*14:02; PKHD1; ENSG00000170927; TAA
IYNSSCNITM

SEQ ID NO: 63643 - protein, 10 aa, Homo sapiens
  Table A; Target 63643; HLA-C*02:02; PKHD1; ENSG00000170927; TAA
KAFTPELISI

SEQ ID NO: 63644 - protein, 11 aa, Homo sapiens
  Table A; Target 63644; HLA-A*30:02; PKHD1; ENSG00000170927; TAA
KAQTPIVHQVY

SEQ ID NO: 63645 - protein, 11 aa, Homo sapiens
  Table A; Target 63645; HLA-B*57:01; PKHD1; ENSG00000170927; TAA
KAQTPIVHQVY

SEQ ID NO: 63646 - protein, 11 aa, Homo sapiens
  Table A; Target 63646; HLA-B*58:01; PKHD1; ENSG00000170927; TAA
KAQTPIVHQVY

SEQ ID NO: 63647 - protein, 11 aa, Homo sapiens
  Table A; Target 63647; HLA-C*16:02; PKHD1; ENSG00000170927; TAA
KAQTPIVHQVY

SEQ ID NO: 63648 - protein, 9 aa, Homo sapiens
  Table A; Target 63648; HLA-A*31:01; PKHD1; ENSG00000170927; TAA
KATVALLSR

SEQ ID NO: 63649 - protein, 8 aa, Homo sapiens
  Table A; Target 63649; HLA-B*37:01; PKHD1; ENSG00000170927; TAA
KDLDGRAL

SEQ ID NO: 63650 - protein, 10 aa, Homo sapiens
  Table A; Target 63650; HLA-B*37:01; PKHD1; ENSG00000170927; TAA
KDLDGRALGL

SEQ ID NO: 63651 - protein, 10 aa, Homo sapiens
  Table A; Target 63651; HLA-B*40:01; PKHD1; ENSG00000170927; TAA
KEDTVVGEDM

SEQ ID NO: 63652 - protein, 8 aa, Homo sapiens
  Table A; Target 63652; HLA-B*49:01; PKHD1; ENSG00000170927; TAA
KEGMPPTI

SEQ ID NO: 63653 - protein, 10 aa, Homo sapiens
  Table A; Target 63653; HLA-B*40:01; PKHD1; ENSG00000170927; TAA
KEGMPPTISA

SEQ ID NO: 63654 - protein, 10 aa, Homo sapiens
  Table A; Target 63654; HLA-B*44:02; PKHD1; ENSG00000170927; TAA
KEGQEQLLRY

SEQ ID NO: 63655 - protein, 10 aa, Homo sapiens
  Table A; Target 63655; HLA-B*44:03; PKHD1; ENSG00000170927; TAA
KEGQEQLLRY

SEQ ID NO: 63656 - protein, 11 aa, Homo sapiens
  Table A; Target 63656; HLA-A*23:01; PKHD1; ENSG00000170927; TAA
KFTNSSNLVAF

SEQ ID NO: 63657 - protein, 9 aa, Homo sapiens
  Table A; Target 63657; HLA-A*30:02; PKHD1; ENSG00000170927; TAA
KIVLSSSSY

SEQ ID NO: 63658 - protein, 9 aa, Homo sapiens
  Table A; Target 63658; HLA-A*32:01; PKHD1; ENSG00000170927; TAA
KIVLSSSSY

SEQ ID NO: 63659 - protein, 9 aa, Homo sapiens
  Table A; Target 63659; HLA-B*15:01; PKHD1; ENSG00000170927; TAA
KIVLSSSSY

SEQ ID NO: 63660 - protein, 9 aa, Homo sapiens
  Table A; Target 63660; HLA-B*15:03; PKHD1; ENSG00000170927; TAA
KIVLSSSSY

SEQ ID NO: 63661 - protein, 9 aa, Homo sapiens
  Table A; Target 63661; HLA-B*46:01; PKHD1; ENSG00000170927; TAA
KIVLSSSSY

SEQ ID NO: 63662 - protein, 11 aa, Homo sapiens
  Table A; Target 63662; HLA-A*01:01; PKHD1; ENSG00000170927; TAA
KLELLGGAMYY

SEQ ID NO: 63663 - protein, 8 aa, Homo sapiens
  Table A; Target 63663; HLA-B*37:01; PKHD1; ENSG00000170927; TAA
KLYPVVSV

SEQ ID NO: 63664 - protein, 9 aa, Homo sapiens
  Table A; Target 63664; HLA-B*56:01; PKHD1; ENSG00000170927; TAA
KPFAVLPVT

SEQ ID NO: 63665 - protein, 10 aa, Homo sapiens
  Table A; Target 63665; HLA-B*56:01; PKHD1; ENSG00000170927; TAA
KPFAVLPVTR

SEQ ID NO: 63666 - protein, 9 aa, Homo sapiens
  Table A; Target 63666; HLA-B*07:02; PKHD1; ENSG00000170927; TAA
KPFQGRAQI

SEQ ID NO: 63667 - protein, 9 aa, Homo sapiens
  Table A; Target 63667; HLA-C*07:02; PKHD1; ENSG00000170927; TAA
KPFQGRAQI

SEQ ID NO: 63668 - protein, 11 aa, Homo sapiens
  Table A; Target 63668; HLA-B*07:02; PKHD1; ENSG00000170927; TAA
KPFQGRAQITL

SEQ ID NO: 63669 - protein, 11 aa, Homo sapiens
  Table A; Target 63669; HLA-C*07:02; PKHD1; ENSG00000170927; TAA
KPFQGRAQITL

SEQ ID NO: 63670 - protein, 10 aa, Homo sapiens
  Table A; Target 63670; HLA-B*56:01; PKHD1; ENSG00000170927; TAA
KPHSANLTST

SEQ ID NO: 63671 - protein, 9 aa, Homo sapiens
  Table A; Target 63671; HLA-B*07:02; PKHD1; ENSG00000170927; TAA
KPMEEIVTV

SEQ ID NO: 63672 - protein, 9 aa, Homo sapiens
  Table A; Target 63672; HLA-B*35:03; PKHD1; ENSG00000170927; TAA
KPMEEIVTV

SEQ ID NO: 63673 - protein, 9 aa, Homo sapiens
  Table A; Target 63673; HLA-B*51:01; PKHD1; ENSG00000170927; TAA
KPMEEIVTV

SEQ ID NO: 63674 - protein, 9 aa, Homo sapiens
  Table A; Target 63674; HLA-B*54:01; PKHD1; ENSG00000170927; TAA
KPMEEIVTV

SEQ ID NO: 63675 - protein, 9 aa, Homo sapiens
  Table A; Target 63675; HLA-B*55:01; PKHD1; ENSG00000170927; TAA
KPMEEIVTV

SEQ ID NO: 63676 - protein, 9 aa, Homo sapiens
  Table A; Target 63676; HLA-B*56:01; PKHD1; ENSG00000170927; TAA
KPMEEIVTV

SEQ ID NO: 63677 - protein, 9 aa, Homo sapiens
  Table A; Target 63677; HLA-C*07:02; PKHD1; ENSG00000170927; TAA
KPMEEIVTV

SEQ ID NO: 63678 - protein, 10 aa, Homo sapiens
  Table A; Target 63678; HLA-B*13:02; PKHD1; ENSG00000170927; TAA
KQMGFANMSV

SEQ ID NO: 63679 - protein, 9 aa, Homo sapiens
  Table A; Target 63679; HLA-B*13:02; PKHD1; ENSG00000170927; TAA
KQTDQVVLI

SEQ ID NO: 63680 - protein, 9 aa, Homo sapiens
  Table A; Target 63680; HLA-A*31:01; PKHD1; ENSG00000170927; TAA
KTTTVNYVR

SEQ ID NO: 63681 - protein, 9 aa, Homo sapiens
  Table A; Target 63681; HLA-B*57:01; PKHD1; ENSG00000170927; TAA
KTTTVNYVR

SEQ ID NO: 63682 - protein, 10 aa, Homo sapiens
  Table A; Target 63682; HLA-A*02:07; PKHD1; ENSG00000170927; TAA
KVDSNVFYNI

SEQ ID NO: 63683 - protein, 10 aa, Homo sapiens
  Table A; Target 63683; HLA-A*68:01; PKHD1; ENSG00000170927; TAA
LAAEVGLLTR

SEQ ID NO: 63684 - protein, 10 aa, Homo sapiens
  Table A; Target 63684; HLA-C*07:06; PKHD1; ENSG00000170927; TAA
LAAEVGLLTR

SEQ ID NO: 63685 - protein, 10 aa, Homo sapiens
  Table A; Target 63685; HLA-C*03:03; PKHD1; ENSG00000170927; TAA
LAISATGEDL

SEQ ID NO: 63686 - protein, 10 aa, Homo sapiens
  Table A; Target 63686; HLA-C*03:04; PKHD1; ENSG00000170927; TAA
LAISATGEDL

SEQ ID NO: 63687 - protein, 9 aa, Homo sapiens
  Table A; Target 63687; HLA-B*51:01; PKHD1; ENSG00000170927; TAA
LALTVMVSV

SEQ ID NO: 63688 - protein, 9 aa, Homo sapiens
  Table A; Target 63688; HLA-A*32:01; PKHD1; ENSG00000170927; TAA
LANATVSAF

SEQ ID NO: 63689 - protein, 9 aa, Homo sapiens
  Table A; Target 63689; HLA-B*35:01; PKHD1; ENSG00000170927; TAA
LANATVSAF

SEQ ID NO: 63690 - protein, 9 aa, Homo sapiens
  Table A; Target 63690; HLA-B*46:01; PKHD1; ENSG00000170927; TAA
LANATVSAF

SEQ ID NO: 63691 - protein, 9 aa, Homo sapiens
  Table A; Target 63691; HLA-B*58:01; PKHD1; ENSG00000170927; TAA
LANATVSAF

SEQ ID NO: 63692 - protein, 9 aa, Homo sapiens
  Table A; Target 63692; HLA-C*02:02; PKHD1; ENSG00000170927; TAA
LANATVSAF

SEQ ID NO: 63693 - protein, 9 aa, Homo sapiens
  Table A; Target 63693; HLA-C*03:03; PKHD1; ENSG00000170927; TAA
LANATVSAF

SEQ ID NO: 63694 - protein, 9 aa, Homo sapiens
  Table A; Target 63694; HLA-C*03:04; PKHD1; ENSG00000170927; TAA
LANATVSAF

SEQ ID NO: 63695 - protein, 9 aa, Homo sapiens
  Table A; Target 63695; HLA-C*05:01; PKHD1; ENSG00000170927; TAA
LANATVSAF

SEQ ID NO: 63696 - protein, 9 aa, Homo sapiens
  Table A; Target 63696; HLA-C*14:02; PKHD1; ENSG00000170927; TAA
LANATVSAF

SEQ ID NO: 63697 - protein, 9 aa, Homo sapiens
  Table A; Target 63697; HLA-A*30:02; PKHD1; ENSG00000170927; TAA
LANTPEVSY

SEQ ID NO: 63698 - protein, 9 aa, Homo sapiens
  Table A; Target 63698; HLA-B*15:01; PKHD1; ENSG00000170927; TAA
LANTPEVSY

SEQ ID NO: 63699 - protein, 9 aa, Homo sapiens
  Table A; Target 63699; HLA-B*15:03; PKHD1; ENSG00000170927; TAA
LANTPEVSY

SEQ ID NO: 63700 - protein, 9 aa, Homo sapiens
  Table A; Target 63700; HLA-B*35:01; PKHD1; ENSG00000170927; TAA
LANTPEVSY

SEQ ID NO: 63701 - protein, 9 aa, Homo sapiens
  Table A; Target 63701; HLA-B*39:01; PKHD1; ENSG00000170927; TAA
LANTPEVSY

SEQ ID NO: 63702 - protein, 9 aa, Homo sapiens
  Table A; Target 63702; HLA-B*46:01; PKHD1; ENSG00000170927; TAA
LANTPEVSY

SEQ ID NO: 63703 - protein, 9 aa, Homo sapiens
  Table A; Target 63703; HLA-B*55:01; PKHD1; ENSG00000170927; TAA
LANTPEVSY

SEQ ID NO: 63704 - protein, 9 aa, Homo sapiens
  Table A; Target 63704; HLA-B*58:01; PKHD1; ENSG00000170927; TAA
LANTPEVSY

SEQ ID NO: 63705 - protein, 9 aa, Homo sapiens
  Table A; Target 63705; HLA-C*02:02; PKHD1; ENSG00000170927; TAA
LANTPEVSY

SEQ ID NO: 63706 - protein, 9 aa, Homo sapiens
  Table A; Target 63706; HLA-C*03:03; PKHD1; ENSG00000170927; TAA
LANTPEVSY

SEQ ID NO: 63707 - protein, 9 aa, Homo sapiens
  Table A; Target 63707; HLA-C*03:04; PKHD1; ENSG00000170927; TAA
LANTPEVSY

SEQ ID NO: 63708 - protein, 9 aa, Homo sapiens
  Table A; Target 63708; HLA-C*14:02; PKHD1; ENSG00000170927; TAA
LANTPEVSY

SEQ ID NO: 63709 - protein, 9 aa, Homo sapiens
  Table A; Target 63709; HLA-C*16:01; PKHD1; ENSG00000170927; TAA
LANTPEVSY

SEQ ID NO: 63710 - protein, 9 aa, Homo sapiens
  Table A; Target 63710; HLA-C*16:02; PKHD1; ENSG00000170927; TAA
LANTPEVSY

SEQ ID NO: 63711 - protein, 9 aa, Homo sapiens
  Table A; Target 63711; HLA-B*46:01; PKHD1; ENSG00000170927; TAA
LAPVHTQSA

SEQ ID NO: 63712 - protein, 9 aa, Homo sapiens
  Table A; Target 63712; HLA-C*01:02; PKHD1; ENSG00000170927; TAA
LAPVHTQSA

SEQ ID NO: 63713 - protein, 9 aa, Homo sapiens
  Table A; Target 63713; HLA-A*01:01; PKHD1; ENSG00000170927; TAA
LAQETGLFY

SEQ ID NO: 63714 - protein, 9 aa, Homo sapiens
  Table A; Target 63714; HLA-A*30:02; PKHD1; ENSG00000170927; TAA
LAQETGLFY

SEQ ID NO: 63715 - protein, 9 aa, Homo sapiens
  Table A; Target 63715; HLA-B*46:01; PKHD1; ENSG00000170927; TAA
LAQETGLFY

SEQ ID NO: 63716 - protein, 8 aa, Homo sapiens
  Table A; Target 63716; HLA-C*03:04; PKHD1; ENSG00000170927; TAA
LAVRNGTL

SEQ ID NO: 63717 - protein, 8 aa, Homo sapiens
  Table A; Target 63717; HLA-B*37:01; PKHD1; ENSG00000170927; TAA
LDQETYSL

SEQ ID NO: 63718 - protein, 8 aa, Homo sapiens
  Table A; Target 63718; HLA-B*37:01; PKHD1; ENSG00000170927; TAA
LEAEHHGI

SEQ ID NO: 63719 - protein, 8 aa, Homo sapiens
  Table A; Target 63719; HLA-B*49:01; PKHD1; ENSG00000170927; TAA
LEAEHHGI

SEQ ID NO: 63720 - protein, 10 aa, Homo sapiens
  Table A; Target 63720; HLA-B*49:01; PKHD1; ENSG00000170927; TAA
LEAGIYPLQV

SEQ ID NO: 63721 - protein, 9 aa, Homo sapiens
  Table A; Target 63721; HLA-A*30:01; PKHD1; ENSG00000170927; TAA
LEAYFGGQL

SEQ ID NO: 63722 - protein, 9 aa, Homo sapiens
  Table A; Target 63722; HLA-B*40:01; PKHD1; ENSG00000170927; TAA
LEAYFGGQL

SEQ ID NO: 63723 - protein, 9 aa, Homo sapiens
  Table A; Target 63723; HLA-B*49:01; PKHD1; ENSG00000170927; TAA
LEAYFGGQL

SEQ ID NO: 63724 - protein, 10 aa, Homo sapiens
  Table A; Target 63724; HLA-B*49:01; PKHD1; ENSG00000170927; TAA
LEAYFGGQLV

SEQ ID NO: 63725 - protein, 9 aa, Homo sapiens
  Table A; Target 63725; HLA-B*40:01; PKHD1; ENSG00000170927; TAA
LEGASDSVL

SEQ ID NO: 63726 - protein, 9 aa, Homo sapiens
  Table A; Target 63726; HLA-B*49:01; PKHD1; ENSG00000170927; TAA
LEGDPLPGA

SEQ ID NO: 63727 - protein, 11 aa, Homo sapiens
  Table A; Target 63727; HLA-A*30:01; PKHD1; ENSG00000170927; TAA
LEGDPLPGASF

SEQ ID NO: 63728 - protein, 11 aa, Homo sapiens
  Table A; Target 63728; HLA-B*18:01; PKHD1; ENSG00000170927; TAA
LEGDPLPGASF

SEQ ID NO: 63729 - protein, 11 aa, Homo sapiens
  Table A; Target 63729; HLA-B*44:02; PKHD1; ENSG00000170927; TAA
LEGDPLPGASF

SEQ ID NO: 63730 - protein, 11 aa, Homo sapiens
  Table A; Target 63730; HLA-B*44:03; PKHD1; ENSG00000170927; TAA
LEGDPLPGASF

SEQ ID NO: 63731 - protein, 11 aa, Homo sapiens
  Table A; Target 63731; HLA-C*16:04; PKHD1; ENSG00000170927; TAA
LEGDPLPGASF

SEQ ID NO: 63732 - protein, 8 aa, Homo sapiens
  Table A; Target 63732; HLA-B*18:01; PKHD1; ENSG00000170927; TAA
LEGQAYTV

SEQ ID NO: 63733 - protein, 8 aa, Homo sapiens
  Table A; Target 63733; HLA-B*49:01; PKHD1; ENSG00000170927; TAA
LEGQAYTV

SEQ ID NO: 63734 - protein, 8 aa, Homo sapiens
  Table A; Target 63734; HLA-B*49:01; PKHD1; ENSG00000170927; TAA
LEIEVDGL

SEQ ID NO: 63735 - protein, 8 aa, Homo sapiens
  Table A; Target 63735; HLA-B*49:01; PKHD1; ENSG00000170927; TAA
LEIHLVNV

SEQ ID NO: 63736 - protein, 10 aa, Homo sapiens
  Table A; Target 63736; HLA-B*44:03; PKHD1; ENSG00000170927; TAA
LELTEATPGY

SEQ ID NO: 63737 - protein, 9 aa, Homo sapiens
  Table A; Target 63737; HLA-B*49:01; PKHD1; ENSG00000170927; TAA
LENVLNMTI

SEQ ID NO: 63738 - protein, 9 aa, Homo sapiens
  Table A; Target 63738; HLA-B*18:01; PKHD1; ENSG00000170927; TAA
LERDEVLIY

SEQ ID NO: 63739 - protein, 9 aa, Homo sapiens
  Table A; Target 63739; HLA-B*49:01; PKHD1; ENSG00000170927; TAA
LESDANTSV

SEQ ID NO: 63740 - protein, 9 aa, Homo sapiens
  Table A; Target 63740; HLA-C*16:01; PKHD1; ENSG00000170927; TAA
LGFERGPEV

SEQ ID NO: 63741 - protein, 9 aa, Homo sapiens
  Table A; Target 63741; HLA-B*38:01; PKHD1; ENSG00000170927; TAA
LHGSLPEVI

SEQ ID NO: 63742 - protein, 10 aa, Homo sapiens
  Table A; Target 63742; HLA-B*38:01; PKHD1; ENSG00000170927; TAA
LHIEPEEGSL

SEQ ID NO: 63743 - protein, 10 aa, Homo sapiens
  Table A; Target 63743; HLA-B*39:01; PKHD1; ENSG00000170927; TAA
LHIEPEEGSL

SEQ ID NO: 63744 - protein, 9 aa, Homo sapiens
  Table A; Target 63744; HLA-B*38:01; PKHD1; ENSG00000170927; TAA
LHSVHPETI

SEQ ID NO: 63745 - protein, 9 aa, Homo sapiens
  Table A; Target 63745; HLA-B*38:01; PKHD1; ENSG00000170927; TAA
LHVENSVEI

SEQ ID NO: 63746 - protein, 9 aa, Homo sapiens
  Table A; Target 63746; HLA-B*39:01; PKHD1; ENSG00000170927; TAA
LHVENSVEI

SEQ ID NO: 63747 - protein, 8 aa, Homo sapiens
  Table A; Target 63747; HLA-B*39:01; PKHD1; ENSG00000170927; TAA
LHVGGSNL

SEQ ID NO: 63748 - protein, 9 aa, Homo sapiens
  Table A; Target 63748; HLA-A*02:04; PKHD1; ENSG00000170927; TAA
LIYIRPYAL

SEQ ID NO: 63749 - protein, 9 aa, Homo sapiens
  Table A; Target 63749; HLA-B*08:01; PKHD1; ENSG00000170927; TAA
LIYIRPYAL

SEQ ID NO: 63750 - protein, 9 aa, Homo sapiens
  Table A; Target 63750; HLA-B*15:03; PKHD1; ENSG00000170927; TAA
LKVDSNVFY

SEQ ID NO: 63751 - protein, 9 aa, Homo sapiens
  Table A; Target 63751; HLA-A*02:04; PKHD1; ENSG00000170927; TAA
LLAVFYHEL

SEQ ID NO: 63752 - protein, 9 aa, Homo sapiens
  Table A; Target 63752; HLA-A*02:07; PKHD1; ENSG00000170927; TAA
LLAVFYHEL

SEQ ID NO: 63753 - protein, 9 aa, Homo sapiens
  Table A; Target 63753; HLA-B*08:01; PKHD1; ENSG00000170927; TAA
LLAVRHLSL

SEQ ID NO: 63754 - protein, 9 aa, Homo sapiens
  Table A; Target 63754; HLA-A*02:01; PKHD1; ENSG00000170927; TAA
LLDQETYSL

SEQ ID NO: 63755 - protein, 9 aa, Homo sapiens
  Table A; Target 63755; HLA-A*02:04; PKHD1; ENSG00000170927; TAA
LLDQETYSL

SEQ ID NO: 63756 - protein, 9 aa, Homo sapiens
  Table A; Target 63756; HLA-A*02:07; PKHD1; ENSG00000170927; TAA
LLDQETYSL

SEQ ID NO: 63757 - protein, 9 aa, Homo sapiens
  Table A; Target 63757; HLA-B*38:01; PKHD1; ENSG00000170927; TAA
LLDQETYSL

SEQ ID NO: 63758 - protein, 9 aa, Homo sapiens
  Table A; Target 63758; HLA-B*55:01; PKHD1; ENSG00000170927; TAA
LLDQETYSL

SEQ ID NO: 63759 - protein, 9 aa, Homo sapiens
  Table A; Target 63759; HLA-C*05:01; PKHD1; ENSG00000170927; TAA
LLDQETYSL

SEQ ID NO: 63760 - protein, 8 aa, Homo sapiens
  Table A; Target 63760; HLA-C*05:01; PKHD1; ENSG00000170927; TAA
LLDTNTSI

SEQ ID NO: 63761 - protein, 9 aa, Homo sapiens
  Table A; Target 63761; HLA-A*01:01; PKHD1; ENSG00000170927; TAA
LLDTNTSIL

SEQ ID NO: 63762 - protein, 9 aa, Homo sapiens
  Table A; Target 63762; HLA-A*02:07; PKHD1; ENSG00000170927; TAA
LLDTNTSIL

SEQ ID NO: 63763 - protein, 9 aa, Homo sapiens
  Table A; Target 63763; HLA-C*05:01; PKHD1; ENSG00000170927; TAA
LLDTNTSIL

SEQ ID NO: 63764 - protein, 10 aa, Homo sapiens
  Table A; Target 63764; HLA-A*01:01; PKHD1; ENSG00000170927; TAA
LLDTNTSILN

SEQ ID NO: 63765 - protein, 9 aa, Homo sapiens
  Table A; Target 63765; HLA-A*01:01; PKHD1; ENSG00000170927; TAA
LLESWPYLY

SEQ ID NO: 63766 - protein, 9 aa, Homo sapiens
  Table A; Target 63766; HLA-A*02:01; PKHD1; ENSG00000170927; TAA
LLFEVGDAV

SEQ ID NO: 63767 - protein, 9 aa, Homo sapiens
  Table A; Target 63767; HLA-A*02:04; PKHD1; ENSG00000170927; TAA
LLFEVGDAV

SEQ ID NO: 63768 - protein, 9 aa, Homo sapiens
  Table A; Target 63768; HLA-A*02:07; PKHD1; ENSG00000170927; TAA
LLFEVGDAV

SEQ ID NO: 63769 - protein, 9 aa, Homo sapiens
  Table A; Target 63769; HLA-B*13:02; PKHD1; ENSG00000170927; TAA
LLGGTILSI

SEQ ID NO: 63770 - protein, 10 aa, Homo sapiens
  Table A; Target 63770; HLA-A*02:01; PKHD1; ENSG00000170927; TAA
LLLDQETYSL

SEQ ID NO: 63771 - protein, 10 aa, Homo sapiens
  Table A; Target 63771; HLA-A*02:04; PKHD1; ENSG00000170927; TAA
LLLDQETYSL

SEQ ID NO: 63772 - protein, 9 aa, Homo sapiens
  Table A; Target 63772; HLA-A*02:01; PKHD1; ENSG00000170927; TAA
LLLDTNTSI

SEQ ID NO: 63773 - protein, 9 aa, Homo sapiens
  Table A; Target 63773; HLA-A*02:01; PKHD1; ENSG00000170927; TAA
LLLNESIGA

SEQ ID NO: 63774 - protein, 11 aa, Homo sapiens
  Table A; Target 63774; HLA-A*29:02; PKHD1; ENSG00000170927; TAA
LLLNESIGANY

SEQ ID NO: 63775 - protein, 11 aa, Homo sapiens
  Table A; Target 63775; HLA-A*30:02; PKHD1; ENSG00000170927; TAA
LLLNESIGANY

SEQ ID NO: 63776 - protein, 10 aa, Homo sapiens
  Table A; Target 63776; HLA-A*01:01; PKHD1; ENSG00000170927; TAA
LLNESIGANY

SEQ ID NO: 63777 - protein, 10 aa, Homo sapiens
  Table A; Target 63777; HLA-A*29:02; PKHD1; ENSG00000170927; TAA
LLNESIGANY

SEQ ID NO: 63778 - protein, 10 aa, Homo sapiens
  Table A; Target 63778; HLA-A*30:02; PKHD1; ENSG00000170927; TAA
LLNESIGANY

SEQ ID NO: 63779 - protein, 10 aa, Homo sapiens
  Table A; Target 63779; HLA-A*32:01; PKHD1; ENSG00000170927; TAA
LLNESIGANY

SEQ ID NO: 63780 - protein, 10 aa, Homo sapiens
  Table A; Target 63780; HLA-B*15:01; PKHD1; ENSG00000170927; TAA
LLNESIGANY

SEQ ID NO: 63781 - protein, 10 aa, Homo sapiens
  Table A; Target 63781; HLA-B*46:01; PKHD1; ENSG00000170927; TAA
LLNESIGANY

SEQ ID NO: 63782 - protein, 10 aa, Homo sapiens
  Table A; Target 63782; HLA-C*14:02; PKHD1; ENSG00000170927; TAA
LLNESIGANY

SEQ ID NO: 63783 - protein, 9 aa, Homo sapiens
  Table A; Target 63783; HLA-A*01:01; PKHD1; ENSG00000170927; TAA
LNESIGANY

SEQ ID NO: 63784 - protein, 9 aa, Homo sapiens
  Table A; Target 63784; HLA-A*29:02; PKHD1; ENSG00000170927; TAA
LNESIGANY

SEQ ID NO: 63785 - protein, 9 aa, Homo sapiens
  Table A; Target 63785; HLA-A*26:01; PKHD1; ENSG00000170927; TAA
LNPDVVTTY

SEQ ID NO: 63786 - protein, 9 aa, Homo sapiens
  Table A; Target 63786; HLA-A*29:02; PKHD1; ENSG00000170927; TAA
LNPDVVTTY

SEQ ID NO: 63787 - protein, 9 aa, Homo sapiens
  Table A; Target 63787; HLA-B*35:03; PKHD1; ENSG00000170927; TAA
LPAPQIPDA

SEQ ID NO: 63788 - protein, 9 aa, Homo sapiens
  Table A; Target 63788; HLA-B*54:01; PKHD1; ENSG00000170927; TAA
LPAPQIPDA

SEQ ID NO: 63789 - protein, 9 aa, Homo sapiens
  Table A; Target 63789; HLA-B*55:01; PKHD1; ENSG00000170927; TAA
LPAPQIPDA

SEQ ID NO: 63790 - protein, 9 aa, Homo sapiens
  Table A; Target 63790; HLA-B*56:01; PKHD1; ENSG00000170927; TAA
LPAPQIPDA

SEQ ID NO: 63791 - protein, 11 aa, Homo sapiens
  Table A; Target 63791; HLA-B*56:01; PKHD1; ENSG00000170927; TAA
LPAPQIPDAGA

SEQ ID NO: 63792 - protein, 9 aa, Homo sapiens
  Table A; Target 63792; HLA-B*35:01; PKHD1; ENSG00000170927; TAA
LPEVIVTCL

SEQ ID NO: 63793 - protein, 9 aa, Homo sapiens
  Table A; Target 63793; HLA-B*35:03; PKHD1; ENSG00000170927; TAA
LPEVIVTCL

SEQ ID NO: 63794 - protein, 9 aa, Homo sapiens
  Table A; Target 63794; HLA-B*51:01; PKHD1; ENSG00000170927; TAA
LPEVQVLNV

SEQ ID NO: 63795 - protein, 9 aa, Homo sapiens
  Table A; Target 63795; HLA-B*51:01; PKHD1; ENSG00000170927; TAA
LPFFKGLYV

SEQ ID NO: 63796 - protein, 9 aa, Homo sapiens
  Table A; Target 63796; HLA-B*54:01; PKHD1; ENSG00000170927; TAA
LPFFKGLYV

SEQ ID NO: 63797 - protein, 8 aa, Homo sapiens
  Table A; Target 63797; HLA-B*35:03; PKHD1; ENSG00000170927; TAA
LPGASFSL

SEQ ID NO: 63798 - protein, 9 aa, Homo sapiens
  Table A; Target 63798; HLA-B*51:01; PKHD1; ENSG00000170927; TAA
LPIRQITKV

SEQ ID NO: 63799 - protein, 9 aa, Homo sapiens
  Table A; Target 63799; HLA-B*54:01; PKHD1; ENSG00000170927; TAA
LPIRQITKV

SEQ ID NO: 63800 - protein, 9 aa, Homo sapiens
  Table A; Target 63800; HLA-B*56:01; PKHD1; ENSG00000170927; TAA
LPIRQITKV

SEQ ID NO: 63801 - protein, 9 aa, Homo sapiens
  Table A; Target 63801; HLA-B*35:03; PKHD1; ENSG00000170927; TAA
LPLAQETGL

SEQ ID NO: 63802 - protein, 11 aa, Homo sapiens
  Table A; Target 63802; HLA-A*29:02; PKHD1; ENSG00000170927; TAA
LPLAQETGLFY

SEQ ID NO: 63803 - protein, 11 aa, Homo sapiens
  Table A; Target 63803; HLA-B*35:01; PKHD1; ENSG00000170927; TAA
LPLAQETGLFY

SEQ ID NO: 63804 - protein, 9 aa, Homo sapiens
  Table A; Target 63804; HLA-A*23:01; PKHD1; ENSG00000170927; TAA
LPLDVSLAF

SEQ ID NO: 63805 - protein, 9 aa, Homo sapiens
  Table A; Target 63805; HLA-B*35:01; PKHD1; ENSG00000170927; TAA
LPLDVSLAF

SEQ ID NO: 63806 - protein, 9 aa, Homo sapiens
  Table A; Target 63806; HLA-B*35:03; PKHD1; ENSG00000170927; TAA
LPLDVSLAF

SEQ ID NO: 63807 - protein, 9 aa, Homo sapiens
  Table A; Target 63807; HLA-B*51:01; PKHD1; ENSG00000170927; TAA
LPLITARSV

SEQ ID NO: 63808 - protein, 9 aa, Homo sapiens
  Table A; Target 63808; HLA-B*51:01; PKHD1; ENSG00000170927; TAA
LPNAENSGI

SEQ ID NO: 63809 - protein, 10 aa, Homo sapiens
  Table A; Target 63809; HLA-B*35:03; PKHD1; ENSG00000170927; TAA
LPNAENSGIM

SEQ ID NO: 63810 - protein, 8 aa, Homo sapiens
  Table A; Target 63810; HLA-B*51:01; PKHD1; ENSG00000170927; TAA
LPNRTVLV

SEQ ID NO: 63811 - protein, 8 aa, Homo sapiens
  Table A; Target 63811; HLA-B*51:01; PKHD1; ENSG00000170927; TAA
LPPPVSVF

SEQ ID NO: 63812 - protein, 9 aa, Homo sapiens
  Table A; Target 63812; HLA-B*51:01; PKHD1; ENSG00000170927; TAA
LPPYPDILL

SEQ ID NO: 63813 - protein, 10 aa, Homo sapiens
  Table A; Target 63813; HLA-B*35:03; PKHD1; ENSG00000170927; TAA
LPQDGDNVTV

SEQ ID NO: 63814 - protein, 10 aa, Homo sapiens
  Table A; Target 63814; HLA-B*56:01; PKHD1; ENSG00000170927; TAA
LPQDGDNVTV

SEQ ID NO: 63815 - protein, 8 aa, Homo sapiens
  Table A; Target 63815; HLA-B*51:01; PKHD1; ENSG00000170927; TAA
LPRAFTYV

SEQ ID NO: 63816 - protein, 8 aa, Homo sapiens
  Table A; Target 63816; HLA-B*51:01; PKHD1; ENSG00000170927; TAA
LPVGMHRI

SEQ ID NO: 63817 - protein, 8 aa, Homo sapiens
  Table A; Target 63817; HLA-B*51:01; PKHD1; ENSG00000170927; TAA
LPVQPQLV

SEQ ID NO: 63818 - protein, 9 aa, Homo sapiens
  Table A; Target 63818; HLA-B*35:01; PKHD1; ENSG00000170927; TAA
LPVQPQLVF

SEQ ID NO: 63819 - protein, 9 aa, Homo sapiens
  Table A; Target 63819; HLA-C*05:01; PKHD1; ENSG00000170927; TAA
LQDVTFSSF

SEQ ID NO: 63820 - protein, 9 aa, Homo sapiens
  Table A; Target 63820; HLA-A*01:01; PKHD1; ENSG00000170927; TAA
LSEAHEGLY

SEQ ID NO: 63821 - protein, 10 aa, Homo sapiens
  Table A; Target 63821; HLA-A*01:01; PKHD1; ENSG00000170927; TAA
LSEAHEGLYF

SEQ ID NO: 63822 - protein, 9 aa, Homo sapiens
  Table A; Target 63822; HLA-C*16:01; PKHD1; ENSG00000170927; TAA
LSSNKLQNL

SEQ ID NO: 63823 - protein, 9 aa, Homo sapiens
  Table A; Target 63823; HLA-C*03:03; PKHD1; ENSG00000170927; TAA
LSTNTSGSL

SEQ ID NO: 63824 - protein, 9 aa, Homo sapiens
  Table A; Target 63824; HLA-C*03:04; PKHD1; ENSG00000170927; TAA
LSTNTSGSL

SEQ ID NO: 63825 - protein, 8 aa, Homo sapiens
  Table A; Target 63825; HLA-A*01:01; PKHD1; ENSG00000170927; TAA
LTEATPGY

SEQ ID NO: 63826 - protein, 8 aa, Homo sapiens
  Table A; Target 63826; HLA-C*03:03; PKHD1; ENSG00000170927; TAA
LTIEGTGL

SEQ ID NO: 63827 - protein, 8 aa, Homo sapiens
  Table A; Target 63827; HLA-C*03:04; PKHD1; ENSG00000170927; TAA
LTIEGTGL

SEQ ID NO: 63828 - protein, 9 aa, Homo sapiens
  Table A; Target 63828; HLA-A*32:01; PKHD1; ENSG00000170927; TAA
LTRTSPESW

SEQ ID NO: 63829 - protein, 9 aa, Homo sapiens
  Table A; Target 63829; HLA-B*57:01; PKHD1; ENSG00000170927; TAA
LTRTSPESW

SEQ ID NO: 63830 - protein, 9 aa, Homo sapiens
  Table A; Target 63830; HLA-B*58:01; PKHD1; ENSG00000170927; TAA
LTRTSPESW

SEQ ID NO: 63831 - protein, 9 aa, Homo sapiens
  Table A; Target 63831; HLA-C*03:03; PKHD1; ENSG00000170927; TAA
LTVNIGAEL

SEQ ID NO: 63832 - protein, 9 aa, Homo sapiens
  Table A; Target 63832; HLA-C*03:04; PKHD1; ENSG00000170927; TAA
LTVNIGAEL

SEQ ID NO: 63833 - protein, 8 aa, Homo sapiens
  Table A; Target 63833; HLA-C*05:01; PKHD1; ENSG00000170927; TAA
LVDNTIGL

SEQ ID NO: 63834 - protein, 9 aa, Homo sapiens
  Table A; Target 63834; HLA-C*05:01; PKHD1; ENSG00000170927; TAA
LVDNTIGLL

SEQ ID NO: 63835 - protein, 9 aa, Homo sapiens
  Table A; Target 63835; HLA-A*01:01; PKHD1; ENSG00000170927; TAA
LVDTDLPFF

SEQ ID NO: 63836 - protein, 9 aa, Homo sapiens
  Table A; Target 63836; HLA-A*02:07; PKHD1; ENSG00000170927; TAA
LVDTDLPFF

SEQ ID NO: 63837 - protein, 9 aa, Homo sapiens
  Table A; Target 63837; HLA-C*05:01; PKHD1; ENSG00000170927; TAA
LVDTDLPFF

SEQ ID NO: 63838 - protein, 11 aa, Homo sapiens
  Table A; Target 63838; HLA-B*54:01; PKHD1; ENSG00000170927; TAA
LVFTSRVIITA

SEQ ID NO: 63839 - protein, 9 aa, Homo sapiens
  Table A; Target 63839; HLA-A*30:02; PKHD1; ENSG00000170927; TAA
LVHTDLPPY

SEQ ID NO: 63840 - protein, 9 aa, Homo sapiens
  Table A; Target 63840; HLA-A*02:01; PKHD1; ENSG00000170927; TAA
LVLPLDVSL

SEQ ID NO: 63841 - protein, 10 aa, Homo sapiens
  Table A; Target 63841; HLA-A*03:01; PKHD1; ENSG00000170927; TAA
LVLTPPAAQK

SEQ ID NO: 63842 - protein, 10 aa, Homo sapiens
  Table A; Target 63842; HLA-A*03:02; PKHD1; ENSG00000170927; TAA
LVLTPPAAQK

SEQ ID NO: 63843 - protein, 10 aa, Homo sapiens
  Table A; Target 63843; HLA-A*11:01; PKHD1; ENSG00000170927; TAA
LVLTPPAAQK

SEQ ID NO: 63844 - protein, 9 aa, Homo sapiens
  Table A; Target 63844; HLA-B*07:02; PKHD1; ENSG00000170927; TAA
LVRPSGLAI

SEQ ID NO: 63845 - protein, 8 aa, Homo sapiens
  Table A; Target 63845; HLA-C*03:03; PKHD1; ENSG00000170927; TAA
LVSDGGEL

SEQ ID NO: 63846 - protein, 8 aa, Homo sapiens
  Table A; Target 63846; HLA-C*03:04; PKHD1; ENSG00000170927; TAA
LVSDGGEL

SEQ ID NO: 63847 - protein, 8 aa, Homo sapiens
  Table A; Target 63847; HLA-C*05:01; PKHD1; ENSG00000170927; TAA
LVSDGGEL

SEQ ID NO: 63848 - protein, 9 aa, Homo sapiens
  Table A; Target 63848; HLA-A*29:02; PKHD1; ENSG00000170927; TAA
LWINRSLQY

SEQ ID NO: 63849 - protein, 9 aa, Homo sapiens
  Table A; Target 63849; HLA-A*29:02; PKHD1; ENSG00000170927; TAA
LYLKSPLRY

SEQ ID NO: 63850 - protein, 9 aa, Homo sapiens
  Table A; Target 63850; HLA-A*23:01; PKHD1; ENSG00000170927; TAA
LYPNNGSQL

SEQ ID NO: 63851 - protein, 9 aa, Homo sapiens
  Table A; Target 63851; HLA-A*24:02; PKHD1; ENSG00000170927; TAA
LYPNNGSQL

SEQ ID NO: 63852 - protein, 9 aa, Homo sapiens
  Table A; Target 63852; HLA-C*01:02; PKHD1; ENSG00000170927; TAA
LYPNNGSQL

SEQ ID NO: 63853 - protein, 9 aa, Homo sapiens
  Table A; Target 63853; HLA-C*14:02; PKHD1; ENSG00000170927; TAA
LYPNNGSQL

SEQ ID NO: 63854 - protein, 11 aa, Homo sapiens
  Table A; Target 63854; HLA-A*23:01; PKHD1; ENSG00000170927; TAA
LYPVVSVTSGF

SEQ ID NO: 63855 - protein, 11 aa, Homo sapiens
  Table A; Target 63855; HLA-A*24:02; PKHD1; ENSG00000170927; TAA
LYPVVSVTSGF

SEQ ID NO: 63856 - protein, 8 aa, Homo sapiens
  Table A; Target 63856; HLA-C*14:02; PKHD1; ENSG00000170927; TAA
LYQTHSEI

SEQ ID NO: 63857 - protein, 9 aa, Homo sapiens
  Table A; Target 63857; HLA-A*23:01; PKHD1; ENSG00000170927; TAA
LYQTHSEIL

SEQ ID NO: 63858 - protein, 9 aa, Homo sapiens
  Table A; Target 63858; HLA-A*24:02; PKHD1; ENSG00000170927; TAA
LYQTHSEIL

SEQ ID NO: 63859 - protein, 9 aa, Homo sapiens
  Table A; Target 63859; HLA-C*14:02; PKHD1; ENSG00000170927; TAA
LYQTHSEIL

SEQ ID NO: 63860 - protein, 9 aa, Homo sapiens
  Table A; Target 63860; HLA-A*23:01; PKHD1; ENSG00000170927; TAA
LYVMGTLDF

SEQ ID NO: 63861 - protein, 10 aa, Homo sapiens
  Table A; Target 63861; HLA-B*54:01; PKHD1; ENSG00000170927; TAA
MAIFPSQGSA

SEQ ID NO: 63862 - protein, 11 aa, Homo sapiens
  Table A; Target 63862; HLA-C*03:03; PKHD1; ENSG00000170927; TAA
MAIFPSQGSAC

SEQ ID NO: 63863 - protein, 11 aa, Homo sapiens
  Table A; Target 63863; HLA-C*03:04; PKHD1; ENSG00000170927; TAA
MAIFPSQGSAC

SEQ ID NO: 63864 - protein, 10 aa, Homo sapiens
  Table A; Target 63864; HLA-B*35:01; PKHD1; ENSG00000170927; TAA
MALLLDQETY

SEQ ID NO: 63865 - protein, 8 aa, Homo sapiens
  Table A; Target 63865; HLA-C*01:02; PKHD1; ENSG00000170927; TAA
MAPGPIEL

SEQ ID NO: 63866 - protein, 9 aa, Homo sapiens
  Table A; Target 63866; HLA-C*07:06; PKHD1; ENSG00000170927; TAA
MAPGPIELR

SEQ ID NO: 63867 - protein, 10 aa, Homo sapiens
  Table A; Target 63867; HLA-A*25:01; PKHD1; ENSG00000170927; TAA
MATEQLLESW

SEQ ID NO: 63868 - protein, 9 aa, Homo sapiens
  Table A; Target 63868; HLA-A*33:03; PKHD1; ENSG00000170927; TAA
MDQTPQVLR

SEQ ID NO: 63869 - protein, 9 aa, Homo sapiens
  Table A; Target 63869; HLA-C*07:06; PKHD1; ENSG00000170927; TAA
MDQTPQVLR

SEQ ID NO: 63870 - protein, 10 aa, Homo sapiens
  Table A; Target 63870; HLA-B*49:01; PKHD1; ENSG00000170927; TAA
MEEIVTVETV

SEQ ID NO: 63871 - protein, 9 aa, Homo sapiens
  Table A; Target 63871; HLA-A*30:01; PKHD1; ENSG00000170927; TAA
METLSASCL

SEQ ID NO: 63872 - protein, 9 aa, Homo sapiens
  Table A; Target 63872; HLA-B*40:01; PKHD1; ENSG00000170927; TAA
METLSASCL

SEQ ID NO: 63873 - protein, 9 aa, Homo sapiens
  Table A; Target 63873; HLA-A*03:02; PKHD1; ENSG00000170927; TAA
MISSLSSNK

SEQ ID NO: 63874 - protein, 9 aa, Homo sapiens
  Table A; Target 63874; HLA-B*15:01; PKHD1; ENSG00000170927; TAA
MIYITGTGF

SEQ ID NO: 63875 - protein, 9 aa, Homo sapiens
  Table A; Target 63875; HLA-B*15:03; PKHD1; ENSG00000170927; TAA
MIYITGTGF

SEQ ID NO: 63876 - protein, 9 aa, Homo sapiens
  Table A; Target 63876; HLA-B*46:01; PKHD1; ENSG00000170927; TAA
MIYITGTGF

SEQ ID NO: 63877 - protein, 9 aa, Homo sapiens
  Table A; Target 63877; HLA-C*02:02; PKHD1; ENSG00000170927; TAA
MIYITGTGF

SEQ ID NO: 63878 - protein, 9 aa, Homo sapiens
  Table A; Target 63878; HLA-C*07:04; PKHD1; ENSG00000170927; TAA
MIYITGTGF

SEQ ID NO: 63879 - protein, 8 aa, Homo sapiens
  Table A; Target 63879; HLA-B*35:03; PKHD1; ENSG00000170927; TAA
MPGHEETL

SEQ ID NO: 63880 - protein, 11 aa, Homo sapiens
  Table A; Target 63880; HLA-B*54:01; PKHD1; ENSG00000170927; TAA
MPPTISASTSA

SEQ ID NO: 63881 - protein, 11 aa, Homo sapiens
  Table A; Target 63881; HLA-B*56:01; PKHD1; ENSG00000170927; TAA
MPPTISASTSA

SEQ ID NO: 63882 - protein, 10 aa, Homo sapiens
  Table A; Target 63882; HLA-B*38:01; PKHD1; ENSG00000170927; TAA
MQGEITNSSL

SEQ ID NO: 63883 - protein, 9 aa, Homo sapiens
  Table A; Target 63883; HLA-A*03:01; PKHD1; ENSG00000170927; TAA
MSSGIKTPK

SEQ ID NO: 63884 - protein, 9 aa, Homo sapiens
  Table A; Target 63884; HLA-A*03:02; PKHD1; ENSG00000170927; TAA
MSSGIKTPK

SEQ ID NO: 63885 - protein, 9 aa, Homo sapiens
  Table A; Target 63885; HLA-A*11:01; PKHD1; ENSG00000170927; TAA
MSSGIKTPK

SEQ ID NO: 63886 - protein, 10 aa, Homo sapiens
  Table A; Target 63886; HLA-B*57:01; PKHD1; ENSG00000170927; TAA
MTQPAWSTIW

SEQ ID NO: 63887 - protein, 9 aa, Homo sapiens
  Table A; Target 63887; HLA-A*26:01; PKHD1; ENSG00000170927; TAA
MTVETISKV

SEQ ID NO: 63888 - protein, 8 aa, Homo sapiens
  Table A; Target 63888; HLA-C*01:02; PKHD1; ENSG00000170927; TAA
MVIAGGEL

SEQ ID NO: 63889 - protein, 8 aa, Homo sapiens
  Table A; Target 63889; HLA-C*03:03; PKHD1; ENSG00000170927; TAA
MVIAGGEL

SEQ ID NO: 63890 - protein, 8 aa, Homo sapiens
  Table A; Target 63890; HLA-C*03:04; PKHD1; ENSG00000170927; TAA
MVIAGGEL

SEQ ID NO: 63891 - protein, 8 aa, Homo sapiens
  Table A; Target 63891; HLA-C*05:01; PKHD1; ENSG00000170927; TAA
MVIAGGEL

SEQ ID NO: 63892 - protein, 8 aa, Homo sapiens
  Table A; Target 63892; HLA-C*14:02; PKHD1; ENSG00000170927; TAA
MVIAGGEL

SEQ ID NO: 63893 - protein, 9 aa, Homo sapiens
  Table A; Target 63893; HLA-A*03:02; PKHD1; ENSG00000170927; TAA
MVIAGGELK

SEQ ID NO: 63894 - protein, 9 aa, Homo sapiens
  Table A; Target 63894; HLA-A*11:01; PKHD1; ENSG00000170927; TAA
MVIAGGELK

SEQ ID NO: 63895 - protein, 9 aa, Homo sapiens
  Table A; Target 63895; HLA-A*25:01; PKHD1; ENSG00000170927; TAA
MVKNTTCDW

SEQ ID NO: 63896 - protein, 10 aa, Homo sapiens
  Table A; Target 63896; HLA-A*25:01; PKHD1; ENSG00000170927; TAA
MVSNTTFVNF

SEQ ID NO: 63897 - protein, 9 aa, Homo sapiens
  Table A; Target 63897; HLA-B*56:01; PKHD1; ENSG00000170927; TAA
MVVPALRSV

SEQ ID NO: 63898 - protein, 8 aa, Homo sapiens
  Table A; Target 63898; HLA-C*05:01; PKHD1; ENSG00000170927; TAA
NADDFTSR

SEQ ID NO: 63899 - protein, 9 aa, Homo sapiens
  Table A; Target 63899; HLA-A*01:01; PKHD1; ENSG00000170927; TAA
NADDFTSRY

SEQ ID NO: 63900 - protein, 9 aa, Homo sapiens
  Table A; Target 63900; HLA-C*05:01; PKHD1; ENSG00000170927; TAA
NADDFTSRY

SEQ ID NO: 63901 - protein, 10 aa, Homo sapiens
  Table A; Target 63901; HLA-C*03:04; PKHD1; ENSG00000170927; TAA
NADDFTSRYL

SEQ ID NO: 63902 - protein, 10 aa, Homo sapiens
  Table A; Target 63902; HLA-C*05:01; PKHD1; ENSG00000170927; TAA
NADDFTSRYL

SEQ ID NO: 63903 - protein, 8 aa, Homo sapiens
  Table A; Target 63903; HLA-C*05:01; PKHD1; ENSG00000170927; TAA
NAENSGIM

SEQ ID NO: 63904 - protein, 9 aa, Homo sapiens
  Table A; Target 63904; HLA-C*01:02; PKHD1; ENSG00000170927; TAA
NAPEGNLQH

SEQ ID NO: 63905 - protein, 10 aa, Homo sapiens
  Table A; Target 63905; HLA-A*68:01; PKHD1; ENSG00000170927; TAA
NASHVVCQTR

SEQ ID NO: 63906 - protein, 9 aa, Homo sapiens
  Table A; Target 63906; HLA-C*04:01; PKHD1; ENSG00000170927; TAA
NCDVETQSF

SEQ ID NO: 63907 - protein, 9 aa, Homo sapiens
  Table A; Target 63907; HLA-C*05:01; PKHD1; ENSG00000170927; TAA
NCDVETQSF

SEQ ID NO: 63908 - protein, 9 aa, Homo sapiens
  Table A; Target 63908; HLA-A*23:01; PKHD1; ENSG00000170927; TAA
NELPVQPQL

SEQ ID NO: 63909 - protein, 9 aa, Homo sapiens
  Table A; Target 63909; HLA-A*30:01; PKHD1; ENSG00000170927; TAA
NELPVQPQL

SEQ ID NO: 63910 - protein, 9 aa, Homo sapiens
  Table A; Target 63910; HLA-B*18:01; PKHD1; ENSG00000170927; TAA
NELPVQPQL

SEQ ID NO: 63911 - protein, 9 aa, Homo sapiens
  Table A; Target 63911; HLA-B*40:01; PKHD1; ENSG00000170927; TAA
NELPVQPQL

SEQ ID NO: 63912 - protein, 9 aa, Homo sapiens
  Table A; Target 63912; HLA-B*44:02; PKHD1; ENSG00000170927; TAA
NELPVQPQL

SEQ ID NO: 63913 - protein, 9 aa, Homo sapiens
  Table A; Target 63913; HLA-B*44:03; PKHD1; ENSG00000170927; TAA
NELPVQPQL

SEQ ID NO: 63914 - protein, 9 aa, Homo sapiens
  Table A; Target 63914; HLA-B*49:01; PKHD1; ENSG00000170927; TAA
NELPVQPQL

SEQ ID NO: 63915 - protein, 10 aa, Homo sapiens
  Table A; Target 63915; HLA-B*49:01; PKHD1; ENSG00000170927; TAA
NELPVQPQLV

SEQ ID NO: 63916 - protein, 8 aa, Homo sapiens
  Table A; Target 63916; HLA-B*18:01; PKHD1; ENSG00000170927; TAA
NESIGANY

SEQ ID NO: 63917 - protein, 9 aa, Homo sapiens
  Table A; Target 63917; HLA-B*18:01; PKHD1; ENSG00000170927; TAA
NESIGANYF

SEQ ID NO: 63918 - protein, 9 aa, Homo sapiens
  Table A; Target 63918; HLA-B*37:01; PKHD1; ENSG00000170927; TAA
NESIGANYF

SEQ ID NO: 63919 - protein, 9 aa, Homo sapiens
  Table A; Target 63919; HLA-B*44:02; PKHD1; ENSG00000170927; TAA
NESIGANYF

SEQ ID NO: 63920 - protein, 9 aa, Homo sapiens
  Table A; Target 63920; HLA-B*44:03; PKHD1; ENSG00000170927; TAA
NESIGANYF

SEQ ID NO: 63921 - protein, 8 aa, Homo sapiens
  Table A; Target 63921; HLA-C*14:02; PKHD1; ENSG00000170927; TAA
NFAPGNYL

SEQ ID NO: 63922 - protein, 9 aa, Homo sapiens
  Table A; Target 63922; HLA-A*23:01; PKHD1; ENSG00000170927; TAA
NFAPGNYLL

SEQ ID NO: 63923 - protein, 8 aa, Homo sapiens
  Table A; Target 63923; HLA-B*35:01; PKHD1; ENSG00000170927; TAA
NFDYGAML

SEQ ID NO: 63924 - protein, 8 aa, Homo sapiens
  Table A; Target 63924; HLA-B*35:03; PKHD1; ENSG00000170927; TAA
NFDYGAML

SEQ ID NO: 63925 - protein, 8 aa, Homo sapiens
  Table A; Target 63925; HLA-C*04:01; PKHD1; ENSG00000170927; TAA
NFDYGAML

SEQ ID NO: 63926 - protein, 8 aa, Homo sapiens
  Table A; Target 63926; HLA-A*01:01; PKHD1; ENSG00000170927; TAA
NIMDNLLY

SEQ ID NO: 63927 - protein, 9 aa, Homo sapiens
  Table A; Target 63927; HLA-A*02:01; PKHD1; ENSG00000170927; TAA
NIMDNLLYV

SEQ ID NO: 63928 - protein, 9 aa, Homo sapiens
  Table A; Target 63928; HLA-A*02:03; PKHD1; ENSG00000170927; TAA
NIMDNLLYV

SEQ ID NO: 63929 - protein, 9 aa, Homo sapiens
  Table A; Target 63929; HLA-A*02:04; PKHD1; ENSG00000170927; TAA
NIMDNLLYV

SEQ ID NO: 63930 - protein, 9 aa, Homo sapiens
  Table A; Target 63930; HLA-A*02:07; PKHD1; ENSG00000170927; TAA
NIMDNLLYV

SEQ ID NO: 63931 - protein, 8 aa, Homo sapiens
  Table A; Target 63931; HLA-B*15:03; PKHD1; ENSG00000170927; TAA
NKTTTVNY

SEQ ID NO: 63932 - protein, 9 aa, Homo sapiens
  Table A; Target 63932; HLA-A*02:03; PKHD1; ENSG00000170927; TAA
NLAHRVITA

SEQ ID NO: 63933 - protein, 9 aa, Homo sapiens
  Table A; Target 63933; HLA-A*02:04; PKHD1; ENSG00000170927; TAA
NLSNSVILL

SEQ ID NO: 63934 - protein, 9 aa, Homo sapiens
  Table A; Target 63934; HLA-A*02:01; PKHD1; ENSG00000170927; TAA
NLTGVNPAA

SEQ ID NO: 63935 - protein, 9 aa, Homo sapiens
  Table A; Target 63935; HLA-B*55:01; PKHD1; ENSG00000170927; TAA
NLTGVNPAA

SEQ ID NO: 63936 - protein, 9 aa, Homo sapiens
  Table A; Target 63936; HLA-A*02:01; PKHD1; ENSG00000170927; TAA
NLVESVSVV

SEQ ID NO: 63937 - protein, 9 aa, Homo sapiens
  Table A; Target 63937; HLA-A*02:03; PKHD1; ENSG00000170927; TAA
NLVESVSVV

SEQ ID NO: 63938 - protein, 10 aa, Homo sapiens
  Table A; Target 63938; HLA-A*29:02; PKHD1; ENSG00000170927; TAA
NLWINRSLQY

SEQ ID NO: 63939 - protein, 9 aa, Homo sapiens
  Table A; Target 63939; HLA-A*23:01; PKHD1; ENSG00000170927; TAA
NMSVVLQQF

SEQ ID NO: 63940 - protein, 9 aa, Homo sapiens
  Table A; Target 63940; HLA-A*24:02; PKHD1; ENSG00000170927; TAA
NMSVVLQQF

SEQ ID NO: 63941 - protein, 9 aa, Homo sapiens
  Table A; Target 63941; HLA-A*33:01; PKHD1; ENSG00000170927; TAA
NNADDFTSR

SEQ ID NO: 63942 - protein, 9 aa, Homo sapiens
  Table A; Target 63942; HLA-A*33:03; PKHD1; ENSG00000170927; TAA
NNADDFTSR

SEQ ID NO: 63943 - protein, 9 aa, Homo sapiens
  Table A; Target 63943; HLA-A*68:01; PKHD1; ENSG00000170927; TAA
NNADDFTSR

SEQ ID NO: 63944 - protein, 9 aa, Homo sapiens
  Table A; Target 63944; HLA-C*07:06; PKHD1; ENSG00000170927; TAA
NNADDFTSR

SEQ ID NO: 63945 - protein, 10 aa, Homo sapiens
  Table A; Target 63945; HLA-A*26:01; PKHD1; ENSG00000170927; TAA
NNADDFTSRY

SEQ ID NO: 63946 - protein, 10 aa, Homo sapiens
  Table A; Target 63946; HLA-A*30:02; PKHD1; ENSG00000170927; TAA
NNADDFTSRY

SEQ ID NO: 63947 - protein, 9 aa, Homo sapiens
  Table A; Target 63947; HLA-B*07:02; PKHD1; ENSG00000170927; TAA
NPAAATRVV

SEQ ID NO: 63948 - protein, 9 aa, Homo sapiens
  Table A; Target 63948; HLA-B*51:01; PKHD1; ENSG00000170927; TAA
NPAAATRVV

SEQ ID NO: 63949 - protein, 9 aa, Homo sapiens
  Table A; Target 63949; HLA-B*56:01; PKHD1; ENSG00000170927; TAA
NPAAATRVV

SEQ ID NO: 63950 - protein, 9 aa, Homo sapiens
  Table A; Target 63950; HLA-C*07:02; PKHD1; ENSG00000170927; TAA
NPAAATRVV

SEQ ID NO: 63951 - protein, 10 aa, Homo sapiens
  Table A; Target 63951; HLA-B*35:01; PKHD1; ENSG00000170927; TAA
NPAAATRVVY

SEQ ID NO: 63952 - protein, 10 aa, Homo sapiens
  Table A; Target 63952; HLA-B*55:01; PKHD1; ENSG00000170927; TAA
NPAAATRVVY

SEQ ID NO: 63953 - protein, 10 aa, Homo sapiens
  Table A; Target 63953; HLA-C*03:03; PKHD1; ENSG00000170927; TAA
NPAAATRVVY

SEQ ID NO: 63954 - protein, 8 aa, Homo sapiens
  Table A; Target 63954; HLA-B*18:01; PKHD1; ENSG00000170927; TAA
NPDVVTTY

SEQ ID NO: 63955 - protein, 8 aa, Homo sapiens
  Table A; Target 63955; HLA-B*35:01; PKHD1; ENSG00000170927; TAA
NPDVVTTY

SEQ ID NO: 63956 - protein, 8 aa, Homo sapiens
  Table A; Target 63956; HLA-B*55:01; PKHD1; ENSG00000170927; TAA
NPDVVTTY

SEQ ID NO: 63957 - protein, 8 aa, Homo sapiens
  Table A; Target 63957; HLA-C*03:03; PKHD1; ENSG00000170927; TAA
NPDVVTTY

SEQ ID NO: 63958 - protein, 9 aa, Homo sapiens
  Table A; Target 63958; HLA-B*07:02; PKHD1; ENSG00000170927; TAA
NPDVVTTYL

SEQ ID NO: 63959 - protein, 9 aa, Homo sapiens
  Table A; Target 63959; HLA-B*35:01; PKHD1; ENSG00000170927; TAA
NPDVVTTYL

SEQ ID NO: 63960 - protein, 9 aa, Homo sapiens
  Table A; Target 63960; HLA-B*35:03; PKHD1; ENSG00000170927; TAA
NPDVVTTYL

SEQ ID NO: 63961 - protein, 9 aa, Homo sapiens
  Table A; Target 63961; HLA-C*04:01; PKHD1; ENSG00000170927; TAA
NPDVVTTYL

SEQ ID NO: 63962 - protein, 9 aa, Homo sapiens
  Table A; Target 63962; HLA-C*05:01; PKHD1; ENSG00000170927; TAA
NPDVVTTYL

SEQ ID NO: 63963 - protein, 9 aa, Homo sapiens
  Table A; Target 63963; HLA-B*35:03; PKHD1; ENSG00000170927; TAA
NPLEKEQKL

SEQ ID NO: 63964 - protein, 9 aa, Homo sapiens
  Table A; Target 63964; HLA-B*07:02; PKHD1; ENSG00000170927; TAA
NPRGGRIGI

SEQ ID NO: 63965 - protein, 9 aa, Homo sapiens
  Table A; Target 63965; HLA-A*33:01; PKHD1; ENSG00000170927; TAA
NQHTQVVVR

SEQ ID NO: 63966 - protein, 9 aa, Homo sapiens
  Table A; Target 63966; HLA-A*33:03; PKHD1; ENSG00000170927; TAA
NQHTQVVVR

SEQ ID NO: 63967 - protein, 9 aa, Homo sapiens
  Table A; Target 63967; HLA-A*68:01; PKHD1; ENSG00000170927; TAA
NQHTQVVVR

SEQ ID NO: 63968 - protein, 9 aa, Homo sapiens
  Table A; Target 63968; HLA-C*07:06; PKHD1; ENSG00000170927; TAA
NQHTQVVVR

SEQ ID NO: 63969 - protein, 9 aa, Homo sapiens
  Table A; Target 63969; HLA-B*38:01; PKHD1; ENSG00000170927; TAA
NQTSQAPLL

SEQ ID NO: 63970 - protein, 9 aa, Homo sapiens
  Table A; Target 63970; HLA-B*39:01; PKHD1; ENSG00000170927; TAA
NQTSQAPLL

SEQ ID NO: 63971 - protein, 9 aa, Homo sapiens
  Table A; Target 63971; HLA-B*07:02; PKHD1; ENSG00000170927; TAA
NSFSRGLSM

SEQ ID NO: 63972 - protein, 9 aa, Homo sapiens
  Table A; Target 63972; HLA-B*08:01; PKHD1; ENSG00000170927; TAA
NSFSRGLSM

SEQ ID NO: 63973 - protein, 9 aa, Homo sapiens
  Table A; Target 63973; HLA-C*02:02; PKHD1; ENSG00000170927; TAA
NSFSRGLSM

SEQ ID NO: 63974 - protein, 9 aa, Homo sapiens
  Table A; Target 63974; HLA-C*03:03; PKHD1; ENSG00000170927; TAA
NSFSRGLSM

SEQ ID NO: 63975 - protein, 9 aa, Homo sapiens
  Table A; Target 63975; HLA-C*03:04; PKHD1; ENSG00000170927; TAA
NSFSRGLSM

SEQ ID NO: 63976 - protein, 9 aa, Homo sapiens
  Table A; Target 63976; HLA-C*16:01; PKHD1; ENSG00000170927; TAA
NSFSRGLSM

SEQ ID NO: 63977 - protein, 9 aa, Homo sapiens
  Table A; Target 63977; HLA-C*16:01; PKHD1; ENSG00000170927; TAA
NSHRASPPM

SEQ ID NO: 63978 - protein, 9 aa, Homo sapiens
  Table A; Target 63978; HLA-A*01:01; PKHD1; ENSG00000170927; TAA
NSQLRQLTY

SEQ ID NO: 63979 - protein, 9 aa, Homo sapiens
  Table A; Target 63979; HLA-B*58:01; PKHD1; ENSG00000170927; TAA
NSQLRQLTY

SEQ ID NO: 63980 - protein, 9 aa, Homo sapiens
  Table A; Target 63980; HLA-C*16:01; PKHD1; ENSG00000170927; TAA
NSQLRQLTY

SEQ ID NO: 63981 - protein, 9 aa, Homo sapiens
  Table A; Target 63981; HLA-C*16:02; PKHD1; ENSG00000170927; TAA
NSQLRQLTY

SEQ ID NO: 63982 - protein, 8 aa, Homo sapiens
  Table A; Target 63982; HLA-C*16:01; PKHD1; ENSG00000170927; TAA
NSSFGRVV

SEQ ID NO: 63983 - protein, 9 aa, Homo sapiens
  Table A; Target 63983; HLA-A*68:02; PKHD1; ENSG00000170927; TAA
NTIGLLAVV

SEQ ID NO: 63984 - protein, 10 aa, Homo sapiens
  Table A; Target 63984; HLA-A*26:01; PKHD1; ENSG00000170927; TAA
NTIGLLAVVY

SEQ ID NO: 63985 - protein, 10 aa, Homo sapiens
  Table A; Target 63985; HLA-A*29:02; PKHD1; ENSG00000170927; TAA
NTIGLLAVVY

SEQ ID NO: 63986 - protein, 10 aa, Homo sapiens
  Table A; Target 63986; HLA-B*35:01; PKHD1; ENSG00000170927; TAA
NTIGLLAVVY

SEQ ID NO: 63987 - protein, 9 aa, Homo sapiens
  Table A; Target 63987; HLA-C*01:02; PKHD1; ENSG00000170927; TAA
NTPEVSYDL

SEQ ID NO: 63988 - protein, 9 aa, Homo sapiens
  Table A; Target 63988; HLA-C*07:06; PKHD1; ENSG00000170927; TAA
NVATSNSSR

SEQ ID NO: 63989 - protein, 9 aa, Homo sapiens
  Table A; Target 63989; HLA-A*02:04; PKHD1; ENSG00000170927; TAA
NVNMVVPAL

SEQ ID NO: 63990 - protein, 9 aa, Homo sapiens
  Table A; Target 63990; HLA-A*25:01; PKHD1; ENSG00000170927; TAA
NVNMVVPAL

SEQ ID NO: 63991 - protein, 9 aa, Homo sapiens
  Table A; Target 63991; HLA-A*26:01; PKHD1; ENSG00000170927; TAA
NVNMVVPAL

SEQ ID NO: 63992 - protein, 9 aa, Homo sapiens
  Table A; Target 63992; HLA-A*68:02; PKHD1; ENSG00000170927; TAA
NVNMVVPAL

SEQ ID NO: 63993 - protein, 9 aa, Homo sapiens
  Table A; Target 63993; HLA-B*35:01; PKHD1; ENSG00000170927; TAA
NVNMVVPAL

SEQ ID NO: 63994 - protein, 9 aa, Homo sapiens
  Table A; Target 63994; HLA-B*35:03; PKHD1; ENSG00000170927; TAA
NVNMVVPAL

SEQ ID NO: 63995 - protein, 9 aa, Homo sapiens
  Table A; Target 63995; HLA-B*39:01; PKHD1; ENSG00000170927; TAA
NVNMVVPAL

SEQ ID NO: 63996 - protein, 9 aa, Homo sapiens
  Table A; Target 63996; HLA-B*40:01; PKHD1; ENSG00000170927; TAA
NVNMVVPAL

SEQ ID NO: 63997 - protein, 9 aa, Homo sapiens
  Table A; Target 63997; HLA-C*01:02; PKHD1; ENSG00000170927; TAA
NVNMVVPAL

SEQ ID NO: 63998 - protein, 9 aa, Homo sapiens
  Table A; Target 63998; HLA-C*07:06; PKHD1; ENSG00000170927; TAA
NVNMVVPAL

SEQ ID NO: 63999 - protein, 10 aa, Homo sapiens
  Table A; Target 63999; HLA-A*68:01; PKHD1; ENSG00000170927; TAA
NVNMVVPALR

SEQ ID NO: 64000 - protein, 10 aa, Homo sapiens
  Table A; Target 64000; HLA-C*07:06; PKHD1; ENSG00000170927; TAA
NVNMVVPALR

SEQ ID NO: 64001 - protein, 9 aa, Homo sapiens
  Table A; Target 64001; HLA-A*03:02; PKHD1; ENSG00000170927; TAA
NVSFSVFNK

SEQ ID NO: 64002 - protein, 9 aa, Homo sapiens
  Table A; Target 64002; HLA-A*11:01; PKHD1; ENSG00000170927; TAA
NVSFSVFNK

SEQ ID NO: 64003 - protein, 9 aa, Homo sapiens
  Table A; Target 64003; HLA-B*54:01; PKHD1; ENSG00000170927; TAA
NVSSQPIPA

SEQ ID NO: 64004 - protein, 9 aa, Homo sapiens
  Table A; Target 64004; HLA-B*56:01; PKHD1; ENSG00000170927; TAA
NVSSQPIPA

SEQ ID NO: 64005 - protein, 9 aa, Homo sapiens
  Table A; Target 64005; HLA-A*30:02; PKHD1; ENSG00000170927; TAA
NVTVIRGDY

SEQ ID NO: 64006 - protein, 11 aa, Homo sapiens
  Table A; Target 64006; HLA-A*25:01; PKHD1; ENSG00000170927; TAA
NVVAGSERLGF

SEQ ID NO: 64007 - protein, 9 aa, Homo sapiens
  Table A; Target 64007; HLA-A*23:01; PKHD1; ENSG00000170927; TAA
NYFNIMDNL

SEQ ID NO: 64008 - protein, 9 aa, Homo sapiens
  Table A; Target 64008; HLA-A*24:02; PKHD1; ENSG00000170927; TAA
NYFNIMDNL

SEQ ID NO: 64009 - protein, 11 aa, Homo sapiens
  Table A; Target 64009; HLA-A*29:02; PKHD1; ENSG00000170927; TAA
NYFNIMDNLLY

SEQ ID NO: 64010 - protein, 9 aa, Homo sapiens
  Table A; Target 64010; HLA-A*30:02; PKHD1; ENSG00000170927; TAA
PAAATRVVY

SEQ ID NO: 64011 - protein, 9 aa, Homo sapiens
  Table A; Target 64011; HLA-B*15:03; PKHD1; ENSG00000170927; TAA
PAAATRVVY

SEQ ID NO: 64012 - protein, 9 aa, Homo sapiens
  Table A; Target 64012; HLA-C*02:02; PKHD1; ENSG00000170927; TAA
PAAATRVVY

SEQ ID NO: 64013 - protein, 9 aa, Homo sapiens
  Table A; Target 64013; HLA-C*16:01; PKHD1; ENSG00000170927; TAA
PAAATRVVY

SEQ ID NO: 64014 - protein, 9 aa, Homo sapiens
  Table A; Target 64014; HLA-B*40:01; PKHD1; ENSG00000170927; TAA
PEEPSQVQL

SEQ ID NO: 64015 - protein, 8 aa, Homo sapiens
  Table A; Target 64015; HLA-B*49:01; PKHD1; ENSG00000170927; TAA
PEVQVLNV

SEQ ID NO: 64016 - protein, 9 aa, Homo sapiens
  Table A; Target 64016; HLA-A*33:03; PKHD1; ENSG00000170927; TAA
PFAVLPVTR

SEQ ID NO: 64017 - protein, 9 aa, Homo sapiens
  Table A; Target 64017; HLA-A*23:01; PKHD1; ENSG00000170927; TAA
PFFPYGVKF

SEQ ID NO: 64018 - protein, 9 aa, Homo sapiens
  Table A; Target 64018; HLA-A*24:02; PKHD1; ENSG00000170927; TAA
PFFPYGVKF

SEQ ID NO: 64019 - protein, 9 aa, Homo sapiens
  Table A; Target 64019; HLA-B*15:03; PKHD1; ENSG00000170927; TAA
PGAPAQQVY

SEQ ID NO: 64020 - protein, 10 aa, Homo sapiens
  Table A; Target 64020; HLA-A*01:01; PKHD1; ENSG00000170927; TAA
PLAQETGLFY

SEQ ID NO: 64021 - protein, 10 aa, Homo sapiens
  Table A; Target 64021; HLA-A*25:01; PKHD1; ENSG00000170927; TAA
PVFTSEPNQW

SEQ ID NO: 64022 - protein, 9 aa, Homo sapiens
  Table A; Target 64022; HLA-A*26:01; PKHD1; ENSG00000170927; TAA
PVVSVTSGF

SEQ ID NO: 64023 - protein, 8 aa, Homo sapiens
  Table A; Target 64023; HLA-C*05:01; PKHD1; ENSG00000170927; TAA
QADSQASL

SEQ ID NO: 64024 - protein, 10 aa, Homo sapiens
  Table A; Target 64024; HLA-B*38:01; PKHD1; ENSG00000170927; TAA
QADSQASLHF

SEQ ID NO: 64025 - protein, 10 aa, Homo sapiens
  Table A; Target 64025; HLA-C*05:01; PKHD1; ENSG00000170927; TAA
QADSQASLHF

SEQ ID NO: 64026 - protein, 9 aa, Homo sapiens
  Table A; Target 64026; HLA-B*35:03; PKHD1; ENSG00000170927; TAA
QAYTVTNNL

SEQ ID NO: 64027 - protein, 9 aa, Homo sapiens
  Table A; Target 64027; HLA-B*51:01; PKHD1; ENSG00000170927; TAA
QAYTVTNNL

SEQ ID NO: 64028 - protein, 9 aa, Homo sapiens
  Table A; Target 64028; HLA-C*02:02; PKHD1; ENSG00000170927; TAA
QAYTVTNNL

SEQ ID NO: 64029 - protein, 9 aa, Homo sapiens
  Table A; Target 64029; HLA-C*03:03; PKHD1; ENSG00000170927; TAA
QAYTVTNNL

SEQ ID NO: 64030 - protein, 9 aa, Homo sapiens
  Table A; Target 64030; HLA-C*03:04; PKHD1; ENSG00000170927; TAA
QAYTVTNNL

SEQ ID NO: 64031 - protein, 9 aa, Homo sapiens
  Table A; Target 64031; HLA-C*05:01; PKHD1; ENSG00000170927; TAA
QAYTVTNNL

SEQ ID NO: 64032 - protein, 9 aa, Homo sapiens
  Table A; Target 64032; HLA-C*16:02; PKHD1; ENSG00000170927; TAA
QAYTVTNNL

SEQ ID NO: 64033 - protein, 8 aa, Homo sapiens
  Table A; Target 64033; HLA-B*18:01; PKHD1; ENSG00000170927; TAA
QDVTFSSF

SEQ ID NO: 64034 - protein, 8 aa, Homo sapiens
  Table A; Target 64034; HLA-B*37:01; PKHD1; ENSG00000170927; TAA
QDVTFSSF

SEQ ID NO: 64035 - protein, 10 aa, Homo sapiens
  Table A; Target 64035; HLA-B*27:02; PKHD1; ENSG00000170927; TAA
QDVTFSSFVK

SEQ ID NO: 64036 - protein, 10 aa, Homo sapiens
  Table A; Target 64036; HLA-B*40:01; PKHD1; ENSG00000170927; TAA
QEANAPEGNL

SEQ ID NO: 64037 - protein, 9 aa, Homo sapiens
  Table A; Target 64037; HLA-B*40:01; PKHD1; ENSG00000170927; TAA
QEDHGLGTL

SEQ ID NO: 64038 - protein, 9 aa, Homo sapiens
  Table A; Target 64038; HLA-A*30:01; PKHD1; ENSG00000170927; TAA
QEQLLRYQL

SEQ ID NO: 64039 - protein, 9 aa, Homo sapiens
  Table A; Target 64039; HLA-B*37:01; PKHD1; ENSG00000170927; TAA
QEQLLRYQL

SEQ ID NO: 64040 - protein, 9 aa, Homo sapiens
  Table A; Target 64040; HLA-B*40:01; PKHD1; ENSG00000170927; TAA
QEQLLRYQL

SEQ ID NO: 64041 - protein, 9 aa, Homo sapiens
  Table A; Target 64041; HLA-B*44:02; PKHD1; ENSG00000170927; TAA
QEQLLRYQL

SEQ ID NO: 64042 - protein, 9 aa, Homo sapiens
  Table A; Target 64042; HLA-B*44:03; PKHD1; ENSG00000170927; TAA
QEQLLRYQL

SEQ ID NO: 64043 - protein, 8 aa, Homo sapiens
  Table A; Target 64043; HLA-B*49:01; PKHD1; ENSG00000170927; TAA
QETGLFYV

SEQ ID NO: 64044 - protein, 9 aa, Homo sapiens
  Table A; Target 64044; HLA-A*23:01; PKHD1; ENSG00000170927; TAA
QFQVLGQAF

SEQ ID NO: 64045 - protein, 9 aa, Homo sapiens
  Table A; Target 64045; HLA-C*14:02; PKHD1; ENSG00000170927; TAA
QFQVLGQAF

SEQ ID NO: 64046 - protein, 9 aa, Homo sapiens
  Table A; Target 64046; HLA-A*32:01; PKHD1; ENSG00000170927; TAA
QGCTVRNSF

SEQ ID NO: 64047 - protein, 9 aa, Homo sapiens
  Table A; Target 64047; HLA-A*03:02; PKHD1; ENSG00000170927; TAA
QGQGGFTVK

SEQ ID NO: 64048 - protein, 9 aa, Homo sapiens
  Table A; Target 64048; HLA-A*11:01; PKHD1; ENSG00000170927; TAA
QGQGGFTVK

SEQ ID NO: 64049 - protein, 9 aa, Homo sapiens
  Table A; Target 64049; HLA-A*30:02; PKHD1; ENSG00000170927; TAA
QGVDLHIQY

SEQ ID NO: 64050 - protein, 9 aa, Homo sapiens
  Table A; Target 64050; HLA-B*35:01; PKHD1; ENSG00000170927; TAA
QGVDLHIQY

SEQ ID NO: 64051 - protein, 9 aa, Homo sapiens
  Table A; Target 64051; HLA-B*38:01; PKHD1; ENSG00000170927; TAA
QHTQVVVRV

SEQ ID NO: 64052 - protein, 9 aa, Homo sapiens
  Table A; Target 64052; HLA-B*39:01; PKHD1; ENSG00000170927; TAA
QHTQVVVRV

SEQ ID NO: 64053 - protein, 9 aa, Homo sapiens
  Table A; Target 64053; HLA-C*16:02; PKHD1; ENSG00000170927; TAA
QHTQVVVRV

SEQ ID NO: 64054 - protein, 9 aa, Homo sapiens
  Table A; Target 64054; HLA-A*30:02; PKHD1; ENSG00000170927; TAA
QITLYGSSY

SEQ ID NO: 64055 - protein, 9 aa, Homo sapiens
  Table A; Target 64055; HLA-B*15:01; PKHD1; ENSG00000170927; TAA
QITLYGSSY

SEQ ID NO: 64056 - protein, 9 aa, Homo sapiens
  Table A; Target 64056; HLA-B*15:03; PKHD1; ENSG00000170927; TAA
QITLYGSSY

SEQ ID NO: 64057 - protein, 9 aa, Homo sapiens
  Table A; Target 64057; HLA-C*14:02; PKHD1; ENSG00000170927; TAA
QITLYGSSY

SEQ ID NO: 64058 - protein, 9 aa, Homo sapiens
  Table A; Target 64058; HLA-A*02:01; PKHD1; ENSG00000170927; TAA
QLLESWPYL

SEQ ID NO: 64059 - protein, 9 aa, Homo sapiens
  Table A; Target 64059; HLA-A*02:04; PKHD1; ENSG00000170927; TAA
QLLESWPYL

SEQ ID NO: 64060 - protein, 11 aa, Homo sapiens
  Table A; Target 64060; HLA-A*30:02; PKHD1; ENSG00000170927; TAA
QNNADDFTSRY

SEQ ID NO: 64061 - protein, 9 aa, Homo sapiens
  Table A; Target 64061; HLA-B*54:01; PKHD1; ENSG00000170927; TAA
QPIPANATA

SEQ ID NO: 64062 - protein, 9 aa, Homo sapiens
  Table A; Target 64062; HLA-B*56:01; PKHD1; ENSG00000170927; TAA
QPIPANATA

SEQ ID NO: 64063 - protein, 11 aa, Homo sapiens
  Table A; Target 64063; HLA-B*07:02; PKHD1; ENSG00000170927; TAA
QPSDGEVGNEL

SEQ ID NO: 64064 - protein, 9 aa, Homo sapiens
  Table A; Target 64064; HLA-B*13:02; PKHD1; ENSG00000170927; TAA
QQFAVMPRI

SEQ ID NO: 64065 - protein, 9 aa, Homo sapiens
  Table A; Target 64065; HLA-A*32:01; PKHD1; ENSG00000170927; TAA
QQLPGQSRL

SEQ ID NO: 64066 - protein, 9 aa, Homo sapiens
  Table A; Target 64066; HLA-B*15:01; PKHD1; ENSG00000170927; TAA
QQLPGQSRL

SEQ ID NO: 64067 - protein, 9 aa, Homo sapiens
  Table A; Target 64067; HLA-B*15:03; PKHD1; ENSG00000170927; TAA
QQLPGQSRL

SEQ ID NO: 64068 - protein, 9 aa, Homo sapiens
  Table A; Target 64068; HLA-B*38:01; PKHD1; ENSG00000170927; TAA
QQLPGQSRL

SEQ ID NO: 64069 - protein, 9 aa, Homo sapiens
  Table A; Target 64069; HLA-B*13:02; PKHD1; ENSG00000170927; TAA
QQTCLTVNI

SEQ ID NO: 64070 - protein, 9 aa, Homo sapiens
  Table A; Target 64070; HLA-A*02:01; PKHD1; ENSG00000170927; TAA
QQTGVLENV

SEQ ID NO: 64071 - protein, 9 aa, Homo sapiens
  Table A; Target 64071; HLA-A*30:01; PKHD1; ENSG00000170927; TAA
QQTGVLENV

SEQ ID NO: 64072 - protein, 9 aa, Homo sapiens
  Table A; Target 64072; HLA-B*13:02; PKHD1; ENSG00000170927; TAA
QQTGVLENV

SEQ ID NO: 64073 - protein, 9 aa, Homo sapiens
  Table A; Target 64073; HLA-C*06:02; PKHD1; ENSG00000170927; TAA
QQTGVLENV

SEQ ID NO: 64074 - protein, 10 aa, Homo sapiens
  Table A; Target 64074; HLA-B*38:01; PKHD1; ENSG00000170927; TAA
QQTGVLENVL

SEQ ID NO: 64075 - protein, 10 aa, Homo sapiens
  Table A; Target 64075; HLA-B*39:01; PKHD1; ENSG00000170927; TAA
QQTGVLENVL

SEQ ID NO: 64076 - protein, 9 aa, Homo sapiens
  Table A; Target 64076; HLA-B*27:05; PKHD1; ENSG00000170927; TAA
QRLPEVQVL

SEQ ID NO: 64077 - protein, 9 aa, Homo sapiens
  Table A; Target 64077; HLA-B*38:01; PKHD1; ENSG00000170927; TAA
QRLPEVQVL

SEQ ID NO: 64078 - protein, 9 aa, Homo sapiens
  Table A; Target 64078; HLA-B*39:01; PKHD1; ENSG00000170927; TAA
QRLPEVQVL

SEQ ID NO: 64079 - protein, 9 aa, Homo sapiens
  Table A; Target 64079; HLA-C*16:04; PKHD1; ENSG00000170927; TAA
QRLPEVQVL

SEQ ID NO: 64080 - protein, 8 aa, Homo sapiens
  Table A; Target 64080; HLA-C*05:01; PKHD1; ENSG00000170927; TAA
QSDDILTF

SEQ ID NO: 64081 - protein, 9 aa, Homo sapiens
  Table A; Target 64081; HLA-B*35:03; PKHD1; ENSG00000170927; TAA
QSFQGNVSL

SEQ ID NO: 64082 - protein, 9 aa, Homo sapiens
  Table A; Target 64082; HLA-B*39:01; PKHD1; ENSG00000170927; TAA
QSFQGNVSL

SEQ ID NO: 64083 - protein, 9 aa, Homo sapiens
  Table A; Target 64083; HLA-B*40:01; PKHD1; ENSG00000170927; TAA
QSFQGNVSL

SEQ ID NO: 64084 - protein, 9 aa, Homo sapiens
  Table A; Target 64084; HLA-B*58:01; PKHD1; ENSG00000170927; TAA
QSFQGNVSL

SEQ ID NO: 64085 - protein, 9 aa, Homo sapiens
  Table A; Target 64085; HLA-C*01:02; PKHD1; ENSG00000170927; TAA
QSFQGNVSL

SEQ ID NO: 64086 - protein, 9 aa, Homo sapiens
  Table A; Target 64086; HLA-C*03:03; PKHD1; ENSG00000170927; TAA
QSFQGNVSL

SEQ ID NO: 64087 - protein, 9 aa, Homo sapiens
  Table A; Target 64087; HLA-C*03:04; PKHD1; ENSG00000170927; TAA
QSFQGNVSL

SEQ ID NO: 64088 - protein, 9 aa, Homo sapiens
  Table A; Target 64088; HLA-C*16:01; PKHD1; ENSG00000170927; TAA
QSFQGNVSL

SEQ ID NO: 64089 - protein, 9 aa, Homo sapiens
  Table A; Target 64089; HLA-A*01:01; PKHD1; ENSG00000170927; TAA
QTDLLPVGM

SEQ ID NO: 64090 - protein, 9 aa, Homo sapiens
  Table A; Target 64090; HLA-C*04:01; PKHD1; ENSG00000170927; TAA
QTDLLPVGM

SEQ ID NO: 64091 - protein, 9 aa, Homo sapiens
  Table A; Target 64091; HLA-C*05:01; PKHD1; ENSG00000170927; TAA
QTDLLPVGM

SEQ ID NO: 64092 - protein, 9 aa, Homo sapiens
  Table A; Target 64092; HLA-A*01:01; PKHD1; ENSG00000170927; TAA
QTDQVVLIL

SEQ ID NO: 64093 - protein, 9 aa, Homo sapiens
  Table A; Target 64093; HLA-A*01:01; PKHD1; ENSG00000170927; TAA
QTPIVHQVY

SEQ ID NO: 64094 - protein, 9 aa, Homo sapiens
  Table A; Target 64094; HLA-A*29:02; PKHD1; ENSG00000170927; TAA
QTPIVHQVY

SEQ ID NO: 64095 - protein, 10 aa, Homo sapiens
  Table A; Target 64095; HLA-A*25:01; PKHD1; ENSG00000170927; TAA
QTSQAPLLSF

SEQ ID NO: 64096 - protein, 9 aa, Homo sapiens
  Table A; Target 64096; HLA-A*03:01; PKHD1; ENSG00000170927; TAA
QVLGQAFHK

SEQ ID NO: 64097 - protein, 9 aa, Homo sapiens
  Table A; Target 64097; HLA-A*03:02; PKHD1; ENSG00000170927; TAA
QVLGQAFHK

SEQ ID NO: 64098 - protein, 9 aa, Homo sapiens
  Table A; Target 64098; HLA-A*11:01; PKHD1; ENSG00000170927; TAA
QVLGQAFHK

SEQ ID NO: 64099 - protein, 9 aa, Homo sapiens
  Table A; Target 64099; HLA-A*03:01; PKHD1; ENSG00000170927; TAA
QVQVILRVK

SEQ ID NO: 64100 - protein, 9 aa, Homo sapiens
  Table A; Target 64100; HLA-A*03:02; PKHD1; ENSG00000170927; TAA
QVQVILRVK

SEQ ID NO: 64101 - protein, 9 aa, Homo sapiens
  Table A; Target 64101; HLA-A*11:01; PKHD1; ENSG00000170927; TAA
QVQVILRVK

SEQ ID NO: 64102 - protein, 9 aa, Homo sapiens
  Table A; Target 64102; HLA-B*56:01; PKHD1; ENSG00000170927; TAA
QVVLILDSA

SEQ ID NO: 64103 - protein, 10 aa, Homo sapiens
  Table A; Target 64103; HLA-A*25:01; PKHD1; ENSG00000170927; TAA
QVYLQETGNW

SEQ ID NO: 64104 - protein, 11 aa, Homo sapiens
  Table A; Target 64104; HLA-A*03:01; PKHD1; ENSG00000170927; TAA
QVYPPSGVPGK

SEQ ID NO: 64105 - protein, 11 aa, Homo sapiens
  Table A; Target 64105; HLA-A*03:02; PKHD1; ENSG00000170927; TAA
QVYPPSGVPGK

SEQ ID NO: 64106 - protein, 11 aa, Homo sapiens
  Table A; Target 64106; HLA-A*11:01; PKHD1; ENSG00000170927; TAA
QVYPPSGVPGK

SEQ ID NO: 64107 - protein, 9 aa, Homo sapiens
  Table A; Target 64107; HLA-A*23:01; PKHD1; ENSG00000170927; TAA
QYLTEVFSI

SEQ ID NO: 64108 - protein, 9 aa, Homo sapiens
  Table A; Target 64108; HLA-A*24:02; PKHD1; ENSG00000170927; TAA
QYLTEVFSI

SEQ ID NO: 64109 - protein, 9 aa, Homo sapiens
  Table A; Target 64109; HLA-A*23:01; PKHD1; ENSG00000170927; TAA
QYSATFDNF

SEQ ID NO: 64110 - protein, 9 aa, Homo sapiens
  Table A; Target 64110; HLA-A*24:02; PKHD1; ENSG00000170927; TAA
QYSATFDNF

SEQ ID NO: 64111 - protein, 9 aa, Homo sapiens
  Table A; Target 64111; HLA-C*14:02; PKHD1; ENSG00000170927; TAA
QYSATFDNF

SEQ ID NO: 64112 - protein, 9 aa, Homo sapiens
  Table A; Target 64112; HLA-A*29:02; PKHD1; ENSG00000170927; TAA
QYTHLCLAY

SEQ ID NO: 64113 - protein, 9 aa, Homo sapiens
  Table A; Target 64113; HLA-B*57:01; PKHD1; ENSG00000170927; TAA
RAADIGGLW

SEQ ID NO: 64114 - protein, 9 aa, Homo sapiens
  Table A; Target 64114; HLA-B*58:01; PKHD1; ENSG00000170927; TAA
RAADIGGLW

SEQ ID NO: 64115 - protein, 9 aa, Homo sapiens
  Table A; Target 64115; HLA-C*03:04; PKHD1; ENSG00000170927; TAA
RAFTYVSSL

SEQ ID NO: 64116 - protein, 11 aa, Homo sapiens
  Table A; Target 64116; HLA-B*58:01; PKHD1; ENSG00000170927; TAA
RASPPMTVETI

SEQ ID NO: 64117 - protein, 8 aa, Homo sapiens
  Table A; Target 64117; HLA-B*37:01; PKHD1; ENSG00000170927; TAA
RDSCTFKF

SEQ ID NO: 64118 - protein, 11 aa, Homo sapiens
  Table A; Target 64118; HLA-B*40:01; PKHD1; ENSG00000170927; TAA
REEASPVMDAL

SEQ ID NO: 64119 - protein, 10 aa, Homo sapiens
  Table A; Target 64119; HLA-B*40:01; PKHD1; ENSG00000170927; TAA
REEFSGVLQL

SEQ ID NO: 64120 - protein, 10 aa, Homo sapiens
  Table A; Target 64120; HLA-B*49:01; PKHD1; ENSG00000170927; TAA
RESFIQGCTV

SEQ ID NO: 64121 - protein, 9 aa, Homo sapiens
  Table A; Target 64121; HLA-A*30:02; PKHD1; ENSG00000170927; TAA
RGQNTTSVY

SEQ ID NO: 64122 - protein, 9 aa, Homo sapiens
  Table A; Target 64122; HLA-B*15:01; PKHD1; ENSG00000170927; TAA
RGQNTTSVY

SEQ ID NO: 64123 - protein, 9 aa, Homo sapiens
  Table A; Target 64123; HLA-B*46:01; PKHD1; ENSG00000170927; TAA
RGQNTTSVY

SEQ ID NO: 64124 - protein, 9 aa, Homo sapiens
  Table A; Target 64124; HLA-A*03:01; PKHD1; ENSG00000170927; TAA
RISGFLAFK

SEQ ID NO: 64125 - protein, 9 aa, Homo sapiens
  Table A; Target 64125; HLA-A*02:03; PKHD1; ENSG00000170927; TAA
RISVSINGV

SEQ ID NO: 64126 - protein, 9 aa, Homo sapiens
  Table A; Target 64126; HLA-A*03:01; PKHD1; ENSG00000170927; TAA
RLFVGSFRK

SEQ ID NO: 64127 - protein, 10 aa, Homo sapiens
  Table A; Target 64127; HLA-A*02:01; PKHD1; ENSG00000170927; TAA
RLPEVQVLNV

SEQ ID NO: 64128 - protein, 10 aa, Homo sapiens
  Table A; Target 64128; HLA-A*02:03; PKHD1; ENSG00000170927; TAA
RLPEVQVLNV

SEQ ID NO: 64129 - protein, 10 aa, Homo sapiens
  Table A; Target 64129; HLA-A*02:04; PKHD1; ENSG00000170927; TAA
RLPEVQVLNV

SEQ ID NO: 64130 - protein, 10 aa, Homo sapiens
  Table A; Target 64130; HLA-A*02:07; PKHD1; ENSG00000170927; TAA
RLPEVQVLNV

SEQ ID NO: 64131 - protein, 11 aa, Homo sapiens
  Table A; Target 64131; HLA-A*02:07; PKHD1; ENSG00000170927; TAA
RLPQDGDNVTV

SEQ ID NO: 64132 - protein, 9 aa, Homo sapiens
  Table A; Target 64132; HLA-A*30:02; PKHD1; ENSG00000170927; TAA
RNKTTTVNY

SEQ ID NO: 64133 - protein, 8 aa, Homo sapiens
  Table A; Target 64133; HLA-B*07:02; PKHD1; ENSG00000170927; TAA
RPHDKIVL

SEQ ID NO: 64134 - protein, 8 aa, Homo sapiens
  Table A; Target 64134; HLA-B*08:01; PKHD1; ENSG00000170927; TAA
RPHDKIVL

SEQ ID NO: 64135 - protein, 9 aa, Homo sapiens
  Table A; Target 64135; HLA-B*56:01; PKHD1; ENSG00000170927; TAA
RPSGLAISA

SEQ ID NO: 64136 - protein, 9 aa, Homo sapiens
  Table A; Target 64136; HLA-B*56:01; PKHD1; ENSG00000170927; TAA
RPYALSILV

SEQ ID NO: 64137 - protein, 9 aa, Homo sapiens
  Table A; Target 64137; HLA-B*58:01; PKHD1; ENSG00000170927; TAA
RSITIQGNL

SEQ ID NO: 64138 - protein, 9 aa, Homo sapiens
  Table A; Target 64138; HLA-B*57:01; PKHD1; ENSG00000170927; TAA
RSLQYSATF

SEQ ID NO: 64139 - protein, 9 aa, Homo sapiens
  Table A; Target 64139; HLA-B*58:01; PKHD1; ENSG00000170927; TAA
RSLQYSATF

SEQ ID NO: 64140 - protein, 11 aa, Homo sapiens
  Table A; Target 64140; HLA-B*57:01; PKHD1; ENSG00000170927; TAA
RSVPCDVFPVF

SEQ ID NO: 64141 - protein, 9 aa, Homo sapiens
  Table A; Target 64141; HLA-A*30:02; PKHD1; ENSG00000170927; TAA
RTSPPLGGH

SEQ ID NO: 64142 - protein, 10 aa, Homo sapiens
  Table A; Target 64142; HLA-A*30:02; PKHD1; ENSG00000170927; TAA
RTSPPLGGHF

SEQ ID NO: 64143 - protein, 10 aa, Homo sapiens
  Table A; Target 64143; HLA-B*57:01; PKHD1; ENSG00000170927; TAA
RTSPPLGGHF

SEQ ID NO: 64144 - protein, 10 aa, Homo sapiens
  Table A; Target 64144; HLA-B*58:01; PKHD1; ENSG00000170927; TAA
RTSPPLGGHF

SEQ ID NO: 64145 - protein, 11 aa, Homo sapiens
  Table A; Target 64145; HLA-A*31:01; PKHD1; ENSG00000170927; TAA
RTSPPLGGHFR

SEQ ID NO: 64146 - protein, 9 aa, Homo sapiens
  Table A; Target 64146; HLA-A*30:02; PKHD1; ENSG00000170927; TAA
RVCGAGYGY

SEQ ID NO: 64147 - protein, 11 aa, Homo sapiens
  Table A; Target 64147; HLA-A*31:01; PKHD1; ENSG00000170927; TAA
RYISWEAIHGR

SEQ ID NO: 64148 - protein, 11 aa, Homo sapiens
  Table A; Target 64148; HLA-A*33:01; PKHD1; ENSG00000170927; TAA
RYISWEAIHGR

SEQ ID NO: 64149 - protein, 8 aa, Homo sapiens
  Table A; Target 64149; HLA-C*14:02; PKHD1; ENSG00000170927; TAA
RYLNASDF

SEQ ID NO: 64150 - protein, 10 aa, Homo sapiens
  Table A; Target 64150; HLA-A*24:02; PKHD1; ENSG00000170927; TAA
RYQLAGQNQL

SEQ ID NO: 64151 - protein, 11 aa, Homo sapiens
  Table A; Target 64151; HLA-A*23:01; PKHD1; ENSG00000170927; TAA
RYQLAGQNQLL

SEQ ID NO: 64152 - protein, 11 aa, Homo sapiens
  Table A; Target 64152; HLA-A*24:02; PKHD1; ENSG00000170927; TAA
RYQLAGQNQLL

SEQ ID NO: 64153 - protein, 9 aa, Homo sapiens
  Table A; Target 64153; HLA-A*11:01; PKHD1; ENSG00000170927; TAA
SAGGAQIFR

SEQ ID NO: 64154 - protein, 9 aa, Homo sapiens
  Table A; Target 64154; HLA-A*68:01; PKHD1; ENSG00000170927; TAA
SAGGAQIFR

SEQ ID NO: 64155 - protein, 9 aa, Homo sapiens
  Table A; Target 64155; HLA-C*07:06; PKHD1; ENSG00000170927; TAA
SAGGAQIFR

SEQ ID NO: 64156 - protein, 9 aa, Homo sapiens
  Table A; Target 64156; HLA-A*29:02; PKHD1; ENSG00000170927; TAA
SAKQDLFLY

SEQ ID NO: 64157 - protein, 9 aa, Homo sapiens
  Table A; Target 64157; HLA-A*30:02; PKHD1; ENSG00000170927; TAA
SAKQDLFLY

SEQ ID NO: 64158 - protein, 9 aa, Homo sapiens
  Table A; Target 64158; HLA-C*02:02; PKHD1; ENSG00000170927; TAA
SAKQDLFLY

SEQ ID NO: 64159 - protein, 9 aa, Homo sapiens
  Table A; Target 64159; HLA-C*07:06; PKHD1; ENSG00000170927; TAA
SANLTSTDR

SEQ ID NO: 64160 - protein, 9 aa, Homo sapiens
  Table A; Target 64160; HLA-A*25:01; PKHD1; ENSG00000170927; TAA
SAPESALKW

SEQ ID NO: 64161 - protein, 9 aa, Homo sapiens
  Table A; Target 64161; HLA-B*58:01; PKHD1; ENSG00000170927; TAA
SAPESALKW

SEQ ID NO: 64162 - protein, 8 aa, Homo sapiens
  Table A; Target 64162; HLA-C*16:01; PKHD1; ENSG00000170927; TAA
SAVLPRAF

SEQ ID NO: 64163 - protein, 10 aa, Homo sapiens
  Table A; Target 64163; HLA-C*02:02; PKHD1; ENSG00000170927; TAA
SAVLPRAFTY

SEQ ID NO: 64164 - protein, 10 aa, Homo sapiens
  Table A; Target 64164; HLA-C*16:01; PKHD1; ENSG00000170927; TAA
SAVLPRAFTY

SEQ ID NO: 64165 - protein, 8 aa, Homo sapiens
  Table A; Target 64165; HLA-A*32:01; PKHD1; ENSG00000170927; TAA
SAYPKNSW

SEQ ID NO: 64166 - protein, 8 aa, Homo sapiens
  Table A; Target 64166; HLA-B*08:01; PKHD1; ENSG00000170927; TAA
SAYPKNSW

SEQ ID NO: 64167 - protein, 8 aa, Homo sapiens
  Table A; Target 64167; HLA-B*58:01; PKHD1; ENSG00000170927; TAA
SAYPKNSW

SEQ ID NO: 64168 - protein, 9 aa, Homo sapiens
  Table A; Target 64168; HLA-A*30:02; PKHD1; ENSG00000170927; TAA
SCEAARHTY

SEQ ID NO: 64169 - protein, 9 aa, Homo sapiens
  Table A; Target 64169; HLA-B*37:01; PKHD1; ENSG00000170927; TAA
SDNVAHSSL

SEQ ID NO: 64170 - protein, 9 aa, Homo sapiens
  Table A; Target 64170; HLA-B*44:02; PKHD1; ENSG00000170927; TAA
SEAHEGLYF

SEQ ID NO: 64171 - protein, 9 aa, Homo sapiens
  Table A; Target 64171; HLA-B*44:03; PKHD1; ENSG00000170927; TAA
SEAHEGLYF

SEQ ID NO: 64172 - protein, 9 aa, Homo sapiens
  Table A; Target 64172; HLA-A*30:01; PKHD1; ENSG00000170927; TAA
SECQGNCTL

SEQ ID NO: 64173 - protein, 9 aa, Homo sapiens
  Table A; Target 64173; HLA-B*40:01; PKHD1; ENSG00000170927; TAA
SECQGNCTL

SEQ ID NO: 64174 - protein, 8 aa, Homo sapiens
  Table A; Target 64174; HLA-C*14:02; PKHD1; ENSG00000170927; TAA
SFFNAGTF

SEQ ID NO: 64175 - protein, 9 aa, Homo sapiens
  Table A; Target 64175; HLA-A*29:02; PKHD1; ENSG00000170927; TAA
SFKTGNLIY

SEQ ID NO: 64176 - protein, 8 aa, Homo sapiens
  Table A; Target 64176; HLA-C*14:02; PKHD1; ENSG00000170927; TAA
SFQGNVSL

SEQ ID NO: 64177 - protein, 9 aa, Homo sapiens
  Table A; Target 64177; HLA-C*05:01; PKHD1; ENSG00000170927; TAA
SGDSQFLQV

SEQ ID NO: 64178 - protein, 9 aa, Homo sapiens
  Table A; Target 64178; HLA-A*30:02; PKHD1; ENSG00000170927; TAA
SGNVSRHFY

SEQ ID NO: 64179 - protein, 11 aa, Homo sapiens
  Table A; Target 64179; HLA-A*30:02; PKHD1; ENSG00000170927; TAA
SGVPGKLIHVY

SEQ ID NO: 64180 - protein, 10 aa, Homo sapiens
  Table A; Target 64180; HLA-B*38:01; PKHD1; ENSG00000170927; TAA
SHILASMETL

SEQ ID NO: 64181 - protein, 10 aa, Homo sapiens
  Table A; Target 64181; HLA-B*39:01; PKHD1; ENSG00000170927; TAA
SHILASMETL

SEQ ID NO: 64182 - protein, 8 aa, Homo sapiens
  Table A; Target 64182; HLA-C*05:01; PKHD1; ENSG00000170927; TAA
SIDGDINL

SEQ ID NO: 64183 - protein, 9 aa, Homo sapiens
  Table A; Target 64183; HLA-C*05:01; PKHD1; ENSG00000170927; TAA
SIDGDINLM

SEQ ID NO: 64184 - protein, 10 aa, Homo sapiens
  Table A; Target 64184; HLA-A*03:01; PKHD1; ENSG00000170927; TAA
SILPIRQITK

SEQ ID NO: 64185 - protein, 11 aa, Homo sapiens
  Table A; Target 64185; HLA-A*02:04; PKHD1; ENSG00000170927; TAA
SILPIRQITKV

SEQ ID NO: 64186 - protein, 9 aa, Homo sapiens
  Table A; Target 64186; HLA-A*11:01; PKHD1; ENSG00000170927; TAA
SISGIGFSR

SEQ ID NO: 64187 - protein, 9 aa, Homo sapiens
  Table A; Target 64187; HLA-A*68:01; PKHD1; ENSG00000170927; TAA
SISGIGFSR

SEQ ID NO: 64188 - protein, 9 aa, Homo sapiens
  Table A; Target 64188; HLA-C*07:06; PKHD1; ENSG00000170927; TAA
SISGIGFSR

SEQ ID NO: 64189 - protein, 9 aa, Homo sapiens
  Table A; Target 64189; HLA-B*15:03; PKHD1; ENSG00000170927; TAA
SKAQTPIVH

SEQ ID NO: 64190 - protein, 11 aa, Homo sapiens
  Table A; Target 64190; HLA-A*03:02; PKHD1; ENSG00000170927; TAA
SLEGASDSVLK

SEQ ID NO: 64191 - protein, 11 aa, Homo sapiens
  Table A; Target 64191; HLA-A*11:01; PKHD1; ENSG00000170927; TAA
SLEGASDSVLK

SEQ ID NO: 64192 - protein, 9 aa, Homo sapiens
  Table A; Target 64192; HLA-A*02:01; PKHD1; ENSG00000170927; TAA
SLGDHTILC

SEQ ID NO: 64193 - protein, 11 aa, Homo sapiens
  Table A; Target 64193; HLA-A*02:01; PKHD1; ENSG00000170927; TAA
SLGDHTILCQV

SEQ ID NO: 64194 - protein, 10 aa, Homo sapiens
  Table A; Target 64194; HLA-A*02:03; PKHD1; ENSG00000170927; TAA
SLHGGSLLTI

SEQ ID NO: 64195 - protein, 9 aa, Homo sapiens
  Table A; Target 64195; HLA-A*02:01; PKHD1; ENSG00000170927; TAA
SLHGSLPEV

SEQ ID NO: 64196 - protein, 9 aa, Homo sapiens
  Table A; Target 64196; HLA-A*02:03; PKHD1; ENSG00000170927; TAA
SLHGSLPEV

SEQ ID NO: 64197 - protein, 9 aa, Homo sapiens
  Table A; Target 64197; HLA-A*02:04; PKHD1; ENSG00000170927; TAA
SLHGSLPEV

SEQ ID NO: 64198 - protein, 9 aa, Homo sapiens
  Table A; Target 64198; HLA-C*01:02; PKHD1; ENSG00000170927; TAA
SLHVGGSNL

SEQ ID NO: 64199 - protein, 10 aa, Homo sapiens
  Table A; Target 64199; HLA-A*02:01; PKHD1; ENSG00000170927; TAA
SLLGGTILSI

SEQ ID NO: 64200 - protein, 10 aa, Homo sapiens
  Table A; Target 64200; HLA-A*02:03; PKHD1; ENSG00000170927; TAA
SLLGGTILSI

SEQ ID NO: 64201 - protein, 10 aa, Homo sapiens
  Table A; Target 64201; HLA-A*02:04; PKHD1; ENSG00000170927; TAA
SLLGGTILSI

SEQ ID NO: 64202 - protein, 10 aa, Homo sapiens
  Table A; Target 64202; HLA-A*02:01; PKHD1; ENSG00000170927; TAA
SLLTIEGTGL

SEQ ID NO: 64203 - protein, 10 aa, Homo sapiens
  Table A; Target 64203; HLA-A*02:04; PKHD1; ENSG00000170927; TAA
SLLTIEGTGL

SEQ ID NO: 64204 - protein, 9 aa, Homo sapiens
  Table A; Target 64204; HLA-A*02:01; PKHD1; ENSG00000170927; TAA
SLMSIEVLL

SEQ ID NO: 64205 - protein, 9 aa, Homo sapiens
  Table A; Target 64205; HLA-A*02:04; PKHD1; ENSG00000170927; TAA
SLMSIEVLL

SEQ ID NO: 64206 - protein, 10 aa, Homo sapiens
  Table A; Target 64206; HLA-A*02:04; PKHD1; ENSG00000170927; TAA
SLMSIEVLLL

SEQ ID NO: 64207 - protein, 9 aa, Homo sapiens
  Table A; Target 64207; HLA-A*02:01; PKHD1; ENSG00000170927; TAA
SLNPVIVTL

SEQ ID NO: 64208 - protein, 9 aa, Homo sapiens
  Table A; Target 64208; HLA-A*02:03; PKHD1; ENSG00000170927; TAA
SLNPVIVTL

SEQ ID NO: 64209 - protein, 9 aa, Homo sapiens
  Table A; Target 64209; HLA-A*02:04; PKHD1; ENSG00000170927; TAA
SLNPVIVTL

SEQ ID NO: 64210 - protein, 9 aa, Homo sapiens
  Table A; Target 64210; HLA-A*02:07; PKHD1; ENSG00000170927; TAA
SLNPVIVTL

SEQ ID NO: 64211 - protein, 9 aa, Homo sapiens
  Table A; Target 64211; HLA-A*03:01; PKHD1; ENSG00000170927; TAA
SLNPVIVTL

SEQ ID NO: 64212 - protein, 9 aa, Homo sapiens
  Table A; Target 64212; HLA-A*03:02; PKHD1; ENSG00000170927; TAA
SLNPVIVTL

SEQ ID NO: 64213 - protein, 9 aa, Homo sapiens
  Table A; Target 64213; HLA-A*23:01; PKHD1; ENSG00000170927; TAA
SLNPVIVTL

SEQ ID NO: 64214 - protein, 9 aa, Homo sapiens
  Table A; Target 64214; HLA-A*24:02; PKHD1; ENSG00000170927; TAA
SLNPVIVTL

SEQ ID NO: 64215 - protein, 9 aa, Homo sapiens
  Table A; Target 64215; HLA-A*25:01; PKHD1; ENSG00000170927; TAA
SLNPVIVTL

SEQ ID NO: 64216 - protein, 9 aa, Homo sapiens
  Table A; Target 64216; HLA-A*30:01; PKHD1; ENSG00000170927; TAA
SLNPVIVTL

SEQ ID NO: 64217 - protein, 9 aa, Homo sapiens
  Table A; Target 64217; HLA-A*30:02; PKHD1; ENSG00000170927; TAA
SLNPVIVTL

SEQ ID NO: 64218 - protein, 9 aa, Homo sapiens
  Table A; Target 64218; HLA-A*31:01; PKHD1; ENSG00000170927; TAA
SLNPVIVTL

SEQ ID NO: 64219 - protein, 9 aa, Homo sapiens
  Table A; Target 64219; HLA-A*32:01; PKHD1; ENSG00000170927; TAA
SLNPVIVTL

SEQ ID NO: 64220 - protein, 9 aa, Homo sapiens
  Table A; Target 64220; HLA-A*68:02; PKHD1; ENSG00000170927; TAA
SLNPVIVTL

SEQ ID NO: 64221 - protein, 9 aa, Homo sapiens
  Table A; Target 64221; HLA-B*07:02; PKHD1; ENSG00000170927; TAA
SLNPVIVTL

SEQ ID NO: 64222 - protein, 9 aa, Homo sapiens
  Table A; Target 64222; HLA-B*08:01; PKHD1; ENSG00000170927; TAA
SLNPVIVTL

SEQ ID NO: 64223 - protein, 9 aa, Homo sapiens
  Table A; Target 64223; HLA-B*13:02; PKHD1; ENSG00000170927; TAA
SLNPVIVTL

SEQ ID NO: 64224 - protein, 9 aa, Homo sapiens
  Table A; Target 64224; HLA-B*15:01; PKHD1; ENSG00000170927; TAA
SLNPVIVTL

SEQ ID NO: 64225 - protein, 9 aa, Homo sapiens
  Table A; Target 64225; HLA-B*35:03; PKHD1; ENSG00000170927; TAA
SLNPVIVTL

SEQ ID NO: 64226 - protein, 9 aa, Homo sapiens
  Table A; Target 64226; HLA-B*37:01; PKHD1; ENSG00000170927; TAA
SLNPVIVTL

SEQ ID NO: 64227 - protein, 9 aa, Homo sapiens
  Table A; Target 64227; HLA-B*38:01; PKHD1; ENSG00000170927; TAA
SLNPVIVTL

SEQ ID NO: 64228 - protein, 9 aa, Homo sapiens
  Table A; Target 64228; HLA-B*39:01; PKHD1; ENSG00000170927; TAA
SLNPVIVTL

SEQ ID NO: 64229 - protein, 9 aa, Homo sapiens
  Table A; Target 64229; HLA-B*40:01; PKHD1; ENSG00000170927; TAA
SLNPVIVTL

SEQ ID NO: 64230 - protein, 9 aa, Homo sapiens
  Table A; Target 64230; HLA-B*44:02; PKHD1; ENSG00000170927; TAA
SLNPVIVTL

SEQ ID NO: 64231 - protein, 9 aa, Homo sapiens
  Table A; Target 64231; HLA-B*44:03; PKHD1; ENSG00000170927; TAA
SLNPVIVTL

SEQ ID NO: 64232 - protein, 9 aa, Homo sapiens
  Table A; Target 64232; HLA-B*46:01; PKHD1; ENSG00000170927; TAA
SLNPVIVTL

SEQ ID NO: 64233 - protein, 9 aa, Homo sapiens
  Table A; Target 64233; HLA-B*55:01; PKHD1; ENSG00000170927; TAA
SLNPVIVTL

SEQ ID NO: 64234 - protein, 9 aa, Homo sapiens
  Table A; Target 64234; HLA-B*58:01; PKHD1; ENSG00000170927; TAA
SLNPVIVTL

SEQ ID NO: 64235 - protein, 9 aa, Homo sapiens
  Table A; Target 64235; HLA-C*01:02; PKHD1; ENSG00000170927; TAA
SLNPVIVTL

SEQ ID NO: 64236 - protein, 9 aa, Homo sapiens
  Table A; Target 64236; HLA-C*02:02; PKHD1; ENSG00000170927; TAA
SLNPVIVTL

SEQ ID NO: 64237 - protein, 9 aa, Homo sapiens
  Table A; Target 64237; HLA-C*03:03; PKHD1; ENSG00000170927; TAA
SLNPVIVTL

SEQ ID NO: 64238 - protein, 9 aa, Homo sapiens
  Table A; Target 64238; HLA-C*03:04; PKHD1; ENSG00000170927; TAA
SLNPVIVTL

SEQ ID NO: 64239 - protein, 9 aa, Homo sapiens
  Table A; Target 64239; HLA-C*07:04; PKHD1; ENSG00000170927; TAA
SLNPVIVTL

SEQ ID NO: 64240 - protein, 9 aa, Homo sapiens
  Table A; Target 64240; HLA-C*16:01; PKHD1; ENSG00000170927; TAA
SLNPVIVTL

SEQ ID NO: 64241 - protein, 9 aa, Homo sapiens
  Table A; Target 64241; HLA-C*16:02; PKHD1; ENSG00000170927; TAA
SLNPVIVTL

SEQ ID NO: 64242 - protein, 9 aa, Homo sapiens
  Table A; Target 64242; HLA-C*16:04; PKHD1; ENSG00000170927; TAA
SLNPVIVTL

SEQ ID NO: 64243 - protein, 9 aa, Homo sapiens
  Table A; Target 64243; HLA-A*02:07; PKHD1; ENSG00000170927; TAA
SLPAGEYHV

SEQ ID NO: 64244 - protein, 9 aa, Homo sapiens
  Table A; Target 64244; HLA-A*02:07; PKHD1; ENSG00000170927; TAA
SLPETWQGV

SEQ ID NO: 64245 - protein, 9 aa, Homo sapiens
  Table A; Target 64245; HLA-A*02:01; PKHD1; ENSG00000170927; TAA
SLPEVIVTC

SEQ ID NO: 64246 - protein, 9 aa, Homo sapiens
  Table A; Target 64246; HLA-A*02:07; PKHD1; ENSG00000170927; TAA
SLPEVIVTC

SEQ ID NO: 64247 - protein, 10 aa, Homo sapiens
  Table A; Target 64247; HLA-A*02:07; PKHD1; ENSG00000170927; TAA
SLPEVIVTCL

SEQ ID NO: 64248 - protein, 11 aa, Homo sapiens
  Table A; Target 64248; HLA-A*31:01; PKHD1; ENSG00000170927; TAA
SLQSENLWINR

SEQ ID NO: 64249 - protein, 10 aa, Homo sapiens
  Table A; Target 64249; HLA-A*02:04; PKHD1; ENSG00000170927; TAA
SLSSNKLQNL

SEQ ID NO: 64250 - protein, 9 aa, Homo sapiens
  Table A; Target 64250; HLA-C*03:03; PKHD1; ENSG00000170927; TAA
SNIAGGETL

SEQ ID NO: 64251 - protein, 9 aa, Homo sapiens
  Table A; Target 64251; HLA-C*03:04; PKHD1; ENSG00000170927; TAA
SNIAGGETL

SEQ ID NO: 64252 - protein, 9 aa, Homo sapiens
  Table A; Target 64252; HLA-C*14:02; PKHD1; ENSG00000170927; TAA
SNIAGGETL

SEQ ID NO: 64253 - protein, 9 aa, Homo sapiens
  Table A; Target 64253; HLA-B*07:02; PKHD1; ENSG00000170927; TAA
SPGNVSAAV

SEQ ID NO: 64254 - protein, 9 aa, Homo sapiens
  Table A; Target 64254; HLA-B*56:01; PKHD1; ENSG00000170927; TAA
SPGNVSAAV

SEQ ID NO: 64255 - protein, 9 aa, Homo sapiens
  Table A; Target 64255; HLA-C*07:02; PKHD1; ENSG00000170927; TAA
SPGNVSAAV

SEQ ID NO: 64256 - protein, 9 aa, Homo sapiens
  Table A; Target 64256; HLA-B*07:02; PKHD1; ENSG00000170927; TAA
SPLYSSVEF

SEQ ID NO: 64257 - protein, 9 aa, Homo sapiens
  Table A; Target 64257; HLA-B*35:01; PKHD1; ENSG00000170927; TAA
SPLYSSVEF

SEQ ID NO: 64258 - protein, 9 aa, Homo sapiens
  Table A; Target 64258; HLA-B*35:03; PKHD1; ENSG00000170927; TAA
SPLYSSVEF

SEQ ID NO: 64259 - protein, 9 aa, Homo sapiens
  Table A; Target 64259; HLA-B*55:01; PKHD1; ENSG00000170927; TAA
SPLYSSVEF

SEQ ID NO: 64260 - protein, 9 aa, Homo sapiens
  Table A; Target 64260; HLA-B*56:01; PKHD1; ENSG00000170927; TAA
SPPGVNFTA

SEQ ID NO: 64261 - protein, 10 aa, Homo sapiens
  Table A; Target 64261; HLA-A*68:01; PKHD1; ENSG00000170927; TAA
SPPGVNFTAR

SEQ ID NO: 64262 - protein, 10 aa, Homo sapiens
  Table A; Target 64262; HLA-C*07:06; PKHD1; ENSG00000170927; TAA
SPPGVNFTAR

SEQ ID NO: 64263 - protein, 9 aa, Homo sapiens
  Table A; Target 64263; HLA-B*51:01; PKHD1; ENSG00000170927; TAA
SPPMTVETI

SEQ ID NO: 64264 - protein, 9 aa, Homo sapiens
  Table A; Target 64264; HLA-B*07:02; PKHD1; ENSG00000170927; TAA
SPSLVGKGF

SEQ ID NO: 64265 - protein, 11 aa, Homo sapiens
  Table A; Target 64265; HLA-B*07:02; PKHD1; ENSG00000170927; TAA
SPSLVGKGFTF

SEQ ID NO: 64266 - protein, 10 aa, Homo sapiens
  Table A; Target 64266; HLA-C*07:06; PKHD1; ENSG00000170927; TAA
SPTNVIEGNR

SEQ ID NO: 64267 - protein, 9 aa, Homo sapiens
  Table A; Target 64267; HLA-B*07:02; PKHD1; ENSG00000170927; TAA
SPTVRSTGM

SEQ ID NO: 64268 - protein, 9 aa, Homo sapiens
  Table A; Target 64268; HLA-C*07:02; PKHD1; ENSG00000170927; TAA
SPTVRSTGM

SEQ ID NO: 64269 - protein, 8 aa, Homo sapiens
  Table A; Target 64269; HLA-B*51:01; PKHD1; ENSG00000170927; TAA
SPVLVHQI

SEQ ID NO: 64270 - protein, 8 aa, Homo sapiens
  Table A; Target 64270; HLA-B*15:01; PKHD1; ENSG00000170927; TAA
SQAPLLSF

SEQ ID NO: 64271 - protein, 9 aa, Homo sapiens
  Table A; Target 64271; HLA-A*25:01; PKHD1; ENSG00000170927; TAA
SQASLHFSW

SEQ ID NO: 64272 - protein, 9 aa, Homo sapiens
  Table A; Target 64272; HLA-A*32:01; PKHD1; ENSG00000170927; TAA
SQASLHFSW

SEQ ID NO: 64273 - protein, 9 aa, Homo sapiens
  Table A; Target 64273; HLA-B*44:02; PKHD1; ENSG00000170927; TAA
SQASLHFSW

SEQ ID NO: 64274 - protein, 9 aa, Homo sapiens
  Table A; Target 64274; HLA-B*44:03; PKHD1; ENSG00000170927; TAA
SQASLHFSW

SEQ ID NO: 64275 - protein, 9 aa, Homo sapiens
  Table A; Target 64275; HLA-C*16:04; PKHD1; ENSG00000170927; TAA
SQASLHFSW

SEQ ID NO: 64276 - protein, 8 aa, Homo sapiens
  Table A; Target 64276; HLA-B*13:02; PKHD1; ENSG00000170927; TAA
SQFLQVTV

SEQ ID NO: 64277 - protein, 10 aa, Homo sapiens
  Table A; Target 64277; HLA-A*03:02; PKHD1; ENSG00000170927; TAA
SQFLQVTVNK

SEQ ID NO: 64278 - protein, 10 aa, Homo sapiens
  Table A; Target 64278; HLA-A*11:01; PKHD1; ENSG00000170927; TAA
SQFLQVTVNK

SEQ ID NO: 64279 - protein, 9 aa, Homo sapiens
  Table A; Target 64279; HLA-B*13:02; PKHD1; ENSG00000170927; TAA
SQGQGGFTV

SEQ ID NO: 64280 - protein, 9 aa, Homo sapiens
  Table A; Target 64280; HLA-B*39:01; PKHD1; ENSG00000170927; TAA
SQGQGGFTV

SEQ ID NO: 64281 - protein, 10 aa, Homo sapiens
  Table A; Target 64281; HLA-A*11:01; PKHD1; ENSG00000170927; TAA
SQGQGGFTVK

SEQ ID NO: 64282 - protein, 8 aa, Homo sapiens
  Table A; Target 64282; HLA-B*13:02; PKHD1; ENSG00000170927; TAA
SQGVDLHI

SEQ ID NO: 64283 - protein, 8 aa, Homo sapiens
  Table A; Target 64283; HLA-B*13:02; PKHD1; ENSG00000170927; TAA
SQLEIHLV

SEQ ID NO: 64284 - protein, 10 aa, Homo sapiens
  Table A; Target 64284; HLA-A*02:01; PKHD1; ENSG00000170927; TAA
SQLEIHLVNV

SEQ ID NO: 64285 - protein, 10 aa, Homo sapiens
  Table A; Target 64285; HLA-A*02:04; PKHD1; ENSG00000170927; TAA
SQLEIHLVNV

SEQ ID NO: 64286 - protein, 10 aa, Homo sapiens
  Table A; Target 64286; HLA-B*13:02; PKHD1; ENSG00000170927; TAA
SQLEIHLVNV

SEQ ID NO: 64287 - protein, 8 aa, Homo sapiens
  Table A; Target 64287; HLA-B*15:01; PKHD1; ENSG00000170927; TAA
SQLRQLTY

SEQ ID NO: 64288 - protein, 8 aa, Homo sapiens
  Table A; Target 64288; HLA-B*15:03; PKHD1; ENSG00000170927; TAA
SQLRQLTY

SEQ ID NO: 64289 - protein, 9 aa, Homo sapiens
  Table A; Target 64289; HLA-A*02:04; PKHD1; ENSG00000170927; TAA
SQLRQLTYL

SEQ ID NO: 64290 - protein, 8 aa, Homo sapiens
  Table A; Target 64290; HLA-B*13:02; PKHD1; ENSG00000170927; TAA
SQNVSFSV

SEQ ID NO: 64291 - protein, 9 aa, Homo sapiens
  Table A; Target 64291; HLA-A*32:01; PKHD1; ENSG00000170927; TAA
SQNVSFSVF

SEQ ID NO: 64292 - protein, 9 aa, Homo sapiens
  Table A; Target 64292; HLA-B*15:01; PKHD1; ENSG00000170927; TAA
SQNVSFSVF

SEQ ID NO: 64293 - protein, 9 aa, Homo sapiens
  Table A; Target 64293; HLA-B*15:03; PKHD1; ENSG00000170927; TAA
SQNVSFSVF

SEQ ID NO: 64294 - protein, 9 aa, Homo sapiens
  Table A; Target 64294; HLA-A*25:01; PKHD1; ENSG00000170927; TAA
SQSDDILTF

SEQ ID NO: 64295 - protein, 9 aa, Homo sapiens
  Table A; Target 64295; HLA-A*26:01; PKHD1; ENSG00000170927; TAA
SQSDDILTF

SEQ ID NO: 64296 - protein, 9 aa, Homo sapiens
  Table A; Target 64296; HLA-A*32:01; PKHD1; ENSG00000170927; TAA
SQSDDILTF

SEQ ID NO: 64297 - protein, 9 aa, Homo sapiens
  Table A; Target 64297; HLA-B*13:02; PKHD1; ENSG00000170927; TAA
SQSDDILTF

SEQ ID NO: 64298 - protein, 9 aa, Homo sapiens
  Table A; Target 64298; HLA-B*15:01; PKHD1; ENSG00000170927; TAA
SQSDDILTF

SEQ ID NO: 64299 - protein, 9 aa, Homo sapiens
  Table A; Target 64299; HLA-B*15:03; PKHD1; ENSG00000170927; TAA
SQSDDILTF

SEQ ID NO: 64300 - protein, 9 aa, Homo sapiens
  Table A; Target 64300; HLA-B*27:05; PKHD1; ENSG00000170927; TAA
SQSDDILTF

SEQ ID NO: 64301 - protein, 9 aa, Homo sapiens
  Table A; Target 64301; HLA-B*38:01; PKHD1; ENSG00000170927; TAA
SQSDDILTF

SEQ ID NO: 64302 - protein, 9 aa, Homo sapiens
  Table A; Target 64302; HLA-B*39:01; PKHD1; ENSG00000170927; TAA
SQSDDILTF

SEQ ID NO: 64303 - protein, 9 aa, Homo sapiens
  Table A; Target 64303; HLA-C*16:04; PKHD1; ENSG00000170927; TAA
SQSDDILTF

SEQ ID NO: 64304 - protein, 9 aa, Homo sapiens
  Table A; Target 64304; HLA-A*11:01; PKHD1; ENSG00000170927; TAA
SSALVFTSR

SEQ ID NO: 64305 - protein, 9 aa, Homo sapiens
  Table A; Target 64305; HLA-A*31:01; PKHD1; ENSG00000170927; TAA
SSALVFTSR

SEQ ID NO: 64306 - protein, 9 aa, Homo sapiens
  Table A; Target 64306; HLA-A*33:01; PKHD1; ENSG00000170927; TAA
SSALVFTSR

SEQ ID NO: 64307 - protein, 9 aa, Homo sapiens
  Table A; Target 64307; HLA-A*33:03; PKHD1; ENSG00000170927; TAA
SSALVFTSR

SEQ ID NO: 64308 - protein, 9 aa, Homo sapiens
  Table A; Target 64308; HLA-A*68:01; PKHD1; ENSG00000170927; TAA
SSALVFTSR

SEQ ID NO: 64309 - protein, 9 aa, Homo sapiens
  Table A; Target 64309; HLA-C*07:06; PKHD1; ENSG00000170927; TAA
SSALVFTSR

SEQ ID NO: 64310 - protein, 9 aa, Homo sapiens
  Table A; Target 64310; HLA-A*11:01; PKHD1; ENSG00000170927; TAA
SSFDCIQDK

SEQ ID NO: 64311 - protein, 8 aa, Homo sapiens
  Table A; Target 64311; HLA-C*03:04; PKHD1; ENSG00000170927; TAA
SSLEGVSL

SEQ ID NO: 64312 - protein, 9 aa, Homo sapiens
  Table A; Target 64312; HLA-A*29:02; PKHD1; ENSG00000170927; TAA
SSLHGLHLY

SEQ ID NO: 64313 - protein, 9 aa, Homo sapiens
  Table A; Target 64313; HLA-A*30:02; PKHD1; ENSG00000170927; TAA
SSLHGLHLY

SEQ ID NO: 64314 - protein, 10 aa, Homo sapiens
  Table A; Target 64314; HLA-A*03:01; PKHD1; ENSG00000170927; TAA
STDRAPSNPR

SEQ ID NO: 64315 - protein, 10 aa, Homo sapiens
  Table A; Target 64315; HLA-A*03:02; PKHD1; ENSG00000170927; TAA
STDRAPSNPR

SEQ ID NO: 64316 - protein, 10 aa, Homo sapiens
  Table A; Target 64316; HLA-A*11:01; PKHD1; ENSG00000170927; TAA
STDRAPSNPR

SEQ ID NO: 64317 - protein, 10 aa, Homo sapiens
  Table A; Target 64317; HLA-A*68:01; PKHD1; ENSG00000170927; TAA
STDRAPSNPR

SEQ ID NO: 64318 - protein, 10 aa, Homo sapiens
  Table A; Target 64318; HLA-C*07:06; PKHD1; ENSG00000170927; TAA
STDRAPSNPR

SEQ ID NO: 64319 - protein, 10 aa, Homo sapiens
  Table A; Target 64319; HLA-A*68:02; PKHD1; ENSG00000170927; TAA
STIWVAGIKV

SEQ ID NO: 64320 - protein, 9 aa, Homo sapiens
  Table A; Target 64320; HLA-A*68:02; PKHD1; ENSG00000170927; TAA
STPFFPYGV

SEQ ID NO: 64321 - protein, 9 aa, Homo sapiens
  Table A; Target 64321; HLA-C*03:03; PKHD1; ENSG00000170927; TAA
STSAPESAL

SEQ ID NO: 64322 - protein, 9 aa, Homo sapiens
  Table A; Target 64322; HLA-C*03:04; PKHD1; ENSG00000170927; TAA
STSAPESAL

SEQ ID NO: 64323 - protein, 9 aa, Homo sapiens
  Table A; Target 64323; HLA-C*05:01; PKHD1; ENSG00000170927; TAA
STSAPESAL

SEQ ID NO: 64324 - protein, 10 aa, Homo sapiens
  Table A; Target 64324; HLA-A*11:01; PKHD1; ENSG00000170927; TAA
STSAPESALK

SEQ ID NO: 64325 - protein, 11 aa, Homo sapiens
  Table A; Target 64325; HLA-A*25:01; PKHD1; ENSG00000170927; TAA
STSAPESALKW

SEQ ID NO: 64326 - protein, 11 aa, Homo sapiens
  Table A; Target 64326; HLA-B*57:01; PKHD1; ENSG00000170927; TAA
STSAPESALKW

SEQ ID NO: 64327 - protein, 11 aa, Homo sapiens
  Table A; Target 64327; HLA-B*58:01; PKHD1; ENSG00000170927; TAA
STSAPESALKW

SEQ ID NO: 64328 - protein, 9 aa, Homo sapiens
  Table A; Target 64328; HLA-A*25:01; PKHD1; ENSG00000170927; TAA
STSGSVSTF

SEQ ID NO: 64329 - protein, 9 aa, Homo sapiens
  Table A; Target 64329; HLA-A*26:01; PKHD1; ENSG00000170927; TAA
STSGSVSTF

SEQ ID NO: 64330 - protein, 9 aa, Homo sapiens
  Table A; Target 64330; HLA-A*32:01; PKHD1; ENSG00000170927; TAA
STSGSVSTF

SEQ ID NO: 64331 - protein, 10 aa, Homo sapiens
  Table A; Target 64331; HLA-A*01:01; PKHD1; ENSG00000170927; TAA
STSGSVSTFY

SEQ ID NO: 64332 - protein, 10 aa, Homo sapiens
  Table A; Target 64332; HLA-A*26:01; PKHD1; ENSG00000170927; TAA
STSGSVSTFY

SEQ ID NO: 64333 - protein, 10 aa, Homo sapiens
  Table A; Target 64333; HLA-A*29:02; PKHD1; ENSG00000170927; TAA
STSGSVSTFY

SEQ ID NO: 64334 - protein, 10 aa, Homo sapiens
  Table A; Target 64334; HLA-A*30:02; PKHD1; ENSG00000170927; TAA
STSGSVSTFY

SEQ ID NO: 64335 - protein, 9 aa, Homo sapiens
  Table A; Target 64335; HLA-C*05:01; PKHD1; ENSG00000170927; TAA
SVEIENITL

SEQ ID NO: 64336 - protein, 9 aa, Homo sapiens
  Table A; Target 64336; HLA-A*25:01; PKHD1; ENSG00000170927; TAA
SVFPETGSL

SEQ ID NO: 64337 - protein, 9 aa, Homo sapiens
  Table A; Target 64337; HLA-A*26:01; PKHD1; ENSG00000170927; TAA
SVFPETGSL

SEQ ID NO: 64338 - protein, 9 aa, Homo sapiens
  Table A; Target 64338; HLA-A*32:01; PKHD1; ENSG00000170927; TAA
SVFPETGSL

SEQ ID NO: 64339 - protein, 9 aa, Homo sapiens
  Table A; Target 64339; HLA-B*07:02; PKHD1; ENSG00000170927; TAA
SVFPETGSL

SEQ ID NO: 64340 - protein, 9 aa, Homo sapiens
  Table A; Target 64340; HLA-B*15:01; PKHD1; ENSG00000170927; TAA
SVFPETGSL

SEQ ID NO: 64341 - protein, 9 aa, Homo sapiens
  Table A; Target 64341; HLA-B*15:03; PKHD1; ENSG00000170927; TAA
SVFPETGSL

SEQ ID NO: 64342 - protein, 9 aa, Homo sapiens
  Table A; Target 64342; HLA-B*27:05; PKHD1; ENSG00000170927; TAA
SVFPETGSL

SEQ ID NO: 64343 - protein, 9 aa, Homo sapiens
  Table A; Target 64343; HLA-B*35:03; PKHD1; ENSG00000170927; TAA
SVFPETGSL

SEQ ID NO: 64344 - protein, 9 aa, Homo sapiens
  Table A; Target 64344; HLA-B*39:01; PKHD1; ENSG00000170927; TAA
SVFPETGSL

SEQ ID NO: 64345 - protein, 9 aa, Homo sapiens
  Table A; Target 64345; HLA-B*40:01; PKHD1; ENSG00000170927; TAA
SVFPETGSL

SEQ ID NO: 64346 - protein, 9 aa, Homo sapiens
  Table A; Target 64346; HLA-B*46:01; PKHD1; ENSG00000170927; TAA
SVFPETGSL

SEQ ID NO: 64347 - protein, 9 aa, Homo sapiens
  Table A; Target 64347; HLA-C*01:02; PKHD1; ENSG00000170927; TAA
SVFPETGSL

SEQ ID NO: 64348 - protein, 9 aa, Homo sapiens
  Table A; Target 64348; HLA-C*02:02; PKHD1; ENSG00000170927; TAA
SVFPETGSL

SEQ ID NO: 64349 - protein, 9 aa, Homo sapiens
  Table A; Target 64349; HLA-C*03:03; PKHD1; ENSG00000170927; TAA
SVFPETGSL

SEQ ID NO: 64350 - protein, 9 aa, Homo sapiens
  Table A; Target 64350; HLA-C*03:04; PKHD1; ENSG00000170927; TAA
SVFPETGSL

SEQ ID NO: 64351 - protein, 9 aa, Homo sapiens
  Table A; Target 64351; HLA-C*05:01; PKHD1; ENSG00000170927; TAA
SVFPETGSL

SEQ ID NO: 64352 - protein, 9 aa, Homo sapiens
  Table A; Target 64352; HLA-C*14:02; PKHD1; ENSG00000170927; TAA
SVFPETGSL

SEQ ID NO: 64353 - protein, 10 aa, Homo sapiens
  Table A; Target 64353; HLA-A*25:01; PKHD1; ENSG00000170927; TAA
SVFPKTEAEW

SEQ ID NO: 64354 - protein, 9 aa, Homo sapiens
  Table A; Target 64354; HLA-A*29:02; PKHD1; ENSG00000170927; TAA
SVFYTRNGY

SEQ ID NO: 64355 - protein, 9 aa, Homo sapiens
  Table A; Target 64355; HLA-A*30:02; PKHD1; ENSG00000170927; TAA
SVFYTRNGY

SEQ ID NO: 64356 - protein, 9 aa, Homo sapiens
  Table A; Target 64356; HLA-A*32:01; PKHD1; ENSG00000170927; TAA
SVFYTRNGY

SEQ ID NO: 64357 - protein, 10 aa, Homo sapiens
  Table A; Target 64357; HLA-A*25:01; PKHD1; ENSG00000170927; TAA
SVIVATSSSF

SEQ ID NO: 64358 - protein, 10 aa, Homo sapiens
  Table A; Target 64358; HLA-A*26:01; PKHD1; ENSG00000170927; TAA
SVIVATSSSF

SEQ ID NO: 64359 - protein, 10 aa, Homo sapiens
  Table A; Target 64359; HLA-B*15:01; PKHD1; ENSG00000170927; TAA
SVIVATSSSF

SEQ ID NO: 64360 - protein, 10 aa, Homo sapiens
  Table A; Target 64360; HLA-B*46:01; PKHD1; ENSG00000170927; TAA
SVIVATSSSF

SEQ ID NO: 64361 - protein, 9 aa, Homo sapiens
  Table A; Target 64361; HLA-B*08:01; PKHD1; ENSG00000170927; TAA
SVKKVQIVL

SEQ ID NO: 64362 - protein, 10 aa, Homo sapiens
  Table A; Target 64362; HLA-A*31:01; PKHD1; ENSG00000170927; TAA
SVKKVQIVLR

SEQ ID NO: 64363 - protein, 11 aa, Homo sapiens
  Table A; Target 64363; HLA-A*29:02; PKHD1; ENSG00000170927; TAA
SVLSEAHEGLY

SEQ ID NO: 64364 - protein, 11 aa, Homo sapiens
  Table A; Target 64364; HLA-A*30:02; PKHD1; ENSG00000170927; TAA
SVLSEAHEGLY

SEQ ID NO: 64365 - protein, 9 aa, Homo sapiens
  Table A; Target 64365; HLA-B*13:02; PKHD1; ENSG00000170927; TAA
SVSINGVSI

SEQ ID NO: 64366 - protein, 11 aa, Homo sapiens
  Table A; Target 64366; HLA-A*30:02; PKHD1; ENSG00000170927; TAA
SVSVVGSPPVY

SEQ ID NO: 64367 - protein, 9 aa, Homo sapiens
  Table A; Target 64367; HLA-A*25:01; PKHD1; ENSG00000170927; TAA
SVVGSPPVY

SEQ ID NO: 64368 - protein, 9 aa, Homo sapiens
  Table A; Target 64368; HLA-A*26:01; PKHD1; ENSG00000170927; TAA
SVVGSPPVY

SEQ ID NO: 64369 - protein, 9 aa, Homo sapiens
  Table A; Target 64369; HLA-A*29:02; PKHD1; ENSG00000170927; TAA
SVVGSPPVY

SEQ ID NO: 64370 - protein, 9 aa, Homo sapiens
  Table A; Target 64370; HLA-A*30:02; PKHD1; ENSG00000170927; TAA
SVVGSPPVY

SEQ ID NO: 64371 - protein, 9 aa, Homo sapiens
  Table A; Target 64371; HLA-A*32:01; PKHD1; ENSG00000170927; TAA
SVVGSPPVY

SEQ ID NO: 64372 - protein, 9 aa, Homo sapiens
  Table A; Target 64372; HLA-B*15:01; PKHD1; ENSG00000170927; TAA
SVVGSPPVY

SEQ ID NO: 64373 - protein, 9 aa, Homo sapiens
  Table A; Target 64373; HLA-B*15:03; PKHD1; ENSG00000170927; TAA
SVVGSPPVY

SEQ ID NO: 64374 - protein, 9 aa, Homo sapiens
  Table A; Target 64374; HLA-B*27:05; PKHD1; ENSG00000170927; TAA
SVVGSPPVY

SEQ ID NO: 64375 - protein, 9 aa, Homo sapiens
  Table A; Target 64375; HLA-B*35:01; PKHD1; ENSG00000170927; TAA
SVVGSPPVY

SEQ ID NO: 64376 - protein, 9 aa, Homo sapiens
  Table A; Target 64376; HLA-B*39:01; PKHD1; ENSG00000170927; TAA
SVVGSPPVY

SEQ ID NO: 64377 - protein, 9 aa, Homo sapiens
  Table A; Target 64377; HLA-B*58:01; PKHD1; ENSG00000170927; TAA
SVVGSPPVY

SEQ ID NO: 64378 - protein, 9 aa, Homo sapiens
  Table A; Target 64378; HLA-C*02:02; PKHD1; ENSG00000170927; TAA
SVVGSPPVY

SEQ ID NO: 64379 - protein, 9 aa, Homo sapiens
  Table A; Target 64379; HLA-C*07:04; PKHD1; ENSG00000170927; TAA
SVVGSPPVY

SEQ ID NO: 64380 - protein, 9 aa, Homo sapiens
  Table A; Target 64380; HLA-C*07:06; PKHD1; ENSG00000170927; TAA
SVVGSPPVY

SEQ ID NO: 64381 - protein, 9 aa, Homo sapiens
  Table A; Target 64381; HLA-C*12:03; PKHD1; ENSG00000170927; TAA
SVVGSPPVY

SEQ ID NO: 64382 - protein, 9 aa, Homo sapiens
  Table A; Target 64382; HLA-C*16:01; PKHD1; ENSG00000170927; TAA
SVVGSPPVY

SEQ ID NO: 64383 - protein, 9 aa, Homo sapiens
  Table A; Target 64383; HLA-C*16:04; PKHD1; ENSG00000170927; TAA
SVVGSPPVY

SEQ ID NO: 64384 - protein, 9 aa, Homo sapiens
  Table A; Target 64384; HLA-A*29:02; PKHD1; ENSG00000170927; TAA
SYSTPFFPY

SEQ ID NO: 64385 - protein, 8 aa, Homo sapiens
  Table A; Target 64385; HLA-C*05:01; PKHD1; ENSG00000170927; TAA
TADEPMVF

SEQ ID NO: 64386 - protein, 9 aa, Homo sapiens
  Table A; Target 64386; HLA-C*05:01; PKHD1; ENSG00000170927; TAA
TADEPMVFV

SEQ ID NO: 64387 - protein, 9 aa, Homo sapiens
  Table A; Target 64387; HLA-B*35:01; PKHD1; ENSG00000170927; TAA
TAHALDTVL

SEQ ID NO: 64388 - protein, 9 aa, Homo sapiens
  Table A; Target 64388; HLA-B*35:03; PKHD1; ENSG00000170927; TAA
TAHALDTVL

SEQ ID NO: 64389 - protein, 9 aa, Homo sapiens
  Table A; Target 64389; HLA-B*13:02; PKHD1; ENSG00000170927; TAA
TAHLIQTTI

SEQ ID NO: 64390 - protein, 9 aa, Homo sapiens
  Table A; Target 64390; HLA-B*51:01; PKHD1; ENSG00000170927; TAA
TAHLIQTTI

SEQ ID NO: 64391 - protein, 9 aa, Homo sapiens
  Table A; Target 64391; HLA-B*58:01; PKHD1; ENSG00000170927; TAA
TAHLIQTTI

SEQ ID NO: 64392 - protein, 9 aa, Homo sapiens
  Table A; Target 64392; HLA-A*32:01; PKHD1; ENSG00000170927; TAA
TANQHTQVV

SEQ ID NO: 64393 - protein, 9 aa, Homo sapiens
  Table A; Target 64393; HLA-B*08:01; PKHD1; ENSG00000170927; TAA
TANQHTQVV

SEQ ID NO: 64394 - protein, 9 aa, Homo sapiens
  Table A; Target 64394; HLA-B*51:01; PKHD1; ENSG00000170927; TAA
TANQHTQVV

SEQ ID NO: 64395 - protein, 9 aa, Homo sapiens
  Table A; Target 64395; HLA-C*02:02; PKHD1; ENSG00000170927; TAA
TANQHTQVV

SEQ ID NO: 64396 - protein, 9 aa, Homo sapiens
  Table A; Target 64396; HLA-C*03:04; PKHD1; ENSG00000170927; TAA
TANQHTQVV

SEQ ID NO: 64397 - protein, 9 aa, Homo sapiens
  Table A; Target 64397; HLA-C*05:01; PKHD1; ENSG00000170927; TAA
TANQHTQVV

SEQ ID NO: 64398 - protein, 9 aa, Homo sapiens
  Table A; Target 64398; HLA-C*12:03; PKHD1; ENSG00000170927; TAA
TANQHTQVV

SEQ ID NO: 64399 - protein, 9 aa, Homo sapiens
  Table A; Target 64399; HLA-C*16:01; PKHD1; ENSG00000170927; TAA
TANQHTQVV

SEQ ID NO: 64400 - protein, 9 aa, Homo sapiens
  Table A; Target 64400; HLA-C*16:02; PKHD1; ENSG00000170927; TAA
TANQHTQVV

SEQ ID NO: 64401 - protein, 9 aa, Homo sapiens
  Table A; Target 64401; HLA-C*16:04; PKHD1; ENSG00000170927; TAA
TANQHTQVV

SEQ ID NO: 64402 - protein, 11 aa, Homo sapiens
  Table A; Target 64402; HLA-A*33:01; PKHD1; ENSG00000170927; TAA
TANQHTQVVVR

SEQ ID NO: 64403 - protein, 11 aa, Homo sapiens
  Table A; Target 64403; HLA-A*33:03; PKHD1; ENSG00000170927; TAA
TANQHTQVVVR

SEQ ID NO: 64404 - protein, 11 aa, Homo sapiens
  Table A; Target 64404; HLA-A*68:01; PKHD1; ENSG00000170927; TAA
TANQHTQVVVR

SEQ ID NO: 64405 - protein, 11 aa, Homo sapiens
  Table A; Target 64405; HLA-C*07:06; PKHD1; ENSG00000170927; TAA
TANQHTQVVVR

SEQ ID NO: 64406 - protein, 9 aa, Homo sapiens
  Table A; Target 64406; HLA-B*51:01; PKHD1; ENSG00000170927; TAA
TARPGGNLV

SEQ ID NO: 64407 - protein, 8 aa, Homo sapiens
  Table A; Target 64407; HLA-B*37:01; PKHD1; ENSG00000170927; TAA
TDLLPVGM

SEQ ID NO: 64408 - protein, 9 aa, Homo sapiens
  Table A; Target 64408; HLA-A*33:01; PKHD1; ENSG00000170927; TAA
TDRAPSNPR

SEQ ID NO: 64409 - protein, 9 aa, Homo sapiens
  Table A; Target 64409; HLA-A*30:01; PKHD1; ENSG00000170927; TAA
TEAEWTASF

SEQ ID NO: 64410 - protein, 9 aa, Homo sapiens
  Table A; Target 64410; HLA-B*18:01; PKHD1; ENSG00000170927; TAA
TEAEWTASF

SEQ ID NO: 64411 - protein, 9 aa, Homo sapiens
  Table A; Target 64411; HLA-B*37:01; PKHD1; ENSG00000170927; TAA
TEAEWTASF

SEQ ID NO: 64412 - protein, 9 aa, Homo sapiens
  Table A; Target 64412; HLA-B*44:02; PKHD1; ENSG00000170927; TAA
TEAEWTASF

SEQ ID NO: 64413 - protein, 9 aa, Homo sapiens
  Table A; Target 64413; HLA-B*44:03; PKHD1; ENSG00000170927; TAA
TEAEWTASF

SEQ ID NO: 64414 - protein, 10 aa, Homo sapiens
  Table A; Target 64414; HLA-B*44:02; PKHD1; ENSG00000170927; TAA
TEAEWTASFF

SEQ ID NO: 64415 - protein, 10 aa, Homo sapiens
  Table A; Target 64415; HLA-B*44:03; PKHD1; ENSG00000170927; TAA
TEAEWTASFF

SEQ ID NO: 64416 - protein, 9 aa, Homo sapiens
  Table A; Target 64416; HLA-B*49:01; PKHD1; ENSG00000170927; TAA
TEAFCLHSV

SEQ ID NO: 64417 - protein, 9 aa, Homo sapiens
  Table A; Target 64417; HLA-B*44:02; PKHD1; ENSG00000170927; TAA
TEATPGYRW

SEQ ID NO: 64418 - protein, 9 aa, Homo sapiens
  Table A; Target 64418; HLA-B*44:03; PKHD1; ENSG00000170927; TAA
TEATPGYRW

SEQ ID NO: 64419 - protein, 9 aa, Homo sapiens
  Table A; Target 64419; HLA-C*16:04; PKHD1; ENSG00000170927; TAA
TEATPGYRW

SEQ ID NO: 64420 - protein, 9 aa, Homo sapiens
  Table A; Target 64420; HLA-A*30:01; PKHD1; ENSG00000170927; TAA
TEEGSGLVL

SEQ ID NO: 64421 - protein, 9 aa, Homo sapiens
  Table A; Target 64421; HLA-B*40:01; PKHD1; ENSG00000170927; TAA
TEEGSGLVL

SEQ ID NO: 64422 - protein, 10 aa, Homo sapiens
  Table A; Target 64422; HLA-B*49:01; PKHD1; ENSG00000170927; TAA
TEEGSGLVLV

SEQ ID NO: 64423 - protein, 8 aa, Homo sapiens
  Table A; Target 64423; HLA-B*18:01; PKHD1; ENSG00000170927; TAA
TELPLITA

SEQ ID NO: 64424 - protein, 8 aa, Homo sapiens
  Table A; Target 64424; HLA-B*49:01; PKHD1; ENSG00000170927; TAA
TELPLITA

SEQ ID NO: 64425 - protein, 9 aa, Homo sapiens
  Table A; Target 64425; HLA-B*18:01; PKHD1; ENSG00000170927; TAA
TELPLITAR

SEQ ID NO: 64426 - protein, 10 aa, Homo sapiens
  Table A; Target 64426; HLA-A*29:02; PKHD1; ENSG00000170927; TAA
TFDNFAPGNY

SEQ ID NO: 64427 - protein, 10 aa, Homo sapiens
  Table A; Target 64427; HLA-A*32:01; PKHD1; ENSG00000170927; TAA
TFDNFAPGNY

SEQ ID NO: 64428 - protein, 10 aa, Homo sapiens
  Table A; Target 64428; HLA-A*29:02; PKHD1; ENSG00000170927; TAA
TFSSFVKSCY

SEQ ID NO: 64429 - protein, 10 aa, Homo sapiens
  Table A; Target 64429; HLA-A*30:02; PKHD1; ENSG00000170927; TAA
TFSSFVKSCY

SEQ ID NO: 64430 - protein, 9 aa, Homo sapiens
  Table A; Target 64430; HLA-B*35:01; PKHD1; ENSG00000170927; TAA
TGFSGDSQF

SEQ ID NO: 64431 - protein, 10 aa, Homo sapiens
  Table A; Target 64431; HLA-A*68:01; PKHD1; ENSG00000170927; TAA
TGVNPAAATR

SEQ ID NO: 64432 - protein, 10 aa, Homo sapiens
  Table A; Target 64432; HLA-C*07:06; PKHD1; ENSG00000170927; TAA
TGVNPAAATR

SEQ ID NO: 64433 - protein, 9 aa, Homo sapiens
  Table A; Target 64433; HLA-B*38:01; PKHD1; ENSG00000170927; TAA
THSEILSVF

SEQ ID NO: 64434 - protein, 9 aa, Homo sapiens
  Table A; Target 64434; HLA-B*39:01; PKHD1; ENSG00000170927; TAA
THSEILSVF

SEQ ID NO: 64435 - protein, 9 aa, Homo sapiens
  Table A; Target 64435; HLA-B*18:01; PKHD1; ENSG00000170927; TAA
TIGLLAVVY

SEQ ID NO: 64436 - protein, 9 aa, Homo sapiens
  Table A; Target 64436; HLA-C*07:04; PKHD1; ENSG00000170927; TAA
TIGLLAVVY

SEQ ID NO: 64437 - protein, 10 aa, Homo sapiens
  Table A; Target 64437; HLA-A*68:01; PKHD1; ENSG00000170927; TAA
TIQGNLTNER

SEQ ID NO: 64438 - protein, 9 aa, Homo sapiens
  Table A; Target 64438; HLA-A*33:03; PKHD1; ENSG00000170927; TAA
TLKAIADSR

SEQ ID NO: 64439 - protein, 9 aa, Homo sapiens
  Table A; Target 64439; HLA-A*02:01; PKHD1; ENSG00000170927; TAA
TLVDNTIGL

SEQ ID NO: 64440 - protein, 9 aa, Homo sapiens
  Table A; Target 64440; HLA-A*02:03; PKHD1; ENSG00000170927; TAA
TLVDNTIGL

SEQ ID NO: 64441 - protein, 9 aa, Homo sapiens
  Table A; Target 64441; HLA-A*02:04; PKHD1; ENSG00000170927; TAA
TLVDNTIGL

SEQ ID NO: 64442 - protein, 8 aa, Homo sapiens
  Table A; Target 64442; HLA-B*37:01; PKHD1; ENSG00000170927; TAA
TNNLVVLM

SEQ ID NO: 64443 - protein, 10 aa, Homo sapiens
  Table A; Target 64443; HLA-B*35:03; PKHD1; ENSG00000170927; TAA
TPEVSYDLTM

SEQ ID NO: 64444 - protein, 8 aa, Homo sapiens
  Table A; Target 64444; HLA-B*56:01; PKHD1; ENSG00000170927; TAA
TPFFPYGV

SEQ ID NO: 64445 - protein, 8 aa, Homo sapiens
  Table A; Target 64445; HLA-B*08:01; PKHD1; ENSG00000170927; TAA
TPIVHQVY

SEQ ID NO: 64446 - protein, 8 aa, Homo sapiens
  Table A; Target 64446; HLA-B*35:01; PKHD1; ENSG00000170927; TAA
TPIVHQVY

SEQ ID NO: 64447 - protein, 8 aa, Homo sapiens
  Table A; Target 64447; HLA-B*56:01; PKHD1; ENSG00000170927; TAA
TPNQPITV

SEQ ID NO: 64448 - protein, 9 aa, Homo sapiens
  Table A; Target 64448; HLA-B*07:02; PKHD1; ENSG00000170927; TAA
TPQPGNRGL

SEQ ID NO: 64449 - protein, 9 aa, Homo sapiens
  Table A; Target 64449; HLA-C*07:02; PKHD1; ENSG00000170927; TAA
TPQPGNRGL

SEQ ID NO: 64450 - protein, 10 aa, Homo sapiens
  Table A; Target 64450; HLA-B*07:02; PKHD1; ENSG00000170927; TAA
TPQPGNRGLL

SEQ ID NO: 64451 - protein, 9 aa, Homo sapiens
  Table A; Target 64451; HLA-A*30:02; PKHD1; ENSG00000170927; TAA
TQAETQDGY

SEQ ID NO: 64452 - protein, 9 aa, Homo sapiens
  Table A; Target 64452; HLA-B*15:01; PKHD1; ENSG00000170927; TAA
TQAETQDGY

SEQ ID NO: 64453 - protein, 9 aa, Homo sapiens
  Table A; Target 64453; HLA-B*15:03; PKHD1; ENSG00000170927; TAA
TQAETQDGY

SEQ ID NO: 64454 - protein, 8 aa, Homo sapiens
  Table A; Target 64454; HLA-C*05:01; PKHD1; ENSG00000170927; TAA
TQDGYVSF

SEQ ID NO: 64455 - protein, 9 aa, Homo sapiens
  Table A; Target 64455; HLA-A*01:01; PKHD1; ENSG00000170927; TAA
TQDGYVSFY

SEQ ID NO: 64456 - protein, 9 aa, Homo sapiens
  Table A; Target 64456; HLA-A*30:02; PKHD1; ENSG00000170927; TAA
TQDGYVSFY

SEQ ID NO: 64457 - protein, 9 aa, Homo sapiens
  Table A; Target 64457; HLA-B*38:01; PKHD1; ENSG00000170927; TAA
TQDGYVSFY

SEQ ID NO: 64458 - protein, 9 aa, Homo sapiens
  Table A; Target 64458; HLA-B*39:01; PKHD1; ENSG00000170927; TAA
TQDGYVSFY

SEQ ID NO: 64459 - protein, 9 aa, Homo sapiens
  Table A; Target 64459; HLA-C*05:01; PKHD1; ENSG00000170927; TAA
TQDGYVSFY

SEQ ID NO: 64460 - protein, 9 aa, Homo sapiens
  Table A; Target 64460; HLA-C*07:04; PKHD1; ENSG00000170927; TAA
TQDGYVSFY

SEQ ID NO: 64461 - protein, 11 aa, Homo sapiens
  Table A; Target 64461; HLA-B*38:01; PKHD1; ENSG00000170927; TAA
TQDGYVSFYNL

SEQ ID NO: 64462 - protein, 11 aa, Homo sapiens
  Table A; Target 64462; HLA-B*39:01; PKHD1; ENSG00000170927; TAA
TQDGYVSFYNL

SEQ ID NO: 64463 - protein, 9 aa, Homo sapiens
  Table A; Target 64463; HLA-B*15:01; PKHD1; ENSG00000170927; TAA
TQGNFSLQF

SEQ ID NO: 64464 - protein, 9 aa, Homo sapiens
  Table A; Target 64464; HLA-B*15:03; PKHD1; ENSG00000170927; TAA
TQGNFSLQF

SEQ ID NO: 64465 - protein, 9 aa, Homo sapiens
  Table A; Target 64465; HLA-B*38:01; PKHD1; ENSG00000170927; TAA
TQGNFSLQF

SEQ ID NO: 64466 - protein, 9 aa, Homo sapiens
  Table A; Target 64466; HLA-C*07:04; PKHD1; ENSG00000170927; TAA
TQGNFSLQF

SEQ ID NO: 64467 - protein, 9 aa, Homo sapiens
  Table A; Target 64467; HLA-A*23:01; PKHD1; ENSG00000170927; TAA
TQIGDLPNF

SEQ ID NO: 64468 - protein, 9 aa, Homo sapiens
  Table A; Target 64468; HLA-A*26:01; PKHD1; ENSG00000170927; TAA
TQIGDLPNF

SEQ ID NO: 64469 - protein, 9 aa, Homo sapiens
  Table A; Target 64469; HLA-B*15:01; PKHD1; ENSG00000170927; TAA
TQIGDLPNF

SEQ ID NO: 64470 - protein, 9 aa, Homo sapiens
  Table A; Target 64470; HLA-B*15:03; PKHD1; ENSG00000170927; TAA
TQIGDLPNF

SEQ ID NO: 64471 - protein, 9 aa, Homo sapiens
  Table A; Target 64471; HLA-B*38:01; PKHD1; ENSG00000170927; TAA
TQIGDLPNF

SEQ ID NO: 64472 - protein, 9 aa, Homo sapiens
  Table A; Target 64472; HLA-B*39:01; PKHD1; ENSG00000170927; TAA
TQIGDLPNF

SEQ ID NO: 64473 - protein, 10 aa, Homo sapiens
  Table A; Target 64473; HLA-B*13:02; PKHD1; ENSG00000170927; TAA
TQIGDLPNFI

SEQ ID NO: 64474 - protein, 9 aa, Homo sapiens
  Table A; Target 64474; HLA-B*13:02; PKHD1; ENSG00000170927; TAA
TQSAWGLEV

SEQ ID NO: 64475 - protein, 10 aa, Homo sapiens
  Table A; Target 64475; HLA-B*38:01; PKHD1; ENSG00000170927; TAA
TQSFQGNVSL

SEQ ID NO: 64476 - protein, 10 aa, Homo sapiens
  Table A; Target 64476; HLA-B*39:01; PKHD1; ENSG00000170927; TAA
TQSFQGNVSL

SEQ ID NO: 64477 - protein, 9 aa, Homo sapiens
  Table A; Target 64477; HLA-A*30:02; PKHD1; ENSG00000170927; TAA
TQSKGVIGY

SEQ ID NO: 64478 - protein, 9 aa, Homo sapiens
  Table A; Target 64478; HLA-A*32:01; PKHD1; ENSG00000170927; TAA
TQSKGVIGY

SEQ ID NO: 64479 - protein, 9 aa, Homo sapiens
  Table A; Target 64479; HLA-B*15:01; PKHD1; ENSG00000170927; TAA
TQSKGVIGY

SEQ ID NO: 64480 - protein, 9 aa, Homo sapiens
  Table A; Target 64480; HLA-B*15:03; PKHD1; ENSG00000170927; TAA
TQSKGVIGY

SEQ ID NO: 64481 - protein, 9 aa, Homo sapiens
  Table A; Target 64481; HLA-B*39:01; PKHD1; ENSG00000170927; TAA
TQSKGVIGY

SEQ ID NO: 64482 - protein, 9 aa, Homo sapiens
  Table A; Target 64482; HLA-C*07:04; PKHD1; ENSG00000170927; TAA
TQSKGVIGY

SEQ ID NO: 64483 - protein, 9 aa, Homo sapiens
  Table A; Target 64483; HLA-C*16:04; PKHD1; ENSG00000170927; TAA
TQSKGVIGY

SEQ ID NO: 64484 - protein, 9 aa, Homo sapiens
  Table A; Target 64484; HLA-A*03:02; PKHD1; ENSG00000170927; TAA
TSAPESALK

SEQ ID NO: 64485 - protein, 9 aa, Homo sapiens
  Table A; Target 64485; HLA-A*11:01; PKHD1; ENSG00000170927; TAA
TSAPESALK

SEQ ID NO: 64486 - protein, 10 aa, Homo sapiens
  Table A; Target 64486; HLA-A*25:01; PKHD1; ENSG00000170927; TAA
TSAPESALKW

SEQ ID NO: 64487 - protein, 10 aa, Homo sapiens
  Table A; Target 64487; HLA-B*57:01; PKHD1; ENSG00000170927; TAA
TSAPESALKW

SEQ ID NO: 64488 - protein, 10 aa, Homo sapiens
  Table A; Target 64488; HLA-B*58:01; PKHD1; ENSG00000170927; TAA
TSAPESALKW

SEQ ID NO: 64489 - protein, 10 aa, Homo sapiens
  Table A; Target 64489; HLA-C*07:06; PKHD1; ENSG00000170927; TAA
TSAPESALKW

SEQ ID NO: 64490 - protein, 9 aa, Homo sapiens
  Table A; Target 64490; HLA-A*01:01; PKHD1; ENSG00000170927; TAA
TSGSVSTFY

SEQ ID NO: 64491 - protein, 9 aa, Homo sapiens
  Table A; Target 64491; HLA-A*29:02; PKHD1; ENSG00000170927; TAA
TSGSVSTFY

SEQ ID NO: 64492 - protein, 9 aa, Homo sapiens
  Table A; Target 64492; HLA-A*30:02; PKHD1; ENSG00000170927; TAA
TSGSVSTFY

SEQ ID NO: 64493 - protein, 10 aa, Homo sapiens
  Table A; Target 64493; HLA-A*68:01; PKHD1; ENSG00000170927; TAA
TSGTEPFCGR

SEQ ID NO: 64494 - protein, 8 aa, Homo sapiens
  Table A; Target 64494; HLA-C*01:02; PKHD1; ENSG00000170927; TAA
TSPPGVNF

SEQ ID NO: 64495 - protein, 9 aa, Homo sapiens
  Table A; Target 64495; HLA-B*46:01; PKHD1; ENSG00000170927; TAA
TSQAPLLSF

SEQ ID NO: 64496 - protein, 9 aa, Homo sapiens
  Table A; Target 64496; HLA-B*58:01; PKHD1; ENSG00000170927; TAA
TSQAPLLSF

SEQ ID NO: 64497 - protein, 9 aa, Homo sapiens
  Table A; Target 64497; HLA-C*03:04; PKHD1; ENSG00000170927; TAA
TSQAPLLSF

SEQ ID NO: 64498 - protein, 9 aa, Homo sapiens
  Table A; Target 64498; HLA-A*02:03; PKHD1; ENSG00000170927; TAA
TSRVIITAV

SEQ ID NO: 64499 - protein, 11 aa, Homo sapiens
  Table A; Target 64499; HLA-A*33:01; PKHD1; ENSG00000170927; TAA
TSTDRAPSNPR

SEQ ID NO: 64500 - protein, 9 aa, Homo sapiens
  Table A; Target 64500; HLA-A*25:01; PKHD1; ENSG00000170927; TAA
TTADEPMVF

SEQ ID NO: 64501 - protein, 9 aa, Homo sapiens
  Table A; Target 64501; HLA-A*26:01; PKHD1; ENSG00000170927; TAA
TTADEPMVF

SEQ ID NO: 64502 - protein, 9 aa, Homo sapiens
  Table A; Target 64502; HLA-A*32:01; PKHD1; ENSG00000170927; TAA
TTADEPMVF

SEQ ID NO: 64503 - protein, 9 aa, Homo sapiens
  Table A; Target 64503; HLA-B*35:01; PKHD1; ENSG00000170927; TAA
TTADEPMVF

SEQ ID NO: 64504 - protein, 9 aa, Homo sapiens
  Table A; Target 64504; HLA-B*57:01; PKHD1; ENSG00000170927; TAA
TTADEPMVF

SEQ ID NO: 64505 - protein, 9 aa, Homo sapiens
  Table A; Target 64505; HLA-B*58:01; PKHD1; ENSG00000170927; TAA
TTADEPMVF

SEQ ID NO: 64506 - protein, 9 aa, Homo sapiens
  Table A; Target 64506; HLA-C*02:02; PKHD1; ENSG00000170927; TAA
TTADEPMVF

SEQ ID NO: 64507 - protein, 9 aa, Homo sapiens
  Table A; Target 64507; HLA-C*03:04; PKHD1; ENSG00000170927; TAA
TTADEPMVF

SEQ ID NO: 64508 - protein, 9 aa, Homo sapiens
  Table A; Target 64508; HLA-C*05:01; PKHD1; ENSG00000170927; TAA
TTADEPMVF

SEQ ID NO: 64509 - protein, 9 aa, Homo sapiens
  Table A; Target 64509; HLA-C*07:04; PKHD1; ENSG00000170927; TAA
TTADEPMVF

SEQ ID NO: 64510 - protein, 9 aa, Homo sapiens
  Table A; Target 64510; HLA-C*07:06; PKHD1; ENSG00000170927; TAA
TTADEPMVF

SEQ ID NO: 64511 - protein, 9 aa, Homo sapiens
  Table A; Target 64511; HLA-C*12:03; PKHD1; ENSG00000170927; TAA
TTADEPMVF

SEQ ID NO: 64512 - protein, 10 aa, Homo sapiens
  Table A; Target 64512; HLA-A*68:02; PKHD1; ENSG00000170927; TAA
TTADEPMVFV

SEQ ID NO: 64513 - protein, 10 aa, Homo sapiens
  Table A; Target 64513; HLA-A*11:01; PKHD1; ENSG00000170927; TAA
TTIEELLAVK

SEQ ID NO: 64514 - protein, 10 aa, Homo sapiens
  Table A; Target 64514; HLA-A*68:01; PKHD1; ENSG00000170927; TAA
TTIEELLAVK

SEQ ID NO: 64515 - protein, 10 aa, Homo sapiens
  Table A; Target 64515; HLA-A*68:02; PKHD1; ENSG00000170927; TAA
TTVNYVRDTL

SEQ ID NO: 64516 - protein, 9 aa, Homo sapiens
  Table A; Target 64516; HLA-B*35:03; PKHD1; ENSG00000170927; TAA
TVAMATEQL

SEQ ID NO: 64517 - protein, 11 aa, Homo sapiens
  Table A; Target 64517; HLA-A*01:01; PKHD1; ENSG00000170927; TAA
TVETVQDTDLY

SEQ ID NO: 64518 - protein, 9 aa, Homo sapiens
  Table A; Target 64518; HLA-B*35:03; PKHD1; ENSG00000170927; TAA
TVIFDGLEL

SEQ ID NO: 64519 - protein, 10 aa, Homo sapiens
  Table A; Target 64519; HLA-A*25:01; PKHD1; ENSG00000170927; TAA
TVKEDLYTCY

SEQ ID NO: 64520 - protein, 10 aa, Homo sapiens
  Table A; Target 64520; HLA-A*26:01; PKHD1; ENSG00000170927; TAA
TVKEDLYTCY

SEQ ID NO: 64521 - protein, 10 aa, Homo sapiens
  Table A; Target 64521; HLA-A*29:02; PKHD1; ENSG00000170927; TAA
TVKEDLYTCY

SEQ ID NO: 64522 - protein, 10 aa, Homo sapiens
  Table A; Target 64522; HLA-A*30:02; PKHD1; ENSG00000170927; TAA
TVKEDLYTCY

SEQ ID NO: 64523 - protein, 9 aa, Homo sapiens
  Table A; Target 64523; HLA-A*03:01; PKHD1; ENSG00000170927; TAA
TVMVSVLEK

SEQ ID NO: 64524 - protein, 9 aa, Homo sapiens
  Table A; Target 64524; HLA-A*03:02; PKHD1; ENSG00000170927; TAA
TVMVSVLEK

SEQ ID NO: 64525 - protein, 9 aa, Homo sapiens
  Table A; Target 64525; HLA-A*11:01; PKHD1; ENSG00000170927; TAA
TVMVSVLEK

SEQ ID NO: 64526 - protein, 9 aa, Homo sapiens
  Table A; Target 64526; HLA-C*07:06; PKHD1; ENSG00000170927; TAA
TVMVSVLEK

SEQ ID NO: 64527 - protein, 8 aa, Homo sapiens
  Table A; Target 64527; HLA-C*01:02; PKHD1; ENSG00000170927; TAA
TVNIGAEL

SEQ ID NO: 64528 - protein, 9 aa, Homo sapiens
  Table A; Target 64528; HLA-A*32:01; PKHD1; ENSG00000170927; TAA
TVNYVRDTL

SEQ ID NO: 64529 - protein, 9 aa, Homo sapiens
  Table A; Target 64529; HLA-B*07:02; PKHD1; ENSG00000170927; TAA
TVNYVRDTL

SEQ ID NO: 64530 - protein, 9 aa, Homo sapiens
  Table A; Target 64530; HLA-A*25:01; PKHD1; ENSG00000170927; TAA
TVPAAVEVW

SEQ ID NO: 64531 - protein, 9 aa, Homo sapiens
  Table A; Target 64531; HLA-B*35:03; PKHD1; ENSG00000170927; TAA
TVQDTDLYL

SEQ ID NO: 64532 - protein, 10 aa, Homo sapiens
  Table A; Target 64532; HLA-A*03:02; PKHD1; ENSG00000170927; TAA
TVQDTDLYLK

SEQ ID NO: 64533 - protein, 10 aa, Homo sapiens
  Table A; Target 64533; HLA-A*11:01; PKHD1; ENSG00000170927; TAA
TVQDTDLYLK

SEQ ID NO: 64534 - protein, 10 aa, Homo sapiens
  Table A; Target 64534; HLA-B*27:02; PKHD1; ENSG00000170927; TAA
TVQDTDLYLK

SEQ ID NO: 64535 - protein, 10 aa, Homo sapiens
  Table A; Target 64535; HLA-A*31:01; PKHD1; ENSG00000170927; TAA
TVRGLLLNSR

SEQ ID NO: 64536 - protein, 11 aa, Homo sapiens
  Table A; Target 64536; HLA-B*07:02; PKHD1; ENSG00000170927; TAA
TVRSTGMISSL

SEQ ID NO: 64537 - protein, 11 aa, Homo sapiens
  Table A; Target 64537; HLA-A*68:01; PKHD1; ENSG00000170927; TAA
TVSQADSGTAR

SEQ ID NO: 64538 - protein, 11 aa, Homo sapiens
  Table A; Target 64538; HLA-C*07:06; PKHD1; ENSG00000170927; TAA
TVSQADSGTAR

SEQ ID NO: 64539 - protein, 9 aa, Homo sapiens
  Table A; Target 64539; HLA-B*35:03; PKHD1; ENSG00000170927; TAA
TVVGEDMRM

SEQ ID NO: 64540 - protein, 11 aa, Homo sapiens
  Table A; Target 64540; HLA-A*23:01; PKHD1; ENSG00000170927; TAA
TWLNPDVVTTY

SEQ ID NO: 64541 - protein, 11 aa, Homo sapiens
  Table A; Target 64541; HLA-A*29:02; PKHD1; ENSG00000170927; TAA
TWLNPDVVTTY

SEQ ID NO: 64542 - protein, 11 aa, Homo sapiens
  Table A; Target 64542; HLA-A*30:02; PKHD1; ENSG00000170927; TAA
TWLNPDVVTTY

SEQ ID NO: 64543 - protein, 9 aa, Homo sapiens
  Table A; Target 64543; HLA-A*24:02; PKHD1; ENSG00000170927; TAA
TYLREKHQI

SEQ ID NO: 64544 - protein, 9 aa, Homo sapiens
  Table A; Target 64544; HLA-C*14:02; PKHD1; ENSG00000170927; TAA
TYLVSGEGQ

SEQ ID NO: 64545 - protein, 9 aa, Homo sapiens
  Table A; Target 64545; HLA-A*24:02; PKHD1; ENSG00000170927; TAA
TYQFLMQGF

SEQ ID NO: 64546 - protein, 9 aa, Homo sapiens
  Table A; Target 64546; HLA-A*23:01; PKHD1; ENSG00000170927; TAA
TYVQCDLTV

SEQ ID NO: 64547 - protein, 9 aa, Homo sapiens
  Table A; Target 64547; HLA-C*14:02; PKHD1; ENSG00000170927; TAA
TYVSSLNPV

SEQ ID NO: 64548 - protein, 10 aa, Homo sapiens
  Table A; Target 64548; HLA-A*23:01; PKHD1; ENSG00000170927; TAA
TYVSSLNPVI

SEQ ID NO: 64549 - protein, 8 aa, Homo sapiens
  Table A; Target 64549; HLA-B*54:01; PKHD1; ENSG00000170927; TAA
VAFPFPHA

SEQ ID NO: 64550 - protein, 9 aa, Homo sapiens
  Table A; Target 64550; HLA-A*32:01; PKHD1; ENSG00000170927; TAA
VAFPFPHAA

SEQ ID NO: 64551 - protein, 9 aa, Homo sapiens
  Table A; Target 64551; HLA-B*54:01; PKHD1; ENSG00000170927; TAA
VAFPFPHAA

SEQ ID NO: 64552 - protein, 9 aa, Homo sapiens
  Table A; Target 64552; HLA-B*56:01; PKHD1; ENSG00000170927; TAA
VAFPFPHAA

SEQ ID NO: 64553 - protein, 9 aa, Homo sapiens
  Table A; Target 64553; HLA-C*02:02; PKHD1; ENSG00000170927; TAA
VAFPFPHAA

SEQ ID NO: 64554 - protein, 9 aa, Homo sapiens
  Table A; Target 64554; HLA-C*12:03; PKHD1; ENSG00000170927; TAA
VAFPFPHAA

SEQ ID NO: 64555 - protein, 8 aa, Homo sapiens
  Table A; Target 64555; HLA-B*08:01; PKHD1; ENSG00000170927; TAA
VAGEHHIL

SEQ ID NO: 64556 - protein, 8 aa, Homo sapiens
  Table A; Target 64556; HLA-C*03:03; PKHD1; ENSG00000170927; TAA
VAGEHHIL

SEQ ID NO: 64557 - protein, 8 aa, Homo sapiens
  Table A; Target 64557; HLA-C*16:01; PKHD1; ENSG00000170927; TAA
VAGEHHIL

SEQ ID NO: 64558 - protein, 9 aa, Homo sapiens
  Table A; Target 64558; HLA-A*11:01; PKHD1; ENSG00000170927; TAA
VAGEHHILK

SEQ ID NO: 64559 - protein, 9 aa, Homo sapiens
  Table A; Target 64559; HLA-B*46:01; PKHD1; ENSG00000170927; TAA
VAHSSLHGL

SEQ ID NO: 64560 - protein, 9 aa, Homo sapiens
  Table A; Target 64560; HLA-C*03:04; PKHD1; ENSG00000170927; TAA
VAHSSLHGL

SEQ ID NO: 64561 - protein, 9 aa, Homo sapiens
  Table A; Target 64561; HLA-C*16:02; PKHD1; ENSG00000170927; TAA
VAHSSLHGL

SEQ ID NO: 64562 - protein, 8 aa, Homo sapiens
  Table A; Target 64562; HLA-B*51:01; PKHD1; ENSG00000170927; TAA
VALLSRSI

SEQ ID NO: 64563 - protein, 9 aa, Homo sapiens
  Table A; Target 64563; HLA-B*35:03; PKHD1; ENSG00000170927; TAA
VAMATEQLL

SEQ ID NO: 64564 - protein, 9 aa, Homo sapiens
  Table A; Target 64564; HLA-C*03:03; PKHD1; ENSG00000170927; TAA
VAMATEQLL

SEQ ID NO: 64565 - protein, 9 aa, Homo sapiens
  Table A; Target 64565; HLA-C*03:04; PKHD1; ENSG00000170927; TAA
VAMATEQLL

SEQ ID NO: 64566 - protein, 9 aa, Homo sapiens
  Table A; Target 64566; HLA-C*05:01; PKHD1; ENSG00000170927; TAA
VAMATEQLL

SEQ ID NO: 64567 - protein, 8 aa, Homo sapiens
  Table A; Target 64567; HLA-C*01:02; PKHD1; ENSG00000170927; TAA
VAPETNNY

SEQ ID NO: 64568 - protein, 10 aa, Homo sapiens
  Table A; Target 64568; HLA-A*23:01; PKHD1; ENSG00000170927; TAA
VAPETNNYTF

SEQ ID NO: 64569 - protein, 9 aa, Homo sapiens
  Table A; Target 64569; HLA-B*51:01; PKHD1; ENSG00000170927; TAA
VATSNSSRI

SEQ ID NO: 64570 - protein, 9 aa, Homo sapiens
  Table A; Target 64570; HLA-C*16:02; PKHD1; ENSG00000170927; TAA
VATSNSSRI

SEQ ID NO: 64571 - protein, 8 aa, Homo sapiens
  Table A; Target 64571; HLA-B*18:01; PKHD1; ENSG00000170927; TAA
VEFSNVSA

SEQ ID NO: 64572 - protein, 9 aa, Homo sapiens
  Table A; Target 64572; HLA-B*49:01; PKHD1; ENSG00000170927; TAA
VEFSNVSAG

SEQ ID NO: 64573 - protein, 11 aa, Homo sapiens
  Table A; Target 64573; HLA-B*44:02; PKHD1; ENSG00000170927; TAA
VEFSNVSAGSW

SEQ ID NO: 64574 - protein, 11 aa, Homo sapiens
  Table A; Target 64574; HLA-B*44:03; PKHD1; ENSG00000170927; TAA
VEFSNVSAGSW

SEQ ID NO: 64575 - protein, 11 aa, Homo sapiens
  Table A; Target 64575; HLA-C*16:04; PKHD1; ENSG00000170927; TAA
VEFSNVSAGSW

SEQ ID NO: 64576 - protein, 11 aa, Homo sapiens
  Table A; Target 64576; HLA-B*49:01; PKHD1; ENSG00000170927; TAA
VEGDYIGSQNV

SEQ ID NO: 64577 - protein, 8 aa, Homo sapiens
  Table A; Target 64577; HLA-A*30:01; PKHD1; ENSG00000170927; TAA
VEIENITL

SEQ ID NO: 64578 - protein, 8 aa, Homo sapiens
  Table A; Target 64578; HLA-B*18:01; PKHD1; ENSG00000170927; TAA
VEIENITL

SEQ ID NO: 64579 - protein, 8 aa, Homo sapiens
  Table A; Target 64579; HLA-B*40:01; PKHD1; ENSG00000170927; TAA
VEIENITL

SEQ ID NO: 64580 - protein, 8 aa, Homo sapiens
  Table A; Target 64580; HLA-B*49:01; PKHD1; ENSG00000170927; TAA
VEIENITL

SEQ ID NO: 64581 - protein, 9 aa, Homo sapiens
  Table A; Target 64581; HLA-A*30:01; PKHD1; ENSG00000170927; TAA
VEIENITLV

SEQ ID NO: 64582 - protein, 9 aa, Homo sapiens
  Table A; Target 64582; HLA-B*40:01; PKHD1; ENSG00000170927; TAA
VEIENITLV

SEQ ID NO: 64583 - protein, 9 aa, Homo sapiens
  Table A; Target 64583; HLA-B*49:01; PKHD1; ENSG00000170927; TAA
VEIENITLV

SEQ ID NO: 64584 - protein, 9 aa, Homo sapiens
  Table A; Target 64584; HLA-B*49:01; PKHD1; ENSG00000170927; TAA
VEIQNFGSP

SEQ ID NO: 64585 - protein, 10 aa, Homo sapiens
  Table A; Target 64585; HLA-B*40:01; PKHD1; ENSG00000170927; TAA
VEIQNFGSPL

SEQ ID NO: 64586 - protein, 10 aa, Homo sapiens
  Table A; Target 64586; HLA-B*49:01; PKHD1; ENSG00000170927; TAA
VEIQNFGSPL

SEQ ID NO: 64587 - protein, 11 aa, Homo sapiens
  Table A; Target 64587; HLA-B*44:02; PKHD1; ENSG00000170927; TAA
VEIQNFGSPLY

SEQ ID NO: 64588 - protein, 11 aa, Homo sapiens
  Table A; Target 64588; HLA-B*44:03; PKHD1; ENSG00000170927; TAA
VEIQNFGSPLY

SEQ ID NO: 64589 - protein, 10 aa, Homo sapiens
  Table A; Target 64589; HLA-B*49:01; PKHD1; ENSG00000170927; TAA
VENSVEIENI

SEQ ID NO: 64590 - protein, 11 aa, Homo sapiens
  Table A; Target 64590; HLA-B*44:02; PKHD1; ENSG00000170927; TAA
VESLGPPSEPW

SEQ ID NO: 64591 - protein, 8 aa, Homo sapiens
  Table A; Target 64591; HLA-B*49:01; PKHD1; ENSG00000170927; TAA
VETISKVI

SEQ ID NO: 64592 - protein, 9 aa, Homo sapiens
  Table A; Target 64592; HLA-B*49:01; PKHD1; ENSG00000170927; TAA
VETISKVIV

SEQ ID NO: 64593 - protein, 10 aa, Homo sapiens
  Table A; Target 64593; HLA-B*49:01; PKHD1; ENSG00000170927; TAA
VETQSFQGNV

SEQ ID NO: 64594 - protein, 9 aa, Homo sapiens
  Table A; Target 64594; HLA-B*40:01; PKHD1; ENSG00000170927; TAA
VETVQDTDL

SEQ ID NO: 64595 - protein, 9 aa, Homo sapiens
  Table A; Target 64595; HLA-A*30:01; PKHD1; ENSG00000170927; TAA
VEVHVQDAL

SEQ ID NO: 64596 - protein, 9 aa, Homo sapiens
  Table A; Target 64596; HLA-B*18:01; PKHD1; ENSG00000170927; TAA
VEVHVQDAL

SEQ ID NO: 64597 - protein, 9 aa, Homo sapiens
  Table A; Target 64597; HLA-B*40:01; PKHD1; ENSG00000170927; TAA
VEVHVQDAL

SEQ ID NO: 64598 - protein, 9 aa, Homo sapiens
  Table A; Target 64598; HLA-B*44:03; PKHD1; ENSG00000170927; TAA
VEVWAGNRF

SEQ ID NO: 64599 - protein, 8 aa, Homo sapiens
  Table A; Target 64599; HLA-C*14:02; PKHD1; ENSG00000170927; TAA
VFNKGKSM

SEQ ID NO: 64600 - protein, 8 aa, Homo sapiens
  Table A; Target 64600; HLA-C*01:02; PKHD1; ENSG00000170927; TAA
VFPETGSL

SEQ ID NO: 64601 - protein, 8 aa, Homo sapiens
  Table A; Target 64601; HLA-C*14:02; PKHD1; ENSG00000170927; TAA
VFPETGSL

SEQ ID NO: 64602 - protein, 9 aa, Homo sapiens
  Table A; Target 64602; HLA-C*14:02; PKHD1; ENSG00000170927; TAA
VFSAPQNSV

SEQ ID NO: 64603 - protein, 9 aa, Homo sapiens
  Table A; Target 64603; HLA-A*23:01; PKHD1; ENSG00000170927; TAA
VFSSVNANI

SEQ ID NO: 64604 - protein, 9 aa, Homo sapiens
  Table A; Target 64604; HLA-A*23:01; PKHD1; ENSG00000170927; TAA
VFTSEPNQW

SEQ ID NO: 64605 - protein, 9 aa, Homo sapiens
  Table A; Target 64605; HLA-A*24:02; PKHD1; ENSG00000170927; TAA
VFTSEPNQW

SEQ ID NO: 64606 - protein, 8 aa, Homo sapiens
  Table A; Target 64606; HLA-C*16:01; PKHD1; ENSG00000170927; TAA
VGAMRESF

SEQ ID NO: 64607 - protein, 8 aa, Homo sapiens
  Table A; Target 64607; HLA-C*05:01; PKHD1; ENSG00000170927; TAA
VGDAVEGL

SEQ ID NO: 64608 - protein, 10 aa, Homo sapiens
  Table A; Target 64608; HLA-C*05:01; PKHD1; ENSG00000170927; TAA
VGDAVEGLEL

SEQ ID NO: 64609 - protein, 9 aa, Homo sapiens
  Table A; Target 64609; HLA-B*13:02; PKHD1; ENSG00000170927; TAA
VGSPPVYSV

SEQ ID NO: 64610 - protein, 9 aa, Homo sapiens
  Table A; Target 64610; HLA-B*37:01; PKHD1; ENSG00000170927; TAA
VGSPPVYSV

SEQ ID NO: 64611 - protein, 9 aa, Homo sapiens
  Table A; Target 64611; HLA-C*02:02; PKHD1; ENSG00000170927; TAA
VGSPPVYSV

SEQ ID NO: 64612 - protein, 10 aa, Homo sapiens
  Table A; Target 64612; HLA-B*38:01; PKHD1; ENSG00000170927; TAA
VHPETIQEQL

SEQ ID NO: 64613 - protein, 10 aa, Homo sapiens
  Table A; Target 64613; HLA-B*39:01; PKHD1; ENSG00000170927; TAA
VHPETIQEQL

SEQ ID NO: 64614 - protein, 9 aa, Homo sapiens
  Table A; Target 64614; HLA-B*13:02; PKHD1; ENSG00000170927; TAA
VIAGGELKV

SEQ ID NO: 64615 - protein, 8 aa, Homo sapiens
  Table A; Target 64615; HLA-C*03:04; PKHD1; ENSG00000170927; TAA
VIFDGLEL

SEQ ID NO: 64616 - protein, 9 aa, Homo sapiens
  Table A; Target 64616; HLA-A*02:03; PKHD1; ENSG00000170927; TAA
VIFSNQTNV

SEQ ID NO: 64617 - protein, 9 aa, Homo sapiens
  Table A; Target 64617; HLA-B*13:02; PKHD1; ENSG00000170927; TAA
VIFSNQTNV

SEQ ID NO: 64618 - protein, 9 aa, Homo sapiens
  Table A; Target 64618; HLA-A*03:01; PKHD1; ENSG00000170927; TAA
VIISGTGVK

SEQ ID NO: 64619 - protein, 9 aa, Homo sapiens
  Table A; Target 64619; HLA-A*03:02; PKHD1; ENSG00000170927; TAA
VIISGTGVK

SEQ ID NO: 64620 - protein, 9 aa, Homo sapiens
  Table A; Target 64620; HLA-B*46:01; PKHD1; ENSG00000170927; TAA
VIITAVTEN

SEQ ID NO: 64621 - protein, 10 aa, Homo sapiens
  Table A; Target 64621; HLA-A*23:01; PKHD1; ENSG00000170927; TAA
VIITAVTENF

SEQ ID NO: 64622 - protein, 10 aa, Homo sapiens
  Table A; Target 64622; HLA-A*24:02; PKHD1; ENSG00000170927; TAA
VIITAVTENF

SEQ ID NO: 64623 - protein, 9 aa, Homo sapiens
  Table A; Target 64623; HLA-A*02:01; PKHD1; ENSG00000170927; TAA
VISDVPVQI

SEQ ID NO: 64624 - protein, 9 aa, Homo sapiens
  Table A; Target 64624; HLA-A*02:03; PKHD1; ENSG00000170927; TAA
VISDVPVQI

SEQ ID NO: 64625 - protein, 9 aa, Homo sapiens
  Table A; Target 64625; HLA-A*02:07; PKHD1; ENSG00000170927; TAA
VISDVPVQI

SEQ ID NO: 64626 - protein, 9 aa, Homo sapiens
  Table A; Target 64626; HLA-A*23:01; PKHD1; ENSG00000170927; TAA
VISDVPVQI

SEQ ID NO: 64627 - protein, 9 aa, Homo sapiens
  Table A; Target 64627; HLA-A*30:01; PKHD1; ENSG00000170927; TAA
VISDVPVQI

SEQ ID NO: 64628 - protein, 9 aa, Homo sapiens
  Table A; Target 64628; HLA-A*32:01; PKHD1; ENSG00000170927; TAA
VISDVPVQI

SEQ ID NO: 64629 - protein, 9 aa, Homo sapiens
  Table A; Target 64629; HLA-A*68:02; PKHD1; ENSG00000170927; TAA
VISDVPVQI

SEQ ID NO: 64630 - protein, 9 aa, Homo sapiens
  Table A; Target 64630; HLA-B*13:02; PKHD1; ENSG00000170927; TAA
VISDVPVQI

SEQ ID NO: 64631 - protein, 9 aa, Homo sapiens
  Table A; Target 64631; HLA-B*38:01; PKHD1; ENSG00000170927; TAA
VISDVPVQI

SEQ ID NO: 64632 - protein, 9 aa, Homo sapiens
  Table A; Target 64632; HLA-C*02:02; PKHD1; ENSG00000170927; TAA
VISDVPVQI

SEQ ID NO: 64633 - protein, 9 aa, Homo sapiens
  Table A; Target 64633; HLA-C*07:04; PKHD1; ENSG00000170927; TAA
VISDVPVQI

SEQ ID NO: 64634 - protein, 9 aa, Homo sapiens
  Table A; Target 64634; HLA-B*13:02; PKHD1; ENSG00000170927; TAA
VITAQQTGV

SEQ ID NO: 64635 - protein, 9 aa, Homo sapiens
  Table A; Target 64635; HLA-A*23:01; PKHD1; ENSG00000170927; TAA
VIVATSSSF

SEQ ID NO: 64636 - protein, 9 aa, Homo sapiens
  Table A; Target 64636; HLA-A*25:01; PKHD1; ENSG00000170927; TAA
VIVATSSSF

SEQ ID NO: 64637 - protein, 9 aa, Homo sapiens
  Table A; Target 64637; HLA-A*26:01; PKHD1; ENSG00000170927; TAA
VIVATSSSF

SEQ ID NO: 64638 - protein, 9 aa, Homo sapiens
  Table A; Target 64638; HLA-A*32:01; PKHD1; ENSG00000170927; TAA
VIVATSSSF

SEQ ID NO: 64639 - protein, 9 aa, Homo sapiens
  Table A; Target 64639; HLA-B*15:01; PKHD1; ENSG00000170927; TAA
VIVATSSSF

SEQ ID NO: 64640 - protein, 9 aa, Homo sapiens
  Table A; Target 64640; HLA-B*15:03; PKHD1; ENSG00000170927; TAA
VIVATSSSF

SEQ ID NO: 64641 - protein, 9 aa, Homo sapiens
  Table A; Target 64641; HLA-B*46:01; PKHD1; ENSG00000170927; TAA
VIVATSSSF

SEQ ID NO: 64642 - protein, 9 aa, Homo sapiens
  Table A; Target 64642; HLA-B*58:01; PKHD1; ENSG00000170927; TAA
VIVATSSSF

SEQ ID NO: 64643 - protein, 9 aa, Homo sapiens
  Table A; Target 64643; HLA-C*01:02; PKHD1; ENSG00000170927; TAA
VIVATSSSF

SEQ ID NO: 64644 - protein, 9 aa, Homo sapiens
  Table A; Target 64644; HLA-C*02:02; PKHD1; ENSG00000170927; TAA
VIVATSSSF

SEQ ID NO: 64645 - protein, 9 aa, Homo sapiens
  Table A; Target 64645; HLA-C*03:04; PKHD1; ENSG00000170927; TAA
VIVATSSSF

SEQ ID NO: 64646 - protein, 9 aa, Homo sapiens
  Table A; Target 64646; HLA-C*14:02; PKHD1; ENSG00000170927; TAA
VIVATSSSF

SEQ ID NO: 64647 - protein, 9 aa, Homo sapiens
  Table A; Target 64647; HLA-B*15:03; PKHD1; ENSG00000170927; TAA
VKEDLYTCY

SEQ ID NO: 64648 - protein, 8 aa, Homo sapiens
  Table A; Target 64648; HLA-A*03:02; PKHD1; ENSG00000170927; TAA
VLGQAFHK

SEQ ID NO: 64649 - protein, 9 aa, Homo sapiens
  Table A; Target 64649; HLA-A*23:01; PKHD1; ENSG00000170927; TAA
VLLNDNIVF

SEQ ID NO: 64650 - protein, 9 aa, Homo sapiens
  Table A; Target 64650; HLA-A*02:07; PKHD1; ENSG00000170927; TAA
VLPRAFTYV

SEQ ID NO: 64651 - protein, 9 aa, Homo sapiens
  Table A; Target 64651; HLA-A*24:02; PKHD1; ENSG00000170927; TAA
VLPRAFTYV

SEQ ID NO: 64652 - protein, 9 aa, Homo sapiens
  Table A; Target 64652; HLA-A*02:04; PKHD1; ENSG00000170927; TAA
VLQCVVPSL

SEQ ID NO: 64653 - protein, 9 aa, Homo sapiens
  Table A; Target 64653; HLA-A*02:01; PKHD1; ENSG00000170927; TAA
VLSEAHEGL

SEQ ID NO: 64654 - protein, 9 aa, Homo sapiens
  Table A; Target 64654; HLA-A*02:04; PKHD1; ENSG00000170927; TAA
VLSEAHEGL

SEQ ID NO: 64655 - protein, 10 aa, Homo sapiens
  Table A; Target 64655; HLA-A*01:01; PKHD1; ENSG00000170927; TAA
VLSEAHEGLY

SEQ ID NO: 64656 - protein, 10 aa, Homo sapiens
  Table A; Target 64656; HLA-A*30:02; PKHD1; ENSG00000170927; TAA
VLSEAHEGLY

SEQ ID NO: 64657 - protein, 9 aa, Homo sapiens
  Table A; Target 64657; HLA-A*03:01; PKHD1; ENSG00000170927; TAA
VLTPPAAQK

SEQ ID NO: 64658 - protein, 9 aa, Homo sapiens
  Table A; Target 64658; HLA-A*03:02; PKHD1; ENSG00000170927; TAA
VLTPPAAQK

SEQ ID NO: 64659 - protein, 9 aa, Homo sapiens
  Table A; Target 64659; HLA-A*11:01; PKHD1; ENSG00000170927; TAA
VLTPPAAQK

SEQ ID NO: 64660 - protein, 11 aa, Homo sapiens
  Table A; Target 64660; HLA-A*30:02; PKHD1; ENSG00000170927; TAA
VLTPPAAQKGY

SEQ ID NO: 64661 - protein, 10 aa, Homo sapiens
  Table A; Target 64661; HLA-A*02:03; PKHD1; ENSG00000170927; TAA
VLYPNNGSQL

SEQ ID NO: 64662 - protein, 10 aa, Homo sapiens
  Table A; Target 64662; HLA-B*15:01; PKHD1; ENSG00000170927; TAA
VLYPNNGSQL

SEQ ID NO: 64663 - protein, 10 aa, Homo sapiens
  Table A; Target 64663; HLA-B*46:01; PKHD1; ENSG00000170927; TAA
VLYPNNGSQL

SEQ ID NO: 64664 - protein, 10 aa, Homo sapiens
  Table A; Target 64664; HLA-C*01:02; PKHD1; ENSG00000170927; TAA
VLYPNNGSQL

SEQ ID NO: 64665 - protein, 10 aa, Homo sapiens
  Table A; Target 64665; HLA-C*14:02; PKHD1; ENSG00000170927; TAA
VLYPNNGSQL

SEQ ID NO: 64666 - protein, 9 aa, Homo sapiens
  Table A; Target 64666; HLA-A*24:02; PKHD1; ENSG00000170927; TAA
VMPRIMAIF

SEQ ID NO: 64667 - protein, 9 aa, Homo sapiens
  Table A; Target 64667; HLA-A*33:01; PKHD1; ENSG00000170927; TAA
VNMVVPALR

SEQ ID NO: 64668 - protein, 9 aa, Homo sapiens
  Table A; Target 64668; HLA-A*33:03; PKHD1; ENSG00000170927; TAA
VNMVVPALR

SEQ ID NO: 64669 - protein, 9 aa, Homo sapiens
  Table A; Target 64669; HLA-C*16:01; PKHD1; ENSG00000170927; TAA
VNSSFGRVV

SEQ ID NO: 64670 - protein, 10 aa, Homo sapiens
  Table A; Target 64670; HLA-A*30:02; PKHD1; ENSG00000170927; TAA
VNVTVIRGDY

SEQ ID NO: 64671 - protein, 8 aa, Homo sapiens
  Table A; Target 64671; HLA-B*08:01; PKHD1; ENSG00000170927; TAA
VNYVRDTL

SEQ ID NO: 64672 - protein, 8 aa, Homo sapiens
  Table A; Target 64672; HLA-C*16:01; PKHD1; ENSG00000170927; TAA
VNYVRDTL

SEQ ID NO: 64673 - protein, 9 aa, Homo sapiens
  Table A; Target 64673; HLA-B*07:02; PKHD1; ENSG00000170927; TAA
VPAPGTTGI

SEQ ID NO: 64674 - protein, 9 aa, Homo sapiens
  Table A; Target 64674; HLA-B*51:01; PKHD1; ENSG00000170927; TAA
VPAPGTTGI

SEQ ID NO: 64675 - protein, 9 aa, Homo sapiens
  Table A; Target 64675; HLA-B*56:01; PKHD1; ENSG00000170927; TAA
VPAPGTTGI

SEQ ID NO: 64676 - protein, 9 aa, Homo sapiens
  Table A; Target 64676; HLA-C*07:02; PKHD1; ENSG00000170927; TAA
VPAPGTTGI

SEQ ID NO: 64677 - protein, 11 aa, Homo sapiens
  Table A; Target 64677; HLA-B*56:01; PKHD1; ENSG00000170927; TAA
VPAPGTTGITS

SEQ ID NO: 64678 - protein, 9 aa, Homo sapiens
  Table A; Target 64678; HLA-B*35:01; PKHD1; ENSG00000170927; TAA
VPCDVFPVF

SEQ ID NO: 64679 - protein, 9 aa, Homo sapiens
  Table A; Target 64679; HLA-B*35:01; PKHD1; ENSG00000170927; TAA
VPDHWAESM

SEQ ID NO: 64680 - protein, 9 aa, Homo sapiens
  Table A; Target 64680; HLA-B*35:01; PKHD1; ENSG00000170927; TAA
VPGKLIHVY

SEQ ID NO: 64681 - protein, 9 aa, Homo sapiens
  Table A; Target 64681; HLA-A*30:02; PKHD1; ENSG00000170927; TAA
VPSLPAGEY

SEQ ID NO: 64682 - protein, 9 aa, Homo sapiens
  Table A; Target 64682; HLA-B*35:01; PKHD1; ENSG00000170927; TAA
VPSLPAGEY

SEQ ID NO: 64683 - protein, 9 aa, Homo sapiens
  Table A; Target 64683; HLA-B*56:01; PKHD1; ENSG00000170927; TAA
VPTGNGSVA

SEQ ID NO: 64684 - protein, 10 aa, Homo sapiens
  Table A; Target 64684; HLA-B*07:02; PKHD1; ENSG00000170927; TAA
VPTGNGSVAL

SEQ ID NO: 64685 - protein, 10 aa, Homo sapiens
  Table A; Target 64685; HLA-B*35:03; PKHD1; ENSG00000170927; TAA
VPTGNGSVAL

SEQ ID NO: 64686 - protein, 10 aa, Homo sapiens
  Table A; Target 64686; HLA-C*07:02; PKHD1; ENSG00000170927; TAA
VPTGNGSVAL

SEQ ID NO: 64687 - protein, 9 aa, Homo sapiens
  Table A; Target 64687; HLA-B*15:01; PKHD1; ENSG00000170927; TAA
VQCDLTVAM

SEQ ID NO: 64688 - protein, 9 aa, Homo sapiens
  Table A; Target 64688; HLA-B*15:03; PKHD1; ENSG00000170927; TAA
VQCDLTVAM

SEQ ID NO: 64689 - protein, 9 aa, Homo sapiens
  Table A; Target 64689; HLA-B*18:01; PKHD1; ENSG00000170927; TAA
VQCDLTVAM

SEQ ID NO: 64690 - protein, 9 aa, Homo sapiens
  Table A; Target 64690; HLA-B*39:01; PKHD1; ENSG00000170927; TAA
VQCDLTVAM

SEQ ID NO: 64691 - protein, 8 aa, Homo sapiens
  Table A; Target 64691; HLA-C*05:01; PKHD1; ENSG00000170927; TAA
VQDTDLYL

SEQ ID NO: 64692 - protein, 9 aa, Homo sapiens
  Table A; Target 64692; HLA-A*03:02; PKHD1; ENSG00000170927; TAA
VQDTDLYLK

SEQ ID NO: 64693 - protein, 9 aa, Homo sapiens
  Table A; Target 64693; HLA-A*11:01; PKHD1; ENSG00000170927; TAA
VQDTDLYLK

SEQ ID NO: 64694 - protein, 10 aa, Homo sapiens
  Table A; Target 64694; HLA-B*15:01; PKHD1; ENSG00000170927; TAA
VQFQVLGQAF

SEQ ID NO: 64695 - protein, 10 aa, Homo sapiens
  Table A; Target 64695; HLA-B*15:03; PKHD1; ENSG00000170927; TAA
VQFQVLGQAF

SEQ ID NO: 64696 - protein, 10 aa, Homo sapiens
  Table A; Target 64696; HLA-C*16:04; PKHD1; ENSG00000170927; TAA
VQFQVLGQAF

SEQ ID NO: 64697 - protein, 9 aa, Homo sapiens
  Table A; Target 64697; HLA-A*01:01; PKHD1; ENSG00000170927; TAA
VSDENLTGV

SEQ ID NO: 64698 - protein, 9 aa, Homo sapiens
  Table A; Target 64698; HLA-A*02:01; PKHD1; ENSG00000170927; TAA
VSDENLTGV

SEQ ID NO: 64699 - protein, 9 aa, Homo sapiens
  Table A; Target 64699; HLA-C*05:01; PKHD1; ENSG00000170927; TAA
VSDENLTGV

SEQ ID NO: 64700 - protein, 9 aa, Homo sapiens
  Table A; Target 64700; HLA-A*01:01; PKHD1; ENSG00000170927; TAA
VSDGGELRI

SEQ ID NO: 64701 - protein, 9 aa, Homo sapiens
  Table A; Target 64701; HLA-C*05:01; PKHD1; ENSG00000170927; TAA
VSDGGELRI

SEQ ID NO: 64702 - protein, 8 aa, Homo sapiens
  Table A; Target 64702; HLA-A*03:02; PKHD1; ENSG00000170927; TAA
VSFSVFNK

SEQ ID NO: 64703 - protein, 8 aa, Homo sapiens
  Table A; Target 64703; HLA-A*11:01; PKHD1; ENSG00000170927; TAA
VSFSVFNK

SEQ ID NO: 64704 - protein, 8 aa, Homo sapiens
  Table A; Target 64704; HLA-C*16:01; PKHD1; ENSG00000170927; TAA
VSGNHTVL

SEQ ID NO: 64705 - protein, 9 aa, Homo sapiens
  Table A; Target 64705; HLA-A*01:01; PKHD1; ENSG00000170927; TAA
VSLILFGSY

SEQ ID NO: 64706 - protein, 9 aa, Homo sapiens
  Table A; Target 64706; HLA-A*30:02; PKHD1; ENSG00000170927; TAA
VSLILFGSY

SEQ ID NO: 64707 - protein, 9 aa, Homo sapiens
  Table A; Target 64707; HLA-A*23:01; PKHD1; ENSG00000170927; TAA
VSNTTFVNF

SEQ ID NO: 64708 - protein, 9 aa, Homo sapiens
  Table A; Target 64708; HLA-A*32:01; PKHD1; ENSG00000170927; TAA
VSNTTFVNF

SEQ ID NO: 64709 - protein, 9 aa, Homo sapiens
  Table A; Target 64709; HLA-B*57:01; PKHD1; ENSG00000170927; TAA
VSNTTFVNF

SEQ ID NO: 64710 - protein, 9 aa, Homo sapiens
  Table A; Target 64710; HLA-B*58:01; PKHD1; ENSG00000170927; TAA
VSNTTFVNF

SEQ ID NO: 64711 - protein, 9 aa, Homo sapiens
  Table A; Target 64711; HLA-C*02:02; PKHD1; ENSG00000170927; TAA
VSNTTFVNF

SEQ ID NO: 64712 - protein, 10 aa, Homo sapiens
  Table A; Target 64712; HLA-A*01:01; PKHD1; ENSG00000170927; TAA
VSVVGSPPVY

SEQ ID NO: 64713 - protein, 10 aa, Homo sapiens
  Table A; Target 64713; HLA-A*30:02; PKHD1; ENSG00000170927; TAA
VSVVGSPPVY

SEQ ID NO: 64714 - protein, 9 aa, Homo sapiens
  Table A; Target 64714; HLA-A*01:01; PKHD1; ENSG00000170927; TAA
VTDSLLLGH

SEQ ID NO: 64715 - protein, 9 aa, Homo sapiens
  Table A; Target 64715; HLA-A*03:01; PKHD1; ENSG00000170927; TAA
VTDSLLLGH

SEQ ID NO: 64716 - protein, 9 aa, Homo sapiens
  Table A; Target 64716; HLA-A*11:01; PKHD1; ENSG00000170927; TAA
VTDSLLLGH

SEQ ID NO: 64717 - protein, 10 aa, Homo sapiens
  Table A; Target 64717; HLA-A*01:01; PKHD1; ENSG00000170927; TAA
VTDSLLLGHF

SEQ ID NO: 64718 - protein, 9 aa, Homo sapiens
  Table A; Target 64718; HLA-A*33:03; PKHD1; ENSG00000170927; TAA
VTNNLVVLM

SEQ ID NO: 64719 - protein, 10 aa, Homo sapiens
  Table A; Target 64719; HLA-A*01:01; PKHD1; ENSG00000170927; TAA
VTQSKGVIGY

SEQ ID NO: 64720 - protein, 10 aa, Homo sapiens
  Table A; Target 64720; HLA-A*30:02; PKHD1; ENSG00000170927; TAA
VTQSKGVIGY

SEQ ID NO: 64721 - protein, 10 aa, Homo sapiens
  Table A; Target 64721; HLA-A*32:01; PKHD1; ENSG00000170927; TAA
VTQSKGVIGY

SEQ ID NO: 64722 - protein, 10 aa, Homo sapiens
  Table A; Target 64722; HLA-C*16:02; PKHD1; ENSG00000170927; TAA
VTQSKGVIGY

SEQ ID NO: 64723 - protein, 9 aa, Homo sapiens
  Table A; Target 64723; HLA-A*32:01; PKHD1; ENSG00000170927; TAA
VTSGFVDVF

SEQ ID NO: 64724 - protein, 9 aa, Homo sapiens
  Table A; Target 64724; HLA-A*23:01; PKHD1; ENSG00000170927; TAA
VTSPPGVNF

SEQ ID NO: 64725 - protein, 9 aa, Homo sapiens
  Table A; Target 64725; HLA-A*30:02; PKHD1; ENSG00000170927; TAA
VTSPPGVNF

SEQ ID NO: 64726 - protein, 9 aa, Homo sapiens
  Table A; Target 64726; HLA-A*32:01; PKHD1; ENSG00000170927; TAA
VTSPPGVNF

SEQ ID NO: 64727 - protein, 9 aa, Homo sapiens
  Table A; Target 64727; HLA-B*15:01; PKHD1; ENSG00000170927; TAA
VTSPPGVNF

SEQ ID NO: 64728 - protein, 9 aa, Homo sapiens
  Table A; Target 64728; HLA-B*15:03; PKHD1; ENSG00000170927; TAA
VTSPPGVNF

SEQ ID NO: 64729 - protein, 9 aa, Homo sapiens
  Table A; Target 64729; HLA-B*46:01; PKHD1; ENSG00000170927; TAA
VTSPPGVNF

SEQ ID NO: 64730 - protein, 9 aa, Homo sapiens
  Table A; Target 64730; HLA-B*57:01; PKHD1; ENSG00000170927; TAA
VTSPPGVNF

SEQ ID NO: 64731 - protein, 9 aa, Homo sapiens
  Table A; Target 64731; HLA-B*58:01; PKHD1; ENSG00000170927; TAA
VTSPPGVNF

SEQ ID NO: 64732 - protein, 9 aa, Homo sapiens
  Table A; Target 64732; HLA-C*02:02; PKHD1; ENSG00000170927; TAA
VTSPPGVNF

SEQ ID NO: 64733 - protein, 9 aa, Homo sapiens
  Table A; Target 64733; HLA-C*03:03; PKHD1; ENSG00000170927; TAA
VTSPPGVNF

SEQ ID NO: 64734 - protein, 9 aa, Homo sapiens
  Table A; Target 64734; HLA-C*03:04; PKHD1; ENSG00000170927; TAA
VTSPPGVNF

SEQ ID NO: 64735 - protein, 9 aa, Homo sapiens
  Table A; Target 64735; HLA-C*05:01; PKHD1; ENSG00000170927; TAA
VTSPPGVNF

SEQ ID NO: 64736 - protein, 9 aa, Homo sapiens
  Table A; Target 64736; HLA-C*16:01; PKHD1; ENSG00000170927; TAA
VTSPPGVNF

SEQ ID NO: 64737 - protein, 9 aa, Homo sapiens
  Table A; Target 64737; HLA-C*03:03; PKHD1; ENSG00000170927; TAA
VTVENGQLL

SEQ ID NO: 64738 - protein, 9 aa, Homo sapiens
  Table A; Target 64738; HLA-C*03:04; PKHD1; ENSG00000170927; TAA
VTVENGQLL

SEQ ID NO: 64739 - protein, 10 aa, Homo sapiens
  Table A; Target 64739; HLA-A*25:01; PKHD1; ENSG00000170927; TAA
VVAGSERLGF

SEQ ID NO: 64740 - protein, 9 aa, Homo sapiens
  Table A; Target 64740; HLA-A*03:01; PKHD1; ENSG00000170927; TAA
VVGEDMRMK

SEQ ID NO: 64741 - protein, 9 aa, Homo sapiens
  Table A; Target 64741; HLA-A*03:02; PKHD1; ENSG00000170927; TAA
VVGEDMRMK

SEQ ID NO: 64742 - protein, 9 aa, Homo sapiens
  Table A; Target 64742; HLA-A*11:01; PKHD1; ENSG00000170927; TAA
VVGEDMRMK

SEQ ID NO: 64743 - protein, 8 aa, Homo sapiens
  Table A; Target 64743; HLA-A*30:02; PKHD1; ENSG00000170927; TAA
VVGSPPVY

SEQ ID NO: 64744 - protein, 8 aa, Homo sapiens
  Table A; Target 64744; HLA-C*12:03; PKHD1; ENSG00000170927; TAA
VVGSPPVY

SEQ ID NO: 64745 - protein, 9 aa, Homo sapiens
  Table A; Target 64745; HLA-A*02:03; PKHD1; ENSG00000170927; TAA
VVIISGTGV

SEQ ID NO: 64746 - protein, 9 aa, Homo sapiens
  Table A; Target 64746; HLA-B*13:02; PKHD1; ENSG00000170927; TAA
VVIISGTGV

SEQ ID NO: 64747 - protein, 9 aa, Homo sapiens
  Table A; Target 64747; HLA-B*46:01; PKHD1; ENSG00000170927; TAA
VVIISGTGV

SEQ ID NO: 64748 - protein, 9 aa, Homo sapiens
  Table A; Target 64748; HLA-C*01:02; PKHD1; ENSG00000170927; TAA
VVIISGTGV

SEQ ID NO: 64749 - protein, 9 aa, Homo sapiens
  Table A; Target 64749; HLA-A*32:01; PKHD1; ENSG00000170927; TAA
VVLMTQPAW

SEQ ID NO: 64750 - protein, 9 aa, Homo sapiens
  Table A; Target 64750; HLA-B*57:01; PKHD1; ENSG00000170927; TAA
VVLMTQPAW

SEQ ID NO: 64751 - protein, 9 aa, Homo sapiens
  Table A; Target 64751; HLA-B*58:01; PKHD1; ENSG00000170927; TAA
VVLMTQPAW

SEQ ID NO: 64752 - protein, 10 aa, Homo sapiens
  Table A; Target 64752; HLA-A*26:01; PKHD1; ENSG00000170927; TAA
VVPSLPAGEY

SEQ ID NO: 64753 - protein, 10 aa, Homo sapiens
  Table A; Target 64753; HLA-A*29:02; PKHD1; ENSG00000170927; TAA
VVPSLPAGEY

SEQ ID NO: 64754 - protein, 10 aa, Homo sapiens
  Table A; Target 64754; HLA-A*30:02; PKHD1; ENSG00000170927; TAA
VVPSLPAGEY

SEQ ID NO: 64755 - protein, 9 aa, Homo sapiens
  Table A; Target 64755; HLA-A*03:01; PKHD1; ENSG00000170927; TAA
VVTTYLREK

SEQ ID NO: 64756 - protein, 9 aa, Homo sapiens
  Table A; Target 64756; HLA-A*03:02; PKHD1; ENSG00000170927; TAA
VVTTYLREK

SEQ ID NO: 64757 - protein, 9 aa, Homo sapiens
  Table A; Target 64757; HLA-A*11:01; PKHD1; ENSG00000170927; TAA
VVTTYLREK

SEQ ID NO: 64758 - protein, 9 aa, Homo sapiens
  Table A; Target 64758; HLA-A*02:01; PKHD1; ENSG00000170927; TAA
VVYDGGVFL

SEQ ID NO: 64759 - protein, 9 aa, Homo sapiens
  Table A; Target 64759; HLA-A*03:01; PKHD1; ENSG00000170927; TAA
VVYDGGVFL

SEQ ID NO: 64760 - protein, 9 aa, Homo sapiens
  Table A; Target 64760; HLA-C*02:02; PKHD1; ENSG00000170927; TAA
VVYDGGVFL

SEQ ID NO: 64761 - protein, 9 aa, Homo sapiens
  Table A; Target 64761; HLA-C*03:03; PKHD1; ENSG00000170927; TAA
VVYDGGVFL

SEQ ID NO: 64762 - protein, 9 aa, Homo sapiens
  Table A; Target 64762; HLA-C*03:04; PKHD1; ENSG00000170927; TAA
VVYDGGVFL

SEQ ID NO: 64763 - protein, 9 aa, Homo sapiens
  Table A; Target 64763; HLA-C*05:01; PKHD1; ENSG00000170927; TAA
VVYDGGVFL

SEQ ID NO: 64764 - protein, 11 aa, Homo sapiens
  Table A; Target 64764; HLA-A*24:02; PKHD1; ENSG00000170927; TAA
VWESAGGAQIF

SEQ ID NO: 64765 - protein, 8 aa, Homo sapiens
  Table A; Target 64765; HLA-C*04:01; PKHD1; ENSG00000170927; TAA
VYDGGVFL

SEQ ID NO: 64766 - protein, 8 aa, Homo sapiens
  Table A; Target 64766; HLA-C*05:01; PKHD1; ENSG00000170927; TAA
VYDGGVFL

SEQ ID NO: 64767 - protein, 8 aa, Homo sapiens
  Table A; Target 64767; HLA-A*24:02; PKHD1; ENSG00000170927; TAA
VYGKVHLY

SEQ ID NO: 64768 - protein, 8 aa, Homo sapiens
  Table A; Target 64768; HLA-A*29:02; PKHD1; ENSG00000170927; TAA
VYGKVHLY

SEQ ID NO: 64769 - protein, 9 aa, Homo sapiens
  Table A; Target 64769; HLA-A*23:01; PKHD1; ENSG00000170927; TAA
VYIDQQTCL

SEQ ID NO: 64770 - protein, 9 aa, Homo sapiens
  Table A; Target 64770; HLA-A*24:02; PKHD1; ENSG00000170927; TAA
VYIDQQTCL

SEQ ID NO: 64771 - protein, 9 aa, Homo sapiens
  Table A; Target 64771; HLA-B*15:03; PKHD1; ENSG00000170927; TAA
VYIDQQTCL

SEQ ID NO: 64772 - protein, 9 aa, Homo sapiens
  Table A; Target 64772; HLA-B*46:01; PKHD1; ENSG00000170927; TAA
VYIDQQTCL

SEQ ID NO: 64773 - protein, 9 aa, Homo sapiens
  Table A; Target 64773; HLA-B*58:01; PKHD1; ENSG00000170927; TAA
VYIDQQTCL

SEQ ID NO: 64774 - protein, 9 aa, Homo sapiens
  Table A; Target 64774; HLA-C*01:02; PKHD1; ENSG00000170927; TAA
VYIDQQTCL

SEQ ID NO: 64775 - protein, 9 aa, Homo sapiens
  Table A; Target 64775; HLA-C*03:03; PKHD1; ENSG00000170927; TAA
VYIDQQTCL

SEQ ID NO: 64776 - protein, 9 aa, Homo sapiens
  Table A; Target 64776; HLA-C*03:04; PKHD1; ENSG00000170927; TAA
VYIDQQTCL

SEQ ID NO: 64777 - protein, 9 aa, Homo sapiens
  Table A; Target 64777; HLA-C*14:02; PKHD1; ENSG00000170927; TAA
VYIDQQTCL

SEQ ID NO: 64778 - protein, 9 aa, Homo sapiens
  Table A; Target 64778; HLA-A*23:01; PKHD1; ENSG00000170927; TAA
VYLQETGNW

SEQ ID NO: 64779 - protein, 9 aa, Homo sapiens
  Table A; Target 64779; HLA-A*24:02; PKHD1; ENSG00000170927; TAA
VYLQETGNW

SEQ ID NO: 64780 - protein, 9 aa, Homo sapiens
  Table A; Target 64780; HLA-C*14:02; PKHD1; ENSG00000170927; TAA
VYLQETGNW

SEQ ID NO: 64781 - protein, 9 aa, Homo sapiens
  Table A; Target 64781; HLA-A*24:02; PKHD1; ENSG00000170927; TAA
VYPKFQPPW

SEQ ID NO: 64782 - protein, 11 aa, Homo sapiens
  Table A; Target 64782; HLA-A*23:01; PKHD1; ENSG00000170927; TAA
VYPPSGVPGKL

SEQ ID NO: 64783 - protein, 11 aa, Homo sapiens
  Table A; Target 64783; HLA-A*24:02; PKHD1; ENSG00000170927; TAA
VYPPSGVPGKL

SEQ ID NO: 64784 - protein, 9 aa, Homo sapiens
  Table A; Target 64784; HLA-B*49:01; PKHD1; ENSG00000170927; TAA
WESAGGAQI

SEQ ID NO: 64785 - protein, 10 aa, Homo sapiens
  Table A; Target 64785; HLA-A*25:01; PKHD1; ENSG00000170927; TAA
WLNPDVVTTY

SEQ ID NO: 64786 - protein, 10 aa, Homo sapiens
  Table A; Target 64786; HLA-A*29:02; PKHD1; ENSG00000170927; TAA
WLNPDVVTTY

SEQ ID NO: 64787 - protein, 10 aa, Homo sapiens
  Table A; Target 64787; HLA-A*30:02; PKHD1; ENSG00000170927; TAA
WLNPDVVTTY

SEQ ID NO: 64788 - protein, 10 aa, Homo sapiens
  Table A; Target 64788; HLA-B*15:01; PKHD1; ENSG00000170927; TAA
WLNPDVVTTY

SEQ ID NO: 64789 - protein, 9 aa, Homo sapiens
  Table A; Target 64789; HLA-C*07:06; PKHD1; ENSG00000170927; TAA
YACSGNVSR

SEQ ID NO: 64790 - protein, 8 aa, Homo sapiens
  Table A; Target 64790; HLA-B*18:01; PKHD1; ENSG00000170927; TAA
YEAAATPV

SEQ ID NO: 64791 - protein, 8 aa, Homo sapiens
  Table A; Target 64791; HLA-B*49:01; PKHD1; ENSG00000170927; TAA
YEAAATPV

SEQ ID NO: 64792 - protein, 9 aa, Homo sapiens
  Table A; Target 64792; HLA-A*30:01; PKHD1; ENSG00000170927; TAA
YEAAATPVV

SEQ ID NO: 64793 - protein, 9 aa, Homo sapiens
  Table A; Target 64793; HLA-B*13:02; PKHD1; ENSG00000170927; TAA
YEAAATPVV

SEQ ID NO: 64794 - protein, 9 aa, Homo sapiens
  Table A; Target 64794; HLA-B*18:01; PKHD1; ENSG00000170927; TAA
YEAAATPVV

SEQ ID NO: 64795 - protein, 9 aa, Homo sapiens
  Table A; Target 64795; HLA-B*40:01; PKHD1; ENSG00000170927; TAA
YEAAATPVV

SEQ ID NO: 64796 - protein, 9 aa, Homo sapiens
  Table A; Target 64796; HLA-B*40:02; PKHD1; ENSG00000170927; TAA
YEAAATPVV

SEQ ID NO: 64797 - protein, 9 aa, Homo sapiens
  Table A; Target 64797; HLA-B*49:01; PKHD1; ENSG00000170927; TAA
YEAAATPVV

SEQ ID NO: 64798 - protein, 9 aa, Homo sapiens
  Table A; Target 64798; HLA-C*02:02; PKHD1; ENSG00000170927; TAA
YEAAATPVV

SEQ ID NO: 64799 - protein, 9 aa, Homo sapiens
  Table A; Target 64799; HLA-C*16:02; PKHD1; ENSG00000170927; TAA
YEAAATPVV

SEQ ID NO: 64800 - protein, 10 aa, Homo sapiens
  Table A; Target 64800; HLA-A*30:01; PKHD1; ENSG00000170927; TAA
YEAAATPVVT

SEQ ID NO: 64801 - protein, 10 aa, Homo sapiens
  Table A; Target 64801; HLA-B*40:01; PKHD1; ENSG00000170927; TAA
YEAAATPVVT

SEQ ID NO: 64802 - protein, 10 aa, Homo sapiens
  Table A; Target 64802; HLA-B*49:01; PKHD1; ENSG00000170927; TAA
YEAAATPVVT

SEQ ID NO: 64803 - protein, 11 aa, Homo sapiens
  Table A; Target 64803; HLA-A*30:01; PKHD1; ENSG00000170927; TAA
YEAAATPVVTA

SEQ ID NO: 64804 - protein, 11 aa, Homo sapiens
  Table A; Target 64804; HLA-B*49:01; PKHD1; ENSG00000170927; TAA
YEAAATPVVTA

SEQ ID NO: 64805 - protein, 9 aa, Homo sapiens
  Table A; Target 64805; HLA-B*44:02; PKHD1; ENSG00000170927; TAA
YEHVWTLSW

SEQ ID NO: 64806 - protein, 9 aa, Homo sapiens
  Table A; Target 64806; HLA-A*30:01; PKHD1; ENSG00000170927; TAA
YEPHEAEVL

SEQ ID NO: 64807 - protein, 9 aa, Homo sapiens
  Table A; Target 64807; HLA-B*40:01; PKHD1; ENSG00000170927; TAA
YEPHEAEVL

SEQ ID NO: 64808 - protein, 10 aa, Homo sapiens
  Table A; Target 64808; HLA-A*29:02; PKHD1; ENSG00000170927; TAA
YFNIMDNLLY

SEQ ID NO: 64809 - protein, 9 aa, Homo sapiens
  Table A; Target 64809; HLA-C*02:02; PKHD1; ENSG00000170927; TAA
YGSSYSTPF

SEQ ID NO: 64810 - protein, 9 aa, Homo sapiens
  Table A; Target 64810; HLA-B*38:01; PKHD1; ENSG00000170927; TAA
YHELQSPHV

SEQ ID NO: 64811 - protein, 10 aa, Homo sapiens
  Table A; Target 64811; HLA-B*38:01; PKHD1; ENSG00000170927; TAA
YHELQSPHVF

SEQ ID NO: 64812 - protein, 8 aa, Homo sapiens
  Table A; Target 64812; HLA-C*05:01; PKHD1; ENSG00000170927; TAA
YIDQQTCL

SEQ ID NO: 64813 - protein, 8 aa, Homo sapiens
  Table A; Target 64813; HLA-C*05:01; PKHD1; ENSG00000170927; TAA
YIDSPVIL

SEQ ID NO: 64814 - protein, 8 aa, Homo sapiens
  Table A; Target 64814; HLA-C*07:04; PKHD1; ENSG00000170927; TAA
YIDSPVIL

SEQ ID NO: 64815 - protein, 10 aa, Homo sapiens
  Table A; Target 64815; HLA-A*02:07; PKHD1; ENSG00000170927; TAA
YIDSPVILEA

SEQ ID NO: 64816 - protein, 9 aa, Homo sapiens
  Table A; Target 64816; HLA-A*23:01; PKHD1; ENSG00000170927; TAA
YIGSQNVSF

SEQ ID NO: 64817 - protein, 9 aa, Homo sapiens
  Table A; Target 64817; HLA-A*32:01; PKHD1; ENSG00000170927; TAA
YIGSQNVSF

SEQ ID NO: 64818 - protein, 9 aa, Homo sapiens
  Table A; Target 64818; HLA-B*15:01; PKHD1; ENSG00000170927; TAA
YIGSQNVSF

SEQ ID NO: 64819 - protein, 9 aa, Homo sapiens
  Table A; Target 64819; HLA-B*15:03; PKHD1; ENSG00000170927; TAA
YIGSQNVSF

SEQ ID NO: 64820 - protein, 9 aa, Homo sapiens
  Table A; Target 64820; HLA-B*18:01; PKHD1; ENSG00000170927; TAA
YIGSQNVSF

SEQ ID NO: 64821 - protein, 9 aa, Homo sapiens
  Table A; Target 64821; HLA-B*46:01; PKHD1; ENSG00000170927; TAA
YIGSQNVSF

SEQ ID NO: 64822 - protein, 9 aa, Homo sapiens
  Table A; Target 64822; HLA-B*58:01; PKHD1; ENSG00000170927; TAA
YIGSQNVSF

SEQ ID NO: 64823 - protein, 9 aa, Homo sapiens
  Table A; Target 64823; HLA-C*02:02; PKHD1; ENSG00000170927; TAA
YIGSQNVSF

SEQ ID NO: 64824 - protein, 9 aa, Homo sapiens
  Table A; Target 64824; HLA-C*07:04; PKHD1; ENSG00000170927; TAA
YIGSQNVSF

SEQ ID NO: 64825 - protein, 9 aa, Homo sapiens
  Table A; Target 64825; HLA-C*14:02; PKHD1; ENSG00000170927; TAA
YIGSQNVSF

SEQ ID NO: 64826 - protein, 9 aa, Homo sapiens
  Table A; Target 64826; HLA-A*01:01; PKHD1; ENSG00000170927; TAA
YIMPQVFHY

SEQ ID NO: 64827 - protein, 9 aa, Homo sapiens
  Table A; Target 64827; HLA-A*29:02; PKHD1; ENSG00000170927; TAA
YIMPQVFHY

SEQ ID NO: 64828 - protein, 9 aa, Homo sapiens
  Table A; Target 64828; HLA-C*02:02; PKHD1; ENSG00000170927; TAA
YIMPQVFHY

SEQ ID NO: 64829 - protein, 9 aa, Homo sapiens
  Table A; Target 64829; HLA-A*02:01; PKHD1; ENSG00000170927; TAA
YLNASDFTV

SEQ ID NO: 64830 - protein, 9 aa, Homo sapiens
  Table A; Target 64830; HLA-A*02:04; PKHD1; ENSG00000170927; TAA
YLNASDFTV

SEQ ID NO: 64831 - protein, 9 aa, Homo sapiens
  Table A; Target 64831; HLA-A*02:07; PKHD1; ENSG00000170927; TAA
YLNASDFTV

SEQ ID NO: 64832 - protein, 9 aa, Homo sapiens
  Table A; Target 64832; HLA-B*13:02; PKHD1; ENSG00000170927; TAA
YLNASDFTV

SEQ ID NO: 64833 - protein, 9 aa, Homo sapiens
  Table A; Target 64833; HLA-B*55:01; PKHD1; ENSG00000170927; TAA
YLNASDFTV

SEQ ID NO: 64834 - protein, 9 aa, Homo sapiens
  Table A; Target 64834; HLA-B*13:02; PKHD1; ENSG00000170927; TAA
YLQGSTPCV

SEQ ID NO: 64835 - protein, 11 aa, Homo sapiens
  Table A; Target 64835; HLA-A*02:01; PKHD1; ENSG00000170927; TAA
YLVSGEGQVQV

SEQ ID NO: 64836 - protein, 8 aa, Homo sapiens
  Table A; Target 64836; HLA-B*08:01; PKHD1; ENSG00000170927; TAA
YNILGHAL

SEQ ID NO: 64837 - protein, 8 aa, Homo sapiens
  Table A; Target 64837; HLA-C*03:04; PKHD1; ENSG00000170927; TAA
YNILGHAL

SEQ ID NO: 64838 - protein, 9 aa, Homo sapiens
  Table A; Target 64838; HLA-B*35:01; PKHD1; ENSG00000170927; TAA
YPIQEDHGL

SEQ ID NO: 64839 - protein, 9 aa, Homo sapiens
  Table A; Target 64839; HLA-B*35:03; PKHD1; ENSG00000170927; TAA
YPIQEDHGL

SEQ ID NO: 64840 - protein, 9 aa, Homo sapiens
  Table A; Target 64840; HLA-B*38:01; PKHD1; ENSG00000170927; TAA
YPIQEDHGL

SEQ ID NO: 64841 - protein, 9 aa, Homo sapiens
  Table A; Target 64841; HLA-B*55:01; PKHD1; ENSG00000170927; TAA
YPIQEDHGL

SEQ ID NO: 64842 - protein, 8 aa, Homo sapiens
  Table A; Target 64842; HLA-B*07:02; PKHD1; ENSG00000170927; TAA
YPNNGSQL

SEQ ID NO: 64843 - protein, 8 aa, Homo sapiens
  Table A; Target 64843; HLA-C*03:04; PKHD1; ENSG00000170927; TAA
YPNNGSQL

SEQ ID NO: 64844 - protein, 10 aa, Homo sapiens
  Table A; Target 64844; HLA-B*07:02; PKHD1; ENSG00000170927; TAA
YPNNGSQLEI

SEQ ID NO: 64845 - protein, 10 aa, Homo sapiens
  Table A; Target 64845; HLA-B*35:03; PKHD1; ENSG00000170927; TAA
YPNNGSQLEI

SEQ ID NO: 64846 - protein, 10 aa, Homo sapiens
  Table A; Target 64846; HLA-B*51:01; PKHD1; ENSG00000170927; TAA
YPNNGSQLEI

SEQ ID NO: 64847 - protein, 10 aa, Homo sapiens
  Table A; Target 64847; HLA-B*56:01; PKHD1; ENSG00000170927; TAA
YPNNGSQLEI

SEQ ID NO: 64848 - protein, 11 aa, Homo sapiens
  Table A; Target 64848; HLA-B*51:01; PKHD1; ENSG00000170927; TAA
YPPSGVPGKLI

SEQ ID NO: 64849 - protein, 9 aa, Homo sapiens
  Table A; Target 64849; HLA-B*54:01; PKHD1; ENSG00000170927; TAA
YPVVSVTSG

SEQ ID NO: 64850 - protein, 9 aa, Homo sapiens
  Table A; Target 64850; HLA-B*56:01; PKHD1; ENSG00000170927; TAA
YPVVSVTSG

SEQ ID NO: 64851 - protein, 10 aa, Homo sapiens
  Table A; Target 64851; HLA-B*35:01; PKHD1; ENSG00000170927; TAA
YPVVSVTSGF

SEQ ID NO: 64852 - protein, 9 aa, Homo sapiens
  Table A; Target 64852; HLA-A*02:01; PKHD1; ENSG00000170927; TAA
YQLAGQNQL

SEQ ID NO: 64853 - protein, 9 aa, Homo sapiens
  Table A; Target 64853; HLA-A*30:01; PKHD1; ENSG00000170927; TAA
YQLAGQNQL

SEQ ID NO: 64854 - protein, 9 aa, Homo sapiens
  Table A; Target 64854; HLA-B*13:02; PKHD1; ENSG00000170927; TAA
YQLAGQNQL

SEQ ID NO: 64855 - protein, 9 aa, Homo sapiens
  Table A; Target 64855; HLA-B*27:05; PKHD1; ENSG00000170927; TAA
YQLAGQNQL

SEQ ID NO: 64856 - protein, 9 aa, Homo sapiens
  Table A; Target 64856; HLA-B*38:01; PKHD1; ENSG00000170927; TAA
YQLAGQNQL

SEQ ID NO: 64857 - protein, 9 aa, Homo sapiens
  Table A; Target 64857; HLA-B*39:01; PKHD1; ENSG00000170927; TAA
YQLAGQNQL

SEQ ID NO: 64858 - protein, 9 aa, Homo sapiens
  Table A; Target 64858; HLA-C*16:01; PKHD1; ENSG00000170927; TAA
YSAVLPRAF

SEQ ID NO: 64859 - protein, 11 aa, Homo sapiens
  Table A; Target 64859; HLA-A*01:01; PKHD1; ENSG00000170927; TAA
YSAVLPRAFTY

SEQ ID NO: 64860 - protein, 9 aa, Homo sapiens
  Table A; Target 64860; HLA-A*25:01; PKHD1; ENSG00000170927; TAA
YSAYPKNSW

SEQ ID NO: 64861 - protein, 9 aa, Homo sapiens
  Table A; Target 64861; HLA-A*32:01; PKHD1; ENSG00000170927; TAA
YSAYPKNSW

SEQ ID NO: 64862 - protein, 9 aa, Homo sapiens
  Table A; Target 64862; HLA-B*58:01; PKHD1; ENSG00000170927; TAA
YSAYPKNSW

SEQ ID NO: 64863 - protein, 9 aa, Homo sapiens
  Table A; Target 64863; HLA-C*05:01; PKHD1; ENSG00000170927; TAA
YSDDLDVCI

SEQ ID NO: 64864 - protein, 9 aa, Homo sapiens
  Table A; Target 64864; HLA-B*57:01; PKHD1; ENSG00000170927; TAA
YSHNFTENW

SEQ ID NO: 64865 - protein, 9 aa, Homo sapiens
  Table A; Target 64865; HLA-B*35:03; PKHD1; ENSG00000170927; TAA
YSIDGDINL

SEQ ID NO: 64866 - protein, 9 aa, Homo sapiens
  Table A; Target 64866; HLA-B*40:01; PKHD1; ENSG00000170927; TAA
YSIDGDINL

SEQ ID NO: 64867 - protein, 9 aa, Homo sapiens
  Table A; Target 64867; HLA-B*58:01; PKHD1; ENSG00000170927; TAA
YSIDGDINL

SEQ ID NO: 64868 - protein, 9 aa, Homo sapiens
  Table A; Target 64868; HLA-C*03:03; PKHD1; ENSG00000170927; TAA
YSIDGDINL

SEQ ID NO: 64869 - protein, 9 aa, Homo sapiens
  Table A; Target 64869; HLA-C*03:04; PKHD1; ENSG00000170927; TAA
YSIDGDINL

SEQ ID NO: 64870 - protein, 9 aa, Homo sapiens
  Table A; Target 64870; HLA-C*05:01; PKHD1; ENSG00000170927; TAA
YSIDGDINL

SEQ ID NO: 64871 - protein, 10 aa, Homo sapiens
  Table A; Target 64871; HLA-A*26:01; PKHD1; ENSG00000170927; TAA
YSIDGDINLM

SEQ ID NO: 64872 - protein, 8 aa, Homo sapiens
  Table A; Target 64872; HLA-C*05:01; PKHD1; ENSG00000170927; TAA
YTDLDVEV

SEQ ID NO: 64873 - protein, 9 aa, Homo sapiens
  Table A; Target 64873; HLA-A*01:01; PKHD1; ENSG00000170927; TAA
YTDLDVEVH

SEQ ID NO: 64874 - protein, 10 aa, Homo sapiens
  Table A; Target 64874; HLA-A*01:01; PKHD1; ENSG00000170927; TAA
YTDLDVEVHV

SEQ ID NO: 64875 - protein, 10 aa, Homo sapiens
  Table A; Target 64875; HLA-B*13:02; PKHD1; ENSG00000170927; TAA
YVFSAPQNSV

SEQ ID NO: 64876 - protein, 9 aa, Homo sapiens
  Table A; Target 64876; HLA-B*13:02; PKHD1; ENSG00000170927; TAA
YVSSLNPVI

SEQ ID NO: 64877 - protein, 10 aa, Homo sapiens
  Table A; Target 64877; HLA-A*24:02; PKHD1; ENSG00000170927; TAA
YYLEAEHHGI

SEQ ID NO: 64878 - protein, 8 aa, Homo sapiens
  Table A; Target 64878; HLA-A*32:01; PMEL; ENSG00000185664; TAA
AAIPLTSC

SEQ ID NO: 64879 - protein, 8 aa, Homo sapiens
  Table A; Target 64879; HLA-B*46:01; PMEL; ENSG00000185664; TAA
AAIPLTSC

SEQ ID NO: 64880 - protein, 8 aa, Homo sapiens
  Table A; Target 64880; HLA-B*54:01; PMEL; ENSG00000185664; TAA
AAIPLTSC

SEQ ID NO: 64881 - protein, 8 aa, Homo sapiens
  Table A; Target 64881; HLA-B*56:01; PMEL; ENSG00000185664; TAA
AAIPLTSC

SEQ ID NO: 64882 - protein, 8 aa, Homo sapiens
  Table A; Target 64882; HLA-B*58:01; PMEL; ENSG00000185664; TAA
AAIPLTSC

SEQ ID NO: 64883 - protein, 8 aa, Homo sapiens
  Table A; Target 64883; HLA-C*12:03; PMEL; ENSG00000185664; TAA
AAIPLTSC

SEQ ID NO: 64884 - protein, 9 aa, Homo sapiens
  Table A; Target 64884; HLA-A*31:01; PMEL; ENSG00000185664; TAA
AAIPLTSCG

SEQ ID NO: 64885 - protein, 9 aa, Homo sapiens
  Table A; Target 64885; HLA-B*13:02; PMEL; ENSG00000185664; TAA
AAIPLTSCG

SEQ ID NO: 64886 - protein, 9 aa, Homo sapiens
  Table A; Target 64886; HLA-B*27:05; PMEL; ENSG00000185664; TAA
AAIPLTSCG

SEQ ID NO: 64887 - protein, 9 aa, Homo sapiens
  Table A; Target 64887; HLA-B*40:02; PMEL; ENSG00000185664; TAA
AAIPLTSCG

SEQ ID NO: 64888 - protein, 9 aa, Homo sapiens
  Table A; Target 64888; HLA-B*46:01; PMEL; ENSG00000185664; TAA
AAIPLTSCG

SEQ ID NO: 64889 - protein, 9 aa, Homo sapiens
  Table A; Target 64889; HLA-B*58:01; PMEL; ENSG00000185664; TAA
AAIPLTSCG

SEQ ID NO: 64890 - protein, 9 aa, Homo sapiens
  Table A; Target 64890; HLA-C*01:02; PMEL; ENSG00000185664; TAA
AAIPLTSCG

SEQ ID NO: 64891 - protein, 9 aa, Homo sapiens
  Table A; Target 64891; HLA-C*02:02; PMEL; ENSG00000185664; TAA
AAIPLTSCG

SEQ ID NO: 64892 - protein, 9 aa, Homo sapiens
  Table A; Target 64892; HLA-C*03:03; PMEL; ENSG00000185664; TAA
AAIPLTSCG

SEQ ID NO: 64893 - protein, 9 aa, Homo sapiens
  Table A; Target 64893; HLA-C*03:04; PMEL; ENSG00000185664; TAA
AAIPLTSCG

SEQ ID NO: 64894 - protein, 9 aa, Homo sapiens
  Table A; Target 64894; HLA-C*04:01; PMEL; ENSG00000185664; TAA
AAIPLTSCG

SEQ ID NO: 64895 - protein, 9 aa, Homo sapiens
  Table A; Target 64895; HLA-C*06:02; PMEL; ENSG00000185664; TAA
AAIPLTSCG

SEQ ID NO: 64896 - protein, 9 aa, Homo sapiens
  Table A; Target 64896; HLA-C*07:01; PMEL; ENSG00000185664; TAA
AAIPLTSCG

SEQ ID NO: 64897 - protein, 9 aa, Homo sapiens
  Table A; Target 64897; HLA-C*07:02; PMEL; ENSG00000185664; TAA
AAIPLTSCG

SEQ ID NO: 64898 - protein, 9 aa, Homo sapiens
  Table A; Target 64898; HLA-C*12:03; PMEL; ENSG00000185664; TAA
AAIPLTSCG

SEQ ID NO: 64899 - protein, 9 aa, Homo sapiens
  Table A; Target 64899; HLA-C*16:02; PMEL; ENSG00000185664; TAA
AAIPLTSCG

SEQ ID NO: 64900 - protein, 9 aa, Homo sapiens
  Table A; Target 64900; HLA-C*16:04; PMEL; ENSG00000185664; TAA
AAIPLTSCG

SEQ ID NO: 64901 - protein, 9 aa, Homo sapiens
  Table A; Target 64901; HLA-A*23:01; PMEL; ENSG00000185664; TAA
AAQVTTTEW

SEQ ID NO: 64902 - protein, 9 aa, Homo sapiens
  Table A; Target 64902; HLA-A*24:02; PMEL; ENSG00000185664; TAA
AAQVTTTEW

SEQ ID NO: 64903 - protein, 9 aa, Homo sapiens
  Table A; Target 64903; HLA-A*25:01; PMEL; ENSG00000185664; TAA
AAQVTTTEW

SEQ ID NO: 64904 - protein, 9 aa, Homo sapiens
  Table A; Target 64904; HLA-A*31:01; PMEL; ENSG00000185664; TAA
AAQVTTTEW

SEQ ID NO: 64905 - protein, 9 aa, Homo sapiens
  Table A; Target 64905; HLA-A*32:01; PMEL; ENSG00000185664; TAA
AAQVTTTEW

SEQ ID NO: 64906 - protein, 9 aa, Homo sapiens
  Table A; Target 64906; HLA-A*33:01; PMEL; ENSG00000185664; TAA
AAQVTTTEW

SEQ ID NO: 64907 - protein, 9 aa, Homo sapiens
  Table A; Target 64907; HLA-B*15:01; PMEL; ENSG00000185664; TAA
AAQVTTTEW

SEQ ID NO: 64908 - protein, 9 aa, Homo sapiens
  Table A; Target 64908; HLA-B*15:03; PMEL; ENSG00000185664; TAA
AAQVTTTEW

SEQ ID NO: 64909 - protein, 9 aa, Homo sapiens
  Table A; Target 64909; HLA-B*27:02; PMEL; ENSG00000185664; TAA
AAQVTTTEW

SEQ ID NO: 64910 - protein, 9 aa, Homo sapiens
  Table A; Target 64910; HLA-B*27:05; PMEL; ENSG00000185664; TAA
AAQVTTTEW

SEQ ID NO: 64911 - protein, 9 aa, Homo sapiens
  Table A; Target 64911; HLA-B*35:01; PMEL; ENSG00000185664; TAA
AAQVTTTEW

SEQ ID NO: 64912 - protein, 9 aa, Homo sapiens
  Table A; Target 64912; HLA-B*44:02; PMEL; ENSG00000185664; TAA
AAQVTTTEW

SEQ ID NO: 64913 - protein, 9 aa, Homo sapiens
  Table A; Target 64913; HLA-B*44:03; PMEL; ENSG00000185664; TAA
AAQVTTTEW

SEQ ID NO: 64914 - protein, 9 aa, Homo sapiens
  Table A; Target 64914; HLA-B*46:01; PMEL; ENSG00000185664; TAA
AAQVTTTEW

SEQ ID NO: 64915 - protein, 9 aa, Homo sapiens
  Table A; Target 64915; HLA-B*57:01; PMEL; ENSG00000185664; TAA
AAQVTTTEW

SEQ ID NO: 64916 - protein, 9 aa, Homo sapiens
  Table A; Target 64916; HLA-B*58:01; PMEL; ENSG00000185664; TAA
AAQVTTTEW

SEQ ID NO: 64917 - protein, 9 aa, Homo sapiens
  Table A; Target 64917; HLA-C*01:02; PMEL; ENSG00000185664; TAA
AAQVTTTEW

SEQ ID NO: 64918 - protein, 9 aa, Homo sapiens
  Table A; Target 64918; HLA-C*02:02; PMEL; ENSG00000185664; TAA
AAQVTTTEW

SEQ ID NO: 64919 - protein, 9 aa, Homo sapiens
  Table A; Target 64919; HLA-C*03:03; PMEL; ENSG00000185664; TAA
AAQVTTTEW

SEQ ID NO: 64920 - protein, 9 aa, Homo sapiens
  Table A; Target 64920; HLA-C*03:04; PMEL; ENSG00000185664; TAA
AAQVTTTEW

SEQ ID NO: 64921 - protein, 9 aa, Homo sapiens
  Table A; Target 64921; HLA-C*04:01; PMEL; ENSG00000185664; TAA
AAQVTTTEW

SEQ ID NO: 64922 - protein, 9 aa, Homo sapiens
  Table A; Target 64922; HLA-C*05:01; PMEL; ENSG00000185664; TAA
AAQVTTTEW

SEQ ID NO: 64923 - protein, 9 aa, Homo sapiens
  Table A; Target 64923; HLA-C*07:04; PMEL; ENSG00000185664; TAA
AAQVTTTEW

SEQ ID NO: 64924 - protein, 9 aa, Homo sapiens
  Table A; Target 64924; HLA-C*07:06; PMEL; ENSG00000185664; TAA
AAQVTTTEW

SEQ ID NO: 64925 - protein, 9 aa, Homo sapiens
  Table A; Target 64925; HLA-C*12:03; PMEL; ENSG00000185664; TAA
AAQVTTTEW

SEQ ID NO: 64926 - protein, 9 aa, Homo sapiens
  Table A; Target 64926; HLA-C*14:02; PMEL; ENSG00000185664; TAA
AAQVTTTEW

SEQ ID NO: 64927 - protein, 9 aa, Homo sapiens
  Table A; Target 64927; HLA-C*16:01; PMEL; ENSG00000185664; TAA
AAQVTTTEW

SEQ ID NO: 64928 - protein, 9 aa, Homo sapiens
  Table A; Target 64928; HLA-C*16:02; PMEL; ENSG00000185664; TAA
AAQVTTTEW

SEQ ID NO: 64929 - protein, 9 aa, Homo sapiens
  Table A; Target 64929; HLA-C*16:04; PMEL; ENSG00000185664; TAA
AAQVTTTEW

SEQ ID NO: 64930 - protein, 9 aa, Homo sapiens
  Table A; Target 64930; HLA-B*13:02; PMEL; ENSG00000185664; TAA
ACQLVLHQI

SEQ ID NO: 64931 - protein, 8 aa, Homo sapiens
  Table A; Target 64931; HLA-A*30:01; PMEL; ENSG00000185664; TAA
ADTNSLAV

SEQ ID NO: 64932 - protein, 8 aa, Homo sapiens
  Table A; Target 64932; HLA-B*13:02; PMEL; ENSG00000185664; TAA
ADTNSLAV

SEQ ID NO: 64933 - protein, 8 aa, Homo sapiens
  Table A; Target 64933; HLA-B*37:01; PMEL; ENSG00000185664; TAA
ADTNSLAV

SEQ ID NO: 64934 - protein, 8 aa, Homo sapiens
  Table A; Target 64934; HLA-B*40:02; PMEL; ENSG00000185664; TAA
ADTNSLAV

SEQ ID NO: 64935 - protein, 9 aa, Homo sapiens
  Table A; Target 64935; HLA-A*30:01; PMEL; ENSG00000185664; TAA
ADTNSLAVV

SEQ ID NO: 64936 - protein, 9 aa, Homo sapiens
  Table A; Target 64936; HLA-A*32:01; PMEL; ENSG00000185664; TAA
ADTNSLAVV

SEQ ID NO: 64937 - protein, 9 aa, Homo sapiens
  Table A; Target 64937; HLA-B*13:02; PMEL; ENSG00000185664; TAA
ADTNSLAVV

SEQ ID NO: 64938 - protein, 9 aa, Homo sapiens
  Table A; Target 64938; HLA-B*37:01; PMEL; ENSG00000185664; TAA
ADTNSLAVV

SEQ ID NO: 64939 - protein, 9 aa, Homo sapiens
  Table A; Target 64939; HLA-B*39:01; PMEL; ENSG00000185664; TAA
ADTNSLAVV

SEQ ID NO: 64940 - protein, 9 aa, Homo sapiens
  Table A; Target 64940; HLA-B*40:02; PMEL; ENSG00000185664; TAA
ADTNSLAVV

SEQ ID NO: 64941 - protein, 9 aa, Homo sapiens
  Table A; Target 64941; HLA-B*49:01; PMEL; ENSG00000185664; TAA
ADTNSLAVV

SEQ ID NO: 64942 - protein, 9 aa, Homo sapiens
  Table A; Target 64942; HLA-C*04:01; PMEL; ENSG00000185664; TAA
ADTNSLAVV

SEQ ID NO: 64943 - protein, 9 aa, Homo sapiens
  Table A; Target 64943; HLA-C*06:02; PMEL; ENSG00000185664; TAA
ADTNSLAVV

SEQ ID NO: 64944 - protein, 9 aa, Homo sapiens
  Table A; Target 64944; HLA-C*07:02; PMEL; ENSG00000185664; TAA
ADTNSLAVV

SEQ ID NO: 64945 - protein, 9 aa, Homo sapiens
  Table A; Target 64945; HLA-C*16:02; PMEL; ENSG00000185664; TAA
ADTNSLAVV

SEQ ID NO: 64946 - protein, 9 aa, Homo sapiens
  Table A; Target 64946; HLA-A*23:01; PMEL; ENSG00000185664; TAA
AEADLSYTW

SEQ ID NO: 64947 - protein, 9 aa, Homo sapiens
  Table A; Target 64947; HLA-A*24:02; PMEL; ENSG00000185664; TAA
AEADLSYTW

SEQ ID NO: 64948 - protein, 9 aa, Homo sapiens
  Table A; Target 64948; HLA-A*25:01; PMEL; ENSG00000185664; TAA
AEADLSYTW

SEQ ID NO: 64949 - protein, 9 aa, Homo sapiens
  Table A; Target 64949; HLA-A*30:01; PMEL; ENSG00000185664; TAA
AEADLSYTW

SEQ ID NO: 64950 - protein, 9 aa, Homo sapiens
  Table A; Target 64950; HLA-A*32:01; PMEL; ENSG00000185664; TAA
AEADLSYTW

SEQ ID NO: 64951 - protein, 9 aa, Homo sapiens
  Table A; Target 64951; HLA-B*18:01; PMEL; ENSG00000185664; TAA
AEADLSYTW

SEQ ID NO: 64952 - protein, 9 aa, Homo sapiens
  Table A; Target 64952; HLA-B*27:02; PMEL; ENSG00000185664; TAA
AEADLSYTW

SEQ ID NO: 64953 - protein, 9 aa, Homo sapiens
  Table A; Target 64953; HLA-B*27:05; PMEL; ENSG00000185664; TAA
AEADLSYTW

SEQ ID NO: 64954 - protein, 9 aa, Homo sapiens
  Table A; Target 64954; HLA-B*37:01; PMEL; ENSG00000185664; TAA
AEADLSYTW

SEQ ID NO: 64955 - protein, 9 aa, Homo sapiens
  Table A; Target 64955; HLA-B*38:01; PMEL; ENSG00000185664; TAA
AEADLSYTW

SEQ ID NO: 64956 - protein, 9 aa, Homo sapiens
  Table A; Target 64956; HLA-B*40:01; PMEL; ENSG00000185664; TAA
AEADLSYTW

SEQ ID NO: 64957 - protein, 9 aa, Homo sapiens
  Table A; Target 64957; HLA-B*40:02; PMEL; ENSG00000185664; TAA
AEADLSYTW

SEQ ID NO: 64958 - protein, 9 aa, Homo sapiens
  Table A; Target 64958; HLA-B*44:02; PMEL; ENSG00000185664; TAA
AEADLSYTW

SEQ ID NO: 64959 - protein, 9 aa, Homo sapiens
  Table A; Target 64959; HLA-B*44:03; PMEL; ENSG00000185664; TAA
AEADLSYTW

SEQ ID NO: 64960 - protein, 9 aa, Homo sapiens
  Table A; Target 64960; HLA-B*49:01; PMEL; ENSG00000185664; TAA
AEADLSYTW

SEQ ID NO: 64961 - protein, 9 aa, Homo sapiens
  Table A; Target 64961; HLA-B*57:01; PMEL; ENSG00000185664; TAA
AEADLSYTW

SEQ ID NO: 64962 - protein, 9 aa, Homo sapiens
  Table A; Target 64962; HLA-B*58:01; PMEL; ENSG00000185664; TAA
AEADLSYTW

SEQ ID NO: 64963 - protein, 9 aa, Homo sapiens
  Table A; Target 64963; HLA-C*02:02; PMEL; ENSG00000185664; TAA
AEADLSYTW

SEQ ID NO: 64964 - protein, 9 aa, Homo sapiens
  Table A; Target 64964; HLA-C*16:04; PMEL; ENSG00000185664; TAA
AEADLSYTW

SEQ ID NO: 64965 - protein, 11 aa, Homo sapiens
  Table A; Target 64965; HLA-B*44:02; PMEL; ENSG00000185664; TAA
AEADLSYTWDF

SEQ ID NO: 64966 - protein, 11 aa, Homo sapiens
  Table A; Target 64966; HLA-B*44:03; PMEL; ENSG00000185664; TAA
AEADLSYTWDF

SEQ ID NO: 64967 - protein, 8 aa, Homo sapiens
  Table A; Target 64967; HLA-A*30:01; PMEL; ENSG00000185664; TAA
AEAPNTTA

SEQ ID NO: 64968 - protein, 8 aa, Homo sapiens
  Table A; Target 64968; HLA-B*49:01; PMEL; ENSG00000185664; TAA
AEAPNTTA

SEQ ID NO: 64969 - protein, 9 aa, Homo sapiens
  Table A; Target 64969; HLA-A*30:01; PMEL; ENSG00000185664; TAA
AEAPNTTAG

SEQ ID NO: 64970 - protein, 9 aa, Homo sapiens
  Table A; Target 64970; HLA-B*37:01; PMEL; ENSG00000185664; TAA
AEAPNTTAG

SEQ ID NO: 64971 - protein, 9 aa, Homo sapiens
  Table A; Target 64971; HLA-B*40:01; PMEL; ENSG00000185664; TAA
AEAPNTTAG

SEQ ID NO: 64972 - protein, 9 aa, Homo sapiens
  Table A; Target 64972; HLA-B*40:02; PMEL; ENSG00000185664; TAA
AEAPNTTAG

SEQ ID NO: 64973 - protein, 9 aa, Homo sapiens
  Table A; Target 64973; HLA-B*44:03; PMEL; ENSG00000185664; TAA
AEAPNTTAG

SEQ ID NO: 64974 - protein, 9 aa, Homo sapiens
  Table A; Target 64974; HLA-B*49:01; PMEL; ENSG00000185664; TAA
AEAPNTTAG

SEQ ID NO: 64975 - protein, 9 aa, Homo sapiens
  Table A; Target 64975; HLA-C*16:04; PMEL; ENSG00000185664; TAA
AEAPNTTAG

SEQ ID NO: 64976 - protein, 10 aa, Homo sapiens
  Table A; Target 64976; HLA-B*44:02; PMEL; ENSG00000185664; TAA
AEAPNTTAGQ

SEQ ID NO: 64977 - protein, 10 aa, Homo sapiens
  Table A; Target 64977; HLA-B*44:03; PMEL; ENSG00000185664; TAA
AEAPNTTAGQ

SEQ ID NO: 64978 - protein, 10 aa, Homo sapiens
  Table A; Target 64978; HLA-C*16:04; PMEL; ENSG00000185664; TAA
AEAPNTTAGQ

SEQ ID NO: 64979 - protein, 11 aa, Homo sapiens
  Table A; Target 64979; HLA-A*30:01; PMEL; ENSG00000185664; TAA
AEAPNTTAGQV

SEQ ID NO: 64980 - protein, 11 aa, Homo sapiens
  Table A; Target 64980; HLA-B*40:01; PMEL; ENSG00000185664; TAA
AEAPNTTAGQV

SEQ ID NO: 64981 - protein, 11 aa, Homo sapiens
  Table A; Target 64981; HLA-B*40:02; PMEL; ENSG00000185664; TAA
AEAPNTTAGQV

SEQ ID NO: 64982 - protein, 11 aa, Homo sapiens
  Table A; Target 64982; HLA-B*44:02; PMEL; ENSG00000185664; TAA
AEAPNTTAGQV

SEQ ID NO: 64983 - protein, 11 aa, Homo sapiens
  Table A; Target 64983; HLA-B*44:03; PMEL; ENSG00000185664; TAA
AEAPNTTAGQV

SEQ ID NO: 64984 - protein, 11 aa, Homo sapiens
  Table A; Target 64984; HLA-B*49:01; PMEL; ENSG00000185664; TAA
AEAPNTTAGQV

SEQ ID NO: 64985 - protein, 11 aa, Homo sapiens
  Table A; Target 64985; HLA-C*16:04; PMEL; ENSG00000185664; TAA
AEAPNTTAGQV

SEQ ID NO: 64986 - protein, 8 aa, Homo sapiens
  Table A; Target 64986; HLA-B*40:02; PMEL; ENSG00000185664; TAA
AEILQAVP

SEQ ID NO: 64987 - protein, 8 aa, Homo sapiens
  Table A; Target 64987; HLA-B*49:01; PMEL; ENSG00000185664; TAA
AEILQAVP

SEQ ID NO: 64988 - protein, 9 aa, Homo sapiens
  Table A; Target 64988; HLA-B*40:02; PMEL; ENSG00000185664; TAA
AEILQAVPS

SEQ ID NO: 64989 - protein, 9 aa, Homo sapiens
  Table A; Target 64989; HLA-B*49:01; PMEL; ENSG00000185664; TAA
AEILQAVPS

SEQ ID NO: 64990 - protein, 10 aa, Homo sapiens
  Table A; Target 64990; HLA-A*30:01; PMEL; ENSG00000185664; TAA
AEILQAVPSG

SEQ ID NO: 64991 - protein, 10 aa, Homo sapiens
  Table A; Target 64991; HLA-B*27:05; PMEL; ENSG00000185664; TAA
AEILQAVPSG

SEQ ID NO: 64992 - protein, 10 aa, Homo sapiens
  Table A; Target 64992; HLA-B*40:02; PMEL; ENSG00000185664; TAA
AEILQAVPSG

SEQ ID NO: 64993 - protein, 10 aa, Homo sapiens
  Table A; Target 64993; HLA-B*44:03; PMEL; ENSG00000185664; TAA
AEILQAVPSG

SEQ ID NO: 64994 - protein, 10 aa, Homo sapiens
  Table A; Target 64994; HLA-B*49:01; PMEL; ENSG00000185664; TAA
AEILQAVPSG

SEQ ID NO: 64995 - protein, 10 aa, Homo sapiens
  Table A; Target 64995; HLA-C*04:01; PMEL; ENSG00000185664; TAA
AEILQAVPSG

SEQ ID NO: 64996 - protein, 8 aa, Homo sapiens
  Table A; Target 64996; HLA-A*30:01; PMEL; ENSG00000185664; TAA
AEMSTPEA

SEQ ID NO: 64997 - protein, 8 aa, Homo sapiens
  Table A; Target 64997; HLA-B*13:02; PMEL; ENSG00000185664; TAA
AEMSTPEA

SEQ ID NO: 64998 - protein, 8 aa, Homo sapiens
  Table A; Target 64998; HLA-B*18:01; PMEL; ENSG00000185664; TAA
AEMSTPEA

SEQ ID NO: 64999 - protein, 8 aa, Homo sapiens
  Table A; Target 64999; HLA-B*27:05; PMEL; ENSG00000185664; TAA
AEMSTPEA

SEQ ID NO: 65000 - protein, 8 aa, Homo sapiens
  Table A; Target 65000; HLA-B*37:01; PMEL; ENSG00000185664; TAA
AEMSTPEA

SEQ ID NO: 65001 - protein, 8 aa, Homo sapiens
  Table A; Target 65001; HLA-B*40:02; PMEL; ENSG00000185664; TAA
AEMSTPEA

SEQ ID NO: 65002 - protein, 8 aa, Homo sapiens
  Table A; Target 65002; HLA-B*44:03; PMEL; ENSG00000185664; TAA
AEMSTPEA

SEQ ID NO: 65003 - protein, 8 aa, Homo sapiens
  Table A; Target 65003; HLA-B*49:01; PMEL; ENSG00000185664; TAA
AEMSTPEA

SEQ ID NO: 65004 - protein, 8 aa, Homo sapiens
  Table A; Target 65004; HLA-B*56:01; PMEL; ENSG00000185664; TAA
AEMSTPEA

SEQ ID NO: 65005 - protein, 8 aa, Homo sapiens
  Table A; Target 65005; HLA-C*16:04; PMEL; ENSG00000185664; TAA
AEMSTPEA

SEQ ID NO: 65006 - protein, 9 aa, Homo sapiens
  Table A; Target 65006; HLA-A*30:01; PMEL; ENSG00000185664; TAA
AEMSTPEAT

SEQ ID NO: 65007 - protein, 9 aa, Homo sapiens
  Table A; Target 65007; HLA-B*27:02; PMEL; ENSG00000185664; TAA
AEMSTPEAT

SEQ ID NO: 65008 - protein, 9 aa, Homo sapiens
  Table A; Target 65008; HLA-B*37:01; PMEL; ENSG00000185664; TAA
AEMSTPEAT

SEQ ID NO: 65009 - protein, 9 aa, Homo sapiens
  Table A; Target 65009; HLA-B*40:01; PMEL; ENSG00000185664; TAA
AEMSTPEAT

SEQ ID NO: 65010 - protein, 9 aa, Homo sapiens
  Table A; Target 65010; HLA-B*40:02; PMEL; ENSG00000185664; TAA
AEMSTPEAT

SEQ ID NO: 65011 - protein, 9 aa, Homo sapiens
  Table A; Target 65011; HLA-B*44:02; PMEL; ENSG00000185664; TAA
AEMSTPEAT

SEQ ID NO: 65012 - protein, 9 aa, Homo sapiens
  Table A; Target 65012; HLA-B*44:03; PMEL; ENSG00000185664; TAA
AEMSTPEAT

SEQ ID NO: 65013 - protein, 9 aa, Homo sapiens
  Table A; Target 65013; HLA-B*49:01; PMEL; ENSG00000185664; TAA
AEMSTPEAT

SEQ ID NO: 65014 - protein, 9 aa, Homo sapiens
  Table A; Target 65014; HLA-C*16:04; PMEL; ENSG00000185664; TAA
AEMSTPEAT

SEQ ID NO: 65015 - protein, 10 aa, Homo sapiens
  Table A; Target 65015; HLA-A*30:01; PMEL; ENSG00000185664; TAA
AEMSTPEATG

SEQ ID NO: 65016 - protein, 10 aa, Homo sapiens
  Table A; Target 65016; HLA-B*27:02; PMEL; ENSG00000185664; TAA
AEMSTPEATG

SEQ ID NO: 65017 - protein, 10 aa, Homo sapiens
  Table A; Target 65017; HLA-B*40:01; PMEL; ENSG00000185664; TAA
AEMSTPEATG

SEQ ID NO: 65018 - protein, 10 aa, Homo sapiens
  Table A; Target 65018; HLA-B*40:02; PMEL; ENSG00000185664; TAA
AEMSTPEATG

SEQ ID NO: 65019 - protein, 10 aa, Homo sapiens
  Table A; Target 65019; HLA-B*44:02; PMEL; ENSG00000185664; TAA
AEMSTPEATG

SEQ ID NO: 65020 - protein, 10 aa, Homo sapiens
  Table A; Target 65020; HLA-B*44:03; PMEL; ENSG00000185664; TAA
AEMSTPEATG

SEQ ID NO: 65021 - protein, 10 aa, Homo sapiens
  Table A; Target 65021; HLA-B*49:01; PMEL; ENSG00000185664; TAA
AEMSTPEATG

SEQ ID NO: 65022 - protein, 10 aa, Homo sapiens
  Table A; Target 65022; HLA-C*07:02; PMEL; ENSG00000185664; TAA
AEMSTPEATG

SEQ ID NO: 65023 - protein, 11 aa, Homo sapiens
  Table A; Target 65023; HLA-A*30:01; PMEL; ENSG00000185664; TAA
AEMSTPEATGM

SEQ ID NO: 65024 - protein, 11 aa, Homo sapiens
  Table A; Target 65024; HLA-B*27:02; PMEL; ENSG00000185664; TAA
AEMSTPEATGM

SEQ ID NO: 65025 - protein, 11 aa, Homo sapiens
  Table A; Target 65025; HLA-B*27:05; PMEL; ENSG00000185664; TAA
AEMSTPEATGM

SEQ ID NO: 65026 - protein, 11 aa, Homo sapiens
  Table A; Target 65026; HLA-B*37:01; PMEL; ENSG00000185664; TAA
AEMSTPEATGM

SEQ ID NO: 65027 - protein, 11 aa, Homo sapiens
  Table A; Target 65027; HLA-B*39:01; PMEL; ENSG00000185664; TAA
AEMSTPEATGM

SEQ ID NO: 65028 - protein, 11 aa, Homo sapiens
  Table A; Target 65028; HLA-B*40:01; PMEL; ENSG00000185664; TAA
AEMSTPEATGM

SEQ ID NO: 65029 - protein, 11 aa, Homo sapiens
  Table A; Target 65029; HLA-B*40:02; PMEL; ENSG00000185664; TAA
AEMSTPEATGM

SEQ ID NO: 65030 - protein, 11 aa, Homo sapiens
  Table A; Target 65030; HLA-B*44:02; PMEL; ENSG00000185664; TAA
AEMSTPEATGM

SEQ ID NO: 65031 - protein, 11 aa, Homo sapiens
  Table A; Target 65031; HLA-B*44:03; PMEL; ENSG00000185664; TAA
AEMSTPEATGM

SEQ ID NO: 65032 - protein, 11 aa, Homo sapiens
  Table A; Target 65032; HLA-B*49:01; PMEL; ENSG00000185664; TAA
AEMSTPEATGM

SEQ ID NO: 65033 - protein, 11 aa, Homo sapiens
  Table A; Target 65033; HLA-C*02:02; PMEL; ENSG00000185664; TAA
AEMSTPEATGM

SEQ ID NO: 65034 - protein, 11 aa, Homo sapiens
  Table A; Target 65034; HLA-C*04:01; PMEL; ENSG00000185664; TAA
AEMSTPEATGM

SEQ ID NO: 65035 - protein, 11 aa, Homo sapiens
  Table A; Target 65035; HLA-C*07:04; PMEL; ENSG00000185664; TAA
AEMSTPEATGM

SEQ ID NO: 65036 - protein, 11 aa, Homo sapiens
  Table A; Target 65036; HLA-C*16:04; PMEL; ENSG00000185664; TAA
AEMSTPEATGM

SEQ ID NO: 65037 - protein, 9 aa, Homo sapiens
  Table A; Target 65037; HLA-A*30:01; PMEL; ENSG00000185664; TAA
AEPSGTTSV

SEQ ID NO: 65038 - protein, 9 aa, Homo sapiens
  Table A; Target 65038; HLA-B*13:02; PMEL; ENSG00000185664; TAA
AEPSGTTSV

SEQ ID NO: 65039 - protein, 9 aa, Homo sapiens
  Table A; Target 65039; HLA-B*37:01; PMEL; ENSG00000185664; TAA
AEPSGTTSV

SEQ ID NO: 65040 - protein, 9 aa, Homo sapiens
  Table A; Target 65040; HLA-B*40:01; PMEL; ENSG00000185664; TAA
AEPSGTTSV

SEQ ID NO: 65041 - protein, 9 aa, Homo sapiens
  Table A; Target 65041; HLA-B*40:02; PMEL; ENSG00000185664; TAA
AEPSGTTSV

SEQ ID NO: 65042 - protein, 9 aa, Homo sapiens
  Table A; Target 65042; HLA-B*44:02; PMEL; ENSG00000185664; TAA
AEPSGTTSV

SEQ ID NO: 65043 - protein, 9 aa, Homo sapiens
  Table A; Target 65043; HLA-B*44:03; PMEL; ENSG00000185664; TAA
AEPSGTTSV

SEQ ID NO: 65044 - protein, 9 aa, Homo sapiens
  Table A; Target 65044; HLA-B*49:01; PMEL; ENSG00000185664; TAA
AEPSGTTSV

SEQ ID NO: 65045 - protein, 9 aa, Homo sapiens
  Table A; Target 65045; HLA-C*01:02; PMEL; ENSG00000185664; TAA
AEPSGTTSV

SEQ ID NO: 65046 - protein, 9 aa, Homo sapiens
  Table A; Target 65046; HLA-C*16:04; PMEL; ENSG00000185664; TAA
AEPSGTTSV

SEQ ID NO: 65047 - protein, 11 aa, Homo sapiens
  Table A; Target 65047; HLA-A*30:01; PMEL; ENSG00000185664; TAA
AEPSGTTSVQV

SEQ ID NO: 65048 - protein, 11 aa, Homo sapiens
  Table A; Target 65048; HLA-B*40:01; PMEL; ENSG00000185664; TAA
AEPSGTTSVQV

SEQ ID NO: 65049 - protein, 11 aa, Homo sapiens
  Table A; Target 65049; HLA-B*49:01; PMEL; ENSG00000185664; TAA
AEPSGTTSVQV

SEQ ID NO: 65050 - protein, 11 aa, Homo sapiens
  Table A; Target 65050; HLA-B*49:01; PMEL; ENSG00000185664; TAA
AESTGMTPEKV

SEQ ID NO: 65051 - protein, 8 aa, Homo sapiens
  Table A; Target 65051; HLA-A*30:01; PMEL; ENSG00000185664; TAA
AEVSIVVL

SEQ ID NO: 65052 - protein, 8 aa, Homo sapiens
  Table A; Target 65052; HLA-B*18:01; PMEL; ENSG00000185664; TAA
AEVSIVVL

SEQ ID NO: 65053 - protein, 8 aa, Homo sapiens
  Table A; Target 65053; HLA-B*37:01; PMEL; ENSG00000185664; TAA
AEVSIVVL

SEQ ID NO: 65054 - protein, 8 aa, Homo sapiens
  Table A; Target 65054; HLA-B*40:01; PMEL; ENSG00000185664; TAA
AEVSIVVL

SEQ ID NO: 65055 - protein, 8 aa, Homo sapiens
  Table A; Target 65055; HLA-B*40:02; PMEL; ENSG00000185664; TAA
AEVSIVVL

SEQ ID NO: 65056 - protein, 8 aa, Homo sapiens
  Table A; Target 65056; HLA-B*44:02; PMEL; ENSG00000185664; TAA
AEVSIVVL

SEQ ID NO: 65057 - protein, 8 aa, Homo sapiens
  Table A; Target 65057; HLA-B*44:03; PMEL; ENSG00000185664; TAA
AEVSIVVL

SEQ ID NO: 65058 - protein, 8 aa, Homo sapiens
  Table A; Target 65058; HLA-B*49:01; PMEL; ENSG00000185664; TAA
AEVSIVVL

SEQ ID NO: 65059 - protein, 9 aa, Homo sapiens
  Table A; Target 65059; HLA-B*49:01; PMEL; ENSG00000185664; TAA
AEVSIVVLS

SEQ ID NO: 65060 - protein, 10 aa, Homo sapiens
  Table A; Target 65060; HLA-A*30:01; PMEL; ENSG00000185664; TAA
AEVSIVVLSG

SEQ ID NO: 65061 - protein, 10 aa, Homo sapiens
  Table A; Target 65061; HLA-B*44:03; PMEL; ENSG00000185664; TAA
AEVSIVVLSG

SEQ ID NO: 65062 - protein, 10 aa, Homo sapiens
  Table A; Target 65062; HLA-B*49:01; PMEL; ENSG00000185664; TAA
AEVSIVVLSG

SEQ ID NO: 65063 - protein, 9 aa, Homo sapiens
  Table A; Target 65063; HLA-C*04:01; PMEL; ENSG00000185664; TAA
AFELTVSCQ

SEQ ID NO: 65064 - protein, 10 aa, Homo sapiens
  Table A; Target 65064; HLA-C*04:01; PMEL; ENSG00000185664; TAA
AFELTVSCQG

SEQ ID NO: 65065 - protein, 10 aa, Homo sapiens
  Table A; Target 65065; HLA-A*24:02; PMEL; ENSG00000185664; TAA
AFTITDQVPF

SEQ ID NO: 65066 - protein, 9 aa, Homo sapiens
  Table A; Target 65066; HLA-A*02:01; PMEL; ENSG00000185664; TAA
AGLGQVPLI

SEQ ID NO: 65067 - protein, 9 aa, Homo sapiens
  Table A; Target 65067; HLA-A*02:04; PMEL; ENSG00000185664; TAA
AGLGQVPLI

SEQ ID NO: 65068 - protein, 9 aa, Homo sapiens
  Table A; Target 65068; HLA-A*23:01; PMEL; ENSG00000185664; TAA
AGLGQVPLI

SEQ ID NO: 65069 - protein, 9 aa, Homo sapiens
  Table A; Target 65069; HLA-A*24:02; PMEL; ENSG00000185664; TAA
AGLGQVPLI

SEQ ID NO: 65070 - protein, 9 aa, Homo sapiens
  Table A; Target 65070; HLA-A*30:01; PMEL; ENSG00000185664; TAA
AGLGQVPLI

SEQ ID NO: 65071 - protein, 9 aa, Homo sapiens
  Table A; Target 65071; HLA-B*13:02; PMEL; ENSG00000185664; TAA
AGLGQVPLI

SEQ ID NO: 65072 - protein, 9 aa, Homo sapiens
  Table A; Target 65072; HLA-B*49:01; PMEL; ENSG00000185664; TAA
AGLGQVPLI

SEQ ID NO: 65073 - protein, 9 aa, Homo sapiens
  Table A; Target 65073; HLA-C*06:02; PMEL; ENSG00000185664; TAA
AGLGQVPLI

SEQ ID NO: 65074 - protein, 9 aa, Homo sapiens
  Table A; Target 65074; HLA-C*16:02; PMEL; ENSG00000185664; TAA
AGLGQVPLI

SEQ ID NO: 65075 - protein, 9 aa, Homo sapiens
  Table A; Target 65075; HLA-B*13:02; PMEL; ENSG00000185664; TAA
AGQVPTTEV

SEQ ID NO: 65076 - protein, 9 aa, Homo sapiens
  Table A; Target 65076; HLA-B*15:01; PMEL; ENSG00000185664; TAA
AGQVPTTEV

SEQ ID NO: 65077 - protein, 9 aa, Homo sapiens
  Table A; Target 65077; HLA-B*46:01; PMEL; ENSG00000185664; TAA
AGQVPTTEV

SEQ ID NO: 65078 - protein, 9 aa, Homo sapiens
  Table A; Target 65078; HLA-C*01:02; PMEL; ENSG00000185664; TAA
AGQVPTTEV

SEQ ID NO: 65079 - protein, 9 aa, Homo sapiens
  Table A; Target 65079; HLA-C*03:03; PMEL; ENSG00000185664; TAA
AGQVPTTEV

SEQ ID NO: 65080 - protein, 9 aa, Homo sapiens
  Table A; Target 65080; HLA-C*03:04; PMEL; ENSG00000185664; TAA
AGQVPTTEV

SEQ ID NO: 65081 - protein, 9 aa, Homo sapiens
  Table A; Target 65081; HLA-C*05:01; PMEL; ENSG00000185664; TAA
AGQVPTTEV

SEQ ID NO: 65082 - protein, 9 aa, Homo sapiens
  Table A; Target 65082; HLA-C*14:02; PMEL; ENSG00000185664; TAA
AGQVPTTEV

SEQ ID NO: 65083 - protein, 9 aa, Homo sapiens
  Table A; Target 65083; HLA-B*13:02; PMEL; ENSG00000185664; TAA
AHSSSAFTI

SEQ ID NO: 65084 - protein, 9 aa, Homo sapiens
  Table A; Target 65084; HLA-B*27:05; PMEL; ENSG00000185664; TAA
AHSSSAFTI

SEQ ID NO: 65085 - protein, 9 aa, Homo sapiens
  Table A; Target 65085; HLA-B*38:01; PMEL; ENSG00000185664; TAA
AHSSSAFTI

SEQ ID NO: 65086 - protein, 9 aa, Homo sapiens
  Table A; Target 65086; HLA-B*39:01; PMEL; ENSG00000185664; TAA
AHSSSAFTI

SEQ ID NO: 65087 - protein, 8 aa, Homo sapiens
  Table A; Target 65087; HLA-C*01:02; PMEL; ENSG00000185664; TAA
AIPLTSCG

SEQ ID NO: 65088 - protein, 9 aa, Homo sapiens
  Table A; Target 65088; HLA-A*02:07; PMEL; ENSG00000185664; TAA
ALDGGNKHF

SEQ ID NO: 65089 - protein, 9 aa, Homo sapiens
  Table A; Target 65089; HLA-A*32:01; PMEL; ENSG00000185664; TAA
ALDGGNKHF

SEQ ID NO: 65090 - protein, 9 aa, Homo sapiens
  Table A; Target 65090; HLA-B*55:01; PMEL; ENSG00000185664; TAA
ALDGGNKHF

SEQ ID NO: 65091 - protein, 9 aa, Homo sapiens
  Table A; Target 65091; HLA-C*04:01; PMEL; ENSG00000185664; TAA
ALDGGNKHF

SEQ ID NO: 65092 - protein, 9 aa, Homo sapiens
  Table A; Target 65092; HLA-C*05:01; PMEL; ENSG00000185664; TAA
ALDGGNKHF

SEQ ID NO: 65093 - protein, 9 aa, Homo sapiens
  Table A; Target 65093; HLA-C*16:02; PMEL; ENSG00000185664; TAA
ALDGGNKHF

SEQ ID NO: 65094 - protein, 10 aa, Homo sapiens
  Table A; Target 65094; HLA-A*01:01; PMEL; ENSG00000185664; TAA
ALDGGNKHFL

SEQ ID NO: 65095 - protein, 10 aa, Homo sapiens
  Table A; Target 65095; HLA-A*02:01; PMEL; ENSG00000185664; TAA
ALDGGNKHFL

SEQ ID NO: 65096 - protein, 10 aa, Homo sapiens
  Table A; Target 65096; HLA-A*02:03; PMEL; ENSG00000185664; TAA
ALDGGNKHFL

SEQ ID NO: 65097 - protein, 10 aa, Homo sapiens
  Table A; Target 65097; HLA-A*02:04; PMEL; ENSG00000185664; TAA
ALDGGNKHFL

SEQ ID NO: 65098 - protein, 10 aa, Homo sapiens
  Table A; Target 65098; HLA-A*02:07; PMEL; ENSG00000185664; TAA
ALDGGNKHFL

SEQ ID NO: 65099 - protein, 10 aa, Homo sapiens
  Table A; Target 65099; HLA-A*03:01; PMEL; ENSG00000185664; TAA
ALDGGNKHFL

SEQ ID NO: 65100 - protein, 10 aa, Homo sapiens
  Table A; Target 65100; HLA-A*03:02; PMEL; ENSG00000185664; TAA
ALDGGNKHFL

SEQ ID NO: 65101 - protein, 10 aa, Homo sapiens
  Table A; Target 65101; HLA-A*31:01; PMEL; ENSG00000185664; TAA
ALDGGNKHFL

SEQ ID NO: 65102 - protein, 10 aa, Homo sapiens
  Table A; Target 65102; HLA-B*38:01; PMEL; ENSG00000185664; TAA
ALDGGNKHFL

SEQ ID NO: 65103 - protein, 10 aa, Homo sapiens
  Table A; Target 65103; HLA-B*55:01; PMEL; ENSG00000185664; TAA
ALDGGNKHFL

SEQ ID NO: 65104 - protein, 10 aa, Homo sapiens
  Table A; Target 65104; HLA-C*16:02; PMEL; ENSG00000185664; TAA
ALDGGNKHFL

SEQ ID NO: 65105 - protein, 11 aa, Homo sapiens
  Table A; Target 65105; HLA-A*31:01; PMEL; ENSG00000185664; TAA
ALDGGNKHFLR

SEQ ID NO: 65106 - protein, 9 aa, Homo sapiens
  Table A; Target 65106; HLA-A*03:01; PMEL; ENSG00000185664; TAA
ALLAVGATK

SEQ ID NO: 65107 - protein, 9 aa, Homo sapiens
  Table A; Target 65107; HLA-A*03:02; PMEL; ENSG00000185664; TAA
ALLAVGATK

SEQ ID NO: 65108 - protein, 9 aa, Homo sapiens
  Table A; Target 65108; HLA-A*11:01; PMEL; ENSG00000185664; TAA
ALLAVGATK

SEQ ID NO: 65109 - protein, 9 aa, Homo sapiens
  Table A; Target 65109; HLA-A*30:02; PMEL; ENSG00000185664; TAA
ALLAVGATK

SEQ ID NO: 65110 - protein, 9 aa, Homo sapiens
  Table A; Target 65110; HLA-A*31:01; PMEL; ENSG00000185664; TAA
ALLAVGATK

SEQ ID NO: 65111 - protein, 9 aa, Homo sapiens
  Table A; Target 65111; HLA-A*32:01; PMEL; ENSG00000185664; TAA
ALLAVGATK

SEQ ID NO: 65112 - protein, 9 aa, Homo sapiens
  Table A; Target 65112; HLA-B*13:02; PMEL; ENSG00000185664; TAA
ALLAVGATK

SEQ ID NO: 65113 - protein, 9 aa, Homo sapiens
  Table A; Target 65113; HLA-B*27:02; PMEL; ENSG00000185664; TAA
ALLAVGATK

SEQ ID NO: 65114 - protein, 9 aa, Homo sapiens
  Table A; Target 65114; HLA-B*27:05; PMEL; ENSG00000185664; TAA
ALLAVGATK

SEQ ID NO: 65115 - protein, 9 aa, Homo sapiens
  Table A; Target 65115; HLA-C*07:06; PMEL; ENSG00000185664; TAA
ALLAVGATK

SEQ ID NO: 65116 - protein, 10 aa, Homo sapiens
  Table A; Target 65116; HLA-A*02:01; PMEL; ENSG00000185664; TAA
ALLAVGATKV

SEQ ID NO: 65117 - protein, 10 aa, Homo sapiens
  Table A; Target 65117; HLA-A*02:03; PMEL; ENSG00000185664; TAA
ALLAVGATKV

SEQ ID NO: 65118 - protein, 10 aa, Homo sapiens
  Table A; Target 65118; HLA-A*02:04; PMEL; ENSG00000185664; TAA
ALLAVGATKV

SEQ ID NO: 65119 - protein, 10 aa, Homo sapiens
  Table A; Target 65119; HLA-A*02:07; PMEL; ENSG00000185664; TAA
ALLAVGATKV

SEQ ID NO: 65120 - protein, 10 aa, Homo sapiens
  Table A; Target 65120; HLA-B*13:02; PMEL; ENSG00000185664; TAA
ALLAVGATKV

SEQ ID NO: 65121 - protein, 10 aa, Homo sapiens
  Table A; Target 65121; HLA-B*55:01; PMEL; ENSG00000185664; TAA
ALLAVGATKV

SEQ ID NO: 65122 - protein, 9 aa, Homo sapiens
  Table A; Target 65122; HLA-A*03:01; PMEL; ENSG00000185664; TAA
ALNFPGSQK

SEQ ID NO: 65123 - protein, 9 aa, Homo sapiens
  Table A; Target 65123; HLA-A*03:02; PMEL; ENSG00000185664; TAA
ALNFPGSQK

SEQ ID NO: 65124 - protein, 9 aa, Homo sapiens
  Table A; Target 65124; HLA-A*11:01; PMEL; ENSG00000185664; TAA
ALNFPGSQK

SEQ ID NO: 65125 - protein, 9 aa, Homo sapiens
  Table A; Target 65125; HLA-A*30:02; PMEL; ENSG00000185664; TAA
ALNFPGSQK

SEQ ID NO: 65126 - protein, 9 aa, Homo sapiens
  Table A; Target 65126; HLA-A*31:01; PMEL; ENSG00000185664; TAA
ALNFPGSQK

SEQ ID NO: 65127 - protein, 9 aa, Homo sapiens
  Table A; Target 65127; HLA-A*32:01; PMEL; ENSG00000185664; TAA
ALNFPGSQK

SEQ ID NO: 65128 - protein, 9 aa, Homo sapiens
  Table A; Target 65128; HLA-B*15:01; PMEL; ENSG00000185664; TAA
ALNFPGSQK

SEQ ID NO: 65129 - protein, 9 aa, Homo sapiens
  Table A; Target 65129; HLA-B*27:05; PMEL; ENSG00000185664; TAA
ALNFPGSQK

SEQ ID NO: 65130 - protein, 9 aa, Homo sapiens
  Table A; Target 65130; HLA-B*46:01; PMEL; ENSG00000185664; TAA
ALNFPGSQK

SEQ ID NO: 65131 - protein, 9 aa, Homo sapiens
  Table A; Target 65131; HLA-C*01:02; PMEL; ENSG00000185664; TAA
ALNFPGSQK

SEQ ID NO: 65132 - protein, 9 aa, Homo sapiens
  Table A; Target 65132; HLA-C*06:02; PMEL; ENSG00000185664; TAA
ALNFPGSQK

SEQ ID NO: 65133 - protein, 10 aa, Homo sapiens
  Table A; Target 65133; HLA-A*02:01; PMEL; ENSG00000185664; TAA
ALNFPGSQKV

SEQ ID NO: 65134 - protein, 10 aa, Homo sapiens
  Table A; Target 65134; HLA-A*02:03; PMEL; ENSG00000185664; TAA
ALNFPGSQKV

SEQ ID NO: 65135 - protein, 10 aa, Homo sapiens
  Table A; Target 65135; HLA-B*13:02; PMEL; ENSG00000185664; TAA
ALNFPGSQKV

SEQ ID NO: 65136 - protein, 10 aa, Homo sapiens
  Table A; Target 65136; HLA-A*01:01; PMEL; ENSG00000185664; TAA
ALQLHDPSGY

SEQ ID NO: 65137 - protein, 10 aa, Homo sapiens
  Table A; Target 65137; HLA-A*03:02; PMEL; ENSG00000185664; TAA
ALQLHDPSGY

SEQ ID NO: 65138 - protein, 10 aa, Homo sapiens
  Table A; Target 65138; HLA-A*30:02; PMEL; ENSG00000185664; TAA
ALQLHDPSGY

SEQ ID NO: 65139 - protein, 10 aa, Homo sapiens
  Table A; Target 65139; HLA-A*32:01; PMEL; ENSG00000185664; TAA
ALQLHDPSGY

SEQ ID NO: 65140 - protein, 10 aa, Homo sapiens
  Table A; Target 65140; HLA-B*15:01; PMEL; ENSG00000185664; TAA
ALQLHDPSGY

SEQ ID NO: 65141 - protein, 10 aa, Homo sapiens
  Table A; Target 65141; HLA-B*15:03; PMEL; ENSG00000185664; TAA
ALQLHDPSGY

SEQ ID NO: 65142 - protein, 10 aa, Homo sapiens
  Table A; Target 65142; HLA-C*07:01; PMEL; ENSG00000185664; TAA
ALQLHDPSGY

SEQ ID NO: 65143 - protein, 10 aa, Homo sapiens
  Table A; Target 65143; HLA-C*16:02; PMEL; ENSG00000185664; TAA
ALQLHDPSGY

SEQ ID NO: 65144 - protein, 8 aa, Homo sapiens
  Table A; Target 65144; HLA-A*23:01; PMEL; ENSG00000185664; TAA
ALVVTHTY

SEQ ID NO: 65145 - protein, 8 aa, Homo sapiens
  Table A; Target 65145; HLA-A*25:01; PMEL; ENSG00000185664; TAA
ALVVTHTY

SEQ ID NO: 65146 - protein, 8 aa, Homo sapiens
  Table A; Target 65146; HLA-A*29:02; PMEL; ENSG00000185664; TAA
ALVVTHTY

SEQ ID NO: 65147 - protein, 8 aa, Homo sapiens
  Table A; Target 65147; HLA-A*30:02; PMEL; ENSG00000185664; TAA
ALVVTHTY

SEQ ID NO: 65148 - protein, 8 aa, Homo sapiens
  Table A; Target 65148; HLA-A*32:01; PMEL; ENSG00000185664; TAA
ALVVTHTY

SEQ ID NO: 65149 - protein, 8 aa, Homo sapiens
  Table A; Target 65149; HLA-B*08:01; PMEL; ENSG00000185664; TAA
ALVVTHTY

SEQ ID NO: 65150 - protein, 8 aa, Homo sapiens
  Table A; Target 65150; HLA-B*15:01; PMEL; ENSG00000185664; TAA
ALVVTHTY

SEQ ID NO: 65151 - protein, 8 aa, Homo sapiens
  Table A; Target 65151; HLA-B*15:03; PMEL; ENSG00000185664; TAA
ALVVTHTY

SEQ ID NO: 65152 - protein, 8 aa, Homo sapiens
  Table A; Target 65152; HLA-B*18:01; PMEL; ENSG00000185664; TAA
ALVVTHTY

SEQ ID NO: 65153 - protein, 8 aa, Homo sapiens
  Table A; Target 65153; HLA-B*37:01; PMEL; ENSG00000185664; TAA
ALVVTHTY

SEQ ID NO: 65154 - protein, 8 aa, Homo sapiens
  Table A; Target 65154; HLA-B*39:01; PMEL; ENSG00000185664; TAA
ALVVTHTY

SEQ ID NO: 65155 - protein, 8 aa, Homo sapiens
  Table A; Target 65155; HLA-B*44:02; PMEL; ENSG00000185664; TAA
ALVVTHTY

SEQ ID NO: 65156 - protein, 8 aa, Homo sapiens
  Table A; Target 65156; HLA-B*44:03; PMEL; ENSG00000185664; TAA
ALVVTHTY

SEQ ID NO: 65157 - protein, 8 aa, Homo sapiens
  Table A; Target 65157; HLA-B*46:01; PMEL; ENSG00000185664; TAA
ALVVTHTY

SEQ ID NO: 65158 - protein, 8 aa, Homo sapiens
  Table A; Target 65158; HLA-B*58:01; PMEL; ENSG00000185664; TAA
ALVVTHTY

SEQ ID NO: 65159 - protein, 8 aa, Homo sapiens
  Table A; Target 65159; HLA-C*01:02; PMEL; ENSG00000185664; TAA
ALVVTHTY

SEQ ID NO: 65160 - protein, 8 aa, Homo sapiens
  Table A; Target 65160; HLA-C*02:02; PMEL; ENSG00000185664; TAA
ALVVTHTY

SEQ ID NO: 65161 - protein, 8 aa, Homo sapiens
  Table A; Target 65161; HLA-C*04:01; PMEL; ENSG00000185664; TAA
ALVVTHTY

SEQ ID NO: 65162 - protein, 8 aa, Homo sapiens
  Table A; Target 65162; HLA-C*07:01; PMEL; ENSG00000185664; TAA
ALVVTHTY

SEQ ID NO: 65163 - protein, 8 aa, Homo sapiens
  Table A; Target 65163; HLA-C*07:04; PMEL; ENSG00000185664; TAA
ALVVTHTY

SEQ ID NO: 65164 - protein, 8 aa, Homo sapiens
  Table A; Target 65164; HLA-C*14:02; PMEL; ENSG00000185664; TAA
ALVVTHTY

SEQ ID NO: 65165 - protein, 8 aa, Homo sapiens
  Table A; Target 65165; HLA-C*16:01; PMEL; ENSG00000185664; TAA
ALVVTHTY

SEQ ID NO: 65166 - protein, 8 aa, Homo sapiens
  Table A; Target 65166; HLA-C*16:02; PMEL; ENSG00000185664; TAA
ALVVTHTY

SEQ ID NO: 65167 - protein, 8 aa, Homo sapiens
  Table A; Target 65167; HLA-C*16:04; PMEL; ENSG00000185664; TAA
ALVVTHTY

SEQ ID NO: 65168 - protein, 9 aa, Homo sapiens
  Table A; Target 65168; HLA-A*02:01; PMEL; ENSG00000185664; TAA
ALVVTHTYL

SEQ ID NO: 65169 - protein, 9 aa, Homo sapiens
  Table A; Target 65169; HLA-A*02:03; PMEL; ENSG00000185664; TAA
ALVVTHTYL

SEQ ID NO: 65170 - protein, 9 aa, Homo sapiens
  Table A; Target 65170; HLA-A*02:04; PMEL; ENSG00000185664; TAA
ALVVTHTYL

SEQ ID NO: 65171 - protein, 9 aa, Homo sapiens
  Table A; Target 65171; HLA-A*02:07; PMEL; ENSG00000185664; TAA
ALVVTHTYL

SEQ ID NO: 65172 - protein, 9 aa, Homo sapiens
  Table A; Target 65172; HLA-A*23:01; PMEL; ENSG00000185664; TAA
ALVVTHTYL

SEQ ID NO: 65173 - protein, 9 aa, Homo sapiens
  Table A; Target 65173; HLA-A*24:02; PMEL; ENSG00000185664; TAA
ALVVTHTYL

SEQ ID NO: 65174 - protein, 9 aa, Homo sapiens
  Table A; Target 65174; HLA-B*13:02; PMEL; ENSG00000185664; TAA
ALVVTHTYL

SEQ ID NO: 65175 - protein, 9 aa, Homo sapiens
  Table A; Target 65175; HLA-B*15:03; PMEL; ENSG00000185664; TAA
ALVVTHTYL

SEQ ID NO: 65176 - protein, 9 aa, Homo sapiens
  Table A; Target 65176; HLA-B*37:01; PMEL; ENSG00000185664; TAA
ALVVTHTYL

SEQ ID NO: 65177 - protein, 9 aa, Homo sapiens
  Table A; Target 65177; HLA-B*55:01; PMEL; ENSG00000185664; TAA
ALVVTHTYL

SEQ ID NO: 65178 - protein, 9 aa, Homo sapiens
  Table A; Target 65178; HLA-C*01:02; PMEL; ENSG00000185664; TAA
ALVVTHTYL

SEQ ID NO: 65179 - protein, 9 aa, Homo sapiens
  Table A; Target 65179; HLA-C*02:02; PMEL; ENSG00000185664; TAA
ALVVTHTYL

SEQ ID NO: 65180 - protein, 9 aa, Homo sapiens
  Table A; Target 65180; HLA-C*04:01; PMEL; ENSG00000185664; TAA
ALVVTHTYL

SEQ ID NO: 65181 - protein, 8 aa, Homo sapiens
  Table A; Target 65181; HLA-A*23:01; PMEL; ENSG00000185664; TAA
AMLGTHTM

SEQ ID NO: 65182 - protein, 8 aa, Homo sapiens
  Table A; Target 65182; HLA-A*32:01; PMEL; ENSG00000185664; TAA
AMLGTHTM

SEQ ID NO: 65183 - protein, 8 aa, Homo sapiens
  Table A; Target 65183; HLA-B*08:01; PMEL; ENSG00000185664; TAA
AMLGTHTM

SEQ ID NO: 65184 - protein, 8 aa, Homo sapiens
  Table A; Target 65184; HLA-B*37:01; PMEL; ENSG00000185664; TAA
AMLGTHTM

SEQ ID NO: 65185 - protein, 8 aa, Homo sapiens
  Table A; Target 65185; HLA-C*04:01; PMEL; ENSG00000185664; TAA
AMLGTHTM

SEQ ID NO: 65186 - protein, 8 aa, Homo sapiens
  Table A; Target 65186; HLA-C*14:02; PMEL; ENSG00000185664; TAA
AMLGTHTM

SEQ ID NO: 65187 - protein, 10 aa, Homo sapiens
  Table A; Target 65187; HLA-A*02:01; PMEL; ENSG00000185664; TAA
AMLGTHTMEV

SEQ ID NO: 65188 - protein, 10 aa, Homo sapiens
  Table A; Target 65188; HLA-A*02:03; PMEL; ENSG00000185664; TAA
AMLGTHTMEV

SEQ ID NO: 65189 - protein, 10 aa, Homo sapiens
  Table A; Target 65189; HLA-A*02:04; PMEL; ENSG00000185664; TAA
AMLGTHTMEV

SEQ ID NO: 65190 - protein, 10 aa, Homo sapiens
  Table A; Target 65190; HLA-A*02:07; PMEL; ENSG00000185664; TAA
AMLGTHTMEV

SEQ ID NO: 65191 - protein, 10 aa, Homo sapiens
  Table A; Target 65191; HLA-A*03:01; PMEL; ENSG00000185664; TAA
AMLGTHTMEV

SEQ ID NO: 65192 - protein, 10 aa, Homo sapiens
  Table A; Target 65192; HLA-A*30:01; PMEL; ENSG00000185664; TAA
AMLGTHTMEV

SEQ ID NO: 65193 - protein, 10 aa, Homo sapiens
  Table A; Target 65193; HLA-B*13:02; PMEL; ENSG00000185664; TAA
AMLGTHTMEV

SEQ ID NO: 65194 - protein, 10 aa, Homo sapiens
  Table A; Target 65194; HLA-B*40:02; PMEL; ENSG00000185664; TAA
AMLGTHTMEV

SEQ ID NO: 65195 - protein, 10 aa, Homo sapiens
  Table A; Target 65195; HLA-B*46:01; PMEL; ENSG00000185664; TAA
AMLGTHTMEV

SEQ ID NO: 65196 - protein, 10 aa, Homo sapiens
  Table A; Target 65196; HLA-B*55:01; PMEL; ENSG00000185664; TAA
AMLGTHTMEV

SEQ ID NO: 65197 - protein, 10 aa, Homo sapiens
  Table A; Target 65197; HLA-B*56:01; PMEL; ENSG00000185664; TAA
AMLGTHTMEV

SEQ ID NO: 65198 - protein, 10 aa, Homo sapiens
  Table A; Target 65198; HLA-C*02:02; PMEL; ENSG00000185664; TAA
AMLGTHTMEV

SEQ ID NO: 65199 - protein, 10 aa, Homo sapiens
  Table A; Target 65199; HLA-C*04:01; PMEL; ENSG00000185664; TAA
AMLGTHTMEV

SEQ ID NO: 65200 - protein, 10 aa, Homo sapiens
  Table A; Target 65200; HLA-C*06:02; PMEL; ENSG00000185664; TAA
AMLGTHTMEV

SEQ ID NO: 65201 - protein, 10 aa, Homo sapiens
  Table A; Target 65201; HLA-C*07:02; PMEL; ENSG00000185664; TAA
AMLGTHTMEV

SEQ ID NO: 65202 - protein, 10 aa, Homo sapiens
  Table A; Target 65202; HLA-C*16:02; PMEL; ENSG00000185664; TAA
AMLGTHTMEV

SEQ ID NO: 65203 - protein, 9 aa, Homo sapiens
  Table A; Target 65203; HLA-A*03:02; PMEL; ENSG00000185664; TAA
ANASFSIAL

SEQ ID NO: 65204 - protein, 9 aa, Homo sapiens
  Table A; Target 65204; HLA-A*11:01; PMEL; ENSG00000185664; TAA
ANASFSIAL

SEQ ID NO: 65205 - protein, 9 aa, Homo sapiens
  Table A; Target 65205; HLA-A*23:01; PMEL; ENSG00000185664; TAA
ANASFSIAL

SEQ ID NO: 65206 - protein, 9 aa, Homo sapiens
  Table A; Target 65206; HLA-A*30:01; PMEL; ENSG00000185664; TAA
ANASFSIAL

SEQ ID NO: 65207 - protein, 9 aa, Homo sapiens
  Table A; Target 65207; HLA-A*68:02; PMEL; ENSG00000185664; TAA
ANASFSIAL

SEQ ID NO: 65208 - protein, 9 aa, Homo sapiens
  Table A; Target 65208; HLA-B*07:02; PMEL; ENSG00000185664; TAA
ANASFSIAL

SEQ ID NO: 65209 - protein, 9 aa, Homo sapiens
  Table A; Target 65209; HLA-B*27:05; PMEL; ENSG00000185664; TAA
ANASFSIAL

SEQ ID NO: 65210 - protein, 9 aa, Homo sapiens
  Table A; Target 65210; HLA-B*35:03; PMEL; ENSG00000185664; TAA
ANASFSIAL

SEQ ID NO: 65211 - protein, 9 aa, Homo sapiens
  Table A; Target 65211; HLA-B*39:01; PMEL; ENSG00000185664; TAA
ANASFSIAL

SEQ ID NO: 65212 - protein, 9 aa, Homo sapiens
  Table A; Target 65212; HLA-B*40:01; PMEL; ENSG00000185664; TAA
ANASFSIAL

SEQ ID NO: 65213 - protein, 9 aa, Homo sapiens
  Table A; Target 65213; HLA-B*55:01; PMEL; ENSG00000185664; TAA
ANASFSIAL

SEQ ID NO: 65214 - protein, 9 aa, Homo sapiens
  Table A; Target 65214; HLA-B*56:01; PMEL; ENSG00000185664; TAA
ANASFSIAL

SEQ ID NO: 65215 - protein, 9 aa, Homo sapiens
  Table A; Target 65215; HLA-C*01:02; PMEL; ENSG00000185664; TAA
ANASFSIAL

SEQ ID NO: 65216 - protein, 9 aa, Homo sapiens
  Table A; Target 65216; HLA-C*02:02; PMEL; ENSG00000185664; TAA
ANASFSIAL

SEQ ID NO: 65217 - protein, 9 aa, Homo sapiens
  Table A; Target 65217; HLA-C*03:03; PMEL; ENSG00000185664; TAA
ANASFSIAL

SEQ ID NO: 65218 - protein, 9 aa, Homo sapiens
  Table A; Target 65218; HLA-C*07:02; PMEL; ENSG00000185664; TAA
ANASFSIAL

SEQ ID NO: 65219 - protein, 9 aa, Homo sapiens
  Table A; Target 65219; HLA-C*12:03; PMEL; ENSG00000185664; TAA
ANASFSIAL

SEQ ID NO: 65220 - protein, 9 aa, Homo sapiens
  Table A; Target 65220; HLA-C*16:01; PMEL; ENSG00000185664; TAA
ANASFSIAL

SEQ ID NO: 65221 - protein, 9 aa, Homo sapiens
  Table A; Target 65221; HLA-C*16:02; PMEL; ENSG00000185664; TAA
ANASFSIAL

SEQ ID NO: 65222 - protein, 11 aa, Homo sapiens
  Table A; Target 65222; HLA-A*23:01; PMEL; ENSG00000185664; TAA
ANASFSIALNF

SEQ ID NO: 65223 - protein, 9 aa, Homo sapiens
  Table A; Target 65223; HLA-B*07:02; PMEL; ENSG00000185664; TAA
APNTTAGQV

SEQ ID NO: 65224 - protein, 9 aa, Homo sapiens
  Table A; Target 65224; HLA-B*56:01; PMEL; ENSG00000185664; TAA
APNTTAGQV

SEQ ID NO: 65225 - protein, 9 aa, Homo sapiens
  Table A; Target 65225; HLA-C*07:02; PMEL; ENSG00000185664; TAA
APNTTAGQV

SEQ ID NO: 65226 - protein, 10 aa, Homo sapiens
  Table A; Target 65226; HLA-B*07:02; PMEL; ENSG00000185664; TAA
APNTTAGQVP

SEQ ID NO: 65227 - protein, 10 aa, Homo sapiens
  Table A; Target 65227; HLA-B*56:01; PMEL; ENSG00000185664; TAA
APNTTAGQVP

SEQ ID NO: 65228 - protein, 10 aa, Homo sapiens
  Table A; Target 65228; HLA-C*04:01; PMEL; ENSG00000185664; TAA
APNTTAGQVP

SEQ ID NO: 65229 - protein, 11 aa, Homo sapiens
  Table A; Target 65229; HLA-B*56:01; PMEL; ENSG00000185664; TAA
APNTTAGQVPT

SEQ ID NO: 65230 - protein, 8 aa, Homo sapiens
  Table A; Target 65230; HLA-B*51:01; PMEL; ENSG00000185664; TAA
APVQMPTA

SEQ ID NO: 65231 - protein, 8 aa, Homo sapiens
  Table A; Target 65231; HLA-B*54:01; PMEL; ENSG00000185664; TAA
APVQMPTA

SEQ ID NO: 65232 - protein, 8 aa, Homo sapiens
  Table A; Target 65232; HLA-B*55:01; PMEL; ENSG00000185664; TAA
APVQMPTA

SEQ ID NO: 65233 - protein, 8 aa, Homo sapiens
  Table A; Target 65233; HLA-B*56:01; PMEL; ENSG00000185664; TAA
APVQMPTA

SEQ ID NO: 65234 - protein, 10 aa, Homo sapiens
  Table A; Target 65234; HLA-B*56:01; PMEL; ENSG00000185664; TAA
APVQMPTAES

SEQ ID NO: 65235 - protein, 8 aa, Homo sapiens
  Table A; Target 65235; HLA-A*23:01; PMEL; ENSG00000185664; TAA
AQVTTTEW

SEQ ID NO: 65236 - protein, 8 aa, Homo sapiens
  Table A; Target 65236; HLA-A*25:01; PMEL; ENSG00000185664; TAA
AQVTTTEW

SEQ ID NO: 65237 - protein, 8 aa, Homo sapiens
  Table A; Target 65237; HLA-A*32:01; PMEL; ENSG00000185664; TAA
AQVTTTEW

SEQ ID NO: 65238 - protein, 8 aa, Homo sapiens
  Table A; Target 65238; HLA-B*13:02; PMEL; ENSG00000185664; TAA
AQVTTTEW

SEQ ID NO: 65239 - protein, 8 aa, Homo sapiens
  Table A; Target 65239; HLA-B*15:01; PMEL; ENSG00000185664; TAA
AQVTTTEW

SEQ ID NO: 65240 - protein, 8 aa, Homo sapiens
  Table A; Target 65240; HLA-B*15:03; PMEL; ENSG00000185664; TAA
AQVTTTEW

SEQ ID NO: 65241 - protein, 8 aa, Homo sapiens
  Table A; Target 65241; HLA-B*27:02; PMEL; ENSG00000185664; TAA
AQVTTTEW

SEQ ID NO: 65242 - protein, 8 aa, Homo sapiens
  Table A; Target 65242; HLA-B*37:01; PMEL; ENSG00000185664; TAA
AQVTTTEW

SEQ ID NO: 65243 - protein, 8 aa, Homo sapiens
  Table A; Target 65243; HLA-B*44:02; PMEL; ENSG00000185664; TAA
AQVTTTEW

SEQ ID NO: 65244 - protein, 8 aa, Homo sapiens
  Table A; Target 65244; HLA-B*44:03; PMEL; ENSG00000185664; TAA
AQVTTTEW

SEQ ID NO: 65245 - protein, 8 aa, Homo sapiens
  Table A; Target 65245; HLA-B*46:01; PMEL; ENSG00000185664; TAA
AQVTTTEW

SEQ ID NO: 65246 - protein, 8 aa, Homo sapiens
  Table A; Target 65246; HLA-B*57:01; PMEL; ENSG00000185664; TAA
AQVTTTEW

SEQ ID NO: 65247 - protein, 8 aa, Homo sapiens
  Table A; Target 65247; HLA-B*58:01; PMEL; ENSG00000185664; TAA
AQVTTTEW

SEQ ID NO: 65248 - protein, 8 aa, Homo sapiens
  Table A; Target 65248; HLA-C*14:02; PMEL; ENSG00000185664; TAA
AQVTTTEW

SEQ ID NO: 65249 - protein, 8 aa, Homo sapiens
  Table A; Target 65249; HLA-C*16:01; PMEL; ENSG00000185664; TAA
AQVTTTEW

SEQ ID NO: 65250 - protein, 8 aa, Homo sapiens
  Table A; Target 65250; HLA-C*16:04; PMEL; ENSG00000185664; TAA
AQVTTTEW

SEQ ID NO: 65251 - protein, 9 aa, Homo sapiens
  Table A; Target 65251; HLA-B*13:02; PMEL; ENSG00000185664; TAA
AQVTTTEWV

SEQ ID NO: 65252 - protein, 9 aa, Homo sapiens
  Table A; Target 65252; HLA-A*30:01; PMEL; ENSG00000185664; TAA
AQVVLQAAI

SEQ ID NO: 65253 - protein, 9 aa, Homo sapiens
  Table A; Target 65253; HLA-B*13:02; PMEL; ENSG00000185664; TAA
AQVVLQAAI

SEQ ID NO: 65254 - protein, 9 aa, Homo sapiens
  Table A; Target 65254; HLA-B*15:01; PMEL; ENSG00000185664; TAA
AQVVLQAAI

SEQ ID NO: 65255 - protein, 9 aa, Homo sapiens
  Table A; Target 65255; HLA-B*15:03; PMEL; ENSG00000185664; TAA
AQVVLQAAI

SEQ ID NO: 65256 - protein, 9 aa, Homo sapiens
  Table A; Target 65256; HLA-B*27:02; PMEL; ENSG00000185664; TAA
AQVVLQAAI

SEQ ID NO: 65257 - protein, 9 aa, Homo sapiens
  Table A; Target 65257; HLA-B*27:05; PMEL; ENSG00000185664; TAA
AQVVLQAAI

SEQ ID NO: 65258 - protein, 9 aa, Homo sapiens
  Table A; Target 65258; HLA-B*39:01; PMEL; ENSG00000185664; TAA
AQVVLQAAI

SEQ ID NO: 65259 - protein, 9 aa, Homo sapiens
  Table A; Target 65259; HLA-B*44:02; PMEL; ENSG00000185664; TAA
AQVVLQAAI

SEQ ID NO: 65260 - protein, 9 aa, Homo sapiens
  Table A; Target 65260; HLA-B*58:01; PMEL; ENSG00000185664; TAA
AQVVLQAAI

SEQ ID NO: 65261 - protein, 9 aa, Homo sapiens
  Table A; Target 65261; HLA-C*02:02; PMEL; ENSG00000185664; TAA
AQVVLQAAI

SEQ ID NO: 65262 - protein, 9 aa, Homo sapiens
  Table A; Target 65262; HLA-C*06:02; PMEL; ENSG00000185664; TAA
AQVVLQAAI

SEQ ID NO: 65263 - protein, 9 aa, Homo sapiens
  Table A; Target 65263; HLA-C*16:04; PMEL; ENSG00000185664; TAA
AQVVLQAAI

SEQ ID NO: 65264 - protein, 9 aa, Homo sapiens
  Table A; Target 65264; HLA-A*01:01; PMEL; ENSG00000185664; TAA
ASFSIALNF

SEQ ID NO: 65265 - protein, 9 aa, Homo sapiens
  Table A; Target 65265; HLA-A*03:01; PMEL; ENSG00000185664; TAA
ASFSIALNF

SEQ ID NO: 65266 - protein, 9 aa, Homo sapiens
  Table A; Target 65266; HLA-A*03:02; PMEL; ENSG00000185664; TAA
ASFSIALNF

SEQ ID NO: 65267 - protein, 9 aa, Homo sapiens
  Table A; Target 65267; HLA-A*11:01; PMEL; ENSG00000185664; TAA
ASFSIALNF

SEQ ID NO: 65268 - protein, 9 aa, Homo sapiens
  Table A; Target 65268; HLA-A*23:01; PMEL; ENSG00000185664; TAA
ASFSIALNF

SEQ ID NO: 65269 - protein, 9 aa, Homo sapiens
  Table A; Target 65269; HLA-A*24:02; PMEL; ENSG00000185664; TAA
ASFSIALNF

SEQ ID NO: 65270 - protein, 9 aa, Homo sapiens
  Table A; Target 65270; HLA-A*26:01; PMEL; ENSG00000185664; TAA
ASFSIALNF

SEQ ID NO: 65271 - protein, 9 aa, Homo sapiens
  Table A; Target 65271; HLA-A*29:02; PMEL; ENSG00000185664; TAA
ASFSIALNF

SEQ ID NO: 65272 - protein, 9 aa, Homo sapiens
  Table A; Target 65272; HLA-A*30:02; PMEL; ENSG00000185664; TAA
ASFSIALNF

SEQ ID NO: 65273 - protein, 9 aa, Homo sapiens
  Table A; Target 65273; HLA-A*31:01; PMEL; ENSG00000185664; TAA
ASFSIALNF

SEQ ID NO: 65274 - protein, 9 aa, Homo sapiens
  Table A; Target 65274; HLA-A*32:01; PMEL; ENSG00000185664; TAA
ASFSIALNF

SEQ ID NO: 65275 - protein, 9 aa, Homo sapiens
  Table A; Target 65275; HLA-A*68:02; PMEL; ENSG00000185664; TAA
ASFSIALNF

SEQ ID NO: 65276 - protein, 9 aa, Homo sapiens
  Table A; Target 65276; HLA-B*13:02; PMEL; ENSG00000185664; TAA
ASFSIALNF

SEQ ID NO: 65277 - protein, 9 aa, Homo sapiens
  Table A; Target 65277; HLA-B*15:01; PMEL; ENSG00000185664; TAA
ASFSIALNF

SEQ ID NO: 65278 - protein, 9 aa, Homo sapiens
  Table A; Target 65278; HLA-B*15:03; PMEL; ENSG00000185664; TAA
ASFSIALNF

SEQ ID NO: 65279 - protein, 9 aa, Homo sapiens
  Table A; Target 65279; HLA-B*27:02; PMEL; ENSG00000185664; TAA
ASFSIALNF

SEQ ID NO: 65280 - protein, 9 aa, Homo sapiens
  Table A; Target 65280; HLA-B*40:02; PMEL; ENSG00000185664; TAA
ASFSIALNF

SEQ ID NO: 65281 - protein, 9 aa, Homo sapiens
  Table A; Target 65281; HLA-B*44:02; PMEL; ENSG00000185664; TAA
ASFSIALNF

SEQ ID NO: 65282 - protein, 9 aa, Homo sapiens
  Table A; Target 65282; HLA-B*44:03; PMEL; ENSG00000185664; TAA
ASFSIALNF

SEQ ID NO: 65283 - protein, 9 aa, Homo sapiens
  Table A; Target 65283; HLA-B*46:01; PMEL; ENSG00000185664; TAA
ASFSIALNF

SEQ ID NO: 65284 - protein, 9 aa, Homo sapiens
  Table A; Target 65284; HLA-B*57:01; PMEL; ENSG00000185664; TAA
ASFSIALNF

SEQ ID NO: 65285 - protein, 9 aa, Homo sapiens
  Table A; Target 65285; HLA-B*58:01; PMEL; ENSG00000185664; TAA
ASFSIALNF

SEQ ID NO: 65286 - protein, 9 aa, Homo sapiens
  Table A; Target 65286; HLA-C*02:02; PMEL; ENSG00000185664; TAA
ASFSIALNF

SEQ ID NO: 65287 - protein, 9 aa, Homo sapiens
  Table A; Target 65287; HLA-C*06:02; PMEL; ENSG00000185664; TAA
ASFSIALNF

SEQ ID NO: 65288 - protein, 9 aa, Homo sapiens
  Table A; Target 65288; HLA-C*12:03; PMEL; ENSG00000185664; TAA
ASFSIALNF

SEQ ID NO: 65289 - protein, 9 aa, Homo sapiens
  Table A; Target 65289; HLA-C*16:01; PMEL; ENSG00000185664; TAA
ASFSIALNF

SEQ ID NO: 65290 - protein, 9 aa, Homo sapiens
  Table A; Target 65290; HLA-C*16:04; PMEL; ENSG00000185664; TAA
ASFSIALNF

SEQ ID NO: 65291 - protein, 9 aa, Homo sapiens
  Table A; Target 65291; HLA-A*02:03; PMEL; ENSG00000185664; TAA
ATGMTPAEV

SEQ ID NO: 65292 - protein, 10 aa, Homo sapiens
  Table A; Target 65292; HLA-A*32:01; PMEL; ENSG00000185664; TAA
ATKVPRNQDW

SEQ ID NO: 65293 - protein, 10 aa, Homo sapiens
  Table A; Target 65293; HLA-B*44:02; PMEL; ENSG00000185664; TAA
ATKVPRNQDW

SEQ ID NO: 65294 - protein, 10 aa, Homo sapiens
  Table A; Target 65294; HLA-B*57:01; PMEL; ENSG00000185664; TAA
ATKVPRNQDW

SEQ ID NO: 65295 - protein, 10 aa, Homo sapiens
  Table A; Target 65295; HLA-B*58:01; PMEL; ENSG00000185664; TAA
ATKVPRNQDW

SEQ ID NO: 65296 - protein, 8 aa, Homo sapiens
  Table A; Target 65296; HLA-A*31:01; PMEL; ENSG00000185664; TAA
ATLRLVKR

SEQ ID NO: 65297 - protein, 8 aa, Homo sapiens
  Table A; Target 65297; HLA-A*33:01; PMEL; ENSG00000185664; TAA
ATLRLVKR

SEQ ID NO: 65298 - protein, 9 aa, Homo sapiens
  Table A; Target 65298; HLA-A*03:01; PMEL; ENSG00000185664; TAA
AVGATKVPR

SEQ ID NO: 65299 - protein, 9 aa, Homo sapiens
  Table A; Target 65299; HLA-A*03:02; PMEL; ENSG00000185664; TAA
AVGATKVPR

SEQ ID NO: 65300 - protein, 9 aa, Homo sapiens
  Table A; Target 65300; HLA-A*11:01; PMEL; ENSG00000185664; TAA
AVGATKVPR

SEQ ID NO: 65301 - protein, 9 aa, Homo sapiens
  Table A; Target 65301; HLA-A*31:01; PMEL; ENSG00000185664; TAA
AVGATKVPR

SEQ ID NO: 65302 - protein, 9 aa, Homo sapiens
  Table A; Target 65302; HLA-A*33:01; PMEL; ENSG00000185664; TAA
AVGATKVPR

SEQ ID NO: 65303 - protein, 9 aa, Homo sapiens
  Table A; Target 65303; HLA-A*33:03; PMEL; ENSG00000185664; TAA
AVGATKVPR

SEQ ID NO: 65304 - protein, 9 aa, Homo sapiens
  Table A; Target 65304; HLA-A*68:01; PMEL; ENSG00000185664; TAA
AVGATKVPR

SEQ ID NO: 65305 - protein, 9 aa, Homo sapiens
  Table A; Target 65305; HLA-C*07:06; PMEL; ENSG00000185664; TAA
AVGATKVPR

SEQ ID NO: 65306 - protein, 8 aa, Homo sapiens
  Table A; Target 65306; HLA-B*56:01; PMEL; ENSG00000185664; TAA
AVIGALLA

SEQ ID NO: 65307 - protein, 9 aa, Homo sapiens
  Table A; Target 65307; HLA-A*02:01; PMEL; ENSG00000185664; TAA
AVIGALLAV

SEQ ID NO: 65308 - protein, 9 aa, Homo sapiens
  Table A; Target 65308; HLA-A*02:03; PMEL; ENSG00000185664; TAA
AVIGALLAV

SEQ ID NO: 65309 - protein, 9 aa, Homo sapiens
  Table A; Target 65309; HLA-A*02:04; PMEL; ENSG00000185664; TAA
AVIGALLAV

SEQ ID NO: 65310 - protein, 9 aa, Homo sapiens
  Table A; Target 65310; HLA-A*02:07; PMEL; ENSG00000185664; TAA
AVIGALLAV

SEQ ID NO: 65311 - protein, 9 aa, Homo sapiens
  Table A; Target 65311; HLA-A*03:01; PMEL; ENSG00000185664; TAA
AVIGALLAV

SEQ ID NO: 65312 - protein, 9 aa, Homo sapiens
  Table A; Target 65312; HLA-A*11:01; PMEL; ENSG00000185664; TAA
AVIGALLAV

SEQ ID NO: 65313 - protein, 9 aa, Homo sapiens
  Table A; Target 65313; HLA-A*23:01; PMEL; ENSG00000185664; TAA
AVIGALLAV

SEQ ID NO: 65314 - protein, 9 aa, Homo sapiens
  Table A; Target 65314; HLA-A*25:01; PMEL; ENSG00000185664; TAA
AVIGALLAV

SEQ ID NO: 65315 - protein, 9 aa, Homo sapiens
  Table A; Target 65315; HLA-A*26:01; PMEL; ENSG00000185664; TAA
AVIGALLAV

SEQ ID NO: 65316 - protein, 9 aa, Homo sapiens
  Table A; Target 65316; HLA-A*29:02; PMEL; ENSG00000185664; TAA
AVIGALLAV

SEQ ID NO: 65317 - protein, 9 aa, Homo sapiens
  Table A; Target 65317; HLA-A*30:01; PMEL; ENSG00000185664; TAA
AVIGALLAV

SEQ ID NO: 65318 - protein, 9 aa, Homo sapiens
  Table A; Target 65318; HLA-A*31:01; PMEL; ENSG00000185664; TAA
AVIGALLAV

SEQ ID NO: 65319 - protein, 9 aa, Homo sapiens
  Table A; Target 65319; HLA-A*32:01; PMEL; ENSG00000185664; TAA
AVIGALLAV

SEQ ID NO: 65320 - protein, 9 aa, Homo sapiens
  Table A; Target 65320; HLA-A*68:02; PMEL; ENSG00000185664; TAA
AVIGALLAV

SEQ ID NO: 65321 - protein, 9 aa, Homo sapiens
  Table A; Target 65321; HLA-B*13:02; PMEL; ENSG00000185664; TAA
AVIGALLAV

SEQ ID NO: 65322 - protein, 9 aa, Homo sapiens
  Table A; Target 65322; HLA-B*15:01; PMEL; ENSG00000185664; TAA
AVIGALLAV

SEQ ID NO: 65323 - protein, 9 aa, Homo sapiens
  Table A; Target 65323; HLA-B*27:05; PMEL; ENSG00000185664; TAA
AVIGALLAV

SEQ ID NO: 65324 - protein, 9 aa, Homo sapiens
  Table A; Target 65324; HLA-B*40:02; PMEL; ENSG00000185664; TAA
AVIGALLAV

SEQ ID NO: 65325 - protein, 9 aa, Homo sapiens
  Table A; Target 65325; HLA-B*46:01; PMEL; ENSG00000185664; TAA
AVIGALLAV

SEQ ID NO: 65326 - protein, 9 aa, Homo sapiens
  Table A; Target 65326; HLA-B*49:01; PMEL; ENSG00000185664; TAA
AVIGALLAV

SEQ ID NO: 65327 - protein, 9 aa, Homo sapiens
  Table A; Target 65327; HLA-B*54:01; PMEL; ENSG00000185664; TAA
AVIGALLAV

SEQ ID NO: 65328 - protein, 9 aa, Homo sapiens
  Table A; Target 65328; HLA-B*55:01; PMEL; ENSG00000185664; TAA
AVIGALLAV

SEQ ID NO: 65329 - protein, 9 aa, Homo sapiens
  Table A; Target 65329; HLA-B*56:01; PMEL; ENSG00000185664; TAA
AVIGALLAV

SEQ ID NO: 65330 - protein, 9 aa, Homo sapiens
  Table A; Target 65330; HLA-B*58:01; PMEL; ENSG00000185664; TAA
AVIGALLAV

SEQ ID NO: 65331 - protein, 9 aa, Homo sapiens
  Table A; Target 65331; HLA-C*01:02; PMEL; ENSG00000185664; TAA
AVIGALLAV

SEQ ID NO: 65332 - protein, 9 aa, Homo sapiens
  Table A; Target 65332; HLA-C*02:02; PMEL; ENSG00000185664; TAA
AVIGALLAV

SEQ ID NO: 65333 - protein, 9 aa, Homo sapiens
  Table A; Target 65333; HLA-C*03:03; PMEL; ENSG00000185664; TAA
AVIGALLAV

SEQ ID NO: 65334 - protein, 9 aa, Homo sapiens
  Table A; Target 65334; HLA-C*03:04; PMEL; ENSG00000185664; TAA
AVIGALLAV

SEQ ID NO: 65335 - protein, 9 aa, Homo sapiens
  Table A; Target 65335; HLA-C*06:02; PMEL; ENSG00000185664; TAA
AVIGALLAV

SEQ ID NO: 65336 - protein, 9 aa, Homo sapiens
  Table A; Target 65336; HLA-C*14:02; PMEL; ENSG00000185664; TAA
AVIGALLAV

SEQ ID NO: 65337 - protein, 9 aa, Homo sapiens
  Table A; Target 65337; HLA-C*16:04; PMEL; ENSG00000185664; TAA
AVIGALLAV

SEQ ID NO: 65338 - protein, 10 aa, Homo sapiens
  Table A; Target 65338; HLA-B*56:01; PMEL; ENSG00000185664; TAA
AVIGALLAVG

SEQ ID NO: 65339 - protein, 10 aa, Homo sapiens
  Table A; Target 65339; HLA-C*04:01; PMEL; ENSG00000185664; TAA
AVIGALLAVG

SEQ ID NO: 65340 - protein, 10 aa, Homo sapiens
  Table A; Target 65340; HLA-C*06:02; PMEL; ENSG00000185664; TAA
AVIGALLAVG

SEQ ID NO: 65341 - protein, 11 aa, Homo sapiens
  Table A; Target 65341; HLA-B*56:01; PMEL; ENSG00000185664; TAA
AVIGALLAVGA

SEQ ID NO: 65342 - protein, 10 aa, Homo sapiens
  Table A; Target 65342; HLA-A*25:01; PMEL; ENSG00000185664; TAA
AVPSGEGDAF

SEQ ID NO: 65343 - protein, 10 aa, Homo sapiens
  Table A; Target 65343; HLA-A*26:01; PMEL; ENSG00000185664; TAA
AVPSGEGDAF

SEQ ID NO: 65344 - protein, 10 aa, Homo sapiens
  Table A; Target 65344; HLA-B*15:01; PMEL; ENSG00000185664; TAA
AVPSGEGDAF

SEQ ID NO: 65345 - protein, 10 aa, Homo sapiens
  Table A; Target 65345; HLA-B*27:05; PMEL; ENSG00000185664; TAA
AVPSGEGDAF

SEQ ID NO: 65346 - protein, 10 aa, Homo sapiens
  Table A; Target 65346; HLA-B*38:01; PMEL; ENSG00000185664; TAA
AVPSGEGDAF

SEQ ID NO: 65347 - protein, 10 aa, Homo sapiens
  Table A; Target 65347; HLA-B*39:01; PMEL; ENSG00000185664; TAA
AVPSGEGDAF

SEQ ID NO: 65348 - protein, 10 aa, Homo sapiens
  Table A; Target 65348; HLA-B*58:01; PMEL; ENSG00000185664; TAA
AVPSGEGDAF

SEQ ID NO: 65349 - protein, 10 aa, Homo sapiens
  Table A; Target 65349; HLA-C*01:02; PMEL; ENSG00000185664; TAA
AVPSGEGDAF

SEQ ID NO: 65350 - protein, 10 aa, Homo sapiens
  Table A; Target 65350; HLA-C*07:02; PMEL; ENSG00000185664; TAA
AVPSGEGDAF

SEQ ID NO: 65351 - protein, 10 aa, Homo sapiens
  Table A; Target 65351; HLA-C*14:02; PMEL; ENSG00000185664; TAA
AVPSGEGDAF

SEQ ID NO: 65352 - protein, 8 aa, Homo sapiens
  Table A; Target 65352; HLA-B*13:02; PMEL; ENSG00000185664; TAA
AVVLASLI

SEQ ID NO: 65353 - protein, 8 aa, Homo sapiens
  Table A; Target 65353; HLA-C*04:01; PMEL; ENSG00000185664; TAA
AVVLASLI

SEQ ID NO: 65354 - protein, 8 aa, Homo sapiens
  Table A; Target 65354; HLA-C*06:02; PMEL; ENSG00000185664; TAA
AVVLASLI

SEQ ID NO: 65355 - protein, 9 aa, Homo sapiens
  Table A; Target 65355; HLA-A*01:01; PMEL; ENSG00000185664; TAA
AVVLASLIY

SEQ ID NO: 65356 - protein, 9 aa, Homo sapiens
  Table A; Target 65356; HLA-A*26:01; PMEL; ENSG00000185664; TAA
AVVLASLIY

SEQ ID NO: 65357 - protein, 9 aa, Homo sapiens
  Table A; Target 65357; HLA-A*29:02; PMEL; ENSG00000185664; TAA
AVVLASLIY

SEQ ID NO: 65358 - protein, 9 aa, Homo sapiens
  Table A; Target 65358; HLA-A*30:02; PMEL; ENSG00000185664; TAA
AVVLASLIY

SEQ ID NO: 65359 - protein, 9 aa, Homo sapiens
  Table A; Target 65359; HLA-A*32:01; PMEL; ENSG00000185664; TAA
AVVLASLIY

SEQ ID NO: 65360 - protein, 9 aa, Homo sapiens
  Table A; Target 65360; HLA-B*15:01; PMEL; ENSG00000185664; TAA
AVVLASLIY

SEQ ID NO: 65361 - protein, 9 aa, Homo sapiens
  Table A; Target 65361; HLA-B*15:03; PMEL; ENSG00000185664; TAA
AVVLASLIY

SEQ ID NO: 65362 - protein, 9 aa, Homo sapiens
  Table A; Target 65362; HLA-B*35:01; PMEL; ENSG00000185664; TAA
AVVLASLIY

SEQ ID NO: 65363 - protein, 9 aa, Homo sapiens
  Table A; Target 65363; HLA-B*44:03; PMEL; ENSG00000185664; TAA
AVVLASLIY

SEQ ID NO: 65364 - protein, 9 aa, Homo sapiens
  Table A; Target 65364; HLA-B*46:01; PMEL; ENSG00000185664; TAA
AVVLASLIY

SEQ ID NO: 65365 - protein, 9 aa, Homo sapiens
  Table A; Target 65365; HLA-C*02:02; PMEL; ENSG00000185664; TAA
AVVLASLIY

SEQ ID NO: 65366 - protein, 9 aa, Homo sapiens
  Table A; Target 65366; HLA-C*07:01; PMEL; ENSG00000185664; TAA
AVVLASLIY

SEQ ID NO: 65367 - protein, 9 aa, Homo sapiens
  Table A; Target 65367; HLA-C*07:04; PMEL; ENSG00000185664; TAA
AVVLASLIY

SEQ ID NO: 65368 - protein, 9 aa, Homo sapiens
  Table A; Target 65368; HLA-C*16:01; PMEL; ENSG00000185664; TAA
AVVLASLIY

SEQ ID NO: 65369 - protein, 9 aa, Homo sapiens
  Table A; Target 65369; HLA-C*16:04; PMEL; ENSG00000185664; TAA
AVVLASLIY

SEQ ID NO: 65370 - protein, 10 aa, Homo sapiens
  Table A; Target 65370; HLA-A*03:01; PMEL; ENSG00000185664; TAA
AVVLASLIYR

SEQ ID NO: 65371 - protein, 10 aa, Homo sapiens
  Table A; Target 65371; HLA-A*11:01; PMEL; ENSG00000185664; TAA
AVVLASLIYR

SEQ ID NO: 65372 - protein, 10 aa, Homo sapiens
  Table A; Target 65372; HLA-A*31:01; PMEL; ENSG00000185664; TAA
AVVLASLIYR

SEQ ID NO: 65373 - protein, 10 aa, Homo sapiens
  Table A; Target 65373; HLA-A*33:03; PMEL; ENSG00000185664; TAA
AVVLASLIYR

SEQ ID NO: 65374 - protein, 10 aa, Homo sapiens
  Table A; Target 65374; HLA-A*68:01; PMEL; ENSG00000185664; TAA
AVVLASLIYR

SEQ ID NO: 65375 - protein, 10 aa, Homo sapiens
  Table A; Target 65375; HLA-B*57:01; PMEL; ENSG00000185664; TAA
AVVLASLIYR

SEQ ID NO: 65376 - protein, 10 aa, Homo sapiens
  Table A; Target 65376; HLA-C*07:06; PMEL; ENSG00000185664; TAA
AVVLASLIYR

SEQ ID NO: 65377 - protein, 11 aa, Homo sapiens
  Table A; Target 65377; HLA-A*31:01; PMEL; ENSG00000185664; TAA
AVVLASLIYRR

SEQ ID NO: 65378 - protein, 8 aa, Homo sapiens
  Table A; Target 65378; HLA-A*23:01; PMEL; ENSG00000185664; TAA
AVVSTQLI

SEQ ID NO: 65379 - protein, 8 aa, Homo sapiens
  Table A; Target 65379; HLA-B*13:02; PMEL; ENSG00000185664; TAA
AVVSTQLI

SEQ ID NO: 65380 - protein, 9 aa, Homo sapiens
  Table A; Target 65380; HLA-A*26:01; PMEL; ENSG00000185664; TAA
AVVSTQLIM

SEQ ID NO: 65381 - protein, 9 aa, Homo sapiens
  Table A; Target 65381; HLA-A*29:02; PMEL; ENSG00000185664; TAA
AVVSTQLIM

SEQ ID NO: 65382 - protein, 9 aa, Homo sapiens
  Table A; Target 65382; HLA-B*13:02; PMEL; ENSG00000185664; TAA
AVVSTQLIM

SEQ ID NO: 65383 - protein, 9 aa, Homo sapiens
  Table A; Target 65383; HLA-B*15:01; PMEL; ENSG00000185664; TAA
AVVSTQLIM

SEQ ID NO: 65384 - protein, 9 aa, Homo sapiens
  Table A; Target 65384; HLA-B*15:03; PMEL; ENSG00000185664; TAA
AVVSTQLIM

SEQ ID NO: 65385 - protein, 9 aa, Homo sapiens
  Table A; Target 65385; HLA-B*35:01; PMEL; ENSG00000185664; TAA
AVVSTQLIM

SEQ ID NO: 65386 - protein, 9 aa, Homo sapiens
  Table A; Target 65386; HLA-B*46:01; PMEL; ENSG00000185664; TAA
AVVSTQLIM

SEQ ID NO: 65387 - protein, 9 aa, Homo sapiens
  Table A; Target 65387; HLA-B*58:01; PMEL; ENSG00000185664; TAA
AVVSTQLIM

SEQ ID NO: 65388 - protein, 9 aa, Homo sapiens
  Table A; Target 65388; HLA-C*01:02; PMEL; ENSG00000185664; TAA
AVVSTQLIM

SEQ ID NO: 65389 - protein, 9 aa, Homo sapiens
  Table A; Target 65389; HLA-C*02:02; PMEL; ENSG00000185664; TAA
AVVSTQLIM

SEQ ID NO: 65390 - protein, 9 aa, Homo sapiens
  Table A; Target 65390; HLA-C*03:03; PMEL; ENSG00000185664; TAA
AVVSTQLIM

SEQ ID NO: 65391 - protein, 9 aa, Homo sapiens
  Table A; Target 65391; HLA-C*03:04; PMEL; ENSG00000185664; TAA
AVVSTQLIM

SEQ ID NO: 65392 - protein, 9 aa, Homo sapiens
  Table A; Target 65392; HLA-C*07:04; PMEL; ENSG00000185664; TAA
AVVSTQLIM

SEQ ID NO: 65393 - protein, 9 aa, Homo sapiens
  Table A; Target 65393; HLA-C*16:01; PMEL; ENSG00000185664; TAA
AVVSTQLIM

SEQ ID NO: 65394 - protein, 9 aa, Homo sapiens
  Table A; Target 65394; HLA-C*16:04; PMEL; ENSG00000185664; TAA
AVVSTQLIM

SEQ ID NO: 65395 - protein, 11 aa, Homo sapiens
  Table A; Target 65395; HLA-A*31:01; PMEL; ENSG00000185664; TAA
AVVSTQLIMPG

SEQ ID NO: 65396 - protein, 11 aa, Homo sapiens
  Table A; Target 65396; HLA-C*04:01; PMEL; ENSG00000185664; TAA
AVVSTQLIMPG

SEQ ID NO: 65397 - protein, 9 aa, Homo sapiens
  Table A; Target 65397; HLA-B*07:02; PMEL; ENSG00000185664; TAA
CPIGENSPL

SEQ ID NO: 65398 - protein, 9 aa, Homo sapiens
  Table A; Target 65398; HLA-B*35:01; PMEL; ENSG00000185664; TAA
CPIGENSPL

SEQ ID NO: 65399 - protein, 9 aa, Homo sapiens
  Table A; Target 65399; HLA-B*35:03; PMEL; ENSG00000185664; TAA
CPIGENSPL

SEQ ID NO: 65400 - protein, 9 aa, Homo sapiens
  Table A; Target 65400; HLA-B*55:01; PMEL; ENSG00000185664; TAA
CPIGENSPL

SEQ ID NO: 65401 - protein, 9 aa, Homo sapiens
  Table A; Target 65401; HLA-B*56:01; PMEL; ENSG00000185664; TAA
CPIGENSPL

SEQ ID NO: 65402 - protein, 9 aa, Homo sapiens
  Table A; Target 65402; HLA-C*03:03; PMEL; ENSG00000185664; TAA
CPIGENSPL

SEQ ID NO: 65403 - protein, 9 aa, Homo sapiens
  Table A; Target 65403; HLA-C*07:02; PMEL; ENSG00000185664; TAA
CPIGENSPL

SEQ ID NO: 65404 - protein, 10 aa, Homo sapiens
  Table A; Target 65404; HLA-B*07:02; PMEL; ENSG00000185664; TAA
CPIGENSPLL

SEQ ID NO: 65405 - protein, 10 aa, Homo sapiens
  Table A; Target 65405; HLA-B*35:01; PMEL; ENSG00000185664; TAA
CPIGENSPLL

SEQ ID NO: 65406 - protein, 10 aa, Homo sapiens
  Table A; Target 65406; HLA-B*35:03; PMEL; ENSG00000185664; TAA
CPIGENSPLL

SEQ ID NO: 65407 - protein, 10 aa, Homo sapiens
  Table A; Target 65407; HLA-B*38:01; PMEL; ENSG00000185664; TAA
CPIGENSPLL

SEQ ID NO: 65408 - protein, 10 aa, Homo sapiens
  Table A; Target 65408; HLA-B*55:01; PMEL; ENSG00000185664; TAA
CPIGENSPLL

SEQ ID NO: 65409 - protein, 10 aa, Homo sapiens
  Table A; Target 65409; HLA-B*56:01; PMEL; ENSG00000185664; TAA
CPIGENSPLL

SEQ ID NO: 65410 - protein, 10 aa, Homo sapiens
  Table A; Target 65410; HLA-C*07:02; PMEL; ENSG00000185664; TAA
CPIGENSPLL

SEQ ID NO: 65411 - protein, 8 aa, Homo sapiens
  Table A; Target 65411; HLA-B*13:02; PMEL; ENSG00000185664; TAA
CQLVLHQI

SEQ ID NO: 65412 - protein, 9 aa, Homo sapiens
  Table A; Target 65412; HLA-C*07:04; PMEL; ENSG00000185664; TAA
CQPVLPSPA

SEQ ID NO: 65413 - protein, 8 aa, Homo sapiens
  Table A; Target 65413; HLA-B*51:01; PMEL; ENSG00000185664; TAA
DAFELTVS

SEQ ID NO: 65414 - protein, 9 aa, Homo sapiens
  Table A; Target 65414; HLA-A*25:01; PMEL; ENSG00000185664; TAA
DAFELTVSC

SEQ ID NO: 65415 - protein, 9 aa, Homo sapiens
  Table A; Target 65415; HLA-A*26:01; PMEL; ENSG00000185664; TAA
DAFELTVSC

SEQ ID NO: 65416 - protein, 9 aa, Homo sapiens
  Table A; Target 65416; HLA-A*68:01; PMEL; ENSG00000185664; TAA
DAFELTVSC

SEQ ID NO: 65417 - protein, 9 aa, Homo sapiens
  Table A; Target 65417; HLA-A*68:02; PMEL; ENSG00000185664; TAA
DAFELTVSC

SEQ ID NO: 65418 - protein, 9 aa, Homo sapiens
  Table A; Target 65418; HLA-B*18:01; PMEL; ENSG00000185664; TAA
DAFELTVSC

SEQ ID NO: 65419 - protein, 9 aa, Homo sapiens
  Table A; Target 65419; HLA-B*35:01; PMEL; ENSG00000185664; TAA
DAFELTVSC

SEQ ID NO: 65420 - protein, 9 aa, Homo sapiens
  Table A; Target 65420; HLA-B*35:03; PMEL; ENSG00000185664; TAA
DAFELTVSC

SEQ ID NO: 65421 - protein, 9 aa, Homo sapiens
  Table A; Target 65421; HLA-B*39:01; PMEL; ENSG00000185664; TAA
DAFELTVSC

SEQ ID NO: 65422 - protein, 9 aa, Homo sapiens
  Table A; Target 65422; HLA-B*40:02; PMEL; ENSG00000185664; TAA
DAFELTVSC

SEQ ID NO: 65423 - protein, 9 aa, Homo sapiens
  Table A; Target 65423; HLA-B*51:01; PMEL; ENSG00000185664; TAA
DAFELTVSC

SEQ ID NO: 65424 - protein, 9 aa, Homo sapiens
  Table A; Target 65424; HLA-B*54:01; PMEL; ENSG00000185664; TAA
DAFELTVSC

SEQ ID NO: 65425 - protein, 9 aa, Homo sapiens
  Table A; Target 65425; HLA-B*55:01; PMEL; ENSG00000185664; TAA
DAFELTVSC

SEQ ID NO: 65426 - protein, 9 aa, Homo sapiens
  Table A; Target 65426; HLA-B*56:01; PMEL; ENSG00000185664; TAA
DAFELTVSC

SEQ ID NO: 65427 - protein, 9 aa, Homo sapiens
  Table A; Target 65427; HLA-C*02:02; PMEL; ENSG00000185664; TAA
DAFELTVSC

SEQ ID NO: 65428 - protein, 9 aa, Homo sapiens
  Table A; Target 65428; HLA-C*07:06; PMEL; ENSG00000185664; TAA
DAFELTVSC

SEQ ID NO: 65429 - protein, 9 aa, Homo sapiens
  Table A; Target 65429; HLA-C*12:03; PMEL; ENSG00000185664; TAA
DAFELTVSC

SEQ ID NO: 65430 - protein, 9 aa, Homo sapiens
  Table A; Target 65430; HLA-C*16:04; PMEL; ENSG00000185664; TAA
DAFELTVSC

SEQ ID NO: 65431 - protein, 10 aa, Homo sapiens
  Table A; Target 65431; HLA-A*26:01; PMEL; ENSG00000185664; TAA
DAFELTVSCQ

SEQ ID NO: 65432 - protein, 9 aa, Homo sapiens
  Table A; Target 65432; HLA-C*12:03; PMEL; ENSG00000185664; TAA
DASSIMSTE

SEQ ID NO: 65433 - protein, 10 aa, Homo sapiens
  Table A; Target 65433; HLA-C*07:01; PMEL; ENSG00000185664; TAA
DCWRGGQVSL

SEQ ID NO: 65434 - protein, 9 aa, Homo sapiens
  Table A; Target 65434; HLA-C*14:02; PMEL; ENSG00000185664; TAA
DFGDSSGTL

SEQ ID NO: 65435 - protein, 9 aa, Homo sapiens
  Table A; Target 65435; HLA-A*33:01; PMEL; ENSG00000185664; TAA
DFSVPQLPH

SEQ ID NO: 65436 - protein, 8 aa, Homo sapiens
  Table A; Target 65436; HLA-B*08:01; PMEL; ENSG00000185664; TAA
DGGNKHFL

SEQ ID NO: 65437 - protein, 8 aa, Homo sapiens
  Table A; Target 65437; HLA-C*07:01; PMEL; ENSG00000185664; TAA
DGGNKHFL

SEQ ID NO: 65438 - protein, 9 aa, Homo sapiens
  Table A; Target 65438; HLA-A*31:01; PMEL; ENSG00000185664; TAA
DGGNKHFLR

SEQ ID NO: 65439 - protein, 9 aa, Homo sapiens
  Table A; Target 65439; HLA-A*33:01; PMEL; ENSG00000185664; TAA
DGGNKHFLR

SEQ ID NO: 65440 - protein, 9 aa, Homo sapiens
  Table A; Target 65440; HLA-A*33:03; PMEL; ENSG00000185664; TAA
DGGNKHFLR

SEQ ID NO: 65441 - protein, 9 aa, Homo sapiens
  Table A; Target 65441; HLA-A*68:01; PMEL; ENSG00000185664; TAA
DGGNKHFLR

SEQ ID NO: 65442 - protein, 10 aa, Homo sapiens
  Table A; Target 65442; HLA-A*25:01; PMEL; ENSG00000185664; TAA
DGGPCPSGSW

SEQ ID NO: 65443 - protein, 8 aa, Homo sapiens
  Table A; Target 65443; HLA-B*51:01; PMEL; ENSG00000185664; TAA
DGPTLIGA

SEQ ID NO: 65444 - protein, 10 aa, Homo sapiens
  Table A; Target 65444; HLA-C*07:02; PMEL; ENSG00000185664; TAA
DGPTLIGANA

SEQ ID NO: 65445 - protein, 8 aa, Homo sapiens
  Table A; Target 65445; HLA-B*08:01; PMEL; ENSG00000185664; TAA
DGTATLRL

SEQ ID NO: 65446 - protein, 8 aa, Homo sapiens
  Table A; Target 65446; HLA-B*51:01; PMEL; ENSG00000185664; TAA
DGTATLRL

SEQ ID NO: 65447 - protein, 9 aa, Homo sapiens
  Table A; Target 65447; HLA-B*51:01; PMEL; ENSG00000185664; TAA
DGTATLRLV

SEQ ID NO: 65448 - protein, 9 aa, Homo sapiens
  Table A; Target 65448; HLA-C*06:02; PMEL; ENSG00000185664; TAA
DGTATLRLV

SEQ ID NO: 65449 - protein, 9 aa, Homo sapiens
  Table A; Target 65449; HLA-C*07:01; PMEL; ENSG00000185664; TAA
DGTATLRLV

SEQ ID NO: 65450 - protein, 9 aa, Homo sapiens
  Table A; Target 65450; HLA-C*07:02; PMEL; ENSG00000185664; TAA
DGTATLRLV

SEQ ID NO: 65451 - protein, 9 aa, Homo sapiens
  Table A; Target 65451; HLA-C*16:02; PMEL; ENSG00000185664; TAA
DGTATLRLV

SEQ ID NO: 65452 - protein, 11 aa, Homo sapiens
  Table A; Target 65452; HLA-A*33:01; PMEL; ENSG00000185664; TAA
DGTATLRLVKR

SEQ ID NO: 65453 - protein, 9 aa, Homo sapiens
  Table A; Target 65453; HLA-A*25:01; PMEL; ENSG00000185664; TAA
DIVQGIESA

SEQ ID NO: 65454 - protein, 9 aa, Homo sapiens
  Table A; Target 65454; HLA-A*26:01; PMEL; ENSG00000185664; TAA
DIVQGIESA

SEQ ID NO: 65455 - protein, 9 aa, Homo sapiens
  Table A; Target 65455; HLA-B*54:01; PMEL; ENSG00000185664; TAA
DIVQGIESA

SEQ ID NO: 65456 - protein, 11 aa, Homo sapiens
  Table A; Target 65456; HLA-A*25:01; PMEL; ENSG00000185664; TAA
DIVQGIESAEI

SEQ ID NO: 65457 - protein, 8 aa, Homo sapiens
  Table A; Target 65457; HLA-B*08:01; PMEL; ENSG00000185664; TAA
DLVLKRCL

SEQ ID NO: 65458 - protein, 9 aa, Homo sapiens
  Table A; Target 65458; HLA-B*08:01; PMEL; ENSG00000185664; TAA
DLVLKRCLL

SEQ ID NO: 65459 - protein, 9 aa, Homo sapiens
  Table A; Target 65459; HLA-B*35:01; PMEL; ENSG00000185664; TAA
DPSGYLAEA

SEQ ID NO: 65460 - protein, 9 aa, Homo sapiens
  Table A; Target 65460; HLA-B*35:03; PMEL; ENSG00000185664; TAA
DPSGYLAEA

SEQ ID NO: 65461 - protein, 9 aa, Homo sapiens
  Table A; Target 65461; HLA-B*54:01; PMEL; ENSG00000185664; TAA
DPSGYLAEA

SEQ ID NO: 65462 - protein, 9 aa, Homo sapiens
  Table A; Target 65462; HLA-B*55:01; PMEL; ENSG00000185664; TAA
DPSGYLAEA

SEQ ID NO: 65463 - protein, 9 aa, Homo sapiens
  Table A; Target 65463; HLA-B*56:01; PMEL; ENSG00000185664; TAA
DPSGYLAEA

SEQ ID NO: 65464 - protein, 9 aa, Homo sapiens
  Table A; Target 65464; HLA-A*02:03; PMEL; ENSG00000185664; TAA
DQVPFSVSV

SEQ ID NO: 65465 - protein, 9 aa, Homo sapiens
  Table A; Target 65465; HLA-A*25:01; PMEL; ENSG00000185664; TAA
DQVPFSVSV

SEQ ID NO: 65466 - protein, 9 aa, Homo sapiens
  Table A; Target 65466; HLA-A*26:01; PMEL; ENSG00000185664; TAA
DQVPFSVSV

SEQ ID NO: 65467 - protein, 9 aa, Homo sapiens
  Table A; Target 65467; HLA-A*30:01; PMEL; ENSG00000185664; TAA
DQVPFSVSV

SEQ ID NO: 65468 - protein, 9 aa, Homo sapiens
  Table A; Target 65468; HLA-A*68:02; PMEL; ENSG00000185664; TAA
DQVPFSVSV

SEQ ID NO: 65469 - protein, 9 aa, Homo sapiens
  Table A; Target 65469; HLA-B*08:01; PMEL; ENSG00000185664; TAA
DQVPFSVSV

SEQ ID NO: 65470 - protein, 9 aa, Homo sapiens
  Table A; Target 65470; HLA-B*13:02; PMEL; ENSG00000185664; TAA
DQVPFSVSV

SEQ ID NO: 65471 - protein, 9 aa, Homo sapiens
  Table A; Target 65471; HLA-B*15:01; PMEL; ENSG00000185664; TAA
DQVPFSVSV

SEQ ID NO: 65472 - protein, 9 aa, Homo sapiens
  Table A; Target 65472; HLA-B*15:03; PMEL; ENSG00000185664; TAA
DQVPFSVSV

SEQ ID NO: 65473 - protein, 9 aa, Homo sapiens
  Table A; Target 65473; HLA-B*18:01; PMEL; ENSG00000185664; TAA
DQVPFSVSV

SEQ ID NO: 65474 - protein, 9 aa, Homo sapiens
  Table A; Target 65474; HLA-B*27:05; PMEL; ENSG00000185664; TAA
DQVPFSVSV

SEQ ID NO: 65475 - protein, 9 aa, Homo sapiens
  Table A; Target 65475; HLA-B*35:01; PMEL; ENSG00000185664; TAA
DQVPFSVSV

SEQ ID NO: 65476 - protein, 9 aa, Homo sapiens
  Table A; Target 65476; HLA-B*35:03; PMEL; ENSG00000185664; TAA
DQVPFSVSV

SEQ ID NO: 65477 - protein, 9 aa, Homo sapiens
  Table A; Target 65477; HLA-B*38:01; PMEL; ENSG00000185664; TAA
DQVPFSVSV

SEQ ID NO: 65478 - protein, 9 aa, Homo sapiens
  Table A; Target 65478; HLA-B*39:01; PMEL; ENSG00000185664; TAA
DQVPFSVSV

SEQ ID NO: 65479 - protein, 9 aa, Homo sapiens
  Table A; Target 65479; HLA-B*40:01; PMEL; ENSG00000185664; TAA
DQVPFSVSV

SEQ ID NO: 65480 - protein, 9 aa, Homo sapiens
  Table A; Target 65480; HLA-B*40:02; PMEL; ENSG00000185664; TAA
DQVPFSVSV

SEQ ID NO: 65481 - protein, 9 aa, Homo sapiens
  Table A; Target 65481; HLA-B*49:01; PMEL; ENSG00000185664; TAA
DQVPFSVSV

SEQ ID NO: 65482 - protein, 9 aa, Homo sapiens
  Table A; Target 65482; HLA-B*51:01; PMEL; ENSG00000185664; TAA
DQVPFSVSV

SEQ ID NO: 65483 - protein, 9 aa, Homo sapiens
  Table A; Target 65483; HLA-B*54:01; PMEL; ENSG00000185664; TAA
DQVPFSVSV

SEQ ID NO: 65484 - protein, 9 aa, Homo sapiens
  Table A; Target 65484; HLA-B*55:01; PMEL; ENSG00000185664; TAA
DQVPFSVSV

SEQ ID NO: 65485 - protein, 9 aa, Homo sapiens
  Table A; Target 65485; HLA-C*02:02; PMEL; ENSG00000185664; TAA
DQVPFSVSV

SEQ ID NO: 65486 - protein, 9 aa, Homo sapiens
  Table A; Target 65486; HLA-C*03:03; PMEL; ENSG00000185664; TAA
DQVPFSVSV

SEQ ID NO: 65487 - protein, 9 aa, Homo sapiens
  Table A; Target 65487; HLA-C*06:02; PMEL; ENSG00000185664; TAA
DQVPFSVSV

SEQ ID NO: 65488 - protein, 9 aa, Homo sapiens
  Table A; Target 65488; HLA-C*12:03; PMEL; ENSG00000185664; TAA
DQVPFSVSV

SEQ ID NO: 65489 - protein, 9 aa, Homo sapiens
  Table A; Target 65489; HLA-C*16:04; PMEL; ENSG00000185664; TAA
DQVPFSVSV

SEQ ID NO: 65490 - protein, 9 aa, Homo sapiens
  Table A; Target 65490; HLA-A*11:01; PMEL; ENSG00000185664; TAA
DSSGTLISR

SEQ ID NO: 65491 - protein, 9 aa, Homo sapiens
  Table A; Target 65491; HLA-A*31:01; PMEL; ENSG00000185664; TAA
DSSGTLISR

SEQ ID NO: 65492 - protein, 9 aa, Homo sapiens
  Table A; Target 65492; HLA-A*33:01; PMEL; ENSG00000185664; TAA
DSSGTLISR

SEQ ID NO: 65493 - protein, 9 aa, Homo sapiens
  Table A; Target 65493; HLA-A*33:03; PMEL; ENSG00000185664; TAA
DSSGTLISR

SEQ ID NO: 65494 - protein, 9 aa, Homo sapiens
  Table A; Target 65494; HLA-A*68:01; PMEL; ENSG00000185664; TAA
DSSGTLISR

SEQ ID NO: 65495 - protein, 9 aa, Homo sapiens
  Table A; Target 65495; HLA-A*68:02; PMEL; ENSG00000185664; TAA
DSSGTLISR

SEQ ID NO: 65496 - protein, 9 aa, Homo sapiens
  Table A; Target 65496; HLA-B*27:02; PMEL; ENSG00000185664; TAA
DSSGTLISR

SEQ ID NO: 65497 - protein, 9 aa, Homo sapiens
  Table A; Target 65497; HLA-C*07:06; PMEL; ENSG00000185664; TAA
DSSGTLISR

SEQ ID NO: 65498 - protein, 8 aa, Homo sapiens
  Table A; Target 65498; HLA-A*33:01; PMEL; ENSG00000185664; TAA
DTNSLAVV

SEQ ID NO: 65499 - protein, 8 aa, Homo sapiens
  Table A; Target 65499; HLA-B*51:01; PMEL; ENSG00000185664; TAA
DTNSLAVV

SEQ ID NO: 65500 - protein, 9 aa, Homo sapiens
  Table A; Target 65500; HLA-A*33:01; PMEL; ENSG00000185664; TAA
DTNSLAVVS

SEQ ID NO: 65501 - protein, 9 aa, Homo sapiens
  Table A; Target 65501; HLA-A*33:03; PMEL; ENSG00000185664; TAA
DTNSLAVVS

SEQ ID NO: 65502 - protein, 9 aa, Homo sapiens
  Table A; Target 65502; HLA-C*07:06; PMEL; ENSG00000185664; TAA
DTNSLAVVS

SEQ ID NO: 65503 - protein, 10 aa, Homo sapiens
  Table A; Target 65503; HLA-A*33:01; PMEL; ENSG00000185664; TAA
DTNSLAVVST

SEQ ID NO: 65504 - protein, 10 aa, Homo sapiens
  Table A; Target 65504; HLA-A*68:01; PMEL; ENSG00000185664; TAA
DTNSLAVVST

SEQ ID NO: 65505 - protein, 8 aa, Homo sapiens
  Table A; Target 65505; HLA-A*33:03; PMEL; ENSG00000185664; TAA
EADLSYTW

SEQ ID NO: 65506 - protein, 8 aa, Homo sapiens
  Table A; Target 65506; HLA-B*35:01; PMEL; ENSG00000185664; TAA
EADLSYTW

SEQ ID NO: 65507 - protein, 8 aa, Homo sapiens
  Table A; Target 65507; HLA-B*57:01; PMEL; ENSG00000185664; TAA
EADLSYTW

SEQ ID NO: 65508 - protein, 9 aa, Homo sapiens
  Table A; Target 65508; HLA-B*35:03; PMEL; ENSG00000185664; TAA
EAGLGQVPL

SEQ ID NO: 65509 - protein, 9 aa, Homo sapiens
  Table A; Target 65509; HLA-C*07:06; PMEL; ENSG00000185664; TAA
EAGLGQVPL

SEQ ID NO: 65510 - protein, 10 aa, Homo sapiens
  Table A; Target 65510; HLA-A*68:01; PMEL; ENSG00000185664; TAA
EATGMTPAEV

SEQ ID NO: 65511 - protein, 9 aa, Homo sapiens
  Table A; Target 65511; HLA-B*38:01; PMEL; ENSG00000185664; TAA
EGDAFELTV

SEQ ID NO: 65512 - protein, 9 aa, Homo sapiens
  Table A; Target 65512; HLA-B*51:01; PMEL; ENSG00000185664; TAA
EGDAFELTV

SEQ ID NO: 65513 - protein, 9 aa, Homo sapiens
  Table A; Target 65513; HLA-C*05:01; PMEL; ENSG00000185664; TAA
EGDAFELTV

SEQ ID NO: 65514 - protein, 8 aa, Homo sapiens
  Table A; Target 65514; HLA-B*51:01; PMEL; ENSG00000185664; TAA
EGPDASSI

SEQ ID NO: 65515 - protein, 9 aa, Homo sapiens
  Table A; Target 65515; HLA-A*26:01; PMEL; ENSG00000185664; TAA
EGPDASSIM

SEQ ID NO: 65516 - protein, 9 aa, Homo sapiens
  Table A; Target 65516; HLA-C*01:02; PMEL; ENSG00000185664; TAA
EGPDASSIM

SEQ ID NO: 65517 - protein, 9 aa, Homo sapiens
  Table A; Target 65517; HLA-A*26:01; PMEL; ENSG00000185664; TAA
EILQAVPSG

SEQ ID NO: 65518 - protein, 9 aa, Homo sapiens
  Table A; Target 65518; HLA-B*15:03; PMEL; ENSG00000185664; TAA
EKVPVSEVM

SEQ ID NO: 65519 - protein, 9 aa, Homo sapiens
  Table A; Target 65519; HLA-B*38:01; PMEL; ENSG00000185664; TAA
EKVPVSEVM

SEQ ID NO: 65520 - protein, 9 aa, Homo sapiens
  Table A; Target 65520; HLA-B*39:01; PMEL; ENSG00000185664; TAA
EKVPVSEVM

SEQ ID NO: 65521 - protein, 9 aa, Homo sapiens
  Table A; Target 65521; HLA-B*40:02; PMEL; ENSG00000185664; TAA
EKVPVSEVM

SEQ ID NO: 65522 - protein, 10 aa, Homo sapiens
  Table A; Target 65522; HLA-A*26:01; PMEL; ENSG00000185664; TAA
EMSTPEATGM

SEQ ID NO: 65523 - protein, 10 aa, Homo sapiens
  Table A; Target 65523; HLA-B*39:01; PMEL; ENSG00000185664; TAA
EMSTPEATGM

SEQ ID NO: 65524 - protein, 10 aa, Homo sapiens
  Table A; Target 65524; HLA-C*04:01; PMEL; ENSG00000185664; TAA
EMSTPEATGM

SEQ ID NO: 65525 - protein, 10 aa, Homo sapiens
  Table A; Target 65525; HLA-C*07:01; PMEL; ENSG00000185664; TAA
EMSTPEATGM

SEQ ID NO: 65526 - protein, 10 aa, Homo sapiens
  Table A; Target 65526; HLA-C*07:06; PMEL; ENSG00000185664; TAA
EMSTPEATGM

SEQ ID NO: 65527 - protein, 11 aa, Homo sapiens
  Table A; Target 65527; HLA-A*26:01; PMEL; ENSG00000185664; TAA
ENSPLLSGQQV

SEQ ID NO: 65528 - protein, 11 aa, Homo sapiens
  Table A; Target 65528; HLA-A*33:03; PMEL; ENSG00000185664; TAA
ENSPLLSGQQV

SEQ ID NO: 65529 - protein, 11 aa, Homo sapiens
  Table A; Target 65529; HLA-A*68:01; PMEL; ENSG00000185664; TAA
ENSPLLSGQQV

SEQ ID NO: 65530 - protein, 11 aa, Homo sapiens
  Table A; Target 65530; HLA-A*68:02; PMEL; ENSG00000185664; TAA
ENSPLLSGQQV

SEQ ID NO: 65531 - protein, 11 aa, Homo sapiens
  Table A; Target 65531; HLA-B*27:02; PMEL; ENSG00000185664; TAA
ENSPLLSGQQV

SEQ ID NO: 65532 - protein, 11 aa, Homo sapiens
  Table A; Target 65532; HLA-C*04:01; PMEL; ENSG00000185664; TAA
ENSPLLSGQQV

SEQ ID NO: 65533 - protein, 11 aa, Homo sapiens
  Table A; Target 65533; HLA-C*06:02; PMEL; ENSG00000185664; TAA
ENSPLLSGQQV

SEQ ID NO: 65534 - protein, 11 aa, Homo sapiens
  Table A; Target 65534; HLA-C*07:01; PMEL; ENSG00000185664; TAA
ENSPLLSGQQV

SEQ ID NO: 65535 - protein, 11 aa, Homo sapiens
  Table A; Target 65535; HLA-B*35:01; PMEL; ENSG00000185664; TAA
EPEGPDASSIM

SEQ ID NO: 65536 - protein, 11 aa, Homo sapiens
  Table A; Target 65536; HLA-B*35:03; PMEL; ENSG00000185664; TAA
EPEGPDASSIM

SEQ ID NO: 65537 - protein, 11 aa, Homo sapiens
  Table A; Target 65537; HLA-B*55:01; PMEL; ENSG00000185664; TAA
EPEGPDASSIM

SEQ ID NO: 65538 - protein, 9 aa, Homo sapiens
  Table A; Target 65538; HLA-A*25:01; PMEL; ENSG00000185664; TAA
EPGPVTAQV

SEQ ID NO: 65539 - protein, 9 aa, Homo sapiens
  Table A; Target 65539; HLA-A*26:01; PMEL; ENSG00000185664; TAA
EPGPVTAQV

SEQ ID NO: 65540 - protein, 9 aa, Homo sapiens
  Table A; Target 65540; HLA-A*33:03; PMEL; ENSG00000185664; TAA
EPGPVTAQV

SEQ ID NO: 65541 - protein, 9 aa, Homo sapiens
  Table A; Target 65541; HLA-A*68:01; PMEL; ENSG00000185664; TAA
EPGPVTAQV

SEQ ID NO: 65542 - protein, 9 aa, Homo sapiens
  Table A; Target 65542; HLA-A*68:02; PMEL; ENSG00000185664; TAA
EPGPVTAQV

SEQ ID NO: 65543 - protein, 9 aa, Homo sapiens
  Table A; Target 65543; HLA-B*07:02; PMEL; ENSG00000185664; TAA
EPGPVTAQV

SEQ ID NO: 65544 - protein, 9 aa, Homo sapiens
  Table A; Target 65544; HLA-B*35:01; PMEL; ENSG00000185664; TAA
EPGPVTAQV

SEQ ID NO: 65545 - protein, 9 aa, Homo sapiens
  Table A; Target 65545; HLA-B*35:03; PMEL; ENSG00000185664; TAA
EPGPVTAQV

SEQ ID NO: 65546 - protein, 9 aa, Homo sapiens
  Table A; Target 65546; HLA-B*51:01; PMEL; ENSG00000185664; TAA
EPGPVTAQV

SEQ ID NO: 65547 - protein, 9 aa, Homo sapiens
  Table A; Target 65547; HLA-B*54:01; PMEL; ENSG00000185664; TAA
EPGPVTAQV

SEQ ID NO: 65548 - protein, 9 aa, Homo sapiens
  Table A; Target 65548; HLA-B*56:01; PMEL; ENSG00000185664; TAA
EPGPVTAQV

SEQ ID NO: 65549 - protein, 9 aa, Homo sapiens
  Table A; Target 65549; HLA-C*06:02; PMEL; ENSG00000185664; TAA
EPGPVTAQV

SEQ ID NO: 65550 - protein, 9 aa, Homo sapiens
  Table A; Target 65550; HLA-C*07:02; PMEL; ENSG00000185664; TAA
EPGPVTAQV

SEQ ID NO: 65551 - protein, 9 aa, Homo sapiens
  Table A; Target 65551; HLA-C*07:06; PMEL; ENSG00000185664; TAA
EPGPVTAQV

SEQ ID NO: 65552 - protein, 10 aa, Homo sapiens
  Table A; Target 65552; HLA-A*68:01; PMEL; ENSG00000185664; TAA
EPGPVTAQVV

SEQ ID NO: 65553 - protein, 10 aa, Homo sapiens
  Table A; Target 65553; HLA-B*35:03; PMEL; ENSG00000185664; TAA
EPGPVTAQVV

SEQ ID NO: 65554 - protein, 10 aa, Homo sapiens
  Table A; Target 65554; HLA-B*51:01; PMEL; ENSG00000185664; TAA
EPGPVTAQVV

SEQ ID NO: 65555 - protein, 10 aa, Homo sapiens
  Table A; Target 65555; HLA-B*56:01; PMEL; ENSG00000185664; TAA
EPGPVTAQVV

SEQ ID NO: 65556 - protein, 10 aa, Homo sapiens
  Table A; Target 65556; HLA-C*07:06; PMEL; ENSG00000185664; TAA
EPGPVTAQVV

SEQ ID NO: 65557 - protein, 11 aa, Homo sapiens
  Table A; Target 65557; HLA-A*33:03; PMEL; ENSG00000185664; TAA
EPGPVTAQVVL

SEQ ID NO: 65558 - protein, 11 aa, Homo sapiens
  Table A; Target 65558; HLA-A*68:01; PMEL; ENSG00000185664; TAA
EPGPVTAQVVL

SEQ ID NO: 65559 - protein, 11 aa, Homo sapiens
  Table A; Target 65559; HLA-A*68:02; PMEL; ENSG00000185664; TAA
EPGPVTAQVVL

SEQ ID NO: 65560 - protein, 11 aa, Homo sapiens
  Table A; Target 65560; HLA-B*07:02; PMEL; ENSG00000185664; TAA
EPGPVTAQVVL

SEQ ID NO: 65561 - protein, 11 aa, Homo sapiens
  Table A; Target 65561; HLA-B*35:01; PMEL; ENSG00000185664; TAA
EPGPVTAQVVL

SEQ ID NO: 65562 - protein, 11 aa, Homo sapiens
  Table A; Target 65562; HLA-B*35:03; PMEL; ENSG00000185664; TAA
EPGPVTAQVVL

SEQ ID NO: 65563 - protein, 11 aa, Homo sapiens
  Table A; Target 65563; HLA-B*38:01; PMEL; ENSG00000185664; TAA
EPGPVTAQVVL

SEQ ID NO: 65564 - protein, 11 aa, Homo sapiens
  Table A; Target 65564; HLA-B*39:01; PMEL; ENSG00000185664; TAA
EPGPVTAQVVL

SEQ ID NO: 65565 - protein, 11 aa, Homo sapiens
  Table A; Target 65565; HLA-B*40:01; PMEL; ENSG00000185664; TAA
EPGPVTAQVVL

SEQ ID NO: 65566 - protein, 11 aa, Homo sapiens
  Table A; Target 65566; HLA-B*55:01; PMEL; ENSG00000185664; TAA
EPGPVTAQVVL

SEQ ID NO: 65567 - protein, 11 aa, Homo sapiens
  Table A; Target 65567; HLA-B*56:01; PMEL; ENSG00000185664; TAA
EPGPVTAQVVL

SEQ ID NO: 65568 - protein, 11 aa, Homo sapiens
  Table A; Target 65568; HLA-C*04:01; PMEL; ENSG00000185664; TAA
EPGPVTAQVVL

SEQ ID NO: 65569 - protein, 11 aa, Homo sapiens
  Table A; Target 65569; HLA-C*07:01; PMEL; ENSG00000185664; TAA
EPGPVTAQVVL

SEQ ID NO: 65570 - protein, 11 aa, Homo sapiens
  Table A; Target 65570; HLA-C*07:02; PMEL; ENSG00000185664; TAA
EPGPVTAQVVL

SEQ ID NO: 65571 - protein, 11 aa, Homo sapiens
  Table A; Target 65571; HLA-C*07:04; PMEL; ENSG00000185664; TAA
EPGPVTAQVVL

SEQ ID NO: 65572 - protein, 11 aa, Homo sapiens
  Table A; Target 65572; HLA-C*07:06; PMEL; ENSG00000185664; TAA
EPGPVTAQVVL

SEQ ID NO: 65573 - protein, 11 aa, Homo sapiens
  Table A; Target 65573; HLA-C*12:03; PMEL; ENSG00000185664; TAA
EPGPVTAQVVL

SEQ ID NO: 65574 - protein, 8 aa, Homo sapiens
  Table A; Target 65574; HLA-B*51:01; PMEL; ENSG00000185664; TAA
EPSGTTSV

SEQ ID NO: 65575 - protein, 8 aa, Homo sapiens
  Table A; Target 65575; HLA-B*56:01; PMEL; ENSG00000185664; TAA
EPSGTTSV

SEQ ID NO: 65576 - protein, 10 aa, Homo sapiens
  Table A; Target 65576; HLA-A*68:01; PMEL; ENSG00000185664; TAA
EPSGTTSVQV

SEQ ID NO: 65577 - protein, 10 aa, Homo sapiens
  Table A; Target 65577; HLA-C*07:06; PMEL; ENSG00000185664; TAA
EPSGTTSVQV

SEQ ID NO: 65578 - protein, 9 aa, Homo sapiens
  Table A; Target 65578; HLA-A*25:01; PMEL; ENSG00000185664; TAA
ESAEILQAV

SEQ ID NO: 65579 - protein, 9 aa, Homo sapiens
  Table A; Target 65579; HLA-A*26:01; PMEL; ENSG00000185664; TAA
ESAEILQAV

SEQ ID NO: 65580 - protein, 9 aa, Homo sapiens
  Table A; Target 65580; HLA-A*33:03; PMEL; ENSG00000185664; TAA
ESAEILQAV

SEQ ID NO: 65581 - protein, 9 aa, Homo sapiens
  Table A; Target 65581; HLA-A*68:01; PMEL; ENSG00000185664; TAA
ESAEILQAV

SEQ ID NO: 65582 - protein, 9 aa, Homo sapiens
  Table A; Target 65582; HLA-A*68:02; PMEL; ENSG00000185664; TAA
ESAEILQAV

SEQ ID NO: 65583 - protein, 9 aa, Homo sapiens
  Table A; Target 65583; HLA-B*13:02; PMEL; ENSG00000185664; TAA
ESAEILQAV

SEQ ID NO: 65584 - protein, 9 aa, Homo sapiens
  Table A; Target 65584; HLA-B*51:01; PMEL; ENSG00000185664; TAA
ESAEILQAV

SEQ ID NO: 65585 - protein, 9 aa, Homo sapiens
  Table A; Target 65585; HLA-C*07:06; PMEL; ENSG00000185664; TAA
ESAEILQAV

SEQ ID NO: 65586 - protein, 10 aa, Homo sapiens
  Table A; Target 65586; HLA-A*68:01; PMEL; ENSG00000185664; TAA
ESAEILQAVP

SEQ ID NO: 65587 - protein, 9 aa, Homo sapiens
  Table A; Target 65587; HLA-A*26:01; PMEL; ENSG00000185664; TAA
ESITGSLGP

SEQ ID NO: 65588 - protein, 10 aa, Homo sapiens
  Table A; Target 65588; HLA-A*25:01; PMEL; ENSG00000185664; TAA
ESITGSLGPL

SEQ ID NO: 65589 - protein, 10 aa, Homo sapiens
  Table A; Target 65589; HLA-A*26:01; PMEL; ENSG00000185664; TAA
ESITGSLGPL

SEQ ID NO: 65590 - protein, 10 aa, Homo sapiens
  Table A; Target 65590; HLA-A*68:01; PMEL; ENSG00000185664; TAA
ESITGSLGPL

SEQ ID NO: 65591 - protein, 10 aa, Homo sapiens
  Table A; Target 65591; HLA-B*40:02; PMEL; ENSG00000185664; TAA
ESITGSLGPL

SEQ ID NO: 65592 - protein, 10 aa, Homo sapiens
  Table A; Target 65592; HLA-C*07:02; PMEL; ENSG00000185664; TAA
ESITGSLGPL

SEQ ID NO: 65593 - protein, 11 aa, Homo sapiens
  Table A; Target 65593; HLA-A*23:01; PMEL; ENSG00000185664; TAA
ESITGSLGPLL

SEQ ID NO: 65594 - protein, 11 aa, Homo sapiens
  Table A; Target 65594; HLA-A*26:01; PMEL; ENSG00000185664; TAA
ESITGSLGPLL

SEQ ID NO: 65595 - protein, 11 aa, Homo sapiens
  Table A; Target 65595; HLA-A*33:03; PMEL; ENSG00000185664; TAA
ESITGSLGPLL

SEQ ID NO: 65596 - protein, 11 aa, Homo sapiens
  Table A; Target 65596; HLA-A*68:01; PMEL; ENSG00000185664; TAA
ESITGSLGPLL

SEQ ID NO: 65597 - protein, 11 aa, Homo sapiens
  Table A; Target 65597; HLA-A*68:02; PMEL; ENSG00000185664; TAA
ESITGSLGPLL

SEQ ID NO: 65598 - protein, 9 aa, Homo sapiens
  Table A; Target 65598; HLA-A*11:01; PMEL; ENSG00000185664; TAA
ESTGMTPEK

SEQ ID NO: 65599 - protein, 9 aa, Homo sapiens
  Table A; Target 65599; HLA-A*26:01; PMEL; ENSG00000185664; TAA
ESTGMTPEK

SEQ ID NO: 65600 - protein, 9 aa, Homo sapiens
  Table A; Target 65600; HLA-A*33:01; PMEL; ENSG00000185664; TAA
ESTGMTPEK

SEQ ID NO: 65601 - protein, 9 aa, Homo sapiens
  Table A; Target 65601; HLA-A*33:03; PMEL; ENSG00000185664; TAA
ESTGMTPEK

SEQ ID NO: 65602 - protein, 9 aa, Homo sapiens
  Table A; Target 65602; HLA-A*68:01; PMEL; ENSG00000185664; TAA
ESTGMTPEK

SEQ ID NO: 65603 - protein, 9 aa, Homo sapiens
  Table A; Target 65603; HLA-B*07:02; PMEL; ENSG00000185664; TAA
ESTGMTPEK

SEQ ID NO: 65604 - protein, 9 aa, Homo sapiens
  Table A; Target 65604; HLA-B*27:02; PMEL; ENSG00000185664; TAA
ESTGMTPEK

SEQ ID NO: 65605 - protein, 9 aa, Homo sapiens
  Table A; Target 65605; HLA-C*07:06; PMEL; ENSG00000185664; TAA
ESTGMTPEK

SEQ ID NO: 65606 - protein, 8 aa, Homo sapiens
  Table A; Target 65606; HLA-C*05:01; PMEL; ENSG00000185664; TAA
ETDDACIF

SEQ ID NO: 65607 - protein, 8 aa, Homo sapiens
  Table A; Target 65607; HLA-A*26:01; PMEL; ENSG00000185664; TAA
EVISTAPV

SEQ ID NO: 65608 - protein, 9 aa, Homo sapiens
  Table A; Target 65608; HLA-A*25:01; PMEL; ENSG00000185664; TAA
EVISTAPVQ

SEQ ID NO: 65609 - protein, 9 aa, Homo sapiens
  Table A; Target 65609; HLA-A*26:01; PMEL; ENSG00000185664; TAA
EVISTAPVQ

SEQ ID NO: 65610 - protein, 9 aa, Homo sapiens
  Table A; Target 65610; HLA-A*33:03; PMEL; ENSG00000185664; TAA
EVISTAPVQ

SEQ ID NO: 65611 - protein, 9 aa, Homo sapiens
  Table A; Target 65611; HLA-A*68:01; PMEL; ENSG00000185664; TAA
EVISTAPVQ

SEQ ID NO: 65612 - protein, 9 aa, Homo sapiens
  Table A; Target 65612; HLA-C*03:03; PMEL; ENSG00000185664; TAA
EVISTAPVQ

SEQ ID NO: 65613 - protein, 10 aa, Homo sapiens
  Table A; Target 65613; HLA-A*25:01; PMEL; ENSG00000185664; TAA
EVISTAPVQM

SEQ ID NO: 65614 - protein, 10 aa, Homo sapiens
  Table A; Target 65614; HLA-A*26:01; PMEL; ENSG00000185664; TAA
EVISTAPVQM

SEQ ID NO: 65615 - protein, 10 aa, Homo sapiens
  Table A; Target 65615; HLA-A*33:01; PMEL; ENSG00000185664; TAA
EVISTAPVQM

SEQ ID NO: 65616 - protein, 10 aa, Homo sapiens
  Table A; Target 65616; HLA-A*33:03; PMEL; ENSG00000185664; TAA
EVISTAPVQM

SEQ ID NO: 65617 - protein, 10 aa, Homo sapiens
  Table A; Target 65617; HLA-A*68:01; PMEL; ENSG00000185664; TAA
EVISTAPVQM

SEQ ID NO: 65618 - protein, 10 aa, Homo sapiens
  Table A; Target 65618; HLA-A*68:02; PMEL; ENSG00000185664; TAA
EVISTAPVQM

SEQ ID NO: 65619 - protein, 10 aa, Homo sapiens
  Table A; Target 65619; HLA-B*35:01; PMEL; ENSG00000185664; TAA
EVISTAPVQM

SEQ ID NO: 65620 - protein, 10 aa, Homo sapiens
  Table A; Target 65620; HLA-C*07:06; PMEL; ENSG00000185664; TAA
EVISTAPVQM

SEQ ID NO: 65621 - protein, 9 aa, Homo sapiens
  Table A; Target 65621; HLA-A*25:01; PMEL; ENSG00000185664; TAA
EVMGTTLAE

SEQ ID NO: 65622 - protein, 9 aa, Homo sapiens
  Table A; Target 65622; HLA-A*26:01; PMEL; ENSG00000185664; TAA
EVMGTTLAE

SEQ ID NO: 65623 - protein, 10 aa, Homo sapiens
  Table A; Target 65623; HLA-A*25:01; PMEL; ENSG00000185664; TAA
EVMGTTLAEM

SEQ ID NO: 65624 - protein, 10 aa, Homo sapiens
  Table A; Target 65624; HLA-A*26:01; PMEL; ENSG00000185664; TAA
EVMGTTLAEM

SEQ ID NO: 65625 - protein, 10 aa, Homo sapiens
  Table A; Target 65625; HLA-A*33:01; PMEL; ENSG00000185664; TAA
EVMGTTLAEM

SEQ ID NO: 65626 - protein, 10 aa, Homo sapiens
  Table A; Target 65626; HLA-A*33:03; PMEL; ENSG00000185664; TAA
EVMGTTLAEM

SEQ ID NO: 65627 - protein, 10 aa, Homo sapiens
  Table A; Target 65627; HLA-A*68:01; PMEL; ENSG00000185664; TAA
EVMGTTLAEM

SEQ ID NO: 65628 - protein, 10 aa, Homo sapiens
  Table A; Target 65628; HLA-A*68:02; PMEL; ENSG00000185664; TAA
EVMGTTLAEM

SEQ ID NO: 65629 - protein, 10 aa, Homo sapiens
  Table A; Target 65629; HLA-B*35:01; PMEL; ENSG00000185664; TAA
EVMGTTLAEM

SEQ ID NO: 65630 - protein, 10 aa, Homo sapiens
  Table A; Target 65630; HLA-B*35:03; PMEL; ENSG00000185664; TAA
EVMGTTLAEM

SEQ ID NO: 65631 - protein, 10 aa, Homo sapiens
  Table A; Target 65631; HLA-B*46:01; PMEL; ENSG00000185664; TAA
EVMGTTLAEM

SEQ ID NO: 65632 - protein, 10 aa, Homo sapiens
  Table A; Target 65632; HLA-C*07:06; PMEL; ENSG00000185664; TAA
EVMGTTLAEM

SEQ ID NO: 65633 - protein, 9 aa, Homo sapiens
  Table A; Target 65633; HLA-A*26:01; PMEL; ENSG00000185664; TAA
EVSIVVLSG

SEQ ID NO: 65634 - protein, 9 aa, Homo sapiens
  Table A; Target 65634; HLA-A*33:03; PMEL; ENSG00000185664; TAA
EVSIVVLSG

SEQ ID NO: 65635 - protein, 9 aa, Homo sapiens
  Table A; Target 65635; HLA-A*68:01; PMEL; ENSG00000185664; TAA
EVSIVVLSG

SEQ ID NO: 65636 - protein, 9 aa, Homo sapiens
  Table A; Target 65636; HLA-A*68:02; PMEL; ENSG00000185664; TAA
EVSIVVLSG

SEQ ID NO: 65637 - protein, 10 aa, Homo sapiens
  Table A; Target 65637; HLA-A*68:01; PMEL; ENSG00000185664; TAA
EVSIVVLSGT

SEQ ID NO: 65638 - protein, 10 aa, Homo sapiens
  Table A; Target 65638; HLA-A*68:02; PMEL; ENSG00000185664; TAA
EVSIVVLSGT

SEQ ID NO: 65639 - protein, 10 aa, Homo sapiens
  Table A; Target 65639; HLA-C*06:02; PMEL; ENSG00000185664; TAA
EVSIVVLSGT

SEQ ID NO: 65640 - protein, 10 aa, Homo sapiens
  Table A; Target 65640; HLA-C*07:01; PMEL; ENSG00000185664; TAA
EVSIVVLSGT

SEQ ID NO: 65641 - protein, 8 aa, Homo sapiens
  Table A; Target 65641; HLA-A*33:01; PMEL; ENSG00000185664; TAA
EVTVYHRR

SEQ ID NO: 65642 - protein, 8 aa, Homo sapiens
  Table A; Target 65642; HLA-A*33:03; PMEL; ENSG00000185664; TAA
EVTVYHRR

SEQ ID NO: 65643 - protein, 9 aa, Homo sapiens
  Table A; Target 65643; HLA-A*25:01; PMEL; ENSG00000185664; TAA
EVVGTTPGQ

SEQ ID NO: 65644 - protein, 9 aa, Homo sapiens
  Table A; Target 65644; HLA-A*26:01; PMEL; ENSG00000185664; TAA
EVVGTTPGQ

SEQ ID NO: 65645 - protein, 9 aa, Homo sapiens
  Table A; Target 65645; HLA-A*68:01; PMEL; ENSG00000185664; TAA
EVVGTTPGQ

SEQ ID NO: 65646 - protein, 10 aa, Homo sapiens
  Table A; Target 65646; HLA-A*26:01; PMEL; ENSG00000185664; TAA
EVVGTTPGQA

SEQ ID NO: 65647 - protein, 10 aa, Homo sapiens
  Table A; Target 65647; HLA-A*68:01; PMEL; ENSG00000185664; TAA
EVVGTTPGQA

SEQ ID NO: 65648 - protein, 11 aa, Homo sapiens
  Table A; Target 65648; HLA-A*26:01; PMEL; ENSG00000185664; TAA
EVVGTTPGQAP

SEQ ID NO: 65649 - protein, 11 aa, Homo sapiens
  Table A; Target 65649; HLA-A*68:01; PMEL; ENSG00000185664; TAA
EVVGTTPGQAP

SEQ ID NO: 65650 - protein, 11 aa, Homo sapiens
  Table A; Target 65650; HLA-C*07:01; PMEL; ENSG00000185664; TAA
EVVGTTPGQAP

SEQ ID NO: 65651 - protein, 11 aa, Homo sapiens
  Table A; Target 65651; HLA-A*30:02; PMEL; ENSG00000185664; TAA
FALQLHDPSGY

SEQ ID NO: 65652 - protein, 8 aa, Homo sapiens
  Table A; Target 65652; HLA-B*18:01; PMEL; ENSG00000185664; TAA
FELTVSCQ

SEQ ID NO: 65653 - protein, 8 aa, Homo sapiens
  Table A; Target 65653; HLA-B*40:02; PMEL; ENSG00000185664; TAA
FELTVSCQ

SEQ ID NO: 65654 - protein, 8 aa, Homo sapiens
  Table A; Target 65654; HLA-C*04:01; PMEL; ENSG00000185664; TAA
FELTVSCQ

SEQ ID NO: 65655 - protein, 8 aa, Homo sapiens
  Table A; Target 65655; HLA-C*07:01; PMEL; ENSG00000185664; TAA
FELTVSCQ

SEQ ID NO: 65656 - protein, 8 aa, Homo sapiens
  Table A; Target 65656; HLA-C*07:04; PMEL; ENSG00000185664; TAA
FELTVSCQ

SEQ ID NO: 65657 - protein, 8 aa, Homo sapiens
  Table A; Target 65657; HLA-C*12:03; PMEL; ENSG00000185664; TAA
FELTVSCQ

SEQ ID NO: 65658 - protein, 9 aa, Homo sapiens
  Table A; Target 65658; HLA-B*40:02; PMEL; ENSG00000185664; TAA
FELTVSCQG

SEQ ID NO: 65659 - protein, 8 aa, Homo sapiens
  Table A; Target 65659; HLA-B*35:03; PMEL; ENSG00000185664; TAA
FGDSSGTL

SEQ ID NO: 65660 - protein, 8 aa, Homo sapiens
  Table A; Target 65660; HLA-B*39:01; PMEL; ENSG00000185664; TAA
FGDSSGTL

SEQ ID NO: 65661 - protein, 8 aa, Homo sapiens
  Table A; Target 65661; HLA-C*03:03; PMEL; ENSG00000185664; TAA
FGDSSGTL

SEQ ID NO: 65662 - protein, 8 aa, Homo sapiens
  Table A; Target 65662; HLA-C*03:04; PMEL; ENSG00000185664; TAA
FGDSSGTL

SEQ ID NO: 65663 - protein, 8 aa, Homo sapiens
  Table A; Target 65663; HLA-C*04:01; PMEL; ENSG00000185664; TAA
FGDSSGTL

SEQ ID NO: 65664 - protein, 8 aa, Homo sapiens
  Table A; Target 65664; HLA-C*05:01; PMEL; ENSG00000185664; TAA
FGDSSGTL

SEQ ID NO: 65665 - protein, 8 aa, Homo sapiens
  Table A; Target 65665; HLA-C*07:04; PMEL; ENSG00000185664; TAA
FGDSSGTL

SEQ ID NO: 65666 - protein, 9 aa, Homo sapiens
  Table A; Target 65666; HLA-A*01:01; PMEL; ENSG00000185664; TAA
FGDSSGTLI

SEQ ID NO: 65667 - protein, 9 aa, Homo sapiens
  Table A; Target 65667; HLA-A*02:01; PMEL; ENSG00000185664; TAA
FGDSSGTLI

SEQ ID NO: 65668 - protein, 9 aa, Homo sapiens
  Table A; Target 65668; HLA-A*02:07; PMEL; ENSG00000185664; TAA
FGDSSGTLI

SEQ ID NO: 65669 - protein, 9 aa, Homo sapiens
  Table A; Target 65669; HLA-A*23:01; PMEL; ENSG00000185664; TAA
FGDSSGTLI

SEQ ID NO: 65670 - protein, 9 aa, Homo sapiens
  Table A; Target 65670; HLA-B*13:02; PMEL; ENSG00000185664; TAA
FGDSSGTLI

SEQ ID NO: 65671 - protein, 9 aa, Homo sapiens
  Table A; Target 65671; HLA-B*27:05; PMEL; ENSG00000185664; TAA
FGDSSGTLI

SEQ ID NO: 65672 - protein, 9 aa, Homo sapiens
  Table A; Target 65672; HLA-B*35:01; PMEL; ENSG00000185664; TAA
FGDSSGTLI

SEQ ID NO: 65673 - protein, 9 aa, Homo sapiens
  Table A; Target 65673; HLA-B*35:03; PMEL; ENSG00000185664; TAA
FGDSSGTLI

SEQ ID NO: 65674 - protein, 9 aa, Homo sapiens
  Table A; Target 65674; HLA-B*38:01; PMEL; ENSG00000185664; TAA
FGDSSGTLI

SEQ ID NO: 65675 - protein, 9 aa, Homo sapiens
  Table A; Target 65675; HLA-B*39:01; PMEL; ENSG00000185664; TAA
FGDSSGTLI

SEQ ID NO: 65676 - protein, 9 aa, Homo sapiens
  Table A; Target 65676; HLA-B*40:01; PMEL; ENSG00000185664; TAA
FGDSSGTLI

SEQ ID NO: 65677 - protein, 9 aa, Homo sapiens
  Table A; Target 65677; HLA-B*49:01; PMEL; ENSG00000185664; TAA
FGDSSGTLI

SEQ ID NO: 65678 - protein, 9 aa, Homo sapiens
  Table A; Target 65678; HLA-B*51:01; PMEL; ENSG00000185664; TAA
FGDSSGTLI

SEQ ID NO: 65679 - protein, 9 aa, Homo sapiens
  Table A; Target 65679; HLA-B*55:01; PMEL; ENSG00000185664; TAA
FGDSSGTLI

SEQ ID NO: 65680 - protein, 9 aa, Homo sapiens
  Table A; Target 65680; HLA-C*02:02; PMEL; ENSG00000185664; TAA
FGDSSGTLI

SEQ ID NO: 65681 - protein, 9 aa, Homo sapiens
  Table A; Target 65681; HLA-C*03:03; PMEL; ENSG00000185664; TAA
FGDSSGTLI

SEQ ID NO: 65682 - protein, 9 aa, Homo sapiens
  Table A; Target 65682; HLA-C*03:04; PMEL; ENSG00000185664; TAA
FGDSSGTLI

SEQ ID NO: 65683 - protein, 9 aa, Homo sapiens
  Table A; Target 65683; HLA-C*04:01; PMEL; ENSG00000185664; TAA
FGDSSGTLI

SEQ ID NO: 65684 - protein, 9 aa, Homo sapiens
  Table A; Target 65684; HLA-C*05:01; PMEL; ENSG00000185664; TAA
FGDSSGTLI

SEQ ID NO: 65685 - protein, 9 aa, Homo sapiens
  Table A; Target 65685; HLA-C*07:01; PMEL; ENSG00000185664; TAA
FGDSSGTLI

SEQ ID NO: 65686 - protein, 9 aa, Homo sapiens
  Table A; Target 65686; HLA-C*07:04; PMEL; ENSG00000185664; TAA
FGDSSGTLI

SEQ ID NO: 65687 - protein, 11 aa, Homo sapiens
  Table A; Target 65687; HLA-A*11:01; PMEL; ENSG00000185664; TAA
FGDSSGTLISR

SEQ ID NO: 65688 - protein, 11 aa, Homo sapiens
  Table A; Target 65688; HLA-A*31:01; PMEL; ENSG00000185664; TAA
FGDSSGTLISR

SEQ ID NO: 65689 - protein, 11 aa, Homo sapiens
  Table A; Target 65689; HLA-A*33:01; PMEL; ENSG00000185664; TAA
FGDSSGTLISR

SEQ ID NO: 65690 - protein, 11 aa, Homo sapiens
  Table A; Target 65690; HLA-A*33:03; PMEL; ENSG00000185664; TAA
FGDSSGTLISR

SEQ ID NO: 65691 - protein, 11 aa, Homo sapiens
  Table A; Target 65691; HLA-A*68:01; PMEL; ENSG00000185664; TAA
FGDSSGTLISR

SEQ ID NO: 65692 - protein, 11 aa, Homo sapiens
  Table A; Target 65692; HLA-A*68:02; PMEL; ENSG00000185664; TAA
FGDSSGTLISR

SEQ ID NO: 65693 - protein, 11 aa, Homo sapiens
  Table A; Target 65693; HLA-B*27:02; PMEL; ENSG00000185664; TAA
FGDSSGTLISR

SEQ ID NO: 65694 - protein, 11 aa, Homo sapiens
  Table A; Target 65694; HLA-B*27:05; PMEL; ENSG00000185664; TAA
FGDSSGTLISR

SEQ ID NO: 65695 - protein, 11 aa, Homo sapiens
  Table A; Target 65695; HLA-B*35:01; PMEL; ENSG00000185664; TAA
FGDSSGTLISR

SEQ ID NO: 65696 - protein, 11 aa, Homo sapiens
  Table A; Target 65696; HLA-B*35:03; PMEL; ENSG00000185664; TAA
FGDSSGTLISR

SEQ ID NO: 65697 - protein, 11 aa, Homo sapiens
  Table A; Target 65697; HLA-B*54:01; PMEL; ENSG00000185664; TAA
FGDSSGTLISR

SEQ ID NO: 65698 - protein, 11 aa, Homo sapiens
  Table A; Target 65698; HLA-C*03:03; PMEL; ENSG00000185664; TAA
FGDSSGTLISR

SEQ ID NO: 65699 - protein, 11 aa, Homo sapiens
  Table A; Target 65699; HLA-C*03:04; PMEL; ENSG00000185664; TAA
FGDSSGTLISR

SEQ ID NO: 65700 - protein, 11 aa, Homo sapiens
  Table A; Target 65700; HLA-C*04:01; PMEL; ENSG00000185664; TAA
FGDSSGTLISR

SEQ ID NO: 65701 - protein, 11 aa, Homo sapiens
  Table A; Target 65701; HLA-C*05:01; PMEL; ENSG00000185664; TAA
FGDSSGTLISR

SEQ ID NO: 65702 - protein, 11 aa, Homo sapiens
  Table A; Target 65702; HLA-C*07:06; PMEL; ENSG00000185664; TAA
FGDSSGTLISR

SEQ ID NO: 65703 - protein, 9 aa, Homo sapiens
  Table A; Target 65703; HLA-A*02:01; PMEL; ENSG00000185664; TAA
FLRNQPLTF

SEQ ID NO: 65704 - protein, 9 aa, Homo sapiens
  Table A; Target 65704; HLA-A*02:03; PMEL; ENSG00000185664; TAA
FLRNQPLTF

SEQ ID NO: 65705 - protein, 9 aa, Homo sapiens
  Table A; Target 65705; HLA-A*02:04; PMEL; ENSG00000185664; TAA
FLRNQPLTF

SEQ ID NO: 65706 - protein, 9 aa, Homo sapiens
  Table A; Target 65706; HLA-A*02:07; PMEL; ENSG00000185664; TAA
FLRNQPLTF

SEQ ID NO: 65707 - protein, 9 aa, Homo sapiens
  Table A; Target 65707; HLA-A*03:01; PMEL; ENSG00000185664; TAA
FLRNQPLTF

SEQ ID NO: 65708 - protein, 9 aa, Homo sapiens
  Table A; Target 65708; HLA-A*23:01; PMEL; ENSG00000185664; TAA
FLRNQPLTF

SEQ ID NO: 65709 - protein, 9 aa, Homo sapiens
  Table A; Target 65709; HLA-A*24:02; PMEL; ENSG00000185664; TAA
FLRNQPLTF

SEQ ID NO: 65710 - protein, 9 aa, Homo sapiens
  Table A; Target 65710; HLA-A*25:01; PMEL; ENSG00000185664; TAA
FLRNQPLTF

SEQ ID NO: 65711 - protein, 9 aa, Homo sapiens
  Table A; Target 65711; HLA-A*29:02; PMEL; ENSG00000185664; TAA
FLRNQPLTF

SEQ ID NO: 65712 - protein, 9 aa, Homo sapiens
  Table A; Target 65712; HLA-A*30:01; PMEL; ENSG00000185664; TAA
FLRNQPLTF

SEQ ID NO: 65713 - protein, 9 aa, Homo sapiens
  Table A; Target 65713; HLA-A*31:01; PMEL; ENSG00000185664; TAA
FLRNQPLTF

SEQ ID NO: 65714 - protein, 9 aa, Homo sapiens
  Table A; Target 65714; HLA-A*32:01; PMEL; ENSG00000185664; TAA
FLRNQPLTF

SEQ ID NO: 65715 - protein, 9 aa, Homo sapiens
  Table A; Target 65715; HLA-A*33:01; PMEL; ENSG00000185664; TAA
FLRNQPLTF

SEQ ID NO: 65716 - protein, 9 aa, Homo sapiens
  Table A; Target 65716; HLA-B*07:02; PMEL; ENSG00000185664; TAA
FLRNQPLTF

SEQ ID NO: 65717 - protein, 9 aa, Homo sapiens
  Table A; Target 65717; HLA-B*08:01; PMEL; ENSG00000185664; TAA
FLRNQPLTF

SEQ ID NO: 65718 - protein, 9 aa, Homo sapiens
  Table A; Target 65718; HLA-B*13:02; PMEL; ENSG00000185664; TAA
FLRNQPLTF

SEQ ID NO: 65719 - protein, 9 aa, Homo sapiens
  Table A; Target 65719; HLA-B*15:01; PMEL; ENSG00000185664; TAA
FLRNQPLTF

SEQ ID NO: 65720 - protein, 9 aa, Homo sapiens
  Table A; Target 65720; HLA-B*15:03; PMEL; ENSG00000185664; TAA
FLRNQPLTF

SEQ ID NO: 65721 - protein, 9 aa, Homo sapiens
  Table A; Target 65721; HLA-B*40:02; PMEL; ENSG00000185664; TAA
FLRNQPLTF

SEQ ID NO: 65722 - protein, 9 aa, Homo sapiens
  Table A; Target 65722; HLA-B*46:01; PMEL; ENSG00000185664; TAA
FLRNQPLTF

SEQ ID NO: 65723 - protein, 9 aa, Homo sapiens
  Table A; Target 65723; HLA-B*54:01; PMEL; ENSG00000185664; TAA
FLRNQPLTF

SEQ ID NO: 65724 - protein, 9 aa, Homo sapiens
  Table A; Target 65724; HLA-B*57:01; PMEL; ENSG00000185664; TAA
FLRNQPLTF

SEQ ID NO: 65725 - protein, 9 aa, Homo sapiens
  Table A; Target 65725; HLA-B*58:01; PMEL; ENSG00000185664; TAA
FLRNQPLTF

SEQ ID NO: 65726 - protein, 9 aa, Homo sapiens
  Table A; Target 65726; HLA-C*01:02; PMEL; ENSG00000185664; TAA
FLRNQPLTF

SEQ ID NO: 65727 - protein, 9 aa, Homo sapiens
  Table A; Target 65727; HLA-C*02:02; PMEL; ENSG00000185664; TAA
FLRNQPLTF

SEQ ID NO: 65728 - protein, 9 aa, Homo sapiens
  Table A; Target 65728; HLA-C*06:02; PMEL; ENSG00000185664; TAA
FLRNQPLTF

SEQ ID NO: 65729 - protein, 9 aa, Homo sapiens
  Table A; Target 65729; HLA-C*07:02; PMEL; ENSG00000185664; TAA
FLRNQPLTF

SEQ ID NO: 65730 - protein, 9 aa, Homo sapiens
  Table A; Target 65730; HLA-C*07:04; PMEL; ENSG00000185664; TAA
FLRNQPLTF

SEQ ID NO: 65731 - protein, 9 aa, Homo sapiens
  Table A; Target 65731; HLA-C*12:03; PMEL; ENSG00000185664; TAA
FLRNQPLTF

SEQ ID NO: 65732 - protein, 9 aa, Homo sapiens
  Table A; Target 65732; HLA-C*14:02; PMEL; ENSG00000185664; TAA
FLRNQPLTF

SEQ ID NO: 65733 - protein, 9 aa, Homo sapiens
  Table A; Target 65733; HLA-C*16:01; PMEL; ENSG00000185664; TAA
FLRNQPLTF

SEQ ID NO: 65734 - protein, 9 aa, Homo sapiens
  Table A; Target 65734; HLA-C*16:02; PMEL; ENSG00000185664; TAA
FLRNQPLTF

SEQ ID NO: 65735 - protein, 9 aa, Homo sapiens
  Table A; Target 65735; HLA-C*16:04; PMEL; ENSG00000185664; TAA
FLRNQPLTF

SEQ ID NO: 65736 - protein, 10 aa, Homo sapiens
  Table A; Target 65736; HLA-A*02:03; PMEL; ENSG00000185664; TAA
FLRNQPLTFA

SEQ ID NO: 65737 - protein, 11 aa, Homo sapiens
  Table A; Target 65737; HLA-A*02:01; PMEL; ENSG00000185664; TAA
FLRNQPLTFAL

SEQ ID NO: 65738 - protein, 11 aa, Homo sapiens
  Table A; Target 65738; HLA-A*02:03; PMEL; ENSG00000185664; TAA
FLRNQPLTFAL

SEQ ID NO: 65739 - protein, 11 aa, Homo sapiens
  Table A; Target 65739; HLA-A*02:04; PMEL; ENSG00000185664; TAA
FLRNQPLTFAL

SEQ ID NO: 65740 - protein, 8 aa, Homo sapiens
  Table A; Target 65740; HLA-B*54:01; PMEL; ENSG00000185664; TAA
FPDGGPCP

SEQ ID NO: 65741 - protein, 8 aa, Homo sapiens
  Table A; Target 65741; HLA-B*55:01; PMEL; ENSG00000185664; TAA
FPDGGPCP

SEQ ID NO: 65742 - protein, 9 aa, Homo sapiens
  Table A; Target 65742; HLA-B*55:01; PMEL; ENSG00000185664; TAA
FPDGGPCPS

SEQ ID NO: 65743 - protein, 9 aa, Homo sapiens
  Table A; Target 65743; HLA-C*04:01; PMEL; ENSG00000185664; TAA
FPDGGPCPS

SEQ ID NO: 65744 - protein, 10 aa, Homo sapiens
  Table A; Target 65744; HLA-B*27:05; PMEL; ENSG00000185664; TAA
FPDGGPCPSG

SEQ ID NO: 65745 - protein, 10 aa, Homo sapiens
  Table A; Target 65745; HLA-B*54:01; PMEL; ENSG00000185664; TAA
FPDGGPCPSG

SEQ ID NO: 65746 - protein, 10 aa, Homo sapiens
  Table A; Target 65746; HLA-B*55:01; PMEL; ENSG00000185664; TAA
FPDGGPCPSG

SEQ ID NO: 65747 - protein, 8 aa, Homo sapiens
  Table A; Target 65747; HLA-B*07:02; PMEL; ENSG00000185664; TAA
FPGSQKVL

SEQ ID NO: 65748 - protein, 8 aa, Homo sapiens
  Table A; Target 65748; HLA-B*08:01; PMEL; ENSG00000185664; TAA
FPGSQKVL

SEQ ID NO: 65749 - protein, 8 aa, Homo sapiens
  Table A; Target 65749; HLA-B*35:01; PMEL; ENSG00000185664; TAA
FPGSQKVL

SEQ ID NO: 65750 - protein, 8 aa, Homo sapiens
  Table A; Target 65750; HLA-B*35:03; PMEL; ENSG00000185664; TAA
FPGSQKVL

SEQ ID NO: 65751 - protein, 8 aa, Homo sapiens
  Table A; Target 65751; HLA-B*51:01; PMEL; ENSG00000185664; TAA
FPGSQKVL

SEQ ID NO: 65752 - protein, 8 aa, Homo sapiens
  Table A; Target 65752; HLA-B*55:01; PMEL; ENSG00000185664; TAA
FPGSQKVL

SEQ ID NO: 65753 - protein, 8 aa, Homo sapiens
  Table A; Target 65753; HLA-C*07:01; PMEL; ENSG00000185664; TAA
FPGSQKVL

SEQ ID NO: 65754 - protein, 8 aa, Homo sapiens
  Table A; Target 65754; HLA-C*07:02; PMEL; ENSG00000185664; TAA
FPGSQKVL

SEQ ID NO: 65755 - protein, 9 aa, Homo sapiens
  Table A; Target 65755; HLA-B*54:01; PMEL; ENSG00000185664; TAA
FPGSQKVLP

SEQ ID NO: 65756 - protein, 8 aa, Homo sapiens
  Table A; Target 65756; HLA-A*30:01; PMEL; ENSG00000185664; TAA
FSVSVSQL

SEQ ID NO: 65757 - protein, 8 aa, Homo sapiens
  Table A; Target 65757; HLA-B*40:02; PMEL; ENSG00000185664; TAA
FSVSVSQL

SEQ ID NO: 65758 - protein, 8 aa, Homo sapiens
  Table A; Target 65758; HLA-B*46:01; PMEL; ENSG00000185664; TAA
FSVSVSQL

SEQ ID NO: 65759 - protein, 8 aa, Homo sapiens
  Table A; Target 65759; HLA-C*01:02; PMEL; ENSG00000185664; TAA
FSVSVSQL

SEQ ID NO: 65760 - protein, 8 aa, Homo sapiens
  Table A; Target 65760; HLA-C*02:02; PMEL; ENSG00000185664; TAA
FSVSVSQL

SEQ ID NO: 65761 - protein, 8 aa, Homo sapiens
  Table A; Target 65761; HLA-C*03:03; PMEL; ENSG00000185664; TAA
FSVSVSQL

SEQ ID NO: 65762 - protein, 8 aa, Homo sapiens
  Table A; Target 65762; HLA-C*03:04; PMEL; ENSG00000185664; TAA
FSVSVSQL

SEQ ID NO: 65763 - protein, 8 aa, Homo sapiens
  Table A; Target 65763; HLA-C*05:01; PMEL; ENSG00000185664; TAA
FSVSVSQL

SEQ ID NO: 65764 - protein, 8 aa, Homo sapiens
  Table A; Target 65764; HLA-C*07:04; PMEL; ENSG00000185664; TAA
FSVSVSQL

SEQ ID NO: 65765 - protein, 8 aa, Homo sapiens
  Table A; Target 65765; HLA-C*12:03; PMEL; ENSG00000185664; TAA
FSVSVSQL

SEQ ID NO: 65766 - protein, 8 aa, Homo sapiens
  Table A; Target 65766; HLA-C*14:02; PMEL; ENSG00000185664; TAA
FSVSVSQL

SEQ ID NO: 65767 - protein, 8 aa, Homo sapiens
  Table A; Target 65767; HLA-C*16:02; PMEL; ENSG00000185664; TAA
FSVSVSQL

SEQ ID NO: 65768 - protein, 9 aa, Homo sapiens
  Table A; Target 65768; HLA-A*31:01; PMEL; ENSG00000185664; TAA
FSVSVSQLR

SEQ ID NO: 65769 - protein, 9 aa, Homo sapiens
  Table A; Target 65769; HLA-A*33:01; PMEL; ENSG00000185664; TAA
FSVSVSQLR

SEQ ID NO: 65770 - protein, 9 aa, Homo sapiens
  Table A; Target 65770; HLA-A*33:03; PMEL; ENSG00000185664; TAA
FSVSVSQLR

SEQ ID NO: 65771 - protein, 9 aa, Homo sapiens
  Table A; Target 65771; HLA-A*68:01; PMEL; ENSG00000185664; TAA
FSVSVSQLR

SEQ ID NO: 65772 - protein, 9 aa, Homo sapiens
  Table A; Target 65772; HLA-A*68:02; PMEL; ENSG00000185664; TAA
FSVSVSQLR

SEQ ID NO: 65773 - protein, 9 aa, Homo sapiens
  Table A; Target 65773; HLA-B*57:01; PMEL; ENSG00000185664; TAA
FSVSVSQLR

SEQ ID NO: 65774 - protein, 9 aa, Homo sapiens
  Table A; Target 65774; HLA-C*07:06; PMEL; ENSG00000185664; TAA
FSVSVSQLR

SEQ ID NO: 65775 - protein, 11 aa, Homo sapiens
  Table A; Target 65775; HLA-C*03:03; PMEL; ENSG00000185664; TAA
FSVSVSQLRAL

SEQ ID NO: 65776 - protein, 11 aa, Homo sapiens
  Table A; Target 65776; HLA-C*03:04; PMEL; ENSG00000185664; TAA
FSVSVSQLRAL

SEQ ID NO: 65777 - protein, 11 aa, Homo sapiens
  Table A; Target 65777; HLA-C*06:02; PMEL; ENSG00000185664; TAA
FSVSVSQLRAL

SEQ ID NO: 65778 - protein, 11 aa, Homo sapiens
  Table A; Target 65778; HLA-A*68:02; PMEL; ENSG00000185664; TAA
FSVTLDIVQGI

SEQ ID NO: 65779 - protein, 9 aa, Homo sapiens
  Table A; Target 65779; HLA-A*23:01; PMEL; ENSG00000185664; TAA
FTITDQVPF

SEQ ID NO: 65780 - protein, 9 aa, Homo sapiens
  Table A; Target 65780; HLA-A*24:02; PMEL; ENSG00000185664; TAA
FTITDQVPF

SEQ ID NO: 65781 - protein, 9 aa, Homo sapiens
  Table A; Target 65781; HLA-A*25:01; PMEL; ENSG00000185664; TAA
FTITDQVPF

SEQ ID NO: 65782 - protein, 9 aa, Homo sapiens
  Table A; Target 65782; HLA-A*26:01; PMEL; ENSG00000185664; TAA
FTITDQVPF

SEQ ID NO: 65783 - protein, 9 aa, Homo sapiens
  Table A; Target 65783; HLA-A*29:02; PMEL; ENSG00000185664; TAA
FTITDQVPF

SEQ ID NO: 65784 - protein, 9 aa, Homo sapiens
  Table A; Target 65784; HLA-A*31:01; PMEL; ENSG00000185664; TAA
FTITDQVPF

SEQ ID NO: 65785 - protein, 9 aa, Homo sapiens
  Table A; Target 65785; HLA-A*33:01; PMEL; ENSG00000185664; TAA
FTITDQVPF

SEQ ID NO: 65786 - protein, 9 aa, Homo sapiens
  Table A; Target 65786; HLA-A*33:03; PMEL; ENSG00000185664; TAA
FTITDQVPF

SEQ ID NO: 65787 - protein, 9 aa, Homo sapiens
  Table A; Target 65787; HLA-A*68:01; PMEL; ENSG00000185664; TAA
FTITDQVPF

SEQ ID NO: 65788 - protein, 9 aa, Homo sapiens
  Table A; Target 65788; HLA-A*68:02; PMEL; ENSG00000185664; TAA
FTITDQVPF

SEQ ID NO: 65789 - protein, 9 aa, Homo sapiens
  Table A; Target 65789; HLA-B*15:01; PMEL; ENSG00000185664; TAA
FTITDQVPF

SEQ ID NO: 65790 - protein, 9 aa, Homo sapiens
  Table A; Target 65790; HLA-B*15:03; PMEL; ENSG00000185664; TAA
FTITDQVPF

SEQ ID NO: 65791 - protein, 9 aa, Homo sapiens
  Table A; Target 65791; HLA-B*27:02; PMEL; ENSG00000185664; TAA
FTITDQVPF

SEQ ID NO: 65792 - protein, 9 aa, Homo sapiens
  Table A; Target 65792; HLA-B*35:01; PMEL; ENSG00000185664; TAA
FTITDQVPF

SEQ ID NO: 65793 - protein, 9 aa, Homo sapiens
  Table A; Target 65793; HLA-B*35:03; PMEL; ENSG00000185664; TAA
FTITDQVPF

SEQ ID NO: 65794 - protein, 9 aa, Homo sapiens
  Table A; Target 65794; HLA-B*46:01; PMEL; ENSG00000185664; TAA
FTITDQVPF

SEQ ID NO: 65795 - protein, 9 aa, Homo sapiens
  Table A; Target 65795; HLA-B*54:01; PMEL; ENSG00000185664; TAA
FTITDQVPF

SEQ ID NO: 65796 - protein, 9 aa, Homo sapiens
  Table A; Target 65796; HLA-B*57:01; PMEL; ENSG00000185664; TAA
FTITDQVPF

SEQ ID NO: 65797 - protein, 9 aa, Homo sapiens
  Table A; Target 65797; HLA-B*58:01; PMEL; ENSG00000185664; TAA
FTITDQVPF

SEQ ID NO: 65798 - protein, 9 aa, Homo sapiens
  Table A; Target 65798; HLA-C*01:02; PMEL; ENSG00000185664; TAA
FTITDQVPF

SEQ ID NO: 65799 - protein, 9 aa, Homo sapiens
  Table A; Target 65799; HLA-C*02:02; PMEL; ENSG00000185664; TAA
FTITDQVPF

SEQ ID NO: 65800 - protein, 9 aa, Homo sapiens
  Table A; Target 65800; HLA-C*03:03; PMEL; ENSG00000185664; TAA
FTITDQVPF

SEQ ID NO: 65801 - protein, 9 aa, Homo sapiens
  Table A; Target 65801; HLA-C*03:04; PMEL; ENSG00000185664; TAA
FTITDQVPF

SEQ ID NO: 65802 - protein, 9 aa, Homo sapiens
  Table A; Target 65802; HLA-C*04:01; PMEL; ENSG00000185664; TAA
FTITDQVPF

SEQ ID NO: 65803 - protein, 9 aa, Homo sapiens
  Table A; Target 65803; HLA-C*05:01; PMEL; ENSG00000185664; TAA
FTITDQVPF

SEQ ID NO: 65804 - protein, 9 aa, Homo sapiens
  Table A; Target 65804; HLA-C*07:01; PMEL; ENSG00000185664; TAA
FTITDQVPF

SEQ ID NO: 65805 - protein, 9 aa, Homo sapiens
  Table A; Target 65805; HLA-C*07:04; PMEL; ENSG00000185664; TAA
FTITDQVPF

SEQ ID NO: 65806 - protein, 9 aa, Homo sapiens
  Table A; Target 65806; HLA-C*07:06; PMEL; ENSG00000185664; TAA
FTITDQVPF

SEQ ID NO: 65807 - protein, 9 aa, Homo sapiens
  Table A; Target 65807; HLA-C*12:03; PMEL; ENSG00000185664; TAA
FTITDQVPF

SEQ ID NO: 65808 - protein, 9 aa, Homo sapiens
  Table A; Target 65808; HLA-C*16:01; PMEL; ENSG00000185664; TAA
FTITDQVPF

SEQ ID NO: 65809 - protein, 9 aa, Homo sapiens
  Table A; Target 65809; HLA-C*16:04; PMEL; ENSG00000185664; TAA
FTITDQVPF

SEQ ID NO: 65810 - protein, 11 aa, Homo sapiens
  Table A; Target 65810; HLA-A*68:02; PMEL; ENSG00000185664; TAA
FTITDQVPFSV

SEQ ID NO: 65811 - protein, 8 aa, Homo sapiens
  Table A; Target 65811; HLA-B*57:01; PMEL; ENSG00000185664; TAA
FVYVWKTW

SEQ ID NO: 65812 - protein, 10 aa, Homo sapiens
  Table A; Target 65812; HLA-A*03:01; PMEL; ENSG00000185664; TAA
GALLAVGATK

SEQ ID NO: 65813 - protein, 10 aa, Homo sapiens
  Table A; Target 65813; HLA-A*03:02; PMEL; ENSG00000185664; TAA
GALLAVGATK

SEQ ID NO: 65814 - protein, 10 aa, Homo sapiens
  Table A; Target 65814; HLA-A*11:01; PMEL; ENSG00000185664; TAA
GALLAVGATK

SEQ ID NO: 65815 - protein, 10 aa, Homo sapiens
  Table A; Target 65815; HLA-B*27:02; PMEL; ENSG00000185664; TAA
GALLAVGATK

SEQ ID NO: 65816 - protein, 10 aa, Homo sapiens
  Table A; Target 65816; HLA-C*07:06; PMEL; ENSG00000185664; TAA
GALLAVGATK

SEQ ID NO: 65817 - protein, 8 aa, Homo sapiens
  Table A; Target 65817; HLA-B*13:02; PMEL; ENSG00000185664; TAA
GANASFSI

SEQ ID NO: 65818 - protein, 8 aa, Homo sapiens
  Table A; Target 65818; HLA-C*16:04; PMEL; ENSG00000185664; TAA
GANASFSI

SEQ ID NO: 65819 - protein, 9 aa, Homo sapiens
  Table A; Target 65819; HLA-B*54:01; PMEL; ENSG00000185664; TAA
GANASFSIA

SEQ ID NO: 65820 - protein, 9 aa, Homo sapiens
  Table A; Target 65820; HLA-B*56:01; PMEL; ENSG00000185664; TAA
GANASFSIA

SEQ ID NO: 65821 - protein, 9 aa, Homo sapiens
  Table A; Target 65821; HLA-C*03:03; PMEL; ENSG00000185664; TAA
GANASFSIA

SEQ ID NO: 65822 - protein, 9 aa, Homo sapiens
  Table A; Target 65822; HLA-C*12:03; PMEL; ENSG00000185664; TAA
GANASFSIA

SEQ ID NO: 65823 - protein, 10 aa, Homo sapiens
  Table A; Target 65823; HLA-B*07:02; PMEL; ENSG00000185664; TAA
GANASFSIAL

SEQ ID NO: 65824 - protein, 10 aa, Homo sapiens
  Table A; Target 65824; HLA-B*40:01; PMEL; ENSG00000185664; TAA
GANASFSIAL

SEQ ID NO: 65825 - protein, 10 aa, Homo sapiens
  Table A; Target 65825; HLA-B*40:02; PMEL; ENSG00000185664; TAA
GANASFSIAL

SEQ ID NO: 65826 - protein, 10 aa, Homo sapiens
  Table A; Target 65826; HLA-B*46:01; PMEL; ENSG00000185664; TAA
GANASFSIAL

SEQ ID NO: 65827 - protein, 10 aa, Homo sapiens
  Table A; Target 65827; HLA-C*02:02; PMEL; ENSG00000185664; TAA
GANASFSIAL

SEQ ID NO: 65828 - protein, 10 aa, Homo sapiens
  Table A; Target 65828; HLA-C*03:03; PMEL; ENSG00000185664; TAA
GANASFSIAL

SEQ ID NO: 65829 - protein, 10 aa, Homo sapiens
  Table A; Target 65829; HLA-C*03:04; PMEL; ENSG00000185664; TAA
GANASFSIAL

SEQ ID NO: 65830 - protein, 9 aa, Homo sapiens
  Table A; Target 65830; HLA-A*03:02; PMEL; ENSG00000185664; TAA
GCQPPAQRL

SEQ ID NO: 65831 - protein, 9 aa, Homo sapiens
  Table A; Target 65831; HLA-B*07:02; PMEL; ENSG00000185664; TAA
GCQPPAQRL

SEQ ID NO: 65832 - protein, 9 aa, Homo sapiens
  Table A; Target 65832; HLA-B*15:01; PMEL; ENSG00000185664; TAA
GCQPPAQRL

SEQ ID NO: 65833 - protein, 9 aa, Homo sapiens
  Table A; Target 65833; HLA-C*01:02; PMEL; ENSG00000185664; TAA
GCQPPAQRL

SEQ ID NO: 65834 - protein, 9 aa, Homo sapiens
  Table A; Target 65834; HLA-C*03:03; PMEL; ENSG00000185664; TAA
GCQPPAQRL

SEQ ID NO: 65835 - protein, 9 aa, Homo sapiens
  Table A; Target 65835; HLA-C*03:04; PMEL; ENSG00000185664; TAA
GCQPPAQRL

SEQ ID NO: 65836 - protein, 9 aa, Homo sapiens
  Table A; Target 65836; HLA-C*16:02; PMEL; ENSG00000185664; TAA
GCQPPAQRL

SEQ ID NO: 65837 - protein, 8 aa, Homo sapiens
  Table A; Target 65837; HLA-B*37:01; PMEL; ENSG00000185664; TAA
GDSSGTLI

SEQ ID NO: 65838 - protein, 8 aa, Homo sapiens
  Table A; Target 65838; HLA-B*49:01; PMEL; ENSG00000185664; TAA
GDSSGTLI

SEQ ID NO: 65839 - protein, 8 aa, Homo sapiens
  Table A; Target 65839; HLA-C*04:01; PMEL; ENSG00000185664; TAA
GDSSGTLI

SEQ ID NO: 65840 - protein, 10 aa, Homo sapiens
  Table A; Target 65840; HLA-A*03:01; PMEL; ENSG00000185664; TAA
GDSSGTLISR

SEQ ID NO: 65841 - protein, 10 aa, Homo sapiens
  Table A; Target 65841; HLA-A*03:02; PMEL; ENSG00000185664; TAA
GDSSGTLISR

SEQ ID NO: 65842 - protein, 10 aa, Homo sapiens
  Table A; Target 65842; HLA-A*11:01; PMEL; ENSG00000185664; TAA
GDSSGTLISR

SEQ ID NO: 65843 - protein, 10 aa, Homo sapiens
  Table A; Target 65843; HLA-A*31:01; PMEL; ENSG00000185664; TAA
GDSSGTLISR

SEQ ID NO: 65844 - protein, 10 aa, Homo sapiens
  Table A; Target 65844; HLA-A*33:01; PMEL; ENSG00000185664; TAA
GDSSGTLISR

SEQ ID NO: 65845 - protein, 10 aa, Homo sapiens
  Table A; Target 65845; HLA-A*33:03; PMEL; ENSG00000185664; TAA
GDSSGTLISR

SEQ ID NO: 65846 - protein, 10 aa, Homo sapiens
  Table A; Target 65846; HLA-A*68:01; PMEL; ENSG00000185664; TAA
GDSSGTLISR

SEQ ID NO: 65847 - protein, 10 aa, Homo sapiens
  Table A; Target 65847; HLA-A*68:02; PMEL; ENSG00000185664; TAA
GDSSGTLISR

SEQ ID NO: 65848 - protein, 10 aa, Homo sapiens
  Table A; Target 65848; HLA-B*27:02; PMEL; ENSG00000185664; TAA
GDSSGTLISR

SEQ ID NO: 65849 - protein, 10 aa, Homo sapiens
  Table A; Target 65849; HLA-B*27:05; PMEL; ENSG00000185664; TAA
GDSSGTLISR

SEQ ID NO: 65850 - protein, 10 aa, Homo sapiens
  Table A; Target 65850; HLA-C*04:01; PMEL; ENSG00000185664; TAA
GDSSGTLISR

SEQ ID NO: 65851 - protein, 10 aa, Homo sapiens
  Table A; Target 65851; HLA-C*07:02; PMEL; ENSG00000185664; TAA
GDSSGTLISR

SEQ ID NO: 65852 - protein, 10 aa, Homo sapiens
  Table A; Target 65852; HLA-C*07:06; PMEL; ENSG00000185664; TAA
GDSSGTLISR

SEQ ID NO: 65853 - protein, 11 aa, Homo sapiens
  Table A; Target 65853; HLA-C*12:03; PMEL; ENSG00000185664; TAA
GDSSGTLISRA

SEQ ID NO: 65854 - protein, 8 aa, Homo sapiens
  Table A; Target 65854; HLA-A*30:01; PMEL; ENSG00000185664; TAA
GEGDAFEL

SEQ ID NO: 65855 - protein, 8 aa, Homo sapiens
  Table A; Target 65855; HLA-B*18:01; PMEL; ENSG00000185664; TAA
GEGDAFEL

SEQ ID NO: 65856 - protein, 8 aa, Homo sapiens
  Table A; Target 65856; HLA-B*27:05; PMEL; ENSG00000185664; TAA
GEGDAFEL

SEQ ID NO: 65857 - protein, 8 aa, Homo sapiens
  Table A; Target 65857; HLA-B*37:01; PMEL; ENSG00000185664; TAA
GEGDAFEL

SEQ ID NO: 65858 - protein, 8 aa, Homo sapiens
  Table A; Target 65858; HLA-B*40:01; PMEL; ENSG00000185664; TAA
GEGDAFEL

SEQ ID NO: 65859 - protein, 8 aa, Homo sapiens
  Table A; Target 65859; HLA-B*40:02; PMEL; ENSG00000185664; TAA
GEGDAFEL

SEQ ID NO: 65860 - protein, 8 aa, Homo sapiens
  Table A; Target 65860; HLA-B*44:02; PMEL; ENSG00000185664; TAA
GEGDAFEL

SEQ ID NO: 65861 - protein, 8 aa, Homo sapiens
  Table A; Target 65861; HLA-B*44:03; PMEL; ENSG00000185664; TAA
GEGDAFEL

SEQ ID NO: 65862 - protein, 8 aa, Homo sapiens
  Table A; Target 65862; HLA-B*49:01; PMEL; ENSG00000185664; TAA
GEGDAFEL

SEQ ID NO: 65863 - protein, 8 aa, Homo sapiens
  Table A; Target 65863; HLA-C*16:04; PMEL; ENSG00000185664; TAA
GEGDAFEL

SEQ ID NO: 65864 - protein, 9 aa, Homo sapiens
  Table A; Target 65864; HLA-B*49:01; PMEL; ENSG00000185664; TAA
GEGDAFELT

SEQ ID NO: 65865 - protein, 10 aa, Homo sapiens
  Table A; Target 65865; HLA-A*30:01; PMEL; ENSG00000185664; TAA
GEGDAFELTV

SEQ ID NO: 65866 - protein, 10 aa, Homo sapiens
  Table A; Target 65866; HLA-B*13:02; PMEL; ENSG00000185664; TAA
GEGDAFELTV

SEQ ID NO: 65867 - protein, 10 aa, Homo sapiens
  Table A; Target 65867; HLA-B*27:02; PMEL; ENSG00000185664; TAA
GEGDAFELTV

SEQ ID NO: 65868 - protein, 10 aa, Homo sapiens
  Table A; Target 65868; HLA-B*40:01; PMEL; ENSG00000185664; TAA
GEGDAFELTV

SEQ ID NO: 65869 - protein, 10 aa, Homo sapiens
  Table A; Target 65869; HLA-B*40:02; PMEL; ENSG00000185664; TAA
GEGDAFELTV

SEQ ID NO: 65870 - protein, 10 aa, Homo sapiens
  Table A; Target 65870; HLA-B*44:02; PMEL; ENSG00000185664; TAA
GEGDAFELTV

SEQ ID NO: 65871 - protein, 10 aa, Homo sapiens
  Table A; Target 65871; HLA-B*44:03; PMEL; ENSG00000185664; TAA
GEGDAFELTV

SEQ ID NO: 65872 - protein, 10 aa, Homo sapiens
  Table A; Target 65872; HLA-B*49:01; PMEL; ENSG00000185664; TAA
GEGDAFELTV

SEQ ID NO: 65873 - protein, 10 aa, Homo sapiens
  Table A; Target 65873; HLA-C*16:04; PMEL; ENSG00000185664; TAA
GEGDAFELTV

SEQ ID NO: 65874 - protein, 9 aa, Homo sapiens
  Table A; Target 65874; HLA-A*30:01; PMEL; ENSG00000185664; TAA
GENSPLLSG

SEQ ID NO: 65875 - protein, 9 aa, Homo sapiens
  Table A; Target 65875; HLA-B*49:01; PMEL; ENSG00000185664; TAA
GENSPLLSG

SEQ ID NO: 65876 - protein, 9 aa, Homo sapiens
  Table A; Target 65876; HLA-C*16:04; PMEL; ENSG00000185664; TAA
GENSPLLSG

SEQ ID NO: 65877 - protein, 8 aa, Homo sapiens
  Table A; Target 65877; HLA-A*31:01; PMEL; ENSG00000185664; TAA
GGNKHFLR

SEQ ID NO: 65878 - protein, 9 aa, Homo sapiens
  Table A; Target 65878; HLA-B*13:02; PMEL; ENSG00000185664; TAA
GGPVSGLSI

SEQ ID NO: 65879 - protein, 9 aa, Homo sapiens
  Table A; Target 65879; HLA-B*15:03; PMEL; ENSG00000185664; TAA
GGPVSGLSI

SEQ ID NO: 65880 - protein, 9 aa, Homo sapiens
  Table A; Target 65880; HLA-B*46:01; PMEL; ENSG00000185664; TAA
GGPVSGLSI

SEQ ID NO: 65881 - protein, 9 aa, Homo sapiens
  Table A; Target 65881; HLA-B*51:01; PMEL; ENSG00000185664; TAA
GGPVSGLSI

SEQ ID NO: 65882 - protein, 9 aa, Homo sapiens
  Table A; Target 65882; HLA-C*01:02; PMEL; ENSG00000185664; TAA
GGPVSGLSI

SEQ ID NO: 65883 - protein, 9 aa, Homo sapiens
  Table A; Target 65883; HLA-C*03:03; PMEL; ENSG00000185664; TAA
GGPVSGLSI

SEQ ID NO: 65884 - protein, 9 aa, Homo sapiens
  Table A; Target 65884; HLA-C*03:04; PMEL; ENSG00000185664; TAA
GGPVSGLSI

SEQ ID NO: 65885 - protein, 9 aa, Homo sapiens
  Table A; Target 65885; HLA-C*04:01; PMEL; ENSG00000185664; TAA
GGPVSGLSI

SEQ ID NO: 65886 - protein, 9 aa, Homo sapiens
  Table A; Target 65886; HLA-C*06:02; PMEL; ENSG00000185664; TAA
GGPVSGLSI

SEQ ID NO: 65887 - protein, 9 aa, Homo sapiens
  Table A; Target 65887; HLA-C*07:02; PMEL; ENSG00000185664; TAA
GGPVSGLSI

SEQ ID NO: 65888 - protein, 9 aa, Homo sapiens
  Table A; Target 65888; HLA-C*14:02; PMEL; ENSG00000185664; TAA
GGPVSGLSI

SEQ ID NO: 65889 - protein, 8 aa, Homo sapiens
  Table A; Target 65889; HLA-B*13:02; PMEL; ENSG00000185664; TAA
GGQVSLKV

SEQ ID NO: 65890 - protein, 8 aa, Homo sapiens
  Table A; Target 65890; HLA-C*06:02; PMEL; ENSG00000185664; TAA
GGQVSLKV

SEQ ID NO: 65891 - protein, 8 aa, Homo sapiens
  Table A; Target 65891; HLA-C*06:02; PMEL; ENSG00000185664; TAA
GGSGTYCL

SEQ ID NO: 65892 - protein, 11 aa, Homo sapiens
  Table A; Target 65892; HLA-A*02:07; PMEL; ENSG00000185664; TAA
GIESAEILQAV

SEQ ID NO: 65893 - protein, 9 aa, Homo sapiens
  Table A; Target 65893; HLA-A*02:04; PMEL; ENSG00000185664; TAA
GILLVLMAV

SEQ ID NO: 65894 - protein, 8 aa, Homo sapiens
  Table A; Target 65894; HLA-A*02:01; PMEL; ENSG00000185664; TAA
GLGQVPLI

SEQ ID NO: 65895 - protein, 8 aa, Homo sapiens
  Table A; Target 65895; HLA-A*02:03; PMEL; ENSG00000185664; TAA
GLGQVPLI

SEQ ID NO: 65896 - protein, 8 aa, Homo sapiens
  Table A; Target 65896; HLA-A*02:04; PMEL; ENSG00000185664; TAA
GLGQVPLI

SEQ ID NO: 65897 - protein, 8 aa, Homo sapiens
  Table A; Target 65897; HLA-B*13:02; PMEL; ENSG00000185664; TAA
GLGQVPLI

SEQ ID NO: 65898 - protein, 8 aa, Homo sapiens
  Table A; Target 65898; HLA-B*55:01; PMEL; ENSG00000185664; TAA
GLGQVPLI

SEQ ID NO: 65899 - protein, 9 aa, Homo sapiens
  Table A; Target 65899; HLA-A*02:01; PMEL; ENSG00000185664; TAA
GLGQVPLIV

SEQ ID NO: 65900 - protein, 9 aa, Homo sapiens
  Table A; Target 65900; HLA-A*02:03; PMEL; ENSG00000185664; TAA
GLGQVPLIV

SEQ ID NO: 65901 - protein, 9 aa, Homo sapiens
  Table A; Target 65901; HLA-A*02:04; PMEL; ENSG00000185664; TAA
GLGQVPLIV

SEQ ID NO: 65902 - protein, 9 aa, Homo sapiens
  Table A; Target 65902; HLA-A*02:07; PMEL; ENSG00000185664; TAA
GLGQVPLIV

SEQ ID NO: 65903 - protein, 9 aa, Homo sapiens
  Table A; Target 65903; HLA-A*03:01; PMEL; ENSG00000185664; TAA
GLGQVPLIV

SEQ ID NO: 65904 - protein, 9 aa, Homo sapiens
  Table A; Target 65904; HLA-A*30:01; PMEL; ENSG00000185664; TAA
GLGQVPLIV

SEQ ID NO: 65905 - protein, 9 aa, Homo sapiens
  Table A; Target 65905; HLA-B*13:02; PMEL; ENSG00000185664; TAA
GLGQVPLIV

SEQ ID NO: 65906 - protein, 9 aa, Homo sapiens
  Table A; Target 65906; HLA-B*55:01; PMEL; ENSG00000185664; TAA
GLGQVPLIV

SEQ ID NO: 65907 - protein, 9 aa, Homo sapiens
  Table A; Target 65907; HLA-C*06:02; PMEL; ENSG00000185664; TAA
GLGQVPLIV

SEQ ID NO: 65908 - protein, 9 aa, Homo sapiens
  Table A; Target 65908; HLA-C*12:03; PMEL; ENSG00000185664; TAA
GLGQVPLIV

SEQ ID NO: 65909 - protein, 11 aa, Homo sapiens
  Table A; Target 65909; HLA-A*02:01; PMEL; ENSG00000185664; TAA
GLGQVPLIVGI

SEQ ID NO: 65910 - protein, 11 aa, Homo sapiens
  Table A; Target 65910; HLA-A*02:04; PMEL; ENSG00000185664; TAA
GLGQVPLIVGI

SEQ ID NO: 65911 - protein, 11 aa, Homo sapiens
  Table A; Target 65911; HLA-A*02:07; PMEL; ENSG00000185664; TAA
GLGQVPLIVGI

SEQ ID NO: 65912 - protein, 9 aa, Homo sapiens
  Table A; Target 65912; HLA-A*02:03; PMEL; ENSG00000185664; TAA
GLSIGTGRA

SEQ ID NO: 65913 - protein, 10 aa, Homo sapiens
  Table A; Target 65913; HLA-C*01:02; PMEL; ENSG00000185664; TAA
GLSIGTGRAM

SEQ ID NO: 65914 - protein, 10 aa, Homo sapiens
  Table A; Target 65914; HLA-C*07:02; PMEL; ENSG00000185664; TAA
GLSIGTGRAM

SEQ ID NO: 65915 - protein, 9 aa, Homo sapiens
  Table A; Target 65915; HLA-A*02:01; PMEL; ENSG00000185664; TAA
GMTPAEVSI

SEQ ID NO: 65916 - protein, 9 aa, Homo sapiens
  Table A; Target 65916; HLA-A*02:03; PMEL; ENSG00000185664; TAA
GMTPAEVSI

SEQ ID NO: 65917 - protein, 9 aa, Homo sapiens
  Table A; Target 65917; HLA-A*23:01; PMEL; ENSG00000185664; TAA
GMTPAEVSI

SEQ ID NO: 65918 - protein, 9 aa, Homo sapiens
  Table A; Target 65918; HLA-A*30:01; PMEL; ENSG00000185664; TAA
GMTPAEVSI

SEQ ID NO: 65919 - protein, 9 aa, Homo sapiens
  Table A; Target 65919; HLA-B*13:02; PMEL; ENSG00000185664; TAA
GMTPAEVSI

SEQ ID NO: 65920 - protein, 9 aa, Homo sapiens
  Table A; Target 65920; HLA-B*15:01; PMEL; ENSG00000185664; TAA
GMTPAEVSI

SEQ ID NO: 65921 - protein, 9 aa, Homo sapiens
  Table A; Target 65921; HLA-B*55:01; PMEL; ENSG00000185664; TAA
GMTPAEVSI

SEQ ID NO: 65922 - protein, 9 aa, Homo sapiens
  Table A; Target 65922; HLA-C*06:02; PMEL; ENSG00000185664; TAA
GMTPAEVSI

SEQ ID NO: 65923 - protein, 10 aa, Homo sapiens
  Table A; Target 65923; HLA-A*02:03; PMEL; ENSG00000185664; TAA
GMTPAEVSIV

SEQ ID NO: 65924 - protein, 11 aa, Homo sapiens
  Table A; Target 65924; HLA-A*02:01; PMEL; ENSG00000185664; TAA
GMTPAEVSIVV

SEQ ID NO: 65925 - protein, 9 aa, Homo sapiens
  Table A; Target 65925; HLA-A*02:01; PMEL; ENSG00000185664; TAA
GMTPEKVPV

SEQ ID NO: 65926 - protein, 9 aa, Homo sapiens
  Table A; Target 65926; HLA-A*02:03; PMEL; ENSG00000185664; TAA
GMTPEKVPV

SEQ ID NO: 65927 - protein, 9 aa, Homo sapiens
  Table A; Target 65927; HLA-B*13:02; PMEL; ENSG00000185664; TAA
GMTPEKVPV

SEQ ID NO: 65928 - protein, 9 aa, Homo sapiens
  Table A; Target 65928; HLA-B*55:01; PMEL; ENSG00000185664; TAA
GMTPEKVPV

SEQ ID NO: 65929 - protein, 9 aa, Homo sapiens
  Table A; Target 65929; HLA-C*16:02; PMEL; ENSG00000185664; TAA
GMTPEKVPV

SEQ ID NO: 65930 - protein, 8 aa, Homo sapiens
  Table A; Target 65930; HLA-B*35:03; PMEL; ENSG00000185664; TAA
GPDASSIM

SEQ ID NO: 65931 - protein, 8 aa, Homo sapiens
  Table A; Target 65931; HLA-B*55:01; PMEL; ENSG00000185664; TAA
GPDASSIM

SEQ ID NO: 65932 - protein, 8 aa, Homo sapiens
  Table A; Target 65932; HLA-C*05:01; PMEL; ENSG00000185664; TAA
GPDASSIM

SEQ ID NO: 65933 - protein, 9 aa, Homo sapiens
  Table A; Target 65933; HLA-B*56:01; PMEL; ENSG00000185664; TAA
GPLLDGTAT

SEQ ID NO: 65934 - protein, 10 aa, Homo sapiens
  Table A; Target 65934; HLA-B*07:02; PMEL; ENSG00000185664; TAA
GPLLDGTATL

SEQ ID NO: 65935 - protein, 10 aa, Homo sapiens
  Table A; Target 65935; HLA-B*35:01; PMEL; ENSG00000185664; TAA
GPLLDGTATL

SEQ ID NO: 65936 - protein, 10 aa, Homo sapiens
  Table A; Target 65936; HLA-B*35:03; PMEL; ENSG00000185664; TAA
GPLLDGTATL

SEQ ID NO: 65937 - protein, 10 aa, Homo sapiens
  Table A; Target 65937; HLA-B*40:01; PMEL; ENSG00000185664; TAA
GPLLDGTATL

SEQ ID NO: 65938 - protein, 10 aa, Homo sapiens
  Table A; Target 65938; HLA-B*56:01; PMEL; ENSG00000185664; TAA
GPLLDGTATL

SEQ ID NO: 65939 - protein, 10 aa, Homo sapiens
  Table A; Target 65939; HLA-C*07:02; PMEL; ENSG00000185664; TAA
GPLLDGTATL

SEQ ID NO: 65940 - protein, 9 aa, Homo sapiens
  Table A; Target 65940; HLA-B*07:02; PMEL; ENSG00000185664; TAA
GPTLIGANA

SEQ ID NO: 65941 - protein, 9 aa, Homo sapiens
  Table A; Target 65941; HLA-B*54:01; PMEL; ENSG00000185664; TAA
GPTLIGANA

SEQ ID NO: 65942 - protein, 9 aa, Homo sapiens
  Table A; Target 65942; HLA-B*55:01; PMEL; ENSG00000185664; TAA
GPTLIGANA

SEQ ID NO: 65943 - protein, 9 aa, Homo sapiens
  Table A; Target 65943; HLA-B*56:01; PMEL; ENSG00000185664; TAA
GPTLIGANA

SEQ ID NO: 65944 - protein, 9 aa, Homo sapiens
  Table A; Target 65944; HLA-C*07:02; PMEL; ENSG00000185664; TAA
GPTLIGANA

SEQ ID NO: 65945 - protein, 11 aa, Homo sapiens
  Table A; Target 65945; HLA-A*23:01; PMEL; ENSG00000185664; TAA
GPTLIGANASF

SEQ ID NO: 65946 - protein, 11 aa, Homo sapiens
  Table A; Target 65946; HLA-B*07:02; PMEL; ENSG00000185664; TAA
GPTLIGANASF

SEQ ID NO: 65947 - protein, 11 aa, Homo sapiens
  Table A; Target 65947; HLA-B*18:01; PMEL; ENSG00000185664; TAA
GPTLIGANASF

SEQ ID NO: 65948 - protein, 11 aa, Homo sapiens
  Table A; Target 65948; HLA-B*35:01; PMEL; ENSG00000185664; TAA
GPTLIGANASF

SEQ ID NO: 65949 - protein, 11 aa, Homo sapiens
  Table A; Target 65949; HLA-B*35:03; PMEL; ENSG00000185664; TAA
GPTLIGANASF

SEQ ID NO: 65950 - protein, 11 aa, Homo sapiens
  Table A; Target 65950; HLA-B*38:01; PMEL; ENSG00000185664; TAA
GPTLIGANASF

SEQ ID NO: 65951 - protein, 11 aa, Homo sapiens
  Table A; Target 65951; HLA-B*44:03; PMEL; ENSG00000185664; TAA
GPTLIGANASF

SEQ ID NO: 65952 - protein, 11 aa, Homo sapiens
  Table A; Target 65952; HLA-B*55:01; PMEL; ENSG00000185664; TAA
GPTLIGANASF

SEQ ID NO: 65953 - protein, 11 aa, Homo sapiens
  Table A; Target 65953; HLA-B*56:01; PMEL; ENSG00000185664; TAA
GPTLIGANASF

SEQ ID NO: 65954 - protein, 11 aa, Homo sapiens
  Table A; Target 65954; HLA-C*04:01; PMEL; ENSG00000185664; TAA
GPTLIGANASF

SEQ ID NO: 65955 - protein, 11 aa, Homo sapiens
  Table A; Target 65955; HLA-C*07:01; PMEL; ENSG00000185664; TAA
GPTLIGANASF

SEQ ID NO: 65956 - protein, 11 aa, Homo sapiens
  Table A; Target 65956; HLA-C*07:02; PMEL; ENSG00000185664; TAA
GPTLIGANASF

SEQ ID NO: 65957 - protein, 8 aa, Homo sapiens
  Table A; Target 65957; HLA-B*07:02; PMEL; ENSG00000185664; TAA
GPVSGLSI

SEQ ID NO: 65958 - protein, 8 aa, Homo sapiens
  Table A; Target 65958; HLA-B*51:01; PMEL; ENSG00000185664; TAA
GPVSGLSI

SEQ ID NO: 65959 - protein, 8 aa, Homo sapiens
  Table A; Target 65959; HLA-B*56:01; PMEL; ENSG00000185664; TAA
GPVSGLSI

SEQ ID NO: 65960 - protein, 8 aa, Homo sapiens
  Table A; Target 65960; HLA-C*07:02; PMEL; ENSG00000185664; TAA
GPVSGLSI

SEQ ID NO: 65961 - protein, 10 aa, Homo sapiens
  Table A; Target 65961; HLA-B*56:01; PMEL; ENSG00000185664; TAA
GPVSGLSIGT

SEQ ID NO: 65962 - protein, 11 aa, Homo sapiens
  Table A; Target 65962; HLA-B*56:01; PMEL; ENSG00000185664; TAA
GPVSGLSIGTG

SEQ ID NO: 65963 - protein, 11 aa, Homo sapiens
  Table A; Target 65963; HLA-C*04:01; PMEL; ENSG00000185664; TAA
GPVSGLSIGTG

SEQ ID NO: 65964 - protein, 11 aa, Homo sapiens
  Table A; Target 65964; HLA-C*07:01; PMEL; ENSG00000185664; TAA
GPVSGLSIGTG

SEQ ID NO: 65965 - protein, 11 aa, Homo sapiens
  Table A; Target 65965; HLA-C*07:02; PMEL; ENSG00000185664; TAA
GPVSGLSIGTG

SEQ ID NO: 65966 - protein, 11 aa, Homo sapiens
  Table A; Target 65966; HLA-C*12:03; PMEL; ENSG00000185664; TAA
GPVSGLSIGTG

SEQ ID NO: 65967 - protein, 8 aa, Homo sapiens
  Table A; Target 65967; HLA-B*51:01; PMEL; ENSG00000185664; TAA
GPVTAQVV

SEQ ID NO: 65968 - protein, 8 aa, Homo sapiens
  Table A; Target 65968; HLA-B*56:01; PMEL; ENSG00000185664; TAA
GPVTAQVV

SEQ ID NO: 65969 - protein, 9 aa, Homo sapiens
  Table A; Target 65969; HLA-B*07:02; PMEL; ENSG00000185664; TAA
GPVTAQVVL

SEQ ID NO: 65970 - protein, 9 aa, Homo sapiens
  Table A; Target 65970; HLA-B*35:01; PMEL; ENSG00000185664; TAA
GPVTAQVVL

SEQ ID NO: 65971 - protein, 9 aa, Homo sapiens
  Table A; Target 65971; HLA-B*35:03; PMEL; ENSG00000185664; TAA
GPVTAQVVL

SEQ ID NO: 65972 - protein, 9 aa, Homo sapiens
  Table A; Target 65972; HLA-B*40:01; PMEL; ENSG00000185664; TAA
GPVTAQVVL

SEQ ID NO: 65973 - protein, 9 aa, Homo sapiens
  Table A; Target 65973; HLA-B*55:01; PMEL; ENSG00000185664; TAA
GPVTAQVVL

SEQ ID NO: 65974 - protein, 9 aa, Homo sapiens
  Table A; Target 65974; HLA-B*56:01; PMEL; ENSG00000185664; TAA
GPVTAQVVL

SEQ ID NO: 65975 - protein, 9 aa, Homo sapiens
  Table A; Target 65975; HLA-C*03:03; PMEL; ENSG00000185664; TAA
GPVTAQVVL

SEQ ID NO: 65976 - protein, 9 aa, Homo sapiens
  Table A; Target 65976; HLA-C*07:02; PMEL; ENSG00000185664; TAA
GPVTAQVVL

SEQ ID NO: 65977 - protein, 11 aa, Homo sapiens
  Table A; Target 65977; HLA-B*54:01; PMEL; ENSG00000185664; TAA
GPVTAQVVLQA

SEQ ID NO: 65978 - protein, 11 aa, Homo sapiens
  Table A; Target 65978; HLA-B*56:01; PMEL; ENSG00000185664; TAA
GPVTAQVVLQA

SEQ ID NO: 65979 - protein, 10 aa, Homo sapiens
  Table A; Target 65979; HLA-B*13:02; PMEL; ENSG00000185664; TAA
GQAPTAEPSG

SEQ ID NO: 65980 - protein, 10 aa, Homo sapiens
  Table A; Target 65980; HLA-B*27:05; PMEL; ENSG00000185664; TAA
GQAPTAEPSG

SEQ ID NO: 65981 - protein, 10 aa, Homo sapiens
  Table A; Target 65981; HLA-C*07:04; PMEL; ENSG00000185664; TAA
GQAPTAEPSG

SEQ ID NO: 65982 - protein, 9 aa, Homo sapiens
  Table A; Target 65982; HLA-B*13:02; PMEL; ENSG00000185664; TAA
GQEAGLGQV

SEQ ID NO: 65983 - protein, 9 aa, Homo sapiens
  Table A; Target 65983; HLA-B*39:01; PMEL; ENSG00000185664; TAA
GQEAGLGQV

SEQ ID NO: 65984 - protein, 10 aa, Homo sapiens
  Table A; Target 65984; HLA-B*27:05; PMEL; ENSG00000185664; TAA
GQEAGLGQVP

SEQ ID NO: 65985 - protein, 10 aa, Homo sapiens
  Table A; Target 65985; HLA-C*07:04; PMEL; ENSG00000185664; TAA
GQEAGLGQVP

SEQ ID NO: 65986 - protein, 11 aa, Homo sapiens
  Table A; Target 65986; HLA-B*27:05; PMEL; ENSG00000185664; TAA
GQEAGLGQVPL

SEQ ID NO: 65987 - protein, 11 aa, Homo sapiens
  Table A; Target 65987; HLA-B*38:01; PMEL; ENSG00000185664; TAA
GQEAGLGQVPL

SEQ ID NO: 65988 - protein, 11 aa, Homo sapiens
  Table A; Target 65988; HLA-B*39:01; PMEL; ENSG00000185664; TAA
GQEAGLGQVPL

SEQ ID NO: 65989 - protein, 9 aa, Homo sapiens
  Table A; Target 65989; HLA-B*13:02; PMEL; ENSG00000185664; TAA
GQPVYPQET

SEQ ID NO: 65990 - protein, 10 aa, Homo sapiens
  Table A; Target 65990; HLA-A*30:01; PMEL; ENSG00000185664; TAA
GQVIWVNNTI

SEQ ID NO: 65991 - protein, 10 aa, Homo sapiens
  Table A; Target 65991; HLA-B*13:02; PMEL; ENSG00000185664; TAA
GQVIWVNNTI

SEQ ID NO: 65992 - protein, 9 aa, Homo sapiens
  Table A; Target 65992; HLA-A*02:01; PMEL; ENSG00000185664; TAA
GQVPLIVGI

SEQ ID NO: 65993 - protein, 9 aa, Homo sapiens
  Table A; Target 65993; HLA-A*02:03; PMEL; ENSG00000185664; TAA
GQVPLIVGI

SEQ ID NO: 65994 - protein, 9 aa, Homo sapiens
  Table A; Target 65994; HLA-A*02:04; PMEL; ENSG00000185664; TAA
GQVPLIVGI

SEQ ID NO: 65995 - protein, 9 aa, Homo sapiens
  Table A; Target 65995; HLA-A*30:01; PMEL; ENSG00000185664; TAA
GQVPLIVGI

SEQ ID NO: 65996 - protein, 9 aa, Homo sapiens
  Table A; Target 65996; HLA-A*32:01; PMEL; ENSG00000185664; TAA
GQVPLIVGI

SEQ ID NO: 65997 - protein, 9 aa, Homo sapiens
  Table A; Target 65997; HLA-B*13:02; PMEL; ENSG00000185664; TAA
GQVPLIVGI

SEQ ID NO: 65998 - protein, 9 aa, Homo sapiens
  Table A; Target 65998; HLA-B*15:01; PMEL; ENSG00000185664; TAA
GQVPLIVGI

SEQ ID NO: 65999 - protein, 9 aa, Homo sapiens
  Table A; Target 65999; HLA-B*15:03; PMEL; ENSG00000185664; TAA
GQVPLIVGI

SEQ ID NO: 66000 - protein, 9 aa, Homo sapiens
  Table A; Target 66000; HLA-B*27:02; PMEL; ENSG00000185664; TAA
GQVPLIVGI

SEQ ID NO: 66001 - protein, 9 aa, Homo sapiens
  Table A; Target 66001; HLA-B*27:05; PMEL; ENSG00000185664; TAA
GQVPLIVGI

SEQ ID NO: 66002 - protein, 9 aa, Homo sapiens
  Table A; Target 66002; HLA-B*38:01; PMEL; ENSG00000185664; TAA
GQVPLIVGI

SEQ ID NO: 66003 - protein, 9 aa, Homo sapiens
  Table A; Target 66003; HLA-B*39:01; PMEL; ENSG00000185664; TAA
GQVPLIVGI

SEQ ID NO: 66004 - protein, 9 aa, Homo sapiens
  Table A; Target 66004; HLA-B*40:01; PMEL; ENSG00000185664; TAA
GQVPLIVGI

SEQ ID NO: 66005 - protein, 9 aa, Homo sapiens
  Table A; Target 66005; HLA-B*40:02; PMEL; ENSG00000185664; TAA
GQVPLIVGI

SEQ ID NO: 66006 - protein, 9 aa, Homo sapiens
  Table A; Target 66006; HLA-B*49:01; PMEL; ENSG00000185664; TAA
GQVPLIVGI

SEQ ID NO: 66007 - protein, 9 aa, Homo sapiens
  Table A; Target 66007; HLA-B*58:01; PMEL; ENSG00000185664; TAA
GQVPLIVGI

SEQ ID NO: 66008 - protein, 9 aa, Homo sapiens
  Table A; Target 66008; HLA-C*02:02; PMEL; ENSG00000185664; TAA
GQVPLIVGI

SEQ ID NO: 66009 - protein, 9 aa, Homo sapiens
  Table A; Target 66009; HLA-C*06:02; PMEL; ENSG00000185664; TAA
GQVPLIVGI

SEQ ID NO: 66010 - protein, 9 aa, Homo sapiens
  Table A; Target 66010; HLA-C*16:04; PMEL; ENSG00000185664; TAA
GQVPLIVGI

SEQ ID NO: 66011 - protein, 11 aa, Homo sapiens
  Table A; Target 66011; HLA-A*02:04; PMEL; ENSG00000185664; TAA
GQVPLIVGILL

SEQ ID NO: 66012 - protein, 11 aa, Homo sapiens
  Table A; Target 66012; HLA-A*30:01; PMEL; ENSG00000185664; TAA
GQVPLIVGILL

SEQ ID NO: 66013 - protein, 11 aa, Homo sapiens
  Table A; Target 66013; HLA-B*39:01; PMEL; ENSG00000185664; TAA
GQVPLIVGILL

SEQ ID NO: 66014 - protein, 8 aa, Homo sapiens
  Table A; Target 66014; HLA-A*02:01; PMEL; ENSG00000185664; TAA
GQVPTTEV

SEQ ID NO: 66015 - protein, 8 aa, Homo sapiens
  Table A; Target 66015; HLA-A*02:03; PMEL; ENSG00000185664; TAA
GQVPTTEV

SEQ ID NO: 66016 - protein, 8 aa, Homo sapiens
  Table A; Target 66016; HLA-A*30:01; PMEL; ENSG00000185664; TAA
GQVPTTEV

SEQ ID NO: 66017 - protein, 8 aa, Homo sapiens
  Table A; Target 66017; HLA-B*13:02; PMEL; ENSG00000185664; TAA
GQVPTTEV

SEQ ID NO: 66018 - protein, 8 aa, Homo sapiens
  Table A; Target 66018; HLA-B*15:01; PMEL; ENSG00000185664; TAA
GQVPTTEV

SEQ ID NO: 66019 - protein, 8 aa, Homo sapiens
  Table A; Target 66019; HLA-B*15:03; PMEL; ENSG00000185664; TAA
GQVPTTEV

SEQ ID NO: 66020 - protein, 8 aa, Homo sapiens
  Table A; Target 66020; HLA-B*27:05; PMEL; ENSG00000185664; TAA
GQVPTTEV

SEQ ID NO: 66021 - protein, 8 aa, Homo sapiens
  Table A; Target 66021; HLA-B*37:01; PMEL; ENSG00000185664; TAA
GQVPTTEV

SEQ ID NO: 66022 - protein, 8 aa, Homo sapiens
  Table A; Target 66022; HLA-B*39:01; PMEL; ENSG00000185664; TAA
GQVPTTEV

SEQ ID NO: 66023 - protein, 8 aa, Homo sapiens
  Table A; Target 66023; HLA-B*40:02; PMEL; ENSG00000185664; TAA
GQVPTTEV

SEQ ID NO: 66024 - protein, 8 aa, Homo sapiens
  Table A; Target 66024; HLA-B*49:01; PMEL; ENSG00000185664; TAA
GQVPTTEV

SEQ ID NO: 66025 - protein, 8 aa, Homo sapiens
  Table A; Target 66025; HLA-C*02:02; PMEL; ENSG00000185664; TAA
GQVPTTEV

SEQ ID NO: 66026 - protein, 8 aa, Homo sapiens
  Table A; Target 66026; HLA-C*06:02; PMEL; ENSG00000185664; TAA
GQVPTTEV

SEQ ID NO: 66027 - protein, 9 aa, Homo sapiens
  Table A; Target 66027; HLA-A*02:01; PMEL; ENSG00000185664; TAA
GQVPTTEVV

SEQ ID NO: 66028 - protein, 9 aa, Homo sapiens
  Table A; Target 66028; HLA-A*02:03; PMEL; ENSG00000185664; TAA
GQVPTTEVV

SEQ ID NO: 66029 - protein, 9 aa, Homo sapiens
  Table A; Target 66029; HLA-A*30:01; PMEL; ENSG00000185664; TAA
GQVPTTEVV

SEQ ID NO: 66030 - protein, 9 aa, Homo sapiens
  Table A; Target 66030; HLA-A*32:01; PMEL; ENSG00000185664; TAA
GQVPTTEVV

SEQ ID NO: 66031 - protein, 9 aa, Homo sapiens
  Table A; Target 66031; HLA-B*13:02; PMEL; ENSG00000185664; TAA
GQVPTTEVV

SEQ ID NO: 66032 - protein, 9 aa, Homo sapiens
  Table A; Target 66032; HLA-B*15:01; PMEL; ENSG00000185664; TAA
GQVPTTEVV

SEQ ID NO: 66033 - protein, 9 aa, Homo sapiens
  Table A; Target 66033; HLA-B*15:03; PMEL; ENSG00000185664; TAA
GQVPTTEVV

SEQ ID NO: 66034 - protein, 9 aa, Homo sapiens
  Table A; Target 66034; HLA-B*27:05; PMEL; ENSG00000185664; TAA
GQVPTTEVV

SEQ ID NO: 66035 - protein, 9 aa, Homo sapiens
  Table A; Target 66035; HLA-B*37:01; PMEL; ENSG00000185664; TAA
GQVPTTEVV

SEQ ID NO: 66036 - protein, 9 aa, Homo sapiens
  Table A; Target 66036; HLA-B*38:01; PMEL; ENSG00000185664; TAA
GQVPTTEVV

SEQ ID NO: 66037 - protein, 9 aa, Homo sapiens
  Table A; Target 66037; HLA-B*39:01; PMEL; ENSG00000185664; TAA
GQVPTTEVV

SEQ ID NO: 66038 - protein, 9 aa, Homo sapiens
  Table A; Target 66038; HLA-B*40:01; PMEL; ENSG00000185664; TAA
GQVPTTEVV

SEQ ID NO: 66039 - protein, 9 aa, Homo sapiens
  Table A; Target 66039; HLA-B*40:02; PMEL; ENSG00000185664; TAA
GQVPTTEVV

SEQ ID NO: 66040 - protein, 9 aa, Homo sapiens
  Table A; Target 66040; HLA-B*49:01; PMEL; ENSG00000185664; TAA
GQVPTTEVV

SEQ ID NO: 66041 - protein, 9 aa, Homo sapiens
  Table A; Target 66041; HLA-B*55:01; PMEL; ENSG00000185664; TAA
GQVPTTEVV

SEQ ID NO: 66042 - protein, 9 aa, Homo sapiens
  Table A; Target 66042; HLA-B*58:01; PMEL; ENSG00000185664; TAA
GQVPTTEVV

SEQ ID NO: 66043 - protein, 9 aa, Homo sapiens
  Table A; Target 66043; HLA-C*02:02; PMEL; ENSG00000185664; TAA
GQVPTTEVV

SEQ ID NO: 66044 - protein, 9 aa, Homo sapiens
  Table A; Target 66044; HLA-C*06:02; PMEL; ENSG00000185664; TAA
GQVPTTEVV

SEQ ID NO: 66045 - protein, 9 aa, Homo sapiens
  Table A; Target 66045; HLA-C*07:04; PMEL; ENSG00000185664; TAA
GQVPTTEVV

SEQ ID NO: 66046 - protein, 9 aa, Homo sapiens
  Table A; Target 66046; HLA-C*16:04; PMEL; ENSG00000185664; TAA
GQVPTTEVV

SEQ ID NO: 66047 - protein, 11 aa, Homo sapiens
  Table A; Target 66047; HLA-B*27:05; PMEL; ENSG00000185664; TAA
GQVPTTEVVGT

SEQ ID NO: 66048 - protein, 9 aa, Homo sapiens
  Table A; Target 66048; HLA-B*13:02; PMEL; ENSG00000185664; TAA
GQYWQVLGG

SEQ ID NO: 66049 - protein, 10 aa, Homo sapiens
  Table A; Target 66049; HLA-B*27:02; PMEL; ENSG00000185664; TAA
GRAMLGTHTM

SEQ ID NO: 66050 - protein, 10 aa, Homo sapiens
  Table A; Target 66050; HLA-B*27:05; PMEL; ENSG00000185664; TAA
GRAMLGTHTM

SEQ ID NO: 66051 - protein, 10 aa, Homo sapiens
  Table A; Target 66051; HLA-C*16:04; PMEL; ENSG00000185664; TAA
GRAMLGTHTM

SEQ ID NO: 66052 - protein, 9 aa, Homo sapiens
  Table A; Target 66052; HLA-B*13:02; PMEL; ENSG00000185664; TAA
GSFSVTLDI

SEQ ID NO: 66053 - protein, 9 aa, Homo sapiens
  Table A; Target 66053; HLA-C*16:04; PMEL; ENSG00000185664; TAA
GSFSVTLDI

SEQ ID NO: 66054 - protein, 9 aa, Homo sapiens
  Table A; Target 66054; HLA-B*13:02; PMEL; ENSG00000185664; TAA
GSGTYCLNV

SEQ ID NO: 66055 - protein, 10 aa, Homo sapiens
  Table A; Target 66055; HLA-C*04:01; PMEL; ENSG00000185664; TAA
GSQVWGGQPV

SEQ ID NO: 66056 - protein, 11 aa, Homo sapiens
  Table A; Target 66056; HLA-A*01:01; PMEL; ENSG00000185664; TAA
GSQVWGGQPVY

SEQ ID NO: 66057 - protein, 11 aa, Homo sapiens
  Table A; Target 66057; HLA-A*30:02; PMEL; ENSG00000185664; TAA
GSQVWGGQPVY

SEQ ID NO: 66058 - protein, 11 aa, Homo sapiens
  Table A; Target 66058; HLA-B*39:01; PMEL; ENSG00000185664; TAA
GSQVWGGQPVY

SEQ ID NO: 66059 - protein, 11 aa, Homo sapiens
  Table A; Target 66059; HLA-C*07:01; PMEL; ENSG00000185664; TAA
GSQVWGGQPVY

SEQ ID NO: 66060 - protein, 10 aa, Homo sapiens
  Table A; Target 66060; HLA-A*03:01; PMEL; ENSG00000185664; TAA
GSRSYVPLAH

SEQ ID NO: 66061 - protein, 9 aa, Homo sapiens
  Table A; Target 66061; HLA-C*16:02; PMEL; ENSG00000185664; TAA
GSSPVPGTT

SEQ ID NO: 66062 - protein, 9 aa, Homo sapiens
  Table A; Target 66062; HLA-B*57:01; PMEL; ENSG00000185664; TAA
GSWSQKRSF

SEQ ID NO: 66063 - protein, 9 aa, Homo sapiens
  Table A; Target 66063; HLA-C*16:01; PMEL; ENSG00000185664; TAA
GSWSQKRSF

SEQ ID NO: 66064 - protein, 8 aa, Homo sapiens
  Table A; Target 66064; HLA-A*02:03; PMEL; ENSG00000185664; TAA
GTATLRLV

SEQ ID NO: 66065 - protein, 8 aa, Homo sapiens
  Table A; Target 66065; HLA-C*06:02; PMEL; ENSG00000185664; TAA
GTATLRLV

SEQ ID NO: 66066 - protein, 8 aa, Homo sapiens
  Table A; Target 66066; HLA-C*16:02; PMEL; ENSG00000185664; TAA
GTATLRLV

SEQ ID NO: 66067 - protein, 9 aa, Homo sapiens
  Table A; Target 66067; HLA-A*01:01; PMEL; ENSG00000185664; TAA
GTATLRLVK

SEQ ID NO: 66068 - protein, 9 aa, Homo sapiens
  Table A; Target 66068; HLA-A*03:01; PMEL; ENSG00000185664; TAA
GTATLRLVK

SEQ ID NO: 66069 - protein, 9 aa, Homo sapiens
  Table A; Target 66069; HLA-A*03:02; PMEL; ENSG00000185664; TAA
GTATLRLVK

SEQ ID NO: 66070 - protein, 9 aa, Homo sapiens
  Table A; Target 66070; HLA-A*11:01; PMEL; ENSG00000185664; TAA
GTATLRLVK

SEQ ID NO: 66071 - protein, 9 aa, Homo sapiens
  Table A; Target 66071; HLA-A*29:02; PMEL; ENSG00000185664; TAA
GTATLRLVK

SEQ ID NO: 66072 - protein, 9 aa, Homo sapiens
  Table A; Target 66072; HLA-A*31:01; PMEL; ENSG00000185664; TAA
GTATLRLVK

SEQ ID NO: 66073 - protein, 9 aa, Homo sapiens
  Table A; Target 66073; HLA-A*68:01; PMEL; ENSG00000185664; TAA
GTATLRLVK

SEQ ID NO: 66074 - protein, 9 aa, Homo sapiens
  Table A; Target 66074; HLA-B*27:05; PMEL; ENSG00000185664; TAA
GTATLRLVK

SEQ ID NO: 66075 - protein, 9 aa, Homo sapiens
  Table A; Target 66075; HLA-B*57:01; PMEL; ENSG00000185664; TAA
GTATLRLVK

SEQ ID NO: 66076 - protein, 9 aa, Homo sapiens
  Table A; Target 66076; HLA-C*06:02; PMEL; ENSG00000185664; TAA
GTATLRLVK

SEQ ID NO: 66077 - protein, 9 aa, Homo sapiens
  Table A; Target 66077; HLA-C*07:01; PMEL; ENSG00000185664; TAA
GTATLRLVK

SEQ ID NO: 66078 - protein, 9 aa, Homo sapiens
  Table A; Target 66078; HLA-C*07:06; PMEL; ENSG00000185664; TAA
GTATLRLVK

SEQ ID NO: 66079 - protein, 9 aa, Homo sapiens
  Table A; Target 66079; HLA-C*12:03; PMEL; ENSG00000185664; TAA
GTATLRLVK

SEQ ID NO: 66080 - protein, 9 aa, Homo sapiens
  Table A; Target 66080; HLA-C*16:01; PMEL; ENSG00000185664; TAA
GTATLRLVK

SEQ ID NO: 66081 - protein, 10 aa, Homo sapiens
  Table A; Target 66081; HLA-A*03:01; PMEL; ENSG00000185664; TAA
GTATLRLVKR

SEQ ID NO: 66082 - protein, 10 aa, Homo sapiens
  Table A; Target 66082; HLA-A*11:01; PMEL; ENSG00000185664; TAA
GTATLRLVKR

SEQ ID NO: 66083 - protein, 10 aa, Homo sapiens
  Table A; Target 66083; HLA-A*31:01; PMEL; ENSG00000185664; TAA
GTATLRLVKR

SEQ ID NO: 66084 - protein, 9 aa, Homo sapiens
  Table A; Target 66084; HLA-A*02:01; PMEL; ENSG00000185664; TAA
GTHTMEVTV

SEQ ID NO: 66085 - protein, 9 aa, Homo sapiens
  Table A; Target 66085; HLA-A*02:03; PMEL; ENSG00000185664; TAA
GTHTMEVTV

SEQ ID NO: 66086 - protein, 9 aa, Homo sapiens
  Table A; Target 66086; HLA-A*32:01; PMEL; ENSG00000185664; TAA
GTHTMEVTV

SEQ ID NO: 66087 - protein, 9 aa, Homo sapiens
  Table A; Target 66087; HLA-A*68:02; PMEL; ENSG00000185664; TAA
GTHTMEVTV

SEQ ID NO: 66088 - protein, 9 aa, Homo sapiens
  Table A; Target 66088; HLA-B*13:02; PMEL; ENSG00000185664; TAA
GTHTMEVTV

SEQ ID NO: 66089 - protein, 9 aa, Homo sapiens
  Table A; Target 66089; HLA-B*27:05; PMEL; ENSG00000185664; TAA
GTHTMEVTV

SEQ ID NO: 66090 - protein, 9 aa, Homo sapiens
  Table A; Target 66090; HLA-B*40:02; PMEL; ENSG00000185664; TAA
GTHTMEVTV

SEQ ID NO: 66091 - protein, 9 aa, Homo sapiens
  Table A; Target 66091; HLA-B*58:01; PMEL; ENSG00000185664; TAA
GTHTMEVTV

SEQ ID NO: 66092 - protein, 9 aa, Homo sapiens
  Table A; Target 66092; HLA-C*04:01; PMEL; ENSG00000185664; TAA
GTHTMEVTV

SEQ ID NO: 66093 - protein, 9 aa, Homo sapiens
  Table A; Target 66093; HLA-C*06:02; PMEL; ENSG00000185664; TAA
GTHTMEVTV

SEQ ID NO: 66094 - protein, 9 aa, Homo sapiens
  Table A; Target 66094; HLA-C*07:04; PMEL; ENSG00000185664; TAA
GTHTMEVTV

SEQ ID NO: 66095 - protein, 9 aa, Homo sapiens
  Table A; Target 66095; HLA-C*12:03; PMEL; ENSG00000185664; TAA
GTHTMEVTV

SEQ ID NO: 66096 - protein, 9 aa, Homo sapiens
  Table A; Target 66096; HLA-C*16:02; PMEL; ENSG00000185664; TAA
GTHTMEVTV

SEQ ID NO: 66097 - protein, 9 aa, Homo sapiens
  Table A; Target 66097; HLA-C*16:04; PMEL; ENSG00000185664; TAA
GTHTMEVTV

SEQ ID NO: 66098 - protein, 10 aa, Homo sapiens
  Table A; Target 66098; HLA-A*01:01; PMEL; ENSG00000185664; TAA
GTHTMEVTVY

SEQ ID NO: 66099 - protein, 10 aa, Homo sapiens
  Table A; Target 66099; HLA-A*11:01; PMEL; ENSG00000185664; TAA
GTHTMEVTVY

SEQ ID NO: 66100 - protein, 10 aa, Homo sapiens
  Table A; Target 66100; HLA-A*25:01; PMEL; ENSG00000185664; TAA
GTHTMEVTVY

SEQ ID NO: 66101 - protein, 10 aa, Homo sapiens
  Table A; Target 66101; HLA-A*26:01; PMEL; ENSG00000185664; TAA
GTHTMEVTVY

SEQ ID NO: 66102 - protein, 10 aa, Homo sapiens
  Table A; Target 66102; HLA-A*29:02; PMEL; ENSG00000185664; TAA
GTHTMEVTVY

SEQ ID NO: 66103 - protein, 10 aa, Homo sapiens
  Table A; Target 66103; HLA-A*30:02; PMEL; ENSG00000185664; TAA
GTHTMEVTVY

SEQ ID NO: 66104 - protein, 10 aa, Homo sapiens
  Table A; Target 66104; HLA-A*32:01; PMEL; ENSG00000185664; TAA
GTHTMEVTVY

SEQ ID NO: 66105 - protein, 10 aa, Homo sapiens
  Table A; Target 66105; HLA-B*15:01; PMEL; ENSG00000185664; TAA
GTHTMEVTVY

SEQ ID NO: 66106 - protein, 10 aa, Homo sapiens
  Table A; Target 66106; HLA-B*15:03; PMEL; ENSG00000185664; TAA
GTHTMEVTVY

SEQ ID NO: 66107 - protein, 10 aa, Homo sapiens
  Table A; Target 66107; HLA-B*27:05; PMEL; ENSG00000185664; TAA
GTHTMEVTVY

SEQ ID NO: 66108 - protein, 10 aa, Homo sapiens
  Table A; Target 66108; HLA-B*46:01; PMEL; ENSG00000185664; TAA
GTHTMEVTVY

SEQ ID NO: 66109 - protein, 10 aa, Homo sapiens
  Table A; Target 66109; HLA-B*57:01; PMEL; ENSG00000185664; TAA
GTHTMEVTVY

SEQ ID NO: 66110 - protein, 10 aa, Homo sapiens
  Table A; Target 66110; HLA-B*58:01; PMEL; ENSG00000185664; TAA
GTHTMEVTVY

SEQ ID NO: 66111 - protein, 10 aa, Homo sapiens
  Table A; Target 66111; HLA-C*07:01; PMEL; ENSG00000185664; TAA
GTHTMEVTVY

SEQ ID NO: 66112 - protein, 10 aa, Homo sapiens
  Table A; Target 66112; HLA-C*07:04; PMEL; ENSG00000185664; TAA
GTHTMEVTVY

SEQ ID NO: 66113 - protein, 10 aa, Homo sapiens
  Table A; Target 66113; HLA-C*12:03; PMEL; ENSG00000185664; TAA
GTHTMEVTVY

SEQ ID NO: 66114 - protein, 10 aa, Homo sapiens
  Table A; Target 66114; HLA-C*16:02; PMEL; ENSG00000185664; TAA
GTHTMEVTVY

SEQ ID NO: 66115 - protein, 10 aa, Homo sapiens
  Table A; Target 66115; HLA-C*16:04; PMEL; ENSG00000185664; TAA
GTHTMEVTVY

SEQ ID NO: 66116 - protein, 8 aa, Homo sapiens
  Table A; Target 66116; HLA-B*15:03; PMEL; ENSG00000185664; TAA
GTLISRAL

SEQ ID NO: 66117 - protein, 8 aa, Homo sapiens
  Table A; Target 66117; HLA-C*03:04; PMEL; ENSG00000185664; TAA
GTLISRAL

SEQ ID NO: 66118 - protein, 8 aa, Homo sapiens
  Table A; Target 66118; HLA-C*06:02; PMEL; ENSG00000185664; TAA
GTLISRAL

SEQ ID NO: 66119 - protein, 8 aa, Homo sapiens
  Table A; Target 66119; HLA-C*16:01; PMEL; ENSG00000185664; TAA
GTLISRAL

SEQ ID NO: 66120 - protein, 11 aa, Homo sapiens
  Table A; Target 66120; HLA-C*06:02; PMEL; ENSG00000185664; TAA
GTLISRALVVT

SEQ ID NO: 66121 - protein, 9 aa, Homo sapiens
  Table A; Target 66121; HLA-C*07:04; PMEL; ENSG00000185664; TAA
GTTAAQVTT

SEQ ID NO: 66122 - protein, 9 aa, Homo sapiens
  Table A; Target 66122; HLA-C*16:02; PMEL; ENSG00000185664; TAA
GTTAAQVTT

SEQ ID NO: 66123 - protein, 9 aa, Homo sapiens
  Table A; Target 66123; HLA-C*16:01; PMEL; ENSG00000185664; TAA
GTTDGHRPT

SEQ ID NO: 66124 - protein, 9 aa, Homo sapiens
  Table A; Target 66124; HLA-C*16:02; PMEL; ENSG00000185664; TAA
GTTDGHRPT

SEQ ID NO: 66125 - protein, 9 aa, Homo sapiens
  Table A; Target 66125; HLA-A*11:01; PMEL; ENSG00000185664; TAA
GTTSVQVPT

SEQ ID NO: 66126 - protein, 9 aa, Homo sapiens
  Table A; Target 66126; HLA-A*03:01; PMEL; ENSG00000185664; TAA
GTYCLNVSL

SEQ ID NO: 66127 - protein, 9 aa, Homo sapiens
  Table A; Target 66127; HLA-B*13:02; PMEL; ENSG00000185664; TAA
GTYCLNVSL

SEQ ID NO: 66128 - protein, 9 aa, Homo sapiens
  Table A; Target 66128; HLA-B*15:01; PMEL; ENSG00000185664; TAA
GTYCLNVSL

SEQ ID NO: 66129 - protein, 9 aa, Homo sapiens
  Table A; Target 66129; HLA-B*27:05; PMEL; ENSG00000185664; TAA
GTYCLNVSL

SEQ ID NO: 66130 - protein, 9 aa, Homo sapiens
  Table A; Target 66130; HLA-B*58:01; PMEL; ENSG00000185664; TAA
GTYCLNVSL

SEQ ID NO: 66131 - protein, 9 aa, Homo sapiens
  Table A; Target 66131; HLA-A*03:01; PMEL; ENSG00000185664; TAA
GVSRQLRTK

SEQ ID NO: 66132 - protein, 9 aa, Homo sapiens
  Table A; Target 66132; HLA-A*03:02; PMEL; ENSG00000185664; TAA
GVSRQLRTK

SEQ ID NO: 66133 - protein, 9 aa, Homo sapiens
  Table A; Target 66133; HLA-A*11:01; PMEL; ENSG00000185664; TAA
GVSRQLRTK

SEQ ID NO: 66134 - protein, 10 aa, Homo sapiens
  Table A; Target 66134; HLA-A*23:01; PMEL; ENSG00000185664; TAA
GYLAEADLSY

SEQ ID NO: 66135 - protein, 10 aa, Homo sapiens
  Table A; Target 66135; HLA-A*29:02; PMEL; ENSG00000185664; TAA
GYLAEADLSY

SEQ ID NO: 66136 - protein, 10 aa, Homo sapiens
  Table A; Target 66136; HLA-A*30:02; PMEL; ENSG00000185664; TAA
GYLAEADLSY

SEQ ID NO: 66137 - protein, 10 aa, Homo sapiens
  Table A; Target 66137; HLA-C*14:02; PMEL; ENSG00000185664; TAA
GYLAEADLSY

SEQ ID NO: 66138 - protein, 8 aa, Homo sapiens
  Table A; Target 66138; HLA-B*37:01; PMEL; ENSG00000185664; TAA
HDPSGYLA

SEQ ID NO: 66139 - protein, 8 aa, Homo sapiens
  Table A; Target 66139; HLA-C*07:01; PMEL; ENSG00000185664; TAA
HDPSGYLA

SEQ ID NO: 66140 - protein, 10 aa, Homo sapiens
  Table A; Target 66140; HLA-A*68:02; PMEL; ENSG00000185664; TAA
HDPSGYLAEA

SEQ ID NO: 66141 - protein, 10 aa, Homo sapiens
  Table A; Target 66141; HLA-A*23:01; PMEL; ENSG00000185664; TAA
HFLRNQPLTF

SEQ ID NO: 66142 - protein, 10 aa, Homo sapiens
  Table A; Target 66142; HLA-A*24:02; PMEL; ENSG00000185664; TAA
HFLRNQPLTF

SEQ ID NO: 66143 - protein, 10 aa, Homo sapiens
  Table A; Target 66143; HLA-A*29:02; PMEL; ENSG00000185664; TAA
HFLRNQPLTF

SEQ ID NO: 66144 - protein, 10 aa, Homo sapiens
  Table A; Target 66144; HLA-B*57:01; PMEL; ENSG00000185664; TAA
HFLRNQPLTF

SEQ ID NO: 66145 - protein, 8 aa, Homo sapiens
  Table A; Target 66145; HLA-A*02:03; PMEL; ENSG00000185664; TAA
HLAVIGAL

SEQ ID NO: 66146 - protein, 8 aa, Homo sapiens
  Table A; Target 66146; HLA-A*26:01; PMEL; ENSG00000185664; TAA
HLAVIGAL

SEQ ID NO: 66147 - protein, 8 aa, Homo sapiens
  Table A; Target 66147; HLA-B*08:01; PMEL; ENSG00000185664; TAA
HLAVIGAL

SEQ ID NO: 66148 - protein, 8 aa, Homo sapiens
  Table A; Target 66148; HLA-B*40:02; PMEL; ENSG00000185664; TAA
HLAVIGAL

SEQ ID NO: 66149 - protein, 8 aa, Homo sapiens
  Table A; Target 66149; HLA-C*03:04; PMEL; ENSG00000185664; TAA
HLAVIGAL

SEQ ID NO: 66150 - protein, 9 aa, Homo sapiens
  Table A; Target 66150; HLA-A*02:01; PMEL; ENSG00000185664; TAA
HLAVIGALL

SEQ ID NO: 66151 - protein, 9 aa, Homo sapiens
  Table A; Target 66151; HLA-A*02:03; PMEL; ENSG00000185664; TAA
HLAVIGALL

SEQ ID NO: 66152 - protein, 9 aa, Homo sapiens
  Table A; Target 66152; HLA-A*02:04; PMEL; ENSG00000185664; TAA
HLAVIGALL

SEQ ID NO: 66153 - protein, 9 aa, Homo sapiens
  Table A; Target 66153; HLA-A*02:07; PMEL; ENSG00000185664; TAA
HLAVIGALL

SEQ ID NO: 66154 - protein, 9 aa, Homo sapiens
  Table A; Target 66154; HLA-A*23:01; PMEL; ENSG00000185664; TAA
HLAVIGALL

SEQ ID NO: 66155 - protein, 9 aa, Homo sapiens
  Table A; Target 66155; HLA-A*24:02; PMEL; ENSG00000185664; TAA
HLAVIGALL

SEQ ID NO: 66156 - protein, 9 aa, Homo sapiens
  Table A; Target 66156; HLA-A*26:01; PMEL; ENSG00000185664; TAA
HLAVIGALL

SEQ ID NO: 66157 - protein, 9 aa, Homo sapiens
  Table A; Target 66157; HLA-A*30:01; PMEL; ENSG00000185664; TAA
HLAVIGALL

SEQ ID NO: 66158 - protein, 9 aa, Homo sapiens
  Table A; Target 66158; HLA-A*68:02; PMEL; ENSG00000185664; TAA
HLAVIGALL

SEQ ID NO: 66159 - protein, 9 aa, Homo sapiens
  Table A; Target 66159; HLA-B*08:01; PMEL; ENSG00000185664; TAA
HLAVIGALL

SEQ ID NO: 66160 - protein, 9 aa, Homo sapiens
  Table A; Target 66160; HLA-B*13:02; PMEL; ENSG00000185664; TAA
HLAVIGALL

SEQ ID NO: 66161 - protein, 9 aa, Homo sapiens
  Table A; Target 66161; HLA-B*35:03; PMEL; ENSG00000185664; TAA
HLAVIGALL

SEQ ID NO: 66162 - protein, 9 aa, Homo sapiens
  Table A; Target 66162; HLA-B*38:01; PMEL; ENSG00000185664; TAA
HLAVIGALL

SEQ ID NO: 66163 - protein, 9 aa, Homo sapiens
  Table A; Target 66163; HLA-B*40:01; PMEL; ENSG00000185664; TAA
HLAVIGALL

SEQ ID NO: 66164 - protein, 9 aa, Homo sapiens
  Table A; Target 66164; HLA-B*55:01; PMEL; ENSG00000185664; TAA
HLAVIGALL

SEQ ID NO: 66165 - protein, 9 aa, Homo sapiens
  Table A; Target 66165; HLA-C*02:02; PMEL; ENSG00000185664; TAA
HLAVIGALL

SEQ ID NO: 66166 - protein, 9 aa, Homo sapiens
  Table A; Target 66166; HLA-C*04:01; PMEL; ENSG00000185664; TAA
HLAVIGALL

SEQ ID NO: 66167 - protein, 9 aa, Homo sapiens
  Table A; Target 66167; HLA-C*07:04; PMEL; ENSG00000185664; TAA
HLAVIGALL

SEQ ID NO: 66168 - protein, 10 aa, Homo sapiens
  Table A; Target 66168; HLA-A*02:03; PMEL; ENSG00000185664; TAA
HLAVIGALLA

SEQ ID NO: 66169 - protein, 11 aa, Homo sapiens
  Table A; Target 66169; HLA-A*02:01; PMEL; ENSG00000185664; TAA
HLAVIGALLAV

SEQ ID NO: 66170 - protein, 11 aa, Homo sapiens
  Table A; Target 66170; HLA-A*02:03; PMEL; ENSG00000185664; TAA
HLAVIGALLAV

SEQ ID NO: 66171 - protein, 11 aa, Homo sapiens
  Table A; Target 66171; HLA-A*02:04; PMEL; ENSG00000185664; TAA
HLAVIGALLAV

SEQ ID NO: 66172 - protein, 11 aa, Homo sapiens
  Table A; Target 66172; HLA-A*02:07; PMEL; ENSG00000185664; TAA
HLAVIGALLAV

SEQ ID NO: 66173 - protein, 11 aa, Homo sapiens
  Table A; Target 66173; HLA-A*68:02; PMEL; ENSG00000185664; TAA
HLAVIGALLAV

SEQ ID NO: 66174 - protein, 11 aa, Homo sapiens
  Table A; Target 66174; HLA-B*13:02; PMEL; ENSG00000185664; TAA
HLAVIGALLAV

SEQ ID NO: 66175 - protein, 11 aa, Homo sapiens
  Table A; Target 66175; HLA-A*25:01; PMEL; ENSG00000185664; TAA
HQILKGGSGTY

SEQ ID NO: 66176 - protein, 11 aa, Homo sapiens
  Table A; Target 66176; HLA-A*26:01; PMEL; ENSG00000185664; TAA
HQILKGGSGTY

SEQ ID NO: 66177 - protein, 11 aa, Homo sapiens
  Table A; Target 66177; HLA-A*30:02; PMEL; ENSG00000185664; TAA
HQILKGGSGTY

SEQ ID NO: 66178 - protein, 11 aa, Homo sapiens
  Table A; Target 66178; HLA-A*32:01; PMEL; ENSG00000185664; TAA
HQILKGGSGTY

SEQ ID NO: 66179 - protein, 11 aa, Homo sapiens
  Table A; Target 66179; HLA-B*15:01; PMEL; ENSG00000185664; TAA
HQILKGGSGTY

SEQ ID NO: 66180 - protein, 11 aa, Homo sapiens
  Table A; Target 66180; HLA-B*15:03; PMEL; ENSG00000185664; TAA
HQILKGGSGTY

SEQ ID NO: 66181 - protein, 11 aa, Homo sapiens
  Table A; Target 66181; HLA-B*18:01; PMEL; ENSG00000185664; TAA
HQILKGGSGTY

SEQ ID NO: 66182 - protein, 11 aa, Homo sapiens
  Table A; Target 66182; HLA-B*27:05; PMEL; ENSG00000185664; TAA
HQILKGGSGTY

SEQ ID NO: 66183 - protein, 11 aa, Homo sapiens
  Table A; Target 66183; HLA-B*39:01; PMEL; ENSG00000185664; TAA
HQILKGGSGTY

SEQ ID NO: 66184 - protein, 11 aa, Homo sapiens
  Table A; Target 66184; HLA-B*44:02; PMEL; ENSG00000185664; TAA
HQILKGGSGTY

SEQ ID NO: 66185 - protein, 11 aa, Homo sapiens
  Table A; Target 66185; HLA-B*44:03; PMEL; ENSG00000185664; TAA
HQILKGGSGTY

SEQ ID NO: 66186 - protein, 11 aa, Homo sapiens
  Table A; Target 66186; HLA-C*04:01; PMEL; ENSG00000185664; TAA
HQILKGGSGTY

SEQ ID NO: 66187 - protein, 11 aa, Homo sapiens
  Table A; Target 66187; HLA-C*07:01; PMEL; ENSG00000185664; TAA
HQILKGGSGTY

SEQ ID NO: 66188 - protein, 11 aa, Homo sapiens
  Table A; Target 66188; HLA-C*07:04; PMEL; ENSG00000185664; TAA
HQILKGGSGTY

SEQ ID NO: 66189 - protein, 11 aa, Homo sapiens
  Table A; Target 66189; HLA-C*16:04; PMEL; ENSG00000185664; TAA
HQILKGGSGTY

SEQ ID NO: 66190 - protein, 8 aa, Homo sapiens
  Table A; Target 66190; HLA-B*07:02; PMEL; ENSG00000185664; TAA
HSSSAFTI

SEQ ID NO: 66191 - protein, 8 aa, Homo sapiens
  Table A; Target 66191; HLA-B*13:02; PMEL; ENSG00000185664; TAA
HSSSAFTI

SEQ ID NO: 66192 - protein, 8 aa, Homo sapiens
  Table A; Target 66192; HLA-B*38:01; PMEL; ENSG00000185664; TAA
HSSSAFTI

SEQ ID NO: 66193 - protein, 8 aa, Homo sapiens
  Table A; Target 66193; HLA-B*51:01; PMEL; ENSG00000185664; TAA
HSSSAFTI

SEQ ID NO: 66194 - protein, 8 aa, Homo sapiens
  Table A; Target 66194; HLA-B*57:01; PMEL; ENSG00000185664; TAA
HSSSAFTI

SEQ ID NO: 66195 - protein, 8 aa, Homo sapiens
  Table A; Target 66195; HLA-B*58:01; PMEL; ENSG00000185664; TAA
HSSSAFTI

SEQ ID NO: 66196 - protein, 8 aa, Homo sapiens
  Table A; Target 66196; HLA-C*04:01; PMEL; ENSG00000185664; TAA
HSSSAFTI

SEQ ID NO: 66197 - protein, 8 aa, Homo sapiens
  Table A; Target 66197; HLA-C*06:02; PMEL; ENSG00000185664; TAA
HSSSAFTI

SEQ ID NO: 66198 - protein, 8 aa, Homo sapiens
  Table A; Target 66198; HLA-C*07:01; PMEL; ENSG00000185664; TAA
HSSSAFTI

SEQ ID NO: 66199 - protein, 8 aa, Homo sapiens
  Table A; Target 66199; HLA-C*07:04; PMEL; ENSG00000185664; TAA
HSSSAFTI

SEQ ID NO: 66200 - protein, 8 aa, Homo sapiens
  Table A; Target 66200; HLA-C*12:03; PMEL; ENSG00000185664; TAA
HSSSAFTI

SEQ ID NO: 66201 - protein, 8 aa, Homo sapiens
  Table A; Target 66201; HLA-C*16:02; PMEL; ENSG00000185664; TAA
HSSSAFTI

SEQ ID NO: 66202 - protein, 8 aa, Homo sapiens
  Table A; Target 66202; HLA-A*01:01; PMEL; ENSG00000185664; TAA
HTMEVTVY

SEQ ID NO: 66203 - protein, 8 aa, Homo sapiens
  Table A; Target 66203; HLA-A*03:01; PMEL; ENSG00000185664; TAA
HTMEVTVY

SEQ ID NO: 66204 - protein, 8 aa, Homo sapiens
  Table A; Target 66204; HLA-A*03:02; PMEL; ENSG00000185664; TAA
HTMEVTVY

SEQ ID NO: 66205 - protein, 8 aa, Homo sapiens
  Table A; Target 66205; HLA-A*11:01; PMEL; ENSG00000185664; TAA
HTMEVTVY

SEQ ID NO: 66206 - protein, 8 aa, Homo sapiens
  Table A; Target 66206; HLA-A*23:01; PMEL; ENSG00000185664; TAA
HTMEVTVY

SEQ ID NO: 66207 - protein, 8 aa, Homo sapiens
  Table A; Target 66207; HLA-A*25:01; PMEL; ENSG00000185664; TAA
HTMEVTVY

SEQ ID NO: 66208 - protein, 8 aa, Homo sapiens
  Table A; Target 66208; HLA-A*26:01; PMEL; ENSG00000185664; TAA
HTMEVTVY

SEQ ID NO: 66209 - protein, 8 aa, Homo sapiens
  Table A; Target 66209; HLA-A*29:02; PMEL; ENSG00000185664; TAA
HTMEVTVY

SEQ ID NO: 66210 - protein, 8 aa, Homo sapiens
  Table A; Target 66210; HLA-A*30:02; PMEL; ENSG00000185664; TAA
HTMEVTVY

SEQ ID NO: 66211 - protein, 8 aa, Homo sapiens
  Table A; Target 66211; HLA-A*32:01; PMEL; ENSG00000185664; TAA
HTMEVTVY

SEQ ID NO: 66212 - protein, 8 aa, Homo sapiens
  Table A; Target 66212; HLA-A*33:01; PMEL; ENSG00000185664; TAA
HTMEVTVY

SEQ ID NO: 66213 - protein, 8 aa, Homo sapiens
  Table A; Target 66213; HLA-A*33:03; PMEL; ENSG00000185664; TAA
HTMEVTVY

SEQ ID NO: 66214 - protein, 8 aa, Homo sapiens
  Table A; Target 66214; HLA-B*08:01; PMEL; ENSG00000185664; TAA
HTMEVTVY

SEQ ID NO: 66215 - protein, 8 aa, Homo sapiens
  Table A; Target 66215; HLA-B*15:01; PMEL; ENSG00000185664; TAA
HTMEVTVY

SEQ ID NO: 66216 - protein, 8 aa, Homo sapiens
  Table A; Target 66216; HLA-B*15:03; PMEL; ENSG00000185664; TAA
HTMEVTVY

SEQ ID NO: 66217 - protein, 8 aa, Homo sapiens
  Table A; Target 66217; HLA-B*18:01; PMEL; ENSG00000185664; TAA
HTMEVTVY

SEQ ID NO: 66218 - protein, 8 aa, Homo sapiens
  Table A; Target 66218; HLA-B*35:01; PMEL; ENSG00000185664; TAA
HTMEVTVY

SEQ ID NO: 66219 - protein, 8 aa, Homo sapiens
  Table A; Target 66219; HLA-B*35:03; PMEL; ENSG00000185664; TAA
HTMEVTVY

SEQ ID NO: 66220 - protein, 8 aa, Homo sapiens
  Table A; Target 66220; HLA-B*37:01; PMEL; ENSG00000185664; TAA
HTMEVTVY

SEQ ID NO: 66221 - protein, 8 aa, Homo sapiens
  Table A; Target 66221; HLA-B*39:01; PMEL; ENSG00000185664; TAA
HTMEVTVY

SEQ ID NO: 66222 - protein, 8 aa, Homo sapiens
  Table A; Target 66222; HLA-B*40:02; PMEL; ENSG00000185664; TAA
HTMEVTVY

SEQ ID NO: 66223 - protein, 8 aa, Homo sapiens
  Table A; Target 66223; HLA-B*46:01; PMEL; ENSG00000185664; TAA
HTMEVTVY

SEQ ID NO: 66224 - protein, 8 aa, Homo sapiens
  Table A; Target 66224; HLA-B*51:01; PMEL; ENSG00000185664; TAA
HTMEVTVY

SEQ ID NO: 66225 - protein, 8 aa, Homo sapiens
  Table A; Target 66225; HLA-B*54:01; PMEL; ENSG00000185664; TAA
HTMEVTVY

SEQ ID NO: 66226 - protein, 8 aa, Homo sapiens
  Table A; Target 66226; HLA-B*55:01; PMEL; ENSG00000185664; TAA
HTMEVTVY

SEQ ID NO: 66227 - protein, 8 aa, Homo sapiens
  Table A; Target 66227; HLA-B*57:01; PMEL; ENSG00000185664; TAA
HTMEVTVY

SEQ ID NO: 66228 - protein, 8 aa, Homo sapiens
  Table A; Target 66228; HLA-B*58:01; PMEL; ENSG00000185664; TAA
HTMEVTVY

SEQ ID NO: 66229 - protein, 8 aa, Homo sapiens
  Table A; Target 66229; HLA-C*01:02; PMEL; ENSG00000185664; TAA
HTMEVTVY

SEQ ID NO: 66230 - protein, 8 aa, Homo sapiens
  Table A; Target 66230; HLA-C*02:02; PMEL; ENSG00000185664; TAA
HTMEVTVY

SEQ ID NO: 66231 - protein, 8 aa, Homo sapiens
  Table A; Target 66231; HLA-C*03:03; PMEL; ENSG00000185664; TAA
HTMEVTVY

SEQ ID NO: 66232 - protein, 8 aa, Homo sapiens
  Table A; Target 66232; HLA-C*03:04; PMEL; ENSG00000185664; TAA
HTMEVTVY

SEQ ID NO: 66233 - protein, 8 aa, Homo sapiens
  Table A; Target 66233; HLA-C*04:01; PMEL; ENSG00000185664; TAA
HTMEVTVY

SEQ ID NO: 66234 - protein, 8 aa, Homo sapiens
  Table A; Target 66234; HLA-C*05:01; PMEL; ENSG00000185664; TAA
HTMEVTVY

SEQ ID NO: 66235 - protein, 8 aa, Homo sapiens
  Table A; Target 66235; HLA-C*07:01; PMEL; ENSG00000185664; TAA
HTMEVTVY

SEQ ID NO: 66236 - protein, 8 aa, Homo sapiens
  Table A; Target 66236; HLA-C*07:04; PMEL; ENSG00000185664; TAA
HTMEVTVY

SEQ ID NO: 66237 - protein, 8 aa, Homo sapiens
  Table A; Target 66237; HLA-C*07:06; PMEL; ENSG00000185664; TAA
HTMEVTVY

SEQ ID NO: 66238 - protein, 8 aa, Homo sapiens
  Table A; Target 66238; HLA-C*12:03; PMEL; ENSG00000185664; TAA
HTMEVTVY

SEQ ID NO: 66239 - protein, 8 aa, Homo sapiens
  Table A; Target 66239; HLA-C*14:02; PMEL; ENSG00000185664; TAA
HTMEVTVY

SEQ ID NO: 66240 - protein, 8 aa, Homo sapiens
  Table A; Target 66240; HLA-C*16:01; PMEL; ENSG00000185664; TAA
HTMEVTVY

SEQ ID NO: 66241 - protein, 8 aa, Homo sapiens
  Table A; Target 66241; HLA-C*16:02; PMEL; ENSG00000185664; TAA
HTMEVTVY

SEQ ID NO: 66242 - protein, 8 aa, Homo sapiens
  Table A; Target 66242; HLA-C*16:04; PMEL; ENSG00000185664; TAA
HTMEVTVY

SEQ ID NO: 66243 - protein, 9 aa, Homo sapiens
  Table A; Target 66243; HLA-A*03:01; PMEL; ENSG00000185664; TAA
HTMEVTVYH

SEQ ID NO: 66244 - protein, 9 aa, Homo sapiens
  Table A; Target 66244; HLA-A*03:02; PMEL; ENSG00000185664; TAA
HTMEVTVYH

SEQ ID NO: 66245 - protein, 9 aa, Homo sapiens
  Table A; Target 66245; HLA-A*11:01; PMEL; ENSG00000185664; TAA
HTMEVTVYH

SEQ ID NO: 66246 - protein, 9 aa, Homo sapiens
  Table A; Target 66246; HLA-A*26:01; PMEL; ENSG00000185664; TAA
HTMEVTVYH

SEQ ID NO: 66247 - protein, 9 aa, Homo sapiens
  Table A; Target 66247; HLA-A*29:02; PMEL; ENSG00000185664; TAA
HTMEVTVYH

SEQ ID NO: 66248 - protein, 9 aa, Homo sapiens
  Table A; Target 66248; HLA-A*31:01; PMEL; ENSG00000185664; TAA
HTMEVTVYH

SEQ ID NO: 66249 - protein, 9 aa, Homo sapiens
  Table A; Target 66249; HLA-A*33:01; PMEL; ENSG00000185664; TAA
HTMEVTVYH

SEQ ID NO: 66250 - protein, 9 aa, Homo sapiens
  Table A; Target 66250; HLA-A*33:03; PMEL; ENSG00000185664; TAA
HTMEVTVYH

SEQ ID NO: 66251 - protein, 9 aa, Homo sapiens
  Table A; Target 66251; HLA-A*68:01; PMEL; ENSG00000185664; TAA
HTMEVTVYH

SEQ ID NO: 66252 - protein, 9 aa, Homo sapiens
  Table A; Target 66252; HLA-A*68:02; PMEL; ENSG00000185664; TAA
HTMEVTVYH

SEQ ID NO: 66253 - protein, 9 aa, Homo sapiens
  Table A; Target 66253; HLA-B*13:02; PMEL; ENSG00000185664; TAA
HTMEVTVYH

SEQ ID NO: 66254 - protein, 9 aa, Homo sapiens
  Table A; Target 66254; HLA-B*35:01; PMEL; ENSG00000185664; TAA
HTMEVTVYH

SEQ ID NO: 66255 - protein, 9 aa, Homo sapiens
  Table A; Target 66255; HLA-B*57:01; PMEL; ENSG00000185664; TAA
HTMEVTVYH

SEQ ID NO: 66256 - protein, 9 aa, Homo sapiens
  Table A; Target 66256; HLA-C*02:02; PMEL; ENSG00000185664; TAA
HTMEVTVYH

SEQ ID NO: 66257 - protein, 9 aa, Homo sapiens
  Table A; Target 66257; HLA-C*04:01; PMEL; ENSG00000185664; TAA
HTMEVTVYH

SEQ ID NO: 66258 - protein, 9 aa, Homo sapiens
  Table A; Target 66258; HLA-C*07:06; PMEL; ENSG00000185664; TAA
HTMEVTVYH

SEQ ID NO: 66259 - protein, 10 aa, Homo sapiens
  Table A; Target 66259; HLA-A*03:02; PMEL; ENSG00000185664; TAA
HTMEVTVYHR

SEQ ID NO: 66260 - protein, 10 aa, Homo sapiens
  Table A; Target 66260; HLA-A*11:01; PMEL; ENSG00000185664; TAA
HTMEVTVYHR

SEQ ID NO: 66261 - protein, 10 aa, Homo sapiens
  Table A; Target 66261; HLA-A*31:01; PMEL; ENSG00000185664; TAA
HTMEVTVYHR

SEQ ID NO: 66262 - protein, 10 aa, Homo sapiens
  Table A; Target 66262; HLA-A*33:01; PMEL; ENSG00000185664; TAA
HTMEVTVYHR

SEQ ID NO: 66263 - protein, 10 aa, Homo sapiens
  Table A; Target 66263; HLA-A*33:03; PMEL; ENSG00000185664; TAA
HTMEVTVYHR

SEQ ID NO: 66264 - protein, 10 aa, Homo sapiens
  Table A; Target 66264; HLA-A*68:01; PMEL; ENSG00000185664; TAA
HTMEVTVYHR

SEQ ID NO: 66265 - protein, 10 aa, Homo sapiens
  Table A; Target 66265; HLA-A*68:02; PMEL; ENSG00000185664; TAA
HTMEVTVYHR

SEQ ID NO: 66266 - protein, 10 aa, Homo sapiens
  Table A; Target 66266; HLA-B*57:01; PMEL; ENSG00000185664; TAA
HTMEVTVYHR

SEQ ID NO: 66267 - protein, 10 aa, Homo sapiens
  Table A; Target 66267; HLA-C*07:06; PMEL; ENSG00000185664; TAA
HTMEVTVYHR

SEQ ID NO: 66268 - protein, 11 aa, Homo sapiens
  Table A; Target 66268; HLA-A*31:01; PMEL; ENSG00000185664; TAA
HTMEVTVYHRR

SEQ ID NO: 66269 - protein, 11 aa, Homo sapiens
  Table A; Target 66269; HLA-A*33:01; PMEL; ENSG00000185664; TAA
HTMEVTVYHRR

SEQ ID NO: 66270 - protein, 9 aa, Homo sapiens
  Table A; Target 66270; HLA-A*68:02; PMEL; ENSG00000185664; TAA
HTYLEPGPV

SEQ ID NO: 66271 - protein, 9 aa, Homo sapiens
  Table A; Target 66271; HLA-B*40:02; PMEL; ENSG00000185664; TAA
HTYLEPGPV

SEQ ID NO: 66272 - protein, 9 aa, Homo sapiens
  Table A; Target 66272; HLA-C*03:03; PMEL; ENSG00000185664; TAA
HTYLEPGPV

SEQ ID NO: 66273 - protein, 9 aa, Homo sapiens
  Table A; Target 66273; HLA-C*03:04; PMEL; ENSG00000185664; TAA
HTYLEPGPV

SEQ ID NO: 66274 - protein, 9 aa, Homo sapiens
  Table A; Target 66274; HLA-C*06:02; PMEL; ENSG00000185664; TAA
HTYLEPGPV

SEQ ID NO: 66275 - protein, 9 aa, Homo sapiens
  Table A; Target 66275; HLA-C*07:04; PMEL; ENSG00000185664; TAA
HTYLEPGPV

SEQ ID NO: 66276 - protein, 10 aa, Homo sapiens
  Table A; Target 66276; HLA-B*54:01; PMEL; ENSG00000185664; TAA
HTYLEPGPVT

SEQ ID NO: 66277 - protein, 10 aa, Homo sapiens
  Table A; Target 66277; HLA-C*06:02; PMEL; ENSG00000185664; TAA
HTYLEPGPVT

SEQ ID NO: 66278 - protein, 11 aa, Homo sapiens
  Table A; Target 66278; HLA-A*68:02; PMEL; ENSG00000185664; TAA
HTYLEPGPVTA

SEQ ID NO: 66279 - protein, 11 aa, Homo sapiens
  Table A; Target 66279; HLA-B*54:01; PMEL; ENSG00000185664; TAA
HTYLEPGPVTA

SEQ ID NO: 66280 - protein, 11 aa, Homo sapiens
  Table A; Target 66280; HLA-B*56:01; PMEL; ENSG00000185664; TAA
HTYLEPGPVTA

SEQ ID NO: 66281 - protein, 9 aa, Homo sapiens
  Table A; Target 66281; HLA-C*12:03; PMEL; ENSG00000185664; TAA
IALNFPGSQ

SEQ ID NO: 66282 - protein, 9 aa, Homo sapiens
  Table A; Target 66282; HLA-C*16:01; PMEL; ENSG00000185664; TAA
IALNFPGSQ

SEQ ID NO: 66283 - protein, 9 aa, Homo sapiens
  Table A; Target 66283; HLA-C*16:02; PMEL; ENSG00000185664; TAA
IALNFPGSQ

SEQ ID NO: 66284 - protein, 10 aa, Homo sapiens
  Table A; Target 66284; HLA-A*03:01; PMEL; ENSG00000185664; TAA
IALNFPGSQK

SEQ ID NO: 66285 - protein, 10 aa, Homo sapiens
  Table A; Target 66285; HLA-A*03:02; PMEL; ENSG00000185664; TAA
IALNFPGSQK

SEQ ID NO: 66286 - protein, 10 aa, Homo sapiens
  Table A; Target 66286; HLA-A*11:01; PMEL; ENSG00000185664; TAA
IALNFPGSQK

SEQ ID NO: 66287 - protein, 10 aa, Homo sapiens
  Table A; Target 66287; HLA-A*31:01; PMEL; ENSG00000185664; TAA
IALNFPGSQK

SEQ ID NO: 66288 - protein, 10 aa, Homo sapiens
  Table A; Target 66288; HLA-A*33:01; PMEL; ENSG00000185664; TAA
IALNFPGSQK

SEQ ID NO: 66289 - protein, 10 aa, Homo sapiens
  Table A; Target 66289; HLA-A*33:03; PMEL; ENSG00000185664; TAA
IALNFPGSQK

SEQ ID NO: 66290 - protein, 10 aa, Homo sapiens
  Table A; Target 66290; HLA-A*68:01; PMEL; ENSG00000185664; TAA
IALNFPGSQK

SEQ ID NO: 66291 - protein, 10 aa, Homo sapiens
  Table A; Target 66291; HLA-B*27:02; PMEL; ENSG00000185664; TAA
IALNFPGSQK

SEQ ID NO: 66292 - protein, 10 aa, Homo sapiens
  Table A; Target 66292; HLA-B*57:01; PMEL; ENSG00000185664; TAA
IALNFPGSQK

SEQ ID NO: 66293 - protein, 10 aa, Homo sapiens
  Table A; Target 66293; HLA-C*03:03; PMEL; ENSG00000185664; TAA
IALNFPGSQK

SEQ ID NO: 66294 - protein, 10 aa, Homo sapiens
  Table A; Target 66294; HLA-C*07:06; PMEL; ENSG00000185664; TAA
IALNFPGSQK

SEQ ID NO: 66295 - protein, 9 aa, Homo sapiens
  Table A; Target 66295; HLA-A*30:01; PMEL; ENSG00000185664; TAA
IESAEILQA

SEQ ID NO: 66296 - protein, 9 aa, Homo sapiens
  Table A; Target 66296; HLA-B*13:02; PMEL; ENSG00000185664; TAA
IESAEILQA

SEQ ID NO: 66297 - protein, 9 aa, Homo sapiens
  Table A; Target 66297; HLA-B*18:01; PMEL; ENSG00000185664; TAA
IESAEILQA

SEQ ID NO: 66298 - protein, 9 aa, Homo sapiens
  Table A; Target 66298; HLA-B*40:01; PMEL; ENSG00000185664; TAA
IESAEILQA

SEQ ID NO: 66299 - protein, 9 aa, Homo sapiens
  Table A; Target 66299; HLA-B*40:02; PMEL; ENSG00000185664; TAA
IESAEILQA

SEQ ID NO: 66300 - protein, 9 aa, Homo sapiens
  Table A; Target 66300; HLA-B*49:01; PMEL; ENSG00000185664; TAA
IESAEILQA

SEQ ID NO: 66301 - protein, 9 aa, Homo sapiens
  Table A; Target 66301; HLA-B*54:01; PMEL; ENSG00000185664; TAA
IESAEILQA

SEQ ID NO: 66302 - protein, 9 aa, Homo sapiens
  Table A; Target 66302; HLA-B*56:01; PMEL; ENSG00000185664; TAA
IESAEILQA

SEQ ID NO: 66303 - protein, 10 aa, Homo sapiens
  Table A; Target 66303; HLA-A*30:01; PMEL; ENSG00000185664; TAA
IESAEILQAV

SEQ ID NO: 66304 - protein, 10 aa, Homo sapiens
  Table A; Target 66304; HLA-B*40:01; PMEL; ENSG00000185664; TAA
IESAEILQAV

SEQ ID NO: 66305 - protein, 10 aa, Homo sapiens
  Table A; Target 66305; HLA-B*40:02; PMEL; ENSG00000185664; TAA
IESAEILQAV

SEQ ID NO: 66306 - protein, 10 aa, Homo sapiens
  Table A; Target 66306; HLA-B*44:02; PMEL; ENSG00000185664; TAA
IESAEILQAV

SEQ ID NO: 66307 - protein, 10 aa, Homo sapiens
  Table A; Target 66307; HLA-B*49:01; PMEL; ENSG00000185664; TAA
IESAEILQAV

SEQ ID NO: 66308 - protein, 9 aa, Homo sapiens
  Table A; Target 66308; HLA-B*54:01; PMEL; ENSG00000185664; TAA
IGALLAVGA

SEQ ID NO: 66309 - protein, 9 aa, Homo sapiens
  Table A; Target 66309; HLA-B*56:01; PMEL; ENSG00000185664; TAA
IGALLAVGA

SEQ ID NO: 66310 - protein, 9 aa, Homo sapiens
  Table A; Target 66310; HLA-C*06:02; PMEL; ENSG00000185664; TAA
IGALLAVGA

SEQ ID NO: 66311 - protein, 11 aa, Homo sapiens
  Table A; Target 66311; HLA-A*03:01; PMEL; ENSG00000185664; TAA
IGALLAVGATK

SEQ ID NO: 66312 - protein, 11 aa, Homo sapiens
  Table A; Target 66312; HLA-A*03:02; PMEL; ENSG00000185664; TAA
IGALLAVGATK

SEQ ID NO: 66313 - protein, 11 aa, Homo sapiens
  Table A; Target 66313; HLA-A*11:01; PMEL; ENSG00000185664; TAA
IGALLAVGATK

SEQ ID NO: 66314 - protein, 11 aa, Homo sapiens
  Table A; Target 66314; HLA-B*27:02; PMEL; ENSG00000185664; TAA
IGALLAVGATK

SEQ ID NO: 66315 - protein, 11 aa, Homo sapiens
  Table A; Target 66315; HLA-C*04:01; PMEL; ENSG00000185664; TAA
IGALLAVGATK

SEQ ID NO: 66316 - protein, 11 aa, Homo sapiens
  Table A; Target 66316; HLA-C*06:02; PMEL; ENSG00000185664; TAA
IGALLAVGATK

SEQ ID NO: 66317 - protein, 11 aa, Homo sapiens
  Table A; Target 66317; HLA-C*07:06; PMEL; ENSG00000185664; TAA
IGALLAVGATK

SEQ ID NO: 66318 - protein, 9 aa, Homo sapiens
  Table A; Target 66318; HLA-B*13:02; PMEL; ENSG00000185664; TAA
IGANASFSI

SEQ ID NO: 66319 - protein, 9 aa, Homo sapiens
  Table A; Target 66319; HLA-B*51:01; PMEL; ENSG00000185664; TAA
IGANASFSI

SEQ ID NO: 66320 - protein, 9 aa, Homo sapiens
  Table A; Target 66320; HLA-C*03:03; PMEL; ENSG00000185664; TAA
IGANASFSI

SEQ ID NO: 66321 - protein, 9 aa, Homo sapiens
  Table A; Target 66321; HLA-C*06:02; PMEL; ENSG00000185664; TAA
IGANASFSI

SEQ ID NO: 66322 - protein, 9 aa, Homo sapiens
  Table A; Target 66322; HLA-C*16:02; PMEL; ENSG00000185664; TAA
IGANASFSI

SEQ ID NO: 66323 - protein, 11 aa, Homo sapiens
  Table A; Target 66323; HLA-C*03:03; PMEL; ENSG00000185664; TAA
IGANASFSIAL

SEQ ID NO: 66324 - protein, 8 aa, Homo sapiens
  Table A; Target 66324; HLA-C*03:03; PMEL; ENSG00000185664; TAA
IGENSPLL

SEQ ID NO: 66325 - protein, 8 aa, Homo sapiens
  Table A; Target 66325; HLA-C*03:04; PMEL; ENSG00000185664; TAA
IGENSPLL

SEQ ID NO: 66326 - protein, 8 aa, Homo sapiens
  Table A; Target 66326; HLA-C*04:01; PMEL; ENSG00000185664; TAA
IGENSPLL

SEQ ID NO: 66327 - protein, 8 aa, Homo sapiens
  Table A; Target 66327; HLA-C*05:01; PMEL; ENSG00000185664; TAA
IGENSPLL

SEQ ID NO: 66328 - protein, 8 aa, Homo sapiens
  Table A; Target 66328; HLA-C*07:04; PMEL; ENSG00000185664; TAA
IGENSPLL

SEQ ID NO: 66329 - protein, 8 aa, Homo sapiens
  Table A; Target 66329; HLA-B*07:02; PMEL; ENSG00000185664; TAA
IGTGRAML

SEQ ID NO: 66330 - protein, 8 aa, Homo sapiens
  Table A; Target 66330; HLA-B*08:01; PMEL; ENSG00000185664; TAA
IGTGRAML

SEQ ID NO: 66331 - protein, 8 aa, Homo sapiens
  Table A; Target 66331; HLA-C*16:01; PMEL; ENSG00000185664; TAA
IGTGRAML

SEQ ID NO: 66332 - protein, 8 aa, Homo sapiens
  Table A; Target 66332; HLA-A*25:01; PMEL; ENSG00000185664; TAA
IINGSQVW

SEQ ID NO: 66333 - protein, 8 aa, Homo sapiens
  Table A; Target 66333; HLA-A*32:01; PMEL; ENSG00000185664; TAA
IINGSQVW

SEQ ID NO: 66334 - protein, 8 aa, Homo sapiens
  Table A; Target 66334; HLA-B*57:01; PMEL; ENSG00000185664; TAA
IINGSQVW

SEQ ID NO: 66335 - protein, 8 aa, Homo sapiens
  Table A; Target 66335; HLA-B*58:01; PMEL; ENSG00000185664; TAA
IINGSQVW

SEQ ID NO: 66336 - protein, 8 aa, Homo sapiens
  Table A; Target 66336; HLA-C*04:01; PMEL; ENSG00000185664; TAA
IINGSQVW

SEQ ID NO: 66337 - protein, 8 aa, Homo sapiens
  Table A; Target 66337; HLA-C*07:04; PMEL; ENSG00000185664; TAA
IINGSQVW

SEQ ID NO: 66338 - protein, 8 aa, Homo sapiens
  Table A; Target 66338; HLA-C*12:03; PMEL; ENSG00000185664; TAA
IINGSQVW

SEQ ID NO: 66339 - protein, 9 aa, Homo sapiens
  Table A; Target 66339; HLA-A*02:03; PMEL; ENSG00000185664; TAA
ILKGGSGTY

SEQ ID NO: 66340 - protein, 9 aa, Homo sapiens
  Table A; Target 66340; HLA-A*03:01; PMEL; ENSG00000185664; TAA
ILKGGSGTY

SEQ ID NO: 66341 - protein, 9 aa, Homo sapiens
  Table A; Target 66341; HLA-A*03:02; PMEL; ENSG00000185664; TAA
ILKGGSGTY

SEQ ID NO: 66342 - protein, 9 aa, Homo sapiens
  Table A; Target 66342; HLA-A*23:01; PMEL; ENSG00000185664; TAA
ILKGGSGTY

SEQ ID NO: 66343 - protein, 9 aa, Homo sapiens
  Table A; Target 66343; HLA-A*25:01; PMEL; ENSG00000185664; TAA
ILKGGSGTY

SEQ ID NO: 66344 - protein, 9 aa, Homo sapiens
  Table A; Target 66344; HLA-A*26:01; PMEL; ENSG00000185664; TAA
ILKGGSGTY

SEQ ID NO: 66345 - protein, 9 aa, Homo sapiens
  Table A; Target 66345; HLA-A*29:02; PMEL; ENSG00000185664; TAA
ILKGGSGTY

SEQ ID NO: 66346 - protein, 9 aa, Homo sapiens
  Table A; Target 66346; HLA-A*30:02; PMEL; ENSG00000185664; TAA
ILKGGSGTY

SEQ ID NO: 66347 - protein, 9 aa, Homo sapiens
  Table A; Target 66347; HLA-A*31:01; PMEL; ENSG00000185664; TAA
ILKGGSGTY

SEQ ID NO: 66348 - protein, 9 aa, Homo sapiens
  Table A; Target 66348; HLA-A*32:01; PMEL; ENSG00000185664; TAA
ILKGGSGTY

SEQ ID NO: 66349 - protein, 9 aa, Homo sapiens
  Table A; Target 66349; HLA-B*07:02; PMEL; ENSG00000185664; TAA
ILKGGSGTY

SEQ ID NO: 66350 - protein, 9 aa, Homo sapiens
  Table A; Target 66350; HLA-B*15:01; PMEL; ENSG00000185664; TAA
ILKGGSGTY

SEQ ID NO: 66351 - protein, 9 aa, Homo sapiens
  Table A; Target 66351; HLA-B*15:03; PMEL; ENSG00000185664; TAA
ILKGGSGTY

SEQ ID NO: 66352 - protein, 9 aa, Homo sapiens
  Table A; Target 66352; HLA-B*39:01; PMEL; ENSG00000185664; TAA
ILKGGSGTY

SEQ ID NO: 66353 - protein, 9 aa, Homo sapiens
  Table A; Target 66353; HLA-B*46:01; PMEL; ENSG00000185664; TAA
ILKGGSGTY

SEQ ID NO: 66354 - protein, 9 aa, Homo sapiens
  Table A; Target 66354; HLA-B*57:01; PMEL; ENSG00000185664; TAA
ILKGGSGTY

SEQ ID NO: 66355 - protein, 9 aa, Homo sapiens
  Table A; Target 66355; HLA-B*58:01; PMEL; ENSG00000185664; TAA
ILKGGSGTY

SEQ ID NO: 66356 - protein, 9 aa, Homo sapiens
  Table A; Target 66356; HLA-C*01:02; PMEL; ENSG00000185664; TAA
ILKGGSGTY

SEQ ID NO: 66357 - protein, 9 aa, Homo sapiens
  Table A; Target 66357; HLA-C*02:02; PMEL; ENSG00000185664; TAA
ILKGGSGTY

SEQ ID NO: 66358 - protein, 9 aa, Homo sapiens
  Table A; Target 66358; HLA-C*04:01; PMEL; ENSG00000185664; TAA
ILKGGSGTY

SEQ ID NO: 66359 - protein, 9 aa, Homo sapiens
  Table A; Target 66359; HLA-C*06:02; PMEL; ENSG00000185664; TAA
ILKGGSGTY

SEQ ID NO: 66360 - protein, 9 aa, Homo sapiens
  Table A; Target 66360; HLA-C*07:01; PMEL; ENSG00000185664; TAA
ILKGGSGTY

SEQ ID NO: 66361 - protein, 9 aa, Homo sapiens
  Table A; Target 66361; HLA-C*07:02; PMEL; ENSG00000185664; TAA
ILKGGSGTY

SEQ ID NO: 66362 - protein, 9 aa, Homo sapiens
  Table A; Target 66362; HLA-C*07:04; PMEL; ENSG00000185664; TAA
ILKGGSGTY

SEQ ID NO: 66363 - protein, 9 aa, Homo sapiens
  Table A; Target 66363; HLA-C*12:03; PMEL; ENSG00000185664; TAA
ILKGGSGTY

SEQ ID NO: 66364 - protein, 9 aa, Homo sapiens
  Table A; Target 66364; HLA-C*14:02; PMEL; ENSG00000185664; TAA
ILKGGSGTY

SEQ ID NO: 66365 - protein, 9 aa, Homo sapiens
  Table A; Target 66365; HLA-C*16:01; PMEL; ENSG00000185664; TAA
ILKGGSGTY

SEQ ID NO: 66366 - protein, 9 aa, Homo sapiens
  Table A; Target 66366; HLA-C*16:02; PMEL; ENSG00000185664; TAA
ILKGGSGTY

SEQ ID NO: 66367 - protein, 9 aa, Homo sapiens
  Table A; Target 66367; HLA-C*16:04; PMEL; ENSG00000185664; TAA
ILKGGSGTY

SEQ ID NO: 66368 - protein, 10 aa, Homo sapiens
  Table A; Target 66368; HLA-A*02:03; PMEL; ENSG00000185664; TAA
ILKGGSGTYC

SEQ ID NO: 66369 - protein, 10 aa, Homo sapiens
  Table A; Target 66369; HLA-C*04:01; PMEL; ENSG00000185664; TAA
ILQAVPSGEG

SEQ ID NO: 66370 - protein, 10 aa, Homo sapiens
  Table A; Target 66370; HLA-C*06:02; PMEL; ENSG00000185664; TAA
ILQAVPSGEG

SEQ ID NO: 66371 - protein, 9 aa, Homo sapiens
  Table A; Target 66371; HLA-A*02:01; PMEL; ENSG00000185664; TAA
IMPGQEAGL

SEQ ID NO: 66372 - protein, 9 aa, Homo sapiens
  Table A; Target 66372; HLA-A*02:07; PMEL; ENSG00000185664; TAA
IMPGQEAGL

SEQ ID NO: 66373 - protein, 9 aa, Homo sapiens
  Table A; Target 66373; HLA-B*55:01; PMEL; ENSG00000185664; TAA
IMPGQEAGL

SEQ ID NO: 66374 - protein, 9 aa, Homo sapiens
  Table A; Target 66374; HLA-C*01:02; PMEL; ENSG00000185664; TAA
IMPGQEAGL

SEQ ID NO: 66375 - protein, 9 aa, Homo sapiens
  Table A; Target 66375; HLA-C*07:04; PMEL; ENSG00000185664; TAA
IMPGQEAGL

SEQ ID NO: 66376 - protein, 9 aa, Homo sapiens
  Table A; Target 66376; HLA-C*14:02; PMEL; ENSG00000185664; TAA
IMPGQEAGL

SEQ ID NO: 66377 - protein, 9 aa, Homo sapiens
  Table A; Target 66377; HLA-B*55:01; PMEL; ENSG00000185664; TAA
IMSTESITG

SEQ ID NO: 66378 - protein, 9 aa, Homo sapiens
  Table A; Target 66378; HLA-C*04:01; PMEL; ENSG00000185664; TAA
IMSTESITG

SEQ ID NO: 66379 - protein, 9 aa, Homo sapiens
  Table A; Target 66379; HLA-B*35:03; PMEL; ENSG00000185664; TAA
IPEPEGPDA

SEQ ID NO: 66380 - protein, 9 aa, Homo sapiens
  Table A; Target 66380; HLA-B*55:01; PMEL; ENSG00000185664; TAA
IPEPEGPDA

SEQ ID NO: 66381 - protein, 9 aa, Homo sapiens
  Table A; Target 66381; HLA-B*57:01; PMEL; ENSG00000185664; TAA
ISRALVVTH

SEQ ID NO: 66382 - protein, 9 aa, Homo sapiens
  Table A; Target 66382; HLA-C*12:03; PMEL; ENSG00000185664; TAA
ISRALVVTH

SEQ ID NO: 66383 - protein, 11 aa, Homo sapiens
  Table A; Target 66383; HLA-A*30:02; PMEL; ENSG00000185664; TAA
ISRALVVTHTY

SEQ ID NO: 66384 - protein, 11 aa, Homo sapiens
  Table A; Target 66384; HLA-B*57:01; PMEL; ENSG00000185664; TAA
ISRALVVTHTY

SEQ ID NO: 66385 - protein, 9 aa, Homo sapiens
  Table A; Target 66385; HLA-C*07:04; PMEL; ENSG00000185664; TAA
ISSPGCQPP

SEQ ID NO: 66386 - protein, 10 aa, Homo sapiens
  Table A; Target 66386; HLA-C*06:02; PMEL; ENSG00000185664; TAA
ISSPGCQPPA

SEQ ID NO: 66387 - protein, 8 aa, Homo sapiens
  Table A; Target 66387; HLA-C*16:01; PMEL; ENSG00000185664; TAA
ISTAPVQM

SEQ ID NO: 66388 - protein, 8 aa, Homo sapiens
  Table A; Target 66388; HLA-C*16:02; PMEL; ENSG00000185664; TAA
ISTAPVQM

SEQ ID NO: 66389 - protein, 10 aa, Homo sapiens
  Table A; Target 66389; HLA-B*07:02; PMEL; ENSG00000185664; TAA
ISTAPVQMPT

SEQ ID NO: 66390 - protein, 10 aa, Homo sapiens
  Table A; Target 66390; HLA-C*06:02; PMEL; ENSG00000185664; TAA
ISTAPVQMPT

SEQ ID NO: 66391 - protein, 9 aa, Homo sapiens
  Table A; Target 66391; HLA-A*01:01; PMEL; ENSG00000185664; TAA
ITDQVPFSV

SEQ ID NO: 66392 - protein, 9 aa, Homo sapiens
  Table A; Target 66392; HLA-A*02:01; PMEL; ENSG00000185664; TAA
ITDQVPFSV

SEQ ID NO: 66393 - protein, 9 aa, Homo sapiens
  Table A; Target 66393; HLA-A*02:04; PMEL; ENSG00000185664; TAA
ITDQVPFSV

SEQ ID NO: 66394 - protein, 9 aa, Homo sapiens
  Table A; Target 66394; HLA-A*02:07; PMEL; ENSG00000185664; TAA
ITDQVPFSV

SEQ ID NO: 66395 - protein, 9 aa, Homo sapiens
  Table A; Target 66395; HLA-A*32:01; PMEL; ENSG00000185664; TAA
ITDQVPFSV

SEQ ID NO: 66396 - protein, 9 aa, Homo sapiens
  Table A; Target 66396; HLA-A*68:02; PMEL; ENSG00000185664; TAA
ITDQVPFSV

SEQ ID NO: 66397 - protein, 9 aa, Homo sapiens
  Table A; Target 66397; HLA-B*13:02; PMEL; ENSG00000185664; TAA
ITDQVPFSV

SEQ ID NO: 66398 - protein, 9 aa, Homo sapiens
  Table A; Target 66398; HLA-B*35:03; PMEL; ENSG00000185664; TAA
ITDQVPFSV

SEQ ID NO: 66399 - protein, 9 aa, Homo sapiens
  Table A; Target 66399; HLA-B*38:01; PMEL; ENSG00000185664; TAA
ITDQVPFSV

SEQ ID NO: 66400 - protein, 9 aa, Homo sapiens
  Table A; Target 66400; HLA-B*55:01; PMEL; ENSG00000185664; TAA
ITDQVPFSV

SEQ ID NO: 66401 - protein, 9 aa, Homo sapiens
  Table A; Target 66401; HLA-C*03:03; PMEL; ENSG00000185664; TAA
ITDQVPFSV

SEQ ID NO: 66402 - protein, 9 aa, Homo sapiens
  Table A; Target 66402; HLA-C*03:04; PMEL; ENSG00000185664; TAA
ITDQVPFSV

SEQ ID NO: 66403 - protein, 9 aa, Homo sapiens
  Table A; Target 66403; HLA-C*04:01; PMEL; ENSG00000185664; TAA
ITDQVPFSV

SEQ ID NO: 66404 - protein, 9 aa, Homo sapiens
  Table A; Target 66404; HLA-C*05:01; PMEL; ENSG00000185664; TAA
ITDQVPFSV

SEQ ID NO: 66405 - protein, 9 aa, Homo sapiens
  Table A; Target 66405; HLA-C*07:04; PMEL; ENSG00000185664; TAA
ITDQVPFSV

SEQ ID NO: 66406 - protein, 9 aa, Homo sapiens
  Table A; Target 66406; HLA-C*16:02; PMEL; ENSG00000185664; TAA
ITDQVPFSV

SEQ ID NO: 66407 - protein, 11 aa, Homo sapiens
  Table A; Target 66407; HLA-A*02:07; PMEL; ENSG00000185664; TAA
ITDQVPFSVSV

SEQ ID NO: 66408 - protein, 11 aa, Homo sapiens
  Table A; Target 66408; HLA-C*05:01; PMEL; ENSG00000185664; TAA
ITDQVPFSVSV

SEQ ID NO: 66409 - protein, 9 aa, Homo sapiens
  Table A; Target 66409; HLA-A*01:01; PMEL; ENSG00000185664; TAA
ITGSLGPLL

SEQ ID NO: 66410 - protein, 9 aa, Homo sapiens
  Table A; Target 66410; HLA-A*03:01; PMEL; ENSG00000185664; TAA
ITGSLGPLL

SEQ ID NO: 66411 - protein, 9 aa, Homo sapiens
  Table A; Target 66411; HLA-A*03:02; PMEL; ENSG00000185664; TAA
ITGSLGPLL

SEQ ID NO: 66412 - protein, 9 aa, Homo sapiens
  Table A; Target 66412; HLA-A*11:01; PMEL; ENSG00000185664; TAA
ITGSLGPLL

SEQ ID NO: 66413 - protein, 9 aa, Homo sapiens
  Table A; Target 66413; HLA-A*23:01; PMEL; ENSG00000185664; TAA
ITGSLGPLL

SEQ ID NO: 66414 - protein, 9 aa, Homo sapiens
  Table A; Target 66414; HLA-A*24:02; PMEL; ENSG00000185664; TAA
ITGSLGPLL

SEQ ID NO: 66415 - protein, 9 aa, Homo sapiens
  Table A; Target 66415; HLA-A*26:01; PMEL; ENSG00000185664; TAA
ITGSLGPLL

SEQ ID NO: 66416 - protein, 9 aa, Homo sapiens
  Table A; Target 66416; HLA-A*29:02; PMEL; ENSG00000185664; TAA
ITGSLGPLL

SEQ ID NO: 66417 - protein, 9 aa, Homo sapiens
  Table A; Target 66417; HLA-A*31:01; PMEL; ENSG00000185664; TAA
ITGSLGPLL

SEQ ID NO: 66418 - protein, 9 aa, Homo sapiens
  Table A; Target 66418; HLA-A*68:01; PMEL; ENSG00000185664; TAA
ITGSLGPLL

SEQ ID NO: 66419 - protein, 9 aa, Homo sapiens
  Table A; Target 66419; HLA-A*68:02; PMEL; ENSG00000185664; TAA
ITGSLGPLL

SEQ ID NO: 66420 - protein, 9 aa, Homo sapiens
  Table A; Target 66420; HLA-B*07:02; PMEL; ENSG00000185664; TAA
ITGSLGPLL

SEQ ID NO: 66421 - protein, 9 aa, Homo sapiens
  Table A; Target 66421; HLA-B*27:05; PMEL; ENSG00000185664; TAA
ITGSLGPLL

SEQ ID NO: 66422 - protein, 9 aa, Homo sapiens
  Table A; Target 66422; HLA-B*35:03; PMEL; ENSG00000185664; TAA
ITGSLGPLL

SEQ ID NO: 66423 - protein, 9 aa, Homo sapiens
  Table A; Target 66423; HLA-B*38:01; PMEL; ENSG00000185664; TAA
ITGSLGPLL

SEQ ID NO: 66424 - protein, 9 aa, Homo sapiens
  Table A; Target 66424; HLA-B*57:01; PMEL; ENSG00000185664; TAA
ITGSLGPLL

SEQ ID NO: 66425 - protein, 9 aa, Homo sapiens
  Table A; Target 66425; HLA-B*58:01; PMEL; ENSG00000185664; TAA
ITGSLGPLL

SEQ ID NO: 66426 - protein, 9 aa, Homo sapiens
  Table A; Target 66426; HLA-C*02:02; PMEL; ENSG00000185664; TAA
ITGSLGPLL

SEQ ID NO: 66427 - protein, 9 aa, Homo sapiens
  Table A; Target 66427; HLA-C*03:03; PMEL; ENSG00000185664; TAA
ITGSLGPLL

SEQ ID NO: 66428 - protein, 9 aa, Homo sapiens
  Table A; Target 66428; HLA-C*03:04; PMEL; ENSG00000185664; TAA
ITGSLGPLL

SEQ ID NO: 66429 - protein, 9 aa, Homo sapiens
  Table A; Target 66429; HLA-C*04:01; PMEL; ENSG00000185664; TAA
ITGSLGPLL

SEQ ID NO: 66430 - protein, 9 aa, Homo sapiens
  Table A; Target 66430; HLA-C*05:01; PMEL; ENSG00000185664; TAA
ITGSLGPLL

SEQ ID NO: 66431 - protein, 9 aa, Homo sapiens
  Table A; Target 66431; HLA-C*06:02; PMEL; ENSG00000185664; TAA
ITGSLGPLL

SEQ ID NO: 66432 - protein, 9 aa, Homo sapiens
  Table A; Target 66432; HLA-C*07:01; PMEL; ENSG00000185664; TAA
ITGSLGPLL

SEQ ID NO: 66433 - protein, 9 aa, Homo sapiens
  Table A; Target 66433; HLA-C*07:02; PMEL; ENSG00000185664; TAA
ITGSLGPLL

SEQ ID NO: 66434 - protein, 9 aa, Homo sapiens
  Table A; Target 66434; HLA-C*07:04; PMEL; ENSG00000185664; TAA
ITGSLGPLL

SEQ ID NO: 66435 - protein, 9 aa, Homo sapiens
  Table A; Target 66435; HLA-C*12:03; PMEL; ENSG00000185664; TAA
ITGSLGPLL

SEQ ID NO: 66436 - protein, 9 aa, Homo sapiens
  Table A; Target 66436; HLA-B*27:05; PMEL; ENSG00000185664; TAA
IVQGIESAE

SEQ ID NO: 66437 - protein, 10 aa, Homo sapiens
  Table A; Target 66437; HLA-A*23:01; PMEL; ENSG00000185664; TAA
IVQGIESAEI

SEQ ID NO: 66438 - protein, 10 aa, Homo sapiens
  Table A; Target 66438; HLA-A*25:01; PMEL; ENSG00000185664; TAA
IVQGIESAEI

SEQ ID NO: 66439 - protein, 10 aa, Homo sapiens
  Table A; Target 66439; HLA-B*13:02; PMEL; ENSG00000185664; TAA
IVQGIESAEI

SEQ ID NO: 66440 - protein, 10 aa, Homo sapiens
  Table A; Target 66440; HLA-B*38:01; PMEL; ENSG00000185664; TAA
IVQGIESAEI

SEQ ID NO: 66441 - protein, 10 aa, Homo sapiens
  Table A; Target 66441; HLA-C*04:01; PMEL; ENSG00000185664; TAA
IVQGIESAEI

SEQ ID NO: 66442 - protein, 10 aa, Homo sapiens
  Table A; Target 66442; HLA-C*07:04; PMEL; ENSG00000185664; TAA
IVQGIESAEI

SEQ ID NO: 66443 - protein, 8 aa, Homo sapiens
  Table A; Target 66443; HLA-C*06:02; PMEL; ENSG00000185664; TAA
IVVLSGTT

SEQ ID NO: 66444 - protein, 9 aa, Homo sapiens
  Table A; Target 66444; HLA-B*15:01; PMEL; ENSG00000185664; TAA
IVVLSGTTA

SEQ ID NO: 66445 - protein, 9 aa, Homo sapiens
  Table A; Target 66445; HLA-B*15:03; PMEL; ENSG00000185664; TAA
IVVLSGTTA

SEQ ID NO: 66446 - protein, 9 aa, Homo sapiens
  Table A; Target 66446; HLA-B*46:01; PMEL; ENSG00000185664; TAA
IVVLSGTTA

SEQ ID NO: 66447 - protein, 9 aa, Homo sapiens
  Table A; Target 66447; HLA-B*54:01; PMEL; ENSG00000185664; TAA
IVVLSGTTA

SEQ ID NO: 66448 - protein, 9 aa, Homo sapiens
  Table A; Target 66448; HLA-B*55:01; PMEL; ENSG00000185664; TAA
IVVLSGTTA

SEQ ID NO: 66449 - protein, 9 aa, Homo sapiens
  Table A; Target 66449; HLA-B*56:01; PMEL; ENSG00000185664; TAA
IVVLSGTTA

SEQ ID NO: 66450 - protein, 9 aa, Homo sapiens
  Table A; Target 66450; HLA-C*01:02; PMEL; ENSG00000185664; TAA
IVVLSGTTA

SEQ ID NO: 66451 - protein, 9 aa, Homo sapiens
  Table A; Target 66451; HLA-C*02:02; PMEL; ENSG00000185664; TAA
IVVLSGTTA

SEQ ID NO: 66452 - protein, 9 aa, Homo sapiens
  Table A; Target 66452; HLA-C*03:03; PMEL; ENSG00000185664; TAA
IVVLSGTTA

SEQ ID NO: 66453 - protein, 9 aa, Homo sapiens
  Table A; Target 66453; HLA-C*03:04; PMEL; ENSG00000185664; TAA
IVVLSGTTA

SEQ ID NO: 66454 - protein, 9 aa, Homo sapiens
  Table A; Target 66454; HLA-C*04:01; PMEL; ENSG00000185664; TAA
IVVLSGTTA

SEQ ID NO: 66455 - protein, 9 aa, Homo sapiens
  Table A; Target 66455; HLA-C*07:04; PMEL; ENSG00000185664; TAA
IVVLSGTTA

SEQ ID NO: 66456 - protein, 9 aa, Homo sapiens
  Table A; Target 66456; HLA-C*14:02; PMEL; ENSG00000185664; TAA
IVVLSGTTA

SEQ ID NO: 66457 - protein, 10 aa, Homo sapiens
  Table A; Target 66457; HLA-B*54:01; PMEL; ENSG00000185664; TAA
IVVLSGTTAA

SEQ ID NO: 66458 - protein, 10 aa, Homo sapiens
  Table A; Target 66458; HLA-B*56:01; PMEL; ENSG00000185664; TAA
IVVLSGTTAA

SEQ ID NO: 66459 - protein, 11 aa, Homo sapiens
  Table A; Target 66459; HLA-B*07:02; PMEL; ENSG00000185664; TAA
IVVLSGTTAAQ

SEQ ID NO: 66460 - protein, 11 aa, Homo sapiens
  Table A; Target 66460; HLA-C*01:02; PMEL; ENSG00000185664; TAA
IVVLSGTTAAQ

SEQ ID NO: 66461 - protein, 11 aa, Homo sapiens
  Table A; Target 66461; HLA-C*06:02; PMEL; ENSG00000185664; TAA
IVVLSGTTAAQ

SEQ ID NO: 66462 - protein, 11 aa, Homo sapiens
  Table A; Target 66462; HLA-C*07:01; PMEL; ENSG00000185664; TAA
IVVLSGTTAAQ

SEQ ID NO: 66463 - protein, 11 aa, Homo sapiens
  Table A; Target 66463; HLA-C*07:02; PMEL; ENSG00000185664; TAA
IVVLSGTTAAQ

SEQ ID NO: 66464 - protein, 11 aa, Homo sapiens
  Table A; Target 66464; HLA-B*57:01; PMEL; ENSG00000185664; TAA
KAWNRQLYPEW

SEQ ID NO: 66465 - protein, 9 aa, Homo sapiens
  Table A; Target 66465; HLA-B*07:02; PMEL; ENSG00000185664; TAA
KGGSGTYCL

SEQ ID NO: 66466 - protein, 9 aa, Homo sapiens
  Table A; Target 66466; HLA-C*07:01; PMEL; ENSG00000185664; TAA
KGGSGTYCL

SEQ ID NO: 66467 - protein, 9 aa, Homo sapiens
  Table A; Target 66467; HLA-C*07:02; PMEL; ENSG00000185664; TAA
KGGSGTYCL

SEQ ID NO: 66468 - protein, 11 aa, Homo sapiens
  Table A; Target 66468; HLA-A*24:02; PMEL; ENSG00000185664; TAA
KHFLRNQPLTF

SEQ ID NO: 66469 - protein, 11 aa, Homo sapiens
  Table A; Target 66469; HLA-B*57:01; PMEL; ENSG00000185664; TAA
KHFLRNQPLTF

SEQ ID NO: 66470 - protein, 9 aa, Homo sapiens
  Table A; Target 66470; HLA-A*02:01; PMEL; ENSG00000185664; TAA
KQDFSVPQL

SEQ ID NO: 66471 - protein, 9 aa, Homo sapiens
  Table A; Target 66471; HLA-A*02:04; PMEL; ENSG00000185664; TAA
KQDFSVPQL

SEQ ID NO: 66472 - protein, 9 aa, Homo sapiens
  Table A; Target 66472; HLA-A*02:07; PMEL; ENSG00000185664; TAA
KQDFSVPQL

SEQ ID NO: 66473 - protein, 9 aa, Homo sapiens
  Table A; Target 66473; HLA-A*30:01; PMEL; ENSG00000185664; TAA
KQDFSVPQL

SEQ ID NO: 66474 - protein, 9 aa, Homo sapiens
  Table A; Target 66474; HLA-B*13:02; PMEL; ENSG00000185664; TAA
KQDFSVPQL

SEQ ID NO: 66475 - protein, 9 aa, Homo sapiens
  Table A; Target 66475; HLA-B*15:01; PMEL; ENSG00000185664; TAA
KQDFSVPQL

SEQ ID NO: 66476 - protein, 9 aa, Homo sapiens
  Table A; Target 66476; HLA-B*15:03; PMEL; ENSG00000185664; TAA
KQDFSVPQL

SEQ ID NO: 66477 - protein, 9 aa, Homo sapiens
  Table A; Target 66477; HLA-B*27:05; PMEL; ENSG00000185664; TAA
KQDFSVPQL
